United States Patent Application Publication US 2025/0084491 A1 - sequence listing, part 33

SEQ ID NO: 627856 - DNA, 75 bp, synthetic construct
  source 1..75: mol_type = other DNA
ttagggtataagctaggtcaaaattataaaattttacctaagaatgcagttaaaaaattcagtatgcataaaaaa

SEQ ID NO: 627857 - DNA, 75 bp, synthetic construct
  source 1..75: mol_type = other DNA
gcgacaaatgggcgggagagcaggacagagacaaaaagaaaacagatcagattactgttgatgttcagatgtcgg

SEQ ID NO: 627858 - DNA, 75 bp, synthetic construct
  source 1..75: mol_type = other DNA
atttacaatccagtttcctctggggagacgctgacaattattaatgaccgggattacccgatgctggttcagtca

SEQ ID NO: 627859 - DNA, 75 bp, synthetic construct
  source 1..75: mol_type = other DNA
ggcatgagccaggctcagttagccgagctaataggcctgtctcaacaatctgtggcgaaaattgaaaatggagat

SEQ ID NO: 627860 - DNA, 75 bp, synthetic construct
  source 1..75: mol_type = other DNA
agacccggaaaagcatgaactttatcaggattcacgcgataagtggcaggcagtttatcaggatcagctggggct

SEQ ID NO: 627861 - DNA, 75 bp, synthetic construct
  source 1..75: mol_type = other DNA
ttactgattttgagtacgcattcactcgttatcgagatcgcattgaatttactacagaatatgataaggagttac

SEQ ID NO: 627862 - DNA, 75 bp, synthetic construct
  source 1..75: mol_type = other DNA
tctttgatcgtgatcgctggagttatgtcgttatttgcatctcaaatgatgactaaaataaatccaacccaaaac

SEQ ID NO: 627863 - DNA, 75 bp, synthetic construct
  source 1..75: mol_type = other DNA
acgtgggaaaacccgtttcgacacttcacaccgggctttatcgccagaatttacgcggcaaccgttgcggttatc

SEQ ID NO: 627864 - DNA, 75 bp, synthetic construct
  source 1..75: mol_type = other DNA
tggccttaaaaatcaataaattaccaatcaacaagcaactggctatttaccatgattataatttagatgatgatt

SEQ ID NO: 627865 - DNA, 75 bp, synthetic construct
  source 1..75: mol_type = other DNA
catgattgctggtactgttatcacgtctgtgggtgtcatgctgatgtccatgaccagtattgaagatctgatgat

SEQ ID NO: 627866 - DNA, 75 bp, synthetic construct
  source 1..75: mol_type = other DNA
cgaaaccagcggcactcatgaagtgcgttgcacaccgaatacctgggttaccgtgtcgccaaagctgaacatgcg

SEQ ID NO: 627867 - DNA, 75 bp, synthetic construct
  source 1..75: mol_type = other DNA
gctaaagtgttaggggtttctcaaaagtggttgcaattgggaattgaggataacgcgtctttcccagaccttgtt

SEQ ID NO: 627868 - DNA, 75 bp, synthetic construct
  source 1..75: mol_type = other DNA
aaagtgcatcgcatccacatgtttttgcaacgggtgattgcgcaacgctccccgatacgcctaaaagtggcgtat

SEQ ID NO: 627869 - DNA, 75 bp, synthetic construct
  source 1..75: mol_type = other DNA
aaagttgcatcgatcctacatttcaattaatgcgagagcaggaatgctgggttgtatgcgaagagaacccaggtg

SEQ ID NO: 627870 - DNA, 75 bp, synthetic construct
  source 1..75: mol_type = other DNA
ctgaaatttgctataattatcctgtgtttacattggaaaactataacagattatcactggcgcatatttgtgact

SEQ ID NO: 627871 - DNA, 75 bp, synthetic construct
  source 1..75: mol_type = other DNA
cccaccgattgccagaatgcacgctccgcccttcaccgtgaaaaagctaaacctgatgttgccgaaggatataag

SEQ ID NO: 627872 - DNA, 75 bp, synthetic construct
  source 1..75: mol_type = other DNA
cttatcatcgatacattaaaattcaatatcccgtaagtcatcgtgagcgtattgagtgcatagaggatttctttg

SEQ ID NO: 627873 - DNA, 75 bp, synthetic construct
  source 1..75: mol_type = other DNA
ttgtggcgaacagaatgttggcagcctggaaagctggttttattgatgatactgcgaagaacgccgcggatattg

SEQ ID NO: 627874 - DNA, 75 bp, synthetic construct
  source 1..75: mol_type = other DNA
tgcgttcggatttatctgccacgctggaattgttacgctcaggtgagagtgtaacggtaacgcaacgggggaagc

SEQ ID NO: 627875 - DNA, 75 bp, synthetic construct
  source 1..75: mol_type = other DNA
aatatattactacaaacaggattgattcattaacacactggttaaatgttacctgtgccgatttagctgatccag

SEQ ID NO: 627876 - DNA, 75 bp, synthetic construct
  source 1..75: mol_type = other DNA
cagcgggacactgccaccatcgacacttattcactcgtttctgaactggaaatcgctggtggcaattgcagtagg

SEQ ID NO: 627877 - DNA, 75 bp, synthetic construct
  source 1..75: mol_type = other DNA
atgtttgatgtcactttgctgatcctgctcgggttagctgcgctgggctttatcagccacaacaccactgtcgct

SEQ ID NO: 627878 - DNA, 75 bp, synthetic construct
  source 1..75: mol_type = other DNA
cgaacatgagcgccttagtgttatgccgcctgatgacattttcgatatctcactggcagaaggaactcagcttga

SEQ ID NO: 627879 - DNA, 75 bp, synthetic construct
  source 1..75: mol_type = other DNA
ttcaaaattggtcgaacacttgccgacgagcattatgaaaaatcacgcgtaacagtagttgatgacagtgaccct

SEQ ID NO: 627880 - DNA, 75 bp, synthetic construct
  source 1..75: mol_type = other DNA
acaattcaggcactgcgaatcgcgctggatggcatagagcggagcgacgccattcttcatggttccgagcctgta

SEQ ID NO: 627881 - DNA, 75 bp, synthetic construct
  source 1..75: mol_type = other DNA
acgagcgtgaccatgctgagtctgctttagctgatatgtacttcgcaacaaccggggataggcctgagtggagta

SEQ ID NO: 627882 - DNA, 75 bp, synthetic construct
  source 1..75: mol_type = other DNA
ccctgcggatactcagcagggctatatttacagcaacggcgaatttacgccaccgccggaggtgttggccagttg

SEQ ID NO: 627883 - DNA, 75 bp, synthetic construct
  source 1..75: mol_type = other DNA
agttcaagcattccatcgtgcgcgtggcgctgcgtcgggacagcatcatccaggtcaagacggtggtcctgatcg

SEQ ID NO: 627884 - DNA, 75 bp, synthetic construct
  source 1..75: mol_type = other DNA
ataccggaagcacctttcggcgcggagatgcaacgattaagccgggtaatggtattgagcaagcaactcactgga

SEQ ID NO: 627885 - DNA, 75 bp, synthetic construct
  source 1..75: mol_type = other DNA
tttacccctgctcacgctcctcccgtttgcagcagttgatgcgcggcgacgaaggctatttgctggcgctggcct

SEQ ID NO: 627886 - DNA, 75 bp, synthetic construct
  source 1..75: mol_type = other DNA
agcgcattaaatgttgctattaatgaacattttggactgaaggtggcttacaacgtcacatggaactctgaacct

SEQ ID NO: 627887 - DNA, 75 bp, synthetic construct
  source 1..75: mol_type = other DNA
tcattcacttatataaggtcgaataaaaatattattagtagtttgacaacgatggggtggaacgtatacataaat

SEQ ID NO: 627888 - DNA, 75 bp, synthetic construct
  source 1..75: mol_type = other DNA
ttttagtgtttttgctgtatattttttatggtttaaagcctgtcttgattttcacttgtctaaaagtcctgaagt

SEQ ID NO: 627889 - DNA, 75 bp, synthetic construct
  source 1..75: mol_type = other DNA
ggagaaccgaactgccgaccagttaagccagtacggggccgtgtcgttacgtgagcaggcccgttaccttgataa

SEQ ID NO: 627890 - DNA, 75 bp, synthetic construct
  source 1..75: mol_type = other DNA
attcgcctgcaatatatcacaatgatggttctattgctgcgatgccactttcacctcgtttatttgtaaacttca

SEQ ID NO: 627891 - DNA, 75 bp, synthetic construct
  source 1..75: mol_type = other DNA
ttgctcaccgattttccgcgcctggacacctcagcgtgcccgcgcccctcctgctgtttttctttctgcgaatta

SEQ ID NO: 627892 - DNA, 75 bp, synthetic construct
  source 1..75: mol_type = other DNA
gaattccgttccgtttgcctcattgactaatattttagctacggcgataaatcaaagtcataatggtgatacgaa

SEQ ID NO: 627893 - DNA, 75 bp, synthetic construct
  source 1..75: mol_type = other DNA
ataaataccgatgttttacaagattcgttttttaaaaatgttgattttatccataaatcaaacgcatatactggg

SEQ ID NO: 627894 - DNA, 75 bp, synthetic construct
  source 1..75: mol_type = other DNA
actgagtgtgaaatggttaacggttttatcgacccgccgggtgagccgccgcacttcacgcgcggctacgggctg

SEQ ID NO: 627895 - DNA, 75 bp, synthetic construct
  source 1..75: mol_type = other DNA
gtggactgatatctctggcgaagtggggcagatggataagaccacagtcaaattttcgattccaatggataacgc

SEQ ID NO: 627896 - DNA, 75 bp, synthetic construct
  source 1..75: mol_type = other DNA
ggggcgaaaatcatgaatgccgcaaaaataatgggtcgcgactacgcatggaaacatgtaaaagaagacaggttg

SEQ ID NO: 627897 - DNA, 75 bp, synthetic construct
  source 1..75: mol_type = other DNA
ccatttcagcaatgaaactgagttcaaacttaaagcggcagcggtcagagaatgcgccaacgtagcagaaaacaa

SEQ ID NO: 627898 - DNA, 75 bp, synthetic construct
  source 1..75: mol_type = other DNA
taatcaagcatggtgtatcaggcatactttttcatactgaacattatgaagagttagccgatattttgctaaata

SEQ ID NO: 627899 - DNA, 75 bp, synthetic construct
  source 1..75: mol_type = other DNA
agatgtacggtaagccggtgagtgaactgagcgagacagagaagcagacggtctcgacactggcaacggttgctg

SEQ ID NO: 627900 - DNA, 75 bp, synthetic construct
  source 1..75: mol_type = other DNA
atgattattggggaggggttgcttcagagttttcatctggatttattaaagatctcaataaaccgaaaggttcgt

SEQ ID NO: 627901 - DNA, 75 bp, synthetic construct
  source 1..75: mol_type = other DNA
aaggatgcgaataacataatggagcggtgtatgagcttttatgagtcggaaaagcttgataattacattcgtaat

SEQ ID NO: 627902 - DNA, 75 bp, synthetic construct
  source 1..75: mol_type = other DNA
tcacttttcaaaaccctctctccatacaaaaaagtaaaaataaaaatagttggatgcaaagaaaatgttcttgac

SEQ ID NO: 627903 - DNA, 75 bp, synthetic construct
  source 1..75: mol_type = other DNA
cgtgatgttactgcggagattgagattcggaccgggttagcgaacagttcagattttttgcgttcagcccggatc

SEQ ID NO: 627904 - DNA, 75 bp, synthetic construct
  source 1..75: mol_type = other DNA
ggctggcgaggttcgcaaccttgcccagcgcagtgcgcttgcggctaaagatatcaagatactcattgaggcctc

SEQ ID NO: 627905 - DNA, 75 bp, synthetic construct
  source 1..75: mol_type = other DNA
cctgtgaacagggctggaatgcagccggccagcctgtcagtcagcgcgccggattttttccggaggaaaccacat

SEQ ID NO: 627906 - DNA, 75 bp, synthetic construct
  source 1..75: mol_type = other DNA
gcaccgggctgggctatggcgaaggcgatgagtcctatggctatgacagttgtggctacctgaaggcgcagtctg

SEQ ID NO: 627907 - DNA, 75 bp, synthetic construct
  source 1..75: mol_type = other DNA
cgttatccagatttttataatgaagaaatattcagggaggtgaccgaagagagcgagtcaacatttaaagagctt

SEQ ID NO: 627908 - DNA, 75 bp, synthetic construct
  source 1..75: mol_type = other DNA
atgacaacaagaaagtggatattatttttggttttagcggtaagttgcattgcgcaagccaaaccgaaaggaatc

SEQ ID NO: 627909 - DNA, 75 bp, synthetic construct
  source 1..75: mol_type = other DNA
aaatatcgggtcatgctcaacagagtcaaacccgaagatgcccccgatatcacatggccggaactgcccgcataa

SEQ ID NO: 627910 - DNA, 75 bp, synthetic construct
  source 1..75: mol_type = other DNA
ctactacatcgcgttaatccgcctcctgattgtgttcggatgccggacggtagaactgaggttatcggagatcag

SEQ ID NO: 627911 - DNA, 75 bp, synthetic construct
  source 1..75: mol_type = other DNA
tgaccgtgattatgacgggattttattctcacgtttgaatgaagaaaaattaataatcacacatggttatagttg

SEQ ID NO: 627912 - DNA, 75 bp, synthetic construct
  source 1..75: mol_type = other DNA
gggttgatcattttaaaaataaaaatgatacattgattcagctattgcagtcagactttgttcttatgcacccca

SEQ ID NO: 627913 - DNA, 75 bp, synthetic construct
  source 1..75: mol_type = other DNA
aaccttcggcctgccgggggcctgtcactggcagataaacccgacgaactggcggcgctggaacactattggcaa

SEQ ID NO: 627914 - DNA, 75 bp, synthetic construct
  source 1..75: mol_type = other DNA
gatgaattccatcacctgctggcccgccactcccctgccgggcgggtggagaagcgacctgacgggccgtccgct

SEQ ID NO: 627915 - DNA, 75 bp, synthetic construct
  source 1..75: mol_type = other DNA
tgaatataagagcgcagatttaattattatccctagtagatgggaggggtttgccatggttccgcttgaggctat

SEQ ID NO: 627916 - DNA, 75 bp, synthetic construct
  source 1..75: mol_type = other DNA
ctggatatagaatcaaaatccatatatattcatcgtttaaagaatggttattccgttagtcatccaattccagta

SEQ ID NO: 627917 - DNA, 75 bp, synthetic construct
  source 1..75: mol_type = other DNA
gaagccaaagcatccgcagcattgaaaaacccacgctcaagcgaggttactaaaaccttagctggttcggttgtt

SEQ ID NO: 627918 - DNA, 75 bp, synthetic construct
  source 1..75: mol_type = other DNA
cgccaccgctattatgacccgctgcaggggaggtatatcactcaggatccgattgggctgaaggggggatggaac

SEQ ID NO: 627919 - DNA, 75 bp, synthetic construct
  source 1..75: mol_type = other DNA
cgcgtacccactccagctacggcaatattgatgtgttacagcaggcctgcccacaagaggtgtggatcaacccca

SEQ ID NO: 627920 - DNA, 75 bp, synthetic construct
  source 1..75: mol_type = other DNA
cagtatcaatattctgacctctcaccgcccttcaccgctggcaaagggaaacccgtcgcacagcaatcttgtcca

SEQ ID NO: 627921 - DNA, 75 bp, synthetic construct
  source 1..75: mol_type = other DNA
cgttattactatgatcctgacggcaatattctgcgggaagaagcgccggacggcagtaccaccacgtatgaatgg

SEQ ID NO: 627922 - DNA, 75 bp, synthetic construct
  source 1..75: mol_type = other DNA
gctgcctgactgcaccgcttccgaacagatggactttgcactggatgcatcctgcgggaatatgtcttacgtgat

SEQ ID NO: 627923 - DNA, 75 bp, synthetic construct
  source 1..75: mol_type = other DNA
atttccccatgaatccgataagttcaaatgataatgatagtgtagacttgcgaaatataaaatgccctgaaggtt

SEQ ID NO: 627924 - DNA, 75 bp, synthetic construct
  source 1..75: mol_type = other DNA
aaaaactgggagtcggtcaaagaacaggtgatgcgaaaagcacttcgcgctaaattcgaacagcatgcagaactg

SEQ ID NO: 627925 - DNA, 75 bp, synthetic construct
  source 1..75: mol_type = other DNA
tacagccatcaattgcttgcaccggcggacaatatctccattgcaaaaaatgaactggcggttctggggacgatt

SEQ ID NO: 627926 - DNA, 75 bp, synthetic construct
  source 1..75: mol_type = other DNA
aagccagagaggccagaaggctccagaaaccgcgcacgaatgacggtaaggggtttgccttgctgcaccgtaaaa

SEQ ID NO: 627927 - DNA, 75 bp, synthetic construct
  source 1..75: mol_type = other DNA
tgaccagcgcagtcatcattgtattaatgctattgatgatgattttttcaccgtggctggcgacgcatgatccca

SEQ ID NO: 627928 - DNA, 75 bp, synthetic construct
  source 1..75: mol_type = other DNA
acgcccgctcggcatcgcctcgctggaggacaagatcgtccagtatgcgctggtgaaaatcctgaacgcagtcta

SEQ ID NO: 627929 - DNA, 75 bp, synthetic construct
  source 1..75: mol_type = other DNA
taaattcgaacaacacgcagaactgcgcgcgctcctgctggcaaccgcgtcagcgaaactggttgagcatacgaa

SEQ ID NO: 627930 - DNA, 75 bp, synthetic construct
  source 1..75: mol_type = other DNA
taagcctcaaatgcacaatcttgttgaaatgtattcggcaatttttaaatatttattaagaactagcgacgaaag

SEQ ID NO: 627931 - DNA, 75 bp, synthetic construct
  source 1..75: mol_type = other DNA
tcggtcgggggatgttcagttgggcggtgaattaccgttatgttctggacgggcgtctgttaagcgaatatccca

SEQ ID NO: 627932 - DNA, 75 bp, synthetic construct
  source 1..75: mol_type = other DNA
acgctggcgcaggtaaaaatcaaagggaagaaggctcattgcggttactgacgccgggagagattgcgctggcga

SEQ ID NO: 627933 - DNA, 75 bp, synthetic construct
  source 1..75: mol_type = other DNA
cccggcagcctgccggggacgaagacgcagatgacgatccgctcgaaaacctataagggcagcgggtttaatgaa

SEQ ID NO: 627934 - DNA, 75 bp, synthetic construct
  source 1..75: mol_type = other DNA
gccagcgctcagattaaaaacagtagtcaaattaccgggattgtcggcgataatggacaactttatctctcagga

SEQ ID NO: 627935 - DNA, 75 bp, synthetic construct
  source 1..75: mol_type = other DNA
atgacgacgcctggcgcaggtgccgctggcggcatgggcgcggcgctgttagggattctgaatgcggagttaaag

SEQ ID NO: 627936 - DNA, 75 bp, synthetic construct
  source 1..75: mol_type = other DNA
gataacgatattcgcgctcgtcttgaaaacaaacctatgcttgctccgcctgaaatgcaggtttcagattcagac

SEQ ID NO: 627937 - DNA, 75 bp, synthetic construct
  source 1..75: mol_type = other DNA
ggaactgctgtggcaccatgagaccggacatgcgtacaacgaacaggggctggcaaaccgcgtcacgccggacag

SEQ ID NO: 627938 - DNA, 75 bp, synthetic construct
  source 1..75: mol_type = other DNA
tacgagtcaacgcgattttactcccccgcccggacttgcggatatgaaagccagcattggcgctgcctgctcaag

SEQ ID NO: 627939 - DNA, 75 bp, synthetic construct
  source 1..75: mol_type = other DNA
tggcgttatcactggagacaaaacatttattgaagacgccattaagcagagaaaactcgagcaggacctgttaaa

SEQ ID NO: 627940 - DNA, 75 bp, synthetic construct
  source 1..75: mol_type = other DNA
tctctggaatttaaagacatcatctactaacgcacaattgctacaggtcggtgtattaggcaagggtgaactgaa

SEQ ID NO: 627941 - DNA, 75 bp, synthetic construct
  source 1..75: mol_type = other DNA
taccggacaaaaacgcccgcgccggtggggagcctcggccccggctggaaaatgcctgcggatatccgcttacag

SEQ ID NO: 627942 - DNA, 75 bp, synthetic construct
  source 1..75: mol_type = other DNA
gtcacgccggacagtctgccgccggtggagtggccagggaaagatcatcagaagtacactttttgtactaaataa

SEQ ID NO: 627943 - DNA, 75 bp, synthetic construct
  source 1..75: mol_type = other DNA
gataacgatattcgcgctcgtcttgaaaacaaacctatgcttgctccgcctgaaatgcaggtttccgattctgat

SEQ ID NO: 627944 - DNA, 75 bp, synthetic construct
  source 1..75: mol_type = other DNA
tgcaatcgctggagaaaaaagtcaacacattgaatcaagagctgtcgcaactgcaacctggcgatccgcaatata

SEQ ID NO: 627945 - DNA, 75 bp, synthetic construct
  source 1..75: mol_type = other DNA
gtttctgcattatcaaaaacagccgcagaagaagtcaccaaagaaataacaagcactataaaatcaaccattgaa

SEQ ID NO: 627946 - DNA, 75 bp, synthetic construct
  source 1..75: mol_type = other DNA
taaagcatgagccagattcatcaaatgagatatgtattgcttcaatgctggcccgtttacgcccgacgcaaaaag

SEQ ID NO: 627947 - DNA, 75 bp, synthetic construct
  source 1..75: mol_type = other DNA
tgtctatcccgatcatgggcgaatctggctgacgcagcgtgtgctgcgtgagcaaggtgctattcagatgccaca

SEQ ID NO: 627948 - DNA, 75 bp, synthetic construct
  source 1..75: mol_type = other DNA
cagaaaaactaccaactggcgatgaacaaaggggtgaaaggctttgtgttcaatcccatgctggaacaggtcttc

SEQ ID NO: 627949 - DNA, 75 bp, synthetic construct
  source 1..75: mol_type = other DNA
tgagtgggcacaggtctatacatcgaaagactccataccgggcgtaaatacaacgggcaaccagaacacaacagg

SEQ ID NO: 627950 - DNA, 75 bp, synthetic construct
  source 1..75: mol_type = other DNA
tgggaacatctgaattacgtacttaataatcctcgtccggctggagataagctccgcaagcttatgacaaggaaa

SEQ ID NO: 627951 - DNA, 75 bp, synthetic construct
  source 1..75: mol_type = other DNA
gcctgcgctgcaaccaattgatggcgtggcggtgagttatatcgatgctgccgtggcgttgggtaataccattaa

SEQ ID NO: 627952 - DNA, 75 bp, synthetic construct
  source 1..75: mol_type = other DNA
ttaacaactggaataattttgttgtggattttacagttgatcatgaacttggtggtatggatgcgaatacgtttt

SEQ ID NO: 627953 - DNA, 75 bp, synthetic construct
  source 1..75: mol_type = other DNA
ctggaagatgacaaactggtgcttgccatgcatgcaaaacataaacccgtccctcctgaagtggccgttttaagt

SEQ ID NO: 627954 - DNA, 75 bp, synthetic construct
  source 1..75: mol_type = other DNA
agttatagttgatatcgactgtgaagtcataagctacaaaaccagagaatacaagggacgagaaaataatctgga

SEQ ID NO: 627955 - DNA, 75 bp, synthetic construct
  source 1..75: mol_type = other DNA
ggtgtcgcggaatatgtgaacaacggaggaaaacatcatgcatatgcgaaacctgtcactctgaagttgaagagt

SEQ ID NO: 627956 - DNA, 75 bp, synthetic construct
  source 1..75: mol_type = other DNA
atgaccgaagcatcggagggttttcagcctgttatggtgcgtgatgatgcgcctgctctgaatactgacaagatc

SEQ ID NO: 627957 - DNA, 75 bp, synthetic construct
  source 1..75: mol_type = other DNA
agaggtgccattttcgcttgaactccttgaagccgattttgtgccagtgaatctcaacagcacggaaggacagca

SEQ ID NO: 627958 - DNA, 75 bp, synthetic construct
  source 1..75: mol_type = other DNA
acgaagagagtgaacgcgtggccgcaagaatcgctgccgcgctgggcttttatatcaagagaggtgatgccgcta

SEQ ID NO: 627959 - DNA, 75 bp, synthetic construct
  source 1..75: mol_type = other DNA
ggattttacagttgatcatgaacttggtggtatggatgcgaatacgttttcccttgatttttcgtggagagcatg

SEQ ID NO: 627960 - DNA, 75 bp, synthetic construct
  source 1..75: mol_type = other DNA
tcctgacactgatggtaaattgcccgacgccgcgattttttgtttgaaccagaaaagttgctgcaaattgtccgc

SEQ ID NO: 627961 - DNA, 75 bp, synthetic construct
  source 1..75: mol_type = other DNA
ggcggatggcgcgttcttttccgggctattcccccgtggctggcagaagaaaatacgaacgccaatattcagggg

SEQ ID NO: 627962 - DNA, 75 bp, synthetic construct
  source 1..75: mol_type = other DNA
cctcctgaagtggccgttttaagtaaaagaattgatgtttcccccgatgggacagtgatgatggtttgtggttcc

SEQ ID NO: 627963 - DNA, 75 bp, synthetic construct
  source 1..75: mol_type = other DNA
attttcatataacccagagttcatttgctgagattgttggcgcatcccaagggatggtcagccacgttataacgg

SEQ ID NO: 627964 - DNA, 75 bp, synthetic construct
  source 1..75: mol_type = other DNA
tagttaattttttaaaaaattgtgatagtataatagtattaggtccctcattaataaaaatgtatgatttctgtc

SEQ ID NO: 627965 - DNA, 75 bp, synthetic construct
  source 1..75: mol_type = other DNA
ggcatgaactcgatgatgagtacgttgcttatttgtttctgcgccctttcatttgcgggaacattagccttgagc

SEQ ID NO: 627966 - DNA, 75 bp, synthetic construct
  source 1..75: mol_type = other DNA
acaatgccaatggtactgttacgatcggtaatgggctcgatgttactggcggcatcaatggtagtttgaacggca

SEQ ID NO: 627967 - DNA, 75 bp, synthetic construct
  source 1..75: mol_type = other DNA
ggctaaaacaagcacactggctgttatccaataccttggtttaagagaaatcggtaccagcggtgaaaagatccc

SEQ ID NO: 627968 - DNA, 75 bp, synthetic construct
  source 1..75: mol_type = other DNA
gtgtatgaaaaatattttaacgctcttcctaatgaaatttttaactatggatatggttattatagtttaaatatg

SEQ ID NO: 627969 - DNA, 75 bp, synthetic construct
  source 1..75: mol_type = other DNA
gttcctttagcctgtgaagcgcatagccatcgcagcgtcgcccttgccaaaaccggtgatgctgccaacttactg

SEQ ID NO: 627970 - DNA, 75 bp, synthetic construct
  source 1..75: mol_type = other DNA
aacaagaaagttattcttttgttaatttagaaaagcaactaatgagtaatgaattaccgaagcaaacgctattaa

SEQ ID NO: 627971 - DNA, 75 bp, synthetic construct
  source 1..75: mol_type = other DNA
ttaaagccaaattgccacaagaacgaagtgaaaaagttgaggatatgtgtgaaagaatgagaggtggcatctcta

SEQ ID NO: 627972 - DNA, 75 bp, synthetic construct
  source 1..75: mol_type = other DNA
aagtgaaaaagttgagggtatgtgtgaaagaatgagaggtggcatctctatgtttaatcacactacaaaaacagc

SEQ ID NO: 627973 - DNA, 75 bp, synthetic construct
  source 1..75: mol_type = other DNA
taagcagaaagttttttttggcaatgaaaaaccgttgtttgtaaaacataccgcaatgatgagggaggcatgcca

SEQ ID NO: 627974 - DNA, 75 bp, synthetic construct
  source 1..75: mol_type = other DNA
ttgatcaacagggatattttagttgcgattcattaacagccaaagaattaatgatgttaaaagacctttttgata

SEQ ID NO: 627975 - DNA, 75 bp, synthetic construct
  source 1..75: mol_type = other DNA
atacggagaattgctgcccttcacccgtatacctgatgatgatgttcgtcttattcgtgaattacgggatgctga

SEQ ID NO: 627976 - DNA, 75 bp, synthetic construct
  source 1..75: mol_type = other DNA
ggctgaccggcgttcacaccaccgcagcgaatctggatatccgcatcccgtatgccacggacccgcgggcaaccg

SEQ ID NO: 627977 - DNA, 75 bp, synthetic construct
  source 1..75: mol_type = other DNA
ctaacatgtctcgtgcgcagatcctgcaacaagcgggtacctctgttctggcgcaggctaaccagaccacgcaga

SEQ ID NO: 627978 - DNA, 75 bp, synthetic construct
  source 1..75: mol_type = other DNA
aactgatcttctggattggggtgataatgatcatccctgcctttagtcgtttttgctattcagcgtcagccttgc

SEQ ID NO: 627979 - DNA, 75 bp, synthetic construct
  source 1..75: mol_type = other DNA
agaatggtaatcagtaataatattattcaaatctatgacaataataatacgttacgtgtacgtatgggtttatgg

SEQ ID NO: 627980 - DNA, 75 bp, synthetic construct
  source 1..75: mol_type = other DNA
acagcgaagacgttgaggcaaagacagtatttcctgatgtgatcgtgcatcggcgaggtacacgacagaatcatt

SEQ ID NO: 627981 - DNA, 75 bp, synthetic construct
  source 1..75: mol_type = other DNA
gaaaactcagtcattcacagtaagctaataaatctgaaatccacaggggggataattgaacaaacgttatccaca

SEQ ID NO: 627982 - DNA, 75 bp, synthetic construct
  source 1..75: mol_type = other DNA
ccagaattttcagcgtgaccacaaaccgagccgcacctcccgatgatactcaatatcttggtccaaaagcgaacc

SEQ ID NO: 627983 - DNA, 75 bp, synthetic construct
  source 1..75: mol_type = other DNA
tcccctacaccgccctgaaagatggatcagtcgatctggctgatattgcccgtatgaatgactggctggacctga

SEQ ID NO: 627984 - DNA, 75 bp, synthetic construct
  source 1..75: mol_type = other DNA
tgtccgtgggcttccgtccccatgaatacacctttctggacggaggcggactgcattttctgcgctgggaactga

SEQ ID NO: 627985 - DNA, 75 bp, synthetic construct
  source 1..75: mol_type = other DNA
gcgtcaacgccttctccggatcgggatggtgacatcctggagccggagggcgcggagtttggcagtgcgatcccg

SEQ ID NO: 627986 - DNA, 75 bp, synthetic construct
  source 1..75: mol_type = other DNA
acgtgcccgcacccaaaatcacgatccgtacagtagatgatgcatcagattctttttgtccgggcgtgaacgata

SEQ ID NO: 627987 - DNA, 75 bp, synthetic construct
  source 1..75: mol_type = other DNA
gaaaaaatggcgcagcagcgtggactgcgcaacatgcaatttttcccgctgcaatcgtatgacgctttacccgca

SEQ ID NO: 627988 - DNA, 75 bp, synthetic construct
  source 1..75: mol_type = other DNA
accaaagcgcagatgatcaactcctatgacaactcggtgacctatgtggatcactttatctccagcgtgattgat

SEQ ID NO: 627989 - DNA, 75 bp, synthetic construct
  source 1..75: mol_type = other DNA
gacgaaatgcagcaatcgctggggcgcaacccggatggtaagcatctgatcattctgcataccaaaggttcgcac

SEQ ID NO: 627990 - DNA, 75 bp, synthetic construct
  source 1..75: mol_type = other DNA
gcagcctggcggtcgtcgtactggcgggtattatggtttgggcaccgattcgtttgctggatatccagcagaaga

SEQ ID NO: 627991 - DNA, 75 bp, synthetic construct
  source 1..75: mol_type = other DNA
gtaacttattccaactctatacttatactccaagttttggctcccactatatttcttacgggtataagtaatatt

SEQ ID NO: 627992 - DNA, 75 bp, synthetic construct
  source 1..75: mol_type = other DNA
tgcgcgtcggtaaatatccgaccggctccacgaaccgcgagaaagccacgctgatgcaggccgtgatggatatcg

SEQ ID NO: 627993 - DNA, 75 bp, synthetic construct
  source 1..75: mol_type = other DNA
tgtatgttggttgagcgcagagggtactggcgggctgttgtggccatcgccgccaaaaatgcgcggctgtgttgg

SEQ ID NO: 627994 - DNA, 75 bp, synthetic construct
  source 1..75: mol_type = other DNA
gcagaagaattctttaccacttcaggttcagcaatgtgttgatgatttgctggagcacgttgctcgcattgaaga

SEQ ID NO: 627995 - DNA, 75 bp, synthetic construct
  source 1..75: mol_type = other DNA
atcccagaatgggatgaacaggaatattcaaagaaataataagtcaggatatccgggtgtctgttggcacaaaaa

SEQ ID NO: 627996 - DNA, 75 bp, synthetic construct
  source 1..75: mol_type = other DNA
gttttcagcatgttgcagatgccgatgttgatgcccttcgtaaccagcttggcctgccggataacaaaaaaatca

SEQ ID NO: 627997 - DNA, 75 bp, synthetic construct
  source 1..75: mol_type = other DNA
acccaattactgctcaagttaaacaaatgcctactttagaacagttaaaatcctgggttcgtaataatggcgagg

SEQ ID NO: 627998 - DNA, 75 bp, synthetic construct
  source 1..75: mol_type = other DNA
tcttatcttggactggaaacacatgaaaatctaaaacatgcaatcgctaatgcaattgaaagatttggagtccaa

SEQ ID NO: 627999 - DNA, 75 bp, synthetic construct
  source 1..75: mol_type = other DNA
gacatcaaagagaacattcatttcaggcgcgaaatcagcagattaagcacgggttttatcgtgatttaccacgac

SEQ ID NO: 628000 - DNA, 75 bp, synthetic construct
  source 1..75: mol_type = other DNA
tcacttttaatgatgctgtaaaatctggaagtattacgtggaaagcatccttgccgattactgtgtcttatgtgt

SEQ ID NO: 628001 - DNA, 75 bp, synthetic construct
  source 1..75: mol_type = other DNA
agtacaaactttgggaagctggtgatttcaatagcaatcattatcaagaattatttaatgcattaaagatctatt

SEQ ID NO: 628002 - DNA, 75 bp, synthetic construct
  source 1..75: mol_type = other DNA
cagtatgatagatgaattatttgaagaaataaaaatatatcatagcaatgaacttgacgaagaatatgaagatga

SEQ ID NO: 628003 - DNA, 75 bp, synthetic construct
  source 1..75: mol_type = other DNA
tgaagcaaaaatcggatacgggaaccaaaaaatattcgaggggctacttcagttgcttactcgctatgttaaaag

SEQ ID NO: 628004 - DNA, 75 bp, synthetic construct
  source 1..75: mol_type = other DNA
aaaattgattctcagtttggttcagtatttctttggttttcgagattattatatataacatggttaactttatta

SEQ ID NO: 628005 - DNA, 75 bp, synthetic construct
  source 1..75: mol_type = other DNA
tttggaatgaatgtttcgatcatcttcatgggaaaattgaatacgtcaaatactctgaagcaatagataaaatta

SEQ ID NO: 628006 - DNA, 75 bp, synthetic construct
  source 1..75: mol_type = other DNA
ttgttctcaaagttgaatctgttcaggaaatttggtcctatatgctaggtaaaattaagggaaaaaacaggagaa

SEQ ID NO: 628007 - DNA, 75 bp, synthetic construct
  source 1..75: mol_type = other DNA
tgtcatcgatgcctgtggtaaggaggattcatgcctgacattgacagatgaccccatggaagcaaagcgaatgcg

SEQ ID NO: 628008 - DNA, 75 bp, synthetic construct
  source 1..75: mol_type = other DNA
cgcgatccggtaactatatcaatgttcataatccatcacctttttatgtcaccctggttaacttgcaagtgggca

SEQ ID NO: 628009 - DNA, 75 bp, synthetic construct
  source 1..75: mol_type = other DNA
gtgagaggactgtttacagccgagactgttccgcgcctggggcttgtggtgttaaagccgggtagcgaactgatg

SEQ ID NO: 628010 - DNA, 75 bp, synthetic construct
  source 1..75: mol_type = other DNA
gttcgcaaagttgttcagccagacgctggtattttttattctggtttctcgtcggtcaatgcaggtgagcctcgc

SEQ ID NO: 628011 - DNA, 75 bp, synthetic construct
  source 1..75: mol_type = other DNA
caattgccaagagtggcgctttacaaggaagaacgggcacaacgtatcatctgagcagtaaacgtcaagctcagt

SEQ ID NO: 628012 - DNA, 75 bp, synthetic construct
  source 1..75: mol_type = other DNA
aaaccttttacaacatacaggatcacaacaagtgaaggggaagtgtatgagggtatttctgattcagaaggtaaa

SEQ ID NO: 628013 - DNA, 75 bp, synthetic construct
  source 1..75: mol_type = other DNA
acgcgcttagttctggttgcccgtgcccaggcttcaacgctgaaagaggtttctcatacgcacgatgagctgtct

SEQ ID NO: 628014 - DNA, 75 bp, synthetic construct
  source 1..75: mol_type = other DNA
ccgttgaggctatagacacagctaatatgggcattgatttcgcgaaggtggatatcagccagatgcggttgagcc

SEQ ID NO: 628015 - DNA, 75 bp, synthetic construct
  source 1..75: mol_type = other DNA
gctacaaggtcaagtttacatttcgcaatatagcgccaatggatgcagcatcaagaattatgcaggatgggggta

SEQ ID NO: 628016 - DNA, 75 bp, synthetic construct
  source 1..75: mol_type = other DNA
atttgaagcggcgcgtcatgacattccggtggtgttaaatctcgatcacggactgcattttgaatcggtggtgca

SEQ ID NO: 628017 - DNA, 75 bp, synthetic construct
  source 1..75: mol_type = other DNA
atgtttgtgcgtgaaggtggaacggaaaataacccacaacgaacactaaaagagcagaacgtatttgcggttctc

SEQ ID NO: 628018 - DNA, 75 bp, synthetic construct
  source 1..75: mol_type = other DNA
aatgaaattgaacgttctctggagaaaaaaccagaaggtaagcatctgattgtgctgcataccaaagggtcgcac

SEQ ID NO: 628019 - DNA, 75 bp, synthetic construct
  source 1..75: mol_type = other DNA
atgagatacatcaaaacgataacgcagcaaaagctaagcttttttctcgctgtctatattggtttgtttatgaat

SEQ ID NO: 628020 - DNA, 75 bp, synthetic construct
  source 1..75: mol_type = other DNA
atttgataccgcgccaaccggtcacaccatccgcatgcttgaattgccgggagcctggagcggttatctggaagc

SEQ ID NO: 628021 - DNA, 75 bp, synthetic construct
  source 1..75: mol_type = other DNA
ggctcgctgccaaaccttcaggtcagccgtatcgatccgaaggtggagacagagcgctatcgccgctttgtgctg

SEQ ID NO: 628022 - DNA, 75 bp, synthetic construct
  source 1..75: mol_type = other DNA
ggtcctctggtagggctggagaaacaacagcaccagtacacagaagcggttaaggcactctcggatgctgcattc

SEQ ID NO: 628023 - DNA, 75 bp, synthetic construct
  source 1..75: mol_type = other DNA
cggtccggggactgatgggctcatttttcaccctttcagagaacggttccttcacgcccgttggcgttttcgccc

SEQ ID NO: 628024 - DNA, 75 bp, synthetic construct
  source 1..75: mol_type = other DNA
ttcccccgttcatcttcttcactggcaaaggtggcgtgggtaaaacatctctggcctgtgctactgcggtatggc

SEQ ID NO: 628025 - DNA, 75 bp, synthetic construct
  source 1..75: mol_type = other DNA
agctcatctgtcttatacgctggatggctcgctaccaaaccttcaggtcagccgtattgacccgaaagtagagac

SEQ ID NO: 628026 - DNA, 75 bp, synthetic construct
  source 1..75: mol_type = other DNA
aagttccttaagcgcaacgggttcaaggtttgttttcatgaccgctttatagctgtaaccagtaccggagaatag

SEQ ID NO: 628027 - DNA, 75 bp, synthetic construct
  source 1..75: mol_type = other DNA
cgtcactaagtcagtcatgggtaaagacacatggcaggtgacagctaaaggctacgcatggatgcaggggaacgc

SEQ ID NO: 628028 - DNA, 75 bp, synthetic construct
  source 1..75: mol_type = other DNA
gccgacgccagcgtcgacaaagcggtgaaaatgtttccggccattgagcgatttttgcgccaggagatgcgcgaa

SEQ ID NO: 628029 - DNA, 75 bp, synthetic construct
  source 1..75: mol_type = other DNA
taatcatcaaagattatgatgaaattaaaaaattgctcggcctgatcgagtttaattacaaaaagaaaacattgt

SEQ ID NO: 628030 - DNA, 75 bp, synthetic construct
  source 1..75: mol_type = other DNA
aattagctatcacaaaattaaaacgtgatgcaattgtatataaaatgcatggcgatatagatcatgcaaacgatg

SEQ ID NO: 628031 - DNA, 75 bp, synthetic construct
  source 1..75: mol_type = other DNA
agaaacacacagaattctggcaagattaccaattagcacctactggacaaccaactatgacaaacttatagaaaa

SEQ ID NO: 628032 - DNA, 75 bp, synthetic construct
  source 1..75: mol_type = other DNA
tgaaaatgagcgtggtaaagccactgtaaaatattctccgttgttttctttcccactcccgaaatctttttttga

SEQ ID NO: 628033 - DNA, 75 bp, synthetic construct
  source 1..75: mol_type = other DNA
aactggatagcgtaagcacgttgactaaaagtggcggcgggacgctggagttgaccgccagcggcactgcgacgt

SEQ ID NO: 628034 - DNA, 75 bp, synthetic construct
  source 1..75: mol_type = other DNA
tgacactcgctcggctacaacaggtcagggcaggaatattgaaatgcgcgctgatggcgaaatacacgttgagga

SEQ ID NO: 628035 - DNA, 75 bp, synthetic construct
  source 1..75: mol_type = other DNA
atcgcggcattcagtgcacttgtgtcgaggagtgagcgggaggtgattatcattacaccgtggatccgttatgga

SEQ ID NO: 628036 - DNA, 75 bp, synthetic construct
  source 1..75: mol_type = other DNA
agcgtgattttttggctgtgctaagagtgaatcaggcattattgaattcccggtatcttgcctatctgaatgaga

SEQ ID NO: 628037 - DNA, 75 bp, synthetic construct
  source 1..75: mol_type = other DNA
aaccccattattctctgggacacggacaaatggctgcgattcaggctatgaatcaggacgaacgtcttattgccg

SEQ ID NO: 628038 - DNA, 75 bp, synthetic construct
  source 1..75: mol_type = other DNA
tgcatctgacacgaccgcacaaccagggtcagtaaaagttaccgctgacgaagtaaacaaaattatgcaggcagc

SEQ ID NO: 628039 - DNA, 75 bp, synthetic construct
  source 1..75: mol_type = other DNA
aactttatccctggggctaatgctatatataacatgttcgcagaacacactatattatacaatagctcttctgcg

SEQ ID NO: 628040 - DNA, 75 bp, synthetic construct
  source 1..75: mol_type = other DNA
atatggtcatgaaccacggctgatggctgctaaatttgtatctccttaccgcatggccggtaaatcaggcaaaaa

SEQ ID NO: 628041 - DNA, 75 bp, synthetic construct
  source 1..75: mol_type = other DNA
aagatagagtgcatttatcgcgcggcgcatcagctggcgctggagaatatcttcgttgatcaggcctttagcaat

SEQ ID NO: 628042 - DNA, 75 bp, synthetic construct
  source 1..75: mol_type = other DNA
gtggaatggctgacctacggcagcggctggctgtcaggcatgaaactcggcgacacaccgctggtggagtacacc

SEQ ID NO: 628043 - DNA, 75 bp, synthetic construct
  source 1..75: mol_type = other DNA
tcgactgcaaattcgtctacagttaatgcaagttatgttgaaccttcagcggaaaaaataatatcgccaagcgat

SEQ ID NO: 628044 - DNA, 75 bp, synthetic construct
  source 1..75: mol_type = other DNA
ttatctcaaattgatatggatgatataccggattgtgatgtggttattggtggatttccttgccaaggtttttct

SEQ ID NO: 628045 - DNA, 75 bp, synthetic construct
  source 1..75: mol_type = other DNA
agggcgctcgctacaagatctgaaagatgcgctgaaaggcaaagtgcaggaaacgctatctgcggtggcggatga

SEQ ID NO: 628046 - DNA, 75 bp, synthetic construct
  source 1..75: mol_type = other DNA
aaaaatgaagttatcgacaacggccgcgaagactggaagcgtatctcggcatcaatgcgcaaacagcctgatgcc

SEQ ID NO: 628047 - DNA, 75 bp, synthetic construct
  source 1..75: mol_type = other DNA
gcaacaggaaccggaaaagatctgcaccgcctgcggtcagagcggtggcggcaactgccctgattgtggtgcggt

SEQ ID NO: 628048 - DNA, 75 bp, synthetic construct
  source 1..75: mol_type = other DNA
catcagcgacttaatttgagcattccccaaattgcactgtaccgtgatgcaagaggttacgtctccccttctcgt

SEQ ID NO: 628049 - DNA, 75 bp, synthetic construct
  source 1..75: mol_type = other DNA
ggtgtcatcgccccacaaagtacagatgccctgcgtcacatggtttctgagcagaagagttctttgccacttcag

SEQ ID NO: 628050 - DNA, 75 bp, synthetic construct
  source 1..75: mol_type = other DNA
gatcaaagagggcgcagaaaaaatcagcaagctggattacccgaacttctggcatcagggcaatctcaagctgcg

SEQ ID NO: 628051 - DNA, 75 bp, synthetic construct
  source 1..75: mol_type = other DNA
ggtacgctactgctcgatagcgaattaaacggcgatgactcagcaagcgaccaactggtattgaacggtaatact

SEQ ID NO: 628052 - DNA, 75 bp, synthetic construct
  source 1..75: mol_type = other DNA
gccaaagcaatactggatatggcaaaaggggagataacaacccacggaacagaaagttatgccgcttacgctaat

SEQ ID NO: 628053 - DNA, 75 bp, synthetic construct
  source 1..75: mol_type = other DNA
cagcattggggattgatcctgtaatagctgaaagatgtcttaatcataaaatacccggtgttgaaggtatttata

SEQ ID NO: 628054 - DNA, 75 bp, synthetic construct
  source 1..75: mol_type = other DNA
tattggtggatgttccacctgatacgctatacggaaatatctccggagtagtgactttttatatggactactcgt

SEQ ID NO: 628055 - DNA, 75 bp, synthetic construct
  source 1..75: mol_type = other DNA
gcgatagggtaaaaatagtaaatgccgggaaatatgctcgtcttaattcaagttgcatgtacggcgactcgaatt

SEQ ID NO: 628056 - DNA, 75 bp, synthetic construct
  source 1..75: mol_type = other DNA
caggaaataatgaaaatagcgccaaagcaatactggatatggcaaaaggggagataacaacccacggaacagaaa

SEQ ID NO: 628057 - DNA, 75 bp, synthetic construct
  source 1..75: mol_type = other DNA
gcgttcttgcgtgtgcatctcccggaagcgctcgtgcgtgtgtatcttctcttgatgaagaaagcactgccgata

SEQ ID NO: 628058 - DNA, 75 bp, synthetic construct
  source 1..75: mol_type = other DNA
acgggttacacaccgtaccaccctgattatggttatagtggtcacagccgtggcgtgtgggtggaaggaacggca

SEQ ID NO: 628059 - DNA, 75 bp, synthetic construct
  source 1..75: mol_type = other DNA
ttcaacgaataaaatagtggtttggtgttcgtttatagcactttttggtagtttattatttccgatttggttatt

SEQ ID NO: 628060 - DNA, 75 bp, synthetic construct
  source 1..75: mol_type = other DNA
agaagtcggtctggagttagaattctccggacaaggtgttgatgaaatagcaactgttgtgaataaaacatctga

SEQ ID NO: 628061 - DNA, 75 bp, synthetic construct
  source 1..75: mol_type = other DNA
aaccttaattcaaataaggatctaatggctataacaacaaaagaccttggtaattggataacatatgggccatct

SEQ ID NO: 628062 - DNA, 75 bp, synthetic construct
  source 1..75: mol_type = other DNA
acgaagcagaccgcctcacgcaccgcaccgtgaatggcgaaaccgcagagcggtggcggtatgacgaacgtggct

SEQ ID NO: 628063 - DNA, 75 bp, synthetic construct
  source 1..75: mol_type = other DNA
ccactgctcattcgtagctactggatgccggaggacgcagaccccgaagtgatcagggggatgaaagatcggtgt

SEQ ID NO: 628064 - DNA, 75 bp, synthetic construct
  source 1..75: mol_type = other DNA
ataacccgcaggttcggcggttaaatgaaatcatcgagaagaagcgcatatccaaagcggatatagcgagaatct

SEQ ID NO: 628065 - DNA, 75 bp, synthetic construct
  source 1..75: mol_type = other DNA
tataaaatatgacttaattataaaaaacattccattaaagcaagttttaaaacaagataattgtaagctttacga

SEQ ID NO: 628066 - DNA, 75 bp, synthetic construct
  source 1..75: mol_type = other DNA
tatacagaatccaatgaatatttctcagaaatcgtatcattatataataagaaaaatcgtcatcttgataaaata

SEQ ID NO: 628067 - DNA, 75 bp, synthetic construct
  source 1..75: mol_type = other DNA
cgcgctgatttactaaattcacgcatggcaaaaaatcaaactggtcagcattatgttgcgccaacaacgcaagaa

SEQ ID NO: 628068 - DNA, 75 bp, synthetic construct
  source 1..75: mol_type = other DNA
agaagatgaaagtgatttttttaaatggaaaaaaataagagagttggcatttgtgagcaatcataaagaatggaa

SEQ ID NO: 628069 - DNA, 75 bp, synthetic construct
  source 1..75: mol_type = other DNA
aaagggcgttggtcccacaacggcctgtgcactggtcgccagtatcggtaatgcacatgattttaaaaatggacg

SEQ ID NO: 628070 - DNA, 75 bp, synthetic construct
  source 1..75: mol_type = other DNA
tgcgcttagtctggggctgaatcattaccgcgataacgccatcacctacaaagcgcagcgtgataaaaaagccag

SEQ ID NO: 628071 - DNA, 75 bp, synthetic construct
  source 1..75: mol_type = other DNA
ggtttacgcagtgaacctgtacatgactggttatccctgcatcgtcgtcttgcggaagatggtctgtacctgtct

SEQ ID NO: 628072 - DNA, 75 bp, synthetic construct
  source 1..75: mol_type = other DNA
gttgaccctgttgaccccgttgaccctgttgaccccgttgaccccgttgaccccgttgaccccgttgaccccgtt

SEQ ID NO: 628073 - DNA, 75 bp, synthetic construct
  source 1..75: mol_type = other DNA
agcgatggcaacagcaactggaacctgaccaatgatgtcaaacccaacccggatcccaacccaaatcccaaccca

SEQ ID NO: 628074 - DNA, 75 bp, synthetic construct
  source 1..75: mol_type = other DNA
ggtatcgcaaagatgtgctggcaaaagcggggcttgaggagccgaaaaactggcaacagctgctggacgttgcac

SEQ ID NO: 628075 - DNA, 75 bp, synthetic construct
  source 1..75: mol_type = other DNA
gaacaatggcgtaaaccggatctgcgttatggggaacgttgtcgggaaattcatcaggcatgccgtctgcggaag

SEQ ID NO: 628076 - DNA, 75 bp, synthetic construct
  source 1..75: mol_type = other DNA
aacgatggacagtttaatcaggtctttgctgaaatggtggcatggcacaatgtgacgggattctctgaacatgga

SEQ ID NO: 628077 - DNA, 75 bp, synthetic construct
  source 1..75: mol_type = other DNA
ccattatctttaaaccaatactcatctggtggttggggtaatggggcaatgcgttatataattgagagatatcag

SEQ ID NO: 628078 - DNA, 75 bp, synthetic construct
  source 1..75: mol_type = other DNA
aagtctataggggcattgcttcaggtagaggtcattcggttggaggccatgcaggacaatccctatgtggttctt

SEQ ID NO: 628079 - DNA, 75 bp, synthetic construct
  source 1..75: mol_type = other DNA
gacgtccggtgatggtgcgccggttccggacggcgtacaacgaagtcgcccgtaaaaacgcaaaatcaaccctgt

SEQ ID NO: 628080 - DNA, 75 bp, synthetic construct
  source 1..75: mol_type = other DNA
aaaacttcagaggctacagaaactctactgaaatcattattgatgaaagcatgacgggtacacaattgcagcgaa

SEQ ID NO: 628081 - DNA, 75 bp, synthetic construct
  source 1..75: mol_type = other DNA
cgacgttcgccgctttgctgatctgatggacaagctgggcgacacgatggcggaaacctacgccggaagaacggg

SEQ ID NO: 628082 - DNA, 75 bp, synthetic construct
  source 1..75: mol_type = other DNA
cgatcacatcgttatgcctgaaaacgcgatgatgatgatacatgccccccgtggtgttactgccggagtgtcggg

SEQ ID NO: 628083 - DNA, 75 bp, synthetic construct
  source 1..75: mol_type = other DNA
cacgttattatgcaaatgatgttacaactgcttctttgttgggggcaatgttaaatactggttattcggatttta

SEQ ID NO: 628084 - DNA, 75 bp, synthetic construct
  source 1..75: mol_type = other DNA
ttgaagtggtcgaagattaagaacagtgcggggcaggcaaacatctgcattgagctgctggcaatggtgctcaag

SEQ ID NO: 628085 - DNA, 75 bp, synthetic construct
  source 1..75: mol_type = other DNA
ataaagacgttggttaagtcggtgacgatgcacgactctaagcaccatctgggattgcaggtggtggacatcctg

SEQ ID NO: 628086 - DNA, 75 bp, synthetic construct
  source 1..75: mol_type = other DNA
tgtagtagatagttttagcacaatctgtaaaaaaataaaaaatatgtcaccggaagttattaatacagaaacagc

SEQ ID NO: 628087 - DNA, 75 bp, synthetic construct
  source 1..75: mol_type = other DNA
taatatattctttaaggaatttgctgaagctgaaggcagaattgctcataatgttattggcgatgctttctctga

SEQ ID NO: 628088 - DNA, 75 bp, synthetic construct
  source 1..75: mol_type = other DNA
tggaggatattgcccgggataaagtcagaactctccattttgtggatgagatagaagtctacctggccttccaga

SEQ ID NO: 628089 - DNA, 75 bp, synthetic construct
  source 1..75: mol_type = other DNA
gcgctgggtcgcgaagtagttaatgaaagtagccggatgggattacctgatgaattcactctacaacgcgaattc

SEQ ID NO: 628090 - DNA, 75 bp, synthetic construct
  source 1..75: mol_type = other DNA
ggtataagcacgggcagctacggcacacgctcgcagatagtaaacgcggcattcacccacagcagcagcgatttt

SEQ ID NO: 628091 - DNA, 75 bp, synthetic construct
  source 1..75: mol_type = other DNA
attggtttcgatggggttaataataagtgatagatatataatatcatctatatttggtgttgaagatgtcacaaa

SEQ ID NO: 628092 - DNA, 75 bp, synthetic construct
  source 1..75: mol_type = other DNA
gactcaaaaggactcggcaatttcaagaacctatttttttatgcaccgaatggaaaagctgatgggatcaaaatt

SEQ ID NO: 628093 - DNA, 75 bp, synthetic construct
  source 1..75: mol_type = other DNA
gaggcgctgtctcgcgccgatctgatcgtctggcagcatccgatgcagtggtacagcattcctccgctcctcaaa

SEQ ID NO: 628094 - DNA, 75 bp, synthetic construct
  source 1..75: mol_type = other DNA
tcagtatcaattgagcccaacgttaccggtcagaaaggatgggccaagtaatgccataattgtaattctttcttc

SEQ ID NO: 628095 - DNA, 75 bp, synthetic construct
  source 1..75: mol_type = other DNA
tacaacccttacagtggacaaccttactatagatgacagtgcatttgtgctgcgtgcaaatctggcccaagcaga

SEQ ID NO: 628096 - DNA, 75 bp, synthetic construct
  source 1..75: mol_type = other DNA
tcgtaagcgagaatacgcgggtttggtggcaccaggccgaactcaccgggaggcacccggcaccatgcagtattc

SEQ ID NO: 628097 - DNA, 75 bp, synthetic construct
  source 1..75: mol_type = other DNA
atgacgtacaaatcagttaagcacggactgccgcattcgttcacccgcgtctgggtgatgaccgacaccgggcgg

SEQ ID NO: 628098 - DNA, 75 bp, synthetic construct
  source 1..75: mol_type = other DNA
tggtcgtgccagcaatatgctgttggagaacggtggtagtctgactgtggagccaggacattctgttaaagatac

SEQ ID NO: 628099 - DNA, 75 bp, synthetic construct
  source 1..75: mol_type = other DNA
aattctgcccggcgtatcgggtgacagctgaagggcgggatatcacgcgggtgctggcccgttatcttgtggata

SEQ ID NO: 628100 - DNA, 75 bp, synthetic construct
  source 1..75: mol_type = other DNA
tcaatattttttctgaagatgacgctgcccgtgcggcacgtcagctgcttgcccaccgtccggatggcattatct

SEQ ID NO: 628101 - DNA, 75 bp, synthetic construct
  source 1..75: mol_type = other DNA
ggtctgcggggatgacattaccgcaggcgatggcgcagggaacggcgtgtgcagcgcaaaccattcagtatcacg

SEQ ID NO: 628102 - DNA, 75 bp, synthetic construct
  source 1..75: mol_type = other DNA
acgtatggcgggtacgaaatgacgcctgtgaaggtgacaattaacgccgttgctgcagagactgaaaatggcgag

SEQ ID NO: 628103 - DNA, 75 bp, synthetic construct
  source 1..75: mol_type = other DNA
aatctcgcaatataagaagaaggttcatgccgagaaacagtttaaccgcaaggttgagctcaataagcagttaaa

SEQ ID NO: 628104 - DNA, 75 bp, synthetic construct
  source 1..75: mol_type = other DNA
tgatggacgatttgaggcgcttaataataaaggagaatatatttttatcagaaatagtgtcccgggattgagttc

SEQ ID NO: 628105 - DNA, 75 bp, synthetic construct
  source 1..75: mol_type = other DNA
gaggcgctgtctcgcgccgatctgattgtctggcagcacccgatgcagtggtacagcattcctccgctcctcaaa

SEQ ID NO: 628106 - DNA, 75 bp, synthetic construct
  source 1..75: mol_type = other DNA
caaaaatggtgatatctgcatggacggcaccgcccgcgatgtgactaaccgttatctggatgaactgtttggcaa

SEQ ID NO: 628107 - DNA, 75 bp, synthetic construct
  source 1..75: mol_type = other DNA
aaatatgggccgcctgctcatgagttcgtgaggccacgatataaatttgttggtgaatattatatcggcttgaat

SEQ ID NO: 628108 - DNA, 75 bp, synthetic construct
  source 1..75: mol_type = other DNA
gcgggcaacaaccgggaggtgcgacaaaatgttgttctcacatgcacagaaaacgcaggcctgggatgccttcgc

SEQ ID NO: 628109 - DNA, 75 bp, synthetic construct
  source 1..75: mol_type = other DNA
ctgacagaaaaacgaattaaagcagtagtgagtattacgggtgttaatatcgggcgtctttttcgggaaggtttc

SEQ ID NO: 628110 - DNA, 75 bp, synthetic construct
  source 1..75: mol_type = other DNA
ccatcctgtgtgaagaacgccttgcgctggcgcactatcgcccgacggcaatcatcaagggcactttctcttctg

SEQ ID NO: 628111 - DNA, 75 bp, synthetic construct
  source 1..75: mol_type = other DNA
atgcttaagccagagagcgaagaaagaatgattcatcttcctgggattattcagatagataaaaaagaatatgca

SEQ ID NO: 628112 - DNA, 75 bp, synthetic construct
  source 1..75: mol_type = other DNA
cccgcgctttcctcggtatcggcctgatactgatccttatttctgcagttatcttttattaccattttaccttta

SEQ ID NO: 628113 - DNA, 75 bp, synthetic construct
  source 1..75: mol_type = other DNA
tcggcgactacattgaagagccagtgcgcgtctattccagcgggatgcagatgcgactggcgtttgccgtggcca

SEQ ID NO: 628114 - DNA, 75 bp, synthetic construct
  source 1..75: mol_type = other DNA
gggggcttccggtggtgtcgaccacggcgcagacggcaggcaaattcaccgttggcgcgtttggcctggcgtcgc

SEQ ID NO: 628115 - DNA, 75 bp, synthetic construct
  source 1..75: mol_type = other DNA
ttcgtgatctgctgtctcagggccgcacttccagtaacgctctggaatatgtgcgtgaagaggtgtttaccaata

SEQ ID NO: 628116 - DNA, 75 bp, synthetic construct
  source 1..75: mol_type = other DNA
atagcatccaagtgtgcgatattacaagattttgatcaacaattgttctggcgcacgtttacaggaggggtcctc

SEQ ID NO: 628117 - DNA, 75 bp, synthetic construct
  source 1..75: mol_type = other DNA
gttcggtaagtaaccgttatggtacgacgaaagtgtttgaaagccagaatctgacggataagcagatccacaatt

SEQ ID NO: 628118 - DNA, 75 bp, synthetic construct
  source 1..75: mol_type = other DNA
gtagagaatgaagatggctctcacgttcctgtttcgcaaccaatcattattaacgctgctggttatccggtatat

SEQ ID NO: 628119 - DNA, 75 bp, synthetic construct
  source 1..75: mol_type = other DNA
catagtccggagcaaattgccgcatggaaaaaaatcaccgctggcgttcatgctgaaaatggtcatatggccgtg

SEQ ID NO: 628120 - DNA, 75 bp, synthetic construct
  source 1..75: mol_type = other DNA
atggcgattattcctttctttgtgaatcgggtagggccaaaaaatgcattacttatcggtgttgtgattatggtg

SEQ ID NO: 628121 - DNA, 75 bp, synthetic construct
  source 1..75: mol_type = other DNA
gccacgacactgaaccgagtggcgggggccattattgcgaaaacggcctcttcagttgccagggagctggccgtt

SEQ ID NO: 628122 - DNA, 75 bp, synthetic construct
  source 1..75: mol_type = other DNA
aatttgacggataaacagatccacaattacgcacagcaactggcaggcgatacaccgctgaaagaggttcggccg

SEQ ID NO: 628123 - DNA, 75 bp, synthetic construct
  source 1..75: mol_type = other DNA
caagtactatccaaatgggccaaaaaaaacggacaacaagtgcagcagtatccacaacgttttttggcccaaatg

SEQ ID NO: 628124 - DNA, 75 bp, synthetic construct
  source 1..75: mol_type = other DNA
agagcgcatctcacatgttgtaaagcctgctaatcgtaatttagaaattgatattccacgtgatactacatctat

SEQ ID NO: 628125 - DNA, 75 bp, synthetic construct
  source 1..75: mol_type = other DNA
agaagagagcgccgattcttttggggatatcttccgtgaatggcatgcgcacaaatcaaaggtgtggtctaaggg

SEQ ID NO: 628126 - DNA, 75 bp, synthetic construct
  source 1..75: mol_type = other DNA
tgtggatttaagccagaacggtaatttgattatggtcgcagtaaccttagtgctgggtgcgggtgattttgctct

SEQ ID NO: 628127 - DNA, 75 bp, synthetic construct
  source 1..75: mol_type = other DNA
ctattccgtgcgtgattttgcagagtttctggaaatttacggactccccatgcgcgtcggtaaatatccgaccgg

SEQ ID NO: 628128 - DNA, 75 bp, synthetic construct
  source 1..75: mol_type = other DNA
gcgccctcctcaagtcctcccctgggcggttacagaatatcgttagctttaccgcaaatggtacctacaccccat

SEQ ID NO: 628129 - DNA, 75 bp, synthetic construct
  source 1..75: mol_type = other DNA
ggcaatctggttccacaaccagcgcggtaaggcagaccgttactattctgcgaaagtctcattccagaaggtacc

SEQ ID NO: 628130 - DNA, 75 bp, synthetic construct
  source 1..75: mol_type = other DNA
cacgctgcgtaaaatcgacacgtggatcacgatgccgcaggtgatgaccctctccacagagggtggtgaccagca

SEQ ID NO: 628131 - DNA, 75 bp, synthetic construct
  source 1..75: mol_type = other DNA
agctccggctggctaaaactcgataatatggtgctgcgcgttaaatccgtagccggtaccaaaatcgtgctggat

SEQ ID NO: 628132 - DNA, 75 bp, synthetic construct
  source 1..75: mol_type = other DNA
agcttgtgtttcattatactcatctggttgcagtgttttcttagcaacatttggtgggagtctgaatcaagttgc

SEQ ID NO: 628133 - DNA, 75 bp, synthetic construct
  source 1..75: mol_type = other DNA
gctcaaatcattacattgatttatggtaatggatatcaggaatccaaatctgtactagatgtctttatggttgta

SEQ ID NO: 628134 - DNA, 75 bp, synthetic construct
  source 1..75: mol_type = other DNA
ggcgaattggtcaccccaatatcaggtgggtatgccatcgtgatccgccatgatcagaaaatcattccccagcat

SEQ ID NO: 628135 - DNA, 75 bp, synthetic construct
  source 1..75: mol_type = other DNA
tttattcaacaaagccgagctgagcaatcaactgctcatgaaatacagcaagcgaaagtgattgatttaaatgac

SEQ ID NO: 628136 - DNA, 75 bp, synthetic construct
  source 1..75: mol_type = other DNA
gtgcccgaaaacatacgttatctgatacaaaataatcctcgtttctctgccattctcaccggttcccggcgactt

SEQ ID NO: 628137 - DNA, 75 bp, synthetic construct
  source 1..75: mol_type = other DNA
cattcgccctgataaaaactatttagactctgattatctacttgcatatataaatagccgcgcctgtcaaaattg

SEQ ID NO: 628138 - DNA, 75 bp, synthetic construct
  source 1..75: mol_type = other DNA
taaataattatattaaagattcattccttgaggatgtctttaagctttataaacttgggggtggccgtgtgggct

SEQ ID NO: 628139 - DNA, 75 bp, synthetic construct
  source 1..75: mol_type = other DNA
cactagaatttatatttacagattccttctttagagggttgcatactaatactgggttgaaatgcattgttatta

SEQ ID NO: 628140 - DNA, 75 bp, synthetic construct
  source 1..75: mol_type = other DNA
actatcacttatttaagtgatactggttgtctggagattcagggggccagtctagatgataaaatgatctccgct

SEQ ID NO: 628141 - DNA, 75 bp, synthetic construct
  source 1..75: mol_type = other DNA
cagagaatggtgaacaggcgaaggcgcggcaccggagtctggcggaggtgttgcaggaggacacgggggtgacgc

SEQ ID NO: 628142 - DNA, 75 bp, synthetic construct
  source 1..75: mol_type = other DNA
tgctgagctacatcttgttttgcacgatatatcaggcaatccgatcaaagtttctgaagggctggaatttgtgca

SEQ ID NO: 628143 - DNA, 75 bp, synthetic construct
  source 1..75: mol_type = other DNA
gcggtaaagcggttactgatactgaaggcaaagcgaaagtcacgctgaaaggtacaaaagcaggcgctcatactg

SEQ ID NO: 628144 - DNA, 75 bp, synthetic construct
  source 1..75: mol_type = other DNA
tggaaagacatgaggatgaaacaagaacggagataacaattgatgtcagtctatcaggtgttgtgatttcggagg

SEQ ID NO: 628145 - DNA, 75 bp, synthetic construct
  source 1..75: mol_type = other DNA
agcgagtccacacaacaataatgtctggggggcgacgtataacacccgtaataatgtcaccaccgatgcgggggc

SEQ ID NO: 628146 - DNA, 75 bp, synthetic construct
  source 1..75: mol_type = other DNA
tgcccaaaatgtcggtattcaaattttggaccgtacgggtgaggtattaatacttgatggggccacttttagtgc

SEQ ID NO: 628147 - DNA, 75 bp, synthetic construct
  source 1..75: mol_type = other DNA
aacgaacaatacgtagtttccctagcaacaggtgatcaaagcgtatttgaaaagcttgggtttgcttatgcgaca

SEQ ID NO: 628148 - DNA, 75 bp, synthetic construct
  source 1..75: mol_type = other DNA
acgattatgaagcacgcccggccaatggctgggatgtacgcgcagaaggctggctacccgcctggccgcaccttg

SEQ ID NO: 628149 - DNA, 75 bp, synthetic construct
  source 1..75: mol_type = other DNA
gaaaccgcagatggcgtctataaggctaacctataccgcctataccaaaggcagtgggcttactgcgaagctatt

SEQ ID NO: 628150 - DNA, 75 bp, synthetic construct
  source 1..75: mol_type = other DNA
tgccggggcagcagtatgatgaggagtcggggctgtactataaccgcaaccggtactatgacccgttgcaggggc

SEQ ID NO: 628151 - DNA, 75 bp, synthetic construct
  source 1..75: mol_type = other DNA
gtagccttggtggaaagcgtgttcgcaaaaattcccggaacgaaaccctcagtttaagctttcgcaacattgcgc

SEQ ID NO: 628152 - DNA, 75 bp, synthetic construct
  source 1..75: mol_type = other DNA
tatacatacatgaatcaccaaattttttggatgattgcttagcaagcttgtataagcaaagtcattttcctgacg

SEQ ID NO: 628153 - DNA, 75 bp, synthetic construct
  source 1..75: mol_type = other DNA
ggatgatgacggtcatttatgaattcccggtggattctgaaactaccctgcaaaactacgatatttacttcacca

SEQ ID NO: 628154 - DNA, 75 bp, synthetic construct
  source 1..75: mol_type = other DNA
ctacagtggccttattctcggacgatattatctagaaagaggggattcttcattacgtttctacccagacgaaac

SEQ ID NO: 628155 - DNA, 75 bp, synthetic construct
  source 1..75: mol_type = other DNA
tcctgaagatattctcacctgtgatatcgaaagggagtgtttacattttattaaagtttttgggaaggaacggat

SEQ ID NO: 628156 - DNA, 75 bp, synthetic construct
  source 1..75: mol_type = other DNA
gaacgcctccgcaaggttcttgggcatgatcattcggtaggcgtccagcagataagtcacagcttcccttttctg

SEQ ID NO: 628157 - DNA, 75 bp, synthetic construct
  source 1..75: mol_type = other DNA
cactaccgaaggcgcagccgcaaacatgtattaccgtgttgcggtaatggcgtgtgcgattactgccctcggaga

SEQ ID NO: 628158 - DNA, 75 bp, synthetic construct
  source 1..75: mol_type = other DNA
gcaagcatggttccgggagcgatacgaccactaccgaaagcaggctgagcgggcgagagtgatagaactacggtg

SEQ ID NO: 628159 - DNA, 75 bp, synthetic construct
  source 1..75: mol_type = other DNA
ttgctgatggtatagaaacaaaaaatcaggctgaatacatgattggaaaaggaattaaatatttaaaaggtcctg

SEQ ID NO: 628160 - DNA, 75 bp, synthetic construct
  source 1..75: mol_type = other DNA
tcctgaagatattcttacctgtgatatcgaaagggagtgtttacattttattaaagttttcggaacggaacggat

SEQ ID NO: 628161 - DNA, 75 bp, synthetic construct
  source 1..75: mol_type = other DNA
cctatttattcccagacattaataaacccgatgggccagcaacagcagggatagatgatttgggtgaaattttag

SEQ ID NO: 628162 - DNA, 75 bp, synthetic construct
  source 1..75: mol_type = other DNA
atgaataaagtatactctctaaaatacagtgcaaaaacaaaaggactagttgctgttagtgaacacgccaaaaga

SEQ ID NO: 628163 - DNA, 75 bp, synthetic construct
  source 1..75: mol_type = other DNA
gatctgtttattaagaaatttcagtccgttaattcgttgaatgagtatatgagatcatctccttatgttatggag

SEQ ID NO: 628164 - DNA, 75 bp, synthetic construct
  source 1..75: mol_type = other DNA
tccggaggatatgggggcagggacatcattacctgtgggggatgaggccgtttttttgtctacctttatcaaaaa

SEQ ID NO: 628165 - DNA, 75 bp, synthetic construct
  source 1..75: mol_type = other DNA
atgatattagtagtgatttagcccgtcgaaaaatgaatgaccttcctgaaagccccataggaaataacctcgaag

SEQ ID NO: 628166 - DNA, 75 bp, synthetic construct
  source 1..75: mol_type = other DNA
gcatgatgattctgatcctggcaccgaccgtccttattggtttattgctgagtactgatgaatcccctaatgatt

SEQ ID NO: 628167 - DNA, 75 bp, synthetic construct
  source 1..75: mol_type = other DNA
ccgtctcagcgcgtcgtgatgaccttaaccccatgcaggaacacctcagcatagaggcgtaccataaactcaatc

SEQ ID NO: 628168 - DNA, 75 bp, synthetic construct
  source 1..75: mol_type = other DNA
gcaaaaaagaaaaacaatgcccacgatgagttcatatttattagaaactattttacttaattattatgataataa

SEQ ID NO: 628169 - DNA, 75 bp, synthetic construct
  source 1..75: mol_type = other DNA
cttattcctgatgggaacggtcactggaaaaaaacagatccaagaatagataaaaacagaacaactgacataaat

SEQ ID NO: 628170 - DNA, 75 bp, synthetic construct
  source 1..75: mol_type = other DNA
aatttagctagagatttagaagaaaaatatgattatcagaagtcgataaatgtttggcgtgaaatttttggtgat

SEQ ID NO: 628171 - DNA, 75 bp, synthetic construct
  source 1..75: mol_type = other DNA
agcaaaggcggcaggaagtgcaactatcaatacatctactcaatctttacgtgttggtgatcgcatccagtttac

SEQ ID NO: 628172 - DNA, 75 bp, synthetic construct
  source 1..75: mol_type = other DNA
atttcagaccgtcacgaagtagaccagtttttagcactacattcattgggtaaaccatttcaaatggacttagga

SEQ ID NO: 628173 - DNA, 75 bp, synthetic construct
  source 1..75: mol_type = other DNA
acatatctgatgtaatatacaatactgtaaatgatcataaaaacatccaaggtgatattaataacctaccttggg

SEQ ID NO: 628174 - DNA, 75 bp, synthetic construct
  source 1..75: mol_type = other DNA
aatcctacctgaccacttacggctgggttgccctgggcgcctggtaccagacctttgccaccgccaaccagcgac

SEQ ID NO: 628175 - DNA, 75 bp, synthetic construct
  source 1..75: mol_type = other DNA
aacagctttactggccgttcactggtgagaagcagtatcaggcggatgatctgaaactgaaacttaccggcaaaa

SEQ ID NO: 628176 - DNA, 75 bp, synthetic construct
  source 1..75: mol_type = other DNA
aaatgcctccttctgaacaggttgaagaagaggaagatagcggtccgctggatctctccacgccgtatcccatca

SEQ ID NO: 628177 - DNA, 75 bp, synthetic construct
  source 1..75: mol_type = other DNA
gtgcccaattgtctccacagattcatgcggaagaataatgaggctatttatgatgattattttgaagagaacttg

SEQ ID NO: 628178 - DNA, 75 bp, synthetic construct
  source 1..75: mol_type = other DNA
ctggacagcgcagcacaggaatttgtgtcagcgtaccggacccgacgcgacacgggtaacggcaacctgccggat

SEQ ID NO: 628179 - DNA, 75 bp, synthetic construct
  source 1..75: mol_type = other DNA
ttacctgaggctgcaaaggcttttatggaagcagccgctccaccgctctacttcctgctgtttttgctgttctgt

SEQ ID NO: 628180 - DNA, 75 bp, synthetic construct
  source 1..75: mol_type = other DNA
atgctgaatgcatcaccagtgagcgctgctatggaaagaggcattgttcattcgaacagacctgatttacctcct

SEQ ID NO: 628181 - DNA, 75 bp, synthetic construct
  source 1..75: mol_type = other DNA
ctttgcactctgtgcatcacccgaaagaaggtccgcctgatgcctatcaggccagagtatctggctggaagcagc

SEQ ID NO: 628182 - DNA, 75 bp, synthetic construct
  source 1..75: mol_type = other DNA
ggcgatcaacgctaccttctagaaatagatacctcagacaaccggaagaccatgtcaacgcggatcatgggcttc

SEQ ID NO: 628183 - DNA, 75 bp, synthetic construct
  source 1..75: mol_type = other DNA
atgaaaaaaaacaaacggccaggcagggttaaaagtgctctgctcaactggcttggtgtgcctatcagcctgact

SEQ ID NO: 628184 - DNA, 75 bp, synthetic construct
  source 1..75: mol_type = other DNA
gcataaccctgaatcctgaagatgcgcagatgctggaatcacgctcattcagcatcgaggaaatctgccgctggt

SEQ ID NO: 628185 - DNA, 75 bp, synthetic construct
  source 1..75: mol_type = other DNA
gcgccgatcacattgatgacggtttacagtgagaaggtggaaacggtggagcaagctgatccccaaccgggggag

SEQ ID NO: 628186 - DNA, 75 bp, synthetic construct
  source 1..75: mol_type = other DNA
gtctggtattcagcttgtacagtgggttatctatagcagcggatccagttattacaggtaacaagggaaatatag

SEQ ID NO: 628187 - DNA, 75 bp, synthetic construct
  source 1..75: mol_type = other DNA
cagactgatgcattgggaagaactagttcagcagaagggatactagttgcttcgaaaagcgacagaaacacttat

SEQ ID NO: 628188 - DNA, 75 bp, synthetic construct
  source 1..75: mol_type = other DNA
aatccttgctgtcgcagcactgggagccgtgacaggtgggatgaggaaatcaggtacttcaacggcaagtaaaaa

SEQ ID NO: 628189 - DNA, 75 bp, synthetic construct
  source 1..75: mol_type = other DNA
gatttgtgataagatgggttttatcatgatagaaaaaaacagggaactggtaacccacccattcggcatacatta

SEQ ID NO: 628190 - DNA, 75 bp, synthetic construct
  source 1..75: mol_type = other DNA
cctggctggcgtggcactcagataactggactcccccctcaacatggaaagaaggtgtcgccggcgtcctgatgg

SEQ ID NO: 628191 - DNA, 75 bp, synthetic construct
  source 1..75: mol_type = other DNA
cttcaatttcgatcaagccaatcagcaactaaatatcaccattccgcaagcctggctggcgtggcactcagaaaa

SEQ ID NO: 628192 - DNA, 75 bp, synthetic construct
  source 1..75: mol_type = other DNA
gcgtgagttccgtctggtactgaccacacaggcacagcgggcggaagaggcccgcacctcttcgctatcttcttc

SEQ ID NO: 628193 - DNA, 75 bp, synthetic construct
  source 1..75: mol_type = other DNA
atgttcatgctgattttaaattctggcttccggaaggacggctggaacgatgctcgcggcagcaggcagaacttt

SEQ ID NO: 628194 - DNA, 75 bp, synthetic construct
  source 1..75: mol_type = other DNA
tccgtatttttatgaaaaattataatatgaaacaaacttgtaaatcaatggcgatatatgttatatatattttaa

SEQ ID NO: 628195 - DNA, 75 bp, synthetic construct
  source 1..75: mol_type = other DNA
cggataaaccagaagatgttggacagtataccacactgatgagtgatgaaaaatggcgatatggctattcgttac

SEQ ID NO: 628196 - DNA, 75 bp, synthetic construct
  source 1..75: mol_type = other DNA
atatgagggccgaatcattgaacccaaatggggatccttgcgcatactacaagaagctcttattgctaaaagtgc

SEQ ID NO: 628197 - DNA, 75 bp, synthetic construct
  source 1..75: mol_type = other DNA
tacactgaaaccggtgaccagtattttgtccacggcaccaggagggccggtaagtaccactctggcatttgatgt

SEQ ID NO: 628198 - DNA, 75 bp, synthetic construct
  source 1..75: mol_type = other DNA
cagcgaatagcgctgttatcaccatccctgtgaccataatcaaccagcagagtacctgtaaagtgagttttgagg

SEQ ID NO: 628199 - DNA, 75 bp, synthetic construct
  source 1..75: mol_type = other DNA
gcgaagctccgtgagcgtgatgcagacagcatttttgcagccacccgtgaagcgattctggccgttcatgaaaag

SEQ ID NO: 628200 - DNA, 75 bp, synthetic construct
  source 1..75: mol_type = other DNA
ccaagccatggatttgaaaatgccccagtagatcgttttccgtataacagcccgtccctgtgggtgccaggggtg

SEQ ID NO: 628201 - DNA, 75 bp, synthetic construct
  source 1..75: mol_type = other DNA
tctctggatgtgacgaccgaacgtaccagcgaaaacgtactgatggcgacagttacactgagggaaataatcacc

SEQ ID NO: 628202 - DNA, 75 bp, synthetic construct
  source 1..75: mol_type = other DNA
atgatggtcctgtaatcgatgctcatcatcatttctgggatccgataaaaaacgatcatccttggttgaaaccgg

SEQ ID NO: 628203 - DNA, 75 bp, synthetic construct
  source 1..75: mol_type = other DNA
gtataacatcggtaaaaattttgatggtctgatcgaagcctggaaagaagatctgtttatcgactggctgtttga

SEQ ID NO: 628204 - DNA, 60 bp, synthetic construct
  source 1..60: mol_type = other DNA
atgcgacgctggcgcgtcttatcaggcctacaccgctgtgaagtgctccaccccgtaggt

SEQ ID NO: 628205 - DNA, 75 bp, synthetic construct
  source 1..75: mol_type = other DNA
aaatcaacagaaaaagacctggcagtaaacgccattgctcacgccattctgggcggtgcagtagcggcaatgcag

SEQ ID NO: 628206 - DNA, 75 bp, synthetic construct
  source 1..75: mol_type = other DNA
ctgatggacacatcagaaaaggaaaaagaaacatattccattaaaactggtgatatttttttaaccagaactagt

SEQ ID NO: 628207 - DNA, 75 bp, synthetic construct
  source 1..75: mol_type = other DNA
taactatattgatggcgagtttcactgcaccagtgaaacgtacccggcaaaacagatcacccactggatgttagt

SEQ ID NO: 628208 - DNA, 75 bp, synthetic construct
  source 1..75: mol_type = other DNA
cacgttatacaaccgttttgttgtcaatttacagcaaactggctgtcatctggtggtactggcaggaaaccatga

SEQ ID NO: 628209 - DNA, 75 bp, synthetic construct
  source 1..75: mol_type = other DNA
taccatgaagggcaatacacctctgcgggcttgtcgttacagggcggcgcaacgcttactgcccacggtggcgca

SEQ ID NO: 628210 - DNA, 75 bp, synthetic construct
  source 1..75: mol_type = other DNA
attgagctatataccgatgtgacatgggaatcattcagcgcactgcacaataaaattaatccgtataaggaaaac

SEQ ID NO: 628211 - DNA, 75 bp, synthetic construct
  source 1..75: mol_type = other DNA
ctgtttatagtgttgatgataccgatatccccgctattactggtctggataattggaaggacatttgaaccagtt

SEQ ID NO: 628212 - DNA, 75 bp, synthetic construct
  source 1..75: mol_type = other DNA
cttcgatggcgatcctgtattcaatgccgctattgatgagtatttcaacggtcccaaagaatttcgcgataagtt

SEQ ID NO: 628213 - DNA, 75 bp, synthetic construct
  source 1..75: mol_type = other DNA
aatttcaattagcatcgctcgcgccgaacatggcggcaatacgaagcgaaatgttggctgtaatggggtcaaaca

SEQ ID NO: 628214 - DNA, 75 bp, synthetic construct
  source 1..75: mol_type = other DNA
ttggctgtaatgggttcggcggggtcgctgggcgtatatctggcaaacgtcgataaactacaagggcatgaatcc

SEQ ID NO: 628215 - DNA, 75 bp, synthetic construct
  source 1..75: mol_type = other DNA
aaaatcgttgtactctggtttttgtatccgagccagattaaaaacagatgattttctccctctgtttttggctta

SEQ ID NO: 628216 - DNA, 75 bp, synthetic construct
  source 1..75: mol_type = other DNA
ggaaagttgaactcgatgacacgctagtcctttctgatgaaagctatcataggcaatacatggatttataccatt

SEQ ID NO: 628217 - DNA, 75 bp, synthetic construct
  source 1..75: mol_type = other DNA
caagccgataaatcagacatcgccacaaacgcattcacagcgcaacagcaggcaccaaatccgcgagaatatttc

SEQ ID NO: 628218 - DNA, 75 bp, synthetic construct
  source 1..75: mol_type = other DNA
tctggaaaaaggtttctccatcgacctgtgggcgatgccggtacaacgtccgtataacccgaacgctcgccgcat

SEQ ID NO: 628219 - DNA, 75 bp, synthetic construct
  source 1..75: mol_type = other DNA
aatatgtggcgctgcaattcctgcgtaactccgacatcgcggcgaaaggcgttctgccaacctgtcaggataccg

SEQ ID NO: 628220 - DNA, 75 bp, synthetic construct
  source 1..75: mol_type = other DNA
cgtttatgctgcgtccggctcaccaacaacaggtggccgacattctgcgtgacccggaggccagcgaaaatgata

SEQ ID NO: 628221 - DNA, 75 bp, synthetic construct
  source 1..75: mol_type = other DNA
actgatgatgagcaggccaaacggggctttttctcccgctttttcacttcgtcacctcacaaacaggaagaggca

SEQ ID NO: 628222 - DNA, 75 bp, synthetic construct
  source 1..75: mol_type = other DNA
cagccgtgaccggtgggttgggtaaaggcgggaagcctgcggctggaaccgcagggaaaaatatcgttgtggttg

SEQ ID NO: 628223 - DNA, 75 bp, synthetic construct
  source 1..75: mol_type = other DNA
ggagcgccttcacctgaggaacgcgaaagccaactcgagaccctacaactcctcgacagcatgctggacgggcta

SEQ ID NO: 628224 - DNA, 75 bp, synthetic construct
  source 1..75: mol_type = other DNA
gcttgactgtttttatcttctcctttagtggtgcaacatttgcggccccaaaaggtatctgcacctcagataatg

SEQ ID NO: 628225 - DNA, 75 bp, synthetic construct
  source 1..75: mol_type = other DNA
taactttgattttgcagcgatgcgcctgaacatcactattcctcagatagcgttgttgagtagcgctcacggtta

SEQ ID NO: 628226 - DNA, 75 bp, synthetic construct
  source 1..75: mol_type = other DNA
ggcaagaaaacttgccatgatgaatatggcggcggcggtgatcaccttaatggctgctgccgtcgcattcattgc

SEQ ID NO: 628227 - DNA, 75 bp, synthetic construct
  source 1..75: mol_type = other DNA
ctgaaatcagagctgcaaagctcgctgatgcaatgggacttcacggccaaggataaggctgaccgtattcttaac

SEQ ID NO: 628228 - DNA, 75 bp, synthetic construct
  source 1..75: mol_type = other DNA
aattctggctcagtggtatcgctgtcaccgacacaccggccagcattaacaccacccgcctgcacttttcacagg

SEQ ID NO: 628229 - DNA, 75 bp, synthetic construct
  source 1..75: mol_type = other DNA
attcggcgacaggatccagctcaaagcccgcattgtgccgaaccgtttcctcctggaagccaacaaggccggaca

SEQ ID NO: 628230 - DNA, 75 bp, synthetic construct
  source 1..75: mol_type = other DNA
aaatagcctggtattcttcgatacagcaagagccgaatggccggaagaccgtcactacacagcgatttgttcagg

SEQ ID NO: 628231 - DNA, 75 bp, synthetic construct
  source 1..75: mol_type = other DNA
aagaatagaagcgctgacagtcgatgaggcctatgagtactgggtgaagcattactgtatcccggaggggctcat

SEQ ID NO: 628232 - DNA, 75 bp, synthetic construct
  source 1..75: mol_type = other DNA
aataagggggaggtcgttctgaaccgccccgggtttcctggagagtgttttatctgtgaactcaggctgccagat

SEQ ID NO: 628233 - DNA, 75 bp, synthetic construct
  source 1..75: mol_type = other DNA
cagcagcggcgataaccaacttgaagggcgcggcggcaacgacacgctcaacatcggcaacggcggccatgacac

SEQ ID NO: 628234 - DNA, 75 bp, synthetic construct
  source 1..75: mol_type = other DNA
tgattgtcggcgcgggtcaggccggtattgctatgagtgaacatctggcgcagatgggcgtgcctcacgtcgtcc

SEQ ID NO: 628235 - DNA, 75 bp, synthetic construct
  source 1..75: mol_type = other DNA
cagagatgcagttaaatgaaaaaggatattattttgccgtactggtattaggactgttggatttgcccctatatt

SEQ ID NO: 628236 - DNA, 75 bp, synthetic construct
  source 1..75: mol_type = other DNA
tacaaaatgggccaacgattttaacattagctcagattctttgtgccatgagacatatgcgcaccattaaagaag

SEQ ID NO: 628237 - DNA, 75 bp, synthetic construct
  source 1..75: mol_type = other DNA
caacgtcattatggtcgggattgtcgcgctgtcggcgctgttctttgatttagtcaccgccacagcgttaattaa

SEQ ID NO: 628238 - DNA, 75 bp, synthetic construct
  source 1..75: mol_type = other DNA
acaggatgaggtgcagtattacccgaaagcgcttgcagagctggaagcggtggcagcggaaatcctgaagcgtgc

SEQ ID NO: 628239 - DNA, 75 bp, synthetic construct
  source 1..75: mol_type = other DNA
gagacccgtttaccgggcacgtggcgtgcatgtggtccgatgctatggacatcatctccgggtatcagacaggca

SEQ ID NO: 628240 - DNA, 75 bp, synthetic construct
  source 1..75: mol_type = other DNA
gggcagtatgttgaagtggtgatcaacggcaaaacctacacctctgaaccgggcggcgcggtagtggtcgatccg

SEQ ID NO: 628241 - DNA, 75 bp, synthetic construct
  source 1..75: mol_type = other DNA
gtggggcgtatctgtggtatctggtacgtcgttatcgcaaagtaccgctgtacgagggtgacagaacgccggtga

SEQ ID NO: 628242 - DNA, 75 bp, synthetic construct
  source 1..75: mol_type = other DNA
ctcggtctggtatgggcttcgttaggcggcgcatatttgtggtatctgatccgccgctatcgcaaagtgccgctg

SEQ ID NO: 628243 - DNA, 75 bp, synthetic construct
  source 1..75: mol_type = other DNA
gggctttaaatttgatttcagttggttacaggttgatgcattcgatgaaaaaggcctgccgtttcataaacgcgg

SEQ ID NO: 628244 - DNA, 75 bp, synthetic construct
  source 1..75: mol_type = other DNA
ctccgggctcattgttatggaggacactcaggccattgacactatccttgatgagcatgccactatgcaatcgct

SEQ ID NO: 628245 - DNA, 75 bp, synthetic construct
  source 1..75: mol_type = other DNA
cgtttcgctcgaaaatagcgcatggaccatcattgccgatatcactacgacgaaccaaaacactcgcctcaactt

SEQ ID NO: 628246 - DNA, 75 bp, synthetic construct
  source 1..75: mol_type = other DNA
aaagaaataaaagattctaaatactttaattttaagggtaacataattagtactcatatatgttacgaagggcta

SEQ ID NO: 628247 - DNA, 75 bp, synthetic construct
  source 1..75: mol_type = other DNA
cgggatgtcgaaaacagctatctggcctcggatgcggtggatgacgacccgatgacacccctgctggggcactcg

SEQ ID NO: 628248 - DNA, 75 bp, synthetic construct
  source 1..75: mol_type = other DNA
agcggctggcggcacagatagagccggtttatttacctgagcgaaaaattcatctttatcactgtgaccaccggg

SEQ ID NO: 628249 - DNA, 75 bp, synthetic construct
  source 1..75: mol_type = other DNA
tgtttgggttagggctacttttctcaagtaaattaggcggactggttgtcgccttattttttgtgcccatttata

SEQ ID NO: 628250 - DNA, 75 bp, synthetic construct
  source 1..75: mol_type = other DNA
gcaggtctagagtccctctttttgagcttttcgaacttaaaggatacctggttcaataagcaagtcatgctgcct

SEQ ID NO: 628251 - DNA, 75 bp, synthetic construct
  source 1..75: mol_type = other DNA
aaaaaactaacgccaaaaggtaaggcgaaatacttttaccgcaaactcatattaatattaaaggcggtgatatat

SEQ ID NO: 628252 - DNA, 75 bp, synthetic construct
  source 1..75: mol_type = other DNA
gtaaagaaaatgaaatagatgaatgtaaagaaagcgttgttaaacaaactattgataagaagcaaatcatttttg

SEQ ID NO: 628253 - DNA, 75 bp, synthetic construct
  source 1..75: mol_type = other DNA
gatgaccgcgtagatgcttttactgttcataacaacaggccagtaatcatccgaaataacgtcaaaaagagtata

SEQ ID NO: 628254 - DNA, 75 bp, synthetic construct
  source 1..75: mol_type = other DNA
attatcgtggtgactgcttaaaattagctcgtcaggctaaaggggttacgggcgaagagcttgctactgctttgg

SEQ ID NO: 628255 - DNA, 75 bp, synthetic construct
  source 1..75: mol_type = other DNA
taatcgttatcaatgattcgctgctgctaccctatgagcagccatggtatggagcgctggctgagctttgctttg

SEQ ID NO: 628256 - DNA, 75 bp, synthetic construct
  source 1..75: mol_type = other DNA
tccaaaaggggatacgggagacacaggcccggcaggaccacagggaccgtcaggaagtcctgacagcggactgtt

SEQ ID NO: 628257 - DNA, 75 bp, synthetic construct
  source 1..75: mol_type = other DNA
aaagcgatctggttgtgggcgacggtgacaaaaaagcaaaaggctttttatccgtaccccgtgcagagaagaacg

SEQ ID NO: 628258 - DNA, 75 bp, synthetic construct
  source 1..75: mol_type = other DNA
tcgtggatttttccgatgtggacatcctttcatggctgacgggtgagattggcgacaccttcacggaaaccgaag

SEQ ID NO: 628259 - DNA, 75 bp, synthetic construct
  source 1..75: mol_type = other DNA
tattctccatatttttctggcacagaagaactggttcagcatctggcgaacgcacagaaaaatccaaacgatcca

SEQ ID NO: 628260 - DNA, 75 bp, synthetic construct
  source 1..75: mol_type = other DNA
gttgttagaaagagttgctgctcttgcaaaggagtatgagggaacaggattaactcaagggatgttaaacgggag

SEQ ID NO: 628261 - DNA, 75 bp, synthetic construct
  source 1..75: mol_type = other DNA
gtatcttactgatagcatgaagcgttatggtggtgatattgcaaaagttctggcccagtataatggaggcaatgc

SEQ ID NO: 628262 - DNA, 75 bp, synthetic construct
  source 1..75: mol_type = other DNA
ttacgcgctaaagctgaatccctcgataaagacatttcccgccttgaagccattgcagacgaagagcgcagcaag

SEQ ID NO: 628263 - DNA, 75 bp, synthetic construct
  source 1..75: mol_type = other DNA
gtaccgcaaaaaagctgtatgggtgatgaactcaaatacagccgcctccgcacaaaaactgaaaaatgccactgg

SEQ ID NO: 628264 - DNA, 75 bp, synthetic construct
  source 1..75: mol_type = other DNA
tgaaggatgagacgacaggtgagtttaaggagaatttagagtctgctatatctgcaattaaagatgcgatagact

SEQ ID NO: 628265 - DNA, 75 bp, synthetic construct
  source 1..75: mol_type = other DNA
atattattgtaggtatttacagcaaaaaaaatgaagaaaaatcatttgagtatatgtactcttatctgacaagga

SEQ ID NO: 628266 - DNA, 75 bp, synthetic construct
  source 1..75: mol_type = other DNA
cccgcgcaataattgagcttcaggtgcgacaatcgccgggttccgacatactggcacaactcgccggaacgcaac

SEQ ID NO: 628267 - DNA, 75 bp, synthetic construct
  source 1..75: mol_type = other DNA
ttatcgacttcctaaaaatatgatgtctgcaattgcagaagccgaatcatcgtggaatcccctagcgaaaggaag

SEQ ID NO: 628268 - DNA, 75 bp, synthetic construct
  source 1..75: mol_type = other DNA
tgacactggacgttaatgaagaacgtcttaagcgacttgaggcgatatttgaaaagtatcgcaacgggctgatga

SEQ ID NO: 628269 - DNA, 75 bp, synthetic construct
  source 1..75: mol_type = other DNA
aaagggcgctttgttggcagcggaaaaacacctgattcgctggtgagcaactataaaggtcgcggcgaaacgatg

SEQ ID NO: 628270 - DNA, 75 bp, synthetic construct
  source 1..75: mol_type = other DNA
cctgacggacggcaagggcactcaccgttattactatgatcctgacggcaatattctgcgggaagaagcgccgga

SEQ ID NO: 628271 - DNA, 75 bp, synthetic construct
  source 1..75: mol_type = other DNA
taaaatgccgctgccgggcagcgtggtgggttccgtcagtccggaagatctgatgaaaacgctgccgaagcgtaa

SEQ ID NO: 628272 - DNA, 75 bp, synthetic construct
  source 1..75: mol_type = other DNA
atgacaatagaacataataacgcccttcgcagcattgcccgtcaggctaattatgaaatcaaaaaagccagacag

SEQ ID NO: 628273 - DNA, 75 bp, synthetic construct
  source 1..75: mol_type = other DNA
gatagatcgctggtatgacacgactgttgactgctcagaagattcattctggctggacgttaaaggggattctat

SEQ ID NO: 628274 - DNA, 75 bp, synthetic construct
  source 1..75: mol_type = other DNA
ctatgatgagcgcggcctgctcagcaacatcaccgacccagccggcagacgtggacacagcagtgtgatgaacgc

SEQ ID NO: 628275 - DNA, 75 bp, synthetic construct
  source 1..75: mol_type = other DNA
ataaggcgagtgattatgtggaggagaaacagaaccagcttgaatcatggataaacagcttttgtgacacggacg

SEQ ID NO: 628276 - DNA, 75 bp, synthetic construct
  source 1..75: mol_type = other DNA
agatgtagaaacggggctggataaacttggtaagtacgttaatggcccggattttaataacgacctgaacaattt

SEQ ID NO: 628277 - DNA, 75 bp, synthetic construct
  source 1..75: mol_type = other DNA
gtgagaactttaaaaggattctgacagatgtagaaacggggctggataaacttggtaagtacgttaatggcccgg

SEQ ID NO: 628278 - DNA, 75 bp, synthetic construct
  source 1..75: mol_type = other DNA
tttgccagcttcccgacgatgctggaagtaaccggctcatttaaaccgtctggtctgtttcctccggctctacaa

SEQ ID NO: 628279 - DNA, 75 bp, synthetic construct
  source 1..75: mol_type = other DNA
tttttatgtattgtgaaggaaacagcccaaaaaattcaaagctagcccccgatctctatgtaaatatggaaagaa

SEQ ID NO: 628280 - DNA, 75 bp, synthetic construct
  source 1..75: mol_type = other DNA
gctacgtaatagcatcgctatttttgtgctaaccacgctgttctattttattggtgcagagttacgactggttca

SEQ ID NO: 628281 - DNA, 75 bp, synthetic construct
  source 1..75: mol_type = other DNA
tactatatgaaaaaacgaaatgattacatcaaatttttagagtatctggacaaacaaaaaagagctataagatta

SEQ ID NO: 628282 - DNA, 75 bp, synthetic construct
  source 1..75: mol_type = other DNA
actggaacctgaccaatagggggtgcggacgatttcttggacggtttatacggacatcaatccgaccgcatgacg

SEQ ID NO: 628283 - DNA, 75 bp, synthetic construct
  source 1..75: mol_type = other DNA
aaatgtacaagtaaaggacctgtactctttaagcagattagatatgggatggatggtaaaccaataaaagtttgg

SEQ ID NO: 628284 - DNA, 75 bp, synthetic construct
  source 1..75: mol_type = other DNA
aaatcaccgcctatcgtgtccgctatgcgtcaggttttcagactgtcgcactatcatcccgtcctgcgaatattc

SEQ ID NO: 628285 - DNA, 75 bp, synthetic construct
  source 1..75: mol_type = other DNA
cgacattattttagcggcattgccgaagtgggtcatatctcccgcctgattcaggatttcgacggtatttttaat

SEQ ID NO: 628286 - DNA, 75 bp, synthetic construct
  source 1..75: mol_type = other DNA
tatcatcagcgaatcttatcactgcggagctggttgaacgactttctgagcgaaataagtcggttcccggtaaca

SEQ ID NO: 628287 - DNA, 75 bp, synthetic construct
  source 1..75: mol_type = other DNA
atggcagattatggatttacccgtaccttaattgtcactgacaatatgttaacgaaattaggtatggcgggtgat

SEQ ID NO: 628288 - DNA, 75 bp, synthetic construct
  source 1..75: mol_type = other DNA
aattttttggtaatgttggtgattttccaaatgattggtgggattaccgacttttatcgctcatggcgaggaatt

SEQ ID NO: 628289 - DNA, 75 bp, synthetic construct
  source 1..75: mol_type = other DNA
gacaggtctttgtttttctataataggattatttctatttgttgttttgaagcaagaattatttacagtatttgc

SEQ ID NO: 628290 - DNA, 75 bp, synthetic construct
  source 1..75: mol_type = other DNA
cacctgttcatcttaaagatgccgttattggagtttgtggaacgtggttgtttcttactataattacatctcttt

SEQ ID NO: 628291 - DNA, 75 bp, synthetic construct
  source 1..75: mol_type = other DNA
tcaggatttcgacggtattttcaatcaaaccatgcgtaacaccaggaatttgaataacagaagtcttcgggtgaa

SEQ ID NO: 628292 - DNA, 75 bp, synthetic construct
  source 1..75: mol_type = other DNA
tgagccgggtaagccaggcagtgggattgtggtgaatatcctgtttaaaattaacggcaccaccgaaattcagta

SEQ ID NO: 628293 - DNA, 75 bp, synthetic construct
  source 1..75: mol_type = other DNA
tataaaaaactgccatgtgataccttttggcccggcaatttccatttctggatttgttatatatttattcatcgc

SEQ ID NO: 628294 - DNA, 75 bp, synthetic construct
  source 1..75: mol_type = other DNA
cagaactattgccgaaaaacgaactttctcaagggataagttcgttgcgatggacaacgacagggcttgctgcaa

SEQ ID NO: 628295 - DNA, 75 bp, synthetic construct
  source 1..75: mol_type = other DNA
gcggcgatttcacctcaaacggcatcacagtgcatacgcataagcacggtggcgttaaaggtggcagcgattcga

SEQ ID NO: 628296 - DNA, 75 bp, synthetic construct
  source 1..75: mol_type = other DNA
tggactggaagtctatggccgggcgatggtttcgcaggatcgtcagttagtttcattacccgatttctcacatta

SEQ ID NO: 628297 - DNA, 75 bp, synthetic construct
  source 1..75: mol_type = other DNA
tgttgcgtccgcaggagatttccaataacccggaaatcatccgtcgtctgggcgtcatcgctctgaacgtcggcc

SEQ ID NO: 628298 - DNA, 75 bp, synthetic construct
  source 1..75: mol_type = other DNA
gacggtcaccacgcagccggacggtacggtggagatctcagtcaccagtcagacggcgggagtcagtacagtcac

SEQ ID NO: 628299 - DNA, 75 bp, synthetic construct
  source 1..75: mol_type = other DNA
acagcggtatgatattttatccaggagatggtcatctctcgatagcgtcacgttcatccgcattgtgtttgcaag

SEQ ID NO: 628300 - DNA, 75 bp, synthetic construct
  source 1..75: mol_type = other DNA
agacggtcagcgtgttggcggacaacggcgcaacgacagccccgacggtcatcacagagccggacgggacgttgg

SEQ ID NO: 628301 - DNA, 75 bp, synthetic construct
  source 1..75: mol_type = other DNA
tacgcactgaatgtcatgcatccagacacttgtacgccgttctcgggtcagtccggtatgtcgattggtgaaggc

SEQ ID NO: 628302 - DNA, 75 bp, synthetic construct
  source 1..75: mol_type = other DNA
ttccagcgtttcaacgctgctgggcttacagggtggggttgaactggtggcgaccgcgtgtaccgccagcccgaa

SEQ ID NO: 628303 - DNA, 75 bp, synthetic construct
  source 1..75: mol_type = other DNA
cattgttggccaggaagagtcgtatccccaacatctcttcctgtagcaataaaacatataagagatgtcttcaga

SEQ ID NO: 628304 - DNA, 75 bp, synthetic construct
  source 1..75: mol_type = other DNA
tcagcggggccagcgcctccagcctgacaatctcggccgattccctgcgcaagatttacgacaatatggattact

SEQ ID NO: 628305 - DNA, 75 bp, synthetic construct
  source 1..75: mol_type = other DNA
agtctcagcggctgggagaatctaccaaaagggttgacggatacagggaaggcggccacatcctgggtgaaatac

SEQ ID NO: 628306 - DNA, 75 bp, synthetic construct
  source 1..75: mol_type = other DNA
caccggagcaaatcgactacgtcaacgcgcacggtacgggtactgaagccaatgaccgtatcgaaacgctggcaa

SEQ ID NO: 628307 - DNA, 75 bp, synthetic construct
  source 1..75: mol_type = other DNA
gcagcccggcagtcacaatgacgtaccttgatattactcaggatgaggttaaccagacctaccacaagctgaaca

SEQ ID NO: 628308 - DNA, 75 bp, synthetic construct
  source 1..75: mol_type = other DNA
gatctcaccattaacaccgtcgcgggcgatgacatcatcaacgccatcgaacatggtcaggcgctggtcgtcagc

SEQ ID NO: 628309 - DNA, 75 bp, synthetic construct
  source 1..75: mol_type = other DNA
agcggccaggtaacgggcgcggcggcgggggatacggttaccgttacgctgggtggcaacacctataccgccacg

SEQ ID NO: 628310 - DNA, 75 bp, synthetic construct
  source 1..75: mol_type = other DNA
aaggcgcggcgttaacgctctccggcagcacgtcaggcgtcgaagcggggcagaccgttactattacctttggcg

SEQ ID NO: 628311 - DNA, 75 bp, synthetic construct
  source 1..75: mol_type = other DNA
accaccctcaccaccaacggtacgcagtggacttacaccgacagccgcacgctgaccgacggcagctacgtttac

SEQ ID NO: 628312 - DNA, 75 bp, synthetic construct
  source 1..75: mol_type = other DNA
tcgataccaccagcccggaagcggcgaaaagcatcaccattaccggtatcagcgatgacaccggagccagcagca

SEQ ID NO: 628313 - DNA, 75 bp, synthetic construct
  source 1..75: mol_type = other DNA
ggcggcacttatgcggcaactaacgtggtcacgctgacgggcgtgcataccgaccttgccactttgctggcgaat

SEQ ID NO: 628314 - DNA, 75 bp, synthetic construct
  source 1..75: mol_type = other DNA
tgattttgtcctgacggttgatacctctattccaaccacgctggcgcaaattaccagccagaccacgcgcgatac

SEQ ID NO: 628315 - DNA, 75 bp, synthetic construct
  source 1..75: mol_type = other DNA
ttaccagcgacacctcgcttaccgtgcgcggcgtattgggggcggcgctcggcgctaacgagttcgcgcaaatca

SEQ ID NO: 628316 - DNA, 75 bp, synthetic construct
  source 1..75: mol_type = other DNA
agcactggcggagaggcgggagatgtcgtcagcgtcacgctaaacaataaaacctacaccacgacgctggatgcc

SEQ ID NO: 628317 - DNA, 75 bp, synthetic construct
  source 1..75: mol_type = other DNA
cgaccgacgatattatcaacgctgccgaagcgggcaatgcgcaaaccatcagcggccaggtaacgggcgcggcgg

SEQ ID NO: 628318 - DNA, 75 bp, synthetic construct
  source 1..75: mol_type = other DNA
accgacgcggcaggcaacagcgatgacgccagccgcacggtcaccgtgaatctcaccgcgccaaccattggcatc

SEQ ID NO: 628319 - DNA, 75 bp, synthetic construct
  source 1..75: mol_type = other DNA
tgggcgaagccacctacagcgtgacggcgagcgtcaccaatgctcagggtaacagcagcaccgccagccataacg

SEQ ID NO: 628320 - DNA, 75 bp, synthetic construct
  source 1..75: mol_type = other DNA
gatgtttctgtttgtatattagatacaggtgttaactacaataatccactattatctagatttactaactcatca

SEQ ID NO: 628321 - DNA, 75 bp, synthetic construct
  source 1..75: mol_type = other DNA
cccgaaaatcctggtcaatgaagacagcctgaccgtcggcggcgcaagtacacgcggtgaatggtacaaagcgcg

SEQ ID NO: 628322 - DNA, 75 bp, synthetic construct
  source 1..75: mol_type = other DNA
ctgagtcgatggacatgcctgaaaccagtacgaaaaaagcaggcaagaaaggcaataaatcaaaggcaaaaacgg

SEQ ID NO: 628323 - DNA, 75 bp, synthetic construct
  source 1..75: mol_type = other DNA
cattctggccgaaatgatgatggaagggctgtatggtcgctccggtgactgggcgtatcgcgttggtttaccggg

SEQ ID NO: 628324 - DNA, 75 bp, synthetic construct
  source 1..75: mol_type = other DNA
ccattgtctatcgggctactttgcccagcattgaagcggttgaaggccacctgcaggaattgccctactctgaac

SEQ ID NO: 628325 - DNA, 75 bp, synthetic construct
  source 1..75: mol_type = other DNA
cagccgtgctgcgcagaacccgctcgccggtaaaaaagaccagccgggcgacctcttctcggtggcctcccttgc

SEQ ID NO: 628326 - DNA, 75 bp, synthetic construct
  source 1..75: mol_type = other DNA
gaaaaacctacagactgcgaatcccgtcaaaaggcacagcagaagaggcctcaatgacggcacagcagcacgaaa

SEQ ID NO: 628327 - DNA, 75 bp, synthetic construct
  source 1..75: mol_type = other DNA
ctgtttcgcccgttcatctgtcgggcgctggattaactggttcacacagtcgggtgttgatggactgaaatcatt

SEQ ID NO: 628328 - DNA, 75 bp, synthetic construct
  source 1..75: mol_type = other DNA
cggatgagaagccgtcacctgatacaccatcaaaaccgtccacgccacccgcagacaccacgacgatgagtacgc

SEQ ID NO: 628329 - DNA, 75 bp, synthetic construct
  source 1..75: mol_type = other DNA
agccacggttgctggggggaagtggttatctacgacaaacgcttgctgaccaaaaattatggcaagcgactactg

SEQ ID NO: 628330 - DNA, 75 bp, synthetic construct
  source 1..75: mol_type = other DNA
atgttccgtggtatagagttgccgttactaacggtgttaatgattttactgaaactacttcatttactggtaaaa

SEQ ID NO: 628331 - DNA, 75 bp, synthetic construct
  source 1..75: mol_type = other DNA
ggtaactggattaaactattaacacctggtgattatggattgggtagtaataatactacaatttatcctactgat

SEQ ID NO: 628332 - DNA, 75 bp, synthetic construct
  source 1..75: mol_type = other DNA
cgctttaacctgcgcacctccaataccgaaccggtggtgcgcctgaatgtggaatcgcgcggtgatgtgccgctg

SEQ ID NO: 628333 - DNA, 75 bp, synthetic construct
  source 1..75: mol_type = other DNA
atcagaatctttgatttccgcaaaacaatcaccgcagataaaacgatcattgtcagagccagagtgctcatcgat

SEQ ID NO: 628334 - DNA, 75 bp, synthetic construct
  source 1..75: mol_type = other DNA
tagacttggcattttcttatttttcaaagccagccatttttggtactttagcagcaaagttcgcaagaatacaaa

SEQ ID NO: 628335 - DNA, 75 bp, synthetic construct
  source 1..75: mol_type = other DNA
agtgctccaaagcaagatggatggatacatttaacagaatcaaaaaagtcgcaccggtagcaagcggctacatat

SEQ ID NO: 628336 - DNA, 75 bp, synthetic construct
  source 1..75: mol_type = other DNA
tacctgtcatagctgaacaggtagcccgcgagcaaccagagaatctgcgcacctatttcatggaacgtctacggc

SEQ ID NO: 628337 - DNA, 75 bp, synthetic construct
  source 1..75: mol_type = other DNA
ctggcgcccgtgccggcttctccggcaataacggccccggtggcgcaacctgctaagggaggcttcctgaaaaaa

SEQ ID NO: 628338 - DNA, 75 bp, synthetic construct
  source 1..75: mol_type = other DNA
ctgcaataattatcagcagcctcatagctggggggctgatatcggttactgcctggcagtatgtaaactcagcac

SEQ ID NO: 628339 - DNA, 75 bp, synthetic construct
  source 1..75: mol_type = other DNA
gcgctgaacaaatggtatgaccgcatagaacttcttgcgggtaatcatcaaaatgtggttctgttatctgtaacg

SEQ ID NO: 628340 - DNA, 75 bp, synthetic construct
  source 1..75: mol_type = other DNA
atcaactctccagaggtgaactgacaattaaccatgatggtttatcgcgtgatgaaggactggtcactttggttc

SEQ ID NO: 628341 - DNA, 75 bp, synthetic construct
  source 1..75: mol_type = other DNA
ataatagtgaatttaaatcattagctggtaactttaaagaatataacgacctaacaattgaagggaaaagaatag

SEQ ID NO: 628342 - DNA, 75 bp, synthetic construct
  source 1..75: mol_type = other DNA
tacagtgatgcgctggaggatatcaaagttactgatgttggaagaaagcaggcaaaacgtgatcgtgttttaact

SEQ ID NO: 628343 - DNA, 75 bp, synthetic construct
  source 1..75: mol_type = other DNA
gagcggcataaagcggagctgcgcaaacacatttacccttatattgggaaaatggcgctcgctgactgcgaaacc

SEQ ID NO: 628344 - DNA, 75 bp, synthetic construct
  source 1..75: mol_type = other DNA
cgtgataaatgtcgtcagtggttggcctctggtaaagacccaaagcaccaattggcgctaactactcaggaaacg

SEQ ID NO: 628345 - DNA, 75 bp, synthetic construct
  source 1..75: mol_type = other DNA
tttttaatggcgcaatccttgccggagcgatggctctgatttcaacagaagcggcggtcgcccagcccgcaccaa

SEQ ID NO: 628346 - DNA, 75 bp, synthetic construct
  source 1..75: mol_type = other DNA
caggtggagagccgctacctctacgacccgctgggccgccggacgggtaaacgggtgtggcggcgggtacgtgac

SEQ ID NO: 628347 - DNA, 75 bp, synthetic construct
  source 1..75: mol_type = other DNA
acggcaggctggcggagaagacggacctcatcccggaaggggttatccggatgcacgacgagcggacccaccact

SEQ ID NO: 628348 - DNA, 75 bp, synthetic construct
  source 1..75: mol_type = other DNA
tgatactaccggacggcaggacggtgcggtatggctataacagccagttgcaactgacttcagtgacatatccgg

SEQ ID NO: 628349 - DNA, 75 bp, synthetic construct
  source 1..75: mol_type = other DNA
gaatacatcccggagaggaaacttcatctttaccactgtgaccaccgtgggctgccgctggcgcttatcagcccg

SEQ ID NO: 628350 - DNA, 75 bp, synthetic construct
  source 1..75: mol_type = other DNA
ggcgcggggagtatgatgaatggggcaaccagcttaatgaggagaacccacatcacctgtatcagccataccgcc

SEQ ID NO: 628351 - DNA, 75 bp, synthetic construct
  source 1..75: mol_type = other DNA
ggcgtggccggataaccgcatcgcggaagatgcgcactatgtctaccgctacgatgaatacggcaggctggcgga

SEQ ID NO: 628352 - DNA, 72 bp, synthetic construct
  source 1..72: mol_type = other DNA
atgagcggaaaaccggcggcgcgtcagggcgacatgacgcagtatggcggtagcattgtccagggttcagcc

SEQ ID NO: 628353 - DNA, 75 bp, synthetic construct
  source 1..75: mol_type = other DNA
cgtgaactggcgcatgaactttcgtccatttccaggaattgggtggtaggtttgcacaagtactgggtcgacaac

SEQ ID NO: 628354 - DNA, 75 bp, synthetic construct
  source 1..75: mol_type = other DNA
gaacacctgaagcagaaattgtcaggctgagaaacaacctatgccatggcaacattctggagtttatcatgtctg

SEQ ID NO: 628355 - DNA, 75 bp, synthetic construct
  source 1..75: mol_type = other DNA
cgtcgggcgcggtgacggcggtgacggggccggacggcaggacggtgcggtatggctataacagccagcggcagg

SEQ ID NO: 628356 - DNA, 75 bp, synthetic construct
  source 1..75: mol_type = other DNA
ttggttggataagaatccaacagcatctccaggggatcgagcagcagcagaaaacgttcttcaggatttacagaa

SEQ ID NO: 628357 - DNA, 75 bp, synthetic construct
  source 1..75: mol_type = other DNA
acccggagacggaagcactgctctggcagcatgagaccagacatgcgtacaacgcgcagggactggcgaaccgct

SEQ ID NO: 628358 - DNA, 75 bp, synthetic construct
  source 1..75: mol_type = other DNA
tacggtgcaacggcggcataccagcttgccatagatccggcccgtcctctccagactctgatcctgacaggtatc

SEQ ID NO: 628359 - DNA, 75 bp, synthetic construct
  source 1..75: mol_type = other DNA
cttgatatgctaattctggacattatccgcgaagcaaagaaaactgggcaaaaaaaaaagactcaggacgctgaa

SEQ ID NO: 628360 - DNA, 75 bp, synthetic construct
  source 1..75: mol_type = other DNA
gatggctaccggtgttgcaatcaatacactgccgctaacgccaaaacgattatatgaagaattccatctggcagg

SEQ ID NO: 628361 - DNA, 75 bp, synthetic construct
  source 1..75: mol_type = other DNA
gtttattattacaatgatattttagacaggctacaaggaagaaataatgtttttacttgtaccgctgtgctgact

SEQ ID NO: 628362 - DNA, 75 bp, synthetic construct
  source 1..75: mol_type = other DNA
cttaatgtgttactcgcattcgaacgcaagacctctgtcattaccgcggtatccatgcattaccgacacacccta

SEQ ID NO: 628363 - DNA, 75 bp, synthetic construct
  source 1..75: mol_type = other DNA
ttctttgctagaagcggagaattgctttatctgatgctgaatcgaagcagtaaagctaaagaattagccgatatg

SEQ ID NO: 628364 - DNA, 75 bp, synthetic construct
  source 1..75: mol_type = other DNA
gtggttttcactcctcgcgcgtggacgctgggtgtttactttggtctgattaacggtggttacgccagcctgatt

SEQ ID NO: 628365 - DNA, 75 bp, synthetic construct
  source 1..75: mol_type = other DNA
gcgagaaaaaaagtagttaatgatttcaataacgagataatctatgctgatttagataaaataattaagtgctaa

SEQ ID NO: 628366 - DNA, 75 bp, synthetic construct
  source 1..75: mol_type = other DNA
catatgaacgttctgaacctgggtggaccataaggtcatactttgaccttatgtataatgaaaataggttcttgg

SEQ ID NO: 628367 - DNA, 75 bp, synthetic construct
  source 1..75: mol_type = other DNA
ccgatgcgttcggtaatgcgcttgccggacagacggtcagcgtgacggcaggcaacggcgcaacggttgctccga

SEQ ID NO: 628368 - DNA, 75 bp, synthetic construct
  source 1..75: mol_type = other DNA
gtttttactacaaacgttattgtacttgataaagtaaaggctttcattaaaggtcagaatgtttggctttatact

SEQ ID NO: 628369 - DNA, 75 bp, synthetic construct
  source 1..75: mol_type = other DNA
atgctgcaacaacacgctcctgccgagacgcatattcttccgcaacaggcgatacgcgatccctttgtgctcgaa

SEQ ID NO: 628370 - DNA, 75 bp, synthetic construct
  source 1..75: mol_type = other DNA
aaagaaagatattacgaaatagcaaattatactatgcctgtgaaatttcttcatttggtatgtttggcatacgta

SEQ ID NO: 628371 - DNA, 75 bp, synthetic construct
  source 1..75: mol_type = other DNA
cagatgaagcattccgacttgtaaacaaaatcccattaactaccttaccgattggttacctgccctcagcctttt

SEQ ID NO: 628372 - DNA, 75 bp, synthetic construct
  source 1..75: mol_type = other DNA
atgccgcgccttgaattgttggatggcgatgcgacgccgattccggtaaagctggatattctcgccattacctca

SEQ ID NO: 628373 - DNA, 75 bp, synthetic construct
  source 1..75: mol_type = other DNA
atgaatcaggatggaaccatcaacgtgcaaagcggcgcgacggaaatcggccagggtgccgacaccgtgttctcg

SEQ ID NO: 628374 - DNA, 75 bp, synthetic construct
  source 1..75: mol_type = other DNA
ctctggggatggataaaccggaaccagtggcgaaagtgtgctatgcacaaatggtgaaacagttcctgagtcgtg

SEQ ID NO: 628375 - DNA, 75 bp, synthetic construct
  source 1..75: mol_type = other DNA
ccgccacgctgggccgtatccgttacatcatcaaaaaccgtttcacgaaccgttatccgcgccacaagctggcag

SEQ ID NO: 628376 - DNA, 75 bp, synthetic construct
  source 1..75: mol_type = other DNA
agcggcgacgctttgtctggctgactgccgaaggagaaaagatacttgctgcggcgataccgattggtgacagcg

SEQ ID NO: 628377 - DNA, 75 bp, synthetic construct
  source 1..75: mol_type = other DNA
gctgtaaataacatggttcagtttggtgttgtagatgtaaacaatgatgtgaagaaagaattcacggtaaaactc

SEQ ID NO: 628378 - DNA, 75 bp, synthetic construct
  source 1..75: mol_type = other DNA
cgtgtttatggcgatcggatttactttttacctttccgttatcgccgatgccccgtcttcacaggcattaaccca

SEQ ID NO: 628379 - DNA, 75 bp, synthetic construct
  source 1..75: mol_type = other DNA
atgatataaattattttgttgaagagatgaatcgattgatatcaaatggaaatattcaagagatggactataaaa

SEQ ID NO: 628380 - DNA, 75 bp, synthetic construct
  source 1..75: mol_type = other DNA
gtataaagaaagaaatttatttcttttctcaaaaggtgacaagataacaattgaagataatgttattgctgaaga

SEQ ID NO: 628381 - DNA, 75 bp, synthetic construct
  source 1..75: mol_type = other DNA
tgagtctttaagagaaatatctgacattagcatcgatcacaaaatatctctcttacaacaaaatggggctcatct

SEQ ID NO: 628382 - DNA, 75 bp, synthetic construct
  source 1..75: mol_type = other DNA
aaagttgcaacaaacagacttagcagagtatacatgtattttatctttcatcgatcatttattcccatcattttc

SEQ ID NO: 628383 - DNA, 75 bp, synthetic construct
  source 1..75: mol_type = other DNA
tcgccagtggctttgagcactgtatcgccaatttgtttgtgattccgttcgccattgccattcgccatttcgccc

SEQ ID NO: 628384 - DNA, 75 bp, synthetic construct
  source 1..75: mol_type = other DNA
cggtgacagtattacatagcttagggatcacactgctgctgattctggcactctgggtggtccaaactgccgctg

SEQ ID NO: 628385 - DNA, 75 bp, synthetic construct
  source 1..75: mol_type = other DNA
aggcattggcgggccgctgggaatttttgccgcgctgctgcacaccttaaaccacagtctggcaaaaacgctgct

SEQ ID NO: 628386 - DNA, 75 bp, synthetic construct
  source 1..75: mol_type = other DNA
tggcgggcgcttccactatagtcctctcagggacgcacgacctgcctgcacaacgtagcacctggcatgattttt

SEQ ID NO: 628387 - DNA, 75 bp, synthetic construct
  source 1..75: mol_type = other DNA
accgtcggcacgctgacgtggtacggctcgattgtggcatttgataaagagggcgacggctatctcgacttctgg

SEQ ID NO: 628388 - DNA, 75 bp, synthetic construct
  source 1..75: mol_type = other DNA
aggtgttgaccatcgccagcatcagcaccgacacggggagttcggcaactgactttatcaccagcgatacctcgc

SEQ ID NO: 628389 - DNA, 75 bp, synthetic construct
  source 1..75: mol_type = other DNA
accacgcttaccgtgcgcggcgtattgggggcggcactcggggctaatgagttcgcgcaaatcagtaccgataac

SEQ ID NO: 628390 - DNA, 75 bp, synthetic construct
  source 1..75: mol_type = other DNA
agctggatatcctgcgtcgcgtcgataaggttgcccgcgaagcggacaagcgcgtacaagaagtgactgccagcc

SEQ ID NO: 628391 - DNA, 75 bp, synthetic construct
  source 1..75: mol_type = other DNA
gccgtggctgctcgccattccccatgtggcttttgccaccagcgccctgctgctctttgctgacggagggctgct

SEQ ID NO: 628392 - DNA, 75 bp, synthetic construct
  source 1..75: mol_type = other DNA
gggcaccgggtgacggtgcattacgggtatgatgagaaaggccgcctgaccggtgagcgtcagacggtgcatcac

SEQ ID NO: 628393 - DNA, 75 bp, synthetic construct
  source 1..75: mol_type = other DNA
tttctggtaggcatttacggtcagcgttcatcgctggaagcagcatggaagtacatcattatttgtactgttggt

SEQ ID NO: 628394 - DNA, 75 bp, synthetic construct
  source 1..75: mol_type = other DNA
agcaatcagatcacgacccgccagaaaattgacaataccttcaaacgcggtgcgccgctgcttgtggatcctgca

SEQ ID NO: 628395 - DNA, 75 bp, synthetic construct
  source 1..75: mol_type = other DNA
cggcattgatgccacgcgcctgcgctttgatccggtcggggagtatcaaaaaatgctggcgggtgtggaaggtcg

SEQ ID NO: 628396 - DNA, 75 bp, synthetic construct
  source 1..75: mol_type = other DNA
gtgctgggtagtccggtggcggtgggggctacggcaaccacctacgccagccagtttagcctggcggtggactgg

SEQ ID NO: 628397 - DNA, 75 bp, synthetic construct
  source 1..75: mol_type = other DNA
caggcaccgcgagcaacaacggtaagttcgttggcaccggttataacgacaccttcttcgccaccgcaggcaccg

SEQ ID NO: 628398 - DNA, 75 bp, synthetic construct
  source 1..75: mol_type = other DNA
ggttagcgggtgcggcggtaggtggcggtgcgcttggcgctttactggcaagcggtggcgatgacgattcaaaaa

SEQ ID NO: 628399 - DNA, 75 bp, synthetic construct
  source 1..75: mol_type = other DNA
ttagcgcctccgcgcaggacagcgccggaaacagcgccacggcctcgcgcagcgtggcggtggatctcaccgcgc

SEQ ID NO: 628400 - DNA, 75 bp, synthetic construct
  source 1..75: mol_type = other DNA
acagccagaatgtggtgatcgacaccatcgcgccagatccagcggtgaaaaccatcgccatcagcgcgatcacca

SEQ ID NO: 628401 - DNA, 75 bp, synthetic construct
  source 1..75: mol_type = other DNA
ttacggtgacgctgaacgggcaaaattacaccgcgacgacggacgcagcaggcaactggagcaccacggtgcccg

SEQ ID NO: 628402 - DNA, 75 bp, synthetic construct
  source 1..75: mol_type = other DNA
cgatggcagccataccctgacggcgacggtcaatgacaaagcgggcaacccggcgagcaccacgcataatctggc

SEQ ID NO: 628403 - DNA, 75 bp, synthetic construct
  source 1..75: mol_type = other DNA
tctccggcaccagcagcggcggggaagcgggcgatgtggtgagcgttgtgctcaacggcaaaacctacaccacca

SEQ ID NO: 628404 - DNA, 75 bp, synthetic construct
  source 1..75: mol_type = other DNA
gccgccgaaaaaggcactggcctgaccctttctggcagcaccagcggaattgaaagcgggcaaaccgtcaccgtc

SEQ ID NO: 628405 - DNA, 75 bp, synthetic construct
  source 1..75: mol_type = other DNA
agccacttatacggtgactgccgccgccactgacgccgatggcaacagcggttccgccagccataacgtacaggt

SEQ ID NO: 628406 - DNA, 75 bp, synthetic construct
  source 1..75: mol_type = other DNA
tacagtagtgaccgtgttgcttaacggcaaaggctacagcgctaccattcagaacaacgggagctggagcgtgaa

SEQ ID NO: 628407 - DNA, 75 bp, synthetic construct
  source 1..75: mol_type = other DNA
cgacgatgtgattaacaacgttgaacacactcaggcgcagattatcagcggcaccgccacgggtgcggtggcggg

SEQ ID NO: 628408 - DNA, 75 bp, synthetic construct
  source 1..75: mol_type = other DNA
ttgccatcagcattaacgctattacccctgatgatgtgattaacgccgccgaaaaaggcgcggcgttaacgctct

SEQ ID NO: 628409 - DNA, 75 bp, synthetic construct
  source 1..75: mol_type = other DNA
gcggaagtcagcctcgataatactcaggggttaggcagaggaaatattgccaatgacggtctgttaacgctaaaa

SEQ ID NO: 628410 - DNA, 75 bp, synthetic construct
  source 1..75: mol_type = other DNA
tttattagataaaacagtcaatcatgctcagttaaattctgctgatggctctgagttggcggagattctgaagaa

SEQ ID NO: 628411 - DNA, 75 bp, synthetic construct
  source 1..75: mol_type = other DNA
gggcaggcaccggttttggccacctggcgataccgcgtgtgggtcaggaggtgattgtggacttcctcaacggcg

SEQ ID NO: 628412 - DNA, 75 bp, synthetic construct
  source 1..75: mol_type = other DNA
tatggattgatgattttggttctaatgattgcaaaataaatatatcccaattgcaacatgtgggggcaataaaac

SEQ ID NO: 628413 - DNA, 75 bp, synthetic construct
  source 1..75: mol_type = other DNA
cccgcaattgggactataacagtcgccaaaaaagtgaaattcaattcaacatcagccagacaatatttgatgggg

SEQ ID NO: 628414 - DNA, 75 bp, synthetic construct
  source 1..75: mol_type = other DNA
ctgggcgtgacggaggggctggcagggcgggggattgctatctccggtgcgctggcgacggtcgtggccgcgccg

SEQ ID NO: 628415 - DNA, 75 bp, synthetic construct
  source 1..75: mol_type = other DNA
acaatggcttacgctcatcttgctccagattatcttcagaatgcagtgatgctaaatccgttaaaaggagggatt

SEQ ID NO: 628416 - DNA, 75 bp, synthetic construct
  source 1..75: mol_type = other DNA
tctacgcaggtacgctggcgaatgcatcggtcagtggcgcgacaggaagcctgtcgttaatgacgccacgggata

SEQ ID NO: 628417 - DNA, 75 bp, synthetic construct
  source 1..75: mol_type = other DNA
taagcgggcatctcggggtggggtatagcaacggtgccgatttggaatccccgtggaacgcggtggctggtgtga

SEQ ID NO: 628418 - DNA, 75 bp, synthetic construct
  source 1..75: mol_type = other DNA
ggcgacgtataacacccgtaataatgtcaccaccgatgcgggtgccgggtttgagcagacgctgatcggaatgac

SEQ ID NO: 628419 - DNA, 75 bp, synthetic construct
  source 1..75: mol_type = other DNA
ttgtcgatctgctggagcaacagccgcgcacacctggcgagctggcgcaacagactggcgtttcaggcagggcca

SEQ ID NO: 628420 - DNA, 75 bp, synthetic construct
  source 1..75: mol_type = other DNA
ggggatgcttcgtttacgctgggcaataccggcggtttcgttgatcttgggacctatgagtatgtcctgaaaagc

SEQ ID NO: 628421 - DNA, 75 bp, synthetic construct
  source 1..75: mol_type = other DNA
caaatccgaacccaaacccaaatccgaacccaaatccgaacccaaatccgaatccaaatccgaatccaaatccga

SEQ ID NO: 628422 - DNA, 75 bp, synthetic construct
  source 1..75: mol_type = other DNA
gcaatatctgggcaacgcttttgcgcttatcgatgctaatggggcttctggcgtgaggatacaaaactatccggg

SEQ ID NO: 628423 - DNA, 75 bp, synthetic construct
  source 1..75: mol_type = other DNA
gcaaaagggtggtgattgtcagggttatctcttccgctgtctccactgcggcaagctgagactgtggggtgattt

SEQ ID NO: 628424 - DNA, 75 bp, synthetic construct
  source 1..75: mol_type = other DNA
gcagacttaccggtatgtgccgaatccactggggtatgttgatcctttggggctggctatatgtcctgtgatgta

SEQ ID NO: 628425 - DNA, 75 bp, synthetic construct
  source 1..75: mol_type = other DNA
attacaacgccacgctggactatggtgacggctgcaccaccgtgacggacggcaagggcactcaccgttattact

SEQ ID NO: 628426 - DNA, 75 bp, synthetic construct
  source 1..75: mol_type = other DNA
tctatttcgagagaaattacaattgttgatataaaaaataaaaaaacaccacaggcaatagaaagaattttctgg

SEQ ID NO: 628427 - DNA, 75 bp, synthetic construct
  source 1..75: mol_type = other DNA
ataaatgattatgatatcgtcggcccatttgaaaagccgattaaaggaagcttaataaaatccaatatcgataaa

SEQ ID NO: 628428 - DNA, 75 bp, synthetic construct
  source 1..75: mol_type = other DNA
taatacaacgctaaaatgcaaaatctacctttcacctgaaacctccgatgaaaagacggaatattcagcagtgaa

SEQ ID NO: 628429 - DNA, 75 bp, synthetic construct
  source 1..75: mol_type = other DNA
tggctacctgaaggcgcagtctgcgggcaggcaccggataagtgaagagactgaccagtatgccggaggccaccg

SEQ ID NO: 628430 - DNA, 75 bp, synthetic construct
  source 1..75: mol_type = other DNA
cggcctgctgtatgcaggacagtggcaggatgcggaatccgggctgtgctataaccggttccggtattacgagcc

SEQ ID NO: 628431 - DNA, 75 bp, synthetic construct
  source 1..75: mol_type = other DNA
ataaaaaattatataaataaatattcaagtaataacattcaggcaagaattataaggaatgatattaatgttggt

SEQ ID NO: 628432 - DNA, 75 bp, synthetic construct
  source 1..75: mol_type = other DNA
ctgatgttattactaaacagattgaggaaattcaaaagattgctcgtaatggactggaaaacggttatccagtta

SEQ ID NO: 628433 - DNA, 75 bp, synthetic construct
  source 1..75: mol_type = other DNA
acctggtgagtgatccgctggggttgcaggggggtgagcagacttaccggtatgtgccgaatccgtgtgggtatg

SEQ ID NO: 628434 - DNA, 75 bp, synthetic construct
  source 1..75: mol_type = other DNA
cggtcagtcagtgcggttacagtggcagcagcaccataaactgagcggcattgaacgtgctggaaccggcgcgga

SEQ ID NO: 628435 - DNA, 75 bp, synthetic construct
  source 1..75: mol_type = other DNA
gctggtgatctccggtaccagcacgggcggggaagcgggcgatgtggtgagcgttgtgctcaatggcaaaaccta

SEQ ID NO: 628436 - DNA, 75 bp, synthetic construct
  source 1..75: mol_type = other DNA
ggtgacagcagcggtgaccagcggtatcggcaatagcgccaccgccagccataacctcctggtcgacagcgcgct

SEQ ID NO: 628437 - DNA, 75 bp, synthetic construct
  source 1..75: mol_type = other DNA
gtgacggttccggcatcggcggtaaccgcattaggccaggccaactatacggtgacagcagcggtgaccagcggt

SEQ ID NO: 628438 - DNA, 75 bp, synthetic construct
  source 1..75: mol_type = other DNA
caacagcgacagcacgactcacgatgtgaccgttgatctcagtggcccgacgctgaccatcaacaccgtctccgg

SEQ ID NO: 628439 - DNA, 75 bp, synthetic construct
  source 1..75: mol_type = other DNA
taacccggcaagtgccgaccatgcgctggcggtggacgttaccgcacctgatctcaccattaacaccgttgcggg

SEQ ID NO: 628440 - DNA, 75 bp, synthetic construct
  source 1..75: mol_type = other DNA
aacgtcaacggcaacagcgccacggcaacgcacgaatacagcgtcgatagcgccgcgccaacggtcaccatcaac

SEQ ID NO: 628441 - DNA, 75 bp, synthetic construct
  source 1..75: mol_type = other DNA
agcatcgatccactgaccgccgataacatcattaacgccgccgaaagcgggcaggatttgcaaatcactggcacc

SEQ ID NO: 628442 - DNA, 75 bp, synthetic construct
  source 1..75: mol_type = other DNA
aaagcgggtaacccggcaagcgccgaccacgcgctggcggtggacgttaccgcgccggatctcaccataaacacc

SEQ ID NO: 628443 - DNA, 75 bp, synthetic construct
  source 1..75: mol_type = other DNA
ttaacgccgccgaacacgggcaggcgctggtgatctccggttccagcactggcggcgaagcgggcgatatcatca

SEQ ID NO: 628444 - DNA, 75 bp, synthetic construct
  source 1..75: mol_type = other DNA
atgccactgaaagcggacaagatttgtctatcaccggcaccaccgacgcccagccagggcagacggtaacggtca

SEQ ID NO: 628445 - DNA, 75 bp, synthetic construct
  source 1..75: mol_type = other DNA
cgccgccaatggaagctggagcgtaacggttccggcggcggatctggcaactctgccagacggcgcggcgaacgt

SEQ ID NO: 628446 - DNA, 75 bp, synthetic construct
  source 1..75: mol_type = other DNA
cggcaaatgtaggcaactggcctgcgggtacggtgaatatcacggtttcaggtgctactagcgcaggaaacccgg

SEQ ID NO: 628447 - DNA, 75 bp, synthetic construct
  source 1..75: mol_type = other DNA
ctgacggtggatcttgccgctccggttgtcaccatcaacacggtggcgggcgatgacgtgattaatgccacagaa

SEQ ID NO: 628448 - DNA, 75 bp, synthetic construct
  source 1..75: mol_type = other DNA
ggccacaccgctatttagcgatgtggatgagttatacagtttgctggaagaggcggtgcaagcggaggctgaaga

SEQ ID NO: 628449 - DNA, 75 bp, synthetic construct
  source 1..75: mol_type = other DNA
tcaacttcgtttataaaaggccagcctcgcaaggtaagttcgccttcaaaggtcgataaattcattaaagctcac

SEQ ID NO: 628450 - DNA, 75 bp, synthetic construct
  source 1..75: mol_type = other DNA
tgataatgtagcccactcagaaatggtcgcgacatctggcttcagtgttcttcggttttcatctttaacacaggc

SEQ ID NO: 628451 - DNA, 75 bp, synthetic construct
  source 1..75: mol_type = other DNA
ttaacgccgccgaagcgggcgtagcgcaaaccatcagcgggcaggttactggagccgccgttggcgacacggtaa

SEQ ID NO: 628452 - DNA, 75 bp, synthetic construct
  source 1..75: mol_type = other DNA
gtgattgacgcagcgggcaacgtcggtgccactgacagccagaatgtggtgatcgacaccatcgcgccagatcca

SEQ ID NO: 628453 - DNA, 75 bp, synthetic construct
  source 1..75: mol_type = other DNA
cacctacagcgtgacggcgagcgtcaccaacgcccagggcaacagcagcaccgccagccataacgtgcaggtcaa

SEQ ID NO: 628454 - DNA, 75 bp, synthetic construct
  source 1..75: mol_type = other DNA
atcggcgctgaccatcagcggcaccagcacggcggaagccgggcagacggtgaccgtgacgcttaacggcgtcaa

SEQ ID NO: 628455 - DNA, 75 bp, synthetic construct
  source 1..75: mol_type = other DNA
gacggtgggcgtgaccgcgaatttaagcgtcaccaccgcgcaggccaccggttttaacacctcgacatttaccaa

SEQ ID NO: 628456 - DNA, 75 bp, synthetic construct
  source 1..75: mol_type = other DNA
gtcaacgtggcgcttggcacgccggtgctcggcattaacacgattgccgtcgacgacattatcaacgccacggag

SEQ ID NO: 628457 - DNA, 75 bp, synthetic construct
  source 1..75: mol_type = other DNA
atggcggcattcaccagctttccggcttactctgtgcactgcagcagggagattgctctgagggcagtaccgtcc

SEQ ID NO: 628458 - DNA, 75 bp, synthetic construct
  source 1..75: mol_type = other DNA
cggcgtattgggcgcagcactcggggctaatgagttcgcacaaatcagtaccgacaacggcgcaacctgggtaaa

SEQ ID NO: 628459 - DNA, 75 bp, synthetic construct
  source 1..75: mol_type = other DNA
caccaccactgccgatgcatccggtaactggagcgtgaccgttccggcgtcacgggtgagcgccctcggtgaagc

SEQ ID NO: 628460 - DNA, 75 bp, synthetic construct
  source 1..75: mol_type = other DNA
tggtcgacagcgcgctgcccggtgtgaccattaatccggtggcaaccgacgatattattaacgccgccgaagcgg

SEQ ID NO: 628461 - DNA, 75 bp, synthetic construct
  source 1..75: mol_type = other DNA
agtttgaaggtctggatctggttggaaaactggaggagaccaaagagggcaactatctgatccaggatctgggtt

SEQ ID NO: 628462 - DNA, 75 bp, synthetic construct
  source 1..75: mol_type = other DNA
acttttgcgacaactaacgtggtcacgctgacgggcgtgcacaccgacctcgccactttgctggcgaatcatcag

SEQ ID NO: 628463 - DNA, 75 bp, synthetic construct
  source 1..75: mol_type = other DNA
cagctccattgccgattacgaccgtaacggcacgggcgatctgtttatcacccgtgatgattacggtacgggcta

SEQ ID NO: 628464 - DNA, 75 bp, synthetic construct
  source 1..75: mol_type = other DNA
tgccatccgcctgaacggcgggcgcgtgtatgagctttccgccgtgacgcagatccagcacaccacgccagccgt

SEQ ID NO: 628465 - DNA, 75 bp, synthetic construct
  source 1..75: mol_type = other DNA
cacagcggtgggcatattcacccgctaaacctcgccattggtgaagccgatgccatccgcctgaacggcgggcgc

SEQ ID NO: 628466 - DNA, 75 bp, synthetic construct
  source 1..75: mol_type = other DNA
accgcagcagaagagagcaagctggaaagcgtatcacgctacggcactgatacaaaccacatgaaggcgtcgagc

SEQ ID NO: 628467 - DNA, 75 bp, synthetic construct
  source 1..75: mol_type = other DNA
agctggagcgtgaatgttccggcggcggatctggcatctctgccagacggcgcggcgaacgtgcaggccagcgtc

SEQ ID NO: 628468 - DNA, 75 bp, synthetic construct
  source 1..75: mol_type = other DNA
ggcctgaatgcaggcgtgccgttgacgatcacgattaacggtacgccttattccgccacggtacaggcggacgga

SEQ ID NO: 628469 - DNA, 75 bp, synthetic construct
  source 1..75: mol_type = other DNA
cgcagattagcctcgacggcggcgcgacctggactacgctcaccactaacggcacgcaatggacttacaccgaca

SEQ ID NO: 628470 - DNA, 75 bp, synthetic construct
  source 1..75: mol_type = other DNA
gatctggcggggaacaccggcccggtggtatcgaaaacggtggtggtcgatacgattaaccctaccgccacgcca

SEQ ID NO: 628471 - DNA, 75 bp, synthetic construct
  source 1..75: mol_type = other DNA
gcggcgggcagtaccgtcaccgttgaactgggcggtaaaacttacaccgccatcgtccaggttgatttaagctgg

SEQ ID NO: 628472 - DNA, 75 bp, synthetic construct
  source 1..75: mol_type = other DNA
gacaaagcgggcaaccccggcagcgccagccataatctggcggtagacaccaccgcgccggttcttaccataaat

SEQ ID NO: 628473 - DNA, 75 bp, synthetic construct
  source 1..75: mol_type = other DNA
accattcgacacgctgaatgagtcaatcacctgcgacgtttgcgtggttggcggcggctataccgggctctcctc

SEQ ID NO: 628474 - DNA, 75 bp, synthetic construct
  source 1..75: mol_type = other DNA
ggtagcaccgtgacggtgactatcggcacaaatactttcaccacggtgctggatgccagcggcaactggagcgtc

SEQ ID NO: 628475 - DNA, 75 bp, synthetic construct
  source 1..75: mol_type = other DNA
acgccgccgaaaaaggcagcgatttgcagctctccggcaccacctccgatgtggaagcggggcaaaccatcactg

SEQ ID NO: 628476 - DNA, 75 bp, synthetic construct
  source 1..75: mol_type = other DNA
cgccatcagcggcaccaccacggcgcaggccgggcagacgctgaccgtcacgctcaataacaacacgtaccagac

SEQ ID NO: 628477 - DNA, 75 bp, synthetic construct
  source 1..75: mol_type = other DNA
ggtgacggcgatatggatctcttcctgcccgccagccagggaagagctaactacggctcgctgttattcaacacc

SEQ ID NO: 628478 - DNA, 75 bp, synthetic construct
  source 1..75: mol_type = other DNA
gtgatgactacggtacaggctatatcaacggctttaccaataacggcgacggcaccttttccagcgctattcagg

SEQ ID NO: 628479 - DNA, 75 bp, synthetic construct
  source 1..75: mol_type = other DNA
ctgactttatcaccagcgataccacgctcacgctgaccggttcgctgggagcggggcttgccagcggcgaagtgg

SEQ ID NO: 628480 - DNA, 75 bp, synthetic construct
  source 1..75: mol_type = other DNA
tactgtgtcgaagactgtaactatctgcttgattactatcgtctcactgctgacaaccgcctgctgtacggcggc

SEQ ID NO: 628481 - DNA, 75 bp, synthetic construct
  source 1..75: mol_type = other DNA
atttcctgcgacgtttgcgtggtcggcggcggctataccgggctttcctccgcgctgcatctggcggaagcgggc

SEQ ID NO: 628482 - DNA, 75 bp, synthetic construct
  source 1..75: mol_type = other DNA
cccggcgggcgcacgctgcgtgtgccgtttaccgcgatgggcgcggcgtattacagcctgcgcgatcgtctgggc

SEQ ID NO: 628483 - DNA, 75 bp, synthetic construct
  source 1..75: mol_type = other DNA
aacagcgccggaacaacctccaccattacccatccggtcaccgtcgatctggcggcggtcgccatcaccattaac

SEQ ID NO: 628484 - DNA, 75 bp, synthetic construct
  source 1..75: mol_type = other DNA
agacagtaacggcaatacaattgccagtactcaggtagacaacaacggtcactggagtgtctcgttacccacgca

SEQ ID NO: 628485 - DNA, 75 bp, synthetic construct
  source 1..75: mol_type = other DNA
tcgcgcatgccgcagttcggtcgccttgataccaacatctattacatgcagggttacagcggccacggcgtcacc

SEQ ID NO: 628486 - DNA, 75 bp, synthetic construct
  source 1..75: mol_type = other DNA
actgagccacctgaaaaaaaatctgatgtggatataagtgaacgattatttaaacctatattttgtagcatgcga

SEQ ID NO: 628487 - DNA, 75 bp, synthetic construct
  source 1..75: mol_type = other DNA
ttacgcccggctggcgcaggtagccgaactctatttgcaggacgttaaacagcaacaggggcttaacccagtaga

SEQ ID NO: 628488 - DNA, 75 bp, synthetic construct
  source 1..75: mol_type = other DNA
tcggactggccgttgcccgatgatgaagaactggcatggcaattctctgtgctgtttgaggggcagggggaaatg

SEQ ID NO: 628489 - DNA, 75 bp, synthetic construct
  source 1..75: mol_type = other DNA
acaagttgatcaaatcatcaacgctgaactgtttgcactggcaggtctggatgcacaacatctgcaactgttggt

SEQ ID NO: 628490 - DNA, 75 bp, synthetic construct
  source 1..75: mol_type = other DNA
gcatcgataaagccttcccgggcgtaaaagccctctcgggcgctgcgttaaatgtctatccgggccgcgtgatgg

SEQ ID NO: 628491 - DNA, 75 bp, synthetic construct
  source 1..75: mol_type = other DNA
tctcatggtattcatgcatcacagggcaatctcaccgtttctgattctgatataaaaactaaaggaaataatgcc

SEQ ID NO: 628492 - DNA, 75 bp, synthetic construct
  source 1..75: mol_type = other DNA
ttcagtgggcaagttttcaagataaaagggaaccaaaataataaagcaggtagtgctgttgctttatttccattt

SEQ ID NO: 628493 - DNA, 75 bp, synthetic construct
  source 1..75: mol_type = other DNA
tattaataacatccaaaagttaaagcaattaacaaaaactaacaataatatcgattttaatagtcaatatgcagt

SEQ ID NO: 628494 - DNA, 75 bp, synthetic construct
  source 1..75: mol_type = other DNA
gaacctggtatttttgctgttcactgccggattgctcgggctggcctggtggatacgcggacgcgaacaaaaagc

SEQ ID NO: 628495 - DNA, 75 bp, synthetic construct
  source 1..75: mol_type = other DNA
cttgattaatcaacacgattcttttaatgaccatattttatcaaaagaaatgtctaacggaaaaaacgcgctaaa

SEQ ID NO: 628496 - DNA, 75 bp, synthetic construct
  source 1..75: mol_type = other DNA
tattaacaacatccaaaagctaaggcaattgacaaattataacaatactatcgattttaataatcaatatgcggt

SEQ ID NO: 628497 - DNA, 75 bp, synthetic construct
  source 1..75: mol_type = other DNA
aaccatatatagaaaaggttaccgattcagtggacaagtattcaaaataaaaggaaatcaatataatgaagcagg

SEQ ID NO: 628498 - DNA, 75 bp, synthetic construct
  source 1..75: mol_type = other DNA
tagctcgcaaagactatcaggatcgtcgccggcgccaagaggaagggatagcgaaagccaaggtggccggtaaat

SEQ ID NO: 628499 - DNA, 75 bp, synthetic construct
  source 1..75: mol_type = other DNA
gggtcaatccggaacggggacgctgaatattaaacagaagggtcacgtcgatggaggctatttaagattaggtac

SEQ ID NO: 628500 - DNA, 75 bp, synthetic construct
  source 1..75: mol_type = other DNA
tggttggctggtatggcactggagtgcttaatattttggctggcggtaatgccgccttaaccactattactacca

SEQ ID NO: 628501 - DNA, 75 bp, synthetic construct
  source 1..75: mol_type = other DNA
ctaccactacgacagccagcaccgtctggtgttctacacgcggatacagcatggcgagccactggtcgagagccg

SEQ ID NO: 628502 - DNA, 75 bp, synthetic construct
  source 1..75: mol_type = other DNA
ttagcgatggcggtaagtttgtatcgcaaaatattacttttttgggcgataaagcaagcggtatcggcacactga

SEQ ID NO: 628503 - DNA, 75 bp, synthetic construct
  source 1..75: mol_type = other DNA
tgatagcctgttgattagcaaagttcatgcagaaagcctccggcttacttggttagctaagaccactccaccagc

SEQ ID NO: 628504 - DNA, 75 bp, synthetic construct
  source 1..75: mol_type = other DNA
gataccgaacgaaaagatattccctatgttttgggtgcaatcattcttcacgatgatggtgagtatctcaatgta

SEQ ID NO: 628505 - DNA, 75 bp, synthetic construct
  source 1..75: mol_type = other DNA
gttatcgccagaaagttcgaactctccaagcctcagctaatgagggttctggaaacggtagcctttcattgcgat

SEQ ID NO: 628506 - DNA, 75 bp, synthetic construct
  source 1..75: mol_type = other DNA
tagagccggtttatttgcctgagcgaaaaatacatctttatcactgtgaccaccggggcctgccgctggcgctta

SEQ ID NO: 628507 - DNA, 75 bp, synthetic construct
  source 1..75: mol_type = other DNA
caccggcgcgaaaagttcatttttaccactgcgaccaccggggcctgccgctggcgctcatcagcgaagacggca

SEQ ID NO: 628508 - DNA, 75 bp, synthetic construct
  source 1..75: mol_type = other DNA
gcggctgctggacagactggaggaagaaattcgggcagaccgcgtgagcagtgaaagccgggcgtggcttgcgca

SEQ ID NO: 628509 - DNA, 75 bp, synthetic construct
  source 1..75: mol_type = other DNA
gctgagaaaaaaaggtaaggatgatgctgctaccagaagtcttattattggatttgaagaaccagaaatttattt

SEQ ID NO: 628510 - DNA, 75 bp, synthetic construct
  source 1..75: mol_type = other DNA
caggccgataaagttgccgtcacgttgacattggtcaacgtggggatgtggcattgtttggcctggtcattgatc

SEQ ID NO: 628511 - DNA, 75 bp, synthetic construct
  source 1..75: mol_type = other DNA
ttgccacaggacagtattattgagctggatgtggctgcagttattcagtcaacacgaagcctcgttggtcgccag

SEQ ID NO: 628512 - DNA, 75 bp, synthetic construct
  source 1..75: mol_type = other DNA
atggaggagtaccgccgctggcgcaatgagtcctggcgatacgacggaagtgataagtacccgtggtctcagcct

SEQ ID NO: 628513 - DNA, 75 bp, synthetic construct
  source 1..75: mol_type = other DNA
cttacctgggatttgatgccatagaaatgaacgatgaacacggcacaagttaccttattgtaaatccacaaatta

SEQ ID NO: 628514 - DNA, 75 bp, synthetic construct
  source 1..75: mol_type = other DNA
ttctattcttgtttgtttatacgcaaactcgtttgggtttatttatgctcagagaagtcagcaattcatctggta

SEQ ID NO: 628515 - DNA, 75 bp, synthetic construct
  source 1..75: mol_type = other DNA
catcgtctggaacccaatcacttattatccggtaccgaaaccgtcgacccaggtagggcagaaagttctggataa

SEQ ID NO: 628516 - DNA, 75 bp, synthetic construct
  source 1..75: mol_type = other DNA
gcggtggcgaccgatgacattatcaacgctgccgaagcgggcaatgcacaaaccattagcgggcaggtgacgggg

SEQ ID NO: 628517 - DNA, 75 bp, synthetic construct
  source 1..75: mol_type = other DNA
cgatctggcggcggtggcgatctccattaacaccgtttccggcgacgatgtgattaacgccgctgaaaaaagtgc

SEQ ID NO: 628518 - DNA, 75 bp, synthetic construct
  source 1..75: mol_type = other DNA
agcaaacgtccaggccagcgtcagcaatgtcgcagggaacagcgcccaggcaacgcatgcttacagcgttgatgc

SEQ ID NO: 628519 - DNA, 75 bp, synthetic construct
  source 1..75: mol_type = other DNA
taataatgattataaataaacaacaatatgtggctaacagcccatttaagttagactggaatacgccattaaaaa

SEQ ID NO: 628520 - DNA, 75 bp, synthetic construct
  source 1..75: mol_type = other DNA
attacggtattaaatggcggtgattatcggttattggcgggtcatgaatataataaaaataatcgcgttactgca

SEQ ID NO: 628521 - DNA, 75 bp, synthetic construct
  source 1..75: mol_type = other DNA
gtgcgggtgacgatattatcaacaacgccgagcagcttgccgggcagaccatcagcggcaccaccaccgctgaag

SEQ ID NO: 628522 - DNA, 75 bp, synthetic construct
  source 1..75: mol_type = other DNA
cgctcgtgtttgctgcaccggtgctggcttccgaagtgacggtgggtcaggtttgtagggctgcttcagcggcga

SEQ ID NO: 628523 - DNA, 75 bp, synthetic construct
  source 1..75: mol_type = other DNA
ggttatgctctgaatatctaaagcatcggcgcaagggcaaggtatcggagtcggctataagtgatatccgtaact

SEQ ID NO: 628524 - DNA, 75 bp, synthetic construct
  source 1..75: mol_type = other DNA
aaatctctcagttactgctgggtgatattctggcagaaggcggtgtttattacttgaatcttgaaaacgatagtg

SEQ ID NO: 628525 - DNA, 75 bp, synthetic construct
  source 1..75: mol_type = other DNA
acaatgacttaaaaaccgttgctcggtttgacggtaaaaccttaagagatgccttttcgagaaaaatagcgactt

SEQ ID NO: 628526 - DNA, 75 bp, synthetic construct
  source 1..75: mol_type = other DNA
actgggctgtcatctgggccggactgatgtccggtatcaatattatccacctgctgctggtgaaaacctatgccc

SEQ ID NO: 628527 - DNA, 75 bp, synthetic construct
  source 1..75: mol_type = other DNA
aacttgggttattggctgaatatgcactttttttttctgtgccatgtgttgcgttggttggcaattttcttgcag

SEQ ID NO: 628528 - DNA, 75 bp, synthetic construct
  source 1..75: mol_type = other DNA
ggatgttatttactatccttcggtggggatgtttccgctgaccgtgtacctgacggcactgcgcctggcgccgct

SEQ ID NO: 628529 - DNA, 75 bp, synthetic construct
  source 1..75: mol_type = other DNA
ggctgtcagtgatgcaagcagtgtaccggttcgcttctgtttctggatgggatttgcacaggggctgacgttcga

SEQ ID NO: 628530 - DNA, 75 bp, synthetic construct
  source 1..75: mol_type = other DNA
gagcattttcatctgctgggaattgctcagccaggagcaactgatgaggtgacccgggaggtgtttgatgaattc

SEQ ID NO: 628531 - DNA, 75 bp, synthetic construct
  source 1..75: mol_type = other DNA
atcaggatgggcaggaggatcagttgggggcgctggggctggtgacaaatgctgtcgttctctggaataccatct

SEQ ID NO: 628532 - DNA, 75 bp, synthetic construct
  source 1..75: mol_type = other DNA
atgaattggggcaggtagtggcagttactatcagtggtgaagaagggcatgtgaaagcccgtgcagagtatacca

SEQ ID NO: 628533 - DNA, 75 bp, synthetic construct
  source 1..75: mol_type = other DNA
tggatccgctgaccctgaacggagataacttcaggctgttttgcctgagctactatcctgattcccagatagccc

SEQ ID NO: 628534 - DNA, 75 bp, synthetic construct
  source 1..75: mol_type = other DNA
cggtggaaaaccaaagttgtggagggaaaggaaagaaaaaatcttggatatattcaagctattgaacacattcaa

SEQ ID NO: 628535 - DNA, 75 bp, synthetic construct
  source 1..75: mol_type = other DNA
ttcaggggcgccccatggcattttcagcagccttcattacccgaagcatcattatgaaccactgaggccagcacc

SEQ ID NO: 628536 - DNA, 75 bp, synthetic construct
  source 1..75: mol_type = other DNA
actgtgttcgcttagccaaaattggtggctttttgtgctgcgcggtgtcttggcattgatttttgcagccctcgc

SEQ ID NO: 628537 - DNA, 75 bp, synthetic construct
  source 1..75: mol_type = other DNA
ctgttcagcatggtcgacatttgtgcgccgtatgtccaggcggaaccggtgatgagttatttcgacaaactgggc

SEQ ID NO: 628538 - DNA, 75 bp, synthetic construct
  source 1..75: mol_type = other DNA
catggatctaatcctcgaaccgttaacgccgtatgaatcgaacgtcgtgtgtaatgctaatgatgtgcttcatgc

SEQ ID NO: 628539 - DNA, 75 bp, synthetic construct
  source 1..75: mol_type = other DNA
gctgcgctgcgatcccgccgttgccgggctgcgcctgagcgggacgttcccgctgaaaaataccgatgcgatcct

SEQ ID NO: 628540 - DNA, 75 bp, synthetic construct
  source 1..75: mol_type = other DNA
aaataataaaaccagtaagctttttcttttatcggtcgggatgactgccataattctaggtgctctagttgcgat

SEQ ID NO: 628541 - DNA, 75 bp, synthetic construct
  source 1..75: mol_type = other DNA
ttaatgaacaagtgttcatcaatattatattcacaattaaatttatttgttttctgctattaatacgctgtttcg

SEQ ID NO: 628542 - DNA, 75 bp, synthetic construct
  source 1..75: mol_type = other DNA
agttcggaaacgaaaattgttattaataaaggcatatacgcatcatggaaatttgttggtacgattcaaaactac

SEQ ID NO: 628543 - DNA, 75 bp, synthetic construct
  source 1..75: mol_type = other DNA
aaggatgcgcaggggcgtgaaatccgttatgagtacagcgccgcaggcgacctgacagcaacgatatcaccggac

SEQ ID NO: 628544 - DNA, 75 bp, synthetic construct
  source 1..75: mol_type = other DNA
atttgcctgggcttgtggcgtaagcactgccgatgtcgtagaggtgcgatcggatacaccggataaagcaatcta

SEQ ID NO: 628545 - DNA, 75 bp, synthetic construct
  source 1..75: mol_type = other DNA
tatctccgcgtaactgacaacaaggggaaaacgcacgaagtgctgaccggaagtgatgacggtcgccgcagcaac

SEQ ID NO: 628546 - DNA, 75 bp, synthetic construct
  source 1..75: mol_type = other DNA
gcggaatggtatagctaatcgtatccgtaaggacattaccattgctcaggatgattacattactaacctcttccc

SEQ ID NO: 628547 - DNA, 75 bp, synthetic construct
  source 1..75: mol_type = other DNA
cgcacaaatccgcccttcttccgtggtgaccaaagactacacctttaaacgacccggctggggcagggcgttttg

SEQ ID NO: 628548 - DNA, 75 bp, synthetic construct
  source 1..75: mol_type = other DNA
gtgcgtccgcagcaaattaaatttgaagtgactgagcatgcatttcttgatgtcgaaaaaatgacgccgattatt

SEQ ID NO: 628549 - DNA, 75 bp, synthetic construct
  source 1..75: mol_type = other DNA
ataccgctggtacgttggtagcaaccggaagaaaaattccagcgtattccgctttgcgtagaggcaacattttat

SEQ ID NO: 628550 - DNA, 75 bp, synthetic construct
  source 1..75: mol_type = other DNA
aaaggtgatccgggagtagcaggtccagcaggtccggcgggtgcgccggggccgaaaggtgacaaaggcgatccg

SEQ ID NO: 628551 - DNA, 75 bp, synthetic construct
  source 1..75: mol_type = other DNA
aatacatggactcaaccacaaactattaatggcgatttgacggtaaccggaaacggctcatttaacgatgttcag

SEQ ID NO: 628552 - DNA, 75 bp, synthetic construct
  source 1..75: mol_type = other DNA
gagtggagcccgctgttcagcgagccacatccttcccgtgagttttgtgtccagtacggtgagactgattacgat

SEQ ID NO: 628553 - DNA, 75 bp, synthetic construct
  source 1..75: mol_type = other DNA
tttatgtgtatacaggcgatattcatcgtgatggttatcttgatctcaccaatgaaatcaagaaacgtaagtcac

SEQ ID NO: 628554 - DNA, 75 bp, synthetic construct
  source 1..75: mol_type = other DNA
cagaactaattttgaaagttaggcatcaattgaatgatgcagaactaaaagaaaacacaatgtttgaaaacattt

SEQ ID NO: 628555 - DNA, 75 bp, synthetic construct
  source 1..75: mol_type = other DNA
ctcggccctaagacatcaatcatctgttctccaatgactagtctaaaaactagtattaagactatcacttattta

SEQ ID NO: 628556 - DNA, 75 bp, synthetic construct
  source 1..75: mol_type = other DNA
actgacggccagtcgttctgggtagctcaggggccagatgcgctttctgctgcatggcagtatcaaaacaatgct

SEQ ID NO: 628557 - DNA, 75 bp, synthetic construct
  source 1..75: mol_type = other DNA
ataagactgccagcgatcctgatggcaccattgcagggttggcagcaactactgacggccagtcgttctgggtag

SEQ ID NO: 628558 - DNA, 75 bp, synthetic construct
  source 1..75: mol_type = other DNA
gtagagctctacagcaccattatgaaacggtaacacttttagttgttggaccatgcaaaagtgctggtacactaa

SEQ ID NO: 628559 - DNA, 75 bp, synthetic construct
  source 1..75: mol_type = other DNA
ctggtcatgtcaaatctatctgtttcgactcgctgtcttattgagtggcagcttctgaccctagtgcgtccttct

SEQ ID NO: 628560 - DNA, 75 bp, synthetic construct
  source 1..75: mol_type = other DNA
aaaaaaacataatagaaaaagttaaagagcggaatgaaggtatggctacatcatttaacaagataaaaaaagata

SEQ ID NO: 628561 - DNA, 75 bp, synthetic construct
  source 1..75: mol_type = other DNA
aatgtgatctgtttgtggtgacagatcgggccgggaagacggaaaacgtgccaaaaccgcagatttttgcccgtt

SEQ ID NO: 628562 - DNA, 75 bp, synthetic construct
  source 1..75: mol_type = other DNA
ttgaaactgaaaatactgacactattgatagccttaaattacagcgtgaagatttgcagcgtaaaatctcaaaaa

SEQ ID NO: 628563 - DNA, 75 bp, synthetic construct
  source 1..75: mol_type = other DNA
tctctacccaagcgctggaaatcgtacagcaactcaaagtgatgtcagggcaatatccactggtgttcccgggac

SEQ ID NO: 628564 - DNA, 75 bp, synthetic construct
  source 1..75: mol_type = other DNA
accctgaagacatcaaagcagcgattagaaaacgcggaatgacgaccagtcagttatcccgttgtcatgggctag

SEQ ID NO: 628565 - DNA, 75 bp, synthetic construct
  source 1..75: mol_type = other DNA
ggcgaggaaccgcccctgaatggcaaatgaaacgggaaatgttgagtcagtgttatacaactaaatggcgagata

SEQ ID NO: 628566 - DNA, 75 bp, synthetic construct
  source 1..75: mol_type = other DNA
atgcctgttatcagagactgccagcgttgtggtggtcgtggctatgaaagattaccttcaacggaggcatttaat

SEQ ID NO: 628567 - DNA, 75 bp, synthetic construct
  source 1..75: mol_type = other DNA
ggcttacagccgtgtgtcgactttctccggggattatctccgcgtaactgacaacaaggggaaaaacgcacgatg

SEQ ID NO: 628568 - DNA, 75 bp, synthetic construct
  source 1..75: mol_type = other DNA
tatcactaatctcggaactaatcttggttatgacggccacggcgaaatggatatcagtaatgaggggcttgttgt

SEQ ID NO: 628569 - DNA, 75 bp, synthetic construct
  source 1..75: mol_type = other DNA
gttgaggctacaccgtgaacacatctcaagcaatattgaaaagctggtacagctatcacttgaaattgaagattt

SEQ ID NO: 628570 - DNA, 75 bp, synthetic construct
  source 1..75: mol_type = other DNA
agaaaactggcaggccaacccctgggtctgggtaatcgaatttaaggtggtgcccaatgttcaggataatccagc

SEQ ID NO: 628571 - DNA, 75 bp, synthetic construct
  source 1..75: mol_type = other DNA
tgatcaggtggaagcgatgaccctggccgataaaatcgtggtgatgaaccacgggaaagtcgaacaaatgggttc

SEQ ID NO: 628572 - DNA, 75 bp, synthetic construct
  source 1..75: mol_type = other DNA
agagttttgtttttgccgcttcaagttcaacatatggtgatcataccgctctgcccaaaatagaacatacaattg

SEQ ID NO: 628573 - DNA, 75 bp, synthetic construct
  source 1..75: mol_type = other DNA
gacgattcccgccgaacgaatgaaggctaagcgtgaacacattgttcctttatcaccacaagcattagaaattct

SEQ ID NO: 628574 - DNA, 75 bp, synthetic construct
  source 1..75: mol_type = other DNA
cgttggaaccgtctgatcactcagttattaccaactatcgcgacctataatcagttaactgaaggtacaaaacgt

SEQ ID NO: 628575 - DNA, 75 bp, synthetic construct
  source 1..75: mol_type = other DNA
gcaacacagaagttctgcgcgctaaagcgttagaaaaggatctaacgttgcatgatggcgatggtctttttctgc

SEQ ID NO: 628576 - DNA, 75 bp, synthetic construct
  source 1..75: mol_type = other DNA
attgaattagacagcattttctcaacagtggctgctaactggttccagataaaaagcagaagcgtcacagaagat

SEQ ID NO: 628577 - DNA, 75 bp, synthetic construct
  source 1..75: mol_type = other DNA
cggtgcgataccagttcaggagattaaggccagaacgattgttgaagcattggagccaataaaagcacgtggcgc

SEQ ID NO: 628578 - DNA, 75 bp, synthetic construct
  source 1..75: mol_type = other DNA
tcgtcaaaaccactggtaaaaaactctggcgcttccgttatcaacgaccgggaagcagcagccgcacaaatttga

SEQ ID NO: 628579 - DNA, 75 bp, synthetic construct
  source 1..75: mol_type = other DNA
aatctacttcgaacagttatgaagtgtgaggcttgtggtaataccatgattgttcatgcggtatctggaagtttg

SEQ ID NO: 628580 - DNA, 75 bp, synthetic construct
  source 1..75: mol_type = other DNA
gtatctgaacaacgtatcagccagaaagaggttactgcaatcggtgatgttagaatcaggcagcgctcgccgcag

SEQ ID NO: 628581 - DNA, 75 bp, synthetic construct
  source 1..75: mol_type = other DNA
aagagttgctatcgattctaaaagaaatcgttcatttccaggtgggaagcattaatttaagcaccagtatcggtg

SEQ ID NO: 628582 - DNA, 75 bp, synthetic construct
  source 1..75: mol_type = other DNA
gaaagaacaggtgagaaattctcaagaggccaaaactaataccttcttgttagttgctgagcgttggtggaatgt

SEQ ID NO: 628583 - DNA, 75 bp, synthetic construct
  source 1..75: mol_type = other DNA
agaattaccaaagctgatgcgttctctagtaatgtcaaatctatctgttacgactcgctgtctcattgaatggca

SEQ ID NO: 628584 - DNA, 75 bp, synthetic construct
  source 1..75: mol_type = other DNA
tataatatcattaatgaatttttaattgtagcaaaattcaaccagttgaaaacaagaaagatgctaatgaaactt

SEQ ID NO: 628585 - DNA, 75 bp, synthetic construct
  source 1..75: mol_type = other DNA
gtgatctatgggctgatattttgttcaagggtgatgcaagtaatttaaagtcagcaactgatgagcttgtttatt

SEQ ID NO: 628586 - DNA, 75 bp, synthetic construct
  source 1..75: mol_type = other DNA
tgccattctttcggctaattctgtagataaacattggcctaagaaagaattgcattctgtgcttgcaagagaaat

SEQ ID NO: 628587 - DNA, 75 bp, synthetic construct
  source 1..75: mol_type = other DNA
agtacttttatcgccccaaaaaaccagcacatggatttattaaggataaaagtatattaacaaatgcagaaaaac

SEQ ID NO: 628588 - DNA, 75 bp, synthetic construct
  source 1..75: mol_type = other DNA
agcaacaatcaaggtcgctgaccagggtgaagaagggattgcggaagctgaccgcgccgatggtagttttatgga

SEQ ID NO: 628589 - DNA, 75 bp, synthetic construct
  source 1..75: mol_type = other DNA
aggtaatattctaaaaggagcattaaagctcggttgtaagatagatataaatggcgatagcaaaccggatgtaga

SEQ ID NO: 628590 - DNA, 75 bp, synthetic construct
  source 1..75: mol_type = other DNA
aaggaaacaaggatgagctgatcaatattttatatactgaaaatcaatttgagccatttttcaataaattaaatg

SEQ ID NO: 628591 - DNA, 75 bp, synthetic construct
  source 1..75: mol_type = other DNA
agtgagcgaatgcctgaaaagggccagaacgtgcttatttcggtgaatttcgatagctctctggttgaaccgcta

SEQ ID NO: 628592 - DNA, 75 bp, synthetic construct
  source 1..75: mol_type = other DNA
aactccggatggttggataagctgtagtgagcgaatgcctgaaaagggccagaacgtgcttatttcggtgaattt

SEQ ID NO: 628593 - DNA, 75 bp, synthetic construct
  source 1..75: mol_type = other DNA
aacacggaaaagctgtcggctggaacgcctatcgcgccgccatgcttcaggccgaacctgtaagtaatagtgatg

SEQ ID NO: 628594 - DNA, 75 bp, synthetic construct
  source 1..75: mol_type = other DNA
tgttactaaaaaaggttttaaggcaacaaataacgaacatgctatatcaatttttcgcaatcatatttatgggcg

SEQ ID NO: 628595 - DNA, 75 bp, synthetic construct
  source 1..75: mol_type = other DNA
gatgctggcggtggtccccgactcggtgatctatgaggcaatgaaggcattcaggcatctgaatgatgccgaaaa

SEQ ID NO: 628596 - DNA, 75 bp, synthetic construct
  source 1..75: mol_type = other DNA
aaagagtttatatccaggtggtattacccactggatgccactaccggaaccaccgcaggaggttaaccgtggcta

SEQ ID NO: 628597 - DNA, 75 bp, synthetic construct
  source 1..75: mol_type = other DNA
gatatctgcgaaatcatacgctctaccgtgctgttcgtacttctgtggatggcaggaaggatcaacccgcccagg

SEQ ID NO: 628598 - DNA, 75 bp, synthetic construct
  source 1..75: mol_type = other DNA
gaaattttttacaatcgttacgtaatacaacggtgttgttactcgacattgctttaattgaatcacttaagacta

SEQ ID NO: 628599 - DNA, 75 bp, synthetic construct
  source 1..75: mol_type = other DNA
tcggcgaagtacttcctgctaatgcgacagagaaacaacgtcaggaatatcttgcaaaactgcgtgacacgcagg

SEQ ID NO: 628600 - DNA, 75 bp, synthetic construct
  source 1..75: mol_type = other DNA
cattccaagctgattagtctcggttttatcgactacgtgaatgccttaaaagatgccgggtatgtccgtttgttt

SEQ ID NO: 628601 - DNA, 75 bp, synthetic construct
  source 1..75: mol_type = other DNA
ttgatatcacctcgaataaaattcgccttaagattgatggtagtaaagttaaaacatatgatgaaattaaagtta

SEQ ID NO: 628602 - DNA, 75 bp, synthetic construct
  source 1..75: mol_type = other DNA
caagtctgacagttacgatgccattaatggttcacagctttatgccattagcgactcggtagcaaaaataacgta

SEQ ID NO: 628603 - DNA, 75 bp, synthetic construct
  source 1..75: mol_type = other DNA
atcaattgcaggaatcacgtagatactgttatggcctgcaagttttttcctggtccggtttcccggattgcaggc

SEQ ID NO: 628604 - DNA, 75 bp, synthetic construct
  source 1..75: mol_type = other DNA
agaaggtgcagtaatcagcgccaccagagacccggagtattactttattgtggttctggcggggcagtcaaacag

SEQ ID NO: 628605 - DNA, 75 bp, synthetic construct
  source 1..75: mol_type = other DNA
agtggttcaccaaaaaaggttggaccattgtaagtggcttggctaaaggtgttgattcaattgctcatacctccg

SEQ ID NO: 628606 - DNA, 75 bp, synthetic construct
  source 1..75: mol_type = other DNA
cgccgcccgctatcaccgtcctgctggcggcgcgcctgccacacgctaccgcaagctggtcagtcgccatctgca

SEQ ID NO: 628607 - DNA, 75 bp, synthetic construct
  source 1..75: mol_type = other DNA
atgaagaaaaaaactatatctcagtgcgttatcttgttctttagccttcttaacacccatgtagggatggctggg

SEQ ID NO: 628608 - DNA, 75 bp, synthetic construct
  source 1..75: mol_type = other DNA
gatgcgcaaagtcagcaagaaatcccgctcaatcaggtccagcctcttacgcccttaaaagccggggataacaca

SEQ ID NO: 628609 - DNA, 75 bp, synthetic construct
  source 1..75: mol_type = other DNA
caggggcgcttcccgccgcgctgtcactttggccgcaacagctgtgcctggcttctttcggatgtgctctggtgg

SEQ ID NO: 628610 - DNA, 75 bp, synthetic construct
  source 1..75: mol_type = other DNA
actctccaggaaacccggggcggttcagggcgatgttattaaggttaattttggattcatcaatggtcagaagtt

SEQ ID NO: 628611 - DNA, 75 bp, synthetic construct
  source 1..75: mol_type = other DNA
tcctccaaaacactcaacgttgagcgttacgttattccgacaaaagcgcaggcgcttgcgcttttgaaagggatc

SEQ ID NO: 628612 - DNA, 75 bp, synthetic construct
  source 1..75: mol_type = other DNA
cctgaaatccaacatccagctggtgttcaacaacgccattctggcgagcgaaattgccaaagaatatcagcgtct

SEQ ID NO: 628613 - DNA, 75 bp, synthetic construct
  source 1..75: mol_type = other DNA
atagagttagatacaattaaaaaaaataaatatacaaattatgagttaagaagaaaatttgacaaacagaatgaa

SEQ ID NO: 628614 - DNA, 75 bp, synthetic construct
  source 1..75: mol_type = other DNA
ggtatggctttcgtcagtctgaaaccgtgggaagagcgtagtggtgacgaaaacagtgcggaagcggtaatccat

SEQ ID NO: 628615 - DNA, 75 bp, synthetic construct
  source 1..75: mol_type = other DNA
acacacagtgggcgtcggcggaaaggggaaacacggaaactggattacgcgttgctaggttgggctgtctcagca

SEQ ID NO: 628616 - DNA, 75 bp, synthetic construct
  source 1..75: mol_type = other DNA
ggcaattgcgcgtgccgcagatggagatgaaatgccaataaaaaagcctgagttcgatgagggacgaactcaggc

SEQ ID NO: 628617 - DNA, 75 bp, synthetic construct
  source 1..75: mol_type = other DNA
ttctaacaaacggcctgccattgtggagcggcaatattattttcttcaacgtgccggaagtgatcctctgcgtgg

SEQ ID NO: 628618 - DNA, 75 bp, synthetic construct
  source 1..75: mol_type = other DNA
ttagatggtgatgatgcaggtcaatgtaatcaatgttcatcatgctcagctaacgtaccagtcccttgttatacc

SEQ ID NO: 628619 - DNA, 75 bp, synthetic construct
  source 1..75: mol_type = other DNA
ttttcatggcaacattgagtcattatcaagtttaaatgacaaggtgtctagtttaaaaatatcccctttacgttc

SEQ ID NO: 628620 - DNA, 75 bp, synthetic construct
  source 1..75: mol_type = other DNA
aagaatgctggatggttggaagagagtatattcacgtatcaccagacggtaatccaaagccttctgaagtggtca

SEQ ID NO: 628621 - DNA, 75 bp, synthetic construct
  source 1..75: mol_type = other DNA
ttaatgtcaccgtcgcctattcctgctatggataacccccgcatggcgatgatgcctgctattcagatttttggc

SEQ ID NO: 628622 - DNA, 75 bp, synthetic construct
  source 1..75: mol_type = other DNA
ggtgacgggcaaaatgttgatgttcgccctggcctccagtgttgtgctggttaatgaagccacagttcctgcgtt

SEQ ID NO: 628623 - DNA, 75 bp, synthetic construct
  source 1..75: mol_type = other DNA
caggaaccagttccggcgatgccatggcattgatggaaaaccttgcgtcaaaattacctgcgggcattggttatg

SEQ ID NO: 628624 - DNA, 75 bp, synthetic construct
  source 1..75: mol_type = other DNA
catattcagaatataatggtgccgccgctcgcgatgctgatgggatctatcgcgtcatgtatatcgcaaaatttg

SEQ ID NO: 628625 - DNA, 75 bp, synthetic construct
  source 1..75: mol_type = other DNA
cgaatctggcggtttatctcgcgtcaccgctttcctcggcaaccacaggggcagccctgcgcgtcgatggcggtg

SEQ ID NO: 628626 - DNA, 75 bp, synthetic construct
  source 1..75: mol_type = other DNA
gcacaatcgggacgcagtgcgcgtgaacaggccgatgagtttgttaaaacctcgcgtccgagctccatcatccag

SEQ ID NO: 628627 - DNA, 75 bp, synthetic construct
  source 1..75: mol_type = other DNA
ccggcattaacccggcgtatttgactatcccgatgctgcaggcgtcaaaccttggccgtaccctttcgcccgttt

SEQ ID NO: 628628 - DNA, 75 bp, synthetic construct
  source 1..75: mol_type = other DNA
ttcggcgagtatcatcctgatgctggtattggtgattctgacaatgctggcggcagtcacgaccggttcaggcaa

SEQ ID NO: 628629 - DNA, 75 bp, synthetic construct
  source 1..75: mol_type = other DNA
tgaaaaatactggaacaggtggtgcctatcgcgtcgtttcccatatgaaagaacaggttgttgagccagactctt

SEQ ID NO: 628630 - DNA, 75 bp, synthetic construct
  source 1..75: mol_type = other DNA
gatgacctgaaggccatcagcaaattcaaggacctcacgcctccgcgcttcagcgatgtggtcagccgtcaggat

SEQ ID NO: 628631 - DNA, 75 bp, synthetic construct
  source 1..75: mol_type = other DNA
gaactactttctgacggtaaaagctggagcaaaattcaggctttgatcggttgttcaagggctactatcgcaaag

SEQ ID NO: 628632 - DNA, 75 bp, synthetic construct
  source 1..75: mol_type = other DNA
catccacgaaagagcaagatgcgaatagggcattgaaagagttagaggcttttgctcagtcacatgatctgaaaa

SEQ ID NO: 628633 - DNA, 75 bp, synthetic construct
  source 1..75: mol_type = other DNA
ctggcggccctcgccgcccgagcggtgaaacgtccggttaaagtgatgctcccccgcccctctattcccaataac

SEQ ID NO: 628634 - DNA, 75 bp, synthetic construct
  source 1..75: mol_type = other DNA
gcgctgctgggtatgctgacatttgccgcagtgccggcactgcaggcccgtctgattggtgtcgctgagcaacat

SEQ ID NO: 628635 - DNA, 75 bp, synthetic construct
  source 1..75: mol_type = other DNA
caggggttaccggagcaacggtgagtctgtttatgctggtttacggtattacagctgcggtaggtaatattcttg

SEQ ID NO: 628636 - DNA, 75 bp, synthetic construct
  source 1..75: mol_type = other DNA
gacacggcaggcaacagtaattccgccagccataatgtgctggtcaacagcgccttgcctgccgtcaccattaac

SEQ ID NO: 628637 - DNA, 75 bp, synthetic construct
  source 1..75: mol_type = other DNA
gtttcaggtgccactagcgcaggaaacccggtcactatcacccatccggtcaccgtcgatctggcggcggtggcg

SEQ ID NO: 628638 - DNA, 75 bp, synthetic construct
  source 1..75: mol_type = other DNA
ggcattaacaccatcgccaccgatgacgtgattaacgccaccgaaaaaggcgcggatctgcaaatttccggcacc

SEQ ID NO: 628639 - DNA, 75 bp, synthetic construct
  source 1..75: mol_type = other DNA
attaacaccatcgccaccgacgatattcttaacgccgccgaggcgggcaatccgctaaccatcagcggcagcagt

SEQ ID NO: 628640 - DNA, 75 bp, synthetic construct
  source 1..75: mol_type = other DNA
ggattagcccccgtagaactgactgcccagaccaccgcgattgaaagcattgcgccatttcttgataccgttgct

SEQ ID NO: 628641 - DNA, 75 bp, synthetic construct
  source 1..75: mol_type = other DNA
tccttaacgtgagcgaagcgggcgcggggataaccatcagcggtaccaccacggcacaggccggacagacgctga

SEQ ID NO: 628642 - DNA, 75 bp, synthetic construct
  source 1..75: mol_type = other DNA
gctcactttcgatcagacgctgatcgaccatttcgcggaagaaggctacaaacccgagttcggtgcgcgtgaact

SEQ ID NO: 628643 - DNA, 75 bp, synthetic construct
  source 1..75: mol_type = other DNA
gccgatgccgtgcggctgtcccgcgccggcctgcgcgaaggcagcaaaccggtggctaccttcctgtttctgggc

SEQ ID NO: 628644 - DNA, 75 bp, synthetic construct
  source 1..75: mol_type = other DNA
aagtcgataccgaacacctgctgttggcgctcgccgacagcgacgtggtcaagaccattctggggcaattcaaga

SEQ ID NO: 628645 - DNA, 75 bp, synthetic construct
  source 1..75: mol_type = other DNA
aaattacactgccagcgtggcgagcgatggtagctggagtgccaccgttcccgctgccgatttagcgttattaac

SEQ ID NO: 628646 - DNA, 75 bp, synthetic construct
  source 1..75: mol_type = other DNA
gcaggcgctggtggtcagcggcagcagctcggggctggctgaaggcacgccgcttaccgtcacaattaataatgt

SEQ ID NO: 628647 - DNA, 75 bp, synthetic construct
  source 1..75: mol_type = other DNA
accattaacccggtggcaaccgacgatattattaacgccgccgaagcgggcgtcgcgcaaaccatcagcgggcag

SEQ ID NO: 628648 - DNA, 75 bp, synthetic construct
  source 1..75: mol_type = other DNA
gacacggcaggcaacagcaattccgccagccataatgtgcaggccaacagcgccttgcctggcgttaccattaac

SEQ ID NO: 628649 - DNA, 75 bp, synthetic construct
  source 1..75: mol_type = other DNA
cacccatccggtcaccgtcgatctggcggcggtggcgatttccattaacaccgtttccggcgacgatgtgattaa

SEQ ID NO: 628650 - DNA, 75 bp, synthetic construct
  source 1..75: mol_type = other DNA
acggcgttggcaatactggcagcggttcgcgagatattactatcgacgccaacctgccaggtctgcgcgttgaca

SEQ ID NO: 628651 - DNA, 75 bp, synthetic construct
  source 1..75: mol_type = other DNA
ctatacggtaacggcggcggtgaccagcagtatcggcaacagcgccaccgccagccataacgtactggtcgacag

SEQ ID NO: 628652 - DNA, 75 bp, synthetic construct
  source 1..75: mol_type = other DNA
accacgcactggcggtagatatcaccgcgccggatctcaccattaataccgtcgcaggcgatgacattatcaacg

SEQ ID NO: 628653 - DNA, 75 bp, synthetic construct
  source 1..75: mol_type = other DNA
cgcgcgatatcacgatcgacgccaatctgcctggcctgcgggtcgataccgtggcgggcgatgatgttattaaca

SEQ ID NO: 628654 - DNA, 75 bp, synthetic construct
  source 1..75: mol_type = other DNA
atcaccggcaccagtaatcagcctgcgggcaccaccattacggtgacgctgaacgggcaaaattacaccgctact

SEQ ID NO: 628655 - DNA, 75 bp, synthetic construct
  source 1..75: mol_type = other DNA
cggcggtcaccgcactgggccaggccaactacacggtaacggcggcggtgacgagtaatatcggcaacagcaaca

SEQ ID NO: 628656 - DNA, 75 bp, synthetic construct
  source 1..75: mol_type = other DNA
ctacaccaccaccctggatgcctccggcaactggagcgtcggcgttccggctgcggatgtctctgcgctgggcag

SEQ ID NO: 628657 - DNA, 75 bp, synthetic construct
  source 1..75: mol_type = other DNA
acgcgaatctgcccggtctgcgggtcgatactgtctctggcgatgatgtggtcaatattatcgagcacggacagg

SEQ ID NO: 628658 - DNA, 75 bp, synthetic construct
  source 1..75: mol_type = other DNA
gctgaacgggcaaaattacaccaccacgaccgacgcctccggcaactggagcgtcaccgttccggcatcggcggt

SEQ ID NO: 628659 - DNA, 75 bp, synthetic construct
  source 1..75: mol_type = other DNA
gcgggtgatgacattatcaacgccgctgaaatcgccgttaaccagaccctcagcggacaggttacggggacggcg

SEQ ID NO: 628660 - DNA, 75 bp, synthetic construct
  source 1..75: mol_type = other DNA
ggtgatccgctgcaacggttatttcctgcaagcggcgaatacagctgaacaatcggaactggtgtttgccgatgg

SEQ ID NO: 628661 - DNA, 75 bp, synthetic construct
  source 1..75: mol_type = other DNA
acccgccccggccggtacgggcaccgcgcgccggcgcggcagtgggctggccagccgtatcagcgaacagtccga

SEQ ID NO: 628662 - DNA, 75 bp, synthetic construct
  source 1..75: mol_type = other DNA
gactcgggatctactcgctccaattaaggtagtagaggcgagtgggcgatatgaagtagcttcgcgtcttcaaca

SEQ ID NO: 628663 - DNA, 75 bp, synthetic construct
  source 1..75: mol_type = other DNA
ataatccagctcaagatatggctggggcaatcgctgtagctaaacgagtgcaccgcccggctctggatttcgaac

SEQ ID NO: 628664 - DNA, 75 bp, synthetic construct
  source 1..75: mol_type = other DNA
aaggccctgcgctcaatgggctacgacactaaaacggaagtttgtggtcatggtttccgagctatggcctgtagc

SEQ ID NO: 628665 - DNA, 75 bp, synthetic construct
  source 1..75: mol_type = other DNA
atgaaatatatttgttttaaagaactaccctattgtgatagtgatagtgatagtgatatcagtataatagaatct

SEQ ID NO: 628666 - DNA, 75 bp, synthetic construct
  source 1..75: mol_type = other DNA
ttcctattggcacattggaaatatatactgatggagaatggtgctggtattctgatttaatctattacattgaaa

SEQ ID NO: 628667 - DNA, 75 bp, synthetic construct
  source 1..75: mol_type = other DNA
cacaggccagcattaccatttgataggttctcagagcttttagagcgcatcgagagctttaaaggtaggaaactt

SEQ ID NO: 628668 - DNA, 75 bp, synthetic construct
  source 1..75: mol_type = other DNA
ttaacccggaggaactcagcgcgttaactccgcggcctacgctggcgattgtctctggactgtatgagctgtttc

SEQ ID NO: 628669 - DNA, 75 bp, synthetic construct
  source 1..75: mol_type = other DNA
ccccccagactgatgaatcacctgtaatcatagaaacgcatgacttatcgcgtatttatccgggtgtggtggcgt

SEQ ID NO: 628670 - DNA, 75 bp, synthetic construct
  source 1..75: mol_type = other DNA
ctatttgactttagctgaggagttaagaccactattaagtcatgtagctggttttatttcaattgaacgttttca

SEQ ID NO: 628671 - DNA, 75 bp, synthetic construct
  source 1..75: mol_type = other DNA
aacatctggagaaatgaggaagaaaataaagaaattgtgtttgaatggcaggggcgacgctgggatgcaggtaag

SEQ ID NO: 628672 - DNA, 75 bp, synthetic construct
  source 1..75: mol_type = other DNA
agcgttatgtcgtcacaaatgaccgttttcagttcattttgcaggagagaaagaccgctgaaaccgggaagaatg

SEQ ID NO: 628673 - DNA, 75 bp, synthetic construct
  source 1..75: mol_type = other DNA
aaaccagctatgaaccgcaagaagcaaccagcatgatggctctctgcattaacggtaagtcgaaatcgctcagtg

SEQ ID NO: 628674 - DNA, 75 bp, synthetic construct
  source 1..75: mol_type = other DNA
gtgggaatggcgtggcgttattgcctcaatttgcctgtaaacaggggcttgcgaacggtgaactggtgcgcctgt

SEQ ID NO: 628675 - DNA, 75 bp, synthetic construct
  source 1..75: mol_type = other DNA
cgctttccggcaccagcgatcagcctgcgggtacggcgatcaccgtgacgctgaacggacaaaactacagcgcca

SEQ ID NO: 628676 - DNA, 75 bp, synthetic construct
  source 1..75: mol_type = other DNA
tattccggcgcagcagtttgccggattaagcgacggcagctacaccattagcgcgacggttagcgatcaggccgg

SEQ ID NO: 628677 - DNA, 75 bp, synthetic construct
  source 1..75: mol_type = other DNA
tacggtagcgggcgatgatatcgtcaacagcattgaacacgggcaggcgctggtgatcaccggcggcagtagcgg

SEQ ID NO: 628678 - DNA, 75 bp, synthetic construct
  source 1..75: mol_type = other DNA
gccaacctgctgcgccgctacggcctgacgccgcaggcgctgcgccaacaggtcagcaaggtggtcggcaagggc

SEQ ID NO: 628679 - DNA, 75 bp, synthetic construct
  source 1..75: mol_type = other DNA
ccgtcagtattaaaacctgatccgtcagataaaagatcttcttgtccggacgtttcactgccggacgaaaaacaa

SEQ ID NO: 628680 - DNA, 75 bp, synthetic construct
  source 1..75: mol_type = other DNA
atctgggcttctgtttctaacgttttgtgtcctgctgacgctgtatatgatcaaatccgctttaggcattgatgt

SEQ ID NO: 628681 - DNA, 75 bp, synthetic construct
  source 1..75: mol_type = other DNA
attaaagtatcagattttactttaatcgacaaagcaccacaatattcaaatactacttggactggtgcactcatt

SEQ ID NO: 628682 - DNA, 75 bp, synthetic construct
  source 1..75: mol_type = other DNA
tgctgggcgttgcctacggactggcgctgtccgatctggtgctcgggccgggcatcccgtccgcttcggcgcgcg

SEQ ID NO: 628683 - DNA, 75 bp, synthetic construct
  source 1..75: mol_type = other DNA
aataaagatttatatccagaggttaataaattcatttcactatataaacagggcagaccttttcagatgagtatg

SEQ ID NO: 628684 - DNA, 75 bp, synthetic construct
  source 1..75: mol_type = other DNA
ctctgatagaaggtaaatctgataagtgtaaccaaataattgagttggatatggatgcatgtaaagaaatatctg

SEQ ID NO: 628685 - DNA, 75 bp, synthetic construct
  source 1..75: mol_type = other DNA
ccgtacacattgtctttaagcgttctgaccttgttgaaaaactgaatgatattattgcacggcattatcctggtg

SEQ ID NO: 628686 - DNA, 75 bp, synthetic construct
  source 1..75: mol_type = other DNA
cccgcgtccgaaattcctacataccatttttactataacaaaaacatgaacttatgtttaaaatcagtatgttag

SEQ ID NO: 628687 - DNA, 75 bp, synthetic construct
  source 1..75: mol_type = other DNA
gtcaacgttaaccttctcgcgctcttcttgtgttttagcggcaatattccgcttcgacatggcgttacgttttac

SEQ ID NO: 628688 - DNA, 75 bp, synthetic construct
  source 1..75: mol_type = other DNA
gaccaaagaagcattgccggtcattcgttaccgcacgcgtgatttaacccgactgttaccaggaacggcgcgaac

SEQ ID NO: 628689 - DNA, 75 bp, synthetic construct
  source 1..75: mol_type = other DNA
tcctgaaattgttaatcctcatgacggcacaccgcttgccgatggtgaacatggcgaactgttattcaccacgct

SEQ ID NO: 628690 - DNA, 75 bp, synthetic construct
  source 1..75: mol_type = other DNA
aacagaacagggacttaagcttggaaataatgttgttggtgatggtgcaagatttaaaggcagaggtaccataca

SEQ ID NO: 628691 - DNA, 75 bp, synthetic construct
  source 1..75: mol_type = other DNA
tcgtggggcttttattttcggttcaggcagatgctgcgcggggaagaaaaccctgctcgggtgctaaaggtggta

SEQ ID NO: 628692 - DNA, 75 bp, synthetic construct
  source 1..75: mol_type = other DNA
caagagctaatagtaagcgtctacctaataaaaatattcttaagttggcaggaaagccattaataaaatggacaa

SEQ ID NO: 628693 - DNA, 75 bp, synthetic construct
  source 1..75: mol_type = other DNA
gaccaaagaagcattgccggtcattcgttaccgcacgcgtgatttaacccgactgttgccaggaacggcacgaac

SEQ ID NO: 628694 - DNA, 75 bp, synthetic construct
  source 1..75: mol_type = other DNA
ggcagtgcatcagaacacgaacagcacacggggaggcgtgcactatcgcccttctccgcgacgatatgaaaaagc

SEQ ID NO: 628695 - DNA, 75 bp, synthetic construct
  source 1..75: mol_type = other DNA
tcattaacgttacgtgatttacagggcgacgaggtggaagcggacaaaacgttacacattgcgcaaaacggaacg

SEQ ID NO: 628696 - DNA, 75 bp, synthetic construct
  source 1..75: mol_type = other DNA
aacaccgctgcgcttactcacgcgatgttgcagtctgacagtgaaaataccacatcggtaaaagtgggagagcaa

SEQ ID NO: 628697 - DNA, 75 bp, synthetic construct
  source 1..75: mol_type = other DNA
tgagtggcaggaaattgaagattttggacatgaaagacttgaatggctaaagaaatatggtgattttgataatgg

SEQ ID NO: 628698 - DNA, 75 bp, synthetic construct
  source 1..75: mol_type = other DNA
aattaggtggaacaatcggcaaggtatctcaaaaaaacgggggatatgttgtcaatataaacatgaccccaatag

SEQ ID NO: 628699 - DNA, 75 bp, synthetic construct
  source 1..75: mol_type = other DNA
tcggcactgtatctagaaaaaacgggggatatgttgtcaatataaacatgagcccaatagacaatatgttaaaaa

SEQ ID NO: 628700 - DNA, 75 bp, synthetic construct
  source 1..75: mol_type = other DNA
gtcggtggccgggaaaaatgaggttgtaccggtcactgaaccccgtaaacccacctgtgcgccgctttatatggc

SEQ ID NO: 628701 - DNA, 75 bp, synthetic construct
  source 1..75: mol_type = other DNA
cagtcatatgtatattaatgtcaaatctacagtcagctcagggagcgactaagtcagttcaggttccaataagaa

SEQ ID NO: 628702 - DNA, 75 bp, synthetic construct
  source 1..75: mol_type = other DNA
aaactgaacgcaatgcactgcgtcaggagctggattcgctgaaggccggttcgcaaaccccggacaaaaaggcga

SEQ ID NO: 628703 - DNA, 75 bp, synthetic construct
  source 1..75: mol_type = other DNA
tcacggctgtaaaaggtgatgctaaaatacctgtcgataagattgaactatatatgcgtggtaaagcttctggtg

SEQ ID NO: 628704 - DNA, 75 bp, synthetic construct
  source 1..75: mol_type = other DNA
gttcatttgcaagtagttacactgacttcattgataaacttgatgaagttcacaaagaaaaagtagccgtaatac

SEQ ID NO: 628705 - DNA, 75 bp, synthetic construct
  source 1..75: mol_type = other DNA
gcgcacctgctgaaatcaacagaaaaagacccggcagtaaacgccattgctcatgccattctgggtggtgcagtg

SEQ ID NO: 628706 - DNA, 75 bp, synthetic construct
  source 1..75: mol_type = other DNA
aggagctggcgcaggagcgggaattaccgtcagacgggcttgggcgagggacgttttatgaggttttgaagatgg

SEQ ID NO: 628707 - DNA, 75 bp, synthetic construct
  source 1..75: mol_type = other DNA
gtgcggcacttacggttggtgtatcgctgtttaaagccctgacaggtgaaaccgaggagacaacagacaagaccg

SEQ ID NO: 628708 - DNA, 75 bp, synthetic construct
  source 1..75: mol_type = other DNA
gccgatccactggcagcaattcaggcgcaacagcaacgtgaattcgaaatgctggaaatgtaccgccagcagaat

SEQ ID NO: 628709 - DNA, 75 bp, synthetic construct
  source 1..75: mol_type = other DNA
agtcagtcgaagcgcttttgttccggttatggcgtggcacccggcaaacgtcaggtgaaatcaccggtcaccacg

SEQ ID NO: 628710 - DNA, 75 bp, synthetic construct
  source 1..75: mol_type = other DNA
cgcattaacgttggcaatatgcactacgccaatggcaagcaacaaatcgccaaaacggtttctgtggatgcgggc

SEQ ID NO: 628711 - DNA, 75 bp, synthetic construct
  source 1..75: mol_type = other DNA
caaacaacatccaggcgacaaacggctggactgaagacgactcaaaagcgttgcaacagactatagaaaacacag

SEQ ID NO: 628712 - DNA, 75 bp, synthetic construct
  source 1..75: mol_type = other DNA
gtcggcaatgcgtgtagcagccatcgagcaacaacaagcgaccgaatacagtaagaacattcaggggttgatgaa

SEQ ID NO: 628713 - DNA, 75 bp, synthetic construct
  source 1..75: mol_type = other DNA
agatactgtatcgggtattttatctgcgatttcagcaagtttcattttgagcaatgcagatgcagataccggaac

SEQ ID NO: 628714 - DNA, 75 bp, synthetic construct
  source 1..75: mol_type = other DNA
cggcggcggtcacggtattgatatcaccggcgacagcgcaacggtggataacaagggcaccatgaccgtcaccga

SEQ ID NO: 628715 - DNA, 75 bp, synthetic construct
  source 1..75: mol_type = other DNA
gcgtttacagtggatccggtaagaggtggcctattagacagactattaagacgtgaacatcagatggaaagaaga

SEQ ID NO: 628716 - DNA, 75 bp, synthetic construct
  source 1..75: mol_type = other DNA
gcttcctggcattgatatgttttagctcggggatacaggcggctcaaaaaatcgctgagttacatacccaaatgg

SEQ ID NO: 628717 - DNA, 75 bp, synthetic construct
  source 1..75: mol_type = other DNA
tatgctctctatatgataaggacacgttagtgcaacttgttgaaactggtggagctcatcctctgagtcgggaac

SEQ ID NO: 628718 - DNA, 75 bp, synthetic construct
  source 1..75: mol_type = other DNA
taataactattttcagagtgtcatggcagaacacagagaaaataaaacaagtaataaaatattaatggaaaaaat

SEQ ID NO: 628719 - DNA, 75 bp, synthetic construct
  source 1..75: mol_type = other DNA
tcatcctctgagtcgagaacctataacagaatcaatgattatgagaaaagatgaatgtcactttgattcaaaaaa

SEQ ID NO: 628720 - DNA, 75 bp, synthetic construct
  source 1..75: mol_type = other DNA
actggaaacagctgctgaagagatgcagtacaaggcggacaaagctgttttttcccgtaatgatacagaccccgt

SEQ ID NO: 628721 - DNA, 75 bp, synthetic construct
  source 1..75: mol_type = other DNA
tttcgaaccattggatttcattgcaaggctggccgccctggtaccgaagcccagagtcaacctaacccgcttcca

SEQ ID NO: 628722 - DNA, 75 bp, synthetic construct
  source 1..75: mol_type = other DNA
agacggcttgttgattatgcaacacgcctgcgtaacgaaaaatttgtctccctgattgatgtgatgaaagacggc

SEQ ID NO: 628723 - DNA, 75 bp, synthetic construct
  source 1..75: mol_type = other DNA
tcagtttaatctttctatcctcacaccagaaggcgcgcaatatggggtatatcaatccaggtcagttgcgatttt

SEQ ID NO: 628724 - DNA, 75 bp, synthetic construct
  source 1..75: mol_type = other DNA
ccggaaggagcacaatatggggtatatcaagccaggtcaattgcgattttgaatgtgccactagtatcgtggaca

SEQ ID NO: 628725 - DNA, 75 bp, synthetic construct
  source 1..75: mol_type = other DNA
gaaaatacggtcgttcacgacaagttggtgcgattgcaatcgacgggcggtatcattgaacaaacgctgccaact

SEQ ID NO: 628726 - DNA, 75 bp, synthetic construct
  source 1..75: mol_type = other DNA
ctataacagaatcaatgattatgagaaaagatgaatatcactttgattcaaaaaaagaatcctttgttgcaagtg

SEQ ID NO: 628727 - DNA, 75 bp, synthetic construct
  source 1..75: mol_type = other DNA
tttatggctttctgatgtatttgccacagcaggatatgaagcggttgctggcctggtcgaccatcactcaacttg

SEQ ID NO: 628728 - DNA, 75 bp, synthetic construct
  source 1..75: mol_type = other DNA
gcgggtgtctgggtatccagggttctgggggctttcgggaaaatatcaggtttgccggtcccgccgtggttaaaa

SEQ ID NO: 628729 - DNA, 75 bp, synthetic construct
  source 1..75: mol_type = other DNA
caaaccatgtcagcattgatgagcagtattatccagcatgaaaatggaagaaatatctattctcgagagctgatt

SEQ ID NO: 628730 - DNA, 75 bp, synthetic construct
  source 1..75: mol_type = other DNA
cgataaagcgcagcgttcagcactaaaagcgttacttatcactcatatcggttcgttggggttgtatcttgccgc

SEQ ID NO: 628731 - DNA, 75 bp, synthetic construct
  source 1..75: mol_type = other DNA
ccggcgtgccgccgttcaacggcttcttcagtaaattcccgctgtttgctgccggttttgcgttgtcagtggagt

SEQ ID NO: 628732 - DNA, 75 bp, synthetic construct
  source 1..75: mol_type = other DNA
cccgctgtttgctgccggttttgcgttgtcagtggagtactggatcctgctgccggttttgcgttgtcagtggag

SEQ ID NO: 628733 - DNA, 75 bp, synthetic construct
  source 1..75: mol_type = other DNA
gcgggggcaaatctggttctggtagccaatgacgaggtagccgaagatccggtacaacaaaacctgatggaaatg

SEQ ID NO: 628734 - DNA, 75 bp, synthetic construct
  source 1..75: mol_type = other DNA
ttggtctggtgtcgtgtgcaggaaaatcattaccccgtttctggcccggggattttttcccggtattctacgcct

SEQ ID NO: 628735 - DNA, 75 bp, synthetic construct
  source 1..75: mol_type = other DNA
gggttgaatctgtcccgtcatgcgcatatccggcaaccggccattaaccggctgtggggctgggccgttttttca

SEQ ID NO: 628736 - DNA, 75 bp, synthetic construct
  source 1..75: mol_type = other DNA
aaaggccgatgcgaaaagctcgctggcgctgattggcactggcactttatttaatgacagttgcagcctgaacat

SEQ ID NO: 628737 - DNA, 75 bp, synthetic construct
  source 1..75: mol_type = other DNA
cgctggcagccggtaagaccttccatatctgggccaagccgatgctggactcctttattttccttggggcagtgg

SEQ ID NO: 628738 - DNA, 75 bp, synthetic construct
  source 1..75: mol_type = other DNA
agccgaacccggcaacgccacgccatcgtttttggtaaccgataatcagggcgatcaacgcggtattctttccgc

SEQ ID NO: 628739 - DNA, 75 bp, synthetic construct
  source 1..75: mol_type = other DNA
cagtatcttctttgaataatggacatataaatcttggaacaggcgcttccattgaaactaagggagagcaagctg

SEQ ID NO: 628740 - DNA, 75 bp, synthetic construct
  source 1..75: mol_type = other DNA
cgaaaaacctgatcccgccaaccatgtggggctataacgacgacgttcaggactacacctacgatcctgaaaaag

SEQ ID NO: 628741 - DNA, 75 bp, synthetic construct
  source 1..75: mol_type = other DNA
ctcatccctatgactacaacgcctcactgaacaattatttacattattttgagaatttctctcgtaatgactgga

SEQ ID NO: 628742 - DNA, 75 bp, synthetic construct
  source 1..75: mol_type = other DNA
tcgcacagtgatatagtgagctattctctctttagaaatccattcaaccatatgactgtaatgttcaataaagaa

SEQ ID NO: 628743 - DNA, 75 bp, synthetic construct
  source 1..75: mol_type = other DNA
accttattactcggtaagcagtttgggggcaaggtggaatgcagcagtaaaacgtgctggtattcgccgccgtaa

SEQ ID NO: 628744 - DNA, 75 bp, synthetic construct
  source 1..75: mol_type = other DNA
gacagtgacgataagttcatcgataggaatttaaatcccaaaaagattaaaaaaacacccaaaaacggatgttta

SEQ ID NO: 628745 - DNA, 75 bp, synthetic construct
  source 1..75: mol_type = other DNA
ggaaaacacgccgggccatttgggtaaaaccgtaagaatggatgaagctggtcgtcgtattactgaatatcaggg

SEQ ID NO: 628746 - DNA, 75 bp, synthetic construct
  source 1..75: mol_type = other DNA
tgacgccaaccagggaaaaagccgcatcgacactaaccagtgtattgacagtaagaacattgacatttatacccc

SEQ ID NO: 628747 - DNA, 75 bp, synthetic construct
  source 1..75: mol_type = other DNA
accgccgaattgtcatccataccaggcacccccatcgaggctggtcccttcgatacagtagtgctttttaagatt

SEQ ID NO: 628748 - DNA, 75 bp, synthetic construct
  source 1..75: mol_type = other DNA
ggatcacgtcttttgagtgctcctattacacccttccgggcttcatcaaagagttcgaggtcagcggcaacctgc

SEQ ID NO: 628749 - DNA, 75 bp, synthetic construct
  source 1..75: mol_type = other DNA
gcgattgagaatatgacatcaggtggactaatttatgccgtatctggtgtacctggattgattgctgcaaacagc

SEQ ID NO: 628750 - DNA, 75 bp, synthetic construct
  source 1..75: mol_type = other DNA
acgggtggaatgacaacggcgacctggtgcgcatcagcggcccgcgacagacgcgggaatacggctacagtgcca

SEQ ID NO: 628751 - DNA, 75 bp, synthetic construct
  source 1..75: mol_type = other DNA
ctgataatgccggtgttagaaccggggtcattatgtcagttgctgaatatgaacggctgttaagtctggcagatc

SEQ ID NO: 628752 - DNA, 75 bp, synthetic construct
  source 1..75: mol_type = other DNA
tatgcgggcgatacgcaaaacagttcttccagtgcagttaccgaaagcctggcaaaatccggcaaagagacgaac

SEQ ID NO: 628753 - DNA, 75 bp, synthetic construct
  source 1..75: mol_type = other DNA
aatatggaagttcggctcagcgataacggtaaaaatattatctatcgctaccgacgggacactgaatacgccgac

SEQ ID NO: 628754 - DNA, 72 bp, synthetic construct
  source 1..72: mol_type = other DNA
gacgcgccagcgtcgcatcaggcaaccggctcgggcgttggatgtcggatgcggcgtgaccgccttgtctga

SEQ ID NO: 628755 - DNA, 75 bp, synthetic construct
  source 1..75: mol_type = other DNA
aactggcacaggaaattatccaggctaaccagccactgattgaccggattgttaatcaggaagtggacaaaatta

SEQ ID NO: 628756 - DNA, 75 bp, synthetic construct
  source 1..75: mol_type = other DNA
acgcattcacagcgtcacagcaggcaccaaatccgcgagattattttgacgggaacctggatgagtttactcgcc

SEQ ID NO: 628757 - DNA, 75 bp, synthetic construct
  source 1..75: mol_type = other DNA
atggataatatgattagcgacatggacaacgctgccagtgagtttgtgacaacatttctggaaaaaagaaattct

SEQ ID NO: 628758 - DNA, 75 bp, synthetic construct
  source 1..75: mol_type = other DNA
ggcttgttgaaagcgccggacacgctgaatcatcaatttactgggaagatcctgaaacaggaattttgtgtcggt

SEQ ID NO: 628759 - DNA, 75 bp, synthetic construct
  source 1..75: mol_type = other DNA
cgcttcggtatctctgaaggcatggtgatggctgctggccctggcgggaaagatatcttcctgttaagcccggat

SEQ ID NO: 628760 - DNA, 75 bp, synthetic construct
  source 1..75: mol_type = other DNA
tggtgatggctgccggtcctggcgggaaagatattttcctgctaagcccggatgccggtgctaaaccgggtcatc

SEQ ID NO: 628761 - DNA, 75 bp, synthetic construct
  source 1..75: mol_type = other DNA
taccgtcagcccggataacggttttacaaccagtattgaactcgaagtgaagattgatgatttcgaaatggaatg

SEQ ID NO: 628762 - DNA, 75 bp, synthetic construct
  source 1..75: mol_type = other DNA
gagctgggcaataacacgggaccacgctttaagtctgagctgataaacccgcgcaaaggtacgccaacaagctat

SEQ ID NO: 628763 - DNA, 75 bp, synthetic construct
  source 1..75: mol_type = other DNA
cccttgctgaaaatttgaaccaacaagggaaagacaaatcagctgatggggactccagaacggatattacccgta

SEQ ID NO: 628764 - DNA, 75 bp, synthetic construct
  source 1..75: mol_type = other DNA
agatcatcgcgatgggatggcagaacaaaatttgctctggtgatcccaataatattcatatgtcgcgtacgtttc

SEQ ID NO: 628765 - DNA, 75 bp, synthetic construct
  source 1..75: mol_type = other DNA
taaaattagacattataacttcaggtgatcttagcgtagaatgtctctcggggctaactgagaaattaaaagctg

SEQ ID NO: 628766 - DNA, 75 bp, synthetic construct
  source 1..75: mol_type = other DNA
gaagagtacatcgcgcggacttttggcgcggaacagagttatatcgttaccaacggaacatcgacgtcgaacaaa

SEQ ID NO: 628767 - DNA, 75 bp, synthetic construct
  source 1..75: mol_type = other DNA
gatacccgaacggcgccgggaactggtggcaggatgccagcgctgcgctgattgccaagaagaagaggaattacg

SEQ ID NO: 628768 - DNA, 75 bp, synthetic construct
  source 1..75: mol_type = other DNA
tttttcgctaaaaatttggcacagactgaacgtcaattatctagctaagcgattagcaaatcatgtcgagcattt

SEQ ID NO: 628769 - DNA, 75 bp, synthetic construct
  source 1..75: mol_type = other DNA
acaaccgcgcgaacatttcggtaagacgcgggaaggtatcgcatttggcggcggcactggcaggggtaactattg

SEQ ID NO: 628770 - DNA, 75 bp, synthetic construct
  source 1..75: mol_type = other DNA
gtagcatggtgatgaatgaagggggggcaggtagatatggagtctcacagattttcggtatcataatgctcaata

SEQ ID NO: 628771 - DNA, 75 bp, synthetic construct
  source 1..75: mol_type = other DNA
cggggcgtggaacgactggagcaggggcgggcggatattgttatcgcgccggatatgcattttcgttcctcgtcg

SEQ ID NO: 628772 - DNA, 75 bp, synthetic construct
  source 1..75: mol_type = other DNA
ctggcacttggggtttatcctgaaatcacactcgcggatgccagaatacgtcgtgacgagccacgtaagctgctt

SEQ ID NO: 628773 - DNA, 75 bp, synthetic construct
  source 1..75: mol_type = other DNA
agaaaggttccgaagcaatgctttttggggcttggtccttcattatcttcctgataagttttttattaataagat

SEQ ID NO: 628774 - DNA, 75 bp, synthetic construct
  source 1..75: mol_type = other DNA
gtggcgggctgccagcgctgcgctgactgtcaggaagagtttgaagaacgtggtaaacatttggctgtaacgaga

SEQ ID NO: 628775 - DNA, 75 bp, synthetic construct
  source 1..75: mol_type = other DNA
ccaacgagttagcggaactccagcggaaagccgccattgcgaaatgtcgcatcaaccattcggcggtttcggcta

SEQ ID NO: 628776 - DNA, 75 bp, synthetic construct
  source 1..75: mol_type = other DNA
ggatatgcattttcgttcctcgtcggagatcaactcgcgcaagctctatacgttaatgaacgtctacgttgccgc

SEQ ID NO: 628777 - DNA, 75 bp, synthetic construct
  source 1..75: mol_type = other DNA
ctaagtggtatttaaaaatttcagagaaaatagctgttaaatattcagatgttgttgtggctgataatgaagcta

SEQ ID NO: 628778 - DNA, 75 bp, synthetic construct
  source 1..75: mol_type = other DNA
ttggattttccttgctataggtagctttatcgataaccaacgtggtgcaacgttaagtagtactttggatccggc

SEQ ID NO: 628779 - DNA, 75 bp, synthetic construct
  source 1..75: mol_type = other DNA
gcaagattatttaaccttttctctgctgcggtttatcttactaaaggtggaatgaactttattctggaaactctt

SEQ ID NO: 628780 - DNA, 75 bp, synthetic construct
  source 1..75: mol_type = other DNA
atgtcaagtataataggaagttcaagagattactttaataaaagcctcaactcaaatcaatacgataataaagat

SEQ ID NO: 628781 - DNA, 75 bp, synthetic construct
  source 1..75: mol_type = other DNA
tcgtcatctgtctggtatttctgccattgaagtctgcgctagcgctgaactgctattttggtacttccggcggaa

SEQ ID NO: 628782 - DNA, 75 bp, synthetic construct
  source 1..75: mol_type = other DNA
agtcagttcctcgttttataccgaagaaacgttggttgaagaagataaagcattgttgattggtaatggacttaa

SEQ ID NO: 628783 - DNA, 75 bp, synthetic construct
  source 1..75: mol_type = other DNA
ggatcgttattatcaactcggcgtgacatacaatggtgtcgattacgatgccagtctggggaaaagccgcatcga

SEQ ID NO: 628784 - DNA, 75 bp, synthetic construct
  source 1..75: mol_type = other DNA
ttatgatattgtttacaatatcacactcagtatttggaaaagaaaatccagtggaaattttagtaaatagtcgtg

SEQ ID NO: 628785 - DNA, 75 bp, synthetic construct
  source 1..75: mol_type = other DNA
tggcggccagggccgatgaacgcaagaagctcgaacggctgtgccggtacatcagccgcccggcggtatccgaga

SEQ ID NO: 628786 - DNA, 75 bp, synthetic construct
  source 1..75: mol_type = other DNA
cttgaagagctgcgcgcagcgcaagaggaaattcgccaacgacaagggcaactggcagggcagattaatatcggc

SEQ ID NO: 628787 - DNA, 75 bp, synthetic construct
  source 1..75: mol_type = other DNA
attaagcgaatagatgctctcaaaaattgggttgaggagtgtattgatcagtgcactaatgagcaattaggtgat

SEQ ID NO: 628788 - DNA, 75 bp, synthetic construct
  source 1..75: mol_type = other DNA
ttgcgaaaaatacataacagatcaggtgaaaacgttatctcaacaagagatgaaaaaaaatctgaaggagatgaa

SEQ ID NO: 628789 - DNA, 75 bp, synthetic construct
  source 1..75: mol_type = other DNA
attaaaagatagattggatatacttgacaaaaaagggctggaatatctgaaaactattgaggaatggctctctag

SEQ ID NO: 628790 - DNA, 75 bp, synthetic construct
  source 1..75: mol_type = other DNA
gcgctctctcgtaaggctgatgagcaaggagcaacgtcattcaaaatcctgtcgacaacgggggataacaggcta

SEQ ID NO: 628791 - DNA, 75 bp, synthetic construct
  source 1..75: mol_type = other DNA
gatccgatctactatggaagctcaacatatctggtcggagcaatttgaggaattacatcagaattctttggcgct

SEQ ID NO: 628792 - DNA, 75 bp, synthetic construct
  source 1..75: mol_type = other DNA
taaaggataaatttaaaactggacttgcatatgtgcgggggccagaaaaaagcggatcttccgctcaaaatgcag

SEQ ID NO: 628793 - DNA, 75 bp, synthetic construct
  source 1..75: mol_type = other DNA
gctgcaactggcaaaacacgccaccatcggcaagcggatggatttcgacactgaagtgatggtgcgcctctactg

SEQ ID NO: 628794 - DNA, 75 bp, synthetic construct
  source 1..75: mol_type = other DNA
tattaatacttgttttcacattgctacaggtgtgtttttttgctctctggaaggctcgtgatggtagcacaacgt

SEQ ID NO: 628795 - DNA, 75 bp, synthetic construct
  source 1..75: mol_type = other DNA
tcagcctggatttgcccctatatttccagacacctgttatcacttaacccattactggcctgctgccgtagatat

SEQ ID NO: 628796 - DNA, 75 bp, synthetic construct
  source 1..75: mol_type = other DNA
ttaatttctaaaaacacaggtaatggtatagttaatgcagagagtggcgagacgcatctcacgggagataatacc

SEQ ID NO: 628797 - DNA, 75 bp, synthetic construct
  source 1..75: mol_type = other DNA
cagctgcagccggtgcgcatcaccacccgtgaagagtgcaaaattccaggcctgcttgacggcgaccggcagggg

SEQ ID NO: 628798 - DNA, 75 bp, synthetic construct
  source 1..75: mol_type = other DNA
gcaacaaaattaaccatagagcagcgccttgaactgcttgaaaatgaattgtcgcaaaataaacaagagctgaga

SEQ ID NO: 628799 - DNA, 75 bp, synthetic construct
  source 1..75: mol_type = other DNA
agatgacaaacatgatctcatatcagggacttgttcgcaccttccctagtgaacttgcaaaactggaaaagctaa

SEQ ID NO: 628800 - DNA, 75 bp, synthetic construct
  source 1..75: mol_type = other DNA
ctcgtggccggatataccgacgccaccggcgatgaaaaaagcaatcagcagttatcgctgcggcgtgccgaagcg

SEQ ID NO: 628801 - DNA, 75 bp, synthetic construct
  source 1..75: mol_type = other DNA
tgcattgcagtatcaaggtaacaacgaaggcagcaatgcaggagaagatcaagaaggtactaaaaatggtcacga

SEQ ID NO: 628802 - DNA, 75 bp, synthetic construct
  source 1..75: mol_type = other DNA
acggaaagcgagattgtctcgaagacccgtaaggccatccaggaagcgaccgaagcgctggcgctgtttgatacc

SEQ ID NO: 628803 - DNA, 75 bp, synthetic construct
  source 1..75: mol_type = other DNA
agtggcaacagttgtctttccctctgttctggcagggctgcgaattacaggtcactcttgacgcgcagcgtattg

SEQ ID NO: 628804 - DNA, 75 bp, synthetic construct
  source 1..75: mol_type = other DNA
agaacagagcaaatcagcaaaagaagcctggttgatcttcagcagaacaaatgacttcagagcgcgagaaatcat

SEQ ID NO: 628805 - DNA, 75 bp, synthetic construct
  source 1..75: mol_type = other DNA
gcagtaccagtaagcaagaaaagaacaaaaatgagccttggaacctatcctcaccttacccttgcaaaagccaga

SEQ ID NO: 628806 - DNA, 75 bp, synthetic construct
  source 1..75: mol_type = other DNA
aaaaaaataaatttttgcataaactggttaacagaaaggaggttcagagagcaattaatgaagcaaagcataatt

SEQ ID NO: 628807 - DNA, 75 bp, synthetic construct
  source 1..75: mol_type = other DNA
ggcacggcgatcgacctgacgcttcgtgatgagcacgggaacatcctcgatatgggcgcagggttcgatgaaatg

SEQ ID NO: 628808 - DNA, 75 bp, synthetic construct
  source 1..75: mol_type = other DNA
atgactggtggcggttttgtcggtatctccagcgaatggtggcacttcgaattaccccaggcagcgagttaccct

SEQ ID NO: 628809 - DNA, 75 bp, synthetic construct
  source 1..75: mol_type = other DNA
gggaggatggggaccagaagatgagaatagcgcaagggatcgtatgcagcatgaacggtataaagatgaattgcg

SEQ ID NO: 628810 - DNA, 75 bp, synthetic construct
  source 1..75: mol_type = other DNA
aaccggtactacgatccgttgcagggacgctatatcacccaggatcccattgggctgaaggggggatggaacctg

SEQ ID NO: 628811 - DNA, 75 bp, synthetic construct
  source 1..75: mol_type = other DNA
gtcgagtacacgcgggaccggctgcaccgcgagacggcccgtagcttcggcggggcgggcagtacagcggggtac

SEQ ID NO: 628812 - DNA, 75 bp, synthetic construct
  source 1..75: mol_type = other DNA
tgcggtaacaatgcaatttgcgactatgaactggaacccgcagttcactgtaacaggtcttgaattgccattaaa

SEQ ID NO: 628813 - DNA, 75 bp, synthetic construct
  source 1..75: mol_type = other DNA
tcggggctgtactataaccgtcaccggtactacgatccgttgcaggggcggtatatcaccccggacccgattggg

SEQ ID NO: 628814 - DNA, 75 bp, synthetic construct
  source 1..75: mol_type = other DNA
acaagggctttacaggattggttggataagaatccaacagcatctccaggggatcgagcagcagcagaaaacgtt

SEQ ID NO: 628815 - DNA, 75 bp, synthetic construct
  source 1..75: mol_type = other DNA
gccagtggctggcacagtgcgggctgacggtggagcggctggcggcacagatagagccggtttatttacctgagc

SEQ ID NO: 628816 - DNA, 75 bp, synthetic construct
  source 1..75: mol_type = other DNA
cgaacttcggcaagatgccttttcaacacgtttagctacgtacgatggtagtcattattctatagaaggtatact

SEQ ID NO: 628817 - DNA, 75 bp, synthetic construct
  source 1..75: mol_type = other DNA
accggacgctgatccatttcccggataaccctctggcttttctggagctcaataagccgggtttcatggataaac

SEQ ID NO: 628818 - DNA, 75 bp, synthetic construct
  source 1..75: mol_type = other DNA
caaatatcaatcattattatagaaacttagaaataaaaaactcacaacccaaaaatagagcatcaagcaaaagag

SEQ ID NO: 628819 - DNA, 75 bp, synthetic construct
  source 1..75: mol_type = other DNA
tgttgtaatgacaacgtttcgcggctattcttgagttgtgtaggttcaagaatggcccccgtgatgttgtcaggt

SEQ ID NO: 628820 - DNA, 75 bp, synthetic construct
  source 1..75: mol_type = other DNA
ggcgtctgagggatggcaactactgcccccaatggaccctggcggtatgggggagatgggtgtggttgaggcaga

SEQ ID NO: 628821 - DNA, 75 bp, synthetic construct
  source 1..75: mol_type = other DNA
cacgcgtgcaatcaggatgggttaatgagcgccgcacaagccgcgtttactcaaactttaaaaagtgagaagatt

SEQ ID NO: 628822 - DNA, 75 bp, synthetic construct
  source 1..75: mol_type = other DNA
agcgaaagaaaagatattgatgctcctgggtattatcggactgagcatttagtgttcgctgagagtagtgttaag

SEQ ID NO: 628823 - DNA, 75 bp, synthetic construct
  source 1..75: mol_type = other DNA
gcctgttcctgtcagcttatatggtgaagtatctgggacaacaaaaaaatgttaatttgctcactgtcatcaaac

SEQ ID NO: 628824 - DNA, 75 bp, synthetic construct
  source 1..75: mol_type = other DNA
aactgttctggaacgtttgcgagctattgtatctgacccacgcgcattacctcgcagaaaagaatgggttagtgg

SEQ ID NO: 628825 - DNA, 75 bp, synthetic construct
  source 1..75: mol_type = other DNA
ccgctgggacggcgaatggcgaaacgggtatggcggcgggagcgtgacctgacggggtggatgtcgctgtcgcgt

SEQ ID NO: 628826 - DNA, 75 bp, synthetic construct
  source 1..75: mol_type = other DNA
atgacaacggcgacctggtgcgcatcagcggcccgcgacagacgcgggaatacggctacagcgccacgggcaggc

SEQ ID NO: 628827 - DNA, 75 bp, synthetic construct
  source 1..75: mol_type = other DNA
agtgtatccacactaacaatgaggttatttactcaaccaggcataaacattttgttctgtgcgtgggaacagcct

SEQ ID NO: 628828 - DNA, 75 bp, synthetic construct
  source 1..75: mol_type = other DNA
ttgatgcgtttcattctccgtgggagtatctgagttcaattaccatgccacatgatgttctttatgaaccagcac

SEQ ID NO: 628829 - DNA, 75 bp, synthetic construct
  source 1..75: mol_type = other DNA
aactggcagatgttattgtgccgggagtcacccaggaattgagttttgtcgacatgctacagcggttgagagtgc

SEQ ID NO: 628830 - DNA, 75 bp, synthetic construct
  source 1..75: mol_type = other DNA
atgaaaaaactcgttataatttcagtaatgatattatctgttatgagtggttcaagactggctgataatcatacg

SEQ ID NO: 628831 - DNA, 75 bp, synthetic construct
  source 1..75: mol_type = other DNA
ccatccgcagcggcattgaccgctatctggagccctcccgcgcgcaaccgcgtgacccgtcttatgtggccggta

SEQ ID NO: 628832 - DNA, 75 bp, synthetic construct
  source 1..75: mol_type = other DNA
gggaaacccggcagggctggacactacagtcgatcacgggacagcaggtgcagtttcgtgtcgcggggaaaaccc

SEQ ID NO: 628833 - DNA, 75 bp, synthetic construct
  source 1..75: mol_type = other DNA
ttattgtgctgggagctactcaggaattgggttttgtcgatatgctacggcagtttagcgtgccgctgttgctga

SEQ ID NO: 628834 - DNA, 75 bp, synthetic construct
  source 1..75: mol_type = other DNA
tttttcgccaacgtttcatcagggcatgttcatttgcttggctttataccggagtatgtaaggatactggagcgg

SEQ ID NO: 628835 - DNA, 75 bp, synthetic construct
  source 1..75: mol_type = other DNA
gtgggccgaaaacgcctgatctggaatcgtacttctccacgccgacccggaaaactgatgcccggacgccaaata

SEQ ID NO: 628836 - DNA, 75 bp, synthetic construct
  source 1..75: mol_type = other DNA
gccggatcgccctggcagttaaagcaaacgaatcagcaccggaaccggacgacgctgagcttaaattccgcaaag

SEQ ID NO: 628837 - DNA, 75 bp, synthetic construct
  source 1..75: mol_type = other DNA
gactctctggtcaagaatgtcaataaatattttgcgccagatcctgacaataataatggtacgcgcaaatatgca

SEQ ID NO: 628838 - DNA, 75 bp, synthetic construct
  source 1..75: mol_type = other DNA
aaaggctaatacaattttgtaatgagatgtcacaaaaaaacaatatctgcattatattctcaatacatagtcgag

SEQ ID NO: 628839 - DNA, 75 bp, synthetic construct
  source 1..75: mol_type = other DNA
aaacaccagatatcaatacctactttactgagccagcgaataaacctggtaacagtaaagcaccgaatattaata

SEQ ID NO: 628840 - DNA, 75 bp, synthetic construct
  source 1..75: mol_type = other DNA
aatcgccatcgactggcagatgagtatgctggaggccgcgaagctgctaatgcctgccggggctatctattacaa

SEQ ID NO: 628841 - DNA, 75 bp, synthetic construct
  source 1..75: mol_type = other DNA
tgagatttcgatgcaggaacggctcagggatggaggtgaaacggttaaagacggtctgcttcatcgcagtattga

SEQ ID NO: 628842 - DNA, 75 bp, synthetic construct
  source 1..75: mol_type = other DNA
aacaacgtcttaagcaggcttcagatgcacgagctcaggaagtcgccggtagcgaagtgctttactccggtgatg

SEQ ID NO: 628843 - DNA, 75 bp, synthetic construct
  source 1..75: mol_type = other DNA
aattgcctgtcttgagccacgtatagatgagcttgagcgcgagctggaatcacttatccagctgaatggcgcgcc

SEQ ID NO: 628844 - DNA, 75 bp, synthetic construct
  source 1..75: mol_type = other DNA
gcagaatggagcattcaacgttatttacccttaggtgacgaacctacacctaaacaatggtcaaaggtcactagt

SEQ ID NO: 628845 - DNA, 75 bp, synthetic construct
  source 1..75: mol_type = other DNA
ggtttaggctgggtactaacgttcatcattctatggaactacgtcattgtgccagtactggcattgtgtggtgta

SEQ ID NO: 628846 - DNA, 75 bp, synthetic construct
  source 1..75: mol_type = other DNA
tcattctatggaactacgtcattgtgccagtactggccttatgtggtgtagtactccccatcgttccacttgatg

SEQ ID NO: 628847 - DNA, 75 bp, synthetic construct
  source 1..75: mol_type = other DNA
tcacgtacacaacgcggcgcgtattcgttatccgatggtacgcgtggactggctgcgtaagcgccatctcagcga

SEQ ID NO: 628848 - DNA, 75 bp, synthetic construct
  source 1..75: mol_type = other DNA
gacaacggcaatgagtatttcaaatggagacaccgcctcgctggcggccagctcaaagagctgatgaatcttaaa

SEQ ID NO: 628849 - DNA, 75 bp, synthetic construct
  source 1..75: mol_type = other DNA
catctactgtttgctggttgaaacgcgaacggataaagaaaaagatctacggaacgcgggaagaagcccgcagcg

SEQ ID NO: 628850 - DNA, 75 bp, synthetic construct
  source 1..75: mol_type = other DNA
tgtcgatattgttgagggtcgttttgatgccgggatacgcctgggtgaaattgttgataaggatatggttgcagt

SEQ ID NO: 628851 - DNA, 75 bp, synthetic construct
  source 1..75: mol_type = other DNA
tgtcgatattgttgatggtcgttttgatgccgggatacgcctgggtgaaattgtagataaggatatggttgcagt

SEQ ID NO: 628852 - DNA, 75 bp, synthetic construct
  source 1..75: mol_type = other DNA
tgtcgatattgttgaaggtcgttttgatgccgggatacgcctgggtgaaattgtcgataatgatatggttgcagt

SEQ ID NO: 628853 - DNA, 75 bp, synthetic construct
  source 1..75: mol_type = other DNA
gcagaatgggtcattcaacgttatttaccagtaggtgaagagcctacacccgaacaatggtcagaggtctctggt

SEQ ID NO: 628854 - DNA, 75 bp, synthetic construct
  source 1..75: mol_type = other DNA
tggcctgacgccgccgccccatttacgtgaagaaaccttcatggcgctttgcgataaagcagagtgcgggagcgc

SEQ ID NO: 628855 - DNA, 75 bp, synthetic construct
  source 1..75: mol_type = other DNA
ttaccggtacacccggcgcggggaaaagtacctttcttgaagtcttcggcatgcagctaattcgccaggggttga

SEQ ID NO: 628856 - DNA, 75 bp, synthetic construct
  source 1..75: mol_type = other DNA
tatcagagcaaactcagcgattacatcgtcgtacagtttgatggcgcaggcagcgtgaacgaagaccctaccgcg

SEQ ID NO: 628857 - DNA, 75 bp, synthetic construct
  source 1..75: mol_type = other DNA
attaggtgaaactaatgttttgataaaagcgcccggagcgaataatgtggatgttcagcgggggacaggaatatc

SEQ ID NO: 628858 - DNA, 75 bp, synthetic construct
  source 1..75: mol_type = other DNA
agcaaaaatgtcaggctaattacaagctccctgaaacagaactggataatcctgttagctatgcaactctggagt

SEQ ID NO: 628859 - DNA, 75 bp, synthetic construct
  source 1..75: mol_type = other DNA
tcggctagtcagcaaacatactggaatactgataaaaaagattctttataccaagttggttataacaccagtatt

SEQ ID NO: 628860 - DNA, 75 bp, synthetic construct
  source 1..75: mol_type = other DNA
tgcccgatggttcgtttacccgcaggcaggctgaagctatcgtggcggcgtaccagaacgtcaccatcgaagacg

SEQ ID NO: 628861 - DNA, 75 bp, synthetic construct
  source 1..75: mol_type = other DNA
catacactaaccctacccaatcatgcccggcaggttctgtgatccaaaacggcagatgtattagccagtcgcaaa

SEQ ID NO: 628862 - DNA, 75 bp, synthetic construct
  source 1..75: mol_type = other DNA
ctagcgcggacatactctcaaatttgccaagcgcagcttgatggctcgacgaggattaaggtggtttgttctggc

SEQ ID NO: 628863 - DNA, 75 bp, synthetic construct
  source 1..75: mol_type = other DNA
ttgtccaaatattactgtttatttatacagtaaacttctataatatcactgtacgcaatgtgttatgcgggggcc

SEQ ID NO: 628864 - DNA, 75 bp, synthetic construct
  source 1..75: mol_type = other DNA
gatgtcgaaaattaacgacgccatccagcatgtgcgcgacggtaaggcgcgttaccgcgtggtgttgaaagccga

SEQ ID NO: 628865 - DNA, 75 bp, synthetic construct
  source 1..75: mol_type = other DNA
gccattacgaataaaaagtgccgaaaattttccttctgcaacgatagtggcattagccgaagcattggtaaaaaa

SEQ ID NO: 628866 - DNA, 75 bp, synthetic construct
  source 1..75: mol_type = other DNA
tattccctacgtcagctaaaatacgaaggaacaaacaaagatagggctaaaaaacttattgaggtcgcttttaga

SEQ ID NO: 628867 - DNA, 75 bp, synthetic construct
  source 1..75: mol_type = other DNA
gattgagccggattttgaacgtcgcaccgattatgactggttgcgtgacgtggcgaaaaaactgggtgtcgaagc

SEQ ID NO: 628868 - DNA, 75 bp, synthetic construct
  source 1..75: mol_type = other DNA
cctgtagcacatttgactgcggtggtaagtgcgatattcgggcgcatatgcgcgacggcgtggtgacgcaaatta

SEQ ID NO: 628869 - DNA, 75 bp, synthetic construct
  source 1..75: mol_type = other DNA
tgtagtgagcgaatgccggaagaaacggatgacattattgttgtttcggatggcattgtaatgtcagggatttct

SEQ ID NO: 628870 - DNA, 75 bp, synthetic construct
  source 1..75: mol_type = other DNA
accaggagattgataattactgttttcaaaaaatgcaaaaatttccactgaagagaggcaaagggtcttttctct

SEQ ID NO: 628871 - DNA, 75 bp, synthetic construct
  source 1..75: mol_type = other DNA
tgtactgagttcgacccgcattacggcgctggcgaaagggaattcgcatcaaacaatgctggtggaggttgagaa

SEQ ID NO: 628872 - DNA, 75 bp, synthetic construct
  source 1..75: mol_type = other DNA
tcaaaagcgcgccgcacatcgctttcgaagcaaatattcgcgatccgcagaataatcctttcccgacgccttccg

SEQ ID NO: 628873 - DNA, 75 bp, synthetic construct
  source 1..75: mol_type = other DNA
ggtgatattgaagagaagacatttgtggatccagctgttaacggtcgcgaccaaaggtatgtaacccctgagtca

SEQ ID NO: 628874 - DNA, 75 bp, synthetic construct
  source 1..75: mol_type = other DNA
ctacgagttctccagactcccgtctggagtgcaaactgaaattgacgaagcaataaaaaaaatcattgggaaaat

SEQ ID NO: 628875 - DNA, 75 bp, synthetic construct
  source 1..75: mol_type = other DNA
taagaaatgctttagcctgtgcattgtcaacttgttataatagaaactatctcattaaagttgcaaaagggaaat

SEQ ID NO: 628876 - DNA, 75 bp, synthetic construct
  source 1..75: mol_type = other DNA
ttatgcaataaaagcagaatattgtcgtaatgttactgtgaatggtaatttcttcggtaaccagaaagtcactgg

SEQ ID NO: 628877 - DNA, 75 bp, synthetic construct
  source 1..75: mol_type = other DNA
tcccctatagatataactgatgttgccgatttgagactagtaggcacttcgatgttttacggaccttacggcata

SEQ ID NO: 628878 - DNA, 75 bp, synthetic construct
  source 1..75: mol_type = other DNA
ccggcaagcgtttcccgagcgtttcaagctgcttctgtgccagctgaaatggtcgagttattcccggttatcaat

SEQ ID NO: 628879 - DNA, 75 bp, synthetic construct
  source 1..75: mol_type = other DNA
atgtgtaatgtaacatggcctgatgcagcggtagacgctatcaaaacgctgatggattcacttattgagatttca

SEQ ID NO: 628880 - DNA, 75 bp, synthetic construct
  source 1..75: mol_type = other DNA
aatgtggatattattctctggcacagttttccttttgccggtgttcattcacaggaatattgcggtgtactgttc

SEQ ID NO: 628881 - DNA, 75 bp, synthetic construct
  source 1..75: mol_type = other DNA
aagataaattatctaagaaaacaattaaaagaaaacaataatattgtatcgtactatgacgaaattaactcacta

SEQ ID NO: 628882 - DNA, 75 bp, synthetic construct
  source 1..75: mol_type = other DNA
aatgaaatagagagaaacttaagaaaaaaggagaatgaaattgaattatataaaatgcatatgttttttattggg

SEQ ID NO: 628883 - DNA, 75 bp, synthetic construct
  source 1..75: mol_type = other DNA
gatgtcaggttttgcagggattggatggattcaagaaaaagagggaatagggaggttagcgcatgcttatacgca

SEQ ID NO: 628884 - DNA, 75 bp, synthetic construct
  source 1..75: mol_type = other DNA
acgcacatgtcaaatttatcatttggtccgctgacggtggcagcggcgaataaccactccggatacaatattttc

SEQ ID NO: 628885 - DNA, 75 bp, synthetic construct
  source 1..75: mol_type = other DNA
aactctataccgcagcgcaagaggcatacacttattatacggttgcaatgcaagcaaccggggatgccgcgattg

SEQ ID NO: 628886 - DNA, 75 bp, synthetic construct
  source 1..75: mol_type = other DNA
tccgcatgcgctggacacgcctccgcatttatcgccgcccgggttcggtgctggtggactaccgcattcttcgca

SEQ ID NO: 628887 - DNA, 75 bp, synthetic construct
  source 1..75: mol_type = other DNA
ttggtggtggtgtgagtggctttctcgtggagtcagtgatcgcaacgatagaagttaagtccacccttgataaag

SEQ ID NO: 628888 - DNA, 75 bp, synthetic construct
  source 1..75: mol_type = other DNA
tggaagaacaacttcttgccacttctaaaatccctgcaaactctggtcactctttgcataaaggaacgccgagag

SEQ ID NO: 628889 - DNA, 75 bp, synthetic construct
  source 1..75: mol_type = other DNA
aaagtcatgtaaaaaaaacgacgttagctttttgattaaaaaggaaaatgcagctgagcttgaggaggcgaatat

SEQ ID NO: 628890 - DNA, 75 bp, synthetic construct
  source 1..75: mol_type = other DNA
ctgtaatttttcttgaggccccatctgcgattgcaagtgtttgttctctagactcatattttaataaatccatgg

SEQ ID NO: 628891 - DNA, 75 bp, synthetic construct
  source 1..75: mol_type = other DNA
ccggaactcagggcgctggatgcaaaagcgaaaggtcaggccatcgcagatgcgctgttaatcgcaaggttcggg

SEQ ID NO: 628892 - DNA, 75 bp, synthetic construct
  source 1..75: mol_type = other DNA
gtgttcaccgccggcagtgccacggttactccgaaactgaatggagtggctggcccggcattccaggtcataaaa

SEQ ID NO: 628893 - DNA, 75 bp, synthetic construct
  source 1..75: mol_type = other DNA
ggcacacagtatgactccgtctacggcgcgtacaaaaacagggagagcgacaacgttttctttgtgccgttcatg

SEQ ID NO: 628894 - DNA, 75 bp, synthetic construct
  source 1..75: mol_type = other DNA
aacctgcgctgtttacagccatgctgacacagtttcgtgctgacctctccgtgtttaacgcgcagtgccatggtg

SEQ ID NO: 628895 - DNA, 75 bp, synthetic construct
  source 1..75: mol_type = other DNA
tgcggctatggcattagctgagcgtctgcgtgatgaattaccgggcgtgaaactgatgaccaaccacggcggcgg

SEQ ID NO: 628896 - DNA, 75 bp, synthetic construct
  source 1..75: mol_type = other DNA
ggcagttaacccggaatttaaagccgatcctgttgtcgatatatacctggtggcatctggtgccgatacgcaacc

SEQ ID NO: 628897 - DNA, 75 bp, synthetic construct
  source 1..75: mol_type = other DNA
gatgtgaaagctgacgagcagatcctggatatcggtgatgcttccgctcaggaactggctgaaatcctgaagaat

SEQ ID NO: 628898 - DNA, 75 bp, synthetic construct
  source 1..75: mol_type = other DNA
cgcagggctggagcattaaggacggcagtattcagttgtcagagggtgtatttaagatcaccaaacagaacaaca

SEQ ID NO: 628899 - DNA, 75 bp, synthetic construct
  source 1..75: mol_type = other DNA
cggacacgggggccagccaggattcggcgcgctggggtgtgggtaaaccgttatatcaggacctgattgcgcgca

SEQ ID NO: 628900 - DNA, 75 bp, synthetic construct
  source 1..75: mol_type = other DNA
tcgccagtaccatgaaagaaccgccgtatgtcagcagtttgcgcattgaaattccgccagacattgccgcaaaca

SEQ ID NO: 628901 - DNA, 75 bp, synthetic construct
  source 1..75: mol_type = other DNA
ggtgatgtggtggtcagtggtgcaattgagccggagtggtactacgtcatcgtattggcccggcattccaggcca

SEQ ID NO: 628902 - DNA, 75 bp, synthetic construct
  source 1..75: mol_type = other DNA
cgtactggccgggcagtccaatgccatggcttacggtgaagggcttccgctgccggattcatacgatgcgcccca

SEQ ID NO: 628903 - DNA, 75 bp, synthetic construct
  source 1..75: mol_type = other DNA
ctgacctgtaagttccgcctgtcaggcgcactgaccaacaatcagttcgggctggggatttatctgtatacggac

SEQ ID NO: 628904 - DNA, 75 bp, synthetic construct
  source 1..75: mol_type = other DNA
agggcaccgtgtgtgcaggcggtcgttatgacggtctggtggaacaactgggcggtcgtgcaacaccggctgtcg

SEQ ID NO: 628905 - DNA, 75 bp, synthetic construct
  source 1..75: mol_type = other DNA
tattccgcgcatatggtgccagaaggcggtctggcaatggtgccgcagatggttaacgatggcgtgatgatcgtt

SEQ ID NO: 628906 - DNA, 75 bp, synthetic construct
  source 1..75: mol_type = other DNA
caacagtctggcgcaatacaaacgcgaactggaacaaagttgcgtcatccgcgatatgcagcattttcgcaagat

SEQ ID NO: 628907 - DNA, 75 bp, synthetic construct
  source 1..75: mol_type = other DNA
ctcgaagcgaatgtggtgattctggctgatggcgttaactcgatgcttggccgctcgctgggaatggttcccgct

SEQ ID NO: 628908 - DNA, 75 bp, synthetic construct
  source 1..75: mol_type = other DNA
atcttggctttacggttcgcggaatggatttagccatcgcgtcggcacaggctgctgccacaacggtgattgccg

SEQ ID NO: 628909 - DNA, 75 bp, synthetic construct
  source 1..75: mol_type = other DNA
cgttgggtctggtctgcggattgggtgatatcgcccatgcgcaaaaaagcgtgccgcaaatgctggaagatttta

SEQ ID NO: 628910 - DNA, 75 bp, synthetic construct
  source 1..75: mol_type = other DNA
cccggcgctgatggaaaacccgcgcctgtttagccaatacccacgaatggtcgccgacatcatgaacgatatgtt

SEQ ID NO: 628911 - DNA, 75 bp, synthetic construct
  source 1..75: mol_type = other DNA
tgggtatcgtcaaatcgtccgacacatttcagttcatgggcgcgcaggggcattattcctgatcgtctggcaact

SEQ ID NO: 628912 - DNA, 75 bp, synthetic construct
  source 1..75: mol_type = other DNA
atggcatttaaacactatgatgttgtcagggcggcgtcgccgtcagaccttgcggaaaagctgacacataaactg

SEQ ID NO: 628913 - DNA, 75 bp, synthetic construct
  source 1..75: mol_type = other DNA
gatttgcgctctggtgagcaaacggcagtcgcgcaggatagcgtagccgcgcatttgcgcacgttactgggttaa

SEQ ID NO: 628914 - DNA, 75 bp, synthetic construct
  source 1..75: mol_type = other DNA
cgtcatgcgcgatatgcagcatttccgcaagatcccggcgctgatggaaaacccgcgcctgtttagccaataccc

SEQ ID NO: 628915 - DNA, 75 bp, synthetic construct
  source 1..75: mol_type = other DNA
tgatatcgcccatgcgcaaaaaagtgtgccgcaaatgctggaagattttaaacaacaccccgccattcgcccgct

SEQ ID NO: 628916 - DNA, 75 bp, synthetic construct
  source 1..75: mol_type = other DNA
ggagttcggcgattacggtaacgactggcagacgctggagctggtgttcaccgccggcagtgccacggttactcc

SEQ ID NO: 628917 - DNA, 75 bp, synthetic construct
  source 1..75: mol_type = other DNA
taaggcaccggaaatcaacccctcgcccggcggcaacacgccatcgggtccgtctgcagatacgtccgttcgcac

SEQ ID NO: 628918 - DNA, 75 bp, synthetic construct
  source 1..75: mol_type = other DNA
ggtttaatcaggtgatttatttaatgaaaagagtgtgtttgtggatgtattgtgtatatgtcttaccgggcatct

SEQ ID NO: 628919 - DNA, 75 bp, synthetic construct
  source 1..75: mol_type = other DNA
tgggactgaatgcgctgacggatgttacaaaaaatgcagcgtatggcgttgagatagaaagtctggtgctggaga

SEQ ID NO: 628920 - DNA, 75 bp, synthetic construct
  source 1..75: mol_type = other DNA
ttacaaagtcatccctttgatggatttgatctcatgggaacagctctacaacgaaggtaagaacatacctttcac

SEQ ID NO: 628921 - DNA, 75 bp, synthetic construct
  source 1..75: mol_type = other DNA
atatctcttatttcagtggtctctcccgcatttgcattcggacggaatgacagtcgtcattcgtcctctccagcc

SEQ ID NO: 628922 - DNA, 75 bp, synthetic construct
  source 1..75: mol_type = other DNA
atgaaggcattatcgccaatcgcagtccttatttccgcgctgctgttgcaaggttgtgttgccgctgccgtagtg

SEQ ID NO: 628923 - DNA, 75 bp, synthetic construct
  source 1..75: mol_type = other DNA
atcttctgtggacgctgcgaagaagtttgcccgacggcggcaatcaaactgtcgcaagagtacgaactggcggtg

SEQ ID NO: 628924 - DNA, 75 bp, synthetic construct
  source 1..75: mol_type = other DNA
tgttggaattggtgcgacggcatccgttggagccggtgatgtgctcaaaatgggcgttggaggaggtgcatctaa

SEQ ID NO: 628925 - DNA, 75 bp, synthetic construct
  source 1..75: mol_type = other DNA
gaacggattcaatactgacgagatgctgaagaagctgggcaaacttgatccgcgtgagttctctccgggcgcagc

SEQ ID NO: 628926 - DNA, 75 bp, synthetic construct
  source 1..75: mol_type = other DNA
cgcgatgggcggcagtatcgccatcatgaccgttttcgccggtttcctgtatcaatatctcggccacggcgtgtt

SEQ ID NO: 628927 - DNA, 75 bp, synthetic construct
  source 1..75: mol_type = other DNA
atctctgagtatctgaaacaaggaggcatgaaccctgctaacaagatgctgattgaaattgacttggaagaagcc

SEQ ID NO: 628928 - DNA, 75 bp, synthetic construct
  source 1..75: mol_type = other DNA
gtaatgccgttattcaccatgatgcgatgatccactctggcagggtcttgctggaggataaatggatctctgaaa

SEQ ID NO: 628929 - DNA, 75 bp, synthetic construct
  source 1..75: mol_type = other DNA
cagcagccgcaacaacctcagcaggcaggtgcatccctgaacggcttcagtactgaccagatgctgaaacaactc

SEQ ID NO: 628930 - DNA, 75 bp, synthetic construct
  source 1..75: mol_type = other DNA
gctgacgctgacggatgttacaaaaaatgcagcgtatggcgttgagatagaaagtctggtgctggagataaatgc

SEQ ID NO: 628931 - DNA, 75 bp, synthetic construct
  source 1..75: mol_type = other DNA
gcgatcgcctgctgattgactccctgagcttctcgatccctaaaggggcgatcgtcgggatcatcggtccgaacg

SEQ ID NO: 628932 - DNA, 75 bp, synthetic construct
  source 1..75: mol_type = other DNA
aggtaaagttgagttcttcgaaggtaactttactgagtacgaagagtacaagaaacgcacgctgggcgcagacgc

SEQ ID NO: 628933 - DNA, 75 bp, synthetic construct
  source 1..75: mol_type = other DNA
ttgcacctgagtttgttagtatcttttttggattaaaacctaccaccgtggaggcaataaaagatgtcgggatgt

SEQ ID NO: 628934 - DNA, 75 bp, synthetic construct
  source 1..75: mol_type = other DNA
acagctggagcgtgcggcggatgcgctgcgtctgccggactgggacgcgaaaatcgctaacctctccggtggtga

SEQ ID NO: 628935 - DNA, 75 bp, synthetic construct
  source 1..75: mol_type = other DNA
cgaccgtatcgccacgcacatcctggactaccaggatgaaggtaaagttgagttcttcgaaggtaactttaccga

SEQ ID NO: 628936 - DNA, 75 bp, synthetic construct
  source 1..75: mol_type = other DNA
ttatctgtatacggacgctcccgttcctgatggtgtggcgatgacgggtaccggtaatccgttcctgatgtcgta

SEQ ID NO: 628937 - DNA, 75 bp, synthetic construct
  source 1..75: mol_type = other DNA
atgaaaaataataacgcaccattatatctttggttgctttggtgtacgttttgtctgtacatcactaccccgtgg

SEQ ID NO: 628938 - DNA, 75 bp, synthetic construct
  source 1..75: mol_type = other DNA
ggcggtcatccgtttgccaaaccgccagtcgttcccggtcatgaaattgcagcgcgtgttacggaagtgggtagc

SEQ ID NO: 628939 - DNA, 75 bp, synthetic construct
  source 1..75: mol_type = other DNA
cggcaacaccgagatgccaagccgcgcctacgttggccgctttaactttaaaggggttgatcagggtaaacgcgt

SEQ ID NO: 628940 - DNA, 75 bp, synthetic construct
  source 1..75: mol_type = other DNA
gacagcggcaccatcactttaggtgaaacggtgaaactggcatcggttgatcagttccgtgactcaatggataac

SEQ ID NO: 628941 - DNA, 75 bp, synthetic construct
  source 1..75: mol_type = other DNA
acgaactgtttattccacctggaccgcgtctgggcgataaagtgctggaagtcagcaacctgcgtaaatcctacg

SEQ ID NO: 628942 - DNA, 75 bp, synthetic construct
  source 1..75: mol_type = other DNA
cggagttgcgttcgttcctgctgcgtgatggttatccgcagggagaactgaaggtgtcgcgtatcagtgaagcga

SEQ ID NO: 628943 - DNA, 75 bp, synthetic construct
  source 1..75: mol_type = other DNA
aaagataaataatgctgaatgggattgcgaaaataacacaaaaaaacacatatataacgtaaaatcgattaaccc

SEQ ID NO: 628944 - DNA, 75 bp, synthetic construct
  source 1..75: mol_type = other DNA
agcagttcagggaagtttcggataaaattcgcttgtccggcctgagcatcagtgattatattaagcagaacggca

SEQ ID NO: 628945 - DNA, 75 bp, synthetic construct
  source 1..75: mol_type = other DNA
ggctgcttctgccactgcatcagctaacagtcaaaaagcagcaaaaaccagtgaaaccaacgcaaaggcgagcga

SEQ ID NO: 628946 - DNA, 75 bp, synthetic construct
  source 1..75: mol_type = other DNA
aagcgagagtgctgcagctggttctgcgacttcagcagctggatcagcaactgctgcggctaacagccagaaagc

SEQ ID NO: 628947 - DNA, 75 bp, synthetic construct
  source 1..75: mol_type = other DNA
ccatcaattgcttgcaccggcggaaaatatctccattgcaaaaaatgaactggcggttctggggacgatttcatg

SEQ ID NO: 628948 - DNA, 75 bp, synthetic construct
  source 1..75: mol_type = other DNA
acagaccatcaacgggatcattattgtactgaatgttattgtcatccccgtgctgacagtgacaatcttccgccc

SEQ ID NO: 628949 - DNA, 66 bp, synthetic construct
  source 1..66: mol_type = other DNA
atgtcgattaaacattatgatgttgtcagggcggcgtcgccgtcagaccttgcggaaaagctgaca

SEQ ID NO: 628950 - DNA, 75 bp, synthetic construct
  source 1..75: mol_type = other DNA
gagagtttgacatgagcgccgccacccacgcacagcaacctgcgctgtttacagccatgctggcacagtttcgtg

SEQ ID NO: 628951 - DNA, 75 bp, synthetic construct
  source 1..75: mol_type = other DNA
ctaaaaactttaatgcttcaacaagcctgacggatgaaattaaatctgaaggttgccagatggcggataactcat

SEQ ID NO: 628952 - DNA, 75 bp, synthetic construct
  source 1..75: mol_type = other DNA
cgctgggacggcaagcctgtaaaagctgtcacctgcgtccttgtagacggcgtgatgatgggacaaaaagccacg

SEQ ID NO: 628953 - DNA, 75 bp, synthetic construct
  source 1..75: mol_type = other DNA
atgcgcatcatgcgcttcgagatgcaaagtttcaggtagcttatgttagtgctgctttccgtgcattagctgggt

SEQ ID NO: 628954 - DNA, 75 bp, synthetic construct
  source 1..75: mol_type = other DNA
aggttggaactgatggttttggttttacttatggaaagtttgtttgtaatgaatcattaattgggcaaagtacaa

SEQ ID NO: 628955 - DNA, 75 bp, synthetic construct
  source 1..75: mol_type = other DNA
gcttattgaggggcaaagaactaacctgctaatcaattcaacaaatccgactaaatggaacaagtcgtcaaatat

SEQ ID NO: 628956 - DNA, 75 bp, synthetic construct
  source 1..75: mol_type = other DNA
tcagggagtatttctcgctggcgcaatgctggccgcagtgtggctggcagtcgccagtaccatgaaagacaccgc

SEQ ID NO: 628957 - DNA, 75 bp, synthetic construct
  source 1..75: mol_type = other DNA
agattacgacggatttccttattgcgatattggaggagctaacagacgggtaaacgaaaacgcatcgcttgaaaa

SEQ ID NO: 628958 - DNA, 75 bp, synthetic construct
  source 1..75: mol_type = other DNA
gcatcagcaaacagtcaaaaagcggcaaaaaccagtgaaaccaatgcaaagacaagcgagactgcagcggcgaac

SEQ ID NO: 628959 - DNA, 75 bp, synthetic construct
  source 1..75: mol_type = other DNA
cgggcacgctgaatgattttctcggtgccatgacggaagacgatgtcatgccggaggcattgcgtcgttttgagg

SEQ ID NO: 628960 - DNA, 75 bp, synthetic construct
  source 1..75: mol_type = other DNA
ctggcacgctgaatgattttctcggggccatgacggaagacgatgtcatgccggaggcattgcgtcgttttgagg

SEQ ID NO: 628961 - DNA, 75 bp, synthetic construct
  source 1..75: mol_type = other DNA
ggggattatctcgatgtaaccactccacagattgaggctggtacaggcgcatcatcttttattgttacggggacg

SEQ ID NO: 628962 - DNA, 75 bp, synthetic construct
  source 1..75: mol_type = other DNA
aatctggcgaactgaaaacggcggaaattaatgagccacgatttgaaaaagaaggtttattgattgaaggtcagc

SEQ ID NO: 628963 - DNA, 75 bp, synthetic construct
  source 1..75: mol_type = other DNA
gcagcagcccaaagcgagagtgccgcagctggttctgcaagcgcggcggctgcttctgccactgcatcagccaac

SEQ ID NO: 628964 - DNA, 75 bp, synthetic construct
  source 1..75: mol_type = other DNA
tctctgattgggcaaacgtcagccattaatatggcatcaattgctgctacaaagtcagttgatgtttcaggcgat

SEQ ID NO: 628965 - DNA, 75 bp, synthetic construct
  source 1..75: mol_type = other DNA
cagtgataaacaggttaatttcagtcgcgcatcaacggcaacatatatcaacaaatctggcgaactgaaaacggc

SEQ ID NO: 628966 - DNA, 75 bp, synthetic construct
  source 1..75: mol_type = other DNA
tacagatatgttttacagccgctgccggatgtgtggataccctttaatgattcgctggatatgattacgggctat

SEQ ID NO: 628967 - DNA, 75 bp, synthetic construct
  source 1..75: mol_type = other DNA
ctgacctctccgtgtttaacgcgcagtgccatggtggcagcgctgcagatgtgccgtggatttgtggtgacacga

SEQ ID NO: 628968 - DNA, 75 bp, synthetic construct
  source 1..75: mol_type = other DNA
gatccagacccgtcaactggcgcaacagatgcgtcgtgaagtgcaggagctggtggatgtgctgctgagcacacc

SEQ ID NO: 628969 - DNA, 75 bp, synthetic construct
  source 1..75: mol_type = other DNA
ccttcctctctgaccgtgtgtgcgggatctgcggcttcgcccacagcaccgcctacaccacgtcggtggaaaacg

SEQ ID NO: 628970 - DNA, 75 bp, synthetic construct
  source 1..75: mol_type = other DNA
tgtgcgtaagaagaagagcaaagtggtgccgtacaaagaactcgagcgttacagcattgagcgtaaaaactcgcc

SEQ ID NO: 628971 - DNA, 75 bp, synthetic construct
  source 1..75: mol_type = other DNA
gccggaagtggtggagtttctctactacaaacaagggggctggctgtcggtgctgtttggtaacgacgaacgcaa

SEQ ID NO: 628972 - DNA, 75 bp, synthetic construct
  source 1..75: mol_type = other DNA
ccgttttgcgctgggctttgccgaagcgccgcgcggtgatgatattcactggagcatgaccggcgacaaccagaa

SEQ ID NO: 628973 - DNA, 75 bp, synthetic construct
  source 1..75: mol_type = other DNA
gcgccgcgcggcgatgatatccactggagcatgactggcgacaaccagaagctgtaccgctggcgctgccgtgcc

SEQ ID NO: 628974 - DNA, 75 bp, synthetic construct
  source 1..75: mol_type = other DNA
tgcactgacgctgacggatattaccaaaaatgcaacgtatggcgttgagatagaaagtctggtgctggagataaa

SEQ ID NO: 628975 - DNA, 75 bp, synthetic construct
  source 1..75: mol_type = other DNA
cgtacttcactcagaccactgacggcagagtgaatctgatgcatcacaggaaagccggaaacacgaagctggggg

SEQ ID NO: 628976 - DNA, 75 bp, synthetic construct
  source 1..75: mol_type = other DNA
gctgccgccacaacagtgatcgccgccaaagaacgcgcggatttctccgccagcagtctggcgcaatacaaacgt

SEQ ID NO: 628977 - DNA, 75 bp, synthetic construct
  source 1..75: mol_type = other DNA
acccgtatgggttacaacgaagtgaccttcctctctgaccgtgtgtgcggcatctgcggctttgctcacagcacc

SEQ ID NO: 628978 - DNA, 75 bp, synthetic construct
  source 1..75: mol_type = other DNA
tatccgtccgtgacgccgcgcgttccggcggcggtgtggggcgagcgcgaagtgcgcgatatgtacggtttgatt

SEQ ID NO: 628979 - DNA, 75 bp, synthetic construct
  source 1..75: mol_type = other DNA
attatctcgccgcgctgaatgaggcatttccgggcgtcgtgctggaccacgcctggcagaccaaagatcagctga

SEQ ID NO: 628980 - DNA, 75 bp, synthetic construct
  source 1..75: mol_type = other DNA
gtgagcggcgcgcgacctggggtttagggaccgtattttcattacgcatgctgggcatgttcatggttctgccgg

SEQ ID NO: 628981 - DNA, 75 bp, synthetic construct
  source 1..75: mol_type = other DNA
ccaagcagagcaataaaacctggtccctgacgcatccggtggatgacgcaattaccctgctgacacagggcggca

SEQ ID NO: 628982 - DNA, 75 bp, synthetic construct
  source 1..75: mol_type = other DNA
aagcagagcaataaaacctggtccctgacgcatccggtggatgacgcaattaccctgctgacacagggcggcaga

SEQ ID NO: 628983 - DNA, 75 bp, synthetic construct
  source 1..75: mol_type = other DNA
cacaggcatttattgccggtgtaaaaccggagaacacaccatcagcaggtggctctacgtcgccggatgactcat

SEQ ID NO: 628984 - DNA, 75 bp, synthetic construct
  source 1..75: mol_type = other DNA
tttacagccatgctgacacagtttcgtgctgacctctccgtgtttaacgcgcagtgccatggtggcagtgctgca

SEQ ID NO: 628985 - DNA, 75 bp, synthetic construct
  source 1..75: mol_type = other DNA
gacgtattactggaaaaacacatacggcacacagtatgactccgtctacggcgcgtacaaaaacagggagagcga

SEQ ID NO: 628986 - DNA, 75 bp, synthetic construct
  source 1..75: mol_type = other DNA
gcccggcattccaggttataaaagacagtctgacactgggactgaatgcgctgacgctgacggatgttacaaaaa

SEQ ID NO: 628987 - DNA, 75 bp, synthetic construct
  source 1..75: mol_type = other DNA
ctgctggtaccatgctgtcgtggtggttcggcatttacccagggcgcggaggggatattcagcgagtccacgggg

SEQ ID NO: 628988 - DNA, 75 bp, synthetic construct
  source 1..75: mol_type = other DNA
tgcctgcatgatgtgcaggatatgagtacgctgaatcatccgaaggcagacctgagcaaagggcagtacggctgt

SEQ ID NO: 628989 - DNA, 75 bp, synthetic construct
  source 1..75: mol_type = other DNA
gtaatccgttcctgatgtcgtacttcactcagaccactgacggcagagtgaatctgatgcatcacaggaaagccg

SEQ ID NO: 628990 - DNA, 75 bp, synthetic construct
  source 1..75: mol_type = other DNA
ggcggcatcccggacatcggccaactggacgtcagcagaccgtgcgagccatttcagtgcctgggcacggcgtgg

SEQ ID NO: 628991 - DNA, 75 bp, synthetic construct
  source 1..75: mol_type = other DNA
ctggtgttcaccgccggcagtgccacggttactccgaaactgaatggagtggctggcccggcattccaggttata

SEQ ID NO: 628992 - DNA, 75 bp, synthetic construct
  source 1..75: mol_type = other DNA
aacacgaagctgggggagttcggcgattacggtaacgactggcagacgctggagctggtgttcaccgccggcagt

SEQ ID NO: 628993 - DNA, 75 bp, synthetic construct
  source 1..75: mol_type = other DNA
ctctgcttgccgggcagattgagcaagggctgtatcgtcacggggagaaattgccgtcggtgcgcagcttaagtc

SEQ ID NO: 628994 - DNA, 75 bp, synthetic construct
  source 1..75: mol_type = other DNA
agtcaggagcacggcgtcagcaccgtgcagcaggcgtatcagacgctggagacgatgaacctcatcactccgtag

SEQ ID NO: 628995 - DNA, 75 bp, synthetic construct
  source 1..75: mol_type = other DNA
acaacgtaaagcccagccgccagtaccgccgatgacgcgtccggtgcagcgcccggtagagattacccagtggga

SEQ ID NO: 628996 - DNA, 75 bp, synthetic construct
  source 1..75: mol_type = other DNA
gaaaatgaaaccggcgctgaaaaaaacgctgatggcggtagcgtgcctgagcgcagtacccgcagcccaggctgc

SEQ ID NO: 628997 - DNA, 75 bp, synthetic construct
  source 1..75: mol_type = other DNA
gaaaatgaaaccggcgctgaaaaaaacgctgatggcggtagcgtgtctgagcgcagtacctgcagcccaggctgc

SEQ ID NO: 628998 - DNA, 75 bp, synthetic construct
  source 1..75: mol_type = other DNA
gaaaatgaaaccggcgctgaaaaaaacgctgatggcggtagcgtgactgagcgcagtaccagcagcccaggctgc

SEQ ID NO: 628999 - DNA, 75 bp, synthetic construct
  source 1..75: mol_type = other DNA
atgaagttgagctataagctggttatcgctgctgtcatcggttctttcatctggtcggccaaccactactacagc

SEQ ID NO: 629000 - DNA, 75 bp, synthetic construct
  source 1..75: mol_type = other DNA
ggatgatgattgtgcttcacgccctgtgcctgatgtcgctgctgaccggttgcggaagtacgcggacagtatacg

SEQ ID NO: 629001 - DNA, 75 bp, synthetic construct
  source 1..75: mol_type = other DNA
gtgcctgccgccgctgctgaccggttgcggaagtacgcggacagtttacgtgccagttccggctataccgttacc

SEQ ID NO: 629002 - DNA, 75 bp, synthetic construct
  source 1..75: mol_type = other DNA
aggaagatatcaaagtggctgttgcggatgatgattgcgctgttcgtatcgttccttctggcgcagttaagcggt

SEQ ID NO: 629003 - DNA, 75 bp, synthetic construct
  source 1..75: mol_type = other DNA
gtgcctgatgtcgctgctgaccggttgcggaagtacgcggacagtatacgtgcaggttccaacgataccgttacc

SEQ ID NO: 629004 - DNA, 75 bp, synthetic construct
  source 1..75: mol_type = other DNA
gtgcctgctgccgctgctgaccggttgcggaagtacgcgaacagtttacgtaccgattccggcggtaccgttgcc

SEQ ID NO: 629005 - DNA, 75 bp, synthetic construct
  source 1..75: mol_type = other DNA
gaaaatgaaaccggcgctgaaaaaaacgctgatggcggtagcgtggctgagcgcagtaccggcagcccaggctgc

SEQ ID NO: 629006 - DNA, 75 bp, synthetic construct
  source 1..75: mol_type = other DNA
ggcgtgctggcagccgtgcagaccctgcgtgagatgaacgccgacaacctgcgcaaggtgccggccgatgcaccc

SEQ ID NO: 629007 - DNA, 75 bp, synthetic construct
  source 1..75: mol_type = other DNA
aagtggaagtgatctaccgctccaaagcgtgcctgatccagcgtgacggcgaaatggctgacgccaagcagcagc

SEQ ID NO: 629008 - DNA, 75 bp, synthetic construct
  source 1..75: mol_type = other DNA
aagtagaagtgatgttccgctctaaagcctgcctgattcaacgcgacggcgagatgagcgacgccaagcagcagt

SEQ ID NO: 629009 - DNA, 75 bp, synthetic construct
  source 1..75: mol_type = other DNA
acgcagccactgaggcaaatggaggaaaatcgcccccgtttgcaggggacgacggatgtgacgccgaaacggtga

SEQ ID NO: 629010 - DNA, 75 bp, synthetic construct
  source 1..75: mol_type = other DNA
taattcctgtggttcatcctacggcgtttgtccatcccagcgcggtattgattggtgatgtgattgtgggagccg

SEQ ID NO: 629011 - DNA, 75 bp, synthetic construct
  source 1..75: mol_type = other DNA
gctacccgcgccagaacggactggcccgtggccctgcgcgagctgggccggatcgagcgcacgctgttcatcctg

SEQ ID NO: 629012 - DNA, 75 bp, synthetic construct
  source 1..75: mol_type = other DNA
aatctttgacacgtataataacagtaataacaagaaagaacttattaataacaataaagaagatgactttgaaga

SEQ ID NO: 629013 - DNA, 75 bp, synthetic construct
  source 1..75: mol_type = other DNA
atctgcaaaacggtcgtatcgacagcgtatttggtgacaccgcagtggtaaccgaatggctgaaagataacccga

SEQ ID NO: 629014 - DNA, 75 bp, synthetic construct
  source 1..75: mol_type = other DNA
aatcttaactcgtattggttttgcaggaaggtgagatgtaatgatttattaaaaataataagacaggggaagtga

SEQ ID NO: 629015 - DNA, 75 bp, synthetic construct
  source 1..75: mol_type = other DNA
gagctgggacgcatcgagcgcacactgttcatcctggactggctgcaaagcgtcgagctgcgccgccgcgtgcat

SEQ ID NO: 629016 - DNA, 75 bp, synthetic construct
  source 1..75: mol_type = other DNA
agacttatcgaaaagaccaatgtaaagggtcagcaaagtatttttaaagtattcacgttggatgagcgtccagaa

SEQ ID NO: 629017 - DNA, 75 bp, synthetic construct
  source 1..75: mol_type = other DNA
tggatggtgctgattattacgaatctaagttcgggagatatgcaccaagtattgactatttgatggttatgtctg

SEQ ID NO: 629018 - DNA, 75 bp, synthetic construct
  source 1..75: mol_type = other DNA
gtgcctgctaccgctgctgaccggttgcggaagtacgcggacaatttacgtgaacattccggcggcaccactgcc

SEQ ID NO: 629019 - DNA, 75 bp, synthetic construct
  source 1..75: mol_type = other DNA
tggtcaaatttcgaacgacaccatcccgattgactatactgatttcgtcagacttacggttaagcacaccagcca

SEQ ID NO: 629020 - DNA, 75 bp, synthetic construct
  source 1..75: mol_type = other DNA
cccattaaggtctatgcccttaacgaagaccttattgcccgcggtttggttggtcaaatttcgaacgacaccatc

SEQ ID NO: 629021 - DNA, 75 bp, synthetic construct
  source 1..75: mol_type = other DNA
tgctggtgaatcgtagccaggcggatgtcgacaccgcacatcggctggcggaagatatcctgcgcttcgcccgct

SEQ ID NO: 629022 - DNA, 75 bp, synthetic construct
  source 1..75: mol_type = other DNA
actggtcaccgcattctgggcaacactggcactgatgtatgtctcgctggcagcgatcaccgggaaatatccggt

SEQ ID NO: 629023 - DNA, 75 bp, synthetic construct
  source 1..75: mol_type = other DNA
atgctgcacacattacatcgctccccctggttgacggatttttctgcactgctgcgtctgctcggtgagggcgac

SEQ ID NO: 629024 - DNA, 75 bp, synthetic construct
  source 1..75: mol_type = other DNA
cctgccggaaaaaatcaggaaatgccatgtttatttccctgatgacaggacaaacagaaacaacggagataaaaa

SEQ ID NO: 629025 - DNA, 75 bp, synthetic construct
  source 1..75: mol_type = other DNA
tttaatcactggatgggaaaaacgccaggtgtcgaaagaagacaatggcaacatttcacaaactgcaaaaacccc

SEQ ID NO: 629026 - DNA, 75 bp, synthetic construct
  source 1..75: mol_type = other DNA
ctccggcagagcgcaagagggcgcagcgtgagagggaaagaaagcgggaacaaaatggcgattgtcacggcgcgt

SEQ ID NO: 629027 - DNA, 75 bp, synthetic construct
  source 1..75: mol_type = other DNA
atggctacttcatggctcagattatggcatgacatgccaaatgatcccaagtggcgaacaatttccagggtgtca

SEQ ID NO: 629028 - DNA, 75 bp, synthetic construct
  source 1..75: mol_type = other DNA
gatgctggacgaaacgcaaaccgccgaacaaaagctgctggcacgttatcaggcgttatcggagtgcgttaaaaa

SEQ ID NO: 629029 - DNA, 75 bp, synthetic construct
  source 1..75: mol_type = other DNA
aactaataaagatacagataaagaattaaaccccacacataacgcgcgcgtgcgcgagagtgctccgaccagtga

SEQ ID NO: 629030 - DNA, 75 bp, synthetic construct
  source 1..75: mol_type = other DNA
agcagaaatttgcccgccacgtgcagcacgtcagggcacaggtaaaaccagtcagcaagggggtaagccatgcag

SEQ ID NO: 629031 - DNA, 75 bp, synthetic construct
  source 1..75: mol_type = other DNA
gggaagtacttgctgaagatgcttccctgccgggaaaaatcagtaaatgccctgtttattttcctgatgacagaa

SEQ ID NO: 629032 - DNA, 75 bp, synthetic construct
  source 1..75: mol_type = other DNA
ggaacggatgtaccgacgcgatatacaactcgcgctaaaacaggagaaggaccgaacaaacgaaacagcaatgag

SEQ ID NO: 629033 - DNA, 75 bp, synthetic construct
  source 1..75: mol_type = other DNA
ttctgtattggaggtgctggaaaatatcaaaaacaatttcgatgcatttcttactctgccaccagaaacaaaagc

SEQ ID NO: 629034 - DNA, 75 bp, synthetic construct
  source 1..75: mol_type = other DNA
gtctgtaacgtgtggttttcgccggggagatgcggcagagtatgccagggagactgaccgttcactgatgcaacg

SEQ ID NO: 629035 - DNA, 75 bp, synthetic construct
  source 1..75: mol_type = other DNA
tggcaataacgaacatcattcaggaggcgaatcaatatgcaaaacagcagatcgcactggagtcacagagaaccc

SEQ ID NO: 629036 - DNA, 75 bp, synthetic construct
  source 1..75: mol_type = other DNA
tttggggtacaggatcgaacctgtcaaatgggaggttataacaaaaaatgaaaaaatacagattagacgtgtgga

SEQ ID NO: 629037 - DNA, 75 bp, synthetic construct
  source 1..75: mol_type = other DNA
atgactgaaaagctatggaagttgacggtattcatgacagacggtagggaaaaggttatcgccctgtatgacgac

SEQ ID NO: 629038 - DNA, 75 bp, synthetic construct
  source 1..75: mol_type = other DNA
cagcgatcaccgggaaatatccggtgctgcccggaaaaatgaaatgtatccgggtggtaaccgcagatgaacatc

SEQ ID NO: 629039 - DNA, 75 bp, synthetic construct
  source 1..75: mol_type = other DNA
aatacaggatatctgccattaccgcgcggctgatgctgcagattatgtcagggaaactgaccggtcactgatgca

SEQ ID NO: 629040 - DNA, 75 bp, synthetic construct
  source 1..75: mol_type = other DNA
ttccctgccgggaaaaatcaggaaatgccatgtttatttccatgatgacagaacaaacagaagcaacggagataa

SEQ ID NO: 629041 - DNA, 75 bp, synthetic construct
  source 1..75: mol_type = other DNA
ctggcactgatgtttatgtcgtttgcagtgggcaccaggaaaaaaacggtacggcccgggaaaatgaaatgtgtc

SEQ ID NO: 629042 - DNA, 75 bp, synthetic construct
  source 1..75: mol_type = other DNA
ctggcactgatgtttatgtcgtttgcagtgggcaccaggaaatatccggtgcgacccggaaaaatgaaatgtgtc

SEQ ID NO: 629043 - DNA, 75 bp, synthetic construct
  source 1..75: mol_type = other DNA
gctggagccacagagtatgccagggagactgaccggtcactgatgcaactggtcaccgcattatgggcaacactg

SEQ ID NO: 629044 - DNA, 75 bp, synthetic construct
  source 1..75: mol_type = other DNA
agtatcaatattactttgcagataaacaaatatctgcctggggggcgtatgagtatcgatgcactacgatgggct

SEQ ID NO: 629045 - DNA, 75 bp, synthetic construct
  source 1..75: mol_type = other DNA
gctttcaagcgtgcgtatcgtcagcaataccaacattactttgcagataaacaaatatctgtctggggttcgtat

SEQ ID NO: 629046 - DNA, 75 bp, synthetic construct
  source 1..75: mol_type = other DNA
gaaggtggcgcggttgatcagcgagcgcttggtgttaatcgagtgaagatattcgaacgctggaaggctatcgac

SEQ ID NO: 629047 - DNA, 75 bp, synthetic construct
  source 1..75: mol_type = other DNA
aatggagttttacggcggaaagtcaccgaaaatcgccagtgtgcatcagttcggtctgtcggaagaaacccggaa

SEQ ID NO: 629048 - DNA, 75 bp, synthetic construct
  source 1..75: mol_type = other DNA
gtaagaaaattgattatccggcgcgtcctctgctcggctttaccggtgaggatgtgcagatgattgaagagatta

SEQ ID NO: 629049 - DNA, 75 bp, synthetic construct
  source 1..75: mol_type = other DNA
ttatcaccagtcgttttttgcatatccgcgccagcccggaacaggcatcaatggagttttacggcgggaagtcac

SEQ ID NO: 629050 - DNA, 75 bp, synthetic construct
  source 1..75: mol_type = other DNA
catacgccaccggaagtgatctaccaccgcatttccgccagcgcccgtcgcccgacgttgcttgctccgctgtgg

SEQ ID NO: 629051 - DNA, 75 bp, synthetic construct
  source 1..75: mol_type = other DNA
tcgagctggatcgctatctgaatgaacatggcgtacagggatcggcgctgggacgtccgtggctacctccaacgg

SEQ ID NO: 629052 - DNA, 75 bp, synthetic construct
  source 1..75: mol_type = other DNA
agacggtctaaaggaaacatttgcaggtggtgacccgtggaaatggttagaccaactatgggcaaaaataataca

SEQ ID NO: 629053 - DNA, 75 bp, synthetic construct
  source 1..75: mol_type = other DNA
taatcgagtgaagatattcgaacgctggaaggctatcgacaccagggataagcgtgaaaagttcacggcgctagt

SEQ ID NO: 629054 - DNA, 75 bp, synthetic construct
  source 1..75: mol_type = other DNA
gcagggtacaccggcaccgctggctgcaggtaacctggcatctgataccaataaagaattacttaatacacctga

SEQ ID NO: 629055 - DNA, 75 bp, synthetic construct
  source 1..75: mol_type = other DNA
gcttcgtttgccgacgaagcgcagcaacaccgctccattgctgaacagctggcgcatcaggcgaatctggttaac

SEQ ID NO: 629056 - DNA, 75 bp, synthetic construct
  source 1..75: mol_type = other DNA
accggctgaccggactgattgaatcgctgtcaccgtcagggcgtcggcgactgagtgccgaactggcgaaacgtc

SEQ ID NO: 629057 - DNA, 75 bp, synthetic construct
  source 1..75: mol_type = other DNA
tgccgcgacgccatgcttcagggtgccgaaaaagccgagtcgcccaccaccatgcagaccgcgccagccctagat

SEQ ID NO: 629058 - DNA, 75 bp, synthetic construct
  source 1..75: mol_type = other DNA
ttacgtgggccttacccgctgctcaatgccaacattggccgggagcagatattggcactgtacaaaaaaaacgaa

SEQ ID NO: 629059 - DNA, 75 bp, synthetic construct
  source 1..75: mol_type = other DNA
atgctgacggcagaccaacagccccgtattaaccaggttaaatgctggctgaaagataatcccgtggtccgggat

SEQ ID NO: 629060 - DNA, 75 bp, synthetic construct
  source 1..75: mol_type = other DNA
tgccgtcgtcgtggcaggtggctacggctttttgctccacacctttaccaatgcctgggccccctggctggattc

SEQ ID NO: 629061 - DNA, 75 bp, synthetic construct
  source 1..75: mol_type = other DNA
tctgcccgacggcggcgattaagctgtcgcaagaatacgaactggcggtgtggaagaaagaagacttcctgcaac

SEQ ID NO: 629062 - DNA, 75 bp, synthetic construct
  source 1..75: mol_type = other DNA
acaaacgtggtgaatatggtcaatctgttagtaaatggttggcaaatattgcgagtaaagcagcccatggtactt

SEQ ID NO: 629063 - DNA, 75 bp, synthetic construct
  source 1..75: mol_type = other DNA
atattagtgggaaaattactgtgcctgagagatgttatattgatacaggatcaggttctgaaataaaatttaatg

SEQ ID NO: 629064 - DNA, 75 bp, synthetic construct
  source 1..75: mol_type = other DNA
atggtagctccatcgattattttgttcctggtatgataatcaaacgaccgtttatttcagtcaattttctgcgca

SEQ ID NO: 629065 - DNA, 75 bp, synthetic construct
  source 1..75: mol_type = other DNA
atgcaggtggctcttttcctgcagtctgctactgcccgtaatggtgttgcggccttcacggcactgatggggtat

SEQ ID NO: 629066 - DNA, 75 bp, synthetic construct
  source 1..75: mol_type = other DNA
atgcgtgagtatgatacatggttacagtgtgactgtattccgggagattcgccggccatgaattttgctgctctt

SEQ ID NO: 629067 - DNA, 75 bp, synthetic construct
  source 1..75: mol_type = other DNA
ctgcgcctgaatgatgtacagctcccctattccacctacgaccggttgtcggaagttgatcccgtcgcgattgtt

SEQ ID NO: 629068 - DNA, 75 bp, synthetic construct
  source 1..75: mol_type = other DNA
gggtattaaaaagccttacagtacagtacgataaagtgctgtatctgattgaagacagcaaggacagccgccggg

SEQ ID NO: 629069 - DNA, 75 bp, synthetic construct
  source 1..75: mol_type = other DNA
atttgcctttcttttggttttttacggcaaatgtttaatagctggctacagttaatatttagttcgtgtttgatt

SEQ ID NO: 629070 - DNA, 75 bp, synthetic construct
  source 1..75: mol_type = other DNA
tgactatctcgcgaaaacgatcgtcatcaggccggaatcgttgcagttaaaactgcgaaaatcgctggtggtgga

SEQ ID NO: 629071 - DNA, 75 bp, synthetic construct
  source 1..75: mol_type = other DNA
cgccctgttgagataacttgcacaggcgccagcttttcctctgcggaaggcacctttgtgttaagtgaagagaac

SEQ ID NO: 629072 - DNA, 75 bp, synthetic construct
  source 1..75: mol_type = other DNA
tttcacactggtctgattgctggtttcttagctgggatgatttttatcgcatccggaaaaatgatgactatgcca

SEQ ID NO: 629073 - DNA, 75 bp, synthetic construct
  source 1..75: mol_type = other DNA
tatcccaaacaggctatccctgctcatctgcaatctcaggggatcaaaaacctgcttaaacctggctggcagggt

SEQ ID NO: 629074 - DNA, 75 bp, synthetic construct
  source 1..75: mol_type = other DNA
cgggatctacttttatgatttccgcctggagccgcagattgatgaaaacaggcaaattgcgtcggtaacgcttct

SEQ ID NO: 629075 - DNA, 75 bp, synthetic construct
  source 1..75: mol_type = other DNA
aaagtaaggggattaagaacttactgcaaagtgactgggtgggtgacgcgcatattgttcttaccacctatgaga

SEQ ID NO: 629076 - DNA, 75 bp, synthetic construct
  source 1..75: mol_type = other DNA
atcgaggagcactacaccgacacggccggcttcaccgatcacgtctttgccctgatgcacctgctaggcttccgc

SEQ ID NO: 629077 - DNA, 75 bp, synthetic construct
  source 1..75: mol_type = other DNA
atgctgaccgagctggcgatgcaaaccgacaaaggcatcgtgctggccagcgccttgatcgggcacctgcggcgg

SEQ ID NO: 629078 - DNA, 75 bp, synthetic construct
  source 1..75: mol_type = other DNA
atcaggatcttgtcgggcgctgccatgcagcgttacatgaaacgcaaccgttgaggcaaatggaggaaaatcgtc

SEQ ID NO: 629079 - DNA, 75 bp, synthetic construct
  source 1..75: mol_type = other DNA
gcaccgcttccaccagttcgttgacgtattgccaggctgttctctggattaagccgctgctggccgctattgaaa

SEQ ID NO: 629080 - DNA, 75 bp, synthetic construct
  source 1..75: mol_type = other DNA
tcgctacattcttcttctctgtcttcggtggactcgtctggtcagtaaaccattaccacagcaaatatcagacag

SEQ ID NO: 629081 - DNA, 75 bp, synthetic construct
  source 1..75: mol_type = other DNA
aatatctgttgcttccctaacctggaacctggggtgatatcccggatgcgtgaatccctcagagctaagctggag

SEQ ID NO: 629082 - DNA, 75 bp, synthetic construct
  source 1..75: mol_type = other DNA
gcccagcctgggcttttaggggcgttaaatgaatttggtaaacattatgttcgtcctatcgagaacgaaactggc

SEQ ID NO: 629083 - DNA, 75 bp, synthetic construct
  source 1..75: mol_type = other DNA
acgtttgtcttttgtaacccgatgaccttaagtctgggtcgttttatgccggaaaagttcaaacccagctattac

SEQ ID NO: 629084 - DNA, 75 bp, synthetic construct
  source 1..75: mol_type = other DNA
accaccgccattttcgagaaaaagatgggcattcaacttgaacaaaaagttcgtctggcaggagcaacatcatga

SEQ ID NO: 629085 - DNA, 75 bp, synthetic construct
  source 1..75: mol_type = other DNA
atacatgatcataataataaatttatgcgttcttattttcaacaaaaaatcgaatttctgaacattatcttaatc

SEQ ID NO: 629086 - DNA, 75 bp, synthetic construct
  source 1..75: mol_type = other DNA
gggaataacgggtaagaccgctaacctggccggacagggcgttaatattggtgccaaaaagcttcgtcaggcagc

SEQ ID NO: 629087 - DNA, 75 bp, synthetic construct
  source 1..75: mol_type = other DNA
gttatctgttacagcccctatatttgttttatgtatcgcttttggcttcctcaggcaaatgtttaatagctggtt

SEQ ID NO: 629088 - DNA, 75 bp, synthetic construct
  source 1..75: mol_type = other DNA
ggaaaattaaatgaatattcatctattgcttatgaattaggtaaatatggtgtttctatatatgtgctgtggtat

SEQ ID NO: 629089 - DNA, 75 bp, synthetic construct
  source 1..75: mol_type = other DNA
gcacaaaaaatgttctccagcctggacagttttgctttattggcggtaccgtttttcgttctttctggcgtgatt

SEQ ID NO: 629090 - DNA, 75 bp, synthetic construct
  source 1..75: mol_type = other DNA
ggtggacaggcttatccagcaggcgatagcgcagcagttaagcgccatcgtggacacagcttctgccgctacgca

SEQ ID NO: 629091 - DNA, 75 bp, synthetic construct
  source 1..75: mol_type = other DNA
cagccaaagaagatcaggcaacagaccgggcgtaccgaattgggcaaactaaagatgtgtatgtctattacccga

SEQ ID NO: 629092 - DNA, 75 bp, synthetic construct
  source 1..75: mol_type = other DNA
aactgttttgatgtattgaaaaatgctgttgatgataaattattagatctaaatccagtgatcgcagaacaacta

SEQ ID NO: 629093 - DNA, 75 bp, synthetic construct
  source 1..75: mol_type = other DNA
acgaagacgacaacgctgtgaccatcacttccgcacagggtgtcaacctgatcgacgtagccaaagagctggttc

SEQ ID NO: 629094 - DNA, 75 bp, synthetic construct
  source 1..75: mol_type = other DNA
cgagtctgtgttgaaaaatatggttgatctgatgccggggtctactctgaacgaagacgacaacgctgtgaccat

SEQ ID NO: 629095 - DNA, 75 bp, synthetic construct
  source 1..75: mol_type = other DNA
accctttaatgattcgctggatatgattacgggctattctccgggttataaaaaagtgaagattggtgataatgt

SEQ ID NO: 629096 - DNA, 75 bp, synthetic construct
  source 1..75: mol_type = other DNA
tccatcactgatgtgcagctgtacaccagtggtgatgtgacaatgaaaattacaggtgaagacgggcgggagcag

SEQ ID NO: 629097 - DNA, 75 bp, synthetic construct
  source 1..75: mol_type = other DNA
tgccgtttgatgccctgaaagttaagcgttacctgctgcaggtgaagcagcgtgacggtgagtttgtgccggggg

SEQ ID NO: 629098 - DNA, 75 bp, synthetic construct
  source 1..75: mol_type = other DNA
tcgccgtgctgcactggcgcttgccatatcagcggtgtttgccagtgttgcgaccgttgccggtgaaaagctgga

SEQ ID NO: 629099 - DNA, 75 bp, synthetic construct
  source 1..75: mol_type = other DNA
gacatcatgttcagccggacaagtgctgacacggtggctgtggtgaatgtgaaaaacacgccgggtgtgaaagtc

SEQ ID NO: 629100 - DNA, 75 bp, synthetic construct
  source 1..75: mol_type = other DNA
attatgttcagccggacaagtgctgacacggtggctgtggtgaatgtgaaaaacacgccaggtgtgaaggtaact

SEQ ID NO: 629101 - DNA, 75 bp, synthetic construct
  source 1..75: mol_type = other DNA
ttacctgatgatgacagtcacctgaaaggtggtgtgtttgctgcgtcatacggttatggtctgaataacctgacc

SEQ ID NO: 629102 - DNA, 75 bp, synthetic construct
  source 1..75: mol_type = other DNA
aaggagatgatgcagtggtacgcggactatatcgagtctcttgctaaaggtaccgttatacagggaatatttggt

SEQ ID NO: 629103 - DNA, 75 bp, synthetic construct
  source 1..75: mol_type = other DNA
agcagcgaggccgctgaatggtgggacaacttaacaccggagtggcgcggcgtagtgcttcatgctgctgcggtt

SEQ ID NO: 629104 - DNA, 75 bp, synthetic construct
  source 1..75: mol_type = other DNA
agcagtgaggccgctgaatggtgggacaacttaacaccagagtggcggggtgtagtgcttcatgctgctgcggtt

SEQ ID NO: 629105 - DNA, 75 bp, synthetic construct
  source 1..75: mol_type = other DNA
gtgcgtgtaaaaacaaaattaatagcggggagcgcgcctccggtgttttttcgccgtgctgcactggcgcttgcc

SEQ ID NO: 629106 - DNA, 75 bp, synthetic construct
  source 1..75: mol_type = other DNA
gtggcaaacgtcatggccgcaggggtactcaaaaccgttaccgcgccaatgcccctgatcgtgctccaggataag

SEQ ID NO: 629107 - DNA, 75 bp, synthetic construct
  source 1..75: mol_type = other DNA
atggtggaaatgattgattcacagggaaaccctgacgggcagtgtgccgttgccatcgacaacattggcgcagga

SEQ ID NO: 629108 - DNA, 75 bp, synthetic construct
  source 1..75: mol_type = other DNA
tgggcagaactgagtaaggaattcgctcctggtcgttatctgattgatgttttcattaatggaaaggatacgggc

SEQ ID NO: 629109 - DNA, 75 bp, synthetic construct
  source 1..75: mol_type = other DNA
atggggctatttacccaactggaaaaatttgaccaaaagcttacgcgcggttatgcccggtgggggcgctgggta

SEQ ID NO: 629110 - DNA, 75 bp, synthetic construct
  source 1..75: mol_type = other DNA
aaagattctttttctccgtatgaagatcttcacaacggggggtacaagacccgcgttcggcaggatgtgaaagat

SEQ ID NO: 629111 - DNA, 75 bp, synthetic construct
  source 1..75: mol_type = other DNA
tacctggagcggcgcggataaacattgcgacattttgcccggaatgcgtcagttcggtgcgctggcgacggtggt

SEQ ID NO: 629112 - DNA, 75 bp, synthetic construct
  source 1..75: mol_type = other DNA
ggggttaatccggaagtctgggcagccctgaacggcagctatgcgccggggcgttatctggttgacctgtccctg

SEQ ID NO: 629113 - DNA, 75 bp, synthetic construct
  source 1..75: mol_type = other DNA
aatttgaccaaaagcttacgcgcggttatgcccgctgggggcgctgggtatggcggacgttaattgtcgttccgg

SEQ ID NO: 629114 - DNA, 75 bp, synthetic construct
  source 1..75: mol_type = other DNA
tactggtcgtgttgtggaatataggacaggcagtatggggaggaccaagaggtggagtgattctggaaatccaca

SEQ ID NO: 629115 - DNA, 75 bp, synthetic construct
  source 1..75: mol_type = other DNA
tgtctgccagtggttctgtactggcaatacctgattcgaaagatgtaatttttagtcgcaccacaggtgatacag

SEQ ID NO: 629116 - DNA, 75 bp, synthetic construct
  source 1..75: mol_type = other DNA
tgggcagaacttagtaaggaataccctccaggtcgttatttggtggatgtgttcctcaacggaaaggaaactggc

SEQ ID NO: 629117 - DNA, 75 bp, synthetic construct
  source 1..75: mol_type = other DNA
ttttggcggaggacttgatggtgatggaggaacaagaagttatcttagttcgtcgtatagtggtaatcagatctt

SEQ ID NO: 629118 - DNA, 75 bp, synthetic construct
  source 1..75: mol_type = other DNA
tccgcacgctcgggaggagacgccagacagcgtgctttgtgcgggctatcaggcgttttattcttactctgcgcc

SEQ ID NO: 629119 - DNA, 75 bp, synthetic construct
  source 1..75: mol_type = other DNA
cgaaagggaagaaatttctctttggtttgttggcggttttcattattgcggcgtcggttgtgactcgcgcgacca

SEQ ID NO: 629120 - DNA, 75 bp, synthetic construct
  source 1..75: mol_type = other DNA
atcttcacaatggggggtacaagacccgcgttcggcaggatgtgaaagataaactttatgccacaggaaaaatga

SEQ ID NO: 629121 - DNA, 75 bp, synthetic construct
  source 1..75: mol_type = other DNA
ggaagggttcaatacggcatggattgaaacccagcttgcgcatgtcgataagaatgcgatacgtgggacgtacaa

SEQ ID NO: 629122 - DNA, 75 bp, synthetic construct
  source 1..75: mol_type = other DNA
acactatgagtacgattttgcatgagcagggctataacaccgcgtggatagaaacgcagctcgctcacgttgata

SEQ ID NO: 629123 - DNA, 75 bp, synthetic construct
  source 1..75: mol_type = other DNA
acactgccaagccaaaagagaaggcttacaagctggctgatggtggtggtctgtatctcctggtaaaacctagtg

SEQ ID NO: 629124 - DNA, 75 bp, synthetic construct
  source 1..75: mol_type = other DNA
taccagcgcgatgtcagggcatgaatcgaagcattatcccttccttactgttgaggagttaccagacttttttaa

SEQ ID NO: 629125 - DNA, 75 bp, synthetic construct
  source 1..75: mol_type = other DNA
cggaatacaatcctgcagcggatctaaccagcgcaatgtcagggcatgaatcgaagcattatcccttccttactg

SEQ ID NO: 629126 - DNA, 75 bp, synthetic construct
  source 1..75: mol_type = other DNA
ccatgcgcagtatatggagggacggagggagatgatgcagtggtatgcggattatattgaagcatctttaactaa

SEQ ID NO: 629127 - DNA, 75 bp, synthetic construct
  source 1..75: mol_type = other DNA
tctgggaaataccagcctcacgcatgaaaatgcgtcgccctcatatagtgccattgtctgagcaggctctttcgc

SEQ ID NO: 629128 - DNA, 75 bp, synthetic construct
  source 1..75: mol_type = other DNA
ccggataatgtagtacaccaaaaattagaacagcttgccgatgatcagaaacgttgtcaaatcaaactcagctat

SEQ ID NO: 629129 - DNA, 75 bp, synthetic construct
  source 1..75: mol_type = other DNA
ttcaataatgcttatgatcgtaagctattgggtactaagtcaatcccggacatttctcttgcagttaactactta

SEQ ID NO: 629130 - DNA, 75 bp, synthetic construct
  source 1..75: mol_type = other DNA
aatgcatcaacataatattataaaagatttttatttagacgaaataatattacatcctattttaaatgagtttaa

SEQ ID NO: 629131 - DNA, 75 bp, synthetic construct
  source 1..75: mol_type = other DNA
agaacgcgattcgcgggacgtataaccatgctcagtatcttgatgggcgtagggaaatgatgcagtggtatgcgg

SEQ ID NO: 629132 - DNA, 75 bp, synthetic construct
  source 1..75: mol_type = other DNA
ctataagctggcagatggtgctggtttgtatcttgaagtcgttccctctggttctcgatactggcgaatgaaata

SEQ ID NO: 629133 - DNA, 75 bp, synthetic construct
  source 1..75: mol_type = other DNA
cggttatcggtcgaagaaatacgctcaatcgcagaacggcacaaacaggaaaatccaaacctgtcactcatcatg

SEQ ID NO: 629134 - DNA, 75 bp, synthetic construct
  source 1..75: mol_type = other DNA
ccatgctcagtatctggaagggcgtagggagatgatgcagtggtacgccgactatattaataacattggcaaaaa

SEQ ID NO: 629135 - DNA, 75 bp, synthetic construct
  source 1..75: mol_type = other DNA
caaactggcggcaaaagccaatacccaactggcaatcatcaccgaagtgctggcgggggcgtgggaacggctgga

SEQ ID NO: 629136 - DNA, 75 bp, synthetic construct
  source 1..75: mol_type = other DNA
cgagatcgatattattatggcctggcgtcgcgacagtatgggagaagcaaaatcctggtgtttgcgggaaattcc

SEQ ID NO: 629137 - DNA, 75 bp, synthetic construct
  source 1..75: mol_type = other DNA
acatcggcaaaaagccgatcgcggaaatcaagccgcttgaactgcttaatgtgcttcgtcgtatggaggggagag

SEQ ID NO: 629138 - DNA, 75 bp, synthetic construct
  source 1..75: mol_type = other DNA
gggcgcaatgatccacgtaaaacgatgagtgaagcgagtattaatcaggtgttcaagcggattggatacacgggg

SEQ ID NO: 629139 - DNA, 75 bp, synthetic construct
  source 1..75: mol_type = other DNA
gtgctaccgaaaaagccaaaaaagtgaggcagcgatgcggggaagttttccgctatgcaattgtcactggacgtg

SEQ ID NO: 629140 - DNA, 75 bp, synthetic construct
  source 1..75: mol_type = other DNA
atggcttttggtgtttatccagcagtgtctcttgcacaagcgagggcactgcgtgatgaagccaagaaaaagctg

SEQ ID NO: 629141 - DNA, 75 bp, synthetic construct
  source 1..75: mol_type = other DNA
ggacgttgtgatatcaacaagccaatgagcgaagccagcatcaacatggtgctcaaacgtatcggttacgatggc

SEQ ID NO: 629142 - DNA, 75 bp, synthetic construct
  source 1..75: mol_type = other DNA
ccgtgatgaggccagaaaaatagtggccgagggaaaaaatcctagtgaggttcgaaaagaacaaaaattagcatt

SEQ ID NO: 629143 - DNA, 75 bp, synthetic construct
  source 1..75: mol_type = other DNA
gccgcgctaagcctgaagataaatcctatacgcttggggatgggcaaggcttgtcattgcttatagaacctaatg

SEQ ID NO: 629144 - DNA, 75 bp, synthetic construct
  source 1..75: mol_type = other DNA
tatcaaacgaataggctatgctggaaaacttacaggacatgggtttaggcatacattatcaacaattcttcatga

SEQ ID NO: 629145 - DNA, 75 bp, synthetic construct
  source 1..75: mol_type = other DNA
ctacaagatggctgatggtggtggcctctacttattggttaaaaccaacgggtcacgctactggcgtttaaagta

SEQ ID NO: 629146 - DNA, 75 bp, synthetic construct
  source 1..75: mol_type = other DNA
gctggccgagttactggccatggtttcagacacacaatgagcactattttgcatgaaaaaggcttcaatagtgca

SEQ ID NO: 629147 - DNA, 75 bp, synthetic construct
  source 1..75: mol_type = other DNA
tcgcctccatgcgtctgtttgcccgcttatccctggatagcgccgtgccggaacgcaccaccatcatgaatttcc

SEQ ID NO: 629148 - DNA, 75 bp, synthetic construct
  source 1..75: mol_type = other DNA
tcgcctccatgcgtctgtttgcccgcttatccctggatagcgccttgccggatcgcaccaccatcatgaatttcc

SEQ ID NO: 629149 - DNA, 75 bp, synthetic construct
  source 1..75: mol_type = other DNA
gaaggaggataacggtaacgtttcgcagaccgcaaaatccccggcagagcgcaagagagctcagcgcgacaggga

SEQ ID NO: 629150 - DNA, 75 bp, synthetic construct
  source 1..75: mol_type = other DNA
atgggggaggtgtattcgaaccgctggactcagaagaacggggccgcaccttcgaagctctggattgcccagatt

SEQ ID NO: 629151 - DNA, 75 bp, synthetic construct
  source 1..75: mol_type = other DNA
tcgcctccatgcgcctgtttgcccgcttatccctggatagcgccctgccggatcgcaccaccatcatgaatttcc

SEQ ID NO: 629152 - DNA, 75 bp, synthetic construct
  source 1..75: mol_type = other DNA
aacttcgcgcggcgtttgtcaggcacgcaaaagttgcaggactggatgatgccgataccgtaacgcttaaggaag

SEQ ID NO: 629153 - DNA, 75 bp, synthetic construct
  source 1..75: mol_type = other DNA
tcgcctccatgcgtctgtttgcccgcttatccctggatagcgccatgccggagcgcaccaccatcatgaatttcc

SEQ ID NO: 629154 - DNA, 75 bp, synthetic construct
  source 1..75: mol_type = other DNA
tcgcctccatgcgactgtttgcccgcttatccctggatagcgccttgccggaacgcaccaccatcatgaatttcc

SEQ ID NO: 629155 - DNA, 75 bp, synthetic construct
  source 1..75: mol_type = other DNA
tcgcctccatgcgactgtttgcccgcttatccctggatagcgccatgccggatcgcaccaccatcatgaatttcc

SEQ ID NO: 629156 - DNA, 75 bp, synthetic construct
  source 1..75: mol_type = other DNA
gtaattgattcaattttacaggcaatgcaggggcgggtacttgatggagatttaatcaccggatgggaaaaacgc

SEQ ID NO: 629157 - DNA, 75 bp, synthetic construct
  source 1..75: mol_type = other DNA
gggacattaacctgcctgcgctgggaagataagcagtatttcgtccagccatcgaaccggcataaggatatgggc

SEQ ID NO: 629158 - DNA, 75 bp, synthetic construct
  source 1..75: mol_type = other DNA
tgcagcaacaggatgccgaaagcccgttgattatcgacgaaggtcgttttcaggcttcatggcgcggtaaaatgc

SEQ ID NO: 629159 - DNA, 75 bp, synthetic construct
  source 1..75: mol_type = other DNA
ggtagcgcgcgtcaaaactatattgcgtcgttgcaaaccgcagcgtgagttgcaacagcaagatgcagaaagccc

SEQ ID NO: 629160 - DNA, 75 bp, synthetic construct
  source 1..75: mol_type = other DNA
ccatcatctgaaagggaaaaaacaggacttcttctggcggctggaaacaccggatcggctgggtcgcgcggggat

SEQ ID NO: 629161 - DNA, 75 bp, synthetic construct
  source 1..75: mol_type = other DNA
atcaccttacgccgttgttggaagcgcctgacgccgacgaactgcttaactggttgcgccgccagcctctgatgc

SEQ ID NO: 629162 - DNA, 75 bp, synthetic construct
  source 1..75: mol_type = other DNA
ggatatgtacagcaaagaatcgccggaagaggcccctgccccactgaaaccgtggtttgcgattcctggccctgt

SEQ ID NO: 629163 - DNA, 75 bp, synthetic construct
  source 1..75: mol_type = other DNA
ttcagaccggcacctggctgggggaacatcgcatccacggcggatcgcgtcgcatcatcgcgacactacaagggg

SEQ ID NO: 629164 - DNA, 75 bp, synthetic construct
  source 1..75: mol_type = other DNA
acgtttcgcaaacggcaaaatccccggcagagcgcaagagagcgcagcgggagcgcgaaaagctgcggaaatatg

SEQ ID NO: 629165 - DNA, 75 bp, synthetic construct
  source 1..75: mol_type = other DNA
gagtcattacccatgcagcattggtacaacctgagcgacggtgccatggaagatgccctgtacgaaatcgcctcc

SEQ ID NO: 629166 - DNA, 75 bp, synthetic construct
  source 1..75: mol_type = other DNA
gtggactggctgatcgccgaacgtcccggcaaggtaaaaaccttgaagcagaatccgcgcaagaacaaaacggcc

SEQ ID NO: 629167 - DNA, 75 bp, synthetic construct
  source 1..75: mol_type = other DNA
attaacgagttaatcaagggtggtgaaaacgccaaatacgtgactgaaattttccgacttgagaaagaacgcatg

SEQ ID NO: 629168 - DNA, 75 bp, synthetic construct
  source 1..75: mol_type = other DNA
gtgtgtgcaggaaagaaggtggttgcagagctggtttcgtctttgttttcccgtcgggctgcgcttgctgtatca

SEQ ID NO: 629169 - DNA, 75 bp, synthetic construct
  source 1..75: mol_type = other DNA
tgtgtctgacagaggcatggctgacgaaggccgggatttacgtcagtgcagattactttcgtgagggatatgacg

SEQ ID NO: 629170 - DNA, 75 bp, synthetic construct
  source 1..75: mol_type = other DNA
atgaaggccgggatttacgtcagtgcagattactttcgtgagggatatgacgccacacgacagtgctatgtgctg

SEQ ID NO: 629171 - DNA, 75 bp, synthetic construct
  source 1..75: mol_type = other DNA
ccgcaacaaaatcagtcactgacctgctggcaatgctcaccaaagccacgcaggaaggtaaagccgctgctgctg

SEQ ID NO: 629172 - DNA, 75 bp, synthetic construct
  source 1..75: mol_type = other DNA
ctggcgaagttagaacattgcgtctatgtgaaagtagacagtaaaatcaccaatcgttttgaaatagaacgagta

SEQ ID NO: 629173 - DNA, 75 bp, synthetic construct
  source 1..75: mol_type = other DNA
aatccggaagtctgggcagcgctgaacggcagctatgcgccgggacgttatctggttgacctgtccctgaacggg

SEQ ID NO: 629174 - DNA, 75 bp, synthetic construct
  source 1..75: mol_type = other DNA
cctccgcctttggctctgcggacctgaaggccaatatcgggcactgggtggtgagttcttcggctacggccagca

SEQ ID NO: 629175 - DNA, 75 bp, synthetic construct
  source 1..75: mol_type = other DNA
cctcggcctttggctcagcggacctgaaagccaatatcgggcgctgggtggtgagttcttctgccacggccagtg

SEQ ID NO: 629176 - DNA, 75 bp, synthetic construct
  source 1..75: mol_type = other DNA
ctgagcacacaggttaagggtgccactctgaatctgggctggtccggttcgcgtaactctgacggtgaaaataac

SEQ ID NO: 629177 - DNA, 75 bp, synthetic construct
  source 1..75: mol_type = other DNA
gctgcattcggagatggtgccggcggggccgttctccatcacggatgtgccgctgtacaccagtggtgatgtgac

SEQ ID NO: 629178 - DNA, 75 bp, synthetic construct
  source 1..75: mol_type = other DNA
gcggaatgcggaaggtgaaaataactggtcagcatccgcttctgtttcagtgccgttcatgttgcttgaccgtcg

SEQ ID NO: 629179 - DNA, 75 bp, synthetic construct
  source 1..75: mol_type = other DNA
ttatctggttgacctgtccctgaacgggaaggaggtcgggaaacagatactggatgtgacaccacaggacagtaa

SEQ ID NO: 629180 - DNA, 75 bp, synthetic construct
  source 1..75: mol_type = other DNA
ggagtgttgaaaggaaatatatctgaaactgattttttgattgctagcgcagagcttgagagtcattattctcaa

SEQ ID NO: 629181 - DNA, 75 bp, synthetic construct
  source 1..75: mol_type = other DNA
ctggatgatgccgataccgtaacgcttaaggaagtgacagaagcattgttgcattgtgcggaacagattcgcgcg

SEQ ID NO: 629182 - DNA, 75 bp, synthetic construct
  source 1..75: mol_type = other DNA
gaccgaggcgagctgacggcagcgtcggtgacaaccgagttatggggacaatttttaatcgccctgttcgagtgt

SEQ ID NO: 629183 - DNA, 75 bp, synthetic construct
  source 1..75: mol_type = other DNA
aagtgaaaacccgcaaccatggaaggattgccaggggtgtgactggcatcgtttatgtccgtatgcccgagagca

SEQ ID NO: 629184 - DNA, 75 bp, synthetic construct
  source 1..75: mol_type = other DNA
ttaacgatcgcggcccctatggtaacgatcgcgttatttctctctcacgcgcggcagccgaccgtctgaatacat

SEQ ID NO: 629185 - DNA, 75 bp, synthetic construct
  source 1..75: mol_type = other DNA
ctacgcgcgaatcactaacctggctaacggtcggatgattgtggtgcgcattaacgatcgtggtccctacggcaa

SEQ ID NO: 629186 - DNA, 75 bp, synthetic construct
  source 1..75: mol_type = other DNA
cgctttagtcaggctggcctggctgctatttatgatgccgaaccgggcagcaatctgacggcctcaggtgaagca

SEQ ID NO: 629187 - DNA, 75 bp, synthetic construct
  source 1..75: mol_type = other DNA
cgatatctataattactggcactacgccattacgggtacggtggtccagttgataaccggtagcctgatttacgg

SEQ ID NO: 629188 - DNA, 75 bp, synthetic construct
  source 1..75: mol_type = other DNA
ttaagggcacgtagcgagttctgtttgatcattgcagaacttagcgggaggcgccatgcgtacatcactaatgtt

SEQ ID NO: 629189 - DNA, 75 bp, synthetic construct
  source 1..75: mol_type = other DNA
tgcggacaaacaaaacgatatttcgtcgattgtggtggaactggattacccggtagatatcagcgaagtttcccg

SEQ ID NO: 629190 - DNA, 75 bp, synthetic construct
  source 1..75: mol_type = other DNA
cggtgacagcagagctgtgggggaaatttttaattgccctgttcgagtgttgggtgcgggcagatatcagtcgta

SEQ ID NO: 629191 - DNA, 75 bp, synthetic construct
  source 1..75: mol_type = other DNA
tcctggctgatgtacgggcggtggcgtttaacgagcttcgcgcggcgtttgtcaggcacgcaaaagttgcaggac

SEQ ID NO: 629192 - DNA, 75 bp, synthetic construct
  source 1..75: mol_type = other DNA
atgctggttgaaggttttccgccttcacatgccgggaccattaccgtctatgaaggctccagaccaggtacgctg

SEQ ID NO: 629193 - DNA, 75 bp, synthetic construct
  source 1..75: mol_type = other DNA
tatttaccttgcaacaccacaatttgaaaacggcggatgtgcttcatcttttgttattacgacaactgcacccgc

SEQ ID NO: 629194 - DNA, 75 bp, synthetic construct
  source 1..75: mol_type = other DNA
ttccttttacggttctttgtgaggtacataagaactggtataaaacgccaaatgcagcaccgcgtgtttttaata

SEQ ID NO: 629195 - DNA, 75 bp, synthetic construct
  source 1..75: mol_type = other DNA
tcattaacaatgactacgccgcaaattgaaaaagggccatgcgcttcatcgtttattatttccggaaacacacca

SEQ ID NO: 629196 - DNA, 75 bp, synthetic construct
  source 1..75: mol_type = other DNA
ctgcggcaaaaaacagccaggttgcagcagcccaaagcgagagcgcggcagccggttctgcgacttcagcagctg

SEQ ID NO: 629197 - DNA, 75 bp, synthetic construct
  source 1..75: mol_type = other DNA
actgcatcagctaacagtcaaaaagcagcaaaaaccagtgaaaccaacgcaaagacaagcgagactgcggcagct

SEQ ID NO: 629198 - DNA, 75 bp, synthetic construct
  source 1..75: mol_type = other DNA
aagattgttaagtttaaacgtgcatcgaaagcaacctatattaacaaatctggtgtgctgacagaggctgccatt

SEQ ID NO: 629199 - DNA, 75 bp, synthetic construct
  source 1..75: mol_type = other DNA
taagaataatctttataatcttccttttacggttctttgtgaggtggatttgcccctatatttccagacacctgt

SEQ ID NO: 629200 - DNA, 75 bp, synthetic construct
  source 1..75: mol_type = other DNA
agtacagcaaccattcgcattggtggacaaactacagcaggattacgccatttatttgggcatgtgaggaatttt

SEQ ID NO: 629201 - DNA, 75 bp, synthetic construct
  source 1..75: mol_type = other DNA
tgataaacagattaatttcagtcgcgcatcaacggcaacatatatcaacaaatctggcgaactgaaaacggcgga

SEQ ID NO: 629202 - DNA, 75 bp, synthetic construct
  source 1..75: mol_type = other DNA
caaaaacagcgacaaccgccgctaattcagcaaagacatacagagatgaggcccacgaatacgccaatcagacag

SEQ ID NO: 629203 - DNA, 75 bp, synthetic construct
  source 1..75: mol_type = other DNA
aggctcgtatgttaatagcgcagcgacagatgtatttgcagagaaaaccacatttggatgtattgcaaaagctga

SEQ ID NO: 629204 - DNA, 75 bp, synthetic construct
  source 1..75: mol_type = other DNA
gaacaactggtattggctttcaggacgcctacaagtccggatgtagaacctttaccttatgttcagtttggagtg

SEQ ID NO: 629205 - DNA, 75 bp, synthetic construct
  source 1..75: mol_type = other DNA
tgccactgcatcagccaacagtcaaaaagctgcaaaaaccagtgaaaccaacgcaaagacaagcgagactgcggc

SEQ ID NO: 629206 - DNA, 75 bp, synthetic construct
  source 1..75: mol_type = other DNA
gccactgcatcagccaacagtcaaaaagcagcaaaaaccagtgaaaccaacacaaaggcgagcgagactgcggcg

SEQ ID NO: 629207 - DNA, 75 bp, synthetic construct
  source 1..75: mol_type = other DNA
tcacgctgtttgaaattatggttcatgaaggtattcaccagggtcttcaggatcatttatggttgcattactatt

SEQ ID NO: 629208 - DNA, 75 bp, synthetic construct
  source 1..75: mol_type = other DNA
atagaatttggggcgatattcctcctaatgtagcaccgcgtatttttgatttttctggtgtgccacctattgagt

SEQ ID NO: 629209 - DNA, 75 bp, synthetic construct
  source 1..75: mol_type = other DNA
aactcagcgaaagcatcggcagcaagccagacggcagctaaagcaagcgaagatgcagccagagagtatgcaagt

SEQ ID NO: 629210 - DNA, 75 bp, synthetic construct
  source 1..75: mol_type = other DNA
ggggttcccggcggctgaacactggaaggtctatctggcgacgatgttaatcgcctttggctcggtcgtgccttt

SEQ ID NO: 629211 - DNA, 75 bp, synthetic construct
  source 1..75: mol_type = other DNA
aaattaataaatctggtgtgctgacagaggctgccattgacgagccacgatttgaacgtgatggcctgcttattg

SEQ ID NO: 629212 - DNA, 75 bp, synthetic construct
  source 1..75: mol_type = other DNA
gcggcggcaaagaaatccgaaactgcagcggcatcatcgaagaacgcggcgaaaacgtcagaaacgaatgcagct

SEQ ID NO: 629213 - DNA, 75 bp, synthetic construct
  source 1..75: mol_type = other DNA
gccagatggctgcaaaagcaagtgaagacgcagcgagagagtatgcaagccaggcagcagagccgtataaatatg

SEQ ID NO: 629214 - DNA, 75 bp, synthetic construct
  source 1..75: mol_type = other DNA
tttgcggctgatttagcaatataccgtgacatcggtgaatatatctactggaggttagatgaagatgaaaaaatt

SEQ ID NO: 629215 - DNA, 75 bp, synthetic construct
  source 1..75: mol_type = other DNA
attacttgattcacctaacagtcgtctatatgttgagcttaaaaataatcttaacgttagtcgaggacatcgttt

SEQ ID NO: 629216 - DNA, 75 bp, synthetic construct
  source 1..75: mol_type = other DNA
gggcgaacgtcaaatatggatgtgcccgaaacagggacggataattttggttttacctatggaaagtttgtctgc

SEQ ID NO: 629217 - DNA, 75 bp, synthetic construct
  source 1..75: mol_type = other DNA
ttatatcaggagcgacggcggcgacccgcgcaagcgatatagttacagttccaattaagaataatctttataatc

SEQ ID NO: 629218 - DNA, 75 bp, synthetic construct
  source 1..75: mol_type = other DNA
tgcgtcatttatttggtcatgtcaggaatttcagaatatggcacaaggcattgactgatgctcagatgggggagt

SEQ ID NO: 629219 - DNA, 75 bp, synthetic construct
  source 1..75: mol_type = other DNA
tggcggagagcggcatctgttcggtcatttaagaaatctccgtctttggcataaagcgttaactgatgcacaaat

SEQ ID NO: 629220 - DNA, 75 bp, synthetic construct
  source 1..75: mol_type = other DNA
acaattggggtcgcttcaaatgacgagcaaatgattttggcgtttaggaatccaacaagtggtaatgtcgaaccg

SEQ ID NO: 629221 - DNA, 75 bp, synthetic construct
  source 1..75: mol_type = other DNA
gcagcaaaaaacagccaggtttcagcagcccaaagcgagagcgcggcagccggttctgcgacttcagcagctgga

SEQ ID NO: 629222 - DNA, 75 bp, synthetic construct
  source 1..75: mol_type = other DNA
tgacggaagatgatgtcatgccggaggcattgcgtcgttttgaggaaatggtggaagaagcggcacgcaacgctg

SEQ ID NO: 629223 - DNA, 75 bp, synthetic construct
  source 1..75: mol_type = other DNA
acgctgaatgattttctcggtgccatgacggaagatgatgtcatgccggaggcattgcgtcgttttgaggaaatg

SEQ ID NO: 629224 - DNA, 75 bp, synthetic construct
  source 1..75: mol_type = other DNA
atctggggaattattctgggccgggcgttacaaggttctggagcgattgccgctgccgttatggcgctactttct

SEQ ID NO: 629225 - DNA, 75 bp, synthetic construct
  source 1..75: mol_type = other DNA
agcgaaacgaatgccaaagccagtgaaactgcggcgaaaaacagccaggctgcagcagctgaaagcgagagcgcg

SEQ ID NO: 629226 - DNA, 75 bp, synthetic construct
  source 1..75: mol_type = other DNA
tgcaacagcggcagctaatagccaaaaagctgcaaaaaccagtgaaactaacgcaaagacgagtgaaacaaaagc

SEQ ID NO: 629227 - DNA, 75 bp, synthetic construct
  source 1..75: mol_type = other DNA
aagcggtggtatatctgtaacatcatcaacagatgaatttgagtttaaatatggacgtttcacggtaggaagcga

SEQ ID NO: 629228 - DNA, 75 bp, synthetic construct
  source 1..75: mol_type = other DNA
ctgccatttttattgatagcgccacactagatacattcacgtctggagcagatgcgtctaatattgctgtgaaaa

SEQ ID NO: 629229 - DNA, 75 bp, synthetic construct
  source 1..75: mol_type = other DNA
aaactgcagcaaaaaacagccaggtttcagcagcccaaagcgagagcgcggcagccggttctgcgacttcagcag

SEQ ID NO: 629230 - DNA, 75 bp, synthetic construct
  source 1..75: mol_type = other DNA
gcggcgaactcggcgaaagcatccgctgcaagccagaccgctgcaaaagcaagtgaagacgcagccagagagtat

SEQ ID NO: 629231 - DNA, 75 bp, synthetic construct
  source 1..75: mol_type = other DNA
ctgttaatggcatatgccaatttagccgggcttcatctgcaacgtatattgataagtccgggcatattaccgtgg

SEQ ID NO: 629232 - DNA, 75 bp, synthetic construct
  source 1..75: mol_type = other DNA
ctggtggtgcagcaaatcgtattattgcaaaggctgtaaaagatgaggctactggttggattttctatcaggcta

SEQ ID NO: 629233 - DNA, 75 bp, synthetic construct
  source 1..75: mol_type = other DNA
cgaagctaccggatggatttttgcagaggcaacaattcaggcaattgatggggagttaaaaataggttctcagat

SEQ ID NO: 629234 - DNA, 75 bp, synthetic construct
  source 1..75: mol_type = other DNA
cctcgatttgaacgtgatggcctgcttattgaggggcaaagaacgaactacatgctcaattcggaaaaccctgcc

SEQ ID NO: 629235 - DNA, 75 bp, synthetic construct
  source 1..75: mol_type = other DNA
tccgccttcacatgccgggaccattaccgtctatgaaggctccagaccaggtacgctgaatgattttctcggtgc

SEQ ID NO: 629236 - DNA, 75 bp, synthetic construct
  source 1..75: mol_type = other DNA
taatgcagagtcagccgctgaaaatgccggagtcgccaccacaaaagcgcgggaggctgcagcagacgcaacaaa

SEQ ID NO: 629237 - DNA, 75 bp, synthetic construct
  source 1..75: mol_type = other DNA
tgccatgacggaagatgatgtcatgccggaggcattgcgtcgttttgaggcaatggtggaagaagcagcacgcaa

SEQ ID NO: 629238 - DNA, 75 bp, synthetic construct
  source 1..75: mol_type = other DNA
tggatgtgcccgaaaccgggacggatagttttggttttacttatggaaaatttgtctgtaacgattctctgattg

SEQ ID NO: 629239 - DNA, 75 bp, synthetic construct
  source 1..75: mol_type = other DNA
gcaaaggtgagcgaaacagcggctgcgaactcagcgaaagcatcggcagcaagccagacggcagctaaagcaagc

SEQ ID NO: 629240 - DNA, 75 bp, synthetic construct
  source 1..75: mol_type = other DNA
atctcaatgttcgcgcacgtatccgttttgaacggtataactcggaaggatacactttcctttgtgacgcctatt

SEQ ID NO: 629241 - DNA, 75 bp, synthetic construct
  source 1..75: mol_type = other DNA
ctatggaaagtttgtctgtaacgattctctgattgggcaaacctcagccattaatatggcatcaattgctgcaac

SEQ ID NO: 629242 - DNA, 75 bp, synthetic construct
  source 1..75: mol_type = other DNA
tcgccgtcatataaaaagattgttattggtgatgatgaaataacgatgcctggcgataaggttgtaaagtttaaa

SEQ ID NO: 629243 - DNA, 75 bp, synthetic construct
  source 1..75: mol_type = other DNA
gctgctgactcgctggtttgaaaaaccgctgatgagcgtcggtaaggtgctgaatatgaacaatatcgcggcagc

SEQ ID NO: 629244 - DNA, 75 bp, synthetic construct
  source 1..75: mol_type = other DNA
caattggcgtggcgatgatgctggtgccaaaagaagacgcgaccgcggctaaaactgaagcggaggcgcaatcgt

SEQ ID NO: 629245 - DNA, 75 bp, synthetic construct
  source 1..75: mol_type = other DNA
cagtttggcggttcggctcgtttcctcggtaaattcggtaaaagtattgaaggagcgggcggtcagtttgaagaa

SEQ ID NO: 629246 - DNA, 75 bp, synthetic construct
  source 1..75: mol_type = other DNA
agcagatggatactcgcggcaaagtgatcaactgcgccttcgccgtttccgcagccttcgccctgggcgaccact

SEQ ID NO: 629247 - DNA, 75 bp, synthetic construct
  source 1..75: mol_type = other DNA
tcgccggaacactgctggcgtgcgatatgggcggcttcttcctcgccaaagagctggcgggcggcgacgtagcag

SEQ ID NO: 629248 - DNA, 75 bp, synthetic construct
  source 1..75: mol_type = other DNA
cacagattttagaagacagcggggagaaaactgatgaggttcatgtcggagcaacattgaatgacaaggtagtag

SEQ ID NO: 629249 - DNA, 75 bp, synthetic construct
  source 1..75: mol_type = other DNA
gtgacgccaaaagcctgctggattcgactcagttgcgacaggtcttggatatgccgcacccgttggtgttggctg

SEQ ID NO: 629250 - DNA, 75 bp, synthetic construct
  source 1..75: mol_type = other DNA
cgattgtggatgagatgtttgccacagcgccgcaggcgatggcgatgatggcagaactggcgatacgcgggccgg

SEQ ID NO: 629251 - DNA, 75 bp, synthetic construct
  source 1..75: mol_type = other DNA
tggcgggcattgtgaccattccgattggttgtatcgctggtggtctggttgctatgtactccggtgtgcagatca

SEQ ID NO: 629252 - DNA, 75 bp, synthetic construct
  source 1..75: mol_type = other DNA
cctattggctcagtttgctggcgagtgcggacttgtctgtgaaattcccccacaaattttagaggacagtgggga

SEQ ID NO: 629253 - DNA, 75 bp, synthetic construct
  source 1..75: mol_type = other DNA
tggcggatgtcatggtggatgaagccgcattaatgatggcttcagcggggattccgggaggtgtgagatatgtcc

SEQ ID NO: 629254 - DNA, 75 bp, synthetic construct
  source 1..75: mol_type = other DNA
tgcttcgattacctggtcgctggtctcttctctggcaccgatgcgcctgattggtttaaccggcggcgtgtttaa

SEQ ID NO: 629255 - DNA, 75 bp, synthetic construct
  source 1..75: mol_type = other DNA
tcaagtacgtactcaggttaaaatcacctactacgaaaacgcaacccgtactactggcttctttgtaatctataa

SEQ ID NO: 629256 - DNA, 75 bp, synthetic construct
  source 1..75: mol_type = other DNA
actattattgatgtggtagtatacaattctgcttataacgagaagttgctaggcacgaaatctgttccagcaatt

SEQ ID NO: 629257 - DNA, 75 bp, synthetic construct
  source 1..75: mol_type = other DNA
cctagtacttatagttatggcggcgtgggaagtttaatttcgttagtacaatctctagctcatgagtaccgcctg

SEQ ID NO: 629258 - DNA, 75 bp, synthetic construct
  source 1..75: mol_type = other DNA
cgattgttgatgagatgtttgccacagcgccccaggcgatggcgatgatggcggaactggcgatacgtgggccgg

SEQ ID NO: 629259 - DNA, 75 bp, synthetic construct
  source 1..75: mol_type = other DNA
atccgcaaaccaatgagccagattgaaatggttgctgcaatggcgcttgaagctgttcgccaacaaagacgtctt

SEQ ID NO: 629260 - DNA, 75 bp, synthetic construct
  source 1..75: mol_type = other DNA
gttaagttatacaggtttacctcctgtatcaaatgataaagaaagtgtttattatcttaatgttcttgagatacc

SEQ ID NO: 629261 - DNA, 75 bp, synthetic construct
  source 1..75: mol_type = other DNA
atcttcaggtagcatttcgtaccaggataaagcttttttaccgaccagaaaatttaccaggaaaatctctggagg

SEQ ID NO: 629262 - DNA, 75 bp, synthetic construct
  source 1..75: mol_type = other DNA
gcagcagcaggaattgtactggtcgaatccggttatttgatgttggtgaaatccttcaccgacgatctggcctgg

SEQ ID NO: 629263 - DNA, 75 bp, synthetic construct
  source 1..75: mol_type = other DNA
gttccaccaaatgatgtcagaggctgacccacgcggcacacgctggtatcacccgaagatggggcttttccaggt

SEQ ID NO: 629264 - DNA, 75 bp, synthetic construct
  source 1..75: mol_type = other DNA
agaagcgcctgaatcatgtggaagaacagctcgaaacagtcacagaagcggtggaaaccatcaaacgcggaaata

SEQ ID NO: 629265 - DNA, 75 bp, synthetic construct
  source 1..75: mol_type = other DNA
tcacccgaaacccgcttgccgatcccggtttgcttggcgtgaacgccggagccagctttgccattgtgctcggcg

SEQ ID NO: 629266 - DNA, 75 bp, synthetic construct
  source 1..75: mol_type = other DNA
gctaacagccagaaagctgcgaagacgagtgaaactaacgcaaagtccagccagacggcagcgaagaccagcgaa

SEQ ID NO: 629267 - DNA, 75 bp, synthetic construct
  source 1..75: mol_type = other DNA
agtgcgacggcaatagttggcccgattgcctttattggcctgatgatgccgcatatggcgcgttggctggtgggt

SEQ ID NO: 629268 - DNA, 75 bp, synthetic construct
  source 1..75: mol_type = other DNA
agtgcgacggcggtagttggcccgattgcctttattggcctgatgatgccgcacatggcgcgctggctggtaggt

SEQ ID NO: 629269 - DNA, 75 bp, synthetic construct
  source 1..75: mol_type = other DNA
gcgctattgccgtgcccggattactgttattactgattatcgcaacgacattaagtctgctcattggggcaaaat

SEQ ID NO: 629270 - DNA, 75 bp, synthetic construct
  source 1..75: mol_type = other DNA
gaaggggtggattttcttgaaatgactgcggacgtaatacgtacggagtcactttctgatgcctttgccgcgcga

SEQ ID NO: 629271 - DNA, 75 bp, synthetic construct
  source 1..75: mol_type = other DNA
ctttctgtatataaatactggacgataaatgaagattctccatttggaagtgttgatgggcagaagcacacttgc

SEQ ID NO: 629272 - DNA, 75 bp, synthetic construct
  source 1..75: mol_type = other DNA
actgctgccaaggatgatctcagaggaaaaggaaagctggatgctaaggatctgagggtaattcatccatccgag

SEQ ID NO: 629273 - DNA, 75 bp, synthetic construct
  source 1..75: mol_type = other DNA
gctgagttggcaatacgcgggccggagaaaattcagccgcgcgttgactggcaagggctggagatcattgaagag

SEQ ID NO: 629274 - DNA, 75 bp, synthetic construct
  source 1..75: mol_type = other DNA
atgcgacgcaacgacgagaaagtgatctttcttgttccgcacggttgggcagttgatatccccgccatgctgatg

SEQ ID NO: 629275 - DNA, 75 bp, synthetic construct
  source 1..75: mol_type = other DNA
gaaaaagctcacgccgtcgtgcgttaatcaatctgtcgctctgctttccagaacgtagtgaagctgaacgcgaag

SEQ ID NO: 629276 - DNA, 75 bp, synthetic construct
  source 1..75: mol_type = other DNA
ctcattgctcctaaggacgttgctgccgcatgggtatcggagcgtttgcctgccgagcatcggcccctcatctgc

SEQ ID NO: 629277 - DNA, 75 bp, synthetic construct
  source 1..75: mol_type = other DNA
aggagcatttctccaaggcgcttttcgacactattgcccagtggaatgcagagtcggattggaagggtgacgagc

SEQ ID NO: 629278 - DNA, 75 bp, synthetic construct
  source 1..75: mol_type = other DNA
ccctctctgatggctgattttactggtgaactgcatagactcatttctgaatatttgcagtgcaagagacgtaat

SEQ ID NO: 629279 - DNA, 75 bp, synthetic construct
  source 1..75: mol_type = other DNA
tgtaaatacgtacaaattgatcctgagatggtaaccgtacagcttgagcaaaaagatggcgatatttctattctt

SEQ ID NO: 629280 - DNA, 75 bp, synthetic construct
  source 1..75: mol_type = other DNA
tagaacaaaaccaagaagtgaacgccacaaaatttgttcaggacgcaggaaaacgccccacagagaacaaaacaa

SEQ ID NO: 629281 - DNA, 75 bp, synthetic construct
  source 1..75: mol_type = other DNA
cgaaggatgtcgctgccgactgggcaataaaacgcctacctgcccagtatcagcccgtcttacttgaagctaagc

SEQ ID NO: 629282 - DNA, 75 bp, synthetic construct
  source 1..75: mol_type = other DNA
gtggagacggtgacggagggagctaccgtatgggcagaagttaagggtatcagcgggagggagataatctcaggt

SEQ ID NO: 629283 - DNA, 75 bp, synthetic construct
  source 1..75: mol_type = other DNA
tatagacggtccgccgataccggatgcccgtgccacccggcttgagatactctgcagcctgaaggggaatgtgtg

SEQ ID NO: 629284 - DNA, 75 bp, synthetic construct
  source 1..75: mol_type = other DNA
taattcaaacattgatatcaagtgtaggtttttggtttgtgtcaaattggactccttcttttagttttgataaaa

SEQ ID NO: 629285 - DNA, 75 bp, synthetic construct
  source 1..75: mol_type = other DNA
cgttcggtctccgtcagggcaccctgtggaaacaatgacggagggggcaaccatatgggcagaagttaaggggat

SEQ ID NO: 629286 - DNA, 75 bp, synthetic construct
  source 1..75: mol_type = other DNA
cgcccgctctccgtcagggcatccggtggagacggtgacggagggagctaccgtatgggcagaagttaagggtat

SEQ ID NO: 629287 - DNA, 75 bp, synthetic construct
  source 1..75: mol_type = other DNA
ggtgcagaaaccgctcaggctacggtcagagtctggatgagattccgacgcgatgtgacggcagcttcacgtctg

SEQ ID NO: 629288 - DNA, 75 bp, synthetic construct
  source 1..75: mol_type = other DNA
cactcgctccgtcaggttcttctggaaaaggggatgctgacgggggttggagatgaaggcggttttgcacctgtc

SEQ ID NO: 629289 - DNA, 75 bp, synthetic construct
  source 1..75: mol_type = other DNA
gcgtgccggaagccgggccgttattctggaggtcagtggacgctggatggaagcggcagaagcatggcgacgggc

SEQ ID NO: 629290 - DNA, 75 bp, synthetic construct
  source 1..75: mol_type = other DNA
agccacaatcaattaactgatattgtggcaggaaataaagatgaacttttactgctggatctatcccataataaa

SEQ ID NO: 629291 - DNA, 75 bp, synthetic construct
  source 1..75: mol_type = other DNA
agaaagaaataataaattttctcaagtttgttttgttgaaatgatttccgctattttcgctttaggtattggtat

SEQ ID NO: 629292 - DNA, 75 bp, synthetic construct
  source 1..75: mol_type = other DNA
gacaaaagctgatccgcccgatgattgttatcgtctcggcggtgatgagtgccaaattactttacgatagccacg

SEQ ID NO: 629293 - DNA, 75 bp, synthetic construct
  source 1..75: mol_type = other DNA
cggctcaatgagcggcgctttgctggtgcagtacgttcaggctgatgtcttgcggcagattttgcccattctggt

SEQ ID NO: 629294 - DNA, 75 bp, synthetic construct
  source 1..75: mol_type = other DNA
tgagggtctggatgagattccggcgagatgtaacagcaacttcatgtctgaaagtgctgactggtgcattcaaag

SEQ ID NO: 629295 - DNA, 75 bp, synthetic construct
  source 1..75: mol_type = other DNA
acttattggggaacgagtaatgtcgatgagcaattccaggctggattaaatactgcgttcgaagatattaactgg

SEQ ID NO: 629296 - DNA, 75 bp, synthetic construct
  source 1..75: mol_type = other DNA
ggggcgctggttaggtagtgcgcaagggtattctattcttgacattaaaccctggacacgtcgtcccattattta

SEQ ID NO: 629297 - DNA, 75 bp, synthetic construct
  source 1..75: mol_type = other DNA
gtgactatttttgatattaatgggcaatggcagtggtataaaagccccgatggcacaccattaaattatttagca

SEQ ID NO: 629298 - DNA, 75 bp, synthetic construct
  source 1..75: mol_type = other DNA
gcacatctgcatggagaaacgccagtgcccgttacagtcagaccctggaggctcacggacaggctgccagtacag

SEQ ID NO: 629299 - DNA, 75 bp, synthetic construct
  source 1..75: mol_type = other DNA
tgcccgttacagtcagaccctggaggctcacggacaggctgccagtacagcagggctgtatgtgtcaacgacgga

SEQ ID NO: 629300 - DNA, 75 bp, synthetic construct
  source 1..75: mol_type = other DNA
ctgaccagctctcattgtttcagaagctgctttccggccgctggcagaaagtcagagttaccaatagcccgtttt

SEQ ID NO: 629301 - DNA, 75 bp, synthetic construct
  source 1..75: mol_type = other DNA
gcttatgacgatggaatgagggaggctatggagatactaaaaagaatggaaaatagcgagcaagaaaaagcccgg

SEQ ID NO: 629302 - DNA, 75 bp, synthetic construct
  source 1..75: mol_type = other DNA
aggaaacagggccattgcttggcgaatgctggtttactccttctggcaagttacgactaaaacccggattgatgc

SEQ ID NO: 629303 - DNA, 75 bp, synthetic construct
  source 1..75: mol_type = other DNA
ctatgagtttaatccttgctttgctgcgatggctaaaatcggcaacgatagtgagcttgtcgaatatttcgcact

SEQ ID NO: 629304 - DNA, 75 bp, synthetic construct
  source 1..75: mol_type = other DNA
gggtatgacaatgaccggatatagggccgctgtacgcgctaaaacgccaccagacgaaagaaacgagaaacgtaa

SEQ ID NO: 629305 - DNA, 75 bp, synthetic construct
  source 1..75: mol_type = other DNA
attggtgacggtccagaagaagacacgggcgaaaaccaggatggcgagtacaagcccacattcgacatccttgag

SEQ ID NO: 629306 - DNA, 75 bp, synthetic construct
  source 1..75: mol_type = other DNA
atgcctggggccgttttgccgccgataaagacagcctctattttgatggcgaacgcacggatgataatcacggcg

SEQ ID NO: 629307 - DNA, 75 bp, synthetic construct
  source 1..75: mol_type = other DNA
ggtcagcactatctggagatccactaccgcaccttgtcccatccggccgtcaccctctgggaacaacgccaggcg

SEQ ID NO: 629308 - DNA, 75 bp, synthetic construct
  source 1..75: mol_type = other DNA
ccaagcgtaaaagctactcatttgatgaaatgattggagtcgcaatcgaccgtgggcaaaacgctaaacatcagc

SEQ ID NO: 629309 - DNA, 75 bp, synthetic construct
  source 1..75: mol_type = other DNA
caatgctcaaagttcttgccgggaatatgctgtttctcaacgtttcctgcgtaagttgtttggcaacgaccgcga

SEQ ID NO: 629310 - DNA, 75 bp, synthetic construct
  source 1..75: mol_type = other DNA
atgaaaccatatattacgcataacaatatcctagtgacagattcaacgctggactatttcaagtcggtcgttttc

SEQ ID NO: 629311 - DNA, 75 bp, synthetic construct
  source 1..75: mol_type = other DNA
ccgatggggtttaatatgccctttgcggtatcacagaacagtgctgatgcctcttttttgcagcagatggcgctg

SEQ ID NO: 629312 - DNA, 75 bp, synthetic construct
  source 1..75: mol_type = other DNA
agcatattggtgcacaaagtagttttgactcagaggttgttggattaatggggaatcttcttcctctttgcttta

SEQ ID NO: 629313 - DNA, 75 bp, synthetic construct
  source 1..75: mol_type = other DNA
actcagtagttgagaagctttctaaaaatagtgacagggctttttttaaactaaaattccaagatagagttgagc

SEQ ID NO: 629314 - DNA, 75 bp, synthetic construct
  source 1..75: mol_type = other DNA
acctgagcaggttttggctgcggaaaaattatatgctcaattgagaagcgggaaggccgcgaggccgaaattggc

SEQ ID NO: 629315 - DNA, 75 bp, synthetic construct
  source 1..75: mol_type = other DNA
aaatagcgactgcggtcgagcagcagggagcagtaagtgaagacataaaccgcagtattatcaatatacgcgatg

SEQ ID NO: 629316 - DNA, 75 bp, synthetic construct
  source 1..75: mol_type = other DNA
tagtgatccttctattgtgccaccgccacctgcctggcaaatgaaagcggcttcgctaatgcacatcatgcttta

SEQ ID NO: 629317 - DNA, 75 bp, synthetic construct
  source 1..75: mol_type = other DNA
aaaataaattacagctgacgagctggatggcgtatatccgacagcttaaagaaatgcactttaatgatattgcca

SEQ ID NO: 629318 - DNA, 75 bp, synthetic construct
  source 1..75: mol_type = other DNA
gaagatggtaaggatttctacgaatccctgccattattcaccaaaaaatataaactttgcataacccctgacagc

SEQ ID NO: 629319 - DNA, 75 bp, synthetic construct
  source 1..75: mol_type = other DNA
actgtgaaggtattgcgggtcttcgtcagatcggcaaccaaattggcgtgaaagccaaaggcatcgttgaaatga

SEQ ID NO: 629320 - DNA, 75 bp, synthetic construct
  source 1..75: mol_type = other DNA
gtgcgtggccggcagagaaccgcgtggatatccggggtgagctgaaaacgtggattggggattccaaaccctaca

SEQ ID NO: 629321 - DNA, 75 bp, synthetic construct
  source 1..75: mol_type = other DNA
atttcgtctccacgttcgaaccgtcaacaaaatcggtcgatttgctcacagttgaaacttttgccggtacggtat

SEQ ID NO: 629322 - DNA, 75 bp, synthetic construct
  source 1..75: mol_type = other DNA
ccggaaagaacatgtgcgcaaaaaagcaaaaggccgcgccgctggcgtttttccataggctccgcccccctgacg

SEQ ID NO: 629323 - DNA, 75 bp, synthetic construct
  source 1..75: mol_type = other DNA
accggtcgagcgcatcatccgcgagctgctgcaaaagcgcttcctgaccaagcagaaacgcagcctggcggcgtt

SEQ ID NO: 629324 - DNA, 75 bp, synthetic construct
  source 1..75: mol_type = other DNA
tccggcgcgacccgcgtgacatcagccgtatctgggtgctggaaccggaggggcagcattacctggaaatcccct

SEQ ID NO: 629325 - DNA, 75 bp, synthetic construct
  source 1..75: mol_type = other DNA
acccacattttgcatcttctggtaagtttgaaagaaaacttaccaaaatactttcaacactggatgattatcaaa

SEQ ID NO: 629326 - DNA, 75 bp, synthetic construct
  source 1..75: mol_type = other DNA
atgaatgaatttccggttgttttggttattaactgtggttcgtcttcgattaagttttccgtgctcgatgccagc

SEQ ID NO: 629327 - DNA, 75 bp, synthetic construct
  source 1..75: mol_type = other DNA
ggacgcgcagtggtgatgtcgacttcggcgcgatgtcctgggttgccagtcaaaccaatcagagcctgggcgatc

SEQ ID NO: 629328 - DNA, 75 bp, synthetic construct
  source 1..75: mol_type = other DNA
atgaatgaatttccggttgttttggttattaactgtggttcgtcttcgattaagttttccgtgctcgatacctgt

SEQ ID NO: 629329 - DNA, 75 bp, synthetic construct
  source 1..75: mol_type = other DNA
acacgaacagctgctgaagtatgtgtatccggcatcgcagaacaacctgaaaattcagcttgctgaggatgcaaa

SEQ ID NO: 629330 - DNA, 75 bp, synthetic construct
  source 1..75: mol_type = other DNA
ccacccgtgtcattggtctggggtttatctgtctcggtaccgtcacagtactgagcctggccaccaatgttattc

SEQ ID NO: 629331 - DNA, 75 bp, synthetic construct
  source 1..75: mol_type = other DNA
tacgagtcaatgaacattgattacgtggtggaagactacgccgccggttgtctggtggaaaaaattaaggtcggt

SEQ ID NO: 629332 - DNA, 75 bp, synthetic construct
  source 1..75: mol_type = other DNA
cgcaatgaagcggcgacccgcgtgatgagtaaaatcgtcgacgaggaagggaacgtcgtttccgccgtgatccgt

SEQ ID NO: 629333 - DNA, 75 bp, synthetic construct
  source 1..75: mol_type = other DNA
ctttaccgcgctggagtccaaaaaatacgagtgcgatcaggtcaactttgacttccacttcaaatataaaaagct

SEQ ID NO: 629334 - DNA, 75 bp, synthetic construct
  source 1..75: mol_type = other DNA
aagaacttcgtgaaattcgctctcagcttgtagaaaagcgcggcgatgttattgccccatggtatcttatgaagc

SEQ ID NO: 629335 - DNA, 75 bp, synthetic construct
  source 1..75: mol_type = other DNA
ttaggagatggagaggtaaatctaagaaggcggttgtttttggcataaattgccagaaattgagaaagtttcatt

SEQ ID NO: 629336 - DNA, 75 bp, synthetic construct
  source 1..75: mol_type = other DNA
tgcgactgtggaagctaaacagccaaaaacaataaataccattacctacacaagaatactccggactccggatga

SEQ ID NO: 629337 - DNA, 75 bp, synthetic construct
  source 1..75: mol_type = other DNA
tctgtggtcgtgaactgctggctgacaagtatttcccgctggttaacaaagagcaggacaacagcgaaaaaatct

SEQ ID NO: 629338 - DNA, 75 bp, synthetic construct
  source 1..75: mol_type = other DNA
attgccggaaccaccgataccaccaccaaagagcgagagcctaccgatccgacgctgatggaagacgtggaatac

SEQ ID NO: 629339 - DNA, 75 bp, synthetic construct
  source 1..75: mol_type = other DNA
cgaaatgtgccgtgctcgtggcattatctatcacgttgatgcaacccagagcgtgggtaaactgcctatcgacct

SEQ ID NO: 629340 - DNA, 75 bp, synthetic construct
  source 1..75: mol_type = other DNA
tccagcgtatcgcgcttgatcgcatcatgatcggctttaacggaaccagctacgcggataagtccgaccgcaacg

SEQ ID NO: 629341 - DNA, 75 bp, synthetic construct
  source 1..75: mol_type = other DNA
gcgcaccgccgccgcattgtggaagagccggaatataaccgtgtctctacctacagttcgtcaaatgatgcctat

SEQ ID NO: 629342 - DNA, 75 bp, synthetic construct
  source 1..75: mol_type = other DNA
gcgtctgaacggtgtggcagttgaagaactgtccagcaagttcaccgtagagccgtctgtacagcagacgctgga

SEQ ID NO: 629343 - DNA, 75 bp, synthetic construct
  source 1..75: mol_type = other DNA
cgctacctggggatggtgaagcaatggcaggacatgatctattccggccgtcattcacaatcttatatgcagtcg

SEQ ID NO: 629344 - DNA, 75 bp, synthetic construct
  source 1..75: mol_type = other DNA
agaggcctgttcagcgatgcagatgcgtaccctctggaccaggcttttccactgctgatgaaacaactgaaactc

SEQ ID NO: 629345 - DNA, 75 bp, synthetic construct
  source 1..75: mol_type = other DNA
agaggcctgttcagcgatgcagatgcgtaccctctggaccaggcatttcctctgctgatgaaacaactgcaactc

SEQ ID NO: 629346 - DNA, 75 bp, synthetic construct
  source 1..75: mol_type = other DNA
gtgagagagctgtgctatggatctgtttgcagtggaattgaagccgcgagcatttcatgggaaccgttgggtatg

SEQ ID NO: 629347 - DNA, 75 bp, synthetic construct
  source 1..75: mol_type = other DNA
gaccgcccctggtgggggctgccctgcaccgtgacgccctgtttcggggcacgtctggtgcaggagggtaaccgg

SEQ ID NO: 629348 - DNA, 75 bp, synthetic construct
  source 1..75: mol_type = other DNA
attatcccgacgaccataacgaccgcctctggtggggactgccctgcaccgtgacgccctgtttcggggcacgtc

SEQ ID NO: 629349 - DNA, 75 bp, synthetic construct
  source 1..75: mol_type = other DNA
agaggcctgttcagcgatgcagatgcgtaccctctggaccaggcgtttccactgctgatgaaacaactgtaactc

SEQ ID NO: 629350 - DNA, 75 bp, synthetic construct
  source 1..75: mol_type = other DNA
gcaccgctggccccatgtcgccaaccttggcgacatgacaaaactcgcccaaaaagtccaggctggagaaattga

SEQ ID NO: 629351 - DNA, 75 bp, synthetic construct
  source 1..75: mol_type = other DNA
gaccctggaggatttagggctgatcgtaacctattcaaccttgagtcttggcgcagcgtattttgctcagttacc

SEQ ID NO: 629352 - DNA, 75 bp, synthetic construct
  source 1..75: mol_type = other DNA
ctcaggcaaattattgagcaactgaatctccctgttgtctcatcattaatgggactcggcgcgtttccggcaaca

SEQ ID NO: 629353 - DNA, 75 bp, synthetic construct
  source 1..75: mol_type = other DNA
cgtttttgttcctgaaccgacattgttttaatggattgacgcgctacaaccaggccggtgagttcaatgtcggtt

SEQ ID NO: 629354 - DNA, 75 bp, synthetic construct
  source 1..75: mol_type = other DNA
tcaggatggcggcatttggggaatatattgacgatgaaaccgcatcgacagtaaaggcaagagattttaaagatg

SEQ ID NO: 629355 - DNA, 75 bp, synthetic construct
  source 1..75: mol_type = other DNA
caaaagagcgaaaagttaaaccagcggcagaattcgaacggtccatattcaaatgggctggtggaaaatttggtg

SEQ ID NO: 629356 - DNA, 75 bp, synthetic construct
  source 1..75: mol_type = other DNA
accattctcgacgcagctctgcgtaacggtatcgagattgaacacgcctgtgaaaaatcctgtgcttgcaccacc

SEQ ID NO: 629357 - DNA, 75 bp, synthetic construct
  source 1..75: mol_type = other DNA
gtgtcgcctgccgtggtacagggggcaccggatatcacccgtgaaatccagcaggatattgcccggcgaatgagg

SEQ ID NO: 629358 - DNA, 75 bp, synthetic construct
  source 1..75: mol_type = other DNA
ccttctggggcgtctctgcaataagcgggggcctggcagtctttctgcctaacgttttgtttatgatatttgcct

SEQ ID NO: 629359 - DNA, 75 bp, synthetic construct
  source 1..75: mol_type = other DNA
tatgccgggaattaattttaaccctggcaaacaggacgacgactcagcgtgctgagccgatgacccgcagattaa

SEQ ID NO: 629360 - DNA, 75 bp, synthetic construct
  source 1..75: mol_type = other DNA
gctaccgctgtcaaacctgatcagcaccagaaagcatccggcagaagcgcgtctgctccccgtgtccagaggccc

SEQ ID NO: 629361 - DNA, 75 bp, synthetic construct
  source 1..75: mol_type = other DNA
gattaatggcattctggttaacgacgttaccggtaccccgactgaaatcacggaagcccgcaacacgttcctgat

SEQ ID NO: 629362 - DNA, 75 bp, synthetic construct
  source 1..75: mol_type = other DNA
tgccggtgtcggtcgccggctggcgatattcactcgccgagtgtgctgccaccgggaacagcggcaatctgcgtg

SEQ ID NO: 629363 - DNA, 75 bp, synthetic construct
  source 1..75: mol_type = other DNA
atgagcgattattacagctcgctttctgaatcagagtattttgaaaataaattatacatatctgtatgctataaa

SEQ ID NO: 629364 - DNA, 75 bp, synthetic construct
  source 1..75: mol_type = other DNA
ctgatgacaatatggttccggacagccagagagggtatgcaccgacaattcacggtatttcccggggaacatccc

SEQ ID NO: 629365 - DNA, 75 bp, synthetic construct
  source 1..75: mol_type = other DNA
ctggaagaaaatgagtggttacagtgttcttacccaggacggagtgatacagatacagccgaagtatacggatta

SEQ ID NO: 629366 - DNA, 75 bp, synthetic construct
  source 1..75: mol_type = other DNA
aactctgttttctgtttatcgaacccagcgcagtgacaatgccgacaacatgttgcacattgaaaatatcgccct

SEQ ID NO: 629367 - DNA, 75 bp, synthetic construct
  source 1..75: mol_type = other DNA
gatgagttaagttatctggattgtactgttgatgttgagtatgtgaaggaacagaaacgaaaattatttgcaatg

SEQ ID NO: 629368 - DNA, 75 bp, synthetic construct
  source 1..75: mol_type = other DNA
caccggatgtgacacaccgaataaaagaatccatcaatgcctggacagaagatgagttaagttatctggattgta

SEQ ID NO: 629369 - DNA, 75 bp, synthetic construct
  source 1..75: mol_type = other DNA
gttcgccagctcaatggatatgtcattgaaagaagtgctgacaaaatcttttgagttactcaaggctcaatacaa

SEQ ID NO: 629370 - DNA, 75 bp, synthetic construct
  source 1..75: mol_type = other DNA
gcaaaaacccgatgctgcaggatgtggccgtcggctggctgcagaagtaccgcaacgaagctcctgcccgcgtga

SEQ ID NO: 629371 - DNA, 75 bp, synthetic construct
  source 1..75: mol_type = other DNA
tgctgatcacccgtctggataacttgtccatctactggcaggaagacacccgccgccgttcagttatcgacaacc

SEQ ID NO: 629372 - DNA, 75 bp, synthetic construct
  source 1..75: mol_type = other DNA
gcgccgttcttcccgccgaatgcactgctgattacccgtctggataacctgtccatttactggcaggaagatacc

SEQ ID NO: 629373 - DNA, 75 bp, synthetic construct
  source 1..75: mol_type = other DNA
gtattcaaatttattttatctagaatgttttacagtggactttataaaagtagataagatgtttacacagggttt

SEQ ID NO: 629374 - DNA, 75 bp, synthetic construct
  source 1..75: mol_type = other DNA
gaacaccatgcaggagtcctctgactttctgacccgcatcaatattgtgccggtcagcgaaatgaaaggggaaaa

SEQ ID NO: 629375 - DNA, 75 bp, synthetic construct
  source 1..75: mol_type = other DNA
ttatcaagcgccagtcgctcgatttcatcatggccggtttcaacggtattacccgtgcggcgacctccaaccgta

SEQ ID NO: 629376 - DNA, 75 bp, synthetic construct
  source 1..75: mol_type = other DNA
gttgaggactaccgctgcgccgcactggtggaaaacatccagattggcgacttcagcaccgccgcagcagaaacc

SEQ ID NO: 629377 - DNA, 75 bp, synthetic construct
  source 1..75: mol_type = other DNA
atgatttcgaaatatgcgaaagtattttaagacagcaggagaagttgcgtgaaagaattgatgagacgctttctg

SEQ ID NO: 629378 - DNA, 75 bp, synthetic construct
  source 1..75: mol_type = other DNA
ggatgtgctgacatatgggcgtcactgccactgtcagccgccggatggcgttattcgctggctgaatgctcgact

SEQ ID NO: 629379 - DNA, 75 bp, synthetic construct
  source 1..75: mol_type = other DNA
gaccaacaacctgattgaaccgtggtatcaggaagaccctgaccttgtggtgattgtgggacgtcagctactggc

SEQ ID NO: 629380 - DNA, 75 bp, synthetic construct
  source 1..75: mol_type = other DNA
actggtacaaagcgaataccgataagaaagagtacgctccggcagaagatccgggcgtggtttctgtatctgaaa

SEQ ID NO: 629381 - DNA, 75 bp, synthetic construct
  source 1..75: mol_type = other DNA
ttaacgcttacctgcagcagctggcgcgtctgaacggtgtggcagttgaagaactgtccagcaagttcaccgtgg

SEQ ID NO: 629382 - DNA, 75 bp, synthetic construct
  source 1..75: mol_type = other DNA
atcggtaacgctcttgttcgtctccatgttcatgatactaactttgactttaacgcctctggtgactttaccgca

SEQ ID NO: 629383 - DNA, 75 bp, synthetic construct
  source 1..75: mol_type = other DNA
gattattaaagctattcaggaaatggacgccaaatataaagcccagatcgaagcattacagaaagaaattgccga

SEQ ID NO: 629384 - DNA, 75 bp, synthetic construct
  source 1..75: mol_type = other DNA
tatagtgatgtaggcggtagttctattcgtcaacatattgacggccagatagaacttcaaactggcaatatgaag

SEQ ID NO: 629385 - DNA, 75 bp, synthetic construct
  source 1..75: mol_type = other DNA
aaacaggtttttgaatgtaaggatgctacaagttatcactggtatactgaacgtactcagggtggcactggacct

SEQ ID NO: 629386 - DNA, 75 bp, synthetic construct
  source 1..75: mol_type = other DNA
gtatgatttacggtaactatggtgcattctggcgtaatgatggtcaaaacgtatatcttctgtctactgccgaaa

SEQ ID NO: 629387 - DNA, 75 bp, synthetic construct
  source 1..75: mol_type = other DNA
gctagctggcgtgatcgtgcttctggtattcaggtcgactgtcaacaatcaaccgattccgctcataacgtatgg

SEQ ID NO: 629388 - DNA, 75 bp, synthetic construct
  source 1..75: mol_type = other DNA
aggtgaggcctgatcttcctgaagggcagtcgatacatgttttacggcatacctttgccactcacttcatgatta

SEQ ID NO: 629389 - DNA, 75 bp, synthetic construct
  source 1..75: mol_type = other DNA
cgctttaaccaaaataccaccacttgagcggcgaaatgacatgcctcgcggtagtggtaacaaaagcgcgtttac

SEQ ID NO: 629390 - DNA, 75 bp, synthetic construct
  source 1..75: mol_type = other DNA
ttcttaaggctttacgaaaagccgggctgtattccaatgccacgttgacagatgctgaccctcaggcaattgaag

SEQ ID NO: 629391 - DNA, 75 bp, synthetic construct
  source 1..75: mol_type = other DNA
atcgttccatgcgactacgtgatggtatcagtgccgcaacgataaaccgtgacatgtaccgattatccggcatgt

SEQ ID NO: 629392 - DNA, 75 bp, synthetic construct
  source 1..75: mol_type = other DNA
aatgggcgaacccagaatctacatgctgacccgtaactttttgatgaagtatcgcgctaccaggttgcaaagcgg

SEQ ID NO: 629393 - DNA, 75 bp, synthetic construct
  source 1..75: mol_type = other DNA
gcttggtgatccagccgttaaccgactgaacaagcgaatgattgcacagcaccgaagccaacggctggaagacgg

SEQ ID NO: 629394 - DNA, 75 bp, synthetic construct
  source 1..75: mol_type = other DNA
cttaacgttcctcactcttccggtaaagcgcatggtcgaggatttactttccgttatgcgtctggcggatctcgt

SEQ ID NO: 629395 - DNA, 75 bp, synthetic construct
  source 1..75: mol_type = other DNA
ctgcgcgccctggttatcccatcatcgaagacaaaaagctgcctgcacagcaaaaagcacgtgatgaatactggc

SEQ ID NO: 629396 - DNA, 75 bp, synthetic construct
  source 1..75: mol_type = other DNA
cctgcgcgccctggttatccaatcatcgaagacaaaaagctgcctgcacagcaaaaaacacgtgatgaatactgg

SEQ ID NO: 629397 - DNA, 75 bp, synthetic construct
  source 1..75: mol_type = other DNA
aattggttaatgatacctacgggcatttaatcggcgatgtagtattacgcaccctggcaacttacttagccagtt

SEQ ID NO: 629398 - DNA, 75 bp, synthetic construct
  source 1..75: mol_type = other DNA
taaaaacaaacccagcctgcaacgtgtggctaaatacagtaaaaacttcccccacgcgacgctcgccgcactggc

SEQ ID NO: 629399 - DNA, 75 bp, synthetic construct
  source 1..75: mol_type = other DNA
aaactcgaacgatgctggggcctggacgtatttagcgatcgagaagccagctacatgtcgcatgaaaaccacttc

SEQ ID NO: 629400 - DNA, 75 bp, synthetic construct
  source 1..75: mol_type = other DNA
agaactgctggcgttaaaagcccccccctgcgcgccctggttatcccatcatcgaagaccaaaagctgcctgcac

SEQ ID NO: 629401 - DNA, 75 bp, synthetic construct
  source 1..75: mol_type = other DNA
ttctggatcgcgtgattatattcgatttaatcattggggcgatagcaacaacgcccgtgataacgttttatacct

SEQ ID NO: 629402 - DNA, 75 bp, synthetic construct
  source 1..75: mol_type = other DNA
atttcaagattgctacggctacgatcccacaaaatggtcgtatggtaatgcttcgtatcttcggtggtaatggtt

SEQ ID NO: 629403 - DNA, 75 bp, synthetic construct
  source 1..75: mol_type = other DNA
actttggtgctttccgtaccaatggtcaagatggactcatggatctaactcttaacgttcctcactcttccggta

SEQ ID NO: 629404 - DNA, 75 bp, synthetic construct
  source 1..75: mol_type = other DNA
aacaaccgtcgccgtggtgggtacatttatgggtctgctatcgcaacccctttaatattttgctcaccattcttg

SEQ ID NO: 629405 - DNA, 75 bp, synthetic construct
  source 1..75: mol_type = other DNA
tttggtgttggtgttgctaacggattgggtggaaattctattgttttaggcgatagtgatactggatttaaacaa

SEQ ID NO: 629406 - DNA, 75 bp, synthetic construct
  source 1..75: mol_type = other DNA
ttaaggggtctgctgcatatttcccgatcatcgctggttacagtaacttaggtgatgttggttatcgtcagtcct

SEQ ID NO: 629407 - DNA, 75 bp, synthetic construct
  source 1..75: mol_type = other DNA
gctctccttaccgctgctgacagtgcatatcagacaatctgtatcgctttaaccaaaataccaccacttgagcgg

SEQ ID NO: 629408 - DNA, 75 bp, synthetic construct
  source 1..75: mol_type = other DNA
ctgccagcggcctctctcggcctgaaatccgccccggcgatattttcaaagataaatacggcggcactgtaacga

SEQ ID NO: 629409 - DNA, 75 bp, synthetic construct
  source 1..75: mol_type = other DNA
ggcgacttgatacatatttatctcgtttccatgcacatcgtcttggactggttgaggaaaacgggcgagttttct

SEQ ID NO: 629410 - DNA, 75 bp, synthetic construct
  source 1..75: mol_type = other DNA
gctgcccggtcgggaagtaaaaatcgttaacgatgaagtgtggttgcgcgctgccagtatggccgaaggttactg

SEQ ID NO: 629411 - DNA, 75 bp, synthetic construct
  source 1..75: mol_type = other DNA
tatgactgcgtgatgcctgtttatcagttccggggtgatttttcactgatacaggccacgccatgcaaacagccc

SEQ ID NO: 629412 - DNA, 75 bp, synthetic construct
  source 1..75: mol_type = other DNA
tatgattgcgtgatgcctgtttatcagttccggcgtgatttttctctggtacaggcagcgccccgcagtaaacca

SEQ ID NO: 629413 - DNA, 75 bp, synthetic construct
  source 1..75: mol_type = other DNA
atatgccgcaccccgcagtaagcccaccagcagggaaaaagcgcggggaaacatccagaaaatgaaaagcatgat

SEQ ID NO: 629414 - DNA, 75 bp, synthetic construct
  source 1..75: mol_type = other DNA
gtgatcggccagtttctgcgccatcacctgttaattctcggcaagtttattctcaccttgctgccgatgcccgcc

SEQ ID NO: 629415 - DNA, 75 bp, synthetic construct
  source 1..75: mol_type = other DNA
aaaaatcctcccggatttcagcaaaatcagcccgttaaaaggcattgggcgactgttttccagcgaacatctggc

SEQ ID NO: 629416 - DNA, 75 bp, synthetic construct
  source 1..75: mol_type = other DNA
tcggtggtggtgctggtgatgctgtgggtaagcctgcgcaataactttgccgcctttctcggcctgcaggcgcta

SEQ ID NO: 629417 - DNA, 75 bp, synthetic construct
  source 1..75: mol_type = other DNA
gtcactggcggcaagtgcggggagaagccattgccttgcgtctcaataacgagcaactcaactggcgcgagcttt

SEQ ID NO: 629418 - DNA, 75 bp, synthetic construct
  source 1..75: mol_type = other DNA
gctggcagcggcgtgatgttacgggcgtggaattcgccgcaaacgctgcttgcctggctggcgttattgcaatgt

SEQ ID NO: 629419 - DNA, 75 bp, synthetic construct
  source 1..75: mol_type = other DNA
aaaatcagcttcaacatcagttcgtgcgccagggcggtgtgtggatgccgggcgatgaagtaaaaaaagtgacct

SEQ ID NO: 629420 - DNA, 75 bp, synthetic construct
  source 1..75: mol_type = other DNA
ctgacagcggcaaaactcgcactaaattcatgcgcggggatatttaccgcgaccagtacggcggcacggtaatga

SEQ ID NO: 629421 - DNA, 75 bp, synthetic construct
  source 1..75: mol_type = other DNA
ctggatgtgcggttacttgatcactttatcgtggcggggacggaaacggtatcaatggctgaacgggggctagtg

SEQ ID NO: 629422 - DNA, 75 bp, synthetic construct
  source 1..75: mol_type = other DNA
acacagagatggcctttctttctgatgatgagattgaacggcttcttgagcgactggagggtgatgcgcgtcgtg

SEQ ID NO: 629423 - DNA, 75 bp, synthetic construct
  source 1..75: mol_type = other DNA
gcaaggtaatgcaggcggttaccctcctgcaccagacgggcaccaaacagggcctcactgtgcagggaagccccc

SEQ ID NO: 629424 - DNA, 75 bp, synthetic construct
  source 1..75: mol_type = other DNA
gatgccgaccctcaggcaattgaagatgccattaatgacctcgaagacatgatggcagcatggcaggcgaaaggt

SEQ ID NO: 629425 - DNA, 75 bp, synthetic construct
  source 1..75: mol_type = other DNA
aggctgtagcatttgagcgatacacaatcgcctacgccagccagaaagaatgggcaggtcagcgagcagatcgca

SEQ ID NO: 629426 - DNA, 75 bp, synthetic construct
  source 1..75: mol_type = other DNA
atgaccatgtttacccagcgtgaaacccgtatcctcgatcaggcgcgtgaaatcatcagccggtactatcagcgt

SEQ ID NO: 629427 - DNA, 75 bp, synthetic construct
  source 1..75: mol_type = other DNA
atgctccccctgaccgacggacttcttaagatgatgaacttcaacaatgttttccgctggcatttgcccttcctg

SEQ ID NO: 629428 - DNA, 75 bp, synthetic construct
  source 1..75: mol_type = other DNA
gtgctggttgaactgggcggcaatgacggtttgcgtggttttcagccacagcaaaccgagcaaacgctgcgccag

SEQ ID NO: 629429 - DNA, 75 bp, synthetic construct
  source 1..75: mol_type = other DNA
gaccagtacggcggcacggtaatgattaagggcgtggcgggacggtgcgtaacttaccgccgtgaaggttacgaa

SEQ ID NO: 629430 - DNA, 75 bp, synthetic construct
  source 1..75: mol_type = other DNA
gccatgcaggagcatctcctggaaaaaaagcgccaggagctggagaaaaacgaaagtcatccggagcctgaggtg

SEQ ID NO: 629431 - DNA, 75 bp, synthetic construct
  source 1..75: mol_type = other DNA
atgaaacatccatttgaagtaaaacttgccgccgtaaatcattacctggccggtcatgctggcatcatttctacg

SEQ ID NO: 629432 - DNA, 75 bp, synthetic construct
  source 1..75: mol_type = other DNA
cgccgtgaaggttacgaatatgattgcgtgatgcctgtttatcagttccggcgtgatttttctctggtacagacc

SEQ ID NO: 629433 - DNA, 75 bp, synthetic construct
  source 1..75: mol_type = other DNA
tttattctcggtggcaaagtgatttgggcgacaggatttgtgatgttggtaggacagttcctcggcgcgcgcatg

SEQ ID NO: 629434 - DNA, 75 bp, synthetic construct
  source 1..75: mol_type = other DNA
taccgggaacaacctcggcggaatcaatcatcgattatttcaaaaatcataaacctgtcaccccagacttaacta

SEQ ID NO: 629435 - DNA, 75 bp, synthetic construct
  source 1..75: mol_type = other DNA
atccgaaaacaaagaaaattgatagttataatggtgagttaatcaccatctttgcagatcaatttaaacctgaca

SEQ ID NO: 629436 - DNA, 75 bp, synthetic construct
  source 1..75: mol_type = other DNA
tatcgatccgctgtcccgccagttccttgttgttaagaacccacagaggaaaggtgaaagtgatgattttgctgc

SEQ ID NO: 629437 - DNA, 75 bp, synthetic construct
  source 1..75: mol_type = other DNA
atattcgtttgggtgttaatgttttcacgcctgattataaaacaccgttatagtaatccttctattgtgccaccg

SEQ ID NO: 629438 - DNA, 75 bp, synthetic construct
  source 1..75: mol_type = other DNA
ccggaagagcagcagctttcaccggcggccatcagccgggaagcctcccgtaatgagctgattgcccgtaatctg

SEQ ID NO: 629439 - DNA, 75 bp, synthetic construct
  source 1..75: mol_type = other DNA
aagagattggtgcagcaataacattgcttgcaacagagtgcttagttacgtcactcatgctgatgttcgtaagaa

SEQ ID NO: 629440 - DNA, 75 bp, synthetic construct
  source 1..75: mol_type = other DNA
tgaacgttgctacaacgcaatgattaatgccgcgttaaaacatgtgttcgggcgctcaaacagccctgaactgaa

SEQ ID NO: 629441 - DNA, 75 bp, synthetic construct
  source 1..75: mol_type = other DNA
acagagcacaaaggaagtcgccgccggctccgctttacccggccatgcagggcatggccttgtggtttttcagtt

SEQ ID NO: 629442 - DNA, 75 bp, synthetic construct
  source 1..75: mol_type = other DNA
attatccagagttctgtgaatttattagcgggaatattatcatgttgtttaatatttaaatatagatggatttct

SEQ ID NO: 629443 - DNA, 75 bp, synthetic construct
  source 1..75: mol_type = other DNA
gtgatggtgcggctatttcactattaataacggaattaatggtatcgacgttaatgtatttatttttacgctcga

SEQ ID NO: 629444 - DNA, 75 bp, synthetic construct
  source 1..75: mol_type = other DNA
aatgaaatggataactatatgtactattacggctcgatgtttagtgatacctttaacatttatctttgttaaaaa

SEQ ID NO: 629445 - DNA, 75 bp, synthetic construct
  source 1..75: mol_type = other DNA
tcctaacgagcgatccggtatccctaaatatgtggaacctgaagtcaaacctgatcctcgccatacacaaaacag

SEQ ID NO: 629446 - DNA, 75 bp, synthetic construct
  source 1..75: mol_type = other DNA
ctgattacggaattgcgtattatactaaggtgaaatttacctgtaacaatattacggcaattagagagattgtgt

SEQ ID NO: 629447 - DNA, 75 bp, synthetic construct
  source 1..75: mol_type = other DNA
tactctcagggatcggtgttcgctggccgtatctgtgatggcagttccggcagtgtagcctggcgtctttactcc

SEQ ID NO: 629448 - DNA, 75 bp, synthetic construct
  source 1..75: mol_type = other DNA
tgaagaaagcgagataaagtcaagtcgggttaaattatcatggaagaaaaaacggcaggatgcactggagtcagg

SEQ ID NO: 629449 - DNA, 75 bp, synthetic construct
  source 1..75: mol_type = other DNA
atccggtataaaggttttagtaatcgataatctatcggcgttgctgaccaatgaaacattgggtgtcttcttcaa

SEQ ID NO: 629450 - DNA, 75 bp, synthetic construct
  source 1..75: mol_type = other DNA
tcagtgataaatatgcaaaggctattaacattttaaatgataaccttaaagaaaactactatgttttttatggtg

SEQ ID NO: 629451 - DNA, 75 bp, synthetic construct
  source 1..75: mol_type = other DNA
ttaatgaaaaatattctaaggctattaacattttaaaggataaccttaaagaaaactatcatattttttatggag

SEQ ID NO: 629452 - DNA, 75 bp, synthetic construct
  source 1..75: mol_type = other DNA
aatctctcacctgaagttcggggaaaactgccaggtagtctgtccgggcatggttatatcgattttgtcattggc

SEQ ID NO: 629453 - DNA, 75 bp, synthetic construct
  source 1..75: mol_type = other DNA
cagtacgtaaaccaactgcggcacgttccaatgtctccgcaactgtaaatagcactgaagttaaaaagttgatga

SEQ ID NO: 629454 - DNA, 75 bp, synthetic construct
  source 1..75: mol_type = other DNA
gaagcatcaacccgcacccgcctctctttcgaaacctcgatgcaccgcctgggcgctagtgtggtgggattctct

SEQ ID NO: 629455 - DNA, 75 bp, synthetic construct
  source 1..75: mol_type = other DNA
gacagggaaaattattggacaaaaacctgtcagggatgctgacggctccctgttctgcctgtcagtacacaccat

SEQ ID NO: 629456 - DNA, 75 bp, synthetic construct
  source 1..75: mol_type = other DNA
cttatcttggttcgcgcctgcgccgtttgaatgaaatcaaaaccgaacgcctcaccgccctcaccgcagcacagg

SEQ ID NO: 629457 - DNA, 75 bp, synthetic construct
  source 1..75: mol_type = other DNA
ttctgcactgtcagcctcagtcaacagcacggaggtaaagaaactgatgaagtatgacggcaaagccctgctggt

SEQ ID NO: 629458 - DNA, 75 bp, synthetic construct
  source 1..75: mol_type = other DNA
cgccgtgtcgtgtgcgggcggtgtcgcggaatatgtgaataacggaggaaaacatcatgcaatatgcgaaacctg

SEQ ID NO: 629459 - DNA, 75 bp, synthetic construct
  source 1..75: mol_type = other DNA
cggtctgggcggcacctatgccggtaacccgattgcctgcgtagcggcgctggaagtgttaaaagtgtttgagca

SEQ ID NO: 629460 - DNA, 75 bp, synthetic construct
  source 1..75: mol_type = other DNA
gcgctggaagtgttgaaggtgtttgagcaggaaaatctgctgcaaaaagccaacgatctggggcagaagttgaaa

SEQ ID NO: 629461 - DNA, 75 bp, synthetic construct
  source 1..75: mol_type = other DNA
tggcaccagatctcaccacctttgcgaaatcgatcgcaggcggtttcccgctggcgggcgtcaccgggcgcgccg

SEQ ID NO: 629462 - DNA, 75 bp, synthetic construct
  source 1..75: mol_type = other DNA
cctggaatttggtgaaaccattcacaaaggtcgggcagcgatggagcgagagctccctgaagcactggagcggat

SEQ ID NO: 629463 - DNA, 75 bp, synthetic construct
  source 1..75: mol_type = other DNA
gcctgaacctttaagtcttggtaaggcaaaagagcttgcatcagcgtgtagagaaagaaacgaaatggcagaggt

SEQ ID NO: 629464 - DNA, 75 bp, synthetic construct
  source 1..75: mol_type = other DNA
gagcggcgcggggcgtaccggcacgctgtttgcgatggagcagatgggcgtggcacccgatctcaccacctttgc

SEQ ID NO: 629465 - DNA, 75 bp, synthetic construct
  source 1..75: mol_type = other DNA
agccgtatctggagctgtgcgagattatgaatcagaaggtgccaggcgatttcgccaagaaaacgctgctggtta

SEQ ID NO: 629466 - DNA, 75 bp, synthetic construct
  source 1..75: mol_type = other DNA
acctgcttccaggtgctggcctacgagccgtatctggagctgtgcgagattatgaatcagaaggtgccaggcgat

SEQ ID NO: 629467 - DNA, 75 bp, synthetic construct
  source 1..75: mol_type = other DNA
ggaacagcaaactgcaattgaccattttagcgccatgtcttttgacgaacgtcttgctacgagaggagcggatat

SEQ ID NO: 629468 - DNA, 75 bp, synthetic construct
  source 1..75: mol_type = other DNA
gcctgattcttctctcctgcggcccgtattacaacgtgctgcgcatccttgtaccgctcaccattgaagacgctc

SEQ ID NO: 629469 - DNA, 75 bp, synthetic construct
  source 1..75: mol_type = other DNA
ttgccaagaaaacgctgctggtcaccacaggttctgaagcggtggaaaacgcggtgaaaatcgcccgcgccgcca

SEQ ID NO: 629470 - DNA, 75 bp, synthetic construct
  source 1..75: mol_type = other DNA
gtaccgctcaccattgaagacgctcagatccgtcagggtctggagattatcggtcagtgttttgatgaggcgaag

SEQ ID NO: 629471 - DNA, 75 bp, synthetic construct
  source 1..75: mol_type = other DNA
tggtcataaagtccggttgttgcaggcccgcttcgttaaggcattcgtcatgggcaataagaatgatgtgatgga

SEQ ID NO: 629472 - DNA, 75 bp, synthetic construct
  source 1..75: mol_type = other DNA
ctggccagcgtcttaaagcgcaatttgcccagcaaggccgtatcgtcgatgctgataaccctctgtttgtctatc

SEQ ID NO: 629473 - DNA, 75 bp, synthetic construct
  source 1..75: mol_type = other DNA
atgatgtatcgcatcagaaattggttagtagcgacgttgctgctgctgtgcgcgcaggcgggggccgcgacgctc

SEQ ID NO: 629474 - DNA, 75 bp, synthetic construct
  source 1..75: mol_type = other DNA
acggtaacgcgtccggcagcgcgcgcgacggctaacactggcgataaaattatcatcgctattgatgccggacac

SEQ ID NO: 629475 - DNA, 75 bp, synthetic construct
  source 1..75: mol_type = other DNA
gctttacccggccatgcaggcatggccttgtgggttttcagttatgtggccgccgtgtcgtgtgcgggcggtgcc

SEQ ID NO: 629476 - DNA, 75 bp, synthetic construct
  source 1..75: mol_type = other DNA
tcatgctggaagtgccgtcaatggtatttatgctgccgcatctggcaaagcgggtcgatttcatctctgttggca

SEQ ID NO: 629477 - DNA, 75 bp, synthetic construct
  source 1..75: mol_type = other DNA
gccaatacagcattgctgtgggctcaaccggaaatctggggttatcaatcggcattatgagccccgcattggctt

SEQ ID NO: 629478 - DNA, 75 bp, synthetic construct
  source 1..75: mol_type = other DNA
ccaggttgagtgagctggatatgctgatagatgaccttgaaaagcagcttaacagtgtggcacggcagagcgaaa

SEQ ID NO: 629479 - DNA, 75 bp, synthetic construct
  source 1..75: mol_type = other DNA
atggaggcttgtgggggctctcagcactgggcacgtgagctgaaaaaactggggcacgaagttcggctgttgcag

SEQ ID NO: 629480 - DNA, 75 bp, synthetic construct
  source 1..75: mol_type = other DNA
aaatccgcctgctggggataagcaaacgtggtgatacatatctgcgaaccctgtttattcatggcgcaagggcgg

SEQ ID NO: 629481 - DNA, 75 bp, synthetic construct
  source 1..75: mol_type = other DNA
atgatgtatcgcatcagaaattggttggtagcgacgttgctgctgctgtgcgcgcaggctggcgccgctacgctc

SEQ ID NO: 629482 - DNA, 75 bp, synthetic construct
  source 1..75: mol_type = other DNA
gtctgcgcaattatttccttgcgcatccgatgcagtctgcgccacaaggtgcaacagcacaaaccgccagtacgg

SEQ ID NO: 629483 - DNA, 75 bp, synthetic construct
  source 1..75: mol_type = other DNA
tttagccatcaaagcaaacgcactgtggcgctggatattaaacaaaccggtgtaattcaggggctaccgttgttg

SEQ ID NO: 629484 - DNA, 75 bp, synthetic construct
  source 1..75: mol_type = other DNA
acactgtatgcgaaggggctggcctgtgaagccgacaccttcggctcctgtggttacgtttatctggctgtttat

SEQ ID NO: 629485 - DNA, 75 bp, synthetic construct
  source 1..75: mol_type = other DNA
atgacaaacgatatttacattaatggcaaagtgattgatagcttcggtgactggtcaccaacgactgaacatcca

SEQ ID NO: 629486 - DNA, 75 bp, synthetic construct
  source 1..75: mol_type = other DNA
gaaaggttgatagcttcggtgactggtcaccacagactgaacatccagctatcgctattcagcgcaaagagcacg

SEQ ID NO: 629487 - DNA, 75 bp, synthetic construct
  source 1..75: mol_type = other DNA
aatatgaagatgctaagaaggttgctatgcaggctgatattgagcagttagtgaagatttctagcaaatatgcaa

SEQ ID NO: 629488 - DNA, 75 bp, synthetic construct
  source 1..75: mol_type = other DNA
caaagaaacgccggaacagcgcttcgcgctggagcaggaacatctgcggccgttaccggatacggacttcgatac

SEQ ID NO: 629489 - DNA, 75 bp, synthetic construct
  source 1..75: mol_type = other DNA
ctgattgagctgcataccgataacctggataaattcttcaccccgcgcccgaaagtggactggcccgcccactcg

SEQ ID NO: 629490 - DNA, 75 bp, synthetic construct
  source 1..75: mol_type = other DNA
atctttgtgagtcctgaacctcaagagatgcctgatatttgcaagggtgaattattatttgagcttgagcgtgaa

SEQ ID NO: 629491 - DNA, 75 bp, synthetic construct
  source 1..75: mol_type = other DNA
tgggccatcggcctgccccgccctgtttccgtcaggattaacaccttcggtacacaaacagtgtcatctgaagcg

SEQ ID NO: 629492 - DNA, 75 bp, synthetic construct
  source 1..75: mol_type = other DNA
aaaaatttagttgataaagctcagtcgcaaactcaattcgattatttttttgaagcagcaggtccagggtgtaca

SEQ ID NO: 629493 - DNA, 75 bp, synthetic construct
  source 1..75: mol_type = other DNA
ggctgacctgatggtggtggcaggaacctgctttaccaagatggcaccggttattcagcgtctgtatgaccagat

SEQ ID NO: 629494 - DNA, 75 bp, synthetic construct
  source 1..75: mol_type = other DNA
atgaagatgctaagaagattgctatgcaggctgatattgagcagcttacgaagatttctcagaaatatgcaaagg

SEQ ID NO: 629495 - DNA, 75 bp, synthetic construct
  source 1..75: mol_type = other DNA
aaaacatcccagacgtgattaataatcttcctgatggatatcgaattgtgaagatggttaaagcttcaagaggtg

SEQ ID NO: 629496 - DNA, 75 bp, synthetic construct
  source 1..75: mol_type = other DNA
aaaacatcccagccgtgattaataatccgatggatggatatcgaattgtgaagatggttaaagcttcaagaggtg

SEQ ID NO: 629497 - DNA, 75 bp, synthetic construct
  source 1..75: mol_type = other DNA
atagcaacccggccgcatcttcatttcccgcaggtattcccatgtatgaaaatgtagcagggcttcccatgtatt

SEQ ID NO: 629498 - DNA, 75 bp, synthetic construct
  source 1..75: mol_type = other DNA
gaacctgtacaactttatttccggaaagacacagcctgtagcgaatccgcacatcgcgcgatggtctgacaatat

SEQ ID NO: 629499 - DNA, 75 bp, synthetic construct
  source 1..75: mol_type = other DNA
tgaccgaacgctacggagattttgttcgctataacccaccgttaacgggtcagacgctggtgttgtgggcgctgc

SEQ ID NO: 629500 - DNA, 75 bp, synthetic construct
  source 1..75: mol_type = other DNA
aaaattatgtcggtttccggggtcgtgcgcggcgcaaagagtactggatgtttactctgattaacgccatcgtcg

SEQ ID NO: 629501 - DNA, 75 bp, synthetic construct
  source 1..75: mol_type = other DNA
cagatgtacggcgaccggtcactctgggaaatcatggtagggcacctggaaggtatcagtaaagacattgcgctg

SEQ ID NO: 629502 - DNA, 75 bp, synthetic construct
  source 1..75: mol_type = other DNA
atcgaaggataagtgggtaagtgatgtgattggtaaactcgatcgcaaatattacacacgcgccgacggccagtt

SEQ ID NO: 629503 - DNA, 75 bp, synthetic construct
  source 1..75: mol_type = other DNA
gatgaacgatgccgagttgtctgcatttcttggagaggcttataacacgatcgctactggtgggctgaataagct

SEQ ID NO: 629504 - DNA, 75 bp, synthetic construct
  source 1..75: mol_type = other DNA
aatgacgttaggaggaagtgaattatatgaagttggtaaaaaattaaggagtaatggtagagggcagtacagaaa

SEQ ID NO: 629505 - DNA, 75 bp, synthetic construct
  source 1..75: mol_type = other DNA
gactagcgggcattaaagaaatgaaagtcaaaactattacgatgggcaaacttcatgatatgggttgtccgcctt

SEQ ID NO: 629506 - DNA, 75 bp, synthetic construct
  source 1..75: mol_type = other DNA
ccttgtaaaacgactaatcagtcaaatggtgggtattcgacaatttgcgccgttcctgaaaaagaagattacacc

SEQ ID NO: 629507 - DNA, 75 bp, synthetic construct
  source 1..75: mol_type = other DNA
cactaaaatctgaattccttcgcagctattgtctgcgcacttttggggttatttttcttgttgtagatatttata

SEQ ID NO: 629508 - DNA, 75 bp, synthetic construct
  source 1..75: mol_type = other DNA
tacttaagaaacatggaaaggcaaattatagcgataatagtgttatatataatgatattatttctttttgtaatg

SEQ ID NO: 629509 - DNA, 75 bp, synthetic construct
  source 1..75: mol_type = other DNA
aatgatgctaggaggaagtgaattatatgaaattggtaaaaaattaaggagtaatggcagagggcagtatagaaa

SEQ ID NO: 629510 - DNA, 75 bp, synthetic construct
  source 1..75: mol_type = other DNA
ccagagggagaatggcagtgggccattccggttgggacggaactcgctccggccgcattagtgtggctggcgcac

SEQ ID NO: 629511 - DNA, 75 bp, synthetic construct
  source 1..75: mol_type = other DNA
ttgtactgaaaatgatagacgtcatcgaaaaccagcggatcgaatgggacgcccaggaaaaggacattgcagcgt

SEQ ID NO: 629512 - DNA, 75 bp, synthetic construct
  source 1..75: mol_type = other DNA
cagaaataagcacgctgaaaggatggcggaaatagacgctcgcggacccggcaacacaccgcgcgcagccgccgc

SEQ ID NO: 629513 - DNA, 75 bp, synthetic construct
  source 1..75: mol_type = other DNA
tggaccggtgaaacatggaaaggcggcaataaaaagcgccgggcggcagtcttcccgacgtttgacgaaatgcgc

SEQ ID NO: 629514 - DNA, 75 bp, synthetic construct
  source 1..75: mol_type = other DNA
ctgacagcacaggcagaggcgcaggagcttaaaaacgagcgcgaacgcggcgacgttattgatacagagttttgt

SEQ ID NO: 629515 - DNA, 75 bp, synthetic construct
  source 1..75: mol_type = other DNA
tgacgtgattgatactgagttttgcctgtacgcgctttcaaagctggcgagtcagatttcatcaatcatggacag

SEQ ID NO: 629516 - DNA, 75 bp, synthetic construct
  source 1..75: mol_type = other DNA
gttgcaggtgctatatgaaagttttaatgatgataagtatcgccccagctttttattaaagaaaatggtcgatgc

SEQ ID NO: 629517 - DNA, 75 bp, synthetic construct
  source 1..75: mol_type = other DNA
ggaagataacccgctggtgaatgcgccgcacattcaaagcgaactggtcgccgagtgggcgcgtccgtacagccg

SEQ ID NO: 629518 - DNA, 75 bp, synthetic construct
  source 1..75: mol_type = other DNA
aggtgaaagccggagtctggccgctggaagataacccgttggtaaacgcgccgcacattcagaacgaactggttg

SEQ ID NO: 629519 - DNA, 75 bp, synthetic construct
  source 1..75: mol_type = other DNA
tgcagcttttcagcgtactgctgggcgataatcacggactggacatcgacacgctggacaaagacgtggctcacg

SEQ ID NO: 629520 - DNA, 75 bp, synthetic construct
  source 1..75: mol_type = other DNA
agtatttctggataccgaaattccgcaaactcaatgacgtggcaagtgcgatggccacgcacgacaaatggcggt

SEQ ID NO: 629521 - DNA, 75 bp, synthetic construct
  source 1..75: mol_type = other DNA
ggcgcagcgggcaaaacgagaagaaaagctgcagcagctgcagaacggcaatgtgaccacaaatagcggtgtcac

SEQ ID NO: 629522 - DNA, 75 bp, synthetic construct
  source 1..75: mol_type = other DNA
gtactgacgcgtgccgaagcggctgaaatcaacctgcgtagcgatattctgaacgcggttgggatcacccttgat

SEQ ID NO: 629523 - DNA, 75 bp, synthetic construct
  source 1..75: mol_type = other DNA
aaaacatggcgcaaagctgccgtgtaagtgcgacagcgttcgacaagtggggagtgactcccgttgaacgtaaag

SEQ ID NO: 629524 - DNA, 75 bp, synthetic construct
  source 1..75: mol_type = other DNA
aagagctagtttcacatgcgaaagtaaatgttccggcagaacaaagcattcgcggtgaactgttgccgtcatcga

SEQ ID NO: 629525 - DNA, 75 bp, synthetic construct
  source 1..75: mol_type = other DNA
actcgcagtcattgctggatctcgctgctctgcgcgccaagattggtgatattgacgatcattacaagaacttcg

SEQ ID NO: 629526 - DNA, 75 bp, synthetic construct
  source 1..75: mol_type = other DNA
cggaagcgcaggaacttaaaaacgagcgcgaacgcggcgaggtgattgatacaaagttttgcatctacgcgattt

SEQ ID NO: 629527 - DNA, 75 bp, synthetic construct
  source 1..75: mol_type = other DNA
cccctcgccagctctttttatctttgaacggcttagatgaagtgaatctgccggtggccttcaacgacgtggatt

SEQ ID NO: 629528 - DNA, 75 bp, synthetic construct
  source 1..75: mol_type = other DNA
atcccgtgcgggctggtttttgatccagggcaccctgcgtgcccgtcagccgcggggtgaaacccgcctgcgctg

SEQ ID NO: 629529 - DNA, 75 bp, synthetic construct
  source 1..75: mol_type = other DNA
gagcagtagaaaaaagaagaacagtagcagtagcagtagcagtagcagtagcagtagcaggaacaacaacatcat

SEQ ID NO: 629530 - DNA, 75 bp, synthetic construct
  source 1..75: mol_type = other DNA
gataactggtgctgttggaatattagttgtctacttctatgattcttataaatctggctatatagtatcgttctt

SEQ ID NO: 629531 - DNA, 75 bp, synthetic construct
  source 1..75: mol_type = other DNA
cgacgtgattgatacaggtttttgcctgtacgcgctttcaaagctggcgagccagatttcatcaatcatggacag

SEQ ID NO: 629532 - DNA, 75 bp, synthetic construct
  source 1..75: mol_type = other DNA
aatgcaattgaccaggttacaaacgacaaaggcgatatcgacgatgatgaacttttacgcgtaagaatccgatta

SEQ ID NO: 629533 - DNA, 75 bp, synthetic construct
  source 1..75: mol_type = other DNA
aatgcaattaaccaggttacaaacgacaaaggcgagattgatgatgatgaactcttacgagtcaggatcagatta

SEQ ID NO: 629534 - DNA, 75 bp, synthetic construct
  source 1..75: mol_type = other DNA
gcttcaacagttacaggcagcgaaacagcagtatgatcagcttgtcgaacagtataagcaagctaaaagcttgca

SEQ ID NO: 629535 - DNA, 75 bp, synthetic construct
  source 1..75: mol_type = other DNA
gtggaggtgaaaatgaagcacgagatagtattattaaacaagcaaaagagagtattggattgataacaggaagtt

SEQ ID NO: 629536 - DNA, 75 bp, synthetic construct
  source 1..75: mol_type = other DNA
tttgtgatcaatgagccgggtgattacaacatcaaggtcactgtccgtgatgctcgcggccatgagaccgtgatc

SEQ ID NO: 629537 - DNA, 75 bp, synthetic construct
  source 1..75: mol_type = other DNA
cctgaacagaaactgatacctttatcagagttatttgatgttaattatggactgaatcttgagctcaataaactg

SEQ ID NO: 629538 - DNA, 75 bp, synthetic construct
  source 1..75: mol_type = other DNA
tcctaaaaaggatatgggattgtttgaaaaaatatattactctcgttgtataactatgaacagatatttattttc

SEQ ID NO: 629539 - DNA, 75 bp, synthetic construct
  source 1..75: mol_type = other DNA
aaaaacaaacagcattcaacctcagcctaagggcgcactgcgcctgacaggctctgtgtgcccaagttactttaa

SEQ ID NO: 629540 - DNA, 75 bp, synthetic construct
  source 1..75: mol_type = other DNA
cgaccacgttgtttgtcggaagtgaaggcaagtacacagcgaacctgacgttgaacgatgagccaatctccggtg

SEQ ID NO: 629541 - DNA, 75 bp, synthetic construct
  source 1..75: mol_type = other DNA
ggtagatggtacgccgttggaaagcagcggttactacggcagagcaactctgggcgctggtgagcacagcatcaa

SEQ ID NO: 629542 - DNA, 75 bp, synthetic construct
  source 1..75: mol_type = other DNA
atcgccgtctttgcaatgagcaacaagtcgatggtggggcagcaccggctgcgtcagaaccgtcagcgcatgcag

SEQ ID NO: 629543 - DNA, 75 bp, synthetic construct
  source 1..75: mol_type = other DNA
caggggactgactctgagaaaggttctgaagctcagaaaactgagggagagcttgctgctgaaaaagccaatacc

SEQ ID NO: 629544 - DNA, 75 bp, synthetic construct
  source 1..75: mol_type = other DNA
atgaatttatttgagcgtttgctgtatcgccgtctttgcaatgagcagccagccgatggcggggcagctccggct

SEQ ID NO: 629545 - DNA, 75 bp, synthetic construct
  source 1..75: mol_type = other DNA
tcggaggcgagatggtttgaggagaacaaagagtatgaaaaatccatcaataaatggcgcgatgtgttcgggccg

SEQ ID NO: 629546 - DNA, 75 bp, synthetic construct
  source 1..75: mol_type = other DNA
cccccttccattccgtttattatcttcggcgtttccagcggattatccatcagtaagctgtttatggcgggcatt

SEQ ID NO: 629547 - DNA, 75 bp, synthetic construct
  source 1..75: mol_type = other DNA
atcgccgtctttgcaatgagcaatccactgaaggtggccaggcagatacagcttcaacgggagcaactgaaacca

SEQ ID NO: 629548 - DNA, 75 bp, synthetic construct
  source 1..75: mol_type = other DNA
taagctgtaccgccaagatggttcactctacaaagatgtatcagtgaactacgatgatgccaacaaacaagccag

SEQ ID NO: 629549 - DNA, 75 bp, synthetic construct
  source 1..75: mol_type = other DNA
cgcgtcacgaaatgtcacgacatgtcacggcgtgtcactacgtggtcacattgatgtcacgacggaagatttagc

SEQ ID NO: 629550 - DNA, 75 bp, synthetic construct
  source 1..75: mol_type = other DNA
aacttgccgccttccgggactactgggcagcggaggggaaagttttcacgcaggttcagtgggagcagaaattcg

SEQ ID NO: 629551 - DNA, 75 bp, synthetic construct
  source 1..75: mol_type = other DNA
atcgggaaatttccgatgactgatggctggcatccgtcgctggattttcgacggcgggcagctctgtggggagtg

SEQ ID NO: 629552 - DNA, 75 bp, synthetic construct
  source 1..75: mol_type = other DNA
aggcctgagcgaacccatcgggaaatttccgatgactgatggctggcatccgtcgccggattttcgacggcgggc

SEQ ID NO: 629553 - DNA, 75 bp, synthetic construct
  source 1..75: mol_type = other DNA
cgtcgccggattttcgacggcgggctgcactgtggggagtggctctgccggagcctgaatttacacctgctgaac

SEQ ID NO: 629554 - DNA, 75 bp, synthetic construct
  source 1..75: mol_type = other DNA
gggacggcaatgggcgacagtatcggccttgtaattgccaacgttgacagcgccttgctggatgccatgcatctg

SEQ ID NO: 629555 - DNA, 75 bp, synthetic construct
  source 1..75: mol_type = other DNA
gggctatttgagataacgcctgaatatgacctaaatattatgaaaactggtcagactctcaacgatattacctcc

SEQ ID NO: 629556 - DNA, 75 bp, synthetic construct
  source 1..75: mol_type = other DNA
tgcaaaaaaaaataaaaatgttcaaataatttatccaatgcacttaaatcctaatgttcgtaaacctgtcacgga

SEQ ID NO: 629557 - DNA, 75 bp, synthetic construct
  source 1..75: mol_type = other DNA
tggacattaatacctggaaaggggcggctaaactctctgctgagtcgtggacaattcgccaggttatcgacccgg

SEQ ID NO: 629558 - DNA, 75 bp, synthetic construct
  source 1..75: mol_type = other DNA
tgcagttcgtttatttaatggacaaagcatatattattgtgactgattctggtggtattcaagaagaagctccgt

SEQ ID NO: 629559 - DNA, 75 bp, synthetic construct
  source 1..75: mol_type = other DNA
tgcattgaaattcaaagattataattttgtatatccggtacatcttaatccgtcagtacggaaaccggtaaaaga

SEQ ID NO: 629560 - DNA, 75 bp, synthetic construct
  source 1..75: mol_type = other DNA
gtaatcgatgctctgctgatggttaaagagaagattgaaaaaaataataaacttaaagagcagctcgcaactcaa

SEQ ID NO: 629561 - DNA, 75 bp, synthetic construct
  source 1..75: mol_type = other DNA
aaggcggtgttggtaaaagtacacttgcggtatcaatagccgcatatctgatgtcattaggcaatcgcgtgatta

SEQ ID NO: 629562 - DNA, 75 bp, synthetic construct
  source 1..75: mol_type = other DNA
gaaaccatttatggtttgccggggattgggcaattgttcgttaatggcgcattgaaccgtgactattccttagtg

SEQ ID NO: 629563 - DNA, 75 bp, synthetic construct
  source 1..75: mol_type = other DNA
cccgggcgaaagggttacctatgcggcggatcattttacgccacgcattaaaacctgctctgttacccgtgctct

SEQ ID NO: 629564 - DNA, 75 bp, synthetic construct
  source 1..75: mol_type = other DNA
ctgaaacaactggcgcatggcgatttcggtccatcgtttaaatataaagattattcggtcaacgacctggttgca

SEQ ID NO: 629565 - DNA, 75 bp, synthetic construct
  source 1..75: mol_type = other DNA
ctatgacagttatcagaatgcctttatcgacctgaaaaatggtcgtattgatggggtatttggtgacacagcggt

SEQ ID NO: 629566 - DNA, 75 bp, synthetic construct
  source 1..75: mol_type = other DNA
catatatgggacccgcatttgtcggcattattaccggttctatggtcatcgaaaccatttatggtttacctggga

SEQ ID NO: 629567 - DNA, 75 bp, synthetic construct
  source 1..75: mol_type = other DNA
tggcaatgaccggggtggttatccccagttttgtggttgcgccattattagtcatgatattcgcgatcattttgc

SEQ ID NO: 629568 - DNA, 75 bp, synthetic construct
  source 1..75: mol_type = other DNA
gatgagtgattctgagcttactgcctttcttggcgaagcatataacaccatcgccactggtgggctgaataagct

SEQ ID NO: 629569 - DNA, 75 bp, synthetic construct
  source 1..75: mol_type = other DNA
tggcatctgaagaattacagcgagaagcggcattaaagaaacgtcgtgtggctctcactatagccgcacgtcaga

SEQ ID NO: 629570 - DNA, 75 bp, synthetic construct
  source 1..75: mol_type = other DNA
cgtatcctgaaaagcaaagggattactgacacagactggagcgtatggaagctggcgcaacaggaggactggggg

SEQ ID NO: 629571 - DNA, 75 bp, synthetic construct
  source 1..75: mol_type = other DNA
accatcccattgtcgctccgcttatcagtggtggaagattgttggaatattctgcccatatggtaccagaaggcg

SEQ ID NO: 629572 - DNA, 75 bp, synthetic construct
  source 1..75: mol_type = other DNA
tgggcatatgggcggagggtttctttataccaataaaaccagcgtttcattaggcctggttatggggctgcacaa

SEQ ID NO: 629573 - DNA, 75 bp, synthetic construct
  source 1..75: mol_type = other DNA
gagcggctgtatcgtgcagcacaattggcatctgaagaattacagcgagaagcggcattaaagaaacgtcgtgtg

SEQ ID NO: 629574 - DNA, 75 bp, synthetic construct
  source 1..75: mol_type = other DNA
aactgaataacgcgctggcagcaattaaagctgacggtacgtatcagaaaatcaatgaccagtggttcccgcagt

SEQ ID NO: 629575 - DNA, 75 bp, synthetic construct
  source 1..75: mol_type = other DNA
gtttacgcaattagataccatgatgagcaaactgaataacaccagtacctatctcagccaacaatttactgcaat

SEQ ID NO: 629576 - DNA, 75 bp, synthetic construct
  source 1..75: mol_type = other DNA
cggtatctataccatcagcgtaacccaactggcgcaggcgcaatctttacgaactgattccccgacaatcattgc

SEQ ID NO: 629577 - DNA, 75 bp, synthetic construct
  source 1..75: mol_type = other DNA
aacattaaacgagatcgggattaagcaggacggcacgacgggtaagctgaaaattgatgatgataaactcaaaaa

SEQ ID NO: 629578 - DNA, 75 bp, synthetic construct
  source 1..75: mol_type = other DNA
gcgtagtgggttgatggccgctgacgtattcatttctccgttgcggccttctcagatggacctggatgtagtgcc

SEQ ID NO: 629579 - DNA, 75 bp, synthetic construct
  source 1..75: mol_type = other DNA
ggggatatctcgttttaaacatgacgcccacaaatatgtttgttaatgaagccaatgaggcagctgaagtactta

SEQ ID NO: 629580 - DNA, 75 bp, synthetic construct
  source 1..75: mol_type = other DNA
gcgcaaaatgcacagctaaacgttaacggtatcgatattgaacgttcaagtaacaaaattaccgatgctcctcag

SEQ ID NO: 629581 - DNA, 75 bp, synthetic construct
  source 1..75: mol_type = other DNA
gttcaaaccagctgaaggtcaggaacttgatgctgccgctctggagcagttcgagcctatcgcccgcgaactgaa

SEQ ID NO: 629582 - DNA, 75 bp, synthetic construct
  source 1..75: mol_type = other DNA
attgtcggctgttctcgtgaaaccgtgggacgcattctgaagatgctggaagatcagaacctgatctctgcacac

SEQ ID NO: 629583 - DNA, 75 bp, synthetic construct
  source 1..75: mol_type = other DNA
tacttgcttcttttactttcggtgcttctgccgcagagaaaatcaattttggcgtttcagccacctatcccccct

SEQ ID NO: 629584 - DNA, 75 bp, synthetic construct
  source 1..75: mol_type = other DNA
cgacctggattgccggaggctttgccgggacagtcgaactgctggcgcagagccttaaaccgggcgggatcatgc

SEQ ID NO: 629585 - DNA, 75 bp, synthetic construct
  source 1..75: mol_type = other DNA
actatgcagtactcggtgaatataccgcattttcagacaaggcccgggatgcagcccgtcgccgacatgctgaaa

SEQ ID NO: 629586 - DNA, 75 bp, synthetic construct
  source 1..75: mol_type = other DNA
tcatgccaatggtccagcagcaacaggttgaagcatggcagaaaaccaccgagcagtgggctgctgatgttaaag

SEQ ID NO: 629587 - DNA, 75 bp, synthetic construct
  source 1..75: mol_type = other DNA
gtgacaccctgtttcggcgcccgtctggtgcaggagggtaaccggttgcattaccttgccgaccgcgccggtatc

SEQ ID NO: 629588 - DNA, 75 bp, synthetic construct
  source 1..75: mol_type = other DNA
gtatgcgaagggggtgacctgtgaagccgacaccctcggctcctgtggttacgtttatctggctgtttatccgac

SEQ ID NO: 629589 - DNA, 75 bp, synthetic construct
  source 1..75: mol_type = other DNA
tgcgaagccgacaccctcggcagctgtggttacgtttatctggctgtttatccgacgccagaaacgaaaaagtaa

SEQ ID NO: 629590 - DNA, 75 bp, synthetic construct
  source 1..75: mol_type = other DNA
gtgtcagacacactccccgggacaacgcatcccgacgataacaacgaccacccctggtgggggctaccctgcacc

SEQ ID NO: 629591 - DNA, 75 bp, synthetic construct
  source 1..75: mol_type = other DNA
cataccacctggaccaggcctttccgctgctgatgaaacaactgaaattaatgctcactagcggtgaactgaatc

SEQ ID NO: 629592 - DNA, 75 bp, synthetic construct
  source 1..75: mol_type = other DNA
gtgtcagacacactctccgggacaacgcatcccgatgacaatcatgaccgtccctggtggggactaccctgcacc

SEQ ID NO: 629593 - DNA, 75 bp, synthetic construct
  source 1..75: mol_type = other DNA
tccggcagagttatttaccaagtttcaggtgagtttttactcagacccggttgatgctgtttataaggcgctggg

SEQ ID NO: 629594 - DNA, 75 bp, synthetic construct
  source 1..75: mol_type = other DNA
catgtgtataaagagtgttctcctaactccctgttagtttctggcgggcaaacgaccgttgccaacctgttctac

SEQ ID NO: 629595 - DNA, 75 bp, synthetic construct
  source 1..75: mol_type = other DNA
ccgatccagatgccaaatatggatatggacgaggtatttgaagcccgcaagcagtttgatcgcgaccagtggatt

SEQ ID NO: 629596 - DNA, 75 bp, synthetic construct
  source 1..75: mol_type = other DNA
gacctgcgaagccgacaccctcggctcctgtggttacgtttatctggctgtttatccgacgcccgaaacgaaaaa

SEQ ID NO: 629597 - DNA, 75 bp, synthetic construct
  source 1..75: mol_type = other DNA
tccctggtggggactacccagcaccgtgacgccctgtttcggggcccgtctggtgcaggagggtaaccggttgca

SEQ ID NO: 629598 - DNA, 75 bp, synthetic construct
  source 1..75: mol_type = other DNA
gtaacatggaaacggcctctgtgttggctcaggacctggattcattgttgaatcagcactttcgcggtcgcgtgg

SEQ ID NO: 629599 - DNA, 75 bp, synthetic construct
  source 1..75: mol_type = other DNA
taccgtgacactgtatgcgaaggggctgacctgtgaagccgacaccctcggctcctgtggttacgtttatctggc

SEQ ID NO: 629600 - DNA, 75 bp, synthetic construct
  source 1..75: mol_type = other DNA
gtgagatccgcagactggaaggtgaggaaagcgaccttgcgcgcaaggcgtataatcgtcgctttccggttgcca

SEQ ID NO: 629601 - DNA, 75 bp, synthetic construct
  source 1..75: mol_type = other DNA
agaaggcgacttcgcgcgtcaggcgtataatcgtcgctttccggttgccagaatgctgtcagctccagtttggga

SEQ ID NO: 629602 - DNA, 75 bp, synthetic construct
  source 1..75: mol_type = other DNA
atgctcaccagcggtgaactgaatccccgccatcagcataccgtcacactgtatgcgaaaggactgacctgcgaa

SEQ ID NO: 629603 - DNA, 75 bp, synthetic construct
  source 1..75: mol_type = other DNA
gggactggtatgcgaggccgactcactcgggtcgtgcggctacatttatgtggcgatttaccccggagactcccc

SEQ ID NO: 629604 - DNA, 75 bp, synthetic construct
  source 1..75: mol_type = other DNA
tcagcataccgtcacactgtatgcgaaagggctgacctgcgaagccgacaccctcggctcctgtggttacgttta

SEQ ID NO: 629605 - DNA, 75 bp, synthetic construct
  source 1..75: mol_type = other DNA
gaactctggtgcgccaatgccttttatctttttgatgcgcagaaagtcgccttctacattttgacggaagaaaaa

SEQ ID NO: 629606 - DNA, 75 bp, synthetic construct
  source 1..75: mol_type = other DNA
aggtctgacctgcaaagctgacaccctcggtagcggtggttacgtttatctggctgtttatccgacgcccgaaac

SEQ ID NO: 629607 - DNA, 75 bp, synthetic construct
  source 1..75: mol_type = other DNA
gtgtcagacacactctccgggacaacgcatcctgacgacaatcacgaccgcccctggtggggactcccctgcaca

SEQ ID NO: 629608 - DNA, 75 bp, synthetic construct
  source 1..75: mol_type = other DNA
cgcatcccgacaacaacaacgaccgcccctggtgggggctcccctgcaccgtgacgccctgtttcggggcacgtc

SEQ ID NO: 629609 - DNA, 75 bp, synthetic construct
  source 1..75: mol_type = other DNA
actcatgctcaccagcggtgaactgaatccccgccatcagcataccgttaccctgtatgcgaaaggactgacctg

SEQ ID NO: 629610 - DNA, 75 bp, synthetic construct
  source 1..75: mol_type = other DNA
actcatgctcaccagcggtgaactgaatccccgccatcagcataccgttacactgtatgcgaacggactgacctg

SEQ ID NO: 629611 - DNA, 75 bp, synthetic construct
  source 1..75: mol_type = other DNA
ggaccaggcttttccactgctgatgaaacaactggaactcatgctgaccagcggtgaactgaatccccgccatca

SEQ ID NO: 629612 - DNA, 75 bp, synthetic construct
  source 1..75: mol_type = other DNA
gtgacgccctgttttggcgcccgtctggtgcaggagggcaatcagttgcattaccttgcagaccgtgccggtatc

SEQ ID NO: 629613 - DNA, 75 bp, synthetic construct
  source 1..75: mol_type = other DNA
catttcgcgttaatcagccgcaggatcttggcattgcattggcacgcgctatccgggtctcagtatcgggtcgtc

SEQ ID NO: 629614 - DNA, 75 bp, synthetic construct
  source 1..75: mol_type = other DNA
attatcccgacgacaacaacgaccgcccctggtgggggctaccctgcaccgtgacgccctgttttggtgcccgtc

SEQ ID NO: 629615 - DNA, 75 bp, synthetic construct
  source 1..75: mol_type = other DNA
agcccgtctggtgcaggaaggcaaccgactgcattatctggctgaccgggccagcatcaccggcaagttcagtga

SEQ ID NO: 629616 - DNA, 75 bp, synthetic construct
  source 1..75: mol_type = other DNA
actgttcgatgaaatctggaaagagggtatgaagccggaagagtggcttgatacctatctggaacgtgcaaacct

SEQ ID NO: 629617 - DNA, 75 bp, synthetic construct
  source 1..75: mol_type = other DNA
tgcgaagccgacaccctcggcagctgtggttacgtttatatggctgtttatccgacgcccgaaacgaaaaagtaa

SEQ ID NO: 629618 - DNA, 75 bp, synthetic construct
  source 1..75: mol_type = other DNA
atgctcaccagcggagaactgaatccccgtcatcagcataccgtcacgctgtatgccagagggctgacctgcgaa

SEQ ID NO: 629619 - DNA, 75 bp, synthetic construct
  source 1..75: mol_type = other DNA
tgatgctcatgccaaatttgttgcacggcgagcggtgatgctggctgaaaaagagcgactgcatttcgggcgtgt

SEQ ID NO: 629620 - DNA, 75 bp, synthetic construct
  source 1..75: mol_type = other DNA
ccttggcaaaggcgcggcgtattcacaatctgatgaacagcttcgtgaatttattgaaagtgcccagattccatt

SEQ ID NO: 629621 - DNA, 75 bp, synthetic construct
  source 1..75: mol_type = other DNA
gtatcagaggccggttcagcgatgcggatgcataccatctggaccaggcttttccactgctgatgaaacaactgg

SEQ ID NO: 629622 - DNA, 75 bp, synthetic construct
  source 1..75: mol_type = other DNA
ttgcggaggtgagagtacccgtcagtgaagaagatgcggtcgatgactggcgttatcacccctggttaggtgtgt

SEQ ID NO: 629623 - DNA, 75 bp, synthetic construct
  source 1..75: mol_type = other DNA
atgctgggaacgcgggtattactttcttccgcgacgttaccgccaggtttgattcaggcgctgttcgcggcttat

SEQ ID NO: 629624 - DNA, 75 bp, synthetic construct
  source 1..75: mol_type = other DNA
aaagcctgggatgtggcgcgagcgttacgtgaacgaagtcgtgaagagggatttttcggcgtcaatatggcctcg

SEQ ID NO: 629625 - DNA, 75 bp, synthetic construct
  source 1..75: mol_type = other DNA
tattcttattactatttcgttctttatgatgcgcctcgcgccgggaagcccttttaccggcgaacgtactttacc

SEQ ID NO: 629626 - DNA, 75 bp, synthetic construct
  source 1..75: mol_type = other DNA
atgaagacggttatttccgtgctgaccgcgcatttttttgtcctgagcgccttcatctggctggcatcccccgcc

SEQ ID NO: 629627 - DNA, 75 bp, synthetic construct
  source 1..75: mol_type = other DNA
accggcggacaacggctcctgtgaaagcctgatgaaaaatacggcctgtactctgtcatcccgccagtgcgcctt

SEQ ID NO: 629628 - DNA, 75 bp, synthetic construct
  source 1..75: mol_type = other DNA
atctgcaggtggaaaatttttgtacacgggaagcgaccctgaaggataacgccaccacgcagaaagttaaccgaa

SEQ ID NO: 629629 - DNA, 75 bp, synthetic construct
  source 1..75: mol_type = other DNA
gccgacaccctgggctcctgtggttacgtttatctggctgtttatcctgcgaccgaaacggaaaatgtagtggtc

SEQ ID NO: 629630 - DNA, 75 bp, synthetic construct
  source 1..75: mol_type = other DNA
gttatctcaggcgcagacgctacaggatattcagcagcatatcgagactttaggtgtgtcacttagcatggctat

SEQ ID NO: 629631 - DNA, 75 bp, synthetic construct
  source 1..75: mol_type = other DNA
gcagacgctacaggatattcagcaacatatcgagactttaggtgtgtcacttagcatggctattgaccagttcgt

SEQ ID NO: 629632 - DNA, 75 bp, synthetic construct
  source 1..75: mol_type = other DNA
ctcgcgctggtgtcgtgcacttggttactcagggaagcactgggcagcttgggttatatcgctatgaaacccaga

SEQ ID NO: 629633 - DNA, 75 bp, synthetic construct
  source 1..75: mol_type = other DNA
cattattaccggttcgatggtcatcgaaaccatttatggtttaccggggattgggcaattgttcgttaatggcgc

SEQ ID NO: 629634 - DNA, 75 bp, synthetic construct
  source 1..75: mol_type = other DNA
ggtccatcgtttaaatataaagattattcggtcaatgacttggttgcatccagttttcccgtttctgccaaactg

SEQ ID NO: 629635 - DNA, 75 bp, synthetic construct
  source 1..75: mol_type = other DNA
tatgaggaaaccacggttatcaaaacgtataccgtgccgaataaccagttcagctacagctatgacggtaacaaa

SEQ ID NO: 629636 - DNA, 75 bp, synthetic construct
  source 1..75: mol_type = other DNA
caagaacaagaaaacctcttatataattattaggtatcaagataaaatatacgccgcccacaggataatatggga

SEQ ID NO: 629637 - DNA, 75 bp, synthetic construct
  source 1..75: mol_type = other DNA
gttgttctcaaaattccagatcagcttttatgcagaccccgtcgatgccgtgtttaaggcgcttggggttaattg

SEQ ID NO: 629638 - DNA, 75 bp, synthetic construct
  source 1..75: mol_type = other DNA
tctttaaattcgatgacctcgtgcgctgtggcgttgatgtcagtacgtgggaggattttcacccggaagaaccca

SEQ ID NO: 629639 - DNA, 75 bp, synthetic construct
  source 1..75: mol_type = other DNA
cagtcaaacagcggccacctgtatattgatgaatacctgtggatccccggttttcgccgtctcaatgaagtggcg

SEQ ID NO: 629640 - DNA, 75 bp, synthetic construct
  source 1..75: mol_type = other DNA
aacaacgtataaaagtattaagagattatggtgagacttgcgatcgattagtacgagaaaaagaacggcaatata

SEQ ID NO: 629641 - DNA, 75 bp, synthetic construct
  source 1..75: mol_type = other DNA
atgcgccgccataatgggcgcatggctaaatattctgacgaaattaaagaggcggcccgctcgctttatctgaag

SEQ ID NO: 629642 - DNA, 75 bp, synthetic construct
  source 1..75: mol_type = other DNA
atgcgccgccataatgggcgcatggctaaatattctgacgaaatcaaagaggcggcgcgatcgctttacctgaag

SEQ ID NO: 629643 - DNA, 75 bp, synthetic construct
  source 1..75: mol_type = other DNA
tccggtatggccacccactcgcactggcgcattacctacttctccacgccgtcaaccaaaacccatcagggctat

SEQ ID NO: 629644 - DNA, 75 bp, synthetic construct
  source 1..75: mol_type = other DNA
tggatgcgcagcagaaacgcctacagagcgttacagagccttttaaggggctttccagagagcagatgaccgaaa

SEQ ID NO: 629645 - DNA, 75 bp, synthetic construct
  source 1..75: mol_type = other DNA
atggtaccaccttctgctgtactctgttatcataatgagataagcaggcagataccggtaaatatgaaaaatatc

SEQ ID NO: 629646 - DNA, 75 bp, synthetic construct
  source 1..75: mol_type = other DNA
gaaaaatacggaatggcaaaacgcaacgtcgaacgcctgggcgcacggttggcgaaacgcggtttaatatccacg

SEQ ID NO: 629647 - DNA, 75 bp, synthetic construct
  source 1..75: mol_type = other DNA
ccaccacgtaaatctatcggaaagaaatcttgcggatggttgttaagtgaccttctctgctggatacagaccaga

SEQ ID NO: 629648 - DNA, 75 bp, synthetic construct
  source 1..75: mol_type = other DNA
atggcgaactacgcgataatgcgctgtaaaaagctgacgggaatgggcagtgtggccagcgcgttacagcactgc

SEQ ID NO: 629649 - DNA, 75 bp, synthetic construct
  source 1..75: mol_type = other DNA
ggaacgaggccacaccgcggcagcaggcggagtttttcgcccgttctgagcaatggctggagaacaaatacggga

SEQ ID NO: 629650 - DNA, 75 bp, synthetic construct
  source 1..75: mol_type = other DNA
ggtttaccactggtgtgatgtggggcagtgggccgccctgctgcccgctgaatccgttgaggacgtgatcgcccg

SEQ ID NO: 629651 - DNA, 75 bp, synthetic construct
  source 1..75: mol_type = other DNA
ggtcaggtttaccttgatggcgcgaacatgaacgcccaggttggcatcacctcgccgggctttattggcgcggac

SEQ ID NO: 629652 - DNA, 75 bp, synthetic construct
  source 1..75: mol_type = other DNA
tggttcggcgcaacgctttggcgtaccgatgggctacggtggcccacacgcggcattctttgcggcgaaagacga

SEQ ID NO: 629653 - DNA, 75 bp, synthetic construct
  source 1..75: mol_type = other DNA
gtagttaatattgaggatgcgatcgcgcggcgtatcgccctcttaactgaccgcgaaaaaaaaacacctggcgaa

SEQ ID NO: 629654 - DNA, 75 bp, synthetic construct
  source 1..75: mol_type = other DNA
actggatcgctttatcgacgcgatgctggctattcgctcagaaattgaccaggtaaaagccggtgtctggccgct

SEQ ID NO: 629655 - DNA, 75 bp, synthetic construct
  source 1..75: mol_type = other DNA
ctttctgcattccgcacggcggtggtggtccgggtatgggaccgatcggtgtgaaagcgcatctggcaccgtttg

SEQ ID NO: 629656 - DNA, 75 bp, synthetic construct
  source 1..75: mol_type = other DNA
acagcaggttggcactaccggtgaaatccacgattacacaacgcttatcagcgaactgaaatcacgcaaaattgt

SEQ ID NO: 629657 - DNA, 75 bp, synthetic construct
  source 1..75: mol_type = other DNA
gacctgaaagaaatggacatgctgattgcccacgccacaaagctgcgtgctcaaagcaataagcataaagaaaag

SEQ ID NO: 629658 - DNA, 75 bp, synthetic construct
  source 1..75: mol_type = other DNA
cgccctgcataacgaaccactcaactacgaaaataaaccgaaatcccgctggggtgtaaggaaagaggctgcatg

SEQ ID NO: 629659 - DNA, 75 bp, synthetic construct
  source 1..75: mol_type = other DNA
cttcaacctggccaacatcgagaagctgcgcaaccgctacaacaccgccaccttcaacatgctctatatgtgcgt

SEQ ID NO: 629660 - DNA, 75 bp, synthetic construct
  source 1..75: mol_type = other DNA
agatggccgtgtggaatgggataaggaaaaaaccgaaattgccgccagttttatgactatccgccgcacgtccac

SEQ ID NO: 629661 - DNA, 75 bp, synthetic construct
  source 1..75: mol_type = other DNA
ttcgctatctcgcacgccgtaattaacgaacctatcgatcacgaatatgaccgcccatcgggctggtactttggg

SEQ ID NO: 629662 - DNA, 75 bp, synthetic construct
  source 1..75: mol_type = other DNA
atccgcttaagcaacggcgcagaactgcgttttctctccaccaacaaaaacaccgcccagtcctacagtggccac

SEQ ID NO: 629663 - DNA, 75 bp, synthetic construct
  source 1..75: mol_type = other DNA
gacatctgcaccatcaatcagttgttgaaacatcacttggaatagttgagcaccacggcacattagctggcaaag

SEQ ID NO: 629664 - DNA, 75 bp, synthetic construct
  source 1..75: mol_type = other DNA
tttttggtacaacagaaaacaccagtaatgaattttactctgacgatgagttggtcaatgccatggagaaaaata

SEQ ID NO: 629665 - DNA, 75 bp, synthetic construct
  source 1..75: mol_type = other DNA
acagcacagtatgagtgctaatggcgttattaacgggctcggtggtagagttcaaaaagagcttggcagatttga

SEQ ID NO: 629666 - DNA, 75 bp, synthetic construct
  source 1..75: mol_type = other DNA
ccgcactcataccgggtaacgaactgtgtattgtgatgattttttattacagggggatgatcgtgatcaataaga

SEQ ID NO: 629667 - DNA, 75 bp, synthetic construct
  source 1..75: mol_type = other DNA
cagggcaatggcttctgaagtggatagtcgtgatgactcatcgctgatagcgtcatatataaacatcatcaagaa

SEQ ID NO: 629668 - DNA, 75 bp, synthetic construct
  source 1..75: mol_type = other DNA
gccctctgattaacataattcgcggaacccaaacgctggcacaaaaacaggtgcctaagggagtattaacaggaa

SEQ ID NO: 629669 - DNA, 75 bp, synthetic construct
  source 1..75: mol_type = other DNA
atcaagttaccgcgcaaggaatccggcaaatacatcctccaccaaagcatcttcgattccgaacacgataaaaaa

SEQ ID NO: 629670 - DNA, 75 bp, synthetic construct
  source 1..75: mol_type = other DNA
catcagcataccgtcacgctgtatgcaaaagggctgacctgcaaagccgataccctcagcagttgtggttacgtt

SEQ ID NO: 629671 - DNA, 75 bp, synthetic construct
  source 1..75: mol_type = other DNA
ctggaccaggcctttccgctgctgatgaaacaactggaactcatgctcaccagcggtgaactgaatccccgccat

SEQ ID NO: 629672 - DNA, 75 bp, synthetic construct
  source 1..75: mol_type = other DNA
gtatgcaaaagggctgacctgcgaagccgacaccctcggcagttgtggctacgtttatctggctgtttatccgac

SEQ ID NO: 629673 - DNA, 75 bp, synthetic construct
  source 1..75: mol_type = other DNA
tcgctgggacaataaaaaagaaccctcgggtgctagtcactcaagcggcagatcgctcatggcatttaatcaaga

SEQ ID NO: 629674 - DNA, 75 bp, synthetic construct
  source 1..75: mol_type = other DNA
tacgaaatgccgtcacgatcttctcgcggtagacgggccgatactggaaaaaaatattctccatatcagccatcg

SEQ ID NO: 629675 - DNA, 75 bp, synthetic construct
  source 1..75: mol_type = other DNA
atgccaatggacaatcaaaatattacgtccactggaaggatgaaaaatccggtcatggacgccgccgcattttta

SEQ ID NO: 629676 - DNA, 75 bp, synthetic construct
  source 1..75: mol_type = other DNA
gtcctctgattaacataattcgcggcactcaaacactggcgcaaaaacaagtgcctaagggagtattaacaggaa

SEQ ID NO: 629677 - DNA, 75 bp, synthetic construct
  source 1..75: mol_type = other DNA
catatcggggcgcttgctcataaagctgaatgcggtgagagctacgacaccgggatcgctgaacgcgtgctaaat

SEQ ID NO: 629678 - DNA, 75 bp, synthetic construct
  source 1..75: mol_type = other DNA
ggatggcaatgtgattatgcgctggattaaaacagcccgtgatcgcgatgaaatggaaaggctaatgcaagcggc

SEQ ID NO: 629679 - DNA, 75 bp, synthetic construct
  source 1..75: mol_type = other DNA
atttaaccggttttttgtaccaatgcgtgacgcgctgcgggcgctgcgcggggaattacgaaacacaatgcgtat

SEQ ID NO: 629680 - DNA, 75 bp, synthetic construct
  source 1..75: mol_type = other DNA
atgtcacaaagaaagatcagcgatgaacagttaatcgctgaacataataacggtctgacgtataaacagatcgca

SEQ ID NO: 629681 - DNA, 75 bp, synthetic construct
  source 1..75: mol_type = other DNA
gtttatgtggctatccggtctgtccggcgggcggtcgggaagatgttactaaatcataaagacgtcgagatccaa

SEQ ID NO: 629682 - DNA, 75 bp, synthetic construct
  source 1..75: mol_type = other DNA
atgtcacaaagaaagatcagcgatgaacaactaatcgctgaacataacagcggcctgacatataaacagatcgct

SEQ ID NO: 629683 - DNA, 75 bp, synthetic construct
  source 1..75: mol_type = other DNA
tattcccgcaatgttgatggctgcgtcgggcagaaaaattgcagcgatgtttcataaccagagaaatccggtggt

SEQ ID NO: 629684 - DNA, 75 bp, synthetic construct
  source 1..75: mol_type = other DNA
accgctattggcgacaccgtcggtctggtgattgctaatgtcgatggcgccttactggaagcaatgaaacttgaa

SEQ ID NO: 629685 - DNA, 75 bp, synthetic construct
  source 1..75: mol_type = other DNA
atttcgttcgtccacatcctgagcagtatacgtggatcctgaagttgctgaaaacgcgtaaggcaggggaagagg

SEQ ID NO: 629686 - DNA, 75 bp, synthetic construct
  source 1..75: mol_type = other DNA
ttgaaacgtttgtcgacgatacgcgcgtttattatccgtgggaagtatacgacgcaaaggtgtatacaccgccac

SEQ ID NO: 629687 - DNA, 75 bp, synthetic construct
  source 1..75: mol_type = other DNA
ttttcaacatcaactggagcgaaataacgacagagcacgttctgacgttgttatgctgcttcgcaacggaataca

SEQ ID NO: 629688 - DNA, 75 bp, synthetic construct
  source 1..75: mol_type = other DNA
gcgtcatatataaacatcatcaagaaaactcaaattatgggatgcgctagagttcctcaaggaatactcaccgga

SEQ ID NO: 629689 - DNA, 75 bp, synthetic construct
  source 1..75: mol_type = other DNA
gatggggtaatggtttatcaggagacgtatcacgaggcgacgtatgcccgccatcatctgaaaggtaaaaaacag

SEQ ID NO: 629690 - DNA, 75 bp, synthetic construct
  source 1..75: mol_type = other DNA
agataacagcggtcccgaaactggctgtatatgacccgacggtgcagtttgagttctggttctcggaaaagcgga

SEQ ID NO: 629691 - DNA, 75 bp, synthetic construct
  source 1..75: mol_type = other DNA
gtgatcgatgccatcagcgaagggccggttgaaggtccggtagatggattaaaaagcgtgctgctgaacagtacg

SEQ ID NO: 629692 - DNA, 75 bp, synthetic construct
  source 1..75: mol_type = other DNA
atgggtaaaggtggcggcagggcgcacacgcctcgagaggcgaaggataatctcaaatccacgcagatgatgagt

SEQ ID NO: 629693 - DNA, 75 bp, synthetic construct
  source 1..75: mol_type = other DNA
agccatactgcgctacggacgcaacctgctgaagatggacgcgttcggctgtaccagccgcggtcaggcccaccg

SEQ ID NO: 629694 - DNA, 75 bp, synthetic construct
  source 1..75: mol_type = other DNA
gataacggcgtgggattccgctacagcttcagtgccctgaaggaccggcacacggcggtggaggtgaattacacc

SEQ ID NO: 629695 - DNA, 75 bp, synthetic construct
  source 1..75: mol_type = other DNA
tatcagcggagcaattaccgcgaataccggcacgctcaataatgtcaccattaacgagaactgtgtcatcagagg

SEQ ID NO: 629696 - DNA, 75 bp, synthetic construct
  source 1..75: mol_type = other DNA
aattccgggacgctcaacaacgtcacgattaacgagaactgtcgggttctgggaaaactgtccgcgaaccagatt

SEQ ID NO: 629697 - DNA, 75 bp, synthetic construct
  source 1..75: mol_type = other DNA
taccacgctgataagcctggttgacggccagggcactccggtcagcgtggaggtacagtccgtcaccgacggcgt

SEQ ID NO: 629698 - DNA, 75 bp, synthetic construct
  source 1..75: mol_type = other DNA
taccacgctgataagcctggttgacggccagggaaatccggtcagcgtggaggtacagtccgtcaccgacggcgt

SEQ ID NO: 629699 - DNA, 75 bp, synthetic construct
  source 1..75: mol_type = other DNA
taccacgctgataagcctggttgacggacagggaactccggtcagcgtggaggtacagtccgtcaccgacggcgt

SEQ ID NO: 629700 - DNA, 75 bp, synthetic construct
  source 1..75: mol_type = other DNA
tacaaataataacctgaacagcatgtgggctgtgaagctgcagcagatgcaggacggacgcctttatatcgcggg

SEQ ID NO: 629701 - DNA, 75 bp, synthetic construct
  source 1..75: mol_type = other DNA
taccacgctgataagcctggttgacgggcaggggactccggtcagcgtggaggtacagtccgtcaccgacggcgt

SEQ ID NO: 629702 - DNA, 75 bp, synthetic construct
  source 1..75: mol_type = other DNA
taccacgctgataagcctggttgacggccaggggagtccggtcagcgtggaggtacagtccgtcaccgacggcgt

SEQ ID NO: 629703 - DNA, 75 bp, synthetic construct
  source 1..75: mol_type = other DNA
ctgattaaaactgaactgctggagacgcagaccgtggatttcagcgtaggcgcggaagggcttcgccatgtaccg

SEQ ID NO: 629704 - DNA, 75 bp, synthetic construct
  source 1..75: mol_type = other DNA
atcggagccggtattgagaatacgccagcaggtatgcagagtcaggtgcttctggctgctgaccggattgcgatg

SEQ ID NO: 629705 - DNA, 75 bp, synthetic construct
  source 1..75: mol_type = other DNA
ctgattaaaactgaactgctggagacgcagaccgtggatttcagcgtgggtgctgaagggcttcgccatgtaccg

SEQ ID NO: 629706 - DNA, 75 bp, synthetic construct
  source 1..75: mol_type = other DNA
ctgattaaaactgaactgctggagacgcagaccgtggatttcagcgttggagctgaagggcttcgccatgtaccg

SEQ ID NO: 629707 - DNA, 75 bp, synthetic construct
  source 1..75: mol_type = other DNA
ctgattaaaactgaactgctggagacgcagaccgtggatttcagcgtaggggccgaagggcttcgccatgtaccg

SEQ ID NO: 629708 - DNA, 75 bp, synthetic construct
  source 1..75: mol_type = other DNA
aatgaagtgttcctgaaatatctgacggctcccaccattaccagcggcggtaatcctccggcattttccctgaca

SEQ ID NO: 629709 - DNA, 75 bp, synthetic construct
  source 1..75: mol_type = other DNA
catatccgcggccgcatcattcaggtgccgtcaaactatgacccggaaaaacgcacctacagcggtatctgggac

SEQ ID NO: 629710 - DNA, 75 bp, synthetic construct
  source 1..75: mol_type = other DNA
gattctgaataatctccctgagcgcccctttaacatccggatggtcagggagacggcggacagcaccacggacca

SEQ ID NO: 629711 - DNA, 75 bp, synthetic construct
  source 1..75: mol_type = other DNA
ggacgcagattgataacggtcagcttgcgcctgacctggcggaaatcagaacgtccatcacggatgtcagtaatg

SEQ ID NO: 629712 - DNA, 75 bp, synthetic construct
  source 1..75: mol_type = other DNA
cgggacgaaacaccagaatttcaacagcccgaatcagcagtcgtactggtattccacctgtaagctgcaggtgct

SEQ ID NO: 629713 - DNA, 75 bp, synthetic construct
  source 1..75: mol_type = other DNA
cagcggacatatcagtgcgaactcgggcacgctgaataatgtcgtgatagcggagaactgcacgataaatggcac

SEQ ID NO: 629714 - DNA, 75 bp, synthetic construct
  source 1..75: mol_type = other DNA
ctgctgctggctgaccgtatcgcgatgataaatccggagagcggcaacagcacgccgttatttgtggcgcagggg

SEQ ID NO: 629715 - DNA, 75 bp, synthetic construct
  source 1..75: mol_type = other DNA
ttcgtcatgccgcctgatagtgaagaaaaacggtgctgaaatttataaccgtaccgcgctggataatacgctggt

SEQ ID NO: 629716 - DNA, 75 bp, synthetic construct
  source 1..75: mol_type = other DNA
ggtgaccaccgccatcaccgcggatacagagcatcgttccagtggtctgccgctcggggaatacaccctgacagt

SEQ ID NO: 629717 - DNA, 75 bp, synthetic construct
  source 1..75: mol_type = other DNA
aatcccccgacgttttccctgacgccggaagggaagctgacagccaggaacgcggatatcagcggagcaattacc

SEQ ID NO: 629718 - DNA, 75 bp, synthetic construct
  source 1..75: mol_type = other DNA
gtggccgggccagcaatgatgcagaagggtatctggggctgtttcgggaaaaaataggaaaactgcatctggctc

SEQ ID NO: 629719 - DNA, 75 bp, synthetic construct
  source 1..75: mol_type = other DNA
tggaagtcagcgggcagcccagcaatgatggtgaagggtatctggaatttttccgggaaaaaataggaaaactgc

SEQ ID NO: 629720 - DNA, 75 bp, synthetic construct
  source 1..75: mol_type = other DNA
aaatgaaaactgtacgattaagggcatgctggaggcgactcaggtcagaggtgacttcgttaaagctgtatccaa

SEQ ID NO: 629721 - DNA, 75 bp, synthetic construct
  source 1..75: mol_type = other DNA
tgagttctggttctcggaaaagcggattgcggatatcaggcaggttgaaaccagcgcgcgttatcttggtacggc

SEQ ID NO: 629722 - DNA, 75 bp, synthetic construct
  source 1..75: mol_type = other DNA
gacgccggatggcaggctgacagcccgcaatgcggatatcagtggagccatcacggcgaataccggcacgctcaa

SEQ ID NO: 629723 - DNA, 75 bp, synthetic construct
  source 1..75: mol_type = other DNA
gggacacgccgcgggtggtgaagggcgtgcgcttcagtctgcgcctgaccagtggtaagggaacggatgccagac

SEQ ID NO: 629724 - DNA, 75 bp, synthetic construct
  source 1..75: mol_type = other DNA
ccggaccggatacaggtcagcaccctgcctgatggtgtggagacatacggtgtatggggactctccctgccgtca

SEQ ID NO: 629725 - DNA, 75 bp, synthetic construct
  source 1..75: mol_type = other DNA
acaacagccagcttgcggatgagatggcggagatgaagacctccatcaccgaaacccgcaatgaaatcacacaga

SEQ ID NO: 629726 - DNA, 75 bp, synthetic construct
  source 1..75: mol_type = other DNA
gggtaaatggttggtatcccacagcaagtatcagcgatttgctggttgttgtgatgaagaaagccactgcaggca

SEQ ID NO: 629727 - DNA, 75 bp, synthetic construct
  source 1..75: mol_type = other DNA
ggcaatcagcgggcaggtaatatcaccgactgtacggtgattgtgaccaaaaaagcggcttccggcatcagtatc

SEQ ID NO: 629728 - DNA, 75 bp, synthetic construct
  source 1..75: mol_type = other DNA
ggagctgtggacgcagattgataacggtcagcttgcgcctgacctggctgaaatcaggacgtccattacggatgt

SEQ ID NO: 629729 - DNA, 75 bp, synthetic construct
  source 1..75: mol_type = other DNA
acaacagtcagctgaaggacgagatggcggaaatgcagaccaccatcaccgaaacccgcaatgaaatcacacaga

SEQ ID NO: 629730 - DNA, 75 bp, synthetic construct
  source 1..75: mol_type = other DNA
gcagcggtaagccggtgagtgtggacattaccgcacaccctgcgcctgaccggatacaggtcagccccctgccgg

SEQ ID NO: 629731 - DNA, 75 bp, synthetic construct
  source 1..75: mol_type = other DNA
tgtgggcagagattgacaacagtcagctgaaggacgagatggcggaaatgcagaccaccatcacagaaacccgca

SEQ ID NO: 629732 - DNA, 75 bp, synthetic construct
  source 1..75: mol_type = other DNA
gcattttccctgacaccggacgggcggctgacggcaaaaaatgccgatatcagcggtaacgtgaatgcgaactcc

SEQ ID NO: 629733 - DNA, 75 bp, synthetic construct
  source 1..75: mol_type = other DNA
atgcgtacctggcacaacagcgtaaggcatgggacgtgctcagtgatttctgctcggcggttccggattaacgca

SEQ ID NO: 629734 - DNA, 75 bp, synthetic construct
  source 1..75: mol_type = other DNA
tgccgggaccctgaccggcggacgtgtcctgtccatcgatgctgccacccgcaccctgacgctggaccgtgaagt

SEQ ID NO: 629735 - DNA, 75 bp, synthetic construct
  source 1..75: mol_type = other DNA
ccaacatctccggtatcacggtggtgttccgtgccggtgagcaggagcagacaccgccggaggggtttgaatcct

SEQ ID NO: 629736 - DNA, 75 bp, synthetic construct
  source 1..75: mol_type = other DNA
attttcagataacagcggtcccgaaactggctgtatatgacccgacggtgcagtttgagttctggttctcggaaa

SEQ ID NO: 629737 - DNA, 75 bp, synthetic construct
  source 1..75: mol_type = other DNA
cgcgtggacatcactgcacaaccggcccctgaccggatacaggtcagcgtcctgccggatggcgtggaggcatac

SEQ ID NO: 629738 - DNA, 75 bp, synthetic construct
  source 1..75: mol_type = other DNA
cagatactgctggcagcggaccgtgtggcattcattaatccggagaatggtgataccacacccgcactggtcacg

SEQ ID NO: 629739 - DNA, 75 bp, synthetic construct
  source 1..75: mol_type = other DNA
ctgcagaagatgcaggacggacgcctttatattgccggtattggtgcaggcattgagaatacggatgaaggggtg

SEQ ID NO: 629740 - DNA, 75 bp, synthetic construct
  source 1..75: mol_type = other DNA
gaagtcagcgggcagcccagcaatgatggtgaagggtatctggaatttttccgggaaaaaataggaaaactgcat

SEQ ID NO: 629741 - DNA, 75 bp, synthetic construct
  source 1..75: mol_type = other DNA
cggacgtgtcctgtccatcgatgccgccagccgcaccctgacactggaccgtgaggtgaccctgccggagaccgg

SEQ ID NO: 629742 - DNA, 75 bp, synthetic construct
  source 1..75: mol_type = other DNA
acgactatgccgggaccctgaccggcggacgtgtcctgtccattgatgctgccacccgcaccctgacactggacc

SEQ ID NO: 629743 - DNA, 75 bp, synthetic construct
  source 1..75: mol_type = other DNA
ggtgccggtattgagaatacgccagcaggaatgcagagtcaggtgctgctggcggcagacaggattgcgatgatt

SEQ ID NO: 629744 - DNA, 75 bp, synthetic construct
  source 1..75: mol_type = other DNA
agggcggggtcatgtcaccctgacgtttaatgtgtcgtcggccggtgcgaacaactggacgccgacaacgtacat

SEQ ID NO: 629745 - DNA, 75 bp, synthetic construct
  source 1..75: mol_type = other DNA
gtggaggtgagcgcggctgacggtcagtatctggcacaggcgaaatgggacacgccgcgggttgtgaagggtgtg

SEQ ID NO: 629746 - DNA, 75 bp, synthetic construct
  source 1..75: mol_type = other DNA
aaactgtacgattaagggcatgctggaggcgacccaggtcagaggggatttcgttaaagctgtatcaaaagcctt

SEQ ID NO: 629747 - DNA, 75 bp, synthetic construct
  source 1..75: mol_type = other DNA
ggcaagataaccgaatcccatctcggtaaagagctgctggaaaaagttgatttgacggaggataacgccagcaga

SEQ ID NO: 629748 - DNA, 75 bp, synthetic construct
  source 1..75: mol_type = other DNA
cctgccggttaagagtgacccgcaatggtcaggagatttttaatcagtccacgacggatgttcagggcgtatttt

SEQ ID NO: 629749 - DNA, 75 bp, synthetic construct
  source 1..75: mol_type = other DNA
atacagcaacaacccggcctggtgtctgtgggacatgctgactcacccgcgctacgggatgggaaaacgtctggg

SEQ ID NO: 629750 - DNA, 75 bp, synthetic construct
  source 1..75: mol_type = other DNA
cccggtgctgtttcgcggacgaaacaccagaatttcaacagcccgaatcagcagtcgtactggtattccacctgt

SEQ ID NO: 629751 - DNA, 75 bp, synthetic construct
  source 1..75: mol_type = other DNA
gtcacaggggctgcggcacacgcccggtgacatcattgaaatctgtgataacgactatgccgggaccctgaccgg

SEQ ID NO: 629752 - DNA, 75 bp, synthetic construct
  source 1..75: mol_type = other DNA
ggtgcagtcactggtggagaccacgtcaaagggcgaccgtaatccttcctctgtccggattctgattcagttaca

SEQ ID NO: 629753 - DNA, 75 bp, synthetic construct
  source 1..75: mol_type = other DNA
tgttgtttttgtgcataaccagattcagacatcaggcaggacagggggacagagtgggtaaaggcggcggcaagg

SEQ ID NO: 629754 - DNA, 75 bp, synthetic construct
  source 1..75: mol_type = other DNA
tctttctcagggagtttagtctccaggatttccggggcggttcaaaccgtgtggtggatgctgtgctgttaacct

SEQ ID NO: 629755 - DNA, 75 bp, synthetic construct
  source 1..75: mol_type = other DNA
aggcgatattgtcaaaacggtcagcaagtctttcccccgcacgagcacttatgccagtggcaccatcacggtaag

SEQ ID NO: 629756 - DNA, 75 bp, synthetic construct
  source 1..75: mol_type = other DNA
tttcgggaaaaaataggaaaactgcatctggctcaggggctgtgggagctgatagacaacagccagcttgcggat

SEQ ID NO: 629757 - DNA, 75 bp, synthetic construct
  source 1..75: mol_type = other DNA
ggtgtcagcatggctggtaaatggctggtatcccacagcaagtatcagcgatttgctggttgttgtgatgaagaa

SEQ ID NO: 629758 - DNA, 75 bp, synthetic construct
  source 1..75: mol_type = other DNA
cggaacggtggccatcagggaccattaccgtcagggtttatgacgatcagccgtttgaccggcagattgttattc

SEQ ID NO: 629759 - DNA, 75 bp, synthetic construct
  source 1..75: mol_type = other DNA
cccaggaggcacgcgatacacgggttatggttttgaagttcgcaaaaacggcgtattaatcgcatccagagaaac

SEQ ID NO: 629760 - DNA, 75 bp, synthetic construct
  source 1..75: mol_type = other DNA
acggaaacaccaaacggtacggttacagtcaccatcagcgatgatcataactttgaccgccagattattattccg

SEQ ID NO: 629761 - DNA, 75 bp, synthetic construct
  source 1..75: mol_type = other DNA
gtactggatagctgccagtagcaatattaagccgggttatgattattacttttacatccgcagcgtgaataccgt

SEQ ID NO: 629762 - DNA, 75 bp, synthetic construct
  source 1..75: mol_type = other DNA
tttacagtggcgttattgatatgcctgccggtcacggtcacatgacgctggagttttcggtatcagcatggctag

SEQ ID NO: 629763 - DNA, 75 bp, synthetic construct
  source 1..75: mol_type = other DNA
taaggtgaaagtgaaccgggttcctgacggcgttgcagaatacagtgtgtgggggctgaagctgccgacgctgcg

SEQ ID NO: 629764 - DNA, 75 bp, synthetic construct
  source 1..75: mol_type = other DNA
tcaacaatgtcacgattaaccagaactgtacgattaagggcatgctggaggcgacccaggtcagaggagatttcg

SEQ ID NO: 629765 - DNA, 75 bp, synthetic construct
  source 1..75: mol_type = other DNA
ggcatgcagagtcaggtgctgctggcagcagacaggattgcgatgattaatcctgcgaatggcaacacaaagccg

SEQ ID NO: 629766 - DNA, 75 bp, synthetic construct
  source 1..75: mol_type = other DNA
caggtcagaggggatttcgttaaagctgtatcaaaagccttcccgaaaaaagtcggtacgtggggtaacacggaa

SEQ ID NO: 629767 - DNA, 75 bp, synthetic construct
  source 1..75: mol_type = other DNA
taacacggaaacaccaaacggtacggttacagtcaccatcagcgatgatcataactttgaccgccagattattat

SEQ ID NO: 629768 - DNA, 75 bp, synthetic construct
  source 1..75: mol_type = other DNA
aggaagaaaaagctaaatgaatgtccttcggctgatgcaggtacagtaaacaaaattatttcaagctttggtcga

SEQ ID NO: 629769 - DNA, 75 bp, synthetic construct
  source 1..75: mol_type = other DNA
acagttatgccagtggcaagataactgtcacggtttatgatgaccagggcttcgaccggcagattatcattcccc

SEQ ID NO: 629770 - DNA, 75 bp, synthetic construct
  source 1..75: mol_type = other DNA
tgcgaacgccgggacactcaacaacgtcacgattaatgagaactgccggattctgggaaaactgtctgccagcca

SEQ ID NO: 629771 - DNA, 75 bp, synthetic construct
  source 1..75: mol_type = other DNA
tgcttcgcctgaccgtggcagcggacgatggcagtgagcggctggtcagcacggccaggacgacggaaactacat

SEQ ID NO: 629772 - DNA, 75 bp, synthetic construct
  source 1..75: mol_type = other DNA
atgcctgccggacaggggacgctgacactgacattcaccgtatcttcatcaggagcgaataactggacaccaaca

SEQ ID NO: 629773 - DNA, 75 bp, synthetic construct
  source 1..75: mol_type = other DNA
tcaggtgctgctggcggcagacaggattgcgttcattaatccggagaacggtaacaccactccagcactggtcac

SEQ ID NO: 629774 - DNA, 75 bp, synthetic construct
  source 1..75: mol_type = other DNA
taacggggcgcactttgacggcgaccagagcggcacggtgaatggtgtcacaccgccagcggtgcagcaccttac

SEQ ID NO: 629775 - DNA, 75 bp, synthetic construct
  source 1..75: mol_type = other DNA
aaaaatgccgatatcagcggtaacgtgaatgcgaactccgggacgctcaacaacgtcacgataaatgagaactgt

SEQ ID NO: 629776 - DNA, 75 bp, synthetic construct
  source 1..75: mol_type = other DNA
ctgtatgtcatcggccagcattgcgaccagtcggtgcctgacggctttggtggcacggagccacgcatcacctgt

SEQ ID NO: 629777 - DNA, 75 bp, synthetic construct
  source 1..75: mol_type = other DNA
ctggacgccaacgaccagtatcagcgaccttcttgttgttgtgatgaagaaatctacagccggtatcagtatcag

SEQ ID NO: 629778 - DNA, 75 bp, synthetic construct
  source 1..75: mol_type = other DNA
aatggctggtatcccacagcgagtatcagcgatttgctggttgttgtgatgaagaaatccactgcaggcatcacg

SEQ ID NO: 629779 - DNA, 75 bp, synthetic construct
  source 1..75: mol_type = other DNA
attcgtggaggctgttggtcagccgagtgatgatccatccggctatctggattttttcaaaggagagatagggaa

SEQ ID NO: 629780 - DNA, 75 bp, synthetic construct
  source 1..75: mol_type = other DNA
cggctgacggcgaaaaatgccgatatcagcggtaacgtgaatgcgaactccgggacgctcaaaaatgtcacgatt

SEQ ID NO: 629781 - DNA, 75 bp, synthetic construct
  source 1..75: mol_type = other DNA
caccacactgataagcctggttgacggaaagggtaatccggtcagcgtggaggtcaggtccgtcaccgacggcgt

SEQ ID NO: 629782 - DNA, 75 bp, synthetic construct
  source 1..75: mol_type = other DNA
taccgtcagggtttatgacgatcagccgtttgaccggcagattgttattccggcggtggcattcagtggcgctaa

SEQ ID NO: 629783 - DNA, 75 bp, synthetic construct
  source 1..75: mol_type = other DNA
atttcgttaaagctgtatcaaaagccttcccgaaaaaagtcggtacgtggggtaacacggaaacaccaaacggta

SEQ ID NO: 629784 - DNA, 75 bp, synthetic construct
  source 1..75: mol_type = other DNA
ggcagcggtaagccggtgagcgtggacatcactgcacaccccgcgccggaccggatacaggtcagcaccctgcct

SEQ ID NO: 629785 - DNA, 75 bp, synthetic construct
  source 1..75: mol_type = other DNA
tcgcgggacgaaacaccagaatttcaacagcccgaatcagcagtcgtactggtattccacctgtaagctgcaggt

SEQ ID NO: 629786 - DNA, 75 bp, synthetic construct
  source 1..75: mol_type = other DNA
tgaaatgggacacgccgcgggtggtgaagggcgtgcgcttcagtctgcgcctgaccagtggtaagggaacggatg

SEQ ID NO: 629787 - DNA, 75 bp, synthetic construct
  source 1..75: mol_type = other DNA
ggtctgccgctcggggaatacaccctgacagtcagggcaattaacagttatggccagcagggggaaccggccacc

SEQ ID NO: 629788 - DNA, 75 bp, synthetic construct
  source 1..75: mol_type = other DNA
accatacagcagatacagcgcgtgcagaaggacacaaatgatgacctggctgcgctgtacatgctgaaggttcaa

SEQ ID NO: 629789 - DNA, 75 bp, synthetic construct
  source 1..75: mol_type = other DNA
ataaatcatcttttgaaaaaggaaatgaatatgctcgcgatattgctaatagattaatgtacgtggctttttcta

SEQ ID NO: 629790 - DNA, 75 bp, synthetic construct
  source 1..75: mol_type = other DNA
ttgctgaagtgacccaaaaaatcggggagacagaaaacagcctcacacagctggttgcgaaaaaaaatgatgagc

SEQ ID NO: 629791 - DNA, 75 bp, synthetic construct
  source 1..75: mol_type = other DNA
cggcatggggaaacgtcttggtgcggcagatgtggacaaatgggcgctgtacgttatcggccagtactgcgacca

SEQ ID NO: 629792 - DNA, 75 bp, synthetic construct
  source 1..75: mol_type = other DNA
catctggctcaggagctgtggacgcagattgataacggtcagcttgcgccggacctggctgaaatcaggacgtcc

SEQ ID NO: 629793 - DNA, 75 bp, synthetic construct
  source 1..75: mol_type = other DNA
aacagcatgtgggctgtgaagctgcagcagatgcaggacggacgcctttatatcgcgggtatcggtgccggtatt

SEQ ID NO: 629794 - DNA, 75 bp, synthetic construct
  source 1..75: mol_type = other DNA
aaatgggacacgccgaaggtggtgaagggcgtgagctttatgcttcgcctgaccgtggtcgcggatgacggcagt

SEQ ID NO: 629795 - DNA, 75 bp, synthetic construct
  source 1..75: mol_type = other DNA
agtattaatatcaggccgggccatgattattacttttatatccgcagtgtgaacatcgtcggtaaatcagcgttt

SEQ ID NO: 629796 - DNA, 75 bp, synthetic construct
  source 1..75: mol_type = other DNA
atgaaatcacgcagaccgtcaataaaaaactggaaaatcagagtgcggcaatccagcagatacagaaagttcagg

SEQ ID NO: 629797 - DNA, 75 bp, synthetic construct
  source 1..75: mol_type = other DNA
tgatttacagtggcgttattgatatgcctgccggtcacggtcacatgacgctggagttttcggtgtcagcatggc

SEQ ID NO: 629798 - DNA, 75 bp, synthetic construct
  source 1..75: mol_type = other DNA
cacctgaccgccgaagtcaccgcagacagcggggagtatcaggtactggcccgctgggacacgccgaaggtggtg

SEQ ID NO: 629799 - DNA, 75 bp, synthetic construct
  source 1..75: mol_type = other DNA
agaaaaaggcgtaccgcctggcagataatcgcctaccgatgaatgctggctgggatgaagatctgttgcggatgg

SEQ ID NO: 629800 - DNA, 75 bp, synthetic construct
  source 1..75: mol_type = other DNA
tcttgcggtttatgatccgacggtacagtttgagttctggttctcggaaaagcggattaccgatatcaggaaggt

SEQ ID NO: 629801 - DNA, 75 bp, synthetic construct
  source 1..75: mol_type = other DNA
gtgaagggtatctggggctgtttcgggaaaaaataggaaaactgcatctggctcaggggctgtgggagctgatag

SEQ ID NO: 629802 - DNA, 75 bp, synthetic construct
  source 1..75: mol_type = other DNA
acggatgtcagtaatgaaatcacgcagaccgtcaataagaaactggaagaccagagtgcagcgatccagcagata

SEQ ID NO: 629803 - DNA, 75 bp, synthetic construct
  source 1..75: mol_type = other DNA
atgcatccggctatctggattttttcaaaggagagatagggaaaacccatctggctcaggagttgtggactcaga

SEQ ID NO: 629804 - DNA, 75 bp, synthetic construct
  source 1..75: mol_type = other DNA
gagtggaaagacgccaacgataaatggaatgccatgtggggcgtcaaaattgagcagaccgaagacggtaagcat

SEQ ID NO: 629805 - DNA, 75 bp, synthetic construct
  source 1..75: mol_type = other DNA
actgaaatcaggacgtccataacggatgtcagcaatgaaataacacagaccgtcaataagaaactggaagaccag

SEQ ID NO: 629806 - DNA, 75 bp, synthetic construct
  source 1..75: mol_type = other DNA
agtttaagattttccagaaaggcaatcagggggcaggcaatatcaccgattgtacggtgattgtgaccaaaaaag

SEQ ID NO: 629807 - DNA, 75 bp, synthetic construct
  source 1..75: mol_type = other DNA
tcatcaggagcgaataactggacaccaacaaccagtatcagcgatctgctggttgtggtgatgaagaaatccaca

SEQ ID NO: 629808 - DNA, 75 bp, synthetic construct
  source 1..75: mol_type = other DNA
agcgcgtgcagaaggacacaaatgatgacctggctgcgctgtacatgctgaaggttcaaaaaacgaaagacggca

SEQ ID NO: 629809 - DNA, 75 bp, synthetic construct
  source 1..75: mol_type = other DNA
aaaccgcagcggctttttctgggttaagtcatcgttgtcaggaaaaacacgcgacatcctgcgcgcctacaaaat

SEQ ID NO: 629810 - DNA, 75 bp, synthetic construct
  source 1..75: mol_type = other DNA
ccgaaggctacctgaatttttacaaagagctgattaataaaacacatctcggtaaagagctgctggaaaacgctg

SEQ ID NO: 629811 - DNA, 75 bp, synthetic construct
  source 1..75: mol_type = other DNA
aacccgtagcggcgtgcttttcatgaagtcggttttgtccggtaaatctctcgacatgttgcgagcctacaagac

SEQ ID NO: 629812 - DNA, 75 bp, synthetic construct
  source 1..75: mol_type = other DNA
tggttttatgtgcgcagcgtcaacctggtggggaaatctgcgtttgtggaagccagtggccgggcgagcaatgat

SEQ ID NO: 629813 - DNA, 75 bp, synthetic construct
  source 1..75: mol_type = other DNA
cagataacggcggtcccgcatcttacggtgtatgacccgacggtacagtttgagttctggttttcggaggcaaaa

SEQ ID NO: 629814 - DNA, 75 bp, synthetic construct
  source 1..75: mol_type = other DNA
tatctggagtttttccgggaaaagataggaaaaacacatctggcagaggcgttgtgggcagagattgacaacagt

SEQ ID NO: 629815 - DNA, 75 bp, synthetic construct
  source 1..75: mol_type = other DNA
gtgggtaaaggtggcggcaaggggcacacaccgcgtgaggcgaaggacaatctcaaatccacgcagatgatgagc

SEQ ID NO: 629816 - DNA, 75 bp, synthetic construct
  source 1..75: mol_type = other DNA
gcgtaacggtaactgggtgacggagaaggatgtcaccattaacggcaagaccacctcgcagtacctgacgtcggt

SEQ ID NO: 629817 - DNA, 75 bp, synthetic construct
  source 1..75: mol_type = other DNA
ggttctcagaggagaaaatcgcagacacatctcaggtggaaacgtctgcccgttatcttgggaccggcagccagt

SEQ ID NO: 629818 - DNA, 75 bp, synthetic construct
  source 1..75: mol_type = other DNA
gggagtgaaattacctcgaccacggataaaaatctgggtgaccaggccgtgaccatacagcaaatccagcgggtt

SEQ ID NO: 629819 - DNA, 75 bp, synthetic construct
  source 1..75: mol_type = other DNA
caggtccgccagtacgtggacaaaaagcaaagtgaaatcaagcagacagtcagccagggccagtcagaaaacgcc

SEQ ID NO: 629820 - DNA, 75 bp, synthetic construct
  source 1..75: mol_type = other DNA
gaaaaacggtgctgaaatttataaccgtaccgcgatggataatacgctgttttacagtggtgttattgatatgcc

SEQ ID NO: 629821 - DNA, 75 bp, synthetic construct
  source 1..75: mol_type = other DNA
tgcagcacgtaccggaaaaagaagccatcgtggataacggtgcccgctttgagccgcagtcaggcaccctgaaca

SEQ ID NO: 629822 - DNA, 75 bp, synthetic construct
  source 1..75: mol_type = other DNA
tgttggtcagggcgatcagatattcatgaacgaagtgttcctgaaacgcctgacggctcccaccattaccagcgg

SEQ ID NO: 629823 - DNA, 75 bp, synthetic construct
  source 1..75: mol_type = other DNA
gacaggattgcgatgattaatcctgcaaatggcaacacaaagccgatgtttgttggtcagggcgatcagatattc

SEQ ID NO: 629824 - DNA, 75 bp, synthetic construct
  source 1..75: mol_type = other DNA
gttccggtacgctgaataacgtgacgattgcggaagactgcaccattaatggaacgatgagcgctgaccgaatca

SEQ ID NO: 629825 - DNA, 75 bp, synthetic construct
  source 1..75: mol_type = other DNA
gaacaccgttggcaaatcggcattcgtggaggctgttggccagccgagtgatgatgcatccggctatctggattt

SEQ ID NO: 629826 - DNA, 75 bp, synthetic construct
  source 1..75: mol_type = other DNA
ccggtgctggacagtgaggggaataccaacatctccggtgtcacggtggtgttccgggcaggtgagcaagaacag

SEQ ID NO: 629827 - DNA, 75 bp, synthetic construct
  source 1..75: mol_type = other DNA
cgcagcgcgtaacaatcccgagtctttcagaaagctgagcctgagaactgccgtatatggtggcgaccatctcgg

SEQ ID NO: 629828 - DNA, 75 bp, synthetic construct
  source 1..75: mol_type = other DNA
tgcgtttgtggaagccagcgggcaggccagtaatgatggtgaagggtatctggaaattttccgggaaaaaatagg

SEQ ID NO: 629829 - DNA, 75 bp, synthetic construct
  source 1..75: mol_type = other DNA
tgcatggatgattgacgtcatacgccatgcaatgaatggctcgcaggaacgggaattatcgctggctgaattatc

SEQ ID NO: 629830 - DNA, 75 bp, synthetic construct
  source 1..75: mol_type = other DNA
agcatggatgattgacgtcattcgtcacgcaatgaatggcacacaggagcgtgaattatcgctggctgaattatc

SEQ ID NO: 629831 - DNA, 75 bp, synthetic construct
  source 1..75: mol_type = other DNA
gtcgccgttgggtaaatgagaaatatacgcgctgggtgaagactcagccgtgtgcgtgttgtggtcaaccagccg

SEQ ID NO: 629832 - DNA, 75 bp, synthetic construct
  source 1..75: mol_type = other DNA
cgagttctatcggcgcgcaaatgggaattatcgccagtccggtgtccgttgcggtagtatcactcgtcgcaatgc

SEQ ID NO: 629833 - DNA, 75 bp, synthetic construct
  source 1..75: mol_type = other DNA
attgtgctgccgcataacgcccaccagcaacagaacccaccacaggaaaagacggtggtcagcatcaccattgat

SEQ ID NO: 629834 - DNA, 75 bp, synthetic construct
  source 1..75: mol_type = other DNA
acagaatctggcagcctggatgattgacgtcatccgtcatgcaatgaatggcacacaggagcgtgaattatcgct

SEQ ID NO: 629835 - DNA, 75 bp, synthetic construct
  source 1..75: mol_type = other DNA
aagcggattaccgatatcaggcaggttgaaaccagcgcgcgttatcttggtacggggctgtactggatagctgcc

SEQ ID NO: 629836 - DNA, 75 bp, synthetic construct
  source 1..75: mol_type = other DNA
atacagtgtgtgggggctgaagttgccgacgttgcgtcagcgcctgttccgctgtgtgagtatccgtgagaacga

SEQ ID NO: 629837 - DNA, 75 bp, synthetic construct
  source 1..75: mol_type = other DNA
ctgccagtggcctcatggtgactatcatcacagtgaaaccgtcatacatcgttacggtaccggcgcgatggtgtt

SEQ ID NO: 629838 - DNA, 75 bp, synthetic construct
  source 1..75: mol_type = other DNA
gaaagaaggttgttgcatacctgcatccgacactctatccgcaggactgtctgacccaacaaaccatcgacacta

SEQ ID NO: 629839 - DNA, 75 bp, synthetic construct
  source 1..75: mol_type = other DNA
catggtcagggcggaatggggacaaaatctcacgatattttcacgctaccgctgtgtcgggagcatcacaacgag

SEQ ID NO: 629840 - DNA, 75 bp, synthetic construct
  source 1..75: mol_type = other DNA
gctggttacttcgtgaaaaaggctgccagtggcctcattccgactggcacagcgagaacatgaccacaacgcgcc

SEQ ID NO: 629841 - DNA, 75 bp, synthetic construct
  source 1..75: mol_type = other DNA
aaaaaatgcgtcgggaaaaacgaaaaattatcccattatgcccatttgcgaaacacgaatttgataaaacgcggg

SEQ ID NO: 629842 - DNA, 75 bp, synthetic construct
  source 1..75: mol_type = other DNA
gataccgtggcatttgaagagaagtatggctcccagctggagctgatatttcgttttatcgatcgcgcgctggcg

SEQ ID NO: 629843 - DNA, 75 bp, synthetic construct
  source 1..75: mol_type = other DNA
ggcatttgaagagaagtatggctcccagctggagctggtatttcgttttatcgatcgtgcgctggcaattggcgt

SEQ ID NO: 629844 - DNA, 75 bp, synthetic construct
  source 1..75: mol_type = other DNA
gtgagagcactactgacccctgaaatagccccgcgtatggggatcgtattgttcagacccggttcagagctgatg

SEQ ID NO: 629845 - DNA, 75 bp, synthetic construct
  source 1..75: mol_type = other DNA
gttcgaagaaaagcatggttcccaggttgatttaatttttcgttttcttgatcacgcctttgcaaccggcgtgct

SEQ ID NO: 629846 - DNA, 75 bp, synthetic construct
  source 1..75: mol_type = other DNA
gtcatggtcagggcggaatgggaacaaaatcccacgatattttcacgctaccgctgtgtcgggagcatcacaacg

SEQ ID NO: 629847 - DNA, 75 bp, synthetic construct
  source 1..75: mol_type = other DNA
cctcggggcaatcgctgtagtcgcacttcttggtgctgattcggacctgcgtccatccttcggcggcaaaccgct

SEQ ID NO: 629848 - DNA, 75 bp, synthetic construct
  source 1..75: mol_type = other DNA
gtggaatgggtacaaaagcgcatgacctttttgtgttgcctttgtgcagaaaacaccatgacgaactgcatgcgg

SEQ ID NO: 629849 - DNA, 75 bp, synthetic construct
  source 1..75: mol_type = other DNA
ggttaatgaaaagtacacgcgctgggttaagacacagccgtgtgcatgttgtggaaaacctgctgatgatcccca

SEQ ID NO: 629850 - DNA, 75 bp, synthetic construct
  source 1..75: mol_type = other DNA
tggttcgtaatgacctggcggatgccttaccggaaagtgcagcccgtaaggcactgagattaccgaagcctgttg

SEQ ID NO: 629851 - DNA, 75 bp, synthetic construct
  source 1..75: mol_type = other DNA
gtggaaagccagctgatgatccgcatcatctgattggtcacggccagggtggtatggggacaaaagcgcatgatc

SEQ ID NO: 629852 - DNA, 75 bp, synthetic construct
  source 1..75: mol_type = other DNA
ttgccccgcgtatggggatcgtattgttcaggccgggttcagagctgatgcccctgtttatgcaggggcgtgtcc

SEQ ID NO: 629853 - DNA, 75 bp, synthetic construct
  source 1..75: mol_type = other DNA
atccgtgagaacgatgacggcacgtatgccatcaccgctgtgcagcatgtgccggagaaagaggccatcgtggat

SEQ ID NO: 629854 - DNA, 75 bp, synthetic construct
  source 1..75: mol_type = other DNA
gaatcactcgggcaacttgctcatcaaaacctgtcagcatggatgattgacgtcatcggtcacgcaataagcggt

SEQ ID NO: 629855 - DNA, 75 bp, synthetic construct
  source 1..75: mol_type = other DNA
tgcatgacgtgtggcaatcaggcagatgatccgcatcacatcattggtcatggactgggagggatgggaacaaag

SEQ ID NO: 629856 - DNA, 75 bp, synthetic construct
  source 1..75: mol_type = other DNA
gcggacgcgcttccggaggcagcattacgccgttcgctggggttgcgtgcggaaaaaatccgctcaatgtaccgt

SEQ ID NO: 629857 - DNA, 75 bp, synthetic construct
  source 1..75: mol_type = other DNA
gtgttgtgttggcactgcgacaaccaactgcgtgaccagacatcggaatcactggagctgcttgctcaacaaaat

SEQ ID NO: 629858 - DNA, 75 bp, synthetic construct
  source 1..75: mol_type = other DNA
aaagattttgaagaaaaacacggtagtcagttgttgttgctgattcgttttttaatgcacgcgagaaattcgggt

SEQ ID NO: 629859 - DNA, 75 bp, synthetic construct
  source 1..75: mol_type = other DNA
catcattggtcatggactgggagggatgggaacaaaggctgacgatttgtttgttattccgctgtgtcgtaaatg

SEQ ID NO: 629860 - DNA, 75 bp, synthetic construct
  source 1..75: mol_type = other DNA
atgaatcattcagagttccgaccagaagttacgccacatggcataaaaattggcaatacaaccattaattttgtt

SEQ ID NO: 629861 - DNA, 75 bp, synthetic construct
  source 1..75: mol_type = other DNA
gtgagagcactgctgacccctgaaattgccccgcgtatggggattgtattgttcaggccaggttcagagctgatg

SEQ ID NO: 629862 - DNA, 75 bp, synthetic construct
  source 1..75: mol_type = other DNA
ggttaatgaaaagtacacgcgctgggttaagacgcagccgtgcgcatgttgcggaaagcctgctgatgatgccca

SEQ ID NO: 629863 - DNA, 75 bp, synthetic construct
  source 1..75: mol_type = other DNA
tggcgtatgacgatccggggagcggtaataacccgggaggtacgcgatacacgggttatggttttgaagttcgca

SEQ ID NO: 629864 - DNA, 75 bp, synthetic construct
  source 1..75: mol_type = other DNA
cgacgagctgcatgcggataccgtggcatttgaagagaagtatggctcccagctggagctgatatttcgttttat

SEQ ID NO: 629865 - DNA, 75 bp, synthetic construct
  source 1..75: mol_type = other DNA
aagtaacgccacatggcataaaaattggtaatacaaccattgattatattgaggccgtacagcggcttaatgatg

SEQ ID NO: 629866 - DNA, 75 bp, synthetic construct
  source 1..75: mol_type = other DNA
attacggatgtcagcaatgaaatcacgcagaccgtcaataagaaactggaagaccagagtgcagcgatccagcag

SEQ ID NO: 629867 - DNA, 75 bp, synthetic construct
  source 1..75: mol_type = other DNA
aggataaatcactactgccatttttcagcgatgagcgggtgattcgtgctgctggtggtgctggtgcactgtctg

SEQ ID NO: 629868 - DNA, 75 bp, synthetic construct
  source 1..75: mol_type = other DNA
gttggatgaaatgctcaggtctgaaaaaatactatttctatatgatagagtaaaaggaatattaaaaaacaagtg

SEQ ID NO: 629869 - DNA, 75 bp, synthetic construct
  source 1..75: mol_type = other DNA
tgcggatccgctggcgttcgaagaaaagcatggttcccaggttgatttaatttttcgttttcttgatcacgcctt

SEQ ID NO: 629870 - DNA, 75 bp, synthetic construct
  source 1..75: mol_type = other DNA
taatctgccgtccggggtcgttcctgccgttcgccagccgctgggggatgacaaaccatttctgccgtttttcag

SEQ ID NO: 629871 - DNA, 75 bp, synthetic construct
  source 1..75: mol_type = other DNA
taatctgccgtccggggtcgttcctgccgttcgccagccgctgggggatgaaaaaacatttctgccctttttcag

SEQ ID NO: 629872 - DNA, 75 bp, synthetic construct
  source 1..75: mol_type = other DNA
tgttgtggtcagccagccgacgatccccatcacctgattggtcacggtcagggagggatgggaacaaaggcccac

SEQ ID NO: 629873 - DNA, 75 bp, synthetic construct
  source 1..75: mol_type = other DNA
cgtgaccagacatccgaatcactcgggcaacttgctcatcaaaatctgtcagcatggatgattgacgtcatacgc

SEQ ID NO: 629874 - DNA, 75 bp, synthetic construct
  source 1..75: mol_type = other DNA
agcatggatgattgacgtcatccgtcacgcaataagcggtgcgcaggagcgggaattatcgctggctgaattatc

SEQ ID NO: 629875 - DNA, 75 bp, synthetic construct
  source 1..75: mol_type = other DNA
gtggaaaacctgctgatgatccccaccacctgataggtcacggtcagggtggaatgggtacaaaagcgcatgacc

SEQ ID NO: 629876 - DNA, 75 bp, synthetic construct
  source 1..75: mol_type = other DNA
cctcacgcccaccagcaacagaactcaccgcaggaaaaggcggtggtcagcattgctgttgatcctgagtctccg

SEQ ID NO: 629877 - DNA, 75 bp, synthetic construct
  source 1..75: mol_type = other DNA
agaaaagcatggttctcaggttgatttaatttttcgttttcttgatcacgcctttgcaactggcgtgcttgggta

SEQ ID NO: 629878 - DNA, 75 bp, synthetic construct
  source 1..75: mol_type = other DNA
ctgattggccatggtcagggtggaatgggtacaaaagcgcatgacctttttgtgttgcctttgtgcagaaaacac

SEQ ID NO: 629879 - DNA, 75 bp, synthetic construct
  source 1..75: mol_type = other DNA
caatggcaacggataactgtgcccgctgggtgttgtctgttgtgcgtcgggatcttggttttgatgacagtcacg

SEQ ID NO: 629880 - DNA, 75 bp, synthetic construct
  source 1..75: mol_type = other DNA
cagcgatgagcgggtaattcgtgctgccggcggcgctggtgcactgtctgactggctgttgcgtcatgtcaaatc

SEQ ID NO: 629881 - DNA, 75 bp, synthetic construct
  source 1..75: mol_type = other DNA
gcgggtggcgctggtgcactgtctgactggttattacgtcacgtgaaatcctgccagtggccacacggcgattat

SEQ ID NO: 629882 - DNA, 75 bp, synthetic construct
  source 1..75: mol_type = other DNA
cagcgatgagcgtgtgattcgtgctgctggcggcgctggcgcactgtctgactggctcctgcgtcatgtcaaatc

SEQ ID NO: 629883 - DNA, 75 bp, synthetic construct
  source 1..75: mol_type = other DNA
gagaagtatgactcccaactggagctgatatttcgttttatcgatcgcgcgctggcaactggcgtaagtggagaa

SEQ ID NO: 629884 - DNA, 75 bp, synthetic construct
  source 1..75: mol_type = other DNA
ctgccagtggcctcatggtgactatcatcacagtgaaaccgttattcaccgttatggtaccggcgcaatggtgtt

SEQ ID NO: 629885 - DNA, 75 bp, synthetic construct
  source 1..75: mol_type = other DNA
ttgctcaccgtctggggattgtacttttcaggcccggtcctgatgcgatgcctttgtttatgcaggggcgtgtac

SEQ ID NO: 629886 - DNA, 75 bp, synthetic construct
  source 1..75: mol_type = other DNA
acgatccccatcacctgattggtcatggtcagggcggaatggggacaaaggcccacgatattttcacgttaccgt

SEQ ID NO: 629887 - DNA, 75 bp, synthetic construct
  source 1..75: mol_type = other DNA
gaatctttcatgaagcggcctaaacgtcgccgttgggtaaatgagaaatacacgctctgggtaaagacacagccg

SEQ ID NO: 629888 - DNA, 75 bp, synthetic construct
  source 1..75: mol_type = other DNA
tggtaccggaactcggactggtggtgctaaagccgggccgtgaatccatgcaggtatttcatagccctcgagtgc

SEQ ID NO: 629889 - DNA, 75 bp, synthetic construct
  source 1..75: mol_type = other DNA
cctgccgttcgccagccgctggcggaagacaaatctctgctgccatttttcagcgacgagcgggtaattcgtgcc

SEQ ID NO: 629890 - DNA, 75 bp, synthetic construct
  source 1..75: mol_type = other DNA
gctggcactgtgacaaccagctgcgcgaccagacatcagaatcactcgatcaacttgctcagcagaatctggttg

SEQ ID NO: 629891 - DNA, 75 bp, synthetic construct
  source 1..75: mol_type = other DNA
taccgtgagagtgacatcgtaccgggagaacagactgccaccagcatactgaagcagcgcacaaaaaatattgcg

SEQ ID NO: 629892 - DNA, 75 bp, synthetic construct
  source 1..75: mol_type = other DNA
taccgtgaaagcgacatcgtaccgggagagcagaccgccaccagcatactgaagcagcgcacaaaaaatcttgcg

SEQ ID NO: 629893 - DNA, 75 bp, synthetic construct
  source 1..75: mol_type = other DNA
cctgccgttcgccagccgctggcagaagataaatcattactgccatttttcagcgacgaacgggtgattcgtgct

SEQ ID NO: 629894 - DNA, 75 bp, synthetic construct
  source 1..75: mol_type = other DNA
actggttattacgtcacgtgaaatcctgccagtggctacacggtgattatcatcacagcgaaaccgtcattcacc

SEQ ID NO: 629895 - DNA, 75 bp, synthetic construct
  source 1..75: mol_type = other DNA
gaaaagcatggttctcaggttgatttaatttttcgttttcttgatcacgcctttgcaacaggcgtactcggataa

SEQ ID NO: 629896 - DNA, 75 bp, synthetic construct
  source 1..75: mol_type = other DNA
gggaattatcgctggctgaattatcctggtgggcggtctgcaatcaggtagcggacgcactaccggaggcagtat

SEQ ID NO: 629897 - DNA, 75 bp, synthetic construct
  source 1..75: mol_type = other DNA
agacagccaccagcatactgaagcagcgcacaaaaaatattgcgctaccgcctcacgcccaccagcaacagaacc

SEQ ID NO: 629898 - DNA, 75 bp, synthetic construct
  source 1..75: mol_type = other DNA
gctggtggcgtggaatgccttgagagctggttacttcgtgaaaaaggctgtcagtggcctcattccgactggcac

SEQ ID NO: 629899 - DNA, 75 bp, synthetic construct
  source 1..75: mol_type = other DNA
gcatgttgtggaaagcctgctgatgatccccaccacctgataggccacggtcagggtggaatgggtactaaagcg

SEQ ID NO: 629900 - DNA, 75 bp, synthetic construct
  source 1..75: mol_type = other DNA
gcgggtggcgctggtgcactgtctgactggttattacgtcacgtgaaatcctgccagtggctacacggtgattat

SEQ ID NO: 629901 - DNA, 75 bp, synthetic construct
  source 1..75: mol_type = other DNA
gatctcggttttgatgacagtcacgttgtgacaatgccggaactgtgctggtggctgattcgtaatgatctggcg

SEQ ID NO: 629902 - DNA, 75 bp, synthetic construct
  source 1..75: mol_type = other DNA
ttcatctttcgccagtggtgccgttccggcggcatcacaaccgctggcggatgatcctgtcgttcgggccgtgtt

SEQ ID NO: 629903 - DNA, 75 bp, synthetic construct
  source 1..75: mol_type = other DNA
accgtggcatttgaagagaagtatggctcccagctggagctgatatttcgttttatcgatcgtgcactggcaatt

SEQ ID NO: 629904 - DNA, 75 bp, synthetic construct
  source 1..75: mol_type = other DNA
atcaacttgctcagcagaatctggcagccaggatgattgatgtcatacgtcacgcaatgaatggcacacaggagc

SEQ ID NO: 629905 - DNA, 75 bp, synthetic construct
  source 1..75: mol_type = other DNA
aattttacattaatgacgaacagggcaagcaaatcgctgaaattgtctttgtgccgaccggagagaatttagcga

SEQ ID NO: 629906 - DNA, 75 bp, synthetic construct
  source 1..75: mol_type = other DNA
ggaatgggtacaaaagcgcatgacctttttgtgttgcctttgtgcagaaaacaccatgacggactgcatgcggat

SEQ ID NO: 629907 - DNA, 75 bp, synthetic construct
  source 1..75: mol_type = other DNA
aaacagctggttgcgaaagtcgtggaaaaaatgcgtcgggaaaaaacgaaaaattatcccactatgcccatttgc

SEQ ID NO: 629908 - DNA, 75 bp, synthetic construct
  source 1..75: mol_type = other DNA
gctggttacttcgtgaaaaaggctgtcagtggcctcattccgactggcacagcgagaacatgaccacaatgcgac

SEQ ID NO: 629909 - DNA, 75 bp, synthetic construct
  source 1..75: mol_type = other DNA
tggcacagcgagaacatgaccacaatgcgacacgctccgggcgcaatccgtctgtgctggcactgcgataaccag

SEQ ID NO: 629910 - DNA, 75 bp, synthetic construct
  source 1..75: mol_type = other DNA
acaaaaaatcttgcgccgctgcctcacgcccaccagcaaaacccgccacaggaaaagacggtggtaagcattgcc

SEQ ID NO: 629911 - DNA, 75 bp, synthetic construct
  source 1..75: mol_type = other DNA
tcagtacccacacagcgagtggcacgatcgcaactacaccataacccggcatgcacctggctcaatccgcacgtg

SEQ ID NO: 629912 - DNA, 75 bp, synthetic construct
  source 1..75: mol_type = other DNA
cacgttgtgacaatgccggaactgtgctggtggctgattcgtaatgatctggcggatgccttaccggaaagtgca

SEQ ID NO: 629913 - DNA, 75 bp, synthetic construct
  source 1..75: mol_type = other DNA
taatctgccgtccggggtcgttcctgccgttcgccagccgctggaggatgataaagcattgctgccatttttcag

SEQ ID NO: 629914 - DNA, 75 bp, synthetic construct
  source 1..75: mol_type = other DNA
actggctgttgcgtcatgtcaaatcctgccagtggcctcatggtgactaccatcacagtgaaacggtcgtacatc

SEQ ID NO: 629915 - DNA, 75 bp, synthetic construct
  source 1..75: mol_type = other DNA
tgtgtagaagctgccataacgagctacatgccggggtaagagaatttgaagagaaacacggcagccagctgttgt

SEQ ID NO: 629916 - DNA, 75 bp, synthetic construct
  source 1..75: mol_type = other DNA
cactgcgacaaccagctgcgtgaccagacatccgaatcactcgagcaacttgctcatcaaaacctgtcagcatgg

SEQ ID NO: 629917 - DNA, 75 bp, synthetic construct
  source 1..75: mol_type = other DNA
gcgcacaaaaaatattgcgctaccgcctcacacccaccagcaacagaacccaccacaggaaaagacggtggtcag

SEQ ID NO: 629918 - DNA, 75 bp, synthetic construct
  source 1..75: mol_type = other DNA
tctttcatgaaacgacctaaacgtcgccgctgggttaacgagaaatacacacgctgggtgaagacacagccgtgt

SEQ ID NO: 629919 - DNA, 75 bp, synthetic construct
  source 1..75: mol_type = other DNA
gttatggtaccggcgcaatggtgttgtgctggcactgcgacaaccagttgcgtgaccagacatccgaatcactcg

SEQ ID NO: 629920 - DNA, 75 bp, synthetic construct
  source 1..75: mol_type = other DNA
gccttaccggaaagtgcagcccgtaaggcactgagattaccgaagcctgttgtgccgtctgtcacccgggaaagt

SEQ ID NO: 629921 - DNA, 75 bp, synthetic construct
  source 1..75: mol_type = other DNA
taatctgccgtccggggtcgttcctgccgttcgccagccgctggaggaggataaagcatttctgccatttttcag

SEQ ID NO: 629922 - DNA, 75 bp, synthetic construct
  source 1..75: mol_type = other DNA
taatctgccgtccggggtcgttcctgccgttcgccagccgctggaggacgataaagcattcctgccttttttcag

SEQ ID NO: 629923 - DNA, 75 bp, synthetic construct
  source 1..75: mol_type = other DNA
actggctcctgcgtcatattaaatcctgccagtggcctcatggtgactaccatcacagtgaaaccgtcatacatc

SEQ ID NO: 629924 - DNA, 75 bp, synthetic construct
  source 1..75: mol_type = other DNA
aaccctttacctgactactgcaatgatcctagcgcctcatggccgattattgagaagtacaggattagcattatc

SEQ ID NO: 629925 - DNA, 75 bp, synthetic construct
  source 1..75: mol_type = other DNA
cacaggaaaagacggtggtcagcattgccgttgagccggagtctccggaatctttcatgaaacgacctaaacgtc

SEQ ID NO: 629926 - DNA, 75 bp, synthetic construct
  source 1..75: mol_type = other DNA
acgattaatgaaaactgtcagattaaggggaaactgtcagccaatcagattgaaggcgatattgtcaaaacggtc

SEQ ID NO: 629927 - DNA, 75 bp, synthetic construct
  source 1..75: mol_type = other DNA
ctcccaccattaccagcggtggaaatccgccggcattttccctgacaccagacggaaagctgaccgctaaaaatg

SEQ ID NO: 629928 - DNA, 75 bp, synthetic construct
  source 1..75: mol_type = other DNA
gatatcagcggagcaattaccgcgaataccggcacgctcaataatgtcaccattaacgagaactgtgtcatcaga

SEQ ID NO: 629929 - DNA, 75 bp, synthetic construct
  source 1..75: mol_type = other DNA
accagcggtggcaatcccccaacgttttcactgacacctgatggtcgactttctgcgaaaaatgcggatatcagc

SEQ ID NO: 629930 - DNA, 75 bp, synthetic construct
  source 1..75: mol_type = other DNA
gacacgcgcaatgagctgaatgccatgtatatgctgaaggtgcagaaaacaaaaaacggtattccctatgtggcc

SEQ ID NO: 629931 - DNA, 75 bp, synthetic construct
  source 1..75: mol_type = other DNA
cagcatgtgggctgtgaagctgcagcagatgcaggacggacgcctttatatcgcgggtatcggtgccggtattga

SEQ ID NO: 629932 - DNA, 75 bp, synthetic construct
  source 1..75: mol_type = other DNA
tttttaatcagtccacgacggatgctcagggcgtattttcctcagttatagatatgcctgccggacaggggacac

SEQ ID NO: 629933 - DNA, 75 bp, synthetic construct
  source 1..75: mol_type = other DNA
gtcgcatcatccaggtgccgtcaaactatgacccggaaaaacgcacgtacagtggtatctgggacggcagcctga

SEQ ID NO: 629934 - DNA, 75 bp, synthetic construct
  source 1..75: mol_type = other DNA
cggtcagtaaaacgctggaagaccagagcgccaccattcagcagatacagcgcgtgcagaaggacacaaatgatg

SEQ ID NO: 629935 - DNA, 75 bp, synthetic construct
  source 1..75: mol_type = other DNA
ttcagtctgcggctgaccaacggaagcggagaagacagccgtctggtgaccaccgccatcactgcggatacagag

SEQ ID NO: 629936 - DNA, 75 bp, synthetic construct
  source 1..75: mol_type = other DNA
agtaatgaaatcacgcagaccgtcaataagaaactggaagaccagagtgcagcgatccagcagatacagaaggtt

SEQ ID NO: 629937 - DNA, 75 bp, synthetic construct
  source 1..75: mol_type = other DNA
gttccgctgtgtctccatccgggaaaacacggacggcacctttgccatcacggcggtgcagcacgtaccggaaaa

SEQ ID NO: 629938 - DNA, 75 bp, synthetic construct
  source 1..75: mol_type = other DNA
gggcagtcagaaaatgcccgacagatagcacaggtccgccagtacgtggataaaaaagggagtgaaattacctcg

SEQ ID NO: 629939 - DNA, 75 bp, synthetic construct
  source 1..75: mol_type = other DNA
ctctatgccatcgggcagtactgtgaccagcctgtaccggacggctatggtggcaccgaaccccgtatgaccttt

SEQ ID NO: 629940 - DNA, 75 bp, synthetic construct
  source 1..75: mol_type = other DNA
gtcacggtaaatgaaaactgtacgattaagggcatgctggaggcgactcaggtcagaggtgacttcgttaaagct

SEQ ID NO: 629941 - DNA, 75 bp, synthetic construct
  source 1..75: mol_type = other DNA
ctgacggcgaaaaatgtggatatcagtggcagtgtgaatgcgaactcaggaacgctcaacaatgtcacgattaac

SEQ ID NO: 629942 - DNA, 75 bp, synthetic construct
  source 1..75: mol_type = other DNA
ccacagcccgctatcttggcacggcgctgtactggatagccgccagtatcaatatcaggccgggccatgattatt

SEQ ID NO: 629943 - DNA, 75 bp, synthetic construct
  source 1..75: mol_type = other DNA
tacggacgcaatctgctgaagatggatgcgtttggctgtactagccgtggtcaggctcaccgggcaggcctgtgg

SEQ ID NO: 629944 - DNA, 75 bp, synthetic construct
  source 1..75: mol_type = other DNA
gcagattgataacggtcagcttgcgcctgacctggctgaaatcaggacgtccattacgggtgtcagcaatgaaat

SEQ ID NO: 629945 - DNA, 75 bp, synthetic construct
  source 1..75: mol_type = other DNA
gcaaccagatattcatgaacgaagtgttcctgaagtatctgacggctcccaccattaccagtggcggcaatcctc

SEQ ID NO: 629946 - DNA, 75 bp, synthetic construct
  source 1..75: mol_type = other DNA
tgttattccggcggtggcattctgcggcgctaaacatgagcgggagaataacgatatttattcgtcatgccgcct

SEQ ID NO: 629947 - DNA, 75 bp, synthetic construct
  source 1..75: mol_type = other DNA
ttcagtctgcgactgaccagcggaagcggagaagacagccgtctggtgaccaccgccatcactgcggatacagag

SEQ ID NO: 629948 - DNA, 75 bp, synthetic construct
  source 1..75: mol_type = other DNA
tttgagttctggttttcggagacaaaaatcgcagatacatctcaggtggaaacctctgcccgttatctggggacc

SEQ ID NO: 629949 - DNA, 75 bp, synthetic construct
  source 1..75: mol_type = other DNA
gaacggtggccatcagggaccattaccgtcaggatttatgacgatcagccgtttgaccggcagattgttattccg

SEQ ID NO: 629950 - DNA, 75 bp, synthetic construct
  source 1..75: mol_type = other DNA
tccgcgaaccagattgaaggcgatctcgttaaaacagtgggcaaagctttcccccgggactcccgtgcaccggag

SEQ ID NO: 629951 - DNA, 75 bp, synthetic construct
  source 1..75: mol_type = other DNA
gcgactgtttgcggtgagcatcacgtcatccggcaatcctccgacgttttccctgacgccggatggcaggctgac

SEQ ID NO: 629952 - DNA, 75 bp, synthetic construct
  source 1..75: mol_type = other DNA
gatatgcctgccggacacggccatgtcaccctgactttcaatgtttcttcatatggtgctaataactggacgcca

SEQ ID NO: 629953 - DNA, 75 bp, synthetic construct
  source 1..75: mol_type = other DNA
aatggtgtcacgccgccagcagtgcagcacctgactgccgaagtcaccgcagacagcggggagtatcaggtactg

SEQ ID NO: 629954 - DNA, 75 bp, synthetic construct
  source 1..75: mol_type = other DNA
tttcagataacggcggtcccgaaactggctgtatatgacccgacggtacagtttgaattctggttttcggaacag

SEQ ID NO: 629955 - DNA, 75 bp, synthetic construct
  source 1..75: mol_type = other DNA
ccgcacattaagcccgggaaggatttctggttttacgtgcgcagcgtcaacctggtggggaaatctgcttttgtg

SEQ ID NO: 629956 - DNA, 75 bp, synthetic construct
  source 1..75: mol_type = other DNA
acatcgacggtgaacctgattaacggcagcggtaagccggtgcgcgtggacatcaccgcacaccccgccccggac

SEQ ID NO: 629957 - DNA, 75 bp, synthetic construct
  source 1..75: mol_type = other DNA
ggacgcatcctgtccatggatgccgccagccgtaccctgacgctggaccgtgaggtgacactgccggaagcaggg

SEQ ID NO: 629958 - DNA, 75 bp, synthetic construct
  source 1..75: mol_type = other DNA
ccggaacggtggccatcagggaccattaccgtcagggtttatgacgatcagccgtttgaccggcagattgttatt

SEQ ID NO: 629959 - DNA, 75 bp, synthetic construct
  source 1..75: mol_type = other DNA
atacagcgtgtgggggctgaagctgccgacactgcgtcagcgcctgtttcgctgtgtgagtatccgtgagaacga

SEQ ID NO: 629960 - DNA, 75 bp, synthetic construct
  source 1..75: mol_type = other DNA
ccggaaaaacgcacctacagcggtatctgggacggtagtctgaaaccggcatacagcaataacccggcctggtgc

SEQ ID NO: 629961 - DNA, 75 bp, synthetic construct
  source 1..75: mol_type = other DNA
gctacgggcgcaacctgctgaagatggatgcgttcggctgcaccagtcgcggtcaggcccaccgtgccgggctgt

SEQ ID NO: 629962 - DNA, 75 bp, synthetic construct
  source 1..75: mol_type = other DNA
cagccagtggagcgtctccggcagccggattaagccggggacggatttctggttttatgtgcgcagcgtcaacct

SEQ ID NO: 629963 - DNA, 75 bp, synthetic construct
  source 1..75: mol_type = other DNA
ccggctcactgaacagcgtcatcccgccggcagtgcagcacctcacggtggaggtgagtgcctcagacggccagt

SEQ ID NO: 629964 - DNA, 75 bp, synthetic construct
  source 1..75: mol_type = other DNA
tacgggcgcaatctgctgaagatggacgcgttcggctgtaccagccgcggtcaggcccaccgtgccggactgtgg

SEQ ID NO: 629965 - DNA, 75 bp, synthetic construct
  source 1..75: mol_type = other DNA
gaaggaccggcacacggcggtggaggtgaattacaccgacccgcagaacggctggcagacttccacggaactggt

SEQ ID NO: 629966 - DNA, 75 bp, synthetic construct
  source 1..75: mol_type = other DNA
cagcagatgcaggacggacgcctttatatcgcgggtattggtgccggtattgagaacacccctgacggcatgcag

SEQ ID NO: 629967 - DNA, 75 bp, synthetic construct
  source 1..75: mol_type = other DNA
ggaccattaccgtcagggtttatgacgatcagccgtttgaccggcagattgttattccagcggtggctttcagcg

SEQ ID NO: 629968 - DNA, 75 bp, synthetic construct
  source 1..75: mol_type = other DNA
aaaacagtgggcaaagctttcccccgggactcccgtgcaccggaacggtggccatcagggaccattaccgtcagg

SEQ ID NO: 629969 - DNA, 75 bp, synthetic construct
  source 1..75: mol_type = other DNA
ggattcgacaggcagatcatcattccgccggtactgttccggggggcgagacatgaacaccagtccagcaaagat

SEQ ID NO: 629970 - DNA, 75 bp, synthetic construct
  source 1..75: mol_type = other DNA
aggtcatgataccgccagtgttattccgcggtggtaagcatgagaatttcaacagtaataaccaacagtcatact

SEQ ID NO: 629971 - DNA, 75 bp, synthetic construct
  source 1..75: mol_type = other DNA
agcatgagaatttcaacagtaataaccaacagtcatactggtattcaacctgccggttaagagtgacccgcaatg

SEQ ID NO: 629972 - DNA, 75 bp, synthetic construct
  source 1..75: mol_type = other DNA
accgatgtttgttggtcagggtgatcagatattcatgaatgaagtgttcctgaaatatctgacggctcccaccat

SEQ ID NO: 629973 - DNA, 75 bp, synthetic construct
  source 1..75: mol_type = other DNA
tttgaagttcagtcgagcggcagtggagagcccagaacatggatcagtgatttaatggtctcggtcacgaaaaaa

SEQ ID NO: 629974 - DNA, 75 bp, synthetic construct
  source 1..75: mol_type = other DNA
caatggtcaggagatttttaatcagtccacgacggatgctcagggcgtattttcctcagttatagatatgcctgc

SEQ ID NO: 629975 - DNA, 75 bp, synthetic construct
  source 1..75: mol_type = other DNA
tcagttatagatatgcctgccggacaggggacgctgacactgacattcaccgtatcttcatcaggagcgaataac

SEQ ID NO: 629976 - DNA, 75 bp, synthetic construct
  source 1..75: mol_type = other DNA
atgacgatcagccgtttaaccggcagattgttattccggcggtggctttcagcggtgccagacatgagcgggaga

SEQ ID NO: 629977 - DNA, 63 bp, synthetic construct
  source 1..63: mol_type = other DNA
atgggtaaaggaagcagcaaggggcataccccgcgcgaagcgaaggacaacctgaagtccacg

SEQ ID NO: 629978 - DNA, 75 bp, synthetic construct
  source 1..75: mol_type = other DNA
atacagcaacaacccggcctggtgcctgtgggacatgctgactcacccgcgctacgggatgggaaaacgcctggg

SEQ ID NO: 629979 - DNA, 75 bp, synthetic construct
  source 1..75: mol_type = other DNA
gtgagagcattgttgactcctgaaattgccccgcgaatggggattgtattgttcagacccggttcagagctgatg

SEQ ID NO: 629980 - DNA, 75 bp, synthetic construct
  source 1..75: mol_type = other DNA
taggaaaactgcatctggctcaggggctatgggagctgatagacaacagccagcttgcggatgagatggcggaga

SEQ ID NO: 629981 - DNA, 75 bp, synthetic construct
  source 1..75: mol_type = other DNA
cgctggaggaccagagcgccaccatacagcagatacagcgcgtgcagaaggacacaaatgatgaccttgctgcac

SEQ ID NO: 629982 - DNA, 75 bp, synthetic construct
  source 1..75: mol_type = other DNA
ccgtgcaccggaacggtggccatcagggaccattaccgtcaggatttatgacgatcaaccgtttgaccgacagat

SEQ ID NO: 629983 - DNA, 75 bp, synthetic construct
  source 1..75: mol_type = other DNA
ccatcactgcacaccccgcgccggaccggatacaggtcagcaccctgcctgatggtgtggagacatacggtgtat

SEQ ID NO: 629984 - DNA, 75 bp, synthetic construct
  source 1..75: mol_type = other DNA
aaaggcgagatagggaaaacccatctggctcaggagctgtggacgcagattgataacggtcagcttgcgcctgac

SEQ ID NO: 629985 - DNA, 75 bp, synthetic construct
  source 1..75: mol_type = other DNA
ggtgacatcattgaaatctgtgataacgactatgccgggaccatgaccggcggacgtgtcctgtccatcgatgcc

SEQ ID NO: 629986 - DNA, 75 bp, synthetic construct
  source 1..75: mol_type = other DNA
cctggctggtgaatggatggtacccgacagcgagtatcagcgatctgctggttgtcgtgatgaagaagtccacgg

SEQ ID NO: 629987 - DNA, 75 bp, synthetic construct
  source 1..75: mol_type = other DNA
ggattcccgtgcaccggagcggtggccatcagggaccattaccgtcaggttttatgacgatcagccgtttgaccg

SEQ ID NO: 629988 - DNA, 75 bp, synthetic construct
  source 1..75: mol_type = other DNA
cggagcggtggccatcaggaaccattaccgtcagggtttatgacgatcagccgtttgaccggcagattgttattc

SEQ ID NO: 629989 - DNA, 75 bp, synthetic construct
  source 1..75: mol_type = other DNA
cgggagaataacgatatttattcgtcatgccgcctgatagtacggaaaaacggtgctgaaatttataaccgtacc

SEQ ID NO: 629990 - DNA, 75 bp, synthetic construct
  source 1..75: mol_type = other DNA
tagatatgccggcaggacggggccatgtcaccctgactttcaatgtttcttcatatggtgctaataagtggacgc

SEQ ID NO: 629991 - DNA, 75 bp, synthetic construct
  source 1..75: mol_type = other DNA
atgggcaaaggtggcggcaaggcgcacacaccgcgtgaggcgaaagacaatctcaaatccacgcagatgatgagt

SEQ ID NO: 629992 - DNA, 75 bp, synthetic construct
  source 1..75: mol_type = other DNA
aatgcgaactccgggacgctcaacaacgtcacgattaatgagaactgtcagattaaggggaaactgtcagccaac

SEQ ID NO: 629993 - DNA, 75 bp, synthetic construct
  source 1..75: mol_type = other DNA
actggtatcccacagcaagtatcagcgatttgctggttgtggtgatgaagaaatccacagcaggtatcagtatca

SEQ ID NO: 629994 - DNA, 75 bp, synthetic construct
  source 1..75: mol_type = other DNA
acagatgaaggacggacgcctttatattgcgggtatcggtgccggtattgagaatacgccagcaggaatgcagag

SEQ ID NO: 629995 - DNA, 75 bp, synthetic construct
  source 1..75: mol_type = other DNA
attaccccggagaacggcaacaccacgccgctgtttgtggcgcaggggaatcagctgttcatgaacgacgtgttc

SEQ ID NO: 629996 - DNA, 75 bp, synthetic construct
  source 1..75: mol_type = other DNA
ttggtgcagggattgaggatactgatggccagccactgagcaacatactgctgctggctgaccgtatcgcgatga

SEQ ID NO: 629997 - DNA, 75 bp, synthetic construct
  source 1..75: mol_type = other DNA
aatgaagtgttcctgaaacgcctgacggcccccaccattaccagcggtggaaatccaccggcattttccctgaca

SEQ ID NO: 629998 - DNA, 75 bp, synthetic construct
  source 1..75: mol_type = other DNA
ccgctgacgggcacggacggtaatcccgtgatacacggtatgactgcggtctggcgtgccggggagcaggagcag

SEQ ID NO: 629999 - DNA, 75 bp, synthetic construct
  source 1..75: mol_type = other DNA
ggacgcaacctgctgaagatggatgcgttcggctgcaccagtcgcggtcaggcccaccgtgccgggctgtgggtg

SEQ ID NO: 630000 - DNA, 75 bp, synthetic construct
  source 1..75: mol_type = other DNA
tggacagtgaggggaataccaacatctccggcgtcacggtggtgttccgggccggtgagcaggagcagacaccgc

SEQ ID NO: 630001 - DNA, 75 bp, synthetic construct
  source 1..75: mol_type = other DNA
ctggaggcgacccaggtcagaggagatttcgttaaagctgtatcaaaagccttcccgaaaaaagtcggtacgtgg

SEQ ID NO: 630002 - DNA, 75 bp, synthetic construct
  source 1..75: mol_type = other DNA
accacagcccgctaccttggcacggggctgtactggatagccgccagtatcaatatcaaaccgggccatgattat

SEQ ID NO: 630003 - DNA, 75 bp, synthetic construct
  source 1..75: mol_type = other DNA
cgtgagtttcatgcttcgcctgaccgtggccgcggatgacggcagtgagcggctggtcagcacagcccggacggc

SEQ ID NO: 630004 - DNA, 75 bp, synthetic construct
  source 1..75: mol_type = other DNA
gagtgatgatgcatcaggctatctggattttttcaaaggcgagatagggaaaacccatctggctcaggagctgtg

SEQ ID NO: 630005 - DNA, 75 bp, synthetic construct
  source 1..75: mol_type = other DNA
ttcctcgccagaaggtagcgatcatctatgatgttggtgtatcgacactgtataagaagtttccggccggagata

SEQ ID NO: 630006 - DNA, 75 bp, synthetic construct
  source 1..75: mol_type = other DNA
aatggttgttgattttcccacaaaaccgctgaattttaaggcgaccggaggatttggttcagttcttctggaatg

SEQ ID NO: 630007 - DNA, 75 bp, synthetic construct
  source 1..75: mol_type = other DNA
ggatgtgagcggatttttgaggataaaatcagtggcactaagtccgacagaccggggctgaaaaaactactcagg

SEQ ID NO: 630008 - DNA, 75 bp, synthetic construct
  source 1..75: mol_type = other DNA
aaatcagtggcactaagtccgacagaccggggctgaaaaaactgctcaggatactatcggcaggagacacgctgg

SEQ ID NO: 630009 - DNA, 75 bp, synthetic construct
  source 1..75: mol_type = other DNA
tgcggggattgaggatgctgatggccagacgctgagcaatattctgctgcaggcggaccgtatcgcgatgattaa

SEQ ID NO: 630010 - DNA, 75 bp, synthetic construct
  source 1..75: mol_type = other DNA
aaacgcgcaggggcaggctgtaaaggatgctgcaattaagacaaccgaagttgtggggactctcagggaagaaac

SEQ ID NO: 630011 - DNA, 75 bp, synthetic construct
  source 1..75: mol_type = other DNA
acttcgccagttatccggaatgccgttattcagaacggaaactttcaggttgattctcagggtaacctgaatatt

SEQ ID NO: 630012 - DNA, 75 bp, synthetic construct
  source 1..75: mol_type = other DNA
tggcagaacgacctgaccagctgtggggggctgattttacttacgtcagcacatggcagggcttcgtctatgtgg

SEQ ID NO: 630013 - DNA, 75 bp, synthetic construct
  source 1..75: mol_type = other DNA
gaagagagagatacagcgcgtatacgatgaaaatcaccaggtatacggtgtgcgtaaagtctggcgtcagttgtt

SEQ ID NO: 630014 - DNA, 75 bp, synthetic construct
  source 1..75: mol_type = other DNA
atgttagtcggttatgtgcgcgtatcaacaagtgagcaaaacacagcgctgcagcgtgatgcactggaacgttca

SEQ ID NO: 630015 - DNA, 75 bp, synthetic construct
  source 1..75: mol_type = other DNA
ggaggattggcgggcgtcgcccaaagctatctgatgatcagtgggcgcaagcggggcggttgattgctgccggtg

SEQ ID NO: 630016 - DNA, 75 bp, synthetic construct
  source 1..75: mol_type = other DNA
tagtattgatacatcaactcctatggggcgctttttctttcatgttatgggggcgctagctgaaatggagcgtga

SEQ ID NO: 630017 - DNA, 75 bp, synthetic construct
  source 1..75: mol_type = other DNA
caacaaatgaccagaacaccgatttgcaacgtaatgcactgaactgtgcgggatgtgagcggatttttgaggata

SEQ ID NO: 630018 - DNA, 75 bp, synthetic construct
  source 1..75: mol_type = other DNA
agataagcggtacaaagtccgaaaggcctggactgaaaaaactgctcaggacattatcggcaggtgacactctgg

SEQ ID NO: 630019 - DNA, 75 bp, synthetic construct
  source 1..75: mol_type = other DNA
caacaaaccaccaggatactgaattgcaactaacggcgctcaagtcagcgggttgtgagaaaatttttgaagagc

SEQ ID NO: 630020 - DNA, 75 bp, synthetic construct
  source 1..75: mol_type = other DNA
gtgttaatttccgtagtctgacagacagtattgacacatcaacacccatggggcgtttcttttttcacgtcatgg

SEQ ID NO: 630021 - DNA, 75 bp, synthetic construct
  source 1..75: mol_type = other DNA
gcagcgtaacgcgctggagtgcgcaggatgtgagctgatttttgaggataaaatcagcggcactaagtccgaccg

SEQ ID NO: 630022 - DNA, 75 bp, synthetic construct
  source 1..75: mol_type = other DNA
atccgcgtcgcagttgtttgtctttgacccgaacgatcctgataacacggcctatccgtttgcagtttctggcgg

SEQ ID NO: 630023 - DNA, 75 bp, synthetic construct
  source 1..75: mol_type = other DNA
gcgtgaatttccgaagcctgactgacagtattgataccagtacccctatgggccgtttcttttttcatgtcatgg

SEQ ID NO: 630024 - DNA, 75 bp, synthetic construct
  source 1..75: mol_type = other DNA
ggacttgctgccgccagaaataaaggccgtattggtgggcgaccacctaaactaaccaaagcggaatgggagcag

SEQ ID NO: 630025 - DNA, 75 bp, synthetic construct
  source 1..75: mol_type = other DNA
gtgccctggctgaaatggaacgagaactaatcatcgagcgaacgatggctggacttgctgccgccagaaataaag

SEQ ID NO: 630026 - DNA, 75 bp, synthetic construct
  source 1..75: mol_type = other DNA
tggtctggaaactggaccgactggggcgcagtatgcggcatcttgtcgtgctggtggaagagttgcgcgaacgtg

SEQ ID NO: 630027 - DNA, 75 bp, synthetic construct
  source 1..75: mol_type = other DNA
gttactctgatagaagagttgcgccagcgcggcgtgaatttcagaagtctgactgacagtattgataccagtacc

SEQ ID NO: 630028 - DNA, 75 bp, synthetic construct
  source 1..75: mol_type = other DNA
gccggacgactaattgcatcaggagctcctcgccagaaggtggcgattatctatgatgttggtgtgtcaactttg

SEQ ID NO: 630029 - DNA, 75 bp, synthetic construct
  source 1..75: mol_type = other DNA
caacaaatgaacaaaacacggcactgcagcgtgatgcgctggagcggtcaggatgtgaactgatatttgaggaca

SEQ ID NO: 630030 - DNA, 75 bp, synthetic construct
  source 1..75: mol_type = other DNA
aggtatcagagtggccagatgcactgtggcacgtctcatggcagttatgggacttaccggtgttctccggggtaa

SEQ ID NO: 630031 - DNA, 75 bp, synthetic construct
  source 1..75: mol_type = other DNA
tacaaagcggaggtaatacaccgtaagagctggaaaaaccgtgcagaagtagaactggccacactcacgtgggtg

SEQ ID NO: 630032 - DNA, 75 bp, synthetic construct
  source 1..75: mol_type = other DNA
tagccgtcgcatccgcgcgctggaacaggcgattggcgttgaattgtttaaccgccaggtgacacctctgcaact

SEQ ID NO: 630033 - DNA, 75 bp, synthetic construct
  source 1..75: mol_type = other DNA
tcgcagatccgccatctgttgcaacagttagaaagcaacctggcagagctgcgtggcggcagcgattacgcgcaa

SEQ ID NO: 630034 - DNA, 75 bp, synthetic construct
  source 1..75: mol_type = other DNA
atcagggtagccagatgtacagtggcgcgcctcatggcggttatgggacttgccgatgttctccggggtaaaaag

SEQ ID NO: 630035 - DNA, 75 bp, synthetic construct
  source 1..75: mol_type = other DNA
gttcggggcagaacgtcctgaccagttgtgggtggctgattttacttacggtgtgcccggagttcagggcgggca

SEQ ID NO: 630036 - DNA, 75 bp, synthetic construct
  source 1..75: mol_type = other DNA
ccgcaggcgaccgcgtaaaccgtcagttcggggcagaacgtcctgaccagttgtgggtggctgattttacttacg

SEQ ID NO: 630037 - DNA, 75 bp, synthetic construct
  source 1..75: mol_type = other DNA
agcgactaaaagaagccggattactggcatcaacagggagtacaggcgactcgtatgacaacgcgatggctgaga

SEQ ID NO: 630038 - DNA, 75 bp, synthetic construct
  source 1..75: mol_type = other DNA
agaagtggaactggccacactcacgtgggtggactggtataacaatcgacgattgctggaaaggctgggccatat

SEQ ID NO: 630039 - DNA, 75 bp, synthetic construct
  source 1..75: mol_type = other DNA
ccggatacatcgtggggtggcgggtctcatcgtctatggaaacgacattcgtgctggatgcactggagcaggcgt

SEQ ID NO: 630040 - DNA, 75 bp, synthetic construct
  source 1..75: mol_type = other DNA
gctggataagctgcgtgagcagtacggggtcagaccggtatgcagtgaactgcatattgccccgtcaacgtatta

SEQ ID NO: 630041 - DNA, 75 bp, synthetic construct
  source 1..75: mol_type = other DNA
agtgataaaggttctcagtatgtatcgctggcctacacacagcggcttaaggaagccggattactggcatcaaca

SEQ ID NO: 630042 - DNA, 75 bp, synthetic construct
  source 1..75: mol_type = other DNA
ctcttttttcgccgtagtaaaggcgtgacgttaactgatgccggtgaaagtttttatcagcacgccagtctaatt

SEQ ID NO: 630043 - DNA, 75 bp, synthetic construct
  source 1..75: mol_type = other DNA
tatgggacttgccggtgttctccgtggtaaaaaggtccgtactaccgtcagccggaaagccgtttccgcaggcga

SEQ ID NO: 630044 - DNA, 75 bp, synthetic construct
  source 1..75: mol_type = other DNA
atgaaaatcacaaggtatacggtgtgcgtaaagtctggcgtcagttgttacgggaaggcatcagagtggccagat

SEQ ID NO: 630045 - DNA, 75 bp, synthetic construct
  source 1..75: mol_type = other DNA
aaggtatcagagtggccagatgcactgtggcacgtctcatggcggttatgggacttgccggtgttctccggggta

SEQ ID NO: 630046 - DNA, 75 bp, synthetic construct
  source 1..75: mol_type = other DNA
cacaatccaccacagtgataaaggttctcagtatgtatcgctggcctacacgcagcggcttaaggaagccggttt

SEQ ID NO: 630047 - DNA, 75 bp, synthetic construct
  source 1..75: mol_type = other DNA
tatggaaacgacattcgtgctggatgcgctggagcaggcgttgtgggcccgtcgtccgtctggcaccatccatca

SEQ ID NO: 630048 - DNA, 75 bp, synthetic construct
  source 1..75: mol_type = other DNA
tctgcgggactgtatattttcgccaatcgtaaagcctacgcctggcgctatgtttatccaggaatggccgggatg

SEQ ID NO: 630049 - DNA, 75 bp, synthetic construct
  source 1..75: mol_type = other DNA
tgattttcaaagggttgtttaaccagagcttcggtgaaatcaacatgatgttgagcgcgctgtttggcgtgaagc

SEQ ID NO: 630050 - DNA, 75 bp, synthetic construct
  source 1..75: mol_type = other DNA
atgccactgctggataagctgcgtaagctgtacggggtcggaccagtatgcagtgaactgcatattgccccgtca

SEQ ID NO: 630051 - DNA, 75 bp, synthetic construct
  source 1..75: mol_type = other DNA
ggtctcatcgtcgatgaaaacgacgttcgtgctggatgcactggagcaggcgctgtgggcccgtcgcccgtcggg

SEQ ID NO: 630052 - DNA, 75 bp, synthetic construct
  source 1..75: mol_type = other DNA
atcatcctgataaacgcagtgcccgtgcgcagcgcgatgactggctgaagagagagatacggcgcgtatacgatg

SEQ ID NO: 630053 - DNA, 75 bp, synthetic construct
  source 1..75: mol_type = other DNA
gacatcatccggataaacgcagtgcccgtgcgcggcgcgatgactggctgaagaaagagatacagcgcgtatacg

SEQ ID NO: 630054 - DNA, 75 bp, synthetic construct
  source 1..75: mol_type = other DNA
ctgttgctttaggtgtctttattgttagcgctcctgccttttcgcatggtcatcactcacacggcaaacccttaa

SEQ ID NO: 630055 - DNA, 75 bp, synthetic construct
  source 1..75: mol_type = other DNA
gtgtctggaaatataggggcaaatccagtttttgatgatgccaatgtacaaaaccgaacgctcagtgactgggat

SEQ ID NO: 630056 - DNA, 75 bp, synthetic construct
  source 1..75: mol_type = other DNA
aatcaagacagtgtattgcactgatttttgatgtgggcgtttctaccatttatagaaaatttccggcgaatgaga

SEQ ID NO: 630057 - DNA, 75 bp, synthetic construct
  source 1..75: mol_type = other DNA
ggactggaagctgctcgcgcacagggacgaattggtggacgtcgtcccaaacttacaccagaacaatgggaacag

SEQ ID NO: 630058 - DNA, 75 bp, synthetic construct
  source 1..75: mol_type = other DNA
gatggacaggatgagtttaaaggcgggaatagccatctgatcaatactcatgagggatttgatccgactcctgtc

SEQ ID NO: 630059 - DNA, 75 bp, synthetic construct
  source 1..75: mol_type = other DNA
cagcatagacacatcttctccaatggggcgttttttcttccacgtgatgggtgccctggctgaaatggaacgtga

SEQ ID NO: 630060 - DNA, 75 bp, synthetic construct
  source 1..75: mol_type = other DNA
ctacgatgtggctctgtcaactttgtataaaaaacaccccgccaaacgaacgtgcatagaaagtaacgctcaaac

SEQ ID NO: 630061 - DNA, 75 bp, synthetic construct
  source 1..75: mol_type = other DNA
ggacttgctgccgccagaaataaaggccgtattggtgggcgaccacctaaactaaccaaagcagagtgggagcag

SEQ ID NO: 630062 - DNA, 75 bp, synthetic construct
  source 1..75: mol_type = other DNA
aaacgcgccagcgtgtggcaataatttacgacgttggagtatcgacactataccgtaaattcccggtaggcagtg

SEQ ID NO: 630063 - DNA, 75 bp, synthetic construct
  source 1..75: mol_type = other DNA
ggctggtggcgatgatggacggctggaaaggggtgaaagagacgtggccagcggcgctggttgcgggtggtagct

SEQ ID NO: 630064 - DNA, 75 bp, synthetic construct
  source 1..75: mol_type = other DNA
gaatatagtctggggcaaatcatacgcgcctggtcaccgtttttaatcttaacggtgctggtcaccatctggacg

SEQ ID NO: 630065 - DNA, 75 bp, synthetic construct
  source 1..75: mol_type = other DNA
caacaaatgagcagaacacagcattactgataaatgcgctcgagtgcgcaggaggtgagctgatttttgaagaca

SEQ ID NO: 630066 - DNA, 75 bp, synthetic construct
  source 1..75: mol_type = other DNA
gccgggcggttgctggctgcgggggaatctcgtcaacgtgtggcgctgatttttgatattggcctgtccacgctc

SEQ ID NO: 630067 - DNA, 75 bp, synthetic construct
  source 1..75: mol_type = other DNA
gcactgatttttgatgtgggtgtttctaccatttatcgaaaatttccggcaaataagagcaatgaatctccctga

SEQ ID NO: 630068 - DNA, 75 bp, synthetic construct
  source 1..75: mol_type = other DNA
ttctcccaaaccaacgtttatgaaaatgcagagataacggctaactggcatcatctccggtttttattcaggggg

SEQ ID NO: 630069 - DNA, 75 bp, synthetic construct
  source 1..75: mol_type = other DNA
gtattaccgtcattgtgacggcactggtaacgaggaaagacctctgcgaggtacgaatccgaaccggccagacgg

SEQ ID NO: 630070 - DNA, 75 bp, synthetic construct
  source 1..75: mol_type = other DNA
tcgccctgatcgtcatctgtattaccgttgttgtgacggcactggtaacgaggaaagacctctgcgaggtaggaa

SEQ ID NO: 630071 - DNA, 75 bp, synthetic construct
  source 1..75: mol_type = other DNA
gcgatgttaatcgccctgatcgtcatctgtttaaccgtcatagtgacggcactggtaacgaggaaagacctctgc

SEQ ID NO: 630072 - DNA, 75 bp, synthetic construct
  source 1..75: mol_type = other DNA
atgaagcagcaaaaagcgatgttaatcgctctgatcgtcatctgtttaaccgtcatagtgacggcactggtaacg

SEQ ID NO: 630073 - DNA, 75 bp, synthetic construct
  source 1..75: mol_type = other DNA
atgttagtcgccctgattgtcatctgtttaaccgtcatagtgacggcactggtaacgagtaaagacctctgcgag

SEQ ID NO: 630074 - DNA, 75 bp, synthetic construct
  source 1..75: mol_type = other DNA
cttacgtgcctaaaggcaaggagaagcaggctatgaagcagcaaaaggcgatgttaatcgccctgatcgtcatct

SEQ ID NO: 630075 - DNA, 75 bp, synthetic construct
  source 1..75: mol_type = other DNA
ctggtaacaaggaaagacttctgcgaggtacaaatccgaaccggtcagacggaggtcgctgtcttcacagcttac

SEQ ID NO: 630076 - DNA, 75 bp, synthetic construct
  source 1..75: mol_type = other DNA
aaatcagcggcacgaagtccgaccgaccgggactgaaaaaactgctcagaacattatcagcaggtgacactctgg

SEQ ID NO: 630077 - DNA, 75 bp, synthetic construct
  source 1..75: mol_type = other DNA
ctcagaacattatcagcaggtgacactctggtagtctggaagctggaccggctggggcgtagtatgcggcatctg

SEQ ID NO: 630078 - DNA, 75 bp, synthetic construct
  source 1..75: mol_type = other DNA
aaaaggcgatgttaatcgccctgatcgtcatctgtttaaccgtcatagtgacggcactggtaacgaggaaagacc

SEQ ID NO: 630079 - DNA, 75 bp, synthetic construct
  source 1..75: mol_type = other DNA
cttacgtgccggaaggcaaggagaagcaggctatgaagcagcaaaaggcgaagttaatcgccctgatcgtcatct

SEQ ID NO: 630080 - DNA, 75 bp, synthetic construct
  source 1..75: mol_type = other DNA
atgaagcagcaaaaggcgatgttaatcgctctgatcgtcatctgtttaaccgtcatagtgacagcactggtaacg

SEQ ID NO: 630081 - DNA, 75 bp, synthetic construct
  source 1..75: mol_type = other DNA
atattgattgcgatattcgcctttaaaatgccgattgatatggcatttgctgctgcgggatatggttttatttat

SEQ ID NO: 630082 - DNA, 75 bp, synthetic construct
  source 1..75: mol_type = other DNA
gatctcttacgatcaggaaagcggttttattaaaaatatggcgattattgagtccaacaataatcagtatctggc

SEQ ID NO: 630083 - DNA, 75 bp, synthetic construct
  source 1..75: mol_type = other DNA
gaggcgttgtgccgttgggtgtctgcggagcgggggatcatttcaccgctgaagttcattaccattgctgaagat

SEQ ID NO: 630084 - DNA, 75 bp, synthetic construct
  source 1..75: mol_type = other DNA
gtttatttaatgaccactcgtgtgttccgtcggcaattttctgaaatgaccgagctggttaatacgctggcgttt

SEQ ID NO: 630085 - DNA, 75 bp, synthetic construct
  source 1..75: mol_type = other DNA
gcgcagtatgcggcatctcgttacgctgatagaagatctgcgccagcgtggcgtgaatttccgaagcctgactga

SEQ ID NO: 630086 - DNA, 75 bp, synthetic construct
  source 1..75: mol_type = other DNA
ttacggcattggtatatcgacgatttatcgttaccaccccgcaggagaatcaagcggaacaattgagaagagtca

SEQ ID NO: 630087 - DNA, 75 bp, synthetic construct
  source 1..75: mol_type = other DNA
aaacgattttgacagcagctttggctaccgcaatctgcgcatccataagtctgccatttgtgaacctttgcaggg

SEQ ID NO: 630088 - DNA, 75 bp, synthetic construct
  source 1..75: mol_type = other DNA
actccgggaaattgaagaaaacatctggattgcccgtaatattcgccatgcaatgaaaaagggcgagctgttttt

SEQ ID NO: 630089 - DNA, 75 bp, synthetic construct
  source 1..75: mol_type = other DNA
gctgcgatatcgtgacattcaatgccgatctctatttacttctgtgccgggaaaatgtacagacgtttacccgta

SEQ ID NO: 630090 - DNA, 75 bp, synthetic construct
  source 1..75: mol_type = other DNA
tagccgctttgaacttattcagaaaaacgttggctatttctttaaagatattgaacgttcggccctgacattaaa

SEQ ID NO: 630091 - DNA, 75 bp, synthetic construct
  source 1..75: mol_type = other DNA
tgatgcgaaactcaacgaaatagaagagaatatctggattgcgcgtaatattcgccatgcaggtaatgactccaa

SEQ ID NO: 630092 - DNA, 75 bp, synthetic construct
  source 1..75: mol_type = other DNA
taaaatcgtcaggaaattgtgtcagcgaattgccgagaaatatgcacaatgctgcgatatcgtgacattcaatgc

SEQ ID NO: 630093 - DNA, 75 bp, synthetic construct
  source 1..75: mol_type = other DNA
cagtagctttggctaccgcaatctgcgtatacacaaatctgccatttgtgaacctctgaagggcgaaaatgcctg

SEQ ID NO: 630094 - DNA, 75 bp, synthetic construct
  source 1..75: mol_type = other DNA
gggcttgctgcagctcgcgccaaaggcagagtaggtggacgccgtcctaagttgaccaccgaacagtgggcacag

SEQ ID NO: 630095 - DNA, 75 bp, synthetic construct
  source 1..75: mol_type = other DNA
atcaatgcccaggttgctggcgttgagcagcgtctgaaagatctggttaaccaggatggcggcgaaaactgggcg

SEQ ID NO: 630096 - DNA, 75 bp, synthetic construct
  source 1..75: mol_type = other DNA
gcgtcacctcggcgagaaaaaactgcatgaacgtctgccgttcatctgcgaactggcgaaagcgtacgttggcgt

SEQ ID NO: 630097 - DNA, 75 bp, synthetic construct
  source 1..75: mol_type = other DNA
ttcgccgtcggtgaatgttcctctgtaggtctgcacggtgcaaaccgtctgggatccaactcactggcagaactg

SEQ ID NO: 630098 - DNA, 75 bp, synthetic construct
  source 1..75: mol_type = other DNA
atggttacctggactcaaatgtatatgccgatgggaggactggggctatccgctctggtcgccttaattccaata

SEQ ID NO: 630099 - DNA, 75 bp, synthetic construct
  source 1..75: mol_type = other DNA
ttcctcgccagaaggtagcgatcatctatgatgttggcgtatcgactttgtataagaagtttccagtcggagata

SEQ ID NO: 630100 - DNA, 75 bp, synthetic construct
  source 1..75: mol_type = other DNA
tgccggtaatggcaacgatgcagcaatcaatgctcaggttgctggcgttgaacagcgcctgaaagatctggttaa

SEQ ID NO: 630101 - DNA, 75 bp, synthetic construct
  source 1..75: mol_type = other DNA
ggccgtttcttttttcatgtcatgggtgccctggctgaaatggaacgcgaactgatagttgaacgtaccagggca

SEQ ID NO: 630102 - DNA, 75 bp, synthetic construct
  source 1..75: mol_type = other DNA
gataaaatcagtggcaccaagtccgacagaccggggctgaaaaagctgctcaggacactatcggcaggagacacg

SEQ ID NO: 630103 - DNA, 75 bp, synthetic construct
  source 1..75: mol_type = other DNA
ttcctcgccagaaggtggcgattatctatgatgttggtgtgtcaactttgtataagaggtttcctgcagaggata

SEQ ID NO: 630104 - DNA, 75 bp, synthetic construct
  source 1..75: mol_type = other DNA
gaaggcggtattctggttaacaaaaatggctaccgttatctgcaagattacggcatgggcccggaaactccgctg

SEQ ID NO: 630105 - DNA, 75 bp, synthetic construct
  source 1..75: mol_type = other DNA
caacaaatgaccagaacacggaattgcagcgtaatgcgctggagtgtgcaggatgtgagctgatttttgaggata

SEQ ID NO: 630106 - DNA, 75 bp, synthetic construct
  source 1..75: mol_type = other DNA
ggttgtcaccgccgacaagttgcagcgagcgcgggagcacatcgccaacgggcttaatgtccgagaggccgctac

SEQ ID NO: 630107 - DNA, 75 bp, synthetic construct
  source 1..75: mol_type = other DNA
tgacgctctccatggcggcaatgctgagtccgcaggtcgatgtccgtttcgcaacgttatgccacgatctcggta

SEQ ID NO: 630108 - DNA, 75 bp, synthetic construct
  source 1..75: mol_type = other DNA
gcaacgttatgccacgatctcggtaaagggctgactccaccagaactgtggccgcgtcatcatggtcacggtccg

SEQ ID NO: 630109 - DNA, 75 bp, synthetic construct
  source 1..75: mol_type = other DNA
tgatgcgcgagatgacccacgcgggtgaactggaacacctgacgcccgaacgcgtgtggaaagaaactgaaagcg

SEQ ID NO: 630110 - DNA, 75 bp, synthetic construct
  source 1..75: mol_type = other DNA
tgtcgatgattaatgaattgcgtcagggagaattggatttcaccatcaatacctattatcagggaccgtacgacc

SEQ ID NO: 630111 - DNA, 75 bp, synthetic construct
  source 1..75: mol_type = other DNA
atgaaacagctcatagcctccatcttccatgaacaccggggatgttatgggtaccggcggatccattgtgagctt

SEQ ID NO: 630112 - DNA, 75 bp, synthetic construct
  source 1..75: mol_type = other DNA
gaaggagaaaaaccgctgctccacagtgatcaagggtggcattaccggataaaaagttatcaggctgccctagca

SEQ ID NO: 630113 - DNA, 75 bp, synthetic construct
  source 1..75: mol_type = other DNA
aaaaactgtacctgtccccgatacttgatttgtttaacggggaaatcgtggcgtgggaaactgcctgcaggccta

SEQ ID NO: 630114 - DNA, 75 bp, synthetic construct
  source 1..75: mol_type = other DNA
gcctgcaggcctacagaggagctggtgaagcgcatgttaaataaggggctggaaagccttgcagaaggagaaaaa

SEQ ID NO: 630115 - DNA, 75 bp, synthetic construct
  source 1..75: mol_type = other DNA
gactgctgatggcgcgggtggcggaacagtacggtaaaaacgagatggcgctcctgctgctggaagaactggata

SEQ ID NO: 630116 - DNA, 75 bp, synthetic construct
  source 1..75: mol_type = other DNA
gtgcagagcatgtcacgcaagggcaactgtcttgataatgcggtaatggagaatttctttggtcacctgaaagaa

SEQ ID NO: 630117 - DNA, 75 bp, synthetic construct
  source 1..75: mol_type = other DNA
tggagtggctggcaggggaaaagatgctcgacagccttgcccgctacccggaagtggcaaaagaggattttgcga

SEQ ID NO: 630118 - DNA, 75 bp, synthetic construct
  source 1..75: mol_type = other DNA
gataccgccgcacagggaataacgctgacgcagtgggagccagaactgctgtttgaagtaaaagcccggcaactg

SEQ ID NO: 630119 - DNA, 75 bp, synthetic construct
  source 1..75: mol_type = other DNA
ggtgggcgtccaaccgcatatcgcccctggtgaagaataccaatataccagcggcgcaatcattgaaacgccgct

SEQ ID NO: 630120 - DNA, 75 bp, synthetic construct
  source 1..75: mol_type = other DNA
agcaaaatcattatcaaccgccaggagccgctgcaccaggtatggctggcaaccaaacagggcggctaccatttt

SEQ ID NO: 630121 - DNA, 75 bp, synthetic construct
  source 1..75: mol_type = other DNA
acctgcggaaaaagtcagtccggagatggcggagaagcttgccctgcttgagaaactgggcatcacgctggatga

SEQ ID NO: 630122 - DNA, 75 bp, synthetic construct
  source 1..75: mol_type = other DNA
cagacgggcaatggagcaattgcgtgagattggatatcttgattacactgagatccagcggggacggacaaaact

SEQ ID NO: 630123 - DNA, 75 bp, synthetic construct
  source 1..75: mol_type = other DNA
ctttgaaaacggcagcaaaatcattatcaaccgccaggaaccgctgcaccaggtatggctggcaaccaaacaagg

SEQ ID NO: 630124 - DNA, 75 bp, synthetic construct
  source 1..75: mol_type = other DNA
cggcttactatgatacggaaaaggatatcgtccagctgcaggccgatccacgcctgtttgagctctaccagtttg

SEQ ID NO: 630125 - DNA, 75 bp, synthetic construct
  source 1..75: mol_type = other DNA
cagcttactatgatacggaaaaggatatcgtccagctgcaggccgatccacggctgtttgagctctaccaatttg

SEQ ID NO: 630126 - DNA, 75 bp, synthetic construct
  source 1..75: mol_type = other DNA
atttgcagtcggctaaatccgcaatgcgcgatgtggtgagcaaagtgattgccgattgtggctgcgaggcagggc

SEQ ID NO: 630127 - DNA, 75 bp, synthetic construct
  source 1..75: mol_type = other DNA
caaagaggtggtggatttttgccatcgctttgatgtcagcgtcgaagcggagctggggcaacttggcggccagga

SEQ ID NO: 630128 - DNA, 75 bp, synthetic construct
  source 1..75: mol_type = other DNA
tcaacacaccatgaatgcctataaagcagcggtagaagagaaatatcgcttttttagttacggtgatgcgatgtt

SEQ ID NO: 630129 - DNA, 75 bp, synthetic construct
  source 1..75: mol_type = other DNA
atgatcgatgaaaatggcgttccattcagcatcgacattcctgtatttcgactctccgttccaatactcattcat

SEQ ID NO: 630130 - DNA, 75 bp, synthetic construct
  source 1..75: mol_type = other DNA
tggcccgtgctgagggattcgataaggttgagatcaccggcccccggctggatatggataacgatttcaagacct

SEQ ID NO: 630131 - DNA, 75 bp, synthetic construct
  source 1..75: mol_type = other DNA
gttgaactgccttttgtcgagtttgcaaaactgtgtggtataccttcaagccagtcatcacgccggcttcgtgag

SEQ ID NO: 630132 - DNA, 75 bp, synthetic construct
  source 1..75: mol_type = other DNA
atgccgctgattaacgcgctggaatcgcgtctggcgcagtcgggtgggatgaacgcggtggtgccgcaaaacagc

SEQ ID NO: 630133 - DNA, 75 bp, synthetic construct
  source 1..75: mol_type = other DNA
tcaaaccgctgcaccgcattaacccgctgcgtctgggctatattgccgagcgtgctggcggtttatttggcaaaa

SEQ ID NO: 630134 - DNA, 75 bp, synthetic construct
  source 1..75: mol_type = other DNA
gggcttgagacactggcttttaacgacggcacgccgtttgccgatgaagtgacgctgagctggatacagcagcag

SEQ ID NO: 630135 - DNA, 75 bp, synthetic construct
  source 1..75: mol_type = other DNA
ggcatggaggcactggtcccccagaacagcagcacccgggagcccgggcgtgaatcagctcccccggactcacca

SEQ ID NO: 630136 - DNA, 75 bp, synthetic construct
  source 1..75: mol_type = other DNA
tggatatgggatttgagccattgcaggtggcaaaactgcatgcgctggaaagcggtatccaggtcgagtacgtgc

SEQ ID NO: 630137 - DNA, 75 bp, synthetic construct
  source 1..75: mol_type = other DNA
accataacgtagaccacgaagagatcgctaaatttgaagccgtcgcctcccgctggtgggatctggaaggtgagt

SEQ ID NO: 630138 - DNA, 75 bp, synthetic construct
  source 1..75: mol_type = other DNA
aacccgatcactaattcctttaagctcggccccggcgttgatgtgaactatatgctgcatacgcagaataagtga

SEQ ID NO: 630139 - DNA, 75 bp, synthetic construct
  source 1..75: mol_type = other DNA
gccgccgcgttgaccgcccagggcttgcagccggtatggaaagactgggacagctatctgggacgcgcctcgcaa

SEQ ID NO: 630140 - DNA, 75 bp, synthetic construct
  source 1..75: mol_type = other DNA
gatgaacgccagttagtgcaaaccatctgcgccttccggctgcttgcaccggagattgaactgtcactctccacg

SEQ ID NO: 630141 - DNA, 75 bp, synthetic construct
  source 1..75: mol_type = other DNA
cgaaagtggggatggattactttcgtcgtcatctccctgccctgcgtgaacagttctcttcactacagatggaag

SEQ ID NO: 630142 - DNA, 75 bp, synthetic construct
  source 1..75: mol_type = other DNA
atgatcgatgaaaacggcgttccgttcagcatcgatattcccgtattccgactctccgttccaatactcattcat

SEQ ID NO: 630143 - DNA, 75 bp, synthetic construct
  source 1..75: mol_type = other DNA
ggtaagggacgtaaaggcatcatcatccgcacccgtaagccgggattttttgccatggctaaacgcttcataaaa

SEQ ID NO: 630144 - DNA, 75 bp, synthetic construct
  source 1..75: mol_type = other DNA
ccatcatctgaaaggcaaaaaacaggacttcttctggcggctggaaacgccggatcggctgggccgtgcggggat

SEQ ID NO: 630145 - DNA, 75 bp, synthetic construct
  source 1..75: mol_type = other DNA
aacccgatcactaattcctttaagctcggccccggcgtcgatgtgaactatatgctgcacacgcagaataaataa

SEQ ID NO: 630146 - DNA, 75 bp, synthetic construct
  source 1..75: mol_type = other DNA
ccctccctgatgccgctgattaacgcgctggaatcgcgtctggcgcagtcgggtgggatgaacgcggtggtgccg

SEQ ID NO: 630147 - DNA, 75 bp, synthetic construct
  source 1..75: mol_type = other DNA
ggcgggggaaaagatgctcgacagccttgcccgcgacccggaagtggcaaaagaggattttgcgaacattgttgc

SEQ ID NO: 630148 - DNA, 75 bp, synthetic construct
  source 1..75: mol_type = other DNA
atgaacccgattgcagtgaccctactcaccggttttttaggcgcgggcaaaaccaccctgctgcgccatattctt

SEQ ID NO: 630149 - DNA, 75 bp, synthetic construct
  source 1..75: mol_type = other DNA
ttcggcacaccggctgatgaaaaccctgcgctgggacacggtgcatgaactgccgccggatgtggacggcaaaac

SEQ ID NO: 630150 - DNA, 75 bp, synthetic construct
  source 1..75: mol_type = other DNA
ccgctgattaacgcgctggaatcacgtctggcgcagtcgggcgggatgaacgcggtggtgccgcaaaacagcagc

SEQ ID NO: 630151 - DNA, 75 bp, synthetic construct
  source 1..75: mol_type = other DNA
tcaggcgctgactaaggcgggcgcaccgtgggacaggtggacagcggttatccgtcaggacctggcgctgctgct

SEQ ID NO: 630152 - DNA, 75 bp, synthetic construct
  source 1..75: mol_type = other DNA
gaatatattgaatactacaacagcagaagaattagcctgaaattaaaaggtctgactccaattgaatatcggaat

SEQ ID NO: 630153 - DNA, 75 bp, synthetic construct
  source 1..75: mol_type = other DNA
aacccgatcactaattcctttaagctcggccccggcgtcgatgtgaactatatgctgcacacgcagaataagtga

SEQ ID NO: 630154 - DNA, 75 bp, synthetic construct
  source 1..75: mol_type = other DNA
tagagcctgtgcgcaactggtgaaaccgggcggcgatgttttttctcgacgcttaaccgcaacggcaagtcgtgg

SEQ ID NO: 630155 - DNA, 75 bp, synthetic construct
  source 1..75: mol_type = other DNA
tcaccggttttttaggcgcgggaaaaaccaccctgctgcgccatattcttaacgaacaacacggctacaagattg

SEQ ID NO: 630156 - DNA, 75 bp, synthetic construct
  source 1..75: mol_type = other DNA
atggccgatcccggcccgattattcagacctttttctcccatgagattttatgccagcgctacctgctggacggc

SEQ ID NO: 630157 - DNA, 75 bp, synthetic construct
  source 1..75: mol_type = other DNA
gaaggggagaaaccgctgctccacagtgatcaaggatggcattaccggataaaaagttatcagtccgccctggcg

SEQ ID NO: 630158 - DNA, 75 bp, synthetic construct
  source 1..75: mol_type = other DNA
atcaacagggagtactggcgactcgtatgacaacgcgatggctgagagcatcaatggtctttacaaagcggaggt

SEQ ID NO: 630159 - DNA, 75 bp, synthetic construct
  source 1..75: mol_type = other DNA
gggtggctgattttacttacgtcagcacatggcagggggtcgtctatgtggcgttcatcattgatgtgtttgccg

SEQ ID NO: 630160 - DNA, 75 bp, synthetic construct
  source 1..75: mol_type = other DNA
tgaggtaaaagccggggtaagtatcacttcgccagttatccggagtgccgttattcagaacggaaactttcaggt

SEQ ID NO: 630161 - DNA, 75 bp, synthetic construct
  source 1..75: mol_type = other DNA
cgggaaggaatcagggtggccagatgtacagtggcgcgcctcatggcggttatgggactttccggtgttctccgg

SEQ ID NO: 630162 - DNA, 75 bp, synthetic construct
  source 1..75: mol_type = other DNA
tcaacgtattaccactgtcagcaacagcgacatcatcctgataaacgcagcgcccgtgcgcagcgcgatgactgg

SEQ ID NO: 630163 - DNA, 75 bp, synthetic construct
  source 1..75: mol_type = other DNA
gtgatcagccggaaagccgttgccgcaggcgaccgcgtaaaccgtcagttcgtggcagaacgacctgaccagctg

SEQ ID NO: 630164 - DNA, 75 bp, synthetic construct
  source 1..75: mol_type = other DNA
acgacattcgtgctggatgcactggagcaggcgttatgggcccgtcgaccgtccggcacggtccatcacagtgat

SEQ ID NO: 630165 - DNA, 75 bp, synthetic construct
  source 1..75: mol_type = other DNA
tcgggtgaaccggcagttcgtggctgaacggcccgatagtctttgggtggccgattttacctacggtgtgcccgg

SEQ ID NO: 630166 - DNA, 75 bp, synthetic construct
  source 1..75: mol_type = other DNA
tgcagaagtggaactggccacactcacgtgggtggactggtataacaatcgacgattgctgggaaggctgggtca

SEQ ID NO: 630167 - DNA, 75 bp, synthetic construct
  source 1..75: mol_type = other DNA
ggtaatacaccgtaatagctggaaaaaccggacagaagtggaactggccacactaacgtgggtggactggtataa

SEQ ID NO: 630168 - DNA, 75 bp, synthetic construct
  source 1..75: mol_type = other DNA
atggcagggcttcgttatgtggcgttcatcattgatgtgttcgccggatacatcgtgggatggcaggtctcatca

SEQ ID NO: 630169 - DNA, 75 bp, synthetic construct
  source 1..75: mol_type = other DNA
aacgacattcgtgctggatgctctggagcaggcgttatggacccgtcgaccgtccggcacagtccatcacagtga

SEQ ID NO: 630170 - DNA, 75 bp, synthetic construct
  source 1..75: mol_type = other DNA
ggatgctcgatgacaaacgtattctcgcgcatattcgtgcctcaaaagcaccaaagccgggcgctgaactgctgc

SEQ ID NO: 630171 - DNA, 75 bp, synthetic construct
  source 1..75: mol_type = other DNA
actcctggcatcaacaggaagtaccggcgactcgtatgacaacgcgatggcggagagcatcaatggcctttacaa

SEQ ID NO: 630172 - DNA, 75 bp, synthetic construct
  source 1..75: mol_type = other DNA
actactggcatcaacaggcagtacgggcgactcgtatgacaacgcgatggcggagagcatcaatggcctttacaa

SEQ ID NO: 630173 - DNA, 75 bp, synthetic construct
  source 1..75: mol_type = other DNA
ctcatcgtctatggaaacgacattcgtgctggatgcgctggagcaggcgttttgggcccgacgtccgtccggcac

SEQ ID NO: 630174 - DNA, 75 bp, synthetic construct
  source 1..75: mol_type = other DNA
tggaaaaaccgtgcagaagtggaactggccacactcacgtgggtggactggtataaggcactgttgcaaagttag

SEQ ID NO: 630175 - DNA, 75 bp, synthetic construct
  source 1..75: mol_type = other DNA
gcgtaaagtctggcgtcagttgttacggaaaggcatcagagtggccagatgcactgtggcacgtctcatggcggt

SEQ ID NO: 630176 - DNA, 75 bp, synthetic construct
  source 1..75: mol_type = other DNA
actgctggcatcaacaggcagtacaggcgactcgtatgacaacgcgatggcggagagcatcaatggcctttacaa

SEQ ID NO: 630177 - DNA, 75 bp, synthetic construct
  source 1..75: mol_type = other DNA
attgtcgccggaaaagacagtgaaggcaggcctgtaagtcaggttgcaatttctgcgtcgcagttgtttgtcttt

SEQ ID NO: 630178 - DNA, 75 bp, synthetic construct
  source 1..75: mol_type = other DNA
atgtggcgttcatcattgatgtgtttgccggatacatcgtgggggtggcgggtctcatcgtccatggaaacgaca

SEQ ID NO: 630179 - DNA, 75 bp, synthetic construct
  source 1..75: mol_type = other DNA
gtaaaaaggtccgtactaccgtcagccgatttacgggccgtaagtaacgaagttggatgcaaatgtcagatcgtg

SEQ ID NO: 630180 - DNA, 75 bp, synthetic construct
  source 1..75: mol_type = other DNA
ctcatcgtctatggaaacgacattcgtgctggatgctctggagcaggcgttttgggcccgtcgtccgtccggcac

SEQ ID NO: 630181 - DNA, 75 bp, synthetic construct
  source 1..75: mol_type = other DNA
ctcatcgtctatggaaacgacattcgtgctggatgcactggagcaggcgttttgggcccggcgtccgtccggcac

SEQ ID NO: 630182 - DNA, 75 bp, synthetic construct
  source 1..75: mol_type = other DNA
aggaagccggattactggcatcaacaggaagtgcaggcgactcgtatgacaacgcgatggcggagagcatcaatg

SEQ ID NO: 630183 - DNA, 75 bp, synthetic construct
  source 1..75: mol_type = other DNA
ggagaaagagagaactggtgcgatggagatatgacgcctttactctcatggtggcgaaatcgacagattccggtt

SEQ ID NO: 630184 - DNA, 75 bp, synthetic construct
  source 1..75: mol_type = other DNA
tttgacccgaacgatcctgataacacggcctatccgtttgcagtttctggcggaaaagtcgtgattaccaaagcg

SEQ ID NO: 630185 - DNA, 75 bp, synthetic construct
  source 1..75: mol_type = other DNA
catttgatgtattacatataggtcatataaatatcttaaaaagggcaaaaaaaatgggggactatctaatagttg

SEQ ID NO: 630186 - DNA, 75 bp, synthetic construct
  source 1..75: mol_type = other DNA
atgccactgctggataagctgcgtgagcagtacggggtcggaccggtatgcagcgaactgcatgttgccccgtca

SEQ ID NO: 630187 - DNA, 75 bp, synthetic construct
  source 1..75: mol_type = other DNA
acgtattaccactgtcagcaacagcgacatcatcctgataaacgcggttcacatgcacagcgcgatgactggctg

SEQ ID NO: 630188 - DNA, 75 bp, synthetic construct
  source 1..75: mol_type = other DNA
acgtattaccactgtcagcaacagcgacatcatcctgataaacgcggtacacatgctcagcgcgatgactggctg

SEQ ID NO: 630189 - DNA, 75 bp, synthetic construct
  source 1..75: mol_type = other DNA
acgtattaccactgtcagcaacagcgacatcatcctgataaacgctgtacacatgcacagcgcgatgactggctg

SEQ ID NO: 630190 - DNA, 75 bp, synthetic construct
  source 1..75: mol_type = other DNA
ctttgagaacggcagcaaaatcattatcaaccgccaggaaccgctgcaccaggtatggctggcaaccaaacaggg

SEQ ID NO: 630191 - DNA, 75 bp, synthetic construct
  source 1..75: mol_type = other DNA
gcgagaagtcgacaaagaagcccgcgatcatgttcgcaaagatgagcaagtgatcgggatttttcatccggacta

SEQ ID NO: 630192 - DNA, 75 bp, synthetic construct
  source 1..75: mol_type = other DNA
cgggcgcaaaatgcccggcctgtcaggcgcaggattcaatggcgatgtggcgcgaaaataatattgatattgttg

SEQ ID NO: 630193 - DNA, 75 bp, synthetic construct
  source 1..75: mol_type = other DNA
atggcagaaaagcttgccctgcttgaaaaactgggcatcacgctggatgacctggaaaaactcttcaaatcccgc

SEQ ID NO: 630194 - DNA, 75 bp, synthetic construct
  source 1..75: mol_type = other DNA
gttgaactgccttttgtcgagtttgcaaaactgtgtggtataccctcaagccagtcatcacgcaggctgcgtgag

SEQ ID NO: 630195 - DNA, 75 bp, synthetic construct
  source 1..75: mol_type = other DNA
taaatctgacacctaatgccagtaatacagtgcagcctgtggcactgatgcggctgggggtgtttgttcccacgc

SEQ ID NO: 630196 - DNA, 75 bp, synthetic construct
  source 1..75: mol_type = other DNA
acattcgtgctggatgcactggagcaggcgttgtgggcccgtcgtccgtccggcaccatccatcacagcgataaa

SEQ ID NO: 630197 - DNA, 75 bp, synthetic construct
  source 1..75: mol_type = other DNA
cgtcagttcgtggcagaacgacctgaccagctgtgggtggctgattttacttacggtgtgcccggagttcagggc

SEQ ID NO: 630198 - DNA, 75 bp, synthetic construct
  source 1..75: mol_type = other DNA
ggaaacgacattcgtgctggatgcactggagcaggcgttgtgggcccgtcggccgtccggcacagtccatcacag

SEQ ID NO: 630199 - DNA, 75 bp, synthetic construct
  source 1..75: mol_type = other DNA
ctgattttaattacgtcagcacatggctggggttcgtctatgtggcgttcatcattgatgtgtttgccggataca

SEQ ID NO: 630200 - DNA, 75 bp, synthetic construct
  source 1..75: mol_type = other DNA
gatggcggagagcatcaatggcctttacaaagcggaggtaatacaccgtaagagctggaaaaaccggacagaagt

SEQ ID NO: 630201 - DNA, 75 bp, synthetic construct
  source 1..75: mol_type = other DNA
caacgcgatggcggagagcatcaatggctttacaaagcggaggtaatacaccgtaagagctggaaaaaccgtgca

SEQ ID NO: 630202 - DNA, 75 bp, synthetic construct
  source 1..75: mol_type = other DNA
atggtctttacaaagacggaggtaatacaccgtaagagctggaaaaaccgtgcagaagtggaactggccacactc

SEQ ID NO: 630203 - DNA, 75 bp, synthetic construct
  source 1..75: mol_type = other DNA
cagaagtggaactggccacactcacgtgggtggactggtataacaatcgacgattgctggaaaggcggggccata

SEQ ID NO: 630204 - DNA, 75 bp, synthetic construct
  source 1..75: mol_type = other DNA
cagaagtggaactggccacactcacgtgggtggactggtataacaatcgatgattgctggtaaggcagggccata

SEQ ID NO: 630205 - DNA, 75 bp, synthetic construct
  source 1..75: mol_type = other DNA
cagaagtggaactggccacactcacgtgggtggactggtataacaatcgaagattgctggtaaggctgggccata

SEQ ID NO: 630206 - DNA, 75 bp, synthetic construct
  source 1..75: mol_type = other DNA
agcagtacggggtcggaccgctatgcagcgaactgcatatttccccgtcaacgtattaccactgtcagcaacagc

SEQ ID NO: 630207 - DNA, 75 bp, synthetic construct
  source 1..75: mol_type = other DNA
gtcactggcctatacggagcgattaaaagaagcaaaactgctggcatcaacaggaagtacaggcgactcgtatga

SEQ ID NO: 630208 - DNA, 75 bp, synthetic construct
  source 1..75: mol_type = other DNA
cagaagtggaactggccacactcacgtgggtggactggtataacaatcgaggattgctggaaaggccgggccata

SEQ ID NO: 630209 - DNA, 75 bp, synthetic construct
  source 1..75: mol_type = other DNA
ctccggcccgctgccatctggcgagtctggagtatcagtctgtcgccattcgctacaacaacaccgtcaactatg

SEQ ID NO: 630210 - DNA, 75 bp, synthetic construct
  source 1..75: mol_type = other DNA
ggtcagcaagtctttcccccgcacgagcacttatgccagtggcaccatcacggtaagaatcagtgatgatcagaa

SEQ ID NO: 630211 - DNA, 75 bp, synthetic construct
  source 1..75: mol_type = other DNA
agctcaccaaccgcagtggcaaacgggaatactggggaaacggcctggaagaactggtcaaaaaccaccagaaag

SEQ ID NO: 630212 - DNA, 75 bp, synthetic construct
  source 1..75: mol_type = other DNA
tccggcagtgcagcacctcacggtggaggtgagtgcctcagacggccagtatctggcgcaggcgaaatgggacac

SEQ ID NO: 630213 - DNA, 75 bp, synthetic construct
  source 1..75: mol_type = other DNA
gacggtgttgctgaatacagcgtgtgggggctgaagctgccgacgctgcgccagcgcctgttccgctgtgtgagt

SEQ ID NO: 630214 - DNA, 75 bp, synthetic construct
  source 1..75: mol_type = other DNA
acagcaccacggaccagctgcagaataagacgctgtggtcgtcatacaccgaaatcatcgatgtgaaacagtgct

SEQ ID NO: 630215 - DNA, 75 bp, synthetic construct
  source 1..75: mol_type = other DNA
catccggctatctggattttttcaaaggagagatagggaaaacccatctggctcaggagttgtggacacagattg

SEQ ID NO: 630216 - DNA, 75 bp, synthetic construct
  source 1..75: mol_type = other DNA
atatatcggtatccccacgcccaacaatgacactactgaccgccgtgaagctatcgtgatcggcaacctgatatt

SEQ ID NO: 630217 - DNA, 75 bp, synthetic construct
  source 1..75: mol_type = other DNA
gcggaaggttatctgaatttttataaagggttgatcaataaaacgcatctcggcaaggaactgctggaaaacttt

SEQ ID NO: 630218 - DNA, 75 bp, synthetic construct
  source 1..75: mol_type = other DNA
ttttcgaaagagtggaaggacgccaacgataagtggaatgccatgtggggcgtcaaaattgagcagaccaaagac

SEQ ID NO: 630219 - DNA, 75 bp, synthetic construct
  source 1..75: mol_type = other DNA
agaattaaaatatgacaatccgctcacccgcaccatcacgtcagcaaacatcgaccgtctgcgcctgactttcgg

SEQ ID NO: 630220 - DNA, 75 bp, synthetic construct
  source 1..75: mol_type = other DNA
ggtcagcacagcccagacgacggaaaccacataccgcttcaggcagctggcgctggggaactacaggctgacggt

SEQ ID NO: 630221 - DNA, 75 bp, synthetic construct
  source 1..75: mol_type = other DNA
ccacagtggcaggatgagctgaaacaacttcctctgccgtcacaggatatcgccctgctggacaacgggcgtccg

SEQ ID NO: 630222 - DNA, 75 bp, synthetic construct
  source 1..75: mol_type = other DNA
cgatccggtcacagaatttgctcaggtcctggaaaacgccggactggttattcagggattgccacagatggatgg

SEQ ID NO: 630223 - DNA, 75 bp, synthetic construct
  source 1..75: mol_type = other DNA
ctaaaaatgcggatatcagtggcagtgtgaatgcgaactcagggacgctcaacaacgtcacgattaatgagaact

SEQ ID NO: 630224 - DNA, 75 bp, synthetic construct
  source 1..75: mol_type = other DNA
gcatggtgggtaaatggctggtatcccacagcaagtatcagcgatttgctggttgtggtgatgaagaaagccact

SEQ ID NO: 630225 - DNA, 75 bp, synthetic construct
  source 1..75: mol_type = other DNA
atatgcctgctggtcgcggcgacatgacgctggagttttctgtatcagcatggtgggtaaatggctggtatccca

SEQ ID NO: 630226 - DNA, 75 bp, synthetic construct
  source 1..75: mol_type = other DNA
gggttctgggaaaactgtccgcgaaccagattgaaggcgatctcgttaaaacagtgggaaaagcctttccgagaa

SEQ ID NO: 630227 - DNA, 75 bp, synthetic construct
  source 1..75: mol_type = other DNA
ctgaatacagcgtatgggggctgaagctgccgacgctgcgccagcgcctgttccgctgtgtgagtatccgggaga

SEQ ID NO: 630228 - DNA, 75 bp, synthetic construct
  source 1..75: mol_type = other DNA
gacggcgttgctgaatacagcgtgtgggggctgaagctgccgacgctgcgccagcgcctgttccgctgcgtgagt

SEQ ID NO: 630229 - DNA, 75 bp, synthetic construct
  source 1..75: mol_type = other DNA
cgacagacaaaaaactgggcgagcaggaagcaacaatccagcagatacaaaaggttcagacagacaccagtaata

SEQ ID NO: 630230 - DNA, 75 bp, synthetic construct
  source 1..75: mol_type = other DNA
tcagaaagtggacaacgtcagtagcgaactcacgcaaacggtcagtcagagtaatgaggagaatgcacgccagat

SEQ ID NO: 630231 - DNA, 75 bp, synthetic construct
  source 1..75: mol_type = other DNA
tgaagggtatctggaaattttccgggggctgatagatgagacgcttcttggtcaggcactgaaagagcgcattga

SEQ ID NO: 630232 - DNA, 75 bp, synthetic construct
  source 1..75: mol_type = other DNA
agtcagtggactgtccaggggagccggattaagccggggacggatttctggttttacgtgcgaagcgtcaacctg

SEQ ID NO: 630233 - DNA, 75 bp, synthetic construct
  source 1..75: mol_type = other DNA
ccattcccggtagctacagtgcggttattgatatgccgagtggcaggggaagcgtcactctggagtttaaggttt

SEQ ID NO: 630234 - DNA, 75 bp, synthetic construct
  source 1..75: mol_type = other DNA
ctgtgggacatgctgacccacccgcgctacggaatgggaaaacgtctgggggcggcggatgtggacaagtgggcg

SEQ ID NO: 630235 - DNA, 75 bp, synthetic construct
  source 1..75: mol_type = other DNA
ccgtatcttcatcaggagcgaataactggacaccaacaaccagtatcagcgatctgctggttgtggtgatgaaga

SEQ ID NO: 630236 - DNA, 75 bp, synthetic construct
  source 1..75: mol_type = other DNA
cggactggtagcggaacgtgaaggcattcgtgaaccaattattggtcttgatgtactacaaaccgctacgcgggg

SEQ ID NO: 630237 - DNA, 75 bp, synthetic construct
  source 1..75: mol_type = other DNA
gtgacggcaatcgtgacaggttcaactgacaatacgggttattacaaaaatgaaggtactgccgaaaatattcag

SEQ ID NO: 630238 - DNA, 75 bp, synthetic construct
  source 1..75: mol_type = other DNA
aaaaaaaaaacggcttccgtaacgttataaatgtcaatagccgctatttccatcctggtgggtggcggcctccct

SEQ ID NO: 630239 - DNA, 75 bp, synthetic construct
  source 1..75: mol_type = other DNA
tgccagacatgagcgggagaacagcgatacttattcgtcatgccgcctgatagtgaagaaaaacggtgctgaaat

SEQ ID NO: 630240 - DNA, 75 bp, synthetic construct
  source 1..75: mol_type = other DNA
ggaagcgccggtcacggcaaaagctgaagccccccgggccggcacaccggaacaaccagccgccccgtcatcgtc

SEQ ID NO: 630241 - DNA, 75 bp, synthetic construct
  source 1..75: mol_type = other DNA
tacgccgaaggtggtgaagggcgtgagctttatgcttcgcctgaccgtggcagcggatgacggcagtgagcggct

SEQ ID NO: 630242 - DNA, 75 bp, synthetic construct
  source 1..75: mol_type = other DNA
tatctctcacacagtccggtctccattattacctgtcagatccaccgggagaatttgcgtttattgctgacccgg

SEQ ID NO: 630243 - DNA, 75 bp, synthetic construct
  source 1..75: mol_type = other DNA
attattatttttacgttcgcagtgtgaacacagtcggcaaatcggcattcatggaggctgtcggtcgggcgagcg

SEQ ID NO: 630244 - DNA, 75 bp, synthetic construct
  source 1..75: mol_type = other DNA
gctgggagacggcgacagagcttgtggaggacacgcaggccattctccgttacggtcgtaacgtcacgaagatgg

SEQ ID NO: 630245 - DNA, 75 bp, synthetic construct
  source 1..75: mol_type = other DNA
gagcggtggccatcagggaccattaccgtcagggtttatgacgatcagccgtttgaccggcaaattgttattcca

SEQ ID NO: 630246 - DNA, 75 bp, synthetic construct
  source 1..75: mol_type = other DNA
attgagaacacccctgacggcatgcagagtcaggtgctgctggcggcggacaggattgcgatgattaatcctgcg

SEQ ID NO: 630247 - DNA, 75 bp, synthetic construct
  source 1..75: mol_type = other DNA
gatgcgttcggctgcaccagtcgcggtcaggcccaccgtgccgggctgtgggtgataaagaccggactgctggaa

SEQ ID NO: 630248 - DNA, 75 bp, synthetic construct
  source 1..75: mol_type = other DNA
gactggtatcccacagcaagtatcagcgatttgctggttgtggtgatgaagaaagccaccgcaggcatcagtatc

SEQ ID NO: 630249 - DNA, 75 bp, synthetic construct
  source 1..75: mol_type = other DNA
aacggggcgcactttgacggcgaccagagcggaacggtaaacggtgtcacgccgccagcagtgcagcacctgact

SEQ ID NO: 630250 - DNA, 75 bp, synthetic construct
  source 1..75: mol_type = other DNA
gtcacgattaatgagaactgccggattctgggaaaactgtctgccagccagattgaaggcgatattgtcaaaaca

SEQ ID NO: 630251 - DNA, 75 bp, synthetic construct
  source 1..75: mol_type = other DNA
gtcgcatcattcaggtgccgtcaaactacgacccggaaaaacgcacttacagcggtatctgggacggtagtctga

SEQ ID NO: 630252 - DNA, 75 bp, synthetic construct
  source 1..75: mol_type = other DNA
gctgttcatgaacgatgtgttcctgaaacaactttttgcggtgagcatcacctcatcaggtgaacccccgacctt

SEQ ID NO: 630253 - DNA, 75 bp, synthetic construct
  source 1..75: mol_type = other DNA
agtgtggacatcaccgcacaaccggcccctgaccggatacaggtcagcgccctgcctgagggtgtggaaatttac

SEQ ID NO: 630254 - DNA, 75 bp, synthetic construct
  source 1..75: mol_type = other DNA
gaacgaagtgttcctgaaatatctgacggctcccaccattaccagcggtggcaatcccccaacgttttcactgac

SEQ ID NO: 630255 - DNA, 75 bp, synthetic construct
  source 1..75: mol_type = other DNA
ggcagtggcgtaatgacactggagttttcggtatcagcatggtgggtaaatggctggtatcccacagcaagtatc

SEQ ID NO: 630256 - DNA, 75 bp, synthetic construct
  source 1..75: mol_type = other DNA
gagacaaaaatcgcagatacatctcaggtggaaacctctgcccgttatctggggaccggcagtcagtggagtgta

SEQ ID NO: 630257 - DNA, 75 bp, synthetic construct
  source 1..75: mol_type = other DNA
acgtctgggggcggcggatgtggacaagtgggcgctgtatgccatcgggcagtactgcgaccagatggtgccgga

SEQ ID NO: 630258 - DNA, 75 bp, synthetic construct
  source 1..75: mol_type = other DNA
tgctggcgcgctgggacacgccgaaggtggtgaagggcgtgagcttcctgcttcgcctgaccgtggcagcggacg

SEQ ID NO: 630259 - DNA, 75 bp, synthetic construct
  source 1..75: mol_type = other DNA
tatcagcggtaacgtgaatgcgaactccgggacgctcaacaacgtcacgattaacgagaactgtcgggttctggg

SEQ ID NO: 630260 - DNA, 75 bp, synthetic construct
  source 1..75: mol_type = other DNA
atgagtaaaaccactgtctggctcgcttgttataagggccgaacagagcaccgtggtgttgcccgactggctgac

SEQ ID NO: 630261 - DNA, 75 bp, synthetic construct
  source 1..75: mol_type = other DNA
ttcctgcaattaaaagacagctggcgatactcaccaaatcacctgtatgccttagtaagtagctggcaatcccat

SEQ ID NO: 630262 - DNA, 75 bp, synthetic construct
  source 1..75: mol_type = other DNA
ccgacggacttaaggtgaaagtgaatcgggttcctgacggcgttgcagaatacagtgtgtgggggctgaagttgc

SEQ ID NO: 630263 - DNA, 75 bp, synthetic construct
  source 1..75: mol_type = other DNA
agctgttcatgaacgacgtgttcctgaagcggctgtttgcggtgagtatcacctcgtccggcaatcccccgacgt

SEQ ID NO: 630264 - DNA, 75 bp, synthetic construct
  source 1..75: mol_type = other DNA
actgtccggttcgctgaacagcgtcatcccgccggctgtgcagcacctgacggtggaggtgagcgcggctgacgg

SEQ ID NO: 630265 - DNA, 75 bp, synthetic construct
  source 1..75: mol_type = other DNA
gacgttcgttcaggaccgcccgtcggatgtggtgtggccgtacaccaactgcgatgtggtggtggatgataacgg

SEQ ID NO: 630266 - DNA, 75 bp, synthetic construct
  source 1..75: mol_type = other DNA
ggggcgtcaaaattgagcagaccaaagacggtaagcattatgtcgcggggcttggcctcagcatggaagatacag

SEQ ID NO: 630267 - DNA, 75 bp, synthetic construct
  source 1..75: mol_type = other DNA
tggccatcagggaccatcaccgtcagggtttatgacgatcagccttttgaccggcaaattgtcattccggcggtg

SEQ ID NO: 630268 - DNA, 75 bp, synthetic construct
  source 1..75: mol_type = other DNA
aacgtgaatgcgaactccgggacgctcaacaacgtcacgattaacgagaactgtcgggttctgggaaaattgtcc

SEQ ID NO: 630269 - DNA, 75 bp, synthetic construct
  source 1..75: mol_type = other DNA
aacggggcgcactttgacggcgacttgagcggcacggtgaatggcgtcacgccgcccgcggtgcagcacctgact

SEQ ID NO: 630270 - DNA, 75 bp, synthetic construct
  source 1..75: mol_type = other DNA
gtgaagtgacacttccggagaccggtgccgccacggtgaacctgattaacggcagcggtaagccagtgagtgtgg

SEQ ID NO: 630271 - DNA, 75 bp, synthetic construct
  source 1..75: mol_type = other DNA
gagttctggttctcggaaacgcggattaccgatatcaggcaggttgaaaccacagcccgctaccttggcacgggg

SEQ ID NO: 630272 - DNA, 75 bp, synthetic construct
  source 1..75: mol_type = other DNA
gtcagattaaggggaaactgtcagccaaccagattgaaggtgatattgtcaaaacggtcagcaagtctttccccc

SEQ ID NO: 630273 - DNA, 75 bp, synthetic construct
  source 1..75: mol_type = other DNA
ttatggttttgaagttcgcaaaaacggtgtattaatcgcatccagagaaactaaaggggccattcccggtagtta

SEQ ID NO: 630274 - DNA, 75 bp, synthetic construct
  source 1..75: mol_type = other DNA
ataactggacaccaacaaccagtatcagcgatctgctggttgttgtgatgaagaaagccaccgcaggcatcagta

SEQ ID NO: 630275 - DNA, 75 bp, synthetic construct
  source 1..75: mol_type = other DNA
cgcctgccaccattgaactgataccggggtattttcagataacggcggtcccgaaactggctgtatatgacccga

SEQ ID NO: 630276 - DNA, 75 bp, synthetic construct
  source 1..75: mol_type = other DNA
agccctgcctgatggcgtggcgacatacggtgtgtggggactctccctgccgtcactgcgccgtcgcctgttccg

SEQ ID NO: 630277 - DNA, 75 bp, synthetic construct
  source 1..75: mol_type = other DNA
cgccatgaaatatgactggctgggggctgtgggattcgttgtttttaatcgtggacgggagaacaaatatttctg

SEQ ID NO: 630278 - DNA, 75 bp, synthetic construct
  source 1..75: mol_type = other DNA
ccagacggtgagccgccgggtgacctggtccccgtctgacacggatgcccgggagctgaccgccgtgatcagcgt

SEQ ID NO: 630279 - DNA, 75 bp, synthetic construct
  source 1..75: mol_type = other DNA
ctgttcgctgatgcgctgtatgccggtgtggaacggacagacgctgacgtttgtgcaggaccggccgtcggataa

SEQ ID NO: 630280 - DNA, 75 bp, synthetic construct
  source 1..75: mol_type = other DNA
gataacagcggtcccgcgtcttgcggtgtatgacccgacggtacagtttgagttctggttctcggagacaaaaat

SEQ ID NO: 630281 - DNA, 75 bp, synthetic construct
  source 1..75: mol_type = other DNA
ttttatccactcaggctgaaaagctcatctccatgatgcgaagaacagcagcacatcttcgtaatcccgaacaac

SEQ ID NO: 630282 - DNA, 75 bp, synthetic construct
  source 1..75: mol_type = other DNA
cattttttgaaagctctaatagcaggatatataatatattctcagggaacttttatgatgatgcttcttttgtgg

SEQ ID NO: 630283 - DNA, 75 bp, synthetic construct
  source 1..75: mol_type = other DNA
tcaatgcactgacggataacggtctgcagtttgccggctacggtgaagctgtcaaccacgatgagaatactcatc

SEQ ID NO: 630284 - DNA, 75 bp, synthetic construct
  source 1..75: mol_type = other DNA
gtatggaacggtcagacgctgacgtttgttcaggaccgcccgtcggatgtggtgtgtccgtacaccaacagcgat

SEQ ID NO: 630285 - DNA, 75 bp, synthetic construct
  source 1..75: mol_type = other DNA
gaccagagtgcggcaattcagcagatacagaaggttcagattgatacaaataataacctgaacagcatgtgggct

SEQ ID NO: 630286 - DNA, 75 bp, synthetic construct
  source 1..75: mol_type = other DNA
gatattcatgaacgacgtgttcctgaaacgcctgacggctccgaccattaccagcggcggtaatcctccggcatt

SEQ ID NO: 630287 - DNA, 75 bp, synthetic construct
  source 1..75: mol_type = other DNA
agaaatacacagagtgcccacacgggatgacagaagaggctcccagagtggcgcatacaaggcctatcttgatgg

SEQ ID NO: 630288 - DNA, 75 bp, synthetic construct
  source 1..75: mol_type = other DNA
ccgggagagatcaccttcatcaccgggcaaaccggaatgggtgcgaaatatctggaccatgaaaccggtctgtaa

SEQ ID NO: 630289 - DNA, 75 bp, synthetic construct
  source 1..75: mol_type = other DNA
actgttggcaaatcggcattcgtggaggctgtcggtcaggcgagcgatgatgcttccggctatctggattttttc

SEQ ID NO: 630290 - DNA, 75 bp, synthetic construct
  source 1..75: mol_type = other DNA
cagggcaattaacagttatggccagcagggcgaaccggccaccaccaccttccggattaacgcgccagcaaaacc

SEQ ID NO: 630291 - DNA, 75 bp, synthetic construct
  source 1..75: mol_type = other DNA
attaagcccgggaaggatttctggttttacgtgcgcagcgtcaacctggtggggaaatctgcgtttgtggaagtc

SEQ ID NO: 630292 - DNA, 75 bp, synthetic construct
  source 1..75: mol_type = other DNA
cgattgaaggtccggtgaaggggctgcagagtatcctggtgaacaaaaccccgctgacggacacggacggcaatc

SEQ ID NO: 630293 - DNA, 75 bp, synthetic construct
  source 1..75: mol_type = other DNA
tgccggtattgagaacacccctgacggcatgcagagtcaggtgctgctggcggcagacaggattgcgatgattaa

SEQ ID NO: 630294 - DNA, 75 bp, synthetic construct
  source 1..75: mol_type = other DNA
tgaattctggttctccgaaaaacgcatcacgaacacggcacaggtggaaaaatctgcccgttatctggggaccgg

SEQ ID NO: 630295 - DNA, 75 bp, synthetic construct
  source 1..75: mol_type = other DNA
ccttcaagcatctgacggaagaaatgcgccgtcaattgctggatatttcccgtacatcagaaaagtcttcccgct

SEQ ID NO: 630296 - DNA, 75 bp, synthetic construct
  source 1..75: mol_type = other DNA
cacccgcgctacggcatgggtaaacgtcttggtgcggcagatgtggataaatgggcgctgtacgtcatcggccag

SEQ ID NO: 630297 - DNA, 75 bp, synthetic construct
  source 1..75: mol_type = other DNA
atagcgtatgacgatccggggagcggaaataacccaggaggcacgcgatacacgggttatggttttgaagttcgc

SEQ ID NO: 630298 - DNA, 75 bp, synthetic construct
  source 1..75: mol_type = other DNA
gatggacgggtgattgatacaaaaggatgggatggttgggaatggacccacggtgtgggtttatacggtatttat

SEQ ID NO: 630299 - DNA, 75 bp, synthetic construct
  source 1..75: mol_type = other DNA
acagaaggttcaggttgatacaaataataatctgaacagcatgtgggctgtgaagctgcagcagatgcaggacgg

SEQ ID NO: 630300 - DNA, 75 bp, synthetic construct
  source 1..75: mol_type = other DNA
attgataacggtcagcttgcgcctgacctggctgaaatcaggacgtccattacggatgtcagcaatgaaatcaca

SEQ ID NO: 630301 - DNA, 75 bp, synthetic construct
  source 1..75: mol_type = other DNA
gctgtcggtcgggcgagcgatgatgcggaaggttacctggattttttcaaaggagaaatcgggaaaacacatctg

SEQ ID NO: 630302 - DNA, 75 bp, synthetic construct
  source 1..75: mol_type = other DNA
gtgaggtgaccctgccggagaccggtgccgccacggtgaacctgattaacggcagcggtaagccggtgagcgtgg

SEQ ID NO: 630303 - DNA, 75 bp, synthetic construct
  source 1..75: mol_type = other DNA
ggggatcagcatcggcgggcgcgtgctggcggtgaacaaccagacgcggacactgacgctcgaccgtgaaatcac

SEQ ID NO: 630304 - DNA, 75 bp, synthetic construct
  source 1..75: mol_type = other DNA
tccgagcgccgctgagtgcgtgcctggcggtccttccgtcgcgtgttcttccgctaaagcgattgagtgggatga

SEQ ID NO: 630305 - DNA, 75 bp, synthetic construct
  source 1..75: mol_type = other DNA
aacggggcccgctttgagccgctgtccggttcactgaacagcgtcatcccgccggcagtgcagcacctcacggtg

SEQ ID NO: 630306 - DNA, 75 bp, synthetic construct
  source 1..75: mol_type = other DNA
aaagagcgggtactacgcggcgtacaactgaatcccgaagccacagtggcggagcggatttactgggcagaagat

SEQ ID NO: 630307 - DNA, 75 bp, synthetic construct
  source 1..75: mol_type = other DNA
ttacagaagatgtcatcaggcaggtcatatcaaatctgttcgaatttgaaaaagaaatgctggatggtaaaccag

SEQ ID NO: 630308 - DNA, 75 bp, synthetic construct
  source 1..75: mol_type = other DNA
tgaaggcgatctcgttaaaacagtgggtaaggctttccctcgtgactcccgtgcaccgaagcgttggccatcagg

SEQ ID NO: 630309 - DNA, 75 bp, synthetic construct
  source 1..75: mol_type = other DNA
cgtcgacagttccgagctgccatggctgggcgagcagttctcgctgtttggcgatggctgggagctggcggaatc

SEQ ID NO: 630310 - DNA, 75 bp, synthetic construct
  source 1..75: mol_type = other DNA
tctggaatatcagtctgtcgccattcgatacaacagtactacctgttatgacggtagttacaaccacgggagcag

SEQ ID NO: 630311 - DNA, 75 bp, synthetic construct
  source 1..75: mol_type = other DNA
agggtatctggaaattttccgggggctgatagatgagacgcttctgggccaggcactgaaagagcgcattgatgc

SEQ ID NO: 630312 - DNA, 75 bp, synthetic construct
  source 1..75: mol_type = other DNA
ctccggcccgctgccatctggcaagcctggagtatcagtctgtcgccattcgctacaacaacaccgccaactatg

SEQ ID NO: 630313 - DNA, 75 bp, synthetic construct
  source 1..75: mol_type = other DNA
tgtttgcggtgagtatcacctcgtccggcaatcccccgacgttttccctgacgccggagggcaggctgatcgcaa

SEQ ID NO: 630314 - DNA, 75 bp, synthetic construct
  source 1..75: mol_type = other DNA
ttataaccgtaccgcgatggataatacgctggtttacagtggtgttattgatatgcctgctggtcgcggccacat

SEQ ID NO: 630315 - DNA, 75 bp, synthetic construct
  source 1..75: mol_type = other DNA
tatcgtgatcggcaacctgatattcacaccggtaaaagatgagaagccacaaatgtcccctgaaaacagacagag

SEQ ID NO: 630316 - DNA, 75 bp, synthetic construct
  source 1..75: mol_type = other DNA
gccgcggacgtggacaaatgggcgctgtatgccatcgggcagtactgtgaccagcgtgtcccggacggcttcgga

SEQ ID NO: 630317 - DNA, 75 bp, synthetic construct
  source 1..75: mol_type = other DNA
cgctggggcgttacatgctgacggtccgggcggtaaatgcgtggggacagcagggcgattcggcgtcggtatcgt

SEQ ID NO: 630318 - DNA, 75 bp, synthetic construct
  source 1..75: mol_type = other DNA
accttgcgaacggtacacgaacgctgacggtgtatgacgatcacagctttgaccggcagattataatcccgccga

SEQ ID NO: 630319 - DNA, 75 bp, synthetic construct
  source 1..75: mol_type = other DNA
cagataacggcggtcccgcatcttacggtgtatgacccgacggtacaatttgaattctggttttcggaggcaaaa

SEQ ID NO: 630320 - DNA, 75 bp, synthetic construct
  source 1..75: mol_type = other DNA
tgtgtggggactctccctgccgtcactgcgtcgtcgcctgttccgctgtgtttccatccgggaaaacacggacgg

SEQ ID NO: 630321 - DNA, 75 bp, synthetic construct
  source 1..75: mol_type = other DNA
cccggagaacggcaacaccacgccgctgtttgtggcgcaggggaatcagctgttcatgaacgatgtgttcctgaa

SEQ ID NO: 630322 - DNA, 75 bp, synthetic construct
  source 1..75: mol_type = other DNA
gaaaatcaggactatatgattgcttcccaaattcgggaagcaaaaggtagaggcggttacaaccgcaaggattac

SEQ ID NO: 630323 - DNA, 75 bp, synthetic construct
  source 1..75: mol_type = other DNA
atacagcaacaacccggcctggtgtctgtgggacatgctgacccacccgcgctacgggatggggaaacgcctggg

SEQ ID NO: 630324 - DNA, 75 bp, synthetic construct
  source 1..75: mol_type = other DNA
gattctggagaatctgcctgagcggccctttaacatccggatggtccgggagacagcggacaacacctcggacca

SEQ ID NO: 630325 - DNA, 75 bp, synthetic construct
  source 1..75: mol_type = other DNA
cgctggctgagtctcaggtgtattcaggggtgattgatatgcctgcaggaagggggcatatgacgctggagtttt

SEQ ID NO: 630326 - DNA, 75 bp, synthetic construct
  source 1..75: mol_type = other DNA
tccctgacatcagacgggagactgacggcgaaaaatgcggatatcagtggtagtgtgaatgcgaactcaggaacg

SEQ ID NO: 630327 - DNA, 75 bp, synthetic construct
  source 1..75: mol_type = other DNA
acggacttaaggtgaaagtgaaccgggttcctgatggcgttgcagaatacagtgtgtgggggctgaagttgccga

SEQ ID NO: 630328 - DNA, 75 bp, synthetic construct
  source 1..75: mol_type = other DNA
ctggacgcgcaatcacgccgatatcccgctgcgcccacgatttgcggtgcttgcgagcggcagtttctttagcgg

SEQ ID NO: 630329 - DNA, 75 bp, synthetic construct
  source 1..75: mol_type = other DNA
agccgagtgatgatgcatccggctatctggattttttcaaaggcgagatagggaaaagccatctggctcaggagc

SEQ ID NO: 630330 - DNA, 75 bp, synthetic construct
  source 1..75: mol_type = other DNA
cgcaactggcgctgggaaactacaggctgacagtccgggcggcaaatgcctgggggcagcagggcgatccggcat

SEQ ID NO: 630331 - DNA, 75 bp, synthetic construct
  source 1..75: mol_type = other DNA
atacagaaagttcaggttgatacaaataataacctgaacagcatgtgggctgtgaagctgcagcagatgcaggac

SEQ ID NO: 630332 - DNA, 75 bp, synthetic construct
  source 1..75: mol_type = other DNA
tggccgttgttacttgatgcgcttattcctgtcgccaatacctgcgaaatgatcctgatgcccgcctgcttcggc

SEQ ID NO: 630333 - DNA, 75 bp, synthetic construct
  source 1..75: mol_type = other DNA
catgccgtctgataggagaaaaaacgggggctgaaatttataaccgaacggctctggataatactctgatataca

SEQ ID NO: 630334 - DNA, 75 bp, synthetic construct
  source 1..75: mol_type = other DNA
cccgtcgcaggcggggcaaaccattgagaacctgtttgccatcggttcggtgctgggcggatttgatcccatcgc

SEQ ID NO: 630335 - DNA, 75 bp, synthetic construct
  source 1..75: mol_type = other DNA
ccggctccgagaaggtgctgggtacggaagtgaaatacgacacgccgatcatccggaccatcacgtctgcaaaca

SEQ ID NO: 630336 - DNA, 75 bp, synthetic construct
  source 1..75: mol_type = other DNA
ctgcctgacggtcagccggtgacagacattcacagtggactggaatctttgtgtcatcaggcacctgcccatcca

SEQ ID NO: 630337 - DNA, 75 bp, synthetic construct
  source 1..75: mol_type = other DNA
atccggagaacggtaacaccactccagcactggtcacgcaagggggacagacgtttctcaatgaagcgctgatta

SEQ ID NO: 630338 - DNA, 75 bp, synthetic construct
  source 1..75: mol_type = other DNA
ataacggcggtcccgcgtctgacagtgtatgacccgacggtgcagtttgagttctggttttcggaggcaaaagtc

SEQ ID NO: 630339 - DNA, 75 bp, synthetic construct
  source 1..75: mol_type = other DNA
tgaactaccatatccgcggccgcatcattcaggtgccgtcaaactatgacccggaaaaacgcacctacagcggta

SEQ ID NO: 630340 - DNA, 75 bp, synthetic construct
  source 1..75: mol_type = other DNA
agaactgtcagattaaggggaaactgtcagccaaccagattgaaggcgatatagtcaaaacagtgggtaaggctt

SEQ ID NO: 630341 - DNA, 75 bp, synthetic construct
  source 1..75: mol_type = other DNA
ctcaccagcggattacaccgctcggcactctgcgctcaacctggctaagttcgccagaagtccctgtctggccgc

SEQ ID NO: 630342 - DNA, 75 bp, synthetic construct
  source 1..75: mol_type = other DNA
ggccttagtatggaggatacggaggaaggcaaactgagccagttcctggttgccgctaaccgtatcgcgtttatt

SEQ ID NO: 630343 - DNA, 75 bp, synthetic construct
  source 1..75: mol_type = other DNA
ttttaatattacctttaatcaattttttgcgaatgacaaagaaattgaaaaagcaggcatggtacccgctaaagg

SEQ ID NO: 630344 - DNA, 75 bp, synthetic construct
  source 1..75: mol_type = other DNA
ggaatgccatgtggggcgtcaaaattgagcagaccgaagacggcaaacattatgtcgcggggcttggcctcagca

SEQ ID NO: 630345 - DNA, 75 bp, synthetic construct
  source 1..75: mol_type = other DNA
ggtacaggcaatgcgaacgaagtgaaatacagcattattaatgatttcggtgtcgccggtgaaatgctgacgaag

SEQ ID NO: 630346 - DNA, 75 bp, synthetic construct
  source 1..75: mol_type = other DNA
tctgggacgggagcctcaaaccggcatacagcaacaatccggcctggtgcctgtgggacatgctgacgcacccgc

SEQ ID NO: 630347 - DNA, 75 bp, synthetic construct
  source 1..75: mol_type = other DNA
gggcagcgaaatccggcagacagtaagcaggagcacggaggagaacagccgacagatagcgcagatcagacagta

SEQ ID NO: 630348 - DNA, 75 bp, synthetic construct
  source 1..75: mol_type = other DNA
ggaagtgacgaaggcaaaaccggtgacacgcaccattacgtcagcgaacattgaccgcctgcgggtgaccttcgg

SEQ ID NO: 630349 - DNA, 75 bp, synthetic construct
  source 1..75: mol_type = other DNA
acgctcaataatgtcgtgatagcggagaactgtaccatcaaaggtactctgagagcggaaaatatcattggcgat

SEQ ID NO: 630350 - DNA, 75 bp, synthetic construct
  source 1..75: mol_type = other DNA
tggccagcccctgagcaatatactgctgcaggcggaccgtatcgcgatgattaacccggagaacggcaacaccac

SEQ ID NO: 630351 - DNA, 75 bp, synthetic construct
  source 1..75: mol_type = other DNA
ttgaaattaactcaggaaggcccggcgcaggccgcctgtttttcaatggcgagcgaatcgacgtatatgacgata

SEQ ID NO: 630352 - DNA, 75 bp, synthetic construct
  source 1..75: mol_type = other DNA
gctgttcatgaatgatgttttcatgaaaaaactgaccgtggattttgccagagtgacgggagatatccggtcaga

SEQ ID NO: 630353 - DNA, 75 bp, synthetic construct
  source 1..75: mol_type = other DNA
cctgaactggtcgcggcctttaaattaggcttcgccaaccgcacgttaccctatcgtctgcccgccgttaaatca

SEQ ID NO: 630354 - DNA, 75 bp, synthetic construct
  source 1..75: mol_type = other DNA
gtatggaacggccagacgctgacgttcgttcaggaccgcccgtcggatgtggtgtggccgtacaccaactgcgat

SEQ ID NO: 630355 - DNA, 75 bp, synthetic construct
  source 1..75: mol_type = other DNA
aaaacaggaatcccgtaccagtaatgacatctggacagagtgcttcctgcatgttgatcagaacggacgccggat

SEQ ID NO: 630356 - DNA, 75 bp, synthetic construct
  source 1..75: mol_type = other DNA
ggtacaggcaacgcgcacgaagtgaaatacagcattattaatgatttcggtgttgctggcgaaatgctgacgaag

SEQ ID NO: 630357 - DNA, 75 bp, synthetic construct
  source 1..75: mol_type = other DNA
ctgcgggctatctggaacttttccgggaaaagataggaaaattgcatctggcagaggcgctgtgggcagagattg

SEQ ID NO: 630358 - DNA, 75 bp, synthetic construct
  source 1..75: mol_type = other DNA
ttacgatttcagcgtcaaaataaccaaattgtggttaataacgactcagcttataacctgacctttaatcagatg

SEQ ID NO: 630359 - DNA, 75 bp, synthetic construct
  source 1..75: mol_type = other DNA
ggaggacacacaggccattgcccgttacggtcgtaacgtcacgaagatggatgcctttggctgtaccagccgtgg

SEQ ID NO: 630360 - DNA, 75 bp, synthetic construct
  source 1..75: mol_type = other DNA
gttgggagacagcgacagagcttgtggaggacacacaggccattgcccgttacggtcgtaacgtcacgaagatgg

SEQ ID NO: 630361 - DNA, 75 bp, synthetic construct
  source 1..75: mol_type = other DNA
tcactggtaaaaaagccgctgctttcaaagaagcctacattgctgaattcgatcgcatggaaaaacaactatggg

SEQ ID NO: 630362 - DNA, 75 bp, synthetic construct
  source 1..75: mol_type = other DNA
atgggtaaaggctggaatgcatcctttcatcttggcagacgtgagcggctgcgtcaggagggtttgcaccgtgtc

SEQ ID NO: 630363 - DNA, 75 bp, synthetic construct
  source 1..75: mol_type = other DNA
ccgctaaaaatgcagatatcagtggcagtgtgaatgcgaacgccgggacgctcaacaacgttacgataaatgaaa

SEQ ID NO: 630364 - DNA, 75 bp, synthetic construct
  source 1..75: mol_type = other DNA
acgaacgtgtaattgataaagttcgcaatctggaatgttcgattgaatttactgaacacaattttgtgtcgagta

SEQ ID NO: 630365 - DNA, 75 bp, synthetic construct
  source 1..75: mol_type = other DNA
ccaccgaaaaactggtggtcgatgccgacaatgacatccgtgcacaagttgaatctgcggtgcaaaaagcgggct

SEQ ID NO: 630366 - DNA, 75 bp, synthetic construct
  source 1..75: mol_type = other DNA
tggaaagcgccgggcaaacggttgtgctggtagtacgtaatgatgacgtgctgggtatcattgcattgcaggata

SEQ ID NO: 630367 - DNA, 75 bp, synthetic construct
  source 1..75: mol_type = other DNA
ggctgacgctgctgctgattggttgcccgtgtgctttagttatctccacgcccgcggcgattacctccgggctgg

SEQ ID NO: 630368 - DNA, 75 bp, synthetic construct
  source 1..75: mol_type = other DNA
ataaataagatggaaaaagaacactttaaggctcatgttcagtatgacgactggaagggaagcgttgcagcagac

SEQ ID NO: 630369 - DNA, 75 bp, synthetic construct
  source 1..75: mol_type = other DNA
agtttttcaaaaccttcaaacgtttttcagtcaagatttctcgcaatggggaacttgatgatcaagatatcgagt

SEQ ID NO: 630370 - DNA, 75 bp, synthetic construct
  source 1..75: mol_type = other DNA
agtgctggtggtgcgtaacgatgacgtgcttggtgtgattgcgttgcaggatacgctacgcgccgacgccgcaac

SEQ ID NO: 630371 - DNA, 75 bp, synthetic construct
  source 1..75: mol_type = other DNA
ctggcagtgctggcagataccggtgcgacggtgctggtaacggcgaatgcgttaaggctgttgcgcaggaaataa

SEQ ID NO: 630372 - DNA, 75 bp, synthetic construct
  source 1..75: mol_type = other DNA
gcgccgcctgtgcgcgcaaggtagaaaatgccgtgcgccagcttgcaggcgtgaatcaggtacaggtgttgttcg

SEQ ID NO: 630373 - DNA, 75 bp, synthetic construct
  source 1..75: mol_type = other DNA
aatctggcgctacagattgttgatattatgatggatgcatcaatccgcgattacgtgtctttaagcatggaagaa

SEQ ID NO: 630374 - DNA, 75 bp, synthetic construct
  source 1..75: mol_type = other DNA
tcccgccgccgaatcacaacgggcgctggttgggtctggaattgaagcgcaagtcaacggcgagcgcgtactgat

SEQ ID NO: 630375 - DNA, 75 bp, synthetic construct
  source 1..75: mol_type = other DNA
ataccctgcgcgccgacgccgcaactgccatcagcgaactgagcgccctgggcgtcaaaggagtgatcctcactg

SEQ ID NO: 630376 - DNA, 75 bp, synthetic construct
  source 1..75: mol_type = other DNA
ccaccgaaaaactggtggtggatgccgacaatgacatccgtgcccaggttgaatctgcggtgcaaaaagcgggct

SEQ ID NO: 630377 - DNA, 75 bp, synthetic construct
  source 1..75: mol_type = other DNA
tattcattatccctttagggatatatatacctttttatcttttaaagagaatgaaaaaaacccatagctcgataa

SEQ ID NO: 630378 - DNA, 75 bp, synthetic construct
  source 1..75: mol_type = other DNA
tatcgagtatttctcgtggtatagcgactgcagttcgaagcagtagtttctctgtatcaccgcaaaaagtgtcac

SEQ ID NO: 630379 - DNA, 75 bp, synthetic construct
  source 1..75: mol_type = other DNA
tgctctggcacaactgccacagcccgtaatcgccctgttgcacggcctggcttatggcggtggtctggaactggc

SEQ ID NO: 630380 - DNA, 75 bp, synthetic construct
  source 1..75: mol_type = other DNA
ctcactctgcctgataatgatccgcgctggtttcaggtgaaaaccatgctcgaacgccaccgaatgctgcgtgac

SEQ ID NO: 630381 - DNA, 75 bp, synthetic construct
  source 1..75: mol_type = other DNA
aggcgcaaaaccagcagagcagcgtcagcggcgtcagcatggacgaagaggcggtgaatctgatcacctatcaac

SEQ ID NO: 630382 - DNA, 75 bp, synthetic construct
  source 1..75: mol_type = other DNA
agcggtggtgcaaaacgcgccgcaacgccagacgcaacagcaggaactcacgccgttgccgccgcagttgcagga

SEQ ID NO: 630383 - DNA, 75 bp, synthetic construct
  source 1..75: mol_type = other DNA
gagaaatgcatcaagcgcgagcctttcaactttgcagcgttacgcagctgcatgcgggatgcacattaaactgtc

SEQ ID NO: 630384 - DNA, 75 bp, synthetic construct
  source 1..75: mol_type = other DNA
ctccttaaatatgcgagtaagaaatatcgaagaatcgatcttgtccttgaagaataatatcacacaacttgtaga

SEQ ID NO: 630385 - DNA, 75 bp, synthetic construct
  source 1..75: mol_type = other DNA
taataatatgttaaggataattaataggttaacaatagagcaagttgaaagtgttccatatgttgtttctgaatc

SEQ ID NO: 630386 - DNA, 75 bp, synthetic construct
  source 1..75: mol_type = other DNA
aatgtgtactcctctgatcttattgcatgatacgttaaagagattatcacgaaatgaaaatatcagttataactg

SEQ ID NO: 630387 - DNA, 75 bp, synthetic construct
  source 1..75: mol_type = other DNA
aagcggggaaactgccggaggcgtttttctggacggatgcggaaaacaatgatgtgccgatgaagtcagaagagc

SEQ ID NO: 630388 - DNA, 75 bp, synthetic construct
  source 1..75: mol_type = other DNA
actatcgatctgacgaaatacgtgcccgttgagacgtataacgccctgcgaaccgaatacgtcgcgctgtcagca

SEQ ID NO: 630389 - DNA, 75 bp, synthetic construct
  source 1..75: mol_type = other DNA
gagcgccgttctggacaaggcggaacaggaaggccgcattttcaaaagcgaacgtacctatctggaacagcttgg

SEQ ID NO: 630390 - DNA, 75 bp, synthetic construct
  source 1..75: mol_type = other DNA
tatttctggtcgttatggttgcgtcgctgagttccgttacacagcgtattcaacgtgcggagcaaggcgaaaaag

SEQ ID NO: 630391 - DNA, 75 bp, synthetic construct
  source 1..75: mol_type = other DNA
tcaggtatttatacggactggcgtggatatgccgtggtcccatatttgaatccctataaccgaaatcaaatttca

SEQ ID NO: 630392 - DNA, 75 bp, synthetic construct
  source 1..75: mol_type = other DNA
tcaagcgcaggtatccgtcaagcaaaacggtgttgtcatttatcaaaagaacgtcccacctggaccgtttgaatt

SEQ ID NO: 630393 - DNA, 75 bp, synthetic construct
  source 1..75: mol_type = other DNA
ataggttctcatttaaccccgattttttgcaattatctgatggtgataatgccaaaaatatcgatctcaattatt

SEQ ID NO: 630394 - DNA, 75 bp, synthetic construct
  source 1..75: mol_type = other DNA
acagttgccgagcgaagataaaatgaagcgcgctttcgacgaacaggttggtaatgcatttgcccgtaacccaga

SEQ ID NO: 630395 - DNA, 75 bp, synthetic construct
  source 1..75: mol_type = other DNA
tgcatcaaatcctgataccctgaaggcgctttgtgcagccattatccatcatgaaaacggtagccagccatacag

SEQ ID NO: 630396 - DNA, 75 bp, synthetic construct
  source 1..75: mol_type = other DNA
cgccagcgtaagagtattgaacggttcaggtatttatacagactcgcgtggatatgctgtggttccatatttgaa

SEQ ID NO: 630397 - DNA, 75 bp, synthetic construct
  source 1..75: mol_type = other DNA
cacctacgctcgaaattcgaccgggttatcgcttcaatataatggttactaaagacttagcattcacaaaacctt

SEQ ID NO: 630398 - DNA, 75 bp, synthetic construct
  source 1..75: mol_type = other DNA
gttacagcagttagaaaatctagatttatctgacagaaaaacaagggcgcatcatgaacgttcaagtatacaaac

SEQ ID NO: 630399 - DNA, 75 bp, synthetic construct
  source 1..75: mol_type = other DNA
gataaatcattatattttacgctttctataccaattggtaaatttactggaggtagtaacaatcttaccagtaac

SEQ ID NO: 630400 - DNA, 75 bp, synthetic construct
  source 1..75: mol_type = other DNA
attattcttgagtaaagtcccagagaaaaaaaggaatgtttatataaaaatgctcctcgaagaccctcttcattt

SEQ ID NO: 630401 - DNA, 75 bp, synthetic construct
  source 1..75: mol_type = other DNA
tactcaagcaaccatacctaagtttaaccggatgggaattcttgcaggtgtagaggcgagtggattcaaagtgta

SEQ ID NO: 630402 - DNA, 75 bp, synthetic construct
  source 1..75: mol_type = other DNA
tatccgcaccaaaaacctgttgatcctgctgggcctggttgtggttatcgtcttcactaccgtcggtcttacctt

SEQ ID NO: 630403 - DNA, 75 bp, synthetic construct
  source 1..75: mol_type = other DNA
atgagatttgatatgtgggtacgttgcacgaaagcaggtcctgaacctctcgatatatgggaactctgcacgatt

SEQ ID NO: 630404 - DNA, 75 bp, synthetic construct
  source 1..75: mol_type = other DNA
tgcctggcaaggcggcgtatcactctatactggcccggtgatcaccagctaccgctatacccattatgactccag

SEQ ID NO: 630405 - DNA, 75 bp, synthetic construct
  source 1..75: mol_type = other DNA
gactggtcgccagagacgcgtcacggcagcatgaagagcgccagtttacaacgtattcaaccgttgactgagcaa

SEQ ID NO: 630406 - DNA, 75 bp, synthetic construct
  source 1..75: mol_type = other DNA
cggccatttttagcgcattacccgcttatgccgggttaacttccattaccgcgggctacgattttaccgattatt

SEQ ID NO: 630407 - DNA, 75 bp, synthetic construct
  source 1..75: mol_type = other DNA
tataacctgcacctttcgttgcaacgctcggaatgggtgatgtgcagtttgctggatagcagaagcgcgctacag

SEQ ID NO: 630408 - DNA, 75 bp, synthetic construct
  source 1..75: mol_type = other DNA
gcgctgaactccgtagccaacccagccacagtgctggcgctgctggatgagctggaagccaaagaccagaggatt

SEQ ID NO: 630409 - DNA, 75 bp, synthetic construct
  source 1..75: mol_type = other DNA
tacgtgaaatcgctgaggcagcagttggtgcacatgagcgccttagtgttatgccgcctgatgacattttcgata

SEQ ID NO: 630410 - DNA, 75 bp, synthetic construct
  source 1..75: mol_type = other DNA
ttatgtaagcatttaaacagtaatgggacattaaaaaactctgataaagctgttatcgacccccaaaaaataacc

SEQ ID NO: 630411 - DNA, 75 bp, synthetic construct
  source 1..75: mol_type = other DNA
aaccataatgaataatgtatctaatattgaacatatagatgcttccaggccggtttgcattgattgtgaaaatat

SEQ ID NO: 630412 - DNA, 75 bp, synthetic construct
  source 1..75: mol_type = other DNA
cgaatggggcgaactgacagagcggcgtgagcagcaactggcgtggaacgcgcagggtcagttaacgcgggttat

SEQ ID NO: 630413 - DNA, 75 bp, synthetic construct
  source 1..75: mol_type = other DNA
cctctggaggatgtggtcctgaacaaaacacaggcggcatcatgtacgcagtggagcgtaaccaacggaggaacg

SEQ ID NO: 630414 - DNA, 75 bp, synthetic construct
  source 1..75: mol_type = other DNA
tgccctgaacgatgaagaagtgcgcccggtggccgacagggtaacggtgcagtctgcggagatcgtgccgtatca

SEQ ID NO: 630415 - DNA, 75 bp, synthetic construct
  source 1..75: mol_type = other DNA
ggtgcagcgtgtcgagctgacatcaccgcaggccgacatagtgctgagtaagtcgcaggcgtcgaactgtaccga

SEQ ID NO: 630416 - DNA, 75 bp, synthetic construct
  source 1..75: mol_type = other DNA
ttttgcagcttttgcgtgatgacgatgaaacaagatcgcaaaattcgtcggttgaagaaacctcctccttcagag

SEQ ID NO: 630417 - DNA, 75 bp, synthetic construct
  source 1..75: mol_type = other DNA
gcattgaaaattatatggcgcgggtcaatgattcgctttgtttgctggtacaggtagaaagtaaaacggcgctgg

SEQ ID NO: 630418 - DNA, 75 bp, synthetic construct
  source 1..75: mol_type = other DNA
tgtggctcctgatatggcgcagcaatgccttgcgtggggagcgaactttgtcgccgttggcgtcgacaccatgct

SEQ ID NO: 630419 - DNA, 75 bp, synthetic construct
  source 1..75: mol_type = other DNA
gaagcggcaacctatgcccacggttcaaaagatatgcctgagcgcaatattgtggaagacatcaagttcgcctag

SEQ ID NO: 630420 - DNA, 75 bp, synthetic construct
  source 1..75: mol_type = other DNA
gttccatcagctgtgccatcaggcatccgcgcagtattagcggaaaacttaatttgctcatcgctggatctgtaa

SEQ ID NO: 630421 - DNA, 75 bp, synthetic construct
  source 1..75: mol_type = other DNA
tcccgtcgctggcggcgattcaggaagcggtgcagcagggctttgacgtggctgatattcaggttggcggtttag

SEQ ID NO: 630422 - DNA, 75 bp, synthetic construct
  source 1..75: mol_type = other DNA
tcgcctgcgcaatttaccccaattaacggttgcaaatctcaacggtcataccattggcggtgggattgaactcgc

SEQ ID NO: 630423 - DNA, 75 bp, synthetic construct
  source 1..75: mol_type = other DNA
catcgggcattatctgaacataaaacactatcaataagttggagtcattacccgggcggcgatattaaatcgtgg

SEQ ID NO: 630424 - DNA, 75 bp, synthetic construct
  source 1..75: mol_type = other DNA
accgattttcactatgcagggcatccatggcctgagcttgaaaaagatgtcgatgtgagctggacgcaacaatac

SEQ ID NO: 630425 - DNA, 75 bp, synthetic construct
  source 1..75: mol_type = other DNA
tgccagccaacccgtgatccgtccggtggaaggcagtaagtcgctgattaaacaagtcctggatattggcgcgca

SEQ ID NO: 630426 - DNA, 75 bp, synthetic construct
  source 1..75: mol_type = other DNA
tcggcgcggagatgcaacgattaagccgggtaatggtattgagcaagcaactcactggatgccactaccagaacc

SEQ ID NO: 630427 - DNA, 75 bp, synthetic construct
  source 1..75: mol_type = other DNA
ggatgtgtaagtactgaaatgcttatgcactggataagggtcgcgtatgaggctggcaactatccggtaactccg

SEQ ID NO: 630428 - DNA, 75 bp, synthetic construct
  source 1..75: mol_type = other DNA
gaactggacggcaaacgccgggaccagtttgacatgatcgaccgatttatcgccgattacgcgatcaacgttgag

SEQ ID NO: 630429 - DNA, 75 bp, synthetic construct
  source 1..75: mol_type = other DNA
ctgaaggcgcatggcgcggatttgacgaacaggaaaccaccgttgccgttgctcgctatgcaccgttcaatgcca

SEQ ID NO: 630430 - DNA, 75 bp, synthetic construct
  source 1..75: mol_type = other DNA
atgctttatcttgaggcacgttgcatttacatcaccaaagccgcgggtgttcagggtctgcaaaacggttccgta

SEQ ID NO: 630431 - DNA, 75 bp, synthetic construct
  source 1..75: mol_type = other DNA
aagcaggtattccgtgggccattgtgacttctggctccatgccggtagcgcgagcgcgccataaaatagcggggc

SEQ ID NO: 630432 - DNA, 75 bp, synthetic construct
  source 1..75: mol_type = other DNA
agcggaaaacttaatttgctcatcgctggatctggaatgcgcttccagtaatgaccagacctttacccactcgga

SEQ ID NO: 630433 - DNA, 75 bp, synthetic construct
  source 1..75: mol_type = other DNA
tgttcactggaagaagcctccgaactgaaactcggtatgttaggccacacctgttacgccgaaacaatttctgtc

SEQ ID NO: 630434 - DNA, 75 bp, synthetic construct
  source 1..75: mol_type = other DNA
aggatttctcgcgtcatcctatgcttctcgcggcttaaaaatgcgctttacttccggctccggctctgaagtaca

SEQ ID NO: 630435 - DNA, 75 bp, synthetic construct
  source 1..75: mol_type = other DNA
ctatggaaatggcgttaaaccgctttaaatcggagttttcactcgcccgccatctctattttgattacctttatc

SEQ ID NO: 630436 - DNA, 75 bp, synthetic construct
  source 1..75: mol_type = other DNA
gcaattctgtcttgtaaatcatctgacactgtccgagcacggtctttattgcccctgcgtgggcagtgccaccga

SEQ ID NO: 630437 - DNA, 75 bp, synthetic construct
  source 1..75: mol_type = other DNA
ccgacggcgatgatacgccgtggtccaaagcgtttctcgcctcggcctatgcgtctcgcggactgaaaatgcgtt

SEQ ID NO: 630438 - DNA, 75 bp, synthetic construct
  source 1..75: mol_type = other DNA
ggagaacaccgatgaagaaatcacttgttcacacacattgcaggcgctgtggttgcagtctcatcatgtcagaac

SEQ ID NO: 630439 - DNA, 75 bp, synthetic construct
  source 1..75: mol_type = other DNA
gcgagccgggaaacctggctggagagtgtcccggacagtaccgaaccgtcaccctcaccggaaccggtatccacg

SEQ ID NO: 630440 - DNA, 75 bp, synthetic construct
  source 1..75: mol_type = other DNA
ccagctggtctataagttgctgaccgccgaacaggaatacgagtcgaccggaagcgaagaaacgctcaagacagt

SEQ ID NO: 630441 - DNA, 75 bp, synthetic construct
  source 1..75: mol_type = other DNA
gctgtccttttcactgggagacattaccagtgagctgaatgtgccgcgcctgaagtcactggtagtgagtcttga

SEQ ID NO: 630442 - DNA, 75 bp, synthetic construct
  source 1..75: mol_type = other DNA
gtaccgcttccgctcggctcttgccgcgtgcagaagtctgggatggcagattggcacgtgcgcatggaacgacca

SEQ ID NO: 630443 - DNA, 75 bp, synthetic construct
  source 1..75: mol_type = other DNA
gtgatcgctggcatctggcgtgccggggagactacgttatccgtcttgacggcaccacctgcctgcagctgtgga

SEQ ID NO: 630444 - DNA, 75 bp, synthetic construct
  source 1..75: mol_type = other DNA
gatcggccggtggagttgggcgatctctggcacatggcgtgccggggcgactacgttatccgtctcaacggaacc

SEQ ID NO: 630445 - DNA, 75 bp, synthetic construct
  source 1..75: mol_type = other DNA
ctgcgtctggattaacccctatatcggtcaaaaatcccccgtctttaaagagttacaagagaaaggctatttact

SEQ ID NO: 630446 - DNA, 75 bp, synthetic construct
  source 1..75: mol_type = other DNA
gcctgaaagcgaaaggactgaaaatctgcgtctggattaacccctatatcggtcaaaaatccgtaagcggctcgc

SEQ ID NO: 630447 - DNA, 75 bp, synthetic construct
  source 1..75: mol_type = other DNA
gtcagacttggggcatataaaactcataccatgcagaaaggcacgatgtttgaaactgctggctatgtcattaca

SEQ ID NO: 630448 - DNA, 75 bp, synthetic construct
  source 1..75: mol_type = other DNA
atgaagaaactgattctcatcgccatgatggcatcggggttagtggcctgtgcgcaatcaaccgcgccacaggaa

SEQ ID NO: 630449 - DNA, 75 bp, synthetic construct
  source 1..75: mol_type = other DNA
catggcgtcgcagtttgccgatgcggtcaacaatcagctggcgcagggctacgatctcaacggtaaccccggcga

SEQ ID NO: 630450 - DNA, 75 bp, synthetic construct
  source 1..75: mol_type = other DNA
gactcgcaaagcacggaaatcatcagccagcagcaggcgatggtgtcgcaaatcaacacgctcaccagcggcatc

SEQ ID NO: 630451 - DNA, 75 bp, synthetic construct
  source 1..75: mol_type = other DNA
gctgaacaccctgctgaacaacctggaacgacaacagctgtactgcaaccgcgaacaactgacggagattgtgtt

SEQ ID NO: 630452 - DNA, 75 bp, synthetic construct
  source 1..75: mol_type = other DNA
atttatcgcagagactatggtacagaactattactttattaatccagactatatgtttaatggtgatcgcttgac

SEQ ID NO: 630453 - DNA, 75 bp, synthetic construct
  source 1..75: mol_type = other DNA
gacagccatctgaaagaagcttacagcgcctgtatcaacaccgcgcaaggttcgccggaaaaaattgaagcctgt

SEQ ID NO: 630454 - DNA, 75 bp, synthetic construct
  source 1..75: mol_type = other DNA
gatggcgaaccagttagcgcagctggaaaaatgtggtccggtggcactggcacacattaagcaactgattctggc

SEQ ID NO: 630455 - DNA, 75 bp, synthetic construct
  source 1..75: mol_type = other DNA
gggttatgccggtaatccgcaacacccggaagtgcaggccgcgattgagcaggcgatcgtgcagatccgcgaagc

SEQ ID NO: 630456 - DNA, 75 bp, synthetic construct
  source 1..75: mol_type = other DNA
gtgttcccaagggggctggtaactcggtgccatgggatcctgaactgacaccctacatcattgagcccatgaact

SEQ ID NO: 630457 - DNA, 75 bp, synthetic construct
  source 1..75: mol_type = other DNA
acgcgccgcgcacaggcgactggtgatgtgcctctttatcttctccagaccgatgcccttaaagaccgggtgaat

SEQ ID NO: 630458 - DNA, 75 bp, synthetic construct
  source 1..75: mol_type = other DNA
gcactgacgtatggcgggtacgaaatgacgcctgtgaaggtgacaattaacgccgttgctgcagagactgaaaat

SEQ ID NO: 630459 - DNA, 75 bp, synthetic construct
  source 1..75: mol_type = other DNA
tggtgaatttcacgccagcaacgccattttcaaacccatcgattttcagcaaacgctgaataatttttgcccgga

SEQ ID NO: 630460 - DNA, 75 bp, synthetic construct
  source 1..75: mol_type = other DNA
tttgatattgtggtgagtgattgttgcccggaagatgagtatgtgaagtacgcgcagacgcaccgtattaagttg

SEQ ID NO: 630461 - DNA, 75 bp, synthetic construct
  source 1..75: mol_type = other DNA
cggaatccattgcctatctgctgaaagacacttcacagtttgaaatatcggtaccggcttatccggacaaaacat

SEQ ID NO: 630462 - DNA, 75 bp, synthetic construct
  source 1..75: mol_type = other DNA
cgtggctcagatccagggaatggacccggtctggatcagtgctgccgtaccagaatctatcgcctatctactgaa

SEQ ID NO: 630463 - DNA, 75 bp, synthetic construct
  source 1..75: mol_type = other DNA
actctaccgccattgcacaaaatacaaatacgaaaaaaccacccgaaggtggtttcacgacactgcttattgctt

SEQ ID NO: 630464 - DNA, 75 bp, synthetic construct
  source 1..75: mol_type = other DNA
cggcagctgcttatcagacactctcgcaactcgtttacaaactgcttactgcagaacaggaatacgagacaaccg

SEQ ID NO: 630465 - DNA, 75 bp, synthetic construct
  source 1..75: mol_type = other DNA
aagggacactttccttccgtgattggaaactctcaaatcacgggaggaagattgaaaaggcgggtaataatggta

SEQ ID NO: 630466 - DNA, 75 bp, synthetic construct
  source 1..75: mol_type = other DNA
taccggtaaagaacagcgtgtgatcaccgttgatgatgagggcaggtttgtgccgaaaaaaatccacgttctgca

SEQ ID NO: 630467 - DNA, 75 bp, synthetic construct
  source 1..75: mol_type = other DNA
ataaaattttcggagaggataattttattggaaatatagtagtttgtcgttcaaaaaatggaaaaggtagcaaac

SEQ ID NO: 630468 - DNA, 75 bp, synthetic construct
  source 1..75: mol_type = other DNA
atgagtcgttcgcagaatttacgtcataacgtcataaatcaggtgattgaagatatggcgaggggcaatattcct

SEQ ID NO: 630469 - DNA, 75 bp, synthetic construct
  source 1..75: mol_type = other DNA
cgaacgtcacaggacattgcgcgacagcattggcagcaactttcgaatgttttctcaattagaccgtgattttca

SEQ ID NO: 630470 - DNA, 75 bp, synthetic construct
  source 1..75: mol_type = other DNA
caattctggaattcagataaggtcggaacacgtgtgattttgtacagtgaaccatcttgtaaggagtataaatat

SEQ ID NO: 630471 - DNA, 75 bp, synthetic construct
  source 1..75: mol_type = other DNA
tagatacaacatccagactgaccactaatgatattaagtttttggcatttgtatattttttacgttcaatcaata

SEQ ID NO: 630472 - DNA, 75 bp, synthetic construct
  source 1..75: mol_type = other DNA
gaaccagttgcttatattttcaaacatccggccgggaaattattctgggctttaacggatgaaagtaataaagag

SEQ ID NO: 630473 - DNA, 75 bp, synthetic construct
  source 1..75: mol_type = other DNA
ccattaccgcgggctacgattttaccgattattctggcgaacatggcaaccgtaatttagcgtatgctgaactgg

SEQ ID NO: 630474 - DNA, 75 bp, synthetic construct
  source 1..75: mol_type = other DNA
taagtatttttagcacattaccagcgtatggcggaataacatcaatcactacaggttatgatttcattgattatt

SEQ ID NO: 630475 - DNA, 75 bp, synthetic construct
  source 1..75: mol_type = other DNA
gcgtggtcgtgcactggccggggcgagtggcgatcgggaagcgcaaatattttgtacgaacctgatggcagaact

SEQ ID NO: 630476 - DNA, 75 bp, synthetic construct
  source 1..75: mol_type = other DNA
gtatgacctggctaacgggaaatataccgctcaggacgctacgacagcacaaaaaggaattgtccagctcagtag

SEQ ID NO: 630477 - DNA, 75 bp, synthetic construct
  source 1..75: mol_type = other DNA
cttaatctcgggttgacggcaggtaaagtgtggttcaacaccccaaccgatgattataacggtctgcaacttgca

SEQ ID NO: 630478 - DNA, 75 bp, synthetic construct
  source 1..75: mol_type = other DNA
gcgcggtgctggttatacgcaactatggctaagccgcggaacaggtgcttacacctacgactggacgccagaaac

SEQ ID NO: 630479 - DNA, 75 bp, synthetic construct
  source 1..75: mol_type = other DNA
tgtactgttgatggagtggagcaaataaaagaggaatatgcagaattatatgatccagcccaagaatgctggaaa

SEQ ID NO: 630480 - DNA, 75 bp, synthetic construct
  source 1..75: mol_type = other DNA
caccattacaacccgatatgttccccctctcagtacatcctcatccgcaccccaccatgacgccgtatgcgcagc

SEQ ID NO: 630481 - DNA, 75 bp, synthetic construct
  source 1..75: mol_type = other DNA
cccgatgagattctggttgacgtgatacgcaacctcccgacagctcagggttattgcgattcaaaaggcctctat

SEQ ID NO: 630482 - DNA, 75 bp, synthetic construct
  source 1..75: mol_type = other DNA
atgccgggcgggcgcctctatgaacagcgtaaccgcgcctgggaactgattaacgatattcctggcgtttcctgc

SEQ ID NO: 630483 - DNA, 75 bp, synthetic construct
  source 1..75: mol_type = other DNA
atgctgtcgcatggtcgtgaacactatgagccggctccattcacaaccggtctgaagcgtgtgccatatcaggag

SEQ ID NO: 630484 - DNA, 75 bp, synthetic construct
  source 1..75: mol_type = other DNA
gataagtgggttgctgaaaacattggtttgtcgcgctgcaaagacgaggctgaactcttcgatacgaagtggttt

SEQ ID NO: 630485 - DNA, 75 bp, synthetic construct
  source 1..75: mol_type = other DNA
gcgcaattttctccgctatctggctaatggaaatcgttccagagcgccttatttccgcccactttccagaagaac

SEQ ID NO: 630486 - DNA, 75 bp, synthetic construct
  source 1..75: mol_type = other DNA
tgacggtcgctcgctgggtgagctggtcaaagaagagatggggccaaccgccggggtgatagcgctggtggcctg

SEQ ID NO: 630487 - DNA, 75 bp, synthetic construct
  source 1..75: mol_type = other DNA
ggcggtgctgccggtgtggttgctgctggccccgcgtgactacctctcaaccttcctgaaaatcgggactatcgt

SEQ ID NO: 630488 - DNA, 75 bp, synthetic construct
  source 1..75: mol_type = other DNA
gagctaaggccggaaaagaaggtgggaacagtaaatcagaagtgtatcgaataattcaggataagcttgttaatt

SEQ ID NO: 630489 - DNA, 75 bp, synthetic construct
  source 1..75: mol_type = other DNA
cgcagagcatcactcgattgctgcaatggcgccagacctgctgaccatcacctttaacggtttgtcgaagaccta

SEQ ID NO: 630490 - DNA, 75 bp, synthetic construct
  source 1..75: mol_type = other DNA
ctaccgcgtgtcgatgatatcgagctgtctttgagtaagttcgcgcgtttcctttctggttatcatcagctgtaa

SEQ ID NO: 630491 - DNA, 75 bp, synthetic construct
  source 1..75: mol_type = other DNA
atttcagatatatcaggggatgtctatgttaataatattagggctaaaaaacgaaatttattgcctagctcatgc

SEQ ID NO: 630492 - DNA, 75 bp, synthetic construct
  source 1..75: mol_type = other DNA
ggaaaggagaaagcaccgcgccctacccctcaggcatcaacgcaaaacacaactccgatcacaaaaacgcgctta

SEQ ID NO: 630493 - DNA, 75 bp, synthetic construct
  source 1..75: mol_type = other DNA
tcaccaggaaagctgatcatactcggtctgcaacacgtccttgtcatgtacgcaggtgcagtcgctgttcctctt

SEQ ID NO: 630494 - DNA, 75 bp, synthetic construct
  source 1..75: mol_type = other DNA
ctggtaaaaaatatttctttgggtgaggtatccaaatccgcactggaagctactggtaagagtcctgcacagagc

SEQ ID NO: 630495 - DNA, 75 bp, synthetic construct
  source 1..75: mol_type = other DNA
ttagtggtcacatgaatacctttgaaatcgaagctttgatggatgaagagatcgagactcacgaaagcgaggcgg

SEQ ID NO: 630496 - DNA, 75 bp, synthetic construct
  source 1..75: mol_type = other DNA
tgctgcatagcggcattatgctcgcaacccttagcgccgttgtgctgaacgtcttctttaatggctatcagcatc

SEQ ID NO: 630497 - DNA, 75 bp, synthetic construct
  source 1..75: mol_type = other DNA
cctcatcttcagggcaagactgccccactgatgaggttgaccgtatattatcaccaggaaagttgatcatactcg

SEQ ID NO: 630498 - DNA, 75 bp, synthetic construct
  source 1..75: mol_type = other DNA
gcattgcttccggtatcattttgatcctgttcggcatggtgcccaaaatggcggtgctggtggcctcgattccgc

SEQ ID NO: 630499 - DNA, 75 bp, synthetic construct
  source 1..75: mol_type = other DNA
ctaaaggcagaatttccagacgccgctatatattttcatttatttttacaaatctaatttgtatcttacttattt

SEQ ID NO: 630500 - DNA, 75 bp, synthetic construct
  source 1..75: mol_type = other DNA
aaggcagaatttccagacgccgttatttgttttcatttattttaacaaatttagtttgtgtcttacttattgctt

SEQ ID NO: 630501 - DNA, 75 bp, synthetic construct
  source 1..75: mol_type = other DNA
ttttcttgttattgtctctaccatcgcactccattatctcgtcatcaacataaattgccaacgactccgtgatag

SEQ ID NO: 630502 - DNA, 75 bp, synthetic construct
  source 1..75: mol_type = other DNA
attgttgcctataacgaatgtgaggaatggttaacgtcattaaaggagcatcttgcttcaaatattcaatttacc

SEQ ID NO: 630503 - DNA, 75 bp, synthetic construct
  source 1..75: mol_type = other DNA
gactggcaagattttgatctaaaaattaaaaaagcgaagatggtgttattatgcaatcctcataacccgacagga

SEQ ID NO: 630504 - DNA, 75 bp, synthetic construct
  source 1..75: mol_type = other DNA
aatggttaaagtcgttaaaggtacatattgcctctaacattcaatttaccttgcagtatttaaatgaaaatattc

SEQ ID NO: 630505 - DNA, 75 bp, synthetic construct
  source 1..75: mol_type = other DNA
ctgtagtttcagctttaatgaatggtgttgcatttgctgctccggccgataacgatgcaagtaaggctactctta

SEQ ID NO: 630506 - DNA, 75 bp, synthetic construct
  source 1..75: mol_type = other DNA
acaagcctggaaagtggaacataatttgtcggatattctactgttgactatttgtgccgtcatttctggtgcaga

SEQ ID NO: 630507 - DNA, 75 bp, synthetic construct
  source 1..75: mol_type = other DNA
acaagcctggaaagtggaacataaattgtcagatatcctggcgctgacaatctgtgccgtcattttcggggctga

SEQ ID NO: 630508 - DNA, 75 bp, synthetic construct
  source 1..75: mol_type = other DNA
atatttctattatccccgattacagacaagcctggaaagtggaacataaattatctgatattctactgttgacta

SEQ ID NO: 630509 - DNA, 75 bp, synthetic construct
  source 1..75: mol_type = other DNA
aatgtcagtggcctcgaagaacaggtcaactggccagcaatgcacaaagctatctcagcaacaggcttgcggatc

SEQ ID NO: 630510 - DNA, 75 bp, synthetic construct
  source 1..75: mol_type = other DNA
aaatacaacgccggtcacaaaaacgcgtttaatagataccccggtgcgttccggtcagcgtatttatgctccaca

SEQ ID NO: 630511 - DNA, 75 bp, synthetic construct
  source 1..75: mol_type = other DNA
aatggaataactggctgacaacccgaacgggtattgcctttgcggataatacgccggtctttgcccgtcaggatt

SEQ ID NO: 630512 - DNA, 75 bp, synthetic construct
  source 1..75: mol_type = other DNA
ataaatcagataattacatggaatcgttctatgtctgatattgtgaggagtattttccagaacaaaggtattgtt

SEQ ID NO: 630513 - DNA, 75 bp, synthetic construct
  source 1..75: mol_type = other DNA
atgttacagaaccagaaggtactgccattcaaattggtgaaaataaaaatctcagtgtagtaaaagatgggcagg

SEQ ID NO: 630514 - DNA, 75 bp, synthetic construct
  source 1..75: mol_type = other DNA
tttgaagctatcctgacgcgggaaaaaatgggcagtaccggtatcggtaatggcattgcgatcccgcacggcaaa

SEQ ID NO: 630515 - DNA, 75 bp, synthetic construct
  source 1..75: mol_type = other DNA
ggggaaacacatctcaattttttgaagcaatatggtgattttgaaaatggtattcctgttcacgataccattgcc

SEQ ID NO: 630516 - DNA, 75 bp, synthetic construct
  source 1..75: mol_type = other DNA
atggatgtttttaatactcctgtttcccgcaaaggaacatattgtacccaatgggacttttgcgaggacagattt

SEQ ID NO: 630517 - DNA, 75 bp, synthetic construct
  source 1..75: mol_type = other DNA
agatataatgaagaaaataaacgacagaaattaatgccaacaccgtctgaagatgcgttaaaacagatggtggat

SEQ ID NO: 630518 - DNA, 75 bp, synthetic construct
  source 1..75: mol_type = other DNA
ggaagccaccatttttctctatccgggaccggaagcagagccggtaatggcagcggcaaaagccagcctgcagag

SEQ ID NO: 630519 - DNA, 75 bp, synthetic construct
  source 1..75: mol_type = other DNA
gcgcagaaatcataccgtaccgcgtggaagccaccacttttctctatccggggccggaagcagagccggtaatgg

SEQ ID NO: 630520 - DNA, 75 bp, synthetic construct
  source 1..75: mol_type = other DNA
atttactggcgattgttgataaatcgctgaatgccgaagatgtgcgccccgtggccgaccgggtgactgtccagt

SEQ ID NO: 630521 - DNA, 75 bp, synthetic construct
  source 1..75: mol_type = other DNA
ttcatcctaaagatgaacaggaagccgtgatccgtacgctggaactggaatctgaacccgtcaccaaattgttgc

SEQ ID NO: 630522 - DNA, 75 bp, synthetic construct
  source 1..75: mol_type = other DNA
ggccggaaacaacaacaccgcgcgacagattgtgacgcccgccgatgacagcactatcccgccgacacccgccgt

SEQ ID NO: 630523 - DNA, 75 bp, synthetic construct
  source 1..75: mol_type = other DNA
tttatgccgcgctgcatgtcgagggtgtccagcgtgtggaactggccgcgccggtggctgacctcgtgctcagca

SEQ ID NO: 630524 - DNA, 75 bp, synthetic construct
  source 1..75: mol_type = other DNA
gctttccgatcaagagatcgaacagactttgcaggcatttgaagcacgcgtgaagtctgctgctcaggcgaagat

SEQ ID NO: 630525 - DNA, 75 bp, synthetic construct
  source 1..75: mol_type = other DNA
ccgatggaacgtattgagcctgatgaacaggtacaaattcgcctgatggcactggcctcgttaaacaacttacca

SEQ ID NO: 630526 - DNA, 75 bp, synthetic construct
  source 1..75: mol_type = other DNA
ggcgctggcatcgcttagcaaattaccgcaggacagagaaacgttgttctattttaacgtacgagaaataccacc

SEQ ID NO: 630527 - DNA, 75 bp, synthetic construct
  source 1..75: mol_type = other DNA
gctgttattactccttatgctcaatggttactttctcttgctcaaaaatgggctacagataaacacagtgaaaat

SEQ ID NO: 630528 - DNA, 75 bp, synthetic construct
  source 1..75: mol_type = other DNA
gcaaaaagaccttgtcgcatggtttattgatggctcagtacgctattacaaaatcaaatacccgaacggtaccgt

SEQ ID NO: 630529 - DNA, 75 bp, synthetic construct
  source 1..75: mol_type = other DNA
aatcaccaacaacggcaaaccatcgctggcagaagacagcggtaccgcgccgattgcagtcacggggatcagcct

SEQ ID NO: 630530 - DNA, 75 bp, synthetic construct
  source 1..75: mol_type = other DNA
agtgatccgcactctggaactggaatctgaacccgtcaccaaattgctgcaggagaacgcttaccgtgagttgct

SEQ ID NO: 630531 - DNA, 75 bp, synthetic construct
  source 1..75: mol_type = other DNA
tttatgccgctttgcatgtggaaggcgtgcagcgtgtcgaactggccgcaccactggccgacatcgtgctcaaca

SEQ ID NO: 630532 - DNA, 75 bp, synthetic construct
  source 1..75: mol_type = other DNA
aaccgcctcgctttatctctatcccggtcccgagagtgaacccattcgcgccgctgccgtgaaaaagctggaggg

SEQ ID NO: 630533 - DNA, 75 bp, synthetic construct
  source 1..75: mol_type = other DNA
tgacgcgacgctctacgtttaccccggccccgaatctgaacccatcagacaggcatcagagcagaagctgcagag

SEQ ID NO: 630534 - DNA, 75 bp, synthetic construct
  source 1..75: mol_type = other DNA
catcttttataaaattatctcttttatttcccgcatgtgtttatgcgggagatttcaattctgattttttgattg

SEQ ID NO: 630535 - DNA, 75 bp, synthetic construct
  source 1..75: mol_type = other DNA
ccgctggctgatgtggtcctgaacaaaacacaggccgcatcatgtacgcagtggagcgtaaccaacggaggaacg

SEQ ID NO: 630536 - DNA, 75 bp, synthetic construct
  source 1..75: mol_type = other DNA
ccgccggtaatgaccttgatgtgattggtgccaattacaacaccacgcgcctgattatcactccggcagatgatt

SEQ ID NO: 630537 - DNA, 75 bp, synthetic construct
  source 1..75: mol_type = other DNA
gtacatcacggcgcagcaccggctggggcgcgacatccgtctgtctgccatttatgccgctttgcatgtggaagg

SEQ ID NO: 630538 - DNA, 75 bp, synthetic construct
  source 1..75: mol_type = other DNA
acgctgtgccgcccgttgcagctgtgatggaaagcgatgaagcgttacgcctgcgtgtgcctgcagcctttgaag

SEQ ID NO: 630539 - DNA, 75 bp, synthetic construct
  source 1..75: mol_type = other DNA
atagtgccggtgcgcaccaacacaagagttccggtgcatttggtggcacgaacacgagcatttttcctaatggtt

SEQ ID NO: 630540 - DNA, 75 bp, synthetic construct
  source 1..75: mol_type = other DNA
gcgtcgggacagacctggacaacctcgcgggcaatatgaacacaaagcgcctggttatcactccggcaacggata

SEQ ID NO: 630541 - DNA, 75 bp, synthetic construct
  source 1..75: mol_type = other DNA
cgtctccgccgcgctggaactggaatcagaaccactgaacgttatcgctcaaaccatgtcttttcgtgaaatgct

SEQ ID NO: 630542 - DNA, 75 bp, synthetic construct
  source 1..75: mol_type = other DNA
atgaaatcaccgttaatcacaacaggaatgatttatttactggggatctgcaactttgcccaggcgactgtctcc

SEQ ID NO: 630543 - DNA, 75 bp, synthetic construct
  source 1..75: mol_type = other DNA
aggcggcatatcactctatactggcccggtgatcaccagctaccgctatacccaatatgactccagcgatgcagg

SEQ ID NO: 630544 - DNA, 75 bp, synthetic construct
  source 1..75: mol_type = other DNA
tctggtacaaatggaataactggctgacaacccgaacgggtattgcctttgcggataatacgccggtctttgccc

SEQ ID NO: 630545 - DNA, 75 bp, synthetic construct
  source 1..75: mol_type = other DNA
tggtggatatccgtctgctggatcacctggtggttggcggcatggagattgtctcgttcgctgaacgcggctggc

SEQ ID NO: 630546 - DNA, 75 bp, synthetic construct
  source 1..75: mol_type = other DNA
aggcggcctatcactctatactggcccggtgatcaccagttaccgctatacccattatgactccagcgatgcagg

SEQ ID NO: 630547 - DNA, 75 bp, synthetic construct
  source 1..75: mol_type = other DNA
aggcggcctatcactctatactggcccggtgatcaccagataccgctatacccaatatgactccagcgatgcagg

SEQ ID NO: 630548 - DNA, 75 bp, synthetic construct
  source 1..75: mol_type = other DNA
aggcggcttatcactctatactggcccggtgatcaccagctaccgctatacccattatgactccagcgatgcagg

SEQ ID NO: 630549 - DNA, 75 bp, synthetic construct
  source 1..75: mol_type = other DNA
tatcgcagcctgagctttttccggtgtcggtcatggctcagcatggctgtttactccctacgacttccggactga

SEQ ID NO: 630550 - DNA, 75 bp, synthetic construct
  source 1..75: mol_type = other DNA
atgaataccgcattatccccggtgtcatcgcagcccgaactctttccgctgacggttgtggcccagcatggttgc

SEQ ID NO: 630551 - DNA, 75 bp, synthetic construct
  source 1..75: mol_type = other DNA
gaatggctgattctgaacatggcgggactggagcgtgaagagttccgggtgctgtatctgaataaccagaatcag

SEQ ID NO: 630552 - DNA, 75 bp, synthetic construct
  source 1..75: mol_type = other DNA
cgtcatcgcagcctgatatgttcccgtcactgacctcaccacaccaggaagtccccctgtccccgtatgcccggc

SEQ ID NO: 630553 - DNA, 75 bp, synthetic construct
  source 1..75: mol_type = other DNA
atccccgtgaagtggtaaagtctgcacttcgcttcaatgctgccgctgtcgtattggcgcacaaccatccatccg

SEQ ID NO: 630554 - DNA, 75 bp, synthetic construct
  source 1..75: mol_type = other DNA
gtgctggcgcataaccatccctccggtgatccggagcccagccaatgcgatcgcaacattacgggcaggcttaaa

SEQ ID NO: 630555 - DNA, 75 bp, synthetic construct
  source 1..75: mol_type = other DNA
aggcggcctatcactctatactggcccggtgatcaccagctaccgctatacccactatgactccagcgatgcagg

SEQ ID NO: 630556 - DNA, 75 bp, synthetic construct
  source 1..75: mol_type = other DNA
ggacaccactttgtctaactcgtcagattctgaccaaacgtttcaggctgtacgcttactctgaaggggggagaa

SEQ ID NO: 630557 - DNA, 75 bp, synthetic construct
  source 1..75: mol_type = other DNA
cgtaaaaaactgtacggcgatcttgatacattacagtcggatcttgatgaatggctggctcactataataatgag

SEQ ID NO: 630558 - DNA, 75 bp, synthetic construct
  source 1..75: mol_type = other DNA
aaccttgagaatttcaaaaaaagtctgaaagcactggaagaaaaagtagcccgtgatggcattgagctaactgac

SEQ ID NO: 630559 - DNA, 75 bp, synthetic construct
  source 1..75: mol_type = other DNA
cgaagccactgaacaggccactgcagcagcgaggtctgcttccgcagcgaggacatccgagacgaacgcgaaagc

SEQ ID NO: 630560 - DNA, 75 bp, synthetic construct
  source 1..75: mol_type = other DNA
tttgtcttgtcggggatgctgatggcgataactcagcggtttaccggccggtgcaaaaatacataaacggcacat

SEQ ID NO: 630561 - DNA, 75 bp, synthetic construct
  source 1..75: mol_type = other DNA
ggttcgcaggacacgctctatgtaggcaacctgaaaggtgtcgggcgtatttatcagcagacgttcgttgatacg

SEQ ID NO: 630562 - DNA, 75 bp, synthetic construct
  source 1..75: mol_type = other DNA
gctcatcaggagcgtgaagtttttatcgtgatgtatctcgacaatcagcactgcctactgggatgcgaaactcta

SEQ ID NO: 630563 - DNA, 75 bp, synthetic construct
  source 1..75: mol_type = other DNA
aggcggcgtatcactctatactggcccggtgatcaccagctaccgctatacccagtatgactccagcgatgcagg

SEQ ID NO: 630564 - DNA, 75 bp, synthetic construct
  source 1..75: mol_type = other DNA
aggcggcctatcactctatactggcccggtgatcaccaggtaccgctatacccagtatgactccagcgatgcagg

SEQ ID NO: 630565 - DNA, 75 bp, synthetic construct
  source 1..75: mol_type = other DNA
gaagcgctggcattggttgatgtgaacactctcgatcatctggttatcggttcagatggaattgtgtcgtttgca

SEQ ID NO: 630566 - DNA, 75 bp, synthetic construct
  source 1..75: mol_type = other DNA
gtgctggcgcataaccatccatccggtgatccggagcccagccaatgtgaccgcaacattacgggcaggcttaaa

SEQ ID NO: 630567 - DNA, 75 bp, synthetic construct
  source 1..75: mol_type = other DNA
ggcgattatggcccagcatggttgtttgctccccgcgacctccggattaaccccctatgcccaacgcaccattcg

SEQ ID NO: 630568 - DNA, 75 bp, synthetic construct
  source 1..75: mol_type = other DNA
ggcggaaaacttaatttgttcatcgctggatctggaatgcgcctccagtaatgaccagacctttacccactcaga

SEQ ID NO: 630569 - DNA, 75 bp, synthetic construct
  source 1..75: mol_type = other DNA
acagagcgaagatgcccgctcaccgttttgctattaatctgtctccaacctcggtatgtcaggctcgttttcctg

SEQ ID NO: 630570 - DNA, 75 bp, synthetic construct
  source 1..75: mol_type = other DNA
ttgctggaaccgggtgaagatgtttatcagctttcgggtaacgatctcgcgctgcgactgaatacagaatcgcac

SEQ ID NO: 630571 - DNA, 75 bp, synthetic construct
  source 1..75: mol_type = other DNA
taaatgaaaaaagcacaatttttagcaccaactatacgttatcgttattgctaccgctgatgatgtggggagcaa

SEQ ID NO: 630572 - DNA, 75 bp, synthetic construct
  source 1..75: mol_type = other DNA
agaattgatagcacagcatctcgggtatggtggaagctctggatttctgttctcggataaaaatgcgattggcgg

SEQ ID NO: 630573 - DNA, 75 bp, synthetic construct
  source 1..75: mol_type = other DNA
gctcaggagtcaatgcatcgacgggaaaaaatgccacaggtaatggctctggcggaagcggcgcggtctctattt

SEQ ID NO: 630574 - DNA, 75 bp, synthetic construct
  source 1..75: mol_type = other DNA
tgccctttaacctcgggaccttaatcaattatcaggccttgctggtaggtaatctgattggtgtcccgctgtgct

SEQ ID NO: 630575 - DNA, 75 bp, synthetic construct
  source 1..75: mol_type = other DNA
atttcatcattcgggtggtgcgaaatccactttatttacgtggctattattcgcagttaaaacagcaggttgaca

SEQ ID NO: 630576 - DNA, 75 bp, synthetic construct
  source 1..75: mol_type = other DNA
atgtctatagactggaactggggtatttttttacaacaagccccattcggcaacaccacctatcttggttggatc

SEQ ID NO: 630577 - DNA, 75 bp, synthetic construct
  source 1..75: mol_type = other DNA
ttcagtcgctgccgcgtgggcaaaaaaactgccgcgctggcgatgggtctgacgctaccgcaggcctaccgctac

SEQ ID NO: 630578 - DNA, 75 bp, synthetic construct
  source 1..75: mol_type = other DNA
gggtattgattacctgcaaggctttttgattggtgaaccgcagccgttagtggcgatgttgggtgaaagagaacc

SEQ ID NO: 630579 - DNA, 75 bp, synthetic construct
  source 1..75: mol_type = other DNA
ttacgaaacgctctcattaacggctaattttattatcattatcattctctgttggggcggttacagggtctttac

SEQ ID NO: 630580 - DNA, 75 bp, synthetic construct
  source 1..75: mol_type = other DNA
aagcgtggcaacttatttttgaagtcaccgaaagtaatgctctgaccaatgttaagcaggcgcaaatcaccttgc

SEQ ID NO: 630581 - DNA, 75 bp, synthetic construct
  source 1..75: mol_type = other DNA
gaaatgcagatccgcctatggatggaagaatatggaatgccgtgggagatatttttctgcttcgaccataaacag

SEQ ID NO: 630582 - DNA, 75 bp, synthetic construct
  source 1..75: mol_type = other DNA
caaccagtatgaacccggtcatttttgcgggcgataaaccaggacaaaacacaaaaacgcagtggttgcaggata

SEQ ID NO: 630583 - DNA, 75 bp, synthetic construct
  source 1..75: mol_type = other DNA
tggcggttgggtttgatatcgatgataccgttttgttttccagccccggattctggcgcggcaagaaaatattct

SEQ ID NO: 630584 - DNA, 75 bp, synthetic construct
  source 1..75: mol_type = other DNA
ccgatgtaatactacggtttcagtccgattacgaagaaaccgctgctgttccattgttcccattcgctgagagag

SEQ ID NO: 630585 - DNA, 75 bp, synthetic construct
  source 1..75: mol_type = other DNA
atataccactccgccagcgccgatagcgttagaggccattgaaaacgcaattgaatacattcgtagtatcgcttt

SEQ ID NO: 630586 - DNA, 75 bp, synthetic construct
  source 1..75: mol_type = other DNA
tgattaaagaaatcaaagagcgtataggcagcctggacgtgcgagacaatattgagcgccgggcttatgaaatag

SEQ ID NO: 630587 - DNA, 75 bp, synthetic construct
  source 1..75: mol_type = other DNA
tgattaaagaaatcagagagcgaatcggcagcctggacgtgcgagacaatattgagcgccgtgcttatgaaatcg

SEQ ID NO: 630588 - DNA, 75 bp, synthetic construct
  source 1..75: mol_type = other DNA
gccggtgtcccgtgaatctgaagagtatttcaaaaaacatgatcaggctgagcaggcgctgaaaaatggcacctg

SEQ ID NO: 630589 - DNA, 75 bp, synthetic construct
  source 1..75: mol_type = other DNA
atgaaccgtcaaaaacatatgaaccgtcaaaacggcattcttgcagcagcggctggctatacattacccctggaa

SEQ ID NO: 630590 - DNA, 75 bp, synthetic construct
  source 1..75: mol_type = other DNA
cagtctcggcgtcgaatatcaacatacctttaaggcgattaatcaacgtaacggagagcgcaacaacgcgtttct

SEQ ID NO: 630591 - DNA, 75 bp, synthetic construct
  source 1..75: mol_type = other DNA
gattccttctccgatggcggcacgcataattcgctgattgatgcggtgaaacatgcgaatctgatgatcaatgct

SEQ ID NO: 630592 - DNA, 75 bp, synthetic construct
  source 1..75: mol_type = other DNA
caattgcgcaacgattcgaagtttggatctcggtcgatacttctaaaccggaagtcatccgggaatcggcaagag

SEQ ID NO: 630593 - DNA, 75 bp, synthetic construct
  source 1..75: mol_type = other DNA
cgtggagtattacagaggccatgagcaggcggcacaggcgctggaaaacggcacatggacgcagcggacgtctgc

SEQ ID NO: 630594 - DNA, 75 bp, synthetic construct
  source 1..75: mol_type = other DNA
ctcactggcagacgatgaaactgattattctgccgcaggcgttccgcgcgatggtgccgctgctgctcactcagg

SEQ ID NO: 630595 - DNA, 75 bp, synthetic construct
  source 1..75: mol_type = other DNA
gcagagttcgagagagataacgcggccaaaactggtaagggcgtaatgtcaaaccaggggactgttcttgggtta

SEQ ID NO: 630596 - DNA, 75 bp, synthetic construct
  source 1..75: mol_type = other DNA
tgggttgcgtcagcttgctcaatggttagcaaagaaccaagagctggtaattaatctcggtaaggtcgtggccgc

SEQ ID NO: 630597 - DNA, 75 bp, synthetic construct
  source 1..75: mol_type = other DNA
gccggtgcggttgtggtttcactctgttccacctctgatgaaaccattgaagaagcggaaaaagacctgccgcgc

SEQ ID NO: 630598 - DNA, 75 bp, synthetic construct
  source 1..75: mol_type = other DNA
gttaaaatctggcgaaaaggtggtttatgggccgggtatggccggaactacagtaaagattaatcaggatgaacg

SEQ ID NO: 630599 - DNA, 75 bp, synthetic construct
  source 1..75: mol_type = other DNA
agcgaaacttcaaaggtcgttgacgagattaggaaaataccagaagcgatgacagcggccaaacgtgcacagatg

SEQ ID NO: 630600 - DNA, 75 bp, synthetic construct
  source 1..75: mol_type = other DNA
acgcggagacattgctgtagccaaacgtcttgcaaaagatgcggcagaatcacagatagagaaaatacgggaaga

SEQ ID NO: 630601 - DNA, 75 bp, synthetic construct
  source 1..75: mol_type = other DNA
gtaagttaccaacagatgcacggtttcagcgccgaacaactgcgtaatgccactcatctggtgtgggcgacggga

SEQ ID NO: 630602 - DNA, 75 bp, synthetic construct
  source 1..75: mol_type = other DNA
ttaaagtaacggtgcatatgtctgctgatgcccgcgcctggaaaaaagcgaaactgcgcagtcatggcgttactg

SEQ ID NO: 630603 - DNA, 75 bp, synthetic construct
  source 1..75: mol_type = other DNA
tggtcgcgcatcaggctttgtcgggcgggcgatggagcgtctgctggatggcttctatacccttagcgatcaaac

SEQ ID NO: 630604 - DNA, 75 bp, synthetic construct
  source 1..75: mol_type = other DNA
aggcagtggatcaggcttacacccaatttcactcacttaacggcggacaaaatgccgattacattccctttctgg

SEQ ID NO: 630605 - DNA, 75 bp, synthetic construct
  source 1..75: mol_type = other DNA
cgattgatgactgcctattaaatgagtatcctgatgtttttcatgactatcatgaaattaacttaaagaaaattc

SEQ ID NO: 630606 - DNA, 75 bp, synthetic construct
  source 1..75: mol_type = other DNA
ttagttcgaataaagaattgtctcacctcaacgtattacaatcaaaacttgatatatatggaaaggttgtggtta

SEQ ID NO: 630607 - DNA, 75 bp, synthetic construct
  source 1..75: mol_type = other DNA
aggcgctggcgcaatatatgcgaaaccagatggattctgcgacttatcaacgtactttgcctgacggcactccga

SEQ ID NO: 630608 - DNA, 75 bp, synthetic construct
  source 1..75: mol_type = other DNA
ggtgtttgctgccgccctgcttcgtcgtgcactgattgttgcagctgtctgtctggctgttgcgatggggcttta

SEQ ID NO: 630609 - DNA, 75 bp, synthetic construct
  source 1..75: mol_type = other DNA
tcggcagaaagcgccgcatcatccgcttcaacagccacaacgaaggctggcgaagccactgagcaggccacggca

SEQ ID NO: 630610 - DNA, 75 bp, synthetic construct
  source 1..75: mol_type = other DNA
ccttaacgccactggcagcagccactggtaaccggattagcagagcgatgatggcacaaacggtgctacagagtt

SEQ ID NO: 630611 - DNA, 75 bp, synthetic construct
  source 1..75: mol_type = other DNA
atcaacataatctgacgcaggttctgtttaatcttcctgcgggtaactggcaagagggtgaacggggtattgcat

SEQ ID NO: 630612 - DNA, 75 bp, synthetic construct
  source 1..75: mol_type = other DNA
tcccggtcagtacctgaaacatgaagacaggctgatggctgaagggcgtttcccggtgcagaccggccttcacct

SEQ ID NO: 630613 - DNA, 75 bp, synthetic construct
  source 1..75: mol_type = other DNA
cccctgttaaaaagccccgcctcagcggctggctgctgacctctgtgctgttgctcggtaccatcggcctggtct

SEQ ID NO: 630614 - DNA, 75 bp, synthetic construct
  source 1..75: mol_type = other DNA
ggcgcgacagttgcgtctggtttagtgtctgtgtgggctggtggcggattcgatggattgatgtctggttcttct

SEQ ID NO: 630615 - DNA, 75 bp, synthetic construct
  source 1..75: mol_type = other DNA
gcactgactaaagctcgtgaacaggatgccgcagccgccgagaaagcagcccaacgatcagctaatgcctcgcag

SEQ ID NO: 630616 - DNA, 75 bp, synthetic construct
  source 1..75: mol_type = other DNA
atctcggtaaggtcgtggccgcgatggttgcgttcaaactgatgcgtgcagggattatgggcgtagttggtgctg

SEQ ID NO: 630617 - DNA, 75 bp, synthetic construct
  source 1..75: mol_type = other DNA
gtgctgtgtgtggttctgctggcgatcctcgcggatcagtcgacgatcaatagtgaagcactcatcaacagcctg

SEQ ID NO: 630618 - DNA, 75 bp, synthetic construct
  source 1..75: mol_type = other DNA
ggatctggttgctcttaaagaaaccacctggtttaatcctggcacgacctcattggcagaaggtttaccttatgt

SEQ ID NO: 630619 - DNA, 75 bp, synthetic construct
  source 1..75: mol_type = other DNA
aatcgtcgaagctgcctccaaaatggagcgtatgtgcgtcatgttgcgcgggctgaacaaggacaaggccaaccc

SEQ ID NO: 630620 - DNA, 75 bp, synthetic construct
  source 1..75: mol_type = other DNA
ttaaagagagagccactaagaagatttgaagatgtaacggatgcaaaaatacatagtgtggaattaattaattcc

SEQ ID NO: 630621 - DNA, 75 bp, synthetic construct
  source 1..75: mol_type = other DNA
gacgatgttcttattatattaagcccaggataccaattagcgttcgttgcttttagtgatgatgttgatggtata

SEQ ID NO: 630622 - DNA, 75 bp, synthetic construct
  source 1..75: mol_type = other DNA
caattagccacagaaaatagattgtcgaaattagagtccaatgatgcattgtttaatcagaagtttgaaacaatg

SEQ ID NO: 630623 - DNA, 75 bp, synthetic construct
  source 1..75: mol_type = other DNA
ctggcagagtattaccactggcagccacaatcaatggaaataatccagtggatgagaagacaggagtaatgcaac

SEQ ID NO: 630624 - DNA, 75 bp, synthetic construct
  source 1..75: mol_type = other DNA
ggataaggagaatttaaatagtaaaataatgtttacgtgccataataaaatattggcagacaatatgagaaagag

SEQ ID NO: 630625 - DNA, 75 bp, synthetic construct
  source 1..75: mol_type = other DNA
ttgtttgatggagatcagacaaggtttgtataccaaaaatttgataagaaaaaagttgttattcaaggattatca

SEQ ID NO: 630626 - DNA, 75 bp, synthetic construct
  source 1..75: mol_type = other DNA
tgctaatgttgtcccttttgaaagtatagataaaataaaagataattatgatttcatactttgcgcaaacgtgct

SEQ ID NO: 630627 - DNA, 75 bp, synthetic construct
  source 1..75: mol_type = other DNA
ctatacgttcagaaaatgcagcaaaaccgcatactatgccatctaactatctctgtaaccatattgaaaattctg

SEQ ID NO: 630628 - DNA, 75 bp, synthetic construct
  source 1..75: mol_type = other DNA
tgtcggttatgaaaactgcactggggcgaaagcgaccgagctaatgcgtggcggaaacgggcgatgtctacgacg

SEQ ID NO: 630629 - DNA, 75 bp, synthetic construct
  source 1..75: mol_type = other DNA
atgaagtgggcagtgatacaggcagaacaggagaatgacatgaatatactaaaaaaactggtagtaggactggag

SEQ ID NO: 630630 - DNA, 75 bp, synthetic construct
  source 1..75: mol_type = other DNA
gtggacaggcttatccagcaggcggtgcaacaggcacagcgttacatacggggtggcaaacggtgggtggtggat

SEQ ID NO: 630631 - DNA, 75 bp, synthetic construct
  source 1..75: mol_type = other DNA
aggccactgcgaccagcggcagaggagacggacagtatccgtcagggctgcatgatggcgctgaaatcagcacgg

SEQ ID NO: 630632 - DNA, 75 bp, synthetic construct
  source 1..75: mol_type = other DNA
agaaccgagtgagcctgcatacctaggcttaggtatcgctgccggtgtattaggcggtattactgcgcttggcgg

SEQ ID NO: 630633 - DNA, 75 bp, synthetic construct
  source 1..75: mol_type = other DNA
cggctggcctgtcgccatgctgatgatggcggtgctgattatggcgctgtcactcccgctgtggcgcattacgga

SEQ ID NO: 630634 - DNA, 75 bp, synthetic construct
  source 1..75: mol_type = other DNA
atgagtgatgttcagtcgaatgtgaaacctctgacgttgacgaccgggcgggggatttttgctattgccggcgtc

SEQ ID NO: 630635 - DNA, 75 bp, synthetic construct
  source 1..75: mol_type = other DNA
tgcaggaagccgctatcaaacacctctggacctatccctacacgccaaaaatgaacgctatctgtgaacgtttta

SEQ ID NO: 630636 - DNA, 75 bp, synthetic construct
  source 1..75: mol_type = other DNA
gatcgggtgtcggaagcaaaccaccttaccgctgacgtgctgaataaagcgcaatcggcaggttcatcactctcc

SEQ ID NO: 630637 - DNA, 75 bp, synthetic construct
  source 1..75: mol_type = other DNA
tggcgacgctctttgcacaactggaaaatggtcagcagcaacttaatcagcagcaaaaccaggcgcaaaatctgc

SEQ ID NO: 630638 - DNA, 75 bp, synthetic construct
  source 1..75: mol_type = other DNA
aaatcaaaagctggcagagacattatcaacaacataccgcgagtcaggccaacagtttgctgaacaggtcagtgg

SEQ ID NO: 630639 - DNA, 75 bp, synthetic construct
  source 1..75: mol_type = other DNA
ttaacgaaatcagaatgcgaaaaaatgctctcaggggaaaaaagaagcaggcgtttccagagagcagaaagtaaa

SEQ ID NO: 630640 - DNA, 75 bp, synthetic construct
  source 1..75: mol_type = other DNA
ccgccatatcttaaagcaatggctgatttgctggcgcacggtctcccggccagtgacattatgcaggcacatttg

SEQ ID NO: 630641 - DNA, 75 bp, synthetic construct
  source 1..75: mol_type = other DNA
taccgcccggtaaagacaggtgagctcattgggatggacgccattgagctcagaatgggcgaactgcgtcgctat

SEQ ID NO: 630642 - DNA, 75 bp, synthetic construct
  source 1..75: mol_type = other DNA
ttaggttcgaacgtaggcctcaggttgatagaaatatcgcctggggcttttgtccatctggaacctcgcgaatgc

SEQ ID NO: 630643 - DNA, 75 bp, synthetic construct
  source 1..75: mol_type = other DNA
ccaaagcactaccgtccggtaaagacaggagagctcattgggatggacgccattgagctcagaatgggtgaaatg

SEQ ID NO: 630644 - DNA, 75 bp, synthetic construct
  source 1..75: mol_type = other DNA
gttctacctctgatgaaaccattgaagaagcggagaaagatctgccgcgcaacctctgcccgctgattaaaagca

SEQ ID NO: 630645 - DNA, 75 bp, synthetic construct
  source 1..75: mol_type = other DNA
tcagttctgaatcattgccgcacaattttaatatggctgctgtcggtgtgatgaagaagggaatgtcgatgagct

SEQ ID NO: 630646 - DNA, 75 bp, synthetic construct
  source 1..75: mol_type = other DNA
tattatggttgtcggacaaacctgttcggggaaagcaaatctgactgcagagttaatttctgctgttgtggagaa

SEQ ID NO: 630647 - DNA, 75 bp, synthetic construct
  source 1..75: mol_type = other DNA
gcacaattttaatatagccgctgtcggtgtgatgaagaagggtatgtcgatgagtttattttcttctccggggca

SEQ ID NO: 630648 - DNA, 75 bp, synthetic construct
  source 1..75: mol_type = other DNA
aattttaatatagccgctgttggtgtgatgaagattgagtgcttatacgtaagcaacataaaattaatcgtcgat

SEQ ID NO: 630649 - DNA, 75 bp, synthetic construct
  source 1..75: mol_type = other DNA
ttaaaagcagtcctcaatcactgctgcacaattttaatatagccgctgtcggtttgatgaagaaggggatgtcga

SEQ ID NO: 630650 - DNA, 75 bp, synthetic construct
  source 1..75: mol_type = other DNA
agttttaatatggctgctgtcggtgcgatgaggaagggtatgtcgatgagcttattttcttctccgggaaatacg

SEQ ID NO: 630651 - DNA, 75 bp, synthetic construct
  source 1..75: mol_type = other DNA
cggtaatgagtggaccggcaatcctgatattgataacgccatcatcatgctcgatcgcatagatacgctggaaag

SEQ ID NO: 630652 - DNA, 75 bp, synthetic construct
  source 1..75: mol_type = other DNA
ccgataacgccggaggccattgaaaacgcaattgaatatatccgcagtatcgcttttcacatcgatgaagacgat

SEQ ID NO: 630653 - DNA, 75 bp, synthetic construct
  source 1..75: mol_type = other DNA
cattggcctggctggaagggcattcatgcagtgatgacagtcagggcaaatccgataattcaccattgccgcgct

SEQ ID NO: 630654 - DNA, 75 bp, synthetic construct
  source 1..75: mol_type = other DNA
ctggagttcctgaaaggttatctgatcccgaaatatgccgagtttatcggcaaagagatccagacggcctacctt

SEQ ID NO: 630655 - DNA, 75 bp, synthetic construct
  source 1..75: mol_type = other DNA
tcatgctccggcatttattcgttcacgacgggatacgaccgacgcaaactggtcgccgtgggcgcagctttacac

SEQ ID NO: 630656 - DNA, 75 bp, synthetic construct
  source 1..75: mol_type = other DNA
tggcaggacaggtacaaggggaatacgtggagttgagcgacggcactttatcgtggttagggaacgccttgtact

SEQ ID NO: 630657 - DNA, 75 bp, synthetic construct
  source 1..75: mol_type = other DNA
aaccgtatcagatgattttatacatgctgttctcagtaactgcaccacaaaaatagttcttcctgcaccggagaa

SEQ ID NO: 630658 - DNA, 75 bp, synthetic construct
  source 1..75: mol_type = other DNA
gtgtacgtgctagtgcaagacggctggccagcaggcaaagtgctgcgtgagttagtcgtcaaaaaaggcgaaaaa

SEQ ID NO: 630659 - DNA, 75 bp, synthetic construct
  source 1..75: mol_type = other DNA
agccagtacaaagactatgtactgaccatgctgtttatgaagtatgtctccgataagtacaaaggcgacccttac

SEQ ID NO: 630660 - DNA, 75 bp, synthetic construct
  source 1..75: mol_type = other DNA
ttgccacccgcagcctgctaccgtttaaagcgtgggtgaaagaggcaagtctggaagagattcgcaaaggtgata

SEQ ID NO: 630661 - DNA, 75 bp, synthetic construct
  source 1..75: mol_type = other DNA
agctattacgtgcgcagaaagaacgtgccacccacaattttgtttttggaaccggcggggacgttaccgcgtcac

SEQ ID NO: 630662 - DNA, 75 bp, synthetic construct
  source 1..75: mol_type = other DNA
caccgaggaacagcgtcgctattttgatggagtggatagttcggcaggtattgacctgaactcgtatttcggtcg

SEQ ID NO: 630663 - DNA, 75 bp, synthetic construct
  source 1..75: mol_type = other DNA
gccttggttaaagcctccgaggtgaaaagcaccatcctgaaccatgacgagttcaaaaccttcgccgcacaaagc

SEQ ID NO: 630664 - DNA, 75 bp, synthetic construct
  source 1..75: mol_type = other DNA
aacgctggcagcgaattttacatatccaacagcaactggctggtgagcaggtagcgctctctgacgaagtcaacc

SEQ ID NO: 630665 - DNA, 75 bp, synthetic construct
  source 1..75: mol_type = other DNA
atcagtaaacagacaccacaggatgctaccgtttatgaccctacctgtggttcaggctcactgttgttgaaagcc

SEQ ID NO: 630666 - DNA, 75 bp, synthetic construct
  source 1..75: mol_type = other DNA
ccgacctggttacagcaatgcacgagtcgaagcaagtgaagtaaagaccactatcctggcacacccggaatttgc

SEQ ID NO: 630667 - DNA, 75 bp, synthetic construct
  source 1..75: mol_type = other DNA
gcgtatcgcgtggggttgcccggaaaaagcggcgttggcggcggtattctggcggtcgtacctagcgtgatgggt

SEQ ID NO: 630668 - DNA, 75 bp, synthetic construct
  source 1..75: mol_type = other DNA
aggcagtggaccaggcatatacccaatatcattcactgagcggcggacaaaatgccgattacattccctttctgg

SEQ ID NO: 630669 - DNA, 75 bp, synthetic construct
  source 1..75: mol_type = other DNA
acgcataaacgcgttcttcaggccgacaacgtgccgtacattctggccgaaatgatgatggaagggctgtatggt

SEQ ID NO: 630670 - DNA, 75 bp, synthetic construct
  source 1..75: mol_type = other DNA
caaaagcgcctggcgtaccgcacttctggacctgaaaatagaaaatctgcattttcacgatctccgtcatgaagc

SEQ ID NO: 630671 - DNA, 75 bp, synthetic construct
  source 1..75: mol_type = other DNA
ccggtgcactccccgtcaatgacccggcgttcgtcatggtctgccctctgaatccgcagggtgccctgaccgcac

SEQ ID NO: 630672 - DNA, 75 bp, synthetic construct
  source 1..75: mol_type = other DNA
gaatatgctcaaacgctacacacatctccgtgcctggcagctggtcagcaagctggatgcccgtcgacgccagac

SEQ ID NO: 630673 - DNA, 75 bp, synthetic construct
  source 1..75: mol_type = other DNA
tactggccttacgttgggagcacattgatttgcgccatggtgtggctcatttacctgaaaccaaaaacggtcact

SEQ ID NO: 630674 - DNA, 75 bp, synthetic construct
  source 1..75: mol_type = other DNA
tggttcgcaagccgaaagtatcctccggacgagatcgccggctaacgtcttcagaagaacgtcgcctttctcgct

SEQ ID NO: 630675 - DNA, 75 bp, synthetic construct
  source 1..75: mol_type = other DNA
atgccgtctccacgcatccgtaaaatgtccctgtcacgcgcactggataagtacctgaaaacagtttctgttcac

SEQ ID NO: 630676 - DNA, 75 bp, synthetic construct
  source 1..75: mol_type = other DNA
tttttctttctttggcgtttttacctctaagtagtaatacttatgcagggcagcaagcggcaacttatggaaagg

SEQ ID NO: 630677 - DNA, 75 bp, synthetic construct
  source 1..75: mol_type = other DNA
aacaatacactgggtgacgccaaaacagcctataatactcctagtaatttatatatatctccttatgatgcaatt

SEQ ID NO: 630678 - DNA, 75 bp, synthetic construct
  source 1..75: mol_type = other DNA
tttggatatttttatacagtaagaccaatttaccaaaaggaacttttatcagaagaaattgcaaaaaaagaagtt

SEQ ID NO: 630679 - DNA, 75 bp, synthetic construct
  source 1..75: mol_type = other DNA
atgaaaataaactataaattccggattaacttaatcacagtccttctgtctcagctcctgatacagatatatttg

SEQ ID NO: 630680 - DNA, 75 bp, synthetic construct
  source 1..75: mol_type = other DNA
tgcagtgttgcgccgtcaggcgaacgaactgccgggcgcgccgtcacaggaagaagcagtaattgcttttggtaa

SEQ ID NO: 630681 - DNA, 75 bp, synthetic construct
  source 1..75: mol_type = other DNA
gatgggctggctggggcgccagtaactttatctgcagggcaatcgtatgtaaattatgatgcatggggggatcca

SEQ ID NO: 630682 - DNA, 75 bp, synthetic construct
  source 1..75: mol_type = other DNA
caccattatacactaaatcagcaagttggtagcatcaccaaaaatgtctggtataataagaatatcatcaataaa

SEQ ID NO: 630683 - DNA, 75 bp, synthetic construct
  source 1..75: mol_type = other DNA
gaggcgtggtcccctggtttttacttacgggggattcagaaaaaaacgcttccctgcttaaggatattaatcttc

SEQ ID NO: 630684 - DNA, 75 bp, synthetic construct
  source 1..75: mol_type = other DNA
cataagaaaaaaaggaagagggaaagtcccttggtttttacttacaggaatttcagaaaaaggcaattccttgat

SEQ ID NO: 630685 - DNA, 75 bp, synthetic construct
  source 1..75: mol_type = other DNA
taaaagcaccagatttgagaccagtcctgtttcatggcgcgttgctgaatataagaaaaaattccaagcggcttc

SEQ ID NO: 630686 - DNA, 75 bp, synthetic construct
  source 1..75: mol_type = other DNA
gtgttttgttggctatagtgcatattgttcatatcatgtatatgatatcagcccaggttctgttgatactagtca

SEQ ID NO: 630687 - DNA, 75 bp, synthetic construct
  source 1..75: mol_type = other DNA
acccaaaaaataagctagtaatattatttaatgagtttgaaaaggttcgttcattcattaataatgataatacag

SEQ ID NO: 630688 - DNA, 75 bp, synthetic construct
  source 1..75: mol_type = other DNA
cctgacgcgttttcatcttttgtgcagtaccttgatgaaagtcgccaggagcatttcagacagttcattatggct

SEQ ID NO: 630689 - DNA, 75 bp, synthetic construct
  source 1..75: mol_type = other DNA
ttctctggttttttgtttctgtcttcgttctgtctgtttgctatgttatcggcgtgttcagaaactggacagata

SEQ ID NO: 630690 - DNA, 75 bp, synthetic construct
  source 1..75: mol_type = other DNA
caaccttcatgcatggctaactttacccagtatggaaattatagatatcacattatcaacaacaatttctatgtt

SEQ ID NO: 630691 - DNA, 75 bp, synthetic construct
  source 1..75: mol_type = other DNA
attttgggggggctctctttttggattggccctctcgttgttgagttagttgccggaaatgaatatctaaatgct

SEQ ID NO: 630692 - DNA, 75 bp, synthetic construct
  source 1..75: mol_type = other DNA
accagccctgaattactgatagaacaagtattaaaatatgaagataaagtaagacctaatatactgtatttacct

SEQ ID NO: 630693 - DNA, 75 bp, synthetic construct
  source 1..75: mol_type = other DNA
gtcatttaaatcagttatggttatgatggtactgctctttattggatatagtgcatattgttcatatcatatata

SEQ ID NO: 630694 - DNA, 75 bp, synthetic construct
  source 1..75: mol_type = other DNA
cataagtaaaaggggaagaggagaggttccttggttcttacttacgggagattcagaaaaaaacaactctttgct

SEQ ID NO: 630695 - DNA, 75 bp, synthetic construct
  source 1..75: mol_type = other DNA
tgctgttgcttttgttggggcggtttttctaaccagttcggctggttggttggcatttagatggtttaatgcagg

SEQ ID NO: 630696 - DNA, 75 bp, synthetic construct
  source 1..75: mol_type = other DNA
gcctgctggttcgcgatgggactgctcggaatcacaatgatggatattgccgcaatctggcacaatattgagtcg

SEQ ID NO: 630697 - DNA, 75 bp, synthetic construct
  source 1..75: mol_type = other DNA
ttcttctccgctggcaacttcttagcgccgtactgatgtttctggccagtacgctcaacattcgttttcgtcgct

SEQ ID NO: 630698 - DNA, 75 bp, synthetic construct
  source 1..75: mol_type = other DNA
atggctaccctcaccactggcgtggttctccttcgctggcagcttcttagcgccatattgatgtttctggccagc

SEQ ID NO: 630699 - DNA, 75 bp, synthetic construct
  source 1..75: mol_type = other DNA
acaatattttaattatcatccgaaaccaaatggatgttgggacatggaaagggaaatatattatctatgataatg

SEQ ID NO: 630700 - DNA, 75 bp, synthetic construct
  source 1..75: mol_type = other DNA
gttactgcatttaatgattttggtggaagtacatcggaacgacgaaaaagagaaggggcccttgttcaacaggat

SEQ ID NO: 630701 - DNA, 75 bp, synthetic construct
  source 1..75: mol_type = other DNA
gcgctggatgagggggtaatctgcgatatgtttgaaggtcatgcgccgtacaaaccgcgctatgtcttacccgat

SEQ ID NO: 630702 - DNA, 75 bp, synthetic construct
  source 1..75: mol_type = other DNA
gcaaaatcctttatcgctcttgatggcaacggacgtctgacgggcgcccgtactgcacaggccgcaccttatgct

SEQ ID NO: 630703 - DNA, 75 bp, synthetic construct
  source 1..75: mol_type = other DNA
cccgggtaatttaacttacgaaatcgttcgtgaattagtcgatgacatcgtgctggtcagcgaagacgaaatcag

SEQ ID NO: 630704 - DNA, 75 bp, synthetic construct
  source 1..75: mol_type = other DNA
ctcctgcgcgatgctgggtatcgacggtaaagtggtgatgccaaaaggtgcgccaaaatccaaagtagcggcaac

SEQ ID NO: 630705 - DNA, 75 bp, synthetic construct
  source 1..75: mol_type = other DNA
ggagccctctataacgcggcagaaaagtccgacgttaacttctcctccgagcttgatgctgcggccaaaaaagct

SEQ ID NO: 630706 - DNA, 75 bp, synthetic construct
  source 1..75: mol_type = other DNA
ttgaaaccatacgagcatgagtacgctcgtcgcttagttctggggctaagtggaccgttgccgcgtgaactgcgt

SEQ ID NO: 630707 - DNA, 75 bp, synthetic construct
  source 1..75: mol_type = other DNA
gttgaaaaagagaatgtcatattatataatcccaaaaaaggtattgctattactaataaattgaaagaaaatttc

SEQ ID NO: 630708 - DNA, 75 bp, synthetic construct
  source 1..75: mol_type = other DNA
gcaagaaaacaatggaagttgagatcctcaaagaagcggtggagtacgcacaatcgcgaaaatggatagcgcatg

SEQ ID NO: 630709 - DNA, 75 bp, synthetic construct
  source 1..75: mol_type = other DNA
accaagtcgagcagtattacatcgataaagtaccgctcaaacgcggctgcgattatcaggatgtgctgaatatgc

SEQ ID NO: 630710 - DNA, 75 bp, synthetic construct
  source 1..75: mol_type = other DNA
gtgctgacgccaccagcgagcagagcgttctggcgctctctcgtggggtagatgaaatctttggtcgcgtggatt

SEQ ID NO: 630711 - DNA, 75 bp, synthetic construct
  source 1..75: mol_type = other DNA
tggcagcactggcatccggggggatgccagtgaataaacaggcactggtagcggctattgcacaggctcaatatt

SEQ ID NO: 630712 - DNA, 75 bp, synthetic construct
  source 1..75: mol_type = other DNA
ccgttgcaagcacatgcgcagcgggttgccatcgcttcaaccggaattattcgcgacggcagcttgttggcgctg

SEQ ID NO: 630713 - DNA, 75 bp, synthetic construct
  source 1..75: mol_type = other DNA
ccgttgcaagctcatgcgcagcgggttgccatcgcttctaccggaattattcgcgacggcagcctgctggcgctg

SEQ ID NO: 630714 - DNA, 75 bp, synthetic construct
  source 1..75: mol_type = other DNA
gtcgataacgtgattgtgccaattggtggtggcggtttaattgctggtattgcggtggcaataaaatctattaac

SEQ ID NO: 630715 - DNA, 75 bp, synthetic construct
  source 1..75: mol_type = other DNA
agagttgcttattgctctcctggtgatgctggtgttcctgtttgcgggtgagaaaattctggcatttcttagcct

SEQ ID NO: 630716 - DNA, 75 bp, synthetic construct
  source 1..75: mol_type = other DNA
ttgctgtctcaccagtaccctaaccagatgggccatctggtgattgctctgctgctggcctggggcgggacattt

SEQ ID NO: 630717 - DNA, 75 bp, synthetic construct
  source 1..75: mol_type = other DNA
ttgttgtctcatcagtacccgaatcagatgggacatctggtaattgctctgctgctggcctggggcggcaccttt

SEQ ID NO: 630718 - DNA, 75 bp, synthetic construct
  source 1..75: mol_type = other DNA
aatgtaattaataaagaaacattattgcaacaacctgaagaacgttttgcctggttaaggtcaaagaaagataga

SEQ ID NO: 630719 - DNA, 75 bp, synthetic construct
  source 1..75: mol_type = other DNA
ggaaaatgaactcctcaaagaagccgttgaatatggacgggcaaaaacgtggatagcgcacgcgcccttattgcc

SEQ ID NO: 630720 - DNA, 75 bp, synthetic construct
  source 1..75: mol_type = other DNA
atgaatgaaatcatttctgcagcagttttattgatcttgattatggatccgctcggaaacctacctatttttatg

SEQ ID NO: 630721 - DNA, 75 bp, synthetic construct
  source 1..75: mol_type = other DNA
cgcacagcagcaacaacgacaaatggaacagtctgctgaaagtaaaccgctactggctggcgatccagcagggcg

SEQ ID NO: 630722 - DNA, 75 bp, synthetic construct
  source 1..75: mol_type = other DNA
gagtactggagtacggtggcgaaaattccggctcgccgtggcgaagcgattaatcagttaaaacgcatcaatgcg

SEQ ID NO: 630723 - DNA, 75 bp, synthetic construct
  source 1..75: mol_type = other DNA
ttgccagttattatcgggagaacataagcggtacaaaacttgaccgtccagaactggggcgattactgatggaca

SEQ ID NO: 630724 - DNA, 75 bp, synthetic construct
  source 1..75: mol_type = other DNA
acttactacggggctatcttctttctgccacacaacacggcaacaaaccaccttcacgtcatgaggcagaaagcc

SEQ ID NO: 630725 - DNA, 75 bp, synthetic construct
  source 1..75: mol_type = other DNA
tgacaggatcgcggcaaacagcgttcatccggtcatgctgtgcatggataatagttcggaatttagctctctggt

SEQ ID NO: 630726 - DNA, 75 bp, synthetic construct
  source 1..75: mol_type = other DNA
gtcgttttctcacgtttaatgtcgttgatgactttaatcgtgaggcgttatcgattgaaatcgatctaaatctgc

SEQ ID NO: 630727 - DNA, 75 bp, synthetic construct
  source 1..75: mol_type = other DNA
gcaacttcagatggggtttcgcaaagcgggctccagtgacattgtcgacgttaaacaatgccccattttagtgcc

SEQ ID NO: 630728 - DNA, 75 bp, synthetic construct
  source 1..75: mol_type = other DNA
cgcggttggcgatgctggatatgttcccacacacggggcatctggaatcgatggtacttttctcgcgcgttaaat

SEQ ID NO: 630729 - DNA, 75 bp, synthetic construct
  source 1..75: mol_type = other DNA
ataatgtgacgttttatcacgaaaatcttgaagatgatgtcacaaagcagccgtgggcaaaaaacggctttgata

SEQ ID NO: 630730 - DNA, 75 bp, synthetic construct
  source 1..75: mol_type = other DNA
tggctgcgatgtcgcataaggactggctgagccgccgccagcggcaaaaacagggaattgaacgggcccatatac

SEQ ID NO: 630731 - DNA, 75 bp, synthetic construct
  source 1..75: mol_type = other DNA
gagctggggcgcttactgatggacagtcaccacaatgatattttgctggtcgaacagatagaccgcctgacccgt

SEQ ID NO: 630732 - DNA, 75 bp, synthetic construct
  source 1..75: mol_type = other DNA
gcccgcgtgattttattcaggtcaacgcaggcgtgaaccaaaaaatggtggcgcaggcgctggaatggctggatg

SEQ ID NO: 630733 - DNA, 75 bp, synthetic construct
  source 1..75: mol_type = other DNA
gttcgtcagcaatgggaagaaggtcagcggctggagccgcgtccacgcattttaattaccggctgcccaataggc

SEQ ID NO: 630734 - DNA, 75 bp, synthetic construct
  source 1..75: mol_type = other DNA
taaaactgataaaattacacacatgaagccagttggcgctattcctgcaatgcagacaagagaagggcgctttat

SEQ ID NO: 630735 - DNA, 75 bp, synthetic construct
  source 1..75: mol_type = other DNA
gctattcctgcaatgcagacaagagaagggcgctttatttttaccgtagcttttcaaaccatcatatctagataa

SEQ ID NO: 630736 - DNA, 75 bp, synthetic construct
  source 1..75: mol_type = other DNA
aaaaaacttgaggaattgtggcttacccatgaatatcgtgagcaaaaacagaaagaaaaagaagaacaggcagaa

SEQ ID NO: 630737 - DNA, 75 bp, synthetic construct
  source 1..75: mol_type = other DNA
tcctgaaactgctgctactggggggattattgaatcagaactggttgccattccgactatgcaaaaacggctgga

SEQ ID NO: 630738 - DNA, 75 bp, synthetic construct
  source 1..75: mol_type = other DNA
cagcacaaaaaggaattgtccagctcagtagtgcaaccaacagcacatctgaaacgcttgctgcgacaccgaaag

SEQ ID NO: 630739 - DNA, 75 bp, synthetic construct
  source 1..75: mol_type = other DNA
aagccagttggcgctattcctgcaatgcagacgagagaagggcgctttatttttaccgtagctttccaaaccatt

SEQ ID NO: 630740 - DNA, 75 bp, synthetic construct
  source 1..75: mol_type = other DNA
aggccatgatattttcccactcggcatttaatgattcgttaacaaatacgctttactgtacaatcctttcgttaa

SEQ ID NO: 630741 - DNA, 75 bp, synthetic construct
  source 1..75: mol_type = other DNA
atcaaggggggaacctggtttttcacggtaaatttacagaatcgtcgaaaccaacttttgaccacccagttttag

SEQ ID NO: 630742 - DNA, 75 bp, synthetic construct
  source 1..75: mol_type = other DNA
ataatgaactaacaaacaccattgaaaaaatggatggtatcaataaacaaatccaagagctaagaagaacttata

SEQ ID NO: 630743 - DNA, 75 bp, synthetic construct
  source 1..75: mol_type = other DNA
tgccagatatcacggagttccagttccctgcaggtaaagtctggctatcaccggtggtggactgcttcgatggaa

SEQ ID NO: 630744 - DNA, 75 bp, synthetic construct
  source 1..75: mol_type = other DNA
tctatttgcctggcttcggcgcgcaaaaaacagggtaaagatgcactggtggttggctggaatattcaagatacc

SEQ ID NO: 630745 - DNA, 75 bp, synthetic construct
  source 1..75: mol_type = other DNA
tgcaacctgacgagcgcgtgctggatctgttctgcggcatgggcaattttacgctgccgttagccactcgtgcgg

SEQ ID NO: 630746 - DNA, 75 bp, synthetic construct
  source 1..75: mol_type = other DNA
ttatcagcaggagctgctggaaggaaaaccaaagcccaacaacagcgaactggtggtacgcaactggtataaccc

SEQ ID NO: 630747 - DNA, 75 bp, synthetic construct
  source 1..75: mol_type = other DNA
gaatagtttgtggccgctactggtgataacggccacgacagggtcagcggcgtacgcgatgtttagacgtaaggt

SEQ ID NO: 630748 - DNA, 75 bp, synthetic construct
  source 1..75: mol_type = other DNA
gattaaccctatccgccactttacggacattaccaagcagatttatttgaaggatgcgagtctggatattgtgtg

SEQ ID NO: 630749 - DNA, 75 bp, synthetic construct
  source 1..75: mol_type = other DNA
agccggaaccatccccggaactgcttccggaaccacaggcggaagatgtcaccacggaaaatggtgatattcagc

SEQ ID NO: 630750 - DNA, 75 bp, synthetic construct
  source 1..75: mol_type = other DNA
ctgctgaagcagtgaaggaagtcctgcgctctgaagaagtcctgcgctctgaagaagtccggagcgcactgaaac

SEQ ID NO: 630751 - DNA, 75 bp, synthetic construct
  source 1..75: mol_type = other DNA
atgtttcatcgcttatggacgttaattcgcaaagagttgcagtcgctgctgcgcgaaccgcaaacccgcgcgatt

SEQ ID NO: 630752 - DNA, 75 bp, synthetic construct
  source 1..75: mol_type = other DNA
aggataaaaattgtactttttctgatgttttagtttctgagatcctgccacaaatacagaactcagaagttattc

SEQ ID NO: 630753 - DNA, 75 bp, synthetic construct
  source 1..75: mol_type = other DNA
ttgggcaaccaataaattagacacaaatgcatctgaatatgactcatcatatatattgtcatcattaaaatctaa

SEQ ID NO: 630754 - DNA, 75 bp, synthetic construct
  source 1..75: mol_type = other DNA
tctctgcttaaggatattaatcttcccgtctttcacagtaatgagttaaatggtatttctcaacaattcagaaca

SEQ ID NO: 630755 - DNA, 75 bp, synthetic construct
  source 1..75: mol_type = other DNA
aggagatccgcccaactatcgatacgcaaaaggcgctactgctggtgcgtttcccggctgacttctcacgcaaac

SEQ ID NO: 630756 - DNA, 75 bp, synthetic construct
  source 1..75: mol_type = other DNA
tctcgtccgttacaaactgagtgatacaagcgatctaagtcagggatatatcgaatgggaacaattaaaacagaa

SEQ ID NO: 630757 - DNA, 75 bp, synthetic construct
  source 1..75: mol_type = other DNA
tatatatctgatgtctgtttttaataacagtcagatgaacaggacaacggatcatgtaacagcatggagagactg

SEQ ID NO: 630758 - DNA, 75 bp, synthetic construct
  source 1..75: mol_type = other DNA
ttgccgatttacgataagccaatgatttactatccgctgtcggtgctgatgctggccggtatccgcgaaattctc

SEQ ID NO: 630759 - DNA, 75 bp, synthetic construct
  source 1..75: mol_type = other DNA
ccctccggcctgtatgacacatggttagttctcggggggcgttcgttcgagctggagcagttgtccgataaaccg

SEQ ID NO: 630760 - DNA, 75 bp, synthetic construct
  source 1..75: mol_type = other DNA
tcctgtcgggccgcataaaaccgcctgtcagtaccggacgacccgcgatgtgttactacaaccgctgcaccttgc

SEQ ID NO: 630761 - DNA, 75 bp, synthetic construct
  source 1..75: mol_type = other DNA
atgaccggtttcactggcgggggatgagtcacctcggatcaaactttctcagcatgatggacaatccggaggtgc

SEQ ID NO: 630762 - DNA, 75 bp, synthetic construct
  source 1..75: mol_type = other DNA
gagctggggcgcttactgatggacagtcaccacaatgatatcttgctggtcgaacagatagaccgtctgacccgt

SEQ ID NO: 630763 - DNA, 75 bp, synthetic construct
  source 1..75: mol_type = other DNA
tgggtaaataccgggggaaacaagccgatcaggaacggcatcagaaagtgttgtactacagacaagtaaaaaaac

SEQ ID NO: 630764 - DNA, 75 bp, synthetic construct
  source 1..75: mol_type = other DNA
gagtacgtgccttttaccagcttccgtcatcgtgggggaatgctgcgccatgatgcacccgaacgttattatcat

SEQ ID NO: 630765 - DNA, 75 bp, synthetic construct
  source 1..75: mol_type = other DNA
cgaagcaggtgaagccgtcggaacgcggtgagttggaaataacctccattaatcaaatgtatctggaggcaggta

SEQ ID NO: 630766 - DNA, 75 bp, synthetic construct
  source 1..75: mol_type = other DNA
acctgaccgttgaactgctcgggcgcggatttgcctggctggacactggcactcacgacagcctgattgaagcca

SEQ ID NO: 630767 - DNA, 75 bp, synthetic construct
  source 1..75: mol_type = other DNA
cggtgaaactttcctcaacggcgagccttcttgtctggtgctgggagataatattttcttcggccagggcttcag

SEQ ID NO: 630768 - DNA, 75 bp, synthetic construct
  source 1..75: mol_type = other DNA
cctcacagaacgtcctgcgggtgcgcaacctgtgcgccccgacgcagccctgctatcccccggcgcgtgaccgct

SEQ ID NO: 630769 - DNA, 75 bp, synthetic construct
  source 1..75: mol_type = other DNA
atgatatcgatcagcgttgccgatggtgcggggttacagaactacgatgccgtgcttgagcatatttttaacacg

SEQ ID NO: 630770 - DNA, 75 bp, synthetic construct
  source 1..75: mol_type = other DNA
taaccatctccaaaatgaagaattttaccaaaacttactgacacttcccgtcgaggatgcaaaagcactttttgt

SEQ ID NO: 630771 - DNA, 75 bp, synthetic construct
  source 1..75: mol_type = other DNA
ggccacgcgcgcgcactcgtgcggtttttgtgccaagacccaaagcaggcaatttttcaacaccagctcaaactg

SEQ ID NO: 630772 - DNA, 75 bp, synthetic construct
  source 1..75: mol_type = other DNA
gcactggccaaagagctgggatgtccggtggtggccctttcccagttaaaccggcaactggagcaacgtgtggat

SEQ ID NO: 630773 - DNA, 75 bp, synthetic construct
  source 1..75: mol_type = other DNA
aatatgttatccacccagagtgtggcggctcaggcgaatattccggcgttatgtgaacaggctgaacagcggctg

SEQ ID NO: 630774 - DNA, 75 bp, synthetic construct
  source 1..75: mol_type = other DNA
cgacacaggcgttgcagttgctgactgaacgagaactcaggcgagtccgccagcagcgtattgttgccagcggcg

SEQ ID NO: 630775 - DNA, 75 bp, synthetic construct
  source 1..75: mol_type = other DNA
tgcactgcctgaaatgttatatctcacgcgaggtctacacactgcttcgaaatcaaaatcggcagatcaacagca

SEQ ID NO: 630776 - DNA, 75 bp, synthetic construct
  source 1..75: mol_type = other DNA
gccgaaaaatacctgtcgtttaatcaggagcaggtgcagtcgcgtggtaaagaaacaatggcgctgacgctgaat

SEQ ID NO: 630777 - DNA, 75 bp, synthetic construct
  source 1..75: mol_type = other DNA
cggcagaagcagagcaggccgttctaggcggattaatgctggataacgaccgctgggatgaagtggttttattgc

SEQ ID NO: 630778 - DNA, 75 bp, synthetic construct
  source 1..75: mol_type = other DNA
gaccacgaaaaaagaaaaacgacagaagacggctcttcagatattccaactccgtcaaaaatgagtctggaagag

SEQ ID NO: 630779 - DNA, 75 bp, synthetic construct
  source 1..75: mol_type = other DNA
gttcctgaaggcaaccagctcttcgacaaatatattgaaaagcatctttcgtcaggtgtttcgtcgacgctggca

SEQ ID NO: 630780 - DNA, 75 bp, synthetic construct
  source 1..75: mol_type = other DNA
atgcataaaaagtcttcttctgctgtattacctgaaactctgtactcaccggaggcggagcagagcgtgctgggc

SEQ ID NO: 630781 - DNA, 75 bp, synthetic construct
  source 1..75: mol_type = other DNA
gtggattatctgcaactgattcgggcgccggagctggagaaccgcacacaggaaattgctgaaatttcccgttcc

SEQ ID NO: 630782 - DNA, 75 bp, synthetic construct
  source 1..75: mol_type = other DNA
aggtgctggatgctgcagagcggcgtctgtttgcacttgcgcagaacaggacgctccgggagcgcacggaagcct

SEQ ID NO: 630783 - DNA, 75 bp, synthetic construct
  source 1..75: mol_type = other DNA
atacccggcaacaaatcgtgaaatgcgatctctgtgaactgcgggaagaggggccagcctgcgttgaatcttgcc

SEQ ID NO: 630784 - DNA, 75 bp, synthetic construct
  source 1..75: mol_type = other DNA
acacatttaattttataggcaaatggccggaagattattttatgtactcagaagatactgatctacattataatt

SEQ ID NO: 630785 - DNA, 75 bp, synthetic construct
  source 1..75: mol_type = other DNA
caaaatttgatagagtataagattcagtaccaggaatctgatctggattttattcatagagttttgtttgatgct

SEQ ID NO: 630786 - DNA, 75 bp, synthetic construct
  source 1..75: mol_type = other DNA
ctatcagggccagttgatgatttccgtgtggaaccgtggtcaggacagcttcaccattcaacctggcgaacgtat

SEQ ID NO: 630787 - DNA, 75 bp, synthetic construct
  source 1..75: mol_type = other DNA
aatcaacacagtcaataaaaataaaagtgggtgcaaatgagataacgatatccacatcaggtatagatataaaag

SEQ ID NO: 630788 - DNA, 75 bp, synthetic construct
  source 1..75: mol_type = other DNA
ttatctgatgcaggtatctactacttttttgttcataataaagataaacatattatgacgttagcagatgatcct

SEQ ID NO: 630789 - DNA, 75 bp, synthetic construct
  source 1..75: mol_type = other DNA
taattatgataacagcatgcaacatacctgcattattatcttacaaccagagatagccgaattggcatctggtaa

SEQ ID NO: 630790 - DNA, 75 bp, synthetic construct
  source 1..75: mol_type = other DNA
tgcctgaagcgctatatctcacgcgaagtttatacattactgcgtaatcaaaacaggcagatcaacagcatcccg

SEQ ID NO: 630791 - DNA, 75 bp, synthetic construct
  source 1..75: mol_type = other DNA
caacgcaggcgttgcagttgatgactgagagagaactcaggcaagtccgccagcagcgtcttgctgccagcggtg

SEQ ID NO: 630792 - DNA, 75 bp, synthetic construct
  source 1..75: mol_type = other DNA
tgatctttgcgaacagcggcaagagggatctgcgtgcgttgagtcctgcccaacgcaggcgttgcagttgatgac

SEQ ID NO: 630793 - DNA, 75 bp, synthetic construct
  source 1..75: mol_type = other DNA
ttaatcaggccaacgaatacatgaacagtaagcaatggcccggtaaagcatcaattggtcgtctgaaaggtgagg

SEQ ID NO: 630794 - DNA, 75 bp, synthetic construct
  source 1..75: mol_type = other DNA
cacgctgccattgcggccggacagctggcagtggaaaggaaaatggacgaacttttgccgttggtacgcaccaac

SEQ ID NO: 630795 - DNA, 75 bp, synthetic construct
  source 1..75: mol_type = other DNA
gcgtggtggtttgttgcgcggtgaacgcgtatttaatcagtaccgcgaaattatgcccgtaacagagatcgaaaa

SEQ ID NO: 630796 - DNA, 75 bp, synthetic construct
  source 1..75: mol_type = other DNA
ctccgggaaaaacttccgatccttcagacgctgaccagacggatgcctctggagaaaacaatgaagacaacgaag

SEQ ID NO: 630797 - DNA, 75 bp, synthetic construct
  source 1..75: mol_type = other DNA
atggatggttgtgactcgttcggtcaggattgtggcgctgacatgactgaagatcctgatggcgattatgtcctg

SEQ ID NO: 630798 - DNA, 75 bp, synthetic construct
  source 1..75: mol_type = other DNA
ctgtttgatgacgtagttaagttgtttgagtttgatacattcgaaagcccagtaaaggaggcagccagtgagcgg

SEQ ID NO: 630799 - DNA, 75 bp, synthetic construct
  source 1..75: mol_type = other DNA
aggattgtggcgcagatatgactgaagatcctgatggtgattatgtcctgtttgatgacgtggttaagttgtttg

SEQ ID NO: 630800 - DNA, 75 bp, synthetic construct
  source 1..75: mol_type = other DNA
atgacgatcacaaaacaacgggtagaagaaatcatatcccgcattgaaatgtatgggcatggtgcagggtatacc

SEQ ID NO: 630801 - DNA, 75 bp, synthetic construct
  source 1..75: mol_type = other DNA
ccccaaccctgacagacgccagtaattctgttgtggtacgtggtgccagggagcacaaccttaaagaggtggatg

SEQ ID NO: 630802 - DNA, 75 bp, synthetic construct
  source 1..75: mol_type = other DNA
aagaaatcatatcccgcattgaaatgtatggacatggtgcagggtataccgctgacgaggtttatgacctggctg

SEQ ID NO: 630803 - DNA, 75 bp, synthetic construct
  source 1..75: mol_type = other DNA
caagaaaatgcagaagcatctggattaagtgttgcctgttttgttcgtagagttgcaatgggttatcaggttgat

SEQ ID NO: 630804 - DNA, 75 bp, synthetic construct
  source 1..75: mol_type = other DNA
tcagtgcgcaactgaataatcttcaggacacggcaacatctgccttaagcgatatcagtaaaacggtgggagggc

SEQ ID NO: 630805 - DNA, 75 bp, synthetic construct
  source 1..75: mol_type = other DNA
tcaggagctgcagtatcaacgcaactggcgacatgcggcaaacagccgggtaaaccgacgtccgtccacgcagtt

SEQ ID NO: 630806 - DNA, 75 bp, synthetic construct
  source 1..75: mol_type = other DNA
atgatgatcacaaaacaacgtgtagaagaaatcatatcccgtattgaaatgtatgggcatggttccgggtatacc

SEQ ID NO: 630807 - DNA, 75 bp, synthetic construct
  source 1..75: mol_type = other DNA
ctcagcaagatcgaggcgacgcaggaagaaatgggtaacatcatgaccaaggttgttatgccaaggtctgatcta

SEQ ID NO: 630808 - DNA, 75 bp, synthetic construct
  source 1..75: mol_type = other DNA
atgaacttagccgagtaaacgctgatcttggaagacttggcggattacttaaattatggctcgcaaatgatcctc

SEQ ID NO: 630809 - DNA, 75 bp, synthetic construct
  source 1..75: mol_type = other DNA
ggagtgcctgctgcctcgctgacggcaaaaggcaccgtacaattgagcagtgacatcaacagcacgtctgaaata

SEQ ID NO: 630810 - DNA, 75 bp, synthetic construct
  source 1..75: mol_type = other DNA
ctaaaaaaaattttacagatcaatttatctatttttttatggttttactcagagcaatgaagttgacttttaaaa

SEQ ID NO: 630811 - DNA, 75 bp, synthetic construct
  source 1..75: mol_type = other DNA
cgtgacgcatcgaacggcacgcctgacttcagcactccatacgccacctgtgccagcttgcgcatcatcgcgccg

SEQ ID NO: 630812 - DNA, 75 bp, synthetic construct
  source 1..75: mol_type = other DNA
gagtcaggagacaccccagaatccgatgctatcggcatgaaatcaagtgactctgacaccgatgatgatggcagc

SEQ ID NO: 630813 - DNA, 75 bp, synthetic construct
  source 1..75: mol_type = other DNA
acgcaacaccggcattgatgaatgctgtgcgcggatttctcgatcatgaggttgctcacattttgtttaccgata

SEQ ID NO: 630814 - DNA, 75 bp, synthetic construct
  source 1..75: mol_type = other DNA
aaaacgagtagtcgctctcctttcaggtaaaaacatccctgttgcagaacgaggggacgacgcttatgtacgcta

SEQ ID NO: 630815 - DNA, 75 bp, synthetic construct
  source 1..75: mol_type = other DNA
agtattaattatactttatatcaagttacatatttggatttagaaagcgacaaaaaacgcactggtatggttttg

SEQ ID NO: 630816 - DNA, 75 bp, synthetic construct
  source 1..75: mol_type = other DNA
atgcaatacgctgaattccaggctgaagcaacagccacaggtatacgaactggcagtatgactattgattatcac

SEQ ID NO: 630817 - DNA, 75 bp, synthetic construct
  source 1..75: mol_type = other DNA
tcaccagacccgttactggaatccgaaaatgaagccgttcatcttcggtgcgcgtaacaaagttcacatcatcaa

SEQ ID NO: 630818 - DNA, 75 bp, synthetic construct
  source 1..75: mol_type = other DNA
ttgttagccgttaaaattaagccctttaccaaaccaatacttattatgaaaaacacaatacatatcaacttcgct

SEQ ID NO: 630819 - DNA, 75 bp, synthetic construct
  source 1..75: mol_type = other DNA
tgattcacctgagggattagtggtagccgcagcaaataacagggcgttcgcagagcgccttgttggtgtttacag

SEQ ID NO: 630820 - DNA, 75 bp, synthetic construct
  source 1..75: mol_type = other DNA
agaagggcttgaacttcttctggatgaaatgattcacgatctgaatactcatggtatacaagaagcaccagtgac

SEQ ID NO: 630821 - DNA, 75 bp, synthetic construct
  source 1..75: mol_type = other DNA
cggtttaagaatcatgcaatgtattgcggaagccgatgatgccggattcctgggaagattttcagtcgatctgaa

SEQ ID NO: 630822 - DNA, 75 bp, synthetic construct
  source 1..75: mol_type = other DNA
cccccgtcgccgccccggagtggctagggaaggttcgcttaagctggcaaaacgaagccttttcccgcggtcaga

SEQ ID NO: 630823 - DNA, 75 bp, synthetic construct
  source 1..75: mol_type = other DNA
gtgaaagcctgcgcgcaggcgaatccgatatggcggttgccggcggcgtggcgctctctttcccccagcaggcag

SEQ ID NO: 630824 - DNA, 75 bp, synthetic construct
  source 1..75: mol_type = other DNA
aacgtgccctgcgtcttaatctcgaagccttcaagcgccgccttcgtgaaattgggttctaccaggatttgtcgg

SEQ ID NO: 630825 - DNA, 75 bp, synthetic construct
  source 1..75: mol_type = other DNA
cggccacggcgccagcggcaagcaggtgtggctgtttaccggccagggctcgcactggcgcactatgggtcaaac

SEQ ID NO: 630826 - DNA, 75 bp, synthetic construct
  source 1..75: mol_type = other DNA
caggatggcagcccgaccgccgggatgagcgaacatatcattctcgccacgctgcccggtcaggcggttagcgcc

SEQ ID NO: 630827 - DNA, 75 bp, synthetic construct
  source 1..75: mol_type = other DNA
gtcagccccgccagccgttgcgtattcttgaagttggcggcggaaccggcggcaccaccgcgtggctgctgccgg

SEQ ID NO: 630828 - DNA, 75 bp, synthetic construct
  source 1..75: mol_type = other DNA
acgttcctgctcgtgacctggctcccctgctgcgccagatgatggatgcgggtagcgtcggtaatgttgtgcatt

SEQ ID NO: 630829 - DNA, 75 bp, synthetic construct
  source 1..75: mol_type = other DNA
acctcgaccgagcgcgctaaacgcaacctgatggtatttatccgcccgacgattatccgtgacgatgatgtttat

SEQ ID NO: 630830 - DNA, 75 bp, synthetic construct
  source 1..75: mol_type = other DNA
tgaaatggctggcggggatctttgtttcagcctggcaatatatcagtgaaggatggaacagctttatttctttgc

SEQ ID NO: 630831 - DNA, 75 bp, synthetic construct
  source 1..75: mol_type = other DNA
atctggctggcacagaaagccgttgttgtctggaatatcaccctgggtgcgttgcgaggcatcctgctggcggtg

SEQ ID NO: 630832 - DNA, 75 bp, synthetic construct
  source 1..75: mol_type = other DNA
caggtggtgagttaaagggcattgaaaagggcggtctttcaaaaacaattaacagcaattctaaatctgttgttg

SEQ ID NO: 630833 - DNA, 75 bp, synthetic construct
  source 1..75: mol_type = other DNA
ataacgtcgccattaccgccgatgaacagactaactctctggtcattaccgctgaccagtccgtccaggaaaaac

SEQ ID NO: 630834 - DNA, 75 bp, synthetic construct
  source 1..75: mol_type = other DNA
cggttccaggacgcctgcgcgggactgcacgcggagccggggcaaataccgattatttccacgctcaccgccgac

SEQ ID NO: 630835 - DNA, 75 bp, synthetic construct
  source 1..75: mol_type = other DNA
ggagaaagggcggatgctgtttggtaagttaatgatgcagaagccgaacattctgatcatggacgaaccgaccaa

SEQ ID NO: 630836 - DNA, 75 bp, synthetic construct
  source 1..75: mol_type = other DNA
tttcgttagccgctttagcgccaacgcctcgaaatctcgccaggcaacttcgcgcgcgcgccagattgataaaat

SEQ ID NO: 630837 - DNA, 75 bp, synthetic construct
  source 1..75: mol_type = other DNA
tttcgccttcgggatggggatggagcgtctgaccatgttgcgttatggcgtcaccgacctgcgttcattcttcga

SEQ ID NO: 630838 - DNA, 75 bp, synthetic construct
  source 1..75: mol_type = other DNA
cactgcgaatcgcgctggatggtatagagcggagcgacgccatgcttcagggtaaaggagggggatatgctattg

SEQ ID NO: 630839 - DNA, 75 bp, synthetic construct
  source 1..75: mol_type = other DNA
ctgttgcttgatggtgaaacggtgatggccgggcgatacccaaaacgcgctgaactggctcgctggtttggtata

SEQ ID NO: 630840 - DNA, 75 bp, synthetic construct
  source 1..75: mol_type = other DNA
ccatcatgcgccgtggacgtctgctgccccgctaccagcagctactccagcgcctgctgaataactgcgtggtcg

SEQ ID NO: 630841 - DNA, 75 bp, synthetic construct
  source 1..75: mol_type = other DNA
catactggatagccagcgcccggcgtaacaaagaggcgagcgatgtcctcaatcaggccctgctccagctttacg

SEQ ID NO: 630842 - DNA, 75 bp, synthetic construct
  source 1..75: mol_type = other DNA
aatggctgaaacaacgaggtgttcaggtagatcgtttcaatctggcacagcaaccgatgagctttgtccagaacg

SEQ ID NO: 630843 - DNA, 75 bp, synthetic construct
  source 1..75: mol_type = other DNA
caaccgatgagctttgtacagaacgagaaggtcaaagcgtttattgaagcttccggggcagaaggtctgccattg

SEQ ID NO: 630844 - DNA, 75 bp, synthetic construct
  source 1..75: mol_type = other DNA
tgagatagctcgctggtttggtataccgctggagagggtagggttagctcccaccagttgctgtggtggtaatac

SEQ ID NO: 630845 - DNA, 75 bp, synthetic construct
  source 1..75: mol_type = other DNA
aaaagcagcggtgatgaataccgaagccttccagacatgtgccgccgtggtgaaatggctggcggggatctttgc

SEQ ID NO: 630846 - DNA, 75 bp, synthetic construct
  source 1..75: mol_type = other DNA
cggaacatcaatagacatcaacggacgtttttttatgactgaaatccgcgccacacaaggcttttcgctattttt

SEQ ID NO: 630847 - DNA, 75 bp, synthetic construct
  source 1..75: mol_type = other DNA
ttttaaaagacagtttatttactcctccacaagtaattttatataaaaaacaggattttctggaatataagatcc

SEQ ID NO: 630848 - DNA, 75 bp, synthetic construct
  source 1..75: mol_type = other DNA
caggggggagaatcaatatccgaagtatatacttatgaaataaaatgtctcagtaaggaagattatcattctctg

SEQ ID NO: 630849 - DNA, 75 bp, synthetic construct
  source 1..75: mol_type = other DNA
ctggcctcaaaagaactgctggtgatgcccgatggtagcgtgacgctcaatatgcccatggatgaaaatgcgcag

SEQ ID NO: 630850 - DNA, 75 bp, synthetic construct
  source 1..75: mol_type = other DNA
atgattaaaaaactattacctttactggtattaagcgcaatttccgccaccacctttgccgctacaccgccaaat

SEQ ID NO: 630851 - DNA, 75 bp, synthetic construct
  source 1..75: mol_type = other DNA
gatgctgatatggctcgcgatctgggggcagaccaaattgatgcattacagggtaaacctggcgtcaaagtgatg

SEQ ID NO: 630852 - DNA, 75 bp, synthetic construct
  source 1..75: mol_type = other DNA
ggctctgaagaatattatacagataaattagggcgtgtaaaaattagatttctctggggggaaatgtccacgtca

SEQ ID NO: 630853 - DNA, 75 bp, synthetic construct
  source 1..75: mol_type = other DNA
gggcaaccctgaccatccagttatcgttggcacagtgtataatggcaagaataaaccacctttttctcttcctga

SEQ ID NO: 630854 - DNA, 75 bp, synthetic construct
  source 1..75: mol_type = other DNA
tcaacagtgatatcaagtgtgctggatattgttattgtgatttgtgtgcctcagataataaaagcccacttaatt

SEQ ID NO: 630855 - DNA, 75 bp, synthetic construct
  source 1..75: mol_type = other DNA
caggcgacatctgaagttaaaggcaccatgttgacgcttcagggctctgccatgacacagataaaaggtggaata

SEQ ID NO: 630856 - DNA, 75 bp, synthetic construct
  source 1..75: mol_type = other DNA
attttaaaagacagttcatttgatcctccagaagtgacattatataaacaagagtcattactggagtataagatc

SEQ ID NO: 630857 - DNA, 75 bp, synthetic construct
  source 1..75: mol_type = other DNA
gaagaatattatacagatgaaaacgggcgtgtaaaaatcagctttctctggggggaaaagtcaacgtcgggcacg

SEQ ID NO: 630858 - DNA, 75 bp, synthetic construct
  source 1..75: mol_type = other DNA
tggctggcagcgtagcccgcctgtactgggagtggcaaacccaggcggcgttaaacacggtcttgcagcaaatag

SEQ ID NO: 630859 - DNA, 75 bp, synthetic construct
  source 1..75: mol_type = other DNA
ggggaggcggcactgggtaaggcgatttccggcggaatgaatgagacagcggagtgggtgaagcagcgttacggg

SEQ ID NO: 630860 - DNA, 75 bp, synthetic construct
  source 1..75: mol_type = other DNA
ccacatacctgcccaccattttcggtctgtctgccgcgggggcggccggtgaggccctgagccaggggcagtaca

SEQ ID NO: 630861 - DNA, 75 bp, synthetic construct
  source 1..75: mol_type = other DNA
acggtgaaagacgggctgttgtgggctgagccgcaggatgctcagccggctgaaccgggaaggagtgtgaacgga

SEQ ID NO: 630862 - DNA, 75 bp, synthetic construct
  source 1..75: mol_type = other DNA
ccggttctgaaccgactggccgatatggggcagacttttgcccgctggatgcagctatttcccaacattgcgcgt

SEQ ID NO: 630863 - DNA, 75 bp, synthetic construct
  source 1..75: mol_type = other DNA
gaatgaactgccgaaagtgacgaaagtcgccaataccctggcgtttgcgctcaaatccaccgcagcggaaaccgc

SEQ ID NO: 630864 - DNA, 75 bp, synthetic construct
  source 1..75: mol_type = other DNA
cagcctggaatgtgacactcaaatttctgcgcggggctttgctggcggtgcgtatggccgcagtgatggccggga

SEQ ID NO: 630865 - DNA, 75 bp, synthetic construct
  source 1..75: mol_type = other DNA
cagtcgctgatgctgcctccccctgcgcaacaggcgctggcaaaggcggcgctgacttaccgctttggcgaagag

SEQ ID NO: 630866 - DNA, 75 bp, synthetic construct
  source 1..75: mol_type = other DNA
ataaacgctgcctgtggtcagtgtcccgcgtccggcgggcacgggacgggcgcttttaccgctcccggctggcgt

SEQ ID NO: 630867 - DNA, 75 bp, synthetic construct
  source 1..75: mol_type = other DNA
ctgaacagcgcattcagctagctgaagcccaggcgaaggcagttgccactcaggatggtccgcagatcgactttt

SEQ ID NO: 630868 - DNA, 75 bp, synthetic construct
  source 1..75: mol_type = other DNA
atgaacatgttctttgactggtggttcgccacatcaccccgcctccgccagttttgctgggcagtctggttgctg

SEQ ID NO: 630869 - DNA, 75 bp, synthetic construct
  source 1..75: mol_type = other DNA
gcgattgattacgaagaccagggccgtaaggtgcgttatgacttcaccctgccgggagaggcggacacacagggt

SEQ ID NO: 630870 - DNA, 75 bp, synthetic construct
  source 1..75: mol_type = other DNA
tcaaatttgtggtgcccggcgtggtgctggccggggtattcatcgggcttaaaagctgcggcgactcagcgtcgt

SEQ ID NO: 630871 - DNA, 75 bp, synthetic construct
  source 1..75: mol_type = other DNA
gcgattggtgccattctcacggtgttgggttcgcttatgctggcgctgggcgcaattcttggcccgatggccctt

SEQ ID NO: 630872 - DNA, 75 bp, synthetic construct
  source 1..75: mol_type = other DNA
gcgcaggggatgaaactcaacgggccgctgcctgccgataccctgtttcagccgaaatatctcgataacgccgac

SEQ ID NO: 630873 - DNA, 75 bp, synthetic construct
  source 1..75: mol_type = other DNA
agtggaccacggcaccgcgcttgaactggcgggacgtggcgaagccgatgtcggcagttttattacggcgcttaa

SEQ ID NO: 630874 - DNA, 75 bp, synthetic construct
  source 1..75: mol_type = other DNA
gcggtactggacagtgtcgctgggaaggattaccggacgatgtcagggataccatcaccgcacttttcaccgcaa

SEQ ID NO: 630875 - DNA, 75 bp, synthetic construct
  source 1..75: mol_type = other DNA
tcacagcatggatgcagcagcaggctggcgcgctcgtttcttcggtgctgccgtacagtgttcagcagcctgccg

SEQ ID NO: 630876 - DNA, 75 bp, synthetic construct
  source 1..75: mol_type = other DNA
cagcaacacggcagagaagaaagacggccccggtgaaatcgtcttcaagaataagcagccgtacattcctatccg

SEQ ID NO: 630877 - DNA, 75 bp, synthetic construct
  source 1..75: mol_type = other DNA
gcaaactgcgggcacattaacgctacttcctgtcgcactacgcgcgcctgtcactgcggggaaactgacggttga

SEQ ID NO: 630878 - DNA, 75 bp, synthetic construct
  source 1..75: mol_type = other DNA
tatgggcacggaagagatagataccatcattccagtgctcgacgagttacgggcgcaggggatgaaactcaacgg

SEQ ID NO: 630879 - DNA, 75 bp, synthetic construct
  source 1..75: mol_type = other DNA
cacatcagtagatcacggtaccgcgcttgaactggcgggacgtggtaaagccgatgtcggcagttttattacggc

SEQ ID NO: 630880 - DNA, 75 bp, synthetic construct
  source 1..75: mol_type = other DNA
attcccccaactcccctgcacaaccgcaaactgcgggcacattaacgctacttcctgtcgcgctacgtgcacctg

SEQ ID NO: 630881 - DNA, 75 bp, synthetic construct
  source 1..75: mol_type = other DNA
ccggtcgaactggttgtttgtgccgatgccttttttacttctccttaccgaccgggtctagcgatgctcggtttg

SEQ ID NO: 630882 - DNA, 75 bp, synthetic construct
  source 1..75: mol_type = other DNA
tatgggtacggaagagatagacaccattattccggtgctcgacgagttgcgggcgcaggggatgaaacttaacgg

SEQ ID NO: 630883 - DNA, 75 bp, synthetic construct
  source 1..75: mol_type = other DNA
gtatcggtgtggtggaaccgtctgtgtgacaacgtactgccggaaaaaaccatgccgtttgacctgctgacggtt

SEQ ID NO: 630884 - DNA, 75 bp, synthetic construct
  source 1..75: mol_type = other DNA
aaacgctgtgcgcgctcaggcagaaaaaatggcgaaagagcagatcgctcgccaggttgagatggctaaagtccg

SEQ ID NO: 630885 - DNA, 75 bp, synthetic construct
  source 1..75: mol_type = other DNA
gctgtttctggccggaagtgccggacttctgcagatcactgaaaatatccgctctgaacagtgccccggagtgac

SEQ ID NO: 630886 - DNA, 75 bp, synthetic construct
  source 1..75: mol_type = other DNA
tatgacggctataacctggcttggtaatggcctcagaactctggcgacctccggtttcggcgctttgctgaacgt

SEQ ID NO: 630887 - DNA, 75 bp, synthetic construct
  source 1..75: mol_type = other DNA
gtttgcccgcaaatatctacgcttgatttccatcgcgcgcacgctgccattgcggccggacagctggcagtggaa

SEQ ID NO: 630888 - DNA, 75 bp, synthetic construct
  source 1..75: mol_type = other DNA
aaggcagggttaagacgtaagatgcgaaaagcagctatggacagaaactatctggcgtcagtccttgcggagagc

SEQ ID NO: 630889 - DNA, 75 bp, synthetic construct
  source 1..75: mol_type = other DNA
acagttaagcagcaacgcgttgaatgtcggggagagtggtttattaatttttatatgcgttataaacagcaacat

SEQ ID NO: 630890 - DNA, 75 bp, synthetic construct
  source 1..75: mol_type = other DNA
caccagataagcaggtagccaaccttacccagattttcggtaaagagttcggggatgatgcacagaaacttgcga

SEQ ID NO: 630891 - DNA, 75 bp, synthetic construct
  source 1..75: mol_type = other DNA
gccagccaactggattacaagcaagccgccgcgctgggctccacctttctgacgcttggatcacctgccgaagtt

SEQ ID NO: 630892 - DNA, 75 bp, synthetic construct
  source 1..75: mol_type = other DNA
gaaacatttgggagggttctgggtactgcaataagcggtttgctttggccgctacaaaaattgatggagggtgtc

SEQ ID NO: 630893 - DNA, 75 bp, synthetic construct
  source 1..75: mol_type = other DNA
tgcagcgggcgatcatggatgccagcgaaaagctgccaatggctaacggtgctgttgactatgccgccctggtcg

SEQ ID NO: 630894 - DNA, 75 bp, synthetic construct
  source 1..75: mol_type = other DNA
caggttgagaagcccgccgcccgggtgcccgtttcggcgtcgccgtctgcggcctccgtcgctgcgctgatgcct

SEQ ID NO: 630895 - DNA, 75 bp, synthetic construct
  source 1..75: mol_type = other DNA
ggggatgatgcacagaaacttgcgaacaacctgcccgaacttcggcgccagatcgaactgacgcagggtgctgcc

SEQ ID NO: 630896 - DNA, 75 bp, synthetic construct
  source 1..75: mol_type = other DNA
tggttgtttgtgccgatgccactctccttaccgaccgggcagcgatgctcggtttgccgctccccctccgccctt

SEQ ID NO: 630897 - DNA, 75 bp, synthetic construct
  source 1..75: mol_type = other DNA
agtttgaaccgtgccccggactgacggctgccggacgtggtgttgtatcgccggagaatatcgcgttcacccgct

SEQ ID NO: 630898 - DNA, 75 bp, synthetic construct
  source 1..75: mol_type = other DNA
gggctgtgatttctgtggctggcagttgtatgagcgcggagagctcgttgatgtgctgtggggggaactggaatg

SEQ ID NO: 630899 - DNA, 75 bp, synthetic construct
  source 1..75: mol_type = other DNA
cgcaaaaagaggtgactggtgtgacatctggggtaacgaggatgtatcggtgtggtggaaccgtctgtgtgacaa

SEQ ID NO: 630900 - DNA, 75 bp, synthetic construct
  source 1..75: mol_type = other DNA
atttctgtggctggcagttgtatgagcgcggagagctcgttgatgtgctgtggggggaactggaatggtcacatc

SEQ ID NO: 630901 - DNA, 75 bp, synthetic construct
  source 1..75: mol_type = other DNA
accacgaaagcgtcagaagcagccacttcagcacgggatgcgtcggcttcaaaagaggcagcgaaatcatcagaa

SEQ ID NO: 630902 - DNA, 75 bp, synthetic construct
  source 1..75: mol_type = other DNA
ttcgacacgccgtggtgtcagccggaaagcgacgttattgcagtattaagccgccgtttcagttgcatgctggag

SEQ ID NO: 630903 - DNA, 75 bp, synthetic construct
  source 1..75: mol_type = other DNA
cactggtacgccgaacagggctgtgatttctgtggctggcagttgtatgagcgcggagagcttgttgatgtgctg

SEQ ID NO: 630904 - DNA, 75 bp, synthetic construct
  source 1..75: mol_type = other DNA
ccggacgtggtggtgtggggcagcggtacaccgatgcgtgaatttctgcacgtcgatgatatggcggcggcgagc

SEQ ID NO: 630905 - DNA, 75 bp, synthetic construct
  source 1..75: mol_type = other DNA
agcggtgcagttacaccgctttatcgccgcgccacaaatgaaggtattcagctgtttctggccggaagtgccgga

SEQ ID NO: 630906 - DNA, 75 bp, synthetic construct
  source 1..75: mol_type = other DNA
acacgccgctatccgtctatttcgctcaccgtgctcactggtaatgacaatgtcaatctgcaacgtgccggaatc

SEQ ID NO: 630907 - DNA, 75 bp, synthetic construct
  source 1..75: mol_type = other DNA
acatcactacgctgccgggaaggcagtggccgaaaattgaggcttttattcactggttaagagaacaagtctgcc

SEQ ID NO: 630908 - DNA, 75 bp, synthetic construct
  source 1..75: mol_type = other DNA
atcgactgcttaacggctggcaactatcaaaaatgcatacttttgaagtggctgccaggcatcagtccttcgccc

SEQ ID NO: 630909 - DNA, 75 bp, synthetic construct
  source 1..75: mol_type = other DNA
ttcgacacgccgtggtgtcagccggagagcgacgttgttgcagaattaagccgccttttcggctgcacgctggag

SEQ ID NO: 630910 - DNA, 75 bp, synthetic construct
  source 1..75: mol_type = other DNA
atgagtaaacaacgcatttttatcgctggccatcgtgggatggtcggttccgccatcacgcggcagctcgaacag

SEQ ID NO: 630911 - DNA, 75 bp, synthetic construct
  source 1..75: mol_type = other DNA
gcaaaaagaggtgactggtgtgacatctggggtaacgaggatgtatcggtgtggtggaaccgtctgtgtgacaac

SEQ ID NO: 630912 - DNA, 75 bp, synthetic construct
  source 1..75: mol_type = other DNA
ggtatgaggtgaatatcagcagtcagggagacaacttcattcaggtggatttcgacacgccgtggtgtcagccgg

SEQ ID NO: 630913 - DNA, 75 bp, synthetic construct
  source 1..75: mol_type = other DNA
gcacagcgtgagtggccggtcgaactggttgtttgtgccgatgccactctccttaccgaccgggcagcgatgctc

SEQ ID NO: 630914 - DNA, 75 bp, synthetic construct
  source 1..75: mol_type = other DNA
ccatcgccaaagtggtgggttacaaaggtcgggtggtttttgatgccagtaaaccggatggcacaccgcgcaaac

SEQ ID NO: 630915 - DNA, 75 bp, synthetic construct
  source 1..75: mol_type = other DNA
tcagcttggctggtatcacgaaatctcactggaagcggggcttgccagcacttaccagtggttccttgagaatca

SEQ ID NO: 630916 - DNA, 75 bp, synthetic construct
  source 1..75: mol_type = other DNA
atgccaaactggtgctcgaatcgtatgcatttttctggtgaaccggcacagatagctgagattaaacgactggcc

SEQ ID NO: 630917 - DNA, 75 bp, synthetic construct
  source 1..75: mol_type = other DNA
gctctgagcagtgccccggagtgacggctgccggacgtggtgctgtatcgccggaaaatatcgcgttcacccgct

SEQ ID NO: 630918 - DNA, 75 bp, synthetic construct
  source 1..75: mol_type = other DNA
gcgtggcgagcttgttgatgtgctgtggggggaactggaatggtcacatccgacagatgatgacgagttgccgga

SEQ ID NO: 630919 - DNA, 75 bp, synthetic construct
  source 1..75: mol_type = other DNA
gagtaacgaggctgtatcggtgtggtggaaccgtctgtgtgacaacgtactgccggaaaaaaccatgccgtttga

SEQ ID NO: 630920 - DNA, 75 bp, synthetic construct
  source 1..75: mol_type = other DNA
tgtatttttctggtgaacctgcacagatcgctgagattaaacgactggccagcggtgcagtcacaccgctttatc

SEQ ID NO: 630921 - DNA, 75 bp, synthetic construct
  source 1..75: mol_type = other DNA
tgtggggggaactggaatggtcttccccgacagatgatgatgagctgccggaagtcaccggacctgcgtggataa

SEQ ID NO: 630922 - DNA, 75 bp, synthetic construct
  source 1..75: mol_type = other DNA
actacctcgaaccgacgattttgtttggtcagaacaatatgcgcgtgttccaggaggagatttttggcccggtgc

SEQ ID NO: 630923 - DNA, 75 bp, synthetic construct
  source 1..75: mol_type = other DNA
ggcatttaccggctcaacggaagtcggtcagcagattatgcagtacgctacccagaacattattccggtgacgct

SEQ ID NO: 630924 - DNA, 75 bp, synthetic construct
  source 1..75: mol_type = other DNA
cagcttctgtgcgaagtggcgtcttcgggcaaacgcgatatcgatctggcgctggatgcagcccataaagcgaaa

SEQ ID NO: 630925 - DNA, 75 bp, synthetic construct
  source 1..75: mol_type = other DNA
gtgaaacccacaaaatgatgcttgagcattaccagcaaaccaagtgcctgctggtgagctaccctattacgggca

SEQ ID NO: 630926 - DNA, 75 bp, synthetic construct
  source 1..75: mol_type = other DNA
tttaaccagggcgaagtttgcacctgtccaagccgtgctttagtgcaggaatctatctacgaacgctttatggaa

SEQ ID NO: 630927 - DNA, 75 bp, synthetic construct
  source 1..75: mol_type = other DNA
tatctacgaacgctttatggaacgcgccatccgccgtgtcgaaagcattcgcagcggtaacccgctcgacagcgt

SEQ ID NO: 630928 - DNA, 75 bp, synthetic construct
  source 1..75: mol_type = other DNA
gggcgtgcacatggttttgaatgtgaggcacaaggaacactattttttgatgtcgctcggattattaaatcaaaa

SEQ ID NO: 630929 - DNA, 75 bp, synthetic construct
  source 1..75: mol_type = other DNA
tatcgcaaggactctgtctgctcgttatcataaagatggctctgaaatattgattgatcgtggctgggataaggc

SEQ ID NO: 630930 - DNA, 75 bp, synthetic construct
  source 1..75: mol_type = other DNA
cgccgaaactctgggagtacctctataactacgctaaaaagcacgcagctaaggggaacgggttcggttttggcc

SEQ ID NO: 630931 - DNA, 75 bp, synthetic construct
  source 1..75: mol_type = other DNA
gggcggcgcaagctgctggaaggcgaactgaaagacggctactacctcgaaccgacgattctgtttggtcagaac

SEQ ID NO: 630932 - DNA, 75 bp, synthetic construct
  source 1..75: mol_type = other DNA
gatcatgatgtgctgttggcaggattcccctgccagccttttagcctcgcaggtgtcagcaaaaaaaattcatta

SEQ ID NO: 630933 - DNA, 75 bp, synthetic construct
  source 1..75: mol_type = other DNA
tgactacgcatttcgttttatcgatttattcgcgggcatcggcggtattcgcaaagggttcgaagaaattggcgg

SEQ ID NO: 630934 - DNA, 75 bp, synthetic construct
  source 1..75: mol_type = other DNA
acaaaagatatatctaatatgcctaaggaatatctttctgtttatcaggatggcagtaatttaagcttgggtaac

SEQ ID NO: 630935 - DNA, 75 bp, synthetic construct
  source 1..75: mol_type = other DNA
ttagcgatcagctgggcattctgcagaacacggcaacgtctgcgattggaagcatcagcggaacggtgggaggtt

SEQ ID NO: 630936 - DNA, 75 bp, synthetic construct
  source 1..75: mol_type = other DNA
tctttatgttgcgcaccgtgccgtatcaggagctgcagtatcagcgcagctggcgacacgctgcgaacaaccggg

SEQ ID NO: 630937 - DNA, 75 bp, synthetic construct
  source 1..75: mol_type = other DNA
cgcaaaccatcgccaaagtggtgggttacaaaggtcgggtggtttttgatgccagcaaaccggatggtacgccgc

SEQ ID NO: 630938 - DNA, 75 bp, synthetic construct
  source 1..75: mol_type = other DNA
tcggtgatctcagtgcgcaactgaataatctgcaggaaacggcaacatctgctttaagcgatatcagtaaaacgg

SEQ ID NO: 630939 - DNA, 75 bp, synthetic construct
  source 1..75: mol_type = other DNA
actaaaacggagtttttccgtgacggtatgccgcgccggattgagtttaccctgtcgctcaaacgggtggatgaa

SEQ ID NO: 630940 - DNA, 75 bp, synthetic construct
  source 1..75: mol_type = other DNA
tcgttaccgcgaacttgccgatgaaggcggtgtggatgcgctgattaatcgtagtcgccgcgctcctaaccttaa

SEQ ID NO: 630941 - DNA, 75 bp, synthetic construct
  source 1..75: mol_type = other DNA
gatcatgatgttctgctggctggtttcccgtgtcagccctttagccttgcaggtgtgagcaaaaaaaactcactt

SEQ ID NO: 630942 - DNA, 75 bp, synthetic construct
  source 1..75: mol_type = other DNA
acggtaccaaaaggcagtgcagccggtgataccctgacactgacggtcaccagaccggacggcacgacggacgca

SEQ ID NO: 630943 - DNA, 75 bp, synthetic construct
  source 1..75: mol_type = other DNA
gtgaagacggcaatgatacctttaaattaggcacaattgccaaaaacctgaccattgatgccggtgccggtgatg

SEQ ID NO: 630944 - DNA, 75 bp, synthetic construct
  source 1..75: mol_type = other DNA
gaaggtcgggcgtggccgttgctggatggcaccggcatgatttacggcatgtatgtcatcagcagggtgagtgaa

SEQ ID NO: 630945 - DNA, 75 bp, synthetic construct
  source 1..75: mol_type = other DNA
aggtaacgggcggcaggctgtcgttgctggctctggagcagatggcagaacagggaaaagcatggcccctgattg

SEQ ID NO: 630946 - DNA, 75 bp, synthetic construct
  source 1..75: mol_type = other DNA
tggcgacatgcggcaaacagccgggtaaaccgacgtccgtccacgcagtttctgggaccggaaaacgacatgctg

SEQ ID NO: 630947 - DNA, 75 bp, synthetic construct
  source 1..75: mol_type = other DNA
tgtggcgcgtattatccgcgcaaaaaaacctgccatctttgttcttgaaaacgttaaaaacctgaagagccatga

SEQ ID NO: 630948 - DNA, 75 bp, synthetic construct
  source 1..75: mol_type = other DNA
atggcatacaggcagaagtgacggttccggcaggcagtgctgaaggtgatactgtgacgctgacggtcaccaaac

SEQ ID NO: 630949 - DNA, 75 bp, synthetic construct
  source 1..75: mol_type = other DNA
ctctgtgaacagcgggaagaggggccagcctgcgttgaatcttgcccaacacaggcgctgcagttgcttactgaa

SEQ ID NO: 630950 - DNA, 75 bp, synthetic construct
  source 1..75: mol_type = other DNA
ggcggtctggtggcgtggccaatggtgtcgaatatcgaaatcagttttttacgtctgccgctcaatcccaacatc

SEQ ID NO: 630951 - DNA, 75 bp, synthetic construct
  source 1..75: mol_type = other DNA
gataacgttacggcagctactgacatcgttgataatgcgggagcatccgcaacaggtgttatttatgatggtaat

SEQ ID NO: 630952 - DNA, 75 bp, synthetic construct
  source 1..75: mol_type = other DNA
aacctgttggtaatcaaggttccattaacggtggagaaggtagcgatactctggttctggcaggtaatatttctg

SEQ ID NO: 630953 - DNA, 75 bp, synthetic construct
  source 1..75: mol_type = other DNA
tatgttggctattatcaggatggtcaggaaacatcatcatatagcaacgtggccaattctatggataacggttat

SEQ ID NO: 630954 - DNA, 75 bp, synthetic construct
  source 1..75: mol_type = other DNA
ttcaaggcagggttaagacgtaagatgcgaaaagcagctatggacagaaactatctggcgtcagtccttgcggag

SEQ ID NO: 630955 - DNA, 75 bp, synthetic construct
  source 1..75: mol_type = other DNA
acgtggagaataagctgcactggcgtctggacgtggtaatgaatgaagacgactgcaaaataagaagaggaaatg

SEQ ID NO: 630956 - DNA, 75 bp, synthetic construct
  source 1..75: mol_type = other DNA
cgacacgtcgggcggtgacagcgccaacggcaacagagattatgaccacttctatccaggtgctggagaaccgac

SEQ ID NO: 630957 - DNA, 75 bp, synthetic construct
  source 1..75: mol_type = other DNA
gatctcggtggtgctcttcatcattattttcgctgtcattctgctgaccaggaaacgggtgaacctcaatggcaa

SEQ ID NO: 630958 - DNA, 75 bp, synthetic construct
  source 1..75: mol_type = other DNA
acgtctgccgctcaatcccaacatcgagtcaacctttgttggggtgagtaactatgtgcgtatcctctccgatcc

SEQ ID NO: 630959 - DNA, 75 bp, synthetic construct
  source 1..75: mol_type = other DNA
tgctcagtgggtcatagcagcggatatgccagtcagcccggcacccactatcccggtgaaacagtatgtgactca

SEQ ID NO: 630960 - DNA, 75 bp, synthetic construct
  source 1..75: mol_type = other DNA
aagaaacaacatcgtatagtaatgttgctaactcacaggataatgggccagacggaacaaaaaccgatggcaatc

SEQ ID NO: 630961 - DNA, 75 bp, synthetic construct
  source 1..75: mol_type = other DNA
gtggatgtcacctttgaagatgaaaagggtggtaaacacaccgtgacgctggagaacggggataacggctggaca

SEQ ID NO: 630962 - DNA, 75 bp, synthetic construct
  source 1..75: mol_type = other DNA
gtggatgtcacctttgaagatgaaaagggtgttaagcacaccgtgacgctggagaacggtgataacggctggaca

SEQ ID NO: 630963 - DNA, 75 bp, synthetic construct
  source 1..75: mol_type = other DNA
gtggatgtcacctttgaagatgaaaagggtgttaatcacaccgtgacgctggagaacggggataacggctggaca

SEQ ID NO: 630964 - DNA, 75 bp, synthetic construct
  source 1..75: mol_type = other DNA
gtgtcatccaaggttaattatgagtcgctggcatcggtcatgccgcgtaatgaacaggaaacagatgctgtagtg

SEQ ID NO: 630965 - DNA, 75 bp, synthetic construct
  source 1..75: mol_type = other DNA
gtggatgtcacctttgaagatgaaaagggtggtaagcacaccgtgacgctggagaacggagataacggctggaca

SEQ ID NO: 630966 - DNA, 75 bp, synthetic construct
  source 1..75: mol_type = other DNA
gtggatgtcacctttgaagatgaaaagggtggtaatcacaccgtgacgctggagaacggtgataacggctggaca

SEQ ID NO: 630967 - DNA, 75 bp, synthetic construct
  source 1..75: mol_type = other DNA
gtcgatactcagatcccgggcgatactgacggtgacggtgtggtggatgcaacaccggtagtgaccattccggaa

SEQ ID NO: 630968 - DNA, 75 bp, synthetic construct
  source 1..75: mol_type = other DNA
attgagcatgaatgacaattcaacgctttatatttctggtgatgctaatgataaagttgatctgggggctgatgg

SEQ ID NO: 630969 - DNA, 75 bp, synthetic construct
  source 1..75: mol_type = other DNA
aatcaaagtattacgactgttgatttaggtgctggtgatgatctaatggtcattcgtggtaacatgctgtctaat

SEQ ID NO: 630970 - DNA, 75 bp, synthetic construct
  source 1..75: mol_type = other DNA
gtggatgtcacctttgaagatgaaaagggtgataagcacaccgtgacgctggagaacggggataacggctggaca

SEQ ID NO: 630971 - DNA, 75 bp, synthetic construct
  source 1..75: mol_type = other DNA
tgatgctgctgactattctgacattggtggagcacagcataacgggaaaataggccttcatggtgatactggaaa

SEQ ID NO: 630972 - DNA, 75 bp, synthetic construct
  source 1..75: mol_type = other DNA
gatgttcccgcaactattgaagataaggatgattccactggactggtttatacggtttctctgaatcatgtcact

SEQ ID NO: 630973 - DNA, 75 bp, synthetic construct
  source 1..75: mol_type = other DNA
agattatgcgcaaccatttagctgtattcgagcgatatggaatagccccaaacgatagcactaccacaattcagg

SEQ ID NO: 630974 - DNA, 75 bp, synthetic construct
  source 1..75: mol_type = other DNA
tttttacgctgtttgtggatggtgaaaacgaagtgggtaaagtgacctccgtcactcagcccaaactgacgcgca

SEQ ID NO: 630975 - DNA, 75 bp, synthetic construct
  source 1..75: mol_type = other DNA
tttttacgttgtttgtggatggtgaaaacgaagtgggtaacgtgacctccgtcactctgcccaaactgacgcgca

SEQ ID NO: 630976 - DNA, 75 bp, synthetic construct
  source 1..75: mol_type = other DNA
tttttacgatgtttgtggatggtgaaaacgaagtgggtaacgtgacctccgtcactcagcccaaactgacgcgca

SEQ ID NO: 630977 - DNA, 75 bp, synthetic construct
  source 1..75: mol_type = other DNA
tttttacgctgtttgtggatggtgaaaacgaagtgggtaaggtgacctccgtcactcggcccaaactgacgcgca

SEQ ID NO: 630978 - DNA, 75 bp, synthetic construct
  source 1..75: mol_type = other DNA
tttttacgctgtttgtggatggtgaaaacgaagtgggtaacgtgacctccgtcactccgcccaaactgacgcgca

SEQ ID NO: 630979 - DNA, 75 bp, synthetic construct
  source 1..75: mol_type = other DNA
tttttacgctgtttgtggatggtgaaaacgaagtgggtaatgtgacctccgtcactctgcccaaactgacgcgca

SEQ ID NO: 630980 - DNA, 75 bp, synthetic construct
  source 1..75: mol_type = other DNA
taaaggggttaaaataactcttctcacaaatagaaagggtggggaatttctctctaataataaaaatatatttga

SEQ ID NO: 630981 - DNA, 75 bp, synthetic construct
  source 1..75: mol_type = other DNA
ggggactttaccgatagtgctgagctacatcttgttctgcacgatatatcaggcaatccgatcaaagtttcttaa

SEQ ID NO: 630982 - DNA, 75 bp, synthetic construct
  source 1..75: mol_type = other DNA
acccgtttcagcaattgcgtgaaaaattgattgtcggtttgcaatatattgccaaaattccccgccagcaggcgt

SEQ ID NO: 630983 - DNA, 75 bp, synthetic construct
  source 1..75: mol_type = other DNA
agttcacgctgtttgtgaacggcaaaaacaaaatcggcacagtgacaggcgtcagtctgcccaaactgacccgaa

SEQ ID NO: 630984 - DNA, 75 bp, synthetic construct
  source 1..75: mol_type = other DNA
ctcggactggatgacagcgcactggatgcgagttttgttatgggtggtgcagctgctgacctggtgcgtaagtat

SEQ ID NO: 630985 - DNA, 75 bp, synthetic construct
  source 1..75: mol_type = other DNA
tatgtaagcatctgcgggatttgcagttcgatattgtattagacccctttgaaaccatgccctcatttaagcata

SEQ ID NO: 630986 - DNA, 75 bp, synthetic construct
  source 1..75: mol_type = other DNA
tttttacggtgtttgtggatggtgaaaacgaagtgggtaacgtgacctccgtcactcggcccaaactgacgcgca

SEQ ID NO: 630987 - DNA, 75 bp, synthetic construct
  source 1..75: mol_type = other DNA
cgaagcaggccagttaccaacgaacagcccccttgttcaaaatgaacatgcagcaggtacatcagctcttcacaa

SEQ ID NO: 630988 - DNA, 75 bp, synthetic construct
  source 1..75: mol_type = other DNA
tttcgtcgcaaaacacagctcaaagccaattgatcaaccagcaagccaagaacttcatggataagttccaggtgg

SEQ ID NO: 630989 - DNA, 75 bp, synthetic construct
  source 1..75: mol_type = other DNA
tggcgaatcaggcgatgtgctggacatcaaagcgcaagcgaagggggcaacagagtcctcagctcaagactcctc

SEQ ID NO: 630990 - DNA, 75 bp, synthetic construct
  source 1..75: mol_type = other DNA
gctggccgaaaatgaaggggcaaagttctggctcaatgtgctgactgaactgaaaaactgtagtggatcacaaaa

SEQ ID NO: 630991 - DNA, 75 bp, synthetic construct
  source 1..75: mol_type = other DNA
ctcattgctggtggtcaagctggcgctgatgcgttctcaagagcgatggatcaaatgagaacgatgacacctgaa

SEQ ID NO: 630992 - DNA, 75 bp, synthetic construct
  source 1..75: mol_type = other DNA
acgcttacacagggcaggtccgagtcgtcgccaatgtgcctattggagtaggctttgctggtggtgtcatatcta

SEQ ID NO: 630993 - DNA, 75 bp, synthetic construct
  source 1..75: mol_type = other DNA
gttttggaatcagcatagcaagcccccctcattcttccggacaaaaaccagtcatagatggtttcttttttgggg

SEQ ID NO: 630994 - DNA, 75 bp, synthetic construct
  source 1..75: mol_type = other DNA
aggaagtggcagcagaaataaaagaaaacacgtcaatgcttgagtttatatttaaaaactctggtgataacggag

SEQ ID NO: 630995 - DNA, 75 bp, synthetic construct
  source 1..75: mol_type = other DNA
aggaagtggcagcacaaataaaagagaatacatcaatgcttgaatttatatttaagaattcgcctgattcaggag

SEQ ID NO: 630996 - DNA, 75 bp, synthetic construct
  source 1..75: mol_type = other DNA
ctgcggccaccccggtcatttccctgtttatcgttacaggtagcacttatgccttcaccagcttggcatcgagaa

SEQ ID NO: 630997 - DNA, 75 bp, synthetic construct
  source 1..75: mol_type = other DNA
ggagtatgcagaacgtaacccggatggctcaccgatgatgcaaggaggtcagcctgttctttctcagcaaaacga

SEQ ID NO: 630998 - DNA, 75 bp, synthetic construct
  source 1..75: mol_type = other DNA
cgtacagcgctaagtagtctagcggatactttttttgagaataatgttaacaatatagatatgaataaattccgt

SEQ ID NO: 630999 - DNA, 75 bp, synthetic construct
  source 1..75: mol_type = other DNA
cgttacgcgtggcgctatctactggcacttcgagaacaagactcaactgtttaatgagatgtggttgcaacagcc

SEQ ID NO: 631000 - DNA, 75 bp, synthetic construct
  source 1..75: mol_type = other DNA
tgaattaatgttgttgcctggcaagctgcgctatcgcgaagtgtctgccagctttaactacaactatatcggtcg

SEQ ID NO: 631001 - DNA, 75 bp, synthetic construct
  source 1..75: mol_type = other DNA
catcggtagagaagttcccgctggtggggctgaatagcgccatgctactggtggctgaagatggcggatttacac

SEQ ID NO: 631002 - DNA, 75 bp, synthetic construct
  source 1..75: mol_type = other DNA
tctacggattatcgttatagcgatcaggatggcgatcaaacgtcatggcagttatcgcatatcttttataacgac

SEQ ID NO: 631003 - DNA, 75 bp, synthetic construct
  source 1..75: mol_type = other DNA
ctgattatgagttttcaagctctgcctcctgggtcgatgttgatgctaccggtaaagtgacatttaaaaatgtcg

SEQ ID NO: 631004 - DNA, 75 bp, synthetic construct
  source 1..75: mol_type = other DNA
gggtgcggtactggtggatgtgaaaggcttctctgaacaggatgaagagagtcaggatctgcaactcgaagcgcg

SEQ ID NO: 631005 - DNA, 75 bp, synthetic construct
  source 1..75: mol_type = other DNA
taaagaaacgcgccagcattcgttacagcggagatgttacttgtagtgtggtgacttattcacaattaccggagt

SEQ ID NO: 631006 - DNA, 75 bp, synthetic construct
  source 1..75: mol_type = other DNA
ttgagttaacggagtccgggcgttattttttccgcaaagcaaccgacctgctgaatgattttcacgccatcaaac

SEQ ID NO: 631007 - DNA, 75 bp, synthetic construct
  source 1..75: mol_type = other DNA
gatatatcaggcaatccgatcaaagtttctgaagggatggaatttgtgcaatcaggtactaacgtgccctatata

SEQ ID NO: 631008 - DNA, 75 bp, synthetic construct
  source 1..75: mol_type = other DNA
gttgagcgggttattccggtagcgatacgtcgctggcgtaaagcgtggttttcagcgcctgttaaagcagagcgg

SEQ ID NO: 631009 - DNA, 75 bp, synthetic construct
  source 1..75: mol_type = other DNA
cgtgtgaagagttggtgggtgaactccggcgatgctttcatgatatacagccttgctgaaaatttttgcagtagc

SEQ ID NO: 631010 - DNA, 75 bp, synthetic construct
  source 1..75: mol_type = other DNA
caagctctgcctcctgggtcgatgttgatgctaccggtaaagtgacatttaaaaatgtcggcagcaattgggaaa

SEQ ID NO: 631011 - DNA, 75 bp, synthetic construct
  source 1..75: mol_type = other DNA
atggcggtaaagtgattactgatgctgaaggcaaagcgaaagtcacgctgaaaggtacaaaagcaggcgctcata

SEQ ID NO: 631012 - DNA, 75 bp, synthetic construct
  source 1..75: mol_type = other DNA
atgtctggaaatataggggcaaatccaactgcatctttccataacggcgtaacaatacagacacagacaaccgtg

SEQ ID NO: 631013 - DNA, 75 bp, synthetic construct
  source 1..75: mol_type = other DNA
tcgattttccgattcgtttggtggtaacccaccattatattcgtgcggtcttagtgcgctgtaatatccaacgat

SEQ ID NO: 631014 - DNA, 75 bp, synthetic construct
  source 1..75: mol_type = other DNA
aatttcttgaaaatttgaatcttgacctcaaacaggcaaaaaagatcagctatcactatcgaaaaataaccaagt

SEQ ID NO: 631015 - DNA, 75 bp, synthetic construct
  source 1..75: mol_type = other DNA
gtgctggaactgcgcgccgcgccggccgcgcaaggcgtgctggcagccgtgcagaccctgcgtgagatgaacgcc

SEQ ID NO: 631016 - DNA, 75 bp, synthetic construct
  source 1..75: mol_type = other DNA
acaccgaacgctcgccgtcggaatatcgccggcagtaccacagccaactgacagaaaaaccggtaatgactccaa

SEQ ID NO: 631017 - DNA, 75 bp, synthetic construct
  source 1..75: mol_type = other DNA
cggcccgcgcattggttcattcttgctgcaaacactcaatgaaatgcaaatgcagccacaggagcagcaaacggc

SEQ ID NO: 631018 - DNA, 75 bp, synthetic construct
  source 1..75: mol_type = other DNA
aactggccgctgaaaatgcccgcctgaagctgcaactggcggagcaggcagaggtactggctatcctccaaaagg

SEQ ID NO: 631019 - DNA, 75 bp, synthetic construct
  source 1..75: mol_type = other DNA
ctgctggccgataacgccaagaagaaagcgcagattgctgagttgcaatctttcgttagccgctttagcgccaac

SEQ ID NO: 631020 - DNA, 75 bp, synthetic construct
  source 1..75: mol_type = other DNA
gatgcccgtacgttcccggacggcgatctggatggtattgaaaccgcccgcccggctatgcatctaggcagcatg

SEQ ID NO: 631021 - DNA, 75 bp, synthetic construct
  source 1..75: mol_type = other DNA
cgatagtgctgaattacgtcttgttctgcacgatatatcaggcaatccgatcaaagtttctgaagggatggaatt

SEQ ID NO: 631022 - DNA, 75 bp, synthetic construct
  source 1..75: mol_type = other DNA
accaaagggtttgataacggtccgctgtttaaaaatctcaacctgctgctggaagtgggggaaaaactggcggta

SEQ ID NO: 631023 - DNA, 75 bp, synthetic construct
  source 1..75: mol_type = other DNA
taagctccctggcgacccgcattctggaaatcaccccggaacgcgtgatcgactttagcggtaattacgaagatt

SEQ ID NO: 631024 - DNA, 75 bp, synthetic construct
  source 1..75: mol_type = other DNA
cgggcaactacgatgagtacatgacggcggcgactcaggcgcgtgaacgtctgctggctgataacgccaagaaga

SEQ ID NO: 631025 - DNA, 75 bp, synthetic construct
  source 1..75: mol_type = other DNA
tcataccagccccggttcggacagtcatccagtctgtccgcaacatcgtggtatcagtcgcccgtgcagtctgga

SEQ ID NO: 631026 - DNA, 75 bp, synthetic construct
  source 1..75: mol_type = other DNA
acaacggctgaagtattggtttaagctggctgatccacaaacgcgaaataccttcctgcaatgggcggaaaaaca

SEQ ID NO: 631027 - DNA, 75 bp, synthetic construct
  source 1..75: mol_type = other DNA
tcattacttcaacaacaaaaacaatcgattatgaagtggaggtcgagcgctataacaaatccgcgaaacgcgcgt

SEQ ID NO: 631028 - DNA, 75 bp, synthetic construct
  source 1..75: mol_type = other DNA
tcgttgtgcaatgccctgtttgccagtgagatttcaactgtcagcgatgtggctgcctgcactcgcgaaccactg

SEQ ID NO: 631029 - DNA, 75 bp, synthetic construct
  source 1..75: mol_type = other DNA
catcatcgtttctgtctgcatcgctgaaaacggtgattcgtagcgtgcgtgatgcggtggtgtcggtcgcacggg

SEQ ID NO: 631030 - DNA, 75 bp, synthetic construct
  source 1..75: mol_type = other DNA
tccctctgcaacgaacttttccggggcgaggtgtccccggtgagtgacgtgaacgcctgtactcgcgacgtactg

SEQ ID NO: 631031 - DNA, 75 bp, synthetic construct
  source 1..75: mol_type = other DNA
agtctctggtgggaaaagatggatgcaatgcaggagtctgccacccgtcagcgtgtagagaaagaaacgaaatgg

SEQ ID NO: 631032 - DNA, 75 bp, synthetic construct
  source 1..75: mol_type = other DNA
atgaacaggatatccggcgtctctggcaggaaacgcagaggaaacactatacataaatcagaagctgaaaaagtt

SEQ ID NO: 631033 - DNA, 75 bp, synthetic construct
  source 1..75: mol_type = other DNA
atgcataaatcagaaactgaaaaaatagattctattctggatgaacatcaacagatatatcgcagacataaccga

SEQ ID NO: 631034 - DNA, 75 bp, synthetic construct
  source 1..75: mol_type = other DNA
tgattgcattatgtttgccggtatccgtttttgccaccacgctacggctgtccagcgatattgatcttctggtac

SEQ ID NO: 631035 - DNA, 75 bp, synthetic construct
  source 1..75: mol_type = other DNA
gatcgggcgctggcagtggatgagcattattatcggcaggtgattggtgaagcataccggcacaagatgctgttt

SEQ ID NO: 631036 - DNA, 75 bp, synthetic construct
  source 1..75: mol_type = other DNA
gccagcaactgacgcaactcgatctggtactgtggctgattaaggccgatgatcgagcactagcggtggatgaac

SEQ ID NO: 631037 - DNA, 75 bp, synthetic construct
  source 1..75: mol_type = other DNA
cgtgttgtggctgcttaaggctgatgaccgggcgctagcagtggatgagcacttttatcatcaggtgattgggga

SEQ ID NO: 631038 - DNA, 75 bp, synthetic construct
  source 1..75: mol_type = other DNA
ggccgagcgccgcgtttttgaaatagctgaaaaacgacaaaagagcggtagtggtccaaaagatatcgccagcat

SEQ ID NO: 631039 - DNA, 75 bp, synthetic construct
  source 1..75: mol_type = other DNA
ggaaatgatggtgatcggacatatgcacgtctgggctttaaaggtgaaactcagattaatgatcaactgaccggt

SEQ ID NO: 631040 - DNA, 75 bp, synthetic construct
  source 1..75: mol_type = other DNA
caggatgcggacttgatcatgtttatctatcgtgatgaggtgtatcacgaaaacagtgatttaaaaggcatcgcg

SEQ ID NO: 631041 - DNA, 75 bp, synthetic construct
  source 1..75: mol_type = other DNA
agtttggtggtgatggctggacgcagaccgataactttatgacggcccgaacttccggtgtcctgacataccgta

SEQ ID NO: 631042 - DNA, 75 bp, synthetic construct
  source 1..75: mol_type = other DNA
ataccaagtcagatcgtaccaataagcaggttcagggactgaatggtagcaaaactattgaaatcaaagatcctt

SEQ ID NO: 631043 - DNA, 75 bp, synthetic construct
  source 1..75: mol_type = other DNA
tgggcgcgggtttctggcgcaatgggtattctgttggacaagcagaatatttttattgatgactcaagcgccctg

SEQ ID NO: 631044 - DNA, 75 bp, synthetic construct
  source 1..75: mol_type = other DNA
ctcgatagcatcagtgcctttcctctgatacccacacctgtgcgggccgtcattcaggccgtgcgcaccaccgtg

SEQ ID NO: 631045 - DNA, 75 bp, synthetic construct
  source 1..75: mol_type = other DNA
cagtccaggagaaagcgcgtgacgattttggtgaaacggtcggcgcggtactggacacggtaagtgctttcccac

SEQ ID NO: 631046 - DNA, 75 bp, synthetic construct
  source 1..75: mol_type = other DNA
atgtgcggtgtcggtccgactgcagtggggactgaaggtgatggccgagcggatgataaagtgcctgccacgtga

SEQ ID NO: 631047 - DNA, 75 bp, synthetic construct
  source 1..75: mol_type = other DNA
atgaagacagtgaatagctttctgtatacgggaatggcgaaaaatggactgtatggtgtgagtgtgaaacatctt

SEQ ID NO: 631048 - DNA, 75 bp, synthetic construct
  source 1..75: mol_type = other DNA
ccttgcagggctcacttaagggcttaccagaatgggcctcagaacgggtcatgcagcaaattcgtcagctcacaa

SEQ ID NO: 631049 - DNA, 75 bp, synthetic construct
  source 1..75: mol_type = other DNA
ttattcccgccccggtgcgaaccattattcaggccgtgcgctccgctgtggtgtcagtggcccgcgctgtctggg

SEQ ID NO: 631050 - DNA, 75 bp, synthetic construct
  source 1..75: mol_type = other DNA
ctgaactggatgccgattttgtttttgcaacctggcgcggtgacaccggtggtaaacctcaggatgagctggcag

SEQ ID NO: 631051 - DNA, 75 bp, synthetic construct
  source 1..75: mol_type = other DNA
acagcatggagtgcgcgctgacggcgcagcaaaacggtgccgacagaatagaattgtgtgcggcaccgaaagaag

SEQ ID NO: 631052 - DNA, 75 bp, synthetic construct
  source 1..75: mol_type = other DNA
gaattatgcgcagccccaaaagaggggggcttaacgccgtcgttgggggtactgaaatccgtgcgccagcgggtg

SEQ ID NO: 631053 - DNA, 75 bp, synthetic construct
  source 1..75: mol_type = other DNA
agcactggcttttgccattaagtgggtggcggttggtgttgctgtgtccccgatgctgtatgggctggcaaaact

SEQ ID NO: 631054 - DNA, 75 bp, synthetic construct
  source 1..75: mol_type = other DNA
cattaaaggttattccagccatgaacgagatgtactggaagccgtaacattggctcgtagccaggctaatcgcgc

SEQ ID NO: 631055 - DNA, 75 bp, synthetic construct
  source 1..75: mol_type = other DNA
gggcgttctggatgttgatggcaatgtcgatatgcggcgaatggaaaaaataatggctgccgccgggccgctggt

SEQ ID NO: 631056 - DNA, 75 bp, synthetic construct
  source 1..75: mol_type = other DNA
aattaggatttcctggactggtgacaggccttctggatgttgatggtaatgtcgatatgccacgaatggaaaaaa

SEQ ID NO: 631057 - DNA, 75 bp, synthetic construct
  source 1..75: mol_type = other DNA
gctggatatttaccttaaggtgaatagtgggatgaatcggttggggttccagcccgatcgcgtgctcaccgtctg

SEQ ID NO: 631058 - DNA, 75 bp, synthetic construct
  source 1..75: mol_type = other DNA
ctgcgcgcgatgaacagcgaatcggcattgtcgccgcagggtacgccgacggttatccgcgccacgcgcctaccg

SEQ ID NO: 631059 - DNA, 75 bp, synthetic construct
  source 1..75: mol_type = other DNA
gttggatatttatcttaaagtgaacagtgggatgaatcggttgggcttccagcccgatcgcgtgcttaccgtctg

SEQ ID NO: 631060 - DNA, 75 bp, synthetic construct
  source 1..75: mol_type = other DNA
tacggatttgggtacgaaaaccacatcgtcgtttgattacgggacgaaaacaacctcactatttgactatgggac

SEQ ID NO: 631061 - DNA, 75 bp, synthetic construct
  source 1..75: mol_type = other DNA
ggttttgtgtttctgaccttggataaggcaagggagaacatggaaaagtataaacgaattctgttgaggttgact

SEQ ID NO: 631062 - DNA, 75 bp, synthetic construct
  source 1..75: mol_type = other DNA
gtaaaaaccccgtttgttggcaccaagcgaggttttgtgtttctgaccttgagtaaggcaagggagaacatggcg

SEQ ID NO: 631063 - DNA, 75 bp, synthetic construct
  source 1..75: mol_type = other DNA
ggcaacaggctcaagcgcaggtgactcgcactctcggtcagttaacgataattagtgagcgttaccctgagttaa

SEQ ID NO: 631064 - DNA, 75 bp, synthetic construct
  source 1..75: mol_type = other DNA
ggtgttcctgaaagatcgtctggcaaaatatgaatattccgttgcggagtactacaccgaacgtggcgcatgggt

SEQ ID NO: 631065 - DNA, 75 bp, synthetic construct
  source 1..75: mol_type = other DNA
tgatttcagcgatgcgttataatccaagatatattttcctgggtgagattcgtagcgctaaaacagcgaaagagg

SEQ ID NO: 631066 - DNA, 75 bp, synthetic construct
  source 1..75: mol_type = other DNA
aggctcatccgcaactggcagaagagtttacccgtcggatgagcggtggtttaccgaaggactgggagaaaacga

SEQ ID NO: 631067 - DNA, 75 bp, synthetic construct
  source 1..75: mol_type = other DNA
tccgggcgttatgtgctgatttctcgtgaagaggcaatttctaactcctttgcatctctggggctgatggctgcg

SEQ ID NO: 631068 - DNA, 75 bp, synthetic construct
  source 1..75: mol_type = other DNA
atcactcgatagcctcgggttttccgaaccattcctgaatacattaaaattgatggggaagaaaagaggtttgct

SEQ ID NO: 631069 - DNA, 75 bp, synthetic construct
  source 1..75: mol_type = other DNA
aaactggagcttttgagtagtgaaattgagcaacaacgaattatgttgagccatgggaaaaaactgattagctaa

SEQ ID NO: 631070 - DNA, 75 bp, synthetic construct
  source 1..75: mol_type = other DNA
ggctatgttaatcgaagccaacatgttacaggattctgacgaaatacttacctttgaagaatatgttcaacatgt

SEQ ID NO: 631071 - DNA, 75 bp, synthetic construct
  source 1..75: mol_type = other DNA
gacgagcaggttaattcatcctggtcagaagttctgaatcagtatcaacgtcgcgccgaccttattcctaatctc

SEQ ID NO: 631072 - DNA, 75 bp, synthetic construct
  source 1..75: mol_type = other DNA
gtcgcaagtattaaaggttattccagccatgaaaaagaggtactggaggccgttacgttagctcgtagtcaagct

SEQ ID NO: 631073 - DNA, 75 bp, synthetic construct
  source 1..75: mol_type = other DNA
atctgctccggcggataagctgttcccgttctttggctttaccgccgagaatattgtggcaaaagcgcataaggt

SEQ ID NO: 631074 - DNA, 75 bp, synthetic construct
  source 1..75: mol_type = other DNA
aagagaagagcaactgaaggaatcattttcaagagttaaaccggattattcaattaatagttttgcagaaatttt

SEQ ID NO: 631075 - DNA, 75 bp, synthetic construct
  source 1..75: mol_type = other DNA
aaagccatactcaggaccgacaccgaaacagttatatttaccgatatttatggcgggacgccctcaaatattgcc

SEQ ID NO: 631076 - DNA, 75 bp, synthetic construct
  source 1..75: mol_type = other DNA
gtatttgccatcatgatggtggcgtattacgccgggcaactggtgatggatacgttcggcatttcgattcccggt

SEQ ID NO: 631077 - DNA, 75 bp, synthetic construct
  source 1..75: mol_type = other DNA
ggcggttattttgtggggaagtctacgcagctctggcacaattatgcggctggtgggtaagggggcattgaagcg

SEQ ID NO: 631078 - DNA, 75 bp, synthetic construct
  source 1..75: mol_type = other DNA
atgttagatttgtttaaagcaattggcctggggctggtggtgttgctgccgttagctaacccattaacaactgtc

SEQ ID NO: 631079 - DNA, 75 bp, synthetic construct
  source 1..75: mol_type = other DNA
actggcggagcagaatctgatcctgcgccatcatggcggcgcggcgctgccttccagttccgttaacacgccgtg

SEQ ID NO: 631080 - DNA, 75 bp, synthetic construct
  source 1..75: mol_type = other DNA
aagtggcggagcaaattcccaatggctcgacgctgtttatcgatatcggcaccacgccggaagcggtggcgcacg

SEQ ID NO: 631081 - DNA, 75 bp, synthetic construct
  source 1..75: mol_type = other DNA
atccactgacggaggaagaaaaccttgacgcaacgcagcttgccaaccagcagtggattgccgttattcataatg

SEQ ID NO: 631082 - DNA, 75 bp, synthetic construct
  source 1..75: mol_type = other DNA
cgcacaccggaaggctatttcactcataacacggtaaccctgcaatgcagcggaaacacctcgattaaccgtagc

SEQ ID NO: 631083 - DNA, 75 bp, synthetic construct
  source 1..75: mol_type = other DNA
gccaggcgaatcgccgacaaagccgtactacggctgattcggcgctacctgcaagctgggatcatggcggatggt

SEQ ID NO: 631084 - DNA, 75 bp, synthetic construct
  source 1..75: mol_type = other DNA
ccgggctatccagctgaagcactggcgcacgggaacgactgtctataatcgcctccgcagtctcggggctaccca

SEQ ID NO: 631085 - DNA, 75 bp, synthetic construct
  source 1..75: mol_type = other DNA
tactgacatcagggcaaaaatcagacgcactgcaaggtttatcaaaaattatggaacttattgcccatcgtgatg

SEQ ID NO: 631086 - DNA, 75 bp, synthetic construct
  source 1..75: mol_type = other DNA
attatgcgttgggccgggccgagaatgctgtggcgtcatccgatcttaaccgtgcgtcatctcatcgatgacaag

SEQ ID NO: 631087 - DNA, 75 bp, synthetic construct
  source 1..75: mol_type = other DNA
atcagcttgacgccccgcgcacatcggaaggctatttcacccacaacacggtcactctgcaatgcagtggcaaca

SEQ ID NO: 631088 - DNA, 75 bp, synthetic construct
  source 1..75: mol_type = other DNA
gacagcgacggctcgctgctggagtttgattaccacgaagtgcgcactaaacgcgccattatcgataactcgcgc

SEQ ID NO: 631089 - DNA, 75 bp, synthetic construct
  source 1..75: mol_type = other DNA
tcaaaactgcctaacgaaaagttattaattttcaatcatattgctatcaggatttacattttttcgctgtgctag

SEQ ID NO: 631090 - DNA, 75 bp, synthetic construct
  source 1..75: mol_type = other DNA
tacagcgcggaaaggacttgtccagctcagtagcgccaccaacagcgattcagaaacgctggcggcaacaccaaa

SEQ ID NO: 631091 - DNA, 75 bp, synthetic construct
  source 1..75: mol_type = other DNA
accaatcaactattagaaataatgggaatggttgtgccaatctctatctggaggtcttattgcagggaacatcca

SEQ ID NO: 631092 - DNA, 75 bp, synthetic construct
  source 1..75: mol_type = other DNA
tgctggttcactccgaaggtgagatagagaaacacaggccggagcggcttgctgatatagaaagctactgtaaca

SEQ ID NO: 631093 - DNA, 75 bp, synthetic construct
  source 1..75: mol_type = other DNA
ttcttcgaacatcaaatcaaaacgttgtgcgccgaaataaacatgctgcttccgaaaaatatgagtgaatcttat

SEQ ID NO: 631094 - DNA, 75 bp, synthetic construct
  source 1..75: mol_type = other DNA
tacaaccctttttcgcctttgtcatttcacaaccatagatctccataattacgctacatataataaatattctga

SEQ ID NO: 631095 - DNA, 75 bp, synthetic construct
  source 1..75: mol_type = other DNA
cgcgcatgattactcgcgtcgcggcaacccaacgcgcgatgtggttcagcgtgcgctggctgaactggaaggcgg

SEQ ID NO: 631096 - DNA, 75 bp, synthetic construct
  source 1..75: mol_type = other DNA
accgaaccttctgcagaagtggacgtcatgggtaaaaacggtaaatggctggaagtactgggctgcgggatggtg

SEQ ID NO: 631097 - DNA, 75 bp, synthetic construct
  source 1..75: mol_type = other DNA
tcgattaccacgaagttcgcaccaagcgcgccattattgagaactcgcgccacgttatgctggttgtcgatcact

SEQ ID NO: 631098 - DNA, 75 bp, synthetic construct
  source 1..75: mol_type = other DNA
caagtatcagccagtgaaatcgccaggcgtattggtgtcagtcgcgcggtattgtataaatggaaagatgaaatt

SEQ ID NO: 631099 - DNA, 75 bp, synthetic construct
  source 1..75: mol_type = other DNA
gctaacacgttgatggtaaaagaagatttccgcattattctcgccggtggcgaattacgcagccgcgatggcggg

SEQ ID NO: 631100 - DNA, 75 bp, synthetic construct
  source 1..75: mol_type = other DNA
atgacgcgtaaacaggccaccattgcagtgcgtagcgggttaaatgacgacgaacagtatggttgcgttgtccct

SEQ ID NO: 631101 - DNA, 75 bp, synthetic construct
  source 1..75: mol_type = other DNA
agctgcgttggcagcagctaaacttgcgaagatcccgaaaccaccaagccaggcagtatatgaagtgttcaaaaa

SEQ ID NO: 631102 - DNA, 75 bp, synthetic construct
  source 1..75: mol_type = other DNA
tgactaacgacattccgcgaaattgcgaatttttactaactagtgatgtgttgaaagaagcgattgggctcgatt

SEQ ID NO: 631103 - DNA, 75 bp, synthetic construct
  source 1..75: mol_type = other DNA
tattcgtggcttgcagtcggttgcggcaacccggagtggctgtggtcatgcagtcacggagcaggacgcagccag

SEQ ID NO: 631104 - DNA, 75 bp, synthetic construct
  source 1..75: mol_type = other DNA
gtggtgatgatccacagtggatcgcgagatgttggcttttacgtcggaagacgctggatggatcgcgcccgtgct

SEQ ID NO: 631105 - DNA, 75 bp, synthetic construct
  source 1..75: mol_type = other DNA
ccgagcctctataaccgcgaccgactggctaccgggatcaaagactggaccgagcacgttgtaaccgagcgtgac

SEQ ID NO: 631106 - DNA, 75 bp, synthetic construct
  source 1..75: mol_type = other DNA
tcagcgtctggggggtatccagttccgtgaggctgaacaactggcagcgagtgtccatgaacagtacaccatcaa

SEQ ID NO: 631107 - DNA, 75 bp, synthetic construct
  source 1..75: mol_type = other DNA
ttaataccaaagagctggagtcaatcaaagcgtttgtgacacgtactcacgaaaactggatcccgaaataccggg

SEQ ID NO: 631108 - DNA, 75 bp, synthetic construct
  source 1..75: mol_type = other DNA
agggcattacacaaagccattgtctatgcgctgtctcatcgcgtggaactgagccgcttcctggaagatggcgcg

SEQ ID NO: 631109 - DNA, 75 bp, synthetic construct
  source 1..75: mol_type = other DNA
atggcgcggtgccgctagataataatgtgtgtgaacgggccatcaaaaacgtggtcctgggcagaaaatcgtggc

SEQ ID NO: 631110 - DNA, 75 bp, synthetic construct
  source 1..75: mol_type = other DNA
ctttctcaggaagtttagtctccaggattcccggggcggttcagatagcctgaacgtgtactgtcgtaatggcca

SEQ ID NO: 631111 - DNA, 75 bp, synthetic construct
  source 1..75: mol_type = other DNA
cattactccgcgatccttgtctgggtacgccgggttcaggtaatcattttattgaacttcaggtcgttgatagcg

SEQ ID NO: 631112 - DNA, 75 bp, synthetic construct
  source 1..75: mol_type = other DNA
tagagaaagcaactctggattgtgaggtcgctcacaagctttcagatgccgatcgcccggttaaagcacaagaag

SEQ ID NO: 631113 - DNA, 75 bp, synthetic construct
  source 1..75: mol_type = other DNA
attttactggttccatgctgtcgtggtggttcggcattcacccagaccacagacggcaaactgaatctgatgcat

SEQ ID NO: 631114 - DNA, 75 bp, synthetic construct
  source 1..75: mol_type = other DNA
cgttcgaagacggccacagcaccggcggcgacccgacgagcacggtttacttcccgggcggtaccgcgggctttg

SEQ ID NO: 631115 - DNA, 75 bp, synthetic construct
  source 1..75: mol_type = other DNA
cgctggaagcgctggaagcggcttcgattgaagagctgcaaaaagtgcccgatgttggaattgtcgtcgcatctc

SEQ ID NO: 631116 - DNA, 75 bp, synthetic construct
  source 1..75: mol_type = other DNA
aatgcggcggcaggttcattgcgtcagcttgatccgcgtatcacagccaagcggccgctcactttcttctgctac

SEQ ID NO: 631117 - DNA, 75 bp, synthetic construct
  source 1..75: mol_type = other DNA
cagaactgcgaacggtgcttcgtcatcatgaatatctttatcatgtgatggatgcgccggaaattcctgacgctg

SEQ ID NO: 631118 - DNA, 75 bp, synthetic construct
  source 1..75: mol_type = other DNA
gcgttttggcagcttcagtaaagccgcagaagagttgggtttaaccacttccgccattagctacaccattaagcg

SEQ ID NO: 631119 - DNA, 75 bp, synthetic construct
  source 1..75: mol_type = other DNA
aaccgctggtatttgatgcagaactggacaccgtgcgtgagcgtcttggtagcgtaaagggcggcgatgtggagt

SEQ ID NO: 631120 - DNA, 75 bp, synthetic construct
  source 1..75: mol_type = other DNA
agaagacattacgtctaacgtccgtactatccgcgctattccgttgaaattgcatggtgagaatatcccggcgcg

SEQ ID NO: 631121 - DNA, 75 bp, synthetic construct
  source 1..75: mol_type = other DNA
acgtttttgatgaagagagttttctcgctttcaacaaacgcgtactggatcgtctgaaaagtaacgaaaaagtca

SEQ ID NO: 631122 - DNA, 75 bp, synthetic construct
  source 1..75: mol_type = other DNA
tggccttgccgtcagtattctgtatgaaaatggcgttttagtcagtgccgcgacccgtggcgatggcaccaccgg

SEQ ID NO: 631123 - DNA, 75 bp, synthetic construct
  source 1..75: mol_type = other DNA
atgatctggcagcttgagttcacagataaaacactctccaggaaaatcggggcggttcaactgttgtatacccct

SEQ ID NO: 631124 - DNA, 75 bp, synthetic construct
  source 1..75: mol_type = other DNA
tgatgacgctaaagctcgactggtcgaactgggggcgaaagtcgcgggcagcgtgtcgaagaaaaccgatctggt

SEQ ID NO: 631125 - DNA, 75 bp, synthetic construct
  source 1..75: mol_type = other DNA
tgtggaaggtgaagcagtcgcccgctgtacaggtggcctgatttgcggcgctcagcgtaaagagtcgctgaaaca

SEQ ID NO: 631126 - DNA, 75 bp, synthetic construct
  source 1..75: mol_type = other DNA
cgaagacatcacctctaacgtccgtactattcgcgcgattccgctgaaattgcatggtgagaatatcccggcgcg

SEQ ID NO: 631127 - DNA, 75 bp, synthetic construct
  source 1..75: mol_type = other DNA
cagcctgaactggtaacggttgaccataacgatcagtcaggagagcctcgtctgcgtcttaactacaacggcgtt

SEQ ID NO: 631128 - DNA, 75 bp, synthetic construct
  source 1..75: mol_type = other DNA
cttttatttatgcattttatatccgcacctttaacagaacattaaagtatttattaaatgcattcacggggggat

SEQ ID NO: 631129 - DNA, 75 bp, synthetic construct
  source 1..75: mol_type = other DNA
gagtaacattaatgtttacagcaaaggcgaagtggataagaaaaaaggaatgcggcagtacgcatttaatgcgcc

SEQ ID NO: 631130 - DNA, 75 bp, synthetic construct
  source 1..75: mol_type = other DNA
atataggttgcccggcatctcctactggttggttaactacaggaagtaatggcggagcaataacaacagcacagt

SEQ ID NO: 631131 - DNA, 75 bp, synthetic construct
  source 1..75: mol_type = other DNA
aattaaagctcactataaaaatggtggtctgttctaccgttcctcaagagacggttatggttttgaaagtggttg

SEQ ID NO: 631132 - DNA, 75 bp, synthetic construct
  source 1..75: mol_type = other DNA
agaactggttctacgagcaggcaatggaaaccccaaaggaattacaggtgctttgtggaagcgtacagctgtcgg

SEQ ID NO: 631133 - DNA, 75 bp, synthetic construct
  source 1..75: mol_type = other DNA
tctgcttccgcagcgaagacatccgaaacgaacgcgaaagcgtcggaaacccgtgcagaatcctcaaaaacggca

SEQ ID NO: 631134 - DNA, 75 bp, synthetic construct
  source 1..75: mol_type = other DNA
aggatgcggcattattccactggctggcgcagttattgaggtatttaataaaggcagtagctcaaacaattatac

SEQ ID NO: 631135 - DNA, 75 bp, synthetic construct
  source 1..75: mol_type = other DNA
ctacggtgggattacaaacgcaatcctcgtttatcactaccgcagtaatagaaacccggcaggtcaatggcttaa

SEQ ID NO: 631136 - DNA, 75 bp, synthetic construct
  source 1..75: mol_type = other DNA
aatgctggcagtatcaacaatataacgggatttggtgctgtagaattagcagaatccataatcgaagtttttaat

SEQ ID NO: 631137 - DNA, 75 bp, synthetic construct
  source 1..75: mol_type = other DNA
tcccgactaatgaaggggagggagaaaatggagacatcggttcattaagaccattctctataaacttaagatcag

SEQ ID NO: 631138 - DNA, 75 bp, synthetic construct
  source 1..75: mol_type = other DNA
gatcgaacacatatttcatgctaacagcatcaggagacacattaggttcatggaacggtttgcgacctattacaa

SEQ ID NO: 631139 - DNA, 75 bp, synthetic construct
  source 1..75: mol_type = other DNA
gggaatgagttgtctcaattgacagcaaatgctgttaagcggttcattgaaaaaaacgctgaaaacgctgaaaac

SEQ ID NO: 631140 - DNA, 75 bp, synthetic construct
  source 1..75: mol_type = other DNA
atttgtagtgtcggtggatacggggttaagccatttaacggcggcactggatagacccaatatcacggtttatgg

SEQ ID NO: 631141 - DNA, 75 bp, synthetic construct
  source 1..75: mol_type = other DNA
ttgcaaaacagcagcacgccgtagaacgcacccgcgaactgtttgccaaaagtctgggttacagcaaaccgcaga

SEQ ID NO: 631142 - DNA, 75 bp, synthetic construct
  source 1..75: mol_type = other DNA
gaatcaggtggtttgtagggcgccagataaagatctttctcatctgactgcagaagcggtatttaataaaatcaa

SEQ ID NO: 631143 - DNA, 75 bp, synthetic construct
  source 1..75: mol_type = other DNA
cggtggatacaggattaagccatttaacagcagcgctggacaggccgaatattacggtttatggacctacagatc

SEQ ID NO: 631144 - DNA, 75 bp, synthetic construct
  source 1..75: mol_type = other DNA
gaatcagatggtttgtagggctccggggaaaagtttaaataatctcaacggtcaagcagttttggaaaagttatc

SEQ ID NO: 631145 - DNA, 75 bp, synthetic construct
  source 1..75: mol_type = other DNA
ggcaggcatttcagaactggttctacgagcaggcaatggaaaccccaaagggattacaggtgctttgtggaagcg

SEQ ID NO: 631146 - DNA, 75 bp, synthetic construct
  source 1..75: mol_type = other DNA
cgtttatcattaccgtagtaatagaagtccgtcaggtcaatggctgaaatttgcaggtactgttggggcaacaag

SEQ ID NO: 631147 - DNA, 75 bp, synthetic construct
  source 1..75: mol_type = other DNA
taccacagatgcggcatggtcagcgtgggcgcaggtatatactgctaaggattcaatccctggtgtgaatacaac

SEQ ID NO: 631148 - DNA, 75 bp, synthetic construct
  source 1..75: mol_type = other DNA
ttgatccggtgaaggcgattaaatatcagattatggtgacctttatgctgctctcaaccgccagcctgtcgacca

SEQ ID NO: 631149 - DNA, 75 bp, synthetic construct
  source 1..75: mol_type = other DNA
gtcggggcgggaattaccctggcggtgctgattctctcagggtcgattgaatttatcccgatgcaggtgatccct

SEQ ID NO: 631150 - DNA, 75 bp, synthetic construct
  source 1..75: mol_type = other DNA
gatctatcggtggagttggtttcgacggttctgcaaatatcaaccttccaggtgtaaacactacgggtaatcaga

SEQ ID NO: 631151 - DNA, 75 bp, synthetic construct
  source 1..75: mol_type = other DNA
aaggcagtagctcaaacaattatacgattcgtataacaacggcaacaacgacaggtgtctctggcgcactcacta

SEQ ID NO: 631152 - DNA, 75 bp, synthetic construct
  source 1..75: mol_type = other DNA
actcagttggccagtgcctactataacgtgcgcattggtggcgatatggcattgctcaaggggatgatgcgcctg

SEQ ID NO: 631153 - DNA, 75 bp, synthetic construct
  source 1..75: mol_type = other DNA
ggaaccaatatccaggtcgcaggatatcgctattctacgcaaggtttttataacttatccgacagtgcctacagt

SEQ ID NO: 631154 - DNA, 75 bp, synthetic construct
  source 1..75: mol_type = other DNA
atgactagtctaaaaactagtattaagactatcacttatttaagtgatattggttgtctggagattcagggagcc

SEQ ID NO: 631155 - DNA, 75 bp, synthetic construct
  source 1..75: mol_type = other DNA
agagtattattttaatccacggtttttaagcaatgatcttgctgaatctgtcgatttatccgcctttactaaggg

SEQ ID NO: 631156 - DNA, 75 bp, synthetic construct
  source 1..75: mol_type = other DNA
gcaactgcggtttttcccgttgacgcagagtattattttaatccacggtttttaagcaatgaccttgctgaatct

SEQ ID NO: 631157 - DNA, 75 bp, synthetic construct
  source 1..75: mol_type = other DNA
tacagatgataataacgcagatctcatcccatgcctgagtacagatcttcttgtcagtcttggcataaaaaaatc

SEQ ID NO: 631158 - DNA, 75 bp, synthetic construct
  source 1..75: mol_type = other DNA
atgttcacccttcacccattattcaccacctatcactctgaaataaaaggagaaaaaagaaaggtgaacagtgtg

SEQ ID NO: 631159 - DNA, 75 bp, synthetic construct
  source 1..75: mol_type = other DNA
agtagattggtcagaaaaacagtgggggcacaaaagggggcatatttcattgttgtgttttattatttgtttttt

SEQ ID NO: 631160 - DNA, 75 bp, synthetic construct
  source 1..75: mol_type = other DNA
ggcaatggttatcactttatataacttcttcgaacatcaaattaaaacgttgtgcatcgaaataaacaagctgct

SEQ ID NO: 631161 - DNA, 75 bp, synthetic construct
  source 1..75: mol_type = other DNA
agcgttattagccaataagggccatttggcaggaaaaaatgtgccggataacaacgcatgtacaccacttcagga

SEQ ID NO: 631162 - DNA, 75 bp, synthetic construct
  source 1..75: mol_type = other DNA
atgcacaggatctggagatttatgaccagtaccgcctgaccacctgcgtccacagcaactggcagctcaaagcac

SEQ ID NO: 631163 - DNA, 75 bp, synthetic construct
  source 1..75: mol_type = other DNA
agtgggatgaatcggttgggcttccagcccgatcgcgtgcttaccgtctggcagcagttgcgggcgatggcgaat

SEQ ID NO: 631164 - DNA, 75 bp, synthetic construct
  source 1..75: mol_type = other DNA
ggcgtgatgctgacgttattgctacttcgcccgttaaccctgatggggcttgatgatggcgtggcgcgcaatctc

SEQ ID NO: 631165 - DNA, 75 bp, synthetic construct
  source 1..75: mol_type = other DNA
ggtgaacgcagtggggattatcggctttatcgggttgttcgcgccactgctggcaaaaatgctgggggcgcggcg

SEQ ID NO: 631166 - DNA, 75 bp, synthetic construct
  source 1..75: mol_type = other DNA
gtcgccggatattgacgtcatcgagcagatgatttttcactacagcttgctgccgcgtctggcgatttcgctgct

SEQ ID NO: 631167 - DNA, 75 bp, synthetic construct
  source 1..75: mol_type = other DNA
caggtgcggcatggtcagcgtgggcgcaggtatatacatcaagggactccattcctggtgtgaatgccactggta

SEQ ID NO: 631168 - DNA, 75 bp, synthetic construct
  source 1..75: mol_type = other DNA
gaaggagtgatgtatgaacgtttggttgtaccactcattcatcatattcagcaattgaccaaaagggttgaggag

SEQ ID NO: 631169 - DNA, 75 bp, synthetic construct
  source 1..75: mol_type = other DNA
cgttccaggtcccggcggggctactgtcgacgtttattggcgcgccgtattttatctatttgttgagaaagcaaa

SEQ ID NO: 631170 - DNA, 75 bp, synthetic construct
  source 1..75: mol_type = other DNA
gaaatgagcgaatacgtcgcgatgctgatccgccaggacgatgcccgcgttcgtggtcgcattaagtcaatcagc

SEQ ID NO: 631171 - DNA, 75 bp, synthetic construct
  source 1..75: mol_type = other DNA
aatgtattgttaattacaagcttcctgaagtctctcctgggaacttactgagtcagcaaacagcagtctgtcgct

SEQ ID NO: 631172 - DNA, 75 bp, synthetic construct
  source 1..75: mol_type = other DNA
atggtcaggtctatctgacaggacttccacaatcaggaaaattacaggtttcatggggcaacaatgcaaacgcta

SEQ ID NO: 631173 - DNA, 75 bp, synthetic construct
  source 1..75: mol_type = other DNA
ggcgtcgctgattggggcgctgatcctctggctttccgatcaaatcatcctctggctgactcgcgtgtggatgga

SEQ ID NO: 631174 - DNA, 75 bp, synthetic construct
  source 1..75: mol_type = other DNA
gtggggattatcggctttatcgggttgttcgcgccgctgctggcaaaaatgctgggggcgcggcgtttgttgcca

SEQ ID NO: 631175 - DNA, 75 bp, synthetic construct
  source 1..75: mol_type = other DNA
atgcgctgccggttaagtcgtgtccgtgcgacggtgattcgaaatgctgggttacgcgtggctggcatgaaacta

SEQ ID NO: 631176 - DNA, 75 bp, synthetic construct
  source 1..75: mol_type = other DNA
cagcggtctgaactcaagcatgcgtggaatgagttcgaagaatcgttgcactcacaatatgaactggagaacggc

SEQ ID NO: 631177 - DNA, 75 bp, synthetic construct
  source 1..75: mol_type = other DNA
caggcgttgcaacaggcgaaagcgggtattgaagcggtctatctgtctggctggcaggtagcggcggacgctaat

SEQ ID NO: 631178 - DNA, 75 bp, synthetic construct
  source 1..75: mol_type = other DNA
ttcctgccgatcgttgccgatgcggaagccggttttggcggtgtcctgaatgcctttgaactgatgaaagcgatg

SEQ ID NO: 631179 - DNA, 75 bp, synthetic construct
  source 1..75: mol_type = other DNA
atgagattatcaaagttgaaggggtacgctgcttctacgtcagcaaatctaaaactaaagcgggcataaggtacg

SEQ ID NO: 631180 - DNA, 75 bp, synthetic construct
  source 1..75: mol_type = other DNA
cagcagcagctgtcggatatgggctacaagttccagttcatcaccctggcaggtatccacagcatgtggttcaac

SEQ ID NO: 631181 - DNA, 75 bp, synthetic construct
  source 1..75: mol_type = other DNA
cgtcgttcaactggcagaaaaacctcgacgacaaaactattgccagcttccagcagcagctgtcggatatgggct

SEQ ID NO: 631182 - DNA, 75 bp, synthetic construct
  source 1..75: mol_type = other DNA
acctggtctggtgtgaaacctccacgccggatctggaactggcgcgtcgctttgcacaagccatccacgcgaaat

SEQ ID NO: 631183 - DNA, 75 bp, synthetic construct
  source 1..75: mol_type = other DNA
ctcgttgatagatgaaatccttaagatcaacaatgaagggataagggttgtggaacattcggcctccattcatct

SEQ ID NO: 631184 - DNA, 75 bp, synthetic construct
  source 1..75: mol_type = other DNA
ttcaggtatctgatgaactgcatctcagaaggtggtccgaaggctgagatgctaaaaggatgggcatatgtctga

SEQ ID NO: 631185 - DNA, 75 bp, synthetic construct
  source 1..75: mol_type = other DNA
tcacagttgaaggggtacggtgcttctacgtcagcaaatccaaaactaaagcgggtgtaaggcacatccccatac

SEQ ID NO: 631186 - DNA, 75 bp, synthetic construct
  source 1..75: mol_type = other DNA
tggaaggtgtgcgctgtttctacatcagcaagagtaaaaccaaagcggggatcaggtatgtgccgattcactccc

SEQ ID NO: 631187 - DNA, 75 bp, synthetic construct
  source 1..75: mol_type = other DNA
tccagagtattgggaaagttgatattggtttgaacaagatcggacgcagaacggttacagacttcattgagggcc

SEQ ID NO: 631188 - DNA, 75 bp, synthetic construct
  source 1..75: mol_type = other DNA
taaccaaggcaagttttcacctcaaacgttgcagaactggctaacctctttggggagtctgtacgaattcgccaa

SEQ ID NO: 631189 - DNA, 75 bp, synthetic construct
  source 1..75: mol_type = other DNA
tgcttttgaactgatgaaagcgatgattgaagccggtgcagcggcagttcacttcgaagatcagctggcgtcagt

SEQ ID NO: 631190 - DNA, 75 bp, synthetic construct
  source 1..75: mol_type = other DNA
cgcacaatttattgatgccgataaaggcgtggcagataccaaagccgcactggacggcgcgcgctatatcctgat

SEQ ID NO: 631191 - DNA, 75 bp, synthetic construct
  source 1..75: mol_type = other DNA
aaatcgatccgaaatctattggcgtgggtcagtatcagcatgatgttagccagacgcagctggctcgcaaactgg

SEQ ID NO: 631192 - DNA, 75 bp, synthetic construct
  source 1..75: mol_type = other DNA
tgtcgatatcggcgtgcatcaggacggcctggttcacatctcttcattgtcgaacaagtttgtggaagatccgca

SEQ ID NO: 631193 - DNA, 75 bp, synthetic construct
  source 1..75: mol_type = other DNA
tccgcagttcgatgagccgccaaaagagagctattgcgagcaaatcatcatggatcatctcggcctgcgcctgaa

SEQ ID NO: 631194 - DNA, 75 bp, synthetic construct
  source 1..75: mol_type = other DNA
acgcagttgcgtaatctggaaacgcgtctgggatatttgcgcgagctggaagagagacgtcaggcgatcctcaag

SEQ ID NO: 631195 - DNA, 75 bp, synthetic construct
  source 1..75: mol_type = other DNA
cgtcacacacgccagaagtcgccgctgcacaatatattgatgccgataaaggcgtggcagataccaaagccgcgc

SEQ ID NO: 631196 - DNA, 75 bp, synthetic construct
  source 1..75: mol_type = other DNA
ggactttgtttacaacaagctgaaaaccggacgtaaactcgatatggtgcttgtcgtagccacacagtcaccgga

SEQ ID NO: 631197 - DNA, 75 bp, synthetic construct
  source 1..75: mol_type = other DNA
ttccatcagcctgcgaaaaatgatgcgcctctaccgataaacgatgcgttgatatatataagagatgaatttata

SEQ ID NO: 631198 - DNA, 75 bp, synthetic construct
  source 1..75: mol_type = other DNA
tttctcaccagcaggaagtgggtacaggttatttcgataaagtgacgaccattattcagggcggtacgtcttcag

SEQ ID NO: 631199 - DNA, 75 bp, synthetic construct
  source 1..75: mol_type = other DNA
ggatacggatattaccgaagtggcgaaaaataacgcgctgactgatgatgatttttctgcgggaaagtcttcgac

SEQ ID NO: 631200 - DNA, 75 bp, synthetic construct
  source 1..75: mol_type = other DNA
aaaacgatttttctctggctgaaagaatgctggctgcagatgaccgttaccggaccgggccgcggtttacatttt

SEQ ID NO: 631201 - DNA, 75 bp, synthetic construct
  source 1..75: mol_type = other DNA
tggttaacctccttgggcagtctttatgagttcgccaagagacgttacgatcagataccggacagcaacccgttc

SEQ ID NO: 631202 - DNA, 75 bp, synthetic construct
  source 1..75: mol_type = other DNA
tgccggtttttccccgaaacagacgaccactattaataaagattccgtcctgcaggctgctcggcaggcatacgc

SEQ ID NO: 631203 - DNA, 75 bp, synthetic construct
  source 1..75: mol_type = other DNA
cattaagttgctgatggtttcagttgacggaaacctgacggtgaaaaaagaggatggcggtaacgttgtctggga

SEQ ID NO: 631204 - DNA, 75 bp, synthetic construct
  source 1..75: mol_type = other DNA
catggcaggaaagtattaagaccgccctcgcgttaagtgccgctggcgttcctaaatctaaaattgttcttctgc

SEQ ID NO: 631205 - DNA, 75 bp, synthetic construct
  source 1..75: mol_type = other DNA
gttttattgcccgaaggccctttctcacgcgaacaggcggttgccgtcacaacagcttaccgcaatgtgcttatt

SEQ ID NO: 631206 - DNA, 75 bp, synthetic construct
  source 1..75: mol_type = other DNA
agccggtatgtcggactgtcaccctgttttattgcccgaaggccctttctcacgcgaacaggcggttgccgtcac

SEQ ID NO: 631207 - DNA, 75 bp, synthetic construct
  source 1..75: mol_type = other DNA
ccgtatcagtattaacggtaacctgatccccacatcacaaatgtgtaatcagcagacaggattcagggctgtcga

SEQ ID NO: 631208 - DNA, 75 bp, synthetic construct
  source 1..75: mol_type = other DNA
cgcaacgcgaagaaagagaaagaagggaataagccgccgaaatccgcacgccagattttccagtatctgcgcgag

SEQ ID NO: 631209 - DNA, 75 bp, synthetic construct
  source 1..75: mol_type = other DNA
cagggaaacggcatcagcgcatactctccagcagcgtttcagccatcacccacaatgcgcggttgagcttaatgt

SEQ ID NO: 631210 - DNA, 75 bp, synthetic construct
  source 1..75: mol_type = other DNA
aaattgtcgcccaatttcggcaaaactcgctgttacgtctgaaacccggcgatgatgcggaagtggtgtttaacg

SEQ ID NO: 631211 - DNA, 75 bp, synthetic construct
  source 1..75: mol_type = other DNA
caaaccgcattagtccagatagtgaagtagaggatgtactggcgccggtatttgaatttgtcaaacgaacgaaag

SEQ ID NO: 631212 - DNA, 75 bp, synthetic construct
  source 1..75: mol_type = other DNA
ttctgtctgcggctctcctttcatcaacagcgaatgctattgacctgagcggaaccatcttcgacaaagcagcga

SEQ ID NO: 631213 - DNA, 75 bp, synthetic construct
  source 1..75: mol_type = other DNA
accagcaggtggtgctgttccataaactggaaaatctgcgcgatcgtttaattgatcacggtgatgacgccatcg

SEQ ID NO: 631214 - DNA, 75 bp, synthetic construct
  source 1..75: mol_type = other DNA
atgggctgcggagcagggcatgccagctttgtcgctgcgcaaaacgtgagcacggtggtggcgtatgacttatct

SEQ ID NO: 631215 - DNA, 75 bp, synthetic construct
  source 1..75: mol_type = other DNA
gtccgcggtcagatgttatctctggagcaagaattaaaaatatctggagatgaaaaatctcagcttcgccatgag

SEQ ID NO: 631216 - DNA, 75 bp, synthetic construct
  source 1..75: mol_type = other DNA
gccattcagccagaacaggagcaaaagcaaaaaatcaaggctgttgagcctgttcgttcagcccgttcaccggag

SEQ ID NO: 631217 - DNA, 75 bp, synthetic construct
  source 1..75: mol_type = other DNA
atggcaagctaccattgcactgtcaaagctggagcaaaaggcagtgccttaaaacatgctgattacatttccaga

SEQ ID NO: 631218 - DNA, 75 bp, synthetic construct
  source 1..75: mol_type = other DNA
tgggtcttacagacatgtttatcaggcctgttagtccttatgggtttgctcagaagcagagcttcactttttcaa

SEQ ID NO: 631219 - DNA, 75 bp, synthetic construct
  source 1..75: mol_type = other DNA
ggtggcatggcaatgcataccgccggagagtttccagggctggagctggagctgtggggagttcgcgataaatga

SEQ ID NO: 631220 - DNA, 75 bp, synthetic construct
  source 1..75: mol_type = other DNA
gtgcatgaaaatgaaattcgcgatgccaactcgctggggcgtggcgcacaattgttgcagctcagccacctgcgc

SEQ ID NO: 631221 - DNA, 75 bp, synthetic construct
  source 1..75: mol_type = other DNA
cgattgctgctcactgctggccagcttcgccgcttcgctcccgctgcgccggccttccccaattgccacgctgga

SEQ ID NO: 631222 - DNA, 75 bp, synthetic construct
  source 1..75: mol_type = other DNA
caccatctgatattaacaaggtaaaagagactcattctgatgacgagttaaaccgtttactggaggctgttaatc

SEQ ID NO: 631223 - DNA, 75 bp, synthetic construct
  source 1..75: mol_type = other DNA
aaatcagggaaggacaggctgaagtgtgccgccgtaaagcatggagtgttggtgtatgggcctggcctgataatt

SEQ ID NO: 631224 - DNA, 75 bp, synthetic construct
  source 1..75: mol_type = other DNA
tgaattgataggaaaaggtgacgatacagtgatgaaaaatgccgaacgcattgatctcactgataaacttgaagg

SEQ ID NO: 631225 - DNA, 75 bp, synthetic construct
  source 1..75: mol_type = other DNA
gtatttatctttgcagttctatttaaggcagccaaaggacaagggatagcaaaatcattttccgtcgcagcaatt

SEQ ID NO: 631226 - DNA, 75 bp, synthetic construct
  source 1..75: mol_type = other DNA
gttcgaggaagtggttccatgatgggcagaatatcactggacgcctaccatcacttagtgctgcaagaggaaact

SEQ ID NO: 631227 - DNA, 75 bp, synthetic construct
  source 1..75: mol_type = other DNA
tacctacagaacatatctggaaccccgttccagtgggagcctgggggattcagtatctgggttatgcaaggccac

SEQ ID NO: 631228 - DNA, 75 bp, synthetic construct
  source 1..75: mol_type = other DNA
aggatgctaacggtccttccaatccgttaatgaaactggtggcagtgctacctggtgcctggatgaataatttcg

SEQ ID NO: 631229 - DNA, 75 bp, synthetic construct
  source 1..75: mol_type = other DNA
cctgatttacgtggtgagtttattcgtggctgggatgacggaagaggaatagatactaaccgtagcttgctttcg

SEQ ID NO: 631230 - DNA, 75 bp, synthetic construct
  source 1..75: mol_type = other DNA
ctgtcaggtaagcagccactggatgagacgctgactcatttgagtggaaaggatgtagctggtcttctcacatac

SEQ ID NO: 631231 - DNA, 75 bp, synthetic construct
  source 1..75: mol_type = other DNA
cctgatttacgcggtgaatttattcgtggatgggatgatgggaggggcgttgatagcggtcgaggattactttcg

SEQ ID NO: 631232 - DNA, 75 bp, synthetic construct
  source 1..75: mol_type = other DNA
ttgggagaaggttcggcattacccgttggtgtgcctgttccgtggccttcagccactccgccaacaggctggctg

SEQ ID NO: 631233 - DNA, 75 bp, synthetic construct
  source 1..75: mol_type = other DNA
tgatgatgaacgccggatagtgattaacagtgttggcgcacactgggaaggcaaccaggtctggttaatcctcgc

SEQ ID NO: 631234 - DNA, 75 bp, synthetic construct
  source 1..75: mol_type = other DNA
ccgctggcttttgattatcgtggaaaaatcgctgatgcgcgctggcgtaaaatgtgggatgccggtctggtcatc

SEQ ID NO: 631235 - DNA, 75 bp, synthetic construct
  source 1..75: mol_type = other DNA
gatcctggtggtctttatgatctccgacggatttgacatggggatcggctgtttgctgccgctggtggcgcgtaa

SEQ ID NO: 631236 - DNA, 75 bp, synthetic construct
  source 1..75: mol_type = other DNA
ctgcccgttggtgtgcccgttccgtggccctcagcaacaccgccaacgggctggctgaaatgtaacggcgcagca

SEQ ID NO: 631237 - DNA, 75 bp, synthetic construct
  source 1..75: mol_type = other DNA
gccgcaagaatccgtttggtgatatcaaatcggatggcacggtgaaaacggctctcgaaaaccttggtttaggag

SEQ ID NO: 631238 - DNA, 75 bp, synthetic construct
  source 1..75: mol_type = other DNA
gttagcgaaaacgagaagttacacgggaagaccattgactcgcctagcagttctcttttccctgcacacttttgt

SEQ ID NO: 631239 - DNA, 75 bp, synthetic construct
  source 1..75: mol_type = other DNA
cggttggtgtgcctgttccgtggccttcagccactccgccaatggggtggctaaaatgtaacggagcagtatttt

SEQ ID NO: 631240 - DNA, 75 bp, synthetic construct
  source 1..75: mol_type = other DNA
ctggtacaacttcgtctcagatcagtactccggtttccatggcattgtcgttcccggtacgcttcgtgattccat

SEQ ID NO: 631241 - DNA, 75 bp, synthetic construct
  source 1..75: mol_type = other DNA
tcgactgaatccgctttatcgcattttccctatcaatgactgcatagagcgccagtttacgatcgaaaagcgtga

SEQ ID NO: 631242 - DNA, 75 bp, synthetic construct
  source 1..75: mol_type = other DNA
atgttcggctgtaaaaaccgctttacccggatggctatttctaaagaaattggtggtcttatcgcttccggtttt

SEQ ID NO: 631243 - DNA, 75 bp, synthetic construct
  source 1..75: mol_type = other DNA
tgccagagccatctgtcacggtcaaaaaggtgagataagaaaacgatataccgacggtcaggaagatcagttggg

SEQ ID NO: 631244 - DNA, 75 bp, synthetic construct
  source 1..75: mol_type = other DNA
gctggttgattttcagtcctcgttagcgttggcaggatactggggtggcggtgaggtggcctccgctgatggtat

SEQ ID NO: 631245 - DNA, 75 bp, synthetic construct
  source 1..75: mol_type = other DNA
gcacattatggtgccctgaatgagctggcccggggatgtgttgaactgtcaaaaatagaatcccaatgggatgaa

SEQ ID NO: 631246 - DNA, 75 bp, synthetic construct
  source 1..75: mol_type = other DNA
atgcgtcgtttgttgtctgtcgcgccggttcttctctggctggttacgcccctcgcgttcgcgcaactgcctggt

SEQ ID NO: 631247 - DNA, 75 bp, synthetic construct
  source 1..75: mol_type = other DNA
aattcgctatatggcgctgctgttcgtgccgattggcgtaggcgtaatgcaatattttgatttattacgcgcgca

SEQ ID NO: 631248 - DNA, 75 bp, synthetic construct
  source 1..75: mol_type = other DNA
cacggtcagaatagagcaattggatgttcatgcttcagccggttccggatatataaaccaaccattccctacaat

SEQ ID NO: 631249 - DNA, 75 bp, synthetic construct
  source 1..75: mol_type = other DNA
gtgctgggattatttgctctggaaaacattaccatggcagaaatgttcggctgtaaaaaccgctttacccggatg

SEQ ID NO: 631250 - DNA, 75 bp, synthetic construct
  source 1..75: mol_type = other DNA
ttttttgattatcgacctggtgattgccagcgtgttgatggcattggggatgatgatggtccccccgccaccatt

SEQ ID NO: 631251 - DNA, 75 bp, synthetic construct
  source 1..75: mol_type = other DNA
gatgatgatggttccccccgccaccattgctctgccctttaaactgatgctgtttgtactggtggatggctggca

SEQ ID NO: 631252 - DNA, 75 bp, synthetic construct
  source 1..75: mol_type = other DNA
cggaagcgacatcatgatgagcgatgctataccgtcaggaaaagccagctactccggctttacgctggtgctcga

SEQ ID NO: 631253 - DNA, 75 bp, synthetic construct
  source 1..75: mol_type = other DNA
gaagacgtggtgttgcgtctgtccgggatgagcggggctgttcatgcggatactgacagcaccgaagtggcgaaa

SEQ ID NO: 631254 - DNA, 75 bp, synthetic construct
  source 1..75: mol_type = other DNA
ctatttacgactatcagattattgatcctgaagaacccttttccttccgacttgaaatccataaatacgctaaat

SEQ ID NO: 631255 - DNA, 75 bp, synthetic construct
  source 1..75: mol_type = other DNA
gatttatataagagatgagtgtattgatgagcggaaattacgaggtgaatcacctgaaactgtaggtgatgctgc

SEQ ID NO: 631256 - DNA, 75 bp, synthetic construct
  source 1..75: mol_type = other DNA
cggtaacctgcaggtgagcgtggaggaccttgtcagaaccggggcgtttctggtggcgatgtccctgtggcataa

SEQ ID NO: 631257 - DNA, 75 bp, synthetic construct
  source 1..75: mol_type = other DNA
tctgcgctgcagcgtattgagcatcttgccctcctgaaacggcgggcagaagaggctgaagccagcggcaacctg

SEQ ID NO: 631258 - DNA, 75 bp, synthetic construct
  source 1..75: mol_type = other DNA
gaagacgtggtgttgcgtctgtccgggatgagcggggctgttcatgtggatacggatatcaccgaagtggcgaaa

SEQ ID NO: 631259 - DNA, 75 bp, synthetic construct
  source 1..75: mol_type = other DNA
atgtttctgaaaacagaacaatttgaatataacggtgtgactgtcacgctttctgagctgtctgcgctgcagcgt

SEQ ID NO: 631260 - DNA, 75 bp, synthetic construct
  source 1..75: mol_type = other DNA
gcatcaaggtgctgatgcatctggaaaccgaactgatgggcaccgtgcgcgaacgcgcggaagatgaagcaatca

SEQ ID NO: 631261 - DNA, 75 bp, synthetic construct
  source 1..75: mol_type = other DNA
tgcgcaatttgttgatgctgataaaggcgtagcggataccaaagccgcgctggacggcgcgcgctatatactgat

SEQ ID NO: 631262 - DNA, 75 bp, synthetic construct
  source 1..75: mol_type = other DNA
atagcaatttttaatcgtaaactacagaatatattcaaccaactaatagaatattactttattaaagggggaagc

SEQ ID NO: 631263 - DNA, 75 bp, synthetic construct
  source 1..75: mol_type = other DNA
tccgggatgatcgaagctgttcgtccggatactgatattactgaagtggcgaaaaataacacgctgactgatgat

SEQ ID NO: 631264 - DNA, 75 bp, synthetic construct
  source 1..75: mol_type = other DNA
gatctcgtcagaaccggcgcgtttctggtggcgatgtccctgtggcataaccatccgcagaaaacggcatcaccg

SEQ ID NO: 631265 - DNA, 75 bp, synthetic construct
  source 1..75: mol_type = other DNA
tttgattttgttgatgaactacaaccacccttacacttttaccgcgcaaaaggcagtgatagcgatccccatcac

SEQ ID NO: 631266 - DNA, 75 bp, synthetic construct
  source 1..75: mol_type = other DNA
ttgtgcgccagttgaactgatggggagcgttgccgtacaagaaggtagctctttgattattggttacggtgctga

SEQ ID NO: 631267 - DNA, 75 bp, synthetic construct
  source 1..75: mol_type = other DNA
ctggggggctgcccgtcacttgatagcggcattcagaagaaattgctctccaagttcgggaagctgcgcggcctt

SEQ ID NO: 631268 - DNA, 75 bp, synthetic construct
  source 1..75: mol_type = other DNA
gtcttcatccctgagcaaaaacggcaaattgttgcccaatttcggcaaaactcgctgttgcgcctgaaaccaggc

SEQ ID NO: 631269 - DNA, 75 bp, synthetic construct
  source 1..75: mol_type = other DNA
gaagcgcaggccaacaccacccaggtttcagcggagcgcgaccgtctgtttaaaaattatcaacgttatctgaaa

SEQ ID NO: 631270 - DNA, 75 bp, synthetic construct
  source 1..75: mol_type = other DNA
ctgaggtcgatgccttgccggacggcatctacgcacaagtggcggtttactctgaccatttcagccatgtttctg

SEQ ID NO: 631271 - DNA, 75 bp, synthetic construct
  source 1..75: mol_type = other DNA
gcgatgttattcagcggtatatcgaacaatttgttgccaattccaacaagatgaccgccgttggggcgtgcgggc

SEQ ID NO: 631272 - DNA, 75 bp, synthetic construct
  source 1..75: mol_type = other DNA
cgggcggctgacgtagtggatttgcgcctcgaaggtacctgggttaaggctgacggtcagcagggatacttcctg

SEQ ID NO: 631273 - DNA, 75 bp, synthetic construct
  source 1..75: mol_type = other DNA
atcgagcatcttgccctcctgaaacggcgggcagaagagtctgaagccagcggcaacctgcaggtgagcgtggaa

SEQ ID NO: 631274 - DNA, 75 bp, synthetic construct
  source 1..75: mol_type = other DNA
gattttttaaatcagtgttcaacggcagacccgactgcaatctcactgatcatgagtaagtttggtcgtgtcaga

SEQ ID NO: 631275 - DNA, 75 bp, synthetic construct
  source 1..75: mol_type = other DNA
gcatttctgaatcagtgttcaacggctgatccggctgctatctcaaaaattatgagtaagttcggtaagattaag

SEQ ID NO: 631276 - DNA, 75 bp, synthetic construct
  source 1..75: mol_type = other DNA
gttgccgttgtttttgcacttttcgccgcgtttcccatgttttctgacgtcagcattcagttgcgtcattttatc

SEQ ID NO: 631277 - DNA, 75 bp, synthetic construct
  source 1..75: mol_type = other DNA
agcatgtttccggcatgtactgtggtcagtggttaagttatcagggagatgagttcaagattcgtgttggagacg

SEQ ID NO: 631278 - DNA, 75 bp, synthetic construct
  source 1..75: mol_type = other DNA
ccttcccggtgaagatccggcgcagctgaacgacccggcctaccgtcgtctgcgtatcatcaccgataatctcaa

SEQ ID NO: 631279 - DNA, 75 bp, synthetic construct
  source 1..75: mol_type = other DNA
aagtgtggacgacgaccggcgatccggcagtgacgcaaacaatgacgcaatccgcgccagcaatggtcctcaccg

SEQ ID NO: 631280 - DNA, 75 bp, synthetic construct
  source 1..75: mol_type = other DNA
cggtattgggcaacgcatcggtattttcgcggggtccggcgttggtaaaagtacgcttttgggaatgatttgtaa

SEQ ID NO: 631281 - DNA, 75 bp, synthetic construct
  source 1..75: mol_type = other DNA
attactgcaccttatcttccgtttgaacgcagtttgtatgctgaaccccccgatcctttattaaggcaggttatt

SEQ ID NO: 631282 - DNA, 75 bp, synthetic construct
  source 1..75: mol_type = other DNA
acctataagaatattgaactgcttattcgtattggtgagtacacgatggggcaagatcctgaagcggataaggca

SEQ ID NO: 631283 - DNA, 75 bp, synthetic construct
  source 1..75: mol_type = other DNA
cgctgcgccaggtgtgcaagctttcagcgcgtaaacaaaagcaggtgcaggagtttattggggtgattgcgggta

SEQ ID NO: 631284 - DNA, 75 bp, synthetic construct
  source 1..75: mol_type = other DNA
aaactgtcggcgcgtaaacaaaagcaggtgcaggcgtttattggagtgattgccggtaaacagaaagtcgcgtaa

SEQ ID NO: 631285 - DNA, 75 bp, synthetic construct
  source 1..75: mol_type = other DNA
cgctacgccaggtgtgcaaactgtcggcacgtaaacaaaagcaggtgcaggattttattggagtgattgcgggta

SEQ ID NO: 631286 - DNA, 75 bp, synthetic construct
  source 1..75: mol_type = other DNA
atgagcgattcgtttactacgtcagaactgattaccgcgacacagcaggtatttaagttcaatccgttgttttta

SEQ ID NO: 631287 - DNA, 75 bp, synthetic construct
  source 1..75: mol_type = other DNA
aacataacgccgtcgtcgtgtgcaaagagctattaagcccgaacgcgcgttgcctgccgggcggcgaatacgatg

SEQ ID NO: 631288 - DNA, 75 bp, synthetic construct
  source 1..75: mol_type = other DNA
tgttttgccccgcgtaaatgagaaggtcctgatggttactctggcggcaaatgtggaaattgtggggcgtttcgt

SEQ ID NO: 631289 - DNA, 75 bp, synthetic construct
  source 1..75: mol_type = other DNA
agaagattggtcgcgaattgggatggaaaccacaggaaacgtttgagagcgggattcgtaaaacggtggaatggt

SEQ ID NO: 631290 - DNA, 75 bp, synthetic construct
  source 1..75: mol_type = other DNA
caggttttattggatctgctgttgttcgacatattattaataatactctggattctgtcgtcaatgtcgataaat

SEQ ID NO: 631291 - DNA, 75 bp, synthetic construct
  source 1..75: mol_type = other DNA
cggtaaagcgctgccgatctacggcaaaggcgatcagatccgcgactggctgtacgttgaagatcacgcccgtgc

SEQ ID NO: 631292 - DNA, 75 bp, synthetic construct
  source 1..75: mol_type = other DNA
atgaaatcaatgagtattgccgccagtagtgaactggtttcccgactttctactcatcgccgcgtggtggcgctg

SEQ ID NO: 631293 - DNA, 75 bp, synthetic construct
  source 1..75: mol_type = other DNA
tccgcagttcgatgagccgcccaaagagagctattgcgagcaaatcatcatggatcaccttggcctgcgcctgaa

SEQ ID NO: 631294 - DNA, 75 bp, synthetic construct
  source 1..75: mol_type = other DNA
catacggtcttccaacaatggtgaccaactgttcgaataactatggcccataccatttccctgaaaagttgattc

SEQ ID NO: 631295 - DNA, 75 bp, synthetic construct
  source 1..75: mol_type = other DNA
attgtgggtacttatgttcttttagaaacagcccgtcaatactggtcctcactggatagtgcgcgaaaggcgaca

SEQ ID NO: 631296 - DNA, 75 bp, synthetic construct
  source 1..75: mol_type = other DNA
tttcgtttccaccacatctccaccgacgaagtgtatggcgatctgccgcacccggatgaagtgagcgcaggcacc

SEQ ID NO: 631297 - DNA, 75 bp, synthetic construct
  source 1..75: mol_type = other DNA
gctctacaccgtagtcaccaccggcgtggtgggcgagacctacaacatcggcggccacaacgagaagcagaacct

SEQ ID NO: 631298 - DNA, 75 bp, synthetic construct
  source 1..75: mol_type = other DNA
cccggatgaagtgagcgcaggtacagcgttaccgctgtttaccgaaaccaccccgtacgcgccaagcagcccgta

SEQ ID NO: 631299 - DNA, 75 bp, synthetic construct
  source 1..75: mol_type = other DNA
gtttattccgatgatggcagatagctcgccgttactgttagaacttaacgaaaacgatccggggatctttgttac

SEQ ID NO: 631300 - DNA, 75 bp, synthetic construct
  source 1..75: mol_type = other DNA
ttacggcaagggggaccagattcgtgactggctgtacgttgaagaccacgcccgcgcactctacaccgttgtcac

SEQ ID NO: 631301 - DNA, 75 bp, synthetic construct
  source 1..75: mol_type = other DNA
atgaagtatatggtgatctccctcatccggatgactgggataataaaaatagtccaccactgtttactgagaata

SEQ ID NO: 631302 - DNA, 75 bp, synthetic construct
  source 1..75: mol_type = other DNA
ggttttgccaccggcacggcggtagatgtcaaagtgatggaaggctgtattgtcctcaccgcccaaccacccgcc

SEQ ID NO: 631303 - DNA, 75 bp, synthetic construct
  source 1..75: mol_type = other DNA
caccggaaggtaaagccgaatttgcgaacgtgaaaatggctccgaaaacttttgctggtggcaacccaatttcta

SEQ ID NO: 631304 - DNA, 75 bp, synthetic construct
  source 1..75: mol_type = other DNA
ctaatgatattcgtaataaagtcattgaaggtacgatggaaaaaatttctgtcggctatgacattaaagaatatc

SEQ ID NO: 631305 - DNA, 75 bp, synthetic construct
  source 1..75: mol_type = other DNA
ggtggcaacccgatcagccgtcagtcgctgaaaaccgttccgggcatcgctaccctgatcactgatcacattaac

SEQ ID NO: 631306 - DNA, 75 bp, synthetic construct
  source 1..75: mol_type = other DNA
ctctgttgcacgcacggttctgcgtgccgtccgtgactcggtggtctctgttgcccgcgcggtatggaactggat

SEQ ID NO: 631307 - DNA, 75 bp, synthetic construct
  source 1..75: mol_type = other DNA
acacggcggagagtgtctgcattgcctctgttgcacgcacggttctgcgcgccgtccgtgactcggtggtctctg

SEQ ID NO: 631308 - DNA, 75 bp, synthetic construct
  source 1..75: mol_type = other DNA
cgttccgcgtatctgggtagacctggattatgttgttactcagccggaagctctgaaagttcttcacatctccga

SEQ ID NO: 631309 - DNA, 75 bp, synthetic construct
  source 1..75: mol_type = other DNA
aagccgaagtgattctggtggcagataacagcccgatcaaaaccgtagccgatcttaaaggtcacaaagttgcct

SEQ ID NO: 631310 - DNA, 75 bp, synthetic construct
  source 1..75: mol_type = other DNA
cctgaagcgttacgtataggctatcagaaaggcagtattggtatggtgctggcaaaaagccaccagttactggaa

SEQ ID NO: 631311 - DNA, 75 bp, synthetic construct
  source 1..75: mol_type = other DNA
atgccggtcgtttatccgaaaaatgatggatcgttaatagaagccggtattccagttgaatttgctggctattta

SEQ ID NO: 631312 - DNA, 75 bp, synthetic construct
  source 1..75: mol_type = other DNA
cgttccgcgtatctgggtagatctggattatgtagttacccagccggaagctctgaaagttcttcacgtctctga

SEQ ID NO: 631313 - DNA, 75 bp, synthetic construct
  source 1..75: mol_type = other DNA
tttgctggtggcaacccgatcagccgtcagtctctgaaaactgttccgaatattgctaccctgatcactgatcac

SEQ ID NO: 631314 - DNA, 75 bp, synthetic construct
  source 1..75: mol_type = other DNA
gaaatttcatttgtgacggtccctgccgatgatacggtcggtttaaatcgctctctaaatactatcacagttaat

SEQ ID NO: 631315 - DNA, 75 bp, synthetic construct
  source 1..75: mol_type = other DNA
ctctgttgcacgcacggttctgcgcgccgtccgtgactctgtggtctctgttgcccgcgccgtatggaactggat

SEQ ID NO: 631316 - DNA, 75 bp, synthetic construct
  source 1..75: mol_type = other DNA
catgagagcttcaatcatgagaaagagcatgttaaatctgtaattaattctcttgttttgaatcaaaagaattaa

SEQ ID NO: 631317 - DNA, 75 bp, synthetic construct
  source 1..75: mol_type = other DNA
atgactagtaaaaatgtaaatatccagtttaaccacgatgtttctcctgctggacttgcggatgagctcactgct

SEQ ID NO: 631318 - DNA, 75 bp, synthetic construct
  source 1..75: mol_type = other DNA
caacttcaccactctggcggattactgcgagcatttcgctgaaacgatcatcgagtgccacgatctggcgctgaa

SEQ ID NO: 631319 - DNA, 75 bp, synthetic construct
  source 1..75: mol_type = other DNA
gtagatataacgctggtggctggcccggcagacacctcgcagtccgtccttaagagcaatcggtcatcactgaaa

SEQ ID NO: 631320 - DNA, 75 bp, synthetic construct
  source 1..75: mol_type = other DNA
cactacgcaaggtgtgtaagctgtcggcgcgtaaacagaagcaagtgcaggaatttattggggtgattgccggta

SEQ ID NO: 631321 - DNA, 75 bp, synthetic construct
  source 1..75: mol_type = other DNA
atgtcaaagtaatggaaggctgtattgtcctcaccgcccaaccacccgccgccgaagagagcgaactgatgcagt

SEQ ID NO: 631322 - DNA, 75 bp, synthetic construct
  source 1..75: mol_type = other DNA
atgcgtaagatcattaaactggtgctggcgggtttacttagcgtctctacacttgctgttgccgcagaatcctcg

SEQ ID NO: 631323 - DNA, 75 bp, synthetic construct
  source 1..75: mol_type = other DNA
cagacccgtgaacagtttaccggtgcggtggaccggatatttgacacggcggagagtgtctgcattgcctctgtt

SEQ ID NO: 631324 - DNA, 75 bp, synthetic construct
  source 1..75: mol_type = other DNA
ctctgttgcacgcacggttctgcgggccgtccgtgactcggtggtctctgttgcccgcgctgtatggaactggat

SEQ ID NO: 631325 - DNA, 75 bp, synthetic construct
  source 1..75: mol_type = other DNA
atcactctgcgattactgcctggcgctgacgcagatactgaacggccacgtgctgctgccggaaaccgaaaccac

SEQ ID NO: 631326 - DNA, 75 bp, synthetic construct
  source 1..75: mol_type = other DNA
aaagtgggtctatgaactgtttccacgtctgcatgagcgccgtgttcagcggggcgggcaccatgtccggcggtg

SEQ ID NO: 631327 - DNA, 75 bp, synthetic construct
  source 1..75: mol_type = other DNA
ttcccgaggcatcgggtcactgtacagtgaatggggagatatggggcattacacgactgaagctggttttcaatc

SEQ ID NO: 631328 - DNA, 75 bp, synthetic construct
  source 1..75: mol_type = other DNA
acctggctaatgcaaaatgggttgagaatgtgaaactcggtgcatatacttcttacctttccaaacaaggcggag

SEQ ID NO: 631329 - DNA, 75 bp, synthetic construct
  source 1..75: mol_type = other DNA
attgttggtacttatgtccttttagaagccgctcgtaattactggtctgctcttgatagcgacaagaaaaatagc

SEQ ID NO: 631330 - DNA, 75 bp, synthetic construct
  source 1..75: mol_type = other DNA
cccggctaacccaatcgccagcaacagcaccgcagaaggtaaggcgcaaaaccgccgtgtagaaattaccttaag

SEQ ID NO: 631331 - DNA, 75 bp, synthetic construct
  source 1..75: mol_type = other DNA
agaaatcttatcgcgagcaaattacttatgttgccgatcgtccgggacacgatcgccgttatgcgattgatgctg

SEQ ID NO: 631332 - DNA, 75 bp, synthetic construct
  source 1..75: mol_type = other DNA
gaaaccgcaggaaacatttgaaagcgggattcgtaaaacggtggaatggtacctgaccaatacaaaatgggtgga

SEQ ID NO: 631333 - DNA, 75 bp, synthetic construct
  source 1..75: mol_type = other DNA
tcgtcacattataaataatacgcaggatagtgttgttaatgtcgataaattaacgtacgccggaaacctggaatc

SEQ ID NO: 631334 - DNA, 75 bp, synthetic construct
  source 1..75: mol_type = other DNA
gcgtgcgccgagcgatggttatgtgacccaggtactgattcgtccgggtacctatgccgcgtcgctgccgctacg

SEQ ID NO: 631335 - DNA, 75 bp, synthetic construct
  source 1..75: mol_type = other DNA
atggtgacgaaaaccatcactgaacaacgtgcggaagtacgtatttttgccggtaatgatccggctcataccgcc

SEQ ID NO: 631336 - DNA, 75 bp, synthetic construct
  source 1..75: mol_type = other DNA
acaatatgcatcacaatataaagaattggttggtggttttggcacaacccccatctcacactttagacatcgcat

SEQ ID NO: 631337 - DNA, 75 bp, synthetic construct
  source 1..75: mol_type = other DNA
gcggtaaaggtgcgctgattggcgcagcggcaggtgcagcgctgggcggcggcgtaggttattacatggatgtgc

SEQ ID NO: 631338 - DNA, 75 bp, synthetic construct
  source 1..75: mol_type = other DNA
gtagtgcggttggcatactggtactgccgcttgaaggcacagagacggtgctgacctattacaagtcggggacct

SEQ ID NO: 631339 - DNA, 75 bp, synthetic construct
  source 1..75: mol_type = other DNA
tttgtgatttgttggatgagattgtaccgaaagagaaatcttatcgtgagcaaattacttatgttgctgatcgcc

SEQ ID NO: 631340 - DNA, 75 bp, synthetic construct
  source 1..75: mol_type = other DNA
atgaccgttaccgatccggattccatcggcattcagatcgacggcgacaaggcggtcgtgaacaacgacggtgac

SEQ ID NO: 631341 - DNA, 75 bp, synthetic construct
  source 1..75: mol_type = other DNA
atgcgacggccaacaacagcggcaataccaccgtagacggtcagggttcgaccggaactgaaatcgcgggtaaca

SEQ ID NO: 631342 - DNA, 75 bp, synthetic construct
  source 1..75: mol_type = other DNA
cgtgaagcgtcgtaccttcacgctcatcgataaccgcaaccgtcagggatggatcacccgtcgcttccagtgctt

SEQ ID NO: 631343 - DNA, 75 bp, synthetic construct
  source 1..75: mol_type = other DNA
gttttcatccccgagcaaaaacggcaaattgtcgcccaatttcggcaaaactcgctgttacgtctgaaacccggc

SEQ ID NO: 631344 - DNA, 75 bp, synthetic construct
  source 1..75: mol_type = other DNA
cccgttatttaggtgaaattgatccggatatcatttcaggaagaaaacgtgcgtcatttttaccgtctttaaaaa

SEQ ID NO: 631345 - DNA, 75 bp, synthetic construct
  source 1..75: mol_type = other DNA
ctgttggttataaatgtgtctggttgcttgttggtgttgatcaacttgccttgcgcgtattacaaggagagcatt

SEQ ID NO: 631346 - DNA, 75 bp, synthetic construct
  source 1..75: mol_type = other DNA
aaggttcataccgcgatcagattagctatgttgcggatcgtcctgggcatgaccgtcgctacgcgattgattctg

SEQ ID NO: 631347 - DNA, 75 bp, synthetic construct
  source 1..75: mol_type = other DNA
gcaaaatgggtcgagaatgtgaaaagtggtgcctatcaatcgtggattgaacagaactatgagggccgccagtaa

SEQ ID NO: 631348 - DNA, 75 bp, synthetic construct
  source 1..75: mol_type = other DNA
ttgttggatgagattgtaccgaaagagaaatcttaccgcgagcaaattacttatgttgccgatcgcccgggacac

SEQ ID NO: 631349 - DNA, 75 bp, synthetic construct
  source 1..75: mol_type = other DNA
agcgtgcggaagtacgtattttggcaggtaatgatccggctcacaccgccacaggcagcagcgggatttcctcgg

SEQ ID NO: 631350 - DNA, 75 bp, synthetic construct
  source 1..75: mol_type = other DNA
gtggtctgggacggacagaaagccggtagtgcggttggcatactggtactgccgcttgaaggcacagagacggcg

SEQ ID NO: 631351 - DNA, 75 bp, synthetic construct
  source 1..75: mol_type = other DNA
gccgtgatggtgcgcgtaatctcggtgaagtacgtaccggggttgaggcgaaagtaaataacaaccttagcctgt

SEQ ID NO: 631352 - DNA, 75 bp, synthetic construct
  source 1..75: mol_type = other DNA
tctacgactgaacataccacttatacttaaggataaatgggatgagagtgaaatacaggagcgaggtaaaaagtt

SEQ ID NO: 631353 - DNA, 75 bp, synthetic construct
  source 1..75: mol_type = other DNA
cgaacacaccctgcgcgaactgggtaaacgcttcgaggttatgtatggtaagagcatgaccaaagaagagatcgc

SEQ ID NO: 631354 - DNA, 75 bp, synthetic construct
  source 1..75: mol_type = other DNA
ttaacaaagcaggagtagaaaatgctaagttgatgtcaaaaatgaaagcgtttgacggcttatctattattgatt

SEQ ID NO: 631355 - DNA, 75 bp, synthetic construct
  source 1..75: mol_type = other DNA
agggcagttcaggtattgattgatgaagctaaagcgatgaatgctgctgctgaatcggccaattacttagcaagc

SEQ ID NO: 631356 - DNA, 75 bp, synthetic construct
  source 1..75: mol_type = other DNA
atgaaaaaagttttatcccgtgggcgaattcttggcaacagtgcttcagaatttgcacgtatgcttgaaagcgac

SEQ ID NO: 631357 - DNA, 75 bp, synthetic construct
  source 1..75: mol_type = other DNA
tcaggcagaaaatctctctcctgcgaaagtgactcgtgcgtttcaggccgcagcagtgccagatgaaatggttgc

SEQ ID NO: 631358 - DNA, 75 bp, synthetic construct
  source 1..75: mol_type = other DNA
taaagcgaagatactggctatcttcaaagcggaaagcaaaagcctgaagcccgcgccggttaaatctgtggtggt

SEQ ID NO: 631359 - DNA, 75 bp, synthetic construct
  source 1..75: mol_type = other DNA
ccaaccctgctggttgctcgtaccgatgccgatgcggcggatctgattacctccgattgcgacccatatgacagc

SEQ ID NO: 631360 - DNA, 75 bp, synthetic construct
  source 1..75: mol_type = other DNA
cgaaaccgagcgtttctatctcgacgttcagaagcagtttccgaaagtgaccgcacagaaagtgatcgtcagcga

SEQ ID NO: 631361 - DNA, 75 bp, synthetic construct
  source 1..75: mol_type = other DNA
cgccaccttaagcaaaaccgaactcgaagacctctacctgccctacaaacctaaacgccgcacccgcgggcaaat

SEQ ID NO: 631362 - DNA, 75 bp, synthetic construct
  source 1..75: mol_type = other DNA
gcaattttgcagaagaccgcgaaagagcatcagaagcaggtaaaaaaggtggtaagagcagtcacggcaaaagcg

SEQ ID NO: 631363 - DNA, 75 bp, synthetic construct
  source 1..75: mol_type = other DNA
atttataaccgctgttatcataattatctttaaaaatataattatcgaacaatttttcaattctaatgatgaagt

SEQ ID NO: 631364 - DNA, 75 bp, synthetic construct
  source 1..75: mol_type = other DNA
cgttgcccggacattattttgtcctcattcctcaatggcctgatttacgacaaacgcggcaaggatgagtctgcc

SEQ ID NO: 631365 - DNA, 75 bp, synthetic construct
  source 1..75: mol_type = other DNA
gaggcctgtgagcagcacggtgtttctcaggggtatttatcaggagcgctggttcggattcagcacctcagtcag

SEQ ID NO: 631366 - DNA, 75 bp, synthetic construct
  source 1..75: mol_type = other DNA
caccggtgattgcctcgtatctggatcatcgtcctcccaccaccatcaaaccggtgagcgctgaagttgccgcct

SEQ ID NO: 631367 - DNA, 75 bp, synthetic construct
  source 1..75: mol_type = other DNA
tgcggaacttcatgccacagatcttattcgcaattatatttttatgtgcgctgaacatgaaaatattaatgctgt

SEQ ID NO: 631368 - DNA, 75 bp, synthetic construct
  source 1..75: mol_type = other DNA
cactcaccacgagaaaatgctgtagcattaattgaggctgtcttgacggatctgaaactagtaagcatatttctc

SEQ ID NO: 631369 - DNA, 75 bp, synthetic construct
  source 1..75: mol_type = other DNA
gtaaggaaacggcaacaagcgatagctacgttgggaaatctaactttgcttaaccttagcgtaaaccgttccgtt

SEQ ID NO: 631370 - DNA, 75 bp, synthetic construct
  source 1..75: mol_type = other DNA
gctcacgattgctgcggagtcttctcctgaagcgttacggataggttatcaaaaaggcagcatcagcatggtgct

SEQ ID NO: 631371 - DNA, 75 bp, synthetic construct
  source 1..75: mol_type = other DNA
ttatgaaaaccgtctggtgccgaaaaaagttgatattcgccagcgcatctggcagcccactcaactggaaggaaa

SEQ ID NO: 631372 - DNA, 75 bp, synthetic construct
  source 1..75: mol_type = other DNA
gtggcctgacgccaaagaattacaacaatgtatttatgaatgtattgcggcacttgtctaaaacggaaatttcca

SEQ ID NO: 631373 - DNA, 75 bp, synthetic construct
  source 1..75: mol_type = other DNA
acaacgccaataggttatgattttctgtcttatttgttttattgttcttttttccttatatgtgcgtttcatata

SEQ ID NO: 631374 - DNA, 75 bp, synthetic construct
  source 1..75: mol_type = other DNA
ggcgctggaaaaatgtcagcatttgccctttattcttgaagtacacagtcgcaccggcaaacatgttattgctca

SEQ ID NO: 631375 - DNA, 75 bp, synthetic construct
  source 1..75: mol_type = other DNA
ttggcctctcgaaaatggtcatatggtgacaaattcagatgctacggtattgaaccaaattgttctgtctggaac

SEQ ID NO: 631376 - DNA, 75 bp, synthetic construct
  source 1..75: mol_type = other DNA
cattatgtttttttactgaagcctttataaaatggattaaaatagaaaaccactcaccacaagaaaatgctgtag

SEQ ID NO: 631377 - DNA, 75 bp, synthetic construct
  source 1..75: mol_type = other DNA
gcctatgtatggactcagcaagaccaatggtcagctctactggaggatatcctagagaaagcacaatcccggctc

SEQ ID NO: 631378 - DNA, 75 bp, synthetic construct
  source 1..75: mol_type = other DNA
cggagccactacgctgacccggttgatttcagaggtaagggaaaaggcgacgttgcgcctgtggaacaaactggc

SEQ ID NO: 631379 - DNA, 75 bp, synthetic construct
  source 1..75: mol_type = other DNA
aatcaaagtaaagttttgctagatacggctaaaaagattacgccattaggactaaccaaaatatcatcagggctt

SEQ ID NO: 631380 - DNA, 75 bp, synthetic construct
  source 1..75: mol_type = other DNA
aaaaccttagaacaaatgtcccaaaccctgttcaaatcctggtttgtggattttgatccggtgattgataacgct

SEQ ID NO: 631381 - DNA, 75 bp, synthetic construct
  source 1..75: mol_type = other DNA
ccgccacggtacagcactttgcaagtgatatcgcgacgctgaagcggaacaacgcagagctatcgggtcggcttg

SEQ ID NO: 631382 - DNA, 75 bp, synthetic construct
  source 1..75: mol_type = other DNA
aaagctggctgcacagcgcgcagtcactacagcagcggctgagccagaacctcaaccaccgcgatgtgtcagcca

SEQ ID NO: 631383 - DNA, 75 bp, synthetic construct
  source 1..75: mol_type = other DNA
cggaaagtatccttcgaggcagaatgatcataagcatgccgctttctatctggaacaggatagtcagtatattta

SEQ ID NO: 631384 - DNA, 75 bp, synthetic construct
  source 1..75: mol_type = other DNA
gcccgtttaagtaccagtcgtgtaatggccatcgcctttatatttatgtcagtgcttattgttctcagcctctct

SEQ ID NO: 631385 - DNA, 75 bp, synthetic construct
  source 1..75: mol_type = other DNA
acgccgctttgcgcgtgtctatctcgcgggggagatagagccaatccagatcaatgctattgctgaaaagctggc

SEQ ID NO: 631386 - DNA, 75 bp, synthetic construct
  source 1..75: mol_type = other DNA
ggtatcggcaagcatgaaggcgctggaagatgccagggaacgcgcgttagtggttggcttttcgctgattatcat

SEQ ID NO: 631387 - DNA, 75 bp, synthetic construct
  source 1..75: mol_type = other DNA
agccagtacaggataaagaattacagcgagctatggcacagattttcattgatgcggagatcagctattcgcaga

SEQ ID NO: 631388 - DNA, 75 bp, synthetic construct
  source 1..75: mol_type = other DNA
atgaaagttacatggactgtcacgcctgtggggtatcagcgcattgcgaaacgatgcccttcttgcaagattaaa

SEQ ID NO: 631389 - DNA, 75 bp, synthetic construct
  source 1..75: mol_type = other DNA
cgctaccagtgcgctggcgcggatgaacatgattctgcataacaatgccaccgcgaaaatctggcagggcaatac

SEQ ID NO: 631390 - DNA, 75 bp, synthetic construct
  source 1..75: mol_type = other DNA
atgttgatggtgaattacttaaattgggaatgtgagggggattttgtggctgtgcaattaatacagttaagtcgt

SEQ ID NO: 631391 - DNA, 75 bp, synthetic construct
  source 1..75: mol_type = other DNA
atcatcgatctgcatgattacgacatccttcgacctttggttgaggcaatcattcgccatgagaatgggcgaggt

SEQ ID NO: 631392 - DNA, 75 bp, synthetic construct
  source 1..75: mol_type = other DNA
aaaaaattattctcgatcagactggtggtttattggtcaacgggacggcttcatcagcaatagtggatgatggcg

SEQ ID NO: 631393 - DNA, 75 bp, synthetic construct
  source 1..75: mol_type = other DNA
tggctgaaagtggaaactggtgggatcgccaaaggcacacaatatggcaacaatggcacgctatcggtcagtgac

SEQ ID NO: 631394 - DNA, 75 bp, synthetic construct
  source 1..75: mol_type = other DNA
gctctgaaattacagccagacgaagacgggattggcgcaatgaaccgccccgggtttcctggagagtattttatc

SEQ ID NO: 631395 - DNA, 75 bp, synthetic construct
  source 1..75: mol_type = other DNA
tctataccggagtcggaagttgccggaccctgcagatgaaggcgcattacagaaatggtggtctgttctaccgtt

SEQ ID NO: 631396 - DNA, 75 bp, synthetic construct
  source 1..75: mol_type = other DNA
agctgatcgggtagctgacaggtttcttgaaaaattgcctcagaaagaacgtggtcgggcaatgcgggccatgat

SEQ ID NO: 631397 - DNA, 75 bp, synthetic construct
  source 1..75: mol_type = other DNA
tgccagtcggcaaccaatttgcagtgcgcttaaactgcaacctgacgaagacaggattggcgcaacgctccagcc

SEQ ID NO: 631398 - DNA, 75 bp, synthetic construct
  source 1..75: mol_type = other DNA
tgcggcgttacgtgagatcgaggatgtgaaacacgatacgcgtgaagcggaagatgtgctggatgtggcggtggc

SEQ ID NO: 631399 - DNA, 75 bp, synthetic construct
  source 1..75: mol_type = other DNA
ttggtcgtcgagcggcattgcgtgaaattgaagatgtgaaacacgatacgcgtgaagcggaagatgtgctggatg

SEQ ID NO: 631400 - DNA, 75 bp, synthetic construct
  source 1..75: mol_type = other DNA
acgccagtttgtaagctctgctgcacaaaaaccggcatcggcatcagcagtaacgcgtataaatctgaccatgac

SEQ ID NO: 631401 - DNA, 75 bp, synthetic construct
  source 1..75: mol_type = other DNA
tggtggcctatgcagatggtgaatgcgaggcatccgagaaagcgaagatcgaacaggtcttacgtaatcagcctg

SEQ ID NO: 631402 - DNA, 75 bp, synthetic construct
  source 1..75: mol_type = other DNA
cccgcagagcggctgcggaaattaaaaagtttgaaaaacgcgatctggcacaagcagtgattaacgctgcatacc

SEQ ID NO: 631403 - DNA, 75 bp, synthetic construct
  source 1..75: mol_type = other DNA
ggtcagctggataccaattttaaaattggtcgtcgtgccgcgttacgcgagattgaggatgtgaaacacgatgcg

SEQ ID NO: 631404 - DNA, 75 bp, synthetic construct
  source 1..75: mol_type = other DNA
cagtgaccgaagcggggggatctcgcgtcgtagggtgatatttaatttctctgaggtcgtaccggagaacgaacg

SEQ ID NO: 631405 - DNA, 75 bp, synthetic construct
  source 1..75: mol_type = other DNA
tatgccaccgctcgtgcgctcggtctgcgcgccaaaattgatgagcagaccgggtggcacaaaagcctgtccaac

SEQ ID NO: 631406 - DNA, 75 bp, synthetic construct
  source 1..75: mol_type = other DNA
atgtgggcggtggacaaaccgctgaacccgtcgctggcccgcgacattatcgaaggtatccgtgccaaaatgcgc

SEQ ID NO: 631407 - DNA, 75 bp, synthetic construct
  source 1..75: mol_type = other DNA
gacggacacgatggcagaagcgcacatgtgggcggtggacaaaccgctgaatccgtcgctggcccgcgacattat

SEQ ID NO: 631408 - DNA, 75 bp, synthetic construct
  source 1..75: mol_type = other DNA
tgtcaccgaaatggagccgaaagatcgcgggattgcgatggtgttccagaactacgcgctttatccgcatatgag

SEQ ID NO: 631409 - DNA, 75 bp, synthetic construct
  source 1..75: mol_type = other DNA
cttgaaaacctgatgctgcgtcagcgcattaccgatcagtacctggtgaatttcgccagccaggtcagcgcgtaa

SEQ ID NO: 631410 - DNA, 75 bp, synthetic construct
  source 1..75: mol_type = other DNA
atcggtgcagtgactgctgaaggtaaaaaaacaggcatgaaagcactgttatctgcccagacacagctcggcgtt

SEQ ID NO: 631411 - DNA, 75 bp, synthetic construct
  source 1..75: mol_type = other DNA
ggtaatggatacgctgcatcaggcgggttatctgaagataggcctggtcggcgaagaaaccgccaaagcgaaata

SEQ ID NO: 631412 - DNA, 75 bp, synthetic construct
  source 1..75: mol_type = other DNA
tcgacgataacggcgaaatgcatgatatcaacgtgacgccgtttatcgacgtgatgttggttctgctgattatct

SEQ ID NO: 631413 - DNA, 75 bp, synthetic construct
  source 1..75: mol_type = other DNA
tcctcctggaaatgctcgcacaattgggctttgtgaccgtagagaaagttgttgagcgcctgggaatttcacctg

SEQ ID NO: 631414 - DNA, 75 bp, synthetic construct
  source 1..75: mol_type = other DNA
aaagcctgtccaacgtgggcgtgaacggtgtcaccggaatttctgcagatgtgttctgggatctgcaggacccgg

SEQ ID NO: 631415 - DNA, 75 bp, synthetic construct
  source 1..75: mol_type = other DNA
tgcgcgccaaaatcgacgaacagaccggatggcacaaaaccctgtccaacgtgggagtgaatggcgtcaccggca

SEQ ID NO: 631416 - DNA, 75 bp, synthetic construct
  source 1..75: mol_type = other DNA
agtacaacactggggagacttatacggctgaatgctcttgcagcaaggcttgcaccttattatacagatgagtcg

SEQ ID NO: 631417 - DNA, 75 bp, synthetic construct
  source 1..75: mol_type = other DNA
cacaccagttgaagtctacgaaaagcccgccagcctgtttgtagcgagttttatcggcagtccggcgatgaacct

SEQ ID NO: 631418 - DNA, 75 bp, synthetic construct
  source 1..75: mol_type = other DNA
gctattccttgaaccccgtttcgaagccattgagcaagacggcttggtggttcgtgagagcctgaccaaactgct

SEQ ID NO: 631419 - DNA, 75 bp, synthetic construct
  source 1..75: mol_type = other DNA
gggccggaaccgctgggggccgacgatctccgcattctgcaaggactggtagcaatggctggaccttctggcctt

SEQ ID NO: 631420 - DNA, 75 bp, synthetic construct
  source 1..75: mol_type = other DNA
tgtggcgatggggcgcgcgattgtgcgcgatccggcggtgttcttgtttgatgagccgctctctaacctcgatgc

SEQ ID NO: 631421 - DNA, 75 bp, synthetic construct
  source 1..75: mol_type = other DNA
cggtgttaaggcggtgtatacccgtgaggtgcagatatattttgaaggctcaggctggcggaccgtgggattcac

SEQ ID NO: 631422 - DNA, 75 bp, synthetic construct
  source 1..75: mol_type = other DNA
gaaacagggccacagggaccgaagggcgataaaggtgacccgggcggaccgccggggccgaaaggtgacaccggc

SEQ ID NO: 631423 - DNA, 75 bp, synthetic construct
  source 1..75: mol_type = other DNA
agcacagggcattggctttttactggcaaccggcctgggtaaatatggcgcacaaataattattaatgatattac

SEQ ID NO: 631424 - DNA, 75 bp, synthetic construct
  source 1..75: mol_type = other DNA
agctttccggcggtcagcgtcagcgtgtggcgatgggccgcgcgattgtgcgcgatccggcggtgttcctgtttg

SEQ ID NO: 631425 - DNA, 75 bp, synthetic construct
  source 1..75: mol_type = other DNA
aggcggcataccactggtgatggacacgctggagatcctcggcgcagataatctggcgcacgggcgctggggcga

SEQ ID NO: 631426 - DNA, 75 bp, synthetic construct
  source 1..75: mol_type = other DNA
ggcagcacgctgtggctgcatctgccggaaaatcagctgcatctttttgatggtgaaacaggacaacgagtatga

SEQ ID NO: 631427 - DNA, 75 bp, synthetic construct
  source 1..75: mol_type = other DNA
gccgggctggagcgggtgacggaaggcgatatctggatcaacgaccagcgcgtgaccgaaatggagccgaaagat

SEQ ID NO: 631428 - DNA, 75 bp, synthetic construct
  source 1..75: mol_type = other DNA
ccaggtcattaaaccgctgacgcttgatgtggcagacggtgaatttattgtgatggttgggccgtctggctgcgg

SEQ ID NO: 631429 - DNA, 75 bp, synthetic construct
  source 1..75: mol_type = other DNA
atgaccctcggtattcgcccggaacatattgcgttaagctcgcaggcagaaggcggcgtgccgctggtgatggac

SEQ ID NO: 631430 - DNA, 75 bp, synthetic construct
  source 1..75: mol_type = other DNA
agatcatggcgcaggtcatcgcacgcgtagcgacaccgaagcatgaggttctcccggaaaccaatcatcaaacac

SEQ ID NO: 631431 - DNA, 75 bp, synthetic construct
  source 1..75: mol_type = other DNA
atggaaaaacataacctcaaatctggattcagcatctatttcgctgacatccatttcgagaaacaggtctacgca

SEQ ID NO: 631432 - DNA, 75 bp, synthetic construct
  source 1..75: mol_type = other DNA
aatcattcagagcatgaagaacgtggcggcatccgtgcaggatgtcggcctgctggttctgtcacgccgcccacc

SEQ ID NO: 631433 - DNA, 75 bp, synthetic construct
  source 1..75: mol_type = other DNA
ctggccgatgacaaactgtggcgttggttgaatgaaaaactaccttgttcactgatgcttttgccaacgctgccg

SEQ ID NO: 631434 - DNA, 75 bp, synthetic construct
  source 1..75: mol_type = other DNA
aacgaggcaaacatgacgccggaagagatgaagaatgagctgcgttatcttcgcgcagaaaatgcatatctgaaa

SEQ ID NO: 631435 - DNA, 75 bp, synthetic construct
  source 1..75: mol_type = other DNA
attctcctgaagataaactttgcgtggttctttatgctctcgggcattctgagtctctaccccgggtagctgccc

SEQ ID NO: 631436 - DNA, 75 bp, synthetic construct
  source 1..75: mol_type = other DNA
tgttgatagcactagtatggacaggattattactcagcggatatggcgttcttattggaagcaaggagaatgcag

SEQ ID NO: 631437 - DNA, 75 bp, synthetic construct
  source 1..75: mol_type = other DNA
gacggccagatggtggctctgatggcgctggcgattcatgatgccaataatatggcgataactgtctacaactgt

SEQ ID NO: 631438 - DNA, 75 bp, synthetic construct
  source 1..75: mol_type = other DNA
tcaaacattgatatcagatacaacgaatctgcgtcctgtaccccgaaaaatatcgttataacggtggagtcatga

SEQ ID NO: 631439 - DNA, 75 bp, synthetic construct
  source 1..75: mol_type = other DNA
cgccggatgcgtccgtggaagacgtgcaggacgtgaaagcggcttatgcggttctggcagcctcagagctggcca

SEQ ID NO: 631440 - DNA, 75 bp, synthetic construct
  source 1..75: mol_type = other DNA
cgggctgccagcacagccactgatgagctggttctcggagaaaatctgctgacactggattttgaggaagacttc

SEQ ID NO: 631441 - DNA, 75 bp, synthetic construct
  source 1..75: mol_type = other DNA
gggaaggcgttcacgctggaaatcgacgggcagattgtctgcaccggttatatcgattcgcggcgacgccagatg

SEQ ID NO: 631442 - DNA, 75 bp, synthetic construct
  source 1..75: mol_type = other DNA
gctgcccggtttaacattcccagccacaacacggttaaaaactggataaaaggctaccgcaaatctggtaatgag

SEQ ID NO: 631443 - DNA, 75 bp, synthetic construct
  source 1..75: mol_type = other DNA
tgtggctggcagcagacagcatggatgaagccgaatggcgggatttgcggcggattttgttacagcaggagacgc

SEQ ID NO: 631444 - DNA, 75 bp, synthetic construct
  source 1..75: mol_type = other DNA
atgaaacagaaaatttctgactttactgccagcggcctccctcggtctgaaatccgccccggcgatattttccgg

SEQ ID NO: 631445 - DNA, 75 bp, synthetic construct
  source 1..75: mol_type = other DNA
atgaaaaataaaaattctggctttactgccagcggccccgctcggcctgaaatctgccccggcgatatttaccgg

SEQ ID NO: 631446 - DNA, 75 bp, synthetic construct
  source 1..75: mol_type = other DNA
tcggtggtggtgctggtaatgctatgggtaagcctgcgcaattactttgctgcctttctcggcctgcaggcactg

SEQ ID NO: 631447 - DNA, 75 bp, synthetic construct
  source 1..75: mol_type = other DNA
gccgcgctgctctcctcactggtgcccggcggctggctgttcttgccgaaaaaaatcctcccggatttcagcaaa

SEQ ID NO: 631448 - DNA, 75 bp, synthetic construct
  source 1..75: mol_type = other DNA
tctcaccttgctgccgatgcccgccgccgcactgctctcctcactggtgcctggcggctggctgttcttgccgaa

SEQ ID NO: 631449 - DNA, 75 bp, synthetic construct
  source 1..75: mol_type = other DNA
atgggaatgaaaaatactggtgttaatgccagcggccccgctcgtcctgaatttatgcgcagggatatttaccgc

SEQ ID NO: 631450 - DNA, 75 bp, synthetic construct
  source 1..75: mol_type = other DNA
accagcaacgccagggcacgggcaaacatccagaagctgaaaaccatgattaacggattcaggggtaaaaaatga

SEQ ID NO: 631451 - DNA, 75 bp, synthetic construct
  source 1..75: mol_type = other DNA
accagcagggagaaagcacgcgccaatattcagaagatgaaaaccatgattaaaggattcaggggtaaaaaatga

SEQ ID NO: 631452 - DNA, 75 bp, synthetic construct
  source 1..75: mol_type = other DNA
ttacccaacagcgcccgcgctggacgccgatgaatctgcatcaggcgcagaatcacgatgaaaaagtacgtattg

SEQ ID NO: 631453 - DNA, 75 bp, synthetic construct
  source 1..75: mol_type = other DNA
gccgatgaatctgcatcaggcgcagaatcacgatgaaaaagtacgtatcgccaaagcggcatcacagctggttaa

SEQ ID NO: 631454 - DNA, 75 bp, synthetic construct
  source 1..75: mol_type = other DNA
atgactgaagcacaaagacatcaaatcctcctggaaatgctcgcacaattgggctttgtgaccgttgagaaagtc

SEQ ID NO: 631455 - DNA, 75 bp, synthetic construct
  source 1..75: mol_type = other DNA
agtgttgcgttgccatcaataaccccatttgaagcactggatggtgctgtttctaatgttaccggtgtaacccgc

SEQ ID NO: 631456 - DNA, 75 bp, synthetic construct
  source 1..75: mol_type = other DNA
cggcaccttcatcttcgcattaatgagccatgcgcaaatccgtaacgatatgagtaacaagcgtaaagaagaggc

SEQ ID NO: 631457 - DNA, 75 bp, synthetic construct
  source 1..75: mol_type = other DNA
ccagcgagatgtttgctaacgcgatcatctccggctggcttatagccacaatggtatggatgttccctgcggcgg

SEQ ID NO: 631458 - DNA, 75 bp, synthetic construct
  source 1..75: mol_type = other DNA
gcttacttatgcggttatggggcgtcgtgctgctgggtaatattctcgggacaggtattgctgcgtgggcatttg

SEQ ID NO: 631459 - DNA, 75 bp, synthetic construct
  source 1..75: mol_type = other DNA
tactgtgctggtgacggccacatgtgcgaatagcggttcggttgcggcgatggccgggactatcaccaccattaa

SEQ ID NO: 631460 - DNA, 75 bp, synthetic construct
  source 1..75: mol_type = other DNA
tggcatgaaaggttatctggggaaatatcaggacatgggagtcactatctaccttacgcctgacggcaaacatgc

SEQ ID NO: 631461 - DNA, 75 bp, synthetic construct
  source 1..75: mol_type = other DNA
tactggcaaaagggatatttcatgtcgaactggaaggtgtgccgggcagcttcttactggagaatctcggttata

SEQ ID NO: 631462 - DNA, 75 bp, synthetic construct
  source 1..75: mol_type = other DNA
atggtcgagaacgctctgctggagatcccaaccgggttaattgaagcttcccgcgcaatgggtgccacgccgatg

SEQ ID NO: 631463 - DNA, 75 bp, synthetic construct
  source 1..75: mol_type = other DNA
gttcattatcttgctggtatggatgattccgtttacccgcgttattgttggtacatcgattggtttgcaggcagc

SEQ ID NO: 631464 - DNA, 75 bp, synthetic construct
  source 1..75: mol_type = other DNA
tgggcgtggtttttatgagtcccactcgttaatcgttaacgataacttgtcgtgcaaaaaactttttgccacaga

SEQ ID NO: 631465 - DNA, 75 bp, synthetic construct
  source 1..75: mol_type = other DNA
attacggcactaaatccacgaataacactggtgcgcatactcatagtttaagtggcagcacgaatgcagctggta

SEQ ID NO: 631466 - DNA, 75 bp, synthetic construct
  source 1..75: mol_type = other DNA
gtggctgctggttcgtggcgtatgggaaacgctggcaatgaccttcgtatccggttttttggctttgtgattggt

SEQ ID NO: 631467 - DNA, 75 bp, synthetic construct
  source 1..75: mol_type = other DNA
aagttgtatcgtaccgtatctgcgattgtgaacattttccgttccattccgttcattattttactggtatggatg

SEQ ID NO: 631468 - DNA, 75 bp, synthetic construct
  source 1..75: mol_type = other DNA
gaaatccccgggggctttgtcgtcatcaaacattgatatcagatacaacgaatctgcgtcctgtacaccggaaaa

SEQ ID NO: 631469 - DNA, 75 bp, synthetic construct
  source 1..75: mol_type = other DNA
atctgaatacacggggagttcagctacccggtgcaacagtagtgactgtacgtaccaccgagcctgcactggtga

SEQ ID NO: 631470 - DNA, 75 bp, synthetic construct
  source 1..75: mol_type = other DNA
gaatttacgttcagtgtacttgtgatgggggatgatgttcagacacagcgaaatcgtctgcgtgatgcccttcgt

SEQ ID NO: 631471 - DNA, 75 bp, synthetic construct
  source 1..75: mol_type = other DNA
tatggcgataactgtctataactgtttttcaccagcaaccggctatggagccgcactgaccagtaacgtgaaaat

SEQ ID NO: 631472 - DNA, 75 bp, synthetic construct
  source 1..75: mol_type = other DNA
gaacggttgagttcacgatcaacgtgatccccgccagtgacgataccgccccttcggtggcagaagatacggcag

SEQ ID NO: 631473 - DNA, 75 bp, synthetic construct
  source 1..75: mol_type = other DNA
aggccatgccgcagctgtaccgcacactttcctccctgcgttacaccctcagcgaacaggatgatccacagcgcc

SEQ ID NO: 631474 - DNA, 75 bp, synthetic construct
  source 1..75: mol_type = other DNA
gtgcgggcggactggcctggctggaaagttctgctgatgtgcagcgtatcaaccgggatttgagcgatgccatgg

SEQ ID NO: 631475 - DNA, 75 bp, synthetic construct
  source 1..75: mol_type = other DNA
gacgtctgccggtggcgtagccgcggcaaacgtggatattgcctttgaccagtcagcatcctgcgccgtcagcaa

SEQ ID NO: 631476 - DNA, 75 bp, synthetic construct
  source 1..75: mol_type = other DNA
gtcagtggaggtaatgccaggtattacgacattaccgagttgctgatcgggacgtctgccggtggcgtagccgcg

SEQ ID NO: 631477 - DNA, 75 bp, synthetic construct
  source 1..75: mol_type = other DNA
tacgtcaaaatcactatcgagccccttacgggctacacatcccaggtcggcgaagagataaaggcggctgtatct

SEQ ID NO: 631478 - DNA, 75 bp, synthetic construct
  source 1..75: mol_type = other DNA
cccaggctatccggggtaataaagggcagggaacggcgacctacgggacgacctctgtcacggtaccggacactt

SEQ ID NO: 631479 - DNA, 75 bp, synthetic construct
  source 1..75: mol_type = other DNA
tcgcgggttacacatcacaaataggtaaggagattcagcaggccgttgcggattacatcaacgacctgacgatcg

SEQ ID NO: 631480 - DNA, 75 bp, synthetic construct
  source 1..75: mol_type = other DNA
cacggccattgccgtttacaactgcttctcacctgctacgggttacggcgcagcgctgaccagtaacgtgaaaat

SEQ ID NO: 631481 - DNA, 75 bp, synthetic construct
  source 1..75: mol_type = other DNA
caccaacaacctgattgacgaggtttatcaggatgacccgaaactcgttgccatcgttggccgtaagctgctggc

SEQ ID NO: 631482 - DNA, 75 bp, synthetic construct
  source 1..75: mol_type = other DNA
gatgtggcaaagaaattcaccgtcgagccgtccgtgacgcaaaccctgatgaccactctgcaggcgtcatccgcg

SEQ ID NO: 631483 - DNA, 75 bp, synthetic construct
  source 1..75: mol_type = other DNA
taacctgtcgatttacttcatggatgacgcacaccgccgcgccatcatcgaggagccgaagaaagaccgcgtcga

SEQ ID NO: 631484 - DNA, 75 bp, synthetic construct
  source 1..75: mol_type = other DNA
tagatgaggctcttttgattcaaacattcccgagtaattatgtctttgtggggaaaaattcgtcaatttggcgtc

SEQ ID NO: 631485 - DNA, 75 bp, synthetic construct
  source 1..75: mol_type = other DNA
ctacagtgtaggagccaaaatatttctactgttctgggctgcaggattgggaggcacgctgtacagcgtgctggc

SEQ ID NO: 631486 - DNA, 75 bp, synthetic construct
  source 1..75: mol_type = other DNA
aaaagactctgggagtggttaatgacaggccatttctcgacgtctacctcagtcgcgaagtcagagataagacgt

SEQ ID NO: 631487 - DNA, 75 bp, synthetic construct
  source 1..75: mol_type = other DNA
agcaaaaccgtgactgttcgtacaacttcctataaagatgttgatggagtaccacagaagggtttaaataaaatc

SEQ ID NO: 631488 - DNA, 75 bp, synthetic construct
  source 1..75: mol_type = other DNA
aagtaactaagcctgaaggcgcagagaatgagacaaacttacaggcagtagatgaggaaaattcaactataacta

SEQ ID NO: 631489 - DNA, 75 bp, synthetic construct
  source 1..75: mol_type = other DNA
gaagatgctgactacgcgaccgaagtgtctaacatgtctcgtgcgcagatcctgcaacaagcgggtacctctgtt

SEQ ID NO: 631490 - DNA, 75 bp, synthetic construct
  source 1..75: mol_type = other DNA
atgcgtaaagatacccgctttaaatttaatgcttacctgtcccgcgtggcggagctgaacggcgtcgacaccgac

SEQ ID NO: 631491 - DNA, 75 bp, synthetic construct
  source 1..75: mol_type = other DNA
atgcgtaaagatacccgctttaaattcaatgcttacctgtcccgcgtggcggagctgaacggcgtcgacaccgat

SEQ ID NO: 631492 - DNA, 75 bp, synthetic construct
  source 1..75: mol_type = other DNA
tgccgctgataaattaaaagatcatgacttcagtaaacaagctaccttaggtgaagaagcaacaacaactactgt

SEQ ID NO: 631493 - DNA, 75 bp, synthetic construct
  source 1..75: mol_type = other DNA
ctattaatgttcaaaagagtcaaacagagttgagtttgaattcgaaaaacggatcacattttcaaaccgatggat

SEQ ID NO: 631494 - DNA, 75 bp, synthetic construct
  source 1..75: mol_type = other DNA
ccgtgttgaccagtttgcagcatcgttgtccagcgcgaaaaacagctatgaccagtatacaaccagtaagacccg

SEQ ID NO: 631495 - DNA, 75 bp, synthetic construct
  source 1..75: mol_type = other DNA
tgctgttgttgctaatgctaaagcaaataacatcagcaatgaggagtcgttccaacaattaatggatgattcgac

SEQ ID NO: 631496 - DNA, 75 bp, synthetic construct
  source 1..75: mol_type = other DNA
gtaacgagcgcctggaataccctgaagcagttcggtaccaatatggggaccagttcctcaatgacgacgggggca

SEQ ID NO: 631497 - DNA, 75 bp, synthetic construct
  source 1..75: mol_type = other DNA
ctgcacgttaacggaatttgttggcaccgctattggcgacactgtaggtctggtcattgcaaacgttgatagcgc

SEQ ID NO: 631498 - DNA, 75 bp, synthetic construct
  source 1..75: mol_type = other DNA
aaggaactcgccacaacgcgcttgatgatgccattcaccaagccaaatacgtttcagcgatctggaaaaagttag

SEQ ID NO: 631499 - DNA, 75 bp, synthetic construct
  source 1..75: mol_type = other DNA
gccagttatttctattggggcggtattctttgacccgaataccggagaaacaggagaagagttctcggtaaatat

SEQ ID NO: 631500 - DNA, 75 bp, synthetic construct
  source 1..75: mol_type = other DNA
tattgatgaagaacacctttatgatggctcaacaagttatgttgagacttatcataatcatctaatgaatggtgg

SEQ ID NO: 631501 - DNA, 75 bp, synthetic construct
  source 1..75: mol_type = other DNA
ggggttttggatgtccttactggtaaaactattaatgttcaaaagagtcaaacagagttgagtttgaattcgtaa

SEQ ID NO: 631502 - DNA, 75 bp, synthetic construct
  source 1..75: mol_type = other DNA
gagttgaggcggcgataaaaaaataccaatatctttcgcccacagttggtgagattattcggcctttagggcgag

SEQ ID NO: 631503 - DNA, 75 bp, synthetic construct
  source 1..75: mol_type = other DNA
cttcatattcaggatctgcatctcgacttactggcgcgcagggtatttcgcggtggaacgagactggaactaacc

SEQ ID NO: 631504 - DNA, 75 bp, synthetic construct
  source 1..75: mol_type = other DNA
caatggctaaaagtaagatgtggaatgcggtggttgctaatgcaaaagcaaataatatatctaatgagcagtcct

SEQ ID NO: 631505 - DNA, 75 bp, synthetic construct
  source 1..75: mol_type = other DNA
catgcgaggaggcctcacgggatctgaaatcggctctcgcgctggatactcagacaggcggtaaaacctggaact

SEQ ID NO: 631506 - DNA, 75 bp, synthetic construct
  source 1..75: mol_type = other DNA
tttggcattgatgacgccgccttgaagaataacactggtgatgctaccgctactccaccgggaacatctgggaca

SEQ ID NO: 631507 - DNA, 75 bp, synthetic construct
  source 1..75: mol_type = other DNA
tgttgctagctgagcaggctgacgatgctgaactgagggagaccatattcagcagcataccgaaaagtaggctgg

SEQ ID NO: 631508 - DNA, 75 bp, synthetic construct
  source 1..75: mol_type = other DNA
tacgctatatccggtggcgatggcctgggcttgtgagaaagttgaacatcatcaactggtggcgatgaaccaggc

SEQ ID NO: 631509 - DNA, 75 bp, synthetic construct
  source 1..75: mol_type = other DNA
tgggcgcgcgtattggtgcggggccacacattatggccgcggatgaagcagtaaaagccacgaacactgaagtta

SEQ ID NO: 631510 - DNA, 75 bp, synthetic construct
  source 1..75: mol_type = other DNA
tacacccgtgcatggctcagtaatgagcgacccggcctgatgtttgattttgccaccgcctggttgcttcagaat

SEQ ID NO: 631511 - DNA, 75 bp, synthetic construct
  source 1..75: mol_type = other DNA
tgcactgggcctcgtcactaacgcagtggtactgtggaacacactttatatgcaggaagccctgagctggatgcg

SEQ ID NO: 631512 - DNA, 75 bp, synthetic construct
  source 1..75: mol_type = other DNA
aggccctgttacagtcagtggacctgcgtttaatgaggcgctggaacgatatatccgattacgaagtcttgagtt

SEQ ID NO: 631513 - DNA, 75 bp, synthetic construct
  source 1..75: mol_type = other DNA
ttttcagtcctcgttagcgttggcaggatactggggtggcggtgaggtggcctccgctgatggtatgcgttttgt

SEQ ID NO: 631514 - DNA, 75 bp, synthetic construct
  source 1..75: mol_type = other DNA
aagtatccttccctgactgtcagcagcctggaaaaactcgatgagccgcctgcgctgacacagctgagcagccgg

SEQ ID NO: 631515 - DNA, 75 bp, synthetic construct
  source 1..75: mol_type = other DNA
cacgttgccagaggatattttaaaaggggaactgagagctctaaatttaaatataaacaacgaattatctcctta

SEQ ID NO: 631516 - DNA, 75 bp, synthetic construct
  source 1..75: mol_type = other DNA
tcacactgccagaggatattttaaaaggagagctgagagctctaaatttaaatataaacaacgaattatctcctt

SEQ ID NO: 631517 - DNA, 75 bp, synthetic construct
  source 1..75: mol_type = other DNA
caccgcccgcgccagctatgcactggaaaaagcgtttggcgctccactgggacgggcttgcggcgttattgtcgg

SEQ ID NO: 631518 - DNA, 75 bp, synthetic construct
  source 1..75: mol_type = other DNA
attctggatgctctgatgtatctccccgttgagtatgtcgtgacatcgtcctttactgcgatggataagcagtca

SEQ ID NO: 631519 - DNA, 75 bp, synthetic construct
  source 1..75: mol_type = other DNA
ccaaaaacttcttcagggggaggaatggcaggcgcagcgggttccagtctgccgggcattgggtcaccccactaa

SEQ ID NO: 631520 - DNA, 75 bp, synthetic construct
  source 1..75: mol_type = other DNA
aatgatgggcagaccatctctatcgatttgcagaaaatagactcttctgcccttggtttaagtggttttagtgtt

SEQ ID NO: 631521 - DNA, 75 bp, synthetic construct
  source 1..75: mol_type = other DNA
tgtcttcaatccaggacgaaatcaaatcccgcttggctgaaatcgatcgtgtctctggtcagacccagttcaacg

SEQ ID NO: 631522 - DNA, 75 bp, synthetic construct
  source 1..75: mol_type = other DNA
agatgacgctgccggtcaggcgattgctaaccgtttcacctctaacattaaaggcctgactcaggctgcgcgtaa

SEQ ID NO: 631523 - DNA, 75 bp, synthetic construct
  source 1..75: mol_type = other DNA
cactaccaacctgtctgaagcgcagtcccgtattcaggacgctgactatgcgaccgaagtgtccaacatgtcgaa

SEQ ID NO: 631524 - DNA, 75 bp, synthetic construct
  source 1..75: mol_type = other DNA
cagattctaccggtacgccaaaagcattcgtgtctgtccaaggtaaaagctttggcattgatgacgccgccttga

SEQ ID NO: 631525 - DNA, 75 bp, synthetic construct
  source 1..75: mol_type = other DNA
aaagcgaatgctaacatttacactggaacctcttctgcagatccactggctctgctggacaaagctatcgcatct

SEQ ID NO: 631526 - DNA, 75 bp, synthetic construct
  source 1..75: mol_type = other DNA
cattctgacccagcttaatcggggagaaagccgtcatgcagttgccagagccatctgtcacggtcaaaaaggtga

SEQ ID NO: 631527 - DNA, 75 bp, synthetic construct
  source 1..75: mol_type = other DNA
ggtccgttcattgctgaaaagtgaacgtccttccggactgactcaggcaatcattgaagtggggcgcatcaacaa

SEQ ID NO: 631528 - DNA, 75 bp, synthetic construct
  source 1..75: mol_type = other DNA
ccagaaagattgggcagaaaaaacggctccgctcgctgaaggatctggataaatctgcattggcgctcgccagcg

SEQ ID NO: 631529 - DNA, 75 bp, synthetic construct
  source 1..75: mol_type = other DNA
ttccagggtaaaaactacgctacaacggctccagcggcgcttaatgatgacactacggcaacagccacagcgaac

SEQ ID NO: 631530 - DNA, 75 bp, synthetic construct
  source 1..75: mol_type = other DNA
aacaccctggatgcgaaaggggctgccaccgcacagttcgtcgttcaatccggtagtgatttctactccgcgtcc

SEQ ID NO: 631531 - DNA, 75 bp, synthetic construct
  source 1..75: mol_type = other DNA
tgaattcacaacaacaactgcagcggatggcaatgggaatggtgtatattctgcagaaattgatggtaagtcagt

SEQ ID NO: 631532 - DNA, 75 bp, synthetic construct
  source 1..75: mol_type = other DNA
caacggctttaactacttcgataaaattgccttctggaaaacgcctattgcggaagggggaaaatttgttcccta

SEQ ID NO: 631533 - DNA, 75 bp, synthetic construct
  source 1..75: mol_type = other DNA
ggcatccggcgatgcctcgctacgcctgattatggggaaacgcgtacagccgattaacaccgcgctgatccccaa

SEQ ID NO: 631534 - DNA, 75 bp, synthetic construct
  source 1..75: mol_type = other DNA
atgagagagccaagaccccgccataccttgcaggtcattcgagtgccttctctggaggttcaggatctggggctg

SEQ ID NO: 631535 - DNA, 75 bp, synthetic construct
  source 1..75: mol_type = other DNA
atatcgatcaatattttgccaaagccagctacaaatttgatatcgccggtagcccgttaaccaccagctaccagt

SEQ ID NO: 631536 - DNA, 75 bp, synthetic construct
  source 1..75: mol_type = other DNA
gataaacaatacgactgggttacgcaattcgaaaaagaaacaggttgcgcggtaaatgtgaaaaccgccgccact

SEQ ID NO: 631537 - DNA, 75 bp, synthetic construct
  source 1..75: mol_type = other DNA
gcctgtgtgcgctaaccatgactttaatgaccgcccacgccgccgaacccctcactaatttagataaaccggaag

SEQ ID NO: 631538 - DNA, 75 bp, synthetic construct
  source 1..75: mol_type = other DNA
gtgagaaggactcgcgctggtttcacgttactggaaatgctggtggcgatagccatttttgcctcactggcactg

SEQ ID NO: 631539 - DNA, 75 bp, synthetic construct
  source 1..75: mol_type = other DNA
tttaccggcaacctggtcggtactttgctgaccgggtatgtcattaaacgcttcggctttaaccgtagctattat

SEQ ID NO: 631540 - DNA, 75 bp, synthetic construct
  source 1..75: mol_type = other DNA
aatttattgtttatcatgatcgccagcgtatcgtttatctatttgctgatgctgctgcgcaacgccggtcatacg

SEQ ID NO: 631541 - DNA, 75 bp, synthetic construct
  source 1..75: mol_type = other DNA
agttcgacttaaatcttcttgtcatatttgagtgtatttaccagcatttaagcattagcaacgctgctgaatcac

SEQ ID NO: 631542 - DNA, 75 bp, synthetic construct
  source 1..75: mol_type = other DNA
atctggaactgcaaaaatatataacaggagacatgttattgaggaagctcataaagcatctcttgctatgcaaca

SEQ ID NO: 631543 - DNA, 75 bp, synthetic construct
  source 1..75: mol_type = other DNA
cgcataaccctgcattcgccgcaatggggcgaaattgaacgcatctggttgttacgcgggccgcaattatcatga

SEQ ID NO: 631544 - DNA, 75 bp, synthetic construct
  source 1..75: mol_type = other DNA
acagcctggatgcggtctacaccattcaggatggtcgcgccaaaggcacgatgttcaaactgcacttcaccgaat

SEQ ID NO: 631545 - DNA, 75 bp, synthetic construct
  source 1..75: mol_type = other DNA
atctcaatttactgctctgcctgcaattactgatgcaggagcgcagcgtgaccaaagcggcgaagcggatgaacg

SEQ ID NO: 631546 - DNA, 75 bp, synthetic construct
  source 1..75: mol_type = other DNA
ttttaccctgctgtggcataaacggaacagccataatccgaagatcgtctggttacgggaaaccattaaaaatct

SEQ ID NO: 631547 - DNA, 75 bp, synthetic construct
  source 1..75: mol_type = other DNA
aacgccgcgcggtcttaagtttgaactggcggcggagtcgccgctgatgatgatcatgtttaacgcgttatcgaa

SEQ ID NO: 631548 - DNA, 75 bp, synthetic construct
  source 1..75: mol_type = other DNA
aagcgggccagagcaccagaaattattcctgtttctgtgtctggtgcccccggtatggatgatggcagaccattg

SEQ ID NO: 631549 - DNA, 75 bp, synthetic construct
  source 1..75: mol_type = other DNA
atgaccaggatgcgatggacgcttgaccagaaaaaacatcacgttgctgcatggcgtgccagtggtcttacacgc

SEQ ID NO: 631550 - DNA, 75 bp, synthetic construct
  source 1..75: mol_type = other DNA
cgctggggctgtcgcccacaccgctaatggtcagcatggagcaaaatctggcggaatggatgcaaatgagcaatc

SEQ ID NO: 631551 - DNA, 75 bp, synthetic construct
  source 1..75: mol_type = other DNA
agcattaaggggaggtgaagggaagcttgatcaaaaatcgttcattcggatggtcaggatcgcggatagttttgg

SEQ ID NO: 631552 - DNA, 75 bp, synthetic construct
  source 1..75: mol_type = other DNA
ttgcacaggcctttcgggttttattagagtctaactggtcactacagcgtttgttggctattgatcgtgctgaag

SEQ ID NO: 631553 - DNA, 75 bp, synthetic construct
  source 1..75: mol_type = other DNA
acctttggttaccgggcggctgacgtagtggatttgcgcctcgaaggcacctgggttaaggctgacggtcagcag

SEQ ID NO: 631554 - DNA, 75 bp, synthetic construct
  source 1..75: mol_type = other DNA
tatgccaccgctcgtgcgcttggtctgcgtgccaaaattgatgagcagaccgggtggcacaaaagcctgtccaac

SEQ ID NO: 631555 - DNA, 75 bp, synthetic construct
  source 1..75: mol_type = other DNA
acggcgcaggtgctgacggacacaatggcagaagcgcacatgtgggcagtggacaaaccgctgaacccgtcgctg

SEQ ID NO: 631556 - DNA, 75 bp, synthetic construct
  source 1..75: mol_type = other DNA
ttgtgcgtgtgccgcagggtgaaacggaagacgaaaccacgaccaatatcatcggcgcagtgactgctgaaggta

SEQ ID NO: 631557 - DNA, 75 bp, synthetic construct
  source 1..75: mol_type = other DNA
ggttctggttagtgctggtatccttgggcaatggccaattggtcgtctggcagataaatttggtcgcctgctggt

SEQ ID NO: 631558 - DNA, 75 bp, synthetic construct
  source 1..75: mol_type = other DNA
gctggcaaatggtgaagtttggagatatcgcgaaacatatctctaaacgagtggaaccgagcgagacagaccttg

SEQ ID NO: 631559 - DNA, 75 bp, synthetic construct
  source 1..75: mol_type = other DNA
tcatggtgcgcttgtcaccgtgaccagtgttgaggaaacccgggtggtgtttatgcgggacggctatccgcatcc

SEQ ID NO: 631560 - DNA, 75 bp, synthetic construct
  source 1..75: mol_type = other DNA
tgatccagcagaaaaagtgtatcaaacatcggcaaagagaaactggacctactccattacaattgatgatccgga

SEQ ID NO: 631561 - DNA, 75 bp, synthetic construct
  source 1..75: mol_type = other DNA
tggcacaacaaaaaactaaattattttcatttcaagtagaacccctaaacgccacagtagatccatcagtacaga

SEQ ID NO: 631562 - DNA, 75 bp, synthetic construct
  source 1..75: mol_type = other DNA
aaggtgacgttctggtttcaattactgctgatttaggactagtttcaattatagaaaaagatttccctatagcat

SEQ ID NO: 631563 - DNA, 75 bp, synthetic construct
  source 1..75: mol_type = other DNA
cgataaaatggaaagttcttgctgaacagaaatttccattaccagataaggaagagcaaaagcgtattgttagta

SEQ ID NO: 631564 - DNA, 75 bp, synthetic construct
  source 1..75: mol_type = other DNA
caaaaggtttacaggatgcgggcgttgacgtgctggatattggtatgtccggcaccgaagagatctatttcgcca

SEQ ID NO: 631565 - DNA, 75 bp, synthetic construct
  source 1..75: mol_type = other DNA
cctatgatattcgcgggaaattaggcgaagaactgaatgaagatattgcctggcgcattggtcgtgcctatggcg

SEQ ID NO: 631566 - DNA, 75 bp, synthetic construct
  source 1..75: mol_type = other DNA
acttcctcccgttgatgaaaccaaacgcggtcgctatcagcaaatcaatctgcgtgacgcttacgttgatcacct

SEQ ID NO: 631567 - DNA, 75 bp, synthetic construct
  source 1..75: mol_type = other DNA
atgaagctgcgtctggttgtcagggtaaaaaaagcctcgtacaccccgtatgttgtctggtctgaaagctgcccg

SEQ ID NO: 631568 - DNA, 75 bp, synthetic construct
  source 1..75: mol_type = other DNA
ccgctggcggtggctgccgcgcacgcggtgctcaatattatcgacaaagaatcactctgcgaacgcgcgaatcaa

SEQ ID NO: 631569 - DNA, 75 bp, synthetic construct
  source 1..75: mol_type = other DNA
gtcgtctttctgctaccccacgcggggttggcgtgatgtgtaacttcttcgcccagtcggcagaaaacgctacgc

SEQ ID NO: 631570 - DNA, 75 bp, synthetic construct
  source 1..75: mol_type = other DNA
cgttactggaaatgctggtggcaatcgccatttttgcctcactggcgctgatggcgcagcaggtgacaaacggcg

SEQ ID NO: 631571 - DNA, 75 bp, synthetic construct
  source 1..75: mol_type = other DNA
agcctgggaagcgcctcacccgcttgaacgcgcgttgcgtgccctggtagtccgccaccaggcgctgacagatat

SEQ ID NO: 631572 - DNA, 75 bp, synthetic construct
  source 1..75: mol_type = other DNA
ttcgcagggcgttgtatatgcccgcaatggtagccaccagtaagactgagtggggaacgggcgttccgcgaccgt

SEQ ID NO: 631573 - DNA, 75 bp, synthetic construct
  source 1..75: mol_type = other DNA
gcactacacgctggcgttgactggcaaggtgaatccgtactctgcggggatgggactgatgccggggcatgttta

SEQ ID NO: 631574 - DNA, 75 bp, synthetic construct
  source 1..75: mol_type = other DNA
caggcgcggcttggcgtgaatggctgcattatctcaggaatcgttctgggatctctatatggcctgatgccgctg

SEQ ID NO: 631575 - DNA, 75 bp, synthetic construct
  source 1..75: mol_type = other DNA
gcgtatcgtttatctatttgctgatgctgatgctgctgcgcaacgccggtcatacgccgaaacccgttgctcacg

SEQ ID NO: 631576 - DNA, 75 bp, synthetic construct
  source 1..75: mol_type = other DNA
gcgctggcgtgctggcgtctgagagtgaagggatgcgctttgtgcgtggcggcgtggttaatccgttgatgcgcc

SEQ ID NO: 631577 - DNA, 75 bp, synthetic construct
  source 1..75: mol_type = other DNA
aaatatcaatattgatgaaagaatccagaagaagctgtttcttgctcctcatgaaattgaggatttgattgaatt

SEQ ID NO: 631578 - DNA, 75 bp, synthetic construct
  source 1..75: mol_type = other DNA
acttttgaatctgcgaattggtgatatagattttgcagaatcgacaattgcaataagaagaagagcaaatgataa

SEQ ID NO: 631579 - DNA, 75 bp, synthetic construct
  source 1..75: mol_type = other DNA
atggcgcagcaggtgactaacggcgtcacgcgcgtgaatagcgccgtcgccgatcacgatcaaaaactaaacctc

SEQ ID NO: 631580 - DNA, 75 bp, synthetic construct
  source 1..75: mol_type = other DNA
gtaccgctcaccattgaagataatcagatccgtcagggtctggagatcatcgatcagtgttttgatgaggcgaaa

SEQ ID NO: 631581 - DNA, 75 bp, synthetic construct
  source 1..75: mol_type = other DNA
gggtgtgggacgttgaaggccgtgagtatcttgatttcgcgggcgggattgcagtgctcaacaccgggcacctgc

SEQ ID NO: 631582 - DNA, 75 bp, synthetic construct
  source 1..75: mol_type = other DNA
atgtcaaaaaaccaactaagtattttcgcattacaacagtagctaactatcttgaatggttgtgcaaaatacttc

SEQ ID NO: 631583 - DNA, 75 bp, synthetic construct
  source 1..75: mol_type = other DNA
atgcctgcttgtgaacttcgcccggcaacgcagtacgacaccgacgcggtttacgcgctgatttgtgagctaaaa

SEQ ID NO: 631584 - DNA, 75 bp, synthetic construct
  source 1..75: mol_type = other DNA
gatgacagcaccaaacttagcctgcccctaaaccaacgtaaattagttgcgcggcgtgcattattcgaaatgcgt

SEQ ID NO: 631585 - DNA, 75 bp, synthetic construct
  source 1..75: mol_type = other DNA
atttatccgtgaactaccggaaatcacgtttagtggaaaaattgctctcgaacgggggctggatgttcgttatat

SEQ ID NO: 631586 - DNA, 75 bp, synthetic construct
  source 1..75: mol_type = other DNA
caaaaatatctcgacacctatttcaccgagctgaagtccactactgatcacctccagccactcaccttagatacc

SEQ ID NO: 631587 - DNA, 75 bp, synthetic construct
  source 1..75: mol_type = other DNA
gcggcgtttttgcagcattgaatctgaacctgacgccgtatattttctatagctatcaccagcaagatttcaacg

SEQ ID NO: 631588 - DNA, 75 bp, synthetic construct
  source 1..75: mol_type = other DNA
ttacgcgctgatttgtgagctaaaacaggcggagtttgaccaccacgcgtttcgcgtgggctttaacgccaacct

SEQ ID NO: 631589 - DNA, 75 bp, synthetic construct
  source 1..75: mol_type = other DNA
tgtttatgtttatctggcaagtcaggagtcgagctacgtcaccgcagaagtgcacggcgtatgcggcggcgaaca

SEQ ID NO: 631590 - DNA, 75 bp, synthetic construct
  source 1..75: mol_type = other DNA
aacccaggaagcgatccccctgctaccgaaaggtgcaagtatcatcaccacttcgtcaaccaggcttcaggtgcc

SEQ ID NO: 631591 - DNA, 75 bp, synthetic construct
  source 1..75: mol_type = other DNA
agtgtatgtttatctggcaagtcaggagtcgagctatgtcactgcagaagtacacggcgtgtgcggcggcgaaca

SEQ ID NO: 631592 - DNA, 75 bp, synthetic construct
  source 1..75: mol_type = other DNA
ggcggcaaactgaatgaagtcacgaaagaagacctgattaaactggtcgagtttgataacaaagaatatctctat

SEQ ID NO: 631593 - DNA, 75 bp, synthetic construct
  source 1..75: mol_type = other DNA
atgggattcctgctggtatgtatgggcgtgcagtttattattaacggcatcctggaaatcattaaaacgtatcat

SEQ ID NO: 631594 - DNA, 75 bp, synthetic construct
  source 1..75: mol_type = other DNA
atgcaacataatattcatagtgattatttcaagtggtggtgcggaacagtaatcattggagcaatccctatcttt

SEQ ID NO: 631595 - DNA, 75 bp, synthetic construct
  source 1..75: mol_type = other DNA
tgctgacgctggcgaagcgtctcaatatgctgacagttgctgaaggggttgaaacgccggaacaggcacgctggt

SEQ ID NO: 631596 - DNA, 75 bp, synthetic construct
  source 1..75: mol_type = other DNA
gcgcaactgaatctgactgatgatatacgtctctggcaggaagaagatgtgctctacgccctgaccgtatttaac

SEQ ID NO: 631597 - DNA, 75 bp, synthetic construct
  source 1..75: mol_type = other DNA
tgcaagggccgcgttctgccccggaattgcgccagcgtctggcaatcagtcaggcgacgttctcacgccttgttg

SEQ ID NO: 631598 - DNA, 75 bp, synthetic construct
  source 1..75: mol_type = other DNA
tgcaaaacaaacagcagattaataccaatactattgatttacgctataaagatatcccgttatgggataaagcga

SEQ ID NO: 631599 - DNA, 75 bp, synthetic construct
  source 1..75: mol_type = other DNA
ttgggtctatgccgccagccagattttgttgctcgactccctgaacgcgcctggctttatctcattgaataacca

SEQ ID NO: 631600 - DNA, 75 bp, synthetic construct
  source 1..75: mol_type = other DNA
cagtgccaccgttatgcgcgacgggcaggtggctggcgatgtgatgctcgaaaacacttccacgcatcatattgt

SEQ ID NO: 631601 - DNA, 75 bp, synthetic construct
  source 1..75: mol_type = other DNA
gcggcagggagtgccaggtgcgcatctatggtgtctgcaatcacaatcctgaaactacagtgcttgctcattatc

SEQ ID NO: 631602 - DNA, 75 bp, synthetic construct
  source 1..75: mol_type = other DNA
cggccaatatcaatattccggtgcgttacagcgatccgggcagtatcgccaatatccggcaggtgctggcgtata

SEQ ID NO: 631603 - DNA, 75 bp, synthetic construct
  source 1..75: mol_type = other DNA
tgaccaaaattcagcaaaagcatggcctgctgctctacggctgcaacgaggtccctgcacgcccattaacaggga

SEQ ID NO: 631604 - DNA, 75 bp, synthetic construct
  source 1..75: mol_type = other DNA
aagaagagcaaaaagacgggctgtgtgcctacggttgcagtgaagttcctgagcgtcctgctgcagggcgtcctc

SEQ ID NO: 631605 - DNA, 75 bp, synthetic construct
  source 1..75: mol_type = other DNA
cgccacgacgcgcaccgtttctatctgcgcgaaggctacgagcagagccacttccgcttcacgaaggcgctgtaa

SEQ ID NO: 631606 - DNA, 75 bp, synthetic construct
  source 1..75: mol_type = other DNA
taataaaaaaaaaggtatcagtagagttattaaaaaaaagatattttgagttttcaagaaaagagtttttacatt

SEQ ID NO: 631607 - DNA, 75 bp, synthetic construct
  source 1..75: mol_type = other DNA
ttctccgttatttactactgggttcagaaaatatttgggagagtattgtttagatatattgcttcagaaagattt

SEQ ID NO: 631608 - DNA, 75 bp, synthetic construct
  source 1..75: mol_type = other DNA
cagcactgcaaatttccggtggacagacgcaggataagatcccgcagtttggtcagcaaacaccaatgaaacgtg

SEQ ID NO: 631609 - DNA, 75 bp, synthetic construct
  source 1..75: mol_type = other DNA
tgtctacgtcacaacccagcaactccaccggctcagtgttgttcagggtatgctgaagcacattgatttttcgac

SEQ ID NO: 631610 - DNA, 75 bp, synthetic construct
  source 1..75: mol_type = other DNA
gccctgacatgatcaaaatgttgcggggacggatctccggtgcgcagttcatcaggaatcttgccgtggcatctt

SEQ ID NO: 631611 - DNA, 75 bp, synthetic construct
  source 1..75: mol_type = other DNA
tggcacatcctcaggtgaaaggacgtcgggtttatggacaggttgggttcaactttgcggcgcatgcgcggggga

SEQ ID NO: 631612 - DNA, 75 bp, synthetic construct
  source 1..75: mol_type = other DNA
tccggtgcgcagttcatcaggaatcttgccgtggcatcttcctgtgtggcaggtggtgctgtcgggtcagtggcg

SEQ ID NO: 631613 - DNA, 75 bp, synthetic construct
  source 1..75: mol_type = other DNA
tacgcctcctgaatctatctatcctgactttcgctaccgcgccgccgatccgagtggcattgttgagaatgaagt

SEQ ID NO: 631614 - DNA, 75 bp, synthetic construct
  source 1..75: mol_type = other DNA
tgaatacacagggagtcccttcgggaacactggaaaaatatgctgcacacacggctgatacccccttacatctcg

SEQ ID NO: 631615 - DNA, 75 bp, synthetic construct
  source 1..75: mol_type = other DNA
cactggccaggtacgccggcacagcgtatcaatacactgaccgatcataccgatctgatgaccacgctgatgcag

SEQ ID NO: 631616 - DNA, 75 bp, synthetic construct
  source 1..75: mol_type = other DNA
ttccgtacagtatccgttaagcgaactgcgctaccgcgatatgggcaccgggcaaaacgtcttgctgattactgt

SEQ ID NO: 631617 - DNA, 75 bp, synthetic construct
  source 1..75: mol_type = other DNA
tgttctatggcatctcgccaagctatatggacggcattctgtcgactcgtacgcctgcagcgttgattaccgcgc

SEQ ID NO: 631618 - DNA, 75 bp, synthetic construct
  source 1..75: mol_type = other DNA
cgatctgatgaccacgctgatgcaacgtctgctacacgtcagcacaccggcgagcgaatattcgcaaggtcagga

SEQ ID NO: 631619 - DNA, 75 bp, synthetic construct
  source 1..75: mol_type = other DNA
agctgcgcagcctgacgcgtcgtcggcgcttcgcgcgtccgctggccgcattcttatttatcgcctttatcgcct

SEQ ID NO: 631620 - DNA, 75 bp, synthetic construct
  source 1..75: mol_type = other DNA
tttgttcaaccctcaacgccgtcattactgggttactgctgcggataacgatacgctggcaattaccaccccgaa

SEQ ID NO: 631621 - DNA, 75 bp, synthetic construct
  source 1..75: mol_type = other DNA
ctggtttttgcattttcatggcggcggcagcatgtgtgataatttattgataattaaaagttatttctgttttca

SEQ ID NO: 631622 - DNA, 75 bp, synthetic construct
  source 1..75: mol_type = other DNA
agcgttaagtggctatttaaaagtgatggtcaggctcagctatttgaagcttggttccgcgagactatcaccgac

SEQ ID NO: 631623 - DNA, 75 bp, synthetic construct
  source 1..75: mol_type = other DNA
ttataagtgccgtttcgtcgatatttatgaaggtccgaccccggtaaaaccgggaaagtggatgtttactgccac

SEQ ID NO: 631624 - DNA, 75 bp, synthetic construct
  source 1..75: mol_type = other DNA
attatcttcctgttcccctttatgatggttatgggtttaaacctgtatcaccgttattaagaactgaaatgctaa

SEQ ID NO: 631625 - DNA, 75 bp, synthetic construct
  source 1..75: mol_type = other DNA
tagtcattataataaatcttcatctataaacttcagtttatcccaaaaattaagtgataaattaggtagcgtgta

SEQ ID NO: 631626 - DNA, 75 bp, synthetic construct
  source 1..75: mol_type = other DNA
agaaaatgcaaatctgaatttaacttgggtgaggtgaatagtacttaccttaagaaaatacatttgacctgtaat

SEQ ID NO: 631627 - DNA, 75 bp, synthetic construct
  source 1..75: mol_type = other DNA
cgctggggcttactttctttcttgccgggtgtgaagaagttaaatctgtagattggtggcaggatcaccctgacg

SEQ ID NO: 631628 - DNA, 75 bp, synthetic construct
  source 1..75: mol_type = other DNA
agatcgcgtgggagctggatgatggttctcgcatggtgttgaaggcagaaaaacaggaggcaaccagtgagcaag

SEQ ID NO: 631629 - DNA, 75 bp, synthetic construct
  source 1..75: mol_type = other DNA
tccactgggaccatttggtgcactgacagggcgtgtggttggcggtgttctggggggaatgattgcctccgctgt

SEQ ID NO: 631630 - DNA, 75 bp, synthetic construct
  source 1..75: mol_type = other DNA
atgctgaagcacattgatttttcgactgccagcccgactgtccgactggctcttcagaaggggaccggtgcagga

SEQ ID NO: 631631 - DNA, 75 bp, synthetic construct
  source 1..75: mol_type = other DNA
tatcgacatgtacgtttgccggttcgtcgatatttatgaagggccgaccattgagggggggaattactggcgata

SEQ ID NO: 631632 - DNA, 75 bp, synthetic construct
  source 1..75: mol_type = other DNA
gtgaaattaattgggagctggatgatggttcgcgcatggtgttgaaggcagaaaaacaggaggcaaccaatgagc

SEQ ID NO: 631633 - DNA, 75 bp, synthetic construct
  source 1..75: mol_type = other DNA
ttggttttttaccgctatcaaaaaccatcgtgttggcaaaaatgcgtgacttaggggatggaacaaaacgtcgtg

SEQ ID NO: 631634 - DNA, 75 bp, synthetic construct
  source 1..75: mol_type = other DNA
caccctccgccgggattttcgtgagcgactgatgtacctggacctggaatatcgcgatggcacctgtcgtctgct

SEQ ID NO: 631635 - DNA, 75 bp, synthetic construct
  source 1..75: mol_type = other DNA
gcgcgtcgcagaagtcattgatattccgttctgcgtggcgggcgggattaagtctgcagaagatgcggcgaaaat

SEQ ID NO: 631636 - DNA, 75 bp, synthetic construct
  source 1..75: mol_type = other DNA
ctcaatatgatgaaccaggacggcgtgcgtaacggctacgacctggagcagttgaaaaaagtgcgcgatgtttgc

SEQ ID NO: 631637 - DNA, 75 bp, synthetic construct
  source 1..75: mol_type = other DNA
gtatatggccctgcgaatgatgcgctatgttctggcggtgatacatcgccacctgaaagcacatgcgtgtgctcc

SEQ ID NO: 631638 - DNA, 75 bp, synthetic construct
  source 1..75: mol_type = other DNA
ccgaccacgtttgtggatccggatcttcgccagtttgcctgtgatgttctgtggagtatgaaaaccacagatggc

SEQ ID NO: 631639 - DNA, 75 bp, synthetic construct
  source 1..75: mol_type = other DNA
cgacggagtttggggtctcggagcgtaccctgcatcgtgatttccgcgagcgtctgatttatctcgacctcgaat

SEQ ID NO: 631640 - DNA, 75 bp, synthetic construct
  source 1..75: mol_type = other DNA
catgaaatcattggcgatatcgtgccgctggcaaaacgctacgccgaagaaggtgcagacgaactggtgttctac

SEQ ID NO: 631641 - DNA, 75 bp, synthetic construct
  source 1..75: mol_type = other DNA
atgacacagacagaacgccgccatgaccggctggctgtcaggctgtcactgataatcagccgtctggttgcgggt

SEQ ID NO: 631642 - DNA, 75 bp, synthetic construct
  source 1..75: mol_type = other DNA
tcgtcacgcttcatcccgacagttttacccccgacgccacggtgcgcgacatcctttcccgtccggattttttac

SEQ ID NO: 631643 - DNA, 75 bp, synthetic construct
  source 1..75: mol_type = other DNA
cgaagccttccgggatgccgacgttgacggcgcgcttgccgcctccgtcttccacaaacaaattatcaatattgg

SEQ ID NO: 631644 - DNA, 75 bp, synthetic construct
  source 1..75: mol_type = other DNA
cactggactgggtgcaggaggtccaaaaacgcggcgcgggcgaaatcgtcctgaacatgatgaaccaggacggcg

SEQ ID NO: 631645 - DNA, 75 bp, synthetic construct
  source 1..75: mol_type = other DNA
cacgtcccgctgattgcctccggtggcgcgggcaccatggaacacttcctggaagccttccgcgatgccgacgtt

SEQ ID NO: 631646 - DNA, 75 bp, synthetic construct
  source 1..75: mol_type = other DNA
cagatggctgcgctgatgcttatgatgaagctccggcagaagaaagtggatctgatggttcatcttgactttttg

SEQ ID NO: 631647 - DNA, 75 bp, synthetic construct
  source 1..75: mol_type = other DNA
actggatgtttaagccgggagccatgaaacaggtggcggaatatgcagatggtattggtccggattaccatatgt

SEQ ID NO: 631648 - DNA, 75 bp, synthetic construct
  source 1..75: mol_type = other DNA
tgtataacaaagcgggtgtaaatgggctgtttactgatttccctgataaggcagtaaaattccttaataaagagt

SEQ ID NO: 631649 - DNA, 75 bp, synthetic construct
  source 1..75: mol_type = other DNA
gcggatagcaacgaaaaaatagtcatcgcccatcgcggtgccagtggatatttgccggagcatacgctgccagca

SEQ ID NO: 631650 - DNA, 75 bp, synthetic construct
  source 1..75: mol_type = other DNA
cgtcttgacgactggcttacgcaagcgccagacggcgtggtgttattaagcagtgacccgaaacgcacgccagaa

SEQ ID NO: 631651 - DNA, 75 bp, synthetic construct
  source 1..75: mol_type = other DNA
cgttgtggcaacgaatgctggcgcgcggctggacgccggtcagtgaatcccgtcttgacgactggcttacgcaag

SEQ ID NO: 631652 - DNA, 75 bp, synthetic construct
  source 1..75: mol_type = other DNA
ggaagctgggttaattacagctatgactggatgttcaagccgggcgccatgaaacaggtagcggaatatgctgat

SEQ ID NO: 631653 - DNA, 75 bp, synthetic construct
  source 1..75: mol_type = other DNA
cagaaagaaatgactttgcaactttctgagctttcggaaaagctggcaaaagacaccgttagtttaggagagacg

SEQ ID NO: 631654 - DNA, 75 bp, synthetic construct
  source 1..75: mol_type = other DNA
cttccccttgagcgattacctgaattacttggcaaaataaatgattaccactataagatgaatggacggttatta

SEQ ID NO: 631655 - DNA, 75 bp, synthetic construct
  source 1..75: mol_type = other DNA
gaccattagcaataggcgttgttggtcaatctaagggtatctatcctgcaaatatcaatgatgcactggcacatg

SEQ ID NO: 631656 - DNA, 75 bp, synthetic construct
  source 1..75: mol_type = other DNA
caaaagaaaatcctgaatacctatactgcgccccaggcgaaagaaaaatcagtcaaacattgtggcggctgtaaa

SEQ ID NO: 631657 - DNA, 75 bp, synthetic construct
  source 1..75: mol_type = other DNA
catttgctgatgaatatgtttgcactcctggtggtgggggcagtggcggaacggatactggggaaatggcgactc

SEQ ID NO: 631658 - DNA, 75 bp, synthetic construct
  source 1..75: mol_type = other DNA
acattatccgctccggtaagtcgtgaacaggccagtggtgatttgctcgctgagattgccgatatccatgatatg

SEQ ID NO: 631659 - DNA, 75 bp, synthetic construct
  source 1..75: mol_type = other DNA
gtgtttcctctgaacgatatccatgcggttaccttgcacccggaactgttcgtacccgatcttcagattcgtaac

SEQ ID NO: 631660 - DNA, 75 bp, synthetic construct
  source 1..75: mol_type = other DNA
atgagttagctcttgaaaaggttcgctcagacaatttcagagataaggtttcccgcctaaccggaatatacctat

SEQ ID NO: 631661 - DNA, 75 bp, synthetic construct
  source 1..75: mol_type = other DNA
atggaacagagaaaactatatgcttacttaaatttaaataatccaattgttgcctgggaggttgcaataggaaga

SEQ ID NO: 631662 - DNA, 75 bp, synthetic construct
  source 1..75: mol_type = other DNA
tgacccgttatgcgacggtgcttaatcgggttttgccagtgccgacgcaagttgccagtgggcaatgtgtagagg

SEQ ID NO: 631663 - DNA, 75 bp, synthetic construct
  source 1..75: mol_type = other DNA
gttaagctggcatacgaacgaaagcgtgaaaataactggtcagtgctggaagcagctgaattcatcgaggcgcat

SEQ ID NO: 631664 - DNA, 75 bp, synthetic construct
  source 1..75: mol_type = other DNA
cctttttcagtgtcctccctgttttttactgggttttcaagattttgtttgatcgcctgcgctttatgtgtaccc

SEQ ID NO: 631665 - DNA, 75 bp, synthetic construct
  source 1..75: mol_type = other DNA
gacatcgtcctgataaacgcagtacccgtgcgcagcgcgatgactggctgaagaaagagatactgcgcgtatacg

SEQ ID NO: 631666 - DNA, 75 bp, synthetic construct
  source 1..75: mol_type = other DNA
gtggtcgggaatgccaggtaagaatccctggcgtatgtaatggcaattctgagacgtctgtactggcacatatcc

SEQ ID NO: 631667 - DNA, 75 bp, synthetic construct
  source 1..75: mol_type = other DNA
gttgatattgcgccggttgcccctcaggaaattgtggatcaggccgtgctggaagtccgtgcgttacgccataag

SEQ ID NO: 631668 - DNA, 75 bp, synthetic construct
  source 1..75: mol_type = other DNA
atcacgcgccccgattacggcgacatgctgaaacgcggcattggctatacgccagaaaaccgcaaagaagcgggg

SEQ ID NO: 631669 - DNA, 75 bp, synthetic construct
  source 1..75: mol_type = other DNA
taaattaaataatgcgctttataatggcatcattgattacaatcgtggcgctggtcgccgtggccctgctggtgc

SEQ ID NO: 631670 - DNA, 75 bp, synthetic construct
  source 1..75: mol_type = other DNA
attgatttttcgacggccagcccgactgtccggcaggcgcttcagaaggggaccggtgcaggaaatatcagtgcc

SEQ ID NO: 631671 - DNA, 75 bp, synthetic construct
  source 1..75: mol_type = other DNA
cctgacatgatcaaaatgttgcggggacggatctccggtacgcagttcatcaggaatcttgccgtggcatcttcc

SEQ ID NO: 631672 - DNA, 75 bp, synthetic construct
  source 1..75: mol_type = other DNA
gcattgttaagctggcatacgaacgaaagcgtgaaaacaactggtcagtgctggaggcagctgaattcatcgagg

SEQ ID NO: 631673 - DNA, 75 bp, synthetic construct
  source 1..75: mol_type = other DNA
ttttgtgaacatttcacgctgacaggccggatggatgagctacccaatctgatcgccaaaaaacaggcgttacag

SEQ ID NO: 631674 - DNA, 75 bp, synthetic construct
  source 1..75: mol_type = other DNA
attccccggcacaacatcaatacctttcttgccattgcggaaatctctgaccacttacaggcaatgctgatgggg

SEQ ID NO: 631675 - DNA, 75 bp, synthetic construct
  source 1..75: mol_type = other DNA
atatcaattactggaggaggatggcacctcgacgcggatgcgtacccacattccccggcacaacatcaatacctt

SEQ ID NO: 631676 - DNA, 75 bp, synthetic construct
  source 1..75: mol_type = other DNA
aaccttcacaccagacggacatttcacccgcatcctgtcacgcccggattttttacaggcgttacctcattttca

SEQ ID NO: 631677 - DNA, 75 bp, synthetic construct
  source 1..75: mol_type = other DNA
cgctggggaaatcgtttatctcccaagcggaagaatccattgaagaaacccagggcgtgcgcatgctggaacagc

SEQ ID NO: 631678 - DNA, 75 bp, synthetic construct
  source 1..75: mol_type = other DNA
tgaacagccgttcaaagttgctcgaggaatctttatggatttatggcggctcgcgaatgacgaaagttgtctgcg

SEQ ID NO: 631679 - DNA, 75 bp, synthetic construct
  source 1..75: mol_type = other DNA
aagttcccgtatgtcggaaccacctatcgtctgaccgagcatttccactactggaccaaacacgcgctgttgaac

SEQ ID NO: 631680 - DNA, 75 bp, synthetic construct
  source 1..75: mol_type = other DNA
tggcgctccatcacttgaagatctggataaaatcgcgcgagaacgggccgccagccgccgcgctgatgccgcatt

SEQ ID NO: 631681 - DNA, 75 bp, synthetic construct
  source 1..75: mol_type = other DNA
ggtgatcacattgcggctgaaatagcggaaaaacaaagggttaatgccgttgtcagtgccgcagtcgagaatgcg

SEQ ID NO: 631682 - DNA, 75 bp, synthetic construct
  source 1..75: mol_type = other DNA
atgaccaaccactgggtcgacatcaagaacgccaacctcgtcgtggtgatgggcggtaatgccgctgaagctcac

SEQ ID NO: 631683 - DNA, 75 bp, synthetic construct
  source 1..75: mol_type = other DNA
agtggcgatggagagcaacggtaaggcgctggccgatattaccgatccggcaaccggtgcggttatcgtcaagaa

SEQ ID NO: 631684 - DNA, 75 bp, synthetic construct
  source 1..75: mol_type = other DNA
cgtgaggattacggctttgaagatggtctgttcaccggctacgacgcggaaaaacgccagtacgataaatccacc

SEQ ID NO: 631685 - DNA, 75 bp, synthetic construct
  source 1..75: mol_type = other DNA
acgtctggagattgcactaaaaatcgttcgtcacgccgacggcaccgaatctgccagcgaacagctatatcaagt

SEQ ID NO: 631686 - DNA, 75 bp, synthetic construct
  source 1..75: mol_type = other DNA
ttgacggagaaagctggtcagcgattgttgattcactgccttcaattgcgcgacatgcacagcaaaaacgcatca

SEQ ID NO: 631687 - DNA, 75 bp, synthetic construct
  source 1..75: mol_type = other DNA
gaatcgctgcgccgtcctgtgcgctaaccttggcggcgacacagacaccatcggtgctatggcgacggcaatttg

SEQ ID NO: 631688 - DNA, 75 bp, synthetic construct
  source 1..75: mol_type = other DNA
tggatgcggtaaatcagcttgatttcaaccgctatgccacagcgctggcgaaatatcgtcaacaacgggaggcgg

SEQ ID NO: 631689 - DNA, 75 bp, synthetic construct
  source 1..75: mol_type = other DNA
ctctttacgggcaggcgttaggggatgcgatggggatgccgtccgagctttggccacgctcccgcgtcaaagcac

SEQ ID NO: 631690 - DNA, 75 bp, synthetic construct
  source 1..75: mol_type = other DNA
tggatgcggtaaatcagcttgatttcaaccgctatgccacagcgctggcgaagtatcgccaacaacgggaggtgg

SEQ ID NO: 631691 - DNA, 75 bp, synthetic construct
  source 1..75: mol_type = other DNA
cgctttgccgataagctgccgtcagagccacgggaaaatatcgtttatcagtgctgggagcgtttttgccaggag

SEQ ID NO: 631692 - DNA, 75 bp, synthetic construct
  source 1..75: mol_type = other DNA
gtaaacgcagaccatatgaagtattaacagaggtattagatgggaaacagattcctgtactggatggatttgatt

SEQ ID NO: 631693 - DNA, 75 bp, synthetic construct
  source 1..75: mol_type = other DNA
ggtcgcttatatggggatattctgccgtcagttagcgccgcagttaccggatatgcagcaaacgctgctggataa

SEQ ID NO: 631694 - DNA, 75 bp, synthetic construct
  source 1..75: mol_type = other DNA
gatttagacggaatcaacttattttacgtgattatatattgttgcaattaggtaaagagctcacaagggtaggtc

SEQ ID NO: 631695 - DNA, 75 bp, synthetic construct
  source 1..75: mol_type = other DNA
gtaaacaggaagaattaccgggactcgatccggaacagtttcaccccatcagtgatgctgtcgcccagtatcagg

SEQ ID NO: 631696 - DNA, 75 bp, synthetic construct
  source 1..75: mol_type = other DNA
gaaatcggcgcggtagcgagcggtatctccggctccggcccgaccttgttcgctctgtgtgacaagccggatacc

SEQ ID NO: 631697 - DNA, 75 bp, synthetic construct
  source 1..75: mol_type = other DNA
ggccgaacgcttcgacgcgtttaacaaaaacgttcttgggccgacgtcaaaaatagccctcaatgccatccgtga

SEQ ID NO: 631698 - DNA, 75 bp, synthetic construct
  source 1..75: mol_type = other DNA
gaaactggacgactgcacagtttatcgagtggctggattctcagggagcatttaaccatccctactggatgtgca

SEQ ID NO: 631699 - DNA, 75 bp, synthetic construct
  source 1..75: mol_type = other DNA
caggcaggcacggcaggcggtagcggaaattggcgcggtggcgagtggtatctccggctcaggcccgacgttgtt

SEQ ID NO: 631700 - DNA, 75 bp, synthetic construct
  source 1..75: mol_type = other DNA
ccagcctgaacttgccgcgaagctgatgaaagatgttatcgcggaaccgtatcgtgagcgtttgttgccgggctt

SEQ ID NO: 631701 - DNA, 75 bp, synthetic construct
  source 1..75: mol_type = other DNA
aacggctggttcgccgcgcgtccgtcaggcacggaagacgcctataagatctattgtgaaagcttcctcggggaa

SEQ ID NO: 631702 - DNA, 75 bp, synthetic construct
  source 1..75: mol_type = other DNA
aacggctggttcgccgcgcgtccgtcaggcacggaagacgcatacaaaatctactgcgaaagcttcctcggtgaa

SEQ ID NO: 631703 - DNA, 75 bp, synthetic construct
  source 1..75: mol_type = other DNA
gtgctggcagcgaacggcgtagatgttattgtgcaggaaaacaatggcttcaccccgacgcctgccgtttccaat

SEQ ID NO: 631704 - DNA, 75 bp, synthetic construct
  source 1..75: mol_type = other DNA
tatcatgtctagattaagtaagttactattgccttattcccataagctcatatgtacagcacatagcagatatga

SEQ ID NO: 631705 - DNA, 75 bp, synthetic construct
  source 1..75: mol_type = other DNA
aaaaacgtactaggtccgacctcgaagattgctctcaacgccattcgcgacggtaaacccgttgctgaactggaa

SEQ ID NO: 631706 - DNA, 75 bp, synthetic construct
  source 1..75: mol_type = other DNA
gagtccgtgccgtgcgccattgcactggttgaactggcacaaaccgacccaaaccgttgcgccatcctgtgcgct

SEQ ID NO: 631707 - DNA, 75 bp, synthetic construct
  source 1..75: mol_type = other DNA
tgaaagatcacaacgagcaggtcagctttgcgcaagccgtaacccaggggttgggcaaaaatcaggggctgtttt

SEQ ID NO: 631708 - DNA, 75 bp, synthetic construct
  source 1..75: mol_type = other DNA
tgttcggtggtcgcggcgctgatggcgatgaatgaacactgcggcaagccgcttaatgacactcgtttgctggct

SEQ ID NO: 631709 - DNA, 75 bp, synthetic construct
  source 1..75: mol_type = other DNA
gtgctgggagcgtttttgccaggaactgggtaagcaaattccagtggcgatgaccctggaaaagaatatgccgat

SEQ ID NO: 631710 - DNA, 75 bp, synthetic construct
  source 1..75: mol_type = other DNA
cgtgcacagctgttatgggcctgggcacggctggatgaagccgaagcgtcggcgcgtagcgggattgaagtcttg

SEQ ID NO: 631711 - DNA, 75 bp, synthetic construct
  source 1..75: mol_type = other DNA
atgatgagggggattgcgaacatgcctggctcaccgatggacgctctgttctttggtctggcaaagtcctgaaaa

SEQ ID NO: 631712 - DNA, 75 bp, synthetic construct
  source 1..75: mol_type = other DNA
aggaaaatgcacgccaaacagggtgaatggctgcgttataacttaggtgtgggagggtggtcatcggtgaagcaa

SEQ ID NO: 631713 - DNA, 75 bp, synthetic construct
  source 1..75: mol_type = other DNA
cagactttactgtgtccggtgcagagcttctggttcgctggcacatgcctgcaggcgaaatcattccgccggcat

SEQ ID NO: 631714 - DNA, 75 bp, synthetic construct
  source 1..75: mol_type = other DNA
aaagccagctagggcaggggacagttgacgctatgttgcagtacgcaggtacgctcgacgccgggacacaatcca

SEQ ID NO: 631715 - DNA, 75 bp, synthetic construct
  source 1..75: mol_type = other DNA
agctgagagtttgctggattttgcgaggcgctacaatgcgatagtgagaggctggatcgggtgctacggaaagtt

SEQ ID NO: 631716 - DNA, 75 bp, synthetic construct
  source 1..75: mol_type = other DNA
gatgcaacaaggctgaagaacaggttatcggagcgcttctcggaagtcgggctggtcctgaatgcggggaaaacg

SEQ ID NO: 631717 - DNA, 75 bp, synthetic construct
  source 1..75: mol_type = other DNA
aagtctcggtggttattcccgtttataacgagcaggaaagcttaccggaattaatcaggcgcaccaccgcagcct

SEQ ID NO: 631718 - DNA, 75 bp, synthetic construct
  source 1..75: mol_type = other DNA
ggggaaacagcgtgcaggtcggcggcagctatctgggaatgatgtgcggcggcggggtgttcctgatgctgtcgg

SEQ ID NO: 631719 - DNA, 75 bp, synthetic construct
  source 1..75: mol_type = other DNA
gatgtgttatacgcgttcctcggttcagcatttgcaattacgttctctatccttatcacctggctggagaaattc

SEQ ID NO: 631720 - DNA, 75 bp, synthetic construct
  source 1..75: mol_type = other DNA
gctggctgagcgtgagttcactcagatgtgtctggcgctgacagggtatgacagcatacatctggtactggagct

SEQ ID NO: 631721 - DNA, 75 bp, synthetic construct
  source 1..75: mol_type = other DNA
cttggtctaatatccgagacgccattgatgcaaagtttgaaatcactaccacctggatgtattgcgccgatcctg

SEQ ID NO: 631722 - DNA, 75 bp, synthetic construct
  source 1..75: mol_type = other DNA
actggaaacagtttaaaggtaaagtgaaagagcaatggggaaaactgaccgatgatgatatgacgatcattgaag

SEQ ID NO: 631723 - DNA, 75 bp, synthetic construct
  source 1..75: mol_type = other DNA
atgtctgatcagaatgttaatccgtacctttccggtggtgatgctgcaccgcagcaatcgccatacatggccgca

SEQ ID NO: 631724 - DNA, 75 bp, synthetic construct
  source 1..75: mol_type = other DNA
caagaaaaagcgttccagttgattaacgagcagcatctggaacagctgccaatgcatgagtttctggtacgtatt

SEQ ID NO: 631725 - DNA, 75 bp, synthetic construct
  source 1..75: mol_type = other DNA
aaacgggcaaatgcgcctcgaagagattgagcgtcaggggctgtttttacagcggatggatgataccggcgagtg

SEQ ID NO: 631726 - DNA, 75 bp, synthetic construct
  source 1..75: mol_type = other DNA
cgcccagcgcgagcaggcgaaggattatcaggctgaactacgtagcaccctgccgtggattgatgaaggcgcgaa

SEQ ID NO: 631727 - DNA, 75 bp, synthetic construct
  source 1..75: mol_type = other DNA
gcccattgacccaacgcgaatggcaggtactggggctgatttactccggttacagtaacgaacaaattgcgggcg

SEQ ID NO: 631728 - DNA, 75 bp, synthetic construct
  source 1..75: mol_type = other DNA
ccgcaatctgtaccaaaaactcggtgtcgcccaccgtcaggccgcggtacaacacgcgcagaaactgctgaagat

SEQ ID NO: 631729 - DNA, 75 bp, synthetic construct
  source 1..75: mol_type = other DNA
gttcctgcaaaccgcgtgggaaacgcaggaaaaagcgttccagctgatcaacgagcagcatctggaacagctgcc

SEQ ID NO: 631730 - DNA, 75 bp, synthetic construct
  source 1..75: mol_type = other DNA
atccgagtagttttctgctggctccgctgcaaattttgatgatgccgctggtctggttgctgaatgctatcaccc

SEQ ID NO: 631731 - DNA, 75 bp, synthetic construct
  source 1..75: mol_type = other DNA
tcgcaacctgttggtatgtctcatgctgagtttattgcagcgtatgatcagctttcgcagtgggcgcagcaatca

SEQ ID NO: 631732 - DNA, 75 bp, synthetic construct
  source 1..75: mol_type = other DNA
ctgtatctcgatggtggaaaagtcgcctccagtatgcaggaacctacaatgaagtatggcgtgaaaagcgctatc

SEQ ID NO: 631733 - DNA, 75 bp, synthetic construct
  source 1..75: mol_type = other DNA
tttggcaaagatgtctgtagccgtgttgtgactctggaagacagccgcaaagccctggtcgggaatttgaaataa

SEQ ID NO: 631734 - DNA, 75 bp, synthetic construct
  source 1..75: mol_type = other DNA
aagccgcgtagagaaggcacgtgtcgcgctggataagatcatcgttcaggaaatgggcgaaaacagcaaaatgcg

SEQ ID NO: 631735 - DNA, 75 bp, synthetic construct
  source 1..75: mol_type = other DNA
acggtaagcaatattccctgaatgccgcccagcgcgagcaggcgaaggattatcaggctgaactacgcagcacgc

SEQ ID NO: 631736 - DNA, 75 bp, synthetic construct
  source 1..75: mol_type = other DNA
atggaaaacgctaaaatgaattcgctcatcgcccagtatccgttggtagaggatctggttgctcttcaagaaacc

SEQ ID NO: 631737 - DNA, 75 bp, synthetic construct
  source 1..75: mol_type = other DNA
aaaagcacgtggcgggatttatgaagtcctggcccatgctgaaaaactggctctggaagcgggtttgctgacgct

SEQ ID NO: 631738 - DNA, 75 bp, synthetic construct
  source 1..75: mol_type = other DNA
tctccggagtttaaacagttctttagtcaatacagcattgctgtgggctcaaccggaaatctggggttatcaatc

SEQ ID NO: 631739 - DNA, 75 bp, synthetic construct
  source 1..75: mol_type = other DNA
gggagacctgagggaatttgaactggcagacggaaactggctactggacaatgcctggtatgaaagaaacatggc

SEQ ID NO: 631740 - DNA, 75 bp, synthetic construct
  source 1..75: mol_type = other DNA
gtaatccgaaggggattactggtgctttatggcagcgcacatcgacagggtttacaaattttgcctgggtcaata

SEQ ID NO: 631741 - DNA, 75 bp, synthetic construct
  source 1..75: mol_type = other DNA
agcatatcctttctgtcaaagaagctattgctgaactggaggccgtttgccagccgggcagcgtggtggttgaag

SEQ ID NO: 631742 - DNA, 75 bp, synthetic construct
  source 1..75: mol_type = other DNA
agctattttgcggtattggtgcgaaaggtggtcggggagtttattcatgggggatactcttatacgttctcagaa

SEQ ID NO: 631743 - DNA, 75 bp, synthetic construct
  source 1..75: mol_type = other DNA
ctggacgacggtgctacgcaacagtcatttcagctcagcagcccgtcgtgggattatttctgacaaatttgttga

SEQ ID NO: 631744 - DNA, 75 bp, synthetic construct
  source 1..75: mol_type = other DNA
atgttcaggatatgcgggattatcaccatcctctggcaacgaatcatcaaacacaatacggtacagttggacagg

SEQ ID NO: 631745 - DNA, 75 bp, synthetic construct
  source 1..75: mol_type = other DNA
ttgtcgggcgggcaatggagcgtctgctggatggcttctatacccttagcgatcaaaccatgtatgacatgcttg

SEQ ID NO: 631746 - DNA, 75 bp, synthetic construct
  source 1..75: mol_type = other DNA
atgagcgccgggatttaccccctgaaccgccccgggtttcctggagagtgttttatctgtgaactcaggctgcca

SEQ ID NO: 631747 - DNA, 75 bp, synthetic construct
  source 1..75: mol_type = other DNA
ccacctaggtatcgaaactgatattgatccacagcttgtaaaatatgctgtgtcatctggtaatgattgggttat

SEQ ID NO: 631748 - DNA, 75 bp, synthetic construct
  source 1..75: mol_type = other DNA
actgaacgcataacccggttattccatattcgctggctggcaggcgtatttctgacaattgccggaatgatcatc

SEQ ID NO: 631749 - DNA, 75 bp, synthetic construct
  source 1..75: mol_type = other DNA
aaattgccggagcgctggttgaagaagatcgcgtcaaaattctggcaatgattcaggagcaggtgacatggcttg

SEQ ID NO: 631750 - DNA, 75 bp, synthetic construct
  source 1..75: mol_type = other DNA
cagactggtcagcggaacagaaatccagacgaaatattgttcaactgcagtccgtagcgtcggtgcggcattcga

SEQ ID NO: 631751 - DNA, 75 bp, synthetic construct
  source 1..75: mol_type = other DNA
catttcagcactgcagcccgtcgggggattatttctgacagatttgtagaagcaattttgcagttttggcgcgaa

SEQ ID NO: 631752 - DNA, 75 bp, synthetic construct
  source 1..75: mol_type = other DNA
tattgggttaccgcagcggataacgatacgctggcaatcaccacgccaaaaatgacgctggtgctgaacaataat

SEQ ID NO: 631753 - DNA, 75 bp, synthetic construct
  source 1..75: mol_type = other DNA
aagaaacctttgactggtcccacggtcatctgcaggtaccattagtgattcactggcccggcacaccggcgcagc

SEQ ID NO: 631754 - DNA, 75 bp, synthetic construct
  source 1..75: mol_type = other DNA
ggcgatcgcgatgctgccctgcagacagctgctgtccaggcaggaaaaaccttcacccgcacactggctgtctac

SEQ ID NO: 631755 - DNA, 75 bp, synthetic construct
  source 1..75: mol_type = other DNA
cagcaacttcaccggctcagtgttgttcagggtatgctgaagcatattgatttttcgacggccagcccgactgtc

SEQ ID NO: 631756 - DNA, 75 bp, synthetic construct
  source 1..75: mol_type = other DNA
gctcacacctttgactctgtgaaatttattctgaccaccgctctcgccggtggtctgctggctgttcccctgcag

SEQ ID NO: 631757 - DNA, 75 bp, synthetic construct
  source 1..75: mol_type = other DNA
gcaaaacgattacagccttcctgaaacgttgacggagcgcatctggctcacgctcatttcacaacggatttcccg

SEQ ID NO: 631758 - DNA, 75 bp, synthetic construct
  source 1..75: mol_type = other DNA
taatgaccagtgactacgcgtcaccccctcaacactttaatcatatggttgacgcctttcgtagggatctaaggt

SEQ ID NO: 631759 - DNA, 75 bp, synthetic construct
  source 1..75: mol_type = other DNA
ttctgctgatcgcaggatttgccattcttcgccttttgttcagagcattaatcagcacagcttctgcgctggcag

SEQ ID NO: 631760 - DNA, 75 bp, synthetic construct
  source 1..75: mol_type = other DNA
gtacaggaaatatcagtgccctgaacaaagtgatgaagggtacgctggtgacatctctggcactggtagctgtca

SEQ ID NO: 631761 - DNA, 75 bp, synthetic construct
  source 1..75: mol_type = other DNA
gttgtataaagacctgctgacacgcactcaggccgcgctgaaggcaaaccccaaaaacatactactttgtgttgt

SEQ ID NO: 631762 - DNA, 75 bp, synthetic construct
  source 1..75: mol_type = other DNA
atgttagagcaactgaaagccgacgtgctggcggcaaatctggcgcttcccgctcaccatctggtgacgtttacc

SEQ ID NO: 631763 - DNA, 75 bp, synthetic construct
  source 1..75: mol_type = other DNA
cgccagctcgtgccgcagcttcctgccatgcaaaatgaactgctggataagcactatctgcgtaagcacggggct

SEQ ID NO: 631764 - DNA, 75 bp, synthetic construct
  source 1..75: mol_type = other DNA
agagcagttttatccgcctggcgcaccaatcccgtggccatcggataccgttccgtctggttatgccctgatgca

SEQ ID NO: 631765 - DNA, 75 bp, synthetic construct
  source 1..75: mol_type = other DNA
agtgaaagatgtgatgcgctttaatgagccgatgtacaaggtcggggaacagaacagtgtttgtctgtcctgcca

SEQ ID NO: 631766 - DNA, 75 bp, synthetic construct
  source 1..75: mol_type = other DNA
ctgccggggtgctggcgtcgggcctgttgtggagcctgaacggaattaccgctacccctgcggcgcaggcatctg

SEQ ID NO: 631767 - DNA, 75 bp, synthetic construct
  source 1..75: mol_type = other DNA
gaaactttcgaagaacgcggcaggagtccggcacaaatcccggcggtactggtgcattctcacggcccgttcgcc

SEQ ID NO: 631768 - DNA, 75 bp, synthetic construct
  source 1..75: mol_type = other DNA
gtttcggctttggcggcgaagagagcgcgggtgcttccttcctgcgtttcgacggtacgccgtggtcgaccgata

SEQ ID NO: 631769 - DNA, 75 bp, synthetic construct
  source 1..75: mol_type = other DNA
gtggcccgctggcagacggtatcgtgattacaccgtcccataacccgccggaagatggtggtatcaagtacaatc

SEQ ID NO: 631770 - DNA, 75 bp, synthetic construct
  source 1..75: mol_type = other DNA
attgatgccacaccgtgggcgttcagtccgtggatggtgatgcaggcagccaatagtgaagcaagaaaattgttg

SEQ ID NO: 631771 - DNA, 75 bp, synthetic construct
  source 1..75: mol_type = other DNA
gtgttgccgtggcggatcagcttttaccgcgggcagcgaagggacatattcagaaccgcacggagccagccatga

SEQ ID NO: 631772 - DNA, 75 bp, synthetic construct
  source 1..75: mol_type = other DNA
cgcacattctggcgatcgctcaagcgattgccgaagaacgtgcgaaaaacggcatcactggcccttgctatgtgg

SEQ ID NO: 631773 - DNA, 75 bp, synthetic construct
  source 1..75: mol_type = other DNA
aatgataacaacgggactttgtggaggtctgagtactttctctacattttctgttgaagtattggtaatgactcc

SEQ ID NO: 631774 - DNA, 75 bp, synthetic construct
  source 1..75: mol_type = other DNA
gagccgatgtacaacgttggtgagcagaacagtgtttgtatgtcctgccatctgccggaacagttgcaaaaagcg

SEQ ID NO: 631775 - DNA, 75 bp, synthetic construct
  source 1..75: mol_type = other DNA
gtaaactgacggtcagcgatccgttcctcggtcagtaccaacaactggtccgcgacgtggtgattccttatcagt

SEQ ID NO: 631776 - DNA, 75 bp, synthetic construct
  source 1..75: mol_type = other DNA
gcggcattggctcacaaagcagcggcgaagcgttcagcagcgattacgatctgccgaatgacacggtatacgctg

SEQ ID NO: 631777 - DNA, 75 bp, synthetic construct
  source 1..75: mol_type = other DNA
ggcgtcgcacatctggcgcgtttaagtcacgatgaaagcaagcgtcaggactgcctgcggctgtggaacaatatg

SEQ ID NO: 631778 - DNA, 75 bp, synthetic construct
  source 1..75: mol_type = other DNA
ctggggtgtgggtaaaccgttgtacatggatttaattgcccgcacgaaggcggcccttgaaaagaacccgaaaaa

SEQ ID NO: 631779 - DNA, 75 bp, synthetic construct
  source 1..75: mol_type = other DNA
caaactctgacctttatcccgtggtttagctgggccaaccggggtgaaggcgaaatgcggatctgggtgaatgag

SEQ ID NO: 631780 - DNA, 75 bp, synthetic construct
  source 1..75: mol_type = other DNA
attgaatggggaagaggtcgagcaggatattcgtaaagggtatttgcacattacccgcgaatggcaggagggcga

SEQ ID NO: 631781 - DNA, 75 bp, synthetic construct
  source 1..75: mol_type = other DNA
aaagcgggcctgacgctgggcgttgatccgctgggcggttccggtatcgaatactggaagcgtattggcgagtat

SEQ ID NO: 631782 - DNA, 75 bp, synthetic construct
  source 1..75: mol_type = other DNA
tcattgtgcaggaaaacaatggcttcaccccgacgcctgccgtttccaatgccatcctggttcacaataaaaaag

SEQ ID NO: 631783 - DNA, 75 bp, synthetic construct
  source 1..75: mol_type = other DNA
cgccaaatggtggcccggctgataccaacgtcactaaagtggtggaagacagagccaacgcactgatggccgatg

SEQ ID NO: 631784 - DNA, 75 bp, synthetic construct
  source 1..75: mol_type = other DNA
ccgcagaatgccgggatacttttggtgccctgttgccgtggcgggtctggtttaaccgtgggtaatgacggcacg

SEQ ID NO: 631785 - DNA, 75 bp, synthetic construct
  source 1..75: mol_type = other DNA
tcggcaatggctactcttgatcacgtccatcactcgctggataaatccgccgtcaatcgtgccgttgatctcctc

SEQ ID NO: 631786 - DNA, 75 bp, synthetic construct
  source 1..75: mol_type = other DNA
gtcacggtatcgtcactccggcaggtttgatgaatccgaaccactacctggcggtggcgatcaattacctgttcc

SEQ ID NO: 631787 - DNA, 75 bp, synthetic construct
  source 1..75: mol_type = other DNA
ggtattcacccgtgggcggaactgataaacctgatgcgtgggcttgtcgaaccacagcaggagcgtgcctcatga

SEQ ID NO: 631788 - DNA, 75 bp, synthetic construct
  source 1..75: mol_type = other DNA
agatcaaaccgctgatcccgctcggcggctacgtggcaggtgccgacgccagcgtcgacaaagcggtgaaaatgt

SEQ ID NO: 631789 - DNA, 75 bp, synthetic construct
  source 1..75: mol_type = other DNA
tcggcgaaccgctggatggcaaaggccgcctgaacggcaacgaccttctgccgccgctgccgccctcggtcaatc

SEQ ID NO: 631790 - DNA, 75 bp, synthetic construct
  source 1..75: mol_type = other DNA
cccgcctccctcgaactggtgcaaagccgcctgcaaatcctctttcccaacggcaaaaaggcagaagggcaataa

SEQ ID NO: 631791 - DNA, 75 bp, synthetic construct
  source 1..75: mol_type = other DNA
acatgctggtgaaggtgaaaggcacgccgctggcggataacgatgatgtcgatgcctttgattttattcgcacca

SEQ ID NO: 631792 - DNA, 75 bp, synthetic construct
  source 1..75: mol_type = other DNA
atggaagtcgaacaagtgctggaatcggcgcgcaaagcgaaagcggcgggttcgacgcgtttctgtatgggggcg

SEQ ID NO: 631793 - DNA, 75 bp, synthetic construct
  source 1..75: mol_type = other DNA
tttttgcgccaggagatgcgcgaacccgcctccctcgaactggtgcaaagccgcctgcaaatcctctttcccatc

SEQ ID NO: 631794 - DNA, 75 bp, synthetic construct
  source 1..75: mol_type = other DNA
agaagctgaactgcattgatgcggtgatcggcctgcctgccaatatcttctacggcaccagcattccgacctgcg

SEQ ID NO: 631795 - DNA, 75 bp, synthetic construct
  source 1..75: mol_type = other DNA
gggctggtgctgaaagagtggaacaatgcaggtcgccgtccggtaacggtgttgagcctcggttgtgtggtgatt

SEQ ID NO: 631796 - DNA, 75 bp, synthetic construct
  source 1..75: mol_type = other DNA
agagttcaatctgaaaaaaggctggtgctggcggttatgtgcggcattttctctgccgggatgtcctttgcgatg

SEQ ID NO: 631797 - DNA, 75 bp, synthetic construct
  source 1..75: mol_type = other DNA
aattgagcttagtaaagttagcattcgtgcgatgtcgatagctgaaaacttaactaaattattcaggaaaggtct

SEQ ID NO: 631798 - DNA, 75 bp, synthetic construct
  source 1..75: mol_type = other DNA
ccggtaaaaaaggcggctcttcttgagcagcgactgcggcaggatgcggagtccatgatgccccggttgctgtgg

SEQ ID NO: 631799 - DNA, 75 bp, synthetic construct
  source 1..75: mol_type = other DNA
ccctgggcactgactccgcagatgacttcagcaacctgtttgaagacctggatttaggctccagcaaactgggta

SEQ ID NO: 631800 - DNA, 75 bp, synthetic construct
  source 1..75: mol_type = other DNA
ataacgatgatgtcgattcctttgattttattcgcaccattgctgtagcgcgaatcatgatgccgacctcttacg

SEQ ID NO: 631801 - DNA, 75 bp, synthetic construct
  source 1..75: mol_type = other DNA
aaccagcttgcactgtccattaaagccattatgagcaataacgcgctgctgataaaaaataacctcagcgaaatt

SEQ ID NO: 631802 - DNA, 75 bp, synthetic construct
  source 1..75: mol_type = other DNA
ctggtgcgccttaacggcatcctgctggagagcgtcggctgcccgctaatgaccggtcaactgtgccgcatcgaa

SEQ ID NO: 631803 - DNA, 75 bp, synthetic construct
  source 1..75: mol_type = other DNA
cgaccagcaagatccgattgtcgactgcgcccgcgcggtgctggacgggcatatcgtattaacccgcaaactggc

SEQ ID NO: 631804 - DNA, 75 bp, synthetic construct
  source 1..75: mol_type = other DNA
agcgttccggcgataaaatgaccggagaactgaaaattggcacgatgaatgcgctgcgaattttcaatgatgcct

SEQ ID NO: 631805 - DNA, 75 bp, synthetic construct
  source 1..75: mol_type = other DNA
gtgtctcaagctggtaacgccgttcagcgctccggcgataaaatgaccggagaactgaaaattggcacgatgaat

SEQ ID NO: 631806 - DNA, 75 bp, synthetic construct
  source 1..75: mol_type = other DNA
tataacaccgatggaaatatatttggcgggtgttggggttcaaatttagctgattatctcaatagcacatatgta

SEQ ID NO: 631807 - DNA, 75 bp, synthetic construct
  source 1..75: mol_type = other DNA
gaggcgtgtatgacgctgggcacgttgagtgaatctcaagcgcagcgccttgcgaatgccgggttggattactac

SEQ ID NO: 631808 - DNA, 75 bp, synthetic construct
  source 1..75: mol_type = other DNA
ctcgcgctacaaaaccgggctggaagccgagcggttgatggaagttgaacaggtgctggagtcggcgcgcaaagc

SEQ ID NO: 631809 - DNA, 75 bp, synthetic construct
  source 1..75: mol_type = other DNA
gaggcgtgtatgacgctgggcacgttgagtgaatctcaggcgcagcgccttgcgaacgccgggctggattactac

SEQ ID NO: 631810 - DNA, 75 bp, synthetic construct
  source 1..75: mol_type = other DNA
tatcgtcgtcgtcgcgcctgccgatgaatcgccgctgatgcgcctgaaagccaccgaactgtgccactccatcgc

SEQ ID NO: 631811 - DNA, 75 bp, synthetic construct
  source 1..75: mol_type = other DNA
cccgctggctcgcgtcgccggacggctggtgcgcctgaacggcattctgctggagagcgtcggctgcccattaat

SEQ ID NO: 631812 - DNA, 75 bp, synthetic construct
  source 1..75: mol_type = other DNA
tcatcaagaccaactgttgcagagcttggtgatgattcaggctggcatttctatagccagcgaaatacagataac

SEQ ID NO: 631813 - DNA, 75 bp, synthetic construct
  source 1..75: mol_type = other DNA
agcgcaagatgggcattaaagccgaagagttcaacctgaaaaaagggctggtgctggcggtgatgtgcggcattt

SEQ ID NO: 631814 - DNA, 75 bp, synthetic construct
  source 1..75: mol_type = other DNA
gtgccgtttattcagagctgtgcatcgtggccgttaatgatcatgaccgtgatcgtgatgattgtcgggatcgca

SEQ ID NO: 631815 - DNA, 75 bp, synthetic construct
  source 1..75: mol_type = other DNA
gaacatattgaccaccaggagtaccacaaaattctcgcggacactgagcaggaaaagcacctaaaaaaattacga

SEQ ID NO: 631816 - DNA, 75 bp, synthetic construct
  source 1..75: mol_type = other DNA
ggagcttgtccggaagattgcaaatactgcccgcaaagctcgcgttataaaaccggactggaagctgagcggttg

SEQ ID NO: 631817 - DNA, 75 bp, synthetic construct
  source 1..75: mol_type = other DNA
agcaacagaaaataaatggtttttgggcaataatcagtctgtggtgtgcgttagctcgtgtttttacaccgcatt

SEQ ID NO: 631818 - DNA, 75 bp, synthetic construct
  source 1..75: mol_type = other DNA
aactgtataccgacagtgccggttacccgataaaaattattcgctgcataaataacactgtgttgtacagaagaa

SEQ ID NO: 631819 - DNA, 75 bp, synthetic construct
  source 1..75: mol_type = other DNA
aaatattgacctacaaaacattacactggctatttttcagaaactggactatctcactagtaaaaacgctaaata

SEQ ID NO: 631820 - DNA, 75 bp, synthetic construct
  source 1..75: mol_type = other DNA
ggagcgcgctgtttgcctggcattatcggcagcaaaccgatccgctatttccgctgacgctagccgttttatctc

SEQ ID NO: 631821 - DNA, 75 bp, synthetic construct
  source 1..75: mol_type = other DNA
tgggcacgttgattgtccgttccggcattctggtttcggttcatgcgttcgcgctggataacgtccgcgccgtgc

SEQ ID NO: 631822 - DNA, 75 bp, synthetic construct
  source 1..75: mol_type = other DNA
tgcgatctcaattccattctgttcttattaactccggcggaaagccacgagaagctggcacaactggtggcgatg

SEQ ID NO: 631823 - DNA, 75 bp, synthetic construct
  source 1..75: mol_type = other DNA
ccctgacacgccagcgggggattttccgccactggtcgctgttgctggcgatagtaactctgatgctgtcgctgc

SEQ ID NO: 631824 - DNA, 75 bp, synthetic construct
  source 1..75: mol_type = other DNA
atgtacaaagcggtgtgcgctggatctgggggggaggattgttgatgattgcgggcgcattattaagcggatggc

SEQ ID NO: 631825 - DNA, 75 bp, synthetic construct
  source 1..75: mol_type = other DNA
agatatacacggacagagccggataccctgtggtgattactcgcagcactgagcactcagtgttctttcgacgca

SEQ ID NO: 631826 - DNA, 75 bp, synthetic construct
  source 1..75: mol_type = other DNA
tggctgtaattgcttatcgtatttgttttgcaggcgaatcgttactgactcctggacagatgcctgaatggcgag

SEQ ID NO: 631827 - DNA, 75 bp, synthetic construct
  source 1..75: mol_type = other DNA
tacggcagtggaactttgatgccttgggtgtagcaaacgcaatgcaaacattgtgggctgagatagctctgcgtg

SEQ ID NO: 631828 - DNA, 75 bp, synthetic construct
  source 1..75: mol_type = other DNA
gtaggcttaacgccggaaatgttgccgatgattgtcacttcgacgctggcacgtggcgcagtcaagctgtcgaaa

SEQ ID NO: 631829 - DNA, 75 bp, synthetic construct
  source 1..75: mol_type = other DNA
gcaaaacaaattctttcgcgaagggatgaacagcgttggtgtgttaattgagtttcctccacttcctgaacagtt

SEQ ID NO: 631830 - DNA, 75 bp, synthetic construct
  source 1..75: mol_type = other DNA
cacagaacagccatatcctattggtataatcacaatgtatcgtcagcaaaaagaggaaattgacaatgctatcag

SEQ ID NO: 631831 - DNA, 75 bp, synthetic construct
  source 1..75: mol_type = other DNA
ttgcacagcttgagcaaactattaccacagaacagccatatcctattggtataatcacaatgtatcgtcagcaaa

SEQ ID NO: 631832 - DNA, 75 bp, synthetic construct
  source 1..75: mol_type = other DNA
gaataccgacaaattctggcagaaacagaacaggaaactcatctgaaaaaattacgggccatgaaaaggaagtaa

SEQ ID NO: 631833 - DNA, 75 bp, synthetic construct
  source 1..75: mol_type = other DNA
gaacggctcgatcatcaggaatacctacaaattctggcagaaacagagcaggaaactcatctgaagaaattacga

SEQ ID NO: 631834 - DNA, 75 bp, synthetic construct
  source 1..75: mol_type = other DNA
aactgtataccgatagtgctggctacccgataaaaattattcgctgcataaacaacactgtgttgtacagaagaa

SEQ ID NO: 631835 - DNA, 75 bp, synthetic construct
  source 1..75: mol_type = other DNA
attccgcgaggagaataagggacgattgagttacttacgaggtgggcgtaactttgataacgccatgattatgca

SEQ ID NO: 631836 - DNA, 75 bp, synthetic construct
  source 1..75: mol_type = other DNA
ttttccgggacagggaatgcaatgtatgcctatcgaataggtcacgcgccatttaaccctgaatcacgcacgctt

SEQ ID NO: 631837 - DNA, 75 bp, synthetic construct
  source 1..75: mol_type = other DNA
cttgacgcgatatgttttgctttattcggtaaggattacgaaagttctgaccttgatataattgaattcaacaaa

SEQ ID NO: 631838 - DNA, 75 bp, synthetic construct
  source 1..75: mol_type = other DNA
aggcgcgttattatgcaaccggtgccgcaaccccaggtgctgctaatgcggatgcgaccttcaaggttcagtatc

SEQ ID NO: 631839 - DNA, 75 bp, synthetic construct
  source 1..75: mol_type = other DNA
cttatcagccaaccggcgatcagcagaaggacgcaatcgcacaaatcgacatcatgcagagtcgtgctgttcagg

SEQ ID NO: 631840 - DNA, 75 bp, synthetic construct
  source 1..75: mol_type = other DNA
ctggcggtactgcaatcgaaagtgtttgatttcccgtgggagccagactggcgattgtggattgtgctgccgtgc

SEQ ID NO: 631841 - DNA, 75 bp, synthetic construct
  source 1..75: mol_type = other DNA
ccagctctgccgttggttttaacattcagttgaatgattgcgataccactgttgccacaaaagccgctgttgcct

SEQ ID NO: 631842 - DNA, 75 bp, synthetic construct
  source 1..75: mol_type = other DNA
atcgctagtggcaggcccagcagacgcctcgcagtccatccttaagaacaaccagtcatcactgaaaggggactt

SEQ ID NO: 631843 - DNA, 75 bp, synthetic construct
  source 1..75: mol_type = other DNA
tccgatcaaagtttctgaagggatggaatttgtgcaatcaggtactaacgtgccctatataaaaattagcgcaat

SEQ ID NO: 631844 - DNA, 75 bp, synthetic construct
  source 1..75: mol_type = other DNA
ggccgcaattggtgcggaaacggcgctggcagtgttgcaggcgaaagtgtttgattttccgtgggagccagactg

SEQ ID NO: 631845 - DNA, 75 bp, synthetic construct
  source 1..75: mol_type = other DNA
ctgaaagtcggcaagcagctgactttcgccaccatgacatttgcaggcgacacaccgcagctggcgaacgttaaa

SEQ ID NO: 631846 - DNA, 75 bp, synthetic construct
  source 1..75: mol_type = other DNA
tctggccgtggctgtgggcgctcggcaccatgacagtcatctcgctgctggtggggctacgaccgtaccgcctgt

SEQ ID NO: 631847 - DNA, 75 bp, synthetic construct
  source 1..75: mol_type = other DNA
gattaacggcaagccgacagaaggcaatgaagatgaggcgctcaaccgcgaactcaatcttacctggcaaaatac

SEQ ID NO: 631848 - DNA, 75 bp, synthetic construct
  source 1..75: mol_type = other DNA
tatgttgctgttgctggcacaggtgcaggtgggaatgcgtcagcgtcatcaggagctggtggtgtggcgcacact

SEQ ID NO: 631849 - DNA, 75 bp, synthetic construct
  source 1..75: mol_type = other DNA
agcatgctgctttgggcggtgctggcgggcgcggtagtactggctttgctgtgcggtgtgctgggctggatgctg

SEQ ID NO: 631850 - DNA, 75 bp, synthetic construct
  source 1..75: mol_type = other DNA
ctcttatatcaaccatgctacgtcgagtattcatccgattgtggcgaaagtagagatacgcaaagagggcaaaac

SEQ ID NO: 631851 - DNA, 75 bp, synthetic construct
  source 1..75: mol_type = other DNA
agattaacggtctggaaatggcgtttttgagcgccgatgagaaacgtgctctgagagaaaaagtgactgcgaagt

SEQ ID NO: 631852 - DNA, 75 bp, synthetic construct
  source 1..75: mol_type = other DNA
accatccccttttcacgcaaggcacaaagtcgcgcgatgtttggcggattcgatgcccagctcaatcaactccat

SEQ ID NO: 631853 - DNA, 75 bp, synthetic construct
  source 1..75: mol_type = other DNA
cagaccagtaccgtagcctctctggtggcacatccactgaaaacgttccttgagcatggtatttgcgccagcatt

SEQ ID NO: 631854 - DNA, 75 bp, synthetic construct
  source 1..75: mol_type = other DNA
gcatcctgttggttactcccaatacggggatcgccattgaccatgagttaaaaggtttttatcacgactctttta

SEQ ID NO: 631855 - DNA, 75 bp, synthetic construct
  source 1..75: mol_type = other DNA
tacatgccagccaatgtgaagtccggcatcctgttggttactcccaatacggggatcgccattgaccatgagtta

SEQ ID NO: 631856 - DNA, 75 bp, synthetic construct
  source 1..75: mol_type = other DNA
ggtgtagtgaatatcatcaccaaaaaaaatcggtcagaaatggtcgggtaccgttaccgtcgataccaccattca

SEQ ID NO: 631857 - DNA, 75 bp, synthetic construct
  source 1..75: mol_type = other DNA
aggttcgttgaatattgcccacaccatggattcccccgactttgcccgcacggtagagactgccgtgcgcggttt

SEQ ID NO: 631858 - DNA, 75 bp, synthetic construct
  source 1..75: mol_type = other DNA
gggcgcgccaattaaacgtattgaaaatcaatcttctggcgtgattccggtgatgaaaatgctggaggacgcatt

SEQ ID NO: 631859 - DNA, 75 bp, synthetic construct
  source 1..75: mol_type = other DNA
cggtctggggcagatgaatttacacggttatctggcgcgagaaggcatcgcttatggttcgccggaagcactgga

SEQ ID NO: 631860 - DNA, 75 bp, synthetic construct
  source 1..75: mol_type = other DNA
gagtggatatcattcacgaatataccgttgccgcgccagctgctgggttatcccgcgagcaaatccgccaggcgc

SEQ ID NO: 631861 - DNA, 75 bp, synthetic construct
  source 1..75: mol_type = other DNA
aaatcaacggtctggagatggcttttttaagtgctgatgagaaacgtgcgctgcgggaaaaagtagcaacaaaat

SEQ ID NO: 631862 - DNA, 75 bp, synthetic construct
  source 1..75: mol_type = other DNA
gggcaaaacaggacgcgtttactaccctgccccgtttatgactaacgaaaatctggcgctgtatcaggacgctta

SEQ ID NO: 631863 - DNA, 75 bp, synthetic construct
  source 1..75: mol_type = other DNA
acaggacaagccgcgcgctgatgcgattatggcgcttcatgaagcagccgaatatcagccgatgttgcgtgcaat

SEQ ID NO: 631864 - DNA, 75 bp, synthetic construct
  source 1..75: mol_type = other DNA
caatggacaggggtatccaggtgcggtcagctttggttatttactaactgaacaaatgggatttcccataccatg

SEQ ID NO: 631865 - DNA, 75 bp, synthetic construct
  source 1..75: mol_type = other DNA
caatggacagggctatcccggcgcggtcagctttggttatttgctgacagaacagtatggatttccggttccatg

SEQ ID NO: 631866 - DNA, 75 bp, synthetic construct
  source 1..75: mol_type = other DNA
ggcatgttgagcgaaaccggctgggaaaaattgctcccggtgtgtgacggcgcaatgctcgatctcaaagcgtgg

SEQ ID NO: 631867 - DNA, 75 bp, synthetic construct
  source 1..75: mol_type = other DNA
cagttgctgacgctgctttgtgaagagtacgacaatgcgccaaacagttgtcggttggcactcactcactttgat

SEQ ID NO: 631868 - DNA, 75 bp, synthetic construct
  source 1..75: mol_type = other DNA
aagggagggttggtgtgaatcaattgaagcgattggttgtctccggtttattatttgcttcttttggagcgaacg

SEQ ID NO: 631869 - DNA, 75 bp, synthetic construct
  source 1..75: mol_type = other DNA
gaactggctggggaatgtcgctgatgttcttcgggattcttatcatcggatacggcttgctttattggtggcacc

SEQ ID NO: 631870 - DNA, 75 bp, synthetic construct
  source 1..75: mol_type = other DNA
aacctcggtttacaggaaacggtaaacagggctggtaacgccgtgcaaaaaaatggcgatactttgtccggtggg

SEQ ID NO: 631871 - DNA, 75 bp, synthetic construct
  source 1..75: mol_type = other DNA
tgtattccgctttcagaatggagtggctattgcttttaaaaatattcaggctggggatggtaaaaaattcacgct

SEQ ID NO: 631872 - DNA, 75 bp, synthetic construct
  source 1..75: mol_type = other DNA
ggagccttatggcagtttaacccgaacgacaaatcatttttctcgccaggtccggtaattgccggtggagcgact

SEQ ID NO: 631873 - DNA, 75 bp, synthetic construct
  source 1..75: mol_type = other DNA
gtgcgacggcgcaatgctcgatctcaaagcgtgggggagcgaatgtcatcagcaattaaccggacgcgataatca

SEQ ID NO: 631874 - DNA, 75 bp, synthetic construct
  source 1..75: mol_type = other DNA
gatggcacaatcgatgagtgtggacgaagtgcttagtcatatccgcaaagtggtgctgtttatcgaagggataac

SEQ ID NO: 631875 - DNA, 75 bp, synthetic construct
  source 1..75: mol_type = other DNA
gaagaactggcggcgtttatcaagggacttggcgatgttccggtacgcctgaacgcgtttcatgcccacggcgtg

SEQ ID NO: 631876 - DNA, 75 bp, synthetic construct
  source 1..75: mol_type = other DNA
cgcgattttccgtgggatcacgctggtgatctccgatgccaactcggtatacggcttctcatttgacttcgtgaa

SEQ ID NO: 631877 - DNA, 75 bp, synthetic construct
  source 1..75: mol_type = other DNA
atgatgttgagctctgtgtcagaaaaaggaaatgcaaaggtcgaatatccaaactcttaagttatatgctttttt

SEQ ID NO: 631878 - DNA, 75 bp, synthetic construct
  source 1..75: mol_type = other DNA
gcttcagaacatgctgttgttgtcaccccaaacgaaagagctgttacaatatggttaggagaattattaagaata

SEQ ID NO: 631879 - DNA, 75 bp, synthetic construct
  source 1..75: mol_type = other DNA
aagcagaaaccggttatccagtaataggctccggggggcagtttgcatgggcgaatacttttctatatgataaac

SEQ ID NO: 631880 - DNA, 75 bp, synthetic construct
  source 1..75: mol_type = other DNA
gcccgaaagccgtatcggctggcatggcatacgatggcagaaacccgggcgatgacgaagacatcaaccgcatac

SEQ ID NO: 631881 - DNA, 75 bp, synthetic construct
  source 1..75: mol_type = other DNA
attatgtcgcttcatgaatctgacgactatcagccgctgttacgtgcaatggcaaacgtgccttgtattgatgtt

SEQ ID NO: 631882 - DNA, 75 bp, synthetic construct
  source 1..75: mol_type = other DNA
gggattacgggcgctgatcatttctggttcggtcatacgccattacgccatcgtgtagatatcggtaacttgcat

SEQ ID NO: 631883 - DNA, 75 bp, synthetic construct
  source 1..75: mol_type = other DNA
gcaggtatgacgtttttctggcctgatgagggggcggcacacagtcgtgccgtcatgaatacagagctgggctgg

SEQ ID NO: 631884 - DNA, 75 bp, synthetic construct
  source 1..75: mol_type = other DNA
agacccgacaattgattattgccgttgaccatctcgaccgaccggtgattgtcctcgatccggaacgccatattg

SEQ ID NO: 631885 - DNA, 75 bp, synthetic construct
  source 1..75: mol_type = other DNA
agttgcggctgtaccagatgggaaaatagaaaaaccatttacttttaataatgaagttgtttgcttaaaggaaat

SEQ ID NO: 631886 - DNA, 75 bp, synthetic construct
  source 1..75: mol_type = other DNA
gtatatccgaatttgttgctgttaccggcagcattgctgatggggctggcgatttcagtgacgatggggagtttt

SEQ ID NO: 631887 - DNA, 75 bp, synthetic construct
  source 1..75: mol_type = other DNA
ccgaatctggtgttgttaccggcggcgctgctgttcgggcttgcggtgacagtagccactgcctcattcaaaaaa

SEQ ID NO: 631888 - DNA, 75 bp, synthetic construct
  source 1..75: mol_type = other DNA
tgtgatggtgtcactggtggctgtggtggaaggtctgggaagacgtgacctgcgccggtacggtgctgcgtatga

SEQ ID NO: 631889 - DNA, 75 bp, synthetic construct
  source 1..75: mol_type = other DNA
tggtggtggaagaagtggaaggtaatccgggttattacgatgccaaattcttcctgcgcccgcatttccagcttg

SEQ ID NO: 631890 - DNA, 75 bp, synthetic construct
  source 1..75: mol_type = other DNA
accgacgatggtggtgtggacatgaaatgtccgacggaaattgccatctctgaccgtcgggaagctgaactggcg

SEQ ID NO: 631891 - DNA, 75 bp, synthetic construct
  source 1..75: mol_type = other DNA
tattgacgctacgcgaggtgctattaacgcaaactcagagcgtctctgtggctgataaagcgaatatgcaggacg

SEQ ID NO: 631892 - DNA, 75 bp, synthetic construct
  source 1..75: mol_type = other DNA
tccaagcatcaaggattggaaggattggcgatcgtcagtgtccacgaggctttcggcttgggccaggagtttaat

SEQ ID NO: 631893 - DNA, 75 bp, synthetic construct
  source 1..75: mol_type = other DNA
cagcgctggctcaatgagtggattatgaactacgtcgatgccgatccggtgaactcctcacaggaaaccaaagct

SEQ ID NO: 631894 - DNA, 75 bp, synthetic construct
  source 1..75: mol_type = other DNA
ctttatcggcgcacagtcgctgcaaaaacctcaggaatattacgacccggatgccacggccaacgctaatctctc

SEQ ID NO: 631895 - DNA, 75 bp, synthetic construct
  source 1..75: mol_type = other DNA
actcgacctgcaggcgagccgtattcctttcgatgtggttacgggcaaacggctgtacagcaacatgctgatccg

SEQ ID NO: 631896 - DNA, 75 bp, synthetic construct
  source 1..75: mol_type = other DNA
cgccagacacgaagataacttggtatccagtaagtctaccttcaagtccttaaaagatgagttgaaggctattca

SEQ ID NO: 631897 - DNA, 75 bp, synthetic construct
  source 1..75: mol_type = other DNA
agcgtcctctgaaagctgggagcgcgatcgcggcgagcgtctggacaaggcccgagccgatttggctggcgcgga

SEQ ID NO: 631898 - DNA, 75 bp, synthetic construct
  source 1..75: mol_type = other DNA
gctgagcccgaaagaactgtatcaggaactgcttaacctgcagcggaatcgtattcctttcgatgtgacaaccgg

SEQ ID NO: 631899 - DNA, 75 bp, synthetic construct
  source 1..75: mol_type = other DNA
atcgctgccacagatagcgcaaaaaggtgtcaccactgtcgatgggtatctgagcaatttatttctgggaaggtg

SEQ ID NO: 631900 - DNA, 75 bp, synthetic construct
  source 1..75: mol_type = other DNA
atggactttttatctgttttactgcagcagcgaacccgctcaataggaatcattattcctgatgtggttattacc

SEQ ID NO: 631901 - DNA, 75 bp, synthetic construct
  source 1..75: mol_type = other DNA
gcggcaccattttactgcgcgatcagcatctggaaggtttggcgggtcagcaaatcgcccgtatgggggtggtgc

SEQ ID NO: 631902 - DNA, 75 bp, synthetic construct
  source 1..75: mol_type = other DNA
actcttcagaaagtatcccgtggcatgaactgccagcttcccacagaggaaacaatcagatgagtttgcccttac

SEQ ID NO: 631903 - DNA, 75 bp, synthetic construct
  source 1..75: mol_type = other DNA
atgaccgttaaacgcgaaaaactgacagttgatgtttactatgcctctgaaaccgccgaaggtaagaatgtggca

SEQ ID NO: 631904 - DNA, 75 bp, synthetic construct
  source 1..75: mol_type = other DNA
tatcttaccgataatatcattatggcaaatgcgctggtctactctcatggtgaagatgtttacagctatgagagt

SEQ ID NO: 631905 - DNA, 75 bp, synthetic construct
  source 1..75: mol_type = other DNA
acatcaaaacgcgccccgtcgccgcagggtacagagcggataccgtgggaagattttccgggatctcacaggggg

SEQ ID NO: 631906 - DNA, 75 bp, synthetic construct
  source 1..75: mol_type = other DNA
cggcaaaagtattaccagtgtaataacctggaatgcggcgtatgcttctcaacactggaagcttttcataagttc

SEQ ID NO: 631907 - DNA, 75 bp, synthetic construct
  source 1..75: mol_type = other DNA
atgttccgttgtccactttgtggcgcgtctgcccgtatccgcaccagtcgtccggaaaatgactcaaacaccgtg

SEQ ID NO: 631908 - DNA, 75 bp, synthetic construct
  source 1..75: mol_type = other DNA
ctgctggtggcacagcatcagcaactgaaaaccgggctgttctccggcctgttgaaaacaccctctttccgtcgc

SEQ ID NO: 631909 - DNA, 75 bp, synthetic construct
  source 1..75: mol_type = other DNA
ctgaccggtttctacaaacccaccggcggcaccattttactgcgcgatcagcatcttgaaggtttaccggggcag

SEQ ID NO: 631910 - DNA, 75 bp, synthetic construct
  source 1..75: mol_type = other DNA
gctgaaaacgccctctttccgtcgcgcccagagtgaagcgctagaccgggccgcgacctggcttgagcgcattgg

SEQ ID NO: 631911 - DNA, 75 bp, synthetic construct
  source 1..75: mol_type = other DNA
cgtgatttttcgcgtaccagccagatgaataccaatttgtggatgttcgttatcgcaatatcccgttatgggatg

SEQ ID NO: 631912 - DNA, 75 bp, synthetic construct
  source 1..75: mol_type = other DNA
gggcttgaattaggctggtttaagcaacagaacaaaactcagcagggtgtaacactaaatgaatcggcttataaa

SEQ ID NO: 631913 - DNA, 75 bp, synthetic construct
  source 1..75: mol_type = other DNA
tgaccttaaatcagcgtgtttataatcaggacggtaaaacggcaaatgcggtcgttacctatgatggcaacgtgg

SEQ ID NO: 631914 - DNA, 75 bp, synthetic construct
  source 1..75: mol_type = other DNA
aattttgcttggtctggcgggaattttgtatgcggtgatcggcggactgcgcgcaatggcagtggcggactccat

SEQ ID NO: 631915 - DNA, 75 bp, synthetic construct
  source 1..75: mol_type = other DNA
gcgtggttaatgccgatgatgccttaacgatgccgattcgcggtgcggatgaacgttgcgtcagcttcggcgtca

SEQ ID NO: 631916 - DNA, 75 bp, synthetic construct
  source 1..75: mol_type = other DNA
gtggagcgccatactggcggtctcaatgatgaatggctgatggcggcagatctgattgtcgccagccccggcatt

SEQ ID NO: 631917 - DNA, 75 bp, synthetic construct
  source 1..75: mol_type = other DNA
tgcaggtagacggcacgctgcatttgttgctgggcggcgatggtaaatcggcggacttcagtccactggcgcgct

SEQ ID NO: 631918 - DNA, 75 bp, synthetic construct
  source 1..75: mol_type = other DNA
gggcaatttgctgttttgtcctcttcattgtggtgtgtctttttctggcgacgcacatgaaaggcgcttttcggg

SEQ ID NO: 631919 - DNA, 75 bp, synthetic construct
  source 1..75: mol_type = other DNA
gttaaaggcgagaaagtgctgaacgtgaaagagatgaaactttccgggcagcataactacaccaatgcgctggcg

SEQ ID NO: 631920 - DNA, 75 bp, synthetic construct
  source 1..75: mol_type = other DNA
atggctgattaccagggtaaaaatgtcgtcattatcggcctgggcctcaccgggctttcctgcgtggactttttc

SEQ ID NO: 631921 - DNA, 75 bp, synthetic construct
  source 1..75: mol_type = other DNA
gcagcatttagctgggcgtgtggcaacatcttcaataaaaagatcatgtcgcactcatcgcgcccggcagtgatg

SEQ ID NO: 631922 - DNA, 75 bp, synthetic construct
  source 1..75: mol_type = other DNA
ctggtgttacaggcacaggcgttttttactatcgtgcttggcgcgtttactttcggggagcgactgcatggcaaa

SEQ ID NO: 631923 - DNA, 75 bp, synthetic construct
  source 1..75: mol_type = other DNA
cgttgtggcaacgaatgctggcgcgtggctggacgccgatcagtgaatgccgtctcgacgactggcttacgcaag

SEQ ID NO: 631924 - DNA, 75 bp, synthetic construct
  source 1..75: mol_type = other DNA
gtgctcattatggccggactgtatatcaatgtatttggtttgcagtggcgtaaagcggtgaaggtaagaggttaa

SEQ ID NO: 631925 - DNA, 75 bp, synthetic construct
  source 1..75: mol_type = other DNA
tcccaatcattcccttctttgttgcttcgctgattctcgatggttccgcaaccatgattcacagtctggtcacta

SEQ ID NO: 631926 - DNA, 75 bp, synthetic construct
  source 1..75: mol_type = other DNA
gtgctcattatgaccgggctatatatcaatgtgtttggtatgcggtggcgtaaagcagtgaaagtgagaggctaa

SEQ ID NO: 631927 - DNA, 75 bp, synthetic construct
  source 1..75: mol_type = other DNA
caacattcagtcgctgaaaaaccgctttggtgaaggtgaagaaatcctgtcgctactcaatctttatcacaatct

SEQ ID NO: 631928 - DNA, 75 bp, synthetic construct
  source 1..75: mol_type = other DNA
aggctctgaactactcgcctatggcttaggtaagagccagcaattacgccagcgtgtagccgctgagacagatcc

SEQ ID NO: 631929 - DNA, 75 bp, synthetic construct
  source 1..75: mol_type = other DNA
cactcgtttttcagactcctgaagaagcgctccatcgggctgttatcccagcaatttcctcgtcgactcagactc

SEQ ID NO: 631930 - DNA, 75 bp, synthetic construct
  source 1..75: mol_type = other DNA
tcagacgatcaggcgtccagattctctttcgcccatgcagcaaaatcggtatagccgccgatatgttgctgatcg

SEQ ID NO: 631931 - DNA, 75 bp, synthetic construct
  source 1..75: mol_type = other DNA
acaatacacaaagcacgaccattcatccttcacgtgatcttaatctggcggtatatcaacgcggtttttttgatg

SEQ ID NO: 631932 - DNA, 75 bp, synthetic construct
  source 1..75: mol_type = other DNA
ctgctttttgcaaaagataatgccggaatttgaaaaatgtcgggttgcattcagaaatgcgactggtgaatttga

SEQ ID NO: 631933 - DNA, 75 bp, synthetic construct
  source 1..75: mol_type = other DNA
gtcaggttattgacctgtctgaaacacaggaaaatgcagaagaaaccatcatccaaacagagtcacagcctgaga

SEQ ID NO: 631934 - DNA, 75 bp, synthetic construct
  source 1..75: mol_type = other DNA
tcgattttgttgcgatctggctcacgtctttcgcatatggttggcatttcattattaccatttatcctctattca

SEQ ID NO: 631935 - DNA, 75 bp, synthetic construct
  source 1..75: mol_type = other DNA
ctgtctcagctgaatatacgctatcccgttggggtagcggctgaggcggaattcctgcctcacccaagccttatg

SEQ ID NO: 631936 - DNA, 75 bp, synthetic construct
  source 1..75: mol_type = other DNA
acaagtcgcatctgtttgaagcatgtcaacgtagctcgtttgacctgaccgctgaagacgtagccgataagctgt

SEQ ID NO: 631937 - DNA, 75 bp, synthetic construct
  source 1..75: mol_type = other DNA
atgccaccgctcaatcacgcgaagtcggaattgcttctgtaaaaaccaatggcgcaagtcagaaggtgaaagaca

SEQ ID NO: 631938 - DNA, 75 bp, synthetic construct
  source 1..75: mol_type = other DNA
cccctggcgctagtgagaaaggttatggcatttcatccagcattgtaggcgagtctaagatacttggtgacaatt

SEQ ID NO: 631939 - DNA, 75 bp, synthetic construct
  source 1..75: mol_type = other DNA
ttatatcttaatagctatgataatcaatcagattttagtaaaaagcagtgctgtaaattacaagcagacgtgggg

SEQ ID NO: 631940 - DNA, 75 bp, synthetic construct
  source 1..75: mol_type = other DNA
atgcttctaccagcccgttctatccgctgtttgccgcactggacgttaacgccaaaattcatgaaggggagagtg

SEQ ID NO: 631941 - DNA, 75 bp, synthetic construct
  source 1..75: mol_type = other DNA
gggccatatcatagaaggcaaggctggggtcatgttcactctgtacgaactccagaaggagctctcgaagatggg

SEQ ID NO: 631942 - DNA, 75 bp, synthetic construct
  source 1..75: mol_type = other DNA
agcttcttcccgatggtgggactgaccaccagaggtgagtttcgcaagaaaggcgggaacgccaggtgctatgtg

SEQ ID NO: 631943 - DNA, 75 bp, synthetic construct
  source 1..75: mol_type = other DNA
ggcgtcggctgtgggctgagtgcgttgagatagggattgaagcgcgcaaggctattcttgcgcactgtaagctgt

SEQ ID NO: 631944 - DNA, 75 bp, synthetic construct
  source 1..75: mol_type = other DNA
gcgatctgcttattcatgaaggatcggcgaaagatgcgcagaaattcgcagccaaagtctttcatgccgataaaa

SEQ ID NO: 631945 - DNA, 75 bp, synthetic construct
  source 1..75: mol_type = other DNA
cgggattttcgccggagctgcaaggtgtttatagcgaaaccgatgcggatggcatgaaacggttgtacggttatg

SEQ ID NO: 631946 - DNA, 75 bp, synthetic construct
  source 1..75: mol_type = other DNA
agcacggagatccgctataacccggtcgccagctatctggaacagctgggggcatcagaccccgaagccgccgca

SEQ ID NO: 631947 - DNA, 75 bp, synthetic construct
  source 1..75: mol_type = other DNA
actggatgtttaagccgggtgccatgaagcaggtagcggagtatgctgacggcattggcccggattaccatatgg

SEQ ID NO: 631948 - DNA, 75 bp, synthetic construct
  source 1..75: mol_type = other DNA
actggatgtttaagccgggtgccatgaaacaggtggcggaatatgctgatggtattggtccggattaccatatgt

SEQ ID NO: 631949 - DNA, 75 bp, synthetic construct
  source 1..75: mol_type = other DNA
tcatcaaacaagaggtcataagcgactacgacgcgaaccagatcaaggatggccgcagagtcatcgacgtgcggt

SEQ ID NO: 631950 - DNA, 75 bp, synthetic construct
  source 1..75: mol_type = other DNA
atgacaaaaattgccatgttcgccgtaacaattattgttcctttatctgcaatgtatcttgggaagaataacgta

SEQ ID NO: 631951 - DNA, 75 bp, synthetic construct
  source 1..75: mol_type = other DNA
agcacggagatccgccataacccggtcgccagctatctggcacagctgggggcatcagaccctgaagccgccgca

SEQ ID NO: 631952 - DNA, 75 bp, synthetic construct
  source 1..75: mol_type = other DNA
gaacggctcgatcaccaggaataccgacaaattctggcagaaacagaacaggaaactcatctgaagaaattacga

SEQ ID NO: 631953 - DNA, 75 bp, synthetic construct
  source 1..75: mol_type = other DNA
ggtggcggcgagcgtggcgctggcgagtttactgcgcggcgagtttgatggtacctgcgcccgaatttgctggcg

SEQ ID NO: 631954 - DNA, 75 bp, synthetic construct
  source 1..75: mol_type = other DNA
tgctgcaacatcccggtcttatcttccatccgccgctgctttatctcggctatggcggtttgatggtggcagcga

SEQ ID NO: 631955 - DNA, 75 bp, synthetic construct
  source 1..75: mol_type = other DNA
cgcctctttattaccctggctttctgccactgcgctgctgcacagtttatccctgacacgccagcgggggatttt

SEQ ID NO: 631956 - DNA, 75 bp, synthetic construct
  source 1..75: mol_type = other DNA
gctggcgcatgcgggcgtgctgttatttgccgcagggatcgtggtctccagcgtcagccgtcaggagatcagcct

SEQ ID NO: 631957 - DNA, 75 bp, synthetic construct
  source 1..75: mol_type = other DNA
cgaatttgctggcgctgggcgttacctggctggagtgcattaacggcggggatcatcctcggttcctggtgggcc

SEQ ID NO: 631958 - DNA, 75 bp, synthetic construct
  source 1..75: mol_type = other DNA
ggcgtactgacgtattgttttctcatcagcgatttctcggtcatttatgtcgcccaacatagctacagcctgctg

SEQ ID NO: 631959 - DNA, 75 bp, synthetic construct
  source 1..75: mol_type = other DNA
catcagaaaattcaataatttattcgaacacattgatcacagagaatatcaccagatcctggctgaaacagagca

SEQ ID NO: 631960 - DNA, 75 bp, synthetic construct
  source 1..75: mol_type = other DNA
tcattattggtccccacggacacaccatcaccgttaatgctacggggaacgcagaaaacaccgtaaaaaacatcg

SEQ ID NO: 631961 - DNA, 75 bp, synthetic construct
  source 1..75: mol_type = other DNA
atgagatggtatccatggttacgacctgatttcgaaaaactggtagccagctatcaggccggaagaggtcaccat

SEQ ID NO: 631962 - DNA, 75 bp, synthetic construct
  source 1..75: mol_type = other DNA
atgtacaaagcggtgtgcgctggatttgggggggaggattgttgatgattgcgggcgcgttattaagcagattgc

SEQ ID NO: 631963 - DNA, 75 bp, synthetic construct
  source 1..75: mol_type = other DNA
cattctggtttcggttcatgcgttcgccctggataatgtccgcgctgtgccgctgtttagcctgtttgcgctgat

SEQ ID NO: 631964 - DNA, 75 bp, synthetic construct
  source 1..75: mol_type = other DNA
cgcgcaacatagctatagcctgctgtcgtgggaactcaagctggcagcggtgtggggcggccatgaaggttcgct

SEQ ID NO: 631965 - DNA, 75 bp, synthetic construct
  source 1..75: mol_type = other DNA
gcgttactgatgtcgccgatcgtttcccggacagggcacgcaaagacggtcgttactacgcgatagatttcacgc

SEQ ID NO: 631966 - DNA, 75 bp, synthetic construct
  source 1..75: mol_type = other DNA
tctttctgatttaaccgggcgcaccattcttgatgtcggctgcgggagcggttatcacatgtggcgcatgattgg

SEQ ID NO: 631967 - DNA, 75 bp, synthetic construct
  source 1..75: mol_type = other DNA
acgctggttattgatggcgacgaaaacacggtgctggtgccgggcgatcgttacgctcaaatgcgtaatgtctat

SEQ ID NO: 631968 - DNA, 75 bp, synthetic construct
  source 1..75: mol_type = other DNA
cggaaaaaatattaccagtgtaacaacctggaatgcggcataagtttctcaacactggaagctttccataaattc

SEQ ID NO: 631969 - DNA, 75 bp, synthetic construct
  source 1..75: mol_type = other DNA
gccagtttgaagcggtgcgtaaactactgggtaacgatcagcgcgcacatttgttaccgttaggtattgaacaac

SEQ ID NO: 631970 - DNA, 75 bp, synthetic construct
  source 1..75: mol_type = other DNA
acgctggttattgatggcgatgagaacacggtgctggtgccaggcgatcgttacgcgcaaatgcgtaatgtctat

SEQ ID NO: 631971 - DNA, 75 bp, synthetic construct
  source 1..75: mol_type = other DNA
atgatcgactttggtaacttttattctctgattgccaaaaatcatctttcgcactggctggaaaccctccctgca

SEQ ID NO: 631972 - DNA, 75 bp, synthetic construct
  source 1..75: mol_type = other DNA
gttggcctgtgtggtcgcaggagcaggcattgcgcttattccacgctctatgctggaaagtatgccggggcatca

SEQ ID NO: 631973 - DNA, 75 bp, synthetic construct
  source 1..75: mol_type = other DNA
catcgcgtgccgtcgaatctcactacccgtctacgccagctggaaacagaactgggggttgatctgtttattcgc

SEQ ID NO: 631974 - DNA, 75 bp, synthetic construct
  source 1..75: mol_type = other DNA
atgttccgttgtccgctttgtggcgcatctgcccgtatccgcaccagtcgtccggaaaatgattcaaacactgtg

SEQ ID NO: 631975 - DNA, 75 bp, synthetic construct
  source 1..75: mol_type = other DNA
acattgaatgcagcgccacctttgtgacgcacgagtttgtcgtgagaaccgtatgccgtccgcaacccaccgaag

SEQ ID NO: 631976 - DNA, 75 bp, synthetic construct
  source 1..75: mol_type = other DNA
gctggcggcgattcccttctggtatctgatgacctttttgccctggcagctctattcgctggtggtgatgctggg

SEQ ID NO: 631977 - DNA, 75 bp, synthetic construct
  source 1..75: mol_type = other DNA
tgtgattttccgtatcctggatatgtggaaaccgtggccgatccgctggtttgatcgcaatgtacatggcggcat

SEQ ID NO: 631978 - DNA, 75 bp, synthetic construct
  source 1..75: mol_type = other DNA
taggcctgttgttcgaaaacgtgttgatggtgctgctcaaacccgtgctacctgccgctttacctcctgccagcc

SEQ ID NO: 631979 - DNA, 75 bp, synthetic construct
  source 1..75: mol_type = other DNA
gcagagcgacataaaccgtttgtccgcgcattctccaccgatgcaatgaaacgactgatgaccgcgagctggccg

SEQ ID NO: 631980 - DNA, 75 bp, synthetic construct
  source 1..75: mol_type = other DNA
gtgttgcaggagcgtaaagtgcgcccgctgggcagtaaccgcgatattgatatcgacgtgcggattatttctgcc

SEQ ID NO: 631981 - DNA, 75 bp, synthetic construct
  source 1..75: mol_type = other DNA
ataaagacgcgctgtatcaggcaattgacgatgctctggagcaatcagctcccactaccgacgaacgctggcgcg

SEQ ID NO: 631982 - DNA, 75 bp, synthetic construct
  source 1..75: mol_type = other DNA
cggctggtggcgcaatcagacgtcagcgttttgattaatggccagagcggcaccgggaaagagattttcgcccag

SEQ ID NO: 631983 - DNA, 75 bp, synthetic construct
  source 1..75: mol_type = other DNA
ggtaatgtgcgccagttggtcaacgtgattgaacagtgcgtggcgctgacttcatcgccagtgattagcgatgcg

SEQ ID NO: 631984 - DNA, 75 bp, synthetic construct
  source 1..75: mol_type = other DNA
tattgacgtgaggattatttccgcaactcaccgtgacctgccaaaagcaatggcgcgtggagagttccgtgagga

SEQ ID NO: 631985 - DNA, 75 bp, synthetic construct
  source 1..75: mol_type = other DNA
ggtgaagggcgtccgggatggctgccgtcactggctgccactgagcgtgacggacagacacttcaggacaccggg

SEQ ID NO: 631986 - DNA, 75 bp, synthetic construct
  source 1..75: mol_type = other DNA
aaagcgatgggggtttgcagccagaggctgagcgtgccgtactggacacgattgtccgccatcttgaatcagcgg

SEQ ID NO: 631987 - DNA, 75 bp, synthetic construct
  source 1..75: mol_type = other DNA
gggcacatatctcgcagtcgtatcatgtggacgcgtacacatcagaaatgcccgcccgtcctttcctgccactga

SEQ ID NO: 631988 - DNA, 75 bp, synthetic construct
  source 1..75: mol_type = other DNA
tcatgcgcgtggcgcgtttactggcgctgtcagcaatcgcgaaggtttattccaggcggcggaaggcggtacgct

SEQ ID NO: 631989 - DNA, 75 bp, synthetic construct
  source 1..75: mol_type = other DNA
tttatcggtggtattgacgctcactgttttgaagaaagttacctgcgtgagctgattacagaagttgcaccgcag

SEQ ID NO: 631990 - DNA, 75 bp, synthetic construct
  source 1..75: mol_type = other DNA
tgtccgtggtgcaatgcggtttactttaaacaggtacaaggtacgaaggtaaaagccagcgtagttattattcag

SEQ ID NO: 631991 - DNA, 75 bp, synthetic construct
  source 1..75: mol_type = other DNA
caccacaggaaaagacggtggtcagcattgccgttgatcccgagtcaccggctcagtatctccagcgccagaaat

SEQ ID NO: 631992 - DNA, 75 bp, synthetic construct
  source 1..75: mol_type = other DNA
acgccgcaggcgacctgactgccgttatcaccccggacggcaaccggagcgagacacagtacgatgcgtggggaa

SEQ ID NO: 631993 - DNA, 75 bp, synthetic construct
  source 1..75: mol_type = other DNA
cgcacctacagcagctaccggactaggactcctgccccggtgggcgttttcggccccggctggaaagcgccttct

SEQ ID NO: 631994 - DNA, 75 bp, synthetic construct
  source 1..75: mol_type = other DNA
cgcacctacagcagctaccggactacgactcctgccccggtgggcgttttgggccccggctggaaagcgccttct

SEQ ID NO: 631995 - DNA, 75 bp, synthetic construct
  source 1..75: mol_type = other DNA
atttttcgtatcgcattagagcgtatgggaattaaacaggagcatgcagcattgaattttgtggagacaaccagt

SEQ ID NO: 631996 - DNA, 75 bp, synthetic construct
  source 1..75: mol_type = other DNA
ttcctcaacgaagccaacaaagccgatcagcgtgttttagagttactgactgaaaaattccatctgttcgatggc

SEQ ID NO: 631997 - DNA, 75 bp, synthetic construct
  source 1..75: mol_type = other DNA
ccgctgcgtaccgcgtactcatacctgtaccacttccccatgaccgcagatctttctgaggtcgttatcaatgct

SEQ ID NO: 631998 - DNA, 75 bp, synthetic construct
  source 1..75: mol_type = other DNA
caacaaaagacctgatgaatcttaaatgggatgctttgtatgttcttgtcaatgccattgtaaatggcgaagtca

SEQ ID NO: 631999 - DNA, 75 bp, synthetic construct
  source 1..75: mol_type = other DNA
atgttggatctgtttgccgatgctgaaccgtggcaagagccactggcggctggtgcggtaattttacggcgtttt

SEQ ID NO: 632000 - DNA, 75 bp, synthetic construct
  source 1..75: mol_type = other DNA
gccaaagagcgcgcagatgtcgatattagtattgccattaccggctacggtgggcctgaaggtgggcaggatggt

SEQ ID NO: 632001 - DNA, 75 bp, synthetic construct
  source 1..75: mol_type = other DNA
cgcacctacagcagctaccggactacgactcctgccccggtgggcgtatttggccccggctggaaagcgccttct

SEQ ID NO: 632002 - DNA, 75 bp, synthetic construct
  source 1..75: mol_type = other DNA
cgcacctacagcagctaccggactatgactcctgccccggtgggcgtgttaggccccggctggaaagcgccttct

SEQ ID NO: 632003 - DNA, 75 bp, synthetic construct
  source 1..75: mol_type = other DNA
acaggtgacaacggcaatgaatatttcaaatggagaagtcgtcagagcaccacaacaaaagatctgatgaatctt

SEQ ID NO: 632004 - DNA, 75 bp, synthetic construct
  source 1..75: mol_type = other DNA
aggatttttgaacgcaaaaaaacaacctttaagagcgcatgaaaatattgaagttttttacagaaagcaaccgac

SEQ ID NO: 632005 - DNA, 75 bp, synthetic construct
  source 1..75: mol_type = other DNA
atgggtaaaatcaaccgcagtaaaaccccgtacgtggcggtgttactctccaccggcgcggcattcttaacggtg

SEQ ID NO: 632006 - DNA, 75 bp, synthetic construct
  source 1..75: mol_type = other DNA
gcttaccggctagaccaagagttaagtcaggttctaatgctgaagttgagtgggctaagaaatgtattgaaataa

SEQ ID NO: 632007 - DNA, 75 bp, synthetic construct
  source 1..75: mol_type = other DNA
ttcaattaaaagataattttacgttatttgcattaagagcaatatcagcatttacctctcctcattcttttagaa

SEQ ID NO: 632008 - DNA, 75 bp, synthetic construct
  source 1..75: mol_type = other DNA
ctttggcgcacggatgccgctgttcttccagtgcaatggcaacagctgccaggtggatgaagagcagagccgcaa

SEQ ID NO: 632009 - DNA, 75 bp, synthetic construct
  source 1..75: mol_type = other DNA
ccttgggacaaattgggaacataagcctctttggtagtcgcgatgagttccgtaatgatagaccacataaagatt

SEQ ID NO: 632010 - DNA, 75 bp, synthetic construct
  source 1..75: mol_type = other DNA
cactatgtctaccgccacgatgaatacggcaggctggcggagaagacggaccgtatcccggaaggggttatccgg

SEQ ID NO: 632011 - DNA, 75 bp, synthetic construct
  source 1..75: mol_type = other DNA
gcatggcgatgagctcgagcgcgccaggcagatgcggcaggcttttggcgctcgtcacgtcaagcgaggagtcga

SEQ ID NO: 632012 - DNA, 75 bp, synthetic construct
  source 1..75: mol_type = other DNA
tatgggcccatcctcgtcatgattcattgaccgcaaatattgctgatgcgatccatcagcgggcaatggagcgga

SEQ ID NO: 632013 - DNA, 75 bp, synthetic construct
  source 1..75: mol_type = other DNA
tacttaaagcaatatttcaaataggagtttttgtttatttcacacatgtgtcagatattactacatttggtatta

SEQ ID NO: 632014 - DNA, 75 bp, synthetic construct
  source 1..75: mol_type = other DNA
ccaggactctgggaagaaaacaaaaagaaggcgcctgtggttgtcagaggtagagtatgatattgaaggtgaaga

SEQ ID NO: 632015 - DNA, 75 bp, synthetic construct
  source 1..75: mol_type = other DNA
accgcttgcgtaatggcctgctggtggctgttaacgccgacatgtcactgccgtttgacacgattgaacgtacta

SEQ ID NO: 632016 - DNA, 75 bp, synthetic construct
  source 1..75: mol_type = other DNA
ttttataccgcctgcgtaacggtctggttgttgaaatcgaaccagatatgtcactgccattagtcactattgaac

SEQ ID NO: 632017 - DNA, 75 bp, synthetic construct
  source 1..75: mol_type = other DNA
tttgctggcgactgcgaaacggtattagctttagcggtgaggtttgccctcgcccagctgctgcaattactgcta

SEQ ID NO: 632018 - DNA, 75 bp, synthetic construct
  source 1..75: mol_type = other DNA
tatctcgctgaaactctgatggtgattgaccatcagaaaaaagcacccgcattcaggccagcctgtttgctccga

SEQ ID NO: 632019 - DNA, 75 bp, synthetic construct
  source 1..75: mol_type = other DNA
cgccatcaccaacgaaaatacgaattgcaaaaacagttaaacgccgggctgccaaatcagggattgcagacagtt

SEQ ID NO: 632020 - DNA, 75 bp, synthetic construct
  source 1..75: mol_type = other DNA
caattgataaacaagaatccaatgctattgctgccgaactggtaaattgccttaaaaccgaatctgatcttaacc

SEQ ID NO: 632021 - DNA, 75 bp, synthetic construct
  source 1..75: mol_type = other DNA
catgatggtattagctcttattgtaattgcgggttacgctgtcaaagtttttcctgcttttgagaaggttgtggc

SEQ ID NO: 632022 - DNA, 75 bp, synthetic construct
  source 1..75: mol_type = other DNA
tatgatggtactggctctaattgttatagccggttatgctgtaaaagtatttcctgcattcgaaaaggttgttgc

SEQ ID NO: 632023 - DNA, 75 bp, synthetic construct
  source 1..75: mol_type = other DNA
gtgatgcatttaaaacaggacttcttggtggtgatgaattactgaatatcagtctttatgccagtttgccatctt

SEQ ID NO: 632024 - DNA, 75 bp, synthetic construct
  source 1..75: mol_type = other DNA
tctaaaaaacacgatcagtatcgccgcatcgttcgatacctcaaacgatggagaaatttcacttttagtgaaaat

SEQ ID NO: 632025 - DNA, 75 bp, synthetic construct
  source 1..75: mol_type = other DNA
tcgaataagcatgaccaataccggcgtattgtcaggtacctcaaacgttggagaaatttcacatttggcgatgat

SEQ ID NO: 632026 - DNA, 75 bp, synthetic construct
  source 1..75: mol_type = other DNA
ataaagcagcggccaaatttaaatacggtccggtgtggcgagggcaggttatattcagccaactggtcaaacgct

SEQ ID NO: 632027 - DNA, 75 bp, synthetic construct
  source 1..75: mol_type = other DNA
gatgatttcgatatatcctcttactgagtattggctggatatcgggcaaatggctgagtataaacaggctcagaa

SEQ ID NO: 632028 - DNA, 75 bp, synthetic construct
  source 1..75: mol_type = other DNA
gttatttttggacgtaatgcggtatccactgatggtgctcaggctttgctccgtcaggaccatgccgaccgcaaa

SEQ ID NO: 632029 - DNA, 75 bp, synthetic construct
  source 1..75: mol_type = other DNA
aagtagatatccctgtaagtcacacaagggacatttttgataacagtagcatcacaaccggcactcaattccgta

SEQ ID NO: 632030 - DNA, 75 bp, synthetic construct
  source 1..75: mol_type = other DNA
tttgtcttgatcaggcatttctgcaacaagccggtttaaaaattccttctgaagaaaaaaatggctgttacgact

SEQ ID NO: 632031 - DNA, 75 bp, synthetic construct
  source 1..75: mol_type = other DNA
tttatatattactcctggtgaaagtggttttgtcagttttgttaatcgtgaaggaaaaatatgtcatactgcata

SEQ ID NO: 632032 - DNA, 75 bp, synthetic construct
  source 1..75: mol_type = other DNA
tatcaattgaatccgatatcagacatcgaccccctgggtttatctatgtgggaggatgcaaaatcgggggcatgt

SEQ ID NO: 632033 - DNA, 75 bp, synthetic construct
  source 1..75: mol_type = other DNA
cataaaccattgttattgctatacgtattagcgggatacctgaatggacatccgcgccttttcgattattgtagt

SEQ ID NO: 632034 - DNA, 75 bp, synthetic construct
  source 1..75: mol_type = other DNA
attttgaaattgttggtaaagccgcctggctttggggatgttcttcacttcataaaagctggcctatatctatat

SEQ ID NO: 632035 - DNA, 75 bp, synthetic construct
  source 1..75: mol_type = other DNA
ccgaatgcgatgggagtcagcctgtcgctcaccacccagaaatcgaaatcacaacaacattctgaaagtgacaca

SEQ ID NO: 632036 - DNA, 75 bp, synthetic construct
  source 1..75: mol_type = other DNA
agacagtccgtcagcagggaacggaaatcgccagcggtggtgacaccaccgtcaacgcaggacgggatatcaccg

SEQ ID NO: 632037 - DNA, 75 bp, synthetic construct
  source 1..75: mol_type = other DNA
atgggcgtctacttgttatcattggtaatgatgtttcgttaggaagaagtgatgctttttctgagttaccagaaa

SEQ ID NO: 632038 - DNA, 75 bp, synthetic construct
  source 1..75: mol_type = other DNA
tgaattcgagaaaaaagaaaaaaaagattttgaattaatattgttccatgatggagttagagcaaaagtttacta

SEQ ID NO: 632039 - DNA, 75 bp, synthetic construct
  source 1..75: mol_type = other DNA
tattacgtgggtaggatcattattcttctttccgcaaccctaccaatgaaacaaaaacagaaacttctggatact

SEQ ID NO: 632040 - DNA, 75 bp, synthetic construct
  source 1..75: mol_type = other DNA
tgttttatcatggcattcaaccgttgaaagtgggggttcatcccataagcgctaacttaagggttgtggtattac

SEQ ID NO: 632041 - DNA, 75 bp, synthetic construct
  source 1..75: mol_type = other DNA
aagtattgcggtattagatgataatgtattggaaagtcaggctattgaaacgttgtcagcgataggtctttctta

SEQ ID NO: 632042 - DNA, 75 bp, synthetic construct
  source 1..75: mol_type = other DNA
aagtattgcggtattagatgataatgtattggaaagtcaggctattgaaaacgttgtcagcgataggtctttctt

SEQ ID NO: 632043 - DNA, 75 bp, synthetic construct
  source 1..75: mol_type = other DNA
gtgctgaaagccggcgggaaatactggcatgtgtacatgtcgaagaagacagccggagggcggaatacggcacga

SEQ ID NO: 632044 - DNA, 75 bp, synthetic construct
  source 1..75: mol_type = other DNA
gagtttcgtcgttcgttaggtactcgttcaaagactgaagcgacaaagcgatctttacgctttgcagatcgccct

SEQ ID NO: 632045 - DNA, 75 bp, synthetic construct
  source 1..75: mol_type = other DNA
ttgcttggtcggtttacggggatgagggctaacgaaatttgtcaactatatcatggtgatatattaaaaaatgaa

SEQ ID NO: 632046 - DNA, 75 bp, synthetic construct
  source 1..75: mol_type = other DNA
caagtaattggtgctatctgtttctattgcaataatcaaaaagatctaattgcgtatgtaagtatgattgcagtt

SEQ ID NO: 632047 - DNA, 75 bp, synthetic construct
  source 1..75: mol_type = other DNA
taagtaaagttatccaagatgatctaaacctgaaatgttcgattcttaataactatcacaagatagatgactaca

SEQ ID NO: 632048 - DNA, 75 bp, synthetic construct
  source 1..75: mol_type = other DNA
ggatattcaagatttatcaacaggcagacctgttttattaggtgataacttgcatgaacttaatgagtttataga

SEQ ID NO: 632049 - DNA, 75 bp, synthetic construct
  source 1..75: mol_type = other DNA
ttcaggcgtaatggatcgcaacaccgccggtggggtgggtggatagcctacttccttatcgtggcatcagccagc

SEQ ID NO: 632050 - DNA, 75 bp, synthetic construct
  source 1..75: mol_type = other DNA
gcggagttcagatcattacttcgccatcctcctgcagggagtcgcgttatcgcgagtaaggattttggcttcgct

SEQ ID NO: 632051 - DNA, 75 bp, synthetic construct
  source 1..75: mol_type = other DNA
acttgatacctctgacttaagttcgatgctgtcatactgtgttactcaggaatttaccgcaaactgtcgaaaaat

SEQ ID NO: 632052 - DNA, 75 bp, synthetic construct
  source 1..75: mol_type = other DNA
gaagagacggagaaagcgcctgagcagaactatgacgaagtgattaaggcactgaaggctgcagggatcgatccg

SEQ ID NO: 632053 - DNA, 75 bp, synthetic construct
  source 1..75: mol_type = other DNA
ggacatggacacggactttaaagtctggcttgggatcattcgctccatgtctgagtatggcgtgaaaaaggacac

SEQ ID NO: 632054 - DNA, 75 bp, synthetic construct
  source 1..75: mol_type = other DNA
tcctgaacgccgcaatctgcggcggaattgcaatcagagtcctgctgttccgtcgtggcgggtcacgccatcgct

SEQ ID NO: 632055 - DNA, 75 bp, synthetic construct
  source 1..75: mol_type = other DNA
catgacaacggacagcagttataccactctgcaacgtgtcgcagcgctggaacgttccggaatgcaaatcagtcg

SEQ ID NO: 632056 - DNA, 75 bp, synthetic construct
  source 1..75: mol_type = other DNA
aacgatggccagaccatcactatcgacctgaagaagattgactcttctaccttgaaactgactggttttaacgtg

SEQ ID NO: 632057 - DNA, 75 bp, synthetic construct
  source 1..75: mol_type = other DNA
tggactctatccaggacgaaatcaaatcccgtcttgacgaaattgaccgcgtatccggtcagacccagttcaacg

SEQ ID NO: 632058 - DNA, 75 bp, synthetic construct
  source 1..75: mol_type = other DNA
agcctgcaaggtacttttggtacagatacgaatactgcaaaaatcaccatcgatggttctgctcaagaagtaaac

SEQ ID NO: 632059 - DNA, 75 bp, synthetic construct
  source 1..75: mol_type = other DNA
tattaaagttgatagtaaaggtatagtacaacaatacacaggtacagtttttgaagacgcttacaccaaagctga

SEQ ID NO: 632060 - DNA, 75 bp, synthetic construct
  source 1..75: mol_type = other DNA
tttttctcgctgttgatgatgcaggacagtgccggtgcggtcattggcgcattgttggggagctggctgttgtaa

SEQ ID NO: 632061 - DNA, 75 bp, synthetic construct
  source 1..75: mol_type = other DNA
ccacctcaacagcggcagaactccaatcttacctcacgcctaaggcgggggataccgcaactttctccgttgaaa

SEQ ID NO: 632062 - DNA, 75 bp, synthetic construct
  source 1..75: mol_type = other DNA
tatccagaaccgtctggattccgcagtcaccaacctgaacaacaccactaccaacctgtccgaagcgcagtcccg

SEQ ID NO: 632063 - DNA, 75 bp, synthetic construct
  source 1..75: mol_type = other DNA
agatcatccagcaggccggtaactccgtgctggcaaaagccaaccaggtaccgcagcaggttctgtctctgctgc

SEQ ID NO: 632064 - DNA, 75 bp, synthetic construct
  source 1..75: mol_type = other DNA
atacctgactaccatacagaacaatgtatttagtcgtcaggggggcggctaccaagtgtattatcggattgatgg

SEQ ID NO: 632065 - DNA, 75 bp, synthetic construct
  source 1..75: mol_type = other DNA
gtgtgcggcgttcaatgcgtggttgttaccagcatggaaactctccaccatacgcacgcccgttcgcgaaggcat

SEQ ID NO: 632066 - DNA, 75 bp, synthetic construct
  source 1..75: mol_type = other DNA
caccaacctgaacaacaccaccaccaacctgtctgaagcgcagtcccgtattcaggacgccgactatgcgaccga

SEQ ID NO: 632067 - DNA, 75 bp, synthetic construct
  source 1..75: mol_type = other DNA
gaatatacttatcataaagatactaacacatatacggcttctgcttcagttgatgcgactcaactggcggcattc

SEQ ID NO: 632068 - DNA, 75 bp, synthetic construct
  source 1..75: mol_type = other DNA
agacgtcgtgttatcttatatatcgacgctgggtgcttttgcaaaaaaaaacattcttttagtcaacatcagtta

SEQ ID NO: 632069 - DNA, 75 bp, synthetic construct
  source 1..75: mol_type = other DNA
gccacatgaccgtaaggcctggtatcagtccgaacgtgaacgcctcaagttcgaacaggaaacggcgcaactcat

SEQ ID NO: 632070 - DNA, 75 bp, synthetic construct
  source 1..75: mol_type = other DNA
tgcaggatattattgatgatctgcgcgatgaaattgccaggcgtgtgactgaggatggcggaccgaatgatgcag

SEQ ID NO: 632071 - DNA, 75 bp, synthetic construct
  source 1..75: mol_type = other DNA
tgaatattcatctctggctaaagccgtggtcatggtgctggaaacgttaccggatattcttgagcgcgattgcgc

SEQ ID NO: 632072 - DNA, 75 bp, synthetic construct
  source 1..75: mol_type = other DNA
tcgctttattcttttatagttggaaatatattattgagactaactttataatgtatagtctctttattttttttg

SEQ ID NO: 632073 - DNA, 75 bp, synthetic construct
  source 1..75: mol_type = other DNA
atgtttgtagaaaataacctgaaggctgatcctgataatcagggatgggttctgggttgggctgtagtacgtgac

SEQ ID NO: 632074 - DNA, 75 bp, synthetic construct
  source 1..75: mol_type = other DNA
atgacaactcatgagctgattttactcgtcgccaatgcggttatctgttctgcgatagcaatccgcgtcggaacc

SEQ ID NO: 632075 - DNA, 75 bp, synthetic construct
  source 1..75: mol_type = other DNA
agaacagcgaaaatgagcttgctgagcaacttatagaacaaaccggcgataacactctgacgttaatggataaag

SEQ ID NO: 632076 - DNA, 75 bp, synthetic construct
  source 1..75: mol_type = other DNA
cccccccaggcactggaagccagacgtaaggtcatcaaagagacaatccttagctggcttttggttgacccttca

SEQ ID NO: 632077 - DNA, 75 bp, synthetic construct
  source 1..75: mol_type = other DNA
aactctggcagggcttactggcaggtgctttagcccaactttttgttcatatgatttcattccctctcatgggac

SEQ ID NO: 632078 - DNA, 75 bp, synthetic construct
  source 1..75: mol_type = other DNA
ttatcaccaatgcagttatttgtactggcatagcaattcgcgttgtcactttccagcgtaacggatctcaacacc

SEQ ID NO: 632079 - DNA, 75 bp, synthetic construct
  source 1..75: mol_type = other DNA
taaatcaaaaaatatagatgatattggaatatttgcattggcaatgtgtaatggagaatcaattaacgagaataa

SEQ ID NO: 632080 - DNA, 75 bp, synthetic construct
  source 1..75: mol_type = other DNA
ctgaacgtagcagggatcctcgtccttcagggcgtggaggatgtcaacaaacaggttgaattaactccgcgccct

SEQ ID NO: 632081 - DNA, 75 bp, synthetic construct
  source 1..75: mol_type = other DNA
agaagaaatcacattcttcaactctccgcgacggagaactgcttcagcagcactggcaacatggtggccccggtg

SEQ ID NO: 632082 - DNA, 75 bp, synthetic construct
  source 1..75: mol_type = other DNA
tcgatgagataatcgatatctttctgaatacattaaccgctccaatagcacaaaagcatttaaacaaaaaatggt

SEQ ID NO: 632083 - DNA, 75 bp, synthetic construct
  source 1..75: mol_type = other DNA
agtcaacgtcagttattcacactgttggccgctaaaaatcatgacaacatgtcagctgttcatatagccattcat

SEQ ID NO: 632084 - DNA, 75 bp, synthetic construct
  source 1..75: mol_type = other DNA
cataatcattataaaactgtagaaacatattatgctgctataaatgtaatcagccaaagcctgagttttagtgct

SEQ ID NO: 632085 - DNA, 75 bp, synthetic construct
  source 1..75: mol_type = other DNA
catttaactggcgaagcgatgacggaaacgcgcaacgtgctgattgaagcggcacgaataacgcgcggtgaaatc

SEQ ID NO: 632086 - DNA, 75 bp, synthetic construct
  source 1..75: mol_type = other DNA
gaacagttaactgccgaaaatcgtaaccattgtatgaaactgtctaaaaaaatccatagagaaaaactatacaac

SEQ ID NO: 632087 - DNA, 75 bp, synthetic construct
  source 1..75: mol_type = other DNA
tgatggatattttagccatgaaaacacgtgatggtgaaccagggttatttgctgcaatggaaaataatcacctgt

SEQ ID NO: 632088 - DNA, 75 bp, synthetic construct
  source 1..75: mol_type = other DNA
atgaaactcaaacatgtcggaatgattgtcgtatctgtgttggcgatgtcttcggctgcggttaacgctgccgaa

SEQ ID NO: 632089 - DNA, 75 bp, synthetic construct
  source 1..75: mol_type = other DNA
ctccgcttccctgagatagtaagcgaaatggcatcagcatcttctagggcaaactcaattcaggggtatgacagt

SEQ ID NO: 632090 - DNA, 75 bp, synthetic construct
  source 1..75: mol_type = other DNA
ggctttttacgcagaaaactttcaggtcatgtcgggaaaagaaaatctgctggaaaaaggcatttccgtgcgaac

SEQ ID NO: 632091 - DNA, 75 bp, synthetic construct
  source 1..75: mol_type = other DNA
tgatttatcagaggtcatcatcaatgctgtcatgcttgccgccgttctgaagacgcgcggtaacgtcgtgcagat

SEQ ID NO: 632092 - DNA, 75 bp, synthetic construct
  source 1..75: mol_type = other DNA
agtcaacatcagttattcacactgttggccgctaaaaatcatgacaacatatcagctgttcatatagccattcat

SEQ ID NO: 632093 - DNA, 75 bp, synthetic construct
  source 1..75: mol_type = other DNA
gcagactgaactgcaagtgatgcatccggagcttttacctccggaggtttatgaaatttatctcaaactaacgaa

SEQ ID NO: 632094 - DNA, 75 bp, synthetic construct
  source 1..75: mol_type = other DNA
ggtggggctggcggtcaataaagacaaccctgaattattgaaggaactgaaagcatccttggcgcagagggtgag

SEQ ID NO: 632095 - DNA, 75 bp, synthetic construct
  source 1..75: mol_type = other DNA
aacgggtggcatcaattaaaggcggagcctggattgcccgcctgaataaggtgtctaccgactactgccagtcta

SEQ ID NO: 632096 - DNA, 75 bp, synthetic construct
  source 1..75: mol_type = other DNA
gggatttgatttgccgttataagacggttttttctgatgtctggaaaattcgtcacacacttgatgctcctgtca

SEQ ID NO: 632097 - DNA, 75 bp, synthetic construct
  source 1..75: mol_type = other DNA
ggagtggctgacgtatggcagcggttacctggcgggaatgaagctgggcgggacgccgttggtcgagtatacgcg

SEQ ID NO: 632098 - DNA, 75 bp, synthetic construct
  source 1..75: mol_type = other DNA
gaaaaacgaatttaacggatggaaataaaaggatactacatccttattatgacgtttttcttaatcagaggcttt

SEQ ID NO: 632099 - DNA, 75 bp, synthetic construct
  source 1..75: mol_type = other DNA
cgatggcagctaccgtgcgctgttgcagaagtacaacctgcaaatgccgggtgccgatgaaatatcgaaagcgct

SEQ ID NO: 632100 - DNA, 75 bp, synthetic construct
  source 1..75: mol_type = other DNA
ggcggaaagtcccgaaagcgctgcgcgattagtcgaaaattaatctcgcccggcgaagcggtttatgaatatcgt

SEQ ID NO: 632101 - DNA, 75 bp, synthetic construct
  source 1..75: mol_type = other DNA
gcaaactaccttgctatcaaatcacccgcgatggcttcgcgttccttgctatgggctttactggcaaacgtgcag

SEQ ID NO: 632102 - DNA, 75 bp, synthetic construct
  source 1..75: mol_type = other DNA
ggcggcggcacggctgaccagatcatcggggatgcgccattggtcggcgtcgatccgctggcactgttgcaaagt

SEQ ID NO: 632103 - DNA, 75 bp, synthetic construct
  source 1..75: mol_type = other DNA
gagaaaaagatgagtatgcatttcttcctgctcaccttgaactcattgaaacaccagtatccagacgttctcatt

SEQ ID NO: 632104 - DNA, 75 bp, synthetic construct
  source 1..75: mol_type = other DNA
tcctaatacagcctggcgcagcagcaaacctaattcgaatttcagttgaaagaatgctaaccgctatggatgtag

SEQ ID NO: 632105 - DNA, 75 bp, synthetic construct
  source 1..75: mol_type = other DNA
ctggcaaaacaagcgtggttaattaatgcgggcgttctggatgagcgaacctgcaatacctggaagcaatatacc

SEQ ID NO: 632106 - DNA, 75 bp, synthetic construct
  source 1..75: mol_type = other DNA
acgcaggcgcagcgggcggaagaggcccagcagcaggcggttgcagccggagcaaaacgaccagatatcccgatt

SEQ ID NO: 632107 - DNA, 75 bp, synthetic construct
  source 1..75: mol_type = other DNA
ttcgaccagcaagatcgtaacagcgataacgctgagacggtcaagcagagcgtgcccgccatgcttaaacatgac

SEQ ID NO: 632108 - DNA, 75 bp, synthetic construct
  source 1..75: mol_type = other DNA
aggatgcgggactttgatccggacagccccgaaataaaattcagtgatcgcagggcagcccttgaactgatgacg

SEQ ID NO: 632109 - DNA, 75 bp, synthetic construct
  source 1..75: mol_type = other DNA
ttacaggagatataacaactaacgcctgggtttatgcaaacaggtttgctattaacagcagtaatggtatgtgga

SEQ ID NO: 632110 - DNA, 75 bp, synthetic construct
  source 1..75: mol_type = other DNA
attgtctggtattaatgttcaggatacagggtccaactctgccgataatatagcgggcgtttattacagacccgt

SEQ ID NO: 632111 - DNA, 75 bp, synthetic construct
  source 1..75: mol_type = other DNA
agagatcctgccaaaccgcaatcggccaatgacctcaatcccgacactcattcgccacgtgccgggtaaacatac

SEQ ID NO: 632112 - DNA, 75 bp, synthetic construct
  source 1..75: mol_type = other DNA
gccttgaaaagaattgaagaattacagggcgaacgaaccaaaattatccgtaaagagatggtgctggccgtcgtt

SEQ ID NO: 632113 - DNA, 75 bp, synthetic construct
  source 1..75: mol_type = other DNA
gtataccggacagcctgcccgccgtggaatggctgacctacggcagcggctggctgtcaggcatgaaactcggcg

SEQ ID NO: 632114 - DNA, 75 bp, synthetic construct
  source 1..75: mol_type = other DNA
tacacctggaacgacaacggcgaactcatccgcatcagcagcccgcgccagacccggagttacagctacagcgac

SEQ ID NO: 632115 - DNA, 75 bp, synthetic construct
  source 1..75: mol_type = other DNA
cgatacgtggggaaaggccatccgtaccacgcagggtggtctgacgcgcagtatggaatacgatgctgccggacg

SEQ ID NO: 632116 - DNA, 75 bp, synthetic construct
  source 1..75: mol_type = other DNA
ttgaacaaagggaaagcaattctgacagcgccccctatacgttattaaaaaactatgctgacagatttaaaaaat

SEQ ID NO: 632117 - DNA, 75 bp, synthetic construct
  source 1..75: mol_type = other DNA
taaatatggcgatgcacgaatcaatgcttcttatacacaattagaaataaaacactcacaacccaaaaatagagc

SEQ ID NO: 632118 - DNA, 75 bp, synthetic construct
  source 1..75: mol_type = other DNA
atgggagaaatgtcgaataataatataaaagttcatttaaatgaaccagagataatatttttacatgccgatctt

SEQ ID NO: 632119 - DNA, 75 bp, synthetic construct
  source 1..75: mol_type = other DNA
ggaacgccttatcgagcagggaaaccgtacaggtccgtccacaggccgggtggttgaatccatgctgaaagccaa

SEQ ID NO: 632120 - DNA, 75 bp, synthetic construct
  source 1..75: mol_type = other DNA
atatctttgtgtcccagatggtaaaggggactatacttgtggtggccaagaccaacggggagaatcaaaaggaga

SEQ ID NO: 632121 - DNA, 75 bp, synthetic construct
  source 1..75: mol_type = other DNA
gccgctggcccttatcagcacggaagggacaacagcgtggtacgcagaatacgatgaatggggtaacctgctgaa

SEQ ID NO: 632122 - DNA, 75 bp, synthetic construct
  source 1..75: mol_type = other DNA
cgacccgctgggccgcagggtggtaaaacgggtatggcgacgtgaacgggacctgacgggctggatgtcgctgtc

SEQ ID NO: 632123 - DNA, 75 bp, synthetic construct
  source 1..75: mol_type = other DNA
aatcaatccagaacatctacggcagacactgagcgtaaatctcttactgctgttcagaaatcacaatgtgaaatc

SEQ ID NO: 632124 - DNA, 75 bp, synthetic construct
  source 1..75: mol_type = other DNA
tgtttgaaataagagaaagcgtgcttaagcttaggcctgcgctggatcatgtcgacctcaacgaaccatttgaag

SEQ ID NO: 632125 - DNA, 75 bp, synthetic construct
  source 1..75: mol_type = other DNA
taccggtatgaccgtcacggcaggctgacagagaaaaccgacctcatcccggaaggggttatccgcacggatgat

SEQ ID NO: 632126 - DNA, 75 bp, synthetic construct
  source 1..75: mol_type = other DNA
tggtaataatgctaaatgcatgtgaatcagctcaaaattttaaacgtccagaattatctcaacaaaactgtgata

SEQ ID NO: 632127 - DNA, 75 bp, synthetic construct
  source 1..75: mol_type = other DNA
gttttaactatattattggatgttatttttcttatgttttggactttcataggatgcctccatctaactaatata

SEQ ID NO: 632128 - DNA, 75 bp, synthetic construct
  source 1..75: mol_type = other DNA
cagtatttctgtttttgatgtgatcgggcaggactactggggtgaaggcgtaacagccaaacgtatcgccggtgc

SEQ ID NO: 632129 - DNA, 75 bp, synthetic construct
  source 1..75: mol_type = other DNA
ctaaaagaacccgtagtgggttgggggtacccccgggccccgacgaagtggctaccagcttgaatgcgcctgaga

SEQ ID NO: 632130 - DNA, 75 bp, synthetic construct
  source 1..75: mol_type = other DNA
ccgggatatcgcggagcgtgaggggttgaaactggtggaagttctggaaaaagcagttgaggcatataaggaaaa

SEQ ID NO: 632131 - DNA, 75 bp, synthetic construct
  source 1..75: mol_type = other DNA
atattataatagataaaaatgagggagagtctttttttctaagatcttctaattatctacttaaattatcgccct

SEQ ID NO: 632132 - DNA, 75 bp, synthetic construct
  source 1..75: mol_type = other DNA
ccagtctacccccagaaaaaattcatgttccgtttgtgttgacgccaccggtcactcacgtaaaagggggggaag

SEQ ID NO: 632133 - DNA, 75 bp, synthetic construct
  source 1..75: mol_type = other DNA
atgggattcccgagtctagctcaagactacgttgaagaacgcatatcactcgacaagaggctcatcgctcatccg

SEQ ID NO: 632134 - DNA, 75 bp, synthetic construct
  source 1..75: mol_type = other DNA
caacgagcgagctgtttaccgtatggtaatgtcagtgaaaatacctgccttcaaagtgggcacatcctggcgttt

SEQ ID NO: 632135 - DNA, 75 bp, synthetic construct
  source 1..75: mol_type = other DNA
aagatgaattgcgacagaagatgggaaaacctgacgttacagattcaaatttgaaaaatattatagacgatcttt

SEQ ID NO: 632136 - DNA, 75 bp, synthetic construct
  source 1..75: mol_type = other DNA
caaagccgtgaaggttggccctgactaccacgttgaatatgtccgtcactggtactccgttccacacgaactggt

SEQ ID NO: 632137 - DNA, 75 bp, synthetic construct
  source 1..75: mol_type = other DNA
ttatattggctagtgtatttacaggcattgctcaatcccacgcgctatcattgtatggggtgcttaaaggagatt

SEQ ID NO: 632138 - DNA, 75 bp, synthetic construct
  source 1..75: mol_type = other DNA
tcgctgtacgcaccgttacggacgctggaagcggtaccgggtatccggccggttaatacacatctgcccgggaaa

SEQ ID NO: 632139 - DNA, 75 bp, synthetic construct
  source 1..75: mol_type = other DNA
aaccggaaaaccagtaagcaaggtgtaataaccccctccttctttggacttgggggtggcattaacagcgaagac

SEQ ID NO: 632140 - DNA, 75 bp, synthetic construct
  source 1..75: mol_type = other DNA
tgtttatctgattgacatcagtaaaagtacacgtagtggtattgtcactgataatcatcgtcgggatatagaaaa

SEQ ID NO: 632141 - DNA, 75 bp, synthetic construct
  source 1..75: mol_type = other DNA
tggtgtcgataaaggaagtttttctcgactgaatataagaaccgtcagtaatggtattaatataaaaaataattc

SEQ ID NO: 632142 - DNA, 75 bp, synthetic construct
  source 1..75: mol_type = other DNA
gataagaatccaacagcatctccaggggatcgagcagcagcagaaaacgttcttcaggatttacagaatgctttg

SEQ ID NO: 632143 - DNA, 75 bp, synthetic construct
  source 1..75: mol_type = other DNA
aaccttagcctgtgggggaatgtcggtgtgcaactaggtgataaaggctatagcgatactcagggcatgctgggt

SEQ ID NO: 632144 - DNA, 75 bp, synthetic construct
  source 1..75: mol_type = other DNA
tcatcagggcattatcagacgggaagattgattctcttagcgtaacggtcggacagatgattaatgtcggtgaca

SEQ ID NO: 632145 - DNA, 75 bp, synthetic construct
  source 1..75: mol_type = other DNA
atttataagagaacatcatttaatgcaggcacgctaaacatactagtgaaagataatcatgaaattgatttttct

SEQ ID NO: 632146 - DNA, 75 bp, synthetic construct
  source 1..75: mol_type = other DNA
gaatggaattcttgcttagaagtctacaaagtgacaaaaccgggcgaagaataccctgctgttctagaggcactt

SEQ ID NO: 632147 - DNA, 75 bp, synthetic construct
  source 1..75: mol_type = other DNA
atgttacaaaaaacaaccattaatgccatactgagatatattgatgaacacatagaaaaaaaaataaacattcat

SEQ ID NO: 632148 - DNA, 75 bp, synthetic construct
  source 1..75: mol_type = other DNA
ccggcgcgaaaaatccacctgtaccactgcgaccatcgcggcctgccgctggcccttatcagcacggaaggggca

SEQ ID NO: 632149 - DNA, 75 bp, synthetic construct
  source 1..75: mol_type = other DNA
cggccgttatgaactcaccaccgcttatacccctgccgggcagttacagagccagcacctgaacagcctgctgtc

SEQ ID NO: 632150 - DNA, 75 bp, synthetic construct
  source 1..75: mol_type = other DNA
ccacgacctgaccggcaaacttatccgcagcgaggatgaggggctggtcacccactggcactatgacgaagcaga

SEQ ID NO: 632151 - DNA, 75 bp, synthetic construct
  source 1..75: mol_type = other DNA
gatgtggtgactttcacggggtccgcgacgaccggacagatgctacgagttcagccaaatatcgtcgccaaatct

SEQ ID NO: 632152 - DNA, 75 bp, synthetic construct
  source 1..75: mol_type = other DNA
gatattgttaactttgcttgcctcagcggcgatcatttctatgcacatatggataagattgctgctgccgaatct

SEQ ID NO: 632153 - DNA, 75 bp, synthetic construct
  source 1..75: mol_type = other DNA
gatgtggtgactttcacgggctctgcgacgaccggacagatgctacgtgttcagccaaatatcgtcgccaaatct

SEQ ID NO: 632154 - DNA, 75 bp, synthetic construct
  source 1..75: mol_type = other DNA
actatcgtatgccaaacctcaacgctgcgcttgggtgtgggcagatggaacgccttgattcgttcctgaaacaaa

SEQ ID NO: 632155 - DNA, 75 bp, synthetic construct
  source 1..75: mol_type = other DNA
actatcgaatgcccaatattaatgcggcattaggctgcgcacaaatagaaatgttaaatgagtttttattaaaga

SEQ ID NO: 632156 - DNA, 75 bp, synthetic construct
  source 1..75: mol_type = other DNA
tattacacaagcattaacttttgttgcaacgtgtaattcaatttaccatttgggtgctgagcctatctttgttga

SEQ ID NO: 632157 - DNA, 75 bp, synthetic construct
  source 1..75: mol_type = other DNA
cagatgataatttccccttttcttggggaagcgacagtattttcatgcatgcctgtcttcagtcatacggggaga

SEQ ID NO: 632158 - DNA, 75 bp, synthetic construct
  source 1..75: mol_type = other DNA
ccttgctttgaaaatgggaaatctgcttggcttaacaatcttcaaactgagtttggatacggctcaaccgagttt

SEQ ID NO: 632159 - DNA, 75 bp, synthetic construct
  source 1..75: mol_type = other DNA
tgtctgacaccatgcgcgaggctggcgtaataccttgcgaactgccggaattaatccccggcaccgttgcccgct

SEQ ID NO: 632160 - DNA, 75 bp, synthetic construct
  source 1..75: mol_type = other DNA
atctgacgttagcttcagaagtgagtattaatgctcatataccacgtacgtcccggctcgttataggtatacgcc

SEQ ID NO: 632161 - DNA, 75 bp, synthetic construct
  source 1..75: mol_type = other DNA
cgcgtttacggcgattgaaatggcggaaaacggcgacagctctcacccgaacgaaatcgcgttttcaaaaagtaa

SEQ ID NO: 632162 - DNA, 75 bp, synthetic construct
  source 1..75: mol_type = other DNA
ccgcagatattcccgtggcgagcgataacccagcgcactatgcggatgccattcgttataatgctcgaacgcctc

SEQ ID NO: 632163 - DNA, 75 bp, synthetic construct
  source 1..75: mol_type = other DNA
actatctttaccggtatgaccgtcacggcaggctgacggagaaaaccgacctcatcccggaaggggtatccgtac

SEQ ID NO: 632164 - DNA, 75 bp, synthetic construct
  source 1..75: mol_type = other DNA
ttcctgttgtgcttactaacggcgagagaactaaaatatcactcgtcgatcttctgaacgattctattcacgatg

SEQ ID NO: 632165 - DNA, 75 bp, synthetic construct
  source 1..75: mol_type = other DNA
aaaactgttgcagacatatcgaacaatgataaagaatcaccacgattctttagattcagaaatcctaattacata

SEQ ID NO: 632166 - DNA, 75 bp, synthetic construct
  source 1..75: mol_type = other DNA
tggcagcatcacccgaagtaaatttgactatatgggcgactccagtcacagacggatgcagcaggccggacaaca

SEQ ID NO: 632167 - DNA, 75 bp, synthetic construct
  source 1..75: mol_type = other DNA
tgagctagcaaaaaaaatcgtcacggaaacaataaaaaaactgaatttatcaaaaaacaagcgagtgaatgtttt

SEQ ID NO: 632168 - DNA, 75 bp, synthetic construct
  source 1..75: mol_type = other DNA
ggatggaagagcgcacgacagattcatggtctcagtttgaacggaatttacaaatcttgctacagaagccagctt

SEQ ID NO: 632169 - DNA, 75 bp, synthetic construct
  source 1..75: mol_type = other DNA
ctttgactgggatgcattctctgatcctgattgtccagacaagatcctgttgcgccaacttaatgcccggcaggt

SEQ ID NO: 632170 - DNA, 75 bp, synthetic construct
  source 1..75: mol_type = other DNA
acggctgacgatgtgctgaaaaaatattgggggctggaggtggtgctaaaacaaattgctgatgccgcagatttc

SEQ ID NO: 632171 - DNA, 75 bp, synthetic construct
  source 1..75: mol_type = other DNA
gtgatcctcaccgcggtaattttattattgaaaatggtgaagtacgcattattgatctttcaggaaaacgggcat

SEQ ID NO: 632172 - DNA, 75 bp, synthetic construct
  source 1..75: mol_type = other DNA
acttcagttttacatttacatgggcaacaacaataatatctccattgataatatttgtaactgcaaatatcgtcc

SEQ ID NO: 632173 - DNA, 75 bp, synthetic construct
  source 1..75: mol_type = other DNA
aatcttaataaagaccttgattcccttttagtgaattttggggctatttttacggctttattgctttctgttatt

SEQ ID NO: 632174 - DNA, 75 bp, synthetic construct
  source 1..75: mol_type = other DNA
gttctctatcagaacggctgtaccgtgcacagggtatcgatacaaaaacattactgggacataaagtccaggcaa

SEQ ID NO: 632175 - DNA, 75 bp, synthetic construct
  source 1..75: mol_type = other DNA
gttacttccccaaattacaggctgaaaagtggtattttcggcactgttggcgacgccttaacgggcctggacaat

SEQ ID NO: 632176 - DNA, 75 bp, synthetic construct
  source 1..75: mol_type = other DNA
tactcatatagttctttcattgatcgctgcattattaatcgagatgttgggagtatggtttataaattataagtt

SEQ ID NO: 632177 - DNA, 75 bp, synthetic construct
  source 1..75: mol_type = other DNA
ataactaaaatgaaaatcgaaaagatttgtcagcgtgtatcagatgctactgataataaaattattgttaagtat

SEQ ID NO: 632178 - DNA, 75 bp, synthetic construct
  source 1..75: mol_type = other DNA
ataactaaaatgaaaattgaaaagatttgtcagcgtgtatcagatgctactgatcataaaattatagttaagtat

SEQ ID NO: 632179 - DNA, 75 bp, synthetic construct
  source 1..75: mol_type = other DNA
ccgtacaccggaagtgttccggctagccgccaaccacagcaagcagcaaccggtgatgcttccaattagtagaac

SEQ ID NO: 632180 - DNA, 75 bp, synthetic construct
  source 1..75: mol_type = other DNA
tacgtgacaagctgtcaccgtatgacacagaagagatgcttgaggctatgcgtatttttctggaagaacagggag

SEQ ID NO: 632181 - DNA, 75 bp, synthetic construct
  source 1..75: mol_type = other DNA
catcttgatagcgaattaggcaatcgataccatccttatctgatgcgttcctataaagagcagtttggattattt

SEQ ID NO: 632182 - DNA, 75 bp, synthetic construct
  source 1..75: mol_type = other DNA
tggagctagagaaatagatatgattttgaatcataacgtccttcctctactggcaaaacatatatgcaataatga

SEQ ID NO: 632183 - DNA, 75 bp, synthetic construct
  source 1..75: mol_type = other DNA
tcaacgtagccgatggttccgaagcccatgacgccgttacggttcgccagttgcaaaatgctattggtgcagtcg

SEQ ID NO: 632184 - DNA, 75 bp, synthetic construct
  source 1..75: mol_type = other DNA
cagccgcaaaaccgccttcgggcgctcggtttttgccgttggcggtaatgctacggcggcgcagttgtgcggcat

SEQ ID NO: 632185 - DNA, 75 bp, synthetic construct
  source 1..75: mol_type = other DNA
ccacggcggcgcagttgtgcgggattaacgtccggcgagtacgcattcttatttttaccctttcaggattattag

SEQ ID NO: 632186 - DNA, 75 bp, synthetic construct
  source 1..75: mol_type = other DNA
tacaacaatggctacccttccccctatggcaatgtgcttcaccttaaaggtgccaccgctgctggcgaaggtgag

SEQ ID NO: 632187 - DNA, 75 bp, synthetic construct
  source 1..75: mol_type = other DNA
ttccagatatgtgagagatgttcgcctgggtacgcgagttgttcaattgatggcgcgtggtggtcgttatgaaaa

SEQ ID NO: 632188 - DNA, 75 bp, synthetic construct
  source 1..75: mol_type = other DNA
gcgtgactcattcccagcagagtgggtaatccagtgcgcccttgaaacaggcacctcgcttaattggctcacaac

SEQ ID NO: 632189 - DNA, 75 bp, synthetic construct
  source 1..75: mol_type = other DNA
gataaagaatttgatgatatacgtgatggtaaatgggtaataagtattgatggcgaaataacgatccgtgacatt

SEQ ID NO: 632190 - DNA, 75 bp, synthetic construct
  source 1..75: mol_type = other DNA
tgttttaagggactgcgttttacggaggacaaatatccttttcatcgtgatttatggcgaaaaccaactgcgtcg

SEQ ID NO: 632191 - DNA, 75 bp, synthetic construct
  source 1..75: mol_type = other DNA
cgttgcctctgacgaacttaacagtctgtggcgtgaatattcgcccgtcacgtatgccagaaccgatgcactgtt

SEQ ID NO: 632192 - DNA, 75 bp, synthetic construct
  source 1..75: mol_type = other DNA
tggtaatgtgggtattggtatcggttatggtgcctacgtggacgcgaatgcacttaatggcattgctatcggtag

SEQ ID NO: 632193 - DNA, 75 bp, synthetic construct
  source 1..75: mol_type = other DNA
gtgtatgaagatcagagcattggcgcggagctgacgaaaaaaagatatcaatcgcgtcgcctggcgttccatgct

SEQ ID NO: 632194 - DNA, 75 bp, synthetic construct
  source 1..75: mol_type = other DNA
ggtggtctggtgtcgccagcaattagggcgggtaaagacgcagcatcagctgtgtcgaaatttggcaactataat

SEQ ID NO: 632195 - DNA, 75 bp, synthetic construct
  source 1..75: mol_type = other DNA
gggggcgctctctccttcaacaacactatcaaggaaatgacaggtgacagtaagctgctgaccatcactcagtct

SEQ ID NO: 632196 - DNA, 75 bp, synthetic construct
  source 1..75: mol_type = other DNA
cctatactgttagcgcaggcctgaaaacatctacagctgcagatgtaattgcgagtttggctaataacgcaaaag

SEQ ID NO: 632197 - DNA, 75 bp, synthetic construct
  source 1..75: mol_type = other DNA
gctggcgattcattttgctgcgactactctaacgccgcgcgaactcaattacttaacctgaaaacaggcgagtgg

SEQ ID NO: 632198 - DNA, 75 bp, synthetic construct
  source 1..75: mol_type = other DNA
cgtggtgtgtggcttaagccgtggcgtaaagcgcgcgcatttgattcgcgccgcactggaatcaatcacttacca

SEQ ID NO: 632199 - DNA, 75 bp, synthetic construct
  source 1..75: mol_type = other DNA
cctgctctcactggcctgggcgcgccatggtgggatgacagcgctcgcggcgtggtgtgtggcttaagccgtggc

SEQ ID NO: 632200 - DNA, 75 bp, synthetic construct
  source 1..75: mol_type = other DNA
gcaatgccatcattcgctttattatcaagatttaataattatatagataaagttgcagtttataatgaagaagtt

SEQ ID NO: 632201 - DNA, 75 bp, synthetic construct
  source 1..75: mol_type = other DNA
cggtggtggacgccattgaagcccgctttaaagccctcggcgcacccgtggaattgatcaaagtgcacaacacgc

SEQ ID NO: 632202 - DNA, 75 bp, synthetic construct
  source 1..75: mol_type = other DNA
agttcagccagcaggttgtgttgaatacccagattaaacagcaggaacagcggctcaggcagatcgcagaaaccc

SEQ ID NO: 632203 - DNA, 75 bp, synthetic construct
  source 1..75: mol_type = other DNA
ttttacaagatatgctgatgatattacattctctacgaggaagggggcgtttccttctgctatagcaaaaaatca

SEQ ID NO: 632204 - DNA, 75 bp, synthetic construct
  source 1..75: mol_type = other DNA
attgcgtcaaggcgaaaaattaaatccaaaatatcacttaaaaaaagatgccaataaaaatggccatgccaaaaa

SEQ ID NO: 632205 - DNA, 75 bp, synthetic construct
  source 1..75: mol_type = other DNA
ttgcagtgtgcttgttcgtttgtttccggttacggaacaatctgtttcatggacctaaatggcgttattttcttg

SEQ ID NO: 632206 - DNA, 75 bp, synthetic construct
  source 1..75: mol_type = other DNA
ggataaaagaattagcaggccgcagtagcaccgcatacggaatgactcctcttgtgattttcaggaaaattcagt

SEQ ID NO: 632207 - DNA, 75 bp, synthetic construct
  source 1..75: mol_type = other DNA
gccggtccggtattaatggagaaagaattaaataatccagagcatgacagttacgcaattagtgaaaagagtcac

SEQ ID NO: 632208 - DNA, 75 bp, synthetic construct
  source 1..75: mol_type = other DNA
cgatgacacgttaaatgacaatctggaggatgcctctggttatgttttgggcctcgagatacccattacagatct

SEQ ID NO: 632209 - DNA, 75 bp, synthetic construct
  source 1..75: mol_type = other DNA
aaatcaaccaagaatacccgactggaaaaagtggctaaaggaaatcgtaagaacgaaagttacctaccttacatt

SEQ ID NO: 632210 - DNA, 75 bp, synthetic construct
  source 1..75: mol_type = other DNA
ttcgcgtaatgatgcgtcatttcatcaagcgtttgccgcgatgttgatcaacacacttcatctcccaaaagcact

SEQ ID NO: 632211 - DNA, 75 bp, synthetic construct
  source 1..75: mol_type = other DNA
ccacagagggggaatattgctttaactggctggatgaggtgctggataaacttcatgctggtgggatctctgtct

SEQ ID NO: 632212 - DNA, 75 bp, synthetic construct
  source 1..75: mol_type = other DNA
atgactacaactactgggcattagccgaagtggttgattttgtgagttgggatagctatcccatgtggcataaac

SEQ ID NO: 632213 - DNA, 75 bp, synthetic construct
  source 1..75: mol_type = other DNA
ataagaatcatgagcgaaagcaaagaggatattaaacactattctctgatggattttatgaatgtagattatagc

SEQ ID NO: 632214 - DNA, 75 bp, synthetic construct
  source 1..75: mol_type = other DNA
ttcactgctcaaggaggctgccatcatggctacagtcccaacttccccatacctgaaaatcgaagtcgtcaacgg

SEQ ID NO: 632215 - DNA, 75 bp, synthetic construct
  source 1..75: mol_type = other DNA
ccagaggttctgagagttagcgcgtcacgcgagaaaatgcttcacggcggtcgccataatcactgcctttcttcg

SEQ ID NO: 632216 - DNA, 75 bp, synthetic construct
  source 1..75: mol_type = other DNA
cagtaacggcttagcatcttttgttcagcggggacttcaatatcaccggttagaagaatgctattcgtcccgtca

SEQ ID NO: 632217 - DNA, 75 bp, synthetic construct
  source 1..75: mol_type = other DNA
atataaaagaacaaggtgttacctggttattaccaccttatagttggtccatacggcatattgcccgtaaactgg

SEQ ID NO: 632218 - DNA, 75 bp, synthetic construct
  source 1..75: mol_type = other DNA
tcagcctgccttttatgggcgggagcaatatgaactcacgttcagaagctccagacgttcagaaatttacgttaa

SEQ ID NO: 632219 - DNA, 75 bp, synthetic construct
  source 1..75: mol_type = other DNA
taagcaattggtcgggacgaaaactcaggctaaagttgccattattttcgactgggaaaaccgctgggcgattaa

SEQ ID NO: 632220 - DNA, 75 bp, synthetic construct
  source 1..75: mol_type = other DNA
tacgaacctacaagtgatcatctatggtcagtcgacgtccgtaaagtcgacctgaccgatgtacgcgacatcacc

SEQ ID NO: 632221 - DNA, 75 bp, synthetic construct
  source 1..75: mol_type = other DNA
tgaattaatggtaacgatgatgaggtattactgccatgatgaggtacctgaagtaatgttgctgcatttgctgcc

SEQ ID NO: 632222 - DNA, 75 bp, synthetic construct
  source 1..75: mol_type = other DNA
atgaaagcggcaatagcattatccttattaggatgcgtattcggattttctggcaaagcatttgccggagatgcc

SEQ ID NO: 632223 - DNA, 75 bp, synthetic construct
  source 1..75: mol_type = other DNA
ccgctgctcggtgcaaaggtccttcccggtgaaaccgacattgccctgcccggcccgctgccgttcatcctctcc

SEQ ID NO: 632224 - DNA, 75 bp, synthetic construct
  source 1..75: mol_type = other DNA
ctttaccacagatggtcaggactacacgttatcaaacggcatgccgcggatgtgggaaatacccggatattacgc

SEQ ID NO: 632225 - DNA, 75 bp, synthetic construct
  source 1..75: mol_type = other DNA
tcaaatgggtggcgcggcaaaccagactaccctcaataatggtgtgctacaggtttatggcgcagcgaatgatcc

SEQ ID NO: 632226 - DNA, 75 bp, synthetic construct
  source 1..75: mol_type = other DNA
attacatcgaaagtaagcttaatgtgaatgttatatgcggagtcaccactaacagcctggtgattgagacatcgc

SEQ ID NO: 632227 - DNA, 75 bp, synthetic construct
  source 1..75: mol_type = other DNA
gaaagtcataagttagcaagagaaagattcgatgcaaatgtaaataatgtaaagttattaaaaatactaggaatt

SEQ ID NO: 632228 - DNA, 75 bp, synthetic construct
  source 1..75: mol_type = other DNA
cattaatgatgaaaaacgaactgcactgccagacagcagcttttttgcatgacgatcttcataaaaaatgggaag

SEQ ID NO: 632229 - DNA, 75 bp, synthetic construct
  source 1..75: mol_type = other DNA
tcaaacacggcgcggatatgggcattgcctttgacggtgattttgatcgctgcttcctgtttgacgaaaaagggc

SEQ ID NO: 632230 - DNA, 75 bp, synthetic construct
  source 1..75: mol_type = other DNA
accttgctggataatggcaaccatagctggagtctggcagagaatcgcgcgcaaattaccccttcaaccactgat

SEQ ID NO: 632231 - DNA, 75 bp, synthetic construct
  source 1..75: mol_type = other DNA
tgccaacgctgccgttatcgaaaaagggggactactggaggttaaagatgggggattagcatcttcaatagttca

SEQ ID NO: 632232 - DNA, 75 bp, synthetic construct
  source 1..75: mol_type = other DNA
cccgacgttaagcggtcatttgtcagtcagctatggcaatggcgcaggggtagaatcgccgtggaatactcaggc

SEQ ID NO: 632233 - DNA, 75 bp, synthetic construct
  source 1..75: mol_type = other DNA
ccaccaataccctgtcgggaaacggcaatttttatatgcgtaccgatatggctaatcatcagagcgatcagctca

SEQ ID NO: 632234 - DNA, 75 bp, synthetic construct
  source 1..75: mol_type = other DNA
ggaggttatggatggcgggactgcaactggcgttgataaaaaagcaggcggaaaattaattgtctcaacgaatgc

SEQ ID NO: 632235 - DNA, 75 bp, synthetic construct
  source 1..75: mol_type = other DNA
ccatgaggcaatgaatcattttaacgagtggcgattttcgaaagtttggccattagttaatttcttaggtggtac

SEQ ID NO: 632236 - DNA, 75 bp, synthetic construct
  source 1..75: mol_type = other DNA
tcattcgttccattcgctatgatggacgcaatggtctgcatttttactcagaatatgaaggacttcagtttgaag

SEQ ID NO: 632237 - DNA, 75 bp, synthetic construct
  source 1..75: mol_type = other DNA
tgttctttatccacacaaaaataaaatatcaattatgagtaagatctatattgctcttaaaatgaaaatatactc

SEQ ID NO: 632238 - DNA, 75 bp, synthetic construct
  source 1..75: mol_type = other DNA
atggtttacataccccgatatcggggatgtacaaatcatggttttacgactggtgaatttgaacaactcaaataa

SEQ ID NO: 632239 - DNA, 75 bp, synthetic construct
  source 1..75: mol_type = other DNA
agccaatcagtaacggcgcgttttatcgactgattgagcaggccaaagggagaggattgattagcgttgaacagg

SEQ ID NO: 632240 - DNA, 75 bp, synthetic construct
  source 1..75: mol_type = other DNA
tttagggtatggtcgtgctcataatttaaccatcgattccaactttgattaccatctggtgttaaatcctgacat

SEQ ID NO: 632241 - DNA, 75 bp, synthetic construct
  source 1..75: mol_type = other DNA
tttgtatggttctaaactacaatgtaagcttggagatattgtatataatagagagccatctatatatcaaaataa

SEQ ID NO: 632242 - DNA, 75 bp, synthetic construct
  source 1..75: mol_type = other DNA
cagcgactgcattcccgtatcgcaaatatccgcagggactaccttcacaaagtcacaacgaccgtcagcaaaaac

SEQ ID NO: 632243 - DNA, 75 bp, synthetic construct
  source 1..75: mol_type = other DNA
ctgcgccatattctgagcgtactgccggaatggccctccaaccgtgttgacgaactcctgccatggaacgtggtt

SEQ ID NO: 632244 - DNA, 75 bp, synthetic construct
  source 1..75: mol_type = other DNA
caaaaggtttacaggacgcgggcgtcgatgtgctggatatcggcatgtcaggcaccgaagagatctattttgcca

SEQ ID NO: 632245 - DNA, 75 bp, synthetic construct
  source 1..75: mol_type = other DNA
ttccgactgcaacaggtaataaaaaccagccccacattaccggtcaaccatcaggggcccctgcctgacatcgcc

SEQ ID NO: 632246 - DNA, 75 bp, synthetic construct
  source 1..75: mol_type = other DNA
cgcggagtaactgactcattgatactaattggttctctatgtcctcctgatggcgttgacatgtatcaatacacc

SEQ ID NO: 632247 - DNA, 75 bp, synthetic construct
  source 1..75: mol_type = other DNA
gaaaaagtgggacggggtatcagttttacaattaggcaccgttggtcgcctgcatgaagttaaaaattacgcagg

SEQ ID NO: 632248 - DNA, 75 bp, synthetic construct
  source 1..75: mol_type = other DNA
cgcagataaaggcgcatctgaaggttgatggtgacgacgaagatacgcttatttctgcctatgcgtcggcctccg

SEQ ID NO: 632249 - DNA, 75 bp, synthetic construct
  source 1..75: mol_type = other DNA
gggatccgccgcaacgacgtgaagcgcggtttgcgaaacggcgttgcgccttacatcccggcggccttttgccgg

SEQ ID NO: 632250 - DNA, 75 bp, synthetic construct
  source 1..75: mol_type = other DNA
gcagggacccgccgcaacgacggagagcgcgtgcgcgaaacggcgttgccccttacatcccggcggccttttgcc

SEQ ID NO: 632251 - DNA, 75 bp, synthetic construct
  source 1..75: mol_type = other DNA
tgatgacctgtggatcgagagtttagcgatccaacaattacacaccacggcaaatttacccaacatgcagcgcgt

SEQ ID NO: 632252 - DNA, 75 bp, synthetic construct
  source 1..75: mol_type = other DNA
ccgaagaacaattaaaaattatgagatttgcaattataaaatctataccaagggcaactcttacagataaattag

SEQ ID NO: 632253 - DNA, 75 bp, synthetic construct
  source 1..75: mol_type = other DNA
atattaaaaaaacggtggcaaaagtgaaagcaatgattaaagaggccaaagcgttaaaagaaaagtgtgaaaaga

SEQ ID NO: 632254 - DNA, 75 bp, synthetic construct
  source 1..75: mol_type = other DNA
aactccgggaatggcgcggcgggtccggtggtggacgccatcgaagcccgctttaacgccctcggcgcaccggtg

SEQ ID NO: 632255 - DNA, 75 bp, synthetic construct
  source 1..75: mol_type = other DNA
ccggcacatcagcccgtaaggcggcaacccatgcgactgatgctgcaggctcagcacgtgcagtcagaaaatccg

SEQ ID NO: 632256 - DNA, 75 bp, synthetic construct
  source 1..75: mol_type = other DNA
atgcgaaaccgcggtgtaaataacgacaaaaacaaaattggccgcttcggtcagggccaactattgcctgaaaag

SEQ ID NO: 632257 - DNA, 75 bp, synthetic construct
  source 1..75: mol_type = other DNA
cacacgggccggccggaaatccgttaccgttacgacagcgacgggcgggtgacagaacagcttaacccggcaggc

SEQ ID NO: 632258 - DNA, 75 bp, synthetic construct
  source 1..75: mol_type = other DNA
cgttcagaatgcgtgaagaagagcatgaaaagatgcttcaacgacgcgagaaagggtggcagccgagtgaacaaa

SEQ ID NO: 632259 - DNA, 75 bp, synthetic construct
  source 1..75: mol_type = other DNA
atggttactcaaccattttatcgatggctaattagtgactttccaatggtgcaacaaattaactcgcttgcagaa

SEQ ID NO: 632260 - DNA, 75 bp, synthetic construct
  source 1..75: mol_type = other DNA
ggtgggtcggatcatgcaactgaaccggattaaagctgtgcgcggctataaagctccacgtcgtatcgctggcag

SEQ ID NO: 632261 - DNA, 75 bp, synthetic construct
  source 1..75: mol_type = other DNA
gaaggtgacgctggctcaggatatcgatctcgaacaggtggctgcgctgaccacgggcttttcgggtgcagacct

SEQ ID NO: 632262 - DNA, 75 bp, synthetic construct
  source 1..75: mol_type = other DNA
ccggaactggcccacggcggttgccgggtggccgaatcgacccaggcgcgcatcgatcaggctatccgcgacatc

SEQ ID NO: 632263 - DNA, 75 bp, synthetic construct
  source 1..75: mol_type = other DNA
atgctacgcaacatgaaaattttcatcaccgctcaacaaccagcagggattaaggattttcatgttatccttcgt

SEQ ID NO: 632264 - DNA, 75 bp, synthetic construct
  source 1..75: mol_type = other DNA
tgcgagccaattaaatgatcgcagataccggattaatcaaagtgctttctcaaatgcagccgcttaccaagggat

SEQ ID NO: 632265 - DNA, 75 bp, synthetic construct
  source 1..75: mol_type = other DNA
cagatatttttgccgaacaacgaagacagcttttgcaccgcatacttgagcgccaactggaactgaaacgcgcta

SEQ ID NO: 632266 - DNA, 75 bp, synthetic construct
  source 1..75: mol_type = other DNA
cctttacttatttgatgttgatataatccagaatgagaaaacactggcaaccgttaatttaaaactaggaggaga

SEQ ID NO: 632267 - DNA, 75 bp, synthetic construct
  source 1..75: mol_type = other DNA
ctgaagaacccgcaggattacggccgcctcggcgcgcgcatcccgaaaggtgtgttgctggttggcccgccgggc

SEQ ID NO: 632268 - DNA, 75 bp, synthetic construct
  source 1..75: mol_type = other DNA
ctgcccggttaatcgcacagtggggtgaccggctgccgtatatgaatttttaccgcttctgtcagttgctggagc

SEQ ID NO: 632269 - DNA, 75 bp, synthetic construct
  source 1..75: mol_type = other DNA
attacttatagtgtgcccggagttcagggtgagcagggatgctcaaatgaaccacgagtctgtctggaatattga

SEQ ID NO: 632270 - DNA, 75 bp, synthetic construct
  source 1..75: mol_type = other DNA
atgaaagataaagtctgggattttattgttactcctgaaggttttgctacccgttcatctgagaagttaaccaat

SEQ ID NO: 632271 - DNA, 75 bp, synthetic construct
  source 1..75: mol_type = other DNA
ctgcgtgacgcttacgttgatcacctgttcggttatatcaacgtcaaaaacctcacgccgctcaagctggtgatt

SEQ ID NO: 632272 - DNA, 75 bp, synthetic construct
  source 1..75: mol_type = other DNA
gttcttttccatctcaggctcggagttcgtcgagatgttcgtcggcgtgggtgcggcgcgcgtgcgcgacctgtt

SEQ ID NO: 632273 - DNA, 75 bp, synthetic construct
  source 1..75: mol_type = other DNA
tattcttattttgctactatcttatttcaaaaggtaaatttaaattatctttattttttgtttttatctattctt

SEQ ID NO: 632274 - DNA, 75 bp, synthetic construct
  source 1..75: mol_type = other DNA
actggctattacgtcatgttacatcctgccagtggcctaatggtaagcgtcaacggagcaccgtattgacgctta

SEQ ID NO: 632275 - DNA, 75 bp, synthetic construct
  source 1..75: mol_type = other DNA
cgtcgcattactctgcggaagaactggcgaaagtgaaaaaaagaaagaccggcaacctgtcaaaacgaagcaggt

SEQ ID NO: 632276 - DNA, 75 bp, synthetic construct
  source 1..75: mol_type = other DNA
ctgttggagcaggatttttacgccagtggcccgaaccagaagtggcaggagacatcacgtacttacgtacagatg

SEQ ID NO: 632277 - DNA, 75 bp, synthetic construct
  source 1..75: mol_type = other DNA
caggtttatatttggctataaattatggtaatgcggatatcgttgagactattttcaattcattgtcagagccag

SEQ ID NO: 632278 - DNA, 75 bp, synthetic construct
  source 1..75: mol_type = other DNA
cacgacactcactcaaaccattgctccaatatttgaagaatacctaatggaaattttacctcaacgctcagacac

SEQ ID NO: 632279 - DNA, 75 bp, synthetic construct
  source 1..75: mol_type = other DNA
atgactttgaaatataaaataaaaagattgaagaataaggatggtatcagaagttgcattattattaatgagagc

SEQ ID NO: 632280 - DNA, 75 bp, synthetic construct
  source 1..75: mol_type = other DNA
ctgtagttcttaatgtgccgtcagattatacgggacgcgttttgatatttctcgataaagggaaagtgaaatcac

SEQ ID NO: 632281 - DNA, 75 bp, synthetic construct
  source 1..75: mol_type = other DNA
ttattaaccaatctgttgcaataattccagcacttccgaaagaacagctattgatgttaaaaggatcggtaatga

SEQ ID NO: 632282 - DNA, 75 bp, synthetic construct
  source 1..75: mol_type = other DNA
acgttattaatactatttttaacgcattacccactctttttaatacgtttaaattcgataaaaaatatgaagccc

SEQ ID NO: 632283 - DNA, 75 bp, synthetic construct
  source 1..75: mol_type = other DNA
cacacaaaatatcctaaagaaattttggaagtagttttagaggatggtggtcgcgcagctatcagaataccaggg

SEQ ID NO: 632284 - DNA, 75 bp, synthetic construct
  source 1..75: mol_type = other DNA
tggaagtagttttagaggatggtggtcgcgcagctatcagaataccaggggtaggaactggaaggatcttgctac

SEQ ID NO: 632285 - DNA, 75 bp, synthetic construct
  source 1..75: mol_type = other DNA
tacaagccgtgccgcaaaaagaagatacaccattctatccacgcagtccgtatggtgttgctaaactgtatgctc

SEQ ID NO: 632286 - DNA, 75 bp, synthetic construct
  source 1..75: mol_type = other DNA
ctttctctgcaaatattaataatacagcccagacaaatgaacaccaaaacctgagtgaattgttttataaagaac

SEQ ID NO: 632287 - DNA, 75 bp, synthetic construct
  source 1..75: mol_type = other DNA
gggaaacggcgtggcagggggagtatgacgagtggggaaacctgctgggcgaggaaagcgcgcagcaccttcagc

SEQ ID NO: 632288 - DNA, 75 bp, synthetic construct
  source 1..75: mol_type = other DNA
cagtctgccaatacggaaacgctccagcgttagacaaaaaaatcattatattggtccattcattttgtaattgga

SEQ ID NO: 632289 - DNA, 75 bp, synthetic construct
  source 1..75: mol_type = other DNA
taccctgacatggtggtgccggatgcgctggcagcagaaggaagcagtaaacgggaatggaatcgcttcccggac

SEQ ID NO: 632290 - DNA, 75 bp, synthetic construct
  source 1..75: mol_type = other DNA
tgtgatccctgaacttaacgggaaactgaaaggccatgctcaacgtattccggtaaaaacagggtcagtgactga

SEQ ID NO: 632291 - DNA, 75 bp, synthetic construct
  source 1..75: mol_type = other DNA
agttgttgaatgtacgggcttttatacatcagcagaaaaagctaatgcccatattgaggccggggccggaaaagt

SEQ ID NO: 632292 - DNA, 75 bp, synthetic construct
  source 1..75: mol_type = other DNA
gacctgacggggtggatgtcgctgtcgcgtaaaccggaggagacctggtacgggtgggacggtgacaggctgacc

SEQ ID NO: 632293 - DNA, 75 bp, synthetic construct
  source 1..75: mol_type = other DNA
ccgccagggcggagacagcttcgctggctccgttcacgacagcccgccccgcaagggggacgcccggaaaaggca

SEQ ID NO: 632294 - DNA, 75 bp, synthetic construct
  source 1..75: mol_type = other DNA
aggcaggaggacaacaaaacagacagtaatcaggacagcagtaatcagaatcagaacaggagggaaaagagaata

SEQ ID NO: 632295 - DNA, 75 bp, synthetic construct
  source 1..75: mol_type = other DNA
ctgtttggatttactgctgaagatattatggatttttggcaacacaaagcgccacaaaaatactctgcctttgag

SEQ ID NO: 632296 - DNA, 75 bp, synthetic construct
  source 1..75: mol_type = other DNA
attgctgccggtgttttccggtcatgcgtcggattcggataaaacggatattattgtggtgctgcaggccagacg

SEQ ID NO: 632297 - DNA, 75 bp, synthetic construct
  source 1..75: mol_type = other DNA
tgcactcagcgctgtggggcattttactttaggttgcgtattggaagatcaagagcatcaagtcgctaaagaaga

SEQ ID NO: 632298 - DNA, 75 bp, synthetic construct
  source 1..75: mol_type = other DNA
acaacaacatcatcagtaacagacaaatgacaggcataaaaagacagaagcccacagcagaacgtccgcgtaatg

SEQ ID NO: 632299 - DNA, 75 bp, synthetic construct
  source 1..75: mol_type = other DNA
cgaaggtgacgctacctacagagctgctatcgacaaagcattaacccctgttgggttacggaatgtttgggtaag

SEQ ID NO: 632300 - DNA, 75 bp, synthetic construct
  source 1..75: mol_type = other DNA
caccgagcacgcaagcaaaatcgatgcgattataagtcgcaatggcacaaatacggcacaagaggagaacgtggt

SEQ ID NO: 632301 - DNA, 75 bp, synthetic construct
  source 1..75: mol_type = other DNA
gtttgggtgcggcacgtaaggcatttgtcagaagtggttgcgagaataaagctaaagctacagcctggagcgtat

SEQ ID NO: 632302 - DNA, 75 bp, synthetic construct
  source 1..75: mol_type = other DNA
ttgcggcaacgccaaaggcggttaagacagcgtatgaccttgctaacgggaaatacactgcacaggatgccacca

SEQ ID NO: 632303 - DNA, 75 bp, synthetic construct
  source 1..75: mol_type = other DNA
gaagatttaaatcttgagcaaaccgtagaattagccgctggatcattgcagaaaaaccagaacggcgcggatatt

SEQ ID NO: 632304 - DNA, 75 bp, synthetic construct
  source 1..75: mol_type = other DNA
ttgcggcaacgccaaaggcggtaaaggcagcatatgacctcgctaacgggaaatataccgcacaggatgccacca

SEQ ID NO: 632305 - DNA, 75 bp, synthetic construct
  source 1..75: mol_type = other DNA
aaataaaaatgcatataccttgacttttaattcaaataaaccgtttgcgctgacaaaatattgcatcaaatgctt

SEQ ID NO: 632306 - DNA, 75 bp, synthetic construct
  source 1..75: mol_type = other DNA
ttttatgcttttatactgattttttacaaaaaaataagaatgaagcgtataatagcaatgattgtcttgatggct

SEQ ID NO: 632307 - DNA, 75 bp, synthetic construct
  source 1..75: mol_type = other DNA
attcagacagaaagtgaagtatcactccggtcacccttcagcatcaatgtcgggctggatgctggcgtggctaaa

SEQ ID NO: 632308 - DNA, 75 bp, synthetic construct
  source 1..75: mol_type = other DNA
aaaccggtgtcctttgtggtaccgctggcgtttgtgaaaaatctggataaaacacttaccgtgaatacaggtgcg

SEQ ID NO: 632309 - DNA, 75 bp, synthetic construct
  source 1..75: mol_type = other DNA
cttgaagatattatgagtattccagatagttcacttagaaaacgtctcgggtatgaggttttaagcttctcacta

SEQ ID NO: 632310 - DNA, 75 bp, synthetic construct
  source 1..75: mol_type = other DNA
tacagactgccgcccgatatcagagcatgattgacgccagacagacagctgctgccaatgcgcaacaggaacaag

SEQ ID NO: 632311 - DNA, 75 bp, synthetic construct
  source 1..75: mol_type = other DNA
aatgcatcatttaacttgtggggaaattcgtcaagaccaactgttgcagagcttggtgatgattcaggctggcat

SEQ ID NO: 632312 - DNA, 75 bp, synthetic construct
  source 1..75: mol_type = other DNA
tgctggcaaaagtgcaggcactgtctgaacagctgaaaaccaccggcagtggttccgcaggcgcaaaaccggctt

SEQ ID NO: 632313 - DNA, 75 bp, synthetic construct
  source 1..75: mol_type = other DNA
aaccgaataaaacatatcttgaggcggtactgcgtacagcgttgttaggaaagacagaagacgaatacgttgatt

SEQ ID NO: 632314 - DNA, 75 bp, synthetic construct
  source 1..75: mol_type = other DNA
ttcatcagcaatatctctgaggccgggcagttcgacgtctacgtcaatgaccacaaagcagggaccttcactgcg

SEQ ID NO: 632315 - DNA, 75 bp, synthetic construct
  source 1..75: mol_type = other DNA
ggtcaaacaagctgtaaaacgagcagtaagtgccatggtggtttctggcctttcaacacaaccacctacagaatc

SEQ ID NO: 632316 - DNA, 75 bp, synthetic construct
  source 1..75: mol_type = other DNA
cgttacctgaaagcctgtgccgagaacgctatcattgatgtgttttctagttatgcagctgaagagtttctgaag

SEQ ID NO: 632317 - DNA, 75 bp, synthetic construct
  source 1..75: mol_type = other DNA
acccatggtaccgccatccggggcgatgacgggctgatgtgggtgacgccaggcgatcaaaaagctgtcgatccg

SEQ ID NO: 632318 - DNA, 75 bp, synthetic construct
  source 1..75: mol_type = other DNA
taaggtcgaaggtggcatcaccaatattgatgcgaaatcccgtagcggaaaaatgaccatcacagatatcagcgg

SEQ ID NO: 632319 - DNA, 75 bp, synthetic construct
  source 1..75: mol_type = other DNA
actattaacggtgtttcgtttgatggttctaaaaacattgagctaacggctgaaaatttaaatcttgagcaaacc

SEQ ID NO: 632320 - DNA, 75 bp, synthetic construct
  source 1..75: mol_type = other DNA
caattctgccgataatatagctggcgtttattacagaccagttcaaaagtatataaatggcacttggtataatgt

SEQ ID NO: 632321 - DNA, 75 bp, synthetic construct
  source 1..75: mol_type = other DNA
acgtactgttacgtccgctgcttgatgatgtgccggaggatgaactgtgcggcgtagcgcccggaagagtgttgc

SEQ ID NO: 632322 - DNA, 75 bp, synthetic construct
  source 1..75: mol_type = other DNA
ttttctgcatgggatattccgcaaactatcccggatataacgcctgcgaaaatagccagggcgggaggcgagtaa

SEQ ID NO: 632323 - DNA, 75 bp, synthetic construct
  source 1..75: mol_type = other DNA
gagcagcgtttatcactaacacaattggaagcgatcatcactgtctctgctactcattttcctaatgcagatcga

SEQ ID NO: 632324 - DNA, 75 bp, synthetic construct
  source 1..75: mol_type = other DNA
tttggggaaaagataattacaatccaaacaaacctcttcaacgctataccggggaaggatatgcttctataaaag

SEQ ID NO: 632325 - DNA, 75 bp, synthetic construct
  source 1..75: mol_type = other DNA
tctggtgttgcttcaaccatcactactgaagatggcactaatattgatattgctgctaacggtaatattggtctg

SEQ ID NO: 632326 - DNA, 75 bp, synthetic construct
  source 1..75: mol_type = other DNA
tctgacggcaacctgactaaaaaccaggccggcggtccagatgcggcaacgttggacggtattttcaacggtgcg

SEQ ID NO: 632327 - DNA, 75 bp, synthetic construct
  source 1..75: mol_type = other DNA
cgatttgtgtgtataaatgatgagattaatgacgacttagatgatagttcaattttaataaatgatataattaaa

SEQ ID NO: 632328 - DNA, 75 bp, synthetic construct
  source 1..75: mol_type = other DNA
ggagctgcgataatcaaagaggatgaagtgaattatcactttgaattccatatggaaaactttattaaattaaaa

SEQ ID NO: 632329 - DNA, 75 bp, synthetic construct
  source 1..75: mol_type = other DNA
aatttaaaagaatataggcaagcaaaacaagatttaaatgttatcgacaataaaattgacactataaaaaaagat

SEQ ID NO: 632330 - DNA, 75 bp, synthetic construct
  source 1..75: mol_type = other DNA
tcgtgaactgacggttcaggcttctaccgggactaactccgattcggatctggactccattcaggacgaaatcaa

SEQ ID NO: 632331 - DNA, 75 bp, synthetic construct
  source 1..75: mol_type = other DNA
acgacatctgttgatgttgttctggcgagcgatggcaaaattacagcgaaagatggctcagctctgtatatcgac

SEQ ID NO: 632332 - DNA, 75 bp, synthetic construct
  source 1..75: mol_type = other DNA
tcttccctgggtgccgtgcagaaccgtctggattccgccgtcaccaacctgaacaacaccactaccaacctgtct

SEQ ID NO: 632333 - DNA, 75 bp, synthetic construct
  source 1..75: mol_type = other DNA
tactccgttgagtgtctctaaaaaaatccagcctaataaatcttgtgagtgggctgtaaacacatttagtccaaa

SEQ ID NO: 632334 - DNA, 75 bp, synthetic construct
  source 1..75: mol_type = other DNA
ctataggaagggatagtgtttattctgcgttaaaatcagtgttttctcagacatataaagtctctgagataataa

SEQ ID NO: 632335 - DNA, 75 bp, synthetic construct
  source 1..75: mol_type = other DNA
acagctttagcgcaacggctgcatctaaagattctctgttgagcacactggcaccaaacgctggcgatacattta

SEQ ID NO: 632336 - DNA, 75 bp, synthetic construct
  source 1..75: mol_type = other DNA
cgttgtttagatattaccaattggtaactggtagtttttatccgtgctattataatgatcatgcctgtgttaatg

SEQ ID NO: 632337 - DNA, 75 bp, synthetic construct
  source 1..75: mol_type = other DNA
ctcccggcaccaatcaccgccaatacaatagcgaaagcagcagcaaccagtttcttgataagcccggtcatcgca

SEQ ID NO: 632338 - DNA, 75 bp, synthetic construct
  source 1..75: mol_type = other DNA
tttcttgataagcccggcaatcgtataaacccggcgtataacctgcggattggcaacgaagatgacgccatttca

SEQ ID NO: 632339 - DNA, 75 bp, synthetic construct
  source 1..75: mol_type = other DNA
tcactcgttcagcactgtaggacaacgcgacaagaaaggcagaacgcgggcagagagtagccacctaacagcaga

SEQ ID NO: 632340 - DNA, 75 bp, synthetic construct
  source 1..75: mol_type = other DNA
agcggtctttttaccgcaatacgcccaagtcttcattgaagctgatccttacggcgttctgacctatggcgatgc

SEQ ID NO: 632341 - DNA, 75 bp, synthetic construct
  source 1..75: mol_type = other DNA
accgctttaaggatcgctcagatgaactgaacacccagagcaaccgttatgttctgcaacttggcggcgatcttg

SEQ ID NO: 632342 - DNA, 75 bp, synthetic construct
  source 1..75: mol_type = other DNA
ggtacatcaaaaaatcgtaatagttatggcgaggttctggttgacggtaaaaattcaacattgaatgctgaatat

SEQ ID NO: 632343 - DNA, 75 bp, synthetic construct
  source 1..75: mol_type = other DNA
atgaaatatacaacgattcagaaacgctaagtgggctaggtggagaacgaatagccaaggataagtttgaaaaac

SEQ ID NO: 632344 - DNA, 75 bp, synthetic construct
  source 1..75: mol_type = other DNA
tataaacatgtccgaatattacggcaaaaacgcccaacttcagtacttcgaagatgtcttgttagactctgactt

SEQ ID NO: 632345 - DNA, 75 bp, synthetic construct
  source 1..75: mol_type = other DNA
gttcgcaatggcacgctttctattgtcaagctacctacaggcggatactgcactaattcgtcttgcagtagagtg

SEQ ID NO: 632346 - DNA, 75 bp, synthetic construct
  source 1..75: mol_type = other DNA
aggcattatccaggatttagcttacggatacgctcatctcaaaacatactacatacttttgtattttatgctatt

SEQ ID NO: 632347 - DNA, 75 bp, synthetic construct
  source 1..75: mol_type = other DNA
aatttcatactgcagtacttactcttgcgggccatggaagtattcaagaacgcttgattaattcgtatgttttta

SEQ ID NO: 632348 - DNA, 75 bp, synthetic construct
  source 1..75: mol_type = other DNA
gcgcggaatgcgcgcgccaacgctttcgttttgcaacatgtcatgcctgtgtcgaggcttgcccggcacaggcgc

SEQ ID NO: 632349 - DNA, 75 bp, synthetic construct
  source 1..75: mol_type = other DNA
catgagccgccttaaccatccgaaagcggacctgtcaaaggggcagtacggtaccgtggggcaggggctgcatat

SEQ ID NO: 632350 - DNA, 75 bp, synthetic construct
  source 1..75: mol_type = other DNA
aaatggcggccgaacgcatgtactgttgcagctggttatcaaacaaaatcgcacagatatccaccggttactggg

SEQ ID NO: 632351 - DNA, 75 bp, synthetic construct
  source 1..75: mol_type = other DNA
aagcgctggcaacaattaattaaagagaatgatttatggtcaaatgttttgcttcatgacccccgtttgctcagt

SEQ ID NO: 632352 - DNA, 75 bp, synthetic construct
  source 1..75: mol_type = other DNA
tcctatttcaagaaagggcggttataccgatccgctggcgcaatgtgaacaggcgctgcgtgaaggtaaaacact

SEQ ID NO: 632353 - DNA, 75 bp, synthetic construct
  source 1..75: mol_type = other DNA
gttttcgccttgctttcgctttttccgctgcgttaccaggcttctgttcatccggttgctgccgcggattatttt

SEQ ID NO: 632354 - DNA, 75 bp, synthetic construct
  source 1..75: mol_type = other DNA
catgagccgtcttaaccatccgaaagcggacctgtcaaaggggcagtacggaaccgtgggcaggggctgcatatc

SEQ ID NO: 632355 - DNA, 75 bp, synthetic construct
  source 1..75: mol_type = other DNA
atccgcaacgatgccccgcaccgcattatcagtaaggtcactctgactgcgcgtgatgaagataacaaaattgtc

SEQ ID NO: 632356 - DNA, 75 bp, synthetic construct
  source 1..75: mol_type = other DNA
aagatacactaattgatgcaattggtggagatatagatctgacaggattaatagatgatccatttagcaattacg

SEQ ID NO: 632357 - DNA, 75 bp, synthetic construct
  source 1..75: mol_type = other DNA
gaaaggtgtggagattaatacacgtcagcttcagatgaaagcagaggttgaggcgctgacagaactgaaggcgat

SEQ ID NO: 632358 - DNA, 75 bp, synthetic construct
  source 1..75: mol_type = other DNA
tatcattctattacttaatgctgacggtgaaattgttagcaaagaagagattatcgataaggtctggagcgcgag

SEQ ID NO: 632359 - DNA, 75 bp, synthetic construct
  source 1..75: mol_type = other DNA
tgaaagtgcaggagatccgtggctacgatcaggtaacacggattgcgaacacgccagcgtttatcaaaggcgtca

SEQ ID NO: 632360 - DNA, 75 bp, synthetic construct
  source 1..75: mol_type = other DNA
cacggcgctggattcaaacaagtacacctgtaataaggtgaacgcggatactttcgcctcttatgcgcagcttga

SEQ ID NO: 632361 - DNA, 75 bp, synthetic construct
  source 1..75: mol_type = other DNA
catagttgtaggaagtttaaggaatcatttgatgtcggcatgtcgtcagctatacgcactgggcgtcccttagtt

SEQ ID NO: 632362 - DNA, 75 bp, synthetic construct
  source 1..75: mol_type = other DNA
tcgccccgtggctgcccaccaccagcaccaacaattaccgcattgcgttacggaagtatcaacactatcagcgtc

SEQ ID NO: 632363 - DNA, 75 bp, synthetic construct
  source 1..75: mol_type = other DNA
aacatttgaggcatttccagaggaagagcaacagcaaatgcttaaagatatgaaggagaaaaaagagacaatgga

SEQ ID NO: 632364 - DNA, 75 bp, synthetic construct
  source 1..75: mol_type = other DNA
gaagaccaagaaaaaatgcttcaagaaatcaaagacaagaaaaaatcaatggaagaaaccattgcccggtggctg

SEQ ID NO: 632365 - DNA, 75 bp, synthetic construct
  source 1..75: mol_type = other DNA
acattgaaatgaatggcaccgcagaatactcagtattaaatgatggttatcaaattgttcaaatgggtggcgcgg

SEQ ID NO: 632366 - DNA, 75 bp, synthetic construct
  source 1..75: mol_type = other DNA
cgatagctatactctgggtgcttatgccggttgggagcatcaaaacggtacctatgttgacggggtggtgaaagt

SEQ ID NO: 632367 - DNA, 75 bp, synthetic construct
  source 1..75: mol_type = other DNA
ggtgctcatgtcgagagcgggttccgttgggttgacggattgtggagtgttagaccctatctggcctttaccggc

SEQ ID NO: 632368 - DNA, 75 bp, synthetic construct
  source 1..75: mol_type = other DNA
tgcaatgcctgcccgtagaagaacacgagccagtgttgacgttactgttctcggtaatgggcggcgaacatttac

SEQ ID NO: 632369 - DNA, 75 bp, synthetic construct
  source 1..75: mol_type = other DNA
tgcaatgtctgcctgtagaagaacacgagccgatgttacggtcattgttctcagtggtgggcggcgaacatttac

SEQ ID NO: 632370 - DNA, 75 bp, synthetic construct
  source 1..75: mol_type = other DNA
tctgttgctggcagaagggccgccgcgtttactgtggtcagcgcttgatcacctggtccagcgtcagcttctttc

SEQ ID NO: 632371 - DNA, 75 bp, synthetic construct
  source 1..75: mol_type = other DNA
tcctgtttgacgaaaaagggcagtttatcgagggctactacattgtcggcctgctggcagaagcgttcctcgaaa

SEQ ID NO: 632372 - DNA, 75 bp, synthetic construct
  source 1..75: mol_type = other DNA
ttgatattggtaatcaatataaggttaaacttacacaaagcggaaaaaaagagctctctttaactttagaattta

SEQ ID NO: 632373 - DNA, 75 bp, synthetic construct
  source 1..75: mol_type = other DNA
tatcatattatttatattatgtgcttatttttgctcttatggaaccatctcgattgttaaaatatttttatattt

SEQ ID NO: 632374 - DNA, 75 bp, synthetic construct
  source 1..75: mol_type = other DNA
actacgggaagtcaacgcagacgcgtcttgagccgtcggtggctgcagcgaaagcggggaaactgccggaggcgt

SEQ ID NO: 632375 - DNA, 75 bp, synthetic construct
  source 1..75: mol_type = other DNA
gaattatcgaaggaaatctgaacagtccactgtcagtaaaaattcttgctaaacgttccggctattcagagcgct

SEQ ID NO: 632376 - DNA, 75 bp, synthetic construct
  source 1..75: mol_type = other DNA
gtcgctgtgtattaataaatgtgttatgaaaagaggacctatatatacactatttcacagaacagataataaaaa

SEQ ID NO: 632377 - DNA, 75 bp, synthetic construct
  source 1..75: mol_type = other DNA
ttatttataaccgtaacctttttgagtccataatatcaatttatggtcctgttaatgaaatgtctgactttatga

SEQ ID NO: 632378 - DNA, 75 bp, synthetic construct
  source 1..75: mol_type = other DNA
tagcggaggctcaggagcgaatgagccttcgtgagtttcaggtgtgggtaaagtaccgtaataagtatggtcagc

SEQ ID NO: 632379 - DNA, 75 bp, synthetic construct
  source 1..75: mol_type = other DNA
ctccttccgtaccaaaccttaaaatgcctgtgaatctgggaatggactatatccatacccagagcgggaatcact

SEQ ID NO: 632380 - DNA, 75 bp, synthetic construct
  source 1..75: mol_type = other DNA
gttcaaggtgtcaccagtgcagtatcgcaatgcagatgcttgggatatgcagtacgcccaacccatattatacag

SEQ ID NO: 632381 - DNA, 75 bp, synthetic construct
  source 1..75: mol_type = other DNA
gagtcattgctgataatttcgcgtaaggtcactgcccttaaagtcgcagctgccttttcctcgtggttgtttacc

SEQ ID NO: 632382 - DNA, 75 bp, synthetic construct
  source 1..75: mol_type = other DNA
gtgaaagttgttatttacaaaacagatgacactaataagaaaaacctgctgggtactacggacattctggcgacg

SEQ ID NO: 632383 - DNA, 75 bp, synthetic construct
  source 1..75: mol_type = other DNA
tgattctggattcatacgagtatgttaaaaatgatgataatttccgccgagggtccagagtgagcagtttagaag

SEQ ID NO: 632384 - DNA, 75 bp, synthetic construct
  source 1..75: mol_type = other DNA
cctggctggcgtggcactcagaaaactgggctcccccctctacatggaaagaaggtgttgccggtgtcctgatgg

SEQ ID NO: 632385 - DNA, 75 bp, synthetic construct
  source 1..75: mol_type = other DNA
agcgaatccctgaagctggcgctggcgaaagggctgcaggacgcgggcgtggacgtgctggatatcggcctttcc

SEQ ID NO: 632386 - DNA, 75 bp, synthetic construct
  source 1..75: mol_type = other DNA
tggaatcgcgcggtaatatagcattaatgaatgaacaggttgaatttattacaaaatttttaaacggtgatggtt

SEQ ID NO: 632387 - DNA, 75 bp, synthetic construct
  source 1..75: mol_type = other DNA
cgtaaaacgatctttagccctttcatgataacccagactgtccatttcgccgatcctttaaaattatcaagagaa

SEQ ID NO: 632388 - DNA, 75 bp, synthetic construct
  source 1..75: mol_type = other DNA
agggcataaacaggaagcggcgcggctactcggctgggggcgtaacactctgacgcggaagttaaaagagctggg

SEQ ID NO: 632389 - DNA, 75 bp, synthetic construct
  source 1..75: mol_type = other DNA
gtcagtcggtgggggggctgttcagtctgtcggtgtccggctggcagcggagttattacccggcacagatgactg

SEQ ID NO: 632390 - DNA, 75 bp, synthetic construct
  source 1..75: mol_type = other DNA
actgcgggtgagctggtcacggcagagtgaggaatatgaggacatgtcctcctttgacccgacagagctgtggtc

SEQ ID NO: 632391 - DNA, 75 bp, synthetic construct
  source 1..75: mol_type = other DNA
gcgttttaatttgagaagctcgaatacagagccagtattacgtttaaatgttgaatccaagaaggataaagattt

SEQ ID NO: 632392 - DNA, 75 bp, synthetic construct
  source 1..75: mol_type = other DNA
tgaagttaacaagatgcatgttcctgactttcgccagttccttcctgtaggtgcaaatatgttgcatacctattc

SEQ ID NO: 632393 - DNA, 75 bp, synthetic construct
  source 1..75: mol_type = other DNA
aaagaccaccagcaagggtacacaaatgacgatggcgagtatggcggtcccccttccgtgcagccaggcagatga

SEQ ID NO: 632394 - DNA, 75 bp, synthetic construct
  source 1..75: mol_type = other DNA
tttataaggataacgattaatcatgtttgtcataactttgacaagttaaccgcgcaggaaggccatcatgggaat

SEQ ID NO: 632395 - DNA, 75 bp, synthetic construct
  source 1..75: mol_type = other DNA
aagccacagacacaggaaaatggcacacatccattactacatcgccaattgatgattcgaaaaatgtaattttat

SEQ ID NO: 632396 - DNA, 75 bp, synthetic construct
  source 1..75: mol_type = other DNA
gaccagttggggcaatggtgtgaaggagggatttatgggaatcgctttacagaaaatctcccgccaataaatttt

SEQ ID NO: 632397 - DNA, 75 bp, synthetic construct
  source 1..75: mol_type = other DNA
tgaaacgggagcaacaggcccagctggtccgcggggagcgcagggaccgaaaggggagaaaggagaccacggtcg

SEQ ID NO: 632398 - DNA, 75 bp, synthetic construct
  source 1..75: mol_type = other DNA
gtactggctattttgttgttggcaaaatcgaaaaaaataaacgccgctatccgtgggcgcaattcgttattgacg

SEQ ID NO: 632399 - DNA, 75 bp, synthetic construct
  source 1..75: mol_type = other DNA
cggtgccgctgcacacgctgctgatacccgcattggtgtaacaatctataagtacgacgataacttttgtagtgc

SEQ ID NO: 632400 - DNA, 75 bp, synthetic construct
  source 1..75: mol_type = other DNA
ggggtgcgcattggtgcccccaccggcgtggcctgttcggtgtgccccggcggagtgacgtccggccatccggtc

SEQ ID NO: 632401 - DNA, 75 bp, synthetic construct
  source 1..75: mol_type = other DNA
aggaagagaagtctgactcgccgcacttgcagcaatttcgtgaatggttgctggcgaaatcggtcgtaccgcagg

SEQ ID NO: 632402 - DNA, 75 bp, synthetic construct
  source 1..75: mol_type = other DNA
atttggatagtggcgatatggtgattccctgtgatgtgcctattcgtaccggtaatcgttttattatgacgtggc

SEQ ID NO: 632403 - DNA, 75 bp, synthetic construct
  source 1..75: mol_type = other DNA
gtcaacaaaagatcaaattcaaaaacagaagctcgcatatggtgatattgtcattacacgttcaggttcaggaac

SEQ ID NO: 632404 - DNA, 75 bp, synthetic construct
  source 1..75: mol_type = other DNA
aaaagctaaattgaccgttgtacaagtttgccatgcactggggtataatttatttgatcataaatcatgtgtttt

SEQ ID NO: 632405 - DNA, 75 bp, synthetic construct
  source 1..75: mol_type = other DNA
ataaagaaaagtcagttaggtatagtaatgcattatgtttgctgaatttgcatcaatgccatgaagttaaaatga

SEQ ID NO: 632406 - DNA, 75 bp, synthetic construct
  source 1..75: mol_type = other DNA
cgtctggaagaacgccgggcaagggctgaggcaatggcagctcgccttgatagcctggcgtgtcatatcacatcc

SEQ ID NO: 632407 - DNA, 75 bp, synthetic construct
  source 1..75: mol_type = other DNA
cactggaagcgcgtggcctgtaccggagagcggcggcgcggtgggctgaggtcatcatgctggcgaatgatgaca

SEQ ID NO: 632408 - DNA, 75 bp, synthetic construct
  source 1..75: mol_type = other DNA
atggtggagagagggagtactaacccaatatattgatcgatatattaattttgttttgtgtttttcgcttattta

SEQ ID NO: 632409 - DNA, 75 bp, synthetic construct
  source 1..75: mol_type = other DNA
ttgccggtatgcagcggcagtttgcttgcaatgtccgatcaaaaactgtcagtggcagaactgcttacagagtta

SEQ ID NO: 632410 - DNA, 75 bp, synthetic construct
  source 1..75: mol_type = other DNA
tatggaaagcaaaaagtgttcgcgagcatgatgttgaaagtgaagtagtgatctattgtatagaggaaccggaag

SEQ ID NO: 632411 - DNA, 75 bp, synthetic construct
  source 1..75: mol_type = other DNA
gaattaaataagctacttactgaagtaaatgaaaaagttaaaggaataagttatgttgcatcagcaacagaagag

SEQ ID NO: 632412 - DNA, 75 bp, synthetic construct
  source 1..75: mol_type = other DNA
tgatagaaaaattaaagatttatttcacttcaaccttgttgattcattaacattgaaacctagaagaatgaaaca

SEQ ID NO: 632413 - DNA, 75 bp, synthetic construct
  source 1..75: mol_type = other DNA
tactaacgcatgaacagtttatcaacacaataccgcaggtcgcaacttgtagcgcggccagttcctggtggagca

SEQ ID NO: 632414 - DNA, 75 bp, synthetic construct
  source 1..75: mol_type = other DNA
gcgcactggtacgttgagtcatcgctaagcaccattgatgcggcaaaagcggcattttatcctgacatcaacctg

SEQ ID NO: 632415 - DNA, 75 bp, synthetic construct
  source 1..75: mol_type = other DNA
tctctaagtatgcggtttggaaagcataccagcgggtcaaagctaatcgaggtgcggcaggtgtcgacggcagtc

SEQ ID NO: 632416 - DNA, 75 bp, synthetic construct
  source 1..75: mol_type = other DNA
aaaaccatcaatgatgccagtatgcgagagtatttcattgccctgaaatacgccttgtctcagaaagacgtaaga

SEQ ID NO: 632417 - DNA, 75 bp, synthetic construct
  source 1..75: mol_type = other DNA
tacctgaaacgaaaagcaaaaataagcaaagataaaaactcggctttaagtaaactgcaagtaaaaataaagaaa

SEQ ID NO: 632418 - DNA, 75 bp, synthetic construct
  source 1..75: mol_type = other DNA
gatgagaaaatcagcgatgccttcgtctattggttcagcgagtataaaagcgaatttttggcgcagcccgagttc

SEQ ID NO: 632419 - DNA, 75 bp, synthetic construct
  source 1..75: mol_type = other DNA
taaagggaaatataattctgatactgactttttttatgatagtagcaatcctggttactgatatcggtgttgcag

SEQ ID NO: 632420 - DNA, 75 bp, synthetic construct
  source 1..75: mol_type = other DNA
ttcatgaacccaataaaatttcgcaatttacaggaggtgacgacgcgaaaagatgatgaacctgattttggagca

SEQ ID NO: 632421 - DNA, 75 bp, synthetic construct
  source 1..75: mol_type = other DNA
cgccggccgcggatgtcgaaaatcggcccccctcagttgagagcgaagctttatatgtccgccctgtgcggaaaa

SEQ ID NO: 632422 - DNA, 75 bp, synthetic construct
  source 1..75: mol_type = other DNA
acagaatctgttggtatcggtgcaggtgttgacgcttcagttatgactctggcttgtagaacgtggcaagaatgc

SEQ ID NO: 632423 - DNA, 75 bp, synthetic construct
  source 1..75: mol_type = other DNA
agcatgatgccagggatgccgagccaccgtcagatgatgcgctggcaactggagcatatggacttcagggaaggg

SEQ ID NO: 632424 - DNA, 75 bp, synthetic construct
  source 1..75: mol_type = other DNA
attttattggtgcggtggagttatttgtaaagtcttcgtatacaaaaacacattcaaacaatttttttaacaaca

SEQ ID NO: 632425 - DNA, 75 bp, synthetic construct
  source 1..75: mol_type = other DNA
cgcgtggagagcccgggagaaatacacctgctgcaccggaacgaccgagtaaacgttatggcagtcagagagcat

SEQ ID NO: 632426 - DNA, 75 bp, synthetic construct
  source 1..75: mol_type = other DNA
actgtaagcacgctggcaacgctgtcagcgggtatggccggcggcattgccagtggcgatgtggctggcgcggct

SEQ ID NO: 632427 - DNA, 75 bp, synthetic construct
  source 1..75: mol_type = other DNA
ccaacgacagtatcagcccgatatttgacaaggagaaagagcagaaccgcctgaaggaaatcgggatgatcagcg

SEQ ID NO: 632428 - DNA, 75 bp, synthetic construct
  source 1..75: mol_type = other DNA
gtaaaattggtaaagattttcctccatatatcattgctgaattatcggctaatcataatggagatataaatcgtg

SEQ ID NO: 632429 - DNA, 75 bp, synthetic construct
  source 1..75: mol_type = other DNA
caatgtttcaatgaatgcgacagccaaaattaacgctttatatttcattggtggcggtggcgtctctttcttgaa

SEQ ID NO: 632430 - DNA, 75 bp, synthetic construct
  source 1..75: mol_type = other DNA
tctacagatctagaacgtgcaaataccatactgcgtaagattaatagcacgcctgtaataaggcatctactacgc

SEQ ID NO: 632431 - DNA, 75 bp, synthetic construct
  source 1..75: mol_type = other DNA
gctttgcttcatgaacgcatgaatgcaataaataatatgtcgcaaatgatagatgagcgtgacagaacaattcat

SEQ ID NO: 632432 - DNA, 75 bp, synthetic construct
  source 1..75: mol_type = other DNA
ccactcaacttgtcaataagtacttaggtaacatatatacaggagtattcaaaacactgggaagtattgatgaca

SEQ ID NO: 632433 - DNA, 75 bp, synthetic construct
  source 1..75: mol_type = other DNA
ttaactttatgattgtttctttctgttctattatgtctataatttctagttctattgtgaaatatccatcttttt

SEQ ID NO: 632434 - DNA, 75 bp, synthetic construct
  source 1..75: mol_type = other DNA
aatttctggaaaggatgctgattctttgactatttttaagcgagagtatcctgaaaaatatgctgaactcagggc

SEQ ID NO: 632435 - DNA, 75 bp, synthetic construct
  source 1..75: mol_type = other DNA
gataaaggtgaattatttactaatgacaatgtcaaaagtattcgacctggattcggccttcccccagtttatctc

SEQ ID NO: 632436 - DNA, 75 bp, synthetic construct
  source 1..75: mol_type = other DNA
cgccagcgggtttgctgggtaaaagtttttacccagaggtgatgcgtttagatccgcgcaccaccagaccgtggt

SEQ ID NO: 632437 - DNA, 75 bp, synthetic construct
  source 1..75: mol_type = other DNA
atatatttggagtattcttcattaaaacaaaaataaaaaaccttctctgtgaagatattatggcctgttcgatgg

SEQ ID NO: 632438 - DNA, 75 bp, synthetic construct
  source 1..75: mol_type = other DNA
tggtggaaaatcgggggctggtcagtgctgcagacggtcaggtgtacctgacggcactgggtaagaatatgctgc

SEQ ID NO: 632439 - DNA, 75 bp, synthetic construct
  source 1..75: mol_type = other DNA
gagctatgggcggctaacatcgaggtcatcaaaaaagcgattgagcaatcagggatcgacgccagtcaaatcaaa

SEQ ID NO: 632440 - DNA, 75 bp, synthetic construct
  source 1..75: mol_type = other DNA
gcgagacgctacacacgtcctggacgggctgctgtatcacgaatcagacctgcgtatcgaggagcactacaccga

SEQ ID NO: 632441 - DNA, 75 bp, synthetic construct
  source 1..75: mol_type = other DNA
caccttcctggatgtgctgcagtggaccgtggtatggacgctgctggcgaccactctgcagtgtacggtgggcgt

SEQ ID NO: 632442 - DNA, 75 bp, synthetic construct
  source 1..75: mol_type = other DNA
tatgacagggtcatgatccacggtgaaccctatcaggtagtcgatcccggctgggatgagtcgggtactgcgggg

SEQ ID NO: 632443 - DNA, 75 bp, synthetic construct
  source 1..75: mol_type = other DNA
atccggacatgcgggttgccgaggtggctcgacgttatgatgtttctcgcaccaccctttacaagtacgtcggta

SEQ ID NO: 632444 - DNA, 75 bp, synthetic construct
  source 1..75: mol_type = other DNA
gagaacgagttcccgactcaggtaggcgacgcttccggtacgccgcatctgtctgttggttgcgtgcgcaatgac

SEQ ID NO: 632445 - DNA, 75 bp, synthetic construct
  source 1..75: mol_type = other DNA
ctgaacattacgggtggaaacctgagctttaccaatgtttcaggcaccacgacaaacgccacactgaatgcgaca

SEQ ID NO: 632446 - DNA, 75 bp, synthetic construct
  source 1..75: mol_type = other DNA
caccacgaacggttcgaccatcacgggtaacgcgaccaacgggtcgggtgtccaggtggggggtaacctgaccaa

SEQ ID NO: 632447 - DNA, 75 bp, synthetic construct
  source 1..75: mol_type = other DNA
aataatgtcacggtgaacggctccacggccaatggctccggcgtgaacatcagcggcaacctgagcaacagcaac

SEQ ID NO: 632448 - DNA, 75 bp, synthetic construct
  source 1..75: mol_type = other DNA
gttaaactatcttcgccgaaaataccctctacctccaaatgttcttcatgtcatgacggaaggacatgtagagga

SEQ ID NO: 632449 - DNA, 75 bp, synthetic construct
  source 1..75: mol_type = other DNA
gacggccagtaacattgctcttaccgggaacagtacgagtgggaatgccatcaaccttacaggcactgccacgct

SEQ ID NO: 632450 - DNA, 75 bp, synthetic construct
  source 1..75: mol_type = other DNA
tcagaacagccagaacatggtggccaactggaacagctttgacattggtaaaggaaatacggtgcagttttacca

SEQ ID NO: 632451 - DNA, 75 bp, synthetic construct
  source 1..75: mol_type = other DNA
aattaaaacaataaatattaatggctccactgataatagatacaatcagatgtcatgtattagagaaaaaatcaa

SEQ ID NO: 632452 - DNA, 75 bp, synthetic construct
  source 1..75: mol_type = other DNA
tccccggccctaaacacagcccccactcaccgcaacctaaactcatccgcatctcgccatgccggaaacttatcg

SEQ ID NO: 632453 - DNA, 75 bp, synthetic construct
  source 1..75: mol_type = other DNA
atgataaacgccggccgctaccgctggtcatcccgatgctgttttatcacggtagccgtagtcctggtgatgctg

SEQ ID NO: 632454 - DNA, 75 bp, synthetic construct
  source 1..75: mol_type = other DNA
gttcagttaattactcgtacttcacctccacatttaactgattatggtcagaaattagcaggactgctatatcat

SEQ ID NO: 632455 - DNA, 75 bp, synthetic construct
  source 1..75: mol_type = other DNA
tgttttttaatgcaaacatatttggtgagcaaataacaccatcactgcatctattatctaaagcaatacgctttg

SEQ ID NO: 632456 - DNA, 75 bp, synthetic construct
  source 1..75: mol_type = other DNA
gataatatctcagtctatatatacgttgcaccgctaacattagcagcaatatttttgttgcacaaggaaagaaaa

SEQ ID NO: 632457 - DNA, 75 bp, synthetic construct
  source 1..75: mol_type = other DNA
atttcgttacttgggccgttggttatctttctgctgtttcggatgatccgcaccagttatgtcaagcaggtcgct

SEQ ID NO: 632458 - DNA, 75 bp, synthetic construct
  source 1..75: mol_type = other DNA
taagcgaattaacgtggtgcagccacaatcagcaccatgatgacacgctatatgttcgagctgacttggtaaatg

SEQ ID NO: 632459 - DNA, 75 bp, synthetic construct
  source 1..75: mol_type = other DNA
tctttccatgagcagagatctttatcagaacgattgttcagagaacagggaattgataccaaaattttgctgggc

SEQ ID NO: 632460 - DNA, 75 bp, synthetic construct
  source 1..75: mol_type = other DNA
aagttactaatccccaatatttggataataaatacgatataatactgctttctcctcctcaaactaattcattcc

SEQ ID NO: 632461 - DNA, 75 bp, synthetic construct
  source 1..75: mol_type = other DNA
atcattgataaatttaaaaataaaataaatatacgatatttgagaaatgatgaaaataaaaatggggcatattcc

SEQ ID NO: 632462 - DNA, 75 bp, synthetic construct
  source 1..75: mol_type = other DNA
gtggcgtagtgttggcgattaatctgttttttctgcgcttctccaggcggtacgcttttttgggcaggctttttt

SEQ ID NO: 632463 - DNA, 75 bp, synthetic construct
  source 1..75: mol_type = other DNA
tgtgaccattccgatcgcagtgaattctgacacgctggcaacatggctaattcctgccttgtgtgtttttttaaa

SEQ ID NO: 632464 - DNA, 75 bp, synthetic construct
  source 1..75: mol_type = other DNA
tgtcagcactgactaactgtaatcgggataaaacttctattcgtaaaatagaagcagagagtgtcagtaaacgga

SEQ ID NO: 632465 - DNA, 75 bp, synthetic construct
  source 1..75: mol_type = other DNA
gtcacagagaacccaggaagatatcaaagtggctgttgcgaatgatgattgcgcttcacgtcctgtgcctgctgc

SEQ ID NO: 632466 - DNA, 75 bp, synthetic construct
  source 1..75: mol_type = other DNA
gccagatttttgaccatgacgcgacagaaaaactacacacttacttttcaaatgtatgtgcttattttgaagctg

SEQ ID NO: 632467 - DNA, 75 bp, synthetic construct
  source 1..75: mol_type = other DNA
cattaccgcccaaatcaatacttgggccgtcaacaatcaagacatcctgaaagaacgagcgcggcaggcgattga

SEQ ID NO: 632468 - DNA, 75 bp, synthetic construct
  source 1..75: mol_type = other DNA
tttcagttcccggcttttggtcggcagcgtctcttgcctgtttattgaatacgtatcgtgacggttatatcagag

SEQ ID NO: 632469 - DNA, 75 bp, synthetic construct
  source 1..75: mol_type = other DNA
ggcacacagtatcaggtctgggaagacaagtggatgattgatgagtgtttatgtgtcatgtacgacagatcatcc

SEQ ID NO: 632470 - DNA, 75 bp, synthetic construct
  source 1..75: mol_type = other DNA
gtggatacccttctgcctcttgatcaattcagctttgccggtggcgtcaccccggacagactgcgtggtttcctc

SEQ ID NO: 632471 - DNA, 75 bp, synthetic construct
  source 1..75: mol_type = other DNA
gtggatacccttctgcctcttgatcaattcagttttgccggtggcgtcaccccggacaggctgcgtggttttctc

SEQ ID NO: 632472 - DNA, 75 bp, synthetic construct
  source 1..75: mol_type = other DNA
tattgatgcctgcgtgctcggcggtttgcaggtagacgaagaagccaacctcgcgaactgggtagtgcctggaaa

SEQ ID NO: 632473 - DNA, 75 bp, synthetic construct
  source 1..75: mol_type = other DNA
ctgctggaaattgctgacggagctttcattctgcgcgagcgcgcgccgggaatcagcgttgcggaaatcatcgcc

SEQ ID NO: 632474 - DNA, 75 bp, synthetic construct
  source 1..75: mol_type = other DNA
tgcgagtcgcccgcgaattgcgcgatggctattacgtcaatctcggcattggtatcccgaccctggtggcaaact

SEQ ID NO: 632475 - DNA, 75 bp, synthetic construct
  source 1..75: mol_type = other DNA
cataacaaattagcttataaaaagatgctggatgacacaaataaagcaattttagaattgaagagtatttatgat

SEQ ID NO: 632476 - DNA, 75 bp, synthetic construct
  source 1..75: mol_type = other DNA
atcagcagacgttcgttgatacgtactatctttatagggatccgcctggaattcggaaaataaatcacgttaaga

SEQ ID NO: 632477 - DNA, 75 bp, synthetic construct
  source 1..75: mol_type = other DNA
aaagatataatcacactcgtcgagcatgtacgaggtgcattaggtcgctacatttgccataagttttcatattct

SEQ ID NO: 632478 - DNA, 75 bp, synthetic construct
  source 1..75: mol_type = other DNA
gcagctggcgttttttgtcgctggcaaagaagccactgcgagctgggttgaagaagcgaccaacgcagggtgcct

SEQ ID NO: 632479 - DNA, 75 bp, synthetic construct
  source 1..75: mol_type = other DNA
ggcgcaacaagtcttgtgagtgtgatacgtaacttgcggcataatcataaccaacgaattcggcatctagggttt

SEQ ID NO: 632480 - DNA, 75 bp, synthetic construct
  source 1..75: mol_type = other DNA
gtcatcgccgtaccagacagtctgaccagccagctgctggcggcactgaaaccgttaatcgatcagggcggtttg

SEQ ID NO: 632481 - DNA, 75 bp, synthetic construct
  source 1..75: mol_type = other DNA
gttattgctgttcctgatagcctgaccagtcagttactggctgcactgaaaccgttaatcgatcagggcggtttg

SEQ ID NO: 632482 - DNA, 75 bp, synthetic construct
  source 1..75: mol_type = other DNA
ccagttttttagtggagctgggcactcttgatgacacgctggctttgttcgccgccttgcaggctgcgccattgt

SEQ ID NO: 632483 - DNA, 75 bp, synthetic construct
  source 1..75: mol_type = other DNA
agaaaatgttaactacatccatcactggcatatgtactatagtgatgtcctctgtcgcaattgcatctgaaacaa

SEQ ID NO: 632484 - DNA, 75 bp, synthetic construct
  source 1..75: mol_type = other DNA
tacgctaataatcgggcgtgagaaatttgcagagattgcgcaggggtatcttgaggcgatggaggggcatgactt

SEQ ID NO: 632485 - DNA, 75 bp, synthetic construct
  source 1..75: mol_type = other DNA
tatggacagcagaaacgcgtttaccttattaaaaaggaaaatgttactcaatacgcataacgataaatatttgaa

SEQ ID NO: 632486 - DNA, 75 bp, synthetic construct
  source 1..75: mol_type = other DNA
agatgtggtaacgaaaatttcacccactttagatgcaatcttgggtgatatcaatatcatttttgatacatctca

SEQ ID NO: 632487 - DNA, 75 bp, synthetic construct
  source 1..75: mol_type = other DNA
agccaggtattgtgctgccgtttaacggtctggcgcataaaataccggatttacagtccatgctttttgcaacgg

SEQ ID NO: 632488 - DNA, 75 bp, synthetic construct
  source 1..75: mol_type = other DNA
gtgcgggaatttgtaggcctgataagacgcgcaagcgtcgcatcaggcagtcggcatcgttgccggatgcggcgc

SEQ ID NO: 632489 - DNA, 75 bp, synthetic construct
  source 1..75: mol_type = other DNA
aagaagccactaacgcgggatgtctggtcattgatagcagcggcctgtttgctctcgaacctgatgttccgctgg

SEQ ID NO: 632490 - DNA, 75 bp, synthetic construct
  source 1..75: mol_type = other DNA
cgaatttggtcggtgatagaggattactcgccacttcgtggctcgccctgcgggccgttgctggcgcaacgttct

SEQ ID NO: 632491 - DNA, 75 bp, synthetic construct
  source 1..75: mol_type = other DNA
tcagaggttgttcgtatggtcgttaccttctgctgttcagggtactggatactgaagttcgtatcgaacgtatcg

SEQ ID NO: 632492 - DNA, 75 bp, synthetic construct
  source 1..75: mol_type = other DNA
tactaaaaaatgaggatatatttaagattacagaaaaattacctgcgaaatatccaagacctcccaaaaagcaag

SEQ ID NO: 632493 - DNA, 75 bp, synthetic construct
  source 1..75: mol_type = other DNA
aagaagcgaccaacgcgggttgtctggtgatcgacagcagcggattgtttgctctcgaacccgacgtaccgctgg

SEQ ID NO: 632494 - DNA, 75 bp, synthetic construct
  source 1..75: mol_type = other DNA
cggcacagatcgagccagtttatttgcctgagcgaaaaatacatctttatcactgcgaccaccggggactgccgc

SEQ ID NO: 632495 - DNA, 75 bp, synthetic construct
  source 1..75: mol_type = other DNA
ctatcaatttaaaccggaacgctcagcaatagctaaaaataaattggatgcagcaattgctactcaacgttttcc

SEQ ID NO: 632496 - DNA, 75 bp, synthetic construct
  source 1..75: mol_type = other DNA
aaaaaaatattagcagcgttgtgccgacgcaaggcgcgttggttcgtgccaattttgatacccgcataggcgtgc

SEQ ID NO: 632497 - DNA, 75 bp, synthetic construct
  source 1..75: mol_type = other DNA
atggacagaagcaacgatatctaccagaaagtcaccgaccagattattgccgagctggaaaacggcaatgtgccg

SEQ ID NO: 632498 - DNA, 75 bp, synthetic construct
  source 1..75: mol_type = other DNA
ggtatatccctatgttgcgccattaggtagtgacggtaaaccgtctgtctctccaccctggattatcttttccat

SEQ ID NO: 632499 - DNA, 75 bp, synthetic construct
  source 1..75: mol_type = other DNA
actgcagagttctgcgggcagaatgagtgtatgggtcggggggatgtaccaggatgttgaacagcgcttcagggg

SEQ ID NO: 632500 - DNA, 75 bp, synthetic construct
  source 1..75: mol_type = other DNA
gaaagctagggattgatatggtggatggtggcagaaggtgtggaaacacaggcgaaggtgaactatctgtgcttt

SEQ ID NO: 632501 - DNA, 75 bp, synthetic construct
  source 1..75: mol_type = other DNA
aagccagggtgatacctcgaataatgggtatacgggcagcgccacggcaaactggcaggccacttacggtacgct

SEQ ID NO: 632502 - DNA, 75 bp, synthetic construct
  source 1..75: mol_type = other DNA
cattttcggatacctttctgctaatcagtggtctgttatttatcgcatttttgttggttcctgctatgaataaat

SEQ ID NO: 632503 - DNA, 75 bp, synthetic construct
  source 1..75: mol_type = other DNA
atgaccaaattctcagtggttgtcgcaggcggtggaagcacctttacgccaggcatcgtgttgatgctcttggcg

SEQ ID NO: 632504 - DNA, 75 bp, synthetic construct
  source 1..75: mol_type = other DNA
tggcactggaaaatgcccgtgatgcttacacccgtcgtagcgaaggatgttcaatttgggtggtgaaggcgagtg

SEQ ID NO: 632505 - DNA, 75 bp, synthetic construct
  source 1..75: mol_type = other DNA
ctcttgcaccaggtagtaatgaaaagaaaaaaatgtatctcctgacggatttgattatttcgttgctggaaaaac

SEQ ID NO: 632506 - DNA, 75 bp, synthetic construct
  source 1..75: mol_type = other DNA
ctgctgtgttttttaaatatttgtgctctgatgcgtttatgccaggtaagtgtgtaaacaaaaacagaggaggat

SEQ ID NO: 632507 - DNA, 75 bp, synthetic construct
  source 1..75: mol_type = other DNA
gatcatggcccgcaaatgacggcactccgcgacggtgtccggggcaaagataaactggatgtgcccattaagttc

SEQ ID NO: 632508 - DNA, 75 bp, synthetic construct
  source 1..75: mol_type = other DNA
taagcggtcatttgtctgtcagttatggtaatggcgcaggtgtggaatcgccctggaatacgcaagctggcgtgg

SEQ ID NO: 632509 - DNA, 75 bp, synthetic construct
  source 1..75: mol_type = other DNA
ctacgaatgtttctaatggcgcattattggccatatatgctcttgcagatacggctaacgcgactgttaatctgg

SEQ ID NO: 632510 - DNA, 75 bp, synthetic construct
  source 1..75: mol_type = other DNA
tggcaataaagtgagcagagaaggtccacccgtattggatctgacgcgtgttacaggagactggcgagtattacc

SEQ ID NO: 632511 - DNA, 75 bp, synthetic construct
  source 1..75: mol_type = other DNA
taggcgtaaggaaatatgcaaaggaaatcggaataccaattatcacagataaaaaattagcacgaaaaatttatg

SEQ ID NO: 632512 - DNA, 75 bp, synthetic construct
  source 1..75: mol_type = other DNA
tctttcacctattccattgatttctgtaagagaaactaatgaggtagccttagccgtaaggaaatatgcaaagga

SEQ ID NO: 632513 - DNA, 75 bp, synthetic construct
  source 1..75: mol_type = other DNA
ctttagaccctaaatatatagcagtgattatctcttcgattatagccgtcctcggatggctattttcctcgtata

SEQ ID NO: 632514 - DNA, 75 bp, synthetic construct
  source 1..75: mol_type = other DNA
tatttttccggttgtaatctttattacagcggtcgtatttttagcatggttttttattggcggctatgctgcccc

SEQ ID NO: 632515 - DNA, 75 bp, synthetic construct
  source 1..75: mol_type = other DNA
gatgccttcccgcgcgagacgaaacgccatcaccgcaggggcaaaaagaaaaaagaggtcgccattgttaaggtc

SEQ ID NO: 632516 - DNA, 75 bp, synthetic construct
  source 1..75: mol_type = other DNA
gcggatatcgtccggggtgcgccggtccgtttgcaggtgggagacgagacggtcctcagtggtcgcgtggacagc

SEQ ID NO: 632517 - DNA, 75 bp, synthetic construct
  source 1..75: mol_type = other DNA
ggttacgagagaagttttcgatgaaaaggcctgtagacgcttcctgagtgggaaaatagcaaataaattgggtcg

SEQ ID NO: 632518 - DNA, 75 bp, synthetic construct
  source 1..75: mol_type = other DNA
atgagcgcacgttcacgggcactgattcccctcagcgcagaacaacaggccgccatgcaggctgtggctgtcaca

SEQ ID NO: 632519 - DNA, 75 bp, synthetic construct
  source 1..75: mol_type = other DNA
cgctgaggctgaagacgatgatgatgccgacgcaatttatgacagcaccggctctgcagagaatggctttcatgg

SEQ ID NO: 632520 - DNA, 75 bp, synthetic construct
  source 1..75: mol_type = other DNA
gtggccagacgggcattcataacatgaaagccgtggccaccgaccccaccgtggattattaccgcccgcagataa

SEQ ID NO: 632521 - DNA, 75 bp, synthetic construct
  source 1..75: mol_type = other DNA
aagttatgcgcctggacgcagggatcacgcaggaagtattgaagctatatattgcgtttaaagcggaaacgaatt

SEQ ID NO: 632522 - DNA, 75 bp, synthetic construct
  source 1..75: mol_type = other DNA
atcagagttgaaaccgccaccggtgagctggcgaaaacgcagcgccgcagcctggcggatacccttcagcagtcc

SEQ ID NO: 632523 - DNA, 75 bp, synthetic construct
  source 1..75: mol_type = other DNA
gctatctttacgacccgctgggccgcagggtggcaaaacgggtatggcggcgtgaacgggacctgacgggctgga

SEQ ID NO: 632524 - DNA, 75 bp, synthetic construct
  source 1..75: mol_type = other DNA
cacgccggccatgaccgactatatcacccgtgcatttgctgaaaccaagctgacaatttatcagaaatatctgtc

SEQ ID NO: 632525 - DNA, 75 bp, synthetic construct
  source 1..75: mol_type = other DNA
atatagtttctctagaagagagattaaaggttgctgaagaatatacttatcagtctagaacagataaaatgatgc

SEQ ID NO: 632526 - DNA, 75 bp, synthetic construct
  source 1..75: mol_type = other DNA
gggcgcgcccagacgagtttccgccaaggaacatgcagacaagcaaggggctgcgggcactcggctacaacgtga

SEQ ID NO: 632527 - DNA, 75 bp, synthetic construct
  source 1..75: mol_type = other DNA
gaagctgcagcagagaaaaaggctagcgaagctctctttatttccacggagctggtctttctgctggaagaattt

SEQ ID NO: 632528 - DNA, 75 bp, synthetic construct
  source 1..75: mol_type = other DNA
ttcccccgctgctgcaaatcttcttctggtactttgccgtgttgcgcaatttgcccggaccacgcgccaggctgt

SEQ ID NO: 632529 - DNA, 75 bp, synthetic construct
  source 1..75: mol_type = other DNA
ttggcctgtcacaagagtggcgattcatgacagagtttaacaaagtaaggaattgcatagttcatgctaatggag

SEQ ID NO: 632530 - DNA, 75 bp, synthetic construct
  source 1..75: mol_type = other DNA
gctcctgacgattatattaattacttagaagactattattcagagcaatatgatttcttagttaacatacaacca

SEQ ID NO: 632531 - DNA, 75 bp, synthetic construct
  source 1..75: mol_type = other DNA
acgcagcaacaactgggggataagacacgggtaacgctgttgggcgattatgcccatactcatggttatgatgtt

SEQ ID NO: 632532 - DNA, 75 bp, synthetic construct
  source 1..75: mol_type = other DNA
aaggttatcgcttcattgcttcctacgggacatcttataaggcaccaaatctggggcaactgtatggcttctacg

SEQ ID NO: 632533 - DNA, 75 bp, synthetic construct
  source 1..75: mol_type = other DNA
cacaaagtaaattcagatgccaggtatgtggatatacagcgaacgccgatgtaaatggcgctcgtaacattttag

SEQ ID NO: 632534 - DNA, 75 bp, synthetic construct
  source 1..75: mol_type = other DNA
gccagatcgcagcactggagcgtaaagccagtgatgacgaggcctgtggcgaaatcgaaacggctcatccgggat

SEQ ID NO: 632535 - DNA, 75 bp, synthetic construct
  source 1..75: mol_type = other DNA
attttaaaaaatgcgttaaagtagaatacaatgggacattggagggatattatttttttctcgccatatctttaa

SEQ ID NO: 632536 - DNA, 75 bp, synthetic construct
  source 1..75: mol_type = other DNA
gacagaggatgtggaaggtgacaagaaaatttataatgctgaagttgctgaatgggataagttacggcaacgatt

SEQ ID NO: 632537 - DNA, 75 bp, synthetic construct
  source 1..75: mol_type = other DNA
gttactgacagcggcggattatgcgcaactgacggatgcgtttaacgtttttatgctgccgccagagaagcgacc

SEQ ID NO: 632538 - DNA, 75 bp, synthetic construct
  source 1..75: mol_type = other DNA
tgggagctcgatagtgatattaaaaggaaatgtgggcaatacgctatcgaacttataagtattgaccaaaaaaaa

SEQ ID NO: 632539 - DNA, 75 bp, synthetic construct
  source 1..75: mol_type = other DNA
cgtgattatggaatgtgacaagctcatcgccctgccaccggcagcaaaccagagctcggttgcccgtatcgcttg

SEQ ID NO: 632540 - DNA, 75 bp, synthetic construct
  source 1..75: mol_type = other DNA
aatttgagtccttaataacgccacgcactgtgctggcgcttctggatgaacgggaaagaaaccagcaatacatca

SEQ ID NO: 632541 - DNA, 75 bp, synthetic construct
  source 1..75: mol_type = other DNA
ccgggcgttgtcgggctcacggctggggagtgtgggttctgatggcatcatgattggtctatttatccgggttta

SEQ ID NO: 632542 - DNA, 75 bp, synthetic construct
  source 1..75: mol_type = other DNA
tattaaagaaggtgctacagaaacgtttgtttataatgaaaaaatggtcagaaatatagctaacgtcgccagcat

SEQ ID NO: 632543 - DNA, 75 bp, synthetic construct
  source 1..75: mol_type = other DNA
ggcgaggaaatcttctgcgacgaacatggtcgcgtgcgggtgaagttcaactgggaccgttataacccggcagac

SEQ ID NO: 632544 - DNA, 75 bp, synthetic construct
  source 1..75: mol_type = other DNA
gggatacacaaggacgaccgtaagcgcagaggcattttctgccgatgatattgacggcgactggcgggtactacc

SEQ ID NO: 632545 - DNA, 75 bp, synthetic construct
  source 1..75: mol_type = other DNA
gtggtcttgatataaaaaaccgtcgcctgagtaaactggtgacagaggttgctccgactgaagtgtctgatgtgg

SEQ ID NO: 632546 - DNA, 75 bp, synthetic construct
  source 1..75: mol_type = other DNA
atgaagtatgtttttattgaaaaacatgttaacggctccgatacgatgagcttcgggtacgccagaaacacttat

SEQ ID NO: 632547 - DNA, 75 bp, synthetic construct
  source 1..75: mol_type = other DNA
tccttgggcaaacctgttctcgttatgcgtgaaactactgaaaggctagaagctttaaatgcgggtaccgtgaag

SEQ ID NO: 632548 - DNA, 75 bp, synthetic construct
  source 1..75: mol_type = other DNA
tgcaaccatgcgtatcaggttattcaggacgatctagggcctgttcgtgttgatttttttgacagtgaaagtcct

SEQ ID NO: 632549 - DNA, 75 bp, synthetic construct
  source 1..75: mol_type = other DNA
tataagcaactatattattaacggtgaatcaatatcttcaaaaattaacttcatgaccactaaagggtttaatga

SEQ ID NO: 632550 - DNA, 75 bp, synthetic construct
  source 1..75: mol_type = other DNA
gttaaatagagagctgcttaccggaataccaacattagaagtatttttctgcaagaaaattatacttgatgttga

SEQ ID NO: 632551 - DNA, 75 bp, synthetic construct
  source 1..75: mol_type = other DNA
ttatggcggttacctccggaattaaaacgccatcaagcagatttagaattcgtcaacatattgaacaattaagga

SEQ ID NO: 632552 - DNA, 75 bp, synthetic construct
  source 1..75: mol_type = other DNA
tcagttgccaatatcttttattcccaaacgttaagagataatatagccgagaaaaaaacagtatcgagagatata

SEQ ID NO: 632553 - DNA, 75 bp, synthetic construct
  source 1..75: mol_type = other DNA
tgaaggaggccgttaccgaatggaggctgtatccggtagtagaggcgctgcaagccatgcgagggattcagttta

SEQ ID NO: 632554 - DNA, 75 bp, synthetic construct
  source 1..75: mol_type = other DNA
atgctcaaaatatctatcctgggggataaaatgaacgtaacctcacccaaaatgctggctcaggcaatcagggat

SEQ ID NO: 632555 - DNA, 75 bp, synthetic construct
  source 1..75: mol_type = other DNA
tttcaggttgccgtgttggtaacgctgaccactgggggtaaagacattaaacttgcagcctcgcaaagctacggg

SEQ ID NO: 632556 - DNA, 75 bp, synthetic construct
  source 1..75: mol_type = other DNA
aggcgctgcgtcagaatccttattcaactctcggcaagccgccgctacgctcctcccgtgaccgtatcacgcgtg

SEQ ID NO: 632557 - DNA, 75 bp, synthetic construct
  source 1..75: mol_type = other DNA
acctgttaaggggatgccagcattaaagcgcggcggatctctttaccgttatcaggacgttatttcattttgtaa

SEQ ID NO: 632558 - DNA, 75 bp, synthetic construct
  source 1..75: mol_type = other DNA
cacgtcaaaaccaaaaacggccttgatcttgttgctaaagtaaaaaacccttcaccgccgccggatgatttttgg

SEQ ID NO: 632559 - DNA, 75 bp, synthetic construct
  source 1..75: mol_type = other DNA
ctacagatcgacaatatcaaaacggtagagggggtttggtgtttcgaagtgacggaaggcaagacgcgcaatgcg

SEQ ID NO: 632560 - DNA, 75 bp, synthetic construct
  source 1..75: mol_type = other DNA
cgaagccggagtcagtcagtccagcgtcgtgaagttcgcgcaaaaactcggctataaaggttttccggcgcttaa

SEQ ID NO: 632561 - DNA, 75 bp, synthetic construct
  source 1..75: mol_type = other DNA
ccacgctgagtctgagtcagtccctggggcagtggggctatgtgggactgaacggcagccgggatgagtaccgtg

SEQ ID NO: 632562 - DNA, 75 bp, synthetic construct
  source 1..75: mol_type = other DNA
tatttaaacaagctggatgaagccgacaagaatactgagccagatgcaaacacaaagttaactgccactaaactg

SEQ ID NO: 632563 - DNA, 75 bp, synthetic construct
  source 1..75: mol_type = other DNA
tttgggacaattaaaatgtggatgggtgcaacgcacttcctgatgcggaaatttaaaaatgtcagtacggaaata

SEQ ID NO: 632564 - DNA, 75 bp, synthetic construct
  source 1..75: mol_type = other DNA
tctgtctttatttcgcgggtggtcgtttattgaacggttccatctgtcggcctttactgtacttgctgtatttat

SEQ ID NO: 632565 - DNA, 75 bp, synthetic construct
  source 1..75: mol_type = other DNA
ttcttttcaacgcctttcgccaacagcgtgacgcctggcttaactggccgtcaagagtggcaccattaatggctg

SEQ ID NO: 632566 - DNA, 75 bp, synthetic construct
  source 1..75: mol_type = other DNA
gatacgctggcgaaaatcgaacaacttaccggtgtgcgcgatcctgctggcgttgcctgtgaacctttccgctag

SEQ ID NO: 632567 - DNA, 75 bp, synthetic construct
  source 1..75: mol_type = other DNA
cgttaagaagccagattatgatcggcgatacgtggacggcgagcgatattttcgacagcacgcaaatccgtggtg

SEQ ID NO: 632568 - DNA, 75 bp, synthetic construct
  source 1..75: mol_type = other DNA
gactatcaactacgatttttccggttcacatactctgcgctcggattacagctcacaggagaccgataccagtta

SEQ ID NO: 632569 - DNA, 75 bp, synthetic construct
  source 1..75: mol_type = other DNA
tgcgacatggttcaaacagtaagtaatcagcgacttatggatttgcccctatatttccagacatctgttatcact

SEQ ID NO: 632570 - DNA, 75 bp, synthetic construct
  source 1..75: mol_type = other DNA
gaaattacgtgtctgcgtggaatttctggcggcatggtgccagcaacggctgggcaagcccgatgaaggctatca

SEQ ID NO: 632571 - DNA, 75 bp, synthetic construct
  source 1..75: mol_type = other DNA
ccaaaagggactgaagcagccatcaaaatttctgctagcggcgatcagggcgcggcgacatcattatggaaaaca

SEQ ID NO: 632572 - DNA, 75 bp, synthetic construct
  source 1..75: mol_type = other DNA
gttagccatcctcaaacgtgaaggtcaaactgatgttgatgtcagtgtgggagaattacgcgatgaagatggctt

SEQ ID NO: 632573 - DNA, 75 bp, synthetic construct
  source 1..75: mol_type = other DNA
caccatcaactacgatttttctggttcacatacactacgttcggattatggttcacaagagacagataccagtta

SEQ ID NO: 632574 - DNA, 75 bp, synthetic construct
  source 1..75: mol_type = other DNA
aatatgtcgctgtcttatgacggcacctacggttcgttgaacggcagttataattacagccaaaattcccagcga

SEQ ID NO: 632575 - DNA, 75 bp, synthetic construct
  source 1..75: mol_type = other DNA
cttttggagccattgctgcgatacaagatgcaagtttggcagattcaggaattgtcggtgaccgtggcgaacttt

SEQ ID NO: 632576 - DNA, 75 bp, synthetic construct
  source 1..75: mol_type = other DNA
gaagatttctgggaaaccggtaaccgccgcagccgtgtggaaggaacgttaacgcaatcactgggcagagattat

SEQ ID NO: 632577 - DNA, 75 bp, synthetic construct
  source 1..75: mol_type = other DNA
atctgcacgcttgctttgtcgcggttaaaaaaacgctgacttcctttggcgtaaaagttgacgcgctgaaagcgc

SEQ ID NO: 632578 - DNA, 75 bp, synthetic construct
  source 1..75: mol_type = other DNA
ttgataaaacaaaaaaaagaaaacacataagcaaggtgcctcaagtaaaggataaaagtgaattatatgagaagt

SEQ ID NO: 632579 - DNA, 75 bp, synthetic construct
  source 1..75: mol_type = other DNA
gcaccggataagtgaagagactgaccagtatgccggaggccaccggctgaaacaggccggaaacacgcagtatga

SEQ ID NO: 632580 - DNA, 75 bp, synthetic construct
  source 1..75: mol_type = other DNA
aaaatcagcagtttgatggactatattggcgatggtcgtcgtgttagtgggcatacgggtttcctggatggggtt

SEQ ID NO: 632581 - DNA, 75 bp, synthetic construct
  source 1..75: mol_type = other DNA
tataaagatcttaatgattacctgaatgcatatattaatgatgacgtaagcgcctgtgagcgctcctggcgagta

SEQ ID NO: 632582 - DNA, 75 bp, synthetic construct
  source 1..75: mol_type = other DNA
gcgccgctgccgccgtaccgggtgcttaccgggctggcagaccgtttcgggcggacgctgacgtaccggcgtgag

SEQ ID NO: 632583 - DNA, 75 bp, synthetic construct
  source 1..75: mol_type = other DNA
gggagcttcacaccactcatcagagttgaaactgccaccggtgaactggccagaacgcagcgccgcagcctggcg

SEQ ID NO: 632584 - DNA, 75 bp, synthetic construct
  source 1..75: mol_type = other DNA
atcatcatcccaaaggtactgagatggaacagaaattttacgagacgattcgaagatataagcggatgagagggt

SEQ ID NO: 632585 - DNA, 75 bp, synthetic construct
  source 1..75: mol_type = other DNA
cggtttatccccgctggcgcggggaactcactaaacttaatgatggccgttacagcgtggacggtttatccccgc

SEQ ID NO: 632586 - DNA, 75 bp, synthetic construct
  source 1..75: mol_type = other DNA
gctttcaactctccaatgatggtacgaatgaaatccagtatggtaaaagcaattactactcttttcagcatcccc

SEQ ID NO: 632587 - DNA, 75 bp, synthetic construct
  source 1..75: mol_type = other DNA
catattaaaaaatgagttagaaaatagtgaggaaggtgctggtcaagtaggctttcaactatcgaatgatggtac

SEQ ID NO: 632588 - DNA, 75 bp, synthetic construct
  source 1..75: mol_type = other DNA
tgccggtagtgatttcagttatgaaatggtttttctcctttggcttgatagtagcgttgagccagaagtctgggt

SEQ ID NO: 632589 - DNA, 75 bp, synthetic construct
  source 1..75: mol_type = other DNA
cagccatttaatggtttccagtgatagccatgataaatgggatgtttttggtgatttcagaacacaggattttaa

SEQ ID NO: 632590 - DNA, 75 bp, synthetic construct
  source 1..75: mol_type = other DNA
tgatgttatttagccaatgtgctccaacggtatcgccagtaacgctaaatgctattgtgcaaacagagtcaagcg

SEQ ID NO: 632591 - DNA, 75 bp, synthetic construct
  source 1..75: mol_type = other DNA
tatattctttagaactaaaaacaccactttcgttgttcagaccgattggatgaaagatgctatcgtagcaaagaa

SEQ ID NO: 632592 - DNA, 75 bp, synthetic construct
  source 1..75: mol_type = other DNA
gataacggacaactaatccgcatcagcggcccgcaggagagccgggagtaccgttacagcgacacgggaaggctg

SEQ ID NO: 632593 - DNA, 75 bp, synthetic construct
  source 1..75: mol_type = other DNA
gtccggtgagtgtgacggaaggcggtcttacgcgcagcatggggtatgacgctgccgggcgcatcaccgtgctga

SEQ ID NO: 632594 - DNA, 75 bp, synthetic construct
  source 1..75: mol_type = other DNA
gctgcccggcccgctgccgttcatcctttcccgcgcctacagcagttaccggaccaggacgcccgcgccggtagg

SEQ ID NO: 632595 - DNA, 75 bp, synthetic construct
  source 1..75: mol_type = other DNA
ccggagaacaggtcgttcctgcctctgaacttgctgccgccatgaagcagattaaagaactcctgcttggcaaaa

SEQ ID NO: 632596 - DNA, 75 bp, synthetic construct
  source 1..75: mol_type = other DNA
gggccgacccggcagcgaaagggaaagcacgggctgttcctgagctgtcagcggtatcctgagtgtaagggggtg

SEQ ID NO: 632597 - DNA, 75 bp, synthetic construct
  source 1..75: mol_type = other DNA
cactggtgaatacaagtgccaatggttctctgggaaaaaactcgatcatggagtattccctgaagaatccctgac

SEQ ID NO: 632598 - DNA, 75 bp, synthetic construct
  source 1..75: mol_type = other DNA
gctgtatgcgggacagtggcaggatgcagaatcggggctgtgctataaccggttccggtactacgagccggaaac

SEQ ID NO: 632599 - DNA, 75 bp, synthetic construct
  source 1..75: mol_type = other DNA
ttttaaacttggtttgactcccagtgagcgatttgatggaaatgattatttagcgaggtatccagacgtacaaca

SEQ ID NO: 632600 - DNA, 75 bp, synthetic construct
  source 1..75: mol_type = other DNA
acttatgaagtggattgtattgattttgttaataattggtttcctgaagttgatgctcatgtttttatatcgcac

SEQ ID NO: 632601 - DNA, 75 bp, synthetic construct
  source 1..75: mol_type = other DNA
atagtttcaattattctagatttatcagatttcgataccgaattaatttccgaaaagaatttcctaccggactat

SEQ ID NO: 632602 - DNA, 75 bp, synthetic construct
  source 1..75: mol_type = other DNA
taccggacaacgccaaattagctggtgtcggttattgcggatgttattactacaactcaatcggtgacatttacc

SEQ ID NO: 632603 - DNA, 75 bp, synthetic construct
  source 1..75: mol_type = other DNA
atgctctttaacagtgaaggtaaaaccgtctggcgaccgggacagaccagcctgtgggggctggcactcagcctg

SEQ ID NO: 632604 - DNA, 75 bp, synthetic construct
  source 1..75: mol_type = other DNA
ggcgaaagccccgactaccgcacattattcagcaatctttccgatcaggatggtggcgcaattgtcagccaactg

SEQ ID NO: 632605 - DNA, 75 bp, synthetic construct
  source 1..75: mol_type = other DNA
tataatatctctatttttcttgaagagtgaccccagtaaagcagatgtgttcaatacgatgaaaaaaaataatct

SEQ ID NO: 632606 - DNA, 75 bp, synthetic construct
  source 1..75: mol_type = other DNA
agccctatcattccgctaaattggtcgaaagcttcaatgactctcatgttgaaagagatgtccaaccttatcaat

SEQ ID NO: 632607 - DNA, 75 bp, synthetic construct
  source 1..75: mol_type = other DNA
aatcatctgacgctggcggtcagcgatctggcgtcaagcctggcgttttatcagcggttacctggaatgcgtctg

SEQ ID NO: 632608 - DNA, 75 bp, synthetic construct
  source 1..75: mol_type = other DNA
ttgcaaatgctggatgaaggcaacgttgctgcatttgaaggacgagatatatgcctgacaatgagattctggagt

SEQ ID NO: 632609 - DNA, 75 bp, synthetic construct
  source 1..75: mol_type = other DNA
gatttagtggtagaaggtaatatagagagtaatcaaaaattgattgttcttggcaatttgacagtcaaaggtaat

SEQ ID NO: 632610 - DNA, 75 bp, synthetic construct
  source 1..75: mol_type = other DNA
atccgcaaagcgtctgaaatttccatcaaagccggtgctgacttcatcaaaacctctaccggtaaagtggcggtg

SEQ ID NO: 632611 - DNA, 75 bp, synthetic construct
  source 1..75: mol_type = other DNA
acaagttcaccatcaataaaagatcatatttcccagcttatgcttttcataaattcagcccaggtgttaaatgct

SEQ ID NO: 632612 - DNA, 75 bp, synthetic construct
  source 1..75: mol_type = other DNA
gatcgctatcagccagacttcacggataagacgactgacgggacagacaaccactactggatcctgcgcaacatg

SEQ ID NO: 632613 - DNA, 75 bp, synthetic construct
  source 1..75: mol_type = other DNA
ccgcctttattgcggccatagagcttaacccaaagggctaccgctacctgagaacagacagctttatagaaaagt

SEQ ID NO: 632614 - DNA, 75 bp, synthetic construct
  source 1..75: mol_type = other DNA
atgaggggatgcgtggccgatcacagtttacaacagggtttgataacgggaggaaaagtcatgctgcagggattg

SEQ ID NO: 632615 - DNA, 75 bp, synthetic construct
  source 1..75: mol_type = other DNA
tttggttttccttcattgattggttttacttttatgtcagggatgatcaacaagttcaaagaggtgttcccgaaa

SEQ ID NO: 632616 - DNA, 75 bp, synthetic construct
  source 1..75: mol_type = other DNA
gtttataaaattcacggatgcgttagcaaaccagaatccataataataaccagtgatgactatattcattttgat

SEQ ID NO: 632617 - DNA, 75 bp, synthetic construct
  source 1..75: mol_type = other DNA
cgctacgggcagttacagaccttcaccgactgctcaggatatgaaacgcattacgaatacgaccgctttggtcag

SEQ ID NO: 632618 - DNA, 75 bp, synthetic construct
  source 1..75: mol_type = other DNA
attcgacaattgaaagatgataaacaaggtaaaattgctaatatctatcaattaaatgcacaagatgcgtctgcc

SEQ ID NO: 632619 - DNA, 75 bp, synthetic construct
  source 1..75: mol_type = other DNA
gctgggtgcggacggtgtggcggatggacgaccagcagcagtgggaagagcgggcgcgggtaaacgcggatgcgc

SEQ ID NO: 632620 - DNA, 75 bp, synthetic construct
  source 1..75: mol_type = other DNA
atggcagcaggcgagaatactgagccgggtaataccggctatcaccggtatgaaactaccggggagaacacgcac

SEQ ID NO: 632621 - DNA, 75 bp, synthetic construct
  source 1..75: mol_type = other DNA
tacaatgaaaatggatcgaagcgggatgactttagcagaagcaattggtaatgccgaaggtatgtcccaagcttt

SEQ ID NO: 632622 - DNA, 75 bp, synthetic construct
  source 1..75: mol_type = other DNA
aatcgcgtgatttctcaactggttccaacaatttcgggtgtacatgatatgacagaaacaacccgttatattaag

SEQ ID NO: 632623 - DNA, 75 bp, synthetic construct
  source 1..75: mol_type = other DNA
gctggtgggcttgctccagatgctgattggcgaaatgttgtattaactcataacggaaaagacataaaagtctca

SEQ ID NO: 632624 - DNA, 75 bp, synthetic construct
  source 1..75: mol_type = other DNA
gagcagacggtcactgcatcactggctaataatggtgccagcgacaacaaaactgtgcattttattggcgacaca

SEQ ID NO: 632625 - DNA, 75 bp, synthetic construct
  source 1..75: mol_type = other DNA
agatatcccagtaattcatttaagtgtaatgtttcttctggggagtatatttataacacatggagatatctggta

SEQ ID NO: 632626 - DNA, 75 bp, synthetic construct
  source 1..75: mol_type = other DNA
ccacgccggacggcaggaaatcggaattttactataacaatcaaaaccagttaacctcagccaccgggcctgacg

SEQ ID NO: 632627 - DNA, 75 bp, synthetic construct
  source 1..75: mol_type = other DNA
ttgtcggcgactcgagtaccgcgcaggttgatctgcagaagtcgaaaaatgaagtggtcgctgacggcaatgata

SEQ ID NO: 632628 - DNA, 75 bp, synthetic construct
  source 1..75: mol_type = other DNA
aaaaattatcgagttgacgcctgacccaggcagcataatcgccggtaccccacagaacagcaccggtagcgtaat

SEQ ID NO: 632629 - DNA, 75 bp, synthetic construct
  source 1..75: mol_type = other DNA
gttaatggcctggcgacttttgatctgaaaagtagtaagcaggaagacaacacggttgaagtcacccttgaaaat

SEQ ID NO: 632630 - DNA, 75 bp, synthetic construct
  source 1..75: mol_type = other DNA
tttctattgcgatgggcccggaattccgcccaatgctacgtttctacatgacgggcgggcaagttgataatgacc

SEQ ID NO: 632631 - DNA, 75 bp, synthetic construct
  source 1..75: mol_type = other DNA
aaaaaaaattaaattcattatttgaagaaaaaggtgggcttgaagctggactacttcaaatccaagagatggaga

SEQ ID NO: 632632 - DNA, 75 bp, synthetic construct
  source 1..75: mol_type = other DNA
aatgcagccagtgctgcaagaaatttccaaatataaagatgaactaaataacttattgactcaagaatcagagct

SEQ ID NO: 632633 - DNA, 75 bp, synthetic construct
  source 1..75: mol_type = other DNA
gttctttcaggcttggagtgattcgtgatatcgaatttcacattggcgttaatttgattattgaccgaaacacct

SEQ ID NO: 632634 - DNA, 75 bp, synthetic construct
  source 1..75: mol_type = other DNA
tgcaggagatgccttatgcccagcagctggaaaaactgcgtctcgacgggccggcgggcattgggccggacgtgc

SEQ ID NO: 632635 - DNA, 75 bp, synthetic construct
  source 1..75: mol_type = other DNA
gtgttaaacatcacgctttatatgatgccattcatcaggctaaagttgtttcttatgtctggatgtatcttgtaa

SEQ ID NO: 632636 - DNA, 75 bp, synthetic construct
  source 1..75: mol_type = other DNA
gttcgtaatattattaagtttgatggtgttaaacatcacgctttatatgatgccattcatcaggctaaagttgtt

SEQ ID NO: 632637 - DNA, 75 bp, synthetic construct
  source 1..75: mol_type = other DNA
aggtaataaggtcggtgattatcttggagatgcttataagtcgttagcaagagaaattgctgatgatgtcaaaaa

SEQ ID NO: 632638 - DNA, 75 bp, synthetic construct
  source 1..75: mol_type = other DNA
gtggggttcactggggtggtggttcaggctctggtaatggaggtggtgaacatggaagtcagacggggtggggat

SEQ ID NO: 632639 - DNA, 75 bp, synthetic construct
  source 1..75: mol_type = other DNA
gtgaaagattgtaccttggtgatggagttggaaaagacaaaaaaaggattaatctcgagggcggagtgtatttct

SEQ ID NO: 632640 - DNA, 75 bp, synthetic construct
  source 1..75: mol_type = other DNA
gctgaagatgcgtgggatcgtttgcctcctaatgtgagaaaatttgatgttgatgttgaacagttccactattta

SEQ ID NO: 632641 - DNA, 75 bp, synthetic construct
  source 1..75: mol_type = other DNA
aaatttgccgatgtggtgatgaaggttgagaaggtccgggagaaaagcatcgagggctatgaaaccgggaactgg

SEQ ID NO: 632642 - DNA, 75 bp, synthetic construct
  source 1..75: mol_type = other DNA
ataaagttttgtctaatccggggtttaaatttaacagggccgacagtgatgcactggcgaacgtctggcgaagta

SEQ ID NO: 632643 - DNA, 75 bp, synthetic construct
  source 1..75: mol_type = other DNA
tcgccgctcagcgtcgatcaggcgaaacaggatgcctttacgccagcctccatcaatgccttccgcatggacaac

SEQ ID NO: 632644 - DNA, 75 bp, synthetic construct
  source 1..75: mol_type = other DNA
ttggcagaagtattcctgactgaactgtttggatccaattatagcgatgtaatcgcgtcatacggagatacgcta

SEQ ID NO: 632645 - DNA, 75 bp, synthetic construct
  source 1..75: mol_type = other DNA
tccatttcctcagcagggaatacagtaggcgctaatatatggcccgcgtcacagtgtgaaattgttatatttgcg

SEQ ID NO: 632646 - DNA, 75 bp, synthetic construct
  source 1..75: mol_type = other DNA
caggctgcttacagagtccgttctgatgacatccctgagtcagtgggtccgacataacggtatcatcagttatga

SEQ ID NO: 632647 - DNA, 75 bp, synthetic construct
  source 1..75: mol_type = other DNA
tcgctggctgccagcgaaggcgaagaacagcgatttcccgggcaactggtggattatcgagacaaaacacaacgt

SEQ ID NO: 632648 - DNA, 75 bp, synthetic construct
  source 1..75: mol_type = other DNA
accttgccatccttgggctggtggatcttaacgatgttacgccggaattgctcagcatgcgcaagaatcatgtgg

SEQ ID NO: 632649 - DNA, 75 bp, synthetic construct
  source 1..75: mol_type = other DNA
tgcggatgtcgtaaacgacggctctaaatttatggatgcctatcaaatggatgcggtgcagttgccatcagccta

SEQ ID NO: 632650 - DNA, 75 bp, synthetic construct
  source 1..75: mol_type = other DNA
gttttgtaggtctgataagacgcgccagcgtcgcatcagacatcagcacggtgcctgtgccggatgcggcgtgga

SEQ ID NO: 632651 - DNA, 75 bp, synthetic construct
  source 1..75: mol_type = other DNA
accctatggagaacaagaaagttaccgttggcagcaggcttcggagcgtatggccgaacggctggggagatacag

SEQ ID NO: 632652 - DNA, 75 bp, synthetic construct
  source 1..75: mol_type = other DNA
agcaggcgccgcaggccgcgctcgataatgcggtgaaacagatcacgatgcagatcgaagcaatgcaggccagca

SEQ ID NO: 632653 - DNA, 75 bp, synthetic construct
  source 1..75: mol_type = other DNA
gtgcatctccagccttttattacgaaatgtcgctcgataaacagcctccggaacagccccagatgcctgtttatg

SEQ ID NO: 632654 - DNA, 75 bp, synthetic construct
  source 1..75: mol_type = other DNA
attggtgttagagaaaattatttaaagacgtacatagaagaaaaaaccgatttaaaatgtgatgttaatcttgat

SEQ ID NO: 632655 - DNA, 75 bp, synthetic construct
  source 1..75: mol_type = other DNA
attatggacaaggaccttattgtaaagcgcacaaattagtttcttatgcggcaagtatgggtaagctgtgtttgg

SEQ ID NO: 632656 - DNA, 75 bp, synthetic construct
  source 1..75: mol_type = other DNA
gaaaatccggattacaaaattgtaccgacctataaaggcaactacgaacagaatttaagcgcggggattgccgca

SEQ ID NO: 632657 - DNA, 75 bp, synthetic construct
  source 1..75: mol_type = other DNA
ggttactactccgacagcaaaacgggccacttactctcccagccattcaacagctcgactcccgttctctattac

SEQ ID NO: 632658 - DNA, 75 bp, synthetic construct
  source 1..75: mol_type = other DNA
aattttttattccattaaaaacagcaaccagactgttacttaataacgagatagatagcgcaagagttgttctta

SEQ ID NO: 632659 - DNA, 75 bp, synthetic construct
  source 1..75: mol_type = other DNA
aatggggcaacctgctgaatgaagagaacccgcatcagctgcagcagctcatccgcctgccgggtcagcagtatg

SEQ ID NO: 632660 - DNA, 75 bp, synthetic construct
  source 1..75: mol_type = other DNA
atcaggccaaaactccggtcggcaataccgccgctatctgtatctatcctcgctttatcccgattgctcgcaaaa

SEQ ID NO: 632661 - DNA, 75 bp, synthetic construct
  source 1..75: mol_type = other DNA
agttcgcagccgctaagcgcgctctggcaggtgctgccggaagatgttcgcctgagtccgcatgtgtacctggcg

SEQ ID NO: 632662 - DNA, 75 bp, synthetic construct
  source 1..75: mol_type = other DNA
agtcagataagtcactaacctatggttcagtatgcagtggtattgaagctgcgacagtagcctggagcaatcttg

SEQ ID NO: 632663 - DNA, 75 bp, synthetic construct
  source 1..75: mol_type = other DNA
atttgagtcctcgcctttgtcgtcgggcggtgaaaactattatggaaagaagaaaaaatcccaatccctgcttga

SEQ ID NO: 632664 - DNA, 75 bp, synthetic construct
  source 1..75: mol_type = other DNA
aaatgaaagcgcattaccagcaaggcggactgggtgacaggacatgcaaaaacgagctggagatatgcctacagg

SEQ ID NO: 632665 - DNA, 75 bp, synthetic construct
  source 1..75: mol_type = other DNA
gatgtttttgatactcgatttgctttttacggtatagattttaactttttcagacgcttaagaataataaaacat

SEQ ID NO: 632666 - DNA, 75 bp, synthetic construct
  source 1..75: mol_type = other DNA
gggagattctttttgctggggatcatgggtaatagtagataacgcccctgcacattatgcaatagaatctgcact

SEQ ID NO: 632667 - DNA, 75 bp, synthetic construct
  source 1..75: mol_type = other DNA
ttcccacacggtaacgacgacatcgaaatcgcgctggcagaaacccgtgcggcaatcgcctacggtgccgatgaa

SEQ ID NO: 632668 - DNA, 75 bp, synthetic construct
  source 1..75: mol_type = other DNA
attcatgcagtggggttgttttctgtttacgaagctcacttacagcgcaggttacactgtagagacggtttcaaa

SEQ ID NO: 632669 - DNA, 75 bp, synthetic construct
  source 1..75: mol_type = other DNA
ggttatggggcttgtcggtgttctctggggtaaaaggtccgcactaccgtcagccggaaaaccgttgccgcaggt

SEQ ID NO: 632670 - DNA, 75 bp, synthetic construct
  source 1..75: mol_type = other DNA
gtttcgggaaggtatcagagtggccagatgcactgtgcacgtctcatggcggttatggggcttgtcggtgttctc

SEQ ID NO: 632671 - DNA, 75 bp, synthetic construct
  source 1..75: mol_type = other DNA
agcagcaagccgtactcaacatggcgggattcataaaaagtcagagcctgacgctgctcgaaaaactggacgcac

SEQ ID NO: 632672 - DNA, 75 bp, synthetic construct
  source 1..75: mol_type = other DNA
caccggcgggtcgtccctgcgcgcgcgttacctgtgaaaccttaccgtctgcactggatcgctgggacggcggga

SEQ ID NO: 632673 - DNA, 75 bp, synthetic construct
  source 1..75: mol_type = other DNA
tttgcgctctcacttgatgaaggaggtaacagcgtagggaggagcattgtcgcgtcagggaacacaataaccgta

SEQ ID NO: 632674 - DNA, 75 bp, synthetic construct
  source 1..75: mol_type = other DNA
atgcttcgggaaaccccaacaactacggaatcaagcccgtttccgttgttggacgtatacaacttgccgccggac

SEQ ID NO: 632675 - DNA, 75 bp, synthetic construct
  source 1..75: mol_type = other DNA
cgaactagcggaagaactgcagaacagcatacagacgcattttgaagcgcagtacggcattggagtggaacaacc

SEQ ID NO: 632676 - DNA, 75 bp, synthetic construct
  source 1..75: mol_type = other DNA
ggcggtcggctggctgcagaaataccgcaatgaagccccggcgcgcgtgatgagcaaggttactgacgaggaagg

SEQ ID NO: 632677 - DNA, 75 bp, synthetic construct
  source 1..75: mol_type = other DNA
tatttctgccacccggtgaacttcgactatcacctgaagtacaacaaactcgacctgtgggcgcgttttcaggat

SEQ ID NO: 632678 - DNA, 75 bp, synthetic construct
  source 1..75: mol_type = other DNA
ttaacatggcgcgattcatcaaaagccagagtctgacactgcttgaaaagctggatgccctcgatgccgacgaac

SEQ ID NO: 632679 - DNA, 75 bp, synthetic construct
  source 1..75: mol_type = other DNA
gaactgtccagcaagttcaccgtagagccgtccgtgcagcagacattggaagaccagatccagcaatccgccgct

SEQ ID NO: 632680 - DNA, 75 bp, synthetic construct
  source 1..75: mol_type = other DNA
ggcggtgggctggctgcagaagtaccgcaatgaagctgcagcgcgcgtgatgtcaaaaatcaccgacgaagacgg

SEQ ID NO: 632681 - DNA, 75 bp, synthetic construct
  source 1..75: mol_type = other DNA
ggcattggaacagattattttagttatttaagaatatttcaaagtgctctggagggaagagtaactactgagatc

SEQ ID NO: 632682 - DNA, 75 bp, synthetic construct
  source 1..75: mol_type = other DNA
aacgtttatccgatgacgccgggcctgatcgagcaactccgtccggagactgtgctcgctcgtccaaacccacag

SEQ ID NO: 632683 - DNA, 75 bp, synthetic construct
  source 1..75: mol_type = other DNA
acttaatgcgcaagatgcttcggcaatggtactgggaacagaatttcagttacaaccatacgatatcgtttatgt

SEQ ID NO: 632684 - DNA, 75 bp, synthetic construct
  source 1..75: mol_type = other DNA
gcaggaggattatctgaaaacgcggattggcgtaatgtagtgctaacccataatggtcaagacacaaaaatatcg

SEQ ID NO: 632685 - DNA, 75 bp, synthetic construct
  source 1..75: mol_type = other DNA
gttaaatgctcaagatgcatctgcaatggtattaggcactgaatttcaattacaaccttatgatatcgtctatgt

SEQ ID NO: 632686 - DNA, 75 bp, synthetic construct
  source 1..75: mol_type = other DNA
ggtcagggattaaacactctgcgtaagaacgtagtcgaactcccggacagtgactacgatctggataaactggtc

SEQ ID NO: 632687 - DNA, 75 bp, synthetic construct
  source 1..75: mol_type = other DNA
taatggtaaagatactaaaatctcattatatgcattaatgcaaaagggcgacttaacgcaaaaccatatgctcta

SEQ ID NO: 632688 - DNA, 75 bp, synthetic construct
  source 1..75: mol_type = other DNA
actggcgaggtagcaaaatcaggacagcagccaattactaatatcccccttacggttatggatgccattaataat

SEQ ID NO: 632689 - DNA, 75 bp, synthetic construct
  source 1..75: mol_type = other DNA
agtaccgtagcgccagcgatactggtaactgggttaactccgacggtaccatattctatccttatatcggtaaag

SEQ ID NO: 632690 - DNA, 75 bp, synthetic construct
  source 1..75: mol_type = other DNA
taatgggtgaagttggcaagcaagcaaccatgaaaatggacagaagtggcatgactttggctgaagcaataggaa

SEQ ID NO: 632691 - DNA, 75 bp, synthetic construct
  source 1..75: mol_type = other DNA
acttgacgcagaatcatctgctttatcccggcgatatactttttgtaccacgtaatgatgatttgaaagtttttg

SEQ ID NO: 632692 - DNA, 75 bp, synthetic construct
  source 1..75: mol_type = other DNA
gaactgggttaattcagatggtactattttctatccttatattggtaaggttcaggtagcgggtaaaacgcttag

SEQ ID NO: 632693 - DNA, 75 bp, synthetic construct
  source 1..75: mol_type = other DNA
tccaggagatattctttttgtacctcgtaatgacgatcttaaagtattcgtgatgggagaggttggtaaacaaag

SEQ ID NO: 632694 - DNA, 75 bp, synthetic construct
  source 1..75: mol_type = other DNA
atattctatccgtatattggcaaagttcaggtagcgggtaaaactatcagtcaggtccgtcaggatattgccagt

SEQ ID NO: 632695 - DNA, 75 bp, synthetic construct
  source 1..75: mol_type = other DNA
cggtcagaataatacgttcccgtattttacgggcgaagacacaatggcattaacgccgctcagtgcttttgtgcg

SEQ ID NO: 632696 - DNA, 75 bp, synthetic construct
  source 1..75: mol_type = other DNA
gtgtaccggtaatgccacctgtcgcagctgaattaagcaaaacaacgctttatttcaccgaaggcgggaacggta

SEQ ID NO: 632697 - DNA, 75 bp, synthetic construct
  source 1..75: mol_type = other DNA
agcagcctataaccaatattccattgaccgtcatggatgctatcaataatgctggtggccttgcgccggatgctg

SEQ ID NO: 632698 - DNA, 75 bp, synthetic construct
  source 1..75: mol_type = other DNA
cgttcttcagcgtgccggtcatgcttggcacgctcggaggaatcggtttaattgtcggcccggcaggcctgctgt

SEQ ID NO: 632699 - DNA, 75 bp, synthetic construct
  source 1..75: mol_type = other DNA
tcatgtaaaaaatgtcaaggattattttttctcttttggttctggtaaagggaatgtctcaggagttattgctag

SEQ ID NO: 632700 - DNA, 75 bp, synthetic construct
  source 1..75: mol_type = other DNA
ctaccccatcacttatggcaatgttctgcacctgaaaggcgcgacagcatcaggcgaaggtgaactgctgattgg

SEQ ID NO: 632701 - DNA, 75 bp, synthetic construct
  source 1..75: mol_type = other DNA
tgatgggggaggttggtaaacaatcaaccatgaaaatggatcgaagtggtatgaccttggccgaagctttaggta

SEQ ID NO: 632702 - DNA, 75 bp, synthetic construct
  source 1..75: mol_type = other DNA
ttagataatttattgcgcagttacgaatatcgcattggtgtgggcgatgtattgatggttacggtatgggatcac

SEQ ID NO: 632703 - DNA, 75 bp, synthetic construct
  source 1..75: mol_type = other DNA
aatcgcgttatatcgcaacttgttccaacaattaccggtgttcatgatatgacggaaacagtgagatatattaac

SEQ ID NO: 632704 - DNA, 75 bp, synthetic construct
  source 1..75: mol_type = other DNA
aatgtttatcctatgaccccaggactgatcgaacagctccgtcctgaaaccgtgctggctcgtcccaacccgcag

SEQ ID NO: 632705 - DNA, 75 bp, synthetic construct
  source 1..75: mol_type = other DNA
tgaagtcagacaaatcattgccagtcgcctgacgacctacattgaaagcccgcaggttgacattagcgttgccgc

SEQ ID NO: 632706 - DNA, 75 bp, synthetic construct
  source 1..75: mol_type = other DNA
atccggcaattgaaaggcgacaaacaaggaaagattgcaaatatttatcagttaaatgcacaagatgcatccgct

SEQ ID NO: 632707 - DNA, 75 bp, synthetic construct
  source 1..75: mol_type = other DNA
ctattcgcatttatatgctctccaccggactggcaacgctggcggggattgtcttctcgatttatacccaggccg

SEQ ID NO: 632708 - DNA, 75 bp, synthetic construct
  source 1..75: mol_type = other DNA
tgatgtggtcattgtcgttgatggacctatcccggaaggtattacggatgtaatattggcgctaagagaaaaata

SEQ ID NO: 632709 - DNA, 75 bp, synthetic construct
  source 1..75: mol_type = other DNA
atttaccgtggcgatcggacatatagcaaggggtctgttgcattaaagcgttgctggttgaaaaccgggaaaaca

SEQ ID NO: 632710 - DNA, 75 bp, synthetic construct
  source 1..75: mol_type = other DNA
tttcatattcagcttttactgatccatttttatcgccgtgtcgtccttaaagaccctttgttgccggaggagttg

SEQ ID NO: 632711 - DNA, 75 bp, synthetic construct
  source 1..75: mol_type = other DNA
aaagataagactcctgaaaactgggaagggagggtaatgttacaaagatatctcgaattaaaaatgaaagatcat

SEQ ID NO: 632712 - DNA, 75 bp, synthetic construct
  source 1..75: mol_type = other DNA
tttgactatcatatgtttcgtcgtgtttatagtttcattattaccgactaaagaagtcaaaaacttcattaatcg

SEQ ID NO: 632713 - DNA, 75 bp, synthetic construct
  source 1..75: mol_type = other DNA
caccttctgaagagttagaaaatggcaaggcgctgttgtcttcttatcagcaactacaagaagatgacagaagtc

SEQ ID NO: 632714 - DNA, 75 bp, synthetic construct
  source 1..75: mol_type = other DNA
gaggcaggaattagaggtaaaaacgccctaccgggccatgaatcccccggtcactggagtagtaaccaaagcaga

SEQ ID NO: 632715 - DNA, 75 bp, synthetic construct
  source 1..75: mol_type = other DNA
cttccgaaagaagtcaacgggcacgttatctgttcaaccagaatccgacacattctggctatacgaaagagcata

SEQ ID NO: 632716 - DNA, 75 bp, synthetic construct
  source 1..75: mol_type = other DNA
ataacgcactcgtctggctgaaaaaacttgatcatcgcctgaaagcgaaatatagcgagaagaaaaatactggcg

SEQ ID NO: 632717 - DNA, 75 bp, synthetic construct
  source 1..75: mol_type = other DNA
gcttatctgcgggccgtcggcgatttaccgcgcgattatccgacgctgcgcgacgtggtggatgaagcgattgtc

SEQ ID NO: 632718 - DNA, 75 bp, synthetic construct
  source 1..75: mol_type = other DNA
ggggtattgtttatcctcgtcctgtgatgacatttcgcgcacccaacaccttttctggtcatccacttcctgatg

SEQ ID NO: 632719 - DNA, 75 bp, synthetic construct
  source 1..75: mol_type = other DNA
gataacatcgtctgtgttgctcccccatttggtcagttcagtactcttataggatggtttttgattgcggaatca

SEQ ID NO: 632720 - DNA, 75 bp, synthetic construct
  source 1..75: mol_type = other DNA
tctcgatcgcatcgttgccacgctgggtctgaaggaaatgacgcagggaacgctgatccgtaagttatgtacata

SEQ ID NO: 632721 - DNA, 75 bp, synthetic construct
  source 1..75: mol_type = other DNA
caaaaaaagaagcagatacagacagtctgacggctgtcatcgttgctcaggccatgaatcatggcaaccatgtca

SEQ ID NO: 632722 - DNA, 75 bp, synthetic construct
  source 1..75: mol_type = other DNA
agttaataacatcaatcgctgcagctcccgcatttcatgtttctccatctagggagccagagccaagaaaaatca

SEQ ID NO: 632723 - DNA, 75 bp, synthetic construct
  source 1..75: mol_type = other DNA
cgggagttttgtattccccagcgaatagcaaaagatattctgtataacattgagcacgagggacgaaaccatatc

SEQ ID NO: 632724 - DNA, 75 bp, synthetic construct
  source 1..75: mol_type = other DNA
cctgatgccttcagagtgggtggagttggtgggacaatccttggtttaggtctctggataaaagcaaaactacaa

SEQ ID NO: 632725 - DNA, 75 bp, synthetic construct
  source 1..75: mol_type = other DNA
tcaggatctcgacagaccatttgtgattttcaaaacgcgtatgtcggcaatgatcgcgacggtggttgtcgtact

SEQ ID NO: 632726 - DNA, 75 bp, synthetic construct
  source 1..75: mol_type = other DNA
agttacagagacgcatggaaggggtttatccacgccaatttacgtcttgtggtcgcgattgcgaaaaaacactgc

SEQ ID NO: 632727 - DNA, 75 bp, synthetic construct
  source 1..75: mol_type = other DNA
agttgctgcatccgaattgccttcccgcgacatcgcctgagattactgaagaggatgacgacgcggaagaagcgg

SEQ ID NO: 632728 - DNA, 75 bp, synthetic construct
  source 1..75: mol_type = other DNA
gtggatggcgatgatgctttcccggaaagtgatgcctttggggaattagcggcgagtgatgttctcgagccctgg

SEQ ID NO: 632729 - DNA, 75 bp, synthetic construct
  source 1..75: mol_type = other DNA
aacgacacctttacccgactgacccgtaacgacgagaaagatgactggctgaaacgcggcgtgcgcagcgatgcg

SEQ ID NO: 632730 - DNA, 75 bp, synthetic construct
  source 1..75: mol_type = other DNA
ccctttgacacctttgccgtgccaatggaacaagtggtgcgcattcatgcttcttcgggaaccacaggtaaaccg

SEQ ID NO: 632731 - DNA, 75 bp, synthetic construct
  source 1..75: mol_type = other DNA
atctcttatagcaatttcaagaaatatgcgtagcgatcattcattcgccctagacttggtgcaagctttaagtgg

SEQ ID NO: 632732 - DNA, 75 bp, synthetic construct
  source 1..75: mol_type = other DNA
gaaggaaatggctacgatttatcaatcattaaaggataatgaagagatcctgaaatggtttgatatcgcagtatt

SEQ ID NO: 632733 - DNA, 75 bp, synthetic construct
  source 1..75: mol_type = other DNA
aagtcctgcgtattcgatgaagagaagtgtgctgttggcatctctcaccttgagggctaccgcaaggagtgggac

SEQ ID NO: 632734 - DNA, 75 bp, synthetic construct
  source 1..75: mol_type = other DNA
catttcgtggtggtacgctgcgttacctgcatgtttccgagttcggcaagatatgcgccaagtatccggacaaag

SEQ ID NO: 632735 - DNA, 75 bp, synthetic construct
  source 1..75: mol_type = other DNA
gtcatctttagaattagcgcagcggccaagcggtggggtagtaccgcgaaaagtaggtacgttgtggggcgaata

SEQ ID NO: 632736 - DNA, 75 bp, synthetic construct
  source 1..75: mol_type = other DNA
atgggtatatgtattggtaagaaaaaaaatataacgccaacaggtgagtggttatttgttgtaacagtagaagat

SEQ ID NO: 632737 - DNA, 75 bp, synthetic construct
  source 1..75: mol_type = other DNA
aacaagcggatcggccaaatcccggataactcgcacctcccggtgcacacgttctgggatatcggtgtgggtgac

SEQ ID NO: 632738 - DNA, 75 bp, synthetic construct
  source 1..75: mol_type = other DNA
atcgacccggtcgaacctcttcctgtgcgcctgctggaatacttcgctgagatggaagcgaagcacggcgtagtc

SEQ ID NO: 632739 - DNA, 75 bp, synthetic construct
  source 1..75: mol_type = other DNA
cggaacgtcacgtttatcgccgatgtcaggacggcgcagatcgcgagtctggaggtgaggcaggataactcagtg

SEQ ID NO: 632740 - DNA, 75 bp, synthetic construct
  source 1..75: mol_type = other DNA
tttggtaatgcgcttgccgggcagacggtgagcgtgttggcggacaacggcgcaacggtgtctccgacggtcatc

SEQ ID NO: 632741 - DNA, 75 bp, synthetic construct
  source 1..75: mol_type = other DNA
gttcctgatgcggagttcattgctcagtgtacccgatgtagtcaatgcattgatgtctgctcaatgggagtcctg

SEQ ID NO: 632742 - DNA, 75 bp, synthetic construct
  source 1..75: mol_type = other DNA
ggacggcacggtggagatcattgtcaccagtcagacggcgggagtcagttctgtcaccgccagcatcaacaacag

SEQ ID NO: 632743 - DNA, 75 bp, synthetic construct
  source 1..75: mol_type = other DNA
aatacgcttgccgggcagacggtgagcgtgttgggaggcaacggcgcaacgactgccccgacggtcatcacaggg

SEQ ID NO: 632744 - DNA, 75 bp, synthetic construct
  source 1..75: mol_type = other DNA
ttatctgtgctgataagaagtgaagttactattactgggaaacccaagaatggtaaagggaatgatgttgtattt

SEQ ID NO: 632745 - DNA, 75 bp, synthetic construct
  source 1..75: mol_type = other DNA
gaaactcaagtctatgtagcgaccatccttaatggtgctcccgcccagttttcagcctctccgtcacgaaataag

SEQ ID NO: 632746 - DNA, 75 bp, synthetic construct
  source 1..75: mol_type = other DNA
gagcgaaaaataacaatgaaaacgatgctcattggattgaaaggatgatgccagttgaacctgaccgtgactatc

SEQ ID NO: 632747 - DNA, 75 bp, synthetic construct
  source 1..75: mol_type = other DNA
ccttacgcaagtgggggccggagaaacaactggcgaagctcgccgaggaagcagccgaactcagcgccgcaaccg

SEQ ID NO: 632748 - DNA, 75 bp, synthetic construct
  source 1..75: mol_type = other DNA
aaagaaatgtgcggtctggaatgggggcgtttatacgaaacctataaagacaaaccatacaatccaggtgaatta

SEQ ID NO: 632749 - DNA, 75 bp, synthetic construct
  source 1..75: mol_type = other DNA
ttgagaaaaaagatctcagctcacgaatgtgctttgaagaagcgttattactgcatcttcatcgggtattccggc

SEQ ID NO: 632750 - DNA, 75 bp, synthetic construct
  source 1..75: mol_type = other DNA
gaaaatggtttttacttgctgcccaaaatggcaacacatctgcgcaatatgagcttgcccgtatctcacgctttg

SEQ ID NO: 632751 - DNA, 75 bp, synthetic construct
  source 1..75: mol_type = other DNA
cggggtactcggtcaagtattaccagagcgatggatcaagacagtgaagttattcatttgaacaataccacgata

SEQ ID NO: 632752 - DNA, 75 bp, synthetic construct
  source 1..75: mol_type = other DNA
atcgcatcgctatcgtgccgatgccggtatgcgtgcgctcaatgagcttaatccactattcgcattagagctaac

SEQ ID NO: 632753 - DNA, 75 bp, synthetic construct
  source 1..75: mol_type = other DNA
atcgcgttatggtcaacgccagcaagcagctgacctggagcgatgtcaacgcagttccggcgcgtaacgtgggct

SEQ ID NO: 632754 - DNA, 75 bp, synthetic construct
  source 1..75: mol_type = other DNA
cgatatatcactcaggatccgattgggctgaaagggggatggaatttttatcagtatccgttgaatccgatctca

SEQ ID NO: 632755 - DNA, 75 bp, synthetic construct
  source 1..75: mol_type = other DNA
acagataaagcggagcaacaaggtatttcaaactgccccctttgcgccagttcagataatgccaataaaacaaaa

SEQ ID NO: 632756 - DNA, 75 bp, synthetic construct
  source 1..75: mol_type = other DNA
ctttgtttataatgaactggagggaaaaggcttgtttggtttatcaggaaagcttaccattcagcccgaatatca

SEQ ID NO: 632757 - DNA, 75 bp, synthetic construct
  source 1..75: mol_type = other DNA
gcttttaaccaaacttgaaacagtgtttgacggccgctaccgtggcaaagtcattcaagtggatagcagtaaaaa

SEQ ID NO: 632758 - DNA, 75 bp, synthetic construct
  source 1..75: mol_type = other DNA
tatctgctccacgtttgaccgttgattctggcgagaaagcatcttttgccgttggtgatgatgtgcctgtactca

SEQ ID NO: 632759 - DNA, 75 bp, synthetic construct
  source 1..75: mol_type = other DNA
gcacgggtggttaaccaccctcagccataccagtgaaggccaccgcgtgtcggtccactacgggtacgacgataa

SEQ ID NO: 632760 - DNA, 75 bp, synthetic construct
  source 1..75: mol_type = other DNA
gcctggtgttccacacgcggatacagcatggcgagccactggtcgagagccgctacctctacgacccgctgggac

SEQ ID NO: 632761 - DNA, 75 bp, synthetic construct
  source 1..75: mol_type = other DNA
tcaaccttcaccattcacgcggcatggaccttctgtgaaaggtgcatttaaaccagaaatagttgcgcacggtgg

SEQ ID NO: 632762 - DNA, 75 bp, synthetic construct
  source 1..75: mol_type = other DNA
atatttccaaagcccctcttcagaatgaccgacggacccgtagagtcaatatgcctcgtattcgcagaggcgatt

SEQ ID NO: 632763 - DNA, 75 bp, synthetic construct
  source 1..75: mol_type = other DNA
ttcagcatctcagcccggcaacggaaaaccaaccgtcgccttttacccgacacggcccgtcggtaaaaggcgcgt

SEQ ID NO: 632764 - DNA, 75 bp, synthetic construct
  source 1..75: mol_type = other DNA
cagtacctacacaataccattttgttacacataaaggggtaacatcgccattccaagacctcctagatgatccaa

SEQ ID NO: 632765 - DNA, 75 bp, synthetic construct
  source 1..75: mol_type = other DNA
ctgctcttttttcatcacggatactggaaataataaattatagaaataatattcttttctttttagttgtggcaa

SEQ ID NO: 632766 - DNA, 75 bp, synthetic construct
  source 1..75: mol_type = other DNA
ggcagtagaagacaatccaagcacgaacgttactattgtaacggataaacacacgtactcattgtaccttacgga

SEQ ID NO: 632767 - DNA, 75 bp, synthetic construct
  source 1..75: mol_type = other DNA
actgtgctgaccaacgagaacggcagccagtccacgttccggtatgacccggtcgacaggctgacggagcagcgc

SEQ ID NO: 632768 - DNA, 75 bp, synthetic construct
  source 1..75: mol_type = other DNA
aaaccgcgtcacgccggacagcctgccgccggtggagtggctgacctacggcagcggttacctggcgggcatgaa

SEQ ID NO: 632769 - DNA, 75 bp, synthetic construct
  source 1..75: mol_type = other DNA
acgttgttgctttaatttttccattgttgatgattctatgtggggcttttgtaaaaaaacttgccagatcctctg

SEQ ID NO: 632770 - DNA, 75 bp, synthetic construct
  source 1..75: mol_type = other DNA
aacggacagagaaaacgctgaagctaatctttatgccgaaattgaggcacgaattcgtgagcaggagcgttccag

SEQ ID NO: 632771 - DNA, 75 bp, synthetic construct
  source 1..75: mol_type = other DNA
ctggacgcactcgatgctgacgaacaggccgccatgtgtgagaagctgcacgaactcgcggaagaacttcagaac

SEQ ID NO: 632772 - DNA, 75 bp, synthetic construct
  source 1..75: mol_type = other DNA
aactattccaacgaacaaacacaactgctggggcagattgtactggcgaactttgccaacaacgaaggtctggca

SEQ ID NO: 632773 - DNA, 75 bp, synthetic construct
  source 1..75: mol_type = other DNA
tgctgcgctgacctgggtattccgttctttgtggatacgggaaacaaaaagctggttgaaccgccccgggtttcc

SEQ ID NO: 632774 - DNA, 75 bp, synthetic construct
  source 1..75: mol_type = other DNA
atgaacagtttaacggcaaataaccgtttgtcgcaacagctggtggtcagtgtcgctgaacaccggttgttatgg

SEQ ID NO: 632775 - DNA, 75 bp, synthetic construct
  source 1..75: mol_type = other DNA
tcctcgcatcattattgatcatgatttatttcgagtatacactgcttcagcacctgaaaaatcaggtgccgggat

SEQ ID NO: 632776 - DNA, 75 bp, synthetic construct
  source 1..75: mol_type = other DNA
gaaaacaatagagtttttaaaaaagaaagagaatatatcgataactcagttggaaattttaaaagcaattgagtc

SEQ ID NO: 632777 - DNA, 75 bp, synthetic construct
  source 1..75: mol_type = other DNA
aactccagtgaagtgaatggctacggtgttgaccacgtaaaagtagcggaaggtttaggttgtaaagcgattcgc

SEQ ID NO: 632778 - DNA, 75 bp, synthetic construct
  source 1..75: mol_type = other DNA
atttattttcatgtcaattgtgattgctagaaattctttctccttaccagtgaagacaaatttactaatatcatt

SEQ ID NO: 632779 - DNA, 75 bp, synthetic construct
  source 1..75: mol_type = other DNA
attggctggcaacatttattgtattatcaataatttactcaatgattgctaaaaacataattccaaactcagatg

SEQ ID NO: 632780 - DNA, 75 bp, synthetic construct
  source 1..75: mol_type = other DNA
catccttgacagtctggaggcggcagaaaaatctaccctgacgccgatatcaaaacagcaagctcttataccgcg

SEQ ID NO: 632781 - DNA, 75 bp, synthetic construct
  source 1..75: mol_type = other DNA
ccttactttttacggcattaacggccccatttatcacacccgctaccgctactggcccatatccagactgactgg

SEQ ID NO: 632782 - DNA, 75 bp, synthetic construct
  source 1..75: mol_type = other DNA
gtcttcaaaccggaagatattgcgccagcctttgaacaggcgaaagccttaatggcgcaatatcgggtaccggta

SEQ ID NO: 632783 - DNA, 75 bp, synthetic construct
  source 1..75: mol_type = other DNA
gatatggatgctattgttggcggagctcataatggggccgccgatgcaatgagacattgttacttgatgtgtcga

SEQ ID NO: 632784 - DNA, 75 bp, synthetic construct
  source 1..75: mol_type = other DNA
actggttgtcatgggtggcgggtattatgacgctggctggtctctggtgtgtgctttcttctgtgctcgcagacc

SEQ ID NO: 632785 - DNA, 75 bp, synthetic construct
  source 1..75: mol_type = other DNA
atagagatcgagatgtagtagaaagagcatgtggtgaaatagataaatcagcggcttcatttttaccaagcttaa

SEQ ID NO: 632786 - DNA, 75 bp, synthetic construct
  source 1..75: mol_type = other DNA
atgacacaacgcccctggagcaagttacagcgggagatctatgacttactgacgccaacgatcaacctgcaaatt

SEQ ID NO: 632787 - DNA, 75 bp, synthetic construct
  source 1..75: mol_type = other DNA
tggcaatttgacagtcaaaggtaatatttctactttctcactttctaatccatgggttattctcggtaacgtgac

SEQ ID NO: 632788 - DNA, 75 bp, synthetic construct
  source 1..75: mol_type = other DNA
caattcctgaccaaaggcgcgaatgatgagcgcgataacgtagacgcggtgatgcgcaaggagctttcgctatga

SEQ ID NO: 632789 - DNA, 75 bp, synthetic construct
  source 1..75: mol_type = other DNA
agtctgcgcagcggccgccgactgtactggctttcctggattatcggggcggcagtactggctgcgctgtggtac

SEQ ID NO: 632790 - DNA, 75 bp, synthetic construct
  source 1..75: mol_type = other DNA
ggaaattctggtttccgattacctgcaatggcttctcggttactgggtacccagggtacggtggtcatcaaaggt

SEQ ID NO: 632791 - DNA, 75 bp, synthetic construct
  source 1..75: mol_type = other DNA
acatgaccggaatgccggtacggctgatcatcctcgatacgctggcccgctgttttggtaattcagatgaaaaca

SEQ ID NO: 632792 - DNA, 75 bp, synthetic construct
  source 1..75: mol_type = other DNA
agtaacaatattatagcatctttttcgaaagagtattatgtcctttatgaaactcaaaggagatattatgtttgg

SEQ ID NO: 632793 - DNA, 75 bp, synthetic construct
  source 1..75: mol_type = other DNA
atattcaggtgatcttgtgttagttgtgatcacaggggatcagatgatggcactagtccacgagctctataggag

SEQ ID NO: 632794 - DNA, 75 bp, synthetic construct
  source 1..75: mol_type = other DNA
ggtggctgaccaagaatgaagaggacctaagaaccgcagacggcaaaaatatcgaagtctgggttttccgtcatg

SEQ ID NO: 632795 - DNA, 75 bp, synthetic construct
  source 1..75: mol_type = other DNA
acaaaaaaacggcgaagcctccaccaaggacgtgttgtttgtttttgaatccaagacaaaattctccgcctctac

SEQ ID NO: 632796 - DNA, 75 bp, synthetic construct
  source 1..75: mol_type = other DNA
ttcaacactatatgcttaaacgagctgatttaataataacaacaagtgaaccatatcgcttaagttctgagtgcc

SEQ ID NO: 632797 - DNA, 75 bp, synthetic construct
  source 1..75: mol_type = other DNA
agcaaacaccgtctcggtcaatgtcgctgatgaaggaagcaacccaatcaatgatcataccgtcacgtttgcggt

SEQ ID NO: 632798 - DNA, 75 bp, synthetic construct
  source 1..75: mol_type = other DNA
tgaacagagcatggtggtcgttcaggcacctacgctaagccagaaagattcctcggtatcgttaagtacccaaac

SEQ ID NO: 632799 - DNA, 75 bp, synthetic construct
  source 1..75: mol_type = other DNA
aaagtggatgtttgatctgccaaaaggaacttcagggcaaggtcatgtttcctggcaaatcattaatgatcaagg

SEQ ID NO: 632800 - DNA, 75 bp, synthetic construct
  source 1..75: mol_type = other DNA
gcataatttgcggaatttttccgttgctgattttgccccaattgcctaggacattaacccttgcgtttctgactc

SEQ ID NO: 632801 - DNA, 75 bp, synthetic construct
  source 1..75: mol_type = other DNA
tcagaaaaatccgtgttagtaagaaatggtgttgatttagtccctgaattatcagagagtattgatgatagaaat

SEQ ID NO: 632802 - DNA, 75 bp, synthetic construct
  source 1..75: mol_type = other DNA
tgtttataacttctataaagaagccgataagaaactatttaatattattaatgacattaaaggatcatttaatat

SEQ ID NO: 632803 - DNA, 75 bp, synthetic construct
  source 1..75: mol_type = other DNA
atcatgtcggtgctggcggatggagtgctggtggtcggtattgtggtggtactttttcctttggtgaaaaaggac

SEQ ID NO: 632804 - DNA, 75 bp, synthetic construct
  source 1..75: mol_type = other DNA
gagcatgttgatttgcactctacatctcatctcattctgaattcagatgattttaaatctcaggatatagagggg

SEQ ID NO: 632805 - DNA, 75 bp, synthetic construct
  source 1..75: mol_type = other DNA
gggaaagtgtttgtccccgcgacgcacaccgaagacggacagaagctttccagcatcttctacgaggacggcacg

SEQ ID NO: 632806 - DNA, 75 bp, synthetic construct
  source 1..75: mol_type = other DNA
aaccgggagctgccagtgttgcaggccgcgcgagaagcaaaacccttttatctcggcgcattgggcagctatcga

SEQ ID NO: 632807 - DNA, 75 bp, synthetic construct
  source 1..75: mol_type = other DNA
atgcgcatactctggcactctccgtgctggcagaagtcgcctctgtacgtctccatcaggaggaggattcatgcc

SEQ ID NO: 632808 - DNA, 75 bp, synthetic construct
  source 1..75: mol_type = other DNA
ctggttcttccgcgataacagccaggttgtcgagttgttggcggtgccacttaagctgcggttcaactattacga

SEQ ID NO: 632809 - DNA, 75 bp, synthetic construct
  source 1..75: mol_type = other DNA
aaaaactgtatctgtcccccgttctggatctgtataacggagaaatagttgcgtatcagatggcgtcccgtcctc

SEQ ID NO: 632810 - DNA, 75 bp, synthetic construct
  source 1..75: mol_type = other DNA
cgcagacagtgcaggagcctacagacaaaaaagggcagacgctgaatcgctatggctctgcatccagactttcca

SEQ ID NO: 632811 - DNA, 75 bp, synthetic construct
  source 1..75: mol_type = other DNA
gaccggaagtggtggtggtgatgatcgatgtgacgatgaggatgagcctgaaaaatatactctccagttccattt

SEQ ID NO: 632812 - DNA, 75 bp, synthetic construct
  source 1..75: mol_type = other DNA
gaaaaccatccgcataatgcgttgggttatcgctctccgcgagaatatcgacgtcagcgggtaacgttaacttaa

SEQ ID NO: 632813 - DNA, 75 bp, synthetic construct
  source 1..75: mol_type = other DNA
atttccctatcaaaaccgagcaaacaggaggtcctatggccgacctgtccaacgggtacacccggatcgccaacg

SEQ ID NO: 632814 - DNA, 75 bp, synthetic construct
  source 1..75: mol_type = other DNA
taagtgggacacgctctcacttcagcgcgacgctgccgcccgtcgcaccacaaccggcggcgtcccgggcatcga

SEQ ID NO: 632815 - DNA, 75 bp, synthetic construct
  source 1..75: mol_type = other DNA
aattatatagatgagacttttgagctatctcaaaatgaacacatagttgatttgttgactcgtttagatgataga

SEQ ID NO: 632816 - DNA, 75 bp, synthetic construct
  source 1..75: mol_type = other DNA
aggatggatggatctggcagggtaacagtattgttattacctacactcgggatgaagggatgaccagagtcatcc

SEQ ID NO: 632817 - DNA, 75 bp, synthetic construct
  source 1..75: mol_type = other DNA
aattgttgatgaagttcatgcttacgacacctatatgaacggcttgctggaggcagtgctcaaggctcaggctga

SEQ ID NO: 632818 - DNA, 75 bp, synthetic construct
  source 1..75: mol_type = other DNA
gcctatgcttggaaacttattgatcaacaaattgcggatagtgttatttttgccctcccaacacaagctaccgcg

SEQ ID NO: 632819 - DNA, 75 bp, synthetic construct
  source 1..75: mol_type = other DNA
gttatgccatgacggttcattattaccgtctgcgggattacgccctgcagcatccggaatgcagcgccattatgc

SEQ ID NO: 632820 - DNA, 75 bp, synthetic construct
  source 1..75: mol_type = other DNA
atgagtgttcgtgatctcgtttcgtatctgcttggatggaatgctcttgttgtaaagtggatcgcttctgatgct

SEQ ID NO: 632821 - DNA, 75 bp, synthetic construct
  source 1..75: mol_type = other DNA
ctaccgtgggttgtcgcgttagaggaagaaaaggttatcgggtattgttatctcactcgttaccgtgaacgctac

SEQ ID NO: 632822 - DNA, 75 bp, synthetic construct
  source 1..75: mol_type = other DNA
ggctgaacgtggaattattttcagtcacaagcagggcgtgatgaaaattgtcggtataaatactgacctgaatgc

SEQ ID NO: 632823 - DNA, 75 bp, synthetic construct
  source 1..75: mol_type = other DNA
ttgatttcaaaaacgctacccgtctttcttctagagaactagaagttctttgtgatcgagctgaagagattgcga

SEQ ID NO: 632824 - DNA, 75 bp, synthetic construct
  source 1..75: mol_type = other DNA
caagaagcactctacctgaaaatgaactagaggccttacgttatatcgtgcgacataatcaaaatgatgtcgtaa

SEQ ID NO: 632825 - DNA, 75 bp, synthetic construct
  source 1..75: mol_type = other DNA
cttcttatcgggaaaatcgaatcgcacttgatgcggcgtcgttaaaacgtaacgtggatcttgaaaatgcagtag

SEQ ID NO: 632826 - DNA, 75 bp, synthetic construct
  source 1..75: mol_type = other DNA
gaagacgcagatgaccattcgttcgaaaacctataagggcagcgggtttaatgaactgaagtttgacgatgcgac

SEQ ID NO: 632827 - DNA, 75 bp, synthetic construct
  source 1..75: mol_type = other DNA
tacgtttgaatggtaaatcagaggatgggcaacaattatataacgttaagttatgcctgcccatcccatataata

SEQ ID NO: 632828 - DNA, 75 bp, synthetic construct
  source 1..75: mol_type = other DNA
gatgacaatgcattcatcgttagagcccaaactgctgatccgcaggttttagctgaaatgaacatggaactgttg

SEQ ID NO: 632829 - DNA, 75 bp, synthetic construct
  source 1..75: mol_type = other DNA
ctgccagatgatgttaactccagcaacgaacttgttcatgcgatcaaggatgcgactcaccgctattacggcagt

SEQ ID NO: 632830 - DNA, 75 bp, synthetic construct
  source 1..75: mol_type = other DNA
gacgttctcttgaggcgcaggcaaccgcgagtcttgcagcagccacaggctatgacagccatatcttcgatcttt

SEQ ID NO: 632831 - DNA, 75 bp, synthetic construct
  source 1..75: mol_type = other DNA
ggctgcgtggaggccgctgccgcttttgaagcgctggagatgatgggctcaggccgcgatcgcgaaattcgctat

SEQ ID NO: 632832 - DNA, 75 bp, synthetic construct
  source 1..75: mol_type = other DNA
caaagcagggtatgccgctgagatttggtgcaatggcaacactggatggcgcacaaacaattagcggtatcattg

SEQ ID NO: 632833 - DNA, 75 bp, synthetic construct
  source 1..75: mol_type = other DNA
ccatccgggaaaacacggacggcacctttgccatcacggcagtgcagcacgtaccggaaaaagagccattgtgga

SEQ ID NO: 632834 - DNA, 75 bp, synthetic construct
  source 1..75: mol_type = other DNA
gtactattcagattatttataaacgtaagcaggttggtcgtcgctattgttttatttgcaaaaaacttgataagc

SEQ ID NO: 632835 - DNA, 75 bp, synthetic construct
  source 1..75: mol_type = other DNA
ttgataaaaatcattaggggattcatcagggcctggctgttatttttcattgctcttcatgatattggaaagttt

SEQ ID NO: 632836 - DNA, 75 bp, synthetic construct
  source 1..75: mol_type = other DNA
tgattttcgatttctacaccctgattttaattatatctaccaaaattatggggatgattttgttacccatacagc

SEQ ID NO: 632837 - DNA, 75 bp, synthetic construct
  source 1..75: mol_type = other DNA
tcagcaggtaagaactcaatatcagcatgaattcaacaatactacgcattcagaaaataaagcatcttttgattc

SEQ ID NO: 632838 - DNA, 75 bp, synthetic construct
  source 1..75: mol_type = other DNA
acagtcgcgtttcgcagtgagcttggctggcagcgactgtacggagaccgggaaagaggagttaaattgcggttt

SEQ ID NO: 632839 - DNA, 75 bp, synthetic construct
  source 1..75: mol_type = other DNA
ggaatcaactaaatcaggtagtgcatactcatcatttaaggttgtttatcaggggtgtcgtatgcataatatgtt

SEQ ID NO: 632840 - DNA, 75 bp, synthetic construct
  source 1..75: mol_type = other DNA
aacatttcgtaatgccgcgacgccgttacaaacattaaaaaactcaaagatgcaggctaccaaacagaagtcatg

SEQ ID NO: 632841 - DNA, 75 bp, synthetic construct
  source 1..75: mol_type = other DNA
gataattgctcagtttcgtcacgtcaggattcaggcgatgatctcacacgattagtcagctatcgcgattatctt

SEQ ID NO: 632842 - DNA, 75 bp, synthetic construct
  source 1..75: mol_type = other DNA
cacgccaggctggggcaatatttatttaacattcagtcgacaggaatactggcagaccgatgaggtcgaacgttt

SEQ ID NO: 632843 - DNA, 75 bp, synthetic construct
  source 1..75: mol_type = other DNA
tgcggtggtgaaagccgaatttgtcacccatgtcggttatcgcgtgctatttaacgtccgccaggtcaacggtaa

SEQ ID NO: 632844 - DNA, 75 bp, synthetic construct
  source 1..75: mol_type = other DNA
tcccccctcgtcaccagacataataaagaaaaaaaacaaacgacattctacccttcgcaaaaatcccctttttaa

SEQ ID NO: 632845 - DNA, 75 bp, synthetic construct
  source 1..75: mol_type = other DNA
gataccgtcatgaccgacatcctgactgcaagaatcaacaccgacagaagcgcattcatcgttgccgtgcgccct

SEQ ID NO: 632846 - DNA, 75 bp, synthetic construct
  source 1..75: mol_type = other DNA
ctttgtgtatataatataaaacttactttctcgcttctcacaaaagaactgtcaactttaattaaagaaagattt

SEQ ID NO: 632847 - DNA, 75 bp, synthetic construct
  source 1..75: mol_type = other DNA
gttgatggagattggttcgatattgtaaagaaagacattgcctcagatgagcaaaaggaaaggataagtatacct

SEQ ID NO: 632848 - DNA, 75 bp, synthetic construct
  source 1..75: mol_type = other DNA
tggttagcaagtaataacgttagtggtgtggttgccgcgacatatctcgatgataatggtgcacagataaagcaa

SEQ ID NO: 632849 - DNA, 75 bp, synthetic construct
  source 1..75: mol_type = other DNA
gcagcactgaaccggggagagctgacagaggagcctgattacagggaagagaccggcacctccatggcagccccc

SEQ ID NO: 632850 - DNA, 75 bp, synthetic construct
  source 1..75: mol_type = other DNA
tccggacctgaatgtgccctggatatctggcgtaatgatatcggtggtcatggtggattgactaaagaaggcgca

SEQ ID NO: 632851 - DNA, 75 bp, synthetic construct
  source 1..75: mol_type = other DNA
tcctgcaaggattaggaataggggcagaagttccggttgccagcgcttatatcaatgaatttatcggagcaaaaa

SEQ ID NO: 632852 - DNA, 75 bp, synthetic construct
  source 1..75: mol_type = other DNA
acaatcgctcgacgttgattttgattggttaattacccagcattgtcccgcagatttgcttttccaacgattggg

SEQ ID NO: 632853 - DNA, 75 bp, synthetic construct
  source 1..75: mol_type = other DNA
ctgttattgcgggaatcacctattccggccatgtacatcatgataacggtgaaggcagtaagacaggagcgccgg

SEQ ID NO: 632854 - DNA, 75 bp, synthetic construct
  source 1..75: mol_type = other DNA
actgtcgtacgccccgggcaaagcaaccgttggcgtatcactgcaaggtaaaaactgggcgcagataacgatgaa

SEQ ID NO: 632855 - DNA, 75 bp, synthetic construct
  source 1..75: mol_type = other DNA
taagtcaggtagtgactattcatcctttaaagttacttatgacggttgtcgcttatatgatatattgttaactca

SEQ ID NO: 632856 - DNA, 75 bp, synthetic construct
  source 1..75: mol_type = other DNA
tagaagtttcacgcagggagtccactaagtcaggtagtgactattcatcctttaaagttacttatgacggttgtc

SEQ ID NO: 632857 - DNA, 75 bp, synthetic construct
  source 1..75: mol_type = other DNA
aaaagaggagagaaatcagttaaaatagaagtttcacgcagggagtccactaagtcaggtagtgactattcatcc

SEQ ID NO: 632858 - DNA, 75 bp, synthetic construct
  source 1..75: mol_type = other DNA
gttattatgatggctatacaaaaggcattattgatgagatggataattttatacccttgataagcttgctatgct

SEQ ID NO: 632859 - DNA, 75 bp, synthetic construct
  source 1..75: mol_type = other DNA
tgtcgtttactccgcaagaaagtgtctcaattgaactaaatattccatcttctgatcgcacaaaggtggataaag

SEQ ID NO: 632860 - DNA, 75 bp, synthetic construct
  source 1..75: mol_type = other DNA
aaacgtaccatctgatgatggttctaaaactgaaaaagtaggaccaataacgtatgacttacaccaaggaaaaat

SEQ ID NO: 632861 - DNA, 75 bp, synthetic construct
  source 1..75: mol_type = other DNA
tggtgcgaatctttctgattcatgctcgaacgccatattttcgtgctctctgttcgttttttgcgatggtgtatt

SEQ ID NO: 632862 - DNA, 75 bp, synthetic construct
  source 1..75: mol_type = other DNA
ggtattcctggagttgtattaacaattttagcattttcagcaatactcatatatgccttaagaactgctaaagaa

SEQ ID NO: 632863 - DNA, 75 bp, synthetic construct
  source 1..75: mol_type = other DNA
tatcgggctatttatttacgtcaggaaccctgaaaaatcagcccggcgaaacagttcgtcgggctgaagattatt

SEQ ID NO: 632864 - DNA, 75 bp, synthetic construct
  source 1..75: mol_type = other DNA
ttcacacactatcggagaacatcataacttcggtaatgactccaacttattgatagtgttttatgttcagataat

SEQ ID NO: 632865 - DNA, 75 bp, synthetic construct
  source 1..75: mol_type = other DNA
cagaaggtgttcgctatcggcaaccccttcggcctggactggacgctcaccactggtatcgtctccgcgctcgac

SEQ ID NO: 632866 - DNA, 75 bp, synthetic construct
  source 1..75: mol_type = other DNA
atggtctatctcgacccgtaccaacgccccgcgccggaccgcttcgtccggcgctggctcttcatcaccgcctgt

SEQ ID NO: 632867 - DNA, 75 bp, synthetic construct
  source 1..75: mol_type = other DNA
ataatttgagtgattatgtagagtttatgggatttaggcatgatcttgatcaaataaggcttgacaacgatgttt

SEQ ID NO: 632868 - DNA, 75 bp, synthetic construct
  source 1..75: mol_type = other DNA
taatggatgcagtagcggcgatgcgctacgtgaattctgaggtttttcaggaaggactgaacgcgagaattggcg

SEQ ID NO: 632869 - DNA, 75 bp, synthetic construct
  source 1..75: mol_type = other DNA
atgagtgacatttttcacagccttcaaacaattctatttcatcgttatcccttgtcctataaggtaatccactta

SEQ ID NO: 632870 - DNA, 75 bp, synthetic construct
  source 1..75: mol_type = other DNA
gctgggaaccgggtgtccagaccgtcgcggtgaaatgcgacctgtgtgatttcttgccagaaggtccggcctgcg

SEQ ID NO: 632871 - DNA, 75 bp, synthetic construct
  source 1..75: mol_type = other DNA
tggcggggaggatcccataagcgctaacttaagggttgaaccatctgaagaatgcgacgcctcggtgcctcgtta

SEQ ID NO: 632872 - DNA, 75 bp, synthetic construct
  source 1..75: mol_type = other DNA
agcggttccagtactggcagcaaatggtgttattttggcaccaatcccactcgaacatattgtagagatcatcac

SEQ ID NO: 632873 - DNA, 75 bp, synthetic construct
  source 1..75: mol_type = other DNA
attttccgcgcttgggaaagttaaagttgcaaattacactgttattttcggtgctttaacgcatgtagttattct

SEQ ID NO: 632874 - DNA, 75 bp, synthetic construct
  source 1..75: mol_type = other DNA
attgcgccttgctttcaccttcatctaaattttttctaagtctgcaacaacatcatgcgggaatctggcatttaa

SEQ ID NO: 632875 - DNA, 75 bp, synthetic construct
  source 1..75: mol_type = other DNA
gttacacctgataaactgaccggcaccattcaaaacgatattctcaaagagtacctctgccgcaacacctatatt

SEQ ID NO: 632876 - DNA, 75 bp, synthetic construct
  source 1..75: mol_type = other DNA
taattcaccgggtggcgatgtctttgaaggcatcgccatttttaatgcactgaaaacacatggtgcgtccattac

SEQ ID NO: 632877 - DNA, 75 bp, synthetic construct
  source 1..75: mol_type = other DNA
cacaaaacaacatcgcccaatggggcaagttattctggtgtctgaagcaggtgagtcaccttattacaacaaacg

SEQ ID NO: 632878 - DNA, 75 bp, synthetic construct
  source 1..75: mol_type = other DNA
ccctttatccagacgttgaccccccttcagcaacgcgcagccactctggatatttccacgtccgggccacaactg

SEQ ID NO: 632879 - DNA, 75 bp, synthetic construct
  source 1..75: mol_type = other DNA
gtggatagcgcacgcgcccttattgcccggggatggggactaagcttagtcagccgctgtctccgggggtcgcgt

SEQ ID NO: 632880 - DNA, 75 bp, synthetic construct
  source 1..75: mol_type = other DNA
gatcaaaccgtataattctggatgcccctgccggggacatttacaccagtgagatggtccctatctatagtaata

SEQ ID NO: 632881 - DNA, 75 bp, synthetic construct
  source 1..75: mol_type = other DNA
acaacaaataacgcattcccctataaaaatggtaacacggtagttgagtcaatcgatgcacttgtaggctttgta

SEQ ID NO: 632882 - DNA, 75 bp, synthetic construct
  source 1..75: mol_type = other DNA
cttgcttatgcattatctcaagtcattggcgcattattatctcaatattacatgcgtaaagaaggttataaatat

SEQ ID NO: 632883 - DNA, 75 bp, synthetic construct
  source 1..75: mol_type = other DNA
gattaaccagaagaaatcagcaatatcgtctgcacagaagtcatctgatacagagggtaattcacctgataaagc

SEQ ID NO: 632884 - DNA, 75 bp, synthetic construct
  source 1..75: mol_type = other DNA
gcggcgcgctcccaccagaaaacctgatcctcatagcccagtctctcatcatgcatggcattatcggccgggcca

SEQ ID NO: 632885 - DNA, 75 bp, synthetic construct
  source 1..75: mol_type = other DNA
gctattaacgtcattcagtcatgctgtgacgaggacgtttctgaattgacaggctggcatgagccttcacgtact

SEQ ID NO: 632886 - DNA, 75 bp, synthetic construct
  source 1..75: mol_type = other DNA
ttttttatagaaactataattgcggatatcaatagaaatgttcgttcggtttatagtggcggtaacctggtgtgg

SEQ ID NO: 632887 - DNA, 75 bp, synthetic construct
  source 1..75: mol_type = other DNA
cccagatcgtcgaccgtaaacttgctcgcacggccatcggtcgcattaaatcaagccttaaaaaatttagctgtg

SEQ ID NO: 632888 - DNA, 75 bp, synthetic construct
  source 1..75: mol_type = other DNA
ccactggcaagcacccggttgtgtacattgctaccacggtttttatggtcgcactgccttatttgaagttctgcc

SEQ ID NO: 632889 - DNA, 75 bp, synthetic construct
  source 1..75: mol_type = other DNA
atgaagaaattaatttcattgctaattgcatccactctttcattttcagtatgcgctcaagaagaagacaattat

SEQ ID NO: 632890 - DNA, 75 bp, synthetic construct
  source 1..75: mol_type = other DNA
tggcaaaaaccacgcagcatacagtaaatggaaccagacaaccattgacaatctgaagaacaagttttcttacaa

SEQ ID NO: 632891 - DNA, 75 bp, synthetic construct
  source 1..75: mol_type = other DNA
ccggattcacctttcgtcaggacataaaaagcggtgactccatcggtgaaagtaaatttaccgggggcattatgg

SEQ ID NO: 632892 - DNA, 75 bp, synthetic construct
  source 1..75: mol_type = other DNA
tgataacaaagaagataaatgggttctacttggaacaacccatggaataatagggaacggaaaaacgcaaaaaac

SEQ ID NO: 632893 - DNA, 75 bp, synthetic construct
  source 1..75: mol_type = other DNA
aggcagatgtgggacgcagcgataaaacgtgccggactccgccatcgaaaatcatatcagtcgagacatacttat

SEQ ID NO: 632894 - DNA, 75 bp, synthetic construct
  source 1..75: mol_type = other DNA
gtgggcggattttctggatgccaatcgggagagagcgattacgccgtttgactatgcgaagatcaatcggggtaa

SEQ ID NO: 632895 - DNA, 75 bp, synthetic construct
  source 1..75: mol_type = other DNA
ttattcgacatacggataaaccatattcagaactgaaagaaggtgatataggatatgatgaggagcttctcgata

SEQ ID NO: 632896 - DNA, 75 bp, synthetic construct
  source 1..75: mol_type = other DNA
atttatttgtaatccagttttggaaaaacgccagttttcaaacgaaagtcagttaaaaaatctgcctggatataa

SEQ ID NO: 632897 - DNA, 75 bp, synthetic construct
  source 1..75: mol_type = other DNA
ttcgttctgtgaagtaaccgctttaggattacccgttgatatgacggcgaagcttcagcagttggctgataaaaa

SEQ ID NO: 632898 - DNA, 75 bp, synthetic construct
  source 1..75: mol_type = other DNA
gtatacccgtattcaggaaactggcctctactttaaccacgcgattgttaacccaccgatcgtcatttgccgacc

SEQ ID NO: 632899 - DNA, 75 bp, synthetic construct
  source 1..75: mol_type = other DNA
atgcagaaaatgcactgtctggcggtgaatacaacggtattttctttgcgaaaaatggcggaactcttgacctga

SEQ ID NO: 632900 - DNA, 75 bp, synthetic construct
  source 1..75: mol_type = other DNA
gaagatcgcaatgccgacagtctttcaccagattcgaaggccgcgagaataactcaagttgaatcaaatatttta

SEQ ID NO: 632901 - DNA, 75 bp, synthetic construct
  source 1..75: mol_type = other DNA
tctcagatcctcatggttagtccttattatggcgtgattgttttttattcatcttccgcaaacgaatataatatt

SEQ ID NO: 632902 - DNA, 75 bp, synthetic construct
  source 1..75: mol_type = other DNA
tgatgattatacgggcatggtatagcgcattggatctggagttggatgattacgcaggactagtccattttccta

SEQ ID NO: 632903 - DNA, 75 bp, synthetic construct
  source 1..75: mol_type = other DNA
caaagaattaatgaacttatcgagtgtggtgcgatgtttttagatggggataggcgatattacgccgattacccc

SEQ ID NO: 632904 - DNA, 75 bp, synthetic construct
  source 1..75: mol_type = other DNA
caggatgttacaaccgagaaaatggggccttcattatggcatatgcatccgattaaattccttggtacgttatcg

SEQ ID NO: 632905 - DNA, 75 bp, synthetic construct
  source 1..75: mol_type = other DNA
caggcacctaaggatggcgggtatgaggcgcgttatcaggtgcatattgaatgcataagtatggatgacaatctg

SEQ ID NO: 632906 - DNA, 75 bp, synthetic construct
  source 1..75: mol_type = other DNA
ggatccttgatgacggcggcagggaagagtttcgccagtttgcgcaaaacgtggggggtgaaatatatcgcccgc

SEQ ID NO: 632907 - DNA, 75 bp, synthetic construct
  source 1..75: mol_type = other DNA
gccaaaggcgagttcgtgtcgattttcgactgcgaccacgtaccaacgcgatcgttcttgcaaatggtaatgact

SEQ ID NO: 632908 - DNA, 75 bp, synthetic construct
  source 1..75: mol_type = other DNA
ggtcgtatgctcatgaatgttggtctcaacgccgaaattcgcgataatcttcgcttcggtcttgagtttgagaaa

SEQ ID NO: 632909 - DNA, 75 bp, synthetic construct
  source 1..75: mol_type = other DNA
agatgcttattaccatttaggtgattatgaggctgaaagcaatttaaggatgatgattgtaagagcatggtatag

SEQ ID NO: 632910 - DNA, 75 bp, synthetic construct
  source 1..75: mol_type = other DNA
cggtggtcacgattatgcttggtggcgcggagcaattattgatgaattagcaaattataattgcaggaaggtatc

SEQ ID NO: 632911 - DNA, 75 bp, synthetic construct
  source 1..75: mol_type = other DNA
gggcagaagtacctgaaaggcctgaacccttcatggcctatgactcctatcaacgggaactgcaagattatcggt

SEQ ID NO: 632912 - DNA, 75 bp, synthetic construct
  source 1..75: mol_type = other DNA
ggtagtggtgttcactggggaggtggctccggcaatggcaatagcggggggaatggtaattccggtggtggcagc

SEQ ID NO: 632913 - DNA, 75 bp, synthetic construct
  source 1..75: mol_type = other DNA
agcttcgacgatttccggaagaaattctgggaagaagtgtcaaaagatcccgagcttagcaagcaatttaaagac

SEQ ID NO: 632914 - DNA, 75 bp, synthetic construct
  source 1..75: mol_type = other DNA
ccgcagcaggtcatcgcattgtgcatcatctgcgcgccattaatcgggaagtgaacgcagtaaaagagatagccg

SEQ ID NO: 632915 - DNA, 75 bp, synthetic construct
  source 1..75: mol_type = other DNA
cacgtattgatgctaaacgtggccaaacaatcaaactgatgtacaccgccagtagtgctctgccaaaagacagag

SEQ ID NO: 632916 - DNA, 75 bp, synthetic construct
  source 1..75: mol_type = other DNA
cagcattgtgcttagcgagctgtatggcttttagctcatcagctattgcagacatcgtaatttcaggtactcgcg

SEQ ID NO: 632917 - DNA, 75 bp, synthetic construct
  source 1..75: mol_type = other DNA
tgctgatgcaaaggctgaaataaaacaattcgagcgatttgcccgagaaccaatggctgctggtcacagaatgtg

SEQ ID NO: 632918 - DNA, 75 bp, synthetic construct
  source 1..75: mol_type = other DNA
tttttaaaagcctttccgacgaaacccgactcagcctcgtgctgctgctacgcgaaaaaggggagctctgcgtct

SEQ ID NO: 632919 - DNA, 75 bp, synthetic construct
  source 1..75: mol_type = other DNA
tgggcagattaacccgaaatatggacaagagcctggatgccagttttatacacatatatcagatcaatacagtcc

SEQ ID NO: 632920 - DNA, 75 bp, synthetic construct
  source 1..75: mol_type = other DNA
tatgggcaagatgcgaatactgtgcttttgaatgtgatggatacggatattcgcaatgcaacagtgggtgagagc

SEQ ID NO: 632921 - DNA, 75 bp, synthetic construct
  source 1..75: mol_type = other DNA
atgctggatgtgtcgcaaagcgatagcgaagcagaattacgtggcaaccggaaaattgccgccccttatcgcggc

SEQ ID NO: 632922 - DNA, 75 bp, synthetic construct
  source 1..75: mol_type = other DNA
aaagatgcttatgttaatggacaaaaatatcgcactacaaatcgtaatggggtggtggtatacgacggaatgacg

SEQ ID NO: 632923 - DNA, 75 bp, synthetic construct
  source 1..75: mol_type = other DNA
aggcgcttggaaagcgcagggagaaggtcgaagttctctcagactcaaacggcctcaatgtaaggttaagcataa

SEQ ID NO: 632924 - DNA, 75 bp, synthetic construct
  source 1..75: mol_type = other DNA
ccgttgcgtcgaaaaggcgctggagatgtgttccccgcgccagcggggataaaccgtacgcttacacaacgggcg

SEQ ID NO: 632925 - DNA, 75 bp, synthetic construct
  source 1..75: mol_type = other DNA
acaggaaaaggttcaggcgattgtccgcaacctggctcgacaaaactgttccggggacagtaagaacatttgcag

SEQ ID NO: 632926 - DNA, 75 bp, synthetic construct
  source 1..75: mol_type = other DNA
gcaaaacatgagataacggcgcacaaaagcgcgtatttggtgaatgccaaaatcagcgaactggtgcagatcttc

SEQ ID NO: 632927 - DNA, 75 bp, synthetic construct
  source 1..75: mol_type = other DNA
cctttcgttataaagttcctatgatttatcgtccggcttctctaggaaatattgcacagaaaccagaaaaattac

SEQ ID NO: 632928 - DNA, 75 bp, synthetic construct
  source 1..75: mol_type = other DNA
agacgtggagatcatctttaccttcaaaggcaccaaatcgggtaactgggatgtgaagacgctggataacaggtg

SEQ ID NO: 632929 - DNA, 75 bp, synthetic construct
  source 1..75: mol_type = other DNA
gcgatctctgcactgccctcgatcagtcgcagcccaagatctcccgccatctggcattactgcgtgaaagtgggc

SEQ ID NO: 632930 - DNA, 75 bp, synthetic construct
  source 1..75: mol_type = other DNA
gaaaaggttcaggcgattgtccgcaacctagctcgacaaaactgttccggggacagtaagaacatttgcagttaa

SEQ ID NO: 632931 - DNA, 75 bp, synthetic construct
  source 1..75: mol_type = other DNA
gaagacggcgatcacaacaagccggacgccaaactcaccgccgagatcgtggcacgcgcccgcgataaaggcctg

SEQ ID NO: 632932 - DNA, 75 bp, synthetic construct
  source 1..75: mol_type = other DNA
acgcctgaagggaaagctgtgcacgttatcagcaagcgttacactcagcgcattgagcgacataatctgaatctg

SEQ ID NO: 632933 - DNA, 75 bp, synthetic construct
  source 1..75: mol_type = other DNA
ccatctgtacgcgtgaatgaatggttcagtgcttatgcgatggcaggtgtggcttacagccgtgtgtcgacgttc

SEQ ID NO: 632934 - DNA, 75 bp, synthetic construct
  source 1..75: mol_type = other DNA
taatccgccaactggaagaacagcgcgctgtgattgtgcagaaaagtgctcaagttaactggttgcaaactgaaa

SEQ ID NO: 632935 - DNA, 75 bp, synthetic construct
  source 1..75: mol_type = other DNA
attccgttcgtcattgcttgtggcgactgttttttctgtcgattgcaacaatatgccgcctgcgaaaataccaat

SEQ ID NO: 632936 - DNA, 75 bp, synthetic construct
  source 1..75: mol_type = other DNA
ttctctcctgcggcccgtattacaacgtgctgcgcatccttgtaccgctcaccattgaagacgctcagatccgtc

SEQ ID NO: 632937 - DNA, 75 bp, synthetic construct
  source 1..75: mol_type = other DNA
gcaaccagcctgagttggttcgttgcccgagttcgtactgaaaaaggtaacggtagccctattcctgaagacgct

SEQ ID NO: 632938 - DNA, 75 bp, synthetic construct
  source 1..75: mol_type = other DNA
gcgtcagtggatacatattccaatgttatggaagttaatttaattatttacaataatgatgtaataatgatggct

SEQ ID NO: 632939 - DNA, 75 bp, synthetic construct
  source 1..75: mol_type = other DNA
ccggaagaactggctaatgtctaccaggaaaacattaatgagcaaaaagccattctgctgaaatccacaatggtt

SEQ ID NO: 632940 - DNA, 75 bp, synthetic construct
  source 1..75: mol_type = other DNA
gaatgggcacaatacaaaacctgaggatttgcgggtagagcttcaggatggtgttgcatttgatttgtggactgt

SEQ ID NO: 632941 - DNA, 75 bp, synthetic construct
  source 1..75: mol_type = other DNA
gtgagcgaaattaattaccaggcactgcgtgaggcggcagaaaaagcactacatggtgaatggggttacgaggca

SEQ ID NO: 632942 - DNA, 75 bp, synthetic construct
  source 1..75: mol_type = other DNA
tgcgtggggcggcagaagcaataaaaatagcagccacaccacaaaaattgctggcatttcgtatgaaggtcacac

SEQ ID NO: 632943 - DNA, 75 bp, synthetic construct
  source 1..75: mol_type = other DNA
gctgacagcaattgagatgtacaaaccaactgtgcgcatcgtggaagttaatgtgccacgcgtcgctggcattcg

SEQ ID NO: 632944 - DNA, 75 bp, synthetic construct
  source 1..75: mol_type = other DNA
ccgccagtctgtaagtgtgaatattacagtgagtattctgttacttgatggcgacaacatgacgatttcggttga

SEQ ID NO: 632945 - DNA, 75 bp, synthetic construct
  source 1..75: mol_type = other DNA
acatcaaggatatcaaaaatttattttcaaacacaagaaagaactttctactaaccagcttaagtcattatacct

SEQ ID NO: 632946 - DNA, 75 bp, synthetic construct
  source 1..75: mol_type = other DNA
gtgacagataaacaacgcaccggccttttaacaataccaccgggagccgttatatatgaccgcctggtgtatgaa

SEQ ID NO: 632947 - DNA, 75 bp, synthetic construct
  source 1..75: mol_type = other DNA
ccttacgtctatatttgcctcaatggcttcagtgtccgacccgaggatttgcaggtcgaccttagggacggagtt

SEQ ID NO: 632948 - DNA, 75 bp, synthetic construct
  source 1..75: mol_type = other DNA
atgtataccctggcggttattatgattgcttgtttatttgttcataagaggattgatacagtggtcacttatgcg

SEQ ID NO: 632949 - DNA, 75 bp, synthetic construct
  source 1..75: mol_type = other DNA
gcgatgattttctcgatgcaggtttacgatcgggtggttccggcgcaatcgtacccgacgctgtgggtgctgttc

SEQ ID NO: 632950 - DNA, 75 bp, synthetic construct
  source 1..75: mol_type = other DNA
tgttgactgcctataatagtattaacctgccaggcttatatttggctataaattatggtaatgcggatatcgttg

SEQ ID NO: 632951 - DNA, 75 bp, synthetic construct
  source 1..75: mol_type = other DNA
tatggagctaatgcttctggtaaatccaacatcatcaaagcaatgaaacatgctcaaaatatgattttgaaagga

SEQ ID NO: 632952 - DNA, 75 bp, synthetic construct
  source 1..75: mol_type = other DNA
tgtggcgcagggctgcgccaaccctgcgtacccgtaacctgcataaagcagcaattcacaaagcactggacgaat

SEQ ID NO: 632953 - DNA, 75 bp, synthetic construct
  source 1..75: mol_type = other DNA
cttattttgttaatgaaagttcctttaacatggatgttaacagatatataaacatttccaatgaggatatttctg

SEQ ID NO: 632954 - DNA, 75 bp, synthetic construct
  source 1..75: mol_type = other DNA
ccaccaaccgcatcagtcgcttgatcgaagaggcgcgcgatccagaagtggcggtgatcgtgatggattttgtgc

SEQ ID NO: 632955 - DNA, 75 bp, synthetic construct
  source 1..75: mol_type = other DNA
taattgggatgccatcgcaactcttcactatggctcgctcttttaaagccgtagctaatggcaaaatttatatcg

SEQ ID NO: 632956 - DNA, 75 bp, synthetic construct
  source 1..75: mol_type = other DNA
ggatgggtgttacttcgagagttatttcccttaatttctgccgagctcgctgggatggctttaatgccagaaacg

SEQ ID NO: 632957 - DNA, 75 bp, synthetic construct
  source 1..75: mol_type = other DNA
tccggtcgttctgaccagcaataaagtcggtacatatacggtgactgcatcgttccataacggcgtaacaataca

SEQ ID NO: 632958 - DNA, 75 bp, synthetic construct
  source 1..75: mol_type = other DNA
atatgtattggtcatctagtcccgcaaactcaagcgaacaatacgtagtttccctggcaacaggtgatcaaagcg

SEQ ID NO: 632959 - DNA, 75 bp, synthetic construct
  source 1..75: mol_type = other DNA
tagcaatggctacacacttccccgtgcagatcatttaaaccatagtcgttcccgaggcatcgggtcactgtacag

SEQ ID NO: 632960 - DNA, 75 bp, synthetic construct
  source 1..75: mol_type = other DNA
aaaaaaagaattatcacagatgatgtttcagaatgaacgtgaattcatttataatgtctctggtttcgataactt

SEQ ID NO: 632961 - DNA, 75 bp, synthetic construct
  source 1..75: mol_type = other DNA
aaaaaaaaccggcgttctcgatcaagttctggatgccctgaaaggcatggacgtgctggaatttggcggtattga

SEQ ID NO: 632962 - DNA, 75 bp, synthetic construct
  source 1..75: mol_type = other DNA
caacccgcattctgtttggtaaaggcgcaatcgctggtttacgcgaacaaattcctcacgatgctcgcgtattga

SEQ ID NO: 632963 - DNA, 75 bp, synthetic construct
  source 1..75: mol_type = other DNA
gaattttaacgacattctgaccggcagcagcggcgataaccaactggaagggcgcggcggcaacgacacgctcaa

SEQ ID NO: 632964 - DNA, 75 bp, synthetic construct
  source 1..75: mol_type = other DNA
gcacacctataacctgaacaactattacacgctgtcttcgctcatcaaccaggggaatgggacgtttgtctgggg

SEQ ID NO: 632965 - DNA, 75 bp, synthetic construct
  source 1..75: mol_type = other DNA
aacctggcgtctatgctatttgttgggtgaggctggaagtggaaaaacctggctggcgcagcaactgcaaaaaag

SEQ ID NO: 632966 - DNA, 75 bp, synthetic construct
  source 1..75: mol_type = other DNA
tattatgcatttcgcttgttgttgattaaaaaattctttccagtttatcatttcttgtatcaagtaaaaaacaga

SEQ ID NO: 632967 - DNA, 75 bp, synthetic construct
  source 1..75: mol_type = other DNA
cgttacagtcgggcgaccgctggtcagtggcgacggttgaggatgacgtgctgacagactgggttatgcaggata

SEQ ID NO: 632968 - DNA, 75 bp, synthetic construct
  source 1..75: mol_type = other DNA
ctgaacggtgtactttccgcgccgcttgccagcggtgaagtggtttacctctaccgtaacgggctgctgttaggg

SEQ ID NO: 632969 - DNA, 75 bp, synthetic construct
  source 1..75: mol_type = other DNA
ggagatgaagaatttctctacgataattacgataataatgttatcggtctcgttgaacttatcattcaaaaagca

SEQ ID NO: 632970 - DNA, 75 bp, synthetic construct
  source 1..75: mol_type = other DNA
ggtgatgactgcctgctggttctgagccaccacagggccgaagatgctgctcatatcatcgttgctgatcgcggg

SEQ ID NO: 632971 - DNA, 75 bp, synthetic construct
  source 1..75: mol_type = other DNA
aacccggggcggttcaatacgattattcctgtatcatcaacaccattatatgaatcaatcgctgacagtgactgg

SEQ ID NO: 632972 - DNA, 75 bp, synthetic construct
  source 1..75: mol_type = other DNA
ctttattagtacagcttatcataatttatcttgtaatgactatgtcctctgttatttccgataaaaacaaagagt

SEQ ID NO: 632973 - DNA, 75 bp, synthetic construct
  source 1..75: mol_type = other DNA
acctcaaggcgcagccgttattgcaaccaatatcaatacagtagaaataacagagcccgacgcattaacaaaatt

SEQ ID NO: 632974 - DNA, 75 bp, synthetic construct
  source 1..75: mol_type = other DNA
gaaggctacgttcaggtcgtcgaggccgtctcgcgtgccattgcccggatggaagccaaaaaactacagcaaacc

SEQ ID NO: 632975 - DNA, 75 bp, synthetic construct
  source 1..75: mol_type = other DNA
cctctaattttgtaggtaaaattccttcatataaacgaactaaatttcaaatttgtaagtctggtgatgtttttt

SEQ ID NO: 632976 - DNA, 75 bp, synthetic construct
  source 1..75: mol_type = other DNA
atagtaccgcagggggagccgagattgcaaacccaaatgtaagtcctgtttctgaagatattgcaaaactgcaaa

SEQ ID NO: 632977 - DNA, 75 bp, synthetic construct
  source 1..75: mol_type = other DNA
actccgctgcttttagcgcatgaagctgagagctattcttctcgtctaaaagtgctaggtgatgagattaaattc

SEQ ID NO: 632978 - DNA, 75 bp, synthetic construct
  source 1..75: mol_type = other DNA
gaacggaatttgttcagcgagcgacgacgttttttggaccggaccggaattttgaaaacccctggctgctcccgg

SEQ ID NO: 632979 - DNA, 75 bp, synthetic construct
  source 1..75: mol_type = other DNA
atgcagggcaatatcgaagaaaatctagcacaactagatgccttaactaagcaattacgcagccgctcaaactcg

SEQ ID NO: 632980 - DNA, 75 bp, synthetic construct
  source 1..75: mol_type = other DNA
ctgttcctttagttgaaaacatattcaaatcggttaagtcactaacatgtgagttacgaaagcatctcataaact

SEQ ID NO: 632981 - DNA, 75 bp, synthetic construct
  source 1..75: mol_type = other DNA
atttggcctggcgaatgccaacgaaccctgtacacacgcctggatggaaaatggcaaacgctaccaagttaacta

SEQ ID NO: 632982 - DNA, 75 bp, synthetic construct
  source 1..75: mol_type = other DNA
acgacgtgaagcgcggtttgcgaaacggcgttgctccttacataccagcggccttttgcggggatgcctggagcg

SEQ ID NO: 632983 - DNA, 75 bp, synthetic construct
  source 1..75: mol_type = other DNA
cgcgttctgattaacggttatttcatcgcggaactgaccggtcgtgggcaggatgtagcggaaggccgggtctgc

SEQ ID NO: 632984 - DNA, 75 bp, synthetic construct
  source 1..75: mol_type = other DNA
atgagtgacatgaaagctgttcgtcatcgatataagcagagatataattttgctgcgtcagaagttgtgggggcg

SEQ ID NO: 632985 - DNA, 75 bp, synthetic construct
  source 1..75: mol_type = other DNA
ggcaaacccgaagaaatccgctttcagtgcctggaaggccagattacgcgagggggtgtcaccagaggccatgct

SEQ ID NO: 632986 - DNA, 75 bp, synthetic construct
  source 1..75: mol_type = other DNA
acgacgtgaagcgcggtttgcgaaacggcgttgctccttacatacccgcggccttttgctgggatgccaggagcg

SEQ ID NO: 632987 - DNA, 75 bp, synthetic construct
  source 1..75: mol_type = other DNA
acgacgtgaagcgcggtttgcgaaacggcgttgctccttacatacctgcggccttttgccgggatgcccggagcg

SEQ ID NO: 632988 - DNA, 75 bp, synthetic construct
  source 1..75: mol_type = other DNA
ccaacattagtagtagcaatccctgttctttagagggtttaatcgccgtaaaggatgatagaggcgagacgcaca

SEQ ID NO: 632989 - DNA, 75 bp, synthetic construct
  source 1..75: mol_type = other DNA
attatatagattacacttacttacttctaatgctgatattccacaaaatatcaggaagtacaaatggcatttaat

SEQ ID NO: 632990 - DNA, 75 bp, synthetic construct
  source 1..75: mol_type = other DNA
ttgccgcgacgacggctgtgtcgcttccggctctggctgaaagcaggctgcagccctcgtttcaccttagcgatc

SEQ ID NO: 632991 - DNA, 75 bp, synthetic construct
  source 1..75: mol_type = other DNA
tctctacctgacgtgaattacaagagtttgcgtcggttacccaatttattaatagacccgacaacactagacgaa

SEQ ID NO: 632992 - DNA, 75 bp, synthetic construct
  source 1..75: mol_type = other DNA
aagattccgggacgacgtgatgagcctgaccggttcagctccggtatcaggatcgcatgacgacagaaaaaaaag

SEQ ID NO: 632993 - DNA, 75 bp, synthetic construct
  source 1..75: mol_type = other DNA
atttagtaatgcaccacttcccaaaattaatggtatagaagaagcttatcttgctgtcgttaaagcaaaggattt

SEQ ID NO: 632994 - DNA, 75 bp, synthetic construct
  source 1..75: mol_type = other DNA
aaccaagtcgttcaacttggtactgttgctaaaggtgttaccggtaatgcagttaatttcgcaatgaaaccggct

SEQ ID NO: 632995 - DNA, 75 bp, synthetic construct
  source 1..75: mol_type = other DNA
tctttcgatgaataccgactgaagacgctgaagcgtaaagcaggctggatctccgatatcctccgttcagataag

SEQ ID NO: 632996 - DNA, 75 bp, synthetic construct
  source 1..75: mol_type = other DNA
gccgcgacggatatcaaacgcctgcgcccgctggtggaggatgcaataaataaaggcattctggatgttgatcct

SEQ ID NO: 632997 - DNA, 75 bp, synthetic construct
  source 1..75: mol_type = other DNA
tgttcctgctactgctactcagcagaatggtcagccacagagtgctgacacgacgaaaaaagggagcgcgaaaac

SEQ ID NO: 632998 - DNA, 75 bp, synthetic construct
  source 1..75: mol_type = other DNA
atatttgaactttcggatgtaaaatttaatttaagtctcactttaattattttttatttattaagcttatatatg

SEQ ID NO: 632999 - DNA, 75 bp, synthetic construct
  source 1..75: mol_type = other DNA
agcagcacgtaaagagaaagcagaattaaaactcctcgatgtgtcaagctctatcagtgcaatgcaccgtctctc

SEQ ID NO: 633000 - DNA, 75 bp, synthetic construct
  source 1..75: mol_type = other DNA
gacacccgtcacagcggtcaatcgcttaaatccgtctacagcaaatccttctaccagacaggaaccaatatccaa

SEQ ID NO: 633001 - DNA, 75 bp, synthetic construct
  source 1..75: mol_type = other DNA
gtgcataacgtcaccgtaggtaaagccgatctccctggcacgatgcaaacgagccagaaaaagctggatgaactg

SEQ ID NO: 633002 - DNA, 75 bp, synthetic construct
  source 1..75: mol_type = other DNA
caaaagaaaaccggtaagaaaatcaagccggaagagtttaaagcagtgcgtacagtccaggatgttgtcgaggct

SEQ ID NO: 633003 - DNA, 75 bp, synthetic construct
  source 1..75: mol_type = other DNA
gcggagctggcgcgtggggaaattccaccgattttaccggacagtcgagatggagatgttcgggagctagataat

SEQ ID NO: 633004 - DNA, 75 bp, synthetic construct
  source 1..75: mol_type = other DNA
ggggtttctgatagtaaagtggtaaccaagctgcattaccttgaatcagccccttatgacacggctctttcagga

SEQ ID NO: 633005 - DNA, 75 bp, synthetic construct
  source 1..75: mol_type = other DNA
ctttatcatccactcccttatcatccagtatttgtgattctgaatggtattttggtgctgatgttcttgaactgc

SEQ ID NO: 633006 - DNA, 75 bp, synthetic construct
  source 1..75: mol_type = other DNA
gcttgaagagattatgagtatttcagatagttcacttagaaaacgtcttgggtatgaggttttaagcttttcgct

SEQ ID NO: 633007 - DNA, 75 bp, synthetic construct
  source 1..75: mol_type = other DNA
ctgcagccggagccagacccgatgccgaatccggagccaaacccgaatccagagccgaaccctaacccgacacct

SEQ ID NO: 633008 - DNA, 75 bp, synthetic construct
  source 1..75: mol_type = other DNA
aaatctgcgggcatggactcagggcaatggcctgtagtgccctggtggagtcggatctctggtcacgcgatacgg

SEQ ID NO: 633009 - DNA, 75 bp, synthetic construct
  source 1..75: mol_type = other DNA
aattgacggcagttttatccgcaatattgtgtcaaatagtctggattatcagatagtggcgtcgatttgccacct

SEQ ID NO: 633010 - DNA, 75 bp, synthetic construct
  source 1..75: mol_type = other DNA
taacggcgcttaaggcaatggtgccgaagtggttttctccgctgcgtgcgcgttggcattattattcgatggcgc

SEQ ID NO: 633011 - DNA, 75 bp, synthetic construct
  source 1..75: mol_type = other DNA
tttccgaattgctggcgggaagtgagttggatgcggccttacgcgcagaaatagatgaattactggaacgtaaac

SEQ ID NO: 633012 - DNA, 75 bp, synthetic construct
  source 1..75: mol_type = other DNA
atgcgcgaacgggtatcgcagcagttaaaagaaatagaacggcgctacggcgtgaaagtgctgtatgcctgtgaa

SEQ ID NO: 633013 - DNA, 75 bp, synthetic construct
  source 1..75: mol_type = other DNA
ccgtaccgaggtgagcaccctctgcatcagccagtttcgctacagcgcacaaatccgcccttcttccgtggtgac

SEQ ID NO: 633014 - DNA, 75 bp, synthetic construct
  source 1..75: mol_type = other DNA
tggctggttgagtggaaaaagccactgaaacgcaatggcttaaagattcccctcacagccattgcaacagtcact

SEQ ID NO: 633015 - DNA, 75 bp, synthetic construct
  source 1..75: mol_type = other DNA
tgttcgtcagaatgttcagttcggtgtgcttgatcgggatgttctgtttaataaagaagtgcttccggcattctc

SEQ ID NO: 633016 - DNA, 75 bp, synthetic construct
  source 1..75: mol_type = other DNA
gctgacaccatcgctccagcagcgaatcgcttttccagcgaatggggaagcacaccgaagccaaaagcagctaac

SEQ ID NO: 633017 - DNA, 75 bp, synthetic construct
  source 1..75: mol_type = other DNA
ctgatcttctcagagcaatagcgaaagttgaatccggattaaatcatcttgcagttggtaagaacccaggaagag

SEQ ID NO: 633018 - DNA, 75 bp, synthetic construct
  source 1..75: mol_type = other DNA
atggtgatgtacaggtttatgtttattacctgcgctggctcatacttcagtgggaaaacagaaatcccgacataa

SEQ ID NO: 633019 - DNA, 75 bp, synthetic construct
  source 1..75: mol_type = other DNA
tgggcggcggtgggcttggtgccgccataacgccctggttagttcaacatagcgaaacctggtatcaaacactcg

SEQ ID NO: 633020 - DNA, 75 bp, synthetic construct
  source 1..75: mol_type = other DNA
ttgccgtcggtgcattgatgcgtgagctttaccctcaaagtgcgctgctgcttagcagcgcactgctcggtgggg

SEQ ID NO: 633021 - DNA, 75 bp, synthetic construct
  source 1..75: mol_type = other DNA
gtttccgctctgtttgctgctggcgctcgatcactctgcgcaaccggctattgctggcaagctggtggcgtttat

SEQ ID NO: 633022 - DNA, 75 bp, synthetic construct
  source 1..75: mol_type = other DNA
tgctgcatcagattgttgatcgccggacagcgtcgatgcgcagcgtggggatgctgacaaacctgaactatgagg

SEQ ID NO: 633023 - DNA, 75 bp, synthetic construct
  source 1..75: mol_type = other DNA
gagcggggactggggcaggaaacacccgttgagtctctgttgacgcagtaccatgatgcccgtgcgcagaagcag

SEQ ID NO: 633024 - DNA, 75 bp, synthetic construct
  source 1..75: mol_type = other DNA
cgtctgtgtactggcctatagcacgccagatctcagtatgaacggcaaaatgatctatgcagcaattacttacat

SEQ ID NO: 633025 - DNA, 75 bp, synthetic construct
  source 1..75: mol_type = other DNA
gcgatcccgccacgcgggataaaatgcgccgcctgatccgtcgtctggactcagaaatggagcgcagcggcaaca

SEQ ID NO: 633026 - DNA, 75 bp, synthetic construct
  source 1..75: mol_type = other DNA
gacaacgggcaggataccgccattcaggacgcgcagcacgccatcacggtggcgcagacggatattgatgccaat

SEQ ID NO: 633027 - DNA, 75 bp, synthetic construct
  source 1..75: mol_type = other DNA
aagtcgcagtgcttcgaattaataacctaaaggtgcgagaagatattgattcgctgttaaagagttataattatt

SEQ ID NO: 633028 - DNA, 75 bp, synthetic construct
  source 1..75: mol_type = other DNA
agctgttgttgtaattatttatagccgtatagataatttttatctcaagacatttgccccaggggatcttgcagc

SEQ ID NO: 633029 - DNA, 75 bp, synthetic construct
  source 1..75: mol_type = other DNA
aaactggcggggcgtcatcaggatgaattacgggcgatgacagagtcattacctgaaaatgcatctacgcaacaa

SEQ ID NO: 633030 - DNA, 75 bp, synthetic construct
  source 1..75: mol_type = other DNA
gggggatgttgcagcgtcggcggcacgcacatcgtcgcgtggcggcggcagatctggcgctgttcacgcgccaac

SEQ ID NO: 633031 - DNA, 75 bp, synthetic construct
  source 1..75: mol_type = other DNA
gcaaatctttcgaggcccaggtcattcaggagtgttctgaacccggtgcctccatcgcaaacatcgccttgggct

SEQ ID NO: 633032 - DNA, 75 bp, synthetic construct
  source 1..75: mol_type = other DNA
attgaattcacatatacaaaaaggtgatatgggattagttggggatgatcctaggatgaagcgctacgttaaaaa

SEQ ID NO: 633033 - DNA, 75 bp, synthetic construct
  source 1..75: mol_type = other DNA
agtggcctcaaaagttaagaaaaatcccggtgttcttgttaccgaatctaatgggcgctatgtaaaaaacttaga

SEQ ID NO: 633034 - DNA, 75 bp, synthetic construct
  source 1..75: mol_type = other DNA
aaacggtgctttatttgcacaaatagaaccctataccatacatacacttgtctgccgttctccttatgcttctgt

SEQ ID NO: 633035 - DNA, 75 bp, synthetic construct
  source 1..75: mol_type = other DNA
ttcgtatcgctggttacactaaaactattcgttagtgtcaagtttaggtttattagaacgtcagcttttgatgtg

SEQ ID NO: 633036 - DNA, 75 bp, synthetic construct
  source 1..75: mol_type = other DNA
ccgggtatatgctgaatgaaatgctctggcatgaatttgaaacatacctgccggcaaactgtattgttcatcatg

SEQ ID NO: 633037 - DNA, 75 bp, synthetic construct
  source 1..75: mol_type = other DNA
tggcaatgttaacgtaaaaattggtgctcttggcactgatggacttggtgcatctggcctgccagcctggattga

SEQ ID NO: 633038 - DNA, 75 bp, synthetic construct
  source 1..75: mol_type = other DNA
gctttacccccaaagtgcgctgctgcttagcagcgcactgcttggtggggtggggatcggcatcattcaggcggt

SEQ ID NO: 633039 - DNA, 75 bp, synthetic construct
  source 1..75: mol_type = other DNA
gttcatagcggcgcgattcgtgtggggcctgccattaccgactttaacgtcaggcaagatctgaatattaatgag

SEQ ID NO: 633040 - DNA, 75 bp, synthetic construct
  source 1..75: mol_type = other DNA
gctcgtactttcgtacgagctcttcttgtgcacagaaaacccccagctaggctgggggttccggaaagctttcag

SEQ ID NO: 633041 - DNA, 75 bp, synthetic construct
  source 1..75: mol_type = other DNA
ttatcggcggactgtttgaaaggcactacccgaatacgaaggtgtttcaactgtcatgcacgttcagatttggcc

SEQ ID NO: 633042 - DNA, 75 bp, synthetic construct
  source 1..75: mol_type = other DNA
ctacagaagaaaatattcgtgatggtatgtttcaaagaatttctgcgatagattctttaacgcaaaataaggaga

SEQ ID NO: 633043 - DNA, 75 bp, synthetic construct
  source 1..75: mol_type = other DNA
tttacctctttctcagggagtttagtctccaggatttccggggcggttcacttggcggagaaaccataattgcat

SEQ ID NO: 633044 - DNA, 75 bp, synthetic construct
  source 1..75: mol_type = other DNA
tggagttccgacaagcctgaactgatcccggacagcaccgataataaagtgacagttccggcagacaaagtgaag

SEQ ID NO: 633045 - DNA, 75 bp, synthetic construct
  source 1..75: mol_type = other DNA
aagctattgccgcggtagtgattggcggaaccagcttaatgggtggtattggcactattggcggcacaatcattg

SEQ ID NO: 633046 - DNA, 75 bp, synthetic construct
  source 1..75: mol_type = other DNA
cgatattctggtgactaatgtttgtacagatactcggtatcgaacacaatttccacaattaaacattgtggaggt

SEQ ID NO: 633047 - DNA, 75 bp, synthetic construct
  source 1..75: mol_type = other DNA
ggaaatatgtcgggatatggaaaagtgaagtggacagttgttaacgattatggtgggcatgaattaagtgagtca

SEQ ID NO: 633048 - DNA, 75 bp, synthetic construct
  source 1..75: mol_type = other DNA
aataatttctttggtgtaccgcaggccgcagcggaagaaacgcgtcatcaggcggagtatcaaaaccgtggaaca

SEQ ID NO: 633049 - DNA, 75 bp, synthetic construct
  source 1..75: mol_type = other DNA
taaacggcaatattggttatgttcatactggtgcttatccagatcgtcaatcaggccatgatccgcgattacccg

SEQ ID NO: 633050 - DNA, 75 bp, synthetic construct
  source 1..75: mol_type = other DNA
ctgggaaaccacagcaggaggttgtgttggctgcgctggaagatacctgggagactctttccaaacgctatggca

SEQ ID NO: 633051 - DNA, 75 bp, synthetic construct
  source 1..75: mol_type = other DNA
gtttacgatacttgcaaagtagagagtctaaattattttttacataatcggacaataagagaatatttaaaaaaa

SEQ ID NO: 633052 - DNA, 75 bp, synthetic construct
  source 1..75: mol_type = other DNA
actccaataactggcaacacattagttatactttctctgccagccaatcttatgatgaaaataataaagaagagg

SEQ ID NO: 633053 - DNA, 75 bp, synthetic construct
  source 1..75: mol_type = other DNA
ggcatcactgcgaaacactcgatgttgaggggtatacctaccgcacggaaacgcagaatggcgatgtgatgatca

SEQ ID NO: 633054 - DNA, 75 bp, synthetic construct
  source 1..75: mol_type = other DNA
gttattagagatgaaacttctcataagcattcggatttttatagtaatcgtgttataagttatcaagagaatata

SEQ ID NO: 633055 - DNA, 75 bp, synthetic construct
  source 1..75: mol_type = other DNA
gctttacccccaaagtgtgctgctgcttagcagcgcactgcttggtggggtggggatcggtatcattcaggcggt

SEQ ID NO: 633056 - DNA, 75 bp, synthetic construct
  source 1..75: mol_type = other DNA
gatcaacaatgtcagtttgctttcagtacaccggattcagaacctacaacctctgtattacaaggcacagcgcag

SEQ ID NO: 633057 - DNA, 75 bp, synthetic construct
  source 1..75: mol_type = other DNA
agcattaagcccttacgactacacactgtattgcaggaagtgggtaaaaccaaatctgacttgtacgccacagga

SEQ ID NO: 633058 - DNA, 75 bp, synthetic construct
  source 1..75: mol_type = other DNA
ttaatgataaaaatattacagttgattcattgccaaaagaagatgtaattaatgttatggctagctgccatttgg

SEQ ID NO: 633059 - DNA, 75 bp, synthetic construct
  source 1..75: mol_type = other DNA
aacaaatggaattcaaatatgtttgaattcatttatgcaggcggcatgcaagcttggcaaaatattgatttgatg

SEQ ID NO: 633060 - DNA, 75 bp, synthetic construct
  source 1..75: mol_type = other DNA
ggaaatgaaaaaattttacgaggctaaatataatactagtttagataaaagatctattgtattgccaatttttga

SEQ ID NO: 633061 - DNA, 75 bp, synthetic construct
  source 1..75: mol_type = other DNA
cagattatgaccgtataatgatacagcaattaagagaacatttcgaaataaaaaacattgcctatcctgaagggc

SEQ ID NO: 633062 - DNA, 75 bp, synthetic construct
  source 1..75: mol_type = other DNA
gtgacatactccgtgctatcagccttgtggaagctcttgattcggatacagcaaaactcgcggagaaaattgcag

SEQ ID NO: 633063 - DNA, 75 bp, synthetic construct
  source 1..75: mol_type = other DNA
tggtagcgacgctgctgctgctgtgcacgccggtgggtgccgcgacgctctctgatattcaggtttctaacggta

SEQ ID NO: 633064 - DNA, 75 bp, synthetic construct
  source 1..75: mol_type = other DNA
ataaattgcctgatttacgtggtgagtttattcgtggctgggatgacgggcgtggagtggatgcgggacgtgcct

SEQ ID NO: 633065 - DNA, 75 bp, synthetic construct
  source 1..75: mol_type = other DNA
gctgaaacgtccggcaggtggagcgcaaaataaactggccaccgagcataaagaggcgtttgtgggcttcctgcg

SEQ ID NO: 633066 - DNA, 75 bp, synthetic construct
  source 1..75: mol_type = other DNA
aatcaggcctttacatcataaataatggaatggggacggcttttgtctcaaatattaccgtaatggttgatggta

SEQ ID NO: 633067 - DNA, 75 bp, synthetic construct
  source 1..75: mol_type = other DNA
atgaatatgatgatctcatatcaggaacttgttcgcaccttccttagaaaacgtctcgggtatgaggttttaagc

SEQ ID NO: 633068 - DNA, 75 bp, synthetic construct
  source 1..75: mol_type = other DNA
agcatatcaccaaacgctttccaggcgtgttggcgcttaatgatgtgcaatttactctacgccggggcgaagttc

SEQ ID NO: 633069 - DNA, 75 bp, synthetic construct
  source 1..75: mol_type = other DNA
gcgatttttggtgcggattctattgacagcggaatgctaaaattaaatggtaaggaaaccgttattaaagatatt

SEQ ID NO: 633070 - DNA, 75 bp, synthetic construct
  source 1..75: mol_type = other DNA
agcttttaatctcatttgctcttgccgggacgttgatattaagcatctatctcatggaagctcactacccacgtt

SEQ ID NO: 633071 - DNA, 75 bp, synthetic construct
  source 1..75: mol_type = other DNA
ccaccaaagaatcttccgaaagatggggtaaaagcacggccctgcggactgatggctttgtgcgcaatatccacg

SEQ ID NO: 633072 - DNA, 75 bp, synthetic construct
  source 1..75: mol_type = other DNA
gctggtggggcagccgaaaggctggccggtttccttgtacgccggtattcctacccccgccagcgtcaccgcccc

SEQ ID NO: 633073 - DNA, 75 bp, synthetic construct
  source 1..75: mol_type = other DNA
attacccgggacattcccggatacctgttcgccggtggtgtggcttacgacggcgatgtaattacggtttacccc

SEQ ID NO: 633074 - DNA, 75 bp, synthetic construct
  source 1..75: mol_type = other DNA
gagcgttgggtaacggacataacctacagtgtgcccggagttcagggcgggcatggatgcttaaatgaaccgcga

SEQ ID NO: 633075 - DNA, 75 bp, synthetic construct
  source 1..75: mol_type = other DNA
taaaagatcgccccgccatcgggaaaccctgtgaaaacgtgtttttcaatatcagccctttgccgattctgatag

SEQ ID NO: 633076 - DNA, 75 bp, synthetic construct
  source 1..75: mol_type = other DNA
acaaatagccacacctggaagcgagtatcgagatatcgtaaatggaagactctacatcaaagaatcaggtcgctg

SEQ ID NO: 633077 - DNA, 75 bp, synthetic construct
  source 1..75: mol_type = other DNA
gcaacagaatttgatgaccgatatttatatctacatgatgattggcgatacagattctcaggtaataatgtggct

SEQ ID NO: 633078 - DNA, 75 bp, synthetic construct
  source 1..75: mol_type = other DNA
ctggcaaacactaaagctggaacgccagcctatgaaagagcgctgaataacgccgcaaatgccatcagaccaata

SEQ ID NO: 633079 - DNA, 75 bp, synthetic construct
  source 1..75: mol_type = other DNA
cccgcaggccacccagaaaatgctggatgatgcctttttcaacgtggaagcatggatcaacagcgagctggcaac

SEQ ID NO: 633080 - DNA, 75 bp, synthetic construct
  source 1..75: mol_type = other DNA
atcgcgagatttaggcgcatcaaccagctttaccgccaacgatgtggcgcaggggcagggttttctggcaatggc

SEQ ID NO: 633081 - DNA, 75 bp, synthetic construct
  source 1..75: mol_type = other DNA
gaatgaacaacaactggcgaaactggtggcgcaggaactggacaagcgcgaacggcagaatgccgccagaacccg

SEQ ID NO: 633082 - DNA, 75 bp, synthetic construct
  source 1..75: mol_type = other DNA
agcagctggagtatgggctacggcaggctgtgcctggatatttcagcatttgcattgggttacgtcacaaaagtc

SEQ ID NO: 633083 - DNA, 75 bp, synthetic construct
  source 1..75: mol_type = other DNA
agaagccgaaagggttcctggcgtatgaatccacggatgaaaccgataaggtccgggcgttcggcaaacttcagc

SEQ ID NO: 633084 - DNA, 75 bp, synthetic construct
  source 1..75: mol_type = other DNA
tggtgatgcgccaggaagccactgtgatcaccctcgggggctcggattataaaaaactggtgaatctgggcggca

SEQ ID NO: 633085 - DNA, 75 bp, synthetic construct
  source 1..75: mol_type = other DNA
ccgctggcagcaggcttcggagcgcatggccgaacggctgggggagatacagaaacaggtaatcactgtctgtga

SEQ ID NO: 633086 - DNA, 75 bp, synthetic construct
  source 1..75: mol_type = other DNA
agagcaatgatgatggacgggatttcattcctgttgcagagcaggggggtataccagtacacggatttcgtttac

SEQ ID NO: 633087 - DNA, 75 bp, synthetic construct
  source 1..75: mol_type = other DNA
ctgttggggcggctagtctgggcatgcaaaaggtggagttttcgctgaatgacagtccggctcttaaaagccttc

SEQ ID NO: 633088 - DNA, 75 bp, synthetic construct
  source 1..75: mol_type = other DNA
agcggccaggcgctcccgctcacgtatgtctgttgccgggagcaggcagaggacggtgcctgctggcatctgctg

SEQ ID NO: 633089 - DNA, 75 bp, synthetic construct
  source 1..75: mol_type = other DNA
ttcagagcgtggaaactcaggcggtgactccttaaacacaaaggaggctgccataatggctactacccctaccca

SEQ ID NO: 633090 - DNA, 75 bp, synthetic construct
  source 1..75: mol_type = other DNA
aaaggaaatggatttgtcataccacttggtacaattatgccctccccctggcagaaggaagaattggctcagtgg

SEQ ID NO: 633091 - DNA, 75 bp, synthetic construct
  source 1..75: mol_type = other DNA
acttagccaaacgcggatacaaggtatccgcgtaccctgctgaaactgaccagattgaatttttcagaattgaac

SEQ ID NO: 633092 - DNA, 75 bp, synthetic construct
  source 1..75: mol_type = other DNA
cttcaactcaaacagctctcattaccgctgatctcggagtcaaatatcttcttgataagattcgacaatcatcca

SEQ ID NO: 633093 - DNA, 75 bp, synthetic construct
  source 1..75: mol_type = other DNA
aaaaactttatcaggtgggctacagaataagagttcggtgatgaagcgtagggctagttgggtggcacttcttaa

SEQ ID NO: 633094 - DNA, 75 bp, synthetic construct
  source 1..75: mol_type = other DNA
cgagagttagttggaagggcagctccgaagatgcgattgagtatggctttatactgagcgaaaggtatcacgcgt

SEQ ID NO: 633095 - DNA, 75 bp, synthetic construct
  source 1..75: mol_type = other DNA
gcagaaggaagaattggctcagtggtatttagaattactacagaatttgccacaggatttatttaccatgctgac

SEQ ID NO: 633096 - DNA, 75 bp, synthetic construct
  source 1..75: mol_type = other DNA
gcggatgtcaggacggcgcagatcgcggacctggtggtcattaaggacggctcagtggcagacggttcgacggcg

SEQ ID NO: 633097 - DNA, 75 bp, synthetic construct
  source 1..75: mol_type = other DNA
tttcgcaacaagcgggaggtcaagcaggtaatattgctcaaagcggtgtgagcagtttttctaaggggattgata

SEQ ID NO: 633098 - DNA, 75 bp, synthetic construct
  source 1..75: mol_type = other DNA
ttaaactttgagtgtaatgtcccctctatccccgaacaacgcgaaatcgttcgccgcgtcgaacaactcctcgcc

SEQ ID NO: 633099 - DNA, 75 bp, synthetic construct
  source 1..75: mol_type = other DNA
aaaatgacggagggctttctctacctaactttgaacgtcataacggaaaaagctctaaaaaaaacgggcggttac

SEQ ID NO: 633100 - DNA, 75 bp, synthetic construct
  source 1..75: mol_type = other DNA
gtgtccgttaaactcaggctacctcaggttattcgcttctgggcatgggcggatcaacaaatgatagacggtaat

SEQ ID NO: 633101 - DNA, 75 bp, synthetic construct
  source 1..75: mol_type = other DNA
aaaggtgacgttatttctaaggtgtcttttttatcatcaaatctacaacatgtaactttcgaatgtaaagaaatt

SEQ ID NO: 633102 - DNA, 75 bp, synthetic construct
  source 1..75: mol_type = other DNA
ttttgatgacgagttcgctttggagggaatgactacatttaaagagcttgaagggaaaaagttttctgaattagg

SEQ ID NO: 633103 - DNA, 75 bp, synthetic construct
  source 1..75: mol_type = other DNA
aaacgttgctggcagccgataattcaaacgttgaaagtaaaaatgaagtaagttttgaattaaagtcagaaaaag

SEQ ID NO: 633104 - DNA, 75 bp, synthetic construct
  source 1..75: mol_type = other DNA
atgaacaggaccagtccccattattgtcgccgctcagtactttccttattgatatctgccttgatgaaatttatg

SEQ ID NO: 633105 - DNA, 75 bp, synthetic construct
  source 1..75: mol_type = other DNA
agtttgtgtccgccaccttccagcaccgctgggtcggtccggccggcacgcctgaggacaccaccacggtgtatg

SEQ ID NO: 633106 - DNA, 75 bp, synthetic construct
  source 1..75: mol_type = other DNA
attgagtatctggtctcggtgaatcacccgcaacgcgtcgcttttcgcatcaatggcggcctgaaggaagtggac

SEQ ID NO: 633107 - DNA, 75 bp, synthetic construct
  source 1..75: mol_type = other DNA
attttctggttaatgcaggttgccaacaagtggaattagccgaacaagtggatgcgatagtaagtgcgaatctgg

SEQ ID NO: 633108 - DNA, 75 bp, synthetic construct
  source 1..75: mol_type = other DNA
gcgatttattccactcgtgtgtacgcctggttaaaacaacacaacgtgacaatccgcttacccaaagaagtccct

SEQ ID NO: 633109 - DNA, 75 bp, synthetic construct
  source 1..75: mol_type = other DNA
cgaagcacacaccatgaattcagatgaattcgaacgtattcagggtatgcgacgcgccgtttatgacagcgatga

SEQ ID NO: 633110 - DNA, 75 bp, synthetic construct
  source 1..75: mol_type = other DNA
ggggtaaatattaagtatcgctatgagctggatgataaatggggcgttgcatcttcatttacgtacacaaatcaa

SEQ ID NO: 633111 - DNA, 75 bp, synthetic construct
  source 1..75: mol_type = other DNA
aaatatttggtgaagatgtatttacaaaccctacagttaggagaaaacgtaaagggttagttcattatgacattt

SEQ ID NO: 633112 - DNA, 75 bp, synthetic construct
  source 1..75: mol_type = other DNA
aacaggggccttctgagccggtacgtattgtgtatgacggtgaggtcagcacggtcagtcaggcgactgacctga

SEQ ID NO: 633113 - DNA, 75 bp, synthetic construct
  source 1..75: mol_type = other DNA
gttactgatacccccgtttgtgctgcatgctgacgaactgatgaagtgggagcgtattccgttatccgtacccct

SEQ ID NO: 633114 - DNA, 75 bp, synthetic construct
  source 1..75: mol_type = other DNA
cgaagcgcacaccatgaactccgatgaatttgaacgtattcaggggatgcgccgcgcggtttatgacagcgaaga

SEQ ID NO: 633115 - DNA, 75 bp, synthetic construct
  source 1..75: mol_type = other DNA
tcgaaacaataacagtgtcaatcaccgaaggcctgccccgagagattgaactacgccagaagcagtacgaatact

SEQ ID NO: 633116 - DNA, 75 bp, synthetic construct
  source 1..75: mol_type = other DNA
catttgtcctaatgatccagaaaaatcccttgccatccagtctgaaatcgttcggattctggataaatttactgc

SEQ ID NO: 633117 - DNA, 75 bp, synthetic construct
  source 1..75: mol_type = other DNA
cccaagggagtaccgtgtattcactacggtgaaatgtatacccattaccgcatctgggcggataaagcaaaatcg

SEQ ID NO: 633118 - DNA, 75 bp, synthetic construct
  source 1..75: mol_type = other DNA
ttcatggtggtatgaggtcgtttgttaccacaagtttattccctgttggggcgaataaatttgacaaatccgatg

SEQ ID NO: 633119 - DNA, 75 bp, synthetic construct
  source 1..75: mol_type = other DNA
gattttatgaagcgtttgcgtaaggaattagataaggatgatgtgaaaattcgttattttggctgtggtgaatat

SEQ ID NO: 633120 - DNA, 75 bp, synthetic construct
  source 1..75: mol_type = other DNA
gacccgtggcgtttgcaggatttggataagtttaatctggttaaattccagcgaatgatgaggaaattagaagat

SEQ ID NO: 633121 - DNA, 75 bp, synthetic construct
  source 1..75: mol_type = other DNA
tggcggcctgcccgggaatgaccgtggagaacgcccgggctgtgctggctgcgggatcaggtaaggcagaaccgg

SEQ ID NO: 633122 - DNA, 75 bp, synthetic construct
  source 1..75: mol_type = other DNA
agatgggggcatcaagtctttcggtaccacaacagcaggtacagtttgatgctcccggaatgctggctgaaacgg

SEQ ID NO: 633123 - DNA, 75 bp, synthetic construct
  source 1..75: mol_type = other DNA
gagccctgtgtctgtcacggtcacgctgccactgagtgaatattacgatcatgactgccagaaaaatgagctgaa

SEQ ID NO: 633124 - DNA, 75 bp, synthetic construct
  source 1..75: mol_type = other DNA
gcagggaaacgtaacgattcactggtacggtatcgtctgcttgaaaccgctaaacaaattcgtaccggcagagcc

SEQ ID NO: 633125 - DNA, 75 bp, synthetic construct
  source 1..75: mol_type = other DNA
gctggaaagtggcggaattcagtgctgcaacgtttaactatcaggtgggcacgctgaaatacacctgggacagcg

SEQ ID NO: 633126 - DNA, 75 bp, synthetic construct
  source 1..75: mol_type = other DNA
ctgcccctgagcgagtattacgacggggactgccagcggaacgaggaaaatatccgacgcaaacgggaaaacctg

SEQ ID NO: 633127 - DNA, 75 bp, synthetic construct
  source 1..75: mol_type = other DNA
atactgacccttccaccttacggcgcgtcagacgtcgttctttcagcatcatcgataaccggaacaggaaaggtt

SEQ ID NO: 633128 - DNA, 75 bp, synthetic construct
  source 1..75: mol_type = other DNA
cgggaacttatctgccaggccaatcgccagaaagggatagattgatccccgactcgatattgagtatgggtgtat

SEQ ID NO: 633129 - DNA, 75 bp, synthetic construct
  source 1..75: mol_type = other DNA
ataattgttttgaacagttattattatgtggcgttatggcactaataccaattgcagcactaagtacggaccctt

SEQ ID NO: 633130 - DNA, 75 bp, synthetic construct
  source 1..75: mol_type = other DNA
atgttacctatgtattttgtttgtcacgtaaacgttaaattagagataaagttattatccgcttttctgatatcg

SEQ ID NO: 633131 - DNA, 75 bp, synthetic construct
  source 1..75: mol_type = other DNA
gcggagatagcccagtattcaaaataccagaagcaattatggaaaaagttggcttcagtatcggcgatgctattg

SEQ ID NO: 633132 - DNA, 75 bp, synthetic construct
  source 1..75: mol_type = other DNA
actgtaattgcacgggatgcaacaactgtgttgaacaatccccggggactgggaaagggtgacattattgttgcc

SEQ ID NO: 633133 - DNA, 75 bp, synthetic construct
  source 1..75: mol_type = other DNA
gggagatgttgcccgctggagtggtgatggacttgatcgctggcatcttggtgtgatggccgggtatggacatga

SEQ ID NO: 633134 - DNA, 75 bp, synthetic construct
  source 1..75: mol_type = other DNA
aagtacgagaatgcgcgattgggcatgcagctcgatgaggtaatcgcagcggtcgcacaagtagccaaactctgt

SEQ ID NO: 633135 - DNA, 75 bp, synthetic construct
  source 1..75: mol_type = other DNA
tcgactcttgctttcaggtggggagcatagaagaaattgccgatgctctcgagaagcgcagcggaagcgaggaaa

SEQ ID NO: 633136 - DNA, 75 bp, synthetic construct
  source 1..75: mol_type = other DNA
tgaggtcagccttcgcaacaaagcggcggcagaaaacctgccgccgtgttgcccgttaacgtttaacttcgtagg

SEQ ID NO: 633137 - DNA, 75 bp, synthetic construct
  source 1..75: mol_type = other DNA
attccaattattttgaaaaggttcaataatgcattcatctatctaatttttggtattttaagtgttatatatttc

SEQ ID NO: 633138 - DNA, 75 bp, synthetic construct
  source 1..75: mol_type = other DNA
gggggattgttcttatgcattttgtaatgttgatgatattgatgagcgagttgaacgtctaaccttctatttatt

SEQ ID NO: 633139 - DNA, 75 bp, synthetic construct
  source 1..75: mol_type = other DNA
gcgagcttggcagaattgattttaaaactttgatagatagtttctattcttcagagaacatcacaatagctgaag

SEQ ID NO: 633140 - DNA, 75 bp, synthetic construct
  source 1..75: mol_type = other DNA
ctgatctgagtaataccagttttgcattcattaacaaagcctggtctggaattccggggacaggtgctcaggacg

SEQ ID NO: 633141 - DNA, 75 bp, synthetic construct
  source 1..75: mol_type = other DNA
gaagcacagccctctttagagatccttaagcgcattgccgtaacttttagcgtgtcagccgactggctgatattt

SEQ ID NO: 633142 - DNA, 75 bp, synthetic construct
  source 1..75: mol_type = other DNA
tgacatgctgatggtcataccctcccgtctggccacagagctgaacggttcaggtggactgctgcagggcatttc

SEQ ID NO: 633143 - DNA, 75 bp, synthetic construct
  source 1..75: mol_type = other DNA
ataccggcgaactgacggtagtggctaaaacctcggcgaaaaataccaccgttgatgctggcggtaaactgatcg

SEQ ID NO: 633144 - DNA, 75 bp, synthetic construct
  source 1..75: mol_type = other DNA
tgcctgcaccacagtcactccagcttataaagataacggcacacgcagtggtccttgcgttgaaggaggcccgga

SEQ ID NO: 633145 - DNA, 75 bp, synthetic construct
  source 1..75: mol_type = other DNA
tcgaagagtctggtgggaagtacaggttgatgcggcaggctgtacatataatacttaaatctatttctatagagg

SEQ ID NO: 633146 - DNA, 75 bp, synthetic construct
  source 1..75: mol_type = other DNA
gggggaaatgaaatgtcatcagttagccgtgaagaaatgcaagcacttctagctgccaataaggcggagatggag

SEQ ID NO: 633147 - DNA, 75 bp, synthetic construct
  source 1..75: mol_type = other DNA
aaaagaagaagccgttgccgccgagcgccgccgccaggaagaggcagaagccgcccgtttggtcgaagagcagcg

SEQ ID NO: 633148 - DNA, 75 bp, synthetic construct
  source 1..75: mol_type = other DNA
atgagagaaataacggacttaactgtcatcgaaatcaagccggaacaggcgccagtgctttacgtatcgggcggc

SEQ ID NO: 633149 - DNA, 75 bp, synthetic construct
  source 1..75: mol_type = other DNA
cacagaaaatgagttagcctcaagtaaacttgggttggccttaaataaaaacaactgcaaaacaattaccgagta

SEQ ID NO: 633150 - DNA, 75 bp, synthetic construct
  source 1..75: mol_type = other DNA
aacgaatccggcgcgaggctgaagcaaaagagcaagccagaatagcagaagaaaaaagaatcaaggaagaagaag

SEQ ID NO: 633151 - DNA, 75 bp, synthetic construct
  source 1..75: mol_type = other DNA
accgtgaccgcgaagagcagcgccgcctggcggaacaggctcggcgtgagcacgaagagcgcattaagcgcgaag

SEQ ID NO: 633152 - DNA, 75 bp, synthetic construct
  source 1..75: mol_type = other DNA
agcgcaggaagaagcagatcgcatcaagcgtgaagctgaagcgaaagaaaaagcccgtctggccgaagagcagcg

SEQ ID NO: 633153 - DNA, 75 bp, synthetic construct
  source 1..75: mol_type = other DNA
gtgtggcgttttctggcactgagtgccggagaatctcaaatcatccacgtaaccgcctggacggaacgcgaagcg

SEQ ID NO: 633154 - DNA, 75 bp, synthetic construct
  source 1..75: mol_type = other DNA
atcgctttatggcacagcatgctgccagtgcggtttccggtggcggaactgccgggcgcggggaggaagacctgc

SEQ ID NO: 633155 - DNA, 75 bp, synthetic construct
  source 1..75: mol_type = other DNA
gtaaatatgtcgcaaacgaatgtttcgatcattgaggctgtggcccaggaaaatcagcgcgtgatggagatcctg

SEQ ID NO: 633156 - DNA, 75 bp, synthetic construct
  source 1..75: mol_type = other DNA
ctgactatatggcgggcggtcagcgtccggcaaagagttaccaggtgaagaatggcattgccattctgccggtga

SEQ ID NO: 633157 - DNA, 75 bp, synthetic construct
  source 1..75: mol_type = other DNA
tttcttaaaagaagagtttagtaacctaccacctgtttctgtatataatttaatgctaaaaactttaaaggaaag

SEQ ID NO: 633158 - DNA, 75 bp, synthetic construct
  source 1..75: mol_type = other DNA
gtccgtgccttggtgactgccacgttgccgacgttaataaggctcgcagctcctccttcgaagacgtggtgaagc

SEQ ID NO: 633159 - DNA, 75 bp, synthetic construct
  source 1..75: mol_type = other DNA
tccgataaaggcccatgccttggtgactgccacgtttccgacgttaataaggctcgcagctcctccttcgaagac

SEQ ID NO: 633160 - DNA, 75 bp, synthetic construct
  source 1..75: mol_type = other DNA
agcgagtctgcgcggcgctgcgggagcttaacaagcaccgggatattgtacggcagatgaattgttccagagagg

SEQ ID NO: 633161 - DNA, 75 bp, synthetic construct
  source 1..75: mol_type = other DNA
agttgtatcggttaatggttactggtctgtttcagaacgacaaagtggcgtgaaagaaaaaacagtgccggtgtg

SEQ ID NO: 633162 - DNA, 75 bp, synthetic construct
  source 1..75: mol_type = other DNA
gcgaaaagtcatgtccagaagtgggagcgagtctgcgccgcgctgcgggagctgaacaagcaccgggatattgtc

SEQ ID NO: 633163 - DNA, 75 bp, synthetic construct
  source 1..75: mol_type = other DNA
ataactgcgtcgatatctacccgcaactgaataaagcgttttctggcggtaatgcggtgaacgtggcggtgtact

SEQ ID NO: 633164 - DNA, 75 bp, synthetic construct
  source 1..75: mol_type = other DNA
tcgctgaaggcgtcgaaaacattgattgtcataagttatcaaaagggatagggctatgggcgctcagggatattt

SEQ ID NO: 633165 - DNA, 75 bp, synthetic construct
  source 1..75: mol_type = other DNA
caatcatttccacaagcactaacaagttgatagcagtggaagtgttgagcagattttattccaacgagggggcca

SEQ ID NO: 633166 - DNA, 75 bp, synthetic construct
  source 1..75: mol_type = other DNA
cgccgtggctttcctacgtgctgtacaaaccggaaatcacacacagtgaagaagtggcaacctgggcgggtgatg

SEQ ID NO: 633167 - DNA, 75 bp, synthetic construct
  source 1..75: mol_type = other DNA
cgatccgcgcaaagccgccgtcgaagccgctattgcccgtgccaaagcgcgcaagctggaacagcaacagactaa

SEQ ID NO: 633168 - DNA, 75 bp, synthetic construct
  source 1..75: mol_type = other DNA
ttacaatggattatcaatgaatactggattatggggcactcaaggatattttttcccttctgtgcctctatctga

SEQ ID NO: 633169 - DNA, 75 bp, synthetic construct
  source 1..75: mol_type = other DNA
atggaagtaatttacattgcagaaccaataatatccacaaacattaacaaactaattgctgttgaagtattgagt

SEQ ID NO: 633170 - DNA, 75 bp, synthetic construct
  source 1..75: mol_type = other DNA
aaagtaacaacctgcctctgccagatgacgctatgcgccacctaggcacaatgttgagctttccacgcgacatta

SEQ ID NO: 633171 - DNA, 75 bp, synthetic construct
  source 1..75: mol_type = other DNA
gacaacagggttggttcgttatagcgttcttttaccttatgctaaacaaaggtacgtcactacggatcggttgat

SEQ ID NO: 633172 - DNA, 75 bp, synthetic construct
  source 1..75: mol_type = other DNA
cataataaaattggtggttgttccaggaacagtagtacatgccctttcagcgaagtgcgttcttgttacggctgt

SEQ ID NO: 633173 - DNA, 75 bp, synthetic construct
  source 1..75: mol_type = other DNA
tcgccgcattgcaggaacatgcgagcgacaaaatcaatatggtcgccaaaaatcgcggactgacaatggctgaac

SEQ ID NO: 633174 - DNA, 75 bp, synthetic construct
  source 1..75: mol_type = other DNA
tcgttgcattacaggaacatgcccgcgagaaaatcaacatagttgctgaaaaccgtgggctgactatggctgaac

SEQ ID NO: 633175 - DNA, 75 bp, synthetic construct
  source 1..75: mol_type = other DNA
gcttatccgcgcctggcctggggaatcccagcataaacgggcggtgtccgggctggatgtattagctgatattgg

SEQ ID NO: 633176 - DNA, 75 bp, synthetic construct
  source 1..75: mol_type = other DNA
tttactccaataaaaaaccatttgatattgaagaggattttgtttctttattaaaaatgaaatggagagaatgca

SEQ ID NO: 633177 - DNA, 75 bp, synthetic construct
  source 1..75: mol_type = other DNA
tccaaagttgaggggcttaaagactcactctatgaactctttaacgggcggtgtgccttttgtgagtgcaaccat

SEQ ID NO: 633178 - DNA, 75 bp, synthetic construct
  source 1..75: mol_type = other DNA
gagaaaataccgcgtgctgctgagccgtattaatccagaagatgcgccagaaattgcgtggccggaggaggttga

SEQ ID NO: 633179 - DNA, 75 bp, synthetic construct
  source 1..75: mol_type = other DNA
gcgtgaatacagggtatcgctgatgcgcattgataccgactcagcgacagatattgtctggccggagcaacctgc

SEQ ID NO: 633180 - DNA, 75 bp, synthetic construct
  source 1..75: mol_type = other DNA
ccatagtcgttcccgaggcatcgggtcactgtacagtgaatggggagatatggggcattacacgactgaagctgg

SEQ ID NO: 633181 - DNA, 75 bp, synthetic construct
  source 1..75: mol_type = other DNA
gtgtacttcgccttaaaaagcggctctgccacattaacgtcattaacagcggtgacagatcaaaacggaatcgcg

SEQ ID NO: 633182 - DNA, 75 bp, synthetic construct
  source 1..75: mol_type = other DNA
atgttcacctcagagagtatggcagaacagaaaacaaaaatgcacctttgtttttcaacctgaagtgtcagcgag

SEQ ID NO: 633183 - DNA, 75 bp, synthetic construct
  source 1..75: mol_type = other DNA
ctacaggaaatcgggttaacacctggttgcgcgatgccgacgatccacgtctcaatagtatcgttcagcaactct

SEQ ID NO: 633184 - DNA, 75 bp, synthetic construct
  source 1..75: mol_type = other DNA
agattgggcagcatgcgcactccgagattgttggtatgttgcctgaaggtaactggatcactcgcgcaccaacct

SEQ ID NO: 633185 - DNA, 75 bp, synthetic construct
  source 1..75: mol_type = other DNA
ccgcactaaggcgaaccttgctgaggcggaaattgctttacgcctgtgtgggctaccttatcgctacctcaatgg

SEQ ID NO: 633186 - DNA, 75 bp, synthetic construct
  source 1..75: mol_type = other DNA
actatgcattttgttcactgacgttgttggcgctgggaactgggggattacctgcggctggagctgtcgtcttgg

SEQ ID NO: 633187 - DNA, 75 bp, synthetic construct
  source 1..75: mol_type = other DNA
gactttgttaaaacagtgacagagaccgatgaaaatggagtaacacgaacacgtgaagccatcgatgaagagaaa

SEQ ID NO: 633188 - DNA, 75 bp, synthetic construct
  source 1..75: mol_type = other DNA
caacgaaagcgaatagcggcgggaaggaagtaaaagggaaaggtgaaccttgtttatatttccatcccgacagtg

SEQ ID NO: 633189 - DNA, 75 bp, synthetic construct
  source 1..75: mol_type = other DNA
gttgtccctcttgatgaagggcttgcgcggtggctcaaaaaccgctgggatagcacccgaagaagtcaccgatag

SEQ ID NO: 633190 - DNA, 75 bp, synthetic construct
  source 1..75: mol_type = other DNA
ccactgtaggcgaaatgctgtcagaagagtttttaaagccgctgaacatcacccaggcagagctggcgctggtaa

SEQ ID NO: 633191 - DNA, 75 bp, synthetic construct
  source 1..75: mol_type = other DNA
ttttatacaaccaaacgaaccggcggtatgctggtggattctcaggcgattaagctgatgaagatcggtgctgca

SEQ ID NO: 633192 - DNA, 75 bp, synthetic construct
  source 1..75: mol_type = other DNA
ctcagcgagctggaaaatctcaaaagcgatcttgaaaaagagctgcttgagctgaaacgtccggcaggtggtgtg

SEQ ID NO: 633193 - DNA, 75 bp, synthetic construct
  source 1..75: mol_type = other DNA
ttagcgaattacctgagatttatcaaactatttttggccatcccgaatgggatggcgatgccgctcgtgattgta

SEQ ID NO: 633194 - DNA, 75 bp, synthetic construct
  source 1..75: mol_type = other DNA
ctggcaatggtgttactgaacgcagccgtcagttacggcattgtcagactgaacgcaccggtgactgtcgccttc

SEQ ID NO: 633195 - DNA, 75 bp, synthetic construct
  source 1..75: mol_type = other DNA
cttagtgttgaagaagctgcacatctggcggtgttgttcggcgttgacgaaggtttctggataaacttacaggct

SEQ ID NO: 633196 - DNA, 75 bp, synthetic construct
  source 1..75: mol_type = other DNA
cgccagccccttttgactacgaagtatggcaacctgatcctgactgggattgttctcccgaattacagccgattg

SEQ ID NO: 633197 - DNA, 75 bp, synthetic construct
  source 1..75: mol_type = other DNA
gggttgaacctgcaggagcaggatctgcattatggtgaacaactttactatcgctacccattttctatggttcgt

SEQ ID NO: 633198 - DNA, 75 bp, synthetic construct
  source 1..75: mol_type = other DNA
accatcgtattcttgagcgcagacggcctcacggggaatatcgtgcaaccagtaacgttccggaagaatggttgc

SEQ ID NO: 633199 - DNA, 75 bp, synthetic construct
  source 1..75: mol_type = other DNA
tggccactcctgcttatctggcccgaaagcaactcaaaaaagattattacaaccgtgaatatgggccttatggat

SEQ ID NO: 633200 - DNA, 75 bp, synthetic construct
  source 1..75: mol_type = other DNA
acgcagccgctgtttttgagcctgccgcagctgaggcactctgtcccgctgccgtttcagaagacctggcgttcg

SEQ ID NO: 633201 - DNA, 75 bp, synthetic construct
  source 1..75: mol_type = other DNA
gacgccgccgaactggctgacgatgcggcagccgtttttgaggattctgcgctggtttccgacgctttcgcgttc

SEQ ID NO: 633202 - DNA, 75 bp, synthetic construct
  source 1..75: mol_type = other DNA
tgcaagtttttctattacgacatgccccacggcatcctgacggcggaagagagccagcgtaataaacatgaactg

SEQ ID NO: 633203 - DNA, 75 bp, synthetic construct
  source 1..75: mol_type = other DNA
ggtggcagactatttatcactattgctaaatgcagaacataacatgattcctttatcatccacccccttatcatc

SEQ ID NO: 633204 - DNA, 75 bp, synthetic construct
  source 1..75: mol_type = other DNA
aactcgaagctggtaaagaagcggtcgcagctggaattacgttgtttggttcactacactgcgcattaacggtat

SEQ ID NO: 633205 - DNA, 75 bp, synthetic construct
  source 1..75: mol_type = other DNA
tgacagcgaagaaaataaattcgatcccgatcaatacagcaaaatcggttttgacacgactgtaatcctggaaac

SEQ ID NO: 633206 - DNA, 75 bp, synthetic construct
  source 1..75: mol_type = other DNA
atgaagttctacaagaactggatgagttagattctttattaattatagatctcgggggcaccacattagatattt

SEQ ID NO: 633207 - DNA, 75 bp, synthetic construct
  source 1..75: mol_type = other DNA
tgtggtatcggcatgctttattttcaggacttgatgcctgaaaaaataggctctgcgacaacgttatatgcaaat

SEQ ID NO: 633208 - DNA, 75 bp, synthetic construct
  source 1..75: mol_type = other DNA
gttgagaatgctttatcgcgtggaaatgttttgattaacgagtttattgatgctggggtcaagggaatatccatt

SEQ ID NO: 633209 - DNA, 75 bp, synthetic construct
  source 1..75: mol_type = other DNA
gattttgcacatcttccgtttgagccggaagccggcgcttacgccagcaagtcgcacgcccataatcacgatcag

SEQ ID NO: 633210 - DNA, 75 bp, synthetic construct
  source 1..75: mol_type = other DNA
ggcattactagcccacggcgaaaatgcccagtctggttggctggtgatggaaaaactcccgggtagcttgctgag

SEQ ID NO: 633211 - DNA, 75 bp, synthetic construct
  source 1..75: mol_type = other DNA
gacgatccgcgtgaactgattgagcagtgcgcgttttatagactaattggtgagtttgatactcatttatcacaa

SEQ ID NO: 633212 - DNA, 75 bp, synthetic construct
  source 1..75: mol_type = other DNA
atgaagatgccgaacgagaagcggctgaacgtaaggaactggaagctaaataccaacaggcagttgaatacatta

SEQ ID NO: 633213 - DNA, 75 bp, synthetic construct
  source 1..75: mol_type = other DNA
cccggacgtaaaaagcctgccagcgattgttccggcggtgatcccgcttctgctgatgatgatcccgtcaatgct

SEQ ID NO: 633214 - DNA, 75 bp, synthetic construct
  source 1..75: mol_type = other DNA
cgaagagaaaagcctcaacgtacgcgccgctgcacttcacgtgctgggtgatttgctcggatctgtgggagccat

SEQ ID NO: 633215 - DNA, 75 bp, synthetic construct
  source 1..75: mol_type = other DNA
attgcgcaaaacgccgacgtcagcgcctctaacccggtgctggaacgtattattcacctgtacaccgaccgcagc

SEQ ID NO: 633216 - DNA, 75 bp, synthetic construct
  source 1..75: mol_type = other DNA
acggtgaaaaaagcggaaataaaggtggagctgctgccgaaatatgccgcctgggcggagggcgtcttggctgcc

SEQ ID NO: 633217 - DNA, 75 bp, synthetic construct
  source 1..75: mol_type = other DNA
aataatgactgcggtagcagatgcaggttatcgtgattatcattatgatagtgaacattgtggtttctcctatcc

SEQ ID NO: 633218 - DNA, 75 bp, synthetic construct
  source 1..75: mol_type = other DNA
gatgtttccacccagagtctggcgctgtccattccccagaaggggctggtgaagatgccggagaatgtggactgg

SEQ ID NO: 633219 - DNA, 75 bp, synthetic construct
  source 1..75: mol_type = other DNA
gtctgacagaggcatggctgatgaaggccgggatttacgtcagtgcagattactttcgtgagggatatgacgcca

SEQ ID NO: 633220 - DNA, 75 bp, synthetic construct
  source 1..75: mol_type = other DNA
aggcgaaaacccgtaaggcgctgacgccgctattagaaatccgcaacctcaccaaatcctacgatggtcaacatg

SEQ ID NO: 633221 - DNA, 75 bp, synthetic construct
  source 1..75: mol_type = other DNA
cccgacggtggagcggcaattacagcggattattttctctctcgagcgagaagcccgagaaaaagcggacaaagt

SEQ ID NO: 633222 - DNA, 75 bp, synthetic construct
  source 1..75: mol_type = other DNA
tattattgttccgactcttgccgacagaggggtttatatcgcttcagaatcaactttttatcgcgtattaaaatc

SEQ ID NO: 633223 - DNA, 75 bp, synthetic construct
  source 1..75: mol_type = other DNA
gcagattgacagtaaagttgatgcttcaaacgattttatagcattcagacccctgcaaaaattaatcggaggtac

SEQ ID NO: 633224 - DNA, 75 bp, synthetic construct
  source 1..75: mol_type = other DNA
aggttatgatgtctttgatcctaccgaagttatcccagagtttgtatgcgatattggaacgaagaaaggtgaaaa

SEQ ID NO: 633225 - DNA, 75 bp, synthetic construct
  source 1..75: mol_type = other DNA
gtcagttcaacaaataatttcaaggctgattatggtgtaaatggttttcgcctgacaggtgaggttggttatcta

SEQ ID NO: 633226 - DNA, 75 bp, synthetic construct
  source 1..75: mol_type = other DNA
acaggcgctggcagaggaggatcgtaaagcgatgcggggagcattattgaatttttgttttggaatgccgcagga

SEQ ID NO: 633227 - DNA, 75 bp, synthetic construct
  source 1..75: mol_type = other DNA
atgatcgaatttgtttatccgcacacgcagcttgttgcgggtgtggatgaagtcgggcgcgggccgttggttggc

SEQ ID NO: 633228 - DNA, 75 bp, synthetic construct
  source 1..75: mol_type = other DNA
atactttcgtgccaatccggtgtgtggcgaacgattggtgcacctgacggaagttacagcaatctgggttctcac

SEQ ID NO: 633229 - DNA, 75 bp, synthetic construct
  source 1..75: mol_type = other DNA
cggacaaccagtggatacgtgccgtcaataacaaggggatcacaaccggtggtgaaatcaaaggaggaaaagtca

SEQ ID NO: 633230 - DNA, 75 bp, synthetic construct
  source 1..75: mol_type = other DNA
atccgaattcgctaactattattgaactaggagtatttttctcttatcgaaaaactcatgaatcgacttccaatg

SEQ ID NO: 633231 - DNA, 75 bp, synthetic construct
  source 1..75: mol_type = other DNA
cgctcattttatgacaacgaaggtattcgaaagttcaggttttgaaaaacgtctgcctgaccagcgcctgatgca

SEQ ID NO: 633232 - DNA, 75 bp, synthetic construct
  source 1..75: mol_type = other DNA
caggatcaaagaggtggtaatacacaaatacgtggtactttaccttccttcagaattccagaaaacgcccagccg

SEQ ID NO: 633233 - DNA, 75 bp, synthetic construct
  source 1..75: mol_type = other DNA
ctcaaacggctttgccgtctgtgacggcaaagcaggctatggtgcggcaggattcagagcgtacagaggtaaacc

SEQ ID NO: 633234 - DNA, 75 bp, synthetic construct
  source 1..75: mol_type = other DNA
ttcgggcagaaagaggcggatgtgatgcatgttaaaggtgatacatccgggagttcaggtatagttgtcacgaca

SEQ ID NO: 633235 - DNA, 75 bp, synthetic construct
  source 1..75: mol_type = other DNA
cgcagcatatgacagggatagataataaagggatgatttatctttctgacggaagtgcttcatcagatgtgtatc

SEQ ID NO: 633236 - DNA, 75 bp, synthetic construct
  source 1..75: mol_type = other DNA
ccggtatcagcagatctaccgttttcgtggcgcggatgatgccctgtctcatccgtctctgtccggtgccgaccg

SEQ ID NO: 633237 - DNA, 75 bp, synthetic construct
  source 1..75: mol_type = other DNA
acccaaacaaacctgacattaaatgataagtcgtcagtaaatgtgagcggcgagatgtcagtggcccagggaagt

SEQ ID NO: 633238 - DNA, 75 bp, synthetic construct
  source 1..75: mol_type = other DNA
tattcacatatcgggataatgggcgggatggggagtgccgctaacaaaacaacgtcaacaaataataaaagagct

SEQ ID NO: 633239 - DNA, 75 bp, synthetic construct
  source 1..75: mol_type = other DNA
tttatcatgtatttcaacaaaatatcagtgatggactaaatgagtcagaacgtcaggggctgtggacttattcgt

SEQ ID NO: 633240 - DNA, 75 bp, synthetic construct
  source 1..75: mol_type = other DNA
gtaacacacgccaattcccaatacacagtcacctgattgagctgggcttccttgatttcgtgcagtccaacacca

SEQ ID NO: 633241 - DNA, 75 bp, synthetic construct
  source 1..75: mol_type = other DNA
aaaggagaagcccgtaatgctctggcccgtgctgtattcatgcatcgattgggggagattagagatcggaaaccg

SEQ ID NO: 633242 - DNA, 75 bp, synthetic construct
  source 1..75: mol_type = other DNA
tgacgttatttcttatgaggttgtttttattatttatcttattgattttatatgcattttgtcgttctgtgaagt

SEQ ID NO: 633243 - DNA, 75 bp, synthetic construct
  source 1..75: mol_type = other DNA
atgtccattctgcgggagctcaaaaaccgctactttagatcattatcttcctcaagctgattatcctgagtggat

SEQ ID NO: 633244 - DNA, 75 bp, synthetic construct
  source 1..75: mol_type = other DNA
ttaaaggagaggttgttgaggctgcatgcgctgtgaatatgaactcagcagaccagacagttcaattggggcaag

SEQ ID NO: 633245 - DNA, 75 bp, synthetic construct
  source 1..75: mol_type = other DNA
gttacccaaaacagaatggacttgccaaagcgctgagagagattggccgcattgagcggacactatttatgctgg

SEQ ID NO: 633246 - DNA, 75 bp, synthetic construct
  source 1..75: mol_type = other DNA
ttccttatggaacacagtttacatggaaagagctgttgatgctctgaagcgtaagggcatgaaaataaatgctca

SEQ ID NO: 633247 - DNA, 75 bp, synthetic construct
  source 1..75: mol_type = other DNA
atgcggattctacaaagacaaacaagaatataatgagggtgacctgttaaaagctgatgaaatggatcctgaaga

SEQ ID NO: 633248 - DNA, 75 bp, synthetic construct
  source 1..75: mol_type = other DNA
cagggccttccgttcttaataaatttgactataggagggatgattggaattccctatcatcaaatgataaaaaag

SEQ ID NO: 633249 - DNA, 75 bp, synthetic construct
  source 1..75: mol_type = other DNA
atcaggaacttgttcgcaccttccctaatattgagaggccaagcagattttgctcttttttttgcgcaatttata

SEQ ID NO: 633250 - DNA, 75 bp, synthetic construct
  source 1..75: mol_type = other DNA
cggggaaatattaaacatccaaattaaagatatcaattttgataacagcattctttccattattagaaggccaga

SEQ ID NO: 633251 - DNA, 75 bp, synthetic construct
  source 1..75: mol_type = other DNA
tatcaagcactgatagcgtcaaccggacaggcgcaggttgataaagagcaggtaaaaaagccgcacggcagaata

SEQ ID NO: 633252 - DNA, 75 bp, synthetic construct
  source 1..75: mol_type = other DNA
gttaagattgctcaagacttaattgatagtggtgaggatgcagaagaagttcggcaatatgttcgggatgagtat

SEQ ID NO: 633253 - DNA, 75 bp, synthetic construct
  source 1..75: mol_type = other DNA
gaaagaggagttaacttatctgtcagaataaagaaaatagatataatgcaaaaaccatattttgttattcgacta

SEQ ID NO: 633254 - DNA, 75 bp, synthetic construct
  source 1..75: mol_type = other DNA
agaacggcagccacagcgacttcagctacgatgcgctggaccggctggtacagcagggcggctttgacgggcgga

SEQ ID NO: 633255 - DNA, 75 bp, synthetic construct
  source 1..75: mol_type = other DNA
aaggcgcttggcgagctgcgtcaggacggcacctacgacaagatggcgaaaaagtatttcgactttaatgtctac

SEQ ID NO: 633256 - DNA, 75 bp, synthetic construct
  source 1..75: mol_type = other DNA
atgagttatccctggagcgtgagcgccagctggaaatacaggaacggacacaggatggcccttcgctgggatggt

SEQ ID NO: 633257 - DNA, 75 bp, synthetic construct
  source 1..75: mol_type = other DNA
tgggcgaaaaatttgccgatagtatcggtatacattatcggtcaatgattgaagaactctccaattactcacttt

SEQ ID NO: 633258 - DNA, 75 bp, synthetic construct
  source 1..75: mol_type = other DNA
accaggtgaccggcgataccgacgatgaccgcctggcacacagccccgcagaccggatgtatacagggaaagatc

SEQ ID NO: 633259 - DNA, 75 bp, synthetic construct
  source 1..75: mol_type = other DNA
gggaagcttcacgccgctcatccgggtcgagacagagaacggcgagcgggaaaaagcgcagcggcgcagcctggc

SEQ ID NO: 633260 - DNA, 75 bp, synthetic construct
  source 1..75: mol_type = other DNA
tatctactctaatatatcttgtttcaagaatcgaaaataatgaaaagataatagagtcaatttacatatcatcta

SEQ ID NO: 633261 - DNA, 75 bp, synthetic construct
  source 1..75: mol_type = other DNA
cttgagagaggaattaatatatcagtaaggttgcaaaagaagaaatcctcaggaaaaccgtatatcgcaatcaga

SEQ ID NO: 633262 - DNA, 75 bp, synthetic construct
  source 1..75: mol_type = other DNA
agttcaatgtatcagaaataaccatcagaaaaagactcgaaattgagaatatatcgttcaatcaaatactgcttc

SEQ ID NO: 633263 - DNA, 75 bp, synthetic construct
  source 1..75: mol_type = other DNA
ctcagtggttctatcgtttccataatatgatcagtaagccagctatagaggaaaatgttggcgattttcgtttga

SEQ ID NO: 633264 - DNA, 75 bp, synthetic construct
  source 1..75: mol_type = other DNA
ataaagcattattggatttgcttgaaaatgcaaggaatcataatgagccatcctttatatctactctaatatatc

SEQ ID NO: 633265 - DNA, 75 bp, synthetic construct
  source 1..75: mol_type = other DNA
attcagattaagtgaaaatattcttagacatttaaaaagtacactaatgataatatatgggatatcaaatataga

SEQ ID NO: 633266 - DNA, 75 bp, synthetic construct
  source 1..75: mol_type = other DNA
gagcgaggcgatgttcggggattcccaatacgaggtcgccaacatcttcttctggaggccgtggttggcttgtat

SEQ ID NO: 633267 - DNA, 75 bp, synthetic construct
  source 1..75: mol_type = other DNA
attcaattactgttttaaatacagatattgacgcagttagtgaaaataattgcagtttttttgtgggcttatgga

SEQ ID NO: 633268 - DNA, 75 bp, synthetic construct
  source 1..75: mol_type = other DNA
cagggaaagatcatcagaagtacactttttgtactaagtaattcgcattttatgtttaaaaatttagatattcct

SEQ ID NO: 633269 - DNA, 75 bp, synthetic construct
  source 1..75: mol_type = other DNA
gaaaatactactggcccaatactatggtatgggagatatgtggattttggcgattttacagatgtactttcccga

SEQ ID NO: 633270 - DNA, 75 bp, synthetic construct
  source 1..75: mol_type = other DNA
cgtgcagtcggtcaatcacaatctaatatatgtaatagggactttgctgcctgttttgttcttttttgctctgag

SEQ ID NO: 633271 - DNA, 75 bp, synthetic construct
  source 1..75: mol_type = other DNA
caggatgaattacagaatgattacagtgctgggttaatttctggttttgctgcacaggctactgctgcgatggat

SEQ ID NO: 633272 - DNA, 75 bp, synthetic construct
  source 1..75: mol_type = other DNA
gggcaaaatctcttaaaatgtccacccaggatttgttatcctggcaatatgctgctgaacaagccggtttaaccg

SEQ ID NO: 633273 - DNA, 75 bp, synthetic construct
  source 1..75: mol_type = other DNA
ttcctgcaaaacgtttctttgtagaaatgttaaccagggatatcgaactccaagatgctattcttgacttattag

SEQ ID NO: 633274 - DNA, 75 bp, synthetic construct
  source 1..75: mol_type = other DNA
gcgccggaatatgtgttgattgatggtaaccgctgcccgaaattaccgatgccttcgatggctgtggtgaaaggc

SEQ ID NO: 633275 - DNA, 75 bp, synthetic construct
  source 1..75: mol_type = other DNA
cttgatgggaatagtgccaacaattacatttctgatattctgcctgttattgatgcactacccaatccaccagtg

SEQ ID NO: 633276 - DNA, 75 bp, synthetic construct
  source 1..75: mol_type = other DNA
aattgcaggacaagagattgcagaatcagcaagctatggagcaggcaaagcgagataaggctgatgcgtacaact

SEQ ID NO: 633277 - DNA, 75 bp, synthetic construct
  source 1..75: mol_type = other DNA
ctctgcttgggccgtccggttccggcaaatccacccttttacgtcacttaagcggcctgattgtcggcgataaaa

SEQ ID NO: 633278 - DNA, 75 bp, synthetic construct
  source 1..75: mol_type = other DNA
cctggttttaaccggttgcttgctcgcctgaaatgtggtgatcaattgattgtgacaaaactgggtaatgactcc

SEQ ID NO: 633279 - DNA, 75 bp, synthetic construct
  source 1..75: mol_type = other DNA
aaagccaaagggatttcagattacgaaggcagcagtcgcgacaaacaaattttcagtggacacaaaacagaaaat

SEQ ID NO: 633280 - DNA, 75 bp, synthetic construct
  source 1..75: mol_type = other DNA
tcgggtaaatccacgctggcaaaaatgctggcgggaatgatagagcctaccagcggcgagttattgattgacgat

SEQ ID NO: 633281 - DNA, 75 bp, synthetic construct
  source 1..75: mol_type = other DNA
cgaagtggtgaaacactacagacgcggggaatctgtaatcaaggaagaatgggtgaaggaactatgtcagcattg

SEQ ID NO: 633282 - DNA, 75 bp, synthetic construct
  source 1..75: mol_type = other DNA
gtctgtatgcagtttctattctggtggttttcctctgccttgcagcactgtacgaaagctggtcagtcccgttct

SEQ ID NO: 633283 - DNA, 75 bp, synthetic construct
  source 1..75: mol_type = other DNA
atgaaattcagggggaaaatgcgactggctttagttccggcgatgcaatgacaaaaatggagaaactggcaaaca

SEQ ID NO: 633284 - DNA, 75 bp, synthetic construct
  source 1..75: mol_type = other DNA
tggtcgagagccgctacctctacgacccgctgggacggcgaatggcgaaacgggtatggcggcgggagcgtgacc

SEQ ID NO: 633285 - DNA, 75 bp, synthetic construct
  source 1..75: mol_type = other DNA
ggtaagtcctgctccggctggctgtgggcttacgtcagcggagaaagaagcggtccgccggtcgtctgttttgac

SEQ ID NO: 633286 - DNA, 75 bp, synthetic construct
  source 1..75: mol_type = other DNA
ccactcatcagagttgaaaccgccaccggtgaactggccagaacgcagcgccgcagcctggcggatgcgcttcag

SEQ ID NO: 633287 - DNA, 75 bp, synthetic construct
  source 1..75: mol_type = other DNA
ttagcaattacacaaaccatattgctgacacaccactagatgcacctttcagtaagtatgaatggaagaagaaat

SEQ ID NO: 633288 - DNA, 75 bp, synthetic construct
  source 1..75: mol_type = other DNA
catgaattgtttctccataccagtttcaataatgacgagaaaaccgtggtgtggcaggcaattaatgtagagcac

SEQ ID NO: 633289 - DNA, 75 bp, synthetic construct
  source 1..75: mol_type = other DNA
aaatacatctttatcactgtgaccaccggggcctgccgctggcgcttatcagtgaagacggcaatacggcgtgga

SEQ ID NO: 633290 - DNA, 75 bp, synthetic construct
  source 1..75: mol_type = other DNA
gggctggtaatgccaccgtcagtgatgttgtgacggcagtgaatggtgcggcgggggccggggtgattgcctccg

SEQ ID NO: 633291 - DNA, 75 bp, synthetic construct
  source 1..75: mol_type = other DNA
ctgttttgactgggatccgtttgtttctctgctggggcatgatatcgacatggtgcgtcaggatgtgcccagcca

SEQ ID NO: 633292 - DNA, 75 bp, synthetic construct
  source 1..75: mol_type = other DNA
gtggagactgaagataaagaaatcaataacttgcctgtaaatggcaacaggttagcgagaaaaagggccaaatat

SEQ ID NO: 633293 - DNA, 75 bp, synthetic construct
  source 1..75: mol_type = other DNA
gacagtttggctatcaccggcgcggcaggagccagggggatttatgccatgaccaacagccagatcgacctcacg

SEQ ID NO: 633294 - DNA, 75 bp, synthetic construct
  source 1..75: mol_type = other DNA
ttgcccaacacaaagggtatccaaccgcttttcatctggaaaaactggctgaacacggcgcgaccgaacaccatc

SEQ ID NO: 633295 - DNA, 75 bp, synthetic construct
  source 1..75: mol_type = other DNA
gaaaaacgccgtctggcgctctgtgaagagatcaaagagaaggcgttaagctggagtctgggtcgcgcggaacct

SEQ ID NO: 633296 - DNA, 75 bp, synthetic construct
  source 1..75: mol_type = other DNA
ggattcgctctcggcaatattaccgggcgacatcgccgaagatgacatcacagcggtactctgttttgtgattga

SEQ ID NO: 633297 - DNA, 75 bp, synthetic construct
  source 1..75: mol_type = other DNA
tggcagcctgaatttgatctttacgataagggccgtactgtaatccaaatgaaagattggtacgtgcttaaagat

SEQ ID NO: 633298 - DNA, 75 bp, synthetic construct
  source 1..75: mol_type = other DNA
aaaaaacagattgcggcggtgattgccgaatggaccggcgtaccgcttaaccgcctgtcacagaatgagatgtcg

SEQ ID NO: 633299 - DNA, 75 bp, synthetic construct
  source 1..75: mol_type = other DNA
cgctggatgaactggaggccgcctggcatcagcaacagacgctggtgcaggagattatcgccctgcgccagcagt

SEQ ID NO: 633300 - DNA, 75 bp, synthetic construct
  source 1..75: mol_type = other DNA
atgcagatctgcaaatccatcactgcgtcagcagactgtgaggagatcattaagctcatctatcttcgtcgctac

SEQ ID NO: 633301 - DNA, 75 bp, synthetic construct
  source 1..75: mol_type = other DNA
acgcaaaaaaatgggcgatcatgttgagcaacagctacaggttagccagcagaataaccagcttaccctgaaaac

SEQ ID NO: 633302 - DNA, 75 bp, synthetic construct
  source 1..75: mol_type = other DNA
gtaacgaaattactactcccactttattgtaaacaagacatttttatcttttatattcaatggcttattttcctg

SEQ ID NO: 633303 - DNA, 75 bp, synthetic construct
  source 1..75: mol_type = other DNA
accggcgagacaaaagccagcgccgaagcggctgcaaaaagcgagcagaacgcaaaaagtcacgccgataatgca

SEQ ID NO: 633304 - DNA, 75 bp, synthetic construct
  source 1..75: mol_type = other DNA
atgccgcagcacgtcgtgcgcaagaacgtgctgcggctggatgctattttttccctgaagcggaaaacattacta

SEQ ID NO: 633305 - DNA, 75 bp, synthetic construct
  source 1..75: mol_type = other DNA
agtccgggcaccaaattcatatcaacggacctccacggaggtccgtttttcgtttcagaacgccacaatttaagc

SEQ ID NO: 633306 - DNA, 75 bp, synthetic construct
  source 1..75: mol_type = other DNA
atttgcaaactcatccatcggtgcgcctggcgctcgaagaggggcggatcgccctgcacggctgggtctacgaca

SEQ ID NO: 633307 - DNA, 75 bp, synthetic construct
  source 1..75: mol_type = other DNA
tatctgaaaaacatcttccgatgactcacgatgagcttgtaacgtttagtttaactcgctgcccatttattcatc

SEQ ID NO: 633308 - DNA, 75 bp, synthetic construct
  source 1..75: mol_type = other DNA
tgaaactattctggcgaccaaaagctattgaattagaagatgatggggtaatgtcttacgaaaaagttgaaatca

SEQ ID NO: 633309 - DNA, 75 bp, synthetic construct
  source 1..75: mol_type = other DNA
caggtgacaggccaaccagtctagcgcaggctatagccgaaataggacgcgccgataaaactatccatatgctga

SEQ ID NO: 633310 - DNA, 75 bp, synthetic construct
  source 1..75: mol_type = other DNA
attccaattcggaagcagaagtcaaagtcattattctctacggcattaacggccatatttattataaccgttact

SEQ ID NO: 633311 - DNA, 75 bp, synthetic construct
  source 1..75: mol_type = other DNA
ttttctcaggtgggtaaaaacggcaaaacccggtcgttatactgtatttgcggacacaaatgtggtggtaccagg

SEQ ID NO: 633312 - DNA, 75 bp, synthetic construct
  source 1..75: mol_type = other DNA
taacgacgagtcagacacaacgcgtaaattcaaaacgttgctgtgttttaaccagtattacgaaggcgaacacaa

SEQ ID NO: 633313 - DNA, 75 bp, synthetic construct
  source 1..75: mol_type = other DNA
cccgaccggttattatctgacaatcgcctacctgggccgaaatgagcaaggcgttctcccgggtttcaaaactgt

SEQ ID NO: 633314 - DNA, 75 bp, synthetic construct
  source 1..75: mol_type = other DNA
tcttctggtcgccctgccaccgatacaacgtctggaaccgaaagcaacaacgcaggtacggatagtaaagcaagc

SEQ ID NO: 633315 - DNA, 75 bp, synthetic construct
  source 1..75: mol_type = other DNA
gttacaggttagccagcagggcaaccaactgacactgaaaaatcctaccgcgtattatctgaccattgcctatct

SEQ ID NO: 633316 - DNA, 75 bp, synthetic construct
  source 1..75: mol_type = other DNA
atggaaactgaaaggtaaaaccaatatgggtgagccaggagaacagatgcggcctgacgatatacccgcaacaga

SEQ ID NO: 633317 - DNA, 75 bp, synthetic construct
  source 1..75: mol_type = other DNA
catcagcgggtctgtgatatgcgcgccatgtattctctgttgcccggcagaaccctccggcagttccggcggctg

SEQ ID NO: 633318 - DNA, 75 bp, synthetic construct
  source 1..75: mol_type = other DNA
gcagtaacagcaacgtcacgcggcttgtgcgcagtgaactgccgtatgaagggctgcttactgtactggaactgg

SEQ ID NO: 633319 - DNA, 75 bp, synthetic construct
  source 1..75: mol_type = other DNA
tcgcgaccatgacaagttaaatcgtggaatgcatgttgaaatagccagtaatgttatcaatgacctgcaattctt

SEQ ID NO: 633320 - DNA, 75 bp, synthetic construct
  source 1..75: mol_type = other DNA
aatatggcatctttttggcggtaaaaataaaaagagtctaaagaaaattctttctatagctggattagacgccaa

SEQ ID NO: 633321 - DNA, 75 bp, synthetic construct
  source 1..75: mol_type = other DNA
gtcgtcactcactcattcagaatcggttggaggtaacgcggaaaggattatgctggcaaaaaaactacctttaaa

SEQ ID NO: 633322 - DNA, 75 bp, synthetic construct
  source 1..75: mol_type = other DNA
ctttttctgtcattcaggtcgatcttgaccattttaaagcgattaatgaccgctttggtcatcaggcgggcgacc

SEQ ID NO: 633323 - DNA, 75 bp, synthetic construct
  source 1..75: mol_type = other DNA
cgcatcaggcatcggctgtcgaatacaatcaacgggcgttttttatttcacctggctacgggcaaacaggttgtc

SEQ ID NO: 633324 - DNA, 75 bp, synthetic construct
  source 1..75: mol_type = other DNA
taactttactggaagatgcattaacattattgacggagcttgagtataatttacttttcgggaagtgttttatta

SEQ ID NO: 633325 - DNA, 75 bp, synthetic construct
  source 1..75: mol_type = other DNA
actgtgaacatgacgaataatgccaaagtgtttccgcttagcgcacggttggtacgcgacagtggcaaagcagat

SEQ ID NO: 633326 - DNA, 75 bp, synthetic construct
  source 1..75: mol_type = other DNA
accagagctggctgaaaaaactcgcgcgccgcctggggcctggtcatgtcgttaatctctgctttattgtggtgt

SEQ ID NO: 633327 - DNA, 75 bp, synthetic construct
  source 1..75: mol_type = other DNA
ccgtgcgttcaatgcagcaatttttacaaaatgctatcgataaaaatctcgatggcgaatatcaactctatgaca

SEQ ID NO: 633328 - DNA, 75 bp, synthetic construct
  source 1..75: mol_type = other DNA
tcctggctgaccgggtgagtgaggaaagccgccgctggctggcatcgtgcggcctgacggtgaagcagatgcaaa

SEQ ID NO: 633329 - DNA, 75 bp, synthetic construct
  source 1..75: mol_type = other DNA
tcacgcttaacggtactaactaccagaccacgatacaggcggacggcagctggagcttcacgctgcctgccagcg

SEQ ID NO: 633330 - DNA, 75 bp, synthetic construct
  source 1..75: mol_type = other DNA
tcggttagcaccatcagcggcgataaccttattaacgccgccgaagcgggcagtgcgctgaccctgagcggcacc

SEQ ID NO: 633331 - DNA, 75 bp, synthetic construct
  source 1..75: mol_type = other DNA
gtgttgcttaacggcaaaggctacagcgccaccattcagagcaacgggagctggagcgtgaacgtgcctgcggcg

SEQ ID NO: 633332 - DNA, 75 bp, synthetic construct
  source 1..75: mol_type = other DNA
ggcaacggacgatataattaacgccgccgaagcgggcgtggaccagaccatcagcgggcaggtgacgggtgcggc

SEQ ID NO: 633333 - DNA, 75 bp, synthetic construct
  source 1..75: mol_type = other DNA
taccgccgaagcggggcagacggtgaccgtcacccttaatggcgtgacttacaccggcaccgtccaggcggacgg

SEQ ID NO: 633334 - DNA, 75 bp, synthetic construct
  source 1..75: mol_type = other DNA
gcgcaggccggaaacatcggtgactttgtcaaagtcacccagagcggcagcgacaccatcgtgcagatcgaccgc

SEQ ID NO: 633335 - DNA, 75 bp, synthetic construct
  source 1..75: mol_type = other DNA
ccagcgacgacgtgattaacgccgccgaaaaaggcaccgacctgaccctttctggcagcaccagcgggattgaaa

SEQ ID NO: 633336 - DNA, 75 bp, synthetic construct
  source 1..75: mol_type = other DNA
ataaacttaattgatagcaaactcttttgtacgtggctgacaaatacattcctcgaaatggttatatgtaccggc

SEQ ID NO: 633337 - DNA, 75 bp, synthetic construct
  source 1..75: mol_type = other DNA
tgtttaatacccgtctctatcgggttaatttcgatgaggctaacgtgcagggaatgggcattaccattctccgtg

SEQ ID NO: 633338 - DNA, 75 bp, synthetic construct
  source 1..75: mol_type = other DNA
atcaccattaatccggtggcgacggacgatactatcaacgcttcagaggcaggcagcgcgcaaactatcagcggc

SEQ ID NO: 633339 - DNA, 75 bp, synthetic construct
  source 1..75: mol_type = other DNA
acgcagtggacttacaccgacagccgcacgctgaccgacggcagctacgtttatcaggtgcgggtgctggatctg

SEQ ID NO: 633340 - DNA, 75 bp, synthetic construct
  source 1..75: mol_type = other DNA
aaaaggatccgatctggcgctttccggcaccagcgatcagcctgcgggtacggcgatcaccgtcacgctgaacgg

SEQ ID NO: 633341 - DNA, 75 bp, synthetic construct
  source 1..75: mol_type = other DNA
ggaaattgaaaagaaatttccttttctcagtgagtcaggtaggcatgtggctaataatatcccaggggaaaataa

SEQ ID NO: 633342 - DNA, 75 bp, synthetic construct
  source 1..75: mol_type = other DNA
actgaagatatcgcgaaactggtggggcaaaaactggtagagcgtgctaagccgggtgagtttgtgcagggcatt

SEQ ID NO: 633343 - DNA, 75 bp, synthetic construct
  source 1..75: mol_type = other DNA
gacgaactcagtcacccgggttgttcatgggataaaaactttgcctgtctgcaaaaaaaacggctcttcaataaa

SEQ ID NO: 633344 - DNA, 75 bp, synthetic construct
  source 1..75: mol_type = other DNA
cgtagcgcgaattctctgacgctgattaacccgacaccctattacctgacggtaacagagttgaatgccggagcc

SEQ ID NO: 633345 - DNA, 75 bp, synthetic construct
  source 1..75: mol_type = other DNA
agcgtctgaacttctgaagctggaaatcactgccgaagtgcaggaaatcgttcgccaaaaacgtcagcgtaatct

SEQ ID NO: 633346 - DNA, 75 bp, synthetic construct
  source 1..75: mol_type = other DNA
cctccgggctacgttggctacggtgaaggcggcgtactgaccgaagcgattcgccagaaaccctactcggtagta

SEQ ID NO: 633347 - DNA, 75 bp, synthetic construct
  source 1..75: mol_type = other DNA
gagcatctgttgtaattaatggtgataagcttattataaataaagataatccagctgttgataatggtgagttgg

SEQ ID NO: 633348 - DNA, 75 bp, synthetic construct
  source 1..75: mol_type = other DNA
catttcgccacaaagggcttgaacactttttcaagacaggttcaactgcaggcattcgggccaaacatgcggtta

SEQ ID NO: 633349 - DNA, 75 bp, synthetic construct
  source 1..75: mol_type = other DNA
ctttacgatgctggctacatagtgtcagtcattaatcctgcgctgggtaaagctttcgctcagagtgaaagactg

SEQ ID NO: 633350 - DNA, 75 bp, synthetic construct
  source 1..75: mol_type = other DNA
agatgcgcaattattttttgctaattaaaagttttgtaaacattacagaatatcccctttccctatatggtaaaa

SEQ ID NO: 633351 - DNA, 75 bp, synthetic construct
  source 1..75: mol_type = other DNA
aagtaaatttgatagtactgcagatgctgcgttagatgctttgaaagaaacgcagaatagatctctatgtaatga

SEQ ID NO: 633352 - DNA, 75 bp, synthetic construct
  source 1..75: mol_type = other DNA
gtttcctgggttgtatcgtttattccgcgccgcccggagcggagcgaaacggcacaaccatcggatcaggctttg

SEQ ID NO: 633353 - DNA, 75 bp, synthetic construct
  source 1..75: mol_type = other DNA
ttgaggttgtctctgcgatatatagcaataaagaattactttttaaagaatgtaattcttttgaagagacatttt

SEQ ID NO: 633354 - DNA, 75 bp, synthetic construct
  source 1..75: mol_type = other DNA
cgacagtagcggcctcgctgctacctacacggcagcgttcaaacacaatgtcgataccctcgctgctggcatgaa

SEQ ID NO: 633355 - DNA, 75 bp, synthetic construct
  source 1..75: mol_type = other DNA
atggtttatcactttgatttgtaccgccttgccgatcccgaggagctggagtttatggggatccgcgattatttt

SEQ ID NO: 633356 - DNA, 75 bp, synthetic construct
  source 1..75: mol_type = other DNA
cattcatgataattacgcgttatgcctgcaattctggctgaatggcgttgatcgtcaggaattactgcgtttaat

SEQ ID NO: 633357 - DNA, 75 bp, synthetic construct
  source 1..75: mol_type = other DNA
atgatgagaaaatatttcccgcttgaggcgagcgagcgtttatttgttgcagttgaagaagatgatgtcgttgat

SEQ ID NO: 633358 - DNA, 75 bp, synthetic construct
  source 1..75: mol_type = other DNA
ctgaactaaaacgagaaaaaaaatcggaaattgaaaagaaatttccttttctcagtgagtcaggtaggcatgtgg

SEQ ID NO: 633359 - DNA, 75 bp, synthetic construct
  source 1..75: mol_type = other DNA
atcgcagcaacgggctgggcggtcacattgaaaccgggatgcgatttaccgatggtaactggaacctgacgccgt

SEQ ID NO: 633360 - DNA, 75 bp, synthetic construct
  source 1..75: mol_type = other DNA
atgtcaccaccgatgcgggggctgggtttgagcagacgctgaccggaatgacagtggggatcgacagtcgtaatg

SEQ ID NO: 633361 - DNA, 75 bp, synthetic construct
  source 1..75: mol_type = other DNA
gtggtcatcgcctgcgccatcgcgatgcagccaaagctattaattcttgatgaagcctttagccgcctgacgccg

SEQ ID NO: 633362 - DNA, 75 bp, synthetic construct
  source 1..75: mol_type = other DNA
aatgtctgatttactgagaagagcatgttatcttccttcaaaaagaaagtttttgtctgatggtgagaaccagtt

SEQ ID NO: 633363 - DNA, 75 bp, synthetic construct
  source 1..75: mol_type = other DNA
aagcattagagcttttagattatgtatcagacataaccactgtcgatggaaaaattttagctattatgggactga

SEQ ID NO: 633364 - DNA, 75 bp, synthetic construct
  source 1..75: mol_type = other DNA
agcagaatgtacggattatttaccccagtagacctggataaacaatactcattccgcacgctgaacggaaatatt

SEQ ID NO: 633365 - DNA, 75 bp, synthetic construct
  source 1..75: mol_type = other DNA
gagccgataccagcattgccgggaattgagcaacgtaagaataagattgttgcaatggatgatactggaaatccg

SEQ ID NO: 633366 - DNA, 75 bp, synthetic construct
  source 1..75: mol_type = other DNA
aaatcacaagaaaaattgaagtgttactgaatcagtttccagtaaacccggtaaatgaaaatgatgcttctgctc

SEQ ID NO: 633367 - DNA, 75 bp, synthetic construct
  source 1..75: mol_type = other DNA
accatgccctgacttttctgttgctggcaaaaacaaaggcaaagatggtgaaaatggcaaattatcacaaagtta

SEQ ID NO: 633368 - DNA, 75 bp, synthetic construct
  source 1..75: mol_type = other DNA
aaaccaagaagaattactgttgccgaagcattagcaattcagtctttaccaaaagaatttgaattacctgcttat

SEQ ID NO: 633369 - DNA, 75 bp, synthetic construct
  source 1..75: mol_type = other DNA
taacagcaaaaagcgaggtcgctccgtcaattatcaaagaaaatctctcattacacttaactcatacggtgaaat

SEQ ID NO: 633370 - DNA, 75 bp, synthetic construct
  source 1..75: mol_type = other DNA
tgcttttttccaccttgctcacctggcgtgaagtggtggtgctggaagatgcctatatctccagccagcgtaatc

SEQ ID NO: 633371 - DNA, 75 bp, synthetic construct
  source 1..75: mol_type = other DNA
cgtcttcactctgtgctgcgcattccgcagaatattatccgcttgcaaccgttgcatttttcttacgaaaaaggc

SEQ ID NO: 633372 - DNA, 75 bp, synthetic construct
  source 1..75: mol_type = other DNA
tgaatttttttcaagtagcgataaaaatcttgtaagaagtaaagataataatcttgaagcattttatctcgcaac

SEQ ID NO: 633373 - DNA, 75 bp, synthetic construct
  source 1..75: mol_type = other DNA
agtcgctatgttagctgggaacggctggatcattttgacggggtattagtgcgaatccatacgcttagcgaaggt

SEQ ID NO: 633374 - DNA, 75 bp, synthetic construct
  source 1..75: mol_type = other DNA
tggtattgaaccaccagaatccttactaacctcagaacaggttgcggacatgactttatcaattatgtcctctga

SEQ ID NO: 633375 - DNA, 75 bp, synthetic construct
  source 1..75: mol_type = other DNA
cggggcgaatcgtcataccggcctgcggctcgccacgcttgatttgccggaagggaacgccatgcgtgcgcccgg

SEQ ID NO: 633376 - DNA, 75 bp, synthetic construct
  source 1..75: mol_type = other DNA
tactgcaccgtcaattacttatgatcagattatcagtacttttgataatgagaaagcacgtgctttcaaggatgc

SEQ ID NO: 633377 - DNA, 75 bp, synthetic construct
  source 1..75: mol_type = other DNA
aataataaaggagaatatatttttatcagaaatagtgtcccgggattgagttcagtatgcataccgtatcatgat

SEQ ID NO: 633378 - DNA, 75 bp, synthetic construct
  source 1..75: mol_type = other DNA
tggggaatatgttaaatgatttcgctggcgtggatcagcaacgagttatgcattgtcgtaaagcatttagtgatg

SEQ ID NO: 633379 - DNA, 75 bp, synthetic construct
  source 1..75: mol_type = other DNA
tgttcgcaccttccctaagtcaccggcggcttgcctgccacacattgaacattacagaccaattagcactttgtc

SEQ ID NO: 633380 - DNA, 75 bp, synthetic construct
  source 1..75: mol_type = other DNA
cgctgtggctcagcaacggtctgtgggtaacgcctttttacctgattatgatcggcgtatcgtcggctattgcct

SEQ ID NO: 633381 - DNA, 75 bp, synthetic construct
  source 1..75: mol_type = other DNA
atgaacgttttaagacacgttaatgtgattaacatgggagtgtgcattctaatttgggttattggatgtgtaaat

SEQ ID NO: 633382 - DNA, 75 bp, synthetic construct
  source 1..75: mol_type = other DNA
gataatgtccagtgaaacgactgcatttcaggaacgctatgattttaatatcgatgaatggcgggcaaaattcag

SEQ ID NO: 633383 - DNA, 75 bp, synthetic construct
  source 1..75: mol_type = other DNA
gcagatgtgtgttgatacttattttgcgcagagaaaaccgcttcaggcattaaccctgttacataattatgcctg

SEQ ID NO: 633384 - DNA, 75 bp, synthetic construct
  source 1..75: mol_type = other DNA
tgacgcactgccactgttacagcgagcaacagaacaattgcctgaagtcagcgaatattggttagcactggcaat

SEQ ID NO: 633385 - DNA, 75 bp, synthetic construct
  source 1..75: mol_type = other DNA
gctttcagttgccttcttcaactcgaatttaatgcgaataacttttgaccctgttctaatagggagcaactttta

SEQ ID NO: 633386 - DNA, 75 bp, synthetic construct
  source 1..75: mol_type = other DNA
attgcatatgctattaacattcctgactatgagctggcagccgatgtatataatattaacgtgacgtcaccttcc

SEQ ID NO: 633387 - DNA, 75 bp, synthetic construct
  source 1..75: mol_type = other DNA
ggtgttcatcagtatggtccagctgaacatttcactcacattatatctgacaaaccgtctccaaaagataagtat

SEQ ID NO: 633388 - DNA, 75 bp, synthetic construct
  source 1..75: mol_type = other DNA
aaaaagactggcttcgctcggtggtgcatcacctgaaatgcagataattcctcgccgccgcgaggagccatccgc

SEQ ID NO: 633389 - DNA, 75 bp, synthetic construct
  source 1..75: mol_type = other DNA
gcggggaaaactgactgctgaaacctgtgaacgcacattgaaacgcctgatcccggtgaccgatattcacgcgct

SEQ ID NO: 633390 - DNA, 75 bp, synthetic construct
  source 1..75: mol_type = other DNA
aatattctggataaagcaagcacacaggcggttattcaatatcttggtctgagcgatgcaagtggatacgttgga

SEQ ID NO: 633391 - DNA, 75 bp, synthetic construct
  source 1..75: mol_type = other DNA
tgctatttcagcactagcgccgaaatttttacctgaaaaggttgtttggcgaattgtagagcgaatgtgtagtga

SEQ ID NO: 633392 - DNA, 75 bp, synthetic construct
  source 1..75: mol_type = other DNA
aggccagcgtcagcaatgttaacggcaacaacgccactactacccacgcttacagcgtcgatgccagcgcgccaa

SEQ ID NO: 633393 - DNA, 75 bp, synthetic construct
  source 1..75: mol_type = other DNA
acaaacggtcaccgtcacctttggcggcaaaacttacactgcaagcgtcgcggctaacggttcctggagtaccac

SEQ ID NO: 633394 - DNA, 75 bp, synthetic construct
  source 1..75: mol_type = other DNA
ggcgatgggcattaatatcgattccctgcaagccgacactgggcttagcgccagcgactttatcaccagcgtcag

SEQ ID NO: 633395 - DNA, 75 bp, synthetic construct
  source 1..75: mol_type = other DNA
gcgtgcgcaggacgttgccgggcgggtcggtggtgaggagttttgtgtgattctgccaggcgcgagtctgacgca

SEQ ID NO: 633396 - DNA, 75 bp, synthetic construct
  source 1..75: mol_type = other DNA
gcgatatggatctcttcctgcctgccagccagggaagagctaactacggctccctgttattcaacaccaacggcg

SEQ ID NO: 633397 - DNA, 75 bp, synthetic construct
  source 1..75: mol_type = other DNA
gaagccacctacagcgtcacggcgagcgtcaccaatgctcagggtaacagcagcaccgccagccataacgtgcag

SEQ ID NO: 633398 - DNA, 75 bp, synthetic construct
  source 1..75: mol_type = other DNA
cggaaacccggcctcggttaaccataatctgacggtggatacttccgttccggtcgtcaccatcaacacggtggc

SEQ ID NO: 633399 - DNA, 75 bp, synthetic construct
  source 1..75: mol_type = other DNA
aatggcacaaactatactggcacggttcaaacggacggtagctggagcgtcagtgtgccgcaagccgacgtaagc

SEQ ID NO: 633400 - DNA, 75 bp, synthetic construct
  source 1..75: mol_type = other DNA
caccacggttccggcggcggatatggcagccctgcgtgatggcgatgccagtgcacaggccagcgtcagcaatgt

SEQ ID NO: 633401 - DNA, 75 bp, synthetic construct
  source 1..75: mol_type = other DNA
ctcggcagcgccgatgtcaccgcgctggcggacggcaatgcctatgtgattaacgcctcggtgagcaacgccatt

SEQ ID NO: 633402 - DNA, 75 bp, synthetic construct
  source 1..75: mol_type = other DNA
cacccgtctggaaaatcagccggtgcagggcgaagcgtcgtctccggtaacccttccggctcaggcacttcggtc

SEQ ID NO: 633403 - DNA, 75 bp, synthetic construct
  source 1..75: mol_type = other DNA
gtgtacagctccggcaccggaacgtggctggcgaatggcgggatggacgtggttgatttccgcctctcgacggtg

SEQ ID NO: 633404 - DNA, 75 bp, synthetic construct
  source 1..75: mol_type = other DNA
gaaatcctggctgaccgggtgagtgaggaaagccgccgctggctggcatcgtgcggcctgacggtggcgcagatg

SEQ ID NO: 633405 - DNA, 75 bp, synthetic construct
  source 1..75: mol_type = other DNA
tgaggacatccccaacaaggagctgttcctgatcaacgtgggcacaccacgcgtttatgcaaaaaacgggtacat

SEQ ID NO: 633406 - DNA, 75 bp, synthetic construct
  source 1..75: mol_type = other DNA
catactgttggtattggtgcacattcacacacggttgctattggctcacacgggcactctattaccgttaatgct

SEQ ID NO: 633407 - DNA, 75 bp, synthetic construct
  source 1..75: mol_type = other DNA
gatggtgagtatcagctctatgacagtaagctgagattattgacctcttctaatcccgaccattcaacagggaat

SEQ ID NO: 633408 - DNA, 75 bp, synthetic construct
  source 1..75: mol_type = other DNA
tgctggagctcatcaacacaccagagatgcttaatggcgttaagcagcgtcacgactggtttgttgagcgtctta

SEQ ID NO: 633409 - DNA, 75 bp, synthetic construct
  source 1..75: mol_type = other DNA
aaggcggtgtggtgccagccagcaacgcatttttacaaggtctgcgtgaattgtgtgatcgccacaatgctctgt

SEQ ID NO: 633410 - DNA, 75 bp, synthetic construct
  source 1..75: mol_type = other DNA
ggtaatatgaatatatatcaaaatgttttgggtaataatgcagaagtgataatcactgtcacttacgaaatagat

SEQ ID NO: 633411 - DNA, 75 bp, synthetic construct
  source 1..75: mol_type = other DNA
caccgagcacgcgagcaaaatcgatgcgattataagtcgcaatggcacaaatacggcacaagaggagaacgtagt

SEQ ID NO: 633412 - DNA, 75 bp, synthetic construct
  source 1..75: mol_type = other DNA
aaattatttatacaaaaattatggagcagaattattttctgctaattatagggggttcatgggattaaataagag

SEQ ID NO: 633413 - DNA, 75 bp, synthetic construct
  source 1..75: mol_type = other DNA
acggagttaaatattcctgaaggaggatatgcatatgtgcatgttgcaagagggcgtctggaagtcaacgggatc

SEQ ID NO: 633414 - DNA, 75 bp, synthetic construct
  source 1..75: mol_type = other DNA
ccgaagtccgtcagcgggcgatttgtatggttctggaaagtcaggacgaatatgactcacaatgggcggcaattt

SEQ ID NO: 633415 - DNA, 75 bp, synthetic construct
  source 1..75: mol_type = other DNA
atgtataaaaaagttttaattagtcttattggagtagggggggcgtttttctctttcatatctaatggggaagca

SEQ ID NO: 633416 - DNA, 75 bp, synthetic construct
  source 1..75: mol_type = other DNA
ggaagggagcgttaaagcgggcaggcattagcaacttccgcttccatgatctgaggcatacctgggcaagctggc

SEQ ID NO: 633417 - DNA, 75 bp, synthetic construct
  source 1..75: mol_type = other DNA
ggcgcgcaccgacgcggtgatccgcaaaatgagcgagatcgggatgaataccgaaggggtcgactatgcggtcgc

SEQ ID NO: 633418 - DNA, 75 bp, synthetic construct
  source 1..75: mol_type = other DNA
tcaatttacctttaaatattaatgatctagcgagagatgttgaaagtacactgaatgtgaaaaaagatattcttt

SEQ ID NO: 633419 - DNA, 75 bp, synthetic construct
  source 1..75: mol_type = other DNA
tgaactattagatctatctatcctagacgctaagtatcaaaatcttttaaatatgcagcagcaattcctacgtaa

SEQ ID NO: 633420 - DNA, 75 bp, synthetic construct
  source 1..75: mol_type = other DNA
gaaaaacaagataaaattccaaatagctctccacttattttcaaaatgtatgaattaggaaatgaagaaaacaag

SEQ ID NO: 633421 - DNA, 75 bp, synthetic construct
  source 1..75: mol_type = other DNA
tgaatgtgcagattctgcggaacaagctgaacccatctcaacctcatttattaactgaaccgccccgggtttcct

SEQ ID NO: 633422 - DNA, 75 bp, synthetic construct
  source 1..75: mol_type = other DNA
tgacggacttctatcaccgtaatctgctggacagcccggaggcgcaggcatggctggtacaccgtggcctgaacc

SEQ ID NO: 633423 - DNA, 75 bp, synthetic construct
  source 1..75: mol_type = other DNA
gtcggcattgtgcgcacaacaaaacgtcttgagcgcgccctgcggcgtatcaatatgttgcaacaggaaatagac

SEQ ID NO: 633424 - DNA, 75 bp, synthetic construct
  source 1..75: mol_type = other DNA
ggcagtgtcgcgcagcgcaaaatttcagatacacaccccacgcagcaccgggcgtgaccgtggcgggcgttttgg

SEQ ID NO: 633425 - DNA, 75 bp, synthetic construct
  source 1..75: mol_type = other DNA
gcgcgacaagctgcatgactggctcaccaaaaccgtgatgccactgggtgaggctggcggtaaaaccgatattat

SEQ ID NO: 633426 - DNA, 75 bp, synthetic construct
  source 1..75: mol_type = other DNA
gaacgacgccatcgccgcgccccgtggtgaagcaaaatccacgctggtgactcagctgtttaccctgtggaccat

SEQ ID NO: 633427 - DNA, 75 bp, synthetic construct
  source 1..75: mol_type = other DNA
catacatcaatcatttggtcgcatgtgaccaacatgtttacaaaaataaaggcacacggccatatattggcgttg

SEQ ID NO: 633428 - DNA, 75 bp, synthetic construct
  source 1..75: mol_type = other DNA
ttgccgggtggttacgctgaagcggctgattggctcgatgtaacagaaaacgctttattcaaccgcctgaaccgc

SEQ ID NO: 633429 - DNA, 75 bp, synthetic construct
  source 1..75: mol_type = other DNA
ataacccgatgtggaaaacggcccgttttaaggccgtcattcagtggcctgccaatatgaagttgtgggacgagt

SEQ ID NO: 633430 - DNA, 75 bp, synthetic construct
  source 1..75: mol_type = other DNA
tggaggccttttccggacgctcacagactatccgggaggccgtcggggaagatgcctcgctgaaatcccgggatg

SEQ ID NO: 633431 - DNA, 75 bp, synthetic construct
  source 1..75: mol_type = other DNA
agtacgctggcaaccgtttcagcagggctgaccggcggtctaaccggaaacagcaccgcatcagcagcagtggga

SEQ ID NO: 633432 - DNA, 75 bp, synthetic construct
  source 1..75: mol_type = other DNA
tggcggcttcgatatcacggtcggcaaccacacccagctcgatggtgcggttatcgcttccacggcgacggcaga

SEQ ID NO: 633433 - DNA, 75 bp, synthetic construct
  source 1..75: mol_type = other DNA
atttgacaaggagaaagagcagaggcgtctgcagacagtggggcttatcagtgacattggcagtcaggtggcaga

SEQ ID NO: 633434 - DNA, 75 bp, synthetic construct
  source 1..75: mol_type = other DNA
tgaaatagcaccgtcggccaggctgacccggtcggaacgattgcaaattacccgtatccgcgttgatctcgctca

SEQ ID NO: 633435 - DNA, 75 bp, synthetic construct
  source 1..75: mol_type = other DNA
tgagcatgctgcagcggtgttaaatttaatagatgaagggattctaagttggaccgagccaggcattatgaaggt

SEQ ID NO: 633436 - DNA, 75 bp, synthetic construct
  source 1..75: mol_type = other DNA
tgaaatggcaccatcggccagactgacccggtcggaacgaatgcaaattacccgtatccgcgttgacctcgctca

SEQ ID NO: 633437 - DNA, 75 bp, synthetic construct
  source 1..75: mol_type = other DNA
tatgctaccgccgtgggacgaaagccgggttgagaaccctgacgaacgggtagtgattcaacataactggcacga

SEQ ID NO: 633438 - DNA, 75 bp, synthetic construct
  source 1..75: mol_type = other DNA
atgacagcgcgttatctcggaatgaatcgcagtgatggcctgactgtcactgaccttgaacatatcagccagagt

SEQ ID NO: 633439 - DNA, 75 bp, synthetic construct
  source 1..75: mol_type = other DNA
gacatcatgaaacagaaccgggtgaccgtacatccggagaaaagtgtcccccggacggccggttacagcgatgcc

SEQ ID NO: 633440 - DNA, 75 bp, synthetic construct
  source 1..75: mol_type = other DNA
tctgatgccagaaggctccagtgcgaattcaacctgagcaaccatgtcgtacagcgtcggaccgttgaatctgct

SEQ ID NO: 633441 - DNA, 75 bp, synthetic construct
  source 1..75: mol_type = other DNA
gcagggtggcaaaacgggtgtggcggcgtgaacgggacctgacgggctggatgtcgctgtcacggaaaccgcaag

SEQ ID NO: 633442 - DNA, 75 bp, synthetic construct
  source 1..75: mol_type = other DNA
aaaattcctttaaggcagtcactgattctgaaaaccccggaggattttaaattctacgtaggatcaatgagttac

SEQ ID NO: 633443 - DNA, 75 bp, synthetic construct
  source 1..75: mol_type = other DNA
gtgattgattataaaaaaaacttattatttattttagtttttatcagtgggcttattctcttcattgtttactct

SEQ ID NO: 633444 - DNA, 75 bp, synthetic construct
  source 1..75: mol_type = other DNA
acctttagtggtacggctgacggcgtgcaacctacagcatttgccaaccaggctaccaccgatgcagcgacgaat

SEQ ID NO: 633445 - DNA, 75 bp, synthetic construct
  source 1..75: mol_type = other DNA
agacctggaagatattgataatgcgattaaaaataaacaaattaactttgataaaaaagaaaagagtttgctgat

SEQ ID NO: 633446 - DNA, 75 bp, synthetic construct
  source 1..75: mol_type = other DNA
atgaaaatcaacttaaaaaacaagcaaagaaagccaaagaaagaattgatattgaaatgaatggtaagtatagcc

SEQ ID NO: 633447 - DNA, 75 bp, synthetic construct
  source 1..75: mol_type = other DNA
gacgccagcgacggataacagcttacttgcactggatgatgcggtcatggcgcaaaatgtcgcaatagaactgca

SEQ ID NO: 633448 - DNA, 75 bp, synthetic construct
  source 1..75: mol_type = other DNA
ggtaaattgctctattcctcagcccatgcctgggagtcgtttaccgccattacgctggcgtatgtgttgattaac

SEQ ID NO: 633449 - DNA, 75 bp, synthetic construct
  source 1..75: mol_type = other DNA
acagtgacctttaaagttgattatattgctaccggtaaagcgacagcaggtaatgtcaatgcagtaacagatttt

SEQ ID NO: 633450 - DNA, 75 bp, synthetic construct
  source 1..75: mol_type = other DNA
tcattgagaaacagaacgcaatggcggtattcaccaccaaagagcagctcgaccctattattgaggcgatcgaga

SEQ ID NO: 633451 - DNA, 75 bp, synthetic construct
  source 1..75: mol_type = other DNA
acgcgacgagtggtcggagcatgggtgtggaatcgcaataaagaagcggtagaaacctgtcatgcgaaagctgtg

SEQ ID NO: 633452 - DNA, 75 bp, synthetic construct
  source 1..75: mol_type = other DNA
gtattttctcaggaacaggacggcattaaatcgcaaacccacagcgccagcgcatccagtaccgatttggggacg

SEQ ID NO: 633453 - DNA, 75 bp, synthetic construct
  source 1..75: mol_type = other DNA
gatggtgcgggtttaccagctcagggatcgtaaagcggttgatgccgccgattaccagatgctgctgcgccgggc

SEQ ID NO: 633454 - DNA, 75 bp, synthetic construct
  source 1..75: mol_type = other DNA
aggtggaaggacagaccagcctcgacgtggtgtttggcgagcgcaaactgaaaaccaccgtgctggctaacgatg

SEQ ID NO: 633455 - DNA, 75 bp, synthetic construct
  source 1..75: mol_type = other DNA
ggaaggtgcgcttgaaaaagccctggctattgcgtgccagcttcagaaaatggggatgacgccggagcagattaa

SEQ ID NO: 633456 - DNA, 75 bp, synthetic construct
  source 1..75: mol_type = other DNA
ctcgctctttttctaataaaaattctaaaatgaataaaggtgatatggtttcagtgtcattagattatcggcatg

SEQ ID NO: 633457 - DNA, 75 bp, synthetic construct
  source 1..75: mol_type = other DNA
aactagattatcgttgcttagacaaagagagtctttgaagatgggtaaagatgtttcaaatatctatattaagaa

SEQ ID NO: 633458 - DNA, 75 bp, synthetic construct
  source 1..75: mol_type = other DNA
tgtaatgttcttgtttcaagcatagatagggattttttatacgccaatagtaacttagacttatgtaatacattg

SEQ ID NO: 633459 - DNA, 75 bp, synthetic construct
  source 1..75: mol_type = other DNA
acgaaacatgcactgcaaattgggtaatttttaatgaccagggacgagcaaatcttaccatcgactttatgttta

SEQ ID NO: 633460 - DNA, 75 bp, synthetic construct
  source 1..75: mol_type = other DNA
tgttggtgatgcgggtacttatcggcattgtcatcggtgcagattatcccatcgccacctcaatgatcaccgagt

SEQ ID NO: 633461 - DNA, 75 bp, synthetic construct
  source 1..75: mol_type = other DNA
tttcggacaagagtcattactgtaaatttactgcgggaacattagatcctgaaaaaggggttaattattcacaag

SEQ ID NO: 633462 - DNA, 75 bp, synthetic construct
  source 1..75: mol_type = other DNA
ccagtccaataccagcgggcgcgatcttaatgacgctcagttgaaatatgccagcgatgtcgaaggccgtattca

SEQ ID NO: 633463 - DNA, 75 bp, synthetic construct
  source 1..75: mol_type = other DNA
ttatcacagggaatggcttgattgcgctggcagggagcgccagaaattgattgatgattttctcagtaatcatag

SEQ ID NO: 633464 - DNA, 75 bp, synthetic construct
  source 1..75: mol_type = other DNA
ttttcccttctattttcaatagtattgctctttacatacacgatagaggtgctggttttgctggcgtaagaactg

SEQ ID NO: 633465 - DNA, 75 bp, synthetic construct
  source 1..75: mol_type = other DNA
tagaaatgactgatgctatatcaatgaattattcaagagtttgtgaaacaaaaaataatgcgggtattaaaggtc

SEQ ID NO: 633466 - DNA, 75 bp, synthetic construct
  source 1..75: mol_type = other DNA
tttttgcgatgttgccgggttttgacaatacgcccaaagtgactgatgcaccgtcaaccgtgttaccggcagaga

SEQ ID NO: 633467 - DNA, 75 bp, synthetic construct
  source 1..75: mol_type = other DNA
agcaacagcaaagccaacgcacagcaaaccatgaacctctggcgggggaagacgacgatacgcttccggttcccg

SEQ ID NO: 633468 - DNA, 75 bp, synthetic construct
  source 1..75: mol_type = other DNA
catagataacacgtttgctatgcggcgacagatgttgtccccggattacacgacagactggcgctcgataccgac

SEQ ID NO: 633469 - DNA, 75 bp, synthetic construct
  source 1..75: mol_type = other DNA
aggtccccgcaaaacgtcaaaaccgcggctcccgaaactcaacagatgatgggggctgaaaacatcagatacagg

SEQ ID NO: 633470 - DNA, 75 bp, synthetic construct
  source 1..75: mol_type = other DNA
gttttctattctttcgctattccgggcattgtggcggctgtcgcgtggtatttgctggtaaaaaccaaacccgct

SEQ ID NO: 633471 - DNA, 75 bp, synthetic construct
  source 1..75: mol_type = other DNA
caagtaacaaaccctacgccttattacgtctcatttagcagtggtgatttagaaaccagcagcaagcgctatcca

SEQ ID NO: 633472 - DNA, 75 bp, synthetic construct
  source 1..75: mol_type = other DNA
tgcagttggcatttcgtacccgtatcaaattgttttatcgccctgaagggttaaagggcaatccgtctgacgcgc

SEQ ID NO: 633473 - DNA, 75 bp, synthetic construct
  source 1..75: mol_type = other DNA
agtgtacaacaacagtgttacatagcaaagctgtgtaaccacgctgcaaaaacatggcccgctactggcggggtg

SEQ ID NO: 633474 - DNA, 75 bp, synthetic construct
  source 1..75: mol_type = other DNA
tattcatcgcggagtctgtacgtcagcgcccggtttggacttaacctggggccgtggcgtctgagaacatccggc

SEQ ID NO: 633475 - DNA, 75 bp, synthetic construct
  source 1..75: mol_type = other DNA
ccggctggtccacagggtatacctggacctccggggccaacaggtagcgtcggtcctaagggggaaaaaggcgag

SEQ ID NO: 633476 - DNA, 75 bp, synthetic construct
  source 1..75: mol_type = other DNA
tttaggggcagcctgtgtcaccgctgtcacttacggcttccttcaggttcatgatggcagccagtgggttacggt

SEQ ID NO: 633477 - DNA, 75 bp, synthetic construct
  source 1..75: mol_type = other DNA
tttcatatcaataatttcgaagccggcgccattgccagtatgttctttttgggatatgcccttagccaaattccg

SEQ ID NO: 633478 - DNA, 75 bp, synthetic construct
  source 1..75: mol_type = other DNA
caagcggaaaaccgttaccttttggagcgattgtttctctcgatggaatgccaaagggaaaagagaatacaggaa

SEQ ID NO: 633479 - DNA, 75 bp, synthetic construct
  source 1..75: mol_type = other DNA
agagatgaaacgtgagggcgtgtcgggatttgaactgtccgcaggacgttacgataacagtggctcggaagatta

SEQ ID NO: 633480 - DNA, 75 bp, synthetic construct
  source 1..75: mol_type = other DNA
tagccctgaaatggaaatgggctgaagggaagtctggcctgagtgtatataacccaacaccttattacgtctctt

SEQ ID NO: 633481 - DNA, 75 bp, synthetic construct
  source 1..75: mol_type = other DNA
ctgcgcatttgttggcggtatgcgtaaagaaagtaactggagtatcagcggcgcgctgttttttggcggcgggac

SEQ ID NO: 633482 - DNA, 75 bp, synthetic construct
  source 1..75: mol_type = other DNA
gtggcggacaaaacggctgaaattaaaagaggtcttctcgccggaataaaaggcgaaaaaattaccaccgtggag

SEQ ID NO: 633483 - DNA, 75 bp, synthetic construct
  source 1..75: mol_type = other DNA
gataaaatcctcgatcaaagcggtatcgcactggccattgctgcgctactttgcgcatttattggcggtatgcgt

SEQ ID NO: 633484 - DNA, 75 bp, synthetic construct
  source 1..75: mol_type = other DNA
gcaacagccctgcctaaagaccgggaaagtgtctactggtttaacgtgctggaagtgccgcctaagccgaaagat

SEQ ID NO: 633485 - DNA, 75 bp, synthetic construct
  source 1..75: mol_type = other DNA
actggttggacaccggcaatgacaatgtcgaccccagccagatcaaagtgccctttacctctacgccccccgttt

SEQ ID NO: 633486 - DNA, 75 bp, synthetic construct
  source 1..75: mol_type = other DNA
aaagtgtctactggtttaacgtgctggaagtgccgcctaagccgaaagatgctgaggctgacaaaaacttgttac

SEQ ID NO: 633487 - DNA, 75 bp, synthetic construct
  source 1..75: mol_type = other DNA
cagcattatgtttcgctgcttgtatgagtttgagtacatcggcaatagcagatatcgtaatttcaggaactcgcg

SEQ ID NO: 633488 - DNA, 75 bp, synthetic construct
  source 1..75: mol_type = other DNA
atgaccaggatgtgtcagtttgttgtttccgctgttttcatcgcatcgacagccgttttcagcctcaccgcgcaa

SEQ ID NO: 633489 - DNA, 75 bp, synthetic construct
  source 1..75: mol_type = other DNA
gacagtgacaatcacctatacgaatagccagacgttaccaaaagatcgcgaaagtgtcttttggtttaatgtgct

SEQ ID NO: 633490 - DNA, 75 bp, synthetic construct
  source 1..75: mol_type = other DNA
atggatatcttagcgcaaaataaaatcagttcactgggtatgctgttcggtgccatcgctttaatgatgggcatt

SEQ ID NO: 633491 - DNA, 75 bp, synthetic construct
  source 1..75: mol_type = other DNA
gatatcataatttccggcactcgtatcatatataatgcagataaaaaagatgttaacgtccgtctggaaaacaaa

SEQ ID NO: 633492 - DNA, 75 bp, synthetic construct
  source 1..75: mol_type = other DNA
aactattaaattgatgtacacggcttcctcaccgctgccaaaagaccgagaaagtgttttctggtttaacgtact

SEQ ID NO: 633493 - DNA, 75 bp, synthetic construct
  source 1..75: mol_type = other DNA
aacgagaagccaaggatactgatggtaaccctgaaattaaaggggagcgccgtcgccttcattctgagatacaaa

SEQ ID NO: 633494 - DNA, 75 bp, synthetic construct
  source 1..75: mol_type = other DNA
gcccgctgagcatttccgcctggacacttatccacgactgtctgaaaaccggcaccatcaatgacgtctgttcac

SEQ ID NO: 633495 - DNA, 75 bp, synthetic construct
  source 1..75: mol_type = other DNA
ccgccgccgtcagtaagatcgattctattgttgctaattattcaaaagccaatcagttatcgacaggaaccgttt

SEQ ID NO: 633496 - DNA, 75 bp, synthetic construct
  source 1..75: mol_type = other DNA
tgtatccggatgcttacgggcagatagtaaacctgctgaacatcaccagtattgatgcacaaaatcagcagcagg

SEQ ID NO: 633497 - DNA, 75 bp, synthetic construct
  source 1..75: mol_type = other DNA
agaaagatgacgagtttggtaatgctggttacagctgtggttactggatcgatattgacagcgtgggaagcttca

SEQ ID NO: 633498 - DNA, 75 bp, synthetic construct
  source 1..75: mol_type = other DNA
cagaccagcgccttcccgtggggttggctggcgggggcggcggtaggtggcggtgcgcttggtgcactgctggca

SEQ ID NO: 633499 - DNA, 75 bp, synthetic construct
  source 1..75: mol_type = other DNA
agcactcaacaggccgagacaggacaaaccgtcacagtaaccctggctggacagagttttaccactaccgtgtag

SEQ ID NO: 633500 - DNA, 75 bp, synthetic construct
  source 1..75: mol_type = other DNA
aatacttttgatggccagctgtctgatattgttaaaaatgaatcgggggattcatcaaatgattatgattcttta

SEQ ID NO: 633501 - DNA, 75 bp, synthetic construct
  source 1..75: mol_type = other DNA
tgaaattgcaccatcggccagactgacccggtctgaacgattgcaaatcacccgtatccgtgttgaccttgctca

SEQ ID NO: 633502 - DNA, 75 bp, synthetic construct
  source 1..75: mol_type = other DNA
ggaatgaccaggaggtcgtgagggcgctcaggggcgcattaaaacacgacctgagaacaccaaaccgtcagcaaa

SEQ ID NO: 633503 - DNA, 75 bp, synthetic construct
  source 1..75: mol_type = other DNA
actgcggattttgtaccgcaacctgcccaacctatcagcttctgggcgatgaactggacgggccgcgcgggcgca

SEQ ID NO: 633504 - DNA, 75 bp, synthetic construct
  source 1..75: mol_type = other DNA
atggaacgcagtaatttcttagtggctattatcatgctaattcttaggtccctagcgattattcctggctggttc

SEQ ID NO: 633505 - DNA, 75 bp, synthetic construct
  source 1..75: mol_type = other DNA
caccaataaatttgatgttgtcttttcttactgcggaaataatgtaaaggaatttatacttttattaccctataa

SEQ ID NO: 633506 - DNA, 75 bp, synthetic construct
  source 1..75: mol_type = other DNA
gttgttgggggaactcgcgttattttttatggtgacaaacctgataccacaatctctatttttaataaagaaacg

SEQ ID NO: 633507 - DNA, 75 bp, synthetic construct
  source 1..75: mol_type = other DNA
tctcaccttagtaatgggcgacagatgcggggatattatgatggtcgttatcaggataatcatgtttttgctttt

SEQ ID NO: 633508 - DNA, 75 bp, synthetic construct
  source 1..75: mol_type = other DNA
aggggcaataacactctatttcagtatcctaagcgtcctttttagacttgctgtaacggttcttgactttattaa

SEQ ID NO: 633509 - DNA, 75 bp, synthetic construct
  source 1..75: mol_type = other DNA
aatttaggcgtttcacacatctcgcttctaatgccgaaagaaagaaaaaatacgaccttgccgataaattttgga

SEQ ID NO: 633510 - DNA, 75 bp, synthetic construct
  source 1..75: mol_type = other DNA
ccagcatcagaagagctaatgtcagtttattatcctgagatgcttaaattaggtggatggaatgttaatgggtta

SEQ ID NO: 633511 - DNA, 75 bp, synthetic construct
  source 1..75: mol_type = other DNA
atgatgcttcctcttgcagccgttgccgggggagggacatggcaggaaagaatagacagtatactgacaaagccg

SEQ ID NO: 633512 - DNA, 75 bp, synthetic construct
  source 1..75: mol_type = other DNA
atatcgttttgaatttaagccacggatgaatgtgcgactggattttggtattggaaaacgaagttgtggttttta

SEQ ID NO: 633513 - DNA, 75 bp, synthetic construct
  source 1..75: mol_type = other DNA
gctactttattagcgttgatttgtacttcgcttttttacctgttctgggacaaacttcgccagaatgatcaatta

SEQ ID NO: 633514 - DNA, 75 bp, synthetic construct
  source 1..75: mol_type = other DNA
atcgccattcttatcctcaaactcattgttgcagcactgcaactacttgatgctgttctgaaatacctgaagtaa

SEQ ID NO: 633515 - DNA, 75 bp, synthetic construct
  source 1..75: mol_type = other DNA
aaatgtagcgatgaattataatggtggtggcgatcccaagtatgcaataaaacttcagttcgtttatacattact

SEQ ID NO: 633516 - DNA, 75 bp, synthetic construct
  source 1..75: mol_type = other DNA
tcgcctccatgcgtctgtttgcccggttatccctggatagcgccttgccggaccgcaccaccccgtcagtagctg

SEQ ID NO: 633517 - DNA, 75 bp, synthetic construct
  source 1..75: mol_type = other DNA
tattaaaatatggctactttgatgtaaatgagtataaaaaaacattacttatgacacatcttttattgacaaaga

SEQ ID NO: 633518 - DNA, 75 bp, synthetic construct
  source 1..75: mol_type = other DNA
atggatagtattaaattacttgataaagttattatctatcaacaacagaatgagcaattatatccagcacaggaa

SEQ ID NO: 633519 - DNA, 75 bp, synthetic construct
  source 1..75: mol_type = other DNA
tgtcaactcaggcgcttgagttgcttgaacagatgagagggttacatgagaaccttgtattcccttcccccagaa

SEQ ID NO: 633520 - DNA, 75 bp, synthetic construct
  source 1..75: mol_type = other DNA
atggccttactcactgataccaaagcccgtcatatcaaacccaatgacaaaccgatttcgcatggtggtgtcact

SEQ ID NO: 633521 - DNA, 75 bp, synthetic construct
  source 1..75: mol_type = other DNA
tcacatatctttcagttatgttaggcgcaggagtgatttttcttttattattttcctttacgcttaagatgttct

SEQ ID NO: 633522 - DNA, 75 bp, synthetic construct
  source 1..75: mol_type = other DNA
ggtatgccgtggtttaatcgcatgggcgaaggtgtggttgaggcgggtaaagcctttggtgttaatgcctcatag

SEQ ID NO: 633523 - DNA, 75 bp, synthetic construct
  source 1..75: mol_type = other DNA
attgacgccatcattaaagaaaaatcaatccggctggcgcaccgacttatgttccgggcgaatacaagctgggtg

SEQ ID NO: 633524 - DNA, 75 bp, synthetic construct
  source 1..75: mol_type = other DNA
gctgagaaccaaccctgcggtacgcatggattcaacgcaaagtactgatgaatcccctaatgatttttatcaaaa

SEQ ID NO: 633525 - DNA, 75 bp, synthetic construct
  source 1..75: mol_type = other DNA
ggcaacgcgtgccgagggcatgaagaacctcgcacttactgccgagataattgagcaggcggcgaaggaatgcgg

SEQ ID NO: 633526 - DNA, 75 bp, synthetic construct
  source 1..75: mol_type = other DNA
ggctacgcgtgccgagggaatgaagaacctcgcgttaaccgcggagattatcgagcaggccgccaaagagtgcgg

SEQ ID NO: 633527 - DNA, 75 bp, synthetic construct
  source 1..75: mol_type = other DNA
gagcctactcttggctggccggtgagcttctacggacaaatgattggtgaggatgagtctggttatttaccatcg

SEQ ID NO: 633528 - DNA, 75 bp, synthetic construct
  source 1..75: mol_type = other DNA
atacaaatgaagaaagtgataaaaattacttattagttataaacaacggtgaagtcatggaaggaacagatgcct

SEQ ID NO: 633529 - DNA, 75 bp, synthetic construct
  source 1..75: mol_type = other DNA
agctatctgggcgcggatgagtatgatgtcgataccgccaaataccaagaaaatgtgctggatacgctggatcgc

SEQ ID NO: 633530 - DNA, 75 bp, synthetic construct
  source 1..75: mol_type = other DNA
ctggcatcacgccaatggcaaccgataccgtcctgacccatgacgcgatcacgccgacattattaaagctgtttg

SEQ ID NO: 633531 - DNA, 75 bp, synthetic construct
  source 1..75: mol_type = other DNA
cccacagtcttaacattcaaaacaccgctacgccacctgaacaatccccagttaaaagcaaacgattcactacct

SEQ ID NO: 633532 - DNA, 75 bp, synthetic construct
  source 1..75: mol_type = other DNA
cccaaccgccgttatcattatcggcgttggattctaatggaaaaagtgaattacagcgagcgcgggaacattatg

SEQ ID NO: 633533 - DNA, 75 bp, synthetic construct
  source 1..75: mol_type = other DNA
cacacttctcgtgtacgttgatgatgcaacgagccggctgatgcaacttctgtttgttagttccgagtctacttt

SEQ ID NO: 633534 - DNA, 75 bp, synthetic construct
  source 1..75: mol_type = other DNA
ctttcgtagccgcagtgctggcatcaccaattgctcatgcccagtgggtaactaatactgaagatgaccttttct

SEQ ID NO: 633535 - DNA, 75 bp, synthetic construct
  source 1..75: mol_type = other DNA
aaaactaaagctgagaaatcattaaacggcgattttaattcatcatgttttagtccaggattattatacgtcgaa

SEQ ID NO: 633536 - DNA, 75 bp, synthetic construct
  source 1..75: mol_type = other DNA
aaaactaaagctgagagatcattaaaaggcgattttaattcatcatgttttagctcaggattattatacgtcgaa

SEQ ID NO: 633537 - DNA, 75 bp, synthetic construct
  source 1..75: mol_type = other DNA
gcaagacgagagtgattttttttcagttgctgcttttgatttttgtggagagtctctatttaatggatggaaacc

SEQ ID NO: 633538 - DNA, 75 bp, synthetic construct
  source 1..75: mol_type = other DNA
ttccggcaccagtgaagatcggtgttcgtgccgttgcttttgtcgagagtgaagttgacgagtggattcaatcag

SEQ ID NO: 633539 - DNA, 75 bp, synthetic construct
  source 1..75: mol_type = other DNA
gcataaacaacttcaaattaaaaaatgaattaatccgcaatggctacttttcatcaatcaatgacgaacaggcaa

SEQ ID NO: 633540 - DNA, 75 bp, synthetic construct
  source 1..75: mol_type = other DNA
atatgccgcagaaattcggcctgtatgaagatctcacggtgatggagaacctcaatctgtacgcggatttgcgca

SEQ ID NO: 633541 - DNA, 75 bp, synthetic construct
  source 1..75: mol_type = other DNA
aatagcaaactttttaaaaatagatataaatgaaattaaatctctgcagttcccagcagaatacttcatttctaa

SEQ ID NO: 633542 - DNA, 75 bp, synthetic construct
  source 1..75: mol_type = other DNA
ttcatgcgaccatgctggcgatgcagcgtgccgtcgctgggctgcatattgcgccggaatatgtgttgattgatg

SEQ ID NO: 633543 - DNA, 75 bp, synthetic construct
  source 1..75: mol_type = other DNA
gtaataatgtcaccaccgatgcgggtgccgggtttgagcagacgctgaccggaatgacggtggggatcgatagcc

SEQ ID NO: 633544 - DNA, 75 bp, synthetic construct
  source 1..75: mol_type = other DNA
accggtaaagataataccgccgcgaatgatcctaatgaaccgggcaatcaactggccggttttgactttaagttc

SEQ ID NO: 633545 - DNA, 75 bp, synthetic construct
  source 1..75: mol_type = other DNA
gatgagctacgttttgctcaacttgcgataaaaactaagcagggtgatcagtctccgccttacattgtcatgcct

SEQ ID NO: 633546 - DNA, 75 bp, synthetic construct
  source 1..75: mol_type = other DNA
ggatttagtattgaacttaatgactgtagttctgcaactgccgggcatgcatcaattatctttgcaggaaatgtt

SEQ ID NO: 633547 - DNA, 75 bp, synthetic construct
  source 1..75: mol_type = other DNA
gcagggaattcgcaatgtccggcgaaaatggcatcgcgaatgaagcatgtaaccgcgcacgggcaaaatacggac

SEQ ID NO: 633548 - DNA, 75 bp, synthetic construct
  source 1..75: mol_type = other DNA
caaccagcttaatgaggagaacccgcatcacctgccccagccgtaccggctgccggggcagcagtatgataagga

SEQ ID NO: 633549 - DNA, 75 bp, synthetic construct
  source 1..75: mol_type = other DNA
ttgaatgaagcctattccggcctaccggtggcggaaatcaccccgcgtgaagcgtacaacgcgattgtcgacaac

SEQ ID NO: 633550 - DNA, 75 bp, synthetic construct
  source 1..75: mol_type = other DNA
atccatgaactttacaacggcaaagattatagcgaatgccaagaaaacagtgtgtttgttctgcaccccgtgtta

SEQ ID NO: 633551 - DNA, 75 bp, synthetic construct
  source 1..75: mol_type = other DNA
tttatgtttatgcaataacgagagactttggttttgcacctaatccatttcatggaagttgtaccttggcaacat

SEQ ID NO: 633552 - DNA, 75 bp, synthetic construct
  source 1..75: mol_type = other DNA
gtactgttggcggtaacgatcaggagatccagacctggcagcgcccggaagactctggcagccagacagtgatgc

SEQ ID NO: 633553 - DNA, 75 bp, synthetic construct
  source 1..75: mol_type = other DNA
gctcgtcttatgtcaatgactttaaccagttcgggcgtacctggcgcgtgatggcccaggctgacggaccatacc

SEQ ID NO: 633554 - DNA, 75 bp, synthetic construct
  source 1..75: mol_type = other DNA
cagccgtggtcgcgccagtgacctccatcccagtaataaccgcgattatcacgatcgcctatctgtaattttact

SEQ ID NO: 633555 - DNA, 75 bp, synthetic construct
  source 1..75: mol_type = other DNA
tgcaaatacggattaccgggaaaaccggtccatgatactgtccggtttatcactttgggagaaaggcagtccgct

SEQ ID NO: 633556 - DNA, 75 bp, synthetic construct
  source 1..75: mol_type = other DNA
catcggtcgccagcggcaccggcgaagacagccatgccggccgggaaggctccatctggccatatattgaaacgg

SEQ ID NO: 633557 - DNA, 75 bp, synthetic construct
  source 1..75: mol_type = other DNA
ttgaacaggccgcgaaagaggttggcgacgcttacaccaataagctgaaggttgaaagcactggcaaggatggcg

SEQ ID NO: 633558 - DNA, 75 bp, synthetic construct
  source 1..75: mol_type = other DNA
gaagcgcatgatacgcgcagcaatatgagccggaccaattatagttatacgcatcatatctataaggatggttac

SEQ ID NO: 633559 - DNA, 75 bp, synthetic construct
  source 1..75: mol_type = other DNA
gaaccagtcgatcaacaaagcattcccacatgccgataccttgaaaggtgtacagctaggctggagcggggatgt

SEQ ID NO: 633560 - DNA, 75 bp, synthetic construct
  source 1..75: mol_type = other DNA
cctggttatcggctacacttcaaccgaccagccgggcaccccgcaggggtttggtcagacacagccagcggataa

SEQ ID NO: 633561 - DNA, 75 bp, synthetic construct
  source 1..75: mol_type = other DNA
tccagggcaacgtggaagggggggaacggatcagcaacggatcgcgcttcaacgccaacggcgcctacggtgcgg

SEQ ID NO: 633562 - DNA, 75 bp, synthetic construct
  source 1..75: mol_type = other DNA
tcgggtcaccggctatacctcgactgaccagccgggcactccgcaggggtttggtcagacgcagccagcagataa

SEQ ID NO: 633563 - DNA, 75 bp, synthetic construct
  source 1..75: mol_type = other DNA
agatgaggctggttacctgccatcggcaaatatgttcctcggcgggattgaagggcaccacggctggggaaaaga

SEQ ID NO: 633564 - DNA, 75 bp, synthetic construct
  source 1..75: mol_type = other DNA
aatcaatataccgctgtgcctcatgccaaaattatcggcggacgctttaccttcacaccgttccagtcattagaa

SEQ ID NO: 633565 - DNA, 75 bp, synthetic construct
  source 1..75: mol_type = other DNA
ttaccaatcggtccggttgaatacctcattgtggtacaccaacgctaacaatagcgacagcgatgacgttggtgc

SEQ ID NO: 633566 - DNA, 75 bp, synthetic construct
  source 1..75: mol_type = other DNA
atggctgcattaaaacctgatgtgaaagccttcatcattcagtcgcttgcgtgctatgacacgccatcgcaggtg

SEQ ID NO: 633567 - DNA, 75 bp, synthetic construct
  source 1..75: mol_type = other DNA
tgacgttgggtttgctttcctccctgggagcccaggcttacgcggccgggttagtagtaaatgacaacgacttgc

SEQ ID NO: 633568 - DNA, 75 bp, synthetic construct
  source 1..75: mol_type = other DNA
gagtacctccctgtggtataccaatgctgacaacagcgatagcgacgacgttggggccagtgcagggatagagat

SEQ ID NO: 633569 - DNA, 75 bp, synthetic construct
  source 1..75: mol_type = other DNA
ttatcagtcggtccgcctgaatacctccctatggtataccaacgctaacaacagcgacagcgatgacgttggggc

SEQ ID NO: 633570 - DNA, 75 bp, synthetic construct
  source 1..75: mol_type = other DNA
ggctaaattccctgaaggaagcacgtgataaaaataataaaataatttattcctcagggcttagttgttttcaat

SEQ ID NO: 633571 - DNA, 75 bp, synthetic construct
  source 1..75: mol_type = other DNA
aattagccaatatttttaataaaaaacataaagaacacatggatgatcgtcttatccatctaattagaagcaatg

SEQ ID NO: 633572 - DNA, 75 bp, synthetic construct
  source 1..75: mol_type = other DNA
gtgcagtgggtcccgcaggcccacggggaccggctggtgcagccggagccaaaggtgccccggggccaaaagggg

SEQ ID NO: 633573 - DNA, 75 bp, synthetic construct
  source 1..75: mol_type = other DNA
ctaaccgaatggcctctaactcattgctggaatgtctggtctacggctggtcggcggcggaagacattgaaagac

SEQ ID NO: 633574 - DNA, 75 bp, synthetic construct
  source 1..75: mol_type = other DNA
agagtaggggcttgcattacacgctggactacccggagttgctcacgcattccggtccgtcgattctctcgcctg

SEQ ID NO: 633575 - DNA, 75 bp, synthetic construct
  source 1..75: mol_type = other DNA
ggtgccagaagtgttccaggcgtggaagtcaccttaaaacgtgttcctgaaaccatggctcctgaagcctttaaa

SEQ ID NO: 633576 - DNA, 75 bp, synthetic construct
  source 1..75: mol_type = other DNA
catctcactgaaccgctccggttttcctggagagtattttgcctgagtgatcaggctgccacatcccggtcattc

SEQ ID NO: 633577 - DNA, 75 bp, synthetic construct
  source 1..75: mol_type = other DNA
atgtcaaaggcaatttgttcgaatcgtgaacagagcatggtagtcgttcaggcacctacgttaagccagaaagat

SEQ ID NO: 633578 - DNA, 75 bp, synthetic construct
  source 1..75: mol_type = other DNA
gtgccaattgaattaaaagattgtgatactaccgtaacaaaaaatgcaacgttcacctttaatggcactgcggat

SEQ ID NO: 633579 - DNA, 75 bp, synthetic construct
  source 1..75: mol_type = other DNA
gcgtcacgtattcgcccacgttctcgattgttcataatgccggaaacagtatcccggggacatggcgggcttttg

SEQ ID NO: 633580 - DNA, 75 bp, synthetic construct
  source 1..75: mol_type = other DNA
ggtattgccatcactcaggccaatggcgaagcgcatgtcaccctcaaaggcaaaaaagcgggcacgcatacggtt

SEQ ID NO: 633581 - DNA, 75 bp, synthetic construct
  source 1..75: mol_type = other DNA
tctgacccgtgaaggtggacatagtcaccgtcgtattcttcatgccgccgacgctactggtaaagaagtagaaac

SEQ ID NO: 633582 - DNA, 75 bp, synthetic construct
  source 1..75: mol_type = other DNA
gcctgtgccgatagtacctgctgcgcactatacttgcggcggtgtaatggtggatgactatgggcgtactgatgt

SEQ ID NO: 633583 - DNA, 75 bp, synthetic construct
  source 1..75: mol_type = other DNA
gggcaaccctgccagtggtcgggccgtattatctcaggaacaggacggcattaaatcgcatacccacagcgccag

SEQ ID NO: 633584 - DNA, 75 bp, synthetic construct
  source 1..75: mol_type = other DNA
gggcaatcctgccagtggtcgggccgtattgtctcaggaacaggacggcattaaatcgcacacccacagcgccag

SEQ ID NO: 633585 - DNA, 75 bp, synthetic construct
  source 1..75: mol_type = other DNA
gggcaaacctgccagtggtcgggccgtattctctcaggaacaggacggcattaaatcgcatacccacagcgccag

SEQ ID NO: 633586 - DNA, 75 bp, synthetic construct
  source 1..75: mol_type = other DNA
gtattatctcaggaacaggacggcattaaatcgcagacccacagcgccagcgcatccagtactgatttggggacg

SEQ ID NO: 633587 - DNA, 75 bp, synthetic construct
  source 1..75: mol_type = other DNA
gtattatctcaggaacaggacggcattaaatcgcatacccacagcgccagcgcatccagtacagatttggggacg

SEQ ID NO: 633588 - DNA, 75 bp, synthetic construct
  source 1..75: mol_type = other DNA
gggcaagcctgccagtggtcgggccgtattttctcaggaacaggacggcattaaatcgcacacccacagcgccag

SEQ ID NO: 633589 - DNA, 75 bp, synthetic construct
  source 1..75: mol_type = other DNA
ggcggccctggcggtagtagccgctaatgacagtggcgatggcggttctcacaatacctcaaccacgacgtctac

SEQ ID NO: 633590 - DNA, 75 bp, synthetic construct
  source 1..75: mol_type = other DNA
gagctcagcgggattaatattggcccgtggcgtttacgcaacaatggttcctggaactatttttgcggaaattga

SEQ ID NO: 633591 - DNA, 75 bp, synthetic construct
  source 1..75: mol_type = other DNA
cgttgttgagtagcgctcacggttacattccgcctgaagagtgggatgaaggtattcctgctttactcctgaatt

SEQ ID NO: 633592 - DNA, 75 bp, synthetic construct
  source 1..75: mol_type = other DNA
gattatgagcacaacaagcggtagtggccagactcgtaatgcagggaagacatcatcagatggtgctcataccca

SEQ ID NO: 633593 - DNA, 75 bp, synthetic construct
  source 1..75: mol_type = other DNA
tggctggacgattaagggcaagcccgccagtggtcgggccgtattatctcaggaacaggacggcattaaatcgca

SEQ ID NO: 633594 - DNA, 75 bp, synthetic construct
  source 1..75: mol_type = other DNA
atggataaatccgacttcatcaaagctgttattggaaagccatgggccaacaggagttgcacattcggtgcgatg

SEQ ID NO: 633595 - DNA, 75 bp, synthetic construct
  source 1..75: mol_type = other DNA
cttcgccacgttggtacaactgcttcccgcctcacaaagtcatcaccattccactcccggcgggttgctggatca

SEQ ID NO: 633596 - DNA, 75 bp, synthetic construct
  source 1..75: mol_type = other DNA
gatggcacccgctggcattcgtggcagggtaatctggcacagccttatcgctggcagtaccagagccacggtcgc

SEQ ID NO: 633597 - DNA, 75 bp, synthetic construct
  source 1..75: mol_type = other DNA
acggtcgcagtggtctgcgcggcattgctgcacgatacgggaaaaatcgccgtggatatggagattcatcaacgt

SEQ ID NO: 633598 - DNA, 75 bp, synthetic construct
  source 1..75: mol_type = other DNA
ttgatgactatgggcgtaccgacgttgatggtctgtacgccatcggcgaagtgagctacacgggattacacggcg

SEQ ID NO: 633599 - DNA, 75 bp, synthetic construct
  source 1..75: mol_type = other DNA
gccggatacagcgccttctttgtcgaactgtcgaaggagatccaggatgacatcatccgccggacagcgcatcag

SEQ ID NO: 633600 - DNA, 75 bp, synthetic construct
  source 1..75: mol_type = other DNA
atagcgattatcattacggcaaagaaaaatacaagcggaatgtttataaaatgatgttggaatgtaaacaaagag

SEQ ID NO: 633601 - DNA, 75 bp, synthetic construct
  source 1..75: mol_type = other DNA
tctacgataatgaattcgaagatttaacacaaaacgattgtattataggtaatgatgtgtggctcggtacaggag

SEQ ID NO: 633602 - DNA, 75 bp, synthetic construct
  source 1..75: mol_type = other DNA
ttgttatatagggaaaaatgtatatataactaaaagtatcattgggaattacacatctattgcaaataatgtctc

SEQ ID NO: 633603 - DNA, 75 bp, synthetic construct
  source 1..75: mol_type = other DNA
aagaaaaaaaataccggactcagcaataataaacttaacaagtcatgtggataaacattcagtaattggaaagtg

SEQ ID NO: 633604 - DNA, 75 bp, synthetic construct
  source 1..75: mol_type = other DNA
tgttatcagtgagataaaaaacaaagcgttttgtttttttgaatactttgattcattgaataaaatattcgatgc

SEQ ID NO: 633605 - DNA, 75 bp, synthetic construct
  source 1..75: mol_type = other DNA
gctgaaaagattaaatcggaagttgagagtgtgatgcattctgcatgtgatcaccatgtttattttactagatta

SEQ ID NO: 633606 - DNA, 75 bp, synthetic construct
  source 1..75: mol_type = other DNA
aaagaactgttcctgcaggcgaactaactaagtttaataaatttttatctggcgatgctaaacaatttgaagaaa

SEQ ID NO: 633607 - DNA, 75 bp, synthetic construct
  source 1..75: mol_type = other DNA
ccgggcgctggcatcggatgaaatccctgacggtacgcgcgaccgccggggatggtggggagacagttttcgccc

SEQ ID NO: 633608 - DNA, 75 bp, synthetic construct
  source 1..75: mol_type = other DNA
aatagaactactatctatctatggcggtatatggatggattctactgtatatatccataaagctattgaagaaac

SEQ ID NO: 633609 - DNA, 75 bp, synthetic construct
  source 1..75: mol_type = other DNA
aacagccgcttcgtccgccgcattggcgcgttaaatatgttccgctcggggttgtggatacaatttattatggca

SEQ ID NO: 633610 - DNA, 75 bp, synthetic construct
  source 1..75: mol_type = other DNA
ccctgtatatattggcgataatactgaattgttcggagagggacaaacaacaagaatagtctttgaaaatccaat

SEQ ID NO: 633611 - DNA, 75 bp, synthetic construct
  source 1..75: mol_type = other DNA
tggcgacatgctgtttaaaaacttcggtgtcacccgtcacgggcgtgtggttttttatgattacgatgaaatttg

SEQ ID NO: 633612 - DNA, 75 bp, synthetic construct
  source 1..75: mol_type = other DNA
tggcatcaaaagattcactagaaaacctattgatccaagccattgacacagagatgctgatttttgtaacactaa

SEQ ID NO: 633613 - DNA, 75 bp, synthetic construct
  source 1..75: mol_type = other DNA
cccgaatataaagtagcttattacattgacgatgttaataacataaccaccggccaggtaaaatccgcattgcaa

SEQ ID NO: 633614 - DNA, 75 bp, synthetic construct
  source 1..75: mol_type = other DNA
aaaacgatgccacaaataaacattatgcaattgcccattttaacgtatggaatgcagaaatgttgatgggcgtta

SEQ ID NO: 633615 - DNA, 75 bp, synthetic construct
  source 1..75: mol_type = other DNA
aaacgggatatcatcaaagccatgaacaaagcagccgcgctggatgaactgataacggggcgcactttgacggtg

SEQ ID NO: 633616 - DNA, 75 bp, synthetic construct
  source 1..75: mol_type = other DNA
ctaaccgcatggcctcaaattcattactggagtgtctggtttacggctggtcggcggcggaggatattaccaggc

SEQ ID NO: 633617 - DNA, 75 bp, synthetic construct
  source 1..75: mol_type = other DNA
cgatgagatttatcgccgtcagcgggagatgaaagaggagctgagcagtctggatgatttggcttcaattcgggc

SEQ ID NO: 633618 - DNA, 75 bp, synthetic construct
  source 1..75: mol_type = other DNA
ttatttgaaacgcccggacggtacacgatttatgcccgattttgatgatcgcggcgaactggcaccgcgcgatat

SEQ ID NO: 633619 - DNA, 75 bp, synthetic construct
  source 1..75: mol_type = other DNA
ttcacagacagaggccgccacatccctggcagtcagtaacgtcatgaatgaggtgaagacaaaagcgtcactgga

SEQ ID NO: 633620 - DNA, 75 bp, synthetic construct
  source 1..75: mol_type = other DNA
tcctattattaatacaacaatcaatttatcatcgttgtctaaggacgttttaaattcattaaaatattgtagttt

SEQ ID NO: 633621 - DNA, 75 bp, synthetic construct
  source 1..75: mol_type = other DNA
ataaccgtatcgcgcttgataccaatacgatggggaattccatcgatgttgaaaaaaatattagcagcgttgtgc

SEQ ID NO: 633622 - DNA, 75 bp, synthetic construct
  source 1..75: mol_type = other DNA
catgatgtcgacttaaccaccatcgtttattcaccaccgctgaaggataactggcgcggttttgctggattcggt

SEQ ID NO: 633623 - DNA, 75 bp, synthetic construct
  source 1..75: mol_type = other DNA
tataatttattctttattcaaacatattttttacttttcattgttactcttgtttttgtgagaattaaaatattt

SEQ ID NO: 633624 - DNA, 75 bp, synthetic construct
  source 1..75: mol_type = other DNA
atcataccgattgcacaacccagcaggccgaagagctcatggaggaataccagcgccgcggcgtaatggtagagc

SEQ ID NO: 633625 - DNA, 75 bp, synthetic construct
  source 1..75: mol_type = other DNA
cgtccccgattggctattacgactctgcgcctggaagccagaattacccttacccggcaatgtcctggctttatc

SEQ ID NO: 633626 - DNA, 75 bp, synthetic construct
  source 1..75: mol_type = other DNA
tgaagatgtactaactgcctatctatataaattgaaaactactattcgttcaatcccaagtaaagtttacctaga

SEQ ID NO: 633627 - DNA, 75 bp, synthetic construct
  source 1..75: mol_type = other DNA
aaatcgaacaaagcgaagatgacaacattactggcgaaagtaataccaactctgatcccaccgaagaaacaaccg

SEQ ID NO: 633628 - DNA, 75 bp, synthetic construct
  source 1..75: mol_type = other DNA
aaaaaatagattctacactaaccgaattaggtaatatggaattcgaactaccagaagatgaggaaatacttgatg

SEQ ID NO: 633629 - DNA, 75 bp, synthetic construct
  source 1..75: mol_type = other DNA
atgtttacccgccgggcgcgaacctggtcatggcttgggcttgatggctgggaggcgcaaaacaaagcgctggcc

SEQ ID NO: 633630 - DNA, 75 bp, synthetic construct
  source 1..75: mol_type = other DNA
gccagatcatccagctcaccgaaacacttcagaaaataggtcgcattggcggatcctcttccgaagaaatggcga

SEQ ID NO: 633631 - DNA, 75 bp, synthetic construct
  source 1..75: mol_type = other DNA
attacgacatcgaggccgatgtttctggcttgctgaaggcgcagggaaaggccaataagtcactcgactcaatcg

SEQ ID NO: 633632 - DNA, 75 bp, synthetic construct
  source 1..75: mol_type = other DNA
aaacaaaaaatttcaaaaagcaaatagtggggacactatgcttgacaatgcaatgaaaagcaaagattcaaaaat

SEQ ID NO: 633633 - DNA, 75 bp, synthetic construct
  source 1..75: mol_type = other DNA
atgatcgacgacgcgaatatctggcgcttcaacgtcgccgggagtaaagaggtgcgggattatcgcgtgaaggga

SEQ ID NO: 633634 - DNA, 63 bp, synthetic construct
  source 1..63: mol_type = other DNA
atgagcggaaaaccggcagcgcggcagggtgacatgacccgcaagggactggatattgtgcag

SEQ ID NO: 633635 - DNA, 75 bp, synthetic construct
  source 1..75: mol_type = other DNA
accggtcaagcaacacaaccaatttcatcaagtctggtgacgctggaaacacgtcaagcgtgaaggtcactaata

SEQ ID NO: 633636 - DNA, 75 bp, synthetic construct
  source 1..75: mol_type = other DNA
gaagacgaagatcagttctacgtaatggctaaagtgctactaagacaatcaatagagtacaagcgcttcgcataa

SEQ ID NO: 633637 - DNA, 75 bp, synthetic construct
  source 1..75: mol_type = other DNA
gcatacaaacagggcgaggtcaatgcgtggcagctgacactggccttccagcgggtaaatgatgccgtcagggca

SEQ ID NO: 633638 - DNA, 75 bp, synthetic construct
  source 1..75: mol_type = other DNA
gtgcggcagaaattattccctacgatgtggttgcagatattcatattccctacgggctggatggtgaactggtga

SEQ ID NO: 633639 - DNA, 75 bp, synthetic construct
  source 1..75: mol_type = other DNA
aatcgaaaagaggaatgaaaagccgaggagggggaaggccaaagattgtcggaagcccttggcttgatttaggga

SEQ ID NO: 633640 - DNA, 75 bp, synthetic construct
  source 1..75: mol_type = other DNA
gccatcctgttgccttgcctcatggcgtttgtcagacttgttataatcgattgaaagcctggcattatcacagca

SEQ ID NO: 633641 - DNA, 75 bp, synthetic construct
  source 1..75: mol_type = other DNA
aatatcgaaagcctgtactattgcaggatgaattacttggacaattcacgctggataaagactattctcactttt

SEQ ID NO: 633642 - DNA, 75 bp, synthetic construct
  source 1..75: mol_type = other DNA
ttatatatgccagagggaggtgagaagtgttctttttataataatggtgataaagttcttgagcttcttgaaata

SEQ ID NO: 633643 - DNA, 75 bp, synthetic construct
  source 1..75: mol_type = other DNA
gggacctctgccgtgggccacttacagcttcccctttcagtcgccttcgcttacttcttctttgtccgcaaaatg

SEQ ID NO: 633644 - DNA, 75 bp, synthetic construct
  source 1..75: mol_type = other DNA
tcgtcagggctggcctgagtatggacaatggatgctagcttgtgttgaaagagctacagcttacaacatgcagtt

SEQ ID NO: 633645 - DNA, 75 bp, synthetic construct
  source 1..75: mol_type = other DNA
gaaaaccagcggtcattatcacggctataacgacacgcggcgcaacacccatccggaattatatgaagtgattaa

SEQ ID NO: 633646 - DNA, 75 bp, synthetic construct
  source 1..75: mol_type = other DNA
gtcgttcaagttatatctcaaatggggtgtgataatattttattcaaaagagcctctaaaaaaaagacatcagcg

SEQ ID NO: 633647 - DNA, 75 bp, synthetic construct
  source 1..75: mol_type = other DNA
gcttcttgttcctcctgctctggagtttccagtaattcatcggcacattacgccaggtgcactgactttatgcgt

SEQ ID NO: 633648 - DNA, 75 bp, synthetic construct
  source 1..75: mol_type = other DNA
tttacggtgactgtgcgatcaacccggatccgaccgcagaacagctggcagaaatcgcgattcagtccgctgatt

SEQ ID NO: 633649 - DNA, 75 bp, synthetic construct
  source 1..75: mol_type = other DNA
aaggcctgatactcaacgacaacggcggcaggagcattcactttgagccgctgtttcccggcgagataagctaca

SEQ ID NO: 633650 - DNA, 75 bp, synthetic construct
  source 1..75: mol_type = other DNA
tgtgtcgatgaccatatattcaagaataaatcagttttctgtttcatttatcgaaggtagctatgatcttggtgt

SEQ ID NO: 633651 - DNA, 75 bp, synthetic construct
  source 1..75: mol_type = other DNA
ctattttaaattcaaaaatgaacacctatgcgaatatacttgggcttattgtgggtttaagtgttcggtatataa

SEQ ID NO: 633652 - DNA, 75 bp, synthetic construct
  source 1..75: mol_type = other DNA
gtactgtccttagccggagcgtcgaaaaaaagccgctcgccttttgcgcggggatcggcgttaccgcactggtgc

SEQ ID NO: 633653 - DNA, 75 bp, synthetic construct
  source 1..75: mol_type = other DNA
tcatttttaaaaaaaaataatgtaattatagagcaaaatatacttagaaagtatgatattaatcatcttattaat

SEQ ID NO: 633654 - DNA, 75 bp, synthetic construct
  source 1..75: mol_type = other DNA
acacgatttgcccgattatggccgcttcattttctgtcgacgatgctgatggtagccatttattactataatgcg

SEQ ID NO: 633655 - DNA, 75 bp, synthetic construct
  source 1..75: mol_type = other DNA
ttaaatataaaatatctgccggttttaaaccaggtctgatgatgagtggtttttttgttcattgtatcattacta

SEQ ID NO: 633656 - DNA, 75 bp, synthetic construct
  source 1..75: mol_type = other DNA
gattgacgaagccgcagcgctggaagctgcctgtctggtgctggtggtcggtggtttgcctgccggttccagaga

SEQ ID NO: 633657 - DNA, 75 bp, synthetic construct
  source 1..75: mol_type = other DNA
tcaaaaccactgtgcactggaaacgccactggcaacgggcgcggatggcccatgagttcgtttatggagaacagt

SEQ ID NO: 633658 - DNA, 75 bp, synthetic construct
  source 1..75: mol_type = other DNA
cagtggcagtatgatggccacggctggctgacagacatcagccacctgagcgaaggccaccgtgttgccgtccac

SEQ ID NO: 633659 - DNA, 75 bp, synthetic construct
  source 1..75: mol_type = other DNA
ttccgggttagcactgtttatccagaaaaaggggggtttttgattggagtgcatggtgaagaaccttcagataac

SEQ ID NO: 633660 - DNA, 75 bp, synthetic construct
  source 1..75: mol_type = other DNA
aaaagtagaaaacggagagcggcggttagatatcgtcgagtttgttcatctatgccgattggttggtattgatcc

SEQ ID NO: 633661 - DNA, 75 bp, synthetic construct
  source 1..75: mol_type = other DNA
ttcatttgttttatgttgcggtgaaaaaataaacagcactataagtgaattacttagcaaaaaattacagattta

SEQ ID NO: 633662 - DNA, 75 bp, synthetic construct
  source 1..75: mol_type = other DNA
acaaggaatatacccgtacacctgtatatgttgtttcgttcccgaaagatgaactcaaccagcctgttaagaagt

SEQ ID NO: 633663 - DNA, 75 bp, synthetic construct
  source 1..75: mol_type = other DNA
aggggccaggcgtggtacatggacatgatgtgctttgctcgaggtgctagtgatattcctagccagtcagcgatg

SEQ ID NO: 633664 - DNA, 75 bp, synthetic construct
  source 1..75: mol_type = other DNA
aaaggcgcgaccgaaggcctgacgcctgaaatgcctgctactgtattccccgggggcgggtactctttggcatga

SEQ ID NO: 633665 - DNA, 75 bp, synthetic construct
  source 1..75: mol_type = other DNA
ggtatccgtcagtcgctttggacggcgggttcgctcatccgtaaatccccttccgtcttccatcatgatggcact

SEQ ID NO: 633666 - DNA, 75 bp, synthetic construct
  source 1..75: mol_type = other DNA
gcactgtaccgctacattcagacgcatttccccgaccgcaaaacggtgacctatgaagatccggtggaatacatt

SEQ ID NO: 633667 - DNA, 75 bp, synthetic construct
  source 1..75: mol_type = other DNA
gtgaataaagtaagtgagactttggaaaagatgcaatcaacgcaagccctgattgatgctcttacaatcgaacgt

SEQ ID NO: 633668 - DNA, 75 bp, synthetic construct
  source 1..75: mol_type = other DNA
aaatctgggcgcagctagcaaatgagcctgtggataacaatcagcagcttgagcgtgcatttcaccattttgaag

SEQ ID NO: 633669 - DNA, 75 bp, synthetic construct
  source 1..75: mol_type = other DNA
tatcgactctttcgctctggagagttgcaattgcctccccggaacccacccaactcgccctcgcgctgaagcaac

SEQ ID NO: 633670 - DNA, 75 bp, synthetic construct
  source 1..75: mol_type = other DNA
gcgcgcccggaacagcgccagtgccgactcacagtcgcgctatttcttcgactacttacaggcgcagcaggatct

SEQ ID NO: 633671 - DNA, 75 bp, synthetic construct
  source 1..75: mol_type = other DNA
tgacaccgcaagggcgttacatatcagtatcaatgccgttgtacgcactttaaaaaactctcacccaggaatgta

SEQ ID NO: 633672 - DNA, 75 bp, synthetic construct
  source 1..75: mol_type = other DNA
tgacaccgcacgggcgctgcatatcagcattaatgccgttgtgcgcacattaaaaaactcgcaccacgatgtgta

SEQ ID NO: 633673 - DNA, 75 bp, synthetic construct
  source 1..75: mol_type = other DNA
ttgcaatgaacaatgcgggcatccgtgacaccgcacgggcgctgcatatcagcattaatgccgttgtgcgcacat

SEQ ID NO: 633674 - DNA, 75 bp, synthetic construct
  source 1..75: mol_type = other DNA
aaccaccacagccagttaacgtcagccaccgggcctgacgggctggaaatacgccgggaatatgatgaatggggc

SEQ ID NO: 633675 - DNA, 75 bp, synthetic construct
  source 1..75: mol_type = other DNA
cctgacgggctggaaatacgccgggaatatgatgaatggggcaacctgctgaatgaagagaacccgcatcagctg

SEQ ID NO: 633676 - DNA, 75 bp, synthetic construct
  source 1..75: mol_type = other DNA
atgattaaaaccaccacagaaaagcgcgcggacgggcgcatttttgccggaagcgatccggtgtataccgcaaca

SEQ ID NO: 633677 - DNA, 75 bp, synthetic construct
  source 1..75: mol_type = other DNA
agcagcgccagacgacgttcaccaccaggataatgctcaagaaaccaaagaactggcgggaggccaggaagaaaa

SEQ ID NO: 633678 - DNA, 75 bp, synthetic construct
  source 1..75: mol_type = other DNA
gaattattagaaaccagggtaaacaatctttcatacaacgacataataaaatatcagcaagaattccaaaaagaa

SEQ ID NO: 633679 - DNA, 75 bp, synthetic construct
  source 1..75: mol_type = other DNA
cgacactctctcgatacaataaaattcaaacatgggcagaaatgtctgaatatcaattcgaagtatttcaatacg

SEQ ID NO: 633680 - DNA, 75 bp, synthetic construct
  source 1..75: mol_type = other DNA
gacaatgcgtatatacaaggaatgaatatgccaagacacagaaaggcagagagccaaggtttgaaaccttaactg

SEQ ID NO: 633681 - DNA, 75 bp, synthetic construct
  source 1..75: mol_type = other DNA
atgtcgggatcgtgcgcgaagtcgacgcggcggacgtgggccagagcgatggccgcaactacgggctgattttca

SEQ ID NO: 633682 - DNA, 75 bp, synthetic construct
  source 1..75: mol_type = other DNA
gaacatggggcgcattgtcgttgacattgatggtgttaatctcgctgaactgattaacatggtctgcgataacgg

SEQ ID NO: 633683 - DNA, 75 bp, synthetic construct
  source 1..75: mol_type = other DNA
tcaatgtggctggtgcgcggtggtaaggcagcacagccggacggccatacgctggcgcggctgtggggggcgctg

SEQ ID NO: 633684 - DNA, 75 bp, synthetic construct
  source 1..75: mol_type = other DNA
gcggatatggagcgagacccaacaaaccgcctacgcccgatccaagtaaattgccggacatagcgaaacaattaa

SEQ ID NO: 633685 - DNA, 75 bp, synthetic construct
  source 1..75: mol_type = other DNA
ttgcatcggcagtatatacggttgattacactagataatgaactggagtggtatgattctgaactgaaaaatatg

SEQ ID NO: 633686 - DNA, 75 bp, synthetic construct
  source 1..75: mol_type = other DNA
gcactggatgcgtgtggcgtatgaggctggcaactctccggtaattccggatggttggataagctgtagtgagcg

SEQ ID NO: 633687 - DNA, 75 bp, synthetic construct
  source 1..75: mol_type = other DNA
ccggctggaaaaagataagccatttacggaatggctgataagaagcagccggggtaatggctggggtatttttat

SEQ ID NO: 633688 - DNA, 75 bp, synthetic construct
  source 1..75: mol_type = other DNA
atacacgccggcgcgaaaaattcacctgtaccactgcgaccatcgcggcctgccgctggcccttatcagcacgga

SEQ ID NO: 633689 - DNA, 75 bp, synthetic construct
  source 1..75: mol_type = other DNA
acattcttcagagcattaagcccttacgactacacactgtattgcaggaagtgggtaaaaccaaatctgacttgt

SEQ ID NO: 633690 - DNA, 75 bp, synthetic construct
  source 1..75: mol_type = other DNA
aaagatatcaggctatagcgtctcagtatagctcaaggattggtgtggattattatgtatcaatgatgctaccat

SEQ ID NO: 633691 - DNA, 75 bp, synthetic construct
  source 1..75: mol_type = other DNA
aggataaaaacttcattgcaaaaatgattgcagaatatgctgtgtctagaaatgcaattatttctagcaacacat

SEQ ID NO: 633692 - DNA, 75 bp, synthetic construct
  source 1..75: mol_type = other DNA
gaacttaaatgataatggtaataaagctctcacaagagatgaaacaatagcctatattaaagacagtaagccttg

SEQ ID NO: 633693 - DNA, 75 bp, synthetic construct
  source 1..75: mol_type = other DNA
tgcagatgattactggcatccaaaaaaactagaattacaactatcatttattaatgatgaaaacttggatttttt

SEQ ID NO: 633694 - DNA, 75 bp, synthetic construct
  source 1..75: mol_type = other DNA
cgaatctggatatccgcatcccgtatgccacagacccggcaggtaaccgcctgcccgacccggagctgcacccgg

SEQ ID NO: 633695 - DNA, 75 bp, synthetic construct
  source 1..75: mol_type = other DNA
gaaaccgccaccggtgagcaggcgaaaacgcagcgccgcagcctggcggatacccttcagcagtccggcggcgaa

SEQ ID NO: 633696 - DNA, 75 bp, synthetic construct
  source 1..75: mol_type = other DNA
tccaatcataactaaaattctcgtagaagaaggaatacccgaaatattcagtgtccaaaccgtttcttccgataa

SEQ ID NO: 633697 - DNA, 75 bp, synthetic construct
  source 1..75: mol_type = other DNA
tctattgttaggtgaccaccttaacacaagagcacttaaaaaagcaaagccccgcaagtgtcattaccactcgca

SEQ ID NO: 633698 - DNA, 75 bp, synthetic construct
  source 1..75: mol_type = other DNA
ggcgaataacgagtatgttcacgacgcgattgtgctcaacagcgccaccgggcttatcggcatgccgcagcagac

SEQ ID NO: 633699 - DNA, 72 bp, synthetic construct
  source 1..72: mol_type = other DNA
aaaccgctggataaaacccgcgctaattccctgacccgccactttatcactcagcatctacccaccgattaa

SEQ ID NO: 633700 - DNA, 75 bp, synthetic construct
  source 1..75: mol_type = other DNA
aggcgcgaccgaaggcctgacgcctgaaatgcctgctactgtattcccccgggggcgggtactctttggcatgac

SEQ ID NO: 633701 - DNA, 75 bp, synthetic construct
  source 1..75: mol_type = other DNA
tgcctgctgaggcgatccgatttaacgataaacagagacataacgggcgcgtgtttcagtctctttattctctgg

SEQ ID NO: 633702 - DNA, 75 bp, synthetic construct
  source 1..75: mol_type = other DNA
gaaaattccggtgatcagtaatgctgctagtctgcgcagtcgcgtgctgagcaagttttcgaagctggtggcgct

SEQ ID NO: 633703 - DNA, 75 bp, synthetic construct
  source 1..75: mol_type = other DNA
ttgatgaaatgccagtaaacagtatgaacaagcgtgtctatgcgcaattacaggagttatttcatgaagccccat

SEQ ID NO: 633704 - DNA, 75 bp, synthetic construct
  source 1..75: mol_type = other DNA
ccgccagcacggtagcaatagcgggcataattggttgggtcggcctggtcgttccgcacattgcccgcttgttga

SEQ ID NO: 633705 - DNA, 75 bp, synthetic construct
  source 1..75: mol_type = other DNA
atggtggccacgggaaattatgacgaagcggttatcggacatattaacgacaacatgaatgatgccacccggcag

SEQ ID NO: 633706 - DNA, 75 bp, synthetic construct
  source 1..75: mol_type = other DNA
gagcaatggagtgatatactacatcctaggcgttatctgacaaaaccacttgaaagattaatttgcagaaaagca

SEQ ID NO: 633707 - DNA, 75 bp, synthetic construct
  source 1..75: mol_type = other DNA
gcgattgtgctcaacagcgctaccgggcttattggcatgccgcagcagactatcggtaacggcgtaaacgtccgc

SEQ ID NO: 633708 - DNA, 75 bp, synthetic construct
  source 1..75: mol_type = other DNA
agcctggcggagaagttacagcaggaagggagcgaagacggtcacggtgtggtgttcccggctgaactggtgcgg

SEQ ID NO: 633709 - DNA, 75 bp, synthetic construct
  source 1..75: mol_type = other DNA
tctgacacaaaaaagagcgtttcatgaaatttgcgctgaaatagaccgcatcacggggaatgaataccggagaga

SEQ ID NO: 633710 - DNA, 75 bp, synthetic construct
  source 1..75: mol_type = other DNA
atttcgaagatctacttaatataaatttcactgacgcaaatttagggaaggtgcgaataagcggggaaattcttc

SEQ ID NO: 633711 - DNA, 75 bp, synthetic construct
  source 1..75: mol_type = other DNA
tggcagaaaaaatgaaatattttattgagaataaagataaagtactcgaaatggggcttgctggaaggaagtttg

SEQ ID NO: 633712 - DNA, 75 bp, synthetic construct
  source 1..75: mol_type = other DNA
taggaacgatgataaattccgttattaacggccaacaaaaatatagagtttttgtttctattggtatgatatccg

SEQ ID NO: 633713 - DNA, 75 bp, synthetic construct
  source 1..75: mol_type = other DNA
tatcaattcgaagtatttcaatacgagacgcttaacccaaaaaaaaatgtcacacacgccttatttaaagaggcc

SEQ ID NO: 633714 - DNA, 75 bp, synthetic construct
  source 1..75: mol_type = other DNA
atctttcatacaatgacatattaaaatatcagcaagaattccaaaaacaatgttataagcaagttaaagccttta

SEQ ID NO: 633715 - DNA, 75 bp, synthetic construct
  source 1..75: mol_type = other DNA
acttgtaagtcttattaataacattgaaacgataagttcgacaccacttacgcaacagacacaatcaatacttaa

SEQ ID NO: 633716 - DNA, 75 bp, synthetic construct
  source 1..75: mol_type = other DNA
cgatcatgtgcggaccgtgaaaaagaatctccacgatatcgagctggaaggccaccatttgattcgctcggcggt

SEQ ID NO: 633717 - DNA, 75 bp, synthetic construct
  source 1..75: mol_type = other DNA
ttattttcgcagatcgagacgtaaacagcgccaccggattggctgcggccacggaatgtgcccatgccaacttac

SEQ ID NO: 633718 - DNA, 75 bp, synthetic construct
  source 1..75: mol_type = other DNA
atgttccagtctctttatgccctggcgaccgatgacaagggagaactgtgttacctgcatcagacattgcttgat

SEQ ID NO: 633719 - DNA, 75 bp, synthetic construct
  source 1..75: mol_type = other DNA
ggaagtaggtttactggctgaaaaacacaaagattttttacttgacgattataacaagaaacacactagtaactg

SEQ ID NO: 633720 - DNA, 75 bp, synthetic construct
  source 1..75: mol_type = other DNA
taaaacttatagttctttcttagagcttgatgatccatacagacgacactttaataatagtagaaatgattttta

SEQ ID NO: 633721 - DNA, 75 bp, synthetic construct
  source 1..75: mol_type = other DNA
ttttttgcgggtcctcctggtggggtgggtatgaacacggggcggaggggcgcggaaaaaggcgcattttttgat

SEQ ID NO: 633722 - DNA, 75 bp, synthetic construct
  source 1..75: mol_type = other DNA
gaaaaattcatttttaccactgcgaccatcgcggcctgccgctggcgctcatcagcacggaaggggcaacagcgt

SEQ ID NO: 633723 - DNA, 75 bp, synthetic construct
  source 1..75: mol_type = other DNA
ataatccagaatcatcgacagaatctgttggtatcggtgcaggtgttgacgcttcagttatgactctggcttgta

SEQ ID NO: 633724 - DNA, 75 bp, synthetic construct
  source 1..75: mol_type = other DNA
ctgcagcaggaagggagcgaggacgggcacggcgtggtatttccggctgaactggtgcggctgctggacaggctg

SEQ ID NO: 633725 - DNA, 75 bp, synthetic construct
  source 1..75: mol_type = other DNA
ggtttatgagagtaattttacgcaaataatatcacagactacatatccggacgatgctttagttattgctccaaa

SEQ ID NO: 633726 - DNA, 75 bp, synthetic construct
  source 1..75: mol_type = other DNA
tgagcgtaaattcctcattgctgatggcgtgaaaatcggagtgaacaaggtggtttctcagtggattagccagga

SEQ ID NO: 633727 - DNA, 75 bp, synthetic construct
  source 1..75: mol_type = other DNA
ctaacgggggcggcgatgggcaggttaaacctgaacgtcgcaaggcagaacgaatcgactacgaatccttcctga

SEQ ID NO: 633728 - DNA, 75 bp, synthetic construct
  source 1..75: mol_type = other DNA
gatatccggaggagcggggggagaaggtattgggggacagataaatacgtctcttggtcctggctctcccggtgc

SEQ ID NO: 633729 - DNA, 75 bp, synthetic construct
  source 1..75: mol_type = other DNA
gaagccacatttggcgctcaaaattgcgctgtatttgataatgcaggcgtcagcacctggaatgttcctgacata

SEQ ID NO: 633730 - DNA, 75 bp, synthetic construct
  source 1..75: mol_type = other DNA
tgaaggttatcggcggtggcgggtctggcggttatcccgcaataaacacaacgaaccctgccggcggcggtggtg

SEQ ID NO: 633731 - DNA, 75 bp, synthetic construct
  source 1..75: mol_type = other DNA
gttcattaagtgaaaaatggaaataccgatttaacttttatgatcaacatggctttcctggattctggggggcaa

SEQ ID NO: 633732 - DNA, 75 bp, synthetic construct
  source 1..75: mol_type = other DNA
gcgacacaccaagaatcgcacaaatatgcatgttctagaggctatgcgcgttttgaaggcaatttgccccaccag

SEQ ID NO: 633733 - DNA, 75 bp, synthetic construct
  source 1..75: mol_type = other DNA
aacaaaaaaggcgtgatgagcgtgctgatggttccgtcccgctgaaactgtccggaaaaatccacaaacagcttg

SEQ ID NO: 633734 - DNA, 75 bp, synthetic construct
  source 1..75: mol_type = other DNA
tgagatctggtgtgatgagcaaattgacgcaatcattcagggttccgttcatcatatcgacgatgaaagaataaa

SEQ ID NO: 633735 - DNA, 75 bp, synthetic construct
  source 1..75: mol_type = other DNA
tagccataaataacagatataatattgtaatattcacaacaattgcattttttgcatcgtatcttcttgcaactc

SEQ ID NO: 633736 - DNA, 75 bp, synthetic construct
  source 1..75: mol_type = other DNA
tacaacgtgcgttgcaccaaaccaggggaaaaatttccggcacaggtggagcggcggagctccttggtattaaca

SEQ ID NO: 633737 - DNA, 75 bp, synthetic construct
  source 1..75: mol_type = other DNA
aagtatccctggcaacacggagcaggaaaaaaaaaaaaccgaatggagtccgctgttcagcgatccgcatccttc

SEQ ID NO: 633738 - DNA, 75 bp, synthetic construct
  source 1..75: mol_type = other DNA
aaattcaaaatatggctcatatgtttcttctggtttcaataaagaaactcaaatcggaaccggagttggggttat

SEQ ID NO: 633739 - DNA, 75 bp, synthetic construct
  source 1..75: mol_type = other DNA
catcagagatctactgtgctaacatacatagatttaagcctgtgtatagagttaacacggcaatccctactatta

SEQ ID NO: 633740 - DNA, 75 bp, synthetic construct
  source 1..75: mol_type = other DNA
ctcaagtttattcgcgcaaagcgaggaagaggagccattctccaactaagaaactgcgctacgttaagcgtagat

SEQ ID NO: 633741 - DNA, 75 bp, synthetic construct
  source 1..75: mol_type = other DNA
tgaaagtggggggcgggctttcagtcggggcaggactgacactggcaggcgctgcaggtgcagcacttagccgga

SEQ ID NO: 633742 - DNA, 75 bp, synthetic construct
  source 1..75: mol_type = other DNA
aatttaacatcacccagaaacccggcgaggatgccggacaactggcagacagggtgacgaaaaatctgggggata

SEQ ID NO: 633743 - DNA, 75 bp, synthetic construct
  source 1..75: mol_type = other DNA
gtttaagtaatggcaatattttcgtaactccagattcgacacctatgtgcctttattcgcgggttgctctaaatt

SEQ ID NO: 633744 - DNA, 75 bp, synthetic construct
  source 1..75: mol_type = other DNA
tgagttggatgaaattctcttgcattcccccaaggctattcctagtccaccaatgtttactttatggcggcttct

SEQ ID NO: 633745 - DNA, 75 bp, synthetic construct
  source 1..75: mol_type = other DNA
aaaaacccgacagatgtgacgtacttcaggaactaattgattgtggtgatattagtgctaaagatgcaaaaagca

SEQ ID NO: 633746 - DNA, 75 bp, synthetic construct
  source 1..75: mol_type = other DNA
cacttcagatatcgaaggagccaaggatgctatagttgatgtagtgcgcagaactgtttccgattgcaaggggcg

SEQ ID NO: 633747 - DNA, 75 bp, synthetic construct
  source 1..75: mol_type = other DNA
aacccttatctggatattgagcgcgatgatcatcctgcctacctgccgaagcgaggccaggcctctgacgtacgc

SEQ ID NO: 633748 - DNA, 75 bp, synthetic construct
  source 1..75: mol_type = other DNA
actgaagagattgatccgtccaccacgatgcaggagcaactccgcccgatgctgcgcctgattctcgataacgaa

SEQ ID NO: 633749 - DNA, 75 bp, synthetic construct
  source 1..75: mol_type = other DNA
acagaaggacggtgggatgaactcatcgccagcgaaatggaatatgtcaatgcggtgcaaaaaattgcacactta

SEQ ID NO: 633750 - DNA, 75 bp, synthetic construct
  source 1..75: mol_type = other DNA
gaaggacaaggcgaaaacggtaatatcggcccattaaggccattcgctataaatctgagaacaggtgctatatct

SEQ ID NO: 633751 - DNA, 75 bp, synthetic construct
  source 1..75: mol_type = other DNA
gctcaggaaagaatgcccggggctgacagtccacaggaacttatgaaaagggcaagggaatatcaggataagtat

SEQ ID NO: 633752 - DNA, 75 bp, synthetic construct
  source 1..75: mol_type = other DNA
gcaccaaacatagcgagctcgcttacaagtttatgaatattgccctgaaacctgaaattcaggagcaggtggcga

SEQ ID NO: 633753 - DNA, 75 bp, synthetic construct
  source 1..75: mol_type = other DNA
ggtcggtcagtcatcaatgcaaaaatctgtgttaagcgcctacggtgatcaggggggctacgtgctggcgccgca

SEQ ID NO: 633754 - DNA, 75 bp, synthetic construct
  source 1..75: mol_type = other DNA
gtcgttctggctggaagtcaaggggcattcaatgaccgcgccacagggtggtaagcccagtttccctgaagggat

SEQ ID NO: 633755 - DNA, 75 bp, synthetic construct
  source 1..75: mol_type = other DNA
ggtgcatggggacgtattcagctgacagatgccattgctgaactggcgaaaaaacagtctgttgatgcaatgctg

SEQ ID NO: 633756 - DNA, 75 bp, synthetic construct
  source 1..75: mol_type = other DNA
tcagccgcattgttgaattcatcgaaaaaccggatcagccgcagacgctggactcagacatcatggccgtgggcc

SEQ ID NO: 633757 - DNA, 75 bp, synthetic construct
  source 1..75: mol_type = other DNA
caaatttatgattggtggactggggaataagcaatttggcatctacatgattaataactcaaggacagccaatgg

SEQ ID NO: 633758 - DNA, 75 bp, synthetic construct
  source 1..75: mol_type = other DNA
ttctacggcgatcaatcatcccattgggcatgtcacgcaatcactgatcaccctatggttcaaacagaacccgaa

SEQ ID NO: 633759 - DNA, 75 bp, synthetic construct
  source 1..75: mol_type = other DNA
gatccgcgggaactgggatgcgcagagcggttatgcgggtgcgctgcagatgctgcgcgagacgccgcaattttc

SEQ ID NO: 633760 - DNA, 75 bp, synthetic construct
  source 1..75: mol_type = other DNA
aacttacttatcttcataatatgtcagcacaagaaaaggtcggtttaaatcccggttggcaatgctacacctcat

SEQ ID NO: 633761 - DNA, 75 bp, synthetic construct
  source 1..75: mol_type = other DNA
ctgaccgcattacagaaaacgctggcccccggtcagatgctgccggtgtcctcgctgcgcacggccatcggtatg

SEQ ID NO: 633762 - DNA, 75 bp, synthetic construct
  source 1..75: mol_type = other DNA
acgaccaggggatatttctgccaatataaaaagctccgtattaaaaactatagaacaagcacactcagtaaatag

SEQ ID NO: 633763 - DNA, 75 bp, synthetic construct
  source 1..75: mol_type = other DNA
ctgcgtcatatgccgtggatagtaaacttatgtttaaaatggtcagcatctgtaataggcaagaatagaaagttc

SEQ ID NO: 633764 - DNA, 75 bp, synthetic construct
  source 1..75: mol_type = other DNA
acgcgttcatgacctgcgcggtaccgcgaggacaatgctcggcaaaatgggatttgatgatgccctggccaaacg

SEQ ID NO: 633765 - DNA, 75 bp, synthetic construct
  source 1..75: mol_type = other DNA
tcccccgttcccggcgtggaaagtattggtttaacgggtacggggggcatcatcggtggtgcggatattgagcca

SEQ ID NO: 633766 - DNA, 75 bp, synthetic construct
  source 1..75: mol_type = other DNA
cttcaccagccagtctcccattccggcagaaacccggatgcagtccgacacgaatcaggtgtatcaggtactcac

SEQ ID NO: 633767 - DNA, 75 bp, synthetic construct
  source 1..75: mol_type = other DNA
ataaaattgaatttgacatgtcaatcaagtttcctccagtgtataaacattttttgatagaagaaattaaagata

SEQ ID NO: 633768 - DNA, 75 bp, synthetic construct
  source 1..75: mol_type = other DNA
tctgcggcttaaacgcctgggtctgtcaaaaacgtttcgtcgtctggttgtcactctcatccggcgttatggcgt

SEQ ID NO: 633769 - DNA, 75 bp, synthetic construct
  source 1..75: mol_type = other DNA
atattccggatgaacttttgcaggcgcacgaggaaggccgcgtggtgttcttctgcggggcaggcatttcctacc

SEQ ID NO: 633770 - DNA, 75 bp, synthetic construct
  source 1..75: mol_type = other DNA
atgccggtattacgtaatcaagtttctcttgactcattgcatcatcttttagagttttgcttaggttcatctaat

SEQ ID NO: 633771 - DNA, 75 bp, synthetic construct
  source 1..75: mol_type = other DNA
gagaagccgttcgagggcgaagtcggcgtgtcgccccgggtcaaggacgcgctcagccgcgctttcgtggcctcc

SEQ ID NO: 633772 - DNA, 75 bp, synthetic construct
  source 1..75: mol_type = other DNA
aggcgattggctatgcgtcgctgttttatggcttctggccgcaattgagccgctttaagctggtgcttgcgatcg

SEQ ID NO: 633773 - DNA, 75 bp, synthetic construct
  source 1..75: mol_type = other DNA
ttttacaacaccctctcgatacaatagaattaaaaaatgggcacaaatgtctgaatatcaattcgaaatatttca

SEQ ID NO: 633774 - DNA, 75 bp, synthetic construct
  source 1..75: mol_type = other DNA
ttgatactattttttcacataaggaaaaccccatcacaaaattacataaagatgaacaatatgttgacaaacaaa

SEQ ID NO: 633775 - DNA, 75 bp, synthetic construct
  source 1..75: mol_type = other DNA
aaacaaaagtgctgaatgtcgaatcattgttgtcgctaatcctaaacccgacaaggcaatcataactaaaattag

SEQ ID NO: 633776 - DNA, 75 bp, synthetic construct
  source 1..75: mol_type = other DNA
gcaagatgctgaatcactgaataaacaaggatttacgcatcttaccgtacttaccgacgagactaaatttggcga

SEQ ID NO: 633777 - DNA, 75 bp, synthetic construct
  source 1..75: mol_type = other DNA
agctgcgtgaattcacccttgagcacggcattgaaaaacaggtacggatcccggctgacggagagatcctcacgt

SEQ ID NO: 633778 - DNA, 75 bp, synthetic construct
  source 1..75: mol_type = other DNA
cggcgctgaccagtatgcttggcaatggaacatcggcgcttgccagcgccactctctgcggcgcggcggcgttgt

SEQ ID NO: 633779 - DNA, 75 bp, synthetic construct
  source 1..75: mol_type = other DNA
gcggcaactgttatggatggaatacaaggcacaggcgggtgataaagcgatgggatactcgcacttctgccattg

SEQ ID NO: 633780 - DNA, 75 bp, synthetic construct
  source 1..75: mol_type = other DNA
acctgggaggagctgattcagggaggaacgaatgttgctaatgacccgcaatcaggacaattcagactggatgaa

SEQ ID NO: 633781 - DNA, 75 bp, synthetic construct
  source 1..75: mol_type = other DNA
tgttgagtttaataaaagtcatgcagcaatggactctgcgacccaggccccgctgcctgaatataaagaatatca

SEQ ID NO: 633782 - DNA, 75 bp, synthetic construct
  source 1..75: mol_type = other DNA
atctgaatctgccagcttttcgcgtggtccgtgtactcgacaggatcgcggcaaatcgcggctatccgtcatgct

SEQ ID NO: 633783 - DNA, 75 bp, synthetic construct
  source 1..75: mol_type = other DNA
cgtctggctaaagttgacggtatcgatgtaccggcagtggatgaaaacggcaacggcaagccggatgcaatagat

SEQ ID NO: 633784 - DNA, 75 bp, synthetic construct
  source 1..75: mol_type = other DNA
gtgctgcttactctcgccagcgactctcctctcttgcttatcattagtagtatcggttttggcggtacctttatg

SEQ ID NO: 633785 - DNA, 75 bp, synthetic construct
  source 1..75: mol_type = other DNA
gttacaaaaatcaaaaattaaccaatcttttagcaagcatttgataaaggcattctcagcaacatcagatgaaat

SEQ ID NO: 633786 - DNA, 75 bp, synthetic construct
  source 1..75: mol_type = other DNA
gtccctgtcgcattaccgctatcgctcaactatcacggccactatgtgcaggtctcgatggctgaacaggcataa

SEQ ID NO: 633787 - DNA, 75 bp, synthetic construct
  source 1..75: mol_type = other DNA
cgttaatgccgatggttatcgcccctgatgtctggcaatccgctgtggaatttcccgccgacccgcagcaggtgg

SEQ ID NO: 633788 - DNA, 75 bp, synthetic construct
  source 1..75: mol_type = other DNA
ccgggcgcatgtggccgggaattgcgctgagctgttcgctgggaaatatcgccgcatccatcctgcttttttcca

SEQ ID NO: 633789 - DNA, 75 bp, synthetic construct
  source 1..75: mol_type = other DNA
tgtcgccaaaataaaaataaataatgaagggaaactttccgaatggcctagagggttctttgatcaacaatcaca

SEQ ID NO: 633790 - DNA, 75 bp, synthetic construct
  source 1..75: mol_type = other DNA
ctgaatcactggaatgcgctgaacgagttctgtcgtgacggccaggtggaaatagacaacaacatcggtgaaaac

SEQ ID NO: 633791 - DNA, 75 bp, synthetic construct
  source 1..75: mol_type = other DNA
atggtagtgtccgctattgccagtacacctcagtgtgatgtcatcgttcaggcaccacttccccctaaaccgatc

SEQ ID NO: 633792 - DNA, 75 bp, synthetic construct
  source 1..75: mol_type = other DNA
gccagtatttcctgcatataacattaaaaacccgcaacaacgacgcgaagtgcaagcaatgatcggaagaaagag

SEQ ID NO: 633793 - DNA, 75 bp, synthetic construct
  source 1..75: mol_type = other DNA
gccagtgttttctgtatataacattaaaaacccgcaacaacggcgagaagtgaaagcaatgatcggaagaaagcg

SEQ ID NO: 633794 - DNA, 75 bp, synthetic construct
  source 1..75: mol_type = other DNA
tagcgacaataaaagctggatttatcgttatcgaatagctcaaaagccagctaaattaacactaggtagttaccc

SEQ ID NO: 633795 - DNA, 75 bp, synthetic construct
  source 1..75: mol_type = other DNA
ggaaaaactgatgatcttgagggagactatattaaataatgatattgactttatctatcatagagctcgtatatt

SEQ ID NO: 633796 - DNA, 75 bp, synthetic construct
  source 1..75: mol_type = other DNA
ttaatcgagagaaacaacttcgtaatgcattggccgaactaaataagcaactctacaaagagtttgaggttattg

SEQ ID NO: 633797 - DNA, 75 bp, synthetic construct
  source 1..75: mol_type = other DNA
aggatcatcgagctgtgcataaagcatctatagttgcatgtcggaaaattcctcaggtgctgggatacgaaacac

SEQ ID NO: 633798 - DNA, 75 bp, synthetic construct
  source 1..75: mol_type = other DNA
tattcagcgacttcgtcgcggtgtcaggattgtttacgccgatgaaaatccgggtttccacattgatgtcacacc

SEQ ID NO: 633799 - DNA, 75 bp, synthetic construct
  source 1..75: mol_type = other DNA
cgttactacgcgatagatttcacgctggatgaaattaagtcgctgaaatttaccgaaggtttcgatattgaaaac

SEQ ID NO: 633800 - DNA, 75 bp, synthetic construct
  source 1..75: mol_type = other DNA
gcacgtaatgtcggttttgcgttagtgaagccaggttcgtccacgccaattaccctgaaccagccttacaccacg

SEQ ID NO: 633801 - DNA, 75 bp, synthetic construct
  source 1..75: mol_type = other DNA
agtctggctggaaggtgtttcatcggtactgttcggtgtagccgcattctcgaccttttatgtgattgtggtgtg

SEQ ID NO: 633802 - DNA, 75 bp, synthetic construct
  source 1..75: mol_type = other DNA
gaaatgtacgatgcagacgtctctccggcgctgatatcgaaagtcaccgatgccgtaatcgaccaggttgtagaa

SEQ ID NO: 633803 - DNA, 75 bp, synthetic construct
  source 1..75: mol_type = other DNA
ggcgcatggggcagggcgtaaatgggggcgcaccgagtgtaaagggcgtctggcagcgaaatacacagcgacgca

SEQ ID NO: 633804 - DNA, 75 bp, synthetic construct
  source 1..75: mol_type = other DNA
gattattcccggttcacgcggtgattactcctggctggttaagcctgttgcgaacgaaaaaacgctccactcgct

SEQ ID NO: 633805 - DNA, 75 bp, synthetic construct
  source 1..75: mol_type = other DNA
aagaattcttttattcatatatggacataccatatcgagcagcggtagttgcaactattgatggagaaggatatt

SEQ ID NO: 633806 - DNA, 75 bp, synthetic construct
  source 1..75: mol_type = other DNA
actgatttgggacttgttcgctctattcttgggatggtcttttggccgtacttcatcaggaactatcctttacgt

SEQ ID NO: 633807 - DNA, 75 bp, synthetic construct
  source 1..75: mol_type = other DNA
cgttataccaggcacttgaaggtgcgggcgatcagcgcgaggagtattggaaaaatcgtgtccagccattttggc

SEQ ID NO: 633808 - DNA, 75 bp, synthetic construct
  source 1..75: mol_type = other DNA
ataatgtatctgctattcttctttggtattcccgcttgcccgaatttaactctcgcctacggtctggcagtgtgc

SEQ ID NO: 633809 - DNA, 75 bp, synthetic construct
  source 1..75: mol_type = other DNA
gaatatgaatgacagcctttttgatctggagtcaacattttgcgcccctgactctgatgagtatttcattgagcc

SEQ ID NO: 633810 - DNA, 75 bp, synthetic construct
  source 1..75: mol_type = other DNA
cagttaacgcgctgggaacgaaattttgcgatgccagcgcgcaccgaacgttgattaaaggagcattagatttta

SEQ ID NO: 633811 - DNA, 75 bp, synthetic construct
  source 1..75: mol_type = other DNA
cagttgtgcatagtacacatggtacgcaacagcctgcggttcgtggcgtggaaagactataaagcggtaacccgt

SEQ ID NO: 633812 - DNA, 75 bp, synthetic construct
  source 1..75: mol_type = other DNA
ctggtctccggggaagattacgttgtgcaccgccagccgcagcttgatttttatcagaacctgcgaaatccgcag

SEQ ID NO: 633813 - DNA, 75 bp, synthetic construct
  source 1..75: mol_type = other DNA
gcggcactggaaccgcgtccgacgctggggatcgtgtccggtctgtatgaactgttcccggaaaacgggccggta

SEQ ID NO: 633814 - DNA, 75 bp, synthetic construct
  source 1..75: mol_type = other DNA
cctgacgccagtgctgcgtggatggataagctaattcaggctgagggaagtcagaggagtgctggaagagctgga

SEQ ID NO: 633815 - DNA, 75 bp, synthetic construct
  source 1..75: mol_type = other DNA
aaggagcacagcaaaacgaaggtagccatattccggcctataccggaagcaatactgccgttcatcacgcagctg

SEQ ID NO: 633816 - DNA, 75 bp, synthetic construct
  source 1..75: mol_type = other DNA
aatttaagagccaattatataaaaattgctgatgcaactacacctggaagtgtgaaggctattgcaactattact

SEQ ID NO: 633817 - DNA, 75 bp, synthetic construct
  source 1..75: mol_type = other DNA
aaccgatgcacaaagtgctagtgataaatattgtgcgtactgcagcgacagaaacggcaatcttaaacactggtc

SEQ ID NO: 633818 - DNA, 75 bp, synthetic construct
  source 1..75: mol_type = other DNA
taacagcagaagtgtttgcatccacgttaggcttgcctatgtttatcgtaaaattagataaattgatgtcatcat

SEQ ID NO: 633819 - DNA, 75 bp, synthetic construct
  source 1..75: mol_type = other DNA
gaacacgcaaaatacgtggtgctgatggaccccctggatggctcgtccaacatcgatgttaacgtttctgtcggt

SEQ ID NO: 633820 - DNA, 75 bp, synthetic construct
  source 1..75: mol_type = other DNA
gaagaagtacattaaattctgccaggaagaagataaatccaccaaccgcccgtatacctcacgttatatcggttc

SEQ ID NO: 633821 - DNA, 75 bp, synthetic construct
  source 1..75: mol_type = other DNA
ctaccaacttgagtttactgttgatgttcttccggtgctggttgaattgggcgttttggaagaagaacagaaagc

SEQ ID NO: 633822 - DNA, 75 bp, synthetic construct
  source 1..75: mol_type = other DNA
cttttttattgagcttagtgctgcctgcacaggccaccagctttaccgaatatctgccaatgagtgacagcgaat

SEQ ID NO: 633823 - DNA, 75 bp, synthetic construct
  source 1..75: mol_type = other DNA
agaaaagtgggcattgcaggcgtaacgcttgagaagatgccaaatgaagaggattactggcgattaaccgctaag

SEQ ID NO: 633824 - DNA, 75 bp, synthetic construct
  source 1..75: mol_type = other DNA
caggcagaaggaagcggagaaaatcccctggtttcttcgctcgatgcactggcgcaggtggaaaaaatcggtgtc

SEQ ID NO: 633825 - DNA, 75 bp, synthetic construct
  source 1..75: mol_type = other DNA
tgtcaatattgacctgctgattatggatgcctccagctttacgcttttcttcgatgagcttaacgccctgctggc

SEQ ID NO: 633826 - DNA, 75 bp, synthetic construct
  source 1..75: mol_type = other DNA
gaaagccgccaggcctatctggacgcactgcgccagcgcctgagccaccgtcttttacgcgtggaaatcggcgaa

SEQ ID NO: 633827 - DNA, 75 bp, synthetic construct
  source 1..75: mol_type = other DNA
ttttgtatagtgacagagtcccatctgaacaagagtctgacagcaaagtatccgctacagatgagcggttttcac

SEQ ID NO: 633828 - DNA, 75 bp, synthetic construct
  source 1..75: mol_type = other DNA
agataaattattaacacaggcaggtgtaaaaaacagggttttcctagtattagaaaacttggttgaagatatgta

SEQ ID NO: 633829 - DNA, 75 bp, synthetic construct
  source 1..75: mol_type = other DNA
cacggcgccccggtggtatttaccagcaatctggggcattccctctacagcagccgcgcagaatcgccgttgggc

SEQ ID NO: 633830 - DNA, 75 bp, synthetic construct
  source 1..75: mol_type = other DNA
gcgatggcgataccgtcagcaacctggcgcgtaaaaaccagctcacgtttacggaggactgggagcatcgccact

SEQ ID NO: 633831 - DNA, 75 bp, synthetic construct
  source 1..75: mol_type = other DNA
gttcggaggatgaggggtatctggcgagctggcagtacgacgcggcgggaaacctgctggggaggcgcgcggggg

SEQ ID NO: 633832 - DNA, 75 bp, synthetic construct
  source 1..75: mol_type = other DNA
ggcagaccagctactggaaatccgccgccagcggcacgaaactgacgcgccggaagttatccgcttcagctacga

SEQ ID NO: 633833 - DNA, 75 bp, synthetic construct
  source 1..75: mol_type = other DNA
tggtcacgctcacgaacgagaacggagaacgctaccggttccgccatgatgtgctggaccgtctggcggagcaga

SEQ ID NO: 633834 - DNA, 75 bp, synthetic construct
  source 1..75: mol_type = other DNA
aatggtggtgttttcgaacaggcaggcgtcaacttttctcacgtccacggcgaggcgatgcctgcttccgccacc

SEQ ID NO: 633835 - DNA, 75 bp, synthetic construct
  source 1..75: mol_type = other DNA
atccgctaaaaacgccatccggtaaaatcgaagtgtattcccaggcactggctgatctggcgcagaaatggatct

SEQ ID NO: 633836 - DNA, 75 bp, synthetic construct
  source 1..75: mol_type = other DNA
tctatagtttattctgtcagtgaatttaaaatgattaattataaagatgataaaatatatagagttgatttcaaa

SEQ ID NO: 633837 - DNA, 75 bp, synthetic construct
  source 1..75: mol_type = other DNA
attgcggaactgatgtcagcacggttgacgtcaccttttcaggaaccccgacggagtgcagagcgaaatgctgtc

SEQ ID NO: 633838 - DNA, 75 bp, synthetic construct
  source 1..75: mol_type = other DNA
gaaataaaaaagcttgcaaaaataaaaaacaaagagcaagaggagaagattaaatcagaaatggagttgattttg

SEQ ID NO: 633839 - DNA, 75 bp, synthetic construct
  source 1..75: mol_type = other DNA
atgctgtctcctttgtggcgctgactaacattgagatgaagcgtgcgtcgctggagttacacaacaaaccgcaac

SEQ ID NO: 633840 - DNA, 75 bp, synthetic construct
  source 1..75: mol_type = other DNA
aacgaccgtgatattttgatctccgaccatgtcatcgagcgcatcaactgtaccaacggcaaaatcaactggggc

SEQ ID NO: 633841 - DNA, 75 bp, synthetic construct
  source 1..75: mol_type = other DNA
ggcagccgggagccgaagggtgtccccgcctccgggcatcagaacaacagaaacgacaaaacagaaaaatgcctc

SEQ ID NO: 633842 - DNA, 75 bp, synthetic construct
  source 1..75: mol_type = other DNA
tgaccgttgcgctacgtgaaacagatgcagggcaaggcgtaccggggaattttcgtgcactggcaacgtttaatt

SEQ ID NO: 633843 - DNA, 75 bp, synthetic construct
  source 1..75: mol_type = other DNA
tccttaccgccggggcaacgcttgccgcggccttaccggtactttcagcaaccgccgcgcgtgctgctgagaagc

SEQ ID NO: 633844 - DNA, 75 bp, synthetic construct
  source 1..75: mol_type = other DNA
cctcactttgatataatcatcaaagcttgcatctcgggtgtcagagactttgtacgtcaaaatcctcgaatgcga

SEQ ID NO: 633845 - DNA, 75 bp, synthetic construct
  source 1..75: mol_type = other DNA
gagcctctaaaattaataaagaccagtttgattttattgcagtaacagacccattgacctttcagtcagaatttg

SEQ ID NO: 633846 - DNA, 75 bp, synthetic construct
  source 1..75: mol_type = other DNA
cacgaccgaatacggcggtgctgctcatgattttgtcaggtcatcctacgatatccagtctgctattgccgggtt

SEQ ID NO: 633847 - DNA, 75 bp, synthetic construct
  source 1..75: mol_type = other DNA
gcaccaggcggtgaaaaactttgtcgtcgccaatatcaccggcagccactgccgacagttggttcacgtcgaaaa

SEQ ID NO: 633848 - DNA, 75 bp, synthetic construct
  source 1..75: mol_type = other DNA
gcttcctgtcggcaggcgctgcgcttgccgccgttcctctgctccacagccccgccgcacgtgcgctggggcgca

SEQ ID NO: 633849 - DNA, 75 bp, synthetic construct
  source 1..75: mol_type = other DNA
ggcatcatcatgccaccgggtaaaacgctgcaggtaaacggcagcctgaaaggcaatggtcgtgggcgttttgcg

SEQ ID NO: 633850 - DNA, 75 bp, synthetic construct
  source 1..75: mol_type = other DNA
ggtaaagtacaccagcccgatggggaggataacgcgctggcagcgggacgggcagggccgggtgcgcagccggac

SEQ ID NO: 633851 - DNA, 75 bp, synthetic construct
  source 1..75: mol_type = other DNA
atcgtgatgcatctggcggcagaaagccatgtggaccgttccattgatggcccggcagcctttatccagaccaac

SEQ ID NO: 633852 - DNA, 75 bp, synthetic construct
  source 1..75: mol_type = other DNA
caggctttatcggctctgctgtggttcgtcatatcattgaaaatacctgggatgaagtccgcgtgctggactgcc

SEQ ID NO: 633853 - DNA, 75 bp, synthetic construct
  source 1..75: mol_type = other DNA
tggcaggccttgccactgcggcagacaaactaccgtattttacggggaatgatacagccagcctgacaaccctga

SEQ ID NO: 633854 - DNA, 75 bp, synthetic construct
  source 1..75: mol_type = other DNA
caccgacgatctgtttaccgaagagaccccgtacgcgccgagcagcccgtattcggcctccaaagccggcagcga

SEQ ID NO: 633855 - DNA, 75 bp, synthetic construct
  source 1..75: mol_type = other DNA
accccttacgcgccgagcagcccgtactctgcctccaaagcgggcagcgatcatctggttcgcgcctggaaccgc

SEQ ID NO: 633856 - DNA, 75 bp, synthetic construct
  source 1..75: mol_type = other DNA
gcgatctgggctgggtgccgcaggagacgttcgagagcgggattgagaaaaccgtgcactggtacctgaacaacc

SEQ ID NO: 633857 - DNA, 75 bp, synthetic construct
  source 1..75: mol_type = other DNA
ctgacggtaaaaggcactgtgcaactcagcagcgccactaacagcacatcagaaacgcaggccgccactccaaag

SEQ ID NO: 633858 - DNA, 75 bp, synthetic construct
  source 1..75: mol_type = other DNA
ccacgccggaaaatctcttcgggaaagactttgctgatgcactctttcagctacgggatcttgtcggctccataa

SEQ ID NO: 633859 - DNA, 75 bp, synthetic construct
  source 1..75: mol_type = other DNA
ttatgcgtggcagtctcctttcggtccataatagcagaacaaaagaaagagccagaaatgacggtcagatattat

SEQ ID NO: 633860 - DNA, 75 bp, synthetic construct
  source 1..75: mol_type = other DNA
cggctgcaaggctatatccaataatgaaacgtttttcggtgctggcggtggggccggtggaacaataatttcaat

SEQ ID NO: 633861 - DNA, 75 bp, synthetic construct
  source 1..75: mol_type = other DNA
tggacgcgcaggcgctggcggtggtgttagcggtaaggcatatggttcaggtggcggtggtgcatacgatgccgg

SEQ ID NO: 633862 - DNA, 75 bp, synthetic construct
  source 1..75: mol_type = other DNA
accctgactaatgttgggcgggatattctggctaaaacaagcaaacaggaggttattcattatcttggtttggga

SEQ ID NO: 633863 - DNA, 75 bp, synthetic construct
  source 1..75: mol_type = other DNA
atgatcggcgcgcgccagggcggacgcatcatcacgctgtcatcggtttccggcgtaatgggtaatcgcggtcag

SEQ ID NO: 633864 - DNA, 75 bp, synthetic construct
  source 1..75: mol_type = other DNA
cgctaatggcactcgaatggcggcggcaggtgctgaatacgcagctttcggtggtgatgtttatgctgcggcgga

SEQ ID NO: 633865 - DNA, 75 bp, synthetic construct
  source 1..75: mol_type = other DNA
aagggagagctgcgcgcgctggtacaggaattacaggcgctgcgcttgcagctgcaacaaaatcagccagtgctg

SEQ ID NO: 633866 - DNA, 75 bp, synthetic construct
  source 1..75: mol_type = other DNA
gcaggtgctaaatacgcagctttcagtggtgatgtttatgctgcgccggatacacccgttagctacgctggttta

SEQ ID NO: 633867 - DNA, 75 bp, synthetic construct
  source 1..75: mol_type = other DNA
tgttgatattgataccacaaagaaaaatgttgaattaaaaggaaaaacgaaaggtggtgtaatggactggaaaat

SEQ ID NO: 633868 - DNA, 75 bp, synthetic construct
  source 1..75: mol_type = other DNA
agtgattacctgccacagacaaattggccaacaactcaattaccaccaggatatacttgtgcagaaccctattta

SEQ ID NO: 633869 - DNA, 75 bp, synthetic construct
  source 1..75: mol_type = other DNA
catcaaaatatggacacttaaataatggcggatatggagcgagacccaacaaaccgcctacgcccgatccaagta

SEQ ID NO: 633870 - DNA, 75 bp, synthetic construct
  source 1..75: mol_type = other DNA
atttgagtgattcccctgtgttgtcagcgtatgcacagcagacgatcaaccagttagaccccatcctgtatagcg

SEQ ID NO: 633871 - DNA, 75 bp, synthetic construct
  source 1..75: mol_type = other DNA
accccacgctgggggagatgaccgtttccatacctgagaacgggttaaggctttccggctccgccgacaacggtc

SEQ ID NO: 633872 - DNA, 75 bp, synthetic construct
  source 1..75: mol_type = other DNA
tcagaccatcaggggaaccgtgacgttctggaccaatatggtggataacaccatcagtgaggtaacaaacgtcag

SEQ ID NO: 633873 - DNA, 75 bp, synthetic construct
  source 1..75: mol_type = other DNA
cggtgctcaacattatcgacaaagaatcactttgcgaacgcgcgaatcaactgggccagcgtctgacacaaacgt

SEQ ID NO: 633874 - DNA, 75 bp, synthetic construct
  source 1..75: mol_type = other DNA
cgtaccttatccgtcagatttacacggcatttcaacacaggactccctcgacgccatcgaacgcttgtttaaatc

SEQ ID NO: 633875 - DNA, 75 bp, synthetic construct
  source 1..75: mol_type = other DNA
tggcgcaggggctgctcctgctgacctgtggcgcatacggcaacgtgattcgcttcctgtatccgctgaccatcc

SEQ ID NO: 633876 - DNA, 75 bp, synthetic construct
  source 1..75: mol_type = other DNA
tattcagaggcttattcattggttggcaatccatttgattcaagactgggaaggaccaacttccaacttttgaga

SEQ ID NO: 633877 - DNA, 75 bp, synthetic construct
  source 1..75: mol_type = other DNA
tttgatttcgaccctattcttattgaaccaccaaaagtagagtctgttttatctaaacgttttttcttagccaaa

SEQ ID NO: 633878 - DNA, 75 bp, synthetic construct
  source 1..75: mol_type = other DNA
aactcaaaattaaaattttatataggtgatgtgcgagactataattccgttctaaatgcaacgcgtggtgccgat

SEQ ID NO: 633879 - DNA, 75 bp, synthetic construct
  source 1..75: mol_type = other DNA
ttaaccgtggagtcagacacctcttctgacaaaacacaggtcaatacgggcggacgggagatcgtcaaaacaaaa

SEQ ID NO: 633880 - DNA, 75 bp, synthetic construct
  source 1..75: mol_type = other DNA
ccttaatgaaaatcataccatcaaaggaacgttgcaggagttgataaatacagcagaaaaaacggcgtttctcgg

SEQ ID NO: 633881 - DNA, 75 bp, synthetic construct
  source 1..75: mol_type = other DNA
ttacaggtggcacaggttcatttggtaatgctgtattaaagcgttttttagatacgaatatcaaagaaattcgca

SEQ ID NO: 633882 - DNA, 75 bp, synthetic construct
  source 1..75: mol_type = other DNA
ttatatatcattttacctatattaatcagattctaagtaaattacaaaacaaatacttcttgtatattactaagc

SEQ ID NO: 633883 - DNA, 75 bp, synthetic construct
  source 1..75: mol_type = other DNA
taaaacgctacttcctgttttagatactatgttgtacaagtttgatgacaatgaaattataacttccgctattga

SEQ ID NO: 633884 - DNA, 75 bp, synthetic construct
  source 1..75: mol_type = other DNA
gtcatcgaataaaaataatgttgatcattttttgaatccgctaagagagatgaacagaccctattcggcaatata

SEQ ID NO: 633885 - DNA, 75 bp, synthetic construct
  source 1..75: mol_type = other DNA
acagataaaatagatatttaccctatctttaataaattaaaatcaataaaacctggcacaaaacaagctggggag

SEQ ID NO: 633886 - DNA, 75 bp, synthetic construct
  source 1..75: mol_type = other DNA
ggcgtattctggaaacctagaaaaagaaaagagtatattgttgatagctctgatttacgcaaataccagatttta

SEQ ID NO: 633887 - DNA, 75 bp, synthetic construct
  source 1..75: mol_type = other DNA
gaaggttactttcaccacagcgaatactatgacgggtcagactgacctgctgaaaaacaccaaagaaactgaaat

SEQ ID NO: 633888 - DNA, 75 bp, synthetic construct
  source 1..75: mol_type = other DNA
gcggtcacattgaaaccgggatgcgatttaccgatggtaactggaacctgacgccgtatgcatcgttaacggggg

SEQ ID NO: 633889 - DNA, 75 bp, synthetic construct
  source 1..75: mol_type = other DNA
cgtaaaattgcagaaatctgtggtattggcctcaagaccgttagcgcccatgagtccgcaattcgagaacgatta

SEQ ID NO: 633890 - DNA, 75 bp, synthetic construct
  source 1..75: mol_type = other DNA
atggggcgtaaaggacaactctctattgtattgttgagcctgtttatcgccttgatttttcaatttttctggccc

SEQ ID NO: 633891 - DNA, 75 bp, synthetic construct
  source 1..75: mol_type = other DNA
cagaagagcgtgccggtgcatatcttcccgtttgcgatgaacgaagaaaatatgcgccaggcgcaggtatggccg

SEQ ID NO: 633892 - DNA, 75 bp, synthetic construct
  source 1..75: mol_type = other DNA
gaaaacccaaaaaaaactcatcctacggatgtagtcttcaaatataaagatccttattcagatataactcagtat

SEQ ID NO: 633893 - DNA, 75 bp, synthetic construct
  source 1..75: mol_type = other DNA
gtcgcctgaaaatggagcatctgagttatcacgttgaaagcctgctggaacaggcagctaaaaaagagctgagtt

SEQ ID NO: 633894 - DNA, 75 bp, synthetic construct
  source 1..75: mol_type = other DNA
atagcatctggacagggtttttctgttaatggaaaacaggctgcacatgatggtgataaaacaacctgcggagca

SEQ ID NO: 633895 - DNA, 75 bp, synthetic construct
  source 1..75: mol_type = other DNA
gccccgcaggccaatatgtggggccatatggcggaaaccctgacggccatgaattacacctttagtcgtccgaaa

SEQ ID NO: 633896 - DNA, 75 bp, synthetic construct
  source 1..75: mol_type = other DNA
ttccacaacttccggaacccttatcgaaggaatcaacagttatggtgatgctttctacatcaggaattcagaagc

SEQ ID NO: 633897 - DNA, 75 bp, synthetic construct
  source 1..75: mol_type = other DNA
taagaattgatgcagatggtaatgccagagacgtcgacaacgcttacgaggagggaatctacgccgccgtaatag

SEQ ID NO: 633898 - DNA, 75 bp, synthetic construct
  source 1..75: mol_type = other DNA
cacctgcaggactgcatgctgagtcagggtggaactacttattcaaaagcgaaggttactttcactacagcaaat

SEQ ID NO: 633899 - DNA, 75 bp, synthetic construct
  source 1..75: mol_type = other DNA
tggggatttctaaagcaatgatggaaaaagtcatcgttgccaaaagccgcaatttaactcatacgaacacaacta

SEQ ID NO: 633900 - DNA, 75 bp, synthetic construct
  source 1..75: mol_type = other DNA
gtcctgcgggcgcgaattcttgtgaatcatttgacttcaatacaggtcaacttgtgactgtatctaaaagccgcg

SEQ ID NO: 633901 - DNA, 75 bp, synthetic construct
  source 1..75: mol_type = other DNA
tcatctaataaaaataatgttgatcagtttattgaatgcgctaagagaaatgaacagaccctattcggcaatata

SEQ ID NO: 633902 - DNA, 75 bp, synthetic construct
  source 1..75: mol_type = other DNA
atggttatgttatttattacaatggcgagggtaataatgaattagagtttgtttatattcttgatacgttatcaa

SEQ ID NO: 633903 - DNA, 75 bp, synthetic construct
  source 1..75: mol_type = other DNA
gtgagtttgacagatcgttctatgatgtgttttatcagtcttataatgcagaaactgataaaacaaaacggggta

SEQ ID NO: 633904 - DNA, 75 bp, synthetic construct
  source 1..75: mol_type = other DNA
actttttacggcattaacggccccatttatcacacccgctactgctactggcccatatccagactgactggctgg

SEQ ID NO: 633905 - DNA, 75 bp, synthetic construct
  source 1..75: mol_type = other DNA
cagcggccatacgcgccgtggcgttgcgatatggattccccctaatagaccttaacgctgactgtggctggacaa

SEQ ID NO: 633906 - DNA, 75 bp, synthetic construct
  source 1..75: mol_type = other DNA
gccgtcacattagattttggcatgagtactataattggaagagattcttctgatagtacaattagtaatgacaag

SEQ ID NO: 633907 - DNA, 75 bp, synthetic construct
  source 1..75: mol_type = other DNA
gtctttttttggtgcctgattgtttttgttgcagtaccttcagcattaggatattcatcgttataccaaatatta

SEQ ID NO: 633908 - DNA, 75 bp, synthetic construct
  source 1..75: mol_type = other DNA
tagcgctcagcgcgtacccggcgcaaaatttatcgcgggcgggaccaatctgctggacctgatgaagctggaaat

SEQ ID NO: 633909 - DNA, 75 bp, synthetic construct
  source 1..75: mol_type = other DNA
tggatttacgctcgcatgtaataaattcagctacaaatatgaaattaaaaacaacggcggaaatgtctctgtttc

SEQ ID NO: 633910 - DNA, 75 bp, synthetic construct
  source 1..75: mol_type = other DNA
atgcatcatctcagccgttacgccttcttccccaatattctggaacgtgatacagcggtacgctggccgcgcaac

SEQ ID NO: 633911 - DNA, 75 bp, synthetic construct
  source 1..75: mol_type = other DNA
cgccattgccgccgagctggagggcttttacctgcgccagcacggcgaggaaaaaggtcgccagattgcctgtgc

SEQ ID NO: 633912 - DNA, 75 bp, synthetic construct
  source 1..75: mol_type = other DNA
tagctctttcatacccttggtttcatcgaatggctttacgctcgcatgtaataaattcagctacaaatatgaaat

SEQ ID NO: 633913 - DNA, 75 bp, synthetic construct
  source 1..75: mol_type = other DNA
taaatgatatattaaagaatgaaggtgtaacaaaaccttcagaaattaatgaaaaacctactgagattacaacgc

SEQ ID NO: 633914 - DNA, 75 bp, synthetic construct
  source 1..75: mol_type = other DNA
gtcattgattttttggcagagcaactgcatattgagaatggtagtgagcaggttaatttatataactcaggaaaa

SEQ ID NO: 633915 - DNA, 75 bp, synthetic construct
  source 1..75: mol_type = other DNA
atgtcgaccgtaatgtatctctttagtgtggtgggcaacatgggcggaggtctgattgaccaggttttaccgcaa

SEQ ID NO: 633916 - DNA, 75 bp, synthetic construct
  source 1..75: mol_type = other DNA
gatttatggcaaataaggccgccgtaaaagcaattcgcgatgcactaggaaacgaagagttccagcgtttgtcga

SEQ ID NO: 633917 - DNA, 75 bp, synthetic construct
  source 1..75: mol_type = other DNA
agtaacatttgacggcatgaaagcatggagagcgaaatttgctgatgcggagcaaaaatataagcgtagcggaga

SEQ ID NO: 633918 - DNA, 75 bp, synthetic construct
  source 1..75: mol_type = other DNA
aagccatacagaactagccgatatcattagattggctgattctgttgaaaatcaattgaatggaggcaattcatt

SEQ ID NO: 633919 - DNA, 75 bp, synthetic construct
  source 1..75: mol_type = other DNA
gtttacttcacgctatgactacatccggcgcaataaaagcccggtattgagcgttacgccgccgcagagggtgat

SEQ ID NO: 633920 - DNA, 75 bp, synthetic construct
  source 1..75: mol_type = other DNA
ctgattcccgcaaccttaaccgccatgctggtgggaattaccgaaccgctggaatttaccttcctgttcatttca

SEQ ID NO: 633921 - DNA, 75 bp, synthetic construct
  source 1..75: mol_type = other DNA
catcgaaggtaaggaatgggaagctctgcgttcaataatctgccgctctcttggattatcatcaacacctggtgc

SEQ ID NO: 633922 - DNA, 75 bp, synthetic construct
  source 1..75: mol_type = other DNA
gatctggatcgtgcagcagaaatactggcaaaagcatgccgaatgcttcttgacgataaattatctgatactgat

SEQ ID NO: 633923 - DNA, 75 bp, synthetic construct
  source 1..75: mol_type = other DNA
gacattacctgcaattacgccagtttcggatatccgtattgcggccatggcacgttatgcctcaacggctaagat

SEQ ID NO: 633924 - DNA, 75 bp, synthetic construct
  source 1..75: mol_type = other DNA
ctggccacggccggtatcagtggcgctatgggttccgtagcgctcacgtatttctgggaacgaattaccggagtg

SEQ ID NO: 633925 - DNA, 75 bp, synthetic construct
  source 1..75: mol_type = other DNA
aactgagacaggcttaccgtgaaggccaggaagatcaacttggagcgttaggtctggtgctcaatattattgttc

SEQ ID NO: 633926 - DNA, 75 bp, synthetic construct
  source 1..75: mol_type = other DNA
catcttggctgttgttctggagcaacaaacggatcaaatgccataccagataatgaccgatacgggggcatacag

SEQ ID NO: 633927 - DNA, 75 bp, synthetic construct
  source 1..75: mol_type = other DNA
ggaaatattgatttaggtgtcgttggcgtgggcgattttaccggaaacatttcagccgaaaattatcaccccggt

SEQ ID NO: 633928 - DNA, 75 bp, synthetic construct
  source 1..75: mol_type = other DNA
gcatctggatttcaaacctaaaaacggcgcttttgcagcaggctcgcaacaaatttttccgaatgaggaaagtaa

SEQ ID NO: 633929 - DNA, 75 bp, synthetic construct
  source 1..75: mol_type = other DNA
atctcaatgagccggacctctttctcgacagcgactctctgagccagcttcccaaagatctcctcaccattccgt

SEQ ID NO: 633930 - DNA, 75 bp, synthetic construct
  source 1..75: mol_type = other DNA
ctcagcagggcgaagcgcaaatctggcgtcgcgaagtgagttcccgatacggtcagtatccgaaagcgcaggcgg

SEQ ID NO: 633931 - DNA, 75 bp, synthetic construct
  source 1..75: mol_type = other DNA
aaatgtgttaaatcagttacatattaactttaaaccgcttaatggcgtgatggcgacaggctctcagcaaatttt

SEQ ID NO: 633932 - DNA, 75 bp, synthetic construct
  source 1..75: mol_type = other DNA
aaatgtcttaaatcaactacacatagactttagggcacaaagtggtgcaatggctaatggttcccgacaaatatt

SEQ ID NO: 633933 - DNA, 75 bp, synthetic construct
  source 1..75: mol_type = other DNA
atgagtggtgaaaaaaaggcgaaaggctggcggttttatggccttgttggttttggggcaatagcgctgctatcc

SEQ ID NO: 633934 - DNA, 75 bp, synthetic construct
  source 1..75: mol_type = other DNA
cattctgtgaatgatcctgaaacgctattgcgggatttcattacttcttcaatcactaatccggcgttgaaacag

SEQ ID NO: 633935 - DNA, 75 bp, synthetic construct
  source 1..75: mol_type = other DNA
acactgttggccgctaaaaatcatgacaacatgtcagctgttcatatagccattcatcataatcattataaaact

SEQ ID NO: 633936 - DNA, 75 bp, synthetic construct
  source 1..75: mol_type = other DNA
ggatgaaacaggaacttcgcactcgcctgaaagactcgataaagaagattatgtccacaattgtcgaattttcga

SEQ ID NO: 633937 - DNA, 75 bp, synthetic construct
  source 1..75: mol_type = other DNA
aagacaaccaggatcaactgtacctaaatatttcgattccctggggaaccagtagaacattgagctatggtatgc

SEQ ID NO: 633938 - DNA, 75 bp, synthetic construct
  source 1..75: mol_type = other DNA
atgcaccacatcagggcgataattcacaaaatataagttcctatgggcaggctggggttaatcttggggcctggc

SEQ ID NO: 633939 - DNA, 75 bp, synthetic construct
  source 1..75: mol_type = other DNA
ttaaataaactggtggacgtcgcacacgttgctatctgccagagcacaactacatcacaacaaatccgcgcctga

SEQ ID NO: 633940 - DNA, 75 bp, synthetic construct
  source 1..75: mol_type = other DNA
gtatcaagtaaaacagaatgtataaggaaatgtaacgaatttctagagtatttaattcgggaaaaaaagtatcga

SEQ ID NO: 633941 - DNA, 75 bp, synthetic construct
  source 1..75: mol_type = other DNA
tcatctgaatgtgacctggttagaaaagacatttatcgttgtgctctggagttggtcgttgaaaaaacacctgat

SEQ ID NO: 633942 - DNA, 75 bp, synthetic construct
  source 1..75: mol_type = other DNA
acatcacggaggaagagattgccgccagaaacgagaaacaagaagagttatcatcaatacagggtgatgccacca

SEQ ID NO: 633943 - DNA, 75 bp, synthetic construct
  source 1..75: mol_type = other DNA
gcgctgggtctgtataccgacacacgaacggtcagtgaggtttgtaaggagaaagagaatagggaagaagagacg

SEQ ID NO: 633944 - DNA, 75 bp, synthetic construct
  source 1..75: mol_type = other DNA
tccagagccaattttaattattgaaattcaacatggcaatttaaatgatgaatgtgatgttgaaagattgattgc

SEQ ID NO: 633945 - DNA, 75 bp, synthetic construct
  source 1..75: mol_type = other DNA
tagttctaagtcgaagggattatgttcctttgtattggaaattaagaaacttgataggtatgtttctgaaattta

SEQ ID NO: 633946 - DNA, 75 bp, synthetic construct
  source 1..75: mol_type = other DNA
acaacggcggtgggctcacgtctgatgagcggtgcgctggggctggttggtggcgtacccggactggtgatgctg

SEQ ID NO: 633947 - DNA, 75 bp, synthetic construct
  source 1..75: mol_type = other DNA
gctgatgggggaggccggacctgaagccattatgcccctgacgcgggcggcggatggctcgctgggtgtgcgcgc

SEQ ID NO: 633948 - DNA, 75 bp, synthetic construct
  source 1..75: mol_type = other DNA
cacagcttgcgacggagggtatctcagggatggtgaataacatcacggagatgctgaacggaaataaagtggaat

SEQ ID NO: 633949 - DNA, 75 bp, synthetic construct
  source 1..75: mol_type = other DNA
atacggagatacgctatcccctgaagcacttcaggagaaaatagcggattcgatcgccaaaatgccggagaaaac

SEQ ID NO: 633950 - DNA, 75 bp, synthetic construct
  source 1..75: mol_type = other DNA
tcatggtactgccggagcagcaggctggcagcttaaggatgccatcactggcgtcattaacgaacaggccagcat

SEQ ID NO: 633951 - DNA, 75 bp, synthetic construct
  source 1..75: mol_type = other DNA
gatgacgactgggatgcggtgatccacaccaatctcgacagtttctacaacgttattcagccgtgcattatgccg

SEQ ID NO: 633952 - DNA, 75 bp, synthetic construct
  source 1..75: mol_type = other DNA
gtagaaacatattatgctgctattaatgcaatcagccaaagccctgatgaatcccctaatgattttggtaaaaat

SEQ ID NO: 633953 - DNA, 75 bp, synthetic construct
  source 1..75: mol_type = other DNA
agaagactggaatagtattgtctctgttggtggagttagcacacctcgatttgtttacgtggggcagtataataa

SEQ ID NO: 633954 - DNA, 75 bp, synthetic construct
  source 1..75: mol_type = other DNA
acgggtgcattaatattgatgggaatcggttggaactttctctatgtcggcggaaccagcttattggcaacaact

SEQ ID NO: 633955 - DNA, 75 bp, synthetic construct
  source 1..75: mol_type = other DNA
ccgttttgctgcgggtgaagttgcgttgccggcattccgcacccgggccatttcgctggttctggctggcggtgt

SEQ ID NO: 633956 - DNA, 75 bp, synthetic construct
  source 1..75: mol_type = other DNA
ggacacgctggagcaggccctgacacatgattctgatggcctgctgattcgcctgatggatattcatgaagtggg

SEQ ID NO: 633957 - DNA, 75 bp, synthetic construct
  source 1..75: mol_type = other DNA
attatgacgcgccaacagcaaaattgccggactatctgatactacttagtgcgttacatcagacgcttcccacaa

SEQ ID NO: 633958 - DNA, 75 bp, synthetic construct
  source 1..75: mol_type = other DNA
agacgcatattcttccgcaacaggcgatacgcgatccctttgtgctcgaatttctggaattgaaagatgaatatt

SEQ ID NO: 633959 - DNA, 75 bp, synthetic construct
  source 1..75: mol_type = other DNA
aagggcgtatcactgaccagaacaacaacggaaacatcaccattgaaggcacgactgcgcagcctgccagtattg

SEQ ID NO: 633960 - DNA, 75 bp, synthetic construct
  source 1..75: mol_type = other DNA
atggcgactaccaacaaaaacgctaaatcacaattgaccaccgtccgagttccccacgatgttatggagggcatg

SEQ ID NO: 633961 - DNA, 75 bp, synthetic construct
  source 1..75: mol_type = other DNA
ggcgcaggtggaaaaaatcggtgtcaaagcagccgaggagatcgggcaactcgtcaccgtcgcgcgtgaagaact

SEQ ID NO: 633962 - DNA, 75 bp, synthetic construct
  source 1..75: mol_type = other DNA
gtgtcactcaggctatcaacgttctaagcagaagcctggagaagggatatacacctgaagaaattataaaccaga

SEQ ID NO: 633963 - DNA, 75 bp, synthetic construct
  source 1..75: mol_type = other DNA
atgcaaaaggagctattagttccggttaaagagagcaaaatcggcatgtatgtatgcggcgtgacggtttatgac

SEQ ID NO: 633964 - DNA, 75 bp, synthetic construct
  source 1..75: mol_type = other DNA
gcactgcgcaatttatcgttacagccatgcgaggcgagatcaaacgccgccagcgccgcaaggccaaagaatcag

SEQ ID NO: 633965 - DNA, 75 bp, synthetic construct
  source 1..75: mol_type = other DNA
tgttcggcaccgttcagcgtgataactcggaagagcggttgctggactacatccgccgtgccctcgatcagggac

SEQ ID NO: 633966 - DNA, 75 bp, synthetic construct
  source 1..75: mol_type = other DNA
cgctatctttacgacccgctgggccgcagggtggcaaaacgggtatggcggcgtgaacgggacctgacgggctgg

SEQ ID NO: 633967 - DNA, 75 bp, synthetic construct
  source 1..75: mol_type = other DNA
tcaagttactaactgggctgatcacggatggatgcaatctttaaccccaaatgaggcgaacagtagatttaatat

SEQ ID NO: 633968 - DNA, 75 bp, synthetic construct
  source 1..75: mol_type = other DNA
ctattcctgtttatcagttgcgctataacggcaataacgtcctgatgtttgcgacttatcaggacaaaatattgg

SEQ ID NO: 633969 - DNA, 75 bp, synthetic construct
  source 1..75: mol_type = other DNA
tttcgttttctattatcagaatcatgccgatcgtctgggcattgaaggcagcattcgccgcattgtctatgaaca

SEQ ID NO: 633970 - DNA, 75 bp, synthetic construct
  source 1..75: mol_type = other DNA
tgatcaagcaacgcccctatgagaattgtggtgctttcatgtccaccctgaatgcaatttcaggggcgattcagg

SEQ ID NO: 633971 - DNA, 75 bp, synthetic construct
  source 1..75: mol_type = other DNA
ctattacctttgagtcagttgccagagagtggcacgcagtaaataaaaaatggacagaagaacatagccgacggg

SEQ ID NO: 633972 - DNA, 75 bp, synthetic construct
  source 1..75: mol_type = other DNA
acggacatgaagactacatcaaaaaattactcgaaaatcttaatgctgacgatgagcactacaagattatcgtac

SEQ ID NO: 633973 - DNA, 75 bp, synthetic construct
  source 1..75: mol_type = other DNA
taagaaaataaagttactcaccgtgattaaacaatcggcgcgttttctcttattacatttagggttattagttgc

SEQ ID NO: 633974 - DNA, 75 bp, synthetic construct
  source 1..75: mol_type = other DNA
ctgcgctggaaggctggggagtatgcggcaccaccaccaccttcggtgatccgagacgtgcctgggtgaacacgg

SEQ ID NO: 633975 - DNA, 75 bp, synthetic construct
  source 1..75: mol_type = other DNA
cgagcaagcggcaaatatggcgcgtggatgggcctcttctcaggcttcaggcgcaatgacagactggttaagccg

SEQ ID NO: 633976 - DNA, 75 bp, synthetic construct
  source 1..75: mol_type = other DNA
gtcccggcacaagttagtgaaaataatttaaccccgccaccgggtaatagcagtggcaaccttgagcaacagata

SEQ ID NO: 633977 - DNA, 75 bp, synthetic construct
  source 1..75: mol_type = other DNA
tatctatgacattgccgattattaccagaacgattttggccgtaaaaatagcttctctgccaatatgagtcagtc

SEQ ID NO: 633978 - DNA, 75 bp, synthetic construct
  source 1..75: mol_type = other DNA
caggcgcttgcatctggcaatgcggctaacatcaatcaattaaaagaagaactgaaaaaagctgagcaaggggcg

SEQ ID NO: 633979 - DNA, 75 bp, synthetic construct
  source 1..75: mol_type = other DNA
actaaacagggggatttttcgtggaaaaatattaaagaatcatttgttgaattaaataaagataattattttaaa

SEQ ID NO: 633980 - DNA, 75 bp, synthetic construct
  source 1..75: mol_type = other DNA
cacgacgagcggacccaccactaccactacgacagccagcaccgtctggtgttctacacgcggatacagcacggt

SEQ ID NO: 633981 - DNA, 75 bp, synthetic construct
  source 1..75: mol_type = other DNA
gcctgaacagataattactccccgtcgtcgggaggataaacagaactatctctggacaacctggcagcgggttta

SEQ ID NO: 633982 - DNA, 75 bp, synthetic construct
  source 1..75: mol_type = other DNA
aaatatatacttgttgaacagggggagtatgcacaaaatgtaactttaagcaggttgagaaaagttatattcagt

SEQ ID NO: 633983 - DNA, 75 bp, synthetic construct
  source 1..75: mol_type = other DNA
gaagaacaaaaagtcgatctagtggaaacctttaactacctgatcggcttaacggtaaagcatatcgatgcgcag

SEQ ID NO: 633984 - DNA, 75 bp, synthetic construct
  source 1..75: mol_type = other DNA
caattgaagaagatcctgataataaagagctaatggggcaaaaatggttaagaatgctaatcgctccgggggatc

SEQ ID NO: 633985 - DNA, 75 bp, synthetic construct
  source 1..75: mol_type = other DNA
atttgccgagattaaggctctttttggtcgactggatctcttgttcaataatgcgggcaataatagtccggcaaa

SEQ ID NO: 633986 - DNA, 75 bp, synthetic construct
  source 1..75: mol_type = other DNA
acagcccggaaagtatggaatatcagggaaaagacgcttcatgcataagcatgaccgtgcgagcaattgaacttt

SEQ ID NO: 633987 - DNA, 75 bp, synthetic construct
  source 1..75: mol_type = other DNA
gttagaaaaaccttcgtactttctgatgattataagagtgaatctctcgcattatgggatcatctttgtcaggaa

SEQ ID NO: 633988 - DNA, 75 bp, synthetic construct
  source 1..75: mol_type = other DNA
gtgatcggctaccgcagcgcccggggtgagcagtgggaataccgccacgacgccagcggcagacgaacagagaaa

SEQ ID NO: 633989 - DNA, 75 bp, synthetic construct
  source 1..75: mol_type = other DNA
ctgcaagggctgcaagggctgcatctaattttggtaagaaaaatatctatgattttatcaaggcaactcaatctg

SEQ ID NO: 633990 - DNA, 75 bp, synthetic construct
  source 1..75: mol_type = other DNA
aagagcatggctcctgaaatcattaaaaaagcgaccgaggagttgttgaaatcagccagggagcttgggctgtaa

SEQ ID NO: 633991 - DNA, 75 bp, synthetic construct
  source 1..75: mol_type = other DNA
tatgtctatggcagttgatgtttatgaagctaaaaacagaaatgatacaggcaggaaagaagatctttacgatgg

SEQ ID NO: 633992 - DNA, 75 bp, synthetic construct
  source 1..75: mol_type = other DNA
actcagggaaaatgatctctttacttgtttaggtgctgagacttataaagcaaaacaggaagctttaaagacaga

SEQ ID NO: 633993 - DNA, 75 bp, synthetic construct
  source 1..75: mol_type = other DNA
caggcatgaaacggatattttacacgttgttgcacttggtctggccttactgtctcgaggggatattattcaggc

SEQ ID NO: 633994 - DNA, 75 bp, synthetic construct
  source 1..75: mol_type = other DNA
aaagaattaaataatccagagcatgacagttacgcaattagtgaaaagagtcacggcagagaagaaacccgtctt

SEQ ID NO: 633995 - DNA, 75 bp, synthetic construct
  source 1..75: mol_type = other DNA
cctgtgtagcccacagaatcctaccgggaaagtgtggacgtgcgatgagctggagatcatggctgcgtcatggtg

SEQ ID NO: 633996 - DNA, 75 bp, synthetic construct
  source 1..75: mol_type = other DNA
atcgtcatggcacatggtgtacgcagtgggattatgtcgctgaccgtttcggcactgctgacctgttaccgttca

SEQ ID NO: 633997 - DNA, 75 bp, synthetic construct
  source 1..75: mol_type = other DNA
tgccgaaagaagcttgtcggttactggctaaaattgcgccgcaaatacaccatgttttggattacaccgatggta

SEQ ID NO: 633998 - DNA, 75 bp, synthetic construct
  source 1..75: mol_type = other DNA
ttcgtggcggcaccgatcttgccagttgttttcgcgccattatggaacgcttgcaaagcagggaatggtttgatg

SEQ ID NO: 633999 - DNA, 75 bp, synthetic construct
  source 1..75: mol_type = other DNA
tcgaacatcttgatgtcctgatccaggaacatattaaaactcaccctgagctcaaccaggatttcagactgttaa

SEQ ID NO: 634000 - DNA, 75 bp, synthetic construct
  source 1..75: mol_type = other DNA
ggatggctggattaaactggcagaggttggaaccatcttgcgagcttcacctccagctcctttgccagaggattt

SEQ ID NO: 634001 - DNA, 75 bp, synthetic construct
  source 1..75: mol_type = other DNA
tacaacgccacgaaaattcaagtagtgacgctgacaataaaccttatgaaggtgatgtgacggtctttagacctg

SEQ ID NO: 634002 - DNA, 75 bp, synthetic construct
  source 1..75: mol_type = other DNA
aagccttccgcattggtaataaaatttgaagagcatacatgtgtgggtgactgggctttggccgagagcagtatg

SEQ ID NO: 634003 - DNA, 75 bp, synthetic construct
  source 1..75: mol_type = other DNA
ccatatggatttaccataacgtcgcattacgcgcaccgctaaaacgcgctgaacgcgattctgccgcgaacaccg

SEQ ID NO: 634004 - DNA, 75 bp, synthetic construct
  source 1..75: mol_type = other DNA
tacgctttcctctttcagagtcaaccctgaatttcaggattttttctcttcgttgttccgaccatcctgtgaagt

SEQ ID NO: 634005 - DNA, 75 bp, synthetic construct
  source 1..75: mol_type = other DNA
aagaggacctgccctataccaacagcttattcatcatcagtttaatattgatgatcgtggcggtgatcgttatgg

SEQ ID NO: 634006 - DNA, 75 bp, synthetic construct
  source 1..75: mol_type = other DNA
taattaaatctgatattttttgtttaccaacatattatccttatgaggggcaacctataagcatacttgaggcat

SEQ ID NO: 634007 - DNA, 75 bp, synthetic construct
  source 1..75: mol_type = other DNA
tgatgcaagaaaaaaatatagacttaaacatcatttagaaaagatgatgacagtattaatgaatcatgaggtaat

SEQ ID NO: 634008 - DNA, 75 bp, synthetic construct
  source 1..75: mol_type = other DNA
tttctgtttgttgttttttcaccctttttgctgcaatcgcacacaaaacggtgcttttttgcatactaaaagact

SEQ ID NO: 634009 - DNA, 75 bp, synthetic construct
  source 1..75: mol_type = other DNA
tgcctcacagccgcaggtgaaaaccggtgatttaatgatggtgtctgcgggcgcaggaacgtttaatggtgaatc

SEQ ID NO: 634010 - DNA, 75 bp, synthetic construct
  source 1..75: mol_type = other DNA
cgaaacccaacaaacgcagattaccgaacaacaaaagcaaatcgaagctacacaaaaaacagtcgccgctaccgg

SEQ ID NO: 634011 - DNA, 75 bp, synthetic construct
  source 1..75: mol_type = other DNA
tttttggtatcgatttttaattgatagtatcgtgtacgatttgactagcaatacagatgtagaaaatatagagaa

SEQ ID NO: 634012 - DNA, 75 bp, synthetic construct
  source 1..75: mol_type = other DNA
gaaacttgtcccatagtccacataagcatgtcctcccttttggttttgttcaatctccaatacttgcaaccctct

SEQ ID NO: 634013 - DNA, 75 bp, synthetic construct
  source 1..75: mol_type = other DNA
tattgtttatctaggtgagtggcatacacatccagaagattttccgcacccctcatttattgatataaaatcgtg

SEQ ID NO: 634014 - DNA, 75 bp, synthetic construct
  source 1..75: mol_type = other DNA
atgaaagctgatgacgcgcagcacgccatcacggtggcgcagatggatattgatgccaataaagccgccatcgcc

SEQ ID NO: 634015 - DNA, 75 bp, synthetic construct
  source 1..75: mol_type = other DNA
gaagcggcagtgagaacgaaggcacgggagctgggcatcagcatgatgttacgtggtgattttcacccgtcggca

SEQ ID NO: 634016 - DNA, 75 bp, synthetic construct
  source 1..75: mol_type = other DNA
tcaatatgtcaatttcggttactgattttgaaaatgcctgtccctcaaaagagccctttaatttggcgaatattt

SEQ ID NO: 634017 - DNA, 75 bp, synthetic construct
  source 1..75: mol_type = other DNA
gagcgaaaagttcacctttatcactgcgaccaccggggactgccgctggcgctcatcagcgaagacggcaatacg

SEQ ID NO: 634018 - DNA, 75 bp, synthetic construct
  source 1..75: mol_type = other DNA
aacaaacgtaatatttaccgtaccacagaaaaaaataagtcaaaaaacaataacattattaatccaacggaaaag

SEQ ID NO: 634019 - DNA, 75 bp, synthetic construct
  source 1..75: mol_type = other DNA
acttctcctcactacggtatcgtggcgtccactgaaaccgctgcggcgatgatgaaaggcaatgcaggtaaacgt

SEQ ID NO: 634020 - DNA, 75 bp, synthetic construct
  source 1..75: mol_type = other DNA
ggcatagcgatgggttaccttggtggttatttgatatgcgtccacaaggcttccttggaagagcatatgcatcag

SEQ ID NO: 634021 - DNA, 75 bp, synthetic construct
  source 1..75: mol_type = other DNA
attatgcgctttgccgttcagagcggcttaatcgactacaaccccgcgcaagagattgcaggtgcggttgctacg

SEQ ID NO: 634022 - DNA, 75 bp, synthetic construct
  source 1..75: mol_type = other DNA
attatgagttgtttatctctagttgcagtaaaagagagtatcttaaatctagaacacttattaggttcctatcca

SEQ ID NO: 634023 - DNA, 75 bp, synthetic construct
  source 1..75: mol_type = other DNA
caggatataaatgaatttgtagcggagatttgtcagtgtgaagctatcatttccagctccatgcatggattaata

SEQ ID NO: 634024 - DNA, 75 bp, synthetic construct
  source 1..75: mol_type = other DNA
cgaacacctgtcaaaccaccaagtttaagatttttcaaacacctctgtgctgttggtagtgtgctatcttcgatg

SEQ ID NO: 634025 - DNA, 75 bp, synthetic construct
  source 1..75: mol_type = other DNA
gaccgatggtttacctgttggatgtaaggctaacacgcaaaatgcacaggagttgattcatgaaaatcaggcatg

SEQ ID NO: 634026 - DNA, 75 bp, synthetic construct
  source 1..75: mol_type = other DNA
tcctgaaaaagagcggttgcttgattttctctggcccgtactggtcagtttcagtgatgccggaacacacactgt

SEQ ID NO: 634027 - DNA, 75 bp, synthetic construct
  source 1..75: mol_type = other DNA
aagaaaagagcaggttctaaaaatagttaaaaaactagcaggtccgtatggtataaaaagatacgagaaggataa

SEQ ID NO: 634028 - DNA, 75 bp, synthetic construct
  source 1..75: mol_type = other DNA
aaaaaaagcctgtacaaaatgtgactgcatcgttgaagcaccggcgccgtcccgcccgatagagcgtggtatcgc

SEQ ID NO: 634029 - DNA, 75 bp, synthetic construct
  source 1..75: mol_type = other DNA
acaccgggcagaaaaaaggcaaaaacaggacgcatctggacgtatgtccgggatgaccggaatgcgggctcatca

SEQ ID NO: 634030 - DNA, 75 bp, synthetic construct
  source 1..75: mol_type = other DNA
ctgggggaagtcagcgctgaacagctggaactgggtaagcgtcaacggagcaccgtattgacgcttatttattgg

SEQ ID NO: 634031 - DNA, 75 bp, synthetic construct
  source 1..75: mol_type = other DNA
cagtgggacgccctctgttattacagtgatgacggtctggcggaggtggacaataacacagcggaaagagcgctt

SEQ ID NO: 634032 - DNA, 75 bp, synthetic construct
  source 1..75: mol_type = other DNA
ggcagaagaagccctgaagcgaatcagtgaactgtacgccatcgaggatgaaatacggggattaccggagtcaga

SEQ ID NO: 634033 - DNA, 75 bp, synthetic construct
  source 1..75: mol_type = other DNA
acaataacacagcagaaagagcgcttcgtgccgtctgtctcgggaaaaagaattcttatgacctttgtcaaatat

SEQ ID NO: 634034 - DNA, 75 bp, synthetic construct
  source 1..75: mol_type = other DNA
tggagccagatgtcacgaacggtgcaatagtgatccacacccaacgcctgaaatcagatccagggggtaatctgc

SEQ ID NO: 634035 - DNA, 75 bp, synthetic construct
  source 1..75: mol_type = other DNA
acatcaccacggaagccctgcagcgtatcggtgaactgtatgccatcgaggcagagggtccgggggctgttcagc

SEQ ID NO: 634036 - DNA, 75 bp, synthetic construct
  source 1..75: mol_type = other DNA
cgggccgtgaagacgcaactgaagatgcgaaagcaaccggtactagcgaaatggcaccggctctggttgccgcat

SEQ ID NO: 634037 - DNA, 75 bp, synthetic construct
  source 1..75: mol_type = other DNA
tatctgggggaagtcagcgctgaacagctggaactggtgagcagtgccctgaaagtgatccgcacagaacgggta

SEQ ID NO: 634038 - DNA, 75 bp, synthetic construct
  source 1..75: mol_type = other DNA
ttgcacgcagttatgccggagcggggctcctggcccatgtcgtcaccgggaaatatgcagaccatctgccgttat

SEQ ID NO: 634039 - DNA, 75 bp, synthetic construct
  source 1..75: mol_type = other DNA
caggcaccagtaccttcaaaacccattgcacgcagttatgccggagcggggctcctggcccatgtcgtcaccggg

SEQ ID NO: 634040 - DNA, 75 bp, synthetic construct
  source 1..75: mol_type = other DNA
tgtattctgctggggatgcgtgacggtacttcgttctcgcacggtctgattgactttatcgtactgtctggtaac

SEQ ID NO: 634041 - DNA, 75 bp, synthetic construct
  source 1..75: mol_type = other DNA
gtgctgaagcgtataccggtcgtgaagtgcaggatattcccggtgtgctggccgtgtttgctgaacgccgtaagg

SEQ ID NO: 634042 - DNA, 75 bp, synthetic construct
  source 1..75: mol_type = other DNA
aggttcacactgatgacacaccagtaaaagtactggcaccgggcaggaagaaggcgaaaacaggatatatctgga

SEQ ID NO: 634043 - DNA, 75 bp, synthetic construct
  source 1..75: mol_type = other DNA
aaatattcgatcaagtacgtaaagatttaaactgtgaattattttattctgagctaaaacgtcacaatatctcac

SEQ ID NO: 634044 - DNA, 75 bp, synthetic construct
  source 1..75: mol_type = other DNA
tgcatcccgtctttttccgttctgtaccggtaagtaccgctggcacggcagtgctgagacgtataccggtcgtga

SEQ ID NO: 634045 - DNA, 75 bp, synthetic construct
  source 1..75: mol_type = other DNA
gcggtggtatctggtccttttacacgctcagcaatggcggcgcgtttatggcccctgatgctgacgttgacgata

SEQ ID NO: 634046 - DNA, 75 bp, synthetic construct
  source 1..75: mol_type = other DNA
ggaacgtctggtacaggcactgggcctggtggatatccgggtgccggaccatctgatagtcggtggcagccaggt

SEQ ID NO: 634047 - DNA, 75 bp, synthetic construct
  source 1..75: mol_type = other DNA
gggcgtggagctgagtcgttcactgctgtcgggctgggtggatgcatgctgccggctactgtcaccgctggaaga

SEQ ID NO: 634048 - DNA, 75 bp, synthetic construct
  source 1..75: mol_type = other DNA
aaatattcgatcaagtgcgtaaaaatttaaactgtgaattattttattctgagctaaaacgtcacaatatctcac

SEQ ID NO: 634049 - DNA, 75 bp, synthetic construct
  source 1..75: mol_type = other DNA
tggcgttgtgctgtccttcatttggccgccgattggttctgcaatccagaccttctctcagtgggctgcttacca

SEQ ID NO: 634050 - DNA, 75 bp, synthetic construct
  source 1..75: mol_type = other DNA
aacggtatcgatccggaagcgtatctgcgccatattctgagcgtactgccggaatggccctccaaccgggttgat

SEQ ID NO: 634051 - DNA, 75 bp, synthetic construct
  source 1..75: mol_type = other DNA
aaactacatcttcttcggcagtgatcatggtggtgaacgtggtgccctgctgtatggtctgatcggaacgtgcag

SEQ ID NO: 634052 - DNA, 75 bp, synthetic construct
  source 1..75: mol_type = other DNA
caataagaaaacgaagaccgggcggttatggacctacgttcgtgacgaccgtaacgccgggtcaacgctggcgcc

SEQ ID NO: 634053 - DNA, 75 bp, synthetic construct
  source 1..75: mol_type = other DNA
gctgcgttacgtcattgagcatatccaggactggccggcaaaccgggtacacgatctgttgccctggaaagttga

SEQ ID NO: 634054 - DNA, 75 bp, synthetic construct
  source 1..75: mol_type = other DNA
ttggtgaatacaccaacgcagcaggtcaggttttccacggcgacattccgcgttatatggcgggtgacccgactg

SEQ ID NO: 634055 - DNA, 75 bp, synthetic construct
  source 1..75: mol_type = other DNA
ttactacaccatcttccgcgtgctgattaaagcactggatctgaaaacgccgggtcgtgaagatgcgactgaaga

SEQ ID NO: 634056 - DNA, 75 bp, synthetic construct
  source 1..75: mol_type = other DNA
tgaaaactattcgttatcgcagcctcattgctgaggcacttttgggtaatttatcaaagtgtgaagatacaaaaa

SEQ ID NO: 634057 - DNA, 75 bp, synthetic construct
  source 1..75: mol_type = other DNA
gttacgtcattgaacatatccaggactggccggcaaatcgggtacgcgatctgttgccctggaaagttgatctga

SEQ ID NO: 634058 - DNA, 75 bp, synthetic construct
  source 1..75: mol_type = other DNA
ttccgttctgtaccggtaaataccgctggcacggcagtgctgaagcgtataccggtcgtgaagtgcaggatattc

SEQ ID NO: 634059 - DNA, 75 bp, synthetic construct
  source 1..75: mol_type = other DNA
agggaatgaccagtctcaactggttgccactcccgtccctgatgaacagcgcatcagcttctggccgcagcattt

SEQ ID NO: 634060 - DNA, 75 bp, synthetic construct
  source 1..75: mol_type = other DNA
cgccgggtgggggcgtcggatattcacatcaccgttttcgtcgcacagacacgcattgagatgcgtatcaacggt

SEQ ID NO: 634061 - DNA, 75 bp, synthetic construct
  source 1..75: mol_type = other DNA
ggcattgccgcctgtctgatgacgtacagtcatcacgcctgccgtacggagtgttatgccatgacggttcattat

SEQ ID NO: 634062 - DNA, 75 bp, synthetic construct
  source 1..75: mol_type = other DNA
catcatgcctgtcgtacggagaattatgccatgacggtccactattaccgtctgcgggattacgccctgcagcat

SEQ ID NO: 634063 - DNA, 75 bp, synthetic construct
  source 1..75: mol_type = other DNA
accatctaccagtccatgtccgacctgtccgacaacatgttcaaggccttccagccacaggatgcgcgtctgaaa

SEQ ID NO: 634064 - DNA, 75 bp, synthetic construct
  source 1..75: mol_type = other DNA
tgaggctctgctgaaacaacgtgaacaggacagcgatcgttacagtgggcgggaagacgatcctcaggttccccg

SEQ ID NO: 634065 - DNA, 75 bp, synthetic construct
  source 1..75: mol_type = other DNA
cgtgccatgctccgtctggacccggatgcggtctatatcggtgaaatccgcgaccatgactccgccatggccgcc

SEQ ID NO: 634066 - DNA, 75 bp, synthetic construct
  source 1..75: mol_type = other DNA
atgaacggtaaccgcgctgaaatgagtccggaagctgccggcattgctgcctgtctgatgacgtacagtcatcat

SEQ ID NO: 634067 - DNA, 75 bp, synthetic construct
  source 1..75: mol_type = other DNA
gtatctggaatctgtacaccctgaacaacggcggggcatttatggctcccgaaccggatgacgatgatgacgaaa

SEQ ID NO: 634068 - DNA, 75 bp, synthetic construct
  source 1..75: mol_type = other DNA
gtatctggaatctgtacactctgaacaacggcggggcatttatggcccccgaaccggatgacgatgatgccgaaa

SEQ ID NO: 634069 - DNA, 75 bp, synthetic construct
  source 1..75: mol_type = other DNA
gtatctggaatctgtacacactgaacaacggcggggcatttatggcgcccgaaccggatgacgatgatgtcgaaa

SEQ ID NO: 634070 - DNA, 75 bp, synthetic construct
  source 1..75: mol_type = other DNA
gctgcgttacgtcattgaacatatccaggactggccggcaaaccgggtacgcgatctgttgccctggaaagttga

SEQ ID NO: 634071 - DNA, 75 bp, synthetic construct
  source 1..75: mol_type = other DNA
gaacatatccaggattggccggcaaaccgggtacgcgatctgttgccctggaaagttgatctgagctctcagtaa

SEQ ID NO: 634072 - DNA, 75 bp, synthetic construct
  source 1..75: mol_type = other DNA
tggagcctgaagaaagttgttgcccggagtgtggcagtgagctgaattatctgggggaagtcagtgctgagcagc

SEQ ID NO: 634073 - DNA, 75 bp, synthetic construct
  source 1..75: mol_type = other DNA
cgcgtgctgccagtcaatgacgccgctgaatgatgccctgtaccgttatgtgatgaatacccgcaagcttcacac

SEQ ID NO: 634074 - DNA, 75 bp, synthetic construct
  source 1..75: mol_type = other DNA
ctgaatgatgccctgtacagttatgtgatgaacacccgcaaggttcacactgatgacacaccggtaaaggtactg

SEQ ID NO: 634075 - DNA, 75 bp, synthetic construct
  source 1..75: mol_type = other DNA
ttggttgccactcccgtccctgatgaacatcgcatcagcttctggccgcagcattttggcctcattccacagtgg

SEQ ID NO: 634076 - DNA, 75 bp, synthetic construct
  source 1..75: mol_type = other DNA
acgtccgcatcccgtcagcactgacggaagaagccctggagcagaccggtcagttgtacgccatagaggcggata

SEQ ID NO: 634077 - DNA, 75 bp, synthetic construct
  source 1..75: mol_type = other DNA
ccacaccttctgtttccgtaaccgctgcatcagggaataaccagtctcaactggttgccactcccgtccctgatg

SEQ ID NO: 634078 - DNA, 75 bp, synthetic construct
  source 1..75: mol_type = other DNA
tgatgacacaccggtaaaggtactgtcaccgggtcagaaaaaggcgaaaacagggcgtatctggacgtatgtccg

SEQ ID NO: 634079 - DNA, 75 bp, synthetic construct
  source 1..75: mol_type = other DNA
tgatgacgaaacatgggtactgttcaatgccatgaacggtaaccgcgctgaaatgagcccggaagcagccggcat

SEQ ID NO: 634080 - DNA, 75 bp, synthetic construct
  source 1..75: mol_type = other DNA
atgaaaaccgtaactgtaaaagatctcgtcattggtacgggcgcacctaaaatcatcgtctcgctgatggcgaaa

SEQ ID NO: 634081 - DNA, 75 bp, synthetic construct
  source 1..75: mol_type = other DNA
caacggtatgaacggcaatggcgcggacatgagtgctgaagccgcaggcattgctgtctgcctgattgaatacag

SEQ ID NO: 634082 - DNA, 75 bp, synthetic construct
  source 1..75: mol_type = other DNA
cggcggaagaagcactgaaactaatcggcgaactgtacgccattgagcacgaaatacgcgggttgccggtgtctg

SEQ ID NO: 634083 - DNA, 75 bp, synthetic construct
  source 1..75: mol_type = other DNA
gcactgaagcgtataccggtcgtgaagtgcaggatattcccggtgtgctggccgtgtttgctgaacgtcgtaagg

SEQ ID NO: 634084 - DNA, 75 bp, synthetic construct
  source 1..75: mol_type = other DNA
gcattttggcctcattccacagtgggtgacccctggagccccgtgtcttcggctggatggaccgtctgtgcgaag

SEQ ID NO: 634085 - DNA, 75 bp, synthetic construct
  source 1..75: mol_type = other DNA
gttgcgtcagacccgcacccgtaagccgttccctgaatcactaccccgtgacgaaaagcgactgttgccggcggc

SEQ ID NO: 634086 - DNA, 75 bp, synthetic construct
  source 1..75: mol_type = other DNA
ttgtgcaacttctgtgatgacggtctggcggaggcggacaataacacagcggaaagagcgcttcgtgcagtctgt

SEQ ID NO: 634087 - DNA, 75 bp, synthetic construct
  source 1..75: mol_type = other DNA
tgcgttccggtatatcaggaagcactgggttgcgttgtgcaacttctgtgatgacggtctggcggaggcggacaa

SEQ ID NO: 634088 - DNA, 75 bp, synthetic construct
  source 1..75: mol_type = other DNA
ccccgagtcttcggctggatggaccgtctttgcgaagactactgtggtggtatctggaatctgtataccctgaac

SEQ ID NO: 634089 - DNA, 75 bp, synthetic construct
  source 1..75: mol_type = other DNA
tgtatgactggatacagcaacagatgaaaacactgtcgcgtcactcagatacggcaaaagcgttcgcatacctgc

SEQ ID NO: 634090 - DNA, 75 bp, synthetic construct
  source 1..75: mol_type = other DNA
gtgctgaggcgtataccggtcgtgaagtacaggatattcccggtgtgctggccgtgtttgctgaacgccgtaagg

SEQ ID NO: 634091 - DNA, 75 bp, synthetic construct
  source 1..75: mol_type = other DNA
ttgcgtgaaaagatgaagaccctgtcgcgacactcagagttggcgaaggcgttcgcgtacgcacttaaccagtgg

SEQ ID NO: 634092 - DNA, 75 bp, synthetic construct
  source 1..75: mol_type = other DNA
atatccccgtcccggtccaggagccgggcagcggtaaaatccggacagcccggctgtgggtctacgtccgtgatg

SEQ ID NO: 634093 - DNA, 75 bp, synthetic construct
  source 1..75: mol_type = other DNA
gcgccactgatgcagtcactgtatgaccggatacagcaacagatgaaaacactgtcgcgtcactcggatacggca

SEQ ID NO: 634094 - DNA, 75 bp, synthetic construct
  source 1..75: mol_type = other DNA
atgcaagagtgccaaccgacatcaccacggaagccctgcagcgtatcggtgaactgtataccatcgaggcagaag

SEQ ID NO: 634095 - DNA, 75 bp, synthetic construct
  source 1..75: mol_type = other DNA
cctcttcggcctgtgcaccggagactggcctgcaacaactggttaccaccatagtccctgatgaacagcgcatca

SEQ ID NO: 634096 - DNA, 75 bp, synthetic construct
  source 1..75: mol_type = other DNA
aacggtatcgatccggaagcgtatctgcgccatatcctgagcgtactgccggaatggccttccaaccgaattgat

SEQ ID NO: 634097 - DNA, 75 bp, synthetic construct
  source 1..75: mol_type = other DNA
gttcagtgcagaacgtgaaggtggtgcactgacagaagttgcgtgctgggcccatgcccggcgaaaaatccacga

SEQ ID NO: 634098 - DNA, 75 bp, synthetic construct
  source 1..75: mol_type = other DNA
aaaatggctgcgttacgtcattgaacatatcccggactggctggcaaaccgggtgcgcgatctgttgccctggaa

SEQ ID NO: 634099 - DNA, 75 bp, synthetic construct
  source 1..75: mol_type = other DNA
ctgttcagtgcagaacgtgaaggtagtgcgctgacagaagttgcgtgctgggctcatgcccggagaaaaatccac

SEQ ID NO: 634100 - DNA, 75 bp, synthetic construct
  source 1..75: mol_type = other DNA
aaagtgcgacggcagaagaagccctgaagcgaatcagtgaactgtacgccatcgagaatgaaatacggagattac

SEQ ID NO: 634101 - DNA, 75 bp, synthetic construct
  source 1..75: mol_type = other DNA
ggagaagaatggcacgctgtcgaaaaaatccagactgggcgaagcgttcagctatgtactgaatcagtgggacgc

SEQ ID NO: 634102 - DNA, 75 bp, synthetic construct
  source 1..75: mol_type = other DNA
gcactgaagcgtataccagtcgtgaagtgcaggatattcccggtgtgctggccgtgtttgcagaacgccgtaagg

SEQ ID NO: 634103 - DNA, 75 bp, synthetic construct
  source 1..75: mol_type = other DNA
agcagtgccctgaaagtgatccgcacagaacgggtaaaaaaagcctgtacaaaatgtgactgtattgttgaagca

SEQ ID NO: 634104 - DNA, 75 bp, synthetic construct
  source 1..75: mol_type = other DNA
atatcctcaacgtcctgccggaatggccttctaaccgtgttgatgaactcctgccatggaacgtcgtactcaccc

SEQ ID NO: 634105 - DNA, 75 bp, synthetic construct
  source 1..75: mol_type = other DNA
aaatctttgcccgccagggcatcgaactgagccgggcattactctccaactgggttgacgcatgttgtcagttaa

SEQ ID NO: 634106 - DNA, 75 bp, synthetic construct
  source 1..75: mol_type = other DNA
atgcctgccgaaagatccacgatgtgcacgtccgcatcccgtcagcactgacggaagaagccctggagcagatcg

SEQ ID NO: 634107 - DNA, 75 bp, synthetic construct
  source 1..75: mol_type = other DNA
acactgatgacacaccagtaaaagtactggcaccgggcaggaagaaggcgaaaacaggatatatctggacgtatg

SEQ ID NO: 634108 - DNA, 75 bp, synthetic construct
  source 1..75: mol_type = other DNA
acggcaataaccgcgccattcgtctgccccgcgatctggattttgaaggagtgagcgagctggagatcgtccggg

SEQ ID NO: 634109 - DNA, 75 bp, synthetic construct
  source 1..75: mol_type = other DNA
gcgggacagtggtggataatgagcgtctacaaaactttagcgttgatacccaacttgaaagtaaatttgctacag

SEQ ID NO: 634110 - DNA, 75 bp, synthetic construct
  source 1..75: mol_type = other DNA
aacggtatcgatccggaagcgtatctgagccatattctgagcgtactgccggaatggccttccaaccgggttgac

SEQ ID NO: 634111 - DNA, 75 bp, synthetic construct
  source 1..75: mol_type = other DNA
cgtccggccgacctggggctcattcctggagctagaaaaggccgatccggactttatgacggagcgcgaggacgt

SEQ ID NO: 634112 - DNA, 75 bp, synthetic construct
  source 1..75: mol_type = other DNA
cagccatcacgcctgccgtacggagtgttatgccatgacggtccactattaccgtctgcgggattacgccctgca

SEQ ID NO: 634113 - DNA, 75 bp, synthetic construct
  source 1..75: mol_type = other DNA
ctgtacaccctgaacaacggtggcgcatttatggcacctgaaccggatgacgataatgacgaaacatgggtactg

SEQ ID NO: 634114 - DNA, 75 bp, synthetic construct
  source 1..75: mol_type = other DNA
tatgtgatgaatacctgcaaggttcacactgatgacacaccagtaaaagtactggcaccgggcaggaagaaggcg

SEQ ID NO: 634115 - DNA, 75 bp, synthetic construct
  source 1..75: mol_type = other DNA
gtcatatcctgagcgtactgccggaatggccttccaaccgtgttgacgaacttctgccatggaatgtggttctca

SEQ ID NO: 634116 - DNA, 75 bp, synthetic construct
  source 1..75: mol_type = other DNA
cgagcgtggagcactgctgtacgggctgatcggcacctgccgtctgaacggtatcgatccgaaagcgtatctgcg

SEQ ID NO: 634117 - DNA, 75 bp, synthetic construct
  source 1..75: mol_type = other DNA
ggaaaggtatccatccacaaaatcacctggccggttacagcggtgtgcttcaggccgatgcttacggtggttacc

SEQ ID NO: 634118 - DNA, 75 bp, synthetic construct
  source 1..75: mol_type = other DNA
gctgatcggcgcctgccgactgaacggtatcgatccggaagcgtatctgcgccatatcctcaacgtcctgccgga

SEQ ID NO: 634119 - DNA, 75 bp, synthetic construct
  source 1..75: mol_type = other DNA
ccccgggtcttcggctggatggaccgtctttgcgaagactactgcgatggtatctggaatctgtacaccctgaac

SEQ ID NO: 634120 - DNA, 75 bp, synthetic construct
  source 1..75: mol_type = other DNA
gcgtactcaccgaaccggcaggggaaacacccggagcaacacctccgccccttccggggtatccctgccatggaa

SEQ ID NO: 634121 - DNA, 75 bp, synthetic construct
  source 1..75: mol_type = other DNA
cctgtctgatgacgtacagtcatcacgcctgtcgtacggagtgttatgccatgacggtccattattaccggctgc

SEQ ID NO: 634122 - DNA, 75 bp, synthetic construct
  source 1..75: mol_type = other DNA
cctgaagcgcatcagtgaactgtacgccatcgaggatgaaatacggggattaccagagtcagagcgtcttgaagt

SEQ ID NO: 634123 - DNA, 75 bp, synthetic construct
  source 1..75: mol_type = other DNA
atgaaaatacgcaccattgagcacgaaatacgcgggttgccggtgtctgaacgcctggcggtcaggcaaatgcag

SEQ ID NO: 634124 - DNA, 75 bp, synthetic construct
  source 1..75: mol_type = other DNA
tgcgctggcccgcgccgaagaaaagatcgaagaggaggaacgggaaatagaacatcttcgggctcagatagaaaa

SEQ ID NO: 634125 - DNA, 75 bp, synthetic construct
  source 1..75: mol_type = other DNA
gccttacggggagtagccgtaggccggaaaaactggctgttcgcaggttccgacagcggtggtgaacatgcggcg

SEQ ID NO: 634126 - DNA, 75 bp, synthetic construct
  source 1..75: mol_type = other DNA
atatcaccacggaagtcctgcagcgtatcggtgaactgtatgcaatcgaggcagaggtccggggatgttcagcag

SEQ ID NO: 634127 - DNA, 75 bp, synthetic construct
  source 1..75: mol_type = other DNA
acgccctctgttattacagtgatgacggtctggcggaggtggacaataacacagcggaaagagcgcttcgtgcag

SEQ ID NO: 634128 - DNA, 75 bp, synthetic construct
  source 1..75: mol_type = other DNA
atcacaatgtcaatggcaaaaactggcgtaatttctcgtctggctggtgaagtatttggctcggcggcaactttt

SEQ ID NO: 634129 - DNA, 75 bp, synthetic construct
  source 1..75: mol_type = other DNA
agccgtgcattactctccaactgggttgacgcgtgctgccagttaatgacgtcgctgcatgaatggatggtggag

SEQ ID NO: 634130 - DNA, 75 bp, synthetic construct
  source 1..75: mol_type = other DNA
tgctgtttggcctgctgacgtacctgacaaacctttatttcaagattaaagaagataagcgcaaggctgcgagag

SEQ ID NO: 634131 - DNA, 75 bp, synthetic construct
  source 1..75: mol_type = other DNA
atggaaaaaatcacaacaggtgtgtcatacaccacgtcagcagtggggacgggatactggttactgcagctgctg

SEQ ID NO: 634132 - DNA, 75 bp, synthetic construct
  source 1..75: mol_type = other DNA
ggggagtctgttgtttgggctgctgacatatctgactaacctgtatttcaaaatcagagaggaccgtcgtaaggc

SEQ ID NO: 634133 - DNA, 75 bp, synthetic construct
  source 1..75: mol_type = other DNA
atgaaatcaatggacaaaatctcaactggcattgcctacggaacatctgctggtagtgcgggatactggtttttg

SEQ ID NO: 634134 - DNA, 75 bp, synthetic construct
  source 1..75: mol_type = other DNA
tgtttggtctgctgacgtacctgacgaacctgtatttcaaaattaaagaagaccggcgtaaggcggcgcggggag

SEQ ID NO: 634135 - DNA, 75 bp, synthetic construct
  source 1..75: mol_type = other DNA
tgctgtttggtctgctgacgtacctgacgaacctgtatttcaaaatcagagaggaccggcgtaaggcggcacggg

SEQ ID NO: 634136 - DNA, 75 bp, synthetic construct
  source 1..75: mol_type = other DNA
ctggcattgcctacggaacatccgcgggtagtgcgggatactggtttttgcagtggttggatcaggtcagtccat

SEQ ID NO: 634137 - DNA, 75 bp, synthetic construct
  source 1..75: mol_type = other DNA
gctgtttggcctgctgacgtatctgactaacctgtatttcaaaatcagggaggaccgccgtaagacggcacgggg

SEQ ID NO: 634138 - DNA, 75 bp, synthetic construct
  source 1..75: mol_type = other DNA
ctcagtgggcggcaataggcgtgctggggagtctgctgtttgggctgctgacgtacctgactaacctgtatttca

SEQ ID NO: 634139 - DNA, 75 bp, synthetic construct
  source 1..75: mol_type = other DNA
cgggtgtcgcctatggtacctcagcaggtagtgccgggtactggtttttacagttgctcgataaagtcacgccct

SEQ ID NO: 634140 - DNA, 75 bp, synthetic construct
  source 1..75: mol_type = other DNA
ggagtctgctgtttggtctgctgacgtatctgaccaacctgtattttaaaatcagagaggaccggcgcaaggcag

SEQ ID NO: 634141 - DNA, 75 bp, synthetic construct
  source 1..75: mol_type = other DNA
ggtggggacgggatactggttactgcagctgctggacaaagtctctccgtcccagtgggtggcaataggcgtgct

SEQ ID NO: 634142 - DNA, 75 bp, synthetic construct
  source 1..75: mol_type = other DNA
agtacaggatattcccggtgtgctggccgtgtttgcagaacacagtaaggacagttttggtccgtatgtccggct

SEQ ID NO: 634143 - DNA, 75 bp, synthetic construct
  source 1..75: mol_type = other DNA
cgcggatttgcggcagacggccaaagccagaataactatctgaatggcctgaagttgcagggcaacttctataac

SEQ ID NO: 634144 - DNA, 75 bp, synthetic construct
  source 1..75: mol_type = other DNA
cgttgagccgctgccgaacggtaagcgtctgccgacagactttaacgaaggggcgaagaacaacacctattctcg

SEQ ID NO: 634145 - DNA, 75 bp, synthetic construct
  source 1..75: mol_type = other DNA
taccggcactaaaaccgatacgccgattcaaaaagtacctcaatctatttctgtcgtcaccgctgaagagatggc

SEQ ID NO: 634146 - DNA, 75 bp, synthetic construct
  source 1..75: mol_type = other DNA
atggcggaaacgctgggtgagcaatatgacccggtactgccatccgccctgcgccagtcttcagcccgtaaaccg

SEQ ID NO: 634147 - DNA, 75 bp, synthetic construct
  source 1..75: mol_type = other DNA
ggttgaaggcggtgagattcgtgcgcgtggcgtagagctggaagcgaaagcggcactgtcggcgagtgttaacgt

SEQ ID NO: 634148 - DNA, 75 bp, synthetic construct
  source 1..75: mol_type = other DNA
tgaataagcagaagcaaacgggcgtttatgttcaggatcaggcgcagtgggataaagtgctggtcaccctgggcg

SEQ ID NO: 634149 - DNA, 75 bp, synthetic construct
  source 1..75: mol_type = other DNA
agttcgacagggagtgtatcgaacgaaatctcagtccaggcggcagtgccgatttgctaattgtcacctggtttt

SEQ ID NO: 634150 - DNA, 75 bp, synthetic construct
  source 1..75: mol_type = other DNA
tggcacggcagtgctgaggcgtataccggtcgtgaagtgcaggatattcccggtgtgctggccgtgtttgctgaa

SEQ ID NO: 634151 - DNA, 75 bp, synthetic construct
  source 1..75: mol_type = other DNA
cattggcggtggcacttttaaacggtgacacagcgtggcccgtgatctgttacgccacggcgatggcggtactgg

SEQ ID NO: 634152 - DNA, 75 bp, synthetic construct
  source 1..75: mol_type = other DNA
aagtgccaggcacaatgaaaattattgctgcagatatacctgtacccaaagaagatgaagtgctgattaaagtag

SEQ ID NO: 634153 - DNA, 75 bp, synthetic construct
  source 1..75: mol_type = other DNA
aacaggctccagatgttgtctggagaaaagcagagcatacagtacgaataaaaattcttactcagtttattacag

SEQ ID NO: 634154 - DNA, 75 bp, synthetic construct
  source 1..75: mol_type = other DNA
tgaagtgcaggatattcccggtgtgctggccgtgtttgctgaacgccgtaaggacagttttggcccatatgtccg

SEQ ID NO: 634155 - DNA, 75 bp, synthetic construct
  source 1..75: mol_type = other DNA
caggtgtgtcatacaccacgtcagcggtagggacgggatactggttactgcagctgctggacaaagtctctccgt

SEQ ID NO: 634156 - DNA, 75 bp, synthetic construct
  source 1..75: mol_type = other DNA
cggtaccggaactcgggctggtggtccttaagcctggtcgtgaatccatgcaggtatttcataaccctcgagtgc

SEQ ID NO: 634157 - DNA, 75 bp, synthetic construct
  source 1..75: mol_type = other DNA
tggtcaggggggaatgggaacaaaggcccacgatattttcacgctaccgttgtgccgggagcaccacaacgaact

SEQ ID NO: 634158 - DNA, 75 bp, synthetic construct
  source 1..75: mol_type = other DNA
agcaacttgctcaacagaatctggttgcctggatgattgacgtcattcggcatgcaatgaatggcgcacaggaac

SEQ ID NO: 634159 - DNA, 75 bp, synthetic construct
  source 1..75: mol_type = other DNA
tcctggtgggcggtccgcaatcaggtggcggacgcgctaccggaagcggtattacgtcgttcgctggggttgcgt

SEQ ID NO: 634160 - DNA, 75 bp, synthetic construct
  source 1..75: mol_type = other DNA
tagcgcgtcgttcgctgggattaccagcggaaaaaatccgctccgtataccgtgagagtgacatcgtaccgggag

SEQ ID NO: 634161 - DNA, 75 bp, synthetic construct
  source 1..75: mol_type = other DNA
gatccgctggcgttcgaagaaaagcatggctctcaggttgatttaatttttcgttttcttgatcacgcctttgca

SEQ ID NO: 634162 - DNA, 75 bp, synthetic construct
  source 1..75: mol_type = other DNA
tggaatgggtacaaaagcgcatgatctctttgtgttgcctttgtgcagaaagcatcacgacgagctgcatgcgga

SEQ ID NO: 634163 - DNA, 75 bp, synthetic construct
  source 1..75: mol_type = other DNA
ctgagccggaacgttattcatcttttgccagtggtgccgttccggcggcatcacaaccgctggcggatgatcctg

SEQ ID NO: 634164 - DNA, 75 bp, synthetic construct
  source 1..75: mol_type = other DNA
cctcacgcccaccagcaacagaacccaccacaggaaaagacggtggtcagcattgccgttgatccggagtcaccg

SEQ ID NO: 634165 - DNA, 75 bp, synthetic construct
  source 1..75: mol_type = other DNA
ggaaaaaaactgctcggtgtaccgcgaaagcgacatcgtaccgggagagcagaccgccaccagcatattgaaaca

SEQ ID NO: 634166 - DNA, 75 bp, synthetic construct
  source 1..75: mol_type = other DNA
gccgggagcatcacaatgaacttcatgctgatccgctgacatttgaagaaaagcatggttcccagattgatttaa

SEQ ID NO: 634167 - DNA, 75 bp, synthetic construct
  source 1..75: mol_type = other DNA
gcgcacaaaaaatattgcgctaccgcctcacgtccaccagcaacaaaactcaccacaggaaaaggcggtggtaag

SEQ ID NO: 634168 - DNA, 75 bp, synthetic construct
  source 1..75: mol_type = other DNA
gccgtgttccgcaatgaggcagtgatccgtcgtgctggtggcgtggaatgtcttgaaagctggttacttcgtgaa

SEQ ID NO: 634169 - DNA, 75 bp, synthetic construct
  source 1..75: mol_type = other DNA
atgatcacggctcccggagttggccgtcagtgggtgacactggcggctttttgttttcctttactttcattttct

SEQ ID NO: 634170 - DNA, 75 bp, synthetic construct
  source 1..75: mol_type = other DNA
cgggcattgcctacggcacctccgcaggcagtgctggatactggtttttacagtggctggatcaggtcagtccgt

SEQ ID NO: 634171 - DNA, 75 bp, synthetic construct
  source 1..75: mol_type = other DNA
gtctgctgtttggcctgctgacgtatctgactaacctttatttcaagattaaagaagataagcgtaaggtggcgc

SEQ ID NO: 634172 - DNA, 75 bp, synthetic construct
  source 1..75: mol_type = other DNA
gctgtttggcctgctgacgtatctgacaaatctttatttcaaaattaaagaggaccgtcgtaaggtggcgcgggg

SEQ ID NO: 634173 - DNA, 75 bp, synthetic construct
  source 1..75: mol_type = other DNA
gctgtttggcctgctgacgtatctgactaacctgtatttcaaaattaaagaggaccgtcgcaaggctgcccgggg

SEQ ID NO: 634174 - DNA, 75 bp, synthetic construct
  source 1..75: mol_type = other DNA
gacattcacggcgctgaaaatggcgctcgatatgcataaccagtatggcggttgttacaccgtaatgacgccatc

SEQ ID NO: 634175 - DNA, 75 bp, synthetic construct
  source 1..75: mol_type = other DNA
gagcctgctgtttggtctgctgacatacctgacgaacctgtatttcaaaattaaagaagaccggcgtaagtcggc

SEQ ID NO: 634176 - DNA, 75 bp, synthetic construct
  source 1..75: mol_type = other DNA
atggtgggaggctgatagctttggtgagcatattactcttgatgacaaccctctccgcgcagccatgattgtctt

SEQ ID NO: 634177 - DNA, 75 bp, synthetic construct
  source 1..75: mol_type = other DNA
atgtatcgaatggaaaaaatcacgacgggtattgcatacggcgcatcgggagggggggccggatactggttgctc

SEQ ID NO: 634178 - DNA, 75 bp, synthetic construct
  source 1..75: mol_type = other DNA
gggatactggttactgcaactgctggacaaagtctctccgtcccagtgggtggcaataggtgtgctggggagtct

SEQ ID NO: 634179 - DNA, 75 bp, synthetic construct
  source 1..75: mol_type = other DNA
tttggcctgctgacgtacctgacaaatctttatttcaagattaaagaagataggcgtaaggctgcgagaggagag

SEQ ID NO: 634180 - DNA, 75 bp, synthetic construct
  source 1..75: mol_type = other DNA
aagggacttgtttgatgatgccggaccgaatgttggtgtcgcatatgacaatccactccgtgccgccatgattgt

SEQ ID NO: 634181 - DNA, 75 bp, synthetic construct
  source 1..75: mol_type = other DNA
cacgtgccgaagaaaagatcgaagaagatgaacgggaaatagaacatctgcgggctcagatagaaaaactgcgcc

SEQ ID NO: 634182 - DNA, 75 bp, synthetic construct
  source 1..75: mol_type = other DNA
tggagccagaagaaagctgttgcccggagtgtggcggtgagctggattatctgggggaagtcagcgcagaacaac

SEQ ID NO: 634183 - DNA, 75 bp, synthetic construct
  source 1..75: mol_type = other DNA
gcagatagttatcgcgatgctgatggtgaagtagacaccaacggttgggatggaactgaagtggtcaacaaaaac

SEQ ID NO: 634184 - DNA, 75 bp, synthetic construct
  source 1..75: mol_type = other DNA
tatctgcgccatattctgagcgtactgccggaatggccttccaaccgggttgatgaactcctgccatggaacgta

SEQ ID NO: 634185 - DNA, 75 bp, synthetic construct
  source 1..75: mol_type = other DNA
ccccttccggggtatcctgcaggcggatgcgttcacaggttacgacaggctgttcagtgcagaacgcgaaggtgg

SEQ ID NO: 634186 - DNA, 75 bp, synthetic construct
  source 1..75: mol_type = other DNA
tctggcggaggcggacaataacacagcggaaagagcgcttcgtgcagtctgtctcggaaagaaaaattcttatga

SEQ ID NO: 634187 - DNA, 75 bp, synthetic construct
  source 1..75: mol_type = other DNA
ctgggcgaagcgttcagctatgtactgaatcagtgggacgccctctgttattaccgtgatgacggtctggcggag

SEQ ID NO: 634188 - DNA, 75 bp, synthetic construct
  source 1..75: mol_type = other DNA
taaatatgttatggagcatatcaaacccgattacatgccttcatttatgactgaaatcagacagcaacaggtgat

SEQ ID NO: 634189 - DNA, 75 bp, synthetic construct
  source 1..75: mol_type = other DNA
gtcgaaaaattaatgaagagctggaagttatcattatgaatgcttggcacgatgccagatatgcagaagataaat

SEQ ID NO: 634190 - DNA, 75 bp, synthetic construct
  source 1..75: mol_type = other DNA
tctggcggaggcggataataatgctgcggaaagagcgcttcgtgcagtctgtctcggaaagaaaaactttatgtt

SEQ ID NO: 634191 - DNA, 75 bp, synthetic construct
  source 1..75: mol_type = other DNA
ggatattcccggcgttcttgccgtgtttgcagaacgccgtaaggacagttttggcccgtatgtccggctgatgag

SEQ ID NO: 634192 - DNA, 75 bp, synthetic construct
  source 1..75: mol_type = other DNA
ttgttcagtgcagaacgtgaaggtggtgcactgacagaagttgcgtgctgggcccatgcccggcgaaaaatccac

SEQ ID NO: 634193 - DNA, 75 bp, synthetic construct
  source 1..75: mol_type = other DNA
gttgcaaaactgcagcgcatgcagttcggtaaaagctcagaaaaacttcgctcaaaaaccgaacggcagatactg

SEQ ID NO: 634194 - DNA, 75 bp, synthetic construct
  source 1..75: mol_type = other DNA
ttatcggcacttgccttctgaacgacattgatccggaagcgtatctgcgccatatactgagcttactgccggaat

SEQ ID NO: 634195 - DNA, 75 bp, synthetic construct
  source 1..75: mol_type = other DNA
gcccgacagggtgccgaactgagccgtgcattaatctccaactgggttgacgcgtgctgccagttaatgaccccg

SEQ ID NO: 634196 - DNA, 75 bp, synthetic construct
  source 1..75: mol_type = other DNA
cagcagcaaaagtgcgacggcagaagaagccctgaagcgaatcagtgaactgtacgccatcgaggatgaaatacg

SEQ ID NO: 634197 - DNA, 75 bp, synthetic construct
  source 1..75: mol_type = other DNA
accgtaaccatttctgatgaagtttctgctggttgggctgtaggtgatgctgctctgtatgccaacaacatcaaa

SEQ ID NO: 634198 - DNA, 75 bp, synthetic construct
  source 1..75: mol_type = other DNA
agaaagagcgcttcgtgcagtctgtctcgggaagaaaaattatgtgttcttcggcagcgatcacggtggcgagcg

SEQ ID NO: 634199 - DNA, 75 bp, synthetic construct
  source 1..75: mol_type = other DNA
ttatcggcacttgccttctgaacgacattgatccggaagcgtatctgcgccatattctgagcgtactgccggaat

SEQ ID NO: 634200 - DNA, 75 bp, synthetic construct
  source 1..75: mol_type = other DNA
tagatgtagttgcacatccgaatgctgataatgctatgcagaccaccgctgactttagtaactctactttgatgg

SEQ ID NO: 634201 - DNA, 75 bp, synthetic construct
  source 1..75: mol_type = other DNA
ataatgccgctgacactcatgttgtaaatgtatttaacatcggtactgccatcactctggatcaggaagttgatc

SEQ ID NO: 634202 - DNA, 75 bp, synthetic construct
  source 1..75: mol_type = other DNA
tacctgttctgaaaaactgcgtcgtgaagttgaacaggctgaggccctgctgaagcaacgcgaacaggacagcga

SEQ ID NO: 634203 - DNA, 75 bp, synthetic construct
  source 1..75: mol_type = other DNA
ggtatcctgcaggcggatgcgttcacaggttacgacaggttgttcagtgcagaacgtgaaggtggtgcactgaca

SEQ ID NO: 634204 - DNA, 75 bp, synthetic construct
  source 1..75: mol_type = other DNA
atgggtgctgtttaacgtcatgaacggtaaccgcgctgaaatgagcccggaagccgccggtattgccgcctgtct

SEQ ID NO: 634205 - DNA, 75 bp, synthetic construct
  source 1..75: mol_type = other DNA
aggttccccgccagttgcgacagtcgcgccatcgtcgtccgttaccggcacaccttccccgtgaaatacaccgtc

SEQ ID NO: 634206 - DNA, 75 bp, synthetic construct
  source 1..75: mol_type = other DNA
agagttggcgaaggcgttcgcgtacgcacttaaccagtggccggcactgacgtactatgcgaacgatggctgggt

SEQ ID NO: 634207 - DNA, 75 bp, synthetic construct
  source 1..75: mol_type = other DNA
ttggcgataaagtaccggaacagtccatccagtggctgacagataacggttcagcgtacagagcgcatgaaacac

SEQ ID NO: 634208 - DNA, 75 bp, synthetic construct
  source 1..75: mol_type = other DNA
gtaaaccgatccctaaagtgaccagatccagactcaccctggaagactggcaaaaaatttataatgcaacgccag

SEQ ID NO: 634209 - DNA, 75 bp, synthetic construct
  source 1..75: mol_type = other DNA
ctgaataacggcggcgcatttatggcgcccgaaccggatgaagatgatggagaaacctgggtactgttcaatgcc

SEQ ID NO: 634210 - DNA, 75 bp, synthetic construct
  source 1..75: mol_type = other DNA
gcatcagcttctggccgcagcattttggcctcattccacagtgggtggccctggagccccgtgtcttcggctgga

SEQ ID NO: 634211 - DNA, 75 bp, synthetic construct
  source 1..75: mol_type = other DNA
aggatattcccggtgtgctggctgtgtttgcagaacgccgtaaagacagttttggcccgtatgtccggctgatga

SEQ ID NO: 634212 - DNA, 75 bp, synthetic construct
  source 1..75: mol_type = other DNA
atgaacataatgggttgccttgacgtaccagacaaaggcgattacttcatcaacgggcaaaacgccgcccacctt

SEQ ID NO: 634213 - DNA, 75 bp, synthetic construct
  source 1..75: mol_type = other DNA
gtatgttcaggatcaggcgcagtgggataaagtgctggttacgcttggcggtcgctatgactgggccgatcagtc

SEQ ID NO: 634214 - DNA, 75 bp, synthetic construct
  source 1..75: mol_type = other DNA
tcacctggcgtggtggtgtaaactacctgttcgacaacggcgtaacgccttacttcagctacagtgaatcatttg

SEQ ID NO: 634215 - DNA, 75 bp, synthetic construct
  source 1..75: mol_type = other DNA
atgacccggtactgccatccgccctgcgccagtcttcagcccgtaaaccgttaccggcctcacttccccgtgaaa

SEQ ID NO: 634216 - DNA, 75 bp, synthetic construct
  source 1..75: mol_type = other DNA
cgctacgctgtgatgccattgggatatcgctaaaagaagtgattgatggatgcagggacagaatattgagtccat

SEQ ID NO: 634217 - DNA, 75 bp, synthetic construct
  source 1..75: mol_type = other DNA
cggagcataccgcaattactgcctcagtggtcccggacgagttacgcatcggcttctggccgcagcactttggct

SEQ ID NO: 634218 - DNA, 75 bp, synthetic construct
  source 1..75: mol_type = other DNA
atgaacggtaaccgcgctgaaatgagcccggaagccgccggcattgctgcctgtctgatgacgtacagtcatcat

SEQ ID NO: 634219 - DNA, 75 bp, synthetic construct
  source 1..75: mol_type = other DNA
tggaccgtctgtgcgaagactactgcggaggtatctggaatctgtacaccctgaacaacggcggagcatttatgg

SEQ ID NO: 634220 - DNA, 75 bp, synthetic construct
  source 1..75: mol_type = other DNA
aacagcgcatcagcttctggccgcagcattttggcctcattccacagtgggttaccctggagccccgtatcttcg

SEQ ID NO: 634221 - DNA, 75 bp, synthetic construct
  source 1..75: mol_type = other DNA
aattttatattaatgatgcacagggaaaacaaattgctgaaattgtttttgtgccgacaggagaacatttagcca

SEQ ID NO: 634222 - DNA, 75 bp, synthetic construct
  source 1..75: mol_type = other DNA
ccacaccttctgtttccgtaaccgctgcatcagggaataactcacctcagctggttgccactcccgtccctgatg

SEQ ID NO: 634223 - DNA, 75 bp, synthetic construct
  source 1..75: mol_type = other DNA
ttgcacgcagctatgccggagcggggcttctggcccatgtcgtcaccgggaagtatgcagaccatctgccgttat

SEQ ID NO: 634224 - DNA, 75 bp, synthetic construct
  source 1..75: mol_type = other DNA
accgtaacgccggttcacagatgcctgcggcggtctggttcgcgtactcaccggaccggaaaggcatccatccac

SEQ ID NO: 634225 - DNA, 75 bp, synthetic construct
  source 1..75: mol_type = other DNA
ctgcgttacgttattgagcatatccaggactggccggcaaaccgggtacgcgatctgttgccctggaaagttgat

SEQ ID NO: 634226 - DNA, 75 bp, synthetic construct
  source 1..75: mol_type = other DNA
gcatcagcttctggccgcagcaatttggcctcattccacagtgggtaaccctggatccccgtgtcttcggctgga

SEQ ID NO: 634227 - DNA, 75 bp, synthetic construct
  source 1..75: mol_type = other DNA
tggaccgtctgtgcgaagactactgcggagggatctggaatctgtacaccctgaacaacggtggggcatttatgg

SEQ ID NO: 634228 - DNA, 75 bp, synthetic construct
  source 1..75: mol_type = other DNA
tggaccgtctgtgcgaagactactgcggagggatctggaatctgtacaccctgaacaacggaggtgcatttatgg

SEQ ID NO: 634229 - DNA, 75 bp, synthetic construct
  source 1..75: mol_type = other DNA
gccagcctcgtccctgatgaacagcgcatcggcttctggccgcagcattttggcctcattccacaatgggtgacc

SEQ ID NO: 634230 - DNA, 75 bp, synthetic construct
  source 1..75: mol_type = other DNA
tttcgggtaaaaggtattgagttgttacaggggacaactttcagggatgaacgtaatgccctacaggaagtcatt

SEQ ID NO: 634231 - DNA, 75 bp, synthetic construct
  source 1..75: mol_type = other DNA
gcatcagcttctggccgcagcaatttggcctcattccacagtgggttaccctggagccccgtgtcttcggctgga

SEQ ID NO: 634232 - DNA, 75 bp, synthetic construct
  source 1..75: mol_type = other DNA
acccgcaagattcacactgatgacacaccggtaaaggtactggcaccgggtcagaaaaaggcgaaaacagggcgt

SEQ ID NO: 634233 - DNA, 75 bp, synthetic construct
  source 1..75: mol_type = other DNA
gaaagcctttggcatggtgatggcctcgctcggcttggcacctgtgtacggaaagctctgtgagctggtggtcag

SEQ ID NO: 634234 - DNA, 75 bp, synthetic construct
  source 1..75: mol_type = other DNA
ccaacgtccacaagcatgagaatgaacagataagcagtactgtccaggaaatgcttgaagaaacggggttctggt

SEQ ID NO: 634235 - DNA, 75 bp, synthetic construct
  source 1..75: mol_type = other DNA
ctccggacgagttaagcgagttggctcgttggtttttcccgatactgatgtcagggagacaatcagtgctcaaca

SEQ ID NO: 634236 - DNA, 75 bp, synthetic construct
  source 1..75: mol_type = other DNA
gcaaaaagagtcttgggcttggggagcgttggctgctacttattcaaaacaagatcagcgtttagcaatgaagtt

SEQ ID NO: 634237 - DNA, 75 bp, synthetic construct
  source 1..75: mol_type = other DNA
cggcctagagtacaaaatgctgctggttcagtttaagaagagtttggaatggtttccaaccttgattcaccttgt

SEQ ID NO: 634238 - DNA, 75 bp, synthetic construct
  source 1..75: mol_type = other DNA
gaagctggtggggtgtggtcattttagccataccctcgatcaccataatgatgatccagatgtgcacctttcccc

SEQ ID NO: 634239 - DNA, 75 bp, synthetic construct
  source 1..75: mol_type = other DNA
gctggccgctgtatgaatcacgcctgaagggaaagctgcacgttatcagcaagcgttacactcagcgcattgagc

SEQ ID NO: 634240 - DNA, 75 bp, synthetic construct
  source 1..75: mol_type = other DNA
agcgtcttctgagcctgctgtcggcctttgaggtcgcggtatggatgacggatggttggccgctgtatgaatcac

SEQ ID NO: 634241 - DNA, 75 bp, synthetic construct
  source 1..75: mol_type = other DNA
gccatgcttcaggccggaaactttcgggaaaataaagattcgtcaaccagcaattttcgggaaatctcggaaacg

SEQ ID NO: 634242 - DNA, 66 bp, synthetic construct
  source 1..66: mol_type = other DNA
gtggtaagaccgctgcaaatcctgcgtgctgacgggacgtgggaaaatattggcggaatgaaatag

SEQ ID NO: 634243 - DNA, 75 bp, synthetic construct
  source 1..75: mol_type = other DNA
gtcactgtcgttctcaaaatcggtggagttgcatgacaaggtcatcgggcattatctgaacataaaatactatca

SEQ ID NO: 634244 - DNA, 75 bp, synthetic construct
  source 1..75: mol_type = other DNA
ggtatttgtccatgattggcttattgtctgtaaatcagatgattacccgtggagcgaacgtttgggaggagctgg

SEQ ID NO: 634245 - DNA, 75 bp, synthetic construct
  source 1..75: mol_type = other DNA
atcataacagtgcgctgaatccgaccggtaaaagtaataaactggttcaactgggccgcaaaaacagcacattaa

SEQ ID NO: 634246 - DNA, 75 bp, synthetic construct
  source 1..75: mol_type = other DNA
aattcaaagggacggacaaggagaaagacattcttgcctcactggatattattgtttcctccattacgtcaaaaa

SEQ ID NO: 634247 - DNA, 75 bp, synthetic construct
  source 1..75: mol_type = other DNA
gtaaatatgaactcgctgatatggctggctcattaccattaaccatgacaaaagcaaactctgtaggtatgtcag

SEQ ID NO: 634248 - DNA, 75 bp, synthetic construct
  source 1..75: mol_type = other DNA
tcaccggacaaaacgggaagaatacctggtgatgagtttatggaaaggttctcctggcatgtggcggataagggg

SEQ ID NO: 634249 - DNA, 75 bp, synthetic construct
  source 1..75: mol_type = other DNA
atggaaatgttgggaacttagaaatattcccaaaatgcctgtgcatcgaacacctgaacaacatgaatttcttct

SEQ ID NO: 634250 - DNA, 75 bp, synthetic construct
  source 1..75: mol_type = other DNA
gctgacaagttgctcagcaatcgagcgcggttattctgttgcaaaaacaggggaactgacacctgttgccattac

SEQ ID NO: 634251 - DNA, 75 bp, synthetic construct
  source 1..75: mol_type = other DNA
catgagtatttgaagggacggtatgagggttcggagctgcaatatgcgactcaattccttcgtgagaaggagatg

SEQ ID NO: 634252 - DNA, 75 bp, synthetic construct
  source 1..75: mol_type = other DNA
gagtatgtcgggtgcatccgtcgtcagcagcctcacggcccttatgtgctggcgggttggtcgtatggcgcgttt

SEQ ID NO: 634253 - DNA, 75 bp, synthetic construct
  source 1..75: mol_type = other DNA
caattaaacattgatgcttggcgaataaagaatcaattagtatggtcaaaagaagataaatacaacagattaaca

SEQ ID NO: 634254 - DNA, 75 bp, synthetic construct
  source 1..75: mol_type = other DNA
ggcactgcccttcagtccatcgcatcatgcatcacgcaacccgaatccccgatgaaatggaaccggatgttgtgt

SEQ ID NO: 634255 - DNA, 75 bp, synthetic construct
  source 1..75: mol_type = other DNA
ttgctgaccagcaggcgctattagctctattagggtatagagggaataaaaaatacacccaagacgtaatttcag

SEQ ID NO: 634256 - DNA, 75 bp, synthetic construct
  source 1..75: mol_type = other DNA
tgatgctacctttaattcaaaaatattccacagccactggcgcagctccagaagatttggcaaatattgccataa

SEQ ID NO: 634257 - DNA, 75 bp, synthetic construct
  source 1..75: mol_type = other DNA
atgccgggcaaccgcccactttattggcgttggcctcaacacgattttccgccatttaaaaaactcaggccgcag

SEQ ID NO: 634258 - DNA, 75 bp, synthetic construct
  source 1..75: mol_type = other DNA
ggctgggacggaagtcactgtcgttctcaaaatcggtggagctgcatgacaaggtctggatttgcccctatattt

SEQ ID NO: 634259 - DNA, 75 bp, synthetic construct
  source 1..75: mol_type = other DNA
gaggacggttgtggcgcacgtcttcggtgaacctctggccacactggagcgtcttctgagcctgctgtcggcctt

SEQ ID NO: 634260 - DNA, 75 bp, synthetic construct
  source 1..75: mol_type = other DNA
cgcattgagcgacataatctgagacaacatctggcaaggctgggacggaagttactgtcgttctcaaaatcggtg

SEQ ID NO: 634261 - DNA, 75 bp, synthetic construct
  source 1..75: mol_type = other DNA
gagctgcatgacaaggtcatcgggcattatctgaacataaaaacactatcagtaagttggagtcattaccaaaaa

SEQ ID NO: 634262 - DNA, 75 bp, synthetic construct
  source 1..75: mol_type = other DNA
gattgtctgcgctgaaatggacgaacagtggggctacgtcggtgctaaatcacgtcagcgctggctgttttacgc

SEQ ID NO: 634263 - DNA, 75 bp, synthetic construct
  source 1..75: mol_type = other DNA
ctaaaactcaaaagaaaagcgccgatttagtatcaaataagttgcgtatcggcgtttttcagcggtatcaaatga

SEQ ID NO: 634264 - DNA, 75 bp, synthetic construct
  source 1..75: mol_type = other DNA
acgaaaatcgaaggcattattaggtaacattttttcagagtgtaaactctctgatcacgaaaagacaaaaataat

SEQ ID NO: 634265 - DNA, 75 bp, synthetic construct
  source 1..75: mol_type = other DNA
ttaccggcgatctgttgaccccgtggcgtaaccatgtggataacaatatgttccacggttacgactttgacacca

SEQ ID NO: 634266 - DNA, 75 bp, synthetic construct
  source 1..75: mol_type = other DNA
gacggtaaaaattgagttccagaacctgactaccggtccgatagcttgccccatcggtacgctgacaaacatcta

SEQ ID NO: 634267 - DNA, 75 bp, synthetic construct
  source 1..75: mol_type = other DNA
agagacaggcgtcagtttaccgaagtgaccattaccagagagacgaaaaatgcagcgggagagacgcttgcagcg

SEQ ID NO: 634268 - DNA, 75 bp, synthetic construct
  source 1..75: mol_type = other DNA
attaagaatcgcatatctgaccgagaccaaaattgataaattatgtgtatggaataataaaacccccaattcaat

SEQ ID NO: 634269 - DNA, 75 bp, synthetic construct
  source 1..75: mol_type = other DNA
taaattagatgctataattgaatttggttctaaattgactattttatatggtggttctgactctggaaaaacata

SEQ ID NO: 634270 - DNA, 75 bp, synthetic construct
  source 1..75: mol_type = other DNA
tgcatcatgctggaacctggtacccgggtttcgcatgcagctgtacgcctggctgcgcaagttggaacattgttg

SEQ ID NO: 634271 - DNA, 75 bp, synthetic construct
  source 1..75: mol_type = other DNA
caggggcggtatatcacccaggatccgatagggttgaaggggggaataaatctatacacgtatccactggcacca

SEQ ID NO: 634272 - DNA, 75 bp, synthetic construct
  source 1..75: mol_type = other DNA
ctgcggcaccggtggctttctggcaaccagctatgaatatctactggagaagtacagctcgctggaatccattca

SEQ ID NO: 634273 - DNA, 75 bp, synthetic construct
  source 1..75: mol_type = other DNA
ttggagcgttcgggaaggattttgcgatcggcattgtgtatatgtacctcatgtattactacaccgatgtcgttg

SEQ ID NO: 634274 - DNA, 75 bp, synthetic construct
  source 1..75: mol_type = other DNA
agtcagtggttaaaaatagcggctaataatggtcatgcgacagctcagtatcggttatatgtagagttacaagaa

SEQ ID NO: 634275 - DNA, 75 bp, synthetic construct
  source 1..75: mol_type = other DNA
cctgatcatgaaataacagtcgaaaatttgagaattatgcgtatgcatacagcaaaaatcgttgcatccacacca

SEQ ID NO: 634276 - DNA, 75 bp, synthetic construct
  source 1..75: mol_type = other DNA
gacaccacgcattaacgttaagccctgattattatgacttcctgctacgggtcgcttacctggcaaagaacaaca

SEQ ID NO: 634277 - DNA, 75 bp, synthetic construct
  source 1..75: mol_type = other DNA
atggataatcagcaagcaacaatgacaattaccctgagtgtgccagatgatttcaccggacgcatactggtttac

SEQ ID NO: 634278 - DNA, 75 bp, synthetic construct
  source 1..75: mol_type = other DNA
tctgaaaaattcggttattctcttgactggttattaaatggagagggttctccaaagaaggatctggagagcaac

SEQ ID NO: 634279 - DNA, 75 bp, synthetic construct
  source 1..75: mol_type = other DNA
atttccgttcaacagattttacagccggacgatgaacatgcgatgctccgctcttcaaccatccttcccagtcgc

SEQ ID NO: 634280 - DNA, 75 bp, synthetic construct
  source 1..75: mol_type = other DNA
tacgcttttctgggcaggctttttttgcaggaaatcgatctgtttttctccagtgaaaatgcgttgtcgaccttt

SEQ ID NO: 634281 - DNA, 75 bp, synthetic construct
  source 1..75: mol_type = other DNA
caccagttatgtcaagcaggtcgctatttcagtagcgaaaaaagtaaaatataaaagtctgactcgctatgtgct

SEQ ID NO: 634282 - DNA, 75 bp, synthetic construct
  source 1..75: mol_type = other DNA
gttgggtgaagagaacagggcgcaggcatttgaaaaaatgcaaagctttatcagccgtttatatgctaacaagtc

SEQ ID NO: 634283 - DNA, 75 bp, synthetic construct
  source 1..75: mol_type = other DNA
ggctgccgaaggaaaaagcgtggtgtttatctccagtgaagtggaggagttgccgctggtgtgcgaccgcatcct

SEQ ID NO: 634284 - DNA, 75 bp, synthetic construct
  source 1..75: mol_type = other DNA
aattaatggcgcaaaaccagagacgcaaaaaattagcccaatcggctctggtggtagcaccaaaggggaaccgga

SEQ ID NO: 634285 - DNA, 75 bp, synthetic construct
  source 1..75: mol_type = other DNA
cctgcaggcatcacgctgctgcgctgtagcgtaaatgctgcccacagtcgtgagcaaatcgatgccatcattcag

SEQ ID NO: 634286 - DNA, 75 bp, synthetic construct
  source 1..75: mol_type = other DNA
ccgtcattgccagtgaaaaaagacggtccgggtaaggcgattattgtgatcctttccgcgctgatcggcgggatg

SEQ ID NO: 634287 - DNA, 75 bp, synthetic construct
  source 1..75: mol_type = other DNA
tttagtagtacatcgtactttgtatgccttttcagacaatactatgagtgtacaccacgtaaatatctaaaacat

SEQ ID NO: 634288 - DNA, 75 bp, synthetic construct
  source 1..75: mol_type = other DNA
gtgacgcttccggcggagctggcggtgatgctggggaggctggagcgggaactgcgtgcgggagcggtgagtgcg

SEQ ID NO: 634289 - DNA, 75 bp, synthetic construct
  source 1..75: mol_type = other DNA
atatcgtaatggccgcatccttgaggacggaagaattgaatcccgcgatccgttttatcgtgaagatttcacggt

SEQ ID NO: 634290 - DNA, 75 bp, synthetic construct
  source 1..75: mol_type = other DNA
tctcaaaaggaatatgttattccggaaagctggaaacatagctttccttctggcttagagattattcaatatgcc

SEQ ID NO: 634291 - DNA, 75 bp, synthetic construct
  source 1..75: mol_type = other DNA
tctatagatcatacgtcagaaaaaaatccttcggttttattgcgcgcaacttattcctctcatgaatgtgtagat

SEQ ID NO: 634292 - DNA, 75 bp, synthetic construct
  source 1..75: mol_type = other DNA
cgttttatcgtgaagatttcacggtcctctaccgctggcctcacgctttacttagggaaggtgcgaacaagtccc

SEQ ID NO: 634293 - DNA, 75 bp, synthetic construct
  source 1..75: mol_type = other DNA
atcaatgcaacgcgtcagattgcagcggcgcaacaggaaatggcccgggaggcgtcgaacagagcagaaagtgcc

SEQ ID NO: 634294 - DNA, 75 bp, synthetic construct
  source 1..75: mol_type = other DNA
cagaatcaccataaaacagaggcattatctcagaataataaatataatgaagaaaagtcggctcaggaaagaatg

SEQ ID NO: 634295 - DNA, 75 bp, synthetic construct
  source 1..75: mol_type = other DNA
ggcagttgtggaaaattcgtctgccgctgcccgtagcggataagcaatgcccactaccagattctgtcgcgcaac

SEQ ID NO: 634296 - DNA, 75 bp, synthetic construct
  source 1..75: mol_type = other DNA
tatattctcgttaatatggatagaccactggagttattacattattatcatgttttaaaaagtagaagacttctt

SEQ ID NO: 634297 - DNA, 75 bp, synthetic construct
  source 1..75: mol_type = other DNA
agatggctttggtgtatccatcggattcgacagagaaaaactcgatgtctatgatgggattataggtaatcacct

SEQ ID NO: 634298 - DNA, 75 bp, synthetic construct
  source 1..75: mol_type = other DNA
tgccagagttgtatcctgtatcagtcctgcaaaatttcatgagtgctttattaactggatgcgtgactgccattc

SEQ ID NO: 634299 - DNA, 75 bp, synthetic construct
  source 1..75: mol_type = other DNA
atggagaagaatgataaagtacatccaatggaagaaaaggcgtaccgttttgggaaaacattaaaaaaacttccg

SEQ ID NO: 634300 - DNA, 75 bp, synthetic construct
  source 1..75: mol_type = other DNA
gctgcccgtagcggataagcaatgcccactaccagattctgtcgcgcaactggcggcgtggatgcaggcgcgcca

SEQ ID NO: 634301 - DNA, 75 bp, synthetic construct
  source 1..75: mol_type = other DNA
ttataagcaaaggttggacaaattatgaacttgatggaatcatcactcgtgctatttctggtgaacaaatattgc

SEQ ID NO: 634302 - DNA, 75 bp, synthetic construct
  source 1..75: mol_type = other DNA
caggagcaagtgggcaaatattactgtgatcgcgcaatggctaaaaagtttgtgctgaacttcaggcccggctat

SEQ ID NO: 634303 - DNA, 75 bp, synthetic construct
  source 1..75: mol_type = other DNA
aaatatcctcttaaagaggcgcggactgttgcagaaatgcagaaacaatataagcatctgtttgcccatggtgag

SEQ ID NO: 634304 - DNA, 75 bp, synthetic construct
  source 1..75: mol_type = other DNA
catgaagcgatggtgacattgcttcgtgatgatgtaagtctggtggaggcaagcggaagatccaacccagggcgt

SEQ ID NO: 634305 - DNA, 75 bp, synthetic construct
  source 1..75: mol_type = other DNA
taccaaaaattagcaaacatcactgacgacgcaggctttaagcacgaggtcattcttgaagacatcggcgaacaa

SEQ ID NO: 634306 - DNA, 75 bp, synthetic construct
  source 1..75: mol_type = other DNA
atgtcaccactgataatacgcgaacacgataaaaaattaatctggcctgacgacctcaatgaaccgggccagtcc

SEQ ID NO: 634307 - DNA, 75 bp, synthetic construct
  source 1..75: mol_type = other DNA
agccttatgccaccggtgctcacgcatgggaaatgagcgttgtcagagtgcgccgaagctggtggaaaaaacatc

SEQ ID NO: 634308 - DNA, 75 bp, synthetic construct
  source 1..75: mol_type = other DNA
cagtggagtctggcgaaaaaaagtgctggtgggtctggtgatgggtgtggtttttggccttgccctgcataccat

SEQ ID NO: 634309 - DNA, 75 bp, synthetic construct
  source 1..75: mol_type = other DNA
gcaacggtgcagcattttcttctgaaagtatcccaaactggcaaaggctacccacaataaattaccggatttacg

SEQ ID NO: 634310 - DNA, 75 bp, synthetic construct
  source 1..75: mol_type = other DNA
taaccagtaccagaagtgatgttgctgcgagttcgctggcagttaaaaaagcctacgatctggcgaaaagcaagt

SEQ ID NO: 634311 - DNA, 75 bp, synthetic construct
  source 1..75: mol_type = other DNA
taaataatgtacccgatgctaaagccgattgggtgcgtagttttgcatttatgcttctcaagtgccgcaacctct

SEQ ID NO: 634312 - DNA, 75 bp, synthetic construct
  source 1..75: mol_type = other DNA
cacccaataccgacctcaatcgctacttcgagatcatgaacactcgtgggcagcaactcaagcaggttgatattg

SEQ ID NO: 634313 - DNA, 75 bp, synthetic construct
  source 1..75: mol_type = other DNA
atgagcaagaaggagttgaaacctgaactgttaacagtaggcaagttattcactgacaattatctgattcctatt

SEQ ID NO: 634314 - DNA, 75 bp, synthetic construct
  source 1..75: mol_type = other DNA
cgcagaccgtcaataagaaactggaagaccagagtgcggcaatccagcagatacagaaggttcaggttgatacaa

SEQ ID NO: 634315 - DNA, 75 bp, synthetic construct
  source 1..75: mol_type = other DNA
cagtttggtggtcagcagatgacggtgaactaccatatccgcggtcgcatcatccaggtgccgtcaaactatgac

SEQ ID NO: 634316 - DNA, 75 bp, synthetic construct
  source 1..75: mol_type = other DNA
acctcagcgaagtcagcgcggagcagctggagctggttgccagcgccctgaaagtgatccgcacagtgcgggtaa

SEQ ID NO: 634317 - DNA, 75 bp, synthetic construct
  source 1..75: mol_type = other DNA
gcgctgaaatgagtccggaagccgccggcattgcggcctgtctgatgacgtacagtcatcacgcctgtcgtacgg

SEQ ID NO: 634318 - DNA, 75 bp, synthetic construct
  source 1..75: mol_type = other DNA
tgatgcggaaatgagtgcggaagccgccggtatcgctgcctgcctgattgaatacagccatcacgcctgtcgcac

SEQ ID NO: 634319 - DNA, 75 bp, synthetic construct
  source 1..75: mol_type = other DNA
catgccgcctgatggtgaagaaaaacggtgctgaaatttataaccgtaccgcgctggataatacgctggtttata

SEQ ID NO: 634320 - DNA, 75 bp, synthetic construct
  source 1..75: mol_type = other DNA
gaacagcatgtgggccgtgaaactgcagcagatgaaggacggacgcctttatattgcgggtatcggagccggtat

SEQ ID NO: 634321 - DNA, 75 bp, synthetic construct
  source 1..75: mol_type = other DNA
atgaaaatcatcccccgtggtgaagccatgcgtattcaccgccagcatcctgcatcccgtcttttcccgttctgt

SEQ ID NO: 634322 - DNA, 75 bp, synthetic construct
  source 1..75: mol_type = other DNA
acaactggatatcatcaacaccgcgtttagggtaatcgaaacggttcgcccaaaacgggcctgcagccggtgcga

SEQ ID NO: 634323 - DNA, 75 bp, synthetic construct
  source 1..75: mol_type = other DNA
gccaggcaataagaaaacgaagaccgggcggttatggacctacgttcgtgacgaccgtaacgccgggtcaacgct

SEQ ID NO: 634324 - DNA, 75 bp, synthetic construct
  source 1..75: mol_type = other DNA
atgaaaaccatttcacataattccaccactccttctgtttccgtaaccgctgcatcagggaatgaccagcctcag

SEQ ID NO: 634325 - DNA, 75 bp, synthetic construct
  source 1..75: mol_type = other DNA
gtgaccctggagccccgggtcttcggctggatggaccgtctgtgtgaagactactgcggtggtatctggaatctg

SEQ ID NO: 634326 - DNA, 75 bp, synthetic construct
  source 1..75: mol_type = other DNA
gtgttatgccatgacggtccattattaccggctgcgggattacgccctgcagcatccggaatgcagcgccattat

SEQ ID NO: 634327 - DNA, 75 bp, synthetic construct
  source 1..75: mol_type = other DNA
atgtcatgacggttcattattaccgtctgcgggattacgccctgcagcatccggaatgcagcgccattatgcgca

SEQ ID NO: 634328 - DNA, 75 bp, synthetic construct
  source 1..75: mol_type = other DNA
agcttcctgcttcgcctgaccgtggcagcggacgatggcagtgagcggctggtcagcacggccaggacgacggaa

SEQ ID NO: 634329 - DNA, 75 bp, synthetic construct
  source 1..75: mol_type = other DNA
atgaaaatcatcacccgtggcgaagccatacatattcaccgtcagcatccggcatcccgtctttttccgttctgt

SEQ ID NO: 634330 - DNA, 75 bp, synthetic construct
  source 1..75: mol_type = other DNA
atgttctggaggcaggaaaggtgcacgcagatgacacgccggtgaaagtactggctccggggaacggaatgaacc

SEQ ID NO: 634331 - DNA, 75 bp, synthetic construct
  source 1..75: mol_type = other DNA
cacaccggtaaaggtactggcaccgggtcagaaaaaggcgaaaacagggcgtatctggacgtatgtccgggatga

SEQ ID NO: 634332 - DNA, 75 bp, synthetic construct
  source 1..75: mol_type = other DNA
gaagactactgcggtggtatctggaatctgtacaccctgaacaacggcggggcatttatggcacccgaaccggat

SEQ ID NO: 634333 - DNA, 75 bp, synthetic construct
  source 1..75: mol_type = other DNA
tgatgacgaaacctggatactgttcaatgccatgaacggcaaccgcgctgaaatgagcccggaagccgctggcat

SEQ ID NO: 634334 - DNA, 75 bp, synthetic construct
  source 1..75: mol_type = other DNA
cgaaatccgtgcgctggcggcacaccttttcgatcagcagggaatagatccgcaaggccgcatggcacacagcga

SEQ ID NO: 634335 - DNA, 75 bp, synthetic construct
  source 1..75: mol_type = other DNA
ccggggatgtttagcagaacagcgtctggcgacaagaaaagccagagctgcgccactgatgcagtcactgtatga

SEQ ID NO: 634336 - DNA, 75 bp, synthetic construct
  source 1..75: mol_type = other DNA
tgacggttcattattaccgtctgcgggattacgccctgcagcatccggaatacgacgccattatgcgcattattg

SEQ ID NO: 634337 - DNA, 75 bp, synthetic construct
  source 1..75: mol_type = other DNA
gcctgccgtacggagtgttatgccatgacggttcattattaccgtctgcgggattacgccctgcagcatccggaa

SEQ ID NO: 634338 - DNA, 75 bp, synthetic construct
  source 1..75: mol_type = other DNA
ggggcatttatggcacccgaaccggatgacgatgatgacgaaacatgggtactgttcaatgccatgaacggtaac

SEQ ID NO: 634339 - DNA, 75 bp, synthetic construct
  source 1..75: mol_type = other DNA
cccggagaaaaatccacgatgtgcatgcaagagtgtccaccgacatcaccacggaagcactgcagcgtatcggtg

SEQ ID NO: 634340 - DNA, 75 bp, synthetic construct
  source 1..75: mol_type = other DNA
aaagatcagcaactgagtctggttgaagagacggaagccttcctgcgctctgcactggcacgtgccgaggaaaag

SEQ ID NO: 634341 - DNA, 75 bp, synthetic construct
  source 1..75: mol_type = other DNA
gaaagctgttgcccggagtgtggcggtgagctggattatctggggaagtcagcgcagaacaactggaactggtga

SEQ ID NO: 634342 - DNA, 75 bp, synthetic construct
  source 1..75: mol_type = other DNA
tcccttccggggtatcctgcaggcagatgcgtttaatggttacgatcggctgttcagtgccgaacgtgaaggcgg

SEQ ID NO: 634343 - DNA, 75 bp, synthetic construct
  source 1..75: mol_type = other DNA
ccatatcctgagcgtactgccagaatggccttccaaccgagttgatgaactcctgccatggaacgtagtactcac

SEQ ID NO: 634344 - DNA, 75 bp, synthetic construct
  source 1..75: mol_type = other DNA
ttgttgaagcaccggcgccgtcccgcccgatagagcgtggtatcgtgggccccggattacttgcccgcgtgttaa

SEQ ID NO: 634345 - DNA, 75 bp, synthetic construct
  source 1..75: mol_type = other DNA
gatggcgtacagccatcacgcctgtcgtacagagaattatgccatgacggttcattattaccagctgcgggatta

SEQ ID NO: 634346 - DNA, 75 bp, synthetic construct
  source 1..75: mol_type = other DNA
ggtaaccgcgcagaaatgagcccggaagccgccggcattgcagcctgtctgatgacgtacagccatcatgcctgt

SEQ ID NO: 634347 - DNA, 75 bp, synthetic construct
  source 1..75: mol_type = other DNA
gggtgagcaatatgacccggcactgccatcccccctgcgccagtcttctgcccgtaaaccgttaccgacctcact

SEQ ID NO: 634348 - DNA, 75 bp, synthetic construct
  source 1..75: mol_type = other DNA
gacatcccgtctttttccgttctgtaccggtaagtaccgctggcacggcagcgctgaagcacatacctgtcgtga

SEQ ID NO: 634349 - DNA, 75 bp, synthetic construct
  source 1..75: mol_type = other DNA
cattccacagtgggtgaccctggaaccccgtgtcttcggctggatggaccgtctctgcgaaaactactgcggtgg

SEQ ID NO: 634350 - DNA, 75 bp, synthetic construct
  source 1..75: mol_type = other DNA
cattccacagtgggtcaccctggacccccgtgtcttcggctggatggaccgtctatgcgaaaactactgcggtgg

SEQ ID NO: 634351 - DNA, 75 bp, synthetic construct
  source 1..75: mol_type = other DNA
cattccacagtgggtaaccctggagccccgtgtcttcggctggatggaccgtctctgcgaaaactactgcggtgg

SEQ ID NO: 634352 - DNA, 75 bp, synthetic construct
  source 1..75: mol_type = other DNA
gccctgaacgtatactgcagtaatggttgggtggaaatcgacaacaacatcgcagagaacgccttacggggtgtg

SEQ ID NO: 634353 - DNA, 75 bp, synthetic construct
  source 1..75: mol_type = other DNA
ggtgcgaccatatcgtgcaggcaccggtgccttcaaaacccattgcacgcagttatgccggagcggggcttctgg

SEQ ID NO: 634354 - DNA, 75 bp, synthetic construct
  source 1..75: mol_type = other DNA
ggtggtatctggaatctgtacaccctgaacaacggcggggcatttatggcacccgaaccggatgacgatgatgac

SEQ ID NO: 634355 - DNA, 75 bp, synthetic construct
  source 1..75: mol_type = other DNA
agtgatccgcacagaacgggtaaaaaagcctgtacaaaatgtgactgcatcgttgaagcaccggcaccatcccgt

SEQ ID NO: 634356 - DNA, 75 bp, synthetic construct
  source 1..75: mol_type = other DNA
aaagcctgtacaaaatgtgactgtattgttgaagacaccggcgccgtcccgcccgatagagcgtggtatcgcggg

SEQ ID NO: 634357 - DNA, 75 bp, synthetic construct
  source 1..75: mol_type = other DNA
caccacggaagccctgcagcgtatcggtgaactgtatgtcatcgaggcagaagtccggggatgttcagcagaaca

SEQ ID NO: 634358 - DNA, 75 bp, synthetic construct
  source 1..75: mol_type = other DNA
cgacataacctgaatctgagacaacatctggcaaggctgggacggaagtcactgtcgttctcaaaatcggtggag

SEQ ID NO: 634359 - DNA, 75 bp, synthetic construct
  source 1..75: mol_type = other DNA
atgtcgcgccagtgcacgcattatgggcgttggcctcaacacgattttccgccatttaaaaaactcaggccgcag

SEQ ID NO: 634360 - DNA, 75 bp, synthetic construct
  source 1..75: mol_type = other DNA
gcggcataacctgaatctgaggcagcacctggcacggctgggacggaagttgcgtattttcatgaaaggagatca

SEQ ID NO: 634361 - DNA, 75 bp, synthetic construct
  source 1..75: mol_type = other DNA
gtatcacgatgagattaaagctatcagatctgacattgccgatctgcgtgctggcattgatagcggtgctatccg

SEQ ID NO: 634362 - DNA, 75 bp, synthetic construct
  source 1..75: mol_type = other DNA
gtatcacgatgagattaaagctatcagatctgacattgccgatctgcgcactggcattgataacggcactatcag

SEQ ID NO: 634363 - DNA, 75 bp, synthetic construct
  source 1..75: mol_type = other DNA
tgctgttggctttcttgctcgacctctgggagggattgtatttgggcatataggtgataaagtcggaagaaaaaa

SEQ ID NO: 634364 - DNA, 75 bp, synthetic construct
  source 1..75: mol_type = other DNA
tcagagaacaactaaaaataaaagacgcacagatcactggcctacaggactacatcaaaactcagtgtttacgca

SEQ ID NO: 634365 - DNA, 75 bp, synthetic construct
  source 1..75: mol_type = other DNA
gcgcacgtattcggtgaacgcactctggccacactggagcgtcttctgagcctgctgtcggactttgaggtcgtg

SEQ ID NO: 634366 - DNA, 75 bp, synthetic construct
  source 1..75: mol_type = other DNA
tgaagggaaagctgcacgttatcagcaagcgttacactcagcgcattgagcgacataatctgaatctgagacaac

SEQ ID NO: 634367 - DNA, 75 bp, synthetic construct
  source 1..75: mol_type = other DNA
gtggcgcacgtcttcggtgaacgcactctggccacactggagcgtcttctgagcctgctgtcggcctttgacgtg

SEQ ID NO: 634368 - DNA, 75 bp, synthetic construct
  source 1..75: mol_type = other DNA
aaggctgggacggaagtcactgtcgttctcaaaatcggtggagcatgacaaggtcatcgggcattatctgaacat

SEQ ID NO: 634369 - DNA, 75 bp, synthetic construct
  source 1..75: mol_type = other DNA
tatacgcagcgcattgagcgacataatctgaatctgagacaacatctggcaaggctgggacggaagtcactgtcg

SEQ ID NO: 634370 - DNA, 75 bp, synthetic construct
  source 1..75: mol_type = other DNA
ccaccggatccgccagcgccattgatggagccgcctgtagactcactcccgacgctgaatcggcttatctatccc

SEQ ID NO: 634371 - DNA, 75 bp, synthetic construct
  source 1..75: mol_type = other DNA
atgccaaatcatgatcgattcgaatgccaaactgcgatcgattcagatgccattttgcacgtaaccactgcatca

SEQ ID NO: 634372 - DNA, 75 bp, synthetic construct
  source 1..75: mol_type = other DNA
aacagcgtctggcggcaagaaaagccagagctgcgtcactgatgcagtcactgtatgactggatacagactcaga

SEQ ID NO: 634373 - DNA, 75 bp, synthetic construct
  source 1..75: mol_type = other DNA
gcccggaagccgccggtattgccgcctgtctgatgacgtacagtcatcatgcctgtcgtacggagaattatgcca

SEQ ID NO: 634374 - DNA, 75 bp, synthetic construct
  source 1..75: mol_type = other DNA
tgaaactaatcggtgagctgtacgccatcgagcacgaaatacgcgggttgccggtgtctgaacgcctggcggtca

SEQ ID NO: 634375 - DNA, 75 bp, synthetic construct
  source 1..75: mol_type = other DNA
agcgtactgccggaatggccctccaaccgtgttgacgaactcctgccatggaacgtagtactcaccaataaataa

SEQ ID NO: 634376 - DNA, 75 bp, synthetic construct
  source 1..75: mol_type = other DNA
aatgtcatgaacggtaaccgcgctgaaatgagcccggaagccgccggcattgctgcctgtatgatgacgtacagt

SEQ ID NO: 634377 - DNA, 75 bp, synthetic construct
  source 1..75: mol_type = other DNA
gtagataataatgccgcagaaagagcgcttcgtgcagtctgtctcgggaagaaaaattatgtgttcttcgacagc

SEQ ID NO: 634378 - DNA, 75 bp, synthetic construct
  source 1..75: mol_type = other DNA
atgtatatatcagtaccaaaagcgcgacagcggaagaagccctgaaactaatcggtgaactgtacgccatcgagc

SEQ ID NO: 634379 - DNA, 75 bp, synthetic construct
  source 1..75: mol_type = other DNA
atagagcatctgcgggcacagatagaaaaactgcgtcgaatgttgttcggtacccgctccgaaaaacttcgccga

SEQ ID NO: 634380 - DNA, 75 bp, synthetic construct
  source 1..75: mol_type = other DNA
cggcgcggaacttactggcgaagccgcagggatagtcgcctgtctgatgacatacagccaccacgcttgtcgcac

SEQ ID NO: 634381 - DNA, 75 bp, synthetic construct
  source 1..75: mol_type = other DNA
aggttccccgccagttgcgacagtcacgtcatcgtcgtccgttaccggcacatcttccccgtgaaatacaccgct

SEQ ID NO: 634382 - DNA, 75 bp, synthetic construct
  source 1..75: mol_type = other DNA
aaagcctgtacaaaatgtgactgtatcgttgaagccccggcaccgtcccgtccgatagaacgtggtatcgcgagc

SEQ ID NO: 634383 - DNA, 75 bp, synthetic construct
  source 1..75: mol_type = other DNA
tggcctgcaacaactggttgccaccatagtccctgatgaacagcgcatcagcttctggccgcagcactttggcct

SEQ ID NO: 634384 - DNA, 75 bp, synthetic construct
  source 1..75: mol_type = other DNA
tcagagaacaactgaaagagaaggatgcgaagataaccgcgcttcagggatacatcaaaacgcagtgcttacgca

SEQ ID NO: 634385 - DNA, 75 bp, synthetic construct
  source 1..75: mol_type = other DNA
cgaagcaaagaggtttcacatccgacacaagttgccccagattatttaagtagatcgttttccgcaattcgtgat

SEQ ID NO: 634386 - DNA, 75 bp, synthetic construct
  source 1..75: mol_type = other DNA
atcaatattgaacactgtacgaagtttatcacaacaggtagcttgcgcgccaagaagtcctgagtggcggcgtct

SEQ ID NO: 634387 - DNA, 75 bp, synthetic construct
  source 1..75: mol_type = other DNA
tgagtgtacattcgtctttaacccgcatgtggtcaggcgcagtaagcaggtcggatttatctaccgggtcgattc

SEQ ID NO: 634388 - DNA, 75 bp, synthetic construct
  source 1..75: mol_type = other DNA
gacgggcggtactgcgccggggactcagctcgaccgccagttacaggatgcgctcgaaaaatacgagcgggataa

SEQ ID NO: 634389 - DNA, 75 bp, synthetic construct
  source 1..75: mol_type = other DNA
aacaattaaactgaaagcagcaccaatcagcacgaccggaaatgctccagctgcagggcaatatagtggggttgc

SEQ ID NO: 634390 - DNA, 75 bp, synthetic construct
  source 1..75: mol_type = other DNA
cagaatgaagaaagaagtcaaacttaaagagcaataccgccaagagcgagatgatctaaaaactataaacaaaga

SEQ ID NO: 634391 - DNA, 75 bp, synthetic construct
  source 1..75: mol_type = other DNA
acagcctcagctaatgagcaggcttcaaaagtgcttaagtcgggtaatgctttacggaagttttctgtgaatccg

SEQ ID NO: 634392 - DNA, 75 bp, synthetic construct
  source 1..75: mol_type = other DNA
tcagatgccgctaatgagcaagcttcaaaggttcttaagtcgggtaatgctttacgaaagtactctgtgaaccct

SEQ ID NO: 634393 - DNA, 75 bp, synthetic construct
  source 1..75: mol_type = other DNA
atttgcacctggattagcagccatgatttcaactaaagaaaacgaaacacgtattcaaccaaatgcaacatgccc

SEQ ID NO: 634394 - DNA, 75 bp, synthetic construct
  source 1..75: mol_type = other DNA
attgttgaacgtgccgatgatgaaaggatcattattgaagcttctattacaagatttaatcggctaacggggacg

SEQ ID NO: 634395 - DNA, 75 bp, synthetic construct
  source 1..75: mol_type = other DNA
ggtacttcggggatgtactacaaatcgccgggcgtaaaaaaaattattgtggaagccgttggcggtggtggtgcc

SEQ ID NO: 634396 - DNA, 75 bp, synthetic construct
  source 1..75: mol_type = other DNA
aacccgatcgccggcactcctggtgctgacccggaaacgaattatcagtttcgtgatcgagtatggcaggctcag

SEQ ID NO: 634397 - DNA, 75 bp, synthetic construct
  source 1..75: mol_type = other DNA
aacccgatcgccggcactccgggtgctgatccggaaacgaactatcagtttcgtgatcgcgtatggcaggcgcag

SEQ ID NO: 634398 - DNA, 75 bp, synthetic construct
  source 1..75: mol_type = other DNA
tggatgattctggtcaccggtaatgactccaacttattgatagtgttttatgttcagataatgcccgatgacttt

SEQ ID NO: 634399 - DNA, 75 bp, synthetic construct
  source 1..75: mol_type = other DNA
cgaccggtacatgtacagctggaaaaaatggcaaacacggtgtattgcccggacggatacagccgttggttttac

SEQ ID NO: 634400 - DNA, 75 bp, synthetic construct
  source 1..75: mol_type = other DNA
tgttgcacatgaagtactaattgaaaaaatcccccagacagaatatccgacgacagaacatccattgcggatagt

SEQ ID NO: 634401 - DNA, 75 bp, synthetic construct
  source 1..75: mol_type = other DNA
agaaaccgttgagcgtttcatcgtttcgccgggagaagtcgtaccggctccaccgcacccgacgatgaccggtca

SEQ ID NO: 634402 - DNA, 75 bp, synthetic construct
  source 1..75: mol_type = other DNA
atgtttcattgtcctttatgccagcatgccgcacatgcgcgtacaagtcgctatattactgacacgacaaaagag

SEQ ID NO: 634403 - DNA, 75 bp, synthetic construct
  source 1..75: mol_type = other DNA
gtaagctattacggacaggaaagcataatgtcaccagtgttgctgtattgtgtggttatgacagtgtttcatatt

SEQ ID NO: 634404 - DNA, 75 bp, synthetic construct
  source 1..75: mol_type = other DNA
ttttttgccggattacatggttcgcgaggcgatggagcaatccctgctggttacccgccaaatccataatccgcg

SEQ ID NO: 634405 - DNA, 75 bp, synthetic construct
  source 1..75: mol_type = other DNA
ttatacaggaggctttccatccggggaagaagtctttgagttactgaaaaatattttgtcagaaaaccggatgtc

SEQ ID NO: 634406 - DNA, 75 bp, synthetic construct
  source 1..75: mol_type = other DNA
tgtttattctcttcgtcgccgcagggctggcagctggtgccattcgcgcatttcatgaagccggattgtggaacc

SEQ ID NO: 634407 - DNA, 75 bp, synthetic construct
  source 1..75: mol_type = other DNA
gcggcacaaatgacatcgtcacgttctctaccgagttcaaagtcggcgacgcaagcaccatcgaagtgaacgaaa

SEQ ID NO: 634408 - DNA, 75 bp, synthetic construct
  source 1..75: mol_type = other DNA
atggaacttattgattttttacgtcaaacccagaatgagattcgcaaggaatatcaggatcaaatggcgcagcct

SEQ ID NO: 634409 - DNA, 75 bp, synthetic construct
  source 1..75: mol_type = other DNA
actcagttttatttgtttaacctcgctggcgctcttttgttatggtaaagacaacatccttgacaacaataagaa

SEQ ID NO: 634410 - DNA, 75 bp, synthetic construct
  source 1..75: mol_type = other DNA
ctggcactcttttgttatggaaaagacaacatccttgacaacaataagaaaaaacgggaatcctgttgctggcgc

SEQ ID NO: 634411 - DNA, 75 bp, synthetic construct
  source 1..75: mol_type = other DNA
atgagcgcggtgctctcgactcactctctgttcggtacgctgatggaaggtatttttggttatcaggaagcgccg

SEQ ID NO: 634412 - DNA, 75 bp, synthetic construct
  source 1..75: mol_type = other DNA
ttccggcagtatcagcgctgacgctcgctggccgtcaatttatcagtaaagaaaatgttcctgatatgcttcagt

SEQ ID NO: 634413 - DNA, 75 bp, synthetic construct
  source 1..75: mol_type = other DNA
aagaactacatgctttagaaaaaacgacctttactctggaaggattacaggaacgttatgatttacaagaagcaa

SEQ ID NO: 634414 - DNA, 75 bp, synthetic construct
  source 1..75: mol_type = other DNA
acagcctcagctaatgagcaagcttcaagggttcttaagtcgggtaatgctttacggaagtttagtgtgaatccg

SEQ ID NO: 634415 - DNA, 75 bp, synthetic construct
  source 1..75: mol_type = other DNA
gttcatcagaatacaaccagaattgattttgatatgaacacagagtgtgagcttaatttaaaactgaagcttcag

SEQ ID NO: 634416 - DNA, 75 bp, synthetic construct
  source 1..75: mol_type = other DNA
cacccgctggcgttgatggatggcccgttcagcgatgatacgttgcgcaactggccgtcgttggtgcgcgaagac

SEQ ID NO: 634417 - DNA, 75 bp, synthetic construct
  source 1..75: mol_type = other DNA
aacactgacggcaacgaaatcaggtaatacgctggtgggaacagtatgggcatcggctgaagccggagatgcctg

SEQ ID NO: 634418 - DNA, 75 bp, synthetic construct
  source 1..75: mol_type = other DNA
tgctgcacgggtgtctggctgttgtgatggtgatgatggcaggtgtttcacaggcagcagagctgagtcttgatg

SEQ ID NO: 634419 - DNA, 75 bp, synthetic construct
  source 1..75: mol_type = other DNA
tccggacacgctaagcatcatccattgtcacgaggtaggtgccgatcagttgctcaatatggtttatgactcaag

SEQ ID NO: 634420 - DNA, 75 bp, synthetic construct
  source 1..75: mol_type = other DNA
ggaatcaatgatgccatgtttatgctaatgtctctactttccacttcggataatttctgtatgtctccatcagac

SEQ ID NO: 634421 - DNA, 75 bp, synthetic construct
  source 1..75: mol_type = other DNA
gagcgttctggctcgttttgctgatcattgcaggttggggcggtctggtccgctacctgatagatgtgaagcaga

SEQ ID NO: 634422 - DNA, 75 bp, synthetic construct
  source 1..75: mol_type = other DNA
tgattatcgaaaacagaccaagtgcacttgatattcacgaattaagtttgcgtgaatcttttgatagagcttggc

SEQ ID NO: 634423 - DNA, 75 bp, synthetic construct
  source 1..75: mol_type = other DNA
gggcatggttgaacgaattacaggaagttcttgatcgctgtcctgtggtgtcatcctgccgcgattgcgttctta

SEQ ID NO: 634424 - DNA, 75 bp, synthetic construct
  source 1..75: mol_type = other DNA
gcaatagactattttctattaagctaaaaaatgagacaaatgctaaaaatgcctatgctggtgctgttggtatct

SEQ ID NO: 634425 - DNA, 75 bp, synthetic construct
  source 1..75: mol_type = other DNA
cgcaaactctgcccaccgccgtgtttatgctgaaaagctacttcgacaccatccccgatgagatcgaagaagcgg

SEQ ID NO: 634426 - DNA, 75 bp, synthetic construct
  source 1..75: mol_type = other DNA
acttctatggtgggtcaacgactggaaaaacgatccttctccagcttgcgatgtcagttcatggtcatggcgggg

SEQ ID NO: 634427 - DNA, 75 bp, synthetic construct
  source 1..75: mol_type = other DNA
ggcaggagcatcgtgccatcagtcttaacatccgccccgaagatgcccgtaaagacggtgagacctctgaagacg

SEQ ID NO: 634428 - DNA, 75 bp, synthetic construct
  source 1..75: mol_type = other DNA
agtttacagcaggcaataacggttattcaggcaactttggatttgcccctatatttccagacacctgttatcact

SEQ ID NO: 634429 - DNA, 75 bp, synthetic construct
  source 1..75: mol_type = other DNA
ttttttatcagtctatacctgaatccgtgcaagtaactattggaagcggtggtgtagcaggaacaggaccaggag

SEQ ID NO: 634430 - DNA, 75 bp, synthetic construct
  source 1..75: mol_type = other DNA
tggggcaattggacttggtgatgatcaggcgattggcgttgaaagtataacccctactatgcttgggacatacgg

SEQ ID NO: 634431 - DNA, 75 bp, synthetic construct
  source 1..75: mol_type = other DNA
tttcgtcttatatggctacaaaatctcctgaaacatcaggaaaagcaataattgcagccattgaaaagagaatta

SEQ ID NO: 634432 - DNA, 75 bp, synthetic construct
  source 1..75: mol_type = other DNA
gaaatggtacaacagtacactttgatcctgagaataaagtatctgtagttacaaattcatctggaaaggttgtaa

SEQ ID NO: 634433 - DNA, 75 bp, synthetic construct
  source 1..75: mol_type = other DNA
caaaagatttccttttattatttttgaaattcatttgatcaaggttatcaccttatggagacgttacgtagaatg

SEQ ID NO: 634434 - DNA, 75 bp, synthetic construct
  source 1..75: mol_type = other DNA
gggggaacctaaacggctatggcgtaggaatttcatatccacccccttatttttaatagacgttactaaagaaaa

SEQ ID NO: 634435 - DNA, 75 bp, synthetic construct
  source 1..75: mol_type = other DNA
tctggaaatttattgattcaatggggagagagcgttcactctcgctgtatggctcattatgtattaccgcaagaa

SEQ ID NO: 634436 - DNA, 75 bp, synthetic construct
  source 1..75: mol_type = other DNA
ccgcgttgcgctggatactaactcgatgggtaattctatcgatgtggaaaaaaatatcagcagtgttgtgccgac

SEQ ID NO: 634437 - DNA, 75 bp, synthetic construct
  source 1..75: mol_type = other DNA
gctaaatcaatgaataattacggcacaaattttcaattaatcggttatcgttactctacgcagggattttatact

SEQ ID NO: 634438 - DNA, 75 bp, synthetic construct
  source 1..75: mol_type = other DNA
tgaggcggagagtgcatctccgcctttgtatgtgcgtcgggcatggcacgctcgtttcgtttgtgcgcccgttca

SEQ ID NO: 634439 - DNA, 75 bp, synthetic construct
  source 1..75: mol_type = other DNA
ctggaggcaaccttcaataaggcggttacctcagaagttaactggaaagcgccaatgaacatcgttgtttcttat

SEQ ID NO: 634440 - DNA, 75 bp, synthetic construct
  source 1..75: mol_type = other DNA
tggaggagttgctgctgtgcctaatatcgttttcagaggctatgatggtaccatcgtttctcttcaggcatctgg

SEQ ID NO: 634441 - DNA, 75 bp, synthetic construct
  source 1..75: mol_type = other DNA
tggtccgggactggccgcagaccaacctggctcaaagagctgcttgacagtggtatatcgctggatgatctgaag

SEQ ID NO: 634442 - DNA, 75 bp, synthetic construct
  source 1..75: mol_type = other DNA
gcttcacgccgctcatccgggtcgagacagagaacggcgagcgggagaaagcgcagcgccgcagcctggcggaga

SEQ ID NO: 634443 - DNA, 75 bp, synthetic construct
  source 1..75: mol_type = other DNA
cgcagcggctggtatgtctggctcaggcgtcgtcaccagatgagcctgcgccaacagtttcgactcacctgcgat

SEQ ID NO: 634444 - DNA, 75 bp, synthetic construct
  source 1..75: mol_type = other DNA
gcgccactgtcgggctggatattcttgctgctatcggcagcgatatcgccctgatgcaacttaacggtattgcgc

SEQ ID NO: 634445 - DNA, 75 bp, synthetic construct
  source 1..75: mol_type = other DNA
atgagacgctttatctatcaggacgaaaaatcacataaattctgggcggtggagcaacagggaaacgagttgcat

SEQ ID NO: 634446 - DNA, 75 bp, synthetic construct
  source 1..75: mol_type = other DNA
ttaatggggtgccagggttaaatcgagaaaactttatttatatcagcaatattttttcaaatataaaacaacgga

SEQ ID NO: 634447 - DNA, 75 bp, synthetic construct
  source 1..75: mol_type = other DNA
acacccaaaacccggaattactacaggcaatggttgtatccagtggtggcaccccttatccagtgaaagcactta

SEQ ID NO: 634448 - DNA, 75 bp, synthetic construct
  source 1..75: mol_type = other DNA
aatgggcgagccggatcgtacttgtgttcctgttctcggttccttaaccccttctgccgccgatccagagtttat

SEQ ID NO: 634449 - DNA, 75 bp, synthetic construct
  source 1..75: mol_type = other DNA
gatgaagaggcgctccctttgacgttgagccgcggaacgttcttaaccgcctgtggcagcagctgcgccagcgcg

SEQ ID NO: 634450 - DNA, 75 bp, synthetic construct
  source 1..75: mol_type = other DNA
tccgtgggttcgatcctcggcaccacagcggtggcggcgatggtcgtctcccttagccctgagttcgccatgctg

SEQ ID NO: 634451 - DNA, 75 bp, synthetic construct
  source 1..75: mol_type = other DNA
tgttaggcgcaggcttttactcaattatccctgtttttattttagatatatatgtagtgcaatattaaatatctt

SEQ ID NO: 634452 - DNA, 75 bp, synthetic construct
  source 1..75: mol_type = other DNA
gtgtttttctgtattatatacaaatacagctttcgctgtctggcccgtcacagaagaggttttgacaccgtatct

SEQ ID NO: 634453 - DNA, 75 bp, synthetic construct
  source 1..75: mol_type = other DNA
cgcacggatgatgagcggactcaccggtaccattacgacagtcagcaccggctggtgcactacacgcggacacaa

SEQ ID NO: 634454 - DNA, 75 bp, synthetic construct
  source 1..75: mol_type = other DNA
aaacattatctttaacgcaacatattattacggtccaattcatcgtaattcctttttctatcgcatcagcaatat

SEQ ID NO: 634455 - DNA, 75 bp, synthetic construct
  source 1..75: mol_type = other DNA
ccgggatttatgggctagccttcgctagtagtgcatattctttgataaatatgtcggctatgtttttaattatca

SEQ ID NO: 634456 - DNA, 75 bp, synthetic construct
  source 1..75: mol_type = other DNA
aaacattatctctagcgcaacatatcatttcggttcaatttatcgtaattcccttttcaattgcatcagcaatat

SEQ ID NO: 634457 - DNA, 75 bp, synthetic construct
  source 1..75: mol_type = other DNA
tgatgcttactacttacagcaagaaaggatttttagaaaaatttataatattttatctgaaaagaaaagcgatga

SEQ ID NO: 634458 - DNA, 75 bp, synthetic construct
  source 1..75: mol_type = other DNA
cccggggcggttcagcgcgtgcgctatccacttttttgcccgtccatattcaacggcttctttgaggagttcatt

SEQ ID NO: 634459 - DNA, 75 bp, synthetic construct
  source 1..75: mol_type = other DNA
gtgatcaaaggggcggtgatcatcattgcggtgctgatcgacaaataccgaacccgacaccatcaaagtgcataa

SEQ ID NO: 634460 - DNA, 75 bp, synthetic construct
  source 1..75: mol_type = other DNA
actaacgagaacggcagccacagcgacttcagctacgatgcgctggaccggttggtacagcagggcggctttgac

SEQ ID NO: 634461 - DNA, 75 bp, synthetic construct
  source 1..75: mol_type = other DNA
agagaataacagcggtttcggctttgtgtttttcagtgttatatacaaatacagcttttgctgtctggcccgtca

SEQ ID NO: 634462 - DNA, 75 bp, synthetic construct
  source 1..75: mol_type = other DNA
ccatggttggttattatgaatgactctgaagcctctccagggggcgtgacgtatcaggggcctgatagtcacgac

SEQ ID NO: 634463 - DNA, 75 bp, synthetic construct
  source 1..75: mol_type = other DNA
acggcaataactctttgataaaacatggtgtggtgcaaggaaataatatagtcgatcttgatttactacgtaatt

SEQ ID NO: 634464 - DNA, 75 bp, synthetic construct
  source 1..75: mol_type = other DNA
gaaaaccgcacccccggcagcctgccgggaacaaagacgcagatgaccatccgctccaaaacgtacatgggcagc

SEQ ID NO: 634465 - DNA, 75 bp, synthetic construct
  source 1..75: mol_type = other DNA
aaccgctggtcgacggcccgcagagcgctgtcgtgacaggaccggcaggcgaggaaatcttctgcgacgaacatg

SEQ ID NO: 634466 - DNA, 75 bp, synthetic construct
  source 1..75: mol_type = other DNA
ttatcacctgtactatccacaccgtcgacatgctggctcggcattctcattatttatagataggctgaagtataa

SEQ ID NO: 634467 - DNA, 75 bp, synthetic construct
  source 1..75: mol_type = other DNA
tggtgggaagccggaaaaaccaatcgcatccgcaacctactgaagtctcgccagatcggcgcgaccttttacttt

SEQ ID NO: 634468 - DNA, 75 bp, synthetic construct
  source 1..75: mol_type = other DNA
ctttctaatgagcaacttcaagcccgtatcaattgtggtagaagtgaaccgccccggaaatcctggagactaaac

SEQ ID NO: 634469 - DNA, 75 bp, synthetic construct
  source 1..75: mol_type = other DNA
gcgggtaacgtgactactgaacgcaataacgcacctatgctgatgtgtcaggaactgtacagctactcagcatct

SEQ ID NO: 634470 - DNA, 75 bp, synthetic construct
  source 1..75: mol_type = other DNA
attgacgtgaccggtatcggccacggcgtgcatcaactggtgaaacagttcttcccggcagtgcaggcattctct

SEQ ID NO: 634471 - DNA, 75 bp, synthetic construct
  source 1..75: mol_type = other DNA
gcggcagatggagcgcggggcaagggttgaacgctatcagcagggaggcaatgaggtcgacctgaatcctgctct

SEQ ID NO: 634472 - DNA, 75 bp, synthetic construct
  source 1..75: mol_type = other DNA
gccagatttcacacagcgcgatcagccgcatcgccaccccccggattgattttgcgctggcgcttgccgttcgcc

SEQ ID NO: 634473 - DNA, 75 bp, synthetic construct
  source 1..75: mol_type = other DNA
tcgcggcaatggcgaacgtatcaaccaggacgctgcggcgctggttaaaacgaccggaaagtttaataccccagc

SEQ ID NO: 634474 - DNA, 75 bp, synthetic construct
  source 1..75: mol_type = other DNA
acagtggcaaagacggcatctatttccacttaagagacaatgtagatgccttcttaactttatcagctactgaaa

SEQ ID NO: 634475 - DNA, 75 bp, synthetic construct
  source 1..75: mol_type = other DNA
tcaaagtcggaaataacgttaccttcaccgttggtaaaacgaaaaaggatgataccgggcagaccgcgatttact

SEQ ID NO: 634476 - DNA, 75 bp, synthetic construct
  source 1..75: mol_type = other DNA
tggacatcgacctgtcccacaacaacctggcccccggcctgctgtgcgctgacgggcaataccgccagatagtca

SEQ ID NO: 634477 - DNA, 75 bp, synthetic construct
  source 1..75: mol_type = other DNA
atggatgaatgttttataaatatcactccgacttcattgtcttttaaaaatgccgaactatcagatttaagctat

SEQ ID NO: 634478 - DNA, 75 bp, synthetic construct
  source 1..75: mol_type = other DNA
cactcatttcgtgttactgacgaaggtgatttgttaggtatgtcaggaaagcagggaattaaccaaacggggatc

SEQ ID NO: 634479 - DNA, 75 bp, synthetic construct
  source 1..75: mol_type = other DNA
acgccgcatccggcagttggcgcacaatgcctgatgcgacgcttgtcgcgtcttatcatgcctacaagtctgtgc

SEQ ID NO: 634480 - DNA, 75 bp, synthetic construct
  source 1..75: mol_type = other DNA
aaaaatcacataaattctgggcggtggagcagcaaggcaacgaattgcatattagttggggtaaagtcggtacca

SEQ ID NO: 634481 - DNA, 75 bp, synthetic construct
  source 1..75: mol_type = other DNA
gagcattatgtcattgcaacgtctaatgatgttgttgatgtcctgtctgtggtttctccgaaaatagtgtataag

SEQ ID NO: 634482 - DNA, 75 bp, synthetic construct
  source 1..75: mol_type = other DNA
cgatggtggaagtggtttatggccgctcgttgtatgcaggagcggcgcacgggccgtcaccaaccgctggtgaag

SEQ ID NO: 634483 - DNA, 75 bp, synthetic construct
  source 1..75: mol_type = other DNA
tgcttaccgaacgtaaccagattttcctttccgccagcaaggcacaggcccacgtctttaagcagtacatcatcg

SEQ ID NO: 634484 - DNA, 75 bp, synthetic construct
  source 1..75: mol_type = other DNA
gtcttcgtatccagctaacttttcaggaaattaacttcaaagctattgttggccagactgatatttctgctgcta

SEQ ID NO: 634485 - DNA, 75 bp, synthetic construct
  source 1..75: mol_type = other DNA
ccgtggaagatgcagtgcgcggcggatgtaacctgttcgacctcgatcagttacgcatggagtacagcccggacg

SEQ ID NO: 634486 - DNA, 75 bp, synthetic construct
  source 1..75: mol_type = other DNA
cgatggtggaagtagtgtatggtcgctctctgtatgccggcgcggcgcacgggccgtcaccgactgccggtgaag

SEQ ID NO: 634487 - DNA, 75 bp, synthetic construct
  source 1..75: mol_type = other DNA
cgtggccgcaacaaagccgacaaggtggacattgacctgtcacacaacaatctggcccccggcctgctgtgtgca

SEQ ID NO: 634488 - DNA, 75 bp, synthetic construct
  source 1..75: mol_type = other DNA
ctgggaacgttcgccgcaagatcaagaaaaattctgggttaaatatctgcgtgattttatttcgctgattggctt

SEQ ID NO: 634489 - DNA, 75 bp, synthetic construct
  source 1..75: mol_type = other DNA
aatggtgcattttatttctgtaatagccaacaacttatccgactgctaaatgatgattcgttgaatacatgtaaa

SEQ ID NO: 634490 - DNA, 75 bp, synthetic construct
  source 1..75: mol_type = other DNA
attaatgggggagatgccgctgtaatacatgccctggttgaaaaaggaatagttaactggcagcaccttatgaac

SEQ ID NO: 634491 - DNA, 75 bp, synthetic construct
  source 1..75: mol_type = other DNA
ctattcagaatcataatatacattctgttcgtttttttagtcaattgcttatgggaaactcaccaaaagcaaaaa

SEQ ID NO: 634492 - DNA, 75 bp, synthetic construct
  source 1..75: mol_type = other DNA
aatgatgccctataccgttatgtgatgaacacccgcctgggaaccatccacggcacgtcggtcggcgaactgctg

SEQ ID NO: 634493 - DNA, 75 bp, synthetic construct
  source 1..75: mol_type = other DNA
cctgtttcctgccatccttgcgcaaaacgtctggcaccgttttccactttactggcagcgtctgacgttactgtt

SEQ ID NO: 634494 - DNA, 75 bp, synthetic construct
  source 1..75: mol_type = other DNA
aagtataatggtgctgtattgcgttatgttccgttgaaggcaaatggcattcaaagtatattctatgatattttt

SEQ ID NO: 634495 - DNA, 75 bp, synthetic construct
  source 1..75: mol_type = other DNA
atacagcgtgccaaccccggcctgtacgacatgatcaccaacggtgtgctgcaggcgaatgtggctttcgacaag

SEQ ID NO: 634496 - DNA, 75 bp, synthetic construct
  source 1..75: mol_type = other DNA
actgcatggcaaagatgttccggtgcgtgaagccctcgccggacaagtgcccagcgcaggcgtcggcacctgttt

SEQ ID NO: 634497 - DNA, 75 bp, synthetic construct
  source 1..75: mol_type = other DNA
gcgattgagggagacaacgtcaaacttgtaatcgctaatttcgtggctccccattctgattgtcagttgctggga

SEQ ID NO: 634498 - DNA, 75 bp, synthetic construct
  source 1..75: mol_type = other DNA
tgccagtgcgcgggcagttaaagcctgtcatagcctgatccccgaagcgaaaatcggcaatatgcttctcggtgg

SEQ ID NO: 634499 - DNA, 75 bp, synthetic construct
  source 1..75: mol_type = other DNA
atggtttatacgcatgaaatgctttgtgatgcccgtcgggcattacatgaactgatgatcggacgtgctgtggtt

SEQ ID NO: 634500 - DNA, 75 bp, synthetic construct
  source 1..75: mol_type = other DNA
atttccagggcggtggctttgatctcactctgatgtcgtttttacaaatcggcgcagatggctcagtgaacgtct

SEQ ID NO: 634501 - DNA, 75 bp, synthetic construct
  source 1..75: mol_type = other DNA
gaaagcttggtggtatatctcaagaaattgccgggcgtgaatatgatgttgttactgacaagatcatagcgcagg

SEQ ID NO: 634502 - DNA, 75 bp, synthetic construct
  source 1..75: mol_type = other DNA
ctgggcaaactgggaaacctgctggggaaaagcgggaagctgctgggcgcaaaactcggcgcgttgctggggaaa

SEQ ID NO: 634503 - DNA, 75 bp, synthetic construct
  source 1..75: mol_type = other DNA
gcataactaccctataaaatttaaagaaaaattcaccgtcggaaattataaatatgaagtaagggctcatgatgt

SEQ ID NO: 634504 - DNA, 75 bp, synthetic construct
  source 1..75: mol_type = other DNA
gacgtctttattggcggtgagcaggtcacctatctggatatccagccggagttcccgccgtggcagagaatgatc

SEQ ID NO: 634505 - DNA, 75 bp, synthetic construct
  source 1..75: mol_type = other DNA
ttatctaaaatgatgaatagctccagtgatctcatggggttgagaaggcagccccagaacttctggcggctatat

SEQ ID NO: 634506 - DNA, 75 bp, synthetic construct
  source 1..75: mol_type = other DNA
ggtacgggagtaccgttacgacagcgcgggtaacgtgtcaggcgtcaccagccgggaagattacggacgggaaac

SEQ ID NO: 634507 - DNA, 75 bp, synthetic construct
  source 1..75: mol_type = other DNA
cgcggggaactgtgccgaatccttgtgggtgggttgatccgctgggattggctgcaagttctaaaatcagcagtt

SEQ ID NO: 634508 - DNA, 75 bp, synthetic construct
  source 1..75: mol_type = other DNA
ggaggaaaccatcctctacagccgggacgccgcaggccgcaggccgcctggcagaagtcatcacgccggaaggca

SEQ ID NO: 634509 - DNA, 75 bp, synthetic construct
  source 1..75: mol_type = other DNA
tggcagagaatgatcctggggggaataacgatagccagctatcttctgccgccagcgggactgctgggaaaactg

SEQ ID NO: 634510 - DNA, 75 bp, synthetic construct
  source 1..75: mol_type = other DNA
ctggtccgataacgaccagacgtggagccgtttcacctacgatgcacagggccggtgcgtgaccgtcaccggggc

SEQ ID NO: 634511 - DNA, 75 bp, synthetic construct
  source 1..75: mol_type = other DNA
ttgctcaacatttatccaacaaacttggtgtgccagttacagcaccgagtgatacattatggatctttccttcag

SEQ ID NO: 634512 - DNA, 75 bp, synthetic construct
  source 1..75: mol_type = other DNA
gccggattttttccggaagaagccacatggggcgggctggttccctcactggtacgggagtaccgttacgacagc

SEQ ID NO: 634513 - DNA, 75 bp, synthetic construct
  source 1..75: mol_type = other DNA
ggtcgaacagggttaactacccgagtacggcaagaggtagcccgggatattaagattttgagaagtgagcaactt

SEQ ID NO: 634514 - DNA, 75 bp, synthetic construct
  source 1..75: mol_type = other DNA
gggtgaagaggctattcgggcactacttcatgagcgttataaaattattacaacgactcaggtaagcgaccatcg

SEQ ID NO: 634515 - DNA, 75 bp, synthetic construct
  source 1..75: mol_type = other DNA
aaactggcctgtagccggtgtgatgtcatcgttcaggcaccacttcctcctaaaccgatcgaacgcggttatgcc

SEQ ID NO: 634516 - DNA, 75 bp, synthetic construct
  source 1..75: mol_type = other DNA
aaaagccagtccaggtatggtcggcggcggatatcggttttaacgcagaggcagcctggtcagaacaacaggttg

SEQ ID NO: 634517 - DNA, 75 bp, synthetic construct
  source 1..75: mol_type = other DNA
tcgttacccataatacgggtacgggagttaaagttgggggcgataatggagatatttctctcgctgggggaatgc

SEQ ID NO: 634518 - DNA, 75 bp, synthetic construct
  source 1..75: mol_type = other DNA
gaactgaaaagtactagtgccaccactgtacctcgtagtggttccattattcttgccagttttgaaactgaccag

SEQ ID NO: 634519 - DNA, 75 bp, synthetic construct
  source 1..75: mol_type = other DNA
agggggcacgagtcaataacggtactgatgaaatcgatcgctggggttatgccgtttcctcatccttaagtccat

SEQ ID NO: 634520 - DNA, 75 bp, synthetic construct
  source 1..75: mol_type = other DNA
gtctgtgataacatcatttacatagaaaacacaccaaaaggatggttgaaaagaatatattgggattggttcggt

SEQ ID NO: 634521 - DNA, 75 bp, synthetic construct
  source 1..75: mol_type = other DNA
aatgtgggtactgagcaggggcaactggatggaaccaacggcgaaggtttaattggtattaagggcaatggtcgg

SEQ ID NO: 634522 - DNA, 75 bp, synthetic construct
  source 1..75: mol_type = other DNA
actgagcgtaaaccaggggttggaaaacagtggtcacctggatgttgacagcattaacagcaaaaccacgatata

SEQ ID NO: 634523 - DNA, 75 bp, synthetic construct
  source 1..75: mol_type = other DNA
accatcgtagtgcaaacgaattggatgaaaaaaggagtgctggagcaatgtgataaaattagtaccgaaagggtc

SEQ ID NO: 634524 - DNA, 75 bp, synthetic construct
  source 1..75: mol_type = other DNA
tgatggcagtaggactacctttactaatattggtgatatctcagttggtgaagatgggcacagtggtaaccccta

SEQ ID NO: 634525 - DNA, 75 bp, synthetic construct
  source 1..75: mol_type = other DNA
gcgaccacggtattccgcgaagcgcgcgtgctaagcaaccgctttagcatgctggcggatgccgcaccgaaagtg

SEQ ID NO: 634526 - DNA, 75 bp, synthetic construct
  source 1..75: mol_type = other DNA
ttccacgggcgtgctgctgaacggcgatcgcgcgtcattcattaatatgggtgatattaacgttagcggaggtgc

SEQ ID NO: 634527 - DNA, 75 bp, synthetic construct
  source 1..75: mol_type = other DNA
ccgtcccgccggatgatggcggcgatacaccagtcccgccagacgacggcggtgacacgccagatgatggcggcg

SEQ ID NO: 634528 - DNA, 75 bp, synthetic construct
  source 1..75: mol_type = other DNA
caaaacattcatattctcaatgaagcatatggcttggggtttggtaaaaataataattacgtattcgactattgt

SEQ ID NO: 634529 - DNA, 75 bp, synthetic construct
  source 1..75: mol_type = other DNA
ggtgttctggcgaccggctgcattacgcaagaaagcaggagaaaaggtcgaactgcagttacaggtcagccagca

SEQ ID NO: 634530 - DNA, 75 bp, synthetic construct
  source 1..75: mol_type = other DNA
aggagcccccgaacttactccagacgctcgacggaattatttcgatcaccgggacggaatcgcaaccgctgacaa

SEQ ID NO: 634531 - DNA, 75 bp, synthetic construct
  source 1..75: mol_type = other DNA
gaaaaataccgcgccatgtatctgagtaaaacccgttatgcgtgcgatgccttgagaaggggatatatacgcccg

SEQ ID NO: 634532 - DNA, 75 bp, synthetic construct
  source 1..75: mol_type = other DNA
tttaaagtaagtcattatgccttgcttaacggtttttcagataaatatttcatgtattgtgaagatattgatata

SEQ ID NO: 634533 - DNA, 75 bp, synthetic construct
  source 1..75: mol_type = other DNA
ggatgtgaaaattcatctcaagactcttgaaaagttaatcaggattatgaatattgatgatagtagactagcttc

SEQ ID NO: 634534 - DNA, 75 bp, synthetic construct
  source 1..75: mol_type = other DNA
aagacggcaaaaaagatgactccgtttactttagcgtcagtgttcctctggaaaatctgctcggcggagatcgcc

SEQ ID NO: 634535 - DNA, 75 bp, synthetic construct
  source 1..75: mol_type = other DNA
atgctaactctgtaggcattattattgaaggtgatgatgcagtatttaagtctactggggaaatcaatgtttcac

SEQ ID NO: 634536 - DNA, 75 bp, synthetic construct
  source 1..75: mol_type = other DNA
aaaaatgcttataccgatgtggcgaccgatgcttcggtgaatgacgtcgcgaaagcactggatgcgggttacacc

SEQ ID NO: 634537 - DNA, 75 bp, synthetic construct
  source 1..75: mol_type = other DNA
actggttgcagctgctggtggtggcgttaatcggcgtgctggcgttcttcgtaaaccggtaccgcgacaacgcca

SEQ ID NO: 634538 - DNA, 75 bp, synthetic construct
  source 1..75: mol_type = other DNA
ataagatgctcttgagggcaattgcagatatggtgattcaaaacccttcctatgccagagagatattcgatgatg

SEQ ID NO: 634539 - DNA, 75 bp, synthetic construct
  source 1..75: mol_type = other DNA
agagacagctccgtgtgcttagtaacgggaagtttaaaccatatctccagccgttggtttcttcaccagacttta

SEQ ID NO: 634540 - DNA, 75 bp, synthetic construct
  source 1..75: mol_type = other DNA
atgagagacctgggtggaatgctaacctgggcggtgctaccccggacggtgctaccccggacggtgctaacccgg

SEQ ID NO: 634541 - DNA, 75 bp, synthetic construct
  source 1..75: mol_type = other DNA
tcagatgccgctaatgagcaagtttcaaaggtgcttaagccgggtaatgctctgcgaaagtactctgtgaatccg

SEQ ID NO: 634542 - DNA, 75 bp, synthetic construct
  source 1..75: mol_type = other DNA
tcagatgccgctaatgagcaagcttcaaaggtgcttagtaatgctggtacaggtagtactttgaagaaattttct

SEQ ID NO: 634543 - DNA, 75 bp, synthetic construct
  source 1..75: mol_type = other DNA
agggattgatgttgtttcactggatctgcctgtgcgtaacctttccagcgcggaagggaagttgatgctgcaaat

SEQ ID NO: 634544 - DNA, 75 bp, synthetic construct
  source 1..75: mol_type = other DNA
gtgtgtccaccagcgaacagtcaacagaaaaccagattatggcgattcgtcaggctggctatgcagtgaatgata

SEQ ID NO: 634545 - DNA, 75 bp, synthetic construct
  source 1..75: mol_type = other DNA
cctggacggtgctatcctggacggtgctaccgtgaacggtgctacctccctatatgatgaggtaattattattaa

SEQ ID NO: 634546 - DNA, 75 bp, synthetic construct
  source 1..75: mol_type = other DNA
tcaaactcgcagcaacaactgctacctcgaatatcattggttttgacgttagagatattagtgttcgcgatacca

SEQ ID NO: 634547 - DNA, 75 bp, synthetic construct
  source 1..75: mol_type = other DNA
gcgttatgaagtccacaagttaaagaaaccttcccgccccgatgagcgtaatgaacaccgtcaggtccgcatcac

SEQ ID NO: 634548 - DNA, 75 bp, synthetic construct
  source 1..75: mol_type = other DNA
ggctggagacggtcgtacttcccgaactggagaaactgccgcagaacctgcgccactgtctgggggaggactttg

SEQ ID NO: 634549 - DNA, 75 bp, synthetic construct
  source 1..75: mol_type = other DNA
ttttatagatgtaaactcatagaacatacagttcaattttattttttaaacacaaaggcatcacattacttagat

SEQ ID NO: 634550 - DNA, 75 bp, synthetic construct
  source 1..75: mol_type = other DNA
cttaattttgtttgatgactttttcagaagccagattttcctaaaccatctccagtcctccatcatttttttcaa

SEQ ID NO: 634551 - DNA, 75 bp, synthetic construct
  source 1..75: mol_type = other DNA
aatacgatgttctgctgccgtatcagaaacgctgggtggcggatgatgccgacctgaaaattgccgagaaatccc

SEQ ID NO: 634552 - DNA, 75 bp, synthetic construct
  source 1..75: mol_type = other DNA
taactaaagcagctgaagtattaaaaattggtcgtacaacattatggcgcaaacttaaaatctataatctctatc

SEQ ID NO: 634553 - DNA, 75 bp, synthetic construct
  source 1..75: mol_type = other DNA
ttcttgtcactatcagcaactgaaaacatggaatttgacagccctatgatggttaccactcaaaatatgcaatca

SEQ ID NO: 634554 - DNA, 75 bp, synthetic construct
  source 1..75: mol_type = other DNA
aagcatatttaaagttcttggacgctctgggcaatcgcagcatgtaagttttattgacgataaaataaaagagct

SEQ ID NO: 634555 - DNA, 75 bp, synthetic construct
  source 1..75: mol_type = other DNA
gttagagaaggagagattgtcctctttaattgaatctttggagagtaaagaggaatataggaagaaggatatttc

SEQ ID NO: 634556 - DNA, 75 bp, synthetic construct
  source 1..75: mol_type = other DNA
tactttgcggggctttttcatgaaaattgtttatatatggttatattttttcttttgttatttatgatttccatt

SEQ ID NO: 634557 - DNA, 75 bp, synthetic construct
  source 1..75: mol_type = other DNA
ccaaaacttcgccggggacgacatatacgccaataaaagtgagttgctgtagtccagcggctaaagccattgaga

SEQ ID NO: 634558 - DNA, 75 bp, synthetic construct
  source 1..75: mol_type = other DNA
aatgctggtagtggtattattataatgataatgtcatcttttgtttctgctgttatagtgtatgcaattacatct

SEQ ID NO: 634559 - DNA, 75 bp, synthetic construct
  source 1..75: mol_type = other DNA
cgactcgagggggatgcgcgtcgtgttgctgttctgtgtctttccactggcgcaaggtggggggaagcagctggc

SEQ ID NO: 634560 - DNA, 75 bp, synthetic construct
  source 1..75: mol_type = other DNA
ggagcaattgtagcagcttcgattcaggctgcattaattggcttgataatattggtaattaatttaaaccaacaa

SEQ ID NO: 634561 - DNA, 75 bp, synthetic construct
  source 1..75: mol_type = other DNA
gagccagtccaaagcggcgcttgaactgggtttaagtttgccgacaatcaagcgtagctggaacattaaagaagt

SEQ ID NO: 634562 - DNA, 75 bp, synthetic construct
  source 1..75: mol_type = other DNA
gcgaccgttgagtattttttggggctcgatggataaagctcttaactcatcaccgagtcagtggcaaacttatcc

SEQ ID NO: 634563 - DNA, 75 bp, synthetic construct
  source 1..75: mol_type = other DNA
tttctcgtttagaaaaagttaaaagcaggactaataccaaagctatttctgctgatgatttctcagttatttata

SEQ ID NO: 634564 - DNA, 75 bp, synthetic construct
  source 1..75: mol_type = other DNA
cttgtatccgttaaatgattcggcaacaatcatcacccaccacgcgcgtaatctcacccctgcgccgttctcccg

SEQ ID NO: 634565 - DNA, 75 bp, synthetic construct
  source 1..75: mol_type = other DNA
cgtactggattaacctgggcagaagctgctgatgctgccctgaatggctcaatgtcgagagaggcaggcggttgc

SEQ ID NO: 634566 - DNA, 75 bp, synthetic construct
  source 1..75: mol_type = other DNA
caaggacgattattatatgactatgctcagaaaattttgtcactgattgacgaacttgaaggtaaactacataca

SEQ ID NO: 634567 - DNA, 75 bp, synthetic construct
  source 1..75: mol_type = other DNA
atagaaagaatcttcaagaaatcaaatatatacaaaatgaattaacaaacattgaagcaaagaaaatatctttga

SEQ ID NO: 634568 - DNA, 75 bp, synthetic construct
  source 1..75: mol_type = other DNA
tcattagtgaaaataggcacacctattgtcttgacagaatttcttagcgaaaataaaacgccatttattatttta

SEQ ID NO: 634569 - DNA, 75 bp, synthetic construct
  source 1..75: mol_type = other DNA
ttacccagataaaaatagaattaaaaagttgtttgtttatgaccttgtcaaaaatgattatcgcgagcttggatt

SEQ ID NO: 634570 - DNA, 75 bp, synthetic construct
  source 1..75: mol_type = other DNA
ccgaccagattaagcggatgcaggacatcattagcaacccaaaacgactggatggaattctgatcctacccacgt

SEQ ID NO: 634571 - DNA, 75 bp, synthetic construct
  source 1..75: mol_type = other DNA
taacattaacagaaaacacacgaaagttaacgttgacggagaaaccctggggaacatttattcttgcttctactt

SEQ ID NO: 634572 - DNA, 75 bp, synthetic construct
  source 1..75: mol_type = other DNA
aactgatttcatcgctcaatcactatcacaacaattaaattgtaacataataaccagctttaaaccattaagtgg

SEQ ID NO: 634573 - DNA, 75 bp, synthetic construct
  source 1..75: mol_type = other DNA
gggataaatattgccgcggaacatcttgcacatcctgattttgttgctgatgttttacatattaaaaatgcaata

SEQ ID NO: 634574 - DNA, 75 bp, synthetic construct
  source 1..75: mol_type = other DNA
attccatcacctgctggcccgccactcccctgccgggcgggtggagaaatttgaatacaacgccgcacacggcca

SEQ ID NO: 634575 - DNA, 75 bp, synthetic construct
  source 1..75: mol_type = other DNA
agcattcaccaactttaacctggttgctctgggtgtgattggtactgttatggcagtcctctacatccaacttag

SEQ ID NO: 634576 - DNA, 75 bp, synthetic construct
  source 1..75: mol_type = other DNA
cacgtaaacccggtaaagacgcacgccaccacatcgccgtactccgcaatctgttactggaggaaatcgacgact

SEQ ID NO: 634577 - DNA, 75 bp, synthetic construct
  source 1..75: mol_type = other DNA
cacgcaaaccaggaaaagatgtacgccaccacatcgctgtactccgcaatctgctgatggaggaaatcgacgact

SEQ ID NO: 634578 - DNA, 75 bp, synthetic construct
  source 1..75: mol_type = other DNA
tatcgttgtaccattaattattcgcccttgtgattggacatcggcagaattcggaagtatacaaggtttaccaaa

SEQ ID NO: 634579 - DNA, 75 bp, synthetic construct
  source 1..75: mol_type = other DNA
catccgcatcaggcacagcgagcgcaactgcattttcgccgcctggatatgcggatgctgcgagagctcatccca

SEQ ID NO: 634580 - DNA, 75 bp, synthetic construct
  source 1..75: mol_type = other DNA
gcgggctggacggtgatctctgacggaatgcacgatgtccaggcaatgaccgaaaccatcagtgataaggtgtcc

SEQ ID NO: 634581 - DNA, 75 bp, synthetic construct
  source 1..75: mol_type = other DNA
tgggggatgatgttcagacgcagcgaaatcgtctgcgtgatgcccttcgtgctcccggtgccggggagctgcttc

SEQ ID NO: 634582 - DNA, 75 bp, synthetic construct
  source 1..75: mol_type = other DNA
gcacgagctgcaactttgcgaggaaaaagaatccttcactgccagagttctggtacgcccgggcggtgacttatg

SEQ ID NO: 634583 - DNA, 75 bp, synthetic construct
  source 1..75: mol_type = other DNA
ttaccgatgtggttcaccgtctgaacctgagcgcggatggcgaagcggggatgacctgctggcccccacgcgctg

SEQ ID NO: 634584 - DNA, 75 bp, synthetic construct
  source 1..75: mol_type = other DNA
atgatagaaaatggcattcaacgttgggcatctaaactatgtccaaaaattgatgttgaagaaaataaaaaaatt

SEQ ID NO: 634585 - DNA, 75 bp, synthetic construct
  source 1..75: mol_type = other DNA
atggacgttgagtacggtcagtacagtgtcaccctgctggttgaaggttttccgccttcgcatgccgggaccatc

SEQ ID NO: 634586 - DNA, 75 bp, synthetic construct
  source 1..75: mol_type = other DNA
actaaatccacgaataacaccggggcgcatacgcacagtctgagtggctctacggggtctgccggtgttcatact

SEQ ID NO: 634587 - DNA, 75 bp, synthetic construct
  source 1..75: mol_type = other DNA
tgtacgaggcgtacaacaatagctacccgaccatgtatggcaacgtattgcacatgaaaggtgcgagtgctgctg

SEQ ID NO: 634588 - DNA, 75 bp, synthetic construct
  source 1..75: mol_type = other DNA
gcttgaatccatgattgataagcaggaaacagtattacagcaaatgatgagcaaacagcccggattcctctctct

SEQ ID NO: 634589 - DNA, 75 bp, synthetic construct
  source 1..75: mol_type = other DNA
caactagccgatgaacatccccagctgcaggaaaataacactgacaatgtggcgcaggaatatcaggacgctgtg

SEQ ID NO: 634590 - DNA, 75 bp, synthetic construct
  source 1..75: mol_type = other DNA
aggaagaatgagagtaataattcacatgaaatagttctaacagtagcttcacttgaatatatttgggcattttcc

SEQ ID NO: 634591 - DNA, 75 bp, synthetic construct
  source 1..75: mol_type = other DNA
aatatttaactttcagaaatttgatgtccatattatctggatgttaactatggcgttatttggtgggtttatagg

SEQ ID NO: 634592 - DNA, 75 bp, synthetic construct
  source 1..75: mol_type = other DNA
caaatcactacaactcgaacccagaagacgaaaagcagttgtgataaaagaatgtgtagatatgtatgtgcctaa

SEQ ID NO: 634593 - DNA, 75 bp, synthetic construct
  source 1..75: mol_type = other DNA
aacatgaaactctactataaagaaactgagagtgaaagccatcgagttataattgacaacattttgaaactaaag

SEQ ID NO: 634594 - DNA, 75 bp, synthetic construct
  source 1..75: mol_type = other DNA
ggctggggcgattgtgcaatcgtatggactacgccgccggatttatctttatgcgtcgactgggctcggcggcgt

SEQ ID NO: 634595 - DNA, 75 bp, synthetic construct
  source 1..75: mol_type = other DNA
gtggatgtctcggcgcgtaatgatatctaccaactgttgcgcagcatcgccgcacagaatgtggctgtgctgctt

SEQ ID NO: 634596 - DNA, 75 bp, synthetic construct
  source 1..75: mol_type = other DNA
ctgggtatccccgcgttgcgggatcgtattgttcagcgggccatgctgatggcgatggagcgatatgggagagtg

SEQ ID NO: 634597 - DNA, 75 bp, synthetic construct
  source 1..75: mol_type = other DNA
ctgattgtgcttggtggtctgatggacgatcaggcgggagaaagcgtggcgaaagtgcctctgctgggcgatatc

SEQ ID NO: 634598 - DNA, 75 bp, synthetic construct
  source 1..75: mol_type = other DNA
tccgcgtttactgttattaactttgctttctgcggtgacggctgtttctggttttagtttagccaagttgttcct

SEQ ID NO: 634599 - DNA, 75 bp, synthetic construct
  source 1..75: mol_type = other DNA
ggtggatttatattaggggcgttaattgcctttgttgcgctgttagtgacattttcacattatcgctatatgcag

SEQ ID NO: 634600 - DNA, 75 bp, synthetic construct
  source 1..75: mol_type = other DNA
ctgctggcggcatcagtggaaatcgatatttttatcagcgacttaatgctcccaggcggtatgagcggcgcagaa

SEQ ID NO: 634601 - DNA, 75 bp, synthetic construct
  source 1..75: mol_type = other DNA
tttcggttaatggcgtggacaaaggagagacaacgatgagatggtacagtgcaggtacacaaaacctgaccatcg

SEQ ID NO: 634602 - DNA, 75 bp, synthetic construct
  source 1..75: mol_type = other DNA
gaacaccggaccgatgatctaacggagaacgggcgacagcactgcccgtatgtaaatcctgattcgggtgaaagg

SEQ ID NO: 634603 - DNA, 75 bp, synthetic construct
  source 1..75: mol_type = other DNA
attgacactaatcaattgaaagatctatatactgaagccagtaataatataaagaatattcaggtaaaatttgaa

SEQ ID NO: 634604 - DNA, 75 bp, synthetic construct
  source 1..75: mol_type = other DNA
ataatgcatattgcccatgcgtttaccaatcccccccccgccactgtcgccagcggaatagcacttgtacccggc

SEQ ID NO: 634605 - DNA, 75 bp, synthetic construct
  source 1..75: mol_type = other DNA
ttatcagcagcttcggcagcgtcaatggcatcatctgcgtctgcttcaaaagatgaggcgaccagacaggcgtca

SEQ ID NO: 634606 - DNA, 75 bp, synthetic construct
  source 1..75: mol_type = other DNA
atgacaatttgaaacagagtgaaaggtcagatttgcggagtaatgcacataatggttatttaaataaaccacatg

SEQ ID NO: 634607 - DNA, 75 bp, synthetic construct
  source 1..75: mol_type = other DNA
ggccaatgagcgaagcgagtataaatcaagccattaagcgtattgggtatggaggaaaagtcactggacatggtt

SEQ ID NO: 634608 - DNA, 75 bp, synthetic construct
  source 1..75: mol_type = other DNA
aacgcgaactcttgaacggatcaaccaacctgagccattaaagagaaatataggtgaaatccttagccaactcag

SEQ ID NO: 634609 - DNA, 75 bp, synthetic construct
  source 1..75: mol_type = other DNA
ttggctcatctccggaagcccttgacacactgaatgagctggcagcggcgctgggcaatgacccgaattttgcaa

SEQ ID NO: 634610 - DNA, 75 bp, synthetic construct
  source 1..75: mol_type = other DNA
tcccgtaagcccgtccctgcgcccctgggactcaggctacataaacagaagcgggattgccagtctgcttgggag

SEQ ID NO: 634611 - DNA, 75 bp, synthetic construct
  source 1..75: mol_type = other DNA
cgtgctgtatgcgctggcggaacaggatatcaaacggctgctggcctggagtaccgtcgaaaacgtcggcattat

SEQ ID NO: 634612 - DNA, 75 bp, synthetic construct
  source 1..75: mol_type = other DNA
cgccggactggcacgtaatcacctgctgattatcgtcctgctgttattgctgttaacgctggtgctggcgggcct

SEQ ID NO: 634613 - DNA, 75 bp, synthetic construct
  source 1..75: mol_type = other DNA
ctcaacgtcgtctgtgggatgctcaaaatcatgccatttaccgccgtgctgtttggcggcggtgcgctggcgctg

SEQ ID NO: 634614 - DNA, 75 bp, synthetic construct
  source 1..75: mol_type = other DNA
catttgccgcaatttcgatttccgggccgatttcacgtataaccgacgaccgcgtgaccgagtttggcgcgatgg

SEQ ID NO: 634615 - DNA, 75 bp, synthetic construct
  source 1..75: mol_type = other DNA
cagcaatatcagcagccgcaacagccggttgcgccgcagccgcagtatcagcagccacaacagccggttgcgccg

SEQ ID NO: 634616 - DNA, 75 bp, synthetic construct
  source 1..75: mol_type = other DNA
gccacaacagccggttgcgccacagcagcaatatcagcagcagcaacagccggttgcgccgcagccgcagtatca

SEQ ID NO: 634617 - DNA, 75 bp, synthetic construct
  source 1..75: mol_type = other DNA
accctcaaaatccgcacctggaaccagcgtgtcacccgtagcggtgggcagcgtcaggacatggtggctctggag

SEQ ID NO: 634618 - DNA, 75 bp, synthetic construct
  source 1..75: mol_type = other DNA
atacgctgttattgcagggattgattctggcggcgcaaactgaaggctacgcgtgcgatggcgtgacaaccgcgc

SEQ ID NO: 634619 - DNA, 75 bp, synthetic construct
  source 1..75: mol_type = other DNA
ggcggcaacaaaactgaagccgcccgtcagttagggatcacgcgtaaaacgttattggcaaaactgtcgcgttag

SEQ ID NO: 634620 - DNA, 75 bp, synthetic construct
  source 1..75: mol_type = other DNA
tttactagagctcgttcttcatgttcggaagatgacattcttatttctaaaacaattttcaagcatgtagatgaa

SEQ ID NO: 634621 - DNA, 75 bp, synthetic construct
  source 1..75: mol_type = other DNA
gtgctgaatggcgacaatacagacgaaaacaaacagccgaatctgggcaaagacgtagcgagtgctacgaataag

SEQ ID NO: 634622 - DNA, 75 bp, synthetic construct
  source 1..75: mol_type = other DNA
tatggttttttcagggggttgagaaaatgaaaaatgtgaccatatttatggtcactgcaaagttatcttatttaa

SEQ ID NO: 634623 - DNA, 75 bp, synthetic construct
  source 1..75: mol_type = other DNA
ctgagtttgattgtgttaatgaaattaagggaaagaagactaaaggccgttaaaaaaggaaagcaaatatttcta

SEQ ID NO: 634624 - DNA, 75 bp, synthetic construct
  source 1..75: mol_type = other DNA
atgctaaacgaacgccagttaaagattgtcgatctgctggagcaacagccacgcacgcctggcgagctggcgcaa

SEQ ID NO: 634625 - DNA, 75 bp, synthetic construct
  source 1..75: mol_type = other DNA
tgtgttggttttttgttagcgataacaacaatctgcgcagtgccaataacgaagaaaaacagtcattccagctta

SEQ ID NO: 634626 - DNA, 75 bp, synthetic construct
  source 1..75: mol_type = other DNA
cgtcaatttctggcgtacagcgtcagttccgcattggttataaccgtgcagcgcgtattatcgaacagatggaag

SEQ ID NO: 634627 - DNA, 75 bp, synthetic construct
  source 1..75: mol_type = other DNA
gggacgtttgcacgctgttaaaaaaaacgcacctgttggtgctacagaaaatgatacagtaaagacagaaacgaa

SEQ ID NO: 634628 - DNA, 75 bp, synthetic construct
  source 1..75: mol_type = other DNA
attttcgccagtggcagtgcgggctatcagctggaaatcttcgagcgccgcagtttttttcagttgctgcaaaag

SEQ ID NO: 634629 - DNA, 75 bp, synthetic construct
  source 1..75: mol_type = other DNA
tccccgtgcgcaactcgcctcggcgcttaatttgccagaaacgtgggtagcagagcgtctgccccgcctgaaaca

SEQ ID NO: 634630 - DNA, 75 bp, synthetic construct
  source 1..75: mol_type = other DNA
ggtgccagatggactattgatattaaggggaataaacaactttctgacattgcatataaatacaaagatgtggag

SEQ ID NO: 634631 - DNA, 75 bp, synthetic construct
  source 1..75: mol_type = other DNA
taaaaaagagcagttcccgtatgtgggtacgacctatcgtctgaccgagcacttccacacctggaccaagcacgc

SEQ ID NO: 634632 - DNA, 75 bp, synthetic construct
  source 1..75: mol_type = other DNA
cgatttgtttgtccgtaagttaccctaatgcaaaaatgttttataaatatagatgtttaaagcctggggactggg

SEQ ID NO: 634633 - DNA, 75 bp, synthetic construct
  source 1..75: mol_type = other DNA
cctaatggtatacgtttagtaccgtcagcaaatacagaaacatataatcgtgatggatttttaacacatagttgt

SEQ ID NO: 634634 - DNA, 75 bp, synthetic construct
  source 1..75: mol_type = other DNA
ccagatgcaggagctggtgcagcagcaaacggtggatgatatgaccggcagcctgaatctggcgcgcgacacggc

SEQ ID NO: 634635 - DNA, 75 bp, synthetic construct
  source 1..75: mol_type = other DNA
tcgggcacgctcaataatgtcgtgatagcggagaactgtacgataaatggcacgctgaaagcggagaacattatt

SEQ ID NO: 634636 - DNA, 75 bp, synthetic construct
  source 1..75: mol_type = other DNA
accacgccgctgtttgtggcgcaggggaatcagctgtttatgaacgacgtgttcctgaagcgactgtttgcggtg

SEQ ID NO: 634637 - DNA, 75 bp, synthetic construct
  source 1..75: mol_type = other DNA
tggaatctcatcaaacatgaccaatcgtagaatgaagataggttcttttgtagcttcggtagacttgcatgagca

SEQ ID NO: 634638 - DNA, 75 bp, synthetic construct
  source 1..75: mol_type = other DNA
tcagcaatactatgaaaaactgaacattaactatattcatcaagagtgctggatattaaattctgtacctgcaca

SEQ ID NO: 634639 - DNA, 75 bp, synthetic construct
  source 1..75: mol_type = other DNA
atactaaggggttccaagccgcaactgaaccgccccggttttcctggagagtgttttatctgtgaactcaggctg

SEQ ID NO: 634640 - DNA, 75 bp, synthetic construct
  source 1..75: mol_type = other DNA
aatcttaagctgggtacagggaagtaccggccattacgcagtatcgatatcgaatcgtacaaacaaggggagccc

SEQ ID NO: 634641 - DNA, 75 bp, synthetic construct
  source 1..75: mol_type = other DNA
accacagccagaaggcgctggagtgggagatcctcaaaggcgtgatggtgtggaagagcgggaaaatatcgcccc

SEQ ID NO: 634642 - DNA, 75 bp, synthetic construct
  source 1..75: mol_type = other DNA
gacggatttatcttgcgcgacggtgagtttgtcacttcattacaggcattgaaagagatcggaataaaagctggc

SEQ ID NO: 634643 - DNA, 75 bp, synthetic construct
  source 1..75: mol_type = other DNA
tttgttccggttgaccgctatcaatgcggttcgtaaggtgaacgatgcaacagccgagcgcggattgcattcttt

SEQ ID NO: 634644 - DNA, 75 bp, synthetic construct
  source 1..75: mol_type = other DNA
gtttgtgatgatgggaatctggcatggcttgatgccccccagctatcgtatgaggaaaaattaataaaaaatgaa

SEQ ID NO: 634645 - DNA, 75 bp, synthetic construct
  source 1..75: mol_type = other DNA
ataaatgttgtgttgaaatcggaaagtccaacgccaggggtgtttaaagatagcgctgttttaaaggttgatatt

SEQ ID NO: 634646 - DNA, 75 bp, synthetic construct
  source 1..75: mol_type = other DNA
atgaaaagagttatccttttgctattgtttttatctatggaagtatatgcatccgatgatgcatattgtgcttta

SEQ ID NO: 634647 - DNA, 75 bp, synthetic construct
  source 1..75: mol_type = other DNA
ttaagcacaagtatagtaagaaatggtgatagattagtccttaatcagggtaatttacctacatgcggccctaat

SEQ ID NO: 634648 - DNA, 75 bp, synthetic construct
  source 1..75: mol_type = other DNA
atagttgcttgaatgacaaaaaatgcatactgcatttacccgaatttatatttaatgataacaaggtacgccttg

SEQ ID NO: 634649 - DNA, 75 bp, synthetic construct
  source 1..75: mol_type = other DNA
ttctcgaccgagcgtgtggtggacggacagtcctcaacactttggggcaataaaacctggcctgcggatctgatt

SEQ ID NO: 634650 - DNA, 75 bp, synthetic construct
  source 1..75: mol_type = other DNA
ggctaccgggcagaaacaggatgccattaaggtccactggttcccgctggaatatcgttgggttaatcagaccgg

SEQ ID NO: 634651 - DNA, 75 bp, synthetic construct
  source 1..75: mol_type = other DNA
acagtggccaggtaaagcagccattggtcgtctgaaaagcgaagagctagtgcagtaccatttatggttagatta

SEQ ID NO: 634652 - DNA, 75 bp, synthetic construct
  source 1..75: mol_type = other DNA
aactaaaaaaattgatgaagcaaccgataataaaaaagataaggataaaaaagatgaaaaagatgatagagctaa

SEQ ID NO: 634653 - DNA, 75 bp, synthetic construct
  source 1..75: mol_type = other DNA
aaaaacaattcattgatagttgcttgaataaagaaaaatgtatcctgcatttacccgagtttatatttaatgata

SEQ ID NO: 634654 - DNA, 75 bp, synthetic construct
  source 1..75: mol_type = other DNA
ataaaagcacctacatgtaaatactctgacatttctatcgattttggaaaaataacatcgagtcaagtaagaacc

SEQ ID NO: 634655 - DNA, 75 bp, synthetic construct
  source 1..75: mol_type = other DNA
cgttgaaggagctgcactgtctgtggtggcctttacggctaagattgcctccggcctggataatctttactgggc

SEQ ID NO: 634656 - DNA, 75 bp, synthetic construct
  source 1..75: mol_type = other DNA
gaaggctgggaggccatgaaaaaccagctcatgcggtactttactggtaaaacgaccgggcgccgcctgcagact

SEQ ID NO: 634657 - DNA, 75 bp, synthetic construct
  source 1..75: mol_type = other DNA
tatgccgggggctggcgcgacattgaaccagaataccgttatcaacatttctggtgtcagcgatccgagagaggc

SEQ ID NO: 634658 - DNA, 75 bp, synthetic construct
  source 1..75: mol_type = other DNA
gtgctgaagtttctggtgccgttgctggtggtaataacgttatttgccttcttcaaaccggagaatctgcatata

SEQ ID NO: 634659 - DNA, 75 bp, synthetic construct
  source 1..75: mol_type = other DNA
agaaggcaaagaccaatgtcggaatgcgctacaacatggagctggctgacagtgctaatgaatggttacccgctg

SEQ ID NO: 634660 - DNA, 75 bp, synthetic construct
  source 1..75: mol_type = other DNA
gcggcagaaaacccgccgttgccaccgcaccagcgactggacaggttcagtctttaacgcgtggcctgaaattac

SEQ ID NO: 634661 - DNA, 75 bp, synthetic construct
  source 1..75: mol_type = other DNA
acgggttaacggctgatattgagcaggatgaagccgggcgtgcaatctggcgtattcgtattcgagtaaatgcgc

SEQ ID NO: 634662 - DNA, 75 bp, synthetic construct
  source 1..75: mol_type = other DNA
ccggggctagacgctacaccaactgaaaaaggacttcttataaaaccaagtgctcctcaagtaccacgaaggaaa

SEQ ID NO: 634663 - DNA, 75 bp, synthetic construct
  source 1..75: mol_type = other DNA
aaaaatggtaatttaaccatgcatatgatggcaccatcagcagtaggtttgccttacggttgttatgctcgatta

SEQ ID NO: 634664 - DNA, 75 bp, synthetic construct
  source 1..75: mol_type = other DNA
attattcagggtgccgcctctgtcgggcaggggttatgggataaggctgttgactggtggaatggtgatgccacg

SEQ ID NO: 634665 - DNA, 75 bp, synthetic construct
  source 1..75: mol_type = other DNA
tggtaatcgtgtatttgctggtggtcgtaatccaacatcaaatagtggtctatggcaattccacgaaattccaat

SEQ ID NO: 634666 - DNA, 75 bp, synthetic construct
  source 1..75: mol_type = other DNA
aaccccaccgcttaaaaattataatgagcggttacacaatactaacttatttaacccaaaatatcataaaaaagc

SEQ ID NO: 634667 - DNA, 75 bp, synthetic construct
  source 1..75: mol_type = other DNA
ttctggcgctggcacgattacgagaaattcctcgactgggcggcaatgaacggcgttaacctgatgctggatatc

SEQ ID NO: 634668 - DNA, 75 bp, synthetic construct
  source 1..75: mol_type = other DNA
atgactgtatttctcatggccgttttctttggcctcttaaaaactggctctctcattgccctacttgttggtgcc

SEQ ID NO: 634669 - DNA, 75 bp, synthetic construct
  source 1..75: mol_type = other DNA
acatggtgctctggagtagaataaatgaattacttacagagccagacattatagcattcattaattatcccatcg

SEQ ID NO: 634670 - DNA, 75 bp, synthetic construct
  source 1..75: mol_type = other DNA
gtagatccagacactgtcgcgatagatgaaaaaagtgtccaccacactctccttccttacctttttgacgatacc

SEQ ID NO: 634671 - DNA, 75 bp, synthetic construct
  source 1..75: mol_type = other DNA
agcgagttactataattataggattggcttatgcattgcctatagttttgaatggcatcgattacattgatgata

SEQ ID NO: 634672 - DNA, 75 bp, synthetic construct
  source 1..75: mol_type = other DNA
gcctatgttgaagcgggtgccgagatgttgttcccggaggcgattaccgaactcgccatgtaccgccagtttgcc

SEQ ID NO: 634673 - DNA, 75 bp, synthetic construct
  source 1..75: mol_type = other DNA
taaagagtaccgtcatgcatcatggcgaacaggaaattacagtgccgtcttaccggagcgatcagcgcatggttg

SEQ ID NO: 634674 - DNA, 75 bp, synthetic construct
  source 1..75: mol_type = other DNA
cgcggcagcgggcgacacggtaaccgtcacgctcggcggggcgacttacactgccacggtgcaggcgaatttaag

SEQ ID NO: 634675 - DNA, 75 bp, synthetic construct
  source 1..75: mol_type = other DNA
tctccggcaccagcacgggcggggaagcgggcgatgtggtgagcgttgtgctcaacggcaaaacctacaccacca

SEQ ID NO: 634676 - DNA, 75 bp, synthetic construct
  source 1..75: mol_type = other DNA
catcaacaccatcgccagcgacgatattcttaacgccgccgaagcgggatcggtgctgaccatcagcggtaccag

SEQ ID NO: 634677 - DNA, 75 bp, synthetic construct
  source 1..75: mol_type = other DNA
aaatggctaagacaatcaaaagcagcatcttcaaatccactggatgtggctgaacaacaatttcgcttactatca

SEQ ID NO: 634678 - DNA, 75 bp, synthetic construct
  source 1..75: mol_type = other DNA
gcgctttccggcaccagcgatcagcccgcgggcacggcgatcaccgtcaccctgaacggacaaaactacagcgcc

SEQ ID NO: 634679 - DNA, 75 bp, synthetic construct
  source 1..75: mol_type = other DNA
actcggcattaacaccattgccgtcgacgacatcatcaacgccacggagaaaggtgcagatctggcgatttccgg

SEQ ID NO: 634680 - DNA, 75 bp, synthetic construct
  source 1..75: mol_type = other DNA
ctttcaagatatgcagatttcaaatggcaggaaaatgaaacatttatcctacaaaacaaatgccatattgctcca

SEQ ID NO: 634681 - DNA, 75 bp, synthetic construct
  source 1..75: mol_type = other DNA
atccagatcaatggggatgttaagggaggttactctccttctgtcatcactggtgatgctggtatggatacattg

SEQ ID NO: 634682 - DNA, 75 bp, synthetic construct
  source 1..75: mol_type = other DNA
aacggcaacggcaagccggatgcacaggatgcgaaggacgcagaagatgccgcgaaggcgctggttgaggcagcc

SEQ ID NO: 634683 - DNA, 75 bp, synthetic construct
  source 1..75: mol_type = other DNA
tttaatcgttactggaaaagattatggacgtaataccagtgcaggatacacggatcactctcatcgtactgatat

SEQ ID NO: 634684 - DNA, 75 bp, synthetic construct
  source 1..75: mol_type = other DNA
ggcggtaaattgccgatgcacgcttccggtgcgggtaaagcctttttagcccaactgagcgaagaacaggtgacg

SEQ ID NO: 634685 - DNA, 75 bp, synthetic construct
  source 1..75: mol_type = other DNA
atgggaccgagattatgataaagaaaaagcagctgaactgaagaaggcttctgctcggtgccagccctttactca

SEQ ID NO: 634686 - DNA, 75 bp, synthetic construct
  source 1..75: mol_type = other DNA
ggagtgttgaccgtggggatcggttccaccggcaatgtggaaaaacgcgagtacagcaacgctgaagtagcgcgc

SEQ ID NO: 634687 - DNA, 75 bp, synthetic construct
  source 1..75: mol_type = other DNA
gacctgcaccatcgatgcctatgcgctggatgatgagacgcagcgttcttccgtggccagcaacatcaaccaccg

SEQ ID NO: 634688 - DNA, 75 bp, synthetic construct
  source 1..75: mol_type = other DNA
ggactgtaactggcgttgaaaaaaaaagcaggcggaaaattaattgtctcaacgaatgcgctggaagtgagtggt

SEQ ID NO: 634689 - DNA, 75 bp, synthetic construct
  source 1..75: mol_type = other DNA
ttatttagcaataaattttatgccataagaaagaaagataacgtatatattatagattttaactacaaagattgc

SEQ ID NO: 634690 - DNA, 60 bp, synthetic construct
  source 1..60: mol_type = other DNA
agacgcgccagcgtcgcatcaggcaaccggctcgggcgttggatgtcggatgcggcgtga

SEQ ID NO: 634691 - DNA, 75 bp, synthetic construct
  source 1..75: mol_type = other DNA
cggaaagccggacagcacgccggtcacggcgtcattttccattccgggcctgagtcgttatccgggcacgatgga

SEQ ID NO: 634692 - DNA, 75 bp, synthetic construct
  source 1..75: mol_type = other DNA
taccggaaatccggagccggaaaccccgccacctccgcaacaggatgttcagctgcagacaaccccgcctgccgg

SEQ ID NO: 634693 - DNA, 75 bp, synthetic construct
  source 1..75: mol_type = other DNA
atatcattaacgtgacaaataccgctatatcccacgccatcaatgaagaaaaatcaggggggggatatagtggtg

SEQ ID NO: 634694 - DNA, 75 bp, synthetic construct
  source 1..75: mol_type = other DNA
aaaaaggcgcggcgttaacgctctccggcagcacctctggcgttgaagccggacaaacggttaccgtcacctttg

SEQ ID NO: 634695 - DNA, 75 bp, synthetic construct
  source 1..75: mol_type = other DNA
catgggaaggcaccgccgacaccgatcgtattgatatccgcgagttgttacagggcagcggctacaccggaaacg

SEQ ID NO: 634696 - DNA, 75 bp, synthetic construct
  source 1..75: mol_type = other DNA
gggcttgacgcctatgatgcccggtctaaaactcagtgggagtgttatgagatgcctatcgatgtctattatgat

SEQ ID NO: 634697 - DNA, 75 bp, synthetic construct
  source 1..75: mol_type = other DNA
acgacttaatcgcaagacgttagggtattcaaaatcatccggcatgcatgacaagatcattgggactttcattga

SEQ ID NO: 634698 - DNA, 75 bp, synthetic construct
  source 1..75: mol_type = other DNA
cggtactcgccatcaacaccattgccgtcgatgacatcatcaacgccacggagaaaggcgcagatctggcgattt

SEQ ID NO: 634699 - DNA, 75 bp, synthetic construct
  source 1..75: mol_type = other DNA
ccgatagccgcacgctgaccgacggcagctacgtttatcaggtgcgggtgctggatctggcggggaacaccggcc

SEQ ID NO: 634700 - DNA, 75 bp, synthetic construct
  source 1..75: mol_type = other DNA
agcgtgaacgtatctgcggcggatgttgcggcgctcagtgatggcaccagctacacggtcagcgcctccgctcag

SEQ ID NO: 634701 - DNA, 75 bp, synthetic construct
  source 1..75: mol_type = other DNA
gtggcgggcgaccgcctggtagtgaccatcgccgggcagcagtatgtcaccagcaccgatgccagcggcaactgg

SEQ ID NO: 634702 - DNA, 75 bp, synthetic construct
  source 1..75: mol_type = other DNA
gcaccgatacctacgacggttccggcggctgggtgtacagctccggcaccggaacgtggctggcgaacggcggga

SEQ ID NO: 634703 - DNA, 75 bp, synthetic construct
  source 1..75: mol_type = other DNA
acttctggattggcgacgcgggcgggccggactccaacaccttcctgtggaacaacgcaggtacgctggtaggta

SEQ ID NO: 634704 - DNA, 75 bp, synthetic construct
  source 1..75: mol_type = other DNA
agtggtttacctctaccgtaacgggctgctgttaggggcggtgacgatggtcggcgctctgaactggacctacag

SEQ ID NO: 634705 - DNA, 75 bp, synthetic construct
  source 1..75: mol_type = other DNA
cagaagtgattaataaccctacgccacctgctgagcctggcaacgccacaccatcatttttagttaccgataatc

SEQ ID NO: 634706 - DNA, 75 bp, synthetic construct
  source 1..75: mol_type = other DNA
tagtcaccagagggttgtgttttgattatcgccgtgtagatgaagaaagccgcttcatacgtggacaactaaaaa

SEQ ID NO: 634707 - DNA, 75 bp, synthetic construct
  source 1..75: mol_type = other DNA
ggctgaccacagatgaacgcgcaacaccatctttggattgtgcagtagtaaaacgtgagacgttagaatgggtgc

SEQ ID NO: 634708 - DNA, 75 bp, synthetic construct
  source 1..75: mol_type = other DNA
acaggtgtggtgcggtgatgtgacctatatctggacgggtaagcccggcggggtgatgttccacagcgatacgag

SEQ ID NO: 634709 - DNA, 75 bp, synthetic construct
  source 1..75: mol_type = other DNA
gcttgctgatattgctcattgtcagtaccggagcacaggcgtcagtttatgtcgcaacaatgtatacaccggtag

SEQ ID NO: 634710 - DNA, 75 bp, synthetic construct
  source 1..75: mol_type = other DNA
gcagtatgatgaggagtccggcctgtattacaaccgccaccgctattatgacccgctgcaggggcggtatatcac

SEQ ID NO: 634711 - DNA, 75 bp, synthetic construct
  source 1..75: mol_type = other DNA
ggctgaaatccctttacaggcaaagccgcaacgcgaactgcgtttttggaacaatagcaagctgatgcagatcta

SEQ ID NO: 634712 - DNA, 75 bp, synthetic construct
  source 1..75: mol_type = other DNA
gtgaacgatgtcgccggtaatccgagcagcgtttcacgcgtggcgctggtggatgccacgccgccggtggtaacc

SEQ ID NO: 634713 - DNA, 75 bp, synthetic construct
  source 1..75: mol_type = other DNA
tcagtaactcttcttgtccacctataccgttagggccttatgatgtctcctggaatgaaagtcgggttgtgcatg

SEQ ID NO: 634714 - DNA, 75 bp, synthetic construct
  source 1..75: mol_type = other DNA
cttatggctgcgacaaatcaacggtaacggtgacccccacacgtcatccggtaaccgataaagagttacatgata

SEQ ID NO: 634715 - DNA, 75 bp, synthetic construct
  source 1..75: mol_type = other DNA
cgatattatcattatttacactattgccgtttataatagcatccgggacatgttttattaaattctcgattgtta

SEQ ID NO: 634716 - DNA, 75 bp, synthetic construct
  source 1..75: mol_type = other DNA
ggcacctggagcgtgaccgttcccgccgccaatgttgacgcactggctgacggcaacgccacggtcaccgccagc

SEQ ID NO: 634717 - DNA, 75 bp, synthetic construct
  source 1..75: mol_type = other DNA
cagatgtcaccgcacttggcagcggcccgcaaaccatcactgccgctattaccgacgcggcaggcaacagcgatg

SEQ ID NO: 634718 - DNA, 75 bp, synthetic construct
  source 1..75: mol_type = other DNA
accattgccagcgataacatcatcaacgccagcgaagcggcggcgggcgtaacggtgtccggcaccagcacggcg

SEQ ID NO: 634719 - DNA, 75 bp, synthetic construct
  source 1..75: mol_type = other DNA
tggtctatgaacagtattatggcgatgaagtggccctgttcgataaagatgatcggcaaagtaatcctcatgcca

SEQ ID NO: 634720 - DNA, 75 bp, synthetic construct
  source 1..75: mol_type = other DNA
gcatggctacgaagaagagaagtggagaagaaataaatgaccgacaaatcttatgcgggatgggtattaaactac

SEQ ID NO: 634721 - DNA, 75 bp, synthetic construct
  source 1..75: mol_type = other DNA
tgacggcgcaatggcgaacacgctgcgggtgagggtgacggatgcgttcggtaatgtgcttgccgggcagacggt

SEQ ID NO: 634722 - DNA, 75 bp, synthetic construct
  source 1..75: mol_type = other DNA
atgtgacatttatcgccgatgccagcacggcgcagatcgcggacctggtggtcattaaggatggttcagaggcgg

SEQ ID NO: 634723 - DNA, 75 bp, synthetic construct
  source 1..75: mol_type = other DNA
aggacggcgaagatcgctgatctggtggtcattaaggatggttcagaggcggacggttcgacggcgaacacgctg

SEQ ID NO: 634724 - DNA, 75 bp, synthetic construct
  source 1..75: mol_type = other DNA
cgaaagcggagctgtgctggcttattcctccatcgttaccgacaaaacggcctacaccgcgggcggtgcgataaa

SEQ ID NO: 634725 - DNA, 75 bp, synthetic construct
  source 1..75: mol_type = other DNA
ttcggattcagcttgccctgggcttgatgagtacgatacggcggcaaagacatcttattgggactgtgagaatat

SEQ ID NO: 634726 - DNA, 75 bp, synthetic construct
  source 1..75: mol_type = other DNA
cgaacgtttcggtatttcgttggctgagttacgcaaactcaaccagtttcgtacgtttgctcgaggttttgataa

SEQ ID NO: 634727 - DNA, 75 bp, synthetic construct
  source 1..75: mol_type = other DNA
aaacagggagaaaacgacacccgaattggtatggagttgacgttgcaacctggtcattcactgcaaaaacagctc

SEQ ID NO: 634728 - DNA, 75 bp, synthetic construct
  source 1..75: mol_type = other DNA
gcgggcaccagtgccgtcactgcaaccatcaacagcagcagccagagccgggatgtgacgtttatcgccgatgtc

SEQ ID NO: 634729 - DNA, 75 bp, synthetic construct
  source 1..75: mol_type = other DNA
cttctcaataatgcagtcatggtggataacaccaaatcagaaacaagccgcgtctggattgaagaaagtgacggt

SEQ ID NO: 634730 - DNA, 75 bp, synthetic construct
  source 1..75: mol_type = other DNA
cattgacgcggcgatcctgcaatcggctggtggggaagtggccgtctcagggaaggatattcaggttaccatccc

SEQ ID NO: 634731 - DNA, 75 bp, synthetic construct
  source 1..75: mol_type = other DNA
ggttgctgacgctgatggtgttgagcctgacggcccaggcgcagacatttcagatgtatacgcctatgggggttc

SEQ ID NO: 634732 - DNA, 75 bp, synthetic construct
  source 1..75: mol_type = other DNA
ccgctaagccgggacggctggtcattgtggcggaaaaccacagcagcgttggcgggctgtgtgaagctgtagcgt

SEQ ID NO: 634733 - DNA, 75 bp, synthetic construct
  source 1..75: mol_type = other DNA
gcggatctgtcgaaatacaccgatctgcatatctttgctcaggcttatccggatcgcttcttccagatgggcatg

SEQ ID NO: 634734 - DNA, 75 bp, synthetic construct
  source 1..75: mol_type = other DNA
gaacgctatgaaccccgagtctcacaggctgaagtacaggcagtaatgacatccgcctccagtccgctggatatg

SEQ ID NO: 634735 - DNA, 75 bp, synthetic construct
  source 1..75: mol_type = other DNA
aatgctcagggcaacagcagcaccgccagccataacgtgcaggttaataccgcgctgccgggcgtcaccattaat

SEQ ID NO: 634736 - DNA, 75 bp, synthetic construct
  source 1..75: mol_type = other DNA
tcacgctgaacggacaaaactacagcgctaccaccgatgcctccggcaactggagcgtcaccgtgcccgcctcgg

SEQ ID NO: 634737 - DNA, 75 bp, synthetic construct
  source 1..75: mol_type = other DNA
aaaggatatgataaaagaatcggcagtctttggtattgctggagtattttacatgatatatttccaggtaaatat

SEQ ID NO: 634738 - DNA, 75 bp, synthetic construct
  source 1..75: mol_type = other DNA
aatacgctgcgggtgaaggtcaccgatgcgttcgggaatgcacttgccgggcagacggtcagcgtgacggcaggc

SEQ ID NO: 634739 - DNA, 75 bp, synthetic construct
  source 1..75: mol_type = other DNA
tcagaccgccggaaccagtacagtcactgccagcatcaacaacagcagcctgagccagaacgtgacgtttgttgc

SEQ ID NO: 634740 - DNA, 75 bp, synthetic construct
  source 1..75: mol_type = other DNA
agtgcagtcactgcaaccatcaacagcagtactcagagtcagaacgtgacatttatcgccgatgtcaggacggcg

SEQ ID NO: 634741 - DNA, 75 bp, synthetic construct
  source 1..75: mol_type = other DNA
cggcggggccatatttgctaaagaaaactcaacgctgaatcttactgatgttattttttccggtaacgtcgcagg

SEQ ID NO: 634742 - DNA, 75 bp, synthetic construct
  source 1..75: mol_type = other DNA
atgaaactactacgaaattttatggggttgctgacgctgatggtgttgagcctgacggcccaggctgagccgttt

SEQ ID NO: 634743 - DNA, 75 bp, synthetic construct
  source 1..75: mol_type = other DNA
ctcagcggcagacggttcgacggcgaacacgctgcaggtgagggtgaccgatgcgttcgggaatacgcttgccgg

SEQ ID NO: 634744 - DNA, 75 bp, synthetic construct
  source 1..75: mol_type = other DNA
agaaaataaaaatataaacatgacttcctatgcatcatctaaagctgcggccagtcatctggtcagaaatatggc

SEQ ID NO: 634745 - DNA, 75 bp, synthetic construct
  source 1..75: mol_type = other DNA
tagcaataagaggcgacgatggtaatgtagagcttagtgaagcaataaaaaacattattataaattctggttttg

SEQ ID NO: 634746 - DNA, 75 bp, synthetic construct
  source 1..75: mol_type = other DNA
ctccattttgctttgctaaatccccggcaaatactgtagcacgtctttgcacaaaggatgggcgcttaccacaag

SEQ ID NO: 634747 - DNA, 75 bp, synthetic construct
  source 1..75: mol_type = other DNA
tgacccggcagcggtgcaccttttgagttgggcaggagcggcatatattgtctggctggcgtggaaaatcgctac

SEQ ID NO: 634748 - DNA, 75 bp, synthetic construct
  source 1..75: mol_type = other DNA
ataatccaatcagatccatcacgtatacgtcgtcgtttttatccaaccatttttgatgcattatatgtcgcaaca

SEQ ID NO: 634749 - DNA, 75 bp, synthetic construct
  source 1..75: mol_type = other DNA
ataattctcttgaggacacaatagagataatcgaagaagaacagaacgattcttactcaaatgatgatttataca

SEQ ID NO: 634750 - DNA, 75 bp, synthetic construct
  source 1..75: mol_type = other DNA
ctgaaacggcgcgggaagtccagaggccgagcattgatgctcaccttctgtggcttgaagcagagctgaagcgtc

SEQ ID NO: 634751 - DNA, 75 bp, synthetic construct
  source 1..75: mol_type = other DNA
caattgctaagattctctgatgggttatttgtatttgatttggatactatagaaaaatcatttggttttcatgaa

SEQ ID NO: 634752 - DNA, 75 bp, synthetic construct
  source 1..75: mol_type = other DNA
gggctcattagtctttttatggacaatatccgagacaatgttgtatcaaatgaagaattgtcaatattacaactt

SEQ ID NO: 634753 - DNA, 75 bp, synthetic construct
  source 1..75: mol_type = other DNA
caataaagaattagctgcactattgggtattactacagctaagttaacttattacgcctattatttaagtgatga

SEQ ID NO: 634754 - DNA, 75 bp, synthetic construct
  source 1..75: mol_type = other DNA
gatcaaccgccacaaatgagattggtaatacgcggtaaaataatccatgttggtcatgtaaaaggatataccgat

SEQ ID NO: 634755 - DNA, 75 bp, synthetic construct
  source 1..75: mol_type = other DNA
ataatgctaatgttacggtggcgccaaacaggcatcccatcactgacaagcaactgcacgacatggtggtgcgtg

SEQ ID NO: 634756 - DNA, 75 bp, synthetic construct
  source 1..75: mol_type = other DNA
ttgattgtgatgttactgtgtgcgggcatttcattttcactggcagtgattgacccggcagtggtacaccttttg

SEQ ID NO: 634757 - DNA, 75 bp, synthetic construct
  source 1..75: mol_type = other DNA
accacatccggaagctatcccacacctgcacgcgggaggcttccgcacgtctgttaccggaggttctcatgaaga

SEQ ID NO: 634758 - DNA, 75 bp, synthetic construct
  source 1..75: mol_type = other DNA
cgtcacatccagactgaaatcgatcgcagactcacccgcgctgcacacatcgcctttatcatgcaatccaacaca

SEQ ID NO: 634759 - DNA, 75 bp, synthetic construct
  source 1..75: mol_type = other DNA
actatgctacgtttggctggaatagtcaggtcgaactgtatcttgatgttgctgaggtttcgagtgtttactacg

SEQ ID NO: 634760 - DNA, 75 bp, synthetic construct
  source 1..75: mol_type = other DNA
atgaaggcattccgcatctgttaacggaagtcgttactgatatgaaagatgccgccaacgcgctgcgctggtgtg

SEQ ID NO: 634761 - DNA, 75 bp, synthetic construct
  source 1..75: mol_type = other DNA
ttgatgcgtaatggcgacagccgtccgttgcataaaccgacgacgccgctgccttctctggatttgctgacaccg

SEQ ID NO: 634762 - DNA, 75 bp, synthetic construct
  source 1..75: mol_type = other DNA
gtattttattgtttgggctaaattcctctgtacaagcagatgttacgtttaacaatatcgaaacttatgtagcat

SEQ ID NO: 634763 - DNA, 75 bp, synthetic construct
  source 1..75: mol_type = other DNA
agatgggacaactgtaaataattcattttgtccgggcatggaggcactggaagccaaagacagccgctgggaatg

SEQ ID NO: 634764 - DNA, 75 bp, synthetic construct
  source 1..75: mol_type = other DNA
tcaacggtgcttatgccgttgtcagtgatttcgccgtcacggaggcggagacaactctgatggagtgctaccgca

SEQ ID NO: 634765 - DNA, 75 bp, synthetic construct
  source 1..75: mol_type = other DNA
gttatggcgagattactgggggcgtagcggcagcagtaaggattatcagttgagttattccaacaacctgcgaag

SEQ ID NO: 634766 - DNA, 75 bp, synthetic construct
  source 1..75: mol_type = other DNA
atgccgttctcacaaaaaaaccgcttgccatgccgcaatcagtcaggttacattttcgctgcacctcataaaacg

SEQ ID NO: 634767 - DNA, 75 bp, synthetic construct
  source 1..75: mol_type = other DNA
ccttcgccagacttccgcttattttgcgaaggcggagttcgaccgcctctggaaaatattgcccagtcaacgtat

SEQ ID NO: 634768 - DNA, 75 bp, synthetic construct
  source 1..75: mol_type = other DNA
ggaaggtatcagagtggcctggtgcactgtggcacgtctcatggcggttatggggctggccggtgttctccgggg

SEQ ID NO: 634769 - DNA, 75 bp, synthetic construct
  source 1..75: mol_type = other DNA
tttatcacgccacaggcgggcatcaaccagacagccacggttaccggcacgggactcaccggtggtgcggatgtg

SEQ ID NO: 634770 - DNA, 75 bp, synthetic construct
  source 1..75: mol_type = other DNA
tatgcatgcgctacagatagaattaggcccgaagttcacaatccaagaggcctctatcagacggggctgtaccta

SEQ ID NO: 634771 - DNA, 75 bp, synthetic construct
  source 1..75: mol_type = other DNA
aataaacccgatgggccagcaacagcagggatagatgatttgggtgaaattttagctaaaatgaaacagagaaca

SEQ ID NO: 634772 - DNA, 75 bp, synthetic construct
  source 1..75: mol_type = other DNA
cgatcgtgcgggaccgtggagcagatgcaaaaccggagggccccggtgtacccgccggcgcgaaaaatccacctg

SEQ ID NO: 634773 - DNA, 75 bp, synthetic construct
  source 1..75: mol_type = other DNA
gcaggcgcaacgttgccgtgtgccattccgcttgccagagaacaaggacaatgcggctatcgtgatggttaatgc

SEQ ID NO: 634774 - DNA, 75 bp, synthetic construct
  source 1..75: mol_type = other DNA
atgatacaacacagcaatgggcaactggttattactggtaaatattgccctgaaggtgtgcaaacagcattcacc

SEQ ID NO: 634775 - DNA, 75 bp, synthetic construct
  source 1..75: mol_type = other DNA
gtcatcttaaattacctcttgaagcgaactattttcaaatcccttatggcgtaatgattccgcagcaagttgaaa

SEQ ID NO: 634776 - DNA, 75 bp, synthetic construct
  source 1..75: mol_type = other DNA
agtttattatcttgatgttcttacccccgatagcgtcaatcatggtgtttatgcgacacccggtacctacggtgc

SEQ ID NO: 634777 - DNA, 75 bp, synthetic construct
  source 1..75: mol_type = other DNA
ataacgcaaagagtgtgctcgctgcgggtattagcgcgtccgctaccgttattaccgtgggtactggagcggggt

SEQ ID NO: 634778 - DNA, 75 bp, synthetic construct
  source 1..75: mol_type = other DNA
atctggtgacgtgatgacagtaattcgtggtcaggaaggaactacggcacgcgtatggtcaacgaatgacattgt

SEQ ID NO: 634779 - DNA, 75 bp, synthetic construct
  source 1..75: mol_type = other DNA
aggaagaaaagcgtcgccagcaggcatgggacgctgctcacccggaagaggggctgaaaagagagtatgataaag

SEQ ID NO: 634780 - DNA, 75 bp, synthetic construct
  source 1..75: mol_type = other DNA
cttcatcaggtggtggtacggatccaaacagcgggccgggctggggtacgacgcatacacctaacggggatattc

SEQ ID NO: 634781 - DNA, 75 bp, synthetic construct
  source 1..75: mol_type = other DNA
atgagtggcggagacggacgaggtccgggtaattcaggtctgggacacaatggtggtcaggccagtgggaatgtg

SEQ ID NO: 634782 - DNA, 75 bp, synthetic construct
  source 1..75: mol_type = other DNA
atgagagcaaacctgccagcagcattgtgggtgaagaaggacagctttatatcagcgggatgccagaagagggcg

SEQ ID NO: 634783 - DNA, 75 bp, synthetic construct
  source 1..75: mol_type = other DNA
ctaatgaaccggcggcacaagggcgtgctctccgtgggccgggtgcagacgccaaccctccgtctggtggtggag

SEQ ID NO: 634784 - DNA, 75 bp, synthetic construct
  source 1..75: mol_type = other DNA
gctcccggttgtgggacgacagcaaaatcaccgcccaccacggcattatcccgacccgtaaaacggtagatctga

SEQ ID NO: 634785 - DNA, 75 bp, synthetic construct
  source 1..75: mol_type = other DNA
tttcaaagcaggcgctggcgatcctgaagcagataaaacagttctgtggcgaacatgagctgatttttattggcg

SEQ ID NO: 634786 - DNA, 75 bp, synthetic construct
  source 1..75: mol_type = other DNA
aggagaacccgcatcacctgcaccagccgtaccggctgccggggcagcagtatgatgaggagtcgggactgtatt

SEQ ID NO: 634787 - DNA, 75 bp, synthetic construct
  source 1..75: mol_type = other DNA
tttcgtaaaaatgaccgtaattatgagtgcggggacacgttgattttgcatgaatgggtgcagggggtgtatacg

SEQ ID NO: 634788 - DNA, 75 bp, synthetic construct
  source 1..75: mol_type = other DNA
gctctgaatgtcggcctggagtttgatatttacgggcacgccaactcaacgcatgttgccggagttaatttaatg

SEQ ID NO: 634789 - DNA, 75 bp, synthetic construct
  source 1..75: mol_type = other DNA
ttgaacgcaacgcgtatctgtcgatctttatggctccgtcgattgctaaagaaggcaagatctcaaccgtcgtgc

SEQ ID NO: 634790 - DNA, 75 bp, synthetic construct
  source 1..75: mol_type = other DNA
gcaggaaatggcgcatgggcgtattccgccggaatttctgccgctgcaaagtggcgtgggcaatatcaataatgc

SEQ ID NO: 634791 - DNA, 75 bp, synthetic construct
  source 1..75: mol_type = other DNA
aaaagttttattacaaaaccatcctgggagcgagaagtattcttttaatggctgggaaatatttaatagtaattt

SEQ ID NO: 634792 - DNA, 75 bp, synthetic construct
  source 1..75: mol_type = other DNA
ttattttactaaaggtgtgattaaagaagagtccaccgataattcattttcttttacattttccggtgccgcaac

SEQ ID NO: 634793 - DNA, 75 bp, synthetic construct
  source 1..75: mol_type = other DNA
gtgcaatacaaaacaaaattaactctcatgcatttactgttagtcatcaagacttttcctgtcatgaacaacacc

SEQ ID NO: 634794 - DNA, 75 bp, synthetic construct
  source 1..75: mol_type = other DNA
gggctgacggtggagcggctggcggcacagatagagccggtttatttgcctgagcgaaaaatacatctttaccac

SEQ ID NO: 634795 - DNA, 75 bp, synthetic construct
  source 1..75: mol_type = other DNA
ggctgcattatgggaggtagtcgaagagagaaattctatcttcaatattgtatctcatttggtgcaagagtcaaa

SEQ ID NO: 634796 - DNA, 75 bp, synthetic construct
  source 1..75: mol_type = other DNA
cggtagaaaccgtgagcggcggaacactgacaaatcatgacaaccagattgttctcggtacggccaacggaatga

SEQ ID NO: 634797 - DNA, 75 bp, synthetic construct
  source 1..75: mol_type = other DNA
ccgatcaaaattcgcatgcaaaaagagaaaagagcttcattccatcaacagaagcagaatggttttttgactcat

SEQ ID NO: 634798 - DNA, 75 bp, synthetic construct
  source 1..75: mol_type = other DNA
gaggcctggacgtgggaacatcaggcgctggtgcgtgcgcgtgtagtgtacggcgatccgcagctcaccgcgcac

SEQ ID NO: 634799 - DNA, 75 bp, synthetic construct
  source 1..75: mol_type = other DNA
ggagttaggctacagttccgatcttgaccttatcttcctccatgattgcccaatggatgcgatgactgacggtga

SEQ ID NO: 634800 - DNA, 75 bp, synthetic construct
  source 1..75: mol_type = other DNA
gactcgcttcgctcgccctgcgggcagcccgctcactgcgttcacggtctgtccaactggctgtcgccagttgtc

SEQ ID NO: 634801 - DNA, 75 bp, synthetic construct
  source 1..75: mol_type = other DNA
cgtcagggagtcagccgaatgttgggaaggatttgacggatgaagagaagaactgcctggccggcggcagtacgg

SEQ ID NO: 634802 - DNA, 75 bp, synthetic construct
  source 1..75: mol_type = other DNA
aatctttaccttgccccctttcgtatgccggtttttttctttatatccggctatttgattcgccgctatatcgac

SEQ ID NO: 634803 - DNA, 75 bp, synthetic construct
  source 1..75: mol_type = other DNA
ggcgatgaataatccccgttttccagttgatgtattgaaggcgaggctgaaacgtgatcctttgctggcgttaga

SEQ ID NO: 634804 - DNA, 75 bp, synthetic construct
  source 1..75: mol_type = other DNA
aaaaattgttaacagcaaaacaaaagtagcctgcctatgcaatgtttgcaatcactggtggaagacaactcctga

SEQ ID NO: 634805 - DNA, 75 bp, synthetic construct
  source 1..75: mol_type = other DNA
gggagatctattgctgggaaaatcacaaacccgtacggagcttttttctgactttaatttctacggtgcagctat

SEQ ID NO: 634806 - DNA, 75 bp, synthetic construct
  source 1..75: mol_type = other DNA
ctgcagcatcaggggtgtttttaagtagagaggcatcaaaaactattggtatcgttagtgttcctggagtaaaag

SEQ ID NO: 634807 - DNA, 75 bp, synthetic construct
  source 1..75: mol_type = other DNA
taatagcaatgatttggacaaagcttttaattctgactctggtctgttctggttaggcagtcttgactacggtct

SEQ ID NO: 634808 - DNA, 75 bp, synthetic construct
  source 1..75: mol_type = other DNA
ggcgacctagtagtgaccgttgaggatgagaacggaaacaagactgagcaggtctatccggtcaccacgctaccg

SEQ ID NO: 634809 - DNA, 75 bp, synthetic construct
  source 1..75: mol_type = other DNA
ggggacggaaaacagtgccgcttctccatggcaggactgaatgcaaataccaacaaagttcaggaggttcgctgt

SEQ ID NO: 634810 - DNA, 75 bp, synthetic construct
  source 1..75: mol_type = other DNA
aacattgatgctaccattaacttggggcgctgggtgttatccagtaacatgaatgtttcgcactctgatgacaaa

SEQ ID NO: 634811 - DNA, 75 bp, synthetic construct
  source 1..75: mol_type = other DNA
acactgggcgtgcagggcggttatacccgcagcgtcagcggtaacagcgttgacggttacaacggtcaggccaca

SEQ ID NO: 634812 - DNA, 75 bp, synthetic construct
  source 1..75: mol_type = other DNA
tggtctgctatacccagtaaccttaaaaaggggcaaggctgcccgaaatgcgcgaaaagcggtttccttagtcat

SEQ ID NO: 634813 - DNA, 75 bp, synthetic construct
  source 1..75: mol_type = other DNA
aacatgttaaggctattgcgaaagttaaccatgatgttgatgtattaggagaaattacaggtaacgacaaaaaag

SEQ ID NO: 634814 - DNA, 75 bp, synthetic construct
  source 1..75: mol_type = other DNA
gcatattcacggcggtgacgcatctaaccgaatttgcgcctgctgtgagttgcatatggatattcgtccgctgcc

SEQ ID NO: 634815 - DNA, 75 bp, synthetic construct
  source 1..75: mol_type = other DNA
tcggcgatcaacagggctggttgcatcgtaaaggtgccacgccggatgacaacggtctggtgattattcccggtt

SEQ ID NO: 634816 - DNA, 75 bp, synthetic construct
  source 1..75: mol_type = other DNA
accgaggtggcaaacggcaacagcgcatcctcgcagagtgtgcaggctggtggctctgccctgaacaccactatc

SEQ ID NO: 634817 - DNA, 75 bp, synthetic construct
  source 1..75: mol_type = other DNA
atggcggtgagggggggattgactcgcttcgctcgccctgcgggcagcccgctcactgcgttcacggtctgtcca

SEQ ID NO: 634818 - DNA, 75 bp, synthetic construct
  source 1..75: mol_type = other DNA
acccggaagactataaacagtatctgactcacgaaggcgaatacaaaccaggtgatgctgccaacttactgattt

SEQ ID NO: 634819 - DNA, 75 bp, synthetic construct
  source 1..75: mol_type = other DNA
gagtatccgttacatcttcaggtagtttatcggggaattgatgacgggagtggctgttatttcgccattgtagat

SEQ ID NO: 634820 - DNA, 75 bp, synthetic construct
  source 1..75: mol_type = other DNA
cctattttctaccacacaccagtacaactactgcattaacaaacgctacggatacaaaagtcgagttttacccag

SEQ ID NO: 634821 - DNA, 75 bp, synthetic construct
  source 1..75: mol_type = other DNA
tgcgcaactggaggaatgtccggtcggggtggaaggagagatttgcattggcgggatggggctggcacaaggcta

SEQ ID NO: 634822 - DNA, 75 bp, synthetic construct
  source 1..75: mol_type = other DNA
ccggtgaaggacatgtaatacaggcactgcgtcaggcgtatgccgataatccccggatattaccgggagacttat

SEQ ID NO: 634823 - DNA, 75 bp, synthetic construct
  source 1..75: mol_type = other DNA
cggcccgctgccgttcatcctctcccgcacctacagcagttacccggaccaaaaaaacgcccgacgccggtgccc

SEQ ID NO: 634824 - DNA, 75 bp, synthetic construct
  source 1..75: mol_type = other DNA
gcggtagttgaggcatggctaaatgaagattattcaaccttactaagtgaatttaaggtgtttcattcacctacc

SEQ ID NO: 634825 - DNA, 75 bp, synthetic construct
  source 1..75: mol_type = other DNA
ctgtatctgatatggaggctaataacttagggcaggcttatggcaaagaactgtatgaacgatatcatccggtaa

SEQ ID NO: 634826 - DNA, 75 bp, synthetic construct
  source 1..75: mol_type = other DNA
gtggttgatgatattggcagtatatttggtcaaaatattgaagtaagctatatgaaatcagagttgcttgcattt

SEQ ID NO: 634827 - DNA, 75 bp, synthetic construct
  source 1..75: mol_type = other DNA
agacgccggattaatgcagtttgccaacggtacgcagatcccaatcggcacgctgggggcagcgatttctcaggc

SEQ ID NO: 634828 - DNA, 75 bp, synthetic construct
  source 1..75: mol_type = other DNA
gagcctgaaacgccgcctgccgcaacggttgtcgcccaggagggcgaagatgaatatcagttgattgtgcgcgtg

SEQ ID NO: 634829 - DNA, 75 bp, synthetic construct
  source 1..75: mol_type = other DNA
cggtccggtacgccgcattttgtcgcgccctgatacgctgcattgcagttacgaagaattttgtgaaacctggcc

SEQ ID NO: 634830 - DNA, 75 bp, synthetic construct
  source 1..75: mol_type = other DNA
ggggtggaaggagagatttgcattggcgggatggggctggcacaaggctacctgaacgacgcagagaaaacggcg

SEQ ID NO: 634831 - DNA, 75 bp, synthetic construct
  source 1..75: mol_type = other DNA
aatgggattactgtactggttaaggaggttgttcctcatagacgaaacgcagctcctaatatagagagagggatt

SEQ ID NO: 634832 - DNA, 75 bp, synthetic construct
  source 1..75: mol_type = other DNA
tcgaacagttgctggaagccctggcaccgctggtggcgattgtccgctacggcaacgtgcgccagaccgactctg

SEQ ID NO: 634833 - DNA, 75 bp, synthetic construct
  source 1..75: mol_type = other DNA
atatccagatgatattgaaaaaaaaataaatgacatacagaaatatgaagaagagataagcgaaaaagaatcaaa

SEQ ID NO: 634834 - DNA, 75 bp, synthetic construct
  source 1..75: mol_type = other DNA
ttttgatcctaatgcgggaattagccccacagaaagaaataatacggaatatcagtccattcgttatttttctaa

SEQ ID NO: 634835 - DNA, 75 bp, synthetic construct
  source 1..75: mol_type = other DNA
cccgaagatccagacctttatgttttctggctggcagaaaagcaacgacatccacggctatttcggatggaagat

SEQ ID NO: 634836 - DNA, 75 bp, synthetic construct
  source 1..75: mol_type = other DNA
agcaatcaaccataacgaaaaaatcgttgttgttgttcaatcaaaatttcaccaatcgggaaacggcacttggac

SEQ ID NO: 634837 - DNA, 75 bp, synthetic construct
  source 1..75: mol_type = other DNA
ttcgcattctgtggtgcggtggtttccgtaatgctggttaagcgtattagccaacgtaagaaagagatgctggcg

SEQ ID NO: 634838 - DNA, 75 bp, synthetic construct
  source 1..75: mol_type = other DNA
cttcgttggttatcaataattataaatgtggaaatacacgtttacttaatgtcgcagccatgatcgatgatcata

SEQ ID NO: 634839 - DNA, 75 bp, synthetic construct
  source 1..75: mol_type = other DNA
ggcttcccctgaatttttcccctttttggccgcagccttggactgattttgtcggcccgattagtgcacagcttg

SEQ ID NO: 634840 - DNA, 75 bp, synthetic construct
  source 1..75: mol_type = other DNA
atgtggcgcggttgtcataaagaaagtttaagggcttattttcctgctactgaaagaatattatttgcagagcat

SEQ ID NO: 634841 - DNA, 75 bp, synthetic construct
  source 1..75: mol_type = other DNA
gggaaaaaggatgatcttgctacaaatctcctcagctcaggggccggaagaatgttgtctcgcagcgaaaaaggc

SEQ ID NO: 634842 - DNA, 75 bp, synthetic construct
  source 1..75: mol_type = other DNA
atgagtaaaagtgaaaaaagggtcaaagacgcgataattccgatgattcgttgcactcaggcagagaaggacacc

SEQ ID NO: 634843 - DNA, 75 bp, synthetic construct
  source 1..75: mol_type = other DNA
aaggagtattcaaagggcgacaaaaagacgacgagactcgcaggaaggtcgctgagtatttggctaaggggacat

SEQ ID NO: 634844 - DNA, 75 bp, synthetic construct
  source 1..75: mol_type = other DNA
agacttgcgaaatataaaatgccctgaaggttcagagagagtaggcgattatcacactcacggtttttactctga

SEQ ID NO: 634845 - DNA, 75 bp, synthetic construct
  source 1..75: mol_type = other DNA
gaaacccgcagccggatgaaagccgccggacgtatgagagaagtagaagcgattacgcaggcccttgaattgacc

SEQ ID NO: 634846 - DNA, 75 bp, synthetic construct
  source 1..75: mol_type = other DNA
tattgcttcttgcagtcattattctggctgcatgtcaggcaaactatatccgggatgttcagggcgggaccgtat

SEQ ID NO: 634847 - DNA, 75 bp, synthetic construct
  source 1..75: mol_type = other DNA
aaatgtgcgtctatgcggagctatccaccgcttatccggaaaatggcgcagattatgtttatctgaaaaatgccg

SEQ ID NO: 634848 - DNA, 75 bp, synthetic construct
  source 1..75: mol_type = other DNA
atgggaagccaggaactccaacgcaagctcggattttgggccgttcttgcaatcgccgtcgggacaaccgtcggc

SEQ ID NO: 634849 - DNA, 75 bp, synthetic construct
  source 1..75: mol_type = other DNA
cggctaatctgggcagcgaccacatcatgcaactgctggaggaaaaaccggacgccacggacgcagacctgcatg

SEQ ID NO: 634850 - DNA, 75 bp, synthetic construct
  source 1..75: mol_type = other DNA
gcaaaggtccttcccggtgaaaccgacatcgccctgcccggcccgctgccgttcattctctcccgcacctacagc

SEQ ID NO: 634851 - DNA, 75 bp, synthetic construct
  source 1..75: mol_type = other DNA
cgcggagttaacgctatcgaactgatgcacgacgccatcggtcatattttacaattgcgcgataacctgaaagag

SEQ ID NO: 634852 - DNA, 75 bp, synthetic construct
  source 1..75: mol_type = other DNA
tctgataagttttgctgtcgtgttcgcaagatattcttcagcttcaagtttaggaacggaatacaattctccgca

SEQ ID NO: 634853 - DNA, 75 bp, synthetic construct
  source 1..75: mol_type = other DNA
ttaaaaaattatctcaaaatccttcagcttggtgatctatacgaaccatttgtcactgcatcacaaagttgttgt

SEQ ID NO: 634854 - DNA, 75 bp, synthetic construct
  source 1..75: mol_type = other DNA
agcagcttatactcattctcatcatattgataaatatttagattcggtggctcccagagcatggggcttatcaca

SEQ ID NO: 634855 - DNA, 75 bp, synthetic construct
  source 1..75: mol_type = other DNA
gaataaaatagaaatcagtgccttcagagcatttgcagatgaactacgtgatgacctgaataacagcatttccga

SEQ ID NO: 634856 - DNA, 75 bp, synthetic construct
  source 1..75: mol_type = other DNA
gtagttgtccgtaacctcattagcttaaaactgaagaatcaggctcaaattcaaagtttggaacaactccgtgac

SEQ ID NO: 634857 - DNA, 75 bp, synthetic construct
  source 1..75: mol_type = other DNA
aaagcctcaaatgggagaatcacgtcgtttaatcaaacatacagtgatgaagggttaaagcaaagccgattgtgg

SEQ ID NO: 634858 - DNA, 75 bp, synthetic construct
  source 1..75: mol_type = other DNA
agggttggcatttagtaaagctaagtgacttgggtgaagttaacagaggaaaatctaaacatagacctcgggatg

SEQ ID NO: 634859 - DNA, 75 bp, synthetic construct
  source 1..75: mol_type = other DNA
ccaccgagcgcgaaagtctgctgacactgccagatgccaaagacgaactgatacggcactacacgttcaacgaaa

SEQ ID NO: 634860 - DNA, 75 bp, synthetic construct
  source 1..75: mol_type = other DNA
cgttttcagacggtgatttaccgcccgctgggacaggaagcgatgcgcgccattgtggaaatgaaactggcgcag

SEQ ID NO: 634861 - DNA, 75 bp, synthetic construct
  source 1..75: mol_type = other DNA
tttttcaggcgttcgataccctgaatctgcaacgggtaaaaacatttagcgttccaccggtgacgctttgcggtc

SEQ ID NO: 634862 - DNA, 75 bp, synthetic construct
  source 1..75: mol_type = other DNA
gtggaaatcagcgaaacgctggcggcggcgaaaggcattaataatggcgatcgtgtcactgtctcaagcaaacgt

SEQ ID NO: 634863 - DNA, 75 bp, synthetic construct
  source 1..75: mol_type = other DNA
ccagtatggtaaaagcaattactactcttttcagcatccccatgaaggaagtaatcagattcctctgtttattcg

SEQ ID NO: 634864 - DNA, 75 bp, synthetic construct
  source 1..75: mol_type = other DNA
tgtatgaacaagacgcgctgcggatgggtaaaaaagagcagttcccgtatgtgggtacgacctatcgtctgaccg

SEQ ID NO: 634865 - DNA, 75 bp, synthetic construct
  source 1..75: mol_type = other DNA
cactccgcgtctggcatccgcgcggccctgatcaagttgaagtgtgggcgttctgtattactgacaaagccgcct

SEQ ID NO: 634866 - DNA, 75 bp, synthetic construct
  source 1..75: mol_type = other DNA
cgcgcctacccacaagggctgtgtaaatcccactgggggttaaacgaagttccctgtgtggagagttataagggg

SEQ ID NO: 634867 - DNA, 75 bp, synthetic construct
  source 1..75: mol_type = other DNA
atgtgtatccaccttaacttaatgatttttaccaaaatcattaggggattcatcaggcttgagcgtattttcggt

SEQ ID NO: 634868 - DNA, 75 bp, synthetic construct
  source 1..75: mol_type = other DNA
aacacgtcccctttggggcattgctgacattagggaatagcacagcgattgttggtgaagatggagaggtttata

SEQ ID NO: 634869 - DNA, 75 bp, synthetic construct
  source 1..75: mol_type = other DNA
aaaaagcatggttacagcgtcagtgcaaaatacgccaagtcctttgcatctgacacggatttgcagcttacgact

SEQ ID NO: 634870 - DNA, 75 bp, synthetic construct
  source 1..75: mol_type = other DNA
aacagtcgcgggtatacctcagtagggttgtcggagtacagccagaaccatattgacgtcaacatggaaaatgta

SEQ ID NO: 634871 - DNA, 75 bp, synthetic construct
  source 1..75: mol_type = other DNA
gaatgagctttttggttttgctgcaggggtagaaattggttggccattattgtacttgatggtatctaaatttaa

SEQ ID NO: 634872 - DNA, 75 bp, synthetic construct
  source 1..75: mol_type = other DNA
atggtaatcgtacctggatggcggcaactggagagaacgaatataccgtaatcgaacaaacaggtggcaaatcct

SEQ ID NO: 634873 - DNA, 75 bp, synthetic construct
  source 1..75: mol_type = other DNA
gaaatgcctgcagaaattttgagtaatacatatgatttattaaacctgcgaattcaaaaagatgaggggcattta

SEQ ID NO: 634874 - DNA, 75 bp, synthetic construct
  source 1..75: mol_type = other DNA
ggacaggagacaacagcttacggtagtgtttccgcgctggtaaatatcggacgctgggtattaagcagtaatatg

SEQ ID NO: 634875 - DNA, 75 bp, synthetic construct
  source 1..75: mol_type = other DNA
atgttatttcatcaacgtttatttaaactgtctacgttgagccttgcattagtttcacacttttcttttgcaggt

SEQ ID NO: 634876 - DNA, 75 bp, synthetic construct
  source 1..75: mol_type = other DNA
ttctgctcatgaatatgctggcagaacctgaaactgtcagggttgatttgggtaatggaaagcaatgtcagtttt

SEQ ID NO: 634877 - DNA, 75 bp, synthetic construct
  source 1..75: mol_type = other DNA
tcagcgcacccgttacgaggcacgtctgtcgcaccgttttgacgggacatacctgagcggctcttattggtggca

SEQ ID NO: 634878 - DNA, 75 bp, synthetic construct
  source 1..75: mol_type = other DNA
gtacttgtataaagtattgccaaatgtaactaaatattttattttagtatatttatttatgtttgcattagaaaa

SEQ ID NO: 634879 - DNA, 75 bp, synthetic construct
  source 1..75: mol_type = other DNA
gctgcagtatgacctctccctggggcgtcgttcaacccggagtgacatcgacaaccccttcaacgagggtgacaa

SEQ ID NO: 634880 - DNA, 75 bp, synthetic construct
  source 1..75: mol_type = other DNA
agcattccgttcaccacggggggggcgcggtactacagcaccagttccgtgtcacacagctctagctctgacacc

SEQ ID NO: 634881 - DNA, 75 bp, synthetic construct
  source 1..75: mol_type = other DNA
cggagaaaaaaaaataaaaaaagacttgaagtgcaagtcacctaaaagtaacctagatttcaaggtgacttgcac

SEQ ID NO: 634882 - DNA, 75 bp, synthetic construct
  source 1..75: mol_type = other DNA
catgacggcaagctttacggcttaggcaccgccgacatgaaaggcttttttgcgtttatccttgatgcgctacgc

SEQ ID NO: 634883 - DNA, 75 bp, synthetic construct
  source 1..75: mol_type = other DNA
tatttaataatataacttcaccttctttttcgcgtgatagcatcgtagaacgtataaaagattatacgatggaaa

SEQ ID NO: 634884 - DNA, 75 bp, synthetic construct
  source 1..75: mol_type = other DNA
aatccttcaggataaaggattagatcctttttgtgaaaatccaagcacagcttggctcgtgcactggcgtttagc

SEQ ID NO: 634885 - DNA, 75 bp, synthetic construct
  source 1..75: mol_type = other DNA
aaagtaatacatcacatcaattgggaattggcggtactgctctacaagataacaacctgagttataatttacagc

SEQ ID NO: 634886 - DNA, 75 bp, synthetic construct
  source 1..75: mol_type = other DNA
acgacatcgagcaactgaaggccctgctgatcgcacagcaggctgttatcgtccgtctgtctggtgaaataaccg

SEQ ID NO: 634887 - DNA, 75 bp, synthetic construct
  source 1..75: mol_type = other DNA
gatgacattgatgactgctggtgactactgggtgaaaactgccggtgcggcaactgtagggcagaagattttcgc

SEQ ID NO: 634888 - DNA, 75 bp, synthetic construct
  source 1..75: mol_type = other DNA
gacaatgtataccaatgacaccacaaaagcaaagcccgctggcgctatgaacaccaacgggcttctaaccaacaa

SEQ ID NO: 634889 - DNA, 75 bp, synthetic construct
  source 1..75: mol_type = other DNA
gccttttccatcttttcccgtaagtcaggatctaaacggaactggaacggaggattaccacgcctttcgtttttg

SEQ ID NO: 634890 - DNA, 75 bp, synthetic construct
  source 1..75: mol_type = other DNA
tttactgcttttgtcgccatgttgagcacccctcataaaaaacaaatgcagtatgcaggaaaaaaaacaagtgtt

SEQ ID NO: 634891 - DNA, 75 bp, synthetic construct
  source 1..75: mol_type = other DNA
agcgaactgggacggctggcagtggagtacctttgcaatcaggaagacgctgccacacatgtaacactggcaggc

SEQ ID NO: 634892 - DNA, 75 bp, synthetic construct
  source 1..75: mol_type = other DNA
ccaacgggcttctaaccaataacgtaaaggagctaaacgctatggctgtaatacagcataccccacgcccagcac

SEQ ID NO: 634893 - DNA, 75 bp, synthetic construct
  source 1..75: mol_type = other DNA
aaagcaaagcccgctggcgctatgaacaccaacgggcttctaaccaacaacgtaaacgaggagccgttatggttg

SEQ ID NO: 634894 - DNA, 75 bp, synthetic construct
  source 1..75: mol_type = other DNA
gataagcacggcaaaagagtggctaagaaacaatgattatgattcattaaatttgccactcaccatttattcaga

SEQ ID NO: 634895 - DNA, 75 bp, synthetic construct
  source 1..75: mol_type = other DNA
agcagaataaataaatacattctcaatcataatacatctaagttttctaactacctcacagccatggcattaaat

SEQ ID NO: 634896 - DNA, 75 bp, synthetic construct
  source 1..75: mol_type = other DNA
caggtagactaggttatgctttctcggggaatgtatatcttattgattatgatgattgggaaacaaaacctttag

SEQ ID NO: 634897 - DNA, 75 bp, synthetic construct
  source 1..75: mol_type = other DNA
gtaagtctggtgtcgccacagggcgaagagacccggctggcatacaccgctcaggggctgctgtcggggatattc

SEQ ID NO: 634898 - DNA, 75 bp, synthetic construct
  source 1..75: mol_type = other DNA
tcactggtggtactgggtcatttggtaatgcagtgttacgtcggtttcttgagacagatattcaagaggttatta

SEQ ID NO: 634899 - DNA, 75 bp, synthetic construct
  source 1..75: mol_type = other DNA
aatgataaaatgaaatttattataggtgatattagagattatacatctgttttagctgcaactagtgacgttgac

SEQ ID NO: 634900 - DNA, 75 bp, synthetic construct
  source 1..75: mol_type = other DNA
tcggaaaagctcaagttctatattggcgatgtgagagattatcaaagtatctcaaacgcaatgcgtggagttgat

SEQ ID NO: 634901 - DNA, 75 bp, synthetic construct
  source 1..75: mol_type = other DNA
ctggaggaaaactcgcgcggcggttcccgctttttgcatcagcaggtaaaagtgggcgatcggttaagatttcaa

SEQ ID NO: 634902 - DNA, 75 bp, synthetic construct
  source 1..75: mol_type = other DNA
tggctccagcttgttaatgatgataaagaactctccatagataacaagaatggtgatttttttgctctatggagt

SEQ ID NO: 634903 - DNA, 75 bp, synthetic construct
  source 1..75: mol_type = other DNA
ctcaaaatttataaaaaaacatgtccacgaggattactctcttgcaaacctcgtattgagaggggttggatacca

SEQ ID NO: 634904 - DNA, 75 bp, synthetic construct
  source 1..75: mol_type = other DNA
ttgatccatcaaaagaaaaaaacttacaattatcattattagacaattcagacatattaccgatcggagaaatag

SEQ ID NO: 634905 - DNA, 75 bp, synthetic construct
  source 1..75: mol_type = other DNA
cctctgtttgtggatttgattaaagcaggaaaaccgctaacagtgacgaaccctgatatgacaaggtttatgatg

SEQ ID NO: 634906 - DNA, 75 bp, synthetic construct
  source 1..75: mol_type = other DNA
cgtggatgcggggatgctcatccgtacaccgacgcaggcccgtcagaaggtggccgacgacgttgaccgcgtccg

SEQ ID NO: 634907 - DNA, 75 bp, synthetic construct
  source 1..75: mol_type = other DNA
cacacggtcagttaagccgttacacggcggcagacggcgcggagtggcagtactgctatgatgagcgcggcctgc

SEQ ID NO: 634908 - DNA, 75 bp, synthetic construct
  source 1..75: mol_type = other DNA
caccgtgacggctaccgcccggaaacagagcggttccggtgggacagccgtgaccagctgaccgggtattgcagc

SEQ ID NO: 634909 - DNA, 75 bp, synthetic construct
  source 1..75: mol_type = other DNA
ccaatcagattaaaagtgaaagaactaaagcaagacatgctgcagtgtttgaatggaaacgccctgattcttttc

SEQ ID NO: 634910 - DNA, 75 bp, synthetic construct
  source 1..75: mol_type = other DNA
ggtaacccgtgggaattcaaacgccacaacacgcgctataaagtccgttttggtggtcgcattcagcaggaaggt

SEQ ID NO: 634911 - DNA, 75 bp, synthetic construct
  source 1..75: mol_type = other DNA
atgtttgatgtcttcgccgaaaccgcgagcggtgttacagcccgtgagcagcgtgctggcaagcaaaacaagaac

SEQ ID NO: 634912 - DNA, 75 bp, synthetic construct
  source 1..75: mol_type = other DNA
caagcgccagtgtaagcgaacttaagaaaaacccgatggctacagtcagtgctggtgatggctacccagttgcta

SEQ ID NO: 634913 - DNA, 75 bp, synthetic construct
  source 1..75: mol_type = other DNA
acggtgttgtctggacaatggagtacggcccgtttgatttgccggtggcgcgaacggacggtgaaggccaccgct

SEQ ID NO: 634914 - DNA, 75 bp, synthetic construct
  source 1..75: mol_type = other DNA
accaccatgccctgatttttctgtcggtggcaagaacaaaggagaatacggtgaaaatggcattttgacgaaatg

SEQ ID NO: 634915 - DNA, 75 bp, synthetic construct
  source 1..75: mol_type = other DNA
atctgattacattactgaaactctaacgaaattagaaaaacaaacttacccaaattttgaaattgttattgttaa

SEQ ID NO: 634916 - DNA, 75 bp, synthetic construct
  source 1..75: mol_type = other DNA
taaataaaggagcttcattatctaaaatgatgaatagctccagtgatctcatggggttgagaaggcagccccaga

SEQ ID NO: 634917 - DNA, 75 bp, synthetic construct
  source 1..75: mol_type = other DNA
cagtgcggttacagtggcagcagcaccataaactgagtggccttgagcgcactggaaccggcgcggaaggattcc

SEQ ID NO: 634918 - DNA, 75 bp, synthetic construct
  source 1..75: mol_type = other DNA
gacgtctttattggcggtgaacaggtgacctatctggatatccagccagagttcccgccgtggcagagaatgatc

SEQ ID NO: 634919 - DNA, 75 bp, synthetic construct
  source 1..75: mol_type = other DNA
atggcgtgccatgtgggaagctgctcgcgactattcaaggacgccctatccagacaaggctttttcggcaacaga

SEQ ID NO: 634920 - DNA, 75 bp, synthetic construct
  source 1..75: mol_type = other DNA
aagcagctatagcgaatgaagtgaagagggttgtatgcctaagtactgataaagctgtatacccgattaacgcaa

SEQ ID NO: 634921 - DNA, 75 bp, synthetic construct
  source 1..75: mol_type = other DNA
tgaggaaatgatcgctgctatagatatgggcgattattaccgtgtcccgccagatcttcgtgaccttaattatgg

SEQ ID NO: 634922 - DNA, 75 bp, synthetic construct
  source 1..75: mol_type = other DNA
accatcagcggcgagcatcagcaactgtgttatcagtacgaccgccatgaccggatggtgagcgcacaggtgtat

SEQ ID NO: 634923 - DNA, 75 bp, synthetic construct
  source 1..75: mol_type = other DNA
ttattcaaagtttgcaaaaagatatagaagatgaacttaatcgtattggattactttatcgttttttttcgagga

SEQ ID NO: 634924 - DNA, 75 bp, synthetic construct
  source 1..75: mol_type = other DNA
gaacaacaaatatttatttgctaatatttggacaagcattagatcttcaattggttccgttagataattcctata

SEQ ID NO: 634925 - DNA, 75 bp, synthetic construct
  source 1..75: mol_type = other DNA
gcgtttgcgctcgctgcaagccgccagagaagcgacgcgtcccgttgcagccacgacctatgcgcgattgctgct

SEQ ID NO: 634926 - DNA, 75 bp, synthetic construct
  source 1..75: mol_type = other DNA
acgtgagggactttctccccgggtcagttacggaaagggggctgaggatttttcacttgtctggactgcgcctgg

SEQ ID NO: 634927 - DNA, 75 bp, synthetic construct
  source 1..75: mol_type = other DNA
actgtggcaggcagtggtgaattacgtctgaacggcgcgatgccggaacgctggcgggtgtcactgccggtaagc

SEQ ID NO: 634928 - DNA, 75 bp, synthetic construct
  source 1..75: mol_type = other DNA
ttcacagccagcgcgagctgttggacatcaggcattctgaagagcgggacatcaacacgctgtttacctacctga

SEQ ID NO: 634929 - DNA, 75 bp, synthetic construct
  source 1..75: mol_type = other DNA
cggatggattttgcctggtgtggcaatgcgccggtgaagctgctggagtacaacgccgatacgccaacttcattg

SEQ ID NO: 634930 - DNA, 75 bp, synthetic construct
  source 1..75: mol_type = other DNA
gatgacggcctggtggcactgcatctacaggaatatgctgcagaatcgttcactcccgccgaagcggatcaggcg

SEQ ID NO: 634931 - DNA, 75 bp, synthetic construct
  source 1..75: mol_type = other DNA
ttgcactgtggttttcatacaacgccattgcagccagcaccaatattaatatgactgccaatatcatcagcacca

SEQ ID NO: 634932 - DNA, 75 bp, synthetic construct
  source 1..75: mol_type = other DNA
agaactggggcatcattccattgggctgattgatatcaacagccttgagacagacgataagccaaatgacatgaa

SEQ ID NO: 634933 - DNA, 75 bp, synthetic construct
  source 1..75: mol_type = other DNA
ctatagttatgttccaaacccgttatcatggatagatcctcttggattatcaccagtaagccctaaaacaattct

SEQ ID NO: 634934 - DNA, 75 bp, synthetic construct
  source 1..75: mol_type = other DNA
taaagcgtgccggaatccgccatcgcaaatcgtatcagtcgagacacacttatgcctgctggtcgttaacagcag

SEQ ID NO: 634935 - DNA, 75 bp, synthetic construct
  source 1..75: mol_type = other DNA
gccagttaccttgactcatcgtgacattattcgctatttcatgacaattccggaagcatcacagttggtgattca

SEQ ID NO: 634936 - DNA, 75 bp, synthetic construct
  source 1..75: mol_type = other DNA
actatggagttaagggtagtgcgcctgttttgatttatggcgctggtgaatctggccgacaattattgccagcat

SEQ ID NO: 634937 - DNA, 75 bp, synthetic construct
  source 1..75: mol_type = other DNA
tgtttggtaccttgtactgcgctgagtcagcgatcgaaagtggcgttgaaacttttgtgttgatttccaccgata

SEQ ID NO: 634938 - DNA, 75 bp, synthetic construct
  source 1..75: mol_type = other DNA
tggggatatccaaagcaatgatggaaaaagtgattgtagctaaaggacgtaatcttagtgaaagtaacactgtta

SEQ ID NO: 634939 - DNA, 75 bp, synthetic construct
  source 1..75: mol_type = other DNA
attttcatgcgaggatgcagaaggtcgacctgacgcaagccgcgacagccggcttagtacgagccagtgtgtttg

SEQ ID NO: 634940 - DNA, 75 bp, synthetic construct
  source 1..75: mol_type = other DNA
gagttttacgcccgtcgggggcaccctcggcgcaaccaatcaacaggttttcgccaatcaggctgccgatggcgc

SEQ ID NO: 634941 - DNA, 75 bp, synthetic construct
  source 1..75: mol_type = other DNA
gtcgttaacagcaggagctaacccggcattcattgcaaaccagatgggccatgcagatgcgcaaatggtgtttca

SEQ ID NO: 634942 - DNA, 75 bp, synthetic construct
  source 1..75: mol_type = other DNA
aaagtaaaaaattatggcgaccattttaccgttgactcaataaggcagatgtgggacgcagcggtaaagcgtgcc

SEQ ID NO: 634943 - DNA, 75 bp, synthetic construct
  source 1..75: mol_type = other DNA
accgggcgggtgacggagcaggtcaacccggaggggctggactaccgctttgagtacgggcaggaccgtgtgacc

SEQ ID NO: 634944 - DNA, 75 bp, synthetic construct
  source 1..75: mol_type = other DNA
cgcgcttggcgtgcaggcgctgcgcgttgctattccggcactgattgtctcactgttcgtcagcgccgatatggt

SEQ ID NO: 634945 - DNA, 75 bp, synthetic construct
  source 1..75: mol_type = other DNA
aaacctacggtcacactggctggaccgggacagtaaccgttatcgatccggtcaatcatatggcgattgtgatgt

SEQ ID NO: 634946 - DNA, 75 bp, synthetic construct
  source 1..75: mol_type = other DNA
tatgtagatagatacacatgtcctaattgccaaaaatatttacctttactaatgaaagaaatgggaatagataag

SEQ ID NO: 634947 - DNA, 75 bp, synthetic construct
  source 1..75: mol_type = other DNA
atgcttgctgataaagccatcgtttcccgtttaacctatatggatcaagatattcttaatcttatcctgttaggg

SEQ ID NO: 634948 - DNA, 75 bp, synthetic construct
  source 1..75: mol_type = other DNA
cttacggggtttattagtcaggtagatggaactccagcgtatacaggtgtatttcagggatggactactcgctcg

SEQ ID NO: 634949 - DNA, 75 bp, synthetic construct
  source 1..75: mol_type = other DNA
gctggcaggaaaaacggcgtacatggtgcaaaacttcggcgtgaaaatgcagaccatgcaggagcttatcgaggg

SEQ ID NO: 634950 - DNA, 75 bp, synthetic construct
  source 1..75: mol_type = other DNA
actgggaatggagctatcagattgagagccttgatgatgaggaaatgaacattacgcattgggcacccacacctc

SEQ ID NO: 634951 - DNA, 75 bp, synthetic construct
  source 1..75: mol_type = other DNA
tagaaaagtatattgcatggttaacgggcggaatgagcatcatctttattatcctgatcctgccgcatattcact

SEQ ID NO: 634952 - DNA, 75 bp, synthetic construct
  source 1..75: mol_type = other DNA
gagcattgaagggaacgtcaaggcacaacaggcgctggacgccgcgttcggtggcggtgctgacgttatcaaaaa

SEQ ID NO: 634953 - DNA, 75 bp, synthetic construct
  source 1..75: mol_type = other DNA
cagcccgtccgtgctgacggggaaccgaattaatgcaggcatcccacgcggcggcctgatgagtcaggttaaaaa

SEQ ID NO: 634954 - DNA, 75 bp, synthetic construct
  source 1..75: mol_type = other DNA
ggcatggaaactcctgttatggacgctcaacctgttgcgtccgtccctgctgacgacgcgcatcggtctggctgc

SEQ ID NO: 634955 - DNA, 75 bp, synthetic construct
  source 1..75: mol_type = other DNA
aacattaaaacagacatttgtttcagtatggaaaaacaaacctttgttttttgttctggccgctttttttatgaa

SEQ ID NO: 634956 - DNA, 75 bp, synthetic construct
  source 1..75: mol_type = other DNA
ggcgtctggcaactcaatatacatcagcaacaacaggttcctctggctcacattctcatactgtaggtattggtt

SEQ ID NO: 634957 - DNA, 75 bp, synthetic construct
  source 1..75: mol_type = other DNA
agctaataccagtacagatggtaaccatagccactcactgtccggcacagcagcatctgcaggtgcacacgcaca

SEQ ID NO: 634958 - DNA, 75 bp, synthetic construct
  source 1..75: mol_type = other DNA
gggcgcatacccatagtttaagtggcagcacgaatgcagctggtaatcacagccatagagatggccgtcgattta

SEQ ID NO: 634959 - DNA, 75 bp, synthetic construct
  source 1..75: mol_type = other DNA
tcagaaggcgttgctgatggtattcggaaaagtgcttgctgataatgtcaaaactgagcaggtaagaattttcat

SEQ ID NO: 634960 - DNA, 75 bp, synthetic construct
  source 1..75: mol_type = other DNA
gaaaggatgcttgatgctctggatgaccaggagctggtgaaactggttactgaacgcagcaatcagccacttcat

SEQ ID NO: 634961 - DNA, 75 bp, synthetic construct
  source 1..75: mol_type = other DNA
agaagttaccagcagcattgctaaaggatacagtttatcaacagttgattaaaaagaatcccgaactggcagacg

SEQ ID NO: 634962 - DNA, 75 bp, synthetic construct
  source 1..75: mol_type = other DNA
tattacttttgattatgataatattcatcagttgtatggagttttaaaaaaaattaattgtgataatgtttccgt

SEQ ID NO: 634963 - DNA, 75 bp, synthetic construct
  source 1..75: mol_type = other DNA
tatgcagtcagccgtgaacataaacagtgctgcaagtggcggtacgcgcagcgttaccgaaacgcctcactatcg

SEQ ID NO: 634964 - DNA, 75 bp, synthetic construct
  source 1..75: mol_type = other DNA
gtttgcaactgcgtaaggtcattaatctgcatatgtgctgcaacaatctggcgaacagacaagcacgctcccgtg

SEQ ID NO: 634965 - DNA, 75 bp, synthetic construct
  source 1..75: mol_type = other DNA
ggtcagtaagcacaacaacaggaaactggacgactgcacagtttatcgagtggctggattctcagggagcattta

SEQ ID NO: 634966 - DNA, 75 bp, synthetic construct
  source 1..75: mol_type = other DNA
tcgcggcattgagcgcacttatgtcacgaacggtgcaatagtgatccacacccaacgcctgaaatcagatccagg

SEQ ID NO: 634967 - DNA, 75 bp, synthetic construct
  source 1..75: mol_type = other DNA
gcttatccagtgggagatgaagcgttgtttttaaatgatgtattagatagcaatggttcaatttatcattttgat

SEQ ID NO: 634968 - DNA, 75 bp, synthetic construct
  source 1..75: mol_type = other DNA
ggtggatgtttacgtcacccataatccgaaaaaaacagaacaaaaagccggagtcagtcagtatccattaacacc

SEQ ID NO: 634969 - DNA, 75 bp, synthetic construct
  source 1..75: mol_type = other DNA
gccacgctgaacttcgccttcgacggtgaaagtgatacggcggttaacccgtatcacgcccagtacattctgcgc

SEQ ID NO: 634970 - DNA, 75 bp, synthetic construct
  source 1..75: mol_type = other DNA
gctcaggggctgctgtcggggatattccgccaggatgaacggcgtctgggcatagagtacgaccaccacaaccgg

SEQ ID NO: 634971 - DNA, 75 bp, synthetic construct
  source 1..75: mol_type = other DNA
aatccacagtggcgtaaagctgaacctcaactccaggccaccgcctccaccgcccttgaccaacttgacgattaa

SEQ ID NO: 634972 - DNA, 75 bp, synthetic construct
  source 1..75: mol_type = other DNA
agggagccacgctgagatttgccttcgacggtgacagtgatacggcggttaacccgtatcacgcccagtacattc

SEQ ID NO: 634973 - DNA, 75 bp, synthetic construct
  source 1..75: mol_type = other DNA
tgctccggcacagtaaccggggttttgcctgtgaacagggctggaatgcagccggtcagcctgtcagccagcgcg

SEQ ID NO: 634974 - DNA, 75 bp, synthetic construct
  source 1..75: mol_type = other DNA
tggacaatggaatacggcccgttcgatttgccggtggcgcgaacggacggtgaaggccaccgctggcagtaccgc

SEQ ID NO: 634975 - DNA, 75 bp, synthetic construct
  source 1..75: mol_type = other DNA
ccggaagaaaatccgcttcacgtatctgtgggacggcgacagtattgcggaaatccgggaataccgcgatgataa

SEQ ID NO: 634976 - DNA, 75 bp, synthetic construct
  source 1..75: mol_type = other DNA
gacgccgcaggccgcctggcagaagtcatcacgccggaaggcaaaacgcagtatgcgtatgacaaatccggcagg

SEQ ID NO: 634977 - DNA, 75 bp, synthetic construct
  source 1..75: mol_type = other DNA
ctggcacacagccccggtgaccggatgtacatgctgggcggaatgagtgacaccgccagcaaccgcatcacgttt

SEQ ID NO: 634978 - DNA, 75 bp, synthetic construct
  source 1..75: mol_type = other DNA
aagaatttttccgcgtgaagcttgagaaaatcattaatgaagtggagcgtcaccacgggcagatggaatatgtgg

SEQ ID NO: 634979 - DNA, 75 bp, synthetic construct
  source 1..75: mol_type = other DNA
accggataagcgtggatactgacatgtatcagcgcggccaccggctgaaacagaccggaaacacagactacagct

SEQ ID NO: 634980 - DNA, 75 bp, synthetic construct
  source 1..75: mol_type = other DNA
aaatttattcaatgaggcggaaatagctcatgccataaaatatgttgagggattgagagaaaaattcatgatggg

SEQ ID NO: 634981 - DNA, 75 bp, synthetic construct
  source 1..75: mol_type = other DNA
cggcctgccggtaagtctggtgtcgccacagggcgaagagacccggctggcgtacaccgctcaggggctgctgtc

SEQ ID NO: 634982 - DNA, 75 bp, synthetic construct
  source 1..75: mol_type = other DNA
gcatatgttcgaagtaaacgtattcctggaaacattgatccatcattgatcatgaaggttaaatatgatgggtct

SEQ ID NO: 634983 - DNA, 75 bp, synthetic construct
  source 1..75: mol_type = other DNA
atggcttcatctgcatacaaacataaaaataataaagtgctctacgatttattaaatacgagagacatgatcttg

SEQ ID NO: 634984 - DNA, 75 bp, synthetic construct
  source 1..75: mol_type = other DNA
tgaaaaatcctactgatcctgaggaattagcatatatatttaataaaaacataaacaacatatggatgatcatct

SEQ ID NO: 634985 - DNA, 75 bp, synthetic construct
  source 1..75: mol_type = other DNA
aaaacttgctagagctaacagcaaaagatctcttgggattactattttttctgggtggcaattgccatataaggt

SEQ ID NO: 634986 - DNA, 75 bp, synthetic construct
  source 1..75: mol_type = other DNA
ttgctggcggttttatcgtggtggtcggttacgccatggtgctacgtatgatgggcgtgaaatatttgatgcctt

SEQ ID NO: 634987 - DNA, 75 bp, synthetic construct
  source 1..75: mol_type = other DNA
taaggcctggtggagatattcctgaatccggcatattaagtttaaacaataaatatttagatagtctttttaaag

SEQ ID NO: 634988 - DNA, 75 bp, synthetic construct
  source 1..75: mol_type = other DNA
tgtagagagccaaataatgttaacaagttttcacgaagctgtaagtttggctagtgctcaaggtataaagtatga

SEQ ID NO: 634989 - DNA, 75 bp, synthetic construct
  source 1..75: mol_type = other DNA
gggcagaaaccggcgcagaaggattccgctatgaccgccacggcaacctgctggcgtacacggacggtaacggcg

SEQ ID NO: 634990 - DNA, 75 bp, synthetic construct
  source 1..75: mol_type = other DNA
gttgctattccggcactgattgtctcgctgttcgtcagcgctgatatggtgagcaatatgctgagcgccattccc

SEQ ID NO: 634991 - DNA, 75 bp, synthetic construct
  source 1..75: mol_type = other DNA
agtcgcttcttttatgacgcctttccggggatgcgcctgcgccacccggtgactgacgataccagcgatgatcgc

SEQ ID NO: 634992 - DNA, 75 bp, synthetic construct
  source 1..75: mol_type = other DNA
agccacgtggggcgggctgctcccctcactggtacgggagtaccgttacgacagcgcgggcaatgtgtcggctgt

SEQ ID NO: 634993 - DNA, 75 bp, synthetic construct
  source 1..75: mol_type = other DNA
ccgggcgggtggagaagtttgaatacaacgccgcacacggtcagttaagccgttacacggcggcagacggcgcgg

SEQ ID NO: 634994 - DNA, 75 bp, synthetic construct
  source 1..75: mol_type = other DNA
actgccagatgccaaagacgaactgatacggcactacacgttcaacgaaaccgacctgtcggtgatccgtcagcg

SEQ ID NO: 634995 - DNA, 75 bp, synthetic construct
  source 1..75: mol_type = other DNA
gactttaatccgacacaggaagatcgggaccgtgccgaaatgatgtgcagggaacgggagaaaagattcatggac

SEQ ID NO: 634996 - DNA, 75 bp, synthetic construct
  source 1..75: mol_type = other DNA
atggcacgaaacaaacaagccctgcggcgaactgcgcaggccaccgctgatggctatgagaactttattgcccgc

SEQ ID NO: 634997 - DNA, 75 bp, synthetic construct
  source 1..75: mol_type = other DNA
cttggtggtcctgcgtatgaagcgttgctgaagaatatcgacctgattcgacagttccagagcaatgaaggtatg

SEQ ID NO: 634998 - DNA, 75 bp, synthetic construct
  source 1..75: mol_type = other DNA
gagcgttacagagagttcagagtggtgaaaagatgtcagagaaggacgaacagctactggcatctccggcatctg

SEQ ID NO: 634999 - DNA, 75 bp, synthetic construct
  source 1..75: mol_type = other DNA
tactcactcgcgaaaaggagacagcgaagaaaaaccaaccgggaaaatggacgtaaaaggctctggagcgataac

SEQ ID NO: 635000 - DNA, 75 bp, synthetic construct
  source 1..75: mol_type = other DNA
tagaagatattgtgaccttgtttacccagcgcaggccggaaatcagcggatttttagaaattttcggcaacccac

SEQ ID NO: 635001 - DNA, 75 bp, synthetic construct
  source 1..75: mol_type = other DNA
ttgttcgaaattgaagtgagttcatgtacagggaataatactaattgtaatagtgtccgttttaattttaattaa

SEQ ID NO: 635002 - DNA, 75 bp, synthetic construct
  source 1..75: mol_type = other DNA
accgctgggtgccatctcttttgacgctacccgatcgagtagtaagttaaataatgataccagacacgaaggtac

SEQ ID NO: 635003 - DNA, 75 bp, synthetic construct
  source 1..75: mol_type = other DNA
cgacagaaagtaatcaaccatcaacagatcacccaactcttttagtcattaatcgattgactgacaaactgcgct

SEQ ID NO: 635004 - DNA, 75 bp, synthetic construct
  source 1..75: mol_type = other DNA
gccgcattaaagatatggggccggacttgggtaaacctgagttttatgatgtggtgaccacagcaacgggaattc

SEQ ID NO: 635005 - DNA, 75 bp, synthetic construct
  source 1..75: mol_type = other DNA
ggcattcgcattacttcggaaattgatgcaaaagatcgtggcattctagaatcacaactggatgagttgcaaatc

SEQ ID NO: 635006 - DNA, 75 bp, synthetic construct
  source 1..75: mol_type = other DNA
ttttttgcagtcagaaatcacccagcaagagctggcgaagcgaattggtaaacctaagcaggagatcacccgctt

SEQ ID NO: 635007 - DNA, 75 bp, synthetic construct
  source 1..75: mol_type = other DNA
cgagccggaaaccgggatgtacctggtgagtgatccgctggggttgcagggaggggagcagacttaccggtatgt

SEQ ID NO: 635008 - DNA, 75 bp, synthetic construct
  source 1..75: mol_type = other DNA
atggcaatcgagaaatacgaagcgaacccacatttgggaaatggatttgaaggtgcgttgcttgtttccaagacc

SEQ ID NO: 635009 - DNA, 75 bp, synthetic construct
  source 1..75: mol_type = other DNA
cgtgtaagtgatgaaaactatgcaaacgtgctgtcacgagtaaaaggcgatttataccgtgaacggaacaatgaa

SEQ ID NO: 635010 - DNA, 75 bp, synthetic construct
  source 1..75: mol_type = other DNA
gtctgatgcaaaaagtttcttacttaaaacatatggagaacaactttctgaaaaaacgtttgagccggtagcaac

SEQ ID NO: 635011 - DNA, 75 bp, synthetic construct
  source 1..75: mol_type = other DNA
gctttgcgttacaacgggcaaggaacctgatgttcctggtgatacgggtgggcattgcgtggtaaggagaagttt

SEQ ID NO: 635012 - DNA, 75 bp, synthetic construct
  source 1..75: mol_type = other DNA
cagaagatcgtcttgaacaacagttcgtacaggaaaaagcagaacagcaaaatcagcagcaatctgaacaggaac

SEQ ID NO: 635013 - DNA, 75 bp, synthetic construct
  source 1..75: mol_type = other DNA
ctattgagtataaaaataatactgcaatgcttcatgatctggataaaagggaagttattgttaaatctgtaacca

SEQ ID NO: 635014 - DNA, 75 bp, synthetic construct
  source 1..75: mol_type = other DNA
tactggctacatacaatggagagtgttggatcagtgcacaaatcgatagcattcttgcacaaagagatgtcgacg

SEQ ID NO: 635015 - DNA, 75 bp, synthetic construct
  source 1..75: mol_type = other DNA
tattctgtggatgtacctcttacctgtgacactctggtgtttgtgggagtggtatcaacatccgggacaaagtcg

SEQ ID NO: 635016 - DNA, 75 bp, synthetic construct
  source 1..75: mol_type = other DNA
aactatgcagcaccacgatacaacctgcttgccatgaccggtaacaacgccgccaacataagctatagccagtag

SEQ ID NO: 635017 - DNA, 75 bp, synthetic construct
  source 1..75: mol_type = other DNA
aagaaacgtttgagccggtagtaacaataagaaaactgagttatgaagaatccagagaaagattttcttccttta

SEQ ID NO: 635018 - DNA, 75 bp, synthetic construct
  source 1..75: mol_type = other DNA
tgcccgtggtgtgctaatccggagtcgatctccggcaaaatccagacggtacgcagagaggcgaaatgtctgcac

SEQ ID NO: 635019 - DNA, 75 bp, synthetic construct
  source 1..75: mol_type = other DNA
ttatgtttaattatcaccttacattcattgcctgtctttttaaagtacaattctctgctaagaatacgatgtttt

SEQ ID NO: 635020 - DNA, 75 bp, synthetic construct
  source 1..75: mol_type = other DNA
tacgaggggcacggatcaattggttacttcgtgaatcccaaaatccagaccaagttgccgagttggctcagcaca

SEQ ID NO: 635021 - DNA, 75 bp, synthetic construct
  source 1..75: mol_type = other DNA
cacaggcagagctcctatccggccttatttccgtttcccaaacagttgcacagattgtgctcgtcatgaccgtgg

SEQ ID NO: 635022 - DNA, 75 bp, synthetic construct
  source 1..75: mol_type = other DNA
acgtcgagggcttgtatgccattggcgaggtgagttataccggcttacacggcgctaaccgcatggcctcgaatt

SEQ ID NO: 635023 - DNA, 75 bp, synthetic construct
  source 1..75: mol_type = other DNA
cgacgctcggctgtttttggttgatcctggcctggatttttattccgctggagcacccgcgctggcagcgtattc

SEQ ID NO: 635024 - DNA, 75 bp, synthetic construct
  source 1..75: mol_type = other DNA
tttttccccagcgaaacgctcaactatataaaaagcaataaatgcagtacgaatagttcaacggtcacggtgcta

SEQ ID NO: 635025 - DNA, 75 bp, synthetic construct
  source 1..75: mol_type = other DNA
actgatggcgtggaagaaaggggagatgaagccggcattacgcgatttcatcgccattgtgcaggaacgtttggc

SEQ ID NO: 635026 - DNA, 75 bp, synthetic construct
  source 1..75: mol_type = other DNA
tatccgcatctgacgctttatgccggccaggacaaggatggaaaagcccctgcctttcggatcgaagctccggct

SEQ ID NO: 635027 - DNA, 75 bp, synthetic construct
  source 1..75: mol_type = other DNA
gcgtggcgctgacaatactgaccggacaatttgccccgcagctgctggggattgcgttaccgatcggtttggtat

SEQ ID NO: 635028 - DNA, 75 bp, synthetic construct
  source 1..75: mol_type = other DNA
tgctgatgagctggctgagtcgtcagcccgtgcgtaaggttttttcgccaggtcaggaacaaaaacagctgttac

SEQ ID NO: 635029 - DNA, 75 bp, synthetic construct
  source 1..75: mol_type = other DNA
aagcctataaaggagttgcagccactcattttctttttaattcttgttcatttagctcaggggaagatgattata

SEQ ID NO: 635030 - DNA, 75 bp, synthetic construct
  source 1..75: mol_type = other DNA
ccgccgtactactcggtgaaagaagtggtgctgccgttcaataaattcccgggtgttgacccgctgttagggcca

SEQ ID NO: 635031 - DNA, 75 bp, synthetic construct
  source 1..75: mol_type = other DNA
gccacaagatcaccggagtactgaaagggtctttatctgaggatgtctttcaggacagaggcacgattgccggtt

SEQ ID NO: 635032 - DNA, 75 bp, synthetic construct
  source 1..75: mol_type = other DNA
ctcaacgaccgtaccaccaccgtaaaacacgatcaccgcgaaaccgtaaaaaatgaccagacggtcacgatccag

SEQ ID NO: 635033 - DNA, 75 bp, synthetic construct
  source 1..75: mol_type = other DNA
gtggccgggatgggcgatgcgctctccacctggtttgaagccaaggcctgcttcgatgcgcgagccaccagcatg

SEQ ID NO: 635034 - DNA, 75 bp, synthetic construct
  source 1..75: mol_type = other DNA
gaaggacgcccacagcatcacaaagaaggatggcagcaaggcgacgtaagacactggttgtatgtcaccaatgcc

SEQ ID NO: 635035 - DNA, 75 bp, synthetic construct
  source 1..75: mol_type = other DNA
gtaggcgcagcggtaaatggcctggatggttctattcagaaaggggctactactgttgaaattcctgtaggtaaa

SEQ ID NO: 635036 - DNA, 75 bp, synthetic construct
  source 1..75: mol_type = other DNA
ctgtggctgcctctgctgcagtatctggttctgctatggcgtggagtccaggcggctataatggttctgttgccc

SEQ ID NO: 635037 - DNA, 75 bp, synthetic construct
  source 1..75: mol_type = other DNA
ttcctgttgcacagccaatcgtcatcaatgccgcagggtatccagtatataacggacagattgccaaattcgtta

SEQ ID NO: 635038 - DNA, 75 bp, synthetic construct
  source 1..75: mol_type = other DNA
taataagctgctcgcctcccgcgccattgccaaagcggtagaagatgaagcgcgcagcaaaaaaaatctcccatg

SEQ ID NO: 635039 - DNA, 75 bp, synthetic construct
  source 1..75: mol_type = other DNA
atgctttttccccgtcgaaaacctgaagtacgtctattgaaaaataccgctgcgtgcgtcattttttcggtgacg

SEQ ID NO: 635040 - DNA, 75 bp, synthetic construct
  source 1..75: mol_type = other DNA
gattgttgagagtaatgacactccggcgaacagtacacagtttactctggagccattctcaatcttcaagtggga

SEQ ID NO: 635041 - DNA, 75 bp, synthetic construct
  source 1..75: mol_type = other DNA
ggaagctatacccagatcctgaccacaggagcgatgtctggcacgctgacgctgatgccactgaatcgccacgga

SEQ ID NO: 635042 - DNA, 75 bp, synthetic construct
  source 1..75: mol_type = other DNA
cgctgatgaccttcagcgcggagcaacgtcagggtaaacagggcgaaaatgacacccgttttgccgtcgatttta

SEQ ID NO: 635043 - DNA, 75 bp, synthetic construct
  source 1..75: mol_type = other DNA
ctgcgtccaagacccccttccacggacaggctgggatcagtccgcagattaatttcggtaacgctcttgatatcg

SEQ ID NO: 635044 - DNA, 75 bp, synthetic construct
  source 1..75: mol_type = other DNA
aaccggcacggttggacgcatcgcggtaattgaagaaaatcctataaattggaatatcaaagaaggcgtttacac

SEQ ID NO: 635045 - DNA, 75 bp, synthetic construct
  source 1..75: mol_type = other DNA
actatccagtcgttacgccatacctccgatcttgataccggagagatgtatgtcttcctgtgtaaggttgaagcc

SEQ ID NO: 635046 - DNA, 75 bp, synthetic construct
  source 1..75: mol_type = other DNA
ttattatggagccggtgccgcgtgagttaatcgagcacatggacgacggcctcgttgtttccgagggaaggtgcg

SEQ ID NO: 635047 - DNA, 75 bp, synthetic construct
  source 1..75: mol_type = other DNA
gccgccgaatatctgtaacgccgcttacctcgcttcacaagcgcgccagctggctgacagctacagcaagaatgt

SEQ ID NO: 635048 - DNA, 75 bp, synthetic construct
  source 1..75: mol_type = other DNA
gctgcgaaaacatgcctggcggacgagcctatcgtccgggcgatgtgttaaccaccatgtccggccaaaccgttg

SEQ ID NO: 635049 - DNA, 75 bp, synthetic construct
  source 1..75: mol_type = other DNA
gtgagattcgttcttgataaaaaagttcctgtggcaataccgctagctatgtcattaatgttctttggtagctta

SEQ ID NO: 635050 - DNA, 75 bp, synthetic construct
  source 1..75: mol_type = other DNA
atggccgcgataggtagcacaccgtttgagcgcggtgacgaagccgaaggatttttaattgtcactgcagcagca

SEQ ID NO: 635051 - DNA, 75 bp, synthetic construct
  source 1..75: mol_type = other DNA
gccctgttacaaacctgcgggatggttggcctggcgcagtggcgctggtcagcggcggagcggggaaggtggcga

SEQ ID NO: 635052 - DNA, 75 bp, synthetic construct
  source 1..75: mol_type = other DNA
agccatcgttgcgctaatttataaaaacgatcagctttcatgcctcttagactggccccctgaatctccagacaa

SEQ ID NO: 635053 - DNA, 75 bp, synthetic construct
  source 1..75: mol_type = other DNA
gaccggcaccagaacataatttgccgtgagtgccggaagagtgaagttatgcagcgtgtgctggcgttttatcag

SEQ ID NO: 635054 - DNA, 75 bp, synthetic construct
  source 1..75: mol_type = other DNA
gacatcatcggtgatgtttttgatgaccaaacctggattcgattattcaaaaaacactttgctgatattatctaa

SEQ ID NO: 635055 - DNA, 75 bp, synthetic construct
  source 1..75: mol_type = other DNA
aacggacccgtgaaattgtcgcggaatatatcagtgaatgtggttgtgaaaatcccaaccatatccggcaggtat

SEQ ID NO: 635056 - DNA, 75 bp, synthetic construct
  source 1..75: mol_type = other DNA
aaaggtctactgaatggtgcaacagcgcctttatcatcttttgctgctagaacaggcttagcatatgcgttagga

SEQ ID NO: 635057 - DNA, 75 bp, synthetic construct
  source 1..75: mol_type = other DNA
ggcatcatcatcccaacaagcagtaaagattctggaagctattcaaaacatagccgggaatatatccggtctgcg

SEQ ID NO: 635058 - DNA, 75 bp, synthetic construct
  source 1..75: mol_type = other DNA
cacttgatgagcaagagttagatattctcgaaaaatataaattacattataaaaatatgcatggcgtaaaattaa

SEQ ID NO: 635059 - DNA, 75 bp, synthetic construct
  source 1..75: mol_type = other DNA
ttacggtagttcactgcgcgacaacgcgttaatgctctccttgctggaagaaaataaactgctacccgatgagca

SEQ ID NO: 635060 - DNA, 75 bp, synthetic construct
  source 1..75: mol_type = other DNA
ggttaattacggtacggcgttacagcctggtgagacatgggcgattccggcggatggattgcaaaacttctcgcc

SEQ ID NO: 635061 - DNA, 75 bp, synthetic construct
  source 1..75: mol_type = other DNA
gttacatgatgccttgataatcaatgtttcttcaagtgatgtacgttggggactggtcggtattaagtttgatga

SEQ ID NO: 635062 - DNA, 75 bp, synthetic construct
  source 1..75: mol_type = other DNA
ggctcattcatctcaattgtgtcgactggcgtcactgtcaacgaataccactgccgcgcctataatggcggtttt

SEQ ID NO: 635063 - DNA, 75 bp, synthetic construct
  source 1..75: mol_type = other DNA
gtggttgtgcacccaatgaccgcgctgggccgtgaaatgggcctgcaggagatgactggattctctaagactgcg

SEQ ID NO: 635064 - DNA, 75 bp, synthetic construct
  source 1..75: mol_type = other DNA
ctggcgcgggcggtgacgccgggaacgtatcaggtaccgcaaccgatggtggaatcaatgtatgttccccaatgg

SEQ ID NO: 635065 - DNA, 75 bp, synthetic construct
  source 1..75: mol_type = other DNA
agcttccggcgtctccagtagagtggctgacggataatggttcatgctaccgggctaatgaaacacggcagtttg

SEQ ID NO: 635066 - DNA, 75 bp, synthetic construct
  source 1..75: mol_type = other DNA
cgcatccaaggcggcacagccacaagtagatgacaaggccgcccgggaagccgataaaaagcgtgccgagctcac

SEQ ID NO: 635067 - DNA, 75 bp, synthetic construct
  source 1..75: mol_type = other DNA
aaaaatatgcatggcgtaaaattaaacagaacggcaattatcaaaatgttgattagtcgtctatcaaaagaaatt

SEQ ID NO: 635068 - DNA, 75 bp, synthetic construct
  source 1..75: mol_type = other DNA
ctgagtatgtgtttacattaccgatgctgcccaatggggaatattcgatgatggtctcattggctaacggtgata

SEQ ID NO: 635069 - DNA, 75 bp, synthetic construct
  source 1..75: mol_type = other DNA
ggattttacgtttcgacgcagccgaccttgtttacgcgcaatgtaccaacgcgttattacggctatgtcacctaa

SEQ ID NO: 635070 - DNA, 75 bp, synthetic construct
  source 1..75: mol_type = other DNA
tcccggcagtgatgatctgaacgggattaacgtgaaataccgttatgagtttacggacacactggggctggtgac

SEQ ID NO: 635071 - DNA, 75 bp, synthetic construct
  source 1..75: mol_type = other DNA
gaagcagaggctgacctggatatgattgctggtctgtgcgggatggatgcgacagacatgatgaatatggaggcg

SEQ ID NO: 635072 - DNA, 75 bp, synthetic construct
  source 1..75: mol_type = other DNA
tgttcttcactctgctttgggtacccaatccggtttactggctgggcatactgttgctgatatggctgttgccag

SEQ ID NO: 635073 - DNA, 75 bp, synthetic construct
  source 1..75: mol_type = other DNA
tcagacaaaaaaggtctgccgggtaaccgctcgttctatgaaaacagtgaggtcgataagttactgcgcaatgcg

SEQ ID NO: 635074 - DNA, 75 bp, synthetic construct
  source 1..75: mol_type = other DNA
atcggccaggggccagcagaagcatttcccaaagatttaaagattgatgctcccgacgaacatacggtgaagttt

SEQ ID NO: 635075 - DNA, 75 bp, synthetic construct
  source 1..75: mol_type = other DNA
gtgggaaagaatatatctggcaggaaaagatgataactataagtttcagcattacggaatcaactcaatatccga

SEQ ID NO: 635076 - DNA, 75 bp, synthetic construct
  source 1..75: mol_type = other DNA
ctgttgctgatatggctgttgccagccatcctctgcattagccacgaccttctgcataaacctctgcgtcgccgc

SEQ ID NO: 635077 - DNA, 75 bp, synthetic construct
  source 1..75: mol_type = other DNA
cgccggttccggaccgtttatgctgaaaagctggcaaaaaggtcagcaattagttctggtgccaaatccgcatta

SEQ ID NO: 635078 - DNA, 75 bp, synthetic construct
  source 1..75: mol_type = other DNA
tttgttttgcctatgatcagcacatctggacagattataagttcaaaaaaattcactacagtaccaattatcatt

SEQ ID NO: 635079 - DNA, 75 bp, synthetic construct
  source 1..75: mol_type = other DNA
ccgctgaaaacaacagaaccgtttctgttacgggtagacaaaacaacgggatacacggatgtgatcaccccgttc

SEQ ID NO: 635080 - DNA, 75 bp, synthetic construct
  source 1..75: mol_type = other DNA
cgaacagtaccctaataattatctgtcggatgttgcacgacgttcacgctggatccggggtgactggcaactgct

SEQ ID NO: 635081 - DNA, 75 bp, synthetic construct
  source 1..75: mol_type = other DNA
tacctgttttgatggcgtgtctgaaaaagttgatgctttatctgttaatagaaaattccctataataattcgcaa

SEQ ID NO: 635082 - DNA, 75 bp, synthetic construct
  source 1..75: mol_type = other DNA
ggcttcggctcgctcgtttgttaaaagggtatactctgcaagagcttggtgatgctgtttgcgtgacccggcaaa

SEQ ID NO: 635083 - DNA, 75 bp, synthetic construct
  source 1..75: mol_type = other DNA
atgtcgatttcctttatatttattctttgctggctggcttcttcaatctggttgtacgcaggagaacttgcgaaa

SEQ ID NO: 635084 - DNA, 75 bp, synthetic construct
  source 1..75: mol_type = other DNA
catgccagtaataaacaatgggcacaatcacacagcgataaagtactcaaaagcctcgagacacacgtattcccc

SEQ ID NO: 635085 - DNA, 75 bp, synthetic construct
  source 1..75: mol_type = other DNA
tgtatcacgttatcgaaccagaacgttggggggctatgtgcacacgggtcagcggcgttaaaagcggaggggtct

SEQ ID NO: 635086 - DNA, 75 bp, synthetic construct
  source 1..75: mol_type = other DNA
tcattcagccctacaaaagctaaaaattatcaacgttataacgaacggatgaaagaaaaacgtcaggagtgggga

SEQ ID NO: 635087 - DNA, 75 bp, synthetic construct
  source 1..75: mol_type = other DNA
ttttatatcctatagccgatcatattggcttgcttgtggtcgacgaggcgcactgcatctctgattggggccacg

SEQ ID NO: 635088 - DNA, 75 bp, synthetic construct
  source 1..75: mol_type = other DNA
aggagtatgtaaggcgtaaagttgatttgtatattttatcattagctattttgttttgtttttttatttttatca

SEQ ID NO: 635089 - DNA, 75 bp, synthetic construct
  source 1..75: mol_type = other DNA
tggaaaccggacggcaaccgacccggggctcagacaggcgcttgagcaggaagccgctgaactcatgtcagcggt

SEQ ID NO: 635090 - DNA, 75 bp, synthetic construct
  source 1..75: mol_type = other DNA
tgttggtatatttatcccatttacgactggaaggtggccgatatctggacctggtatgctaaacaccagtctcta

SEQ ID NO: 635091 - DNA, 75 bp, synthetic construct
  source 1..75: mol_type = other DNA
aacgtctgtgcgataagtatgcggaaatacgcgtgatcatggccgatatctttgaggagaattaccgctgttacg

SEQ ID NO: 635092 - DNA, 75 bp, synthetic construct
  source 1..75: mol_type = other DNA
agggaattaaagccaagagaacgctattcacggacacagaaaattgctgctgttgagcattatcttactcacggt

SEQ ID NO: 635093 - DNA, 75 bp, synthetic construct
  source 1..75: mol_type = other DNA
taaaattctcacaccggggctccaagatgcgaacaccacatcttgtgccactcagcaaacaggctgtagccatac

SEQ ID NO: 635094 - DNA, 75 bp, synthetic construct
  source 1..75: mol_type = other DNA
actacttgtactgaaaacatatttagacgatgtttttgaaaaactgtcacttcttgatattttagcaaaaaaatt

SEQ ID NO: 635095 - DNA, 75 bp, synthetic construct
  source 1..75: mol_type = other DNA
atcggagcgcatcagcaataaagcgctcgggctgggtaacgccagccgggctggaacgcatctgccattaacctc

SEQ ID NO: 635096 - DNA, 75 bp, synthetic construct
  source 1..75: mol_type = other DNA
gactcagcatgaaagaagccagggcgatggtcgccatggatcttggacatggtgatggccgtggccgttatatcc

SEQ ID NO: 635097 - DNA, 75 bp, synthetic construct
  source 1..75: mol_type = other DNA
tactgagacaaacagcgaggggcagcggttacaggcatatgtagttcgaaacacccaaaacccggaattactaca

SEQ ID NO: 635098 - DNA, 75 bp, synthetic construct
  source 1..75: mol_type = other DNA
atggaagtattagggaagttttacgaaatggagataatagacttgtttactttatgaacaaagaacagtataaga

SEQ ID NO: 635099 - DNA, 75 bp, synthetic construct
  source 1..75: mol_type = other DNA
atgccaccaccctctacgcaactgtttgcagagcaccttcccaccgagtggatacagcacttcctgacgctttct

SEQ ID NO: 635100 - DNA, 75 bp, synthetic construct
  source 1..75: mol_type = other DNA
aatattatgatatagttaagatggggacgactcattggcgattcaatcaaggggtacctccgtcacatttaaata

SEQ ID NO: 635101 - DNA, 75 bp, synthetic construct
  source 1..75: mol_type = other DNA
ttgcaatatggtgatgatgtctatcctctgatagcggcaaagtcacaggactgggatcagacgctccctgttgcc

SEQ ID NO: 635102 - DNA, 75 bp, synthetic construct
  source 1..75: mol_type = other DNA
taaagaccctctgtgtgcgaggaattccaccaaaacaaggagatttatgggctaacaatgaaaaagaatttgttg

SEQ ID NO: 635103 - DNA, 75 bp, synthetic construct
  source 1..75: mol_type = other DNA
tggatgacggctaatctggttgccgatgaacggacaaattcagtgttaattagcgggagccaggcgctcgccagc

SEQ ID NO: 635104 - DNA, 75 bp, synthetic construct
  source 1..75: mol_type = other DNA
cttacgtttatcgcgtcgattgcggcggctgcaacgcctgcgaaatcgaaatttttgccgccatcacacccgtat

SEQ ID NO: 635105 - DNA, 75 bp, synthetic construct
  source 1..75: mol_type = other DNA
agttctggcgcgacggcgaacacgtcatcagtgacatcctcgactactcagccggagacggattcagcgacatct

SEQ ID NO: 635106 - DNA, 75 bp, synthetic construct
  source 1..75: mol_type = other DNA
atgggcggcattgtgccgattttgcggtgatttacactgcaaaacgcagagtgattttttcgatattatcggctt

SEQ ID NO: 635107 - DNA, 75 bp, synthetic construct
  source 1..75: mol_type = other DNA
cgcctggacacgctgcttgatgaaaatggctggcaaacggaacaaaaatcatgggcggcattgtgccgattttgc

SEQ ID NO: 635108 - DNA, 75 bp, synthetic construct
  source 1..75: mol_type = other DNA
gaaaccactcatactgagttaggtaaactaataccaaaaataacacacatagttcgcagggaaactattattata

SEQ ID NO: 635109 - DNA, 75 bp, synthetic construct
  source 1..75: mol_type = other DNA
aagcgataccgtttgctaatgtcgggaagcttgtaacttttggtattctgccaaataagcctgaaacagggtatg

SEQ ID NO: 635110 - DNA, 75 bp, synthetic construct
  source 1..75: mol_type = other DNA
cctgctctggttatttgtaatgaagttcatcgttttatcgttgcagaacagatgcgtaatgtaaatttagcgaat

SEQ ID NO: 635111 - DNA, 75 bp, synthetic construct
  source 1..75: mol_type = other DNA
tatataccattaggtgttattcattcccttgaaaatccagggaaaatacctctggaagtaattgagattcagtcc

SEQ ID NO: 635112 - DNA, 75 bp, synthetic construct
  source 1..75: mol_type = other DNA
gtggtacggggtccagactttggccattatctcggactcatttccctaaacaatttcacaaattaattaacgaac

SEQ ID NO: 635113 - DNA, 75 bp, synthetic construct
  source 1..75: mol_type = other DNA
tcattaccatcgtactgaacattggattgttgtctcggggacagctaaagttcatcttgaagataagacttacct

SEQ ID NO: 635114 - DNA, 75 bp, synthetic construct
  source 1..75: mol_type = other DNA
agcaaggtaagttggtcacatttggcattgttccaacagctccagagacagggtatggctatattaagtcaggtg

SEQ ID NO: 635115 - DNA, 75 bp, synthetic construct
  source 1..75: mol_type = other DNA
aggcttaaatcagaaaatcgtagtgaagtttttacgcatcttgaagtttatcgtccttggggtaaatatgagtct

SEQ ID NO: 635116 - DNA, 75 bp, synthetic construct
  source 1..75: mol_type = other DNA
gtggttcaggttcaaggttatggcctttatctcggacacattatccaaaacagtttcattgtttagttaaagaga

SEQ ID NO: 635117 - DNA, 75 bp, synthetic construct
  source 1..75: mol_type = other DNA
cgcgttagctgctatgcatattgtcgaaactatcaacgctgatcaagacgtgctattgttagttctcccggcaga

SEQ ID NO: 635118 - DNA, 75 bp, synthetic construct
  source 1..75: mol_type = other DNA
atgctgaacttggcaagttagttacatttggcattaatcctttaaatcctgaaactggctatgggtatattaaac

SEQ ID NO: 635119 - DNA, 75 bp, synthetic construct
  source 1..75: mol_type = other DNA
taactaacccaggtattgtcccactgataattattgagatacaggcaggtagttatattagtgatgctgatattt

SEQ ID NO: 635120 - DNA, 75 bp, synthetic construct
  source 1..75: mol_type = other DNA
cagtgaactaaaaaaagataatagaagagagttgtcactttttaaaaatgagtatcggccatggggtgagataga

SEQ ID NO: 635121 - DNA, 75 bp, synthetic construct
  source 1..75: mol_type = other DNA
aattatatacgctcagaatcagcaattactgctactctaggtgttaatgatttaattattgttaatacccatgat

SEQ ID NO: 635122 - DNA, 75 bp, synthetic construct
  source 1..75: mol_type = other DNA
actggaagcctcaaagatattgacaggacaacaaaggaagggatggtagagacacagctacttatcaagggcgta

SEQ ID NO: 635123 - DNA, 75 bp, synthetic construct
  source 1..75: mol_type = other DNA
ccgattattcccagggaagtatttaatgtcataggttttccagatgaacgtttctttatatttaatgacgattta

SEQ ID NO: 635124 - DNA, 75 bp, synthetic construct
  source 1..75: mol_type = other DNA
tcgtctttctttcctataacggcctgaatcggcctgcgatggttatgggtgttccattgatgctttttttgtctg

SEQ ID NO: 635125 - DNA, 75 bp, synthetic construct
  source 1..75: mol_type = other DNA
atgacttataacggttttaaccgtccggcgttagtttctggtatccccttaatgttgttattgttcacggctttt

SEQ ID NO: 635126 - DNA, 75 bp, synthetic construct
  source 1..75: mol_type = other DNA
ttatgaatactattcacccagaggcattccggatggtgtttccgcagcattactgccagtgactgttacgctgga

SEQ ID NO: 635127 - DNA, 75 bp, synthetic construct
  source 1..75: mol_type = other DNA
atgccggtgaatatcagctgctgaccagtgaaaccgacctggccgacatcctcgcaccggcgaaaaccatctcga

SEQ ID NO: 635128 - DNA, 75 bp, synthetic construct
  source 1..75: mol_type = other DNA
tttatgtacggcctgactgagtacccactggaaggcaacagcgcgctgctgaaatcgctgcaggacaacaacatc

SEQ ID NO: 635129 - DNA, 75 bp, synthetic construct
  source 1..75: mol_type = other DNA
ccctgcaattcctggcaccttccgagcgccaggcattactggataaaatttatcaagggctgaatcctggcggag

SEQ ID NO: 635130 - DNA, 75 bp, synthetic construct
  source 1..75: mol_type = other DNA
ggcggatatggagcgagacccaacaaaccgcctacgcccgatccaagtaaattgccggacatagcgaaacaatta

SEQ ID NO: 635131 - DNA, 75 bp, synthetic construct
  source 1..75: mol_type = other DNA
ggggagcttcacaccactcatcagagttgaaactgccaccggtgaactggccagaacgcagcgccgcagcctggc

SEQ ID NO: 635132 - DNA, 75 bp, synthetic construct
  source 1..75: mol_type = other DNA
aagagaagaaatttgtcaccgcgtatctgggcgatgctggaatgctgcgttacaacagcaagctgccgatcgtgg

SEQ ID NO: 635133 - DNA, 75 bp, synthetic construct
  source 1..75: mol_type = other DNA
agctggaagcaaaaatcgccgagaaagatgcgcgtattgctgaactcgaagcgcaattgccggagactaccaata

SEQ ID NO: 635134 - DNA, 75 bp, synthetic construct
  source 1..75: mol_type = other DNA
gcaaaagcatttcccggttggcttccacgacgtcgatgacacggttgctgatcactggttcgtaaaagcgcactg

SEQ ID NO: 635135 - DNA, 75 bp, synthetic construct
  source 1..75: mol_type = other DNA
cctgcataaagccggatttgaacatagcgagttatggttccagtgctttaactttggctcactggtggcattgaa

SEQ ID NO: 635136 - DNA, 75 bp, synthetic construct
  source 1..75: mol_type = other DNA
ggatgcgcactgacctgtcggcaacgctgtttctttgcgatccggagagctatgagggcggagaactggtgattg

SEQ ID NO: 635137 - DNA, 75 bp, synthetic construct
  source 1..75: mol_type = other DNA
atggcaactacctgaatcgcttgctgcccgtttttcattgtcttaatagcacatttttcaacctgtcattaatcc

SEQ ID NO: 635138 - DNA, 75 bp, synthetic construct
  source 1..75: mol_type = other DNA
tgagttccgccacggcaaaatgacgctggagaacccgtcgtcagagttgctgactgtgctgatccgcgaattgac

SEQ ID NO: 635139 - DNA, 75 bp, synthetic construct
  source 1..75: mol_type = other DNA
tttggtgggataaggaggcagacacaatctacgtttcacgcgtgtggaaggcgaaagaaaaaacagccgttcagg

SEQ ID NO: 635140 - DNA, 75 bp, synthetic construct
  source 1..75: mol_type = other DNA
gcttttttttaatgagcggatggtacggtgaaaaattatactcttttggtattgaaatgctgaatttagcattcg

SEQ ID NO: 635141 - DNA, 75 bp, synthetic construct
  source 1..75: mol_type = other DNA
aatttttccgcgcgccaccgccacaaaatggtcgctcttttctttcctccctccggtttgcaggagacaccctat

SEQ ID NO: 635142 - DNA, 75 bp, synthetic construct
  source 1..75: mol_type = other DNA
tcaatgaaaacttccatttatatcccaatgaattaccaaaatcatcacagtggggtcagttaataaaaaaaatga

SEQ ID NO: 635143 - DNA, 75 bp, synthetic construct
  source 1..75: mol_type = other DNA
attacgccatctttgatgacgaaatgccatttacattaactgatgaacagatcgaaaatatttcttttttaaacg

SEQ ID NO: 635144 - DNA, 75 bp, synthetic construct
  source 1..75: mol_type = other DNA
tcatgctggcaacgccggttattagcctgtttcctgccctccttgcgcaaaacttctggcaccgttttccacttt

SEQ ID NO: 635145 - DNA, 75 bp, synthetic construct
  source 1..75: mol_type = other DNA
gatccacacactgccacggttaccctgaacggacttgtggccacggtaaaaggcgtgaagcagggcagtgtcagc

SEQ ID NO: 635146 - DNA, 75 bp, synthetic construct
  source 1..75: mol_type = other DNA
agtatactgagaacagggtagatgatttcatcgactacacgcagcaacagaagattgctgccgggaaggcgatat

SEQ ID NO: 635147 - DNA, 75 bp, synthetic construct
  source 1..75: mol_type = other DNA
catatcacatagaaaagaaaggaaataaagacattattacattggatttcgttagcaaggatcatgctcagcaac

SEQ ID NO: 635148 - DNA, 75 bp, synthetic construct
  source 1..75: mol_type = other DNA
ttcaatccttcgttcccttatcggctgctgcatatgtccgtcgccgcatttctcagtagcgcgctgtttgtcggc

SEQ ID NO: 635149 - DNA, 75 bp, synthetic construct
  source 1..75: mol_type = other DNA
atatactcctgaaatattttatgaggcctgcagaaatctccagtcattttatgatcatcaggagacgtcacaaaa

SEQ ID NO: 635150 - DNA, 75 bp, synthetic construct
  source 1..75: mol_type = other DNA
acacaaaggcatcacattacttagattggatgtttttgatgacagaacaagcgaatgtctttctgaagagattaa

SEQ ID NO: 635151 - DNA, 75 bp, synthetic construct
  source 1..75: mol_type = other DNA
cagatcagggacatggtggaggacgcactgcaggacagctttgatgagtatgacacgcatccctgggtggtgcag

SEQ ID NO: 635152 - DNA, 75 bp, synthetic construct
  source 1..75: mol_type = other DNA
catgccgggccgtcagttatcgattttcttccctgggtggagtacctggatgaggcacagtgtctgctgctggat

SEQ ID NO: 635153 - DNA, 75 bp, synthetic construct
  source 1..75: mol_type = other DNA
atgtggaaccttacagaaatatggaaaatcctcggattacctaacaataagctaccctctcagtggcgcggcaag

SEQ ID NO: 635154 - DNA, 75 bp, synthetic construct
  source 1..75: mol_type = other DNA
actggcgattatctacctgaccattcaggtggcggtttacggattaattttcttcctgccgacccaggttgctgc

SEQ ID NO: 635155 - DNA, 75 bp, synthetic construct
  source 1..75: mol_type = other DNA
ctggcttattccgcgctattccgataaaaccggcgaacggcgtaatgtcgcagcgctgacattactggcggcggg

SEQ ID NO: 635156 - DNA, 75 bp, synthetic construct
  source 1..75: mol_type = other DNA
aattctcaatgctgaagcagtacgccaaaacatgagcgagcctcgtatttttggtacttacgactgcatgaaggt

SEQ ID NO: 635157 - DNA, 75 bp, synthetic construct
  source 1..75: mol_type = other DNA
gcctgcagaaatctccagtcattttatgctcatcaggagacatcacaaaacgctaaatatagtgcaccagacaag

SEQ ID NO: 635158 - DNA, 75 bp, synthetic construct
  source 1..75: mol_type = other DNA
gtgctgcgtttggggcttccatgtgcggtaactgaaatcatcaatgcctacgatacgccggatatgatccgcatc

SEQ ID NO: 635159 - DNA, 75 bp, synthetic construct
  source 1..75: mol_type = other DNA
ttcgcccgccgtcgagatagtgaactggctggcggtgcaatcaatttacagcaggtaatttattcgtcctgggaa

SEQ ID NO: 635160 - DNA, 75 bp, synthetic construct
  source 1..75: mol_type = other DNA
gctggtaccggataagattaataagaaagaagccgaactgatgcaaaatttcgccagacgagcaggttacggcat

SEQ ID NO: 635161 - DNA, 75 bp, synthetic construct
  source 1..75: mol_type = other DNA
gttcatgtttatggcccgcatattttccatacggatgataaagaagtatgggaatatatcaataaattcggaatg

SEQ ID NO: 635162 - DNA, 75 bp, synthetic construct
  source 1..75: mol_type = other DNA
atttccattgttctgtttattcagtggttatcactttatcgagaaaggtttgcagaacgcggatttttttataag

SEQ ID NO: 635163 - DNA, 75 bp, synthetic construct
  source 1..75: mol_type = other DNA
taagtgcggttgctggcacctggtcaattgcaacgcgaatctttgatcgcattattccttctgattatccctatg

SEQ ID NO: 635164 - DNA, 75 bp, synthetic construct
  source 1..75: mol_type = other DNA
taaccatcgatttagggaatggaaaaactaaaattggatttagtcctgaccattatgaaagaatatttgaaatca

SEQ ID NO: 635165 - DNA, 75 bp, synthetic construct
  source 1..75: mol_type = other DNA
atgtttgtgctaatgagacgctggcccattacatgaacgaggatacagtccgccaggagctgaaccggattcata

SEQ ID NO: 635166 - DNA, 75 bp, synthetic construct
  source 1..75: mol_type = other DNA
gctttggcaacctggcgataccgcgtgtgggtcaggaagtcattgtggacttcctcaacggcgatccggaccagc

SEQ ID NO: 635167 - DNA, 75 bp, synthetic construct
  source 1..75: mol_type = other DNA
gtgaatccctgcgcgcccgggaggatgtggcgaccgtgaagaaatatctgggaaaccggcacaagctctaccgtg

SEQ ID NO: 635168 - DNA, 75 bp, synthetic construct
  source 1..75: mol_type = other DNA
tgaccatctgaaggggtatgtgaagccccgtgcgcagcgcaccgcttttacagaggcctggctgggcgagatgga

SEQ ID NO: 635169 - DNA, 75 bp, synthetic construct
  source 1..75: mol_type = other DNA
ttatcatcgaggccggaaactcatttggcctgatggccgactacgccgccgcccacggcctgacggtgaataaaa

SEQ ID NO: 635170 - DNA, 75 bp, synthetic construct
  source 1..75: mol_type = other DNA
tgtagaaaaagcacacatgctcaggcgacggtttgctcgctttaaacaggttgccagtgcgctgagttccgttgt

SEQ ID NO: 635171 - DNA, 75 bp, synthetic construct
  source 1..75: mol_type = other DNA
cggacgaaagcggcagagatggcggaagcgctggggatgttcactcagccgggcagttttgaagcggagctgttt

SEQ ID NO: 635172 - DNA, 75 bp, synthetic construct
  source 1..75: mol_type = other DNA
cggtgactgggcgggagacgggcaccggccatcccggattcagtttctttaaccggggtggggatgtgctgacat

SEQ ID NO: 635173 - DNA, 75 bp, synthetic construct
  source 1..75: mol_type = other DNA
cccctgcaaaagatgacgttgaatttcggcatcgcattatgaatccgctcagtgaagatgagtttcaactgtcaa

SEQ ID NO: 635174 - DNA, 75 bp, synthetic construct
  source 1..75: mol_type = other DNA
ggtgacaccgctgacgctgggtgaagtctgggcgttaccgggaatgctgcgcctggcgctgattgaaaatcttcg

SEQ ID NO: 635175 - DNA, 75 bp, synthetic construct
  source 1..75: mol_type = other DNA
tgtcgcggaacagctgcgtcaactgaataaactcaccgagaacattattctcgaaccggcagggcgtaacactgc

SEQ ID NO: 635176 - DNA, 75 bp, synthetic construct
  source 1..75: mol_type = other DNA
gtacacggtttattgccaggtaaagaagcggttgcacgcgttgcgtggttgctggagcgcgtgggcctgttacct

SEQ ID NO: 635177 - DNA, 75 bp, synthetic construct
  source 1..75: mol_type = other DNA
agtgcgggctgacggcggaacagatggccgcgcaactggaggcggaatacatcccggagaggaaacttcatcttt

SEQ ID NO: 635178 - DNA, 75 bp, synthetic construct
  source 1..75: mol_type = other DNA
cggatgcacgacgagcggacccaccactaccactacgacagccagcaccgtctggtgttctacacgcggatacag

SEQ ID NO: 635179 - DNA, 75 bp, synthetic construct
  source 1..75: mol_type = other DNA
ggcggatcatgtgattgccgatgaagacgcttttcgcaccgccgtgcgtaatgccatgccgtatgccgaagcggg

SEQ ID NO: 635180 - DNA, 75 bp, synthetic construct
  source 1..75: mol_type = other DNA
agctggatggcgtgaatttcgttagtaccgatccggcatattccggttcgcttgcgccgatcgttaaggagtggt

SEQ ID NO: 635181 - DNA, 75 bp, synthetic construct
  source 1..75: mol_type = other DNA
tattcgaccggagactgcaccgtcatatgttgaggaactgtatgaattagcatcctcggttatagatgagcttca

SEQ ID NO: 635182 - DNA, 75 bp, synthetic construct
  source 1..75: mol_type = other DNA
tttggttgttgttgaaacgaaagatgccgtattagttgctcataaagataaagttcagcaagttaaaaacatcgt

SEQ ID NO: 635183 - DNA, 75 bp, synthetic construct
  source 1..75: mol_type = other DNA
acgaaaagtcgtatttggtatcgccaagctaaccgatttaattgccttgcacactactcatgaccgtaaacttta

SEQ ID NO: 635184 - DNA, 75 bp, synthetic construct
  source 1..75: mol_type = other DNA
cgctggttgcctgtatacgcaagctgctgactatcctgaacgcaatgctcagaaagaacgaagaatggaatgaat

SEQ ID NO: 635185 - DNA, 75 bp, synthetic construct
  source 1..75: mol_type = other DNA
aagtttaagactggacaataataaaataacccacattgatactaataatacatccgatattggaactttattccc

SEQ ID NO: 635186 - DNA, 75 bp, synthetic construct
  source 1..75: mol_type = other DNA
gttaagacaaaagtttatgatgaactgcataacgcccggggcattgacttcatctgggaaaatctggatacccag

SEQ ID NO: 635187 - DNA, 75 bp, synthetic construct
  source 1..75: mol_type = other DNA
tgatgctggcggcctgggcgacgctgttctggagcttcgcgccggaaggcaacgttaaaggcgcgctgttctttc

SEQ ID NO: 635188 - DNA, 75 bp, synthetic construct
  source 1..75: mol_type = other DNA
aaaagccagcttcagttaatgtgtgaaaatgaagggatcacccaagcggaaatgattgaaaggcttatcgaaatg

SEQ ID NO: 635189 - DNA, 75 bp, synthetic construct
  source 1..75: mol_type = other DNA
gtgaagaaaaaaaagagaagatagaaaaaataattgtcaaattgataattgatagaaaaatgataaacaggcgaa

SEQ ID NO: 635190 - DNA, 75 bp, synthetic construct
  source 1..75: mol_type = other DNA
aactacgccatcgatgccgggctggatccagtgaaagatcctattgccgttgaaagtggtgaaaacaacccgtat

SEQ ID NO: 635191 - DNA, 75 bp, synthetic construct
  source 1..75: mol_type = other DNA
aagctgaagccgggcgtggataaagtaaccgcgcgcattagcgatatcgtcgaaaacccgaaaaagctgaagttc

SEQ ID NO: 635192 - DNA, 75 bp, synthetic construct
  source 1..75: mol_type = other DNA
acgttcgctcactatttaccaggtaaatttatgggattgtagcgtaaaaaaagacaatttcgcagtcttgcgccg

SEQ ID NO: 635193 - DNA, 75 bp, synthetic construct
  source 1..75: mol_type = other DNA
tattgagaaatctgctaaatattttaattccagaaaaagtaaaaactcattaaaaataaaagtggaaagtgttaa

SEQ ID NO: 635194 - DNA, 75 bp, synthetic construct
  source 1..75: mol_type = other DNA
ttttattttccaaatgtattaaaatacgatcctgatcaacttaggacagagattttttctgaccgtatgctgtta

SEQ ID NO: 635195 - DNA, 75 bp, synthetic construct
  source 1..75: mol_type = other DNA
gcaccgggcgggccaacataacagtgacaatgttattgaagaactggcctcggagctcatccgaaaacagggata

SEQ ID NO: 635196 - DNA, 75 bp, synthetic construct
  source 1..75: mol_type = other DNA
gggcgatacggtcaaggcaggcaaactgctggtgacgctggactgtagcgagctgaaagcccgtcgcgacgcggc

SEQ ID NO: 635197 - DNA, 75 bp, synthetic construct
  source 1..75: mol_type = other DNA
gatgtctacagcgtcgctccccatactggtcgtgcaggctggagctggtacaccggttctgcaggctgggcctgg

SEQ ID NO: 635198 - DNA, 75 bp, synthetic construct
  source 1..75: mol_type = other DNA
ttctgtccctcgggattgatgacagggactttactgccggggaacaggcagtacatgctgcccttaaccggctca

SEQ ID NO: 635199 - DNA, 75 bp, synthetic construct
  source 1..75: mol_type = other DNA
gtgatcctcaatcgccttgagcaatcttctactgaggaagcgcgtgaagccgatgagatcgacgaagaacagcca

SEQ ID NO: 635200 - DNA, 75 bp, synthetic construct
  source 1..75: mol_type = other DNA
atctgggcgggtatgggaatgggtaaaaccgtagcgacactcactacgctggaagacctcttcatggcgggtgca

SEQ ID NO: 635201 - DNA, 75 bp, synthetic construct
  source 1..75: mol_type = other DNA
taagaatgcaatggttaatgttacaacaagaaacacctgatgatttcgtaatagctacgggcaagcagatctctg

SEQ ID NO: 635202 - DNA, 75 bp, synthetic construct
  source 1..75: mol_type = other DNA
ccgtagcgacactcaccacgctggaagatcttttcatggctggagcagaaacacgccccgcgctggtcctcgcgc

SEQ ID NO: 635203 - DNA, 75 bp, synthetic construct
  source 1..75: mol_type = other DNA
ggcagatacaggccggacacaatcgtccggtatttattcaccacattattgctgccgacactatggacgaaatgg

SEQ ID NO: 635204 - DNA, 75 bp, synthetic construct
  source 1..75: mol_type = other DNA
atggcctatgctatgttttcaccccgcccttatcaagacctcatcatcaaccacgaaatagacaccttgcgctgc

SEQ ID NO: 635205 - DNA, 75 bp, synthetic construct
  source 1..75: mol_type = other DNA
gttggggatgtaattgttcgtgttgatccacgctatttccgccctgcggaagttgaaacacttcttggtgatcca

SEQ ID NO: 635206 - DNA, 75 bp, synthetic construct
  source 1..75: mol_type = other DNA
gtgaatttgttcgtatgtcagctaaagaagtcggtctggagttagaattctccggacaaggtgttgatgaaatag

SEQ ID NO: 635207 - DNA, 75 bp, synthetic construct
  source 1..75: mol_type = other DNA
ctatcttggtaacatggactcattgcgtgactggggacatgctaaagattatgtccgtatgcagtggatgatgct

SEQ ID NO: 635208 - DNA, 75 bp, synthetic construct
  source 1..75: mol_type = other DNA
gagcatcttcgtttaacacagaacgtgttgatcatatttatcaagatcgccacaaccaaaatccaaatttctttc

SEQ ID NO: 635209 - DNA, 75 bp, synthetic construct
  source 1..75: mol_type = other DNA
tgtatcgtttgaatcgccagagtatacagctgatgtggatgctataggaactttgcgcttattagaggctattcg

SEQ ID NO: 635210 - DNA, 75 bp, synthetic construct
  source 1..75: mol_type = other DNA
atgaaaaaagcgttaatcactggagttactgggcaagatggatcttacttggcagaattccttcttgataaaggg

SEQ ID NO: 635211 - DNA, 75 bp, synthetic construct
  source 1..75: mol_type = other DNA
catgaaagtaatccaaaattccatcttcactatggtgatttaactgacacatcaaacttaacccgtattttatct

SEQ ID NO: 635212 - DNA, 75 bp, synthetic construct
  source 1..75: mol_type = other DNA
gagtttcggaaaaatgaccgtaattatgagcgcggggacacgttgattttgcatgaatgggtgcagggtgtgtat

SEQ ID NO: 635213 - DNA, 75 bp, synthetic construct
  source 1..75: mol_type = other DNA
taacagatgttactgacctgtcagactggctggaagattatgtcttgctaagtattgagctgcttaatacaggcg

SEQ ID NO: 635214 - DNA, 75 bp, synthetic construct
  source 1..75: mol_type = other DNA
aagtatgttcatatattggtgataactggatgattgatccacatcccccgcaggaactgctggagggatattttc

SEQ ID NO: 635215 - DNA, 75 bp, synthetic construct
  source 1..75: mol_type = other DNA
cagctccagaccatttgccgagaaatacttccctaacggagtaagccgctctgcgctgctcaaggcaccagtggt

SEQ ID NO: 635216 - DNA, 75 bp, synthetic construct
  source 1..75: mol_type = other DNA
tctgtaaatatttccagtggacgtcctgttgttgtgctgtcagatgataagcagattaatcctgataatatatca

SEQ ID NO: 635217 - DNA, 75 bp, synthetic construct
  source 1..75: mol_type = other DNA
gccggtgcagaagtgggctaccgctatcatgtcactgaggatgcctggattgagccacaggctgagctggtttac

SEQ ID NO: 635218 - DNA, 75 bp, synthetic construct
  source 1..75: mol_type = other DNA
taagaaagatacaaagacgaaaacaaagcgtgttattggtgtacgtgaaacgaagaagcgaaaactaatctacga

SEQ ID NO: 635219 - DNA, 75 bp, synthetic construct
  source 1..75: mol_type = other DNA
tttattccaacctccgcagcacgtctaacaaaacaggggaacataccccagcttaaaagtaatatagagaagggt

SEQ ID NO: 635220 - DNA, 75 bp, synthetic construct
  source 1..75: mol_type = other DNA
tgctgtttctttcgaatcaccagaatatactgctgatgttgatgctattggtactcttcgtcttctagatgctat

SEQ ID NO: 635221 - DNA, 75 bp, synthetic construct
  source 1..75: mol_type = other DNA
cttctataaggaagccaatgatggtgtaagggtaattatgagcggtattcagggaacattcaggataagtagaca

SEQ ID NO: 635222 - DNA, 75 bp, synthetic construct
  source 1..75: mol_type = other DNA
gataaaggagcagtacctttcactcagcgttccattctctttatgtacaagaaagttggtaatggagttcgcagt

SEQ ID NO: 635223 - DNA, 75 bp, synthetic construct
  source 1..75: mol_type = other DNA
atgacaagaataacgggtatagataatgtcacgaactatataaaaacaacaggaacgaagttaggtaaacagttc

SEQ ID NO: 635224 - DNA, 75 bp, synthetic construct
  source 1..75: mol_type = other DNA
cgcgttatttccgtccggcagaagtagaaacattgttgggtgatccagcaaaagcgcatgaaaaacttggctgga

SEQ ID NO: 635225 - DNA, 75 bp, synthetic construct
  source 1..75: mol_type = other DNA
ttgggataatggcgaaacggaaccgctgcttcaagatgacgatcaccaggctgagcttgagagggtatttaaggt

SEQ ID NO: 635226 - DNA, 75 bp, synthetic construct
  source 1..75: mol_type = other DNA
ttaagcagtacaagatggaccttgagtgcgccacagatgttggtcgtcgaggtgtctcatcagagcaagcatggg

SEQ ID NO: 635227 - DNA, 75 bp, synthetic construct
  source 1..75: mol_type = other DNA
gtaaatggtgtgatcaccgttaaacctcactggtgtgcttacaaagacatcagggctgacgaagtgatttccacc

SEQ ID NO: 635228 - DNA, 75 bp, synthetic construct
  source 1..75: mol_type = other DNA
cgggatgaaaaatggtcgcccaagaattgcatatgtaaatcaatattccggaacaccgaatattaaaaaaattac

SEQ ID NO: 635229 - DNA, 75 bp, synthetic construct
  source 1..75: mol_type = other DNA
taatggactagctgactggcatgattattacgacaggctgaataacctggcacggaaacccaacatcgaacatac

SEQ ID NO: 635230 - DNA, 75 bp, synthetic construct
  source 1..75: mol_type = other DNA
tacaggcactggatgcggtaatacgtgaacgaggatttgagcgcgcagcacagaaattgtgcattacgcaatcag

SEQ ID NO: 635231 - DNA, 75 bp, synthetic construct
  source 1..75: mol_type = other DNA
acttttaaagccaaactggaagagttatgggcacgagcgctgggcgatgaaagagaagagattggccgggtgatt

SEQ ID NO: 635232 - DNA, 75 bp, synthetic construct
  source 1..75: mol_type = other DNA
cgcctgccgcttacgcagcgaagatatagaagaagtcatcctcaccgatatctgcccttactctttaggcgttga

SEQ ID NO: 635233 - DNA, 75 bp, synthetic construct
  source 1..75: mol_type = other DNA
tgccgctggtgcagcgaatcgccgtgcgtctgtttggcaaattaccgtatcaaagttacgatccgagcaccattg

SEQ ID NO: 635234 - DNA, 75 bp, synthetic construct
  source 1..75: mol_type = other DNA
ctgttacaaaacgacgactatcaggctgaacttgaaaatgtgtttagtgctgatgaatcccctaatgatttttat

SEQ ID NO: 635235 - DNA, 75 bp, synthetic construct
  source 1..75: mol_type = other DNA
tactgcttttagccttacggtataagaagttgctttccctttttaaccggttacgcaagcaggttcacaacaaat

SEQ ID NO: 635236 - DNA, 75 bp, synthetic construct
  source 1..75: mol_type = other DNA
accgatttgatgcggcgttgcagtcaaacgatatggcccgcgtcgatgaggtcaggcggcgggcgagcgtttatt

SEQ ID NO: 635237 - DNA, 75 bp, synthetic construct
  source 1..75: mol_type = other DNA
gaagtttatgacgatctccatcttgagagcatcgagggtcataaaactttggttcaagttaaacattcaattaac

SEQ ID NO: 635238 - DNA, 75 bp, synthetic construct
  source 1..75: mol_type = other DNA
ggtgatgtcattgttgctgttgatcctcgttatttccgaccagctgaagttgatactttgcttggagatccgagc

SEQ ID NO: 635239 - DNA, 75 bp, synthetic construct
  source 1..75: mol_type = other DNA
agacgcgtaaggaatggctgtatcaattaaggaagtgcacctcaagagaaactcttgaaaaagtcattgaaatta

SEQ ID NO: 635240 - DNA, 75 bp, synthetic construct
  source 1..75: mol_type = other DNA
gagagtgattttcatacgctctcgtatggcttccggcctgaacgcagcgtccatcacgcgatccgcacggtgaaa

SEQ ID NO: 635241 - DNA, 75 bp, synthetic construct
  source 1..75: mol_type = other DNA
gggacatgctaaagattatgtccgtatgcagtggatgatgcttcaacaagaacgcccggaagattttgtaatcgc

SEQ ID NO: 635242 - DNA, 75 bp, synthetic construct
  source 1..75: mol_type = other DNA
tgggggcatgcgaaagattatgttcgtatgcaatggatgatgcttcaacaagaccagccagaagactttgttatt

SEQ ID NO: 635243 - DNA, 75 bp, synthetic construct
  source 1..75: mol_type = other DNA
cgcagcgagaaactacaccgttctatcctcgttcgccttatgctgttgctaagatgtatgcatactggattacta

SEQ ID NO: 635244 - DNA, 75 bp, synthetic construct
  source 1..75: mol_type = other DNA
tgacccgggctgtgaaaaactgctggcggaatgacagcgaaaaaactgcggatgaggtgattgagcattatgcat

SEQ ID NO: 635245 - DNA, 75 bp, synthetic construct
  source 1..75: mol_type = other DNA
tggccaccctcaggcaacggcggacgacattcgccgtgcggcagctgctgcaggagccagcgattttattaacgc

SEQ ID NO: 635246 - DNA, 75 bp, synthetic construct
  source 1..75: mol_type = other DNA
gggcggatcgatctcggtaccttcgttgcattcgccagcttcctcgcgatgctgaccgggccaacccgcgtactg

SEQ ID NO: 635247 - DNA, 75 bp, synthetic construct
  source 1..75: mol_type = other DNA
tacgatcaaaaatgtctttaccaaaagggcatcgagggcaaaaaatacgtagaccacagtgtatacccgataatc

SEQ ID NO: 635248 - DNA, 75 bp, synthetic construct
  source 1..75: mol_type = other DNA
gcatcaggcgttcctcgccagaatgtggagatcatctatgatgttggcgtatcgactttgtataagaagtttccg

SEQ ID NO: 635249 - DNA, 75 bp, synthetic construct
  source 1..75: mol_type = other DNA
ggccttatcgttcctgctggatgcgtgaagggcgcgggtgttgcgaaaaacatggcgaataccacacacatattc

SEQ ID NO: 635250 - DNA, 75 bp, synthetic construct
  source 1..75: mol_type = other DNA
acgtcgaagtggacgtcaacagtggcccttgttatgggcgtaccgtctgcgacgagctgggcgttcttggcaagc

SEQ ID NO: 635251 - DNA, 75 bp, synthetic construct
  source 1..75: mol_type = other DNA
cgtaccgtctgcgacgagctgggcgttcttggcaagcccgccaataccaaagtcggcatcactattgataccgac

SEQ ID NO: 635252 - DNA, 75 bp, synthetic construct
  source 1..75: mol_type = other DNA
gaaaatccgtgaaattgtgctaatgggcggcgcttacggtacaggcaacttcaccccatctgccgagttcaacat

SEQ ID NO: 635253 - DNA, 75 bp, synthetic construct
  source 1..75: mol_type = other DNA
gtttctcgatatttttaaccaccgctttatcacccagtattaccgcatctggcgcaaatataactacccggcgtc

SEQ ID NO: 635254 - DNA, 75 bp, synthetic construct
  source 1..75: mol_type = other DNA
cgacatcatgaacttcactctcaaaacgcagttcgaaaactatggcctggctggcggtccggtgcatgacgccac

SEQ ID NO: 635255 - DNA, 75 bp, synthetic construct
  source 1..75: mol_type = other DNA
aaaccggactggatggcccggtattcgagccactgacctgtaaagctgaaagcacccatgcggtgaaatacatca

SEQ ID NO: 635256 - DNA, 75 bp, synthetic construct
  source 1..75: mol_type = other DNA
ctttgctgacccggaagccgcacgcgtggtgttcacctccggcgttccgttggtgatgatgggcctcgatctcac

SEQ ID NO: 635257 - DNA, 75 bp, synthetic construct
  source 1..75: mol_type = other DNA
gatatgcgtaaatccttcaacggtctgggagaacaggtacaacatgtgctggatgagaaccccttctcaggtcac

SEQ ID NO: 635258 - DNA, 75 bp, synthetic construct
  source 1..75: mol_type = other DNA
tgttcaccaaacgcctggaggaaggcctgtttatctggcctgcggtgcgtgacggtaaggtatccattacccgct

SEQ ID NO: 635259 - DNA, 75 bp, synthetic construct
  source 1..75: mol_type = other DNA
ctggcggcccggtgcacgacgccacctgcatcggttatctgatcaaccctgatggcattaaaacccaggagatgt

SEQ ID NO: 635260 - DNA, 75 bp, synthetic construct
  source 1..75: mol_type = other DNA
aacactcatgcggtgaaatatatcatcgataccctgatggcaagcgatggcgatatcactctggtgccggttggt

SEQ ID NO: 635261 - DNA, 75 bp, synthetic construct
  source 1..75: mol_type = other DNA
attgtgatccgggtcatgatgatgctattgccataatgatggccgcgaaacatccggcaatagatttattaggca

SEQ ID NO: 635262 - DNA, 75 bp, synthetic construct
  source 1..75: mol_type = other DNA
tgcgatgacaacacacaggattatcccacgaaaactgacctgggcagttgcagccatttactggtatcaacggag

SEQ ID NO: 635263 - DNA, 75 bp, synthetic construct
  source 1..75: mol_type = other DNA
aaaccggagatgatgccagttagctgttacctctgcattttcttaaacgttggtttgggagaaggctcagcgtta

SEQ ID NO: 635264 - DNA, 75 bp, synthetic construct
  source 1..75: mol_type = other DNA
tctgtgggcctggcggcagaagtgttcgaaggtagcattactgacctgccgaacccgaaagcgaagaagaagtaa

SEQ ID NO: 635265 - DNA, 75 bp, synthetic construct
  source 1..75: mol_type = other DNA
tagcaaaagttatcgaagaagccaaagcactggctgaacacggtatcgttttcggtgagccgaaaaccgatatcg

SEQ ID NO: 635266 - DNA, 75 bp, synthetic construct
  source 1..75: mol_type = other DNA
gatcgctggtgagcttcgcacttctgtttgttttgcaatcagaatggggagtttcgactacgccgcgcagttccc

SEQ ID NO: 635267 - DNA, 75 bp, synthetic construct
  source 1..75: mol_type = other DNA
gcatggatgaaagataacaatatcgggcaaatagaactactcaataagcagttgacggagagtgtcccatacatg

SEQ ID NO: 635268 - DNA, 75 bp, synthetic construct
  source 1..75: mol_type = other DNA
tttgccccgcgtggcaaggctggctgaccttggtgagaacaacagcctgatgaatgcacagcttgcccgggtagg

SEQ ID NO: 635269 - DNA, 75 bp, synthetic construct
  source 1..75: mol_type = other DNA
aagctggcgtagaagtggacgatcgtggctttatccgcgtggataaacaattgcgtaccaacgtaccgcacatct

SEQ ID NO: 635270 - DNA, 75 bp, synthetic construct
  source 1..75: mol_type = other DNA
atcccttctaaagcactgctgcacgtagcaaaagttatcgaagaagccaaagcgctggctgaacacggtatcgtc

SEQ ID NO: 635271 - DNA, 75 bp, synthetic construct
  source 1..75: mol_type = other DNA
ctgtctgtcatctggcgcggagagtattgggttctggatcttgctgacagcaatggttccgccattatctcaggc

SEQ ID NO: 635272 - DNA, 75 bp, synthetic construct
  source 1..75: mol_type = other DNA
gccgatgctggcgcacaaaggtgttcatgaaggtcacgttgccgctgaagttattgccggtaagaaacattactt

SEQ ID NO: 635273 - DNA, 75 bp, synthetic construct
  source 1..75: mol_type = other DNA
catcgttaaagtcttcaccaagcgtatcagcaaaaaattcaacctgatgctggaaaccaaagttaccgccgttga

SEQ ID NO: 635274 - DNA, 75 bp, synthetic construct
  source 1..75: mol_type = other DNA
actgccaccttcccgtgggctgcttctggtcgtgcgatcgcttccgactgcgcagacggtatgaccaagctgatt

SEQ ID NO: 635275 - DNA, 75 bp, synthetic construct
  source 1..75: mol_type = other DNA
gtcgtaagcgtggatgtgcagatacaaccacagacagttctggttactgtgatacacatcgtggcgaaggatggg

SEQ ID NO: 635276 - DNA, 75 bp, synthetic construct
  source 1..75: mol_type = other DNA
gcgcggttaacccggatgagttttacgtgcataaaccgacgctggcggcgaatcgcccggctatcgtgcgccgta

SEQ ID NO: 635277 - DNA, 75 bp, synthetic construct
  source 1..75: mol_type = other DNA
acgcggccaggtcatggaacgttataccctgcattcacagggtaagattatcgctgaaggtcgcgctatcggtca

SEQ ID NO: 635278 - DNA, 75 bp, synthetic construct
  source 1..75: mol_type = other DNA
gatggaagaggggatcgatagcctgtctctgaacccggacaccgtggtgcaaacctggttaagcctggctgaact

SEQ ID NO: 635279 - DNA, 75 bp, synthetic construct
  source 1..75: mol_type = other DNA
catcaccgaaggtcttccgcgtgaaatcgagttgcgccagaaacaatacgagtactatcgtgatttactgttcag

SEQ ID NO: 635280 - DNA, 75 bp, synthetic construct
  source 1..75: mol_type = other DNA
aaaggtgcgggtgtgcctcatgtccgagttaaagagtttgaaacctatgatatacctataccgcctatcaccgaa

SEQ ID NO: 635281 - DNA, 75 bp, synthetic construct
  source 1..75: mol_type = other DNA
ctgtacgacaaaatactcaaagcagaacaggcccttgaccggaatattgcccgtatcgagtcaattgaacgctca

SEQ ID NO: 635282 - DNA, 75 bp, synthetic construct
  source 1..75: mol_type = other DNA
tttggcagaaacgaaacggactcgtggttccagacttttgccaccttcaaatgctttttctcagcgtaacaccca

SEQ ID NO: 635283 - DNA, 75 bp, synthetic construct
  source 1..75: mol_type = other DNA
actcaagattttcttcatcagcaaccaaaacatgattttgataaaacaatatcatatgactctgaaaagggtagc

SEQ ID NO: 635284 - DNA, 75 bp, synthetic construct
  source 1..75: mol_type = other DNA
tggtctggagttggagaagtcggcgtttgggagatataacatagacaactctataaatgctaacttccgttatta

SEQ ID NO: 635285 - DNA, 75 bp, synthetic construct
  source 1..75: mol_type = other DNA
cgtggtgtctgaactgttcgatgagcgcaacgatgcggtgaaagcactgctgtcgatggcgattcgtgccgcgaa

SEQ ID NO: 635286 - DNA, 75 bp, synthetic construct
  source 1..75: mol_type = other DNA
tgcctgccaaatgaaggcgtaggtctggcgcgcctggaatttatcatcaaccgcatgattggcgttcacccacgc

SEQ ID NO: 635287 - DNA, 75 bp, synthetic construct
  source 1..75: mol_type = other DNA
ggccttggtgaaatggtcgtgcagggtgcggttaacccagatgagttttacgtgcataaaccgacactggcggcg

SEQ ID NO: 635288 - DNA, 75 bp, synthetic construct
  source 1..75: mol_type = other DNA
agaatttccctatccccattccctgcccaggcaacccccaaaaatcccttgccatccagtctgaaatcgttcgaa

SEQ ID NO: 635289 - DNA, 75 bp, synthetic construct
  source 1..75: mol_type = other DNA
gacagcttcgcgtatatttgtgaggtggtctatttcccccgcacgccgtcggtgtcgacgacggggattattgag

SEQ ID NO: 635290 - DNA, 75 bp, synthetic construct
  source 1..75: mol_type = other DNA
tatttcccccgcacgccgtcggtgtcgacgacggggatcattgaggtgattagggggaattatataaagtactaa

SEQ ID NO: 635291 - DNA, 75 bp, synthetic construct
  source 1..75: mol_type = other DNA
tgccaaaaagggcagggcaccggtttaccctcaggatgaccgcatggcgattatcgccgggctggcgtgcgtgga

SEQ ID NO: 635292 - DNA, 75 bp, synthetic construct
  source 1..75: mol_type = other DNA
tttatctggcctgcggtacgtgacggcaaggtacccgttctgaaaaactgcagcgtgaggttgaacaggctgagg

SEQ ID NO: 635293 - DNA, 75 bp, synthetic construct
  source 1..75: mol_type = other DNA
tcatcccgaaagcgcatggcggaacagacgcagacagcaacctgcggagtctgtgctggccctgccacaaagaga

SEQ ID NO: 635294 - DNA, 75 bp, synthetic construct
  source 1..75: mol_type = other DNA
ccggttgcgccttggctataccttctccgccatgctgttacagccagtggtggtggcggtctttgtcggcctgct

SEQ ID NO: 635295 - DNA, 75 bp, synthetic construct
  source 1..75: mol_type = other DNA
cgcctttgaccatcttgacgatatgcaccaggcctttttgcagcaaaacttcgatctgcctccaggcagcgtacc

SEQ ID NO: 635296 - DNA, 75 bp, synthetic construct
  source 1..75: mol_type = other DNA
ggacaatattctgttggttgattttctgaacaaaccctccggagaaaaactggatattgaactggtgagtgcacc

SEQ ID NO: 635297 - DNA, 75 bp, synthetic construct
  source 1..75: mol_type = other DNA
cagccgtatgctgatgtccgttggcctgaatgcagaaatcagggataacgtccgctttggactggagtttgagaa

SEQ ID NO: 635298 - DNA, 75 bp, synthetic construct
  source 1..75: mol_type = other DNA
tggcgaaaccttcgttacccgcaaaatcacccgcgcaatcgccaacatcgcccaggggctggagtcgtgcctgta

SEQ ID NO: 635299 - DNA, 75 bp, synthetic construct
  source 1..75: mol_type = other DNA
acaacctgggcgcaatgagccacgttgcggtttcttttgagtcaccggaatataccgctgacgtcgacgcgatgg

SEQ ID NO: 635300 - DNA, 75 bp, synthetic construct
  source 1..75: mol_type = other DNA
tgcgtcagttcgtggaaatggcggcggcacagctgggcatcaaactgcgctttgaaggcacgggtgttgaagaga

SEQ ID NO: 635301 - DNA, 75 bp, synthetic construct
  source 1..75: mol_type = other DNA
gcagcgcatccgatatctggcgcgaagtggcctcgctgtttcgcccacccagccggttaccagtagcggaagcca

SEQ ID NO: 635302 - DNA, 75 bp, synthetic construct
  source 1..75: mol_type = other DNA
ttcgtgaaggtgaacgggcggcggcggacggcagtatcaccggaacgccacgaaattcccggattgcgtcatttt

SEQ ID NO: 635303 - DNA, 75 bp, synthetic construct
  source 1..75: mol_type = other DNA
gcacaagcccaacaaaccgtgcggcggccaagctgttattgctgacgatggtgcgcaagagcgagctgaccaatg

SEQ ID NO: 635304 - DNA, 75 bp, synthetic construct
  source 1..75: mol_type = other DNA
acggctgcaacgttaccagatccaaaacgtggtgctggataccgttatgctggctaaaagcggtgatccgctgct

SEQ ID NO: 635305 - DNA, 75 bp, synthetic construct
  source 1..75: mol_type = other DNA
tcggtgtatcgcattgagcctgactttgttgccgcacaactcgactcagtgttcagcgatgtgcgaatcgatacc

SEQ ID NO: 635306 - DNA, 75 bp, synthetic construct
  source 1..75: mol_type = other DNA
ggacggcagtatcaccggaacgccacgaaattcccggattgcgtcattttggatggaggggccggctgcggcgtt

SEQ ID NO: 635307 - DNA, 75 bp, synthetic construct
  source 1..75: mol_type = other DNA
gcatctggctcgtggccggcgttaccgatatgcgtaaatccttcaacggtctgggagaacaggtacaacatgtgc

SEQ ID NO: 635308 - DNA, 75 bp, synthetic construct
  source 1..75: mol_type = other DNA
gctgcgtcagcgaattaatgaggctgcgcaggcggtcatggtggcctattccatgggaaatgaccttgaacaact

SEQ ID NO: 635309 - DNA, 75 bp, synthetic construct
  source 1..75: mol_type = other DNA
tccggtgaccggtaaacaggcgctgtttgtgaatgaaggttttaccacacgaattgttgatgtcagcgagaaaga

SEQ ID NO: 635310 - DNA, 75 bp, synthetic construct
  source 1..75: mol_type = other DNA
atggcagtgattgacctttcgcagttacctgcgccgcaaattgtggatgtgccggactttgagacgctgcttgcc

SEQ ID NO: 635311 - DNA, 75 bp, synthetic construct
  source 1..75: mol_type = other DNA
gtgcaaccagtccggctcctgcagaggtggtgcttacggtcctaagccgtgaaggcgacggaacagcagaaaaag

SEQ ID NO: 635312 - DNA, 75 bp, synthetic construct
  source 1..75: mol_type = other DNA
gtggctgaccgtctgacggttcgcagcgcagaaatcatcccgtaccgtgtggaagccaccatttttctctatccg

SEQ ID NO: 635313 - DNA, 75 bp, synthetic construct
  source 1..75: mol_type = other DNA
ggcgttagcccaggccgacacgctggaagtcggtcacgggattggtccggttcaccacttccacgcctggtggtg

SEQ ID NO: 635314 - DNA, 75 bp, synthetic construct
  source 1..75: mol_type = other DNA
caaaggtaactgaggttttcgctcatctgaacgaaactccagacaaccgcgccctgtattcagagttagtgaacg

SEQ ID NO: 635315 - DNA, 75 bp, synthetic construct
  source 1..75: mol_type = other DNA
agcactactctgaaaagctatacgcattaccagaaattaatattgctgaaatgctcaaacagtttgtcgttacac

SEQ ID NO: 635316 - DNA, 75 bp, synthetic construct
  source 1..75: mol_type = other DNA
attgcaaagccgcatgcaggatgaccttgctaaattagagtcaggacagaaagttaacccgatctcggaacgtga

SEQ ID NO: 635317 - DNA, 75 bp, synthetic construct
  source 1..75: mol_type = other DNA
ggacaaagtaaggtggctgacatgtgttcagtcaaagtaaatatcgtggagcctcgcattgggaccgcgcctgat

SEQ ID NO: 635318 - DNA, 75 bp, synthetic construct
  source 1..75: mol_type = other DNA
taaatcacaagctgagcttgaagtgaagtggtcaacaaaaactggccaccgagttagagttttttccagtatcga

SEQ ID NO: 635319 - DNA, 75 bp, synthetic construct
  source 1..75: mol_type = other DNA
ttatcgaacacagaccaagtgcacttgatattcacgaattaactttgcgtgaatcttttgatagagcttggcggg

SEQ ID NO: 635320 - DNA, 75 bp, synthetic construct
  source 1..75: mol_type = other DNA
agcgtgcagggatagatattcgtgacgttaacgatggtgccaatgcgtatctgaaaaacctgtcagcagatcaga

SEQ ID NO: 635321 - DNA, 75 bp, synthetic construct
  source 1..75: mol_type = other DNA
gcggatccgggggcatggctgcaacaaaactctccggttgtgcaggctgcattccagcagtacctgaatgaccct

SEQ ID NO: 635322 - DNA, 75 bp, synthetic construct
  source 1..75: mol_type = other DNA
gtgaaacgaattaacgctctgacaattgcaggcactgatcccagtggtggcgcaggaattcaggcagatctcaaa

SEQ ID NO: 635323 - DNA, 75 bp, synthetic construct
  source 1..75: mol_type = other DNA
ctgaaaaacctgtcagccgatcagatcatgccgcttatcggcgatgcccgtctaccggatgaggttaaccgcgag

SEQ ID NO: 635324 - DNA, 75 bp, synthetic construct
  source 1..75: mol_type = other DNA
tattcagcattttaccggtcgcactgcactgaaatttttgcttgcggccttgttaatcacacctctggcacgcta

SEQ ID NO: 635325 - DNA, 75 bp, synthetic construct
  source 1..75: mol_type = other DNA
caacgatctggcgaaactgggaacaaccaaccgatcagtatggaacagcattaccaagttcattgatactccggt

SEQ ID NO: 635326 - DNA, 75 bp, synthetic construct
  source 1..75: mol_type = other DNA
tccgaacctctcgtcaaactgctggaggaaaatgcttatcgtgagcttatctggcgtcagcgtgtgaatgaggcc

SEQ ID NO: 635327 - DNA, 75 bp, synthetic construct
  source 1..75: mol_type = other DNA
ttgcaggaaaggcgattgcgttgccaccggttaaagaaaattatccgggcgagcagtttgttgaatggcacagaa

SEQ ID NO: 635328 - DNA, 75 bp, synthetic construct
  source 1..75: mol_type = other DNA
tggatgaaaatatgcgtgtggtggtttccggtgcggtaaatggtggtggagtggtacagcgactgttctgggatt

SEQ ID NO: 635329 - DNA, 75 bp, synthetic construct
  source 1..75: mol_type = other DNA
tcgcgaaaaatcctccgttgctacatccggtggtgcgaacgcatccggtgagcggtaaacaggcgctgtttgtga

SEQ ID NO: 635330 - DNA, 75 bp, synthetic construct
  source 1..75: mol_type = other DNA
ctgactatcaccccggcagatgattcgaccatcccgccgacaccggcagtgatggagtctgacaccgattatcgt

SEQ ID NO: 635331 - DNA, 75 bp, synthetic construct
  source 1..75: mol_type = other DNA
gaacgcaaggcgacactaatttccctttacccggaagaccagcaggaggcggtcgcccgtaccctgacgctggaa

SEQ ID NO: 635332 - DNA, 75 bp, synthetic construct
  source 1..75: mol_type = other DNA
atgatctcgctcccatcagacactcgaatctcgctggttgccggcgttactgatatgcgtaaatccttcaacggt

SEQ ID NO: 635333 - DNA, 75 bp, synthetic construct
  source 1..75: mol_type = other DNA
gcgcatcgcggctatattctcgataaagagcagaccgaaggcgaactgcagttccgcagccaactggattacgtt

SEQ ID NO: 635334 - DNA, 75 bp, synthetic construct
  source 1..75: mol_type = other DNA
agaagagagccgcttcctgattgatgcgcaactgcgtaaagcaggctggcaggccgatagcaaaaccctgcgctt

SEQ ID NO: 635335 - DNA, 75 bp, synthetic construct
  source 1..75: mol_type = other DNA
gctgggcctgcgttattatcaggaagatgccgtccgcgcggttgaaaaggcaatcgtcaagggtcaacaagagat

SEQ ID NO: 635336 - DNA, 75 bp, synthetic construct
  source 1..75: mol_type = other DNA
gctcacaaggctctgggcgatgttttctggtaaagagtaccagatactgcttcctggtgaaattcacattaaaga

SEQ ID NO: 635337 - DNA, 75 bp, synthetic construct
  source 1..75: mol_type = other DNA
cgaccggtaccggtaaaacccgtacggcaatcgccatgatgttccgcctgatccagtcccagcgttttaaacgca

SEQ ID NO: 635338 - DNA, 75 bp, synthetic construct
  source 1..75: mol_type = other DNA
gaaccgcaaaaacagaatcagtggtttgccgataaccctggcatgagcgagctgggcctgcgttattatcaggaa

SEQ ID NO: 635339 - DNA, 75 bp, synthetic construct
  source 1..75: mol_type = other DNA
gcctgcatgttaagccacagcgccgggacagacctggacaacctcgcgggcaatatgaacacaaagcgcctggtt

SEQ ID NO: 635340 - DNA, 75 bp, synthetic construct
  source 1..75: mol_type = other DNA
aaatgatattgcgatttgggataaccgcgtgactcagcactatgccaatgcggattacctgccacagcggcggat

SEQ ID NO: 635341 - DNA, 75 bp, synthetic construct
  source 1..75: mol_type = other DNA
ttgaataccagataaacgccacgctttacctttaccctggtcctgaaagcgaacccattcgcgctgccgccgtga

SEQ ID NO: 635342 - DNA, 75 bp, synthetic construct
  source 1..75: mol_type = other DNA
tcagagccgattgttaagctgctgcaggaaaacgcctaccgtgaaattatctggcgtcagcgggtgaacgaagcc

SEQ ID NO: 635343 - DNA, 75 bp, synthetic construct
  source 1..75: mol_type = other DNA
ggtggtactgactgtccttagccgtgaaggcgacggaacagcagaaaaagacctgctggatgtggtggaaaaagc

SEQ ID NO: 635344 - DNA, 75 bp, synthetic construct
  source 1..75: mol_type = other DNA
tttttgccgcgctgcatgttgagggggttcaacgtgtggagctggcttcaccgctggcggatgtggtcctgaaca

SEQ ID NO: 635345 - DNA, 75 bp, synthetic construct
  source 1..75: mol_type = other DNA
ccgctggaggatgtggtgctggataagacgcaggcggcgtcctgtacagagtggagcgtcaccaacgggggcaca

SEQ ID NO: 635346 - DNA, 75 bp, synthetic construct
  source 1..75: mol_type = other DNA
gccggataacgacaactggcataccgatgtgacatttattgaaacgccacccgcaggggcgattctggcggcgaa

SEQ ID NO: 635347 - DNA, 75 bp, synthetic construct
  source 1..75: mol_type = other DNA
acgctatggaccagtggtattgcggcgtatgaggcgctctctgttcccttccgtcagttgttgagcgggctgcgc

SEQ ID NO: 635348 - DNA, 75 bp, synthetic construct
  source 1..75: mol_type = other DNA
cgctgccaactacaacgtgaaccgcctgacggtgacgcctgctgctgatgacgctgtgccgcccgttgcagctgt

SEQ ID NO: 635349 - DNA, 75 bp, synthetic construct
  source 1..75: mol_type = other DNA
ccgctggccgacatcgtgcttaacaatacgcaggcgtctttctgcaccgaatacagcgtcgtgaccggaggctcg

SEQ ID NO: 635350 - DNA, 75 bp, synthetic construct
  source 1..75: mol_type = other DNA
gccggactttgaggcgctgcttgccgaacgcaaggccgaatttgttgcgcttcatccgaaagatgagcaggaagc

SEQ ID NO: 635351 - DNA, 75 bp, synthetic construct
  source 1..75: mol_type = other DNA
cgatgggcggcgatctggaccagctcgctgccaactacaacgtgaaacgcctgacggtgacgactgctgatgatg

SEQ ID NO: 635352 - DNA, 75 bp, synthetic construct
  source 1..75: mol_type = other DNA
attgcctctaacattcaattcacccagcagtatctgaacgaaaatactccagaattgatcgtaaggccagctgat

SEQ ID NO: 635353 - DNA, 75 bp, synthetic construct
  source 1..75: mol_type = other DNA
accacggaagaagagttcgccacgctgatggctatcttcaacaaagaagataaagaagtttatattgccgattac

SEQ ID NO: 635354 - DNA, 75 bp, synthetic construct
  source 1..75: mol_type = other DNA
acgcgttcaggggttgtccgaagttttcgaacgctacgtgaaaaaccgcattattgctgaaagcatcagcttgcc

SEQ ID NO: 635355 - DNA, 75 bp, synthetic construct
  source 1..75: mol_type = other DNA
ctcgatcatcgccatcactgccctctcggtaatgatgtccgttgattttatggtgccggactcacatacgctgct

SEQ ID NO: 635356 - DNA, 75 bp, synthetic construct
  source 1..75: mol_type = other DNA
ctgtacatgaaacgccactcagtctacggcacattgattggttcgctctccggcgctgcgccgtcggtgattggc

SEQ ID NO: 635357 - DNA, 75 bp, synthetic construct
  source 1..75: mol_type = other DNA
gatggaaaggacgaagaatcgggtgctggttaaaggcctgatctctcctgctgtctcgctggtgtacgccacctt

SEQ ID NO: 635358 - DNA, 75 bp, synthetic construct
  source 1..75: mol_type = other DNA
ttctgctctggaaagtggagactcaaaaaaggtagtgcatttgttgactgaaggacgaaaactcctgcggacggg

SEQ ID NO: 635359 - DNA, 75 bp, synthetic construct
  source 1..75: mol_type = other DNA
ggagcgaaagcgttgctcgaacagttagggctgggtaaacgtcttgatcatcttccggcacagctttccggcggc

SEQ ID NO: 635360 - DNA, 75 bp, synthetic construct
  source 1..75: mol_type = other DNA
tatgttaattcctacccttaacgcgctggaaaacgtcgagcttccggcgctgctgcgcggtgagagtagcgcgga

SEQ ID NO: 635361 - DNA, 75 bp, synthetic construct
  source 1..75: mol_type = other DNA
ggcaataagcggcgacgcggcgttttatggtctgcaacctgtagacagcgacctgcaagccttcgcatcccatca

SEQ ID NO: 635362 - DNA, 75 bp, synthetic construct
  source 1..75: mol_type = other DNA
tacggcctgcaaccggtagatagcgatctgcacgcgtttgctgcacatcagtcgttgttgaaggcctacgaaaag

SEQ ID NO: 635363 - DNA, 75 bp, synthetic construct
  source 1..75: mol_type = other DNA
gatgtgtttactccgccaaccttcgatgatgaagaagtcgctgaacataccaacctcgaaacgcactttatcgat

SEQ ID NO: 635364 - DNA, 75 bp, synthetic construct
  source 1..75: mol_type = other DNA
cactcttatgccatcgccattttccgctttaaggattatcaggcggcaaacattccggtactgccggtggtgaaa

SEQ ID NO: 635365 - DNA, 75 bp, synthetic construct
  source 1..75: mol_type = other DNA
atgacggatgaggtaaaaagtgtggctataaccaatgccaggaaattgtgtcgcgcagcattggaaaactcaacg

SEQ ID NO: 635366 - DNA, 75 bp, synthetic construct
  source 1..75: mol_type = other DNA
ggcctgggcaaacagtcttatgtttccttcccggctggccctgaaggcccggcagaaattctgattatggatgcc

SEQ ID NO: 635367 - DNA, 75 bp, synthetic construct
  source 1..75: mol_type = other DNA
ctatagccaatgcccggaacctatgtcgtgctgcattaacagaattgcaagaaaacaccacggaagaagtggaaa

SEQ ID NO: 635368 - DNA, 75 bp, synthetic construct
  source 1..75: mol_type = other DNA
gcctgcatacccaacaaaatacccgttcgctggtgtttgatctcggtggcggcacgtttgacgttacggtgcttg

SEQ ID NO: 635369 - DNA, 75 bp, synthetic construct
  source 1..75: mol_type = other DNA
tcattaaaagaagatgccgaagaatttctgcaacgtccgattaaagatgtggtgatctccgttccggcttatttc

SEQ ID NO: 635370 - DNA, 75 bp, synthetic construct
  source 1..75: mol_type = other DNA
actgaagaagtgagcaaaaaacatggtgtggctatctggcgcacaatggatactggcatgcgcaaattcattact

SEQ ID NO: 635371 - DNA, 75 bp, synthetic construct
  source 1..75: mol_type = other DNA
gcatcatgctggttgtggcacacaccgccggcgcggcgcagggtgatgataccgatctgcagcagatttataccg

SEQ ID NO: 635372 - DNA, 75 bp, synthetic construct
  source 1..75: mol_type = other DNA
atagcggcgctgcaatcctgctggctatcttcagcctgtggcaaatgccccactcttatgccatcgccattttcc

SEQ ID NO: 635373 - DNA, 75 bp, synthetic construct
  source 1..75: mol_type = other DNA
ggcggctacgctgggtataaatatctggtggtcgccgctgcggtgagcgtctggtggttaggcatggctctgcgc

SEQ ID NO: 635374 - DNA, 75 bp, synthetic construct
  source 1..75: mol_type = other DNA
gttattcacggccatccgccaccaatgaagacgttgaaattgcctcacagcgggcagggctgtatgagatggtgt

SEQ ID NO: 635375 - DNA, 75 bp, synthetic construct
  source 1..75: mol_type = other DNA
gaagcctgtggcgtggatgttcgtcatcgccgctctgctgatcgcactcgattctgcggcaggcgtaggggtgct

SEQ ID NO: 635376 - DNA, 75 bp, synthetic construct
  source 1..75: mol_type = other DNA
taaagcagatgcttaacgcattctgtattgatccggcaattggccagccgccagatgcaatgagcgttggccaaa

SEQ ID NO: 635377 - DNA, 75 bp, synthetic construct
  source 1..75: mol_type = other DNA
gggacaaccgctacataatatggacgaagaagcgcgggcaaagttgcgcgcgaagcacgtcggctttgtttttca

SEQ ID NO: 635378 - DNA, 75 bp, synthetic construct
  source 1..75: mol_type = other DNA
caccgtttgagcgcggtgacgaagccgaaggatttttaattgtcactgcagcagcagaccagggtctggtagata

SEQ ID NO: 635379 - DNA, 75 bp, synthetic construct
  source 1..75: mol_type = other DNA
ctgtgtgccagcaaaccagttctcctggcacccggtatcgcgcgcggtgggtaatatcaaaaaccagggagcgga

SEQ ID NO: 635380 - DNA, 75 bp, synthetic construct
  source 1..75: mol_type = other DNA
ctgatgctgatggtctgtgcctgttcaccaaacgcctggaggaaggcctgaaccgccccgggaatcctggagact

SEQ ID NO: 635381 - DNA, 75 bp, synthetic construct
  source 1..75: mol_type = other DNA
gtcgccagaagctgtacgggaatggatgcggcaagaggttggcggtaaagaagcctcagaaatcgcggccagtgg

SEQ ID NO: 635382 - DNA, 75 bp, synthetic construct
  source 1..75: mol_type = other DNA
caccgttcgagcgcggtgacgaagccgaaggatttttgatcgtcactgcagcagcagaccagggtctggtagata

SEQ ID NO: 635383 - DNA, 75 bp, synthetic construct
  source 1..75: mol_type = other DNA
gcagcagaccagggtctggtagatattcatgaccgccgcccgctggtactgtcgccagaagctgcgcgggaatgg

SEQ ID NO: 635384 - DNA, 75 bp, synthetic construct
  source 1..75: mol_type = other DNA
caaactataaaaatataactattgctatgtctaagttcacgggagaaaaaggagttatactaaggcagtattttt

SEQ ID NO: 635385 - DNA, 75 bp, synthetic construct
  source 1..75: mol_type = other DNA
aagcaagtgtaggctaggaaatgatgttatacttgcagctagggtatcaataatgagcggttcgaaacatcatga

SEQ ID NO: 635386 - DNA, 75 bp, synthetic construct
  source 1..75: mol_type = other DNA
tcaagtatgttttttctcctgtttgtttttttatgtattttttatatgtgattaaaattataaattataagacat

SEQ ID NO: 635387 - DNA, 75 bp, synthetic construct
  source 1..75: mol_type = other DNA
tgaacgaggatttgagcgcgcagcacagaaattgtgcattacgcaatcagccgtctcacagcgcattaagcagct

SEQ ID NO: 635388 - DNA, 75 bp, synthetic construct
  source 1..75: mol_type = other DNA
aattggagcagttctttaaagatgatatctggacagaggcctctctacacactttgcctgcttttctgcaggttg

SEQ ID NO: 635389 - DNA, 75 bp, synthetic construct
  source 1..75: mol_type = other DNA
gctttttttgtttatccaaacgttaaggttggtaataattgcactgtagaggaatactctattgtcagcttatgt

SEQ ID NO: 635390 - DNA, 75 bp, synthetic construct
  source 1..75: mol_type = other DNA
gtcgggcaatctgttttgccgatggctggtttgagtggaaaaaagaaggcgacaaaaaacagccttattttatct

SEQ ID NO: 635391 - DNA, 75 bp, synthetic construct
  source 1..75: mol_type = other DNA
tcctcaacggtggtggggacgctggcggggcaggtagtgatgcagggcttcattcgctttcatatcccgctgtgg

SEQ ID NO: 635392 - DNA, 75 bp, synthetic construct
  source 1..75: mol_type = other DNA
tgacggggatcgcgactttcctgattttaatgctgcaacgtcgcgggcaaaaaccgctggagaaagtgattggcg

SEQ ID NO: 635393 - DNA, 75 bp, synthetic construct
  source 1..75: mol_type = other DNA
tcctcaacggtggtggggacactggcggggcaggtggtgatgcagggcttcattcgctttcatatcccgctgtgg

SEQ ID NO: 635394 - DNA, 75 bp, synthetic construct
  source 1..75: mol_type = other DNA
atgcgaacccaaacatttatctagtgggtttagttctgatagtagcaatcgtcgttaagtcatttgtagggcagt

SEQ ID NO: 635395 - DNA, 75 bp, synthetic construct
  source 1..75: mol_type = other DNA
gccttcaacattctgctcggccactacgtacaggttaacctcggcgatctgctgcttaactccgtcatctgcatg

SEQ ID NO: 635396 - DNA, 75 bp, synthetic construct
  source 1..75: mol_type = other DNA
gattctttcagccaaactggggatagccaccggtaaaaatctggcagagcaaatccgcgatcactacccgcgccc

SEQ ID NO: 635397 - DNA, 75 bp, synthetic construct
  source 1..75: mol_type = other DNA
aaagagctgaaggccgcaaaaaaacgcgaactgctgccgttctggttgccgtgggtgaacggtgcgtattaccgt

SEQ ID NO: 635398 - DNA, 75 bp, synthetic construct
  source 1..75: mol_type = other DNA
aaggcgacaaaaagcagccttattttatctatcgtgctgatggacaacctgtttttatggccgcgataggtagca

SEQ ID NO: 635399 - DNA, 75 bp, synthetic construct
  source 1..75: mol_type = other DNA
ttcatgaccgccgcccgctggtactgtcgccagaagctgcgcgggaatggatgcggcaagagattggcggtaaag

SEQ ID NO: 635400 - DNA, 75 bp, synthetic construct
  source 1..75: mol_type = other DNA
gcttgatccaacacagattctggtgatgagtcaggtactgttaagttttggtattgctctggcgctggtgccgct

SEQ ID NO: 635401 - DNA, 75 bp, synthetic construct
  source 1..75: mol_type = other DNA
gcagaaattattgcgatggcaaccgacctggcggaatttattggtgcggcgatcggttttaaactcattcttggt

SEQ ID NO: 635402 - DNA, 75 bp, synthetic construct
  source 1..75: mol_type = other DNA
gcagggattcattcgcttccatatcccgctgtgggtgcgtcgtacagtcaccatgttgccgtcatttattgtcat

SEQ ID NO: 635403 - DNA, 75 bp, synthetic construct
  source 1..75: mol_type = other DNA
gtttgtttataaaggtgtaagagtcagggaaaatctgggggttcctgacacggcaaaaaacaggcgcattgcagg

SEQ ID NO: 635404 - DNA, 75 bp, synthetic construct
  source 1..75: mol_type = other DNA
ctgaccaagatggccgagtcgagccccggcctgacctacgccaagctgtcctggctgcaagcctggcacatccgc

SEQ ID NO: 635405 - DNA, 75 bp, synthetic construct
  source 1..75: mol_type = other DNA
tgttactgaccaccatcctggccgatggcatcaatcttgggctgacaaaaatggccgaatcctgtcctggaacga

SEQ ID NO: 635406 - DNA, 75 bp, synthetic construct
  source 1..75: mol_type = other DNA
ctggcgtaataatcttaagctgggatccggaaaataccgctcattacgtacagtcgataccgctttgtacaaaaa

SEQ ID NO: 635407 - DNA, 75 bp, synthetic construct
  source 1..75: mol_type = other DNA
aatacagcacgctgcgtaaatatgcgccccgtatgttgtctgcattgcagttcagtgcagccccttcagcactgc

SEQ ID NO: 635408 - DNA, 75 bp, synthetic construct
  source 1..75: mol_type = other DNA
aggagaagatccctgggcggcgatagaagacgtacttccctggccggaatttatcaccagtctggaggaaacaca

SEQ ID NO: 635409 - DNA, 75 bp, synthetic construct
  source 1..75: mol_type = other DNA
aggaaccgggagtgcagttttatacgcatatctcagatcaatatagtccgttttataccaaagtaatcagccgtg

SEQ ID NO: 635410 - DNA, 75 bp, synthetic construct
  source 1..75: mol_type = other DNA
ccgtatgactcttcttgcatctcggctggaagaagttaacgcgatggcgcttgccggtgatttgcccgatgtaga

SEQ ID NO: 635411 - DNA, 75 bp, synthetic construct
  source 1..75: mol_type = other DNA
cgctggggttgcctgatggtattgcactttccgttcaccagaacaggttgcttaaactggcgcgtgagggccgga

SEQ ID NO: 635412 - DNA, 75 bp, synthetic construct
  source 1..75: mol_type = other DNA
ccctaaaattactgaaatgctggatgaagtggacggctggactggttttacccgccatttcacacatctcaaaaa

SEQ ID NO: 635413 - DNA, 75 bp, synthetic construct
  source 1..75: mol_type = other DNA
caggcggggctgaataagggtgaggcccgtaatgcccttgcgcgagcggtctttttgcaccgtctgggtgaaata

SEQ ID NO: 635414 - DNA, 75 bp, synthetic construct
  source 1..75: mol_type = other DNA
cactatttatgctggactggttccgtgatcccggtctgcgccgacgcgtgcaggcggggctgaataagggtgagg

SEQ ID NO: 635415 - DNA, 75 bp, synthetic construct
  source 1..75: mol_type = other DNA
tcacttcgcgcacctcaaaaataataacgtcagaccaaaagacggaagactgttgctgaccaccattctggctga

SEQ ID NO: 635416 - DNA, 75 bp, synthetic construct
  source 1..75: mol_type = other DNA
atgaatgtcggttcagaccgtgtttttacccggtttatccccgctggcgcggggaacacatatcagcgttatcaa

SEQ ID NO: 635417 - DNA, 75 bp, synthetic construct
  source 1..75: mol_type = other DNA
gtttatccccgctggcgcggggaacacgaatatccacccgtcctgtattccgccaattgcggtttatccccgctg

SEQ ID NO: 635418 - DNA, 75 bp, synthetic construct
  source 1..75: mol_type = other DNA
ggaactctcagggatttttaattgatgatatgcagataccggtttatccccgcaggcgcggggaactcactggcg

SEQ ID NO: 635419 - DNA, 75 bp, synthetic construct
  source 1..75: mol_type = other DNA
atgcggtttatccccgcaggcgcggggaactcgataaccgcttcgcggtcaatatctgccgcaccggtttatccc

SEQ ID NO: 635420 - DNA, 75 bp, synthetic construct
  source 1..75: mol_type = other DNA
acctgttttcgcaaatctatggactattgctattcggtttatccccgctggcgcggggaacaccccagccccagc

SEQ ID NO: 635421 - DNA, 75 bp, synthetic construct
  source 1..75: mol_type = other DNA
tatccccgctggcgcggggaacactatagagatcgtttttggaatttacagcgaggcggtttatccccgctggcg

SEQ ID NO: 635422 - DNA, 75 bp, synthetic construct
  source 1..75: mol_type = other DNA
aacacggctatgccagcaatattcagcgttgggaacgcggtttatccccgctggcgcggggaacactctaaacat

SEQ ID NO: 635423 - DNA, 75 bp, synthetic construct
  source 1..75: mol_type = other DNA
cccgctggcgcggggaacactgagcgtcggcggctcgctggatttgcgcggcggtttatccccgctggcgcgggg

SEQ ID NO: 635424 - DNA, 75 bp, synthetic construct
  source 1..75: mol_type = other DNA
ggcaaactggatttagtccgtaacgaaacgttgacctgctataacggcattaaaggcgacggttgcggtcattgt

SEQ ID NO: 635425 - DNA, 75 bp, synthetic construct
  source 1..75: mol_type = other DNA
gaatacgtttgtcccagggcgtaatattttgttcctgacactggcggcaatatatgcgtatcaggtaaaagcaga

SEQ ID NO: 635426 - DNA, 75 bp, synthetic construct
  source 1..75: mol_type = other DNA
ctggcgcggggaacactttcgaaaccggcacgccctgggcctccgttgcggtttatccccgctggcgcggggaac

SEQ ID NO: 635427 - DNA, 75 bp, synthetic construct
  source 1..75: mol_type = other DNA
cgcggggaacactgaaggtgctgaagaatatcggattcagaacgcggtttatccccgctggcgcggggaacactg

SEQ ID NO: 635428 - DNA, 75 bp, synthetic construct
  source 1..75: mol_type = other DNA
agcagcggtttatccccgctggcgcggggaactcaagctggctggcaatctctttcggggtgagtccggtttatc

SEQ ID NO: 635429 - DNA, 75 bp, synthetic construct
  source 1..75: mol_type = other DNA
cagacgattttgaaaaatcactccgggataaccagttaccccttgctgttccggccgattgccatgaatacatca

SEQ ID NO: 635430 - DNA, 75 bp, synthetic construct
  source 1..75: mol_type = other DNA
ggtacaaactacactgtatacaatatctataatgatttgagtggtatttgtgaagtttacataagaccatctaca

SEQ ID NO: 635431 - DNA, 75 bp, synthetic construct
  source 1..75: mol_type = other DNA
tacacacagccgcaccagttcgcgcccggttccgtcttccacctgctcgagcccgatattaatcaggagctttac

SEQ ID NO: 635432 - DNA, 75 bp, synthetic construct
  source 1..75: mol_type = other DNA
aagggctcggcaattttaagaacctgtttttctacgcgccgaacggtaaagcagacggaattaaaatcgtaccac

SEQ ID NO: 635433 - DNA, 75 bp, synthetic construct
  source 1..75: mol_type = other DNA
tgcacttacaattactcccactcttaagtggcgttcaaagggtaacattaaacgaaattagtgcgttatatactg

SEQ ID NO: 635434 - DNA, 75 bp, synthetic construct
  source 1..75: mol_type = other DNA
aagccggtcgtggaagaaaaagcagcgccaacgggtaaagcctatgttgtgcaactgggcgcgctgaaaaatgcc

SEQ ID NO: 635435 - DNA, 75 bp, synthetic construct
  source 1..75: mol_type = other DNA
tagtaggcacaatagtgctggtggcgctgggggtgattgtgcttccggggctgctcgacgggcagaaaaaacatt

SEQ ID NO: 635436 - DNA, 75 bp, synthetic construct
  source 1..75: mol_type = other DNA
tatgccgaataatgttggggggtttggggatgtggagaaggcaagtaatgtatttgtaaggaatgaattattgcc

SEQ ID NO: 635437 - DNA, 75 bp, synthetic construct
  source 1..75: mol_type = other DNA
ggccagttaatcaagctgctggcctcaccggccaaatacacccggcgcggggtcgatgattcgattttctggttt

SEQ ID NO: 635438 - DNA, 75 bp, synthetic construct
  source 1..75: mol_type = other DNA
cgcaagtattaccagaacggcgcgcacgcgggctacatcatgtatgtgaccgacccggcgcagagcgcgaccgac

SEQ ID NO: 635439 - DNA, 75 bp, synthetic construct
  source 1..75: mol_type = other DNA
atttacggcttgccggaatatctgtcagccattccctccgccctgctaaacgagtccgctacgctgttccgccgc

SEQ ID NO: 635440 - DNA, 75 bp, synthetic construct
  source 1..75: mol_type = other DNA
tgatgccgacagtaatctgcagagcctgtgctggccgtgtcataaggcgaagacggcccgtgaacggttgaagtg

SEQ ID NO: 635441 - DNA, 75 bp, synthetic construct
  source 1..75: mol_type = other DNA
actacagaagctaataatggagcttaactgctggctcggccacgagattatacgttttatcccttacaagcttga

SEQ ID NO: 635442 - DNA, 75 bp, synthetic construct
  source 1..75: mol_type = other DNA
gccgcatctagtaaaaaaagttattacctttattttttcatggaatggatagcaaagttctttacggataagtta

SEQ ID NO: 635443 - DNA, 75 bp, synthetic construct
  source 1..75: mol_type = other DNA
cgcaggggaaaagaccactggcggcattctggggagacgggacaacgtcatcatcagatggacagaatttcagaa

SEQ ID NO: 635444 - DNA, 75 bp, synthetic construct
  source 1..75: mol_type = other DNA
ccgttaacctgctgaagaggaaggggctacatctcaatgagcaattgctgtcacacttgtctccgttgggctggg

SEQ ID NO: 635445 - DNA, 75 bp, synthetic construct
  source 1..75: mol_type = other DNA
agatagaaacccactggaatgaaattctgaggctggcgacctcaataaagcagggaactgtgaccgcttctctga

SEQ ID NO: 635446 - DNA, 75 bp, synthetic construct
  source 1..75: mol_type = other DNA
ttgcggaggaaatgctctcctggctccacaataataaggttattttcccctctgttgaagtgatcgaacgaaccc

SEQ ID NO: 635447 - DNA, 75 bp, synthetic construct
  source 1..75: mol_type = other DNA
gccgcccttgcagaactggtaaacgcgcaggggaaaaggccgctggcggcattctggggagacgggacaacatca

SEQ ID NO: 635448 - DNA, 75 bp, synthetic construct
  source 1..75: mol_type = other DNA
gtgacagcatctctgatgctgaaaaaactagcgagctaccccaagcaaaacggacttgccaaagcactgagagaa

SEQ ID NO: 635449 - DNA, 75 bp, synthetic construct
  source 1..75: mol_type = other DNA
ggcaaggctgacgctgctggcctcccgcctggaggaagttaacgcaatggccgttaccggggatcttcccgatgt

SEQ ID NO: 635450 - DNA, 75 bp, synthetic construct
  source 1..75: mol_type = other DNA
catatcgaccgccttaacgccattgaagcactggcgctaccggaaggcgtggataaaacagttcatcagaaccgg

SEQ ID NO: 635451 - DNA, 75 bp, synthetic construct
  source 1..75: mol_type = other DNA
ttcgccgtccttctttgctatctgaaaaatatcgggtttgctccggataaaaaatcgtctccaccggcagaattg

SEQ ID NO: 635452 - DNA, 75 bp, synthetic construct
  source 1..75: mol_type = other DNA
gctggggttcgcttttgcacccaggatccgggatcttcatgacaagcggttgtttattcaggggaaggctgataa

SEQ ID NO: 635453 - DNA, 75 bp, synthetic construct
  source 1..75: mol_type = other DNA
gcaggcatggtatatccgcgatgaaacgtactctgctgcactggctgaactggttaatgcccagaagtcacgtcc

SEQ ID NO: 635454 - DNA, 75 bp, synthetic construct
  source 1..75: mol_type = other DNA
aaaatggcagagtcctgtccgggaaccacacgagcttcgctggaaaacatacaagcatggtacatccgtgatgaa

SEQ ID NO: 635455 - DNA, 75 bp, synthetic construct
  source 1..75: mol_type = other DNA
tttagattaaaaagtaattaccgccaccacattacattcgccaacgaagacggaagtattcgtatgtttttatgg

SEQ ID NO: 635456 - DNA, 75 bp, synthetic construct
  source 1..75: mol_type = other DNA
ggtgcatatacgcaggcagaatgtaactcaaggtttattacaggtattcgccttggcggtctgtcatctgttcag

SEQ ID NO: 635457 - DNA, 75 bp, synthetic construct
  source 1..75: mol_type = other DNA
attagtatgcgagatcaaaatgttatttttggtcttaataaggtatcaaccagttccgcccaggcattattaaga

SEQ ID NO: 635458 - DNA, 75 bp, synthetic construct
  source 1..75: mol_type = other DNA
atcagcaaacggcctacgtattgcttatggtaattacggattctttattcgtaatgatggttcaaatacatactt

SEQ ID NO: 635459 - DNA, 75 bp, synthetic construct
  source 1..75: mol_type = other DNA
aacggcaatgaatatttcaaatggagaagcaaacaaagcaccacaacaaaagacctgatgaatcttaaatgggat

SEQ ID NO: 635460 - DNA, 75 bp, synthetic construct
  source 1..75: mol_type = other DNA
gatttgatggttctacagatattacactgactcctgaaaatcttggcttgacggatatcgtgtctcaagctggta

SEQ ID NO: 635461 - DNA, 75 bp, synthetic construct
  source 1..75: mol_type = other DNA
atgccaccacgaaccccaaaagcctgccgcgttcgcggctgccgcgataccactactgatccgtcaggctattgc

SEQ ID NO: 635462 - DNA, 75 bp, synthetic construct
  source 1..75: mol_type = other DNA
attcatgcggctgaatttgttgccagaatctataccgattcatatcagttaggtgatggggagctgcttgtttgt

SEQ ID NO: 635463 - DNA, 75 bp, synthetic construct
  source 1..75: mol_type = other DNA
acaggttatcgaccatcaggctgtacaggtctgggcagacagcctcaatactgacaatccgttaccggcgcctcg

SEQ ID NO: 635464 - DNA, 75 bp, synthetic construct
  source 1..75: mol_type = other DNA
cagatcgctacgactgcttacgtacgggctgctatctctgcattggtcggatcatcacctgaagctcttgatacc

SEQ ID NO: 635465 - DNA, 75 bp, synthetic construct
  source 1..75: mol_type = other DNA
aagaaacatcaacggtgttaagtttgatggctcaggcgatatcaacattaatacattggtatctcgtggccgagt

SEQ ID NO: 635466 - DNA, 75 bp, synthetic construct
  source 1..75: mol_type = other DNA
ctgtacagttccgcgtgaattataagaacggcggtatcttttatcgttcagcgcgtgatggttatggctttgaag

SEQ ID NO: 635467 - DNA, 75 bp, synthetic construct
  source 1..75: mol_type = other DNA
cattatggattaataacgctactggcgctgtttcgatggggcgtggccttaatgtttcaggggagacactttcag

SEQ ID NO: 635468 - DNA, 75 bp, synthetic construct
  source 1..75: mol_type = other DNA
tgacaacctgcccctgctgtatcagaccgaaacattcctgaaggcactgagtgacacactggcccggcacgaact

SEQ ID NO: 635469 - DNA, 75 bp, synthetic construct
  source 1..75: mol_type = other DNA
gagcttgatcaatttaaaattatttttgataggtttagttctaaagatgaaaaagtaaaaataaatcgtttgagg

SEQ ID NO: 635470 - DNA, 75 bp, synthetic construct
  source 1..75: mol_type = other DNA
caagaaatgtcgctttcaccggtccatccgacccgacagtgtccagttcaatccactgattctgctgaaacggag

SEQ ID NO: 635471 - DNA, 75 bp, synthetic construct
  source 1..75: mol_type = other DNA
ctggggcaggggcttcgtaaacgtaaaactcctcaggaaaaaattgacattattcagcagacaatggagcctggc

SEQ ID NO: 635472 - DNA, 75 bp, synthetic construct
  source 1..75: mol_type = other DNA
ctgacagaattccccccggcatacaacctgcaacgcagtgtgcaattgctgcagcaactgatggtacttttcccc

SEQ ID NO: 635473 - DNA, 75 bp, synthetic construct
  source 1..75: mol_type = other DNA
atcagcaaactgacccacccggcacgcccggatgtggactggcgtcatgtggagacgctctgcctgcgtctgtat

SEQ ID NO: 635474 - DNA, 75 bp, synthetic construct
  source 1..75: mol_type = other DNA
tgggctcgatgttactggcggcatcaatggtagtttgaacggcaatgcttcaacggctacgaagttgcaaactgc

SEQ ID NO: 635475 - DNA, 75 bp, synthetic construct
  source 1..75: mol_type = other DNA
acgcttaaagaaatagcggctgcgatcaataacgacccgaatttcagcacaactatcaacaatgctctggctctt

SEQ ID NO: 635476 - DNA, 75 bp, synthetic construct
  source 1..75: mol_type = other DNA
cagatgcggcatggtctgagtgggcacaggtctatacatcgaaagactccataccgggcgtaaatacaacgggca

SEQ ID NO: 635477 - DNA, 75 bp, synthetic construct
  source 1..75: mol_type = other DNA
acgtgtttttacgagtgcgaaacgtcagtgtggaatgctctcagccagtcaggcagcgcttttttctcaacaaac

SEQ ID NO: 635478 - DNA, 75 bp, synthetic construct
  source 1..75: mol_type = other DNA
aggtcaacatggtgcgccgggagctgcagcgcgttccggggaattcagtgaactgcatgtgctgggcaagccttg

SEQ ID NO: 635479 - DNA, 75 bp, synthetic construct
  source 1..75: mol_type = other DNA
caagaaatgtcgctttcaccggtccattcgacccgacagtgttcagttcaatccactgattctgctgaaacggag

SEQ ID NO: 635480 - DNA, 75 bp, synthetic construct
  source 1..75: mol_type = other DNA
cgctacgcgatggcccagcgtgagattgcgctggcgattggcgaaccgcctgccaccaaaggttatccaccgtcg

SEQ ID NO: 635481 - DNA, 75 bp, synthetic construct
  source 1..75: mol_type = other DNA
ggagccgcagccaaaagcggccacccgcgccccgcgtaagacccggagtgcgacaccggcaaaacgtggacgccc

SEQ ID NO: 635482 - DNA, 75 bp, synthetic construct
  source 1..75: mol_type = other DNA
tggttgaccatagaggaaaccgcaaacaggttaagcacaacactcggtgaaagggtatctgtagccgattgcctg

SEQ ID NO: 635483 - DNA, 75 bp, synthetic construct
  source 1..75: mol_type = other DNA
tttctatcctcatcgcatcaggtagattttcgcggtagccagcaggtttatgatgccggaacaggaaaatataaa

SEQ ID NO: 635484 - DNA, 75 bp, synthetic construct
  source 1..75: mol_type = other DNA
ttccgttcgtggttgctccggatggtcgtgtcagcaaaggacgtccgaagaacctgaaatcatggttggagagtg

SEQ ID NO: 635485 - DNA, 75 bp, synthetic construct
  source 1..75: mol_type = other DNA
tggtggtattggtatcgcacctggcgcaaacatcggtgacgaatgcgcactgtttgaagccacccacggtactgc

SEQ ID NO: 635486 - DNA, 75 bp, synthetic construct
  source 1..75: mol_type = other DNA
acaccgccgcaccccgccgtacatgttcaccgaggaggtggcgcttgcggccatgcgcgcccacgcggccggtga

SEQ ID NO: 635487 - DNA, 75 bp, synthetic construct
  source 1..75: mol_type = other DNA
gctggcgcggggaacactgaaggtgctgaagaatatcggattcagaacgcggtttatccccgctggcgcggggaa

SEQ ID NO: 635488 - DNA, 75 bp, synthetic construct
  source 1..75: mol_type = other DNA
gctggcgcggggaactcagcaacgataaccacagaatacggagaactggtggtttatccccgctggcgcggggaa

SEQ ID NO: 635489 - DNA, 75 bp, synthetic construct
  source 1..75: mol_type = other DNA
cgcccggtttatccccgctggcggggggaacacccgccacgccgtgcgcatcaacagatatacgcaggtttatcc

SEQ ID NO: 635490 - DNA, 75 bp, synthetic construct
  source 1..75: mol_type = other DNA
gcggggaacaccctctgcctgtaattcagcttcactgtcagtgcggtttatccccgctggcgcggggaacacggt

SEQ ID NO: 635491 - DNA, 75 bp, synthetic construct
  source 1..75: mol_type = other DNA
tatccccgctggcgcggggaacaccagttgtctgatgtgtcgctggcctggcggcacggtttatccccgctggcg

SEQ ID NO: 635492 - DNA, 75 bp, synthetic construct
  source 1..75: mol_type = other DNA
tatccccgctggcgcggggaacacagcaccactgaaaatctgtacgaaagcaatagcggtttatccccgctggcg

SEQ ID NO: 635493 - DNA, 75 bp, synthetic construct
  source 1..75: mol_type = other DNA
ggaaaaaaattaccgctggcgttcatgctgaaaatggtcatatggccgtacagctgtggcacaccggacgcattt

SEQ ID NO: 635494 - DNA, 75 bp, synthetic construct
  source 1..75: mol_type = other DNA
cgggcaatcctcgacggtcacattgtgctgtctcgccgactggcggaagccgggcactatccggctatcgatatt

SEQ ID NO: 635495 - DNA, 75 bp, synthetic construct
  source 1..75: mol_type = other DNA
cttcgaacgtctgatggaaggcgctaaactgctgaaatgcagcgagtttggtgacgcaatcatcgaaaacatgta

SEQ ID NO: 635496 - DNA, 75 bp, synthetic construct
  source 1..75: mol_type = other DNA
tcaacgcgaagactgtaacctatgacttcgaacgtctgatggaaggcgctaacctgctgaaatgttcagagtttg

SEQ ID NO: 635497 - DNA, 75 bp, synthetic construct
  source 1..75: mol_type = other DNA
atgacggcgttgatcagcgagcaacattatgcgcgagtgcgcaccttcaaacagctgttgtcgagttttcagcgt

SEQ ID NO: 635498 - DNA, 75 bp, synthetic construct
  source 1..75: mol_type = other DNA
atgacggcgttgatcagtgagcaacattacgcgcgagtgcgcaccttcaaacagctgttgtcgagttttcagcgt

SEQ ID NO: 635499 - DNA, 75 bp, synthetic construct
  source 1..75: mol_type = other DNA
accagcaggaccccattgccgactccgcgcgggcgatcctcgacggtcacattgtgctgtctcgccgactggcgg

SEQ ID NO: 635500 - DNA, 75 bp, synthetic construct
  source 1..75: mol_type = other DNA
atggaaagtaaagtagttgttccggcacaaggcaagaagatcaccctgcaaaacagcaaactcaacgttcctgaa

SEQ ID NO: 635501 - DNA, 75 bp, synthetic construct
  source 1..75: mol_type = other DNA
ttcgaacgtctgatggaaggcgctaaactgctgaaatgttcagagtttggtgatgcgatcatcaagaatatgtaa

SEQ ID NO: 635502 - DNA, 75 bp, synthetic construct
  source 1..75: mol_type = other DNA
ctctggattatgaaacaaatagccagattcgcagcattcagcgtttactgaagctgtatcagcgcggaaaagcag

SEQ ID NO: 635503 - DNA, 75 bp, synthetic construct
  source 1..75: mol_type = other DNA
gacgtgattgctgacgcattcctgcaacagatcctgctgcgtccggctgaatatgatgttatcgcctgtatgaac

SEQ ID NO: 635504 - DNA, 75 bp, synthetic construct
  source 1..75: mol_type = other DNA
taccggcaaagagatcgtcattaaagacgtgattgctgacgcattcctgcaacagatcctgctgcgtccggctga

SEQ ID NO: 635505 - DNA, 75 bp, synthetic construct
  source 1..75: mol_type = other DNA
tcaacgccaagactgtaacctatgacttcgaacgtctgatggagggcgctaaattgctgaaatgtagcgagtttg

SEQ ID NO: 635506 - DNA, 75 bp, synthetic construct
  source 1..75: mol_type = other DNA
atgcaacatcgtattattctccccggagccactacgctgatccggttgatttcagaggtaagggaaaaggcgacg

SEQ ID NO: 635507 - DNA, 75 bp, synthetic construct
  source 1..75: mol_type = other DNA
atgacaaacatgatctcatatcagggacttgttcgcaccttccctaacagtcagcacatcaagcacatcattaat

SEQ ID NO: 635508 - DNA, 75 bp, synthetic construct
  source 1..75: mol_type = other DNA
cgtgctgaggtgttcagctacatcccaaggcaaaagctggctgaaatcatcacgcttgtccgtgaaattgcccgg

SEQ ID NO: 635509 - DNA, 75 bp, synthetic construct
  source 1..75: mol_type = other DNA
tttttccatgccagtgaagccagtgccagagttgatgatctgcccgtcagcatcagcgccgtgctgatggctgaa

SEQ ID NO: 635510 - DNA, 75 bp, synthetic construct
  source 1..75: mol_type = other DNA
tatgaatatgcaacaaagttttaattattcaatttatagcagcgcaaccaaactccaaaaaataataaccaacag

SEQ ID NO: 635511 - DNA, 75 bp, synthetic construct
  source 1..75: mol_type = other DNA
acaaacacaaaccagataaatatcctatgaatatgcaacaaagttttaattattcaatttatagcagcgcaacca

SEQ ID NO: 635512 - DNA, 75 bp, synthetic construct
  source 1..75: mol_type = other DNA
atggacaaaaataaaattgcactcatcaccggtgtaaccggacaagatggttcttacctggcagagtttctgctg

SEQ ID NO: 635513 - DNA, 75 bp, synthetic construct
  source 1..75: mol_type = other DNA
tcgcttcctcggtcttgaaaagaaaacccgtttctatcaggcgtccacctctgagctgtacggcctggtacagga

SEQ ID NO: 635514 - DNA, 75 bp, synthetic construct
  source 1..75: mol_type = other DNA
cagtatacactccgctatcgctacgtgactgggtcagggcttcgccccgacaccccaaaagggcgttgcgttgcg

SEQ ID NO: 635515 - DNA, 75 bp, synthetic construct
  source 1..75: mol_type = other DNA
cagaaagaaaccacgccgttctacccgcgatctccgtatgcggtcgccaaactgtacgcctactggatcaccgtt

SEQ ID NO: 635516 - DNA, 75 bp, synthetic construct
  source 1..75: mol_type = other DNA
acaggaacagccggaagatttcgttattgccaccggcgttcagtactccgtgcgtcagttcgtggaaatggcggc

SEQ ID NO: 635517 - DNA, 75 bp, synthetic construct
  source 1..75: mol_type = other DNA
ggcgcaggcggggatcacgctgcgttttgaaggcaacggtgtggaagagaaggggattgtggtttctgttaccgg

SEQ ID NO: 635518 - DNA, 75 bp, synthetic construct
  source 1..75: mol_type = other DNA
cgtcatgcagttgccagagccatctgtcacggtcaaaaaggtgagataagaaaacgatataccgacggtcaggaa

SEQ ID NO: 635519 - DNA, 75 bp, synthetic construct
  source 1..75: mol_type = other DNA
ggtaaaagcgaaactgacggcagggcagatgtcgatggatttcaacatcatgacacgcctggatgtctgtaaggc

SEQ ID NO: 635520 - DNA, 75 bp, synthetic construct
  source 1..75: mol_type = other DNA
tgctcgctacgcaagcgttgctgttactggcgattgcggcgatgggttttctcgaaccaggtacgcaacttcgct

SEQ ID NO: 635521 - DNA, 75 bp, synthetic construct
  source 1..75: mol_type = other DNA
ctgccgctcgccctgacatccggcaccttacaggcgtggatgaccgtcgagaatatcgatcttaaaaccattggt

SEQ ID NO: 635522 - DNA, 75 bp, synthetic construct
  source 1..75: mol_type = other DNA
tcatccctaaagcacatggcggcactgatgccgacagtaatttgcagagtctgtgctggccgtgtcataaggcga

SEQ ID NO: 635523 - DNA, 75 bp, synthetic construct
  source 1..75: mol_type = other DNA
gtgatcagcagttcactgggcatttcacgctggaaaaatatgcagcaggttaacgacagcggacggcgagctgtc

SEQ ID NO: 635524 - DNA, 75 bp, synthetic construct
  source 1..75: mol_type = other DNA
gggatccgttgtaccatgtgttttgacatgcgttttgagcggactgcactgtatgccgctgaaaatggtttcagt

SEQ ID NO: 635525 - DNA, 75 bp, synthetic construct
  source 1..75: mol_type = other DNA
ttcttctctctggtaggccaggcttacgtttttaaattcctctggtcaccgctgatggaccgctacacgccccca

SEQ ID NO: 635526 - DNA, 75 bp, synthetic construct
  source 1..75: mol_type = other DNA
ctaccgctcgccctgacatccggcaccttacaggcctggatgacggtcgagaatattgatctcaaaaccattggt

SEQ ID NO: 635527 - DNA, 75 bp, synthetic construct
  source 1..75: mol_type = other DNA
tgataccgtcagccgaacagcgttcacagctggagatgctgctggggccaactgattgcagccgcctgtctttac

SEQ ID NO: 635528 - DNA, 75 bp, synthetic construct
  source 1..75: mol_type = other DNA
tttagtcgccctgtgcggtgtcgtgcttggtggtttactggattacctggcgctacgaaaaacgcatctgacgta

SEQ ID NO: 635529 - DNA, 75 bp, synthetic construct
  source 1..75: mol_type = other DNA
ataagctgggcgacgcattcgccatgagcctgacaaccacgtttttgattcgcggcgtcgggtttgatgcgggtg

SEQ ID NO: 635530 - DNA, 75 bp, synthetic construct
  source 1..75: mol_type = other DNA
ttcaacagccgcgttcagccatattgctgattctgggttttgcttccgggctaccgctcgccctgacatccggca

SEQ ID NO: 635531 - DNA, 75 bp, synthetic construct
  source 1..75: mol_type = other DNA
aatgacctgcttattcgcaccttccctaacagtcagcacatcaagcacatcattaatcaacatcccaatacgtta

SEQ ID NO: 635532 - DNA, 75 bp, synthetic construct
  source 1..75: mol_type = other DNA
agataccagcggggggacaggtactgcaattgtagttcaggctgcaggtaaaaacgtttctttcgatggggttgc

SEQ ID NO: 635533 - DNA, 75 bp, synthetic construct
  source 1..75: mol_type = other DNA
cctcaggggcagggtaaagtaacttttaacggaactgttgttgctgctccatgcagcatttctcagaaatcagct

SEQ ID NO: 635534 - DNA, 75 bp, synthetic construct
  source 1..75: mol_type = other DNA
tgaattataaagctggtgacaacactctgcactacagtgcttgggtcaaaaaatccagtgctgacaatgcagcga

SEQ ID NO: 635535 - DNA, 75 bp, synthetic construct
  source 1..75: mol_type = other DNA
tcgatatctcggtaactccgcagctagccgctaaagcagtaacactgcgccgccagtgggctcctcatcgtccgg

SEQ ID NO: 635536 - DNA, 75 bp, synthetic construct
  source 1..75: mol_type = other DNA
gatgcgattaaccttgtccgccaggctggactaagctatatcacacgctcttcaggggaagtcccttccaccagc

SEQ ID NO: 635537 - DNA, 75 bp, synthetic construct
  source 1..75: mol_type = other DNA
gccgcgttcgcggctgccgtaatactactacagacccgtcaggctactgcgaaagccacaaaaacgaaggctgga

SEQ ID NO: 635538 - DNA, 75 bp, synthetic construct
  source 1..75: mol_type = other DNA
tggtagaactggcagctgaacgcggcgcagaaaaaatctacctgcacgcattccttgacggtcgcgacactccgc

SEQ ID NO: 635539 - DNA, 75 bp, synthetic construct
  source 1..75: mol_type = other DNA
gcagaagggctgcaaagcggcaagcagttgccgctcggtccggcgttattaggtcgtgttctggacggcagcggt

SEQ ID NO: 635540 - DNA, 75 bp, synthetic construct
  source 1..75: mol_type = other DNA
gtgtttgccaaattaccggcactggtcgagcgtgccggaaatggtattagcggcggcggctcgattaccgcgttt

SEQ ID NO: 635541 - DNA, 75 bp, synthetic construct
  source 1..75: mol_type = other DNA
gaattatccgggtaacagatacacgatttaccgtagtaaaaacagcagcataattttcgtcgctgacaacgaaac

SEQ ID NO: 635542 - DNA, 75 bp, synthetic construct
  source 1..75: mol_type = other DNA
ccgaaaaatatgcccacgtcactttcttctttaacggtggcgtagaagagtcgttcaaaggcgaagatcgcattc

SEQ ID NO: 635543 - DNA, 75 bp, synthetic construct
  source 1..75: mol_type = other DNA
tccgcagagctgaccgaaaaactggttgcggccatcaagagcggcaaatacgacaccatcatctgtaactatccg

SEQ ID NO: 635544 - DNA, 75 bp, synthetic construct
  source 1..75: mol_type = other DNA
cgaattacgctgattgccgcccaaaatgaagaagatggtgcacgttttgtggcgctgggtgcaaaaaataatcag

SEQ ID NO: 635545 - DNA, 75 bp, synthetic construct
  source 1..75: mol_type = other DNA
aagcgctgcatcactaccgggaagcttctcagagttggctatcccttcgcaatgaacaaagtacagcccaactgc

SEQ ID NO: 635546 - DNA, 75 bp, synthetic construct
  source 1..75: mol_type = other DNA
gggcttgtattttctagcgttgctttatttgcaattattttacagccgtttttcggcctgatttcagataagctg

SEQ ID NO: 635547 - DNA, 75 bp, synthetic construct
  source 1..75: mol_type = other DNA
ccggtcgcgccgcccctgtcgcgccggaaacggcgctccctgcacacctgacggtgtgtaaggccactgcgcctg

SEQ ID NO: 635548 - DNA, 75 bp, synthetic construct
  source 1..75: mol_type = other DNA
tgggatgttatacgtgcgcgtatactgaagcgtgataaccatctgtgtaagaactgtctgcgcaatgggcgagcc

SEQ ID NO: 635549 - DNA, 75 bp, synthetic construct
  source 1..75: mol_type = other DNA
gtcgcgttcgcggctgtcggaacactacaacagacccatctggctattgtgaaaatcacaaaggtgaaggctgga

SEQ ID NO: 635550 - DNA, 75 bp, synthetic construct
  source 1..75: mol_type = other DNA
gagttcgaaggcggtaaagcgtctgatttcgtactggcgatgggtcagggtcgtatgatcccgggctttgaagac

SEQ ID NO: 635551 - DNA, 75 bp, synthetic construct
  source 1..75: mol_type = other DNA
gatattgaattggttaattgtgatatcacttcatttaagggggtgggaggagccccggcagcaaaaaaagggact

SEQ ID NO: 635552 - DNA, 75 bp, synthetic construct
  source 1..75: mol_type = other DNA
atgcccctacgaaccccaaaagcctgccgcgttcgcggttgccgtaataccactacagacccgtcaggctactgc

SEQ ID NO: 635553 - DNA, 75 bp, synthetic construct
  source 1..75: mol_type = other DNA
atgccaccacgaacaccaaaagcctgccgcgtccgcggttgccgccataccacgactgacccgtcaggctattgc

SEQ ID NO: 635554 - DNA, 75 bp, synthetic construct
  source 1..75: mol_type = other DNA
aacctgattaaccagctggaacaacagcgtgaactcgccagtaaattgggggattcacttcgggaagcagaagaa

SEQ ID NO: 635555 - DNA, 75 bp, synthetic construct
  source 1..75: mol_type = other DNA
gccgaaaaggacacggccctgacgctcgtccggtcggagctctcaacagctaaaggggcgaatgaacaactacga

SEQ ID NO: 635556 - DNA, 75 bp, synthetic construct
  source 1..75: mol_type = other DNA
acctgtgcgggagtggtgcaccagtgaccacgacatgccattgttgtgccgtcgtttttcttcagtcgcgccgtg

SEQ ID NO: 635557 - DNA, 75 bp, synthetic construct
  source 1..75: mol_type = other DNA
agcctgaagcagtatgccagtcgtcattttgccgaacgcttaccggcaatggcgcgcaatggtgaactgaaaagc

SEQ ID NO: 635558 - DNA, 75 bp, synthetic construct
  source 1..75: mol_type = other DNA
ggatgcagacagtaacctgcagagtctgtgctggccctgtcataaagcaaaaacagcgcgcgaacgcctcaattg

SEQ ID NO: 635559 - DNA, 75 bp, synthetic construct
  source 1..75: mol_type = other DNA
cttggttcgtttatagagcaggtgtccggaagagatctggcaatgctcacagaatccgaaaaagaacagcttgcg

SEQ ID NO: 635560 - DNA, 75 bp, synthetic construct
  source 1..75: mol_type = other DNA
agtgagcagaagcgggtgcgtatccccgccatgaaagtcagcgaatggggccacctgctccgcgcgcttgaaatt

SEQ ID NO: 635561 - DNA, 75 bp, synthetic construct
  source 1..75: mol_type = other DNA
atgccgccacgaacaccaaaagcctgccgcgttcgcggttgccgcaataccactactgacccgtcaggctattgc

SEQ ID NO: 635562 - DNA, 75 bp, synthetic construct
  source 1..75: mol_type = other DNA
ttggtactcaggctgtcagtgattacgaatggtatcgtatgcggatggggacaggtccacagggagcaataaagc

SEQ ID NO: 635563 - DNA, 75 bp, synthetic construct
  source 1..75: mol_type = other DNA
cttaacatatgtgtcaataagttctatcagaaatattataaaatttttttttggaagaaaagtattaccatttat

SEQ ID NO: 635564 - DNA, 75 bp, synthetic construct
  source 1..75: mol_type = other DNA
tcctggtgtgcagaaaaactcatgaaaaaaatgggtgactacacgccagtaccaaaagacattttcagccaggtg

SEQ ID NO: 635565 - DNA, 75 bp, synthetic construct
  source 1..75: mol_type = other DNA
tgctgaagatggtctgtacctgtctcagatggacggaaaatttctggtgatggatggctgggatcgcaacaggga

SEQ ID NO: 635566 - DNA, 75 bp, synthetic construct
  source 1..75: mol_type = other DNA
tgctgtatcgcagctgagaggctgggtagactggccccctgaatctccagacaaccaatatcacttaaataagtg

SEQ ID NO: 635567 - DNA, 75 bp, synthetic construct
  source 1..75: mol_type = other DNA
ggagtcaggaaaaactcagtcgtgcctgccgtgagcttgaactgaagcatggttttgctccggataacggttgct

SEQ ID NO: 635568 - DNA, 75 bp, synthetic construct
  source 1..75: mol_type = other DNA
tattttttcatggctgggtagaagaaccgtcatcattttataataatgccgatatattttattgtccatcatcat

SEQ ID NO: 635569 - DNA, 75 bp, synthetic construct
  source 1..75: mol_type = other DNA
gtgagaccatcaattatctttgcaacggctgaatatgtaaagcgtctgcgtgaagagtgcctgtgggagaataaa

SEQ ID NO: 635570 - DNA, 75 bp, synthetic construct
  source 1..75: mol_type = other DNA
gtggggcaatactataaaattagcttaaatgagagtaagcgaattcaagaacaaaaggacatttacgcacacctt

SEQ ID NO: 635571 - DNA, 75 bp, synthetic construct
  source 1..75: mol_type = other DNA
gcgtgggcgatgcggtgattggcgttaacccggtgactgatgacgtggaaaacttaagccgcgtgctggacacca

SEQ ID NO: 635572 - DNA, 75 bp, synthetic construct
  source 1..75: mol_type = other DNA
gggtgggcgatgcggtgatcggcgtcaacccggtgacggacgacgtggaaaacttaagccgcgtgctggacacca

SEQ ID NO: 635573 - DNA, 75 bp, synthetic construct
  source 1..75: mol_type = other DNA
atgggtaagcaaaaatcccgcaaagccgctgcgcagaaggccagcaagccacaacacctgaccgccagcgcaccg

SEQ ID NO: 635574 - DNA, 75 bp, synthetic construct
  source 1..75: mol_type = other DNA
acctgctggagcccgatattaatcaggagatttacggcctgcccgaatatctcagcgcgcttaattctgcctggc

SEQ ID NO: 635575 - DNA, 75 bp, synthetic construct
  source 1..75: mol_type = other DNA
tgcaacgtgacaaaggcctgtgtcagttatgtctgcgtgctggtgtggcgcgtgaagcgaaaaccgttgaccaca

SEQ ID NO: 635576 - DNA, 75 bp, synthetic construct
  source 1..75: mol_type = other DNA
atgtttaataaactgtttggaaaaaaagtagcagcggcaaaagttgaacttaagaaagtggaaaatcgcgatctt

SEQ ID NO: 635577 - DNA, 75 bp, synthetic construct
  source 1..75: mol_type = other DNA
tatacgccgctggacgggctgaccaatagccagtttgtcagcattgcgggggagatatccccacagcagcgtgat

SEQ ID NO: 635578 - DNA, 75 bp, synthetic construct
  source 1..75: mol_type = other DNA
tatacgccgctggaagggctgaccaatagccagtttgtcagcattgcgggagatatatccccacagcagcgagat

SEQ ID NO: 635579 - DNA, 75 bp, synthetic construct
  source 1..75: mol_type = other DNA
atcgagctacacccagccgcacccgttcgcgcccggctcggtgtgtcatctgcttgagcccgatatcaatcagga

SEQ ID NO: 635580 - DNA, 75 bp, synthetic construct
  source 1..75: mol_type = other DNA
acggaacagcttgaagctgggttccgcgttggccgcatgaacattttgcgcgaaatcgacgacatcaaaaacgat

SEQ ID NO: 635581 - DNA, 75 bp, synthetic construct
  source 1..75: mol_type = other DNA
ttttggtatctgccgccgatggcgagatcgaaaaagaagaaaccagcaagctggatcagcttattcgctctaacc

SEQ ID NO: 635582 - DNA, 75 bp, synthetic construct
  source 1..75: mol_type = other DNA
acggttccgcgctgtggccgttcggctggctggttcaccgttacaacgcccggtcggggttcctgggttcatccg

SEQ ID NO: 635583 - DNA, 75 bp, synthetic construct
  source 1..75: mol_type = other DNA
gacgcgacggaaagtcttcttttgaagacctgattgcgtacacctcagtgcgggatgatgtgccggaagatgagc

SEQ ID NO: 635584 - DNA, 75 bp, synthetic construct
  source 1..75: mol_type = other DNA
ctcccttgatgagcttgcagatcttatgcaggataaaaatattgatgttaagtttcttgtggaagatctagcgga

SEQ ID NO: 635585 - DNA, 75 bp, synthetic construct
  source 1..75: mol_type = other DNA
aattatctagtagaagaaaatccgcaagaagaattaccttcctttctagattcccattcatattgggaatatgag

SEQ ID NO: 635586 - DNA, 75 bp, synthetic construct
  source 1..75: mol_type = other DNA
ataaggataaaagacgcacaactaatgttgatcgttgtgtcgtactctgcgaacccggaggaacgccacttttta

SEQ ID NO: 635587 - DNA, 75 bp, synthetic construct
  source 1..75: mol_type = other DNA
gagattcgtcgtgagcgccgtgaagcccgtgcagctgcgcgggaagatttgcgtgcgcgttatcttgcatggaag

SEQ ID NO: 635588 - DNA, 75 bp, synthetic construct
  source 1..75: mol_type = other DNA
gagatgatagctgacggggatttcagctggcaggcatgtcatgagatgtttgcacgtaaagggcttatgctgcag

SEQ ID NO: 635589 - DNA, 75 bp, synthetic construct
  source 1..75: mol_type = other DNA
atggaatgggagcccgagagggggatccgttgtaccatgtgttttgacatgcgttttgagcggacagcgctgtac

SEQ ID NO: 635590 - DNA, 75 bp, synthetic construct
  source 1..75: mol_type = other DNA
ccgtttattgatgctgattacgacacagacaactggtttgaacgagccaaaggaatggaatgggagcccgaacga

SEQ ID NO: 635591 - DNA, 75 bp, synthetic construct
  source 1..75: mol_type = other DNA
agatgccgacagcaatctgcagagtttgtgctggccgtgccataaggcgaagacggcccgtgaacggctaaagtg

SEQ ID NO: 635592 - DNA, 75 bp, synthetic construct
  source 1..75: mol_type = other DNA
gctaaaaacatcatcctggatcaacgtttatttgtgctggatgatgaatgttatgattcatttattacgcaactg

SEQ ID NO: 635593 - DNA, 75 bp, synthetic construct
  source 1..75: mol_type = other DNA
atgcctactactgcaagcatccgtaaaacaccgcgagaaaatcagattaacatccgggcaacggatgaggaacga

SEQ ID NO: 635594 - DNA, 75 bp, synthetic construct
  source 1..75: mol_type = other DNA
caataatgatttagatgactattattatcgtgctaaagattactacggaggtccatataaaacaccacacgaata

SEQ ID NO: 635595 - DNA, 75 bp, synthetic construct
  source 1..75: mol_type = other DNA
aaacgctgacggggaaacaggatgacgccctgctggcggtacttaaccgctttaccgaagacgtgacggaaaaag

SEQ ID NO: 635596 - DNA, 75 bp, synthetic construct
  source 1..75: mol_type = other DNA
ccatattgcagaagtgcaacgtatgcaggcgctgatcagactgaaggaaaatgtcagggaagagcgactggcgct

SEQ ID NO: 635597 - DNA, 75 bp, synthetic construct
  source 1..75: mol_type = other DNA
gccggaaaaagtggcagaaacggagagtctgaaacagtacgcctgccgtcactttgctgaacgcttaccggaaat

SEQ ID NO: 635598 - DNA, 75 bp, synthetic construct
  source 1..75: mol_type = other DNA
aaacagcatcatggtcttgtgattgtggatgcgtttaatcatgagctgacaccggtgaaggccagcagtatccac

SEQ ID NO: 635599 - DNA, 75 bp, synthetic construct
  source 1..75: mol_type = other DNA
gcgtcgtgggtgcgcaaaaaaaccggtatccccaccccgaaagacggcgaagaggtactggtgccggtggcacag

SEQ ID NO: 635600 - DNA, 75 bp, synthetic construct
  source 1..75: mol_type = other DNA
gtattcccaccccgaaagacggcgaagaggtactggtgccggtagctcagcgtctccctgtgcagactggtctca

SEQ ID NO: 635601 - DNA, 75 bp, synthetic construct
  source 1..75: mol_type = other DNA
gtgcataacgaggtccggcacgacattctgaccgccgatgctcgccagctgtccggcatgttcagtagtctgata

SEQ ID NO: 635602 - DNA, 75 bp, synthetic construct
  source 1..75: mol_type = other DNA
gtggaagggctggcgctgcgtatcaccgaaggcaacgtgccggacagcctgaaaacggtgcatatccgcacgctg

SEQ ID NO: 635603 - DNA, 75 bp, synthetic construct
  source 1..75: mol_type = other DNA
aagagccttgaaaaccgcgtggtcgggcaaagcccggcgctctgcgccatcgcacagcggctgcgggcggctaaa

SEQ ID NO: 635604 - DNA, 75 bp, synthetic construct
  source 1..75: mol_type = other DNA
accggggctttatgcgcgacggcgaaggccgggaaattgacttccgcaacaccgtgattctgatgacggctaatc

SEQ ID NO: 635605 - DNA, 75 bp, synthetic construct
  source 1..75: mol_type = other DNA
ggttgttgaccctgcacaggatgcgctggacagcgccacgtcgccaggggagagcatcgcgaaagccatggataa

SEQ ID NO: 635606 - DNA, 75 bp, synthetic construct
  source 1..75: mol_type = other DNA
gcgcagctgcaacagctgataaagcaggcgctgtttgtcagcgaggtctgggggcgactcaatgccgaaagctga

SEQ ID NO: 635607 - DNA, 75 bp, synthetic construct
  source 1..75: mol_type = other DNA
caagagtccgcatgagccttgacaccctgccggaaccgttgacgcagcttcatgcgcgactggcggcactggata

SEQ ID NO: 635608 - DNA, 75 bp, synthetic construct
  source 1..75: mol_type = other DNA
ccgtgccggatatgcagtataagttccggctggtcatcggcccgctgacgctggaggattaccggcgttttctgc

SEQ ID NO: 635609 - DNA, 75 bp, synthetic construct
  source 1..75: mol_type = other DNA
cgttaccgctgcactacaccgaactggcgcgtaaccggaccgaaagccgacgcgatccgacgctgacccgttttt

SEQ ID NO: 635610 - DNA, 75 bp, synthetic construct
  source 1..75: mol_type = other DNA
ggcaacggcgcactcataggacaggccgtaccggacatgcagtataagtttcggctggtcattggtccgctgaca

SEQ ID NO: 635611 - DNA, 75 bp, synthetic construct
  source 1..75: mol_type = other DNA
ccaccgaatggggactggtttcactggttatcaatttctccaatatgatgtttattgttaccgtcgccttactgg

SEQ ID NO: 635612 - DNA, 75 bp, synthetic construct
  source 1..75: mol_type = other DNA
gggcaggatttgcgggagagcgccgacagcccgttgccggatcacgttcgcctggcggcatcggcgcatctggtg

SEQ ID NO: 635613 - DNA, 75 bp, synthetic construct
  source 1..75: mol_type = other DNA
ctgatctttttcatcaccgctggctgacgcagttttaccaggcatggcgcagcgcccagtccgccgggggcggtc

SEQ ID NO: 635614 - DNA, 75 bp, synthetic construct
  source 1..75: mol_type = other DNA
tgaacgtcagcttaagcggcattccgctgggagaatggcgcgatttaaccgacgacgagcttatcgatctcttta

SEQ ID NO: 635615 - DNA, 75 bp, synthetic construct
  source 1..75: mol_type = other DNA
tgaacgtcagcttaagcggcattccgctgggtgagtggcgcgatttaactgacgatgagttaatcgacctcttta

SEQ ID NO: 635616 - DNA, 75 bp, synthetic construct
  source 1..75: mol_type = other DNA
ggtacttatcgccctgaacaagcccgtcggtattgtcagcaccaccgaagatggcgagcgcgataacattgtcga

SEQ ID NO: 635617 - DNA, 75 bp, synthetic construct
  source 1..75: mol_type = other DNA
gcgctgacctttgcaccaagggaaatcgccagtgtgagctggcaggaaggacgactgaacatcagcctttacagc

SEQ ID NO: 635618 - DNA, 75 bp, synthetic construct
  source 1..75: mol_type = other DNA
tgcgatccgaccctgacccgttttaccgatcttttccatcaccgctggctgacgcagttttatcaggcatggcgc

SEQ ID NO: 635619 - DNA, 75 bp, synthetic construct
  source 1..75: mol_type = other DNA
cacggctttagccaataaacgtattcaacgcagcgaactggaaaaacaggcgatggaaaccgtcattaacgcgct

SEQ ID NO: 635620 - DNA, 75 bp, synthetic construct
  source 1..75: mol_type = other DNA
ttaaaaaagggttcctctttgggagcagaatcggagagcagaataaaacttacacgctaagcttggatgcatgtt

SEQ ID NO: 635621 - DNA, 75 bp, synthetic construct
  source 1..75: mol_type = other DNA
gtagccaccagtaagactgagtggggacgggcgttccgcgaccgtctggcggctaatggcaagaaaggaaaggtg

SEQ ID NO: 635622 - DNA, 75 bp, synthetic construct
  source 1..75: mol_type = other DNA
cccccgttccagcccaggagttgcgggtccggataacctcgggcgtccaggtggatgcttcagcgtttcgcctgt

SEQ ID NO: 635623 - DNA, 75 bp, synthetic construct
  source 1..75: mol_type = other DNA
agtctgaccaaacgggataacttcggtgaaatcaggatcaacctgaactggcaccggggcagcggcaaatccggc

SEQ ID NO: 635624 - DNA, 75 bp, synthetic construct
  source 1..75: mol_type = other DNA
cctccattctcgtctgctggagcgtgctgcacgtgttaacgccgaatacgttgaagccttcaccaaaggtgaagt

SEQ ID NO: 635625 - DNA, 75 bp, synthetic construct
  source 1..75: mol_type = other DNA
gaaagggaaaaccggttcactgaccgcgctgccgattatcgaaactcaagcgggtgacgtttctgcgttcgttcc

SEQ ID NO: 635626 - DNA, 75 bp, synthetic construct
  source 1..75: mol_type = other DNA
aagtgaaagggaaaaccggttctctgaccgcactgccgattatcgaaactcaggcgggtgacgtttctgcgttcg

SEQ ID NO: 635627 - DNA, 75 bp, synthetic construct
  source 1..75: mol_type = other DNA
caaaaatcagcctgagcaaggtatcgctgacaaaagagaagcctgcaatcagcctgaccaaacgggataacttcg

SEQ ID NO: 635628 - DNA, 75 bp, synthetic construct
  source 1..75: mol_type = other DNA
gttgtaacccctccgccagttgagacaaaaatcagcctgagcaaggtatcgctgacaaaagagaagcctgcaatc

SEQ ID NO: 635629 - DNA, 75 bp, synthetic construct
  source 1..75: mol_type = other DNA
aaagccgtacctaatcctactactcagttatccggcgaccaacgaagactggaagcggaatcagcagttcccaga

SEQ ID NO: 635630 - DNA, 75 bp, synthetic construct
  source 1..75: mol_type = other DNA
gaattaaccagtacttcaaaggccaggacgaaatggaccggggcatttggctggggatttcgctggagcgccggt

SEQ ID NO: 635631 - DNA, 75 bp, synthetic construct
  source 1..75: mol_type = other DNA
agatctggctggtcgctggcatctccgatatgagaaacggcttcaacggcctggcggcaaaggtgcagacgacgc

SEQ ID NO: 635632 - DNA, 75 bp, synthetic construct
  source 1..75: mol_type = other DNA
ccgattgaaacgcgtctgactgaaggtgataacaaacgcacgctgtgtgcgattgcccgtctggtcaacgagaac

SEQ ID NO: 635633 - DNA, 75 bp, synthetic construct
  source 1..75: mol_type = other DNA
gcggaaaaagggagtcgcccggcatcaaacggtaagcgtttcacctcgccggggcggaagaaaaaagggcgttaa

SEQ ID NO: 635634 - DNA, 75 bp, synthetic construct
  source 1..75: mol_type = other DNA
atgatgagctacatcgtaggtgccagtaaatgcctgcgcgatatccagactcatgtgcagtacatcaacagcatg

SEQ ID NO: 635635 - DNA, 75 bp, synthetic construct
  source 1..75: mol_type = other DNA
gtgattgcgctgggtacggttattcgtggtggcactgcccactttgaatatgtcgctggtggtgcaagcaacggc

SEQ ID NO: 635636 - DNA, 75 bp, synthetic construct
  source 1..75: mol_type = other DNA
gacctggcggggaaactggaatgtacggtcaacagcgatatatacagcgccagcggcaatgtaaaacttatcgaa

SEQ ID NO: 635637 - DNA, 75 bp, synthetic construct
  source 1..75: mol_type = other DNA
gatggacagcgtcgaaagttctatctcttcgaacgccatagtgctgacaaccattaaagatgggcaatgcctgac

SEQ ID NO: 635638 - DNA, 75 bp, synthetic construct
  source 1..75: mol_type = other DNA
caaccgacacccctggcggtgagcaagaatcgatcattatctccgagtcaggcctctacacactgatcctccgct

SEQ ID NO: 635639 - DNA, 75 bp, synthetic construct
  source 1..75: mol_type = other DNA
gtaaagttacgcagctctgtactcgctgtagcatcttattattacaatatggcgcagagagtgaattaatcgatg

SEQ ID NO: 635640 - DNA, 75 bp, synthetic construct
  source 1..75: mol_type = other DNA
ctgccgatctgatggtacgtattaacaacgcaggtgcggcgaatgccatgaacctgtgctgtactgcgttgctgg

SEQ ID NO: 635641 - DNA, 75 bp, synthetic construct
  source 1..75: mol_type = other DNA
aaagagagcctgccgcagatgctgcgcggtttaagcaagctgcgtaatctcggtcagggttacgtcaacttcggt

SEQ ID NO: 635642 - DNA, 75 bp, synthetic construct
  source 1..75: mol_type = other DNA
ttccaccgttttccgtgagtatctcggcgaactgttcagccgtggttattccgtcgagtacttcgtggaaggcgg

SEQ ID NO: 635643 - DNA, 75 bp, synthetic construct
  source 1..75: mol_type = other DNA
tgattattgtggccgctttccttctgctggccgccggggtgtctgtctactatatcccgtcgattattcgtgcaa

SEQ ID NO: 635644 - DNA, 75 bp, synthetic construct
  source 1..75: mol_type = other DNA
cgacgcatcagcgattaatcgctttattatcacaagaaggcgctaacttccgcgttattactcacgaagcggtgg

SEQ ID NO: 635645 - DNA, 75 bp, synthetic construct
  source 1..75: mol_type = other DNA
gccatatcggtgggttgcgtgcttcgctggccagcccggctgaagtcgatgaactgacaggctgtgtcttcggtg

SEQ ID NO: 635646 - DNA, 75 bp, synthetic construct
  source 1..75: mol_type = other DNA
acgcgagcaattatttataaattgtatacttactaaaaaagtcatagattcaagcacaattaccattctcaattt

SEQ ID NO: 635647 - DNA, 75 bp, synthetic construct
  source 1..75: mol_type = other DNA
cccggcggtggataaatactcaaccccgttgctatatctgaagggttttcatgctttgcaggcgtatcgcatcgg

SEQ ID NO: 635648 - DNA, 75 bp, synthetic construct
  source 1..75: mol_type = other DNA
ggtcgcggtatcatgctcgaccacgcgacaggcatcgtcgttggtgaaacggcggtgattgaaaacgacgtatcg

SEQ ID NO: 635649 - DNA, 75 bp, synthetic construct
  source 1..75: mol_type = other DNA
atattcaggcagtgcgtacccgcgaccctgcagtcgataaatactcaaccccattgttatatctgaaaggttttc

SEQ ID NO: 635650 - DNA, 75 bp, synthetic construct
  source 1..75: mol_type = other DNA
tcgcattattcgcgatgccggtattgaagctggaaccgtaacgcagactcatcctcatatgttaaggcatgcttg

SEQ ID NO: 635651 - DNA, 75 bp, synthetic construct
  source 1..75: mol_type = other DNA
atgattggcgctggtgcgaaaattctcggcaacattgaagttggtcgtggcgcgaagattggcgcaggttccgtg

SEQ ID NO: 635652 - DNA, 75 bp, synthetic construct
  source 1..75: mol_type = other DNA
tcggcaatattgaagttgggcgcggcgcgaagattggcgcaggttccgtggtgctgcaaccggtgccgccgcata

SEQ ID NO: 635653 - DNA, 75 bp, synthetic construct
  source 1..75: mol_type = other DNA
ctgtttatcggcttacgcagccgcaaaaaaacgcggcatcactcgctaaaggaaaatgtcgctccgggtgggtaa

SEQ ID NO: 635654 - DNA, 75 bp, synthetic construct
  source 1..75: mol_type = other DNA
gcagatactcgtttaattcaggattatctcgggcatcgaaatattcgccatactgtgcgttataccgccagtaat

SEQ ID NO: 635655 - DNA, 75 bp, synthetic construct
  source 1..75: mol_type = other DNA
agcgcgaaaaaatattaagagataaacgtgagcaattattcacaaattgcatacttactgaaaaagtcatagctt

SEQ ID NO: 635656 - DNA, 75 bp, synthetic construct
  source 1..75: mol_type = other DNA
ctgcctgcatcccacattttatgtggtgataatatttgcttttgtcattggttttacctctctggaggtgttgtg

SEQ ID NO: 635657 - DNA, 75 bp, synthetic construct
  source 1..75: mol_type = other DNA
taatcaaagcgtttgtttccagtggacaatttttattaccgttaattattagcctgttagtatgggctgagttgt

SEQ ID NO: 635658 - DNA, 75 bp, synthetic construct
  source 1..75: mol_type = other DNA
gttttacctccgcaggtggtgttgtacaaattggcctgacgttaatggcggaacgttttccccatgccaaaggca

SEQ ID NO: 635659 - DNA, 75 bp, synthetic construct
  source 1..75: mol_type = other DNA
cggagatctacctgaccgaacagcaggcgctggcagagcgttttaatgacgtgccgctgtggatccgcccgcaaa

SEQ ID NO: 635660 - DNA, 75 bp, synthetic construct
  source 1..75: mol_type = other DNA
gctgcagggcaaaattgctgatgctgtgaaagcaaaaggatatcaggtggtgacttctccggataaagcctacta

SEQ ID NO: 635661 - DNA, 75 bp, synthetic construct
  source 1..75: mol_type = other DNA
caatgactgccgtattatcctccaccctgatcttgtctggttgtggagcgatgagcacagcgataaagaaacgta

SEQ ID NO: 635662 - DNA, 75 bp, synthetic construct
  source 1..75: mol_type = other DNA
aattctgccggtgccacactcggtgtaggccttgctgccggtctggtgggtatggctgcagatgcgatggtggaa

SEQ ID NO: 635663 - DNA, 75 bp, synthetic construct
  source 1..75: mol_type = other DNA
ctcagggatggctgaaccgtggttatgaaggcgcagcagttggtgcagcgttaggtgccggtatcaccggatata

SEQ ID NO: 635664 - DNA, 75 bp, synthetic construct
  source 1..75: mol_type = other DNA
atccggtgcgaaaattcagaccagtactgaaacgggtaaccagcataaataccagacccgggtggtctcaaatgc

SEQ ID NO: 635665 - DNA, 75 bp, synthetic construct
  source 1..75: mol_type = other DNA
atgttgttaaatcgtaaaaataactttatcgctgcagttgttctgggggcatttctcctttctggctgtggtgcg

SEQ ID NO: 635666 - DNA, 75 bp, synthetic construct
  source 1..75: mol_type = other DNA
ataatgccgtcgggcgtttcggtcgcgtgtcagaggtggcgtcccgcgtggcggggcagttgtccggcgaaggga

SEQ ID NO: 635667 - DNA, 75 bp, synthetic construct
  source 1..75: mol_type = other DNA
caccgatatctcgaacccggaaatgggcagcgattttacctcgaacacccaggacagggtgagtacggtgcgtac

SEQ ID NO: 635668 - DNA, 75 bp, synthetic construct
  source 1..75: mol_type = other DNA
gttataactccagttctgccggcgcaacattaggtgttggcctggcggctggtctggtggggatggccgctgacg

SEQ ID NO: 635669 - DNA, 75 bp, synthetic construct
  source 1..75: mol_type = other DNA
tatcaccgtcaatattcagccggtacatatggcgattatggaaggggagacggagatctacctgaccgaacaaca

SEQ ID NO: 635670 - DNA, 75 bp, synthetic construct
  source 1..75: mol_type = other DNA
cgatggttgaggatatcaactataccatggtgaccgatgtgcagattgcagagcgtacctctgcgcaggtgacga

SEQ ID NO: 635671 - DNA, 75 bp, synthetic construct
  source 1..75: mol_type = other DNA
tgacgtcgccggataaagcctactactggattcaggctaacgtgcttaaagctgacaaaatggatctgcgcgaat

SEQ ID NO: 635672 - DNA, 75 bp, synthetic construct
  source 1..75: mol_type = other DNA
ttggtatggctgccgatgcaatggtggaggatatcaactacaccatgatcacggatgtgcagattgcagagcgga

SEQ ID NO: 635673 - DNA, 75 bp, synthetic construct
  source 1..75: mol_type = other DNA
ctggatccaggctaacgttctcaaagcagacaaaatggatctgcgtgaatctcagggatggttgagtcgcggcta

SEQ ID NO: 635674 - DNA, 75 bp, synthetic construct
  source 1..75: mol_type = other DNA
ttggcttagtagcatccactctcgtactttctggctgtggtgccatgtccaccgctgttaaaaagcgtaacctcg

SEQ ID NO: 635675 - DNA, 75 bp, synthetic construct
  source 1..75: mol_type = other DNA
cggattttctaccgttcacccgttacgttttgatgagcgtgaagccgtggaacgctggacccaggaacgtgctaa

SEQ ID NO: 635676 - DNA, 75 bp, synthetic construct
  source 1..75: mol_type = other DNA
atatcaactacaccatgatcacggatgtgcagattgcagagcggacaacatctaaagtcagaactgataatgttg

SEQ ID NO: 635677 - DNA, 75 bp, synthetic construct
  source 1..75: mol_type = other DNA
ctcggtgtgggccttgctgctggtctggtgggtatggctgcagatgcgatggtggaagatgtgaactataccatg

SEQ ID NO: 635678 - DNA, 75 bp, synthetic construct
  source 1..75: mol_type = other DNA
cacgctgggggtaggactggctgccggccttgtgggaatggcggctgatgcgatggtggaagatatcaactacac

SEQ ID NO: 635679 - DNA, 75 bp, synthetic construct
  source 1..75: mol_type = other DNA
agttctgcaggggcgactctgggtgtaggacttgcagccggtctggttggtatggctgctgacgcgatggtggaa

SEQ ID NO: 635680 - DNA, 75 bp, synthetic construct
  source 1..75: mol_type = other DNA
tctgataaggatatgagtggcctgcaggcaaaaattgccagcgccgtcacttcaaagggatatcaggtcgtcagt

SEQ ID NO: 635681 - DNA, 75 bp, synthetic construct
  source 1..75: mol_type = other DNA
gttcgataccgccatcgctgccatcgattttttactggcactgtttatcggcttacgcagcggtgatgctgccaa

SEQ ID NO: 635682 - DNA, 75 bp, synthetic construct
  source 1..75: mol_type = other DNA
gcaaattggcctgacattaatggctgaacgtttcccctacgctaaaggtaaagctacagggatctattacagtgc

SEQ ID NO: 635683 - DNA, 75 bp, synthetic construct
  source 1..75: mol_type = other DNA
atagttatctcatcgctgggcattggtcgattaagtgtcttgctttttgcaggattattatccgatcgctttggt

SEQ ID NO: 635684 - DNA, 75 bp, synthetic construct
  source 1..75: mol_type = other DNA
accgacagccccgacgctcagggcaatatcgggttttccagcaacacccaggatcgggtgagcagcgtacaggtg

SEQ ID NO: 635685 - DNA, 75 bp, synthetic construct
  source 1..75: mol_type = other DNA
attgagcgggtacagcttttcgatatgttcccccacaccgcacattatgaagtgctgacgctgctggtgaagcaa

SEQ ID NO: 635686 - DNA, 75 bp, synthetic construct
  source 1..75: mol_type = other DNA
caaacatgcttttaaatcttcactatctcgcaactccattgagaatatcctgtataaagcaggaaattatataaa

SEQ ID NO: 635687 - DNA, 75 bp, synthetic construct
  source 1..75: mol_type = other DNA
ccaacaatttcagctggagtgttaacagctggattggaggcgacacagatcggatttggctaaagagtgaaggtg

SEQ ID NO: 635688 - DNA, 75 bp, synthetic construct
  source 1..75: mol_type = other DNA
tctgatattaatctgaagataaacccgataccgagcatcagagatttcaatgatcaacccggcgttatgaacctg

SEQ ID NO: 635689 - DNA, 75 bp, synthetic construct
  source 1..75: mol_type = other DNA
caactggcagcggtgacatcgggccgcgacttactcgaccaggccaggttactttcccgctggctgagcgggcag

SEQ ID NO: 635690 - DNA, 75 bp, synthetic construct
  source 1..75: mol_type = other DNA
cattgcctgtgcaaagcagtcagccgctgaactgggcttaacgcgtttgcaatttcaggcgctggactccacgca

SEQ ID NO: 635691 - DNA, 75 bp, synthetic construct
  source 1..75: mol_type = other DNA
ttccgcgaccgtctggcggctaatggcaagaaaggaaaggtgattctcggcgcgatgatgcgcaagctggcacag

SEQ ID NO: 635692 - DNA, 75 bp, synthetic construct
  source 1..75: mol_type = other DNA
gtaagactgagtggggacgggcgttccgcgaccgtctggcggctaatggcaagaaaggaaaggtgattctcggcg

SEQ ID NO: 635693 - DNA, 75 bp, synthetic construct
  source 1..75: mol_type = other DNA
gcaaccgcgtctgaatccgctgcactgcaatacctggcaccgtatgctggttgcgcaatgggcgaatacttccgt

SEQ ID NO: 635694 - DNA, 75 bp, synthetic construct
  source 1..75: mol_type = other DNA
gctttaccgccttcgaactcttcgccgtctacagaaccggtgaagtcgatggttacgcggtcttctgcttcaaca

SEQ ID NO: 635695 - DNA, 75 bp, synthetic construct
  source 1..75: mol_type = other DNA
aaggctcactctcctttgccaaccctacggttcgcgcctggttattccagatccttgccgttgttgctgttgtcg

SEQ ID NO: 635696 - DNA, 75 bp, synthetic construct
  source 1..75: mol_type = other DNA
gggatccaggcagtgccttatggtcaacatgaagcggctcggtcactgggattacccaacccggttacgctacgc

SEQ ID NO: 635697 - DNA, 75 bp, synthetic construct
  source 1..75: mol_type = other DNA
gtcggtggcggcaaatctggcggttatcgcacaatcattttctatcgcgtcggcacaagggcctttttcgtatat

SEQ ID NO: 635698 - DNA, 75 bp, synthetic construct
  source 1..75: mol_type = other DNA
tgaggagaatattctttctggtggcactcaggaagagttaataaatacatattcccatgtgtgtaggtctggaaa

SEQ ID NO: 635699 - DNA, 75 bp, synthetic construct
  source 1..75: mol_type = other DNA
ggaggagaacattctttctggcgacactcaggaagagctaatgaatgcatattcccatgtgtgtgagtctggaaa

SEQ ID NO: 635700 - DNA, 75 bp, synthetic construct
  source 1..75: mol_type = other DNA
tgaattgaatctttcaggagcggatgaacttgccgatactcagattcgttttccagcgttcttggtagcgaccca

SEQ ID NO: 635701 - DNA, 75 bp, synthetic construct
  source 1..75: mol_type = other DNA
gtcacctgcaaagtgatccgaaagccgtggcgatctgggcaacagagctggcgttaagcagtgagaaagggaaaa

SEQ ID NO: 635702 - DNA, 75 bp, synthetic construct
  source 1..75: mol_type = other DNA
aggatatccgccggggaaatatcacgatagtgtttgatccgaaaggggatgcggatttgctgcgccggatgtggg

SEQ ID NO: 635703 - DNA, 75 bp, synthetic construct
  source 1..75: mol_type = other DNA
cacatacacaaatttcaacgctgcatggcgtggagcagcatgatgaatttttgaacatgactcttgccggagctc

SEQ ID NO: 635704 - DNA, 75 bp, synthetic construct
  source 1..75: mol_type = other DNA
tctgcttgaacctctcccttccggtcatttttctattggtgagttggtgcaatatgacaaatacaaaactacgca

SEQ ID NO: 635705 - DNA, 75 bp, synthetic construct
  source 1..75: mol_type = other DNA
atttcggaaggcggctccttacgtactcagccttacagatgaacaactggcacaactgattctacagggtcagtt

SEQ ID NO: 635706 - DNA, 75 bp, synthetic construct
  source 1..75: mol_type = other DNA
atgcgaattttcaaaaacgcctggtttgaacgtttcgcccgaaaacatcggatttccgataaatcgctgcgcaaa

SEQ ID NO: 635707 - DNA, 75 bp, synthetic construct
  source 1..75: mol_type = other DNA
atttattgatagtttgattgctaaaacgcaaaaggagcaggatgagtgccaacagaacatcaactatgcgaagga

SEQ ID NO: 635708 - DNA, 75 bp, synthetic construct
  source 1..75: mol_type = other DNA
agaatctcgaccagtatcttcaggacgaaaacacacgtcttctcaatattggcaatgaaatttcacttttaacaa

SEQ ID NO: 635709 - DNA, 75 bp, synthetic construct
  source 1..75: mol_type = other DNA
tggaaaagatttctctactggttttggcgtaatggctggtcgttggttgccggaggtaataagctatggcgctta

SEQ ID NO: 635710 - DNA, 75 bp, synthetic construct
  source 1..75: mol_type = other DNA
ggacggtgatgatgccccggtgcccgtcgcgtccctttgtgacgccggtgacaaccggggagtggcgtgcactgt

SEQ ID NO: 635711 - DNA, 75 bp, synthetic construct
  source 1..75: mol_type = other DNA
atcttctgggcatgtgataaccccaactacaccgaccataaagctgacctgccagcgctgggcgcattcctgaaa

SEQ ID NO: 635712 - DNA, 75 bp, synthetic construct
  source 1..75: mol_type = other DNA
aatggcggcactggttgcggtgatgatcatggtttccatcgggacattctcctggcgttccattgccaacctgcg

SEQ ID NO: 635713 - DNA, 75 bp, synthetic construct
  source 1..75: mol_type = other DNA
ttagtggcctggttattcctgtcacaatggattcgcattaccgtttttgtggttgccattctgctatggctgaac

SEQ ID NO: 635714 - DNA, 75 bp, synthetic construct
  source 1..75: mol_type = other DNA
aagaagttcgcgaaaatggcggcatgcagactgaattgatggatcaaacaaatctgccggttattttgctgggct

SEQ ID NO: 635715 - DNA, 75 bp, synthetic construct
  source 1..75: mol_type = other DNA
ccgctggctggacgttaccgaaaaagataaaaatagccgtagtgccacgttctacaacacgcttccactgcatga

SEQ ID NO: 635716 - DNA, 75 bp, synthetic construct
  source 1..75: mol_type = other DNA
ttttgggcgcagcgcgcgggcgatgcacgtcagcccatcgacactttcacggcagattcagcgcctggaagaaga

SEQ ID NO: 635717 - DNA, 75 bp, synthetic construct
  source 1..75: mol_type = other DNA
cacgtcagcccatccacgctctcacggcagattcaacgcctggaagaagatctcggtcagccgctgtttatacgc

SEQ ID NO: 635718 - DNA, 75 bp, synthetic construct
  source 1..75: mol_type = other DNA
gccgcttacagccatctgccgccgattcttgacagattccgcgcggaacacccgtcagtggagataaaactcact

SEQ ID NO: 635719 - DNA, 75 bp, synthetic construct
  source 1..75: mol_type = other DNA
agtcgatgatgaccgccactattgtggatgacatgaccgatacgccaagcgacaaaaatagggagtgcaaagctc

SEQ ID NO: 635720 - DNA, 75 bp, synthetic construct
  source 1..75: mol_type = other DNA
gcaatgattggccagtcagttatcaatgttaaatcgggtggacgcggacgactttcaacactgaccgccggcgta

SEQ ID NO: 635721 - DNA, 75 bp, synthetic construct
  source 1..75: mol_type = other DNA
aacgccgtttgagctgggcgtttgtgcgcagaaaaagcggctacatgagccgctgattgaagcgttctggaagat

SEQ ID NO: 635722 - DNA, 75 bp, synthetic construct
  source 1..75: mol_type = other DNA
gtgcctccgttgccgcaggtgtggtgaaaaacccgaaacgcaacgtccctatcgccaccattggcggggtattga

SEQ ID NO: 635723 - DNA, 75 bp, synthetic construct
  source 1..75: mol_type = other DNA
ccgccacagaacgatcattgcttttgctgttgatggcaacaaagtctttatcgctggcgtctactatggcggaca

SEQ ID NO: 635724 - DNA, 75 bp, synthetic construct
  source 1..75: mol_type = other DNA
gccaggggatgcgggtaactcatttccgccacagaacgattattgcttttgccgttgatgacaataaagttttta

SEQ ID NO: 635725 - DNA, 75 bp, synthetic construct
  source 1..75: mol_type = other DNA
ttgctattggcatgattcgcggaacaaaaaacgaattaacagtagatgtaatcaagaatgcgcgtgcctttttga

SEQ ID NO: 635726 - DNA, 75 bp, synthetic construct
  source 1..75: mol_type = other DNA
gcggctaacgccttcaaccctgccagggatatggtacgacgggacgatgatctggatgacctctgtcaggtgcaa

SEQ ID NO: 635727 - DNA, 75 bp, synthetic construct
  source 1..75: mol_type = other DNA
ccctgccagggatatggtacgacgggacgatgatctggatgacctctgtcaggtgcagaccatatccggaccatc

SEQ ID NO: 635728 - DNA, 75 bp, synthetic construct
  source 1..75: mol_type = other DNA
cagatgcaatgataggattaggcaaggcatttattaatggctggtatatgttgggtgcattgattgccaaaggtc

SEQ ID NO: 635729 - DNA, 75 bp, synthetic construct
  source 1..75: mol_type = other DNA
tttggggaaaaatgaagtcgtgcatattgtcagatatattcataattccagtattagaatggaatatgctatagg

SEQ ID NO: 635730 - DNA, 75 bp, synthetic construct
  source 1..75: mol_type = other DNA
aagtgggcttaatccccgttaccctgatggtgtcggggaatattatggggtcaggtgtttttctgttacctgcaa

SEQ ID NO: 635731 - DNA, 75 bp, synthetic construct
  source 1..75: mol_type = other DNA
ctgtggtcatttatcggggtagaaagtgcttctgttgcagcgggtgtagtgaaaaacccgaaacgcaacgtccct

SEQ ID NO: 635732 - DNA, 75 bp, synthetic construct
  source 1..75: mol_type = other DNA
acaggataatctctgtaggtgctttcagaaccaaagccgctgccgcttgcgccaaaatgtacttaccagaagatg

SEQ ID NO: 635733 - DNA, 75 bp, synthetic construct
  source 1..75: mol_type = other DNA
atcagaaaacgccctggcagaattgacagaatcatatctgtaggtgcttttcggactaaagccgctgccgcttgt

SEQ ID NO: 635734 - DNA, 75 bp, synthetic construct
  source 1..75: mol_type = other DNA
tcagaatgaggttgttcatattgttcgcttcatccttaattcaaaaatcaggatggaatacgctgtcggcacagc

SEQ ID NO: 635735 - DNA, 75 bp, synthetic construct
  source 1..75: mol_type = other DNA
tctcggtcagccgctgtttgtgcgcgataaccgcacggtgacgctgactgaagcgggcgaagaactgcgcgtttt

SEQ ID NO: 635736 - DNA, 75 bp, synthetic construct
  source 1..75: mol_type = other DNA
attatgcctatctgaaaatttcggaaggctgtaatcaccgctgcaccttctgcattattccgtctatgcgcggcg

SEQ ID NO: 635737 - DNA, 75 bp, synthetic construct
  source 1..75: mol_type = other DNA
cttggttctggaatctcaaatcacaggggaatggtatgttttcccgcgaggccgcatgagttttgagggcaatgg

SEQ ID NO: 635738 - DNA, 75 bp, synthetic construct
  source 1..75: mol_type = other DNA
atgaaaaaaattatcactttgatgttatttttgacattctttgcccacgcagacgactccgagccaggcagccag

SEQ ID NO: 635739 - DNA, 75 bp, synthetic construct
  source 1..75: mol_type = other DNA
gaaaaaattggtcagggtattttaatcactcactcgatgggcggcactattggctggagaacgcccttttatacc

SEQ ID NO: 635740 - DNA, 75 bp, synthetic construct
  source 1..75: mol_type = other DNA
cccgtatgggtgaagccggtttatcaaccaaagatgatacgggtaaaaatccctgggcgggcaatcctatgtatg

SEQ ID NO: 635741 - DNA, 75 bp, synthetic construct
  source 1..75: mol_type = other DNA
cgggcgttaaagagattctggtgatctcgcaggatacttccgcctatggcgtcgatgttaaacatcgtactggct

SEQ ID NO: 635742 - DNA, 75 bp, synthetic construct
  source 1..75: mol_type = other DNA
atgaggtgattttcagtgaagtctcccctcgcccgcatgacaccgggatggtgacgctaatttctcaggatctct

SEQ ID NO: 635743 - DNA, 75 bp, synthetic construct
  source 1..75: mol_type = other DNA
ggcaaccgcagcaaatgagcccccttgcccttgaacgtgcgcaggagattgcccgtaaagtggtgctggcgctgg

SEQ ID NO: 635744 - DNA, 75 bp, synthetic construct
  source 1..75: mol_type = other DNA
gccgttgttcgaccgtgaagttgaaggttttggtgaagtgttccgtatgttgtcgtttgaagagattggcacttc

SEQ ID NO: 635745 - DNA, 75 bp, synthetic construct
  source 1..75: mol_type = other DNA
tgatgcctgcgcgctgttggcgcagatcaaaatcaccaatccggtcagtctggactatccacaagcaaaagttct

SEQ ID NO: 635746 - DNA, 75 bp, synthetic construct
  source 1..75: mol_type = other DNA
caggcatgggaatacgcccagcaaggcggtcgcgccggagcgggtcgcgtgattgttgagggcgtggttaagttt

SEQ ID NO: 635747 - DNA, 75 bp, synthetic construct
  source 1..75: mol_type = other DNA
gtgcagaatgccgtaggcgcagatttgcagattcgtttatttggtaagccggaaattgatggcagccgtcgtctg

SEQ ID NO: 635748 - DNA, 75 bp, synthetic construct
  source 1..75: mol_type = other DNA
ctggtcaccatcttcgtgacgtgtccgtttgtggtgcgcgagctggtgccggtgatgttaagccagggcagccag

SEQ ID NO: 635749 - DNA, 75 bp, synthetic construct
  source 1..75: mol_type = other DNA
ttctggacctgaaaatagaaaatctgcattttcacgatctccgtcatgaagccatcagccgatttttcgaacttg

SEQ ID NO: 635750 - DNA, 75 bp, synthetic construct
  source 1..75: mol_type = other DNA
agcccagagctggtggcggttacgtaaactttttcagaatacctggcgcgccgtggttgaaggtatggcttacaa

SEQ ID NO: 635751 - DNA, 75 bp, synthetic construct
  source 1..75: mol_type = other DNA
ggtgtggcagccagccagctatttctctggcgtaagcaataccaggagggaagtcttactgctgtggctgccgga

SEQ ID NO: 635752 - DNA, 75 bp, synthetic construct
  source 1..75: mol_type = other DNA
cagcaactgcgccacaccatcgatcagcaagggccgtcgctctctggcgagttacatattttctgctcggtgacc

SEQ ID NO: 635753 - DNA, 75 bp, synthetic construct
  source 1..75: mol_type = other DNA
ccggaaccggtgcgtaaccgcgtgatgattttagagcgcagtgatgaaaaaacgccgtttgagctgggcgtgtgt

SEQ ID NO: 635754 - DNA, 75 bp, synthetic construct
  source 1..75: mol_type = other DNA
ttttgcatctggcggaaagccgccattttggccgtagcgcacgggcgatgcacgttagcccatccacgctctcac

SEQ ID NO: 635755 - DNA, 75 bp, synthetic construct
  source 1..75: mol_type = other DNA
tgttcctgcctctgaacttgctgctgccatgaagcagattaaagaactccagcgcctgctcggcaagaaaacgat

SEQ ID NO: 635756 - DNA, 75 bp, synthetic construct
  source 1..75: mol_type = other DNA
gctgtgccggtgaacctggtgttcggcatcctgttggcctggctggtgacgcgttttgattttccggggcgtcag

SEQ ID NO: 635757 - DNA, 75 bp, synthetic construct
  source 1..75: mol_type = other DNA
tatgttctcctggcccggaatggtgctggtcacgatcttcgtgacgtgtccgtttgtggtgcgcgaactggtgcc

SEQ ID NO: 635758 - DNA, 75 bp, synthetic construct
  source 1..75: mol_type = other DNA
tcgtgacgatctggatttactggtttcagtgcttatctacgatccgaaagacggactggcacgcatcacggaaac

SEQ ID NO: 635759 - DNA, 75 bp, synthetic construct
  source 1..75: mol_type = other DNA
atacgggagcaggaatgcgcggccagctcaaaaggaaggggaagatgcttattctgtatctgctgctactggcag

SEQ ID NO: 635760 - DNA, 75 bp, synthetic construct
  source 1..75: mol_type = other DNA
ggatgtatgagacgcgttatggctggctgatctggcgtctgtgtgtctactgcgcgctcggatggtggggatgga

SEQ ID NO: 635761 - DNA, 75 bp, synthetic construct
  source 1..75: mol_type = other DNA
gatcaacgccaagccgatttccgcagcagtgaaagagttcttcggttccagccagctgtctcagtttatggtcca

SEQ ID NO: 635762 - DNA, 75 bp, synthetic construct
  source 1..75: mol_type = other DNA
ctgggcgtaccgtctcgtatgaacattggtcagatcctcgaaacccacctaggtatggctgcgaaaggtatcggc

SEQ ID NO: 635763 - DNA, 75 bp, synthetic construct
  source 1..75: mol_type = other DNA
tggataccctgatgcctcaggacatgatcaacgccaagccgatttccgcagcagtgaaagagttcttcggttcca

SEQ ID NO: 635764 - DNA, 75 bp, synthetic construct
  source 1..75: mol_type = other DNA
cgttcatgccgtggaatggttacaacttcgaagactccatcctcgtatccgagcgtgttgttcaggaagaccgtt

SEQ ID NO: 635765 - DNA, 75 bp, synthetic construct
  source 1..75: mol_type = other DNA
cgttaagtctgatgacgtaaacggtcgtaccaagatgtataagaacatcgtggacggcaaccatcagatggagcc

SEQ ID NO: 635766 - DNA, 75 bp, synthetic construct
  source 1..75: mol_type = other DNA
cgtctggtgatctatgagcgcgaagcgccggaaggcaccgtaaaagatattaaagaacaagaagtctacatgggc

SEQ ID NO: 635767 - DNA, 75 bp, synthetic construct
  source 1..75: mol_type = other DNA
acggttagttgatgcgggtgccgattatatttctgttgtcacgccgtactatctggtaccaaatcaggaagattt

SEQ ID NO: 635768 - DNA, 75 bp, synthetic construct
  source 1..75: mol_type = other DNA
gtctcgtctgaaactcatctatgcgggcgtgacggaaatcatcacccagttccagcctgattatttcgccattga

SEQ ID NO: 635769 - DNA, 75 bp, synthetic construct
  source 1..75: mol_type = other DNA
agatcatgaaaaaactgtccggtggtatccgtaccgctctggcacagtatcgtgaactggcagcgttctctcagt

SEQ ID NO: 635770 - DNA, 75 bp, synthetic construct
  source 1..75: mol_type = other DNA
agcggaaattaaagagcttctgaaacttggcgacctgccgacttctggtcagatcaccctgtacgacggccgcac

SEQ ID NO: 635771 - DNA, 75 bp, synthetic construct
  source 1..75: mol_type = other DNA
tcctataccgagaaaaacgtattcgtaaggattttggtaaacgtccacaagttctggatgtaccttatctccttt

SEQ ID NO: 635772 - DNA, 75 bp, synthetic construct
  source 1..75: mol_type = other DNA
aggaactggcgtgtgtgtcccgtgacaccaagctggggccagaagagatcaccgctgacatcccgaatgtgggtg

SEQ ID NO: 635773 - DNA, 75 bp, synthetic construct
  source 1..75: mol_type = other DNA
tggataccctgatgcctcaggacatgatcaatgctaagccgatttctgcagcagtgaaagagttctttggttcca

SEQ ID NO: 635774 - DNA, 75 bp, synthetic construct
  source 1..75: mol_type = other DNA
ggcgtgaaaaaggcgaagtaaacccgccgctgcgtatgcttaacggcgtacagaaatttttcgctgtactgtggc

SEQ ID NO: 635775 - DNA, 75 bp, synthetic construct
  source 1..75: mol_type = other DNA
aaattatcgcccagaaactggcgcgcgtggcacgtatgcactttgcccgccagcgccttgctgccgtgggtccac

SEQ ID NO: 635776 - DNA, 75 bp, synthetic construct
  source 1..75: mol_type = other DNA
atcgatcacgcgctgcaaatgaacaagtttgaagtcgagaaagacactatcggcgacatcatcattctgccacgc

SEQ ID NO: 635777 - DNA, 75 bp, synthetic construct
  source 1..75: mol_type = other DNA
ctcgcctcccgcgccattgccaaagcggtagaagatgaagcgcgcagcaaaaaaatctcccatgaaaaagcgcag

SEQ ID NO: 635778 - DNA, 75 bp, synthetic construct
  source 1..75: mol_type = other DNA
aagcggtagaagatgaagcgcgcagcaaaaaaatctcccatgaaaaagcgcagcagaacgcgattgcgctgatgg

SEQ ID NO: 635779 - DNA, 75 bp, synthetic construct
  source 1..75: mol_type = other DNA
cgtcacgtcagcgctcactcacccgcgagcagttaaccgagcaactcaactgctacctggatctgatgcgcaacg

SEQ ID NO: 635780 - DNA, 75 bp, synthetic construct
  source 1..75: mol_type = other DNA
ttgctgctgattgtgactatatattcacaactgatgggaatatcttagaaaaatacaagtctcgtgttggacata

SEQ ID NO: 635781 - DNA, 75 bp, synthetic construct
  source 1..75: mol_type = other DNA
ttttcctgacctgtattctcgggatagtcggtgcggtggtcggcggctggctggcgaccatgtttggcattggcg

SEQ ID NO: 635782 - DNA, 75 bp, synthetic construct
  source 1..75: mol_type = other DNA
gacgaaattcactacctgtctgctatagaagaaggcaactacgttatcgcccaggcgaactccaacctggatgaa

SEQ ID NO: 635783 - DNA, 75 bp, synthetic construct
  source 1..75: mol_type = other DNA
caacttcggtgaaccaatgccgttgatgacctaccttaaccagcacgtaccagactggcgtgaatctatcgatcc

SEQ ID NO: 635784 - DNA, 75 bp, synthetic construct
  source 1..75: mol_type = other DNA
ggctggatacctctcgtccaattatgtacgttttaccgtacaactcgaaagcagatttgctgacgttgcgcgccc

SEQ ID NO: 635785 - DNA, 75 bp, synthetic construct
  source 1..75: mol_type = other DNA
ccaatctcatgagaacaaagaattactactaatccttaataatgatgacttcgatatagatttgattaaaaataa

SEQ ID NO: 635786 - DNA, 75 bp, synthetic construct
  source 1..75: mol_type = other DNA
gtgaatttctcgggaacggagacaatgtcggtaagctgttagaaggggaatattttacggtgcgtggctaccaga

SEQ ID NO: 635787 - DNA, 75 bp, synthetic construct
  source 1..75: mol_type = other DNA
ggtcgtcgtcaccgtggtcggcattggcttccttatttactgggtggtgccaggtattccgctgatccccgcttt

SEQ ID NO: 635788 - DNA, 75 bp, synthetic construct
  source 1..75: mol_type = other DNA
gaatttgacccagaactctttttagtcttatttatcccgccgttgctgttcgcggatggctggaaaacgccgacc

SEQ ID NO: 635789 - DNA, 75 bp, synthetic construct
  source 1..75: mol_type = other DNA
agattaagctccacgaaaaactatccaagagtgatatactaaatatattggctgagcagatgaccatgcctgagg

SEQ ID NO: 635790 - DNA, 75 bp, synthetic construct
  source 1..75: mol_type = other DNA
tccaaagtcaatggcatgggcaaactggaatcctttaacgccgtcagctccctgattttgggacaatccgagaac

SEQ ID NO: 635791 - DNA, 75 bp, synthetic construct
  source 1..75: mol_type = other DNA
atggaacagcatcagcgccatcaggaaggcgtgctggcctactcaattgttaatttattatcggagaagtcatga

SEQ ID NO: 635792 - DNA, 75 bp, synthetic construct
  source 1..75: mol_type = other DNA
gcgcctgcgcgcaaacagcacctgggcgatgctggaatttgtctttaacggcatggtgttcctgctgttaggtct

SEQ ID NO: 635793 - DNA, 75 bp, synthetic construct
  source 1..75: mol_type = other DNA
cgaggcgtctacacgccgtcagcaggaaatggaagccgctgataccgaaccttttgcggtgtggctggaaaaaca

SEQ ID NO: 635794 - DNA, 75 bp, synthetic construct
  source 1..75: mol_type = other DNA
gcagtggcgggaaaaatcgcggcagcttgcggaacggggagacctgacccccgccgactggagcaatctggaact

SEQ ID NO: 635795 - DNA, 75 bp, synthetic construct
  source 1..75: mol_type = other DNA
acacatatccggaccatcacccaccgggtgacggacaccacccttaaggtggtggcagccgatccgaatacggtg

SEQ ID NO: 635796 - DNA, 75 bp, synthetic construct
  source 1..75: mol_type = other DNA
cctatcttgatgagatcgcggcgcagcagtggaaagcaaaggcgaagcagctggcggagcgcggtgatctgacgc

SEQ ID NO: 635797 - DNA, 75 bp, synthetic construct
  source 1..75: mol_type = other DNA
gcgatttgcatcgctataccgcgcgtaatattggcgatgagcggatgtggccgttaagtatgccatgttacatcg

SEQ ID NO: 635798 - DNA, 75 bp, synthetic construct
  source 1..75: mol_type = other DNA
acgtagcgggcctgaaacaggcaatcaaaacgccatcggaagagtacgcgaagattggtattgagaaagacggta

SEQ ID NO: 635799 - DNA, 75 bp, synthetic construct
  source 1..75: mol_type = other DNA
cattctggcaggtttcaaagttgccattatcgttgccgcgatgctgatcggctttatcgccctgatcgccgcgct

SEQ ID NO: 635800 - DNA, 75 bp, synthetic construct
  source 1..75: mol_type = other DNA
gggcagctggtccgcagccggtgttgccgatcaatccgtgaccgtactgaccgggattaaaaatgccgtcggtga

SEQ ID NO: 635801 - DNA, 75 bp, synthetic construct
  source 1..75: mol_type = other DNA
gtgtcgtcgatcaatccgtgactgtgctaaccgggattaaaaatgccgttggtgaaaacggtaaagtgctgtacg

SEQ ID NO: 635802 - DNA, 75 bp, synthetic construct
  source 1..75: mol_type = other DNA
atgaaatggctatgttcagtaggaatcgcggtgagtctggccctgcagccagcactggcggatgatttattcggc

SEQ ID NO: 635803 - DNA, 75 bp, synthetic construct
  source 1..75: mol_type = other DNA
gatgtgctgcacggtcagcgcacggtgttcccgattagcctcggtctggcctcgtcttttaacctcgatgcggtg

SEQ ID NO: 635804 - DNA, 75 bp, synthetic construct
  source 1..75: mol_type = other DNA
atcaacagatgaaatatgacgccgagcctggcaagttcaatgtcttcatcggcactgattccgcacgcgttaaga

SEQ ID NO: 635805 - DNA, 75 bp, synthetic construct
  source 1..75: mol_type = other DNA
cgttcgccgcaagagatgattgatgaagcggtgcagacggcgaaacaatctgatgtggtggtggctgtggtcggt

SEQ ID NO: 635806 - DNA, 75 bp, synthetic construct
  source 1..75: mol_type = other DNA
gctttatcgccctgatcgccgcgctgaacgcactgtttgccaccgtgactggctggtttggctacagcatctcct

SEQ ID NO: 635807 - DNA, 75 bp, synthetic construct
  source 1..75: mol_type = other DNA
tttatcgcctataaagatatcctcggcaaaatgtcccgcaaccgcatgtacaccatggcggccacggcgatgtct

SEQ ID NO: 635808 - DNA, 75 bp, synthetic construct
  source 1..75: mol_type = other DNA
ctatccgattgcatgggtgatgggtgttccttccagtgaagcactgcaagtgggcagtatcatggcgaccaaact

SEQ ID NO: 635809 - DNA, 75 bp, synthetic construct
  source 1..75: mol_type = other DNA
tggcggatgatttattcggcaaccatccattaacgcccgaagcgcgggatgcgttcgtcaccgaactgcttaaga

SEQ ID NO: 635810 - DNA, 75 bp, synthetic construct
  source 1..75: mol_type = other DNA
aacttcgtctttggtagcatgaatgatcaaggcctggcgttcttcttcctgaaagtgctgtgccctatcgtcttt

SEQ ID NO: 635811 - DNA, 75 bp, synthetic construct
  source 1..75: mol_type = other DNA
ttcaactgcttgttatcgaagtgttactggcgtggttcttcctgaactccgacgttggtttgggcttcgtgaaag

SEQ ID NO: 635812 - DNA, 75 bp, synthetic construct
  source 1..75: mol_type = other DNA
gttcaggccatgatgcaggcggtttgttacggggcaacgggagccagagattattgtcttattctgttggcatat

SEQ ID NO: 635813 - DNA, 75 bp, synthetic construct
  source 1..75: mol_type = other DNA
agaggacgtgctggcgctgctggacgtgccggtactggcggcgcggtttgatatcaccgaagaagggctacgtta

SEQ ID NO: 635814 - DNA, 75 bp, synthetic construct
  source 1..75: mol_type = other DNA
ggcacagtggctacagatgactctggcgcaaaagttcggtattgctgcgaacattgattttccgctgcctgcaag

SEQ ID NO: 635815 - DNA, 75 bp, synthetic construct
  source 1..75: mol_type = other DNA
tcgggcgcggcagtcacatccggtactggaagcgtttatcagcctgttatcactgccagacagccgctttgtgtc

SEQ ID NO: 635816 - DNA, 75 bp, synthetic construct
  source 1..75: mol_type = other DNA
gtatcgggcgcggcggcggagctgaccaccatgttctgttacatcgttggtgtgagcaaatgcctgcgtgatatc

SEQ ID NO: 635817 - DNA, 75 bp, synthetic construct
  source 1..75: mol_type = other DNA
agacagaacgctgaaagagatggggattaatccgcaggatgaatggaaaaattacagcttcagtgatgcaggcga

SEQ ID NO: 635818 - DNA, 75 bp, synthetic construct
  source 1..75: mol_type = other DNA
ggcattcgctgggggattgatgacgacaacgttcgcgagctggaactccccgccaccgggcaacacacctggcga

SEQ ID NO: 635819 - DNA, 75 bp, synthetic construct
  source 1..75: mol_type = other DNA
ccgacactcactccgcgcgatatcatcgtgatggtggctgacatcgatagctacagtccgtttattcaggcggtg

SEQ ID NO: 635820 - DNA, 75 bp, synthetic construct
  source 1..75: mol_type = other DNA
ccgaagcgtggcgaccgtagccgtcgcgatgacgaccgctatctgttcctggaagcgttaatttccgcgcagcaa

SEQ ID NO: 635821 - DNA, 75 bp, synthetic construct
  source 1..75: mol_type = other DNA
cggccagccaggctggtaaagcacattctgaatttgttcagccgctgccgtttaccttgccggaaaccgtgccgc

SEQ ID NO: 635822 - DNA, 75 bp, synthetic construct
  source 1..75: mol_type = other DNA
ggcgcagtggctgcaaatgacgctgtcgcagaagttcggcattgcggcaaacattgatttcccgctgccggcgag

SEQ ID NO: 635823 - DNA, 75 bp, synthetic construct
  source 1..75: mol_type = other DNA
ttgaaatccatctcctgtttaccaacccttgccgttattactggggcgatattaaagatcctgcttatctggcga

SEQ ID NO: 635824 - DNA, 75 bp, synthetic construct
  source 1..75: mol_type = other DNA
cgcaacgtttcctgttaccgctgtttcgctttaatcagtcatgggtgctgtataaaaattgcgcaatctatccgc

SEQ ID NO: 635825 - DNA, 75 bp, synthetic construct
  source 1..75: mol_type = other DNA
agactggaaatctcaacataagaagatttctcaacgcttctcgaagggtatggtggaaatcaccataccttctgc

SEQ ID NO: 635826 - DNA, 75 bp, synthetic construct
  source 1..75: mol_type = other DNA
cattaaacgccctggcaaaaaaatgaacagtccgatacgtggccgcgtaacactgattacggaatcaggctatct

SEQ ID NO: 635827 - DNA, 75 bp, synthetic construct
  source 1..75: mol_type = other DNA
cagcgcttctgacaaatctccacctgatagagcgctctcaagtcgcattcattgatgacgcccaacacaccgtat

SEQ ID NO: 635828 - DNA, 75 bp, synthetic construct
  source 1..75: mol_type = other DNA
aagagtcacggccgaagcagccgaaattatcgaaaaacaggatgctgaactaacggttctcagaacacaaccagt

SEQ ID NO: 635829 - DNA, 75 bp, synthetic construct
  source 1..75: mol_type = other DNA
tatgatttccgctcgtatttgctgcaccaacagaagatcaatcaaccactgagagacgacgcgcgcgcttactgg

SEQ ID NO: 635830 - DNA, 75 bp, synthetic construct
  source 1..75: mol_type = other DNA
atggcaaagtgttccttacgcaggcgcagctggcgatgctgctggaaggtatcgactggcgacagcccaagcggc

SEQ ID NO: 635831 - DNA, 75 bp, synthetic construct
  source 1..75: mol_type = other DNA
cgtccggcggtacggctggtagatgcgatggggcagattgatttcgataaatatgagtgggaggcggcacatgat

SEQ ID NO: 635832 - DNA, 75 bp, synthetic construct
  source 1..75: mol_type = other DNA
gttgatatgcgcagtgtggcaaagctgatcagcgatttggcaacgcaacttgaagtgcaactggtgcgtgctaat

SEQ ID NO: 635833 - DNA, 75 bp, synthetic construct
  source 1..75: mol_type = other DNA
aagtatctcgccttacaaatccttattctatgcggctttatgagtccttatgccagtacaggaaggatgatggaa

SEQ ID NO: 635834 - DNA, 75 bp, synthetic construct
  source 1..75: mol_type = other DNA
ttatttatccaactgtccaatacctgttttggttttgctttgtaagcctgaaaaaaaagaagtgttttgggaatg

SEQ ID NO: 635835 - DNA, 75 bp, synthetic construct
  source 1..75: mol_type = other DNA
attacgaaggctgggagatggtgaaatacaatgaagacgtcggcgaactgcaccgcaccgacgccaacggtaatc

SEQ ID NO: 635836 - DNA, 75 bp, synthetic construct
  source 1..75: mol_type = other DNA
agtttcgcaaatgcctggctgaagtgcgggcgcagggcgtggatatggctcgtaacgcgatgattgattttgttg

SEQ ID NO: 635837 - DNA, 75 bp, synthetic construct
  source 1..75: mol_type = other DNA
gcgctggccgaagaccagcagagagcgattgagtcaattaagcaggctgatgaagctgttaagttggcacacgag

SEQ ID NO: 635838 - DNA, 75 bp, synthetic construct
  source 1..75: mol_type = other DNA
ttgaaatccatctcctgtttaccaacccctgccgttattactggggcgacattaaagatcctgcttatctggcga

SEQ ID NO: 635839 - DNA, 75 bp, synthetic construct
  source 1..75: mol_type = other DNA
tcggtaaccggtgttaaaccgcgtattctcggcgtgccgggactggataccaaagaggtggctgttgcactggca

SEQ ID NO: 635840 - DNA, 75 bp, synthetic construct
  source 1..75: mol_type = other DNA
cacagctcggcgttaaaccgcgcattctcggcgtgcctggccacgataacaaagccgttgcgactgagttgctga

SEQ ID NO: 635841 - DNA, 75 bp, synthetic construct
  source 1..75: mol_type = other DNA
ctgcttaaccagaacgacgttaccacgcttatccgcaaagacggtttccacttctggggttcccgctgtctgagc

SEQ ID NO: 635842 - DNA, 75 bp, synthetic construct
  source 1..75: mol_type = other DNA
cagtcaaagcccgtcaccgttgtcgtgcgtgttgccgaaggtaccggagaagacgcggaagcgcagaccatttca

SEQ ID NO: 635843 - DNA, 75 bp, synthetic construct
  source 1..75: mol_type = other DNA
gcgggacgtgcaggagaatatggaatacgtgatggaattcaacggaaggaaatgggattacggcaagaagacatt

SEQ ID NO: 635844 - DNA, 75 bp, synthetic construct
  source 1..75: mol_type = other DNA
acccgtcgctggcccgcgacattatcgaaggtatccgcgccaaaatgcgtagcctggtcagtcagggctatctca

SEQ ID NO: 635845 - DNA, 75 bp, synthetic construct
  source 1..75: mol_type = other DNA
cggatgagaacggtaaatacaccggtatcaaggcgctgttgactgccgaagcggtcactggtgttaagccgcgta

SEQ ID NO: 635846 - DNA, 75 bp, synthetic construct
  source 1..75: mol_type = other DNA
acggtgttaccggcatcagcgcatctgtattctgggatttgcaggagtccggcaccgatgctgacctgctgaatg

SEQ ID NO: 635847 - DNA, 75 bp, synthetic construct
  source 1..75: mol_type = other DNA
tcagcgcatggggttgtaaaaccatttccgaggcgatggcctatcgcgagaatttcagtcagcgcgagctgatgg

SEQ ID NO: 635848 - DNA, 75 bp, synthetic construct
  source 1..75: mol_type = other DNA
agcgtgagctgatggttatcttcccggattttctggcatgggacacaacggcgaatgagactgcgacagcctggg

SEQ ID NO: 635849 - DNA, 75 bp, synthetic construct
  source 1..75: mol_type = other DNA
tgccaaaatcgaccagacggtcggctggcataaaaccctgtctaacgttggcgttaacggtgtgaccggcgtcag

SEQ ID NO: 635850 - DNA, 75 bp, synthetic construct
  source 1..75: mol_type = other DNA
ggtgctggccgacacgatggccgaggcgcacatgtgggcggtcgataagcccattaccgcatcgctcatccgtga

SEQ ID NO: 635851 - DNA, 75 bp, synthetic construct
  source 1..75: mol_type = other DNA
cgcagtcgcacttgcgtcggtctgtatcagcctgcgcgcctttggctatgtcagtgcatggggctgtaagactat

SEQ ID NO: 635852 - DNA, 75 bp, synthetic construct
  source 1..75: mol_type = other DNA
ataccttcaagtagtcgaatcctgacaaagtcagagcaagaagcgcttgatgtagctatcgatgtgttaaaacgt

SEQ ID NO: 635853 - DNA, 75 bp, synthetic construct
  source 1..75: mol_type = other DNA
agccgttatcaaatcaatcagcagttattgaatgcactggttgagcaggatgatgccgaacgcttgttccgccgc

SEQ ID NO: 635854 - DNA, 75 bp, synthetic construct
  source 1..75: mol_type = other DNA
ttaacatttgtactctgatgccaatgcgttcaattccgttcaaagtggtttgcctgctgggaatgaacgacggcg

SEQ ID NO: 635855 - DNA, 75 bp, synthetic construct
  source 1..75: mol_type = other DNA
ctttatcgaaacgctggagtccgcgacgacctgcccgccggggttaccttcgcgcgtctttatatgcggtatttc

SEQ ID NO: 635856 - DNA, 75 bp, synthetic construct
  source 1..75: mol_type = other DNA
ctgttcctctttgaaaactacacccgcaccgcgcaggtgctggccgacacgatggctgtgattatgcgtgaaaaa

SEQ ID NO: 635857 - DNA, 75 bp, synthetic construct
  source 1..75: mol_type = other DNA
ttatctggcctgatttcctcgcatgggacaccaccgcgaacgccaccgcaacagcctacgccaccgcgcgcgcac

SEQ ID NO: 635858 - DNA, 75 bp, synthetic construct
  source 1..75: mol_type = other DNA
tgcaactgctctcgcgccgatttgccagaagctgcgcgcctttggctatatcagcgcatgggattgtaagaacat

SEQ ID NO: 635859 - DNA, 75 bp, synthetic construct
  source 1..75: mol_type = other DNA
agattatttcagctatcgaactgtggataaaaattcataaagagcagctaataccttcaagtagtcgaatcctga

SEQ ID NO: 635860 - DNA, 75 bp, synthetic construct
  source 1..75: mol_type = other DNA
tggcggcatggctggcagagaacggtcgccagaccgagtgcgaagaattgctggcgtggcaccttttaccgtggt

SEQ ID NO: 635861 - DNA, 75 bp, synthetic construct
  source 1..75: mol_type = other DNA
ggatacccagtggcccttgtcacaaacgtcattagcaccgctggtaacgacttttaaggaagagtgtgaagagtc

SEQ ID NO: 635862 - DNA, 75 bp, synthetic construct
  source 1..75: mol_type = other DNA
gcgaagcagtttttcatggatgttgctgccgggttatgtgaaggggatggtccgttgccggaaaagcgccccgta

SEQ ID NO: 635863 - DNA, 75 bp, synthetic construct
  source 1..75: mol_type = other DNA
gattaatgcccgccgccgtgagaatggccagtcggccctcagaacggaacaggtgatcgacgaaatctgttatta

SEQ ID NO: 635864 - DNA, 75 bp, synthetic construct
  source 1..75: mol_type = other DNA
atggcagaaaccaaaattgttgtcggcccgcagccgttcagcgtaggagaagagtacccgtggctggcggagcgt

SEQ ID NO: 635865 - DNA, 75 bp, synthetic construct
  source 1..75: mol_type = other DNA
caggccgccacggcggatcgcatcgccaatcacaagggacgcaacccgcaagaacgcgcctccctgaaaaagcgc

SEQ ID NO: 635866 - DNA, 75 bp, synthetic construct
  source 1..75: mol_type = other DNA
gtgttccatcggagttttaccgttgtgagcgctatgaggacgttcccagttatagtaatgctgccattctgtcaa

SEQ ID NO: 635867 - DNA, 75 bp, synthetic construct
  source 1..75: mol_type = other DNA
cgaagctgaggcgaaaaagcaggcgaagcagtttttcatggatattgctgccgctttatgtgaaggggatgagca

SEQ ID NO: 635868 - DNA, 75 bp, synthetic construct
  source 1..75: mol_type = other DNA
gcatggacgtgcaatttgctttgctgatggttggttcgaatggaagcgcgaaggcattataaaacagccctactt

SEQ ID NO: 635869 - DNA, 75 bp, synthetic construct
  source 1..75: mol_type = other DNA
ggctgtgcggtcgcagcaccttgcaggactaaagttgcagagcagttgctggaaatcggggcgaaagcgggcatg

SEQ ID NO: 635870 - DNA, 75 bp, synthetic construct
  source 1..75: mol_type = other DNA
cgaatatcatcggtcatcacgcgggtattgatgacaatacagcggcaaaagccattgcccatgccattctcggtg

SEQ ID NO: 635871 - DNA, 75 bp, synthetic construct
  source 1..75: mol_type = other DNA
gacgagcagctgcacctcgatccggttctgtggtcgtacgcgcccgggtggtgggataagcagccgctgattaac

SEQ ID NO: 635872 - DNA, 75 bp, synthetic construct
  source 1..75: mol_type = other DNA
aaacccgtgaagactatctggcgtacctggccgacgaaggagatcgtgacatcgcctacgacccggagcctattg

SEQ ID NO: 635873 - DNA, 75 bp, synthetic construct
  source 1..75: mol_type = other DNA
atacggcagaatgtcgtaggtagagtggtggaggagattgttgctaagggtacagcgtctgccgacacgtttatc

SEQ ID NO: 635874 - DNA, 75 bp, synthetic construct
  source 1..75: mol_type = other DNA
accgcatgttgaagatgttctttttcatcctcactatggcgtaatacatggtttaagccacgggaaaattgtcat

SEQ ID NO: 635875 - DNA, 75 bp, synthetic construct
  source 1..75: mol_type = other DNA
taagtcactccagaaaatgctctattcaatatatttattttcacttaaacatccaaactcgaaaacaaccgttag

SEQ ID NO: 635876 - DNA, 75 bp, synthetic construct
  source 1..75: mol_type = other DNA
aaacttattaatgaagccaacgagcacatgaacaacaggcaatggcctggtaaagcggcgattggtcgcctgaaa

SEQ ID NO: 635877 - DNA, 75 bp, synthetic construct
  source 1..75: mol_type = other DNA
ggtctgttactcaacatccccccttgtgagaatcaacacgatctcctgcgcgaactcggcaaaatcgccttcgtt

SEQ ID NO: 635878 - DNA, 75 bp, synthetic construct
  source 1..75: mol_type = other DNA
aaaaaacaaaaataacccagggggattaattgacagccacattcaaatgatgatgaacaaccagacaaatggtat

SEQ ID NO: 635879 - DNA, 75 bp, synthetic construct
  source 1..75: mol_type = other DNA
aaaagccttgcccttgctcttgaatacgaattcatgttcagcactgacatctcaaacttctacccatcaatatat

SEQ ID NO: 635880 - DNA, 75 bp, synthetic construct
  source 1..75: mol_type = other DNA
ttcgcggtgatgttgcagcctgtaaagccgcgaccgatgccggtgccgcagcggcacagcgtatcggcgagctgg

SEQ ID NO: 635881 - DNA, 75 bp, synthetic construct
  source 1..75: mol_type = other DNA
ttagtctgcatcaaaaagatctgaatctggcactggagaatgctcgcctgttgaataccccgcttcctaacacgg

SEQ ID NO: 635882 - DNA, 75 bp, synthetic construct
  source 1..75: mol_type = other DNA
cgatgcgcccgtctctggcggtgaagttggcgcgaaagccgggacgctttccattatggttggcggatgtgaaga

SEQ ID NO: 635883 - DNA, 75 bp, synthetic construct
  source 1..75: mol_type = other DNA
attgtttccagaatatgaggatgcgggaacgcttcctgatgatgttattgaaattaccaaagaaacatatgagca

SEQ ID NO: 635884 - DNA, 75 bp, synthetic construct
  source 1..75: mol_type = other DNA
tgcgggcaaaagccgaaggtaagaaactgggaagaccgccgagaatcgccccagaagaccgtagagcgattaccg

SEQ ID NO: 635885 - DNA, 75 bp, synthetic construct
  source 1..75: mol_type = other DNA
tacgggcaaaagctgaaggcaggaaattgggcaggcctgctaaaatcgcaccggaagctcgtggagcgattttag

SEQ ID NO: 635886 - DNA, 75 bp, synthetic construct
  source 1..75: mol_type = other DNA
ttcgcctggccgtcggcccgcgatggcaaagtgttcctgaccccggcacagctggcgatgctgatggaaggtatc

SEQ ID NO: 635887 - DNA, 75 bp, synthetic construct
  source 1..75: mol_type = other DNA
ggcagttcgctggatgtaccagaaaatatcgttcatagcggtaaaacctggtttgtggaagcgaagctaaagcag

SEQ ID NO: 635888 - DNA, 75 bp, synthetic construct
  source 1..75: mol_type = other DNA
atttaatcgacgggcgggtaaaaactagcgattacaccaaagaagaattgcgcctgatgcatgcagaaggtgttt

SEQ ID NO: 635889 - DNA, 75 bp, synthetic construct
  source 1..75: mol_type = other DNA
atggtgaatttacgtaaagcggcgcgaggccagatgtgtaaggtcagaattcctggctactgcaatcacaatccc

SEQ ID NO: 635890 - DNA, 75 bp, synthetic construct
  source 1..75: mol_type = other DNA
gtggatcacttttcatccgtcgttgacaagatgtgccagatcagaatccctggctactgcaatcacaatcccgaa

SEQ ID NO: 635891 - DNA, 75 bp, synthetic construct
  source 1..75: mol_type = other DNA
tcctggctactgcaatcacaatcctgaaacgtctgtactggcgcattaccggctggcgggaacgtgcggaaccgc

SEQ ID NO: 635892 - DNA, 75 bp, synthetic construct
  source 1..75: mol_type = other DNA
gtaaatctcgtgatgatttgcaggctgttatggcgatggtacgcggtggcgacctgggtcagccgttccagttca

SEQ ID NO: 635893 - DNA, 75 bp, synthetic construct
  source 1..75: mol_type = other DNA
ggtctgtcattcagtaaaattatacttgatgagaggatgcggatggctgaatatttactcagcactcgttgctat

SEQ ID NO: 635894 - DNA, 75 bp, synthetic construct
  source 1..75: mol_type = other DNA
aatattcttctgctggatacgaccgccagccgctgcacccggcggttggcgcgatgcttgccgacttcaccaata

SEQ ID NO: 635895 - DNA, 75 bp, synthetic construct
  source 1..75: mol_type = other DNA
ctgctgcttaacatcaccttattcgaccgccagccgctgcacccggcggttggcgcgatgcttgccgacttcacc

SEQ ID NO: 635896 - DNA, 75 bp, synthetic construct
  source 1..75: mol_type = other DNA
tgcatatcgtccaggaaggacgggtaaataaatttattcgggaactaccggaaattacttttagcggaaaaatcg

SEQ ID NO: 635897 - DNA, 75 bp, synthetic construct
  source 1..75: mol_type = other DNA
agtctattgcttttacatgtctctctgcattttcttctgaaaaacaatttggagtatttctgtttggatgtttga

SEQ ID NO: 635898 - DNA, 75 bp, synthetic construct
  source 1..75: mol_type = other DNA
atggcaactacatgttcagttatattgattttggagtcctttgatgtttatttcggaaaagagagtgtgtttctg

SEQ ID NO: 635899 - DNA, 75 bp, synthetic construct
  source 1..75: mol_type = other DNA
gccgcagtcacaggcgtcctgccagcagtggctggaagtccactggcgtactctgacaccggcgaatttcaccca

SEQ ID NO: 635900 - DNA, 75 bp, synthetic construct
  source 1..75: mol_type = other DNA
gtattaaactacgtttcgccacgatgctggcacgtaaaaaatgccccggtaagaacaaagcgcgtgaaaattccc

SEQ ID NO: 635901 - DNA, 75 bp, synthetic construct
  source 1..75: mol_type = other DNA
tctaacgcttctgaggcaacagtaggttctactatacggcgaaatgacatagataactttggtatggcgggaacg

SEQ ID NO: 635902 - DNA, 75 bp, synthetic construct
  source 1..75: mol_type = other DNA
atgattgccacttatcatgtgaaactaaattgtaaggacacgcaattactatctgttaataatcttgtttctgaa

SEQ ID NO: 635903 - DNA, 75 bp, synthetic construct
  source 1..75: mol_type = other DNA
gtatctggctggttgccggtatcaccgacatgcgaaatggctttaacggccaggcctcaaaagttcagaacgtcc

SEQ ID NO: 635904 - DNA, 75 bp, synthetic construct
  source 1..75: mol_type = other DNA
tgatggctatcttcaataaggaaggtaaagacgtttatattgctgattatgagcatctgggtgtctacgcttgcc

SEQ ID NO: 635905 - DNA, 75 bp, synthetic construct
  source 1..75: mol_type = other DNA
tcgaaacgctggaagcagaaggtttcccaatctttgcttatgatggttcgcttggcggccagtatccggtgattt

SEQ ID NO: 635906 - DNA, 75 bp, synthetic construct
  source 1..75: mol_type = other DNA
cggccaggatttgcaggctcgggcgaaaatgcacaacgcctcatgtatggcaggaatggcgtttaccaatgcctc

SEQ ID NO: 635907 - DNA, 75 bp, synthetic construct
  source 1..75: mol_type = other DNA
tttgtcgattggccagcagtagagggtggcgatgaggacgacgatgatttcggtgacaatattaatcagattata

SEQ ID NO: 635908 - DNA, 75 bp, synthetic construct
  source 1..75: mol_type = other DNA
tttgttgattggccagcagtagatggtggcgatgaggacgacgacgatgatttgggtgatcatgtggatcagttt

SEQ ID NO: 635909 - DNA, 75 bp, synthetic construct
  source 1..75: mol_type = other DNA
actcgcggagtatcaatagaaaaactatgggtaaggttgttccattcaagcgatattgcagatccagatgcgttt

SEQ ID NO: 635910 - DNA, 75 bp, synthetic construct
  source 1..75: mol_type = other DNA
atggtgtaacaattatgttgaaacgagtgatactcctgggcgatgttctgtgtatgtgtcaaaagaagatgctga

SEQ ID NO: 635911 - DNA, 75 bp, synthetic construct
  source 1..75: mol_type = other DNA
caagtaaaaagcgatgcgataagacaaaaacgcattgaagattatttggggtgcaagtttttccgttgtgctata

SEQ ID NO: 635912 - DNA, 75 bp, synthetic construct
  source 1..75: mol_type = other DNA
tgaatcattccggaaaagtagatacgcataacttttacggcacggattccgattacgacgattcgaccaccgaca

SEQ ID NO: 635913 - DNA, 75 bp, synthetic construct
  source 1..75: mol_type = other DNA
tcgcctcaatcaacaagagcggctaccgttatcacccaggtgaaccaagaacgttcctgcttaccgccaatatgc

SEQ ID NO: 635914 - DNA, 75 bp, synthetic construct
  source 1..75: mol_type = other DNA
ttcagatggaatatcaaccttgtcatgggccagactgccacctgaatgaaggggtgtctggccattcacatcatc

SEQ ID NO: 635915 - DNA, 75 bp, synthetic construct
  source 1..75: mol_type = other DNA
atgaaaacaaaaaaactaatgatggttgcactggtcagttccactctggccctttcagggtgtggtgcgatgagc

SEQ ID NO: 635916 - DNA, 75 bp, synthetic construct
  source 1..75: mol_type = other DNA
agcaaaagggtatcaggtggtgacctctccggataaggcatactactggattcaggccaatgtccttaaggctga

SEQ ID NO: 635917 - DNA, 75 bp, synthetic construct
  source 1..75: mol_type = other DNA
tcgcctcaatcaacaagagcggctaccgttatcacccgggcgagccaagaaccttcctgctcacggccaatatgc

SEQ ID NO: 635918 - DNA, 75 bp, synthetic construct
  source 1..75: mol_type = other DNA
atgaacgagatcgaagatggtatctatttacataaggtatttaacatcgtctatttggttagaggtgaatcggtg

SEQ ID NO: 635919 - DNA, 75 bp, synthetic construct
  source 1..75: mol_type = other DNA
atgttaagactcaagactcaagactcaagactcaagactcaagactcaagactcaagactcaagactcaagactc

SEQ ID NO: 635920 - DNA, 75 bp, synthetic construct
  source 1..75: mol_type = other DNA
atgaccatgttaaagggtatggctttataaggcgtgagcgtggacgtgatgttttctttcggtatgatgattttt

SEQ ID NO: 635921 - DNA, 75 bp, synthetic construct
  source 1..75: mol_type = other DNA
caatatccacacactatcccagccataagggggtgattatgacgatagcggaacaactggaagagaaaggccttg

SEQ ID NO: 635922 - DNA, 75 bp, synthetic construct
  source 1..75: mol_type = other DNA
gctggcagctgatggccgcagaatgcacaccggacactctgcgggctgactatgaacgtccgaaaggctccacgg

SEQ ID NO: 635923 - DNA, 75 bp, synthetic construct
  source 1..75: mol_type = other DNA
cctgttcacgcagccgggcacgcggctgaccgctgtcaccctcctgctcagcgaagacggcgaactcacctggaa

SEQ ID NO: 635924 - DNA, 75 bp, synthetic construct
  source 1..75: mol_type = other DNA
tattaccgtcaatattcagccggtacatatggcgattatggaaggggagacggagatctacctgactgaacaaca

SEQ ID NO: 635925 - DNA, 75 bp, synthetic construct
  source 1..75: mol_type = other DNA
ggcgtaaaggccgccctaattatcctcccgaatttaagcagcagctcgttgtggcttcctgtgagcccggcgtgt

SEQ ID NO: 635926 - DNA, 75 bp, synthetic construct
  source 1..75: mol_type = other DNA
cacgggatgctccgtctcaacggcactgtcagcgaaaagctcctgaccctgctgatacaggaactgaagcgatga

SEQ ID NO: 635927 - DNA, 75 bp, synthetic construct
  source 1..75: mol_type = other DNA
gtggcttcctgtgagcccggcgtgtcgatatcaaagctggcgcttgaaaacggcatcaatgccaatctgttattt

SEQ ID NO: 635928 - DNA, 75 bp, synthetic construct
  source 1..75: mol_type = other DNA
gttaatatcccttactgcgcattgggtggtgtaatcaccaatgacccgactcagcgtatctcgctgcaatcctgg

SEQ ID NO: 635929 - DNA, 75 bp, synthetic construct
  source 1..75: mol_type = other DNA
tacaccctacttaccttactttataccatcgttaatatcccttactgcgcattgggtggtgtaatcaccaatgac

SEQ ID NO: 635930 - DNA, 75 bp, synthetic construct
  source 1..75: mol_type = other DNA
gattgcttgtgcgaaacagtctgctgctgagctgggcttaacgcgtttgcaatttcaggcgctggactccactca

SEQ ID NO: 635931 - DNA, 75 bp, synthetic construct
  source 1..75: mol_type = other DNA
gtgacagatattgagctgactggtaaatcaatcacactgacggataagtatggcagcagcgttcaccagaatatc

SEQ ID NO: 635932 - DNA, 75 bp, synthetic construct
  source 1..75: mol_type = other DNA
gcgacacgcctgaattatcgctggagcggtgactggtcgaatgttaacggcaaaacagataaatcaccgaatctg

SEQ ID NO: 635933 - DNA, 75 bp, synthetic construct
  source 1..75: mol_type = other DNA
atgagcaatgatatcgcaatcacatcacaaccaggcgcaactgtaggcactgctgcggcaatcttcagccccgag

SEQ ID NO: 635934 - DNA, 75 bp, synthetic construct
  source 1..75: mol_type = other DNA
cccggaacccctcagtatcagctgtgaggtaacgttccggcacaggacgctccgcctcaatggaatgtcagaaaa

SEQ ID NO: 635935 - DNA, 75 bp, synthetic construct
  source 1..75: mol_type = other DNA
aggtcacaattaaggccgatgaattcctgaatggaaaacggaaagtaaagcaggaagcacaagaccttaaaaacg

SEQ ID NO: 635936 - DNA, 75 bp, synthetic construct
  source 1..75: mol_type = other DNA
accagatggattttgctgaactttctgaagcagtatccacacactatcccagccacaagggggggattatgacga

SEQ ID NO: 635937 - DNA, 75 bp, synthetic construct
  source 1..75: mol_type = other DNA
gcggtgaagtcacggaagaagataaatcagtcgccagtgaactactgaagcggagactggagctgatgaagcaga

SEQ ID NO: 635938 - DNA, 75 bp, synthetic construct
  source 1..75: mol_type = other DNA
cagggaacatcaggctccaaaattcagacaagcacagaaactgaaccgccccggaaatcctggagactaaactcc

SEQ ID NO: 635939 - DNA, 75 bp, synthetic construct
  source 1..75: mol_type = other DNA
cgtggcgcggaagttgagatgcttagcgccgatttcctgaaaacggcccagcttttgcgccagacgtaccctgat

SEQ ID NO: 635940 - DNA, 75 bp, synthetic construct
  source 1..75: mol_type = other DNA
acgcatcaaagctgaagttgcgccagacctgtcggttcatatgctggatgggttgggccgtgaggcgatggtcgc

SEQ ID NO: 635941 - DNA, 75 bp, synthetic construct
  source 1..75: mol_type = other DNA
atcgaacgggtacagcttttcgatatgttcccccacaccgcgcattacgaagtgctgacgctgctggtgaagcaa

SEQ ID NO: 635942 - DNA, 75 bp, synthetic construct
  source 1..75: mol_type = other DNA
ttctcaaagcagacaaaatggatctgcgtgaatctcagggatggctgagtcgcggttatgaaggtgcagcagtcg

SEQ ID NO: 635943 - DNA, 75 bp, synthetic construct
  source 1..75: mol_type = other DNA
ccgagcgaaccagaaccagcgtcagaacggataatgttgcagctttgcgtcagggaacatcaggctccaaaattc

SEQ ID NO: 635944 - DNA, 75 bp, synthetic construct
  source 1..75: mol_type = other DNA
ggcatcacaggatataactccagctctgccggtgcggcgctgggcgtagggattgccacagggttgattggtatg

SEQ ID NO: 635945 - DNA, 75 bp, synthetic construct
  source 1..75: mol_type = other DNA
gtcgactttctcgtcagcaggcctatcgcatcattcgtgatgccggtattgaagctggaaccgtgacgcagactc

SEQ ID NO: 635946 - DNA, 75 bp, synthetic construct
  source 1..75: mol_type = other DNA
caggatcttgatctcaatgaaggccggataaatattcgtcggctgaagaacggattttctactgtccatccacta

SEQ ID NO: 635947 - DNA, 75 bp, synthetic construct
  source 1..75: mol_type = other DNA
ctgcatattcgtgccgatctgacaaagcgttttggcgaactgaagccagatgtttttgtcggcattgatgcacct

SEQ ID NO: 635948 - DNA, 75 bp, synthetic construct
  source 1..75: mol_type = other DNA
taccgtgccgctttatcggtcataccatggctgatgccatgccattagatccagataaaaatgccgcccgtgatg

SEQ ID NO: 635949 - DNA, 75 bp, synthetic construct
  source 1..75: mol_type = other DNA
tggaagatgtgaactataccatgatcacggatgtgcagattgcagagcgtactaaggcaacggtgacaacggata

SEQ ID NO: 635950 - DNA, 75 bp, synthetic construct
  source 1..75: mol_type = other DNA
atcgacacgtaaaaatcacgatcgcggcattaatatgcatgtggtgactgaagtccagcacattgtgattctggc

SEQ ID NO: 635951 - DNA, 75 bp, synthetic construct
  source 1..75: mol_type = other DNA
atgcgtaaaagcagactgatatctctttttttgtgtctggcactgtccggcacagtatatgcagaggaaaacgca

SEQ ID NO: 635952 - DNA, 75 bp, synthetic construct
  source 1..75: mol_type = other DNA
tcgacgccaacctgcgtcgcagcatgcgcgacaagatccgcgagttgcaaaagcagtttgatatcacctcgctgt

SEQ ID NO: 635953 - DNA, 75 bp, synthetic construct
  source 1..75: mol_type = other DNA
gactttgaccactctctcgaccagaaaatggccattaattgggtagaaagctgggaggttgtactggctgatgaa

SEQ ID NO: 635954 - DNA, 75 bp, synthetic construct
  source 1..75: mol_type = other DNA
gtataaaccgactggctgagtactggcctgaactgtttggggcagagaatataaaaccccttaaggctggcgtga

SEQ ID NO: 635955 - DNA, 75 bp, synthetic construct
  source 1..75: mol_type = other DNA
atagtgcatttcaggctgacagcgtggaggctttccgcaaaagttatgttactgctgtgatgtcattgctgaaca

SEQ ID NO: 635956 - DNA, 75 bp, synthetic construct
  source 1..75: mol_type = other DNA
gaaggaacgtcatttactgaaatattgagagatactaggatgaggtatgcaaaaaaactcataacttcaaactct

SEQ ID NO: 635957 - DNA, 75 bp, synthetic construct
  source 1..75: mol_type = other DNA
gagcccccagctacttcctgtgactctcgatgcaactgccgaacagccagaatcgctcgcagaggacccggaaac

SEQ ID NO: 635958 - DNA, 75 bp, synthetic construct
  source 1..75: mol_type = other DNA
tacatcctctgcgctatccgcgttggctggtagccttgatggtaggactttcttgcgcctgtttctgcaaactga

SEQ ID NO: 635959 - DNA, 75 bp, synthetic construct
  source 1..75: mol_type = other DNA
gatggactgcgttgaaagctccatctcttccaacgcaattgtgctaaccaccattaaagatggtcaatgtttaac

SEQ ID NO: 635960 - DNA, 75 bp, synthetic construct
  source 1..75: mol_type = other DNA
cgacgatgcggccttgcaacggctgtgcttcgtgcgcgcggccttcgaggcgggtatcggcctggatgccctggc

SEQ ID NO: 635961 - DNA, 75 bp, synthetic construct
  source 1..75: mol_type = other DNA
cgatgacaccgcgttgcaacggctgcgctttgtacgggctgccttcgaagcgggtatcggcctggacgcactggc

SEQ ID NO: 635962 - DNA, 75 bp, synthetic construct
  source 1..75: mol_type = other DNA
catatggcgattatggaaggggagacggagatctacctgactgaacaacaggcgctggcagagcgttttaatgac

SEQ ID NO: 635963 - DNA, 75 bp, synthetic construct
  source 1..75: mol_type = other DNA
gtatccattacccgctcgcaactggcaatgctcctcgataagctggactggcgtcagccaaaaacatccagccgt

SEQ ID NO: 635964 - DNA, 75 bp, synthetic construct
  source 1..75: mol_type = other DNA
atgcagtgcgcactttacgacgcgggtcgctgtcgttcctgtcagtggataacgcagccgattccagagcaactc

SEQ ID NO: 635965 - DNA, 75 bp, synthetic construct
  source 1..75: mol_type = other DNA
tcgggtatatcagcgcatggggctgtaaaactatttccgaggtgaaagcctaccgccagaatttcagccagcgtg

SEQ ID NO: 635966 - DNA, 75 bp, synthetic construct
  source 1..75: mol_type = other DNA
atgtgggcggtggataaaccgcttaacccgtcgctggcccgcgacattatcgaaggtattcgcgccaaaatgcgc

SEQ ID NO: 635967 - DNA, 75 bp, synthetic construct
  source 1..75: mol_type = other DNA
aatgggcatttcgctggcagaagagctattgaataacggcgcacgtgaaatccttgctgaagtctataacggaga

SEQ ID NO: 635968 - DNA, 75 bp, synthetic construct
  source 1..75: mol_type = other DNA
aagatacaggaactgaagcgatgatcccgttaccttccgggaccaaaatttggctggttgccggtatcaccgata

SEQ ID NO: 635969 - DNA, 75 bp, synthetic construct
  source 1..75: mol_type = other DNA
ccggaacaagggtttcgtaataaagccaaaatggtggtgagtggtagcgttgaaaaaccactgctcggtatgctg

SEQ ID NO: 635970 - DNA, 75 bp, synthetic construct
  source 1..75: mol_type = other DNA
gatggacacgatggcagaagcgcacatgtgggcggtggacaaaccgctgaacccgtcgctggcccgcgacattat

SEQ ID NO: 635971 - DNA, 75 bp, synthetic construct
  source 1..75: mol_type = other DNA
tgttcccacataccgcgcattatgaagtgttggcgctattggtgaagcaatctgaagccgcggcttcagattgct

SEQ ID NO: 635972 - DNA, 75 bp, synthetic construct
  source 1..75: mol_type = other DNA
actgtttccaatatcatcggcaccaccgacgaaaacggtcagtacaccggactgaaagccctgatgggggctgag

SEQ ID NO: 635973 - DNA, 75 bp, synthetic construct
  source 1..75: mol_type = other DNA
aaccgtacctgctctgatgacccgctgttcctctttgaaagctacacacgcaccgcgcaggtactggccgacacg

SEQ ID NO: 635974 - DNA, 75 bp, synthetic construct
  source 1..75: mol_type = other DNA
tgttcctctttgaaagctacacacgcaccgcgcaggtactggccgacacgatggctgaggcgcacatgtgggcta

SEQ ID NO: 635975 - DNA, 75 bp, synthetic construct
  source 1..75: mol_type = other DNA
cgacaatgacaccgggtggcataaaaccctgtcgaacgtcggcgtcaacggtgttactggcatcagtgcatcggt

SEQ ID NO: 635976 - DNA, 75 bp, synthetic construct
  source 1..75: mol_type = other DNA
atgtgggcggtggataaaccgcttaacccgtcgctggcccgcgacattatcgagggcatccgcgccaaaatgcgc

SEQ ID NO: 635977 - DNA, 75 bp, synthetic construct
  source 1..75: mol_type = other DNA
ctgctgaaccagaacgacgtcaccacgctgatctgtaaagacgggttccgcttctggggttcccgctgcctcagt

SEQ ID NO: 635978 - DNA, 75 bp, synthetic construct
  source 1..75: mol_type = other DNA
tggttaacaagcctcgtctgttgttgctggatgagtcgctctcagcgctggattacaaactgcgtaagcaaatgc

SEQ ID NO: 635979 - DNA, 75 bp, synthetic construct
  source 1..75: mol_type = other DNA
gcagtcaccggcgttaagccgcgcattctcggcgtgccgggtctcgatacgcaggaagttgcaaccgcactcgca

SEQ ID NO: 635980 - DNA, 75 bp, synthetic construct
  source 1..75: mol_type = other DNA
tcatctggcctgatttccttgcatgggataccaccacaaacgccaccgcaccggcatacgcaactgcgcgcgcac

SEQ ID NO: 635981 - DNA, 75 bp, synthetic construct
  source 1..75: mol_type = other DNA
accaatgtgcagagcgcaattgcaaaggccggtaaaaaaggcacgctggcggcgtcgttgcaggccatcgctgac

SEQ ID NO: 635982 - DNA, 75 bp, synthetic construct
  source 1..75: mol_type = other DNA
gatggacacgatggcagaagcacacatgtgggcggtggataaaccgcttaacccgtcgctggcgcgcgacattat

SEQ ID NO: 635983 - DNA, 75 bp, synthetic construct
  source 1..75: mol_type = other DNA
tgccggggctcgataccaaagaggtcgcagtcgcacttgcgtcggtctgtatcagcctgcgcgcctttggttatg

SEQ ID NO: 635984 - DNA, 75 bp, synthetic construct
  source 1..75: mol_type = other DNA
gaaaacctgaccctgcgccagcgtattaccgataaatatctggcaaatctggtcacctcggttaacagcaattaa

SEQ ID NO: 635985 - DNA, 75 bp, synthetic construct
  source 1..75: mol_type = other DNA
aaagccggaaaactcactatcgactatgactacacgccagtgccgccacttgaaaatctgatgctgcgccagcgc

SEQ ID NO: 635986 - DNA, 75 bp, synthetic construct
  source 1..75: mol_type = other DNA
gtcggtgaacgacaaagacacgctgaaagccggaaaactcaccatcgactacgactacacgccagtgccgccact

SEQ ID NO: 635987 - DNA, 75 bp, synthetic construct
  source 1..75: mol_type = other DNA
ccgtcagcccgtgatggcaaagtgttccttacacaggcgcagctggcgatgctgctggaaggtatcgactggcga

SEQ ID NO: 635988 - DNA, 75 bp, synthetic construct
  source 1..75: mol_type = other DNA
atgtgggcggtggacaaaccgcttaacccgtcgctggcccgcgacattatcgaaggtatccgcgccaaaatgcgc

SEQ ID NO: 635989 - DNA, 75 bp, synthetic construct
  source 1..75: mol_type = other DNA
gtatcgataaagccttcccgggcgtaaaagcgctttcgggagccgcgctaaatgtctatccgggtcgcgtgatgg

SEQ ID NO: 635990 - DNA, 75 bp, synthetic construct
  source 1..75: mol_type = other DNA
caatggcgatataccgccagcattctgaatcccggttgtctcgcttctgtaggggcaaatatcactggtccggca

SEQ ID NO: 635991 - DNA, 75 bp, synthetic construct
  source 1..75: mol_type = other DNA
agttcagcatatcagcggcgtactcgctgtttttgttgaacgtcgtcaggaccgggcaggcccgtacgctattct

SEQ ID NO: 635992 - DNA, 75 bp, synthetic construct
  source 1..75: mol_type = other DNA
taaatccaccatgatgaaagtgcttactggtatctatactcgcgatgccggtacgcttttatggctggggaaaga

SEQ ID NO: 635993 - DNA, 75 bp, synthetic construct
  source 1..75: mol_type = other DNA
cagcaaaaagtggcgattgcccgcggtctgatgacacgcccaaaagtgttgatccttgatgaacctacccgtggc

SEQ ID NO: 635994 - DNA, 75 bp, synthetic construct
  source 1..75: mol_type = other DNA
accggtatctatacccgtgatgctggtacgcttttatggctgggcaaagaaacgacgtttaccgggccgaaatct

SEQ ID NO: 635995 - DNA, 75 bp, synthetic construct
  source 1..75: mol_type = other DNA
gcagtgaaaatcccgttaaaaacgccgaggaatcaacccccgacacatcaggtatccccacgcaaatagcattaa

SEQ ID NO: 635996 - DNA, 75 bp, synthetic construct
  source 1..75: mol_type = other DNA
aagcatattcgagacttccatcgaaaacagaaaaagaacattgatggttttaaacttttttgtagcgggcatgag

SEQ ID NO: 635997 - DNA, 75 bp, synthetic construct
  source 1..75: mol_type = other DNA
ttggtttaattatagattgtttgttccaactggattaggagcaataatattttcactatttccgacaaccatgca

SEQ ID NO: 635998 - DNA, 75 bp, synthetic construct
  source 1..75: mol_type = other DNA
ttgttccggcgatctgttacttgctgagcgcgattatcgctaaacgctactactcgctcacgacgcacaatctga

SEQ ID NO: 635999 - DNA, 75 bp, synthetic construct
  source 1..75: mol_type = other DNA
gccttcggcggcgctcttatcggctggatgctggcttatggcggatatgatgcggcagaaaaagcgcagaacagc

SEQ ID NO: 636000 - DNA, 75 bp, synthetic construct
  source 1..75: mol_type = other DNA
aagttattaaatcggcctatcttatagcgacaatgaaaaatcatgcaaagataataagctctttatatgcgtcat

SEQ ID NO: 636001 - DNA, 75 bp, synthetic construct
  source 1..75: mol_type = other DNA
cgatgacgatttaccgtcagcatccggcttcccgcatttttcgctactgcaccggcagataccagtggcacggca

SEQ ID NO: 636002 - DNA, 75 bp, synthetic construct
  source 1..75: mol_type = other DNA
ggctttcagccggtcgaagcggaagattatgacagtgctgtgaatcaactgaatgaaccctggccggatttaatt

SEQ ID NO: 636003 - DNA, 75 bp, synthetic construct
  source 1..75: mol_type = other DNA
aacaaacgcgtgactatcatgacaacttcaccacattttctgcggaagaatggcaacctcaaaaccgtggctttg

SEQ ID NO: 636004 - DNA, 75 bp, synthetic construct
  source 1..75: mol_type = other DNA
tgcaccggagcaatatcagaagcaatttaataccggtagtcaaacagcagataactactacgcttccgtttattc

SEQ ID NO: 636005 - DNA, 75 bp, synthetic construct
  source 1..75: mol_type = other DNA
tgctggtcgatgaggttttaaaacgcgcggaagttgccaaaaccacgcttaacgatagcgaactggcagccttgt

SEQ ID NO: 636006 - DNA, 75 bp, synthetic construct
  source 1..75: mol_type = other DNA
taatgacgatacaccgccagcatcctgagtcccgaatctttcgctactgtaccggaaaatatcagtggcacggta

SEQ ID NO: 636007 - DNA, 75 bp, synthetic construct
  source 1..75: mol_type = other DNA
cgaaggagctggtggcgcgaattaaagcggtaatgcgccgtatttcgccaatggcggtggaagaggtgattgaga

SEQ ID NO: 636008 - DNA, 75 bp, synthetic construct
  source 1..75: mol_type = other DNA
gctgctcatgcggcagatgatgtaaagctgaaagcaaccaaaacaaacgttgctttctcagactttacgccgact

SEQ ID NO: 636009 - DNA, 75 bp, synthetic construct
  source 1..75: mol_type = other DNA
ggatgcgcgagaaaggcattcagttcgaaatgaagcaaaacgaaccggaagatcattttggttcactgctgttga

SEQ ID NO: 636010 - DNA, 75 bp, synthetic construct
  source 1..75: mol_type = other DNA
ggaaaaccagtggccgctaccagaagcatcattaacaccgctggtgacggcgtttcaaacacagagtgaagagac

SEQ ID NO: 636011 - DNA, 75 bp, synthetic construct
  source 1..75: mol_type = other DNA
tcaacagcagccaaccgccgcttagtcaggtgaatcaggagaagtttaacaatattaagaaagcacttagcgatg

SEQ ID NO: 636012 - DNA, 75 bp, synthetic construct
  source 1..75: mol_type = other DNA
tgtctatacagtagaaaacaatcagttaggtctatacaaactgacggatctacagcaaaaagaggtgatgctgcc

SEQ ID NO: 636013 - DNA, 75 bp, synthetic construct
  source 1..75: mol_type = other DNA
atgggattccacgctgcaggaacggcatattacaactccccttcactgttcaaaaatcgtgaacgtgtccccgca

SEQ ID NO: 636014 - DNA, 75 bp, synthetic construct
  source 1..75: mol_type = other DNA
gtggctttaccggaagccatggtgaagggatatatcacccgcctggagaaccagcctgtgcagggtgaagtatcg

SEQ ID NO: 636015 - DNA, 75 bp, synthetic construct
  source 1..75: mol_type = other DNA
ggctttggtcactacgacttaaaccttcctcaatcacagctattcgccgggcgatacggcaaacaaactaagtga

SEQ ID NO: 636016 - DNA, 75 bp, synthetic construct
  source 1..75: mol_type = other DNA
atgcaactaatcttatctatatatcatgtgatatgttctgtaacaagtaaaatcaacataaaaaattcagcaaaa

SEQ ID NO: 636017 - DNA, 75 bp, synthetic construct
  source 1..75: mol_type = other DNA
accgacgctgacgctgggcttcatggtaatggctgctggcatgggcatactgggtacgatgatgcatatcggtat

SEQ ID NO: 636018 - DNA, 75 bp, synthetic construct
  source 1..75: mol_type = other DNA
ccagcggtcagcgcggtaataaccgccagattgatattcgcggcatgggtccggaaaacaccctgattttgattg

SEQ ID NO: 636019 - DNA, 75 bp, synthetic construct
  source 1..75: mol_type = other DNA
gaatgtcagtctgaccggcggcgtggacaacctgttcgacaaacgtttgtggcgtgcgggtaatgcccagaccac

SEQ ID NO: 636020 - DNA, 75 bp, synthetic construct
  source 1..75: mol_type = other DNA
ctgaccggtccgctgggcgacgaattcagcttccgcttgtatggcaacctcgacaaaactcaggctgacgcgtgg

SEQ ID NO: 636021 - DNA, 75 bp, synthetic construct
  source 1..75: mol_type = other DNA
gggcgcggggtgcgactggtggggctgcatgtgacgctactggatccgcaaatggaaagacaactggtgctggga

SEQ ID NO: 636022 - DNA, 75 bp, synthetic construct
  source 1..75: mol_type = other DNA
ctgatcggtgagcgcagcccgacaatgcgcggtgacgtgctgacgcaactgtccttactggtggaaagcgacgaa

SEQ ID NO: 636023 - DNA, 75 bp, synthetic construct
  source 1..75: mol_type = other DNA
atcggccagcgttccgctgtcatgcgcaatgatgtttatctgcaaattattctgatggtggaaacggataaccgc

SEQ ID NO: 636024 - DNA, 75 bp, synthetic construct
  source 1..75: mol_type = other DNA
tcgccatcgccatgctgctgatgtttattgtcggttttgccatgagtgccggtccgctgatttgggtactgtgct

SEQ ID NO: 636025 - DNA, 75 bp, synthetic construct
  source 1..75: mol_type = other DNA
cagtgcagaagccaaacgcgagctggatgaaatccgcgaaagtttgcaggttaaacagagtggttgggcgctgtt

SEQ ID NO: 636026 - DNA, 75 bp, synthetic construct
  source 1..75: mol_type = other DNA
ggtgatgtacaaaagtgtgatctggtgacgttgcttaaacgttttggcaaatttggccgcattttgtgggagcgt

SEQ ID NO: 636027 - DNA, 75 bp, synthetic construct
  source 1..75: mol_type = other DNA
acgtattgaagttctgcgtggtccggcggctgcgcgttatggcaacggcgcggcgggcggcgtggttaacatcat

SEQ ID NO: 636028 - DNA, 75 bp, synthetic construct
  source 1..75: mol_type = other DNA
ctgaaaggcgggatttccggtcgcagtgccagaggaaaacgtatccatacccgtaccattcacagcatcgacacc

SEQ ID NO: 636029 - DNA, 75 bp, synthetic construct
  source 1..75: mol_type = other DNA
tgggttgttatccgttgcagcatttatgaccgtcaccccatatagtgtcggtgaggccggtgatgctgccaactt

SEQ ID NO: 636030 - DNA, 75 bp, synthetic construct
  source 1..75: mol_type = other DNA
tgaattttggcgaggctgagcaggcgctgctgacaggacacgctttccaccctgcgcctaagtctcatgaaccgt

SEQ ID NO: 636031 - DNA, 75 bp, synthetic construct
  source 1..75: mol_type = other DNA
ctccttaaagtacgccaatagtttaagcagcttgcctgataaggcgatggaatatctgaagcagaacgggttggt

SEQ ID NO: 636032 - DNA, 75 bp, synthetic construct
  source 1..75: mol_type = other DNA
gtggtggcgcttgcccttcctctccagcgtggtgattatcgcggtggctatttatattcgactgcatcttaaaga

SEQ ID NO: 636033 - DNA, 75 bp, synthetic construct
  source 1..75: mol_type = other DNA
ctctgcgaaactttccaccaacgcgtgctggaaagctacgcccatacgcaacagacaattgatgcccgccatgac

SEQ ID NO: 636034 - DNA, 75 bp, synthetic construct
  source 1..75: mol_type = other DNA
ctattatctggtggatgcgtcttatcagcaggcagtgaatttactaccggaagaaaagcgtaaattgctggtaca

SEQ ID NO: 636035 - DNA, 75 bp, synthetic construct
  source 1..75: mol_type = other DNA
tgtgagttctaccgaccgtagtccgtattcaaaagcggaaatattctcgctgtttgcggaaaacaatatggagct

SEQ ID NO: 636036 - DNA, 75 bp, synthetic construct
  source 1..75: mol_type = other DNA
acgtattgaagttctgcgtggcccggcggctgcacgttatggcaacggcgcggcgggtggcgtagttaacatcat

SEQ ID NO: 636037 - DNA, 75 bp, synthetic construct
  source 1..75: mol_type = other DNA
cgctcgcccgttatggtgaatctcttgcccgccgcggcctgttaactcaggcgcaacaagatgagatgacggcac

SEQ ID NO: 636038 - DNA, 75 bp, synthetic construct
  source 1..75: mol_type = other DNA
agaggcgatggggctgcgcacctgcggtgatgtacaaaagtgtgatctggtgaccttgctcaaacgctttggcaa

SEQ ID NO: 636039 - DNA, 75 bp, synthetic construct
  source 1..75: mol_type = other DNA
tttggcgtgcgtagcgccatgccgaccggtatggcgctaaaattatgtccgcatctcacgttacttccggggcgc

SEQ ID NO: 636040 - DNA, 75 bp, synthetic construct
  source 1..75: mol_type = other DNA
atccgtcagacgattttcaacgagctgcaacttaccgcctctgcgggcattgcgccggtaaagtttcttgccaaa

SEQ ID NO: 636041 - DNA, 75 bp, synthetic construct
  source 1..75: mol_type = other DNA
cactttatccgttaaggtatgtagttgaccatctggagtatcgctcaccctcgactcaatcagcctccctccaag

SEQ ID NO: 636042 - DNA, 75 bp, synthetic construct
  source 1..75: mol_type = other DNA
aacacactttattgctggagtcccttccctctcagggataatggaagaagccaaagatgaactacgactgatggg

SEQ ID NO: 636043 - DNA, 75 bp, synthetic construct
  source 1..75: mol_type = other DNA
tactctgactcgttgcaacgattgacaccgcacacaacccgacatacttgggcctttttgacattacaaaaaata

SEQ ID NO: 636044 - DNA, 75 bp, synthetic construct
  source 1..75: mol_type = other DNA
atgcttcagccactagtggtaacgctaaatcgtcagctattactcctgctgaggcgacaactgtatgtgcgcaga

SEQ ID NO: 636045 - DNA, 75 bp, synthetic construct
  source 1..75: mol_type = other DNA
atgtttatcggttactttgttcatatacatactgtttataaggttaaatgccacgtgttcatactcacacaactc

SEQ ID NO: 636046 - DNA, 75 bp, synthetic construct
  source 1..75: mol_type = other DNA
gcacgggaatgcgttatcaagagaagaagatcaaaccaggcaatatgatgaaaatatctttaatgttgccagtca

SEQ ID NO: 636047 - DNA, 75 bp, synthetic construct
  source 1..75: mol_type = other DNA
ccgttatatccgtcagatgacccgttatctgcctgtgattatcatcagtgcccgtaccagcgaaacccaccgcgt

SEQ ID NO: 636048 - DNA, 75 bp, synthetic construct
  source 1..75: mol_type = other DNA
gtcgcccaacgtttttcgtatgcgcttaatgggtgcggaagtgatcccggtgcatagcggttccgcgacgctgaa

SEQ ID NO: 636049 - DNA, 75 bp, synthetic construct
  source 1..75: mol_type = other DNA
tgatttcatcaacgaaaccgacgtcggcctgattggtgtggagcctggcggtcacggtatcgaaaccggcgagca

SEQ ID NO: 636050 - DNA, 75 bp, synthetic construct
  source 1..75: mol_type = other DNA
gcaaggcttcgaccaaaaactgataaacacgattttatctttacatcgagtcaacagtcagcgaagcctttgtcc

SEQ ID NO: 636051 - DNA, 75 bp, synthetic construct
  source 1..75: mol_type = other DNA
gtgtgttggagctcgataagcaggattatatttttttaagcatttatatagcaaggcttcgaccaaaaactgata

SEQ ID NO: 636052 - DNA, 75 bp, synthetic construct
  source 1..75: mol_type = other DNA
gctgaacgggcaaaaagcatcaattgataagttacgctatgccccggataacaaattagcgaaatcggacaaaac

SEQ ID NO: 636053 - DNA, 75 bp, synthetic construct
  source 1..75: mol_type = other DNA
aaacaaaaaaataaccaacccatttgggggggaattaaatgtaggtccagcaaacaataacaccgcatttggtta

SEQ ID NO: 636054 - DNA, 75 bp, synthetic construct
  source 1..75: mol_type = other DNA
aatggtattgagctaaagattggtagctcgataaacccctattcttacgatcagactcttgctgataacatgatg

SEQ ID NO: 636055 - DNA, 75 bp, synthetic construct
  source 1..75: mol_type = other DNA
ttcaataagaaatatatacacgttcttgttattaacacgggaatgattcactctaagaatttaaattccacttat

SEQ ID NO: 636056 - DNA, 75 bp, synthetic construct
  source 1..75: mol_type = other DNA
cagcaatactataaaaatataaaaaaagttcaggaactcaatggtattgaacatgtaaaaaataattacgatgct

SEQ ID NO: 636057 - DNA, 75 bp, synthetic construct
  source 1..75: mol_type = other DNA
atcatatccgcgaaatcttctctcgctacacatcgcgtattgagccgctgtcgctggatgaagcttatctcgacg

SEQ ID NO: 636058 - DNA, 75 bp, synthetic construct
  source 1..75: mol_type = other DNA
ctattatctggtggatgcgtcttatcagcaggcggtgaatttgctgccggaagaaaaacgtaaattactggtgca

SEQ ID NO: 636059 - DNA, 75 bp, synthetic construct
  source 1..75: mol_type = other DNA
gaatacgttctggcagaagctaatgaactgttaaaaacagagcaagatgcgttttataaaaactatcttgaaaaa

SEQ ID NO: 636060 - DNA, 75 bp, synthetic construct
  source 1..75: mol_type = other DNA
agaacactcatgaatgaaatttttgatgatgagatcatagatgataatgataacttcaaagattcagatgcctat

SEQ ID NO: 636061 - DNA, 75 bp, synthetic construct
  source 1..75: mol_type = other DNA
aacagcgctattactccaggagaggctgcaagctcctgcactgcgaataataacagcaacaaagtgacttatttt

SEQ ID NO: 636062 - DNA, 75 bp, synthetic construct
  source 1..75: mol_type = other DNA
tgttttactaccagtctgcgtctgattccaataagtcgcagaatgctatttcagaagtaatgagcgcaacgtctg

SEQ ID NO: 636063 - DNA, 75 bp, synthetic construct
  source 1..75: mol_type = other DNA
ctcgtatccgtgacttccgtggcctgtctgctaagtctttcgacggtcgtggtaactacagcatgggtgtccgtg

SEQ ID NO: 636064 - DNA, 75 bp, synthetic construct
  source 1..75: mol_type = other DNA
ctcgtatccgtgacttccgtggcctgtccgctaagtctttcgacggtcgcggtaactacagcatgggtgtccgtg

SEQ ID NO: 636065 - DNA, 75 bp, synthetic construct
  source 1..75: mol_type = other DNA
caccaaagcacgcaaatctgttgcaggcttcaaaatccgtcagggttatccgatcggctgtaaagtaactctgcg

SEQ ID NO: 636066 - DNA, 75 bp, synthetic construct
  source 1..75: mol_type = other DNA
agcactgaacgaactggatctggaccgcgagttcctgaaagccggtggcgtgttcactgatgaagcgatcgatgc

SEQ ID NO: 636067 - DNA, 75 bp, synthetic construct
  source 1..75: mol_type = other DNA
gtacatcgctctgcgtcgcgaagaagatgaccgcgtacgtatgactccgcacccggtagagtttgagctgtacta

SEQ ID NO: 636068 - DNA, 75 bp, synthetic construct
  source 1..75: mol_type = other DNA
cccgtacctgtgctttgctgccctgctgatggcgggtcttgatggtatcaagaacaagatccacccaggcgaagc

SEQ ID NO: 636069 - DNA, 75 bp, synthetic construct
  source 1..75: mol_type = other DNA
cgggatgttaattatgaacgaaataaacgagcactggctgctatattctttatagcaaaaattccagctgaacgt

SEQ ID NO: 636070 - DNA, 75 bp, synthetic construct
  source 1..75: mol_type = other DNA
atggctattgaaggcgctgcggcgactgttccattaagccccggtgaacgcctgaacggacttaatcacattgcg

SEQ ID NO: 636071 - DNA, 75 bp, synthetic construct
  source 1..75: mol_type = other DNA
gaattgcgcgcgagatattggggcgatagctggaaagaggttgaacgttttgtcgatgatatgcgcgataaacgt

SEQ ID NO: 636072 - DNA, 75 bp, synthetic construct
  source 1..75: mol_type = other DNA
ggtacgacatttttcagtgccagtcgccaaagttactggaacacgtcacgcagcgaccagcaaatatcatttgga

SEQ ID NO: 636073 - DNA, 75 bp, synthetic construct
  source 1..75: mol_type = other DNA
ccggcaaaccagaaacaggttttattgcctgtcacgaataatgatcctgccagtgtctatctcattcagtcatga

SEQ ID NO: 636074 - DNA, 75 bp, synthetic construct
  source 1..75: mol_type = other DNA
tggctgtggctgaatcaaactctactgaacttgagacactcaaagttgttattgatgatggtagtaaagcggcaa

SEQ ID NO: 636075 - DNA, 75 bp, synthetic construct
  source 1..75: mol_type = other DNA
ttcacattatcggcttcgcgccgttctttattgccctggctttctttgacattattggcgctattgcattgtgga

SEQ ID NO: 636076 - DNA, 75 bp, synthetic construct
  source 1..75: mol_type = other DNA
attattggcgccattgcgctgtggacgcttatcaaagttaaagatgaagaaccgcaagtacagttagcgacaagc

SEQ ID NO: 636077 - DNA, 75 bp, synthetic construct
  source 1..75: mol_type = other DNA
ctttattgataccgtgggtctgaagttaagttttgcgatatgtgccgcaatttggggcctggcgacaatgggcca

SEQ ID NO: 636078 - DNA, 75 bp, synthetic construct
  source 1..75: mol_type = other DNA
gacaagctgacgcgggccgcgtgatgttaaagatggaaaaaacagcttgcgctgatcgaagacgaaacccaggct

SEQ ID NO: 636079 - DNA, 75 bp, synthetic construct
  source 1..75: mol_type = other DNA
cgcgtgatgcgctggaaaaaaaccgcaaaccatgaagtcatcacaatggcgatcccgtgtggtggtatcggcgac

SEQ ID NO: 636080 - DNA, 75 bp, synthetic construct
  source 1..75: mol_type = other DNA
agttaagcacaacaacgggctggcattttggtgcgtacatcatgccggacggttcagtcattggtgagtctgaaa

SEQ ID NO: 636081 - DNA, 75 bp, synthetic construct
  source 1..75: mol_type = other DNA
tgtccgcctgctcaatatcccgatccagaaagccacgcagttacacggatacgcgaacgggaaggatcacgcaga

SEQ ID NO: 636082 - DNA, 75 bp, synthetic construct
  source 1..75: mol_type = other DNA
accagccagccgacaaaatgacggaggtaatcatctttgcaggtagtgatgcgtggagccatgcgaaagagtggc

SEQ ID NO: 636083 - DNA, 75 bp, synthetic construct
  source 1..75: mol_type = other DNA
acatcgcatcaagtttatggggagagccggacgcgcagcggctgacctggtacggcacagcgttaggtatcgcca

SEQ ID NO: 636084 - DNA, 75 bp, synthetic construct
  source 1..75: mol_type = other DNA
acgtgatttaccgattaaagaccttgccggatacagaaaggggagtatcagaaatgaagatgatgagttccgttt

SEQ ID NO: 636085 - DNA, 75 bp, synthetic construct
  source 1..75: mol_type = other DNA
aagactattactacgccagaatgaaggaaaactactgctcaattcgcactcgcatatttattaaaaaagaccttc

SEQ ID NO: 636086 - DNA, 75 bp, synthetic construct
  source 1..75: mol_type = other DNA
tcacctttgaagccgcgcaccgtcttcccaatgtgccgaatggccataaatgcggacgcttacacggacactctt

SEQ ID NO: 636087 - DNA, 75 bp, synthetic construct
  source 1..75: mol_type = other DNA
atgttatctctcgtttatgaaaatcggtgggcgacgatttttctgctgatttttgccagcatgtgcctcaatagt

SEQ ID NO: 636088 - DNA, 75 bp, synthetic construct
  source 1..75: mol_type = other DNA
cagggggcaaaggatggcggcaacagagagctaaaaaactggcgcacagtcgctatcagcaccggagaagtggac

SEQ ID NO: 636089 - DNA, 75 bp, synthetic construct
  source 1..75: mol_type = other DNA
caccacgtcttaagcacatgaagggggcacgactaagggtgtacggccttttacttgcacaggatcatgatgatg

SEQ ID NO: 636090 - DNA, 75 bp, synthetic construct
  source 1..75: mol_type = other DNA
ggccaggccggaaacgcgcgggaggtgtccacgtcagcctatacgctgtttaacggttccgggaaattacagggg

SEQ ID NO: 636091 - DNA, 75 bp, synthetic construct
  source 1..75: mol_type = other DNA
gacctgtttaaaaagaatgaagtcgcaacggctgtcggaatggccggggcatgtgcatggtctggccagctgatt

SEQ ID NO: 636092 - DNA, 75 bp, synthetic construct
  source 1..75: mol_type = other DNA
ttgccgtcaacggcacgcgtctgcaaacgctcaacgacgagcgagagatgcaggctgaacgcgtggaagcaacgc

SEQ ID NO: 636093 - DNA, 75 bp, synthetic construct
  source 1..75: mol_type = other DNA
atgatcaatcgtcaactttcacgcctgctgttatgcagcattctcggcagcgcgaccctcatgtctggctgtgcc

SEQ ID NO: 636094 - DNA, 75 bp, synthetic construct
  source 1..75: mol_type = other DNA
agcgcagtcgcaggcagatttgttagatgctggttcacaattgcaggtggcggcgttagggatgctcaaccgcca

SEQ ID NO: 636095 - DNA, 75 bp, synthetic construct
  source 1..75: mol_type = other DNA
cgcgcggctatgcttcatgccggaaactttcgggaaaacgcgaattcgtcaaccaataattttcgggaaatttcg

SEQ ID NO: 636096 - DNA, 75 bp, synthetic construct
  source 1..75: mol_type = other DNA
tggcgcaggcgccagcgatatgccagagatcaaatcgacggcgctgccacaggttcagaccggcattcctgcgac

SEQ ID NO: 636097 - DNA, 75 bp, synthetic construct
  source 1..75: mol_type = other DNA
gcgcacggcctggaagcgcaagtgcctttccacggcgcgcgggcgcagattctggcggtcgataaacaaattgct

SEQ ID NO: 636098 - DNA, 75 bp, synthetic construct
  source 1..75: mol_type = other DNA
atgatgagaaaatatttcccgcttgaggcgagcgagcgtctatttgttgcagttgaagaagatgatgtcgttgat

SEQ ID NO: 636099 - DNA, 75 bp, synthetic construct
  source 1..75: mol_type = other DNA
cagcaggtttcttattacgacacgttaagatcgcttgatcctgaaaataaagaggcgttgcagatttcccgcttt

SEQ ID NO: 636100 - DNA, 75 bp, synthetic construct
  source 1..75: mol_type = other DNA
tatgacgcaccggtggcgctggatagcgatattcgccagcgtttagagctgcttatctcgcgttttccgctatat

SEQ ID NO: 636101 - DNA, 75 bp, synthetic construct
  source 1..75: mol_type = other DNA
ccgaagcgaaactgcgggaagaaaaagcgcagtcgcaggccgatttgttagatgccggttcacagttgcaggtgg

SEQ ID NO: 636102 - DNA, 75 bp, synthetic construct
  source 1..75: mol_type = other DNA
gccagttccggttggccacaagcacagtggtggaaacagtttcatgatccacaactggatgcgctgatccaacgg

SEQ ID NO: 636103 - DNA, 75 bp, synthetic construct
  source 1..75: mol_type = other DNA
gagatcaaaccggtggcattaccacgagtccagaccggcattccggcgacactctcttatgagttgctcgccaga

SEQ ID NO: 636104 - DNA, 75 bp, synthetic construct
  source 1..75: mol_type = other DNA
tcacttcccgctgcggtggttttcggtggataaaacgcaaatcgctggtgaaagtctgcatcttaaccttcaaca

SEQ ID NO: 636105 - DNA, 75 bp, synthetic construct
  source 1..75: mol_type = other DNA
catgcggcagggataatcgtagcaggtgttcctctgacatgtcacgaacggtgcaatagtgatccacacccaacg

SEQ ID NO: 636106 - DNA, 75 bp, synthetic construct
  source 1..75: mol_type = other DNA
gcccgccttgcgaaagagtcaggaggatgtatggaatcattggtgcgtgatcgaagctactgcttcacggcactg

SEQ ID NO: 636107 - DNA, 75 bp, synthetic construct
  source 1..75: mol_type = other DNA
atggcagccaggtgctgttcgcgcctttctctgctgtgaaggggtgttcagagaatggctgccaagccatcatga

SEQ ID NO: 636108 - DNA, 75 bp, synthetic construct
  source 1..75: mol_type = other DNA
atttcagcctgaaagaaatcgccatgtttgtatggcttccattcctcatggctgatttaggatgccttgccagtg

SEQ ID NO: 636109 - DNA, 75 bp, synthetic construct
  source 1..75: mol_type = other DNA
cgggtaagacccgccaccttaatgatattgcggtctgctgtgagaatccggggatgcgtgtcatctgtgttgatg

SEQ ID NO: 636110 - DNA, 75 bp, synthetic construct
  source 1..75: mol_type = other DNA
tccacaagcatccggaaaacaggttgatgaattaaccatgttggttaagcgattagccagttcgttaaaaagcgt

SEQ ID NO: 636111 - DNA, 75 bp, synthetic construct
  source 1..75: mol_type = other DNA
gggcgtaccggtaacagctgcaatggtctcaacaacgcaggacaccattattgaagcctgcacatggcgctggca

SEQ ID NO: 636112 - DNA, 75 bp, synthetic construct
  source 1..75: mol_type = other DNA
agagatcaatctggtgcgtccgacctatgtactgacgtgtggcagccgggcgacgtcgctcttcaacaacaagag

SEQ ID NO: 636113 - DNA, 75 bp, synthetic construct
  source 1..75: mol_type = other DNA
acagacaattgatgcccgccatgactgggccatcctgcgtgaaaaagcgttgaattttggcgaggctgagcaggc

SEQ ID NO: 636114 - DNA, 75 bp, synthetic construct
  source 1..75: mol_type = other DNA
caccaggggctggttaaagatgcgctgacctatggcattcgcgtattgccaccagacgttaatgtgtcatctaac

SEQ ID NO: 636115 - DNA, 75 bp, synthetic construct
  source 1..75: mol_type = other DNA
gctcaccattctgggcgaggataagcatcaggggctggtgaaggatgcgctgacctatggcattcgcgtattgcc

SEQ ID NO: 636116 - DNA, 75 bp, synthetic construct
  source 1..75: mol_type = other DNA
gatgtatggaatcattagagcgtgggcggaactactcctttaccgctctaattaaaaatgagcagggatatcgag

SEQ ID NO: 636117 - DNA, 75 bp, synthetic construct
  source 1..75: mol_type = other DNA
atatccagtccacttttgcagatacgctcactggatatacgcctaatcgttgggtggcggaagatatcaccgagg

SEQ ID NO: 636118 - DNA, 75 bp, synthetic construct
  source 1..75: mol_type = other DNA
ttgctttgttgttatctgggagttgccatgctggaatggctgattatgatacatatatgagcaatttacagatta

SEQ ID NO: 636119 - DNA, 75 bp, synthetic construct
  source 1..75: mol_type = other DNA
tgaattacagggcgacagcgatgcggcgattgtgaaagggcttattgcggtcgtctttattctttacgatcaaat

SEQ ID NO: 636120 - DNA, 75 bp, synthetic construct
  source 1..75: mol_type = other DNA
gcaatagcattaaaaaaatggggcgtatcctgggaagccgttggtgcatacaatgccggattcaaaaagagtgaa

SEQ ID NO: 636121 - DNA, 75 bp, synthetic construct
  source 1..75: mol_type = other DNA
gaacgaagccactgtgggtgcagcagttgactacctgatcaacattctggctgaaattcagcagggaggtgctta

SEQ ID NO: 636122 - DNA, 75 bp, synthetic construct
  source 1..75: mol_type = other DNA
tggataatggcgctgaagttaattatgtcacgtccggcagtgacaatttcgttacgatagtagcacctgaaggta

SEQ ID NO: 636123 - DNA, 75 bp, synthetic construct
  source 1..75: mol_type = other DNA
ctctactaacgaactaatttctttaagcacatgtagttcatctgattattgtatgggaccacaaaaagatactta

SEQ ID NO: 636124 - DNA, 75 bp, synthetic construct
  source 1..75: mol_type = other DNA
ggttacagcaccgtgttcccgttctacagccagacgcagtatgccatgcctggcgagcgtacggaggccctgtaa

SEQ ID NO: 636125 - DNA, 75 bp, synthetic construct
  source 1..75: mol_type = other DNA
cgggatacagctcggtcttctctttctatagccgggtacagtatgcattaccgggcgaacggctggaggcactct

SEQ ID NO: 636126 - DNA, 75 bp, synthetic construct
  source 1..75: mol_type = other DNA
tgccagagtcaggtgtggattgtgatgcgtcaaaatgcgcagggaattattgaattacagggcgacagcgatgcg

SEQ ID NO: 636127 - DNA, 75 bp, synthetic construct
  source 1..75: mol_type = other DNA
tgccagagtcaggtgtggattgtgatgcgtcagaatgcccagggaattattgaattgcagggcgacagcgatgcg

SEQ ID NO: 636128 - DNA, 75 bp, synthetic construct
  source 1..75: mol_type = other DNA
gccgcaggatattgtcaatttcgatgtgcgtccgtggtttgaaaaaatggcgctcacccaacatctcaccccatc

SEQ ID NO: 636129 - DNA, 75 bp, synthetic construct
  source 1..75: mol_type = other DNA
ggtggcggcaaatgttatcaagggtgatacggtcatctgtcatgtccgcgatgtgttacaacgggaaccgggcag

SEQ ID NO: 636130 - DNA, 75 bp, synthetic construct
  source 1..75: mol_type = other DNA
gatctgcgcttaatgctggcgcaggcgctgcatatgggcgatgaatgccataaccgcaataacgccgggacgacg

SEQ ID NO: 636131 - DNA, 75 bp, synthetic construct
  source 1..75: mol_type = other DNA
gggcgtcggcatgattggcgcgggtattgtgcatccaccttttgcctgctttgagaaagccattcttggctggtg

SEQ ID NO: 636132 - DNA, 75 bp, synthetic construct
  source 1..75: mol_type = other DNA
cattctgccggtgatcaacaccgccatcgcccataaagatgcgggcgtcggcatgattggcgcgggcattgtgca

SEQ ID NO: 636133 - DNA, 75 bp, synthetic construct
  source 1..75: mol_type = other DNA
atgatgattttaaatacaaatcagcaaaaacttgtttttgcgtggggtgtggtgcttttggtggtgagaaccacc

SEQ ID NO: 636134 - DNA, 75 bp, synthetic construct
  source 1..75: mol_type = other DNA
tgccggttataagccggaagattctgggttggatattggcgacagcgccatcaccgaaacctacggcattggtgg

SEQ ID NO: 636135 - DNA, 75 bp, synthetic construct
  source 1..75: mol_type = other DNA
atttgctatggcgaccgcgcctgcaatcgtcgcgctggtgggcggcacggtggaagaggctatcgatttctcccg

SEQ ID NO: 636136 - DNA, 75 bp, synthetic construct
  source 1..75: mol_type = other DNA
attcttttaagtggagaacccttgtttgaaggcgccaatgatgaattccttgctgcgcatgagcattacaggcat

SEQ ID NO: 636137 - DNA, 75 bp, synthetic construct
  source 1..75: mol_type = other DNA
tatcggcttcccctcttctaatgaacgctacacatcgtatagaaatgaagctgacaaagtatatgcatatatcca

SEQ ID NO: 636138 - DNA, 75 bp, synthetic construct
  source 1..75: mol_type = other DNA
tacactcaaatcaatcaataatatttttctttattttttaaatttaaaaattaattgtgctgatgatttttttga

SEQ ID NO: 636139 - DNA, 75 bp, synthetic construct
  source 1..75: mol_type = other DNA
cgtggcgggctgtcggtgcttacaatgccggttttcgcaacacagaggaacaggaacgacgcagaaaaatttatg

SEQ ID NO: 636140 - DNA, 75 bp, synthetic construct
  source 1..75: mol_type = other DNA
ttcaaagacagaaacaggactatgtgctgaactttctgatcgtacgtttctcagcactgatatggttattttggc

SEQ ID NO: 636141 - DNA, 75 bp, synthetic construct
  source 1..75: mol_type = other DNA
gtcagtattgttgtgtttgagcggggaagcgatgtctctttcgccaactgtggattgccttatcatataggcgga

SEQ ID NO: 636142 - DNA, 75 bp, synthetic construct
  source 1..75: mol_type = other DNA
ctggccagcggctgttccacgtcaaaagaggaactgctgcccgccggggagcagacgatgctggaaatctggcag

SEQ ID NO: 636143 - DNA, 75 bp, synthetic construct
  source 1..75: mol_type = other DNA
gctaaacgcctgctatatgagcagcagaaatcagaagaagccctggtgataaaacgcgagggcgattcgctggtg

SEQ ID NO: 636144 - DNA, 75 bp, synthetic construct
  source 1..75: mol_type = other DNA
ttatggcggtgaactggcgattcatgctgactctgacactgttcaccattacaacggcgttgtatgggagccagt

SEQ ID NO: 636145 - DNA, 75 bp, synthetic construct
  source 1..75: mol_type = other DNA
tttcatcctcgatttagagcacctgtctcaaaccggaaaagggtggtatcagtttaacctgacgctggattgccc

SEQ ID NO: 636146 - DNA, 75 bp, synthetic construct
  source 1..75: mol_type = other DNA
gctatggcgcagattttcattgatgcggagatcagctattcgcagaacgccattaaatcggcggtagataccatg

SEQ ID NO: 636147 - DNA, 75 bp, synthetic construct
  source 1..75: mol_type = other DNA
gaaacgctggcaacgcatgcgccgaatttctggaaatggttgcgccgttcggtggcagagaatgaacgcaaagcg

SEQ ID NO: 636148 - DNA, 75 bp, synthetic construct
  source 1..75: mol_type = other DNA
cataaagccccctactcaacacgcattcaggcggtcgtgctggcggtgaacaataacgccatgtcattcagtgac

SEQ ID NO: 636149 - DNA, 75 bp, synthetic construct
  source 1..75: mol_type = other DNA
tgatgaagagaatttacatgttgcctttaatgatgttgatttctgtctgaaagttcgtgaagcaggctatcgtaa

SEQ ID NO: 636150 - DNA, 75 bp, synthetic construct
  source 1..75: mol_type = other DNA
ggagagcaacaacttgccgaactggacaacctgcaaatcgtaccggacggacgctatcgcgtgcgtctctatcag

SEQ ID NO: 636151 - DNA, 75 bp, synthetic construct
  source 1..75: mol_type = other DNA
accgccagccagaaaaacccgccacaaaatggttaagctgaaaccgtttatggattacatcgacatgcgcctggc

SEQ ID NO: 636152 - DNA, 75 bp, synthetic construct
  source 1..75: mol_type = other DNA
gattgggcaatttcggcccaaagcccagcagcatcagcagtacatctgccctggattgcgctgaaccagctttct

SEQ ID NO: 636153 - DNA, 75 bp, synthetic construct
  source 1..75: mol_type = other DNA
tttatgaaatcaaaatggggcaaacatcttgaggtagatcctttctacagcaaaaatctgacaaaagatcgtgaa

SEQ ID NO: 636154 - DNA, 75 bp, synthetic construct
  source 1..75: mol_type = other DNA
gtgcagaggactcaccagagaaaatagcccgattcacaagagaagtgaattttatgaaatcaaaatggggcaaac

SEQ ID NO: 636155 - DNA, 75 bp, synthetic construct
  source 1..75: mol_type = other DNA
gagcgttttgatcctcatttcaagagtgattggaatccggatctgttcttctcgcaaaactacgtctcgcatctc

SEQ ID NO: 636156 - DNA, 75 bp, synthetic construct
  source 1..75: mol_type = other DNA
gcccgggaaacgttgcgccgtccccttacggtaacggagcagcaggggatgaacgcggaggcgtacagctacagc

SEQ ID NO: 636157 - DNA, 75 bp, synthetic construct
  source 1..75: mol_type = other DNA
gccggtgcctggttacagcaccgtcttccccttctacacccgcccacagtatgcattgccgggcgaacgcctgac

SEQ ID NO: 636158 - DNA, 75 bp, synthetic construct
  source 1..75: mol_type = other DNA
tcaaatgtgaccctgacagaggattcagaagactggatgccatcatgtgcatcggtcacaaatgacgatggaaaa

SEQ ID NO: 636159 - DNA, 75 bp, synthetic construct
  source 1..75: mol_type = other DNA
gtgtttcaggcagaacgctgttaccgttactggtactgacaggggctgtgctggccagcggctgttccacgtcaa

SEQ ID NO: 636160 - DNA, 75 bp, synthetic construct
  source 1..75: mol_type = other DNA
atccgggtgctccacctcgaaagaggagcttctgccggcgggcgatcagaccatgcttgaactctggcaggggaa

SEQ ID NO: 636161 - DNA, 75 bp, synthetic construct
  source 1..75: mol_type = other DNA
gcccaatcctgacatggtgatgtatgtttttccgcatctggcttccggtacgtcaccggttccggggtacagcac

SEQ ID NO: 636162 - DNA, 75 bp, synthetic construct
  source 1..75: mol_type = other DNA
acaggataaagaattacagcgagctatggcacagattttcattgatgcggagatcagctattcgcagaacgccat

SEQ ID NO: 636163 - DNA, 75 bp, synthetic construct
  source 1..75: mol_type = other DNA
ggggtctatcgtcgctctctgctgcaacagattgggggattccgtttgggagtagaaggaagtcaggatcaggat

SEQ ID NO: 636164 - DNA, 75 bp, synthetic construct
  source 1..75: mol_type = other DNA
cctattcctgagccaactcctctggtcagtttgctcattccgactcgagatcgtcgcgctctgactgaaactgca

SEQ ID NO: 636165 - DNA, 75 bp, synthetic construct
  source 1..75: mol_type = other DNA
acgaagcacggattgcgctcaaatgtgacgctgacagaggaatcggaggactggatgccgtcatgtgcaccagtg

SEQ ID NO: 636166 - DNA, 75 bp, synthetic construct
  source 1..75: mol_type = other DNA
gtacgactggcagttattcattgaggtaacaggtcctggtggaagcggtaaaagtgttatggcggagatttgtac

SEQ ID NO: 636167 - DNA, 75 bp, synthetic construct
  source 1..75: mol_type = other DNA
cttttcgctgattatcatgccggatatgacccgctacgctggtgatggggcaggaattaaggccattacaggcgg

SEQ ID NO: 636168 - DNA, 75 bp, synthetic construct
  source 1..75: mol_type = other DNA
aagctatcacgattacggcacctttacgccgttgcaggtggcggcgattgcggcgctggagggcgatcaacagtg

SEQ ID NO: 636169 - DNA, 75 bp, synthetic construct
  source 1..75: mol_type = other DNA
ctcgctggaatttgccaagaaattgcttaacgaagcgaaggtctgtgtctctccagggattggctttggcgacta

SEQ ID NO: 636170 - DNA, 75 bp, synthetic construct
  source 1..75: mol_type = other DNA
acaaaacgctggtcagcgcgttggcacgcatcaaaagctatcacgattacggcacctttacaccgttgcaggtgg

SEQ ID NO: 636171 - DNA, 75 bp, synthetic construct
  source 1..75: mol_type = other DNA
caggcgaacaacagtaccgtgaatatctcctcagacagtgccgttctggggaactcaacactgaccagtaccgcc

SEQ ID NO: 636172 - DNA, 75 bp, synthetic construct
  source 1..75: mol_type = other DNA
ggtctcggatgcggtaaacggcggagggatcgttgagagattattctgggattttgacgggaaaactattgcctt

SEQ ID NO: 636173 - DNA, 75 bp, synthetic construct
  source 1..75: mol_type = other DNA
gcctggacgaaaatatgcgggtactggtatcagatgcggtaaacggcggagggatcgttgtgaatcgccacggat

SEQ ID NO: 636174 - DNA, 75 bp, synthetic construct
  source 1..75: mol_type = other DNA
gggatcgttgagaaactattctgggattttgacgggaaaactattgcgttgccgcaggtgcgtaaaaattaccct

SEQ ID NO: 636175 - DNA, 75 bp, synthetic construct
  source 1..75: mol_type = other DNA
tctggcgctttgtgcaatacaccataaagcctttgataaaggatcgattggcctggatgaaaatatgcgggtact

SEQ ID NO: 636176 - DNA, 75 bp, synthetic construct
  source 1..75: mol_type = other DNA
gcagtgccagtaaccaaaaagcggaccaagatgagcttaggaacctatcctcatctcacacttgccaaggctcgg

SEQ ID NO: 636177 - DNA, 75 bp, synthetic construct
  source 1..75: mol_type = other DNA
gccatcgtcactattggttcgaaagagggcctggcgcatctgatgctggcgacgctggatcatggtgacacagtg

SEQ ID NO: 636178 - DNA, 75 bp, synthetic construct
  source 1..75: mol_type = other DNA
cgctggcgaaacgctacgatgtgctggtggtccatgacctggcctatgccgatatcgtctacgatggctggaaag

SEQ ID NO: 636179 - DNA, 75 bp, synthetic construct
  source 1..75: mol_type = other DNA
gcggcgaagatattatcgatttcagcatgggtaacccggacggtgcgactccgccgcatatcgtcgaaaaattat

SEQ ID NO: 636180 - DNA, 75 bp, synthetic construct
  source 1..75: mol_type = other DNA
ccgatgcgcgtaatcttcaccttgccgcgcaaggcctgttaaacaaatcccgccgtcgtgcgtcgccagaagata

SEQ ID NO: 636181 - DNA, 75 bp, synthetic construct
  source 1..75: mol_type = other DNA
aaaccggagccggtcagcatggcgtggcgtcggcccttgccagcgccctgctcggcctgaaatgccgtatttata

SEQ ID NO: 636182 - DNA, 75 bp, synthetic construct
  source 1..75: mol_type = other DNA
gtgacattaggacgctgcccgcaaggcctctttactgattgccgcgccggctgggaaatagaccccgtcgcataa

SEQ ID NO: 636183 - DNA, 75 bp, synthetic construct
  source 1..75: mol_type = other DNA
tgtcatgcctgactgggatgatgagcgcgatctcgtttcgcaagcagaagcagaaatcatcatgctggataacag

SEQ ID NO: 636184 - DNA, 75 bp, synthetic construct
  source 1..75: mol_type = other DNA
atgacaacattacttaacccctattttggtgagtttggcggcatgtacgtgccacaaatcctgatgcctgctctg

SEQ ID NO: 636185 - DNA, 75 bp, synthetic construct
  source 1..75: mol_type = other DNA
ttaatgggtgcggaagtgatcccggtacatagcggttccgcgacgctgaaagatgcctgtaacgaggcgctgcgc

SEQ ID NO: 636186 - DNA, 75 bp, synthetic construct
  source 1..75: mol_type = other DNA
aagcgcgaagatttgctgcacggcggcgcgcataaaaccaaccaggtgctcggccaggctttgctggcgaagcgg

SEQ ID NO: 636187 - DNA, 75 bp, synthetic construct
  source 1..75: mol_type = other DNA
gccgcactgggatgataagtgtgacctcgtttcgcaaacagaagcagaaatcactatgctggataacagtgcgcg

SEQ ID NO: 636188 - DNA, 75 bp, synthetic construct
  source 1..75: mol_type = other DNA
tcctgttgtctgggatcgcaaacgcgcagagcagctttttgattttagctaccggctggagtgctataccccagc

SEQ ID NO: 636189 - DNA, 75 bp, synthetic construct
  source 1..75: mol_type = other DNA
gcctgactgggatgatgagcgcgatctcgtttcgcaaacagaagcagaaatcatcatgctggataacagtgcgcg

SEQ ID NO: 636190 - DNA, 75 bp, synthetic construct
  source 1..75: mol_type = other DNA
cacagttaattcagcatattcatgataaggggccggtacgttcagccgattttgagcatcctcgaaaaggtgcaa

SEQ ID NO: 636191 - DNA, 75 bp, synthetic construct
  source 1..75: mol_type = other DNA
cgccaccgcatgctggcacctgaaaaaatgggctggaaatacaaagacgcctggatgcaggaacatgcggcggaa

SEQ ID NO: 636192 - DNA, 75 bp, synthetic construct
  source 1..75: mol_type = other DNA
aattagtcgggcgaatggatgctaaaatgcatcgccagacgggcgtccttgaagttatcgccctttggttacagg

SEQ ID NO: 636193 - DNA, 75 bp, synthetic construct
  source 1..75: mol_type = other DNA
gccaagcgagaacatattgttcctctgtcggttcgagcattagatattttagagataatgaagcctattagtgca

SEQ ID NO: 636194 - DNA, 75 bp, synthetic construct
  source 1..75: mol_type = other DNA
ttagtgagccgggaattatttcagttgaggatttaccacctggctggggattacttcacgttgttaacggaagag

SEQ ID NO: 636195 - DNA, 75 bp, synthetic construct
  source 1..75: mol_type = other DNA
aagacttgttgcaggagtttagcgtcacctttggcgcacacaccacgcaaatgccacttaagcaactgcttaacc

SEQ ID NO: 636196 - DNA, 75 bp, synthetic construct
  source 1..75: mol_type = other DNA
gacagcgacgaagtgttgcgcctgaaacaaattaacggcctgcaagagttatttgctgaccgtcaatattcccgc

SEQ ID NO: 636197 - DNA, 75 bp, synthetic construct
  source 1..75: mol_type = other DNA
aaaccttcttttaccctggcggataatgagatggagtttggcgtcggcattcatggtgagccgggtattgaccgc

SEQ ID NO: 636198 - DNA, 75 bp, synthetic construct
  source 1..75: mol_type = other DNA
gtcactcaattggtatcgccctcggtgcctgtaccgttcctgccgcaggcaaaccgtcttttacgttggcggata

SEQ ID NO: 636199 - DNA, 75 bp, synthetic construct
  source 1..75: mol_type = other DNA
tcccgcctgggtgctggttccgtcaggcagaattgccttccatcaggtcacgctgccacaccgtacgtggcgtca

SEQ ID NO: 636200 - DNA, 75 bp, synthetic construct
  source 1..75: mol_type = other DNA
taacgcaatttctcgccagtttagcggaagaagatcgcattaaggcgatcaatgagatccggatggcgatacatc

SEQ ID NO: 636201 - DNA, 75 bp, synthetic construct
  source 1..75: mol_type = other DNA
tgccgcgacagcggcatggaaggccacacacaaaaatatcatatgagtgataatgctgactggccgaagccccgc

SEQ ID NO: 636202 - DNA, 75 bp, synthetic construct
  source 1..75: mol_type = other DNA
attaatccggtaacgggatatggcagcggattgatgcaggtagactcccagcattttaacgaactggcccgctac

SEQ ID NO: 636203 - DNA, 75 bp, synthetic construct
  source 1..75: mol_type = other DNA
taacacccatgccaatgcacttgaaattgttgatggttttcaccgccatgaaattggcaaaagcgcttcaacatt

SEQ ID NO: 636204 - DNA, 75 bp, synthetic construct
  source 1..75: mol_type = other DNA
attgttgatggttttcaccgccatgaaataggtaaaggcttatcatcgttaaaattacgcttaaaaggttatttg

SEQ ID NO: 636205 - DNA, 75 bp, synthetic construct
  source 1..75: mol_type = other DNA
gctttacgcaacccattgtggtcacgcatacagataaaaatgccctggaaattgttgatggttttcaccgccatg

SEQ ID NO: 636206 - DNA, 75 bp, synthetic construct
  source 1..75: mol_type = other DNA
aaccaaacagccgctacagtctggcgatcgggtgattgcactggtcaacaatcttggtgccacaccgctttctga

SEQ ID NO: 636207 - DNA, 75 bp, synthetic construct
  source 1..75: mol_type = other DNA
catttcaagcagtagccaagaagtggcttgatgagaaagtcaaaacgtcaggcatctcccaagatcatgctaacg

SEQ ID NO: 636208 - DNA, 75 bp, synthetic construct
  source 1..75: mol_type = other DNA
gaatcgctcccctctcgaaaggaggaaagaagaattggtatttcaggtatgcagtgccagtgagtaaaaaaagaa

SEQ ID NO: 636209 - DNA, 75 bp, synthetic construct
  source 1..75: mol_type = other DNA
gggtaattattcagcaggcaaccaaggtcggtgaacgcaagaagaggaaatgcgacagagtatcaccatggattg

SEQ ID NO: 636210 - DNA, 75 bp, synthetic construct
  source 1..75: mol_type = other DNA
cgacacgttgtcttattgagtggcaactactgacccttgtgcgcccttctgaagcctccggtacaaggtgggcag

SEQ ID NO: 636211 - DNA, 75 bp, synthetic construct
  source 1..75: mol_type = other DNA
tcatcttacacttgctaaggcacgagctttacgtgatgaatacttgtcgttgcttgcaaatgatatagacccaca

SEQ ID NO: 636212 - DNA, 75 bp, synthetic construct
  source 1..75: mol_type = other DNA
gcttgatgagaaagtcaaaacgtcaggcatctcccaagatcatgctaacgacatctggcgaagcctagagagaaa

SEQ ID NO: 636213 - DNA, 75 bp, synthetic construct
  source 1..75: mol_type = other DNA
ggtcttactggttgatcaaagcggatcgatggtcgattcggtgatccactctgcggtgatggcggcctgtttgtg

SEQ ID NO: 636214 - DNA, 75 bp, synthetic construct
  source 1..75: mol_type = other DNA
cagagtcgtttccacctgagcttgctgagtgtatttttgaaggtatgcggcagcagtgtaggcgtttggctggaa

SEQ ID NO: 636215 - DNA, 75 bp, synthetic construct
  source 1..75: mol_type = other DNA
ggcggcggcagcggacacgaaccgatgcactgcggttatatcggtcaggggatgctttcgggggcctgtccgggc

SEQ ID NO: 636216 - DNA, 75 bp, synthetic construct
  source 1..75: mol_type = other DNA
atcccgaccacggacaaaatagaaaagtatctgatagaggtcttacatctcgagacaggaggagaatagcgagat

SEQ ID NO: 636217 - DNA, 75 bp, synthetic construct
  source 1..75: mol_type = other DNA
gtcattatcctcgtgagcgatttttacgaagggggttcatcatcattgctgacgcatcaggtgaaaaagtgtgtc

SEQ ID NO: 636218 - DNA, 75 bp, synthetic construct
  source 1..75: mol_type = other DNA
cgtgctgcgctatggcatagaagatgtggtgacaaatcttgaagtgctggaacgcatgcaaccttccgaaagcct

SEQ ID NO: 636219 - DNA, 75 bp, synthetic construct
  source 1..75: mol_type = other DNA
tcggcagggaaaaccaccacacagaacatcgcatccagtttatggggagagccggacgcgcaacggctgacctgg

SEQ ID NO: 636220 - DNA, 75 bp, synthetic construct
  source 1..75: mol_type = other DNA
gtaactccggatggttggataagctgtagtgagcgaatgcctgagaacattcccggaagttgtaaagagtatctg

SEQ ID NO: 636221 - DNA, 75 bp, synthetic construct
  source 1..75: mol_type = other DNA
gaaagcaccgaatttacgaaaagaattaacgtgatcggcgtgaccgaccagaaaggcgaaaaaatcctcctggac

SEQ ID NO: 636222 - DNA, 75 bp, synthetic construct
  source 1..75: mol_type = other DNA
ttaacgtaatcggtgtaactgaccagaaaggcgaaaaagttctcctggacaccaccgggccgattgcgcgcacga

SEQ ID NO: 636223 - DNA, 75 bp, synthetic construct
  source 1..75: mol_type = other DNA
ctcaagatgattggattttaatttattcaaagcacggcgagtatatggcaggacaggtacaaggggaatacgtgg

SEQ ID NO: 636224 - DNA, 75 bp, synthetic construct
  source 1..75: mol_type = other DNA
catagatacggcggaaagttacgatgatgaccgtattgaggctgttaaggctgttttgcgtagactggcaggcaa

SEQ ID NO: 636225 - DNA, 75 bp, synthetic construct
  source 1..75: mol_type = other DNA
tccccgtaataatcagctgctgaatgatgatgtgttaccggtgccgggattaatgccgggtatgtcgtcagggct

SEQ ID NO: 636226 - DNA, 75 bp, synthetic construct
  source 1..75: mol_type = other DNA
gatgcagccgatcgccaacctgccggtgacgatctttaagtttgcgatgagtccgttttcggaatggcagcaact

SEQ ID NO: 636227 - DNA, 75 bp, synthetic construct
  source 1..75: mol_type = other DNA
gcggcacaccctgattttcagtcccgcatcagcgcacagattgcccgacaggtggcacttgaccgcatcatgatc

SEQ ID NO: 636228 - DNA, 75 bp, synthetic construct
  source 1..75: mol_type = other DNA
atcatgatcggtttcaacggcacgtctcacgcggatgagtccaacttcagcaccaacaagctgcttcaggacgtt

SEQ ID NO: 636229 - DNA, 75 bp, synthetic construct
  source 1..75: mol_type = other DNA
cggatgtgatggtggaatatttccagagtggcctgccggtggccacgccaaccacctttctgaccaacgtcaata

SEQ ID NO: 636230 - DNA, 75 bp, synthetic construct
  source 1..75: mol_type = other DNA
agccaggcttctattccaactgaacgccaggctcagaatacagcacccgcctggtatccacttagcgacggacgg

SEQ ID NO: 636231 - DNA, 75 bp, synthetic construct
  source 1..75: mol_type = other DNA
gctgcttcaggacgttaacgtgggctggctggagcacatcagaaccgacgccagcgaacgcgtaatgaatgacgt

SEQ ID NO: 636232 - DNA, 75 bp, synthetic construct
  source 1..75: mol_type = other DNA
gataagttagagcaagcatctacatcagatacaacgatgcctccaacacatttgttttctgatataggacgaatt

SEQ ID NO: 636233 - DNA, 75 bp, synthetic construct
  source 1..75: mol_type = other DNA
taacgatgcctttgctatccaggaaagtgtctaccttgatatcgacaagctacgtgtggcggggcgtattgacat

SEQ ID NO: 636234 - DNA, 75 bp, synthetic construct
  source 1..75: mol_type = other DNA
aagacgattaccacggcaaacatattgcgtatttcatgcagcaagcattggcctggctggaagggcattcatgca

SEQ ID NO: 636235 - DNA, 75 bp, synthetic construct
  source 1..75: mol_type = other DNA
aatgcgtatatacaagaactgaatatgccaagacacagaaaggcagagagccaaggtttgaaatcttaactggta

SEQ ID NO: 636236 - DNA, 75 bp, synthetic construct
  source 1..75: mol_type = other DNA
agaccggcagccggaacggcggccagtcggccaaggcgaaagccgattacatccagcgggagggccgttactccc

SEQ ID NO: 636237 - DNA, 75 bp, synthetic construct
  source 1..75: mol_type = other DNA
ttgcgcgggccgagctggcacgggcaccggcaccccgccagcgaggcatggacaggggcgggccagatttcagca

SEQ ID NO: 636238 - DNA, 75 bp, synthetic construct
  source 1..75: mol_type = other DNA
ccacggcccacgagcggacgccgcagcaggagcgccagaaggccgccagagaggccgagcgcggccgtgaggctt

SEQ ID NO: 636239 - DNA, 75 bp, synthetic construct
  source 1..75: mol_type = other DNA
tgctatcggcgattatgcaggagttggactacgtgggcgtgatggcgatggagtgttttgtcacccctcaaggtc

SEQ ID NO: 636240 - DNA, 75 bp, synthetic construct
  source 1..75: mol_type = other DNA
tcgcgtctgaccgcgacgctggaagccttaatcccgctgctgccgccagagtatgccagcggcgtgatttgggcg

SEQ ID NO: 636241 - DNA, 75 bp, synthetic construct
  source 1..75: mol_type = other DNA
ttcgtcaggttccaacagatacatttatcagactctgcaatatcctggccgttagtaaagaatataaacaaatgg

SEQ ID NO: 636242 - DNA, 75 bp, synthetic construct
  source 1..75: mol_type = other DNA
gtgattcgcttcattaacgacattctgctctccgcgccgtcgattgtggttggtctgtttgtctacaccatcgtg

SEQ ID NO: 636243 - DNA, 75 bp, synthetic construct
  source 1..75: mol_type = other DNA
caaaacggtgccagcatcagccagtttgagctgcatctgcgggcgattaccgatctgccgttaccgcaaccagta

SEQ ID NO: 636244 - DNA, 75 bp, synthetic construct
  source 1..75: mol_type = other DNA
tgttgtcggcgattatgcaggagctgagctatgtaggcgtgatggcaatggagtgttttgtcaccccgcaaggtc

SEQ ID NO: 636245 - DNA, 75 bp, synthetic construct
  source 1..75: mol_type = other DNA
aacaccgtggcgcacgcgggtaaatatgcgaacgctgatgcactggtacaggacgcgcgctcatccctgctggat

SEQ ID NO: 636246 - DNA, 75 bp, synthetic construct
  source 1..75: mol_type = other DNA
ccggaagctgcgctggtcaacaacctggcagcggcgcatctggaaggttttggctcgcttgcgggtgtcgcgaaa

SEQ ID NO: 636247 - DNA, 75 bp, synthetic construct
  source 1..75: mol_type = other DNA
gatgacgctgttgcgcttaacgccggaatacgattacgcagttattgaacttggcgcgaaccatcagggcgaaat

SEQ ID NO: 636248 - DNA, 75 bp, synthetic construct
  source 1..75: mol_type = other DNA
atcatatggaaacctggacctcggcgttgcaaacccgctccaccgccgggcgcggcagttccggtaaaattgatt

SEQ ID NO: 636249 - DNA, 75 bp, synthetic construct
  source 1..75: mol_type = other DNA
ggcgaagcggcaaaagctgctggtattgaccgcgtgttaagcgtgggtaaacaaagccatgctatcagcaccgcc

SEQ ID NO: 636250 - DNA, 75 bp, synthetic construct
  source 1..75: mol_type = other DNA
gttccccatccaactggcagaaaaccagttgctgctcgacgactcctacaacgccaatgtcggttcaatgaccgc

SEQ ID NO: 636251 - DNA, 75 bp, synthetic construct
  source 1..75: mol_type = other DNA
tgccgccaacagtgattttaccgccaccaatattcatgtgacctcgcacggtactgaatttacgctgcaaactcc

SEQ ID NO: 636252 - DNA, 75 bp, synthetic construct
  source 1..75: mol_type = other DNA
tggcggtagtcaaccaccaaaatcttatttcattgaagaatcaaaagaagggtacgttcaattaattcaaattag

SEQ ID NO: 636253 - DNA, 75 bp, synthetic construct
  source 1..75: mol_type = other DNA
aattaaaatctcagaacccggcaccatcattttccctaaaattggcggagcaattgcaactaataaacgaagaat

SEQ ID NO: 636254 - DNA, 75 bp, synthetic construct
  source 1..75: mol_type = other DNA
tatgcgataagcttaaaactcgtataaaaacagcccaacaaacccaactgcaccttgcagacgcactcactgacg

SEQ ID NO: 636255 - DNA, 75 bp, synthetic construct
  source 1..75: mol_type = other DNA
ctcaaaaatgtaattacaacattaaaggagttcccgtacttagaattcctaatattgtaaaagggttcattgaac

SEQ ID NO: 636256 - DNA, 75 bp, synthetic construct
  source 1..75: mol_type = other DNA
tcccatgtccaccattagaagaattccatcgtattgttgataaagttcaaaacttattatcagtttgcgatgttc

SEQ ID NO: 636257 - DNA, 75 bp, synthetic construct
  source 1..75: mol_type = other DNA
caaaattctgtacttcaaaagatatactaattggtcgttacggtgcatctgttggtaaggtattttggggaaaag

SEQ ID NO: 636258 - DNA, 75 bp, synthetic construct
  source 1..75: mol_type = other DNA
gtaattacgattttagttaagggttcacgtagtgctgccatggaagaggtagtacgcgctttacaggagaatggg

SEQ ID NO: 636259 - DNA, 75 bp, synthetic construct
  source 1..75: mol_type = other DNA
atgggaagaccgtacgtaactttgaatttgaatggtatgtttatggataaatttaaaccatacagcaaatccaat

SEQ ID NO: 636260 - DNA, 75 bp, synthetic construct
  source 1..75: mol_type = other DNA
tacgtgcgcagggcgtggagatgtttgcggagtgtgcatacacacttgaacatcatgatcacgcattagcttttg

SEQ ID NO: 636261 - DNA, 75 bp, synthetic construct
  source 1..75: mol_type = other DNA
accaatgggagtcacgatttttacgatggcctgctaatggcctcagtgtcgcctgatgaggcagacaactctttt

SEQ ID NO: 636262 - DNA, 75 bp, synthetic construct
  source 1..75: mol_type = other DNA
ttcgtatccgcagcttgatgcctgggcggcacaccctgattttcagtcccgcgtcagcacacagattgcccggca

SEQ ID NO: 636263 - DNA, 75 bp, synthetic construct
  source 1..75: mol_type = other DNA
gaatatgatgttctgggtaatgttacttaacgcgatggcgtttatgccaacgattgcattatccaatagcgtatc

SEQ ID NO: 636264 - DNA, 75 bp, synthetic construct
  source 1..75: mol_type = other DNA
attactaacgtctttggtaatcctttcctgcatgattttgcccgtaaccctgaatttgctgatagcttcgtggtg

SEQ ID NO: 636265 - DNA, 75 bp, synthetic construct
  source 1..75: mol_type = other DNA
ctgatattagattaggtagcacacctgacagatcagagaaaaaatattggaatggagacattccttgggttagtt

SEQ ID NO: 636266 - DNA, 75 bp, synthetic construct
  source 1..75: mol_type = other DNA
aagcgaggcctgccatgtacaggtgggcgaagcggcgaaggcggcgggtattgaccgcgtgttaagtgtgggtaa

SEQ ID NO: 636267 - DNA, 75 bp, synthetic construct
  source 1..75: mol_type = other DNA
gtctggcgtttggtgaactggctgcatgggttcgccagcaagttccggcgcgcgtggttgctctgacgggttcct

SEQ ID NO: 636268 - DNA, 75 bp, synthetic construct
  source 1..75: mol_type = other DNA
atgagtaacaaaatcgaaaatcccgtagttctcattcacaagcgcgagaaccacgactcctatgcggtggcgatc

SEQ ID NO: 636269 - DNA, 75 bp, synthetic construct
  source 1..75: mol_type = other DNA
ggtaaactggtgccgcaggatccgaatgatgaaccggcgtcagagctgcttagagaaatgaaaaagcagcaagaa

SEQ ID NO: 636270 - DNA, 75 bp, synthetic construct
  source 1..75: mol_type = other DNA
tttatggcttatggtcaattttgggtgaacaatcatgctcacgtattagatggaatatcagaagattttttaaat

SEQ ID NO: 636271 - DNA, 75 bp, synthetic construct
  source 1..75: mol_type = other DNA
gcgatgtaaacggcgccagttttactctcgaacagatgctcgcctggcgagatcacccgcaggttaccggcctcg

SEQ ID NO: 636272 - DNA, 75 bp, synthetic construct
  source 1..75: mol_type = other DNA
cggcaagcaggccgatatcgtcctgttgagcgatgcgcgtaaggtcacggtgcagcaggtactggtgaaaggcga

SEQ ID NO: 636273 - DNA, 75 bp, synthetic construct
  source 1..75: mol_type = other DNA
caggatttattgatgctcacctgcatattgaatccagcatgatgacgccagtcacctttgaaaccgccaccctgc

SEQ ID NO: 636274 - DNA, 75 bp, synthetic construct
  source 1..75: mol_type = other DNA
aggtacagagccatctgccattgcccattgccgggctgatgagcaccgacacggcgcagtcgctggcggagcaaa

SEQ ID NO: 636275 - DNA, 75 bp, synthetic construct
  source 1..75: mol_type = other DNA
ccctgccagtgatccccgcgctgaaactgaccagccagggtttgtttgatggcgagacgttttccttcactacgc

SEQ ID NO: 636276 - DNA, 75 bp, synthetic construct
  source 1..75: mol_type = other DNA
gccatgagagctatttgctggaagaaggccgtcggaaattacaactcggcatgtcgttgatgatccgcgaaggat

SEQ ID NO: 636277 - DNA, 75 bp, synthetic construct
  source 1..75: mol_type = other DNA
gcggcgttcgcaccagctcttaacagtcatactcgggagtctttttttcgtgcatcgaagcgcaactccgcaaag

SEQ ID NO: 636278 - DNA, 75 bp, synthetic construct
  source 1..75: mol_type = other DNA
cggctgtgatgctgccgttcttaacgcggcgttcgcaccagctcttaactgtcatacgcgggaatcttttttttc

SEQ ID NO: 636279 - DNA, 75 bp, synthetic construct
  source 1..75: mol_type = other DNA
atcgtcagtattattcccctttatttcaacgcttcctgtcttttattgaagataaatggaataatcgcccacaaa

SEQ ID NO: 636280 - DNA, 75 bp, synthetic construct
  source 1..75: mol_type = other DNA
agcccgcaatgcatgctctgtaccgatgaccgtaacccgtgggaaatcgcccatgaagggcatatcgatgcctta

SEQ ID NO: 636281 - DNA, 75 bp, synthetic construct
  source 1..75: mol_type = other DNA
ggctgcgacggtcagccatgacagccataatattgtggtgatcggtcgcagtgccgaagagatggcgctggcggt

SEQ ID NO: 636282 - DNA, 75 bp, synthetic construct
  source 1..75: mol_type = other DNA
gaccatccgcaggttaccggccttgcagaaatgatggactaccctggcgtaattagcgggcagaatgcgctgctc

SEQ ID NO: 636283 - DNA, 75 bp, synthetic construct
  source 1..75: mol_type = other DNA
atgtggcatatcgcgtcgccagctggtcgacggcgcgccactttggtctgaatcacctgggcttactggcacccg

SEQ ID NO: 636284 - DNA, 75 bp, synthetic construct
  source 1..75: mol_type = other DNA
aagagcaatttgagatgctacgcaagatccactgtcgcgttattcagggatatttcttttcccgcccctgcccgc

SEQ ID NO: 636285 - DNA, 75 bp, synthetic construct
  source 1..75: mol_type = other DNA
ccgtcgtgatgaattcaggcccgatcattttttctgaggatcttccgccgcagattcgtcagccagtctgtaatg

SEQ ID NO: 636286 - DNA, 75 bp, synthetic construct
  source 1..75: mol_type = other DNA
tatcgacatcgatccgatggcaatgtcactgcttaccgcctggtcatggccgggaaatattcgagagctttccaa

SEQ ID NO: 636287 - DNA, 75 bp, synthetic construct
  source 1..75: mol_type = other DNA
atcagaaaggagaatgtaacgcagagtatcaaacctaaagaaattaccgtatatccccaatatgccatgcgtggc

SEQ ID NO: 636288 - DNA, 75 bp, synthetic construct
  source 1..75: mol_type = other DNA
accaaaggttaaacgcaaacctggtgataaaggcgtagtatcttactttcctgaatcaaaggaggcagcacttaa

SEQ ID NO: 636289 - DNA, 75 bp, synthetic construct
  source 1..75: mol_type = other DNA
gttatcagtcatatgcccaaaagtaaggaggaagctctaacagttatcagagaaattgaaaacagaaaaagacgt

SEQ ID NO: 636290 - DNA, 75 bp, synthetic construct
  source 1..75: mol_type = other DNA
ttgactcgccttatggaatcggcaaacttattcgcattaacaataatgatgctctaattaagtatttcgattctc

SEQ ID NO: 636291 - DNA, 75 bp, synthetic construct
  source 1..75: mol_type = other DNA
aaccggacgtttttgaccgctggccgtgtatggaccctgagcttaaagaaggcaaggaaagcttctcgatgtccc

SEQ ID NO: 636292 - DNA, 75 bp, synthetic construct
  source 1..75: mol_type = other DNA
cgaaacttatacaaaagatgatgaatatgatacaaacaagtacatcaggatcagacttggggaaataagaaattt

SEQ ID NO: 636293 - DNA, 75 bp, synthetic construct
  source 1..75: mol_type = other DNA
tcagtagtgagaatcagcgcgatattatcgacatcgatccgatggcaatgtcactgcttaccgcctggtcatggc

SEQ ID NO: 636294 - DNA, 75 bp, synthetic construct
  source 1..75: mol_type = other DNA
aggatcttccgccgcagattcgtcgcagattcgtcagccagtctgtaatgctggtgaagcaaaaacagcccctgt

SEQ ID NO: 636295 - DNA, 75 bp, synthetic construct
  source 1..75: mol_type = other DNA
tgctgcatctgctggatgctaaaaattacccactgactgacactggcttacagaaatttcagcagcgtatccagc

SEQ ID NO: 636296 - DNA, 75 bp, synthetic construct
  source 1..75: mol_type = other DNA
gtatgcgagactggatgatatttataaaagtggcggaagtagggaatctttcccaggctgcgcgggaattagata

SEQ ID NO: 636297 - DNA, 75 bp, synthetic construct
  source 1..75: mol_type = other DNA
acttgggatgacggtgatggcgaagacctgtatctcaaagaggtaacccactggatgcctctaccagaaccgcct

SEQ ID NO: 636298 - DNA, 75 bp, synthetic construct
  source 1..75: mol_type = other DNA
aatgcgttctgtgttatctgatatgttccgcgaggccattgttgaaggacgtatatctcaaaatccagtaacgcc

SEQ ID NO: 636299 - DNA, 75 bp, synthetic construct
  source 1..75: mol_type = other DNA
agatcaacttccggcatggttcccattagctatggatttagcccttgtaacaggacaacgtcgtgaagacataac

SEQ ID NO: 636300 - DNA, 75 bp, synthetic construct
  source 1..75: mol_type = other DNA
ggaatacgtggagttgagcgacggcactttatcgtggttagggaacgccttgttctggatgctgctaccagaacc

SEQ ID NO: 636301 - DNA, 75 bp, synthetic construct
  source 1..75: mol_type = other DNA
tgccagttaatacaccttgccaagatgcgccagcccatatctggctgcaaacggctggagtatggccagaagatg

SEQ ID NO: 636302 - DNA, 75 bp, synthetic construct
  source 1..75: mol_type = other DNA
agagagccaaggtttgaaatcttaactggtatatggcatggagtaacccactggatgccgctaccagaaccgccg

SEQ ID NO: 636303 - DNA, 75 bp, synthetic construct
  source 1..75: mol_type = other DNA
ggttcagacaggcattgcgaaaaccgattcgaacggagcagggcgatacgggaactggaaaaattccgtcagcag

SEQ ID NO: 636304 - DNA, 75 bp, synthetic construct
  source 1..75: mol_type = other DNA
agaactgaaacgaaaaggtaacgctgccagcgttacaaaaacggatcaaaaagcgtaccagaggaagagaaagag

SEQ ID NO: 636305 - DNA, 75 bp, synthetic construct
  source 1..75: mol_type = other DNA
cacgccaaccgcgcccttgaacgggccgggcacgaggcccgcattgaccaccgcacccttgaggcgcagggcatc

SEQ ID NO: 636306 - DNA, 75 bp, synthetic construct
  source 1..75: mol_type = other DNA
aaaagctcaaaaaaacgggcggttacaaacgagcgagtaacaaaaatacgtgaactgaaacgaaaaggtaacgct

SEQ ID NO: 636307 - DNA, 75 bp, synthetic construct
  source 1..75: mol_type = other DNA
gcaggtgattcgacacagcattgccaatgaataccagggcttgttcgcaccgaaaggtgttcggcctgagacgtt

SEQ ID NO: 636308 - DNA, 75 bp, synthetic construct
  source 1..75: mol_type = other DNA
cgaaaggtgttcggcctgagacgttgctccgacaggttaacaccgtctcgttgccggacagtgcgatcccgccag

SEQ ID NO: 636309 - DNA, 75 bp, synthetic construct
  source 1..75: mol_type = other DNA
tgcagcaggaaaaagagttgctgcaactcagtttgcaacaggggaaatataaccagaagcgcgcggctgaattgc

SEQ ID NO: 636310 - DNA, 75 bp, synthetic construct
  source 1..75: mol_type = other DNA
ttcagatcctgcgcgatatgggcgtgggtttatcggtagatgattttggcacgggcttttccggattatcccgct

SEQ ID NO: 636311 - DNA, 75 bp, synthetic construct
  source 1..75: mol_type = other DNA
cgtttttgtgaaggcaagcatttctataaagttattggagatgatttgaacaatttgcgggtgactttaagtaac

SEQ ID NO: 636312 - DNA, 75 bp, synthetic construct
  source 1..75: mol_type = other DNA
gatattgataacgccatcatcatgctcgaccgcatagatacgctggaaaattgcgatgatgaccgtattgaggct

SEQ ID NO: 636313 - DNA, 75 bp, synthetic construct
  source 1..75: mol_type = other DNA
atgcggcgtgaacgccttatccgaactacgtccgacaaacaaatttcgtgcgaattaccgctaaaatcgcgtttt

SEQ ID NO: 636314 - DNA, 75 bp, synthetic construct
  source 1..75: mol_type = other DNA
gcagcgttcgcgccagctcttaacagtcatacgcgggagtcttttttttcgcgcatcgcagcgcagatccgtaaa

SEQ ID NO: 636315 - DNA, 75 bp, synthetic construct
  source 1..75: mol_type = other DNA
ggttgattaagaatcaaggattcttaagaaaatatcaggcattagtcgctaactcgataaaagatcaatttccag

SEQ ID NO: 636316 - DNA, 75 bp, synthetic construct
  source 1..75: mol_type = other DNA
aaccagaagcgcgcggctgaattgctggggttaacctatcatcagttccgcgcgttgttgaaaaagcaccagatt

SEQ ID NO: 636317 - DNA, 75 bp, synthetic construct
  source 1..75: mol_type = other DNA
aaccagaaacgcgcggctgaattactgggattaacctatcatcagttccgcgcattgttgaaaaagcaccagatt

SEQ ID NO: 636318 - DNA, 75 bp, synthetic construct
  source 1..75: mol_type = other DNA
ccggtggatttgcgcgaatttcagatgctgcaggaaaaagagttacttcagctcagtttgcaacaggggaaatat

SEQ ID NO: 636319 - DNA, 75 bp, synthetic construct
  source 1..75: mol_type = other DNA
gcagccagccattacaggtcaatgtgcggctggtatgtgcgacaaatgccgatcttccggcgatggttgatgaag

SEQ ID NO: 636320 - DNA, 75 bp, synthetic construct
  source 1..75: mol_type = other DNA
ttggtgaggcgaacagctttctcgaagtgctggaacaggtttcgcatctcgcaccactggacaaaccggtgctca

SEQ ID NO: 636321 - DNA, 75 bp, synthetic construct
  source 1..75: mol_type = other DNA
agtgctggaacaggtttcgcatctcgcgccgctggacaaaccggttttgattattggcgagcgcggcaccggtaa

SEQ ID NO: 636322 - DNA, 75 bp, synthetic construct
  source 1..75: mol_type = other DNA
ggtggtcacccgcggtgccggtgatggtattcgcgtggatgtgcgggcggtggatacacaggctgattatcgcgg

SEQ ID NO: 636323 - DNA, 75 bp, synthetic construct
  source 1..75: mol_type = other DNA
acatgcccaggcggcaaaaaaagccatttataaaggatttggcatgacctttagaatgagtagtaagaattttgc

SEQ ID NO: 636324 - DNA, 75 bp, synthetic construct
  source 1..75: mol_type = other DNA
tttccctgctggcgttaatcatgctggctggttgtagctctcccgcgtctcgcattgcagactgccaggcgcaag

SEQ ID NO: 636325 - DNA, 75 bp, synthetic construct
  source 1..75: mol_type = other DNA
gttgatggctggatcaaagcccaccagcagcagttcgatggctgggtgaatgaagcgctggcagcgcagaagtaa

SEQ ID NO: 636326 - DNA, 75 bp, synthetic construct
  source 1..75: mol_type = other DNA
cttccagaccctgttggtcagccgtgcgctggagaaattaggttataccgtcaaccaggccagcgaagtggatta

SEQ ID NO: 636327 - DNA, 75 bp, synthetic construct
  source 1..75: mol_type = other DNA
cagcgtttgccacgcttatctctacacaaacttttgctgccgatctgccgggcaaaggcattactgttaatccag

SEQ ID NO: 636328 - DNA, 75 bp, synthetic construct
  source 1..75: mol_type = other DNA
ctaaagatatcgacgaagaactggctaaaatcggcatgcttgaacgtatgcgggacattatcgaatatgcgataa

SEQ ID NO: 636329 - DNA, 75 bp, synthetic construct
  source 1..75: mol_type = other DNA
cgggacattatcgaatatgcgataaaagaaaatcttgcagccagagaagcccttttgataatggagcgggagatt

SEQ ID NO: 636330 - DNA, 75 bp, synthetic construct
  source 1..75: mol_type = other DNA
ccaaactgattctggaatcggttgttaccacttcgattgtattactgttgatcggtttttccgtgggcatgtcct

SEQ ID NO: 636331 - DNA, 75 bp, synthetic construct
  source 1..75: mol_type = other DNA
ttagaatgagcagtaagaactttgcttatctcaatgattcattatgtgcaattgatgaagacaataaagatgcca

SEQ ID NO: 636332 - DNA, 75 bp, synthetic construct
  source 1..75: mol_type = other DNA
cagggtggcgaaggcgcgatgctcgccgtcaatgaagcgatggcttatatgtcgcaaaaagtgcagggtggggaa

SEQ ID NO: 636333 - DNA, 75 bp, synthetic construct
  source 1..75: mol_type = other DNA
tactcatcaagaccacttgtgcatgatcatctggtagggagtgatggcgcatttaatgaaacggttaaggggtta

SEQ ID NO: 636334 - DNA, 75 bp, synthetic construct
  source 1..75: mol_type = other DNA
cgttacaaagagggtaagccggtgttttactacacctggacgccgtactgggtgagtaacgaactgaaaccgggg

SEQ ID NO: 636335 - DNA, 75 bp, synthetic construct
  source 1..75: mol_type = other DNA
gatatttctctaacagagaaaggaccgatagtgataatgctattatttattatatcacttgtcgtattcattgtc

SEQ ID NO: 636336 - DNA, 75 bp, synthetic construct
  source 1..75: mol_type = other DNA
ttccctgcaagcacacatcaccgtgtcgttccagcaggactatttcgacaaagcagaaatttcaactgaacaggt

SEQ ID NO: 636337 - DNA, 75 bp, synthetic construct
  source 1..75: mol_type = other DNA
agaacctatcgctggtaaatgcctgcaggctcaggctaaccgtgtaccaatgcccaaagatcagttctgcatcct

SEQ ID NO: 636338 - DNA, 75 bp, synthetic construct
  source 1..75: mol_type = other DNA
ctgttatctggctgattgggggagtgccgaaacaatttttatcctgtgctttattgtactatggcagggattgtt

SEQ ID NO: 636339 - DNA, 75 bp, synthetic construct
  source 1..75: mol_type = other DNA
atgaaaatatactggacaagaaaacgtattcctgaactttcagcacttccaccttcattaagaaagaaaaatttt

SEQ ID NO: 636340 - DNA, 75 bp, synthetic construct
  source 1..75: mol_type = other DNA
gacactgccgagtccgatattctcggtggcatcaacgccgggcttgcgacctgctggctgaatgcgcacaatcgc

SEQ ID NO: 636341 - DNA, 75 bp, synthetic construct
  source 1..75: mol_type = other DNA
ttgtgtgtgcaggaaagaaggtagttgcagagccggtttcgtccgtgttttcccgtcgggtcgcacttacgcttg

SEQ ID NO: 636342 - DNA, 75 bp, synthetic construct
  source 1..75: mol_type = other DNA
gccacggttcagggctgctcagcctttaaggcagggcaggtcgccaccctggattttggtaacccgggccagctg

SEQ ID NO: 636343 - DNA, 75 bp, synthetic construct
  source 1..75: mol_type = other DNA
ggacgccgtactgggtgagtaacgaactgaagccgggcaaagatgtcgtctggttgcaggtgccgttctccgcac

SEQ ID NO: 636344 - DNA, 75 bp, synthetic construct
  source 1..75: mol_type = other DNA
gtgttttggatagaaaaataatatacccagctcttagcgtgcttctttttgcaaattggtgtcaggtaggcaacg

SEQ ID NO: 636345 - DNA, 75 bp, synthetic construct
  source 1..75: mol_type = other DNA
gatggtattcgcgtggatgtgcgggcggtggatacacaggcagattatcgcggacgtctgactcaggacagtcat

SEQ ID NO: 636346 - DNA, 75 bp, synthetic construct
  source 1..75: mol_type = other DNA
gcgtggatgtacgggcggtggatgcagaggctgattatcgcggacgtctgacacaggagaatcattcggtgaatt

SEQ ID NO: 636347 - DNA, 75 bp, synthetic construct
  source 1..75: mol_type = other DNA
ctttattggtgtgcccatttcgttctcaatcggtattgccactgtagcttcaatgcttttgatgtttccctggga

SEQ ID NO: 636348 - DNA, 75 bp, synthetic construct
  source 1..75: mol_type = other DNA
caggatatgcgttcttcacggtactgcaccgatattgccaaaatggtagcggccccaattatccacgttaatggc

SEQ ID NO: 636349 - DNA, 75 bp, synthetic construct
  source 1..75: mol_type = other DNA
taagcgtttctcagtctgcctatgccctgtttaacggcgtagggaaattgcagggcgcgaaagaaggcggaaatc

SEQ ID NO: 636350 - DNA, 75 bp, synthetic construct
  source 1..75: mol_type = other DNA
ggcaaacaagaacacccagaataaagcatctgaacggtaagcagttaagagcgtatgcattacttatggatgatg

SEQ ID NO: 636351 - DNA, 75 bp, synthetic construct
  source 1..75: mol_type = other DNA
cagagtgttagagcggttttcattactcactaactctgtttacgtgatattaactctgtctgcgtccgtgacatg

SEQ ID NO: 636352 - DNA, 75 bp, synthetic construct
  source 1..75: mol_type = other DNA
gctgtggacagagtgctagatcggttttcattactcactaactctgtttacgtgatattaactctatctgcgtcg

SEQ ID NO: 636353 - DNA, 75 bp, synthetic construct
  source 1..75: mol_type = other DNA
atgaggcgctccttaatatcatagaaaatagaaggcagaattttgcatttcttgtttttttatctcttagcttta

SEQ ID NO: 636354 - DNA, 75 bp, synthetic construct
  source 1..75: mol_type = other DNA
ttgcgacacagtggaaaatgccagccaactacatgaagtatggcaaaaaggagcaaacgaaaacgccagcacaat

SEQ ID NO: 636355 - DNA, 75 bp, synthetic construct
  source 1..75: mol_type = other DNA
ggggggtataccttaaaggatatgccgaaggacaaaagaaaacctgccaaatcgattttacttatgccagagggc

SEQ ID NO: 636356 - DNA, 75 bp, synthetic construct
  source 1..75: mol_type = other DNA
aaggacggcggcaacagggagatcaaacactggcgcacggtggcaatcagcaccggagaaatggacgttgagaca

SEQ ID NO: 636357 - DNA, 75 bp, synthetic construct
  source 1..75: mol_type = other DNA
aaggaaaatcaaaccttgatgatgctataactttttatgttcttccggctgtttttaaagccgaggtggcaagtg

SEQ ID NO: 636358 - DNA, 75 bp, synthetic construct
  source 1..75: mol_type = other DNA
atgaaaaaatttatcggttccttgttggctttagtggtttgtgggtgccagattgatccttatactcacgcgcca

SEQ ID NO: 636359 - DNA, 75 bp, synthetic construct
  source 1..75: mol_type = other DNA
ttgtgacacggtggaaaatgccagtcaactgcatgaagtatggcaaaaaggagccgatgaaaatgccagcacgat

SEQ ID NO: 636360 - DNA, 75 bp, synthetic construct
  source 1..75: mol_type = other DNA
tacgcgacttcttgacgctgcttgaacagcagggtgagctaaaacgtatcacgctcccggtggatccgcatctgg

SEQ ID NO: 636361 - DNA, 75 bp, synthetic construct
  source 1..75: mol_type = other DNA
gacagtattgcttaatgaagaagaatcttttgcgcgggcaatcgagttgattgccgcacctgaagatgttcaggt

SEQ ID NO: 636362 - DNA, 75 bp, synthetic construct
  source 1..75: mol_type = other DNA
tcagagaatgaagaatttgtcgctcagctttcaaatctcgttaacaaagatgaagccgctatcggcgtgatatgt

SEQ ID NO: 636363 - DNA, 75 bp, synthetic construct
  source 1..75: mol_type = other DNA
agttttattcacgttccaggcagctagtggctggcacatgcgtcggtattggacaggggcatattggtatccaag

SEQ ID NO: 636364 - DNA, 75 bp, synthetic construct
  source 1..75: mol_type = other DNA
atgggtcttgcggtaatgatagtctgcggcattattgctaaacgccgtggctacccgctttcagaaagagcaacc

SEQ ID NO: 636365 - DNA, 75 bp, synthetic construct
  source 1..75: mol_type = other DNA
ttttgataatcggagatttgagcagaaagattgtccagatgccagttcaggtcaatctcagcattctggcggaaa

SEQ ID NO: 636366 - DNA, 75 bp, synthetic construct
  source 1..75: mol_type = other DNA
ttgctggcaattgcagggctggcaatccttgccggcccggcggtagtgtctttgctggcgaaagataagaagtta

SEQ ID NO: 636367 - DNA, 75 bp, synthetic construct
  source 1..75: mol_type = other DNA
gttttcattaaaaataattcatggtacagaacaaaaagaaattatatctgtagtggttattgaatcattaatgct

SEQ ID NO: 636368 - DNA, 75 bp, synthetic construct
  source 1..75: mol_type = other DNA
gattctgcaaaaacagttcccggaaattgtcgatttttacctgccgccggaaggctgttcttatcgtctggcggt

SEQ ID NO: 636369 - DNA, 75 bp, synthetic construct
  source 1..75: mol_type = other DNA
caatgccggtgctgtgcaacctgttcggtacgccaaagcgcgtggcgatgggcatggggcaggaagatgtttcgg

SEQ ID NO: 636370 - DNA, 75 bp, synthetic construct
  source 1..75: mol_type = other DNA
gaggtctctgacgagttttcagaaagacgaggtgacggcagagtactgcgaagtctatgagcttccgccgggcca

SEQ ID NO: 636371 - DNA, 75 bp, synthetic construct
  source 1..75: mol_type = other DNA
taaccactgcctgaggtcactaaccagttttcagaaagatgaggtgacagctgagtacagcgaagtctatgagct

SEQ ID NO: 636372 - DNA, 75 bp, synthetic construct
  source 1..75: mol_type = other DNA
ctcgttaacagattttcttaaatttgctgatcgcaacacattcaacaactacttcagaccccatccaggctccca

SEQ ID NO: 636373 - DNA, 75 bp, synthetic construct
  source 1..75: mol_type = other DNA
ccagcaaatttgtggcaaagacaatctgggactggtgattgaatgctccggtgccaatatcgcattgaaacaagc

SEQ ID NO: 636374 - DNA, 75 bp, synthetic construct
  source 1..75: mol_type = other DNA
tctactctcattcgcagtacatttgaccaagcgttagagcatttttcacaaggtagcattgatctgcttcatatt

SEQ ID NO: 636375 - DNA, 75 bp, synthetic construct
  source 1..75: mol_type = other DNA
cgcctttggtgacggacttttcgaactcagaattaaaggcaacgatgggatcgcgcgtgttttttactgcactct

SEQ ID NO: 636376 - DNA, 75 bp, synthetic construct
  source 1..75: mol_type = other DNA
atcgaaaatatcttcttttaaactttaaatcacctaattttcttaagtctggtgaatcacaaatgactggttctg

SEQ ID NO: 636377 - DNA, 75 bp, synthetic construct
  source 1..75: mol_type = other DNA
tacagtcaatgattcactctcataaacgaggcggagctcaaccatgcctatatcttggagaaattagtaaatttc

SEQ ID NO: 636378 - DNA, 75 bp, synthetic construct
  source 1..75: mol_type = other DNA
agaagtggaattctaagaagaattttcccagttgctataacatctattgaatgtacagttaatcaagatataaaa

SEQ ID NO: 636379 - DNA, 75 bp, synthetic construct
  source 1..75: mol_type = other DNA
ggaatgcaggcctgttggatcagaccggaaaatggcgatctgatgcaaacctgggacagccgtttactgccgcat

SEQ ID NO: 636380 - DNA, 75 bp, synthetic construct
  source 1..75: mol_type = other DNA
agaagccagtgcaggcgcacacgcagcaatgatcaactttgccaaatggcgcagccgaatcgacgtcccgcagca

SEQ ID NO: 636381 - DNA, 75 bp, synthetic construct
  source 1..75: mol_type = other DNA
agaagccagtgcaggcgcacacgcggcaatgatcaactttgccaaatggcgtagccggatcgacgttccgcagca

SEQ ID NO: 636382 - DNA, 75 bp, synthetic construct
  source 1..75: mol_type = other DNA
gtttcatcaagaagacccagaaaaccccaccagccgaacgccaaaaagctgaaaccagaatgaaggaggtaaagc

SEQ ID NO: 636383 - DNA, 75 bp, synthetic construct
  source 1..75: mol_type = other DNA
gtgaggcagcagaacgtgcaattccagcaatggaacgcctgttaatgttgccagttgatgatgatttgttaagtg

SEQ ID NO: 636384 - DNA, 75 bp, synthetic construct
  source 1..75: mol_type = other DNA
atgtggattgagcatccaacattgggaaatgtgccgacatatggtggcccattagatagttacaccattccaaca

SEQ ID NO: 636385 - DNA, 75 bp, synthetic construct
  source 1..75: mol_type = other DNA
cgctattgcaaaaataacaccttgctttgaaaatagtaaagcagctattttttctggcttaaaaaacggcattgg

SEQ ID NO: 636386 - DNA, 75 bp, synthetic construct
  source 1..75: mol_type = other DNA
acatatatgaatagcccattctcaagacaatattttgctaacgcaagtaagcaaaccactaatttagcttctatt

SEQ ID NO: 636387 - DNA, 75 bp, synthetic construct
  source 1..75: mol_type = other DNA
cgttgcgccatcgtcacccggcaacactctccggtggagagacacagcgcgtggtcatcgcctgcccatcgcgat

SEQ ID NO: 636388 - DNA, 75 bp, synthetic construct
  source 1..75: mol_type = other DNA
ttggagacaacggcagcggcaaaagcacgctggcgcaactgatggcgggttggtatccggacttcctgccgggtg

SEQ ID NO: 636389 - DNA, 75 bp, synthetic construct
  source 1..75: mol_type = other DNA
ggctaccagatataacttactatcgagtaggtaaaacgccgccaactaaagatttaagcttctgggaaacttcta

SEQ ID NO: 636390 - DNA, 75 bp, synthetic construct
  source 1..75: mol_type = other DNA
tataacaagcttttcagcacattgcgaaaaacttaaatcaaaaatccagtccgcccaacaaacccaactgcacct

SEQ ID NO: 636391 - DNA, 75 bp, synthetic construct
  source 1..75: mol_type = other DNA
ggcggattcttgagtgtattgagaccattagttgttaatgaaatttatttaatggccttactcagatgcgaaact

SEQ ID NO: 636392 - DNA, 75 bp, synthetic construct
  source 1..75: mol_type = other DNA
tttttttgaaaataatcctattcccttccctccattgcaagaacaagagcgcattattattaggtttactcaatt

SEQ ID NO: 636393 - DNA, 75 bp, synthetic construct
  source 1..75: mol_type = other DNA
tgcgatccgtttatctcatgtttcaaagtattattatctatttttaaagagcctattcgtattaaaacattacca

SEQ ID NO: 636394 - DNA, 75 bp, synthetic construct
  source 1..75: mol_type = other DNA
tgtgaagacctaaaaacatctacccaatccgcccagcaaacccaactgcaccttgcagacgcactgactgacgcg

SEQ ID NO: 636395 - DNA, 75 bp, synthetic construct
  source 1..75: mol_type = other DNA
cggtacgcccattgggcatctcccgcttaatgaacaatccgccaccatccagctcgtccagcaatcgccctattt

SEQ ID NO: 636396 - DNA, 75 bp, synthetic construct
  source 1..75: mol_type = other DNA
aacgccgaggaactggctgaaaactgggcgcgtattagcgagcatttcgacaccctatttaccaccgaagccagc

SEQ ID NO: 636397 - DNA, 75 bp, synthetic construct
  source 1..75: mol_type = other DNA
cgttaaaacagaccattctgcaactggccgtaatgggtaaacttgtgccgcaggatccgaatgacgaaccagcct

SEQ ID NO: 636398 - DNA, 75 bp, synthetic construct
  source 1..75: mol_type = other DNA
ccctgcttggcggacgcttaaaacaacgcgaggctccgtggtattcgttgtttgacgccctgctgcatctggcgg

SEQ ID NO: 636399 - DNA, 75 bp, synthetic construct
  source 1..75: mol_type = other DNA
tggttaaccacctgaaacgcaaagccccattgcctgccatgcaggtgatgggcgatacccgcggtatttttcacc

SEQ ID NO: 636400 - DNA, 75 bp, synthetic construct
  source 1..75: mol_type = other DNA
gcgatgcaggggtcatagataaggacatctgtaaaggcatgatgcaggttgtcaagattctggaaacagaatgtc

SEQ ID NO: 636401 - DNA, 75 bp, synthetic construct
  source 1..75: mol_type = other DNA
atggccttcttccgcaatgagccaattaccgatgttgttcgccgtctgaagctgagggcggatggcgaagcgggg

SEQ ID NO: 636402 - DNA, 75 bp, synthetic construct
  source 1..75: mol_type = other DNA
acatacttttggcgtgacggaaagcgtgctatcagacaatccgttttatggactggtactgatttgcattctggt

SEQ ID NO: 636403 - DNA, 75 bp, synthetic construct
  source 1..75: mol_type = other DNA
atgccgatgaaacgctgtttacctttgactcgttcaccggcctgcagcggatgtttcttgattacagcgtcacct

SEQ ID NO: 636404 - DNA, 75 bp, synthetic construct
  source 1..75: mol_type = other DNA
gtaaaacactgtggttctataatccctttgttgaacaagccacggcaacctggctgaaagatgccaccggcaata

SEQ ID NO: 636405 - DNA, 75 bp, synthetic construct
  source 1..75: mol_type = other DNA
tggtaacggtgatacagtttatcgcctgttatctggctagttgggggaatgccgaaacaatttttatgctgttct

SEQ ID NO: 636406 - DNA, 75 bp, synthetic construct
  source 1..75: mol_type = other DNA
gattttcatcgtactaatcctgcaacagggttacctatgtcaggtattggtgtggatatcggtggtaattcatat

SEQ ID NO: 636407 - DNA, 75 bp, synthetic construct
  source 1..75: mol_type = other DNA
tgataacggtgatacagttcattgcctgttatctggctgattgggggaacgctgaaacagtctttatcctgtgct

SEQ ID NO: 636408 - DNA, 75 bp, synthetic construct
  source 1..75: mol_type = other DNA
gtttgaagtggctgacggcaaacgcctggtcgacctgcccggctatggctatgcggaagttcccgaagagatgaa

SEQ ID NO: 636409 - DNA, 75 bp, synthetic construct
  source 1..75: mol_type = other DNA
ctggttgacttgcctgggtacggttatgcggaagtcccggaagagatgaagcgcaaatggcagcgtgcgctcggc

SEQ ID NO: 636410 - DNA, 75 bp, synthetic construct
  source 1..75: mol_type = other DNA
ctttttgcagcccgcgctttattggctgttagcgcattcattggtttttgctggactgccgcgccggattggact

SEQ ID NO: 636411 - DNA, 75 bp, synthetic construct
  source 1..75: mol_type = other DNA
cgatgggacatgacgaagcggtaaaagcctatgagcagaatatttccgcgctggcgattgccgcacagtttatta

SEQ ID NO: 636412 - DNA, 75 bp, synthetic construct
  source 1..75: mol_type = other DNA
aacaggaacttaaggattacggtgtggatattgatgcgctcaacgccttcaaatttctgaccggaccagaaaccg

SEQ ID NO: 636413 - DNA, 75 bp, synthetic construct
  source 1..75: mol_type = other DNA
cgggaactgcccgattatctaccgctgtatctggagtatttaagcgtactgcctgacgatcaggcgaaagaagga

SEQ ID NO: 636414 - DNA, 75 bp, synthetic construct
  source 1..75: mol_type = other DNA
cgtttatttcccttaactgcgcggcgttaaatgaaaatttgctggattccgaactgtttggtcacgaagcggggg

SEQ ID NO: 636415 - DNA, 75 bp, synthetic construct
  source 1..75: mol_type = other DNA
gtttttcctcggcagctggctgcgctacgactacgggcagtacacctggcgcgcctcctcaagtcagatgctcga

SEQ ID NO: 636416 - DNA, 75 bp, synthetic construct
  source 1..75: mol_type = other DNA
ccctgcttggcggacgcttaaaacaacgcgaggcatcgtggtacgcgttatttgacaccctgttgcaactggcag

SEQ ID NO: 636417 - DNA, 75 bp, synthetic construct
  source 1..75: mol_type = other DNA
tgctgatggaatacccggacgagctgttgtgggagtgcaaggacgacgcgctggcgttgattcgccgggatgcgc

SEQ ID NO: 636418 - DNA, 75 bp, synthetic construct
  source 1..75: mol_type = other DNA
tggccggaagtgttcaactggctgcaaacggcaggtaatgttgagcgccatgaaatgtatcgcaccttcaactgc

SEQ ID NO: 636419 - DNA, 75 bp, synthetic construct
  source 1..75: mol_type = other DNA
aggtaccaagctgcgtctggcgatggacttaaaacgtcacgacaccattggtattgatctggtcgccatgtgcgt

SEQ ID NO: 636420 - DNA, 75 bp, synthetic construct
  source 1..75: mol_type = other DNA
aaagggatgtctctgtacctgattatcgtcactggtttgttgctttgtgtttctccgttcctggcattttcttga

SEQ ID NO: 636421 - DNA, 75 bp, synthetic construct
  source 1..75: mol_type = other DNA
aaccattcttctgccgcatggctatgacggacaagggccggagcactcttccgcacgtcctgagcgctggctgca

SEQ ID NO: 636422 - DNA, 75 bp, synthetic construct
  source 1..75: mol_type = other DNA
gctggatgagataatcattgacccgttccgccgccacactacacagccacagacagtagaaactaaaccgatgtc

SEQ ID NO: 636423 - DNA, 75 bp, synthetic construct
  source 1..75: mol_type = other DNA
tctgcgttggcgtggtagaaaaatcagaaatcatcgacggttctaaagtcagcgacggtgatgtgctgattgcgc

SEQ ID NO: 636424 - DNA, 75 bp, synthetic construct
  source 1..75: mol_type = other DNA
ttgcacatacgtttgggatagctcttgaagagcaaactgatgccctctctttccacgataacgatggccatgaat

SEQ ID NO: 636425 - DNA, 75 bp, synthetic construct
  source 1..75: mol_type = other DNA
ttatctaataatgaaccaatagaaattgataaaatattagaaacaaacagcaatcgggaagtgctcggtatgttt

SEQ ID NO: 636426 - DNA, 75 bp, synthetic construct
  source 1..75: mol_type = other DNA
tgacggccagactaccagatatctcagaggatatcactggcggtggcagccggggaaatgccgatgccggaacgc

SEQ ID NO: 636427 - DNA, 75 bp, synthetic construct
  source 1..75: mol_type = other DNA
gtggcgtctggaaggggaaagttaaattacattcgaacagcccggcccaggactatttcgcaaatattaccctga

SEQ ID NO: 636428 - DNA, 75 bp, synthetic construct
  source 1..75: mol_type = other DNA
gtcacatgacatgatgcagaacggcacatctggcgcgcatcaggatatggctgatatgcataaaaaaatgatgaa

SEQ ID NO: 636429 - DNA, 75 bp, synthetic construct
  source 1..75: mol_type = other DNA
atgcgccgcatgaaggtaaaagaactcgtagcggaggcgtttgcctccgttgctgaattgccaccaaagcatgcg

SEQ ID NO: 636430 - DNA, 75 bp, synthetic construct
  source 1..75: mol_type = other DNA
ggcattgtcacttcgctgctggtctggctgctcgcctggcgtaacggtatcgacacctttcggttgattattatc

SEQ ID NO: 636431 - DNA, 75 bp, synthetic construct
  source 1..75: mol_type = other DNA
ggcatcggcgttcgcgccatgctggtggcctttaatacttggctgttgctgaaagcgtctttagaaacggcgcta

SEQ ID NO: 636432 - DNA, 75 bp, synthetic construct
  source 1..75: mol_type = other DNA
gcgaactccgcgacggaaaccggaaatttatgcaggcggagcttgaggatgttggtgcgctcctgcgcttcgcga

SEQ ID NO: 636433 - DNA, 75 bp, synthetic construct
  source 1..75: mol_type = other DNA
cgctggggattctggcggatgccgtggcgggcatgacgcatctgcattacggctatcttgactggatagcgcagc

SEQ ID NO: 636434 - DNA, 75 bp, synthetic construct
  source 1..75: mol_type = other DNA
gaaagttaccggaacaccgggaaaaacactgtcaaaaggggctgtgttaaaccgtgatgatggttaccagtacat

SEQ ID NO: 636435 - DNA, 75 bp, synthetic construct
  source 1..75: mol_type = other DNA
tcattatattgatgctcattgccgccgccttgctggtgcggcgaatgcgcttgctggagatgggcgatgataccg

SEQ ID NO: 636436 - DNA, 75 bp, synthetic construct
  source 1..75: mol_type = other DNA
cggtttccatggcgaagaaaacctcgttcgtggtcgtggtggtaattgcgctactgacgatttacggggcgttgg

SEQ ID NO: 636437 - DNA, 75 bp, synthetic construct
  source 1..75: mol_type = other DNA
tgcaaaccattgggatcagcaatacaacaaagcgcaccttgcgggtgatgaaaaagcggcgaactacgcagaatc

SEQ ID NO: 636438 - DNA, 75 bp, synthetic construct
  source 1..75: mol_type = other DNA
atggtattgaaggtatccaagccttggttgccttctcgggcaaagtccccggcaaagatttgggtgatgaagaca

SEQ ID NO: 636439 - DNA, 75 bp, synthetic construct
  source 1..75: mol_type = other DNA
tattaagcacttcaaggccaatatcgctcacctactggaaggtgaagccaaagccatggtggtcacatcgggcag

SEQ ID NO: 636440 - DNA, 75 bp, synthetic construct
  source 1..75: mol_type = other DNA
tggattacatcgacatgcgcctggcagagaatgtctggaatagtgaggttatcttcgcggagattaaggcaatgg

SEQ ID NO: 636441 - DNA, 75 bp, synthetic construct
  source 1..75: mol_type = other DNA
ccagaaaacatcgatctcagtgcactggtactagaaaaattcaaaatcaaatacgacaaagagccgcttccagaa

SEQ ID NO: 636442 - DNA, 75 bp, synthetic construct
  source 1..75: mol_type = other DNA
aacacttccagcaatacatcatcgaacggttggtagatcagggctggaagctgggtgattccaagttctacgaca

SEQ ID NO: 636443 - DNA, 75 bp, synthetic construct
  source 1..75: mol_type = other DNA
cggcgtcccggcaggctgcgatgaacgtgagtatttgcgtgaactgcaaaatgcactgctgtggaccaactttcg

SEQ ID NO: 636444 - DNA, 75 bp, synthetic construct
  source 1..75: mol_type = other DNA
gcgcgttaccagacaccccatcatcgtctacagtcggggattgatgtgatactgcatgtgctggattgggtaccg

SEQ ID NO: 636445 - DNA, 75 bp, synthetic construct
  source 1..75: mol_type = other DNA
ttagccgcagtcaacaagatgattgatgatgcccgccagaacggcgcaggcatgcagtatctttgtgagcacagc

SEQ ID NO: 636446 - DNA, 75 bp, synthetic construct
  source 1..75: mol_type = other DNA
gggagaaaatacctattttctgcccttcaataaaggccatgatggttctacctctgatttgcctgtacacatcaa

SEQ ID NO: 636447 - DNA, 75 bp, synthetic construct
  source 1..75: mol_type = other DNA
cctgattttcccgcgctttcaccaatggacggcagtgaaccagatgctggccgatgctcgcgaaaatggcgcagg

SEQ ID NO: 636448 - DNA, 75 bp, synthetic construct
  source 1..75: mol_type = other DNA
ttccggaaataacctgagcccttcgctgagcttgtcacaggaattaggagattcgtttacattaaaaatgggaat

SEQ ID NO: 636449 - DNA, 75 bp, synthetic construct
  source 1..75: mol_type = other DNA
tgctgaaaatggtcatatcgccgtgcaactttggcacacggggcgcatttctcacgccagcctgcaacctggtgg

SEQ ID NO: 636450 - DNA, 75 bp, synthetic construct
  source 1..75: mol_type = other DNA
aaaaggcggtactacggttatcgcgtttgtggaagatccggacggttacaaaattgagttaatcgaagagaaaga

SEQ ID NO: 636451 - DNA, 75 bp, synthetic construct
  source 1..75: mol_type = other DNA
ctgctgctggcgatgttaatgcgcctgttactgctggcgtcaatctcctggctggtcaccctgactcaaccgctg

SEQ ID NO: 636452 - DNA, 75 bp, synthetic construct
  source 1..75: mol_type = other DNA
atgtcatctgaaaaactgtattctccactaaaagtgggcgcgatcacggtggcaaaccgtatttttatggcccct

SEQ ID NO: 636453 - DNA, 75 bp, synthetic construct
  source 1..75: mol_type = other DNA
accgatcagtacggcggcagcgtggaaaatcgcgcacgtctggtgctggaagtggtcgatgccgggattgaagaa

SEQ ID NO: 636454 - DNA, 75 bp, synthetic construct
  source 1..75: mol_type = other DNA
tttgatctggtggaactccactccgctcacggttatttactgcatcagttcctctctccatcctccaaccatcgt

SEQ ID NO: 636455 - DNA, 75 bp, synthetic construct
  source 1..75: mol_type = other DNA
caacggcgttatcggcatgttggtcgaggctgtcaaagagctgcgcgaggaagtgcgcgaactgaaggcaaaaat

SEQ ID NO: 636456 - DNA, 75 bp, synthetic construct
  source 1..75: mol_type = other DNA
tgggcatcggtacatccagtgctcttggcggtaattccattgttctgggtgacaatgacaccggctttaaacaga

SEQ ID NO: 636457 - DNA, 75 bp, synthetic construct
  source 1..75: mol_type = other DNA
cagccgctcggtaacaactctggaaagtagtggtcctggctggaagttgctgatggagcatcatctggatcaggg

SEQ ID NO: 636458 - DNA, 75 bp, synthetic construct
  source 1..75: mol_type = other DNA
acaagtgccgggcaggcctcatccagtgccaccgccgccggaaaatcggcagaaagtgccgcatcgtctgcttca

SEQ ID NO: 636459 - DNA, 75 bp, synthetic construct
  source 1..75: mol_type = other DNA
cacggtagcgcgtatgcccctgcctggcgcagagattacaacacgactctcaaaccaactgcggctgatgttggt

SEQ ID NO: 636460 - DNA, 75 bp, synthetic construct
  source 1..75: mol_type = other DNA
ttctgcatccaccgcgaccacgaaagcgtcagaagctgccacctcagccagagatgcgtcggcttcaaaagaggc

SEQ ID NO: 636461 - DNA, 75 bp, synthetic construct
  source 1..75: mol_type = other DNA
atgtcatctgaaaaactgtattccccactgcaagtgggcgcgatcacggcggcaaaccgtatttttatggcccct

SEQ ID NO: 636462 - DNA, 75 bp, synthetic construct
  source 1..75: mol_type = other DNA
tgcatggcaactggtgattcaaccatatattatgctgataaaaagtttcttacactttaccttgaacaggcagaa

SEQ ID NO: 636463 - DNA, 75 bp, synthetic construct
  source 1..75: mol_type = other DNA
gcgaagctgacaggaaactgctaactctctaccttgagcagacggaaatgaagaacctgccaattggtggtgttt

SEQ ID NO: 636464 - DNA, 75 bp, synthetic construct
  source 1..75: mol_type = other DNA
atggttttagtttcagtggtagcgggcagaacaccgggatggcgtttgtctcgttgaaaaactggtcacaacgta

SEQ ID NO: 636465 - DNA, 75 bp, synthetic construct
  source 1..75: mol_type = other DNA
aggtaagtattccgtttaatgttggaacagctcaaacaatgactctcggtgctgagtggaatcagcaacggatga

SEQ ID NO: 636466 - DNA, 75 bp, synthetic construct
  source 1..75: mol_type = other DNA
tcagttagaacgaacacgtaactcacgaatgaatgagggacttgatggtgctaatgagggtatttttgatactaa

SEQ ID NO: 636467 - DNA, 75 bp, synthetic construct
  source 1..75: mol_type = other DNA
acgcaataatgaaaatatggtctggaacagcatcaacctgaagcgagttcgtccggtggtattgccgggcattcg

SEQ ID NO: 636468 - DNA, 75 bp, synthetic construct
  source 1..75: mol_type = other DNA
cggttgttcgcatcagggatgtggctcgcgtagagatgggcagtgaagactataatgccattggcaaactgaacg

SEQ ID NO: 636469 - DNA, 75 bp, synthetic construct
  source 1..75: mol_type = other DNA
ttttggttagattttcgtaaatccaaagagggtataaggtgtatctcatgcagtattctgtatcacgataaaagt

SEQ ID NO: 636470 - DNA, 75 bp, synthetic construct
  source 1..75: mol_type = other DNA
ggagtgggtattttatgatggtcgtttttggttagattttcgtaaatccaaagagggtataaggtgtatctcatg

SEQ ID NO: 636471 - DNA, 75 bp, synthetic construct
  source 1..75: mol_type = other DNA
ctggttcctggtaaacgaaaaagcaaacactgatgtcatttttaccgttgatggttttagtttcagtggtagcgg

SEQ ID NO: 636472 - DNA, 75 bp, synthetic construct
  source 1..75: mol_type = other DNA
ggcgtcctttatgttttgcgtcgtgcggtgcgggctatgggtgtctatgtcgtgctgggcggtggaatggctctg

SEQ ID NO: 636473 - DNA, 75 bp, synthetic construct
  source 1..75: mol_type = other DNA
tccaatcatcatgacctcactggcgtttattgccggggtaatgccacttgcaatggctaccggcgcgggcgcgaa

SEQ ID NO: 636474 - DNA, 75 bp, synthetic construct
  source 1..75: mol_type = other DNA
actcggtccgttaccggaaaatgttacctggttatcgccggaaggggagtttcagaagtggaacggtacagcctg

SEQ ID NO: 636475 - DNA, 75 bp, synthetic construct
  source 1..75: mol_type = other DNA
tagatctggagatcgcaacggaggaagaaacctcattgctggaagcctggaaaaagtatcgggtgttgctaaacc

SEQ ID NO: 636476 - DNA, 75 bp, synthetic construct
  source 1..75: mol_type = other DNA
gtaggtgccaaccattcggcatttagccttaagctggcgctggaactgttcagacagccaaaactgtggtttttg

SEQ ID NO: 636477 - DNA, 75 bp, synthetic construct
  source 1..75: mol_type = other DNA
tgtgcgctcatcctcgccgttctgctttttttcgccaaaacagatgcaccttcttccgccacggttgccaatgcc

SEQ ID NO: 636478 - DNA, 75 bp, synthetic construct
  source 1..75: mol_type = other DNA
aagtgatacgggtattatttttgccgctatttctctgttctcgctattattccaaccgctgtttggtctgctttc

SEQ ID NO: 636479 - DNA, 75 bp, synthetic construct
  source 1..75: mol_type = other DNA
tgcatggaagacatatcgggtattgttgaatcgtgttgatacaacagtagcatcggatgttgagtggccagtcgc

SEQ ID NO: 636480 - DNA, 75 bp, synthetic construct
  source 1..75: mol_type = other DNA
ggaagaagtatcgggtgttgctgaaccgtgttaatacaacaactgcaccggatattgaatggccagtagcaccta

SEQ ID NO: 636481 - DNA, 75 bp, synthetic construct
  source 1..75: mol_type = other DNA
agcatattgcgccacttcaggatgccgtagatttggatattgcgacggaggaagaggcatcgttactgactgcat

SEQ ID NO: 636482 - DNA, 75 bp, synthetic construct
  source 1..75: mol_type = other DNA
gcacctacgatgtttttgaccaacagtttgctaatttctttacttcgttctttgctaccggtgaacagggtacgc

SEQ ID NO: 636483 - DNA, 75 bp, synthetic construct
  source 1..75: mol_type = other DNA
aaactattccggatccgggaagcggaagaaacaaaaaatagcctgatgcaggcagcgaatgagcatattgcgcca

SEQ ID NO: 636484 - DNA, 75 bp, synthetic construct
  source 1..75: mol_type = other DNA
gaggcatcgttactgactgcatggaagacatatcgggtattgttgaatcgtgttgatacaacagtagcatcggat

SEQ ID NO: 636485 - DNA, 75 bp, synthetic construct
  source 1..75: mol_type = other DNA
atgcgtaaagtttgtgcagccattttgtccgcagccatctgtctggccgtaatggcattcagaatgagtgaacaa

SEQ ID NO: 636486 - DNA, 75 bp, synthetic construct
  source 1..75: mol_type = other DNA
gaaaaagtatcgggtattgctgaaccgtgttgatacatcaactgcacctgatattgagtggccagcagcacctgt

SEQ ID NO: 636487 - DNA, 75 bp, synthetic construct
  source 1..75: mol_type = other DNA
cacggaccataaaaatttataatctactggctggaaccaatgagtttattggtgaaggtgatgcatacattccac

SEQ ID NO: 636488 - DNA, 75 bp, synthetic construct
  source 1..75: mol_type = other DNA
ctggtgctgggtctggtggcgctgggcttcaccttaatttccgtgttcacgcttagcggccccggcccgctttct

SEQ ID NO: 636489 - DNA, 75 bp, synthetic construct
  source 1..75: mol_type = other DNA
atgtctgcccgtatttcgcgtaaggaaatccattatgtactatttaaaaacacaaacttttggatgttcggttta

SEQ ID NO: 636490 - DNA, 75 bp, synthetic construct
  source 1..75: mol_type = other DNA
ggaacggcacagcctgggtgaaagatgcagaagcagaaaaactgttccggatccggaaggcggaagaaacaaaaa

SEQ ID NO: 636491 - DNA, 75 bp, synthetic construct
  source 1..75: mol_type = other DNA
ccggctggcttcgtggccgttttcaacagtgatgaggcatcgtggaatctcgttgaagaccatcggggaaaaacc

SEQ ID NO: 636492 - DNA, 75 bp, synthetic construct
  source 1..75: mol_type = other DNA
atggctatggttgaaatgcaaaccactgcggcgctggctgaatcccgccgcaaaatgcaggcgcgtcgccgcctc

SEQ ID NO: 636493 - DNA, 75 bp, synthetic construct
  source 1..75: mol_type = other DNA
ggagatctgcacgtattcttaatcgcgtaatgggacgtgatttattcgatctcagtatgccgcccgccctgattc

SEQ ID NO: 636494 - DNA, 75 bp, synthetic construct
  source 1..75: mol_type = other DNA
ggtgcaaagttaactttgcggttaatacgctggggttctcccgccgcttccatgtcttcaccgcaccaaaacagg

SEQ ID NO: 636495 - DNA, 75 bp, synthetic construct
  source 1..75: mol_type = other DNA
accgtcgatatgaaaaagcgagcatcatactgacgtcaaacaaagggttcgcagactggggagaaatgttcggag

SEQ ID NO: 636496 - DNA, 75 bp, synthetic construct
  source 1..75: mol_type = other DNA
gaggctggatttgtggctgtttttaacagtgagaataaatcttggaatattgttgaagaccaccgaggtaaaact

SEQ ID NO: 636497 - DNA, 75 bp, synthetic construct
  source 1..75: mol_type = other DNA
ccaggaagaaaggaaagctggttatgcctccacagaaagtatttgaaaatgaaatcgtcgcaaaagggtatctgg

SEQ ID NO: 636498 - DNA, 75 bp, synthetic construct
  source 1..75: mol_type = other DNA
agatggaggataaaacaaaagcacaactcaaaagcaactttcttaatggattatcaccgtttgctaaccccaatg

SEQ ID NO: 636499 - DNA, 75 bp, synthetic construct
  source 1..75: mol_type = other DNA
atgaatttattggtgaaggtgacgcatatattccgcctcatacaggtctgcctgcaaacatcgtggcatctcgtt

SEQ ID NO: 636500 - DNA, 75 bp, synthetic construct
  source 1..75: mol_type = other DNA
ccagctccagcacgactggggcgaagttgaggtggaggttgcagggcaacggtgcaaagttaactttgcggttaa

SEQ ID NO: 636501 - DNA, 75 bp, synthetic construct
  source 1..75: mol_type = other DNA
ctttgctgccgaactgacggaagcactgcgtgatgaggagcttaaacagctggtgctggccagaatcggtcaacg

SEQ ID NO: 636502 - DNA, 75 bp, synthetic construct
  source 1..75: mol_type = other DNA
atggctggcttagcgaacagcagtaacatgctgcaacagtggtatcacttgtttgagaccggaggggcgaaacgc

SEQ ID NO: 636503 - DNA, 75 bp, synthetic construct
  source 1..75: mol_type = other DNA
tacggactttgataccagttacttcgacatccgccatgtgtcctgggacagctatatcgaggttggcggtaatcg

SEQ ID NO: 636504 - DNA, 75 bp, synthetic construct
  source 1..75: mol_type = other DNA
agtggatggctgatgtggctgacaaacgggagcttcgccagttcagacaaacaccaggacaacgcttcgcactcg

SEQ ID NO: 636505 - DNA, 75 bp, synthetic construct
  source 1..75: mol_type = other DNA
acgccggaacagcgcttcgcgctggagcaggaacatctgcagccgttaccggatacagacttcgataccagttac

SEQ ID NO: 636506 - DNA, 75 bp, synthetic construct
  source 1..75: mol_type = other DNA
gccttagcgttaacgttagacgctgtgcggctggtatttgtcgatggacgttacgtgcctgcgctgagcgatgcg

SEQ ID NO: 636507 - DNA, 75 bp, synthetic construct
  source 1..75: mol_type = other DNA
cagtggatggctgacgttgccgacaggcgggaacttcgccagttcaggcagacaccggaacagcgcttcacgcag

SEQ ID NO: 636508 - DNA, 75 bp, synthetic construct
  source 1..75: mol_type = other DNA
atcttcgcggagattaaggcaatgggctatacgggcggacgttccatgctgcgttactacatccagcccaaacgt

SEQ ID NO: 636509 - DNA, 75 bp, synthetic construct
  source 1..75: mol_type = other DNA
agctgaaacccgatcccagcgatcgtcgtactggtcgttctcgtcaatcttctgagcgttcagaacgtactgaac

SEQ ID NO: 636510 - DNA, 75 bp, synthetic construct
  source 1..75: mol_type = other DNA
gtaccgcaggttcgacagcttcactcatgtcaatcaacaactggagcaatggatagccgatgtggctgacaaacg

SEQ ID NO: 636511 - DNA, 75 bp, synthetic construct
  source 1..75: mol_type = other DNA
catcgcctctgttcggcatcgtctggctggcagacagtgccggagcatcacgccccgctctggcagcaggtcagt

SEQ ID NO: 636512 - DNA, 75 bp, synthetic construct
  source 1..75: mol_type = other DNA
agcaggaacatctgcggccgttaccggatacggacttcgataccagttacttcgacatccgccatgtgtcctggg

SEQ ID NO: 636513 - DNA, 75 bp, synthetic construct
  source 1..75: mol_type = other DNA
tcggttatggtggtcaatggtcagaaacgtctgctaattttaataatatcacatccactggacagttagcattta

SEQ ID NO: 636514 - DNA, 75 bp, synthetic construct
  source 1..75: mol_type = other DNA
aatggtaaatggcaaagtggagcagcaaatagtctttctatgtatgctttatcagatagttcttgtatttcagtg

SEQ ID NO: 636515 - DNA, 75 bp, synthetic construct
  source 1..75: mol_type = other DNA
ttatcccccccctcactatactgaaagataaaggcgtcaatgccgtattttgggatttccccaacctgggacacg

SEQ ID NO: 636516 - DNA, 75 bp, synthetic construct
  source 1..75: mol_type = other DNA
agggaatttaaatatgggtaataatgatataaataatgctaaaaacataacagcatcaggtacaggtaattttgg

SEQ ID NO: 636517 - DNA, 75 bp, synthetic construct
  source 1..75: mol_type = other DNA
tactagaattaactcttgttttaggtgttgggacgatggtggcttttatgaagtttcaggatatgaaaaatgaac

SEQ ID NO: 636518 - DNA, 75 bp, synthetic construct
  source 1..75: mol_type = other DNA
tatgtgtgggcatcaggaaatcttaactctaactatattcattcaaatggtaatatagatgctgatagaagaatt

SEQ ID NO: 636519 - DNA, 75 bp, synthetic construct
  source 1..75: mol_type = other DNA
tcaacatactcacactgttagtcaacttaattatgaggttatacactaccctgtaaacctttatcatgagcctgt

SEQ ID NO: 636520 - DNA, 75 bp, synthetic construct
  source 1..75: mol_type = other DNA
tcctgtcgattacatcaaactcgataaagggtttgtacaaatggtcggcgtggatgaaatctccgggcatatagt

SEQ ID NO: 636521 - DNA, 75 bp, synthetic construct
  source 1..75: mol_type = other DNA
tctgttgcgcattttttaccgaatcaatttcatattgggatcaatatttcaccagcgcattttctgtctccggga

SEQ ID NO: 636522 - DNA, 75 bp, synthetic construct
  source 1..75: mol_type = other DNA
gtcaaaatttttacgcaaaaatctcatactaatgcaccgggagggcgggtatctgctttttcattttgatagtga

SEQ ID NO: 636523 - DNA, 75 bp, synthetic construct
  source 1..75: mol_type = other DNA
gcggaaaaaatgtcactctgctcccggacgacagcggtatacaaaaagaaagtcattcaaaaaaatatccgttct

SEQ ID NO: 636524 - DNA, 75 bp, synthetic construct
  source 1..75: mol_type = other DNA
aagtactgattcgctggcatcaccccgtcagcgggattatcccaccagatcagtttatcccgctggcagagtcca

SEQ ID NO: 636525 - DNA, 75 bp, synthetic construct
  source 1..75: mol_type = other DNA
ttataacaacgactttaccttggagtgaaggcggcaaatttcgctacgatttattaggtaaggctatgcaggaag

SEQ ID NO: 636526 - DNA, 75 bp, synthetic construct
  source 1..75: mol_type = other DNA
ccgctgagatgatgctgcgccacatgggttggacggaagcggctgacctaattgttaaaggtatggaaggcgcaa

SEQ ID NO: 636527 - DNA, 75 bp, synthetic construct
  source 1..75: mol_type = other DNA
ccgctgagatgatgctgcgccatatgggttggacggaagcggctgacttaattgttaaaggtatggaaggcgcaa

SEQ ID NO: 636528 - DNA, 75 bp, synthetic construct
  source 1..75: mol_type = other DNA
ccgctgagatgatgctgcgccaaatgggttggacggaagcggctgacgtgattgttaaaggtatggaaggcgcaa

SEQ ID NO: 636529 - DNA, 75 bp, synthetic construct
  source 1..75: mol_type = other DNA
aacctatgacttcgaacgtctgatggaaggcgctaagctgctgaaatgttcagagtttggtgacgcgatcatcga

SEQ ID NO: 636530 - DNA, 75 bp, synthetic construct
  source 1..75: mol_type = other DNA
aacctatgacttcgaacgtctgatggaaggcgctaacctgctgaaatgttcagagtttggtgaggcgatcatcga

SEQ ID NO: 636531 - DNA, 75 bp, synthetic construct
  source 1..75: mol_type = other DNA
ccgctgagatgatgctgcgccagatgggttggacggaagcggctgacgtaattgttaaaggtatggaaggcgcaa

SEQ ID NO: 636532 - DNA, 75 bp, synthetic construct
  source 1..75: mol_type = other DNA
gggtgatctgaatcttggtggtaagagcatcaaaaacatcaaagacattacggcatcagggacaacaacaaccgg

SEQ ID NO: 636533 - DNA, 75 bp, synthetic construct
  source 1..75: mol_type = other DNA
actcccctgccaaaacaccacaaataatcactcaggttttaaaagaatatggttttaatgtcgaaaaaacaggac

SEQ ID NO: 636534 - DNA, 75 bp, synthetic construct
  source 1..75: mol_type = other DNA
gaatgtaggatggggatgttctcctaatggattacagggaagaacgtcagaaggggctattttatcttgtgttaa

SEQ ID NO: 636535 - DNA, 75 bp, synthetic construct
  source 1..75: mol_type = other DNA
ccgctgagatgatgctgcgccaaatgggttggacggaagcggctgacctcattgttaaaggtatggaaggcgcaa

SEQ ID NO: 636536 - DNA, 75 bp, synthetic construct
  source 1..75: mol_type = other DNA
ccgctgagatgatgctgcgccaaatgggttggacggaagcggctgacataattgttaaaggtatggaaggcgcaa

SEQ ID NO: 636537 - DNA, 75 bp, synthetic construct
  source 1..75: mol_type = other DNA
gtttggtagccgtattgccacgaacggacttaatccaaacgatctgcctgctggctgggctggcggtgttcgcac

SEQ ID NO: 636538 - DNA, 75 bp, synthetic construct
  source 1..75: mol_type = other DNA
gagaaaggaagcagctatctgcagggataccgctatgcacctccactacccgcggaacagtttattgctgagtgg

SEQ ID NO: 636539 - DNA, 75 bp, synthetic construct
  source 1..75: mol_type = other DNA
ccctgccgcactcccgtctggtgtatgttgtttctgaaacaaaagcagagcccacaccctcccttcagaaatccc

SEQ ID NO: 636540 - DNA, 75 bp, synthetic construct
  source 1..75: mol_type = other DNA
agcagcagaaacagacagaaatggtgctgaatcagttgattaatcgctatcagattataaatgaatataaaaaag

SEQ ID NO: 636541 - DNA, 75 bp, synthetic construct
  source 1..75: mol_type = other DNA
ctgctggttgtcagtgtagtcatgggctggcagtctctgacacagccatcaccggcagagcagcaactcaggggg

SEQ ID NO: 636542 - DNA, 75 bp, synthetic construct
  source 1..75: mol_type = other DNA
ccatgcagcgccgtcttgatggcgatctttccggcgagcagggcggtagccagactccggccaaaaaagagcagc

SEQ ID NO: 636543 - DNA, 75 bp, synthetic construct
  source 1..75: mol_type = other DNA
ggcagcggcccctgacgctaatcagaaggcgatgcaggataaagccagagcggaatatgaagccagtcatagcaa

SEQ ID NO: 636544 - DNA, 75 bp, synthetic construct
  source 1..75: mol_type = other DNA
cgcggggattccgggccaggtggatgcccatatgtgggagcgtctgcgtggtgcgatcatgatttcgttgttctc

SEQ ID NO: 636545 - DNA, 75 bp, synthetic construct
  source 1..75: mol_type = other DNA
cagcagcaaaaacaggctgaaatggcgctgaatcagttgattaatcgttatcagatggagaacgcaggcaaaccg

SEQ ID NO: 636546 - DNA, 75 bp, synthetic construct
  source 1..75: mol_type = other DNA
tgcatacaacctgcaacgcagtgcgcagttgctgcagctactgagggtgcttttccctgacaatccacatgttca

SEQ ID NO: 636547 - DNA, 75 bp, synthetic construct
  source 1..75: mol_type = other DNA
agggcccacaccctcccttcaaaaatcccctcccacgtttctgaaaccgtttgtgactggtgtctgtgtggcatt

SEQ ID NO: 636548 - DNA, 75 bp, synthetic construct
  source 1..75: mol_type = other DNA
atcagaccctgccgcactcccgtctggtgcatgttgtttctgaaacaaaagcagagaccaccccctcctttcaaa

SEQ ID NO: 636549 - DNA, 75 bp, synthetic construct
  source 1..75: mol_type = other DNA
acgcccggatgtggactggtgttatgtggagaggctctgcctgcggctgtatgagcataacggtgtggaattaca

SEQ ID NO: 636550 - DNA, 75 bp, synthetic construct
  source 1..75: mol_type = other DNA
cacccgcctggagaaccagcctgtgcagggtgaagtatcgtctccggtaacccttccggcgcaggcactccggtc

SEQ ID NO: 636551 - DNA, 75 bp, synthetic construct
  source 1..75: mol_type = other DNA
ctggtgttaagtttgggcgtaaacctcaccaaaaatgtaagcgtaaactgaccgccgtatgtagccatcagacga

SEQ ID NO: 636552 - DNA, 75 bp, synthetic construct
  source 1..75: mol_type = other DNA
aagctgctgccggtggaactggcggccagtaaaggcattgagctggtgtatgtgaataccaaagggatgagcgat

SEQ ID NO: 636553 - DNA, 75 bp, synthetic construct
  source 1..75: mol_type = other DNA
aaggccaactataaacccgcacgatttgctgatcgggatggggaaatctgggggcatgagtattcatggaacttg

SEQ ID NO: 636554 - DNA, 75 bp, synthetic construct
  source 1..75: mol_type = other DNA
gtggtcaagcattcgggtaagcattcaatggcgtctaatctttcactggtgcgatggttgtgcttacgacattta

SEQ ID NO: 636555 - DNA, 75 bp, synthetic construct
  source 1..75: mol_type = other DNA
gcaacagttgatgtctcaggtcgaacatagcttgaattctgttgcagattttttaccggatcaatttcatattgg

SEQ ID NO: 636556 - DNA, 75 bp, synthetic construct
  source 1..75: mol_type = other DNA
gttttgttcgcactggatgattttggcacgggttatgcgacccacagctacctgcagtcgtttcctgtcgattac

SEQ ID NO: 636557 - DNA, 75 bp, synthetic construct
  source 1..75: mol_type = other DNA
cgattacgccattaacggtgatatacaaccgtcgcggatagtggtggtcgatatcgacgaaaaacggctggagca

SEQ ID NO: 636558 - DNA, 75 bp, synthetic construct
  source 1..75: mol_type = other DNA
tcgacgatccggcgcgtctggcggacaccattgctgcacatatgccgctgaaactggctgacaaacagtccgttc

SEQ ID NO: 636559 - DNA, 75 bp, synthetic construct
  source 1..75: mol_type = other DNA
catgactacctcggtgttcagcgtttcgactatggtcgcgctgataacgaaaaccgtgtcggtcaggtaaccggt

SEQ ID NO: 636560 - DNA, 75 bp, synthetic construct
  source 1..75: mol_type = other DNA
atggctaacattggttatatccgagtttcatcaatccagcagattacagaccgtcaacttgaaggggtcgtactg

SEQ ID NO: 636561 - DNA, 75 bp, synthetic construct
  source 1..75: mol_type = other DNA
ttctcgccgcccggtaataattatgaacgcttgcagggtaatctcgctggatggtcaagcattcgggtgagcatt

SEQ ID NO: 636562 - DNA, 75 bp, synthetic construct
  source 1..75: mol_type = other DNA
agaaatcctcgataccgaccattatggtctggaacgtgtgaaagatcgcatccttgagtatctcgcggttcaaag

SEQ ID NO: 636563 - DNA, 75 bp, synthetic construct
  source 1..75: mol_type = other DNA
cggtgaagcgtattgaggaagttctgactcttgcgctgcaaaatgaaccctctggtatgcaggttgtaaccgcaa

SEQ ID NO: 636564 - DNA, 75 bp, synthetic construct
  source 1..75: mol_type = other DNA
aaagaaaaacaattgcttttggtgaaacagcagagatagaagaaaatgaagggcgattgattgttaatcataaac

SEQ ID NO: 636565 - DNA, 75 bp, synthetic construct
  source 1..75: mol_type = other DNA
gcgcgtgttgttgctgaggtgatgcgccgtgatggtatcgaactgaacgggcaggactgtctggttatccgaaca

SEQ ID NO: 636566 - DNA, 75 bp, synthetic construct
  source 1..75: mol_type = other DNA
atgtctctgcgtgatcatttggttgatggcatgtcaaaaaaacacgcctgccaaaaaaatgatgtgtcactaagt

SEQ ID NO: 636567 - DNA, 75 bp, synthetic construct
  source 1..75: mol_type = other DNA
aaacaaacggcttttgctatgcgcatgttgcctgcacaaatgacggatattgttgttgggttgtccactggtcag

SEQ ID NO: 636568 - DNA, 75 bp, synthetic construct
  source 1..75: mol_type = other DNA
cgtgagtatttgcgtgagctgcaaaatgcattgctgtggattaactttcgttttatcttgctccgctgttctggc

SEQ ID NO: 636569 - DNA, 75 bp, synthetic construct
  source 1..75: mol_type = other DNA
cgcttatctgaccgcagcttctcgtaacgacagccatgcccgttccacgatggctggcgagttaactatgattca

SEQ ID NO: 636570 - DNA, 75 bp, synthetic construct
  source 1..75: mol_type = other DNA
aaggaatggcagcaaagacatctaaaaaatttaacttagatagaatccttcagatcaaacaaggttctaatggtt

SEQ ID NO: 636571 - DNA, 75 bp, synthetic construct
  source 1..75: mol_type = other DNA
gaattagaatcatataatagcattattcagcaactcaatgatgagttagtgaagtataaagaaagtgtcagtgcc

SEQ ID NO: 636572 - DNA, 75 bp, synthetic construct
  source 1..75: mol_type = other DNA
aagaactgctagaggctcagcaatcgctggagcgtatatatgatgaaaaagaattagctgtatacaatgaaatga

SEQ ID NO: 636573 - DNA, 75 bp, synthetic construct
  source 1..75: mol_type = other DNA
aagaggaaggagataaaccatatcttgaactgacaggtgatgatttatggagtgcagcaaaatcagatccgttgg

SEQ ID NO: 636574 - DNA, 75 bp, synthetic construct
  source 1..75: mol_type = other DNA
tgatctggattttgttcgcggtggccgtactatggctccgtttgttggtaaaggttttggctcaaaaaccgttga

SEQ ID NO: 636575 - DNA, 75 bp, synthetic construct
  source 1..75: mol_type = other DNA
ctcgtttcccgctccaaattcttctctcaataaaatatccacagcgacgcgatgcgttattgctggtttttgttg

SEQ ID NO: 636576 - DNA, 75 bp, synthetic construct
  source 1..75: mol_type = other DNA
aaaaataaccgaccagggattttcgggttagcaggtattggagatggtggcgctctaaaaaaaaggctggcgcaa

SEQ ID NO: 636577 - DNA, 75 bp, synthetic construct
  source 1..75: mol_type = other DNA
gaattgatatttcagaaacgcagtggctgatgccattaaaacagacgcagaaaaaggttaacagtgcgcaaaaat

SEQ ID NO: 636578 - DNA, 75 bp, synthetic construct
  source 1..75: mol_type = other DNA
gctgaatttggtcgcgactattgggaagagaaaaatggtgttttaaccgcagacgatttgttgcatatcgcccgc

SEQ ID NO: 636579 - DNA, 75 bp, synthetic construct
  source 1..75: mol_type = other DNA
gccacatgctggcgcacgatgtttatcgcagtttcgttcgtcgggtctgcctgcttggtggggaatcaacaggta

SEQ ID NO: 636580 - DNA, 75 bp, synthetic construct
  source 1..75: mol_type = other DNA
gtatgagcgtttggttgtaccactcattcatcatattcagcaattgaccaaaagggttgaggagcttgaaacgaa

SEQ ID NO: 636581 - DNA, 75 bp, synthetic construct
  source 1..75: mol_type = other DNA
tacacgaaaacagaggtaacaaaccttctaagttcctatgcaagcagatcatcactgacaggctatagtggcaac

SEQ ID NO: 636582 - DNA, 75 bp, synthetic construct
  source 1..75: mol_type = other DNA
gtaatcagaacaccactggtaatgctgcaactgctacaaaacttcagacggtaagaaaaatatccggtgttccat

SEQ ID NO: 636583 - DNA, 75 bp, synthetic construct
  source 1..75: mol_type = other DNA
agaaagaacaccatcatctccgtacgcaacaacattaacaatggagcgttgcccatcaagtggagagaaaaactt

SEQ ID NO: 636584 - DNA, 75 bp, synthetic construct
  source 1..75: mol_type = other DNA
atggatgacgaatacgttaataattttattgttatgtttcttagtgaaaactggcgcatgtttgaacattattgt

SEQ ID NO: 636585 - DNA, 75 bp, synthetic construct
  source 1..75: mol_type = other DNA
cctatcgcgccccgcttgctggcagtttatttatagccgaagtgctgtttggcactatgatgttggcctctctcg

SEQ ID NO: 636586 - DNA, 75 bp, synthetic construct
  source 1..75: mol_type = other DNA
gcttcccgcaagcgacgtttttggtactgacgccagagcttgttgcgcgttataacttacctgccataccgcata

SEQ ID NO: 636587 - DNA, 75 bp, synthetic construct
  source 1..75: mol_type = other DNA
tgttcatcatcagttattccgtgccggaaatgcctgactgtgaacctgaaaagcgcctgacgtggctgcaagtgc

SEQ ID NO: 636588 - DNA, 75 bp, synthetic construct
  source 1..75: mol_type = other DNA
caactttctacagcaccttgcaagtttggaccggaacgtttcgatttccagccaatggcaacacgcaatggtaat

SEQ ID NO: 636589 - DNA, 75 bp, synthetic construct
  source 1..75: mol_type = other DNA
agatcctatgagaggattgttgattttataaatggtgtggatactgataagacaataatactatctttaaggcca

SEQ ID NO: 636590 - DNA, 75 bp, synthetic construct
  source 1..75: mol_type = other DNA
tttatgttgtcgctgacagcgggggattctgccaccaaatcgcagaaaaaagtgctccgctcgttgcgcattagc

SEQ ID NO: 636591 - DNA, 75 bp, synthetic construct
  source 1..75: mol_type = other DNA
gagcaatggggggatgggaacaggcagtaaaaacaatagcaacggtttctgccctgtatattggtgtgaaggcgg

SEQ ID NO: 636592 - DNA, 75 bp, synthetic construct
  source 1..75: mol_type = other DNA
tggcgggcaaggccagcttacgcttaaggaatttacccgtatgatcgaagtggctgacagtatagggatgtggcg

SEQ ID NO: 636593 - DNA, 75 bp, synthetic construct
  source 1..75: mol_type = other DNA
tggcaagtattcgtgcggcaacagtcgcccagaatcaatggacagcggcggcaggaaaaacagcgctgaaattaa

SEQ ID NO: 636594 - DNA, 75 bp, synthetic construct
  source 1..75: mol_type = other DNA
cagccgcgtcagtacaaaccgaatgttcctttgcttaatccggcgatatcgtctgtggcagcacgtggtgaaatc

SEQ ID NO: 636595 - DNA, 75 bp, synthetic construct
  source 1..75: mol_type = other DNA
tggtgcggcattactgacgatgagcgtggcgattggcacattgacacgcataacaaaaatcatgggtagcgtgat

SEQ ID NO: 636596 - DNA, 75 bp, synthetic construct
  source 1..75: mol_type = other DNA
aacctatgacttcgaacgtctgatggacggcgctaagctgctgaaatgttcagagtttggtgaagcgatcatcga

SEQ ID NO: 636597 - DNA, 75 bp, synthetic construct
  source 1..75: mol_type = other DNA
aacctatgacttcgaacgtctgatggacggcgctaaactgctgaaatgttcagagtttggtgaggcgatcatcga

SEQ ID NO: 636598 - DNA, 75 bp, synthetic construct
  source 1..75: mol_type = other DNA
aacctatgacttcgaacgtctgatggatggcgctaacctgctgaaatgttcagagtttggtgatgcgatcatcga

SEQ ID NO: 636599 - DNA, 75 bp, synthetic construct
  source 1..75: mol_type = other DNA
gctgcagtcgagaaagcctataaaggtgagcgtaaaatctcctggatggaaatttacaccggtgaaaaatccaca

SEQ ID NO: 636600 - DNA, 75 bp, synthetic construct
  source 1..75: mol_type = other DNA
aacctatgacttcgaacgtctgatggagggcgctaacctgctgaaatgttcagagtttggtgaagcgatcatcga

SEQ ID NO: 636601 - DNA, 75 bp, synthetic construct
  source 1..75: mol_type = other DNA
aacctatgacttcgaacgtctgatggagggcgctaaactgctgaaatgttcagagtttggtgacgcgatcatcga

SEQ ID NO: 636602 - DNA, 75 bp, synthetic construct
  source 1..75: mol_type = other DNA
ggggctggcgctgctgacatttggtgttgccattggctcgctgtcgcggatgggaaaaatccttagtggcgtgat

SEQ ID NO: 636603 - DNA, 75 bp, synthetic construct
  source 1..75: mol_type = other DNA
taataccgaccccaggctggcgctggatgcggcttataagctggcgcagttcacgcaccataaaaaaggggatgc

SEQ ID NO: 636604 - DNA, 75 bp, synthetic construct
  source 1..75: mol_type = other DNA
cagttgtccggtgcagacctgtctcaccgatgggacaccatcctgtttgatgaggcgcaggatgcgaatccggtg

SEQ ID NO: 636605 - DNA, 75 bp, synthetic construct
  source 1..75: mol_type = other DNA
ggggcattacacggtactcagtcgtactgtcgcgggtgtgattgctactgcgctgatggcggcaatgaaagggca

SEQ ID NO: 636606 - DNA, 75 bp, synthetic construct
  source 1..75: mol_type = other DNA
taatattagtgttttgtcgcagtatttagaggaggagataaaaaaagaattagataacaaaggattgcttgcctc

SEQ ID NO: 636607 - DNA, 75 bp, synthetic construct
  source 1..75: mol_type = other DNA
aagagaaagtaaaagctcatgagcattttaacggatgggcatcaaatggcctcagtatggtttcagaaatatgtc

SEQ ID NO: 636608 - DNA, 75 bp, synthetic construct
  source 1..75: mol_type = other DNA
atggttagaattacccccacctgattccaaattatatatctttgatcagagttttgttcatagaaatgtaatggc

SEQ ID NO: 636609 - DNA, 75 bp, synthetic construct
  source 1..75: mol_type = other DNA
atgaagcagattaaagaactccagcgcctgctcggcaaaaaaacgatggaaaatgaactccttaaagaagccgtt

SEQ ID NO: 636610 - DNA, 75 bp, synthetic construct
  source 1..75: mol_type = other DNA
atgattacggaaaccgaacaggcatacatcgcccgcatccgtgagtatttcgggaatgaacttgtgtcggtggac

SEQ ID NO: 636611 - DNA, 75 bp, synthetic construct
  source 1..75: mol_type = other DNA
atgattacggaaaccgaacaggcatacatcgcccgtatccgtgagtatttcgggaatgaactggtgtctgttgac

SEQ ID NO: 636612 - DNA, 75 bp, synthetic construct
  source 1..75: mol_type = other DNA
agcgttgtcctcgcggcttttatccggtcaaaacagcgctacggtgtaccacgcctgacggatgaactgtgtgct

SEQ ID NO: 636613 - DNA, 75 bp, synthetic construct
  source 1..75: mol_type = other DNA
tggtttttaacggagagaaaaatgtgccggcagacagtctgaaaccgcagccacttattcttccggaccacaggt

SEQ ID NO: 636614 - DNA, 75 bp, synthetic construct
  source 1..75: mol_type = other DNA
tcaaatcatttcccgttccttaaagctgatgagatacccgaatttctgcgtgccttagagggttataccgggagt

SEQ ID NO: 636615 - DNA, 75 bp, synthetic construct
  source 1..75: mol_type = other DNA
taaaccttgaacaacgcaacctatcatccgtgtttggcacactgaaaaagttgggccattggtcagcacccaatc

SEQ ID NO: 636616 - DNA, 75 bp, synthetic construct
  source 1..75: mol_type = other DNA
cgcgtttgaccatcttgacgatatgcaccaggcctttttgcagcaaaatttcgatctgcctcctggcagcgtacc

SEQ ID NO: 636617 - DNA, 75 bp, synthetic construct
  source 1..75: mol_type = other DNA
accgcgaagcgcggctaaaaggtgaagtgcgaaatgaagatggcgcgcttatgtcacccgttaagccccgcacgg

SEQ ID NO: 636618 - DNA, 75 bp, synthetic construct
  source 1..75: mol_type = other DNA
gaaaatagtaatttggttagtactgatgagccacacttaggtggtgtcctagcagcggcagatgtgggtgggaag

SEQ ID NO: 636619 - DNA, 75 bp, synthetic construct
  source 1..75: mol_type = other DNA
tgcctcttttcaggaaaaggaggcaggtgatggtagtacgcagcacatagcggtttcaacagagtcagttgttga

SEQ ID NO: 636620 - DNA, 75 bp, synthetic construct
  source 1..75: mol_type = other DNA
gctttcactggcggtcaacgccgacagtctggcgacgtggttgcttccggcgctggctcctgtgttggctgattc

SEQ ID NO: 636621 - DNA, 75 bp, synthetic construct
  source 1..75: mol_type = other DNA
cgcagtgtattggggtggtgtgttcgtttaccgatacgccgcaaatccagaaagtggaacggattattcgcggca

SEQ ID NO: 636622 - DNA, 75 bp, synthetic construct
  source 1..75: mol_type = other DNA
cccggactcttcttcgcttatatagtggcatatagcggcttcggacttttatccatcggcatgattatttatctt

SEQ ID NO: 636623 - DNA, 75 bp, synthetic construct
  source 1..75: mol_type = other DNA
acgtcagcagcagattgttgctgataagctacttgtcgaacctttggtagggaagtgtccaaatattttctcgcc

SEQ ID NO: 636624 - DNA, 75 bp, synthetic construct
  source 1..75: mol_type = other DNA
agatacggttattaaaaatacgcggattaatcaggtattgctgacaaaatccgccgaaattcgggaaattatgga

SEQ ID NO: 636625 - DNA, 75 bp, synthetic construct
  source 1..75: mol_type = other DNA
cctcgcaggtaattggcaaaccggtagatacggttattaaaaatacgcggattaatcaggtattgctgacaaaat

SEQ ID NO: 636626 - DNA, 75 bp, synthetic construct
  source 1..75: mol_type = other DNA
ccagagtcaatgccaccgtggcccatttgtcgccattaactgtgccgccattccggaaaccctgctggaaagcga

SEQ ID NO: 636627 - DNA, 75 bp, synthetic construct
  source 1..75: mol_type = other DNA
tgatgagctactttcaattctaaaaactaaatttgcatgtcgggtgctttttgaagaaaccttggttttgccaaa

SEQ ID NO: 636628 - DNA, 75 bp, synthetic construct
  source 1..75: mol_type = other DNA
tttgggccggtaactcgtgagcttcgtagtgagaagttcatgaaaattatctctcttgcaccagaagtactctaa

SEQ ID NO: 636629 - DNA, 75 bp, synthetic construct
  source 1..75: mol_type = other DNA
tgataaactcagccctgaaaatcaggcagttatattaaaagcagcgaaagaatcgatgagttacatgaaggagtt

SEQ ID NO: 636630 - DNA, 75 bp, synthetic construct
  source 1..75: mol_type = other DNA
ctcaagccagtcctgggcagtgacattaaaactgagtcataatcaggataagtctcatcctgttcataaagcgat

SEQ ID NO: 636631 - DNA, 75 bp, synthetic construct
  source 1..75: mol_type = other DNA
gggcaactggagcagtttctcacggtgggaagtctgtatgctgtggatatacaggcctctccgttggtgcatatc

SEQ ID NO: 636632 - DNA, 75 bp, synthetic construct
  source 1..75: mol_type = other DNA
atgtggattgagtacgacaggcaaagcccggttggcgatattcgcggtgatatccatgcagcgcagattgtctct

SEQ ID NO: 636633 - DNA, 75 bp, synthetic construct
  source 1..75: mol_type = other DNA
gtgggagcatgaatcagaagaaaataaatgcgatgatccatttattggattagaggttgctctaatgtcttcact

SEQ ID NO: 636634 - DNA, 75 bp, synthetic construct
  source 1..75: mol_type = other DNA
cgaagttcggcggtcaggagttcctgattggccttgatccggcgttgctgctgggacatacggcggtggtatcgg

SEQ ID NO: 636635 - DNA, 75 bp, synthetic construct
  source 1..75: mol_type = other DNA
ctgcatgtggtcgatgtcggctggccgggctcttcaccaatgacctgggcgtcgcaaattgcgctggtggcgatt

SEQ ID NO: 636636 - DNA, 75 bp, synthetic construct
  source 1..75: mol_type = other DNA
gcgattaatcatgacttccgccagctggaaaaatatctggagccaatccccaaagcggactgggagcaggtgaaa

SEQ ID NO: 636637 - DNA, 75 bp, synthetic construct
  source 1..75: mol_type = other DNA
tgatgccacgggtgattaaacccatcatggatggcttaacacctattgcgaagcaggcgcgtagccgtttgcagg

SEQ ID NO: 636638 - DNA, 75 bp, synthetic construct
  source 1..75: mol_type = other DNA
attccgcacggtacgtcggcgtatatggggccgattgcggtgctggtcgatgctatcatcgagaaaatcccaggc

SEQ ID NO: 636639 - DNA, 75 bp, synthetic construct
  source 1..75: mol_type = other DNA
gcgattgctttaaagcgggtctgcatatcgggattggctttgttggcattggccttgtgattggcttaatgctgg

SEQ ID NO: 636640 - DNA, 75 bp, synthetic construct
  source 1..75: mol_type = other DNA
cggtagaaataatcaaatattattagctctatggaaagcgaagagtatcagagaacatgatattgataacgaagt

SEQ ID NO: 636641 - DNA, 75 bp, synthetic construct
  source 1..75: mol_type = other DNA
tatggtggaggaacagcttgtcgtcagccgtaaccgtcgtcgtcgctacagctcatattgcggagaaatcggacc

SEQ ID NO: 636642 - DNA, 75 bp, synthetic construct
  source 1..75: mol_type = other DNA
gaagacaaggcgctggcaaagccactttcccgccttgtttataccaatctgaaaacagccaggaccaacagcgtg

SEQ ID NO: 636643 - DNA, 75 bp, synthetic construct
  source 1..75: mol_type = other DNA
gggcgatggtcaactttgataagctggggtacaactgcaaaaccaataaggaaaagttgcagatcatgcccaata

SEQ ID NO: 636644 - DNA, 75 bp, synthetic construct
  source 1..75: mol_type = other DNA
acgctcaaacagagtggctattgcgggccgtacctgattgagatgtggagcgaaacggcggaagacccggcggca

SEQ ID NO: 636645 - DNA, 75 bp, synthetic construct
  source 1..75: mol_type = other DNA
ccgtaaccgtcgtcgtcgctacagctcatattgcggagaaatcggaccggctccggataaccttatcgccagaga

SEQ ID NO: 636646 - DNA, 75 bp, synthetic construct
  source 1..75: mol_type = other DNA
ttgtacgcagacttatggtggaggaacagcttgtcgtcagccgtaaccgtcgtcgccgctacagctcatattgcg

SEQ ID NO: 636647 - DNA, 75 bp, synthetic construct
  source 1..75: mol_type = other DNA
actttattcgtcaccagtcgactttaccgctgcgtgcacgtactgctgatgccatcctgcgtttgatgggcggta

SEQ ID NO: 636648 - DNA, 75 bp, synthetic construct
  source 1..75: mol_type = other DNA
cggggggatattcttgctgttcaaagcaacaaccgaactgcatgaacggctggaaaaccgcgatcatgattccgg

SEQ ID NO: 636649 - DNA, 75 bp, synthetic construct
  source 1..75: mol_type = other DNA
atagtggtatcgggttttaccggtgttattggtggcctgataagtatcgaaagcggatttagcatttacatgatt

SEQ ID NO: 636650 - DNA, 75 bp, synthetic construct
  source 1..75: mol_type = other DNA
taaagcaacgtggagctggataaatgccctcgctcagatagttgtatcaggattcaccggtgttattggtggcct

SEQ ID NO: 636651 - DNA, 75 bp, synthetic construct
  source 1..75: mol_type = other DNA
tcggtttccacattccgaaaggttacctgtatgccgcgattggcttctcgatcatcatcgaagtgtttaaccaga

SEQ ID NO: 636652 - DNA, 75 bp, synthetic construct
  source 1..75: mol_type = other DNA
caccatcattgaagccaatgattatcgtgttgatctggttcgcattgttaaagagcaaccggcgcacgatgaaga

SEQ ID NO: 636653 - DNA, 75 bp, synthetic construct
  source 1..75: mol_type = other DNA
gcatctatgaaaaagcactccccaccggggagtgctggttggaacggttgcaactggcaaaaacgttgggcttcg

SEQ ID NO: 636654 - DNA, 75 bp, synthetic construct
  source 1..75: mol_type = other DNA
ggctgccaactataaagcagaagccagttcagcccgtaaacaggggaatgtgggagcagcaacaacattgctcac

SEQ ID NO: 636655 - DNA, 75 bp, synthetic construct
  source 1..75: mol_type = other DNA
taccagatgtttggtgggacgtggagtccgtttactcaaagcactcctgcgccaatcggggcagcagcaggaacc

SEQ ID NO: 636656 - DNA, 75 bp, synthetic construct
  source 1..75: mol_type = other DNA
gcataccagatgggcggcggaacgtggagcccgttctctcagaaggctgcgccgatttctgctgctgttggcact

SEQ ID NO: 636657 - DNA, 75 bp, synthetic construct
  source 1..75: mol_type = other DNA
actggggcaattggaataaacgattttattgataatctacaacttggagctaatacaaatggttctaacgtaatg

SEQ ID NO: 636658 - DNA, 75 bp, synthetic construct
  source 1..75: mol_type = other DNA
cttgcacatcattactcagaatattctgtacaacttgatactggggtaattggtataaatgagtttattgatagc

SEQ ID NO: 636659 - DNA, 75 bp, synthetic construct
  source 1..75: mol_type = other DNA
tataggtgactctttagagtctttacaagaaattaactctcgttattatcttaagttcgttaatctaaaatatat

SEQ ID NO: 636660 - DNA, 75 bp, synthetic construct
  source 1..75: mol_type = other DNA
tggagcgaaacggcggaagacccggcggcagaagtggcgaaagcgcgtgattgggtgaaagcgcgcatggcgaaa

SEQ ID NO: 636661 - DNA, 75 bp, synthetic construct
  source 1..75: mol_type = other DNA
tggagattatgcgtaaagccatccagttcgcccaggacgttggcattcgcgtgatccagctggcgggctatgacg

SEQ ID NO: 636662 - DNA, 75 bp, synthetic construct
  source 1..75: mol_type = other DNA
aaagctatccagttcgcccaggacgttggtattcgcgtgatccaactggcgggctatgacgtttactatcaggaa

SEQ ID NO: 636663 - DNA, 75 bp, synthetic construct
  source 1..75: mol_type = other DNA
gtcactacgattttagaaatgataaaaattctgagtacagatgatcaccctcagtgtggaaatggatttcaggaa

SEQ ID NO: 636664 - DNA, 75 bp, synthetic construct
  source 1..75: mol_type = other DNA
tggcgtcttcaaaaacgtgccgtttggcgaaggcgtggtggatttcgaacgttgtttcgaaacgctcaaacagag

SEQ ID NO: 636665 - DNA, 75 bp, synthetic construct
  source 1..75: mol_type = other DNA
ggcgcaggggctggagattatgcgtaaagctatccagttcgcccaggatgtcggtattcgcgtgatccagctggc

SEQ ID NO: 636666 - DNA, 75 bp, synthetic construct
  source 1..75: mol_type = other DNA
gtctgcgccgcggcgaagtggtcggcgcggtgagtattcaacatcaggcgctgccgagttgtcttgtcgataaac

SEQ ID NO: 636667 - DNA, 75 bp, synthetic construct
  source 1..75: mol_type = other DNA
gacgcatcaggtgaaaaagtgtgtccagagcggcatcaaagtgctgggactggcagcgctcgatagcaccgcaac

SEQ ID NO: 636668 - DNA, 75 bp, synthetic construct
  source 1..75: mol_type = other DNA
tcctcccacgccctggcccatgcgctgaaaatgatgcgcgaaaatccggaaaaagagcagctactggtggttaac

SEQ ID NO: 636669 - DNA, 75 bp, synthetic construct
  source 1..75: mol_type = other DNA
gaattaaggccattacaggcggtgataaggtggcaatcgacccgaaacataaagccccctactcaacacgcattc

SEQ ID NO: 636670 - DNA, 75 bp, synthetic construct
  source 1..75: mol_type = other DNA
gggtaaggccaacacggtatcggcaagcatgaaggcgctggaagatgccagggaacgcgcgttagtggttggctt

SEQ ID NO: 636671 - DNA, 75 bp, synthetic construct
  source 1..75: mol_type = other DNA
aatgattgattctctggaaagaatactagcaactgaaattccgtctgatgttgaaatcatgcgtgtttatacaat

SEQ ID NO: 636672 - DNA, 75 bp, synthetic construct
  source 1..75: mol_type = other DNA
ccagatgtttcattaaagacgggttcaacataccagtggcaaaaagtcaggtgtcctgggttgatcagaacacgc

SEQ ID NO: 636673 - DNA, 75 bp, synthetic construct
  source 1..75: mol_type = other DNA
aaggagcatccgctctgggaaacagtactggatattgatgcgttgtgtaaaacggaaggcagggagtggattttt

SEQ ID NO: 636674 - DNA, 75 bp, synthetic construct
  source 1..75: mol_type = other DNA
agaaggaaaatcagcgcaccatagcgcactttgcccggaaccagaattttttacgtattgagcgagaggttctga

SEQ ID NO: 636675 - DNA, 75 bp, synthetic construct
  source 1..75: mol_type = other DNA
gattttggccagatttccaaagctcatctggctgctgatggtatttcagtgaaaaaagacctagatattaaacta

SEQ ID NO: 636676 - DNA, 75 bp, synthetic construct
  source 1..75: mol_type = other DNA
tatatttcttgctgatcaagatgatatatggttagaagggcgaattgataaagttaagaaatattttactgataa

SEQ ID NO: 636677 - DNA, 75 bp, synthetic construct
  source 1..75: mol_type = other DNA
aagaatagttttggatttaaaatacgttacagaattatgttattaattgaatatttgaaactatataaaagaaaa

SEQ ID NO: 636678 - DNA, 75 bp, synthetic construct
  source 1..75: mol_type = other DNA
ttagcgaggcagaaaaggacaaggatttgccggagaaggtcgcggctgaaatccctgtgattatccgccgattac

SEQ ID NO: 636679 - DNA, 75 bp, synthetic construct
  source 1..75: mol_type = other DNA
cgaacatccgcattatcgacgaagggcgccgctttgcgcgtgtctatatcgcaggggagatcgaaccaattcaga

SEQ ID NO: 636680 - DNA, 75 bp, synthetic construct
  source 1..75: mol_type = other DNA
ttatacaaaggtatcaccgaccgggagccggaaaactggcgcgactacctgcaacggatccgcgaacaggcagag

SEQ ID NO: 636681 - DNA, 75 bp, synthetic construct
  source 1..75: mol_type = other DNA
gataaagagctacagcgggaaatggcgcaaatttttattgatgccgaagtagcctattcgcagaacgcgattaaa

SEQ ID NO: 636682 - DNA, 75 bp, synthetic construct
  source 1..75: mol_type = other DNA
ttaatgccatcgggcaaaagctggcgacggcaggtgtacgggatgcgaattattaccccgagggaatgcacagcc

SEQ ID NO: 636683 - DNA, 75 bp, synthetic construct
  source 1..75: mol_type = other DNA
gtaacactgacgcgcttcggtaaagatatgccgggggcaatggcggaatatggcagggagtatatgaaacggaaa

SEQ ID NO: 636684 - DNA, 75 bp, synthetic construct
  source 1..75: mol_type = other DNA
gtcgtcgggtgatattcaatttttcggaggttgtaccggaaaacgaacgcgaccccatgctggcagaaaaaatag

SEQ ID NO: 636685 - DNA, 75 bp, synthetic construct
  source 1..75: mol_type = other DNA
aagcgactgttggtcattattggcccctgctcgatccacgatcttaccgctgcaatggagtacgccacccgtctg

SEQ ID NO: 636686 - DNA, 75 bp, synthetic construct
  source 1..75: mol_type = other DNA
aacatctggtagtggatttcagccacggcaactgccagaagcagcatcgtcgtcagttagaagtctgtgaagatg

SEQ ID NO: 636687 - DNA, 75 bp, synthetic construct
  source 1..75: mol_type = other DNA
atccggatttaaacggcagctatcgggtaaatcacggtctggagctggcgcgcaaattacttttacaggtaaatg

SEQ ID NO: 636688 - DNA, 75 bp, synthetic construct
  source 1..75: mol_type = other DNA
ggggtttttgatacccggttaggccaatttcgaccgcatgataaaaaggactggcttatcgttgcgagcgaattg

SEQ ID NO: 636689 - DNA, 75 bp, synthetic construct
  source 1..75: mol_type = other DNA
tgccgccggtggtcgtgcggaaaaacgcgacgtgattctggccgcactgtttatggtgctggcaaaccgctatga

SEQ ID NO: 636690 - DNA, 75 bp, synthetic construct
  source 1..75: mol_type = other DNA
cacctatggccaatccattaccgacccgtgtttaggctgggaagataccgaacacctgatcgaaaaactcgcctc

SEQ ID NO: 636691 - DNA, 75 bp, synthetic construct
  source 1..75: mol_type = other DNA
attcctgtggctggaagagctgcagggtgataaatctctacaatgggtccagaaggaaaatcagcgcaccatagc

SEQ ID NO: 636692 - DNA, 75 bp, synthetic construct
  source 1..75: mol_type = other DNA
gaatcgcggggatattgcggaatttaaattcagtccgctgtttaccacgctgtttttcccgaacgtggcgacatt

SEQ ID NO: 636693 - DNA, 75 bp, synthetic construct
  source 1..75: mol_type = other DNA
attgaacgttatgagctggactggaatataaaaccacaaaatatcatcactcagtctggcggtactgagtggtca

SEQ ID NO: 636694 - DNA, 75 bp, synthetic construct
  source 1..75: mol_type = other DNA
agaaaaatatttccttgatcctgatttgatggtgcttggcaacacatcattacagggcatcgttgcctacggtgg

SEQ ID NO: 636695 - DNA, 75 bp, synthetic construct
  source 1..75: mol_type = other DNA
aatccgccgcagagctggcatgtaaaaacctgggcgaagtggtgagctttaaaggctatcttggtgatctggccc

SEQ ID NO: 636696 - DNA, 75 bp, synthetic construct
  source 1..75: mol_type = other DNA
atgaaatcgactggaagatcccaagtaaaaatatcgccagacagggacatggcaaaaagtggtcagaggcagata

SEQ ID NO: 636697 - DNA, 75 bp, synthetic construct
  source 1..75: mol_type = other DNA
cagcacccaaaacatcatgctggataccctggacattgaagaagtcaccatgtcggcgttttgttcgcctatggt

SEQ ID NO: 636698 - DNA, 75 bp, synthetic construct
  source 1..75: mol_type = other DNA
gtgccagagatgtcgaaacggcgactctagccatgaaatcacacttcgacagcccggtcagcgcactgatcaata

SEQ ID NO: 636699 - DNA, 75 bp, synthetic construct
  source 1..75: mol_type = other DNA
gtatggcaatcacatcatcacactacaccagaaaatctgcgatgctgtgtgtgccagggatgtcgaaacggcgac

SEQ ID NO: 636700 - DNA, 75 bp, synthetic construct
  source 1..75: mol_type = other DNA
ttcagctagaaagtaacacgctctcagcccaggtacgagactacatactgtcgttaattgcgcggcaaaagttaa

SEQ ID NO: 636701 - DNA, 75 bp, synthetic construct
  source 1..75: mol_type = other DNA
tggaaatacagtaaatggggttgcaactgagctggaaactgcagggccaaccaatactgcaattgtaattaatgg

SEQ ID NO: 636702 - DNA, 75 bp, synthetic construct
  source 1..75: mol_type = other DNA
aacctggatattgaagaagtcactatgtcggcgttttgttcgcctatggttggcagccaggttcagcgcgataaa

SEQ ID NO: 636703 - DNA, 75 bp, synthetic construct
  source 1..75: mol_type = other DNA
cgcgcgtggaatggctggcggtgaatgcgataacgaccggaaaaaacatcattgagggcgaaggcatagaacgct

SEQ ID NO: 636704 - DNA, 75 bp, synthetic construct
  source 1..75: mol_type = other DNA
aaaaaacatcatagagcaggccaaaggccgtaaatggtccgagcaggacaaagaaacccacgatccaatctatga

SEQ ID NO: 636705 - DNA, 75 bp, synthetic construct
  source 1..75: mol_type = other DNA
accggtttctcaatcaccttactgaaagttgatgacgaaacgctggcactctgggacgccccggtccacaccccg

SEQ ID NO: 636706 - DNA, 75 bp, synthetic construct
  source 1..75: mol_type = other DNA
gcagtacgtttcaactcgctgactaaagaacagcagcaggatgttattactcgtaccttcactcaatctatgtaa

SEQ ID NO: 636707 - DNA, 75 bp, synthetic construct
  source 1..75: mol_type = other DNA
gcgtgtggtatcgctggtctgtccgttgctgctgactccctgtctgcaatcaaatatgcgaaagttaaaccgatt

SEQ ID NO: 636708 - DNA, 75 bp, synthetic construct
  source 1..75: mol_type = other DNA
agtttgttccaccgaaaagccctgaacagcaggatattcaggctctgcaccgtgcaagacagcgtattgtcaatc

SEQ ID NO: 636709 - DNA, 75 bp, synthetic construct
  source 1..75: mol_type = other DNA
gcaaaggaagttcgtcaggctttttctggtgtccgcgatcgccgtcgccgctcattaattccactggcccgaaac

SEQ ID NO: 636710 - DNA, 75 bp, synthetic construct
  source 1..75: mol_type = other DNA
ctgaggggcaagccccggaagaaattatcatggatcagcacgaagagattgaggcagttgagccagaagcttctg

SEQ ID NO: 636711 - DNA, 75 bp, synthetic construct
  source 1..75: mol_type = other DNA
aaatcgaaggtgaatacccgcagtttggtaacaacgatccgcgtgtagatgacctggctgttgacctggtagaac

SEQ ID NO: 636712 - DNA, 75 bp, synthetic construct
  source 1..75: mol_type = other DNA
atgaaatcgactggaagataccggaaaaaaacatcatagagcaggccgacggtaaaaaatggtcagagcaggaca

SEQ ID NO: 636713 - DNA, 75 bp, synthetic construct
  source 1..75: mol_type = other DNA
aatcgatccaacaaaaaccatcatgcgcatggctggagaagatccggcacagcttaacgaccctacctaccgccg

SEQ ID NO: 636714 - DNA, 75 bp, synthetic construct
  source 1..75: mol_type = other DNA
gaaaggtgcagtagcgtctctgacttccgttgctaaactgccgttcgcttacgctaaagatggtatctcctacac

SEQ ID NO: 636715 - DNA, 75 bp, synthetic construct
  source 1..75: mol_type = other DNA
gaaggtggtcagcacctgaacgtaaacgtgatgaaccgtgaaatgctgctcgacgcaatggaaaacccggaaaaa

SEQ ID NO: 636716 - DNA, 75 bp, synthetic construct
  source 1..75: mol_type = other DNA
gaaggtggtcagcacctgaacgttaacgtgatgaaccgtgaaatgctgctcgacgcgatggaaaatccggaaaaa

SEQ ID NO: 636717 - DNA, 75 bp, synthetic construct
  source 1..75: mol_type = other DNA
ggaaatcgacgtgctgtcagataaacccaatcagactcactaccgtgcgctgttagtccgtccacaacagatgtt

SEQ ID NO: 636718 - DNA, 75 bp, synthetic construct
  source 1..75: mol_type = other DNA
caaccttaccaacacaagaagatctggaatatttgatttgcattgcaggaggagtgttcgaggatctaaggaatc

SEQ ID NO: 636719 - DNA, 75 bp, synthetic construct
  source 1..75: mol_type = other DNA
ggagtgtatcgaacgaaatctcagtccaggcggcagcgccgacctgctgattcttacctggtttttagcacagat

SEQ ID NO: 636720 - DNA, 75 bp, synthetic construct
  source 1..75: mol_type = other DNA
tcatctgtaaagggaaaatcccggcttatcttggttccagctttgcctttatttcaccggtattgttactgttgc

SEQ ID NO: 636721 - DNA, 75 bp, synthetic construct
  source 1..75: mol_type = other DNA
caaaatgcaggcgcgtcgccgcctcaaaaaccgtattgcactgacgctctcaatggcgacgatggccttcggtct

SEQ ID NO: 636722 - DNA, 75 bp, synthetic construct
  source 1..75: mol_type = other DNA
tattatcgcaacaatatatagaaaaatatgccccggaagcctgggcgagaatgcaaaagcttaacgcacgatcta

SEQ ID NO: 636723 - DNA, 75 bp, synthetic construct
  source 1..75: mol_type = other DNA
atgagagttgagcagaataatttcagggacatgttctccgtttatctctccggcccgccgcagacgcagcatgtg

SEQ ID NO: 636724 - DNA, 75 bp, synthetic construct
  source 1..75: mol_type = other DNA
gtatctggttcgcataaccaaaacgactggctatcgcatatttgctccttatcggtggttaagatttactggtga

SEQ ID NO: 636725 - DNA, 75 bp, synthetic construct
  source 1..75: mol_type = other DNA
ctgcgtgatgaactggcacaggcgactgcacaaagcgccacagccagcctgagcgccgttctggacaaggcggaa

SEQ ID NO: 636726 - DNA, 75 bp, synthetic construct
  source 1..75: mol_type = other DNA
taaacacgcataaaggcagcattttttctttagggctgctatgtgcggcaattggccgtttgcttcagctcaacc

SEQ ID NO: 636727 - DNA, 75 bp, synthetic construct
  source 1..75: mol_type = other DNA
ataattcacaactgacggcaggtcaacggttgtaccagcagcttggccttaccggcgcacgcggtgaagccgaag

SEQ ID NO: 636728 - DNA, 75 bp, synthetic construct
  source 1..75: mol_type = other DNA
tgggaacatagtgcatcagttcttcgtgtgtcagcggacggtcacggcgtatctggttcgtataaccaaaaacga

SEQ ID NO: 636729 - DNA, 75 bp, synthetic construct
  source 1..75: mol_type = other DNA
ggcttaagcctgatcttcaaactgattagcatactgcgcccggaagaagtcgtactggacgcagaagatgcagag

SEQ ID NO: 636730 - DNA, 75 bp, synthetic construct
  source 1..75: mol_type = other DNA
atgcgccccactcaacgtaatctgatgaaaaaatcaattctgcttctgtcgttgctattcagcaccactttccct

SEQ ID NO: 636731 - DNA, 75 bp, synthetic construct
  source 1..75: mol_type = other DNA
ctttgacgttgatgttcacgcatcaataaatcctctgacgggaaaaccgtttttcatgccgtttcgtggtgtaga

SEQ ID NO: 636732 - DNA, 75 bp, synthetic construct
  source 1..75: mol_type = other DNA
gtggtaacgagcaatcaaccaccagctcaggattatcccacactggaagacagcatcatgacaaaaaatatttct

SEQ ID NO: 636733 - DNA, 75 bp, synthetic construct
  source 1..75: mol_type = other DNA
atgatgcgtcgtgtaaatattctttgctcatttgctctgctttttgccagccataatagcctggcggtaacttat

SEQ ID NO: 636734 - DNA, 75 bp, synthetic construct
  source 1..75: mol_type = other DNA
atcagggatggggcctttccggcccccatcaagctgggccgcagttcccgctggctgaaaagtgaagtggaagcc

SEQ ID NO: 636735 - DNA, 75 bp, synthetic construct
  source 1..75: mol_type = other DNA
tatcactcaactgactggcctgaccgataagtggttttacaaactcatcagggatggggcctttccggcccccat

SEQ ID NO: 636736 - DNA, 75 bp, synthetic construct
  source 1..75: mol_type = other DNA
tggagctggcaggcgtagctgccggtatggctggcttactcccggctgaagggcaaacgccagattccaaaaccg

SEQ ID NO: 636737 - DNA, 75 bp, synthetic construct
  source 1..75: mol_type = other DNA
gacaatcccgcttagtttgcaacatttgttcgccatgtttggtgcaaccgtcctggtgcccgtcttatttcatat

SEQ ID NO: 636738 - DNA, 75 bp, synthetic construct
  source 1..75: mol_type = other DNA
ttggcgcggcggagctgaaaggtatggcgctggcgaccatcgtcggtatcggcttaagtttgatcttcaaactga

SEQ ID NO: 636739 - DNA, 75 bp, synthetic construct
  source 1..75: mol_type = other DNA
taagctgggccgccgttcccgctggaagcaaagcgaagtcgaattatggttacagcagcgcattacggattcgcg

SEQ ID NO: 636740 - DNA, 75 bp, synthetic construct
  source 1..75: mol_type = other DNA
caaactgggccgcagttcccgctggctgaaaagtgaagtggaaacctggctgcaggcgcgtattgcacagtcccg

SEQ ID NO: 636741 - DNA, 75 bp, synthetic construct
  source 1..75: mol_type = other DNA
tacagtacatgggtaatcggcggcgcggcgattttcgccatcctgctttcctgcgttggtaaactggctgccgct

SEQ ID NO: 636742 - DNA, 75 bp, synthetic construct
  source 1..75: mol_type = other DNA
cggtcagattggcgtggcggcactgtcggcacagcttgagaaaaaacagcccatcgctgcgttatctgccatgca

SEQ ID NO: 636743 - DNA, 75 bp, synthetic construct
  source 1..75: mol_type = other DNA
taaaacggcttgcagaacggcagctgacgaaatgggcaaagcatgttagtaacggcctgagcgttccgccagtac

SEQ ID NO: 636744 - DNA, 75 bp, synthetic construct
  source 1..75: mol_type = other DNA
atgctgtgatggaggagtaccgccgctggcgtgatgagtcctggcgatatgacggaagcgacaaatatccgtggc

SEQ ID NO: 636745 - DNA, 75 bp, synthetic construct
  source 1..75: mol_type = other DNA
cgacaactggaaggggcgaaacacccgcaagggccaacgccaattgaacggctgaaacaggaatacgaacgccgg

SEQ ID NO: 636746 - DNA, 75 bp, synthetic construct
  source 1..75: mol_type = other DNA
atgatttgtccacgttgtgccgatgaacagattgaagtgatggcgaaatcgccggtgaaagatgtctggacggta

SEQ ID NO: 636747 - DNA, 75 bp, synthetic construct
  source 1..75: mol_type = other DNA
atgacgcagaaagatattgatgacgcgccaatggtgccgagcattccgccactgctggtggcagataagcgttaa

SEQ ID NO: 636748 - DNA, 75 bp, synthetic construct
  source 1..75: mol_type = other DNA
gacggaagcgataaatacccgtggtctcagcctgtgctgtatcacatttgcctcgagatgcgggcaaaagggatt

SEQ ID NO: 636749 - DNA, 75 bp, synthetic construct
  source 1..75: mol_type = other DNA
gaaaaagtatcgggtgttgctgaaccgtgttgatacatcaactgcaccggatattgagtggcctgcaagccctgt

SEQ ID NO: 636750 - DNA, 75 bp, synthetic construct
  source 1..75: mol_type = other DNA
agcctggaaaaagtatcgggtgttgctgaaccgtgttaatacaacaactgcaccggatattgaatggccagtagc

SEQ ID NO: 636751 - DNA, 75 bp, synthetic construct
  source 1..75: mol_type = other DNA
gacctggctgagtttgttgcactgatttcggagagtggggcaaatccatttggtcttacggtggatgcagtgatg

SEQ ID NO: 636752 - DNA, 75 bp, synthetic construct
  source 1..75: mol_type = other DNA
gcggcacccaaacgcccgtcggggccaacgccaattgagttactgaaacaggaatatgaacgccggaaagcggct

SEQ ID NO: 636753 - DNA, 75 bp, synthetic construct
  source 1..75: mol_type = other DNA
gagcgtcagatgaccgaaggggagttaaaacgacttgcagaacggcaactagcgaaatgggcaaagcttgttggt

SEQ ID NO: 636754 - DNA, 75 bp, synthetic construct
  source 1..75: mol_type = other DNA
agaattgacaccagtacagctccggatatcgtatggccagagctgatgaatcagggttatgtgcgggaggacgag

SEQ ID NO: 636755 - DNA, 75 bp, synthetic construct
  source 1..75: mol_type = other DNA
ccaatgcagtgtggtttattcttgtagttattttattttcagcgttcatgttggcaccaaaaaataaagagaaaa

SEQ ID NO: 636756 - DNA, 75 bp, synthetic construct
  source 1..75: mol_type = other DNA
acgtaaaagggctatatgaagggattatgctgataggcaatataatcaataaacctgaagaggctaaagcgttaa

SEQ ID NO: 636757 - DNA, 75 bp, synthetic construct
  source 1..75: mol_type = other DNA
tatgctgataggcaatatcatcaataagcctgaagaggctaaagcgttaatcaaggccactgaaaatggtcgtaa

SEQ ID NO: 636758 - DNA, 75 bp, synthetic construct
  source 1..75: mol_type = other DNA
agtcctgatagcatcgagaaaatgcattttgtttcagctattgttaagcatacgcgttatgttgacaatgatgaa

SEQ ID NO: 636759 - DNA, 75 bp, synthetic construct
  source 1..75: mol_type = other DNA
tgataaagatcatgaacaaaacaagagacggagactatcagtttagtagtataaacagcgatcaccgtccaatca

SEQ ID NO: 636760 - DNA, 75 bp, synthetic construct
  source 1..75: mol_type = other DNA
atgatcaaggttcttggctatgacagagacggagaataccaatttacaagcattaaccaagaccacaggccaata

SEQ ID NO: 636761 - DNA, 75 bp, synthetic construct
  source 1..75: mol_type = other DNA
atgggttgtgttcaaggtaaagtgccattgaatatagttaggcttacttttgatggtaaatctggtacgtctaga

SEQ ID NO: 636762 - DNA, 75 bp, synthetic construct
  source 1..75: mol_type = other DNA
cgttatttatttctgaacttggctcgttaccggaaaatgtcacctggttatccccggaaggggaatatcagaagt

SEQ ID NO: 636763 - DNA, 75 bp, synthetic construct
  source 1..75: mol_type = other DNA
ggaacggcacatcctgggtgaaagatgcagaagcagaaaaactgtttcgggtacgggaggcagaagaaacaaaaa

SEQ ID NO: 636764 - DNA, 75 bp, synthetic construct
  source 1..75: mol_type = other DNA
taatcatttttgtgactttattgagtttaaccaccctaatataatcatgaacacaagtcagtatacatgcagttc

SEQ ID NO: 636765 - DNA, 75 bp, synthetic construct
  source 1..75: mol_type = other DNA
tttttcaaaattggaacgagattttgaaaatgtaatgataatctatcgggaagatgttgacttcagtatgtatga

SEQ ID NO: 636766 - DNA, 75 bp, synthetic construct
  source 1..75: mol_type = other DNA
gtcgaggaaagaatacttggttaacaagtattttcgagaagatgggggatgatcctaatgatgaatcatatgtga

SEQ ID NO: 636767 - DNA, 75 bp, synthetic construct
  source 1..75: mol_type = other DNA
tgatcgctccattaaaagaatagctgcggtgatacactccctattcctatcacataacccactatacctttcctt

SEQ ID NO: 636768 - DNA, 75 bp, synthetic construct
  source 1..75: mol_type = other DNA
tatagttaccgagtattcggcatgcccaaaacgcacacactaaaattaaaaaacacatcctcgttagaaactctc

SEQ ID NO: 636769 - DNA, 75 bp, synthetic construct
  source 1..75: mol_type = other DNA
gatcgatgtactggactttaaagaagttcgcgatcatatgggagcgccggtcattttaatgatggcgggggtgat

SEQ ID NO: 636770 - DNA, 75 bp, synthetic construct
  source 1..75: mol_type = other DNA
agccattatgcatatttaaacctacagagtgggttaaatattggtgcgtggcgtttacgcgacaataccacctag

SEQ ID NO: 636771 - DNA, 75 bp, synthetic construct
  source 1..75: mol_type = other DNA
ctgactttattctggtcaagtgctctgaaaaagaggttatagaattagcactcaaatacatgtctagcgagaaaa

SEQ ID NO: 636772 - DNA, 75 bp, synthetic construct
  source 1..75: mol_type = other DNA
ttatcgtgggctgagcatgacaaggctcctgataaaacccagccaaatcattccaagcgattaaagtggatgtgc

SEQ ID NO: 636773 - DNA, 75 bp, synthetic construct
  source 1..75: mol_type = other DNA
attcgtcaccatgtatttagttgatgcaatggacggtttccagtttgaagatttccttgtggaagtattccagac

SEQ ID NO: 636774 - DNA, 75 bp, synthetic construct
  source 1..75: mol_type = other DNA
ggcgaaaaattattctggttctgtaggtaactcggcggtgcagcaggtgatctctgctaaaacgttctatggttg

SEQ ID NO: 636775 - DNA, 75 bp, synthetic construct
  source 1..75: mol_type = other DNA
tcaagaaattcgccgctaaagtttccatcgacacctcttctctgcagtatgagaacgatgacctgatgcgtccgg

SEQ ID NO: 636776 - DNA, 75 bp, synthetic construct
  source 1..75: mol_type = other DNA
tcgatcgcacgctgtggctgtgtgaatctaacggcagaccggatgaaaaggagtttcacgctcacctgcatagct

SEQ ID NO: 636777 - DNA, 75 bp, synthetic construct
  source 1..75: mol_type = other DNA
ggagatcatggattatccgttgatgaactccatcagcaaggcgctgggctacgcgcactatctcaacaatccgtg

SEQ ID NO: 636778 - DNA, 75 bp, synthetic construct
  source 1..75: mol_type = other DNA
cggcagcagttgggattattgataaagctgtaaatattgctaagaaactatcgaatgaaagtaatgaaattgata

SEQ ID NO: 636779 - DNA, 75 bp, synthetic construct
  source 1..75: mol_type = other DNA
acatacaaatgtaataggacctgacacgctatggacgtggtgggggcgaggaactaatggtaagttaaaaatgga

SEQ ID NO: 636780 - DNA, 75 bp, synthetic construct
  source 1..75: mol_type = other DNA
caccccaccgctggggccgcaagatcaacccgattacttaaacgcagccgtggctctggaaacctctcttacagc

SEQ ID NO: 636781 - DNA, 75 bp, synthetic construct
  source 1..75: mol_type = other DNA
cgatatgaagaatcgtggatttatgctgtggccgctgtttgaaatcgcgccggagttggtgtttcctgatgggga

SEQ ID NO: 636782 - DNA, 75 bp, synthetic construct
  source 1..75: mol_type = other DNA
agactctgttcatgatccatcccgtatggagccgaaagagagaaaggactggtatccggtgcgcctgcatgggcg

SEQ ID NO: 636783 - DNA, 75 bp, synthetic construct
  source 1..75: mol_type = other DNA
aatgctgcaaaagcattgacaaaatggtggaacgatacagcatcacaaagaatatttgactctctaatattgaat

SEQ ID NO: 636784 - DNA, 75 bp, synthetic construct
  source 1..75: mol_type = other DNA
tccagaatcatcgacagaatctgttggtatcggtgcaggtgttgacgcttcagttatgactctggcttgtagaac

SEQ ID NO: 636785 - DNA, 75 bp, synthetic construct
  source 1..75: mol_type = other DNA
atatctgtttgataatgttcctgtaggtactcgtgtgcaaattattgatcagccagtgaaatacacaacggaacc

SEQ ID NO: 636786 - DNA, 75 bp, synthetic construct
  source 1..75: mol_type = other DNA
gctccgggtaagtcagggctgtattcgtctgcgcaatgacgatatcaaatatctgtttgataatgttcctgttgg

SEQ ID NO: 636787 - DNA, 75 bp, synthetic construct
  source 1..75: mol_type = other DNA
ttggaaacctttgccgcacaacacgggcaaggtctgagtaatatgctggaagcaaatccgggagtagacgttttc

SEQ ID NO: 636788 - DNA, 75 bp, synthetic construct
  source 1..75: mol_type = other DNA
ccgaacgtctgaccgttccgcactacgatatgaaaaatcgtggctttatgctgtggccactgtttgaaattgcgc

SEQ ID NO: 636789 - DNA, 75 bp, synthetic construct
  source 1..75: mol_type = other DNA
tgatatcagccgtgcgcttgccacaggtaataatatattccgtatacatatactcgatgaagatgatatctctaa

SEQ ID NO: 636790 - DNA, 75 bp, synthetic construct
  source 1..75: mol_type = other DNA
atgtttgtaattcttcagaatggggattggctgaactgaaaatgagacatgaaaaaatgaaaacgcaattgaaga

SEQ ID NO: 636791 - DNA, 75 bp, synthetic construct
  source 1..75: mol_type = other DNA
gaaggtggtcagcacctgaacgttaacgtgatgaaccgtgaaatgctgctcgatgcgatggaaaacccggaaaaa

SEQ ID NO: 636792 - DNA, 75 bp, synthetic construct
  source 1..75: mol_type = other DNA
atgaccagatggtcgacatgtcgtttatcactcagctgaccggcctgaccgataagtggttttataaactcatca

SEQ ID NO: 636793 - DNA, 75 bp, synthetic construct
  source 1..75: mol_type = other DNA
atgaccagatggtcgacatggcatttatcactcaactgaccggcctgacagataagtggttttacaaactcatca

SEQ ID NO: 636794 - DNA, 75 bp, synthetic construct
  source 1..75: mol_type = other DNA
ctgaaaagtgaagtggaatgggagcacaggtctgctacggggtgtacctctgacagtatatccggctcgctcatc

SEQ ID NO: 636795 - DNA, 75 bp, synthetic construct
  source 1..75: mol_type = other DNA
tggtcaattctggttggcattatcggtattgttctgctggcgctcggcggcctgaaaccgattcaaaccgccatt

SEQ ID NO: 636796 - DNA, 75 bp, synthetic construct
  source 1..75: mol_type = other DNA
tcctcgcccgtatctcccgtggtcgtaccgtgcgtgaactgtgtttcggcatggtgctgggcctgacggcttcca

SEQ ID NO: 636797 - DNA, 75 bp, synthetic construct
  source 1..75: mol_type = other DNA
gggaccgctaccgtgggccacttacagcttcctttcagtcgccttcgcttacttcttctttgtccgcaaaatgga

SEQ ID NO: 636798 - DNA, 75 bp, synthetic construct
  source 1..75: mol_type = other DNA
acctgggggagtgtttacgccgacgctatttatcggactggcaattggcatgttgtatggccggagcctggggtt

SEQ ID NO: 636799 - DNA, 75 bp, synthetic construct
  source 1..75: mol_type = other DNA
ggcttattgattgcctgcgtgattgcctcggtaatgtcgcggactttacatcgtgactctatctaccgccagcac

SEQ ID NO: 636800 - DNA, 75 bp, synthetic construct
  source 1..75: mol_type = other DNA
gaaactgggacgcagctcccgctggttaaaaagcgaagtggaagcctggcttcaggaacgtattaaccagtcccg

SEQ ID NO: 636801 - DNA, 75 bp, synthetic construct
  source 1..75: mol_type = other DNA
ggcagtctggtcaatgcagcgacaaacctttccccctggcgacggctgctaactccggcgctcggcggactggcg

SEQ ID NO: 636802 - DNA, 75 bp, synthetic construct
  source 1..75: mol_type = other DNA
tttgctctacagcgtgcaactctcagtgacggttcagactcgtgactatgcgctgattatcagtaccggcattct

SEQ ID NO: 636803 - DNA, 75 bp, synthetic construct
  source 1..75: mol_type = other DNA
aagtattgtttggcaccatgatgctggcctcccttgcaccagtagtgatctctgccgtagtggcattgcttatta

SEQ ID NO: 636804 - DNA, 75 bp, synthetic construct
  source 1..75: mol_type = other DNA
ttgttctataccgatcccatcgccaaaggcggcttcccgcagggctggaccgtgttctactgggcatggtgggta

SEQ ID NO: 636805 - DNA, 75 bp, synthetic construct
  source 1..75: mol_type = other DNA
aattttcttagcaagtcggctacgaaggataagcagctgtataaaccggtgctgtacgtacctgtccgggatgca

SEQ ID NO: 636806 - DNA, 75 bp, synthetic construct
  source 1..75: mol_type = other DNA
gagcgtgaggggttgaaactggtggaagttctggaaaaagcagttgaggcatataaggaaaaacagggctattaa

SEQ ID NO: 636807 - DNA, 75 bp, synthetic construct
  source 1..75: mol_type = other DNA
ctttctgctcatcgtcgtttcccgctgggcagcgaagatgacgcggtacgggcgcaggggctggagattatgcgc

SEQ ID NO: 636808 - DNA, 75 bp, synthetic construct
  source 1..75: mol_type = other DNA
cagcacaggtgatgatcgatttcagccatgctaactcgtccaaacaattcaaaaagcagatggatgtttgtgctg

SEQ ID NO: 636809 - DNA, 75 bp, synthetic construct
  source 1..75: mol_type = other DNA
acgacagcggtctgccagcggcaggtgagtttctcgatatgatcaccccacaatatctcgctgacctgatgagct

SEQ ID NO: 636810 - DNA, 75 bp, synthetic construct
  source 1..75: mol_type = other DNA
cgaacgctttatctctagcctgagtgattttatccacaagtcgagcacgaaagataagcggttatataaacctgt

SEQ ID NO: 636811 - DNA, 75 bp, synthetic construct
  source 1..75: mol_type = other DNA
ggccgtagctcccgatggctgaaaagtgaagtggaagcctggttgcaggcacgtattacacagtcccgtccgtaa

SEQ ID NO: 636812 - DNA, 75 bp, synthetic construct
  source 1..75: mol_type = other DNA
tgtgatttctgcgctgagtcccggctggcaaaaggctttccgcccatttgcgtcagcgcctgcccggaacacgca

SEQ ID NO: 636813 - DNA, 75 bp, synthetic construct
  source 1..75: mol_type = other DNA
atgtccttcactcgacgcaaatttgttctggggatgggaacagtaatcttttttactggttctgcgtcttctctg

SEQ ID NO: 636814 - DNA, 75 bp, synthetic construct
  source 1..75: mol_type = other DNA
cgctttcagcgtcgccacaatggtcagggagaccatgcacagcagcccataatgcagccatctcgtatgcaaacc

SEQ ID NO: 636815 - DNA, 75 bp, synthetic construct
  source 1..75: mol_type = other DNA
gcaccgacagctaccaggacgagagcggagaaaccaaaaaccgcgacgaatatccatgggggctttgcatcacgt

SEQ ID NO: 636816 - DNA, 75 bp, synthetic construct
  source 1..75: mol_type = other DNA
aactgaacggcctgacagataagtggttttacaggctcatcagggatggggcctttccggctcccatcaagctgg

SEQ ID NO: 636817 - DNA, 75 bp, synthetic construct
  source 1..75: mol_type = other DNA
cgattgcgaccgtgcttgggctggcgtttaaactctccgacccggaaaaactgctgggtggcgcagaagatttag

SEQ ID NO: 636818 - DNA, 75 bp, synthetic construct
  source 1..75: mol_type = other DNA
tgcgtagtattaacgttgatgactttgatccggaagagctggcgacgaagccggtaaagttgccggagaaagtgc

SEQ ID NO: 636819 - DNA, 75 bp, synthetic construct
  source 1..75: mol_type = other DNA
cgagcataacccggttggtttactggaagaggcgctggtggatgtgattgccgccgacccaattcatcagcggat

SEQ ID NO: 636820 - DNA, 75 bp, synthetic construct
  source 1..75: mol_type = other DNA
cgacccggactttgcggcttattataaagagccgtcgaaaactatccctgacccgaaactcaacctggtttatat

SEQ ID NO: 636821 - DNA, 75 bp, synthetic construct
  source 1..75: mol_type = other DNA
gttggcactgactctgaaactgtcgagaccaagaccgtaagttcaccaatattctcacttgagccaggcgtatta

SEQ ID NO: 636822 - DNA, 75 bp, synthetic construct
  source 1..75: mol_type = other DNA
gttgacactgactctgaaactgtcgagaccaggaccataagttcaccaatattctcacttgaaccaggcgtatta

SEQ ID NO: 636823 - DNA, 75 bp, synthetic construct
  source 1..75: mol_type = other DNA
cgaatgcgggggcgcgttataccattatgcgtccgctcagtattgaagcgggttaccgttatctgaacctggcgg

SEQ ID NO: 636824 - DNA, 75 bp, synthetic construct
  source 1..75: mol_type = other DNA
caaataaagccgttgggcaggattactcacgctggaatgatgtctggctaacgttgcgcggtcagtatggcgcgc

SEQ ID NO: 636825 - DNA, 75 bp, synthetic construct
  source 1..75: mol_type = other DNA
gtgattaaacgtagcgagcggcgaattttatgggccagcgctattttgctgggaattgcgttggtgattggtgca

SEQ ID NO: 636826 - DNA, 75 bp, synthetic construct
  source 1..75: mol_type = other DNA
gtcgcggtcagtacctgacgccgagcgagcataacccggttggtttactggaagaggcgctggtggatgtgattg

SEQ ID NO: 636827 - DNA, 75 bp, synthetic construct
  source 1..75: mol_type = other DNA
ggctaccgttacctgaacctggcaggtaaaaatggcaatcgtgataacgccattgctgatggtccgtatgttggg

SEQ ID NO: 636828 - DNA, 75 bp, synthetic construct
  source 1..75: mol_type = other DNA
gttgaatctgcctcttggtccgttaatggcgaccgttggcggtaaaggtatttataccaatccgaatgatggtga

SEQ ID NO: 636829 - DNA, 75 bp, synthetic construct
  source 1..75: mol_type = other DNA
aactctgggctccggaactggcactttccaccgactggtgtgtctcgcaagggcagcttggcggtcagcaaattg

SEQ ID NO: 636830 - DNA, 75 bp, synthetic construct
  source 1..75: mol_type = other DNA
attctgacccgcagcatgatgatcttcggacaaggagcgattcgttgccatccgtacgtgctggaagagatggaa

SEQ ID NO: 636831 - DNA, 75 bp, synthetic construct
  source 1..75: mol_type = other DNA
ccgaacgccactcgctcacgtattggtcggggtcagtacctgacgccgagcgagcataatccggttggtttactg

SEQ ID NO: 636832 - DNA, 75 bp, synthetic construct
  source 1..75: mol_type = other DNA
tcggtcagggggcgattcgttgccatccgtacgtgctggaagagatggaagcggcgaagaacaatgacgtcaacg

SEQ ID NO: 636833 - DNA, 75 bp, synthetic construct
  source 1..75: mol_type = other DNA
ggaatacccacaagaagaaaagaatctaagcgatatcgagatcatcggaagaatcttctggtggtctgtagttga

SEQ ID NO: 636834 - DNA, 75 bp, synthetic construct
  source 1..75: mol_type = other DNA
ggaatacccacaagaagaaaagaatctaagtgacattgagatcatcggaagaattttctggtggtctgtagttga

SEQ ID NO: 636835 - DNA, 75 bp, synthetic construct
  source 1..75: mol_type = other DNA
ctgtaaagagctgggtaaaaatctgccatttacccgtctggatgaactggcgcacaacgcgctggcgaaggggct

SEQ ID NO: 636836 - DNA, 75 bp, synthetic construct
  source 1..75: mol_type = other DNA
agtctcaactaacgaaggaaacattctcggacactctccgcgtaagctcggcattggtatggtagaaatcaaagt

SEQ ID NO: 636837 - DNA, 75 bp, synthetic construct
  source 1..75: mol_type = other DNA
tggaaaggcaaaacggcgtttaaagataccgtcatcgacatgaaacgctacaaagagaatgtggatacgctgaaa

SEQ ID NO: 636838 - DNA, 75 bp, synthetic construct
  source 1..75: mol_type = other DNA
gtttaaagataccgtcatcgtcgtctcttccgatcatctggcgatgaacaacacggcgtggaaatacctcaataa

SEQ ID NO: 636839 - DNA, 75 bp, synthetic construct
  source 1..75: mol_type = other DNA
gtcgttaggtatctgtgtcgcactggtagcgttttcaagtcttgaaacacgtcttcctatgagtaaatcgcgcat

SEQ ID NO: 636840 - DNA, 75 bp, synthetic construct
  source 1..75: mol_type = other DNA
atgggtattttttctcgctttgccgacatcgtgaatgccaacatcaacgctctgttagagaaagcggaagatcca

SEQ ID NO: 636841 - DNA, 75 bp, synthetic construct
  source 1..75: mol_type = other DNA
aatacagcaaagaacacgaatggctgcgtaaagaagctgacggcacttacaccgttggcatcaccgaacacgctc

SEQ ID NO: 636842 - DNA, 75 bp, synthetic construct
  source 1..75: mol_type = other DNA
tacctgagtcctctatttttatcttgcgtaaaagcactattttgccccgagtggcgcagctggcagaaaaattgc

SEQ ID NO: 636843 - DNA, 75 bp, synthetic construct
  source 1..75: mol_type = other DNA
cagggatacaggtattgatacctacgtgttgattgtgggggagtctgtacgtgtcgacaatatgtctttgtatgg

SEQ ID NO: 636844 - DNA, 75 bp, synthetic construct
  source 1..75: mol_type = other DNA
gaagcggcgatagcgctgtcatcgtcaggtagtgaacaggtatggctgacactggagcgtctggcgtttgtggac

SEQ ID NO: 636845 - DNA, 75 bp, synthetic construct
  source 1..75: mol_type = other DNA
tggacgtaatgtctccgggtcacccagtgcgcgacatctggttacagacggtagaagcattacgcgatacctctc

SEQ ID NO: 636846 - DNA, 75 bp, synthetic construct
  source 1..75: mol_type = other DNA
ttggcagcattacccgataatcagagtgtaaaaaaaggcgatattatcctgcgtctcgatgatcgggattatcgt

SEQ ID NO: 636847 - DNA, 75 bp, synthetic construct
  source 1..75: mol_type = other DNA
ctggacggcagtgcctaccgtattgttttttatacaaaacgagaaaaagctaacttcagtggcctttaacacact

SEQ ID NO: 636848 - DNA, 75 bp, synthetic construct
  source 1..75: mol_type = other DNA
gtcgcgatttgctacctatacgccgtttttcaatctcaactattttgctttagcagcgaaagagcatcaaagatt

SEQ ID NO: 636849 - DNA, 75 bp, synthetic construct
  source 1..75: mol_type = other DNA
cagagcgcatcgacagaggtgagaacgtatttttccttgcagactgatggctctttcaccagtgatatcatcatg

SEQ ID NO: 636850 - DNA, 75 bp, synthetic construct
  source 1..75: mol_type = other DNA
atcatcctgctctgctacgttcaactctggatggaaaaagcacaacaactcagtaaacagctataccccgtcatg

SEQ ID NO: 636851 - DNA, 75 bp, synthetic construct
  source 1..75: mol_type = other DNA
agaagtgatatttacggtttaggtcgtaatgttaatttatttgaagatttaagaaaaatagcatataaagttgtt

SEQ ID NO: 636852 - DNA, 75 bp, synthetic construct
  source 1..75: mol_type = other DNA
atgacaatacagtcccaccatgaccacgtagaaaagcagtttagctcacaggccggtgagtatttaaccagtacc

SEQ ID NO: 636853 - DNA, 75 bp, synthetic construct
  source 1..75: mol_type = other DNA
gctgattgtgatggacatcatgtcgccaggacatccggtacgtgatatctggttacagacggtagaagcgttacg

SEQ ID NO: 636854 - DNA, 75 bp, synthetic construct
  source 1..75: mol_type = other DNA
agcgcatcgacagaggtgaaaacgtattttgccttgcagaatgatatggctctttcaccagtgatatcatcatgc

SEQ ID NO: 636855 - DNA, 75 bp, synthetic construct
  source 1..75: mol_type = other DNA
tctgctcaggaagaaaacgtacgtacaagtatcgaagaagttcaggccgctttgactcaggcactactggatctg

SEQ ID NO: 636856 - DNA, 75 bp, synthetic construct
  source 1..75: mol_type = other DNA
aatgaatccatagataaaataggtagaaatttaagtccaggagaagttggttgctatttgtcacatattaaatgc

SEQ ID NO: 636857 - DNA, 75 bp, synthetic construct
  source 1..75: mol_type = other DNA
tatttactgaaaatgctcgcagagagaaaatattgtctttggcaaaaaaattggaactaccgataaaaatagaaa

SEQ ID NO: 636858 - DNA, 75 bp, synthetic construct
  source 1..75: mol_type = other DNA
gcgcactaaatacatctgggttaccgttatcccggcagtatggctgcttatctgcactacctgggcgctgggtct

SEQ ID NO: 636859 - DNA, 75 bp, synthetic construct
  source 1..75: mol_type = other DNA
aaaacgttgctcaggcactgggccgtccgctgcgactcgaaccgcaagcagaagatacgccgcttaacaattatg

SEQ ID NO: 636860 - DNA, 75 bp, synthetic construct
  source 1..75: mol_type = other DNA
ctggggcgtacaggatgcactgtatcaggctgaacaggcgatggacgatttactgcaaaacttcccgaaccgcgt

SEQ ID NO: 636861 - DNA, 75 bp, synthetic construct
  source 1..75: mol_type = other DNA
agcgtaaggagccgagcgcttccggaagaggcgatgacgggctggaacgaaggcatgacccgcttacagcagctg

SEQ ID NO: 636862 - DNA, 75 bp, synthetic construct
  source 1..75: mol_type = other DNA
atcggctgatcaaagaaatgcgtctggaaggtataaccggcattgaggccgcaaatgcctggcttgccactttca

SEQ ID NO: 636863 - DNA, 75 bp, synthetic construct
  source 1..75: mol_type = other DNA
attttaaatgcattaatttctcgcacagaaatgatgtcctctggagagtatgcgattgagcatgatcgttctaaa

SEQ ID NO: 636864 - DNA, 72 bp, synthetic construct
  source 1..72: mol_type = other DNA
atggcaacaccaaatccccttgagccggtaaaaggtgccggtaccactctgtgggtttacaacggcaagggt

SEQ ID NO: 636865 - DNA, 75 bp, synthetic construct
  source 1..75: mol_type = other DNA
aaggaaatgcgtcttaaaggaattagcagcattgaagcagtgaacgcctggctggctactttcatagctgacttc

SEQ ID NO: 636866 - DNA, 75 bp, synthetic construct
  source 1..75: mol_type = other DNA
gaggaggccaatgcctggctggataccttcatcgctgacttcaatcgtcgcttcgcaagaccagaaaaatacccc

SEQ ID NO: 636867 - DNA, 75 bp, synthetic construct
  source 1..75: mol_type = other DNA
tgggcaccggagccttaagtgccaggcatttgataagctggcctgtgtcgaccaggggcagattgttgataacaa

SEQ ID NO: 636868 - DNA, 75 bp, synthetic construct
  source 1..75: mol_type = other DNA
gtgaaatatggtgatttggctaaagcattaaacataccgttaatttcatctggatctattggctttaataaacta

SEQ ID NO: 636869 - DNA, 75 bp, synthetic construct
  source 1..75: mol_type = other DNA
gaatcgcagcagtaatgcaaatgtttattacacccgactcatcaataattactagggatacatttctgtcagcag

SEQ ID NO: 636870 - DNA, 75 bp, synthetic construct
  source 1..75: mol_type = other DNA
taacgagcaccccagaggctcggcagacgattgcattgattgggcaaacaaacggtatccttgccccagatgagg

SEQ ID NO: 636871 - DNA, 75 bp, synthetic construct
  source 1..75: mol_type = other DNA
atgaataaattaagtgataaatcctcaaatcctgtgtttacagtaattgctatcgtgatttttttcttcttcctt

SEQ ID NO: 636872 - DNA, 75 bp, synthetic construct
  source 1..75: mol_type = other DNA
gttgggggcgcttcgtctatgccatcggtggcaacccggaggcggcacgtctggctggggtaaacgtgaagcgtg

SEQ ID NO: 636873 - DNA, 75 bp, synthetic construct
  source 1..75: mol_type = other DNA
atgggcacggcgattggttttctgcacggtctgggcgtcacccgcctgcgtctgccgccgttcatcgtcaccctc

SEQ ID NO: 636874 - DNA, 75 bp, synthetic construct
  source 1..75: mol_type = other DNA
acagcttcctgctttgccagacgaattaaaagcacaggccaaagagattgccgggtgtgaaaaccgcgtctggct

SEQ ID NO: 636875 - DNA, 75 bp, synthetic construct
  source 1..75: mol_type = other DNA
ggcggtgttgttgactgccgttgaggggaaaaccgccgccgaattgcaggcacagtcgccgctggcattgtttga

SEQ ID NO: 636876 - DNA, 75 bp, synthetic construct
  source 1..75: mol_type = other DNA
aagatgcatttctttggtgatagcgaaggacgcattgtgcgcggtctgctggccgtgttgttgaccgcagtggag

SEQ ID NO: 636877 - DNA, 75 bp, synthetic construct
  source 1..75: mol_type = other DNA
cttctgctcctgccgcgccgctgatgccggtttctgataccgttcacgaacgctttatccgtctgcccgaagtga

SEQ ID NO: 636878 - DNA, 75 bp, synthetic construct
  source 1..75: mol_type = other DNA
gccggtttctgatgccgttcaggagcgctttatccgcctgcctgaagtgatgcatctgtgcggcctgtcccggtc

SEQ ID NO: 636879 - DNA, 75 bp, synthetic construct
  source 1..75: mol_type = other DNA
tcggtggaaaaaacgtggcgtgggcgcactcagaaatcatggcatggatgactgaccgcattgccgaacgtaacc

SEQ ID NO: 636880 - DNA, 75 bp, synthetic construct
  source 1..75: mol_type = other DNA
atcataaggagtattatgtttatagcacctgctttattatgcacaatatcttcaattattctggcagttggaatg

SEQ ID NO: 636881 - DNA, 75 bp, synthetic construct
  source 1..75: mol_type = other DNA
ggtccagatcgtgggaaggatatcatcgcatcacctgatggatttggatttgagaatccacgtatcgtcgttgag

SEQ ID NO: 636882 - DNA, 75 bp, synthetic construct
  source 1..75: mol_type = other DNA
gcggtgacggcggcaaactctatgacgatttccgcgataaacaaattgtgggaatcggttggcctcagctggctc

SEQ ID NO: 636883 - DNA, 75 bp, synthetic construct
  source 1..75: mol_type = other DNA
agaacacattgggttctacgctgacggttttccagcttccagaatatgcgctagtagagcttttgcaggataaga

SEQ ID NO: 636884 - DNA, 75 bp, synthetic construct
  source 1..75: mol_type = other DNA
tggaagagaaaaaactagctagattaaaaggagtaaagacacattcaacctctatgttctcaaaagggttaattt

SEQ ID NO: 636885 - DNA, 75 bp, synthetic construct
  source 1..75: mol_type = other DNA
ggaaggcttatttcagtcggggcgcattatggtagaaagtttgcagcatattctgtctgtgcaaccggtgattaa

SEQ ID NO: 636886 - DNA, 75 bp, synthetic construct
  source 1..75: mol_type = other DNA
tgacacatattttgattatcggcgcctttatttttgctttcttgcaagtggtattattagcctccctggttcatg

SEQ ID NO: 636887 - DNA, 75 bp, synthetic construct
  source 1..75: mol_type = other DNA
ggaaaaagctgcataactatccgcagccgcgcctgaccgcagaagagcaagcgtttctcgacggtccggtagaag

SEQ ID NO: 636888 - DNA, 75 bp, synthetic construct
  source 1..75: mol_type = other DNA
gctctacctcgcctccgccgttctgaaacgttatgacgacgaaggccgtaatgaagccgacctgccgctggtgca

SEQ ID NO: 636889 - DNA, 75 bp, synthetic construct
  source 1..75: mol_type = other DNA
tgctggaactcaatagctacggtgagaaacgccaacctgcgaacctaagaaaaaatattacaacagtattttttt

SEQ ID NO: 636890 - DNA, 75 bp, synthetic construct
  source 1..75: mol_type = other DNA
taccgcgccgggttgtcataaaaagcaattgccactttgtagatggcaccaccagcatgcagcaccggctgaagt

SEQ ID NO: 636891 - DNA, 75 bp, synthetic construct
  source 1..75: mol_type = other DNA
ctgctgggtggcgcagaagatttaggtattacctgtgcgctgatcccgaccaccacgccgggcgtggaaattggt

SEQ ID NO: 636892 - DNA, 75 bp, synthetic construct
  source 1..75: mol_type = other DNA
gaacaaacgctacattacgctggcaccgattgcgaccgtgcttgggctggcgtttaaactctccgacccggaaaa

SEQ ID NO: 636893 - DNA, 75 bp, synthetic construct
  source 1..75: mol_type = other DNA
aaaatgcacttctttggcgacagcgaagggcgcattgtgcgcggcctgctggcggtgttgttgactgccgttgag

SEQ ID NO: 636894 - DNA, 75 bp, synthetic construct
  source 1..75: mol_type = other DNA
tcagttccacgcggtgcgtgaagcggttgcggcaacgattgtggcctctaccggtaaacatcttccgctgcgcag

SEQ ID NO: 636895 - DNA, 75 bp, synthetic construct
  source 1..75: mol_type = other DNA
cagcctccgataataaattccttcagccgcacatctacaataagcaaaccaaaaaacgccttgaagcgcgcttta

SEQ ID NO: 636896 - DNA, 75 bp, synthetic construct
  source 1..75: mol_type = other DNA
actgggctgggaagtattgcacgggccggatattgcgccagatggcaacaatccgctgcgtgcgtcgttccacga

SEQ ID NO: 636897 - DNA, 75 bp, synthetic construct
  source 1..75: mol_type = other DNA
acgatggcgcaacggtgcctattcactatgaatcccggctggcaaaactcgatctcaatcatgaagagctggcgg

SEQ ID NO: 636898 - DNA, 75 bp, synthetic construct
  source 1..75: mol_type = other DNA
gccgcacatctacaataagcaaaccaaaaaacgccttgaagcgcgctttaaggatctcaacgaccctctgaaact

SEQ ID NO: 636899 - DNA, 75 bp, synthetic construct
  source 1..75: mol_type = other DNA
gccgctggacagtgaacagagccatccggcacttaacgtccgcagcaacatcgtggtgatttccgatgaagcgca

SEQ ID NO: 636900 - DNA, 75 bp, synthetic construct
  source 1..75: mol_type = other DNA
ttttaagctcaggttctcaaaggcaaccctccgccgcgttggagctaacacagatgggtctggcatcctgtgttt

SEQ ID NO: 636901 - DNA, 75 bp, synthetic construct
  source 1..75: mol_type = other DNA
atcccgaacctgaactgcgtagggagtcatctatccctccagaatctgaatggggaactgttgacgcctgggata

SEQ ID NO: 636902 - DNA, 75 bp, synthetic construct
  source 1..75: mol_type = other DNA
tgctgtatctgagcccgggatctggaagtggcttaacgcatcagcaataccagaccaaaccaatatccttgcact

SEQ ID NO: 636903 - DNA, 75 bp, synthetic construct
  source 1..75: mol_type = other DNA
gccgtcatgacagaaaacgcaccgcccccggatatccgtgcatggctgacgccctccggcaaccaggatgatggt

SEQ ID NO: 636904 - DNA, 75 bp, synthetic construct
  source 1..75: mol_type = other DNA
accgctggctggagaaacaaccagaggcgctggcgctgattgccgtctcttcggaaacagaagaagagcgcacct

SEQ ID NO: 636905 - DNA, 75 bp, synthetic construct
  source 1..75: mol_type = other DNA
atggtattcccaaccgaattagcctctcgggtcataccgatgattttccctacgccagcggtgagaaaggttaca

SEQ ID NO: 636906 - DNA, 75 bp, synthetic construct
  source 1..75: mol_type = other DNA
cagcatctgataaggcaatgctgcaaccgcatatctacaacaaacggactaaaaaacggctggaatcccgcttca

SEQ ID NO: 636907 - DNA, 75 bp, synthetic construct
  source 1..75: mol_type = other DNA
ggcgaaaaatattcatatgacttgatctcgccggatgtgctgccgacgaataacgttgaatggcaatacagcccg

SEQ ID NO: 636908 - DNA, 75 bp, synthetic construct
  source 1..75: mol_type = other DNA
ggggagtttcagcttgagccaccgctggataccgaggaaggacgcgcagcagctgatgagtgggatgaacgttaa

SEQ ID NO: 636909 - DNA, 75 bp, synthetic construct
  source 1..75: mol_type = other DNA
ccccgccgtggatgtgcgcagggagttggttatttttgggaaaatcttaagcgaggaactggcaaaactccccga

SEQ ID NO: 636910 - DNA, 75 bp, synthetic construct
  source 1..75: mol_type = other DNA
atgcttcattattttgtcatgatactttattttgtcctaatccttcttttaggagtgtttacctgcttcgcagga

SEQ ID NO: 636911 - DNA, 75 bp, synthetic construct
  source 1..75: mol_type = other DNA
acaagcatacccagcttggtttttaccgttacggtcatgatgattactgtgagccacttgaaatggatgcccttc

SEQ ID NO: 636912 - DNA, 75 bp, synthetic construct
  source 1..75: mol_type = other DNA
tttggatcagcaatttgctgacctgaaagcagatgatgaaatcagcgagcagttggcgcaattgaaagccaaaat

SEQ ID NO: 636913 - DNA, 75 bp, synthetic construct
  source 1..75: mol_type = other DNA
ggaaggtctcattgaagaagctaatgaggtcatcgaaagcaccgagaaaaacgaagtgcgtgatgccgcactgat

SEQ ID NO: 636914 - DNA, 75 bp, synthetic construct
  source 1..75: mol_type = other DNA
atgaatatgaagaccattgaagatgtatttattcacctgctttcagacacctacagcgcagaaaaacaattaacc

SEQ ID NO: 636915 - DNA, 75 bp, synthetic construct
  source 1..75: mol_type = other DNA
tcatccacggtatgtttgccaaaacggcaacgtcagcgggttttgattacaccggctttgaagctcatgcgcaga

SEQ ID NO: 636916 - DNA, 75 bp, synthetic construct
  source 1..75: mol_type = other DNA
atcagcgcattcatgaatatacccgcccccgcatcactcgaagacatggatccacaaagccgtaaagcctggtac

SEQ ID NO: 636917 - DNA, 75 bp, synthetic construct
  source 1..75: mol_type = other DNA
atggatcgtgagttgaaaaatctgatgctgaacattaaccaactggcggcaatagcaggtatatgtcgtcagact

SEQ ID NO: 636918 - DNA, 75 bp, synthetic construct
  source 1..75: mol_type = other DNA
aaaattaagtcaggcttttcatgcgcacctcgaggaaacacatggacagattgaacgtattgatcaagttgtgga

SEQ ID NO: 636919 - DNA, 75 bp, synthetic construct
  source 1..75: mol_type = other DNA
gtatgacaacataaccggaacagggttttgccctcgtcaccgccaaaaatacgtcctttatcacatttcttcgat

SEQ ID NO: 636920 - DNA, 75 bp, synthetic construct
  source 1..75: mol_type = other DNA
ggaaaaagacgggtttgaagtacgaactcacgtcatgaatgatcaggcgctgtcagccctgaaagaaaagcatgc

SEQ ID NO: 636921 - DNA, 75 bp, synthetic construct
  source 1..75: mol_type = other DNA
acccacgtcatgaatgatcaggccctgtcagccctgaaagaaaaatatgctgttcctgctgagctgagaagctgt

SEQ ID NO: 636922 - DNA, 75 bp, synthetic construct
  source 1..75: mol_type = other DNA
ttctattgatcccaactttatcttgctcggcgatgataatagcgcttcatttcgttaaaaaaatcatttacatta

SEQ ID NO: 636923 - DNA, 75 bp, synthetic construct
  source 1..75: mol_type = other DNA
actctgtactccattaattgagctgttatttaagaatgagaagttagataatattctgtatttgttatgcttttg

SEQ ID NO: 636924 - DNA, 75 bp, synthetic construct
  source 1..75: mol_type = other DNA
ttcataatacgtgatcttggaactgcatcggccataatacaaagaaaagaagtagatgacgatattttaaattca

SEQ ID NO: 636925 - DNA, 75 bp, synthetic construct
  source 1..75: mol_type = other DNA
ctctataccccggctgaaaaaccgctgtatgcccggaccagcactgcacaatgcctgctccgtgtgacagaccgc

SEQ ID NO: 636926 - DNA, 75 bp, synthetic construct
  source 1..75: mol_type = other DNA
gctaagtttcagaaaatatggggactgggttgaatctcagttactggaatcactgggaaatgtgatgtttttcat

SEQ ID NO: 636927 - DNA, 75 bp, synthetic construct
  source 1..75: mol_type = other DNA
atgaataaaccagttatttcccgggctgaacagattttttatcccggctggctgatggtctgccagctgcgcagc

SEQ ID NO: 636928 - DNA, 75 bp, synthetic construct
  source 1..75: mol_type = other DNA
tgtcagccctgaaagaaaagtattctgttccggcaggactacgcagttgtcatacagcagttgcaggcgagctgg

SEQ ID NO: 636929 - DNA, 75 bp, synthetic construct
  source 1..75: mol_type = other DNA
ggttcgggtatatacggtctcgccacccccggtatgccagcaggaagtcctggaatggagatgggagcccgaaaa

SEQ ID NO: 636930 - DNA, 75 bp, synthetic construct
  source 1..75: mol_type = other DNA
aatcgtttgtcaggcttggggttagcctgaagtctcagttaagaagggcttttaaattatattacgaatattgtc

SEQ ID NO: 636931 - DNA, 75 bp, synthetic construct
  source 1..75: mol_type = other DNA
gccacctttgcaaaaaagacgttgaagaaagcaaagctattgaaagaatgcttcacttcatgcacgggattttat

SEQ ID NO: 636932 - DNA, 75 bp, synthetic construct
  source 1..75: mol_type = other DNA
cgtattggtgatgtggcggacaaaatctgccgtactgcgctggagaaattctcccagcagcatcagccattgtta

SEQ ID NO: 636933 - DNA, 75 bp, synthetic construct
  source 1..75: mol_type = other DNA
cttaatgctttcctgtttaaactggagagcgccatcgccaacatctcgtcgctgaaaggcgataaggagacggaa

SEQ ID NO: 636934 - DNA, 75 bp, synthetic construct
  source 1..75: mol_type = other DNA
tctctgggatgatgaaaacggcatctaccgtgattacgactggcgacgtgagcagttagccctgtttaccgctgc

SEQ ID NO: 636935 - DNA, 75 bp, synthetic construct
  source 1..75: mol_type = other DNA
gtgattcaggcgcgtccgactgcagggctgcaacgtttgcgttatctgctgctgctgtggggcgcggatcgtaac

SEQ ID NO: 636936 - DNA, 75 bp, synthetic construct
  source 1..75: mol_type = other DNA
acacaatccagatgctgcatgacgtactggacgcgttcgcgcgcatggatattgacgaagcggtacgaatttatc

SEQ ID NO: 636937 - DNA, 75 bp, synthetic construct
  source 1..75: mol_type = other DNA
aaaacgtcaacatgatggaagtggcgatcgatgaagcctgcgtgcgcattatcgctaaacgtcagccgacggcga

SEQ ID NO: 636938 - DNA, 75 bp, synthetic construct
  source 1..75: mol_type = other DNA
atggacccgctggatattttaatccgctaccgtaaagtgcgccgtcatcgtgattttgacttgcgcaagtttgtt

SEQ ID NO: 636939 - DNA, 75 bp, synthetic construct
  source 1..75: mol_type = other DNA
cctgcccgcaccgtgctgcgcgcgctggatattgtgaagcgcgattatgaaaagaaattaacgcgcgatgatgag

SEQ ID NO: 636940 - DNA, 75 bp, synthetic construct
  source 1..75: mol_type = other DNA
caacgacggaaatgaaaaaatattgtagtgaaagttgtgccgaaaaaagaccagatggcacacgaactttaatta

SEQ ID NO: 636941 - DNA, 75 bp, synthetic construct
  source 1..75: mol_type = other DNA
ccgctatcgtaaagtgcgccgtcatcgtgatttcgatttgcgccgattcgttgaaaatcacttctggttaccgga

SEQ ID NO: 636942 - DNA, 75 bp, synthetic construct
  source 1..75: mol_type = other DNA
ccacccagttcatccccatcgatctgaatgccttcctgtttaaactggagagcgccatcgccaacatctcggcgc

SEQ ID NO: 636943 - DNA, 75 bp, synthetic construct
  source 1..75: mol_type = other DNA
atggaatatgccttctggatggacggtgcagaatcgttgatccctaatcaggcctatcgccatgttgtgcggatg

SEQ ID NO: 636944 - DNA, 75 bp, synthetic construct
  source 1..75: mol_type = other DNA
atggataaagaaaatagtagtgtttctaaaagatggttaatcacgtctggtgttgcggttattttactaacctta

SEQ ID NO: 636945 - DNA, 75 bp, synthetic construct
  source 1..75: mol_type = other DNA
cgaacggtgatggcctgggaggccggtcatgcgtcccccaataccaaaaagaactacggctacctgatctggcgt

SEQ ID NO: 636946 - DNA, 75 bp, synthetic construct
  source 1..75: mol_type = other DNA
attatgccgaaagaccgttttcgctatcagatggtgaatatgcatccggatacaaaagcctgtcatccttttggt

SEQ ID NO: 636947 - DNA, 75 bp, synthetic construct
  source 1..75: mol_type = other DNA
gcgacgcctgccaccacggaattgtgggaaaaagtcatggaaggcatccgtatcgaaaatgcgactcacgcgcca

SEQ ID NO: 636948 - DNA, 75 bp, synthetic construct
  source 1..75: mol_type = other DNA
tctatcagaacgcagaaatcaaatcgggcaaccttgaagtgctggtgaacacgtttatacctgattttcgtatca

SEQ ID NO: 636949 - DNA, 75 bp, synthetic construct
  source 1..75: mol_type = other DNA
acccgctgacgtactggctgaacatcatcacatcgctgggctgtctggaaggtggtgacctggatatcgcttatc

SEQ ID NO: 636950 - DNA, 75 bp, synthetic construct
  source 1..75: mol_type = other DNA
aaggtggccttaaagttggggacggcgttgttgttcttgagcaacagccagatgcaaaccagaaacaacaggcgt

SEQ ID NO: 636951 - DNA, 75 bp, synthetic construct
  source 1..75: mol_type = other DNA
gggaacaatcttgtgttctcaggtaatgaagggaaaatcgaactggtatccagtgtggagcagggagccggatat

SEQ ID NO: 636952 - DNA, 75 bp, synthetic construct
  source 1..75: mol_type = other DNA
ggcctgaacgcagaaatcagggataacgtccgctttggactggagtttgagaaatccgcctttggtaagtacaac

SEQ ID NO: 636953 - DNA, 75 bp, synthetic construct
  source 1..75: mol_type = other DNA
ctgacctccattctgaatccggaggcggtcatttttgccaaccccatcgcgcagggcgcatgtgcggccgacgcg

SEQ ID NO: 636954 - DNA, 75 bp, synthetic construct
  source 1..75: mol_type = other DNA
tgtcaattcaaagagattaaaagcacaagctttaaatttaattatatagattttaaaggtggaccaatgactgcg

SEQ ID NO: 636955 - DNA, 75 bp, synthetic construct
  source 1..75: mol_type = other DNA
tttcactgttttctatcgcatttatggcgacaacagcaaacgctgctgtttgcacacccgctatggaaaccgcag

SEQ ID NO: 636956 - DNA, 75 bp, synthetic construct
  source 1..75: mol_type = other DNA
ttccacgcgtatggtcgtgaaatggatagcgaatttgaatacatctttaccgatctgcgtaaaacccataactag

SEQ ID NO: 636957 - DNA, 75 bp, synthetic construct
  source 1..75: mol_type = other DNA
ttgttctggggcaagcaagcgctgccggatggcgcacatattttgattaatgacttccgtattggcagtcaggtt

SEQ ID NO: 636958 - DNA, 75 bp, synthetic construct
  source 1..75: mol_type = other DNA
gtggatgccaactgccatatccgattgcatcagcaagcgctgccggatggtgcacatattttgattaatgacttc

SEQ ID NO: 636959 - DNA, 75 bp, synthetic construct
  source 1..75: mol_type = other DNA
gcaactttctttgtccgggccataggtgattcgatgcaggatatggggttgcactccggtgatctgatggtggta

SEQ ID NO: 636960 - DNA, 75 bp, synthetic construct
  source 1..75: mol_type = other DNA
atgttattctgttttttttgtgggtgtttttttactttttgttttgtacttacgaatatatcttacacagaaaat

SEQ ID NO: 636961 - DNA, 75 bp, synthetic construct
  source 1..75: mol_type = other DNA
ccccctttaaaagaacaacacgaaatcgttcgtcgcgtcgagcaactcttcgcctacgccgacactattgaaaaa

SEQ ID NO: 636962 - DNA, 75 bp, synthetic construct
  source 1..75: mol_type = other DNA
tgcaaagtgctattgataaatttatctcctaccagaatggtgagattaatgtgtcagttggtgatgtaaataaaa

SEQ ID NO: 636963 - DNA, 75 bp, synthetic construct
  source 1..75: mol_type = other DNA
ttaaatataaccagaaagctaggagaaactacctacagcgtttaccttctgcatgggatattcctttattgccta

SEQ ID NO: 636964 - DNA, 75 bp, synthetic construct
  source 1..75: mol_type = other DNA
gcacctgctctgtgtgcagtaggtgcatggcttgtatctcgaacatccggccatgctgaggagttctttcatcgt

SEQ ID NO: 636965 - DNA, 75 bp, synthetic construct
  source 1..75: mol_type = other DNA
atgttactttttgtcgcccccgaacaggagccggtgcagtccactgccccgctgttcaccgaacgttgcccggca

SEQ ID NO: 636966 - DNA, 75 bp, synthetic construct
  source 1..75: mol_type = other DNA
cagctcaacggtaaaagaggtgcgattgacgttctggatgcagtccgccgcatactcggcggctacaccccgccg

SEQ ID NO: 636967 - DNA, 75 bp, synthetic construct
  source 1..75: mol_type = other DNA
atgaatgttctgcccgtccttgatgcggtgctggcccggttgcgcgagaagctgcctcagctgcaggttgagtac

SEQ ID NO: 636968 - DNA, 75 bp, synthetic construct
  source 1..75: mol_type = other DNA
atatgcgcgtctgctggacgttccttttgtttttgccaccaatggtgatggctttatcttccgtgatgccaccgc

SEQ ID NO: 636969 - DNA, 75 bp, synthetic construct
  source 1..75: mol_type = other DNA
ctgaagcagacattattaccaaatgtgttattccggcgattctccgtgccggatgggacaacaccacgcaaatcc

SEQ ID NO: 636970 - DNA, 75 bp, synthetic construct
  source 1..75: mol_type = other DNA
agtggacccagctcgacggcggatattgaacttatcaaggtggttggggtacatggcccggtgaaggcagtgtat

SEQ ID NO: 636971 - DNA, 75 bp, synthetic construct
  source 1..75: mol_type = other DNA
atgacgaagaacaggtaacaggcgttgatgaaccgcctgcgccaccataccaggttaccgataccgatgatgtcg

SEQ ID NO: 636972 - DNA, 75 bp, synthetic construct
  source 1..75: mol_type = other DNA
gatggcttccttgcgccttataaagttgtccgtgttgatattgatgttgatctgaaaggctggcgtcccgtcaga

SEQ ID NO: 636973 - DNA, 75 bp, synthetic construct
  source 1..75: mol_type = other DNA
gatcgaaacattctggttgaccaggcgaaaaataatgatttccagcccttcggggcggcaatgaccaaagtcagc

SEQ ID NO: 636974 - DNA, 75 bp, synthetic construct
  source 1..75: mol_type = other DNA
ccttacgctcacggttaacggtaggtgatagttataccgatggcgatatttttgatagtgtgaactttcgtggcc

SEQ ID NO: 636975 - DNA, 75 bp, synthetic construct
  source 1..75: mol_type = other DNA
acagcgcatgcacaccacttcaggatcgtttggctgacgcatcatctgagtttgatgttggtcagcaacatctgt

SEQ ID NO: 636976 - DNA, 75 bp, synthetic construct
  source 1..75: mol_type = other DNA
gcattcaaagaagctgcaacaaaaatgaaccagtccacacagacaatggccgaaaacttgtcgacgtcactttca

SEQ ID NO: 636977 - DNA, 75 bp, synthetic construct
  source 1..75: mol_type = other DNA
tggattcaccccgaacaagcctatcaccaagcccaatcgaacagtttacgagttgctgtgcaacccaaccaagtt

SEQ ID NO: 636978 - DNA, 75 bp, synthetic construct
  source 1..75: mol_type = other DNA
actatcccgctcacacccgagcaaagaatcagggaacttgaagcgcagcttgagctggcgaaccagaaagctgat

SEQ ID NO: 636979 - DNA, 75 bp, synthetic construct
  source 1..75: mol_type = other DNA
aaagaccagtgatgaacatgggtaatgactccaacttattgatagtgttttatgttcagataatgcccgatgact

SEQ ID NO: 636980 - DNA, 75 bp, synthetic construct
  source 1..75: mol_type = other DNA
cgactttaaaaaagccaccgaactgtttgccgatgagcgtttcgatggcattcccgaaaaagtcatggataccac

SEQ ID NO: 636981 - DNA, 75 bp, synthetic construct
  source 1..75: mol_type = other DNA
tgaaagatgctgccaacgctttgcgctggtgcgtaaatgaaatggaacgtcgttataagctgatgtccgccctag

SEQ ID NO: 636982 - DNA, 75 bp, synthetic construct
  source 1..75: mol_type = other DNA
cagcagcaatatcagcagccgcaacagcctgttgcaccacagccgcaatatcagcagccgcaacagccagttgcg

SEQ ID NO: 636983 - DNA, 75 bp, synthetic construct
  source 1..75: mol_type = other DNA
acagagggaaaaagaacacaggaaagacaaaaaaaagcagtcgtatgttagacatgatcatgaaagcagatgcgg

SEQ ID NO: 636984 - DNA, 75 bp, synthetic construct
  source 1..75: mol_type = other DNA
gagataagtatataaatcaaattcaaagttggactttgtgtgcagatagtttcgaaaacggaacatacagaaagc

SEQ ID NO: 636985 - DNA, 75 bp, synthetic construct
  source 1..75: mol_type = other DNA
gatgcttggacaatacaaacaggagaacgcgcgtctgcgcgaactgctgggttccccgctgcgtcaggatgagca

SEQ ID NO: 636986 - DNA, 75 bp, synthetic construct
  source 1..75: mol_type = other DNA
aaccgctctccacaaagggctacgccgccgcaaagtggtgctcaaccgcctgcgcgtgcgccgggagggcaatag

SEQ ID NO: 636987 - DNA, 75 bp, synthetic construct
  source 1..75: mol_type = other DNA
acctggcattcccttagccgtgattgaagcaaaagccaacaaacatgaaattggcaaagggatgcaacagggcat

SEQ ID NO: 636988 - DNA, 75 bp, synthetic construct
  source 1..75: mol_type = other DNA
ggagccggtagatacctttgcgcttgaacaaatggcgcgcctggtggaagcgcgtctggctgatttccgtattaa

SEQ ID NO: 636989 - DNA, 75 bp, synthetic construct
  source 1..75: mol_type = other DNA
gccgttaacccgcaaagagcgcgccgagaacgtgcgcaagcggaactacttcacaaaatactctgaagcagcgca

SEQ ID NO: 636990 - DNA, 75 bp, synthetic construct
  source 1..75: mol_type = other DNA
cgtcgctacagattcgccttattcaggcggtgctggtggcgctcggcattattattgccgacagccgcctgggga

SEQ ID NO: 636991 - DNA, 75 bp, synthetic construct
  source 1..75: mol_type = other DNA
atcaatacgtcggctgaacgtgacattattccgttacgctcacggttaacagtgggtgatagttataccgatggc

SEQ ID NO: 636992 - DNA, 75 bp, synthetic construct
  source 1..75: mol_type = other DNA
ccaaagaaatgaaatttacatggaatgaggctaaatcttatcttcgtgttgcttacgacgaacaagtaagcaaag

SEQ ID NO: 636993 - DNA, 75 bp, synthetic construct
  source 1..75: mol_type = other DNA
tacggaagaagaatttaacttttacgcagaggctcatttaccaaagattaaaagcattaccgacagaaatacagg

SEQ ID NO: 636994 - DNA, 75 bp, synthetic construct
  source 1..75: mol_type = other DNA
cgctataacattttatactacttttaattcgatacttatagggcatgtatttaatgcaaggcaagtaggtattta

SEQ ID NO: 636995 - DNA, 75 bp, synthetic construct
  source 1..75: mol_type = other DNA
atgacaaagagatcatgagctatgatgcgttcattaatgagttgcaaaataaatatagcgaagtgaggattcgca

SEQ ID NO: 636996 - DNA, 75 bp, synthetic construct
  source 1..75: mol_type = other DNA
gcgtcagccccgcaacgggaaaagtatacgcaagatcaacccaaaccttcacagcaacccaaaatatcctttgac

SEQ ID NO: 636997 - DNA, 75 bp, synthetic construct
  source 1..75: mol_type = other DNA
gccctacaacgaacttactcgcgatagcgttcgtgaaatggctaaaaccctttctgaaaaccaagtttcattcag

SEQ ID NO: 636998 - DNA, 75 bp, synthetic construct
  source 1..75: mol_type = other DNA
atgacgttaagagcatccatagcagtttcaacactcataacagagctgatggttcacttgagtcagtcgtacggg

SEQ ID NO: 636999 - DNA, 75 bp, synthetic construct
  source 1..75: mol_type = other DNA
ggaacgtgatggcgtagcgttagctgatcaggtaaaaagtatcgcctggcgggcaagaggagcaacgaagaaagg

SEQ ID NO: 637000 - DNA, 75 bp, synthetic construct
  source 1..75: mol_type = other DNA
ggccagtgaaacgcgtttacgcgagatggaacgttatgtcacttccgacactttctcgctacgtagtcgtttccg

SEQ ID NO: 637001 - DNA, 75 bp, synthetic construct
  source 1..75: mol_type = other DNA
tttaggtagagaaaaaatattaacaaaaatttatattgtcggtgccttattgcattgcacgtatgctcctttctt

SEQ ID NO: 637002 - DNA, 75 bp, synthetic construct
  source 1..75: mol_type = other DNA
ttttgattcagatttctaattatatttttcctttgcttacactgccatatttagtaagggtcttaggagcttctc

SEQ ID NO: 637003 - DNA, 75 bp, synthetic construct
  source 1..75: mol_type = other DNA
ttatatcccaattcagcaagttatttttccaaaaatgaataaggaaaatggcactgtagggcataaactatttaa

SEQ ID NO: 637004 - DNA, 75 bp, synthetic construct
  source 1..75: mol_type = other DNA
gcaggttccagcaagccgcagcaggaacgagaggctcagtcagagcttacgctaaccggctttaaggcaagggat

SEQ ID NO: 637005 - DNA, 75 bp, synthetic construct
  source 1..75: mol_type = other DNA
acagcaagctgtctttacctatggtgccagcaccatggctaccggtgccgaaagagagcagctcaaagcggatac

SEQ ID NO: 637006 - DNA, 75 bp, synthetic construct
  source 1..75: mol_type = other DNA
acaactgactttatccgacaattccattacttcatgaacaaaaatagccatttgaagcaaatgaaagtctctgat

SEQ ID NO: 637007 - DNA, 75 bp, synthetic construct
  source 1..75: mol_type = other DNA
gaattgccagtgtggtcgtcatgccttctgaaaacgaaacttttggcatggttctggtagaagctgcagtgtctg

SEQ ID NO: 637008 - DNA, 75 bp, synthetic construct
  source 1..75: mol_type = other DNA
tcccgaccggaacgtttccggatgatggctgcctgcgccagagaagatattgaataccggtttgatatcaacaaa

SEQ ID NO: 637009 - DNA, 75 bp, synthetic construct
  source 1..75: mol_type = other DNA
tcagacaaaaaacctacatcacccgtaagaccagaacgttttccctgaattatctgtgtgatttcattgttgtgc

SEQ ID NO: 637010 - DNA, 75 bp, synthetic construct
  source 1..75: mol_type = other DNA
gcatgatgatgtttttattgctgacaatgtttttcctgccgcccccgtatatcgggttgccagtctggtggttct

SEQ ID NO: 637011 - DNA, 75 bp, synthetic construct
  source 1..75: mol_type = other DNA
gaaggagaggttagtattccggctgtaaccatcaacgagaatgggcgcagcgtcaataaggatattcgtgttgag

SEQ ID NO: 637012 - DNA, 75 bp, synthetic construct
  source 1..75: mol_type = other DNA
tcgcccagaccgatcctgacgttatcagaatgccattgcttgctaatgaggaacttagccagttcacaccgcagc

SEQ ID NO: 637013 - DNA, 75 bp, synthetic construct
  source 1..75: mol_type = other DNA
attgtcgcgttcggctactggtcttgagcttcatgtaacaaccatgtatgaccaggaaagcaacaggactaaaat

SEQ ID NO: 637014 - DNA, 75 bp, synthetic construct
  source 1..75: mol_type = other DNA
tattgtcggacttagtcgtcttatatgtcgtcgccaatttagtattatccgacaaaaaacttatatcacacgaaa

SEQ ID NO: 637015 - DNA, 75 bp, synthetic construct
  source 1..75: mol_type = other DNA
gaagcagaagccgtaagactctacatcgacaggatcttcagtggcaacccctttctcatcacagaaaagcatctc

SEQ ID NO: 637016 - DNA, 75 bp, synthetic construct
  source 1..75: mol_type = other DNA
gaagatgcagatgctgcggcagaggctgaactggctcgtcagtttgcgcaaactcaacaacaacgttattccggc

SEQ ID NO: 637017 - DNA, 75 bp, synthetic construct
  source 1..75: mol_type = other DNA
gggagtgtttgctaaaagcaataccaaacggagaggatatatacattataactgaagatggtgattataaaagtg

SEQ ID NO: 637018 - DNA, 75 bp, synthetic construct
  source 1..75: mol_type = other DNA
ttgtagaactggcggtcaccgacaaccaggcggtgaaacagggcgatttgctgttccgcattgacccgcgcccgt

SEQ ID NO: 637019 - DNA, 75 bp, synthetic construct
  source 1..75: mol_type = other DNA
ggtcaaaatcatggtcgataaacctgacacggaaatgttccgcatcggcgcttcggcagtcgctaatcttgagcc

SEQ ID NO: 637020 - DNA, 75 bp, synthetic construct
  source 1..75: mol_type = other DNA
gcgatacgttacgccgtaccgaaccgctactgcgagaaggttttgtttctgcggaagaggttgaccgtgcaagaa

SEQ ID NO: 637021 - DNA, 75 bp, synthetic construct
  source 1..75: mol_type = other DNA
tgcacggttatctgccaagccgccagccgaacttcaccgagaagctggagctgccgagcctgcaagatttcggcg

SEQ ID NO: 637022 - DNA, 75 bp, synthetic construct
  source 1..75: mol_type = other DNA
agcctccctcgcggcgctggataagcaaattatgctcacccagcgtagcgttgacgcgcaacagtttggtgccga

SEQ ID NO: 637023 - DNA, 75 bp, synthetic construct
  source 1..75: mol_type = other DNA
ccgcgcagcgcgccgcagaagccgatcttaatgccgtattgttgcaggcgcagtcagccgccagcgccgtcagcg

SEQ ID NO: 637024 - DNA, 75 bp, synthetic construct
  source 1..75: mol_type = other DNA
gatagaagtcggcacgatgacgaccattctgaggtgtactggcaatagcggacactaccatttgttcttttttta

SEQ ID NO: 637025 - DNA, 75 bp, synthetic construct
  source 1..75: mol_type = other DNA
tgatttaccctgaagggcaaaaacaggtacaactggcggtaacaaataatgatgataaaagtagttaccttattc

SEQ ID NO: 637026 - DNA, 75 bp, synthetic construct
  source 1..75: mol_type = other DNA
gatagaagtcggcacgatgacgaccattcatgcctatactggcacccagtcactggtggatggcccacgtggtaa

SEQ ID NO: 637027 - DNA, 75 bp, synthetic construct
  source 1..75: mol_type = other DNA
acgttaccggctggctggggggctataacttccagtgggcgtggtcgagtgcgtgggcttgtgcgcaggatttga

SEQ ID NO: 637028 - DNA, 75 bp, synthetic construct
  source 1..75: mol_type = other DNA
cggttcatctaccgaagcggttggttgaacgcttacagcaactcgggcaaatcccggatgtttcgctaaaacagc

SEQ ID NO: 637029 - DNA, 75 bp, synthetic construct
  source 1..75: mol_type = other DNA
cgggggcggcaaatgtcacgaacggtgcaatagtgatccacacccaacgcctgaaatcagatccagggggtaatc

SEQ ID NO: 637030 - DNA, 75 bp, synthetic construct
  source 1..75: mol_type = other DNA
ctgacacttttgcctgcgtgttcagtggcgggtatgcgctttaaccctgcattcctgtcgggtgatacagaagct

SEQ ID NO: 637031 - DNA, 75 bp, synthetic construct
  source 1..75: mol_type = other DNA
ccgcgtcgcctctggcttcgtggctttcttatctggaaaaactgcacagtaaaactatcgatctcggccttgagc

SEQ ID NO: 637032 - DNA, 75 bp, synthetic construct
  source 1..75: mol_type = other DNA
atacgatgcctgttgctgttcagccaggagcttttctgccatccgcgagccagtgtgacaggtgatgaagtatgt

SEQ ID NO: 637033 - DNA, 75 bp, synthetic construct
  source 1..75: mol_type = other DNA
gctggggattttcctgcgcactcgcgatgcgcggcaaaaagtgctggcgggttctgcggtttccgccgggatctt

SEQ ID NO: 637034 - DNA, 75 bp, synthetic construct
  source 1..75: mol_type = other DNA
aagtcaacctacgggctttctgaacgggtatttatcgcctgcgactcacttaaacgtctctggcgccgggcgcat

SEQ ID NO: 637035 - DNA, 75 bp, synthetic construct
  source 1..75: mol_type = other DNA
cagcattgcgctggatcataccgactggttggggccagatcgcgaaagcattggtcgtgagaaagcagggatttt

SEQ ID NO: 637036 - DNA, 75 bp, synthetic construct
  source 1..75: mol_type = other DNA
agcgggctggaggtcagtgaaaatgccattcgcgacgggattgccagcgcaattttgccgggacgtttccagatt

SEQ ID NO: 637037 - DNA, 75 bp, synthetic construct
  source 1..75: mol_type = other DNA
ttagcacaggttctgcgtgaacatggcgacaatgatgcagctacaagagctgatgaggcactgcaaaaagcgctt

SEQ ID NO: 637038 - DNA, 75 bp, synthetic construct
  source 1..75: mol_type = other DNA
ccgcgacggccggtaaatatcgtactaatagttacaatcaaaataatccatatatctttcagggcgatttgattt

SEQ ID NO: 637039 - DNA, 75 bp, synthetic construct
  source 1..75: mol_type = other DNA
aagccagccgttaggagaaacaaatatactgataaaagcacctggggcaaacaatgtaaatgtggaacgcggaac

SEQ ID NO: 637040 - DNA, 75 bp, synthetic construct
  source 1..75: mol_type = other DNA
atgaagagcattaaccgggctatactgaattcatcaggaaaaagagactcattactcctgaatgaaaaaatgatg

SEQ ID NO: 637041 - DNA, 75 bp, synthetic construct
  source 1..75: mol_type = other DNA
cccccaggtcctaaagcaatatggtcaggattaacacgattaatgctatcaattaatgccatagaaatagcccag

SEQ ID NO: 637042 - DNA, 75 bp, synthetic construct
  source 1..75: mol_type = other DNA
catcccgttgattgccgcctcaatggccagcagtcagatggataagctgaatgcagcacttaatcagggacttga

SEQ ID NO: 637043 - DNA, 75 bp, synthetic construct
  source 1..75: mol_type = other DNA
cgaaatttattgcgggctggatcatcaacaagcggcttatgaaagcgagcgatgtgtttattgtgccgggaaagc

SEQ ID NO: 637044 - DNA, 75 bp, synthetic construct
  source 1..75: mol_type = other DNA
acatcgcttttaatttattatcatgctttttacagcatgatgtttatctttgtttttcatgagcttaaaaataaa

SEQ ID NO: 637045 - DNA, 75 bp, synthetic construct
  source 1..75: mol_type = other DNA
atgagtaacgtatcatacccgacaggcgttgaaaaccatggaggatcactccgtatatggtttcactataatggc

SEQ ID NO: 637046 - DNA, 75 bp, synthetic construct
  source 1..75: mol_type = other DNA
ctcatgggaagcggcacttaagcgtgcggggatcagacacagaaaggcgtaccagtcacgacacacctatgcgtg

SEQ ID NO: 637047 - DNA, 75 bp, synthetic construct
  source 1..75: mol_type = other DNA
ctgtattactttatcccactgctgctggcgctgatctgttacctgttgctggaaagccaggcgaagaagctacga

SEQ ID NO: 637048 - DNA, 75 bp, synthetic construct
  source 1..75: mol_type = other DNA
gtgtttatcgcgctactggctggggagcatacctccaaaggcacaattatcgccgccctgctcgcttaccgtgtg

SEQ ID NO: 637049 - DNA, 75 bp, synthetic construct
  source 1..75: mol_type = other DNA
cgtaattttaaccagacgctgcgcgataatctgaacggcattatcgccgcagattgtcagcaggtcgatgagacc

SEQ ID NO: 637050 - DNA, 75 bp, synthetic construct
  source 1..75: mol_type = other DNA
ccagcagttgaaaaacatgtggtcgctggcagtgtacaccggcgtgcgccacggtgaactggtgtcgctggcctg

SEQ ID NO: 637051 - DNA, 75 bp, synthetic construct
  source 1..75: mol_type = other DNA
tgctgaatcagaagctggcagattttgccccattgatgccccatagccacgagagcagtacgggaggattattaa

SEQ ID NO: 637052 - DNA, 75 bp, synthetic construct
  source 1..75: mol_type = other DNA
gtgaactggtctccctggcctgggaagatatcgatctgaaagcaggaacaattactatcaggcgcaattatacga

SEQ ID NO: 637053 - DNA, 75 bp, synthetic construct
  source 1..75: mol_type = other DNA
attgaagtgcagttacgtgagtacggccgttcggtgaaccatgagtgtacattcgtctttaatccgcatgtggtc

SEQ ID NO: 637054 - DNA, 75 bp, synthetic construct
  source 1..75: mol_type = other DNA
tccctgacactgccaagaacaggaagatcgccggagagctgcggacatctgtatgttttgctattcgtacaggaa

SEQ ID NO: 637055 - DNA, 75 bp, synthetic construct
  source 1..75: mol_type = other DNA
tcagcagttaaaaaatatgtggtcactggctgtttatacgggagttcgccacggggagttggtttctctggcatg

SEQ ID NO: 637056 - DNA, 75 bp, synthetic construct
  source 1..75: mol_type = other DNA
ctcgtccggcggtcgaagccggtgagaaactgggcttcctgcctggcgatttaagccagaaagtagacccgtatc

SEQ ID NO: 637057 - DNA, 75 bp, synthetic construct
  source 1..75: mol_type = other DNA
tcctgaaatcggcggcatgctgacttttggtattcctcctttcaaactggataaaacagtattaagccaacggcg

SEQ ID NO: 637058 - DNA, 75 bp, synthetic construct
  source 1..75: mol_type = other DNA
gtatcgagaaagtggcggtgattggcgctgggcctgcagggttagggtgtgctgatattctggcgcgcgcaggag

SEQ ID NO: 637059 - DNA, 75 bp, synthetic construct
  source 1..75: mol_type = other DNA
cgaaatctattgcgggctggatccactgcaagcgacttatgagagtgaccgctgtgtttattgtgccgaaaaagc

SEQ ID NO: 637060 - DNA, 75 bp, synthetic construct
  source 1..75: mol_type = other DNA
cgcggcgttgcttcctgttaacccacgcaaaggcgcagataaaattccagcgaatgagcggaaaaaacattttgg

SEQ ID NO: 637061 - DNA, 75 bp, synthetic construct
  source 1..75: mol_type = other DNA
ggatgcagttcatggcgcggatctggttgtcactgcaatggccgcaggaaggcaggcggcgcgcgatatgttaac

SEQ ID NO: 637062 - DNA, 75 bp, synthetic construct
  source 1..75: mol_type = other DNA
gtcgcgatatttcctttagcgatttaatggcggaatatgacgccgttttcctcggcgttgggacctacggcatga

SEQ ID NO: 637063 - DNA, 75 bp, synthetic construct
  source 1..75: mol_type = other DNA
tgacggcatctgagcagggtttttcgacagacagcgctcagcttacgcaactgcgcctgctggttgttgctgacc

SEQ ID NO: 637064 - DNA, 75 bp, synthetic construct
  source 1..75: mol_type = other DNA
tgctggcctcctcgctgatgggggcgctgtccggcgtttcatcggtaagcgtcgtctcagcaccgtctggcagat

SEQ ID NO: 637065 - DNA, 75 bp, synthetic construct
  source 1..75: mol_type = other DNA
gaaaggcttccaccaacaacaaagccaggtcatggctgggtattggataagcgaactccagacagcaaaaagtaa

SEQ ID NO: 637066 - DNA, 75 bp, synthetic construct
  source 1..75: mol_type = other DNA
tgggaagaagccgaacaaaaacgaaaagcggcgctggcggcagaacgcaagcgcgaagaacaggaacaaaaatga

SEQ ID NO: 637067 - DNA, 75 bp, synthetic construct
  source 1..75: mol_type = other DNA
tattctagtgccctcaaaggaaacccagagaacgcagacaccctaaaaatggttcaacgtcagtgggtaaatatg

SEQ ID NO: 637068 - DNA, 75 bp, synthetic construct
  source 1..75: mol_type = other DNA
tggggagaggaaaatggttcgatttgtttcgctgcttcaggagtaacactttaggggcaaaaatgcaggcgctga

SEQ ID NO: 637069 - DNA, 75 bp, synthetic construct
  source 1..75: mol_type = other DNA
cttattgtttgatgttggtgtggcagatgcactttccaaacgtctggtcagtagcgtacttaacgccgcagtggt

SEQ ID NO: 637070 - DNA, 75 bp, synthetic construct
  source 1..75: mol_type = other DNA
gcgcgctggcgtgggtacaacgctgcatgaaaggctatcgtctgccggagccaacgcgctgggcggacgcggtgg

SEQ ID NO: 637071 - DNA, 75 bp, synthetic construct
  source 1..75: mol_type = other DNA
catattggcgcgacgctggaaaaacagtgtgcacgcggtttgctggcgaaagatctctcttcatccattgtgatt

SEQ ID NO: 637072 - DNA, 75 bp, synthetic construct
  source 1..75: mol_type = other DNA
aacattgtgcatattgagacgcacaatggcgtggtgtttacccagcaggcatgtgtgacagagggggagcaagag

SEQ ID NO: 637073 - DNA, 75 bp, synthetic construct
  source 1..75: mol_type = other DNA
tcaggaggaagtaaaaccggcgctgggatgtactgaacctatttcactggcgctggcagcggcggttgctgcggc

SEQ ID NO: 637074 - DNA, 75 bp, synthetic construct
  source 1..75: mol_type = other DNA
atctattggtctgaaccaaatccagctgaatctgacctcccgttcgggccgtgcggcagtaaaacatcgcatgga

SEQ ID NO: 637075 - DNA, 75 bp, synthetic construct
  source 1..75: mol_type = other DNA
ggttatcgaacgtgctatttatatggtgaaacgcgcacgtaattacactgatgacgttgagttttcttgtgaaga

SEQ ID NO: 637076 - DNA, 75 bp, synthetic construct
  source 1..75: mol_type = other DNA
ggtacatgccggtgcacgccaggtggaaggtgcaatgaacgggatcggcgagcgtgccggtaactgttccctgga

SEQ ID NO: 637077 - DNA, 75 bp, synthetic construct
  source 1..75: mol_type = other DNA
atatcctgcttgagataacctcgctggtagataacgcattggatctggctgaaattacaggtaatgactccaact

SEQ ID NO: 637078 - DNA, 75 bp, synthetic construct
  source 1..75: mol_type = other DNA
agtgatcgaacgcgctatctatatggtgaaacgcgcccgtaattacaccgatgatgttgaattttcttgcgaaga

SEQ ID NO: 637079 - DNA, 75 bp, synthetic construct
  source 1..75: mol_type = other DNA
gtgcggcggtgaaacaccgcatggatgagatgggatataaagaaagtgaatataatttagacaacctgtacgacg

SEQ ID NO: 637080 - DNA, 75 bp, synthetic construct
  source 1..75: mol_type = other DNA
cgatttacatccataaccagttaccgcgtttgtctgcgctttgtgccgcaacgaccgcagcaatgggggccgccg

SEQ ID NO: 637081 - DNA, 75 bp, synthetic construct
  source 1..75: mol_type = other DNA
cttgctggatggctacggttcgccggatctcagcgatgagtttgtcaatgaactgacggcagctggcgtggtgtt

SEQ ID NO: 637082 - DNA, 75 bp, synthetic construct
  source 1..75: mol_type = other DNA
gcgacagtagggtccagtaatctcgatccgctcagtttgtcactgaatctcgaagcaaatgtcatcatccacgat

SEQ ID NO: 637083 - DNA, 75 bp, synthetic construct
  source 1..75: mol_type = other DNA
attggcgggctgaattactccgccgagcatatgtccagctacggtccagaggctaaacaggattacgcggtgcgc

SEQ ID NO: 637084 - DNA, 75 bp, synthetic construct
  source 1..75: mol_type = other DNA
gcagaatcaaaacactgaatacccggcgggtgaatgtcctgaagggtgaacagcgtcgtgtcagtggcagtgccc

SEQ ID NO: 637085 - DNA, 75 bp, synthetic construct
  source 1..75: mol_type = other DNA
ggggatcatccggcgaaaaaacgatcgtcccggacaccgccccccgtctcacgcagagaaaaaattcccgtttca

SEQ ID NO: 637086 - DNA, 75 bp, synthetic construct
  source 1..75: mol_type = other DNA
ccggacccgacgctgccggaggtcatggcagggcagacgatatcatcggactgtgacccgccccgggggggggat

SEQ ID NO: 637087 - DNA, 75 bp, synthetic construct
  source 1..75: mol_type = other DNA
acggatacccgtcattaaaacgcgtagtcggtgaaacggtagacgttattcactctgatgatgtgacctgcgtca

SEQ ID NO: 637088 - DNA, 75 bp, synthetic construct
  source 1..75: mol_type = other DNA
cagcgtcgggtcagtggtagtgcccgggtttccctcaagcgccgtatctggctcagggatgccggacagtgctgt

SEQ ID NO: 637089 - DNA, 75 bp, synthetic construct
  source 1..75: mol_type = other DNA
tgcacttcagttcggtggtggtaatgaggagacgaatctctggacgctctgtactgaatgccatcgccagaagtc

SEQ ID NO: 637090 - DNA, 75 bp, synthetic construct
  source 1..75: mol_type = other DNA
gcatcattcttgaaacgtttatctggtttgaggatgacgtcggcaaacagctgcatgcggcactactggcagcag

SEQ ID NO: 637091 - DNA, 75 bp, synthetic construct
  source 1..75: mol_type = other DNA
tcggtttatgtctggggttaaccacctattctgctttatctgcagatagcgttattaaaattagcgggcgcgttc

SEQ ID NO: 637092 - DNA, 75 bp, synthetic construct
  source 1..75: mol_type = other DNA
tgctcgtgaagcggcgggtggtatgccggacccgacactgccggaggtgtccggaggtagtggcagagcggacga

SEQ ID NO: 637093 - DNA, 75 bp, synthetic construct
  source 1..75: mol_type = other DNA
aggcgataaaccgcatcactgactataacgtcgaactggtgaagtacagcctgaccgccaaaggccacggtaaag

SEQ ID NO: 637094 - DNA, 75 bp, synthetic construct
  source 1..75: mol_type = other DNA
gatgaacgacgctccggcagtggcatctaccgactatatgaaactgttcgctgagcaggtccgtacttacgtacc

SEQ ID NO: 637095 - DNA, 75 bp, synthetic construct
  source 1..75: mol_type = other DNA
ggaagggatcaacgagctgggcgcaggttgttcctggctggcagcggcgacctcttacagcaccaacaatctgcc

SEQ ID NO: 637096 - DNA, 75 bp, synthetic construct
  source 1..75: mol_type = other DNA
aatgtgccggtatctgatgcagatatcgaaaaactgccgtacatcaccttcccggaaggttctgaagagcatacc

SEQ ID NO: 637097 - DNA, 75 bp, synthetic construct
  source 1..75: mol_type = other DNA
atgaaaacattccccgacacacacgtacgggcaacatcgcgctgcccgtctccggttgaaatctggcagacactg

SEQ ID NO: 637098 - DNA, 75 bp, synthetic construct
  source 1..75: mol_type = other DNA
gcgttgccagtagtcaatgtgatacagcataacctgagcagttatgagcaactactgcgtggcaagggaggttcg

SEQ ID NO: 637099 - DNA, 75 bp, synthetic construct
  source 1..75: mol_type = other DNA
gcaatgccggaaggtgctgaggaaggtatccgcaaaggtatctacaaactcgaaactctcgaaggtagcaaaggt

SEQ ID NO: 637100 - DNA, 75 bp, synthetic construct
  source 1..75: mol_type = other DNA
aacgccgcactgccaaacattccccgcgatgttatccgcgaggcgaaaagctggtacgacgaatcggttaaacgt

SEQ ID NO: 637101 - DNA, 75 bp, synthetic construct
  source 1..75: mol_type = other DNA
atgtccaatatactatggggcgacctggaaacctattgcgaaatccctatcaagaatggcacccatgcgtatgcc

SEQ ID NO: 637102 - DNA, 75 bp, synthetic construct
  source 1..75: mol_type = other DNA
ccgcgctgctctccactaaccccgaatgggcgcccgatatcccgctgaacgctggcggcttcgaggcgtaccact

SEQ ID NO: 637103 - DNA, 75 bp, synthetic construct
  source 1..75: mol_type = other DNA
ccagctgccatccgggcgcgcactctgttacccgtccccgtcaatcgagaagggaaacatcacctatcagggcgt

SEQ ID NO: 637104 - DNA, 75 bp, synthetic construct
  source 1..75: mol_type = other DNA
ggaatatcacctacatgggtgttaactcttattcgcgtaaatggcaacgactcaaaacctacggcggaaagctgg

SEQ ID NO: 637105 - DNA, 75 bp, synthetic construct
  source 1..75: mol_type = other DNA
aagtcgacctttggcctgtccgagcgtgtattcatcgcatgtgactcgctcaagcgcctgtggcgcagggcgcac

SEQ ID NO: 637106 - DNA, 75 bp, synthetic construct
  source 1..75: mol_type = other DNA
attgaggcaggcatttcactgtgtgatgcagtgaactttctcgtggaaaaatacgcactggtacgaactgaccag

SEQ ID NO: 637107 - DNA, 75 bp, synthetic construct
  source 1..75: mol_type = other DNA
tccgcctggagccagatgaaaaattacccggctatagcagtctgaaacccgtacctgacaagtatttcgatgagt

SEQ ID NO: 637108 - DNA, 75 bp, synthetic construct
  source 1..75: mol_type = other DNA
actggaaggcgctggcgaaaggaactgcaccggcggtgcctgctttgcctgatttgaagagtggcaaggtagtaa

SEQ ID NO: 637109 - DNA, 75 bp, synthetic construct
  source 1..75: mol_type = other DNA
cgggctgcagacattctgcgagcgcggcaggcaactggcttgttgcggcaaagccgtaacaacgtagtacgatga

SEQ ID NO: 637110 - DNA, 75 bp, synthetic construct
  source 1..75: mol_type = other DNA
tgagatgggatataaagaaagtgaatataatttagacaatctgtacaacgctttcctgaaactggcagataaaaa

SEQ ID NO: 637111 - DNA, 75 bp, synthetic construct
  source 1..75: mol_type = other DNA
gaaggcgcgatgaacgggatcggcgaacgcgccggtaactgttcgctggaagaagtcatcatggcgatcaaagtt

SEQ ID NO: 637112 - DNA, 75 bp, synthetic construct
  source 1..75: mol_type = other DNA
atgcgctgggtcaggtggatatcgtcgctaactacaacggtcgccgcttccacggcgtcggcctggccaccgata

SEQ ID NO: 637113 - DNA, 75 bp, synthetic construct
  source 1..75: mol_type = other DNA
gaacacatagacgccgggatcactctggtcgatgccgtcaattttctggtggagaagtacgaattgatccgtatc

SEQ ID NO: 637114 - DNA, 75 bp, synthetic construct
  source 1..75: mol_type = other DNA
gagcatatcaacgccgggatctcactgtgcgatgccgtaaattttatcgtggagaaatacgacctggtgcgcacc

SEQ ID NO: 637115 - DNA, 75 bp, synthetic construct
  source 1..75: mol_type = other DNA
gatttccagttactggcaacccggtgagtttgtcagcattaacctgctaccggatgtcgatctggataccttcct

SEQ ID NO: 637116 - DNA, 75 bp, synthetic construct
  source 1..75: mol_type = other DNA
tacactctgtgccgttgcttggcaaaaaagatgtcgggatgaattacaacaaggcacaccatggtctgcctggtt

SEQ ID NO: 637117 - DNA, 75 bp, synthetic construct
  source 1..75: mol_type = other DNA
cgcaggcggcgaagccctgcctgtcgccagtggctgtctggcaaatgctactgacacgcctgctggaacaacact

SEQ ID NO: 637118 - DNA, 75 bp, synthetic construct
  source 1..75: mol_type = other DNA
aacagtccccatatctgcgggcggtcgatattctgcgggcgcgacaggcaactggtttattaaaaagaaatcgta

SEQ ID NO: 637119 - DNA, 75 bp, synthetic construct
  source 1..75: mol_type = other DNA
cgcagatcaatctggtgactcaggatgttacctctgaagacctcgtcacgttatacggaacaacatttaactcca

SEQ ID NO: 637120 - DNA, 75 bp, synthetic construct
  source 1..75: mol_type = other DNA
agctgcataccggtttctgggtaaaatcctcaacaacgtgaagaagtggcagatcccgcgattcatcaacacgga

SEQ ID NO: 637121 - DNA, 75 bp, synthetic construct
  source 1..75: mol_type = other DNA
ccgaacatcgaagagctgaaaaaacgcatggagcaaagtcgattgcggaaattgcggggtgatctcgaccagttg

SEQ ID NO: 637122 - DNA, 75 bp, synthetic construct
  source 1..75: mol_type = other DNA
cgctcgacaaatacccccgcccgacagagaaaagccagtatgagggctcgatgtctctccattctgccctgtctg

SEQ ID NO: 637123 - DNA, 75 bp, synthetic construct
  source 1..75: mol_type = other DNA
caacgtgattgaatgcgatcatggcaaactgaaacggataatcggcgccacgctgggatttaaatccatgaagac

SEQ ID NO: 637124 - DNA, 75 bp, synthetic construct
  source 1..75: mol_type = other DNA
atcccactgttagtgggcggtacgatgttgtatttcaaggcattgctggaagggttgtcgccgctaccgtcggca

SEQ ID NO: 637125 - DNA, 75 bp, synthetic construct
  source 1..75: mol_type = other DNA
taacgtgggtgaagtcggtggatgaagccattgcggcgtgtggtgacgtaccagaaatcatggtgattggcggcg

SEQ ID NO: 637126 - DNA, 75 bp, synthetic construct
  source 1..75: mol_type = other DNA
gagagtacgattccagaacgttatgtgcaacaggcggaaattcgcttcaggctctcgtggcgacttcacactaca

SEQ ID NO: 637127 - DNA, 75 bp, synthetic construct
  source 1..75: mol_type = other DNA
cttacagcacccagtgatgaggtcgtaaccatcgcagagggtttggctcgtaaggattactcagtggaagacctg

SEQ ID NO: 637128 - DNA, 75 bp, synthetic construct
  source 1..75: mol_type = other DNA
tgggggcggccggatcgctgccaggggatttgcaacgcctctggcaggttaaaacgcctgacagttaccatctgg

SEQ ID NO: 637129 - DNA, 75 bp, synthetic construct
  source 1..75: mol_type = other DNA
tattaggggtagttttactccttttcataataatactgtaaacatcgcccctaatgaaaaaatatatttccctaa

SEQ ID NO: 637130 - DNA, 75 bp, synthetic construct
  source 1..75: mol_type = other DNA
acattgaactttaatgacttgtctggatacatatcaagtttatgggataatattaggggtagttttactcctttt

SEQ ID NO: 637131 - DNA, 75 bp, synthetic construct
  source 1..75: mol_type = other DNA
tgcctggagttgaattaaaaaaaggttgtgcagttggtgcattatcattagtgaaaaattcatttgaggaatatg

SEQ ID NO: 637132 - DNA, 75 bp, synthetic construct
  source 1..75: mol_type = other DNA
gagcgccagatgaccgaaggggagttaaaacggcttgcagaacggcaactgacgaaatgggcaaagcatgttggt

SEQ ID NO: 637133 - DNA, 75 bp, synthetic construct
  source 1..75: mol_type = other DNA
gcaggttcgagatctgatgaccaaatatcctggtcaattagagaatattcagtctggtatgaagtgggcagacga

SEQ ID NO: 637134 - DNA, 75 bp, synthetic construct
  source 1..75: mol_type = other DNA
cggcggagaccacgaccacagaacaaaccgcgaccacgactacggacgcgccggttgagttcaacacggagcaga

SEQ ID NO: 637135 - DNA, 75 bp, synthetic construct
  source 1..75: mol_type = other DNA
ggcggcaccaaaacgcccgttgggaccaacgccaattgagttgctgaaacaggagtatgaacgccggaaagcggc

SEQ ID NO: 637136 - DNA, 75 bp, synthetic construct
  source 1..75: mol_type = other DNA
ggcggcaactggcggcacccaaacgaccgtcgggaccaacgccaattgagttgctgaaacaggaatatgagcgcc

SEQ ID NO: 637137 - DNA, 75 bp, synthetic construct
  source 1..75: mol_type = other DNA
gagcgccagatgaccgaaggggagttaaaacggcttgcggaacggcagctgacgaaatgggcaaagcatgttggt

SEQ ID NO: 637138 - DNA, 75 bp, synthetic construct
  source 1..75: mol_type = other DNA
gaagaagggactttcaacgttaggaaaggggaagactttttatatcacgatgatgaggatgattggtatgggtct

SEQ ID NO: 637139 - DNA, 75 bp, synthetic construct
  source 1..75: mol_type = other DNA
gcaggtactgagccggggagaatggttaaccattctccgggttaaccggagtcagggggaggtgagttcagtcga

SEQ ID NO: 637140 - DNA, 75 bp, synthetic construct
  source 1..75: mol_type = other DNA
agctgcttttagctattgataaaagttttagtaaattaattagttacctcaacgcaatcccgccagaaatgactt

SEQ ID NO: 637141 - DNA, 75 bp, synthetic construct
  source 1..75: mol_type = other DNA
cggcgcggacgcgattaaatctggtctcgctgatcaactcgttaattacgcggacgctatcgcagtgatggccga

SEQ ID NO: 637142 - DNA, 75 bp, synthetic construct
  source 1..75: mol_type = other DNA
caggcgcagagccgcagaccttagtcgggcacgcgctggcgcggcaaatgggctggaaacccggtgataagctga

SEQ ID NO: 637143 - DNA, 75 bp, synthetic construct
  source 1..75: mol_type = other DNA
ggctattttactcagcaaagctgataaaaagttcaaatggggaaaaagtataaatattgcaaaaatagccagaga

SEQ ID NO: 637144 - DNA, 75 bp, synthetic construct
  source 1..75: mol_type = other DNA
cagctatgatggctggttacgtcttcttgttgttgaatggctatgagttaacagcaccaggcgatgaaatcgtgg

SEQ ID NO: 637145 - DNA, 75 bp, synthetic construct
  source 1..75: mol_type = other DNA
aacaccaactggctggaaggcgcagtcgaacgtaaccgcatgggtgagattatcattgatgcgaaatgcgaaacc

SEQ ID NO: 637146 - DNA, 75 bp, synthetic construct
  source 1..75: mol_type = other DNA
aaagcgttaaaccaaccgtggccacaacgaatgcaggagacgctccagcaaattttgcctcatcgtggtgcgtta

SEQ ID NO: 637147 - DNA, 75 bp, synthetic construct
  source 1..75: mol_type = other DNA
gttcaaccatgctggataaacgttatgtcatcactaacggtaatcagctggcgattcaaaatgatttactggaga

SEQ ID NO: 637148 - DNA, 75 bp, synthetic construct
  source 1..75: mol_type = other DNA
cacgcaataaattccccgctctgttagtggttgcgctggcgctggttgcccttgttttcgttatctggcgcgtag

SEQ ID NO: 637149 - DNA, 75 bp, synthetic construct
  source 1..75: mol_type = other DNA
gcagcggttgtacttaaaataacatctattgtggtaatgataatgatcagggcatcaattaactctgcgggtagt

SEQ ID NO: 637150 - DNA, 75 bp, synthetic construct
  source 1..75: mol_type = other DNA
cagccgattaaagatgcggttgaaaccgtttatcaacgtctggaaggctgggaagggaacggcggtttcgcgcag

SEQ ID NO: 637151 - DNA, 75 bp, synthetic construct
  source 1..75: mol_type = other DNA
atgattttggccaaggtgaacagcagcgagtggccggaggatcggctcatggcggcaatggatgcgtaccttgaa

SEQ ID NO: 637152 - DNA, 75 bp, synthetic construct
  source 1..75: mol_type = other DNA
aaacaccgcgtgcgctgtattttttatcgttttccataccggaagaaggtctgattcgcatgctgccggaggccc

SEQ ID NO: 637153 - DNA, 75 bp, synthetic construct
  source 1..75: mol_type = other DNA
ccgtgctcaacaatgctttatgtcgataaaattggtagacaatgcagatggttcaaccatgctggataaacgtta

SEQ ID NO: 637154 - DNA, 75 bp, synthetic construct
  source 1..75: mol_type = other DNA
ttgggaagaaatgacctgcttattcgcaccttccttagcagggatgaacttatcgataatgtctggaagagaagt

SEQ ID NO: 637155 - DNA, 75 bp, synthetic construct
  source 1..75: mol_type = other DNA
gcgacggcagaagaaaccgccgcgttatctgaatggaaaaaataccgggtcttgctgatgcgcgttgatacatca

SEQ ID NO: 637156 - DNA, 75 bp, synthetic construct
  source 1..75: mol_type = other DNA
agttttctggggacggataaccactatatgcttgaggctcttcgccgttaccctacccggtttcgtggtgtagcc

SEQ ID NO: 637157 - DNA, 75 bp, synthetic construct
  source 1..75: mol_type = other DNA
cgcgcatggaagggatgaacttccagcagatgattcagcaagcggtagagcgtaatggcggtgatgtgaaggccg

SEQ ID NO: 637158 - DNA, 75 bp, synthetic construct
  source 1..75: mol_type = other DNA
atggaagggatgaacttccagcagatgattcagcaagcggtagagcgtaatggtggtgatgtgaaggccgctgaa

SEQ ID NO: 637159 - DNA, 75 bp, synthetic construct
  source 1..75: mol_type = other DNA
cagcaggggcagagccaatcaacgttgccgcgcccggtcatttcttcgcgtattgatgaaccggcctatcaggga

SEQ ID NO: 637160 - DNA, 75 bp, synthetic construct
  source 1..75: mol_type = other DNA
ctgactgaaaagcccgaatggttgttaagattgcagttttcgcaactgaatcttgataatcttataccgcttaat

SEQ ID NO: 637161 - DNA, 75 bp, synthetic construct
  source 1..75: mol_type = other DNA
tgatactcctggtcgtactggttgccgggttatctgcgctggtgttgctggtgaatccgaatgatttccgcgact

SEQ ID NO: 637162 - DNA, 75 bp, synthetic construct
  source 1..75: mol_type = other DNA
aaactgattgatttcctgaaagaaacgccagtaccgctgcgggtttatggcaactggcagcaactcaattacagc

SEQ ID NO: 637163 - DNA, 75 bp, synthetic construct
  source 1..75: mol_type = other DNA
gaaacgcagcgttgcgaaagctgctgttgagctgattaagcctggccatcgcgtgatcctcgactccggaaccac

SEQ ID NO: 637164 - DNA, 75 bp, synthetic construct
  source 1..75: mol_type = other DNA
gtcgagttaattcaaccgggtcatcgcatcattcttgactcaggaaccactacttttgagattgctcgtttgatg

SEQ ID NO: 637165 - DNA, 75 bp, synthetic construct
  source 1..75: mol_type = other DNA
tcagaacgtgcgattcgtcagcaactgaccgatgatccacgttttgggccggataaagcagatgcattcgtgagc

SEQ ID NO: 637166 - DNA, 75 bp, synthetic construct
  source 1..75: mol_type = other DNA
gtggagcggatactgactggagcaccgttgattatcccaggctcactgatatggatgacaacgttgattcaatgg

SEQ ID NO: 637167 - DNA, 75 bp, synthetic construct
  source 1..75: mol_type = other DNA
ccttttcactggtatcgacgtagaagcacagggggcgagcaaccagaccgatttcaatattaatctgaccgaatg

SEQ ID NO: 637168 - DNA, 75 bp, synthetic construct
  source 1..75: mol_type = other DNA
gatcattgtcgatgaaggcattcctgcggatagtctggaagggctacgaaaggccggggttgaggtgattctggt

SEQ ID NO: 637169 - DNA, 75 bp, synthetic construct
  source 1..75: mol_type = other DNA
gatacctggattgagccacaggcagaactggtttacggtgctgtatccggtaaacagtttgcatggaaggaccag

SEQ ID NO: 637170 - DNA, 75 bp, synthetic construct
  source 1..75: mol_type = other DNA
gggaagtgctctgtatttcagcaggccgggcggggagttccataccctgacggcaggcagtatggatatcagcga

SEQ ID NO: 637171 - DNA, 75 bp, synthetic construct
  source 1..75: mol_type = other DNA
agtgtcctgaacaacacgtcatcagcggtggatttcatcatggatggcggagcggatatgtccggcagttttaca

SEQ ID NO: 637172 - DNA, 75 bp, synthetic construct
  source 1..75: mol_type = other DNA
cacttcgctcgttaaaaaataccggaagcatgacatattttacaggaagtgcagcgaataaagcattccatacac

SEQ ID NO: 637173 - DNA, 75 bp, synthetic construct
  source 1..75: mol_type = other DNA
aaaaacgtatcaaaggtgaaaaggacagccgtatgctgatgtccgttggcctgaatgcagaaatcagggacaacg

SEQ ID NO: 637174 - DNA, 75 bp, synthetic construct
  source 1..75: mol_type = other DNA
taccggtgtggatgtgggtaaatccttctcaggtaaggactggaaagtgacagcccgtgccggtctgggctacca

SEQ ID NO: 637175 - DNA, 75 bp, synthetic construct
  source 1..75: mol_type = other DNA
aaaactaaagatctacgtcagttcccgaacatcgataatgcctatatggagctgggcaccaaccgcgcagacgcc

SEQ ID NO: 637176 - DNA, 75 bp, synthetic construct
  source 1..75: mol_type = other DNA
gccagcgacggtagtgccggaatttgaaacatggtttaacagccaggagtcagggaggagtatatgcagcacaca

SEQ ID NO: 637177 - DNA, 75 bp, synthetic construct
  source 1..75: mol_type = other DNA
agcgaaagaaaagatattgatgcccctgggtattatcggactgagcatttagtgttcgctgagagtagtgttaag

SEQ ID NO: 637178 - DNA, 75 bp, synthetic construct
  source 1..75: mol_type = other DNA
cctgctggcgaacggagaaacggtactgcgtgatgcatccggagagaagcgtatcaagggcgagaaagacggccg

SEQ ID NO: 637179 - DNA, 75 bp, synthetic construct
  source 1..75: mol_type = other DNA
gtatgcttcagccctgtttgattccggggcctatatcgacctgattggtaagtatgttcaccatgataatgagta

SEQ ID NO: 637180 - DNA, 75 bp, synthetic construct
  source 1..75: mol_type = other DNA
atgaaaacagaactgaccctgaatgccctgcagtccatgaacgcacaggaatatgaagatatccgtgctgcggga

SEQ ID NO: 637181 - DNA, 75 bp, synthetic construct
  source 1..75: mol_type = other DNA
aaacgaagtcagtgggggcgggtctgtatgcttcagccctgtttgattccggggcctatatcgacctgattggta

SEQ ID NO: 637182 - DNA, 75 bp, synthetic construct
  source 1..75: mol_type = other DNA
tattgataccgccactccggcgaagttttattacaattgcgcacccgcgcatacgacgtatcccaccaaaaaagt

SEQ ID NO: 637183 - DNA, 75 bp, synthetic construct
  source 1..75: mol_type = other DNA
tgaccgtattattgttggcggcattatgccggtagcaaaaacggtttccgttggcggggaagtaggaaaacaact

SEQ ID NO: 637184 - DNA, 75 bp, synthetic construct
  source 1..75: mol_type = other DNA
tattgataccgctactccggcgaagttttattacaattgcgcacctgcgcatacgacgtatcccaccaaaaaagt

SEQ ID NO: 637185 - DNA, 75 bp, synthetic construct
  source 1..75: mol_type = other DNA
gggaactggtctccctggcctgggaagatatcgacctgaaggcgggaacaattaccgtcaggcgtaattatacga

SEQ ID NO: 637186 - DNA, 75 bp, synthetic construct
  source 1..75: mol_type = other DNA
gatcggaggtaatcgcctggtgtcagcagtaaccaaagaggaattgctgtatcttaggaaagatttgctaactgg

SEQ ID NO: 637187 - DNA, 75 bp, synthetic construct
  source 1..75: mol_type = other DNA
gctttgattatgctgcacagttccctgactcccccaaccttcaggcttttggggtaagtaaaaaagaaattacgg

SEQ ID NO: 637188 - DNA, 75 bp, synthetic construct
  source 1..75: mol_type = other DNA
gaatacgggggacggaacggtcattctggcacagaaggctgatgctgcaggcagggtccgggcattcagtgaagt

SEQ ID NO: 637189 - DNA, 75 bp, synthetic construct
  source 1..75: mol_type = other DNA
ggggatgtgaataacacgataaagcaggacagttcaggcaccgtcgtgccggcagttgccggtggtgacattgtg

SEQ ID NO: 637190 - DNA, 75 bp, synthetic construct
  source 1..75: mol_type = other DNA
ggaatcatcgtgaacgacgggcaccgtgttgactggatggtgaacggacttgcgggagacgcacttcataaaact

SEQ ID NO: 637191 - DNA, 75 bp, synthetic construct
  source 1..75: mol_type = other DNA
tggccaatgctatgaaatcggtcaccgcgacgccctgtatgttggtaaaggtgcaaaagaagttgtctttgccag

SEQ ID NO: 637192 - DNA, 75 bp, synthetic construct
  source 1..75: mol_type = other DNA
accgccgcacgattaacaaatattttgtgccggatgtgctggaaacctgccagttgagtatggggctgacggagc

SEQ ID NO: 637193 - DNA, 75 bp, synthetic construct
  source 1..75: mol_type = other DNA
ccgttgtcgggaataccctgccctggcagacctacagggattttgctgagaacaagggcgcgtttcatgccggtg

SEQ ID NO: 637194 - DNA, 75 bp, synthetic construct
  source 1..75: mol_type = other DNA
agtgccagctgttctggaacgtttgcgaactattgtagcggacccacgcgcattacctcgcagaaaagaatgggt

SEQ ID NO: 637195 - DNA, 75 bp, synthetic construct
  source 1..75: mol_type = other DNA
taactggacgctctttttctgggcatggtgggtggcctggtcgccgtttgtcggcctgttcctggcgcgtatctc

SEQ ID NO: 637196 - DNA, 75 bp, synthetic construct
  source 1..75: mol_type = other DNA
ggcactatcttcggtattgccactacgctcggtatcggtgtggtgcagcttaactatggcttgagcgtactgttt

SEQ ID NO: 637197 - DNA, 75 bp, synthetic construct
  source 1..75: mol_type = other DNA
ggcgagtttaaagacaatatcgccaactattttggtcagtggccggtggattataagagctgggcatggagctaa

SEQ ID NO: 637198 - DNA, 75 bp, synthetic construct
  source 1..75: mol_type = other DNA
atgagtgaaaaggtggtgttcagtcaactgagccgtaaattcattgatgagaacgatgccacgcccgccgaggcg

SEQ ID NO: 637199 - DNA, 75 bp, synthetic construct
  source 1..75: mol_type = other DNA
tggcgctcggatactttagctatcgttataatttgccactcaccatccgctcggcgctgtacccgatcttcggta

SEQ ID NO: 637200 - DNA, 75 bp, synthetic construct
  source 1..75: mol_type = other DNA
atctggatttgttggtgcatatgggcgaagaacaaaactttgtctatcagatttggccgcagcaatattcggtgc

SEQ ID NO: 637201 - DNA, 75 bp, synthetic construct
  source 1..75: mol_type = other DNA
gaaggggcgaaacacccgcaagggccaacgccaattgagcggctgaaacaggaatacgaacgccggaaggcagct

SEQ ID NO: 637202 - DNA, 75 bp, synthetic construct
  source 1..75: mol_type = other DNA
agcaggcggtgatctccccgagctggtcgatccattccggcgtcggaaccaaagcttatacctttatctggggca

SEQ ID NO: 637203 - DNA, 75 bp, synthetic construct
  source 1..75: mol_type = other DNA
ctgatttcagaaagcggggccaatccatttggcctgacggtggatgctgtgatggaggagtaccgccgctggcgt

SEQ ID NO: 637204 - DNA, 75 bp, synthetic construct
  source 1..75: mol_type = other DNA
gcgcgtgcaggtgatttaaaagggattaacgtgaaataccgttatgagttcacggatcacctgggcggcattgtc

SEQ ID NO: 637205 - DNA, 75 bp, synthetic construct
  source 1..75: mol_type = other DNA
gacgggagtgataaatacccgtggccacagcctgtgctgtaccacatctgcctcgaaatgcgtaccagagggatt

SEQ ID NO: 637206 - DNA, 75 bp, synthetic construct
  source 1..75: mol_type = other DNA
catggcctccggacctggctgagtttgtggcgctgatttcggaaagcggagccaatccatttggtctgacggtgg

SEQ ID NO: 637207 - DNA, 75 bp, synthetic construct
  source 1..75: mol_type = other DNA
aagcaacaaaaatagcttctcatatcattgataagcttcaatcattaaatttaaacccacatccattaaatgaag

SEQ ID NO: 637208 - DNA, 75 bp, synthetic construct
  source 1..75: mol_type = other DNA
ctgacaattgattttgataaccttaatcaaggtgcaatacacttaactgaatttggttactgtgtacataactat

SEQ ID NO: 637209 - DNA, 75 bp, synthetic construct
  source 1..75: mol_type = other DNA
cgtcaaattaccccggcggtactcctctcaacgaagagggcaaaacagaagtggaaatgaaccagacggggggaa

SEQ ID NO: 637210 - DNA, 75 bp, synthetic construct
  source 1..75: mol_type = other DNA
tactggtcctaacgggaataagattccttttattccaagtataaatgatttggcagcaaactgggtgaaagacgc

SEQ ID NO: 637211 - DNA, 75 bp, synthetic construct
  source 1..75: mol_type = other DNA
atgttagatatcagaatgtcacgaccatctgaagcagatgagatcatacaaatctggaagagttcagtggatgct

SEQ ID NO: 637212 - DNA, 75 bp, synthetic construct
  source 1..75: mol_type = other DNA
aacgcagaccgcttgtgaaaatggtgattatggtgcagacaaatggctgcaacaccatgaaaaaaatttggaaag

SEQ ID NO: 637213 - DNA, 75 bp, synthetic construct
  source 1..75: mol_type = other DNA
tctttgattccattgatgcaatgcacgaagattatatcaattttgcgaaagcatatatcagatatcaacactcat

SEQ ID NO: 637214 - DNA, 75 bp, synthetic construct
  source 1..75: mol_type = other DNA
attgataatattacgacaaaacgaccaggtaatggaataagtcctatgtattggtatgaactattgggtaaaaaa

SEQ ID NO: 637215 - DNA, 75 bp, synthetic construct
  source 1..75: mol_type = other DNA
ataaaaaataaaattagaaaaaaagaaattagacagttaataacatcatcattaatcgtgcctactgtaagtgga

SEQ ID NO: 637216 - DNA, 75 bp, synthetic construct
  source 1..75: mol_type = other DNA
aaaaaacttagcaatagtgaaatagagaggaagtttaaatttaaaattgcgaaatcagtaaaagagcttgaagag

SEQ ID NO: 637217 - DNA, 75 bp, synthetic construct
  source 1..75: mol_type = other DNA
agggcaaaataaaaacaacctgatctcaggtaaagctacggggcgtgtaggtaactacatcactgttgctgttga

SEQ ID NO: 637218 - DNA, 75 bp, synthetic construct
  source 1..75: mol_type = other DNA
aaaggggcaacactgatggaagtgttattggttgttggtgttattgttgtacttgcagcaagtgcatataaactc

SEQ ID NO: 637219 - DNA, 75 bp, synthetic construct
  source 1..75: mol_type = other DNA
tttattgaaaaacatttcactttagataaatctatgtctggcccagatcatttggcctcaatagaacctgatgaa

SEQ ID NO: 637220 - DNA, 75 bp, synthetic construct
  source 1..75: mol_type = other DNA
tcacatgatcggcatgtccatcaatctacagaccagcggcccgcattgggtgggggccgccagctatcttggcga

SEQ ID NO: 637221 - DNA, 75 bp, synthetic construct
  source 1..75: mol_type = other DNA
gtattcgaaatcaaccgtaacttccgtaatgaaggtatttctgttcgccataatcctgagttcacaatgatggaa

SEQ ID NO: 637222 - DNA, 75 bp, synthetic construct
  source 1..75: mol_type = other DNA
ccggtgaaccggtcgcagcggtgagtgcggaggaggcggcgtatgccgtggagcgcagggctcaggagcacgcta

SEQ ID NO: 637223 - DNA, 75 bp, synthetic construct
  source 1..75: mol_type = other DNA
attcaggagatccagggggatattttcgcggcggcggcaacttacgacggtgaagttattaccatttatccggac

SEQ ID NO: 637224 - DNA, 75 bp, synthetic construct
  source 1..75: mol_type = other DNA
taagcgatgccaaaccatgtagccggcacatgatcggcatgtccatcaatctgcagaccagcggcccgcattggg

SEQ ID NO: 637225 - DNA, 75 bp, synthetic construct
  source 1..75: mol_type = other DNA
taagcgatgccaaaccatgtagccgtcacatgatcggcatgtccatcaagctgcagaccagcggcccgcattggg

SEQ ID NO: 637226 - DNA, 75 bp, synthetic construct
  source 1..75: mol_type = other DNA
ggcaaacctatctggagagcattcagcttaatgataaacagggcgatcgcaccgatatcgctcttatccaacatc

SEQ ID NO: 637227 - DNA, 75 bp, synthetic construct
  source 1..75: mol_type = other DNA
atgaaatttttaccgctgctggcgctgctgattagcccgtttgtgagcgccctgaccctggacgatcttcagcaa

SEQ ID NO: 637228 - DNA, 75 bp, synthetic construct
  source 1..75: mol_type = other DNA
accgatatcgctcttatccagcatcaactgacgccagcgcaactgaccgatgacgaacgtcaacgttttgccgcc

SEQ ID NO: 637229 - DNA, 75 bp, synthetic construct
  source 1..75: mol_type = other DNA
cggtaacggctttagcgagctgaatgacgcggaagatcaggcgcagcgcttcctggatcaggttgccgcgaaaga

SEQ ID NO: 637230 - DNA, 75 bp, synthetic construct
  source 1..75: mol_type = other DNA
tgcaaaccgcatgactgtggctcgcaacgtatcgctgtgatgtggtccgagaaatctaatcagatgacggggctg

SEQ ID NO: 637231 - DNA, 75 bp, synthetic construct
  source 1..75: mol_type = other DNA
ccgcactggtcatcgccaccagtgcaatggcgcaggatgatttaaccattagcagccttgcaaagggcgaaacca

SEQ ID NO: 637232 - DNA, 75 bp, synthetic construct
  source 1..75: mol_type = other DNA
cagctgcagcaggaactggaagcgcagattaaccgtaaccccctggcgaaagccgatcgccagtacatcgataat

SEQ ID NO: 637233 - DNA, 75 bp, synthetic construct
  source 1..75: mol_type = other DNA
cggtgcgtaaggtctctgcttccgaagggcaggtgctggataaaattaaaggtctgatgggactggtctcgatcg

SEQ ID NO: 637234 - DNA, 75 bp, synthetic construct
  source 1..75: mol_type = other DNA
cgccgcaggggctggtgcatggcgccagtccgtggttgtacggcatggcgcgtaccgagctggaaaaagtggtga

SEQ ID NO: 637235 - DNA, 75 bp, synthetic construct
  source 1..75: mol_type = other DNA
gctgggatatttgctggcgcaactgttgggattaacggtgtttaatgccgccatttcactgcgtctgccggtgtt

SEQ ID NO: 637236 - DNA, 75 bp, synthetic construct
  source 1..75: mol_type = other DNA
agaagcgtttcgagcagtatttcctgccttatcattctctgggcatggtgcaaaatgcctcccgcgatgcggtga

SEQ ID NO: 637237 - DNA, 75 bp, synthetic construct
  source 1..75: mol_type = other DNA
gtcgagaaaaatccccaactggctgaaaagtggtatcaaaaagcgattgatgcagctaatacacagcgtcagcag

SEQ ID NO: 637238 - DNA, 72 bp, synthetic construct
  source 1..72: mol_type = other DNA
atgcaggatattcacgaagaaagcctgaacgagtcggttaagtcagagcagtcaccgcgggtggtgctctgg

SEQ ID NO: 637239 - DNA, 75 bp, synthetic construct
  source 1..75: mol_type = other DNA
cgacaactccacccgtacccgcttctcttatgcttccgcgcttaacctgctcggccttgcacaacaagatcttga

SEQ ID NO: 637240 - DNA, 75 bp, synthetic construct
  source 1..75: mol_type = other DNA
cgccctgatttctgtattggtcattataaggttgatgagatcattgattttactgaacctggtgatgcgatggga

SEQ ID NO: 637241 - DNA, 75 bp, synthetic construct
  source 1..75: mol_type = other DNA
cttggcgcgcgtgacgatgcgatgggaatgcagtatctgattcctggctggacgttcgataacaagcgcccgtgc

SEQ ID NO: 637242 - DNA, 75 bp, synthetic construct
  source 1..75: mol_type = other DNA
cgatgccaaaccatgtagccgtcacatgatcggcatgtccatcaacctgcagaccagcggcccgcattgggtggg

SEQ ID NO: 637243 - DNA, 75 bp, synthetic construct
  source 1..75: mol_type = other DNA
ctaccagtgccgtgcggcgggtggtggaaccgttcggattcctgatccgcattattgagtggtggcagaccggag

SEQ ID NO: 637244 - DNA, 75 bp, synthetic construct
  source 1..75: mol_type = other DNA
ccgtgcggcggggggtggagccgttcggctttctgatccgcattattgagtggtggcagaccggagagacaccgg

SEQ ID NO: 637245 - DNA, 75 bp, synthetic construct
  source 1..75: mol_type = other DNA
accgatatcgctcttacccaacatcaactgacgccagcgcaactgaccgatgacgaacgccaacgttttgccgcc

SEQ ID NO: 637246 - DNA, 75 bp, synthetic construct
  source 1..75: mol_type = other DNA
gcgcactctctggagattgttgtggctatctgtaaacatcttggcggcggtcaggtctatattcctcgtgggcag

SEQ ID NO: 637247 - DNA, 75 bp, synthetic construct
  source 1..75: mol_type = other DNA
tattcgaagacttccgggacgacaccgttctggaatatcttcacgattatcaggaaaaatatgtttatccggcgc

SEQ ID NO: 637248 - DNA, 75 bp, synthetic construct
  source 1..75: mol_type = other DNA
ctggaaacgggcttacagggttcgttgcataccgaggcggcggaattattaggtttgcacaacgtcgcgcaaata

SEQ ID NO: 637249 - DNA, 75 bp, synthetic construct
  source 1..75: mol_type = other DNA
ggcagcgcgtgggtattgcccgcgcgctggccgcgaatccgcagctgttgctgctggacgagccgttcggggcgc

SEQ ID NO: 637250 - DNA, 75 bp, synthetic construct
  source 1..75: mol_type = other DNA
aaaaaagttttctattaattctgatgggattgtatatacgttacaacgggctgcatgcaaaataaatgaaaagct

SEQ ID NO: 637251 - DNA, 75 bp, synthetic construct
  source 1..75: mol_type = other DNA
gtttaccagtaccgataaagccatcgcgccggagtcggtgctgatgcaggacggcgcattcagcctgagcgcccc

SEQ ID NO: 637252 - DNA, 75 bp, synthetic construct
  source 1..75: mol_type = other DNA
cgtcgtgactccattaacgtgcagaaactgattggtgcaacggatggtttcatcctgcgcccgttcctgtacggt

SEQ ID NO: 637253 - DNA, 75 bp, synthetic construct
  source 1..75: mol_type = other DNA
ccctgacgctgccaagcgtctgctacatggtgtacaaaaacgttaaccaggcggcgacgcagtattatccctcac

SEQ ID NO: 637254 - DNA, 75 bp, synthetic construct
  source 1..75: mol_type = other DNA
aaaaccggtaaatcgcaaaactaacgttttcaacgaacaggtgcgttatgcgttccacggtgctttgcaggatct

SEQ ID NO: 637255 - DNA, 75 bp, synthetic construct
  source 1..75: mol_type = other DNA
ttcctcttttgattttgcccgtcaggcattaattccattgccagagcacattcgccagttccccaggctgggacg

SEQ ID NO: 637256 - DNA, 75 bp, synthetic construct
  source 1..75: mol_type = other DNA
gaaaagcaaaccgttcgccacgtttttaacggtgatggttatcgccatctccctgacgctgcccagcgtttgtta

SEQ ID NO: 637257 - DNA, 75 bp, synthetic construct
  source 1..75: mol_type = other DNA
gaccgggctggtcgggcgcgtttcggcgatgatcggcgtattgatggtggcggcagtgttcctcgtcatcggtaa

SEQ ID NO: 637258 - DNA, 75 bp, synthetic construct
  source 1..75: mol_type = other DNA
gccgggggcagagcgcggggtggtttttcagaatgaagggctgctgccgtggcgtaatgtgcaggataacgtggc

SEQ ID NO: 637259 - DNA, 75 bp, synthetic construct
  source 1..75: mol_type = other DNA
attatttctactaggcggtaagtcatatcagcaaaacttaacacaatctaaaccgttatacatacgtaacactga

SEQ ID NO: 637260 - DNA, 75 bp, synthetic construct
  source 1..75: mol_type = other DNA
ccagaccattcaggccactgaccgccgctacgttgtcattctgttcgccgttttgctgacgctttcctgtttgct

SEQ ID NO: 637261 - DNA, 75 bp, synthetic construct
  source 1..75: mol_type = other DNA
ccggacggaagggattcgtttcatgccattgatgccgatggagaacaggatggtcttgctgatgaagtgctaatc

SEQ ID NO: 637262 - DNA, 75 bp, synthetic construct
  source 1..75: mol_type = other DNA
tccgaacaggagttttcgcttatggtcagtgctgaatcctttggtgaactcaggctgttcaggtatccggatgga

SEQ ID NO: 637263 - DNA, 75 bp, synthetic construct
  source 1..75: mol_type = other DNA
gtaacagggcgcccagagaacaaaagggatctggatgatattacttttgatttctttggtgaggcttacgatgcg

SEQ ID NO: 637264 - DNA, 75 bp, synthetic construct
  source 1..75: mol_type = other DNA
gctgggaagccaggtgaccctaatcggtattgtgttcccgctggttgtcggtctgatcagtgttctttttcagaa

SEQ ID NO: 637265 - DNA, 75 bp, synthetic construct
  source 1..75: mol_type = other DNA
caatggtcatctttatacggacactaaatctcaccatcctgaataccaccttatccgcaattgctgccatcatca

SEQ ID NO: 637266 - DNA, 75 bp, synthetic construct
  source 1..75: mol_type = other DNA
cttgttaaatttgatagctggttttgtgccttatcagcacggcagcattcaactggcgggcaagcgtattcaggg

SEQ ID NO: 637267 - DNA, 75 bp, synthetic construct
  source 1..75: mol_type = other DNA
ggcgcaatgtacaggacaacgtggcgttcggcctgcaattggcaggtatagagaaaatgcagcgactggaaatcg

SEQ ID NO: 637268 - DNA, 75 bp, synthetic construct
  source 1..75: mol_type = other DNA
aggctggtcgcgaaatgagcgatgaagagctgaaagaaaacccagccgttgagcaagaatgggacattcagtggg

SEQ ID NO: 637269 - DNA, 75 bp, synthetic construct
  source 1..75: mol_type = other DNA
tggtgatgggcaaatttaccgccgtattctcgatctcatctgggaaacactgaccgtcaaagacgcaaaagtgaa

SEQ ID NO: 637270 - DNA, 75 bp, synthetic construct
  source 1..75: mol_type = other DNA
acaacaaatcattataacaacataaacaaatcgcttaagtccaacaacaaaaatcatgacaaccaattagttagc

SEQ ID NO: 637271 - DNA, 75 bp, synthetic construct
  source 1..75: mol_type = other DNA
tataaagatccgagctataacgatgactttggtattgaaacgccctcagcgttagataactttactcaggccatc

SEQ ID NO: 637272 - DNA, 75 bp, synthetic construct
  source 1..75: mol_type = other DNA
gtgcactacggctttagcgggaagatcgcctgcaagcgtaataacggtgcttttttattaaatagcgcccaggca

SEQ ID NO: 637273 - DNA, 75 bp, synthetic construct
  source 1..75: mol_type = other DNA
ggaaaataatcatgcagcgcttatttcttttggttgccgtcatgttactgagcggatgcttaaccgccccgccta

SEQ ID NO: 637274 - DNA, 75 bp, synthetic construct
  source 1..75: mol_type = other DNA
atacatctgaagggtgttttaatattggtattctgctcagtaaccgggagtttactgaggacgccatcaggatga

SEQ ID NO: 637275 - DNA, 75 bp, synthetic construct
  source 1..75: mol_type = other DNA
ggaaatatgagccttatctgctcaatgataattccattctttcccgaattgcccttattgaacttggtattttcg

SEQ ID NO: 637276 - DNA, 75 bp, synthetic construct
  source 1..75: mol_type = other DNA
gaaaatatgaaccttatcttcttaatgataattccatactttccagaattgcccttcttgaacttggtattatcg

SEQ ID NO: 637277 - DNA, 75 bp, synthetic construct
  source 1..75: mol_type = other DNA
cttattcgcgtaccggttaaatcccatactaaccatggacgtaatgcagaatattatgcctgggtacaaaatcat

SEQ ID NO: 637278 - DNA, 75 bp, synthetic construct
  source 1..75: mol_type = other DNA
tgaagcgctggcagaaaaactcggcgtgcggagcaatgtgcatttcttctccggtcgcaatgatgtgtcagaatt

SEQ ID NO: 637279 - DNA, 75 bp, synthetic construct
  source 1..75: mol_type = other DNA
gctcatatcccggatgacagaggaagagcgtagtaaccttatcgatgcactcaaaacgtcctcaggcgtaaaata

SEQ ID NO: 637280 - DNA, 75 bp, synthetic construct
  source 1..75: mol_type = other DNA
tactcatgcttatttctccattaagttgggctggaactatgacctttcagttccgcaacccaaactttggtggca

SEQ ID NO: 637281 - DNA, 75 bp, synthetic construct
  source 1..75: mol_type = other DNA
aatggcggcggcggatttattacttcatcctgcctaccaggaagcggcgggaattgtgctgctggaagcgataac

SEQ ID NO: 637282 - DNA, 75 bp, synthetic construct
  source 1..75: mol_type = other DNA
cgctggattacctgttttgacaaccgcagtatgtggatacgcgcattatattgcggatgctaattgtggagcggt

SEQ ID NO: 637283 - DNA, 75 bp, synthetic construct
  source 1..75: mol_type = other DNA
gcaagccagattgggggaagcatacctgaatggaaactacaatcaaacggtgaattacgctcagtcttttaaatg

SEQ ID NO: 637284 - DNA, 75 bp, synthetic construct
  source 1..75: mol_type = other DNA
cgtattcggcaggcgaatcgctgcatcgtatacccacaggaatgcaacagcccgcgtgaggaatggcgtcgctgg

SEQ ID NO: 637285 - DNA, 75 bp, synthetic construct
  source 1..75: mol_type = other DNA
atcttaatgggtatggcgtaccgtttgattatgccaaagccttaagcctttttgagcaagctgacttagcgggag

SEQ ID NO: 637286 - DNA, 75 bp, synthetic construct
  source 1..75: mol_type = other DNA
catatcaacagaatggatcacatcactgcccccagttttgtggctctgggtgatatctattctctgggattgggg

SEQ ID NO: 637287 - DNA, 75 bp, synthetic construct
  source 1..75: mol_type = other DNA
gacacatacgacacatacgacacatacggcagccgaaaataaacctgcggataatacacctgcgtcaggtaatag

SEQ ID NO: 637288 - DNA, 75 bp, synthetic construct
  source 1..75: mol_type = other DNA
tcagcgagcaagagttggctagcttacaggcccttgatcctgacggtaaaaacaaatttgtatttactggaggcc

SEQ ID NO: 637289 - DNA, 75 bp, synthetic construct
  source 1..75: mol_type = other DNA
gttttgccaccgaaattaaaaatgcggttattgaagcggaagccacgattggtccgcaatgctttattgccgact

SEQ ID NO: 637290 - DNA, 75 bp, synthetic construct
  source 1..75: mol_type = other DNA
ttgagatggccgatccgatggtcgcgcagcgttcgacggggtatctggtaggggggattagcccactggggcaga

SEQ ID NO: 637291 - DNA, 75 bp, synthetic construct
  source 1..75: mol_type = other DNA
gcaggggaacagttatatttctgattttaccagtaatcccgaaggtgcattaagcagccaggctaaaaatctgtt

SEQ ID NO: 637292 - DNA, 75 bp, synthetic construct
  source 1..75: mol_type = other DNA
atttggctaacgcattacaggcacagtcgttaaaaatgcaggcgataaaaatgcagtatgatgtctggaatagta

SEQ ID NO: 637293 - DNA, 75 bp, synthetic construct
  source 1..75: mol_type = other DNA
gcccccgcacaagaatttgccactatttatgtttccggcggcaagcgcggactggatatcgaactggcggcaagc

SEQ ID NO: 637294 - DNA, 75 bp, synthetic construct
  source 1..75: mol_type = other DNA
gcggtgaatggcgatatgaaacacctggccgtcgcagtaacgccggtcgcaggtcaactggaccttaaaaaggtc

SEQ ID NO: 637295 - DNA, 75 bp, synthetic construct
  source 1..75: mol_type = other DNA
gactggatatcgaactggcggcaggcgatctggcaaagatcctcgatgccaaatttgctgatatcgcccgccgcg

SEQ ID NO: 637296 - DNA, 75 bp, synthetic construct
  source 1..75: mol_type = other DNA
gcgcgtggcgaaactggcaggcggcgttgcagttatcaaagttggtgctgctaccgaagttgaaatgaaagagaa

SEQ ID NO: 637297 - DNA, 75 bp, synthetic construct
  source 1..75: mol_type = other DNA
tgagctgaatgtctacaaacttatccgtacccattatctggcgcagtttttgccggatcaggaatgggatgcgac

SEQ ID NO: 637298 - DNA, 75 bp, synthetic construct
  source 1..75: mol_type = other DNA
tttgccagaaaaccggacaggcgacggtggcagaggttgagaccaaaagggaaacggagtctgctccgctggcat

SEQ ID NO: 637299 - DNA, 75 bp, synthetic construct
  source 1..75: mol_type = other DNA
gcgtcaaaaaaataaattatccggtgctgtatgaatccggaataacccctccgttatgtgaagtcagtgtgccag

SEQ ID NO: 637300 - DNA, 75 bp, synthetic construct
  source 1..75: mol_type = other DNA
tgctggcttatgtcacgaaccgggcaatcatgaaacgccttgacgatgtttgtggcaaagcaggatggcgcaatg

SEQ ID NO: 637301 - DNA, 75 bp, synthetic construct
  source 1..75: mol_type = other DNA
gcgggtgaccgcctcgttgcagcatcaggggatcatttttcaggctcactggcgacctgcctcgcagtattgtga

SEQ ID NO: 637302 - DNA, 75 bp, synthetic construct
  source 1..75: mol_type = other DNA
cggtatgaacatgacgcgtctgtttaccctcaaagcccgggaactggggtttggtgggatattgtcggtcggacg

SEQ ID NO: 637303 - DNA, 75 bp, synthetic construct
  source 1..75: mol_type = other DNA
acctatcctgattctgtttcggcctggactactcaattgcttggcttttctgaacagctcaatgaggccagcaaa

SEQ ID NO: 637304 - DNA, 75 bp, synthetic construct
  source 1..75: mol_type = other DNA
tgtttatcacaatgaagtcattaaacctgcgctggtggggctgctggggccgtggatttccggtgggattgagtt

SEQ ID NO: 637305 - DNA, 75 bp, synthetic construct
  source 1..75: mol_type = other DNA
atcaggaacatcagtacaatattgccgttgccggacgtcgccaaagcgccactggcagcacaagacattaccagt

SEQ ID NO: 637306 - DNA, 75 bp, synthetic construct
  source 1..75: mol_type = other DNA
taaggctgatgaagtggtgattgccactgacgccgatcgtgaaggcgaaattatcgcaagggaactgctggatta

SEQ ID NO: 637307 - DNA, 75 bp, synthetic construct
  source 1..75: mol_type = other DNA
gaaagaatggtgatttctggggatgtattcgttatccggagtgtagcggtattgttgcagggaaaaatggcggga

SEQ ID NO: 637308 - DNA, 75 bp, synthetic construct
  source 1..75: mol_type = other DNA
tgttgaggggatggggaatgtttccattccgcaatctctaacggacgcattgacggcgctaaaacttgatgctct

SEQ ID NO: 637309 - DNA, 75 bp, synthetic construct
  source 1..75: mol_type = other DNA
aagattgattccgaatgggtaaccaaatgggatgctgctgaaaacacgcaggtagaagccgtcaaaggtggtcgt

SEQ ID NO: 637310 - DNA, 75 bp, synthetic construct
  source 1..75: mol_type = other DNA
ttaagctggaaagcccaaaaatcacccgtaaccttaccactgcatggtttgcaaagcgtgttgatgagcgatggg

SEQ ID NO: 637311 - DNA, 75 bp, synthetic construct
  source 1..75: mol_type = other DNA
tttagcggggtgtagtagtcaggctccgcaaccgttgaaaaagggcgaaaaagcgatagatgtggcgagcgtcgt

SEQ ID NO: 637312 - DNA, 75 bp, synthetic construct
  source 1..75: mol_type = other DNA
gtgaaagaccgcgatgcctgggcgaaagatctcgccaccacctttgaaagtcaggggctggcaccgacgctggaa

SEQ ID NO: 637313 - DNA, 75 bp, synthetic construct
  source 1..75: mol_type = other DNA
cgagtgcatggttaccgacctgccgaaaaatgatgcagctgacttaggcgctgctggcggtatgggcggcatggg

SEQ ID NO: 637314 - DNA, 75 bp, synthetic construct
  source 1..75: mol_type = other DNA
aagaccagaacgtgggtatcaaagttgcactgcgtgcaatggaagctccgctgcgtcagatcgtcctgaactgcg

SEQ ID NO: 637315 - DNA, 75 bp, synthetic construct
  source 1..75: mol_type = other DNA
tatgcagtttgaccgcggctacctgtctccttacttcatcaacaagccggaaactggcgcagtagaactggaaag

SEQ ID NO: 637316 - DNA, 75 bp, synthetic construct
  source 1..75: mol_type = other DNA
ttgtcgatgccgtttcccgcgctattgccaatttggaagcgaaaaagccgcaacagattgtgcacgccccagctc

SEQ ID NO: 637317 - DNA, 75 bp, synthetic construct
  source 1..75: mol_type = other DNA
tcatcttgctgctggtcagcagtgactttatcgcttctgattattgctatcaggtagaaatgaccaacgctctgg

SEQ ID NO: 637318 - DNA, 75 bp, synthetic construct
  source 1..75: mol_type = other DNA
tactggaaagaaaatactcgcaaaaggatagctgcatgtgccggagagttccagccatacggagctatcccattg

SEQ ID NO: 637319 - DNA, 75 bp, synthetic construct
  source 1..75: mol_type = other DNA
tatcacaactacctttatctcttagtcgtaatgttcgtattgaaaaaagggccgagctacgagagttaaatcata

SEQ ID NO: 637320 - DNA, 75 bp, synthetic construct
  source 1..75: mol_type = other DNA
agaatatattagaatgagagataatagtattcaggcgaaatatatttgtcataatattctttcagaacagtttgt

SEQ ID NO: 637321 - DNA, 75 bp, synthetic construct
  source 1..75: mol_type = other DNA
gcaaacttacattcacttgctgcaagaacaataattgacttaatattgaatagatttcctgacagttcctttgca

SEQ ID NO: 637322 - DNA, 75 bp, synthetic construct
  source 1..75: mol_type = other DNA
ccattatggaaacggtctacgtcctctccggcaaacagatttataaagatatgactaagttctggggcaagttgt

SEQ ID NO: 637323 - DNA, 75 bp, synthetic construct
  source 1..75: mol_type = other DNA
aaggtcgtgacttcgccttcgctaaacgctcctttgctatcgctgccagcttcggtatggctgctgttctgtctg

SEQ ID NO: 637324 - DNA, 75 bp, synthetic construct
  source 1..75: mol_type = other DNA
ggtaagctggtggcgttctacgacgataacggcatctctatcgatggtcacgtcgagggatggttcaccgacgac

SEQ ID NO: 637325 - DNA, 75 bp, synthetic construct
  source 1..75: mol_type = other DNA
gccatgcgtattgggtggttgaataccacggcgaagtggtcggcggcggcggaattgcgccattaaccgggagtg

SEQ ID NO: 637326 - DNA, 75 bp, synthetic construct
  source 1..75: mol_type = other DNA
gtcagcgggtagggattgcccgcgcgctggcggcgaatccccagctgttattactcgacgaaccgtttggcgcgc

SEQ ID NO: 637327 - DNA, 75 bp, synthetic construct
  source 1..75: mol_type = other DNA
acgctcggtatggcgttcctgttggccattatggaaacggtctacgtcctctccggcaaacagatttataaagat

SEQ ID NO: 637328 - DNA, 75 bp, synthetic construct
  source 1..75: mol_type = other DNA
atgggcacgcagcattccaattatcattatatccgctatagtcctcttactcgttattaataatcgtaacaatac

SEQ ID NO: 637329 - DNA, 75 bp, synthetic construct
  source 1..75: mol_type = other DNA
tttgttagttgcagaacacaataggctaagaggggcattggagttttctaacgtacatctacataatgagataat

SEQ ID NO: 637330 - DNA, 75 bp, synthetic construct
  source 1..75: mol_type = other DNA
gctatagtttgcttattgtcactaattttacgtggcagacaagaaaattataatataaaaaaccttattcttccc

SEQ ID NO: 637331 - DNA, 75 bp, synthetic construct
  source 1..75: mol_type = other DNA
gctttgtgccgtataccgcgacgttcctgatgtttgttgaatacgcccgtaacgccgcgcggatggcggcactga

SEQ ID NO: 637332 - DNA, 75 bp, synthetic construct
  source 1..75: mol_type = other DNA
aaaaagcgcagcagagctggaatgagaagtttgccgcctataaaaaggctcatccgcaactggcagaagagttta

SEQ ID NO: 637333 - DNA, 75 bp, synthetic construct
  source 1..75: mol_type = other DNA
tataccaatgctaatagcgtgacttccctaggtgcaagactggcaatgtacgaaattggtttaaatatattcata

SEQ ID NO: 637334 - DNA, 75 bp, synthetic construct
  source 1..75: mol_type = other DNA
cgcgaaggttaacgaactggaagagctgctgccgttattgatgaaagacaagcaactggccaaaggcgtgtcgca

SEQ ID NO: 637335 - DNA, 75 bp, synthetic construct
  source 1..75: mol_type = other DNA
tttcacaaatttttattgccattgaagtagataagcttatcgacggccccacccgcgatgccaagctgcaacgca

SEQ ID NO: 637336 - DNA, 75 bp, synthetic construct
  source 1..75: mol_type = other DNA
atatgatcgctactcttctttctgacggcgcgtcagttgctgaagtcacccaggataacagcgacgaatacggtg

SEQ ID NO: 637337 - DNA, 75 bp, synthetic construct
  source 1..75: mol_type = other DNA
gatgatggatcgcgccattgaactggctgccgatcacggtattggtctggtggcgttgcgtaatgccaaccactg

SEQ ID NO: 637338 - DNA, 75 bp, synthetic construct
  source 1..75: mol_type = other DNA
cgagattttgaatgcaaatttatggtttgctgagaatggtggaccatatctgtgctatgagtcaggagcacaatc

SEQ ID NO: 637339 - DNA, 75 bp, synthetic construct
  source 1..75: mol_type = other DNA
agtggacaagcttatcgacggtcccacccgcgatgccaagctgcaacgcatcatggattacgttactagtgccga

SEQ ID NO: 637340 - DNA, 75 bp, synthetic construct
  source 1..75: mol_type = other DNA
acgcgccgatgaaaaccaggccattcgcttacccggccacgaatttaccaccctgctggcagaaaaccgccgtaa

SEQ ID NO: 637341 - DNA, 75 bp, synthetic construct
  source 1..75: mol_type = other DNA
cagatttagattttctacaacattgcagcgaagaacagttggcaaacttcgcccgattacttactcataacgata

SEQ ID NO: 637342 - DNA, 75 bp, synthetic construct
  source 1..75: mol_type = other DNA
tggaagaatatggacgaggaacataaacaggagtttctgcacgcggtcgatgcgagggtgaatgagctggaagag

SEQ ID NO: 637343 - DNA, 75 bp, synthetic construct
  source 1..75: mol_type = other DNA
tttgctcgatgtttcaaaacgattgaagctgaaagccgacaaagagatgtctacgtttgagattgagcaacagtt

SEQ ID NO: 637344 - DNA, 75 bp, synthetic construct
  source 1..75: mol_type = other DNA
gcggcgaatcacgggattggtctggtcgcattacgcaatgctaaccactggatgcgcggcggcagctacggttgg

SEQ ID NO: 637345 - DNA, 75 bp, synthetic construct
  source 1..75: mol_type = other DNA
tgaacagtgggacgcccagcgttcgatcggtaacctgacagcgaaaaagatgatggatcgcgccattgaactggc

SEQ ID NO: 637346 - DNA, 75 bp, synthetic construct
  source 1..75: mol_type = other DNA
tcgatggaaggacatcccgagcaacatcgccgcaactggcagctgattgccggagaattacagcattttggcggt

SEQ ID NO: 637347 - DNA, 75 bp, synthetic construct
  source 1..75: mol_type = other DNA
gtatcaaccacaatgggatatgtggagatgaatctggagactgctgcacaggcactggagcatgagctggaggtg

SEQ ID NO: 637348 - DNA, 75 bp, synthetic construct
  source 1..75: mol_type = other DNA
gtgatggaatgcaggaacgatttaggaggctctatgaaatctatttaaaaaatgaaaaagttcaccctatcacac

SEQ ID NO: 637349 - DNA, 75 bp, synthetic construct
  source 1..75: mol_type = other DNA
aacgggtgaagagcctgctgaacaattaaattattctggatgtgacttgtcagatctaagtcttgcagggctgaa

SEQ ID NO: 637350 - DNA, 75 bp, synthetic construct
  source 1..75: mol_type = other DNA
atgaataatattaatcaatcggaaaacattaatattcagttaaataaagcatcccaaacaaatgtcgttgatgag

SEQ ID NO: 637351 - DNA, 75 bp, synthetic construct
  source 1..75: mol_type = other DNA
gatggctctggtaagccagactggagtgattttaataatgcatataactggattttactgtcatcatcggatgat

SEQ ID NO: 637352 - DNA, 75 bp, synthetic construct
  source 1..75: mol_type = other DNA
gcgcatcgtttattggttcttcatttaaagaaacacctccagacctgaaagatgcacagttggcgggggctatta

SEQ ID NO: 637353 - DNA, 75 bp, synthetic construct
  source 1..75: mol_type = other DNA
gattatggggagtcatgtgttgaaggatatgtctccaagaaaacaggctgagatattattttgtttaggcggtgt

SEQ ID NO: 637354 - DNA, 75 bp, synthetic construct
  source 1..75: mol_type = other DNA
attttatgacagactggtggtctaaatatcctccgggagatatgagagatggccctgcatttgaaaatatgaacg

SEQ ID NO: 637355 - DNA, 75 bp, synthetic construct
  source 1..75: mol_type = other DNA
aatgtgcaggattagtaatccataacttatcaaaagatggcggagacaaaatactgtgctccactgatggagtta

SEQ ID NO: 637356 - DNA, 75 bp, synthetic construct
  source 1..75: mol_type = other DNA
cttaatcatgcagttgttgaaaaatctacggatgtatgtagctatatgcaggatgtaatacgtattggtatggaa

SEQ ID NO: 637357 - DNA, 75 bp, synthetic construct
  source 1..75: mol_type = other DNA
tggattgattgagcaagcttataaaatagattcgaaggtatttggctcacttcattattataatgatattttaga

SEQ ID NO: 637358 - DNA, 75 bp, synthetic construct
  source 1..75: mol_type = other DNA
tctgtctggcatacaggaagatatgctaactgcattggataattatacacaattaaataaatcaattttattgac

SEQ ID NO: 637359 - DNA, 75 bp, synthetic construct
  source 1..75: mol_type = other DNA
gatgtctcacttaagcggatgtttatagatgctctggagtctgataaatcagaaataaaaatggttgattatact

SEQ ID NO: 637360 - DNA, 75 bp, synthetic construct
  source 1..75: mol_type = other DNA
gatgtctcacttaagcagatgtttatagatgctctggaatctgataaatcagaaataaaaatggttgattatact

SEQ ID NO: 637361 - DNA, 75 bp, synthetic construct
  source 1..75: mol_type = other DNA
ccgaactccgcgacacccttctccccaaacttctctcgggtgaaattaccctgccggaagcagaacaggcagtca

SEQ ID NO: 637362 - DNA, 75 bp, synthetic construct
  source 1..75: mol_type = other DNA
ctctgaacttaaaacgattgcgaatttgttccctgatgccatgacggaaagtgaatttggtagtattcctcttgg

SEQ ID NO: 637363 - DNA, 75 bp, synthetic construct
  source 1..75: mol_type = other DNA
ccatccatcatcatgtatccgggcgaagatggaccttcttatagtataagtagttccacatccagtgcaaacagc

SEQ ID NO: 637364 - DNA, 75 bp, synthetic construct
  source 1..75: mol_type = other DNA
ggcgatgaaacggggggcaagacctgaggattatcttttccattatcatcgttatgtggcattgatgtcagaagc

SEQ ID NO: 637365 - DNA, 75 bp, synthetic construct
  source 1..75: mol_type = other DNA
ctgaaattagtaagaaaaatttcaatccaattcctcttgtgaagccgccacttgagcttgttaaaaattatacca

SEQ ID NO: 637366 - DNA, 75 bp, synthetic construct
  source 1..75: mol_type = other DNA
atattgcagagattattatggggcaatcccctaaaggcgaagaggttaataatgaggggataggactccccttat

SEQ ID NO: 637367 - DNA, 75 bp, synthetic construct
  source 1..75: mol_type = other DNA
gcatggccttgacgatgatgtagtgcctgccgacgaatcactacgtttgcagcaggcattaagagaaacgggacg

SEQ ID NO: 637368 - DNA, 75 bp, synthetic construct
  source 1..75: mol_type = other DNA
ctttttacagtcgcaggtgaccgcgtgacggccctgaccagcctcgacggtgagctgacgcgtcaggaacagacg

SEQ ID NO: 637369 - DNA, 75 bp, synthetic construct
  source 1..75: mol_type = other DNA
gcagaatggcattaaaccccagattgactataagggggctgtagatatcgatggtttcaaaaatggtgttaccac

SEQ ID NO: 637370 - DNA, 75 bp, synthetic construct
  source 1..75: mol_type = other DNA
ccgagtcactaaaaaaatttcgtcatgaagggaacaaaattggctgcattgtgatgaacgccaatccctttacta

SEQ ID NO: 637371 - DNA, 75 bp, synthetic construct
  source 1..75: mol_type = other DNA
caggcctggcgtcgttaccagcgtcatcgcactcgcatgatggagattcaggcctattatgaaagctgcctgaac

SEQ ID NO: 637372 - DNA, 75 bp, synthetic construct
  source 1..75: mol_type = other DNA
tttccgccgctaatacccgaaaccgcagcacagcagaatgaatttaataacattatcgcgccactgttggagtgg

SEQ ID NO: 637373 - DNA, 75 bp, synthetic construct
  source 1..75: mol_type = other DNA
acacggcgtgccgcgcgaaatcaccaaagaagtcttgccgggcaaatactatccgaaccatgaagcggtagattt

SEQ ID NO: 637374 - DNA, 75 bp, synthetic construct
  source 1..75: mol_type = other DNA
gcacaaagtcaaatattggatgaccttcaacgaaattaacaaccagcgtaactggcgtgcaccgctgttcggtta

SEQ ID NO: 637375 - DNA, 75 bp, synthetic construct
  source 1..75: mol_type = other DNA
aatccggacgatgtgatgttcgcccaggagtcgatgcgcgaacgctacgtctttaccgatgtgcaactgcgtggc

SEQ ID NO: 637376 - DNA, 75 bp, synthetic construct
  source 1..75: mol_type = other DNA
ctgacgatccctctgtcggcgttaggcgatccagttggcgataatcgttataaagtcaaattgttgcgtaatggt

SEQ ID NO: 637377 - DNA, 75 bp, synthetic construct
  source 1..75: mol_type = other DNA
aaagcgcaggtttctgaagcggatgtaatccacctgaagccggggcaaaacaaaaagcctggtttacggtgcttg

SEQ ID NO: 637378 - DNA, 75 bp, synthetic construct
  source 1..75: mol_type = other DNA
gtataaagtcaaatactggatgaccttcaacgaaattaacaaccagcgtaactggcgtgcaccgttgttcggtta

SEQ ID NO: 637379 - DNA, 75 bp, synthetic construct
  source 1..75: mol_type = other DNA
cgcaagagaaactcacctggttgaatgtgaacgatgcgctttcgattgatggtaaaacggtgctgttcgcggcgt

SEQ ID NO: 637380 - DNA, 75 bp, synthetic construct
  source 1..75: mol_type = other DNA
acacatacgctggacgggcagttcgacgaagccaataacgccgaaaaagcaatgaacaatctgaaggatggtctg

SEQ ID NO: 637381 - DNA, 75 bp, synthetic construct
  source 1..75: mol_type = other DNA
aaaaacctccagcgaacgtcgggtggcggtagacattgaactgggcggctggcaggaacaactgattctgaccct

SEQ ID NO: 637382 - DNA, 75 bp, synthetic construct
  source 1..75: mol_type = other DNA
aatgttttcgtacttccatcgcctggacgcgcattttcccgaaaggcgatgaagcccagcctaatgaagaagggc

SEQ ID NO: 637383 - DNA, 75 bp, synthetic construct
  source 1..75: mol_type = other DNA
ggtactggtgatatgtcgcgttcacgtaagaagagtttcaactggtacaaagaggtgattgccagcaacggcgag

SEQ ID NO: 637384 - DNA, 75 bp, synthetic construct
  source 1..75: mol_type = other DNA
atcgactgcgtatcgttcaccaccgggcagtacagcaaacgctacggtttcatctatgtgaataagcatgacgac

SEQ ID NO: 637385 - DNA, 75 bp, synthetic construct
  source 1..75: mol_type = other DNA
caagcgcaatcaggcctcactcgatacggctaaaaccaatctcgattacacccgcatcgttgccccgatggccgg

SEQ ID NO: 637386 - DNA, 75 bp, synthetic construct
  source 1..75: mol_type = other DNA
attatcaggacgacagtatccttgaatattttgatgatgttcaggaaaaatcgggattcccatctttactggctg

SEQ ID NO: 637387 - DNA, 75 bp, synthetic construct
  source 1..75: mol_type = other DNA
gttaaccctgcccactcccttgagctggtagtggcgatttgcaatcatatcggtgggattcagatatatgttccg

SEQ ID NO: 637388 - DNA, 75 bp, synthetic construct
  source 1..75: mol_type = other DNA
gatggtaaaacggtgctgttcgcggcgttgaccggcagcctggaaaaccatccggatggctttaattttaaataa

SEQ ID NO: 637389 - DNA, 75 bp, synthetic construct
  source 1..75: mol_type = other DNA
ccctgacgctgcccagcgtctgttatatggtgtacaaaaacgttaaccaggcggcgacgcagtattatccgtcac

SEQ ID NO: 637390 - DNA, 75 bp, synthetic construct
  source 1..75: mol_type = other DNA
gtgatcccgaaactcgattttcaggggacggagtcactgaatacgctgcgtgatcgtatcacgcagattaacggc

SEQ ID NO: 637391 - DNA, 75 bp, synthetic construct
  source 1..75: mol_type = other DNA
ttgctgctggtgtgttcgatgattggctgggtggcagcatggcttgccacggtacaacatttacggcactttacg

SEQ ID NO: 637392 - DNA, 75 bp, synthetic construct
  source 1..75: mol_type = other DNA
gaatctgcgccagttgatgatcccggaacagcaacgcctgctggagacgtttacgctgttagtcgccaatgccct

SEQ ID NO: 637393 - DNA, 75 bp, synthetic construct
  source 1..75: mol_type = other DNA
atcgatgcccacgttgagggcgaaaatctacaactggatgtctgggataacggccccggtcttccacaaggcctg

SEQ ID NO: 637394 - DNA, 75 bp, synthetic construct
  source 1..75: mol_type = other DNA
cttgaaggttgccttaaacaggctgagttcctgaatgatgcctttgatgatgtgaacttatacgcgcgtattatc

SEQ ID NO: 637395 - DNA, 75 bp, synthetic construct
  source 1..75: mol_type = other DNA
ggtcgcgcttgatgaaccacccgcccgcacgattaacaacgcgccggatagccgctcttttaaagacaagtggcg

SEQ ID NO: 637396 - DNA, 75 bp, synthetic construct
  source 1..75: mol_type = other DNA
caggcattgatgttttcactaccgtcaacgttcagcatctggaaagtctgaatgatgtggtcagtggcgtcaccg

SEQ ID NO: 637397 - DNA, 75 bp, synthetic construct
  source 1..75: mol_type = other DNA
agaaggcaaagtctatattgccgggcaggcggagcgcgccattgaacatttttttcgcaaaggcaatctgatcgc

SEQ ID NO: 637398 - DNA, 75 bp, synthetic construct
  source 1..75: mol_type = other DNA
atgcagaaaaaacgactgattcagcttatccatattgcccgtaatgaactgggtctggatgaagacacctaccgc

SEQ ID NO: 637399 - DNA, 75 bp, synthetic construct
  source 1..75: mol_type = other DNA
tcggacattaccaacgccagcgtctggtggccgacggattgctggcgaaaaagggttgcccgcaacctggtcagg

SEQ ID NO: 637400 - DNA, 75 bp, synthetic construct
  source 1..75: mol_type = other DNA
gatactaatctggcaaatctcggcggcgcactggagctcaactggacgcttcccggtcagccggataacacgccg

SEQ ID NO: 637401 - DNA, 75 bp, synthetic construct
  source 1..75: mol_type = other DNA
cttaaacgtgagaaacaggacgaaagctgttcattaacgcaggcattaccatcggaactcaaggtgagcgccgac

SEQ ID NO: 637402 - DNA, 75 bp, synthetic construct
  source 1..75: mol_type = other DNA
aatttagacttaaccagagtaatatttgactcacaacaaaatagtgcatcaataaaagtcaataactttaatgaa

SEQ ID NO: 637403 - DNA, 75 bp, synthetic construct
  source 1..75: mol_type = other DNA
ttaatcatcccggaaaaaaatgctaaaacaattagttattctacgataaatgattacggcggagaaacgccgatt

SEQ ID NO: 637404 - DNA, 75 bp, synthetic construct
  source 1..75: mol_type = other DNA
taaaattaatctttcgcccacataagataaacaataaaaaccaagtgtctgatgcttataaaaatttaaaaataa

SEQ ID NO: 637405 - DNA, 75 bp, synthetic construct
  source 1..75: mol_type = other DNA
cagaagttgaactggcggttgctgcctacgaaaaactgactgctgaaggcgtgaaagcgcgcgtggtgtccatgc

SEQ ID NO: 637406 - DNA, 75 bp, synthetic construct
  source 1..75: mol_type = other DNA
ctactggtacaagtatgttggcctgaatggcgctatcatcggtatgaccaccttcggtgagtcagctccggcaga

SEQ ID NO: 637407 - DNA, 75 bp, synthetic construct
  source 1..75: mol_type = other DNA
gttgagcaggtcgcttctctgcgcgtgaccccgaacatgtctacatggcgtccgtgtgaccaggttgaatctgcg

SEQ ID NO: 637408 - DNA, 75 bp, synthetic construct
  source 1..75: mol_type = other DNA
atgaaagcgatcttaatcccatttttatctcttctgattccgttaaccccgcaatctgcattcgctcagagtgag

SEQ ID NO: 637409 - DNA, 75 bp, synthetic construct
  source 1..75: mol_type = other DNA
ccttcggtgagtcagctccggcagagttgctgtttgaagagttcggcttcactgttgataacgttgttacgaaag

SEQ ID NO: 637410 - DNA, 75 bp, synthetic construct
  source 1..75: mol_type = other DNA
gtagagcaggttgcttctctgcgcgtgaccccgaacatgtctacatggcgtccatgtgaccaggttgaatctgca

SEQ ID NO: 637411 - DNA, 75 bp, synthetic construct
  source 1..75: mol_type = other DNA
gaaaagtaaaaaattcattataacgccaatactttacaggatatcacctaatgaaagcattcaattgaaaatcga

SEQ ID NO: 637412 - DNA, 75 bp, synthetic construct
  source 1..75: mol_type = other DNA
gctgtttttccgtgtaaatgcgcgggacgataatatgcaggatgctgcgaatgcattaatggcagaactggcaac

SEQ ID NO: 637413 - DNA, 75 bp, synthetic construct
  source 1..75: mol_type = other DNA
aacgccagcgtctggtggctgacggattgctggcgaaaaagggctgcccgcagcctggtcaggtcgcgattattg

SEQ ID NO: 637414 - DNA, 75 bp, synthetic construct
  source 1..75: mol_type = other DNA
aaaccaggtcaggtggcgattattgctgatgtcgacgaacgcacccgtaaaacaggcgaagcctttgccgccggg

SEQ ID NO: 637415 - DNA, 75 bp, synthetic construct
  source 1..75: mol_type = other DNA
aactcattcatattgcccgcagcgacctccagatggatgaggacacctaccgccagatgctacaggggctgaccg

SEQ ID NO: 637416 - DNA, 75 bp, synthetic construct
  source 1..75: mol_type = other DNA
gggattttttattcatcaccttcctaaattatcatttgtaatagtcgttgaattgtttgcttattttttctacgc

SEQ ID NO: 637417 - DNA, 75 bp, synthetic construct
  source 1..75: mol_type = other DNA
tacagcgtttcttctcgtctctcggttgatcctaaggccaaagatatcagccatttgctggctttcacctgtcaa

SEQ ID NO: 637418 - DNA, 75 bp, synthetic construct
  source 1..75: mol_type = other DNA
tggaaggcatctctcacgaagtttgctctctggcgggtacgctgaagctgggtaaactgattgcgttctacgatg

SEQ ID NO: 637419 - DNA, 75 bp, synthetic construct
  source 1..75: mol_type = other DNA
aaaacgctaaaacaattagctattctacgatcaatgattatggcggaaaaactccgactcaaaacattaagcttt

SEQ ID NO: 637420 - DNA, 75 bp, synthetic construct
  source 1..75: mol_type = other DNA
agttgaaaatgtaataaattccctaccagatgatcgagaaagtatatttagtattaatgtactgaccattcccga

SEQ ID NO: 637421 - DNA, 75 bp, synthetic construct
  source 1..75: mol_type = other DNA
ggtgcttaattttccgcaatcaaacttgtgccttaaccgtgagaaacaggacgaaagctgttcattaacgcaggc

SEQ ID NO: 637422 - DNA, 75 bp, synthetic construct
  source 1..75: mol_type = other DNA
gcgggtaactacatccactacggtgtacgtgaattcggtatgactgcgattgccaacggtatctccctgcacggt

SEQ ID NO: 637423 - DNA, 75 bp, synthetic construct
  source 1..75: mol_type = other DNA
ccttcggtgaatctgctccggctgagcaactgtttgaagagttcggcttcaccgtggataacgttgttgcgaaag

SEQ ID NO: 637424 - DNA, 75 bp, synthetic construct
  source 1..75: mol_type = other DNA
cctataaggcagtctgttgctgatggggttgatgctcgttccagcgatgttccgggacttcctgtaaatccgcta

SEQ ID NO: 637425 - DNA, 75 bp, synthetic construct
  source 1..75: mol_type = other DNA
caggcagacaaagcggcggacattctcgccacgcgcaaattccacccgtgggaaggcggggaagggaaggtcacc

SEQ ID NO: 637426 - DNA, 75 bp, synthetic construct
  source 1..75: mol_type = other DNA
gttatggcaaagcgatagcgttatggcaacgttgcgtagagatgtcgccggagtttgccgacggctggcgcgggt

SEQ ID NO: 637427 - DNA, 75 bp, synthetic construct
  source 1..75: mol_type = other DNA
ccgttcaccgttcgattactacctgcgcggcgtggcgctggatccgctggattatcgctgtaacctggcgctggc

SEQ ID NO: 637428 - DNA, 75 bp, synthetic construct
  source 1..75: mol_type = other DNA
tgtctatcacaatgaagtcattaaacctgcgctggtggggctgctggggccgtggatctctggcgggattgagtt

SEQ ID NO: 637429 - DNA, 75 bp, synthetic construct
  source 1..75: mol_type = other DNA
acttcgaggcagggctggatttttgccaacaaagcctgcgcgcctgcccaactaatcaggaagtgctttgcctgc

SEQ ID NO: 637430 - DNA, 75 bp, synthetic construct
  source 1..75: mol_type = other DNA
catttttgcggataatcagcccgattttacctggcttgatgcttatgaagagaagcgttttgagcagtatttcct

SEQ ID NO: 637431 - DNA, 75 bp, synthetic construct
  source 1..75: mol_type = other DNA
attgacagcgattaatccggcatggccaaaagcagcattattcgccaccgttatgccatttatttttcaactcgt

SEQ ID NO: 637432 - DNA, 75 bp, synthetic construct
  source 1..75: mol_type = other DNA
cagtgcttacgaacgtcagggacaatatcaacaagccgaagaggatttctggcgtgcggtctggagcggcaacag

SEQ ID NO: 637433 - DNA, 75 bp, synthetic construct
  source 1..75: mol_type = other DNA
acgtcgaggctgggctggatttttgccaacaaagcctgcgcgcctgcccaaccaaccaggaagtgctttgcctgc

SEQ ID NO: 637434 - DNA, 75 bp, synthetic construct
  source 1..75: mol_type = other DNA
cgggtaaaaaacagtggagctggggacacagtgaatttggccaggcgtgggataagagcctgaccgacaataacg

SEQ ID NO: 637435 - DNA, 75 bp, synthetic construct
  source 1..75: mol_type = other DNA
atctcacgggtcaggcagacaaagcggcggacattctcgccacgcgcaaattccacccgtgggaaggcggggaag

SEQ ID NO: 637436 - DNA, 75 bp, synthetic construct
  source 1..75: mol_type = other DNA
aactggggaatgcccgccctggcggcagagatgctgaacgcactggactgccagcgaacgctgccgctttatctg

SEQ ID NO: 637437 - DNA, 75 bp, synthetic construct
  source 1..75: mol_type = other DNA
gcgcgagaaactgctgcgcgattatccgctgaacgccactctgtggtggctgaactggttcgatggtcgtagcga

SEQ ID NO: 637438 - DNA, 75 bp, synthetic construct
  source 1..75: mol_type = other DNA
caccattgaaaaaatggttacaacaaccgacgccattacagcggacgaactgatcgacatcctctacaagctgaa

SEQ ID NO: 637439 - DNA, 75 bp, synthetic construct
  source 1..75: mol_type = other DNA
cggcagcattgcagaagctgaaaaaccagagcggtgattacgtatggcgtgacagcctcaaagagggcgcacctg

SEQ ID NO: 637440 - DNA, 75 bp, synthetic construct
  source 1..75: mol_type = other DNA
ttcctgtcttaccctcgcgcggccacagccgataaaacccgcccgttcggtacgctggagaagatggaagctgct

SEQ ID NO: 637441 - DNA, 75 bp, synthetic construct
  source 1..75: mol_type = other DNA
tcgtggatttttccgatgtggacatcctttcatggctgacgggcgagattggcgacaccttcacggaaaccgaag

SEQ ID NO: 637442 - DNA, 75 bp, synthetic construct
  source 1..75: mol_type = other DNA
atgcttttagtcagggtttgcataatgttgctcgtaatggcagtccacggtatgcaggtttactacatcaaatag

SEQ ID NO: 637443 - DNA, 75 bp, synthetic construct
  source 1..75: mol_type = other DNA
aggaaattctggatttttcagaggtggacgtactgggctggttatcgtctgaaatcgccgatacgttcgccacga

SEQ ID NO: 637444 - DNA, 75 bp, synthetic construct
  source 1..75: mol_type = other DNA
gattgtttgaatcaatgggagaagttaatccaagattatacattaaattttatatgggaaacagagttgtaatga

SEQ ID NO: 637445 - DNA, 75 bp, synthetic construct
  source 1..75: mol_type = other DNA
caaccagttgttacgcgcctggcaacaccttgatgccagacaactgcagcaggccagcgaactgcttcatgccgc

SEQ ID NO: 637446 - DNA, 75 bp, synthetic construct
  source 1..75: mol_type = other DNA
ctgattaactggggaatgcccaccctggcggcagagatgctgaacgcactggactgccagcgcacgctgccgctt

SEQ ID NO: 637447 - DNA, 75 bp, synthetic construct
  source 1..75: mol_type = other DNA
gcctggtacttccgttgaaggtgagctagtaagcaacgacgagctgcgtcactacattatgaccggtgatacccg

SEQ ID NO: 637448 - DNA, 75 bp, synthetic construct
  source 1..75: mol_type = other DNA
ccagtaagcaacgacgagctgcgccactacatcatgacaggtgatacccgttctctctccacgctggtgcaggct

SEQ ID NO: 637449 - DNA, 75 bp, synthetic construct
  source 1..75: mol_type = other DNA
aggaaatcctggatttttcagaggtggatattctgggctggttatcctccgaaattgccgacacgttcgccagca

SEQ ID NO: 637450 - DNA, 75 bp, synthetic construct
  source 1..75: mol_type = other DNA
ctgttaacggaagttgttactgatatgaaagatgccgccaacgcgctgcgctggtgtgttaacgagatggagcgt

SEQ ID NO: 637451 - DNA, 75 bp, synthetic construct
  source 1..75: mol_type = other DNA
tcgaccctgcattacgcctgggcccgggagttcggggagcttaaaggcaaaaaacactatcacctgctgctgctg

SEQ ID NO: 637452 - DNA, 75 bp, synthetic construct
  source 1..75: mol_type = other DNA
tatgctgaagcgtgctgactatctcgcgaaagagtacaccaaagtcaacggtaccggtgagcgcaattttggctg

SEQ ID NO: 637453 - DNA, 75 bp, synthetic construct
  source 1..75: mol_type = other DNA
aaaacactatcacctgatgctgctggttaaccgggatacctggtgtcgtgccggtgattaccgtgctccgggatc

SEQ ID NO: 637454 - DNA, 75 bp, synthetic construct
  source 1..75: mol_type = other DNA
tcgggtgccatgccacgctggtgcattttccggcctggccggcggtgtggctggcgcgtaatgatgacaccggct

SEQ ID NO: 637455 - DNA, 75 bp, synthetic construct
  source 1..75: mol_type = other DNA
aacggacgcggcggtgatatcccgctttatcaatgccctgaaagcccgaatcaacgcttaccagaagcgtaagcg

SEQ ID NO: 637456 - DNA, 75 bp, synthetic construct
  source 1..75: mol_type = other DNA
gaacggttttatcaacgaattaggctgggaagcgttactcaacacccgtggtactacctggcgtaaactggacga

SEQ ID NO: 637457 - DNA, 75 bp, synthetic construct
  source 1..75: mol_type = other DNA
ggcagcaacgtattagtgagacggtgcggcacgcactgaatgttcatccccgcctgacggcattgcgggttgacc

SEQ ID NO: 637458 - DNA, 75 bp, synthetic construct
  source 1..75: mol_type = other DNA
acaccggctttcagcaagtgctggaacgtgctgactatctggcgaaggagcataccaaagttcactgcaccggtg

SEQ ID NO: 637459 - DNA, 75 bp, synthetic construct
  source 1..75: mol_type = other DNA
acgtgctgactatctggcgaaggagcataccaaagttcattgcaccggtgagcgcaactttggctgcagtcgtgg

SEQ ID NO: 637460 - DNA, 75 bp, synthetic construct
  source 1..75: mol_type = other DNA
ttcagcaggtgctggagcgtgctgactatctggcgaaggagtgtaccaaagcttacggcaccggtgagcgcaact

SEQ ID NO: 637461 - DNA, 75 bp, synthetic construct
  source 1..75: mol_type = other DNA
ctggaacgcgatgatgacaccagctttcagcaggtgctggagcgtgctgactatctggcgaaggagtgtaccaaa

SEQ ID NO: 637462 - DNA, 75 bp, synthetic construct
  source 1..75: mol_type = other DNA
ggcagcaacgtattcgtgagatggtgctgtgcgcactgaatgttcatccccgcctgacggcacttcgggttgatc

SEQ ID NO: 637463 - DNA, 75 bp, synthetic construct
  source 1..75: mol_type = other DNA
cctgggcccgggagttcggggagctaaaaggcaaaaaacactatcacctgctgctgctggtcaaccgggatacct

SEQ ID NO: 637464 - DNA, 75 bp, synthetic construct
  source 1..75: mol_type = other DNA
gtggtgctggccggtgcggttcaggactttatggtgctgtttatctcttctcgccgtaacggcgcatctctcggt

SEQ ID NO: 637465 - DNA, 75 bp, synthetic construct
  source 1..75: mol_type = other DNA
tcacgatccgtactggggtccggcactgacctttaaagacaccaccattactttcgcgctgattggctatgcgtt

SEQ ID NO: 637466 - DNA, 75 bp, synthetic construct
  source 1..75: mol_type = other DNA
ctgacgatatctggtattttgcctccggtggcgtcattggcagcttactaagcactacgctacaaccaatgctac

SEQ ID NO: 637467 - DNA, 75 bp, synthetic construct
  source 1..75: mol_type = other DNA
aacaacttgcggcctggtatcaaccgattccagaacctgttaaagaaccagaaccgatcaaatcttcgctaaaag

SEQ ID NO: 637468 - DNA, 75 bp, synthetic construct
  source 1..75: mol_type = other DNA
tgaacaactacaccaacgcaggcctgagtattctgttcctgattgtggtgtacagcatcatcttctacggtttca

SEQ ID NO: 637469 - DNA, 75 bp, synthetic construct
  source 1..75: mol_type = other DNA
tccagtaaaattgactcacgaaccattctcgatcaggctggtgccgaatcgttactgggcatgggggatatgctc

SEQ ID NO: 637470 - DNA, 75 bp, synthetic construct
  source 1..75: mol_type = other DNA
gcgtttagcccggatgcgaaagtcggcttcctggccattgctaataagttccaggcaatgatcgacagcggcaat

SEQ ID NO: 637471 - DNA, 75 bp, synthetic construct
  source 1..75: mol_type = other DNA
ccggggtgatagcgctggtggcctgctttatgatcatggtcattatccttgcagtactggcgatgatcgtggtga

SEQ ID NO: 637472 - DNA, 75 bp, synthetic construct
  source 1..75: mol_type = other DNA
aagaagtcacattgacaaagttaagtagcggccgtcgccttctggaagcgttgctgatccttattgtcctgtttg

SEQ ID NO: 637473 - DNA, 75 bp, synthetic construct
  source 1..75: mol_type = other DNA
cttccacgcgctgatctcttccggtacgacgccaaaactgctggctaacgaaaccgacgcgcgtttcattggcta

SEQ ID NO: 637474 - DNA, 75 bp, synthetic construct
  source 1..75: mol_type = other DNA
caacacgtcgtgaactggcgtcatatggcattaagctgccctcacagcgtgcagcggaagagaaggctcgtgaag

SEQ ID NO: 637475 - DNA, 75 bp, synthetic construct
  source 1..75: mol_type = other DNA
cagtttactggcactgggcgcacagtatggctggcaactggcagggatgatgctcattggtgcggcgctgatgcg

SEQ ID NO: 637476 - DNA, 75 bp, synthetic construct
  source 1..75: mol_type = other DNA
gcgctttgggctggagtttgagaaatcagcctttggtaagtacaacgttgataatgctgtaaatgctaacttccg

SEQ ID NO: 637477 - DNA, 75 bp, synthetic construct
  source 1..75: mol_type = other DNA
cgcctttatttgcttatgatgctttacaaaaaaaatgggttattgttgctgtattaagagcgtatgcaggtccca

SEQ ID NO: 637478 - DNA, 75 bp, synthetic construct
  source 1..75: mol_type = other DNA
gccaacctcggcgcgctgattgatgctggcgtacgctccttcaagattgaagggcgttacaaagatatgagctac

SEQ ID NO: 637479 - DNA, 75 bp, synthetic construct
  source 1..75: mol_type = other DNA
agagctgaatcttgagcagatccgcgcgattcaccaggccacggacgcgaccattgaattctttattcatggggc

SEQ ID NO: 637480 - DNA, 75 bp, synthetic construct
  source 1..75: mol_type = other DNA
tgatgcgatcagtaatcgtgccgatggtgttggcaacagtttactggcactgggcgcacagtatggctggcaact

SEQ ID NO: 637481 - DNA, 75 bp, synthetic construct
  source 1..75: mol_type = other DNA
gctgcgttcgtcggggccgggcggtcaacatgtcaataaaaccgactcggcggtacgcgccacgcatctggcatc

SEQ ID NO: 637482 - DNA, 75 bp, synthetic construct
  source 1..75: mol_type = other DNA
ctataaatcggctgaaagcgtggtgcaatgtctggtgctggctgggttaattattcctgtcgcgcgactgcgccc

SEQ ID NO: 637483 - DNA, 75 bp, synthetic construct
  source 1..75: mol_type = other DNA
ggcggcctggataaggtgccggtgctgccagtgtttattaacggcgtcgcaacgccgctgccgggctttcagcgt

SEQ ID NO: 637484 - DNA, 75 bp, synthetic construct
  source 1..75: mol_type = other DNA
ggtctgtatgcttcagcactgtttaactccggtgcctacattgatttgattggtaaatatattcaccatgacaat

SEQ ID NO: 637485 - DNA, 75 bp, synthetic construct
  source 1..75: mol_type = other DNA
tatattgcggaacatgacgatgcgctggcgtttgcgcgtattaatcgccagctgatcgctttgcgcataatgcaa

SEQ ID NO: 637486 - DNA, 75 bp, synthetic construct
  source 1..75: mol_type = other DNA
gtcgcggtaacggtgttggaaacagaaacgggccgctactctgacacgctgcgttcagctctggtttctctggat

SEQ ID NO: 637487 - DNA, 75 bp, synthetic construct
  source 1..75: mol_type = other DNA
cgaaaggcaatatcaaaagctggaaagcaacgccaatgcagctggttaatggtgatgaagtgttaacgctgaagt

SEQ ID NO: 637488 - DNA, 75 bp, synthetic construct
  source 1..75: mol_type = other DNA
gaactgcacgccagcacgcagtgtgatattcgcacggtggaaaaagcgaagttcctctctgacgttggctttacg

SEQ ID NO: 637489 - DNA, 75 bp, synthetic construct
  source 1..75: mol_type = other DNA
cggcgcgctgattgatgctggcgtacgctccttcaagattgaagggcgttacaaagatatgagctacgtgaagaa

SEQ ID NO: 637490 - DNA, 75 bp, synthetic construct
  source 1..75: mol_type = other DNA
gaccagcgaagagggcgtcagtatcactcatacgctggacgggcagttcgacgaagccaataacgccgaaaaagc

SEQ ID NO: 637491 - DNA, 75 bp, synthetic construct
  source 1..75: mol_type = other DNA
ccacatggaccctgaagggattcaatgctgtagccaatcagcagtcaactgaaaaagcggaaaatttcatgtcag

SEQ ID NO: 637492 - DNA, 75 bp, synthetic construct
  source 1..75: mol_type = other DNA
aagcaagcggggccatttgatttcaccctcgggatggcatggggctacgccggtaatgcgggcaatattaccaac

SEQ ID NO: 637493 - DNA, 75 bp, synthetic construct
  source 1..75: mol_type = other DNA
gcgccggaaggtgaattcagcatcaactaccgggataacgaccagtaccgtttctactccacttctgtggcgcta

SEQ ID NO: 637494 - DNA, 75 bp, synthetic construct
  source 1..75: mol_type = other DNA
ggaacccgcgcaacggctgattaccgacctctaccagaccggcgtcgatgcgctgattgttcaggatatggggat

SEQ ID NO: 637495 - DNA, 75 bp, synthetic construct
  source 1..75: mol_type = other DNA
taccgaacagtctgttaaatcagttccgccgtgaggccgccgaaatgctggatgctgcgcgtcttgccagttatc

SEQ ID NO: 637496 - DNA, 75 bp, synthetic construct
  source 1..75: mol_type = other DNA
acaattcgacgaagctaataacgccgaaaaagcgcttaataacctgaaagatggtctggctaagctggggcaaac

SEQ ID NO: 637497 - DNA, 75 bp, synthetic construct
  source 1..75: mol_type = other DNA
gccttaacgtgctggtaaaacgagaagtggttggttttcgtgccaatacggttgaaaaaacgggacaaaatcgtt

SEQ ID NO: 637498 - DNA, 75 bp, synthetic construct
  source 1..75: mol_type = other DNA
tctggtgccgtttgctcatcgctatggcgcaaaaatttttgttacgctgaataccatcttgcatgataacgaact

SEQ ID NO: 637499 - DNA, 75 bp, synthetic construct
  source 1..75: mol_type = other DNA
aatgccgttaccgggaagcgtagtggcatccgtaagtccggatgagctgctgaaaacattgccgaagcgaaaagg

SEQ ID NO: 637500 - DNA, 75 bp, synthetic construct
  source 1..75: mol_type = other DNA
ggcgaccgctttgttgccgtcacgcaaaaaaacaccggtaaaggtggcgcactaatgcatggaataaaatacgcc

SEQ ID NO: 637501 - DNA, 75 bp, synthetic construct
  source 1..75: mol_type = other DNA
tgagaaatgggtgacggatacagatgcacagcatagcgacgcagtagaagcagcagaagcacagcgccagtcact

SEQ ID NO: 637502 - DNA, 75 bp, synthetic construct
  source 1..75: mol_type = other DNA
atgcgtcccgcgactatcgccccgttaacgccatacgataaatgggatggtgagaaatgggtgaccgatactgaa

SEQ ID NO: 637503 - DNA, 75 bp, synthetic construct
  source 1..75: mol_type = other DNA
atgcgtcccgcgactatcgcccccttaccgccatacgataaatgggatggtgagaaatgggtgacagatactgaa

SEQ ID NO: 637504 - DNA, 75 bp, synthetic construct
  source 1..75: mol_type = other DNA
tgagaaatgggtgacggatacagatgcacagcatagcggcgcagtagaagcggcagaagcacagcgccagtcact

SEQ ID NO: 637505 - DNA, 75 bp, synthetic construct
  source 1..75: mol_type = other DNA
tgagaaatgggtgacggatacagatgcacagcatagcgccgcagtagaagccgcagaagcacagcgccagtcact

SEQ ID NO: 637506 - DNA, 75 bp, synthetic construct
  source 1..75: mol_type = other DNA
tgagaaatgggtgacggatacagatgcacagcatagcgtcgcagtagaagctgcagaagcacagcgccagtcact

SEQ ID NO: 637507 - DNA, 75 bp, synthetic construct
  source 1..75: mol_type = other DNA
tgaaagggaaatcctcgctgatgcagatgaccggcaaaggcactctcgatctgatgaaagaggaaggcgatctgc

SEQ ID NO: 637508 - DNA, 75 bp, synthetic construct
  source 1..75: mol_type = other DNA
atgcagcaggataccgggcatcaggccaccgtcgatttctcaggccgcatgaaccgcgatcagcgcgacttatcc

SEQ ID NO: 637509 - DNA, 75 bp, synthetic construct
  source 1..75: mol_type = other DNA
tgagaacgctattagaagcgttacctgaagaggtgataacagaagtcacatcaaaactaaatccttcagcaaacc

SEQ ID NO: 637510 - DNA, 75 bp, synthetic construct
  source 1..75: mol_type = other DNA
atgcgtcccgcgactatcgcccctttatcgccatacgataaatgggatggtgagaaatgggtgaccgatactgaa

SEQ ID NO: 637511 - DNA, 75 bp, synthetic construct
  source 1..75: mol_type = other DNA
atgcgtcccgcgactatcgccccattagcgccatacgataaatgggatggtgagaaatgggtgaccgatactgaa

SEQ ID NO: 637512 - DNA, 75 bp, synthetic construct
  source 1..75: mol_type = other DNA
gattgatactgcaatggcttccattagtctgattcaactgaaattacaggctgggcggaagctgatgcaggcaga

SEQ ID NO: 637513 - DNA, 75 bp, synthetic construct
  source 1..75: mol_type = other DNA
tgagaaatgggtgacggataccgatgcacagcatagcgacgcagtagaagccgcagaagcacagcgccagtcact

SEQ ID NO: 637514 - DNA, 75 bp, synthetic construct
  source 1..75: mol_type = other DNA
cgggcagtgatgtgattgtctgcgctgaaatggacgaacagtggggctacgtcggtgctaaatcacgtcagcgct

SEQ ID NO: 637515 - DNA, 75 bp, synthetic construct
  source 1..75: mol_type = other DNA
cagtcggtaacctcgcgcatacaaccgggcagtgatgtgattgtctgcgctgaaatggacgaacagtggggctac

SEQ ID NO: 637516 - DNA, 75 bp, synthetic construct
  source 1..75: mol_type = other DNA
cgcctggtttcatcgttgctggttgttggtgcctttagctccgctttccgttgtgtatgtattattagcttatgc

SEQ ID NO: 637517 - DNA, 75 bp, synthetic construct
  source 1..75: mol_type = other DNA
tctcgatatttttaaccatcgctttattactcagtactaccgcatctggcgcaaatataactacccggcgtcgtt

SEQ ID NO: 637518 - DNA, 75 bp, synthetic construct
  source 1..75: mol_type = other DNA
gtcagcctgctgtggccccactacctgcgaaccatcccgtcactttccgtggttgaactgtcgacagatcaccgg

SEQ ID NO: 637519 - DNA, 75 bp, synthetic construct
  source 1..75: mol_type = other DNA
ccgcagaagcacagcgccagtcgctgattgattctgcaatggcttccattagtctgattcaactgaaattccagg

SEQ ID NO: 637520 - DNA, 75 bp, synthetic construct
  source 1..75: mol_type = other DNA
ctgcagaagcacagcgccagtcgctgattgatcctgcaatggcttccattagtctgattcaactgaaattacagg

SEQ ID NO: 637521 - DNA, 75 bp, synthetic construct
  source 1..75: mol_type = other DNA
tgagaaatgggtgacggatacggatgcacagcatagcgacgcagtagaagcggcagaagcacagcgccagtcact

SEQ ID NO: 637522 - DNA, 75 bp, synthetic construct
  source 1..75: mol_type = other DNA
ggttgacatcgatggtgttagtctaaaatcaaaaactcgggaaacaattgcgcaaaaaattgcggaaacaattgc

SEQ ID NO: 637523 - DNA, 75 bp, synthetic construct
  source 1..75: mol_type = other DNA
ccagacttaaccctgtgctggattacattgacgcggtgacggcaacagataccagcaccgcgccggatgtcatct

SEQ ID NO: 637524 - DNA, 75 bp, synthetic construct
  source 1..75: mol_type = other DNA
cggcagaagcacagcgccagtcgctgattgatactgcaatggcttccattagtctgattcaactgaaatttcagg

SEQ ID NO: 637525 - DNA, 75 bp, synthetic construct
  source 1..75: mol_type = other DNA
cttctaagggtcaggtgatgtctgaggagctgaaggggcaactatctgaagctttaccgggtgctactcaggcat

SEQ ID NO: 637526 - DNA, 75 bp, synthetic construct
  source 1..75: mol_type = other DNA
agcagcagttagagcagcaggtgcatttatcagctttcaggctgtattagccagttatcagaagattatggaaat

SEQ ID NO: 637527 - DNA, 75 bp, synthetic construct
  source 1..75: mol_type = other DNA
aatggtgatgttaaagcctctgatgcactccctaaatttgctaaagaacttggttcacagattaattccagaggt

SEQ ID NO: 637528 - DNA, 75 bp, synthetic construct
  source 1..75: mol_type = other DNA
atgatgtgaaaggttggtttaatagtgcagctgataaaattgctggtttccaagaacagatgaataacttcgtaa

SEQ ID NO: 637529 - DNA, 75 bp, synthetic construct
  source 1..75: mol_type = other DNA
tcttttaaatagtcttggtggaagtggtaaaacattaggtgaaagtcttggtagtctcatgacttctatgtcaca

SEQ ID NO: 637530 - DNA, 75 bp, synthetic construct
  source 1..75: mol_type = other DNA
aaacggaaattgaggatactttaaagccacttagacaaccaagacagccacgaattagcggaagcagagcaatca

SEQ ID NO: 637531 - DNA, 75 bp, synthetic construct
  source 1..75: mol_type = other DNA
atgagcaaattcacagttgatagttttatcgttgagctaggcttcaatgaaaacgttattaagggcttgcaaaga

SEQ ID NO: 637532 - DNA, 75 bp, synthetic construct
  source 1..75: mol_type = other DNA
taaaccttgcaaatgctgttacttcattcggtgacgctgttaataaagctaaagctggaaaggctggttcttcag

SEQ ID NO: 637533 - DNA, 75 bp, synthetic construct
  source 1..75: mol_type = other DNA
gaatatgctattagctggtagcgctctctatgcaggttatgaaagactagcctctacacctgaacgaatggaagc

SEQ ID NO: 637534 - DNA, 75 bp, synthetic construct
  source 1..75: mol_type = other DNA
taataagacttttgaccgtctggaagctagagccaaaaatactaaagctttccgtttcacaagtcaggttaatga

SEQ ID NO: 637535 - DNA, 75 bp, synthetic construct
  source 1..75: mol_type = other DNA
taataagacctttgacaagattgaacagagagcaagaaacacaaaagcatttcagtttgccaccagatttaatga

SEQ ID NO: 637536 - DNA, 75 bp, synthetic construct
  source 1..75: mol_type = other DNA
caatgctcaacttgcaatgactattagtgaactatcacgcaaggttgatgctttaacagtagaagctaagaagcc

SEQ ID NO: 637537 - DNA, 75 bp, synthetic construct
  source 1..75: mol_type = other DNA
taaaccttgcaaacgctgttacttcattcggtgacgctgttaataaagctaaagctggtaaaggtggttcttcag

SEQ ID NO: 637538 - DNA, 75 bp, synthetic construct
  source 1..75: mol_type = other DNA
atgggctaagattggtagttctatcgctgactggtttaatggtgcagctaataaaattgctaacttccaagagcc

SEQ ID NO: 637539 - DNA, 75 bp, synthetic construct
  source 1..75: mol_type = other DNA
cagtcagagaagcaattgctaaagccagaggtcatacatccaccagcattaacggtgacagagcagctaatagtc

SEQ ID NO: 637540 - DNA, 75 bp, synthetic construct
  source 1..75: mol_type = other DNA
ttctgattgagttaagttttaactctcagaaagttttaaaaggcttggaaaaatccgagaaacaaacgatgcagg

SEQ ID NO: 637541 - DNA, 75 bp, synthetic construct
  source 1..75: mol_type = other DNA
aacaacgcttttaaacgctcttggtgggagtggtaagagtcttggtgaatctcttggtagcttgatgactgatat

SEQ ID NO: 637542 - DNA, 75 bp, synthetic construct
  source 1..75: mol_type = other DNA
aaactcttggaataccacgcttgatagtatcttcagaggttctgaaaatggtctgcaagatttcacaagaagcct

SEQ ID NO: 637543 - DNA, 75 bp, synthetic construct
  source 1..75: mol_type = other DNA
ctttagggcaacttgaaaggaagtttaataagacctttgacaagattgagcagcgtcttaaaaacactagagcgt

SEQ ID NO: 637544 - DNA, 75 bp, synthetic construct
  source 1..75: mol_type = other DNA
atgagcaaattcacagttgatagttttatcgttgagctaagcttcaatgaaaacattattaagggcttgcaaaga

SEQ ID NO: 637545 - DNA, 75 bp, synthetic construct
  source 1..75: mol_type = other DNA
ttgataacctgtcttcagcagcagttaaaacagcaggtgcatttatctcaatgcaagctgtattagccagttatc

SEQ ID NO: 637546 - DNA, 75 bp, synthetic construct
  source 1..75: mol_type = other DNA
tagcatcacgaattgagaagcgattgaataaggcgtttaaagtgaatcctacgcctttaaatgattctctcaaac

SEQ ID NO: 637547 - DNA, 75 bp, synthetic construct
  source 1..75: mol_type = other DNA
tccaccagctatcacaggtgacatggttaatagcaatgctcaattagctatggctgtatcagagttaggaagaaa

SEQ ID NO: 637548 - DNA, 75 bp, synthetic construct
  source 1..75: mol_type = other DNA
gctaacttccaagaaccgatgaataacttcgtaaataacacacaatcaactccaccagctatcacaggtgacatg

SEQ ID NO: 637549 - DNA, 75 bp, synthetic construct
  source 1..75: mol_type = other DNA
ctaatagtcttgatagtctgtcttcagcagcagttaaaacagcaggtgcatttatcagctttcaggctgtactat

SEQ ID NO: 637550 - DNA, 75 bp, synthetic construct
  source 1..75: mol_type = other DNA
gtgaatagaaagaatgggaaaccatcaagactaaaccctatgaatatgctattagctggtagtgctatctatgca

SEQ ID NO: 637551 - DNA, 75 bp, synthetic construct
  source 1..75: mol_type = other DNA
cgccaaaggatactggagctgttagagcccaaagggaccggggagtccaaaggtgctggggagtccaaaggtgct

SEQ ID NO: 637552 - DNA, 75 bp, synthetic construct
  source 1..75: mol_type = other DNA
aaagaggctggtgaggtggccagacagcaggctgttgaaagcaatgcacaggcgcagcagcgatatgatgatcag

SEQ ID NO: 637553 - DNA, 75 bp, synthetic construct
  source 1..75: mol_type = other DNA
cgcaggggagtgttgcatcgacacactggtcagattcctctagcgaagtggttaatccatatgctgaagttgggg

SEQ ID NO: 637554 - DNA, 75 bp, synthetic construct
  source 1..75: mol_type = other DNA
aacctatttatgatgaggtcgctgcagatcctaattatagcgtcattcaacatttttcagggaacagcccagtta

SEQ ID NO: 637555 - DNA, 75 bp, synthetic construct
  source 1..75: mol_type = other DNA
aaaaatatgatgaacagcatgctaaacgcgaacaggaaatgtctctttcatcgggggttggctacggtattagtg

SEQ ID NO: 637556 - DNA, 75 bp, synthetic construct
  source 1..75: mol_type = other DNA
accctgatgctgcagcaaacacagctgaagcagcggcaaaagatcagttaacgaaagaagcattccagaacccag

SEQ ID NO: 637557 - DNA, 75 bp, synthetic construct
  source 1..75: mol_type = other DNA
ggccgtgggccggaagaactggttgtgtgtgtcacgaaggagaactgatagcggcaatatgaaaattgcagcata

SEQ ID NO: 637558 - DNA, 75 bp, synthetic construct
  source 1..75: mol_type = other DNA
tttaatattcctgatgatgggatattagcaggctcttgtgctaatttaaccaagcgtaaagggatcgatcttgtt

SEQ ID NO: 637559 - DNA, 75 bp, synthetic construct
  source 1..75: mol_type = other DNA
ccggatgacccaaccactaccgaccctgatgctgctgcaagtgcaactgaaaccgcgacaagagatcagttaacg

SEQ ID NO: 637560 - DNA, 75 bp, synthetic construct
  source 1..75: mol_type = other DNA
ggtggattaacggggaatggcgggagcgcagtaaatactgcaaatgccgcaccaacgccgggaccaggacgtttc

SEQ ID NO: 637561 - DNA, 75 bp, synthetic construct
  source 1..75: mol_type = other DNA
gttaatccatatgctgaagttggggaggctcggaatagttcaccggctcgtcaggcagaagagcatatttacgat

SEQ ID NO: 637562 - DNA, 75 bp, synthetic construct
  source 1..75: mol_type = other DNA
aaaaacagatttgtttttaccgggggacgtggcggtagtgggcatccgatggtcactgtcgcatcagatatcgcg

SEQ ID NO: 637563 - DNA, 75 bp, synthetic construct
  source 1..75: mol_type = other DNA
tgttgtgggcgggatatcttaacttccatccgctcctcaatctggtgtttgccgcgtttctgctgatgcccattc

SEQ ID NO: 637564 - DNA, 75 bp, synthetic construct
  source 1..75: mol_type = other DNA
gtcgtctgcaatccgtacgctatgccgctaccgcgaagtttgacccagaacataaagtctggcgtctgtcgcagg

SEQ ID NO: 637565 - DNA, 75 bp, synthetic construct
  source 1..75: mol_type = other DNA
gaaaggcatcgtccggctgagcagcgaaacgggcagcgccgccgaaaacgccgctgcaacaccaaaggcagtcca

SEQ ID NO: 637566 - DNA, 75 bp, synthetic construct
  source 1..75: mol_type = other DNA
tttatgggtgattatgcacagtatttttgatgcctgtattgattcgtggaaagctgacccggaattaaataattt

SEQ ID NO: 637567 - DNA, 75 bp, synthetic construct
  source 1..75: mol_type = other DNA
tattgctgtgaataaagttgttggtgtaaccagaagtatttacgggcttatgactgctatcacaagattaggtca

SEQ ID NO: 637568 - DNA, 75 bp, synthetic construct
  source 1..75: mol_type = other DNA
atgagcgaaactacagaaaagaaaagacaaccacgcacttgctttcatattcctgatgaagtatttcaggtgttg

SEQ ID NO: 637569 - DNA, 75 bp, synthetic construct
  source 1..75: mol_type = other DNA
tcaacgtctgaagatattaaccattggctattgtaaaaatagcagctctgcggagtgcagaacacagaccgtaaa

SEQ ID NO: 637570 - DNA, 75 bp, synthetic construct
  source 1..75: mol_type = other DNA
gaagatcctggccgctatatgagtcgctatagctataagcagtcgatccgtgacggcgcgactaacccggtgaaa

SEQ ID NO: 637571 - DNA, 75 bp, synthetic construct
  source 1..75: mol_type = other DNA
ccatcaatctgattgattttgacaatatagagaacaaccactttgtggtggcgcagcaggttcactatatcgcgg

SEQ ID NO: 637572 - DNA, 75 bp, synthetic construct
  source 1..75: mol_type = other DNA
tcaaaaacaataccgaaaatactaatgtcagtcagagcaacaatggtggttataatgttcaaaatacccaggtca

SEQ ID NO: 637573 - DNA, 75 bp, synthetic construct
  source 1..75: mol_type = other DNA
tttgatgcctgtattgattcgtggaaagctgacccggaattaaataacgtacgttatatgtggaacaccctgatg

SEQ ID NO: 637574 - DNA, 75 bp, synthetic construct
  source 1..75: mol_type = other DNA
cgttaagtatctcgaagcgtatgacctgattcaggtgatgctgggcgcaattgtgatttcgatgctgggcttccc

SEQ ID NO: 637575 - DNA, 75 bp, synthetic construct
  source 1..75: mol_type = other DNA
gcaaaaagttgggcgaatacattgagcaagacagccgtggcattttgatcaccaccatctttaaatttaaagata

SEQ ID NO: 637576 - DNA, 75 bp, synthetic construct
  source 1..75: mol_type = other DNA
tatcggtattcgcgacgatatgtatctgggcgcaggcaacgcttatatgcgtgaagttggcgctgcacttgatga

SEQ ID NO: 637577 - DNA, 75 bp, synthetic construct
  source 1..75: mol_type = other DNA
cgtcaggtcaccagcatggaagaagccttcaaagatgcagacatcgtttatccgaagtcatgggcaccttacaaa

SEQ ID NO: 637578 - DNA, 75 bp, synthetic construct
  source 1..75: mol_type = other DNA
tgaagtgactgaaggcgtattcgaaaaatccgtatcgctacctacaaagaagccagctggaagccttatatcatc

SEQ ID NO: 637579 - DNA, 75 bp, synthetic construct
  source 1..75: mol_type = other DNA
cgcctgacggcattgcgggttgatctgcgtctcccggatgtaccggcagcaacggacgcggctgtgatatcccgc

SEQ ID NO: 637580 - DNA, 75 bp, synthetic construct
  source 1..75: mol_type = other DNA
tccgggatcactggccgggatgattaaacaggcgtggtgcagtgccctgggagtggatgtcgggtgccatgccac

SEQ ID NO: 637581 - DNA, 75 bp, synthetic construct
  source 1..75: mol_type = other DNA
gaagcgtaagcgccgtgaaggtaaacgcgtacatcccacgaccctgcattacgcctgggcccgggaattcgggga

SEQ ID NO: 637582 - DNA, 75 bp, synthetic construct
  source 1..75: mol_type = other DNA
gaagtaaatcctgttgtaattggtattcagtattttggtaattttataattacagatatagaggaatcatggact

SEQ ID NO: 637583 - DNA, 75 bp, synthetic construct
  source 1..75: mol_type = other DNA
ctgctgctggtcaaccgggatacctggtgtcgtgccggcgattaccgcgctccggggtcactggccgggatgatt

SEQ ID NO: 637584 - DNA, 75 bp, synthetic construct
  source 1..75: mol_type = other DNA
atatgatctccttctgcgccgacgctattggtattcgcgacgatatgtatctgggcgcaggcaacgcctatatgc

SEQ ID NO: 637585 - DNA, 75 bp, synthetic construct
  source 1..75: mol_type = other DNA
gtttaaagacgatataacctcgatgctttgtgaacagacgcccttacatacacatcaactctcttcatccggata

SEQ ID NO: 637586 - DNA, 75 bp, synthetic construct
  source 1..75: mol_type = other DNA
cttttcaaatattgtaaatataataattttactcattaagcatcctgataaaattctgcccattcttcatggttg

SEQ ID NO: 637587 - DNA, 75 bp, synthetic construct
  source 1..75: mol_type = other DNA
ctggcgcgtaatgatgacaccggctttcagcaggtgctggaacgtgctaactatctggcgaaggagcataccaaa

SEQ ID NO: 637588 - DNA, 75 bp, synthetic construct
  source 1..75: mol_type = other DNA
aacggacgcagctgtgatatcccgcttcatcaatgccctgaaagcccgaatccacgcttaccagaaccgtaagcg

SEQ ID NO: 637589 - DNA, 75 bp, synthetic construct
  source 1..75: mol_type = other DNA
aacggacgcagctgtgatatcccgcttcatcaatgccctgaaagcccgaatcaacgcttaccagaagcgtaagca

SEQ ID NO: 637590 - DNA, 75 bp, synthetic construct
  source 1..75: mol_type = other DNA
aacggacgcagctgtgatatcccgcttcatcaatgccctgaaagcccgaatcaacgcttaccagaatcgtaagct

SEQ ID NO: 637591 - DNA, 75 bp, synthetic construct
  source 1..75: mol_type = other DNA
cgcagagagatctgaaaacaacaccggttgacatcgatggtgttagtctaaaatcaaaaactcgggaaaaaattg

SEQ ID NO: 637592 - DNA, 75 bp, synthetic construct
  source 1..75: mol_type = other DNA
caacggacgcagctgtgatatcccgcttcatcaatgccctgaaagcccgaatctacgcttaccagaatcgtaagc

SEQ ID NO: 637593 - DNA, 75 bp, synthetic construct
  source 1..75: mol_type = other DNA
aacggacgcagctgtgatatcccgcttcatcaatgccctgaaagcccgaatccacgcttaccagaagcgtaagcc

SEQ ID NO: 637594 - DNA, 75 bp, synthetic construct
  source 1..75: mol_type = other DNA
tccgggctcactggccggcatgattgaacaggcctggtgcagtgccctgggggtggatgccgggccttatgccac

SEQ ID NO: 637595 - DNA, 75 bp, synthetic construct
  source 1..75: mol_type = other DNA
tgattaaacaggcgtggtgcagtgccctgggagtggatgtcgggtgccatgccacgctggtgcattttccggcct

SEQ ID NO: 637596 - DNA, 75 bp, synthetic construct
  source 1..75: mol_type = other DNA
gcggcacgcactgaatgttcattcccgcctgacggcattgcgggttgacctgcgtttcccggatgtaccggcagc

SEQ ID NO: 637597 - DNA, 75 bp, synthetic construct
  source 1..75: mol_type = other DNA
aacggacgcagctgtgatatcccgcttcatcaatgccctgaaagcccgaatcaacgcttaccagaaacgtaagcg

SEQ ID NO: 637598 - DNA, 75 bp, synthetic construct
  source 1..75: mol_type = other DNA
tccggggtcactggccggcatgattcaacaggcctggtgcagtgccctgggggtggatgccgggccttatgccac

SEQ ID NO: 637599 - DNA, 75 bp, synthetic construct
  source 1..75: mol_type = other DNA
tccgggctcactggccgggatgattcaacaggcctggtgcagtgccctgggggtggatgccgggccttatgccac

SEQ ID NO: 637600 - DNA, 75 bp, synthetic construct
  source 1..75: mol_type = other DNA
gcgtgctgactatctcgcgaaagagtacaccaaagtcaacggtaccggtgagcgcaattttggctgtagccggag

SEQ ID NO: 637601 - DNA, 75 bp, synthetic construct
  source 1..75: mol_type = other DNA
aagtccgttcgaggaggtaagtgactccatgatcggtctaatggatagctctttcgtcaaagtcatagcgggatt

SEQ ID NO: 637602 - DNA, 75 bp, synthetic construct
  source 1..75: mol_type = other DNA
tcaggacctgggggtggttaagcaagatggtgaaatgcagaaggttgccagccaaccaccagcgctatccataga

SEQ ID NO: 637603 - DNA, 75 bp, synthetic construct
  source 1..75: mol_type = other DNA
ctttaggacctttttataagatattaagccagcatctttctttagccggacactatgttataaaagttaatttca

SEQ ID NO: 637604 - DNA, 75 bp, synthetic construct
  source 1..75: mol_type = other DNA
tggttgttatgccacctaaattcgccttaccagccggtagtagcaaaaccgtgcgctttgtcgcaatggaaccag

SEQ ID NO: 637605 - DNA, 75 bp, synthetic construct
  source 1..75: mol_type = other DNA
aaaacactatcacctgctgctgctggtcaaccgggatacctggtgtcgtgccggtgattaccgcgctccgggatc

SEQ ID NO: 637606 - DNA, 75 bp, synthetic construct
  source 1..75: mol_type = other DNA
ctcttgatagtttaagttcggcagcagttaaaacagcaggtgcatttatttcaatgcaagctgtaattgaatcat

SEQ ID NO: 637607 - DNA, 75 bp, synthetic construct
  source 1..75: mol_type = other DNA
ttatcgttgagctaggtttcaatgaaaacgttgttaaaggtctgcaaagagttgaaaaactcgccatgcagtcag

SEQ ID NO: 637608 - DNA, 75 bp, synthetic construct
  source 1..75: mol_type = other DNA
gagaagttagctcagttaaacgcttcagtcagagaagcaattgctaaagctaaaggtcatacatccaccagcatt

SEQ ID NO: 637609 - DNA, 75 bp, synthetic construct
  source 1..75: mol_type = other DNA
cggtatgactgatgctcaggagctgccgctccaagaagctctgaccaagttggaaggtaaacccatctccctgca

SEQ ID NO: 637610 - DNA, 75 bp, synthetic construct
  source 1..75: mol_type = other DNA
aaacattaagcagttttgctaagttttccgctggtgctggtgatatgaatgcagaccagaaagaatccttatttt

SEQ ID NO: 637611 - DNA, 75 bp, synthetic construct
  source 1..75: mol_type = other DNA
ttatcgttgagctaggcttcaatgagaacgttattaaaggtctgcaaagagttgaaaaggcagctttgcagtcag

SEQ ID NO: 637612 - DNA, 75 bp, synthetic construct
  source 1..75: mol_type = other DNA
cctcaacgtctataccggtgagtttattactcgtggatcaacggcggttgcgctggtgaaacagaactccttcta

SEQ ID NO: 637613 - DNA, 75 bp, synthetic construct
  source 1..75: mol_type = other DNA
gtgcatcccaccaccctgcattacgtctgggcccgggagtttggggagtgcaaaggtaaaaacactatcacctga

SEQ ID NO: 637614 - DNA, 75 bp, synthetic construct
  source 1..75: mol_type = other DNA
gtcgtctgcaatctgtgcgctatgccgcttccgcgaagtttgatcctgaacataaagtctggcgtctgtcgcagg

SEQ ID NO: 637615 - DNA, 75 bp, synthetic construct
  source 1..75: mol_type = other DNA
aggtgacgaagagttagggggtattagtatttatgcctttaacgaaaatcgtcgtctgcaatctgtgcgctatgc

SEQ ID NO: 637616 - DNA, 75 bp, synthetic construct
  source 1..75: mol_type = other DNA
tacgagatatgctgaaccgtgctgactatctcgcgaaagagtataccaaagtcaacggtaccggtgagcgtaatt

SEQ ID NO: 637617 - DNA, 75 bp, synthetic construct
  source 1..75: mol_type = other DNA
gaattgtgctgctggaagcgattactgcaggattaccggtactaacaacagccgtttgtggctatgcgccttata

SEQ ID NO: 637618 - DNA, 75 bp, synthetic construct
  source 1..75: mol_type = other DNA
ttcatcaatgccctgaaagcaagaattgacgcttatcagaaacgtaagcaccgtgaaggtaaacgcgtgcatccc

SEQ ID NO: 637619 - DNA, 75 bp, synthetic construct
  source 1..75: mol_type = other DNA
tatcgggtctggttgcgggtgctctgatggccgtctctgtcggcacgctcgcggctgaaacaaaaaacactccac

SEQ ID NO: 637620 - DNA, 75 bp, synthetic construct
  source 1..75: mol_type = other DNA
acgaccctgcattacgcctgggcccgggagttcggggagctaaaaggcaaaaaacactatcacctgctgctgctg

SEQ ID NO: 637621 - DNA, 75 bp, synthetic construct
  source 1..75: mol_type = other DNA
caggccaacaacgtactacaaacggttctgcatcagttagcgaaagcgcaggcgacccgcgatctggcaaaactg

SEQ ID NO: 637622 - DNA, 75 bp, synthetic construct
  source 1..75: mol_type = other DNA
gctgtcgttcatctttggcccactgcgtagcgtaccgatgggcgtgcgtgtggtcaccggtatcagcttcggttt

SEQ ID NO: 637623 - DNA, 75 bp, synthetic construct
  source 1..75: mol_type = other DNA
atggacaagatagctgttattatgagtgtctataacggagatctacctcagaatgtagaacttgcaattgatagt

SEQ ID NO: 637624 - DNA, 75 bp, synthetic construct
  source 1..75: mol_type = other DNA
atgaccgccttaaataaaaaatggctatcgggtctggttgcgggggctctgatggccgtctctgtcagcacgctc

SEQ ID NO: 637625 - DNA, 75 bp, synthetic construct
  source 1..75: mol_type = other DNA
agaaagtgaaacggcgagtggtatgccggacccgacgctgccggaggtgtccggaggtcatggcagagcggacga

SEQ ID NO: 637626 - DNA, 75 bp, synthetic construct
  source 1..75: mol_type = other DNA
tttcttctatccaggctgaaattactcaacgtctggaagaaattgaccgtgtatctgagcaaactcagtttaacg

SEQ ID NO: 637627 - DNA, 75 bp, synthetic construct
  source 1..75: mol_type = other DNA
tctgcggattccattcctattctctgcattactggtcaagctcccgtaggaaaacttcataaagaagatttccag

SEQ ID NO: 637628 - DNA, 75 bp, synthetic construct
  source 1..75: mol_type = other DNA
ttgatactttccgctcctccctcggtgcggtgcaaaaccgtctggattccgcagtaaccaacctgaacaacacca

SEQ ID NO: 637629 - DNA, 75 bp, synthetic construct
  source 1..75: mol_type = other DNA
cagcatcaggggaaaaccttatttatcagccggaaaacctaccggattgatggtagtggtcaaatggcgattacc

SEQ ID NO: 637630 - DNA, 75 bp, synthetic construct
  source 1..75: mol_type = other DNA
gacctgatttctaaatttaaagcgacaggtactgataattatcaaattaacggtactgataactatactgttaat

SEQ ID NO: 637631 - DNA, 75 bp, synthetic construct
  source 1..75: mol_type = other DNA
tgaaatgaaaattcaggttggtgctaatgatggtgaagccatcactatcaatctggcaaaaattgatgcgaaaac

SEQ ID NO: 637632 - DNA, 75 bp, synthetic construct
  source 1..75: mol_type = other DNA
aagaagaagctggggcatttgtgttgatgtcgttggagtccgggccgctcatgacgatgattattctgggcactg

SEQ ID NO: 637633 - DNA, 75 bp, synthetic construct
  source 1..75: mol_type = other DNA
aattattgaggttgaaggaaacctaaaagatagctcttggacgaatacgctggaaaaacatttgaagtttcattc

SEQ ID NO: 637634 - DNA, 75 bp, synthetic construct
  source 1..75: mol_type = other DNA
acaccctgagacttgaaggaatggaccccagtggtacgccactgtacgagtccgttaaggcacgtattatttcag

SEQ ID NO: 637635 - DNA, 75 bp, synthetic construct
  source 1..75: mol_type = other DNA
gagcttccgtaccagaccgtacgagaaatcattagcgaagctgaaaaggcacgtcaggttaatggcgatgaaccc

SEQ ID NO: 637636 - DNA, 75 bp, synthetic construct
  source 1..75: mol_type = other DNA
ccgacgaagccacttacgtttatctgaacggcacgcgactgcttgtggaacttccgtaccagaccgtacgagaaa

SEQ ID NO: 637637 - DNA, 75 bp, synthetic construct
  source 1..75: mol_type = other DNA
cggtgaactgttattacgtgcatccgctattgatggagtgactccggcgggtaaaaacggagccgacgaagccac

SEQ ID NO: 637638 - DNA, 75 bp, synthetic construct
  source 1..75: mol_type = other DNA
ccaaagagagccgcacggtactcgattttctactgatgctttgttccgtagggcaacattaccccggttttgaaa

SEQ ID NO: 637639 - DNA, 75 bp, synthetic construct
  source 1..75: mol_type = other DNA
gaaacccgccactgggaaaccgctcaggcttacgaaaaactgctcatcgcactcaaccgggctgtgctgacagac

SEQ ID NO: 637640 - DNA, 75 bp, synthetic construct
  source 1..75: mol_type = other DNA
aagagatggcggaaatttaccttgagcgcaatatgcagttgcagatcccaggctgggattttcagggcgcgtgcc

SEQ ID NO: 637641 - DNA, 75 bp, synthetic construct
  source 1..75: mol_type = other DNA
tgcaggcgcgatgatccgcgcaggcagcatcgtcacggcaatgacccgcaacggcaatatgttcgggattcgggt

SEQ ID NO: 637642 - DNA, 75 bp, synthetic construct
  source 1..75: mol_type = other DNA
atgctaataagcagccctgtctttgcaacaaaaccggacgcgccgaataagccggagatgaatatcttcgagctc

SEQ ID NO: 637643 - DNA, 75 bp, synthetic construct
  source 1..75: mol_type = other DNA
atgaaaaataactttccggcgctgcttttgggcaccgccatgatggtcacttcgcccgggactgtatatgcacag

SEQ ID NO: 637644 - DNA, 75 bp, synthetic construct
  source 1..75: mol_type = other DNA
tttattccgggcgacagtgtcacggctattactgcccagaacggcatgctggcagacaagcgactgacgtctgct

SEQ ID NO: 637645 - DNA, 75 bp, synthetic construct
  source 1..75: mol_type = other DNA
tcaaaaaccccgcaagactggcacacagcccggctaatcatggagcgctgggggcatggtggtcttgtaacgctg

SEQ ID NO: 637646 - DNA, 75 bp, synthetic construct
  source 1..75: mol_type = other DNA
aactgatggtgactgaagcaatttggctacttttgcaatatgaccagttgcgttatagctggctggcggcgaaga

SEQ ID NO: 637647 - DNA, 75 bp, synthetic construct
  source 1..75: mol_type = other DNA
ctgctgtttctctttagtattggcatcgataaaaccaaagcaatgggattattgcgtgggttgacggaatttaag

SEQ ID NO: 637648 - DNA, 75 bp, synthetic construct
  source 1..75: mol_type = other DNA
agtgatggatttcctcagcgtgaccgatcagttcttcctcaacctcgcgatggcttactgcaaggcggcgatgga

SEQ ID NO: 637649 - DNA, 75 bp, synthetic construct
  source 1..75: mol_type = other DNA
gtttgaaggctgggcgaaagatgaagcgcaggcactggcaatgctggagcagggggaagtgaacttcattccttg

SEQ ID NO: 637650 - DNA, 75 bp, synthetic construct
  source 1..75: mol_type = other DNA
tccggccattttcttaacgataaccccgttcaaggccttaaaggaatgaaggttaacgagcgcgaaatgggatac

SEQ ID NO: 637651 - DNA, 75 bp, synthetic construct
  source 1..75: mol_type = other DNA
aggcttgcggaatgccgatgtcggcaccagatgcacacagtgccagtgatcaatattgtgcgtactgcagcgaca

SEQ ID NO: 637652 - DNA, 75 bp, synthetic construct
  source 1..75: mol_type = other DNA
gctctccgcgtttctgtttaacagcctgatgccgcaggttgatctgagtactcctgacgggcgcgcacgtttaag

SEQ ID NO: 637653 - DNA, 75 bp, synthetic construct
  source 1..75: mol_type = other DNA
gcgataagcgcagtcgggtgattggttttggcgggcgcgtgctgggcaacgataccccaaaatacctgaactcgc

SEQ ID NO: 637654 - DNA, 75 bp, synthetic construct
  source 1..75: mol_type = other DNA
accaacaatgtcatttgctgttatgacggcgaccgtgcaggccgcgatgccgcatggcgagcgctggaaacggcg

SEQ ID NO: 637655 - DNA, 75 bp, synthetic construct
  source 1..75: mol_type = other DNA
gtgagggaccggtggaaggtccggtgaagggactgcagagtattctggtgaacaaaaccccgctgacggacacgg

SEQ ID NO: 637656 - DNA, 75 bp, synthetic construct
  source 1..75: mol_type = other DNA
gtgatcgatgccatcagcgaaggaccgattgaaggtccggtggatggattaaaaagcgtgctgctgaacagtacg

SEQ ID NO: 637657 - DNA, 75 bp, synthetic construct
  source 1..75: mol_type = other DNA
tatggaattcataccatacttggttcttttgtatttactgaccgtcaaatattctttttttggagctgcgttcgc

SEQ ID NO: 637658 - DNA, 75 bp, synthetic construct
  source 1..75: mol_type = other DNA
agtgagacgccgcaggccgaagctgtctgggtggttgagtcaaacgaactgtacgcacagcagtaccgtgttgtg

SEQ ID NO: 637659 - DNA, 75 bp, synthetic construct
  source 1..75: mol_type = other DNA
tttgcacgatccggataaatatgcgcgtatcgataccggtgccattatcgaccagcggccaataagtgtaattcc

SEQ ID NO: 637660 - DNA, 75 bp, synthetic construct
  source 1..75: mol_type = other DNA
ttatcacgcttgatcgtgattcggcagccgctcccggaagccgtctgatggttaaccttccgtccggcgcatcgc

SEQ ID NO: 637661 - DNA, 75 bp, synthetic construct
  source 1..75: mol_type = other DNA
cggtccagtatctctataaagataatggcgatatggtgggcacggtcaccgagtatgcgatcgatttatcaacgg

SEQ ID NO: 637662 - DNA, 75 bp, synthetic construct
  source 1..75: mol_type = other DNA
agataccagccaggccgttgctcgcgcgctggtgacgcttgatgcgtctgccggtggcaatgtttccaactccac

SEQ ID NO: 637663 - DNA, 75 bp, synthetic construct
  source 1..75: mol_type = other DNA
aacgagtccgggtataccgactgggtgcgaggtcaggccagcatcgatgtttccgatatcaccgatgtgatcctg

SEQ ID NO: 637664 - DNA, 75 bp, synthetic construct
  source 1..75: mol_type = other DNA
ccgggcgacacgtacagcgatttttcgtggggttcccgcctgtggctgcttgagcgtgaaaagctgacggaagat

SEQ ID NO: 637665 - DNA, 75 bp, synthetic construct
  source 1..75: mol_type = other DNA
gaggaatttttaaaaccaatgaacatgtctgatgatgaattagcggaagctatgggtatttctcgacaagatgtt

SEQ ID NO: 637666 - DNA, 75 bp, synthetic construct
  source 1..75: mol_type = other DNA
gaagatatcatctacggtcggcgtcgtcttagggatgatgaggctcgcgttcttgctgctatatttggtactgat

SEQ ID NO: 637667 - DNA, 75 bp, synthetic construct
  source 1..75: mol_type = other DNA
agcaacaaaaaaggcgtgatgaacgtgctgatggttccgttccgctgaaactgtccggaaaaatccacaaacagc

SEQ ID NO: 637668 - DNA, 75 bp, synthetic construct
  source 1..75: mol_type = other DNA
acacaaaatcagataccgccgggcctgtgaccgtgggagaaatgctgacagaggaatttttaaaaccgctgaaca

SEQ ID NO: 637669 - DNA, 75 bp, synthetic construct
  source 1..75: mol_type = other DNA
tacgcattgagggcttccgcaaagcagaggcttccctgagacttgaaggaatggaccccagtggtacgccactgt

SEQ ID NO: 637670 - DNA, 75 bp, synthetic construct
  source 1..75: mol_type = other DNA
tcttgcaggcatgtttggaactgatgaggacttctggagtaaattgcagaccttacaagattaccagaaagaacg

SEQ ID NO: 637671 - DNA, 75 bp, synthetic construct
  source 1..75: mol_type = other DNA
tcgcggcatcgagcgcacttatacccgtgatttgctcgtggaagtttttctcgacggacgcggtaacggcctcaa

SEQ ID NO: 637672 - DNA, 75 bp, synthetic construct
  source 1..75: mol_type = other DNA
ttttcctgcaatcagtactggggtttatggttaccctcgtgcggcagcggctgaaatcgcagttaaaaccgtttc

SEQ ID NO: 637673 - DNA, 75 bp, synthetic construct
  source 1..75: mol_type = other DNA
atcgagcgcacttatacccgtgatttgctcgtggaagtttttctcgacggacgcggcaacggcctgaatcactaa

SEQ ID NO: 637674 - DNA, 75 bp, synthetic construct
  source 1..75: mol_type = other DNA
agccccccccccaaaaaaactgctgaatgaaatgattgagcagacgtaccaggattttgtggcaaatgagcagca

SEQ ID NO: 637675 - DNA, 75 bp, synthetic construct
  source 1..75: mol_type = other DNA
agacgggcgaagtgattgatcagggaacgctggatcatctggccgggcaattgaccgcatttggtgagtttattc

SEQ ID NO: 637676 - DNA, 75 bp, synthetic construct
  source 1..75: mol_type = other DNA
cgttactgggaagcctgcgcaaaggctcatttaatggcatggttgcacgtaccctgccgaaaattgctccggcga

SEQ ID NO: 637677 - DNA, 75 bp, synthetic construct
  source 1..75: mol_type = other DNA
tttggctatggcatgaaagtaccgagcaaattcagctctttgagcaggcgctacgtgacaatcgcaacaacgatc

SEQ ID NO: 637678 - DNA, 75 bp, synthetic construct
  source 1..75: mol_type = other DNA
atctggtcagtcgcctgaccagcacgctggataacgaacggctgtttaccgctgacgtcgctcacgaactacgaa

SEQ ID NO: 637679 - DNA, 75 bp, synthetic construct
  source 1..75: mol_type = other DNA
ttgaatctgatgcgctttttacgccaaccaatatcactacgtcaacggctgatattgaccatcggggccattttg

SEQ ID NO: 637680 - DNA, 75 bp, synthetic construct
  source 1..75: mol_type = other DNA
ggctcgtgcgaccaatgacgtcgatcgcgtcgtgtttgccgccggagaaggggtgctgacgctggtggattcact

SEQ ID NO: 637681 - DNA, 75 bp, synthetic construct
  source 1..75: mol_type = other DNA
cacattgatgtagcgccgttagtcgcacggcttgatcagatgatggagagcgtctcccaattgttgcaactggcg

SEQ ID NO: 637682 - DNA, 75 bp, synthetic construct
  source 1..75: mol_type = other DNA
tgaagatgaagggcctggcattgatgagagtaaatgcggagagttgagcaaagcgtttgtacgaatggacagccg

SEQ ID NO: 637683 - DNA, 75 bp, synthetic construct
  source 1..75: mol_type = other DNA
ggcagcgctgatcccgatgcagcaggcgggcgtggagaaaagcccgtttgtgctggtatttgagaaagtagggat

SEQ ID NO: 637684 - DNA, 75 bp, synthetic construct
  source 1..75: mol_type = other DNA
ttgccctttattgcgggcttccgtttgtcgccctgtgttatggtgcgtactacctgacccgaaatatgacatcgc

SEQ ID NO: 637685 - DNA, 75 bp, synthetic construct
  source 1..75: mol_type = other DNA
ttttcccggagcggagagtgaatggttgtttgtctctcgtcagggggcggggttgacgcggcagcgtgcgtggca

SEQ ID NO: 637686 - DNA, 75 bp, synthetic construct
  source 1..75: mol_type = other DNA
cattcacagcgccaccctcgaaatcgaagcggtggtttcggcgttgaacgatctggtcagtcgcctgaccagcac

SEQ ID NO: 637687 - DNA, 75 bp, synthetic construct
  source 1..75: mol_type = other DNA
aatcgcaacaacgatcgccacatcatgcgtgagatccgcgaggcggtcgccagcctgattgtccccggcgtcttt

SEQ ID NO: 637688 - DNA, 75 bp, synthetic construct
  source 1..75: mol_type = other DNA
tctgcgtggtgatttttggcctgaacgtcatctctacgcgcttctttgcggaaggcgaattctggttctctctgg

SEQ ID NO: 637689 - DNA, 75 bp, synthetic construct
  source 1..75: mol_type = other DNA
cgcgtcgtgtttgccgccggagaaggggtgctgacgctggtggattcactggtgatgggctgcgctgtgttgatt

SEQ ID NO: 637690 - DNA, 75 bp, synthetic construct
  source 1..75: mol_type = other DNA
gcggctggcgctggcctgttcgctgatgcatgaaccggacattctgtttctcgacgaaccgacttccggcgttga

SEQ ID NO: 637691 - DNA, 75 bp, synthetic construct
  source 1..75: mol_type = other DNA
gccaggcgctggtgctggggatggatctgaaagagagttctggtaaagcgcgccagcatctcggctatatggcgc

SEQ ID NO: 637692 - DNA, 75 bp, synthetic construct
  source 1..75: mol_type = other DNA
ctcgactgtaccattcatgctggttatgtaacggggctggtggggccggatggcgcaggtaaaaccacactgatg

SEQ ID NO: 637693 - DNA, 75 bp, synthetic construct
  source 1..75: mol_type = other DNA
tggcgctggttgttgcgaccggcgcacaagctgccagtgaaaaagtcgagatgaacctcgtcacgtcgcaaggag

SEQ ID NO: 637694 - DNA, 75 bp, synthetic construct
  source 1..75: mol_type = other DNA
tggcgggcgaagggatgttaatcctctggagcacctcgtatcttgacgaagccgagcagtgccgtgacgtattgc

SEQ ID NO: 637695 - DNA, 75 bp, synthetic construct
  source 1..75: mol_type = other DNA
cggatgctggccgggttgctgaaacctgacagcggcagggccacagttatcggttttgatccgatcaaaaacgac

SEQ ID NO: 637696 - DNA, 75 bp, synthetic construct
  source 1..75: mol_type = other DNA
aaaatcgttttcttctcatttattagtgcgttgggcttacgctgtttttctgaattgattgcctattataaggac

SEQ ID NO: 637697 - DNA, 75 bp, synthetic construct
  source 1..75: mol_type = other DNA
ttgttcaatccccagatgcaggtgctggcatgaaggaaattttcaaagctatcattgaaaatactttgctatgca

SEQ ID NO: 637698 - DNA, 75 bp, synthetic construct
  source 1..75: mol_type = other DNA
gctacggccagcaaatctatcaccactttcgcaaacagggtaatcatcgctgggatactgctgttcatcaggaca

SEQ ID NO: 637699 - DNA, 75 bp, synthetic construct
  source 1..75: mol_type = other DNA
ccgacagcggcagtgccacggtgattggctttgatccgatcaaaaacgacggcgcgctgcacgccgtgctcggct

SEQ ID NO: 637700 - DNA, 75 bp, synthetic construct
  source 1..75: mol_type = other DNA
tggtgcaggtaaaaccacgctaatgcggatgctggcgggattactgaaacccgacagcggcaatgccacggtgat

SEQ ID NO: 637701 - DNA, 75 bp, synthetic construct
  source 1..75: mol_type = other DNA
ttaagccaggagaaatcgatatcctgacacaaaatcagcactacccgcttgtgatccgctctcttgagggtgaga

SEQ ID NO: 637702 - DNA, 75 bp, synthetic construct
  source 1..75: mol_type = other DNA
acttaacaaaattaagaaggttacaggtctttcacatgcagcagtgatgaagcttgcaattaaccgtgatattaa

SEQ ID NO: 637703 - DNA, 75 bp, synthetic construct
  source 1..75: mol_type = other DNA
aaagccttcctgcaggaattacaagaagccagcgatcgcggtattgtggtggtcaacctgacacaatgtatgtcc

SEQ ID NO: 637704 - DNA, 75 bp, synthetic construct
  source 1..75: mol_type = other DNA
tgaaagcattgattctgcgctcctatggcgtgggtaatgcgccacaaaacaaagccttcctgcaggaattacaag

SEQ ID NO: 637705 - DNA, 75 bp, synthetic construct
  source 1..75: mol_type = other DNA
gatgccaatactgtatggttgggactgaagcgagggcaacttcaacgtaactatgtctggcgctttctggaactt

SEQ ID NO: 637706 - DNA, 75 bp, synthetic construct
  source 1..75: mol_type = other DNA
gtttacttatacccgcattattaaaagatgaagataatgaaagcatcggtaaaattgtactatactcattagtta

SEQ ID NO: 637707 - DNA, 75 bp, synthetic construct
  source 1..75: mol_type = other DNA
cggcagtactggcacgggatgccggattaaatgtagtgatggatcgctgcccggctattgagatccctcgcctgg

SEQ ID NO: 637708 - DNA, 75 bp, synthetic construct
  source 1..75: mol_type = other DNA
gtcagcttgggaagaaatgacctgcttattcgcaccttccctagctgagttacgctctgacggacaaattaatct

SEQ ID NO: 637709 - DNA, 75 bp, synthetic construct
  source 1..75: mol_type = other DNA
cagttttatatgagcggtgggtgctggcgcaacagcataacaatgagtggaaaggaaactccattgatcgccgtc

SEQ ID NO: 637710 - DNA, 75 bp, synthetic construct
  source 1..75: mol_type = other DNA
cttttcattgagagcattattagattttataattctattcctggtggaaaggatcggtatctataacatggatag

SEQ ID NO: 637711 - DNA, 75 bp, synthetic construct
  source 1..75: mol_type = other DNA
ccgttgccggaaaagtttatcgcataggtgcagaaccgggactaggttcgaccgtaaaaattattcaccagttgt

SEQ ID NO: 637712 - DNA, 75 bp, synthetic construct
  source 1..75: mol_type = other DNA
ctgcgtgggccaactcagcttactccatggtaccgacggacctgctgatcccgccggagcagttctctctgctgg

SEQ ID NO: 637713 - DNA, 75 bp, synthetic construct
  source 1..75: mol_type = other DNA
acagccgcttagcctgtggggtatggagctgggctggaccttgccggaactggcttcagcgcagcaggttggacg

SEQ ID NO: 637714 - DNA, 75 bp, synthetic construct
  source 1..75: mol_type = other DNA
gatgcgcttgaggaatcattaaaaaaattgttttctgcggcagaagagttagaaaaaacagtgcaggaaagtaca

SEQ ID NO: 637715 - DNA, 75 bp, synthetic construct
  source 1..75: mol_type = other DNA
ggtttttatattatccgaggtaatttcgaggaagttgatctcaaaccaattggcttgattgttggtttgctgtta

SEQ ID NO: 637716 - DNA, 75 bp, synthetic construct
  source 1..75: mol_type = other DNA
cggtcatgagttctacgaagcggagctgaaatatctggtggatcacgaatgggtccgccgcgccgacgatgccct

SEQ ID NO: 637717 - DNA, 75 bp, synthetic construct
  source 1..75: mol_type = other DNA
tctaaaggtcgtaaacacatccgaattactcaggacgctttagatactttgaagggactaaacaactttaaaatt

SEQ ID NO: 637718 - DNA, 75 bp, synthetic construct
  source 1..75: mol_type = other DNA
tgccagaattaaacgagctactaacttgcctcatcagactgtgatgcagcttgcaattgctaaagaggtcactga

SEQ ID NO: 637719 - DNA, 75 bp, synthetic construct
  source 1..75: mol_type = other DNA
tggctaaatgcggatcaacaatctcgtgtgagtcagtggctggtggaatatacgcagcagaagttgtcgcaggcg

SEQ ID NO: 637720 - DNA, 75 bp, synthetic construct
  source 1..75: mol_type = other DNA
cgcacgcacttacggcagcaacagcgaactgctgctcggcaatgcgggggcgataagcgacctcggggaggattt

SEQ ID NO: 637721 - DNA, 75 bp, synthetic construct
  source 1..75: mol_type = other DNA
aatgcggaacaacaatctcgtgtgagtcagtggctggtggaatatacgcagcagaggttgtcgctggcgtcgtaa

SEQ ID NO: 637722 - DNA, 75 bp, synthetic construct
  source 1..75: mol_type = other DNA
cgcggaacgccaccttctataacaccctgccgctgcatgacggcaaccacttcccgggacaaagcaaaaccgcag

SEQ ID NO: 637723 - DNA, 75 bp, synthetic construct
  source 1..75: mol_type = other DNA
attactactatttttaactcttgtaggtttttatattattcgcggaaacttcgaggaagttgatcttaaaccaat

SEQ ID NO: 637724 - DNA, 75 bp, synthetic construct
  source 1..75: mol_type = other DNA
tataatttttagtgcaattttcttgtttctgcttttaggaacgctctcccgtggtgcgtggctggctgtattcat

SEQ ID NO: 637725 - DNA, 75 bp, synthetic construct
  source 1..75: mol_type = other DNA
gaagggacttaacggctttaaaattgatatcgcccgactattgagtattaagattcacaagttagcaatgggggt

SEQ ID NO: 637726 - DNA, 75 bp, synthetic construct
  source 1..75: mol_type = other DNA
aagaatagccgcaaaatgttgtcattacaacaaggcggctatatgacgctcgcgcagtttgccatgactttctgg

SEQ ID NO: 637727 - DNA, 75 bp, synthetic construct
  source 1..75: mol_type = other DNA
tcgccaggaattaattaaccgcaaatcattcggcgaagatgccgaacgcctggctaacaacaagtggcttaataa

SEQ ID NO: 637728 - DNA, 75 bp, synthetic construct
  source 1..75: mol_type = other DNA
gtggataaaatcatcattatggggcgtcctgatgaggaagagacgctgttacgtgtggatgcggcgatcaacaaa

SEQ ID NO: 637729 - DNA, 75 bp, synthetic construct
  source 1..75: mol_type = other DNA
agtgggaaaaaggaaagatgcgtctgctgtgggataacaaaaagcggcgtaacgaagcgctggactgcctggtgt

SEQ ID NO: 637730 - DNA, 75 bp, synthetic construct
  source 1..75: mol_type = other DNA
cgccggcattcttcctggcgtcgttttccggggaatgattcgcatccgcttcctggaagctgaccgggctacacc

SEQ ID NO: 637731 - DNA, 75 bp, synthetic construct
  source 1..75: mol_type = other DNA
gaaacagtctgctttttcagcccacggattctgccgctgaagattttatgaagtctcacgtggaggcgacgattc

SEQ ID NO: 637732 - DNA, 75 bp, synthetic construct
  source 1..75: mol_type = other DNA
ctggtggagaagtgggaaaaaggaaagatgcgtctgctgtgggataacaaaaagcggcgtaacgaagcgctggac

SEQ ID NO: 637733 - DNA, 75 bp, synthetic construct
  source 1..75: mol_type = other DNA
tggaaaacgctgccattccagatcgccatcatgaacagtatggggaatgatcagatccgcactgttaatctgatt

SEQ ID NO: 637734 - DNA, 75 bp, synthetic construct
  source 1..75: mol_type = other DNA
gccaaaaacccgcaatcagcggggcgtgtatctgtgtgaagtgggaacggacaccgcaaaagaaattctctatgc

SEQ ID NO: 637735 - DNA, 75 bp, synthetic construct
  source 1..75: mol_type = other DNA
ctggtcgcggaagagcttgtggagaagtgggaaaaaggaaagatgcgtctgctgtgggataacaaaaagcggcgt

SEQ ID NO: 637736 - DNA, 75 bp, synthetic construct
  source 1..75: mol_type = other DNA
acaccgcaaaagaaattctctatgcccgtatgaaagccgatcccacgcctgcggatgaagccacgtcgtatgcca

SEQ ID NO: 637737 - DNA, 75 bp, synthetic construct
  source 1..75: mol_type = other DNA
gtgccatgcctgaaagatctttccccgtggctgggtcgtaaacatcgtgacaatactctcactctgaaacgcttt

SEQ ID NO: 637738 - DNA, 75 bp, synthetic construct
  source 1..75: mol_type = other DNA
gtggatctgtgaaaacacgggcatgtggactcgtgacggtctgacatttttcagcgccgcggataatgaaattcc

SEQ ID NO: 637739 - DNA, 75 bp, synthetic construct
  source 1..75: mol_type = other DNA
atgatttcagacgcacagaaggcagctaatgcagccggtgcgatagctacagggcttttatctctcattattcct

SEQ ID NO: 637740 - DNA, 75 bp, synthetic construct
  source 1..75: mol_type = other DNA
tacgatccggcaaattcacaaacctaccaacgtaatgccgatacttataaagccaagattacccaaacccttgcc

SEQ ID NO: 637741 - DNA, 75 bp, synthetic construct
  source 1..75: mol_type = other DNA
ttgcggactcttccacactactggcgggcaccacgaaatttaacggcatcattgatgtgatgtggtcaccctttg

SEQ ID NO: 637742 - DNA, 75 bp, synthetic construct
  source 1..75: mol_type = other DNA
ccggcgcacactacggcggtgtgctctatgtcgattccctgagcacagaaaacggcccggtacctacgtatatcg

SEQ ID NO: 637743 - DNA, 75 bp, synthetic construct
  source 1..75: mol_type = other DNA
gtggagtcaacgttacgggatgtcccttgtctgaaaattctttccccctggctgggacgtaagcacagggataac

SEQ ID NO: 637744 - DNA, 75 bp, synthetic construct
  source 1..75: mol_type = other DNA
tttcccgtgtctgctgggacaccgggggatcgatggtgaaatcgtctaccagaggtcaaaaaaacacggtgtttt

SEQ ID NO: 637745 - DNA, 75 bp, synthetic construct
  source 1..75: mol_type = other DNA
tttcccgtgtctgctgggacataggggggatcgatggcgaaatcgtttatcagaggtcaaaaaacacggtgtttt

SEQ ID NO: 637746 - DNA, 75 bp, synthetic construct
  source 1..75: mol_type = other DNA
cagccagataacaccggaagaaaacacgctgccttatttcagtgcagagggccggattttactggcgcagctgtc

SEQ ID NO: 637747 - DNA, 75 bp, synthetic construct
  source 1..75: mol_type = other DNA
aaattgagttacttttatcttacataacagatgcaacaattaacgtttcatattatgacaagaaattagctctta

SEQ ID NO: 637748 - DNA, 75 bp, synthetic construct
  source 1..75: mol_type = other DNA
tgtggcgatcaacaaaaaataccgccatgcagacggaaccgaaatgaccatttcccgtgtctgctgggacaccgg

SEQ ID NO: 637749 - DNA, 75 bp, synthetic construct
  source 1..75: mol_type = other DNA
cgtagaacgtctgttgggagaagaacgtcctttccgtttcattgaagaagagaagaaaggcttcctcaaacgctt

SEQ ID NO: 637750 - DNA, 75 bp, synthetic construct
  source 1..75: mol_type = other DNA
caggccgggcaacacgtcgctgatgcgcaacaaattaagagcgactgcgagacgctggcggataacgtacagcag

SEQ ID NO: 637751 - DNA, 75 bp, synthetic construct
  source 1..75: mol_type = other DNA
atctttggcatgaatgagcgagggcagattatgcccacaaaaattaccgaacacttgagtattgatgaagtgttt

SEQ ID NO: 637752 - DNA, 75 bp, synthetic construct
  source 1..75: mol_type = other DNA
acggcggcggtgccagcccgggtggtttatctgacggcgggcattgactcgcagcgaaaccgttttgagatgtat

SEQ ID NO: 637753 - DNA, 75 bp, synthetic construct
  source 1..75: mol_type = other DNA
aataccctcacgctgaaacgcttttcatcgggtgtgggcttctggtgcctgggcggcgctgccgccaaaaactac

SEQ ID NO: 637754 - DNA, 75 bp, synthetic construct
  source 1..75: mol_type = other DNA
ccctgacacaggcaccggtcattctgttaactcatccacgtatgggagaacagttgtttcagtttgaacccaggg

SEQ ID NO: 637755 - DNA, 75 bp, synthetic construct
  source 1..75: mol_type = other DNA
gtggatctgtgaaaacacggggatgtggacccgcgacggtctgacgtttttcagcgccgcggataatgaaattcc

SEQ ID NO: 637756 - DNA, 75 bp, synthetic construct
  source 1..75: mol_type = other DNA
tttcccgtgtctgctgggacaccggggggatcgatggtgaaattgtctatcagaggtcaaaaaacacggtgtttt

SEQ ID NO: 637757 - DNA, 75 bp, synthetic construct
  source 1..75: mol_type = other DNA
ccatgccaaaaacccgcaatcagcggggcgtgtatctgtgtgaagtgggaacggacaccgcaaaagaaattctct

SEQ ID NO: 637758 - DNA, 75 bp, synthetic construct
  source 1..75: mol_type = other DNA
atatttattataaccgttattggtccacaggtgatggattgttaactggctggataaacctgaaggtcaacgagg

SEQ ID NO: 637759 - DNA, 75 bp, synthetic construct
  source 1..75: mol_type = other DNA
aaaaactaccgtgaaaaatccgtggacgtggtctgctatgacgaactttcctcgttcgaaccggatgtcgaaaaa

SEQ ID NO: 637760 - DNA, 75 bp, synthetic construct
  source 1..75: mol_type = other DNA
gcggctgcgacgatggaaccccagagcgatatccgcgaccgcacaccgggcaggctggcactgtccggcatgcat

SEQ ID NO: 637761 - DNA, 75 bp, synthetic construct
  source 1..75: mol_type = other DNA
accatgccgaaaactcgcaatcagcggggtgtttatctgtgtgaggtggggacggacaccgcaaaagaaattctc

SEQ ID NO: 637762 - DNA, 75 bp, synthetic construct
  source 1..75: mol_type = other DNA
tggacccgtgacggtctgacgtttttcagcgcccggggtgatgaaattccgccgccgcgctccatcatgttccat

SEQ ID NO: 637763 - DNA, 75 bp, synthetic construct
  source 1..75: mol_type = other DNA
tatgccatccgttttcctgatgatccggagattttttcgcagacagaggcgcagcaactggtggcggaagagctg

SEQ ID NO: 637764 - DNA, 75 bp, synthetic construct
  source 1..75: mol_type = other DNA
ctgccgctgaagattttatgaagtctcacgtggaggcgacgattcgggacgtgccatgcctgaaagatctttccc

SEQ ID NO: 637765 - DNA, 75 bp, synthetic construct
  source 1..75: mol_type = other DNA
ggcttaaatgggagaaggacagccccgaaagtgttttctacctctgtgaacatcatggctgcgtgatccatcagt

SEQ ID NO: 637766 - DNA, 75 bp, synthetic construct
  source 1..75: mol_type = other DNA
tgtatgtctggggatgggctccgggagaggaagcctttctggtggataaaatcatcattatggggcgtcctgatg

SEQ ID NO: 637767 - DNA, 75 bp, synthetic construct
  source 1..75: mol_type = other DNA
cgaactttgcgacaaccgtcactaatgcactggcagggaaacagccgcttaatgacgtgttaacggctgtcagca

SEQ ID NO: 637768 - DNA, 75 bp, synthetic construct
  source 1..75: mol_type = other DNA
aaagcggcgtaacgaagcgctggactgcctggtgtatgcctacgcggcattacgtgtgtccgtgcaacgctggca

SEQ ID NO: 637769 - DNA, 75 bp, synthetic construct
  source 1..75: mol_type = other DNA
gcgactgattcgttatgcgatgggtgattacactttggataatcttgctaatggcgaatggcgagaagtgacaga

SEQ ID NO: 637770 - DNA, 75 bp, synthetic construct
  source 1..75: mol_type = other DNA
ttggagtcattaccggcgcgtttaacccagccgggtaaacgcaccggaaaaatctattatgtgcaggtggaaggt

SEQ ID NO: 637771 - DNA, 75 bp, synthetic construct
  source 1..75: mol_type = other DNA
agtattcccaccagctggctgaagatcaccttatatgaaggacgtaatcgccaggtgcgccgcatgaccgcccat

SEQ ID NO: 637772 - DNA, 75 bp, synthetic construct
  source 1..75: mol_type = other DNA
cgagtgctggtggtggatgtcagcccagaaacgcaacttaagcgcaccatgcagcgcgatgatgtaactcgcgag

SEQ ID NO: 637773 - DNA, 75 bp, synthetic construct
  source 1..75: mol_type = other DNA
aaatggcgcggttgtgcgcaccattgatattggtgaactgaccgccggagtccacagtttcacctgggacggtac

SEQ ID NO: 637774 - DNA, 75 bp, synthetic construct
  source 1..75: mol_type = other DNA
tcagggcattatcgcccgtgtgaagcctggacgtcagtatcaggaaaatgatctgccggatctgctcgcttcgct

SEQ ID NO: 637775 - DNA, 75 bp, synthetic construct
  source 1..75: mol_type = other DNA
cagtttaaaggtctctcattttgggaggtttgggatatacaagcacaagaaaaacacaataaagccaatgcgaag

SEQ ID NO: 637776 - DNA, 75 bp, synthetic construct
  source 1..75: mol_type = other DNA
cctaccctcaattccattacatatatggaactggggaatccaaaaccgtacaggccatcttcgtactgtagatcc

SEQ ID NO: 637777 - DNA, 75 bp, synthetic construct
  source 1..75: mol_type = other DNA
tgatatcgagccagaacaatggccaaccctaggtttacctgatgccattcttgctgaccgtggtgaaatgatgag

SEQ ID NO: 637778 - DNA, 75 bp, synthetic construct
  source 1..75: mol_type = other DNA
ggtaaatgaaattcgtataccaaaagagtttaccggaaccgcaatggggatattaatttgcatcggattcagccc

SEQ ID NO: 637779 - DNA, 75 bp, synthetic construct
  source 1..75: mol_type = other DNA
cgccaccggccctcccctggtgatggctgcgttagcagcatttattatcagctgtgttatttttgtttaccaagg

SEQ ID NO: 637780 - DNA, 75 bp, synthetic construct
  source 1..75: mol_type = other DNA
taaccgcctggacggaacgcgaagcgcgtagccgttgcccgtcaggttgtgttgctgtatttgccgcccgtattc

SEQ ID NO: 637781 - DNA, 75 bp, synthetic construct
  source 1..75: mol_type = other DNA
tgtcgattataaatttcatacatttaaacaagcagatggttcatttcgttttgttcttcagttggtaaatggtcg

SEQ ID NO: 637782 - DNA, 75 bp, synthetic construct
  source 1..75: mol_type = other DNA
cagcaactgatgattagccgtgaagaagatattcgtaatctccagtgggatatcatggcgaccgccagcatcctg

SEQ ID NO: 637783 - DNA, 75 bp, synthetic construct
  source 1..75: mol_type = other DNA
ccatcgcgcggattgatccgacctggagctgttttcagtgtttgtccactgaatatgccagtgcactgatagatt

SEQ ID NO: 637784 - DNA, 75 bp, synthetic construct
  source 1..75: mol_type = other DNA
agctatgccccggagccgccattgcctgagccggtgacgcgcccggtggagttgtacgttaatggcgaactggtg

SEQ ID NO: 637785 - DNA, 75 bp, synthetic construct
  source 1..75: mol_type = other DNA
tggcgtgggtaatgcgccacaaaacaaagccttcctgcaagaattacaagaagccagcgatcgcggtattgtggt

SEQ ID NO: 637786 - DNA, 75 bp, synthetic construct
  source 1..75: mol_type = other DNA
caggaactggatactgaaaccattcgcaaggccatgagccaaaacctgcgcggcgaactgacgccggatgattaa

SEQ ID NO: 637787 - DNA, 75 bp, synthetic construct
  source 1..75: mol_type = other DNA
gtgggcgaaaccatccatgccatgattcatgccgagaagttggagaaagcgcgcagtctgctgatttcaaccacc

SEQ ID NO: 637788 - DNA, 75 bp, synthetic construct
  source 1..75: mol_type = other DNA
tgctccagaaaaacaacggcgacaaagtcggcacccgcgtcgagtatgctatcgatctgtcggtagatggcgggc

SEQ ID NO: 637789 - DNA, 75 bp, synthetic construct
  source 1..75: mol_type = other DNA
tgggtgttgctgacgatttatacggcgaaggtagtacatttgacatgacgcgtacaatcacctatatggatacag

SEQ ID NO: 637790 - DNA, 75 bp, synthetic construct
  source 1..75: mol_type = other DNA
gttgtcagcgtttccgaaaaggatgatggcactttctcgattactggcgcatggcacgacccggataaatatgcc

SEQ ID NO: 637791 - DNA, 75 bp, synthetic construct
  source 1..75: mol_type = other DNA
tcaacacgctgactgttacctccggagaaaatactgcagccattacggtaaacgcaaaggccgtggctgatgtga

SEQ ID NO: 637792 - DNA, 75 bp, synthetic construct
  source 1..75: mol_type = other DNA
gcgatagccaacgttaatggcgacctcagcgcgatgtataacatcaaggttggcgtttccagcaacggtcagtat

SEQ ID NO: 637793 - DNA, 75 bp, synthetic construct
  source 1..75: mol_type = other DNA
gcctgaccggaaccgaggacgatgcgatgctgctggccgatgtgccttatccgcagcgcaaatatcagcagatgg

SEQ ID NO: 637794 - DNA, 75 bp, synthetic construct
  source 1..75: mol_type = other DNA
attgacctaccgcaggcaggcagcacatggacggtgcgcctgcgtaagctaacggcggatgccaacagcgcgaaa

SEQ ID NO: 637795 - DNA, 75 bp, synthetic construct
  source 1..75: mol_type = other DNA
atgacccggagacccgcacctacagcggcacatggacaggggcgtttaagtgggcgtggacggataatccagcct

SEQ ID NO: 637796 - DNA, 75 bp, synthetic construct
  source 1..75: mol_type = other DNA
tcttgagaagcgttttaaagaagaggtgggcgaaaccattcacgccatgattcatgccgaaaagctggagaaagc

SEQ ID NO: 637797 - DNA, 75 bp, synthetic construct
  source 1..75: mol_type = other DNA
gttaaccagcgcaacctcctgagcgtccagtatggagataacaaagccagtatcgatcgagtagacaatgtgatg

SEQ ID NO: 637798 - DNA, 75 bp, synthetic construct
  source 1..75: mol_type = other DNA
acggtgatctgaaggcgatgtacagcatcaaggttggtgtctccagcaatggtcagtattacgccgcagggatgg

SEQ ID NO: 637799 - DNA, 75 bp, synthetic construct
  source 1..75: mol_type = other DNA
cggaaaggttatgggcggacgcatcagcgccgttaatggtcgcgttatcaaacttgaccgtgtagctgatgcggc

SEQ ID NO: 637800 - DNA, 75 bp, synthetic construct
  source 1..75: mol_type = other DNA
atgggctgagttgccgcgctgggctgatcttacgcctttttcgtgggggatttggatcaagatcatcactgcgct

SEQ ID NO: 637801 - DNA, 75 bp, synthetic construct
  source 1..75: mol_type = other DNA
acactcgtctgggtggtatggtatggcgtgcagacaccaaggctaacgtacctggtggcgcatcctttaaagacc

SEQ ID NO: 637802 - DNA, 75 bp, synthetic construct
  source 1..75: mol_type = other DNA
tagtgccgctgccaggtcatttgtctacggaaataccctgcctggcacgtatctcgctttatcaggcgggccgga

SEQ ID NO: 637803 - DNA, 75 bp, synthetic construct
  source 1..75: mol_type = other DNA
gcacaaacctaccaacgtaatgccgatacttataaagccaagattacccaaacccttgcccccctgcgtaagcag

SEQ ID NO: 637804 - DNA, 75 bp, synthetic construct
  source 1..75: mol_type = other DNA
ctgcttgacacaactccggttgcaataatgttcattttttgcggggtgattatcattgcatttatatgggttggg

SEQ ID NO: 637805 - DNA, 75 bp, synthetic construct
  source 1..75: mol_type = other DNA
cgaaatcagcaggcctgaaaaaagatctagagaggaaatgatcggcataatcgtgtgtgacgttcacgagaaaaa

SEQ ID NO: 637806 - DNA, 75 bp, synthetic construct
  source 1..75: mol_type = other DNA
atacaaagctcagggcgttcaactgaccgctaaactgggttacccaatcactgacgacctagacatctacactcg

SEQ ID NO: 637807 - DNA, 75 bp, synthetic construct
  source 1..75: mol_type = other DNA
tgccgctgacattaatcgtctttttcgccgcccgaaaactggcagcgaaatataaatttccgttacttaatccat

SEQ ID NO: 637808 - DNA, 75 bp, synthetic construct
  source 1..75: mol_type = other DNA
atgctgaccggcatctcttacgacagctactttaaaggtagcgaagtgctaaacgatctgctgcaaccggcggtc

SEQ ID NO: 637809 - DNA, 75 bp, synthetic construct
  source 1..75: mol_type = other DNA
gccgtttcggttgcgctgcagcctctggtcagggttgtaccaatgacggcagttgaatgggctgatcaaaattat

SEQ ID NO: 637810 - DNA, 75 bp, synthetic construct
  source 1..75: mol_type = other DNA
tctgtgtatgttcagggttccggtggcggaatgccaggcacataccgggcattgtcggggaatggactggggtct

SEQ ID NO: 637811 - DNA, 75 bp, synthetic construct
  source 1..75: mol_type = other DNA
cttcgggtgtgacgccagtagggatcaccgaagggccctatgagggcaaacctaacccccatgcctggatgtcgc

SEQ ID NO: 637812 - DNA, 75 bp, synthetic construct
  source 1..75: mol_type = other DNA
tcactaaagcactggcaggtaaacagccgcttaatgacgtgttaacggctgtcagccagataacaccggaagaaa

SEQ ID NO: 637813 - DNA, 75 bp, synthetic construct
  source 1..75: mol_type = other DNA
ttcagacagacctttacgacagttcggaaggccgtgttgcgctgcctggtgcatttggttacggaatgacggacg

SEQ ID NO: 637814 - DNA, 75 bp, synthetic construct
  source 1..75: mol_type = other DNA
atgaaaaagttagtagccacagcaccgcgtgttgctgcgctggttgagtatgaagatcgggcgattttagccaat

SEQ ID NO: 637815 - DNA, 75 bp, synthetic construct
  source 1..75: mol_type = other DNA
tctggtgatcgccgcggctgcctttgtgaaagtggcggaggcggccgttaccacgttttcagaggtgcgggacgg

SEQ ID NO: 637816 - DNA, 75 bp, synthetic construct
  source 1..75: mol_type = other DNA
ttacacaagtatggcgagcatatcttgaaggtgtcgaaaatttttcttctttgaacattcaacaagttctaacaa

SEQ ID NO: 637817 - DNA, 75 bp, synthetic construct
  source 1..75: mol_type = other DNA
ggctggagatttttattggtcactgggaaatgcgccatcgtctgactaaccgcgaagaaggcgaaaaagtgctgc

SEQ ID NO: 637818 - DNA, 75 bp, synthetic construct
  source 1..75: mol_type = other DNA
cacggcgcggatttctgccttaaccccattggtactgacgtaggcaaagagatcaaaacgctgaccggcaagcag

SEQ ID NO: 637819 - DNA, 75 bp, synthetic construct
  source 1..75: mol_type = other DNA
atgaaaaagttagtagccacggcaccgcgcgtagcggcgctggttgagtatgaagacagggcgattttagccaat

SEQ ID NO: 637820 - DNA, 75 bp, synthetic construct
  source 1..75: mol_type = other DNA
agaacagtaccaaaagcaactttcccccggttgataatcagttttgcttttaccatgttgatttcagcatagaac

SEQ ID NO: 637821 - DNA, 75 bp, synthetic construct
  source 1..75: mol_type = other DNA
ggggtattggtcgaaagattagtgaacgcctgtcggctttcgggatcatcactgccggtgatttttataatagcg

SEQ ID NO: 637822 - DNA, 75 bp, synthetic construct
  source 1..75: mol_type = other DNA
cagccacaccaaaggctgtcaaaaccgtcatggacgagacgaaaacaaaagcgccactggacagcccggcattca

SEQ ID NO: 637823 - DNA, 75 bp, synthetic construct
  source 1..75: mol_type = other DNA
atgcgtaaaaaagggcttactgtcagccgtctgcgcctgatggcgcgtctggcgggaatggtcatggtgacgttt

SEQ ID NO: 637824 - DNA, 75 bp, synthetic construct
  source 1..75: mol_type = other DNA
ggatggtgtggtgctgggcggtctgattatctccgccattgggtttattgtcgttgcgaatgccgcaatttccac

SEQ ID NO: 637825 - DNA, 75 bp, synthetic construct
  source 1..75: mol_type = other DNA
acgcacctgggatctgatcccgctctgtcatccgctgatgctcagcaaagttgaagtcaatttacaggccgagcc

SEQ ID NO: 637826 - DNA, 75 bp, synthetic construct
  source 1..75: mol_type = other DNA
taattgacactgacgtataccctactcctggtgaattcgttgcggcatgtaacggtagccacgaagcaacgttca

SEQ ID NO: 637827 - DNA, 75 bp, synthetic construct
  source 1..75: mol_type = other DNA
gtggcgttatttcttttgaccctaatattcggaaagagatgctcgatattccagaaatgcgtgacgccctccact

SEQ ID NO: 637828 - DNA, 75 bp, synthetic construct
  source 1..75: mol_type = other DNA
cccgttgccagtccgttcaggtttaccgtcacgggcagaacccaaaaagacatgatcgattccgcggccgtgact

SEQ ID NO: 637829 - DNA, 75 bp, synthetic construct
  source 1..75: mol_type = other DNA
agcaataccaggagggaagtcttactgctgtggccgcaggagagcaggtcgttcctgcctctgaacttgctgctg

SEQ ID NO: 637830 - DNA, 75 bp, synthetic construct
  source 1..75: mol_type = other DNA
gattcattagtgatggaaatgccggcatgttcccatttaatgagtaaccataatggtattctctatgttggtgat

SEQ ID NO: 637831 - DNA, 75 bp, synthetic construct
  source 1..75: mol_type = other DNA
gtgtgttggaggaaatgagcgttggccgtgaaaagctgtatattaacactaggttgctacaggagttgaatcagt

SEQ ID NO: 637832 - DNA, 75 bp, synthetic construct
  source 1..75: mol_type = other DNA
gtgataacagatgtctggaaatataggggcaaatccaataatgcgttcttcccttcagaatattcgcttagccaa

SEQ ID NO: 637833 - DNA, 75 bp, synthetic construct
  source 1..75: mol_type = other DNA
ttttatttaacaaatcaaaagaagacgataaaggcatcactatgctggaaattgccggtggccttattattatcg

SEQ ID NO: 637834 - DNA, 75 bp, synthetic construct
  source 1..75: mol_type = other DNA
gaaattgccggcgcactgattattatcggtattgtggttggtctcgcaataagtcagatgtccagtaccatgtca

SEQ ID NO: 637835 - DNA, 75 bp, synthetic construct
  source 1..75: mol_type = other DNA
tttttggcagcaaaacgaagctcgcgaatgctgcaggggtgaggctggcaagcattgctgcatggggggagctgg

SEQ ID NO: 637836 - DNA, 75 bp, synthetic construct
  source 1..75: mol_type = other DNA
aataccaggaaggaagtcttactgctgtcgccgccggagaacaggttgttcctgcctctgaacttgctgccgcca

SEQ ID NO: 637837 - DNA, 75 bp, synthetic construct
  source 1..75: mol_type = other DNA
gcaaacaaaaaaacataatatcatcatttaccgtaattgataaaaataatatatttaaatctacaaatataatat

SEQ ID NO: 637838 - DNA, 75 bp, synthetic construct
  source 1..75: mol_type = other DNA
ccaatgactgcgctgccaacgcttattcgccatacgcccgggcaaaaagaaccggtactgcatttttcacatgtc

SEQ ID NO: 637839 - DNA, 75 bp, synthetic construct
  source 1..75: mol_type = other DNA
accggccgtacacttcggcggtaagttccgcattatcgactttgcgctgtctaactgcatcaactccgggatccg

SEQ ID NO: 637840 - DNA, 75 bp, synthetic construct
  source 1..75: mol_type = other DNA
cttacaaggataaaatgttaagtaatgaagagtggagggagctggatgagaagttcattgagattctgaatgaac

SEQ ID NO: 637841 - DNA, 75 bp, synthetic construct
  source 1..75: mol_type = other DNA
gttaatgacgtcttccacgggacgtaagcgagacacggcgtcagttattcccgatacaaagccagaagcacagag

SEQ ID NO: 637842 - DNA, 75 bp, synthetic construct
  source 1..75: mol_type = other DNA
atttttctacgccagaagaaatgcgaacggcgtttcccaacctcgacaattttaaatatcgcaacaaatggtacg

SEQ ID NO: 637843 - DNA, 75 bp, synthetic construct
  source 1..75: mol_type = other DNA
gaccagacaagcgccgttttcgaacgggcaagaccaatgttgaaaagccttcgggcgagacaattcgaattttaa

SEQ ID NO: 637844 - DNA, 75 bp, synthetic construct
  source 1..75: mol_type = other DNA
gaggaaatcatcctcctttgctacatgcaactctggatggaaaaagcccaggaccttagcaagcagctgtacccc

SEQ ID NO: 637845 - DNA, 75 bp, synthetic construct
  source 1..75: mol_type = other DNA
ggatcacgccgggtgaacacattatcagtgccgactctgcgctcagcagaaatatccggcagtgtttctgccttt

SEQ ID NO: 637846 - DNA, 75 bp, synthetic construct
  source 1..75: mol_type = other DNA
attaaagagctgatcactgaaatggccttcaatggcgccggggttcgcgataccgccagaacactgaaaattggc

SEQ ID NO: 637847 - DNA, 75 bp, synthetic construct
  source 1..75: mol_type = other DNA
ctgcgacgggcgcattatcagcgccggcgatattcaggaaatggccgaaacctacgacccgcgcgtctacggttg

SEQ ID NO: 637848 - DNA, 75 bp, synthetic construct
  source 1..75: mol_type = other DNA
tccagcgcggctggtcattcttcaatgaagaaatgaacgagtttgtcgatctgctgccagcacagcagagaatga

SEQ ID NO: 637849 - DNA, 75 bp, synthetic construct
  source 1..75: mol_type = other DNA
tactcgaacacgaattacaactaatgctggttgaaggctttgacaagtcccctatttctgccaaagccttgcata

SEQ ID NO: 637850 - DNA, 75 bp, synthetic construct
  source 1..75: mol_type = other DNA
ataccttgtcattgattgaaattgtcaaagcggtaaaagtcaatacggttataccggtagaaagccttcttgctc

SEQ ID NO: 637851 - DNA, 75 bp, synthetic construct
  source 1..75: mol_type = other DNA
ctctgctgtttttgactatcgtcgctggcattaaattgatttttatatcgctggtggtgtttttcaaatttctaa

SEQ ID NO: 637852 - DNA, 75 bp, synthetic construct
  source 1..75: mol_type = other DNA
cagtacgaccccaaagtttatgacgaatatcgtaaggcaaaacgaccttggaaggtgattcatgaaaatcaggca

SEQ ID NO: 637853 - DNA, 75 bp, synthetic construct
  source 1..75: mol_type = other DNA
agatcgttatggtcgtattctcgggcaggtttatgcaccagacggtatgaatgttaatcagtttatggtccgtgc

SEQ ID NO: 637854 - DNA, 75 bp, synthetic construct
  source 1..75: mol_type = other DNA
ttttgtacgctggtcaagaaatcaacttaaagccttgctcgccggacaatccgttaccgtctcttatacgcaaac

SEQ ID NO: 637855 - DNA, 75 bp, synthetic construct
  source 1..75: mol_type = other DNA
gcaacaacctgtcagggttcgtctcctgaatatcgatgccccggaaaagaaacaaccctttggacgctggtcaac

SEQ ID NO: 637856 - DNA, 75 bp, synthetic construct
  source 1..75: mol_type = other DNA
cacagcaagatccaagtctgatgggcgtcaccgttagcattaatggtgccgatcagcgtaccgatcaggcgctgg

SEQ ID NO: 637857 - DNA, 75 bp, synthetic construct
  source 1..75: mol_type = other DNA
gatcagcgtaccgatcaggcgctggcaaaagtcacccgcgataatcaaatcgttaccctgaccgcctcccgcgat

SEQ ID NO: 637858 - DNA, 75 bp, synthetic construct
  source 1..75: mol_type = other DNA
tacaacaccgatcctgttcttcccgtcctgcaggaagaagcacgacagcagaaacgtggtctgtgggcagacagc

SEQ ID NO: 637859 - DNA, 75 bp, synthetic construct
  source 1..75: mol_type = other DNA
aatctgaaaattgttgagctggaagcaccgcaattgccacgttccctggacgatgcacagattgctctggcggtt

SEQ ID NO: 637860 - DNA, 75 bp, synthetic construct
  source 1..75: mol_type = other DNA
cggcagtgggagccctgatcggatcactggcactggtaggctgcggtcaggatgaaaaagatccaaaccacatta

SEQ ID NO: 637861 - DNA, 75 bp, synthetic construct
  source 1..75: mol_type = other DNA
tatccgattgctggttactccaagaaaatcaaatcactggatgaactgcaggatggttcgcaggttgccgtgcca

SEQ ID NO: 637862 - DNA, 75 bp, synthetic construct
  source 1..75: mol_type = other DNA
ccgtcacgggcagaacccaaaaagacatgatcgattccgcggccgtgactgtcaccgggtatttcagctcagtta

SEQ ID NO: 637863 - DNA, 75 bp, synthetic construct
  source 1..75: mol_type = other DNA
attgatttcacgtttgaatggaaagagctgaagaaattatgcatggcagtctcctttcgttcaataataacagaa

SEQ ID NO: 637864 - DNA, 75 bp, synthetic construct
  source 1..75: mol_type = other DNA
ggatgccagccgctttatggttcagtctggcgctgcatgggtatatgaacgttacaacgtggatgagtcattacc

SEQ ID NO: 637865 - DNA, 75 bp, synthetic construct
  source 1..75: mol_type = other DNA
aatttttttctgagcgattaattcttaaagatctaaacattaatctgattcctggagatttcttagtattgacag

SEQ ID NO: 637866 - DNA, 75 bp, synthetic construct
  source 1..75: mol_type = other DNA
gctgctcccgccacagaaagcgcactggcattaattgaagcggtaaagcatcaccctcgcagcaagtatgtctct

SEQ ID NO: 637867 - DNA, 75 bp, synthetic construct
  source 1..75: mol_type = other DNA
cgtgccgattaaacgcggcaagctggcgtttatttcgcagtcggctgccgtctccaacaccatcctcgactgggc

SEQ ID NO: 637868 - DNA, 75 bp, synthetic construct
  source 1..75: mol_type = other DNA
gattatcagcaacggtgcagcgccagctgcgctggcgctggatgctttatggtcacgcaatggcaagctggcaac

SEQ ID NO: 637869 - DNA, 75 bp, synthetic construct
  source 1..75: mol_type = other DNA
cttcagtatgatcccaaagtttatgatgaatatcgtaagacgaagcgggcggggcggttgaacaatgaaaatcac

SEQ ID NO: 637870 - DNA, 75 bp, synthetic construct
  source 1..75: mol_type = other DNA
attacggcacgaaagccaaagtggcgaaagctgctggcgttgatccatctgctgtttctcaatggggggaactgg

SEQ ID NO: 637871 - DNA, 75 bp, synthetic construct
  source 1..75: mol_type = other DNA
ggctatatcaacctgcacggcaccgccacacaactcaacgatcagattgaatcaatggtggttaacgccctgttt

SEQ ID NO: 637872 - DNA, 75 bp, synthetic construct
  source 1..75: mol_type = other DNA
gattatcagcaacggtgctgcgcctgccgcgctggcgctggatgccttatggtcacgcaatggcaagctggcaac

SEQ ID NO: 637873 - DNA, 75 bp, synthetic construct
  source 1..75: mol_type = other DNA
atctccgcgcctgcgccctgcgccataacatgcgtctgctggggccaaacagtctgggattactggccccctggc

SEQ ID NO: 637874 - DNA, 75 bp, synthetic construct
  source 1..75: mol_type = other DNA
tgcgcagcttacgccagatgacgtcggctatatcaacctgcacggcaccgccacacaactcaacgatcagattga

SEQ ID NO: 637875 - DNA, 75 bp, synthetic construct
  source 1..75: mol_type = other DNA
actcctcgcaagaggcacgacgattattcagtgaagccgggctgccgacctatcgcacgccggaaggaaccatca

SEQ ID NO: 637876 - DNA, 75 bp, synthetic construct
  source 1..75: mol_type = other DNA
tcaaaagtaaaaagattcgtgcgcgtagtgcgctacgcccgctggatgtggcgggattaagccagttactggtgc

SEQ ID NO: 637877 - DNA, 75 bp, synthetic construct
  source 1..75: mol_type = other DNA
tgacctctaataccgcagaagcgcatattctgttgcaacgggccatttccgaaggggctacgtcgctcgataccc

SEQ ID NO: 637878 - DNA, 75 bp, synthetic construct
  source 1..75: mol_type = other DNA
cgccccgaccgctgcgcggatgaaacaggccgcagagcaaaccgggcgcgacgttggctcttatgtgttgtttat

SEQ ID NO: 637879 - DNA, 75 bp, synthetic construct
  source 1..75: mol_type = other DNA
gtgtagcagccagccagttatttctctggcgtaagcaataccaggaaggaagtcttactgctgtcgccgccggag

SEQ ID NO: 637880 - DNA, 75 bp, synthetic construct
  source 1..75: mol_type = other DNA
ctggctaaccgaacaaagtcagaaagatacccgctccggtactgacaccaacgtccgtcagatggccgatcccac

SEQ ID NO: 637881 - DNA, 75 bp, synthetic construct
  source 1..75: mol_type = other DNA
tgttaggttactcaattaccactaccgacttcatagccataataagtgtcataattgcattttttgcaatgtacc

SEQ ID NO: 637882 - DNA, 75 bp, synthetic construct
  source 1..75: mol_type = other DNA
tggcatggcgttctccgcccggtatgccgatttcaacttctgtttcggcaaaggcgtaaatacacccacggcttt

SEQ ID NO: 637883 - DNA, 75 bp, synthetic construct
  source 1..75: mol_type = other DNA
ccagcgtcgcccgcatgttagatgaagtagcaagcgtgcctggcgccgaaggcgtgctgctaacctttgatgatt

SEQ ID NO: 637884 - DNA, 75 bp, synthetic construct
  source 1..75: mol_type = other DNA
atctgaaatcatccatgagttgaaatatgccgcagctcagttaatggcgaagcattcagccttacctttctatat

SEQ ID NO: 637885 - DNA, 75 bp, synthetic construct
  source 1..75: mol_type = other DNA
ggtggtcagctcattgtaaagagcgcgattgaaccttatatagaattcaagaaacaattgggaaaaatatcaaat

SEQ ID NO: 637886 - DNA, 75 bp, synthetic construct
  source 1..75: mol_type = other DNA
cgtggaggtgctcaagcagcgccacaaaaaaaactatgaagctggcgttgcggctggactggatccgctgatgac

SEQ ID NO: 637887 - DNA, 75 bp, synthetic construct
  source 1..75: mol_type = other DNA
gaagctactcgtaatttcacgggttataaacctgtgaaaaaggaaaacctggtgttcgtatcgcgtagagcatcg

SEQ ID NO: 637888 - DNA, 75 bp, synthetic construct
  source 1..75: mol_type = other DNA
aagatcatataattttatctgttgaagcttttatcgaatacattgaaaggattggttttaaggtcatacgggatt

SEQ ID NO: 637889 - DNA, 75 bp, synthetic construct
  source 1..75: mol_type = other DNA
gatcatgtaattttatctatcgaggcattcattgaataccttgaaaggctcggtttcaaggtgattcgggaatga

SEQ ID NO: 637890 - DNA, 75 bp, synthetic construct
  source 1..75: mol_type = other DNA
ctggcctactgcgaatacaaaatcaggatgtttgatcagcttgatgccaccctccgtgacatcccttcgggcgta

SEQ ID NO: 637891 - DNA, 75 bp, synthetic construct
  source 1..75: mol_type = other DNA
gaagcggcgacgcttgggcaaacgactgcacttgtcaccaagcggatcgaattccttgaaaatacgctggcaaca

SEQ ID NO: 637892 - DNA, 75 bp, synthetic construct
  source 1..75: mol_type = other DNA
atcctcacccaatatcagcgactggtcgatgacgtcacgcaaatcaaaacgcgcccggaggggatgattcgtatt

SEQ ID NO: 637893 - DNA, 75 bp, synthetic construct
  source 1..75: mol_type = other DNA
gcactgacccataaatggattactaccgattttgcggaagcattgctggaattcattacaccagtggatggtgat

SEQ ID NO: 637894 - DNA, 75 bp, synthetic construct
  source 1..75: mol_type = other DNA
agcgtgctaaagctgaaggggttcacatgggaagacctgtaaaagcttcttcagaggctgtacagacgcttattt

SEQ ID NO: 637895 - DNA, 75 bp, synthetic construct
  source 1..75: mol_type = other DNA
taagtacagatgaccaatccatcactaaccaacaaatgcaaattgaagaggcagggtacaacattgctaaatggt

SEQ ID NO: 637896 - DNA, 75 bp, synthetic construct
  source 1..75: mol_type = other DNA
agttgcgcgtctgcgtagagtttctggcggcatggtgccagcaacgactgggcaagcccgatgaaggctatcagg

SEQ ID NO: 637897 - DNA, 75 bp, synthetic construct
  source 1..75: mol_type = other DNA
atgttataaatcagcatacagtagaaggaccaacaatggcgcagttgctgaccagggtgctgcttaaatacgtcg

SEQ ID NO: 637898 - DNA, 75 bp, synthetic construct
  source 1..75: mol_type = other DNA
gagtatttcattggcgatcgcatctacccggttcgtaaaggcgacctggtcatttataacagccaggtggtgcat

SEQ ID NO: 637899 - DNA, 75 bp, synthetic construct
  source 1..75: mol_type = other DNA
ctgaattacaggaggctgtaagtcaactggcacatcaggagatacagatgattaaagatattatcacctccgggc

SEQ ID NO: 637900 - DNA, 75 bp, synthetic construct
  source 1..75: mol_type = other DNA
tcagttcgaagaagtctttatgaaagaggaactattagggctatttaaagaatttgaacgattcgcactcgatgt

SEQ ID NO: 637901 - DNA, 75 bp, synthetic construct
  source 1..75: mol_type = other DNA
ggttttatcgaatatgaaaaaccattcctgattgagagtgttacggatatcataggatctgagagtgttcaggaa

SEQ ID NO: 637902 - DNA, 75 bp, synthetic construct
  source 1..75: mol_type = other DNA
ttcaccgatggattacctgataaaacgtaggctgggggaggctcaatcgttactaaccacggataaaggcgggcg

SEQ ID NO: 637903 - DNA, 75 bp, synthetic construct
  source 1..75: mol_type = other DNA
ctgctgccagcgcagcagagaatgaaaggggagaactggtatcgcggtacggcagatgccgttacccaaaacctc

SEQ ID NO: 637904 - DNA, 75 bp, synthetic construct
  source 1..75: mol_type = other DNA
tcgtgcaggccatgcccgtggtgagaacatttgatagcggcagcaccagttttttgcgctatcaacgcgcccttg

SEQ ID NO: 637905 - DNA, 75 bp, synthetic construct
  source 1..75: mol_type = other DNA
aatcgctgtcccgatttcctctctggcaggtgattacaccggttcgcaggaaggttattttagctatggcgctgg

SEQ ID NO: 637906 - DNA, 75 bp, synthetic construct
  source 1..75: mol_type = other DNA
ttgctccgcgaagcagcaaaacttgatcccgccaactatatggtgcatagggccagaagtatgctggcgcaacta

SEQ ID NO: 637907 - DNA, 75 bp, synthetic construct
  source 1..75: mol_type = other DNA
ataatttgacgatccgtgtttctgcaaatgcgtttgacaacccttatccggatgaaaacatgcattacgaatatc

SEQ ID NO: 637908 - DNA, 75 bp, synthetic construct
  source 1..75: mol_type = other DNA
gacgcaaaaaaaatcataggaaaagcaaccggcacaaaacctaacgacgtactggacaggttttggcccctaatg

SEQ ID NO: 637909 - DNA, 75 bp, synthetic construct
  source 1..75: mol_type = other DNA
ggcggctggcaatcgcgacgctggggggactggcgtttggatcggttattctcgtgctcgcccgccagcgttcgg

SEQ ID NO: 637910 - DNA, 75 bp, synthetic construct
  source 1..75: mol_type = other DNA
atcctcgaaaccaatacgggcatgaataacatgctggaacgtattggcgcacagccatataagcgttaccgcgtg

SEQ ID NO: 637911 - DNA, 75 bp, synthetic construct
  source 1..75: mol_type = other DNA
ccgagattgattctgctccctgcgcgtttattgtcggcttaccgaatattaacgaggcgattgccgatctgaatg

SEQ ID NO: 637912 - DNA, 75 bp, synthetic construct
  source 1..75: mol_type = other DNA
cactcttctagttaacgctcgtgatctacactcttttcttggtgtgggcagaatgttcgcgcactgggttaaaga

SEQ ID NO: 637913 - DNA, 75 bp, synthetic construct
  source 1..75: mol_type = other DNA
agaatgcacaggacatctgcaaacgcctgtacccgataatgaaggaacttaactcatcatacgcgagtaagctgt

SEQ ID NO: 637914 - DNA, 75 bp, synthetic construct
  source 1..75: mol_type = other DNA
agctctggatggaaaaagcccaggacctcagcaaacacctgtatcccatcatgaaagagctgaactctgattact

SEQ ID NO: 637915 - DNA, 75 bp, synthetic construct
  source 1..75: mol_type = other DNA
atggaatgcgatctgctgatgattaaaattgaaaaagtaataaataaaaacgacttaaaggcatttatcgctttt

SEQ ID NO: 637916 - DNA, 75 bp, synthetic construct
  source 1..75: mol_type = other DNA
cacctgttgttattattaagaaaaaaagacgaattctttctcaccaggatgatgccgtacaggctgttcctgatg

SEQ ID NO: 637917 - DNA, 75 bp, synthetic construct
  source 1..75: mol_type = other DNA
gtaaacgtgttttccagctcacttactcttatgaagccagaaaacccggcgttaaggagcagatcgttgaaatgg

SEQ ID NO: 637918 - DNA, 75 bp, synthetic construct
  source 1..75: mol_type = other DNA
gcgttgccgatgcgccgcacattgttccggctgactccgttgagcgtcagacggtacaacggttgattaacgctt

SEQ ID NO: 637919 - DNA, 75 bp, synthetic construct
  source 1..75: mol_type = other DNA
cctgccgtttgctgtgcgacgaatcaacactacaacagtggcgctatccaccttccggattcggcatcacctacc

SEQ ID NO: 637920 - DNA, 75 bp, synthetic construct
  source 1..75: mol_type = other DNA
tgaagaaatgaacgagtttgtcgatctgctgccagcgcagcagagaatgaaaggggaaaactggtatcgcggcac

SEQ ID NO: 637921 - DNA, 75 bp, synthetic construct
  source 1..75: mol_type = other DNA
ggtgacgcctgaactggacatgtacgaccaggactggccaatccgtacgcagcacatggaatcgctgccaccggc

SEQ ID NO: 637922 - DNA, 75 bp, synthetic construct
  source 1..75: mol_type = other DNA
ctttgacgccgactatctgtatgaactgctggaagaagacgatcgcgatgagaactccagccacgactttggtaa

SEQ ID NO: 637923 - DNA, 75 bp, synthetic construct
  source 1..75: mol_type = other DNA
attttcagcgataaccggcaaaaagaagaggaagctgccgatctgtttatggccaaaatggccatactcagtgtg

SEQ ID NO: 637924 - DNA, 75 bp, synthetic construct
  source 1..75: mol_type = other DNA
cacgtttacggacacctgtgacgctaaaaaaataatcggccgggctgtgggaatgaaacccgataatgtactaga

SEQ ID NO: 637925 - DNA, 75 bp, synthetic construct
  source 1..75: mol_type = other DNA
attcaggacagcgccctggatgtcgcacagagaacgctggataaattacgtgaaatggcccccgaactcgccagt

SEQ ID NO: 637926 - DNA, 75 bp, synthetic construct
  source 1..75: mol_type = other DNA
tatcgcggctgcctggagtgtggcacctgccgtttgctgtgcgacgaatcaacactacaacagtggcgctatccg

SEQ ID NO: 637927 - DNA, 75 bp, synthetic construct
  source 1..75: mol_type = other DNA
tccggctgactccgttgagcgccagacggcagaacggttgattaacgcctgtccggcaggtcttttttcgctcac

SEQ ID NO: 637928 - DNA, 75 bp, synthetic construct
  source 1..75: mol_type = other DNA
ttcagcgttcatggcgcaaccattgcgttttttgtcgttgcgttgggcggtattgccgtggggattgctgttacc

SEQ ID NO: 637929 - DNA, 75 bp, synthetic construct
  source 1..75: mol_type = other DNA
catctttgttgcctcgattcgtggcgatgttcagcagcaggtgaaaacgctggagaaaaccaccgttgccgacac

SEQ ID NO: 637930 - DNA, 75 bp, synthetic construct
  source 1..75: mol_type = other DNA
gaaactggaagccagtaatgaggtttatcagaccgtaattggtcactccatcgatacccctgagaaattcaacgc

SEQ ID NO: 637931 - DNA, 75 bp, synthetic construct
  source 1..75: mol_type = other DNA
tcgataaacgtgaagaacgcactttgttgaaatatctgcaaatgaatgcgtctgacaccgcaggtaaggctcacg

SEQ ID NO: 637932 - DNA, 75 bp, synthetic construct
  source 1..75: mol_type = other DNA
cctgcgcggccaccttacgcaacacttaggtgcatacagttgcgtgaggccccgcatcctcgcaggagattacat

SEQ ID NO: 637933 - DNA, 75 bp, synthetic construct
  source 1..75: mol_type = other DNA
ttgcaggaaaatattatcatccgcctggagcgtggaggccgtcaggaggctgttacagtcacaacttcgaccgat

SEQ ID NO: 637934 - DNA, 75 bp, synthetic construct
  source 1..75: mol_type = other DNA
caccgcagacagcggggaataccaggtgctggcgcgctgggacacgccgaaggtggtgaagggggtgagctttat

SEQ ID NO: 637935 - DNA, 75 bp, synthetic construct
  source 1..75: mol_type = other DNA
gctgcatcatcaggtggaaaaaacactggcgcagggtgcgcgtttgttactgggaggggaaaagattgctggggc

SEQ ID NO: 637936 - DNA, 75 bp, synthetic construct
  source 1..75: mol_type = other DNA
gcctttaaagagcgcggcaaagacgtgcaataccttgcccatgatgataagtatcagcaaaatttccaggtgcct

SEQ ID NO: 637937 - DNA, 75 bp, synthetic construct
  source 1..75: mol_type = other DNA
ttgttctacatctgatgggctcacatccgcaggcctgcgacaggacacaaggcaaatacgaaacctttgtgcagt

SEQ ID NO: 637938 - DNA, 75 bp, synthetic construct
  source 1..75: mol_type = other DNA
gaaaggcgataaagaagcctctggttctctgctgcctgcttcggaagtgaaagtccttaaacgtgacggcgactg

SEQ ID NO: 637939 - DNA, 75 bp, synthetic construct
  source 1..75: mol_type = other DNA
gccgctcctgccataactacgatgcgatggatcatgcgaagcagcatcctgaagcggcacgtcagatgaaggtgg

SEQ ID NO: 637940 - DNA, 75 bp, synthetic construct
  source 1..75: mol_type = other DNA
tctgcctgcactggtcgtcaataatgacggcaaagctaccgatgccgtcatcgcgcctcgtctgaaatcactgga

SEQ ID NO: 637941 - DNA, 75 bp, synthetic construct
  source 1..75: mol_type = other DNA
atgcttcaaagtaatgagtacttttccggcaaagtgaaatcgatcggcttttccagcagcagcactggtcgcgcc

SEQ ID NO: 637942 - DNA, 75 bp, synthetic construct
  source 1..75: mol_type = other DNA
tgagcatctttttgcacttgagcagtcggtggcatttttcgatttttaccaggaaaagatccgtgaatgtgacga

SEQ ID NO: 637943 - DNA, 75 bp, synthetic construct
  source 1..75: mol_type = other DNA
gtattcactgctttggcgagcgcgctgccgaaattattcatatcggtcaggcgattatggaacagaaaggtggcg

SEQ ID NO: 637944 - DNA, 75 bp, synthetic construct
  source 1..75: mol_type = other DNA
ggtcgcgcccagttcaaacatctggcgcgagcgcaaatcgttggcatgaacgtgggtacgctgaaaatcttattc

SEQ ID NO: 637945 - DNA, 75 bp, synthetic construct
  source 1..75: mol_type = other DNA
atattgtctgcgatatccctgatgaacttattgatttcacgtttgaatggaaagggctgaagaaattatgcatgg

SEQ ID NO: 637946 - DNA, 75 bp, synthetic construct
  source 1..75: mol_type = other DNA
tacgtgatgttaacgccgtgtcaggtaatgccgtcaatattggtgccagtgaactgtataccggacgtgtggatg

SEQ ID NO: 637947 - DNA, 75 bp, synthetic construct
  source 1..75: mol_type = other DNA
gtttatgccgggtaagcgtctggcagtaacgacgctggataatctgcatatttacactcaggcgataacacgctg

SEQ ID NO: 637948 - DNA, 75 bp, synthetic construct
  source 1..75: mol_type = other DNA
tgaagaaaatccccagcgtctttgttatgagcggcgaacaggaaacgctgactaacccggtagtcaaaaacagcg

SEQ ID NO: 637949 - DNA, 75 bp, synthetic construct
  source 1..75: mol_type = other DNA
aggactagatatccataccaaagatagctatggcaattcctttcttttcattccatttgaaggatatgtatacga

SEQ ID NO: 637950 - DNA, 75 bp, synthetic construct
  source 1..75: mol_type = other DNA
tcgccatcgccgaaatgtatgtcaaaggagtaagtacccgcagggtctcggatatcgtcgaaattctttgtggca

SEQ ID NO: 637951 - DNA, 75 bp, synthetic construct
  source 1..75: mol_type = other DNA
gattgaagatatccctaccggcatctacaccatcccggaaatcagctcagtcggtaaaaccgaacagcaactgac

SEQ ID NO: 637952 - DNA, 75 bp, synthetic construct
  source 1..75: mol_type = other DNA
attccgtcgaaagccctccgtcacgctgtcagccgcattatagaatttaatcaaaaccctctttatagcgatcat

SEQ ID NO: 637953 - DNA, 75 bp, synthetic construct
  source 1..75: mol_type = other DNA
gacgactggcagcagacccgaacacaaggagaacaaccaaaggaaccaacgtcacaacggcacaactggcggtat

SEQ ID NO: 637954 - DNA, 75 bp, synthetic construct
  source 1..75: mol_type = other DNA
ggcaaatacgaaacctttgtgcaatcgaaagaaacgtcgtgctatctctataccatgacgcaaacagacaattta

SEQ ID NO: 637955 - DNA, 75 bp, synthetic construct
  source 1..75: mol_type = other DNA
agtacaaacaaagaaaacctacaaacatcgtcttctgggaatgatcgatgagtttccaagtctgggtaaactcga

SEQ ID NO: 637956 - DNA, 75 bp, synthetic construct
  source 1..75: mol_type = other DNA
gcgcaagggcacttcttaatcatcctccacatttgcagcgatttctgcaggtagctgattcgctgattgctaata

SEQ ID NO: 637957 - DNA, 75 bp, synthetic construct
  source 1..75: mol_type = other DNA
tttctggcacgacctggcagcaccgatcctggcgggaattattaccgcagcgattgtcagctggtggcgtaaccg

SEQ ID NO: 637958 - DNA, 75 bp, synthetic construct
  source 1..75: mol_type = other DNA
ggccgcaggtccgtaataaaaagaaaactgcgagagggaaactaatcccggcgatggccatcacttcactggcag

SEQ ID NO: 637959 - DNA, 75 bp, synthetic construct
  source 1..75: mol_type = other DNA
taaagctcgtctgcgcccgctggtacgaatcatgctgaacatgattgttcgcttgctggccgataagatggagtt

SEQ ID NO: 637960 - DNA, 75 bp, synthetic construct
  source 1..75: mol_type = other DNA
tgaacccgctgcagccaacggttctgttgcatggaatccgctcgatgaaatccgtgtaggcactgaaaatgaagt

SEQ ID NO: 637961 - DNA, 75 bp, synthetic construct
  source 1..75: mol_type = other DNA
aagcgtagcgaatattaccccaccttcaacctgacaggcgctttgggtaccagcagcgcttcgctactggcatta

SEQ ID NO: 637962 - DNA, 75 bp, synthetic construct
  source 1..75: mol_type = other DNA
cggaaattcgtggatgttcgaaaaccggatgcgccatgtggtggatggcgattacaccccgcattctgccgtaga

SEQ ID NO: 637963 - DNA, 75 bp, synthetic construct
  source 1..75: mol_type = other DNA
cgctacgttgaaagaggcaggtgcttgcggggtttctgataacgccgcgacgtttgccgaaaaactggacgctct

SEQ ID NO: 637964 - DNA, 75 bp, synthetic construct
  source 1..75: mol_type = other DNA
atgacgctcgcgcagtttgccatgactttctggcacgacctggcagcaccgatcctggcggggattattaccgca

SEQ ID NO: 637965 - DNA, 75 bp, synthetic construct
  source 1..75: mol_type = other DNA
caggcggaatttcggctggatgaaaatcgcttcaatcagttgcagaacttagcaaaaatttatcttgagtttggt

SEQ ID NO: 637966 - DNA, 75 bp, synthetic construct
  source 1..75: mol_type = other DNA
tatcaccaattctcctgcattaaaaggttcactgggtgtggacgggaaaaaacagctgaataactcgtccggttg

SEQ ID NO: 637967 - DNA, 75 bp, synthetic construct
  source 1..75: mol_type = other DNA
atcatgctgaacatgattgttcgtttgctggccgacaagatggaatttgagcgtgtagataacaaccttacgtta

SEQ ID NO: 637968 - DNA, 75 bp, synthetic construct
  source 1..75: mol_type = other DNA
acaacgaagtacaggaactgcgcagggaactttatcaggttaaacagtcagttaaggggatgcgtgacgggatgt

SEQ ID NO: 637969 - DNA, 75 bp, synthetic construct
  source 1..75: mol_type = other DNA
cgaagtacaggaactgcgcagggagctttatcaggttaaacaggtggtgaaggaaatgaagaacgggatatccgg

SEQ ID NO: 637970 - DNA, 75 bp, synthetic construct
  source 1..75: mol_type = other DNA
aactaaccaacagttgataattaactttggtgaatatacgtggaataactcaattgaagctacatggttaagttc

SEQ ID NO: 637971 - DNA, 75 bp, synthetic construct
  source 1..75: mol_type = other DNA
cttttgctatggcgaacattgcctcgcgtacaaaaagttctggtcggtatcagttcgctggtggcggcttgttat

SEQ ID NO: 637972 - DNA, 75 bp, synthetic construct
  source 1..75: mol_type = other DNA
tcaactgattccctgcctttcacttgctgacttattaagccttggaattaacaaaaatgcgctgccagagcaggc

SEQ ID NO: 637973 - DNA, 75 bp, synthetic construct
  source 1..75: mol_type = other DNA
gctgacggtaatgaggtgcaggagctgcgcgagcagctttatcaggctaaacaggtggttaagagcgtgaaaaat

SEQ ID NO: 637974 - DNA, 75 bp, synthetic construct
  source 1..75: mol_type = other DNA
aataacgaatataaggacagtcgttttgtttcatgtgggttaaatggcaaaacaccaagtgaaccgccccgggtt

SEQ ID NO: 637975 - DNA, 75 bp, synthetic construct
  source 1..75: mol_type = other DNA
ctggcgacagcagttgaaaagatcggcttcgatttactgatctttggtgaaggttccggcgacctttatgcccag

SEQ ID NO: 637976 - DNA, 75 bp, synthetic construct
  source 1..75: mol_type = other DNA
gacgatgagatagccgcgctgaccgttggcggctcattgttgcagaactcgaaagtgcgcaaagacgtgctatcc

SEQ ID NO: 637977 - DNA, 75 bp, synthetic construct
  source 1..75: mol_type = other DNA
ctgtaaaaccagagaatggcattgaccagagaactgctgagaaactggatattgagcgtgtatggtgggaattgc

SEQ ID NO: 637978 - DNA, 75 bp, synthetic construct
  source 1..75: mol_type = other DNA
ccaaatcgctggaatgtggcatacctgcagggcgtgaatattaaatcggatgacgaaacccagaagcgcatggcc

SEQ ID NO: 637979 - DNA, 75 bp, synthetic construct
  source 1..75: mol_type = other DNA
caggtggcagcctatgagcagaatctgcgctcgcatcgcccgttatttgaggtcagaaaggaggctccggataca

SEQ ID NO: 637980 - DNA, 75 bp, synthetic construct
  source 1..75: mol_type = other DNA
tgccgcacaaagatgaaaaagtaatgccattctttgagcagcataaatcgttgttccgcaatccgaagaaactcg

SEQ ID NO: 637981 - DNA, 75 bp, synthetic construct
  source 1..75: mol_type = other DNA
tgttaaggagtgagatgcctgtgcgtctggtgtctattatattcccaatattattggcgctattcttgctggcgt

SEQ ID NO: 637982 - DNA, 75 bp, synthetic construct
  source 1..75: mol_type = other DNA
atgtttaagtatgcagagatgttgatggcggaagaagatgataaagtatgtgaacttatttttaaacaacaagat

SEQ ID NO: 637983 - DNA, 75 bp, synthetic construct
  source 1..75: mol_type = other DNA
gactgccggaccgctggcagaaacctttgaacgtgaacgggaccggatgtaccgggaaaattaccggcgcagatg

SEQ ID NO: 637984 - DNA, 75 bp, synthetic construct
  source 1..75: mol_type = other DNA
ttcccgcagaaagcgacgaaagaaaggcgagcgttcggtcacgaaaggcggtggcagcgtgctgattgtggggaa

SEQ ID NO: 637985 - DNA, 75 bp, synthetic construct
  source 1..75: mol_type = other DNA
tgacagcgaatatgcagcaatctttgttcctggtggtcatggcgcacttattggtttaccagaaagccaggacgt

SEQ ID NO: 637986 - DNA, 75 bp, synthetic construct
  source 1..75: mol_type = other DNA
gctatacgccacgccgccaatgctggtggtgccggatgaacgggctgcctatgagttatttatggagaagcattt

SEQ ID NO: 637987 - DNA, 75 bp, synthetic construct
  source 1..75: mol_type = other DNA
aatatacggcggcctctctggatgagcttaaccgggcgatcaatgatgcggagttggtactggggacaacccgcc

SEQ ID NO: 637988 - DNA, 75 bp, synthetic construct
  source 1..75: mol_type = other DNA
aaaacctgcgttacgtgacttctcagccgtggccatttcctcagtcattaatgactgcgtttatggcggactatg

SEQ ID NO: 637989 - DNA, 75 bp, synthetic construct
  source 1..75: mol_type = other DNA
agaaagcaggctttgatttgatcctctgtggcgatggttcttccgacctttatgcccagcaggttggtttgctgg

SEQ ID NO: 637990 - DNA, 75 bp, synthetic construct
  source 1..75: mol_type = other DNA
agaaagcaggctttgatctgatcctctgtggcgatggttcttccgacctttatgcccagcaggttggtctgctgg

SEQ ID NO: 637991 - DNA, 75 bp, synthetic construct
  source 1..75: mol_type = other DNA
tggcatgggatatggcgattggctggattatctggtgtcaccgcgccgctatgtttcaggccggaaactttcggg

SEQ ID NO: 637992 - DNA, 75 bp, synthetic construct
  source 1..75: mol_type = other DNA
atggaagatgtcatcgaaggaaaactcgattacaccattgctgattctgtcgccatcagcctgtttcagcgcgtt

SEQ ID NO: 637993 - DNA, 75 bp, synthetic construct
  source 1..75: mol_type = other DNA
tatcatccaacagatgttgatttcacccatccacgcatttacgacagcgactcaattcttagcatgcaccacgaa

SEQ ID NO: 637994 - DNA, 75 bp, synthetic construct
  source 1..75: mol_type = other DNA
tttctgcggaaagtgaagagatgcgtcagcactttttctctgtcgccactctggcctcttttattgctgcacaac

SEQ ID NO: 637995 - DNA, 75 bp, synthetic construct
  source 1..75: mol_type = other DNA
taatgataacctcttttgtccttactggatgttccattctgccgtatcacaacgatttcgcctgtaaacttgagg

SEQ ID NO: 637996 - DNA, 75 bp, synthetic construct
  source 1..75: mol_type = other DNA
tacggcggcttctctggatgagcttaaccgggcgatcaatgatgcggagtcggtactggggacaacccggcgtcg

SEQ ID NO: 637997 - DNA, 75 bp, synthetic construct
  source 1..75: mol_type = other DNA
accgcgcagccgcacgtttacgcggtgggcgacgtgattggttatccgagtctggcgtcggcagcctatgaccag

SEQ ID NO: 637998 - DNA, 75 bp, synthetic construct
  source 1..75: mol_type = other DNA
ttcgcagtcgtcatctaattatctgacgcactccccttctctactgttttccaggaagggaagtgaagagaaacg

SEQ ID NO: 637999 - DNA, 75 bp, synthetic construct
  source 1..75: mol_type = other DNA
tatcgaaggtaagctggattacaccattgccgattctgtcgctatcagcctgtttcagcgcgttcacccggaact

SEQ ID NO: 638000 - DNA, 75 bp, synthetic construct
  source 1..75: mol_type = other DNA
atcgtatcgccgccattcaagcgcggggagagttgcgcgtgagcaccattcatactcccctgacatataacgaaa

SEQ ID NO: 638001 - DNA, 75 bp, synthetic construct
  source 1..75: mol_type = other DNA
tcattgttaacgatctgcaaacgctgaaagagactaagttcccggaattaggctggaaggtagacgacaaaaaag

SEQ ID NO: 638002 - DNA, 75 bp, synthetic construct
  source 1..75: mol_type = other DNA
gccggaaagtgtgccggagaacgaacggatctggtttgccctcgctgcgtacaatatgggctatgcgcatatgct

SEQ ID NO: 638003 - DNA, 75 bp, synthetic construct
  source 1..75: mol_type = other DNA
catactcccctgacttataacgaaatcaacggtaaaccttttggcctggattacgaactggcgaaacagtttgcc

SEQ ID NO: 638004 - DNA, 75 bp, synthetic construct
  source 1..75: mol_type = other DNA
aatgcaagtgctgatgcaattaatttaaaacttgcagatgctacacaatctggtaatgataacgtatgggaaggt

SEQ ID NO: 638005 - DNA, 75 bp, synthetic construct
  source 1..75: mol_type = other DNA
aagctctcgataatgtcccgccgctctattacgccattttacctgtgatgccgttaatcctgatgctcggctcgc

SEQ ID NO: 638006 - DNA, 75 bp, synthetic construct
  source 1..75: mol_type = other DNA
cctccggcctgggtatgttgctgatggtcaccttatttccgacgctggtgagtctgggagtaagtcgcctctctg

SEQ ID NO: 638007 - DNA, 75 bp, synthetic construct
  source 1..75: mol_type = other DNA
atgtgttcccaggggataggagaagtcgcttgatatctagtatgacgggcactgttgcaaagttagcgatgaggc

SEQ ID NO: 638008 - DNA, 75 bp, synthetic construct
  source 1..75: mol_type = other DNA
tcgtattaattacgatgggctatttgatcctgaaaaactacaaacctcaggtggtgctggctgcaggtatcttcc

SEQ ID NO: 638009 - DNA, 75 bp, synthetic construct
  source 1..75: mol_type = other DNA
ttaatcctgatgctcggctcgctgttcctcgcccacgtcgggctgatgcagtcagaactgcatctggtggtggtg

SEQ ID NO: 638010 - DNA, 75 bp, synthetic construct
  source 1..75: mol_type = other DNA
gtgaagcggacagcgatccccatggcagtcggtttcgtggtgaatatgattgccacaatcacgctattttattaa

SEQ ID NO: 638011 - DNA, 75 bp, synthetic construct
  source 1..75: mol_type = other DNA
ttagcgataaacctgcaaaaaatattattttgctgattggcgatgggatgggggattcggaaattactgccgcac

SEQ ID NO: 638012 - DNA, 75 bp, synthetic construct
  source 1..75: mol_type = other DNA
atgttggtggttagcggtaacaattaacaatgactatggtgttttcatttttttgcgctgcccgcgtcatttatt

SEQ ID NO: 638013 - DNA, 75 bp, synthetic construct
  source 1..75: mol_type = other DNA
aagggtggaaaaacatctttaattatgaaggtgtttccaatcgcttcgagttctggtcgtttatgattggtagtg

SEQ ID NO: 638014 - DNA, 75 bp, synthetic construct
  source 1..75: mol_type = other DNA
cgctggtcatagtcaccgctgatcacgcccacgccagccagattgttgcgccggacaccaaagcgccgggcctca

SEQ ID NO: 638015 - DNA, 75 bp, synthetic construct
  source 1..75: mol_type = other DNA
aaaatgaaaaaggcttcttcctgcaagtcgaaggtgcatcgatcgacaaacaggatcacgccgcgaatccttgtg

SEQ ID NO: 638016 - DNA, 75 bp, synthetic construct
  source 1..75: mol_type = other DNA
tcttaacgcccgtgccgatgttacgcttggcggcggtgcaaaaacgtttgcagaaacggcaaccgccggtgagtg

SEQ ID NO: 638017 - DNA, 75 bp, synthetic construct
  source 1..75: mol_type = other DNA
tagatcaaatcaacagtatgcgagcagtttttggcaacccaaaccaacgaccacaagataaaaaccctgttgtgc

SEQ ID NO: 638018 - DNA, 75 bp, synthetic construct
  source 1..75: mol_type = other DNA
aaggtattaaaaacagtaagaaaggttcatgcctttaaaaatgctttttcttccggggttaaaaaggcaggagat

SEQ ID NO: 638019 - DNA, 75 bp, synthetic construct
  source 1..75: mol_type = other DNA
ttacggaatcgctggcacgtcattacgcacgcacttacggcagcaacagcgagctgctgctcggcaatgcggagg

SEQ ID NO: 638020 - DNA, 75 bp, synthetic construct
  source 1..75: mol_type = other DNA
ctctgccagttccaaacttattcacggcggcctgcgctaccttgaacactatgaattccgccttgtcagcgaggc

SEQ ID NO: 638021 - DNA, 75 bp, synthetic construct
  source 1..75: mol_type = other DNA
gtatcaacgtcggcataacccgatctggccggaactggaagcggtattgaaatctcacggcgcgcacaactacgc

SEQ ID NO: 638022 - DNA, 75 bp, synthetic construct
  source 1..75: mol_type = other DNA
aggtaaaccccgacgcccacgacgagtatcaacgtcggcataacccgatctggccggaactggaagcggtattga

SEQ ID NO: 638023 - DNA, 75 bp, synthetic construct
  source 1..75: mol_type = other DNA
aagtcggtactctgacgtttaagatgaacatttttggtttgttgaatgcgacacgctctagtggagaggtatatc

SEQ ID NO: 638024 - DNA, 75 bp, synthetic construct
  source 1..75: mol_type = other DNA
aggggctacgtgttttgctcgtggaaggtaacgacccccagggaacagcctcaatgtatcacggatgggtaccag

SEQ ID NO: 638025 - DNA, 75 bp, synthetic construct
  source 1..75: mol_type = other DNA
cttaccaaatacagcaatagtaatggctctcagtccccgtggatggaggagcaaattcgggatgcctggggaagc

SEQ ID NO: 638026 - DNA, 75 bp, synthetic construct
  source 1..75: mol_type = other DNA
catcaagctcaatggttagcattacaaggtcatcgtgttcttttggttgaaggtaacgatcctcaaggcacggcc

SEQ ID NO: 638027 - DNA, 75 bp, synthetic construct
  source 1..75: mol_type = other DNA
tggctgaatgcgcaacagcagtcacgcattagccaatggctggtggagtatacgcagcagaagttgtcgctggcg

SEQ ID NO: 638028 - DNA, 75 bp, synthetic construct
  source 1..75: mol_type = other DNA
tggctgaatgcggaacaacaatctcgtgtgagtcagtggctggtggagtatacgcagcagaagttgtcgctggcg

SEQ ID NO: 638029 - DNA, 75 bp, synthetic construct
  source 1..75: mol_type = other DNA
ggtggcctgcgctaccttgagcactatgaattccgcctggtcagcgaggcgctggctgaacgtgaagtgctgctg

SEQ ID NO: 638030 - DNA, 75 bp, synthetic construct
  source 1..75: mol_type = other DNA
ctggcctctacccgcaccatgctcggactggatcagccgctgtacgtgcagtacggaacctggttgtggaaggcg

SEQ ID NO: 638031 - DNA, 75 bp, synthetic construct
  source 1..75: mol_type = other DNA
attatcgaaaacatctttgcctggccgggcgtcgggcgctatgcggtgtcggcgatttttaaccgtgactatccg

SEQ ID NO: 638032 - DNA, 75 bp, synthetic construct
  source 1..75: mol_type = other DNA
atcattttgcctgcggtttccattgcctttatgtcgctggcgattaacgcgcgtctgctgcgcgccagtatgctg

SEQ ID NO: 638033 - DNA, 75 bp, synthetic construct
  source 1..75: mol_type = other DNA
tactcccagcctgccatttcacgctagcaagggatatctggctgcaaccgctgcgcattctcgatacccgcaact

SEQ ID NO: 638034 - DNA, 75 bp, synthetic construct
  source 1..75: mol_type = other DNA
taatctgtaccaaccgtatgatccctgcccggctgcataccggcgatatctgcgtggccgtcaacaaaaacccgg

SEQ ID NO: 638035 - DNA, 75 bp, synthetic construct
  source 1..75: mol_type = other DNA
tctgtctaacctgccgccgacgccggagatgctggcctctacccgcaccatgctgggactggatcagccgctgta

SEQ ID NO: 638036 - DNA, 75 bp, synthetic construct
  source 1..75: mol_type = other DNA
gagcagtgcggctataagccgggttttgtgattggcggcgtaccggggaactttgaggtttctgcacgtttgggc

SEQ ID NO: 638037 - DNA, 75 bp, synthetic construct
  source 1..75: mol_type = other DNA
ttccggtatttgttgacccggtatctgcatggaagtgtgtcaaaattcgtgaacatttagcacaaattcatactc

SEQ ID NO: 638038 - DNA, 75 bp, synthetic construct
  source 1..75: mol_type = other DNA
tggacgtgcgagacaatgttgagcgccgggcttatgaaattgctctggcatcgctggaagcagtatcggatgaac

SEQ ID NO: 638039 - DNA, 75 bp, synthetic construct
  source 1..75: mol_type = other DNA
cgagaagcgttttgtcaccctgcgcgtatctgctaaaggtatgcgtgtaatcgataaaaaaggcatcgatacagt

SEQ ID NO: 638040 - DNA, 75 bp, synthetic construct
  source 1..75: mol_type = other DNA
atgatcgaccttcaccagataaaccaaatctgagcgaaccatttatcccaagacccacgtatgacgcttcacttc

SEQ ID NO: 638041 - DNA, 75 bp, synthetic construct
  source 1..75: mol_type = other DNA
gaagtaacgggttcggatgccaatgtgtatccgccgatgagcaccttacttgagaagcaaggcatcgaactgatt

SEQ ID NO: 638042 - DNA, 75 bp, synthetic construct
  source 1..75: mol_type = other DNA
tgcgcgccagccataagcatccggacgcctatgacatttttcaggtcagtacagtcaccagtaaaatcaaagtgt

SEQ ID NO: 638043 - DNA, 75 bp, synthetic construct
  source 1..75: mol_type = other DNA
atgaaacaattacttgcctcaccctcgctgcaattagtgacttatcctgcgagcgccacggcacagtctgcagaa

SEQ ID NO: 638044 - DNA, 75 bp, synthetic construct
  source 1..75: mol_type = other DNA
gtcgatacggaatatattgaaaaaacatcagcggtgccaaacaacgcattattcgaaatctatttttattatcct

SEQ ID NO: 638045 - DNA, 75 bp, synthetic construct
  source 1..75: mol_type = other DNA
atcagcggtgccaaacaacgcattattcgaaatctatttttattatcctggtggtaatttattgaacgcatcaga

SEQ ID NO: 638046 - DNA, 75 bp, synthetic construct
  source 1..75: mol_type = other DNA
caaaagaacttagggtatttctttaaagatatcgaacgctcggctttgacgctaaaggactcgctgtatctgttg

SEQ ID NO: 638047 - DNA, 75 bp, synthetic construct
  source 1..75: mol_type = other DNA
agataaggctgatcattttatttctattggctacgctgtcatttattggccttttttttgttatcaattatcagc

SEQ ID NO: 638048 - DNA, 75 bp, synthetic construct
  source 1..75: mol_type = other DNA
atgaaacaattacttgcctcaccctcgctgcaattagtgacttatcccgcgagcgccatggcacagtctgccgaa

SEQ ID NO: 638049 - DNA, 75 bp, synthetic construct
  source 1..75: mol_type = other DNA
caaagcgccagcaaaccggttgtgcattaccaatggtcgccagtcgccggcggcaataaaaactggctcgtttat

SEQ ID NO: 638050 - DNA, 75 bp, synthetic construct
  source 1..75: mol_type = other DNA
atttcttaccctcctgaatacacactgtaaatcatcagaaactgcacttgccatgctgagtacactctgctacga

SEQ ID NO: 638051 - DNA, 75 bp, synthetic construct
  source 1..75: mol_type = other DNA
atgtatatcgagacaaaagatgcgcaaataagcggggcggttggccgttattcaaagaaattcgcgccaggtaag

SEQ ID NO: 638052 - DNA, 75 bp, synthetic construct
  source 1..75: mol_type = other DNA
atttatttgcggtttgtataccggcggtacgctggctgccgaagcggcgggattacttgccggacaccttggcgt

SEQ ID NO: 638053 - DNA, 75 bp, synthetic construct
  source 1..75: mol_type = other DNA
ctacaaagcgccagcaaaccggttgtgcattaccaatggtcgccagtcgccggcggcaataaaaaactggctcgt

SEQ ID NO: 638054 - DNA, 75 bp, synthetic construct
  source 1..75: mol_type = other DNA
gctccggccagcagtggatttatttgcggcttgtataccggcggtacgctggcagccgaagcggcgggattactc

SEQ ID NO: 638055 - DNA, 75 bp, synthetic construct
  source 1..75: mol_type = other DNA
gccaagatgcgccagcccatatctggctgcaaacggctggagtatggccagaagatggcgagttaagcgaattaa

SEQ ID NO: 638056 - DNA, 75 bp, synthetic construct
  source 1..75: mol_type = other DNA
tgaatgccatgctctgcaagatgctgcatcagacgctgagccacgatcaggcaaaggtcttgattgttcattttg

SEQ ID NO: 638057 - DNA, 75 bp, synthetic construct
  source 1..75: mol_type = other DNA
gtgacgttacgttataacgcacggtactatgcaacgggtcaggccaccgccggcaacgtttctgccactgtgaat

SEQ ID NO: 638058 - DNA, 75 bp, synthetic construct
  source 1..75: mol_type = other DNA
ctgattctgctggtcaggcggtaacacctgttgctattaatggtacaaatgtgacgttacgttataacgcacggt

SEQ ID NO: 638059 - DNA, 75 bp, synthetic construct
  source 1..75: mol_type = other DNA
cgtatctgcggccttaccggataaattccgttgaaattgacccgaaaggcagcaatgacgatgtcgccttcggca

SEQ ID NO: 638060 - DNA, 75 bp, synthetic construct
  source 1..75: mol_type = other DNA
atgaagcagaggtcaatctgcccgggaagattaagcacggctattgcggttgcgctgtgctgttttccgccattt

SEQ ID NO: 638061 - DNA, 75 bp, synthetic construct
  source 1..75: mol_type = other DNA
atggctgttaaatcagaagagaaaacatctgcggatattgccctgaaactcaaacccatcgtcgaagcggcgctg

SEQ ID NO: 638062 - DNA, 75 bp, synthetic construct
  source 1..75: mol_type = other DNA
ttaaaaccttgacggtggaaattccgagcctggaatcggtgctggcgcaaaatcctgatttcgttcccgcccagt

SEQ ID NO: 638063 - DNA, 75 bp, synthetic construct
  source 1..75: mol_type = other DNA
agaccttcacccggccgccggagcgcgtggtcgcgctggggcaaaatacggtcgaaattctgctgctgctcgggc

SEQ ID NO: 638064 - DNA, 75 bp, synthetic construct
  source 1..75: mol_type = other DNA
atatttctccctacatcatggcgtggttgataaccgtgctgatccgtctggcaacgggtcagggcgtggtctccg

SEQ ID NO: 638065 - DNA, 75 bp, synthetic construct
  source 1..75: mol_type = other DNA
tgtccagattcagcttctgaatgctgatggtaccacacagatactacttggtaatgattctgctactcagggagt

SEQ ID NO: 638066 - DNA, 75 bp, synthetic construct
  source 1..75: mol_type = other DNA
gtatcgggcgcggcggcggagctgaccaccatgttctgctacatcgtcggtgtgagcaaatgcctgcgtgatatc

SEQ ID NO: 638067 - DNA, 75 bp, synthetic construct
  source 1..75: mol_type = other DNA
atttgtttgatcggtggcggtcgtggttactactcctgcccgtggtcttcaaccattacaacaaatttttctcaa

SEQ ID NO: 638068 - DNA, 75 bp, synthetic construct
  source 1..75: mol_type = other DNA
ccctgccggttcaccgggctgatggccggcccctgccgtttgcggccacgatttacgatccggccggcagggaga

SEQ ID NO: 638069 - DNA, 75 bp, synthetic construct
  source 1..75: mol_type = other DNA
tgttacgcaaacgtccgatgaaattgagtaccactgtgatcttaatggtcagcgcggtactgttctcggtactat

SEQ ID NO: 638070 - DNA, 75 bp, synthetic construct
  source 1..75: mol_type = other DNA
aaccggaaagttaattatagacaacctttttcaagaggttattgattacgcgaaagaaaaatataccagtggagg

SEQ ID NO: 638071 - DNA, 75 bp, synthetic construct
  source 1..75: mol_type = other DNA
gggttgggcttagcagatatgagggtgactccactatcaaaaacgcatatcaaaatgccatagaaattaataaac

SEQ ID NO: 638072 - DNA, 75 bp, synthetic construct
  source 1..75: mol_type = other DNA
cgccagtaaaaacacaggtggtgaacgttacgggggcaggggatgccatgatggcagggctggcttcctgctggg

SEQ ID NO: 638073 - DNA, 75 bp, synthetic construct
  source 1..75: mol_type = other DNA
gaacatttagcacaaattcatactctcaagcccaaccggcttgaagcagaaacactcagtggtatttcgctttca

SEQ ID NO: 638074 - DNA, 75 bp, synthetic construct
  source 1..75: mol_type = other DNA
gctctgctgggtaaaaactcatggctgatgtcagctgtgggagatgatttctacgggcaatcattattagcacaa

SEQ ID NO: 638075 - DNA, 75 bp, synthetic construct
  source 1..75: mol_type = other DNA
aagagttgcttggcgagggtattcagcaaatagcagcacctgatgacagtaatttctatatggaaacaccttctt

SEQ ID NO: 638076 - DNA, 75 bp, synthetic construct
  source 1..75: mol_type = other DNA
aagaccgtcgtctggtgttactgcgttccctgctggactgtggcgacagcgcgaatgaatccgtgttgcagacct

SEQ ID NO: 638077 - DNA, 75 bp, synthetic construct
  source 1..75: mol_type = other DNA
cgacaccgtgcatacccatattgcctggcttgccgagcagggactggtgcgtaagcgcacgcttgttaacggtta

SEQ ID NO: 638078 - DNA, 75 bp, synthetic construct
  source 1..75: mol_type = other DNA
gccggattgctaatgcggcattagcgcgactcaagcgtaataccggtggaaacctactgattataaaacttccag

SEQ ID NO: 638079 - DNA, 75 bp, synthetic construct
  source 1..75: mol_type = other DNA
gccggatgacgtgacagtaccggtacgcagtgaggtgataaatctgcggaaaatcgtgagtgtgcgcggtgtgaa

SEQ ID NO: 638080 - DNA, 75 bp, synthetic construct
  source 1..75: mol_type = other DNA
acaggcgggcagagtgtggcgtatttcacggagcttgcggcgacgatggggtacagcatcactatccgtgagtac

SEQ ID NO: 638081 - DNA, 75 bp, synthetic construct
  source 1..75: mol_type = other DNA
atcagaaaaaacatcacgttgctgcatggcgcgccagcggccttacccgtgaacagtactgtgaactttacgaca

SEQ ID NO: 638082 - DNA, 75 bp, synthetic construct
  source 1..75: mol_type = other DNA
gaaaagcgcattttcaggctgatatccaccggtgatgttttcagaccggaggccgactgtccggaaaacctcgtc

SEQ ID NO: 638083 - DNA, 75 bp, synthetic construct
  source 1..75: mol_type = other DNA
ttatgcggttgcagcgggcgttctggcgctgcctttcatgcttttctggaaagaccgcgcccgcttttacagcta

SEQ ID NO: 638084 - DNA, 75 bp, synthetic construct
  source 1..75: mol_type = other DNA
ccgccagctggctgaccgcgtggctgcccagctctactggcagggtgaagtcattcctggcgagatttccttccg

SEQ ID NO: 638085 - DNA, 75 bp, synthetic construct
  source 1..75: mol_type = other DNA
gttaaaaacacagtacgagcgcgatctggctaaacgactgtaccaggaaaaaacgattatccgcgcggcaacaga

SEQ ID NO: 638086 - DNA, 75 bp, synthetic construct
  source 1..75: mol_type = other DNA
ctttacatattattattaacaataaacgaggttcgcaaattatacgtcttatcaagaaataactttagtataata

SEQ ID NO: 638087 - DNA, 75 bp, synthetic construct
  source 1..75: mol_type = other DNA
attgacatcggatgctatagcttgcattgaagctagtttgactcaggagaagatatataataaaaaaatatcggg

SEQ ID NO: 638088 - DNA, 75 bp, synthetic construct
  source 1..75: mol_type = other DNA
atgttcacctttattgaactacaaggatttagcaaacgccgccagttattgctacctgatgatgagttccgggct

SEQ ID NO: 638089 - DNA, 69 bp, synthetic construct
  source 1..69: mol_type = other DNA
acgctggaaaatccttcaccagagctgctcacggtgttgatccgtgaactgaccgggagaggacgatga

SEQ ID NO: 638090 - DNA, 75 bp, synthetic construct
  source 1..75: mol_type = other DNA
atcaaagaaaacgagagaaaacttatataaaaaaaacaaagatgctaattagatatttgcaatgttgttattatg

SEQ ID NO: 638091 - DNA, 75 bp, synthetic construct
  source 1..75: mol_type = other DNA
gagaacatgagtgtgcatatttgcagtaactgtggtcaccatgaaccgattttcggtaccggtggtgcagagaaa

SEQ ID NO: 638092 - DNA, 75 bp, synthetic construct
  source 1..75: mol_type = other DNA
gccggaatttctgcttcagcaatgtcgtggagtactctggcttacggtcttggtgtaactactgtcagtcttgga

SEQ ID NO: 638093 - DNA, 75 bp, synthetic construct
  source 1..75: mol_type = other DNA
ctgatgaatctgttgcgggaaaacttccagtttaatactgatgcggaaatctcgatcgaagttgatccgcgtgaa

SEQ ID NO: 638094 - DNA, 75 bp, synthetic construct
  source 1..75: mol_type = other DNA
aagctgctgcgcgaaaacttccagttcaatgccgatgcggagatttcgatcgaagtcgatccgcgggaaatcgaa

SEQ ID NO: 638095 - DNA, 75 bp, synthetic construct
  source 1..75: mol_type = other DNA
ctacctgggtcttatcattatgtttgcggtgcatggcattctgctgggtattaatggcgtcagcccgctgaaata

SEQ ID NO: 638096 - DNA, 75 bp, synthetic construct
  source 1..75: mol_type = other DNA
cgccgaaaggtgaacgcgtcttagccgctatcgataccctacaaagctgggtgatgaaactggttcgccttgtca

SEQ ID NO: 638097 - DNA, 75 bp, synthetic construct
  source 1..75: mol_type = other DNA
gcgaggcagcaaccactgaaaatccattctcatcgtctctccacgtgccttctttctctggaaataatctggcat

SEQ ID NO: 638098 - DNA, 75 bp, synthetic construct
  source 1..75: mol_type = other DNA
gtggcgacctatcacctcagcgttaaatttggtggcaagggacaggctgccaaccatgccgattacatcgagcgc

SEQ ID NO: 638099 - DNA, 75 bp, synthetic construct
  source 1..75: mol_type = other DNA
caccagaagccctgagcgcaatggtcgccgggatactggccaattttcagcacccaaccctgaagcataatctca

SEQ ID NO: 638100 - DNA, 75 bp, synthetic construct
  source 1..75: mol_type = other DNA
ttatctggtgctcgacatgccgccaggcaccggtgacattcaattgacactggcgcaaaacattcctgtaaccgg

SEQ ID NO: 638101 - DNA, 75 bp, synthetic construct
  source 1..75: mol_type = other DNA
actggggcggtggtacgccgacgtatctgaacaaagcgcaaatcagccgtctgatgaagctgctgcgcgaaaact

SEQ ID NO: 638102 - DNA, 75 bp, synthetic construct
  source 1..75: mol_type = other DNA
gagcatgggcgtgcaggacttcaacaaagaagtgcaacgtctggttaaccgcgagcaggatgaagagttcatctt

SEQ ID NO: 638103 - DNA, 75 bp, synthetic construct
  source 1..75: mol_type = other DNA
gcaaaatcaaagatgctgacctgccgagtccgcagcaaaaactcgatatcctgcaggaaaccatcgccttcctga

SEQ ID NO: 638104 - DNA, 75 bp, synthetic construct
  source 1..75: mol_type = other DNA
ctgaaacagcacatcccggagaagttttttaagatggtgagatacttcgggttccttgccaaccgtgtgtgtgga

SEQ ID NO: 638105 - DNA, 75 bp, synthetic construct
  source 1..75: mol_type = other DNA
atcgacgagcccatgaacgacaccacgcgtttacagtgcatgagcgccacggtgactgcgctggcgcgccatgaa

SEQ ID NO: 638106 - DNA, 75 bp, synthetic construct
  source 1..75: mol_type = other DNA
agccgtcatcaccctcaccggcaccctgacagaaagccttgaaaccgtacaaaacacactgacactcaggagcga

SEQ ID NO: 638107 - DNA, 75 bp, synthetic construct
  source 1..75: mol_type = other DNA
tcgccagccgggtgatgcgccgggaatacggcagcctgctgccggatttgctggatgcaccgatgaatgccacca

SEQ ID NO: 638108 - DNA, 75 bp, synthetic construct
  source 1..75: mol_type = other DNA
ggcctgtctcattcttacgattgcggcaggccgtgttattattgtcgtttcttatattttgacaggaagagtatc

SEQ ID NO: 638109 - DNA, 75 bp, synthetic construct
  source 1..75: mol_type = other DNA
aaaccactttcgtgagctgggaaatgtcgtttttatgatgaacaggggttatgcgatcagctttatacccacctc

SEQ ID NO: 638110 - DNA, 75 bp, synthetic construct
  source 1..75: mol_type = other DNA
ggccgtttggtagtacttaggatagccaaccatcagatgctgcatttgcatagtgcaatctccccttacttatcc

SEQ ID NO: 638111 - DNA, 75 bp, synthetic construct
  source 1..75: mol_type = other DNA
gcattgagtcagatgatggcgtggagatcctgattcatgtcggtatcgacaccgtaaaactggacggcaaattct

SEQ ID NO: 638112 - DNA, 75 bp, synthetic construct
  source 1..75: mol_type = other DNA
gcgtgattttactcattgccggatatcagctggtctcggttatacgccatttctggctgactccggcgacatcgg

SEQ ID NO: 638113 - DNA, 75 bp, synthetic construct
  source 1..75: mol_type = other DNA
ctttctgaagcaaggtttagagattattgcgaaaaatcaactcgcccgtgaaaagttgattatttataatagcga

SEQ ID NO: 638114 - DNA, 75 bp, synthetic construct
  source 1..75: mol_type = other DNA
tgctggtggggccgctatcaacctggataagcgaactgattgccgccggttatctctggctttatcaggcggttc

SEQ ID NO: 638115 - DNA, 75 bp, synthetic construct
  source 1..75: mol_type = other DNA
gccggttatctctggctttatcaggcggttcctgcatttgcgggcgcggtaatgggcggcttctggcaaatcttc

SEQ ID NO: 638116 - DNA, 75 bp, synthetic construct
  source 1..75: mol_type = other DNA
aacctgccgcgtaagtacccctttgttatcgcctgtatcagtggggctttgggggccaccattattggctacgcg

SEQ ID NO: 638117 - DNA, 75 bp, synthetic construct
  source 1..75: mol_type = other DNA
agattgaagagattttagaacttctaccgcaccgttttccgttcttactggtagatcgtgtgctggattttgaag

SEQ ID NO: 638118 - DNA, 75 bp, synthetic construct
  source 1..75: mol_type = other DNA
taatgctgaatccactaagtattataaaaagtcattatgaatcaaatggtatgagtaaagatgagcggtataacg

SEQ ID NO: 638119 - DNA, 75 bp, synthetic construct
  source 1..75: mol_type = other DNA
tttctgtcgagcggctggattattccaaaggtttgccagaacgttttcttgcttatgaagcgctgctggaaaaat

SEQ ID NO: 638120 - DNA, 75 bp, synthetic construct
  source 1..75: mol_type = other DNA
tgcgcatgaattacgcaaacgtggggtgaataatcgcattggtttctttctgcatattcctttcccgacaccgga

SEQ ID NO: 638121 - DNA, 75 bp, synthetic construct
  source 1..75: mol_type = other DNA
ggcatgtgtacatgtcgaagaagacagccggagggcggaatacggcacgatacctgggtcgttatctgaaaaagc

SEQ ID NO: 638122 - DNA, 75 bp, synthetic construct
  source 1..75: mol_type = other DNA
atgccggagtcgttgtcacatatcacgacggaatcacagtggagaagcctagtgctgaaagccggaggaaaatac

SEQ ID NO: 638123 - DNA, 75 bp, synthetic construct
  source 1..75: mol_type = other DNA
gtaccgtcgtgcagtcgcgggggtgaatgtgtcagggctgaagaaaaacgcgcgggatataagcctgctgaggca

SEQ ID NO: 638124 - DNA, 75 bp, synthetic construct
  source 1..75: mol_type = other DNA
ttattgtgaaaaacgatataaaccactggcaggcgagttttattcacgacctaaagcagataacaccgcgcagtg

SEQ ID NO: 638125 - DNA, 75 bp, synthetic construct
  source 1..75: mol_type = other DNA
taaaaagtcatatgaatcaaatggatgggcaagggatgagcgttacaacgctctattttctaggatgcaggaagt

SEQ ID NO: 638126 - DNA, 75 bp, synthetic construct
  source 1..75: mol_type = other DNA
aaaaagcaggggccatacaaagatgctgataaagaagcgctatcaagactatatggagctttagctgaagaccaa

SEQ ID NO: 638127 - DNA, 75 bp, synthetic construct
  source 1..75: mol_type = other DNA
tactacaaccaattctccaatgccgttctctggcctgcatttcattatcgactcgatctggtgcaatttcagcgt

SEQ ID NO: 638128 - DNA, 75 bp, synthetic construct
  source 1..75: mol_type = other DNA
gcgattgcgcgtgatattagcgtgcaactgcatacagtcatcgctcagtatcccggcgcggagctggaggcgaaa

SEQ ID NO: 638129 - DNA, 75 bp, synthetic construct
  source 1..75: mol_type = other DNA
caaaaagccatacagcctggggaaaagcatttcgaacagaagtctacccgatcggcattgaaccgaaagaaatag

SEQ ID NO: 638130 - DNA, 75 bp, synthetic construct
  source 1..75: mol_type = other DNA
atttaagtgatattggttgtctggagattcagggggccagtctagcttgtctttcattatcttatcacttttaca

SEQ ID NO: 638131 - DNA, 75 bp, synthetic construct
  source 1..75: mol_type = other DNA
gattcagggggccagtctagacattcgccacaccagaactacaattatattatttttcactctggtcgactttaa

SEQ ID NO: 638132 - DNA, 75 bp, synthetic construct
  source 1..75: mol_type = other DNA
tctggagattcagggggccagtctattgccaggacaatgctcggtgaagttgtggaaaaaattgatgattggcaa

SEQ ID NO: 638133 - DNA, 75 bp, synthetic construct
  source 1..75: mol_type = other DNA
cccattaagtacattgcagatgctctcagaatgcctctgagcacgtcatacagaattgctcaaaggttgagctaa

SEQ ID NO: 638134 - DNA, 75 bp, synthetic construct
  source 1..75: mol_type = other DNA
ctggagaactccatctttattattcaggaacttacaccgagaatttggtttttcgatggatggtgctgcaactga

SEQ ID NO: 638135 - DNA, 75 bp, synthetic construct
  source 1..75: mol_type = other DNA
tcaatttagatggcgctgcaactgagcatgacacgctgttaccacggttcaccgatgatataagccgtcagtcat

SEQ ID NO: 638136 - DNA, 75 bp, synthetic construct
  source 1..75: mol_type = other DNA
gaaataccctcgttaatcagcattctgacatcaacaaaacgcatgaaattctgcaggacgaatcgaaatgcgaaa

SEQ ID NO: 638137 - DNA, 75 bp, synthetic construct
  source 1..75: mol_type = other DNA
acattcttcatcatcgtcatcttcctcttcatcctctttcaacaatgacaatttcagcggtggtggcggttcatc

SEQ ID NO: 638138 - DNA, 75 bp, synthetic construct
  source 1..75: mol_type = other DNA
ctctgcttcgccacaccgttcctggctgtcgccatcgcttttacccccttcggcaaaaaggttcgggattcgatg

SEQ ID NO: 638139 - DNA, 75 bp, synthetic construct
  source 1..75: mol_type = other DNA
ttttacctatagcaggtttcagcggaagctggggagtactcgcaacattactctgcttcgccacaccgttcctgg

SEQ ID NO: 638140 - DNA, 75 bp, synthetic construct
  source 1..75: mol_type = other DNA
gtacattgacgaacagcgaaataaatgctcttgctggtcagattaaaaacctgacgcaaagaaatctggcgcaaa

SEQ ID NO: 638141 - DNA, 75 bp, synthetic construct
  source 1..75: mol_type = other DNA
ggaaacatcatgggggttctgattactggagaactccatttttgttatttaagaacttacaccgtgaatttggtt

SEQ ID NO: 638142 - DNA, 75 bp, synthetic construct
  source 1..75: mol_type = other DNA
ggtatttatatatcacatcctttttcggtgcattcgtcattacacgatggctgtgccggaaagttatcagtattt

SEQ ID NO: 638143 - DNA, 75 bp, synthetic construct
  source 1..75: mol_type = other DNA
ggtgtggctgctatggtggtgacgatggtggcaattttcgtcctcggtcagcttttcaaacgtactctgggcggg

SEQ ID NO: 638144 - DNA, 75 bp, synthetic construct
  source 1..75: mol_type = other DNA
gatttttgttgtgctgggaaagattttgattttgagcgagctggctctgcgtggtgagcctatcctggcatcgct

SEQ ID NO: 638145 - DNA, 75 bp, synthetic construct
  source 1..75: mol_type = other DNA
cagcgacgggaaaaagctgataatgatatggctccgctccagcaaaagctggtggtggtgagcaacaagcgggaa

SEQ ID NO: 638146 - DNA, 75 bp, synthetic construct
  source 1..75: mol_type = other DNA
ttccgggcatccgtaagggccgaaacttcccgtcttccagtctgcggctctgccgccagacgtaatcgccggtta

SEQ ID NO: 638147 - DNA, 75 bp, synthetic construct
  source 1..75: mol_type = other DNA
atagatggcattggtggagaaatcacaggcgcagatcgctttatctttgggcacacaccggtacgaagaccaaaa

SEQ ID NO: 638148 - DNA, 75 bp, synthetic construct
  source 1..75: mol_type = other DNA
accgggggattccacctggacggcctcgccgatacctgtgatggcgtattttctgcacgtagccgcgatcgcatg

SEQ ID NO: 638149 - DNA, 75 bp, synthetic construct
  source 1..75: mol_type = other DNA
cccgagcaatattcccctggtgcaatatttccgtcaggaaaaagctgaaattgcggctattcgtcaggaagaaaa

SEQ ID NO: 638150 - DNA, 75 bp, synthetic construct
  source 1..75: mol_type = other DNA
acggcttattacggacgtgacagtggtttccggatggacagtgaggcgcgtgagtaccgttctttcagggaggct

SEQ ID NO: 638151 - DNA, 75 bp, synthetic construct
  source 1..75: mol_type = other DNA
gcttctcaaacgtacgctgggcgggcaaacgggcgatacgctgggagcagccatagagcttggtgaactggtctt

SEQ ID NO: 638152 - DNA, 75 bp, synthetic construct
  source 1..75: mol_type = other DNA
gcttctcaaacgtactctgggtgggcagaccggcgatacgctgggagcggccattgaacttggtgaactggtttt

SEQ ID NO: 638153 - DNA, 75 bp, synthetic construct
  source 1..75: mol_type = other DNA
ttctgcacgtagccgcgatcgcatgttggaaatcatgcgtgatagccgtttaggcacccacggcggtctggcatt

SEQ ID NO: 638154 - DNA, 75 bp, synthetic construct
  source 1..75: mol_type = other DNA
tagtggtcagtgccgagagtgtaaatgttatttcccattcgcgggtgaaaacagaccttaaaggcacaggcgacc

SEQ ID NO: 638155 - DNA, 75 bp, synthetic construct
  source 1..75: mol_type = other DNA
gaaccggcatgaagctgcttaacgacagcttcaacctgtacggctatttcgccaaaattctgattgcgccggtgt

SEQ ID NO: 638156 - DNA, 75 bp, synthetic construct
  source 1..75: mol_type = other DNA
ccgccaccgctggagcggctgacgtatgagacggagatcacctcggaatacctgttaaccctgaaagggggcaac

SEQ ID NO: 638157 - DNA, 75 bp, synthetic construct
  source 1..75: mol_type = other DNA
atggctggctcccattcaaaaagaatgacatcatcaagtatggacccaataaattccgccgcagcgacaaacttg

SEQ ID NO: 638158 - DNA, 75 bp, synthetic construct
  source 1..75: mol_type = other DNA
tggtttgatcctgcccgcaacgaagagaccgaactggccgccgggcatcttctgctgagttacaaatacacgcca

SEQ ID NO: 638159 - DNA, 75 bp, synthetic construct
  source 1..75: mol_type = other DNA
ggctggctaatccggtggtcgcgcaactggtactgaaaccggacagcgacggtcagccttatgttgaaggtcagg

SEQ ID NO: 638160 - DNA, 75 bp, synthetic construct
  source 1..75: mol_type = other DNA
gctggatgcgatttatgaccatggtgcaggcaccgttctggtcattaacgtactcgatccgtctgtgcataaaac

SEQ ID NO: 638161 - DNA, 75 bp, synthetic construct
  source 1..75: mol_type = other DNA
gctgattgcacaagcggaaaaacttggtgcgattacctacattgatgccccgattgggacgacattccagcaggt

SEQ ID NO: 638162 - DNA, 75 bp, synthetic construct
  source 1..75: mol_type = other DNA
cctcctggtgcgaaagtttgtgcctattattcctggtgcgaccctacaaaggtcaccgcagccgatattatcggt

SEQ ID NO: 638163 - DNA, 75 bp, synthetic construct
  source 1..75: mol_type = other DNA
ggtgtacgacgccgcctccgacagcgaacggctggagccgctctcgtcgcgcgccgctggcctgcgtgccaaagt

SEQ ID NO: 638164 - DNA, 75 bp, synthetic construct
  source 1..75: mol_type = other DNA
tcgagactattgagatcgagcgcggccctcgcccggtacgtaccgttaaatcagcggtaattggtcttgttggca

SEQ ID NO: 638165 - DNA, 75 bp, synthetic construct
  source 1..75: mol_type = other DNA
cgcactgcttggctttgagtgctggtacgatccggcgcgaaattcaccggctgaactcagcgccgggcatttatt

SEQ ID NO: 638166 - DNA, 75 bp, synthetic construct
  source 1..75: mol_type = other DNA
tagaaaccattgaaattgaaaccggcccgcgtccggttaaagcggtaaaatccgccgtcatcgctttaatcggta

SEQ ID NO: 638167 - DNA, 75 bp, synthetic construct
  source 1..75: mol_type = other DNA
tctgccgttattggcctgattggtaccgcaccaatgggggacgtcaatacgctggtgcagtgcctgtctgagaaa

SEQ ID NO: 638168 - DNA, 75 bp, synthetic construct
  source 1..75: mol_type = other DNA
ccatattgtggcacttctcaggcgcagaggcatgtctctgttacatgccactgcacatcctttccaccaaatcct

SEQ ID NO: 638169 - DNA, 75 bp, synthetic construct
  source 1..75: mol_type = other DNA
tatcgttgaccttattcgcgagtttggacaaacaaaacttttacgacctgatattaaaaaaccggtatggcacaa

SEQ ID NO: 638170 - DNA, 75 bp, synthetic construct
  source 1..75: mol_type = other DNA
ggcatgagagtttagtcagtggccgaataattcaggaacttgaaatcgctcatggccttactcaaaccccagcgg

SEQ ID NO: 638171 - DNA, 75 bp, synthetic construct
  source 1..75: mol_type = other DNA
gaaaacaccctgcttcctttatctgtcttgcctatagtaaatgaaatctatcaagagaaagttaaaaccacaggt

SEQ ID NO: 638172 - DNA, 75 bp, synthetic construct
  source 1..75: mol_type = other DNA
gagggaaaatcttcaacggattaatttcttatttattaaaacctgcttcgcaccataagtcagaaccgtatgtag

SEQ ID NO: 638173 - DNA, 75 bp, synthetic construct
  source 1..75: mol_type = other DNA
ggggtaagagcttcgctggtgttgttcaatatgcattgaagccaggttcacatcataaaagtgatccaatcgtca

SEQ ID NO: 638174 - DNA, 75 bp, synthetic construct
  source 1..75: mol_type = other DNA
acacgatcgacctgctttgctggcgctattacggcagaacagcaggcgttaccgaggcagtgatcgatgccaata

SEQ ID NO: 638175 - DNA, 75 bp, synthetic construct
  source 1..75: mol_type = other DNA
cgttggcgttgtattgattacatgctgcagaaagccaacactaatacattacgtattgcagggttacttcactac

SEQ ID NO: 638176 - DNA, 75 bp, synthetic construct
  source 1..75: mol_type = other DNA
tttacctcacgggctgcaggtggagttgccggacattccgaccactaccaccgtgcagaccgtccagctatggga

SEQ ID NO: 638177 - DNA, 75 bp, synthetic construct
  source 1..75: mol_type = other DNA
atgctatcggaacgaaccggggtgctttcaccaagagaagctctgcagcagatacttgataaaagtttatctgat

SEQ ID NO: 638178 - DNA, 75 bp, synthetic construct
  source 1..75: mol_type = other DNA
gatggggttcagtgatactcacctccgttgctatgtcttacatgacgacgaaggccagcacatacacattatcgc

SEQ ID NO: 638179 - DNA, 75 bp, synthetic construct
  source 1..75: mol_type = other DNA
tttacctcacgggttgcaggtggagctgccggacataccgacaaccaccaccgtgcagaccgtccagctatggga

SEQ ID NO: 638180 - DNA, 75 bp, synthetic construct
  source 1..75: mol_type = other DNA
cgcaccatggcaccgctaacccgcgatgccattagtgcaatgtgggacgagctggaagaagattctgaagagtaa

SEQ ID NO: 638181 - DNA, 75 bp, synthetic construct
  source 1..75: mol_type = other DNA
aatcccatcgcctatgcccgcgaggcaatatcgctggcggctgcgaccgaagagcacggggccagactgttcagc

SEQ ID NO: 638182 - DNA, 75 bp, synthetic construct
  source 1..75: mol_type = other DNA
tcacccgtatcggcgcgagtgccattgacgccctcagcgaccagatgctcatcacctttcgtgaaggcgcgcctg

SEQ ID NO: 638183 - DNA, 75 bp, synthetic construct
  source 1..75: mol_type = other DNA
gaggtggttcctatatatactctgacgggggattcagagatgatatcggctccatccctaatggagaaagagtaa

SEQ ID NO: 638184 - DNA, 75 bp, synthetic construct
  source 1..75: mol_type = other DNA
tggagaaaagagtcacatatcgtgacaaagtaaaaagtcagaattattattctgtggccgtcaatgctggctatt

SEQ ID NO: 638185 - DNA, 75 bp, synthetic construct
  source 1..75: mol_type = other DNA
gctcctgaagagggaggacggaaagtcagtcaactggactggaaatacagtaatgccgctattattaaaggctcc

SEQ ID NO: 638186 - DNA, 75 bp, synthetic construct
  source 1..75: mol_type = other DNA
cgtgccctgaacgtaatgctgaagaataagtcgatcaaagatcgtctggtaccgatcatcgccgacgaagcgcgt

SEQ ID NO: 638187 - DNA, 75 bp, synthetic construct
  source 1..75: mol_type = other DNA
tacgccttcctcggcgacggcgagatggacgaaccagaatccaaaggtgcgatcaccatcgctacccgtgaaaaa

SEQ ID NO: 638188 - DNA, 75 bp, synthetic construct
  source 1..75: mol_type = other DNA
tgatggtcaggattgtgaacgctggaacatgctgcatccgctggaaactccgcgcgttccgtatatcgctcaggt

SEQ ID NO: 638189 - DNA, 75 bp, synthetic construct
  source 1..75: mol_type = other DNA
atgctcatcacctttcgtgaaggcgcgcctgcggatctcgaagagtattgcttcattcattgccacggcgagttg

SEQ ID NO: 638190 - DNA, 75 bp, synthetic construct
  source 1..75: mol_type = other DNA
cgcgtgaggccatttcactggcagcggcaaccgaggagcacggcgccaggctgtttggtaacggcgctgtgacat

SEQ ID NO: 638191 - DNA, 75 bp, synthetic construct
  source 1..75: mol_type = other DNA
ccggtgtgttgcgtacggatcaacaactttctgaccaggcttatgcgcgtatcaaaaaggattttgaggaacggc

SEQ ID NO: 638192 - DNA, 75 bp, synthetic construct
  source 1..75: mol_type = other DNA
aaagttatctccggcaggtggcaccagaaattgagctgactgcgcagtttggccgtaaagatatgggggagcaaa

SEQ ID NO: 638193 - DNA, 75 bp, synthetic construct
  source 1..75: mol_type = other DNA
ctggtgattgtggcggcgggctttgcgctgctggcgcgtcgcgtggtgttgagtgtggactggacgctgctgctg

SEQ ID NO: 638194 - DNA, 75 bp, synthetic construct
  source 1..75: mol_type = other DNA
cactctcaatagtcggggggggaatatggttgatcaggactggatggattccgggactcccggaacatggacaga

SEQ ID NO: 638195 - DNA, 75 bp, synthetic construct
  source 1..75: mol_type = other DNA
atggtcgatcaggactggatggattccagtaaccccggaacctggacagatgaaagtagacaccctgatacacaa

SEQ ID NO: 638196 - DNA, 75 bp, synthetic construct
  source 1..75: mol_type = other DNA
ccggtgttgctggtactggcaacggcggcgggctccaacaccctgacccatattaacgatgcttcattctggttg

SEQ ID NO: 638197 - DNA, 75 bp, synthetic construct
  source 1..75: mol_type = other DNA
ccattatcgataccggcatcggcgataccatcggcatgctgatgtcacacggcaatatttctccctacatcatgg

SEQ ID NO: 638198 - DNA, 75 bp, synthetic construct
  source 1..75: mol_type = other DNA
ctgccgacacgtcactggccgcgcttcacttcattttccagatagtgcagggctggggggacgaccatctccatc

SEQ ID NO: 638199 - DNA, 75 bp, synthetic construct
  source 1..75: mol_type = other DNA
ggtgatcagtaacgtgccgagtaccatattgttgctgaactatgtgccgccgtcgttgctgctggcatgggcggt

SEQ ID NO: 638200 - DNA, 75 bp, synthetic construct
  source 1..75: mol_type = other DNA
attaattcttgttggcatcggattaagttttttcgttccctttgcaccgaaatcctggcctgctgctatcgactg

SEQ ID NO: 638201 - DNA, 75 bp, synthetic construct
  source 1..75: mol_type = other DNA
cctttatgtcgctggcgattaacgcgcgtttgctgcgcgccagtatgctggacgtcgccggtcagcgtcacgtca

SEQ ID NO: 638202 - DNA, 75 bp, synthetic construct
  source 1..75: mol_type = other DNA
tttattccgttcggcgctgtcgttcgtggcggtcgtattgcagaaacagccgggcgttttgccctggcgaatgct

SEQ ID NO: 638203 - DNA, 75 bp, synthetic construct
  source 1..75: mol_type = other DNA
agtcatttatctgaacccgggttatggttaacggcaatcggtttatcgcaggtgatcagtaacgtgccgagtacc

SEQ ID NO: 638204 - DNA, 75 bp, synthetic construct
  source 1..75: mol_type = other DNA
acaagtcgatcaaagacaggcttgtgccgatcatcgccgacgaagcacgtactttcggtatggaaggtctgttcc

SEQ ID NO: 638205 - DNA, 75 bp, synthetic construct
  source 1..75: mol_type = other DNA
gcgaaatgctgttgcttgatgtgatcccactgtcgctgggcctcgaaacgatgggcggcctggtggagaaagtga

SEQ ID NO: 638206 - DNA, 75 bp, synthetic construct
  source 1..75: mol_type = other DNA
atgaataactttgttgaaattacctcaagaattggtcgcatgtaccaagattttcttataagtggaaaggggtct

SEQ ID NO: 638207 - DNA, 75 bp, synthetic construct
  source 1..75: mol_type = other DNA
gcaatttgtgcctgctgattttaattccctagctgacatgcttatcccatcggcttcggagcttggcacaagaga

SEQ ID NO: 638208 - DNA, 75 bp, synthetic construct
  source 1..75: mol_type = other DNA
aagggatttcatatcgaaaacgggacaaattctctttttgagttttctgcctataaggaaggaatagatttttta

SEQ ID NO: 638209 - DNA, 75 bp, synthetic construct
  source 1..75: mol_type = other DNA
tcgacccggataaagtcgtcgctattggcgcggcgattcaggcggatattctggtgggtaacaagccggacagcg

SEQ ID NO: 638210 - DNA, 75 bp, synthetic construct
  source 1..75: mol_type = other DNA
aacgttagccgaccatgaaggccgtcacctgttgccgtctgttgttcattatcaacagcaaggacattcggtggg

SEQ ID NO: 638211 - DNA, 75 bp, synthetic construct
  source 1..75: mol_type = other DNA
aaatggtgcattgttccatttgtttgctatggatgaaattacgcctcgtctttatttgcagaagcttgaatattt

SEQ ID NO: 638212 - DNA, 75 bp, synthetic construct
  source 1..75: mol_type = other DNA
caccagtatgcgctatgaggcaagcttcaaaccgcaaagcggaggaatggagcagagtttcgcctcgaggcccag

SEQ ID NO: 638213 - DNA, 75 bp, synthetic construct
  source 1..75: mol_type = other DNA
caccagtatgcgctatgaggcaagcttcaaaccgcaaagcggaggaatggagcagacgtttcgcctcgacgccca

SEQ ID NO: 638214 - DNA, 75 bp, synthetic construct
  source 1..75: mol_type = other DNA
tgcctgctgataccgacctcaatcatttttttgaggtgatgaacaaccgaggcgagcaactcgaaaagcatgagg

SEQ ID NO: 638215 - DNA, 75 bp, synthetic construct
  source 1..75: mol_type = other DNA
ttgccaataaccagactgatagtcttaaattgcttgctatgattcggctgatgaaagataaaggtcgttggctgg

SEQ ID NO: 638216 - DNA, 75 bp, synthetic construct
  source 1..75: mol_type = other DNA
aatacggctttaacccctatgaaaggcataatatttttggtaaagattggggacaatttaaaccaacgtgctacg

SEQ ID NO: 638217 - DNA, 75 bp, synthetic construct
  source 1..75: mol_type = other DNA
atgagtagtttgttgttgtttaacgataagagtagggcactgcaggcggatatcgtcgccgtgcagtcgcaggtg

SEQ ID NO: 638218 - DNA, 75 bp, synthetic construct
  source 1..75: mol_type = other DNA
accttcaacaatatcgaagagctggggctgggatttatcaactattcactggtgccgtatctgacccgcatcgaa

SEQ ID NO: 638219 - DNA, 75 bp, synthetic construct
  source 1..75: mol_type = other DNA
gggcttggtttcattaactattcccttgtgccgtatctgacccgtattgaacagcggatcaatacagggctggtc

SEQ ID NO: 638220 - DNA, 75 bp, synthetic construct
  source 1..75: mol_type = other DNA
tcgggatgttgccctgcaacctgtatcacctgaacggcagcctgaaacagagagccaccggcgaacgtctgcata

SEQ ID NO: 638221 - DNA, 75 bp, synthetic construct
  source 1..75: mol_type = other DNA
cgctgctggaagagcagagcaaagagatctctaccactatcgctttcgttcgtgccctgaacgtaatgctgaaga

SEQ ID NO: 638222 - DNA, 75 bp, synthetic construct
  source 1..75: mol_type = other DNA
cccggaaggttctgaagagcatacctatctgcacgctcagcgtcagaaactgcacggttatctgccaagccgtca

SEQ ID NO: 638223 - DNA, 75 bp, synthetic construct
  source 1..75: mol_type = other DNA
gtggggctgaatcccatcgcctatgcccgcgaggcaatatcactggcggcagcgaccgaagagcacggggccaga

SEQ ID NO: 638224 - DNA, 75 bp, synthetic construct
  source 1..75: mol_type = other DNA
ctgacgctggatggacttgtcggtctgaatcccattgcatatgcgcgcgaggccatttcactggcagcggcaacc

SEQ ID NO: 638225 - DNA, 75 bp, synthetic construct
  source 1..75: mol_type = other DNA
gtcgggctgaatcccattgcgtatgcgcgtgaggccatttcactggcagcggcaactgaggagcacggcgccagg

SEQ ID NO: 638226 - DNA, 75 bp, synthetic construct
  source 1..75: mol_type = other DNA
tgtcatttcccattcacgggttaaaactgacctgaaagggactggcgacctgttttgtgctcagcttatcagtgg

SEQ ID NO: 638227 - DNA, 75 bp, synthetic construct
  source 1..75: mol_type = other DNA
gtcgggctgaatcccattgcgtatgcgcgtgaggccatttcactggcagcggcaaccgaggagcacggtgccagg

SEQ ID NO: 638228 - DNA, 75 bp, synthetic construct
  source 1..75: mol_type = other DNA
gggcttggtttcattaactattcccttgtgccgtatctgacccgtattgagcaacggatcaatacagggctggtc

SEQ ID NO: 638229 - DNA, 75 bp, synthetic construct
  source 1..75: mol_type = other DNA
acgatcaacggatccgccacggcggctgttttccgattgaggattttattgatggtttctggcgacctgcacagg

SEQ ID NO: 638230 - DNA, 75 bp, synthetic construct
  source 1..75: mol_type = other DNA
ccgcttctttcggtgcgaccattggtcagaacggctgtgctggtttgtatccggcaatgctggcagtgatggttg

SEQ ID NO: 638231 - DNA, 75 bp, synthetic construct
  source 1..75: mol_type = other DNA
ctgatgcagaccggtatcaccatgctgaaacagtccaacagcatgtccagtatggtttccagcctgctgcagtaa

SEQ ID NO: 638232 - DNA, 75 bp, synthetic construct
  source 1..75: mol_type = other DNA
acgcgacggaagcgtccaatatgaccaaacagcaggtgctgatgcagactggcatcaccatgctgaaacagtcca

SEQ ID NO: 638233 - DNA, 75 bp, synthetic construct
  source 1..75: mol_type = other DNA
gcaacaccggtactgacggtctgttccagagcgcggtaactttccaggtgggcgcggaatcttccgacaccatga

SEQ ID NO: 638234 - DNA, 75 bp, synthetic construct
  source 1..75: mol_type = other DNA
tagcggcagccttccggcaaatttcacggctgatgatctgattcgtcagggatatctgaaacaggggtttaacca

SEQ ID NO: 638235 - DNA, 75 bp, synthetic construct
  source 1..75: mol_type = other DNA
acatgggcggaaatgacatcaataacgccggtaacctcaatggtcagaaagccacggtgaaaggcgatataacca

SEQ ID NO: 638236 - DNA, 75 bp, synthetic construct
  source 1..75: mol_type = other DNA
atcaaataacctgaataacgttggggcagtaaatgcccagacaggtaatttcagcggcaatgtgaatggtgtaaa

SEQ ID NO: 638237 - DNA, 75 bp, synthetic construct
  source 1..75: mol_type = other DNA
tattcaatttttacatgctctgtgtgcagcctttacttggattatttctcgtgggttatagtgtgtggagatttt

SEQ ID NO: 638238 - DNA, 75 bp, synthetic construct
  source 1..75: mol_type = other DNA
tattcaatttttacatgctctgtgtgcagccttttattggactggttcttgcgggttatggtgcatggaaatttt

SEQ ID NO: 638239 - DNA, 75 bp, synthetic construct
  source 1..75: mol_type = other DNA
gccgaagttccggtggctgaggttgttccggtactgctgcagtcagcagcaatttcagcagaaagcgttattcag

SEQ ID NO: 638240 - DNA, 75 bp, synthetic construct
  source 1..75: mol_type = other DNA
atgtgaataattatgcgtggggaaattatgagtccggcggcacaattactgttacatgcctgaatcttcctggtg

SEQ ID NO: 638241 - DNA, 75 bp, synthetic construct
  source 1..75: mol_type = other DNA
atcagatcacctcttatccggcccaaaactactcttgtggctcaggggtattttcagtttttggataccaaactt

SEQ ID NO: 638242 - DNA, 75 bp, synthetic construct
  source 1..75: mol_type = other DNA
gtattactggaaccagcatcgtattttgtcatcggaactgttgttttgtttgtatggtacatagcctggcaggca

SEQ ID NO: 638243 - DNA, 75 bp, synthetic construct
  source 1..75: mol_type = other DNA
ctgtcgcacctgaacccaatcgtttatatgatcagtggtttccgctacggcttcctcggtatcaatgatgtgccg

SEQ ID NO: 638244 - DNA, 75 bp, synthetic construct
  source 1..75: mol_type = other DNA
aatggcaggaactggtaggttacaaaatgattggcgtgcgctcctccagcggcaaccgactgctgattgagcaaa

SEQ ID NO: 638245 - DNA, 75 bp, synthetic construct
  source 1..75: mol_type = other DNA
ggctgctgccagcgtatatgtcatggagttgaataaaaatgtatacgatcagtttacggaaccaatgctctctca

SEQ ID NO: 638246 - DNA, 75 bp, synthetic construct
  source 1..75: mol_type = other DNA
aaactgcttttcctcggttcgtcgtgtatttatcctaagttagcacaccaaccgattatggaagacgaattatta

SEQ ID NO: 638247 - DNA, 75 bp, synthetic construct
  source 1..75: mol_type = other DNA
ggcatgcgtcgcctgactcgtgaacattgcgatgagttgatcagcatcccgatggcaggaagcgtttcttccctg

SEQ ID NO: 638248 - DNA, 75 bp, synthetic construct
  source 1..75: mol_type = other DNA
ggcaaccgactgttgatagaacaacagctggccgaaagccctggaagctggactggttttacgaagtgcgtcatc

SEQ ID NO: 638249 - DNA, 75 bp, synthetic construct
  source 1..75: mol_type = other DNA
tccattgattttaccccactggtcaacgagccattcgtgctggcctgtcggcgtgaccatccattggccaaaaag

SEQ ID NO: 638250 - DNA, 75 bp, synthetic construct
  source 1..75: mol_type = other DNA
cttggcgtcacgcggcagaccctgtatcggcatgtttcacccaagggtgagctacgtccagatggcgagaagcta

SEQ ID NO: 638251 - DNA, 75 bp, synthetic construct
  source 1..75: mol_type = other DNA
gatctctgcgaagaactcgggattacccggcagacgctctaccggcacgtgtcgcccaagggcgaactgcggcca

SEQ ID NO: 638252 - DNA, 75 bp, synthetic construct
  source 1..75: mol_type = other DNA
gctgtttgttggcattctggtgacggcgatttcgctgttctttgtgccgtttcaggtgcattcgtgggtattcgt

SEQ ID NO: 638253 - DNA, 75 bp, synthetic construct
  source 1..75: mol_type = other DNA
caatggctttagttgttggctatgatggaaaaattgtttttgatataacaaaaccagatggttcgcctcgtaaac

SEQ ID NO: 638254 - DNA, 75 bp, synthetic construct
  source 1..75: mol_type = other DNA
aataactcacatgtaattccagcgcttatgcggcgttttcatgaagcaaaggaacttggtttaaatgaagtggtt

SEQ ID NO: 638255 - DNA, 75 bp, synthetic construct
  source 1..75: mol_type = other DNA
ctgggcaccagggcatggttggctctgctatttgccgacaattatcgctgcgtgatgatatcgagttagtggtta

SEQ ID NO: 638256 - DNA, 75 bp, synthetic construct
  source 1..75: mol_type = other DNA
aacatgtgttgttgttaccgctattttagtgccaattattacggccttatatgcaaaacacatatcaccaaagat

SEQ ID NO: 638257 - DNA, 75 bp, synthetic construct
  source 1..75: mol_type = other DNA
cgactgggaggggagttgttacggcaactggtaagaactgaccacagtaatatccgcgtgcttagcatgtatgcg

SEQ ID NO: 638258 - DNA, 75 bp, synthetic construct
  source 1..75: mol_type = other DNA
cgctgggttacgcggaggcgttaacgcgttcttctgaccccaacgataaccgcctgggcggcgagttgttgcgtc

SEQ ID NO: 638259 - DNA, 75 bp, synthetic construct
  source 1..75: mol_type = other DNA
aaggtaagcgtgccggatatgttgtttatctgccgggtattgtggtggcgttaattgtggctggcgtcagctact

SEQ ID NO: 638260 - DNA, 75 bp, synthetic construct
  source 1..75: mol_type = other DNA
tttgaagtgctggtggaggttaacgacaacaaaccctttgacctggtgacgctgccggtcagccagatggggatg

SEQ ID NO: 638261 - DNA, 75 bp, synthetic construct
  source 1..75: mol_type = other DNA
cctaaattaagccgtcgcattgttgaacaggcagtaaaagagatggaggatagtgggtactggttcaataaaaaa

SEQ ID NO: 638262 - DNA, 75 bp, synthetic construct
  source 1..75: mol_type = other DNA
gttgatgtcatccctgcttctattgatgacggcttcgtagcaagccaatgggagtctttggttgctgaacacctt

SEQ ID NO: 638263 - DNA, 75 bp, synthetic construct
  source 1..75: mol_type = other DNA
aactggccgttaaagaaatggaagaaagtggctatgaatttaataaaaagcgggtaggcaacgtcgagcaatatg

SEQ ID NO: 638264 - DNA, 75 bp, synthetic construct
  source 1..75: mol_type = other DNA
tggcgcgttacggcaacttcgtcacttacgatccgccgttaacgccgctgaccgtgctgctgtgggtgcttccgg

SEQ ID NO: 638265 - DNA, 75 bp, synthetic construct
  source 1..75: mol_type = other DNA
atgcattcctttctgaaggctggaagggattgtgtgaggaacatctgccagggcaaaatattcatgcagtgctta

SEQ ID NO: 638266 - DNA, 75 bp, synthetic construct
  source 1..75: mol_type = other DNA
accggagatgctggaacgccttgaagaagaaggtgtggaacccaggctcagcgccagtattgggtttatgtcaaa

SEQ ID NO: 638267 - DNA, 75 bp, synthetic construct
  source 1..75: mol_type = other DNA
gaaggtaatgtcagcgaagtgctggtgaagtttaatcacgatgcaccgaaagaacatgcttatatggcgcactgc

SEQ ID NO: 638268 - DNA, 75 bp, synthetic construct
  source 1..75: mol_type = other DNA
gtgatgtttatcaagcagtccgccgctattattttatcgaccgtcgcgggtcatctctacgacaccatcggattc

SEQ ID NO: 638269 - DNA, 75 bp, synthetic construct
  source 1..75: mol_type = other DNA
ggaatgtgatcctctggggattctttttcctgttctattactacaactggtcttcctgcttcttgtttttaccca

SEQ ID NO: 638270 - DNA, 75 bp, synthetic construct
  source 1..75: mol_type = other DNA
agaacacctatttctcctcactggataacatggttggatggattaaaaagcgtgctgctgaacagtacgccagtg

SEQ ID NO: 638271 - DNA, 75 bp, synthetic construct
  source 1..75: mol_type = other DNA
aaatcccaggtggtttaatgcttgtaccattactgcttggtgcgatattgaacacctttgccccagagacaggca

SEQ ID NO: 638272 - DNA, 75 bp, synthetic construct
  source 1..75: mol_type = other DNA
ctaccagtcatgatggtattcactttgagaagcagggctgtgtgctgacacctccggaaggtatcatgcatttcc

SEQ ID NO: 638273 - DNA, 75 bp, synthetic construct
  source 1..75: mol_type = other DNA
tggtcgcccccggctgtttggttgttttggatcggcggcctgcgcgacgatctccggcattctgtatggcttcga

SEQ ID NO: 638274 - DNA, 75 bp, synthetic construct
  source 1..75: mol_type = other DNA
atccgcggcaacgcgcgccgagacagcagcaaaacgggcagaggatattgcatccgccgtggcgcttgaggatgc

SEQ ID NO: 638275 - DNA, 75 bp, synthetic construct
  source 1..75: mol_type = other DNA
agtgcgcgcgatgcagctatagaaaatgaaaagttgcggaaggaagttgaagatctccgtatcgcttctgagtcc

SEQ ID NO: 638276 - DNA, 75 bp, synthetic construct
  source 1..75: mol_type = other DNA
gcgaaactgtctggtgcgcgcacggtgctccatattcaggattacgaagtggacgccatgctggggctgggcctt

SEQ ID NO: 638277 - DNA, 75 bp, synthetic construct
  source 1..75: mol_type = other DNA
tgggaaacactgccgtttcaggttgccattatgaacagcatgggaaatgaccggatccgcaccattaatctgatt

SEQ ID NO: 638278 - DNA, 75 bp, synthetic construct
  source 1..75: mol_type = other DNA
ggcattgactcgcagcgaaaccgttttgagatgtatgtctggggatgggctccgggagaggaagcctttctggtg

SEQ ID NO: 638279 - DNA, 75 bp, synthetic construct
  source 1..75: mol_type = other DNA
cggtgaagattacaccgatgtccgttgtgttgctgccccggtgtttaacgccaataacgagcttaccgccgcgat

SEQ ID NO: 638280 - DNA, 75 bp, synthetic construct
  source 1..75: mol_type = other DNA
acagacaaacggtgttattgaaattatctggccacaacctaaaaccagcccgaatgatgagtatgcctataagat

SEQ ID NO: 638281 - DNA, 75 bp, synthetic construct
  source 1..75: mol_type = other DNA
gttttcagcatgttgcagacgccgatgttgatgcccttcgtaaccagcttggcctgccggataacaaaaaaatca

SEQ ID NO: 638282 - DNA, 75 bp, synthetic construct
  source 1..75: mol_type = other DNA
tcttcgtatcttgctggtcgctgggaaactctgccatttcagatggcaataatgaactgcatggggaatgacagg

SEQ ID NO: 638283 - DNA, 75 bp, synthetic construct
  source 1..75: mol_type = other DNA
tttctggtggataaaatcatcattatggggcgtcctgatgaggaagagacgctgttacgtgtggatgcggcgatc

SEQ ID NO: 638284 - DNA, 75 bp, synthetic construct
  source 1..75: mol_type = other DNA
ttgccggtgacgccagttgaatgggctgatcaaaattattatctgcctaaagaatcttcatatggtgagggcgaa

SEQ ID NO: 638285 - DNA, 75 bp, synthetic construct
  source 1..75: mol_type = other DNA
atggcacgaaaaaccaaacaagaagcgcaagaaacgcgccaacacatcctcgatgtggctgctctacgtcttttc

SEQ ID NO: 638286 - DNA, 75 bp, synthetic construct
  source 1..75: mol_type = other DNA
cgattacgttgccatattgctggaaatgtatcttctttgccctacgcttcgtacaccggccaccaacgaaaaatc

SEQ ID NO: 638287 - DNA, 75 bp, synthetic construct
  source 1..75: mol_type = other DNA
atccacctcgctgggtgagattgcaaaagcagctggcgttacgcgcggtgcaatctactggcattttaaagacaa

SEQ ID NO: 638288 - DNA, 75 bp, synthetic construct
  source 1..75: mol_type = other DNA
accttgaggcactggcccgggcacgaagagacgagcaggatgaggatgatatgagtctggaagagatcgcggctg

SEQ ID NO: 638289 - DNA, 75 bp, synthetic construct
  source 1..75: mol_type = other DNA
ccgttaaacgatgtgctgacagcaatcagtgaactcagtgaactgacgcaacgggcagataatcttctgtacttt

SEQ ID NO: 638290 - DNA, 75 bp, synthetic construct
  source 1..75: mol_type = other DNA
aaccgtcatggacgagacgaaaacaaaagcgccgctggacagcccggcattcaccggcacgcccaccacaccaac

SEQ ID NO: 638291 - DNA, 75 bp, synthetic construct
  source 1..75: mol_type = other DNA
ggggatcgatggtgaaatagtttatcggagatcaaaaaaacacggtgtttttcgggtgttgccggtaaaaggcgc

SEQ ID NO: 638292 - DNA, 75 bp, synthetic construct
  source 1..75: mol_type = other DNA
atgaatatatcagagcaacaactgaataatctgatggctgccgtttcggttgcgctgcagcctctggtcagggtt

SEQ ID NO: 638293 - DNA, 75 bp, synthetic construct
  source 1..75: mol_type = other DNA
gccgaaaacccgcaatcagcggggcgtgtatctgtgtgaagtggggacggacaccgcaaaagaaattctctatgc

SEQ ID NO: 638294 - DNA, 75 bp, synthetic construct
  source 1..75: mol_type = other DNA
taaaggctcctgtcagattgagaaagccgcgaatgaatctgcgcatttcatgcggttttatgttccttgccctca

SEQ ID NO: 638295 - DNA, 75 bp, synthetic construct
  source 1..75: mol_type = other DNA
cacgctgaacgagctggcagcggcactgggcaatgacccgaactttgcgacaaccgtcactaatgcactggcagg

SEQ ID NO: 638296 - DNA, 75 bp, synthetic construct
  source 1..75: mol_type = other DNA
gtgccggttttactcgatcttgcaccgtggtttgggcgtaaacatcgtgataataccctcacgctgaaacgcttt

SEQ ID NO: 638297 - DNA, 75 bp, synthetic construct
  source 1..75: mol_type = other DNA
ggagacggtgtattacctgtgtgaacataatggctgcgcgatccgtcagtcggaacttgaccagaccgacgggcg

SEQ ID NO: 638298 - DNA, 75 bp, synthetic construct
  source 1..75: mol_type = other DNA
tggataaaatcatcattatggggcgtcctgatgaggaagagacgctgttacgtgtggatgcggcgatcaacaaaa

SEQ ID NO: 638299 - DNA, 75 bp, synthetic construct
  source 1..75: mol_type = other DNA
ccggatccgcacaattaatcttataaaatcagctcgagtcggttacaccaaaatgctgatgggcgttattggtta

SEQ ID NO: 638300 - DNA, 75 bp, synthetic construct
  source 1..75: mol_type = other DNA
gcactgaccggaacgccgtccacgccaacaccaccggatgatgcagcaggtaatgaaatagccaatgcggcgttt

SEQ ID NO: 638301 - DNA, 75 bp, synthetic construct
  source 1..75: mol_type = other DNA
aagcgaaacagtacagggatgaggcgcagcagatagttgatgacctgaatgcaacaaatgccagcacgacagaaa

SEQ ID NO: 638302 - DNA, 75 bp, synthetic construct
  source 1..75: mol_type = other DNA
gcggcggttagcctatgtcggtatcactcgcgctcagaaggaattgacctttacgctgtgtaaagagcgacgcca

SEQ ID NO: 638303 - DNA, 75 bp, synthetic construct
  source 1..75: mol_type = other DNA
gcggcggctggcctatgtcggcattacccgcgcccagaaggaattgacctttacgctgtgtaaagaacgccgtca

SEQ ID NO: 638304 - DNA, 75 bp, synthetic construct
  source 1..75: mol_type = other DNA
ttggtactgacgtaggcaaagagatcaaaacgctgaccggcaagcagggtgccgatgtgattatcgaaaccagcg

SEQ ID NO: 638305 - DNA, 75 bp, synthetic construct
  source 1..75: mol_type = other DNA
tgacgaccagtcgatctactcctggcgcggtgcacgtccacaaaacctggtgctgctgagtcaggattttccggc

SEQ ID NO: 638306 - DNA, 75 bp, synthetic construct
  source 1..75: mol_type = other DNA
gcgcgcgctttaccgtggtgggcgatgacgatcagtcaatctactcatggcgtggtgcccgtccgcaaaatctgg

SEQ ID NO: 638307 - DNA, 75 bp, synthetic construct
  source 1..75: mol_type = other DNA
cgcgagcgctggcagaacaaaattcgctacctgctggtggacgaatatcaggacaccaacaccagccagtatgag

SEQ ID NO: 638308 - DNA, 75 bp, synthetic construct
  source 1..75: mol_type = other DNA
cgggtgtcacaataaaccggaccactgtttcatgggtaacaaaagtgctcccgcagttaatattttggcactggc

SEQ ID NO: 638309 - DNA, 75 bp, synthetic construct
  source 1..75: mol_type = other DNA
agtaacgctctttggtgctttctgttacttgaaaactgctccttgtgtgcgccgcatgaccacactttggacaat

SEQ ID NO: 638310 - DNA, 75 bp, synthetic construct
  source 1..75: mol_type = other DNA
ggtgaagcggatcatacgctttatcagagcaaaatgaccgggcgcctggcgctggtgatgggcgcggaaggtgaa

SEQ ID NO: 638311 - DNA, 75 bp, synthetic construct
  source 1..75: mol_type = other DNA
gtgacctcgaatgtctggagcacatgcgcaacgtcggccagctcgtcaacgagctgatgcaggtgcaggactgcg

SEQ ID NO: 638312 - DNA, 75 bp, synthetic construct
  source 1..75: mol_type = other DNA
atgagacacaccaccattaccgcccgtgacctcgaatgtctggagcatatgcgcaatgtcggccagctcgtcaat

SEQ ID NO: 638313 - DNA, 75 bp, synthetic construct
  source 1..75: mol_type = other DNA
atgagacacaccaccattactgcccgtgacctcgaatgccttgaacatatgcgcaacgtcggtcagctcgtcagc

SEQ ID NO: 638314 - DNA, 75 bp, synthetic construct
  source 1..75: mol_type = other DNA
agctgatttcaaccatctctaattggaagaacgatctcaaaactcctgcgcaggcggcggcagaggcaaaaggcg

SEQ ID NO: 638315 - DNA, 75 bp, synthetic construct
  source 1..75: mol_type = other DNA
ccttgatgaaagcgatttaaagccagatgtagtgaaacgctttgaggaactggcgcaacaggcacagcagagcgc

SEQ ID NO: 638316 - DNA, 75 bp, synthetic construct
  source 1..75: mol_type = other DNA
gaatatgcactgcaagggcatcgattattctgcaaatggcttctcgaaaactcaccattccttaacagcatcacc

SEQ ID NO: 638317 - DNA, 75 bp, synthetic construct
  source 1..75: mol_type = other DNA
acgtcatggacgagacgaaaacaaaagcgccactggacagcccggccttcaccggcaccccaaccaccccaaccc

SEQ ID NO: 638318 - DNA, 75 bp, synthetic construct
  source 1..75: mol_type = other DNA
tttgaagcaccaaaaggcaaatacaccgtacacatcaagcaaaagaacggccctaagtgctgcgtgggtgacatt

SEQ ID NO: 638319 - DNA, 75 bp, synthetic construct
  source 1..75: mol_type = other DNA
ttatttcagtgcagagggccggattttactggcgcagctgtcagaaaaagcccgcgcattactggcactggacac

SEQ ID NO: 638320 - DNA, 75 bp, synthetic construct
  source 1..75: mol_type = other DNA
cgcggcgcacgtccgcagaacctggtcctgttgagcaaagattttccggcgctgcaggtggttaagctggagcaa

SEQ ID NO: 638321 - DNA, 75 bp, synthetic construct
  source 1..75: mol_type = other DNA
ttacggcctgtacgacgcgcatatgaaggcgtgcaatgtgctggatttcgatgatctgattctgctaccgacgct

SEQ ID NO: 638322 - DNA, 75 bp, synthetic construct
  source 1..75: mol_type = other DNA
gaagcgttgacccgatttactcactggctggcggaaatccagcgactggcggagcgggagcctgtcgccgcagtg

SEQ ID NO: 638323 - DNA, 75 bp, synthetic construct
  source 1..75: mol_type = other DNA
attatgtgcaggtggaaggcattcctacggaagacgctcttgaagccttgcgcaatggcgtaaccttaaatgatg

SEQ ID NO: 638324 - DNA, 75 bp, synthetic construct
  source 1..75: mol_type = other DNA
cgggcagacgctggggcgcaaagaggcgcgtgggctgatgatctccaccttccacacgctggggctggatatcat

SEQ ID NO: 638325 - DNA, 75 bp, synthetic construct
  source 1..75: mol_type = other DNA
cggcgcgcgagatgaaagagcgtgtcgggcagacgctggggcgcaaagaggcgcgtgggctgatgatctccactt

SEQ ID NO: 638326 - DNA, 75 bp, synthetic construct
  source 1..75: mol_type = other DNA
ttccagaacaaagcgtgccggaaggtaagcgtgccggatatgttgtttatctgccgggtattgtggtggcgttaa

SEQ ID NO: 638327 - DNA, 75 bp, synthetic construct
  source 1..75: mol_type = other DNA
ttacgatccgccgttaacgccgctgaccgtgctgctgtgggtgctgccagtagtggctattggcattggcggttg

SEQ ID NO: 638328 - DNA, 75 bp, synthetic construct
  source 1..75: mol_type = other DNA
ctgcccgaaatgccagaacaacagcattgccgattccaactcgatgattgccaccgacctgcgccagaaagtgta

SEQ ID NO: 638329 - DNA, 75 bp, synthetic construct
  source 1..75: mol_type = other DNA
agaagtggttttgctattgaaggcctcttccctgacgatttcatttctgacgcaatggaaacccatccgtcgtgg

SEQ ID NO: 638330 - DNA, 75 bp, synthetic construct
  source 1..75: mol_type = other DNA
tatattctgatcgacgcaatcagctcaatgcaagctctccaaatattccgcgatgggcttacaaaaaaacgcaac

SEQ ID NO: 638331 - DNA, 75 bp, synthetic construct
  source 1..75: mol_type = other DNA
atgaggtttttattgggcgtgctgatgctgatgctgatgctgatgctgatgatctccggctcagcgctggcgacc

SEQ ID NO: 638332 - DNA, 75 bp, synthetic construct
  source 1..75: mol_type = other DNA
agttcaccacacttgatgtgatcgcccgactcaggcaggagacggtcatttccggggtggaaaacggaattaacc

SEQ ID NO: 638333 - DNA, 75 bp, synthetic construct
  source 1..75: mol_type = other DNA
aaaaacaccttcgtgccgtccaggattatctgacccgcctgtgctcccgctatccgggtaaagtatccccgtttg

SEQ ID NO: 638334 - DNA, 75 bp, synthetic construct
  source 1..75: mol_type = other DNA
cagtgctgatgagtactttaaaattggctccactatcaaaacagaccgtgagattgaactggatggcgtaacgta

SEQ ID NO: 638335 - DNA, 75 bp, synthetic construct
  source 1..75: mol_type = other DNA
ctgaacaagccgatgaatatgcagttactgggcgatgcacagccgcatactggcggtgagcgtcgtggcggtggt

SEQ ID NO: 638336 - DNA, 75 bp, synthetic construct
  source 1..75: mol_type = other DNA
tgcgaacgacccgattaacatcctcgaacgtcttgagatggagggggtacaggccaggatgattgccgacccgca

SEQ ID NO: 638337 - DNA, 75 bp, synthetic construct
  source 1..75: mol_type = other DNA
tctggaggcccgtgtccacggagagctggagctgctcgatatcgtcagaaaagatgaggggctggaattactggg

SEQ ID NO: 638338 - DNA, 75 bp, synthetic construct
  source 1..75: mol_type = other DNA
tctctccgagcgatcgtttattaaacgatctccgtggcctcattggttcggagcaggtggaactggagtttgact

SEQ ID NO: 638339 - DNA, 75 bp, synthetic construct
  source 1..75: mol_type = other DNA
aagatgtccccgtaatatctgtttttgacggtgatgaagctggggtcaaagaaagaaccagattacaaagctact

SEQ ID NO: 638340 - DNA, 75 bp, synthetic construct
  source 1..75: mol_type = other DNA
tgtttatggcgttgctcttttccatgttgcaagttcccaacccgctgcaggatgctcatcagcgcgatcggcaat

SEQ ID NO: 638341 - DNA, 75 bp, synthetic construct
  source 1..75: mol_type = other DNA
gtgtccatcatttattaccagccatttcaccccgccctgaagagtgaactgaagcggcgcggaattgcgcgtaac

SEQ ID NO: 638342 - DNA, 75 bp, synthetic construct
  source 1..75: mol_type = other DNA
tgcttttattaccgggatttttcaccgattttcttggccttcttcttctattaccgccagtgcagaaacacctga

SEQ ID NO: 638343 - DNA, 75 bp, synthetic construct
  source 1..75: mol_type = other DNA
ttgccgccggtgcaaaagcatctgacagtgaagttgatgccgcatttgcgcttttctcgcatgccaggcggcggt

SEQ ID NO: 638344 - DNA, 75 bp, synthetic construct
  source 1..75: mol_type = other DNA
ccacggcgattccggcaccggtaaagagctggtcgccagggcgattcacgccagtagcgcacgtagcgaaaaccg

SEQ ID NO: 638345 - DNA, 75 bp, synthetic construct
  source 1..75: mol_type = other DNA
ggccgaagagccggaacaaattgaacaatcctacgccagctgccaaccgtggccggagcaggtggtattagatgg

SEQ ID NO: 638346 - DNA, 75 bp, synthetic construct
  source 1..75: mol_type = other DNA
cgctggatgaccgttccgggcggctggaagtgatgttgtttactgacgccctggataaataccagcaattgctgg

SEQ ID NO: 638347 - DNA, 75 bp, synthetic construct
  source 1..75: mol_type = other DNA
cgcgaactgtttgatctctgcgctcgtaccgacaccaaaaagttgaaccgtcgcgtgctggaaaaactgatcatg

SEQ ID NO: 638348 - DNA, 75 bp, synthetic construct
  source 1..75: mol_type = other DNA
atcagcgaaacaggacgggagatcctgcgctatcatcaactcacactgactactggttatgacggtagctaccgg

SEQ ID NO: 638349 - DNA, 75 bp, synthetic construct
  source 1..75: mol_type = other DNA
tgcgtaagtctatcaaacgtctggtaaaccattttcgtgagctgggaaatgttcgtttttatgatgaacaggggt

SEQ ID NO: 638350 - DNA, 75 bp, synthetic construct
  source 1..75: mol_type = other DNA
aatttcagatagcacaagaaattggccgccactggcaacgccgggcgcgccagcctgtaccaccagatgaaccgt

SEQ ID NO: 638351 - DNA, 75 bp, synthetic construct
  source 1..75: mol_type = other DNA
atcgtaccgtggtgttccatgacacgagtgttgatgagtactttaaaattggctctaccatcaaaacagaccgtg

SEQ ID NO: 638352 - DNA, 75 bp, synthetic construct
  source 1..75: mol_type = other DNA
cgccaccatcttcacgccgctgatccccggttttattgccgccggtctgttgctgggaatagcgacgttaattgc

SEQ ID NO: 638353 - DNA, 75 bp, synthetic construct
  source 1..75: mol_type = other DNA
ccggttactacgctggttttcacgatttcttcggcctgcctatcgatccgcgcggcaatattatcggcgtactga

SEQ ID NO: 638354 - DNA, 75 bp, synthetic construct
  source 1..75: mol_type = other DNA
acgcggggcgattattcccggtctgctgggcgttggcgaaccgctgatttacggtgtcaccctgccccgcatgaa

SEQ ID NO: 638355 - DNA, 75 bp, synthetic construct
  source 1..75: mol_type = other DNA
tcacaacaaaagctggatgccattgagcgtctcgaaacccgccccgtcgatcgtctgttcacaggtattcctgtt

SEQ ID NO: 638356 - DNA, 75 bp, synthetic construct
  source 1..75: mol_type = other DNA
tggttgtccggctttgcctgacggattgcaggcggaattctttaccctgcaactgcgtttttcgcgccctttgcc

SEQ ID NO: 638357 - DNA, 75 bp, synthetic construct
  source 1..75: mol_type = other DNA
caactatactcgtgaccaactttatttgtggttttgtgaatacttacagagcgccgacctgactgtgggtgaaca

SEQ ID NO: 638358 - DNA, 75 bp, synthetic construct
  source 1..75: mol_type = other DNA
ccagcgatcaagtacaggtaatattcggaccgggcaaagcgcatcgtgccgcaaaagcgatgagcgagctgctgg

SEQ ID NO: 638359 - DNA, 75 bp, synthetic construct
  source 1..75: mol_type = other DNA
ataaagaggcgcgctgggcgctggggctgacccttttgtatctggcggtatggttagtagccgcttacttacctg

SEQ ID NO: 638360 - DNA, 75 bp, synthetic construct
  source 1..75: mol_type = other DNA
tcagaacggctgtgctggtttgtatccggcaatgctggcagtgatggttgcgcctacagttggcattaacccact

SEQ ID NO: 638361 - DNA, 75 bp, synthetic construct
  source 1..75: mol_type = other DNA
catggtgcgccgctttatgccggacgatctcgacatgctgctgacctcgttaatcaccctgctgatcaccgctac

SEQ ID NO: 638362 - DNA, 75 bp, synthetic construct
  source 1..75: mol_type = other DNA
acggcgtcaccctgccccgcatgaaaccgtttgttaccgcctgtttaggcggcgcggcgggcggtttgtttatcg

SEQ ID NO: 638363 - DNA, 75 bp, synthetic construct
  source 1..75: mol_type = other DNA
aggcttgttcaccttcctggtgatactggtaggttataatgccgctcaggcatttggcggcacgggcgtcaatgg

SEQ ID NO: 638364 - DNA, 75 bp, synthetic construct
  source 1..75: mol_type = other DNA
caacattacccgcccgacgcaaccactctggccggtcattgatggcagcctgcactggtccctgctctccgccat

SEQ ID NO: 638365 - DNA, 75 bp, synthetic construct
  source 1..75: mol_type = other DNA
cgaaaggtatgccgggtgaagtgctgcaacactttacgcgtacccgcatcctcaacaagccgatgaacatgcaac

SEQ ID NO: 638366 - DNA, 75 bp, synthetic construct
  source 1..75: mol_type = other DNA
tcacctggtccccggtgttaaatcggcagaagagcagacggtaccgcagctaaaaaccgcggcgcaggctgcact

SEQ ID NO: 638367 - DNA, 75 bp, synthetic construct
  source 1..75: mol_type = other DNA
gccatgatggcgggacttgcttcgtgttgggtagacggaatgccgtttgccgaatctgttcgtttcgcacaggga

SEQ ID NO: 638368 - DNA, 75 bp, synthetic construct
  source 1..75: mol_type = other DNA
ctctgcttttttcctctgtggcactggctgaacctcatcatgcacacgccaccagtaatcagccagccaccatga

SEQ ID NO: 638369 - DNA, 75 bp, synthetic construct
  source 1..75: mol_type = other DNA
tctggatgcgcttaggtcgttaaccaaaaaagatgttctggtcggcatcccttcggaagacagcgagcgggatga

SEQ ID NO: 638370 - DNA, 75 bp, synthetic construct
  source 1..75: mol_type = other DNA
gcagaagagctgacggtgccgcagcttaaagccgcggcgcaggctgcacttgatggtaatgctacgggagcggaa

SEQ ID NO: 638371 - DNA, 75 bp, synthetic construct
  source 1..75: mol_type = other DNA
tctgaccaacagtcaacctgcactccacaaccgtttacgactctttccggcatacgctgcagtaccgcacatatc

SEQ ID NO: 638372 - DNA, 75 bp, synthetic construct
  source 1..75: mol_type = other DNA
aatgcaacagcacaacaacgtttcaggagaagagaaaaaggagtagcaaactgcaaatttcttgtctggtttgat

SEQ ID NO: 638373 - DNA, 75 bp, synthetic construct
  source 1..75: mol_type = other DNA
tccgttaacagtgtggtgagccaggtccaggatatgttcaggaaaaaagatctggggcgtcctgtttcgacgtag

SEQ ID NO: 638374 - DNA, 75 bp, synthetic construct
  source 1..75: mol_type = other DNA
gagcgattaagtcaaattcataccctgaagccaaaccgtctggaagcggaaaccctgagcgggattgcgctttcc

SEQ ID NO: 638375 - DNA, 75 bp, synthetic construct
  source 1..75: mol_type = other DNA
aaatgctgcgcatgggcttcatcgaagacgttgaaaccattatggcgcagatcccggaaggtcatcagaccgctc

SEQ ID NO: 638376 - DNA, 75 bp, synthetic construct
  source 1..75: mol_type = other DNA
ttattcactccgcgtggtggaggaatccgaccaacagtcaacctgcacaccaccaccgtttacggcccttgccgg

SEQ ID NO: 638377 - DNA, 75 bp, synthetic construct
  source 1..75: mol_type = other DNA
acgttatcagggctgggaaatgactgacattcagactgaccgtgtgacattacgttatcaggggcgcacggtgac

SEQ ID NO: 638378 - DNA, 75 bp, synthetic construct
  source 1..75: mol_type = other DNA
cgtgtttctcaggctcttgttaatgccggtgtaatgaatcaggcaaatactcttatcggtaagttagtccagata

SEQ ID NO: 638379 - DNA, 75 bp, synthetic construct
  source 1..75: mol_type = other DNA
atttcagtgaagagggccggattttactggcggcgttgtcagaaaaggcccgcacgttactggcattggacacgc

SEQ ID NO: 638380 - DNA, 75 bp, synthetic construct
  source 1..75: mol_type = other DNA
cctgaaagtaaaatcccggacttatcctacttcgacaataagctcgacgccgctttcggtgattatttttccggt

SEQ ID NO: 638381 - DNA, 75 bp, synthetic construct
  source 1..75: mol_type = other DNA
tttacgttttggctgggcgaataagcatatcattaagaatttgcatcgtgatgaagtactggctcaactggaaaa

SEQ ID NO: 638382 - DNA, 75 bp, synthetic construct
  source 1..75: mol_type = other DNA
catatcgtcacggttgagtcagaactccccacggcggcgcgttttgaatgggtacatcgtcatttgccgggactg

SEQ ID NO: 638383 - DNA, 75 bp, synthetic construct
  source 1..75: mol_type = other DNA
tctggcgtccgtactttgcgcagtacttcccgatgcaggttgttcgctacagcctgctgattcacgcggctgcgg

SEQ ID NO: 638384 - DNA, 75 bp, synthetic construct
  source 1..75: mol_type = other DNA
ttgcggatttcgcctgggcgcgccagctcaacggcgaagggatgcgcgaattgctgcaacagcctggttatattc

SEQ ID NO: 638385 - DNA, 75 bp, synthetic construct
  source 1..75: mol_type = other DNA
acgagcaggcaatgcgcctgacgctacgccaggcggcgcagcaaggaataattaccgcgatcgtcaaagatcgtt

SEQ ID NO: 638386 - DNA, 75 bp, synthetic construct
  source 1..75: mol_type = other DNA
aattcggtggtgatacttggacccaaaccgatgtattcatgactcagcgtgcaactggtgttgcaacttaccgta

SEQ ID NO: 638387 - DNA, 75 bp, synthetic construct
  source 1..75: mol_type = other DNA
tcagacgatggcgacaagacttatgctcgtctgggcttcaaaggcgaaacccaaatcaacgatcaactgactggt

SEQ ID NO: 638388 - DNA, 75 bp, synthetic construct
  source 1..75: mol_type = other DNA
tgacatcatgctcaactaccagaccaccgcattccacgataccgccactgtgcgtcagttactcaacctgcgccc

SEQ ID NO: 638389 - DNA, 75 bp, synthetic construct
  source 1..75: mol_type = other DNA
aaaagccagcgcagaagcggcagcaaaaagcgagcagggtgcgaaacagcacagggacgaggcgcaacgggtagt

SEQ ID NO: 638390 - DNA, 75 bp, synthetic construct
  source 1..75: mol_type = other DNA
ggtcagaacatccatgcagtcctgaaagaaaatgtgattgataagctgaagagcgattatgactttatcctcgtt

SEQ ID NO: 638391 - DNA, 75 bp, synthetic construct
  source 1..75: mol_type = other DNA
acacagcgcagaaggtcattgtgggtgcagcattgctggcaaaggtcagaaagccggaggaggtgcagttgcgtg

SEQ ID NO: 638392 - DNA, 75 bp, synthetic construct
  source 1..75: mol_type = other DNA
gcgcctgaaggcgaagagccggagcctggacacggcgcaaaaagtcattgtgggggcagccatgctggcaagggt

SEQ ID NO: 638393 - DNA, 75 bp, synthetic construct
  source 1..75: mol_type = other DNA
aggctgattttgctgaatggctgaaggaagccatgccggggcgttatgcggtcagtattgcggactcttccacgc

SEQ ID NO: 638394 - DNA, 75 bp, synthetic construct
  source 1..75: mol_type = other DNA
gttccagtgctggctgtttatcgcggaacaacttccggggataaagaaatcaatattggcctgggtgatgtggtg

SEQ ID NO: 638395 - DNA, 75 bp, synthetic construct
  source 1..75: mol_type = other DNA
tcgttctcgatccaggtcacggcgggattgataccggtgcgattggtcgcaacggatcaaaagaaaaacacgtgg

SEQ ID NO: 638396 - DNA, 75 bp, synthetic construct
  source 1..75: mol_type = other DNA
ctgcgtgcgttcctgctccagtttctgcgaaaggaagtcacaagacaggcggatgtgaaccgactacaaccgctg

SEQ ID NO: 638397 - DNA, 75 bp, synthetic construct
  source 1..75: mol_type = other DNA
ggcccgtgatgacgcagagcgttttgcgaatgaggcagaaaacagtgctcaggcatcaggggcagcgcggaatga

SEQ ID NO: 638398 - DNA, 75 bp, synthetic construct
  source 1..75: mol_type = other DNA
cgtttcgtcagaaaatcgccacagcgattgctgaaggcgtgatcagttatttccactggtttgacaaccagaaag

SEQ ID NO: 638399 - DNA, 75 bp, synthetic construct
  source 1..75: mol_type = other DNA
cgttgaaatcgcccataaacatggcgcggatctgtttatgtcaattcacgccgacggctttaccaacccaaaagc

SEQ ID NO: 638400 - DNA, 75 bp, synthetic construct
  source 1..75: mol_type = other DNA
tctaaccgtggggcaagtagcgcaatggcgaaatacctgtctgaacgcgaaaaccgcgccgatgaagttgccggt

SEQ ID NO: 638401 - DNA, 75 bp, synthetic construct
  source 1..75: mol_type = other DNA
atgcttaacccgccgcgtcgcggtaaacgtaagccggaatatctgcaatggctggcgtctcttgcacgggcgcag

SEQ ID NO: 638402 - DNA, 75 bp, synthetic construct
  source 1..75: mol_type = other DNA
gcaaatattccctcaccgatgcgcagatgcagcagtacgaagaagagcaattggcgcttgccgcacgctggtcac

SEQ ID NO: 638403 - DNA, 75 bp, synthetic construct
  source 1..75: mol_type = other DNA
ttctctggagatgcaggacggcgaaatccgcgcctttgccgaaagccagagtcacctgtcagaagcaatggacgg

SEQ ID NO: 638404 - DNA, 75 bp, synthetic construct
  source 1..75: mol_type = other DNA
tggataaattcttcaccccgcgcccgaaagttgactggcccgcccattcggcgatgagcagccacgacgcgctga

SEQ ID NO: 638405 - DNA, 75 bp, synthetic construct
  source 1..75: mol_type = other DNA
ggctcatcgtggattctttggctgcaaccattttgtgctggcaaatcagtggctggaacaacatcggcgagacgc

SEQ ID NO: 638406 - DNA, 75 bp, synthetic construct
  source 1..75: mol_type = other DNA
accgagttgggcgatgtcaaagtcgtgatcctcggtcaggacccctatcatggccccgggcaagcgcatggtctg

SEQ ID NO: 638407 - DNA, 75 bp, synthetic construct
  source 1..75: mol_type = other DNA
gcaaatactcgctcactgatgcgcagatgcagcagtacgaagaagagcaactggcgctcgccgcacgctggtcgc

SEQ ID NO: 638408 - DNA, 75 bp, synthetic construct
  source 1..75: mol_type = other DNA
tagccgtcaggcgtggattttgcggcaaatgcatcaattaggcggtgagtcgtttatgcgacaacaccaactata

SEQ ID NO: 638409 - DNA, 75 bp, synthetic construct
  source 1..75: mol_type = other DNA
tgccgcatccggaccgacgcccggacaaaaaagagcgccgcgacctgttacgatttaaatacggcgacagtgaat

SEQ ID NO: 638410 - DNA, 75 bp, synthetic construct
  source 1..75: mol_type = other DNA
atacttttgatggtgagtaccagcgaaaggatgatgagcgcgaccgccttgatcataaagaagacgatcgccagg

SEQ ID NO: 638411 - DNA, 75 bp, synthetic construct
  source 1..75: mol_type = other DNA
ccgctttacgctgccgcaggcggtgaagctggtgaccaaaaatccggcgcaggcgcttaatctccaggatcgcgg

SEQ ID NO: 638412 - DNA, 75 bp, synthetic construct
  source 1..75: mol_type = other DNA
gatgcagcagtatgaagaggaacagctggcgcttgccgcacgctggtcgcagccgaatcgcgaatccatcgccgc

SEQ ID NO: 638413 - DNA, 75 bp, synthetic construct
  source 1..75: mol_type = other DNA
gcaaatactccctcaccgatgcgcagatgcagcagtacgaagaggaacagctggcgcttgccgcacgctggtcgc

SEQ ID NO: 638414 - DNA, 75 bp, synthetic construct
  source 1..75: mol_type = other DNA
gcaccaaatttattgatcgcgcctgtcactggaccgtggtgatttgcttcttcctggtggcgctgtccgggattt

SEQ ID NO: 638415 - DNA, 75 bp, synthetic construct
  source 1..75: mol_type = other DNA
atgacggagctggaaaaacatttgctgaacgcattagagcaactgcaacaggactatatgcagcggctgaacgaa

SEQ ID NO: 638416 - DNA, 75 bp, synthetic construct
  source 1..75: mol_type = other DNA
caggcgctgggagccgatctcggtaaatcagtaatggcgatagcttacggtgaacagtggatgaatatggcacaa

SEQ ID NO: 638417 - DNA, 75 bp, synthetic construct
  source 1..75: mol_type = other DNA
aattccccttctacgctgggatccaactgatgatggagcgggcggactcattaccgaattcttcatcaatgttgc

SEQ ID NO: 638418 - DNA, 75 bp, synthetic construct
  source 1..75: mol_type = other DNA
aatactggtcaatactcggcactgcgctgattatcttcgttacctggtttctggtggaagttggggttgccgtca

SEQ ID NO: 638419 - DNA, 75 bp, synthetic construct
  source 1..75: mol_type = other DNA
gtttgttcttgctgtttccgtcgattgttgccggtacgattacgctcggcctgatgacgcagattaccaacgttt

SEQ ID NO: 638420 - DNA, 75 bp, synthetic construct
  source 1..75: mol_type = other DNA
actggagtttaaaaatcagcgtgtagaagctgcctaccgtaaagagttggtttatggtgaagacgatgcatcgcg

SEQ ID NO: 638421 - DNA, 75 bp, synthetic construct
  source 1..75: mol_type = other DNA
tgtttgttaatccacgcgacagcagctattgtactgattcacgccattctgattcatatatacatggcgttttgg

SEQ ID NO: 638422 - DNA, 75 bp, synthetic construct
  source 1..75: mol_type = other DNA
tcgaagggaaagttagtcggcgctgggcgaagaaacaccatcctcgttggtatcgtgagattgaatctactgaaa

SEQ ID NO: 638423 - DNA, 75 bp, synthetic construct
  source 1..75: mol_type = other DNA
accgcttaatgacgtcttaacggcaatcagcgcactgacgcaacgggcagataatcttctgtacttcaatacgga

SEQ ID NO: 638424 - DNA, 75 bp, synthetic construct
  source 1..75: mol_type = other DNA
ctctgttggctgcaacaccgggcaacccggttgagcatatcgccgggctgatcccggtgggcgatactctgttca

SEQ ID NO: 638425 - DNA, 75 bp, synthetic construct
  source 1..75: mol_type = other DNA
aatcggtaatggcgatcgcctacggcgagcaatggatgaacatggcacaaccgttctgggcgctgccagcactgg

SEQ ID NO: 638426 - DNA, 75 bp, synthetic construct
  source 1..75: mol_type = other DNA
tcgcgctttggttaacaccacaaacgccgatcagcatggtgaaaatgtggggtgacggtttctggaacttgctgg

SEQ ID NO: 638427 - DNA, 75 bp, synthetic construct
  source 1..75: mol_type = other DNA
atggttgttttcggttccggcaacggttgccggatgcggcgtgaacgccttatccgtcctggggggctgggcttg

SEQ ID NO: 638428 - DNA, 75 bp, synthetic construct
  source 1..75: mol_type = other DNA
cgataaagtcagcgcgctgcgcggtattttcagcgaatatggtttgctgaaattccgtgtacaagttgaagtacg

SEQ ID NO: 638429 - DNA, 75 bp, synthetic construct
  source 1..75: mol_type = other DNA
cacgactacattgccgaactgtttgattgcgttgcgcgcttcaacactattctgatcgactttgaccgtgacgtc

SEQ ID NO: 638430 - DNA, 75 bp, synthetic construct
  source 1..75: mol_type = other DNA
gaagaagatgcgacgcgaatcaaaaccatcgagcgtaccactaaccacgacgtcaaagcggttgagtatttcctg

SEQ ID NO: 638431 - DNA, 75 bp, synthetic construct
  source 1..75: mol_type = other DNA
ccagaccgccgctgttagtgggggtgcctgtcgcccccgcacttttgtcattttttgcattattcatgtcgggat

SEQ ID NO: 638432 - DNA, 75 bp, synthetic construct
  source 1..75: mol_type = other DNA
atcaacgtcttggcgatgatattaaaacgctgaaagtggttcaggacacgcttttccagaccgcagaagatattg

SEQ ID NO: 638433 - DNA, 75 bp, synthetic construct
  source 1..75: mol_type = other DNA
ccaccctgaaaggcgtgagcaaactggaagtgaaccgtgatcatcttctggaggaactggatcacaactgggaag

SEQ ID NO: 638434 - DNA, 75 bp, synthetic construct
  source 1..75: mol_type = other DNA
aacaacaggaaacggagaaagtttgcaccgcctgcagtaaggctggcggcggcaactgtcctgactgtggcgcgg

SEQ ID NO: 638435 - DNA, 75 bp, synthetic construct
  source 1..75: mol_type = other DNA
tactgctcttgagatggatcaggaaaacagctatgtccagaatctgctgttggccatacgcagcatggcagaacc

SEQ ID NO: 638436 - DNA, 75 bp, synthetic construct
  source 1..75: mol_type = other DNA
gaactgcccattcgttggcttgctcaacacggcagcgaaaaaccggtaacgcacgtttcacgcgacggactccag

SEQ ID NO: 638437 - DNA, 75 bp, synthetic construct
  source 1..75: mol_type = other DNA
attttcagcgaatatggtttgctgaaattccgtgtacaagttgaagtacgttggctgcaaaaactggccgcgcac

SEQ ID NO: 638438 - DNA, 75 bp, synthetic construct
  source 1..75: mol_type = other DNA
tggcgatttagttgtttctcagcagtctgctatgcaagtattgccaatggtacggattatacaggcaaataacca

SEQ ID NO: 638439 - DNA, 75 bp, synthetic construct
  source 1..75: mol_type = other DNA
aaattaaggctgggagaattacaattaaaagcagaaaatctcagagctaatgttggtaacaatcctgctaagttc

SEQ ID NO: 638440 - DNA, 75 bp, synthetic construct
  source 1..75: mol_type = other DNA
taattgggactacgagatcgaatctgagtatttaaattattcatcctatggctatgcatttgctttaacaatttc

SEQ ID NO: 638441 - DNA, 75 bp, synthetic construct
  source 1..75: mol_type = other DNA
gtgctctcctgtcaattatgctatattaagcaaatgtatatccaaagatgatttcgaaaccctcacaaagctgat

SEQ ID NO: 638442 - DNA, 75 bp, synthetic construct
  source 1..75: mol_type = other DNA
gaagagatcattgctactaaaaaagaaaagcatcaatgttttgatgtgtgcatttttaataagaccaactctact

SEQ ID NO: 638443 - DNA, 75 bp, synthetic construct
  source 1..75: mol_type = other DNA
agtagacaaccaaataatttcctcgctaacaaaggctatgaaattaaagtgggatttatctgaacagccttctgt

SEQ ID NO: 638444 - DNA, 75 bp, synthetic construct
  source 1..75: mol_type = other DNA
acgggaaaagtttatcgcaaaatttggcgtatcgccgtccgtatggcgaaaaacattcaggggttcagaagcgat

SEQ ID NO: 638445 - DNA, 75 bp, synthetic construct
  source 1..75: mol_type = other DNA
ggcagataaaggataatgcgatagaagcattactacatgatcccttattccgacagcgcgtagagaaaaataaga

SEQ ID NO: 638446 - DNA, 75 bp, synthetic construct
  source 1..75: mol_type = other DNA
gtaggcagtattggtttgtatcgtattggaattagagttgatagaaataatccaaaactgcaattagcggataac

SEQ ID NO: 638447 - DNA, 75 bp, synthetic construct
  source 1..75: mol_type = other DNA
cctgacaggctctatcgacggcgtgccggacatctacaaagcgatgattgatggcgaagcgaacgccagcgttga

SEQ ID NO: 638448 - DNA, 75 bp, synthetic construct
  source 1..75: mol_type = other DNA
gggaactgggaggccagtggcaagaaagtaaatcacttttttaccactgtccttctgctttcaggcgtttgttaa

SEQ ID NO: 638449 - DNA, 75 bp, synthetic construct
  source 1..75: mol_type = other DNA
gaagtataaccgcttatcaggctttttatgcagccattatagcaatgcctctctgctatatattgaaagacttca

SEQ ID NO: 638450 - DNA, 75 bp, synthetic construct
  source 1..75: mol_type = other DNA
gatcgcatcgtgttcaatatgcagatgtcggtactgaccttcatcatccgccaggcgcgggagtgtcaggaaaag

SEQ ID NO: 638451 - DNA, 75 bp, synthetic construct
  source 1..75: mol_type = other DNA
gagatgatggagccgttgatgcaacgtctaatccagagtgccagacgctaccccgtgcgccagcttccactgata

SEQ ID NO: 638452 - DNA, 75 bp, synthetic construct
  source 1..75: mol_type = other DNA
atctcagaatggtgcatccctcaaaacgagggaggttcccctaaaatgagggacatccctcaaaacgagggataa

SEQ ID NO: 638453 - DNA, 75 bp, synthetic construct
  source 1..75: mol_type = other DNA
gctttcgatgcgctggagaaatacaaaaaagacggcaccatgcctgaaaagctaacgctgaccaaatccaccctt

SEQ ID NO: 638454 - DNA, 75 bp, synthetic construct
  source 1..75: mol_type = other DNA
tatagcctcagaagagtcaagtgatgctctgggggtaatcctttgtgttgatcaggggggggagcaattaacccc

SEQ ID NO: 638455 - DNA, 75 bp, synthetic construct
  source 1..75: mol_type = other DNA
gtggcaaccactattccgataaattgtacgaacaaagatattgatgccgtaatgacgctggttttcgatggcaat

SEQ ID NO: 638456 - DNA, 75 bp, synthetic construct
  source 1..75: mol_type = other DNA
cgggtaagcgtccggatcgcgccacactggtttatacccaacgttgtaaagaggcgtggaaagatgtgccggtga

SEQ ID NO: 638457 - DNA, 75 bp, synthetic construct
  source 1..75: mol_type = other DNA
aattcaaccactggtttgctgaggaaaaaccgtctcctgacttactatgtggttatttgtctgttccattaaaat

SEQ ID NO: 638458 - DNA, 75 bp, synthetic construct
  source 1..75: mol_type = other DNA
ggctctaacgaggctgtatacgatattgatcgtattaggcaagccttgggggataaacaactgacagccgtggcg

SEQ ID NO: 638459 - DNA, 75 bp, synthetic construct
  source 1..75: mol_type = other DNA
ggttatttgtctgttccattaaaatatacagacacaggcggagatgcttcttatgaaaaaaaatcacaagtcaaa

SEQ ID NO: 638460 - DNA, 75 bp, synthetic construct
  source 1..75: mol_type = other DNA
ttatctggacactggggagttgctgcccccgctgcctttggcagaggttaagcgcttgctttgcgcgcacgttcg

SEQ ID NO: 638461 - DNA, 75 bp, synthetic construct
  source 1..75: mol_type = other DNA
cctggtatctccaggaacacgctccaaatgaccagtttcggcgcacattcaacgctattgaggatgccagcgaac

SEQ ID NO: 638462 - DNA, 75 bp, synthetic construct
  source 1..75: mol_type = other DNA
gaaatcgcctgttcgcagcgcccatggctggcattacagacagaccttttcggacgttgtgctacgagatgggag

SEQ ID NO: 638463 - DNA, 75 bp, synthetic construct
  source 1..75: mol_type = other DNA
tcggcggtattgaggccagcctgcgccgtaccgcgcattatgattactggtccgataccgtgcgccgttctgtgc

SEQ ID NO: 638464 - DNA, 75 bp, synthetic construct
  source 1..75: mol_type = other DNA
tggtagattcgaaagccgacatgctgatgtttggtaacggtgaacgtccgctggtggaagtagcgcatcgtctgg

SEQ ID NO: 638465 - DNA, 75 bp, synthetic construct
  source 1..75: mol_type = other DNA
acgctccaaatgaccagtttcggcgcacattcaacgccattgaggatgccagcgaacagctggaggcgttggagg

SEQ ID NO: 638466 - DNA, 75 bp, synthetic construct
  source 1..75: mol_type = other DNA
ttaactttgacaatggacgctctgattcacctgatttttgtgaattgtggccaatacatagcgacctgaacaaaa

SEQ ID NO: 638467 - DNA, 75 bp, synthetic construct
  source 1..75: mol_type = other DNA
caaagaaacaactttgtttatggcaggcacaaagagagcgcatgaatgagcgcgagtttctttcctccccatcca

SEQ ID NO: 638468 - DNA, 75 bp, synthetic construct
  source 1..75: mol_type = other DNA
tggtgaccagtttgctgaaggctgggtgctggccgttatcagtgaaatacagtccttcgccctgaccgatgacga

SEQ ID NO: 638469 - DNA, 75 bp, synthetic construct
  source 1..75: mol_type = other DNA
catacacctgggaagtgctggcccgtcagctgaaaaaggcgcgtcagcagtatatcagtgcacagaacaaaagaa

SEQ ID NO: 638470 - DNA, 75 bp, synthetic construct
  source 1..75: mol_type = other DNA
atgcttaaagaagactcttatctactaaagtcgcttgaaatgcgcggcgttgaacctacagtgaaaaacgcccac

SEQ ID NO: 638471 - DNA, 75 bp, synthetic construct
  source 1..75: mol_type = other DNA
aatcgagttgcgccagaaacaatacgagtactaccgtgatttactgttcagtttcccgaaacctgaaactgtcag

SEQ ID NO: 638472 - DNA, 75 bp, synthetic construct
  source 1..75: mol_type = other DNA
aagccattactgaagagtggcgtatggcacccggtccgcttgaagtggcctggtttgcggaagagacggctgccg

SEQ ID NO: 638473 - DNA, 75 bp, synthetic construct
  source 1..75: mol_type = other DNA
cctgtatgaccagcccatacagtgactggtttggtacagaaagctcttcacctgagttgttatgcggatatctat

SEQ ID NO: 638474 - DNA, 75 bp, synthetic construct
  source 1..75: mol_type = other DNA
atattgatgatttaaatgataatttttcatggaaactcaggcaggcccacagttatcaggaaacgtttgatcgtt

SEQ ID NO: 638475 - DNA, 75 bp, synthetic construct
  source 1..75: mol_type = other DNA
ctcacatatagaataaccgattgtttaagtgattgttgtacaaatgttagcaaagaagcagtggatgagttttta

SEQ ID NO: 638476 - DNA, 75 bp, synthetic construct
  source 1..75: mol_type = other DNA
cggttactacaaagggctatttcattgctatcaccgcaggatgagcccctgcaacgtcgggaattagcattattt

SEQ ID NO: 638477 - DNA, 75 bp, synthetic construct
  source 1..75: mol_type = other DNA
tatgtgatgctacgactaatgtaagtaatgaagctcttgatgtttttattaagaaaaaagcctttagcaaatcga

SEQ ID NO: 638478 - DNA, 75 bp, synthetic construct
  source 1..75: mol_type = other DNA
gaagggctgtgtttttatttctcttttctgtttttctttccgaaactgtgtctgcccaacgcatcgaatggcaat

SEQ ID NO: 638479 - DNA, 75 bp, synthetic construct
  source 1..75: mol_type = other DNA
acgccgggaaagcgacagtaaagtgattcaacaggcgatagcacttttctctgctgtgtcgccacaggttgatcc

SEQ ID NO: 638480 - DNA, 75 bp, synthetic construct
  source 1..75: mol_type = other DNA
gtaaactgctgtggcagtaccacccgctgggcgggaaacttgtcgaaaaacccatactgatggcgatgtgtaagc

SEQ ID NO: 638481 - DNA, 75 bp, synthetic construct
  source 1..75: mol_type = other DNA
atggctgagatcgagatttctgtaaatctcagttcttcgctgatgcgcattcttgaggctgaagaaattcagccg

SEQ ID NO: 638482 - DNA, 75 bp, synthetic construct
  source 1..75: mol_type = other DNA
ccggggattttggcctcaccgatgaagttgcgcctgtcgcgaaatctgccgacgctgaaacgctggtcacccgcc

SEQ ID NO: 638483 - DNA, 75 bp, synthetic construct
  source 1..75: mol_type = other DNA
aaattgacgggatcatggctgctgccacggggcgtaaaagggaaaacgtgaaagccgccaaaaataaaggcgtgt

SEQ ID NO: 638484 - DNA, 75 bp, synthetic construct
  source 1..75: mol_type = other DNA
gtaagcagctgtggcaattccatcctctgggcggaaaacttgtcgaaaaacccatactgatggcgatgtgtaagc

SEQ ID NO: 638485 - DNA, 75 bp, synthetic construct
  source 1..75: mol_type = other DNA
tatgcactgttgaaaggcggtctggcgctttccaacgaagagcttgcgcaaaccttcactgaatggaacgaaggt

SEQ ID NO: 638486 - DNA, 75 bp, synthetic construct
  source 1..75: mol_type = other DNA
tttcaagaaaatcgccgacgactaccagcaggcactgcgtgatgtcgtcgcttatgcagtgcaaaacggtattcc

SEQ ID NO: 638487 - DNA, 75 bp, synthetic construct
  source 1..75: mol_type = other DNA
taaagaccagcgtgtagccgcgtcgaaagtgctgagtggtccgcaggctcaaccggccggtgataaagcggaatt

SEQ ID NO: 638488 - DNA, 75 bp, synthetic construct
  source 1..75: mol_type = other DNA
cgtcagtatcgccaggttcgctatgaagttggactggcatggggtgtttcatcggtgaagccggcgcatggttgt

SEQ ID NO: 638489 - DNA, 75 bp, synthetic construct
  source 1..75: mol_type = other DNA
accagtaatctgattacccttgctgcaccaggtctacgtcaggatctggctgatgatactgcaatcacggttgtc

SEQ ID NO: 638490 - DNA, 75 bp, synthetic construct
  source 1..75: mol_type = other DNA
cgttgaaaggcccatctattatgcctggaggtcagaaagaagcgtacgagttagttgctccaatattgactaaaa

SEQ ID NO: 638491 - DNA, 75 bp, synthetic construct
  source 1..75: mol_type = other DNA
tggaagaccgtttttccgactcgatgacgctgctaaaacgcattccggtgaccttaacgctggaagtgtcgtcgg

SEQ ID NO: 638492 - DNA, 75 bp, synthetic construct
  source 1..75: mol_type = other DNA
gttttggtttctcataccattattccaacggtggtaacccgacgcgtgttggcggcgtgctgccggaaatgtctg

SEQ ID NO: 638493 - DNA, 75 bp, synthetic construct
  source 1..75: mol_type = other DNA
aagctatctcgacaatccactgcaaccggcgaaaggtcgtggcgaagatacctatgtacaggtgagctgggaaca

SEQ ID NO: 638494 - DNA, 75 bp, synthetic construct
  source 1..75: mol_type = other DNA
tctactggggccgctcaggtcatcatgccgcacgtggtgggttccgtggaggtttacgaacagcaaacgtcctgg

SEQ ID NO: 638495 - DNA, 75 bp, synthetic construct
  source 1..75: mol_type = other DNA
gtggcactgatgttagggattgcgcataccctgatgacacaaggcaaacacgataaagtgttccttgaaaaatac

SEQ ID NO: 638496 - DNA, 75 bp, synthetic construct
  source 1..75: mol_type = other DNA
gacttgacgatgaccggtgattacagcaaccagcatattgtgccgatgaagcaggctgtcgctccgcaatttgaa

SEQ ID NO: 638497 - DNA, 75 bp, synthetic construct
  source 1..75: mol_type = other DNA
atgaatggaaaggcaccgctgacgagaagcaattgcagcttctgactgctcatccggctcaccgtttacacagcc

SEQ ID NO: 638498 - DNA, 75 bp, synthetic construct
  source 1..75: mol_type = other DNA
tctacattaatgagagaaggaaacatgaggcttctaccctaaaaagagctttatccatcaaagagaagaaaagaa

SEQ ID NO: 638499 - DNA, 75 bp, synthetic construct
  source 1..75: mol_type = other DNA
attgataattctattaattatgaagaattcaaaagaatctggttccctgatgtaaatgcacatgttttcatttcc

SEQ ID NO: 638500 - DNA, 75 bp, synthetic construct
  source 1..75: mol_type = other DNA
tcttgtcgaaaaggtccctgcccggttgcataagttctaccacaccggttttaaatacgaatcatcccgccagtt

SEQ ID NO: 638501 - DNA, 75 bp, synthetic construct
  source 1..75: mol_type = other DNA
ctccaaaacgctggaaaaatttggctataaggattgcccggcacacccaacctggcttgcgcctgatgagtggaa

SEQ ID NO: 638502 - DNA, 75 bp, synthetic construct
  source 1..75: mol_type = other DNA
tgatcgtcgtttctgaatgctactggacggcagcagctaaacacgcggatatcgtattaccgatcaccacatcgt

SEQ ID NO: 638503 - DNA, 75 bp, synthetic construct
  source 1..75: mol_type = other DNA
ggccgctgatgatggcggaatgacggcgattcctgttgcccgtatcgtcgatgcgctggaaaatcctggtggcaa

SEQ ID NO: 638504 - DNA, 75 bp, synthetic construct
  source 1..75: mol_type = other DNA
gattgccgaaaatccaggcaagaagctggtcccttactatacagtacaagagttcgttgaatcccttgagacacc

SEQ ID NO: 638505 - DNA, 75 bp, synthetic construct
  source 1..75: mol_type = other DNA
ctttgaaaggtccttctattatgccgggtggtcagaaagaggcctatgagctggttgctcctattctgactaaaa

SEQ ID NO: 638506 - DNA, 75 bp, synthetic construct
  source 1..75: mol_type = other DNA
tctaatgaaataagcagtacagaagaaagaaaagcggctacaccgaaagctgtcaaggctgcatatgacctggct

SEQ ID NO: 638507 - DNA, 75 bp, synthetic construct
  source 1..75: mol_type = other DNA
cagttctgcccgctaacctgattcaggctcagcgtgattactttggtgcgcacacctataagcgcactgataaag

SEQ ID NO: 638508 - DNA, 75 bp, synthetic construct
  source 1..75: mol_type = other DNA
cttatgcggtacagaacggtatcccggttccgaccttcgccgctgcggttgcctattacgatagctaccgtgccg

SEQ ID NO: 638509 - DNA, 75 bp, synthetic construct
  source 1..75: mol_type = other DNA
agccagcaggcgataaagctgaattcatcgagaaggttcgtcgcgcgttatacttgggcaaaatcgtttcctatg

SEQ ID NO: 638510 - DNA, 75 bp, synthetic construct
  source 1..75: mol_type = other DNA
gtttgaagggctggcatggaaagcagatgatcggatgctgtttgtcgcaaaagaaagacgcccaagtaaaatatt

SEQ ID NO: 638511 - DNA, 75 bp, synthetic construct
  source 1..75: mol_type = other DNA
aaccatattaatattatttccatttaattgtacttacaaaaaatcacctcaagaacactcactttcatttataaa

SEQ ID NO: 638512 - DNA, 75 bp, synthetic construct
  source 1..75: mol_type = other DNA
tcgttagcatgagccgacgaacctttacacgccgcttccgacagtcgacgggcatgacactggttgactggttaa

SEQ ID NO: 638513 - DNA, 75 bp, synthetic construct
  source 1..75: mol_type = other DNA
tatgccacccagaacagtcctgcgcagctaatcaaaataaccagggatggcgacatcatcaacagagccccgctg

SEQ ID NO: 638514 - DNA, 75 bp, synthetic construct
  source 1..75: mol_type = other DNA
ctttcattgagtggatttgcccctatatttccagacacctgttatcacttaacccattactggcctgctgccgca

SEQ ID NO: 638515 - DNA, 75 bp, synthetic construct
  source 1..75: mol_type = other DNA
ttttcattgcgatatttattatgctaaccatattaatattatttccatttaattgtacttacaaaaaatcacctc

SEQ ID NO: 638516 - DNA, 75 bp, synthetic construct
  source 1..75: mol_type = other DNA
aaagtgctgagtggtccgcaggctcaaccggccggcgataaagcggaatttatcgaaaaagttcgtcgcgcgttg

SEQ ID NO: 638517 - DNA, 75 bp, synthetic construct
  source 1..75: mol_type = other DNA
cctctgtctctgatcaccgagtccgtatttgctcgttacatctcttcgcttaaagaccagcgtgtagctgcttcg

SEQ ID NO: 638518 - DNA, 75 bp, synthetic construct
  source 1..75: mol_type = other DNA
ttactaaagatatcttcaccaagaaggatgaagagggtaactacctcgttgatgttattcttgatgaagccgcaa

SEQ ID NO: 638519 - DNA, 75 bp, synthetic construct
  source 1..75: mol_type = other DNA
tcggtatggctgtgatggggcgtaaccttgcgctgaatatcgaaagccgcggttataccgtatccgttttcaacc

SEQ ID NO: 638520 - DNA, 75 bp, synthetic construct
  source 1..75: mol_type = other DNA
gatgtgatccttgacgaagcagcgaacaaaggtaccggcaaatggaccagccagagctctctggacctgggcgaa

SEQ ID NO: 638521 - DNA, 75 bp, synthetic construct
  source 1..75: mol_type = other DNA
ttcgtcgtaaccgtgaactctctgctgaaggtttcaacttcatcggtaccggtgtctccggtggtgaagagggcg

SEQ ID NO: 638522 - DNA, 75 bp, synthetic construct
  source 1..75: mol_type = other DNA
tgcgcagttcctgcagaaaatcactgatgcatatgctgaaaaccccctgctcgctaacttgctgctggctccgta

SEQ ID NO: 638523 - DNA, 75 bp, synthetic construct
  source 1..75: mol_type = other DNA
ctagtcccatactatacagttaaagaattcgttgaatccctcgaaacgcctcgtcgtatactgttgatggttaag

SEQ ID NO: 638524 - DNA, 75 bp, synthetic construct
  source 1..75: mol_type = other DNA
cttcaaacagatcgctgatgactatcagcaggcgctgcgtgatgtcgtggcgtatgccgtacagaatggtattcc

SEQ ID NO: 638525 - DNA, 75 bp, synthetic construct
  source 1..75: mol_type = other DNA
gatgcttacgctgaaaatccgaagatcgctaacctgctgctggctccgtacttcaaacaaattgccgacgaatac

SEQ ID NO: 638526 - DNA, 75 bp, synthetic construct
  source 1..75: mol_type = other DNA
aaaaggcgacatcatcattgatggcggcaacaccttcttcctggacaccattcgtcgtaaccgtgagctttctgc

SEQ ID NO: 638527 - DNA, 75 bp, synthetic construct
  source 1..75: mol_type = other DNA
ctctgaaagggccttccattatgcctggtggccagaaagaagcttatgagctggttgctccaattctgaagcaga

SEQ ID NO: 638528 - DNA, 75 bp, synthetic construct
  source 1..75: mol_type = other DNA
ttcgtcgtaaccgtgaactctccgctgaaggtttcaacttcattgggaccggtgtttccggtggtgaagagggcg

SEQ ID NO: 638529 - DNA, 75 bp, synthetic construct
  source 1..75: mol_type = other DNA
agaaagaacttagcaaactgtcggtttaccagcgggtttaccagagtctgaaaacgcgggcgctgggcgtactgc

SEQ ID NO: 638530 - DNA, 75 bp, synthetic construct
  source 1..75: mol_type = other DNA
tacagaaagacaaagaaagcacgatgcaggccgtgtatcagcaactcaccgagttgcaccgctacctgctggcaa

SEQ ID NO: 638531 - DNA, 75 bp, synthetic construct
  source 1..75: mol_type = other DNA
gtggaacagacctatctgcaactgctggagcaacgttacctgccctcgctgtttaacgggctggtcaaagcgatg

SEQ ID NO: 638532 - DNA, 75 bp, synthetic construct
  source 1..75: mol_type = other DNA
aattccacggccagcgtgatattcagacacaactgatgtcccatcttgactacgcacttgcacacactgactggc

SEQ ID NO: 638533 - DNA, 75 bp, synthetic construct
  source 1..75: mol_type = other DNA
agccgtctggctgatatgggactgtatcagggacgacgcatcggcccttatgtggagcagacctacctgcagtta

SEQ ID NO: 638534 - DNA, 75 bp, synthetic construct
  source 1..75: mol_type = other DNA
ggcaaaccgtattggctctccggcgcagagcggcatcgcggatgtggcggaatttatgatgttgcagttacttaa

SEQ ID NO: 638535 - DNA, 75 bp, synthetic construct
  source 1..75: mol_type = other DNA
gatttcgacccatctgttaggttctaacgcctcgagcgtgatccgccacgccaatctgcctgtactggtcgttcg

SEQ ID NO: 638536 - DNA, 75 bp, synthetic construct
  source 1..75: mol_type = other DNA
aaacatcgaagatgctgaaaatgcaggtgctttatattcagtagatattgaatatccgatgacactaaatgattt

SEQ ID NO: 638537 - DNA, 75 bp, synthetic construct
  source 1..75: mol_type = other DNA
ttaaacaacatgtccgttttggtagtgtgcgggatgaagttaacgagttagcgaaagaacttgatgcagatgtag

SEQ ID NO: 638538 - DNA, 75 bp, synthetic construct
  source 1..75: mol_type = other DNA
tccgtttcaccgggccgtgggcgcagttccgcctgttcggggcagggcagttaaccagcgttgaggcagggacat

SEQ ID NO: 638539 - DNA, 75 bp, synthetic construct
  source 1..75: mol_type = other DNA
accagggacgacgtatcgggccttatgtggaacagacctatctgcaactgctggagcaacgttacctgccctcgc

SEQ ID NO: 638540 - DNA, 75 bp, synthetic construct
  source 1..75: mol_type = other DNA
gccgttgatccgctcagcgtggaactgaacgcccagcagcgttatcttgaccgctggctgctgcgcctgcaacgc

SEQ ID NO: 638541 - DNA, 75 bp, synthetic construct
  source 1..75: mol_type = other DNA
tgaccaggtgtttacatctgccgatgacaacaaactggttgttccacagtttcttacccgttacggcctgcaaag

SEQ ID NO: 638542 - DNA, 75 bp, synthetic construct
  source 1..75: mol_type = other DNA
attgaccaggctggatccctgcgtggtctgtcgctgtctgatgtgctgaatctgaaagcggataccatgttcagg

SEQ ID NO: 638543 - DNA, 75 bp, synthetic construct
  source 1..75: mol_type = other DNA
attgatcaggctggatccctgcgtggtctgtcgctgtctgatgtgctgaatctgaaagcggataccatgttaatg

SEQ ID NO: 638544 - DNA, 75 bp, synthetic construct
  source 1..75: mol_type = other DNA
attgaacaggctggatccctgcgtggtctgtcgctgtctgatgtgctgaatctgaaagcggataccatgttaagg

SEQ ID NO: 638545 - DNA, 75 bp, synthetic construct
  source 1..75: mol_type = other DNA
atcctgataatgcagtttatttgactttagataaattttataaaaaaacgcatagacattatccctatattcaaa

SEQ ID NO: 638546 - DNA, 75 bp, synthetic construct
  source 1..75: mol_type = other DNA
attgagcaggctggatccctgcgtggtctgtcgctgtctgatgtgctgaatctgaaagcggataccatgttgagg

SEQ ID NO: 638547 - DNA, 75 bp, synthetic construct
  source 1..75: mol_type = other DNA
attgagcaggctggatccctgcgtggtctgtcgctgtctgatgtgctgaatctgaaagcggataccatgttaaag

SEQ ID NO: 638548 - DNA, 75 bp, synthetic construct
  source 1..75: mol_type = other DNA
gccccggaaaacagtaccctgacagtccagaaagataaagaaagcacgatgcaggccgtgtacctgcagctcacc

SEQ ID NO: 638549 - DNA, 75 bp, synthetic construct
  source 1..75: mol_type = other DNA
tggacggtggcgcgatgacctaccgtgtgcataccgacacggaagataacccgttcagcggtgggttgttcagcc

SEQ ID NO: 638550 - DNA, 75 bp, synthetic construct
  source 1..75: mol_type = other DNA
gtgttcagattaccaacaccccgactattcagcggactcaaatcagccctgcgaccggcgatgccccggtttaaa

SEQ ID NO: 638551 - DNA, 75 bp, synthetic construct
  source 1..75: mol_type = other DNA
tgtgactttattcagttgtgtgctgtggctgtaaattttatgagcggtgcggactctggcgggaagaacgaacag

SEQ ID NO: 638552 - DNA, 75 bp, synthetic construct
  source 1..75: mol_type = other DNA
ccgtgactttattcagttatgtgtggttgccataaattttttgagcggtgcggactctggcgggaagaacgaaca

SEQ ID NO: 638553 - DNA, 75 bp, synthetic construct
  source 1..75: mol_type = other DNA
gtggtggcgaaaaaatcacgtatgtggagatcaccggggctattgagcaggctggatccctgcgtggtctgtcgc

SEQ ID NO: 638554 - DNA, 75 bp, synthetic construct
  source 1..75: mol_type = other DNA
agttatttagccgcgacaaagtgaccgggtgggatatgtggggcaatcagtgcgactccgattttgaactggcta

SEQ ID NO: 638555 - DNA, 75 bp, synthetic construct
  source 1..75: mol_type = other DNA
acgttacagtgaatgctgggtatctgtaggtgggatattatgtaccggtgagggggtctatcgacttccggttcc

SEQ ID NO: 638556 - DNA, 75 bp, synthetic construct
  source 1..75: mol_type = other DNA
gcccgcaaacgggcggaataccgcagacggaatgcgctgctggacagtatccgttcaggaatatgtgccagaacg

SEQ ID NO: 638557 - DNA, 75 bp, synthetic construct
  source 1..75: mol_type = other DNA
tcgttttcattcattcgctggcggggaagttttactttgtttattggtggcttgcaggggcctcgggaatacggg

SEQ ID NO: 638558 - DNA, 75 bp, synthetic construct
  source 1..75: mol_type = other DNA
acagtatgaaaagaaacgcattacaggctctctggcttatactcctcctggctcagtgatcaggaaaagattgtg

SEQ ID NO: 638559 - DNA, 75 bp, synthetic construct
  source 1..75: mol_type = other DNA
ttgcttgaatgggcttgtggattatatttctagtaacctcatggaggttgaacaactctatgcagatttgctggc

SEQ ID NO: 638560 - DNA, 75 bp, synthetic construct
  source 1..75: mol_type = other DNA
aagcacgtcagtgcgtaaaatccgtgcctgcacgctacaacttgactcaatttttcgatcaggcagagctggaaa

SEQ ID NO: 638561 - DNA, 75 bp, synthetic construct
  source 1..75: mol_type = other DNA
agatgtgaagctgaaagttctgtataaaacgtcccctcttgccggagccactctggagcttgactctgtcagtta

SEQ ID NO: 638562 - DNA, 75 bp, synthetic construct
  source 1..75: mol_type = other DNA
cagaaatgatgtggcatactgtgagtttgtgactaaatatgcaaaatcttttattcctggtgaacagcagatgcc

SEQ ID NO: 638563 - DNA, 75 bp, synthetic construct
  source 1..75: mol_type = other DNA
ccttctcttcatatcggacagtggctggcgaaagtccaaaataagaaaagttttcaggacaaaagcctgtgtgat

SEQ ID NO: 638564 - DNA, 75 bp, synthetic construct
  source 1..75: mol_type = other DNA
cgctatgcccgtcacgatgacggtggcgaaatcagcgcgacccagcgcaacgccggggagtggcacgggtttctg

SEQ ID NO: 638565 - DNA, 75 bp, synthetic construct
  source 1..75: mol_type = other DNA
cagagagcggtgaagttcagcctgaatcaccggtcgccgatgcgactgaacctcaacccgaatcggtcatgatgc

SEQ ID NO: 638566 - DNA, 75 bp, synthetic construct
  source 1..75: mol_type = other DNA
tcacaattttcccttcaggggcacgcttccgggcagaagggatttctttgaaaatcccaagctttataacgggat

SEQ ID NO: 638567 - DNA, 75 bp, synthetic construct
  source 1..75: mol_type = other DNA
ataacaaaagcacctggcgggtaaattccggtcagccatttaccaaagcaatggaagaccagatcatcaacgatc

SEQ ID NO: 638568 - DNA, 75 bp, synthetic construct
  source 1..75: mol_type = other DNA
gtcgcattactggatattaatgatgttgaggggctggctgatttgtggtggagtggatgcaaaagcagaacggat

SEQ ID NO: 638569 - DNA, 75 bp, synthetic construct
  source 1..75: mol_type = other DNA
tgggccttgatgacggaaacaccagacgaagaagagctggatctacagtttctcgcaagtcgaatggatacctca

SEQ ID NO: 638570 - DNA, 75 bp, synthetic construct
  source 1..75: mol_type = other DNA
agacgttgctacgtctgcttacacgctgtttaacggtgccggaaagctacagggggcgaaggagggaggcaaccg

SEQ ID NO: 638571 - DNA, 75 bp, synthetic construct
  source 1..75: mol_type = other DNA
aggttgatgactatgaaaggctttacctggcacaaaaccaataagcacaaaggcaacagtgcgatcggaatgggg

SEQ ID NO: 638572 - DNA, 75 bp, synthetic construct
  source 1..75: mol_type = other DNA
cgttcaggatgcattctacagtgacggttatgaagcacagtttggagtgcagccaactttcgtttttctggttgc

SEQ ID NO: 638573 - DNA, 75 bp, synthetic construct
  source 1..75: mol_type = other DNA
tgtgttcgccgcttgaggtggtggggtccggtagtgacggggccgagcgctatctcgttttgcgctggcgttcgc

SEQ ID NO: 638574 - DNA, 75 bp, synthetic construct
  source 1..75: mol_type = other DNA
caggcagggaggccgcagagaaagccgccttgtccgtggctggatgggtggcactgccgccgacagactacaaag

SEQ ID NO: 638575 - DNA, 75 bp, synthetic construct
  source 1..75: mol_type = other DNA
gccgggctacgttttcccgtctgtatgccggaatgcgccagagagccatacagggcgaagctgagtacctgcaat

SEQ ID NO: 638576 - DNA, 75 bp, synthetic construct
  source 1..75: mol_type = other DNA
cgttggactgatgatgatctgtacggcatcattcgtgcggctaaaaaaggcaaaaaaaaccttcattctgcatga

SEQ ID NO: 638577 - DNA, 75 bp, synthetic construct
  source 1..75: mol_type = other DNA
gtagcaggaacgacggagggctggcgcgatacagtggcgcggttggctggtggcaatccgtccatgatgctgggg

SEQ ID NO: 638578 - DNA, 75 bp, synthetic construct
  source 1..75: mol_type = other DNA
aaatgcctatggcctgagtcgattcgcgccgctgccttacgaccccgccagcctgccgattcataatctggctgg

SEQ ID NO: 638579 - DNA, 75 bp, synthetic construct
  source 1..75: mol_type = other DNA
atcccgctggctgatattggcgagcgtgaaggctggcgcaccctgaaagctggtggcgtcaacgtcacaacgaaa

SEQ ID NO: 638580 - DNA, 75 bp, synthetic construct
  source 1..75: mol_type = other DNA
gcacttacacagaaacttttggagaaaatgacgccgctgatggagatggacaagcacaaatgaagaatgaataca

SEQ ID NO: 638581 - DNA, 75 bp, synthetic construct
  source 1..75: mol_type = other DNA
atgagcacaaaaccactcttcctgttacgaaaagcgaaaaaatcatccggtgaacctgacgtcgtcctgtgggca

SEQ ID NO: 638582 - DNA, 75 bp, synthetic construct
  source 1..75: mol_type = other DNA
gcgatgtacgcacaatcgttgagctgggaaaaacaatcgactttgatgccagaatcgttattccatttgaaggcg

SEQ ID NO: 638583 - DNA, 75 bp, synthetic construct
  source 1..75: mol_type = other DNA
cacccggatcgcaaatctgaaatcagctatttcgggtttgatgaagaaaccgagctggaaatcagggtccgtcct

SEQ ID NO: 638584 - DNA, 75 bp, synthetic construct
  source 1..75: mol_type = other DNA
tgttgatgccgctcaggagggcgaaaccgttgttcagaacgagccaggcagtgatacgtccggcgatgacgccaa

SEQ ID NO: 638585 - DNA, 75 bp, synthetic construct
  source 1..75: mol_type = other DNA
tgacaccagagcagatgaaagagtggatcgaaagctacaacagcactcttatacagccactgtcggtaagtgccg

SEQ ID NO: 638586 - DNA, 75 bp, synthetic construct
  source 1..75: mol_type = other DNA
ctcaataccgatgaatggccagctattaagacgttatcactgccccgctgggctaaggaatatgcaaatgactaa

SEQ ID NO: 638587 - DNA, 75 bp, synthetic construct
  source 1..75: mol_type = other DNA
tctgccatgcctgcggtcagtctgatggagataactgccctgattgtggcgcggtgatgggcgacatcacgtatc

SEQ ID NO: 638588 - DNA, 75 bp, synthetic construct
  source 1..75: mol_type = other DNA
catatgccgctctactgttccgcaatgggcaagatctacatggcgtttggtcacccggactacgtgaagtcatac

SEQ ID NO: 638589 - DNA, 75 bp, synthetic construct
  source 1..75: mol_type = other DNA
cttcatccggcacatgctaaacgcattgaggaaattatcgctgaaaataaaccacccttttctgttttccgcgac

SEQ ID NO: 638590 - DNA, 75 bp, synthetic construct
  source 1..75: mol_type = other DNA
gatccagactcgcgattgtgtgtaccagaaccagccagaaacggaaaaaaccagcccggatatgaatcaacctga

SEQ ID NO: 638591 - DNA, 75 bp, synthetic construct
  source 1..75: mol_type = other DNA
ggatgcgaaacaacctgagccagtagtgcaacaggaaccggaaatagtctgcaatgcctgcggtcagactggcgg

SEQ ID NO: 638592 - DNA, 75 bp, synthetic construct
  source 1..75: mol_type = other DNA
actttcgacaacgtgattttacgccgttcatatgaacggcaggggatcccctgcccgtggcgttacaccaatgat

SEQ ID NO: 638593 - DNA, 75 bp, synthetic construct
  source 1..75: mol_type = other DNA
acgaggtttatcactctgccaatggaataagcagcacaatgctgaaggatgctcgtatcagcctgatgtattacc

SEQ ID NO: 638594 - DNA, 75 bp, synthetic construct
  source 1..75: mol_type = other DNA
ggtgggctggattattcccgtgccatcgtggttgcggccgtgaaagaagcaccaattggtatcgaggtcatcact

SEQ ID NO: 638595 - DNA, 75 bp, synthetic construct
  source 1..75: mol_type = other DNA
cgaagaaacaggcatcctttacggttcgcttccggaggaatttcggcgtattcctgagggggaaaaacacacagc

SEQ ID NO: 638596 - DNA, 75 bp, synthetic construct
  source 1..75: mol_type = other DNA
caggatgatgaagaaaaaccgcaaccatcttgcgcaatggcaaatgaacaggcaacggctgaaacaatggaaccg

SEQ ID NO: 638597 - DNA, 75 bp, synthetic construct
  source 1..75: mol_type = other DNA
tgctgaacatccgcacaaggagaacgctggcaaccattcgcatcatgattgcagtgatgaaactggtgaagcgtc

SEQ ID NO: 638598 - DNA, 75 bp, synthetic construct
  source 1..75: mol_type = other DNA
ctgagccagtagtgcaacaacaggaaacggagaaagtttgcaccgcctgcggtcaggctggcggcggcaactgtc

SEQ ID NO: 638599 - DNA, 75 bp, synthetic construct
  source 1..75: mol_type = other DNA
gtgatgaaactggcgaagcgtcagctcctgtagcaactgaaatcatgtggccgtcatatttcgagccaggccgct

SEQ ID NO: 638600 - DNA, 75 bp, synthetic construct
  source 1..75: mol_type = other DNA
ctggctatcactgggtggccgtcgtggaagcctcgcaggaactcctggaacttggtcgacaggaatatcgccgga

SEQ ID NO: 638601 - DNA, 75 bp, synthetic construct
  source 1..75: mol_type = other DNA
aagaacgactattccattcgaaggtgaacgccataacgccctgcacgatgcgcgttaccaggcaaaatacgtttc

SEQ ID NO: 638602 - DNA, 75 bp, synthetic construct
  source 1..75: mol_type = other DNA
tggaaggcgctgaacatccgcacaatgagaatgctggcagcgatccgcatcgcgattgcagtgatgaaactggcg

SEQ ID NO: 638603 - DNA, 75 bp, synthetic construct
  source 1..75: mol_type = other DNA
cgtgtgaccatctaatgatcgaccttgaaaccatgggaaaaaatccagatgccccgattatctcaataggtgcaa

SEQ ID NO: 638604 - DNA, 75 bp, synthetic construct
  source 1..75: mol_type = other DNA
cgacatacaccggaaaaagatatcctggaagaagttaaccgcgaactggctgctgaacgcgaaacagaagaagaa

SEQ ID NO: 638605 - DNA, 75 bp, synthetic construct
  source 1..75: mol_type = other DNA
aacgacagtggatggtggctaaatatcagttagctaatacgctgttaaccgtctcaccaatggattcaatacagg

SEQ ID NO: 638606 - DNA, 75 bp, synthetic construct
  source 1..75: mol_type = other DNA
tttatccagtgccttggggcgtattcagaaagttaattacactgtaagtaggttagctcccttctatatagcaag

SEQ ID NO: 638607 - DNA, 75 bp, synthetic construct
  source 1..75: mol_type = other DNA
aacagcatggtgatgagagaggggcattagtatctcttgagtgtaacaaaaatatccccttcgatataagacgtg

SEQ ID NO: 638608 - DNA, 75 bp, synthetic construct
  source 1..75: mol_type = other DNA
agctagataagaaaagtgaccaccgaggcgctcttattgttgtcgagcaaaataaagatattccaattgaaatta

SEQ ID NO: 638609 - DNA, 75 bp, synthetic construct
  source 1..75: mol_type = other DNA
ccagtagcgcaacaggaagaggaaaaagtctgcaccgcctgcggtcagagcggtggcggcaactgtcctgactgt

SEQ ID NO: 638610 - DNA, 75 bp, synthetic construct
  source 1..75: mol_type = other DNA
ttttgatttattaattgaactctcttctgtgcacagtattaaaattattaatgctcttcatgattatctcgtttt

SEQ ID NO: 638611 - DNA, 75 bp, synthetic construct
  source 1..75: mol_type = other DNA
attgcgctgggccgtctttttcggacgaaccagatagtatcacagctcgcttcatattatggggagcaggaaagg

SEQ ID NO: 638612 - DNA, 75 bp, synthetic construct
  source 1..75: mol_type = other DNA
tggcgagcgatatttatgatgaaaatgactatattagaaattatgaggattttatgaggtctattaaaaatgatt

SEQ ID NO: 638613 - DNA, 75 bp, synthetic construct
  source 1..75: mol_type = other DNA
ttcgatcacaattattaccgtgagatttatcttgttggtgaagatggtagagctaagcgttataggttgtgtgac

SEQ ID NO: 638614 - DNA, 75 bp, synthetic construct
  source 1..75: mol_type = other DNA
actgattgccccctggttaccccgtgatgaaacaacggcgctcaccgaggaggcattcatcggctgtatggccac

SEQ ID NO: 638615 - DNA, 75 bp, synthetic construct
  source 1..75: mol_type = other DNA
accaatgatttggcatgaaatgtacgattattcatcagattgtgttttaatggtgttggcagatgacttttatga

SEQ ID NO: 638616 - DNA, 75 bp, synthetic construct
  source 1..75: mol_type = other DNA
actttgataagaaaggtgacaaccgaggctttcttgttgttgttgagcaaaataaagatatcccaattgaaatta

SEQ ID NO: 638617 - DNA, 75 bp, synthetic construct
  source 1..75: mol_type = other DNA
ttctagcaaacgaccactataatgaaagtgattatatccgtaattatagtgattttcttacttataataattctc

SEQ ID NO: 638618 - DNA, 75 bp, synthetic construct
  source 1..75: mol_type = other DNA
tcgcctatatgcgtggacgtacctttgaaaatgcagtcgtcattcttgacgaggcgcagaatgtgactgccgcgc

SEQ ID NO: 638619 - DNA, 75 bp, synthetic construct
  source 1..75: mol_type = other DNA
aaatggaaggcgctgaacatcagcacaatgagaatgctgacagcgatccgcatcgcaattgcagtgatgaaactg

SEQ ID NO: 638620 - DNA, 75 bp, synthetic construct
  source 1..75: mol_type = other DNA
gcgttctggcccgttcaatggatgtggatatttataacctgcacccagcacacgcaaaacgcgttgaagaaatcg

SEQ ID NO: 638621 - DNA, 75 bp, synthetic construct
  source 1..75: mol_type = other DNA
ccagaacaacgtaatcaggtgattcgtctggagatggacacagaagacagttaccttcagagcctgcttactgct

SEQ ID NO: 638622 - DNA, 75 bp, synthetic construct
  source 1..75: mol_type = other DNA
gaaacgaaacagcctgaaccagaagagcaacaagaaccggaaaaagtctgcaccgcctgcggtcagaccggcgac

SEQ ID NO: 638623 - DNA, 75 bp, synthetic construct
  source 1..75: mol_type = other DNA
caatgcctgcggtcagtctggcggggataactgccctgactgtggtgcggtgatgggcgacgcaacatatcagga

SEQ ID NO: 638624 - DNA, 75 bp, synthetic construct
  source 1..75: mol_type = other DNA
ggaaacctttaatgaagaaaatctggaggaatctcaggaaaaagatccggaggaaatggaaggtgctgaacatca

SEQ ID NO: 638625 - DNA, 75 bp, synthetic construct
  source 1..75: mol_type = other DNA
gcgcctgaactcgctgttttgttcggtggcttacagtgtgctggaacagccggatgaagatgaaggacgggacga

SEQ ID NO: 638626 - DNA, 75 bp, synthetic construct
  source 1..75: mol_type = other DNA
cgtcggcagacgaacttatgaatgccaacaggcggtatggcctcggacataccacctggctgaaaggctttatca

SEQ ID NO: 638627 - DNA, 75 bp, synthetic construct
  source 1..75: mol_type = other DNA
atgaaaggaaatcgtgtttcacgcatcacccgcacggcttccggtgctaatgctggcggtgggaacaaaaccgat

SEQ ID NO: 638628 - DNA, 75 bp, synthetic construct
  source 1..75: mol_type = other DNA
tgggcggagattatcgaaatggcgctcaaccttgagcaggcttccgatattgtcgagcgcatgggcagcgaaatt

SEQ ID NO: 638629 - DNA, 75 bp, synthetic construct
  source 1..75: mol_type = other DNA
gtgttaacactgcttcacctgctttctgccgtcgccctgctggtctgggggacacatattgttcgtaccggcgta

SEQ ID NO: 638630 - DNA, 75 bp, synthetic construct
  source 1..75: mol_type = other DNA
gacggcgctaatggcgcgtattctcaccttcgatttatcctggctgtcaccgttacttatttttatcggcgtgat

SEQ ID NO: 638631 - DNA, 75 bp, synthetic construct
  source 1..75: mol_type = other DNA
gtattcagcatccgatggtgcgaaaaagctatctcgataatccactgcaaccggcgaaaggtcgcggcgacgaca

SEQ ID NO: 638632 - DNA, 75 bp, synthetic construct
  source 1..75: mol_type = other DNA
atgaattcagcatttgtgcttgttctgacagtttttcttgtttccggagagccagttgatattgcagtcagtgtt

SEQ ID NO: 638633 - DNA, 75 bp, synthetic construct
  source 1..75: mol_type = other DNA
gaactgcagggtggtggcccgcttatcgacatcggcattcatatgctggatgcggcgatgtatgtgctgggcttt

SEQ ID NO: 638634 - DNA, 75 bp, synthetic construct
  source 1..75: mol_type = other DNA
cggctggggcgtttttaccaataaagaattgcagggcggcgggccgcttattgacatcggcattcatatgctgga

SEQ ID NO: 638635 - DNA, 75 bp, synthetic construct
  source 1..75: mol_type = other DNA
gctggcgctgccaagtgctgtggcgttgggtattctttccggtccgttgaccgtttcgctgttccagtacggcaa

SEQ ID NO: 638636 - DNA, 75 bp, synthetic construct
  source 1..75: mol_type = other DNA
ctgcgtcgtatttttgccgaaggggctttctcccaggcatttgtgcctattctggcggaatataaaagtaagcag

SEQ ID NO: 638637 - DNA, 75 bp, synthetic construct
  source 1..75: mol_type = other DNA
cgtcgctttcaaacttcctaacttgttgcgccgtatctttgccgaaggggcattctcccaggcattcgtgccgat

SEQ ID NO: 638638 - DNA, 75 bp, synthetic construct
  source 1..75: mol_type = other DNA
acgaagaattcattcgtcagatgaacaaaatgctcaatcagcacaaagaacaggagaaagatgatgattctgact

SEQ ID NO: 638639 - DNA, 75 bp, synthetic construct
  source 1..75: mol_type = other DNA
atgagttttacagataactggtcagacgaagaattcattcgtcagatgaaagaattaatcggtaacgaaggagat

SEQ ID NO: 638640 - DNA, 75 bp, synthetic construct
  source 1..75: mol_type = other DNA
tcggtcgttctttttgaccatgccctgagcccggcgcaggagcgtaacctggagcgtttgtgcgagtgtcgtgtc

SEQ ID NO: 638641 - DNA, 75 bp, synthetic construct
  source 1..75: mol_type = other DNA
tgtttccagcacatatctacaccgataacaacggtgaattaatgacgctgatgcaacgggaaatggcagacgaca

SEQ ID NO: 638642 - DNA, 75 bp, synthetic construct
  source 1..75: mol_type = other DNA
ctgccgcagcagaacagaaaattcctggtaactgttatccggtcgagaaagttattcgcatggataataacgaaa

SEQ ID NO: 638643 - DNA, 75 bp, synthetic construct
  source 1..75: mol_type = other DNA
ccgagctggtgataaccgcgcgtgccggaacgccgctggtggcgattgaagcggcgctggagagcgccgggcaaa

SEQ ID NO: 638644 - DNA, 75 bp, synthetic construct
  source 1..75: mol_type = other DNA
cgatatgagtaaaggtacggtttctgcggcgatgggaatgctgcaaatgctgatttttaccgtcggtattgaaat

SEQ ID NO: 638645 - DNA, 75 bp, synthetic construct
  source 1..75: mol_type = other DNA
cagtcagtgttcacaggacaatgcaggagtgtatgactgcagcaaccgaacagaaaattcccggtaactgttacc

SEQ ID NO: 638646 - DNA, 75 bp, synthetic construct
  source 1..75: mol_type = other DNA
ggcgtgcgtaccagcaaaatgcgaaaggccagcatgactgagcttatcgaaatcatgttttggttcggctcagag

SEQ ID NO: 638647 - DNA, 75 bp, synthetic construct
  source 1..75: mol_type = other DNA
acctacatccgcaaaaaactggccagcgaacgctgcgacgccatcattgccgctggctctaacggtgcgtacctg

SEQ ID NO: 638648 - DNA, 75 bp, synthetic construct
  source 1..75: mol_type = other DNA
atgaacacattattcatactcattctgactgtacatctcaatactggtgagtcgcttgatgcaatcaccggcatg

SEQ ID NO: 638649 - DNA, 75 bp, synthetic construct
  source 1..75: mol_type = other DNA
gccggatttaacgccgcagttatgcaactgctactgccggaactggcgcgcgagtcggcgaaaactcccgctcca

SEQ ID NO: 638650 - DNA, 75 bp, synthetic construct
  source 1..75: mol_type = other DNA
ctgccgcagcggaacagaaaattcccggtaactgttatccggtcgataaagttattcgcatggataataacgaag

SEQ ID NO: 638651 - DNA, 75 bp, synthetic construct
  source 1..75: mol_type = other DNA
gatgtgcgtatttctgttgaaaatgtcagaacaattagctatgaatcagggcttgatgtctatcagtgtgcggct

SEQ ID NO: 638652 - DNA, 75 bp, synthetic construct
  source 1..75: mol_type = other DNA
ataacccagtgcactatgcggatgccattcgttataatgctcgaatgcctctgcaaggttctttgctgccgttaa

SEQ ID NO: 638653 - DNA, 75 bp, synthetic construct
  source 1..75: mol_type = other DNA
atgggtaagctacttcggtggtaacttcaacggcgacaacggcaccatcaactatgatcaggatgttaacggcat

SEQ ID NO: 638654 - DNA, 75 bp, synthetic construct
  source 1..75: mol_type = other DNA
gaaaacacgaacgggagttattaaataaaatatgcattctttcaatgctggcccgtttacgcctgatgcaaaaag

SEQ ID NO: 638655 - DNA, 75 bp, synthetic construct
  source 1..75: mol_type = other DNA
ccgttgccggaagcgatactgagcggcaagctgcgctcatcgttttcatcaccgctgcctggcaagaccgacaat

SEQ ID NO: 638656 - DNA, 75 bp, synthetic construct
  source 1..75: mol_type = other DNA
gggattcgcgcgttgggtattcgcggttgcgctgtgtcgatgccgtttaaagaaagctgcatgccttttctcgac

SEQ ID NO: 638657 - DNA, 75 bp, synthetic construct
  source 1..75: mol_type = other DNA
ttatcccccatattctgcgcttatgcgggttaaccgatcatcgcgtattacttcctggttgtgcgctggctgggg

SEQ ID NO: 638658 - DNA, 75 bp, synthetic construct
  source 1..75: mol_type = other DNA
tctcagtcattccacaatacatacgctttttcagcgatttattgcatccggtatcgcatggccattgcccgattc

SEQ ID NO: 638659 - DNA, 75 bp, synthetic construct
  source 1..75: mol_type = other DNA
cgaaacaagtctgatgaaagccagaatgacactaccgtagactcaccacagtgtgagctgcatcttaaatcaggt

SEQ ID NO: 638660 - DNA, 75 bp, synthetic construct
  source 1..75: mol_type = other DNA
tcaccctggtgaaacgacagctgacgcgtgaaatctcggaagggcgcttcactgccagtcgtgaggcggtaaaac

SEQ ID NO: 638661 - DNA, 75 bp, synthetic construct
  source 1..75: mol_type = other DNA
cttatggttccggcttcaataggtcttcgtagcagtattgcagatgccctggcgtctcatgtgccggtatggaag

SEQ ID NO: 638662 - DNA, 75 bp, synthetic construct
  source 1..75: mol_type = other DNA
agcactggtaaaattaactcccagagggataggttgcggaggcttatacgctagcgccgctggttttgctaataa

SEQ ID NO: 638663 - DNA, 75 bp, synthetic construct
  source 1..75: mol_type = other DNA
tgattgttactgttattacagggagtggaatagtaccccataacgccctggctggaacctcgtcagcatccttaa

SEQ ID NO: 638664 - DNA, 75 bp, synthetic construct
  source 1..75: mol_type = other DNA
acactggaatgagcacaacataccactagatgataaaaaatacatagtcgaaagaacctattttttatattatta

SEQ ID NO: 638665 - DNA, 75 bp, synthetic construct
  source 1..75: mol_type = other DNA
gctttgctaccttggaatacagctaaaactggattacgtactgatagttctctttttcttgctgtgagagatcgc

SEQ ID NO: 638666 - DNA, 75 bp, synthetic construct
  source 1..75: mol_type = other DNA
aatgctgccaactatggagccccacaaattagggagcgtgttattttaattggtaatcgcttcggaatgatagcc

SEQ ID NO: 638667 - DNA, 75 bp, synthetic construct
  source 1..75: mol_type = other DNA
gcctggcgttttgtgcgtgagcgtttccgcagttaccagacagagcttaagtcccgtggaataaagcgtgcccgt

SEQ ID NO: 638668 - DNA, 75 bp, synthetic construct
  source 1..75: mol_type = other DNA
tttcagtgcaaaagtagttcgttatgagcgccgaaatgtcgacgcttttattcaaaagtgtcgcagccggtatta

SEQ ID NO: 638669 - DNA, 75 bp, synthetic construct
  source 1..75: mol_type = other DNA
gatattgtcctggctgctcccaggaactttgatgcaacaaattaccagctaaatagttcattttctaaggaactg

SEQ ID NO: 638670 - DNA, 75 bp, synthetic construct
  source 1..75: mol_type = other DNA
gcctaccctacgttaatggttcctgtgtctgtcgggttgcgaagcagcattgctgatgcactggcttcacatgtc

SEQ ID NO: 638671 - DNA, 75 bp, synthetic construct
  source 1..75: mol_type = other DNA
atgacttgatcaaaaccaaagattatgctgctgtgcatgatgctatcaaggccttgggcaactgggcaaaagtta

SEQ ID NO: 638672 - DNA, 75 bp, synthetic construct
  source 1..75: mol_type = other DNA
agtgccgatggcagaatcatctgcagtgaagggtatgctcatgctctttatcaactgacatgtccggtgcctgtg

SEQ ID NO: 638673 - DNA, 75 bp, synthetic construct
  source 1..75: mol_type = other DNA
aggaatgtctgaaaggtctcaggagcggttaatggaaacgctggagaattcagaacgacactggcctgccagaag

SEQ ID NO: 638674 - DNA, 75 bp, synthetic construct
  source 1..75: mol_type = other DNA
cttatcatcactttaatactcttacgtttcgcccgtcgtcatctttcgaccagtcggttattgctggctggcgtt

SEQ ID NO: 638675 - DNA, 75 bp, synthetic construct
  source 1..75: mol_type = other DNA
tgctggtagcagcgaccggctggatggtcggcgtcagtgtggcgcttgctggtgctattggatttattggtctgg

SEQ ID NO: 638676 - DNA, 75 bp, synthetic construct
  source 1..75: mol_type = other DNA
caccgaagcgcgggtctatgcggcagaccagttgtttgccaccctcgacccgacgttgcggcgtattgacgtcgc

SEQ ID NO: 638677 - DNA, 75 bp, synthetic construct
  source 1..75: mol_type = other DNA
cggcgtgagcttttttatgcgcccgctcggcggcattattgtgggggcctgggccgatcgtttcggacgcaaacc

SEQ ID NO: 638678 - DNA, 75 bp, synthetic construct
  source 1..75: mol_type = other DNA
cagtgaagttctggaattcgcatttccggggcagaaatttaacgtgctgaaggtatgcgattccggcgtttacaa

SEQ ID NO: 638679 - DNA, 75 bp, synthetic construct
  source 1..75: mol_type = other DNA
gagagcggaatttctctcattgagtcagatattcaactggcaaacgtagaaaaattaaatctgccggaaatggtg

SEQ ID NO: 638680 - DNA, 75 bp, synthetic construct
  source 1..75: mol_type = other DNA
cggtatttatgataacaccaataccctggttgacctgaatactggtaaatctgctactgtcctgaaagaaggtca

SEQ ID NO: 638681 - DNA, 75 bp, synthetic construct
  source 1..75: mol_type = other DNA
tttaccgctaactatgtcgctaccaaaaatgcagtaaccatcggttacggtaatgccgaagtcgacttcaacctg

SEQ ID NO: 638682 - DNA, 75 bp, synthetic construct
  source 1..75: mol_type = other DNA
ttggtagcacggtcgcaacctatatctccctcttttattacggcacctgggcggcgaagtatctggcgatgcctc

SEQ ID NO: 638683 - DNA, 75 bp, synthetic construct
  source 1..75: mol_type = other DNA
actcgtggtgtgtacaggttaggtgtcaacggagggaatacaggaacagaaacccgcccccgtaatattgcgttt

SEQ ID NO: 638684 - DNA, 75 bp, synthetic construct
  source 1..75: mol_type = other DNA
ccgtggggatctggggcggatctctggtcggcgtcagttggaaaggcattgatagcgggttcttctggtcggcaa

SEQ ID NO: 638685 - DNA, 75 bp, synthetic construct
  source 1..75: mol_type = other DNA
tcggacataaagggattaaaaccctgagaacgttcgggcgggccgggttaatgttattcaatgcgctggtcggca

SEQ ID NO: 638686 - DNA, 75 bp, synthetic construct
  source 1..75: mol_type = other DNA
caaacatagtgtcggaacttcgcaaacagttctttcattaaatgaactacgccgaattaagttacctattcccac

SEQ ID NO: 638687 - DNA, 75 bp, synthetic construct
  source 1..75: mol_type = other DNA
ttctggtggtgggtacggtgttcctcggtagtggtcagccgctggatggcaataccacagggttccatttaatta

SEQ ID NO: 638688 - DNA, 75 bp, synthetic construct
  source 1..75: mol_type = other DNA
ggcgcgggagcccgactgcaaatggcggggccagcactggcactggtctatttaatctgcggcctgttttcattt

SEQ ID NO: 638689 - DNA, 75 bp, synthetic construct
  source 1..75: mol_type = other DNA
aaagcactgggcgcagaacgtcaccattacatcaaccttgcccgcactgaaaatcgcttcgctgggctggctgta

SEQ ID NO: 638690 - DNA, 75 bp, synthetic construct
  source 1..75: mol_type = other DNA
atgacaccgaccgaagcggtgcgggaagttgctcgccgcatggagacgttcgccagcctgatgacgtcagcgccg

SEQ ID NO: 638691 - DNA, 75 bp, synthetic construct
  source 1..75: mol_type = other DNA
atggcactcaactgtccaacctgcaaaacccctctcgaacgcaatggcgggactgctcactgtgcaacttgtgcc

SEQ ID NO: 638692 - DNA, 75 bp, synthetic construct
  source 1..75: mol_type = other DNA
aagaacgcgcgcggcaggcgattgagaacccgcttaagcagcccgaacagggcacacagtatcaggcctgggaag

SEQ ID NO: 638693 - DNA, 75 bp, synthetic construct
  source 1..75: mol_type = other DNA
caacacctaaagcatggcatggtacttctttattggctaaagaaagtcaacgaatccgaactgctcttgggctac

SEQ ID NO: 638694 - DNA, 75 bp, synthetic construct
  source 1..75: mol_type = other DNA
gccgcagtgggtctttgcgctcgctgcgctgaccatcgttggtaccatgaatatgattggtgtgaaatggtttgc

SEQ ID NO: 638695 - DNA, 75 bp, synthetic construct
  source 1..75: mol_type = other DNA
gatggctcctgtaggaccgatttcaaaaaataaaatcggattaggcgtgatctcaccattatatacagtgttcaa

SEQ ID NO: 638696 - DNA, 75 bp, synthetic construct
  source 1..75: mol_type = other DNA
aagaagcgccagtgtacgcgtgcctggtaggtaaaggtatcacttttgactccggcggctacagcatcaaacaga

SEQ ID NO: 638697 - DNA, 75 bp, synthetic construct
  source 1..75: mol_type = other DNA
cagcaagggcggtttcgccgtgatctgttttatcggctgagtattttgcgcctgcagttacccccactacgcgag

SEQ ID NO: 638698 - DNA, 75 bp, synthetic construct
  source 1..75: mol_type = other DNA
gctgaagttatgaagcaaggcagatggaagattattgctaccatgctggcagtaacctggctgaatccgcatgtt

SEQ ID NO: 638699 - DNA, 75 bp, synthetic construct
  source 1..75: mol_type = other DNA
atgcgataatcacctacgcgccttcagcgctatatcagaataatgtcggcgttaccattgccgcagatcacccag

SEQ ID NO: 638700 - DNA, 75 bp, synthetic construct
  source 1..75: mol_type = other DNA
tatttgcattagcttctgttaatgcaatggcggcggattgtgctaaaggtaaaattgagttttccaagtataatg

SEQ ID NO: 638701 - DNA, 75 bp, synthetic construct
  source 1..75: mol_type = other DNA
tattttcgttagtttctgttaatgcaatggcagcggattgtgctaaaggtaaaattgagttctctaaatataatg

SEQ ID NO: 638702 - DNA, 75 bp, synthetic construct
  source 1..75: mol_type = other DNA
atctgccggactacagagcagaggtcaccctgaccttaccggatgtcctgacttcaacagaggtgtcacttctgc

SEQ ID NO: 638703 - DNA, 75 bp, synthetic construct
  source 1..75: mol_type = other DNA
aaagatcctttgttaatcatgcaagtcgccgtacaaaatggtatgagttgtgatcctgattatgtcgagaatgca

SEQ ID NO: 638704 - DNA, 75 bp, synthetic construct
  source 1..75: mol_type = other DNA
ctcacggcgacgtagattacgctcaggcgtctgcggaactggtcaaagcgatcgcgcagctgcgcgttatcgagt

SEQ ID NO: 638705 - DNA, 75 bp, synthetic construct
  source 1..75: mol_type = other DNA
ttgtgcaatcagcgatttggttctgatttgcgccgggatttttggcggtagcgcgttactgatgcagtcaccgtg

SEQ ID NO: 638706 - DNA, 75 bp, synthetic construct
  source 1..75: mol_type = other DNA
ggaaccaaaacgttggtttgcactcgggacaattagcgcctctttcctgtggttctttggtctggctcttctcgc

SEQ ID NO: 638707 - DNA, 75 bp, synthetic construct
  source 1..75: mol_type = other DNA
ttgctcttggtgctgcaatgatcctgccgattggcccacaaaatgcgtttgtaatgaaccaggggattcgtcgcc

SEQ ID NO: 638708 - DNA, 75 bp, synthetic construct
  source 1..75: mol_type = other DNA
gataccgtagggtttattcgccacctgccgcacgatctggttgcagcatttaaagccacgttacaagagacgcgg

SEQ ID NO: 638709 - DNA, 75 bp, synthetic construct
  source 1..75: mol_type = other DNA
taacactagccacatcactaattgggtgttcatcttcatctatatctgtttcaaaggcaaagtatgcacctcaaa

SEQ ID NO: 638710 - DNA, 75 bp, synthetic construct
  source 1..75: mol_type = other DNA
agtcacttttcatctggatgccggagaatggattgttggcgcctcactcgaagacgctgggctgtgcgcactgaa

SEQ ID NO: 638711 - DNA, 75 bp, synthetic construct
  source 1..75: mol_type = other DNA
aactggcccggtgtcatattccgtccgctcaaagaacgcatcccggcagacttatatattgtttatgaaacgcag

SEQ ID NO: 638712 - DNA, 75 bp, synthetic construct
  source 1..75: mol_type = other DNA
tgattatccctgtaatcctgatgtacacctgctggagttactatgtattccgggggaaggtaaaaactggcgacg

SEQ ID NO: 638713 - DNA, 75 bp, synthetic construct
  source 1..75: mol_type = other DNA
gtgttcaagtatcaaagcgcagcgccagctacgttggtggtaatgagagacacaggttttgtaggagctggatgt

SEQ ID NO: 638714 - DNA, 75 bp, synthetic construct
  source 1..75: mol_type = other DNA
tacgctggctgaaatcgacagccgatgacaatcaaatccaccgcatcgcccgtaacgctggcggtcatgcgactc

SEQ ID NO: 638715 - DNA, 75 bp, synthetic construct
  source 1..75: mol_type = other DNA
gctttagtgccggagagggtggctttgccccgctaccggctcctttattccgctatcaccagcagcttaaacagc

SEQ ID NO: 638716 - DNA, 75 bp, synthetic construct
  source 1..75: mol_type = other DNA
atctcaatgaaagtgttaccgcgaccgcgcgcctccctgagcctgcgtcgggaaatcagcctgcaagaagccatg

SEQ ID NO: 638717 - DNA, 75 bp, synthetic construct
  source 1..75: mol_type = other DNA
gcccgtttacgtccgatacaaaaaggatgtggcaatgaatacagcatttgcacttgttctgacagtttttcttgt

SEQ ID NO: 638718 - DNA, 75 bp, synthetic construct
  source 1..75: mol_type = other DNA
atatttccagacatctgttatcacttaacccattacaagcccgctgccgcagatattcccgtggcgagcgataac

SEQ ID NO: 638719 - DNA, 75 bp, synthetic construct
  source 1..75: mol_type = other DNA
gtcttggtgtgctcactgaaatctcgatgaaagtgttaccgcgaccacgcgccaccctgagtctgcgtcgggaaa

SEQ ID NO: 638720 - DNA, 75 bp, synthetic construct
  source 1..75: mol_type = other DNA
gatgtcatcattcttgataacctctgtaacagtaagcgcagcgtactgcctgttatcgagcgtttaggcggcaaa

SEQ ID NO: 638721 - DNA, 75 bp, synthetic construct
  source 1..75: mol_type = other DNA
acggactgcggaccacgttattgcagctcgcagtgatgacaaacgccgtcgttactttagccagttgctggagga

SEQ ID NO: 638722 - DNA, 75 bp, synthetic construct
  source 1..75: mol_type = other DNA
attgttgatgatcctggtgtgctgtatctgggccgggttttgtacatggatctcctcgctggttcgggttgaaaa

SEQ ID NO: 638723 - DNA, 75 bp, synthetic construct
  source 1..75: mol_type = other DNA
tggaagaactggaaatctaccaggaaaagctacgcatctggcaagcgccaccgcaggtgacggaaccggttcatc

SEQ ID NO: 638724 - DNA, 75 bp, synthetic construct
  source 1..75: mol_type = other DNA
cgcatctggcaagcaccgccgcaagttacagaaccggtgtaccggcttaccagtatgctccataagtatcaacat

SEQ ID NO: 638725 - DNA, 75 bp, synthetic construct
  source 1..75: mol_type = other DNA
aaacagctgctgataaagtgccgggaggtggttctctttacgacgtgccacattggtagtcatcgcggaaacagc

SEQ ID NO: 638726 - DNA, 75 bp, synthetic construct
  source 1..75: mol_type = other DNA
cgcatctggcaagcgccaccgcaggtgacggaaccggttcatcggctggcgggggtgctccataagtatcaacat

SEQ ID NO: 638727 - DNA, 75 bp, synthetic construct
  source 1..75: mol_type = other DNA
ttcagcaaagcttgcggcaaaccggttaactatcattttgcaccgcgtcgcgagggcgaccttccggcctactgg

SEQ ID NO: 638728 - DNA, 75 bp, synthetic construct
  source 1..75: mol_type = other DNA
gcggacgccagcaaagccgaccgtgaactgaactggcgcgtaacgcgcacactcgatgaaatggcgcaggacacc

SEQ ID NO: 638729 - DNA, 75 bp, synthetic construct
  source 1..75: mol_type = other DNA
tccacgtaatggatctggcggacggtcacgtcgtggcgatggaaaaactggcgaacaagccaggcgtacacatct

SEQ ID NO: 638730 - DNA, 75 bp, synthetic construct
  source 1..75: mol_type = other DNA
cgggaaacgcctgtcaccatttatagctgggtcgcggcggcaacgcgttatcagcttctcaagcgcggcgttatc

SEQ ID NO: 638731 - DNA, 75 bp, synthetic construct
  source 1..75: mol_type = other DNA
cgcatctggcaagcgccaccgcaggtgacggaaccggtgcatcggcttactggtatgctgcataaataccagcac

SEQ ID NO: 638732 - DNA, 75 bp, synthetic construct
  source 1..75: mol_type = other DNA
ggcagcagcgtgctggacgtggttaatgccttcagcaaagcctgcggcaaaccggttaactatcattttgcaccg

SEQ ID NO: 638733 - DNA, 75 bp, synthetic construct
  source 1..75: mol_type = other DNA
tgacgttgtttcatatagttgcataaatttttcatttcttttaataccaatttatctaattgaaacaaatgacat

SEQ ID NO: 638734 - DNA, 75 bp, synthetic construct
  source 1..75: mol_type = other DNA
cgacctgtctgcgtaattccagcctggagaaggatctggtcctagcggaacgttttggatatgactatattgaga

SEQ ID NO: 638735 - DNA, 75 bp, synthetic construct
  source 1..75: mol_type = other DNA
attgaagaacgggaaagatttattgaaaccccggaatcgcaagatgagtcagaaacagtgctcgttagttgcaat

SEQ ID NO: 638736 - DNA, 75 bp, synthetic construct
  source 1..75: mol_type = other DNA
ttatccggcctacgaatggcgcggaaatctgtaggcctgataagcgtggcgcttcaggcattggccaccacagcc

SEQ ID NO: 638737 - DNA, 75 bp, synthetic construct
  source 1..75: mol_type = other DNA
gcttacattaaaaccatggatgcaacctcaaaaactgcaacttttgattttaaagcatcctatgttcgtgctgaa

SEQ ID NO: 638738 - DNA, 75 bp, synthetic construct
  source 1..75: mol_type = other DNA
atgaccttcggttctgttttttttggtaacagcaaaggaacactgaacaacgacatgtctattaacaccccgtct

SEQ ID NO: 638739 - DNA, 75 bp, synthetic construct
  source 1..75: mol_type = other DNA
gtcgcctcggttaatgcagcgatcgagacgggtgccagcttcgccgggcagcgaaatgcccttgtcgcgcacaaa

SEQ ID NO: 638740 - DNA, 75 bp, synthetic construct
  source 1..75: mol_type = other DNA
aagtcagtggtctggcactcgccatcagttgcgcggatgttatggcaaaagccgcgtccatcacgctgtttggtc

SEQ ID NO: 638741 - DNA, 75 bp, synthetic construct
  source 1..75: mol_type = other DNA
ttggttcagcgttttggggattaattgccggtggcgtctgttacgtgatgttgaatttaatggctggtagaaacc

SEQ ID NO: 638742 - DNA, 75 bp, synthetic construct
  source 1..75: mol_type = other DNA
gagaaatggtcttgtcgcgcacaaagtgattgcccgtccaggcgagggaatactgtcccgcacaacagaagcact

SEQ ID NO: 638743 - DNA, 75 bp, synthetic construct
  source 1..75: mol_type = other DNA
aaattatcagttgtaatttgtgtcttgacccggcgtgccaacggcaaaaaggtgaaccccgttcactttgcctgc

SEQ ID NO: 638744 - DNA, 75 bp, synthetic construct
  source 1..75: mol_type = other DNA
agagtatcagttgtaatttgtgtcttgacccggcgtgtcaacggcaaaaaggtgagccacgttcactttgcctcc

SEQ ID NO: 638745 - DNA, 75 bp, synthetic construct
  source 1..75: mol_type = other DNA
atgacgggagagcatcttatttcacattgctcaaaaaaaacacatgacagacatcacaaaaatgaaatgcaagta

SEQ ID NO: 638746 - DNA, 75 bp, synthetic construct
  source 1..75: mol_type = other DNA
acgctggccattgagtgcggtctggcgacagagtctgaggccgggaaactctccatcacccgtgccacccgtgcc

SEQ ID NO: 638747 - DNA, 75 bp, synthetic construct
  source 1..75: mol_type = other DNA
atggaaaaggcggtgggcttcacctcccgttttgatttcgccattcatgtggcgcatgcccgttcgcttggtctg

SEQ ID NO: 638748 - DNA, 75 bp, synthetic construct
  source 1..75: mol_type = other DNA
cagcccggctggcgcaatccagttcgaagcggtagacgcaccggaaattatcccggatccgttcgatccgtcgaa

SEQ ID NO: 638749 - DNA, 75 bp, synthetic construct
  source 1..75: mol_type = other DNA
atggaacatttcgacgtggcgattattggcctcggcccggcagggtcggcgttggcacgaaagttagccggcaaa

SEQ ID NO: 638750 - DNA, 75 bp, synthetic construct
  source 1..75: mol_type = other DNA
ttaccacgacagcctgtgtcggaaaatctggcgtgaggatgataaatggcatgtcatttttcgcgcagacggctg

SEQ ID NO: 638751 - DNA, 75 bp, synthetic construct
  source 1..75: mol_type = other DNA
ggagcagcatattaccgcccgctatctggtcggtgccgatggcgcaaactcgatggtgcggcgacatctctaccc

SEQ ID NO: 638752 - DNA, 75 bp, synthetic construct
  source 1..75: mol_type = other DNA
ccaccggtgctgcgtcgacgggctattgatgcgctcctgcaggggctgtgtttccactatgacccgctggccaac

SEQ ID NO: 638753 - DNA, 75 bp, synthetic construct
  source 1..75: mol_type = other DNA
acggcaaaaatatctgcatggtttacgcccataacgacgacatggtaataggcgcaattcaggcaattaaagaag

SEQ ID NO: 638754 - DNA, 75 bp, synthetic construct
  source 1..75: mol_type = other DNA
gtgactgatcttcaacaaacgtattaccgccaggtaaagaacccgaatccggtgtttataccccgtaaaggtgcc

SEQ ID NO: 638755 - DNA, 75 bp, synthetic construct
  source 1..75: mol_type = other DNA
cgcgccaggatcaaactgatattgaaatgtttgagttgctcaaacctgtcgctgatggtttccgtaactatcgtg

SEQ ID NO: 638756 - DNA, 75 bp, synthetic construct
  source 1..75: mol_type = other DNA
cgccgcaggtttgagcattcatgtaccgtttgcgccgggtcgcgttgatgcgcgtcaggatcagactgacattga

SEQ ID NO: 638757 - DNA, 75 bp, synthetic construct
  source 1..75: mol_type = other DNA
actgggatgtgaacgccgcagccgttcgtgctctgcctgttctggagaaaatccagaaagagtctggtaaagcct

SEQ ID NO: 638758 - DNA, 75 bp, synthetic construct
  source 1..75: mol_type = other DNA
gattgcagggactaacacttaacgaagccatcggtgtttttattgtcaccaacgcgttaatagtcctctgtggta

SEQ ID NO: 638759 - DNA, 75 bp, synthetic construct
  source 1..75: mol_type = other DNA
tgaccgtctgcacttcgacgaagcctggtatggctacgcacggtttaacccaatctatgccgatcactatgcaat

SEQ ID NO: 638760 - DNA, 75 bp, synthetic construct
  source 1..75: mol_type = other DNA
cgtttctaccatgactactatggtgaaaatctgttccgcaccgacatgggcatcgaacgaacttccctcggttct

SEQ ID NO: 638761 - DNA, 75 bp, synthetic construct
  source 1..75: mol_type = other DNA
acggcaaaaacatctgcatggtttacgcccataacgatgacatggtgattggtgcaattcaggcaattaaagaag

SEQ ID NO: 638762 - DNA, 75 bp, synthetic construct
  source 1..75: mol_type = other DNA
tggttaccgcatggcttggccaccacggcatcgtgccaactcgcaccaccgatttccagattatgttcctgttct

SEQ ID NO: 638763 - DNA, 75 bp, synthetic construct
  source 1..75: mol_type = other DNA
ttgaacgaagcctattccggcctgccggtggcggaaatcaccccgcgtgaagcgtacaacgcgattgtcgacaac

SEQ ID NO: 638764 - DNA, 75 bp, synthetic construct
  source 1..75: mol_type = other DNA
gtgatcgacgaagcggtcgatttccgccaggcaatggcacggttgtataaagagtttactgacgaaggtagctgg

SEQ ID NO: 638765 - DNA, 75 bp, synthetic construct
  source 1..75: mol_type = other DNA
ctgaattggggatgcggacgatttcctggactgctttattatgccagcccacattgttggcggtacatttcaggg

SEQ ID NO: 638766 - DNA, 75 bp, synthetic construct
  source 1..75: mol_type = other DNA
tctatgttcaggaaaaaaagaagtatgatgctttccagttacaaagagatttatcaatgaaaaataagagaaaaa

SEQ ID NO: 638767 - DNA, 75 bp, synthetic construct
  source 1..75: mol_type = other DNA
gaaattactggcgtgccggaagcgcagattgtgaaacttgcagaactgatggcggcaaatcgcacaatgctgatg

SEQ ID NO: 638768 - DNA, 75 bp, synthetic construct
  source 1..75: mol_type = other DNA
gtgaagtccgtaatctcgaaagaggttacggactttttgttgtgcacagaaaacccccagctaggctgggggttc

SEQ ID NO: 638769 - DNA, 75 bp, synthetic construct
  source 1..75: mol_type = other DNA
cgcgcgtacactatgccatcacaaatagcggcgggatctcacccaacgtggtccaggcgcaggcagaagtgcttt

SEQ ID NO: 638770 - DNA, 75 bp, synthetic construct
  source 1..75: mol_type = other DNA
gaaactgcctgttgcccagtgtttcagcccctgttttgccgtcggtacaccgctacatacgtggcaactggttag

SEQ ID NO: 638771 - DNA, 75 bp, synthetic construct
  source 1..75: mol_type = other DNA
atgtgtcgcggtctgtttatcgaattaaatgcagatataaaaaaaccaaccgtaaaggttggtttttttttgtgc

SEQ ID NO: 638772 - DNA, 75 bp, synthetic construct
  source 1..75: mol_type = other DNA
gtgcgttataacggacaaatgctacggtgcctgtacgctataacgcacgaggtgactatgcgtctgttttctatt

SEQ ID NO: 638773 - DNA, 75 bp, synthetic construct
  source 1..75: mol_type = other DNA
cctttttctggtgacgatggcatcgcaaaacgcaccgggtattgcggcaatgaaagcggccgggtattcggctcc

SEQ ID NO: 638774 - DNA, 75 bp, synthetic construct
  source 1..75: mol_type = other DNA
gagcgaggaggcgtcatatcaccttaacctccattttctcctgtacgccctgcagctgcatttttcccctgccac

SEQ ID NO: 638775 - DNA, 75 bp, synthetic construct
  source 1..75: mol_type = other DNA
acgttgtcacaactgatgttgtctttaaacccgttctccccacttatattacccctgatttttcgtttgctcaca

SEQ ID NO: 638776 - DNA, 75 bp, synthetic construct
  source 1..75: mol_type = other DNA
tcagcggcaataatctggcaagcagcgattgtcgccggagccaccactgcacaaatctctggctggatgacggcg

SEQ ID NO: 638777 - DNA, 75 bp, synthetic construct
  source 1..75: mol_type = other DNA
attttattacgctttggtttacaggcgtttgccagtctggatggtcagtttacgttgtgtggcagtatgttgctg

SEQ ID NO: 638778 - DNA, 75 bp, synthetic construct
  source 1..75: mol_type = other DNA
tggtgttatcgctgattatgggcgttattctcggcctgatcgccggttactttggcggcctggtcgataacatca

SEQ ID NO: 638779 - DNA, 75 bp, synthetic construct
  source 1..75: mol_type = other DNA
gggggcgcagccgccaacgccggagtggggcaccatgctctccgacgtgttgcagttcgcgcaaagcgcctggtg

SEQ ID NO: 638780 - DNA, 75 bp, synthetic construct
  source 1..75: mol_type = other DNA
atgccagacacagcgccgtcaggcgctgtttttttgtgcacagaaaacccccagctaggctgggggttccggaaa

SEQ ID NO: 638781 - DNA, 75 bp, synthetic construct
  source 1..75: mol_type = other DNA
gaagatagcgtggatgaagatatgtggaccgcactgctgcatatcgaggtctttttgaaggcaaaagagaccgat

SEQ ID NO: 638782 - DNA, 75 bp, synthetic construct
  source 1..75: mol_type = other DNA
atgaattcgtctaagatttataaaagtataatttatcaaacgaaagaaacgcaaaccggaactgccacgatcctt

SEQ ID NO: 638783 - DNA, 75 bp, synthetic construct
  source 1..75: mol_type = other DNA
atgaaacaccgtgaaatacgggcggcagttctgtctgccctgaaagacaatatttctgagagggtgagctggttt

SEQ ID NO: 638784 - DNA, 75 bp, synthetic construct
  source 1..75: mol_type = other DNA
acccgctggccaaccgcgtccagtgttccatcaccacactggccattgagtgcggactggcgacagagtccggtg

SEQ ID NO: 638785 - DNA, 75 bp, synthetic construct
  source 1..75: mol_type = other DNA
acgctggccattgagtgcggactggcgacagagtccggtgcaggaaaactctccatcacccgtgccacccgggcc

SEQ ID NO: 638786 - DNA, 75 bp, synthetic construct
  source 1..75: mol_type = other DNA
gaactggggctgattacgtaccagacggaatatgacccgcttattggctgcaacattccgaccgacatcacgttc

SEQ ID NO: 638787 - DNA, 75 bp, synthetic construct
  source 1..75: mol_type = other DNA
ccggtgatgcctgccaatgaatccttccagatgattgaggcgactaaagggatcaacagttactacttgaccagc

SEQ ID NO: 638788 - DNA, 75 bp, synthetic construct
  source 1..75: mol_type = other DNA
ggatctgtttggcattactttcgacggtcacccgaacctgcgccgcatcatgatgccgcaaacctggaaaggtca

SEQ ID NO: 638789 - DNA, 75 bp, synthetic construct
  source 1..75: mol_type = other DNA
gtagcgcatgcccgttcgaagggactgcgtcggcgcatgccaccggtgctgcgtcgacgggctattgatgcgctg

SEQ ID NO: 638790 - DNA, 75 bp, synthetic construct
  source 1..75: mol_type = other DNA
cggaatacgacccgacaattggctgtaacatcccgaccgacatcacgttcacgccggcactgtttgcctcactcg

SEQ ID NO: 638791 - DNA, 75 bp, synthetic construct
  source 1..75: mol_type = other DNA
gtacgtgagcgtttccgtagttaccagacagagcttaagtcccgtggaatcaagcgtgcccgtgcgcgtcgcgat

SEQ ID NO: 638792 - DNA, 75 bp, synthetic construct
  source 1..75: mol_type = other DNA
ctacattccgaccgatatcacgttcacatctgcactgtttgctgccctcgatgtatcagaggaggcagtggccgc

SEQ ID NO: 638793 - DNA, 75 bp, synthetic construct
  source 1..75: mol_type = other DNA
tgcgtcggcgcatgccaccggtactgcgtcgccgggccattgatgcgctgctgcaggggctctgttttcactatg

SEQ ID NO: 638794 - DNA, 75 bp, synthetic construct
  source 1..75: mol_type = other DNA
gcgaacagggaacgtcaggatatcgtcaccctggtgaaacggcagctgacgcgtgaaatcgcggaagggcgcttc

SEQ ID NO: 638795 - DNA, 75 bp, synthetic construct
  source 1..75: mol_type = other DNA
gtgactgatcttcaccaaacgtattaccgccaggtaaagaacccgaatccggtgttcacaccccgtgaaggtgcc

SEQ ID NO: 638796 - DNA, 75 bp, synthetic construct
  source 1..75: mol_type = other DNA
ccggaagagtgggggatgaagcgcggcaccgaaaacgaggacttcatgttcctcaatctcggtccgaaccacccg

SEQ ID NO: 638797 - DNA, 75 bp, synthetic construct
  source 1..75: mol_type = other DNA
ccctgacgttcctgtcagagctgggactgattacctaccagacggaatatgacccgcttatcgggtgctacattc

SEQ ID NO: 638798 - DNA, 75 bp, synthetic construct
  source 1..75: mol_type = other DNA
attgatgcgctgctgcaggggctctgttttcactatgatccgctggccaaccgcgtccagtgctccatcaccaca

SEQ ID NO: 638799 - DNA, 75 bp, synthetic construct
  source 1..75: mol_type = other DNA
gctggccaaccgagtccagtgctccatcaccactctggctattgagtgcggactggcgacggaatctgatgccgg

SEQ ID NO: 638800 - DNA, 75 bp, synthetic construct
  source 1..75: mol_type = other DNA
cagcttctaaaaagaaggagctatcaggcacaatcgcagcatctgctttcgaaaaaggctctctaataaaaaggg

SEQ ID NO: 638801 - DNA, 75 bp, synthetic construct
  source 1..75: mol_type = other DNA
ttcgaaggtagtattgttgactgcactggctctgaattattagcactagccggagtgaatgataaagaagaaata

SEQ ID NO: 638802 - DNA, 75 bp, synthetic construct
  source 1..75: mol_type = other DNA
gcgaaatcgatcgccgcgtgaaggagcgcatgataatgtcgcggaacagcaactacacgcgtctggccacgtcgc

SEQ ID NO: 638803 - DNA, 75 bp, synthetic construct
  source 1..75: mol_type = other DNA
gtgcgtgagcgtttccgcagttaccagacagagcttaagtcccgtggaatgaagcgtgcccgtgcgcgtcgtgat

SEQ ID NO: 638804 - DNA, 75 bp, synthetic construct
  source 1..75: mol_type = other DNA
tgatggaaaaggcggtgggcttcacctcccgttttgatttcgccattcatgtggcacatgcccgttcgcttggtc

SEQ ID NO: 638805 - DNA, 75 bp, synthetic construct
  source 1..75: mol_type = other DNA
ctgcaggggctgtgtttccactatgacccgctggccaaccgcgtccagtgctccatcaccactctggccattgag

SEQ ID NO: 638806 - DNA, 75 bp, synthetic construct
  source 1..75: mol_type = other DNA
ttcacgcggagggagttgaaacgcctcagcctcgagtaggcagcctggcggctgcggcttgtcatggcctgaaat

SEQ ID NO: 638807 - DNA, 75 bp, synthetic construct
  source 1..75: mol_type = other DNA
aaactcactttctggaaattctggttcttaggttctattccgtgggagcgtaaaaccgtcacgccagccagtttg

SEQ ID NO: 638808 - DNA, 75 bp, synthetic construct
  source 1..75: mol_type = other DNA
tggatgaactgatagcgaaagcctggcgttttgtccgtgagcgtttccgcagttaccagacagagcttaagtccc

SEQ ID NO: 638809 - DNA, 75 bp, synthetic construct
  source 1..75: mol_type = other DNA
gagctggggctgattagctaccagacggaatatgacccgcttattggctgcaacattccgaccgatatctcgtta

SEQ ID NO: 638810 - DNA, 75 bp, synthetic construct
  source 1..75: mol_type = other DNA
gcagcacgaatgatcatgactggcgatgcgcaggcatgtctggttggcggcgtggagcatatgggccatgtgcca

SEQ ID NO: 638811 - DNA, 75 bp, synthetic construct
  source 1..75: mol_type = other DNA
gcgttcgatggcggtcgttggttgtgatccgtcgattatgggttacggcccggttccggcctcgaagctggcgct

SEQ ID NO: 638812 - DNA, 75 bp, synthetic construct
  source 1..75: mol_type = other DNA
agcagacgctggagcagggttttaatatcgcccgtaacgcggcgctgttggcagaagtgccgcactctgtcccgg

SEQ ID NO: 638813 - DNA, 75 bp, synthetic construct
  source 1..75: mol_type = other DNA
ccggatatctacaaagcgatgattgatggcgaagcgaacgccagcgttgaactgacgccgaacatggcaggcccc

SEQ ID NO: 638814 - DNA, 75 bp, synthetic construct
  source 1..75: mol_type = other DNA
aagaggcgaaagatgccgaaatcccggtcttcttgcttgaccgttccatcgatgtgaaagacaaatctctctata

SEQ ID NO: 638815 - DNA, 75 bp, synthetic construct
  source 1..75: mol_type = other DNA
cgcactgctggtggtgcttggtgtcattccaatggtgggatttgacgtctttttccaaatcttcagccacctgaa

SEQ ID NO: 638816 - DNA, 75 bp, synthetic construct
  source 1..75: mol_type = other DNA
ctatctggtcggtgccgatggtgccaactcgatggtgcggcgacatctctacccggatcatcagattcgtaaata

SEQ ID NO: 638817 - DNA, 75 bp, synthetic construct
  source 1..75: mol_type = other DNA
atggaacatttcgacgtggcgattattggcctcggcccggcaggttcggcgctggcgcggcagttagcaggcaaa

SEQ ID NO: 638818 - DNA, 75 bp, synthetic construct
  source 1..75: mol_type = other DNA
cgcagagattctgcgttcggtgttactgaagcagccggagaagagcaacgccgcctactggcgcgccacccgcaa

SEQ ID NO: 638819 - DNA, 75 bp, synthetic construct
  source 1..75: mol_type = other DNA
cattccgaccgacatcacgttcacaccggcactgtttgccgctctcgatgtgtctgaggtggcggtggcttccgc

SEQ ID NO: 638820 - DNA, 75 bp, synthetic construct
  source 1..75: mol_type = other DNA
cggaatatgatccgcttatcgggtgctacattccgaccgatatcacgttcacaccggcgttatttgccgcccttg

SEQ ID NO: 638821 - DNA, 75 bp, synthetic construct
  source 1..75: mol_type = other DNA
gctatccagcagtggttcgcagagaaacatccggtgccgttctactcctgcatctttgataattcgataactaac

SEQ ID NO: 638822 - DNA, 75 bp, synthetic construct
  source 1..75: mol_type = other DNA
aaagatgccgaaatcccggtcttcttgctcgaccgttccatcgatgtgaaagacaaatctctctatatgaccacc

SEQ ID NO: 638823 - DNA, 75 bp, synthetic construct
  source 1..75: mol_type = other DNA
aaagcgtgcccgtgcgcgtcgtgatgcaggcagggaacgtcaggatatcgtcactctggtgaaacgacagctgac

SEQ ID NO: 638824 - DNA, 75 bp, synthetic construct
  source 1..75: mol_type = other DNA
cggaatatgacccgcttattggctgctatatcccgaccgatatcacgttcacaccggcgctgtttgctgctctcg

SEQ ID NO: 638825 - DNA, 75 bp, synthetic construct
  source 1..75: mol_type = other DNA
ccgtgcgcgtcgtgatgcgaacagggaacgtcaggatatcgtcaccctggtgaaacggcagctgacgcgtgaaat

SEQ ID NO: 638826 - DNA, 75 bp, synthetic construct
  source 1..75: mol_type = other DNA
aaagcgtgcccgtgcgcgtcgtgatgcgggcagggaacgccaggatatcgtcaccctggtgaaacggcagctgac

SEQ ID NO: 638827 - DNA, 75 bp, synthetic construct
  source 1..75: mol_type = other DNA
caggaaaactctccatcactcgtgccacccgtgccctgacgttcctgtcagagctggggttgattacctaccaga

SEQ ID NO: 638828 - DNA, 75 bp, synthetic construct
  source 1..75: mol_type = other DNA
gtggcgcatgcccgttcgcgtggtctgcgtcgacgcatgccaccggtgctgcgtcgacgggctattgatgcgctg

SEQ ID NO: 638829 - DNA, 75 bp, synthetic construct
  source 1..75: mol_type = other DNA
ctccgcgccgccagaccagaaagggatgctcaacgaactggatgaagaaccgtcaccacgtcgtcgtactcatcg

SEQ ID NO: 638830 - DNA, 75 bp, synthetic construct
  source 1..75: mol_type = other DNA
ttgagcaggtactgaagaataccgacacgcgtatccataacgatatgcgtgtgaacccggcgttcttgtttgccg

SEQ ID NO: 638831 - DNA, 75 bp, synthetic construct
  source 1..75: mol_type = other DNA
gcgcatgtcccgccgtcagggtaaacgcgcatggaaattactcgaacatccgaagttccgcgccgcttatgacct

SEQ ID NO: 638832 - DNA, 75 bp, synthetic construct
  source 1..75: mol_type = other DNA
accgccaggtaaagaacccgaatccggtattcacaccccgtgaaggtgccggaacgctgaagttctgcgaaaaac

SEQ ID NO: 638833 - DNA, 75 bp, synthetic construct
  source 1..75: mol_type = other DNA
tcgccgtttccgtcttgctcacgtgatgtttggtccggaaattatcgaagtcgcaaccttccgtgggcaccacga

SEQ ID NO: 638834 - DNA, 75 bp, synthetic construct
  source 1..75: mol_type = other DNA
agaaccgatccctcgcctggctaccctgctgaacgatattccaccggcacgtctgtttgaagaatctttgaaact

SEQ ID NO: 638835 - DNA, 75 bp, synthetic construct
  source 1..75: mol_type = other DNA
cctgtttttgcctcactcaatgacgaacaacgccgggagctggttgcgctgcgcagcaacaataatggcgcaacg

SEQ ID NO: 638836 - DNA, 75 bp, synthetic construct
  source 1..75: mol_type = other DNA
ttaacgctggcgaaggacttagagcagaaatcgaaagcgcagcagcagagtaccggcgagatgctgaaagccgca

SEQ ID NO: 638837 - DNA, 75 bp, synthetic construct
  source 1..75: mol_type = other DNA
agtaccggcgagatgctgaaagccgcattcagcgagcacgagaagtctgtaaaagcggaactgagcgcaagcgcg

SEQ ID NO: 638838 - DNA, 75 bp, synthetic construct
  source 1..75: mol_type = other DNA
aggggaaggactggatacaactgacggagtgatacggaatgacagagctggaaacacatttgctgaacgccttag

SEQ ID NO: 638839 - DNA, 75 bp, synthetic construct
  source 1..75: mol_type = other DNA
aagaaatacacgtccggtgttctgtcgttcgcagagaaggaactgccgccgggaggacgtgaaaaagtgatggag

SEQ ID NO: 638840 - DNA, 75 bp, synthetic construct
  source 1..75: mol_type = other DNA
ggtgcagagattagccgggcaggtggaccacttgagtcggttatttatcacgaacagcagataagggatgaacag

SEQ ID NO: 638841 - DNA, 75 bp, synthetic construct
  source 1..75: mol_type = other DNA
accgtgctgaaaatgagcgtgaaacgctggctgtggctgattatcgtctcagtgctgatgtttgccacgaccggg

SEQ ID NO: 638842 - DNA, 75 bp, synthetic construct
  source 1..75: mol_type = other DNA
cggggtcttgaggcgctttaccgtgccggagcaataaaaacgcgtcaggatgtcactgaggcgctcacagcggca

SEQ ID NO: 638843 - DNA, 75 bp, synthetic construct
  source 1..75: mol_type = other DNA
tgcagatggacgaatcgggccgcgaaccatgaatgcactgcgtgaatacctgcagaaacggggcagggacggaga

SEQ ID NO: 638844 - DNA, 75 bp, synthetic construct
  source 1..75: mol_type = other DNA
gctgattgacgcgtcgccttacgttaagaaatacacctccggggtactgtcgtttgcggaagcggatttaccttc

SEQ ID NO: 638845 - DNA, 75 bp, synthetic construct
  source 1..75: mol_type = other DNA
acagggaactgacctcaaacgaatctttaatcaggaacgctatcaacgcccatacagcagccctgaaagaacttc

SEQ ID NO: 638846 - DNA, 75 bp, synthetic construct
  source 1..75: mol_type = other DNA
gagcattagttggctatatgcttaacgcgaataaaatagcaaccgctgaaataactcctgtttatgagataaagt

SEQ ID NO: 638847 - DNA, 75 bp, synthetic construct
  source 1..75: mol_type = other DNA
tccctgataatctgccggaaacgaaacaggcgcttgctgagagcgttacacgaggcctggaggtgctttaccatt

SEQ ID NO: 638848 - DNA, 75 bp, synthetic construct
  source 1..75: mol_type = other DNA
cgtcagtctctggataacgtaaaagcgatcgtggaagcggctggcctgaaagtgggcgatatcgttaaaaccacc

SEQ ID NO: 638849 - DNA, 75 bp, synthetic construct
  source 1..75: mol_type = other DNA
atgagcaaaactatcgcgacggaaaatgcaccggcagctatcggcccttacgttcagggcgttgatctgggcaat

SEQ ID NO: 638850 - DNA, 75 bp, synthetic construct
  source 1..75: mol_type = other DNA
acgtccgtgactatgaggccatgccggcgctgaccgacgcgctggagcagattatcagcggcgatcagccattcc

SEQ ID NO: 638851 - DNA, 75 bp, synthetic construct
  source 1..75: mol_type = other DNA
ccatatggcacaatgggtgcaacccaaaatgggtccttaacgctgaatttacctgagatgtgggaaatttctggc

SEQ ID NO: 638852 - DNA, 75 bp, synthetic construct
  source 1..75: mol_type = other DNA
tccaactacggcctggctacggaatttaccgacaactacgctgctggtatctatggcggtaaaaccgatctgcag

SEQ ID NO: 638853 - DNA, 75 bp, synthetic construct
  source 1..75: mol_type = other DNA
tgctgaacaacgcgcggaacgtcagcgttccgatcgccaatgggcgcagcgttttcgcacagaaccgttaacggc

SEQ ID NO: 638854 - DNA, 75 bp, synthetic construct
  source 1..75: mol_type = other DNA
tatgttatattcattatgtgtgattggggtgagctatttattgcgcgatgaaatatattcatttaaagtaagtac

SEQ ID NO: 638855 - DNA, 75 bp, synthetic construct
  source 1..75: mol_type = other DNA
atatatatttgtgtttgttttgattcttggcgttgttataggtatctgtatttattactttattgattctgtaaa

SEQ ID NO: 638856 - DNA, 75 bp, synthetic construct
  source 1..75: mol_type = other DNA
cgttagatgcaagagccgtcaacctcgatcaggaagaagctgatagaaacgtctacgagttcgatctgacattgt

SEQ ID NO: 638857 - DNA, 75 bp, synthetic construct
  source 1..75: mol_type = other DNA
ccgtcgcgaagcactggtacaaaatctgcgtcagcaacttcaggaaattcgccagtgcctgcactgccggttgcc

SEQ ID NO: 638858 - DNA, 75 bp, synthetic construct
  source 1..75: mol_type = other DNA
ggcgggtgaaaacagcgtctggctgaacagctcccggcgcaggctgaccgccttttccgcctgtggcgcggcgct

SEQ ID NO: 638859 - DNA, 75 bp, synthetic construct
  source 1..75: mol_type = other DNA
tgcgtgaggtgacagaggccgcgaagggggatacgacgtggcagaacctacaggcttttcatgctgcggctacgc

SEQ ID NO: 638860 - DNA, 75 bp, synthetic construct
  source 1..75: mol_type = other DNA
aaggcaaattgttcccggatatggacgcagacgggcgtatcggcccccgcacgattaatgcactacgggcttatc

SEQ ID NO: 638861 - DNA, 75 bp, synthetic construct
  source 1..75: mol_type = other DNA
gatgacaaaggttgtcagcacctgttacgtgaatgtcggtcaattttcccggcgactgaactggcgaatgatttc

SEQ ID NO: 638862 - DNA, 75 bp, synthetic construct
  source 1..75: mol_type = other DNA
cggtgtacaacccggtccgttatttcaggatttgaaaaaaggcaaaacagtcacgctggaagacggtcggcagat

SEQ ID NO: 638863 - DNA, 75 bp, synthetic construct
  source 1..75: mol_type = other DNA
gatgacaaaggttgtcagcacctgttacgtgaatgcaggtcaattttcccggcgactgaactagggaaggtgcga

SEQ ID NO: 638864 - DNA, 75 bp, synthetic construct
  source 1..75: mol_type = other DNA
ttgatcatctccgagaaacaaaggcagtccaaacagtggctaactatctttctgcaatggcaaacattctcgatc

SEQ ID NO: 638865 - DNA, 75 bp, synthetic construct
  source 1..75: mol_type = other DNA
tagttttagatccttgtggaaactatctggtgaggatcgccataccaaagtacatgcgtcacctgttcggaggac

SEQ ID NO: 638866 - DNA, 75 bp, synthetic construct
  source 1..75: mol_type = other DNA
gaattaaaaagctcggtgccacaggctgattcagctgtagcggccccggaaaagattcagctaaatttcacggaa

SEQ ID NO: 638867 - DNA, 75 bp, synthetic construct
  source 1..75: mol_type = other DNA
ggcagaagttcagatgtacggcgagctgcgcgatgagctgcgggtgacggtttctttgtggctgggtgaaacgca

SEQ ID NO: 638868 - DNA, 75 bp, synthetic construct
  source 1..75: mol_type = other DNA
cgcgcccaggccgccgatattctggcgttgttcgatgaacgtctgcgccacgacgtgatgttgcgtatcgccacc

SEQ ID NO: 638869 - DNA, 75 bp, synthetic construct
  source 1..75: mol_type = other DNA
tgcgtatcgccacctttggcggtgtacagcctgccgcgctggcggaactgaccgaagtgctgaatggtctgctcg

SEQ ID NO: 638870 - DNA, 75 bp, synthetic construct
  source 1..75: mol_type = other DNA
gatggtttggcagaaaagcgcaacaaaatgctcactatgtgggtgacagaagacgagcaccgccgacttctggag

SEQ ID NO: 638871 - DNA, 75 bp, synthetic construct
  source 1..75: mol_type = other DNA
gacagggtacagattgtggcggcgctgatggccatcgatgccggacttgagcggctgcggcacgccgttcttgag

SEQ ID NO: 638872 - DNA, 75 bp, synthetic construct
  source 1..75: mol_type = other DNA
tttcatctgtggtgcaacgggcgctgggtcggttacggccaggacagtcgtttgccgtctgaatttgacctgagc

SEQ ID NO: 638873 - DNA, 75 bp, synthetic construct
  source 1..75: mol_type = other DNA
agagggcataaactcaacacagcgcagagccgccagagttacgaggcattcacggacgaagaaattacgaagctc

SEQ ID NO: 638874 - DNA, 75 bp, synthetic construct
  source 1..75: mol_type = other DNA
agaaagcgtgatcagattgcagatgaataccattgtctacgggagagtgtcgcccctgtaaacagcacaatagag

SEQ ID NO: 638875 - DNA, 75 bp, synthetic construct
  source 1..75: mol_type = other DNA
ccgtggcgatatgcgcgatttaacccgcgaacaggcactggaaatccttgaggctgattactggtacggaccacg

SEQ ID NO: 638876 - DNA, 75 bp, synthetic construct
  source 1..75: mol_type = other DNA
acgcgcgggcaggcgctggaaatactcgaggcggattactggttcggaccacgttttgaccaggtcgccgcatta

SEQ ID NO: 638877 - DNA, 75 bp, synthetic construct
  source 1..75: mol_type = other DNA
acgaagttctgggaaaagagggcggttacgtcaatcacccggatgataaaggcggtccgaccaaatggggcatta

SEQ ID NO: 638878 - DNA, 75 bp, synthetic construct
  source 1..75: mol_type = other DNA
tgtacgcagggggaccgctatctggaactggcagagaaacgcgaggctaacgaatcgtttgtttatggctggctg

SEQ ID NO: 638879 - DNA, 75 bp, synthetic construct
  source 1..75: mol_type = other DNA
actggtgatgctgaaggcgctgaattgcacgcagggcgaccgctatctggagctggcagaaaaacgcgaggccaa

SEQ ID NO: 638880 - DNA, 75 bp, synthetic construct
  source 1..75: mol_type = other DNA
actttcacccttaatgctgatgaacagaaagaaatcaaaattcacggtcgggtggtcgcttctttggctgtgagg

SEQ ID NO: 638881 - DNA, 75 bp, synthetic construct
  source 1..75: mol_type = other DNA
cgcttacctctggaatttatgtttacacaatggatgcttttggtcgcccatgccttttcattaagagaattgagc

SEQ ID NO: 638882 - DNA, 75 bp, synthetic construct
  source 1..75: mol_type = other DNA
ggtgaagttgctgataccgtattaaaaagcggtcagaaatctctgcctgtagatgtcaccattcacttgcaggat

SEQ ID NO: 638883 - DNA, 75 bp, synthetic construct
  source 1..75: mol_type = other DNA
tgtacccagggcgaactctatctggagctggcagagaagcgagaagccaaccagtcatttgtctacggctggctg

SEQ ID NO: 638884 - DNA, 75 bp, synthetic construct
  source 1..75: mol_type = other DNA
ctacgtcaatcacccggatgacagaggcggtccgacaaaatggggcatcactgaaaaggtggcacgggcgcacgg

SEQ ID NO: 638885 - DNA, 75 bp, synthetic construct
  source 1..75: mol_type = other DNA
gcattcttggaaaagagggcggctatgtggatcaccctgacgacaagggaggcccaacaaagtggggcattactc

SEQ ID NO: 638886 - DNA, 75 bp, synthetic construct
  source 1..75: mol_type = other DNA
attggcctattccgacgatgagcaactgtttttcatggaagaccagagtgttggctttggttttctatgcgaccc

SEQ ID NO: 638887 - DNA, 75 bp, synthetic construct
  source 1..75: mol_type = other DNA
tcccggtgtcatccagctcttcccggctggtgaattccgcgcccgtgacgggcgtccgaccgaatgcgccgcctg

SEQ ID NO: 638888 - DNA, 75 bp, synthetic construct
  source 1..75: mol_type = other DNA
gctgcgtcactggcgaaatccgatccggccagtcttaccgcctttatcgaaaaagcgccaaagattgccgcactg

SEQ ID NO: 638889 - DNA, 75 bp, synthetic construct
  source 1..75: mol_type = other DNA
gggaagagaaaggtaaagagatgaaggttgacgacatcgctgagcgctgtctggaagaagaaaacgaccagcgcc

SEQ ID NO: 638890 - DNA, 75 bp, synthetic construct
  source 1..75: mol_type = other DNA
cgcacgtctgcctcaacccgttcgagctcatacagaactacgaggacgaagaagacgcgattgtcagcctcgttt

SEQ ID NO: 638891 - DNA, 75 bp, synthetic construct
  source 1..75: mol_type = other DNA
ccggcgtgcatcttacatctgaaaagcccgattggatgaatggctttaagggatcggcgaacgcagctaaacgcg

SEQ ID NO: 638892 - DNA, 75 bp, synthetic construct
  source 1..75: mol_type = other DNA
gctctccactcgttcgaactgaagccgagctagaaagccggcttacttcagcactaaacatagcatttcctaaca

SEQ ID NO: 638893 - DNA, 75 bp, synthetic construct
  source 1..75: mol_type = other DNA
cgatattcagccataccatgctgatcctcgggatcgcggtgatcctcttcccgctgtacgtggcgtttgtcgcgg

SEQ ID NO: 638894 - DNA, 75 bp, synthetic construct
  source 1..75: mol_type = other DNA
tctacggctggaaccagtatctgtggccgctgctgattattaccgatgttgatctcggcaccaccgtggcgggga

SEQ ID NO: 638895 - DNA, 75 bp, synthetic construct
  source 1..75: mol_type = other DNA
ccaaacgaagctctggatgcagcgatgaatccggtttcaactatcccggaaggacgtcctgatgaggcttgctta

SEQ ID NO: 638896 - DNA, 75 bp, synthetic construct
  source 1..75: mol_type = other DNA
tcgccggtaaaagatatttataccgtcatttcaagagagggcgtgagctacgtcagcaaagatggcgattacatt

SEQ ID NO: 638897 - DNA, 75 bp, synthetic construct
  source 1..75: mol_type = other DNA
ggaacttgcgggtatacgttttggcaacaggctggtggttgttctgacgacctatcatgccaacgcgttactgaa

SEQ ID NO: 638898 - DNA, 75 bp, synthetic construct
  source 1..75: mol_type = other DNA
gccccaaccaaagaacgtgttgaagcggcagcgatggctgcacgaaacatctggcgtgagtctcggtttgaactt

SEQ ID NO: 638899 - DNA, 75 bp, synthetic construct
  source 1..75: mol_type = other DNA
aaatacggttgcaaataataaagcggtaggatggaactgggatagtggtgcttattgtgcacaggatggcggagc

SEQ ID NO: 638900 - DNA, 75 bp, synthetic construct
  source 1..75: mol_type = other DNA
ttgcggcaacgccaaaggcggtaaaggccgcgtatgaccttgctaacgggaaatacactgcacaggatgccacca

SEQ ID NO: 638901 - DNA, 75 bp, synthetic construct
  source 1..75: mol_type = other DNA
gtctgcctatgacaatgctgaaaaacgtcttcagaaagatcagaacggtgcggatattccgggaaaggatacctt

SEQ ID NO: 638902 - DNA, 75 bp, synthetic construct
  source 1..75: mol_type = other DNA
ccccgccatgcccactgtttcaccctgtaccacaacggtttcacctgcgaagccgatacccttggtagttgcggc

SEQ ID NO: 638903 - DNA, 75 bp, synthetic construct
  source 1..75: mol_type = other DNA
ttataataatttaagaccgctgattataaatgatgccacgggtgctgtatcaatggggcatggcctgaatgttac

SEQ ID NO: 638904 - DNA, 75 bp, synthetic construct
  source 1..75: mol_type = other DNA
tccagctcagtagcgccaccaacagtgattctgaaacgctggccgcaacaccaaaagcagtgaagtctgcctatg

SEQ ID NO: 638905 - DNA, 75 bp, synthetic construct
  source 1..75: mol_type = other DNA
tcattacggataccggatgtggtgatatccacctggctggttgtgtcgtcgaggtcatgggaactaaatctgcaa

SEQ ID NO: 638906 - DNA, 75 bp, synthetic construct
  source 1..75: mol_type = other DNA
ggtgtttttgcacggtttttccggcgattgccatgaatggcaagaagtgggcgaggcgtttgccgactactcgcg

SEQ ID NO: 638907 - DNA, 75 bp, synthetic construct
  source 1..75: mol_type = other DNA
caacggtcataaaagcaggcagtacgccggcttattatgctctgctatcctttacccgcccgcagctggcaatgc

SEQ ID NO: 638908 - DNA, 75 bp, synthetic construct
  source 1..75: mol_type = other DNA
cgctttgagcactgaagccggaaactggacaaccgcgcagtttattgactggctagagtctcagggagcctttaa

SEQ ID NO: 638909 - DNA, 75 bp, synthetic construct
  source 1..75: mol_type = other DNA
attacagaaatggcggtatcttttatcgttcagcgcgtgatggttatggctttgaagctaactggtcagagtttt

SEQ ID NO: 638910 - DNA, 75 bp, synthetic construct
  source 1..75: mol_type = other DNA
tgataaagctgttggctggaactggaatagcggcgtttatgatgcagatatcagtggcgcatcgacattaatcct

SEQ ID NO: 638911 - DNA, 75 bp, synthetic construct
  source 1..75: mol_type = other DNA
cgttcagcattacgctgggcaaaattaccgtttcgatgctctcggcattcgccatcgtctggtttcgttttccgc

SEQ ID NO: 638912 - DNA, 75 bp, synthetic construct
  source 1..75: mol_type = other DNA
gaagcatctgactggtaagatttttactcagcacattgagcgtaacaatctgaccctgagaacccgaatcaaacg

SEQ ID NO: 638913 - DNA, 75 bp, synthetic construct
  source 1..75: mol_type = other DNA
aaacggctggcccgcaaaacgctctgttgttcacgttctgttgagctccatgaaaaagtcatcggggcattcatc

SEQ ID NO: 638914 - DNA, 75 bp, synthetic construct
  source 1..75: mol_type = other DNA
taacctgacgctgagaacccgaatcaaacggctggcccgcaaaacgctctgttgttcacgttctgttgagctcca

SEQ ID NO: 638915 - DNA, 75 bp, synthetic construct
  source 1..75: mol_type = other DNA
taatctgacgctacgcacccgcattaagcggttgggtcgtaaaacaatctgcttctcacgctcagttgagatcca

SEQ ID NO: 638916 - DNA, 75 bp, synthetic construct
  source 1..75: mol_type = other DNA
accggcagacgtcgctgcacaggcacgtcagtcgctggataacgtaaaagcgatcgtcgaagccgctggcctgaa

SEQ ID NO: 638917 - DNA, 75 bp, synthetic construct
  source 1..75: mol_type = other DNA
acccgcattaagcggttggctcgtaaaacaatctgcttctcacgctcagttgagatccacgaaaaagtgatcgga

SEQ ID NO: 638918 - DNA, 75 bp, synthetic construct
  source 1..75: mol_type = other DNA
tgcggtaatcgacatcggcggtcaggacagcaaagtgattcagctcgatagcgacggcaacctgtgcgacttcct

SEQ ID NO: 638919 - DNA, 75 bp, synthetic construct
  source 1..75: mol_type = other DNA
ccgtgacgcatatcgtatcgcgttgggtacaacctactattacgataaaaactggaccttccgtaccggtatcgc

SEQ ID NO: 638920 - DNA, 75 bp, synthetic construct
  source 1..75: mol_type = other DNA
ttcaggggaaggcgcaattgccgatgatgccggtaacgtcagccgtaaccccgcgttgattaccatgtttgaccg

SEQ ID NO: 638921 - DNA, 75 bp, synthetic construct
  source 1..75: mol_type = other DNA
tacgcacccgcattaagcagttggctcgtaaaaaacaatctgcttctcacgctcagttgagatccacgaaaaagt

SEQ ID NO: 638922 - DNA, 75 bp, synthetic construct
  source 1..75: mol_type = other DNA
atggagctacgttaccggcaacactggctctggtacgcgtacaacaccaaaacaggcggtgtactgtcctacact

SEQ ID NO: 638923 - DNA, 75 bp, synthetic construct
  source 1..75: mol_type = other DNA
tactggcctacacttttggtccacgtaccgatgaaacctgtcgtgaattgctggcattgctcacaccctttaata

SEQ ID NO: 638924 - DNA, 75 bp, synthetic construct
  source 1..75: mol_type = other DNA
acaagcccgatagataacttgtctatcttcttaatcacgctggcaattttggcttgtatggcggtagtggcagcc

SEQ ID NO: 638925 - DNA, 75 bp, synthetic construct
  source 1..75: mol_type = other DNA
aagaattcttttatctcaaacaaactaagtaatttgtctactaaattcaacattaggtcatcaagtaataacgat

SEQ ID NO: 638926 - DNA, 75 bp, synthetic construct
  source 1..75: mol_type = other DNA
ctgccgaactggctgatgttaccagcgaggacgatatcacagtcttgcgtcatgttcgtgctagcgccgaaaagc

SEQ ID NO: 638927 - DNA, 75 bp, synthetic construct
  source 1..75: mol_type = other DNA
gcgttgtacaaggagttgcggatcgcaagccgtgcgaggattttgatgcgttcaaaccactatttgagcaggtac

SEQ ID NO: 638928 - DNA, 75 bp, synthetic construct
  source 1..75: mol_type = other DNA
caatattcagccataccatgctgatcctcgggatcgcggtgatcctcttcccactgtacgtggcgtttgtcgcgg

SEQ ID NO: 638929 - DNA, 75 bp, synthetic construct
  source 1..75: mol_type = other DNA
gccgcgcggatcgacggcgcatcgccaatgcgcttcttttgcgacatcgtttttccgttgtccaaaactaatctg

SEQ ID NO: 638930 - DNA, 75 bp, synthetic construct
  source 1..75: mol_type = other DNA
gccgttgttgattattaccgacgttgatctcggcaccaccgtggcagggatcaaagggatgatcgctacaggcga

SEQ ID NO: 638931 - DNA, 75 bp, synthetic construct
  source 1..75: mol_type = other DNA
cggtggcaacggcggtggctgggtaaaccaaacaggcggctttgatgctctgtccagcgaggaccaggacaaggc

SEQ ID NO: 638932 - DNA, 75 bp, synthetic construct
  source 1..75: mol_type = other DNA
aatcagaccgccggaggacgcctggcatcctcaattcgtgaaagcatggagccaaagagtgataacgatgctggt

SEQ ID NO: 638933 - DNA, 75 bp, synthetic construct
  source 1..75: mol_type = other DNA
gccggtgcagccgtcgcatcgggtggtgctgcgcttggaagcgctgcaatatccggggcgactaatatggccggt

SEQ ID NO: 638934 - DNA, 75 bp, synthetic construct
  source 1..75: mol_type = other DNA
acctcatgggtacattgaaaaggtatctatagatagaattgagattcttccccttactcctgaagaagaaacgta

SEQ ID NO: 638935 - DNA, 75 bp, synthetic construct
  source 1..75: mol_type = other DNA
cgtggtaatcgaaaaactaccgcgcactgcctcaggtaaaatacaaaagtttttgttaagaaaagatattatgcg

SEQ ID NO: 638936 - DNA, 75 bp, synthetic construct
  source 1..75: mol_type = other DNA
atataaaaattaccggacgcaaaaaagatattattgtccgcggcggcgaaaatattagcagccgtgaagtggaag

SEQ ID NO: 638937 - DNA, 75 bp, synthetic construct
  source 1..75: mol_type = other DNA
aagaaaaaatcagcaaaatgccaaaaggttctgttcctgccctacagcaagaaatgctgcgacaaatcagtaagc

SEQ ID NO: 638938 - DNA, 75 bp, synthetic construct
  source 1..75: mol_type = other DNA
ttgtctggagattcagggggccagtctacgggggtttatggcactctgctgccggataataacctgaattatagc

SEQ ID NO: 638939 - DNA, 75 bp, synthetic construct
  source 1..75: mol_type = other DNA
tgaagaatgcctggaactgctggaaaaggacatgaaatgggcctttgcggccattgatcggcgtgttcaggtgcc

SEQ ID NO: 638940 - DNA, 75 bp, synthetic construct
  source 1..75: mol_type = other DNA
ctttgccgctaatttgggcaaaaacgcgtttgttaagcgatgatccagcaaaaggagaaggtaaggcaaagcgcc

SEQ ID NO: 638941 - DNA, 75 bp, synthetic construct
  source 1..75: mol_type = other DNA
gttatagagagcgaagcgctggcgcaactgatcgataaacgctttattcagagtcagtatgatgcggcctggcag

SEQ ID NO: 638942 - DNA, 75 bp, synthetic construct
  source 1..75: mol_type = other DNA
ggagaagagccacttttttcagatttagatgtcctggcaatagggccggttgttgaggatgttgccgatgatttt

SEQ ID NO: 638943 - DNA, 75 bp, synthetic construct
  source 1..75: mol_type = other DNA
taattcctaccctgctcgccgcaggtgctgcacatgcagccgaagtttataataaagacggcaacaaattagatc

SEQ ID NO: 638944 - DNA, 75 bp, synthetic construct
  source 1..75: mol_type = other DNA
gttgcgacttaccgcaataccgatttctttggactggttaacggcctgaattttgccgtgcagtatcagggcaat

SEQ ID NO: 638945 - DNA, 75 bp, synthetic construct
  source 1..75: mol_type = other DNA
cacctttggacagccgctgggcgacacaatggttctggttaaggctcctggcgctgataatgtcaaaatagagaa

SEQ ID NO: 638946 - DNA, 75 bp, synthetic construct
  source 1..75: mol_type = other DNA
gcgctggataccaataccctggctgataacgtcgatttagataacgcggtcgctaacgttgttcccactcgtggg

SEQ ID NO: 638947 - DNA, 75 bp, synthetic construct
  source 1..75: mol_type = other DNA
gtgccgtttggtgatattacgacttcgctgaattacagctattccaataatatatggcaaaacgatcgggatcat

SEQ ID NO: 638948 - DNA, 75 bp, synthetic construct
  source 1..75: mol_type = other DNA
tttgcgacagaatatagagaaaatcgtgtcgctcttaacgcgaattcccttgcagataatgttgaactggatgaa

SEQ ID NO: 638949 - DNA, 75 bp, synthetic construct
  source 1..75: mol_type = other DNA
atgggtatattccttgttttatgcttttgtgatattcatcacattgagcatagttgcttacagcaggtgctggat

SEQ ID NO: 638950 - DNA, 75 bp, synthetic construct
  source 1..75: mol_type = other DNA
tctgttacgcgcaccgcagataaagattctgcaaaaacttttgttcaggaaacgctgaaagatacctgggaatct

SEQ ID NO: 638951 - DNA, 75 bp, synthetic construct
  source 1..75: mol_type = other DNA
aaaagccaccagcaacgatggcctttctgttacgcgcaccgccgataaagattctgcaaaaacttttgttcagga

SEQ ID NO: 638952 - DNA, 75 bp, synthetic construct
  source 1..75: mol_type = other DNA
atgcgtgttgagatctgtattgctaaagaaaaaatcagcaaaatgccaaaaggttctgttcctgccctacagcaa

SEQ ID NO: 638953 - DNA, 75 bp, synthetic construct
  source 1..75: mol_type = other DNA
tcgatgcgggcatggcttgtgtccacgtcttgtttattcgtcagggcaaggtgctcggtagccgtagttatttcc

SEQ ID NO: 638954 - DNA, 75 bp, synthetic construct
  source 1..75: mol_type = other DNA
gcaaagcgaaagacctgaaaaaacggctttccagctatttccgtagcaacctcgcttcgcgcaaaaccgaagcgt

SEQ ID NO: 638955 - DNA, 75 bp, synthetic construct
  source 1..75: mol_type = other DNA
caccgccgataaagattcagctaaaacttttgttcaggagacgctgaaagatacctgggagtctgctgacgagtg

SEQ ID NO: 638956 - DNA, 75 bp, synthetic construct
  source 1..75: mol_type = other DNA
gcaacatccccactgctgaactgatccccgcactctgcttcgcggtcatctttatctttgcccgtttccgctctc

SEQ ID NO: 638957 - DNA, 75 bp, synthetic construct
  source 1..75: mol_type = other DNA
gcagcatgttctggatgtatccgaaggtgaaatggctgatcgtattgaattacccgcatcctggcgtaacgacag

SEQ ID NO: 638958 - DNA, 75 bp, synthetic construct
  source 1..75: mol_type = other DNA
atgacgatgccatgacgcatcgttatttacgcaaaatggaatccagcccgtttataaatcatctggttgatggaa

SEQ ID NO: 638959 - DNA, 75 bp, synthetic construct
  source 1..75: mol_type = other DNA
ccataatgcacttgatgacgcccgttaccaggcaaaatacgtttcagctatctggcaaaaactgatcccgagtca

SEQ ID NO: 638960 - DNA, 75 bp, synthetic construct
  source 1..75: mol_type = other DNA
tgcagagtgataatcacagtgacgccaaacaaggacgttctccgcatcgctttctcgcctggcgcgtattcgcca

SEQ ID NO: 638961 - DNA, 75 bp, synthetic construct
  source 1..75: mol_type = other DNA
atgcagggcaaagcagaagttacattattccattcgcgctgctgtgctcacttgttttttctttgggcggtagcc

SEQ ID NO: 638962 - DNA, 75 bp, synthetic construct
  source 1..75: mol_type = other DNA
gcccgggtgttgatcctggatgaaataggctatctgccgatgaacagagaggaagccagcctgttcttccggcta

SEQ ID NO: 638963 - DNA, 75 bp, synthetic construct
  source 1..75: mol_type = other DNA
gaggcgagcctgttcttccggctgctgaaccgccggtatgaaaaagcgagcatcatcctgacgtcaaacaaaggg

SEQ ID NO: 638964 - DNA, 75 bp, synthetic construct
  source 1..75: mol_type = other DNA
caccgcgtcaccgaatacctgaataaagtgctgaccgaaaccgatcatgccaaccctgatccggaaatcgtggat

SEQ ID NO: 638965 - DNA, 75 bp, synthetic construct
  source 1..75: mol_type = other DNA
ttgcgcctttgtcggcaacgacttatgcgtaaattacgcgcgaataagccagcgccatcagacgaacctgagcaa

SEQ ID NO: 638966 - DNA, 75 bp, synthetic construct
  source 1..75: mol_type = other DNA
cagccagcactgacaacaccaatgttaatggcgaagacatgactgagattgaggagaatatgcttctgccggttt

SEQ ID NO: 638967 - DNA, 75 bp, synthetic construct
  source 1..75: mol_type = other DNA
ctgaatatcaaaggagagagttaccggttaaaagagaaacgtaaagctggagtgctggccaaaaacacaacgcca

SEQ ID NO: 638968 - DNA, 75 bp, synthetic construct
  source 1..75: mol_type = other DNA
ccatccggcgctaacgctggcggcggtattcttaccgatcgcggcgaaggttttgtgcatgataatgcgtcaatg

SEQ ID NO: 638969 - DNA, 75 bp, synthetic construct
  source 1..75: mol_type = other DNA
accacactgaacatcaaaggagaaagctaccggttaaaggaaaaacgcaaagcgggagtgctggcaaaaaacgcc

SEQ ID NO: 638970 - DNA, 75 bp, synthetic construct
  source 1..75: mol_type = other DNA
tcgcatcccgccgtggtccctgtatcagacattccatggcgtgaattacctttttaatatttcatccatgctgca

SEQ ID NO: 638971 - DNA, 75 bp, synthetic construct
  source 1..75: mol_type = other DNA
tgcaataatgatctttataagacgcttgaatcaatcgcaagagaatctcataaaaggaacatagtaataatgaca

SEQ ID NO: 638972 - DNA, 75 bp, synthetic construct
  source 1..75: mol_type = other DNA
ttgcgcctttgtcggcagcgattaatgcgcaaattacgtgtaaataagccagcgccatcagacgaaccggagcaa

SEQ ID NO: 638973 - DNA, 75 bp, synthetic construct
  source 1..75: mol_type = other DNA
tgtcgcggctgttttcgtagtcgggatgagcgttttaactggaataaaatgagcgatggcgaaaaacaagaggtg

SEQ ID NO: 638974 - DNA, 75 bp, synthetic construct
  source 1..75: mol_type = other DNA
atggcggagcaattagagttctttcccgtccagagcccgtgccggggaatttgccagtctgatgagcgcggattt

SEQ ID NO: 638975 - DNA, 75 bp, synthetic construct
  source 1..75: mol_type = other DNA
ggcgctaacgctggcggcggcattcttaccgatcgcggcgaaggttttgtccacgatgatgcgtcagtggcgcgt

SEQ ID NO: 638976 - DNA, 75 bp, synthetic construct
  source 1..75: mol_type = other DNA
cgctttccagagctggcgctggcacaggcattacagggagctgaaatcctggtacttcctgccgcctgggttcgc

SEQ ID NO: 638977 - DNA, 75 bp, synthetic construct
  source 1..75: mol_type = other DNA
tttacggcgagaaagtaaacgtaacatgatgacgacaattctgacgattcatgttccttcaacgccggggcgcgc

SEQ ID NO: 638978 - DNA, 75 bp, synthetic construct
  source 1..75: mol_type = other DNA
gatttggtgtttcgctggggtggtgaagagtttgtcttattattgcccagaacccctctggatactgcactttcc

SEQ ID NO: 638979 - DNA, 75 bp, synthetic construct
  source 1..75: mol_type = other DNA
gcgggaaacattgtcgcccgttatgccaaactgcatctctatgatgcatttgccattcaggagtcacgccatgtt

SEQ ID NO: 638980 - DNA, 75 bp, synthetic construct
  source 1..75: mol_type = other DNA
gcggcgggggagtgcgggaacaaaaatatcgggcaaagccggattatagatccctttggcgtcaccattgcggca

SEQ ID NO: 638981 - DNA, 75 bp, synthetic construct
  source 1..75: mol_type = other DNA
cggaagtgacgcccgaacgtgtgcgtcaggtgcgcgcgcaactgcccgtcttaaacaaccgtcgctttgcgccgc

SEQ ID NO: 638982 - DNA, 75 bp, synthetic construct
  source 1..75: mol_type = other DNA
atggttcgactcgtcatgtgcagacctatgccggaccgattgaaatttatggcgacaagctcatgttatgtattg

SEQ ID NO: 638983 - DNA, 75 bp, synthetic construct
  source 1..75: mol_type = other DNA
gcgataacgtgctggcaacggcaatcctggatcgactgctccaccactcaaccacactgaacatcaaaggagaaa

SEQ ID NO: 638984 - DNA, 75 bp, synthetic construct
  source 1..75: mol_type = other DNA
gcatcgtacatgatattactgagcaaaaaaggctcgaggaacagctggaacatgcggcccaccatgatgcgctaa

SEQ ID NO: 638985 - DNA, 75 bp, synthetic construct
  source 1..75: mol_type = other DNA
gtatcgtacatgatattactgagcaaaaaaggctggaggaacagctggaacatgctgcccaccatgatgcgctaa

SEQ ID NO: 638986 - DNA, 75 bp, synthetic construct
  source 1..75: mol_type = other DNA
aacaccactggataccgcgctttcgttggctgaagctatccgcttgagcgtggcaaaagtgagtatttctggctt

SEQ ID NO: 638987 - DNA, 75 bp, synthetic construct
  source 1..75: mol_type = other DNA
atgatgaagaaagtaatggtggacagcgtatcagtgccatggcagcttttgtgtgatgaacatggttttaccccg

SEQ ID NO: 638988 - DNA, 75 bp, synthetic construct
  source 1..75: mol_type = other DNA
ttcaggagcgagaaggaagcggaatcctggttaaatgaactatcttttgctgtgattgctccgctataccgtgtt

SEQ ID NO: 638989 - DNA, 75 bp, synthetic construct
  source 1..75: mol_type = other DNA
cgtgcgctctttatgatatgttattgcaccttgttttgcgaaattcggaaggtcaggctgaatatctgagacaac

SEQ ID NO: 638990 - DNA, 75 bp, synthetic construct
  source 1..75: mol_type = other DNA
gtgttgcccccgaacaaacagaacaggttgagtcctttgttctgcagcttattgccgagcaggagcgggtttggg

SEQ ID NO: 638991 - DNA, 75 bp, synthetic construct
  source 1..75: mol_type = other DNA
tcagcccggaggcattacgtgaaattattgctgaaatagcctgctgccatccgtcaaccagtatattgctcagga

SEQ ID NO: 638992 - DNA, 75 bp, synthetic construct
  source 1..75: mol_type = other DNA
ggttgagtcctttgttctgcagcttattgccgaacaggagcgggtttgggagcttattctaaccaatgatggtta

SEQ ID NO: 638993 - DNA, 75 bp, synthetic construct
  source 1..75: mol_type = other DNA
tttggtgcgaataacgttggtgtgcgggcaggcgttatctttgcgaccctgttaaccgccgcgctggtggcctgg

SEQ ID NO: 638994 - DNA, 75 bp, synthetic construct
  source 1..75: mol_type = other DNA
attacttacccgtgttcattgccggaagcctgccctggttgggattacttccgggcgccttgcgaactggctggc

SEQ ID NO: 638995 - DNA, 75 bp, synthetic construct
  source 1..75: mol_type = other DNA
gttatgacgaaaggttttatcgctctggccgtcccggtcttgagcgtgctgccatgggtggcaatgcaaaaacgc

SEQ ID NO: 638996 - DNA, 75 bp, synthetic construct
  source 1..75: mol_type = other DNA
tccaaatggttaaatcagcatcgccaggaggggattattacactcgtgctttcggttgaccacgatgaagacatc

SEQ ID NO: 638997 - DNA, 75 bp, synthetic construct
  source 1..75: mol_type = other DNA
gttcatggtcgattttttcgctatgggcacttttcggctggtacacattaacgaaagtggaaaaaacctggccct

SEQ ID NO: 638998 - DNA, 75 bp, synthetic construct
  source 1..75: mol_type = other DNA
acgcaccaacagttggataaatatcgcatttggcgttattggcattattgccacgtttattgtttccccctgggg

SEQ ID NO: 638999 - DNA, 75 bp, synthetic construct
  source 1..75: mol_type = other DNA
atggatacgggcatttaaatcaaagagcctttcagttacctcctcccggagaacgaacatgaatgcatatggaca

SEQ ID NO: 639000 - DNA, 75 bp, synthetic construct
  source 1..75: mol_type = other DNA
atgacagacaacggagcccctgaatacccgacgaaaacaaaccttggtgcctcgagccatctttattttgttcag

SEQ ID NO: 639001 - DNA, 75 bp, synthetic construct
  source 1..75: mol_type = other DNA
tggtcgccataaccgtggtaatacagtgtctggccgttcagatgagtcgctatcgactctcccggatgaatgccc

SEQ ID NO: 639002 - DNA, 75 bp, synthetic construct
  source 1..75: mol_type = other DNA
cagtttcaataaggccaaggcgcagcgcaagtacaaaaaaatgcaggaagataaagtcaatgtacagttttttct

SEQ ID NO: 639003 - DNA, 75 bp, synthetic construct
  source 1..75: mol_type = other DNA
ctgacaacactaatgtgaccctgggtactccagtcaccatcaatttccctaccaccaactcattccaggagctga

SEQ ID NO: 639004 - DNA, 75 bp, synthetic construct
  source 1..75: mol_type = other DNA
gatgaagatcaaaccatcaaccttggtgaagttgccagcactgtattgaacagtggacaaaaatctctgccggta

SEQ ID NO: 639005 - DNA, 75 bp, synthetic construct
  source 1..75: mol_type = other DNA
aaaatgaaatcacagagagcaaccagccaggaagagttctccttcagattattacgcagttctgcaatacagacg

SEQ ID NO: 639006 - DNA, 75 bp, synthetic construct
  source 1..75: mol_type = other DNA
cgcgttctgcacaggatgcctcactggatgccttcgaacgcttctttaaaccggatggcatactggataccttct

SEQ ID NO: 639007 - DNA, 75 bp, synthetic construct
  source 1..75: mol_type = other DNA
aaatgattttggctatgctgggtttggtggcgcgtgtcctcctaaaggagataaaccacatcattaccagtttaa

SEQ ID NO: 639008 - DNA, 75 bp, synthetic construct
  source 1..75: mol_type = other DNA
gcacctacaggcagtggttggtggcattggactgttgttaatattccagcaacaataacatatttgcccgttgat

SEQ ID NO: 639009 - DNA, 75 bp, synthetic construct
  source 1..75: mol_type = other DNA
cgctttattatcggactgcacaggaggctttgcgccttgagcagtccggcgagtatgaccgggcggcgaaggtct

SEQ ID NO: 639010 - DNA, 75 bp, synthetic construct
  source 1..75: mol_type = other DNA
taacgaactgaatcaggactggagcgaacgccggtctgatttttgcctgatgcagaacatgcgcgaaaagcgtaa

SEQ ID NO: 639011 - DNA, 75 bp, synthetic construct
  source 1..75: mol_type = other DNA
cgctgtactaccggactgcgcgggaggctttgcgccttgagcagtccggtgaatacgacctggcggcgaaggtct

SEQ ID NO: 639012 - DNA, 75 bp, synthetic construct
  source 1..75: mol_type = other DNA
tattcaacgctttgcaatggatgatgctcagcatagagctccgttctggtactacttgccggtcatcattgccgg

SEQ ID NO: 639013 - DNA, 75 bp, synthetic construct
  source 1..75: mol_type = other DNA
tgcgccagcgttacggcaatcgctatgacctgacgcgagatgttgacggcttctactgtcgtgaaattgtgaaac

SEQ ID NO: 639014 - DNA, 75 bp, synthetic construct
  source 1..75: mol_type = other DNA
atgaataaagcatttgaacgatggggccaccagcgttacggcaatcgctatgacctgacgcgagatggtgacggt

SEQ ID NO: 639015 - DNA, 75 bp, synthetic construct
  source 1..75: mol_type = other DNA
atgaaaaaaattgcatgtgtttcagcactggccgcagttctggctttcaccgcaggtacttccgtagctgcgact

SEQ ID NO: 639016 - DNA, 75 bp, synthetic construct
  source 1..75: mol_type = other DNA
ttgatgcggttgtattgcagcaaacagggcttacattgcggcaggcacaacgctttctttcatttccgcgaaaga

SEQ ID NO: 639017 - DNA, 75 bp, synthetic construct
  source 1..75: mol_type = other DNA
cgcccctgaaaattcattttattcaccagatcagcaagacgtggcattgccatttcctgagctcctggctaacgt

SEQ ID NO: 639018 - DNA, 75 bp, synthetic construct
  source 1..75: mol_type = other DNA
gtcgtcgctgaacgtgccggtcaacctgtgccagaggtagttactcaactactcgaactggagttagcaggatgg

SEQ ID NO: 639019 - DNA, 75 bp, synthetic construct
  source 1..75: mol_type = other DNA
acaccctgactggcagaatgctaaagaaggcgggacagtggcctgggttttcgactgcatcaaaatcgacccatt

SEQ ID NO: 639020 - DNA, 75 bp, synthetic construct
  source 1..75: mol_type = other DNA
cggcgcgcagcgtggcgttccagaaacagccggataacgccaacgctaaggccggtaatacgatgccgtgggtgt

SEQ ID NO: 639021 - DNA, 75 bp, synthetic construct
  source 1..75: mol_type = other DNA
cccagaccatgggcggcaacaagaacactatgaccatcggtgccgatggcgaagtgatgcacagcctgcacgccg

SEQ ID NO: 639022 - DNA, 75 bp, synthetic construct
  source 1..75: mol_type = other DNA
ttctcttacgagcagagccgtattcgtaacgttgacgtaggcacctggattgccggtgttggttaccgcttctaa

SEQ ID NO: 639023 - DNA, 75 bp, synthetic construct
  source 1..75: mol_type = other DNA
ttctcctacgagcagagccgtattcgtagcgttgatgtaggcacctggattgccggtgttggttaccgcttctaa

SEQ ID NO: 639024 - DNA, 75 bp, synthetic construct
  source 1..75: mol_type = other DNA
cactggccgcagttctggctttcaccgcaggtacttccgtagctgcgacttctaccgtaactggcggttacgcac

SEQ ID NO: 639025 - DNA, 75 bp, synthetic construct
  source 1..75: mol_type = other DNA
cggcgtatggcgtgacaattaccagcggcctggcgcgtggaatcgacggtgtggcgcataaagcggccttgcagg

SEQ ID NO: 639026 - DNA, 75 bp, synthetic construct
  source 1..75: mol_type = other DNA
atgtttgagtcttatatggcagaactccttcgccaccgttggctgcgcctgcgcttatatcgttttcccggttct

SEQ ID NO: 639027 - DNA, 75 bp, synthetic construct
  source 1..75: mol_type = other DNA
tctgcaagattatgccgatcgactgattgaacgctacagtaacccggctttacgccaccggacctggcagattgc

SEQ ID NO: 639028 - DNA, 75 bp, synthetic construct
  source 1..75: mol_type = other DNA
tattcacagataaagtaacagaggcgtatttgtctttattgactgaaggcgcgaaagcaaccgtggcaaaatata

SEQ ID NO: 639029 - DNA, 75 bp, synthetic construct
  source 1..75: mol_type = other DNA
aacagtctcgccattccgcccgcagatgccatcgatcgtcaggagcgtctggtgctgattcagtatcgtcccaaa

SEQ ID NO: 639030 - DNA, 75 bp, synthetic construct
  source 1..75: mol_type = other DNA
atgaaatcggtacgttaccttatcggcctcttcgcgtttattgcctgctattacctgttaccgatcagcacgcgt

SEQ ID NO: 639031 - DNA, 75 bp, synthetic construct
  source 1..75: mol_type = other DNA
ccagcggtattgactacggtgttacggtactgcccacattccagggacaaaaggctagaccatttgtgggggtcg

SEQ ID NO: 639032 - DNA, 75 bp, synthetic construct
  source 1..75: mol_type = other DNA
cagtgccggatgctcacccgtgtccggcacacgcactccacctcacccgtggagaactcctttattaccaacctg

SEQ ID NO: 639033 - DNA, 75 bp, synthetic construct
  source 1..75: mol_type = other DNA
tcagtaaactgtcagtgccggatgctcacccgtgtccggcgcacgcactccacctcacccgtggagaactcctta

SEQ ID NO: 639034 - DNA, 75 bp, synthetic construct
  source 1..75: mol_type = other DNA
cccggtccattagggagtccgggaagcgaagggtctcactggttaataaaacaaggtgcgactcttgtgacggaa

SEQ ID NO: 639035 - DNA, 75 bp, synthetic construct
  source 1..75: mol_type = other DNA
atgtttgagttttatatggcagaacttcttcgccaccgctggatgcgcctgcgcttatatcgtttccccagttct

SEQ ID NO: 639036 - DNA, 75 bp, synthetic construct
  source 1..75: mol_type = other DNA
tgtgcagttggctgattttagccatattaattatataataactgataaatctcctggcgcagaatgggttgagtt

SEQ ID NO: 639037 - DNA, 75 bp, synthetic construct
  source 1..75: mol_type = other DNA
caataaaaccactatggcagccgattccagtagtaccgttatggaattgctcaaattgttgcaggaccgtagtga

SEQ ID NO: 639038 - DNA, 75 bp, synthetic construct
  source 1..75: mol_type = other DNA
gcatttccgcattttatcagtcagatggaatcgatgctgaccactggtgaaatgaatcctcggcatgcccattgc

SEQ ID NO: 639039 - DNA, 75 bp, synthetic construct
  source 1..75: mol_type = other DNA
agatattccggcactttcagatcttatcgataccatgatcccgcagggatttaactatcagcgtgataacgagat

SEQ ID NO: 639040 - DNA, 75 bp, synthetic construct
  source 1..75: mol_type = other DNA
ggcgcaccggcagctccggagccggaaggtatcgcgggtgaggggagtgcttcagatagcggtgaccccacaccg

SEQ ID NO: 639041 - DNA, 75 bp, synthetic construct
  source 1..75: mol_type = other DNA
gacgcccagcaggtcgataaggctacctttgtggggcattcaatgggcgggaaagcagtaatggcactgaccgcg

SEQ ID NO: 639042 - DNA, 75 bp, synthetic construct
  source 1..75: mol_type = other DNA
aacctatgactttgctgacgcaccaaccaaactgctgaccaccgttcaggactgctgggtcatgcatccgggcga

SEQ ID NO: 639043 - DNA, 75 bp, synthetic construct
  source 1..75: mol_type = other DNA
taccggtggcggaaatcaccccgcgtgaagcgtacaacgcgattgtcgacaacaatgtcgaactggtatccattg

SEQ ID NO: 639044 - DNA, 75 bp, synthetic construct
  source 1..75: mol_type = other DNA
tcattaataaccaggctgatatcgccattggcgcgcccgatacgttactggacggtggtggaattgattacattg

SEQ ID NO: 639045 - DNA, 75 bp, synthetic construct
  source 1..75: mol_type = other DNA
tattcttgctgattcagactaaaacgcatcagagtttgtttgtctatgagcatgaagatgacagcgatgatgacg

SEQ ID NO: 639046 - DNA, 75 bp, synthetic construct
  source 1..75: mol_type = other DNA
acattaatgcgcgatacgctctattcaattattatgattgttaccggcggactggttggtttttcattactgctg

SEQ ID NO: 639047 - DNA, 75 bp, synthetic construct
  source 1..75: mol_type = other DNA
tcgcctttctgacgggcaacgaattgcagtttgctcttggtgcaccggagatggtggtgatggtggcctctttag

SEQ ID NO: 639048 - DNA, 75 bp, synthetic construct
  source 1..75: mol_type = other DNA
gatgcacagcagatcgacaaagcaacatttatcggtcactccatgggcggtaaagcggtaatggcacttactgca

SEQ ID NO: 639049 - DNA, 75 bp, synthetic construct
  source 1..75: mol_type = other DNA
taaagcggtaatggcgctcactgcactggctcccgatcgcatcgataaactggtggcgattgatatcgcgccggt

SEQ ID NO: 639050 - DNA, 75 bp, synthetic construct
  source 1..75: mol_type = other DNA
cacgaggatgacagcgatgatgacgatccgcaccacggcaaaccgtctgcccatagcagtctgtggcatgctgtc

SEQ ID NO: 639051 - DNA, 75 bp, synthetic construct
  source 1..75: mol_type = other DNA
gctgaaagaaaacaaccctggcgcacggttgaatgaagcctattccggcctaccggtggcggaaatcaccccgcg

SEQ ID NO: 639052 - DNA, 75 bp, synthetic construct
  source 1..75: mol_type = other DNA
tcatatcaatgcagttatcgattccttgactgcgggtcagaaaaaaattcttattacggcattatcgaggaacta

SEQ ID NO: 639053 - DNA, 75 bp, synthetic construct
  source 1..75: mol_type = other DNA
gaaaatacttgcttcagtaaaatattactcgcctcgaggatgtcgatggccagaagactacttgagttacggcaa

SEQ ID NO: 639054 - DNA, 75 bp, synthetic construct
  source 1..75: mol_type = other DNA
gaaaatacctgtttcagtaaaatattactcgcttccaggatgtcgatggccagacgattactcgagttacgtcaa

SEQ ID NO: 639055 - DNA, 75 bp, synthetic construct
  source 1..75: mol_type = other DNA
ggcgcaccggctgttccggagccggaaggcattgcgggtgacgggagtgcttcagatggcggtgaacccacaccc

SEQ ID NO: 639056 - DNA, 75 bp, synthetic construct
  source 1..75: mol_type = other DNA
ggcgtaccagcggttccggagccggaaggtatcgcgggggacgggagtgcttcagatggcggtgaacccacacct

SEQ ID NO: 639057 - DNA, 75 bp, synthetic construct
  source 1..75: mol_type = other DNA
agaaggctttaacttcattggtaccggtgtttccggcggtgaagaaggtgcgctgaaaggtccttccattatgcc

SEQ ID NO: 639058 - DNA, 75 bp, synthetic construct
  source 1..75: mol_type = other DNA
aaaccaaagccctgatcgacagcctgaaaagcatctgtgcgaactacggcctgggcaacgacggtaacgaattca

SEQ ID NO: 639059 - DNA, 75 bp, synthetic construct
  source 1..75: mol_type = other DNA
tggggttaggcggcatcgcgcaaaaagcgtggttaccggtgctggcggcagcgtctgactggacgttacaaggtg

SEQ ID NO: 639060 - DNA, 75 bp, synthetic construct
  source 1..75: mol_type = other DNA
aaactgatttttcaacctgcagaggaaggtacgcgtggcgcgcgggcgatggtcgatgcaggtgtagtggatgat

SEQ ID NO: 639061 - DNA, 75 bp, synthetic construct
  source 1..75: mol_type = other DNA
tggcaaggcggcggtcgtggtcccaactggttttatcaccgcgcagtcgggtattgataaagggattcgcgaaca

SEQ ID NO: 639062 - DNA, 75 bp, synthetic construct
  source 1..75: mol_type = other DNA
gccgcgccattatcaacaaactggccgatttcagcttcgaacgcatcttcacgcagaaattcgacttctacgcca

SEQ ID NO: 639063 - DNA, 75 bp, synthetic construct
  source 1..75: mol_type = other DNA
tctgcatccgttccacaaggacggcggcgcgctgaaacgctttgactacatcgtctccaacccgccgtttaagat

SEQ ID NO: 639064 - DNA, 75 bp, synthetic construct
  source 1..75: mol_type = other DNA
gagtctgttttttggtttgctgacatacctcaccaatctgtatttcaaaatcaaagaggaccggcgtaaggtggc

SEQ ID NO: 639065 - DNA, 75 bp, synthetic construct
  source 1..75: mol_type = other DNA
atggataatttcgggaatttcaagccaacaatatcgcttgatgatttccctcgtggtttaagcgaaagagaagca

SEQ ID NO: 639066 - DNA, 75 bp, synthetic construct
  source 1..75: mol_type = other DNA
aaagccagatgatacttaccgaatatcaattcgaccacaaaactaatgaatcacgatcagtatatttgcttcggc

SEQ ID NO: 639067 - DNA, 75 bp, synthetic construct
  source 1..75: mol_type = other DNA
atgagccagacgcagatccagagccttaccgcattttttaaagagaatgtcccgccccgcgcgatgcagtcattt

SEQ ID NO: 639068 - DNA, 75 bp, synthetic construct
  source 1..75: mol_type = other DNA
gcgctctgaagaagtccggagcgcactgaaacaaaaacttcgccataacctggaagcgcgtcttgatgcagaggt

SEQ ID NO: 639069 - DNA, 75 bp, synthetic construct
  source 1..75: mol_type = other DNA
ccggaaggcatcgcgggtgaggggagtgcttcagatagcggtgaccccacaccggacagcgacatgatgatgtaa

SEQ ID NO: 639070 - DNA, 75 bp, synthetic construct
  source 1..75: mol_type = other DNA
atgatacttaccgaatatcagctcgaccacaaaaccaataaatcacgttcagtatatttgcttcgccacaatagc

SEQ ID NO: 639071 - DNA, 75 bp, synthetic construct
  source 1..75: mol_type = other DNA
caatgggtcacgtgatgctgcgtgaattccatctcgataacccaagccagtatttcaccgattatgtgcgtcgct

SEQ ID NO: 639072 - DNA, 75 bp, synthetic construct
  source 1..75: mol_type = other DNA
agcaaatcactggcgtttctcgtagccagattatccgtattgcccgtgaatttgccgataacgctgacaagacgc

SEQ ID NO: 639073 - DNA, 75 bp, synthetic construct
  source 1..75: mol_type = other DNA
gctggaaaatctacgttaaaaatggtctggtgacctgggaaaaccaacagactgactaaccgcgcactcgcccgg

SEQ ID NO: 639074 - DNA, 75 bp, synthetic construct
  source 1..75: mol_type = other DNA
aacaaccagtaatcgaagctgctttcgaaatgcgtttttctaaagaaacacaaatatcggaaatagttccagggt

SEQ ID NO: 639075 - DNA, 75 bp, synthetic construct
  source 1..75: mol_type = other DNA
tgctgacgctgtccagtaccttcctgctggcttgcttcctggggcagaaagtgtttggtctggataagcacacca

SEQ ID NO: 639076 - DNA, 75 bp, synthetic construct
  source 1..75: mol_type = other DNA
tcatcagtcgataaagtttatttagacgatattattcttagaagaaaaaatgaatatgaacattatacagttgag

SEQ ID NO: 639077 - DNA, 75 bp, synthetic construct
  source 1..75: mol_type = other DNA
aaaagaggatgacccacgtaatcaggttaattttctttatgagtcatcggaaagaccatattgtcatcacgcctc

SEQ ID NO: 639078 - DNA, 75 bp, synthetic construct
  source 1..75: mol_type = other DNA
ggtaagcggcacgaacaaccagcgttgtgtgaatcatatttctgaaccggataccgaaattccgccgggtttcag

SEQ ID NO: 639079 - DNA, 75 bp, synthetic construct
  source 1..75: mol_type = other DNA
gatacctggcggctaccgggaaatcgggaacggaatttgttcagcgagcgacgacgttttttgggccggaccgga

SEQ ID NO: 639080 - DNA, 75 bp, synthetic construct
  source 1..75: mol_type = other DNA
ctggcgggaatacccgttgcgtgctggggcaaacccgaagaaatccgctttcagtgcctggaaggccagatttcg

SEQ ID NO: 639081 - DNA, 75 bp, synthetic construct
  source 1..75: mol_type = other DNA
tctgcgccagggggagcttcacgcagcagtggaatttgagaaggcgacaacttatttatatgatcggagcaaata

SEQ ID NO: 639082 - DNA, 75 bp, synthetic construct
  source 1..75: mol_type = other DNA
gatgtcgcaccgaagaatgttcgcaaagcagctggtggccagttcggatggtgtatgcagatgttggcacaattt

SEQ ID NO: 639083 - DNA, 75 bp, synthetic construct
  source 1..75: mol_type = other DNA
gcgaatgcacttaaccgttaccagtcagtaattaaaaacatgttaccaatgttaggtgaaaaaaactggtttcat

SEQ ID NO: 639084 - DNA, 75 bp, synthetic construct
  source 1..75: mol_type = other DNA
aaaaaatataggaaagctaattcagattgagcgtaacgcgaaagcgcggatacgcagagcgacaaaattcagaac

SEQ ID NO: 639085 - DNA, 75 bp, synthetic construct
  source 1..75: mol_type = other DNA
tgtccgggttgacgaaaaagagcgtcaggtccgctgtaaaatctgcggtgcagttgtggagccgtttgactggat

SEQ ID NO: 639086 - DNA, 75 bp, synthetic construct
  source 1..75: mol_type = other DNA
tgctgggcgtaccagcggttccggagccggaaggtatcgcgggtgacgggagtgcttcagatggcggtgaaccca

SEQ ID NO: 639087 - DNA, 75 bp, synthetic construct
  source 1..75: mol_type = other DNA
cgttcatttgccaggagatgaacgacctgatggcccagggcgtgcgtaatgtgattgagatgaccaaccgttaca

SEQ ID NO: 639088 - DNA, 75 bp, synthetic construct
  source 1..75: mol_type = other DNA
ctggcgcaggagatggtcgatgaaattgaacagggtatcgatggcacggaactgaaagccgggattatcgcggag

SEQ ID NO: 639089 - DNA, 75 bp, synthetic construct
  source 1..75: mol_type = other DNA
acagccggtctgggaattggtatcgaccgtatggtaatgctgttcaccaacagccataccatccgcgacgttatt

SEQ ID NO: 639090 - DNA, 75 bp, synthetic construct
  source 1..75: mol_type = other DNA
cgacagcccacacggattaagtgatatctggctgcgccttagccgtaactttacgccggaatccgccctcttccg

SEQ ID NO: 639091 - DNA, 75 bp, synthetic construct
  source 1..75: mol_type = other DNA
tcacgggtattggatcttgctgacaagtttgtttgtctgccagccaaactataacgccacgcgccaccgcctgaa

SEQ ID NO: 639092 - DNA, 75 bp, synthetic construct
  source 1..75: mol_type = other DNA
gcccctggaaaattggagttgcattcaaatttatacacttatcccagtgctcggaaatggataagagatagcacg

SEQ ID NO: 639093 - DNA, 75 bp, synthetic construct
  source 1..75: mol_type = other DNA
cctgccagcaactgtcacgctgtattttgctgcgtcagccttatcaacacgatccgcattttgaacgcgctttta

SEQ ID NO: 639094 - DNA, 75 bp, synthetic construct
  source 1..75: mol_type = other DNA
tggtgcgttgctgatcgccatttacaccatgctggggacgtctctctatgagcactggtatcagcagccgatgta

SEQ ID NO: 639095 - DNA, 75 bp, synthetic construct
  source 1..75: mol_type = other DNA
gcgtgggcggcggtgagctacatctggcctgactggaagtttcgcaatctgccgcgcatgctcgaacgtgccacc

SEQ ID NO: 639096 - DNA, 75 bp, synthetic construct
  source 1..75: mol_type = other DNA
ttcatgggaagaagttctgtgaggcctgtggtacggggatttattgcagagcggtatgtacgaagtctgtttaca

SEQ ID NO: 639097 - DNA, 75 bp, synthetic construct
  source 1..75: mol_type = other DNA
atgtgcgggcagcattttcccgggaaaaagttctgtgaagcctgtggcacggggatctattccagagcggtatgt

SEQ ID NO: 639098 - DNA, 75 bp, synthetic construct
  source 1..75: mol_type = other DNA
gcttcgctggtggcaatggcgaaagagcgtccggagcaggatttcctcggcattgaagtgcattcgccgggcgtt

SEQ ID NO: 639099 - DNA, 75 bp, synthetic construct
  source 1..75: mol_type = other DNA
cttttaataaagagaatgtaaaaaaatatacaaaaagtgatattgataacatcctctggaaaaatatcaatgatc

SEQ ID NO: 639100 - DNA, 75 bp, synthetic construct
  source 1..75: mol_type = other DNA
aggcctgtggtacggggatttattgcagagcagtatgtacaaagtatgtttacaggtaccagccagatttactcc

SEQ ID NO: 639101 - DNA, 75 bp, synthetic construct
  source 1..75: mol_type = other DNA
aagcctgtggcacggagatctattccagagcaacatgtacgaagtctgtttacagctaccagccagacttgtttc

SEQ ID NO: 639102 - DNA, 75 bp, synthetic construct
  source 1..75: mol_type = other DNA
atggttgcggcggcattgaccgaccttgatgaccgactggcggggcgtctgcgtaacctcatcattacgctgttc

SEQ ID NO: 639103 - DNA, 75 bp, synthetic construct
  source 1..75: mol_type = other DNA
aatgatgttcctgccaccaatgtgctaattgaaggcagtattgataacgatcgcgttacactgactaatctgggc

SEQ ID NO: 639104 - DNA, 75 bp, synthetic construct
  source 1..75: mol_type = other DNA
ccaatggcgaatggaaacttagcgcgcagcaagtaaatggcggcgtcattccgtggttgccagaggccggtaaag

SEQ ID NO: 639105 - DNA, 75 bp, synthetic construct
  source 1..75: mol_type = other DNA
cgcctggccgatatccgtctgcaaagcgaaaaatctctgaccgatttctttgcacctttgcgctctgtcccgtcg

SEQ ID NO: 639106 - DNA, 75 bp, synthetic construct
  source 1..75: mol_type = other DNA
agcacaactctatcagtctccaacggggcatgagcttgaaatcattccgttatccgatataagtcgtttcagtga

SEQ ID NO: 639107 - DNA, 75 bp, synthetic construct
  source 1..75: mol_type = other DNA
aaaatccccggatttataacgggaaagagacaataacactgaagccagcgtccacggattatgtctataaaactg

SEQ ID NO: 639108 - DNA, 75 bp, synthetic construct
  source 1..75: mol_type = other DNA
gagcgagccacggcatgtcgatactatcctgctggaaaacgggacgctgaatctcaccaaccagaccgcgccgct

SEQ ID NO: 639109 - DNA, 75 bp, synthetic construct
  source 1..75: mol_type = other DNA
tcgcgttacgctgactaacctgggtgccgacatcgcccgcgggacattaaccggaaacgcgcagcgtaacgccga

SEQ ID NO: 639110 - DNA, 75 bp, synthetic construct
  source 1..75: mol_type = other DNA
cgctgtatgaacactggtatcagcagccgatatatctacttgccggtgccatctggtacaacgttctgacgctta

SEQ ID NO: 639111 - DNA, 75 bp, synthetic construct
  source 1..75: mol_type = other DNA
gctgtttgccatcggcttaacgctctccaccagcggctttattttgctcgggggtctgggtcaacgctacgcgac

SEQ ID NO: 639112 - DNA, 75 bp, synthetic construct
  source 1..75: mol_type = other DNA
tgctgaaaaacagcaagtgactcaaatcatgaatgcgggcgtcgtttccagtagcaaagttacatcgacagagcc

SEQ ID NO: 639113 - DNA, 75 bp, synthetic construct
  source 1..75: mol_type = other DNA
gcaacgcgacgggaaaacgctgatcctcgatgatgcggcaatcgtcgggctggaatataccttgccgaaaaactg

SEQ ID NO: 639114 - DNA, 75 bp, synthetic construct
  source 1..75: mol_type = other DNA
caatctcgccgggtacgactcagacgtacccggcattccatcaatagattacaacgtaattgtcagcgcattccc

SEQ ID NO: 639115 - DNA, 75 bp, synthetic construct
  source 1..75: mol_type = other DNA
cataataaacgccgtatcgttcaggtgccgtttgccgaactggtaaaaagcaaactgcagctggggggcgtattc

SEQ ID NO: 639116 - DNA, 75 bp, synthetic construct
  source 1..75: mol_type = other DNA
gacctttaccgagtggaataacggtgaactgagcagctacctgatcgacatcaccaaagatatcttcaccaaaaa

SEQ ID NO: 639117 - DNA, 75 bp, synthetic construct
  source 1..75: mol_type = other DNA
aaggggcagaaaatcagattgccatgttgctccagcttcccgacaacggactggcactgctggacgatactctga

SEQ ID NO: 639118 - DNA, 75 bp, synthetic construct
  source 1..75: mol_type = other DNA
aaataacgctgcccaatacgttcagtcagtcgctgtacgatgtgctgatgcatcagcgaaatctcgcctggcggg

SEQ ID NO: 639119 - DNA, 75 bp, synthetic construct
  source 1..75: mol_type = other DNA
ttcgtcgtaatcgtgagctttctgcagaaggctttaatttcattggtaccggtgtttccggtggggaagaaggtg

SEQ ID NO: 639120 - DNA, 75 bp, synthetic construct
  source 1..75: mol_type = other DNA
cgctgaaaggtccttccatcatgcctggtgggcagaaagaagcctatgaactggttgcaccaatcctgaccaaaa

SEQ ID NO: 639121 - DNA, 75 bp, synthetic construct
  source 1..75: mol_type = other DNA
gcatcatgatgtgcgccagcaaatggcgaccctcggcaacgcgtcgtttgatgtagtagtgggcgtcggcggcgg

SEQ ID NO: 639122 - DNA, 75 bp, synthetic construct
  source 1..75: mol_type = other DNA
gatggagcgggtcattatgtcaagatggttcacaatggcatcgaatatggtgatatgcaacttattgcagaagct

SEQ ID NO: 639123 - DNA, 75 bp, synthetic construct
  source 1..75: mol_type = other DNA
caatatcgacgccatcgtcgagcatattcagcagcgtctggcctcgcatcaaccgcagccttctctgttgcacgg

SEQ ID NO: 639124 - DNA, 75 bp, synthetic construct
  source 1..75: mol_type = other DNA
cataacgcatttattttagggcagcaaattgcacatctacatcaatggagcgaccaaccacaattcggcctcgac

SEQ ID NO: 639125 - DNA, 75 bp, synthetic construct
  source 1..75: mol_type = other DNA
gcagcgtagtctggaagcgcaactggcgaccgaagttcgccatcaggttgcagcctttatggagcgtcgcggcat

SEQ ID NO: 639126 - DNA, 75 bp, synthetic construct
  source 1..75: mol_type = other DNA
attgaaaaatttgccgaacaattcgctgcattaagcgataactacctcaaagagcgggccggcgatttacgtgcg

SEQ ID NO: 639127 - DNA, 75 bp, synthetic construct
  source 1..75: mol_type = other DNA
ctgctgcaagaatatcagcggctaattagtgaagagattgagcttagccgtctggcggaagatgacgtcaattta

SEQ ID NO: 639128 - DNA, 75 bp, synthetic construct
  source 1..75: mol_type = other DNA
caaagcacgaaggtgggtattatttcccaggtgctgttaccagactatgtggcgcttttcccggaactgaccacc

SEQ ID NO: 639129 - DNA, 75 bp, synthetic construct
  source 1..75: mol_type = other DNA
cggtttcagccacctcctccagttttggtggcggcactgggcaacttgatatcacaggtcccattgaaggcactc

SEQ ID NO: 639130 - DNA, 75 bp, synthetic construct
  source 1..75: mol_type = other DNA
agccagctggcgacaaggctgagttcatcgaaaaagttcgtcgtgcgctgtatctgggcaaaatcgtttcttacg

SEQ ID NO: 639131 - DNA, 75 bp, synthetic construct
  source 1..75: mol_type = other DNA
ttttttcccgggaagaagttctgtgaggcctgtggtacggggatttattgcagagcggtatgtacaaagtatgtt

SEQ ID NO: 639132 - DNA, 75 bp, synthetic construct
  source 1..75: mol_type = other DNA
ttctgcgtacagatatgattcgctgtaaaaaagctaaagatttcaatatctacaaccctgttggtgatgctgcca

SEQ ID NO: 639133 - DNA, 75 bp, synthetic construct
  source 1..75: mol_type = other DNA
ccaaagatggcgaaacaatcactgttacagcagatgcaaataccgcaactgaggcgaccgatggttatcaacctc

SEQ ID NO: 639134 - DNA, 75 bp, synthetic construct
  source 1..75: mol_type = other DNA
cggcaggccgcgttcgttcaagaggggtagaagtcgaccttgcgggagcattaactgaaaatattaatattattg

SEQ ID NO: 639135 - DNA, 75 bp, synthetic construct
  source 1..75: mol_type = other DNA
gttcagaggtattgccaacctgtattttatccggtgtttcgctcctgccccgttcgtgacacaacggcgcgacac

SEQ ID NO: 639136 - DNA, 75 bp, synthetic construct
  source 1..75: mol_type = other DNA
aaagctctgttgctgatgtccttaaatatcttggtctggaagataattcgacctttcctgtaggtgccccgatcc

SEQ ID NO: 639137 - DNA, 75 bp, synthetic construct
  source 1..75: mol_type = other DNA
tgcagcttatggtgttggtgcatcgttcggggatttggctaaacaaggcgctgtattactgacctctatgacttc

SEQ ID NO: 639138 - DNA, 75 bp, synthetic construct
  source 1..75: mol_type = other DNA
gacagatgctcagggggcatggtttgagcacgatttacatgccctgagcgagcaacagaaggcggactgtgtggt

SEQ ID NO: 639139 - DNA, 75 bp, synthetic construct
  source 1..75: mol_type = other DNA
aaatctatgacggctatcagtcagtatcccgctacctgccgatttccttgaacgtcaaccggtttaccaactcta

SEQ ID NO: 639140 - DNA, 75 bp, synthetic construct
  source 1..75: mol_type = other DNA
attcagcagcgtctcgcctcacatcaaccgcagccttctctgttgcacggcgatttatggtccggcaactgtgcg

SEQ ID NO: 639141 - DNA, 75 bp, synthetic construct
  source 1..75: mol_type = other DNA
ggacaggtacaaggggaatacgtggagttgagcgacggcactttatcgtggttagggaacgccttgtactggatg

SEQ ID NO: 639142 - DNA, 75 bp, synthetic construct
  source 1..75: mol_type = other DNA
atgaccactttaaccgacaaagaactgattaaagaaatcagagagcgtataggcagcctggacgtccgagacaat

SEQ ID NO: 639143 - DNA, 75 bp, synthetic construct
  source 1..75: mol_type = other DNA
gcaagctgcgctacgcatccgcattcaggcttccgatgtttctctggtactccagccgccgcaacagaccagtat

SEQ ID NO: 639144 - DNA, 75 bp, synthetic construct
  source 1..75: mol_type = other DNA
ggcagcaacgttttctccgctgattcatttgaaggatttaaccgtacaaagaaatggggtgatgctgccaactta

SEQ ID NO: 639145 - DNA, 75 bp, synthetic construct
  source 1..75: mol_type = other DNA
ttcgatggaccaactccggtaactccggatggttggataagctgtagtgagcgaatgccggataagttaattccg

SEQ ID NO: 639146 - DNA, 75 bp, synthetic construct
  source 1..75: mol_type = other DNA
aacctgattgcggaaaccgaggccatgctcgcagccgcgccgcaactacccggcagtgaacccgctaccgtgccg

SEQ ID NO: 639147 - DNA, 75 bp, synthetic construct
  source 1..75: mol_type = other DNA
cttggggtgacctcatttggtatccgggtattcagcacttcttccgtcagtcatgtggctatctatctgggtgat

SEQ ID NO: 639148 - DNA, 75 bp, synthetic construct
  source 1..75: mol_type = other DNA
tgtctctgcgtttaagccagaaacgcagttacattatgttgggcacctgaagccaggaatttatattaaagcgag

SEQ ID NO: 639149 - DNA, 75 bp, synthetic construct
  source 1..75: mol_type = other DNA
aaaggtcctgacatgcccgaattcgatggaccaactccggtgactccggatagttggataagctgtagtgatcga

SEQ ID NO: 639150 - DNA, 75 bp, synthetic construct
  source 1..75: mol_type = other DNA
aggagacaaaaagtcgtggttttgttcggaatttgtcactgatgcatttgccaaagccgggcatccgcttacact

SEQ ID NO: 639151 - DNA, 75 bp, synthetic construct
  source 1..75: mol_type = other DNA
tgtctctgcgtttaagccagaaacacagttacagtatattgggcacctgaagccaggaatttatatcaaagcggg

SEQ ID NO: 639152 - DNA, 75 bp, synthetic construct
  source 1..75: mol_type = other DNA
cggcgatttgctgttctcctcaagtcttggggtaacctcatttggaatccgcgtcttcagcacttcctctgtgag

SEQ ID NO: 639153 - DNA, 75 bp, synthetic construct
  source 1..75: mol_type = other DNA
tattggcctttcaggttttggcttctggagccacgatatcggcggctttgagaataccgctccggcgcacgttta

SEQ ID NO: 639154 - DNA, 75 bp, synthetic construct
  source 1..75: mol_type = other DNA
aaaccggtttagccgtttaccaaccacactggcgcggcatcatgtccagaagctggtaccagacctgacggatta

SEQ ID NO: 639155 - DNA, 75 bp, synthetic construct
  source 1..75: mol_type = other DNA
tcgctgatattaaatataacacccagtttagcttaaattatcaactaaaagaaagctttataaacccagtaacca

SEQ ID NO: 639156 - DNA, 75 bp, synthetic construct
  source 1..75: mol_type = other DNA
ctctggccacactggagcgtcttctgagcctgctgtcggcctttgaggtcgtggtatgggacggatggctggccg

SEQ ID NO: 639157 - DNA, 75 bp, synthetic construct
  source 1..75: mol_type = other DNA
acccggcttcatggcacgcctgtttataaggtttgtgggcgttgcaatggaaaccggtttagccgtttaccaacc

SEQ ID NO: 639158 - DNA, 75 bp, synthetic construct
  source 1..75: mol_type = other DNA
atgggtgaaggaactatgtcagcattgccatggtaagggcgaagtcagcacagcgtgcagagggtgtaaggggaa

SEQ ID NO: 639159 - DNA, 75 bp, synthetic construct
  source 1..75: mol_type = other DNA
gccgattactccagatctgcggcaagtaaggctcgctgtgagcattgtgctggttcggggtttcataatgtattg

SEQ ID NO: 639160 - DNA, 75 bp, synthetic construct
  source 1..75: mol_type = other DNA
cgatcaacgtcccgattacgcgtggcacgaaggcacggcattccatctctttaatctgcaagacgggcatgaagc

SEQ ID NO: 639161 - DNA, 75 bp, synthetic construct
  source 1..75: mol_type = other DNA
cagcacgtactggcaacacgattactgtgactggtgcgggcgaggcgaagaactggacgctgtgcctgcgcaatg

SEQ ID NO: 639162 - DNA, 75 bp, synthetic construct
  source 1..75: mol_type = other DNA
cgcgggagtgcgcctgcactggttgttgcgatttttcatgaatgcatggatctcatgacccggctgagcgagagg

SEQ ID NO: 639163 - DNA, 75 bp, synthetic construct
  source 1..75: mol_type = other DNA
acccggcttcatggcacgcctgtttataagatttgtgggcgttgcaatggaaaccgatttagccgtttaccaacc

SEQ ID NO: 639164 - DNA, 75 bp, synthetic construct
  source 1..75: mol_type = other DNA
atgtctgaacccttatccggttccggcacggctgcggcgctcggtggggcgacggtgtacgggctgtttaccgga

SEQ ID NO: 639165 - DNA, 75 bp, synthetic construct
  source 1..75: mol_type = other DNA
ataacttatacatcattggtggtatggagtatattggagggcttgaattttctgctgtcataataatcggtgcag

SEQ ID NO: 639166 - DNA, 75 bp, synthetic construct
  source 1..75: mol_type = other DNA
gatatgcctactgttcaggctggcaactctccggtaactccggatggttggataagctgtagtgagcgaatgccc

SEQ ID NO: 639167 - DNA, 75 bp, synthetic construct
  source 1..75: mol_type = other DNA
ccggctgcagaatgagtttgccggaaatatttctgcgcttgctgatgcggaaaacatctctcgtaagataattac

SEQ ID NO: 639168 - DNA, 75 bp, synthetic construct
  source 1..75: mol_type = other DNA
acgagcgtgggcagcgttacgcaaaccggctgcagaatgagtttgccggaaatatttctgcgcttgctgatgcgg

SEQ ID NO: 639169 - DNA, 75 bp, synthetic construct
  source 1..75: mol_type = other DNA
ttttttctcatcccggtgaactatctgcccggtcaggtgatgcacttcaaagagcttttacagataaagaagaat

SEQ ID NO: 639170 - DNA, 75 bp, synthetic construct
  source 1..75: mol_type = other DNA
gtgcttatgaacgtggcctgcgttatacaagccggctgcagaatgagtttgcaggaaatatttctgcgcttgccg

SEQ ID NO: 639171 - DNA, 75 bp, synthetic construct
  source 1..75: mol_type = other DNA
gcgggcaacatctctgctcttgctgatgcggagaatatttcccggaaaattatctcccgatgtttaaatacggcc

SEQ ID NO: 639172 - DNA, 75 bp, synthetic construct
  source 1..75: mol_type = other DNA
gacataccacacatactcaatcgactgaagatacttcatcaccggcgccggccgcgccgatggtggattcattaa

SEQ ID NO: 639173 - DNA, 75 bp, synthetic construct
  source 1..75: mol_type = other DNA
agcggtcaataaagacaaaccgctgggtgcagtggcgctgaagtcttacgaggaagagttggcgaaagacccacg

SEQ ID NO: 639174 - DNA, 75 bp, synthetic construct
  source 1..75: mol_type = other DNA
tgccgtgcgtaccgcagtgatcaacgctgccagcggtcgccagactgttgatgccgcgctgaaagatgcacaggg

SEQ ID NO: 639175 - DNA, 75 bp, synthetic construct
  source 1..75: mol_type = other DNA
acctgctgaccgacgaaggtctggaagcagtgaataaagacaaaccgctgggtgccgtggcgctgaagtcttacc

SEQ ID NO: 639176 - DNA, 75 bp, synthetic construct
  source 1..75: mol_type = other DNA
taaaatggtgctaaacctagatagatctcgtgttccaactgagtgtatagagaaaattgaagccattcttaagga

SEQ ID NO: 639177 - DNA, 75 bp, synthetic construct
  source 1..75: mol_type = other DNA
ttctgctgttattgatgtcgctgtaaactatttcggttttgatcctattcatccggaatccggtaatgactccaa

SEQ ID NO: 639178 - DNA, 75 bp, synthetic construct
  source 1..75: mol_type = other DNA
cctgcgaagccgatacccttggtagttgcggctacgtatacatcgccatttatccccctcagcgcaaacaaattt

SEQ ID NO: 639179 - DNA, 75 bp, synthetic construct
  source 1..75: mol_type = other DNA
tctcactttgcgagaacagtatcaaagaaaggttgtataggaaaatagttcctgcagtattcagtgtgtcatttt

SEQ ID NO: 639180 - DNA, 75 bp, synthetic construct
  source 1..75: mol_type = other DNA
tcagagcaagagaatcacagcggatactcattgataccgctgcagaaattcttcataagtcacgtacagacttca

SEQ ID NO: 639181 - DNA, 75 bp, synthetic construct
  source 1..75: mol_type = other DNA
taagagctaaagagtctcagagggcactcatcgatgccgctgcagaaatccttcataaatcgcgaaccgacttca

SEQ ID NO: 639182 - DNA, 75 bp, synthetic construct
  source 1..75: mol_type = other DNA
cgcgcagtactgaataaagtgttcgaactgggtaatggtgatattgcgcgcggtacggtgctggcatttgaagcg

SEQ ID NO: 639183 - DNA, 75 bp, synthetic construct
  source 1..75: mol_type = other DNA
ctggaacgcctgccgcgccgccatgcttcaggccgaacctgtaagtaatagtgatgagttaccgctggactatct

SEQ ID NO: 639184 - DNA, 75 bp, synthetic construct
  source 1..75: mol_type = other DNA
taatagagatgattaagcgcaatataacggttatggatcgttatcctgatttagtaactgcacaaatggatctgg

SEQ ID NO: 639185 - DNA, 75 bp, synthetic construct
  source 1..75: mol_type = other DNA
atggcaccgaatatccggatccgcactcagttacgcactggcgtgaaatgccagcagcaccgcagcaggaggtga

SEQ ID NO: 639186 - DNA, 75 bp, synthetic construct
  source 1..75: mol_type = other DNA
tctttggcatgggattattgatacagaccattatgttgaaggaaacatgccgccagaaatagattcaattgagca

SEQ ID NO: 639187 - DNA, 75 bp, synthetic construct
  source 1..75: mol_type = other DNA
tttcattacgttccatacaacatattatgataaccatgtatctttcatctcgtcattgatacttggtctgagcaa

SEQ ID NO: 639188 - DNA, 75 bp, synthetic construct
  source 1..75: mol_type = other DNA
tatcgaatgtttattccagaggcaaatgcaggaatagggagtgagcggcatgttcaaagacacgtaaatcgaaat

SEQ ID NO: 639189 - DNA, 75 bp, synthetic construct
  source 1..75: mol_type = other DNA
aaggtaaaacccttagccaaccgcgcgcaggtgtggcgctgatggacgaacacatcgaactactgaaaacactac

SEQ ID NO: 639190 - DNA, 75 bp, synthetic construct
  source 1..75: mol_type = other DNA
cgcaggcgtggcgctgatggacgaacacatcgaactactgaaaacactacaagaagagtgcgatctgctgccgag

SEQ ID NO: 639191 - DNA, 75 bp, synthetic construct
  source 1..75: mol_type = other DNA
gtataccaatgatactcattgccctcggtgcagattgtcgtcaacggtctctgcaatagcgagatattctcagga

SEQ ID NO: 639192 - DNA, 75 bp, synthetic construct
  source 1..75: mol_type = other DNA
ccagccgtcaacacaagtacttaatatagaccatgggagtattgtgattgatcgtgctaacggaaatattgcaag

SEQ ID NO: 639193 - DNA, 75 bp, synthetic construct
  source 1..75: mol_type = other DNA
gcttaaaattcctgctgatatcggcatcatggatgctcttaatagcgggaaattctccggtttcgacctctcctt

SEQ ID NO: 639194 - DNA, 75 bp, synthetic construct
  source 1..75: mol_type = other DNA
tggcgtgagcattataaaatgccctacagtcaggttaagcagttacctactacaaatactctaatgctgtcattt

SEQ ID NO: 639195 - DNA, 75 bp, synthetic construct
  source 1..75: mol_type = other DNA
aacgcctgcaactggctgatggcagcaccgccctggtgaccaccgtttatgatctgacgctggcaaactacggtc

SEQ ID NO: 639196 - DNA, 75 bp, synthetic construct
  source 1..75: mol_type = other DNA
ctccgcagttaggcactaacccgctgaccatcgcacgtgaagcagaaaaagccgggatgaatccggttgactata

SEQ ID NO: 639197 - DNA, 75 bp, synthetic construct
  source 1..75: mol_type = other DNA
gcaaattatccgtatagcccgtgaatttgctgacaacgctgataaaacgcacggtcgttcgatgattatcgttgg

SEQ ID NO: 639198 - DNA, 75 bp, synthetic construct
  source 1..75: mol_type = other DNA
aaatcagagcagcaagcacaaatcagcgaactccgtgcccgcgttgagaattttaatcgcctattcaccgagcta

SEQ ID NO: 639199 - DNA, 75 bp, synthetic construct
  source 1..75: mol_type = other DNA
atcggcaccagcgaaggaaagattacgccgctggaagagaaggtatttattgccgctgcgctggcgcataaccag

SEQ ID NO: 639200 - DNA, 75 bp, synthetic construct
  source 1..75: mol_type = other DNA
cccttgctcatgagcatctgcatattgatctctccggctttaaaaacaacgtggattgccgccttgatcaatatg

SEQ ID NO: 639201 - DNA, 75 bp, synthetic construct
  source 1..75: mol_type = other DNA
tcagacgcaaagcttgcggtattgcttggtgttccagcaatcatcgctgcaggaacaggtctttataagctatca

SEQ ID NO: 639202 - DNA, 75 bp, synthetic construct
  source 1..75: mol_type = other DNA
ttaaaagcagtgttgaataaccaggtccagcgcgcgatgaatctgttctttggttcagtgttagcaaccatttcg

SEQ ID NO: 639203 - DNA, 75 bp, synthetic construct
  source 1..75: mol_type = other DNA
attcttagcctttcagtggttattcttgaagtcagtttgatttcagctttaatggcaaccggcgacgccgcgcca

SEQ ID NO: 639204 - DNA, 75 bp, synthetic construct
  source 1..75: mol_type = other DNA
gatctgctgcgtaagctcaactacaccaaagcggaaggtccggcgaaaggccagccgatgctgaacaccgcaatt

SEQ ID NO: 639205 - DNA, 75 bp, synthetic construct
  source 1..75: mol_type = other DNA
cttcaacaaagtggaactggaaaacgtgctgctgcacaagctgccggtgaaacgcctgcaactggctgatggcag

SEQ ID NO: 639206 - DNA, 75 bp, synthetic construct
  source 1..75: mol_type = other DNA
tggaacgcggcctgaacgatgttaactgcgcgaccagctatgacgacgtgaaagcctacaccccggcgtgggccg

SEQ ID NO: 639207 - DNA, 75 bp, synthetic construct
  source 1..75: mol_type = other DNA
tgctggtttatcgtccgccgatcgacacccgttcagtgaaagaagtgatgggccagaaatctaacggtaatccgg

SEQ ID NO: 639208 - DNA, 75 bp, synthetic construct
  source 1..75: mol_type = other DNA
gctggaaaatctacgttaaaaaaggtctggtgacctgggaaaaccatcagactgactaaccgcgcactcgcccgg

SEQ ID NO: 639209 - DNA, 75 bp, synthetic construct
  source 1..75: mol_type = other DNA
gctggaaaatctacgttaaaaaaggtctggtgacctgggaaaaccaacagactgactatccgcgcactcgcccgg

SEQ ID NO: 639210 - DNA, 75 bp, synthetic construct
  source 1..75: mol_type = other DNA
ccagccgatgctcaacaccgcaattgatgccgcagagatgatcctgacgctggcgccagaaaccaacggtcaggt

SEQ ID NO: 639211 - DNA, 75 bp, synthetic construct
  source 1..75: mol_type = other DNA
aaaaagcgctcaacttcctgacgccgcaccagaagtggggtatccactccacttacagcgacaacctgctgatgc

SEQ ID NO: 639212 - DNA, 75 bp, synthetic construct
  source 1..75: mol_type = other DNA
gcaagctggatctggtggttacgctggacttccgtctgtcgagcacctgtctctattccgacatcattttgccga

SEQ ID NO: 639213 - DNA, 75 bp, synthetic construct
  source 1..75: mol_type = other DNA
gctggaagagcgcgacggttactacgctgcgggtcgtatgctgcgcgctgccgatctggtggatgcgctgggcca

SEQ ID NO: 639214 - DNA, 75 bp, synthetic construct
  source 1..75: mol_type = other DNA
tctgatcgactttaacgtccgtgcagaacgcatgggctggctgccgtctgcgccgcagttaggcactaacccgct

SEQ ID NO: 639215 - DNA, 75 bp, synthetic construct
  source 1..75: mol_type = other DNA
ttatgactggtattgcgacttgccgccagcttctccgcaaacctggggcgagcagactgacgtaccagaatctgc

SEQ ID NO: 639216 - DNA, 75 bp, synthetic construct
  source 1..75: mol_type = other DNA
acctacagcgacaacctgctgatgctgactttaggtcgcggtggtccggtggtctggctgagtgaagccgatgcc

SEQ ID NO: 639217 - DNA, 75 bp, synthetic construct
  source 1..75: mol_type = other DNA
ccctcgcccatgagcatctgcatattgatctttccggctttaaaaacaacgtggactgccgccttgatcagtatg

SEQ ID NO: 639218 - DNA, 75 bp, synthetic construct
  source 1..75: mol_type = other DNA
gcgagtttttttttcgtcccgatggggcttttttttccaaatccttctacttttttggtgtcggtgcgattatca

SEQ ID NO: 639219 - DNA, 75 bp, synthetic construct
  source 1..75: mol_type = other DNA
cttatatatttatttacactaagctatactttaaaagtgtttttatgtaaaactttcattaaaacagttaatgta

SEQ ID NO: 639220 - DNA, 75 bp, synthetic construct
  source 1..75: mol_type = other DNA
aggatttaatgatgcattaacccagtatggctatggagtgtctacgtttcttagtttctttcatcttgatgattg

SEQ ID NO: 639221 - DNA, 75 bp, synthetic construct
  source 1..75: mol_type = other DNA
catccattattcggccctgatcctgttaaggtattcgcaattaaatgtgacagaaattggatgttgagaggtgaa

SEQ ID NO: 639222 - DNA, 75 bp, synthetic construct
  source 1..75: mol_type = other DNA
acctgaaaggagaatacttttacgccatccgggcgggaaagaaggtggaggaataccgactttataatgactatt

SEQ ID NO: 639223 - DNA, 75 bp, synthetic construct
  source 1..75: mol_type = other DNA
tctggataacattaaccctcccagggtaaaaacgacgggtgataaagacgcattaaacacagagattcatatatt

SEQ ID NO: 639224 - DNA, 75 bp, synthetic construct
  source 1..75: mol_type = other DNA
tggaccttccgtaccggtatcgcctttgatgacagcccagttccggctcagaatcgttctatctccattccggac

SEQ ID NO: 639225 - DNA, 75 bp, synthetic construct
  source 1..75: mol_type = other DNA
cttcctctggcctgggccgggcttattcaggggaaggcgcaattgccgatgatgcaggtaacgttagccgtaacc

SEQ ID NO: 639226 - DNA, 75 bp, synthetic construct
  source 1..75: mol_type = other DNA
ggacggacaccacagggacaagcgctggctgcagccgctaatgatattgaaagtaacaccaaaattgctcatctg

SEQ ID NO: 639227 - DNA, 75 bp, synthetic construct
  source 1..75: mol_type = other DNA
acactggcacgacgtcatgtccagaagctggtaccagacctgactgattatcagtggtacaaaggatatgcagac

SEQ ID NO: 639228 - DNA, 75 bp, synthetic construct
  source 1..75: mol_type = other DNA
aactggtaccggacctgacggattatcagtggtacaaaggatatgcagacgttattaataaactggttacaaagt

SEQ ID NO: 639229 - DNA, 75 bp, synthetic construct
  source 1..75: mol_type = other DNA
tcagtggtacaaaggatatgcagacgtcattgataaactggtaacaaagtgctggcaggaagaagcattcgcaga

SEQ ID NO: 639230 - DNA, 75 bp, synthetic construct
  source 1..75: mol_type = other DNA
ggggtacgaaatcaagttgattcaacatccactattcggccctgatccggtgaaggtattcgcaataaagtgtga

SEQ ID NO: 639231 - DNA, 75 bp, synthetic construct
  source 1..75: mol_type = other DNA
aacagcccaaaggcaggggaaaggcaccagctttccaagtgaggatcgccccagaattgaaagagcaattcgagg

SEQ ID NO: 639232 - DNA, 75 bp, synthetic construct
  source 1..75: mol_type = other DNA
tccataccgaagaggtgatgctggacaaaattaccggaaaaacgccggtaggcggcctatgtttccccggttgtt

SEQ ID NO: 639233 - DNA, 75 bp, synthetic construct
  source 1..75: mol_type = other DNA
gaaatttcgtgcgttgtttctggagctgtttttccgccgtacggtgaatttccataccgaagaggtgatgctgga

SEQ ID NO: 639234 - DNA, 75 bp, synthetic construct
  source 1..75: mol_type = other DNA
gataacgcaaaaacacgcgtacccatgacgattggcgcactctggacggcttaccgtgatgtgggggtgtactga

SEQ ID NO: 639235 - DNA, 75 bp, synthetic construct
  source 1..75: mol_type = other DNA
cgccacattaaccgctatcgttgagaactacgcagttacccaccccaagaaacatggctggagtaccctgggcgc

SEQ ID NO: 639236 - DNA, 75 bp, synthetic construct
  source 1..75: mol_type = other DNA
gttctggcaactggccgcattgacgcgattgaacgcgttaacgtaggggcacaggtatcaggccaggtgaaatca

SEQ ID NO: 639237 - DNA, 75 bp, synthetic construct
  source 1..75: mol_type = other DNA
gttataaactgaaacccaatggtacgtaccatattgaagatacgcaaccattaaatacagcgaagccccgcagtg

SEQ ID NO: 639238 - DNA, 75 bp, synthetic construct
  source 1..75: mol_type = other DNA
gagcagactatggcgcgggctggggttccggttcccgccgggggataccagctcaatgccgctgcgggcagacga

SEQ ID NO: 639239 - DNA, 75 bp, synthetic construct
  source 1..75: mol_type = other DNA
aagtgaggagctcgttgacctgcaggcacatcccttttttaacctgcgggataaataccgcgaccagatcctgtt

SEQ ID NO: 639240 - DNA, 75 bp, synthetic construct
  source 1..75: mol_type = other DNA
cgttttatcgccctgagcacggcacaaccgcgcgtgattcacatcgtggccaccagcgaacaggaagcacgccag

SEQ ID NO: 639241 - DNA, 75 bp, synthetic construct
  source 1..75: mol_type = other DNA
tctgaattgtggggattgcccatcacccttagggcttttatcacgtttgattgttgacaagtggtcacctattga

SEQ ID NO: 639242 - DNA, 75 bp, synthetic construct
  source 1..75: mol_type = other DNA
atttgttgcaacaatgtgtcttcgaagcggatgtttttctttgtgctgccggagcgatcaaattttggtttcaca

SEQ ID NO: 639243 - DNA, 75 bp, synthetic construct
  source 1..75: mol_type = other DNA
cacaagtattgttggcgtgggtaatcagccatcagggtgtgatggcgattccaaaagcggcaactgtcgcacatg

SEQ ID NO: 639244 - DNA, 75 bp, synthetic construct
  source 1..75: mol_type = other DNA
ctggaaaatgttccgtactgttgcagtggaggaggcaaaaaatcttctcagcaaggggggtgaaattgccgtacg

SEQ ID NO: 639245 - DNA, 75 bp, synthetic construct
  source 1..75: mol_type = other DNA
tggcaaaggcactgtgactgatgacggtggacggaaagcgctgcgactggaaaaacagcccggtaaactgacgtc

SEQ ID NO: 639246 - DNA, 75 bp, synthetic construct
  source 1..75: mol_type = other DNA
tgacggcaatgacgaacaaggaacttgccgaaaaacttgcgcccatgctcagggaaggatggggacttcttgggg

SEQ ID NO: 639247 - DNA, 75 bp, synthetic construct
  source 1..75: mol_type = other DNA
ggccagttatttccgcgtgattggcgcaggtcaggtttatggcctgtctgcccgcggcctggcaattgatactgc

SEQ ID NO: 639248 - DNA, 75 bp, synthetic construct
  source 1..75: mol_type = other DNA
ggggcagagttactgaagaaaggcggacgtgtgagcgtgcggtttaaggtgccgggctcactggtacagaaccgg

SEQ ID NO: 639249 - DNA, 75 bp, synthetic construct
  source 1..75: mol_type = other DNA
agacctggcatcacagggctggcgctattatcacaaaccggcgagcggagacaatgttgataaaaacatcgctga

SEQ ID NO: 639250 - DNA, 75 bp, synthetic construct
  source 1..75: mol_type = other DNA
tcaatggattatacaaagagaagattaaatcagaaaatgttggtaaaacggtaggtagtgactggcctcgacttc

SEQ ID NO: 639251 - DNA, 75 bp, synthetic construct
  source 1..75: mol_type = other DNA
tatataaagagaagattaaatcagaaaatgttggtaaaacggtaggtagtactggccacgacttcaaagaaattt

SEQ ID NO: 639252 - DNA, 75 bp, synthetic construct
  source 1..75: mol_type = other DNA
agcgtaagaatgagatccttcgggcccaggttatcagtggattacaggcgtcagaggagctggcaaaacttctta

SEQ ID NO: 639253 - DNA, 75 bp, synthetic construct
  source 1..75: mol_type = other DNA
tctcgtgaaaacttccttgttaatttctacgcgactaatccggattgtgcattgcgacctgattataccattgat

SEQ ID NO: 639254 - DNA, 75 bp, synthetic construct
  source 1..75: mol_type = other DNA
attgcagcctgattataccattgatgtaggaaacaatcgacagggcgaaagtttatgccaaccgccgggtccaat

SEQ ID NO: 639255 - DNA, 75 bp, synthetic construct
  source 1..75: mol_type = other DNA
actgaaagacacgctgatcggtgatgaggaagcaacagggaaaaaagccctgaaactgaccaaacaggaaggcaa

SEQ ID NO: 639256 - DNA, 75 bp, synthetic construct
  source 1..75: mol_type = other DNA
cgaccgcatccgtaaaatgaacggctatacatacacgcttaaagaaaacggtatgccctatgctggtgtcattgc

SEQ ID NO: 639257 - DNA, 75 bp, synthetic construct
  source 1..75: mol_type = other DNA
atatcaaaggcggcgacatatacgctgctgattgacagtgtgaaggtggaagtgaacaacgcggatgccgcggca

SEQ ID NO: 639258 - DNA, 75 bp, synthetic construct
  source 1..75: mol_type = other DNA
tattcaaggccatggttcagcagttccggactgacctgtcctcacttgctgcacagtgtgtgagcggaaatgccg

SEQ ID NO: 639259 - DNA, 75 bp, synthetic construct
  source 1..75: mol_type = other DNA
agcacaacaacactgctgtcttaccgtgccagtgagtctgaagggaggctgaccgaacagggctggagtgctggc

SEQ ID NO: 639260 - DNA, 75 bp, synthetic construct
  source 1..75: mol_type = other DNA
acgcgtaaaatctttgccgatctcggtgcatggcagattgcccaactggcacgtcatccgcagcgcccttatacc

SEQ ID NO: 639261 - DNA, 75 bp, synthetic construct
  source 1..75: mol_type = other DNA
tgcaaccgtcgggtgatggtggcgctgttatcagcaccaccagcgaaccggaatattactttgtcattgcgctgg

SEQ ID NO: 639262 - DNA, 75 bp, synthetic construct
  source 1..75: mol_type = other DNA
atttgaatgaatggggggagtttgagggatggaaagacattgttgtcaacgagagaagaaaggtaagaacaaaag

SEQ ID NO: 639263 - DNA, 75 bp, synthetic construct
  source 1..75: mol_type = other DNA
ggtaaataaataccgtgcagacctggcagatattgcagaccagtgtattggcgggacaacgtccggcgtcccgtg

SEQ ID NO: 639264 - DNA, 75 bp, synthetic construct
  source 1..75: mol_type = other DNA
aacacaatgcgcttttccttgccatggtaaatcagttccgtacggaactggcagatgtggcagagcagtgtactg

SEQ ID NO: 639265 - DNA, 75 bp, synthetic construct
  source 1..75: mol_type = other DNA
cctgcgaatgcgggtatccttcttgttccatgtggccgtggcgattcgggatttactgcgggggccgagggggcg

SEQ ID NO: 639266 - DNA, 75 bp, synthetic construct
  source 1..75: mol_type = other DNA
atcaggacggtgcaggcggatcggaaggtgaagaaggtgaacgttattacacagtagattattctggtgttactg

SEQ ID NO: 639267 - DNA, 75 bp, synthetic construct
  source 1..75: mol_type = other DNA
cgctgacgctgacagatatcacgggggcaaaagcgacgtatccggtactgcttgatacggtcactgtcaaagtga

SEQ ID NO: 639268 - DNA, 75 bp, synthetic construct
  source 1..75: mol_type = other DNA
cacgcagtaatggtaactggacgacagccgatcgtaaaacgcacttcagctcctgggcgcgaagaggcattgttt

SEQ ID NO: 639269 - DNA, 75 bp, synthetic construct
  source 1..75: mol_type = other DNA
aaatcgctctcaaaagccgatttaaagcgtaagaatgagatccttcgggcccaggttatcagtggattacaggcg

SEQ ID NO: 639270 - DNA, 75 bp, synthetic construct
  source 1..75: mol_type = other DNA
ctcgaaaagcgcggcggccaccagtgctgttgccgcgaaaacgtcagaaacgaatgcggcagcgtcacaaaaatc

SEQ ID NO: 639271 - DNA, 75 bp, synthetic construct
  source 1..75: mol_type = other DNA
ttactggcccggtgaatatgcagaccgtaaccgtgcagtggctaatcagcgaatgaccgggagtaatgcgcggtg

SEQ ID NO: 639272 - DNA, 75 bp, synthetic construct
  source 1..75: mol_type = other DNA
caccgccaataacccggaacaggaagaagcggaagagatcctcgacgtcacctacagcggcgcagagatggaaat

SEQ ID NO: 639273 - DNA, 75 bp, synthetic construct
  source 1..75: mol_type = other DNA
catcagctacagaagctgcaaattcatgtaaggcagcaaaagcatcagagacaaacgcaaaagcgtctgaagctg

SEQ ID NO: 639274 - DNA, 75 bp, synthetic construct
  source 1..75: mol_type = other DNA
agaaacgtctgcagaaagatcagaacggtgcggatatccctggcaaagacacctttacgaaaaatattggtgcct

SEQ ID NO: 639275 - DNA, 75 bp, synthetic construct
  source 1..75: mol_type = other DNA
accagtgataaggtcattgttctctcagaaccttataccggcgaaactcaatctaaagttccgtgccgaatcatt

SEQ ID NO: 639276 - DNA, 75 bp, synthetic construct
  source 1..75: mol_type = other DNA
tgttgacagcaacacacatgaagttgtctgtgcagacctgtcgctgaataacgtcacggactcagaagccttccc

SEQ ID NO: 639277 - DNA, 75 bp, synthetic construct
  source 1..75: mol_type = other DNA
gtaaaccgttatggcatcgtgggttccggtttactctccattcagtcagtcaatttttcatttgttaccgtcatg

SEQ ID NO: 639278 - DNA, 75 bp, synthetic construct
  source 1..75: mol_type = other DNA
aaagcggcgtgaaacacttattgtcgccacttctttaggtttagggcttggcgctgagagatcccctcataattt

SEQ ID NO: 639279 - DNA, 75 bp, synthetic construct
  source 1..75: mol_type = other DNA
ccatgtatcgcttcaagcagctcatcggtccgaaactgagtctgcggagctacaacgcccaggtgggtgagatcc

SEQ ID NO: 639280 - DNA, 75 bp, synthetic construct
  source 1..75: mol_type = other DNA
aaattcgcaagcacggcaaggagaaacgccgcgtctggcgcaagcttcaccttgccgtagatgcggcgacccatg

SEQ ID NO: 639281 - DNA, 75 bp, synthetic construct
  source 1..75: mol_type = other DNA
cacggtggaaatggacaacggaatataaccgtcgctcgatagcggaaacggcaatgtacagaatgaagcagttgt

SEQ ID NO: 639282 - DNA, 75 bp, synthetic construct
  source 1..75: mol_type = other DNA
agccgttaaggccgcgtatgacctggctaacgggaaatacaccgcacaggatgcaacgacagcacagaaagggat

SEQ ID NO: 639283 - DNA, 75 bp, synthetic construct
  source 1..75: mol_type = other DNA
attaacccaagacgaaagcactggaaagttgacagaacaaattatatctaccatttcaggtgcaatgagagatta

SEQ ID NO: 639284 - DNA, 75 bp, synthetic construct
  source 1..75: mol_type = other DNA
agaaactaatctaagaatcatcaacagagtaatcgtaaaactgtcacccctcattgaaggctcagagatagaaga

SEQ ID NO: 639285 - DNA, 75 bp, synthetic construct
  source 1..75: mol_type = other DNA
cttacaattaccttagattatcacaatcaaattatctccctacaagaaaggggttaacgaagaaagcaattcaaa

SEQ ID NO: 639286 - DNA, 75 bp, synthetic construct
  source 1..75: mol_type = other DNA
caagccaacagctgcattcttaacaaagaccttagtcagcaaagatggggaaattaagcgccggattatggccat

SEQ ID NO: 639287 - DNA, 75 bp, synthetic construct
  source 1..75: mol_type = other DNA
atataatactaaaagagaaattttcatatcaagagaatgattttcatcataattatatcacatcttctttcaaaa

SEQ ID NO: 639288 - DNA, 75 bp, synthetic construct
  source 1..75: mol_type = other DNA
gaaaaagttgtaagcgacgaaatatatttctctattaataaccttaccgatatattagagcaaaaactggctcca

SEQ ID NO: 639289 - DNA, 75 bp, synthetic construct
  source 1..75: mol_type = other DNA
gttgaccctgcgggctgcacagggttttattgattccatttttacactgatgaatgttccgttgcgctgcccgga

SEQ ID NO: 639290 - DNA, 75 bp, synthetic construct
  source 1..75: mol_type = other DNA
atcatcaagcgccagtagtgccgcttcctcggcaacggcggcaggcaattccgcgaaggcggcaaagacgtctga

SEQ ID NO: 639291 - DNA, 75 bp, synthetic construct
  source 1..75: mol_type = other DNA
tcaccgatcattctttaattaacttagtagacaaatatggtcgcacacctatattctattcagatgattattatt

SEQ ID NO: 639292 - DNA, 75 bp, synthetic construct
  source 1..75: mol_type = other DNA
taatgcgcggtggaaatggacaacagattataaccgtcgctcgatagcggaaacggcgatgtaccgggtaaaaca

SEQ ID NO: 639293 - DNA, 75 bp, synthetic construct
  source 1..75: mol_type = other DNA
gtgttcaggttgaccctgcgggctgcacagggttttattgattccatttttacactgatgaatgttccgttgcgc

SEQ ID NO: 639294 - DNA, 75 bp, synthetic construct
  source 1..75: mol_type = other DNA
ccggcacggatcgtgtttatccgcactgcagaaggaaaagaacgtcttcgcccggcgctttccagcggcaatctg

SEQ ID NO: 639295 - DNA, 75 bp, synthetic construct
  source 1..75: mol_type = other DNA
ctcttagcatgtacgcggttgatgctgttgccgctattgcagaggtgagaggctggaacgcctgccgtgccgcta

SEQ ID NO: 639296 - DNA, 75 bp, synthetic construct
  source 1..75: mol_type = other DNA
caataggtgctttccacattgcagaacagcaggtcgatggcacaagtgactacatcaaggatggagaatggccta

SEQ ID NO: 639297 - DNA, 75 bp, synthetic construct
  source 1..75: mol_type = other DNA
caaaaggtgtttatttttatatctctagaacagctaccttgtcagcatatactaataaagctttaagaggaactc

SEQ ID NO: 639298 - DNA, 75 bp, synthetic construct
  source 1..75: mol_type = other DNA
ggcatagatgtttcaaacaatgaaatagctaaaaaaatagctcgtgatttaaaactcaatttaacatcagatagt

SEQ ID NO: 639299 - DNA, 75 bp, synthetic construct
  source 1..75: mol_type = other DNA
tttttatcgatttagataaaagcattgatgaaagaagttttgtggcaaagtttgatcttaatgctgactttcttg

SEQ ID NO: 639300 - DNA, 75 bp, synthetic construct
  source 1..75: mol_type = other DNA
tactttttcattgcttgcaagttgtcacaatttagtaaagtctattgacgcaatgattgacgccaagaaaatgaa

SEQ ID NO: 639301 - DNA, 75 bp, synthetic construct
  source 1..75: mol_type = other DNA
actatcctcggtgggttctggtttcttctgtacggctttttatcttcactgatagacctgctgaaacccgctggc

SEQ ID NO: 639302 - DNA, 75 bp, synthetic construct
  source 1..75: mol_type = other DNA
atgaaagtcatattcacgtcgaatcgtcttgttgattttcttatccggcttgttattacagcaattgtcatttcc

SEQ ID NO: 639303 - DNA, 75 bp, synthetic construct
  source 1..75: mol_type = other DNA
cttacaagtcacaacacacgcagtttgaacaagttgctgacctctacgaaatgcaatttgatgacggtcgcactt

SEQ ID NO: 639304 - DNA, 75 bp, synthetic construct
  source 1..75: mol_type = other DNA
aaaaccaataggtgcattccacattgcagaacagcaagttgacggcacaagtgactacctcaaggatggagaatg

SEQ ID NO: 639305 - DNA, 75 bp, synthetic construct
  source 1..75: mol_type = other DNA
gcgattgcgtaatgcgctatcgggcaactctccggtaactccggatggttgggttatggtgccgaaggaaccaac

SEQ ID NO: 639306 - DNA, 75 bp, synthetic construct
  source 1..75: mol_type = other DNA
ctgaagccagagagatgttatctgtctggcgggaagcatatcgcgctattgctattggcggtcagtcatataaat

SEQ ID NO: 639307 - DNA, 75 bp, synthetic construct
  source 1..75: mol_type = other DNA
aggacagcaggaagattttacaggacaaggacgaggtgaaagaattgcttggccggtcaccgaacaatgccgacg

SEQ ID NO: 639308 - DNA, 75 bp, synthetic construct
  source 1..75: mol_type = other DNA
ccagtgccgcccaggaagccgtcgatgtgttgctctcgctggaaaatgaacccgtgctggtaaatggctggattg

SEQ ID NO: 639309 - DNA, 75 bp, synthetic construct
  source 1..75: mol_type = other DNA
attcatctcaaaaatggcggcggtaacggtgatcactatcatcatgcgccgatattttacgtttgagggtagaaa

SEQ ID NO: 639310 - DNA, 75 bp, synthetic construct
  source 1..75: mol_type = other DNA
cgaaggaacaaacaagcagcagttgcagaaatgggtggacgactacggcgaggatagcgactttgtgaaggtccg

SEQ ID NO: 639311 - DNA, 75 bp, synthetic construct
  source 1..75: mol_type = other DNA
ggcaacgcaccactgacgacgtattgtttgccaaaataattgccgacttcgaggaccagtaccaggccgatgctg

SEQ ID NO: 639312 - DNA, 75 bp, synthetic construct
  source 1..75: mol_type = other DNA
aagatcagctcgtcgaggatatcgcatcgttcacgtatgacccgctgggctattcgctgtatgcgtttccgtggg

SEQ ID NO: 639313 - DNA, 75 bp, synthetic construct
  source 1..75: mol_type = other DNA
aatcctctgtgaagcatagccgccagcggatgtacctggtacccccggttttttcacagctgaccgaacaacatc

SEQ ID NO: 639314 - DNA, 75 bp, synthetic construct
  source 1..75: mol_type = other DNA
tgttactggcagggctggttatctggtgcgtattggcgcgctggactggacgcccgcgcgttcacgccgcgagcg

SEQ ID NO: 639315 - DNA, 75 bp, synthetic construct
  source 1..75: mol_type = other DNA
atctgttcgcatggtcaacctctatccgcgaaagcggctgggtaggttttgtggaagctgcaatttttatttttg

SEQ ID NO: 639316 - DNA, 75 bp, synthetic construct
  source 1..75: mol_type = other DNA
ctgttatatgacggcggtcttaagtggtctgctacaacatgcgccgccgctggcgcaataacggtaatgataaat

SEQ ID NO: 639317 - DNA, 75 bp, synthetic construct
  source 1..75: mol_type = other DNA
gggtgtcgttgtcgagcgtaccgtgcgcgaattacgcggcgaaccttgctttgctcttgaggataaccctccttc

SEQ ID NO: 639318 - DNA, 75 bp, synthetic construct
  source 1..75: mol_type = other DNA
gcaggccgacacaaaagctaatacgatttcctaaagttattgaaatgacgggaaaatcaagaacgcgaatttacg

SEQ ID NO: 639319 - DNA, 75 bp, synthetic construct
  source 1..75: mol_type = other DNA
cggtaaaagaaaccacggtggacgggatgcttgccgctgctttcgttatcctttactccggtgtgctcctgttta

SEQ ID NO: 639320 - DNA, 75 bp, synthetic construct
  source 1..75: mol_type = other DNA
gtggtggctctcatgaggcgataatccgcttcccggcagacagtggtcagaaaccggtgtatgtgtcggtaacgg

SEQ ID NO: 639321 - DNA, 75 bp, synthetic construct
  source 1..75: mol_type = other DNA
atcaacaaatctcagcgctcactgaacgaagatgacctacttgaagccatgataaagcttcagggaagctctgag

SEQ ID NO: 639322 - DNA, 75 bp, synthetic construct
  source 1..75: mol_type = other DNA
gtacagacacttctgtagggaaaacggtggtttcccgcgcattgctacaagcgttagcctcccagggaaaaacgg

SEQ ID NO: 639323 - DNA, 75 bp, synthetic construct
  source 1..75: mol_type = other DNA
cctgttgtgaatgccaaaccaacacgtactccaggtgtatttcacgcatcatttcctggtgtcccttctctgaca

SEQ ID NO: 639324 - DNA, 75 bp, synthetic construct
  source 1..75: mol_type = other DNA
atttggttttccggcgctggcagcacctggtgccggaacactgggtatcgctgtctctggtgaggctttatctgc

SEQ ID NO: 639325 - DNA, 75 bp, synthetic construct
  source 1..75: mol_type = other DNA
tggtgccggaacactgggtatcgccgtctctggtgaggctttatctgcggcaatagcggatatctttgcagccct

SEQ ID NO: 639326 - DNA, 75 bp, synthetic construct
  source 1..75: mol_type = other DNA
tacatgaaatcgacggtgatgatgcaatcgataagtggattgaaaaaaagaatggaacatcgttaaagcggattc

SEQ ID NO: 639327 - DNA, 75 bp, synthetic construct
  source 1..75: mol_type = other DNA
tccgttatctcgccggaaggttgtgcctctatcctctggaagagcgcagacaaggccccgctggcggctgaagcg

SEQ ID NO: 639328 - DNA, 75 bp, synthetic construct
  source 1..75: mol_type = other DNA
ggatctggccgatctcgacgtgttaagcactgaagatttaaaaaatcgtcgttatcagcgcctgatgagctacgg

SEQ ID NO: 639329 - DNA, 75 bp, synthetic construct
  source 1..75: mol_type = other DNA
cgcagtctggcaatggacaggagaaagaaaggccactgactaaggttgaacgtcagattacaggagatactctgg

SEQ ID NO: 639330 - DNA, 75 bp, synthetic construct
  source 1..75: mol_type = other DNA
gccaatttgtatgtatacgaactactgcaaaaccagatcgagtgaagggggggtacgttgttgagcggtttcatt

SEQ ID NO: 639331 - DNA, 75 bp, synthetic construct
  source 1..75: mol_type = other DNA
gaactatgagaaagtgtttggggttactgatataatgaattcagctaacatcaccatacttgaagggactgattt

SEQ ID NO: 639332 - DNA, 75 bp, synthetic construct
  source 1..75: mol_type = other DNA
gggattctcagcatggtgagcttgaggggtatcgtgccagtgatggtcagcatcttggctcatttgaccctaaaa

SEQ ID NO: 639333 - DNA, 75 bp, synthetic construct
  source 1..75: mol_type = other DNA
aataataacgttgaaggtgtttgtaattttattactcatcacgtaagtagtggatttaccgagcgcgcacgaaaa

SEQ ID NO: 639334 - DNA, 75 bp, synthetic construct
  source 1..75: mol_type = other DNA
atgagagataaagcgaaacgtgacttaagtcacatatcaattgagataccaaaatccgtaacccaggtcatcaaa

SEQ ID NO: 639335 - DNA, 75 bp, synthetic construct
  source 1..75: mol_type = other DNA
atgacaaatatcattctgtgtgatgtgactgccagcgtcagcgaacttaaaaacgatccggtggccaccgccagt

SEQ ID NO: 639336 - DNA, 75 bp, synthetic construct
  source 1..75: mol_type = other DNA
tgttattacagcaattgtcatttccccggtaattatctggtcatggaatacggtaaaagaaaccacggtgggcgg

SEQ ID NO: 639337 - DNA, 75 bp, synthetic construct
  source 1..75: mol_type = other DNA
gtcttgttgattttcttatccggctttcgattacagcgattgtcatttccccggtaattatctggtcgtgggata

SEQ ID NO: 639338 - DNA, 75 bp, synthetic construct
  source 1..75: mol_type = other DNA
cagccacagtacggcatttgatgacctggggaataccaccggggatgcggacgatttcctagactctcaggagat

SEQ ID NO: 639339 - DNA, 75 bp, synthetic construct
  source 1..75: mol_type = other DNA
catggttccaccttgagcgccagttctggacgccgcaaaatttcacgattccagtaatcgtaacgctgtggggat

SEQ ID NO: 639340 - DNA, 75 bp, synthetic construct
  source 1..75: mol_type = other DNA
caccaactaaaagcaggaataaatatccccggtgctcaactcaaggttgggaaaccttcacttcttatcaaataa

SEQ ID NO: 639341 - DNA, 75 bp, synthetic construct
  source 1..75: mol_type = other DNA
gggacaaatgccagaaagaggatggacagaggatgatatcaaaaataccgtatctaacggtgcaactggtacatc

SEQ ID NO: 639342 - DNA, 75 bp, synthetic construct
  source 1..75: mol_type = other DNA
tggtgaacggtcaggtggtgggtaacagtgtggtgaaggtgacccgtacaccgacagacccggtgctgtaccgct

SEQ ID NO: 639343 - DNA, 75 bp, synthetic construct
  source 1..75: mol_type = other DNA
agccgcccggcttccggcggactggcaaacatcacggtgaaacaggctctgccggacaacggggaagcctgcatc

SEQ ID NO: 639344 - DNA, 75 bp, synthetic construct
  source 1..75: mol_type = other DNA
ggagctgctcaacaaaactatgccctggcacaagttacttgcccccgaatctgcgggcgaaagcacagagaacag

SEQ ID NO: 639345 - DNA, 75 bp, synthetic construct
  source 1..75: mol_type = other DNA
tcctgcggaatccgcggcaacgcgcgccgagacagcagcaaaacgggcagaggatattgcatccgccgtggcgct

SEQ ID NO: 639346 - DNA, 75 bp, synthetic construct
  source 1..75: mol_type = other DNA
tccagctgaatccgcggcaacgcgcgccgagacagcagcaaaacgggcagaggatattgcatccgccgtggcgct

SEQ ID NO: 639347 - DNA, 75 bp, synthetic construct
  source 1..75: mol_type = other DNA
ttcggcagaatccgcggcaacgcgcgccgagacagcagcaaaacgggcagaggatattgcatccgccgtggcgct

SEQ ID NO: 639348 - DNA, 75 bp, synthetic construct
  source 1..75: mol_type = other DNA
ctgagacggcagcgggacagagcgcctcagctgcggcaggctcaaaaacagcggctgcgtcgtctgccagtgccg

SEQ ID NO: 639349 - DNA, 75 bp, synthetic construct
  source 1..75: mol_type = other DNA
gtcggaaaccagcgcagaatcctcaaaaacggcagcggcatcgtccgccagttcggcggcgtcatcggcatcatc

SEQ ID NO: 639350 - DNA, 75 bp, synthetic construct
  source 1..75: mol_type = other DNA
tgctgccgaatccgcggcaacgcgcgccgagacagcagcaaaacgggcagaggatattgcatccgccgtggcgct

SEQ ID NO: 639351 - DNA, 75 bp, synthetic construct
  source 1..75: mol_type = other DNA
gtctgcttcaaaagatgaggcgaccagacaagcgtcagcagcgaatggcagagccacgacggcagcgacgaaggc

SEQ ID NO: 639352 - DNA, 75 bp, synthetic construct
  source 1..75: mol_type = other DNA
ccgacaacatccagcggaagtggaacggcgaatgcgcagtttacctatattaatcatggtgatggttattcccct

SEQ ID NO: 639353 - DNA, 75 bp, synthetic construct
  source 1..75: mol_type = other DNA
aacagcacgtccgagtcactggcggcaacaccaaaggccgtaaaagccgcctgtgagaatgctgagaaacgactg

SEQ ID NO: 639354 - DNA, 75 bp, synthetic construct
  source 1..75: mol_type = other DNA
gtctgcttcaaaagatgaggcgaccagacaagcgtcagcagcgaatggcagggccacgacggcaacgacgaaggc

SEQ ID NO: 639355 - DNA, 75 bp, synthetic construct
  source 1..75: mol_type = other DNA
gtctgcttcaaaagatgaggcgaccagacaagcgtcagcagcgaatggcagggccacgactgcatcgacgaaggc

SEQ ID NO: 639356 - DNA, 75 bp, synthetic construct
  source 1..75: mol_type = other DNA
gtctgcttcaaaagatgaggcgaccagacaagcgtcagcagcgaatggcagggccacgacagcagcgacgaaggc

SEQ ID NO: 639357 - DNA, 75 bp, synthetic construct
  source 1..75: mol_type = other DNA
aagtacggcggaatccgcggcaacgcgcgccgagacagcggcaaaacgggcagaggatattgcatccgccgtggc

SEQ ID NO: 639358 - DNA, 75 bp, synthetic construct
  source 1..75: mol_type = other DNA
gcagcagagccgtataaatatgtcttacagccactgcctgatgtgtggataccgtttaacgattcactggatatg

SEQ ID NO: 639359 - DNA, 75 bp, synthetic construct
  source 1..75: mol_type = other DNA
cagagagtatgcaagccaggcagcggagccgtataaacaagttttgcagccgttgcctgatgtgtggataccgtt

SEQ ID NO: 639360 - DNA, 75 bp, synthetic construct
  source 1..75: mol_type = other DNA
aaaccacatcgtcgtttgattacggcactaaatccacgaataacaccggggctcatacgcacagtctgagcggct

SEQ ID NO: 639361 - DNA, 75 bp, synthetic construct
  source 1..75: mol_type = other DNA
tcgcacacgcaagaatgggtcgtaagctccatgatgttcggtgcggcagtcggtgcggtgggcagcggctggctc

SEQ ID NO: 639362 - DNA, 75 bp, synthetic construct
  source 1..75: mol_type = other DNA
atgggggcgctcttcctgttgagttactacaccgacgtcgctggcgtcggtgccgctgcggcgggcaccatgctg

SEQ ID NO: 639363 - DNA, 75 bp, synthetic construct
  source 1..75: mol_type = other DNA
aacatgccgtgctcttgttgcgtgcctaaacaagttaggcgcaaaagtcagtcttgatgacgtgttcccgccgga

SEQ ID NO: 639364 - DNA, 75 bp, synthetic construct
  source 1..75: mol_type = other DNA
agtgaaacaaaagcagcagccagcgagacagaagcaacgtcagccgcaacaagagcagagaatgcagcccggatt

SEQ ID NO: 639365 - DNA, 75 bp, synthetic construct
  source 1..75: mol_type = other DNA
gccctgatgcaggggcagacttttgacaaatctgcatacccgaaacttgcagcggcttatccgtcaggcgtgatc

SEQ ID NO: 639366 - DNA, 75 bp, synthetic construct
  source 1..75: mol_type = other DNA
atgccctgatgcaggggcagacttttgacaaatctgcatacccgaaacttgcagtcgcttatccgtcaggcgtta

SEQ ID NO: 639367 - DNA, 75 bp, synthetic construct
  source 1..75: mol_type = other DNA
ggcgacagaggcagctggcagtgcgacggcggcagcacagagcaaaagtacggcggaatctgcagcaacgcgcgc

SEQ ID NO: 639368 - DNA, 75 bp, synthetic construct
  source 1..75: mol_type = other DNA
cgcgaccaacagcacgtctgaaacgctggcggcaacgccaaaggcagtaaaagcagccaatgacaatgctgagaa

SEQ ID NO: 639369 - DNA, 75 bp, synthetic construct
  source 1..75: mol_type = other DNA
accacgaaagcgtcagatgcggcctcctcagccagggatgcgtcggcttcaaaagaggcggtaaaatcatcagaa

SEQ ID NO: 639370 - DNA, 75 bp, synthetic construct
  source 1..75: mol_type = other DNA
cggcagaatctgcggcaacgcgcgccgagactgcggcaaaacgggcggaggatattgcgtctgccgtggcgcttg

SEQ ID NO: 639371 - DNA, 75 bp, synthetic construct
  source 1..75: mol_type = other DNA
atgcaaggcaacatcattcgaccaggtgtcggacagagatcttaaagaaaatattcaggttattgacaatgccac

SEQ ID NO: 639372 - DNA, 75 bp, synthetic construct
  source 1..75: mol_type = other DNA
atgccaccagggataaagcccccgcaacttatcagtcattacctggggaagaactggggaattttcctcggggtt

SEQ ID NO: 639373 - DNA, 75 bp, synthetic construct
  source 1..75: mol_type = other DNA
attttgtttcttttctgcggtatttattcaggtgctaaacccgatgaatattgcctatcgtaaacgagaaacgga

SEQ ID NO: 639374 - DNA, 75 bp, synthetic construct
  source 1..75: mol_type = other DNA
tgccagtttctccttcttcagagccattgattgcagcaaccgataaactggtgcgtgaataccttgatggttacg

SEQ ID NO: 639375 - DNA, 75 bp, synthetic construct
  source 1..75: mol_type = other DNA
agtagccgagttgacggcagatgataatctttcatcgccttcaaatgatataaattcatatcataaccaatcggc

SEQ ID NO: 639376 - DNA, 75 bp, synthetic construct
  source 1..75: mol_type = other DNA
atggtattcagcccagcctgttgtttaagtggaaaaaaatatctggaaggaagtctcactgctgttgctgccgga

SEQ ID NO: 639377 - DNA, 75 bp, synthetic construct
  source 1..75: mol_type = other DNA
acattacaaatcaaatatgccaatcatgggtcaaccatgacaatcaacacacagggaaccgctcattctggcgct

SEQ ID NO: 639378 - DNA, 75 bp, synthetic construct
  source 1..75: mol_type = other DNA
aacttgggatctcggttacaaccgtcagccgcgcgttgaacggctatgacgacgtgtcgcaggagacgcgcgccc

SEQ ID NO: 639379 - DNA, 75 bp, synthetic construct
  source 1..75: mol_type = other DNA
cacatcttcataaagcaggtattccgtttctggctcttggacgggtaccgcagggcttgccctgtgcgtggtttg

SEQ ID NO: 639380 - DNA, 75 bp, synthetic construct
  source 1..75: mol_type = other DNA
tttgcttcttttctgcagtatttattcaggtgcttaacccgatgaatattgcctaccgcaaacgagaagcaaata

SEQ ID NO: 639381 - DNA, 75 bp, synthetic construct
  source 1..75: mol_type = other DNA
cgctattttcgccgtactggtggcgattgcgtctggtggtgaacgattactgtttaagatttccgggccaatggt

SEQ ID NO: 639382 - DNA, 75 bp, synthetic construct
  source 1..75: mol_type = other DNA
tctcactgctgtggctgccggtgaagacgttgttcctgcttctgaactggccgctgcaataaagcagattaatca

SEQ ID NO: 639383 - DNA, 75 bp, synthetic construct
  source 1..75: mol_type = other DNA
atcggtttttgatatggaaaaacacagtattctgaacgattacctggagcttcctgttcacgaacgcaatgagac

SEQ ID NO: 639384 - DNA, 75 bp, synthetic construct
  source 1..75: mol_type = other DNA
tcgacgttattatggggaaactccagtcgtccagttgtttatgaaattagggatgatggcgggctttttttgttt

SEQ ID NO: 639385 - DNA, 75 bp, synthetic construct
  source 1..75: mol_type = other DNA
atggacgtcgagtatggtcagtacagcgttattctgttggtggagggattcccgccgtcacatgccgggaccatc

SEQ ID NO: 639386 - DNA, 75 bp, synthetic construct
  source 1..75: mol_type = other DNA
cgttgcgttggtctacaacggcatttcgcacgtagtgatgatggcttcgccaaaagaccttgaacgctttgcgct

SEQ ID NO: 639387 - DNA, 75 bp, synthetic construct
  source 1..75: mol_type = other DNA
gcatcagcaaaggccgctgaggcatcaaaaagtgctgccgctgcagagtcctcaaaaagcgcggcggccaccagt

SEQ ID NO: 639388 - DNA, 75 bp, synthetic construct
  source 1..75: mol_type = other DNA
ggtgctgatatccccgacaagggccgcttcctgaataacattaatgtttacagcaaaggtgaagtggataagaaa

SEQ ID NO: 639389 - DNA, 75 bp, synthetic construct
  source 1..75: mol_type = other DNA
tccatcgtttacatcgcattgattggtggcgctggttacaacgtcggttccccacatcaggcaggcatttcagaa

SEQ ID NO: 639390 - DNA, 75 bp, synthetic construct
  source 1..75: mol_type = other DNA
ctgacactggtaggtttttgtaaaccgggtcgggcaacggtttatacccatccgcagcgtttgattcataattaa

SEQ ID NO: 639391 - DNA, 75 bp, synthetic construct
  source 1..75: mol_type = other DNA
gtgaaaaaaacacagcaaaaagaaatcgaaaatgtgacaaatatcacaggtgttcgtcaaattgagttatggcgg

SEQ ID NO: 639392 - DNA, 75 bp, synthetic construct
  source 1..75: mol_type = other DNA
tgacgtgagtaaagttaaaggcgcactggctaagcacgacgccaataagacaacttcactggaaggtgtttctgt

SEQ ID NO: 639393 - DNA, 75 bp, synthetic construct
  source 1..75: mol_type = other DNA
aatttgacgctggtgggcttttgtaagccgggtcgggcaacggtttatacccatccgcagcgtttgagcaattaa

SEQ ID NO: 639394 - DNA, 75 bp, synthetic construct
  source 1..75: mol_type = other DNA
gaccacgcttgctgtagaagtggctgagcgctgtaatttgacgctggtgggcttttgtaaaccgggtcgggcaac

SEQ ID NO: 639395 - DNA, 75 bp, synthetic construct
  source 1..75: mol_type = other DNA
agattttgtttgcggtgtctgccgcgaccacgcttgctgtagaagtggctgagcgctgtaatttgacgctggtgg

SEQ ID NO: 639396 - DNA, 75 bp, synthetic construct
  source 1..75: mol_type = other DNA
tgcccgtgaatggcaaagcggcacttttgtcgcgccgacgctgatcgaactggatagctttgctgaaatgcaaaa

SEQ ID NO: 639397 - DNA, 75 bp, synthetic construct
  source 1..75: mol_type = other DNA
ttttcaccgggcaaattgctgccgcgctggcggcaggtaacagcgtactggcaaaaccggcggagcaaacgccgc

SEQ ID NO: 639398 - DNA, 75 bp, synthetic construct
  source 1..75: mol_type = other DNA
tgctggcgaatcgcccggaaagtgcgctggcggtgacactcgcgcgtcaggatgcagagtatccggtcgatgcgc

SEQ ID NO: 639399 - DNA, 75 bp, synthetic construct
  source 1..75: mol_type = other DNA
ggaattttgggatgcttgaatagcaaaaaagcgcctttagggcgcttttttacattggtgggtcgtgcaggatga

SEQ ID NO: 639400 - DNA, 75 bp, synthetic construct
  source 1..75: mol_type = other DNA
gctggaaaaaccaggaatgccggccagcctggcaacagccgtgaataacgagtttgtgccggaagtggaaatcac

SEQ ID NO: 639401 - DNA, 75 bp, synthetic construct
  source 1..75: mol_type = other DNA
cgattcctccgccctgaccgaacaggtcgtcgtggatgtactggcctcggccttcgacagtgcaggtcagcgttg

SEQ ID NO: 639402 - DNA, 75 bp, synthetic construct
  source 1..75: mol_type = other DNA
ccgggccgaaagcaggcggtccgctctatctctaccgtctgctggcgaatcgcccggaaagtgcgctggcagtga

SEQ ID NO: 639403 - DNA, 75 bp, synthetic construct
  source 1..75: mol_type = other DNA
caacgcccatacgctggcggcaatttatcaactggcgggtcaaaactactacccgggtcagtacgagttccagtg

SEQ ID NO: 639404 - DNA, 75 bp, synthetic construct
  source 1..75: mol_type = other DNA
aaccatcgcggaagcgttagccaatgcccgcaagctggaagagaaaggtttccgttactcttacgatatgcttgg

SEQ ID NO: 639405 - DNA, 75 bp, synthetic construct
  source 1..75: mol_type = other DNA
gctgatccgcaaaggtgtggatatggcaatgcgcctgatgggcgagcagttcgtcacgggcgaaaccatcgcgga

SEQ ID NO: 639406 - DNA, 75 bp, synthetic construct
  source 1..75: mol_type = other DNA
atgggcgagccactgtatgagcaggtcaccgggaaagttgccgacggcaaacttaaccgtccgtgtcgtatttat

SEQ ID NO: 639407 - DNA, 75 bp, synthetic construct
  source 1..75: mol_type = other DNA
gccagcctctcccgctcgctgaaccgcattatcggtaagagcggtgaaccactgatccgcaaaggtgtggatatg

SEQ ID NO: 639408 - DNA, 75 bp, synthetic construct
  source 1..75: mol_type = other DNA
aaagcgcagcggctgatgtggtgatcaaaacccgcccgttcgccgaaattatctactgggggccgcatttaagcc

SEQ ID NO: 639409 - DNA, 75 bp, synthetic construct
  source 1..75: mol_type = other DNA
accgctaaattgtggggcaactccagccgtcctgttgtttatgaagtcggtgttgatggtggcgcttatatgttc

SEQ ID NO: 639410 - DNA, 75 bp, synthetic construct
  source 1..75: mol_type = other DNA
atgggtgatttattcagttgccaaacccgctggagtattgagataattttcagtctgactctcgcaatatcttat

SEQ ID NO: 639411 - DNA, 75 bp, synthetic construct
  source 1..75: mol_type = other DNA
gttcgtcatgcactgaccaacctcagagagggagagtggcagataaatcgtttcgccatcactttacctgtagct

SEQ ID NO: 639412 - DNA, 75 bp, synthetic construct
  source 1..75: mol_type = other DNA
tgctcgtgcggcgattctctctaacgagaaattccgtggtgtgcgcctgtatgtcagtgaaaaccagttgaaaat

SEQ ID NO: 639413 - DNA, 75 bp, synthetic construct
  source 1..75: mol_type = other DNA
gttcgctattacttaaatggtatgctgttcgaaaccgaaggtgaagaactgcgcaccgtggcgactgacggccac

SEQ ID NO: 639414 - DNA, 75 bp, synthetic construct
  source 1..75: mol_type = other DNA
caccctatggcgggtggatatgccggatgcggcgacacaggtgcagggggtggtcagcccggatcagtcgcaggc

SEQ ID NO: 639415 - DNA, 75 bp, synthetic construct
  source 1..75: mol_type = other DNA
ctgacctctttcgccgccatcctgactgggtactgtcaatgccggggtacacacaaccaaccgggagacatcagt

SEQ ID NO: 639416 - DNA, 75 bp, synthetic construct
  source 1..75: mol_type = other DNA
gcttgatctcctccgtgaacgttttccacatgttgagtttgagtcctgtgcttccggtggggggcgtattgactt

SEQ ID NO: 639417 - DNA, 75 bp, synthetic construct
  source 1..75: mol_type = other DNA
cgccggtatgccttgctctataaagaatggcgacaactgattcatacaggtgttctctggcgtgtggatatgccg

SEQ ID NO: 639418 - DNA, 75 bp, synthetic construct
  source 1..75: mol_type = other DNA
tggcatgagttactttttcccgccggaggtaatgggggctcatattggccatcgttgctgccatgcaactttccg

SEQ ID NO: 639419 - DNA, 75 bp, synthetic construct
  source 1..75: mol_type = other DNA
ggtatttatttcaatcacaatcctgattacatcatgcagatggctgagcgtgcagcagcactgggcgttgaacgt

SEQ ID NO: 639420 - DNA, 75 bp, synthetic construct
  source 1..75: mol_type = other DNA
tgattgccgcgcaagggatcgccattttgctggaagcgggtgtaccgccaggcgtggtgcaattgctgccaggtc

SEQ ID NO: 639421 - DNA, 75 bp, synthetic construct
  source 1..75: mol_type = other DNA
caatgttgcgttcacttaccccgagcaatcccaacaagcgctaaaagggatctcccttcaggcaaacaccgggga

SEQ ID NO: 639422 - DNA, 75 bp, synthetic construct
  source 1..75: mol_type = other DNA
aactgctgacccgcgcatgggacccgcaacagggcgagattttgcttaacggtagccccatagccagcctgaatg

SEQ ID NO: 639423 - DNA, 75 bp, synthetic construct
  source 1..75: mol_type = other DNA
gttgggtgaaggcggacgccagctctccggtggtgaactgcgccgtctggctatcgcccgtgcgctgttacatga

SEQ ID NO: 639424 - DNA, 75 bp, synthetic construct
  source 1..75: mol_type = other DNA
acatatggcgattctcgggcgaaccggatgcggcaaatcaacactgttacaactgctgacccgcgcatgggaccc

SEQ ID NO: 639425 - DNA, 75 bp, synthetic construct
  source 1..75: mol_type = other DNA
cgccgcgtcggtctggagaaattgctcgaagatgcaggactcaacagttggttaggtgaaggcggacgtcaactc

SEQ ID NO: 639426 - DNA, 75 bp, synthetic construct
  source 1..75: mol_type = other DNA
tggaagcgcaacgtcgtcaatctgaactgaccgcattgtcgcaagcgataatgctgctcattggcgcgttagcgg

SEQ ID NO: 639427 - DNA, 75 bp, synthetic construct
  source 1..75: mol_type = other DNA
gccagcggaaatttgtgactcattgcgtaagatgaattcaacaaaatgcaatgagatggcatcacttattgaaag

SEQ ID NO: 639428 - DNA, 75 bp, synthetic construct
  source 1..75: mol_type = other DNA
ctgcagtcctgaataacgaactacaggacaaattcgccagttggtatcccggttgtacgatagacgctcagagta

SEQ ID NO: 639429 - DNA, 75 bp, synthetic construct
  source 1..75: mol_type = other DNA
accaacgctaacgctgggcttcctggtgatggctgctggcatgggcgtactcggtacaatgatgcatatcggtat

SEQ ID NO: 639430 - DNA, 75 bp, synthetic construct
  source 1..75: mol_type = other DNA
atgcgcgctttgctaccctatctggcactgtataaacgtcataaatggatgttaagtcttggtattgtgctggca

SEQ ID NO: 639431 - DNA, 75 bp, synthetic construct
  source 1..75: mol_type = other DNA
ctatcgcccgtgcgctattgcacgatgcgccgttggtattgctggatgaaccaaccgaaggcttagatgccacga

SEQ ID NO: 639432 - DNA, 75 bp, synthetic construct
  source 1..75: mol_type = other DNA
atgaaatataaaaatctcaccgtatcacaaaaaggtttaagtctgattgaatcggcaatggtcctggctatcagt

SEQ ID NO: 639433 - DNA, 75 bp, synthetic construct
  source 1..75: mol_type = other DNA
actcccaaaacgctgagtatcgtcggcatagacacccttagcagacgaaccaagaacatcgcctactacgccgaa

SEQ ID NO: 639434 - DNA, 75 bp, synthetic construct
  source 1..75: mol_type = other DNA
ctttaccagaaaggctgggcaaagcgtgaaatggtgctgtttatgggcttcgctaagtctggtaaatcgacggcg

SEQ ID NO: 639435 - DNA, 75 bp, synthetic construct
  source 1..75: mol_type = other DNA
acgaaacagagttaagagccgtcagtagagaaaataataaaaatgtaatttgtgggtatttttcttttagtaaac

SEQ ID NO: 639436 - DNA, 75 bp, synthetic construct
  source 1..75: mol_type = other DNA
gtaatataatttttaactttagaactggtagaatacaagtttttgatcccagaggattgaaccactcgggagaaa

SEQ ID NO: 639437 - DNA, 75 bp, synthetic construct
  source 1..75: mol_type = other DNA
ggtttgcccgtggcgaaagcaatatcctgctggaacggctgtatattgaacgctcgctgagtgtgaataccgctg

SEQ ID NO: 639438 - DNA, 75 bp, synthetic construct
  source 1..75: mol_type = other DNA
cagggctcaactggagcagttgttaaggcagcaggcagagaaaaagaatgaagacgcgacagttcagcctgataa

SEQ ID NO: 639439 - DNA, 75 bp, synthetic construct
  source 1..75: mol_type = other DNA
catggtgcctgacatggttgttgtcgactacgcagatttgatgcgtgccagttatgaccttcgtgatgatcgcgc

SEQ ID NO: 639440 - DNA, 75 bp, synthetic construct
  source 1..75: mol_type = other DNA
tagcaaaacagacgcttaaaaacagtaaaaatccggcagagcgtgaaaaggcacagcagaaatatgatgcattgc

SEQ ID NO: 639441 - DNA, 75 bp, synthetic construct
  source 1..75: mol_type = other DNA
actacaataaccaagtcagcgatatgtatccggatgcttacgggcagatagtaaacctgctgaatatcaccagtg

SEQ ID NO: 639442 - DNA, 75 bp, synthetic construct
  source 1..75: mol_type = other DNA
atctattagtgaaccttgggaatgcgaaaaatatgttttggttgatatgatttatagctctttagcaaagcaagt

SEQ ID NO: 639443 - DNA, 75 bp, synthetic construct
  source 1..75: mol_type = other DNA
gacttcatcgatctgtgcaaagaatatcattcaattgatactgacaaaaatatactgcaagatttattttatgaa

SEQ ID NO: 639444 - DNA, 75 bp, synthetic construct
  source 1..75: mol_type = other DNA
cgcaagactgaaagctattgcgtcgaaagaagggtacgaagatggcccttataactcgaaatacagccagcaata

SEQ ID NO: 639445 - DNA, 75 bp, synthetic construct
  source 1..75: mol_type = other DNA
gtcgaaagaagggtacgacgatggcccttataactcgaaatacagccagcaatacgctgatgcgtatggtcagat

SEQ ID NO: 639446 - DNA, 75 bp, synthetic construct
  source 1..75: mol_type = other DNA
cctacgtgctgacatatgccgcgccggtcaccaaaaaacagtttaactatgggcagcaacagagccaacagggca

SEQ ID NO: 639447 - DNA, 75 bp, synthetic construct
  source 1..75: mol_type = other DNA
ggcagcgtattggtgccagcggaagttggcgttaatccgatctatatcacccattggttgtggtctaaccacggt

SEQ ID NO: 639448 - DNA, 75 bp, synthetic construct
  source 1..75: mol_type = other DNA
cagaaatgcttaatctctctcaaaagctcaagttaccggaggtttatgccggtgatgtagagcaagatctaaccc

SEQ ID NO: 639449 - DNA, 75 bp, synthetic construct
  source 1..75: mol_type = other DNA
atgcatcacgacaagcgatgcaagaaatcgaacatgaagatcgtaaaggctgaagtttttgttacctgtccgggg

SEQ ID NO: 639450 - DNA, 75 bp, synthetic construct
  source 1..75: mol_type = other DNA
ccgaagcgcgacgactccagtcgcagaattgatgttccgtatggaggatatgaagtgaaaacaatcacacacccc

SEQ ID NO: 639451 - DNA, 75 bp, synthetic construct
  source 1..75: mol_type = other DNA
agcgcctcgttaaccgtaagtatgaccgcctgattatcacaaagggatatccgaagcgcgacgactccagccgca

SEQ ID NO: 639452 - DNA, 75 bp, synthetic construct
  source 1..75: mol_type = other DNA
aaagagtggcagagctatttcagctctactgggaatcgactgatggccgatttcgttggtaaagccattcgattc

SEQ ID NO: 639453 - DNA, 75 bp, synthetic construct
  source 1..75: mol_type = other DNA
gatgtatgggatctgttgatttgtcttaaggaggcgcgtttagaggcaattttggctaatggttctgaccctact

SEQ ID NO: 639454 - DNA, 75 bp, synthetic construct
  source 1..75: mol_type = other DNA
aatgtcgttgtactactgattcgcttgatttgaattttgacttcagtcggaagagggataaccaaaatgaaaaag

SEQ ID NO: 639455 - DNA, 75 bp, synthetic construct
  source 1..75: mol_type = other DNA
atgactagtgcggctgatttattacgaattgcagcggaaacaattgagcaaagaggtaaacaaaacggctacgac

SEQ ID NO: 639456 - DNA, 75 bp, synthetic construct
  source 1..75: mol_type = other DNA
aaatagccactatttacaacgctaagaagggagcagatttaaccccgcttgatgtatgggatctgctaatttgtc

SEQ ID NO: 639457 - DNA, 75 bp, synthetic construct
  source 1..75: mol_type = other DNA
tccctatcggtggattgaagaaaacttttgctgaccttgccggaccagaaccatctattgtaccggggcaatccc

SEQ ID NO: 639458 - DNA, 75 bp, synthetic construct
  source 1..75: mol_type = other DNA
attaaatgatcgggagaatgagcaaaagaaaaatcagttcactgccgccaatattaatgatgggatggtaaatga

SEQ ID NO: 639459 - DNA, 75 bp, synthetic construct
  source 1..75: mol_type = other DNA
tgatattcttgatgctgctcacattaatgtatatcgaaacgatagtcacaatcatattagcaatggattattgct

SEQ ID NO: 639460 - DNA, 75 bp, synthetic construct
  source 1..75: mol_type = other DNA
gaaagcagcagaacgggaagccctgcagcagtctgcccgttctgtgtctgaaccagaaaaggctgttttgtcagg

SEQ ID NO: 639461 - DNA, 75 bp, synthetic construct
  source 1..75: mol_type = other DNA
cctgaaatccgttgcaggactggcacagcataatggcggtgtggcgctgataaatcagcagtattacaccattca

SEQ ID NO: 639462 - DNA, 75 bp, synthetic construct
  source 1..75: mol_type = other DNA
gtgacacgcaggcacagacgctgaacacactggccaccagtggtgaccgggtacagatttatacgtcactgtcag

SEQ ID NO: 639463 - DNA, 75 bp, synthetic construct
  source 1..75: mol_type = other DNA
atcacacatccgcactttggcgataaaccggtaagggtgttcgctcttagggtaaatatcagcactgaatgtcaa

SEQ ID NO: 639464 - DNA, 75 bp, synthetic construct
  source 1..75: mol_type = other DNA
atcacacatccgcactttggcgataaaccggtaacggtgttcgctcttatggtaaataccagcactgaatgtcaa

SEQ ID NO: 639465 - DNA, 75 bp, synthetic construct
  source 1..75: mol_type = other DNA
atcacacatccgcactttggcgataaaccggtaatggtgttcgctcttagggtaaatagcagcactgaatgtcaa

SEQ ID NO: 639466 - DNA, 75 bp, synthetic construct
  source 1..75: mol_type = other DNA
atggcggtggtcgtaagggcaccggaaatgcgctggccacgctggaagatgccggtgtggtgcggcttcaggggg

SEQ ID NO: 639467 - DNA, 75 bp, synthetic construct
  source 1..75: mol_type = other DNA
gtcagtgatgcgggatgctgtgtcacaggccatttccctgctgagcgaccgcagggcgcagtttacctactccga

SEQ ID NO: 639468 - DNA, 75 bp, synthetic construct
  source 1..75: mol_type = other DNA
tgaaatcaagacaatcacacatccgcacttcggtgataaaccggtaaaggtgttcgcgataaagattaatatcga

SEQ ID NO: 639469 - DNA, 75 bp, synthetic construct
  source 1..75: mol_type = other DNA
ctggcagagcagcaggggctgaacggaaaagtgagcgggaaggatttactgaccggggaagggctgaagcatgac

SEQ ID NO: 639470 - DNA, 75 bp, synthetic construct
  source 1..75: mol_type = other DNA
tgtcggatatgcatctggattacggctatgccggtacggcacaccgggcacagggggccagcgaggcctttgtga

SEQ ID NO: 639471 - DNA, 75 bp, synthetic construct
  source 1..75: mol_type = other DNA
ggtggtaagtcacggtgaccgccggcagcgttatgaacagctggccctggattatgctgttctgcatgcacaggg

SEQ ID NO: 639472 - DNA, 75 bp, synthetic construct
  source 1..75: mol_type = other DNA
ctgcgctccgcactctatcccattatcggcgatcgcatatacgggcctgtaggtcatgcggttgatattttcgct

SEQ ID NO: 639473 - DNA, 75 bp, synthetic construct
  source 1..75: mol_type = other DNA
cggtatttcattttcactaatgctggttgttctttttcttttcctgccctggatgatgttgtcttcgtcggggat

SEQ ID NO: 639474 - DNA, 75 bp, synthetic construct
  source 1..75: mol_type = other DNA
gcctatacctactggttcgtaaacctgttctttttcacctcactgttgccgcgcgttattgcttatgcttcgtag

SEQ ID NO: 639475 - DNA, 75 bp, synthetic construct
  source 1..75: mol_type = other DNA
cactgatgccgccttcgcatcccctgcttggtacgctacagttgatcggctcaccaatggtagctctaatgattg

SEQ ID NO: 639476 - DNA, 75 bp, synthetic construct
  source 1..75: mol_type = other DNA
cgaagcagcggaagccatccctgatgcccgcgatcgcctgttctacgttgtacagatgactgcgcaggccgcaga

SEQ ID NO: 639477 - DNA, 75 bp, synthetic construct
  source 1..75: mol_type = other DNA
acccgcaacagcagctagaagcactgttcaataaactggtcaaacagcactccgagtttactcagccattggtcg

SEQ ID NO: 639478 - DNA, 75 bp, synthetic construct
  source 1..75: mol_type = other DNA
gttgcgttggttaagcgtcccacaacgattaaccatgcttgaagaactgatgcagtgggaggggagtcattctga

SEQ ID NO: 639479 - DNA, 75 bp, synthetic construct
  source 1..75: mol_type = other DNA
cttcagaacgaagccagacaacataaacgtgggctctggtcagatgctgatcggttccccctggatatggagaca

SEQ ID NO: 639480 - DNA, 75 bp, synthetic construct
  source 1..75: mol_type = other DNA
ggtttatgcaccagacggtatgaatgttaatcagtttatggtccgtgcaggcgctgcatgggtttatgagcagta

SEQ ID NO: 639481 - DNA, 75 bp, synthetic construct
  source 1..75: mol_type = other DNA
ttgatggacaatattcacgacacgctttcaggtttacgccgactggatattgataagcgctgggattttttacat

SEQ ID NO: 639482 - DNA, 75 bp, synthetic construct
  source 1..75: mol_type = other DNA
gtgcgtgttctggatggcaataccattgacgtcatgttatctcagcatccggtgcgtgtccgtcttgttaatatt

SEQ ID NO: 639483 - DNA, 75 bp, synthetic construct
  source 1..75: mol_type = other DNA
atggccggtggtcaacagacatgatgaaatcactggttgcaggaaaaacggttaccgtcacatattttcagcgag

SEQ ID NO: 639484 - DNA, 75 bp, synthetic construct
  source 1..75: mol_type = other DNA
atggtccgggccggggctgcctgggtatatgagcagtacaacacagatcccgtgctgcctgtccttcagaacgaa

SEQ ID NO: 639485 - DNA, 75 bp, synthetic construct
  source 1..75: mol_type = other DNA
aaattatgatggcgcaggattttcaggatctcaccgggcaggtgattaaacggatgatggatgtgattcaggaaa

SEQ ID NO: 639486 - DNA, 75 bp, synthetic construct
  source 1..75: mol_type = other DNA
caacagatttttacgaatgcaagttggttttatatccttgctgtcgccctgattttactgagtgtcgcttttctg

SEQ ID NO: 639487 - DNA, 75 bp, synthetic construct
  source 1..75: mol_type = other DNA
cctgacccgtatggacgagaatgttaccgtcattgtgaacggtgatattactcaatgtgatctgcccggtaacgt

SEQ ID NO: 639488 - DNA, 75 bp, synthetic construct
  source 1..75: mol_type = other DNA
acgggtctcccgcgggcgaaccattcgcgagtttgtcaccggcgtgctgtttgttcccgcgggttttacgctaat

SEQ ID NO: 639489 - DNA, 75 bp, synthetic construct
  source 1..75: mol_type = other DNA
tgcttctgctgaagtcatttgtggaaaatacgggtggttatctgtcggaactggtgagtaaaacgttcaaccttt

SEQ ID NO: 639490 - DNA, 75 bp, synthetic construct
  source 1..75: mol_type = other DNA
caaatcttcacgaatgccagctggttctacatccttgcagtggccctgattctactgagtgtctcgttcctggga

SEQ ID NO: 639491 - DNA, 75 bp, synthetic construct
  source 1..75: mol_type = other DNA
tggggtggcaaacacgcccgtctggcagcgaattttctgggcatcgctcatgggcgttgttgctattgccctgct

SEQ ID NO: 639492 - DNA, 75 bp, synthetic construct
  source 1..75: mol_type = other DNA
tattcacacttttctgaagaaatgtttgacggtctgaaaaatgcgtcagacagaaggttgtttgaacggttaaaa

SEQ ID NO: 639493 - DNA, 75 bp, synthetic construct
  source 1..75: mol_type = other DNA
aacgcctattgaagcggcgcgctttggtaaaagcattgaagattttcgcatgttctggatggaagatccgacccc

SEQ ID NO: 639494 - DNA, 75 bp, synthetic construct
  source 1..75: mol_type = other DNA
tggcgttgtgggatatcaaagctaaagcggcaaatatgccattgtatcaactgcttggtggcgcttctcgtgaag

SEQ ID NO: 639495 - DNA, 75 bp, synthetic construct
  source 1..75: mol_type = other DNA
tttgatctgtgggtccccaatttcggtgtccaggaatacatgggttattccgaacaaatgctcgaagtcttcccg

SEQ ID NO: 639496 - DNA, 75 bp, synthetic construct
  source 1..75: mol_type = other DNA
gcaaatatgccattgtatcaactgcttggtggcgcttctcgtgaaggcgtgatggtttattgccacaccaccggg

SEQ ID NO: 639497 - DNA, 75 bp, synthetic construct
  source 1..75: mol_type = other DNA
ctttaaggcgattcgggtgcagtgcggcgtgccgggtatgcaaactacctatggcctggcgaagggaaaagggct

SEQ ID NO: 639498 - DNA, 75 bp, synthetic construct
  source 1..75: mol_type = other DNA
cttccgctcacaaaaggcctatatctccggtcaggtgaataaatccggtcaacaggcgatcaccaacgtgccact

SEQ ID NO: 639499 - DNA, 75 bp, synthetic construct
  source 1..75: mol_type = other DNA
caactgggtacagcctgacggcactatgttttacccgtatatcggcaaggttcacgtagtcgggaaaacgctcgc

SEQ ID NO: 639500 - DNA, 75 bp, synthetic construct
  source 1..75: mol_type = other DNA
gttatcgaaaccgaagaggccagtcagtttgcggctatcgccagtgccttgttgattaacgttggcacgctgacg

SEQ ID NO: 639501 - DNA, 75 bp, synthetic construct
  source 1..75: mol_type = other DNA
cgtctgacccaataccagagcaaactgggcgcggctatggtgattgttgccgcctggtgcgtggaagattatcag

SEQ ID NO: 639502 - DNA, 75 bp, synthetic construct
  source 1..75: mol_type = other DNA
actggcgcaacgtcgttctgacacacaatggccgcgaagaacgtatttctttgcaggcgctgatgcaaaacggcg

SEQ ID NO: 639503 - DNA, 75 bp, synthetic construct
  source 1..75: mol_type = other DNA
cgcaggtggacgttaatatcgccgccttccgctcacaaaaggcctatatctcaggtcaggtgaataaatccggtc

SEQ ID NO: 639504 - DNA, 75 bp, synthetic construct
  source 1..75: mol_type = other DNA
gtctcgatctccccttccgcctggcggcgccattaaaccgtgaaaccgccgaggcgctcagcgcctgggccggtg

SEQ ID NO: 639505 - DNA, 75 bp, synthetic construct
  source 1..75: mol_type = other DNA
aacccataaaatatttttggagtatgcgacgtattttatatactatattctatacccttaaaaaaggaatttggc

SEQ ID NO: 639506 - DNA, 75 bp, synthetic construct
  source 1..75: mol_type = other DNA
taatccagtggactgccatctggtcattgttgatgagggcgtaaaacccgccatcgaacgagtttataccatcaa

SEQ ID NO: 639507 - DNA, 75 bp, synthetic construct
  source 1..75: mol_type = other DNA
tcgcaatctgctgaaaaaatgcctccttctgctactgattcggtgcaggaggcaatgaatgatgtgcgtcttaaa

SEQ ID NO: 639508 - DNA, 75 bp, synthetic construct
  source 1..75: mol_type = other DNA
aggaagcgcaaaatttagcgaaagacgttcagacagcattgcagcacagcattcgagaaataggtctgcgtttga

SEQ ID NO: 639509 - DNA, 75 bp, synthetic construct
  source 1..75: mol_type = other DNA
tctattatccagactattaagtttcagcagttcttcccctgtattggcattcagcaaggtgaaaggattgagata

SEQ ID NO: 639510 - DNA, 75 bp, synthetic construct
  source 1..75: mol_type = other DNA
aagtcaccatagccaggaacactagcggcgtaattcttaagctgagtggcatttcacctgcggtttatcagtgca

SEQ ID NO: 639511 - DNA, 75 bp, synthetic construct
  source 1..75: mol_type = other DNA
ccagtagctttaaataaagcaccatatcttgtaagtaataaggaatttgatgcttcgctaatagccaccgtcaca

SEQ ID NO: 639512 - DNA, 75 bp, synthetic construct
  source 1..75: mol_type = other DNA
gtttcaccgcgtacaggaacaattccagcagggagttacaccgccaatttgccggttacatttacctattattga

SEQ ID NO: 639513 - DNA, 75 bp, synthetic construct
  source 1..75: mol_type = other DNA
ttcccttgcttatgggactcttaagcgcatccatgccgctggcgggttatgcagcgcaaaaagcaaacgttagct

SEQ ID NO: 639514 - DNA, 75 bp, synthetic construct
  source 1..75: mol_type = other DNA
tagcggaggaagtggcggtgctaaaacacctggcactggcgctaatgccattcagcatcaggctcagaactggag

SEQ ID NO: 639515 - DNA, 75 bp, synthetic construct
  source 1..75: mol_type = other DNA
gaacggatgccaatggcggcgatgtgctggcgcgcattctctatggcacgcggatctcggttctgtttggcctga

SEQ ID NO: 639516 - DNA, 75 bp, synthetic construct
  source 1..75: mol_type = other DNA
atgagaaaacccacctataacgtgtatgtcacgcaggaaacccagcccggcgagaacggggaaaaaagtacgtac

SEQ ID NO: 639517 - DNA, 75 bp, synthetic construct
  source 1..75: mol_type = other DNA
accgttaactacatcccaggcgatgcggtacatgaaaaactgatcaaagctgccgaagacggtactcgaatccag

SEQ ID NO: 639518 - DNA, 75 bp, synthetic construct
  source 1..75: mol_type = other DNA
ataaccgtaagctggtagggaaactgaacgttcctgatctgactctgaccgttaactacatcccaggcgatgcgg

SEQ ID NO: 639519 - DNA, 75 bp, synthetic construct
  source 1..75: mol_type = other DNA
ctggtggcctcgttggtctgtttctgcatgaagaagtaactaacaccgatcttgacagtgaaagctatctggaaa

SEQ ID NO: 639520 - DNA, 75 bp, synthetic construct
  source 1..75: mol_type = other DNA
tgaaacatcttctccacgaggtatggtatattttgattcaaagaaaaatataatttatcagtggttaaccaatcc

SEQ ID NO: 639521 - DNA, 75 bp, synthetic construct
  source 1..75: mol_type = other DNA
cgcattacatctataacgagatgaaagagctacagcgacagaaaggtatactagaaagtggcgctgggcttggtg

SEQ ID NO: 639522 - DNA, 75 bp, synthetic construct
  source 1..75: mol_type = other DNA
gcgtcgtacagcgtgaactgacgtttgcggttgatggcaagcccgttccacagaagatctttactgttggtggat

SEQ ID NO: 639523 - DNA, 75 bp, synthetic construct
  source 1..75: mol_type = other DNA
aagatttcactcagacgttaatgaatgagcaaggggaagtgacgaaacgtgtttcggggaatttatcggaagaag

SEQ ID NO: 639524 - DNA, 75 bp, synthetic construct
  source 1..75: mol_type = other DNA
tgaaatcaagacaatcacacatccacacttcggcgataaaccggtaaaggtgttcgcgataaaggtgaatatcgg

SEQ ID NO: 639525 - DNA, 75 bp, synthetic construct
  source 1..75: mol_type = other DNA
tgggtgacgctggctgcggttaaactgtggcatgagccagtatcgctgcgtcactggtgtggagtagcgttcatt

SEQ ID NO: 639526 - DNA, 75 bp, synthetic construct
  source 1..75: mol_type = other DNA
atgatctggatgattttagtctttgccagcctgcttagtgtagccgggcagttgtgtcagaaacaggcaaccggc

SEQ ID NO: 639527 - DNA, 75 bp, synthetic construct
  source 1..75: mol_type = other DNA
cgactggaaacctcacactgtgaatgaaaagtttgatggcgggtggtgtccatcaattcacatgccgcgctgggc

SEQ ID NO: 639528 - DNA, 75 bp, synthetic construct
  source 1..75: mol_type = other DNA
atgaaaaatttgatggcgggtggtgtccatcaattcacatgccgcgctgggcatcgcgcattcttctggaaatta

SEQ ID NO: 639529 - DNA, 75 bp, synthetic construct
  source 1..75: mol_type = other DNA
atgtcctcacattgaatggcaatgtgatacgtacagagagctgctagagctcatcttgcaatacttatcagtcac

SEQ ID NO: 639530 - DNA, 75 bp, synthetic construct
  source 1..75: mol_type = other DNA
agacccttaacactggctctgaaagctcgtcaggcactggttcaggcggcggcactgccattcccccaccagcac

SEQ ID NO: 639531 - DNA, 75 bp, synthetic construct
  source 1..75: mol_type = other DNA
catcagcaaataaggccagcacagccagcgcagtcgccgctttggttcctgattctgttcttgatgaattaaaca

SEQ ID NO: 639532 - DNA, 75 bp, synthetic construct
  source 1..75: mol_type = other DNA
cgcctgtgtaatgactactggaataagcgaattatgctccgtgagtatgaccgtctgattatcacaaagggatat

SEQ ID NO: 639533 - DNA, 75 bp, synthetic construct
  source 1..75: mol_type = other DNA
tgtggcacgaaccggtgtcttttcgccactggtgtggggtggcattcattattggcggcattgtgatcctgggga

SEQ ID NO: 639534 - DNA, 75 bp, synthetic construct
  source 1..75: mol_type = other DNA
agcgcctcgttaaccgtaagtatgaccgcctgattatcacaaagggatatccgaagcgcgaagacttcagtcgca

SEQ ID NO: 639535 - DNA, 75 bp, synthetic construct
  source 1..75: mol_type = other DNA
tgaaatcaagacaatcacacatccgcacttcggcgataaaccggtaaaggtgtacgcgataaaggtgaatattga

SEQ ID NO: 639536 - DNA, 75 bp, synthetic construct
  source 1..75: mol_type = other DNA
ccaaggttgcgttccagcgcctgtgggaatccatctatggtgaagaaagctggaacgctaatccctgggtgtggg

SEQ ID NO: 639537 - DNA, 75 bp, synthetic construct
  source 1..75: mol_type = other DNA
ccggctttgtcatcgaccacatccactactacgccgatgcgctcaagccgtggattgcgcggcgtgaacgctggc

SEQ ID NO: 639538 - DNA, 75 bp, synthetic construct
  source 1..75: mol_type = other DNA
atacgcccacatgctaaaaccgccgaaagacaggcaagaaattagctggctgacagcagaaaaaatcattgagtg

SEQ ID NO: 639539 - DNA, 75 bp, synthetic construct
  source 1..75: mol_type = other DNA
ctggtattagggaggctgttcttgaatcagatatgccgaaaacaatgcgtttttcaatgcctgatggcagtgaat

SEQ ID NO: 639540 - DNA, 75 bp, synthetic construct
  source 1..75: mol_type = other DNA
acgttatctgtcaccgcgacaccgtcaaaggatccgatcaaaaaactcgattatacggccattactttgctgaat

SEQ ID NO: 639541 - DNA, 75 bp, synthetic construct
  source 1..75: mol_type = other DNA
ctcacaggatgtgaccgcacagaggtaacactttcatttacccctgagatggccagtttctctaatgaattcgat

SEQ ID NO: 639542 - DNA, 75 bp, synthetic construct
  source 1..75: mol_type = other DNA
aattgatttcttctacgtggcttatttttacaatcttgggatttttattggatcttggtttatatacctctttat

SEQ ID NO: 639543 - DNA, 75 bp, synthetic construct
  source 1..75: mol_type = other DNA
acgactggtgctggacggcgtgtttaaccacagtggcgattcccatgcctggtttgacaggcacaatcgtggcac

SEQ ID NO: 639544 - DNA, 75 bp, synthetic construct
  source 1..75: mol_type = other DNA
aaagctggagtgctaatccctgggtttgggtagcgtggatgcaatggctgtgtggcacgttgattgccagtacat

SEQ ID NO: 639545 - DNA, 75 bp, synthetic construct
  source 1..75: mol_type = other DNA
ggaatccatctacggagaagaaagctggagtgctaatccctgggtgtgggtaatcgagtttaagcgcattcagga

SEQ ID NO: 639546 - DNA, 75 bp, synthetic construct
  source 1..75: mol_type = other DNA
atggcttataaacacattggcgtggcaatttccgggaatgaagaagatgccctactggtgaacaaagccctggat

SEQ ID NO: 639547 - DNA, 75 bp, synthetic construct
  source 1..75: mol_type = other DNA
tcgcctgatgcctgcttatcgcggcgttatcaacaagtcgacggcagatttgctaatcgtgccgtttatcgacaa

SEQ ID NO: 639548 - DNA, 75 bp, synthetic construct
  source 1..75: mol_type = other DNA
ttcgggaaatgtactattcagtctttgaggaacggttattttgagctgatggacatttatgattcggaaggtcgt

SEQ ID NO: 639549 - DNA, 75 bp, synthetic construct
  source 1..75: mol_type = other DNA
acacccgtcagcgatgagacgttacgggagatttatgccctgatgaaatgggggccgacatcagctaactgttct

SEQ ID NO: 639550 - DNA, 75 bp, synthetic construct
  source 1..75: mol_type = other DNA
ttgtcgatggtcgcctgaaaatgaacgaaaacgccgcatggctggatggtcagcgtctgccgccgcagggctatg

SEQ ID NO: 639551 - DNA, 75 bp, synthetic construct
  source 1..75: mol_type = other DNA
ggtcagaggccagcatttttacctctatatgatcgtcgatatttacagtcgcaaaattattgctgcagaggtatt

SEQ ID NO: 639552 - DNA, 75 bp, synthetic construct
  source 1..75: mol_type = other DNA
actgttggaattgatacgctttatacaccgcagcgaaaatcattcacctccgagagtcaacagcttatcgaatca

SEQ ID NO: 639553 - DNA, 75 bp, synthetic construct
  source 1..75: mol_type = other DNA
gcactgttacaattgcgggaatttatcgacgaaaactccggtgaattttttgttcatgtctggggaaatggagcc

SEQ ID NO: 639554 - DNA, 75 bp, synthetic construct
  source 1..75: mol_type = other DNA
tccatgcaggcggcctatctgatcgtggcctgtcgtgcgctgggactggataccggcccaatgtccggttttgac

SEQ ID NO: 639555 - DNA, 75 bp, synthetic construct
  source 1..75: mol_type = other DNA
attgcctgatgcagtttgataacggtacggcttccagtggcttgtcctggctctctgttggcatgacgatgatgt

SEQ ID NO: 639556 - DNA, 75 bp, synthetic construct
  source 1..75: mol_type = other DNA
gatggctggtgctgtactgttcgtattgggctcaataggatcagcgtttgccaccagtgtcgaaatgttaatcgc

SEQ ID NO: 639557 - DNA, 75 bp, synthetic construct
  source 1..75: mol_type = other DNA
atcatcatgtactacgcgccgcgtatcttcaaaatggcgggctttacgaccacagaacaacagatgattgcgact

SEQ ID NO: 639558 - DNA, 75 bp, synthetic construct
  source 1..75: mol_type = other DNA
accgatcactttgtgctgaccagtcgtttgcaggagtgggtggtcagcagcatgatgcttggcgcggcaatcggt

SEQ ID NO: 639559 - DNA, 75 bp, synthetic construct
  source 1..75: mol_type = other DNA
cggttatgcgatgagcgccgcgccagtggtgtggatcctgtgctctgaaattcagccgctgaaatgccgcgattt

SEQ ID NO: 639560 - DNA, 75 bp, synthetic construct
  source 1..75: mol_type = other DNA
atgaaaaaaaccaaaattgtttgcaccatcggaccgaaaaccgaatctgaagagatgttagctaaaatgctggac

SEQ ID NO: 639561 - DNA, 75 bp, synthetic construct
  source 1..75: mol_type = other DNA
aatgattgtcaaaggaaaatttgaatctcctttgattacaattgatcctgatagcttcagtcagtatcaagtaac

SEQ ID NO: 639562 - DNA, 75 bp, synthetic construct
  source 1..75: mol_type = other DNA
actgaccaagataaattccggatcaccctgtttagcgaggcagaagtccgtggtatcggagccccaaatctttca

SEQ ID NO: 639563 - DNA, 75 bp, synthetic construct
  source 1..75: mol_type = other DNA
gaaacgaaacagcctgaaccagtggcgcaacaggaagtagaaaaagtttgcaatgcctgcggtcagtctagcggg

SEQ ID NO: 639564 - DNA, 75 bp, synthetic construct
  source 1..75: mol_type = other DNA
ctttatcgtttctttaaaatggatggtgattttaatatattaacatcagatgaatacatgagtatcatgacacct

SEQ ID NO: 639565 - DNA, 75 bp, synthetic construct
  source 1..75: mol_type = other DNA
cccgcgatcgcggccaggcaatggttgacttgttggcacagtatgagcagcacggtttgcaattgaacagtcgtg

SEQ ID NO: 639566 - DNA, 75 bp, synthetic construct
  source 1..75: mol_type = other DNA
ctgtttgaacatgtgcacggtgaatcccgcgaccgcggtcaggcgatggtagacctgctggcgcagtatgagcag

SEQ ID NO: 639567 - DNA, 75 bp, synthetic construct
  source 1..75: mol_type = other DNA
aaactggaaggcggtaatgacgtttctctgaaagccggtcagacctttactttcactactgacaaatccgttatc

SEQ ID NO: 639568 - DNA, 75 bp, synthetic construct
  source 1..75: mol_type = other DNA
tatctgtaaagtgctgaacaacggtgacctgggcgaaaacaaaggtgtgaacctgcctggcgtttccattgctct

SEQ ID NO: 639569 - DNA, 75 bp, synthetic construct
  source 1..75: mol_type = other DNA
tttcgtccacgatctgacgtcactggcacgcgatgtagccactggcgtacttgcccgttcaatggacgtggacat

SEQ ID NO: 639570 - DNA, 75 bp, synthetic construct
  source 1..75: mol_type = other DNA
attcaaaacggcttattacgactaccgctatcacgttcaggatgcattctacagtgacggttatgaagcacagtt

SEQ ID NO: 639571 - DNA, 75 bp, synthetic construct
  source 1..75: mol_type = other DNA
ttaattgaattgccttttggcgaacagtcgcagaccattacggccatgtgcgctcaccatgccggaaaagcggtt

SEQ ID NO: 639572 - DNA, 75 bp, synthetic construct
  source 1..75: mol_type = other DNA
ggtggttaccgccgggcaggttgctcacgctcctgtgattatcggcgtcgacccggcgtattccggagttgatga

SEQ ID NO: 639573 - DNA, 75 bp, synthetic construct
  source 1..75: mol_type = other DNA
atgttcaactcatgcaagacatggctgaggctgggcgggatgctggatgaccaggaaacagcggacgacctgtcg

SEQ ID NO: 639574 - DNA, 75 bp, synthetic construct
  source 1..75: mol_type = other DNA
ctatcagccgcttatgctggcacgtgcttctggtcacggtattggtaaatccgcattcatctcaatgctgatcaa

SEQ ID NO: 639575 - DNA, 75 bp, synthetic construct
  source 1..75: mol_type = other DNA
acctattgacccggcggttatgagtgcgggattgcgcacgctggaaaaacaggttgattgggtgctggtcgaggg

SEQ ID NO: 639576 - DNA, 75 bp, synthetic construct
  source 1..75: mol_type = other DNA
gtcacgctgaatatatgaccacgctcacccgcatgattcccgcgccgctgctgggagagatcccctggcttgcag

SEQ ID NO: 639577 - DNA, 75 bp, synthetic construct
  source 1..75: mol_type = other DNA
ggaagttgctgagggtgcgcttacggacgaagacactgagattatctgggtggcgttcggaaacccgacacgtaa

SEQ ID NO: 639578 - DNA, 75 bp, synthetic construct
  source 1..75: mol_type = other DNA
atgacagtcgcagccatgtcgccggaagaacagctcgttgaggatattgcatctttcacgtatgacccactgggc

SEQ ID NO: 639579 - DNA, 75 bp, synthetic construct
  source 1..75: mol_type = other DNA
caccgggcgattccgtgaatgtttccgcaaatacaaacaccgctgggtcacaaagcagatcgatagccgaaccgt

SEQ ID NO: 639580 - DNA, 75 bp, synthetic construct
  source 1..75: mol_type = other DNA
aggacagccggaagattttgcaggacaaggaagaggtgaaagaattgcttggccggtcacctaacaacgccgacg

SEQ ID NO: 639581 - DNA, 75 bp, synthetic construct
  source 1..75: mol_type = other DNA
attgcaggatatggtcactggcgggttaagcattgacgctattctcgatgtcctggacgccaccggcgaagggga

SEQ ID NO: 639582 - DNA, 75 bp, synthetic construct
  source 1..75: mol_type = other DNA
attgcaggatatggtcactggcgggttaagcattgacgctattctcaatgtactggatgccaccggcgaaggtga

SEQ ID NO: 639583 - DNA, 75 bp, synthetic construct
  source 1..75: mol_type = other DNA
cgttcggtggtgcgtcaactgaccctcagatgctcaacaagcgcggggagatgttcaactcatgcaagacatggc

SEQ ID NO: 639584 - DNA, 75 bp, synthetic construct
  source 1..75: mol_type = other DNA
gggtaacacaggaacaactgccggtaatactggtggttggcgtgaaactcggctgcattaatcacgcgatgttga

SEQ ID NO: 639585 - DNA, 75 bp, synthetic construct
  source 1..75: mol_type = other DNA
cgattctgctgggaagcctgtttactctaagcgcctgtgtacagcaaagcgaaatccgccagatgaaacacagcg

SEQ ID NO: 639586 - DNA, 75 bp, synthetic construct
  source 1..75: mol_type = other DNA
actcaataaagaaacggtcaaaatcactcagcaaaacaggctgaatgcaaaatccagcagtggggtttaccttct

SEQ ID NO: 639587 - DNA, 75 bp, synthetic construct
  source 1..75: mol_type = other DNA
accaaaaccgcatcggttacaccgtcatcagcagtaccgaaatcttcctggccgccagtagggcaacgttgttgg

SEQ ID NO: 639588 - DNA, 75 bp, synthetic construct
  source 1..75: mol_type = other DNA
gtcgcggtatcagcccacttccgctgattgatggagttgaaattggcacactggtcgaactggcgcaatggacgc

SEQ ID NO: 639589 - DNA, 75 bp, synthetic construct
  source 1..75: mol_type = other DNA
acgaccactggagcgttaccggacgctgcgcctttaccgacggttgtgaaggctggaaaacgggctgccagaaat

SEQ ID NO: 639590 - DNA, 75 bp, synthetic construct
  source 1..75: mol_type = other DNA
caacggcatttctcccccctataccatcgaagtaggccaaaagttgaaacttggtggggcaaaaagcaaccgcag

SEQ ID NO: 639591 - DNA, 75 bp, synthetic construct
  source 1..75: mol_type = other DNA
gggtaacacaggaacaactgccggtaatactggtagttggtgtgaaactcggctgtattaatcacgcgatgttga

SEQ ID NO: 639592 - DNA, 75 bp, synthetic construct
  source 1..75: mol_type = other DNA
aacgatgtcactccaccgggcaaacgtcacgctgaatatatgaccacgctcacccgcatgattcccgcgccgctg

SEQ ID NO: 639593 - DNA, 75 bp, synthetic construct
  source 1..75: mol_type = other DNA
gccgatagaatcatcggtaatgagcgccggattacgcgcgcttgaacaacaggctgactgggtgttagtggaagg

SEQ ID NO: 639594 - DNA, 75 bp, synthetic construct
  source 1..75: mol_type = other DNA
accgcaatgactaaagatgttatacagcgaattactacattttttcacaccagcccagatgtcaagaacagagaa

SEQ ID NO: 639595 - DNA, 75 bp, synthetic construct
  source 1..75: mol_type = other DNA
ttgctggtcgtgcgaacgctggattcaatatatagcgcccttcagcgaaatccgttcgatggtgttgagcttgat

SEQ ID NO: 639596 - DNA, 75 bp, synthetic construct
  source 1..75: mol_type = other DNA
aaagacaaaaaaaattaagaggtgaagtagctgatgtttaccaatacacgaatataccaaatgcatttcgtgttc

SEQ ID NO: 639597 - DNA, 75 bp, synthetic construct
  source 1..75: mol_type = other DNA
aaacgagtacgaccagatggactcagacgccgctgtggatgaggccattctcgtcaatgcatacatcttcaccga

SEQ ID NO: 639598 - DNA, 75 bp, synthetic construct
  source 1..75: mol_type = other DNA
gtatgtccggctgatgagcgtcaccctgaactgatgttccgtcacccggaaaacgagtacgaccagatggactca

SEQ ID NO: 639599 - DNA, 75 bp, synthetic construct
  source 1..75: mol_type = other DNA
gcaagctgggcttatctcgggaagtcgcctgcaaatttgagctattccgaggcggcaatgctggcggttttgccg

SEQ ID NO: 639600 - DNA, 75 bp, synthetic construct
  source 1..75: mol_type = other DNA
acggcgatggatccgctcgatgcccaggcccagtacagcgaactgttcgaccgtggccgcgccacgtcactgttg

SEQ ID NO: 639601 - DNA, 75 bp, synthetic construct
  source 1..75: mol_type = other DNA
gctgggcattttcctgcgcgatttaacggcgatggatccgctcgatgcccaggcccagtacagcgaactgttcga

SEQ ID NO: 639602 - DNA, 75 bp, synthetic construct
  source 1..75: mol_type = other DNA
cccgcgaccgcggccaggcgatggtggacctgctggcgcagtacgagcagcacggcttgcagttaaacagccgcg

SEQ ID NO: 639603 - DNA, 75 bp, synthetic construct
  source 1..75: mol_type = other DNA
acgactggctgagctcagacgccgctgtggatgaggtcctgctcatcaacgaatacacctttacccgctctcagt

SEQ ID NO: 639604 - DNA, 75 bp, synthetic construct
  source 1..75: mol_type = other DNA
atgaaacgccgcgctcaactgacgctgggcctggcgctgctggcgctcgcgccgctggcaatcgcccagggcggt

SEQ ID NO: 639605 - DNA, 75 bp, synthetic construct
  source 1..75: mol_type = other DNA
ctgaccgatgcgttaagcaccgccgcgacgccgctcaaacgctttatgctggcgcagaccgacaaaaaagcgatg

SEQ ID NO: 639606 - DNA, 75 bp, synthetic construct
  source 1..75: mol_type = other DNA
acccggcatcactgctgcaagacgtcccccggcgcaccggtgattaccgacctggcaactttgacagcggttttc

SEQ ID NO: 639607 - DNA, 75 bp, synthetic construct
  source 1..75: mol_type = other DNA
tgcaaaactggaggatatggctgcagcgtataccgcatttgctcgccacggtaaggcgggtaagttgcgcttaca

SEQ ID NO: 639608 - DNA, 75 bp, synthetic construct
  source 1..75: mol_type = other DNA
tgtatcttaatcgcgctccgtttggtggtacgttgcaggggatcggtgcggcaagctgggcatatctcggaaaat

SEQ ID NO: 639609 - DNA, 75 bp, synthetic construct
  source 1..75: mol_type = other DNA
aattgccggaccatctgccgctgtatctggagtacctggcgcagctgccgcaaagcgaagccgtggagggtttga

SEQ ID NO: 639610 - DNA, 75 bp, synthetic construct
  source 1..75: mol_type = other DNA
ttctgctgatattcatggacgggtcgtgcgtgttctggatggcgataccattgacgtcatgttatctcagcatcc

SEQ ID NO: 639611 - DNA, 75 bp, synthetic construct
  source 1..75: mol_type = other DNA
ttgacgccatgttatctcagcatccggtgtgtgtccgtcttgttaatattgatgcacctgaaaagaaacaggact

SEQ ID NO: 639612 - DNA, 75 bp, synthetic construct
  source 1..75: mol_type = other DNA
ggctgcctgggtatatgagcagtacaacacagatcccgtgctgcctgtccttcagaacgaagccagacaacaaaa

SEQ ID NO: 639613 - DNA, 75 bp, synthetic construct
  source 1..75: mol_type = other DNA
agatccgcgaaattttaatcagcgagtcagcttgggaagaaatgacctgcttattcgcaccttcccttgagtcta

SEQ ID NO: 639614 - DNA, 75 bp, synthetic construct
  source 1..75: mol_type = other DNA
tttcaggattacgccgactggatattgataaacgctgggattttttacactttggcctgacgggtacatctgcat

SEQ ID NO: 639615 - DNA, 75 bp, synthetic construct
  source 1..75: mol_type = other DNA
ggtgcggatcaggctggtaaatattgatgcaccggaaaagaaacaggattatggccggtggtcgacagacatgat

SEQ ID NO: 639616 - DNA, 75 bp, synthetic construct
  source 1..75: mol_type = other DNA
attaggaatcatatacagaaaatttaatatatctgaaacagttgagatggttgtcatagctttattaatgatact

SEQ ID NO: 639617 - DNA, 75 bp, synthetic construct
  source 1..75: mol_type = other DNA
ttaagcagaaatacacacaggctgaaataggacgctatatgggagtaacccaacaaactgtttggcaatggttta

SEQ ID NO: 639618 - DNA, 75 bp, synthetic construct
  source 1..75: mol_type = other DNA
cgctatcgacagcgacaaagtggcggaaaaaattgccgacgaagcgcgcgatgatacgccgcaggcgctggatgc

SEQ ID NO: 639619 - DNA, 75 bp, synthetic construct
  source 1..75: mol_type = other DNA
gatgcaccggaaaagaaacaggattatggccggtggtcaacagacatgatgagatcactggtcgcaggaaaaacg

SEQ ID NO: 639620 - DNA, 75 bp, synthetic construct
  source 1..75: mol_type = other DNA
atggtgctgtcagtactggtagcgatgatcctcactccggctctgtgtgccacgctacttaagccactgaaaaaa

SEQ ID NO: 639621 - DNA, 75 bp, synthetic construct
  source 1..75: mol_type = other DNA
attaagaaccgcacacgaaaaatttaatatatcagaaacagttgagatagttatcattttttattatggctacta

SEQ ID NO: 639622 - DNA, 75 bp, synthetic construct
  source 1..75: mol_type = other DNA
ctcagacgccgctgtagatgaggccattcacatcaatgcatataccttcaccgaagccggtctccacgccggctg

SEQ ID NO: 639623 - DNA, 75 bp, synthetic construct
  source 1..75: mol_type = other DNA
tcagaaaaaattatcgatctgcttctgagtggttccggttatatcaggcatgacggatatgttcagggatatgga

SEQ ID NO: 639624 - DNA, 75 bp, synthetic construct
  source 1..75: mol_type = other DNA
ttgcagtcagaaataattattcgactccttctcaaggatgtcgactatataaggcacgacgggtatgttcaggga

SEQ ID NO: 639625 - DNA, 75 bp, synthetic construct
  source 1..75: mol_type = other DNA
tgacctgtgttaaagaggtgccgttgcgccgccatctgctgatggcttctttgctgaccgttctggcggtcggtg

SEQ ID NO: 639626 - DNA, 75 bp, synthetic construct
  source 1..75: mol_type = other DNA
aaagcgggcgaatggaccgccaatatcggcccggactggtacggcactgatgttcaccataaaacactggggatt

SEQ ID NO: 639627 - DNA, 75 bp, synthetic construct
  source 1..75: mol_type = other DNA
cgttcaccataaaacactgggcattgtcgggatgggacggatcggcatggcgctggcacagcgcgcgcattttgg

SEQ ID NO: 639628 - DNA, 75 bp, synthetic construct
  source 1..75: mol_type = other DNA
cgcttaacgcccgtaaaatcctgctaatgcatacgccaaccgtattaacagaaacggtagccgatacactcatgg

SEQ ID NO: 639629 - DNA, 75 bp, synthetic construct
  source 1..75: mol_type = other DNA
accagatcaaagggttatgcatctgtctggtggtggtttatcactcggtaatcaccttttacccgcatctgacca

SEQ ID NO: 639630 - DNA, 75 bp, synthetic construct
  source 1..75: mol_type = other DNA
ctgatgaagtgtgagcgtagcatccacgaccacaacaggtatgtgacgggcaaagatacccttcttctggactat

SEQ ID NO: 639631 - DNA, 75 bp, synthetic construct
  source 1..75: mol_type = other DNA
atccggaatttatgttcaaattcagttatagcgctcaacaaaatagattagaacctcatcttctggttcccactt

SEQ ID NO: 639632 - DNA, 75 bp, synthetic construct
  source 1..75: mol_type = other DNA
atttgttctgtttgtactgatgagtgtggctgttaatttcgtacccacaccgtggtggggaatgaacagtgtgat

SEQ ID NO: 639633 - DNA, 75 bp, synthetic construct
  source 1..75: mol_type = other DNA
tgcacgggatgatcaccgccagcaccagcttgtggtatctgtatgctttaattgtctatttcgtgatatgtaaaa

SEQ ID NO: 639634 - DNA, 75 bp, synthetic construct
  source 1..75: mol_type = other DNA
ctatttaattcgccgctatatcgacagcgtgccatggggaaattgtcttgataaacgcatctggagcatcttctg

SEQ ID NO: 639635 - DNA, 75 bp, synthetic construct
  source 1..75: mol_type = other DNA
aactaccggaaaacgctgcaaccgcaagccgacgcctctttctacatcagccgtgaagatctgcacgccgtgctg

SEQ ID NO: 639636 - DNA, 75 bp, synthetic construct
  source 1..75: mol_type = other DNA
gacactgaaacaggcaacagcctacagcgatatcagtacccgccgggcactgtcagaggccaatcgttataccga

SEQ ID NO: 639637 - DNA, 75 bp, synthetic construct
  source 1..75: mol_type = other DNA
actctggctgctgccagaacgcacagcgatgaaaacaacaaaagaacactggtcagtgcgaatacttatgctgac

SEQ ID NO: 639638 - DNA, 75 bp, synthetic construct
  source 1..75: mol_type = other DNA
cctgacgctgaacgatagcgtgcttaactaccgtaaaacactgcaatcccaagctgacgcctctttctacatcag

SEQ ID NO: 639639 - DNA, 75 bp, synthetic construct
  source 1..75: mol_type = other DNA
cctcagacgccgctgtggatgaggccattcacatcaatgcatataccttcaccgaagccggtctccacgccggct

SEQ ID NO: 639640 - DNA, 75 bp, synthetic construct
  source 1..75: mol_type = other DNA
tatgacggcaaaaccagtcaacaactggtgcgagcgattagcgcgcttggggacaaaattgagctgcataccttc

SEQ ID NO: 639641 - DNA, 75 bp, synthetic construct
  source 1..75: mol_type = other DNA
tacctatgctgaccagaaagaaaccgccatcaataaccgtactgacggattactgacgaccgaacgccaggcacg

SEQ ID NO: 639642 - DNA, 75 bp, synthetic construct
  source 1..75: mol_type = other DNA
tgcctggctggaagaatatcccgaccaacttggcattgcgttaaccgactgtattaccatggatgctttcctgcg

SEQ ID NO: 639643 - DNA, 75 bp, synthetic construct
  source 1..75: mol_type = other DNA
ggatgatgaatatcaatggctctctgccctgcctttttttaaggccgactatctcaactggctgcgcgagttccg

SEQ ID NO: 639644 - DNA, 75 bp, synthetic construct
  source 1..75: mol_type = other DNA
ccgtaaagtactgcaaccgaaggtagacgcatcgttttacatgagccgcagcgatctgcacgacgtgctggtcgg

SEQ ID NO: 639645 - DNA, 75 bp, synthetic construct
  source 1..75: mol_type = other DNA
tggtaaaagcgaagaaagccaaaattattggcaatggcgcgaaactggaagaaattatcgcctgtctggataatt

SEQ ID NO: 639646 - DNA, 75 bp, synthetic construct
  source 1..75: mol_type = other DNA
ttcgcttaagcggcccgtggcgcgaagtcatcctctgggaagtgcctttgcttgcagtcattagtgaactggtac

SEQ ID NO: 639647 - DNA, 75 bp, synthetic construct
  source 1..75: mol_type = other DNA
tacaagaaaccatcgttaaacgtttgcaacaggaaccctggttcgttggcaccagtaactacgatctggcacgtc

SEQ ID NO: 639648 - DNA, 75 bp, synthetic construct
  source 1..75: mol_type = other DNA
gttcattaagtgaaaaatggaaataccgatttaatttttatgatcaacatggctttcctggattctggggggcaa

SEQ ID NO: 639649 - DNA, 75 bp, synthetic construct
  source 1..75: mol_type = other DNA
cgtcagaagagctccgggccgcctgctctttccggaatgtgccggttatgaaaaaccggaaattcagtctctgtt

SEQ ID NO: 639650 - DNA, 75 bp, synthetic construct
  source 1..75: mol_type = other DNA
ctggggccaaaaaagatagtcgtcttcggtttgtgcggctgttttttgagcgggctgggctatctgaccgcagga

SEQ ID NO: 639651 - DNA, 75 bp, synthetic construct
  source 1..75: mol_type = other DNA
ttcagctacgtcgataacgaagtactgaaaaaagcacaacaggaaccggaaaaataccgtgatttgatcgtccgt

SEQ ID NO: 639652 - DNA, 75 bp, synthetic construct
  source 1..75: mol_type = other DNA
caggagtggccttctttctggagactatctgatgaatggacgcgacaagtgaagaataacgttattcccgtaacc

SEQ ID NO: 639653 - DNA, 75 bp, synthetic construct
  source 1..75: mol_type = other DNA
gttcattaactgaaaaatggaaatttcgatttaatttttatgaaaaacatggttttcctggattctggggagcaa

SEQ ID NO: 639654 - DNA, 75 bp, synthetic construct
  source 1..75: mol_type = other DNA
gtgggtgctggggttcaaacttaaatgattacctgaatagttcttttatcagaaatgtgcgtctgggaggcagac

SEQ ID NO: 639655 - DNA, 75 bp, synthetic construct
  source 1..75: mol_type = other DNA
tcgattttgaccaggttaatgaaaaggggctgaaatcccttatcgcggcgatcaataaaaccagtgttacggtaa

SEQ ID NO: 639656 - DNA, 75 bp, synthetic construct
  source 1..75: mol_type = other DNA
ctataccagtaaacgtgtttccgccacggaacgccattaccgcatcagccagtgggaatccagcgcctcatcgat

SEQ ID NO: 639657 - DNA, 75 bp, synthetic construct
  source 1..75: mol_type = other DNA
ctggctgtacggtatggcgctggcactggcttccgccggatttggcgtcatcgccacctttatcacgctgtttta

SEQ ID NO: 639658 - DNA, 75 bp, synthetic construct
  source 1..75: mol_type = other DNA
agattttcttcatttcattccgacggctgaaggacaaggcgaaaacggtgatatcggcccattaaggccattcgc

SEQ ID NO: 639659 - DNA, 75 bp, synthetic construct
  source 1..75: mol_type = other DNA
acaggggtatccgggtgcagtcagctttggttatttgctgcttgaacagcaaggcttcccgattccgtgtattca

SEQ ID NO: 639660 - DNA, 75 bp, synthetic construct
  source 1..75: mol_type = other DNA
tcttacaaggcagtacgggctacacgtcgctgttcttcaccatggtcaccttcgcctccattatcggctcggtga

SEQ ID NO: 639661 - DNA, 75 bp, synthetic construct
  source 1..75: mol_type = other DNA
tgcccgcgagttcaacatcagccggaaaccctctaccagtacctccgcacggacgactgacacatgccgcgtcgc

SEQ ID NO: 639662 - DNA, 75 bp, synthetic construct
  source 1..75: mol_type = other DNA
tctcgcgtaaagccattttgcgcccaattggcagccgccatcccaatcccaaagcggcagagctggagctacgcc

SEQ ID NO: 639663 - DNA, 75 bp, synthetic construct
  source 1..75: mol_type = other DNA
gcaaagtattcttaagcaagccgtggaagatgcaactgtcaaagccccgctacgccacaacgcagtagaaatttt

SEQ ID NO: 639664 - DNA, 75 bp, synthetic construct
  source 1..75: mol_type = other DNA
atttttgtcgatcagcaacatatcggcggctataccgattttgctgcatgggtgaaagaaaatctggacgcctga

SEQ ID NO: 639665 - DNA, 75 bp, synthetic construct
  source 1..75: mol_type = other DNA
cagcgcgagggaatcgtgctggctaagcagcgcggggcctaccggggacgaaagaaatcgctgaacagcgaacaa

SEQ ID NO: 639666 - DNA, 75 bp, synthetic construct
  source 1..75: mol_type = other DNA
ttgctggcgaaaagaaagcgacgcttgcccgtgaattcgggatcagtcgagaaacgctgtaccaatacttgcggg

SEQ ID NO: 639667 - DNA, 75 bp, synthetic construct
  source 1..75: mol_type = other DNA
cattatcggctcggtgattgtcagcccgttaacgcggcgtttcgataccgtcaaaatttactactacaccaacct

SEQ ID NO: 639668 - DNA, 75 bp, synthetic construct
  source 1..75: mol_type = other DNA
cgcgcgcggctatcaactgggcgtcggcgtgctgtgcgccattgccgtggtgatgttcctgtgctgtttcttctg

SEQ ID NO: 639669 - DNA, 75 bp, synthetic construct
  source 1..75: mol_type = other DNA
ccacccgccacaatgaagtgatctcctgccagtcctggcgattcgttctctgcggcgtagcgggatttctggttt

SEQ ID NO: 639670 - DNA, 75 bp, synthetic construct
  source 1..75: mol_type = other DNA
ggctacgaaggcgtggtgaaattcgtcttcgaaaatatctccaccctcgccgtaaacgcctgtccaccggtactg

SEQ ID NO: 639671 - DNA, 75 bp, synthetic construct
  source 1..75: mol_type = other DNA
tcgccgtaaacgcctgtccaccggtactggtaggcgtgggcatcgccacctcggtggaaaccgccgctgtgctct

SEQ ID NO: 639672 - DNA, 75 bp, synthetic construct
  source 1..75: mol_type = other DNA
acaagggctgactggcaacagttcagtgatgggcgtacatatcgaatctgccgctcgccatccgtcaaccatcgg

SEQ ID NO: 639673 - DNA, 75 bp, synthetic construct
  source 1..75: mol_type = other DNA
ctacagcagcaaacgcatctccgccaccgagcgtcattaccgcatcaatcagtgggaatcgagcgcctcctcgat

SEQ ID NO: 639674 - DNA, 75 bp, synthetic construct
  source 1..75: mol_type = other DNA
atgaacgatatgttcaataagtcgaatctctatcagtctctgccgcagttatacggaagcctcggcacatacagc

SEQ ID NO: 639675 - DNA, 75 bp, synthetic construct
  source 1..75: mol_type = other DNA
ggtatgctggcgcttggacctgttaaggcattgcagcttctccagaagcgcaagtcgcagttgattgataaagcc

SEQ ID NO: 639676 - DNA, 75 bp, synthetic construct
  source 1..75: mol_type = other DNA
gttacttcctggtggcgtcacatacgtagatcaactgactggacaggaaggattaaggcctgtttatcaggttaa

SEQ ID NO: 639677 - DNA, 75 bp, synthetic construct
  source 1..75: mol_type = other DNA
aaaatttcaagatctacaagattagatccaaatggtttttgcccgactttaagggcgggaaccgctagagataaa

SEQ ID NO: 639678 - DNA, 75 bp, synthetic construct
  source 1..75: mol_type = other DNA
tataaaaagggcgttgttccggttcttggggagctttatcaggaagatgtcgatttgattaccggaaaaagttaa

SEQ ID NO: 639679 - DNA, 75 bp, synthetic construct
  source 1..75: mol_type = other DNA
gggtttcatgttatacgttatgataatcgggatgtaggcagatcaattacttacgagtatggtcatccagaatat

SEQ ID NO: 639680 - DNA, 75 bp, synthetic construct
  source 1..75: mol_type = other DNA
aactggcatcacatctaatcagacaagatacccgctcaaaagaatatgaagatgttacgcttgaccgtaacaaga

SEQ ID NO: 639681 - DNA, 75 bp, synthetic construct
  source 1..75: mol_type = other DNA
aacggtagttctggcattaaggctgcggcagcacattttctggtgataaaacgtttacagactgacactcggtat

SEQ ID NO: 639682 - DNA, 75 bp, synthetic construct
  source 1..75: mol_type = other DNA
ctggttgcgtaagcacgtaacaaatggggcggagcctttgctatctatgcgtcctgccaccgatgacagaaatga

SEQ ID NO: 639683 - DNA, 75 bp, synthetic construct
  source 1..75: mol_type = other DNA
ctataatggatatgatatatatcttgaaattcagtccagaggaagtttttcacttgatgcagaagataatgataa

SEQ ID NO: 639684 - DNA, 75 bp, synthetic construct
  source 1..75: mol_type = other DNA
ctcatttatttagtactcacccgcccccataaccaacgttttgtagaaagatttatattgattgtcggtatatgc

SEQ ID NO: 639685 - DNA, 75 bp, synthetic construct
  source 1..75: mol_type = other DNA
tgcattagctgggattgcgggatttgacaggagcattcagtttacatgtgaaatatcagcaagtatcgaaattat

SEQ ID NO: 639686 - DNA, 75 bp, synthetic construct
  source 1..75: mol_type = other DNA
ccatcgagagaggaattgcttaagagaaatagtttcggttctgttaatgacaacaaatatctgaatgcgatgtgg

SEQ ID NO: 639687 - DNA, 75 bp, synthetic construct
  source 1..75: mol_type = other DNA
atcaactccggacaagcgcgtagcctggcgtatgcggcactgaaacaggcgaagcagggcgattttgccgcagca

SEQ ID NO: 639688 - DNA, 75 bp, synthetic construct
  source 1..75: mol_type = other DNA
catttaatgacgtccatgcttgcgcgtgaactgattacagaattaattgagcttcatgaaaaactgaaggcataa

SEQ ID NO: 639689 - DNA, 75 bp, synthetic construct
  source 1..75: mol_type = other DNA
ggagtcaattgccagtggtcgtttcactattgaaaagattaagcctgctatggagaaatttgttaatgagcaggt

SEQ ID NO: 639690 - DNA, 75 bp, synthetic construct
  source 1..75: mol_type = other DNA
aaagatttacctaagccaaaccagagcgatgaaaaaactcaggcaactgacgcggttaatctcttcaaacagttg

SEQ ID NO: 639691 - DNA, 75 bp, synthetic construct
  source 1..75: mol_type = other DNA
tcttttcaccctgccggaaggcgatatctctattggtattcctcacgttctggaaatatcaccgacggatgctgc

SEQ ID NO: 639692 - DNA, 75 bp, synthetic construct
  source 1..75: mol_type = other DNA
gataatgaagtaatgaaaagatctataaccaaattcgcagaagaccaggtaaggattttctttccagaagaagaa

SEQ ID NO: 639693 - DNA, 75 bp, synthetic construct
  source 1..75: mol_type = other DNA
tggaaaataaaactgccctgatcaccggttccgccagtggcctgggctatgcaatggctaaatgcatgatcgcct

SEQ ID NO: 639694 - DNA, 75 bp, synthetic construct
  source 1..75: mol_type = other DNA
agccgcgcaggaaaaagttgatgtgcttattagcgaacacggggctatcgatatcctggtcaataacgcaggcaa

SEQ ID NO: 639695 - DNA, 75 bp, synthetic construct
  source 1..75: mol_type = other DNA
tcgagagaggaattacttaagagaaattcttttccttcagtgaataaaaacaaatatctgaatgcgatgtggcgg

SEQ ID NO: 639696 - DNA, 75 bp, synthetic construct
  source 1..75: mol_type = other DNA
aaaattcagagagaaaaaaaggaaagtgggtttaatcagatggagtacaacagactaatgctggacaatatatcg

SEQ ID NO: 639697 - DNA, 75 bp, synthetic construct
  source 1..75: mol_type = other DNA
atatcatggcaccttgtgagttttgttgcacaaggtgctttcatgtttttttcttaaatgccgtgcaattacaat

SEQ ID NO: 639698 - DNA, 75 bp, synthetic construct
  source 1..75: mol_type = other DNA
tgggctgcaacctatctggcttctgatgctgccggtttcgttagcggtcaggttctgattgtcgatggcggcgcg

SEQ ID NO: 639699 - DNA, 75 bp, synthetic construct
  source 1..75: mol_type = other DNA
tttgcaactaattgcaatatctaatgaattatcaagagagtatgaagtaaatgtgacaacagatattgctcctga

SEQ ID NO: 639700 - DNA, 75 bp, synthetic construct
  source 1..75: mol_type = other DNA
ttgagcttccctcgcgacattaccgcctacgctggactggatatcattagagaaatcttcacccgggaatcactg

SEQ ID NO: 639701 - DNA, 75 bp, synthetic construct
  source 1..75: mol_type = other DNA
tgattacccgcgccatgccgccgccggactgcttcctgtagcactgggtaaacactgccaaaatcgggaatatgc

SEQ ID NO: 639702 - DNA, 75 bp, synthetic construct
  source 1..75: mol_type = other DNA
gattacggtaacgacccgctgccgcgcttacaggattacgccgcacagggtgccgaagtgttgcacctggtggat

SEQ ID NO: 639703 - DNA, 75 bp, synthetic construct
  source 1..75: mol_type = other DNA
gtttgagcaggcacaaactcagcaagccgctgtacaggtgccaggaattcaaactttaggaactcaatcgcagta

SEQ ID NO: 639704 - DNA, 75 bp, synthetic construct
  source 1..75: mol_type = other DNA
atgctaaagcggcaggcatcttatctgaatgtcgtcctcagtcagtagctgaagaatatgagtatgccactgcgg

SEQ ID NO: 639705 - DNA, 75 bp, synthetic construct
  source 1..75: mol_type = other DNA
catggtgtaagtcggatactttttgagttaacggaagatcattctgacaatccctgttatctcttcgagcgcatc

SEQ ID NO: 639706 - DNA, 75 bp, synthetic construct
  source 1..75: mol_type = other DNA
acgatattaatcgatttgcttttcctcatcgcaccaggccaagagaaattaattatctgcgcaataaaggtgagg

SEQ ID NO: 639707 - DNA, 75 bp, synthetic construct
  source 1..75: mol_type = other DNA
cgactcggtaaatatggttctcccgccagtcacaaaagaaagtaccccttctgaagttaaaaccgcagttgtaag

SEQ ID NO: 639708 - DNA, 75 bp, synthetic construct
  source 1..75: mol_type = other DNA
atgacgatgcgcgaaactggctgactgattacccgcgccatgccgccgccggactgcttcctgtagcactgggta

SEQ ID NO: 639709 - DNA, 75 bp, synthetic construct
  source 1..75: mol_type = other DNA
aaaaatcacataaattctgggcggtggagcagcaaggtaacgagttgcatatcagttggggaaaagttggcaccc

SEQ ID NO: 639710 - DNA, 75 bp, synthetic construct
  source 1..75: mol_type = other DNA
tgccagcaggaaacatcggtattccgcatgtgctggaaatcccccctgaatccgccgctgcattcaggcaaattt

SEQ ID NO: 639711 - DNA, 75 bp, synthetic construct
  source 1..75: mol_type = other DNA
acgtttcggtgccgatgccttagtgctggcgctggatgtccgtattgacgagcaaggcaacaagcaggtggcagt

SEQ ID NO: 639712 - DNA, 75 bp, synthetic construct
  source 1..75: mol_type = other DNA
ttctttccgttgcttttgcgcgccattcaccgaagatccgcctcactctgtgcgatgtctctgcaccagcggtag

SEQ ID NO: 639713 - DNA, 75 bp, synthetic construct
  source 1..75: mol_type = other DNA
aacttcctgctgcgccccgatgtagcaaaacaggttgcggaaactatcggctatccaacgccaaacctcgccgcg

SEQ ID NO: 639714 - DNA, 75 bp, synthetic construct
  source 1..75: mol_type = other DNA
tgctgcgcccggatgtggcaaaacaggttgctgaaactatcggttatccaacgccaaaccttgcggcgcgtaagc

SEQ ID NO: 639715 - DNA, 75 bp, synthetic construct
  source 1..75: mol_type = other DNA
gatctaaaagttctaagtatagaagaaaaaccctttaaaccaaaatcaaattgggccgtgactgggctatatttt

SEQ ID NO: 639716 - DNA, 75 bp, synthetic construct
  source 1..75: mol_type = other DNA
gttcaggaacgaggctatatccattaactttgggggtatctaagcagttgatgcccatatatgataaaccaatga

SEQ ID NO: 639717 - DNA, 75 bp, synthetic construct
  source 1..75: mol_type = other DNA
ctccggtttgtggtgtctcgcccgtgtgtaggctgcggcggcaaggttaatcacccattcatgtaccgcgcccgc

SEQ ID NO: 639718 - DNA, 75 bp, synthetic construct
  source 1..75: mol_type = other DNA
caaagaaggcgcgctgaaattgatcaacttcctgctgcgcccggatgtggcaaaacaggttgctgaaactatcgg

SEQ ID NO: 639719 - DNA, 75 bp, synthetic construct
  source 1..75: mol_type = other DNA
caatgccatgtgcgaccttcgggccaggctgaacgatatggagcatcgctgtcgctttgattccgatgtgcttgt

SEQ ID NO: 639720 - DNA, 75 bp, synthetic construct
  source 1..75: mol_type = other DNA
cagcgtgtcagccgcccaggtctgcgtatctataagcgtaaagatgagctgccgaaagttatggcgggtctgggt

SEQ ID NO: 639721 - DNA, 75 bp, synthetic construct
  source 1..75: mol_type = other DNA
cgacgcccgtgaagtgttccagatggcactgcgtaagctgggttattctggcaacaccaccgatccgaaagagat

SEQ ID NO: 639722 - DNA, 75 bp, synthetic construct
  source 1..75: mol_type = other DNA
ggaccgagtacgtaccgccaggactgctggaacagttcactaaagaaaccggcattaaagttatctattcgactt

SEQ ID NO: 639723 - DNA, 75 bp, synthetic construct
  source 1..75: mol_type = other DNA
tgctgaaaccattaaaaatggcgaatggcagaatgacgttggcgcagccagcagcatttatgaagagtattatca

SEQ ID NO: 639724 - DNA, 75 bp, synthetic construct
  source 1..75: mol_type = other DNA
tagctgatattggcagcgatgttgcgctaatgctgcttaatggcatcgcgcgaaaaattaaattcaaagcattac

SEQ ID NO: 639725 - DNA, 75 bp, synthetic construct
  source 1..75: mol_type = other DNA
acgctgccgttgggcgcacatgccattcttaataacacccaggaaggcactcagttgacgattagcggtcatcct

SEQ ID NO: 639726 - DNA, 75 bp, synthetic construct
  source 1..75: mol_type = other DNA
cagatttaatgcaacgcctgggtgaactcggcaagctaaccccggataccatgaaaggcgtggttgctctgggaa

SEQ ID NO: 639727 - DNA, 75 bp, synthetic construct
  source 1..75: mol_type = other DNA
cgcttcattccattgccataacggcaatggttacagctctgatatcgatcgcgctcatgtttacacgctggaaga

SEQ ID NO: 639728 - DNA, 75 bp, synthetic construct
  source 1..75: mol_type = other DNA
tgagaacggtattctggtactggaagacatcaacgaacatccgttccgtgtcgaacgcatgttattacagcttta

SEQ ID NO: 639729 - DNA, 75 bp, synthetic construct
  source 1..75: mol_type = other DNA
acaaggcaatgtcatcacctttagcggcccgatgctggtggcaaattttggcgcggatgagctgaatgcctttac

SEQ ID NO: 639730 - DNA, 75 bp, synthetic construct
  source 1..75: mol_type = other DNA
tcacgcaggtattttacatcgtcagagcgcgatcattctcggtagtttcagtggcagcgcgccaaatgattatga

SEQ ID NO: 639731 - DNA, 75 bp, synthetic construct
  source 1..75: mol_type = other DNA
atatgcgtgaacaggtagcggaactggccaacaccatgtgcgacctgcgcacaaccatgaatgagatggagcagc

SEQ ID NO: 639732 - DNA, 75 bp, synthetic construct
  source 1..75: mol_type = other DNA
cagggtgaacatgtcgaatttgccctgatcccggtcaccgcggtgaaatacacctacacagtgatcccggcgctg

SEQ ID NO: 639733 - DNA, 75 bp, synthetic construct
  source 1..75: mol_type = other DNA
cggtgatgggcgcgttcgccgagttcgagcgcgccctgatccgcgagcgtcagcgcgagggtattgcgctcgcca

SEQ ID NO: 639734 - DNA, 75 bp, synthetic construct
  source 1..75: mol_type = other DNA
atgagcacgaaccttgcataccacgaagcagttgttgcgtgattgctgtgatgggggggcatgttttaggcgcaa

SEQ ID NO: 639735 - DNA, 75 bp, synthetic construct
  source 1..75: mol_type = other DNA
aatcacgacgacgacacatatgtttatgccaacgtctcactggcccgtggttttctgtcgtgatcccgccatgct

SEQ ID NO: 639736 - DNA, 75 bp, synthetic construct
  source 1..75: mol_type = other DNA
ggaacgtctggtgcgccagacgctctttcgcgccagttatctgtttatgaaggcatataacgaaattctggaact

SEQ ID NO: 639737 - DNA, 75 bp, synthetic construct
  source 1..75: mol_type = other DNA
acggagcgactggaggatatcaatgcccttgccaggctgacctcacccaacactatcgtactggcagtacgcggc

SEQ ID NO: 639738 - DNA, 75 bp, synthetic construct
  source 1..75: mol_type = other DNA
acgtctggaagaaagcggcagcgtttatgcgatgcgcaaatctactccttatggcgatctcgaacttgaaacaga

SEQ ID NO: 639739 - DNA, 75 bp, synthetic construct
  source 1..75: mol_type = other DNA
tccgcatgtactggaaatcccccctgaatccgccgctgcattcaggcaaatttacatagattacgaactgttgcc

SEQ ID NO: 639740 - DNA, 75 bp, synthetic construct
  source 1..75: mol_type = other DNA
caccgccattccgacgctatcccccgcacggcaaccttttgcggcgttactgctccctgaacgcccggatatcgc

SEQ ID NO: 639741 - DNA, 75 bp, synthetic construct
  source 1..75: mol_type = other DNA
ggcgtaacgcacttatcaaactgattaccatcacgccagagttagtatgcgacgtcattccctgggttaatgcca

SEQ ID NO: 639742 - DNA, 75 bp, synthetic construct
  source 1..75: mol_type = other DNA
gcgcttatctggcaatgttgctggcaaataatggggtgcgcggtgtaagccggatacttcttgagtttacggaag

SEQ ID NO: 639743 - DNA, 75 bp, synthetic construct
  source 1..75: mol_type = other DNA
taaccgacgatattaatcgatttgcttttccacatcgctctcgccccagagagatcaattatctgcacaaagatg

SEQ ID NO: 639744 - DNA, 75 bp, synthetic construct
  source 1..75: mol_type = other DNA
ctcactcactttttccgcgctcgacgacatcaccgccagcgaactcattaacgacattgaatcactgtttgatta

SEQ ID NO: 639745 - DNA, 75 bp, synthetic construct
  source 1..75: mol_type = other DNA
ggttaagactggtggtaaccgatgacgccgctctgactacagcagaaaaatacgacttcccaccgttgtatcatg

SEQ ID NO: 639746 - DNA, 75 bp, synthetic construct
  source 1..75: mol_type = other DNA
ttgaaacctcccttgagagtaaaaacaaacgcccatggctggctgatgatgcagtcattccggtcactgacgata

SEQ ID NO: 639747 - DNA, 75 bp, synthetic construct
  source 1..75: mol_type = other DNA
atgtgtcacttaacccgacggctattatggggagtatataacgatgaaaacacccttatagcctgtttccgcgtg

SEQ ID NO: 639748 - DNA, 75 bp, synthetic construct
  source 1..75: mol_type = other DNA
agactgttatggggaatatataccgacgaaaacacgctggctggctgcttccgcgtggcagaagacagctctttc

SEQ ID NO: 639749 - DNA, 75 bp, synthetic construct
  source 1..75: mol_type = other DNA
tgacgctatgcgccacctcggcactatgctgagctttcctcgcgacattaccgcctacgctgggctggatatcat

SEQ ID NO: 639750 - DNA, 75 bp, synthetic construct
  source 1..75: mol_type = other DNA
cagcagttactgccggaactggcacgtgaatcgacgaaaacaaccgcccttcattcactgacgccacaacaagcg

SEQ ID NO: 639751 - DNA, 75 bp, synthetic construct
  source 1..75: mol_type = other DNA
gaataaaatcagagttgaggggcatgataaattcagacaaatcagttggttgatacctgcgggacgaatacatac

SEQ ID NO: 639752 - DNA, 75 bp, synthetic construct
  source 1..75: mol_type = other DNA
gatcgccttgcttttggtgtttggcctactgtgacgcttgctcaggcaagagcaaagcgcgatgaagctaaaaag

SEQ ID NO: 639753 - DNA, 75 bp, synthetic construct
  source 1..75: mol_type = other DNA
aacagtctggatgaactgcgaacgctggcgattgatgttgattatctcgagcccggtaacgggcctgacggcgat

SEQ ID NO: 639754 - DNA, 75 bp, synthetic construct
  source 1..75: mol_type = other DNA
aaagttagcgatgaggcagccttttgtcttattcaaaggccttacgtttcaaaaactctgcttaccaggcgcatt

SEQ ID NO: 639755 - DNA, 75 bp, synthetic construct
  source 1..75: mol_type = other DNA
cgatatgaatggcactgttgcaaagttagcgatgaggcagccttttgtcttattcaaaggccttacatttcaaaa

SEQ ID NO: 639756 - DNA, 75 bp, synthetic construct
  source 1..75: mol_type = other DNA
aacagaaaaataccatcgcacctaatgagtaaaattgaatctattcttgaggaggcgtttggaaattcttccgat

SEQ ID NO: 639757 - DNA, 75 bp, synthetic construct
  source 1..75: mol_type = other DNA
cctgctcgccgggattatcgtctgccggacgggcgggtggtgaacctgaaagattacaaactggtgctgtttatg

SEQ ID NO: 639758 - DNA, 75 bp, synthetic construct
  source 1..75: mol_type = other DNA
ctgattgctgccggtacacaggcgtccacgctggaagagttgcgccagcttgaagcgcacaaaacaatgccgggt

SEQ ID NO: 639759 - DNA, 75 bp, synthetic construct
  source 1..75: mol_type = other DNA
ctaccacgcaaagaaacagcacaggctctgtacaccttcatcgaaagtcttccaaccaagcctgcgccggtatcg

SEQ ID NO: 639760 - DNA, 75 bp, synthetic construct
  source 1..75: mol_type = other DNA
catgatttcaaaacgtgggtgggcgttgtgcgttcgctggcagaatacggcgaacctaacggtcgtgtcgagtta

SEQ ID NO: 639761 - DNA, 75 bp, synthetic construct
  source 1..75: mol_type = other DNA
tttgttcaaccgggatgtgtatattgccagcatcagttaccggtaatgggagaatttcagaaacaatcgggatgg

SEQ ID NO: 639762 - DNA, 75 bp, synthetic construct
  source 1..75: mol_type = other DNA
atgtatgccaacctggtgtttaacaaaggcattgatgagttttatgcccagtgcgagaaagtcggcgtcgattcg

SEQ ID NO: 639763 - DNA, 75 bp, synthetic construct
  source 1..75: mol_type = other DNA
gatgcgggtaaaaacgccgggtcatcggacgcaaattggttcgctctccggtggtaatcagcaaaaggtgattat

SEQ ID NO: 639764 - DNA, 75 bp, synthetic construct
  source 1..75: mol_type = other DNA
acgttgtttacctctacatggctgaaattcaccgcgtttggttagaacaactttatccgatgctggtttcagttc

SEQ ID NO: 639765 - DNA, 75 bp, synthetic construct
  source 1..75: mol_type = other DNA
actctggattgttcccctgagttttgtgcccgcaattttgcggagacatcgatttcggtaaatcaaccgaacggt

SEQ ID NO: 639766 - DNA, 75 bp, synthetic construct
  source 1..75: mol_type = other DNA
gtttgaaatttatcagttaattgccgaactggcgaagaaaggcaaagggattattattatctcctctgaaatgcc

SEQ ID NO: 639767 - DNA, 75 bp, synthetic construct
  source 1..75: mol_type = other DNA
aggtatgtttgtcgatcaggacaaaatgtaccgcgaaaccaaagcgatttttgatgaactggatattgatatcga

SEQ ID NO: 639768 - DNA, 75 bp, synthetic construct
  source 1..75: mol_type = other DNA
gcgatacccagtgggtaattgattcgatgcgggtaaaaacgccgggacatcgtacgcaaattggttcactctccg

SEQ ID NO: 639769 - DNA, 75 bp, synthetic construct
  source 1..75: mol_type = other DNA
gtgaccccggcgcagtgctttgagatgctggcactgattcgccagaagcacccgaccattcccatcggccttttg

SEQ ID NO: 639770 - DNA, 75 bp, synthetic construct
  source 1..75: mol_type = other DNA
tccagctatccccatcggcctgttgatgtacgctaatctggtgtttaacaaaggtattgatgagttttatgccca

SEQ ID NO: 639771 - DNA, 75 bp, synthetic construct
  source 1..75: mol_type = other DNA
tgctggcgctgattcgccagaagcacccaacgattcccattggcctactgatgtacgccaatctggtgtttaaca

SEQ ID NO: 639772 - DNA, 75 bp, synthetic construct
  source 1..75: mol_type = other DNA
ccaaatacaaaagccacagcatcattcgggcatcgaaaatcaaagatattgttattgtcggcgaagcttatgcgc

SEQ ID NO: 639773 - DNA, 75 bp, synthetic construct
  source 1..75: mol_type = other DNA
caaggcgtaacggttcgtgttgatgcagcgtttttgcaaaaacaccgaccagatactggcggctatctgctcggt

SEQ ID NO: 639774 - DNA, 75 bp, synthetic construct
  source 1..75: mol_type = other DNA
ctggcacgcgaaaacgacgccatggtgattgccctcacctctgcgggtaccccgctcgcccgggaagcaacgctg

SEQ ID NO: 639775 - DNA, 75 bp, synthetic construct
  source 1..75: mol_type = other DNA
tgttgctgattgctgccggtgcacaggcgtccacgctggaagagctgcgccagcttgaagcgcacaagacaacgc

SEQ ID NO: 639776 - DNA, 75 bp, synthetic construct
  source 1..75: mol_type = other DNA
acgacgcgtgccattcgtactggagttgcgtaacgtgccgttcaggcagcaggagcaaatcacctggtatctgat

SEQ ID NO: 639777 - DNA, 75 bp, synthetic construct
  source 1..75: mol_type = other DNA
atcccctgctgcaggagaagaacctggtacgacgcgtgccattcgtactggagctgcgtaacgtgccgttcagac

SEQ ID NO: 639778 - DNA, 75 bp, synthetic construct
  source 1..75: mol_type = other DNA
agtaaactgctctatcagaaatgaagatatccttgggcgtttaggtggagaggagtttggcgtgattatcaaaaa

SEQ ID NO: 639779 - DNA, 75 bp, synthetic construct
  source 1..75: mol_type = other DNA
cgtgtattacatcgcctataaccaggacatgaccgtcgaatatattcaggcgtgtgcgatgtgggcgcgggcatt

SEQ ID NO: 639780 - DNA, 75 bp, synthetic construct
  source 1..75: mol_type = other DNA
cgctgggtggctgacacgtctccgctcaaggtgattgagaagagccgccgaaccggtatcacctgggctgaggcg

SEQ ID NO: 639781 - DNA, 75 bp, synthetic construct
  source 1..75: mol_type = other DNA
atggcacatccaccacggctgaatgacgacaaaccggttatctggacggtatctgtaacgcgcttattcgagctg

SEQ ID NO: 639782 - DNA, 75 bp, synthetic construct
  source 1..75: mol_type = other DNA
cgggtaagtcagtggttaaagatggttgaaaaaaacactggcaaaaaaccgattatctattccgggtctgtgttt

SEQ ID NO: 639783 - DNA, 75 bp, synthetic construct
  source 1..75: mol_type = other DNA
ggcaacattccgaccgtggccaggtggatggcattaatggcctggtggattttaatgtgtttaatggcacggtgg

SEQ ID NO: 639784 - DNA, 75 bp, synthetic construct
  source 1..75: mol_type = other DNA
ttggcactgacattcagggatgaaaccaatgcagctaagaattaccagtcgaaaaaaactcacctctctattagc

SEQ ID NO: 639785 - DNA, 75 bp, synthetic construct
  source 1..75: mol_type = other DNA
tatcaatgatttatattatttcaacactcatgtattatgtcttcagaaagttaaatcatgctaatcatatggcaa

SEQ ID NO: 639786 - DNA, 75 bp, synthetic construct
  source 1..75: mol_type = other DNA
ggtgagatgttcgtgatgacagacatcattgatggtaaaccgcagtattcgcgtattgaaatgaatggtaagagt

SEQ ID NO: 639787 - DNA, 75 bp, synthetic construct
  source 1..75: mol_type = other DNA
tccgaccgtggacaggtagatggcatcaatggtccggtggattttaatgtgtttaatggcacggtggaggagttg

SEQ ID NO: 639788 - DNA, 75 bp, synthetic construct
  source 1..75: mol_type = other DNA
cctggttcgccgcgtgccgttcgtgctggagctgcgcaacgtgccgttcaaacagcaggagcaaatcgcctggta

SEQ ID NO: 639789 - DNA, 75 bp, synthetic construct
  source 1..75: mol_type = other DNA
tggggacatcatcgatctggttgcttctgaaatagggttggagcgtgtatctcgttttgatcgcgttataaacgc

SEQ ID NO: 639790 - DNA, 75 bp, synthetic construct
  source 1..75: mol_type = other DNA
cggtagttgacgccattgaagcccgctttaaagtcctcggcgcacccgtggaattgatcaaagtgcacaacacgc

SEQ ID NO: 639791 - DNA, 75 bp, synthetic construct
  source 1..75: mol_type = other DNA
gcgctggcatactttgccagccgtgaaattaacaaagggccggtgaaggcaacgtcccgtcgtcggcgtcaggcg

SEQ ID NO: 639792 - DNA, 75 bp, synthetic construct
  source 1..75: mol_type = other DNA
ggcacgtgattgatgaggtggagaaacgcttcgcggcggccggggtgccggtaacctttatcaaggtgcatcacc

SEQ ID NO: 639793 - DNA, 75 bp, synthetic construct
  source 1..75: mol_type = other DNA
acgggatcagtattgaataccctgaatggcgctttaacctgcgcacgtctaacaccgagccggtggtgcgtctga

SEQ ID NO: 639794 - DNA, 75 bp, synthetic construct
  source 1..75: mol_type = other DNA
ataccctgagtggcgctttaacctgcgcacgtccaacacggagccggtggtgcgtctgaacgttgagtccagagc

SEQ ID NO: 639795 - DNA, 75 bp, synthetic construct
  source 1..75: mol_type = other DNA
agatgaaaacttcaggaggagtgaaacaggtagccagtatctgaaggggattctcggtgtaaaaacaagagtatc

SEQ ID NO: 639796 - DNA, 75 bp, synthetic construct
  source 1..75: mol_type = other DNA
tttgtatattttgtatatatagtttaaccatttttttccatgttgtgaggctgttgataaatatcatgtacgagg

SEQ ID NO: 639797 - DNA, 75 bp, synthetic construct
  source 1..75: mol_type = other DNA
gcctattgcgatgaattaggtcaatataatattcaggtgaatggtattgccccgggatattacgctaccgatatc

SEQ ID NO: 639798 - DNA, 75 bp, synthetic construct
  source 1..75: mol_type = other DNA
tggtgttgtggctgcaacgttttctctgcgcctgaaaggtaaacctgtgctgacgacagagccgctgaaagtgaa

SEQ ID NO: 639799 - DNA, 75 bp, synthetic construct
  source 1..75: mol_type = other DNA
aggcaacttttatctcaatgctgcccagaacgcgttgcgcagtgcctatgacaatgacaccacgtatggctttaa

SEQ ID NO: 639800 - DNA, 75 bp, synthetic construct
  source 1..75: mol_type = other DNA
atgtcctctaattttgagcgttcgcaactgacgaaaattatgatttcgtctgcaccggtaacagcagaaaccctg

SEQ ID NO: 639801 - DNA, 75 bp, synthetic construct
  source 1..75: mol_type = other DNA
agcgatgcggaacgcgagatcaactacttcggctttaccgtcaccagttggcagaccgaccgcgaaattcgggga

SEQ ID NO: 639802 - DNA, 75 bp, synthetic construct
  source 1..75: mol_type = other DNA
caccagacaaagtttataataacgcggctcacaccgtgaaaattgaaattatttctgagcagataacgaatgcaa

SEQ ID NO: 639803 - DNA, 75 bp, synthetic construct
  source 1..75: mol_type = other DNA
ggggcgatagctgcatcctttggagcactgttatcgctgtttggcgtgattcactccccagcggttggctttgcg

SEQ ID NO: 639804 - DNA, 75 bp, synthetic construct
  source 1..75: mol_type = other DNA
gtttgcgcttattaaagtgctcgccattgtgacctttttggtcgtgggtacagtgttcctcggtagtggtcagcc

SEQ ID NO: 639805 - DNA, 75 bp, synthetic construct
  source 1..75: mol_type = other DNA
tgtacgcaaacgcgttgccgaaattcacagcactgcgccggtagtcgaagaagaaaaacaggaaattgtgtttaa

SEQ ID NO: 639806 - DNA, 75 bp, synthetic construct
  source 1..75: mol_type = other DNA
gttcctcctgttgagcgccgggggagagaggttttctatgacgttaaaactgtactggagatagatcgcgagcga

SEQ ID NO: 639807 - DNA, 75 bp, synthetic construct
  source 1..75: mol_type = other DNA
acggtgcaagccttgagaacgcagtgattaaccctctttcagagatgttcctcaatgcacaacgtaacctgagcg

SEQ ID NO: 639808 - DNA, 75 bp, synthetic construct
  source 1..75: mol_type = other DNA
acgaagataagaaatatacccttgaacagatacgggacgctctgctggcaaactttgaaggttatgaaggcttgc

SEQ ID NO: 639809 - DNA, 75 bp, synthetic construct
  source 1..75: mol_type = other DNA
acgcctgacggctaatcaggcatatcaccagatggtgaaactggggatcgtcgagcagcgcgaacgatacagccg

SEQ ID NO: 639810 - DNA, 75 bp, synthetic construct
  source 1..75: mol_type = other DNA
ctacagtcgcgccaatacaccgctgctgggaacgctgtttgagaaacagtgcatcctcagcgtccgcgaccggaa

SEQ ID NO: 639811 - DNA, 75 bp, synthetic construct
  source 1..75: mol_type = other DNA
actgagctggttcaggaattgatcgatacccaaaatctgggtgtcggttcattcaatgaaactacccaaaatttg

SEQ ID NO: 639812 - DNA, 75 bp, synthetic construct
  source 1..75: mol_type = other DNA
gcatgttcggcaagaacatcaccagtcctgcaaatccgcgcgagacgcagccgcatttcttcgaatcccgattcc

SEQ ID NO: 639813 - DNA, 75 bp, synthetic construct
  source 1..75: mol_type = other DNA
tccacaatgggtatttgcgctcggggcattaaccatcgtcggcaccatgaatatgataggtgtaaaatggtttgc

SEQ ID NO: 639814 - DNA, 75 bp, synthetic construct
  source 1..75: mol_type = other DNA
tatttcggagcttatccgtgtttttggccctctggagcatcgtccgtctgaacagttcgctgcacaggtctctga

SEQ ID NO: 639815 - DNA, 75 bp, synthetic construct
  source 1..75: mol_type = other DNA
cgctgattcgcggcgcggtgcgtcatctgaacagcggcggcgagttgcgaattgtagcgaacgccttcctgcctt

SEQ ID NO: 639816 - DNA, 75 bp, synthetic construct
  source 1..75: mol_type = other DNA
cacgaagtgattgcgcaaaccgggcgcttcaaggtgtatcgcgccattatgacccgccaggcgaagaaaggttaa

SEQ ID NO: 639817 - DNA, 75 bp, synthetic construct
  source 1..75: mol_type = other DNA
gtgaaatttattttaagctctttttataatactgcttatcatgattttggttttgaaatggaacggttagttcat

SEQ ID NO: 639818 - DNA, 75 bp, synthetic construct
  source 1..75: mol_type = other DNA
gcattaagaaatattgagtatgttgatatctataacttcttggacgaaaaaaggcaatataatatcaaattatta

SEQ ID NO: 639819 - DNA, 75 bp, synthetic construct
  source 1..75: mol_type = other DNA
agtggcgcgtgttttcaggcatcacggcgtgcttacgttaatggtcagagagtacgaaaatgcgcttcttcatca

SEQ ID NO: 639820 - DNA, 75 bp, synthetic construct
  source 1..75: mol_type = other DNA
ggaatgctggcactcggtcaggttaaagcccttcaggttgagcagaagcgcaaagctcagttgatcgataaagcc

SEQ ID NO: 639821 - DNA, 75 bp, synthetic construct
  source 1..75: mol_type = other DNA
tgtactgcaccggacgtattctgcgctcaatggcgatgggcggttccgcaccgagttttatggcgaaaatgagtc

SEQ ID NO: 639822 - DNA, 75 bp, synthetic construct
  source 1..75: mol_type = other DNA
atcaggcggggcaaagtccgtttgtgacgttcttctctaaacttggcgtgccgtacatcggcagcattatgaata

SEQ ID NO: 639823 - DNA, 75 bp, synthetic construct
  source 1..75: mol_type = other DNA
cggaatacagtttgccgtccataccggaatgggtttacagcgctaacgtccattatacgggcaaacgcgcggcga

SEQ ID NO: 639824 - DNA, 75 bp, synthetic construct
  source 1..75: mol_type = other DNA
ccgaaagtgcaggccaatctgttggcggaatacagtttgccgtccataccggaatgggtttacagcgctaacgtc

SEQ ID NO: 639825 - DNA, 75 bp, synthetic construct
  source 1..75: mol_type = other DNA
ttgagttaaccgctgccgggaatgtgtggcaggggctgaatatttacagcggcgtgaccttcctcgacccgaaac

SEQ ID NO: 639826 - DNA, 75 bp, synthetic construct
  source 1..75: mol_type = other DNA
acacagttcagcctgttgctctgatgcgtcttggtctcttcgttccgacgctgaaatcgacatccaggggtagaa

SEQ ID NO: 639827 - DNA, 75 bp, synthetic construct
  source 1..75: mol_type = other DNA
caatttttcggtgagtgattacaccgattgtacaggtcgcaaacttccctgctaccaaatcacccgcgacggttt

SEQ ID NO: 639828 - DNA, 75 bp, synthetic construct
  source 1..75: mol_type = other DNA
cagcaaactgtacgaccgtgtaggtgatgctgtttttggtgctgcacttgttgattccaggctgaatggttctga

SEQ ID NO: 639829 - DNA, 75 bp, synthetic construct
  source 1..75: mol_type = other DNA
tgctacgcccaaattatggtggggcgtgcaggggcatcgcaagatgcgccgggttcttctgtgaccggttacgcc

SEQ ID NO: 639830 - DNA, 75 bp, synthetic construct
  source 1..75: mol_type = other DNA
gaagctttggtggtgagttattaaaaatcaccaaagaggctgccatcatggctacgatcccaaccctcactcaac

SEQ ID NO: 639831 - DNA, 75 bp, synthetic construct
  source 1..75: mol_type = other DNA
gggtgggggcaccgaaaggtgcgccggtttccgtatgcgccggttacgccaaccctgctcagttcaccaccagcg

SEQ ID NO: 639832 - DNA, 75 bp, synthetic construct
  source 1..75: mol_type = other DNA
atgatccgctacctgaatattgattctacaattccgggacgttacactgttccggcaccttataaagcgggtgcc

SEQ ID NO: 639833 - DNA, 75 bp, synthetic construct
  source 1..75: mol_type = other DNA
atgcagatactaaattcccagcgtaaagctttcctggatatggtggcatggtcagaaggaacggatatccggcag

SEQ ID NO: 639834 - DNA, 75 bp, synthetic construct
  source 1..75: mol_type = other DNA
gctggcgattgatgttgattatctcgatcccggtaacgggcctgacggcgatatcgaacatcacaccgaaataac

SEQ ID NO: 639835 - DNA, 75 bp, synthetic construct
  source 1..75: mol_type = other DNA
gcgatacccagtgggttattgattcaatgcgggtaaaaacgccggggcatcgaacacaaattggttcgctctccg

SEQ ID NO: 639836 - DNA, 75 bp, synthetic construct
  source 1..75: mol_type = other DNA
aacaagatgctggtatcgggcacgcatactcaatggaagctggtcgacctccagcctgacctcttcactgtagta

SEQ ID NO: 639837 - DNA, 75 bp, synthetic construct
  source 1..75: mol_type = other DNA
tttgcgtttcttgccatgggcttcacggggaaacgtgctgcccggttcaaagaggcatacatcaatgcctttaac

SEQ ID NO: 639838 - DNA, 75 bp, synthetic construct
  source 1..75: mol_type = other DNA
tgcgacaacttgagtcagcaggtgcagagattagccgggcaggtggaccgcttgagtcggttatttatcacgaac

SEQ ID NO: 639839 - DNA, 75 bp, synthetic construct
  source 1..75: mol_type = other DNA
gccaacttcttctctaaacgtcatgacgatgttctgaaaaagatccgcattttggattgttctccagagttttgt

SEQ ID NO: 639840 - DNA, 75 bp, synthetic construct
  source 1..75: mol_type = other DNA
ccactggaaaaaatcgcgccttatccacaagctgaaaaaggcatgaagcgtcaggtgattcagttaaccccgcaa

SEQ ID NO: 639841 - DNA, 75 bp, synthetic construct
  source 1..75: mol_type = other DNA
tggcggtaagtcaaagcaatgtgggtattaccgatcgtccgcagttggccgcaatgatggcgcgcgtcgacttac

SEQ ID NO: 639842 - DNA, 75 bp, synthetic construct
  source 1..75: mol_type = other DNA
taacgttaagctgacagaaaaagatggcgaagtgactgacttcaacttctctggttttgaagtgactcctgctga

SEQ ID NO: 639843 - DNA, 75 bp, synthetic construct
  source 1..75: mol_type = other DNA
aaccctgtacgtctcaccacctctgtgattggcgtcccatgtggtgagttttctgaaaaactgactaccggggct

SEQ ID NO: 639844 - DNA, 75 bp, synthetic construct
  source 1..75: mol_type = other DNA
ttgcgtttcttgccatgggcttcactggtaaacgtgctgcccggttcaaagaggcatacatcaacgcctttaacc

SEQ ID NO: 639845 - DNA, 75 bp, synthetic construct
  source 1..75: mol_type = other DNA
ctacgtgctctgcgcaaggtaactctttcggatccgcaggcgcatcaggttctggtagaaacccttcttaacttg

SEQ ID NO: 639846 - DNA, 75 bp, synthetic construct
  source 1..75: mol_type = other DNA
gctgcccagttcaaagaggcatacatcaatgcctttaaccagatggagaaacagctttcaaagcccgctgtaccg

SEQ ID NO: 639847 - DNA, 75 bp, synthetic construct
  source 1..75: mol_type = other DNA
gcatacatcaatgcctttaaccagatggaaaaactgctttcaaagccatccacgctgagcgatgccgcagataac

SEQ ID NO: 639848 - DNA, 75 bp, synthetic construct
  source 1..75: mol_type = other DNA
tctggcaccttataaagcgggtgccgggattggcgtcctgaaattgattactgagcataaccgcgctcatgcggt

SEQ ID NO: 639849 - DNA, 75 bp, synthetic construct
  source 1..75: mol_type = other DNA
accggtctgctaaccctgctcaggtcaccaccagttgtttagcagcagcttgtggtgataagtcaaaactcatca

SEQ ID NO: 639850 - DNA, 75 bp, synthetic construct
  source 1..75: mol_type = other DNA
ttgagtgtgaaggaccaccagcacattgattctgcaattccgggacgttacactgttcaggcaccttataaagcg

SEQ ID NO: 639851 - DNA, 75 bp, synthetic construct
  source 1..75: mol_type = other DNA
gcctgtatgaccatatcaacgatgctgctgcgatttccagcctaatcaatatgacactgaacccttcagaggtaa

SEQ ID NO: 639852 - DNA, 75 bp, synthetic construct
  source 1..75: mol_type = other DNA
gctctggtacaagactttatcccatcacgaagggaatatcaaaacagttgatgcctgtttatgataaacctatga

SEQ ID NO: 639853 - DNA, 75 bp, synthetic construct
  source 1..75: mol_type = other DNA
atggtggactcagtgaaaggtatttttgtttctggtggaagtaatttaagaagatctcctgccacaaatattatt

SEQ ID NO: 639854 - DNA, 75 bp, synthetic construct
  source 1..75: mol_type = other DNA
ctcatcaatcggagagtccggtccaaccgacctgtaccaaggggtaatggcggcctacaaaaccaacctgcaaaa

SEQ ID NO: 639855 - DNA, 75 bp, synthetic construct
  source 1..75: mol_type = other DNA
ttctaatgatatacgcaaggatgtgtaccacaatggtaaccaatatatttgcgcttcaggcctactttcctgatt

SEQ ID NO: 639856 - DNA, 75 bp, synthetic construct
  source 1..75: mol_type = other DNA
aaagcaccgacaagagttacacgttcacaatcagcaatggcagtggcacgtgtggctctgtcgaactgccttatt

SEQ ID NO: 639857 - DNA, 75 bp, synthetic construct
  source 1..75: mol_type = other DNA
tgtaaaattctttaactcactaacaggtgccgcttcgatgcttaccgcgctgtttgaagcacttgcaccacctgt

SEQ ID NO: 639858 - DNA, 75 bp, synthetic construct
  source 1..75: mol_type = other DNA
acgccaccgctgggcacagtagtatcatccagtgaacaacgcatggcaaatgcacaagatccgaaatctgccttg

SEQ ID NO: 639859 - DNA, 75 bp, synthetic construct
  source 1..75: mol_type = other DNA
ttggcatgggggcaacctgcgccatgttcgtgctgggctcgttgcgagaaatcatcggtaacggcacgctgtttg

SEQ ID NO: 639860 - DNA, 75 bp, synthetic construct
  source 1..75: mol_type = other DNA
ttcaggggttgtggaaaaacaactctgcgctggtccagttgctcggcctttgtccgctgttggcggtcacgtcca

SEQ ID NO: 639861 - DNA, 75 bp, synthetic construct
  source 1..75: mol_type = other DNA
ggcacagctacagaactcagcgtatactcctgcactgggaacagccacctctgccagtgaataccacgcatctaa

SEQ ID NO: 639862 - DNA, 75 bp, synthetic construct
  source 1..75: mol_type = other DNA
ctttgaagacgtggaaagtatcattcagtcggctgcatccagctatgaaagcacggtgcagcaggccatcaacaa

SEQ ID NO: 639863 - DNA, 75 bp, synthetic construct
  source 1..75: mol_type = other DNA
cacaggaacagtcacttttattaataaagtgttttccgccactgcgcccgctataaacttcttcctgttatgggt

SEQ ID NO: 639864 - DNA, 75 bp, synthetic construct
  source 1..75: mol_type = other DNA
gcttgcgactacgctggtgttgactctcaccaacctgactatctcgacgctgcgtcactggacgccagccgagat

SEQ ID NO: 639865 - DNA, 75 bp, synthetic construct
  source 1..75: mol_type = other DNA
ggtaacgatatcgccggcgggtacagtctgacgacccagccaaccagtgccagcacaaggacggcagcgcgaggc

SEQ ID NO: 639866 - DNA, 75 bp, synthetic construct
  source 1..75: mol_type = other DNA
gggcatttcatatgttaacaacaatgaatctaaatcaatatgcgtcgaaatctgcacagccgggtcttgctgtgg

SEQ ID NO: 639867 - DNA, 75 bp, synthetic construct
  source 1..75: mol_type = other DNA
atcgtccgaattctggataaatttactgctcttacagctgagcttacagctgagcttaccatgcgtaaaaagcag

SEQ ID NO: 639868 - DNA, 75 bp, synthetic construct
  source 1..75: mol_type = other DNA
aatttgatgcgctaacaaactccatcaacgaaggccttcctcgtgaaatcgagctgcgccagaaacagtacgaat

SEQ ID NO: 639869 - DNA, 75 bp, synthetic construct
  source 1..75: mol_type = other DNA
atttggcgctgccctggttaacgtacagttcaattcgctgaccggtattttcagtcttgctggtttcttgctgat

SEQ ID NO: 639870 - DNA, 75 bp, synthetic construct
  source 1..75: mol_type = other DNA
caacctatggatgggtaacgcttggcgcgtggtatcagacctttgccactgctaaccagcgtctggcagagctgg

SEQ ID NO: 639871 - DNA, 75 bp, synthetic construct
  source 1..75: mol_type = other DNA
aagtcgcaatatccgacatactcctggaatgaaaacagatcgtcttaaaaataatacaaatggaagtgacgacaa

SEQ ID NO: 639872 - DNA, 75 bp, synthetic construct
  source 1..75: mol_type = other DNA
cacaaaaaatgaaatatattactggagctaaagtccgacgggtttcgagtggcgatttatctaaaattaaaattc

SEQ ID NO: 639873 - DNA, 75 bp, synthetic construct
  source 1..75: mol_type = other DNA
attaataaaatattctccgccaccgcaccggctattaactttttccttttatgggtctttgttattggctttcag

SEQ ID NO: 639874 - DNA, 75 bp, synthetic construct
  source 1..75: mol_type = other DNA
actatacgttaggtactgcagaaacaacttatggaagctatatagcagcacgggcagttgcacatgctgctggag

SEQ ID NO: 639875 - DNA, 75 bp, synthetic construct
  source 1..75: mol_type = other DNA
ccggaaccattctaaattcgttgtttggagctgcactggccaatgtacagacagactccctgacggggctattca

SEQ ID NO: 639876 - DNA, 75 bp, synthetic construct
  source 1..75: mol_type = other DNA
cagcaaatgaatataacagcgcaggcagtaacgatccgcaaagtgctattttaagttcaattcctggagtagaac

SEQ ID NO: 639877 - DNA, 75 bp, synthetic construct
  source 1..75: mol_type = other DNA
ggcgaagccggagatactgagttcctgaaggaagtcaaaggagcttaccaggcacagttgcaaaactcaccatat

SEQ ID NO: 639878 - DNA, 75 bp, synthetic construct
  source 1..75: mol_type = other DNA
cgatcacatatggcatcttcaataccggcggcttcatccttttagtggtcaaaaggtatcagagctggaccctat

SEQ ID NO: 639879 - DNA, 75 bp, synthetic construct
  source 1..75: mol_type = other DNA
ggcttaccagcggaaaaaacgacgtgccaacaagcgtgtgcgtgcaaccactctgcgttatttctggtgccggga

SEQ ID NO: 639880 - DNA, 75 bp, synthetic construct
  source 1..75: mol_type = other DNA
tccgatgatacgcctttgtcgggtggatgttctgaaaccaggaaggcttcagacaaaaagccgggtggatccgct

SEQ ID NO: 639881 - DNA, 75 bp, synthetic construct
  source 1..75: mol_type = other DNA
gccaacaagcgtgtgcatgcaaccagcctgcgttatttctggtgccgggagttcggcaaggaaaaaggcaggaaa

SEQ ID NO: 639882 - DNA, 75 bp, synthetic construct
  source 1..75: mol_type = other DNA
tgctgttggtggaactggaaggggaaaaatggattgctgatgtcggtttcggtggacagacgctaaccgcgccga

SEQ ID NO: 639883 - DNA, 75 bp, synthetic construct
  source 1..75: mol_type = other DNA
gaccaatttccattttacccgttatgaaaatggtcacgtagcagagcagcagaatttgccagatgtagcgtcgtt

SEQ ID NO: 639884 - DNA, 75 bp, synthetic construct
  source 1..75: mol_type = other DNA
ttgcccgtattaactggtcgggagctgctgcggtcaatattgatacgctgcgtgcattgcacctgaaacacaatt

SEQ ID NO: 639885 - DNA, 75 bp, synthetic construct
  source 1..75: mol_type = other DNA
tggatgttctgataccaggaaggcttcagacaaaaagccgggtgtagccgctgtgctctggatcaagcgtggtga

SEQ ID NO: 639886 - DNA, 75 bp, synthetic construct
  source 1..75: mol_type = other DNA
tggatgttctgataccaggaaggcttcagacaaaaagccgggtgtagccgctgtactctgggtcaagcgtggtga

SEQ ID NO: 639887 - DNA, 75 bp, synthetic construct
  source 1..75: mol_type = other DNA
tggatgttctgataccaggaaggcttcagacaaaaagccgggtgaagccgctgtactctggttcaagcgtggtga

SEQ ID NO: 639888 - DNA, 75 bp, synthetic construct
  source 1..75: mol_type = other DNA
ccctgcgttatttctggtgtcgggagtttggcaaggaaaaaggcaggaaacattatcacgtgatattactgctca

SEQ ID NO: 639889 - DNA, 75 bp, synthetic construct
  source 1..75: mol_type = other DNA
tggatgttctgataccaggaaggcttcagacaaaaagccgggtggagccgctgtgctctggttcaagcgtggtga

SEQ ID NO: 639890 - DNA, 75 bp, synthetic construct
  source 1..75: mol_type = other DNA
tggatgttctgataccaggaaggcttcagacaaaaagccgggtgcagccgctgtcctctggttcaagcgtggtga

SEQ ID NO: 639891 - DNA, 75 bp, synthetic construct
  source 1..75: mol_type = other DNA
agcccagaagaaaaattacccgacaacgtttgaatcttgatgaatggcaaaaaatctttgatatcgcagatgcca

SEQ ID NO: 639892 - DNA, 75 bp, synthetic construct
  source 1..75: mol_type = other DNA
cacgccgccggttactcggtgtctccgttccaaacgggagaacacccattccggatgaagaaaccgatgctgcaa

SEQ ID NO: 639893 - DNA, 75 bp, synthetic construct
  source 1..75: mol_type = other DNA
aatcgcactgatgaaccgttatttcggggttggctccagagaaacctgtgcacgccgccggttactcggtgtctc

SEQ ID NO: 639894 - DNA, 75 bp, synthetic construct
  source 1..75: mol_type = other DNA
cgcgtgatataacgaaagaaaaattactcacagctgcgaaggatggaaaactgggaacgaagcctaaagcgtggc

SEQ ID NO: 639895 - DNA, 75 bp, synthetic construct
  source 1..75: mol_type = other DNA
gaagcgctgctggcaacggcaatcggtctggtggcagcaattccggcggttgttatctataacgtattcgcacgt

SEQ ID NO: 639896 - DNA, 75 bp, synthetic construct
  source 1..75: mol_type = other DNA
cttaaaccaggccaacgatatcgccgctgattttggtagcaaaagcttaagtctgcatttgctcaatgaagcgca

SEQ ID NO: 639897 - DNA, 75 bp, synthetic construct
  source 1..75: mol_type = other DNA
cgttccgaacgggagaacgcccgttccggatgaagaaaccgatgctgaaatctggcatcagtggcaaaagtatcg

SEQ ID NO: 639898 - DNA, 75 bp, synthetic construct
  source 1..75: mol_type = other DNA
tttattaccgccagtgtgctcatactctgctttttcgtcaccctgttttgtatcagagaaaaattccagcccgtc

SEQ ID NO: 639899 - DNA, 75 bp, synthetic construct
  source 1..75: mol_type = other DNA
gcaacttggcatcaccggccacagcgcgctgaatatgtggtcggggattgtcttcagtattacctttttattttc

SEQ ID NO: 639900 - DNA, 75 bp, synthetic construct
  source 1..75: mol_type = other DNA
atcacaggcagaacgtggggcgcaggttaaatccaacacattgacgatgaatttcagtaaagcgagggatttggc

SEQ ID NO: 639901 - DNA, 75 bp, synthetic construct
  source 1..75: mol_type = other DNA
tctgcttcttcgtcaccctcttttgtatcaaagagaaattcaagccagttagcaaaaaagagatgctccacatgc

SEQ ID NO: 639902 - DNA, 75 bp, synthetic construct
  source 1..75: mol_type = other DNA
ggcgctgggtacgctttccaccggtggcgtcagcggcgcgctgctcggtccaatggctggcggactgcttgcaga

SEQ ID NO: 639903 - DNA, 75 bp, synthetic construct
  source 1..75: mol_type = other DNA
ccggagtcgttttgtttaacgcggtctattcgtggaacagcctgcgccgtcgccgactcccccaggtatcgaact

SEQ ID NO: 639904 - DNA, 75 bp, synthetic construct
  source 1..75: mol_type = other DNA
ttcacctgaaagggatgacagccgttggcgaaggtgagttactcatcggctggagtggtacaagcggtgctcatg

SEQ ID NO: 639905 - DNA, 75 bp, synthetic construct
  source 1..75: mol_type = other DNA
tatccaacagcgtatggaaatatcattcacctgaaagggatgacagccgttggcgaaggtgagttactcatcggc

SEQ ID NO: 639906 - DNA, 75 bp, synthetic construct
  source 1..75: mol_type = other DNA
ccttacctctgcttatgcggcgcaactggctgacgatgaagcgggactacgcatcagactgaaaaacgaattgcg

SEQ ID NO: 639907 - DNA, 75 bp, synthetic construct
  source 1..75: mol_type = other DNA
cacccacagcgccagcgcatccagtacggatttggggacgaaaaacacatcgtcgtttgattacggaaccaaatc

SEQ ID NO: 639908 - DNA, 75 bp, synthetic construct
  source 1..75: mol_type = other DNA
ccagttcacaacgggtttagccgttgttattaccaccacttataacgaaacgcgtattcagccaaatacaaaatg

SEQ ID NO: 639909 - DNA, 75 bp, synthetic construct
  source 1..75: mol_type = other DNA
ggcgcacatactcataccgttccattaaggagaccaaacagtggcggtatgaatttcgactggcttgatggttca

SEQ ID NO: 639910 - DNA, 75 bp, synthetic construct
  source 1..75: mol_type = other DNA
cccggcctgcgcagacgccagtgattgtccacaacgcctgcccgaaagtgagtctttgcccgatgccgggcagtg

SEQ ID NO: 639911 - DNA, 75 bp, synthetic construct
  source 1..75: mol_type = other DNA
atgctgtgcgccggttgcaccagcgtccggcctgcaccgacgccagtgattgtcgccaacgcctgcccgaaagtg

SEQ ID NO: 639912 - DNA, 75 bp, synthetic construct
  source 1..75: mol_type = other DNA
acagcagacgaccatcaccatgctgaaaaatcagcttcatgttgcgctcaccagggcagacaaaaacgagctggc

SEQ ID NO: 639913 - DNA, 75 bp, synthetic construct
  source 1..75: mol_type = other DNA
tgattatctattaactgcgttttcaaaatttgacgacaaaaatagagcttttcttacaatgccggattatctagc

SEQ ID NO: 639914 - DNA, 75 bp, synthetic construct
  source 1..75: mol_type = other DNA
tctatgcgacagcagcacgtgaaggtgcacctcaggccagacagatagctgatcgatggcacctgctaaaaaata

SEQ ID NO: 639915 - DNA, 75 bp, synthetic construct
  source 1..75: mol_type = other DNA
acaccttatagataatgtacaggcactggcagccagtcaccaaagcggctgttttaaagaagcatataaggactt

SEQ ID NO: 639916 - DNA, 75 bp, synthetic construct
  source 1..75: mol_type = other DNA
tcagccatcaatgccagttcgctgaccgtgaaagcatttcttgatatgcaggatgataacctgccaaagctggtg

SEQ ID NO: 639917 - DNA, 75 bp, synthetic construct
  source 1..75: mol_type = other DNA
acagcagcatctgcaggtgcacacgcgcatactgtcggtattggtgctcatacgcactccgttgcgattggttca

SEQ ID NO: 639918 - DNA, 75 bp, synthetic construct
  source 1..75: mol_type = other DNA
ggacgaaaaccacatcgtcgtttgattacggcactaaatccacgaataacactggtgcgcatacccatagtttaa

SEQ ID NO: 639919 - DNA, 75 bp, synthetic construct
  source 1..75: mol_type = other DNA
cagtcgcttatccgtcaggcgtgatccctgatatgcgtggctggacgattaagggcaagcccgccagtggtcgtg

SEQ ID NO: 639920 - DNA, 75 bp, synthetic construct
  source 1..75: mol_type = other DNA
agaagactcaaaaccggtaaaaccgatgctatcggtctggtttatcctgaaaatgatgtgccgtttaacagcggt

SEQ ID NO: 639921 - DNA, 75 bp, synthetic construct
  source 1..75: mol_type = other DNA
atttctgacatggtgtatcagataatcaatggtgcatcaccagaatcactgcagataacctggacaccgatattt

SEQ ID NO: 639922 - DNA, 75 bp, synthetic construct
  source 1..75: mol_type = other DNA
cagatcttagaaaagaatatgaaattgagccagtgaaaacagaaaaaattggacttgcaaaaataagaaaacttg

SEQ ID NO: 639923 - DNA, 75 bp, synthetic construct
  source 1..75: mol_type = other DNA
atccagtctaaccatgtgcgccagactgccgcagtcgctgcgaaactcggtctgcactgcgtggcgctgctggaa

SEQ ID NO: 639924 - DNA, 75 bp, synthetic construct
  source 1..75: mol_type = other DNA
gttgctggatctgttcaatacccagattgaaatgtgcgacgcactgaccgatcccaatgcccaactggaagagct

SEQ ID NO: 639925 - DNA, 75 bp, synthetic construct
  source 1..75: mol_type = other DNA
tctgcactgcgtagcgctgctggaaaaccctattggtactaccgcagagaactatttaagcaatggcaaccgttt

SEQ ID NO: 639926 - DNA, 75 bp, synthetic construct
  source 1..75: mol_type = other DNA
ctgcatacccgaaacttgcagccgcttatccgtcaggcgtgatccctgatatgcgtggctggacgattaagggca

SEQ ID NO: 639927 - DNA, 75 bp, synthetic construct
  source 1..75: mol_type = other DNA
cagagttttatccagtcggtgcaccaatcccgtggccatcagataccgttccgtctggttatgtcctgatgcagg

SEQ ID NO: 639928 - DNA, 75 bp, synthetic construct
  source 1..75: mol_type = other DNA
gttgttggatctcttcaatacccagattgaaatgtgcgatgcgctgaccgatcccaatgcccaactggaagagct

SEQ ID NO: 639929 - DNA, 75 bp, synthetic construct
  source 1..75: mol_type = other DNA
acttaatgaaaacgaggatttccgccgctggtatggcgctgacctgcctgatgctgtgcgccggttgcaccagcg

SEQ ID NO: 639930 - DNA, 75 bp, synthetic construct
  source 1..75: mol_type = other DNA
ccatcatttgtcagtgccggccgattgatgaccgaacgggaacagtgctttctgcgccggctggacagggtgact

SEQ ID NO: 639931 - DNA, 75 bp, synthetic construct
  source 1..75: mol_type = other DNA
cctgaatcgaattgctgtacgtggtcagcgaaaggttgccgacgcgttaggggttaatgaatcgcaaatttcgcg

SEQ ID NO: 639932 - DNA, 75 bp, synthetic construct
  source 1..75: mol_type = other DNA
atggtgattgccccctgttcacgaatggggccggtgacggaagatgagcgtaatggcttgattaatcactctccg

SEQ ID NO: 639933 - DNA, 75 bp, synthetic construct
  source 1..75: mol_type = other DNA
cagttttatgaaaggactgttcagaattgtggatatgaaacggtggtatctgtgtccgcaggtacgggtcgcgga

SEQ ID NO: 639934 - DNA, 75 bp, synthetic construct
  source 1..75: mol_type = other DNA
atgaagttgattatttttattctcattgttctgattattgcagcgttacttatccggattatcctcagaagtgta

SEQ ID NO: 639935 - DNA, 75 bp, synthetic construct
  source 1..75: mol_type = other DNA
gaagaaggtgaacgttattacacagtagattattctggtgttactggcttgcttgttcaggtagccagagagtca

SEQ ID NO: 639936 - DNA, 75 bp, synthetic construct
  source 1..75: mol_type = other DNA
ttcaggagtttattaagctacttaaagagttagagtataactatatatcttttatagccaatgctgagaactatg

SEQ ID NO: 639937 - DNA, 75 bp, synthetic construct
  source 1..75: mol_type = other DNA
gtacagctggacctctgtggggggcaactcatctaggcacatcacaggacagagggagtcgtgctgcctacggtt

SEQ ID NO: 639938 - DNA, 75 bp, synthetic construct
  source 1..75: mol_type = other DNA
agctggctgacagagctccagctgtaacttcaatgtcatcactgggagaagttggtgatactgacttattcagtg

SEQ ID NO: 639939 - DNA, 75 bp, synthetic construct
  source 1..75: mol_type = other DNA
catttatctgtatgaattgtcaatggagtaaaaccattattcatgtgaactgtacaacaggattttatgaatgtc

SEQ ID NO: 639940 - DNA, 75 bp, synthetic construct
  source 1..75: mol_type = other DNA
gtgaatatgtgtaaccatctccctgatttcgtgaacagtaacggcgtgcccctgcgaggtttaaagattcgccgt

SEQ ID NO: 639941 - DNA, 75 bp, synthetic construct
  source 1..75: mol_type = other DNA
gcggtgcaatttgcgctatcgcgatgatgattaccatcgtgatgggtaatggcaatgtgcgaaccaaccaggcgg

SEQ ID NO: 639942 - DNA, 75 bp, synthetic construct
  source 1..75: mol_type = other DNA
agaggtgaatactggcaacgtcagaagacgcttctgacagaaagggaagtcagttttatgaaaggattgttcaga

SEQ ID NO: 639943 - DNA, 75 bp, synthetic construct
  source 1..75: mol_type = other DNA
cccgcctgcaccgacgccagtgattgtccacaacgcctgcccgaaagtgagtctttgcccgatgccgggcagtga

SEQ ID NO: 639944 - DNA, 75 bp, synthetic construct
  source 1..75: mol_type = other DNA
ccccgcctgcaccgacgccagtgattgtcgccaacgtctgcccgaaagtgagtctttgcccgatgccgggcagcg

SEQ ID NO: 639945 - DNA, 75 bp, synthetic construct
  source 1..75: mol_type = other DNA
agtttaaaaatatatgggggaaaacgccccgattttattattaaagttgatagtaacacctttattcttctggat

SEQ ID NO: 639946 - DNA, 75 bp, synthetic construct
  source 1..75: mol_type = other DNA
gctgacctgcctgatgctgtgcgccggttgcaccagcgccccgcctgcaccgacgccagtgattgtcgccaacgc

SEQ ID NO: 639947 - DNA, 75 bp, synthetic construct
  source 1..75: mol_type = other DNA
tcgtgttgttatcgctggcggtggcggggctgtttctggcgaagcatgaaaacgccagactgcgcgcttcactgg

SEQ ID NO: 639948 - DNA, 75 bp, synthetic construct
  source 1..75: mol_type = other DNA
gcagcagacgaccatcaccatgctgaaaaatcagcttcatgttgccctcaccagagcagacaaaaacgagctggc

SEQ ID NO: 639949 - DNA, 75 bp, synthetic construct
  source 1..75: mol_type = other DNA
gatattcttctagaagaggttctgaggcaggctggtattccgttgctcagaagccacgatgccagaaaactgctg

SEQ ID NO: 639950 - DNA, 75 bp, synthetic construct
  source 1..75: mol_type = other DNA
attgtggatatgaaacggtggtatctgtgtccgcaggtacgggtcgcggatatcgtccaactgaacgggaatatc

SEQ ID NO: 639951 - DNA, 75 bp, synthetic construct
  source 1..75: mol_type = other DNA
tcgttattattatagctgttttgcctgtccggataatattccggaggagtaaaaactgtcctcccgcactgatac

SEQ ID NO: 639952 - DNA, 75 bp, synthetic construct
  source 1..75: mol_type = other DNA
cactggtgctgaacgttgctggtgacgcatctaaggctgagattcgtgatatgacggtgaaggttgataaccagc

SEQ ID NO: 639953 - DNA, 75 bp, synthetic construct
  source 1..75: mol_type = other DNA
ctgaaggggcgaccgtttccagttggaccgaaaaaggtgacggttcctatgttgctacgttaactacaggcggaa

SEQ ID NO: 639954 - DNA, 75 bp, synthetic construct
  source 1..75: mol_type = other DNA
aatatcgttcttgagtatcgcaaatctgaagtgatccgtattgctctgcctgagcgtattgaaggcaagggcggc

SEQ ID NO: 639955 - DNA, 75 bp, synthetic construct
  source 1..75: mol_type = other DNA
agacttacacgcaatcagaatgcgatgctttgttaaacaaggatctccacaaaaccgcaaaagcgattgacccat

SEQ ID NO: 639956 - DNA, 75 bp, synthetic construct
  source 1..75: mol_type = other DNA
aagaccgcaaaagcgattgacccatatatcaaagtcgaaatatcagattttacccgcgcagcactttattccttc

SEQ ID NO: 639957 - DNA, 75 bp, synthetic construct
  source 1..75: mol_type = other DNA
tgtgtggactgtttgtcatggtcacaccggaaaagacatcatgcttggtaaaacttacacgcaatcagaatgcga

SEQ ID NO: 639958 - DNA, 75 bp, synthetic construct
  source 1..75: mol_type = other DNA
tccagttttgacgtaggcgctgtcgaacaaaaagagtggcgcagccagtctctgttcgctcaacggatgcgtgaa

SEQ ID NO: 639959 - DNA, 75 bp, synthetic construct
  source 1..75: mol_type = other DNA
aacagggcgaggacgccagcgttatcgctcaggagcggcaggaactcgaagcacgctacttgccacgtaactggt

SEQ ID NO: 639960 - DNA, 75 bp, synthetic construct
  source 1..75: mol_type = other DNA
tgagatgcattatggaggtggaaatcaacagaatatctccctgctaaacagtgccagagttggacgcgtctggtt

SEQ ID NO: 639961 - DNA, 75 bp, synthetic construct
  source 1..75: mol_type = other DNA
accgttgagctggatgaggatattgagctgaactccgggcaggagcgcatttacgttcaggttaaaacccgcctg

SEQ ID NO: 639962 - DNA, 75 bp, synthetic construct
  source 1..75: mol_type = other DNA
atgcggggaagcgaagaaaaatctacgccggatgttttggactctgcccagttggtacgtattgaagccgtacac

SEQ ID NO: 639963 - DNA, 75 bp, synthetic construct
  source 1..75: mol_type = other DNA
gatgctgtcagggcgctggggctgcaacaccttaccatgatggacgtggctatcgtaaataacgcgttactggcg

SEQ ID NO: 639964 - DNA, 75 bp, synthetic construct
  source 1..75: mol_type = other DNA
atgatccttatcgtgatgttgtcggtgtatggactgtttgccacggtcacaccggaaaggacatcatgcttggta

SEQ ID NO: 639965 - DNA, 75 bp, synthetic construct
  source 1..75: mol_type = other DNA
cattacctccgcgctggacaaagagtggatgattgatggacgcgggattaacaacgtctgcgatgtgttgatgta

SEQ ID NO: 639966 - DNA, 75 bp, synthetic construct
  source 1..75: mol_type = other DNA
atgatttctttgatagaccagaattatgacgacgaaaagattgatgacttgaatgttgtgattatgtttaatgtt

SEQ ID NO: 639967 - DNA, 75 bp, synthetic construct
  source 1..75: mol_type = other DNA
tcgatgatggctatcatctgctctgcccgctattttccagttcgctggcgcaggcgatgtatgaaaagctaaccg

SEQ ID NO: 639968 - DNA, 75 bp, synthetic construct
  source 1..75: mol_type = other DNA
gagtcgatgaaataaaatgtgataaaagtacgatactaggctttcaccaagggaatggtttactgatgaaacagt

SEQ ID NO: 639969 - DNA, 75 bp, synthetic construct
  source 1..75: mol_type = other DNA
tcactggtgttgagcattgaaacgaatgtaagccactgtcgtgagttacttgatagcacaataaatcttgtcgat

SEQ ID NO: 639970 - DNA, 75 bp, synthetic construct
  source 1..75: mol_type = other DNA
ctgccaaagccctggtaagatatgtggctgcgccgctggctctctggctggcggcacagggaatggcacaggcaa

SEQ ID NO: 639971 - DNA, 75 bp, synthetic construct
  source 1..75: mol_type = other DNA
gacggtacgctggcaggctctaacgtttctttatatcaagaagtttgcgcccgctatccgcaggtggcgtttcag

SEQ ID NO: 639972 - DNA, 75 bp, synthetic construct
  source 1..75: mol_type = other DNA
ttaatggcacggtggtgcgtttgcatcagggcgattacgcccaacagcgcgactacggtaatgacccgctgccgc

SEQ ID NO: 639973 - DNA, 75 bp, synthetic construct
  source 1..75: mol_type = other DNA
tctctttatatgaagaagtgtgcgccagatatccgcaggtggcatttcagtcatccggcggcattggcgacatta

SEQ ID NO: 639974 - DNA, 75 bp, synthetic construct
  source 1..75: mol_type = other DNA
atgcattaccgccaatgccccgacacgcaagtccaccaaccctgggtgaatgcattaccgccaatgccccgacac

SEQ ID NO: 639975 - DNA, 75 bp, synthetic construct
  source 1..75: mol_type = other DNA
gtgaaagccgctatatgcatcttttcagcggtgaggttgaggatcagccggtgttaacggagccgtcgaacgcgg

SEQ ID NO: 639976 - DNA, 75 bp, synthetic construct
  source 1..75: mol_type = other DNA
cctgaaactgaacgcggcggaagtggcgttggtaaccacgttgttgctacgcggtgcccagacgccaggcgagct

SEQ ID NO: 639977 - DNA, 75 bp, synthetic construct
  source 1..75: mol_type = other DNA
gtttcacgaggtatggcacaggccactgacctggctgccgccggtaaagcggatgtggaggcaacttttggcgaa

SEQ ID NO: 639978 - DNA, 75 bp, synthetic construct
  source 1..75: mol_type = other DNA
gtatcgacaccgctaaagagaaactggatgtcgatgtgttgcgttctgatggtcgtcatcgcaccaaaaaattcg

SEQ ID NO: 639979 - DNA, 75 bp, synthetic construct
  source 1..75: mol_type = other DNA
ggtctgggcgtagatgatgcgaaacatggctttactgtggatgagttagcgctggtgatggcggcgtttgatacg

SEQ ID NO: 639980 - DNA, 75 bp, synthetic construct
  source 1..75: mol_type = other DNA
gatgtgtcggctagcccccttttttgaagggttaacaggtgagcagcgactagaggttgaaaatcagtcgaacta

SEQ ID NO: 639981 - DNA, 75 bp, synthetic construct
  source 1..75: mol_type = other DNA
cctaaaggcgctgcgcaacgtctggggctgaaacgcacgaccctgctgtcacggatgaagcggctgggaattgat

SEQ ID NO: 639982 - DNA, 75 bp, synthetic construct
  source 1..75: mol_type = other DNA
aatggtcgccgaccgagagttccgtagcgatctctattaccgcctgaacgtattcccgatccacctgccgccact

SEQ ID NO: 639983 - DNA, 75 bp, synthetic construct
  source 1..75: mol_type = other DNA
tgcgccgctgccgttaacggctaatagcgactgcaacggttactggaaacggctggcagggctggaactgcaagc

SEQ ID NO: 639984 - DNA, 75 bp, synthetic construct
  source 1..75: mol_type = other DNA
gcattattaagattctttctgcgaaataaaaaaagatgcatattggttagttctgaacaaataaaaaggaatgct

SEQ ID NO: 639985 - DNA, 75 bp, synthetic construct
  source 1..75: mol_type = other DNA
aaaacatctttcttatagattaggacagacattacttaaaaatattaagtctccattaggttggattaaactccc

SEQ ID NO: 639986 - DNA, 75 bp, synthetic construct
  source 1..75: mol_type = other DNA
tggaaagcgatctgtttggtcatgagcgtggggcttttaccggtgccagcgcccagcgtatcggtcgttttgaac

SEQ ID NO: 639987 - DNA, 75 bp, synthetic construct
  source 1..75: mol_type = other DNA
gttggttgagtaataatgaattacatcagcgaggtgcacttttgagtaaaaataattatggtcaatatcttttaa

SEQ ID NO: 639988 - DNA, 75 bp, synthetic construct
  source 1..75: mol_type = other DNA
ttgggctgtcacaggattatatttttatgataataatgtcattgatattgctaagagtattaaaccctccaaacg

SEQ ID NO: 639989 - DNA, 75 bp, synthetic construct
  source 1..75: mol_type = other DNA
ttgggctgtcacaggattatatttttatgacaataacgttatcgatattgcaaagtgtattaaaccttctaaacg

SEQ ID NO: 639990 - DNA, 75 bp, synthetic construct
  source 1..75: mol_type = other DNA
aatcagtgtgatgaactgggtattcgcaaccagtttgaagtggaagtcttgagctacggccatctgccgctggcg

SEQ ID NO: 639991 - DNA, 75 bp, synthetic construct
  source 1..75: mol_type = other DNA
gttcattcactggcgaagtggaaacgtcagaccttagggcaacacgacttcagcgcgggcgaagggctgtacacg

SEQ ID NO: 639992 - DNA, 75 bp, synthetic construct
  source 1..75: mol_type = other DNA
gacgtggcctgccaccgggggggttgtggcgctcagtgatcctgtaagactgaaaaagctgatgagcctggtggc

SEQ ID NO: 639993 - DNA, 75 bp, synthetic construct
  source 1..75: mol_type = other DNA
actgaatgcgactgaacaaaaagctaaagagctgcgttctggcatttcacgattagaagaagagaataaatcatt

SEQ ID NO: 639994 - DNA, 75 bp, synthetic construct
  source 1..75: mol_type = other DNA
aaatccagtgctgctaatgcagccattaaagaaggtgaatttaccgcggttactaacttcaatctgatctatgag

SEQ ID NO: 639995 - DNA, 75 bp, synthetic construct
  source 1..75: mol_type = other DNA
tctgcactacagtgcttgggtcaaaaaatccagtgctgctaatgcagccattaaagaaggtgaatttaccgcggt

SEQ ID NO: 639996 - DNA, 75 bp, synthetic construct
  source 1..75: mol_type = other DNA
gtgaaaatgcgctgcattattcttcatgggtaaaaaaagctactggtggtactgtaaaagaaggtgattttactg

SEQ ID NO: 639997 - DNA, 75 bp, synthetic construct
  source 1..75: mol_type = other DNA
aattaggcacagaaaaaaacatgctggtggatttcaaaactcctatgattttgaccagcgctaccatattggagc

SEQ ID NO: 639998 - DNA, 75 bp, synthetic construct
  source 1..75: mol_type = other DNA
cggcacgaatgtgaatgggcatacaaacgagttaggtactgctggtgataccggtacagcaattgttatttccag

SEQ ID NO: 639999 - DNA, 75 bp, synthetic construct
  source 1..75: mol_type = other DNA
gaaaaaggatctggatattaaactggttaattgtgttcttgacgccaaaaaaccgacagtaaaagtggccttttc

SEQ ID NO: 640000 - DNA, 75 bp, synthetic construct
  source 1..75: mol_type = other DNA
aacaccctacattaccaggcatgggttcagaaaggtgctaaagctgttgaggaaggggagttttcagcgactact

SEQ ID NO: 640001 - DNA, 75 bp, synthetic construct
  source 1..75: mol_type = other DNA
ttgtagctatggcgatgttttcttttggtgctcaggctaacggtcagggtgttgttaacttcaaaggttctgtaa

SEQ ID NO: 640002 - DNA, 75 bp, synthetic construct
  source 1..75: mol_type = other DNA
ataaccaaaagctcaagcaacaattaccagtaccactgtatggggcagctcagcgaataaaaaatgaactagggt

SEQ ID NO: 640003 - DNA, 75 bp, synthetic construct
  source 1..75: mol_type = other DNA
ctggcgcggttgccatggctctggtttcttttggtgcaaatgcaaatcaggggcagggtcaggtgaactttaaag

SEQ ID NO: 640004 - DNA, 75 bp, synthetic construct
  source 1..75: mol_type = other DNA
aatttcggccagatttctaaagcacatttgaatgcagacggaatttccgtaaaaaaagatctggatatcaagtta

SEQ ID NO: 640005 - DNA, 75 bp, synthetic construct
  source 1..75: mol_type = other DNA
cgcaaggggaatacatcaccgggatcgatgatgatgatgaatggacacccaaccgcctgagcgtcttcctcgccc

SEQ ID NO: 640006 - DNA, 75 bp, synthetic construct
  source 1..75: mol_type = other DNA
atgaatcaaccaatacacaatgcttactggttatcccgttttgacagccttctcgacagtgccctggcgcaacac

SEQ ID NO: 640007 - DNA, 75 bp, synthetic construct
  source 1..75: mol_type = other DNA
gcagcgccctgcgtattgagccctggctgggtgatgggctggtccatttttccaggtggacgccttcccgtaaac

SEQ ID NO: 640008 - DNA, 75 bp, synthetic construct
  source 1..75: mol_type = other DNA
gattaaccttgagcacattaagtcttatctgccggacagcacctttaaccgctacggcaaggtgacggcgctgtt

SEQ ID NO: 640009 - DNA, 75 bp, synthetic construct
  source 1..75: mol_type = other DNA
gacggcaacggttaaggatcaatacggcaaccttctgcctggcgctgtggtcgtctttaatctgcctcggggcgt

SEQ ID NO: 640010 - DNA, 75 bp, synthetic construct
  source 1..75: mol_type = other DNA
tggctgatgcgttatcttcaaaccagtcgaaagtctctgtcgcagaagatcacgtaaaagccggcgaaagcacaa

SEQ ID NO: 640011 - DNA, 75 bp, synthetic construct
  source 1..75: mol_type = other DNA
atcaggacggtgcgagcggatcggaaggtgaagaaggtgaacgttattacacagtagattattctggtgttactg

SEQ ID NO: 640012 - DNA, 75 bp, synthetic construct
  source 1..75: mol_type = other DNA
agcctacctggttggcctggccgccactgatgatcccgccagtctgggtacggaaatgctgacattcagcgccag

SEQ ID NO: 640013 - DNA, 75 bp, synthetic construct
  source 1..75: mol_type = other DNA
ttaccgctgcagaggaaacagtgatcgaactggaagaaatccaggacgacaaaccgtccctgtttgcccgcgtca

SEQ ID NO: 640014 - DNA, 75 bp, synthetic construct
  source 1..75: mol_type = other DNA
ttaccgctgcagaagaaacggtgatcgaactggaggaagtccaggacgacaaaccgtccctgtttgcccgcgtca

SEQ ID NO: 640015 - DNA, 75 bp, synthetic construct
  source 1..75: mol_type = other DNA
caggaagaacgtctgtctgagctggagacagttctgcaggcacaacaggccgcctttaacgaactggtggacaag

SEQ ID NO: 640016 - DNA, 75 bp, synthetic construct
  source 1..75: mol_type = other DNA
gcccgaagtttgctgatacgggcaaagcctacctagtcggcctggcggccactgatgatcctgccagtctgggca

SEQ ID NO: 640017 - DNA, 75 bp, synthetic construct
  source 1..75: mol_type = other DNA
acaacccgacggtctacaccgcgctgatcaacctggagcacatcaagtcttactccccggacagtgccttcaacc

SEQ ID NO: 640018 - DNA, 75 bp, synthetic construct
  source 1..75: mol_type = other DNA
cgtcgaaggctgaccatttctcaggtgggaaaatcacgcgtacatttagtaccagcaaccaggtgtctatacgtt

SEQ ID NO: 640019 - DNA, 75 bp, synthetic construct
  source 1..75: mol_type = other DNA
gactctgcggtgatttcccgtttcttcgcctccctgaaagccaaaattcaggcttaccagcggaaaaaaagatgt

SEQ ID NO: 640020 - DNA, 75 bp, synthetic construct
  source 1..75: mol_type = other DNA
tgaccgtattgcaggtaagggcgggcagacggtttccctgggacttgtggtgagtaaagcaactcacggtctgaa

SEQ ID NO: 640021 - DNA, 75 bp, synthetic construct
  source 1..75: mol_type = other DNA
cggtggactccgagggtaatccggtgacgggagaagccagccgcctgcgacttgttccgcaagacactaatggtg

SEQ ID NO: 640022 - DNA, 75 bp, synthetic construct
  source 1..75: mol_type = other DNA
atgaatcaaccaatacacaatgcttactggttatcccgttttgacagccttctcgacagtgccctggcgcagcgc

SEQ ID NO: 640023 - DNA, 75 bp, synthetic construct
  source 1..75: mol_type = other DNA
ggatttgcccctatatttccagacacctgttatcacttaacccattactggcccgctgccgtagatattcccgtg

SEQ ID NO: 640024 - DNA, 75 bp, synthetic construct
  source 1..75: mol_type = other DNA
gtgatgtggaagcgatgcagaaagctcggaacagagccagttatctcgtgaaatatgagacgaagcagcatgacg

SEQ ID NO: 640025 - DNA, 75 bp, synthetic construct
  source 1..75: mol_type = other DNA
gcagggtaatggactggttcatttttccaggcgggcgcctttccgtaaaccgacatcatctgatgctcgcccttc

SEQ ID NO: 640026 - DNA, 75 bp, synthetic construct
  source 1..75: mol_type = other DNA
gtgccgccagcacggggacagagcgaccttcaacaggagactggacagaaacaagtaatggggtctacgtggcga

SEQ ID NO: 640027 - DNA, 75 bp, synthetic construct
  source 1..75: mol_type = other DNA
gcgggtacgaaatgaagccagtgacggtgaccattaccgcggtggatgccaatacggcaacgggcgaggaggcga

SEQ ID NO: 640028 - DNA, 75 bp, synthetic construct
  source 1..75: mol_type = other DNA
cgaatctaaattcgtcgcggatgataaaaacgcggagctcgccgcaacatctgatgtgcattctctggtggcgga

SEQ ID NO: 640029 - DNA, 75 bp, synthetic construct
  source 1..75: mol_type = other DNA
acagacgtataaagttacggtgactgatgccaataacaacctgttgaaagatagcgacgtgacgctgactgccag

SEQ ID NO: 640030 - DNA, 75 bp, synthetic construct
  source 1..75: mol_type = other DNA
cgtaaaagcaggcgaaagcacaaccgtgacgctggtggcgaaagatgcgcatggcaacgctatcagtggtctttc

SEQ ID NO: 640031 - DNA, 75 bp, synthetic construct
  source 1..75: mol_type = other DNA
caggaagaacgcctgtctgagctggagattgctctgcagggacagcagaccgcctttaacgaactggtggacaag

SEQ ID NO: 640032 - DNA, 75 bp, synthetic construct
  source 1..75: mol_type = other DNA
aatttccggcctttaccggagaactgcccaatggcgatcaatattacggctttcccgccgaaaatgacgccctga

SEQ ID NO: 640033 - DNA, 75 bp, synthetic construct
  source 1..75: mol_type = other DNA
tggatccaactggcgaaggaagcgggctgtgcgcaactgttcaactgcccggtcaccgcaattcgtcatgacgat

SEQ ID NO: 640034 - DNA, 75 bp, synthetic construct
  source 1..75: mol_type = other DNA
ttgaaactgaatgagctgctactgaaactggatcgctaccgggtgatagtggtggatgatcttggctatgtcaaa

SEQ ID NO: 640035 - DNA, 75 bp, synthetic construct
  source 1..75: mol_type = other DNA
aaagacaattattacgcgatctctgcggtagcatatgataacaaaggcaatgcctcgaagcgtgtaaagacacag

SEQ ID NO: 640036 - DNA, 75 bp, synthetic construct
  source 1..75: mol_type = other DNA
aacagtattacggcgatgaggtaggactgtttggtaaagataaacgccagaaaaacccacatgctatttcagctg

SEQ ID NO: 640037 - DNA, 75 bp, synthetic construct
  source 1..75: mol_type = other DNA
cgttgtggattacaaaaacgcagtgcttgccgcatcgtctgatgttacatctctggtggcggatgggacaacaac

SEQ ID NO: 640038 - DNA, 75 bp, synthetic construct
  source 1..75: mol_type = other DNA
tcgcgctgtatgaagaagtatgcgccaaatacccgcaggtggcgtttcagtcatctggcggcattggcggaatcg

SEQ ID NO: 640039 - DNA, 75 bp, synthetic construct
  source 1..75: mol_type = other DNA
ctgaccggggcaaaagatccggcaaaacgtcaaatcccgctgattaaaaccctggtggcgggcgttaacgttccg

SEQ ID NO: 640040 - DNA, 75 bp, synthetic construct
  source 1..75: mol_type = other DNA
ccgctatccgcaggtggcgtttcagtcctctggtggcataggtgatattaacgacatcgccgcgctgcgcgggac

SEQ ID NO: 640041 - DNA, 75 bp, synthetic construct
  source 1..75: mol_type = other DNA
tgatgaggctctggcggagatcttgcgtcgcgttggtctggagaagctgctcgaggatgcaggtctcaacagttg

SEQ ID NO: 640042 - DNA, 75 bp, synthetic construct
  source 1..75: mol_type = other DNA
tgccagcgatcgttatcgcacgcaattagagaataccgaaattcagtggctggaagcgcaacgccgtcaatctga

SEQ ID NO: 640043 - DNA, 75 bp, synthetic construct
  source 1..75: mol_type = other DNA
atcagatcatcgctgtgattaagtcggttgaagccggacgaactgtcaaggatgtttgccgcgaggccggtatct

SEQ ID NO: 640044 - DNA, 75 bp, synthetic construct
  source 1..75: mol_type = other DNA
tcatcagcgaactctacgcttgttgcggacaataaggctccgaccgtcaaaatgacgacggaactcaccttcacc

SEQ ID NO: 640045 - DNA, 75 bp, synthetic construct
  source 1..75: mol_type = other DNA
caacaatacgtcacagccctcaatgacccacgcatcacctacattcacaacgatattaacaacggagcctgtgcg

SEQ ID NO: 640046 - DNA, 75 bp, synthetic construct
  source 1..75: mol_type = other DNA
agcctacctggttggcctggctgccactgatgatcctgccagtctgggtacggaaatgctgacattcagcgccag

SEQ ID NO: 640047 - DNA, 75 bp, synthetic construct
  source 1..75: mol_type = other DNA
cagcaagaacgcctgtctgagctggagacagccatgcaggcacagctgaccgcctttaacgaactggtggacaag

SEQ ID NO: 640048 - DNA, 75 bp, synthetic construct
  source 1..75: mol_type = other DNA
acaaagatacctggtgctcgccaggggatttcaccgttccttcttcgctggcgacgctgatcaagctggcatggt

SEQ ID NO: 640049 - DNA, 75 bp, synthetic construct
  source 1..75: mol_type = other DNA
cgacattaacagcggggcgtgcgcggtacgtaaccaggctattatgctggcgcaaggggaatacatcaccgggat

SEQ ID NO: 640050 - DNA, 75 bp, synthetic construct
  source 1..75: mol_type = other DNA
ctttttgtacgctaacgactacgtttgccagggagaagtttattcccaaccggcaagcttaccactgtatcccaa

SEQ ID NO: 640051 - DNA, 75 bp, synthetic construct
  source 1..75: mol_type = other DNA
gtcagatgacagaataacagcactggaagaagaaaatgcagaattaaaacaaagattatctgcaattgaggcggc

SEQ ID NO: 640052 - DNA, 75 bp, synthetic construct
  source 1..75: mol_type = other DNA
gtgcataaggccgtggagctggtcgccactgagcagcagaacctgagcgcacggaccgaaaaatccctgtctgag

SEQ ID NO: 640053 - DNA, 75 bp, synthetic construct
  source 1..75: mol_type = other DNA
agttgaagccggacgaaccgttaaagatatctgctgggaggccggtatctctgaagacacctactacatctatgg

SEQ ID NO: 640054 - DNA, 75 bp, synthetic construct
  source 1..75: mol_type = other DNA
agactgccctgcaggcacagcagaccgcctttaaggaactggtggacaagctgagccatgaagacagccgccagg

SEQ ID NO: 640055 - DNA, 75 bp, synthetic construct
  source 1..75: mol_type = other DNA
gcgtccgcaggattacattgctcaactggcgcgtgcgggagctgatttcatcactttgcatccggaaactatcaa

SEQ ID NO: 640056 - DNA, 75 bp, synthetic construct
  source 1..75: mol_type = other DNA
gaaatccgccgtcatgacatgaaagtggggctgatccttaacccggagacgccagttgaggccatgaaatactat

SEQ ID NO: 640057 - DNA, 75 bp, synthetic construct
  source 1..75: mol_type = other DNA
cactgccagtccagcaccgccggtggtattacgctggttgcgggaacaacatggaggagcaacaatacgatgcct

SEQ ID NO: 640058 - DNA, 75 bp, synthetic construct
  source 1..75: mol_type = other DNA
cactccattcggcagaaggaaacatcaacgggcaacagattcatgcattctgtactgccttttaccgacaggtgc

SEQ ID NO: 640059 - DNA, 75 bp, synthetic construct
  source 1..75: mol_type = other DNA
ctggccggtgataagcgctggcggacaatgccgggtggaaaggtgttttcgggttgtccggcctgatacatcaga

SEQ ID NO: 640060 - DNA, 75 bp, synthetic construct
  source 1..75: mol_type = other DNA
ttcagagccgggagatatccggcgttttattcagcaggcggtggaccactggccacatctgttggcatttcactt

SEQ ID NO: 640061 - DNA, 75 bp, synthetic construct
  source 1..75: mol_type = other DNA
ccggggtgatacatctggccagtatgttgcgttaaaaacagtcgttcaatcctttgtgttaccggttatgacaac

SEQ ID NO: 640062 - DNA, 75 bp, synthetic construct
  source 1..75: mol_type = other DNA
ggatttactgcaacatagctggcaggtgataagtgctggcggacaatgccgggtggaaaggtgttttcgggttgc

SEQ ID NO: 640063 - DNA, 75 bp, synthetic construct
  source 1..75: mol_type = other DNA
gggcgcgttttgatttttatcaggcgcgatcagcctggtcacgggccgagtggattggagccggaagaatggcca

SEQ ID NO: 640064 - DNA, 75 bp, synthetic construct
  source 1..75: mol_type = other DNA
gtttaatggtagtgctgtcttgaacgggaagacgacgctggatatcatgaacgcaacctttaatggtgatatcag

SEQ ID NO: 640065 - DNA, 75 bp, synthetic construct
  source 1..75: mol_type = other DNA
tgcgtttaacggcgaaaatctttgtgcagccggtctgggatacggagagcacgcaactgtttcgtacgcgtttta

SEQ ID NO: 640066 - DNA, 75 bp, synthetic construct
  source 1..75: mol_type = other DNA
gcaacagacctggcgggtgataagtgctagcggacaatgtcgggtggaaagttttttttcgggttgcccagcctg

SEQ ID NO: 640067 - DNA, 75 bp, synthetic construct
  source 1..75: mol_type = other DNA
gcaacagacctggcgggtgataagtgctggcggacaatgtcgggtggaaagttttttttcgggttgcccggcctg

SEQ ID NO: 640068 - DNA, 75 bp, synthetic construct
  source 1..75: mol_type = other DNA
aaagagctggcgctgatgggcgaggattatcaggacattttccgccagcaggtcagggaatctgcagagcggcaa

SEQ ID NO: 640069 - DNA, 75 bp, synthetic construct
  source 1..75: mol_type = other DNA
cacacggccagtccatcatcgccggtggtattacgctggttgcgggaacaacatggaggagcaacaatacgatgc

SEQ ID NO: 640070 - DNA, 75 bp, synthetic construct
  source 1..75: mol_type = other DNA
ctggctggggatgcgggagagttcggcaaagaactttgtcgatgaggtggagacagcctggtcggaatatgcgga

SEQ ID NO: 640071 - DNA, 75 bp, synthetic construct
  source 1..75: mol_type = other DNA
attgaaagtgaccttgataccgaaaaggcctttgaatatatcgccggtgcgccgcaggggcagaaggataatccg

SEQ ID NO: 640072 - DNA, 75 bp, synthetic construct
  source 1..75: mol_type = other DNA
gagtctcagctacaacgggggcggcgcaggatttggcgggcaaatggcggagtggttgccaccggcgcagagtgc

SEQ ID NO: 640073 - DNA, 75 bp, synthetic construct
  source 1..75: mol_type = other DNA
tgccacgctgaacaccatgcttgaagcaacagattcgacggtcacactgggcgacagccgggtttttatcgacaa

SEQ ID NO: 640074 - DNA, 75 bp, synthetic construct
  source 1..75: mol_type = other DNA
gttcgcaagtggtggatttactgcagcagacctggcgggggatggatacgggcggacaatgtcgggtggaaaggt

SEQ ID NO: 640075 - DNA, 75 bp, synthetic construct
  source 1..75: mol_type = other DNA
caacgggcaacagattcatgcattctgtacttccttttatgaacgtattactgagcgtaatcacacgaccagtcc

SEQ ID NO: 640076 - DNA, 75 bp, synthetic construct
  source 1..75: mol_type = other DNA
cagtgtcacagttgatgaagcatgttcgcaagtggcggatttactgcaacagacctggccggtgataagcgctgg

SEQ ID NO: 640077 - DNA, 75 bp, synthetic construct
  source 1..75: mol_type = other DNA
ctccggttgcaccggatacagggagtacaggaagcactgaggctgatggtattgtgtctgaaggaaataacagca

SEQ ID NO: 640078 - DNA, 75 bp, synthetic construct
  source 1..75: mol_type = other DNA
atccggccagtacgttgcgttaaaaacagctgcgttatcttttgatattaccggtgatatccacaacagtcaggg

SEQ ID NO: 640079 - DNA, 75 bp, synthetic construct
  source 1..75: mol_type = other DNA
atcagttttacagcgtcatggaacggctgaagatgctcgattccctgcaggcaacacagcttcagtcggccatag

SEQ ID NO: 640080 - DNA, 75 bp, synthetic construct
  source 1..75: mol_type = other DNA
tgcctgttgctgctcagccagacgagcatttgccatccgcgggccagtgccacggttgatgaagaatgttcgcaa

SEQ ID NO: 640081 - DNA, 75 bp, synthetic construct
  source 1..75: mol_type = other DNA
gttgctgctcagccagacgagtatttgtcacccgcgagccagtgtcacagttgatgaacaatgttcgcaagtggt

SEQ ID NO: 640082 - DNA, 75 bp, synthetic construct
  source 1..75: mol_type = other DNA
tgctgttaaatggtgaggaatcatttaacgacctcggcgagccggagtggctattttctcgcgcgctgggtgtcg

SEQ ID NO: 640083 - DNA, 75 bp, synthetic construct
  source 1..75: mol_type = other DNA
tgatcagctaccgtccgaactggcgctggctggggatgcgggagagcgcagcaaaaagctttgtcgatgaggggg

SEQ ID NO: 640084 - DNA, 75 bp, synthetic construct
  source 1..75: mol_type = other DNA
agctgactgcagcaaggatcgccgctgctctggggatgtacatccgcaaaggcgacggacagagctatgaaccgg

SEQ ID NO: 640085 - DNA, 75 bp, synthetic construct
  source 1..75: mol_type = other DNA
gccctgaaagagtatgaagattctgagctgactgcagcaaggatcgccgctgctctggggatgtacatccgcaaa

SEQ ID NO: 640086 - DNA, 75 bp, synthetic construct
  source 1..75: mol_type = other DNA
gcgaagaaatcggaatggtgaagtcggatcgccccaatcctaaccttgaaacttttcgtaatggtcagttgcgtg

SEQ ID NO: 640087 - DNA, 75 bp, synthetic construct
  source 1..75: mol_type = other DNA
gaggccggactgagcacgtatgagaaagagctggcgctgatgggcgaggattatcaggacattttccgccagcag

SEQ ID NO: 640088 - DNA, 75 bp, synthetic construct
  source 1..75: mol_type = other DNA
gtttcctacgaacagttgtcccgtgattactcgaaggtcagttattcaagtgccagggcctctgccaatgagtcg

SEQ ID NO: 640089 - DNA, 75 bp, synthetic construct
  source 1..75: mol_type = other DNA
cctccgccaatgagtcgtggcgctattttatgggacgacgaaaatttattgcgtcccggctggccacgcagatgt

SEQ ID NO: 640090 - DNA, 75 bp, synthetic construct
  source 1..75: mol_type = other DNA
ccgtggagccaatcagttttacagcgttatggaacggctgaagatgctcgattccctgcaggcaacacagcttca

SEQ ID NO: 640091 - DNA, 75 bp, synthetic construct
  source 1..75: mol_type = other DNA
atctcttgtactgatgaaaaccccggtcaggagagcgtggtggtcaataatatgattgcccgccaggtcgacggg

SEQ ID NO: 640092 - DNA, 75 bp, synthetic construct
  source 1..75: mol_type = other DNA
atgatctgaaactacagactgcgcaggattcagacaatggattttctgcgcttgaacaggcgctgctgcggtata

SEQ ID NO: 640093 - DNA, 75 bp, synthetic construct
  source 1..75: mol_type = other DNA
gcgagcatatgaccgtttcatggggcggcgtggcccactgtgatattcatctgccggacccactgcctgccgatc

SEQ ID NO: 640094 - DNA, 75 bp, synthetic construct
  source 1..75: mol_type = other DNA
tctgtctttggcgcggtggcctttgatatcacccactcgcatacccgtctggataaagagaccgcctacggtaaa

SEQ ID NO: 640095 - DNA, 75 bp, synthetic construct
  source 1..75: mol_type = other DNA
gcaggttgacctcagcgcgaactaccatgaagggcaatacacctctgcgggcttgtcgttacagggcggcgcaac

SEQ ID NO: 640096 - DNA, 75 bp, synthetic construct
  source 1..75: mol_type = other DNA
actgggatcgcgaggagcagacaaactacaacatcatgctctcgcactatttcaatatgggcagcattcgtaata

SEQ ID NO: 640097 - DNA, 75 bp, synthetic construct
  source 1..75: mol_type = other DNA
caataataccgcggcttcactggcgttcagtggtacattgttaggttacgttatcccattatccagtgcggcaat

SEQ ID NO: 640098 - DNA, 75 bp, synthetic construct
  source 1..75: mol_type = other DNA
cgccgaaaacgctgacggtaaacacactgcatgccagcagtatgaatatcgccatgggggtcagcactgccgaca

SEQ ID NO: 640099 - DNA, 75 bp, synthetic construct
  source 1..75: mol_type = other DNA
agtgggccttgtcgatgatgacggcaatgtttatctggctggggtgaaacctggcgaacatatgagcgtgttctg

SEQ ID NO: 640100 - DNA, 75 bp, synthetic construct
  source 1..75: mol_type = other DNA
tcactatcagttgaacgtcggcaccagtgacaaacacaccagcgttgatggctactacagccatgatggttcgct

SEQ ID NO: 640101 - DNA, 75 bp, synthetic construct
  source 1..75: mol_type = other DNA
cgtgtcgatgacgcaacccattaccagttgaacgtaggcaccagcgacaaacactccagcgttgatggctattac

SEQ ID NO: 640102 - DNA, 75 bp, synthetic construct
  source 1..75: mol_type = other DNA
gacaatcattccagcgttgatggctattacagccacgatggatcgcttgcgcaggtggatctcagcgccaactac

SEQ ID NO: 640103 - DNA, 75 bp, synthetic construct
  source 1..75: mol_type = other DNA
agcattcgtaatatgagcgtttccctgactggctaccgctacgagtatgacaaccgggcggataagggcatgtag

SEQ ID NO: 640104 - DNA, 75 bp, synthetic construct
  source 1..75: mol_type = other DNA
ctaccagctgaacgtggggaccagcgacaatcactccagcgttgacggctattacagccacgatggctcgctggc

SEQ ID NO: 640105 - DNA, 75 bp, synthetic construct
  source 1..75: mol_type = other DNA
ttaccagttgaacgtaggcaccagcgacaatcactccagcgttgatggctattacagccacgatggttcgatggc

SEQ ID NO: 640106 - DNA, 75 bp, synthetic construct
  source 1..75: mol_type = other DNA
ggcaggcggccagttcacgcccgtcttcggttgaaatctggcagacactgctcacccgactgctggatcagcact

SEQ ID NO: 640107 - DNA, 75 bp, synthetic construct
  source 1..75: mol_type = other DNA
ctcacccgactgctggaccagcattacggcctcacactgaatgacacaccgttcgccgatgaacgtgtgattgag

SEQ ID NO: 640108 - DNA, 75 bp, synthetic construct
  source 1..75: mol_type = other DNA
gtttgccgatgaacgtgtgattgagcagcatattgaagctggcatttcactgtgtgatgcggtgaactttctcgt

SEQ ID NO: 640109 - DNA, 75 bp, synthetic construct
  source 1..75: mol_type = other DNA
accggcctgatgacccgcgacaattacagaacggtaaataacattaccctgggtaaacatccgggggcgaaacaa

SEQ ID NO: 640110 - DNA, 75 bp, synthetic construct
  source 1..75: mol_type = other DNA
ggaatgtaactcaaatatcaggcgcctacagttatctgacaggggggactgtcggggcgccatcttcatctgacc

SEQ ID NO: 640111 - DNA, 75 bp, synthetic construct
  source 1..75: mol_type = other DNA
actttcttgttgaaaaatacgcgctggtacgaactgaccagccgggattcagcgcaggagtcccgtcgcagttaa

SEQ ID NO: 640112 - DNA, 75 bp, synthetic construct
  source 1..75: mol_type = other DNA
cggaagtacctggaccggtgccggtattattgtggacaacggggtgtccgtaaactggcaggttaatggtgttaa

SEQ ID NO: 640113 - DNA, 75 bp, synthetic construct
  source 1..75: mol_type = other DNA
ttcccgcgtgtgcacgcacccggataactggaagctggtaagacgtaaaccggaagcggaagacagcgcccgcga

SEQ ID NO: 640114 - DNA, 75 bp, synthetic construct
  source 1..75: mol_type = other DNA
cgtgtgattgagcagcatattgaggcaggcatttcactgtgtgatgcggtgaactttctcgtggaaaaatacgcg

SEQ ID NO: 640115 - DNA, 75 bp, synthetic construct
  source 1..75: mol_type = other DNA
cggcggcatgttgcagcgcatgatgattgcgatggcggtgctgtgtgaatcaccgtttatcatcgccgatgaacc

SEQ ID NO: 640116 - DNA, 75 bp, synthetic construct
  source 1..75: mol_type = other DNA
tgaagctgtacccgttcgagatgagcggcggcatgttgcagcgcatgatgattgcgatggcggtgctgtgtgaat

SEQ ID NO: 640117 - DNA, 75 bp, synthetic construct
  source 1..75: mol_type = other DNA
cgctgacacagggaagcaccacatatgccatgcacgggcagcagggaaatgacctgaatgccggtaagaacctga

SEQ ID NO: 640118 - DNA, 75 bp, synthetic construct
  source 1..75: mol_type = other DNA
atgaatagaatttattctcttcgctacagtgctgtggccaggggctttattgccgtctctgagtttgccaggaaa

SEQ ID NO: 640119 - DNA, 75 bp, synthetic construct
  source 1..75: mol_type = other DNA
cctccgggctcgccgggcaactggcctgatgaccagcgacaattacagaacggtaaataacattaccctgggtaa

SEQ ID NO: 640120 - DNA, 75 bp, synthetic construct
  source 1..75: mol_type = other DNA
cctccgggctcgctgggcaactggcctgatgatcagcgacaattacagaacggtaaataacattaccctgggtaa

SEQ ID NO: 640121 - DNA, 75 bp, synthetic construct
  source 1..75: mol_type = other DNA
cctccgggctcgcagggcgactggcctgatgagcagcgacaattacagaacggtaaataacattaccctgggtaa

SEQ ID NO: 640122 - DNA, 75 bp, synthetic construct
  source 1..75: mol_type = other DNA
tccagcgtttttccccggatatgacgccggaagatcccattgtgatggaaagcattaaactggcgttggcgaaat

SEQ ID NO: 640123 - DNA, 75 bp, synthetic construct
  source 1..75: mol_type = other DNA
gatgttcagtaagattgaagttaatggcgaaggacgccatccgctgtatcaaaaattgattgccgcagcgccgac

SEQ ID NO: 640124 - DNA, 75 bp, synthetic construct
  source 1..75: mol_type = other DNA
cctccgggctcgcggggcaactggcctgatgagcagcgacaattacagaacggtaaataacattaccctgggtaa

SEQ ID NO: 640125 - DNA, 75 bp, synthetic construct
  source 1..75: mol_type = other DNA
atacgcgctggtgcgtaccgaccagccgggattcagcgcctgtacccgttctcagttaataaacaggatggatat

SEQ ID NO: 640126 - DNA, 75 bp, synthetic construct
  source 1..75: mol_type = other DNA
atacgcgctggtgcgtaccgaccagccgggattcagcgcctgtacccgatctcagttaataaacaggattgatat

SEQ ID NO: 640127 - DNA, 75 bp, synthetic construct
  source 1..75: mol_type = other DNA
acggcctcacactgaatgacacaccgttagctgatgaacgtgtgattgagcagcatattgaagcagggatttcac

SEQ ID NO: 640128 - DNA, 75 bp, synthetic construct
  source 1..75: mol_type = other DNA
cctccgggctcgcagggccactggcctgatgaccagcgacaattacagaacggtaaataacattaccctgggtaa

SEQ ID NO: 640129 - DNA, 75 bp, synthetic construct
  source 1..75: mol_type = other DNA
cctccgggctcgcagggcaactggcctgatgaacagcgacaattacagaacggtaaataacattaccctgggtaa

SEQ ID NO: 640130 - DNA, 75 bp, synthetic construct
  source 1..75: mol_type = other DNA
atacgcgctggtgcgtaccgaccagccgggattcagcgcctgtacccgctctcagttaataaacagtatagatat

SEQ ID NO: 640131 - DNA, 75 bp, synthetic construct
  source 1..75: mol_type = other DNA
ggtaacagtctgacgtttcatcagttgaaggcggcagattatggcgccgtgctggcgaataacgctgataaacgg

SEQ ID NO: 640132 - DNA, 75 bp, synthetic construct
  source 1..75: mol_type = other DNA
tcccgtcaggtgtggcgtgaactgcgccgccttgccagccagatggcacgcaatccggaaggcccgcaacggctg

SEQ ID NO: 640133 - DNA, 75 bp, synthetic construct
  source 1..75: mol_type = other DNA
gtcattatttacggtagtgcactggcaccacatctggaaatactcggttatgtcataaccggtattgtcgcgttt

SEQ ID NO: 640134 - DNA, 75 bp, synthetic construct
  source 1..75: mol_type = other DNA
gcgtgcgcctggctgacgggcgcacctcgtactggaatgacagcacccgccgcattgatatcacccccgcaccga

SEQ ID NO: 640135 - DNA, 75 bp, synthetic construct
  source 1..75: mol_type = other DNA
tcggtctgtcgcaaatcatctccacgcaactggaggtttcgcgtgccgagcagttacgtgaaatggcaaataagg

SEQ ID NO: 640136 - DNA, 75 bp, synthetic construct
  source 1..75: mol_type = other DNA
tccgtctgaatccggataccgctcgccagttgatctttaatctgtcgcgttatctgcgctataacattgaattaa

SEQ ID NO: 640137 - DNA, 75 bp, synthetic construct
  source 1..75: mol_type = other DNA
tggcggtcttcgatcgggcagcgttaatgcttatctgcctgttttttctcatccgtatccgcctgtttcgcgaac

SEQ ID NO: 640138 - DNA, 75 bp, synthetic construct
  source 1..75: mol_type = other DNA
acatctgacacaaaaaccgtgaaaaccggcggccccaccacgcccgatgacgtcatacatgtgcgtacagcattg

SEQ ID NO: 640139 - DNA, 75 bp, synthetic construct
  source 1..75: mol_type = other DNA
agatcaaggcacacctgcgtgtagaccatgacgcggatgatgaaatgctgatggaaaaggtccgtcaggccactg

SEQ ID NO: 640140 - DNA, 75 bp, synthetic construct
  source 1..75: mol_type = other DNA
gtgacagcattactgacactggaagaaatcaaggctcatctgcgtgttgaccatgacgcggatgatgagatgctg

SEQ ID NO: 640141 - DNA, 75 bp, synthetic construct
  source 1..75: mol_type = other DNA
ccttgaggatatctactgggcaggtctctctaatccgcgtaaccgccgtaacgagatgatggcctgcgtccgggg

SEQ ID NO: 640142 - DNA, 75 bp, synthetic construct
  source 1..75: mol_type = other DNA
gcagaacttcgcgccctgccctcgtttcttggtaacgcgctcattcgtgatctggcgcgtttaaaccgcaaacaa

SEQ ID NO: 640143 - DNA, 75 bp, synthetic construct
  source 1..75: mol_type = other DNA
agagcacagccaaccgcattacgccaggccattcagagctacatcaacgaggatattcgcactgacgccagactg

SEQ ID NO: 640144 - DNA, 75 bp, synthetic construct
  source 1..75: mol_type = other DNA
ttgaccatgattctggtgattgtctgggcaccaactaccgcgttggggatcgatatcgtctctaaaatcgggatt

SEQ ID NO: 640145 - DNA, 75 bp, synthetic construct
  source 1..75: mol_type = other DNA
taatcaagtcggcactgagcgcgacgggcgaggagctacacagtggcgcagcactttccgtacacagaggtgcac

SEQ ID NO: 640146 - DNA, 75 bp, synthetic construct
  source 1..75: mol_type = other DNA
agaacgaagaaggagaacggttcagccttgaggatatctactgggcaggtctctctaatccgcgtaaccgccgta

SEQ ID NO: 640147 - DNA, 75 bp, synthetic construct
  source 1..75: mol_type = other DNA
ggttatcgatcctgaaacattcggcagagcgcaaccaaccgcattgcgccaggccattcagagctacatcaacga

SEQ ID NO: 640148 - DNA, 75 bp, synthetic construct
  source 1..75: mol_type = other DNA
gcgcctgagtctggaggacgtgtactgggctggcctgggtaatccacgcaaccgccgcaatgaaatgatggtctg

SEQ ID NO: 640149 - DNA, 75 bp, synthetic construct
  source 1..75: mol_type = other DNA
aaaccttacgccgataaagaatcgggaaaaaccatggcggaaaccgtggaaaacgccattgcctgggcgagtctc

SEQ ID NO: 640150 - DNA, 75 bp, synthetic construct
  source 1..75: mol_type = other DNA
gacgcagccattatttccgtgcgtaacggggcccgtgttctcctggatgacgggcgcaccgcgtactggaacgac

SEQ ID NO: 640151 - DNA, 75 bp, synthetic construct
  source 1..75: mol_type = other DNA
gtgagcacaactatcagaatggcgatgatttcattagcccaacaacgcgtcaggcaatgaattacggaaaaatca

SEQ ID NO: 640152 - DNA, 75 bp, synthetic construct
  source 1..75: mol_type = other DNA
gtgaacataactatcagaatggtgatgactttattagcccaaccacacgtcaggcgatgaattacggaaaaatca

SEQ ID NO: 640153 - DNA, 75 bp, synthetic construct
  source 1..75: mol_type = other DNA
ctggtgatcccgctttgggagaaaggagtcgtgaccgggacgctgaaaatctactactgccacgcgcatcagatc

SEQ ID NO: 640154 - DNA, 75 bp, synthetic construct
  source 1..75: mol_type = other DNA
agcacggacgaggattttgacgttgggggcggcttcgccgcaccttggactcgtggcaataactgtccccatgat

SEQ ID NO: 640155 - DNA, 75 bp, synthetic construct
  source 1..75: mol_type = other DNA
cacaactcaaccgtgatcaaattcagcgccttgccacactaacagcggcggcattttccaccgaactggaacgca

SEQ ID NO: 640156 - DNA, 75 bp, synthetic construct
  source 1..75: mol_type = other DNA
ccagttgatctttaatctgtcgcgttatcgtaagcgtcgtctcagcaccgtctggcagatcctgaaattcctgag

SEQ ID NO: 640157 - DNA, 75 bp, synthetic construct
  source 1..75: mol_type = other DNA
aatttcgatagctctctggttgaaccgctaatatgctccgcacgctatacaggaagcacattccggcgaggagaa

SEQ ID NO: 640158 - DNA, 75 bp, synthetic construct
  source 1..75: mol_type = other DNA
cctgaagttgtgcgtgagctggcacgaattgcactggcatcactgggagcagaacctgtaagccaagcttacaac

SEQ ID NO: 640159 - DNA, 75 bp, synthetic construct
  source 1..75: mol_type = other DNA
aacatattgcgtatttcatgcgacaagcattggcctggctggaagggcattcatgcagcgacgaaagactgggta

SEQ ID NO: 640160 - DNA, 75 bp, synthetic construct
  source 1..75: mol_type = other DNA
tattgtccgcaatggtgatgaatatttcgaaacacagagtcgcaatgtaaccgactggatgcggctaccggaacc

SEQ ID NO: 640161 - DNA, 75 bp, synthetic construct
  source 1..75: mol_type = other DNA
aaggtaactttcacgcaaattgaccgtgaatataacacgttcactggtatgtattctgacaaagcagaagtcgaa

SEQ ID NO: 640162 - DNA, 75 bp, synthetic construct
  source 1..75: mol_type = other DNA
ttcaggaatacgttaagctggaacgattgcagaacgcactggctggcaactatccggtaactccggatggttgga

SEQ ID NO: 640163 - DNA, 75 bp, synthetic construct
  source 1..75: mol_type = other DNA
aagggagaaaaagcgatgaagttgttgccgctggggacgaagttttataccgcccctccagtgccagtagtaccg

SEQ ID NO: 640164 - DNA, 75 bp, synthetic construct
  source 1..75: mol_type = other DNA
atatggcaggacaggtacaaggggaatacgtggagttgagcgacggcactttatcgtggttagggaacgccttgt

SEQ ID NO: 640165 - DNA, 75 bp, synthetic construct
  source 1..75: mol_type = other DNA
cgcaatccgggaggttgccaggattcgcgccgatttcgatgattttgacggtgacaggcgaggtatcggtgattg

SEQ ID NO: 640166 - DNA, 75 bp, synthetic construct
  source 1..75: mol_type = other DNA
gcgacggcactttatcctggttagggaacgccttgttctggatgcctctaccagaaccgccgaaggaggttaacc

SEQ ID NO: 640167 - DNA, 75 bp, synthetic construct
  source 1..75: mol_type = other DNA
cgaatcgcgctggatggcatagagcggagcgacgccatgcttcatggtgccaaacctgtaagccagacttacaag

SEQ ID NO: 640168 - DNA, 75 bp, synthetic construct
  source 1..75: mol_type = other DNA
gggacgcaaatgggtggggctgcggtacaccgtcaacaggcgttagttctcgtcaatgaaggcaatgcaaaaagc

SEQ ID NO: 640169 - DNA, 75 bp, synthetic construct
  source 1..75: mol_type = other DNA
gcactggcctcgcttgaggcaaaaccaataggtgcattccacattgcagaacagcaagttgacggcacaagtgac

SEQ ID NO: 640170 - DNA, 75 bp, synthetic construct
  source 1..75: mol_type = other DNA
gtcggttctggtctttacggcatgatgctgtttgtcctgctggcggtgtttattgccgggctgatgattggtcgt

SEQ ID NO: 640171 - DNA, 75 bp, synthetic construct
  source 1..75: mol_type = other DNA
tgccaactcgtcgcatccgtttgaaaacccaaccgcactgaccaacttcgtgcagatgctggcgatcttcttgat

SEQ ID NO: 640172 - DNA, 75 bp, synthetic construct
  source 1..75: mol_type = other DNA
ccattctcggcctgaacatgctggggctggcggtgctgttttttatgttgctcggtcagcactatctgccgctta

SEQ ID NO: 640173 - DNA, 75 bp, synthetic construct
  source 1..75: mol_type = other DNA
atggctgcgcaagggttcttactgattgccacgtttttactggtattaatggtgctggcgcggctgattaatgac

SEQ ID NO: 640174 - DNA, 75 bp, synthetic construct
  source 1..75: mol_type = other DNA
gcatggtgccgatgtggttgatgcaaattggtgaagtggtattcggcggcgttggttctggcctttacggcatga

SEQ ID NO: 640175 - DNA, 75 bp, synthetic construct
  source 1..75: mol_type = other DNA
tcgacgtacgcgagatgaaactgactgcactggcgattctggttaccccgacgctggtgctgatgggcgcggcgc

SEQ ID NO: 640176 - DNA, 75 bp, synthetic construct
  source 1..75: mol_type = other DNA
tgccggatagcaaaacagccgttcttgttgccagggagtttgacaggaaaggtgactggcgaatgaaatgggcga

SEQ ID NO: 640177 - DNA, 75 bp, synthetic construct
  source 1..75: mol_type = other DNA
aatagttggacggaacttaactcagatatctttgccgatgaaataactcactggatgccgctaccggagccgccg

SEQ ID NO: 640178 - DNA, 75 bp, synthetic construct
  source 1..75: mol_type = other DNA
taagccgggccatacgctaggcgtcattgatgccatgttggttcatgaaatggcgaaggctttattgccgctggt

SEQ ID NO: 640179 - DNA, 75 bp, synthetic construct
  source 1..75: mol_type = other DNA
ctcatccgtgcgtttacccgccagagcatgagcacactcgggaatgcctgggtcgatctgctacgcatcacgtta

SEQ ID NO: 640180 - DNA, 75 bp, synthetic construct
  source 1..75: mol_type = other DNA
tatggcgactggtttaatgatggcaatcccacttgggatgacggtgatggcgaagacctgtatctcaaagaggta

SEQ ID NO: 640181 - DNA, 75 bp, synthetic construct
  source 1..75: mol_type = other DNA
gaactatgaaattcaggcgttattcacttccccgcctgtgccagtagtacctgaagaaaaaccaatgcctaaccc

SEQ ID NO: 640182 - DNA, 75 bp, synthetic construct
  source 1..75: mol_type = other DNA
gacaacagctttacgggttttatattgcttatgatttgtggctgagtaatggggcgaaacccggaggagtgtttt

SEQ ID NO: 640183 - DNA, 75 bp, synthetic construct
  source 1..75: mol_type = other DNA
atgtcacagacagaaaatgcagtgacttcctcatctggcgtaaagcgagcatacagaaaaggtaatcctctgaca

SEQ ID NO: 640184 - DNA, 75 bp, synthetic construct
  source 1..75: mol_type = other DNA
ccgggaaattggtgtatttgatgagcacggcgatttaatcgcggtgggcaatactgccgaaagttacaagccaac

SEQ ID NO: 640185 - DNA, 75 bp, synthetic construct
  source 1..75: mol_type = other DNA
gcggagcatcaaaaatggtgttgcatttttacacgggtgagggaagttgtccggcaatgcagtttcttgtggatt

SEQ ID NO: 640186 - DNA, 75 bp, synthetic construct
  source 1..75: mol_type = other DNA
taacgggaaatatactgcacaggatgccaccacagcgcgaaaaggtcttgtccagctcagtagcgccaccaacag

SEQ ID NO: 640187 - DNA, 75 bp, synthetic construct
  source 1..75: mol_type = other DNA
ctgcgtggctttgacggcaaaactgagttctgggatcacaaccttgagtcgttcaccttgatggcggggctggcg

SEQ ID NO: 640188 - DNA, 75 bp, synthetic construct
  source 1..75: mol_type = other DNA
aaagatcagaacggtgcggatatccctggcaaagacacctttacgaaaaatattggtgcctgccgtgccttcggt

SEQ ID NO: 640189 - DNA, 75 bp, synthetic construct
  source 1..75: mol_type = other DNA
ttcgcctgggcacacgtgttgttcagactatgcaaaaaggcgtgatgtatgagaaatcaggtcatgcaattacgg

SEQ ID NO: 640190 - DNA, 75 bp, synthetic construct
  source 1..75: mol_type = other DNA
atgcgcggcatgaacatacttctctctattgcaatcacaacaggcattctctccggtatctggggctgggtggct

SEQ ID NO: 640191 - DNA, 75 bp, synthetic construct
  source 1..75: mol_type = other DNA
ttttctgatgtgtattcaggccaaacaaacgttactgtcatttgttccgggcacttttattggcgcgtgtgcgac

SEQ ID NO: 640192 - DNA, 75 bp, synthetic construct
  source 1..75: mol_type = other DNA
gcgacgcgactacaatacgaaaaataagcaaccggcttttgcattagggaaaacaggaaatacggttgcaaataa

SEQ ID NO: 640193 - DNA, 75 bp, synthetic construct
  source 1..75: mol_type = other DNA
ccagaacggcgcagatattccgggtaaagataccttcaccaaaaacattggtgcctgccgcgcatgtgaggcgga

SEQ ID NO: 640194 - DNA, 75 bp, synthetic construct
  source 1..75: mol_type = other DNA
cacatcagaaccgcattattgcggagctggttattcctcctgaaacgggcggattctggatccgggaaattggtg

SEQ ID NO: 640195 - DNA, 75 bp, synthetic construct
  source 1..75: mol_type = other DNA
ccgtcaggcgtgatccctgatatgcgtggctggacgattaagggcaagcccgccagtggtcgagccgtattgtct

SEQ ID NO: 640196 - DNA, 75 bp, synthetic construct
  source 1..75: mol_type = other DNA
gtggtgctgcaaagcgcacgcagcgtggcggtaggcgtcatgctgggtatcgatccggcgcaaaaagatccgcta

SEQ ID NO: 640197 - DNA, 75 bp, synthetic construct
  source 1..75: mol_type = other DNA
atggctaagaccccacgcagtcgcaatgcagacgataaagtcattcagggtaaggaacttgatgcttacatcaaa

SEQ ID NO: 640198 - DNA, 75 bp, synthetic construct
  source 1..75: mol_type = other DNA
agctctgcctggcggcctgtgaaggcaagctggacgagaaaacgtccgagtgggatgaacgcgcttctctcggcg

SEQ ID NO: 640199 - DNA, 75 bp, synthetic construct
  source 1..75: mol_type = other DNA
tgatttgcatgacagtttcagggctgatctttattttccttttcttctggtggcgggcagatatctacagggtca

SEQ ID NO: 640200 - DNA, 75 bp, synthetic construct
  source 1..75: mol_type = other DNA
atctatgttgaaaagaaaattaatacattaggtgcggtagtgacatatgcacagaccgcgcgtgatgatactgaa

SEQ ID NO: 640201 - DNA, 75 bp, synthetic construct
  source 1..75: mol_type = other DNA
gccgtagcggcgtttaacattattacctcgctggggctgatggtgatggagaagcagggcgaagtcgcgatcctg

SEQ ID NO: 640202 - DNA, 75 bp, synthetic construct
  source 1..75: mol_type = other DNA
ggtgaaggcggaacatcgtactggggtggcggtggacgcgcaggcgctggcggtggcgttagaggcagggcattt

SEQ ID NO: 640203 - DNA, 75 bp, synthetic construct
  source 1..75: mol_type = other DNA
aaacggtaaatcaggcttctggcgcattacagaaaaaccagaacggcgcagatattccaggaaaagataccttca

SEQ ID NO: 640204 - DNA, 75 bp, synthetic construct
  source 1..75: mol_type = other DNA
ttccattaaggagaccaaacagtggaggtatgaatttcgactggcttgatggtgcatcaagtggcacggtggtgg

SEQ ID NO: 640205 - DNA, 75 bp, synthetic construct
  source 1..75: mol_type = other DNA
accgatatccactgggacgactgcttctgccggaaagatatcggctggcgcgctatcgaacgcgagcagaactaa

SEQ ID NO: 640206 - DNA, 75 bp, synthetic construct
  source 1..75: mol_type = other DNA
gaaagcggcccagtcgccgctggttgaaactgtttttgttgctccgggtaacgcaggcactgcgctggaacctgc

SEQ ID NO: 640207 - DNA, 75 bp, synthetic construct
  source 1..75: mol_type = other DNA
gcttatgccttaatgaccgatatccattgggacgactgcttctgccggaaagatatcggctggcgcgctatcgaa

SEQ ID NO: 640208 - DNA, 75 bp, synthetic construct
  source 1..75: mol_type = other DNA
acgggtgatgcagtaacaaatctggatggacagattaagaaaggccagcagactgttgcaattactgtgaataat

SEQ ID NO: 640209 - DNA, 75 bp, synthetic construct
  source 1..75: mol_type = other DNA
cagtagcggcttctgctgtggtgtcttgttcagcgatggcttctggctgggggcaaaacggtaatggtacttctg

SEQ ID NO: 640210 - DNA, 75 bp, synthetic construct
  source 1..75: mol_type = other DNA
caactgaatctcaggtatcaacggatgtcagtgatgatgtgacagatgcaacctctccggttgcaccggtcggaa

SEQ ID NO: 640211 - DNA, 75 bp, synthetic construct
  source 1..75: mol_type = other DNA
cgatgcggccctgctgcccgcgttgcgtctggggaatgcccgtgcagatgatctggtgcgcaataacgggatagc

SEQ ID NO: 640212 - DNA, 75 bp, synthetic construct
  source 1..75: mol_type = other DNA
ttgcactgactgtggctgcttctgcagcaatatccggttctgccatggcgtggactccgaatggcaacggtggtt

SEQ ID NO: 640213 - DNA, 75 bp, synthetic construct
  source 1..75: mol_type = other DNA
agccgtgagtccgaaacgggtggacacgccaggacaaggtatcgggaaccgttttctgcgggccggtgtggaggt

SEQ ID NO: 640214 - DNA, 75 bp, synthetic construct
  source 1..75: mol_type = other DNA
gaagggaaacgcacgtttaccgaatttatgcgtgaaggtgtgggcgttcatgcgtttaacggcgaaatctttgtg

SEQ ID NO: 640215 - DNA, 75 bp, synthetic construct
  source 1..75: mol_type = other DNA
gaagggaaacgcacgtttacagaatttatccgtgaaggtgtgggagttcatgcgtttaacggcgaaatctttgtg

SEQ ID NO: 640216 - DNA, 75 bp, synthetic construct
  source 1..75: mol_type = other DNA
tgcaggccacgcaattgcagtcggcggtggtgcgggcgatgtatgccgcgacgattgaatccacgctggattcgg

SEQ ID NO: 640217 - DNA, 75 bp, synthetic construct
  source 1..75: mol_type = other DNA
atgagtcgtggcggtattttatgggcaaacgaaaatttgtggccagccggctggcatcacagatgtttgcctgct

SEQ ID NO: 640218 - DNA, 75 bp, synthetic construct
  source 1..75: mol_type = other DNA
gtaaaaacgggtgatgcggtaactaaccttgatgcgcaggttcagaaagggcaaacctccgtcactgttaatgta

SEQ ID NO: 640219 - DNA, 75 bp, synthetic construct
  source 1..75: mol_type = other DNA
tcgagccggtggaggacgggcagacccgtggggccaatcagttttacagcgtcatggaacggctgaagatgctgg

SEQ ID NO: 640220 - DNA, 75 bp, synthetic construct
  source 1..75: mol_type = other DNA
ggggatgtcggaagccgattcacatgtctttattgaagatgttgaggcagcgtggatggaattctgcgatccggt

SEQ ID NO: 640221 - DNA, 75 bp, synthetic construct
  source 1..75: mol_type = other DNA
agttctggtttttaggcggtcagtcgcgtctgtcgccttcacgcgatcgtctgaccggcttcacgcagggtttgg

SEQ ID NO: 640222 - DNA, 75 bp, synthetic construct
  source 1..75: mol_type = other DNA
gtgaatgtggagttgatagatgttcacggacagcccctgcgacagagtatgggatattccggtggcggctccgga

SEQ ID NO: 640223 - DNA, 75 bp, synthetic construct
  source 1..75: mol_type = other DNA
catattttcgagccggtggaggacgggcagacccgtggggccaatcagttttacagcgtcatggaacggctgaag

SEQ ID NO: 640224 - DNA, 75 bp, synthetic construct
  source 1..75: mol_type = other DNA
gggaatgctgctggtcacccatgatatgggcgttgtggcgcgtctggcggatgacgtggcggtgatgtcgcacgg

SEQ ID NO: 640225 - DNA, 75 bp, synthetic construct
  source 1..75: mol_type = other DNA
tcgagccggtggaggacgggcagacccgtggggcgaatcagttttacagcgtcatggaacggctgaagatgctcg

SEQ ID NO: 640226 - DNA, 75 bp, synthetic construct
  source 1..75: mol_type = other DNA
gaacaggcgctgctgcggtatatcgccgccggtcttggcgtttcctacgaacagttgtcccgtgattactcgaag

SEQ ID NO: 640227 - DNA, 75 bp, synthetic construct
  source 1..75: mol_type = other DNA
ttgtcgttgcctctgctgcagcgtctggttctgctatggcgtggactgcaaacagcactggtggttctgttgact

SEQ ID NO: 640228 - DNA, 75 bp, synthetic construct
  source 1..75: mol_type = other DNA
tgttcagcaggcggtggaccactggccaaatctgttggcatttcacttcacactctattcggcagaaggaaacat

SEQ ID NO: 640229 - DNA, 75 bp, synthetic construct
  source 1..75: mol_type = other DNA
tccggttgtgccggataatgtatcagggtctcttgcttatgcttacaaagagcttacgcctgagattatgcgcgg

SEQ ID NO: 640230 - DNA, 75 bp, synthetic construct
  source 1..75: mol_type = other DNA
gtcatgtataaaggaatgaaactgttaacaaaagaggggcttgaacttattcgtgacggtatagctgaggctaca

SEQ ID NO: 640231 - DNA, 75 bp, synthetic construct
  source 1..75: mol_type = other DNA
agtagtgttaagcaatggggagggcgagttgttccactttacaccgcccagccagtgccggcaactccggatgca

SEQ ID NO: 640232 - DNA, 75 bp, synthetic construct
  source 1..75: mol_type = other DNA
tacagaacacgattaccagcattgagtcagcacgggatgaaataccgttcggactcaatgaagatcaaaacaaca

SEQ ID NO: 640233 - DNA, 75 bp, synthetic construct
  source 1..75: mol_type = other DNA
ttggtaacaacggctggctcatttcgacccacgcgccgcagtacatgccgacctttgaactgaataaagccattg

SEQ ID NO: 640234 - DNA, 75 bp, synthetic construct
  source 1..75: mol_type = other DNA
gccgcgtgaatacataagaggttggcctcttgcgtatagtgattatgctgaaggatggaacgattgccgcgtcgc

SEQ ID NO: 640235 - DNA, 75 bp, synthetic construct
  source 1..75: mol_type = other DNA
ggcaacctgtactgacgtatggtgacttaactcgcctggatccttcaacggtaacgccacagcaagtatttgatg

SEQ ID NO: 640236 - DNA, 75 bp, synthetic construct
  source 1..75: mol_type = other DNA
tgcggacgactggtcgtggtttacgtcggatgatgggtgctgcatggaggtgacccactggatgccgctaccgga

SEQ ID NO: 640237 - DNA, 75 bp, synthetic construct
  source 1..75: mol_type = other DNA
caataaagagcaagcggacgttattcctgtttatgctgccgcgcctgcgtcggttgtgccggataatgcatcaga

SEQ ID NO: 640238 - DNA, 75 bp, synthetic construct
  source 1..75: mol_type = other DNA
gtattctgacaaagcagaagtcgaacgctgggtgcgactgcatgaaataggtgactttcgggcagaaataacacc

SEQ ID NO: 640239 - DNA, 75 bp, synthetic construct
  source 1..75: mol_type = other DNA
cggagattaaatcattcatcactggtttcctgagcgacccggcgcacgatatccaatcttcagacagcctgcttg

SEQ ID NO: 640240 - DNA, 75 bp, synthetic construct
  source 1..75: mol_type = other DNA
tgaatatcgatagcgaggctgggccattaatatattccgcacgctatctcggaggcacgttccggcgcggaggta

SEQ ID NO: 640241 - DNA, 75 bp, synthetic construct
  source 1..75: mol_type = other DNA
ttatttcggtgaatttcgatagctctcaggttgaaccgctaatatgctccgcacgctataccggaagcacctttc

SEQ ID NO: 640242 - DNA, 75 bp, synthetic construct
  source 1..75: mol_type = other DNA
acgacagcgaagtggctgagattgaagcgttaattcaacagcgtctggatgcccgtaaagccaaagactgggcgg

SEQ ID NO: 640243 - DNA, 75 bp, synthetic construct
  source 1..75: mol_type = other DNA
gaacaactgatcgccaaaggtcacgcttatgtggcggacaacggcgacgtgatgttcgacgtcccgaccgatccg

SEQ ID NO: 640244 - DNA, 75 bp, synthetic construct
  source 1..75: mol_type = other DNA
tacgtgtgtggaatcaccgtttacgatctctgtcatattggtcatgggcgtacttttgtcgcctttgacgtagtt

SEQ ID NO: 640245 - DNA, 75 bp, synthetic construct
  source 1..75: mol_type = other DNA
ggaactgcatatcactcctggaattatttatgacgatctgcgtaagggggaagatattggcatggtcaaatctga

SEQ ID NO: 640246 - DNA, 75 bp, synthetic construct
  source 1..75: mol_type = other DNA
agagatagatgcagaaaacatgcttcatctcaaattcacacgacgcctgcaccagacccgcggaacgtctctatt

SEQ ID NO: 640247 - DNA, 75 bp, synthetic construct
  source 1..75: mol_type = other DNA
accgtgcctggctgaaacaggctgtggtatccggtgttatcaggctaccccgcgatctggaccgatcttcactgt

SEQ ID NO: 640248 - DNA, 75 bp, synthetic construct
  source 1..75: mol_type = other DNA
aagcaacgattaagccgggtaatggtattgagcaagcaactcactggatgccgctaccggaaccgccgcaggagg

SEQ ID NO: 640249 - DNA, 75 bp, synthetic construct
  source 1..75: mol_type = other DNA
cagtagaggacgactgcaatcctcgcgaagtaatcataacccactggatgccacttccagcagccccaaaacagg

SEQ ID NO: 640250 - DNA, 75 bp, synthetic construct
  source 1..75: mol_type = other DNA
aagccattaccatcactcttaataatgctgtggccagtgatgaccagattcagtggaaagcttccctgccagtga

SEQ ID NO: 640251 - DNA, 75 bp, synthetic construct
  source 1..75: mol_type = other DNA
cagttgaactacagcgaagagaacctgaagcaggcgcgtgcggcgctggagcgtctctatactgccttgcgcggc

SEQ ID NO: 640252 - DNA, 75 bp, synthetic construct
  source 1..75: mol_type = other DNA
tgctgacaatcaagcagtggcgcgaaacatacagacctggtagcaacgttgtactgccagcagaagaagcggaag

SEQ ID NO: 640253 - DNA, 75 bp, synthetic construct
  source 1..75: mol_type = other DNA
ttgaattgttcattaaaaatccgcttgaaaacgggcttacccgtggcgaacaaatggaactggcacggattgctc

SEQ ID NO: 640254 - DNA, 75 bp, synthetic construct
  source 1..75: mol_type = other DNA
gtttctggagcaagaaccgggcagcgatgaagagattaaaacttactgcaccactacatggggggtggacgttcc

SEQ ID NO: 640255 - DNA, 75 bp, synthetic construct
  source 1..75: mol_type = other DNA
tccgtgcccttccgcacttcagctgtatccgcgaagtcctgtctcctggtccctctgaggagaagccggacaaca

SEQ ID NO: 640256 - DNA, 75 bp, synthetic construct
  source 1..75: mol_type = other DNA
caccggtgaacttaacgggtatatcaccgtgcatcctctggcgaccatccatgcggtgacagtcctcaacaccac

SEQ ID NO: 640257 - DNA, 75 bp, synthetic construct
  source 1..75: mol_type = other DNA
ggtgccagaggtatcacgctgcatatgccatcaccggactgggatatcacgctgatgttgcttaccccggcgctg

SEQ ID NO: 640258 - DNA, 75 bp, synthetic construct
  source 1..75: mol_type = other DNA
aagaaattctaattcatttacagctatagtaccgtttgtcatttttctttgcgactatgcagatttcaatacgca

SEQ ID NO: 640259 - DNA, 75 bp, synthetic construct
  source 1..75: mol_type = other DNA
gtgtttccgctgagcgatatccatgcggttaccttgcacccggaactgttcgtgcccgaccttcagattcgtaac

SEQ ID NO: 640260 - DNA, 75 bp, synthetic construct
  source 1..75: mol_type = other DNA
tctctgccttacctcatttccgttttattcagcagtcgctgaattcattttctccatcagaaagtcgggggcaat

SEQ ID NO: 640261 - DNA, 75 bp, synthetic construct
  source 1..75: mol_type = other DNA
ggggaggtcgaacaaaaagttaccgcggacatgatgattgagtttatctgtcaggatggggctaaaacgtgtgag

SEQ ID NO: 640262 - DNA, 75 bp, synthetic construct
  source 1..75: mol_type = other DNA
agaactggctacgcgacttgatatcagtcgtgaagaagtgctgaacgagctgtgggaactcaaaagaaatggcgt

SEQ ID NO: 640263 - DNA, 75 bp, synthetic construct
  source 1..75: mol_type = other DNA
atggagactgtttttgacgcactgaaagcaatgggaaaagccacgtcggtagaactggctacgcgacttgatatc

SEQ ID NO: 640264 - DNA, 75 bp, synthetic construct
  source 1..75: mol_type = other DNA
ctgtggcggacattgtgctgaaccgccccgggtttcctggagagtattttatctgtgaactcaggctgccagatc

SEQ ID NO: 640265 - DNA, 75 bp, synthetic construct
  source 1..75: mol_type = other DNA
gttggcggtcgtaacagcaacggggcgcctggcacgcgtaaatcagaacggtaaatttcgttactgcataccggg

SEQ ID NO: 640266 - DNA, 75 bp, synthetic construct
  source 1..75: mol_type = other DNA
gtcgcgctgcgggagctgaataaatatcgcgatattgtcgcccagctttgccaggaggcaaccagtgagcaaaat

SEQ ID NO: 640267 - DNA, 75 bp, synthetic construct
  source 1..75: mol_type = other DNA
aatacaggcggaataagacttacaacaatggagcagcgacaaggcagcaatgatggtcctttcctggatttcatt

SEQ ID NO: 640268 - DNA, 75 bp, synthetic construct
  source 1..75: mol_type = other DNA
caccgtgccggacagcaacgcctggccgccgtgcaccgggccatgcagcagggggccgcgaatgattactggttt

SEQ ID NO: 640269 - DNA, 75 bp, synthetic construct
  source 1..75: mol_type = other DNA
caccgtgccggacagcaacgcctggccgccgtccagcgggccatgcagcagggggccgcgaatgattactggttt

SEQ ID NO: 640270 - DNA, 75 bp, synthetic construct
  source 1..75: mol_type = other DNA
cgggccctgaaaaccctggaccgccatcttcatgaacccggcgtggccttcacctccacccgtgcggcacgggaa

SEQ ID NO: 640271 - DNA, 75 bp, synthetic construct
  source 1..75: mol_type = other DNA
gtgacagcgcaggtgccgtataccgatgtctggacgcataaaccggtgcagttctatcccgggaaacatccgtgc

SEQ ID NO: 640272 - DNA, 75 bp, synthetic construct
  source 1..75: mol_type = other DNA
cagtccggacgccggtatatcggtatcgagctgcttgaacagtatcaccgtgccggacagcaacggctggccgcc

SEQ ID NO: 640273 - DNA, 75 bp, synthetic construct
  source 1..75: mol_type = other DNA
caccgtgccggacagcaacggctggccgccgtccaccgggccatgcagcagggggccgcgaatgattactggttt

SEQ ID NO: 640274 - DNA, 75 bp, synthetic construct
  source 1..75: mol_type = other DNA
taatccgaatggggctgactaaagccgaacttgcaccgaaaaactatattgtgcctggtgatccggctattgaat

SEQ ID NO: 640275 - DNA, 75 bp, synthetic construct
  source 1..75: mol_type = other DNA
aacttaaatgctgagataggaaagttagagaatcaaaaaaagcacttgtctcgtgaacttgatttcctgcaacaa

SEQ ID NO: 640276 - DNA, 75 bp, synthetic construct
  source 1..75: mol_type = other DNA
tgccgatatcggaaatgacgatgggcgattggaaatcgttgatggtagccagaggattagaacactttatcattt

SEQ ID NO: 640277 - DNA, 75 bp, synthetic construct
  source 1..75: mol_type = other DNA
atgtctggacgcataaaccggtgcagttctatcccgggaaacatccgtgcgaaaaaccggcagaaatgctgcagc

SEQ ID NO: 640278 - DNA, 75 bp, synthetic construct
  source 1..75: mol_type = other DNA
aaacgcctggaggaaggccagtttatctggcctgcggtacgtgacggcaaggtatccattacccgctcgcaactg

SEQ ID NO: 640279 - DNA, 75 bp, synthetic construct
  source 1..75: mol_type = other DNA
atgctgaagatgtgcaaaaaaaaattaaatgcgttgtttaccagtttgtttttcactcgctcggtaatgtttgaa

SEQ ID NO: 640280 - DNA, 75 bp, synthetic construct
  source 1..75: mol_type = other DNA
ggctaaaacgtgtgaggaactggcggggaagttcggtgtcagtactcgcaaggttgcttccacgctggcggtggt

SEQ ID NO: 640281 - DNA, 75 bp, synthetic construct
  source 1..75: mol_type = other DNA
aagtggcttcaacgctggcaatggcaatcagcaaaggccgtctgattcgtgctaatcaggacggtaaatttcgtt

SEQ ID NO: 640282 - DNA, 75 bp, synthetic construct
  source 1..75: mol_type = other DNA
taccgaaacgcgggcggatgatttgattttgccatcgctgcatctggcaaaccgcaaactgcgtcgggcgaaaag

SEQ ID NO: 640283 - DNA, 75 bp, synthetic construct
  source 1..75: mol_type = other DNA
ctgcatatggcaaaccgcgaattgcgtcgggcgaaaagtcatgtccagaagtgggagcgagtctgcgccgcgctg

SEQ ID NO: 640284 - DNA, 75 bp, synthetic construct
  source 1..75: mol_type = other DNA
atggagactgtttttgacgcactgaaagcgatgggaaaagccacgtcggtagagctggctgcgcgacttgatgtc

SEQ ID NO: 640285 - DNA, 75 bp, synthetic construct
  source 1..75: mol_type = other DNA
gccggaagaaaccaccacggcaactgtagtgaaaatctcagagtgcgatttaaccgcgacgattgaacaacgcgg

SEQ ID NO: 640286 - DNA, 75 bp, synthetic construct
  source 1..75: mol_type = other DNA
acggaaaatgatggtaaagcctttcctcagccagcatgtgttgcgttaccagtacaggaagcgacaatacaggaa

SEQ ID NO: 640287 - DNA, 75 bp, synthetic construct
  source 1..75: mol_type = other DNA
tgttgataaaacgggtcacacctggtttctggctggtgaaggtgaatccggggtaaccgaagaacagccagcaca

SEQ ID NO: 640288 - DNA, 75 bp, synthetic construct
  source 1..75: mol_type = other DNA
gcgagtctgtgccgctctgcgggaactgaacaaacacagggatattctccgggatattaccgccaccagagagca

SEQ ID NO: 640289 - DNA, 75 bp, synthetic construct
  source 1..75: mol_type = other DNA
cagttatccatgcttcttgaaggtatcaactggaagcacccgaaacgaacggaacgcgctggaatccgcatataa

SEQ ID NO: 640290 - DNA, 75 bp, synthetic construct
  source 1..75: mol_type = other DNA
gccggaagaaaccactacggcaacagtgacgaaaatttcggagagcgatttaacttcgacgattgaacaacgtgg

SEQ ID NO: 640291 - DNA, 75 bp, synthetic construct
  source 1..75: mol_type = other DNA
gtctgcgcagcactgcgggagctgaataaacaccgggatattgtccgacagattgtcgattccaccagtcgcgtt

SEQ ID NO: 640292 - DNA, 75 bp, synthetic construct
  source 1..75: mol_type = other DNA
tcaggagggggctaaaacctgtgaagaaatagcgggtaagttcagtgtcagtactcgcaaggttgcttccacgct

SEQ ID NO: 640293 - DNA, 75 bp, synthetic construct
  source 1..75: mol_type = other DNA
gagcgtgtctgcgccgcgctgcgggagctgaacaagcatcgggatattgttcgacagattactgatttttcccgc

SEQ ID NO: 640294 - DNA, 75 bp, synthetic construct
  source 1..75: mol_type = other DNA
tgtgggaactgaaaaaagctggttttgttgataaaaccgcgtacacctggcgtgtggctgataacaacgttcagc

SEQ ID NO: 640295 - DNA, 75 bp, synthetic construct
  source 1..75: mol_type = other DNA
tccagaagtgggagcgagtctgtgctgcgctgcgggaactgaacaaacacagggatattctccgggatattaccg

SEQ ID NO: 640296 - DNA, 75 bp, synthetic construct
  source 1..75: mol_type = other DNA
accacaaacggcggatgaactggctacgctgttcggtaccacatcccgcaaagtggcttcaacgctggcaatggc

SEQ ID NO: 640297 - DNA, 75 bp, synthetic construct
  source 1..75: mol_type = other DNA
acgtttttcggcatcacatcacgcaaagtggcttcaaagctggcaatggcaatcagtaaaggtcgtctgattcgc

SEQ ID NO: 640298 - DNA, 75 bp, synthetic construct
  source 1..75: mol_type = other DNA
agaaactgtggcggacattgtgcagccgttgccatcgtttaccgaaacgcaagcagatgagctgatttttccgtc

SEQ ID NO: 640299 - DNA, 75 bp, synthetic construct
  source 1..75: mol_type = other DNA
taaccgcgacgattgaacaacgcggaccacaaacggcggatgaactggctacgctgttcggtaccacatcccgca

SEQ ID NO: 640300 - DNA, 75 bp, synthetic construct
  source 1..75: mol_type = other DNA
ctgtggcggacattgtgcagtcgttgccatcgtttaccgaaacgcgtgcgaatgacctgattttaccatcactgc

SEQ ID NO: 640301 - DNA, 75 bp, synthetic construct
  source 1..75: mol_type = other DNA
ctgacatgatgattgagtttatcggtcaggagggggctaaaacgtgtgaggaactggcgggtaagttcggtgtca

SEQ ID NO: 640302 - DNA, 75 bp, synthetic construct
  source 1..75: mol_type = other DNA
taatttaccagcagagccgaaagccgcgctggtaacggaaaatgatggtaaggcctttcctcagccagcaggtgt

SEQ ID NO: 640303 - DNA, 75 bp, synthetic construct
  source 1..75: mol_type = other DNA
gatattaaaacagaaactgtagcggacattgtgcagtcgttgccatcgtacaccgaaacacaagcggatgacctg

SEQ ID NO: 640304 - DNA, 75 bp, synthetic construct
  source 1..75: mol_type = other DNA
aagtggcttcaaagctggcaatggcaatcagtaaaggtcgtctgattcgcgttaatcaggacggtaaatttcgtt

SEQ ID NO: 640305 - DNA, 75 bp, synthetic construct
  source 1..75: mol_type = other DNA
agttgataaaaccggccacacctggtttctggctggagaaggtgaatccggggtaaccgaagagcagcccgtgca

SEQ ID NO: 640306 - DNA, 75 bp, synthetic construct
  source 1..75: mol_type = other DNA
ttatctcccgtgtatacagattttgctaccccagccagtggttgagagttagcaatcgccgtgtggtgttgtttt

SEQ ID NO: 640307 - DNA, 75 bp, synthetic construct
  source 1..75: mol_type = other DNA
agaagaatggttgtatttaatgatacgaagataaataaacaattagaggaaatgttggggggggatagcacgaaa

SEQ ID NO: 640308 - DNA, 75 bp, synthetic construct
  source 1..75: mol_type = other DNA
gctgcatacgctggacggggaaaccgtaacgctggcgtcgatcagtgaagaacgcccggtgctgctctacttctg

SEQ ID NO: 640309 - DNA, 75 bp, synthetic construct
  source 1..75: mol_type = other DNA
cagcaaggcagataagaccatcacgcagcgtctggtgcaggcgcttcagctcgttgatatccgtgtgcctgacca

SEQ ID NO: 640310 - DNA, 75 bp, synthetic construct
  source 1..75: mol_type = other DNA
cgcagcctcattcaacgggccctgaaaaccctggaccgccatcttcatgaacccggcgtggccttcacctccacc

SEQ ID NO: 640311 - DNA, 75 bp, synthetic construct
  source 1..75: mol_type = other DNA
taaacgcgccctgtaccacaatgccgctgccgtggtgctggcgcacaatcacccgtccggtgaagtcactcccag

SEQ ID NO: 640312 - DNA, 75 bp, synthetic construct
  source 1..75: mol_type = other DNA
cgttctcgatggcgctgatcccggcagacgttgacaaagccatcgtccaccaggcgctggataacggcaaaatca

SEQ ID NO: 640313 - DNA, 75 bp, synthetic construct
  source 1..75: mol_type = other DNA
cgacatgcgaaatggctttaacggcctggcctcaaaagttcagaacgtcctgaaggatgacccgttctccggaca

SEQ ID NO: 640314 - DNA, 75 bp, synthetic construct
  source 1..75: mol_type = other DNA
tacaacggctttttgttctatcgtgcgtcaatcactgaccgtgcagacggaaagcgctcaacgtggcattcacag

SEQ ID NO: 640315 - DNA, 75 bp, synthetic construct
  source 1..75: mol_type = other DNA
caatggcaccgtgatggtggtcactgttgcggaaggcgtcagcaaaccctacatggacaagaacggtgtcatctg

SEQ ID NO: 640316 - DNA, 75 bp, synthetic construct
  source 1..75: mol_type = other DNA
cgtctggtacaggcactggtcctggtggatatccgggtgccggaccatctgatagtcggtggcagccaggttttc

SEQ ID NO: 640317 - DNA, 75 bp, synthetic construct
  source 1..75: mol_type = other DNA
gcacgacgggtgggcttccgctgtctgaccatcgccggaacgcgcgacccgattatgatcgccgggatcgataaa

SEQ ID NO: 640318 - DNA, 75 bp, synthetic construct
  source 1..75: mol_type = other DNA
gcgtggccttcacctctacccgtgcagcacgggaatggctgattctgaacatggcgggactggagcgtgaagagt

SEQ ID NO: 640319 - DNA, 75 bp, synthetic construct
  source 1..75: mol_type = other DNA
ggaactccccgcaggcgtggaacaaattccaggacgaagtgggcggcaaactgcgctttggcgatccgggcgtgc

SEQ ID NO: 640320 - DNA, 75 bp, synthetic construct
  source 1..75: mol_type = other DNA
tccgcgtgccagcgtggaaagcaactttgcgctgcgtgaactggtgggcgaagaaaacttctacaccggtatcgc

SEQ ID NO: 640321 - DNA, 75 bp, synthetic construct
  source 1..75: mol_type = other DNA
agcgcatcaccaactatgccatgagtgtagctggtggacaaggctatcagccaggcggtcggtttttagtggctt

SEQ ID NO: 640322 - DNA, 75 bp, synthetic construct
  source 1..75: mol_type = other DNA
acgatccggcttattacgacagcaaaactgtcatgctggaaagctggcgctggttacactcgctgcacagcaccc

SEQ ID NO: 640323 - DNA, 75 bp, synthetic construct
  source 1..75: mol_type = other DNA
tcacggtgagcaggaacgtctgcaactggcgctgaaagtactgcgtgaaggcggcatttatactcctgctctgcg

SEQ ID NO: 640324 - DNA, 75 bp, synthetic construct
  source 1..75: mol_type = other DNA
cgaaacagttccgtgaaagtgtggtcgagtggttaatgaccaaccacccgcacgactgtccggtatgtgaagagg

SEQ ID NO: 640325 - DNA, 75 bp, synthetic construct
  source 1..75: mol_type = other DNA
cacaatcacccgtccggtgaagtcacacccagcaaggcagaccgccttatcacggaacgtctggtacaggcactg

SEQ ID NO: 640326 - DNA, 75 bp, synthetic construct
  source 1..75: mol_type = other DNA
gctgccgtgatactggcacacaatcacccgtccggtgaagtcccccccagtaaggctgaccggcttattactgaa

SEQ ID NO: 640327 - DNA, 75 bp, synthetic construct
  source 1..75: mol_type = other DNA
cgtctggtacaggcgctggccctggtggatatccgggtgccggaccatctgatagtcggtggcaaccaggtattc

SEQ ID NO: 640328 - DNA, 75 bp, synthetic construct
  source 1..75: mol_type = other DNA
actggccctggtggatatccgggtgccggaccatctgatagtcggtggcagccaggttttctcctttgccgaaca

SEQ ID NO: 640329 - DNA, 75 bp, synthetic construct
  source 1..75: mol_type = other DNA
attcctgtgtggttaagattgatgacgggacgaatagcattcttctaaccggtgatattgaagcccccgctgaac

SEQ ID NO: 640330 - DNA, 75 bp, synthetic construct
  source 1..75: mol_type = other DNA
gcaatggtgatagccagaaacggcaaagcgattctctatgacacaggactggcctggcctgaaggggatagtggg

SEQ ID NO: 640331 - DNA, 75 bp, synthetic construct
  source 1..75: mol_type = other DNA
aatttatccagtcttttcacattcatttattgaacgagagcttccgctactgaatcttgctcgatcacagtataa

SEQ ID NO: 640332 - DNA, 75 bp, synthetic construct
  source 1..75: mol_type = other DNA
ggacaacaacgggacagaacagccggaagaacggccagcactgaggtgtactggcaatagcggacactaccattt

SEQ ID NO: 640333 - DNA, 75 bp, synthetic construct
  source 1..75: mol_type = other DNA
gcgtggaacgcgccatcggctgggcgcgccttcaccgggtccgccagttccagttctttggtatcccctcccgtc

SEQ ID NO: 640334 - DNA, 75 bp, synthetic construct
  source 1..75: mol_type = other DNA
gctcccttgccggacgcgaacgcctggacgatttgctttacctgccgcagctcaacaaacaccagatacagacac

SEQ ID NO: 640335 - DNA, 75 bp, synthetic construct
  source 1..75: mol_type = other DNA
agttctttggcatcccctcccgtcaggtgtggcgtgaactgcgccgccttgccagccagatggcacgcaacccgg

SEQ ID NO: 640336 - DNA, 75 bp, synthetic construct
  source 1..75: mol_type = other DNA
tcggcctgcatatcggtgaacagcagatgcagcacctgttacggggcggcagtctgtacgttgacggcagcatca

SEQ ID NO: 640337 - DNA, 75 bp, synthetic construct
  source 1..75: mol_type = other DNA
tcagcaggaccagaacaccatgcccccccccgttaccgtgctttctgacatgctgcgcgccatccgtgacgcaga

SEQ ID NO: 640338 - DNA, 75 bp, synthetic construct
  source 1..75: mol_type = other DNA
aatgactgcgctgccaacgcttattcgccatacgcccgggcaaaaagaaccggtactgcatttttcacatgtcgc

SEQ ID NO: 640339 - DNA, 75 bp, synthetic construct
  source 1..75: mol_type = other DNA
gcaacggatgagcagatcacccgttttggcgttgtgcgtgagattttttcgcgctggttgaatcagcccgactgg

SEQ ID NO: 640340 - DNA, 75 bp, synthetic construct
  source 1..75: mol_type = other DNA
gcaaggtgcaccttactccggctcagttgtccatgcttcttgagggcatcaactggaagcacccgaaacgaacgc

SEQ ID NO: 640341 - DNA, 75 bp, synthetic construct
  source 1..75: mol_type = other DNA
cggattttggggtaaattttaaagaagcagaattttactcattttatgaaagtaatgtactcaatcatgctgtag

SEQ ID NO: 640342 - DNA, 75 bp, synthetic construct
  source 1..75: mol_type = other DNA
caataaatgcgggttatgcagactggaatagtggatttgtaaacactcaccgtggtgaagtatggaaagtgactg

SEQ ID NO: 640343 - DNA, 75 bp, synthetic construct
  source 1..75: mol_type = other DNA
catgatattccctacctgattgctaaaaaacgtaatcatcctcatgccgacgccattcatgttgctggttgggtg

SEQ ID NO: 640344 - DNA, 75 bp, synthetic construct
  source 1..75: mol_type = other DNA
atgacggcagagtacatcagggactggcaacaaccgcgccacgcagtaggacgtgaaggaacggggatccccgca

SEQ ID NO: 640345 - DNA, 75 bp, synthetic construct
  source 1..75: mol_type = other DNA
gttgtaaaggcaatagatgtagccgatatagtgattagaggaaagagaattgtcaaaaacaggctcgcatgcact

SEQ ID NO: 640346 - DNA, 75 bp, synthetic construct
  source 1..75: mol_type = other DNA
tacaaaccaggaacttctcccggaggttgtaaaggcaatagatgttgccgatatagtgattagaggaaagagaat

SEQ ID NO: 640347 - DNA, 75 bp, synthetic construct
  source 1..75: mol_type = other DNA
tcctgaatgcattattctgtccagacgattagcatcatcctcaattattgacatcagaaataaaacaggttttct

SEQ ID NO: 640348 - DNA, 75 bp, synthetic construct
  source 1..75: mol_type = other DNA
gactcacggctggatttatacggactctcagttgttacgcgatgatattcaaacacttttcacggcagaacgata

SEQ ID NO: 640349 - DNA, 75 bp, synthetic construct
  source 1..75: mol_type = other DNA
agctatggaagcgaaataaagagaatcgtcgggtcaggaatatttgtcgtataattagtagatatgacaaaagtc

SEQ ID NO: 640350 - DNA, 75 bp, synthetic construct
  source 1..75: mol_type = other DNA
tttactcactggctactggcagtgtcaaccatacagaagctacaggcaatcttcggcgcaatatgcctgacccca

SEQ ID NO: 640351 - DNA, 75 bp, synthetic construct
  source 1..75: mol_type = other DNA
ttggcattgtgcgtgagacgttctcgcgctggctgaatcagcctgactggggacggggtggtgagaaatcaccgc

SEQ ID NO: 640352 - DNA, 75 bp, synthetic construct
  source 1..75: mol_type = other DNA
atgacgcccggcgagcgcagcctcattcaacgggccctgaaaaccctggaccgccatcttcatgaacccggcgtg

SEQ ID NO: 640353 - DNA, 75 bp, synthetic construct
  source 1..75: mol_type = other DNA
gacgacgccgaccaggtgcgggcactgatttccggaacgctgatgaaaggctgtattacgccacagcagatattt

SEQ ID NO: 640354 - DNA, 75 bp, synthetic construct
  source 1..75: mol_type = other DNA
tacccgctgcgagacgctgttacaggcggcacagaccaaaatcagccgtgactttacgctgcgttttgctgaact

SEQ ID NO: 640355 - DNA, 75 bp, synthetic construct
  source 1..75: mol_type = other DNA
aacgggtaaaaacagaattgaatgagtccgggtttcgccccggctttcattttcctgcttttcacggcgcagtcc

SEQ ID NO: 640356 - DNA, 75 bp, synthetic construct
  source 1..75: mol_type = other DNA
gcgatggcattaaatgctgatttttatccataccacagcaatgagcattcacaatataatgcttctgcatgttgt

SEQ ID NO: 640357 - DNA, 75 bp, synthetic construct
  source 1..75: mol_type = other DNA
acggcctcacactgaatgacacaccgtttgccgatgaacgtgtgattgagcagcatattgaggcaggcatttcac

SEQ ID NO: 640358 - DNA, 75 bp, synthetic construct
  source 1..75: mol_type = other DNA
ggcaggcggccagttcacgcccgtctccggttgaaatctggcagacactgctcacccgactgctggaccagcact

SEQ ID NO: 640359 - DNA, 75 bp, synthetic construct
  source 1..75: mol_type = other DNA
atgaaaacattacccgacacacacgtacgggaggcatcgcgctgcccgtctcccgtcaccatctggcagactctg

SEQ ID NO: 640360 - DNA, 75 bp, synthetic construct
  source 1..75: mol_type = other DNA
tgtgtgatgcggtgaattttctcgtggaaaaatacgcgctggtgcgtaccgaccagccgggattcagcgcctgta

SEQ ID NO: 640361 - DNA, 75 bp, synthetic construct
  source 1..75: mol_type = other DNA
atgaaagattatctacaaactgtgacgggccccgtcgcccgtgaagatatggggctacccgggcaggcggccagt

SEQ ID NO: 640362 - DNA, 75 bp, synthetic construct
  source 1..75: mol_type = other DNA
tgatattctccgggctcgccgggcaacaggcctgatgccccgccacaactacagaacggtgaacaatatcaccct

SEQ ID NO: 640363 - DNA, 75 bp, synthetic construct
  source 1..75: mol_type = other DNA
cgtgtgattgagcagcatattgaggcaggcatttcactgtgtgatgcagtgaactttctcgtggaaaaatacgca

SEQ ID NO: 640364 - DNA, 75 bp, synthetic construct
  source 1..75: mol_type = other DNA
ctcacccggttactggaccagcattacagccttacgctgaatgacacaccgttctcggatgaacgcgtgattgag

SEQ ID NO: 640365 - DNA, 75 bp, synthetic construct
  source 1..75: mol_type = other DNA
atgaaaacattgcccgacacgcatgtactggaggcatcgtgctgcccgtctcccgtcaccatctggcagacactg

SEQ ID NO: 640366 - DNA, 75 bp, synthetic construct
  source 1..75: mol_type = other DNA
atgaaaacattattcgacacacatgtacgggaggtatctcgctgcccgtctcccgtcaccatctggcagacactg

SEQ ID NO: 640367 - DNA, 75 bp, synthetic construct
  source 1..75: mol_type = other DNA
acaggcctgatgacccgcgacaattacagagcggtaaataacattacccgggagaagcatccggaggcgaaacaa

SEQ ID NO: 640368 - DNA, 75 bp, synthetic construct
  source 1..75: mol_type = other DNA
ccctcggcagctgtggttacgtttatatggctgtttatccgacactggcacccgcaaccacctcataccccgaat

SEQ ID NO: 640369 - DNA, 75 bp, synthetic construct
  source 1..75: mol_type = other DNA
tatcctccgggcacgccgggcaaccggcctgatgacacgcgacaactacagaacggtaaataacattaccctggg

SEQ ID NO: 640370 - DNA, 75 bp, synthetic construct
  source 1..75: mol_type = other DNA
atgtacagtcagttaagagaacgtatccggctgatgcgcgcaaggctggataacgccgcgccggttgctgaaatc

SEQ ID NO: 640371 - DNA, 75 bp, synthetic construct
  source 1..75: mol_type = other DNA
ggtgacgctggcggagatcagcaaccgagatcacattctggaaccctctgccggcaccggggccatactgcgggc

SEQ ID NO: 640372 - DNA, 75 bp, synthetic construct
  source 1..75: mol_type = other DNA
ccggcaccggggccatactgcgggcgattcgggataccgcgccgggggccatgtgtgatgcggtggaaatcaaca

SEQ ID NO: 640373 - DNA, 75 bp, synthetic construct
  source 1..75: mol_type = other DNA
agatcagcaaccgtgatcacattctggaaccctctgccggcaccggggccatactgcgggcgattcgggataccg

SEQ ID NO: 640374 - DNA, 75 bp, synthetic construct
  source 1..75: mol_type = other DNA
gattcgggatatcgcgccgggggccatgtgtgatgcggtggagatcaacagcgggctggtccggtatctgcggga

SEQ ID NO: 640375 - DNA, 75 bp, synthetic construct
  source 1..75: mol_type = other DNA
atgcacagtcagttaagggagcgtatcaggctgatgcgcgcaaggctggacaatgccaggccagttatcgagatt

SEQ ID NO: 640376 - DNA, 75 bp, synthetic construct
  source 1..75: mol_type = other DNA
ccatttataataaacggggagagcttgtcggtacactgaataaagccgccatgccggatttcagttccgttaacg

SEQ ID NO: 640377 - DNA, 75 bp, synthetic construct
  source 1..75: mol_type = other DNA
gtgattgagcagcatattgaggcaggcatttcactgtgtgatgcggtgaactttctcgtggaaaaatacgcgctg

SEQ ID NO: 640378 - DNA, 75 bp, synthetic construct
  source 1..75: mol_type = other DNA
aaacagcatcgatatcctccgggctcgccgggcaacaggcctgatgacccgcgacaattacagaacggtaaataa

SEQ ID NO: 640379 - DNA, 75 bp, synthetic construct
  source 1..75: mol_type = other DNA
aaattttaatggtgtcagggtacagtgtggcgacttcatggaatggcagccggtgcagtattacagccggattat

SEQ ID NO: 640380 - DNA, 75 bp, synthetic construct
  source 1..75: mol_type = other DNA
tgtggtgacttcatggaatggcagctggcgcactgttacagccggattattatgaatccgccgtttcatcgcggg

SEQ ID NO: 640381 - DNA, 75 bp, synthetic construct
  source 1..75: mol_type = other DNA
atgaacagaatttattctcttcgctacagcgctgtggccaggggctttattgccgtatctgagtttgccaggaaa

SEQ ID NO: 640382 - DNA, 75 bp, synthetic construct
  source 1..75: mol_type = other DNA
ggcctgatgacccgcgacaattaccgaacagtaaataacattactctgggtaagcatccggaggcgaaacaatga

SEQ ID NO: 640383 - DNA, 75 bp, synthetic construct
  source 1..75: mol_type = other DNA
agctggtaagacgcaaaccggaagcggaagacagtgcccgcgaaaatggttttgaccttcagggcggccctgccg

SEQ ID NO: 640384 - DNA, 75 bp, synthetic construct
  source 1..75: mol_type = other DNA
acactggcaagagaagccagaaaacaggcacgcggcgcggtggatgaagcaattgccgcactgcgtctgctgccg

SEQ ID NO: 640385 - DNA, 75 bp, synthetic construct
  source 1..75: mol_type = other DNA
tcccgtcaccatctggcagacactgctgtcccgactactgggccagcattacggccttacactgaatgacacacc

SEQ ID NO: 640386 - DNA, 75 bp, synthetic construct
  source 1..75: mol_type = other DNA
aatgatggccaccatgaaggggctggaacttctggccgaagcccgtggcgacaaagcggtgtttctgactgtcac

SEQ ID NO: 640387 - DNA, 75 bp, synthetic construct
  source 1..75: mol_type = other DNA
acgcgcgcggaaccctgcgcaaaatattcgaacgtctggaccgcaccgaccaccgctggctgacaccgggttatc

SEQ ID NO: 640388 - DNA, 75 bp, synthetic construct
  source 1..75: mol_type = other DNA
aaaaagagctggcaggcagaacgatatgcgcgcggaaccctgcgcaggatattcgaacgtctggaccgcaccgac

SEQ ID NO: 640389 - DNA, 75 bp, synthetic construct
  source 1..75: mol_type = other DNA
acactgctcgcccgactgctggaccagcactacggcctcacgctgaatgacactccgttcgctgatgaacgtgtg

SEQ ID NO: 640390 - DNA, 75 bp, synthetic construct
  source 1..75: mol_type = other DNA
tcccgtcaccatctggcagacactgctcgcccgactgctggaccagcactacggccttacgctgaatgacacacc

SEQ ID NO: 640391 - DNA, 75 bp, synthetic construct
  source 1..75: mol_type = other DNA
cgatatcctccgggctcgccgggcgacaggcctgatgacccgcgacaattacagaacggtaaataacattaccct

SEQ ID NO: 640392 - DNA, 75 bp, synthetic construct
  source 1..75: mol_type = other DNA
cgatatcctccgggcacgccgggcaaccggcctgatgacccgcgacaactacagaacggtaaataacattaccct

SEQ ID NO: 640393 - DNA, 75 bp, synthetic construct
  source 1..75: mol_type = other DNA
atgaaaacattacctgacacacacgtacgggaggcatcgggctgcccgtctcccgtcaccatctggcagacactg

SEQ ID NO: 640394 - DNA, 75 bp, synthetic construct
  source 1..75: mol_type = other DNA
ctcacccggttactggaccagcactacggcctcacactgaatgacacaccgttggcagatgaacgtgtgattgag

SEQ ID NO: 640395 - DNA, 75 bp, synthetic construct
  source 1..75: mol_type = other DNA
caaagaatctgtgaaacaaccgaacgcgcctgccacaaagctgacctactgcgaagaggagtaaagagtgggaac

SEQ ID NO: 640396 - DNA, 75 bp, synthetic construct
  source 1..75: mol_type = other DNA
gcgagtttcgcgcacagcgcgagaaaacacgcgatttcctgaaaagtttcatgctggaaaatgaagacgggttca

SEQ ID NO: 640397 - DNA, 75 bp, synthetic construct
  source 1..75: mol_type = other DNA
tggcaataactgtccccgtgtacaggaaacggacaacaacgggacagaacagccggaagaacggccagcaccgtg

SEQ ID NO: 640398 - DNA, 75 bp, synthetic construct
  source 1..75: mol_type = other DNA
gaaatcgacaccattgtgtcccacacccgcgatattgccattcaggaagatcgtcacgagctgggcgatgatatt

SEQ ID NO: 640399 - DNA, 75 bp, synthetic construct
  source 1..75: mol_type = other DNA
ggcaggcggccagttcacgcccgtctccggttgaaatctggcagatactgctgtcccgactgctggaccagcact

SEQ ID NO: 640400 - DNA, 75 bp, synthetic construct
  source 1..75: mol_type = other DNA
accggcctgatgacccgcgataactacagaacggtaaataacattacacgggggaagcatccggaggcgaaacaa

SEQ ID NO: 640401 - DNA, 75 bp, synthetic construct
  source 1..75: mol_type = other DNA
tgatattctccgggctcgccgggcaacaggcctgatgaccagccacaactacagaacggtgaacaatatcaccct

SEQ ID NO: 640402 - DNA, 75 bp, synthetic construct
  source 1..75: mol_type = other DNA
gcgtaaacagcacggaaatccgccataacccggtttccagctatctgaaacagctcggggcatcagacccagaag

SEQ ID NO: 640403 - DNA, 75 bp, synthetic construct
  source 1..75: mol_type = other DNA
cggggccaccatgcgcgactccagcgattacctggttaacacgttttttgcggcggtccgcaaaaaactgaaccg

SEQ ID NO: 640404 - DNA, 75 bp, synthetic construct
  source 1..75: mol_type = other DNA
cagtggaaacaaaaaacagacagaaacgggattcacaaatcccgtaaatgagcaaaaaacgcgccgcgatatatg

SEQ ID NO: 640405 - DNA, 75 bp, synthetic construct
  source 1..75: mol_type = other DNA
tcagcaggaccagaacaccatgaaaacccccgttaccgtgctttctgacatgctgcgcgccatccgtgacgcaga

SEQ ID NO: 640406 - DNA, 75 bp, synthetic construct
  source 1..75: mol_type = other DNA
tttaaggcagagtacgtcgacggctcaaaaggcacaccgaccagctacatcgccacctacatcgggaaaaacctg

SEQ ID NO: 640407 - DNA, 75 bp, synthetic construct
  source 1..75: mol_type = other DNA
ggcgtatcagatgctggcccgcatggcgttacacttacacgccatgcctccgcattatgacgcactgacaacaga

SEQ ID NO: 640408 - DNA, 75 bp, synthetic construct
  source 1..75: mol_type = other DNA
accgcgaactgcgtcgggcgaaaagtcatgtccagaagtgggagcgagtctgcgccgcgctgcgggagctgaata

SEQ ID NO: 640409 - DNA, 75 bp, synthetic construct
  source 1..75: mol_type = other DNA
gtgtctgcgccgcgctgcgggagctgaacaagcacagggatattgtacgacagattactgattcttcccgccatg

SEQ ID NO: 640410 - DNA, 75 bp, synthetic construct
  source 1..75: mol_type = other DNA
agccgtgaagatgctgtccacgaactgtggaaactgaagcgccgtggtgaggcggataacaggggctcgatgtgg

SEQ ID NO: 640411 - DNA, 75 bp, synthetic construct
  source 1..75: mol_type = other DNA
gagccaatgacctgattttaccatcgctgcaaatggcaaaccgcgaactgcgccgggcgaaaagtcatgtccaga

SEQ ID NO: 640412 - DNA, 75 bp, synthetic construct
  source 1..75: mol_type = other DNA
agcggataacaaggggtcgatgtggtggctgattcaggctggtgaaagtgaaccagtgtcaccggtaccgaaagt

SEQ ID NO: 640413 - DNA, 75 bp, synthetic construct
  source 1..75: mol_type = other DNA
atggcgcgtgatatccagatggttcttgagcgatggggggcatgggcagcaaataatcatgaagatgtaacatgg

SEQ ID NO: 640414 - DNA, 75 bp, synthetic construct
  source 1..75: mol_type = other DNA
aaggctgagggaataattgaaggaatgttaatggcattagatatccggttagagatggatatcgttgttacgaag

SEQ ID NO: 640415 - DNA, 75 bp, synthetic construct
  source 1..75: mol_type = other DNA
tggttatatcgggaaaaagttacagaaggctgagggaataattgaaggaatgttaatggcattagatatccggtt

SEQ ID NO: 640416 - DNA, 75 bp, synthetic construct
  source 1..75: mol_type = other DNA
cacctgtataggtaaacgccttcacaaagcggaggggattgttgaaggcatgctgatgatgctgggagtgaggct

SEQ ID NO: 640417 - DNA, 75 bp, synthetic construct
  source 1..75: mol_type = other DNA
catggcgctggcacggaaacatgggtgctctgacacctgtataggtaaacgccttcacaaagcggaggggattgt

SEQ ID NO: 640418 - DNA, 75 bp, synthetic construct
  source 1..75: mol_type = other DNA
ttcatgtcactggcaagtaagcattgctgctcggatggttatatcgggaaaaggttacagaaggctgagggcata

SEQ ID NO: 640419 - DNA, 75 bp, synthetic construct
  source 1..75: mol_type = other DNA
accgcgaactgcgtcgggcgaaaaatcatgtccagaagtgggagcgtgtctgcgccgcgctgcgggagctgaaca

SEQ ID NO: 640420 - DNA, 75 bp, synthetic construct
  source 1..75: mol_type = other DNA
catccggatggtctgattttaccatcgctgcatgtggctaaccgcgagctgcgccgggcaaaaggtcaggttcag

SEQ ID NO: 640421 - DNA, 75 bp, synthetic construct
  source 1..75: mol_type = other DNA
tcatgtccagaagtgggaacgtgtctgcgccgcgctgcgggagctgaacaagcaccgggatattgttcgacagat

SEQ ID NO: 640422 - DNA, 75 bp, synthetic construct
  source 1..75: mol_type = other DNA
aatcagcaaaggtcgtctgattcgtgtaaaccagaacggtaaatttcgttactgcataccgggtgataatttacc

SEQ ID NO: 640423 - DNA, 75 bp, synthetic construct
  source 1..75: mol_type = other DNA
aagcaatgggaaaagccacatccatagaacttgctgctcgacttgatatcagtcgtgaagaagtgctgaacgaac

SEQ ID NO: 640424 - DNA, 75 bp, synthetic construct
  source 1..75: mol_type = other DNA
atggaaaccgtatttgacgcactgaaagcactgaaaaaagcctcttcacatgtggtggcagctcgccttggaatc

SEQ ID NO: 640425 - DNA, 75 bp, synthetic construct
  source 1..75: mol_type = other DNA
gttatccatgctacgtggaggggatcggcgtggcaacatcccaaacggacagaacggcctggcatccggatataa

SEQ ID NO: 640426 - DNA, 75 bp, synthetic construct
  source 1..75: mol_type = other DNA
gattatctatccagaatgctcagcttcatttgtttgccttcctgtttgccgttgcggcaggtacggtgattggcg

SEQ ID NO: 640427 - DNA, 75 bp, synthetic construct
  source 1..75: mol_type = other DNA
ggttcatcggtctttcatccggaatcttctcgcgtggcccgtatggcttccggcgggcggcatggcctggcgcaa

SEQ ID NO: 640428 - DNA, 75 bp, synthetic construct
  source 1..75: mol_type = other DNA
ggattatctatccagaatgctcagcttcatctgtttgccttcctgtttgccgttgcggcaggtacggtgatcggc

SEQ ID NO: 640429 - DNA, 75 bp, synthetic construct
  source 1..75: mol_type = other DNA
gctgtacttcattccaactgatgtgaagcgcatgaggttcacgccagtaccggcagagcagaccgaacagccagc

SEQ ID NO: 640430 - DNA, 75 bp, synthetic construct
  source 1..75: mol_type = other DNA
cactggcaagatgtcacgacgtcagcatgagctggttaatggctttgtgccgctggcgaccgagacaggcgagta

SEQ ID NO: 640431 - DNA, 75 bp, synthetic construct
  source 1..75: mol_type = other DNA
ctgcgtcggccgtcaaacctcgcacgtcgtttggcattttgggggctatcagcctctcgcatcttctgaacgata

SEQ ID NO: 640432 - DNA, 75 bp, synthetic construct
  source 1..75: mol_type = other DNA
aaagctgaaggtgttattgaaggaatgctgatgatgctggatgttcggctggagatggatcggtatgttgagcgc

SEQ ID NO: 640433 - DNA, 75 bp, synthetic construct
  source 1..75: mol_type = other DNA
ttgccaacgccgggaggatgtcggttagcgtactgcgaaatcctgcatcgatggatgacgagggctgggcacgtg

SEQ ID NO: 640434 - DNA, 75 bp, synthetic construct
  source 1..75: mol_type = other DNA
acagtggttctccattatatgcatttgacacccttctgaataaatgggttattgttggtgtcctaactgcaggta

SEQ ID NO: 640435 - DNA, 75 bp, synthetic construct
  source 1..75: mol_type = other DNA
ggattgctgggttggccgtttgttgcaaaaggctgaagggatagttgacggcatgttgatgatgttagaagttga

SEQ ID NO: 640436 - DNA, 75 bp, synthetic construct
  source 1..75: mol_type = other DNA
atggatcggtatgttgagcgtgaattgccgggagggagaacctctgtattttatcagcgaaaaaatagtttacga

SEQ ID NO: 640437 - DNA, 75 bp, synthetic construct
  source 1..75: mol_type = other DNA
tattacagccggatcattatgaatccgccgttcagtcacgggcaggatatccggcatatcctgcgggctttttcc

SEQ ID NO: 640438 - DNA, 75 bp, synthetic construct
  source 1..75: mol_type = other DNA
taccgttttctgacgtctgcgaggagctgccgcgcggcacgtttgcttataccgatgcttcgacgatgattattc

SEQ ID NO: 640439 - DNA, 75 bp, synthetic construct
  source 1..75: mol_type = other DNA
tgggactatcggaaagcggctgcaaaaagctgaaggtgttattgaaggaatgctgatgatgctggatgttcggct

SEQ ID NO: 640440 - DNA, 75 bp, synthetic construct
  source 1..75: mol_type = other DNA
atgattatatgcgggtgtatggcccgccttaacagaaacaacagtgatttgcatgagttgctggttgattgctac

SEQ ID NO: 640441 - DNA, 75 bp, synthetic construct
  source 1..75: mol_type = other DNA
atggtttactcgagatatgcaagaggctgccatgtttatgtggatatctgtttcgcggatggagtctatctgcgg

SEQ ID NO: 640442 - DNA, 75 bp, synthetic construct
  source 1..75: mol_type = other DNA
aaaaagtaaaatcacgtccacagtgctgtgacgatgatgcgatggtgatatgcgggtgcatagcccgcctttacc

SEQ ID NO: 640443 - DNA, 75 bp, synthetic construct
  source 1..75: mol_type = other DNA
aaagcggaaggtgttgttgaaggcatgctgatgatgctggatgtgaagctggagatggatcggtatgttgagcgc

SEQ ID NO: 640444 - DNA, 75 bp, synthetic construct
  source 1..75: mol_type = other DNA
aacgctggggtgcatgggtggcaaataatcatgaggatgtgagctggtcgcccattgctgccggatttaaggggc

SEQ ID NO: 640445 - DNA, 75 bp, synthetic construct
  source 1..75: mol_type = other DNA
gccatgataatttgtggctgtatggcacgattaaacaagaataatcaggatttgcacgatttgttggtagattat

SEQ ID NO: 640446 - DNA, 75 bp, synthetic construct
  source 1..75: mol_type = other DNA
tgttgaaggcatgttgatgatgctggatgtgaagctggagatggatcggtatgttgagcgcgattcagtgacggc

SEQ ID NO: 640447 - DNA, 75 bp, synthetic construct
  source 1..75: mol_type = other DNA
tcgcggatggggtaaagatactgatgcgtgatatccggcaggttcttgagcgctggggtgcatgggcggcaaata

SEQ ID NO: 640448 - DNA, 75 bp, synthetic construct
  source 1..75: mol_type = other DNA
aggatgttacatggtcgcccattgctgccggatttaagaggctgatccccgaaaaagtaaaatcacgtccacagt

SEQ ID NO: 640449 - DNA, 75 bp, synthetic construct
  source 1..75: mol_type = other DNA
atgcgtgacattcagcaggttctggaacgatggggagcgtgggcggcaaataaccgtgaggatgtaacctggtca

SEQ ID NO: 640450 - DNA, 75 bp, synthetic construct
  source 1..75: mol_type = other DNA
cctgcagaaagcggaaggggttattgatggcatgttgatgatgcttgatatccgactggagatggaccgatacgt

SEQ ID NO: 640451 - DNA, 75 bp, synthetic construct
  source 1..75: mol_type = other DNA
ggcaggatgctccagaaagctgagggcgtagtggagggcatgctgatggtgttggatctccgattggagatggat

SEQ ID NO: 640452 - DNA, 75 bp, synthetic construct
  source 1..75: mol_type = other DNA
tccattgccgccggttttaagggattaattccttcaaaagtaagatctcgtccgcaatgctgtgacgatgacgcg

SEQ ID NO: 640453 - DNA, 75 bp, synthetic construct
  source 1..75: mol_type = other DNA
gatgaaataacccttctgaaagcgaaactaccggaacaccattttcaatggttagcaggagatggagatgaggcg

SEQ ID NO: 640454 - DNA, 75 bp, synthetic construct
  source 1..75: mol_type = other DNA
tatcgggaaaaggttacaaaaggctgagggcataattgaagggatgttaatggcattagatatccggttagagat

SEQ ID NO: 640455 - DNA, 75 bp, synthetic construct
  source 1..75: mol_type = other DNA
agatggttatataggaaagaagctacaaaaagccgagggggtggtggaaggaatgttgatgatgttgggtgtccg

SEQ ID NO: 640456 - DNA, 75 bp, synthetic construct
  source 1..75: mol_type = other DNA
aagcatggatgctctgatggaactatcggtaaaaaattacagaaagcggagggcgtggttgaagggatgttaatg

SEQ ID NO: 640457 - DNA, 75 bp, synthetic construct
  source 1..75: mol_type = other DNA
agcgttggggggcatgggtggcaaataaccacgaggatgttacctggtcaccgattgctgcgggattcaaaggac

SEQ ID NO: 640458 - DNA, 75 bp, synthetic construct
  source 1..75: mol_type = other DNA
ccgtaagccgtggcggtctggtaccgggtgcgttactggcgcgtgaactgggtattcgtcatgtcgataccgttt

SEQ ID NO: 640459 - DNA, 75 bp, synthetic construct
  source 1..75: mol_type = other DNA
tcgagaagattaatctcgctttcactcgccccactaccggctttattgcaccggatactaatgcaggtcgctatc

SEQ ID NO: 640460 - DNA, 75 bp, synthetic construct
  source 1..75: mol_type = other DNA
ttcgcccagcgtcttttgagtaaagggatgtctcgagaagacgttgcagagatggcaaatttacctcttgctgag

SEQ ID NO: 640461 - DNA, 75 bp, synthetic construct
  source 1..75: mol_type = other DNA
gtccccgccgtctggcgctgatttacaacgtgaacacccgcgtggcttacaatgccgggcgttacacgcagatga

SEQ ID NO: 640462 - DNA, 75 bp, synthetic construct
  source 1..75: mol_type = other DNA
tgatgaacacggcggacctgtatccgttctggcagtacgttgttgtcgaagatggcagaacgcgcccggaacacc

SEQ ID NO: 640463 - DNA, 75 bp, synthetic construct
  source 1..75: mol_type = other DNA
gccaacagaaatatgactgaaggcggtcgcgatctgatgaaaacgtgggcaaagcagaagagaacaaatcggaca

SEQ ID NO: 640464 - DNA, 75 bp, synthetic construct
  source 1..75: mol_type = other DNA
tgcctgatgcatgtagtgcttataaaaatgatgcagcatgtgtactcgataaacaaacatgtgcagagggttggt

SEQ ID NO: 640465 - DNA, 75 bp, synthetic construct
  source 1..75: mol_type = other DNA
caagattgatttaacagaatggattaacgatgctgttcaggtcggagaagtaccggaccagtacgctacattctc

SEQ ID NO: 640466 - DNA, 75 bp, synthetic construct
  source 1..75: mol_type = other DNA
tgctgttacaattcaatgttatctcgcgttattatgcagcaggcctacccgcagcttggaatagacccggttact

SEQ ID NO: 640467 - DNA, 75 bp, synthetic construct
  source 1..75: mol_type = other DNA
gacgctggcgcagtggtttgaagagaggggaagacaggaaggaagacaggaggtaagacaagaggtaagacaaga

SEQ ID NO: 640468 - DNA, 75 bp, synthetic construct
  source 1..75: mol_type = other DNA
cagcgattattgcatcaatggttgccaatactatgagttgggctttttatgtcacactcataaacatggtaatga

SEQ ID NO: 640469 - DNA, 75 bp, synthetic construct
  source 1..75: mol_type = other DNA
tggccagttggcacaggaaacaatgtccagcttcggtataggtcagcttaagcagatggcaatgaagaaagccta

SEQ ID NO: 640470 - DNA, 75 bp, synthetic construct
  source 1..75: mol_type = other DNA
tattgcgcaggcggtggaaagccggacgggaacgccaccggcccgcctgctggcgatgagcggtaaaaatgtgct

SEQ ID NO: 640471 - DNA, 75 bp, synthetic construct
  source 1..75: mol_type = other DNA
agacccagcttgcattagggattatcagtgattcagataagcaacaactgatgcgctggatgcggtacgtgcaac

SEQ ID NO: 640472 - DNA, 75 bp, synthetic construct
  source 1..75: mol_type = other DNA
cagatggcaccagaaccatgacaccggatgtgggctggtcatataaccccggctcggcggcgttcggcacagacc

SEQ ID NO: 640473 - DNA, 75 bp, synthetic construct
  source 1..75: mol_type = other DNA
accgctatactcggcgattcttgcgcgcacgctggcaaaacaggaagctatgcaactggcgcgaagcaaggccgc

SEQ ID NO: 640474 - DNA, 75 bp, synthetic construct
  source 1..75: mol_type = other DNA
atgctctatgcgcagaaagtcgaatctacagacacttccagcctgccagtaacgtttcccgaacaaccagaatga

SEQ ID NO: 640475 - DNA, 75 bp, synthetic construct
  source 1..75: mol_type = other DNA
aaaacccagctatgggactcacagctacggctgggcatcatttccgacgagaataaacaaaaattaaccgagtgg

SEQ ID NO: 640476 - DNA, 75 bp, synthetic construct
  source 1..75: mol_type = other DNA
cactgattcagacagacagcaactgatgaactggatgcgatacgtgcaacagattgaagccactgatacctctga

SEQ ID NO: 640477 - DNA, 75 bp, synthetic construct
  source 1..75: mol_type = other DNA
ggaaacgcgaaggaaatcgagctgggcagtccgcgtcgtctggcaaccatttataacgtcaatacccgtacggcg

SEQ ID NO: 640478 - DNA, 75 bp, synthetic construct
  source 1..75: mol_type = other DNA
ctacagagtgagccgtgcaaccctgattgatgctgtcaggggtggaaaacaggaattactggaaggtaagttgta

SEQ ID NO: 640479 - DNA, 75 bp, synthetic construct
  source 1..75: mol_type = other DNA
aggacttcgggcgcttaccggcaatgctggcaaagccaaaagcggtactgtgggacaaacggcacaacaatctga

SEQ ID NO: 640480 - DNA, 75 bp, synthetic construct
  source 1..75: mol_type = other DNA
aaataccgcaggctgcacgtctgcgacgcagacagctgattcgtcaacttcttgaacgcgataaaacaccattag

SEQ ID NO: 640481 - DNA, 75 bp, synthetic construct
  source 1..75: mol_type = other DNA
atgaagttgcgctgattgacgtcggtaaactttctgacgcgccgctcaataccctgtggctttatctgatcctcg

SEQ ID NO: 640482 - DNA, 75 bp, synthetic construct
  source 1..75: mol_type = other DNA
tggaggcggggacgtttgctattgccggaatgggggcattactggcggcatctattcgcgcgccgttaacgggga

SEQ ID NO: 640483 - DNA, 75 bp, synthetic construct
  source 1..75: mol_type = other DNA
tgtggccgttctgtaggcttcgtaaacgggttggcaaaaacagattgctgcgaagctcctaaaggtgcagccgga

SEQ ID NO: 640484 - DNA, 75 bp, synthetic construct
  source 1..75: mol_type = other DNA
agttttgtggctggtacatctctcccctggacggctgaaacgtgttgtggccgcttcagcccccggaaagtccac

SEQ ID NO: 640485 - DNA, 75 bp, synthetic construct
  source 1..75: mol_type = other DNA
aacactaacgctgacggcgaattgattaccatcgacaccgccgacaataaaatcctcagccgtaaaaagctgctg

SEQ ID NO: 640486 - DNA, 75 bp, synthetic construct
  source 1..75: mol_type = other DNA
gtattggcaaagagagcgtgatttgggtcgttgatggcgagaatatcaaactgaaaaccgccatccagaacaccg

SEQ ID NO: 640487 - DNA, 75 bp, synthetic construct
  source 1..75: mol_type = other DNA
gttatctcgccaccaagtagtaatgaatcgtaatatggcaaggagtcgaggttatccagagcgagcagcttgctt

SEQ ID NO: 640488 - DNA, 75 bp, synthetic construct
  source 1..75: mol_type = other DNA
accacgtgagctggtagctgatgatgccacgaacaccgtttacatcagtggtattggtaaagagagcgtgatttg

SEQ ID NO: 640489 - DNA, 75 bp, synthetic construct
  source 1..75: mol_type = other DNA
ctcctcctgccgtccacttcacagggttttccccgcagtggacctttccgatgggggcccgtttaccgcctcacg

SEQ ID NO: 640490 - DNA, 75 bp, synthetic construct
  source 1..75: mol_type = other DNA
ttgcagaatggggcagatcctgaatggatacaaaagattaccggactttcggcagagcaaatgcaggcattagag

SEQ ID NO: 640491 - DNA, 75 bp, synthetic construct
  source 1..75: mol_type = other DNA
tatatttatgtggtgattgaacatcagagccgcgaggatattcatatggcctttcgcctgatgcgctattccatg

SEQ ID NO: 640492 - DNA, 75 bp, synthetic construct
  source 1..75: mol_type = other DNA
gggatggtctggacggtagccgaaaaagaagacaacgaagtgttaaagattggcgtccgggtggcagaagaagaa

SEQ ID NO: 640493 - DNA, 75 bp, synthetic construct
  source 1..75: mol_type = other DNA
tgctaaaacgggcgaagtgaaaggacgtctggtgcttgatgagcgtaaacgtaccgaagaagtgcgtccgttgca

SEQ ID NO: 640494 - DNA, 75 bp, synthetic construct
  source 1..75: mol_type = other DNA
agctttgtcgatgaaaaattgcgggcgctacactccgatattctgtggtcggtaaagacccgtgaaggtgatggc

SEQ ID NO: 640495 - DNA, 75 bp, synthetic construct
  source 1..75: mol_type = other DNA
gcgaataatgtggatttgcccctatatttccagacatctgttatcacttaacccattacaagcccgctgccgcag

SEQ ID NO: 640496 - DNA, 75 bp, synthetic construct
  source 1..75: mol_type = other DNA
gttatccagagcgagcagcttgcttcaatgaagcactcaagattattgatgaactgcgtaaagctgagaaagaag

SEQ ID NO: 640497 - DNA, 75 bp, synthetic construct
  source 1..75: mol_type = other DNA
atgtcggtttagctacttttgtttacgaaaccgtagcctcaaaagctggtgttgttttgctcagtgataatgagc

SEQ ID NO: 640498 - DNA, 75 bp, synthetic construct
  source 1..75: mol_type = other DNA
taaggttgtcgctactcttgaacttcaacgtcgcccgcagcttgaaggcgtactggtaaggaagttctgggagga

SEQ ID NO: 640499 - DNA, 75 bp, synthetic construct
  source 1..75: mol_type = other DNA
tgatatcagcagtacagataaagaaaaactatctgcctggatggactacaaaaaagaagtaaaagccgtcgacac

SEQ ID NO: 640500 - DNA, 75 bp, synthetic construct
  source 1..75: mol_type = other DNA
cgcgacttcagtgtaccagtttacatctctggtggtaatggtgacctaagcgtatgtggcgataattgcatacgt

SEQ ID NO: 640501 - DNA, 75 bp, synthetic construct
  source 1..75: mol_type = other DNA
atgtatagttctgagcaaaataatgctgatgttcagtttaatgctggtgatagttatggtgacgagaaagggttc

SEQ ID NO: 640502 - DNA, 75 bp, synthetic construct
  source 1..75: mol_type = other DNA
cgcacggcagaagtcagagaggcgataatccgcagtcaggctggtaaattaaagcaattatcagagattaacgcg

SEQ ID NO: 640503 - DNA, 75 bp, synthetic construct
  source 1..75: mol_type = other DNA
tcatcgaggcatttaaaaaaggtgagcttacacgccatcaagtagtaatgaatcgtaatatggcaaggagtcgag

SEQ ID NO: 640504 - DNA, 75 bp, synthetic construct
  source 1..75: mol_type = other DNA
agccgcaactggtcgccgggctgctggtaggcactgttttaggcgtggcgctgtttcgcggcgtaccggtcggcc

SEQ ID NO: 640505 - DNA, 75 bp, synthetic construct
  source 1..75: mol_type = other DNA
ggtgtccactattctctcaggaatttcaggatctgccagacggtgctgagacgacgcttacgtttgatgtcactt

SEQ ID NO: 640506 - DNA, 75 bp, synthetic construct
  source 1..75: mol_type = other DNA
atgaatattaatgaaatgctgaaagctctttctccgaaacgtgaatctctgaccatcggcggattcacgttctat

SEQ ID NO: 640507 - DNA, 75 bp, synthetic construct
  source 1..75: mol_type = other DNA
atgaaatggtttacacctgaacacgtcgtagaggcatttaaaaaaggtgatctaacacgccaccaggtagtaatg

SEQ ID NO: 640508 - DNA, 75 bp, synthetic construct
  source 1..75: mol_type = other DNA
gttatccagagcgtgagaaatgtttcgatgcagcactaaaaattattgataaattaagaaaaaatgaaaaaggat

SEQ ID NO: 640509 - DNA, 75 bp, synthetic construct
  source 1..75: mol_type = other DNA
ggttgaggttaataaacagccgttaaccggtgaatatgatatttactggtatgcaacagaaaatgacgccaataa

SEQ ID NO: 640510 - DNA, 75 bp, synthetic construct
  source 1..75: mol_type = other DNA
tacaccaacatgtttggtaaagcggtcgtggcggacgtcaacaactactaccgtaaccaggcctacatcgacatc

SEQ ID NO: 640511 - DNA, 75 bp, synthetic construct
  source 1..75: mol_type = other DNA
atgtttggtaaagccgtcgttgccgacgtcaataactactaccgtaaccaggccacgattgacctgaccagactg

SEQ ID NO: 640512 - DNA, 75 bp, synthetic construct
  source 1..75: mol_type = other DNA
tctggccggggtgaacgcgggtgaacggatgacggtgtcgtgggaaggcgcggcgcactgcgacatttcgctgcc

SEQ ID NO: 640513 - DNA, 75 bp, synthetic construct
  source 1..75: mol_type = other DNA
attatctcaactccgatatctttgatggttttaactatgtcggcggcagtatcagcactgatgatcaaatgctac

SEQ ID NO: 640514 - DNA, 75 bp, synthetic construct
  source 1..75: mol_type = other DNA
gtaaatggcgatagtatgtcccctactctcgtttccggagatcgactgtttgtcgacatttctgttcgtcacttc

SEQ ID NO: 640515 - DNA, 75 bp, synthetic construct
  source 1..75: mol_type = other DNA
gcgctgggttacatgatgcaacgttgtgaagaagttggctgccagaatcatggcaatgccgaagtcgctcatagc

SEQ ID NO: 640516 - DNA, 75 bp, synthetic construct
  source 1..75: mol_type = other DNA
gaccgcagcaggaacgcgtcatttgtttggacacatcagaaatttcagagtctggtttaaagaattaaatgacag

SEQ ID NO: 640517 - DNA, 75 bp, synthetic construct
  source 1..75: mol_type = other DNA
tctcgctgtttggcttgttgatttccgtagcgtttgccccggagactcgagggatgtcactggcgcagaccagca

SEQ ID NO: 640518 - DNA, 75 bp, synthetic construct
  source 1..75: mol_type = other DNA
gtattgatgacgccagccactatcagataaacgttggcagcagtgaaaatcactccagcgtggatggctattaca

SEQ ID NO: 640519 - DNA, 75 bp, synthetic construct
  source 1..75: mol_type = other DNA
gcgggttcttttccggtggcgaagcgtcctgggggatagcaaacggctggtcactgtatggcggggcgcttggcg

SEQ ID NO: 640520 - DNA, 75 bp, synthetic construct
  source 1..75: mol_type = other DNA
tatcttgaatacagcgatgtcgactgggaccctccctcgcgctgggatgatggcatctcaggtttaattgccgat

SEQ ID NO: 640521 - DNA, 75 bp, synthetic construct
  source 1..75: mol_type = other DNA
gcggatttttctccggcggggaggcgtcctggggcgtggcaaacggttggtcgctctatggcggtgcgctggcgg

SEQ ID NO: 640522 - DNA, 75 bp, synthetic construct
  source 1..75: mol_type = other DNA
ttatctgtccttaagtttgccgtggggcgacaacagcaccatcagttacaacggcaactatggcagcggtgccga

SEQ ID NO: 640523 - DNA, 75 bp, synthetic construct
  source 1..75: mol_type = other DNA
gttttggcttaagtatggcttttaaatttgattactatcttgttgacgaagtaacagcagttggagatatgaggt

SEQ ID NO: 640524 - DNA, 75 bp, synthetic construct
  source 1..75: mol_type = other DNA
ggccattgtatttaaaaatgataacacggttagttttcatgaagatgttcagaaaggagtggaggagtataaaaa

SEQ ID NO: 640525 - DNA, 75 bp, synthetic construct
  source 1..75: mol_type = other DNA
atgattaagattgaaaatttgacgaagtcatatcgcacgccagcgggtcgacattatgtctttaaggatttaaat

SEQ ID NO: 640526 - DNA, 75 bp, synthetic construct
  source 1..75: mol_type = other DNA
tgcgctttttttgggtagagataatgctattcattattttgacgatgttgagcaggccataaaaaaatactctga

SEQ ID NO: 640527 - DNA, 75 bp, synthetic construct
  source 1..75: mol_type = other DNA
ggatatcgcttctctgaaaaaaactacatgaccatgagtgagtatctggatgcgaacgacaccgaccgtgcgcgc

SEQ ID NO: 640528 - DNA, 75 bp, synthetic construct
  source 1..75: mol_type = other DNA
aaagtgctgggaaccagcctcgacaccatcaagagctgggaaaccggacgccgtaacccgaccggactggcggcg

SEQ ID NO: 640529 - DNA, 75 bp, synthetic construct
  source 1..75: mol_type = other DNA
ccgtaacccaaccggactggcagcaaaagtgctggccaccattcaggctaacccaaagttttttgatgaactggc

SEQ ID NO: 640530 - DNA, 75 bp, synthetic construct
  source 1..75: mol_type = other DNA
tgcgggttcttccctggtatattgcgctggcaatatcaggaagctataccaatgcctgggctgatgatattcagt

SEQ ID NO: 640531 - DNA, 75 bp, synthetic construct
  source 1..75: mol_type = other DNA
taaagaaaggcataaagagtctagttttttgatggtttcacatagtttgaattcattgaaagagttttgtgatgt

SEQ ID NO: 640532 - DNA, 75 bp, synthetic construct
  source 1..75: mol_type = other DNA
gcggttatacgcgaagcaagaagaactgaaagagaaaattgagtttgttgaagaatttgccgaacttggcaagta

SEQ ID NO: 640533 - DNA, 75 bp, synthetic construct
  source 1..75: mol_type = other DNA
gatatcatggccagtcggccttgcaggtggatttcagggaagtttaaccggacgcgaaaacgtaaaatttgttgc

SEQ ID NO: 640534 - DNA, 75 bp, synthetic construct
  source 1..75: mol_type = other DNA
ttccatcagctttatcgccgccatgtggtatgtcggcgcgacctgtgccgatctggtcggctactggctttatga

SEQ ID NO: 640535 - DNA, 75 bp, synthetic construct
  source 1..75: mol_type = other DNA
tttatacagaggatgggaaaaactggtatgaggaacaaaagaactttcagcctgatacgttgaaaatggtctatg

SEQ ID NO: 640536 - DNA, 75 bp, synthetic construct
  source 1..75: mol_type = other DNA
gcaggcagtcggtttggatctgccgttccagacacgctccaacccgatcccgtggatcaatacctggctggtgtc

SEQ ID NO: 640537 - DNA, 75 bp, synthetic construct
  source 1..75: mol_type = other DNA
agaaagactgggcggattatctgttccgtgacggttcgatgattggtctgaataaagacattctctgccagtacg

SEQ ID NO: 640538 - DNA, 75 bp, synthetic construct
  source 1..75: mol_type = other DNA
tgcccgccaaccccgccttcaagccgataccagttaacccggacactcttgagatctggggcgttgtcacctttg

SEQ ID NO: 640539 - DNA, 75 bp, synthetic construct
  source 1..75: mol_type = other DNA
ttacgctgtttatgttcttcggcacgctgaaaggcgcacgcgttctgcaattcgttttcttcagcctgaccgtgc

SEQ ID NO: 640540 - DNA, 75 bp, synthetic construct
  source 1..75: mol_type = other DNA
caaatcgccgtgctgatatttcgggtaaatggatgttcaaagatggcgtagtgataaagcgaacttataccgagg

SEQ ID NO: 640541 - DNA, 75 bp, synthetic construct
  source 1..75: mol_type = other DNA
cggtaagtggatgtttaaggatggagctgtagttaaacggatttatacggcagacgaacagcaacaacaggccga

SEQ ID NO: 640542 - DNA, 75 bp, synthetic construct
  source 1..75: mol_type = other DNA
gtattgggaaggagagcgtgatctgggtgattgacggtgagaatatcaaactgaaaactgccatccagaacaccg

SEQ ID NO: 640543 - DNA, 75 bp, synthetic construct
  source 1..75: mol_type = other DNA
aaaacgctatatgtcagtgtgaagcaaaaatccactaagcagcaggaagcgactcagccggatgatgtgattcgt

SEQ ID NO: 640544 - DNA, 75 bp, synthetic construct
  source 1..75: mol_type = other DNA
gccgcttatttctattccggaactggaaacctgggtcgaaacctgggcgttctcagaaacgattcattcccgttc

SEQ ID NO: 640545 - DNA, 75 bp, synthetic construct
  source 1..75: mol_type = other DNA
accgtatcgattaccaggcactgcctgaacacgaaaaacacatctttatcagcaacctgaaatatcagacgctgc

SEQ ID NO: 640546 - DNA, 75 bp, synthetic construct
  source 1..75: mol_type = other DNA
gttgttgaggttcctgatattactgccaaccggcgtgctgatgactcaggtaaatggatgtttaaggatggtgca

SEQ ID NO: 640547 - DNA, 75 bp, synthetic construct
  source 1..75: mol_type = other DNA
atgaatccgccgttcagtcacgggcaggatatccggcatatcctgcgggccttttccctgttgcgtccgggtggc

SEQ ID NO: 640548 - DNA, 75 bp, synthetic construct
  source 1..75: mol_type = other DNA
gcgatctgtttaatcgccgccattttccttttgttctgtttgttgccgccatctggacctgccaggtgatcccaa

SEQ ID NO: 640549 - DNA, 75 bp, synthetic construct
  source 1..75: mol_type = other DNA
atctcaaattctcctcaattcaccgccgcattttgctgtggggaagcggtggtccgtttctggatggttatgtac

SEQ ID NO: 640550 - DNA, 75 bp, synthetic construct
  source 1..75: mol_type = other DNA
tgccacggtgacacccacggaaagtatagtgggaacaacaggtggctatactgtgcatggtgtggttgcagcaga

SEQ ID NO: 640551 - DNA, 75 bp, synthetic construct
  source 1..75: mol_type = other DNA
ctttatcaataattacggtatcagtaacacgatgctaatgggggcgggtatctcgctgtttggcttgttgatttc

SEQ ID NO: 640552 - DNA, 75 bp, synthetic construct
  source 1..75: mol_type = other DNA
atgcaaccgtccagaaactttgacgatctcaaattctcctctattcaccgccgcattttgctgtggggaagcggt

SEQ ID NO: 640553 - DNA, 75 bp, synthetic construct
  source 1..75: mol_type = other DNA
aacacgatgctgatgggagcaggtatctcgctgtttggtttgttgatttccattgcgtttgcgccagagacacgg

SEQ ID NO: 640554 - DNA, 75 bp, synthetic construct
  source 1..75: mol_type = other DNA
gatttatcagtaaatgcaatatgcaatggtaattatacaacaaaccttaatggtaaaatatttggagttacagca

SEQ ID NO: 640555 - DNA, 75 bp, synthetic construct
  source 1..75: mol_type = other DNA
gaggcgaaaaccgaagatatcgtaccggggccgtcagctccgaatatggcagcagtaaaaatctcaggtgtgctg

SEQ ID NO: 640556 - DNA, 75 bp, synthetic construct
  source 1..75: mol_type = other DNA
gtgacagaagaacgacgtcgattattgatggagattatattccacaaatgcgaattttgtcggagaaatggctgt

SEQ ID NO: 640557 - DNA, 75 bp, synthetic construct
  source 1..75: mol_type = other DNA
tatgaaggttccagacctggtacgctgaatgattttctcggtgccatgacggaagatgatgtcatgccggaggca

SEQ ID NO: 640558 - DNA, 75 bp, synthetic construct
  source 1..75: mol_type = other DNA
taggtgacgatgaaataacaatgccaggcgacaagattgttaagtttaaacgtgcttcaacagcaacgtatatta

SEQ ID NO: 640559 - DNA, 75 bp, synthetic construct
  source 1..75: mol_type = other DNA
agttctggctggagaagataggtaaaaatgttgagcgggatcgccgcgatatcaatcgcttgcaggcactcggct

SEQ ID NO: 640560 - DNA, 75 bp, synthetic construct
  source 1..75: mol_type = other DNA
ggatggcttaacgctggtgctgttgagttttggtatcgccagctttatcggtacgtcgctttcgtcgttcattct

SEQ ID NO: 640561 - DNA, 75 bp, synthetic construct
  source 1..75: mol_type = other DNA
cgatgtttgctagtttgtttattacccagaccattcaggccactgaccgccgctacgttgtcattctgttcgccg

SEQ ID NO: 640562 - DNA, 75 bp, synthetic construct
  source 1..75: mol_type = other DNA
tatattcgcccggtgtatatgaacctggcgggattcggcgtggatggcttaacgctggtgctgttgagttttggt

SEQ ID NO: 640563 - DNA, 75 bp, synthetic construct
  source 1..75: mol_type = other DNA
atgaagctgttttatcagtacgagcagcgtttcggtatgcgttcctccagcctgctgaatgtgattggctccaac

SEQ ID NO: 640564 - DNA, 75 bp, synthetic construct
  source 1..75: mol_type = other DNA
cttttgctttaattcccgttggctggtcaacgtggatcactcgctcactggccgatcaggcagaaaaggctgggt

SEQ ID NO: 640565 - DNA, 75 bp, synthetic construct
  source 1..75: mol_type = other DNA
gccgatcaggcagaaaaagccgggtctattcaggtggcggttattcagcttgtggcgcggcaatcggcggttatg

SEQ ID NO: 640566 - DNA, 75 bp, synthetic construct
  source 1..75: mol_type = other DNA
ctttcgcctgatgcgctattccatggcagtgatgcagcgccatatagagcatgataaacgccggccactaccgct

SEQ ID NO: 640567 - DNA, 75 bp, synthetic construct
  source 1..75: mol_type = other DNA
cgctggtcacgtcatgatacagtcatgtttctttttgcaagtggcctggcaattttcagtacgtggatgctggaa

SEQ ID NO: 640568 - DNA, 75 bp, synthetic construct
  source 1..75: mol_type = other DNA
aacaaatggtgggcagttactgacaatgaggaagaacaggcatcgaaagtaacccactggatgccactaccggag

SEQ ID NO: 640569 - DNA, 75 bp, synthetic construct
  source 1..75: mol_type = other DNA
cgcggtttctattgcgctggtgattgccgcgccgttgggcagttttttaggcgagcttatcggttggcgcaatgt

SEQ ID NO: 640570 - DNA, 75 bp, synthetic construct
  source 1..75: mol_type = other DNA
ggtttacagttccaaagggatcgccgcgattattatgcctggtataatggggatcatcgcagacaaatggctgcg

SEQ ID NO: 640571 - DNA, 75 bp, synthetic construct
  source 1..75: mol_type = other DNA
gaatcctctagtcatgagcaattcaaaagagatgtagaccttatatttcagactagaaatgttattcatgatgca

SEQ ID NO: 640572 - DNA, 75 bp, synthetic construct
  source 1..75: mol_type = other DNA
gcgggcttgctggtaagaaaactttcacagcgcgcattcagcgatctgttgttctccccgccttctctgcccgct

SEQ ID NO: 640573 - DNA, 75 bp, synthetic construct
  source 1..75: mol_type = other DNA
acgctcgtcatgttgccgcgttcaacccaaaggttgcactggagctgcttggtgaaattaagtgcttggaggaca

SEQ ID NO: 640574 - DNA, 75 bp, synthetic construct
  source 1..75: mol_type = other DNA
tgcgtgaagcggcgcaacaggcttcgcaaggagaatggatcgcatacattttgccgggtgaaaacggtactacat

SEQ ID NO: 640575 - DNA, 75 bp, synthetic construct
  source 1..75: mol_type = other DNA
tttgatggactgaaaaacgcagagaacaacgctcgttatattgccgcattcaacccaaaggttgcactggagcta

SEQ ID NO: 640576 - DNA, 75 bp, synthetic construct
  source 1..75: mol_type = other DNA
gcaaaccaaaaatagaacaacgacaacatatccagaatggtatggagctgttaataaaggtctcgcagcaatcag

SEQ ID NO: 640577 - DNA, 75 bp, synthetic construct
  source 1..75: mol_type = other DNA
ttatcaacgatgccctgcaccacagcgaaactccagcaaccgatgcttttctggctgaagtgaggactgaagcac

SEQ ID NO: 640578 - DNA, 75 bp, synthetic construct
  source 1..75: mol_type = other DNA
cgttctgcaggaatcacgattgacaaccttgaagccaagtgctcggcgctggctgcaaagataaatgtgattaac

SEQ ID NO: 640579 - DNA, 75 bp, synthetic construct
  source 1..75: mol_type = other DNA
ggcatagcagcattggtatttacaaccatgttaggaccatcattaattattttagaggataaggggtctgacgct

SEQ ID NO: 640580 - DNA, 75 bp, synthetic construct
  source 1..75: mol_type = other DNA
tgtaccaaacaagtacggtatgattggcatagcagcattggtatttacaaccatgttaggaccatcattaattat

SEQ ID NO: 640581 - DNA, 75 bp, synthetic construct
  source 1..75: mol_type = other DNA
gcgggcttgctggtaagaaaactttcacagcgagcattcagcgatctgttgttctccccgccttcactgcccgtt

SEQ ID NO: 640582 - DNA, 75 bp, synthetic construct
  source 1..75: mol_type = other DNA
tgcgcaatcagtggtgctcagtgatagtgcggtcatggcaatgtttaagcagaaataatcatgtcaccattggtg

SEQ ID NO: 640583 - DNA, 75 bp, synthetic construct
  source 1..75: mol_type = other DNA
atgaataaagagttagatttaacagttgaagacttgagcacgattgcggaatacatgcgaggtgacgatcctgat

SEQ ID NO: 640584 - DNA, 75 bp, synthetic construct
  source 1..75: mol_type = other DNA
tggaggatttaagcactattgcggaatacaagcgcggcgatgatcctgataaacctgttacggttgacctgaaat

SEQ ID NO: 640585 - DNA, 75 bp, synthetic construct
  source 1..75: mol_type = other DNA
attaaagtgccagtcacgtggtcgaccataaaatctatctgggataaaggtatcgagtattttgcagcaaaacca

SEQ ID NO: 640586 - DNA, 75 bp, synthetic construct
  source 1..75: mol_type = other DNA
aaattatgacattgtcttcagcagtaaagatattcctgtagttagtgaatatacaccagatatatcttctgaaca

SEQ ID NO: 640587 - DNA, 75 bp, synthetic construct
  source 1..75: mol_type = other DNA
gaaaaaagctccgaactgtatagtatttttaaccgacatgtaccttatttaaagacaaccgatccaaatgatggt

SEQ ID NO: 640588 - DNA, 75 bp, synthetic construct
  source 1..75: mol_type = other DNA
catggaagggtatgatcataaatatctaacagtacttgctatatttagaccataccgtagcctaaacgcttttgc

SEQ ID NO: 640589 - DNA, 75 bp, synthetic construct
  source 1..75: mol_type = other DNA
gaccatcggccattttgccggatcttacggctggcgttcttctggcgtgttgcataaagcgcaaaccttactgca

SEQ ID NO: 640590 - DNA, 75 bp, synthetic construct
  source 1..75: mol_type = other DNA
tccaaagtaattgatttttttgtttttgatggaattagttatgctattaacattaaattattagaagaaagatat

SEQ ID NO: 640591 - DNA, 75 bp, synthetic construct
  source 1..75: mol_type = other DNA
tagtacatctctggcaggtggcaggggagagtgcctacttatatcgggatgaagcaaatatttccccggaaacaa

SEQ ID NO: 640592 - DNA, 75 bp, synthetic construct
  source 1..75: mol_type = other DNA
gttttgtttgaatactccccgtttggggttattggctcggtcacgccaagcaccaaccccacggaaaccatcatt

SEQ ID NO: 640593 - DNA, 75 bp, synthetic construct
  source 1..75: mol_type = other DNA
gtatgtcgctggcgctgttcactgaaatgacgccgccgcccaatacggaaggtggtggtctggcgaacgccctgg

SEQ ID NO: 640594 - DNA, 75 bp, synthetic construct
  source 1..75: mol_type = other DNA
attgaaccattattattgaaggccatttctgccggggaatcttcattgaagccgggcgcaattaacataaataag

SEQ ID NO: 640595 - DNA, 75 bp, synthetic construct
  source 1..75: mol_type = other DNA
tgataagcgagataataaaactcttctccaatcaattaaagacttggacaagatactcgcagaagtagagaggat

SEQ ID NO: 640596 - DNA, 75 bp, synthetic construct
  source 1..75: mol_type = other DNA
atttcgaaattgataataatggcatagtgatttttcatgaggaaatcggcttaaatgtcatgtgggaaaacttcc

SEQ ID NO: 640597 - DNA, 75 bp, synthetic construct
  source 1..75: mol_type = other DNA
acctggagcaaaagcgaaacacaaactagccaatataatgattcttcctgaatacgaatcagtaagggaatcttt

SEQ ID NO: 640598 - DNA, 75 bp, synthetic construct
  source 1..75: mol_type = other DNA
aagctatctcgataatccactgcaaccggtgaaaggtcgtggcgaagatacctatgtacaggtgagctgggaaca

SEQ ID NO: 640599 - DNA, 75 bp, synthetic construct
  source 1..75: mol_type = other DNA
taccggtggtactgcggttgcgattcgtgaaatgtatccaaaagcgcactttgtcaccatcttcgcaaaaccggc

SEQ ID NO: 640600 - DNA, 75 bp, synthetic construct
  source 1..75: mol_type = other DNA
aagaaatgtattggcaggatgcgccagttgaaggcagcagcaaagcggctgcatacgctacaggctggaatgcct

SEQ ID NO: 640601 - DNA, 75 bp, synthetic construct
  source 1..75: mol_type = other DNA
ttaccaagcttttctcaataaactaaaaaatactaacataagccctaaagagagaagctcaataattgaaatgct

SEQ ID NO: 640602 - DNA, 75 bp, synthetic construct
  source 1..75: mol_type = other DNA
ctgcagaacgcgctgtctggcaactctccggtaagtccaggtggttggataagctgtagtgagcgaatgccgaat

SEQ ID NO: 640603 - DNA, 75 bp, synthetic construct
  source 1..75: mol_type = other DNA
tttaaataatggcatagtcggttttgatgaaggctggaacgcctgccgcgccgccatgcttcagagtcaaggtaa

SEQ ID NO: 640604 - DNA, 75 bp, synthetic construct
  source 1..75: mol_type = other DNA
tgattaaagaaatcaaagaacgtatcagcagcctggacgtacgagacgatattgagcgccgtgcttatgaaattg

SEQ ID NO: 640605 - DNA, 75 bp, synthetic construct
  source 1..75: mol_type = other DNA
gtattcagcatccgatggtgagaaaaagctatctcgataatccactgcaaccggcgaaaggtcgtggcgaagata

SEQ ID NO: 640606 - DNA, 75 bp, synthetic construct
  source 1..75: mol_type = other DNA
tggcaaaccagtgattgccattgatcctatccgctccgaaatgttcttgcccccttatttccagacaggggttgt

SEQ ID NO: 640607 - DNA, 75 bp, synthetic construct
  source 1..75: mol_type = other DNA
gaccatcggccatttttgccggatcttatggctggcgttcttctggcgtgttgcataaagcgcaaaccttactgc

SEQ ID NO: 640608 - DNA, 75 bp, synthetic construct
  source 1..75: mol_type = other DNA
aggatcttccgccacagattcgtcagccagtctgtaatgctggcgaggtaaaaacagcccctgtcggtgtaatgc

SEQ ID NO: 640609 - DNA, 75 bp, synthetic construct
  source 1..75: mol_type = other DNA
cgggaaatattcgagagctttccaacgtcattgaacgcgccgtcgtgatgaactcaggcccgatcattttttctg

SEQ ID NO: 640610 - DNA, 75 bp, synthetic construct
  source 1..75: mol_type = other DNA
gctgaataccttaaaaattgcctggagcagtaccgatgagcaagggctggaatacttccatcagctgaaaaatct

SEQ ID NO: 640611 - DNA, 75 bp, synthetic construct
  source 1..75: mol_type = other DNA
gagaaatggtttctggcattaaagatattccatacaccttccgtggacgaaaaacagtattgaaaggtatccacg

SEQ ID NO: 640612 - DNA, 75 bp, synthetic construct
  source 1..75: mol_type = other DNA
gggctgggataagcattttcaggccaataccattgggcatcgaacggtactctcaacgattcgcttgggattgga

SEQ ID NO: 640613 - DNA, 75 bp, synthetic construct
  source 1..75: mol_type = other DNA
acggcccgaaccaagcacaacatcaagcgcattgatcgtttgctcggcaacacgcatctgcatcaagaacggtta

SEQ ID NO: 640614 - DNA, 75 bp, synthetic construct
  source 1..75: mol_type = other DNA
ataatgccaatggcacaactaaaggctcttcaggagaatatagttcttcttttcgaacaattagaggcacaaaac

SEQ ID NO: 640615 - DNA, 75 bp, synthetic construct
  source 1..75: mol_type = other DNA
atgatcaaacgcggtggcgagaatgtctcctgcgtggagctggaaaatattatcgccgcgcacccgaaaattcag

SEQ ID NO: 640616 - DNA, 75 bp, synthetic construct
  source 1..75: mol_type = other DNA
aatttgcttattatatttttttatctttttttcttggtcgttatttttaggtttttttctaaaatacatgtaaat

SEQ ID NO: 640617 - DNA, 75 bp, synthetic construct
  source 1..75: mol_type = other DNA
atgattacgctcattctttctgcaccagtaacagaaatggctgaagcatttaagcgggtatttgcaaacgcagat

SEQ ID NO: 640618 - DNA, 75 bp, synthetic construct
  source 1..75: mol_type = other DNA
ataaccaaccagcgaatatgtttgttgccggatttattggatcaccggcgatgaattttattcgtggcacgatcg

SEQ ID NO: 640619 - DNA, 75 bp, synthetic construct
  source 1..75: mol_type = other DNA
gatactggagtggttaactttaacggtaaaattgttgccgatacttgcgaaattaatgtaaacgattctaatagt

SEQ ID NO: 640620 - DNA, 75 bp, synthetic construct
  source 1..75: mol_type = other DNA
aaactcaacgagcaacgcgagtattacgagggagtaatcgcggatggaagtaatcacatagcagaactggaaaaa

SEQ ID NO: 640621 - DNA, 75 bp, synthetic construct
  source 1..75: mol_type = other DNA
aataagcgattcatagcagcagccaatccggctaccgtgctggcactactggatgaacgggaaagaaaccagcaa

SEQ ID NO: 640622 - DNA, 75 bp, synthetic construct
  source 1..75: mol_type = other DNA
agcacaataaaaacgcaacgacagacaggaaaataaagacggtggtattccctgcaatgggggccggatgtggtc

SEQ ID NO: 640623 - DNA, 75 bp, synthetic construct
  source 1..75: mol_type = other DNA
tctgtcgcatcactattttcgtgcagaaggctctagccccccccccaatcttttttgtgacaccctgtttcactg

SEQ ID NO: 640624 - DNA, 75 bp, synthetic construct
  source 1..75: mol_type = other DNA
caggagtcatttcaggatgccatgtcgcggatctcgtttgcggcggtcattttttctttttctgccatgagaagt

SEQ ID NO: 640625 - DNA, 75 bp, synthetic construct
  source 1..75: mol_type = other DNA
aaatattgcgctttatgtcgcgtggctactcaatgacacaaattgccgagcagcttaaacgcaatattaaaacga

SEQ ID NO: 640626 - DNA, 75 bp, synthetic construct
  source 1..75: mol_type = other DNA
cagtatttacggtattaaaagaacactggcgaaaattttctgtctgtcagttgtaattgaagcaatcaatctgct

SEQ ID NO: 640627 - DNA, 75 bp, synthetic construct
  source 1..75: mol_type = other DNA
tggtaaggggcttaacgaacgtgttggctcgacgctggaaattgaatccggcagtaatgatccaatggcggtctt

SEQ ID NO: 640628 - DNA, 75 bp, synthetic construct
  source 1..75: mol_type = other DNA
tgcagatgatgatattgaagcacggttgatcggttcattatctccatcaccactggacggagtattaagtaaagc

SEQ ID NO: 640629 - DNA, 75 bp, synthetic construct
  source 1..75: mol_type = other DNA
gaatgtgccagagcaagtcatattcatgatgtgataatgaaaatgccaatggggtatgaaacgttaataggtgaa

SEQ ID NO: 640630 - DNA, 75 bp, synthetic construct
  source 1..75: mol_type = other DNA
tatgacagccagtcagcacaggtattcagtggtctgaatttgtctgtggctccgggagaaagtgtggctataact

SEQ ID NO: 640631 - DNA, 75 bp, synthetic construct
  source 1..75: mol_type = other DNA
cgtgaatgttgccataaaaaacatgaatatcaccagggtaattattgcacacagagaaacaacgttgaaaactgt

SEQ ID NO: 640632 - DNA, 75 bp, synthetic construct
  source 1..75: mol_type = other DNA
agctttataccggaaacctggaatattatttatggatgaggctacaagttctcttgatacagaaagcgaacgttt

SEQ ID NO: 640633 - DNA, 75 bp, synthetic construct
  source 1..75: mol_type = other DNA
tgcagcagaagtctgccgtgattttggggcagaactaaaagaaagtaacggagacgtagatcatgttcacatgct

SEQ ID NO: 640634 - DNA, 75 bp, synthetic construct
  source 1..75: mol_type = other DNA
gcacactggcttaatatgaaaatagatgcgataaattcgggtattaagctaaccagaatggatttgctcttcgga

SEQ ID NO: 640635 - DNA, 75 bp, synthetic construct
  source 1..75: mol_type = other DNA
caacaggttttcttggtggggctgtactggaaaaaatactaagcaattcaggaaacgttagtttattacttttag

SEQ ID NO: 640636 - DNA, 75 bp, synthetic construct
  source 1..75: mol_type = other DNA
ggaacaggcggggcaaatgccgccgcctttaaccttaccggtacggctgcgaccgatggtttgctctgcatctat

SEQ ID NO: 640637 - DNA, 75 bp, synthetic construct
  source 1..75: mol_type = other DNA
gcgaaagtgatcccagctatctggatgtggaaaccatctacaccctctcctggctgcgttattccctgcgtactt

SEQ ID NO: 640638 - DNA, 75 bp, synthetic construct
  source 1..75: mol_type = other DNA
gacgcactcgttctattggccttgtgatccccgatctggagaacacaagctacacccgtattgcaaactaccttg

SEQ ID NO: 640639 - DNA, 75 bp, synthetic construct
  source 1..75: mol_type = other DNA
tgacggtattgacccgaacgaactgctgaatagccttgctgccgttaaatctggcaccaaagctaaacgtgctca

SEQ ID NO: 640640 - DNA, 75 bp, synthetic construct
  source 1..75: mol_type = other DNA
cacccacagtatcgcggccatggggacgcgccagtataactatatagtgatgccctataaggacagcgcaaacct

SEQ ID NO: 640641 - DNA, 75 bp, synthetic construct
  source 1..75: mol_type = other DNA
ggcaccggacaggcaacggctgcggccatgaatctgaccggaacggtcacccgtgacgggattgtttatgcctgc

SEQ ID NO: 640642 - DNA, 75 bp, synthetic construct
  source 1..75: mol_type = other DNA
tacggatcgctagccttgacccgcgcaaggtcatccgccggcgggaaggccaggatgccgctcgtgacctacaag

SEQ ID NO: 640643 - DNA, 75 bp, synthetic construct
  source 1..75: mol_type = other DNA
gcagtcgcggcattgggcgggcaactgcgctgctgctggcaaaagaagggtatacggtggcggttaattatcagc

SEQ ID NO: 640644 - DNA, 75 bp, synthetic construct
  source 1..75: mol_type = other DNA
ggcaaagcgtttgcgctccaggcggatatcagtgacgaaaaccaggtggtggtgatgtttgcggcaatcgaccag

SEQ ID NO: 640645 - DNA, 75 bp, synthetic construct
  source 1..75: mol_type = other DNA
gcccagttattcgaaaaatggctggaaacgcatccgatgccgcaggcgctgttcactacctcttttgcattgttg

SEQ ID NO: 640646 - DNA, 75 bp, synthetic construct
  source 1..75: mol_type = other DNA
agctgtatgtggcacgtaacaaggacgacaaagaccgtcttgatgtgctgtgcggcccgaatctgattaaccagt

SEQ ID NO: 640647 - DNA, 75 bp, synthetic construct
  source 1..75: mol_type = other DNA
gcgaaagcgatcccagctatctggatgtagaaaccatctacaccctgtcatatctgcgttattccctgcgcacct

SEQ ID NO: 640648 - DNA, 75 bp, synthetic construct
  source 1..75: mol_type = other DNA
atgctgatcgctgacggtattgacccgaacgagctgctgaatagccttgccgccgttaaatctggcaccaaagct

SEQ ID NO: 640649 - DNA, 75 bp, synthetic construct
  source 1..75: mol_type = other DNA
catagataaagttaataagtatagaagggatataaactcaatatttgaatctgctcagataaagtcagggaaaag

SEQ ID NO: 640650 - DNA, 75 bp, synthetic construct
  source 1..75: mol_type = other DNA
cagcgacgatgaaagatgttgctctgaaggcaaaagtctcaacggccaccgtctcccgagcgttaatgaaccccg

SEQ ID NO: 640651 - DNA, 75 bp, synthetic construct
  source 1..75: mol_type = other DNA
ccgggttgaaaaagccgcccgggatgtgggttatttaccgcagccgatggggcgtaacgtcaagcgtaatgagtc

SEQ ID NO: 640652 - DNA, 75 bp, synthetic construct
  source 1..75: mol_type = other DNA
gcaggatgctgtagatctggaaatcgcaacggaggaagaaagctcgttgctggaggcatggaataaatatcgggt

SEQ ID NO: 640653 - DNA, 75 bp, synthetic construct
  source 1..75: mol_type = other DNA
ccagcgcgagcttaaagtgctgaaacgcgcagaaggcgatggcgaaggcttcatcgttattgatgacctggtgga

SEQ ID NO: 640654 - DNA, 75 bp, synthetic construct
  source 1..75: mol_type = other DNA
atagcagaaaaactgggaaagagcaaacaagttgtttataaaaccataaaaagaggctcggttgataagataata

SEQ ID NO: 640655 - DNA, 75 bp, synthetic construct
  source 1..75: mol_type = other DNA
ggggctgaaagttcctgatgacctttccataatcggttttgataacatcgacctgacgcaattttgtgatccgcc

SEQ ID NO: 640656 - DNA, 75 bp, synthetic construct
  source 1..75: mol_type = other DNA
taattatccggaaagaacagtatattttaatgcgggagttgcatgagcggtatacgggagaaactatcagaccat

SEQ ID NO: 640657 - DNA, 75 bp, synthetic construct
  source 1..75: mol_type = other DNA
tggatgtggaaaccatctacaccctgtcatatctgcgttattccctgcgcacctttatcacgcaacgttttccgc

SEQ ID NO: 640658 - DNA, 75 bp, synthetic construct
  source 1..75: mol_type = other DNA
ccacaaccgcctactgctgtcttctgccatagcgatgtgatggcgctcggcgcactttcgcaggcaaaacgccag

SEQ ID NO: 640659 - DNA, 75 bp, synthetic construct
  source 1..75: mol_type = other DNA
acaaatagtcggcagtggatcacgtttaatggactgcgaacttattatccggggatcaacacgcgcgttaactta

SEQ ID NO: 640660 - DNA, 75 bp, synthetic construct
  source 1..75: mol_type = other DNA
taaacggattggctgtatagccggtcccgaagagatgccgctgtgtcactaccgcctgcaaggctatgttcaggc

SEQ ID NO: 640661 - DNA, 75 bp, synthetic construct
  source 1..75: mol_type = other DNA
gatttggattaagtatggcatttgaatttgattactatcttgtcgatgagattacgtcagttggtgatgcaaggt

SEQ ID NO: 640662 - DNA, 75 bp, synthetic construct
  source 1..75: mol_type = other DNA
tggcttggtttggtgacgccgatcggcatcaaatgcagcatgtatcttgtggggagcttctttgatttcccgcta

SEQ ID NO: 640663 - DNA, 75 bp, synthetic construct
  source 1..75: mol_type = other DNA
gggctggcgcggctgattaatgatattcctcttcctggtacgacgggcgttgagcgcgtactctttcgtgtactc

SEQ ID NO: 640664 - DNA, 75 bp, synthetic construct
  source 1..75: mol_type = other DNA
atcgggctgtcaccggattatcagccggtatctgacagcctgcagaagaacattgacgacttccgccaggtggtt

SEQ ID NO: 640665 - DNA, 75 bp, synthetic construct
  source 1..75: mol_type = other DNA
aacaaatacagcgttagccctgaaaaatatctcaaggcagctatagcaattttgtacagcgataatattttggtg

SEQ ID NO: 640666 - DNA, 75 bp, synthetic construct
  source 1..75: mol_type = other DNA
tggttgatagcgacaccgctctgatggtgcaaagcttcactgatgtaggtgttagcattgactttgacaggctgt

SEQ ID NO: 640667 - DNA, 75 bp, synthetic construct
  source 1..75: mol_type = other DNA
tatgatgattcaggctttcactgatgtaggtgttagcattgactttgataagttgttagagttaatgactgataa

SEQ ID NO: 640668 - DNA, 75 bp, synthetic construct
  source 1..75: mol_type = other DNA
gcgtgcaacaggcgtcagcaaaggtccggggcagcaggaagccgtcaggagcgcggcgtcggctgaagagctgac

SEQ ID NO: 640669 - DNA, 75 bp, synthetic construct
  source 1..75: mol_type = other DNA
gcgtgcaacaggcgtcagcaaaggtccggggcagcagcaagccgtcaggaacgcagcgtcggctgaagagctgac

SEQ ID NO: 640670 - DNA, 75 bp, synthetic construct
  source 1..75: mol_type = other DNA
gcgtgcaacaggcgtcagcaaaggtccggggcagcagaaagccgtcaggaccgcagcgtcggctgaagagctgac

SEQ ID NO: 640671 - DNA, 75 bp, synthetic construct
  source 1..75: mol_type = other DNA
ggacgcgttggcgttatggattgaccagccgatacgtctggcaacgtctgttctggcttggtttggtggcgccga

SEQ ID NO: 640672 - DNA, 75 bp, synthetic construct
  source 1..75: mol_type = other DNA
ggcatccttccggatggcccgttcagccgttatggcgatgtggttgagctgaaatctgaaaagattgacgacgat

SEQ ID NO: 640673 - DNA, 75 bp, synthetic construct
  source 1..75: mol_type = other DNA
tattctgatttaccccatgatttgaaaattggtctacgttccttatcaagttcagcagcaatctactcggacttg

SEQ ID NO: 640674 - DNA, 75 bp, synthetic construct
  source 1..75: mol_type = other DNA
gtggagtttaacgagcctcgaatgatgttgccaattacagacagcagtctgaagcgtcttattattgaggaaact

SEQ ID NO: 640675 - DNA, 75 bp, synthetic construct
  source 1..75: mol_type = other DNA
gaggcggaaaagcgcggcgagattaaaccgggtgatgtgctgatcgaagccaccagtggtaacaccggcattgcg

SEQ ID NO: 640676 - DNA, 75 bp, synthetic construct
  source 1..75: mol_type = other DNA
cggttgccggagcactgcgggtggcaaaagctaaccctggtgcggtggtggtggcgatcatctgcgatcgtggcg

SEQ ID NO: 640677 - DNA, 75 bp, synthetic construct
  source 1..75: mol_type = other DNA
tgcttgatatcgacacagtaaatatggttcaacacttcgttgattccggtgtgtcaattgactttgataaattac

SEQ ID NO: 640678 - DNA, 75 bp, synthetic construct
  source 1..75: mol_type = other DNA
ggtgaccattgttggtctgcagccggaagagggcagcagcattcccggcattcgtcgctggcctgaggaatatct

SEQ ID NO: 640679 - DNA, 75 bp, synthetic construct
  source 1..75: mol_type = other DNA
cggttgctggtgcactgcgagtggcaaaagctcaccctggcgcggtagtggtggcgatcatctgtgatcgtggcg

SEQ ID NO: 640680 - DNA, 75 bp, synthetic construct
  source 1..75: mol_type = other DNA
gcagcgatgcgtgcctacggcgcggagctgattctggtgaccaaagagcagggcatggaaggcgctcgcgacctg

SEQ ID NO: 640681 - DNA, 75 bp, synthetic construct
  source 1..75: mol_type = other DNA
gtggagtttaacgagcctcgaatgatgttaccaattacagacagtaatatgaaaagattggttatcgaacagaca

SEQ ID NO: 640682 - DNA, 75 bp, synthetic construct
  source 1..75: mol_type = other DNA
attgaaactggtgaaccacgttttatgtttcccgttagcgactcaagcatgaaaaggcttgttatcgagcaaacg

SEQ ID NO: 640683 - DNA, 75 bp, synthetic construct
  source 1..75: mol_type = other DNA
aacaaattcagcattagccctgaaagatatctcaaggcagctatagcaattttgtacgctgacaatattctggtg

SEQ ID NO: 640684 - DNA, 75 bp, synthetic construct
  source 1..75: mol_type = other DNA
agcaaatacagtatttccccagagcaatttttgaaaggtgctgtgataatcctgtacagcgataatattctggtg

SEQ ID NO: 640685 - DNA, 75 bp, synthetic construct
  source 1..75: mol_type = other DNA
atgaacaattacgaattacagattttcgttgatgccgacactgctatgatgattcaggctttcagtgatgtaggt

SEQ ID NO: 640686 - DNA, 75 bp, synthetic construct
  source 1..75: mol_type = other DNA
gaaaagattggttatcgagcaaacgaacaaatacagcattagccctgaaagatatctcaaggcagctatagcaat

SEQ ID NO: 640687 - DNA, 75 bp, synthetic construct
  source 1..75: mol_type = other DNA
gcgtgcaacaggcgtcagcaaaggtccggggcagcagaaagccgtcaggaacgccgcgtcggctgaagagctgac

SEQ ID NO: 640688 - DNA, 75 bp, synthetic construct
  source 1..75: mol_type = other DNA
agcgcgagcaaggcatgtcgccgcgcgatgccatctaccaggcttgtctgttgcgttttcgtccgatcctgatga

SEQ ID NO: 640689 - DNA, 75 bp, synthetic construct
  source 1..75: mol_type = other DNA
gcaggccgcgattaacgccgccactaacctgttgccgagcgatctgcctaacccaccggtttacagcaaagtgaa

SEQ ID NO: 640690 - DNA, 75 bp, synthetic construct
  source 1..75: mol_type = other DNA
tcgatgacgccatcgtggtgatcgaaaatatttcccgctatatcgaaaaaggcgaaaaaccgttggcggcggcgc

SEQ ID NO: 640691 - DNA, 75 bp, synthetic construct
  source 1..75: mol_type = other DNA
aagctcaattgccaaaattgagcagcgttttgcgccgctttccatcaaccatctggatcagttcccggtaacgac

SEQ ID NO: 640692 - DNA, 75 bp, synthetic construct
  source 1..75: mol_type = other DNA
gcttctcccgtgcctcagagaaaatgttcgacaggataatcgccgcctatggtcgtggactggcgaaagtgctga

SEQ ID NO: 640693 - DNA, 75 bp, synthetic construct
  source 1..75: mol_type = other DNA
atgaccgggtgcaaaaagtcatcgcccgtctgcaaacggcggtggataaagtgccgggcgtcgatctcttcctgc

SEQ ID NO: 640694 - DNA, 75 bp, synthetic construct
  source 1..75: mol_type = other DNA
cagggcggatgaaaccagtcaggcattcagccgcctgaaaaacagtctcgaccacaccgaaagtctgacccagca

SEQ ID NO: 640695 - DNA, 75 bp, synthetic construct
  source 1..75: mol_type = other DNA
gggtgtgtgtgcggcgatggcagtctccttcgttgtctctgccattctgctgaaaaccagcaaagtgaaagaaga

SEQ ID NO: 640696 - DNA, 75 bp, synthetic construct
  source 1..75: mol_type = other DNA
gagtcagttatcgagcgtctggcgcacaccacctgtgtggatgaagtgctggaactgctggcaggtcgtaagtaa

SEQ ID NO: 640697 - DNA, 75 bp, synthetic construct
  source 1..75: mol_type = other DNA
aaccgacgcaggatctgaccatcgatacccaggtcagccgcacccagtaccagtttaccttgcaggcaacttcgc

SEQ ID NO: 640698 - DNA, 75 bp, synthetic construct
  source 1..75: mol_type = other DNA
tgacgctttccggcggtcagcgtccggctgttcgcgtcaaacttaacgctcaggcgattgccgccctcggcctga

SEQ ID NO: 640699 - DNA, 75 bp, synthetic construct
  source 1..75: mol_type = other DNA
gaaatcgtgcagcgtaaccgcctgcgccatccgtcattcatactgccaacgcaacctgtggagattaccgactga

SEQ ID NO: 640700 - DNA, 75 bp, synthetic construct
  source 1..75: mol_type = other DNA
cgttttgcgccgctttccatcaaccatctggatcagttcccggtaacgaccatctcctttaacgtgccggataac

SEQ ID NO: 640701 - DNA, 75 bp, synthetic construct
  source 1..75: mol_type = other DNA
tgcccggaatgccggtgagctgggacgatttatgtcggtggcccgtgtggcggcaggtggcggggttgccgtact

SEQ ID NO: 640702 - DNA, 75 bp, synthetic construct
  source 1..75: mol_type = other DNA
ggtgcgaatgagaaaatcagccggcagcgccgtgatttatggaaggcggaaagtcagtatgcggtcctgaaagag

SEQ ID NO: 640703 - DNA, 75 bp, synthetic construct
  source 1..75: mol_type = other DNA
acgaaggaggcaaccagccggattggcgtcggcaacctgtatcgtctgatgcgcgggtatgcggaaggtggttat

SEQ ID NO: 640704 - DNA, 75 bp, synthetic construct
  source 1..75: mol_type = other DNA
ttattgacctgagtctggatgctgtccgtttcgatgagcagatgagccgggtaaggcgtcatttttccggactgg

SEQ ID NO: 640705 - DNA, 75 bp, synthetic construct
  source 1..75: mol_type = other DNA
ctgaaggctgtgtatgacatggcccgtaaaggtgcacaggatgagctccggctgcagttacgtgatggcggtctg

SEQ ID NO: 640706 - DNA, 75 bp, synthetic construct
  source 1..75: mol_type = other DNA
acgccagctggctgacctgggcgacaaggttgaacaccagaaacgcctgaatgagctggcacagcaggcggtgcg

SEQ ID NO: 640707 - DNA, 75 bp, synthetic construct
  source 1..75: mol_type = other DNA
ctgatggtggcgatcttactcgccggaattatcggttatcgcgccctgcccgtttcggcgctgccggaagtggac

SEQ ID NO: 640708 - DNA, 75 bp, synthetic construct
  source 1..75: mol_type = other DNA
cagttgatggaaaaactccagcagctgccacagctttctgatgtctccagcgactggcaggacaaagggctggtg

SEQ ID NO: 640709 - DNA, 75 bp, synthetic construct
  source 1..75: mol_type = other DNA
caacgcgtttggtcagcggctgatttccactatttatactcaggccaaccagtatcgcgtggtgctggagcacaa

SEQ ID NO: 640710 - DNA, 75 bp, synthetic construct
  source 1..75: mol_type = other DNA
cgctggatgtcgccgagcaggaagtgcaggccgcgattaacgccgccactaacctgttgccgagcgatctgccta

SEQ ID NO: 640711 - DNA, 75 bp, synthetic construct
  source 1..75: mol_type = other DNA
ccagcgaaaccgtgcgcaccgccattaccggcgctaacgttaactcagccaaaggtagcctcgacggcccttcac

SEQ ID NO: 640712 - DNA, 75 bp, synthetic construct
  source 1..75: mol_type = other DNA
aagttccggcggtgcgtcagttatcactttacagttccagctaacattaccgctcgatgtcgccgagcaggaagt

SEQ ID NO: 640713 - DNA, 75 bp, synthetic construct
  source 1..75: mol_type = other DNA
atataccgctcaggacgcaacgacggcacgaaaagggatagttcagctcagtagcgccactaacagcacatctga

SEQ ID NO: 640714 - DNA, 63 bp, synthetic construct
  source 1..63: mol_type = other DNA
attcatttttcgtcttgcgacgtcaagaatccgtatcttcgagtgcccacacagattgtctga

SEQ ID NO: 640715 - DNA, 75 bp, synthetic construct
  source 1..75: mol_type = other DNA
caacgattcgagtccggaacactattcgctatggaggcatgttcaacttctcattctgggggatgaacgttcagt

SEQ ID NO: 640716 - DNA, 75 bp, synthetic construct
  source 1..75: mol_type = other DNA
actgacagaacaaatgggatttccaattccatgtgttcatatgcgtggcgatggcggtaatgatgttttatggca

SEQ ID NO: 640717 - DNA, 75 bp, synthetic construct
  source 1..75: mol_type = other DNA
aagtcgggcgggatattcttgcgaaatcgaccgttgccgctgttatcgaatacctcggtttacaggaaacggtaa

SEQ ID NO: 640718 - DNA, 75 bp, synthetic construct
  source 1..75: mol_type = other DNA
gcaaatacaccgcacaggacgcaaccactgcgcggaaagggatagttcagctcagtagcgccactaacagcacat

SEQ ID NO: 640719 - DNA, 75 bp, synthetic construct
  source 1..75: mol_type = other DNA
gtgacgccggtatgggttccagtgcgatgggcgcaggtgtgctgcgtaagaaaattcaggatgcaggtctgtcgc

SEQ ID NO: 640720 - DNA, 75 bp, synthetic construct
  source 1..75: mol_type = other DNA
gagtccgtcatcgagcgtctggcacacaccaccagcgtggatgaagtgctggaactgttggcaggtcgtaagtaa

SEQ ID NO: 640721 - DNA, 75 bp, synthetic construct
  source 1..75: mol_type = other DNA
ccgcaggcatcatcgggatgatcctcgctattctggcatttctcggcattggcccgattgttgaagccctgtcca

SEQ ID NO: 640722 - DNA, 75 bp, synthetic construct
  source 1..75: mol_type = other DNA
tatttgcctgtaacaaagacgggcaactcggggcaatagacaacgcatatggctatccggtgagtaaaacgcagt

SEQ ID NO: 640723 - DNA, 75 bp, synthetic construct
  source 1..75: mol_type = other DNA
ttgctgtggccagcattgatgtgaatggcaatatcacggatttacggccaaaagggacgctaaatgagcaggtgg

SEQ ID NO: 640724 - DNA, 75 bp, synthetic construct
  source 1..75: mol_type = other DNA
aagaatatcccggaacctccgccgccggagccggtcaaccgtccgatggagctgtatatcaatggcgaactggtg

SEQ ID NO: 640725 - DNA, 75 bp, synthetic construct
  source 1..75: mol_type = other DNA
ggcctgggctggtgtgttgatcattaccctgtgcgtactgctgctgaacattctggcgcgcgttgtttttgccaa

SEQ ID NO: 640726 - DNA, 75 bp, synthetic construct
  source 1..75: mol_type = other DNA
cgcaatgaccatacgcgttactacgccgagcacgtccagcggtggcggaattactaacgctcaattcacttatat

SEQ ID NO: 640727 - DNA, 75 bp, synthetic construct
  source 1..75: mol_type = other DNA
aattagccgctggatcattgcagaaaaaccagaacggcgcagatattccaaacaaagataaatttacgcaaacaa

SEQ ID NO: 640728 - DNA, 75 bp, synthetic construct
  source 1..75: mol_type = other DNA
aacgttgtttgctgtatactcgcaagaacaagcaataataaataaagcatcatctactattgctttaatatcaag

SEQ ID NO: 640729 - DNA, 75 bp, synthetic construct
  source 1..75: mol_type = other DNA
aaaaaaattagcgcaggcagccacaccagatggtaaaccggtccgcctgactcatatggccgtgggtgacggcgg

SEQ ID NO: 640730 - DNA, 75 bp, synthetic construct
  source 1..75: mol_type = other DNA
cttcctcatcgaaacgtccctaccgaaaagggaacccacttagcgctgctgataaacagcgatcttcagtggcaa

SEQ ID NO: 640731 - DNA, 75 bp, synthetic construct
  source 1..75: mol_type = other DNA
ttgctgcgacgcctaaggctgttaaggcagcatatgacctggctaacgctaaatacaccgcacaggacgcgacca

SEQ ID NO: 640732 - DNA, 75 bp, synthetic construct
  source 1..75: mol_type = other DNA
aaatgtatgaagcgtacaaaaatggatatccttttgcttatggtaacgttcttcatcttactggtgtagcggcag

SEQ ID NO: 640733 - DNA, 75 bp, synthetic construct
  source 1..75: mol_type = other DNA
gctccggcatatattcgctcccgacgagatacagcagatgctaattggtctggatgggcgcaactatatacaacc

SEQ ID NO: 640734 - DNA, 75 bp, synthetic construct
  source 1..75: mol_type = other DNA
catatataaacagtgataataaaaagatatttcttggattatacgatgacatatctctagccgttaatgccagaa

SEQ ID NO: 640735 - DNA, 75 bp, synthetic construct
  source 1..75: mol_type = other DNA
aacgccaacaacgccaactgcgccaaaaggtactaataatactcagatcgcaagtacggcttatgtgatggccgc

SEQ ID NO: 640736 - DNA, 75 bp, synthetic construct
  source 1..75: mol_type = other DNA
cttattcgataaagacggcgatatgattgccgtagccaactgcgcggaaacctataaaccgcagttacaggaggg

SEQ ID NO: 640737 - DNA, 75 bp, synthetic construct
  source 1..75: mol_type = other DNA
cgttcagcacgtgatggttatggatttgaggctaactggtcagagttttacaccacaacccgcaaaccctctgcg

SEQ ID NO: 640738 - DNA, 75 bp, synthetic construct
  source 1..75: mol_type = other DNA
agatttccgtcactaacagcgcgatcaataacctgccgccagatgtggacctcgtcatcactcaccgtgatctga

SEQ ID NO: 640739 - DNA, 75 bp, synthetic construct
  source 1..75: mol_type = other DNA
aagcagaaggtcgtcagatggccagcctcttcgaaccggatgtgccggaagttgtttccggagaagacgtgactc

SEQ ID NO: 640740 - DNA, 75 bp, synthetic construct
  source 1..75: mol_type = other DNA
tcgaacgctcaagattatgcagatatgaaaaagatcatatctggagaagcaacatatgataatgagaggaaccaa

SEQ ID NO: 640741 - DNA, 75 bp, synthetic construct
  source 1..75: mol_type = other DNA
atcatgaaggatatgtattttctgatatcaataccttgtctcgttatacactacacggactaggaataactggtg

SEQ ID NO: 640742 - DNA, 75 bp, synthetic construct
  source 1..75: mol_type = other DNA
gatttctaaaaccgacaccacgaagattgcggtcatcccaaccaatgaagaaaaaatgattgctatagatgcagc

SEQ ID NO: 640743 - DNA, 75 bp, synthetic construct
  source 1..75: mol_type = other DNA
gcaacgccttcaggcgctgggattggaactggataaagaacgtaaccagcagctgttcggcggacgtagcggact

SEQ ID NO: 640744 - DNA, 75 bp, synthetic construct
  source 1..75: mol_type = other DNA
gagaatccgccagttgaaactggggcatggaaagatgccgttgagtgggtgctcaaagaggcttgccaggctgta

SEQ ID NO: 640745 - DNA, 75 bp, synthetic construct
  source 1..75: mol_type = other DNA
cgttcttcgaaatcaaaaatggcgtaccgacggtaggagtcatcgacacatccggaaaacctgtcgttgtggctc

SEQ ID NO: 640746 - DNA, 75 bp, synthetic construct
  source 1..75: mol_type = other DNA
aaaagctaaccctgacgcggtggtggtggcgatcatctgcgatcgtggcgatcgctacctttctaccggggtgtt

SEQ ID NO: 640747 - DNA, 75 bp, synthetic construct
  source 1..75: mol_type = other DNA
aaaagccaaccctggagcggtggtggtagcgatcatctgcgatcgtggcgatcgctacctttccaccggcgtatt

SEQ ID NO: 640748 - DNA, 75 bp, synthetic construct
  source 1..75: mol_type = other DNA
gagtagaggggtgttaggtgaagagttcattaatgaaagaaaactgagtgataaagcttatattggtgtctacaa

SEQ ID NO: 640749 - DNA, 75 bp, synthetic construct
  source 1..75: mol_type = other DNA
caaaatattgatgaagttaactataatgaaatcagtgatgcagataaaaacattatcaagaagatattaacagaa

SEQ ID NO: 640750 - DNA, 75 bp, synthetic construct
  source 1..75: mol_type = other DNA
cgaatacaaagacaaccagctgtgctcaggtagcaacaaaccgttcttcgaaatcaaaaatggcgtaccgacggt

SEQ ID NO: 640751 - DNA, 75 bp, synthetic construct
  source 1..75: mol_type = other DNA
cgttaactattacttcaaatcacaggagaacaaaagggcgcaagaggaacacgacgcacgaatggggaataagta

SEQ ID NO: 640752 - DNA, 75 bp, synthetic construct
  source 1..75: mol_type = other DNA
cggatattcgtggataacgggagtattgcctccacgctggcgacgtcgttgtcattcgaaaagcgttacacgctc

SEQ ID NO: 640753 - DNA, 75 bp, synthetic construct
  source 1..75: mol_type = other DNA
aagggcgtaaaaagggattcacctattttgccgatatcaacgacaacgacagcgtcgatatcagtatcagtctga

SEQ ID NO: 640754 - DNA, 75 bp, synthetic construct
  source 1..75: mol_type = other DNA
atgctcaaacccgacagcctgcgcagggcgctgactgatgacgtcacggtgctgaaaactaaccccgatatgctg

SEQ ID NO: 640755 - DNA, 75 bp, synthetic construct
  source 1..75: mol_type = other DNA
tggttgccacgggggccagctccatgtcatgggagtaccgctacaccctgaacgtggtgatagaggatttcagtg

SEQ ID NO: 640756 - DNA, 75 bp, synthetic construct
  source 1..75: mol_type = other DNA
agctatgcccctgagcagccactgcctgagccggtgacgcgcccggtcgagctgtacgttaacggcgaactggtg

SEQ ID NO: 640757 - DNA, 75 bp, synthetic construct
  source 1..75: mol_type = other DNA
tgctgaccgagcgcacgctggtcagtgaggtggacggcgcgctgcatgtgaagaatatcccggaacccccgccgc

SEQ ID NO: 640758 - DNA, 75 bp, synthetic construct
  source 1..75: mol_type = other DNA
aagaatatcccggaacccccgccgccggagccggtcacccgcccgatggagctgtatatcaatggcgaactggtg

SEQ ID NO: 640759 - DNA, 75 bp, synthetic construct
  source 1..75: mol_type = other DNA
gctgaaaaccagccccgagatgctgcggatattcgtggataacgggagtattgcctccacactggcgacgtcgct

SEQ ID NO: 640760 - DNA, 75 bp, synthetic construct
  source 1..75: mol_type = other DNA
cactgacggtagtgtgtcgagcgttgaagctatagcggaacctgatgcacctgaagaaatgtggacggtgaaacg

SEQ ID NO: 640761 - DNA, 75 bp, synthetic construct
  source 1..75: mol_type = other DNA
aacgtagtgatagaggatttcagcggcgaccagaatctgttgatggccccggttttgctgtggctgcgggataac

SEQ ID NO: 640762 - DNA, 75 bp, synthetic construct
  source 1..75: mol_type = other DNA
tggttgcctccggggctagctccatgtcatgggagtaccgctacaccctgaacgtggtgattgaagatttcagcg

SEQ ID NO: 640763 - DNA, 75 bp, synthetic construct
  source 1..75: mol_type = other DNA
ccggcgagcttatccacccgtggttcgggatacagaccgtacaggttggcaaggtcacccatcgcctcagcacgg

SEQ ID NO: 640764 - DNA, 75 bp, synthetic construct
  source 1..75: mol_type = other DNA
ggggtgatgagtccgtgcgccggacacgaagacaatgagctgaatttacatgattttgtggttcgtaatcgcccc

SEQ ID NO: 640765 - DNA, 75 bp, synthetic construct
  source 1..75: mol_type = other DNA
tttattgatgaacagcagttaacgaatagtgatattccgaagaaaagcacggtcctaaatgaagataaaaaaggc

SEQ ID NO: 640766 - DNA, 75 bp, synthetic construct
  source 1..75: mol_type = other DNA
caagctgcgcgtacaaatgcgcgcagagatcagcaagctgcatcagaaactgaacaccaccatgatctacgtgac

SEQ ID NO: 640767 - DNA, 75 bp, synthetic construct
  source 1..75: mol_type = other DNA
tgtgccgaaggagtgggttgctgtctattacgacaatccagatgaaacacccgccgaaaaattacgctgcgacac

SEQ ID NO: 640768 - DNA, 75 bp, synthetic construct
  source 1..75: mol_type = other DNA
atgagaattgaagtcaccatagcaaaaacttctccattacctgccggagccattgacgccctggccggtgaactt

SEQ ID NO: 640769 - DNA, 75 bp, synthetic construct
  source 1..75: mol_type = other DNA
ctttcattttatacacaccatcaaattacctgaaccagaaaagtattgaatggaccacgctgctcgaaaaagatg

SEQ ID NO: 640770 - DNA, 75 bp, synthetic construct
  source 1..75: mol_type = other DNA
gtgccgcgaagaaaggtgctaagtattaccacatcacccgccagtggcaggaacgtggtaataacctgaccatca

SEQ ID NO: 640771 - DNA, 75 bp, synthetic construct
  source 1..75: mol_type = other DNA
ataacccagatattgaatgcctcagacagcaacttttatcagtacgtaagcaggttgatttatgtgtaattgttg

SEQ ID NO: 640772 - DNA, 75 bp, synthetic construct
  source 1..75: mol_type = other DNA
gggaatcgggaggggagtctatgatgacgttggcgcagtggtttgaagagaaggggattgagaagggaattgaga

SEQ ID NO: 640773 - DNA, 75 bp, synthetic construct
  source 1..75: mol_type = other DNA
accggtgcggaatttatgctctacaccacggttggggggcacgagttagggaaggtgcgaataagcaggtcattt

SEQ ID NO: 640774 - DNA, 75 bp, synthetic construct
  source 1..75: mol_type = other DNA
cgtaggggcagcctgcatccggtaggctctcatctggaaagcgtgattcgtctgcaaaagaaccccctgctggtt

SEQ ID NO: 640775 - DNA, 75 bp, synthetic construct
  source 1..75: mol_type = other DNA
gtgccgcgaagaaaggcgctaagtattaccacatcacccgccagtggcaggaacgtggtaataacctcaccgtta

SEQ ID NO: 640776 - DNA, 75 bp, synthetic construct
  source 1..75: mol_type = other DNA
cttgcaggacagtgcttatgaaatgttaccaaagccctgcttcgaggtttacttgaacaatggcgcggaagatgg

SEQ ID NO: 640777 - DNA, 75 bp, synthetic construct
  source 1..75: mol_type = other DNA
cttccggcaaataccgtaactgcctgcgcatcaactgtgctttgccactcagcgaaacttatcgcgaagcgctga

SEQ ID NO: 640778 - DNA, 75 bp, synthetic construct
  source 1..75: mol_type = other DNA
cgtgcagcaggcgtaccagacgctggagacgatgaagttcatcactccgcagccgcgttcgggttattttgtcgc

SEQ ID NO: 640779 - DNA, 75 bp, synthetic construct
  source 1..75: mol_type = other DNA
tacagtacgccagcaattgaaattgaggaattcgaaacagcatataaaggatcaccggaagaaaaacacgagttc

SEQ ID NO: 640780 - DNA, 75 bp, synthetic construct
  source 1..75: mol_type = other DNA
tatatatttcatgaacatgttgctggttacaataaagatcactctctttttgacaggatgacgtttttatgtatg

SEQ ID NO: 640781 - DNA, 75 bp, synthetic construct
  source 1..75: mol_type = other DNA
ttaactcgttgacctgctactttgcttctgatgtttgtcaggaacagttcatttcacgcttagtctggctggggt

SEQ ID NO: 640782 - DNA, 75 bp, synthetic construct
  source 1..75: mol_type = other DNA
gagcagattgcccgcctgatgctcgacagcggctcggtggtcaccgccgatgacatcatcatcaccagcggctgc

SEQ ID NO: 640783 - DNA, 75 bp, synthetic construct
  source 1..75: mol_type = other DNA
ttttggtgatgagctggcaatcaaaatcgaagattttgaaactgcgtataaaactctaccggaagaaaaacatcg

SEQ ID NO: 640784 - DNA, 75 bp, synthetic construct
  source 1..75: mol_type = other DNA
agattcgcgccaattcagaatataccgattcaatggtcggctttaaaactcccgttttaaatgattttactggtg

SEQ ID NO: 640785 - DNA, 75 bp, synthetic construct
  source 1..75: mol_type = other DNA
atgaactacgagattaagcaggaagagaaacgtaccgttgcaggtttccatctcgttggcccgtgggaacagacg

SEQ ID NO: 640786 - DNA, 75 bp, synthetic construct
  source 1..75: mol_type = other DNA
gttctgggaaggcagcgcacaatgcgagatcgtattgccgaagccgctacctgccgatctgttcagcggcctgtt

SEQ ID NO: 640787 - DNA, 75 bp, synthetic construct
  source 1..75: mol_type = other DNA
gccaactaccatgagggggaataccgctcggcggggatcgccttacagggcggggcaacgctgaccgcgcatggc

SEQ ID NO: 640788 - DNA, 75 bp, synthetic construct
  source 1..75: mol_type = other DNA
tacagcctcaatgcgcaaacccgtcatcaggagcagggtggcgaggactcacatgatatcagcggcaacggtacc

SEQ ID NO: 640789 - DNA, 75 bp, synthetic construct
  source 1..75: mol_type = other DNA
gggaatcaggaggggagtctatgatgacgttggcgcaatggtttgaagagaaagggattgaaaaggggattcagc

SEQ ID NO: 640790 - DNA, 75 bp, synthetic construct
  source 1..75: mol_type = other DNA
gattttgtcgttgatgaatatcgttgcgtgatatttacccacggctgcttctggcaccatcatcactgctatctg

SEQ ID NO: 640791 - DNA, 75 bp, synthetic construct
  source 1..75: mol_type = other DNA
cggtcaacgtagcactggacgaaaagcaaatccgcagcggattcgagcgtttcaaagcagagaaaaaagcgcggg

SEQ ID NO: 640792 - DNA, 75 bp, synthetic construct
  source 1..75: mol_type = other DNA
ctgggctggaaaacacgtacacagaaagagctggcgcttatggatgaactgacaccgttgctacacaaactggca

SEQ ID NO: 640793 - DNA, 75 bp, synthetic construct
  source 1..75: mol_type = other DNA
ggccgattcgcaaccgctacggcatcctgcaaaatttcgacggcctcgcctggctggcgcaaatcgccatgttcc

SEQ ID NO: 640794 - DNA, 75 bp, synthetic construct
  source 1..75: mol_type = other DNA
ccttcgcctacatggtaagtaacctggcactggcgattattttgctcgacggcgggatgcgcactcaggccagtt

SEQ ID NO: 640795 - DNA, 75 bp, synthetic construct
  source 1..75: mol_type = other DNA
tgaaattgtccagcagttgttaggcgcggcaccggttgtcggtgaccaggtagagtttgccgggatgatctggac

SEQ ID NO: 640796 - DNA, 75 bp, synthetic construct
  source 1..75: mol_type = other DNA
gaggggctttttttgcccaggcgtcaggagataaaagatggctaatccgctatatcagaaacatatcatttccat

SEQ ID NO: 640797 - DNA, 75 bp, synthetic construct
  source 1..75: mol_type = other DNA
cagataaaggtactgtaattacggataaaacaatttcttggcctgttggattgtctggaggttttcaggggagtt

SEQ ID NO: 640798 - DNA, 75 bp, synthetic construct
  source 1..75: mol_type = other DNA
tttcttatggtttcacataatctaaattctatcagagaattttgtgatgttgcgatttttttaggcagaaataat

SEQ ID NO: 640799 - DNA, 75 bp, synthetic construct
  source 1..75: mol_type = other DNA
tctcaacgatacgaaaccctacggtaacattctcgattttcgtcaacaacaaaagtcggtggaaggggccattgc

SEQ ID NO: 640800 - DNA, 75 bp, synthetic construct
  source 1..75: mol_type = other DNA
aaaaaaactttagggaaaagttcgaaactctcaataaggtgcatctgaccgataacgagtttcagcgtctgcttg

SEQ ID NO: 640801 - DNA, 75 bp, synthetic construct
  source 1..75: mol_type = other DNA
aaaaaagacgctggcctgccgtttttcttcccgttgatcacccattcccagcccctcaatcgaggggcttttttt

SEQ ID NO: 640802 - DNA, 75 bp, synthetic construct
  source 1..75: mol_type = other DNA
cgccttcttcgtggtgctggtttcactgctattacagggaacatcactctcgtgggcagcgaaaaaagccaaagt

SEQ ID NO: 640803 - DNA, 75 bp, synthetic construct
  source 1..75: mol_type = other DNA
ttctgagtaaaggaatgtctcgggaagacgttgcagagatggcaaatttaccccttgccgagattgataagctga

SEQ ID NO: 640804 - DNA, 75 bp, synthetic construct
  source 1..75: mol_type = other DNA
accacgataagctgccgctggtggtgccgattctgttttatcagggcgaagccacgccttacccactctcgatgt

SEQ ID NO: 640805 - DNA, 75 bp, synthetic construct
  source 1..75: mol_type = other DNA
ccggagcttttagaaaaaagcggcgaaacaggcattgaagaaggttgcctgtcaatccctgaacaacgagcttta

SEQ ID NO: 640806 - DNA, 75 bp, synthetic construct
  source 1..75: mol_type = other DNA
gtaagacaggaattcgccctgcgttttctgagtaaagggatgtctcgggaagacgttgcagagatggcaaattta

SEQ ID NO: 640807 - DNA, 75 bp, synthetic construct
  source 1..75: mol_type = other DNA
acgcggtcatactgaacaagcggatttgttttacggtgtggtgagagacagggaaacgggaggggagtctatgat

SEQ ID NO: 640808 - DNA, 75 bp, synthetic construct
  source 1..75: mol_type = other DNA
atgcatgcggagacggctcgcgactttctggagatacatttgccagtggaattacgagaactttgtgacctcaac

SEQ ID NO: 640809 - DNA, 75 bp, synthetic construct
  source 1..75: mol_type = other DNA
cattcattcctgggatatcgacgggcgagtgctgttgtgcagctcgttcagtaaaagtattgcacctggcctgcg

SEQ ID NO: 640810 - DNA, 75 bp, synthetic construct
  source 1..75: mol_type = other DNA
cgccgatgacatcatcattaccagcggctgccataactcgatgtcgctggcgttaatggcggtgtgtaaaccggg

SEQ ID NO: 640811 - DNA, 75 bp, synthetic construct
  source 1..75: mol_type = other DNA
ccatgttcctggtgctggggctgttggttaacccaagcgatctgctgcctattgccattccggcgctcattttgt

SEQ ID NO: 640812 - DNA, 75 bp, synthetic construct
  source 1..75: mol_type = other DNA
aagtattgcaccaggcctgcgcgtgggttgggtcgcaccggggcgttatcacgataaactgatgcatatgaaata

SEQ ID NO: 640813 - DNA, 75 bp, synthetic construct
  source 1..75: mol_type = other DNA
atcgacgggcgagtgctgttgtgcagctcgttcagtaaaagtattgcgcgtgggttgggtcgcaccggggcgtta

SEQ ID NO: 640814 - DNA, 75 bp, synthetic construct
  source 1..75: mol_type = other DNA
tgttattacggttcgatgcagatgctgcgcggtatgggcgtgaaagtgattgaaatcccaaccgatccagaaact

SEQ ID NO: 640815 - DNA, 75 bp, synthetic construct
  source 1..75: mol_type = other DNA
atgcaggtatcgcgtcagccgtcgctattgcttcacagcctcaggttaagacaggtgattttatgatggtgtctg

SEQ ID NO: 640816 - DNA, 75 bp, synthetic construct
  source 1..75: mol_type = other DNA
catgccaacgctaacgccaacgccgctctgatgaacggcgtcaaactttccggtgctgtgacagaaaacaaaaat

SEQ ID NO: 640817 - DNA, 75 bp, synthetic construct
  source 1..75: mol_type = other DNA
cacaaaaaacggtttccgcacttggcgatgcccgcaccagcgcacattatcaggagatggttaacgccaggctgg

SEQ ID NO: 640818 - DNA, 75 bp, synthetic construct
  source 1..75: mol_type = other DNA
cagactgccgcccgatatcagagcatgattgacgccagacagacagccgctgccaatgcgcaacaggcacaagct

SEQ ID NO: 640819 - DNA, 75 bp, synthetic construct
  source 1..75: mol_type = other DNA
cagattactacgctcaataaccatttcgattctctgaaaaacgaagttgaggacaatcgtaaagaagccaatgcg

SEQ ID NO: 640820 - DNA, 75 bp, synthetic construct
  source 1..75: mol_type = other DNA
tttaacgctggaattcatacagtaattaaagcgggtgtctctgcagacacacaatctgatttcggcgcgggtgtc

SEQ ID NO: 640821 - DNA, 75 bp, synthetic construct
  source 1..75: mol_type = other DNA
agcctgaatggtttccgcgttatcgaagccatgtggacttacccgggcgtgtataacgctgacaatcctctaagc

SEQ ID NO: 640822 - DNA, 75 bp, synthetic construct
  source 1..75: mol_type = other DNA
catctgatggagaaatccgcgtcttctatgactcaatccacgccatgcaggagaatctgttcagaggaccactga

SEQ ID NO: 640823 - DNA, 75 bp, synthetic construct
  source 1..75: mol_type = other DNA
tttgaacgtgaattacagaagaatattctggacctgatgccccatgccattctctctgcagagaaaggttatatt

SEQ ID NO: 640824 - DNA, 75 bp, synthetic construct
  source 1..75: mol_type = other DNA
ctgtccaggcacatgagcaaattgaaagtctgagacaagattccgcacaaacgcagcaacagttaaccaacaccc

SEQ ID NO: 640825 - DNA, 75 bp, synthetic construct
  source 1..75: mol_type = other DNA
cggtgtctgtcggaacatcttttaatgccggaacgcatacggtacttaaagccggtatttctgcggatacgcaat

SEQ ID NO: 640826 - DNA, 75 bp, synthetic construct
  source 1..75: mol_type = other DNA
gtatgacaccctgaacagtcattatcctgattttgtttatggtggtttcccgggctatccgtatctggcacttca

SEQ ID NO: 640827 - DNA, 75 bp, synthetic construct
  source 1..75: mol_type = other DNA
taccgtgattaaagccggtgtctctgcggatacgcaatctgatttcggcgcgggtgtcggcgtgggatattcttt

SEQ ID NO: 640828 - DNA, 75 bp, synthetic construct
  source 1..75: mol_type = other DNA
gtgccgcaggaccgagacataaggagtgatcgtatgcatctaacgccagcaaaccatcctgacttatggacacaa

SEQ ID NO: 640829 - DNA, 75 bp, synthetic construct
  source 1..75: mol_type = other DNA
agggaaggcaaactggccggccgcaccgcactgtatgccgaaattgagcccaccgaccgcatgacgcagatgctg

SEQ ID NO: 640830 - DNA, 75 bp, synthetic construct
  source 1..75: mol_type = other DNA
catccggctttgtgccgtgatggccctggtctccggcacctggtcttcactttccggacttcctgatgagccgga

SEQ ID NO: 640831 - DNA, 75 bp, synthetic construct
  source 1..75: mol_type = other DNA
cggtttgtgcaagcggttggtgtctgtgccgccgcagttatctggcaggcgttggtgacggattactatccttca

SEQ ID NO: 640832 - DNA, 75 bp, synthetic construct
  source 1..75: mol_type = other DNA
gtgatctgatccttcaactcagcaaaagttcgatttattcaacaaagcccgaattgattcgcggtacgccaatta

SEQ ID NO: 640833 - DNA, 75 bp, synthetic construct
  source 1..75: mol_type = other DNA
aaatacaataaagcttacgcgggtgcgaggttaaccgcagaactgaaatatttattgcaagatgtcgaatccttc

SEQ ID NO: 640834 - DNA, 75 bp, synthetic construct
  source 1..75: mol_type = other DNA
ttcacagcctcaagttaagacaggtgattttatgatggtgtctgccggggcgggtacattcaacaatgaatctgc

SEQ ID NO: 640835 - DNA, 75 bp, synthetic construct
  source 1..75: mol_type = other DNA
gcacatgcccagtcaacggctgaccatgccaacgctaacgccaacaccgctctgatgaacggcgtcaaactatcc

SEQ ID NO: 640836 - DNA, 75 bp, synthetic construct
  source 1..75: mol_type = other DNA
gcacatgcccagtcaacggctgaccatgccaacgctaacgccaacaccgctctgataaacggcgtcaaactgtcc

SEQ ID NO: 640837 - DNA, 75 bp, synthetic construct
  source 1..75: mol_type = other DNA
gtgccggacggcctgtattctttctatctgcacagcgacgatcgcaccgacatcgcagcgatggcgaccatcagc

SEQ ID NO: 640838 - DNA, 75 bp, synthetic construct
  source 1..75: mol_type = other DNA
tacgtgcctattcgcgccgatgcaactattggtcgcgcagatgcaacggtcgactttactgtacagtacagtacg

SEQ ID NO: 640839 - DNA, 75 bp, synthetic construct
  source 1..75: mol_type = other DNA
tggcgcagacggatattgatgccaataaagccgccatcaccgacacccgcaatgatgtctccgcagtgcagtcag

SEQ ID NO: 640840 - DNA, 75 bp, synthetic construct
  source 1..75: mol_type = other DNA
tattacgataatccagatgagacgcctgccgaaaagttacgctgtgatacagtcgtgtcggtagcggataacttc

SEQ ID NO: 640841 - DNA, 75 bp, synthetic construct
  source 1..75: mol_type = other DNA
caggatttcagtggtttttctttattttttgcaacacggttgtggttcctcctacgctactttctgcttttcagt

SEQ ID NO: 640842 - DNA, 75 bp, synthetic construct
  source 1..75: mol_type = other DNA
tgtcagttttgcattgataattttgctgcgccgtgttctgtttaatgaccttactccaccctggttaaatgaaaa

SEQ ID NO: 640843 - DNA, 75 bp, synthetic construct
  source 1..75: mol_type = other DNA
gctggtggtggtatttttgttctggttagttcttcctcaactctggcgcaggcttctgactgcctttgccggatg

SEQ ID NO: 640844 - DNA, 75 bp, synthetic construct
  source 1..75: mol_type = other DNA
atgtgctgcgcgttcttaataagcaagcgggagtatacgacttgctgtcggaagcgtttatggaagtgaaagggc

SEQ ID NO: 640845 - DNA, 75 bp, synthetic construct
  source 1..75: mol_type = other DNA
ttttttgcctgatggacaacgtaacgcgattcgcctggaacgcctgaaagataagctgggcaatcgctctaatgc

SEQ ID NO: 640846 - DNA, 75 bp, synthetic construct
  source 1..75: mol_type = other DNA
tgtcatgagcaacaccacccgcgcagagcgtctggaagatggctcttatcggctggtggggcataaatggttttt

SEQ ID NO: 640847 - DNA, 75 bp, synthetic construct
  source 1..75: mol_type = other DNA
agggtggatggcatcaagcaataagggtgaaaacatctatttcacatattgcggaggaatgacgttgtcgaacag

SEQ ID NO: 640848 - DNA, 75 bp, synthetic construct
  source 1..75: mol_type = other DNA
tcgataaaatgaatctcaattctcatactgttaaatgtgtaggttcattcacaagaggagtagatttcactttat

SEQ ID NO: 640849 - DNA, 75 bp, synthetic construct
  source 1..75: mol_type = other DNA
atcctctcaaggggagactaatattaagctaatatttactgaaaagaaaagtctggccagaaaaacattaaactt

SEQ ID NO: 640850 - DNA, 75 bp, synthetic construct
  source 1..75: mol_type = other DNA
ttgaagtggattccacttagtgattatactggaatccagttgagtgtttatcactcaatgcaaacgaggctgaaa

SEQ ID NO: 640851 - DNA, 75 bp, synthetic construct
  source 1..75: mol_type = other DNA
gctgtagggatgcctcaatgccactcactacttcatgtggaaatctggcattcagttgctgtgacttattgttaa

SEQ ID NO: 640852 - DNA, 75 bp, synthetic construct
  source 1..75: mol_type = other DNA
ttcacatattgcggaggaatgacgttgtcgaacagaatatatctagacgttaaaagtggaaagacttttagataa

SEQ ID NO: 640853 - DNA, 75 bp, synthetic construct
  source 1..75: mol_type = other DNA
cgataaccatgacctttgccgccatgccattgttgttacagatgctacctgcgccgtttaaggactggagcacgc

SEQ ID NO: 640854 - DNA, 75 bp, synthetic construct
  source 1..75: mol_type = other DNA
cgttctggttgtggtgacaattggagcggtatttatgcgttatttcatcggccaaccgcttcaatggacagaaga

SEQ ID NO: 640855 - DNA, 75 bp, synthetic construct
  source 1..75: mol_type = other DNA
atgcgcaatttgctgggtcttttgctgattctggtcgctgcaatgtcagcgggctggcaggcgcatgactggcac

SEQ ID NO: 640856 - DNA, 75 bp, synthetic construct
  source 1..75: mol_type = other DNA
gggctggcaggcgcatgactggcacgacgcaaagctgaaactcgctgccagtgaagcggcagaacaaacgcgcca

SEQ ID NO: 640857 - DNA, 75 bp, synthetic construct
  source 1..75: mol_type = other DNA
atgaactacgagattaagcaggaagataaacgtaccgttgcaggtttccatcttgttggcccgtgggagcagacg

SEQ ID NO: 640858 - DNA, 75 bp, synthetic construct
  source 1..75: mol_type = other DNA
tcagtatgcggtggcggttgcacgcgtagtgggtgatgactttgctaaaccctggtatcagttctttaatactct

SEQ ID NO: 640859 - DNA, 75 bp, synthetic construct
  source 1..75: mol_type = other DNA
tcagtatgctgtggcggtagctcgcgtaaccgttgatgattttgccaaacactggtatcagttttttaatagtct

SEQ ID NO: 640860 - DNA, 75 bp, synthetic construct
  source 1..75: mol_type = other DNA
aaccgagagtgaggatgagtttgccgaatcagccaatgccgttaaggcaatgaagcagaaaggcgcgttctcatt

SEQ ID NO: 640861 - DNA, 75 bp, synthetic construct
  source 1..75: mol_type = other DNA
cgtggtgtcagatgatgtttgatacgcgcggcggcgtgcggttgtcagagcagatccagaatgatttattgctgc

SEQ ID NO: 640862 - DNA, 75 bp, synthetic construct
  source 1..75: mol_type = other DNA
tcgtcgattacagcagcaactgcgcaaacctactgaagagcttgggcgagagatcactcatcagctattcctgct

SEQ ID NO: 640863 - DNA, 75 bp, synthetic construct
  source 1..75: mol_type = other DNA
gagacgctggagtacaaacgccagctggctgagctgggcgacaaggttgaataccagaaacgcctgaatgagctg

SEQ ID NO: 640864 - DNA, 75 bp, synthetic construct
  source 1..75: mol_type = other DNA
acggtgggggacgatgccgggaaggtggaaaaagcctttgaagggattgcagcagatccggtgaaggcgctggcc

SEQ ID NO: 640865 - DNA, 75 bp, synthetic construct
  source 1..75: mol_type = other DNA
gaagccgctgaacgtaccctggcaggaaaaccagctgacggaatgcccgaagacactgccgagactggcaggccc

SEQ ID NO: 640866 - DNA, 75 bp, synthetic construct
  source 1..75: mol_type = other DNA
ccgctgccagctttgctgaaagcgacggtacggtgatcaacaacgaaggtcgtgctcaacgtttcttccaggttt

SEQ ID NO: 640867 - DNA, 75 bp, synthetic construct
  source 1..75: mol_type = other DNA
gcgtgaccaatctgaccgaattgctgccggaaattacccatgagcaggtttgcgaggccataaccgaggcctttt

SEQ ID NO: 640868 - DNA, 75 bp, synthetic construct
  source 1..75: mol_type = other DNA
tccggataaaaagaaactggcggcgaaaggcattacctcagtgcgttcccgcgtgaccaacctcaccgagctgct

SEQ ID NO: 640869 - DNA, 75 bp, synthetic construct
  source 1..75: mol_type = other DNA
aaccaaagatcgcggcttccaccacggcaccttgctactcaatgccgacctcagccgcctggcaaactatctcaa

SEQ ID NO: 640870 - DNA, 75 bp, synthetic construct
  source 1..75: mol_type = other DNA
ggctgcatcgggcagtgattgtcctgttctgtcttgccttgttagtggcactgatgcagggggcgtcatggttta

SEQ ID NO: 640871 - DNA, 75 bp, synthetic construct
  source 1..75: mol_type = other DNA
ctgttggttgacttcccggaccaggaaaaagagctacgggagttgtcgacgtggatagcgggggcggtaaggtaa

SEQ ID NO: 640872 - DNA, 75 bp, synthetic construct
  source 1..75: mol_type = other DNA
aaacctttgcccgtcagagtagctgggaatggaacttcggtcaggctcctgcattctcgcatctgctggatgaac

SEQ ID NO: 640873 - DNA, 75 bp, synthetic construct
  source 1..75: mol_type = other DNA
atgaaaaggaatttattatcttccgctattatagtcgccatcatgtccctcggtctgacgggttgtgatgataaa

SEQ ID NO: 640874 - DNA, 75 bp, synthetic construct
  source 1..75: mol_type = other DNA
ttaattcggcaggccagtatcaactcgaggctaaaaaatacgttcgccgcatcagagataaagtcccgtactctg

SEQ ID NO: 640875 - DNA, 75 bp, synthetic construct
  source 1..75: mol_type = other DNA
aaagaaacttcaggacgcaaacacaagctggatggtcgaggactcatatccgaaatcattacaagcttataatga

SEQ ID NO: 640876 - DNA, 75 bp, synthetic construct
  source 1..75: mol_type = other DNA
acggtccatgccgcgttcggtggttcaacaaacctgctgttacacatcccggcaattgctcaccaggcaggttgc

SEQ ID NO: 640877 - DNA, 75 bp, synthetic construct
  source 1..75: mol_type = other DNA
ggtgatgctgcatcttcgtagtctgggattgctgcatgaagacgtgatgacggtcaccggcagcacgctgaaaga

SEQ ID NO: 640878 - DNA, 75 bp, synthetic construct
  source 1..75: mol_type = other DNA
ggtcgatgaacaagcggttttcgacgaaaaaatggatgtctatatcaagtgctacaacaagttacagatccctgt

SEQ ID NO: 640879 - DNA, 75 bp, synthetic construct
  source 1..75: mol_type = other DNA
tgcgaggccataaccgaggcctttttcgcccattatggcgagcgtgtagaagcggaaatcatctccccggacaaa

SEQ ID NO: 640880 - DNA, 75 bp, synthetic construct
  source 1..75: mol_type = other DNA
ggcagccatctaccagaccgagcagaagctacgccagggggatgaaaaacttgcgcagggcgcgcgtcagcaggc

SEQ ID NO: 640881 - DNA, 75 bp, synthetic construct
  source 1..75: mol_type = other DNA
ggcagctatatatcagtccgaacaaaagctgcgacagggggatgaaaagcttcgtcagagcgctcgccagcaagc

SEQ ID NO: 640882 - DNA, 75 bp, synthetic construct
  source 1..75: mol_type = other DNA
cattgcccactacgaatgtggctcgcgacatgatgaagaacggcgcagaagaacacctgcggttagcaattcaaa

SEQ ID NO: 640883 - DNA, 75 bp, synthetic construct
  source 1..75: mol_type = other DNA
gtagggatgatggcgggtgcgattgagatgctggcggcaggcgtggtgttaatgatcgcgtcgatgattgcgggt

SEQ ID NO: 640884 - DNA, 75 bp, synthetic construct
  source 1..75: mol_type = other DNA
gttacagagtgtgctaatgacagccagataactgcgctgttaaattacattttactgactggcgatgaagcgcgt

SEQ ID NO: 640885 - DNA, 75 bp, synthetic construct
  source 1..75: mol_type = other DNA
ggttataccgatgctattttatcacggtagccgtagtccttatccctggtccctgtgctggctggacgaatttgc

SEQ ID NO: 640886 - DNA, 75 bp, synthetic construct
  source 1..75: mol_type = other DNA
atccctaccgaagaaaaatttattctagttaatcaacttggtgaggggcgtttgttatcagcaccaataaaatta

SEQ ID NO: 640887 - DNA, 75 bp, synthetic construct
  source 1..75: mol_type = other DNA
tgcctgtaccgcgcagatatgctgcaacaggagtgtgaagcgctgttggttgacttcccggaacaggaaaaagag

SEQ ID NO: 640888 - DNA, 75 bp, synthetic construct
  source 1..75: mol_type = other DNA
gcacttcgacgttgaaaaaggccatatcacccgcgcccaggtgtttaccgatagcctcaaccccgcaccgctgga

SEQ ID NO: 640889 - DNA, 75 bp, synthetic construct
  source 1..75: mol_type = other DNA
tcgcaggtaaagacaacaaaaaaaagcaccaaatcacctgaaaaaaaacgggcgggaagagcaacaaaaaagctg

SEQ ID NO: 640890 - DNA, 75 bp, synthetic construct
  source 1..75: mol_type = other DNA
aaccagttggctctcttccaccgggataatccaggccgcaaaagatggcgtcagcaaaacgctgaataatttgac

SEQ ID NO: 640891 - DNA, 75 bp, synthetic construct
  source 1..75: mol_type = other DNA
ttcaacgatacctggctggcggcggagtggggccatccttccgacaacctcggcggcattctggcaacggcggac

SEQ ID NO: 640892 - DNA, 75 bp, synthetic construct
  source 1..75: mol_type = other DNA
acacttacacccgcctgatgcacgtaaccgatgataacggtaacgaacaaacaattgttttagatggtaattgtg

SEQ ID NO: 640893 - DNA, 75 bp, synthetic construct
  source 1..75: mol_type = other DNA
ccccggtaatccggaggaatcttataacgaacaagccagaatcgcagcgactctcgacaaatttgacgtcttaac

SEQ ID NO: 640894 - DNA, 75 bp, synthetic construct
  source 1..75: mol_type = other DNA
gaagaccttaggggaaattggccattttacccgaggtaaacgttttgttaaaacagatatgctttctgaaggtta

SEQ ID NO: 640895 - DNA, 75 bp, synthetic construct
  source 1..75: mol_type = other DNA
aggaaagatatcagcaattaacgcaaatgggttatccaaggtaaaaatacctatgctttcagcgaaggaacaagc

SEQ ID NO: 640896 - DNA, 75 bp, synthetic construct
  source 1..75: mol_type = other DNA
tgatggcgcagaggcacatcgagcaagccagctgtctttatttggttgcggtaattcgctttgcttaaaatggtg

SEQ ID NO: 640897 - DNA, 75 bp, synthetic construct
  source 1..75: mol_type = other DNA
gagcagctggccggatggggccttgagagtgctgaagtaatgttgtttcagcaaacgctggcaccgttgtttctt

SEQ ID NO: 640898 - DNA, 75 bp, synthetic construct
  source 1..75: mol_type = other DNA
aaaactggatcccaaaaccatggtgaacaacattgaccattctctggcaaatgaaggtattccctctgcccctga

SEQ ID NO: 640899 - DNA, 75 bp, synthetic construct
  source 1..75: mol_type = other DNA
ttaccgcattgttcatggtactcgtgttgcgctggcgttcttgctcacctttctcatcattcgcctgtttactat

SEQ ID NO: 640900 - DNA, 75 bp, synthetic construct
  source 1..75: mol_type = other DNA
gccaggtgtttccgctgacggcaggacggaatgtatttcttgccggaatggactggaaaacactgcccgcaagcc

SEQ ID NO: 640901 - DNA, 75 bp, synthetic construct
  source 1..75: mol_type = other DNA
taacccaggcggtacgcgcaccgcaatgcgggccagtgccttcccgaccgaagatccacagaaacttaaaacccc

SEQ ID NO: 640902 - DNA, 75 bp, synthetic construct
  source 1..75: mol_type = other DNA
gttttactaaagcagattatgtagaagatggtggtatcagtgtaatccattatggtgagatatatacacgatatg

SEQ ID NO: 640903 - DNA, 75 bp, synthetic construct
  source 1..75: mol_type = other DNA
aaattatgattccggttccatatcctaaagatcacgaaaaatcacttaaggaacaagctcgcattgtcgaaatac

SEQ ID NO: 640904 - DNA, 75 bp, synthetic construct
  source 1..75: mol_type = other DNA
tcaccgacaaggatggcgaaaaatacggtcgcgcaaacaaactttctggtctggataaggcactggctgccgggg

SEQ ID NO: 640905 - DNA, 75 bp, synthetic construct
  source 1..75: mol_type = other DNA
cgagttgcttttgatgctgaggttcaggtagccaggtttggcttcaagcttcttcaattggtcacgggcggtatc

SEQ ID NO: 640906 - DNA, 75 bp, synthetic construct
  source 1..75: mol_type = other DNA
ctatcaaagatgcgctttcatggattttttattgccttaccttctggtatgtatttacgtctttaacctcattac

SEQ ID NO: 640907 - DNA, 75 bp, synthetic construct
  source 1..75: mol_type = other DNA
actttagctgaatctgaattaggaattgcaaaggattctcatggtgcgttatgggaggctttcttaaataaaggt

SEQ ID NO: 640908 - DNA, 75 bp, synthetic construct
  source 1..75: mol_type = other DNA
atatgaggccactggcgtcattgtttgccagagtgatagcactgtttgtgctgcgacatggaagcctaccggaac

SEQ ID NO: 640909 - DNA, 75 bp, synthetic construct
  source 1..75: mol_type = other DNA
acactatcgaagaaattctttatgtccgtgatttagttgatagtcattgtgcccgacttgcagcactggctaata

SEQ ID NO: 640910 - DNA, 75 bp, synthetic construct
  source 1..75: mol_type = other DNA
ccagtgccgagcagtttacgctggacggtaactcaaatctggctctatctgtcgtagctgaggcgctctccatca

SEQ ID NO: 640911 - DNA, 75 bp, synthetic construct
  source 1..75: mol_type = other DNA
aatgccatttgtgaagctcacggcgatctgacgcagtacctgcgtaaacatgctgaaaagcagaacaagggccag

SEQ ID NO: 640912 - DNA, 75 bp, synthetic construct
  source 1..75: mol_type = other DNA
tggaaagggcgactctgaattagatggcgcttctactttggctgattctgaattgggaattgaaaaggattctca

SEQ ID NO: 640913 - DNA, 75 bp, synthetic construct
  source 1..75: mol_type = other DNA
gaaggaaaatattaattctttccgctgtcctcatttctcctttttcacatgctgagtcatgggaaagcattacta

SEQ ID NO: 640914 - DNA, 75 bp, synthetic construct
  source 1..75: mol_type = other DNA
tatcccagcttttggatcctcacaccagtcaccacccatttcggcacctcttgtttgcctattggctatttagag

SEQ ID NO: 640915 - DNA, 75 bp, synthetic construct
  source 1..75: mol_type = other DNA
tataggtgatattcaacgatctattcctgatgaaaaaccttccgagcctacgcctgaagagatttgtgaagctaa

SEQ ID NO: 640916 - DNA, 75 bp, synthetic construct
  source 1..75: mol_type = other DNA
ttttgcaggggaggtttaccagattgacattggttgcgataaattattaaccattaaaaatgcgctttcttgggt

SEQ ID NO: 640917 - DNA, 75 bp, synthetic construct
  source 1..75: mol_type = other DNA
caaccaagatggtactaaacaaactgtttattatattgatgcaaccatgcaggcttcttcctgtcagggagctaa

SEQ ID NO: 640918 - DNA, 75 bp, synthetic construct
  source 1..75: mol_type = other DNA
gttgatcgcctgccgagcgcggcattaacgtttacaccccatgatggacgcggtagccaccttgagtcattagcc

SEQ ID NO: 640919 - DNA, 75 bp, synthetic construct
  source 1..75: mol_type = other DNA
tacaggttatgccatgtctttcgcagattggcagtggttcgctgccggttgatcgcctgccgagcgcggcattaa

SEQ ID NO: 640920 - DNA, 75 bp, synthetic construct
  source 1..75: mol_type = other DNA
atcctgtaaacattaacggaacgacctgggtagaaggtggcggttgtaaagcccacgcctgcggctgggactata

SEQ ID NO: 640921 - DNA, 75 bp, synthetic construct
  source 1..75: mol_type = other DNA
cctcgagtacgatctggacgacgccggacgcggacatcgcgatcgggcgctggcgcagctgctgtgccgtattac

SEQ ID NO: 640922 - DNA, 75 bp, synthetic construct
  source 1..75: mol_type = other DNA
attcgtgacagccagacgctgcctgcgtggtgtgaaaactgggcgcaagaagtcgatgcccggttgacgaaagaa

SEQ ID NO: 640923 - DNA, 75 bp, synthetic construct
  source 1..75: mol_type = other DNA
aagagatgatcgcctgcttacagaaccatccgctgaaacgcgcgttacgcgccgataaaatgactctcgccgcgc

SEQ ID NO: 640924 - DNA, 75 bp, synthetic construct
  source 1..75: mol_type = other DNA
ccgattattgggctggaagtaatagccgtactgattataacctcggctacagtaagggcgtatcgtggggcagct

SEQ ID NO: 640925 - DNA, 75 bp, synthetic construct
  source 1..75: mol_type = other DNA
tggggcttgggatcaacaccagcatcggtgcctttgcggtggacgtcacacatgcccgcaccgaaattcctgacg

SEQ ID NO: 640926 - DNA, 75 bp, synthetic construct
  source 1..75: mol_type = other DNA
tgaacagcatctggagatctcggttccacaggcgtacgtctataaaacttatggcggttatgttgatccttcact

SEQ ID NO: 640927 - DNA, 75 bp, synthetic construct
  source 1..75: mol_type = other DNA
cgaaacacacgttcaggaacacggtgcctatattctttccggtcagggggtttataacctcgacaatagctggat

SEQ ID NO: 640928 - DNA, 75 bp, synthetic construct
  source 1..75: mol_type = other DNA
cgccgttgatgtgactcactcccgtacggaaattccgtctgataagacatatcaggggcagagctatcgggtgac

SEQ ID NO: 640929 - DNA, 75 bp, synthetic construct
  source 1..75: mol_type = other DNA
ctacatatccttcagccggataacagtgtagtgctaatcaagcgcgatagcgaagatggcgactgcctggatatg

SEQ ID NO: 640930 - DNA, 75 bp, synthetic construct
  source 1..75: mol_type = other DNA
aatgtgatagcaaaatgaatgccagggaacgcagaaggataaaaagagaaaacgaaagaaaatcatcacctgcaa

SEQ ID NO: 640931 - DNA, 75 bp, synthetic construct
  source 1..75: mol_type = other DNA
cacgctgatgtatgtatgccgcgacatgcgcacacaggtgacctcgaagtttggacggatgaagctggcagatga

SEQ ID NO: 640932 - DNA, 75 bp, synthetic construct
  source 1..75: mol_type = other DNA
cttgacactgacggccaagaatgccgggttactgggcaatggtattgatatcaggctgaattatctcggtgttca

SEQ ID NO: 640933 - DNA, 75 bp, synthetic construct
  source 1..75: mol_type = other DNA
gccaacacggcgaccgctacacagcgaacgctgctgattggtcagatgctggcatcgggctctgcacaggaaaaa

SEQ ID NO: 640934 - DNA, 75 bp, synthetic construct
  source 1..75: mol_type = other DNA
aaatcactccataaagttgatttgaaattctttgttcaggttgacggtgaaatggtagaagcaacaggaatttga

SEQ ID NO: 640935 - DNA, 75 bp, synthetic construct
  source 1..75: mol_type = other DNA
atgactactaaagctactcgcggtcgtcctgcccgttttaacgctgaacagatggctgatattgcctacgcttac

SEQ ID NO: 640936 - DNA, 75 bp, synthetic construct
  source 1..75: mol_type = other DNA
cacactgatgtatgtgatgcgctccatgaagacgcaggtgacgtcgaagatggggcggatgaagctggcggacga

SEQ ID NO: 640937 - DNA, 75 bp, synthetic construct
  source 1..75: mol_type = other DNA
tgtgacgatcatgatactgcccagcaaattatcatcgatggcctgaaacgccagtacgacgatcgcctactgctg

SEQ ID NO: 640938 - DNA, 75 bp, synthetic construct
  source 1..75: mol_type = other DNA
acccggaacagcttgaaaaagtgctgcgccagcaaatcaaaaacgtcggcgatcgcccgctgttgtggagcacac

SEQ ID NO: 640939 - DNA, 75 bp, synthetic construct
  source 1..75: mol_type = other DNA
ggaacgcagaaggataaaaagagaaaacgaaagaaaatcatcacctgcaatcaataaaacagacaatgtggataa

SEQ ID NO: 640940 - DNA, 75 bp, synthetic construct
  source 1..75: mol_type = other DNA
ggactattggcaatatatattccacattggaacacggaaaagaatattctgaacaggaactaataaaaatgatta

SEQ ID NO: 640941 - DNA, 75 bp, synthetic construct
  source 1..75: mol_type = other DNA
tgccgacgctctggacaggctgcacaagccggaagaagccgcagcgatgcgccgcgacggcttgatgttaacgct

SEQ ID NO: 640942 - DNA, 75 bp, synthetic construct
  source 1..75: mol_type = other DNA
gatcgtccgttattatggagcacgctgggacaatcgctgatgaagcacggtgaatggcaggaagcgtcaatcgcc

SEQ ID NO: 640943 - DNA, 75 bp, synthetic construct
  source 1..75: mol_type = other DNA
gataacaattatatatctggccttttaggacttgggatcaatacagatatcggtgcctttgcggtagacgtcacg

SEQ ID NO: 640944 - DNA, 75 bp, synthetic construct
  source 1..75: mol_type = other DNA
atcgccgtagcgcctcccgcctggcggaacccgcaccaacaggtgagcaactgcaaaacatcctgcgtgcgggga

SEQ ID NO: 640945 - DNA, 75 bp, synthetic construct
  source 1..75: mol_type = other DNA
agcattgacgaaatttatgctcttgttgacgacctgattaccgcccacggcaactggctacccggctggttgcac

SEQ ID NO: 640946 - DNA, 75 bp, synthetic construct
  source 1..75: mol_type = other DNA
tttattaagccaggccgtgaggatttgattgaacgttataaagtgccgctggatgagtacccgaaacgctgcgtt

SEQ ID NO: 640947 - DNA, 75 bp, synthetic construct
  source 1..75: mol_type = other DNA
aaccctgctatgcccggcagctatgacgtaaaagtctacgtcaatgaaagtgccgcaacgagcatgaccgtagaa

SEQ ID NO: 640948 - DNA, 75 bp, synthetic construct
  source 1..75: mol_type = other DNA
caggataaaattgtcggttttctctacctcggtacgccgcagttgaaagcatctacgtcgataaacgtcccggac

SEQ ID NO: 640949 - DNA, 75 bp, synthetic construct
  source 1..75: mol_type = other DNA
accttggtacgccgcagctgaaagcatctacgtcgataaacgtcccggacccgacgccgtttgtaacttatttct

SEQ ID NO: 640950 - DNA, 75 bp, synthetic construct
  source 1..75: mol_type = other DNA
cgcatattgccctgatggacattgatcccacccgcctggaagagtcgcatattgtggtgcgtaagcttatggatt

SEQ ID NO: 640951 - DNA, 75 bp, synthetic construct
  source 1..75: mol_type = other DNA
atggcgttgttaatcactaaaaaatgcatcaattgtgatatgtgtgaacccgaatgcccgaatgaggcgatttca

SEQ ID NO: 640952 - DNA, 75 bp, synthetic construct
  source 1..75: mol_type = other DNA
caccaatgatcgtgatgtaagaacgattgttgccctggggctggtgatggatttcgatgctcgaagtgtcatcac

SEQ ID NO: 640953 - DNA, 75 bp, synthetic construct
  source 1..75: mol_type = other DNA
tggcatttcagattggcggttatgaaccctgtacggtcaccgattttgaggtttgtaagcgtcacggtctggaac

SEQ ID NO: 640954 - DNA, 75 bp, synthetic construct
  source 1..75: mol_type = other DNA
tttattaagccaggtcgtgaggatttgattgagcgttataaagtaccgctggatgagtacccgaaacgctgcgtc

SEQ ID NO: 640955 - DNA, 75 bp, synthetic construct
  source 1..75: mol_type = other DNA
tccaactcgcctggaagagtcgcacattgtggtgcgtaagctgatggattcagcaggagccagcggcaaaattac

SEQ ID NO: 640956 - DNA, 75 bp, synthetic construct
  source 1..75: mol_type = other DNA
gcgcacgcctgtacagcgacgaccgcatgttaccgccttccatgaccagttttgccccggtgatccgcggcgtgg

SEQ ID NO: 640957 - DNA, 75 bp, synthetic construct
  source 1..75: mol_type = other DNA
cagcagtaacgacacgctggtgttaatcaacgccctaggtgctaaaggcgcacgaatcaataacagtaataacga

SEQ ID NO: 640958 - DNA, 75 bp, synthetic construct
  source 1..75: mol_type = other DNA
cctcaggcttatgttctgaaaaactacggtggctatgtcgacccctcactgtgggagtcagggattaacgctgcc

SEQ ID NO: 640959 - DNA, 75 bp, synthetic construct
  source 1..75: mol_type = other DNA
cggtgcttttgcggtagacgttacccactcccgtgctgagattccggatgataaaacctatcaggggcaaagtta

SEQ ID NO: 640960 - DNA, 75 bp, synthetic construct
  source 1..75: mol_type = other DNA
ttatcagcaaacagcggatcaacaagaattaactcaaactattattctcaatggaattagttgtcagatacagta

SEQ ID NO: 640961 - DNA, 75 bp, synthetic construct
  source 1..75: mol_type = other DNA
tgagaagcaggattatggttcattctatctctctagtgattggtcagattactgggcttccggacaaaatcgcag

SEQ ID NO: 640962 - DNA, 75 bp, synthetic construct
  source 1..75: mol_type = other DNA
ccgtggaatatgacagttccttcttaatgggaactggcgcatcaacgattgatgttaaacgttatgctcaaggca

SEQ ID NO: 640963 - DNA, 75 bp, synthetic construct
  source 1..75: mol_type = other DNA
gaaggcatcaatgccgcaatgctctcttacacccttaacggctggcgcagtgaatcccccaatcaaaccacagaa

SEQ ID NO: 640964 - DNA, 75 bp, synthetic construct
  source 1..75: mol_type = other DNA
ctcatccgcatcgccttacaaggaaaataacatcagcctggatattgaagggctggaaaacgatgtcgagctaaa

SEQ ID NO: 640965 - DNA, 75 bp, synthetic construct
  source 1..75: mol_type = other DNA
gacaattcgtggtgtagcaaatactaacgccaaagtcagcatcacccagagtggatacaaaatttatgaaaccac

SEQ ID NO: 640966 - DNA, 75 bp, synthetic construct
  source 1..75: mol_type = other DNA
ggttataagatctatgaaaccaccgttccgcccggtgagtttgttatagacgacctcagcccctccggctttggt

SEQ ID NO: 640967 - DNA, 75 bp, synthetic construct
  source 1..75: mol_type = other DNA
gggttacaccggcattcagttcaccgacaacaactatcttgccggactgttaggtgtgggtattaacaccagcat

SEQ ID NO: 640968 - DNA, 75 bp, synthetic construct
  source 1..75: mol_type = other DNA
acagcgtcagcctgcaacgcacatacgatgaagacaataagaaggatgattcagtttacctgagcgtgaccattc

SEQ ID NO: 640969 - DNA, 75 bp, synthetic construct
  source 1..75: mol_type = other DNA
cagataaatactgttttacagaacggaacgaatcgccccgtcttcgccggcagtggcaggatgttctggaggagt

SEQ ID NO: 640970 - DNA, 75 bp, synthetic construct
  source 1..75: mol_type = other DNA
tgccggatacataccggtatcatctgtctcatcgtattcgccgggtgtttgggactgaaaagacatcatcgccat

SEQ ID NO: 640971 - DNA, 75 bp, synthetic construct
  source 1..75: mol_type = other DNA
tgccggatacataccggtatcatctgtctcatcgtattcgccggttgcttgggagtgaaaagacatcatcgccat

SEQ ID NO: 640972 - DNA, 75 bp, synthetic construct
  source 1..75: mol_type = other DNA
atgcgtacacgaattgactatctggcggataaatacagttttacagaacggaacgaatcgccccgtcttcgccag

SEQ ID NO: 640973 - DNA, 75 bp, synthetic construct
  source 1..75: mol_type = other DNA
gtggtgaccacgaccgtggaggtgcacgataacctgacgggaacaacccgcaaaataccggcataccatctctga

SEQ ID NO: 640974 - DNA, 75 bp, synthetic construct
  source 1..75: mol_type = other DNA
aactgccttttcgcttgttgcttacccggacaccacaactgattgccgcgctgcgtgaagaatgggacatcagtc

SEQ ID NO: 640975 - DNA, 75 bp, synthetic construct
  source 1..75: mol_type = other DNA
agaaaaatgtggtgttcaacgataaacgttttggctgcgtgtacagcctgaaggccagcctttcgggtgtgccag

SEQ ID NO: 640976 - DNA, 75 bp, synthetic construct
  source 1..75: mol_type = other DNA
gaatgggaagacggaaagcatcaaattcctgacaccattcgcgtgcgcgactatcgcggcaaactgatagtaccg

SEQ ID NO: 640977 - DNA, 75 bp, synthetic construct
  source 1..75: mol_type = other DNA
ttacaaggtgttgcaattgcagggatatcgcctctctgcttacgaagcattttatcttgcaactctgggtggtgc

SEQ ID NO: 640978 - DNA, 75 bp, synthetic construct
  source 1..75: mol_type = other DNA
cgacaatatctttatgaatgtcatgacgtttaacactcaatcgcccgttgagaaaaaagcggagctgcacgagca

SEQ ID NO: 640979 - DNA, 75 bp, synthetic construct
  source 1..75: mol_type = other DNA
gtcggcagacagaggccgggccagaagagcgactgcgtattgcactgctgaatgtggattatgtcaccagttttg

SEQ ID NO: 640980 - DNA, 75 bp, synthetic construct
  source 1..75: mol_type = other DNA
ctgcgtgaagaatgggacatcagtcagaaaaatgtggtgtttaacgataaacggtttggctgcgtgtacagcctg

SEQ ID NO: 640981 - DNA, 75 bp, synthetic construct
  source 1..75: mol_type = other DNA
gaggcggggttgctggtgactgcactggacggcctgttctggttcggtagtcagcgtattgcggctgatgtcctg

SEQ ID NO: 640982 - DNA, 75 bp, synthetic construct
  source 1..75: mol_type = other DNA
cctgatcgcttctatcgcgtttcttaattttgcgattcccagccatgattttagtacaattctcattagctatat

SEQ ID NO: 640983 - DNA, 75 bp, synthetic construct
  source 1..75: mol_type = other DNA
cgcagattcaggctaaaggtactcacgaaacgcctgagcgcatagaagacgctaagccaattaagttcatggcac

SEQ ID NO: 640984 - DNA, 75 bp, synthetic construct
  source 1..75: mol_type = other DNA
gtacgcgaatgagtttggacataagcaaccagaaactggtgtatgtcttccaaatgtagctctttacgcagcagg

SEQ ID NO: 640985 - DNA, 75 bp, synthetic construct
  source 1..75: mol_type = other DNA
aaagaaatcttcggagatttagaatttgacttagatatagtaaaaagaaggataaaggaattagcctatttaaac

SEQ ID NO: 640986 - DNA, 75 bp, synthetic construct
  source 1..75: mol_type = other DNA
ataaagctcaaagtattaaagttttatcaggtttagaaggtgttagaacaagacctgcgatgtatatagggtcta

SEQ ID NO: 640987 - DNA, 75 bp, synthetic construct
  source 1..75: mol_type = other DNA
ttgcgccgttattggttgggcagttattgagtccattctttggctgctttctttcattcacataactattggttg

SEQ ID NO: 640988 - DNA, 75 bp, synthetic construct
  source 1..75: mol_type = other DNA
ttgggaatgaaaacacatcattgccatatcagcagattgcccgggaagtgaaagcgccccgtgaacggctgaagc

SEQ ID NO: 640989 - DNA, 75 bp, synthetic construct
  source 1..75: mol_type = other DNA
tcagcgcattgcggctgatatcctgagactgagaaagagcggaatgccggtggtgacaacgtccgtggaagcgag

SEQ ID NO: 640990 - DNA, 75 bp, synthetic construct
  source 1..75: mol_type = other DNA
ccggacaccacaactgattgccgcgctgcgtgaagaatgggacatcagccagaaaaatgtgatgttcaacgataa

SEQ ID NO: 640991 - DNA, 75 bp, synthetic construct
  source 1..75: mol_type = other DNA
ttgcgacatcatccgttgatatcagagaaaatttgactgaaacgacatgtcgtatccttgtttactttcttacct

SEQ ID NO: 640992 - DNA, 75 bp, synthetic construct
  source 1..75: mol_type = other DNA
ccgtattcgtcgcgtggttgggaatgaaaacacatcatcgccatatcagcaggttgcccgggaagtgaaagcgcc

SEQ ID NO: 640993 - DNA, 75 bp, synthetic construct
  source 1..75: mol_type = other DNA
ccgtgaacggctgaagtatgcgctggaggcggggttactggtgactgcactggacggcctgttctggtctggcag

SEQ ID NO: 640994 - DNA, 75 bp, synthetic construct
  source 1..75: mol_type = other DNA
acatgctgcaaacactgaacgaagcctacaaagtgttgcagttacagggctatcgtctctcagcatatgaagcgt

SEQ ID NO: 640995 - DNA, 75 bp, synthetic construct
  source 1..75: mol_type = other DNA
tggaaacggtcggtctggaaaaaacctttataatttggggcgcgattgcgctggtgatgattgtttttggcgcga

SEQ ID NO: 640996 - DNA, 75 bp, synthetic construct
  source 1..75: mol_type = other DNA
tcggtttatacctggagcctgtttaacggtgcactttccgccaaactggatgcaccggtaagccaggtggctttc

SEQ ID NO: 640997 - DNA, 75 bp, synthetic construct
  source 1..75: mol_type = other DNA
gtgaagtggttcccggagcgtaaaggtctgatatccgcgttcgctatcggttcttatggtctgggtagcctgggt

SEQ ID NO: 640998 - DNA, 75 bp, synthetic construct
  source 1..75: mol_type = other DNA
ggaagtgaaaaccagtaatggcgtggtggagaaggactacacactggcagagtctatgcgtaaaccgcaatactg

SEQ ID NO: 640999 - DNA, 75 bp, synthetic construct
  source 1..75: mol_type = other DNA
ctgttgattctgtcactggcgctctctacgaccattcgccaaccagggctcagagcgtttcgtgaggtgcatggt

SEQ ID NO: 641000 - DNA, 75 bp, synthetic construct
  source 1..75: mol_type = other DNA
ggaagtgaaaaccagcaatggtgtggtggagaaggattacacgctggcagagtcgatgcgtaaaccgcagtactg

SEQ ID NO: 641001 - DNA, 75 bp, synthetic construct
  source 1..75: mol_type = other DNA
tccaacctcgctgagtgtgaaaaaggcgtaaaaagtgctgtggcgttaacgcctgcgctgcaacctattgatggc

SEQ ID NO: 641002 - DNA, 75 bp, synthetic construct
  source 1..75: mol_type = other DNA
cgaagagctgcatgtggaagaggattatcagctttgtaacgccattgagaatgaacaaaccattatcatgaaacc

SEQ ID NO: 641003 - DNA, 75 bp, synthetic construct
  source 1..75: mol_type = other DNA
taccatctgccggtttgcatccggtattgatggatgcgttaacgctggcgttaaccgcctgcccacaagagaaat

SEQ ID NO: 641004 - DNA, 75 bp, synthetic construct
  source 1..75: mol_type = other DNA
gaaaattataaagacgacgcgtttgctaaaggaaaaattcttcaccagacgttgttgaagaatatcgaagccttc

SEQ ID NO: 641005 - DNA, 75 bp, synthetic construct
  source 1..75: mol_type = other DNA
gactggctgaaagattttaaacaggggccaacgggtaaagagagccttgtttatggcatctatggcattagtgaa

SEQ ID NO: 641006 - DNA, 75 bp, synthetic construct
  source 1..75: mol_type = other DNA
cggtctcacgggttgtgacgataaaaaatccgaaacagaaacgcccccgcctgccaatagtcaacctgccgcacc

SEQ ID NO: 641007 - DNA, 75 bp, synthetic construct
  source 1..75: mol_type = other DNA
aagagcaacttcaggacgcaaactcaagctggatggccgaagactcatttcccgagagcattatgcgagtacaac

SEQ ID NO: 641008 - DNA, 75 bp, synthetic construct
  source 1..75: mol_type = other DNA
ttgtccagattggcgaaccagaagagatctacgaacatccgaccacccgctacagtgctgaatttatcggttcgg

SEQ ID NO: 641009 - DNA, 75 bp, synthetic construct
  source 1..75: mol_type = other DNA
ggtgcatgtggcgctgcgtccggaaaaaatcatgctctgtgacgaaccgcctgctgatggctgcaattttgcagt

SEQ ID NO: 641010 - DNA, 75 bp, synthetic construct
  source 1..75: mol_type = other DNA
ccgatgggcgcgctggataaaaaattgcgtgaccggatgcagcttgaagtggtggatattctggagcgcgtcggt

SEQ ID NO: 641011 - DNA, 75 bp, synthetic construct
  source 1..75: mol_type = other DNA
gaaatcgcctctgcactgcgttttattgaggatggtttactactcattaaacaagggaaagtggaatggtttggc

SEQ ID NO: 641012 - DNA, 75 bp, synthetic construct
  source 1..75: mol_type = other DNA
gcgagaaatataaatcgaccattgaggcgtttaaaaaagagcaactagcgttaccagtattagttcggcgtaaga

SEQ ID NO: 641013 - DNA, 75 bp, synthetic construct
  source 1..75: mol_type = other DNA
ttggatttcgaattatgatagtctgttaattttaagggagttctttcttagagcaacacagatcgataaaaatag

SEQ ID NO: 641014 - DNA, 75 bp, synthetic construct
  source 1..75: mol_type = other DNA
cgctggggtggaaccatatcaggagaagccgggcgaagagtatatgaacgaagcccagctggcgcacttccgtcg

SEQ ID NO: 641015 - DNA, 75 bp, synthetic construct
  source 1..75: mol_type = other DNA
gttattcgataataatccggcggcagcggcaacacttgataaaagtacgatggcattttacggcaaggtttacga

SEQ ID NO: 641016 - DNA, 75 bp, synthetic construct
  source 1..75: mol_type = other DNA
gtgtgagtcgtgcaatatcacatggtaattcattggatgctcgtggtttacgtaataataaccccggtaatattg

SEQ ID NO: 641017 - DNA, 75 bp, synthetic construct
  source 1..75: mol_type = other DNA
cacaggtgccgccttacctgcgccccatcaatatgatgtttcagtcttacgcgctgtttccgcatatgaccgtgg

SEQ ID NO: 641018 - DNA, 75 bp, synthetic construct
  source 1..75: mol_type = other DNA
atcagacatacagacacagacgaaatactcttccgtctgaataaacaccatcatttatatgagaaaaagaaaaca

SEQ ID NO: 641019 - DNA, 75 bp, synthetic construct
  source 1..75: mol_type = other DNA
cagctggcgcattcagcgccgcgcacggcactgacgccaccagcaagatcaccaatgtcaaagccggtgacctga

SEQ ID NO: 641020 - DNA, 75 bp, synthetic construct
  source 1..75: mol_type = other DNA
tggtgccgagtggtcagagatcgatcttgaaggtaaaacatggaccatacccgccagtcgaatgaaagcagcgaa

SEQ ID NO: 641021 - DNA, 75 bp, synthetic construct
  source 1..75: mol_type = other DNA
tcgaccctatctccaccgggcgtattgaagagctgatcaccgaattgaagcaggattacaccgtagtgatcgtaa

SEQ ID NO: 641022 - DNA, 75 bp, synthetic construct
  source 1..75: mol_type = other DNA
cgggccgtccggctgcggtaaatcgacgctgctgcgtaccttcaacaaaatgtttgaactgtacccggagcagcg

SEQ ID NO: 641023 - DNA, 75 bp, synthetic construct
  source 1..75: mol_type = other DNA
cgacttaacgcagcatggattcagatcaactttccgtgattgggctggcgaaacaacatcgcatcagcgtgaagt

SEQ ID NO: 641024 - DNA, 75 bp, synthetic construct
  source 1..75: mol_type = other DNA
cctgagtgtggcaatgggaagccggattaacaaatcaggtaagacggttccccggcgtctgaatatggggctggg

SEQ ID NO: 641025 - DNA, 75 bp, synthetic construct
  source 1..75: mol_type = other DNA
agagcactggagttttccatactgaccgttgcccgttctggtgaaatcagaggggctgagtggtcagaaatcgat

SEQ ID NO: 641026 - DNA, 75 bp, synthetic construct
  source 1..75: mol_type = other DNA
gcttcggcttcagaaatctttgccgcggcaatgcaggattacggtcgtgcgctggttgtgggtgaaccgacgttt

SEQ ID NO: 641027 - DNA, 75 bp, synthetic construct
  source 1..75: mol_type = other DNA
ctgttgcattggtggggggaagaaagtcattacctcttccaagaaatgtgatagccgcgcagtggctaattgaaa

SEQ ID NO: 641028 - DNA, 75 bp, synthetic construct
  source 1..75: mol_type = other DNA
tatgaacatggcgcaagcgtgtatgttggcttttggaatgtgtctggtgctgctggtcattatgagtggcgcatg

SEQ ID NO: 641029 - DNA, 75 bp, synthetic construct
  source 1..75: mol_type = other DNA
tgaaggaacataatgcgcgtatcgcgaaagatcctgagttccagaacatcatgaaggatatcgcgcgcttcaacg

SEQ ID NO: 641030 - DNA, 75 bp, synthetic construct
  source 1..75: mol_type = other DNA
tctggcgcaaaagcgccgttttgagcgttaccagtacgctttgtcagtactggaaaagccgatggatttcaccgg

SEQ ID NO: 641031 - DNA, 75 bp, synthetic construct
  source 1..75: mol_type = other DNA
tcaggtccgtgataacaacggtaaagttcgtgaagacagcgataccgacggacaggtcttctataaaggcccgct

SEQ ID NO: 641032 - DNA, 75 bp, synthetic construct
  source 1..75: mol_type = other DNA
taacccgctacaagaaaaacatgagcgcactacccaacaagtagaattagcccgtaaacaacggtcgtttgctca

SEQ ID NO: 641033 - DNA, 75 bp, synthetic construct
  source 1..75: mol_type = other DNA
cagtgatggctggtcgaaaggcgttttgttacgcgaattgcaggccgcatataacggtgaatcgctgacgccaga

SEQ ID NO: 641034 - DNA, 75 bp, synthetic construct
  source 1..75: mol_type = other DNA
tgcaggatgcccaacttgaacacgcgctgcccgtcgataccgcaaaggcgctggcaaccgcagcagaaaaaatcg

SEQ ID NO: 641035 - DNA, 75 bp, synthetic construct
  source 1..75: mol_type = other DNA
gctttcactgccagcagtgctgtgtgtcacgtccgatattaacgtgccacgtattccttcaatgaaagccattct

SEQ ID NO: 641036 - DNA, 75 bp, synthetic construct
  source 1..75: mol_type = other DNA
cgttaattatccgcgtctggatggtgttttgcataatgccggattgctcggcgatgtttgcccaatgagcgaaca

SEQ ID NO: 641037 - DNA, 75 bp, synthetic construct
  source 1..75: mol_type = other DNA
ggcaggacgtcatgcaggtcaacgttaatgccacctttatgctcacccaggcactgcttcctttattactcaaat

SEQ ID NO: 641038 - DNA, 75 bp, synthetic construct
  source 1..75: mol_type = other DNA
catcaccggcactttcgaatacgacgctgggttatacagtgcggatcgtattcagcacctggtggcgcagtggag

SEQ ID NO: 641039 - DNA, 75 bp, synthetic construct
  source 1..75: mol_type = other DNA
ccgccagtcgaaaccggagcatggaaagacgctgttgactgggtgctcaaagaggcttgtcaggctgtaaacatt

SEQ ID NO: 641040 - DNA, 75 bp, synthetic construct
  source 1..75: mol_type = other DNA
ggcaccaaattggttcaagcctaccggggattgtggctatgacgcaccaatcgttcctgatggcgtcacactgag

SEQ ID NO: 641041 - DNA, 75 bp, synthetic construct
  source 1..75: mol_type = other DNA
caatcgctcgctctggtgaaatacgcggtgcagagtggaatgaaatcgatcttgcggggaaaacatggaccatac

SEQ ID NO: 641042 - DNA, 75 bp, synthetic construct
  source 1..75: mol_type = other DNA
cggagattaaatcattcatcactggcttcctgagcgacccggcgcacgataaccaatcatcaaacagtctgcttg

SEQ ID NO: 641043 - DNA, 75 bp, synthetic construct
  source 1..75: mol_type = other DNA
atgaccacttttaccagagaaaacgcggaaattaaatcattcatcactggtttcctgagcgacccggcgcacgat

SEQ ID NO: 641044 - DNA, 75 bp, synthetic construct
  source 1..75: mol_type = other DNA
cttgaaggtaaaacatggaccatccccgccagtcgaatgaaagcagcgaaggagcatcgagttccgttgtctgat

SEQ ID NO: 641045 - DNA, 75 bp, synthetic construct
  source 1..75: mol_type = other DNA
tccccttcaacttaccgttggcacagtgggcgccggagtggttcaaacctactggcgattgcggctacgatgcac

SEQ ID NO: 641046 - DNA, 75 bp, synthetic construct
  source 1..75: mol_type = other DNA
gatcgaggcggaatttccggtatcgatcaccggaatgttaatggatgccatcgaagcacgtttgcagaaatctta

SEQ ID NO: 641047 - DNA, 75 bp, synthetic construct
  source 1..75: mol_type = other DNA
taccgagtttatctacgctacttatattctggaacgcgctgaagagaaaggtacgttgatcgtcaacaaaccgca

SEQ ID NO: 641048 - DNA, 75 bp, synthetic construct
  source 1..75: mol_type = other DNA
ggcgatccgaacctcggcgtgattgccgaaaccctgactgagcacggtactcgctactgtatggcgcaaaattac

SEQ ID NO: 641049 - DNA, 75 bp, synthetic construct
  source 1..75: mol_type = other DNA
tctattactattttatcggcttctttgggattcttgcggcaatagcgataacgcttgtctggcaaaggcattcac

SEQ ID NO: 641050 - DNA, 75 bp, synthetic construct
  source 1..75: mol_type = other DNA
tgggatacttgccgcgatagctataacgcttgtctggcaaaggcatacgggtgatgctgccaacttactgattta

SEQ ID NO: 641051 - DNA, 75 bp, synthetic construct
  source 1..75: mol_type = other DNA
tcgctactgcatggcacaaaattacctgccagccattaaagatggcgacaaacgcgtgctggtggtggatggcga

SEQ ID NO: 641052 - DNA, 75 bp, synthetic construct
  source 1..75: mol_type = other DNA
tccgcagatccagtttattgttacgacccatagcccgcaggtgctcagtacggtaaaacgcgagtccattcgtct

SEQ ID NO: 641053 - DNA, 75 bp, synthetic construct
  source 1..75: mol_type = other DNA
tacattatgcgcaccaacataacccaagggagaatccagtcgttggcggtcatgatgtcctgctcattaacaacg

SEQ ID NO: 641054 - DNA, 75 bp, synthetic construct
  source 1..75: mol_type = other DNA
atgttctggaaccctgaagtaataacgacgactggaaaatcgctttgtatcattcaaattcaatttaacataata

SEQ ID NO: 641055 - DNA, 75 bp, synthetic construct
  source 1..75: mol_type = other DNA
agccggtaccgtactgcctggcgcgtattccgcaggggggcgaaacccgtggcaatctggctgccggtggtcgcg

SEQ ID NO: 641056 - DNA, 75 bp, synthetic construct
  source 1..75: mol_type = other DNA
atgacagccgcatatttgacaaaacaaacttgctggagttatgagcaggaacgtcgcgtaataattaatgagaaa

SEQ ID NO: 641057 - DNA, 75 bp, synthetic construct
  source 1..75: mol_type = other DNA
ccagccataaccagcaactggtaatgagccatccgcaatacggcaagatccccttatcccagctcagcgatggct

SEQ ID NO: 641058 - DNA, 75 bp, synthetic construct
  source 1..75: mol_type = other DNA
atcttgcatggacgaaataagctccttgaattggcggggaaatgccatagtgaaagttgtggagtccggttcgtt

SEQ ID NO: 641059 - DNA, 75 bp, synthetic construct
  source 1..75: mol_type = other DNA
gctgataaatttaaatttggatatcaagcttttggtcctgttattattgggtttacatcatggataaaaaaaata

SEQ ID NO: 641060 - DNA, 75 bp, synthetic construct
  source 1..75: mol_type = other DNA
cagagatgaaaaactgggttgatacagtttccttaaataaaacaccattacttgatgctgtggtaacaacaatat

SEQ ID NO: 641061 - DNA, 75 bp, synthetic construct
  source 1..75: mol_type = other DNA
ttcgagtaccaagtagcatggggattaatacctatcatataccaagggctattgatattgcgaaattttataccc

SEQ ID NO: 641062 - DNA, 75 bp, synthetic construct
  source 1..75: mol_type = other DNA
aaaaccttcgctcttcaccagtggagacgctggtaagatggcaagagcagcgctttttgtggttgctgatggccg

SEQ ID NO: 641063 - DNA, 75 bp, synthetic construct
  source 1..75: mol_type = other DNA
ggggattgtggctatgacgcaccaatcgttcctgatggcgtcacactgagcagcatgcaacagtggtttgcggaa

SEQ ID NO: 641064 - DNA, 75 bp, synthetic construct
  source 1..75: mol_type = other DNA
tttattaaacctattaaaactaataatggatttgaaatcgttaaaagtaaatttgatgattccacaagacaaact

SEQ ID NO: 641065 - DNA, 75 bp, synthetic construct
  source 1..75: mol_type = other DNA
caggcagcggggctgaccttcaaccagaccagtgaagcgctgaccgagcttatcaacgcgggggtgcgtgctggc

SEQ ID NO: 641066 - DNA, 75 bp, synthetic construct
  source 1..75: mol_type = other DNA
cgtcacgcagatcggcgagaaaacccgagcccttgcggaaagtgctggtatgagcagtcgtgcagcacaacgtcg

SEQ ID NO: 641067 - DNA, 75 bp, synthetic construct
  source 1..75: mol_type = other DNA
ccgcaggactggcctggggcgctaagtatctcgaaattacggcaacaaaatatgattcaccgcaaatgtatgttg

SEQ ID NO: 641068 - DNA, 75 bp, synthetic construct
  source 1..75: mol_type = other DNA
ataaatatctcagggaccggagtatgtttttcaaagactctaataataagtttatttcgcattattataaaataa

SEQ ID NO: 641069 - DNA, 75 bp, synthetic construct
  source 1..75: mol_type = other DNA
acagataaagaatgttcttgcttaaaaaaaattgagatagagcaagaaataaaaaatatcattcctcgcagaagg

SEQ ID NO: 641070 - DNA, 75 bp, synthetic construct
  source 1..75: mol_type = other DNA
atatattgacatttggttgcatccaataagatatatggatgatgtattatttggtttgaaatcaaacaatgaaga

SEQ ID NO: 641071 - DNA, 75 bp, synthetic construct
  source 1..75: mol_type = other DNA
taacgatcaacccatcatgagccaaagcattgcttttactgttattgaaggtaaaaagaacgctcaggcctgcat

SEQ ID NO: 641072 - DNA, 75 bp, synthetic construct
  source 1..75: mol_type = other DNA
gtggcgaatatcgtcgtatctgcacgctgggtgagaaactgcgtggcttgctggaagaagatgcgtttatcgaac

SEQ ID NO: 641073 - DNA, 75 bp, synthetic construct
  source 1..75: mol_type = other DNA
gtcgacggctcgcacattcgtacgctgctgttgacattcttctatcgtcagatgccggaaatcgttgaacgcggt

SEQ ID NO: 641074 - DNA, 75 bp, synthetic construct
  source 1..75: mol_type = other DNA
ctatgaaggcggcatcaaggcgttcgttgaatatctgaacaagaacaaaacgccgattcacccgaatatcttcta

SEQ ID NO: 641075 - DNA, 75 bp, synthetic construct
  source 1..75: mol_type = other DNA
gcgctcgcgggtcactgtaaagaaattatcgtcaccattcacgccgacaactctgtctctgtacaggatgacggg

SEQ ID NO: 641076 - DNA, 75 bp, synthetic construct
  source 1..75: mol_type = other DNA
gcgacgcttatcaccgcgcttggttgtggtatcggtcgtgacgagtacaacccggacaaactgcgttatcacagc

SEQ ID NO: 641077 - DNA, 75 bp, synthetic construct
  source 1..75: mol_type = other DNA
caggctccgctggcggttaccggcgagactgaaaaaaccggcaccatggtgcgtttctggcctagcctcgaaacc

SEQ ID NO: 641078 - DNA, 75 bp, synthetic construct
  source 1..75: mol_type = other DNA
aagcggcaggacttcccgcatttaccgtcatgtcatgtgacaacatgccagaaaacggtcatgttatgcgtgacg

SEQ ID NO: 641079 - DNA, 75 bp, synthetic construct
  source 1..75: mol_type = other DNA
attcagaaggctgtacaaagtagtgccgaagggaaagcgcgcgtccagtcattgctggcgattaaggcgatcttt

SEQ ID NO: 641080 - DNA, 75 bp, synthetic construct
  source 1..75: mol_type = other DNA
tccggaatgggaaaaagcgggagccgaactggttagtgatgtgctgccttatgaagagatgaagttgcgcatgct

SEQ ID NO: 641081 - DNA, 75 bp, synthetic construct
  source 1..75: mol_type = other DNA
ttcaccaatgtgaccgagttcgaatatgaaattctggcgaaacgtctgcgtgagttgtcgttcctcaactccggc

SEQ ID NO: 641082 - DNA, 75 bp, synthetic construct
  source 1..75: mol_type = other DNA
tgactgtttttggtaaaaaccatattgccaacaaagcacaaaacttcgaagtagttgcacaatatcagttcgact

SEQ ID NO: 641083 - DNA, 75 bp, synthetic construct
  source 1..75: mol_type = other DNA
actacggctccatcgattatggccgtaactacggtgtagcatacgatattggtgcatggaccgacgttctgccag

SEQ ID NO: 641084 - DNA, 75 bp, synthetic construct
  source 1..75: mol_type = other DNA
ttgttcactacgcttatgggcgacgccgttgaaccgcgccgtgcgtttatcgaagagaacgctctgaaagcggcg

SEQ ID NO: 641085 - DNA, 75 bp, synthetic construct
  source 1..75: mol_type = other DNA
ctgccagctggcgggagaaccgtcattatccccagcgcatcctgttcacgctggccccgcgttatctctcatggg

SEQ ID NO: 641086 - DNA, 75 bp, synthetic construct
  source 1..75: mol_type = other DNA
ctgggctgggtacagcgggacaggcaacttgcatcacagaaagggctggaccgtacccgctggttcggacatgtc

SEQ ID NO: 641087 - DNA, 75 bp, synthetic construct
  source 1..75: mol_type = other DNA
tggcggctttttcagtcaggcatccgcagcacagcctccgcgggctgccctgcagtatcgcgatgatgtgatccg

SEQ ID NO: 641088 - DNA, 75 bp, synthetic construct
  source 1..75: mol_type = other DNA
atgtggcgcagactgatttatcaccccgatatcaactatgcacttcgacaaacgctggtgctatgtttgcccgtg

SEQ ID NO: 641089 - DNA, 75 bp, synthetic construct
  source 1..75: mol_type = other DNA
ctgatgccggggcttaacagccgtgagccgtttaatccggcatgggccatccgggcgctggtcagctatgaccgc

SEQ ID NO: 641090 - DNA, 75 bp, synthetic construct
  source 1..75: mol_type = other DNA
ctcagggactggcgcagttcatgcccgccactgctgactggataagtcagctgatgccggggcttaacagccgtg

SEQ ID NO: 641091 - DNA, 75 bp, synthetic construct
  source 1..75: mol_type = other DNA
cagcagatgaacgaactgctggcagaatacctgctggaaaacccaaccgacgcgaaaatcgtggtcggcaaaatt

SEQ ID NO: 641092 - DNA, 75 bp, synthetic construct
  source 1..75: mol_type = other DNA
gccggacccgaaattctcctcccagaccaaagacaaactggtttcttctgaggtgaaatcagcggttgaacagca

SEQ ID NO: 641093 - DNA, 75 bp, synthetic construct
  source 1..75: mol_type = other DNA
tgtctgagtacaacgcggcccagaagatgatcaaccgcatggaacgtcgttatccgaaagcgctgctgaaagagc

SEQ ID NO: 641094 - DNA, 75 bp, synthetic construct
  source 1..75: mol_type = other DNA
tcctgttgcaacaaaagttagaaaatgaaattaatgcaaaaaaaagaagccacagaattacaattgaaaataaaa

SEQ ID NO: 641095 - DNA, 75 bp, synthetic construct
  source 1..75: mol_type = other DNA
atggatatcaagaagaatgtaataattatttttgctacaactttattgggtggatgtggcagtattggaaatata

SEQ ID NO: 641096 - DNA, 75 bp, synthetic construct
  source 1..75: mol_type = other DNA
atgctacctgaatttggcggtgactcttataccaatgcagacaactttatgactggtcgtgccaatggcgtcgcg

SEQ ID NO: 641097 - DNA, 75 bp, synthetic construct
  source 1..75: mol_type = other DNA
gtgacccactgttacctgttattcagaaggcagtacaaagtagtgctgaagggacagcgcgcgtccagtcattgc

SEQ ID NO: 641098 - DNA, 75 bp, synthetic construct
  source 1..75: mol_type = other DNA
acacttgctcacgtgcgtttggctggcctgtatgcgtccctctgaaacagaagctaaacagtgtgaattgttctt

SEQ ID NO: 641099 - DNA, 75 bp, synthetic construct
  source 1..75: mol_type = other DNA
atcgattatttgaatagttcgaattcatcgacattacttatcacagacaaaaccttttttaaaatttctgttgaa

SEQ ID NO: 641100 - DNA, 75 bp, synthetic construct
  source 1..75: mol_type = other DNA
tactcatttattgataaaaaacttgagggacaggatttctactggacgaagaacaaagcgattctcagagcctca

SEQ ID NO: 641101 - DNA, 75 bp, synthetic construct
  source 1..75: mol_type = other DNA
taatctgattgtttttgtcctggcaatgttgctcccagtaacaacagttttcatttttatgttgctgggcggtaa

SEQ ID NO: 641102 - DNA, 75 bp, synthetic construct
  source 1..75: mol_type = other DNA
ttctttttagtagtgctggctggtatagtattcaatattggcaggaaaagtaatctaatcgttttcatcctggca

SEQ ID NO: 641103 - DNA, 75 bp, synthetic construct
  source 1..75: mol_type = other DNA
acaagtttaaatacgtatctgctgagtgtggttcaggtaaaaccactgcattgtgtaatatgatcaataatacac

SEQ ID NO: 641104 - DNA, 75 bp, synthetic construct
  source 1..75: mol_type = other DNA
ctttacctccaccaccttagtgaaaagacagcaaagacaatgctggccttcgatctcgaagtgtatgagcgattt

SEQ ID NO: 641105 - DNA, 75 bp, synthetic construct
  source 1..75: mol_type = other DNA
atgaaaaaactgcaaattgcggtgggtattattcgcaacgagaacaatgaaatttttattactcgtcgtgccgca

SEQ ID NO: 641106 - DNA, 75 bp, synthetic construct
  source 1..75: mol_type = other DNA
tgggtgtatgacctgcgtaccaatatgccgagtttcggcaagcgcacgccgtttaccgacgagcatttgcagccg

SEQ ID NO: 641107 - DNA, 75 bp, synthetic construct
  source 1..75: mol_type = other DNA
gcgcagtatttacgggcaggataactggctatctaacccgtgggtatgggtaatcgagtttaagcgcattcagga

SEQ ID NO: 641108 - DNA, 75 bp, synthetic construct
  source 1..75: mol_type = other DNA
ccgggttccggttgaggtttgtaataagccagtatcagaaaagtggacgccatcaattcacatgccgcgatgggc

SEQ ID NO: 641109 - DNA, 75 bp, synthetic construct
  source 1..75: mol_type = other DNA
tcgtcatgttgggtgccttggtagcgactgttgtagctgccgccaatggtttgagttttatcacccttatggctg

SEQ ID NO: 641110 - DNA, 75 bp, synthetic construct
  source 1..75: mol_type = other DNA
aaacaagccctgcgagtcgccgcgcgcgagtcaaaagcggtccgccgttcgctgatcgacaaactggaagaattg

SEQ ID NO: 641111 - DNA, 75 bp, synthetic construct
  source 1..75: mol_type = other DNA
gtgtaaacacgctgaccatgatgttggacaccattgatttactggcagagctggcgcagcaatgtgcgagtcatt

SEQ ID NO: 641112 - DNA, 75 bp, synthetic construct
  source 1..75: mol_type = other DNA
ccggtgagcaattgcagcagcagcgggaagaagtatcccagagagtgacgcaggctggagactgggtaaggcaga

SEQ ID NO: 641113 - DNA, 75 bp, synthetic construct
  source 1..75: mol_type = other DNA
atgaaaccagtaaaacgtctttacctttcaacggatgaaattcacctggtggatgccagcctggtactggagctg

SEQ ID NO: 641114 - DNA, 75 bp, synthetic construct
  source 1..75: mol_type = other DNA
gactggggatattatgaggtcaatttaatcggcggcgaacagcaaattgccgatttacaacagcaagataatctt

SEQ ID NO: 641115 - DNA, 75 bp, synthetic construct
  source 1..75: mol_type = other DNA
ttatttttctgataatgccaatagtgatggtgatcaaacttatgtgcgttttggttttaagggtgaaacgcaaat

SEQ ID NO: 641116 - DNA, 75 bp, synthetic construct
  source 1..75: mol_type = other DNA
tgaaggctctgcacttctgggataaacacggtatttctgcagcttctgaagcctttggcgtatcctgccgcacgc

SEQ ID NO: 641117 - DNA, 75 bp, synthetic construct
  source 1..75: mol_type = other DNA
acgccaacaccagccgtgaatgtcatccccaacaccggagacacaatcgacagccaaacattgttgaagatggtc

SEQ ID NO: 641118 - DNA, 75 bp, synthetic construct
  source 1..75: mol_type = other DNA
aaccaatgccgccgcgttcacactgacggcgacgaaagccgggcagacccggagcaaataccagaatataattgc

SEQ ID NO: 641119 - DNA, 75 bp, synthetic construct
  source 1..75: mol_type = other DNA
atgaaaatggctaccagatacggctgacgccccaattaacgggtaaaggccagcagtggttaactcgcaagctac

SEQ ID NO: 641120 - DNA, 75 bp, synthetic construct
  source 1..75: mol_type = other DNA
agagtaccaacgccctgaccatgatgctggacaccattgatttgctggcagaactggcgcggcagtgcgcgagcc

SEQ ID NO: 641121 - DNA, 75 bp, synthetic construct
  source 1..75: mol_type = other DNA
cccgtcaccatcccgcacgagttcagccaggcatcaacgggcgggcacagtatgaccctcccgatgattcagacg

SEQ ID NO: 641122 - DNA, 75 bp, synthetic construct
  source 1..75: mol_type = other DNA
ccgccgttcgctgatcgacaaactggaagaattgcagcaggcaaactcccctaccccatcgatcccccaaacatt

SEQ ID NO: 641123 - DNA, 75 bp, synthetic construct
  source 1..75: mol_type = other DNA
tggttttcgctggggagaaaaaggcaaatggaacctggaatccattgccgccggtacggaaaccgaattgtcgtt

SEQ ID NO: 641124 - DNA, 75 bp, synthetic construct
  source 1..75: mol_type = other DNA
atcgcgttgccggtttctcgccgattccggcgatgtcgatggtttcttacgccgccggaacacgctatctgtcgc

SEQ ID NO: 641125 - DNA, 75 bp, synthetic construct
  source 1..75: mol_type = other DNA
catcatgatccgcaagatgaagaacgttaactggctggatgatgaaggtcgcgatcaggtacaggaggcgaaaaa

SEQ ID NO: 641126 - DNA, 75 bp, synthetic construct
  source 1..75: mol_type = other DNA
tggcgatcctgcatcagctgcgcgatcgcgggcatacggtgattatcgtcactcacgatccgcaggtcgctgctc

SEQ ID NO: 641127 - DNA, 75 bp, synthetic construct
  source 1..75: mol_type = other DNA
tggcgatcctgcatcagctgcgcgatcgtgggcatacggtgattatcgtcacccacgatccgcaggtcgctgctc

SEQ ID NO: 641128 - DNA, 75 bp, synthetic construct
  source 1..75: mol_type = other DNA
gtgccaatggcgtgagcggcgattattttaatgtctatggcatgaccttcagtgaaggaaacacctttaatcagg

SEQ ID NO: 641129 - DNA, 75 bp, synthetic construct
  source 1..75: mol_type = other DNA
agtgtggaaaacattgcgcactattccttgtggccaggtaatgcattacggtcaactggcagaacatctgggtcg

SEQ ID NO: 641130 - DNA, 75 bp, synthetic construct
  source 1..75: mol_type = other DNA
gtattgttgtaccctgccatcgggttattggacgaaatggcaccatgaccggatatgcaggcggcgtgcagcgaa

SEQ ID NO: 641131 - DNA, 75 bp, synthetic construct
  source 1..75: mol_type = other DNA
tcccggtggcaatgttcatgatggtcgccctttgcgttcctgagctggcgctggccgccggtgcagataccggtg

SEQ ID NO: 641132 - DNA, 75 bp, synthetic construct
  source 1..75: mol_type = other DNA
acagcggtcacctgattgatttcaacgttcgcgccgaacgtatgggctggctaccttctgcgccgcagctggggc

SEQ ID NO: 641133 - DNA, 75 bp, synthetic construct
  source 1..75: mol_type = other DNA
atgctgagattacttgaagaaaaaattgccacgccactgggtccactgtgggtgatttgcgatgaacaatttcgt

SEQ ID NO: 641134 - DNA, 75 bp, synthetic construct
  source 1..75: mol_type = other DNA
gtattgtcgtaccttgccaccgggttattggacgaaacggcacgatgaccggatatgcaggcggagtgcagcgaa

SEQ ID NO: 641135 - DNA, 75 bp, synthetic construct
  source 1..75: mol_type = other DNA
gccgccagcttttcccccataaagcagatgtggttggcgaggtgattctggtcggcaatatgcccgccagagtca

SEQ ID NO: 641136 - DNA, 75 bp, synthetic construct
  source 1..75: mol_type = other DNA
ggcgtcggtttgtatggctggggtaaacaacaggccgtcaatcagaccgccaccagcgatgccctggctaaccaa

SEQ ID NO: 641137 - DNA, 75 bp, synthetic construct
  source 1..75: mol_type = other DNA
gcacctgcacctgcacctgcacctgcacctgcaccgcaagctgatactccggcagccgcgccgcaaggagaataa

SEQ ID NO: 641138 - DNA, 75 bp, synthetic construct
  source 1..75: mol_type = other DNA
aacaacaggccgtcaatcagactgccaccagcgatgccctggctaaccaacttacggcactgcaaaaagcccagg

SEQ ID NO: 641139 - DNA, 75 bp, synthetic construct
  source 1..75: mol_type = other DNA
attgcctgcggtcgttcctctgccccaatgccgcagcgtgtaacagaagaaggaaaacaggatgatgaagaaaaa

SEQ ID NO: 641140 - DNA, 75 bp, synthetic construct
  source 1..75: mol_type = other DNA
agctttccagctccatcagcgaatggcgtatcaatctgcaaaaaagctggcagaactttatggacaacttcatta

SEQ ID NO: 641141 - DNA, 75 bp, synthetic construct
  source 1..75: mol_type = other DNA
aaacctgcacctgcacctgcacctgcacctgcacctgcaccgcaagctgatactccggcagccgcgccgcaagga

SEQ ID NO: 641142 - DNA, 75 bp, synthetic construct
  source 1..75: mol_type = other DNA
agaagtatctgctggggaccgaaagcgggattcagggcgaggaactcggtgccagcgacgggatcaaaccggaag

SEQ ID NO: 641143 - DNA, 75 bp, synthetic construct
  source 1..75: mol_type = other DNA
agcggtggcggctgggcacactatgtcggccaggaaaaactgcgcccacaaaccggctggttgccactggccttt

SEQ ID NO: 641144 - DNA, 75 bp, synthetic construct
  source 1..75: mol_type = other DNA
gtgagatggtggcgattgtcggcgcttcgggttccggtaaatcgaccctgatgaatattctcggctgcctggata

SEQ ID NO: 641145 - DNA, 75 bp, synthetic construct
  source 1..75: mol_type = other DNA
agagccaaaaagcggagctggaagatatcatcaagcaacaaactgtgcagttagaacaggcgaatcgccaacaag

SEQ ID NO: 641146 - DNA, 75 bp, synthetic construct
  source 1..75: mol_type = other DNA
gcattcctcgacgaggtggaccagttaagtcagcaaagtatttcgatggatctcccggaaacactgcaaagccag

SEQ ID NO: 641147 - DNA, 75 bp, synthetic construct
  source 1..75: mol_type = other DNA
ggctatcgccattgctctggcagcaggcgtcggtttgtatggctggggtaaacaacaggccgtcagtcagactgc

SEQ ID NO: 641148 - DNA, 75 bp, synthetic construct
  source 1..75: mol_type = other DNA
ggacaaggttaacggagctggcagcttttattccaacccgtgggtctgggtgatcgagtttaagcgcattgaagg

SEQ ID NO: 641149 - DNA, 75 bp, synthetic construct
  source 1..75: mol_type = other DNA
ttgttcaaatgttacgccctggcgttggacgttggacgttgggatattagcggcggtcaggtcttaaaagatgat

SEQ ID NO: 641150 - DNA, 75 bp, synthetic construct
  source 1..75: mol_type = other DNA
caagccagctactactatggtttgaataactacctgacaggatataccggtattcagctaactgataataactat

SEQ ID NO: 641151 - DNA, 75 bp, synthetic construct
  source 1..75: mol_type = other DNA
taacagccgtcaagtttctctcagcaccgacggtggttttgtattgcatagcggtggactgactttcagtaatga

SEQ ID NO: 641152 - DNA, 75 bp, synthetic construct
  source 1..75: mol_type = other DNA
taactacaactggatgaacgattctggtagcgattacaactttcagaatcggtatctgcagcgcgatattgcatc

SEQ ID NO: 641153 - DNA, 75 bp, synthetic construct
  source 1..75: mol_type = other DNA
gcatttaacggtggcgtaaatttaggagcatggcgcttgcgcgcctcaggtaactacagctggatgaccaattct

SEQ ID NO: 641154 - DNA, 75 bp, synthetic construct
  source 1..75: mol_type = other DNA
ttggacgttgggatattagcggtggtcagattttaaaagatgatattcaggatgagcctaatttatttcaggcca

SEQ ID NO: 641155 - DNA, 75 bp, synthetic construct
  source 1..75: mol_type = other DNA
ttcctcgtcttatcgataccattattggttgtttgattgctttcggtggtacggtctggctgtggccgcaatggc

SEQ ID NO: 641156 - DNA, 75 bp, synthetic construct
  source 1..75: mol_type = other DNA
ggttcccgcctgctgtaacatcgcggggcttgatactccccacaaacgttttttcaaacgcttaatcattggcgc

SEQ ID NO: 641157 - DNA, 75 bp, synthetic construct
  source 1..75: mol_type = other DNA
atgcttggcgaattacgattcggtctgctcttctccctcgttcctgcttgttgcaatattgcgggccttgatacg

SEQ ID NO: 641158 - DNA, 75 bp, synthetic construct
  source 1..75: mol_type = other DNA
attttcagaatcgctatttacaacgcgatcttgcgtcactacgttcacaactggttattggtgaatcttacacga

SEQ ID NO: 641159 - DNA, 75 bp, synthetic construct
  source 1..75: mol_type = other DNA
cggcgacactgacgatagcgtttatcttatagactggccccctgaatcaccagacaaccaatatcacttatttaa

SEQ ID NO: 641160 - DNA, 75 bp, synthetic construct
  source 1..75: mol_type = other DNA
gggcttccggacaaaatcgtagcaattactctattggctacagtaacgggcagctacagtgtcagtgcccagcgt

SEQ ID NO: 641161 - DNA, 75 bp, synthetic construct
  source 1..75: mol_type = other DNA
gtcgctgatcaaaactcttttgggaaaaatagagtcaacccaaaacgagttacgcacagttatggacagggtact

SEQ ID NO: 641162 - DNA, 75 bp, synthetic construct
  source 1..75: mol_type = other DNA
agatgtatcgcgcttacagcacccgcgcttccgatcaaggcccgaacgccggtaagtgggacaacagcaaggtga

SEQ ID NO: 641163 - DNA, 75 bp, synthetic construct
  source 1..75: mol_type = other DNA
ccattcaactggatacccccatcaagcgcggtaaaacagaaatcaccgaaattgtactgcgtaaaccgcagtccg

SEQ ID NO: 641164 - DNA, 75 bp, synthetic construct
  source 1..75: mol_type = other DNA
atgagcgataagcaaactgaaaagaccattcaactggacacccccatcatgcgcggtaaaacagaaattaccgaa

SEQ ID NO: 641165 - DNA, 75 bp, synthetic construct
  source 1..75: mol_type = other DNA
ccattcaactggatacccccatcaagcgcggtaaaacagaaatcaccgaagttgtgctgcgtaaaccgcagtccg

SEQ ID NO: 641166 - DNA, 75 bp, synthetic construct
  source 1..75: mol_type = other DNA
cgcctccgatcaaggcccgaacgccggtaagtgggacaacagcaaggtgatggaagagatcctcgctctgcgtca

SEQ ID NO: 641167 - DNA, 75 bp, synthetic construct
  source 1..75: mol_type = other DNA
gcaggtgcttgatttcttaaccgatctggcaaaacgcgcgcgtccgcagggcgaaaaagagctggcgcaactgcg

SEQ ID NO: 641168 - DNA, 75 bp, synthetic construct
  source 1..75: mol_type = other DNA
ctgtgcagctggataccccaatcaagcgcggtaaaactgaaatcactgaaattgtactgcgtaagccgcaatccg

SEQ ID NO: 641169 - DNA, 75 bp, synthetic construct
  source 1..75: mol_type = other DNA
atgaatcaaatcgaccgtttgctcaccgtcatgcagcgcctgcgcgacccggaaaacggctgcccgtgggataaa

SEQ ID NO: 641170 - DNA, 75 bp, synthetic construct
  source 1..75: mol_type = other DNA
ggacgacgcttggtccggtagtcgataaagtctacgaagagatcgacgaggtgatgtacgaggcgcggcaggctg

SEQ ID NO: 641171 - DNA, 75 bp, synthetic construct
  source 1..75: mol_type = other DNA
ccattaaccactatccaccaaccgaaagatgaactgggggagctggcgattgatgtactcatccatcggataacc

SEQ ID NO: 641172 - DNA, 75 bp, synthetic construct
  source 1..75: mol_type = other DNA
tgatgggcgacgcaacataccaggaaatgttcgatgaagagaatcagcctgaagttcaggaaaatgatccagagg

SEQ ID NO: 641173 - DNA, 75 bp, synthetic construct
  source 1..75: mol_type = other DNA
ccgttcatatgaacggcaggggatcccctgcccgtggctttactacaacgatcgcgatgtacgcacaatcgttga

SEQ ID NO: 641174 - DNA, 75 bp, synthetic construct
  source 1..75: mol_type = other DNA
ctccaactttacgcgaacgctggcggggtctatcggcacgtcgataaccacgaccatgtggaccaaccgcgagtc

SEQ ID NO: 641175 - DNA, 75 bp, synthetic construct
  source 1..75: mol_type = other DNA
ccaaacgctcgatcgcgctggcgttgtggtcgatgacggtgattgtcgcgccaatttgcggcccaatcctcggcg

SEQ ID NO: 641176 - DNA, 75 bp, synthetic construct
  source 1..75: mol_type = other DNA
cacaaccatgtggaccaaccgcgagtcgatgcaccatgcgcagttaaccgagtcggtaaacccattcaacccgaa

SEQ ID NO: 641177 - DNA, 75 bp, synthetic construct
  source 1..75: mol_type = other DNA
atgatgcgctgccctttctgccgcacggcggcacacgttcgcaccagccgctatatgtctgacagcgtcaaagag

SEQ ID NO: 641178 - DNA, 75 bp, synthetic construct
  source 1..75: mol_type = other DNA
gccgccccggagaaaaccgaccccgcgccggtggcgccaccaccgccgcgtaaggtgcagggctgctacagttcg

SEQ ID NO: 641179 - DNA, 75 bp, synthetic construct
  source 1..75: mol_type = other DNA
actgcattaacccgaatgactacgacaaaccaattaaagatgttctgctggatatcaacaaatggggtatcgacc

SEQ ID NO: 641180 - DNA, 75 bp, synthetic construct
  source 1..75: mol_type = other DNA
cgtcattgaccccagtgatgcgcgcaaaattaccacctccgaagggcaaagttacggcatgttctttgccctggc

SEQ ID NO: 641181 - DNA, 75 bp, synthetic construct
  source 1..75: mol_type = other DNA
atgaaagttatgcgttgtggaatcgtgatgatactgatgctggctacctttagtgttcaggcagcctgcaactgg

SEQ ID NO: 641182 - DNA, 75 bp, synthetic construct
  source 1..75: mol_type = other DNA
acggcatgttctttgccctggcggctaacgaccgtgcagctttcgataatattctcgactggacgcagaacaatc

SEQ ID NO: 641183 - DNA, 75 bp, synthetic construct
  source 1..75: mol_type = other DNA
ctaacgtggcgatccccactatcgccgggaatctgggctcatcgctcagccagggaacgtgggtaatcacttctt

SEQ ID NO: 641184 - DNA, 75 bp, synthetic construct
  source 1..75: mol_type = other DNA
agtcggtaaacccgttcaacccgaatgcccaggcgatgtatagtcaactggaagggcttgggatgacgcaacagc

SEQ ID NO: 641185 - DNA, 75 bp, synthetic construct
  source 1..75: mol_type = other DNA
cgaaacccgcacagaaaggcggcgaattgatgctgtggggctggcactgctggtgattggtatcggcagtctgca

SEQ ID NO: 641186 - DNA, 75 bp, synthetic construct
  source 1..75: mol_type = other DNA
cctaaccctaatgcgaaatggcagcattataaggaaatcgggataacacgaaaggaattcagaaagcttaaatct

SEQ ID NO: 641187 - DNA, 75 bp, synthetic construct
  source 1..75: mol_type = other DNA
ggtttcctcaatgtgatgtacaactttgagatggagcgcctgatcaacgccgcgcgcagcaccggctttgccgaa

SEQ ID NO: 641188 - DNA, 75 bp, synthetic construct
  source 1..75: mol_type = other DNA
tattcacagcatgcgacgcttcggttctgcggagcagctacgtaaaacagcagaaagtaccctggaaacggggga

SEQ ID NO: 641189 - DNA, 75 bp, synthetic construct
  source 1..75: mol_type = other DNA
atttccatgcttggtgtaccagaagaattcggtggtatcccggctgattatgtcacccaaatgctggcattgatg

SEQ ID NO: 641190 - DNA, 75 bp, synthetic construct
  source 1..75: mol_type = other DNA
tgatttatctgtcaccacagggacgcaagcttgatcaagcaggcgtcagcgaactggcaacgaatcaaaaattga

SEQ ID NO: 641191 - DNA, 75 bp, synthetic construct
  source 1..75: mol_type = other DNA
gtatcggcggcggtacagacgaaattatgatttacgtagcgggtcggcagatcctgaaagattatcagaacaaat

SEQ ID NO: 641192 - DNA, 75 bp, synthetic construct
  source 1..75: mol_type = other DNA
aaaaaagccttcaccctgtggtgggtcgactccagtaagcccggcattaagattaacccgctgcataaaatcggc

SEQ ID NO: 641193 - DNA, 75 bp, synthetic construct
  source 1..75: mol_type = other DNA
gaactggccgatgattctgacctttataataaatataatcttttccgtaactatctggtgagtattggtaaagat

SEQ ID NO: 641194 - DNA, 75 bp, synthetic construct
  source 1..75: mol_type = other DNA
atggggggaatgatgtctacgaacaaatcaaacgcgcgaagcattaacaagaaagctcttgaaggaaaaattccc

SEQ ID NO: 641195 - DNA, 75 bp, synthetic construct
  source 1..75: mol_type = other DNA
aatcgctcaaagcagggcgtatggattatgaaatgtgctggcttatctctcaacagcctgtagatgctatcaact

SEQ ID NO: 641196 - DNA, 75 bp, synthetic construct
  source 1..75: mol_type = other DNA
accgccagagcacaaaaaacctcaaatcaggcacacttcaggcgctacagaatgaaatcgaacgacgtctgaaac

SEQ ID NO: 641197 - DNA, 75 bp, synthetic construct
  source 1..75: mol_type = other DNA
gaactggcaacgaatcaaaaattgattctggtgtgtggtcgctacgaaggtatagatgagcgcgtgatccaaacc

SEQ ID NO: 641198 - DNA, 75 bp, synthetic construct
  source 1..75: mol_type = other DNA
ggcgacggatgaacaggaaacggttttcatcagtacattgccggatgctgacgccaaaaaaaggccgcttaattc

SEQ ID NO: 641199 - DNA, 75 bp, synthetic construct
  source 1..75: mol_type = other DNA
atgaatgtgttgcgtagtggactcgtgacgatgctgctgctggctgcctttagtgttcaggcagcctgtacctgg

SEQ ID NO: 641200 - DNA, 75 bp, synthetic construct
  source 1..75: mol_type = other DNA
gactgggtggcgaaacgctgtcgaagattgaatggctggcgctgggcgtgattgtcttcgcggtggtgctggtca

SEQ ID NO: 641201 - DNA, 75 bp, synthetic construct
  source 1..75: mol_type = other DNA
gcatggaaagaaaagaatgctctccctgcattactctggcagcaccgtatggatgaacccatcggtatttacacg

SEQ ID NO: 641202 - DNA, 75 bp, synthetic construct
  source 1..75: mol_type = other DNA
tgatgatcccctcgcaaaacgcgcacatgcacacatgaaggccggttcgttaaccggcctttctattgggtacgc

SEQ ID NO: 641203 - DNA, 75 bp, synthetic construct
  source 1..75: mol_type = other DNA
ttttgggctcgctgtttgcgttgtatatcatttggggctcgacttattttgtcattcggattggggtggaaagct

SEQ ID NO: 641204 - DNA, 75 bp, synthetic construct
  source 1..75: mol_type = other DNA
ttgctggcatttttgctactgcgcggacacaaactccccccgctacgtccgctgctcaatgccgcgctgattggc

SEQ ID NO: 641205 - DNA, 75 bp, synthetic construct
  source 1..75: mol_type = other DNA
gcgattcctggcagccggtattttattgctggcatttttgctactgcgcggacacaagctccccccgctacgtcc

SEQ ID NO: 641206 - DNA, 75 bp, synthetic construct
  source 1..75: mol_type = other DNA
gcctgcgattgcccgcaaaatatattcatcggcttttccgctggtggatattaccgtggtgccggatgacgagat

SEQ ID NO: 641207 - DNA, 75 bp, synthetic construct
  source 1..75: mol_type = other DNA
gagagaggtttagaccgagagttagttctgacgctgacccgactttcaccagaggagcttctgaaccagaagcag

SEQ ID NO: 641208 - DNA, 75 bp, synthetic construct
  source 1..75: mol_type = other DNA
aacgcgcaccacaagaaaaggagaaactgatgaccattgctgacagattacgtgaagaagggcggaatgatggat

SEQ ID NO: 641209 - DNA, 75 bp, synthetic construct
  source 1..75: mol_type = other DNA
gccacgatgatgtggtggtccccggtgcctttaccacaacgctccagaaatggagcgaaaaaaaggcgctgcctg

SEQ ID NO: 641210 - DNA, 75 bp, synthetic construct
  source 1..75: mol_type = other DNA
tcggcgacggcaactgtcctgactgtggcgcggtaatgggcgacgcaacataccaggaaacattcaacgaagaaa

SEQ ID NO: 641211 - DNA, 75 bp, synthetic construct
  source 1..75: mol_type = other DNA
cgtgaagaagggcggaatgatggattaattctgggcaaaacgcgaagaagccctgcgtattgctcaggagatgct

SEQ ID NO: 641212 - DNA, 75 bp, synthetic construct
  source 1..75: mol_type = other DNA
tgactccggtgagtttgaagggtatggctccgtctttggtgtaaaggacagccacgatgatgtggtgatgtccgg

SEQ ID NO: 641213 - DNA, 75 bp, synthetic construct
  source 1..75: mol_type = other DNA
taacgttattctctggcaacgtaattgctgcaactgtagaattaggttttgaaaatgagcaatataattatgctt

SEQ ID NO: 641214 - DNA, 75 bp, synthetic construct
  source 1..75: mol_type = other DNA
ccgggatggtgcttccctcctggatggatcagggggagccgaacaagctgctgaaaacagcccggcgattctggg

SEQ ID NO: 641215 - DNA, 75 bp, synthetic construct
  source 1..75: mol_type = other DNA
cggggatggtgcttccttcctggatgaataaaggcgaaccggggaagttgctgaaaacagcgcaacggttctggg

SEQ ID NO: 641216 - DNA, 75 bp, synthetic construct
  source 1..75: mol_type = other DNA
cgaaaccaatcaacgtttattgctggaaaccgccccgaaaggcttttcgccagactgggtgcgctatgagaaaga

SEQ ID NO: 641217 - DNA, 75 bp, synthetic construct
  source 1..75: mol_type = other DNA
actatatgggctgctctacattcagtgagtataccgtcgtcgcagaagtgtctttagccaaaattaatccacagg

SEQ ID NO: 641218 - DNA, 75 bp, synthetic construct
  source 1..75: mol_type = other DNA
tcgccaggcagtggcgttgctcaaagacggtaagcgcggaagcggcgacttcccttgccctgtacaacgcataaa

SEQ ID NO: 641219 - DNA, 75 bp, synthetic construct
  source 1..75: mol_type = other DNA
tccctggtattgggcaaaccgtcgcgccggtactgtggttcctgtttagcgcctggatgttagccatccagtatt

SEQ ID NO: 641220 - DNA, 75 bp, synthetic construct
  source 1..75: mol_type = other DNA
tgcgcgatgttgcgaaggtccagattggcccggagatgcgccggggcattgccgaactaaacggcgaaggcgaag

SEQ ID NO: 641221 - DNA, 75 bp, synthetic construct
  source 1..75: mol_type = other DNA
tggaccggaaatgcgccggggcattgccgaactgaacggcgaaggcgaagtggcaggcggggggggtgatcctgc

SEQ ID NO: 641222 - DNA, 75 bp, synthetic construct
  source 1..75: mol_type = other DNA
ctggttacaatggctgagctatctgttgtggcccctggctgtcatctctgtgctgttagtgtttggctatttctt

SEQ ID NO: 641223 - DNA, 75 bp, synthetic construct
  source 1..75: mol_type = other DNA
ggattatgaaacgcgaatggcaaaaatttgcctggtatctaccacgcgctatcatattactgctcctctatgtta

SEQ ID NO: 641224 - DNA, 75 bp, synthetic construct
  source 1..75: mol_type = other DNA
gcaaggctggaagctcgtctcgcaacccgggattcggcgttttgtcattttacctctgttggtcaatattttgtt

SEQ ID NO: 641225 - DNA, 75 bp, synthetic construct
  source 1..75: mol_type = other DNA
aaaaactgtggaacctgtgtgatgtactgcgtgatgacggcatcaactacagcgattacgtcaccgaactagtgc

SEQ ID NO: 641226 - DNA, 75 bp, synthetic construct
  source 1..75: mol_type = other DNA
gaagatggtgaagttcgcgaatcttatccgtgaaggttatgaaaagcatcagattagccagccaatcgggcctcg

SEQ ID NO: 641227 - DNA, 75 bp, synthetic construct
  source 1..75: mol_type = other DNA
cgtaatgccgaaggggatgatccgaccaatctggaatcggcgctcattggcaagccagtgccgaagtttcgcctc

SEQ ID NO: 641228 - DNA, 75 bp, synthetic construct
  source 1..75: mol_type = other DNA
gctctgctacgtaacgccaaaagagcacctgggtctgcccaataaagaagacgttaagcaaggtcttatcaccta

SEQ ID NO: 641229 - DNA, 75 bp, synthetic construct
  source 1..75: mol_type = other DNA
ccgtaattccgagcgttttgttgagggtaaacactttttcaaggttgttggtgatgagttgaaaaatttgcgggt

SEQ ID NO: 641230 - DNA, 75 bp, synthetic construct
  source 1..75: mol_type = other DNA
aagacggtctcggtgatctttatgaaggtctgctggagaaaaacgccggagaaacaaaatctggcgcaggtcaat

SEQ ID NO: 641231 - DNA, 75 bp, synthetic construct
  source 1..75: mol_type = other DNA
tctctggccaaaattaatccagaagcaaaccatgaacacgtctgcctgctgggctgtggcgtgaccactggcatt

SEQ ID NO: 641232 - DNA, 75 bp, synthetic construct
  source 1..75: mol_type = other DNA
cataccatgagcctggatgaaattaatgacgcctttgacctgatgcatgaaggcaaatccattcgaaccgtaatt

SEQ ID NO: 641233 - DNA, 75 bp, synthetic construct
  source 1..75: mol_type = other DNA
gaatacaccgtggtcgcggaagtgtctctggcaaaaattaatccagaagcaaaccatgaacacgtctgcctgctg

SEQ ID NO: 641234 - DNA, 75 bp, synthetic construct
  source 1..75: mol_type = other DNA
gatctcaatccccgcgtctggcaagaagagatcaagccgctgtgggagaaatacagtaaggaggccgcacaatga

SEQ ID NO: 641235 - DNA, 75 bp, synthetic construct
  source 1..75: mol_type = other DNA
tgcctacacagctatgtgctttgctcaatcgtccgttgatccgtgcccaacatacagcatcaatggaagaggctc

SEQ ID NO: 641236 - DNA, 75 bp, synthetic construct
  source 1..75: mol_type = other DNA
gggacgccgctcatggttagcgtcaacgtcaatacgccgtatccagagttcgttccagaagtgaagaagggctac

SEQ ID NO: 641237 - DNA, 75 bp, synthetic construct
  source 1..75: mol_type = other DNA
gcggcggttcgattatggcgaaatggtgcctctcccatcatcaggaaaatttcctctatcaacacttccgcgaaa

SEQ ID NO: 641238 - DNA, 75 bp, synthetic construct
  source 1..75: mol_type = other DNA
gggaaacactacttcaaattggaaggggctgaattgcgggaatttaagaacaaggttactcaaagtaacttagtt

SEQ ID NO: 641239 - DNA, 75 bp, synthetic construct
  source 1..75: mol_type = other DNA
aactggaagactgttatttcagccagaaacagccaccagcaacacaaaactcccccaccgaaaatgatggatgcg

SEQ ID NO: 641240 - DNA, 75 bp, synthetic construct
  source 1..75: mol_type = other DNA
cccaccgaaaatgatggatgcgcattactgatccacttcgataaacacggtcaggtcgacttcacggaaaaagta

SEQ ID NO: 641241 - DNA, 75 bp, synthetic construct
  source 1..75: mol_type = other DNA
gaactgggggcgagcgatgaggcggatgcgcagcgtcagttgctggaagaagcgtttggtggggtgaaggaatga

SEQ ID NO: 641242 - DNA, 75 bp, synthetic construct
  source 1..75: mol_type = other DNA
cattgctgatccacttcgataaacacggtcaggtctacttcacggaaaaagtacccgccgatgcgatggtatgca

SEQ ID NO: 641243 - DNA, 75 bp, synthetic construct
  source 1..75: mol_type = other DNA
tgttgatccacttcgataaacacggtcaggtagagttcacggaaaaagtacccgccgatgcgatggtatgcactc

SEQ ID NO: 641244 - DNA, 75 bp, synthetic construct
  source 1..75: mol_type = other DNA
ttcacgaaacccgcgagtggattttgcgtaacagcccggtgccgatcggtacagtgccgatctaccaggcgctgg

SEQ ID NO: 641245 - DNA, 75 bp, synthetic construct
  source 1..75: mol_type = other DNA
ctgcttatgacgtttcgctgtcgctgggcgacggcctgcgccccggttctattcaggacgccaacgatgaagcgc

SEQ ID NO: 641246 - DNA, 75 bp, synthetic construct
  source 1..75: mol_type = other DNA
tgaaaccctgccgcaagagtccggtaaagtcgcccatttttgctccatgtgtgggccgaaattctgctcgatgaa

SEQ ID NO: 641247 - DNA, 75 bp, synthetic construct
  source 1..75: mol_type = other DNA
tggaacggttcaaattttatctggaacaacgcggctggatcgttgcccgtaaagagcagctggtggaacgactga

SEQ ID NO: 641248 - DNA, 75 bp, synthetic construct
  source 1..75: mol_type = other DNA
attcaggacgccaacgatgaagcgcagtttgccgagctgcatacgctgggtgaactgaccaaaatcgcctgggaa

SEQ ID NO: 641249 - DNA, 75 bp, synthetic construct
  source 1..75: mol_type = other DNA
gtcgctgggcgacggtctgcgccccggttctattcaggacgccaacgatgaagcgcagtttgccgagctgcatac

SEQ ID NO: 641250 - DNA, 75 bp, synthetic construct
  source 1..75: mol_type = other DNA
gggtgtggttcatcctggccgtgcagggaatgcaggaagaagaagcccaggcggattacctgacccgtgtgtctg

SEQ ID NO: 641251 - DNA, 75 bp, synthetic construct
  source 1..75: mol_type = other DNA
tctcgatacctcggttattgatgaattaccgcctggtcgtacgccagtaacgactgttgctatcccggatacacg

SEQ ID NO: 641252 - DNA, 75 bp, synthetic construct
  source 1..75: mol_type = other DNA
ggtaaaacgctggttgccgccctcgccgcactgcgtgctattgtacatggtaaacaagtggcattgatggcgccg

SEQ ID NO: 641253 - DNA, 75 bp, synthetic construct
  source 1..75: mol_type = other DNA
tgagctacaactgctggttgccactaccgttattgaagtcggcgttgatgtgcctaacgccagtctgatgattat

SEQ ID NO: 641254 - DNA, 75 bp, synthetic construct
  source 1..75: mol_type = other DNA
cgagctgcacctgttggttgccactaccgtcattgaagtcggtgttgatgtacctaacgccagtctgatgattat

SEQ ID NO: 641255 - DNA, 75 bp, synthetic construct
  source 1..75: mol_type = other DNA
cggatgaaacctgccgagaaacaggcggtgatggcatcgtttaaacagggcgagctgcacctgttggttgccact

SEQ ID NO: 641256 - DNA, 75 bp, synthetic construct
  source 1..75: mol_type = other DNA
ctgccgccaggccgcacgccagtgactacggtcgctattcctgatacccgccgtaccgatatcattgaccgcgtg

SEQ ID NO: 641257 - DNA, 75 bp, synthetic construct
  source 1..75: mol_type = other DNA
agcaggccacgctgcgtaaattaaccgaccaggcgctggatctgctcgacacctgcgccattgaagaactcctgc

SEQ ID NO: 641258 - DNA, 75 bp, synthetic construct
  source 1..75: mol_type = other DNA
cagctacgcgcacggtatcaaagtacctgctctctcagtaatcgtggaggatgggaaaatttgggtaaataacgg

SEQ ID NO: 641259 - DNA, 75 bp, synthetic construct
  source 1..75: mol_type = other DNA
gaatactggaacagtgaggaagttaaggattacatcaaggggcttgcatacagctacgcgcacggtatcaaagta

SEQ ID NO: 641260 - DNA, 75 bp, synthetic construct
  source 1..75: mol_type = other DNA
gctggtgattatcgacgaacagcatcgttttggcgtgcatcagcgtctggcattgtgggagaaaggccagcagca

SEQ ID NO: 641261 - DNA, 75 bp, synthetic construct
  source 1..75: mol_type = other DNA
tcagcatgttagctttacgtgccggagcgcaacgttttcatgcccagccgcttagcgacaatgacgcgctgaaaa

SEQ ID NO: 641262 - DNA, 75 bp, synthetic construct
  source 1..75: mol_type = other DNA
agcacagcgttttcatgcccagccgctgagcgccaatgacgcgctgaaaaataaactcctcgccgccttaccgtt

SEQ ID NO: 641263 - DNA, 75 bp, synthetic construct
  source 1..75: mol_type = other DNA
tcagcatgttagccttacgcgccggagcgcaacgtttccatgcccagccgctgagcgccaatgacacgctgaaaa

SEQ ID NO: 641264 - DNA, 75 bp, synthetic construct
  source 1..75: mol_type = other DNA
atggaattaaaggattattacgccatcatgggcgtgaaaccgacggacgatctaaagacaatcaagaccgcctat

SEQ ID NO: 641265 - DNA, 75 bp, synthetic construct
  source 1..75: mol_type = other DNA
actgccgcgctgtggcaacaactggcagacgcccagtcgtcttttgatccacgtaaagattgggggaaagcatga

SEQ ID NO: 641266 - DNA, 75 bp, synthetic construct
  source 1..75: mol_type = other DNA
gtttacccaactacggaaggcgtaaagcaggccacgctgcgtaaattaaccgaccaggcgctggatctgctcgac

SEQ ID NO: 641267 - DNA, 75 bp, synthetic construct
  source 1..75: mol_type = other DNA
cagacggacgcacccttgatgtggagggtggcgattaccaggtcatcgaaaacgtgcgcgtggtggataaggtct

SEQ ID NO: 641268 - DNA, 75 bp, synthetic construct
  source 1..75: mol_type = other DNA
agcacaccgggcagcattgccgcgcatgaaacctatttcggcaagccgctgcgtgaaatggcgatttcaacccag

SEQ ID NO: 641269 - DNA, 75 bp, synthetic construct
  source 1..75: mol_type = other DNA
acgcgggcgccattatggtgctgttcgtgtttgtggtgatgatgcttaacctgggcggttcggaaatcgaacagg

SEQ ID NO: 641270 - DNA, 75 bp, synthetic construct
  source 1..75: mol_type = other DNA
gcgaaaatcaacctgcataccgtgcaggatttactcttacaccttcccctgcgctacgaagatcgcacccatctc

SEQ ID NO: 641271 - DNA, 75 bp, synthetic construct
  source 1..75: mol_type = other DNA
cgacggttttgtgattgcacaaaaagatctggagattcgcggccctggcgaattgttaggcacgcgtcagacggg

SEQ ID NO: 641272 - DNA, 75 bp, synthetic construct
  source 1..75: mol_type = other DNA
tggtgcagggcgatgtaggttccggtaaaacgctggtcgccgccctcgccgcgttgcgtgcgattgcccacggca

SEQ ID NO: 641273 - DNA, 75 bp, synthetic construct
  source 1..75: mol_type = other DNA
ctggctggtaagcagaaaggtaaagcgcgactggcgcagcaggaagccatcgccaacggtcaggtgcagatgatt

SEQ ID NO: 641274 - DNA, 75 bp, synthetic construct
  source 1..75: mol_type = other DNA
gcgcaggcagcagaagccacgtgggaagagctgaaactggccttaccggaactgaatgtcggtctggtacacgga

SEQ ID NO: 641275 - DNA, 75 bp, synthetic construct
  source 1..75: mol_type = other DNA
cgacggatttgtgattgcgcaaaaagatttagagattcgcggccctggtgaactgctgggcacgcgccagacagg

SEQ ID NO: 641276 - DNA, 75 bp, synthetic construct
  source 1..75: mol_type = other DNA
tggcaggcgcatccattcagtggctgcgcgatgagatgaagctgattaatgacgcctacgattccgaatatttcg

SEQ ID NO: 641277 - DNA, 75 bp, synthetic construct
  source 1..75: mol_type = other DNA
gtgaacgctaaccacattatacgcgcgacgctggagtctattgcttatcagacgcgtgacgtgctggaagcaatg

SEQ ID NO: 641278 - DNA, 75 bp, synthetic construct
  source 1..75: mol_type = other DNA
atggacggacaaatatcaatcgttcgaccaggagcatgtgacgatcgcgaaatacgaataattattcgtctggca

SEQ ID NO: 641279 - DNA, 75 bp, synthetic construct
  source 1..75: mol_type = other DNA
cagggtcgcgttcacgtcaccgattacaccaacgcgtctcgtaccatgttgttcaacatccatactctggactgg

SEQ ID NO: 641280 - DNA, 75 bp, synthetic construct
  source 1..75: mol_type = other DNA
tgtatatgtggttccggcgtttaccgggctgggtgcgccatactgggatccgtatgcgcgcggggcgattttcgg

SEQ ID NO: 641281 - DNA, 75 bp, synthetic construct
  source 1..75: mol_type = other DNA
cgctcgaccagggcaccaccagctcccgcgcggtcgtgatggatcacgatgccaatatcattagcgtgtcgcagc

SEQ ID NO: 641282 - DNA, 75 bp, synthetic construct
  source 1..75: mol_type = other DNA
atgagtttgcgccgggaagtatcggccacctgctggagccggatatcaatcaggaaatctacggcctgccggaat

SEQ ID NO: 641283 - DNA, 75 bp, synthetic construct
  source 1..75: mol_type = other DNA
tgcaactggtgcagttaagtaaaccagaaatcgcgcaggcgatatttggcaccacacttaccgggttcagccagc

SEQ ID NO: 641284 - DNA, 75 bp, synthetic construct
  source 1..75: mol_type = other DNA
ctcagtgcattcacatttgatgggccttatcgcctgaccgggcatgacctgctggataatatgtactgtgctgat

SEQ ID NO: 641285 - DNA, 75 bp, synthetic construct
  source 1..75: mol_type = other DNA
gccgcactgaagttgctgtggtttacgatcctatgcgtaacgaactgttcaccgccactcgcggtcagggcgcac

SEQ ID NO: 641286 - DNA, 75 bp, synthetic construct
  source 1..75: mol_type = other DNA
ggtagaacaataactgctctcattactccagaaaatctcgcattagcattaaccggaaagtcagacctgccagta

SEQ ID NO: 641287 - DNA, 75 bp, synthetic construct
  source 1..75: mol_type = other DNA
ggcgaaagataacttctccgatatcaagagcgtcagccgtgacgaccagttagccgcgcaccgggtaccgcccgc

SEQ ID NO: 641288 - DNA, 75 bp, synthetic construct
  source 1..75: mol_type = other DNA
ggtcagaccaacattggcggcaaaggcggcacacgtattccgatcgccgggatcgcaggcgatcagcaagcggcg

SEQ ID NO: 641289 - DNA, 75 bp, synthetic construct
  source 1..75: mol_type = other DNA
cgcgcgaaacgattcgtctgggtcagcagattgaaaaacttggcgtagatgccgtgtcggtcattgccccttact

SEQ ID NO: 641290 - DNA, 75 bp, synthetic construct
  source 1..75: mol_type = other DNA
atatcccctccaggagaacggacagatattgctggcatttccgcgtctgtttattgttgcccgccgtacggagta

SEQ ID NO: 641291 - DNA, 75 bp, synthetic construct
  source 1..75: mol_type = other DNA
tttgattgccccggtcatcagggcggcgaatttttccgtcgccatccggcggggaatcagtttgtggaatacttt

SEQ ID NO: 641292 - DNA, 75 bp, synthetic construct
  source 1..75: mol_type = other DNA
aacaaagagatagatgcttccgtgatattttcacaacttgagattgctcaggctgaagggtatgacaatattaaa

SEQ ID NO: 641293 - DNA, 75 bp, synthetic construct
  source 1..75: mol_type = other DNA
acagggaagagcaaggcgaaccggaaaaacgttacagacgcgactgaggagcttgtacagctgtctattgccaaa

SEQ ID NO: 641294 - DNA, 75 bp, synthetic construct
  source 1..75: mol_type = other DNA
ttcgctgatccataaagggtttgtcgagggatgttcagcctgtatctctgggctcgccaacatcgcgccgcgaga

SEQ ID NO: 641295 - DNA, 75 bp, synthetic construct
  source 1..75: mol_type = other DNA
tacgccaacattcatcaactggcaaaaacgttacaggttcctgaacaaggtgacgcgctggtgacacaaatcaat

SEQ ID NO: 641296 - DNA, 75 bp, synthetic construct
  source 1..75: mol_type = other DNA
aaaatcctcggttccacaggacgatatttactgatctatgcgctgattgttgcaggaatggtggtgttgttttta

SEQ ID NO: 641297 - DNA, 75 bp, synthetic construct
  source 1..75: mol_type = other DNA
acccgtacttttctggcaccaaagtgaagtggatcctcgaccatgtggaaggctctcgcgagcgtgcgcgtcgtg

SEQ ID NO: 641298 - DNA, 75 bp, synthetic construct
  source 1..75: mol_type = other DNA
atagacgctactggctatggcattcctgtttttattgcaacggaaaatgaagaacgtgtacccgcagaatatctg

SEQ ID NO: 641299 - DNA, 75 bp, synthetic construct
  source 1..75: mol_type = other DNA
cgtccgttccgcctcgctgtgattcagttaggcacctacgacggtacgatttataacgcccgccaggtggtggat

SEQ ID NO: 641300 - DNA, 75 bp, synthetic construct
  source 1..75: mol_type = other DNA
tatcgaatgccaaagagcatcccacggagctgtattgtgggaaaagagaagaaatcacgcgttctgacaaaaccc

SEQ ID NO: 641301 - DNA, 75 bp, synthetic construct
  source 1..75: mol_type = other DNA
tttaggctttaacgaggcgacgattcgccgcaattactaccccaccacggacggtcgcgaagacgccatcatcat

SEQ ID NO: 641302 - DNA, 75 bp, synthetic construct
  source 1..75: mol_type = other DNA
tcacgcaaatctaccagccgccggtctccaaaggagatggctacgaccgtgacaacctgttaaaagccgataaat

SEQ ID NO: 641303 - DNA, 75 bp, synthetic construct
  source 1..75: mol_type = other DNA
tagtcagtgggtattgccgttccagcacagcctgcaacggctgggtatcaacatggacattcgcaaggtggataa

SEQ ID NO: 641304 - DNA, 75 bp, synthetic construct
  source 1..75: mol_type = other DNA
tgatgaaccggggagctattacccgctgattgccgaaagtgcacgctatgccgacgatttttcctgggtagaggt

SEQ ID NO: 641305 - DNA, 75 bp, synthetic construct
  source 1..75: mol_type = other DNA
cggaagttcatccccgggaagtgattaaacgcgccctgtaccacaatgctgctgccgtggtgctggcgcacaatc

SEQ ID NO: 641306 - DNA, 75 bp, synthetic construct
  source 1..75: mol_type = other DNA
atgcagcagctttcctttctgcccggagaaatgacaaccagagagcgcagcctcattcagcgagccctgaaaacc

SEQ ID NO: 641307 - DNA, 75 bp, synthetic construct
  source 1..75: mol_type = other DNA
tggaaaacgacgccaaaaactgggccacgcgctataccggtaaaaatttcgataaaaaatacatcatcaaagatg

SEQ ID NO: 641308 - DNA, 75 bp, synthetic construct
  source 1..75: mol_type = other DNA
ctggtggatatccgggtaccggaccatctgatagttggtggcaaccaggttttctcctttgcggaacacggtctg

SEQ ID NO: 641309 - DNA, 75 bp, synthetic construct
  source 1..75: mol_type = other DNA
tggatatccgggtgccggaccatctgatagtcggtggcagtcaggttttctcctttgcggaacacggtctgcttt

SEQ ID NO: 641310 - DNA, 75 bp, synthetic construct
  source 1..75: mol_type = other DNA
gcacgacaggagcgggaaatgtttgttgtgctttacctcgataaccagaaccgactgctggaacacgaaacgcta

SEQ ID NO: 641311 - DNA, 75 bp, synthetic construct
  source 1..75: mol_type = other DNA
cgccctgtttacagcctgggtatcgatacctggtggtatgacgttaataaagcgacgaaactgccgtcagccaga

SEQ ID NO: 641312 - DNA, 75 bp, synthetic construct
  source 1..75: mol_type = other DNA
gacgccaaaaactgggccacgcgctataccggtaaaaatttcgacaaaaaatacattatcaaagacgaacaaaag

SEQ ID NO: 641313 - DNA, 75 bp, synthetic construct
  source 1..75: mol_type = other DNA
tttcgctgccggtatttccagaaaagtactggaaggatcacaaacttagcgacccgctcgccacgcctccgcttg

SEQ ID NO: 641314 - DNA, 75 bp, synthetic construct
  source 1..75: mol_type = other DNA
gttgctgctggtcatcaaggcaaaggtacaaccattcgttgctctgcttctcgtcagcctgttagtcgcacttgc

SEQ ID NO: 641315 - DNA, 75 bp, synthetic construct
  source 1..75: mol_type = other DNA
cgccagaaggatgcggaccttcagtctcagtatcagaccggggatatcagtgaggatttttacagacaggctctg

SEQ ID NO: 641316 - DNA, 75 bp, synthetic construct
  source 1..75: mol_type = other DNA
gacagagcagaaccggctgattgatgaacaggccagtcgggtgaaatccctgcaggaaaaaatcgcaggatatca

SEQ ID NO: 641317 - DNA, 75 bp, synthetic construct
  source 1..75: mol_type = other DNA
tgttcagttcaggcgggcagtcagcgcagccctgtactcagtgctgcgtttatcaggatcaaaattattctgaag

SEQ ID NO: 641318 - DNA, 75 bp, synthetic construct
  source 1..75: mol_type = other DNA
agcaactggtgcgcgagatgatggcgctgggcgacaaaatcgaactgcatacctttggtaagttctcgccgttca

SEQ ID NO: 641319 - DNA, 75 bp, synthetic construct
  source 1..75: mol_type = other DNA
gtacccggactggtgatgctgggggctgcagcatggtacacgctgtaccagaatcaggagcaggccagggagtct

SEQ ID NO: 641320 - DNA, 75 bp, synthetic construct
  source 1..75: mol_type = other DNA
tggcggccacacaggaacgcctgaacagaaatattgctgccagaagcgccgcccagaatgcgctgaacagtacaa

SEQ ID NO: 641321 - DNA, 75 bp, synthetic construct
  source 1..75: mol_type = other DNA
tgtctgcattggcgcaatgtaataccgataaagctgacatcagaaggattgaagttgagcgtggtcacatcatgc

SEQ ID NO: 641322 - DNA, 75 bp, synthetic construct
  source 1..75: mol_type = other DNA
gcggtaccactaccggcgaacctgaccgctgaaaccccacagccagctattcctgatccgctgacttacaaagat

SEQ ID NO: 641323 - DNA, 75 bp, synthetic construct
  source 1..75: mol_type = other DNA
tgttggcatttccgctcctggcgctggctaacccgcataatcgttcggacgtagaagttaatgtgccggcggagg

SEQ ID NO: 641324 - DNA, 75 bp, synthetic construct
  source 1..75: mol_type = other DNA
ttgctgattcccttgtcaaaggctgggaaaccagaattccggcaatgaaatttagtgaatgggatcaattccggt

SEQ ID NO: 641325 - DNA, 75 bp, synthetic construct
  source 1..75: mol_type = other DNA
gaacaggccgtccgttccagaaaagttgaagctgaacgtgaagttcgcattaaagagatcgaacagcagcaggtc

SEQ ID NO: 641326 - DNA, 75 bp, synthetic construct
  source 1..75: mol_type = other DNA
aagggcgattcagtcattatattgatgaaatattatcaacagagaatgtgagatattttcgtgtctttttgttaa

SEQ ID NO: 641327 - DNA, 75 bp, synthetic construct
  source 1..75: mol_type = other DNA
ttatgggacgtggtacgagaccagggcaatgcgctaatggctggtcgggaaggggatccgttgtatcagatatag

SEQ ID NO: 641328 - DNA, 75 bp, synthetic construct
  source 1..75: mol_type = other DNA
ctatccgcgtgaccgtgttcttcgacggttgttcaaactcaacaatgagtttcagcgcaacagaataatccggag

SEQ ID NO: 641329 - DNA, 75 bp, synthetic construct
  source 1..75: mol_type = other DNA
agcctttgctgatggcaaagtactcctgctgggcgacgcaggcgatagtagctgccgtgaacgtgaactaattaa

SEQ ID NO: 641330 - DNA, 75 bp, synthetic construct
  source 1..75: mol_type = other DNA
cgtacatcaggctgtgggggcgctgagcggcggcaatcaacaaaaaatcgtgttatcgaaatggctggagaaaac

SEQ ID NO: 641331 - DNA, 75 bp, synthetic construct
  source 1..75: mol_type = other DNA
tcccgcactggcgctaccattgcctgaaggtagcccgctggtggtaaagcgcattacgccggtggttgaacgcca

SEQ ID NO: 641332 - DNA, 75 bp, synthetic construct
  source 1..75: mol_type = other DNA
cgttatgggacgtggtacgaggccagggccgtgcgctaatggctgggcgggaaggggatccgctgtatcagatat

SEQ ID NO: 641333 - DNA, 75 bp, synthetic construct
  source 1..75: mol_type = other DNA
gtctatatcgaagaacatgatggacgtaagcaagtctggtgctatgtcatcaagcctcgtgatgcgcaaggcacc

SEQ ID NO: 641334 - DNA, 75 bp, synthetic construct
  source 1..75: mol_type = other DNA
cgttgctacaggctggcgcgacaccggtttatctggaaaccgcacgtaacccgtatggctttatcggtggcattg

SEQ ID NO: 641335 - DNA, 75 bp, synthetic construct
  source 1..75: mol_type = other DNA
taaaaaagacagacacatcaaagggcaacagcgttatgtgccacataaacgcatgaataatgctttcatgatgca

SEQ ID NO: 641336 - DNA, 75 bp, synthetic construct
  source 1..75: mol_type = other DNA
aaaccgcatatgagaaaacaattacggatattaatgatgcagccaaataccttctttttcaggtgaaagactaca

SEQ ID NO: 641337 - DNA, 75 bp, synthetic construct
  source 1..75: mol_type = other DNA
ggttttaaacgccctgctgacaccgggtgatctggtgctgtttgaccgcaataaccataagtctaaccatcacgg

SEQ ID NO: 641338 - DNA, 75 bp, synthetic construct
  source 1..75: mol_type = other DNA
atggttagacttatggttattgcggtcaaacagcaccagatcacccggggtcatcagggaggtgagtttttccgt

SEQ ID NO: 641339 - DNA, 75 bp, synthetic construct
  source 1..75: mol_type = other DNA
acgtcaactggctgcggcagggacagcaattattctggtgtcctctgaactgccagaagtcatggcacttagcga

SEQ ID NO: 641340 - DNA, 75 bp, synthetic construct
  source 1..75: mol_type = other DNA
ctgcctgctctgcatctggcgatcagcgcggtcttcattctgatctcctctggcgctattttgtttgaaaccagc

SEQ ID NO: 641341 - DNA, 75 bp, synthetic construct
  source 1..75: mol_type = other DNA
cttgcccgcacgctggtacagccagcagaaatgcccgtaggattattaaccagtctgcttggtgggccttatttt

SEQ ID NO: 641342 - DNA, 75 bp, synthetic construct
  source 1..75: mol_type = other DNA
aacttcgatgatgatgagaagagtgctgtccgtgaaattgcccgttcgctgggtttcgacccggctgaatttggc

SEQ ID NO: 641343 - DNA, 75 bp, synthetic construct
  source 1..75: mol_type = other DNA
aaaggacggtgatgcttcgacaaaccgcacgttatcactgacccgtgaggacgaagaaaatgacctgttcactct

SEQ ID NO: 641344 - DNA, 75 bp, synthetic construct
  source 1..75: mol_type = other DNA
ttatcaaaaatgacagtcataaccaaaagctattggaggtagtaaatccgtttgggaacaactttgacataatta

SEQ ID NO: 641345 - DNA, 75 bp, synthetic construct
  source 1..75: mol_type = other DNA
atgaccgtacatcgctacttagcacccataaggtgctgcgtaatacctatttcttgctgagcctgacgctggcct

SEQ ID NO: 641346 - DNA, 75 bp, synthetic construct
  source 1..75: mol_type = other DNA
aatgggcagccctataccatcaccggtgggacggtctgtttcgtacgcgatcatgatcggcatctgtatgaacat

SEQ ID NO: 641347 - DNA, 75 bp, synthetic construct
  source 1..75: mol_type = other DNA
cggtgcgtcatcttaatagcggcggcgagctgcgaattgtagcgaacgccttcctgccttacccggacgtgctgg

SEQ ID NO: 641348 - DNA, 75 bp, synthetic construct
  source 1..75: mol_type = other DNA
cgactgatggcacgcaagtaacagagtttcactgtcatccggcaaatacctttgatgctattgcgcgcgttaaaa

SEQ ID NO: 641349 - DNA, 75 bp, synthetic construct
  source 1..75: mol_type = other DNA
aaaaggcgaaacgatgaaatatatcctcgccctgaaagaccagccagaggcagctcaactggctcttcgtgtcgg

SEQ ID NO: 641350 - DNA, 75 bp, synthetic construct
  source 1..75: mol_type = other DNA
atgttatcaaccagcttatgattcgaatcttcgaagaacactagcaatgggaagaaatttcaagttaaagaaaaa

SEQ ID NO: 641351 - DNA, 75 bp, synthetic construct
  source 1..75: mol_type = other DNA
atactcgaacaattaaatgatcccctcggaagagaaaattatttaagaaagcatgtgctaccatctctgaaaatg

SEQ ID NO: 641352 - DNA, 75 bp, synthetic construct
  source 1..75: mol_type = other DNA
gatggtaaaccctggcagtcttatgaaacagcgcaaattgcggttgatctgcgcttcttccagtttgtaccaggg

SEQ ID NO: 641353 - DNA, 75 bp, synthetic construct
  source 1..75: mol_type = other DNA
caatattgctgtcgatcccgactatcagcgtcagggattgggaagggcgctactggagcatctgatcgacgaact

SEQ ID NO: 641354 - DNA, 75 bp, synthetic construct
  source 1..75: mol_type = other DNA
atggatgaggggtcactgtctctgccaccatttaccggatacgaagaaaaaggtctacgcgactatcatctcgcg

SEQ ID NO: 641355 - DNA, 75 bp, synthetic construct
  source 1..75: mol_type = other DNA
ccagttgggtgagcttgaactaaaacccataatggctcaggcgttgcatatgggggatgaggtacataaccgtaa

SEQ ID NO: 641356 - DNA, 75 bp, synthetic construct
  source 1..75: mol_type = other DNA
accgccactcgcggtcagggcgcacagctgaacggctaccgtctgcgcggtagcaccgctcgcgatctcgacggt

SEQ ID NO: 641357 - DNA, 75 bp, synthetic construct
  source 1..75: mol_type = other DNA
cgatcctatgcgtaacgaactgttcaccgccactcgcggtcagggcgcacagctgaacggctaccgtctgcgcgg

SEQ ID NO: 641358 - DNA, 75 bp, synthetic construct
  source 1..75: mol_type = other DNA
attcgccgcaattactaccccaccacggacggtcgcgaagacgccatcatcatggcgttgccaatcagtatgtaa

SEQ ID NO: 641359 - DNA, 75 bp, synthetic construct
  source 1..75: mol_type = other DNA
atcttttgtcgcagtcaccactattttcctcgggaaaatgagatcccggcgatcgttaaaccttttattgatcgc

SEQ ID NO: 641360 - DNA, 75 bp, synthetic construct
  source 1..75: mol_type = other DNA
aggcagcggacttgtgtattgcatggcgcatgggcaagggggggcagaaataaaaaatgatgggacatcacctac

SEQ ID NO: 641361 - DNA, 75 bp, synthetic construct
  source 1..75: mol_type = other DNA
tgtgaaaggctgcaaggttttcctgatggacatacattgatccctacggaaaagcgtaaaaaagtttcttcagat

SEQ ID NO: 641362 - DNA, 75 bp, synthetic construct
  source 1..75: mol_type = other DNA
gctatacgccggaagataaaaataaaacagtgccggagcacgcctccggcaacttgcataaaaacaaacacaaca

SEQ ID NO: 641363 - DNA, 75 bp, synthetic construct
  source 1..75: mol_type = other DNA
ctgcaccgatggcctgttttgtcgctgctgtacgtgaactggcggagatcgtcgcaaaggagaaccatcatggtt

SEQ ID NO: 641364 - DNA, 75 bp, synthetic construct
  source 1..75: mol_type = other DNA
gtctggcctggatgcgtgatgaactggcgccggccatgaaagcagcaatcgcacaacacggcgagctggaactca

SEQ ID NO: 641365 - DNA, 75 bp, synthetic construct
  source 1..75: mol_type = other DNA
ctacatcaacatcgtcggcaaactgttcaacgaatgtgcagacttccgtcgtaccggttctgcggcgctggatct

SEQ ID NO: 641366 - DNA, 75 bp, synthetic construct
  source 1..75: mol_type = other DNA
gaaaatgccaaccaaatcgccatgacacgttatctcgaagcacagcccgtgctggtggatgtcatgctcgctaaa

SEQ ID NO: 641367 - DNA, 75 bp, synthetic construct
  source 1..75: mol_type = other DNA
tacttttagcaatttcaatgaaggtctgggtaaggttctccgttttggcgccaataacgatgaagttctcaatcg

SEQ ID NO: 641368 - DNA, 75 bp, synthetic construct
  source 1..75: mol_type = other DNA
cttctccttcccagtggtgctggtgctctatgagcaaatggtgtttgccattgccggaagtttagtagtctgcac

SEQ ID NO: 641369 - DNA, 75 bp, synthetic construct
  source 1..75: mol_type = other DNA
gttgaaggtctgttcttccccggatttggcgttgacgacgccgctgctgacctgggcgatagcgcaattaccgaa

SEQ ID NO: 641370 - DNA, 75 bp, synthetic construct
  source 1..75: mol_type = other DNA
ccgattgcctgggaagatatgtgtggtccggtaaaaggggcgattattggtgccatgctgtacgaaggctgggct

SEQ ID NO: 641371 - DNA, 75 bp, synthetic construct
  source 1..75: mol_type = other DNA
tacttttagcaatttcaatgaaggtctgggtaaggttctccgttttggtgccaataacgacgaagttctcaatcg

SEQ ID NO: 641372 - DNA, 75 bp, synthetic construct
  source 1..75: mol_type = other DNA
aacaaacaactacaggggcaaattaacgatgtcacacagcgctggattgatgaaaaaggtaagagccatcccatt

SEQ ID NO: 641373 - DNA, 75 bp, synthetic construct
  source 1..75: mol_type = other DNA
tgacgcagcgctcagtcggctgcagtcagcgtttgatacctacaaaaccgaacagacaacgcttgagaacgctgc

SEQ ID NO: 641374 - DNA, 75 bp, synthetic construct
  source 1..75: mol_type = other DNA
tgcagcagtacaacgccgccctcggttacgacgacactgcttccgccactgccgccggcactggcgcagcgtccg

SEQ ID NO: 641375 - DNA, 75 bp, synthetic construct
  source 1..75: mol_type = other DNA
tggatggtatcaacccggcaccgcgcggcatgccgcagatcgaagttatcttcgatatcgatgctgacggtatcc

SEQ ID NO: 641376 - DNA, 75 bp, synthetic construct
  source 1..75: mol_type = other DNA
gcacccgctctggcacagcgaccgggcaacctgaaaccactgacacccggttacgcgattcgggtgtctcccagc

SEQ ID NO: 641377 - DNA, 75 bp, synthetic construct
  source 1..75: mol_type = other DNA
gagtgcgtgtttactcgcggtttcgtgcgccagtacaacgccgcactcggatacgacaacgcatccgtcgacacc

SEQ ID NO: 641378 - DNA, 75 bp, synthetic construct
  source 1..75: mol_type = other DNA
gcggtcatgctcgatgggtattaccgggaaggagagccactgcgtctcggtctggggttataccccggcgaacaa

SEQ ID NO: 641379 - DNA, 75 bp, synthetic construct
  source 1..75: mol_type = other DNA
cctgatttattcattgctagatggcgaaatacgccgttacaacagacgacagaacataatttgtcgcgagtgccg

SEQ ID NO: 641380 - DNA, 75 bp, synthetic construct
  source 1..75: mol_type = other DNA
gccgccagtggtgatgtttacaattccggttacggagtattcccgtctgaacaggctcgtaaggactggcaaaat

SEQ ID NO: 641381 - DNA, 75 bp, synthetic construct
  source 1..75: mol_type = other DNA
gggaaaaaattaaagggcaggttgttgaacttgtacgccagagtgggcgcgagacgttacggcaactggaagcca

SEQ ID NO: 641382 - DNA, 75 bp, synthetic construct
  source 1..75: mol_type = other DNA
tgttgaacttgtacgtcttagcggtcgcgagacgttacggcaactggaagcgaaaacaggtgcgacaagatatct

SEQ ID NO: 641383 - DNA, 75 bp, synthetic construct
  source 1..75: mol_type = other DNA
cggcgcacctgttcactgacagcccggtccgccaggtttcagaagggctgtatctgcatgttcctgatgaagaac

SEQ ID NO: 641384 - DNA, 75 bp, synthetic construct
  source 1..75: mol_type = other DNA
atttacaggggggggctgtgagtgaaattagctatcaggcttcaattgccgctggtattcgcatcaaaggagagg

SEQ ID NO: 641385 - DNA, 75 bp, synthetic construct
  source 1..75: mol_type = other DNA
tgttgaacttgtacgccagagtggacgcgagacgttacgccaactggaggcgaaaacaggggcgacaagatatct

SEQ ID NO: 641386 - DNA, 75 bp, synthetic construct
  source 1..75: mol_type = other DNA
gtagccagtggtgttgtatatggctcagggtatggaatattcccttcagcgcaggcacgtaaggactggataaaa

SEQ ID NO: 641387 - DNA, 75 bp, synthetic construct
  source 1..75: mol_type = other DNA
gaacgcctgaacatcccctgcccgtggcgttactacaacgatcgcgatgtacgtacaatcgttgaactgggaaaa

SEQ ID NO: 641388 - DNA, 75 bp, synthetic construct
  source 1..75: mol_type = other DNA
gacggagaaatacgccgctacgacaggcgtcagaacataatctgtcgcgagtgccggaaaggcaaggttatgcag

SEQ ID NO: 641389 - DNA, 75 bp, synthetic construct
  source 1..75: mol_type = other DNA
cacaggcgaccgatttagtcgagcagcagacgctgcatcgtgaggttgaagcctatgaagcacgcctggttcggt

SEQ ID NO: 641390 - DNA, 75 bp, synthetic construct
  source 1..75: mol_type = other DNA
acaggctcgcaaggactggcaaagcgcccgcaaaaaactctcgagagtaaaggtgaggaaaccggttgtggttga

SEQ ID NO: 641391 - DNA, 75 bp, synthetic construct
  source 1..75: mol_type = other DNA
agcgggaaaaaattaaagggcaggttgttgaacttgtacgccagagtgggcgcgagacgttaagacaactggaaa

SEQ ID NO: 641392 - DNA, 75 bp, synthetic construct
  source 1..75: mol_type = other DNA
ctggctacgggttattcccgtctgaacaggcgcgtaaggactggcaaaatgcccgcaaaaaactctcaagggcaa

SEQ ID NO: 641393 - DNA, 75 bp, synthetic construct
  source 1..75: mol_type = other DNA
gtacagcgagggccgtattgacggggatgtgttattcagctggcagtgctatgcgccacggaagcagttcgctga

SEQ ID NO: 641394 - DNA, 75 bp, synthetic construct
  source 1..75: mol_type = other DNA
gacggagaaatacgccgctacgacaggcgcctgaatataatctgtcgcgagtgccggaagagcgaagctatgagg

SEQ ID NO: 641395 - DNA, 75 bp, synthetic construct
  source 1..75: mol_type = other DNA
ccggctacgggttatttccgtctgaacaggcacgtaaggactggataaaggcccgcaaaaagatgtcgaaagcag

SEQ ID NO: 641396 - DNA, 75 bp, synthetic construct
  source 1..75: mol_type = other DNA
gcccgcaaaaaactctcgagagcaaagctgaagaaaacatctgtagttgatccggactttatctggtcgttacca

SEQ ID NO: 641397 - DNA, 75 bp, synthetic construct
  source 1..75: mol_type = other DNA
gatgagcgttctcgccagagagctggttgccagtggtgatgtatacaactctggctacgggttattcccgtctga

SEQ ID NO: 641398 - DNA, 75 bp, synthetic construct
  source 1..75: mol_type = other DNA
acaggcgcgtaaggactggcaaaatacccgtaaaaagctctcaagggcaaagctgaagaaacctgcagtggttga

SEQ ID NO: 641399 - DNA, 75 bp, synthetic construct
  source 1..75: mol_type = other DNA
ggcgtcagaacataatctgtcgcgagtgccggaagagtgaggttatgcagcgagtgctggcgttctatcggggta

SEQ ID NO: 641400 - DNA, 75 bp, synthetic construct
  source 1..75: mol_type = other DNA
ggcgtctgaacataatctgccgtgagtgccggaagagtgaagttatgcagcgtgtactggcgttctatcagggta

SEQ ID NO: 641401 - DNA, 75 bp, synthetic construct
  source 1..75: mol_type = other DNA
ggcgtatgagcataatctgtcgcgagtgccggagaagtgaagttatgcagcgcgtgctggcgttctatcagggga

SEQ ID NO: 641402 - DNA, 75 bp, synthetic construct
  source 1..75: mol_type = other DNA
caaaacgagccagaaacgaaacaacatgaaccagcagcgcaacaggaaccggaaaaagcctgcaccgtctgcggt

SEQ ID NO: 641403 - DNA, 75 bp, synthetic construct
  source 1..75: mol_type = other DNA
aacgggaagaagtgaaggcgcgcattgtggaactggtacgcagagatgggcggaaaacgcgtaaacaactggaaa

SEQ ID NO: 641404 - DNA, 75 bp, synthetic construct
  source 1..75: mol_type = other DNA
tccagcacgtgatggctttacgggcaggaacggcagcagaaaacgaggatatcgtggcccgcacggctcatgagc

SEQ ID NO: 641405 - DNA, 75 bp, synthetic construct
  source 1..75: mol_type = other DNA
gatatcgcctggtttatcaggttaacgataaagagttgctcgtgttggtgatagctattggtaagagagagaact

SEQ ID NO: 641406 - DNA, 75 bp, synthetic construct
  source 1..75: mol_type = other DNA
ctggtgggaagaggaagatggcacctgcctggttttaaaagccgaaaccataaaaacagatgagaaagaaaacgc

SEQ ID NO: 641407 - DNA, 75 bp, synthetic construct
  source 1..75: mol_type = other DNA
atcgccccgctggacacgctacaggaaattatcgccggtcgggacatgccggacgaggtccgcgccaaactctgc

SEQ ID NO: 641408 - DNA, 75 bp, synthetic construct
  source 1..75: mol_type = other DNA
ttcacgggccctgaaaaaggccggacaggatgaagccgctgccgcacaggagcctgcggcacagaaagatacaac

SEQ ID NO: 641409 - DNA, 75 bp, synthetic construct
  source 1..75: mol_type = other DNA
cgtggactgtggcgacctggcgcttgcactgcgcatcggggattatgtggttcgccacaacctcacgatgcctga

SEQ ID NO: 641410 - DNA, 75 bp, synthetic construct
  source 1..75: mol_type = other DNA
tgcgacaacactgcaggcttgtctcgatgaggcgggcgataatctggctgcgcttcgtcatgcggttgagcagca

SEQ ID NO: 641411 - DNA, 75 bp, synthetic construct
  source 1..75: mol_type = other DNA
aagaatacgaggtcaacggagcggacaacttgctggaagcttgtctgtctctgggccttgatattccttactttt

SEQ ID NO: 641412 - DNA, 75 bp, synthetic construct
  source 1..75: mol_type = other DNA
gaagcgttaaccgaactggaaaccggacgcgccgacgcggtggtggtgttggaaaacgatctgcatcgtcacgct

SEQ ID NO: 641413 - DNA, 75 bp, synthetic construct
  source 1..75: mol_type = other DNA
gaagcctataaaaatgccaattacgttattattgctacaccaacgaattatgacccaggttcaaattactttgat

SEQ ID NO: 641414 - DNA, 75 bp, synthetic construct
  source 1..75: mol_type = other DNA
gcgccaccgaaaattgcccgctggcagcgtaaacgtattcagcatcaggattttgagcggcggctacgtgagatg

SEQ ID NO: 641415 - DNA, 75 bp, synthetic construct
  source 1..75: mol_type = other DNA
taggattatgtctctttggattaatgtttacaaatttaggtattgcagggttggttccaaaatttatatatgatt

SEQ ID NO: 641416 - DNA, 75 bp, synthetic construct
  source 1..75: mol_type = other DNA
gacggagaaatacgtcgctacgacagtcgtctaaacataatctgtcgcgagtgccggaaggcaaggagaagcagg

SEQ ID NO: 641417 - DNA, 75 bp, synthetic construct
  source 1..75: mol_type = other DNA
ggcgtcagaacataatctgtcgcgagtgccggaagagtgaggttatgcagcgtgtgctggcattttatcagggta

SEQ ID NO: 641418 - DNA, 75 bp, synthetic construct
  source 1..75: mol_type = other DNA
acggagaaatacgtcgctacgacagtcgcctaaacataatctgtcgcgagtgccggaagagcgaagttatgcagc

SEQ ID NO: 641419 - DNA, 75 bp, synthetic construct
  source 1..75: mol_type = other DNA
acaggctcgtaaggactggcaaaacgcccgcaaaaaaactctcgagggcaaagctgaagaaaccatctgtggttg

SEQ ID NO: 641420 - DNA, 75 bp, synthetic construct
  source 1..75: mol_type = other DNA
gtggcaaaagtttttacacaagaagagcgggaaaaaattaaagggcaggttgttgacctcgtacgccggagtggg

SEQ ID NO: 641421 - DNA, 75 bp, synthetic construct
  source 1..75: mol_type = other DNA
tgttgagctagtacgccggagtgggcgcgagacgttacgacaactggaagctaagacaggtgcgacaagatattt

SEQ ID NO: 641422 - DNA, 75 bp, synthetic construct
  source 1..75: mol_type = other DNA
ctggctacgggttattcccgtcagaacaggctcgtaaggactggcaaaatgcccgcaaaaaactctcaagggcaa

SEQ ID NO: 641423 - DNA, 75 bp, synthetic construct
  source 1..75: mol_type = other DNA
ggccatgaaagatgattacgtggtgcagacttccgccatcgtcaacaattacatggataaccgctccatctccga

SEQ ID NO: 641424 - DNA, 75 bp, synthetic construct
  source 1..75: mol_type = other DNA
acatgatggggcaggtgctcgaagatcactgtcaacgacggatgaaaagtgatccacttatatctccaccaacgg

SEQ ID NO: 641425 - DNA, 75 bp, synthetic construct
  source 1..75: mol_type = other DNA
cactccattacgaagccaaaaatgacaaagtcagaaaacgtctcggtattaaaggcggtttttactggactacag

SEQ ID NO: 641426 - DNA, 75 bp, synthetic construct
  source 1..75: mol_type = other DNA
ctggttacgggttattcccctctgaacaggcgcgcaaggactggcaaaacgcccgtaaaaaactctcaagggcaa

SEQ ID NO: 641427 - DNA, 75 bp, synthetic construct
  source 1..75: mol_type = other DNA
acatgatgggccaggtgctggaagatcacaaactgccgcgtggattcgctgacgctacccatgaatccattgaga

SEQ ID NO: 641428 - DNA, 75 bp, synthetic construct
  source 1..75: mol_type = other DNA
tcccgttcgaaggtgtaccccacaatgcactggatgacgccaatcaccaggcaaaatacgtttcagcaatctggc

SEQ ID NO: 641429 - DNA, 75 bp, synthetic construct
  source 1..75: mol_type = other DNA
ctgaaccgccatcttcatgaacccggcgtggccttcacctccacccgtgcggcacgggaatggctgattctgaac

SEQ ID NO: 641430 - DNA, 75 bp, synthetic construct
  source 1..75: mol_type = other DNA
gcgtggccttcacctccacccgtgtagcacgggaatggctgattctgaacatggcgggactggagcgtgaagagt

SEQ ID NO: 641431 - DNA, 75 bp, synthetic construct
  source 1..75: mol_type = other DNA
cagaccggcttatcaccgaacgtctggtacaggcactgggcctggtggatatccgggtgccggaccatctgatag

SEQ ID NO: 641432 - DNA, 75 bp, synthetic construct
  source 1..75: mol_type = other DNA
taaggctgaccggcttatcactgaacgtctggtacaggcgctggccctggttgacatccgggtgccggaccatct

SEQ ID NO: 641433 - DNA, 75 bp, synthetic construct
  source 1..75: mol_type = other DNA
cagaccgccttatcacggaacgtctggtacaggcactgggcctggtggatatccgggtgccggaccatctgatag

SEQ ID NO: 641434 - DNA, 75 bp, synthetic construct
  source 1..75: mol_type = other DNA
ctcaacttgatcctgaaaaactgactacagcgcagttaatcgctgcctggcaaagtggagaaccgtggatcacca

SEQ ID NO: 641435 - DNA, 75 bp, synthetic construct
  source 1..75: mol_type = other DNA
agcaaattcgcgacgttgcgccagaaaaagccgacctgccgcgcccgtttcgcctggcgattatccagctgggaa

SEQ ID NO: 641436 - DNA, 75 bp, synthetic construct
  source 1..75: mol_type = other DNA
cgattcgccccggcgtgcgctgccagcaggttgacgatgccgcgcgccgggtcattacagaagcaggttatggcg

SEQ ID NO: 641437 - DNA, 75 bp, synthetic construct
  source 1..75: mol_type = other DNA
atgtcgtatccgtcagggaaaaaaattatcaattgggagacgcatagtctaactgttgataataatcagataata

SEQ ID NO: 641438 - DNA, 75 bp, synthetic construct
  source 1..75: mol_type = other DNA
tcattaggagcacatcatgttaattgtttacttttatcagatagtaaacaatcattaataagtcgttgttataac

SEQ ID NO: 641439 - DNA, 75 bp, synthetic construct
  source 1..75: mol_type = other DNA
ttgttgggagcaactaaaaacatctatttcccgaggcttctcaacgcaaattcaggaacacttagcaatgggcgt

SEQ ID NO: 641440 - DNA, 75 bp, synthetic construct
  source 1..75: mol_type = other DNA
gcactgggcctggtggatatccgggtgccggaccatctgatagtcggtggcagccaggttttctcctttgccgaa

SEQ ID NO: 641441 - DNA, 75 bp, synthetic construct
  source 1..75: mol_type = other DNA
atggcaggactggagcgtgaagaattccgggtgctgtatctgaacaaccagaatcagctgattgccggtgaaacc

SEQ ID NO: 641442 - DNA, 75 bp, synthetic construct
  source 1..75: mol_type = other DNA
atgcaacaactttcctttctgcccggcgcgatgacgcccggcgagctcagcctcattctgcgggccctgaaaacc

SEQ ID NO: 641443 - DNA, 75 bp, synthetic construct
  source 1..75: mol_type = other DNA
gagagatgacacccggtgagcgcagcctcattcagcgggccctgaaaaccctgggccgccatcttcatgaacccg

SEQ ID NO: 641444 - DNA, 75 bp, synthetic construct
  source 1..75: mol_type = other DNA
atgcaacaactttcctttctgcccggagagatgacgcccggcgagcgcagcctcattcagcgggccctgaaaacc

SEQ ID NO: 641445 - DNA, 75 bp, synthetic construct
  source 1..75: mol_type = other DNA
tgctgctggccccgggatccgtcagtgaaatgcaggactatattccggaaaaccgctgttaccgtgctaccctgg

SEQ ID NO: 641446 - DNA, 75 bp, synthetic construct
  source 1..75: mol_type = other DNA
gctgccgtggtactggcacacaatcacccgtccggcgaagtcacacccagtaaggctgaccggcttatcactgaa

SEQ ID NO: 641447 - DNA, 75 bp, synthetic construct
  source 1..75: mol_type = other DNA
ctcttcacaggcaccatcaaccgcacggaagtccatccccgggaagtgattaaacgcgccctgtatcacaatgcc

SEQ ID NO: 641448 - DNA, 75 bp, synthetic construct
  source 1..75: mol_type = other DNA
atggcgggactggagcgtgaagagttccgggtgctgtatctgaataaccagaatcagttgattgccggtgaaacc

SEQ ID NO: 641449 - DNA, 75 bp, synthetic construct
  source 1..75: mol_type = other DNA
cggaagttcatcctcgggaggtcattaaacgcgccctgtgccacaatgccgctgccgtgatactggcgcacaatc

SEQ ID NO: 641450 - DNA, 75 bp, synthetic construct
  source 1..75: mol_type = other DNA
gcgtggccttcacctccacccgtgcagcacgggaatggctgattctgaacatggcgggactggagcgggaagaat

SEQ ID NO: 641451 - DNA, 75 bp, synthetic construct
  source 1..75: mol_type = other DNA
caggcactgggcctggtggatatccgggtgccggaccatctgatagtcggtggcaaccaggttttctcctttgcc

SEQ ID NO: 641452 - DNA, 75 bp, synthetic construct
  source 1..75: mol_type = other DNA
cggaagtccatccccgggaagtgattaaacgcgccctgtatcacaatgccgcagccgtggtgctggcacacaatc

SEQ ID NO: 641453 - DNA, 75 bp, synthetic construct
  source 1..75: mol_type = other DNA
gttgccagtggcgatttatacaactctggctacgggttattcccgtctgaacaggctcgtaaggactggcaaaac

SEQ ID NO: 641454 - DNA, 75 bp, synthetic construct
  source 1..75: mol_type = other DNA
ctggttacgggttattcccgtctgaacaggctcgtaaggattggcaaaatgcccgcaaaaaactatctagggcaa

SEQ ID NO: 641455 - DNA, 75 bp, synthetic construct
  source 1..75: mol_type = other DNA
gacggagaaatacgccgctacgacaggcgtatgaacataatctgtcgcgagtgccggaagagcgaagctatgcag

SEQ ID NO: 641456 - DNA, 75 bp, synthetic construct
  source 1..75: mol_type = other DNA
ggcgtcagaacataatctgtcgcgagtgccggaagagtgaagttatgcagcgcatattgtcgttttatcaggggg

SEQ ID NO: 641457 - DNA, 75 bp, synthetic construct
  source 1..75: mol_type = other DNA
ttgaaacacgttaccagccgttggggtgtactgattctggtggcgctgcgcgaaggcactcatcgctttagcgac

SEQ ID NO: 641458 - DNA, 75 bp, synthetic construct
  source 1..75: mol_type = other DNA
ggcgtctaaacataatctgtcgcgagtgccggaagagcgaagctatgcggcgtgtactggcgttctaccagggga

SEQ ID NO: 641459 - DNA, 75 bp, synthetic construct
  source 1..75: mol_type = other DNA
ggtgtcagaacataatttgtcgcgagtgccggaagagtgaagttatgcagcgtgtattagcattttatcagggga

SEQ ID NO: 641460 - DNA, 75 bp, synthetic construct
  source 1..75: mol_type = other DNA
taaatggtggcttaagcaatcacgtgaagcgcagtctgccattatgaccgatgaaatcccgttagatgatgcact

SEQ ID NO: 641461 - DNA, 75 bp, synthetic construct
  source 1..75: mol_type = other DNA
atggcaaaagtatttacacaggaagagcgggaaaaaattaaagggcagatcgttgatctcgtacgccagagttgg

SEQ ID NO: 641462 - DNA, 75 bp, synthetic construct
  source 1..75: mol_type = other DNA
ggcgtcataatatgatttgtactgagtgtcgtaaaagcgaagttatgcagcgcatattgtcgttttatcagggtg

SEQ ID NO: 641463 - DNA, 75 bp, synthetic construct
  source 1..75: mol_type = other DNA
atctggtcattaccagacggagaaatacgccgctatgacaggcaattgaacataatctgtcgcgagtgccggaag

SEQ ID NO: 641464 - DNA, 75 bp, synthetic construct
  source 1..75: mol_type = other DNA
gacggagaaatacgccgctacaacaggcgtcagaacataatctgtcgcgagtgccggaaaagcaaggttatgcag

SEQ ID NO: 641465 - DNA, 75 bp, synthetic construct
  source 1..75: mol_type = other DNA
ctggttacgggttattcccgtctgaacaggctcgtaaggactggcaaaatgcccgcaaaaaactctcaaggacaa

SEQ ID NO: 641466 - DNA, 75 bp, synthetic construct
  source 1..75: mol_type = other DNA
gtaaacaatcattaataagtcgttgttataacctaatgctatccgaacctggaacaaaatggacagcaaacaagg

SEQ ID NO: 641467 - DNA, 75 bp, synthetic construct
  source 1..75: mol_type = other DNA
aaccgtctgacgcaatggcagatgaacaggcaacgactgaagcaatggagccggatacaactgaacatcgccagg

SEQ ID NO: 641468 - DNA, 75 bp, synthetic construct
  source 1..75: mol_type = other DNA
aatggtcatcataagctcacatccaccagcagagcggggattcatctgatgatcgaccttgaaaccatgggaaaa

SEQ ID NO: 641469 - DNA, 75 bp, synthetic construct
  source 1..75: mol_type = other DNA
ttctactgctaaccaggactccccgctgatgggcgaagctatttctggcgcttccggcttcccgattctgggcct

SEQ ID NO: 641470 - DNA, 75 bp, synthetic construct
  source 1..75: mol_type = other DNA
tgaacggacttgtggccacggtaaaaggcgtgaagcagggcagtgtcagcattgtgggcatgaccgctgacggga

SEQ ID NO: 641471 - DNA, 75 bp, synthetic construct
  source 1..75: mol_type = other DNA
tctgcaggtgataccagttttacgctggcctggaaaccgggtgaggaaggtcagaaagggcttatcgcatggttt

SEQ ID NO: 641472 - DNA, 75 bp, synthetic construct
  source 1..75: mol_type = other DNA
aatgagttaaaaggcactccgattgtagatgttaaaggtgttagcacaccattaatcgaaacgccgttctttgaa

SEQ ID NO: 641473 - DNA, 75 bp, synthetic construct
  source 1..75: mol_type = other DNA
gccttcacctccacccgtgcagcacgggaatggctgattctgaacatggcgggactggagcgggaagagttccgg

SEQ ID NO: 641474 - DNA, 75 bp, synthetic construct
  source 1..75: mol_type = other DNA
accagacggagaaatacgccgctacgacaggcgtcaaaacataatctgtagtgaaccgccccggttttcctggag

SEQ ID NO: 641475 - DNA, 75 bp, synthetic construct
  source 1..75: mol_type = other DNA
ggctgaagaactaccggctgttactgccctcgctatttcgcataaaaccagtctgctcgatccactggaaattcg

SEQ ID NO: 641476 - DNA, 75 bp, synthetic construct
  source 1..75: mol_type = other DNA
attatgcaggcagccaatatcagccagcctgacgccgatgaactgcttgcagtatcacgtggtgaatttgttgaa

SEQ ID NO: 641477 - DNA, 75 bp, synthetic construct
  source 1..75: mol_type = other DNA
tttgaaaattttgctgatagcctcggtggggttgtcgttatagaagatcgcaagagcgatgcttttaccgcagac

SEQ ID NO: 641478 - DNA, 75 bp, synthetic construct
  source 1..75: mol_type = other DNA
accaggtttctttcgatccggatgcaacgaacgatatgggccagccagcatggattcctgcgttgttagaaagtc

SEQ ID NO: 641479 - DNA, 75 bp, synthetic construct
  source 1..75: mol_type = other DNA
agaacagcaaaggcgaggcggttgtcgtttcagaagtgagtgagggtataagaaaacgagttacctcacgaatat

SEQ ID NO: 641480 - DNA, 75 bp, synthetic construct
  source 1..75: mol_type = other DNA
tgctacgttagataaggcacccatgatcgacttcagttccaatgcaagaacggggtttgcaacattggccttccc

SEQ ID NO: 641481 - DNA, 75 bp, synthetic construct
  source 1..75: mol_type = other DNA
acggcactccccgtcaacaatgaggtatcttccgtaccgttagtgacagcaccgaaatcgacgtctgctgatgtg

SEQ ID NO: 641482 - DNA, 75 bp, synthetic construct
  source 1..75: mol_type = other DNA
ggagatattatcccctatcaaacatatcgtgacttctcagaaaacaaaggagtgtttacaccagaaaaaacaagt

SEQ ID NO: 641483 - DNA, 75 bp, synthetic construct
  source 1..75: mol_type = other DNA
gatgacggtgcaattattacaagtaatggcagattggccagactgacactgtccttaaatgaaaaaacagcaact

SEQ ID NO: 641484 - DNA, 75 bp, synthetic construct
  source 1..75: mol_type = other DNA
atctatagtggtacggggtccgcagatgcgggttattccaacagctggacgcacctgcagataggggctgacaga

SEQ ID NO: 641485 - DNA, 75 bp, synthetic construct
  source 1..75: mol_type = other DNA
acatcatgcacaggagcacggagctgatggtgtgatggtggtgaatccgtattatgcaaaactcagcgatgatgc

SEQ ID NO: 641486 - DNA, 75 bp, synthetic construct
  source 1..75: mol_type = other DNA
gtgaatcgacggtgaaagttttcaacagccagcactgcataatgaaaaatcctcttcctgatttcacggtccgtt

SEQ ID NO: 641487 - DNA, 75 bp, synthetic construct
  source 1..75: mol_type = other DNA
catcatacgccggttgtctgtaccggcgaagacgcattattggcccagcgtatcgctattgccgcgcagcaatca

SEQ ID NO: 641488 - DNA, 75 bp, synthetic construct
  source 1..75: mol_type = other DNA
tgataaaaactgccatcaaactgagtggactggacatatctactgcagttatggcaccggctcttccgctcagtg

SEQ ID NO: 641489 - DNA, 75 bp, synthetic construct
  source 1..75: mol_type = other DNA
tgataaaaactgccatcaaactgagtgggactggacatatctactgcagttatggcaccggctcttccgctcagt

SEQ ID NO: 641490 - DNA, 75 bp, synthetic construct
  source 1..75: mol_type = other DNA
gaagtcatcaaccgtgtacatgcttttcgtccggatttcattatattcagcggatatgacgaatatatgctggat

SEQ ID NO: 641491 - DNA, 75 bp, synthetic construct
  source 1..75: mol_type = other DNA
acagcaacccgggatgaagataaatctgtcttttccggacatgtctatctgggcaataaatcagcactgaatata

SEQ ID NO: 641492 - DNA, 75 bp, synthetic construct
  source 1..75: mol_type = other DNA
catcaccagggcatcacattatcggactggattcggaacatctgaatggaggtacagttccctggcataaacatc

SEQ ID NO: 641493 - DNA, 75 bp, synthetic construct
  source 1..75: mol_type = other DNA
acgcaacatccaatgtgaataataccttcgtggttgatggcggaattaatacgccagcgggtagtatgacgcagc

SEQ ID NO: 641494 - DNA, 75 bp, synthetic construct
  source 1..75: mol_type = other DNA
ccattttagcggacacgtacagctgaataatggctccattcttaacattaatgagtattttactggtgggattga

SEQ ID NO: 641495 - DNA, 75 bp, synthetic construct
  source 1..75: mol_type = other DNA
tcaccaatggtgaatatggcagaaaagttctttgtgactatctgaaaatgctttgccagagccacaaactggcgg

SEQ ID NO: 641496 - DNA, 75 bp, synthetic construct
  source 1..75: mol_type = other DNA
gcgctttacgatcgcagtgaatggctggctgaacatcaccaacaacatcccgacatctcgttgctggatgcctag

SEQ ID NO: 641497 - DNA, 75 bp, synthetic construct
  source 1..75: mol_type = other DNA
ttaacggtgtaaccaaatacgttgcccagtaccatgataatccgcaacagctgcgccgcgtggtcggcacttcat

SEQ ID NO: 641498 - DNA, 75 bp, synthetic construct
  source 1..75: mol_type = other DNA
attgactttagttctgttgataaaatcggtgttgccactctcgtgaatccacagtatgtcgtcagtgttaagcat

SEQ ID NO: 641499 - DNA, 75 bp, synthetic construct
  source 1..75: mol_type = other DNA
agatgccacccgatgggtgctgaacggattccatgtgcaggcagatacaaaagctgtgaatgccggcagaagttt

SEQ ID NO: 641500 - DNA, 75 bp, synthetic construct
  source 1..75: mol_type = other DNA
cttatccggtaatacagtttttaatcacctgagtcatttcagtcactcctctcttaatattggagataatgcaac

SEQ ID NO: 641501 - DNA, 75 bp, synthetic construct
  source 1..75: mol_type = other DNA
tttgtttaccggcttcactgtcacacacactgacagcagtgcctctgctgatgctttcaaaggtaaaacgaagtc

SEQ ID NO: 641502 - DNA, 75 bp, synthetic construct
  source 1..75: mol_type = other DNA
catcaggtgaaaaactcatcaaaggtgaaaaagacagccgtatgctgatgtccgttggactgaatgcagaaatca

SEQ ID NO: 641503 - DNA, 75 bp, synthetic construct
  source 1..75: mol_type = other DNA
cgatagaaacaaccattcaagtctggatttccatgcgccacgattaaataagattgtaactgaggttatcccggc

SEQ ID NO: 641504 - DNA, 75 bp, synthetic construct
  source 1..75: mol_type = other DNA
ccttaagtgtgggcggtaaagccctgaccaacgccaaagggcgtaaagatgtgctatcgcgcggtccggatgaac

SEQ ID NO: 641505 - DNA, 75 bp, synthetic construct
  source 1..75: mol_type = other DNA
tgttgctggtgatcccaacgttatgggcgattatcactatcaactttttcatcgtgcaaattgcgcctggcggtc

SEQ ID NO: 641506 - DNA, 75 bp, synthetic construct
  source 1..75: mol_type = other DNA
ccgtatgttcagattaaacgagagtattgatcaggctctacatcatttcttaagcaaagaaggtggtaaaaaatg

SEQ ID NO: 641507 - DNA, 75 bp, synthetic construct
  source 1..75: mol_type = other DNA
cgattatgttcaagaagaacccgctggggacgttcaaacagcacgagaacgccgagttctccagtagcttcacct

SEQ ID NO: 641508 - DNA, 75 bp, synthetic construct
  source 1..75: mol_type = other DNA
aaacatgtgttccgcaacgccatgctgctggtgattgccggttttccggcgacgtttatcagcatgttttttacc

SEQ ID NO: 641509 - DNA, 75 bp, synthetic construct
  source 1..75: mol_type = other DNA
tgctggtgattgccggttttccggcgacgtttatcagcatgtttttcaccggttcgctgttgattgaggtgatgt

SEQ ID NO: 641510 - DNA, 75 bp, synthetic construct
  source 1..75: mol_type = other DNA
tgctggtgattgctggttttccagcaacctttatcagcatgtttttcaccggctcgctgttgattgaagtgatgt

SEQ ID NO: 641511 - DNA, 75 bp, synthetic construct
  source 1..75: mol_type = other DNA
cttcaccaatgaagagttaaccgacgagcaaaaatcgctgattgagtggtatcgcgatgtgttccgtccggaaga

SEQ ID NO: 641512 - DNA, 75 bp, synthetic construct
  source 1..75: mol_type = other DNA
ggacggcgagacgctgctggagctggattatctggcgaatatcttcaaagtgaatggtgtggatcagttgagtac

SEQ ID NO: 641513 - DNA, 75 bp, synthetic construct
  source 1..75: mol_type = other DNA
gtattaccaacgccaatatctatatcaatggtaataacctgctgggccgcgcggaggagattaagctgccggata

SEQ ID NO: 641514 - DNA, 75 bp, synthetic construct
  source 1..75: mol_type = other DNA
tcacgaatgccaacatctatctggatggtactaacctgctgggacgggctgaggaagtcaaactccccgatgtct

SEQ ID NO: 641515 - DNA, 75 bp, synthetic construct
  source 1..75: mol_type = other DNA
ggctgtggccgtgcacgatgctgaacgtcaccccgatcaaagggatgatgacggtcatttatgaattcccggtgg

SEQ ID NO: 641516 - DNA, 75 bp, synthetic construct
  source 1..75: mol_type = other DNA
accgtccgaacagtcgtttaaatttgaagagggtacggatgcggcattccacggtttctggctgtggccgtgcac

SEQ ID NO: 641517 - DNA, 75 bp, synthetic construct
  source 1..75: mol_type = other DNA
tgtatattttcaccctgattggcctgctgctgaatattgtcagtgatatcagctatacgctggttgatccgcgta

SEQ ID NO: 641518 - DNA, 75 bp, synthetic construct
  source 1..75: mol_type = other DNA
gcgaccagaacctcagtcaattagcgaagttatagatactgaaggatttaaagttgttgccgatcagatgataac

SEQ ID NO: 641519 - DNA, 75 bp, synthetic construct
  source 1..75: mol_type = other DNA
tttcacacggatgtgaacggtgcgccggaagagatgacggacagtgacgggaaaatcgtgtgggagacggggtat

SEQ ID NO: 641520 - DNA, 75 bp, synthetic construct
  source 1..75: mol_type = other DNA
ggataattaaggcgcatgataacggtcgtgtatatttggaacctgcgaataaaaaaccactcagtcaagtagaca

SEQ ID NO: 641521 - DNA, 75 bp, synthetic construct
  source 1..75: mol_type = other DNA
attcccaaatcgatatatgaaggtatccagaccattaatcgcaatctggtttgtatgctggagttgcaaatcaat

SEQ ID NO: 641522 - DNA, 75 bp, synthetic construct
  source 1..75: mol_type = other DNA
tctatcaatctgcattctcaccgaacttactcgaacgcccacgtctggaaagccatctacaaaaactcctgaccg

SEQ ID NO: 641523 - DNA, 75 bp, synthetic construct
  source 1..75: mol_type = other DNA
accatggtggtgattatggggccaatctcgttctggggtaacgttgtccctcgtgccttcgaacgtattggcggt

SEQ ID NO: 641524 - DNA, 75 bp, synthetic construct
  source 1..75: mol_type = other DNA
taggaactattacttgtttaagcatagtttatccagcatgtaaatattatggagcaacgggtgcgattgtgagtc

SEQ ID NO: 641525 - DNA, 75 bp, synthetic construct
  source 1..75: mol_type = other DNA
tgagtttggtaatgccggagtattacccggtgcaggtgctgaaggtgttcgcgccagccatgcacaaacgggcgt

SEQ ID NO: 641526 - DNA, 75 bp, synthetic construct
  source 1..75: mol_type = other DNA
tggagatgatccgcagcattgccggaatcaagccgccacgaagcaaaattaacaggtgttcagcgcctgtttccg

SEQ ID NO: 641527 - DNA, 75 bp, synthetic construct
  source 1..75: mol_type = other DNA
cgcgtactggcccacgctgatgcgggtgaaagctatatgtgggaatgtccggactttttcagccttggcgatcag

SEQ ID NO: 641528 - DNA, 75 bp, synthetic construct
  source 1..75: mol_type = other DNA
ttgcgctagcgccaggagacgataatgacaaagacgggtgtttttcaggtagtgctgtcgatgacaatggtgtcc

SEQ ID NO: 641529 - DNA, 75 bp, synthetic construct
  source 1..75: mol_type = other DNA
aagatttcggctactgcgaatcctgcggtgttgaaatcggtattcgccgtctggaagcgcgcccgacagccgatc

SEQ ID NO: 641530 - DNA, 75 bp, synthetic construct
  source 1..75: mol_type = other DNA
gatgattggtgtggccattggcggattctggtcgatgtcagcggcaacggcgattcgtctggtgccgcagcatca

SEQ ID NO: 641531 - DNA, 75 bp, synthetic construct
  source 1..75: mol_type = other DNA
gctggcggttctgaccagcctgacgctttcaacgctagctggaaagatgaatcgtaagttcctgctgctggggat

SEQ ID NO: 641532 - DNA, 75 bp, synthetic construct
  source 1..75: mol_type = other DNA
cagccagaagaacgggaactgtcgctttatgcctcccacggagtggctgtggtgcaacatggagcactctggcta

SEQ ID NO: 641533 - DNA, 75 bp, synthetic construct
  source 1..75: mol_type = other DNA
atccataatgaaagcgtctaaaacacaagtggcaggaattatgggacaaccccaatctccacaacaagttgttac

SEQ ID NO: 641534 - DNA, 75 bp, synthetic construct
  source 1..75: mol_type = other DNA
cgataattttagatctagtgttgcctgaagatgatagtatctataaagatctagacacaatgtggggcaatttat

SEQ ID NO: 641535 - DNA, 75 bp, synthetic construct
  source 1..75: mol_type = other DNA
ccctgcccgatcgccatcaatgccgctttggatacggtagtaaacatccgtcgaggactgatgaacggtcgccaa

SEQ ID NO: 641536 - DNA, 75 bp, synthetic construct
  source 1..75: mol_type = other DNA
atggagaagtgcttttggtttaagtggtttgttacttctgggtgcggtggcgatgacatgggtcacatcccgtca

SEQ ID NO: 641537 - DNA, 75 bp, synthetic construct
  source 1..75: mol_type = other DNA
tcccgggagaaacactggcagagctgaatgctctgtccggacctgcggtctctctggtggtgttttcttcgggat

SEQ ID NO: 641538 - DNA, 75 bp, synthetic construct
  source 1..75: mol_type = other DNA
gtaaaattgcagtactacaaaatccaagcttctttggctggccattcaagggatcgacaatacctaagaaagcgg

SEQ ID NO: 641539 - DNA, 75 bp, synthetic construct
  source 1..75: mol_type = other DNA
gcgcggtattccgcttatttagccgccgcatggttgtggtcggcatgatagcttgtggcctgtttttcatggggc

SEQ ID NO: 641540 - DNA, 75 bp, synthetic construct
  source 1..75: mol_type = other DNA
tttcccgccagtcgcacattacagcggtcatttccgcgcccgtcgatgtcccttggtgagcgggagcaaatggcc

SEQ ID NO: 641541 - DNA, 75 bp, synthetic construct
  source 1..75: mol_type = other DNA
tgttaccgtggagtcgcgaactgccgcagcgtcatcacattatgttggcgtttcccgccagtcgcacattacagc

SEQ ID NO: 641542 - DNA, 75 bp, synthetic construct
  source 1..75: mol_type = other DNA
atgaaccagcaacctcgccgtgcgctttcgcgttatgctctgacttttcagggaaatatcctttcagtaaactgt

SEQ ID NO: 641543 - DNA, 75 bp, synthetic construct
  source 1..75: mol_type = other DNA
ggttttctgctaaaaatcaacgcaaaaagcgtcttattctggcgagcgtgattggcgctgctattgcactgtctg

SEQ ID NO: 641544 - DNA, 75 bp, synthetic construct
  source 1..75: mol_type = other DNA
ttttaattacctgaaagaaaaaatattttttattacaacaatatcatttgcaataaccaaatcatctccgcgatt

SEQ ID NO: 641545 - DNA, 75 bp, synthetic construct
  source 1..75: mol_type = other DNA
aatttttcagtgacgaggctatcgaaaagctggagcagattttctttgagcagtctttcgactatcagttgcact

SEQ ID NO: 641546 - DNA, 75 bp, synthetic construct
  source 1..75: mol_type = other DNA
cggataataagcccgttggtaaatgtttttgctgttcatctgaaatgaagttaacgcctaaagtttatgtgtgtc

SEQ ID NO: 641547 - DNA, 75 bp, synthetic construct
  source 1..75: mol_type = other DNA
gaaaatacgggctatgttgttactgagaaaggtaaattaatcccaactcaaaaagggattgattttattaaaaac

SEQ ID NO: 641548 - DNA, 75 bp, synthetic construct
  source 1..75: mol_type = other DNA
ctggcgtaaagtcgctgaaaaagaactgacagataatcaaatgcagttgctaatgagtactggcagaacaaaggt

SEQ ID NO: 641549 - DNA, 75 bp, synthetic construct
  source 1..75: mol_type = other DNA
cagtgccggatgctcacccgtgtccggcgcacgcactccacctcatccgtggagaactccttaattaccttagct

SEQ ID NO: 641550 - DNA, 75 bp, synthetic construct
  source 1..75: mol_type = other DNA
gtgtcagtcggtacgttaccgatcctcgtatcaaagagctgctgttaagcaaagataagggcaaaaaaggcgaac

SEQ ID NO: 641551 - DNA, 75 bp, synthetic construct
  source 1..75: mol_type = other DNA
ttatccctagttcagagccgcaaaatcttgacagactgactgataaagaaagaaaggtttatgaggctattgttc

SEQ ID NO: 641552 - DNA, 75 bp, synthetic construct
  source 1..75: mol_type = other DNA
cacccacggcctgatattgctgtacggtgggttattccagattgcaccgtggcttacccactcagaattgagcgc

SEQ ID NO: 641553 - DNA, 75 bp, synthetic construct
  source 1..75: mol_type = other DNA
tacgacctgatcgtcactaacccgccgtacgtcgatgcggaagatatgtccgacctgccaaatgagtaccgtcac

SEQ ID NO: 641554 - DNA, 75 bp, synthetic construct
  source 1..75: mol_type = other DNA
gcttatgccttcccggaagcggaagtcgacgcggtagacatctctcctgacgcgctggcggttgctgaacagaac

SEQ ID NO: 641555 - DNA, 75 bp, synthetic construct
  source 1..75: mol_type = other DNA
tgataacggcggcgatggtgtgtttatgctcaccaaagagcagctgctggcggcccgtgaacatttcgcgattta

SEQ ID NO: 641556 - DNA, 75 bp, synthetic construct
  source 1..75: mol_type = other DNA
cggtatatgtcggggaatactgcagtaaaaaagtcctcggcgtgtgtctggagaaaaagcgcggctactgtcagt

SEQ ID NO: 641557 - DNA, 75 bp, synthetic construct
  source 1..75: mol_type = other DNA
ggctatgaattttacgtcgatgagcgcgtgctggtaccgcgctcgccgattggggaactgatcaacaacaaattt

SEQ ID NO: 641558 - DNA, 75 bp, synthetic construct
  source 1..75: mol_type = other DNA
gttccgtgatttgccgaaagtgcagtacgacctgatcgtcaccaacccgccgtacgtcgatgcggaagatatgtc

SEQ ID NO: 641559 - DNA, 75 bp, synthetic construct
  source 1..75: mol_type = other DNA
aagaactggcgatggtcgaacgcaccgaacagggccgcgccgttcgtcagtacttcatcaaatgcgaggaagagc

SEQ ID NO: 641560 - DNA, 75 bp, synthetic construct
  source 1..75: mol_type = other DNA
atgaaactgcgaaaaacgcccgtacaggggcagggattcgttcggcctgaaaaccagagccaacaaaatttcggc

SEQ ID NO: 641561 - DNA, 75 bp, synthetic construct
  source 1..75: mol_type = other DNA
gccaatgcctggtttcctggtaccgttaatgtgtggctaccaacgcatttctcctgtttacgcacccggtgaagt

SEQ ID NO: 641562 - DNA, 75 bp, synthetic construct
  source 1..75: mol_type = other DNA
atcgaagaacacggtctgatccacaacgtcattccgattcgttccgatctgttccgtgacttgccgaaagtgcag

SEQ ID NO: 641563 - DNA, 75 bp, synthetic construct
  source 1..75: mol_type = other DNA
aaaaatgggggtgaaaatgtcacttgaactcccttggccaaatgatgagcggctacagcagctttgtgagaattt

SEQ ID NO: 641564 - DNA, 75 bp, synthetic construct
  source 1..75: mol_type = other DNA
aacactctacagcaccactacaccacggaagccaatatgctggcgcgtatcgtgctgggtggcatgactgcaaaa

SEQ ID NO: 641565 - DNA, 75 bp, synthetic construct
  source 1..75: mol_type = other DNA
gctaatgttaatctggatttcaacagcccagatacaacagccacgattgctaatatctggcacggccatttcacc

SEQ ID NO: 641566 - DNA, 75 bp, synthetic construct
  source 1..75: mol_type = other DNA
cggtggatgaactgcagaagctggactttggcgtgatgaacttcagcgatttctatgatgatcttaatgccggca

SEQ ID NO: 641567 - DNA, 75 bp, synthetic construct
  source 1..75: mol_type = other DNA
tggctacggcatcggtctttatggtgcaaccgctcatcgctaatgagcagtttaatcagggtatgcagcagggga

SEQ ID NO: 641568 - DNA, 75 bp, synthetic construct
  source 1..75: mol_type = other DNA
cgctggccgcagtcgcagccgccggtaaagacgtcgctgaactgaatggcgaaaacgtcagggcattcaccggta

SEQ ID NO: 641569 - DNA, 75 bp, synthetic construct
  source 1..75: mol_type = other DNA
aaagattcacgatctaatatttaaactgaatcctcactctgttatcacaacgaattgggacactttgcttgaagc

SEQ ID NO: 641570 - DNA, 75 bp, synthetic construct
  source 1..75: mol_type = other DNA
gatcacggagtccattctcaatacgccgccggataataagccatcgctggatgcaccgtttatttcagaagggtt

SEQ ID NO: 641571 - DNA, 75 bp, synthetic construct
  source 1..75: mol_type = other DNA
gcacgcattgtccaggagcagggacgccgtggccagctgggcattggtttcggcagtggcaaatctccggactgt

SEQ ID NO: 641572 - DNA, 75 bp, synthetic construct
  source 1..75: mol_type = other DNA
aagcagatgcaaccattgattggtcgcacaggaattgaatttggcaaaacattcagcggcaaagactgggaaatg

SEQ ID NO: 641573 - DNA, 75 bp, synthetic construct
  source 1..75: mol_type = other DNA
cccatgattgacttcagctctaatgactcgactggggttgcaacattggtttcgccacaatatgtcgtcagcgtt

SEQ ID NO: 641574 - DNA, 75 bp, synthetic construct
  source 1..75: mol_type = other DNA
ttcctctatacgataaaaatggcaatcccgtcacgacgctgaataaagcacccatgattgacttcagctctaatg

SEQ ID NO: 641575 - DNA, 75 bp, synthetic construct
  source 1..75: mol_type = other DNA
gccggcggaggagttgaagcagcgtgtaaaggatgcggcacaactcaatattccggtggttatccggggaatggt

SEQ ID NO: 641576 - DNA, 75 bp, synthetic construct
  source 1..75: mol_type = other DNA
ttacttcctcaattcccgctataccttcatgaattctgtttttaatgtcgcgacggcccctggcgggacagattc

SEQ ID NO: 641577 - DNA, 75 bp, synthetic construct
  source 1..75: mol_type = other DNA
tggcgtgacctcctctggcgtcgatatgaccgccccgggttcagcagcgctgaacacatctgaaacgggtaaaat

SEQ ID NO: 641578 - DNA, 75 bp, synthetic construct
  source 1..75: mol_type = other DNA
ccagaatgaaagaactcggcataactcaagagaagttagctgaagagcttggtatgacgcagggtggaattggtc

SEQ ID NO: 641579 - DNA, 75 bp, synthetic construct
  source 1..75: mol_type = other DNA
tggcaccgcgctgttaccgtacatcaacgacatgctggacagaaacgagcagcttaataattttattgcagatta

SEQ ID NO: 641580 - DNA, 75 bp, synthetic construct
  source 1..75: mol_type = other DNA
aagttgctggcggtgtcatttggtccggcggggcttgggctggcggcaaatttccgccagttgattaccgtgctc

SEQ ID NO: 641581 - DNA, 75 bp, synthetic construct
  source 1..75: mol_type = other DNA
cacagggagcatttaatcacccgtactggatggttaaaggctcctggtcttatgccagcaacaaaatcatcaccg

SEQ ID NO: 641582 - DNA, 75 bp, synthetic construct
  source 1..75: mol_type = other DNA
cgccgccacatcaaaggcagtaaaagccgcaatggataaggcaaaaggcgctgttgagcgtgacggcgacaccat

SEQ ID NO: 641583 - DNA, 75 bp, synthetic construct
  source 1..75: mol_type = other DNA
tgcgcctcgatgacgccgattatcaaaaagctctatccgcaaaaggaggagcaggtggaggcgttaaaacgccat

SEQ ID NO: 641584 - DNA, 75 bp, synthetic construct
  source 1..75: mol_type = other DNA
cggagaatgccgctggcacagtcacctggacggcatcctcaccggccgtaagcatcaacggtaatatcatgactg

SEQ ID NO: 641585 - DNA, 75 bp, synthetic construct
  source 1..75: mol_type = other DNA
atcacggtcatgcctgccctgacggtcagcagcgtcaccggcatcgatgccactggtgcagacggcaaaaatttt

SEQ ID NO: 641586 - DNA, 75 bp, synthetic construct
  source 1..75: mol_type = other DNA
tcaccctgacgctgacggatgccgcaggcaaccctgtcagtggcgagcgtgtggactggcatactgacagtggca

SEQ ID NO: 641587 - DNA, 75 bp, synthetic construct
  source 1..75: mol_type = other DNA
ggtgggcgcacaacgttcactggccgctaaccgccttgaactggtgaaccgtaacaatgatgtggtacttgaata

SEQ ID NO: 641588 - DNA, 75 bp, synthetic construct
  source 1..75: mol_type = other DNA
gttaccctgaatatgggcagcaactggtttgcgcagagtgcaacggaaagcggttttctcaacatcgatgttccg

SEQ ID NO: 641589 - DNA, 75 bp, synthetic construct
  source 1..75: mol_type = other DNA
tgaggattttcaacgaagcctttggtctgatttttcgtcgttcggaagagagcctgcatctcattcccacccagg

SEQ ID NO: 641590 - DNA, 75 bp, synthetic construct
  source 1..75: mol_type = other DNA
ccaaaacatggcatcgaaattgatttcattcgtatctctggtctgcgtggtaaaggtataaaagcactgttagct

SEQ ID NO: 641591 - DNA, 75 bp, synthetic construct
  source 1..75: mol_type = other DNA
agaacagttcctgctggtccctttgaactacgagatgtaagtcctctgtacgacggtaatatggacatagaaatt

SEQ ID NO: 641592 - DNA, 75 bp, synthetic construct
  source 1..75: mol_type = other DNA
atgattaaacacacggaaatcagacaaagaataaaaataagcgataacgcttcagtagtaatctgtaatcagaac

SEQ ID NO: 641593 - DNA, 75 bp, synthetic construct
  source 1..75: mol_type = other DNA
gctgggtctggagttcgtcagcaaaattgccggtatccagattagctggttgcagtggttcctctgcttcctgcc

SEQ ID NO: 641594 - DNA, 75 bp, synthetic construct
  source 1..75: mol_type = other DNA
atatttgcccactggctgatccccgtgcatggcgcactgggcgcggcgcaggcctatatggcaacctatatcgtc

SEQ ID NO: 641595 - DNA, 75 bp, synthetic construct
  source 1..75: mol_type = other DNA
ggcgtcaggcacgggcgattatgaaagcgttcaaacctgatgtggtgctcggtatgggcggctacgtatcaggtc

SEQ ID NO: 641596 - DNA, 75 bp, synthetic construct
  source 1..75: mol_type = other DNA
gtgtggtggtggaaattgacccgaacagggccattattactcaggaaatcggagacagacgctatctgcaacgaa

SEQ ID NO: 641597 - DNA, 75 bp, synthetic construct
  source 1..75: mol_type = other DNA
gtttatcgccagtattctggtgccgtttaccaaagtgattgttatgttcactttattattgagcattcattttaa

SEQ ID NO: 641598 - DNA, 75 bp, synthetic construct
  source 1..75: mol_type = other DNA
gtgacatgctgtttagcctgcccgagataaattctcatcaaagtgcctattgtccgcgctgtcaggcaaaaattc

SEQ ID NO: 641599 - DNA, 75 bp, synthetic construct
  source 1..75: mol_type = other DNA
gataatatggcaggggaatgttcctgcaggtccatttgaattgaaagatgtgaatccattattctctggtgatat

SEQ ID NO: 641600 - DNA, 75 bp, synthetic construct
  source 1..75: mol_type = other DNA
accggcgaagtgactaaatccggtcagcagccgattaccaatatcccgctgaccattatggatgcgattaacgcc

SEQ ID NO: 641601 - DNA, 75 bp, synthetic construct
  source 1..75: mol_type = other DNA
ggattaaaacccacggtggacaaggcaaaaaatgccgttcagcgtgatggtgacaccatgaccggggaactgaaa

SEQ ID NO: 641602 - DNA, 75 bp, synthetic construct
  source 1..75: mol_type = other DNA
cgttttacaacaccccgaagaacgtgctgttcacccagctcgggatgcgggataacgacggacgcttcaccacca

SEQ ID NO: 641603 - DNA, 75 bp, synthetic construct
  source 1..75: mol_type = other DNA
tacatcagtctgaaaggaaggagctattacaaccaaaaagcatcaatcatttaaaaaaaagtgataccatagacg

SEQ ID NO: 641604 - DNA, 75 bp, synthetic construct
  source 1..75: mol_type = other DNA
tacatcagtctgaaaggaaggagttatcacaacaaaaaagcatcaatcatttaaaaaaaagtgataccatcgacg

SEQ ID NO: 641605 - DNA, 75 bp, synthetic construct
  source 1..75: mol_type = other DNA
taactgggaaacggctggggctattgctggcggggcagcagctgttgctggcctgacgatggggatcatcgctct

SEQ ID NO: 641606 - DNA, 75 bp, synthetic construct
  source 1..75: mol_type = other DNA
gccaccgctgaacgctggcgtcgcgggtttgaacagtgcggcgaactcctgtcagaaaatatgatcaatggtaga

SEQ ID NO: 641607 - DNA, 75 bp, synthetic construct
  source 1..75: mol_type = other DNA
atatcactccgctgactgccgatcacatttccttgcgttgccatcaaaacgccaccgctgaacgctggcgtcgcg

SEQ ID NO: 641608 - DNA, 75 bp, synthetic construct
  source 1..75: mol_type = other DNA
tcgaaaaggtatagaaatacttgttaagcagggagagttgttatcatcattaataaatgataataaaggagataa

SEQ ID NO: 641609 - DNA, 75 bp, synthetic construct
  source 1..75: mol_type = other DNA
cggctcacatcaaccaagccgttactacttcccgctctcctgccgagataccttcactgggatgaatgtcgtcta

SEQ ID NO: 641610 - DNA, 75 bp, synthetic construct
  source 1..75: mol_type = other DNA
tgttgttcaggttgtccaaaaggacatcgatctgtgggaagtgtcctggtctgtttgtccgaccggtacagctcg

SEQ ID NO: 641611 - DNA, 75 bp, synthetic construct
  source 1..75: mol_type = other DNA
cgcattgctgtcattgggttgttatgacgcatccgccttagccgcaatcaaaaagctggctgaagatgttcgcgt

SEQ ID NO: 641612 - DNA, 75 bp, synthetic construct
  source 1..75: mol_type = other DNA
atgattgttcgtccacaacaacactggctgcgccgtatttttgtctggcacggctcagtattatccaagatatcc

SEQ ID NO: 641613 - DNA, 75 bp, synthetic construct
  source 1..75: mol_type = other DNA
gactgaagatcttcagcgtgtactggcttcaaacactccagctaaccgtattttgttgataatgggggagtggtt

SEQ ID NO: 641614 - DNA, 75 bp, synthetic construct
  source 1..75: mol_type = other DNA
ggcttccaactctccagctaaccgtattttattgataatgggtgagtggttagccgttcagcggcggaacgggct

SEQ ID NO: 641615 - DNA, 75 bp, synthetic construct
  source 1..75: mol_type = other DNA
tgagctcattccaggctgacaatatcattgtgcaccgtaatgaacctgactacctttcccgtcgcatttataatg

SEQ ID NO: 641616 - DNA, 75 bp, synthetic construct
  source 1..75: mol_type = other DNA
ctggccagcacgcaggccggacaggccgtggttaatgccaccgtggacggtaaacaaatcagcgcacagtctgtc

SEQ ID NO: 641617 - DNA, 75 bp, synthetic construct
  source 1..75: mol_type = other DNA
tacaacgtgttttacgacgtggactggcgcaacaccaaccgccgctacgggattggcgtggaagcctggcgtgat

SEQ ID NO: 641618 - DNA, 75 bp, synthetic construct
  source 1..75: mol_type = other DNA
ggggctgacgacacccgcctgaacctcggcctgacataccgtatcggtgaaccgctggcgcatcagctggacagc

SEQ ID NO: 641619 - DNA, 75 bp, synthetic construct
  source 1..75: mol_type = other DNA
attctgagcaacggcagaaaatactaccgggcattttatctgccacagggcgtggtcagtgagttgtccgggccg

SEQ ID NO: 641620 - DNA, 75 bp, synthetic construct
  source 1..75: mol_type = other DNA
tccggcagggcacgggatacccgtggcaacctctctgatattgcccgtacccgtattctggtgtccccggcagta

SEQ ID NO: 641621 - DNA, 75 bp, synthetic construct
  source 1..75: mol_type = other DNA
tgtcccgtatcgagcttgacgatgcagaactgcgtcaggccggcgggaagattatcagcaacactggcaaccaga

SEQ ID NO: 641622 - DNA, 75 bp, synthetic construct
  source 1..75: mol_type = other DNA
gctgatggcgctggtttttgtgctggcggctgcgccaatcagccagggattgtttggtaataccgactatcaggg

SEQ ID NO: 641623 - DNA, 75 bp, synthetic construct
  source 1..75: mol_type = other DNA
tgcaactggtgcagttaagcaaaccggaaatcgcgcaggcgatatttggtaccacgctggctgagttcagccaac

SEQ ID NO: 641624 - DNA, 75 bp, synthetic construct
  source 1..75: mol_type = other DNA
taactacccgctgattttgtgtgaggcgttatcgattggcgtgccggtgattgccacccatagcgacgcggcgcg

SEQ ID NO: 641625 - DNA, 75 bp, synthetic construct
  source 1..75: mol_type = other DNA
agcgggttaaaactggatgaagacaaaaagcgagtgatggaaatcatgcagcaggtctgggaggacgacagctgg

SEQ ID NO: 641626 - DNA, 75 bp, synthetic construct
  source 1..75: mol_type = other DNA
gttactggtatgctggcttggctttgttctgattaatgccgttgggggtaatggtcaccactatcgcattcgtcg

SEQ ID NO: 641627 - DNA, 75 bp, synthetic construct
  source 1..75: mol_type = other DNA
gactattgctggttgggatgtggttggtgctggggctgcatgccttgcttcgtgctcgtggcgtgaagaaatcag

SEQ ID NO: 641628 - DNA, 75 bp, synthetic construct
  source 1..75: mol_type = other DNA
aagattgcccggcagaatgctgtaaacaaaatctggatgcttgaaggttacttgctgaagcagaagttaagcgag

SEQ ID NO: 641629 - DNA, 75 bp, synthetic construct
  source 1..75: mol_type = other DNA
taaaagcagtttgcaggagaacctggaaaacagcgcatcacgtctcaacttgcttctggcctggctggaggacca

SEQ ID NO: 641630 - DNA, 75 bp, synthetic construct
  source 1..75: mol_type = other DNA
aatgggcagccttataccatctccggtggaacaatctgtttcgtgcgcgatcatgatcggcatttatacgaacat

SEQ ID NO: 641631 - DNA, 75 bp, synthetic construct
  source 1..75: mol_type = other DNA
gcgtggacagcgcataaatctacagacctccttactttctgcgtactggtgctgaagaatggcttcaccgtcacc

SEQ ID NO: 641632 - DNA, 75 bp, synthetic construct
  source 1..75: mol_type = other DNA
ttgaataaacacaccttccctactgaacgtcgttatgaggatttagagtacgcccgcgagatgtcggcgttcttc

SEQ ID NO: 641633 - DNA, 75 bp, synthetic construct
  source 1..75: mol_type = other DNA
ttttcactgctgcgcagggtgatcaccaggctaaagaagatgaccttatttataatccggagccttatgtcgaag

SEQ ID NO: 641634 - DNA, 75 bp, synthetic construct
  source 1..75: mol_type = other DNA
atggtaaatctccctcctgagctggggtcacctgatgtatgggctggtggaggtattgggctgattgcaggcctg

SEQ ID NO: 641635 - DNA, 75 bp, synthetic construct
  source 1..75: mol_type = other DNA
agattgtttggtcgtgaatggtcgtttgacctcaaggacaggaccagaacagacaaccacacagacccccgttaa

SEQ ID NO: 641636 - DNA, 75 bp, synthetic construct
  source 1..75: mol_type = other DNA
gctgaaagaaaatctgaagttcagagtgatttatcagccagtttactcgccatgggtgaatcacgttgagcggtt

SEQ ID NO: 641637 - DNA, 75 bp, synthetic construct
  source 1..75: mol_type = other DNA
tgctgatgcttcatcggggtgaacgggtcagcgatgttgccagaactctctgttgtgcccgttcatccgttggtc

SEQ ID NO: 641638 - DNA, 75 bp, synthetic construct
  source 1..75: mol_type = other DNA
cggcgggcaaagacgattacgctcattgtcgataactacatcatccacaaaagccgtgaaacgttgcgctggctg

SEQ ID NO: 641639 - DNA, 75 bp, synthetic construct
  source 1..75: mol_type = other DNA
atggtaaatctccctccagaattggtgccacctgatgtatgggctggtggaggcgttgggctgattgcaggaccg

SEQ ID NO: 641640 - DNA, 75 bp, synthetic construct
  source 1..75: mol_type = other DNA
gcgatcgtgatttatcaccattgaagttgctcactttctgcgtactggtgctgaagaatggcttcaccgtcaccg

SEQ ID NO: 641641 - DNA, 75 bp, synthetic construct
  source 1..75: mol_type = other DNA
tacgcgcaagctgacggtttccgggattgaaccttcggtggaagccgggagcgattcccctcgtgatgtggaaat

SEQ ID NO: 641642 - DNA, 75 bp, synthetic construct
  source 1..75: mol_type = other DNA
cgcgattgcgtccattgcctcggatgccgggtgtgccattccgcagtccatgcaactggagatgcaggaaaccgc

SEQ ID NO: 641643 - DNA, 75 bp, synthetic construct
  source 1..75: mol_type = other DNA
tctggtgccactgattgaccgggggatgcgggttcaggaatcggagctgcgggaccggttcggcctggctgaacc

SEQ ID NO: 641644 - DNA, 75 bp, synthetic construct
  source 1..75: mol_type = other DNA
aatctctgcgcagaaaatgccagccattatcccctgtaaggttacatggtgtgcaattactgaccgaaaatgtac

SEQ ID NO: 641645 - DNA, 75 bp, synthetic construct
  source 1..75: mol_type = other DNA
atgtttaaacaactaaccggagccgttcgccggctgctcagtcctgccacgggagaagttgtcaccgtgaacaag

SEQ ID NO: 641646 - DNA, 75 bp, synthetic construct
  source 1..75: mol_type = other DNA
gtccctatgtggatatgaattacgggccacaggagcattacccccgcgtcgttctgcgcatcagcaaaccggaag

SEQ ID NO: 641647 - DNA, 75 bp, synthetic construct
  source 1..75: mol_type = other DNA
ccatactcaggatgggctaaaaccgctggaagaggcgttgaccgggcgcatcagcatttttgccgggcagtctgg

SEQ ID NO: 641648 - DNA, 75 bp, synthetic construct
  source 1..75: mol_type = other DNA
caagattgctcgccagaatgctgtaaacaaaatctggatgcttgaaggttacttgctgaagcagaagctaagcga

SEQ ID NO: 641649 - DNA, 75 bp, synthetic construct
  source 1..75: mol_type = other DNA
aagattgcccggcagaatgctgtaaacaaaatctggatgctcgaaggttacttgctgaagcagaagctaagcgaa

SEQ ID NO: 641650 - DNA, 75 bp, synthetic construct
  source 1..75: mol_type = other DNA
ttcggcctcgccgggtatcagcgtcgcctccgggctgaaccccggcaggctggcaggcattctgcgcaatgccgc

SEQ ID NO: 641651 - DNA, 75 bp, synthetic construct
  source 1..75: mol_type = other DNA
ttcggcctcgccgggcatcagcattgcttccgggctgaatcccggcaggctggcaggcattctgcgcaatgccgc

SEQ ID NO: 641652 - DNA, 75 bp, synthetic construct
  source 1..75: mol_type = other DNA
ttctgaccaatgatgtgtctgacgtttccggtctcggtcagcacactacgactgccgcacggttgtatcatttcc

SEQ ID NO: 641653 - DNA, 75 bp, synthetic construct
  source 1..75: mol_type = other DNA
ccggtattttatgaagatgaagtggatatccaccttaatcctaaaatcggtgcggactggcagttgcgcggacag

SEQ ID NO: 641654 - DNA, 75 bp, synthetic construct
  source 1..75: mol_type = other DNA
tgctgcgtgccgcagtcaaatctggctccgagctgggtaaacaagctaaagacattatggacgctggcaaactgg

SEQ ID NO: 641655 - DNA, 75 bp, synthetic construct
  source 1..75: mol_type = other DNA
caggcgatcattgagcaaaccttgtgtgagctggtggacgaaatgagttgccatctggtgctgacaaccggcggt

SEQ ID NO: 641656 - DNA, 75 bp, synthetic construct
  source 1..75: mol_type = other DNA
ggaaacccgcttaatccccgatgagcaagcgatcattgagcaaacgttgtgtgagctggtagatgaaatgagttg

SEQ ID NO: 641657 - DNA, 75 bp, synthetic construct
  source 1..75: mol_type = other DNA
cgtcatcttttatgctggttggctgtacgcctcgtattgaagtcgctgcacctaaggaaccgatcactatcaata

SEQ ID NO: 641658 - DNA, 75 bp, synthetic construct
  source 1..75: mol_type = other DNA
tctggttgaatatcatcagatgactgcgccgctgattggctactattcaaaagaagctgaagcgggcaacaccaa

SEQ ID NO: 641659 - DNA, 75 bp, synthetic construct
  source 1..75: mol_type = other DNA
aagaagcggaagcgggtaacaccaaatacgcgaaagttgacggcaccaagccggtggctgaagttcgcgcagctc

SEQ ID NO: 641660 - DNA, 75 bp, synthetic construct
  source 1..75: mol_type = other DNA
ggtcaacctggcaactctggttgtgatggctaacggcctgactcgttctggtttattgactggttcgccggtacc

SEQ ID NO: 641661 - DNA, 75 bp, synthetic construct
  source 1..75: mol_type = other DNA
ccttgtattgctcagcttaggtttgtgggtttttggcagtgaagtcattaatgctactgcagttggtctgctggc

SEQ ID NO: 641662 - DNA, 75 bp, synthetic construct
  source 1..75: mol_type = other DNA
gaactgaaaacaatgggtcgcctgactcgcagagagtggacgctgattggtcttgttctgcttagtttgggttta

SEQ ID NO: 641663 - DNA, 75 bp, synthetic construct
  source 1..75: mol_type = other DNA
cctgcgctggaagaatggctgacatccgcactgacaacgccatttgagctggaaacccgcttaatccctgatgag

SEQ ID NO: 641664 - DNA, 75 bp, synthetic construct
  source 1..75: mol_type = other DNA
attactggcgtcttggcgctatcttcggggtgatttatattgccatgctgcttctggtaggctggccgattctcg

SEQ ID NO: 641665 - DNA, 75 bp, synthetic construct
  source 1..75: mol_type = other DNA
tcatgggctgtctgacgccgtatgcaaccggtcctggggtgattatttacggctgtggctatgtgaaatcaaaag

SEQ ID NO: 641666 - DNA, 75 bp, synthetic construct
  source 1..75: mol_type = other DNA
aatattatccgactaaatttggacgaaattatgtcctgaggaatgtaaatattgagctaccaagggaccgtaata

SEQ ID NO: 641667 - DNA, 75 bp, synthetic construct
  source 1..75: mol_type = other DNA
cgcatggtgcactgggcgcggcgcaggcctatatggcaacctatatcgtctatttttctctttgttgtagcgtgt

SEQ ID NO: 641668 - DNA, 75 bp, synthetic construct
  source 1..75: mol_type = other DNA
tattctcaagaagatcgaaccaaaattatttcatcactaaagtttgtcaatgaagttttcatagaagaatccctt

SEQ ID NO: 641669 - DNA, 75 bp, synthetic construct
  source 1..75: mol_type = other DNA
acccggatgccagcgcgagcgttccggttgaactggtcacggcttcggcaagcgggctggacaataacattaccc

SEQ ID NO: 641670 - DNA, 75 bp, synthetic construct
  source 1..75: mol_type = other DNA
acccggatgccagcacgagcgttccggttgaactggtgacggcatcggcaagcgggctggacaataacatcaccc

SEQ ID NO: 641671 - DNA, 75 bp, synthetic construct
  source 1..75: mol_type = other DNA
tcgcaaaatacagccaacaaccactggtgaaatatatcggccagccggtcgtcaacattgtcgaactcaatctgg

SEQ ID NO: 641672 - DNA, 75 bp, synthetic construct
  source 1..75: mol_type = other DNA
catttgatgtatttcatgtaggccacatcaatattattgagagagcgaaaaagctaggtgattacttaattgtag

SEQ ID NO: 641673 - DNA, 75 bp, synthetic construct
  source 1..75: mol_type = other DNA
tgggtcagggtgggacggcttaaaaacccttgttgcaatggcaaccaggctgaccgccaccatggccgacgatcc

SEQ ID NO: 641674 - DNA, 75 bp, synthetic construct
  source 1..75: mol_type = other DNA
tgccatgcaaaggtcgcagacgaagcgggggtggtgcgtgacaccctgaaatccttcgccgagatcgggggcgcc

SEQ ID NO: 641675 - DNA, 75 bp, synthetic construct
  source 1..75: mol_type = other DNA
tattttgctacgtaacagcaatcttgagatattcgacaatatcgatgacgctattcgcatttatcagaacctata

SEQ ID NO: 641676 - DNA, 75 bp, synthetic construct
  source 1..75: mol_type = other DNA
aattgggttaaggataagacgggatgtgaagtgatttatttagaaagaacccccgcgatatctacgacagaagtt

SEQ ID NO: 641677 - DNA, 75 bp, synthetic construct
  source 1..75: mol_type = other DNA
cgactggattctggatgccgaactccaacggcgtgcccagatcgggctcaacaaaggcgaagctcatcatgcgct

SEQ ID NO: 641678 - DNA, 75 bp, synthetic construct
  source 1..75: mol_type = other DNA
gctgatgaacgatgctggacgccatatccgcgagcagttcaccgacacgggcggcttcaccgatcacgtctttgc

SEQ ID NO: 641679 - DNA, 75 bp, synthetic construct
  source 1..75: mol_type = other DNA
ggcaatggcagtttcgccggcaaccgcttcataccgctcgccttagttctgttgacgctggcgctggcatcccct

SEQ ID NO: 641680 - DNA, 75 bp, synthetic construct
  source 1..75: mol_type = other DNA
atttctccaccggtcttgatgtctctggcaataataacaacatgacgctggcgacttatgagctgaatgtgacag

SEQ ID NO: 641681 - DNA, 75 bp, synthetic construct
  source 1..75: mol_type = other DNA
cggcgcctgagggcaaggagacgatagttaagtcctggacagtccatgacgacagcaacaccgttgtctttgatg

SEQ ID NO: 641682 - DNA, 75 bp, synthetic construct
  source 1..75: mol_type = other DNA
gctggcaggcagcaacagctttatcgcaatttggcggtaattatccagaagggtccggccatgcgattgctgatt

SEQ ID NO: 641683 - DNA, 75 bp, synthetic construct
  source 1..75: mol_type = other DNA
ttgtccttgagaagttcttaaaagagtacaggcgcacaaaaatggaatcgcatacctggaaaacatcgcagtatg

SEQ ID NO: 641684 - DNA, 75 bp, synthetic construct
  source 1..75: mol_type = other DNA
aacatttcctgaaggaatgtcgatccttgtcaatccagataaagaagttttttcagggtgttacgtcatcgccag

SEQ ID NO: 641685 - DNA, 75 bp, synthetic construct
  source 1..75: mol_type = other DNA
gctatcagcgggggaaccaccagctatacggttcaactggtgaacagtgggaccatcaatgtcggtacggcgcag

SEQ ID NO: 641686 - DNA, 75 bp, synthetic construct
  source 1..75: mol_type = other DNA
cgattatagaaaatgctggcaccatcaaactggactctctatgggttgatgctaacgataccactgcgttacccg

SEQ ID NO: 641687 - DNA, 75 bp, synthetic construct
  source 1..75: mol_type = other DNA
cccgaatcgaatgacgacttttggaaagatggtgaagaaggtgcttatgcgatgggttatgaggatgggagagac

SEQ ID NO: 641688 - DNA, 75 bp, synthetic construct
  source 1..75: mol_type = other DNA
attggctatgactcaggtgcagaatcgcaatacgaaagcgatgtagaggctatccgcgccgctggaatcaaagtg

SEQ ID NO: 641689 - DNA, 75 bp, synthetic construct
  source 1..75: mol_type = other DNA
cagtgcaggtactgccgacacgactgttgtgattaatgatgttttcaaaggtgaaaatatttccggggctgagaa

SEQ ID NO: 641690 - DNA, 75 bp, synthetic construct
  source 1..75: mol_type = other DNA
gcggactccagtgcacagcaaaaactgactaactacactattggtaccaatagcgatggcacctctggtatgttg

SEQ ID NO: 641691 - DNA, 75 bp, synthetic construct
  source 1..75: mol_type = other DNA
gggattatgttcgtgctggcggtggtaccgggaatgccgcacctgccgtttttgctgttcagcgccctgcttggt

SEQ ID NO: 641692 - DNA, 75 bp, synthetic construct
  source 1..75: mol_type = other DNA
tgagtggtttctgttttgtccgtgtgatacgccttatatcccccaggatttagcctcccgactttatcatcagcg

SEQ ID NO: 641693 - DNA, 75 bp, synthetic construct
  source 1..75: mol_type = other DNA
cttaaagcgcagataaagcgcgttgagatggaaaaagaaatactaaagcaggctgccgtgctgatgagcgaaatc

SEQ ID NO: 641694 - DNA, 75 bp, synthetic construct
  source 1..75: mol_type = other DNA
ccaatgtcgagcgtgtattgatgaatagccgtagagccaatctgatactagagatgactgaagaaggtagatatt

SEQ ID NO: 641695 - DNA, 75 bp, synthetic construct
  source 1..75: mol_type = other DNA
gcgtcgaaaatccctgtagggattaactccgcaggtcaatggcgggtgatgactaaggaagacatgaagaaaaag

SEQ ID NO: 641696 - DNA, 75 bp, synthetic construct
  source 1..75: mol_type = other DNA
ggcggattatgttccccaagatgaagtgcttagcgtcgaagacgaagcgcaggttgatgaagctctggcatggct

SEQ ID NO: 641697 - DNA, 75 bp, synthetic construct
  source 1..75: mol_type = other DNA
tggcggcggaggcggaagagaaaagcctcgaaacgctgacccgcaccatcaccgaaaccagcgagcagcaggtca

SEQ ID NO: 641698 - DNA, 75 bp, synthetic construct
  source 1..75: mol_type = other DNA
tgaccaatcagggcgcggtgcgactggcaaacgcgaccatgctcggtacaaaacttaatatcacacaaatggctg

SEQ ID NO: 641699 - DNA, 75 bp, synthetic construct
  source 1..75: mol_type = other DNA
aacaagacccatacatgaggcattcggcatcgaataacatcatacagcttgccacccgtcagtttgtttctcaat

SEQ ID NO: 641700 - DNA, 75 bp, synthetic construct
  source 1..75: mol_type = other DNA
aataacaccacgcggattgcgaccactgcgtttgtacaggctgctattaccgctctgattgacggtgcgccagcc

SEQ ID NO: 641701 - DNA, 75 bp, synthetic construct
  source 1..75: mol_type = other DNA
gctttttatgcccgaaccgatggtcccaatgtcgagcgtgtattgatgaatagccgtagagccaatctgatacta

SEQ ID NO: 641702 - DNA, 75 bp, synthetic construct
  source 1..75: mol_type = other DNA
gtctgaaggtacaagcacagtaccatgttgatgagatagaaaatgtacataaaccgttgctgcgtatgttggcgg

SEQ ID NO: 641703 - DNA, 75 bp, synthetic construct
  source 1..75: mol_type = other DNA
ggaagggcgttttggttgggcattactgaacgtcttcgtaaacctgttaggttcttttgccatgactgcactggc

SEQ ID NO: 641704 - DNA, 75 bp, synthetic construct
  source 1..75: mol_type = other DNA
cccccggcttgccgatgccggtgaagcggtattctggcgagtggataaatcggcaaattacggtgcactggacga

SEQ ID NO: 641705 - DNA, 75 bp, synthetic construct
  source 1..75: mol_type = other DNA
tataaaatgaacgcctccatctctggcgcggaagtcggctgtcagggggagattggcgtggcctgttcaatggcg

SEQ ID NO: 641706 - DNA, 75 bp, synthetic construct
  source 1..75: mol_type = other DNA
gctgcgccgtttgctggtctctagtgacaatatctctaacgatccaatgaacgtcatcgactggatcaatatgtt

SEQ ID NO: 641707 - DNA, 75 bp, synthetic construct
  source 1..75: mol_type = other DNA
aaagtgatcgagacgatgtatgaaaccggcaaagatatgaacgataaataccgcgaaacatcacgcggaggactg

SEQ ID NO: 641708 - DNA, 75 bp, synthetic construct
  source 1..75: mol_type = other DNA
attctcccgccgcccgcctggatggaggatctgctgaccgccctcgcctgtaacgcccgtggtgaagcgcaggaa

SEQ ID NO: 641709 - DNA, 75 bp, synthetic construct
  source 1..75: mol_type = other DNA
cagcctgtttcagttattgtgcgtggcaggcgactggtcgcgggcactgcaacagatccagctatgcgcccggat

SEQ ID NO: 641710 - DNA, 75 bp, synthetic construct
  source 1..75: mol_type = other DNA
cagtagtcggctcccggtggcggcaggcgcccatgtggttgattttccggtggcaaagaacattatttttcatcc

SEQ ID NO: 641711 - DNA, 75 bp, synthetic construct
  source 1..75: mol_type = other DNA
gctttattctgcgccgctcagaacttgccagtaacgaagtttctccggttccgcttgattacgccgtgggtgata

SEQ ID NO: 641712 - DNA, 75 bp, synthetic construct
  source 1..75: mol_type = other DNA
ccggaactcattgagttattcgcctggagcgaagagaagtttttaaaaataacggaaggttcggcgattcgccgt

SEQ ID NO: 641713 - DNA, 75 bp, synthetic construct
  source 1..75: mol_type = other DNA
ggagcgaagagaagtttttaaaagtcacggaaggatcggcgattcgtcgtattggtcacctgcgttggctgcgta

SEQ ID NO: 641714 - DNA, 75 bp, synthetic construct
  source 1..75: mol_type = other DNA
agaagaaaaatatggtgccctaacccatccatattttgttgttgtttttcaccctgaaacattaagccaaacatc

SEQ ID NO: 641715 - DNA, 75 bp, synthetic construct
  source 1..75: mol_type = other DNA
tcgatagctacaagaccgatatttctggtcgtgttccgaaagggacagcaacttccattacgctggcagcagcac

SEQ ID NO: 641716 - DNA, 75 bp, synthetic construct
  source 1..75: mol_type = other DNA
gcaggtattgatgccaccatgacggcgattggggtaccacagggtatcaaccgccgctctttctggaaccccttc

SEQ ID NO: 641717 - DNA, 75 bp, synthetic construct
  source 1..75: mol_type = other DNA
ggtacaggcgctgggtcagagggtgtggctcaccggtcacggcgatatcagcctgctggatttgtccacctgtac

SEQ ID NO: 641718 - DNA, 75 bp, synthetic construct
  source 1..75: mol_type = other DNA
tgaaatttttggacatttagtctggttctggtccattgaaattattcgcagagatttacgaaacagaattactca

SEQ ID NO: 641719 - DNA, 75 bp, synthetic construct
  source 1..75: mol_type = other DNA
tgcattcattgggctgattgctggcgttgtttccgcatttgtgaagtggggggcagaagttccattgccgccacg

SEQ ID NO: 641720 - DNA, 75 bp, synthetic construct
  source 1..75: mol_type = other DNA
gcgagaagcgcatctatgccgtgccaccgtttacccgcgtggaaagcctcgatttcgatgatcatccgttcaccg

SEQ ID NO: 641721 - DNA, 75 bp, synthetic construct
  source 1..75: mol_type = other DNA
cacaccgtggagtcaatggttcacgctttacgcacgggcaattacagcgtggtgatcggttggttggcagatgat

SEQ ID NO: 641722 - DNA, 75 bp, synthetic construct
  source 1..75: mol_type = other DNA
tggcaggtgctttagcgcaactttttgttcatatgatttcattccctctcatgggacttacgccacctctctttg

SEQ ID NO: 641723 - DNA, 75 bp, synthetic construct
  source 1..75: mol_type = other DNA
gtgctgtctgttcatccctctacgcgtagcctgaccatctgtgtcttggtgctgtgcaatggattcattgttacc

SEQ ID NO: 641724 - DNA, 75 bp, synthetic construct
  source 1..75: mol_type = other DNA
tgattggcgaaagcgacgtgttgaaggtgattgaccagggtgcggatgacaccaccaacgccgtgtcgattcgca

SEQ ID NO: 641725 - DNA, 75 bp, synthetic construct
  source 1..75: mol_type = other DNA
gcccagcgggtgttcgcgactgcacgggcggcaggcgttgagctggcggtcaaccaggtgaatgcagtgccgacc

SEQ ID NO: 641726 - DNA, 75 bp, synthetic construct
  source 1..75: mol_type = other DNA
acatgtttacagctcgattatagaccctgatacgggatatacccgaccggatgatgtagccgttttgctaaataa

SEQ ID NO: 641727 - DNA, 75 bp, synthetic construct
  source 1..75: mol_type = other DNA
gccgatgccgtacggctggggaactggtggtatccagcttaccgccagcgtgattggcgaaagcgacgtgttgaa

SEQ ID NO: 641728 - DNA, 75 bp, synthetic construct
  source 1..75: mol_type = other DNA
gcgagaagcgcatctatgcggtgccgccgtttacccgcgtggaaagcctcgatttcgacgatcacccattcaccg

SEQ ID NO: 641729 - DNA, 75 bp, synthetic construct
  source 1..75: mol_type = other DNA
acccgtcgccgatcccgaaatttgataacccgaaaatggacatgatgcccgccctgcaactgttcggcgcagggc

SEQ ID NO: 641730 - DNA, 75 bp, synthetic construct
  source 1..75: mol_type = other DNA
gccgcacgtccaaccgtggctgatcaggctctgcacgagcataacaacgttagctatcaacagcatattgcgatc

SEQ ID NO: 641731 - DNA, 75 bp, synthetic construct
  source 1..75: mol_type = other DNA
accgccactggatcaactgtggtcaggctggtccgttaggctggacgattccggcggcgctaggggtttgtgccg

SEQ ID NO: 641732 - DNA, 75 bp, synthetic construct
  source 1..75: mol_type = other DNA
gcacaaatgctgcatgtctttaaagaccgccactggatcaactgtgggcaggcaggcccgctgggctggaccatt

SEQ ID NO: 641733 - DNA, 75 bp, synthetic construct
  source 1..75: mol_type = other DNA
gttgacgcgatccgccgtcacgatcctgacgaagccgatcgtgcgttgcaatcgcatctcaacagcgtctctgct

SEQ ID NO: 641734 - DNA, 75 bp, synthetic construct
  source 1..75: mol_type = other DNA
taacccaatcttcatggcgatccacgttgccctgctcgactggctgatcgccgcacgtccaaccgtggctgatca

SEQ ID NO: 641735 - DNA, 75 bp, synthetic construct
  source 1..75: mol_type = other DNA
ccgatcgcgcgttgcaatcgcatctcaacagcgtttctgccacctggcacgccttcggccaggcgaccaacaaaa

SEQ ID NO: 641736 - DNA, 75 bp, synthetic construct
  source 1..75: mol_type = other DNA
cgcgcagcgatcagttactggcgatggtcgggccgggactaatgctttgggcaccgcgagaatacgaactgttcc

SEQ ID NO: 641737 - DNA, 75 bp, synthetic construct
  source 1..75: mol_type = other DNA
gttaatggcaagaagctttagtacgcccggaaaagcccgacaactggcatggaaaaccaccatgctggcaagaag

SEQ ID NO: 641738 - DNA, 75 bp, synthetic construct
  source 1..75: mol_type = other DNA
atggaacagctgcgtgccgaattaagccatttactgggcgaaaaactcagtcgtattgagtgcgtcaatgaaaaa

SEQ ID NO: 641739 - DNA, 75 bp, synthetic construct
  source 1..75: mol_type = other DNA
gatttccggtgacttcgacttccagttcctgattgaagaattagccgttggcgcacagttcaacattccgtacat

SEQ ID NO: 641740 - DNA, 75 bp, synthetic construct
  source 1..75: mol_type = other DNA
ctggggctgattcgccagtcgcagcgcgcgtttgatatggactactgcgtgcaactcgctttcgagaatatcaac

SEQ ID NO: 641741 - DNA, 75 bp, synthetic construct
  source 1..75: mol_type = other DNA
gcgcgtttgatatggattactgcgtacagctcgcgttcgaaaatattaactccagcgaagtgaacggttacggcg

SEQ ID NO: 641742 - DNA, 75 bp, synthetic construct
  source 1..75: mol_type = other DNA
atggtgaaaaagcgctgcaagcatattgccctaaccatcttattttccgtaccagctgggtctacgcgggtaaag

SEQ ID NO: 641743 - DNA, 75 bp, synthetic construct
  source 1..75: mol_type = other DNA
tatgctgcgctggtttttgaagaggcgcgcaaagcagatattcccctcgcactcaacaaactcaatgcggtacca

SEQ ID NO: 641744 - DNA, 75 bp, synthetic construct
  source 1..75: mol_type = other DNA
accagctgggtatacgctggtaaaggaaataattttgccaaaacgatgttgcgtctggcaaaagaacgcgaagag

SEQ ID NO: 641745 - DNA, 75 bp, synthetic construct
  source 1..75: mol_type = other DNA
aaaaaaattcgtcctgacgttattgttaatgctgctgctcacactgcagtagataaagcagaatcagaaccggat

SEQ ID NO: 641746 - DNA, 75 bp, synthetic construct
  source 1..75: mol_type = other DNA
cgtactggagacactcaacacggtcatgcttataacaacgaatgtactttcattgcgcgccttgtattagggatg

SEQ ID NO: 641747 - DNA, 75 bp, synthetic construct
  source 1..75: mol_type = other DNA
tatgccaacgccagaacgtaaagaacgtctcaccgaattagcccaacgctggctggcccgtcgcctgggagaacg

SEQ ID NO: 641748 - DNA, 75 bp, synthetic construct
  source 1..75: mol_type = other DNA
ggctgattgcaccgctcatgccattcgcgtggcattaaaaaaaccagaagttgctggcttgtaccatctggtagc

SEQ ID NO: 641749 - DNA, 75 bp, synthetic construct
  source 1..75: mol_type = other DNA
tattcagaaatgagtctatgcagttcaccagtaaaatcagccatcagagagggaatggccttattaatgccctgc

SEQ ID NO: 641750 - DNA, 75 bp, synthetic construct
  source 1..75: mol_type = other DNA
atgacggttcctacctatgacaaatatattgaacctcttctgcgttatctggcgacaaaaccggaaggtgcagcc

SEQ ID NO: 641751 - DNA, 75 bp, synthetic construct
  source 1..75: mol_type = other DNA
aagagctgtgcggtgacctgacgaatctggaaggcatcgcgcagaccgtgcgtactgtccgcccggacgtggtgg

SEQ ID NO: 641752 - DNA, 75 bp, synthetic construct
  source 1..75: mol_type = other DNA
ccagcaggccggatgaattgccggttcaatatttcgcataagcaacttaagcgggttctgagtggtgaattatat

SEQ ID NO: 641753 - DNA, 75 bp, synthetic construct
  source 1..75: mol_type = other DNA
tgtacaaccataacaaagcctgggagcacccgcttgattatgtgtgtttcatggaagaggcgaaaagctgtttac

SEQ ID NO: 641754 - DNA, 75 bp, synthetic construct
  source 1..75: mol_type = other DNA
ggggtactctgattattatccgttcggcgttgatggttcacgtcaggatgacgaaacggaaattaaacacgctgt

SEQ ID NO: 641755 - DNA, 75 bp, synthetic construct
  source 1..75: mol_type = other DNA
atcgtgaatacgtcgccagctgctttaacacttatggctgcttctggggcgcagaacgtcaggtcgttgcaaccg

SEQ ID NO: 641756 - DNA, 75 bp, synthetic construct
  source 1..75: mol_type = other DNA
aaaaagtagaaaagatcaatccaaataataaatatggttcttggaaatatatagatattgcttctgtagataggt

SEQ ID NO: 641757 - DNA, 75 bp, synthetic construct
  source 1..75: mol_type = other DNA
ttaattcattacttagtgataagtataacaatcatgacctttcgtttactttattatccaacaccattaatgaaa

SEQ ID NO: 641758 - DNA, 75 bp, synthetic construct
  source 1..75: mol_type = other DNA
taactaccttctgggaatatctcgcacaacaagatcccgaattacccgctattcagacgctcccgatggatggtt

SEQ ID NO: 641759 - DNA, 75 bp, synthetic construct
  source 1..75: mol_type = other DNA
ctggtcgttgcactgtttcaaccctcgcccgtttcgggcaattgagatctatcgcagggtctgggaagaggccga

SEQ ID NO: 641760 - DNA, 75 bp, synthetic construct
  source 1..75: mol_type = other DNA
caaactgcgggggcagcggcagaaactgcgcttctggtgctgtgttgcggcctgtgtggcactgcacacctacaa

SEQ ID NO: 641761 - DNA, 75 bp, synthetic construct
  source 1..75: mol_type = other DNA
ctcgctcaacgcgggcaggcctattcacgtcttggcattaacgaccagacgccgctgccgtctctgctcgccagc

SEQ ID NO: 641762 - DNA, 75 bp, synthetic construct
  source 1..75: mol_type = other DNA
gggaacacataccgcgatggcgggacaggaaatcagcttttccgacgaggatatcgacaacatggcagcggccta

SEQ ID NO: 641763 - DNA, 75 bp, synthetic construct
  source 1..75: mol_type = other DNA
ggtgcgccgctgtgtattgggcatccggccagcaatagcccatcttatggtgaaacaactgggctgataagtaaa

SEQ ID NO: 641764 - DNA, 75 bp, synthetic construct
  source 1..75: mol_type = other DNA
ccggttatgttagcagaagtaaagcgactgctgagctggaaaatcagcgtctggcggggaatgtcagcgagctga

SEQ ID NO: 641765 - DNA, 75 bp, synthetic construct
  source 1..75: mol_type = other DNA
ttgtgatttctcgatctttatcaacgcgccagctactgcgttgcgggaacgactggtggggcgcaagctggcggg

SEQ ID NO: 641766 - DNA, 75 bp, synthetic construct
  source 1..75: mol_type = other DNA
ccgccggggacggggaaatctaccctaaccaccttctgggaatatctcgcgcaacaagacccggaactgcccgct

SEQ ID NO: 641767 - DNA, 75 bp, synthetic construct
  source 1..75: mol_type = other DNA
cttctgggaatatctcgcgcaacaagacccggaactgcccgctattcagacgctcccgatggatggttttcacca

SEQ ID NO: 641768 - DNA, 75 bp, synthetic construct
  source 1..75: mol_type = other DNA
agcctaaagaccggagagagcagttctgtcgtcgtggcattcgaggaagaggatgagctgactgttgaagaagat

SEQ ID NO: 641769 - DNA, 75 bp, synthetic construct
  source 1..75: mol_type = other DNA
ggctggataagctgtagtgatcgaatgcctgaaaagggccagaacgtgcttatttcggtgaatttcgatagtgat

SEQ ID NO: 641770 - DNA, 75 bp, synthetic construct
  source 1..75: mol_type = other DNA
tatttcggtgaatttcgatagtgatctggttgagccgctaatatgctccgcacgctataccggaagcacctttcg

SEQ ID NO: 641771 - DNA, 75 bp, synthetic construct
  source 1..75: mol_type = other DNA
cagccggtggcggtatgcctcgactgggctgatgtggtccgcgacggcatcgtctgggatttcttcggtgcggtc

SEQ ID NO: 641772 - DNA, 75 bp, synthetic construct
  source 1..75: mol_type = other DNA
tggttatcccaggataacgccatgctggttacccacaatggacgtcttttaaaaaccgtcaaacttaataataat

SEQ ID NO: 641773 - DNA, 75 bp, synthetic construct
  source 1..75: mol_type = other DNA
tcaacgattaccgttattatcagaccgtggccggaaaatataccgacattcattacagtggtaaaagccgttccc

SEQ ID NO: 641774 - DNA, 75 bp, synthetic construct
  source 1..75: mol_type = other DNA
ggatgcgctcagtggaaaaaatggctggaatgatgatgatatagaagtattaagtagcgctactgaagatgatta

SEQ ID NO: 641775 - DNA, 75 bp, synthetic construct
  source 1..75: mol_type = other DNA
aattgaagatatctcttctactgacagccaggcggcgcataaccttacgttaagcattgatgaacgtctgcaggc

SEQ ID NO: 641776 - DNA, 75 bp, synthetic construct
  source 1..75: mol_type = other DNA
ggtgcatatgatggaaagcgtggcgctaccgggtggtggcggcgtgaaggcggcgattaagggctatcgtatcgc

SEQ ID NO: 641777 - DNA, 75 bp, synthetic construct
  source 1..75: mol_type = other DNA
caatattccgctggatcagctttcagcccgcattaacgccaacccgaaagggcgctttatttatctggcgcgtca

SEQ ID NO: 641778 - DNA, 75 bp, synthetic construct
  source 1..75: mol_type = other DNA
atcgtgaaaaagggcaaggtgacgtactcggcggatgaagccaccggcggacatcacatctctctgactctcgcc

SEQ ID NO: 641779 - DNA, 75 bp, synthetic construct
  source 1..75: mol_type = other DNA
cccccaggtacggatgcgcgtatttccatcaacgtgctggaatctgccggactggaagtcagccatgtgctggat

SEQ ID NO: 641780 - DNA, 75 bp, synthetic construct
  source 1..75: mol_type = other DNA
ttttagccatgcggcgacttcatttcctccaggtacggacccgcgtatttccatcaacgtgctggaatctgccgg

SEQ ID NO: 641781 - DNA, 75 bp, synthetic construct
  source 1..75: mol_type = other DNA
gtcgcccgcttaacccgggtaccgctgttgaaaccgtcgattttcagtttttgagtgatttttacgaatttaatg

SEQ ID NO: 641782 - DNA, 75 bp, synthetic construct
  source 1..75: mol_type = other DNA
ccggttagcgattacaacgtaatggcgcacaatattatccgaagtctcaacatgtatatcgaacgggtcaaaaaa

SEQ ID NO: 641783 - DNA, 75 bp, synthetic construct
  source 1..75: mol_type = other DNA
agtaaccattaagccagatactcccgattttaaccgtttccttacggctcggaatcgttccgtaattagaggctt

SEQ ID NO: 641784 - DNA, 75 bp, synthetic construct
  source 1..75: mol_type = other DNA
gaatgggttccacgggtggagtgggtggagagttgtccgtttaataaagcggatggcgtgctgaaaggcactgag

SEQ ID NO: 641785 - DNA, 75 bp, synthetic construct
  source 1..75: mol_type = other DNA
attccgatgagggaacctgtctgcatgagtatgccacatattcctgcgagtccagaacatccgggaaagtgatgg

SEQ ID NO: 641786 - DNA, 75 bp, synthetic construct
  source 1..75: mol_type = other DNA
atgaaacgtcttataccattgattctgtgcctggcagtcagtggggtacaggctgacagcaacagtgattaccgg

SEQ ID NO: 641787 - DNA, 75 bp, synthetic construct
  source 1..75: mol_type = other DNA
caaaaagcgcaggcagcgaagaaacacgccaagaaacacagccatcagcaaccggcaaaacctgctgcacaaccc

SEQ ID NO: 641788 - DNA, 75 bp, synthetic construct
  source 1..75: mol_type = other DNA
caaaaagcgcaggcagcgaagaaacacgccgggaaacacagccatcagcaaccggcaaaaacctgctgcacaacc

SEQ ID NO: 641789 - DNA, 75 bp, synthetic construct
  source 1..75: mol_type = other DNA
aaagcacaggccgccaaaaagcacagcaaaaaacacagccagcaacaaccgacaaaacctgcagcacagccagcc

SEQ ID NO: 641790 - DNA, 75 bp, synthetic construct
  source 1..75: mol_type = other DNA
ccggttagcgattacaacgttatggcccacaatattatccggagccttaatatgtatatcgagcgggtcaagaaa

SEQ ID NO: 641791 - DNA, 75 bp, synthetic construct
  source 1..75: mol_type = other DNA
attcctctcgttacgggcgctgacctgctggcgcagtacggctatatggggctcggctttaagctggtggtggtc

SEQ ID NO: 641792 - DNA, 75 bp, synthetic construct
  source 1..75: mol_type = other DNA
atgacaattcaggaaattccgctgacagcggacaaccagcagttcagcatcgtcctggggggggtcacctggcgg

SEQ ID NO: 641793 - DNA, 75 bp, synthetic construct
  source 1..75: mol_type = other DNA
atgatttccgcttcgctgcaacaacgtaaaactcgcacccgccgcagcatgttgttcgtacctggcgccaatgcc

SEQ ID NO: 641794 - DNA, 75 bp, synthetic construct
  source 1..75: mol_type = other DNA
catcgctgctggtaaaacaaagcccggcaatgcactacggtcatggctggatcatgggtgaggatggtaaacgct

SEQ ID NO: 641795 - DNA, 75 bp, synthetic construct
  source 1..75: mol_type = other DNA
tggatcatgggggaggatggtaaacgctggcatccgtgccgttcacaagatgaattgctggcagaactatctacg

SEQ ID NO: 641796 - DNA, 75 bp, synthetic construct
  source 1..75: mol_type = other DNA
ggcatctattgtgacgctgagtgtgcgcaatggcacagggaagagcaggccgcaaaacagcgtaaatatggcatg

SEQ ID NO: 641797 - DNA, 75 bp, synthetic construct
  source 1..75: mol_type = other DNA
tcgtcgaaaaggtcgtcctccggctacaacagcgagcggtaagcacaagaacgcttagccctactcaattgcaga

SEQ ID NO: 641798 - DNA, 75 bp, synthetic construct
  source 1..75: mol_type = other DNA
cgcataacgctgaacccagcggtaaatcgtggagtgatcgacattcactccgcgttcagccagcatctcctgcag

SEQ ID NO: 641799 - DNA, 75 bp, synthetic construct
  source 1..75: mol_type = other DNA
gatgtcagggctttcacgggtgaggcgaaattctgccgtaaggccgcagccggcttcagtaactgctgtaaggat

SEQ ID NO: 641800 - DNA, 75 bp, synthetic construct
  source 1..75: mol_type = other DNA
aacaccgggctggatttaccttgttagaggtgatggtagtcattgttattctgggtattttggccagtctggtcg

SEQ ID NO: 641801 - DNA, 75 bp, synthetic construct
  source 1..75: mol_type = other DNA
aaatccagaacatcactggcggttgctatgactggtttgtcactctcggaaaagaagtgatcaccgggaagctgg

SEQ ID NO: 641802 - DNA, 75 bp, synthetic construct
  source 1..75: mol_type = other DNA
cagcaaccgcaacttgaacacagtgggccgccttggagatcctgcctaatcgatgacatctttaaaacgcattgt

SEQ ID NO: 641803 - DNA, 75 bp, synthetic construct
  source 1..75: mol_type = other DNA
gtgagcaagtacgaaaaattagatcaaaacattctttcaatgctgagtgaaagaccaacacctgtttttgatatc

SEQ ID NO: 641804 - DNA, 75 bp, synthetic construct
  source 1..75: mol_type = other DNA
tacagcgctattactcaatagttgtttttttaaaatcattgctttttataattgcattaacatgtgtatttttat

SEQ ID NO: 641805 - DNA, 75 bp, synthetic construct
  source 1..75: mol_type = other DNA
tttttttgtgcatttaacaattagcataattgcatgtttatgttatatggggttagggcaatatgtggcgacttt

SEQ ID NO: 641806 - DNA, 75 bp, synthetic construct
  source 1..75: mol_type = other DNA
atgggtctgtcttctgccgcctttgctgcagagactgcgaccacacctgctccgactgcgacgaccaccaaagca

SEQ ID NO: 641807 - DNA, 75 bp, synthetic construct
  source 1..75: mol_type = other DNA
ggttactgtcattcattcccggtggatttcttggcatgacgctgttttttgccagcgggatgaactggacagtaa

SEQ ID NO: 641808 - DNA, 75 bp, synthetic construct
  source 1..75: mol_type = other DNA
agaaaatcccggataatggtgcgctgaccgaaaaagtgaaagagcagattgccggtcagctgaaacaggtggggc

SEQ ID NO: 641809 - DNA, 75 bp, synthetic construct
  source 1..75: mol_type = other DNA
tctgtggtggtgatgtcttctgccttgacggtgaatgcgataaggcacagagcggaaaaagcagtgattttggtg

SEQ ID NO: 641810 - DNA, 75 bp, synthetic construct
  source 1..75: mol_type = other DNA
tattcgtcacattctggcgcgtcatgtggaaggtgcttcgcacatggcggaaggttatacccgcgcaacggcagg

SEQ ID NO: 641811 - DNA, 75 bp, synthetic construct
  source 1..75: mol_type = other DNA
acgatggtggaggagtactgtacccggactgcggccatgacaggtcattatgagaatacgacagaaataaaacag

SEQ ID NO: 641812 - DNA, 75 bp, synthetic construct
  source 1..75: mol_type = other DNA
atgaacggactcacggcaacgggtataaccgtcggtatttgtgcagggctttggcagttagtgtcttcacatgtc

SEQ ID NO: 641813 - DNA, 75 bp, synthetic construct
  source 1..75: mol_type = other DNA
agaaaaacggcagtgcctgcctgcaggaagaggtggtgttctcctgtgagaagaaggtcagcggagaagcgcagc

SEQ ID NO: 641814 - DNA, 75 bp, synthetic construct
  source 1..75: mol_type = other DNA
tgcgaagcatcctgactgtcggggaattacggttgatgagctgcagaaaattcagttcgacagactggatttcac

SEQ ID NO: 641815 - DNA, 75 bp, synthetic construct
  source 1..75: mol_type = other DNA
tgcaaaagatatcattctgggcgagttaactaagagagttcaccggatcttccccgatgctgatgttcgggttaa

SEQ ID NO: 641816 - DNA, 75 bp, synthetic construct
  source 1..75: mol_type = other DNA
gcagaaaaagcgcagctactgccagtttgattcgaagctggcgcagatagtccagcagcaggggcgtaacgggca

SEQ ID NO: 641817 - DNA, 75 bp, synthetic construct
  source 1..75: mol_type = other DNA
gtcagtttgattcgaagctggcacagattgttcaggcacaggggcgtaaagggcagctgggtatcggttttggca

SEQ ID NO: 641818 - DNA, 75 bp, synthetic construct
  source 1..75: mol_type = other DNA
ggcacactgcgacagtgaagaaaaggcgctggggaaagccaaagagaaactgctcaccgtttatgtcggcacata

SEQ ID NO: 641819 - DNA, 75 bp, synthetic construct
  source 1..75: mol_type = other DNA
ttgtatcccggatgaccacgaactgatggccgggatggtgggtctgcaaaccgcgcatcgttacggtaacgcaac

SEQ ID NO: 641820 - DNA, 75 bp, synthetic construct
  source 1..75: mol_type = other DNA
cttaaccaggatatggttgcaattattggtggccgaggcacgggtaaaagcctgctgcttgatgctctccgttcc

SEQ ID NO: 641821 - DNA, 75 bp, synthetic construct
  source 1..75: mol_type = other DNA
accgtcttaggctcggagatgagtggctgactgaactcacgccaaaaacacatttcagtcagatcgatcttgaag

SEQ ID NO: 641822 - DNA, 75 bp, synthetic construct
  source 1..75: mol_type = other DNA
attccgatgagggaacctgtctgcatgagtacgccacgtactcctgcgagtcaaaaacatcaggaaaagtgatgg

SEQ ID NO: 641823 - DNA, 75 bp, synthetic construct
  source 1..75: mol_type = other DNA
gccgttccatgtcattgcctggccggaacaggatcaagagcgtaacgcatttgctatcaaaattcccgcgctgtt

SEQ ID NO: 641824 - DNA, 75 bp, synthetic construct
  source 1..75: mol_type = other DNA
tttgctttgacagttaagcccagaactgaaagtcaagtcgaaaaaatcccggacgataaaataaaagaatttttc

SEQ ID NO: 641825 - DNA, 75 bp, synthetic construct
  source 1..75: mol_type = other DNA
aggaatgaacattcagagccggtgaatacacgcaagtttcagcaacagatcatccggggagcacaggaaaaaata

SEQ ID NO: 641826 - DNA, 75 bp, synthetic construct
  source 1..75: mol_type = other DNA
ggatggcgtgctgaaaggtactgagtgttcagagccgggggggacgaaaacaggtgtgatggaaggtaaaccctg

SEQ ID NO: 641827 - DNA, 75 bp, synthetic construct
  source 1..75: mol_type = other DNA
ctgcacgtgaagtgaatggtcagtatgttgtctccattacctctcccgttaccggcgaaattgtcgatgcacatt

SEQ ID NO: 641828 - DNA, 75 bp, synthetic construct
  source 1..75: mol_type = other DNA
gaatatcggcgtatgtctggggacttccggtcctgcgggcacggacatgatcaccgcgctctattccgcttctgc

SEQ ID NO: 641829 - DNA, 75 bp, synthetic construct
  source 1..75: mol_type = other DNA
aaccagaaaatcccggacagtggcgttctgacgcagaaagggaaagagcagattgtagaccagctgaaacaggca

SEQ ID NO: 641830 - DNA, 75 bp, synthetic construct
  source 1..75: mol_type = other DNA
cctgtgagtcaaaaacatccgggaaagtgatggtctgtgggggagacgtcttctgcctcgatggcgaatgcgata

SEQ ID NO: 641831 - DNA, 75 bp, synthetic construct
  source 1..75: mol_type = other DNA
cggcagataatggcacctgtcagaaatatgtcgataatccggcctgtacgctggcctcacgtcagtgcgcgtttt

SEQ ID NO: 641832 - DNA, 75 bp, synthetic construct
  source 1..75: mol_type = other DNA
ggtgttcaaacaaacaatatcactcttcttaagaatgaggtttatttcgaaaaaataacgagtgaagtcgtgaaa

SEQ ID NO: 641833 - DNA, 75 bp, synthetic construct
  source 1..75: mol_type = other DNA
atcgagtgcgaacgcaaactgcaccagcaatcctccacgatactggcgccacacagggagtgtctgccgaagatg

SEQ ID NO: 641834 - DNA, 75 bp, synthetic construct
  source 1..75: mol_type = other DNA
cgaaaaaatggattcgaaactggtttaccggttgcatgaccgtttcaccgacagcatgtgcattctgccgaccat

SEQ ID NO: 641835 - DNA, 75 bp, synthetic construct
  source 1..75: mol_type = other DNA
gttccgttcactttcagcagccatgcccgaagccatcacattagcccgggcgggcagtgaggcggtgtcgtatgt

SEQ ID NO: 641836 - DNA, 75 bp, synthetic construct
  source 1..75: mol_type = other DNA
actggatgcatttattgaaactgaactttcatctgcggttaatggtaataataatgccgaactcctttcttgttt

SEQ ID NO: 641837 - DNA, 75 bp, synthetic construct
  source 1..75: mol_type = other DNA
tctatattgcattactcttaaaccctgagtgggcaccatcttccaaggagttgatttcctttttatcaggaaagt

SEQ ID NO: 641838 - DNA, 75 bp, synthetic construct
  source 1..75: mol_type = other DNA
ccgttgaatggtctgtcggtggcctgcctgatgtggcgctgtgggcgcagtacgccgcgccgggagctgacgccg

SEQ ID NO: 641839 - DNA, 75 bp, synthetic construct
  source 1..75: mol_type = other DNA
actaaagtgaccagtaccaacagctacgcgaagctgactatcaatggtgaggtgctctatgaagtggaccttatc

SEQ ID NO: 641840 - DNA, 75 bp, synthetic construct
  source 1..75: mol_type = other DNA
gaagagggtgcatttgcggtaagtccggacgacatgatccatatcagggcgctgggaaacaatcagaaaatggga

SEQ ID NO: 641841 - DNA, 75 bp, synthetic construct
  source 1..75: mol_type = other DNA
cgagccgattgaaacgccgctgggcactaacccgctgcatccgaacgtggtgtctaacccggttgttcgtctgta

SEQ ID NO: 641842 - DNA, 75 bp, synthetic construct
  source 1..75: mol_type = other DNA
cctatttccggctgacgatggacggtaaggaactggtcgaaatcgacaccatcaacatgattgagaaggtgaacg

SEQ ID NO: 641843 - DNA, 75 bp, synthetic construct
  source 1..75: mol_type = other DNA
gacgtcagaaagaaatcgataccggcgagggtaaacagggagaagacaccgagtcgaaaatctccgtggtctgta

SEQ ID NO: 641844 - DNA, 75 bp, synthetic construct
  source 1..75: mol_type = other DNA
tggctattctggtctggctacagtattcgctgtggttcggtaagaacggtatacatgactatacccgcgtcaata

SEQ ID NO: 641845 - DNA, 75 bp, synthetic construct
  source 1..75: mol_type = other DNA
aggagtgcagtctttgcaggatgcagccagacttgaaagtggaataagaatatccattggtagtggccaatattc

SEQ ID NO: 641846 - DNA, 75 bp, synthetic construct
  source 1..75: mol_type = other DNA
tctaatcacttttcttgcccggagtcatttttgacatgcccgataacgctggacacacctgcgaatggagtgttc

SEQ ID NO: 641847 - DNA, 75 bp, synthetic construct
  source 1..75: mol_type = other DNA
aacgataacctgctctttaactggggcatctctggcgtaacggcggcctgcagtcgcccggcgaacatgaaacat

SEQ ID NO: 641848 - DNA, 75 bp, synthetic construct
  source 1..75: mol_type = other DNA
atggcactcccgcgtattacccaaaaagagatgacagagcgcgagcaacgcgagctaaaaacgctgctggaccac

SEQ ID NO: 641849 - DNA, 75 bp, synthetic construct
  source 1..75: mol_type = other DNA
ttggttcggcatcaaccggcaagactctcggcgaagacctctggaacgcatctgcaggcattgacgcaatgatgc

SEQ ID NO: 641850 - DNA, 75 bp, synthetic construct
  source 1..75: mol_type = other DNA
ggtggagctcatcctctgagtcgagaacctataacagaatcaatgattatgagaaaagacgaatgtcactttgat

SEQ ID NO: 641851 - DNA, 75 bp, synthetic construct
  source 1..75: mol_type = other DNA
atgagttattatctaaaaccgccaccgccaccacgaacaaaagagcaagtattaaaagaagcccgtgatcaaata

SEQ ID NO: 641852 - DNA, 75 bp, synthetic construct
  source 1..75: mol_type = other DNA
atgcactggcctgaatatgtcgatccacgtatgcgcaaatatcgcgggcgtatgggccaggttattaacgattaa

SEQ ID NO: 641853 - DNA, 75 bp, synthetic construct
  source 1..75: mol_type = other DNA
agtttgaactgattacctactgggacggcttcgaggccacgtttggcgtcgattatgcggagcatgcccgcatcg

SEQ ID NO: 641854 - DNA, 75 bp, synthetic construct
  source 1..75: mol_type = other DNA
gagcattaccggatttcaggaaaattatcaacgcaatatcaggccaatcaaaacagcatcagaagcccgactacg

SEQ ID NO: 641855 - DNA, 75 bp, synthetic construct
  source 1..75: mol_type = other DNA
attgagaatgacgcaaataacaacatccagacccgacttggtttccgcacctttattcgtactcaggagaaaaac

SEQ ID NO: 641856 - DNA, 75 bp, synthetic construct
  source 1..75: mol_type = other DNA
gcaacggtgactatcgcggctggttcgggattaccgatgtgactgcaaccagcgagcagactgacagtaccggca

SEQ ID NO: 641857 - DNA, 75 bp, synthetic construct
  source 1..75: mol_type = other DNA
atggcattaccacgcaaattaaaacacctgaacctgtttaacgacgggaacaactggcaggggatcgttgagtcg

SEQ ID NO: 641858 - DNA, 75 bp, synthetic construct
  source 1..75: mol_type = other DNA
gcaatcgtgagccgcatgtgttgcaggcgtttcgtgaactggaaaacgatctcggttacggcatgctgctctccc

SEQ ID NO: 641859 - DNA, 75 bp, synthetic construct
  source 1..75: mol_type = other DNA
ggctgactgcggttgtggttggcgttatgttcctgttagttatgttcttctcaccgctggtggcgatggttcctc

SEQ ID NO: 641860 - DNA, 75 bp, synthetic construct
  source 1..75: mol_type = other DNA
ccccaatatgaataaggcgctgtatgttgatagcgtcagttcggtggcgggggcgtttatcggcacctcgtctgt

SEQ ID NO: 641861 - DNA, 75 bp, synthetic construct
  source 1..75: mol_type = other DNA
ccattgatacgcagtcagtggtgtatggcccttcggttatctatatggtgtcagagctgattcgtcagtggtctg

SEQ ID NO: 641862 - DNA, 75 bp, synthetic construct
  source 1..75: mol_type = other DNA
gcgatcagcgcctggtatttactgcgcggacgggagcgcgatgtcgcattacgctcgtttgccatcggttccgtc

SEQ ID NO: 641863 - DNA, 75 bp, synthetic construct
  source 1..75: mol_type = other DNA
gagctacatgggcgttgttgaatccgtgacgctgccgaagctgacccgcaagctcgaaaactatcgcggcggcgg

SEQ ID NO: 641864 - DNA, 75 bp, synthetic construct
  source 1..75: mol_type = other DNA
gcccgtctaccgctaagctggtgcgacgaacaagggcaaccgatctaccttcatcgtgatcgacttttaagttat

SEQ ID NO: 641865 - DNA, 75 bp, synthetic construct
  source 1..75: mol_type = other DNA
cgtgcacccggatgatctgcaacgtgtggatgatatgctcggcgcaaccttaagtttgcatggctggcgcttgcg

SEQ ID NO: 641866 - DNA, 75 bp, synthetic construct
  source 1..75: mol_type = other DNA
gcaaaccgcaactgcgcgtgcacccggatgatctgcaacgtgttgatgatatgctgggcgcaaccttaagtttgc

SEQ ID NO: 641867 - DNA, 75 bp, synthetic construct
  source 1..75: mol_type = other DNA
gtgcgtttatcggcacctcgtctgttactgcctatattgaaagtacttctggtgtggcagtcggtggccgcacgg

SEQ ID NO: 641868 - DNA, 75 bp, synthetic construct
  source 1..75: mol_type = other DNA
atgaacattagcgatgtagcaaaaattaccggcctgaccagcaaagccattcgcttctatgaagagaaggggctg

SEQ ID NO: 641869 - DNA, 75 bp, synthetic construct
  source 1..75: mol_type = other DNA
ttacgcggcgctccacattcacgaggcgttaggctggggaatgcacattcaattgtcgttacagagtcatttcct

SEQ ID NO: 641870 - DNA, 75 bp, synthetic construct
  source 1..75: mol_type = other DNA
ggggcgagcaaccacatattccctggagcaacgtggcgcgcggaaattgggcgctgctgacctcaggctcaaaaa

SEQ ID NO: 641871 - DNA, 75 bp, synthetic construct
  source 1..75: mol_type = other DNA
atttgatggctgaaacctacccacgcttgcaacgcggacgtatggcctggctgttaatgcaggaaatatcgcaag

SEQ ID NO: 641872 - DNA, 75 bp, synthetic construct
  source 1..75: mol_type = other DNA
ctgcaatccatgcgcgaccagctgctggcactggcgaatgcctgccctggcgatgacagcgccgactgcccgatt

SEQ ID NO: 641873 - DNA, 75 bp, synthetic construct
  source 1..75: mol_type = other DNA
tggcgtattacgaatcaattcctgcgctttccatcgctatgtcgcagggcggggattttcttggtgacaatggcg

SEQ ID NO: 641874 - DNA, 75 bp, synthetic construct
  source 1..75: mol_type = other DNA
cgtactacaagctgaccctcaacggtaaagatatggtcgaaattgacaccgtgaacctcgtcgaaatggtgaacg

SEQ ID NO: 641875 - DNA, 75 bp, synthetic construct
  source 1..75: mol_type = other DNA
tcatgaacctgtttatcgacggggtgagttatctcggcgtcgtgcagtccgtcacgctgccaaaattaacccgaa

SEQ ID NO: 641876 - DNA, 75 bp, synthetic construct
  source 1..75: mol_type = other DNA
cagtttggtactaactggtcattctattccaactatgtgggcgatatttttggcgcaccactggcgatggaagca

SEQ ID NO: 641877 - DNA, 75 bp, synthetic construct
  source 1..75: mol_type = other DNA
tatatcgcaaatacgataaatgcagcgttcccggaactcaactggcagctcccacaatccacttatctggcctgg

SEQ ID NO: 641878 - DNA, 75 bp, synthetic construct
  source 1..75: mol_type = other DNA
agcctacggcatcattgaaaatagcgatagtcgcgaggcgtatttatcggcactgaaaggtcgtgatggattgtc

SEQ ID NO: 641879 - DNA, 75 bp, synthetic construct
  source 1..75: mol_type = other DNA
tggttctccacccagcataacaccgccattgatacgcagtcggtggtttatggtccttctgttatctatatggtg

SEQ ID NO: 641880 - DNA, 75 bp, synthetic construct
  source 1..75: mol_type = other DNA
ttctgactcacgggcgaccggacaaagttctgacttaccggacattacgtcgagctggctataccggtaaaattt

SEQ ID NO: 641881 - DNA, 75 bp, synthetic construct
  source 1..75: mol_type = other DNA
ttatcgttgttgatgatgaagataagacacggcatcagtacatggctgaatttggtgaacaggtgctggtgtttt

SEQ ID NO: 641882 - DNA, 75 bp, synthetic construct
  source 1..75: mol_type = other DNA
tacgccgcaaccggtgtggatgccgtaccgattcgttttgcaggctcttaccagcgcgacgataccggcgaaacg

SEQ ID NO: 641883 - DNA, 75 bp, synthetic construct
  source 1..75: mol_type = other DNA
gacggtggtgcacttcagcccggaaaacggggcgttgcgatgacagtctccggctcactggtaaccggtcccgga

SEQ ID NO: 641884 - DNA, 75 bp, synthetic construct
  source 1..75: mol_type = other DNA
cggcaggcggtcgggtgctgaatatggtcgatctgagcgacgtctatatgaccttcttcctgccaaccgaacagg

SEQ ID NO: 641885 - DNA, 75 bp, synthetic construct
  source 1..75: mol_type = other DNA
caacagctggatgacgaccgcgccgccgctgagagcgccagagcggcgctggaatcggcaaaagctcaggtttcg

SEQ ID NO: 641886 - DNA, 75 bp, synthetic construct
  source 1..75: mol_type = other DNA
aggagcagcgactggaagccatcgcgcaaatcaaagaggcacaaagcgccgttgccgccgcgcaggctttgctgg

SEQ ID NO: 641887 - DNA, 75 bp, synthetic construct
  source 1..75: mol_type = other DNA
tgcatgcatttctttagggctttcggttataactgtaaatgttttttcaacaattagattattttttatttctcc

SEQ ID NO: 641888 - DNA, 75 bp, synthetic construct
  source 1..75: mol_type = other DNA
ataccggtttttatgtccgctgccagatgtacgacggaacaccatcaacaagtgctttttcttggagggtttatt

SEQ ID NO: 641889 - DNA, 75 bp, synthetic construct
  source 1..75: mol_type = other DNA
gccgatgccggagggactctgattccatcaccaacgctacatacacgagggagtattggtaacacaggtgggagc

SEQ ID NO: 641890 - DNA, 75 bp, synthetic construct
  source 1..75: mol_type = other DNA
atgcgtcggttggtgaactatctcattaataatattcgcgagcatctgatgctttatctttttctctggggacta

SEQ ID NO: 641891 - DNA, 75 bp, synthetic construct
  source 1..75: mol_type = other DNA
atgtaccgcacgccgcgtaacctcaagaaactgaacgttattgatgaaggctggcgtctgctggacttcaaaaat

SEQ ID NO: 641892 - DNA, 75 bp, synthetic construct
  source 1..75: mol_type = other DNA
gcctgccgtggtacagggggctccggatatcacccgggaaatccagcaggatattgcccggcgaatgagagcgga

SEQ ID NO: 641893 - DNA, 75 bp, synthetic construct
  source 1..75: mol_type = other DNA
gtcgggtgctgaatatggtcgatctcagcgacgtctatatgaccttcttcctgccaaccgaacaggcgggcacgc

SEQ ID NO: 641894 - DNA, 75 bp, synthetic construct
  source 1..75: mol_type = other DNA
atggataagagtaagcgccatctggcgtggtgggttgtcgggttactggcggtggctgccgtcgtggcgtggtgg

SEQ ID NO: 641895 - DNA, 75 bp, synthetic construct
  source 1..75: mol_type = other DNA
gctttatctttttctctggggattgttggcaattatggatctgatctatgtgttttattttagttttccgcactg

SEQ ID NO: 641896 - DNA, 75 bp, synthetic construct
  source 1..75: mol_type = other DNA
cagtgttatgtctgatgccgttcagtcagacccgtcgattcctgccccgcaggttttgtctgtaaattttgaaca

SEQ ID NO: 641897 - DNA, 75 bp, synthetic construct
  source 1..75: mol_type = other DNA
ggaggattggtggacgtaagcctaagttcactgatgagcactgggatgcatttgaacgagaaattaagtctggct

SEQ ID NO: 641898 - DNA, 75 bp, synthetic construct
  source 1..75: mol_type = other DNA
aggcgaggttccggaagaccgggagaccctgtactgggcggtctccaattctctgccgggaggtgagcgcagtga

SEQ ID NO: 641899 - DNA, 75 bp, synthetic construct
  source 1..75: mol_type = other DNA
agacccatacttgcaacattatatggtttatatcatgatgaagaagcaaccattgaatcaggatcaaagagcata

SEQ ID NO: 641900 - DNA, 75 bp, synthetic construct
  source 1..75: mol_type = other DNA
ctgtcgccggaagaactgcatgaaatgttcagaccggaagtgacgcgcaaaacatttcgcggggaaattcagtta

SEQ ID NO: 641901 - DNA, 75 bp, synthetic construct
  source 1..75: mol_type = other DNA
aagcaacgtcccggtgattgttaaggagcgtttccgctccaccggttcagcctggcgttcgctcaatccctttgt

SEQ ID NO: 641902 - DNA, 75 bp, synthetic construct
  source 1..75: mol_type = other DNA
actggcaaaacgctatctggaactgggcgcgctgtttgtcgccgtcggcgttgacaccaccctgctcgcccgcgc

SEQ ID NO: 641903 - DNA, 75 bp, synthetic construct
  source 1..75: mol_type = other DNA
gccacagtggattacgtggatgacaaactgaaagagcatgaacactcacgacgtcacccggacgcctcgctgacc

SEQ ID NO: 641904 - DNA, 75 bp, synthetic construct
  source 1..75: mol_type = other DNA
cggcgctgggaaacgacccgaattttgcgaccaccatgactaaagcgcttgcgggtaagcaaccgaaagatgcca

SEQ ID NO: 641905 - DNA, 75 bp, synthetic construct
  source 1..75: mol_type = other DNA
tgggtatgactcaaaagaggtatgggaactggcggcaatcttcagaagagcatatacacagggcaagggactgga

SEQ ID NO: 641906 - DNA, 75 bp, synthetic construct
  source 1..75: mol_type = other DNA
aatattattttcattcaaaagtaattcctttttttttacgaggtggaggtgctgccttatcttttatatccacaa

SEQ ID NO: 641907 - DNA, 75 bp, synthetic construct
  source 1..75: mol_type = other DNA
tcttctccaataccttggtttgggaggtggcggggctaattggtgtccactgcccggaggaaatattttgcagtg

SEQ ID NO: 641908 - DNA, 75 bp, synthetic construct
  source 1..75: mol_type = other DNA
gccagattattgcggagcaaattatccctgagaacgagggtggattctggatccgtgagattgggctttatgatg

SEQ ID NO: 641909 - DNA, 75 bp, synthetic construct
  source 1..75: mol_type = other DNA
aataatgaaacggcgctggaagtggagcaggacattctgaacagctttcgtaaaaacggttttgagctgatttca

SEQ ID NO: 641910 - DNA, 75 bp, synthetic construct
  source 1..75: mol_type = other DNA
gcggcttcatcaagctggtcatcgaggaaggtagcggacggctcatcggcgtgcaagcggtggccccggaagcgg

SEQ ID NO: 641911 - DNA, 75 bp, synthetic construct
  source 1..75: mol_type = other DNA
aggtcgcgtatatcaatggtgaaggggacggcgaattcgtgctcaccacggcgcacggcgaactgcgcgccgaca

SEQ ID NO: 641912 - DNA, 75 bp, synthetic construct
  source 1..75: mol_type = other DNA
gccgtcatcggcagcggcggcacctgcgtcaatgtcggttgtgtgccgtccaagatcatgatccgcgccgcccat

SEQ ID NO: 641913 - DNA, 75 bp, synthetic construct
  source 1..75: mol_type = other DNA
gcgtggaagaaatcggggccggagatggcttcgctggaggcctggctggaagaacatgagaaatacaggagtgtt

SEQ ID NO: 641914 - DNA, 75 bp, synthetic construct
  source 1..75: mol_type = other DNA
tggaagatcaggtgaaaacccacagtgaagccaacctgaagtacatggacctggagaaaaagtcgaagacctcct

SEQ ID NO: 641915 - DNA, 75 bp, synthetic construct
  source 1..75: mol_type = other DNA
gcgcggagtgccgttctgcatccatctgatgtccagccagcttgttggtgacagaattgaatacgggctgcgtga

SEQ ID NO: 641916 - DNA, 75 bp, synthetic construct
  source 1..75: mol_type = other DNA
actgagctaatccacttttttatcgccgaatacagtgacagccagcgcgctaacgccggcggtggtgtcgaagat

SEQ ID NO: 641917 - DNA, 75 bp, synthetic construct
  source 1..75: mol_type = other DNA
tttcaccctgcacaacattacttacgatctcacgcgcaaagatggcgaagttatccgccataaacgtgaagttta

SEQ ID NO: 641918 - DNA, 75 bp, synthetic construct
  source 1..75: mol_type = other DNA
atgacgcaacaaatcaccctcattaaagacaaaattctctccgataactatttcaccctgcacaacattacttac

SEQ ID NO: 641919 - DNA, 75 bp, synthetic construct
  source 1..75: mol_type = other DNA
tctcgtactgttctccttcgaagaaaaaaagccgggccgacattctggaaatggaaaacctggtgaaaatcatcc

SEQ ID NO: 641920 - DNA, 75 bp, synthetic construct
  source 1..75: mol_type = other DNA
atcagctctatttggtattgtttatccgttagtgcttgtcttaaccacctgtttatatttatatatctttggaaa

SEQ ID NO: 641921 - DNA, 75 bp, synthetic construct
  source 1..75: mol_type = other DNA
ctgatgtccagtcagctggttggtgacaggattgaatacgggctgcgtgagttctcctggtcaggtgaacaggcc

SEQ ID NO: 641922 - DNA, 75 bp, synthetic construct
  source 1..75: mol_type = other DNA
cgccggcataccggtgcctatatcaccatcacacagaacatcgtcgactttgactctgacaaggcctccagtgcg

SEQ ID NO: 641923 - DNA, 75 bp, synthetic construct
  source 1..75: mol_type = other DNA
cccgaaattcagcaccaccattaacaatgcgctgtcaggtaagcaaccactggatgagacgctgactcatttgag

SEQ ID NO: 641924 - DNA, 75 bp, synthetic construct
  source 1..75: mol_type = other DNA
cgcatatcagtattcagaactggtcgccatccggagagggcaccgaagattgttgttttatcgcgctggggtatt

SEQ ID NO: 641925 - DNA, 75 bp, synthetic construct
  source 1..75: mol_type = other DNA
catttcgtcatattgcctcctctgaatctggcgtcaaaatatctaaaatgcctctgatggatatctttattcaac

SEQ ID NO: 641926 - DNA, 75 bp, synthetic construct
  source 1..75: mol_type = other DNA
cagctggacccgtattctgatctgaattatcagtgtgtggaggacagttttgatctgaaggtccgggctgattac

SEQ ID NO: 641927 - DNA, 75 bp, synthetic construct
  source 1..75: mol_type = other DNA
ggagaaagaggcgaaggagtggggggaactgcgtcagcggctgggctccggtcagtcctctgtcgtgtcctactt

SEQ ID NO: 641928 - DNA, 75 bp, synthetic construct
  source 1..75: mol_type = other DNA
ttaaggtgtatgtggatgacctgatggcaaagcatcttgctgctgcagatcctcatacgcagtatgcgcccaaag

SEQ ID NO: 641929 - DNA, 75 bp, synthetic construct
  source 1..75: mol_type = other DNA
ttcgcctggatgccgatgctgtttgctgaccttggttgtatcctcggtggttacctgccgccgctgttccagcgt

SEQ ID NO: 641930 - DNA, 75 bp, synthetic construct
  source 1..75: mol_type = other DNA
atgtccgttggtcagatcctgcgtaaccgtcagttctggggtatcgcgctaccgcgtttcctggctgaacctgcc

SEQ ID NO: 641931 - DNA, 75 bp, synthetic construct
  source 1..75: mol_type = other DNA
tccatctcctgtccgttcatcctgacgctgactctggtggtggaagaccaggtgaaaacccacagcgaagccaac

SEQ ID NO: 641932 - DNA, 75 bp, synthetic construct
  source 1..75: mol_type = other DNA
aacgagctgcgtaaacagggcgtttttatctccggcagtggtgtccgttctgcctggttacgccataaccttgag

SEQ ID NO: 641933 - DNA, 75 bp, synthetic construct
  source 1..75: mol_type = other DNA
atgaaatcgaagccatgctcttaccccagcgaaaatccatcgcacgcacggggatcctgcttcaggacggggatc

SEQ ID NO: 641934 - DNA, 75 bp, synthetic construct
  source 1..75: mol_type = other DNA
tgatgctgctgcgttcagcactggaaggctggggcatctgcgaggtcaccactacgtttggtgacccacgccgtg

SEQ ID NO: 641935 - DNA, 75 bp, synthetic construct
  source 1..75: mol_type = other DNA
cagttgtgctggaggctcttctgcgtgattttgataatacgccctttaagaaagcacctgttgactggatgcagc

SEQ ID NO: 641936 - DNA, 75 bp, synthetic construct
  source 1..75: mol_type = other DNA
ccaacggctatttcgctggcctctaccgaccaggattttgctgacgatctccagcaactgctgcactgcggcaaa

SEQ ID NO: 641937 - DNA, 75 bp, synthetic construct
  source 1..75: mol_type = other DNA
tgcggaaaaaacgcgcgcgaggcagcattgactttattaggtcgtgcacgcaaggacgagcgcagcagccactaa

SEQ ID NO: 641938 - DNA, 75 bp, synthetic construct
  source 1..75: mol_type = other DNA
tgggacgtgttccgcaaagacagctcggtgcgctcacgcgttgaaaaaagcgaagctaacgcgcaagccaccaat

SEQ ID NO: 641939 - DNA, 75 bp, synthetic construct
  source 1..75: mol_type = other DNA
gtgatttcaatactccaccctttaagactgagcctgataactggatccagccggggctgacttatcttaaagtgc

SEQ ID NO: 641940 - DNA, 75 bp, synthetic construct
  source 1..75: mol_type = other DNA
ccaaagggctggaagcggaaaccgggcgtctgttacaggacgtggcgcgcgaggcgttaggcgatcaaattccgc

SEQ ID NO: 641941 - DNA, 75 bp, synthetic construct
  source 1..75: mol_type = other DNA
atggtggtgctggagctgggcggactggaagaccgtccgtcactgctggttgcggtgatgttcagccttatcatt

SEQ ID NO: 641942 - DNA, 75 bp, synthetic construct
  source 1..75: mol_type = other DNA
cgggaaagggctgtttaaacagctgaaagaggccggtgtggttcagcgggcagagagctttaatgtggccaacct

SEQ ID NO: 641943 - DNA, 75 bp, synthetic construct
  source 1..75: mol_type = other DNA
aggcggttaactccctcgtcacagcactgaaactgcctgacgaatccgcaaaggccaatgaagttctgggcgaaa

SEQ ID NO: 641944 - DNA, 75 bp, synthetic construct
  source 1..75: mol_type = other DNA
tgaatctgcccctgaccctgcgccattaccgggtgtttatctcgtactgttctccctcgaagaaaaaaagccggg

SEQ ID NO: 641945 - DNA, 75 bp, synthetic construct
  source 1..75: mol_type = other DNA
tatccgcagcgtgctggactccgggggctttgccgtggtgttcgacatgggggatggctacaagtccctgtgtga

SEQ ID NO: 641946 - DNA, 75 bp, synthetic construct
  source 1..75: mol_type = other DNA
ttgccgtggtgtttgacatgggggatggatataagtccctgtgtgagaacatgggcggggtgtatctggacggtg

SEQ ID NO: 641947 - DNA, 75 bp, synthetic construct
  source 1..75: mol_type = other DNA
tgtggttcagcaaggcaaaatttcagtttatgtcgcggatgaattattgaaaaaaggatcaatgaaaacgggcga

SEQ ID NO: 641948 - DNA, 75 bp, synthetic construct
  source 1..75: mol_type = other DNA
tgacaacgtgatgatgcgtaagaagtttctcttcggtgctgaagcacgtgcaaacggtggctacggcttctggca

SEQ ID NO: 641949 - DNA, 75 bp, synthetic construct
  source 1..75: mol_type = other DNA
cagtgcgctcgcgcgttgaaaaaagcgaagccgacgcgcaagaaaccaataacgtcattccccccgccaaaatgc

SEQ ID NO: 641950 - DNA, 75 bp, synthetic construct
  source 1..75: mol_type = other DNA
accaactggggcacaaaatcgctggcgatactcgacatgccatttaccgcagtactggacacaatattgctaccg

SEQ ID NO: 641951 - DNA, 75 bp, synthetic construct
  source 1..75: mol_type = other DNA
ggttgtgccaccggcgctggaggatgacgcgaactacctgatgaccgccgagaagttcccggacggtacgccgaa

SEQ ID NO: 641952 - DNA, 75 bp, synthetic construct
  source 1..75: mol_type = other DNA
cccttacaaggggacggctgaggttatggttgtccctgagctgacgtctgataccgcctggttccttctggataa

SEQ ID NO: 641953 - DNA, 75 bp, synthetic construct
  source 1..75: mol_type = other DNA
gtcagattttcattaatctgaaagcgaccttccagaacgcctttgatcagacaccgtccgactggcagaagattg

SEQ ID NO: 641954 - DNA, 75 bp, synthetic construct
  source 1..75: mol_type = other DNA
atggggggggggaatcggccatcttttattgtgacaagcgatgactggaatatcacgatcagtgaagatggaaaa

SEQ ID NO: 641955 - DNA, 75 bp, synthetic construct
  source 1..75: mol_type = other DNA
gaaatgaaagaagctattcctgatcgcgcggcgaatctaagctgcgcttcatggttgaaagagcatcttcagcag

SEQ ID NO: 641956 - DNA, 75 bp, synthetic construct
  source 1..75: mol_type = other DNA
gagttttacgaagctgaggcgaaaaagcaggcgaagcagtttttcatggatattgctgccgggttatgtgaaggg

SEQ ID NO: 641957 - DNA, 75 bp, synthetic construct
  source 1..75: mol_type = other DNA
aaatccatacgcgtgagctttaatgaatatgagtacggcgtactcgatgatttaagcaaaaaactgaaccgcagc

SEQ ID NO: 641958 - DNA, 75 bp, synthetic construct
  source 1..75: mol_type = other DNA
ttgattcaacaaaaaaaactgctttagaagatttgttaaataactataattttgaaaaagatccttcacttattc

SEQ ID NO: 641959 - DNA, 75 bp, synthetic construct
  source 1..75: mol_type = other DNA
gagttttatgaggcagcagcgagaaggagcatcagacagttcttcctggatgttgctgccgggttatgtgaagga

SEQ ID NO: 641960 - DNA, 75 bp, synthetic construct
  source 1..75: mol_type = other DNA
tgagccgtccctgcgggatgatgccagaatggtggtgctggagctggggggactggaagaccgtccgtccctgct

SEQ ID NO: 641961 - DNA, 75 bp, synthetic construct
  source 1..75: mol_type = other DNA
atcgccaggggcagggcctgctcgcgcttgagtgcggcgaacttctcggccggcagcaggtagtcgtcgaagtcg

SEQ ID NO: 641962 - DNA, 75 bp, synthetic construct
  source 1..75: mol_type = other DNA
cgtcgataaaaaaatctatgttgaagtccccttcttggtcgttggtaacaaagaatttaaatttggattgctgaa

SEQ ID NO: 641963 - DNA, 75 bp, synthetic construct
  source 1..75: mol_type = other DNA
gtatggttcaggtattccgataacgcggaagaaacactgatttccggtgaatcagaacatatgcgccttcaaatc

SEQ ID NO: 641964 - DNA, 75 bp, synthetic construct
  source 1..75: mol_type = other DNA
ccgttcatcctgacgctgactctggtggtggaagaccaggtgaaaacccacagcgaagccaacctgaagtacatg

SEQ ID NO: 641965 - DNA, 75 bp, synthetic construct
  source 1..75: mol_type = other DNA
gtggatgcacaggcctttatcgatattgtcggggagatgattaaccataacccggactccctgtacccgaaaaga

SEQ ID NO: 641966 - DNA, 75 bp, synthetic construct
  source 1..75: mol_type = other DNA
gtactaaggatttggtgaaagcagcagtatcgggatggctgggcactgcgcttgaatttatggatttcaagagtc

SEQ ID NO: 641967 - DNA, 75 bp, synthetic construct
  source 1..75: mol_type = other DNA
aaaatcgaagaggctaaacgcgagcttaccccggccattacgcagaagcctgactttaatctgggatatggactg

SEQ ID NO: 641968 - DNA, 75 bp, synthetic construct
  source 1..75: mol_type = other DNA
cggccagaagtgacgctggttatggatgctgggcaacgctttattgtgggctggtcgctgtccctgtcggagaac

SEQ ID NO: 641969 - DNA, 75 bp, synthetic construct
  source 1..75: mol_type = other DNA
acccatcaggtcctggaagatacgcaactgcccgttgtggttgagcagaaggcagttaagaacgtcaccattcgc

SEQ ID NO: 641970 - DNA, 75 bp, synthetic construct
  source 1..75: mol_type = other DNA
cagcgtatcgccggaaactgataaaagagcagaaagctgaaatcgacatgctgtcgccggaagaacttcacgaaa

SEQ ID NO: 641971 - DNA, 75 bp, synthetic construct
  source 1..75: mol_type = other DNA
ttgatgccgatattaccgggattctgccccggctgggtgtggagcatcacacggggataccgggtaacccgcagg

SEQ ID NO: 641972 - DNA, 75 bp, synthetic construct
  source 1..75: mol_type = other DNA
tcatggaagcgcccgaccgttgaatacgcttatcgcgagttttcagcctggtggcatgagaaacacgcgaatgat

SEQ ID NO: 641973 - DNA, 75 bp, synthetic construct
  source 1..75: mol_type = other DNA
tggaagaagtcagggccggagatggcttcgctggaggcctggctggaagaacatgagaaatacaggagtgttgca

SEQ ID NO: 641974 - DNA, 75 bp, synthetic construct
  source 1..75: mol_type = other DNA
cgagtcaccgaccatccgcagccgtctggacgaaatgattgtgctgcttgaccagtacactgccaacggcactta

SEQ ID NO: 641975 - DNA, 75 bp, synthetic construct
  source 1..75: mol_type = other DNA
taacccgactgttgaagccgaagtacatctggagggtggtttcgtcggtatggcatctgctccgtcaggtgcttc

SEQ ID NO: 641976 - DNA, 75 bp, synthetic construct
  source 1..75: mol_type = other DNA
ttcctggaagaactgaccaaacagtatccgatcgtttccatcgaagacggtctggacgaatctgactgggacggt

SEQ ID NO: 641977 - DNA, 75 bp, synthetic construct
  source 1..75: mol_type = other DNA
atccgaaagacgttgcccggatgctgaaaaaagacggcaaggactccgatatccggattggcgacctgccgatta

SEQ ID NO: 641978 - DNA, 75 bp, synthetic construct
  source 1..75: mol_type = other DNA
gaaagaggcgaaggagtggggggaactgcgtcagcggctgggctccggtcagtcttctgtcgtgtcctacttcct

SEQ ID NO: 641979 - DNA, 75 bp, synthetic construct
  source 1..75: mol_type = other DNA
tctgctgccataccgtgattacaaccaggaatccggtctgttcatgaatgactccacaatgggctttatgctgga

SEQ ID NO: 641980 - DNA, 75 bp, synthetic construct
  source 1..75: mol_type = other DNA
ccacagcgaagccaacctgaagtacatggacctggagaaaaagtcgaagacctcctatgccaaatggtttccgtc

SEQ ID NO: 641981 - DNA, 75 bp, synthetic construct
  source 1..75: mol_type = other DNA
ggaagccattcccatcaatggggcgaatgagtccattgtggaggcgctcgaccacatgctgcgcaccaaactgcc

SEQ ID NO: 641982 - DNA, 75 bp, synthetic construct
  source 1..75: mol_type = other DNA
ctgacgctgggcctgcgtgagagcggcaggaacagtacggcccgcatcctgaatttccatctggcccgtaacccg

SEQ ID NO: 641983 - DNA, 75 bp, synthetic construct
  source 1..75: mol_type = other DNA
actacgttaaaggtaacgccaaaaggtgacctccctaacggtatttatcagctttcggacgcgctgcaagcgtcg

SEQ ID NO: 641984 - DNA, 75 bp, synthetic construct
  source 1..75: mol_type = other DNA
tgttgctgcggtaaacggcccgatcgctcaggcactgattggcaaagatgccaaagatcaggctggcattgacaa

SEQ ID NO: 641985 - DNA, 75 bp, synthetic construct
  source 1..75: mol_type = other DNA
ttgctgtggtgttcgacatgggggatggctacaagtccctgtgtgagaacatggggggcgtatatctggatggtg

SEQ ID NO: 641986 - DNA, 75 bp, synthetic construct
  source 1..75: mol_type = other DNA
gtgggcgattgcgcagcaaatcgagagacgaaatgcgtgcgtagtcgaagtgcaattgccgaaaaaacagcgtct

SEQ ID NO: 641987 - DNA, 75 bp, synthetic construct
  source 1..75: mol_type = other DNA
atgagcgcacgttcacgggcactggttcccctcagcacagagcaacaggccgcatggcgggcggtggcggagacg

SEQ ID NO: 641988 - DNA, 75 bp, synthetic construct
  source 1..75: mol_type = other DNA
gcggttccgcagcaaaatcagggggcggcgctggcaacttacaccgtatttatggatttatcgcttggcgtgact

SEQ ID NO: 641989 - DNA, 75 bp, synthetic construct
  source 1..75: mol_type = other DNA
gcaggccgacgcacaggaactgaagaatgccagcgaaacaggtgaggtaattgacactgcatttgcgacttatgc

SEQ ID NO: 641990 - DNA, 75 bp, synthetic construct
  source 1..75: mol_type = other DNA
atattgcgattattgcgacggattatgcgcagagcaaagccttctactgcgacattctcggtttcacgctgcaaa

SEQ ID NO: 641991 - DNA, 75 bp, synthetic construct
  source 1..75: mol_type = other DNA
cggcggatatcgtcggcgtaccagacggtgtgtggtatacttacggggtttttcttcattgtatggtccgtcatg

SEQ ID NO: 641992 - DNA, 75 bp, synthetic construct
  source 1..75: mol_type = other DNA
gaagatgatgataatttcgaaatattaattatcgatgacggaagtgtcataccattaacattacctcgcgaaaaa

SEQ ID NO: 641993 - DNA, 75 bp, synthetic construct
  source 1..75: mol_type = other DNA
ggcctctcgaggttggtctggtgtttaaccaggtggaaggcgttgatgtattgagcgaggcccagcagaacaaac

SEQ ID NO: 641994 - DNA, 75 bp, synthetic construct
  source 1..75: mol_type = other DNA
ggccggaagatgccgatcacattgtattcattcgcgggcgcattggtttcgatctgccagtgtggtttgtacctg

SEQ ID NO: 641995 - DNA, 75 bp, synthetic construct
  source 1..75: mol_type = other DNA
cgcgcagctgttcgtcacccgctccaagccggaaatgctgatcgaactgttccgcattgaagtgccggaaatcgg

SEQ ID NO: 641996 - DNA, 75 bp, synthetic construct
  source 1..75: mol_type = other DNA
gataaacacaccatggatatcgccgttgaagccggtaacctggcgcaggcgattggccgtaacggtcagaacgtg

SEQ ID NO: 641997 - DNA, 75 bp, synthetic construct
  source 1..75: mol_type = other DNA
cgaaaatcgcggtgaaaaccaacgataaacgtatcgatccagtaggtgcttgtgtcggtatgcgtggtgcccgtg

SEQ ID NO: 641998 - DNA, 75 bp, synthetic construct
  source 1..75: mol_type = other DNA
ttattcgaacttaccagatctcagataacattccagatatggctgaaaggtatatcaaggataatcagcgaagtt

SEQ ID NO: 641999 - DNA, 75 bp, synthetic construct
  source 1..75: mol_type = other DNA
ccagacggcgatgatcctaccgcacgtcaagatcaccgaattgctgctggaggtagacgaatggacgggcttcac

SEQ ID NO: 642000 - DNA, 75 bp, synthetic construct
  source 1..75: mol_type = other DNA
gccgcggtttggcgatagctacacactcatcggtagctggattgtcgatgatgaagcgtgcggaatggggatccg

SEQ ID NO: 642001 - DNA, 75 bp, synthetic construct
  source 1..75: mol_type = other DNA
cgtaaaccgctctactcgcgcgaaggcggaaatgtcaccattttcgacggccagaataacgtcgttgaccacgct

SEQ ID NO: 642002 - DNA, 75 bp, synthetic construct
  source 1..75: mol_type = other DNA
tactgtcgttatttccggagaacattaacgacagatttcagaacacttacccggttactgaaagagcgggccggt

SEQ ID NO: 642003 - DNA, 75 bp, synthetic construct
  source 1..75: mol_type = other DNA
tcggcctgctactggttggcgtggcgactatgccgtggatggcgaaaatcggcgtcttactggcgggggcagggt

SEQ ID NO: 642004 - DNA, 75 bp, synthetic construct
  source 1..75: mol_type = other DNA
ccggcacttcgcccacctgaagtcaggcgacctggccaaggacaaaaacctgttgctgaccacgatcctcgccga

SEQ ID NO: 642005 - DNA, 75 bp, synthetic construct
  source 1..75: mol_type = other DNA
gctgtcatttgataagagtaacgatggtgaaacgccggaagggatcggttttgccatccccttccagttagcgac

SEQ ID NO: 642006 - DNA, 75 bp, synthetic construct
  source 1..75: mol_type = other DNA
acaaaccggccatctctgctctggagacgatggatcaggtggcggaaattcgccctggttcggtgatcccggttg

SEQ ID NO: 642007 - DNA, 75 bp, synthetic construct
  source 1..75: mol_type = other DNA
cgccctggttcggtgatcccggttgtagtgatgcgtgatgataagcagttaacgctgcaggtcaccattcaggaa

SEQ ID NO: 642008 - DNA, 75 bp, synthetic construct
  source 1..75: mol_type = other DNA
gccaaatggttcatggcactcaatatgtattgccgccagaacagcggaacaaagagcagaggcgcaacagaataa

SEQ ID NO: 642009 - DNA, 75 bp, synthetic construct
  source 1..75: mol_type = other DNA
tcgaagaaactcagaaagaaaaaatggcctctgtttcctccggaatgcagttgccgccaggctttaagatgccgt

SEQ ID NO: 642010 - DNA, 75 bp, synthetic construct
  source 1..75: mol_type = other DNA
gacgcctgccagctataatctggcggttcgccgcgccgcgccagcggtagtcaacgtttataaccgtggtttgaa

SEQ ID NO: 642011 - DNA, 75 bp, synthetic construct
  source 1..75: mol_type = other DNA
ggatattttgttcattctatatgcaattgaagtcggtggaaaagccgagcctgtaccaggtatgaaaatgctgtc

SEQ ID NO: 642012 - DNA, 75 bp, synthetic construct
  source 1..75: mol_type = other DNA
taatgaagttggggcttgggtaattcattactcaactgactacgtattccctggaaatggcgacacgccatggct

SEQ ID NO: 642013 - DNA, 75 bp, synthetic construct
  source 1..75: mol_type = other DNA
ttgattgctcttgatgttcactccactgattattgtggtgattttagtaatcctgaaggtgtagctgaaaccgtc

SEQ ID NO: 642014 - DNA, 75 bp, synthetic construct
  source 1..75: mol_type = other DNA
acatcggcttatcctactccagcccgccgccctcataattctcgtcttaatacagaaaaatttcagcagaacttt

SEQ ID NO: 642015 - DNA, 75 bp, synthetic construct
  source 1..75: mol_type = other DNA
gtgcgggcgttgatgtaatggatgacgcgccggatgtgctcgacaagctggcaatgcacaaggcacgcgaaggtg

SEQ ID NO: 642016 - DNA, 75 bp, synthetic construct
  source 1..75: mol_type = other DNA
gccgcgtttgatgctggtgccgacggcctggtgcattgctataacgggatgacaggtttacatcaccgcgaaccg

SEQ ID NO: 642017 - DNA, 75 bp, synthetic construct
  source 1..75: mol_type = other DNA
gaaatcacggtggcaggctggcgcgaacagggcgacagcggcccgttgtggcagaccaaccgccttgtcgatatc

SEQ ID NO: 642018 - DNA, 75 bp, synthetic construct
  source 1..75: mol_type = other DNA
tgctggggaaaaatatcctcgccgcccgtgggcgcttcagctggcgggagcgtaacagccagtacatcatcaagg

SEQ ID NO: 642019 - DNA, 75 bp, synthetic construct
  source 1..75: mol_type = other DNA
aggaggagatgctggccgcctggaggaaaagggcgacactggagggtgagtattctgatgccaggagcaatccgg

SEQ ID NO: 642020 - DNA, 75 bp, synthetic construct
  source 1..75: mol_type = other DNA
tcagtggtgcactgctgtcctccccctgcacgctggtgagtaatgaggtgccgttaagcctccggccggagaatc

SEQ ID NO: 642021 - DNA, 75 bp, synthetic construct
  source 1..75: mol_type = other DNA
cgacaccagcactgcgtcctcttaattcccgcttaaatacggaaaaatttcagcaatgtttcgacttgacattac

SEQ ID NO: 642022 - DNA, 75 bp, synthetic construct
  source 1..75: mol_type = other DNA
tacagaaaaatttcagcagaattttgcgcttgtattgcctgactggcaggttggtgtgaaacgcatgctcaacga

SEQ ID NO: 642023 - DNA, 75 bp, synthetic construct
  source 1..75: mol_type = other DNA
ttaatgctgcggctcataccgcagtagataaggctgagtcagaacccgaatttgcacaattactcaatgcgacca

SEQ ID NO: 642024 - DNA, 75 bp, synthetic construct
  source 1..75: mol_type = other DNA
gccagcctcaatcaacgcgatacgccgctgacgttaccgctggacattcgcggcactgcttttcagcaacaagtc

SEQ ID NO: 642025 - DNA, 75 bp, synthetic construct
  source 1..75: mol_type = other DNA
tggcggagaattgtctctttcctgctgctttatgctctgcttctgcatccggttgttctgaaatcgttaatcaga

SEQ ID NO: 642026 - DNA, 75 bp, synthetic construct
  source 1..75: mol_type = other DNA
tgtgccgccagcgcggtgattccggctaccaccgtcgcacgctgggactgaccacgttaggtcgtgccagagcca

SEQ ID NO: 642027 - DNA, 75 bp, synthetic construct
  source 1..75: mol_type = other DNA
atgacgttgaccgacaaacaaaaagacatcatcaaaaccatcaatttaggccatgagcgtgggcatctgctcgat

SEQ ID NO: 642028 - DNA, 75 bp, synthetic construct
  source 1..75: mol_type = other DNA
ccagtatttcagccttaaactgttatttatatcgctggtatataccacggtgtcagttttcctgtggacacgttt

SEQ ID NO: 642029 - DNA, 75 bp, synthetic construct
  source 1..75: mol_type = other DNA
tggatcaccaaccagcagacgatgaccgcccgcaataccatgctgacggtattttcgcgccagaccgacaagcag

SEQ ID NO: 642030 - DNA, 75 bp, synthetic construct
  source 1..75: mol_type = other DNA
caagaaaacccggatctgtacctttcacgaccatcgctaatgaatataatgaaacaagccggatataaaactttc

SEQ ID NO: 642031 - DNA, 75 bp, synthetic construct
  source 1..75: mol_type = other DNA
cgtaataccctgtcatcgggtggtccgtggtgatggcacactttccggttaccgctggggcgtgtcgcgtaaagc

SEQ ID NO: 642032 - DNA, 75 bp, synthetic construct
  source 1..75: mol_type = other DNA
catcgggtggtccgtggtgatggctcactttccggttaccgctggggcgtgtcgcgcaaagcgcaactgctgcgc

SEQ ID NO: 642033 - DNA, 75 bp, synthetic construct
  source 1..75: mol_type = other DNA
aatgtaaccttctatgctgatgccggcgaggcgcttgccgccgggtttcgcccgtgtaagcgctgccagcctgac

SEQ ID NO: 642034 - DNA, 75 bp, synthetic construct
  source 1..75: mol_type = other DNA
cctggcgcgctcgtcgcttgcgcgaatcgttaacgaaaggggagagcgtcacccaggcgattctccacgccggat

SEQ ID NO: 642035 - DNA, 75 bp, synthetic construct
  source 1..75: mol_type = other DNA
cctggcgtgctcgccgattgcgggagtctctggcaaaaggggagagcgtgactcaggcgattctcagtgccggat

SEQ ID NO: 642036 - DNA, 75 bp, synthetic construct
  source 1..75: mol_type = other DNA
tggcgatgagtccgttccatctgcatcgattgtttaaagccaccaccgggatgacaccgaaagcctggcaacagg

SEQ ID NO: 642037 - DNA, 75 bp, synthetic construct
  source 1..75: mol_type = other DNA
tgccagcccgttcgtcatcaccatggtaatggaggccgaggaccaggtggcaacgcagggggaggccacgcgcaa

SEQ ID NO: 642038 - DNA, 75 bp, synthetic construct
  source 1..75: mol_type = other DNA
agcggcctggggtaactctgccttcaaggttgtcctcaaacaggatgcgtctgagtttaaacagtacaaccagaa

SEQ ID NO: 642039 - DNA, 75 bp, synthetic construct
  source 1..75: mol_type = other DNA
ggaagacatcaaaatgggcggagccacctgccgggcggagagtatccaggccgtgaatctgctgccggtggtggc

SEQ ID NO: 642040 - DNA, 75 bp, synthetic construct
  source 1..75: mol_type = other DNA
ttgactggctggtcagccagaacgaactcaaagccaacccggcgaaaggtgtttcggcaccgaaagcgccgcgtc

SEQ ID NO: 642041 - DNA, 75 bp, synthetic construct
  source 1..75: mol_type = other DNA
agcgaagacgacgcgctttttctgtcgaaactgggcaagcgtatctccgcgcgtaatgtgcagaaacgctttgcc

SEQ ID NO: 642042 - DNA, 75 bp, synthetic construct
  source 1..75: mol_type = other DNA
gagctgggcggtctgcaggacaagcctgatctgctggttgcggtgatgttctccctcatcatctacatcgaggac

SEQ ID NO: 642043 - DNA, 75 bp, synthetic construct
  source 1..75: mol_type = other DNA
gcgcaaacgtgtcgatcattgagaacggcaaaaccattgaagcagcggaaggtccgtatggcgaagaagggatga

SEQ ID NO: 642044 - DNA, 75 bp, synthetic construct
  source 1..75: mol_type = other DNA
gcaggactgcgcgacagaagctgaaatcgctactgaattcctctacatcgacgatatcggtttaggcgaaaaagg

SEQ ID NO: 642045 - DNA, 75 bp, synthetic construct
  source 1..75: mol_type = other DNA
tttaatagcctgcaagaaaagctgattgatcgctttgccgagctacgtgaacagtatggctttcagttgctgcat

SEQ ID NO: 642046 - DNA, 75 bp, synthetic construct
  source 1..75: mol_type = other DNA
gtgatggaggccgaagaccaggtggcgactcaaggggaagccacgcgcaagtatctcgaccgggagaaaaaagcg

SEQ ID NO: 642047 - DNA, 75 bp, synthetic construct
  source 1..75: mol_type = other DNA
atgttctcgttgattatttatatcgagaaccgcatgtaccagacaccccgtaacctgaaaaaactgaacgtcatt

SEQ ID NO: 642048 - DNA, 75 bp, synthetic construct
  source 1..75: mol_type = other DNA
caaatcatcgagcttcagaaccaggtcaagataatccgggcctcactgcttggcgcgcaaataccgactaaggca

SEQ ID NO: 642049 - DNA, 75 bp, synthetic construct
  source 1..75: mol_type = other DNA
aaacggcctgcaaagctggcagcaatgtgatgtgacgatggtgcgcaatttcgctgtacgcagtcgccgtaaagg

SEQ ID NO: 642050 - DNA, 75 bp, synthetic construct
  source 1..75: mol_type = other DNA
aatcttttacaaagatacaatttaattccaaaaccaggatgagaattttttcaaaattgtctcgctatttaggta

SEQ ID NO: 642051 - DNA, 75 bp, synthetic construct
  source 1..75: mol_type = other DNA
gccgagggcatcgaggtgctggagcacacgcaagccagccaggtcgcccatatggacggtgaattcgtgctgacc

SEQ ID NO: 642052 - DNA, 75 bp, synthetic construct
  source 1..75: mol_type = other DNA
tgcatcgggggaaatttctggtgatataagttcatcaatacaaagtatcattcagatgaatgatactaaacgaaa

SEQ ID NO: 642053 - DNA, 75 bp, synthetic construct
  source 1..75: mol_type = other DNA
agttcgtctatgtggcggcagcggccggcactcgtgcggccattaacatgaccggcggcgacgccgccatcaatc

SEQ ID NO: 642054 - DNA, 75 bp, synthetic construct
  source 1..75: mol_type = other DNA
atttatatatttttggtaacagagttgtaccggcgttttcccaggttcttcctgtagaaaaatggcagggtactg

SEQ ID NO: 642055 - DNA, 75 bp, synthetic construct
  source 1..75: mol_type = other DNA
ttttgaatggtgctaaaaatattggtgaagcaatgcatttatccggttacgtatttccttcaaaaaatttagtta

SEQ ID NO: 642056 - DNA, 75 bp, synthetic construct
  source 1..75: mol_type = other DNA
agcaggacattctgaacagctttcgtaaaaacggttttgagctgatttcaccgcgctttaaccacatgcgcaatt

SEQ ID NO: 642057 - DNA, 75 bp, synthetic construct
  source 1..75: mol_type = other DNA
ggtaactcctcctacaaaattatcctcaaacagagtgcgaaggagttcgcaaaatacaaccagctgtatccggac

SEQ ID NO: 642058 - DNA, 75 bp, synthetic construct
  source 1..75: mol_type = other DNA
atctgccgaaaaatatcgacgtcgacgatatgaatcggctgctggatattgatatcaacgatcccctcgctgtac

SEQ ID NO: 642059 - DNA, 75 bp, synthetic construct
  source 1..75: mol_type = other DNA
ctggcgaaacccgcgagctgcgtctggataaaattaccagctttagccacccggaaatcggtacggtggtggtaa

SEQ ID NO: 642060 - DNA, 75 bp, synthetic construct
  source 1..75: mol_type = other DNA
gtgagggaacacacccaggccagccaggtcgcgtatatcaatggtgaggggacggcgaattcgtgctcaccacgg

SEQ ID NO: 642061 - DNA, 75 bp, synthetic construct
  source 1..75: mol_type = other DNA
tcatcgtggcgcgttcatcaccatcagccagaacatcaaggactttgatgccgatgatgcttccggtgcagcaaa

SEQ ID NO: 642062 - DNA, 75 bp, synthetic construct
  source 1..75: mol_type = other DNA
cgcccaggttgaaaagctggaagaagtcaccgccgaactgcaccagatgtgcctgaaagtggttgaaaaagtgat

SEQ ID NO: 642063 - DNA, 75 bp, synthetic construct
  source 1..75: mol_type = other DNA
cgcatttacgcggcgctgaccgattctttgttatcaccccaccgtcagcgcctggacgaacttctcaagcgcaag

SEQ ID NO: 642064 - DNA, 75 bp, synthetic construct
  source 1..75: mol_type = other DNA
atgatcctaccgcacgtcaagatcaccgaattgctgctggaggtagacgaatggacgggcttcacccggcacttc

SEQ ID NO: 642065 - DNA, 75 bp, synthetic construct
  source 1..75: mol_type = other DNA
gtgttgtggaacacggtctatctggaacgggctgcgcacgcgctgcgtggcaacggccatgccgttgatgacgcg

SEQ ID NO: 642066 - DNA, 75 bp, synthetic construct
  source 1..75: mol_type = other DNA
ccaccgagttcgtttcattcagcgagacgaccaaaagtctgtcggatcaaatcgccgttcgttcgcgctccattg

SEQ ID NO: 642067 - DNA, 75 bp, synthetic construct
  source 1..75: mol_type = other DNA
tcaagcagggcacggtgacggcctccctgatgctccgaaagctcggcagctacccacgccagaacggcctggccg

SEQ ID NO: 642068 - DNA, 75 bp, synthetic construct
  source 1..75: mol_type = other DNA
ttgggatgaaatcctgcggatggccacctcgatcaagcagggcacggcgacggcctcgctgatgctcaggaagct

SEQ ID NO: 642069 - DNA, 75 bp, synthetic construct
  source 1..75: mol_type = other DNA
gctgggggctcaatatctttctatccggaatagtaataatgaaacgctcttgcgtcgcaaaatcggtatcctgcc

SEQ ID NO: 642070 - DNA, 75 bp, synthetic construct
  source 1..75: mol_type = other DNA
cggatcgggcgcaggcgctgatcgaccaaaccagccagttactgccgcgcatcaagatcaccgaactgctgatgg

SEQ ID NO: 642071 - DNA, 75 bp, synthetic construct
  source 1..75: mol_type = other DNA
gaacgccctgcgctccggcgacatctgggtcaagggctcgcggcagttccgcgacttcgacgactacctgctgcc

SEQ ID NO: 642072 - DNA, 75 bp, synthetic construct
  source 1..75: mol_type = other DNA
acaccaagctctacatcccgaagggcgacgccgcctatgacgcgctgaaacccatgatcggcggcacgctcaaca

SEQ ID NO: 642073 - DNA, 75 bp, synthetic construct
  source 1..75: mol_type = other DNA
aagagatggcttttcgtccctgcttcattcgtggcgaatcttcgttaccggtagaagaaagcaacatccgctcat

SEQ ID NO: 642074 - DNA, 75 bp, synthetic construct
  source 1..75: mol_type = other DNA
ttgggagcattaaacttgatgacagtgaaattgccattggtgaggtgccgttaaccttcatcgttgatgcagatc

SEQ ID NO: 642075 - DNA, 75 bp, synthetic construct
  source 1..75: mol_type = other DNA
gaagtacggctcgccgtgggttgttggcaagcatccgcgcggtacgtcgcagggcgagattaaccagttgctgga

SEQ ID NO: 642076 - DNA, 75 bp, synthetic construct
  source 1..75: mol_type = other DNA
gacggggttgccgctgaccctgcgggactaccgtctgtatatctcttactgcgtgaaggcgaagaagcgcacagc

SEQ ID NO: 642077 - DNA, 75 bp, synthetic construct
  source 1..75: mol_type = other DNA
acacccgtgccacccgcgacgaaaaactcacccgggcgggtctgcgtctgaccccgcagtacttcaagcgtgagt

SEQ ID NO: 642078 - DNA, 75 bp, synthetic construct
  source 1..75: mol_type = other DNA
catcgaactcaaagccgcggatggtaaggcggacagcagcgaggtattccgcgagctgatcacgctgtcacgcag

SEQ ID NO: 642079 - DNA, 75 bp, synthetic construct
  source 1..75: mol_type = other DNA
atacgttcaagaagaacggcatagagctgttttccccgacctatatgcagttccgtaactggatagcgatgatcc

SEQ ID NO: 642080 - DNA, 75 bp, synthetic construct
  source 1..75: mol_type = other DNA
ggtggtgctggagctgggcggactggaagaccgtccgtcactgctggttgcggtgatgttctccctgattatcta

SEQ ID NO: 642081 - DNA, 75 bp, synthetic construct
  source 1..75: mol_type = other DNA
ctgtgagaacgtcggcgggacatacctggacggcaagtcactcaagttcaacccgtttgccaatatttccaacat

SEQ ID NO: 642082 - DNA, 75 bp, synthetic construct
  source 1..75: mol_type = other DNA
ctccatggagcagatggtggaggaagcggtggccgccatccccgatgacagcagtattgagctcagggcagcgga

SEQ ID NO: 642083 - DNA, 75 bp, synthetic construct
  source 1..75: mol_type = other DNA
tgtcggcaaaccgcctgagtggtttcagtttgatacggacaactgcctgcgcttccgggcgcgtgatgcgggtgt

SEQ ID NO: 642084 - DNA, 75 bp, synthetic construct
  source 1..75: mol_type = other DNA
cctcgtatgacaatccttacggtttccctgacctgtccatgtgcttctggccggttgccttcaagaaaggcggga

SEQ ID NO: 642085 - DNA, 75 bp, synthetic construct
  source 1..75: mol_type = other DNA
aagttcgtcgttccgcgtcaggatgccacttatgataacccatatggcttccctgacctgtcaatgtgcttctgg

SEQ ID NO: 642086 - DNA, 75 bp, synthetic construct
  source 1..75: mol_type = other DNA
cccgcgcctggcacatcaccgatatcgtgggcaaaccaccggaatggttcctgtttgacaacgacaaccggctgc

SEQ ID NO: 642087 - DNA, 75 bp, synthetic construct
  source 1..75: mol_type = other DNA
cctctctgatgcaccggttgcggacggggcagtgcctgcggaatttgccgaggcgataagcgccgatcatgatgc

SEQ ID NO: 642088 - DNA, 75 bp, synthetic construct
  source 1..75: mol_type = other DNA
cctggtattgcagcatggtgatttttggcgtcttcaccatctacgccattctgagttactccaccaactatctga

SEQ ID NO: 642089 - DNA, 75 bp, synthetic construct
  source 1..75: mol_type = other DNA
tattgccgataaattttcacaccgcaaaatgattacttccgcgatgatcattaccggattactgggtctgttaat

SEQ ID NO: 642090 - DNA, 75 bp, synthetic construct
  source 1..75: mol_type = other DNA
gtggatttggccagtgagctggctgatgtggaaataatgactgaacaatgccgtctcaacggcatggggaaactc

SEQ ID NO: 642091 - DNA, 75 bp, synthetic construct
  source 1..75: mol_type = other DNA
tggggattctgtgctggttttttgttagcgataacaacaacctgcgtagtaccaataacgaagaaaaacagtcat

SEQ ID NO: 642092 - DNA, 75 bp, synthetic construct
  source 1..75: mol_type = other DNA
tgattttactgctgggattcacctgttacgcctcacgcgggctgtactgggcctgccccggcgaagcgagaacac

SEQ ID NO: 642093 - DNA, 75 bp, synthetic construct
  source 1..75: mol_type = other DNA
atgcaacacaactcatatcgccgttggataaccctcgcgataattagttttagcggcggcgttagtttcgacctg

SEQ ID NO: 642094 - DNA, 75 bp, synthetic construct
  source 1..75: mol_type = other DNA
ccagggcgagttccagtatcctatttaccgtatgccgccaaaacgtggtcgtctgccgtctcgtgcggagatcta

SEQ ID NO: 642095 - DNA, 75 bp, synthetic construct
  source 1..75: mol_type = other DNA
gtttacaggctattacacgccggtaattcaggcgcgccatacccgccagggcgagttccagtatccgatttaccg

SEQ ID NO: 642096 - DNA, 75 bp, synthetic construct
  source 1..75: mol_type = other DNA
tgctgcttacattcaatgccacttctttgttgataattatatttttggtgcaaaggaaatatacgttgttttact

SEQ ID NO: 642097 - DNA, 75 bp, synthetic construct
  source 1..75: mol_type = other DNA
atgtcgatgcaggcgattcgtcactggggggaaacgcacagtgaagccgaagttcgcgaactgctggagcagaat

SEQ ID NO: 642098 - DNA, 75 bp, synthetic construct
  source 1..75: mol_type = other DNA
ggttggtacaaccactatggacgtgtctgggtgctgaaaaccgctccgggcgcaggtaacgtctttagcggctga

SEQ ID NO: 642099 - DNA, 75 bp, synthetic construct
  source 1..75: mol_type = other DNA
atgattttgaacaaaaacaaaccactaaagcctatttttttgtacaaaatttgcgtcagggagaggctgctcatt

SEQ ID NO: 642100 - DNA, 75 bp, synthetic construct
  source 1..75: mol_type = other DNA
atgaagtgaaaattgaaacccagggcgcagatggcatccagaaccgtcttacggcgcaagatatcgcagaggcga

SEQ ID NO: 642101 - DNA, 75 bp, synthetic construct
  source 1..75: mol_type = other DNA
tggaatatcaccgaccatgtactgcgttatctcattcttgattgttctccggttcccgcaacggtgcaggaggtg

SEQ ID NO: 642102 - DNA, 75 bp, synthetic construct
  source 1..75: mol_type = other DNA
tggaatatcaccgaacatgttctgcgttacctgattgttgaccggacggctgcgccgggatatctgcggaggtgg

SEQ ID NO: 642103 - DNA, 75 bp, synthetic construct
  source 1..75: mol_type = other DNA
agctgatgttcgatgatatcgacctgctaaccatgctgcagttggtggcgcgggtggtcgccgattcactgggaa

SEQ ID NO: 642104 - DNA, 75 bp, synthetic construct
  source 1..75: mol_type = other DNA
gctggattttctgaaatctgtgcgccgtcctgaaatcattgctgctattgctgaagcgcgtgaacatggcgatct

SEQ ID NO: 642105 - DNA, 75 bp, synthetic construct
  source 1..75: mol_type = other DNA
gcgatgacgaagctgactttaaacaaaacctgatttctgtaaactcgcctattgctcgtggcctgatcggcaaag

SEQ ID NO: 642106 - DNA, 75 bp, synthetic construct
  source 1..75: mol_type = other DNA
caagctgtcgaacgcgcaggtgattgatgtcaccaaaatgcccaacaatgggcgcgttatttttggtgctaccgt

SEQ ID NO: 642107 - DNA, 75 bp, synthetic construct
  source 1..75: mol_type = other DNA
aatgtggatttgcccctatatttccagacatctgttatcacttaacccattacaagcccgctgccgcagatattc

SEQ ID NO: 642108 - DNA, 75 bp, synthetic construct
  source 1..75: mol_type = other DNA
gcagcgtttcggtccggatgcacaggccctgaaactgacagaagaggctgctgaactggcggccagtgccgcccg

SEQ ID NO: 642109 - DNA, 75 bp, synthetic construct
  source 1..75: mol_type = other DNA
taccccggaagataacgaacgtttcgaatcacgcgacgtttatgaaatcactttgcaggacgcaattgaaacgct

SEQ ID NO: 642110 - DNA, 75 bp, synthetic construct
  source 1..75: mol_type = other DNA
cccagaagtcggcctaaagcgcgcgcgtgcacgcggcgagctggatcgcattgagcaagagtcttttgatttctt

SEQ ID NO: 642111 - DNA, 75 bp, synthetic construct
  source 1..75: mol_type = other DNA
gaactggccgcacaaaatagaagcattcacaccattgacgctacccagccgctggatgccgtcatggacgcaatt

SEQ ID NO: 642112 - DNA, 75 bp, synthetic construct
  source 1..75: mol_type = other DNA
tgagttggaacccgatactttcggtagcttacaaggagaacttgagttctggtgggagagtatctggtctccgtt

SEQ ID NO: 642113 - DNA, 75 bp, synthetic construct
  source 1..75: mol_type = other DNA
tttttatctcaggccttatattttaatcctttgtttcttgttttcaggtatgagttttataatattaagacaaaa

SEQ ID NO: 642114 - DNA, 75 bp, synthetic construct
  source 1..75: mol_type = other DNA
cgggtggtcgccaattcgctgggaaattttttgcctacatcccttaccagtacgacgcagagcctgcaacagggc

SEQ ID NO: 642115 - DNA, 75 bp, synthetic construct
  source 1..75: mol_type = other DNA
tgtatatgggctggcgtaatccacgtatcactgacgacgaatactatgaattcgttgatgaatttatccaggctg

SEQ ID NO: 642116 - DNA, 75 bp, synthetic construct
  source 1..75: mol_type = other DNA
gttaagcgagaaaaaaatcgtcttcctcggcgcaggttcagcaggatgcggcattgcggagatgatcatcgccca

SEQ ID NO: 642117 - DNA, 75 bp, synthetic construct
  source 1..75: mol_type = other DNA
atgaacgaatatcagtttgtgcttccatacccgccgtcgctgaacacctactggcgaagacggggaagccaatac

SEQ ID NO: 642118 - DNA, 75 bp, synthetic construct
  source 1..75: mol_type = other DNA
tgcggtgcaggagattgcacatctgactgaagagattgacccgtccaccacgatgcaggagcagctccgcccgat

SEQ ID NO: 642119 - DNA, 75 bp, synthetic construct
  source 1..75: mol_type = other DNA
gtgcaaaaatcggtgttaagtgcctatggcgatcagggcggctttgtgctggctccgcaggataacctcttttga

SEQ ID NO: 642120 - DNA, 75 bp, synthetic construct
  source 1..75: mol_type = other DNA
ttcgttgatgaatttatccaggctgtgaaacaacgctggccggacgtgctgttgcagtttgaagactttgctcaa

SEQ ID NO: 642121 - DNA, 75 bp, synthetic construct
  source 1..75: mol_type = other DNA
gtggtgactgacggtgaacgtattctggggcttggtgaccagggcatcggcggggtgggcattccgatcggtaaa

SEQ ID NO: 642122 - DNA, 75 bp, synthetic construct
  source 1..75: mol_type = other DNA
ctatcttatctggatgcaataaccggaaagattgaaagcgcgttacgttatctcaggataagcctagaagtaaac

SEQ ID NO: 642123 - DNA, 75 bp, synthetic construct
  source 1..75: mol_type = other DNA
aaaaatgcgatgccgttacttaaccgctatcgcaatgaaatttgttcttttaacgatgacattcagggcaccgcg

SEQ ID NO: 642124 - DNA, 75 bp, synthetic construct
  source 1..75: mol_type = other DNA
gcgtggcagtgaagacttccgccgaagccttacaacaagccattgatgataatttctggactgctgagtaccgag

SEQ ID NO: 642125 - DNA, 75 bp, synthetic construct
  source 1..75: mol_type = other DNA
accgaaccataatattaaagtgattgtggtgacggacggcgaacgtattctggggcttggtgaccagggcatcgg

SEQ ID NO: 642126 - DNA, 75 bp, synthetic construct
  source 1..75: mol_type = other DNA
cttttgatgcaatcagaggggctttttacgatgcaggaacacgatcagcgagaatgccgaataacacaactgata

SEQ ID NO: 642127 - DNA, 75 bp, synthetic construct
  source 1..75: mol_type = other DNA
tatgatgaaatcatcaataatattaccaccagtccattaagttattttttggcgtttattggtgcgtttatctgg

SEQ ID NO: 642128 - DNA, 75 bp, synthetic construct
  source 1..75: mol_type = other DNA
ttgctgccgtgctgctcagcgcaccgctgtcgctctcattctggcaaggcgcactgatggtctgtggcggttctc

SEQ ID NO: 642129 - DNA, 75 bp, synthetic construct
  source 1..75: mol_type = other DNA
gcgctggcggcagcgctcgggtttagcggcctggcctccgcctggcaaacggtgttctgggtaggcggggtgatc

SEQ ID NO: 642130 - DNA, 75 bp, synthetic construct
  source 1..75: mol_type = other DNA
tttttcagcatgaacagagtttacagtggttaagtggtattcctcagatagggtcgtatcttttttattttttaa

SEQ ID NO: 642131 - DNA, 75 bp, synthetic construct
  source 1..75: mol_type = other DNA
aagtcactcatttattattgcagggactccaggaatgggaagcaggagcggagcccaatactatgccataaacag

SEQ ID NO: 642132 - DNA, 75 bp, synthetic construct
  source 1..75: mol_type = other DNA
tacatatttgattccttcagaaaaaaaagagatgtggatatataaaacaatggaaaagataatgcaaaaccaaac

SEQ ID NO: 642133 - DNA, 75 bp, synthetic construct
  source 1..75: mol_type = other DNA
ttttcttaaacgttggtttgggagaaggttctgcgttgcctgttggcgtaccagttccttggccttcagctacgc

SEQ ID NO: 642134 - DNA, 75 bp, synthetic construct
  source 1..75: mol_type = other DNA
gtgcctgttccgtggccttcagccactccgccaacaggctggctgaaatgcaatggtgcggttttttctgctgaa

SEQ ID NO: 642135 - DNA, 75 bp, synthetic construct
  source 1..75: mol_type = other DNA
cgacgcctctcgtgtcgtgccaacagctaatgaaaaccgtccacgtaacatcgcctttaattatattgtgagggc

SEQ ID NO: 642136 - DNA, 75 bp, synthetic construct
  source 1..75: mol_type = other DNA
tctgcaccgggtattcttgttgctggcctggcagtgtttattttgatgagtcggagatcaagaatgcagccgtgt

SEQ ID NO: 642137 - DNA, 75 bp, synthetic construct
  source 1..75: mol_type = other DNA
tgggatttcccctcactggtctttgcgcgactgatgaccggtgtcgggctgggggcggcgttgccgaatcttatc

SEQ ID NO: 642138 - DNA, 75 bp, synthetic construct
  source 1..75: mol_type = other DNA
tggccgcttctgcaccgggtattcttgttgctgggttggcggtgtttattttgatgagccggagatcacgaatac

SEQ ID NO: 642139 - DNA, 75 bp, synthetic construct
  source 1..75: mol_type = other DNA
cgccgggttagttggggacagtcagcgtctgttttctgtgagtagtaatgtattgcagtgttttaatgataataa

SEQ ID NO: 642140 - DNA, 75 bp, synthetic construct
  source 1..75: mol_type = other DNA
agataaatatacctacgtttaataatgttcctgcatataattatatggtaaagtatatagaagagctggaagcgg

SEQ ID NO: 642141 - DNA, 75 bp, synthetic construct
  source 1..75: mol_type = other DNA
tcagtggagcatcaaactatacggtgacttacccggtaacattcccaaatcgttcacttgcgctgttggctgtgc

SEQ ID NO: 642142 - DNA, 75 bp, synthetic construct
  source 1..75: mol_type = other DNA
gagtcaatatgttggcacatacatcgatctggaccaggttaaacaacacacggcggcatggatagccgctaacat

SEQ ID NO: 642143 - DNA, 75 bp, synthetic construct
  source 1..75: mol_type = other DNA
tagcccatgagctgatcgcctgggcacttgaaacagccgcgcgtgcctcagctgcgcaacgtaacaccccggagg

SEQ ID NO: 642144 - DNA, 75 bp, synthetic construct
  source 1..75: mol_type = other DNA
ctgggctatcagttcgggtatctgatgttgccgtttattgccgctgccggcatatggatattgatgaacagggag

SEQ ID NO: 642145 - DNA, 75 bp, synthetic construct
  source 1..75: mol_type = other DNA
tagtttttgaagacgatgatggtgtagataaaaaatcacttatatcatatttaggtgtgaggcatatcgtatcta

SEQ ID NO: 642146 - DNA, 75 bp, synthetic construct
  source 1..75: mol_type = other DNA
tggatggtcaccatcagtgctcaaagaacaatatgggatggcaagaagcggaactgaagaaggagccatttttga

SEQ ID NO: 642147 - DNA, 75 bp, synthetic construct
  source 1..75: mol_type = other DNA
atgatggttagttattacatggctaaatcaacggggattttgtacaaaatagaacgccatacggtgtactacttc

SEQ ID NO: 642148 - DNA, 75 bp, synthetic construct
  source 1..75: mol_type = other DNA
ccgactatttgcaacagtgccctccagcccgcagaaatgctccacgtactcggccccttccggcgtgaaggcggc

SEQ ID NO: 642149 - DNA, 75 bp, synthetic construct
  source 1..75: mol_type = other DNA
gctaccacctccattgtcgttttcagaagacggctgcactgaacgtcagaagccgactgcactatagcagcggag

SEQ ID NO: 642150 - DNA, 75 bp, synthetic construct
  source 1..75: mol_type = other DNA
aaccctgcaccgtgtcgcaacccgcctgccgcaaccacgcaaggcagtcgggtgtttccacaccctcggctacca

SEQ ID NO: 642151 - DNA, 75 bp, synthetic construct
  source 1..75: mol_type = other DNA
ccggaagacccgatcagcgaaatgattcgtgcgcaaattaataacatcgcgcataaacatattgtgctgcattaa

SEQ ID NO: 642152 - DNA, 75 bp, synthetic construct
  source 1..75: mol_type = other DNA
tacctttgaaggcattaccgatcaggaaggtaaaactgcaactgtttatacagcagtgccaaatgcattaaaaat

SEQ ID NO: 642153 - DNA, 75 bp, synthetic construct
  source 1..75: mol_type = other DNA
gcaagggcgtactgattaccggcgtgacggccagcgcggcgcgtgaccgcagctatgaactgacgttcacggcga

SEQ ID NO: 642154 - DNA, 75 bp, synthetic construct
  source 1..75: mol_type = other DNA
tgcagtacggtgaggacgacctgacgtttgtctcacgcctgctgtcggaggtgggtatctggttccgctttgcca

SEQ ID NO: 642155 - DNA, 75 bp, synthetic construct
  source 1..75: mol_type = other DNA
tgcagtatggcgaggacgacctgacgtttatttcacgcctgctgtcggaagtgggtatctggttccgcttcgcca

SEQ ID NO: 642156 - DNA, 75 bp, synthetic construct
  source 1..75: mol_type = other DNA
gaatgaacaggccattctcaaaggccagagcaccagttcactgctgatgccggggctggagataaaagttcaggg

SEQ ID NO: 642157 - DNA, 75 bp, synthetic construct
  source 1..75: mol_type = other DNA
ccaccgggggcgataacaccacctacggcgaagcctaccactatgccgacaacttcctgcaaaaaggcgataaag

SEQ ID NO: 642158 - DNA, 75 bp, synthetic construct
  source 1..75: mol_type = other DNA
cctcgacgatgagcgcggcaaagagcatatcaaggtcagtaccgagtacggcggcaagagccagctcaacctcgg

SEQ ID NO: 642159 - DNA, 75 bp, synthetic construct
  source 1..75: mol_type = other DNA
ctccagcaaccaatgccaccagggattaagcccccgcaacattgcgcctcaccggaatccttccggcttgacgct

SEQ ID NO: 642160 - DNA, 75 bp, synthetic construct
  source 1..75: mol_type = other DNA
atggctggaccaggtgttaaagaatcgacaggcagtgcggtatcattaggtgcggttttattatgggtcgcgaat

SEQ ID NO: 642161 - DNA, 75 bp, synthetic construct
  source 1..75: mol_type = other DNA
gatgatggcgtttccggtgattaactctggagaatataacctgaaatatcaggtgaagaatacgattggtaattt

SEQ ID NO: 642162 - DNA, 75 bp, synthetic construct
  source 1..75: mol_type = other DNA
agccagctaaacctcggtcatcttgttgatgccgggaaacagcagcgcggggaaggctttgaactgcgtaccgat

SEQ ID NO: 642163 - DNA, 75 bp, synthetic construct
  source 1..75: mol_type = other DNA
gcggcaagagccagctaaacctcggccatcttgttgatgccgggaaagaacagcgtggcgaaggctttgaactgc

SEQ ID NO: 642164 - DNA, 75 bp, synthetic construct
  source 1..75: mol_type = other DNA
atgatggttagttattatatggctaaacctacaggcattttatacaagattgatggcgaatacgtttactatttt

SEQ ID NO: 642165 - DNA, 75 bp, synthetic construct
  source 1..75: mol_type = other DNA
gtgatcgaaatcttacatgaatactggaaaccactgctgtggactgacggttatcgctttactggcgtggcaatc

SEQ ID NO: 642166 - DNA, 75 bp, synthetic construct
  source 1..75: mol_type = other DNA
tcgccagttctccgatctgtttaaccgggaaattatcttcagggagaatctcatctggttacggtggggggcgag

SEQ ID NO: 642167 - DNA, 75 bp, synthetic construct
  source 1..75: mol_type = other DNA
gcgtgggaatttgctcagggcgttctgacctgtgaaaccgtttatgtggtggctgaagttgatgagcaggccatg

SEQ ID NO: 642168 - DNA, 75 bp, synthetic construct
  source 1..75: mol_type = other DNA
aatgcccacgtcaatccggtgtctgaaatgccgatgatattaacacttgagcaacttcagccaaatccggataac

SEQ ID NO: 642169 - DNA, 75 bp, synthetic construct
  source 1..75: mol_type = other DNA
aaaaccatctgataatacagatgagtcagacccgttatttgtcccggagcctgtgaatccgattattgaaattca

SEQ ID NO: 642170 - DNA, 75 bp, synthetic construct
  source 1..75: mol_type = other DNA
gtgatcgaaatcttacatgaatactggaaaccgctgctgtggaccgacggttatcgctttacgggtggggcggtc

SEQ ID NO: 642171 - DNA, 75 bp, synthetic construct
  source 1..75: mol_type = other DNA
tctcatggttcacctaaatcatgggcgattggttctctgggccgctttggtaacgaatactccggctggtttgat

SEQ ID NO: 642172 - DNA, 75 bp, synthetic construct
  source 1..75: mol_type = other DNA
cttcaccttcgaagacaataaagacgaccagtttgctgtcggtgcccaggctgctgtcggtgcccaggctgaaat

SEQ ID NO: 642173 - DNA, 75 bp, synthetic construct
  source 1..75: mol_type = other DNA
cgtcctgaaatcattgctgctattgctgaagcgcgtgaacatggcgatctgaaagagaacgccgaataccacgca

SEQ ID NO: 642174 - DNA, 75 bp, synthetic construct
  source 1..75: mol_type = other DNA
actggctgcgtatttacggacgtctgacctgcggcattctggctgaaaaaatgaatatgccgccatcctcgatgg

SEQ ID NO: 642175 - DNA, 75 bp, synthetic construct
  source 1..75: mol_type = other DNA
tgacctgtgaaactgtttatgtggtggctgaagttgatgagcaggccatgaaagaaggtgtgccccggtttgtgc

SEQ ID NO: 642176 - DNA, 75 bp, synthetic construct
  source 1..75: mol_type = other DNA
ctaacgcgattgtttactccttcggtaacgatatttatagctacgaaacaggcgcacactctgatttcgaatcta

SEQ ID NO: 642177 - DNA, 75 bp, synthetic construct
  source 1..75: mol_type = other DNA
ccccggttactggaagacgggctgggaagacctcaaattgagcaattactgtccgtgcgctcgacattaaaacgg

SEQ ID NO: 642178 - DNA, 75 bp, synthetic construct
  source 1..75: mol_type = other DNA
tgaacatacgccgctgccggatgccagcgcctacacagccgctaaacatgcgctcggcgggttaaccaaagcgat

SEQ ID NO: 642179 - DNA, 75 bp, synthetic construct
  source 1..75: mol_type = other DNA
tggtgaataatgcgggcgcaatgaccaaagcgccgtttcttgatatggcttttgatgagtggcgcaagattttta

SEQ ID NO: 642180 - DNA, 75 bp, synthetic construct
  source 1..75: mol_type = other DNA
tgggtgccggtatttacccagggcgaactgatgtttgatgatattgacttgctggtcatgcttcatctggtggcg

SEQ ID NO: 642181 - DNA, 75 bp, synthetic construct
  source 1..75: mol_type = other DNA
ttcgcatcatgcggaagtcagaaatgcttacacaagaaaaaatggcagagattactgggcttactcttgctgcat

SEQ ID NO: 642182 - DNA, 75 bp, synthetic construct
  source 1..75: mol_type = other DNA
ggcgctggagctggtcaggcataagattttggtgaacgcagtcgcacctggggcgatcgccacgccaatgaacgg

SEQ ID NO: 642183 - DNA, 75 bp, synthetic construct
  source 1..75: mol_type = other DNA
attttggtgaatgcggttgcacctggggcgatcgccacgccaatgaacggcatggatgatggcgacgtgaagccc

SEQ ID NO: 642184 - DNA, 75 bp, synthetic construct
  source 1..75: mol_type = other DNA
atgaatatttcatggcaaacagaaattgcgatataccgatttggcgcaaagaatgtttacggcgaggcgcaattg

SEQ ID NO: 642185 - DNA, 75 bp, synthetic construct
  source 1..75: mol_type = other DNA
ctgaccggcggaaatcaatccgggatgccaccggtattgaatgatacccagtttatgacatggatgaaactgatg

SEQ ID NO: 642186 - DNA, 75 bp, synthetic construct
  source 1..75: mol_type = other DNA
atgtgttaacggagcctctgtcttctgattcaggtcaggagacttcggtatcccctgttgttgaaaagaaaaaat

SEQ ID NO: 642187 - DNA, 75 bp, synthetic construct
  source 1..75: mol_type = other DNA
attcaccagaacgcgtttcgttattaccgatagcaccaggtgttgattttgcgaccgctgtggcattacgacgca

SEQ ID NO: 642188 - DNA, 75 bp, synthetic construct
  source 1..75: mol_type = other DNA
agtgcccttcttttctatatgccggatcagcgtcaccatatgctgttcgccactctctggaataccggaatgcgt

SEQ ID NO: 642189 - DNA, 75 bp, synthetic construct
  source 1..75: mol_type = other DNA
caccctctggaataccggaatgcgtattggcgaagcccggatgctgacgccggaatcatttgatctggatgaggt

SEQ ID NO: 642190 - DNA, 75 bp, synthetic construct
  source 1..75: mol_type = other DNA
aaacgctctgatgtgaatggtgtatcgcgcggtgtcgagtacaacatggcgcagaatgctgtttatcgcgtttgc

SEQ ID NO: 642191 - DNA, 75 bp, synthetic construct
  source 1..75: mol_type = other DNA
ctgctgatgaactggctgatggcgtgatggagtctctgcgatttgatgcgcatgagttgctgattatccatcttc

SEQ ID NO: 642192 - DNA, 75 bp, synthetic construct
  source 1..75: mol_type = other DNA
tacatgctgaccagtcgttagaagttattgacgatgggcgcgggatgccggtggatattcacccggaagagggtg

SEQ ID NO: 642193 - DNA, 75 bp, synthetic construct
  source 1..75: mol_type = other DNA
tacaatcggttccacgaggtggagaggtgcgggttggtgacactccgccagtgttaagagcacttggcgcaccaa

SEQ ID NO: 642194 - DNA, 75 bp, synthetic construct
  source 1..75: mol_type = other DNA
atggaatttgaaatcaaaggggttaattaccgaaccgccaaacttgacgtattccagcaactgaaggtcagccgt

SEQ ID NO: 642195 - DNA, 75 bp, synthetic construct
  source 1..75: mol_type = other DNA
tcttcgctcattcccgggcattgccaaacgttctgatgtgaacggtgtatcgcgcggagtcgagtacaacatggc

SEQ ID NO: 642196 - DNA, 75 bp, synthetic construct
  source 1..75: mol_type = other DNA
ctgctcggcacgccacaggcgcgcgtggaaatacagccaggcgatcgcgtgcgtgttctcgcagaaggtttcccg

SEQ ID NO: 642197 - DNA, 75 bp, synthetic construct
  source 1..75: mol_type = other DNA
agccaggcgatcgcgttcgtgttctcgcagaaggtttcccgccgctggaaaatccggtagtggacgaacgtgaag

SEQ ID NO: 642198 - DNA, 75 bp, synthetic construct
  source 1..75: mol_type = other DNA
atgagtaagccttcagacccgcgtattgataccagccgtgtaatccatgcgccacacggtacgcagctgcactgc

SEQ ID NO: 642199 - DNA, 75 bp, synthetic construct
  source 1..75: mol_type = other DNA
gccggttcgccgccgtccggggatgtataccgataccactcgccctaaccatttggggcaagaagttattgataa

SEQ ID NO: 642200 - DNA, 75 bp, synthetic construct
  source 1..75: mol_type = other DNA
atcgtctgaacgccgaaccgacggtgttcagggggttcaccaccccggaactggggctggctgcactgaccgggt

SEQ ID NO: 642201 - DNA, 75 bp, synthetic construct
  source 1..75: mol_type = other DNA
cggtctggttaccaatagtcatattgctcgttgccatggcgtctattcagggtggagcctcgttagctaagtcac

SEQ ID NO: 642202 - DNA, 75 bp, synthetic construct
  source 1..75: mol_type = other DNA
tacaggtaagggcttcaccatcggcggacgtgaaagcaggcaggccatggggcgtgcatcccgcgcacagtctcc

SEQ ID NO: 642203 - DNA, 75 bp, synthetic construct
  source 1..75: mol_type = other DNA
tgctgcttgatgccgtggataaaaatggtgatccggtggtgtcagcggtacacatgaaggctgtccggtcgcgtc

SEQ ID NO: 642204 - DNA, 75 bp, synthetic construct
  source 1..75: mol_type = other DNA
ccgttacgcggatacctggcaactgttacgcacgctgccaccctcacagatggacaaggcttctgcttatcgggt

SEQ ID NO: 642205 - DNA, 75 bp, synthetic construct
  source 1..75: mol_type = other DNA
cagcccttggtgctgcgatgggcgctccgttcggtgcggttgccggatatcgtggcaaacgtcaggccgcagaag

SEQ ID NO: 642206 - DNA, 75 bp, synthetic construct
  source 1..75: mol_type = other DNA
ccgcaacccgaaccggttgatccggtggcacagcatcgtgaatccatgcaggggatgaatcgcgagcagcttctg

SEQ ID NO: 642207 - DNA, 75 bp, synthetic construct
  source 1..75: mol_type = other DNA
atggcttattccgatgaacagcgccctgaagcgcaatttggcaaccagaaccgcaacagcctgaacattcagcag

SEQ ID NO: 642208 - DNA, 75 bp, synthetic construct
  source 1..75: mol_type = other DNA
ggcagtgaaacgtcggaaacactgtccggggcattgctgaaaaatgcagcgccgaccattctgcgtccgtttgcg

SEQ ID NO: 642209 - DNA, 75 bp, synthetic construct
  source 1..75: mol_type = other DNA
gcaaaaacgaagtgggtaacgccttcctgaaactggtgcaggataatcccgacaaggattactggcaggtattca

SEQ ID NO: 642210 - DNA, 75 bp, synthetic construct
  source 1..75: mol_type = other DNA
ggcggtgtggctaaaaaggtgggtgatgtcacactgcgaaaaatgctgaccgccgggctggagaaaaaatacatc

SEQ ID NO: 642211 - DNA, 75 bp, synthetic construct
  source 1..75: mol_type = other DNA
caggggaccgcaaacctggtgagaacgctcggacatcttaatggcgacgggccgttactggagcgccttcgctgg

SEQ ID NO: 642212 - DNA, 75 bp, synthetic construct
  source 1..75: mol_type = other DNA
gtcgtggtctgccgtcaccggatgcgcagaacgcgacagcaccggtacgtgaagggctaccggctcctgacattg

SEQ ID NO: 642213 - DNA, 75 bp, synthetic construct
  source 1..75: mol_type = other DNA
gatggaaaaaacgcggtcactgatactgtcggtaaaggtctgaaggtcaccggtaaggctgtcagtgatggtgct

SEQ ID NO: 642214 - DNA, 75 bp, synthetic construct
  source 1..75: mol_type = other DNA
cgtcccgtgctgccggtaatgttgtcggtggtatcctgggggcattcagtcctgtgggcagtgaaacgtcggaaa

SEQ ID NO: 642215 - DNA, 75 bp, synthetic construct
  source 1..75: mol_type = other DNA
tacaaaattaaattacgtgcatcgggatttcgtctggtttatcaggtgattgacgatatgttaattattgcggtt

SEQ ID NO: 642216 - DNA, 75 bp, synthetic construct
  source 1..75: mol_type = other DNA
tggtctgaacgattacctggcggaggccgtaaatggcttaccgacgctgccggaaaaaccgtttatcggtaattt

SEQ ID NO: 642217 - DNA, 75 bp, synthetic construct
  source 1..75: mol_type = other DNA
agatctgtatcctcgcggatgcggactccgatggcctgcacattgccacgctgctctgcgcgctgtttgtaaaac

SEQ ID NO: 642218 - DNA, 75 bp, synthetic construct
  source 1..75: mol_type = other DNA
gtcagggcctgctggacgcgatgcgcgagttctgtgaataccgcaacattctgccgcgcggcgtgaagctgtcgg

SEQ ID NO: 642219 - DNA, 75 bp, synthetic construct
  source 1..75: mol_type = other DNA
ttgctctgcgccttgtttgtaaaacacttccgtacgctggtgaaacacggtcacgtatatgtagcgctaccaccg

SEQ ID NO: 642220 - DNA, 75 bp, synthetic construct
  source 1..75: mol_type = other DNA
aggaagtgcacgatatttcggtagcgatcggtatcgatcctgatagcgacgatcttagccaactgcgttatggca

SEQ ID NO: 642221 - DNA, 75 bp, synthetic construct
  source 1..75: mol_type = other DNA
gtggcgaactgctgactgaaagctatgttaacctgatccctactatgcagggcggtacgcacgttaacggcctgc

SEQ ID NO: 642222 - DNA, 75 bp, synthetic construct
  source 1..75: mol_type = other DNA
tctcaatggattttttctccctgaaaggtaaaaccgcaattgttaccggcgggaatagcggtttaggccaggcat

SEQ ID NO: 642223 - DNA, 75 bp, synthetic construct
  source 1..75: mol_type = other DNA
tttacgatacgccggcgggtccgtcggtggtgctatgtgcggcactgttatttattatcagtatgatgaaaaagc

SEQ ID NO: 642224 - DNA, 75 bp, synthetic construct
  source 1..75: mol_type = other DNA
atgattgaattactatttcccggttggttggccgggatcatgctcgcctgtgccgcgggtccgctgggttcattt

SEQ ID NO: 642225 - DNA, 75 bp, synthetic construct
  source 1..75: mol_type = other DNA
cgtcaacctgatcccaacgatgcagggcggtacgcacgttaacggtctgcgtcagggcttgctggatgcgatgcg

SEQ ID NO: 642226 - DNA, 75 bp, synthetic construct
  source 1..75: mol_type = other DNA
ggcggtacccatgttaacggtctgcgtcagggcctgttggacgcgatgcgtgagttctgtgaataccgcaacatt

SEQ ID NO: 642227 - DNA, 75 bp, synthetic construct
  source 1..75: mol_type = other DNA
ctaaacatgctcttgccggattcaccaaagcttattgtgatgaactaggtcaatataatattcaggtaaatggta

SEQ ID NO: 642228 - DNA, 75 bp, synthetic construct
  source 1..75: mol_type = other DNA
ctctgatggtctgcacattgccacgctgctctgcgctttgttcgtaaaacacttccgcgcattggtgaaacacgg

SEQ ID NO: 642229 - DNA, 75 bp, synthetic construct
  source 1..75: mol_type = other DNA
aaccagtaaaggcactctttctgtacccgttcccgttggcaaattcctgttgattaacaacctgttctggctgca

SEQ ID NO: 642230 - DNA, 75 bp, synthetic construct
  source 1..75: mol_type = other DNA
gtcttccatccggtgttcgatgtcgatcagcagggccgcccggtgatacgctatatcgaccagtttgtccagccg

SEQ ID NO: 642231 - DNA, 75 bp, synthetic construct
  source 1..75: mol_type = other DNA
atgaatgcactgaccgccgtacaaaacagcgctgtcgattccggccaggactatagcggattcaccctcaccccg

SEQ ID NO: 642232 - DNA, 75 bp, synthetic construct
  source 1..75: mol_type = other DNA
gatatcccgttatgggataaagccaccttaatggtgagtggtcgttatgtcacggcaaacgaaagcgcatcggaa

SEQ ID NO: 642233 - DNA, 75 bp, synthetic construct
  source 1..75: mol_type = other DNA
actgtgcgtccggggttatgcgtcatgcggatgcgggttatgaagcggcaattgaatgtgccaaaaactatggtc

SEQ ID NO: 642234 - DNA, 75 bp, synthetic construct
  source 1..75: mol_type = other DNA
ctgggatcatttcaatgaactggatcgtaaaggtctgttcatgtacggccagatgaccgctggctcgtggatcta

SEQ ID NO: 642235 - DNA, 75 bp, synthetic construct
  source 1..75: mol_type = other DNA
gcaacacaggcaccagcgtgcacttctggccggatgaaactttctttgacagcccgcgcttctctgtttcccgtc

SEQ ID NO: 642236 - DNA, 75 bp, synthetic construct
  source 1..75: mol_type = other DNA
cgggcagaccaaagaacgtctctcttcgcgtcagtgtgcggcattcgtttcgggcgtggtgaaagatgccttcat

SEQ ID NO: 642237 - DNA, 75 bp, synthetic construct
  source 1..75: mol_type = other DNA
ccggacgcctctatgccagtgaaagtctgatcaagaaaagactgaaggaggagggaacctcattctctgaaatat

SEQ ID NO: 642238 - DNA, 75 bp, synthetic construct
  source 1..75: mol_type = other DNA
tgcaaaatttgcgtcagggagaggctgctcatttcattaaacgcggcggtttgttatcttcgttgcgccttattt

SEQ ID NO: 642239 - DNA, 75 bp, synthetic construct
  source 1..75: mol_type = other DNA
cgtgattttacgcgtaccagtcagatgaataccaattctgtggatgttcgttatcgcaatatcccgttatgggat

SEQ ID NO: 642240 - DNA, 75 bp, synthetic construct
  source 1..75: mol_type = other DNA
gttacgcgcgatgctaaaggcaatgcaactgcgctggtggtgaataaagacaataaagtagagcagcgaacgctc

SEQ ID NO: 642241 - DNA, 75 bp, synthetic construct
  source 1..75: mol_type = other DNA
ctgatggggctggtagagcaaatggcctgcttattaagtagtggatacgctaatgacagacaaatcaaagggctg

SEQ ID NO: 642242 - DNA, 75 bp, synthetic construct
  source 1..75: mol_type = other DNA
tacatctattgcctgattgaacatcaaagcacctcaaacaaactgatcgcatttcgcatgatgcgttacgccatt

SEQ ID NO: 642243 - DNA, 75 bp, synthetic construct
  source 1..75: mol_type = other DNA
caaaaccatgctggacgccggagtttctcttgaggacgttctgcgatttaccagcctgacggttgaagaccttgc

SEQ ID NO: 642244 - DNA, 75 bp, synthetic construct
  source 1..75: mol_type = other DNA
gccgtacatttccgtgctgaccgatccgaccatgggcggtgtttctgcaagtttcgcgatgcttggcgatctcaa

SEQ ID NO: 642245 - DNA, 75 bp, synthetic construct
  source 1..75: mol_type = other DNA
gccgtatatttccgtgctgactgacccgaccatgggcggtgtttctgcaagtttcgcgatgctgggcgatctcaa

SEQ ID NO: 642246 - DNA, 75 bp, synthetic construct
  source 1..75: mol_type = other DNA
gaagataactgcccgctgatctgcttctccgcttctggtggcgcacgtatgcaggaagcactgatgtcgctgatg

SEQ ID NO: 642247 - DNA, 75 bp, synthetic construct
  source 1..75: mol_type = other DNA
agccggacggcatcatcggtatcggcacatggcgagatttcatcgtctgttttggttcatcgacgattgaatatt

SEQ ID NO: 642248 - DNA, 75 bp, synthetic construct
  source 1..75: mol_type = other DNA
aataaattacggcagggaacaaatggtcgtattgcaatctccatttgtatatgacaatcgagtcttatggcgcag

SEQ ID NO: 642249 - DNA, 75 bp, synthetic construct
  source 1..75: mol_type = other DNA
ttgccggaacttactgcaaaacgccattcgctgattcgtatgcgtttatcagcaatccggcaacgggtgcgccgt

SEQ ID NO: 642250 - DNA, 75 bp, synthetic construct
  source 1..75: mol_type = other DNA
atgagcaaaaagcagagttccaccccacatgatgcgctgttcaaactctttttacgccaaccggacacggctcgc

SEQ ID NO: 642251 - DNA, 75 bp, synthetic construct
  source 1..75: mol_type = other DNA
ctgctgatgaactggctgatggcgtgatggaatcgttgcggtttgatgctcatgagttgctgattattcacctgc

SEQ ID NO: 642252 - DNA, 75 bp, synthetic construct
  source 1..75: mol_type = other DNA
gcgaggtcggtgatgttgccggaagtggtcgcgtatcaatggcacacggtaggacatcacaggcagtaggcgtta

SEQ ID NO: 642253 - DNA, 75 bp, synthetic construct
  source 1..75: mol_type = other DNA
gcgaatcagctgcaaccattgctgttgaagaccctgctaaaccgcgctgaaggtgcgctgttgatcaatgcggtg

SEQ ID NO: 642254 - DNA, 75 bp, synthetic construct
  source 1..75: mol_type = other DNA
cctttgcgcggtgttcgttaaggacgcgacggttgtcgggctggacgatggcgacatcgttacggtgaaagaagc

SEQ ID NO: 642255 - DNA, 75 bp, synthetic construct
  source 1..75: mol_type = other DNA
gttgatatgcgtagtgtggcaaagctgctcagcgatttggcaacgcaactggaagtgcaactggtgcgtgctaat

SEQ ID NO: 642256 - DNA, 75 bp, synthetic construct
  source 1..75: mol_type = other DNA
aactatccgtgtttttaacctgaacggtgacataaagttgcttggtagtcgcagaactgcagtgcaagcaatcat

SEQ ID NO: 642257 - DNA, 75 bp, synthetic construct
  source 1..75: mol_type = other DNA
gagcgcgattccggtagaaaaggagaatcgtcttcctctgccaataaaaccactatgccggcagcccctgcccca

SEQ ID NO: 642258 - DNA, 75 bp, synthetic construct
  source 1..75: mol_type = other DNA
ggatgggttaccgttcaggatgcttcagcacaaggttgcatgacctggcttgctccacaaaatggtgaacacatt

SEQ ID NO: 642259 - DNA, 75 bp, synthetic construct
  source 1..75: mol_type = other DNA
gttgatattgacgaacagcgcctgtctcgcgtgtatgacaatctaaaacgccttgggatgaaggcaaccgtgaaa

SEQ ID NO: 642260 - DNA, 75 bp, synthetic construct
  source 1..75: mol_type = other DNA
tctcgatgactgggaacatctggaccactatttccgccatccactggcgcgtcgcccgatgcgctttgccgcgcc

SEQ ID NO: 642261 - DNA, 75 bp, synthetic construct
  source 1..75: mol_type = other DNA
ggggtcgatgatgtgaagcaagcggatgagatggtgaagctggcgacggcggtggcgcatctgattggtcgctcc

SEQ ID NO: 642262 - DNA, 75 bp, synthetic construct
  source 1..75: mol_type = other DNA
ggtagcgcatctgattggtcgctcaaatttcgatgcgatgagcggtcagtattacgcgcgtttcgtggtgaaaaa

SEQ ID NO: 642263 - DNA, 75 bp, synthetic construct
  source 1..75: mol_type = other DNA
atcttatccgtggtgagtttatcgtttttgtacgaagcgaatcttctattaaagattcggagagggccaatggaa

SEQ ID NO: 642264 - DNA, 75 bp, synthetic construct
  source 1..75: mol_type = other DNA
ccggatctgcgccgtgaactgatgcgccagcgtggctatttcgcttacgccactcaccactaccagacgcatcag

SEQ ID NO: 642265 - DNA, 75 bp, synthetic construct
  source 1..75: mol_type = other DNA
atgaaaatcgacgagcaaaacatgcagggcggaaactcgctgctgctgcatctcgatgactgggaacatctggac

SEQ ID NO: 642266 - DNA, 75 bp, synthetic construct
  source 1..75: mol_type = other DNA
attataaccttaaataatatgcaggcgattcttgataaaaacgtaacgttttatacaaaagtctccggagaaaag

SEQ ID NO: 642267 - DNA, 75 bp, synthetic construct
  source 1..75: mol_type = other DNA
ggtatcaccaatcgccagcgcgagcattgagaaaattctccgctcctacactgctgatgaactggctgatggcgt

SEQ ID NO: 642268 - DNA, 75 bp, synthetic construct
  source 1..75: mol_type = other DNA
gtgaagtcggtgacgttgccggaagtggtcgtgtatcaatggctcatggtcggacatcacaggcggtaggtgtta

SEQ ID NO: 642269 - DNA, 75 bp, synthetic construct
  source 1..75: mol_type = other DNA
tgctgctcagcatactggtgttaccgctgactatcccattactcatctttgccaccgccgcgatggacgcggctt

SEQ ID NO: 642270 - DNA, 75 bp, synthetic construct
  source 1..75: mol_type = other DNA
ctgtgtatatcatcggctccggtcaggtatcaccaatcgccagcgcgagcattgagaaaatactacgctcctaca

SEQ ID NO: 642271 - DNA, 75 bp, synthetic construct
  source 1..75: mol_type = other DNA
aatgtcggcttcaaacttcgcgttatcacgaagtcacctgtcactctgtctggcgctcagataaggattgagtaa

SEQ ID NO: 642272 - DNA, 75 bp, synthetic construct
  source 1..75: mol_type = other DNA
cgacattacgcgcttacgtgggcgttatgcgtggtcaaaagacggaactgattcatggtttatcactgaccttga

SEQ ID NO: 642273 - DNA, 75 bp, synthetic construct
  source 1..75: mol_type = other DNA
gagcgttatgttcaggataaagcgcgtacggctggcgtggagaatgattatctggtcaatatccgtaaggcacct

SEQ ID NO: 642274 - DNA, 75 bp, synthetic construct
  source 1..75: mol_type = other DNA
gaaatggataatcctgcgttctctgaagatgtggcaacggagaccattaacaccctggctgacggagagcgtatt

SEQ ID NO: 642275 - DNA, 75 bp, synthetic construct
  source 1..75: mol_type = other DNA
aactcattacctgagctggcacagcaggcagaagtacgccgacagacaggagaagttcgcgacatcccgcatgct

SEQ ID NO: 642276 - DNA, 75 bp, synthetic construct
  source 1..75: mol_type = other DNA
tggttcttcctgattgtaattaccctttttccgctcagtatcggtccggagccgcaactgctggcacgtattgca

SEQ ID NO: 642277 - DNA, 75 bp, synthetic construct
  source 1..75: mol_type = other DNA
gccgcaactgctggcgcgtattgcgccgggcattatctgggttgctgcgctgctttcatccttgctggcactgga

SEQ ID NO: 642278 - DNA, 75 bp, synthetic construct
  source 1..75: mol_type = other DNA
tcactgcctgagctcgcacagcaggcagaagtacgccgacaggccggaggaaatcgtgacatcccgcagcctgag

SEQ ID NO: 642279 - DNA, 75 bp, synthetic construct
  source 1..75: mol_type = other DNA
aagcgttcagatgtggatggagtatcgcgaggggttgagtacaacaccgctcagaatgctgtatatcgcgtctgt

SEQ ID NO: 642280 - DNA, 75 bp, synthetic construct
  source 1..75: mol_type = other DNA
ttaacattgggcgcatcaacgggcgtttactggatctggagctttccgcgctcgaacaaaaacagcaactggata

SEQ ID NO: 642281 - DNA, 75 bp, synthetic construct
  source 1..75: mol_type = other DNA
gaagcaggcactacaaactgtagtgaaaagcgccggactgataacgcgccaggagggcaacattctctcagtgca

SEQ ID NO: 642282 - DNA, 75 bp, synthetic construct
  source 1..75: mol_type = other DNA
ggcgacaacgcatatcgggtttaacattgggcggattagcggacgtttgctggatctggaactgtctgcactcga

SEQ ID NO: 642283 - DNA, 75 bp, synthetic construct
  source 1..75: mol_type = other DNA
attgtggtgcaacgcgcagtacgcctgcgtcatgaactggctctggactggccggggatcgcggtggcgctgacg

SEQ ID NO: 642284 - DNA, 75 bp, synthetic construct
  source 1..75: mol_type = other DNA
ttaatggatgatattgcgcacctgaagcaggaaaaccgcctgctgcgccagcggctttcccggtttgtagctcat

SEQ ID NO: 642285 - DNA, 75 bp, synthetic construct
  source 1..75: mol_type = other DNA
tcttcaggaagctgagcgggcacgggcgcaggctaatctaccgctggaaaatcgcaatattaccttgcagtacgc

SEQ ID NO: 642286 - DNA, 75 bp, synthetic construct
  source 1..75: mol_type = other DNA
aagaaatcctgaacagcagcggatatcttcgctcattcccgggcattgccaaacgttctgatgtgaacggtgtat

SEQ ID NO: 642287 - DNA, 75 bp, synthetic construct
  source 1..75: mol_type = other DNA
aatcgccagcgcgagcattgagaaaattcttcgctcctacactgctgatgaactggctgatggtgtgatggaatc

SEQ ID NO: 642288 - DNA, 75 bp, synthetic construct
  source 1..75: mol_type = other DNA
acgtgtggcgataagctggaatctgttaccgggaaattgcaattcgatatcagcagccagtacgacaagcaacag

SEQ ID NO: 642289 - DNA, 75 bp, synthetic construct
  source 1..75: mol_type = other DNA
taaaggctgataacgttttaataaatgaccttgaattagaaacatctggcggcgtgtgtgatagaatagatagaa

SEQ ID NO: 642290 - DNA, 75 bp, synthetic construct
  source 1..75: mol_type = other DNA
gagcatattttatattcccctctaataaaggctgataacgttttaataaatgaccttgaattagaaacatctggc

SEQ ID NO: 642291 - DNA, 75 bp, synthetic construct
  source 1..75: mol_type = other DNA
atcttcaagcgctaatggtccgcaatggtgtgtgctgaaaacaggcctgtataacgatgtgtaccgcgctatcga

SEQ ID NO: 642292 - DNA, 75 bp, synthetic construct
  source 1..75: mol_type = other DNA
caccagtacggaagatgagattaaaatcaccgcgaagaagaaaatcacccttaacggcggtggcagctacatccg

SEQ ID NO: 642293 - DNA, 75 bp, synthetic construct
  source 1..75: mol_type = other DNA
cagtgaacggatggcattcaagctgcaccgtcagggaatgattatgaacaccatcgggcagaacacggcggtctg

SEQ ID NO: 642294 - DNA, 75 bp, synthetic construct
  source 1..75: mol_type = other DNA
tgtgacccgtgagccaggcgtgatggtgaacatgggcggttttaaaatcaatctcgggcgcacgggtaccggcac

SEQ ID NO: 642295 - DNA, 75 bp, synthetic construct
  source 1..75: mol_type = other DNA
atgaagcgaagcctgtggctactgatgttattccttctcgcaggttatgtccctgtggcgtcagcggatgcggcc

SEQ ID NO: 642296 - DNA, 75 bp, synthetic construct
  source 1..75: mol_type = other DNA
tggtgaatatgtacccggacagcgggcagtgccatccgttcggacgcagtgtgatgcgctgggagacgggaaaaa

SEQ ID NO: 642297 - DNA, 75 bp, synthetic construct
  source 1..75: mol_type = other DNA
ctgaccaccatcctcaatccggaggcggtcatttttgcaaatccgatagcacagggagcctgtgcggcggatgcc

SEQ ID NO: 642298 - DNA, 75 bp, synthetic construct
  source 1..75: mol_type = other DNA
cagtgaacgcatggcattcaagctgcaccgtcagggcatgattatgggtaagcgtcaacggagcaccgtattgac

SEQ ID NO: 642299 - DNA, 75 bp, synthetic construct
  source 1..75: mol_type = other DNA
ggctgatgttgttatgcctgaccggtacggccagagccgcttcggctgaatgtgaaggcaattttgttaatccaa

SEQ ID NO: 642300 - DNA, 75 bp, synthetic construct
  source 1..75: mol_type = other DNA
gtgacaggaggttatgataaacaagcgatgtctgacgcgattaaacatgcgcggaaagaaaccgataaattcatc

SEQ ID NO: 642301 - DNA, 75 bp, synthetic construct
  source 1..75: mol_type = other DNA
cgctgatgttgttatgcctgaccggtacggccagagccgcttcggctgaatgtgaaggtaattttgttaatccta

SEQ ID NO: 642302 - DNA, 75 bp, synthetic construct
  source 1..75: mol_type = other DNA
tcaccgatatctgctggagctgtattttcccgctgtcgctgggcagcacaaaagtgagtcagggaaaggtaccgg

SEQ ID NO: 642303 - DNA, 75 bp, synthetic construct
  source 1..75: mol_type = other DNA
ttcaaactacaccgtcagggcatgattatggaaaccatcgggaaaaataacgccgtctgtaatgaatatccgtcc

SEQ ID NO: 642304 - DNA, 75 bp, synthetic construct
  source 1..75: mol_type = other DNA
gtgaatctggggggctttaatatcaatattggtaatgtgggcagcggcagtggtggtcaggaaagccgcgccaaa

SEQ ID NO: 642305 - DNA, 75 bp, synthetic construct
  source 1..75: mol_type = other DNA
gattcaatctgtcaatgcaacacccctttcaattatctctttcggtgttttgaacttcagtgtctttctcggtct

SEQ ID NO: 642306 - DNA, 75 bp, synthetic construct
  source 1..75: mol_type = other DNA
agagctataacgccttaagctgttatgaaagtatttccgcgacggtttcacagaattttgtcggctggaatatga

SEQ ID NO: 642307 - DNA, 75 bp, synthetic construct
  source 1..75: mol_type = other DNA
tggcggtctgacagacggaaatgcccagtggttcttacaggcaggtaaaaccacatcacaggtttctgatgatga

SEQ ID NO: 642308 - DNA, 75 bp, synthetic construct
  source 1..75: mol_type = other DNA
tggcagttatcgcataccttttataacgactcattcagccataaagagcttggcgtgaccgtcggcggtttgaac

SEQ ID NO: 642309 - DNA, 75 bp, synthetic construct
  source 1..75: mol_type = other DNA
ttttaatcgcggcaaattacgagcagcttaaaccctatattgatgacagcatgctgacgaaagcgcagcgtgaaa

SEQ ID NO: 642310 - DNA, 75 bp, synthetic construct
  source 1..75: mol_type = other DNA
gtgcggagttcccggttgtgcctggtgagacgggggggcgtttaaatccttcagaaatccgcgatgccctgacgg

SEQ ID NO: 642311 - DNA, 75 bp, synthetic construct
  source 1..75: mol_type = other DNA
ttttaatcgcggcaaattacgagcagctcaaaccttatattgatgacagtatgatgacggacgcgcagcgtgaat

SEQ ID NO: 642312 - DNA, 75 bp, synthetic construct
  source 1..75: mol_type = other DNA
actggtggatgtgaaaggcttctctgaacaggatgaagatagtcaggatctgcaactcgaagcgcgggtggcagg

SEQ ID NO: 642313 - DNA, 75 bp, synthetic construct
  source 1..75: mol_type = other DNA
agagtcgattcaggttcaggcgcagttaaaacagcctaaattacgcgaaagtgtgcaaacggcgcaaagggaggt

SEQ ID NO: 642314 - DNA, 75 bp, synthetic construct
  source 1..75: mol_type = other DNA
atgaatggttatttaacctctatggcaggtctgctacaggtattactgttgttctggggggggggcactggtgtg

SEQ ID NO: 642315 - DNA, 75 bp, synthetic construct
  source 1..75: mol_type = other DNA
ggcggcaaaggcgatatgcaacaggccaactggagtcatccgggatggccgacgttgggcttttatcggaccaac

SEQ ID NO: 642316 - DNA, 75 bp, synthetic construct
  source 1..75: mol_type = other DNA
gaacaggatgaagagagccaggatctgcaattcgaagctcgggttgcgggcagcagaactctgcaacttggtcaa

SEQ ID NO: 642317 - DNA, 75 bp, synthetic construct
  source 1..75: mol_type = other DNA
aagctgttatgaaagcatatccgctacgatttcacagaatcttatcggctggaacatgatgctgggttatacccg

SEQ ID NO: 642318 - DNA, 75 bp, synthetic construct
  source 1..75: mol_type = other DNA
cgaccccacctggacggacagcagcctgaccaccattctcaacccggaggcggtcatttttgccaatccgatagc

SEQ ID NO: 642319 - DNA, 75 bp, synthetic construct
  source 1..75: mol_type = other DNA
accaaaccgcatcgcccgtattcgttctcaagactatgtccgtgatgctgacaagttgttccattctgatgctgt

SEQ ID NO: 642320 - DNA, 75 bp, synthetic construct
  source 1..75: mol_type = other DNA
ataagctctttcattcagacgctgtaccaattgatcatctgatagcaccagagcagttggttatcgataatattt

SEQ ID NO: 642321 - DNA, 75 bp, synthetic construct
  source 1..75: mol_type = other DNA
aagcctattatggcggcccgctgattggtaatgcactttcgaccatgcgcgagcatatgccacatatcgatactc

SEQ ID NO: 642322 - DNA, 75 bp, synthetic construct
  source 1..75: mol_type = other DNA
tacctgccgccgctgttccagcgttggtttggtgtgaacctgatcgtttcccgtaagatggtcgtaacgctgggt

SEQ ID NO: 642323 - DNA, 75 bp, synthetic construct
  source 1..75: mol_type = other DNA
caccgcagtctgacggaacatgtcaggtaacagccaaagaatatcgcgactctttctatcaatatgataatgcca

SEQ ID NO: 642324 - DNA, 75 bp, synthetic construct
  source 1..75: mol_type = other DNA
tgatgtcatgatagccaatgataatttgcgcattgagcaaggcgatcacgtgattatgttcctgacagataaaaa

SEQ ID NO: 642325 - DNA, 75 bp, synthetic construct
  source 1..75: mol_type = other DNA
gtcgtaaagatctgaccaaaatcgttcgtggtgaagcagaacaagcgcgtgttgcagtacgtaacgtgcgtcgtg

SEQ ID NO: 642326 - DNA, 75 bp, synthetic construct
  source 1..75: mol_type = other DNA
ccctcgttgcagactatgtgaatatgcccggcctgctggcggtgataaacgatggcctgaccgggtcaggattac

SEQ ID NO: 642327 - DNA, 75 bp, synthetic construct
  source 1..75: mol_type = other DNA
cgtttaacgggctggatgatggcaacgatgatgacgatgaaggcaatgcgttgcctgagtcgtgggttgaggggg

SEQ ID NO: 642328 - DNA, 75 bp, synthetic construct
  source 1..75: mol_type = other DNA
ttagtcacgtgcgaaaagccgatattgttggtgtttcctcattgcgccgcggtgttgcagaagctattgaagctg

SEQ ID NO: 642329 - DNA, 75 bp, synthetic construct
  source 1..75: mol_type = other DNA
tgccaaacgtatgggtgcgaaaaaggtgatggtattgatccagcgtcgcgcttatgtggatctggttcaggggag

SEQ ID NO: 642330 - DNA, 75 bp, synthetic construct
  source 1..75: mol_type = other DNA
gttgcagtacgtaacgtgcgtcgtgacgcgaacgacaaagtgaaagcactgttgaaagataaagagatcagcgaa

SEQ ID NO: 642331 - DNA, 75 bp, synthetic construct
  source 1..75: mol_type = other DNA
tggttatctggaccgtgttgcagaacaaaccggcgattgaggtggcgcaggaaacacataacgatcccgcaccgc

SEQ ID NO: 642332 - DNA, 75 bp, synthetic construct
  source 1..75: mol_type = other DNA
aaccattcaggagaccccctacggtctgctgttcacaccagcccttcactctctgtctgaaggcattcatggttt

SEQ ID NO: 642333 - DNA, 75 bp, synthetic construct
  source 1..75: mol_type = other DNA
atgaaatgtaaaatcattgctgccattgccatgctgacagcagcatcatgcggatacgcagcagaacaggaagtc

SEQ ID NO: 642334 - DNA, 75 bp, synthetic construct
  source 1..75: mol_type = other DNA
atgaaaaaatttgctttactggcgggtctgtttgttttcgcaccaatgacctgggcgcaggactacaatattaaa

SEQ ID NO: 642335 - DNA, 75 bp, synthetic construct
  source 1..75: mol_type = other DNA
ccatcctgtttgccaaccccatcgcacagggggcgtgcgcggctgacgctatggccagcgcgtttcatatgccac

SEQ ID NO: 642336 - DNA, 75 bp, synthetic construct
  source 1..75: mol_type = other DNA
ttcactggtacaagtacccgctgacctactggctgaacatcatcacctccgcaggctgtctggaaggcggagaca

SEQ ID NO: 642337 - DNA, 75 bp, synthetic construct
  source 1..75: mol_type = other DNA
agcaaaaagctttatcgtccgtgggctgggaaatgaagagtcgttctgttcgtgcagccacggtgccgggcgggt

SEQ ID NO: 642338 - DNA, 75 bp, synthetic construct
  source 1..75: mol_type = other DNA
ttcagtcgccccctctcttgattctatccgcgaaaacccaaacaacggacgctccatttcacaggttcgcgccgc

SEQ ID NO: 642339 - DNA, 75 bp, synthetic construct
  source 1..75: mol_type = other DNA
tgtactggatgtgctgggtacgaaaatcggttatgcaatgtttgctgtactgtgggccgtgttctgtggtgcaac

SEQ ID NO: 642340 - DNA, 75 bp, synthetic construct
  source 1..75: mol_type = other DNA
atctgggcgatggcatggctgattttctataaacatccgcgcgaccagaaacatctgaccgatgaagaacgcgac

SEQ ID NO: 642341 - DNA, 75 bp, synthetic construct
  source 1..75: mol_type = other DNA
atgaaaaaatttgctttactggctggactgtttgttttcgcaccaatgacctgggcgcaggattataatattaag

SEQ ID NO: 642342 - DNA, 75 bp, synthetic construct
  source 1..75: mol_type = other DNA
ccgcgcgttcagacaatcaaccactgtatgccattgccacggtgacaggcactgaacgtgacccgcaatgccgct

SEQ ID NO: 642343 - DNA, 75 bp, synthetic construct
  source 1..75: mol_type = other DNA
ttacattaactaacgagatggctgacatggtgcgcgcccgtgtggcttccggtgcctatgcttcagaaagtgagg

SEQ ID NO: 642344 - DNA, 75 bp, synthetic construct
  source 1..75: mol_type = other DNA
agcaatgaatatattggtaaaccccaggacgcttatctctggcaagttaccgcatgttttagaagactacggaga

SEQ ID NO: 642345 - DNA, 75 bp, synthetic construct
  source 1..75: mol_type = other DNA
tttttaacccaatcaaacattgaccacacggtaaatagctgcgcggttggcgaatacaaaagcgagttgagcggt

SEQ ID NO: 642346 - DNA, 75 bp, synthetic construct
  source 1..75: mol_type = other DNA
aaattttgcttcgctaaataatgttctgaccagcattgctgtcccctatgcgaaaatgccagaaatatttaagaa

SEQ ID NO: 642347 - DNA, 75 bp, synthetic construct
  source 1..75: mol_type = other DNA
cgccgcaaagcatcgccatcgcagtttctgccaccaaaatggacggtcaggccaaccagattatgtctggcacca

SEQ ID NO: 642348 - DNA, 75 bp, synthetic construct
  source 1..75: mol_type = other DNA
ctcttcacgcttaaatgcaaataaattcccggtcgttatcgactggttaagtaaagggttaattaaaccagaaaa

SEQ ID NO: 642349 - DNA, 75 bp, synthetic construct
  source 1..75: mol_type = other DNA
aggggttcgtaaaagaatgtcaggggaatactcttggagaaggtagcgtcgtagttcacacaacgacaaaaacat

SEQ ID NO: 642350 - DNA, 75 bp, synthetic construct
  source 1..75: mol_type = other DNA
agcaatatgatattgcagagagacagctaatcgcgtctgaaaatgcaagacaagaggctgttagtcgagaaaagt

SEQ ID NO: 642351 - DNA, 75 bp, synthetic construct
  source 1..75: mol_type = other DNA
atgaaagataaagtattatcatttctctttgctggaataattaccgtaacatcaccatcaatctttgcatctggt

SEQ ID NO: 642352 - DNA, 75 bp, synthetic construct
  source 1..75: mol_type = other DNA
atatactgaggatagcgggtttattcacctgctattgctataaagacgatgaggaaattacatcaatagcgcttt

SEQ ID NO: 642353 - DNA, 75 bp, synthetic construct
  source 1..75: mol_type = other DNA
aactatttatagcaagcgtgagcttttttctgaagagagatatgcggaaattttaacggcggcatttaatgaaaa

SEQ ID NO: 642354 - DNA, 75 bp, synthetic construct
  source 1..75: mol_type = other DNA
agttcaataaatcaatgtataagcgggcggaacgtgttcaatcgttacagtcattatttgcaaatgccactacgc

SEQ ID NO: 642355 - DNA, 75 bp, synthetic construct
  source 1..75: mol_type = other DNA
gcaggaaagggcgaagagactcacaaatttacaaaaagaattttctaatgccgacactccacagaaaaaagcaga

SEQ ID NO: 642356 - DNA, 75 bp, synthetic construct
  source 1..75: mol_type = other DNA
cggatttattaaaacccgtgagctgagcgctttgcgtaaagaaatgaaactatacgtggatcgcatggaagcggc

SEQ ID NO: 642357 - DNA, 75 bp, synthetic construct
  source 1..75: mol_type = other DNA
cctccggagctatgcagaaatcggctaatggatatgatatttctgatgtatcagccttccgaaatgcgctccagt

SEQ ID NO: 642358 - DNA, 75 bp, synthetic construct
  source 1..75: mol_type = other DNA
cgcaactggacagtggcaaactcgattgcgtgatcctcgcgctggtgaaagagagcgaagcattcattgaagtgc

SEQ ID NO: 642359 - DNA, 75 bp, synthetic construct
  source 1..75: mol_type = other DNA
taaagcgggcaatgcgcgagtgattgtggaatggcgcggctggcgtattttgccgctggtgtgctacgacttacg

SEQ ID NO: 642360 - DNA, 75 bp, synthetic construct
  source 1..75: mol_type = other DNA
ggtaattagtaaagaagaatttatgctgttgcagtcagatcataagcaaaataaaccaggatataaatctgaaca

SEQ ID NO: 642361 - DNA, 75 bp, synthetic construct
  source 1..75: mol_type = other DNA
aacaaaagtttattatacagtcccttatggttcaaaatctattaattcaaaatatgcgaaagaaattctagagga

SEQ ID NO: 642362 - DNA, 75 bp, synthetic construct
  source 1..75: mol_type = other DNA
tttatagactctatttttcagaaagaacccaaacttaaagctagaggtatttcaggacatttaactcttgatgca

SEQ ID NO: 642363 - DNA, 75 bp, synthetic construct
  source 1..75: mol_type = other DNA
ggtatgtttgctttacctgttgatcttgccggtgcctggtttttctggggtgcctttatccttatcattgcctgg

SEQ ID NO: 642364 - DNA, 75 bp, synthetic construct
  source 1..75: mol_type = other DNA
agtacttgctgaacaggtaaatttacccgtaacaaccctcagtgggacgattattcttcagttggcagcgttcaa

SEQ ID NO: 642365 - DNA, 75 bp, synthetic construct
  source 1..75: mol_type = other DNA
gccgattgtgattgtcatcctggcagccatttacagctataacctgatgaatgcgacaaaaagcatggatattct

SEQ ID NO: 642366 - DNA, 75 bp, synthetic construct
  source 1..75: mol_type = other DNA
ggtatggctccggctctgattttgtccggtgctttactgctggtgggtgcactggttatggtcagaagggggacg

SEQ ID NO: 642367 - DNA, 75 bp, synthetic construct
  source 1..75: mol_type = other DNA
cgctgctggcgttagtgatttatctcttctggttgtactgcacaatggggaatattccgcgtgaaagctttaaag

SEQ ID NO: 642368 - DNA, 75 bp, synthetic construct
  source 1..75: mol_type = other DNA
gcgcaatcattagtgaaacaatatcaatgaatttggattatcacgcaaatccacgcattgtcgggatctgcacag

SEQ ID NO: 642369 - DNA, 75 bp, synthetic construct
  source 1..75: mol_type = other DNA
ttaagattgaaagaaaagcgcttgcaggaggggagtgggaacacatcagagatattgttctgaaagcaggttcta

SEQ ID NO: 642370 - DNA, 75 bp, synthetic construct
  source 1..75: mol_type = other DNA
tatatcgaatcagcggcaggaaccgccgccgggggtaaaacagggttaaccgcaaccgtagtgggggcgttattc

SEQ ID NO: 642371 - DNA, 75 bp, synthetic construct
  source 1..75: mol_type = other DNA
tccagccaaccgtacttccgagtgtactggcgctggtgatgaccgccgtgtttgacgccactggcaccatccgtg

SEQ ID NO: 642372 - DNA, 75 bp, synthetic construct
  source 1..75: mol_type = other DNA
tcgtaggccgcgtctttgcacgcgaatggcaaaagctgaatattggtacggtgatcattactgccgcactggtcg

SEQ ID NO: 642373 - DNA, 75 bp, synthetic construct
  source 1..75: mol_type = other DNA
tgcgcaatctctgtcggcgtggctacgctactcaggtagggcgaatgactaacccactactttcattctgtgatg

SEQ ID NO: 642374 - DNA, 75 bp, synthetic construct
  source 1..75: mol_type = other DNA
ccctgtacgtcgccaactggcctgctccgcgctctctgcactggcaggcattgctgacggcccgcgcgattgaga

SEQ ID NO: 642375 - DNA, 75 bp, synthetic construct
  source 1..75: mol_type = other DNA
ctgattgctggcagtgttgcattacaaacggagtctgattcggttaaccgctttttgctggttgagccgggcggc

SEQ ID NO: 642376 - DNA, 75 bp, synthetic construct
  source 1..75: mol_type = other DNA
cttctcagcacaaagtatccccggaggtaaagcgacagcgatcgtttccattaaagagttcttggccaaagtcga

SEQ ID NO: 642377 - DNA, 75 bp, synthetic construct
  source 1..75: mol_type = other DNA
ttgctgacagcccgcgcgattgagaatcaggcgtatgtggcgggatgcaatcgcgtcggcagcgatggcaacggc

SEQ ID NO: 642378 - DNA, 75 bp, synthetic construct
  source 1..75: mol_type = other DNA
cagtaagttcaatattctccggcctggtgggcgcagcgcccgcagcggtttatatcgaatcagcggcaggaaccg

SEQ ID NO: 642379 - DNA, 75 bp, synthetic construct
  source 1..75: mol_type = other DNA
ttgccagtggcgctcggtgcgtttacctccttcccggtgatgatgagcttactggggctggcggtcatcttcggt

SEQ ID NO: 642380 - DNA, 75 bp, synthetic construct
  source 1..75: mol_type = other DNA
atcgttctgacttgtaatatcgttaccggtattatgctgggctttgtgacactggtcgtaggccgcgtctttgca

SEQ ID NO: 642381 - DNA, 75 bp, synthetic construct
  source 1..75: mol_type = other DNA
atgtatcaaaaattcgtgcgctggtggatgaggcaaacttgctgatcggctttgtcatggcggatacagggaagg

SEQ ID NO: 642382 - DNA, 75 bp, synthetic construct
  source 1..75: mol_type = other DNA
gaactcaatcaggtatgcgctgacatgaaacgggataaaaacatcgccagtttgtttggtaccgggctgagtgag

SEQ ID NO: 642383 - DNA, 75 bp, synthetic construct
  source 1..75: mol_type = other DNA
caaacaaagtaaaccccaaaatccgcgacaaggtgattcagtatcaggaagagtgtgacgatgttctctacgaat

SEQ ID NO: 642384 - DNA, 75 bp, synthetic construct
  source 1..75: mol_type = other DNA
ccaacaaagtaaaacccgaaatccgcgataaggtcatccggtatcaggaagagtgcgacgatgttctttacgagt

SEQ ID NO: 642385 - DNA, 75 bp, synthetic construct
  source 1..75: mol_type = other DNA
tgcggaatcgggggaggggaaaaccaccatcaataaactggtcatgaaaccctgttacgaatttgcagcatcact

SEQ ID NO: 642386 - DNA, 75 bp, synthetic construct
  source 1..75: mol_type = other DNA
tcccaatcgtctgagaagagcagaaaaacttacacctgtactcaatcagttaatcgctcagaattatttccgtat

SEQ ID NO: 642387 - DNA, 75 bp, synthetic construct
  source 1..75: mol_type = other DNA
ataaaagaagcgaatatgctgattgattttgtcctggctgatacaggcaaagggaaaataacaaaggcggattga

SEQ ID NO: 642388 - DNA, 75 bp, synthetic construct
  source 1..75: mol_type = other DNA
acaaagttaaacctgaaatccgcgacaaggtaatccagtatcaggaagagtgcgacgatgttctctatgaatact

SEQ ID NO: 642389 - DNA, 75 bp, synthetic construct
  source 1..75: mol_type = other DNA
tataaaacgctaagagagctatgtgagcaatacaattccccctcaaatgaggctcttaagactttgtatattaca

SEQ ID NO: 642390 - DNA, 75 bp, synthetic construct
  source 1..75: mol_type = other DNA
tctggcctgtctgaaccatctgttcagacagtatgacgtcgattatcgtgtgaagtcatcgatatataaaaccat

SEQ ID NO: 642391 - DNA, 75 bp, synthetic construct
  source 1..75: mol_type = other DNA
ttcggcgcaagtccatcttatagcagtgctaaggaaatattgtcagagacactcggtgaatattgtattcacaac

SEQ ID NO: 642392 - DNA, 75 bp, synthetic construct
  source 1..75: mol_type = other DNA
aacggaacatacataagggaggattactttagctcgggtgagtattttattttgaatttatttagaatgattgag

SEQ ID NO: 642393 - DNA, 75 bp, synthetic construct
  source 1..75: mol_type = other DNA
aaatccagcatgttgaacatatgtcatttgctattgatctttctgaaaataaactgacttgcattgtaggaaaga

SEQ ID NO: 642394 - DNA, 75 bp, synthetic construct
  source 1..75: mol_type = other DNA
gatgcggtggtggcgaaatatgatgaattaaaaaccagcacgctgccggaagatgccaaagagaagtttctgctg

SEQ ID NO: 642395 - DNA, 75 bp, synthetic construct
  source 1..75: mol_type = other DNA
cgggtatcaggctgattgccaataaaggtgcagtatcggtacaggcgcagcacgatttgatggagttactggcga

SEQ ID NO: 642396 - DNA, 75 bp, synthetic construct
  source 1..75: mol_type = other DNA
gccggggctggaaatcagggtccagagcgacgacgcgcctgcggtatttcgcaagggcgtactgattaccggcgt

SEQ ID NO: 642397 - DNA, 75 bp, synthetic construct
  source 1..75: mol_type = other DNA
gcccgttacgcctgtcggctcagatcaccgatgacgccattgccacattgcgctttgcgccgaagccgtttaacg

SEQ ID NO: 642398 - DNA, 75 bp, synthetic construct
  source 1..75: mol_type = other DNA
gcggatttgctggaaggcattatcgccctgcccaccgatatgttttacaacaccggtatcgctacctatgtgtgg

SEQ ID NO: 642399 - DNA, 75 bp, synthetic construct
  source 1..75: mol_type = other DNA
gatggggcagaacgacatcaaagccaacctggagaattacgtccagtcgttctcgcccgatgcgcgtgaaatctt

SEQ ID NO: 642400 - DNA, 75 bp, synthetic construct
  source 1..75: mol_type = other DNA
gacgccaccgggggcgataacaccacctacggcgaagcctaccactatgccgacaacttcctgcaaaaaggcgat

SEQ ID NO: 642401 - DNA, 75 bp, synthetic construct
  source 1..75: mol_type = other DNA
aactacaagcgcaacgtgctacgcaccccggcgaacaacaaaatccgcctcgacgatgagcgcggcaaagagcat

SEQ ID NO: 642402 - DNA, 75 bp, synthetic construct
  source 1..75: mol_type = other DNA
tgttccgcaagggcgtactgattaccggcgtgacggccagcgcggcgcgtgaccgcagctatgaactgacgttta

SEQ ID NO: 642403 - DNA, 75 bp, synthetic construct
  source 1..75: mol_type = other DNA
atatttatcagcgccgatgcgcaggacaaggcgcagggtcaggtcagagagatggccgacattatcagcgaactg

SEQ ID NO: 642404 - DNA, 75 bp, synthetic construct
  source 1..75: mol_type = other DNA
actacaactaccgcaccgccacagcagagatgatgacagagcagcatgacgccaccgggggcgataacaccacct

SEQ ID NO: 642405 - DNA, 75 bp, synthetic construct
  source 1..75: mol_type = other DNA
gacggcgaacgccgacccggcggatatggccgcgcagatagcattgataaccagccggataaatgacctgaccgc

SEQ ID NO: 642406 - DNA, 75 bp, synthetic construct
  source 1..75: mol_type = other DNA
cgagatccgccgctacattctggaagcggatttgctggaaggcatcatcgccctgcccaccgacatgttttacaa

SEQ ID NO: 642407 - DNA, 75 bp, synthetic construct
  source 1..75: mol_type = other DNA
atgtggtctatagcattgacggcggctttgaagcctggcagcgacagtttcccgcagaggtggcgtacggcgcgt

SEQ ID NO: 642408 - DNA, 75 bp, synthetic construct
  source 1..75: mol_type = other DNA
cctgtagacgatgcaaacgtggtgtttaatgtgcgctctctgctgcctggtgtaactactttcaccattccagga

SEQ ID NO: 642409 - DNA, 75 bp, synthetic construct
  source 1..75: mol_type = other DNA
actaacattgatctgatcaaagtgactgatccgctgctgctggcacatatgaccgctgacgctgtagctgttcct

SEQ ID NO: 642410 - DNA, 75 bp, synthetic construct
  source 1..75: mol_type = other DNA
cctgcgccgaatgaccaatattggaacctttcgtgcctatctgaacgaatatctgcgtaaccatccgcggattcg

SEQ ID NO: 642411 - DNA, 75 bp, synthetic construct
  source 1..75: mol_type = other DNA
taccgcttgagatctacgcgtttaccaacaccgtggtgtggctggaatatgaaagcattcaggctgatatattcg

SEQ ID NO: 642412 - DNA, 75 bp, synthetic construct
  source 1..75: mol_type = other DNA
taagcgtgaacaaggtaaagaatggctggtagaaatcccttatttcctgcgtgaagatatgatcaaaccgcaaga

SEQ ID NO: 642413 - DNA, 75 bp, synthetic construct
  source 1..75: mol_type = other DNA
gtgtgcgaacgtgtggaaatggagtatggcttcaccactatgagtgtcgtttcgctggcggatctttatggcggt

SEQ ID NO: 642414 - DNA, 75 bp, synthetic construct
  source 1..75: mol_type = other DNA
ggaagcccaggagaaaatgatcctgcgggcgactaatggcctcacgttcttcaatgcctcagcgatggatctcag

SEQ ID NO: 642415 - DNA, 75 bp, synthetic construct
  source 1..75: mol_type = other DNA
acttactgttcaaagtggtgcaaatattcgctaaagcagatttataccccgggcgcgtcaccaaccacgacatgg

SEQ ID NO: 642416 - DNA, 75 bp, synthetic construct
  source 1..75: mol_type = other DNA
ccaggctttcgcactcgataaaatgcaaatgggctggatattcagcgccggaatactcggtttgctacccggcgc

SEQ ID NO: 642417 - DNA, 75 bp, synthetic construct
  source 1..75: mol_type = other DNA
tgatgtgaactgcccatggtgtgggaaaggtttgtcctttcagagcgagggtggaaattcagattttaacgttag

SEQ ID NO: 642418 - DNA, 75 bp, synthetic construct
  source 1..75: mol_type = other DNA
ttctttgttatctggcaggccatccccgccccattgccgagttgctggctccaaactgggatacagagcggatca

SEQ ID NO: 642419 - DNA, 75 bp, synthetic construct
  source 1..75: mol_type = other DNA
gtgctgattaccggcgtgacggccagcgcggcccgtgaccgcagctatgaactgacgttcacggcgataccctac

SEQ ID NO: 642420 - DNA, 75 bp, synthetic construct
  source 1..75: mol_type = other DNA
gatgcacgctccgaaaggggtggcggtcgccagcggcgagcacctgcaactggccgccgtgaaaaacctccagat

SEQ ID NO: 642421 - DNA, 75 bp, synthetic construct
  source 1..75: mol_type = other DNA
gatgcacgctccgaaaggcgtggcggtcgccagcggcgagcacctgcaactggccgcggtgaaaaacctccagat

SEQ ID NO: 642422 - DNA, 75 bp, synthetic construct
  source 1..75: mol_type = other DNA
gatgcacgcaccgaaaggtgtggcggtcgccagcggcgagcacctgcaactggccgcagtgaaaaacctccagat

SEQ ID NO: 642423 - DNA, 75 bp, synthetic construct
  source 1..75: mol_type = other DNA
tggccgccgtgaaaaacctccagataaatgcgggaaacaacgccgatatcggcgtcgtgaagaatatgtttatcg

SEQ ID NO: 642424 - DNA, 75 bp, synthetic construct
  source 1..75: mol_type = other DNA
gatgcacgcgccgaaaggcgtggcggtcgccagcggcgagcacctgcaactggccgctgtgaaaaacctccagat

SEQ ID NO: 642425 - DNA, 75 bp, synthetic construct
  source 1..75: mol_type = other DNA
gatgcacgccccgaaaggggtggcggtcgccagcggcgagcacctgcaactggccgctgtgaaaaacctccagat

SEQ ID NO: 642426 - DNA, 75 bp, synthetic construct
  source 1..75: mol_type = other DNA
gcggcaagagccagttaaacctcggccatctggtggatgccgggaaacagcagcgcggggaaggctttgaactgc

SEQ ID NO: 642427 - DNA, 75 bp, synthetic construct
  source 1..75: mol_type = other DNA
ggacttcgtgtttaacctcaaaagcgaatacccgtcccgtgaacaggtgatgcagtacggtgaggacgacctgac

SEQ ID NO: 642428 - DNA, 75 bp, synthetic construct
  source 1..75: mol_type = other DNA
ccgtatgcgggagacacctacggcctgcatctgccgctgctggcgggaacggaagtcagcatcgcgtttgaggaa

SEQ ID NO: 642429 - DNA, 75 bp, synthetic construct
  source 1..75: mol_type = other DNA
cagaactacaagcgcaacgtgctgcgtaccccggccaacaacaaaatccggctggatgacgagcgcgggaaggag

SEQ ID NO: 642430 - DNA, 75 bp, synthetic construct
  source 1..75: mol_type = other DNA
gaagtgcgtcttgaaccccgtatggcgctgctggcccgcagccgtcagaacgccatttaccagaatctgacggta

SEQ ID NO: 642431 - DNA, 75 bp, synthetic construct
  source 1..75: mol_type = other DNA
cagaactacaagcgcaacgtactgcgtaccccggccaacaacaaaatccggctggatgacgaacgcgggaaggag

SEQ ID NO: 642432 - DNA, 75 bp, synthetic construct
  source 1..75: mol_type = other DNA
tcgcgcccgtatgcgggagacacctacggcctgcacttgccgctgctggcgggaacggaagtgagtatcgccttt

SEQ ID NO: 642433 - DNA, 75 bp, synthetic construct
  source 1..75: mol_type = other DNA
ccggctggatgcctgcggaatagaagcgggaacgccgggagaatataacgttaaggcgggatattatgggcgtaa

SEQ ID NO: 642434 - DNA, 75 bp, synthetic construct
  source 1..75: mol_type = other DNA
cccggaccgaccttatattgcaggcgtaaaacacgactcggcacacactgaccatgtgaccattcagaactacaa

SEQ ID NO: 642435 - DNA, 75 bp, synthetic construct
  source 1..75: mol_type = other DNA
cgccatctaccagaagcagacggtgccgcaaatcgtcgaaaaaatcctgcgcgagcggcatcatatgcgcggtca

SEQ ID NO: 642436 - DNA, 75 bp, synthetic construct
  source 1..75: mol_type = other DNA
atactgattccaaacaaacaattgatgtcagattattaaatcaaaatatagacatgatattgggaggcgtgcatg

SEQ ID NO: 642437 - DNA, 75 bp, synthetic construct
  source 1..75: mol_type = other DNA
tgaaaatggaaatacagaactaatatcctctgataaggaggaggtcgttaatattagtgtgtttgaacccgatga

SEQ ID NO: 642438 - DNA, 75 bp, synthetic construct
  source 1..75: mol_type = other DNA
gccagtgcggggacagtggagcttaattccggtattggtggcctttccgttgattttgagccaacagccctcctg

SEQ ID NO: 642439 - DNA, 75 bp, synthetic construct
  source 1..75: mol_type = other DNA
cgccatctaccagaatcagacggtgccgcaaatcgtcgaaaaaatcctgcgcgagcgacatcaaatgcgcggtca

SEQ ID NO: 642440 - DNA, 75 bp, synthetic construct
  source 1..75: mol_type = other DNA
cgccatctaccagaaacagacggtgccgcaaatcgtcgaaaaaatcctgcgcgagcgacatcatatgcgcggtca

SEQ ID NO: 642441 - DNA, 75 bp, synthetic construct
  source 1..75: mol_type = other DNA
acggcctgcacttgccgctgctggcgggaacggaagtgagtatcgcctttgaggaaggcaacccggacaggcctt

SEQ ID NO: 642442 - DNA, 75 bp, synthetic construct
  source 1..75: mol_type = other DNA
cgccatctaccagaaccagacggtgccgcaaatcgtcgaaaaaatcctgcgcgagcgccatcatatgcgcggtca

SEQ ID NO: 642443 - DNA, 75 bp, synthetic construct
  source 1..75: mol_type = other DNA
cgccatctaccagaatcagacggtgccgcaaatcgtcgaaaaaatcctgcgcgagcggcatcagatgcgcggtca

SEQ ID NO: 642444 - DNA, 75 bp, synthetic construct
  source 1..75: mol_type = other DNA
cgccatctaccagaatcagacggtgccgcaaatcgtcgaaaaaatcctgcgcgagcgccatcacatgcgcggtca

SEQ ID NO: 642445 - DNA, 75 bp, synthetic construct
  source 1..75: mol_type = other DNA
ccttgttcctgcttattcccttgacatctttttcgcaggaattgggccagcgaatatcacaggatgacagtgcag

SEQ ID NO: 642446 - DNA, 75 bp, synthetic construct
  source 1..75: mol_type = other DNA
taacatgacgctggaaaatccttcaccagagctgctcactgtattgattcgtgaactgaccgggaggggaagatg

SEQ ID NO: 642447 - DNA, 75 bp, synthetic construct
  source 1..75: mol_type = other DNA
cttggtgctgaccagaatctggataattaccagacgccgggtctgtatcaccagacaatgaatgcgaataccagt

SEQ ID NO: 642448 - DNA, 75 bp, synthetic construct
  source 1..75: mol_type = other DNA
tacccggtctcgctggttaccaattacgtcaccatgtcgggtctggtttcctcgatcacctcgcagctctcaggc

SEQ ID NO: 642449 - DNA, 75 bp, synthetic construct
  source 1..75: mol_type = other DNA
ctggtagtgtccggaaactccatcacgctcgttgacgtatcggcgtcaggcggcgatgaggagatcccgccgtcg

SEQ ID NO: 642450 - DNA, 75 bp, synthetic construct
  source 1..75: mol_type = other DNA
ccagtacaaaaaagatgaccataacctgaataatctatggccgctggcacaaaagctgatcctggaagttgatga

SEQ ID NO: 642451 - DNA, 75 bp, synthetic construct
  source 1..75: mol_type = other DNA
acgaatagcgccggggatcattcacacaatattcctgttggcaacactggtgctggtaatggtgtttcggctggt

SEQ ID NO: 642452 - DNA, 75 bp, synthetic construct
  source 1..75: mol_type = other DNA
acatacgctcgctattggttcgcacacacaccattaccattgccgcttatggcaacgcggaaaacaccgtaaaaa

SEQ ID NO: 642453 - DNA, 75 bp, synthetic construct
  source 1..75: mol_type = other DNA
aactgaaagagcatgaacagtcacgacgtcacccggacgcctcactgaccgcaaaaggctttgttcaactcagta

SEQ ID NO: 642454 - DNA, 75 bp, synthetic construct
  source 1..75: mol_type = other DNA
tatgaccttgccagtggtaaatatacggctcaggacgcgagcacggcgcagaaaggtctggtgcagctcagcagc

SEQ ID NO: 642455 - DNA, 75 bp, synthetic construct
  source 1..75: mol_type = other DNA
tttactcagttaagcagcgcgaccaatagtgaatctgaaacgctggccgcaacgccgaaggcggttaaggcagcg

SEQ ID NO: 642456 - DNA, 75 bp, synthetic construct
  source 1..75: mol_type = other DNA
atactgccgaaagttacaagcctaccgttgccgaagggtcaggacgtgcacaaacatttcgcaccattctgaccg

SEQ ID NO: 642457 - DNA, 75 bp, synthetic construct
  source 1..75: mol_type = other DNA
tcatgaacatggcgcagtaactatccatcagtggcttgcgaagaacgttcagggctataagcctgatatgaagca

SEQ ID NO: 642458 - DNA, 75 bp, synthetic construct
  source 1..75: mol_type = other DNA
ctctggtcgccaactacggcacaatgtctggcttgctcgcagcgattaacggcgggttgaatggttctgggctca

SEQ ID NO: 642459 - DNA, 75 bp, synthetic construct
  source 1..75: mol_type = other DNA
ctggcctcgatgtcgatgatgataatgatgaagacgaggatgagaacaaacttcctcctggctggatcgccggtg

SEQ ID NO: 642460 - DNA, 75 bp, synthetic construct
  source 1..75: mol_type = other DNA
ttagggaggctttcgggcgaaaccggatctacccggattacctggtacagccggtaacgcgattcgaccccgctg

SEQ ID NO: 642461 - DNA, 75 bp, synthetic construct
  source 1..75: mol_type = other DNA
acggtctggaaaatgccgacaaacttccctggtgggaaaataagacggtgcaactggtggtaccggcgtcgtatg

SEQ ID NO: 642462 - DNA, 75 bp, synthetic construct
  source 1..75: mol_type = other DNA
cgctgtggcagcgtattcactgattatgatgtcgaatatggataagggagggtattcctctgcttccggtaatgg

SEQ ID NO: 642463 - DNA, 75 bp, synthetic construct
  source 1..75: mol_type = other DNA
tcattttgtccgacgatactccaaccgggaaaacccaaagttgcctgattgacgcgatgatttacgacttccagg

SEQ ID NO: 642464 - DNA, 75 bp, synthetic construct
  source 1..75: mol_type = other DNA
acaagggtaaatgaatatgttctatcagtaatagaacaagcaaaattcagcaatatcatgctaaacgccccatcc

SEQ ID NO: 642465 - DNA, 75 bp, synthetic construct
  source 1..75: mol_type = other DNA
gtaccgtcagcaacggctgactcacaccaccacaacggaaatggatgctctctgttataacgttggcgacagaat

SEQ ID NO: 642466 - DNA, 75 bp, synthetic construct
  source 1..75: mol_type = other DNA
cgaagtaaacttctacttcccaaacggaatttgtgggtacaacaaaaaagggaacaagcaaaaccgtgaggtgaa

SEQ ID NO: 642467 - DNA, 75 bp, synthetic construct
  source 1..75: mol_type = other DNA
tttccgcccggcgcggatgtttccggcgatgagcgcagcgagaactggttcaactcgacagaggtgggtggaact

SEQ ID NO: 642468 - DNA, 75 bp, synthetic construct
  source 1..75: mol_type = other DNA
gcagtcagacggaacctgccaggtcaccgcaaaagaatacctcgaatcgttctaccagtacgacgacgccacata

SEQ ID NO: 642469 - DNA, 75 bp, synthetic construct
  source 1..75: mol_type = other DNA
tattatcgctgacagcatgacggtttctggtgcatccgtaacctttacaggtcttgatacggatgatggtgacga

SEQ ID NO: 642470 - DNA, 75 bp, synthetic construct
  source 1..75: mol_type = other DNA
cccccgcccggtaatggccggaacgctcccggcgcgggtcaccagcacggtgaagaacgatatctatgcccatat

SEQ ID NO: 642471 - DNA, 75 bp, synthetic construct
  source 1..75: mol_type = other DNA
cttgacgatcagcgccgtatgatgactccgcagaaattgcgcgagtaccaggacatcatccgcgaagtcaaagac

SEQ ID NO: 642472 - DNA, 75 bp, synthetic construct
  source 1..75: mol_type = other DNA
cggtttatccgccgcagcctgaacaaccggttcaacagcctgcagcgcctcaggtcgcgcaaccaatgcagcccg

SEQ ID NO: 642473 - DNA, 75 bp, synthetic construct
  source 1..75: mol_type = other DNA
cgaactcaccgcagggcgttatgcggttgcccgtcattctggcgacctggataacatatctcacactatccgggc

SEQ ID NO: 642474 - DNA, 75 bp, synthetic construct
  source 1..75: mol_type = other DNA
gaccgcagacgctgtagctgttcctaaattcgctaaaggtgcaggtgtttaccaatctatttatggcgctccttc

SEQ ID NO: 642475 - DNA, 75 bp, synthetic construct
  source 1..75: mol_type = other DNA
aatcgctttactggtacatggtttctggatcagccgtaaagaacgatcttctatgttccgcgatcggccattaaa

SEQ ID NO: 642476 - DNA, 75 bp, synthetic construct
  source 1..75: mol_type = other DNA
tgaatggtgaactgcttcttaacagcattcagcaggcgggctttatctttggcgatatgaatatttaccatcgtc

SEQ ID NO: 642477 - DNA, 75 bp, synthetic construct
  source 1..75: mol_type = other DNA
ggtgacagcgttcactatcccaggaactaacattgatgttattaaactggtagatccgctacaccttgcacatat

SEQ ID NO: 642478 - DNA, 75 bp, synthetic construct
  source 1..75: mol_type = other DNA
gtcaccagtattcgttttcttgatgaagacgaaatgcaacgtctgaataaagcgcatttgttaaagccttattta

SEQ ID NO: 642479 - DNA, 75 bp, synthetic construct
  source 1..75: mol_type = other DNA
gcgggcgacgtattaaacgcagtatcagtattgatgtcaccagtattcgttttcttgatgaagacgaaatgcaac

SEQ ID NO: 642480 - DNA, 75 bp, synthetic construct
  source 1..75: mol_type = other DNA
cggggcctttcacccggagacaagcgcaagcggtcactaccacgtacagcaatatcaccctcgaagacgaccaag

SEQ ID NO: 642481 - DNA, 75 bp, synthetic construct
  source 1..75: mol_type = other DNA
tggaattttgaaccgggcggtgagtacctgatgaaccgctatatccgggactacggagtacgcaaaacgcaataa

SEQ ID NO: 642482 - DNA, 75 bp, synthetic construct
  source 1..75: mol_type = other DNA
tgggacatgcggtgcaggctttccatttaaccaacgacacgctgggcgcgtttatgcgtgataacgactttgaca

SEQ ID NO: 642483 - DNA, 75 bp, synthetic construct
  source 1..75: mol_type = other DNA
tctctgttcaacaaagaaacctctcgtttctcttctgaacataacgtgaccaagcgtgagaacggtaaagaatgg

SEQ ID NO: 642484 - DNA, 75 bp, synthetic construct
  source 1..75: mol_type = other DNA
cgacggcgccacggaagcggtgtgggggctgaacaccgcatacagcgtggtggagaaaaacgtcaccacgcggga

SEQ ID NO: 642485 - DNA, 75 bp, synthetic construct
  source 1..75: mol_type = other DNA
gttttagttctgaacacaatgttactaagcgagaacaaggtaaagaatggctgatcgagatcccttacttcctgc

SEQ ID NO: 642486 - DNA, 75 bp, synthetic construct
  source 1..75: mol_type = other DNA
aaagagagcgtgttggcggcttctttgttctctggcaaaacttacacgcctaaaactgatgatgttcttatcgaa

SEQ ID NO: 642487 - DNA, 75 bp, synthetic construct
  source 1..75: mol_type = other DNA
gataaaatccagaaactgtctgacgatgcggtcacggcgaacgccgatccggcggatatggccgcgcaggtggcg

SEQ ID NO: 642488 - DNA, 75 bp, synthetic construct
  source 1..75: mol_type = other DNA
gggctgaacaccgcgtacagcgtggtggaaaaaagcgtcaccacgcgggactacaactaccgcaccgccacagcg

SEQ ID NO: 642489 - DNA, 75 bp, synthetic construct
  source 1..75: mol_type = other DNA
caacaaaatccgcctcgatgatgagcgcggcaaagagcatatcaaggtcagtaccgagtacggcggcaagagcca

SEQ ID NO: 642490 - DNA, 75 bp, synthetic construct
  source 1..75: mol_type = other DNA
gagcgcacactcatagtgtcagcggcacagctgcatctgcaggtgctcacgcacatactgtcggtattggtgctc

SEQ ID NO: 642491 - DNA, 75 bp, synthetic construct
  source 1..75: mol_type = other DNA
tttttaacggtcagagtattaatattggtgcaaaccagaatctggataattacaaaacgccggggctgtaccatc

SEQ ID NO: 642492 - DNA, 75 bp, synthetic construct
  source 1..75: mol_type = other DNA
gctaacgggaaatataccgcacaggacgctaccacagcgcgaaaaggtcttatccagctcagcagtgcgactaac

SEQ ID NO: 642493 - DNA, 75 bp, synthetic construct
  source 1..75: mol_type = other DNA
tgttaacgttgttacagagaatagccagatggttgtaaaccacgggttgggcttctctgttcaaatcattgttaa

SEQ ID NO: 642494 - DNA, 75 bp, synthetic construct
  source 1..75: mol_type = other DNA
ccggcacatctgccagtgaggcggcaacccgtgcgactgatgctgcaggctcagcacgcgcagccagcacgtcag

SEQ ID NO: 642495 - DNA, 75 bp, synthetic construct
  source 1..75: mol_type = other DNA
atccgcctggcgcaccaatcccgtggccatcggataccgttccgtctggttatgccctgatgcaggggcagactt

SEQ ID NO: 642496 - DNA, 75 bp, synthetic construct
  source 1..75: mol_type = other DNA
tgttctttgataccgaccacctggtcgccggtaaatcggtgtccaacaaaggcaccaaaaaactcaaagtggggg

SEQ ID NO: 642497 - DNA, 75 bp, synthetic construct
  source 1..75: mol_type = other DNA
acaatacacaacatgaatataatattgaaacttcattagattttagttctcctttgccagagccggagcgagagc

SEQ ID NO: 642498 - DNA, 75 bp, synthetic construct
  source 1..75: mol_type = other DNA
acaataaacaccatgaatataatattgaaacttcattagattttagttctcctttgccagagccggagcgagagc

SEQ ID NO: 642499 - DNA, 75 bp, synthetic construct
  source 1..75: mol_type = other DNA
aaacccaaaaaccatttacgcttgaaattgatgtttctgactggaataaaagtcagaaggatgtgttttggaagg

SEQ ID NO: 642500 - DNA, 75 bp, synthetic construct
  source 1..75: mol_type = other DNA
ctacggctgaggttacgcatgttaacggtacaccggtattagtgaatgacgaggagatggcgcgcttcgcctggc

SEQ ID NO: 642501 - DNA, 75 bp, synthetic construct
  source 1..75: mol_type = other DNA
acgatagacagcatgaatataatattgaaacttcattagattttagttctcctttgccagagccggagcgagagc

SEQ ID NO: 642502 - DNA, 75 bp, synthetic construct
  source 1..75: mol_type = other DNA
accataaacaacatgaatataatattgaaacttcattagattttagttctcctttgccagagccggagcgagagc

SEQ ID NO: 642503 - DNA, 75 bp, synthetic construct
  source 1..75: mol_type = other DNA
agacttactggaaattgagcgtgatttaaacgcccagggccacacgattacgttaatcaccgagccggaactgca

SEQ ID NO: 642504 - DNA, 75 bp, synthetic construct
  source 1..75: mol_type = other DNA
acgctgtatatggactcttccgcacagggtgagtgtcccttggtgatagacgaaagtaccccctcttgtgggaac

SEQ ID NO: 642505 - DNA, 75 bp, synthetic construct
  source 1..75: mol_type = other DNA
gtgctctgggaatgtttcagttcacggggattgctcgtgaagagactggcttagctgaaggtgaatcgtttgatc

SEQ ID NO: 642506 - DNA, 75 bp, synthetic construct
  source 1..75: mol_type = other DNA
aacaatcatacttcaaatgacgaaagaaaacataattcgccacctgctccggttatatcacttttaaaaattgat

SEQ ID NO: 642507 - DNA, 75 bp, synthetic construct
  source 1..75: mol_type = other DNA
tgccggacgagttgcatatccggctttcaaaagcaaacggcacaaacaggtggctgagttcactgccagcgcgtt

SEQ ID NO: 642508 - DNA, 75 bp, synthetic construct
  source 1..75: mol_type = other DNA
atgagtaaattagttcaggcctacgatttggccgaatacacagattttattaatcaggagcagttttctggacgc

SEQ ID NO: 642509 - DNA, 75 bp, synthetic construct
  source 1..75: mol_type = other DNA
atgacgttctcaccgtcccggaatggcacgtcactggacctgcaggccggactggaagcccgtgtccgggaaaat

SEQ ID NO: 642510 - DNA, 75 bp, synthetic construct
  source 1..75: mol_type = other DNA
ggtgcgccgctgggaatgcagcatgagcatgatgttcccgattacgccagcgatccggaagggaaggtgatcgcg

SEQ ID NO: 642511 - DNA, 75 bp, synthetic construct
  source 1..75: mol_type = other DNA
ccgcagatgccgaaaaagttgcagaagatgacgcgtttccccaacgactcgcttgatgcagcgttatgtcatggt

SEQ ID NO: 642512 - DNA, 75 bp, synthetic construct
  source 1..75: mol_type = other DNA
gaacaccactgaaagagcagcagacgatttttggtcgagataaacaaaccggtgcaccgctgggtatgcagcatg

SEQ ID NO: 642513 - DNA, 75 bp, synthetic construct
  source 1..75: mol_type = other DNA
actgatatctctgtcaaaaccgatcaaaaagtcgtgactttaagcggatttgttgaaagccaggcacaggccgaa

SEQ ID NO: 642514 - DNA, 75 bp, synthetic construct
  source 1..75: mol_type = other DNA
tgggtggcggcaattcctttcctcgcggcggcggtcgggatgtgggttaacggtattgttgtcgatcggctggcg

SEQ ID NO: 642515 - DNA, 75 bp, synthetic construct
  source 1..75: mol_type = other DNA
cgcgtaaaacggccattgtttgcggtttgatgatgtcggcattagggacgttgctggtggtgcaatcttcctcgc

SEQ ID NO: 642516 - DNA, 75 bp, synthetic construct
  source 1..75: mol_type = other DNA
tgaatgaaccgtcacgccgacgtttactgaaagggattggtgcgctggcgctggcgggaagttgtccggtcgctc

SEQ ID NO: 642517 - DNA, 75 bp, synthetic construct
  source 1..75: mol_type = other DNA
aaaggctgaacggcgaagcgctggaggagtacgtcaaacccatcggcggcggttatttctttgcgttaccgggag

SEQ ID NO: 642518 - DNA, 75 bp, synthetic construct
  source 1..75: mol_type = other DNA
aagacggcactgccaatcccgatagccagaatgataagttgatgcaaaaagtggtgtgggtaacggcagatcagc

SEQ ID NO: 642519 - DNA, 75 bp, synthetic construct
  source 1..75: mol_type = other DNA
tttgctgactcagcggtttgcttttctgactcagggcggagtggcaccagaaacgcccaatcctcgcttgccgcc

SEQ ID NO: 642520 - DNA, 75 bp, synthetic construct
  source 1..75: mol_type = other DNA
gcgctggcgggaagttgtccggtcgctcatgcacaaaaaccgcaaagtgcaccgggtacgctttcgccggatgcg

SEQ ID NO: 642521 - DNA, 75 bp, synthetic construct
  source 1..75: mol_type = other DNA
gaacgccactgaaagaacagcagacgatttttggtcgcgacaaacaaaccggtgcgccgctgggaatgcagcatg

SEQ ID NO: 642522 - DNA, 75 bp, synthetic construct
  source 1..75: mol_type = other DNA
attccgctagtcggcacggtggctggaggtatctatgatgcggtaaccggttggaatgatatagaagcgcaacgc

SEQ ID NO: 642523 - DNA, 75 bp, synthetic construct
  source 1..75: mol_type = other DNA
ccttgtagtcgaagcgaaaaagtctcgtgaatatacagactccagaacgacagttggtgtgaaccctgacggaaa

SEQ ID NO: 642524 - DNA, 75 bp, synthetic construct
  source 1..75: mol_type = other DNA
gcttataaaacccgggtgcttggtggtctgagtgacggtactcgtccctcagatgctgcaaccgttcgtcaggtt

SEQ ID NO: 642525 - DNA, 75 bp, synthetic construct
  source 1..75: mol_type = other DNA
gtctctggtaagttctcagtagctgttggtaacggtgctaaggctacagaaaaagcgtcaacatcagtgggatca

SEQ ID NO: 642526 - DNA, 75 bp, synthetic construct
  source 1..75: mol_type = other DNA
cgcaaaccgaagtcggcggcttttctgctgcaaaaacgctggactggcatgaacttcggtgaaaaaccgcagcag

SEQ ID NO: 642527 - DNA, 75 bp, synthetic construct
  source 1..75: mol_type = other DNA
gctgcgtttcgatgcggtcactcattacggcaaagtgtgggtaaataatcaggaagtgatggagcatcagggcgg

SEQ ID NO: 642528 - DNA, 75 bp, synthetic construct
  source 1..75: mol_type = other DNA
agtgctgaaagaggcagatgcttcgcattacaattacggtagtacttatcgtatttactataacaaatcctctgg

SEQ ID NO: 642529 - DNA, 75 bp, synthetic construct
  source 1..75: mol_type = other DNA
gcagttggtagcgttgaccgccgggttactaaaaatacacaggctattcagtccaatactcgccagttgcaggag

SEQ ID NO: 642530 - DNA, 75 bp, synthetic construct
  source 1..75: mol_type = other DNA
agacagcagcgaaagcaggtgtggcagcgagcgatggcgatgtatcctggaacgctggtgtgaactttgagtttt

SEQ ID NO: 642531 - DNA, 75 bp, synthetic construct
  source 1..75: mol_type = other DNA
gactccagaacgacagttggtgttaactccgacggaaccctgacccgtgcagaaggagccagcaaaaccctggct

SEQ ID NO: 642532 - DNA, 75 bp, synthetic construct
  source 1..75: mol_type = other DNA
taaaagacttcgcccgtatggcagcaggcctcagaacgtctgacaaagaaaacggtaagcatcaggttgatgagg

SEQ ID NO: 642533 - DNA, 75 bp, synthetic construct
  source 1..75: mol_type = other DNA
tatggtgatcgttcaacatctgttggtgttggggcatctgttcgtccaaatgccacagaaggaacagctgttggt

SEQ ID NO: 642534 - DNA, 75 bp, synthetic construct
  source 1..75: mol_type = other DNA
tgatagcgttgttcgtgatgtatataacaaagtatacagtctgcagagaacagaaattacaggtttcagcgtcga

SEQ ID NO: 642535 - DNA, 75 bp, synthetic construct
  source 1..75: mol_type = other DNA
ttgcgcggcaaaggattcgataacgtgctgatggtgcacgatcacgcattaatggactggattggggccaactcc

SEQ ID NO: 642536 - DNA, 75 bp, synthetic construct
  source 1..75: mol_type = other DNA
agaggaatactcctaagtctgaagatatccctaaaaaggctaatattgtcactcgtgttgtaaatgcatccctgg

SEQ ID NO: 642537 - DNA, 75 bp, synthetic construct
  source 1..75: mol_type = other DNA
agctgcggatacctacaataatggcaacttggatgtaaaagtcggaagtcttggcgctgaaggtaaggcaaatct

SEQ ID NO: 642538 - DNA, 75 bp, synthetic construct
  source 1..75: mol_type = other DNA
tccatcattccagcaaaaagccgcttatacgttagccaatgttcttgatatggggggactggtatctggtattag

SEQ ID NO: 642539 - DNA, 75 bp, synthetic construct
  source 1..75: mol_type = other DNA
cggcagaagctgcggctcttctcatgagcaagtatcttaagcaagccaatggagacttaaacgaggccatcactg

SEQ ID NO: 642540 - DNA, 75 bp, synthetic construct
  source 1..75: mol_type = other DNA
aagaacgtgcacgagggaaggggaccgcaacagcagctggcaatgtgtatgttgatactccgatgccagttgaag

SEQ ID NO: 642541 - DNA, 75 bp, synthetic construct
  source 1..75: mol_type = other DNA
actccagagttaaaagctccggttaatagccaccaggagacgtctgattctaaaactgaatccgatgccaaacag

SEQ ID NO: 642542 - DNA, 75 bp, synthetic construct
  source 1..75: mol_type = other DNA
aaaccaaaatcggcggctttctcgctgcaaaaacgctggactggcatgaatttcggtgaaaaaccgcagcaggga

SEQ ID NO: 642543 - DNA, 75 bp, synthetic construct
  source 1..75: mol_type = other DNA
ggaaaaagaacttctggcctggcaggagaaactgcatcagccgattatcatcaccgaatacggcgtggatacgtt

SEQ ID NO: 642544 - DNA, 75 bp, synthetic construct
  source 1..75: mol_type = other DNA
tttaacgatcagtttgctgatgcggatattcgtaattatgtgggcaatgtctggtatcagcgcgaagtctttata

SEQ ID NO: 642545 - DNA, 75 bp, synthetic construct
  source 1..75: mol_type = other DNA
aacagaagatgtaaaggcgcaacggaccgaagcagccgaacacgcccgcgaaatgttcggtcaaaaaggcggtac

SEQ ID NO: 642546 - DNA, 75 bp, synthetic construct
  source 1..75: mol_type = other DNA
gtaaacttggattaaaggcagttggtaaaggggcgttacgcgcaattcccctagtcggcacagtggctggaggta

SEQ ID NO: 642547 - DNA, 75 bp, synthetic construct
  source 1..75: mol_type = other DNA
ctttggtcgtcatgaagatgcggatttgcgtggcaaaggattcgataacgtgctgatggtgcacgatcacgcatt

SEQ ID NO: 642548 - DNA, 75 bp, synthetic construct
  source 1..75: mol_type = other DNA
taaaaatttgtctcgcaaccccgatcgctttgaagaaggtaagcattactatctcttaactggttcaaaattaaa

SEQ ID NO: 642549 - DNA, 75 bp, synthetic construct
  source 1..75: mol_type = other DNA
ggctgaacaaaagcagcttctggaacagaaagcccaccagctaaatcagcagctggtggccgccgctcctaaagt

SEQ ID NO: 642550 - DNA, 75 bp, synthetic construct
  source 1..75: mol_type = other DNA
gccaaacacagtgtgcgtgaactgccggtgaactggtgggtacagccttctgttatccgcaccttcagctcccgg

SEQ ID NO: 642551 - DNA, 75 bp, synthetic construct
  source 1..75: mol_type = other DNA
ccgtatccatgggaaatggcggggtactgctggccgattccggagccgctgtcagtggtacccggagcgacggaa

SEQ ID NO: 642552 - DNA, 75 bp, synthetic construct
  source 1..75: mol_type = other DNA
ctctgaaaattattgaagcagccgaagaggttattagtgcgcttgccggaactaacgaggatgttcaccctggta

SEQ ID NO: 642553 - DNA, 75 bp, synthetic construct
  source 1..75: mol_type = other DNA
gaacagcaaccggttgcaatcccccagacgcttccagaagctctgcgcctggctgccgaactggctgaacaaaag

SEQ ID NO: 642554 - DNA, 75 bp, synthetic construct
  source 1..75: mol_type = other DNA
gaacagaaagcccaccagctaaatcagcagctggtggccgccgctcctaaagtcgattttgccgaccgggtatca

SEQ ID NO: 642555 - DNA, 75 bp, synthetic construct
  source 1..75: mol_type = other DNA
ctacttccgacaaaaagaacagcaaccggttgcaatcccccaaacattaccagaagccctacgcctggctgccga

SEQ ID NO: 642556 - DNA, 75 bp, synthetic construct
  source 1..75: mol_type = other DNA
tcgattttgccgaccgggtatcagtagctaaagggatcctgattgggaattttgcaaaggttgttggacttaagc

SEQ ID NO: 642557 - DNA, 75 bp, synthetic construct
  source 1..75: mol_type = other DNA
ttgttgctggctggaaagaaggtaaagaacacatcagttacatggcatggcgctacatctgcgagagcgccggtt

SEQ ID NO: 642558 - DNA, 75 bp, synthetic construct
  source 1..75: mol_type = other DNA
gcaacaccacggaagtggagattcgaccggaaaccctgcgcaatgcagctaactggacaccgccaaccgtcgatg

SEQ ID NO: 642559 - DNA, 75 bp, synthetic construct
  source 1..75: mol_type = other DNA
atgacatagccgaagcgatcgccctgcatactgcctgtataccgacacgggagatccccggcgcaattgccaact

SEQ ID NO: 642560 - DNA, 75 bp, synthetic construct
  source 1..75: mol_type = other DNA
tgcaaaagcagcagccagtaagcgcgccagacgcctgaagaaactgcctgccgaccagcagattcatgagatggc

SEQ ID NO: 642561 - DNA, 75 bp, synthetic construct
  source 1..75: mol_type = other DNA
ttcttggtgtggtggcttccgggattggctactttatgtggaactacggcgcgacgcaggtggacgccggaacgc

SEQ ID NO: 642562 - DNA, 75 bp, synthetic construct
  source 1..75: mol_type = other DNA
gcgacgcaggtggacgccggaacgctgggcattatgaataatatgcacgttccggcagggctgctggttaacctg

SEQ ID NO: 642563 - DNA, 75 bp, synthetic construct
  source 1..75: mol_type = other DNA
gtctgcgctggggctatgcttttagcgccttgttggcggtgattggtgccgggattattcgctatgatcaggtca

SEQ ID NO: 642564 - DNA, 75 bp, synthetic construct
  source 1..75: mol_type = other DNA
atgaaagatttaactttgaagtttcatgacaaactgcagtttaaggccttcctgtcatctcttgactggggggat

SEQ ID NO: 642565 - DNA, 75 bp, synthetic construct
  source 1..75: mol_type = other DNA
atgaaagatttaactttgaagtttcatgacaaactgcagtttaaggccttcctgtcatctcttgactgggtggag

SEQ ID NO: 642566 - DNA, 75 bp, synthetic construct
  source 1..75: mol_type = other DNA
aaatcactggaagagattattcgcagctctgaaggtggcgtattcaacaacgcagctcaggtctggaaccatact

SEQ ID NO: 642567 - DNA, 75 bp, synthetic construct
  source 1..75: mol_type = other DNA
tactcaatacggcttaggaaaatataaaacctttacgcatattgattccagatcgaaaaaatcacgatggaatgg

SEQ ID NO: 642568 - DNA, 75 bp, synthetic construct
  source 1..75: mol_type = other DNA
tggaagtgacggtctcccgtctttcccgtctgctggccgaacaggtgcgctttggtgtgctgggtgtgtcagagg

SEQ ID NO: 642569 - DNA, 75 bp, synthetic construct
  source 1..75: mol_type = other DNA
gaaagtgaaatccgccagcaactcatccgggaaggcgtactgcgtgaggatgaagatatctccgtacatgcggcc

SEQ ID NO: 642570 - DNA, 75 bp, synthetic construct
  source 1..75: mol_type = other DNA
ggtgatcctggcctcactgtgggtgcatcgtaagtgggtcgctccgcgctcttcacaaacggcagatgatcgcag

SEQ ID NO: 642571 - DNA, 75 bp, synthetic construct
  source 1..75: mol_type = other DNA
ggccaacatttatcacaggcgcgctggtgatcctggcctcactgtgggtgcatcggaagtgggtcgctccgcgct

SEQ ID NO: 642572 - DNA, 75 bp, synthetic construct
  source 1..75: mol_type = other DNA
aggaatttgaatgcaaatgtggaaagtgcggacaagataccgtagacgcggaattactggcaattcttgaggatg

SEQ ID NO: 642573 - DNA, 75 bp, synthetic construct
  source 1..75: mol_type = other DNA
gcacactgcctgtatcagtaccagggatataccgggcgttattgccaactacttcatgatcaccaaacaacttta

SEQ ID NO: 642574 - DNA, 75 bp, synthetic construct
  source 1..75: mol_type = other DNA
ttaataatttaggcctcggagtaactccaaagctcgatgaaatcatgaagaaatcatttttctttataaattatt

SEQ ID NO: 642575 - DNA, 75 bp, synthetic construct
  source 1..75: mol_type = other DNA
actaaatttattaaatattaaccattatcctaatttctttttaggctgttcgctcttggatgaaaaatgccaaag

SEQ ID NO: 642576 - DNA, 75 bp, synthetic construct
  source 1..75: mol_type = other DNA
gatggttcaaattcttattataacaaattttataattttgatcatcaagttggcgagttcatagattatcttacg

SEQ ID NO: 642577 - DNA, 75 bp, synthetic construct
  source 1..75: mol_type = other DNA
actcgccgtaccaaagcggtgggtaaaatcgtcgaagtacttggcgacaatatgggcaccggcatggcggttgat

SEQ ID NO: 642578 - DNA, 75 bp, synthetic construct
  source 1..75: mol_type = other DNA
ctgggcgctgaccgtaaaggtcgtcgtgaagcgcgtattgtccgcgtactggtgccaaaaaccagccagattgtt

SEQ ID NO: 642579 - DNA, 75 bp, synthetic construct
  source 1..75: mol_type = other DNA
tacgccgggagaaattctaaagctcacaaatgccattggcaaaccaatgagttgtcttgatcaattatttccatc

SEQ ID NO: 642580 - DNA, 75 bp, synthetic construct
  source 1..75: mol_type = other DNA
cggcggcagtcgggatgtgggttaacggtattgttgtcgatcgactggcgaaaaaaggctacgacctggcgaaga

SEQ ID NO: 642581 - DNA, 75 bp, synthetic construct
  source 1..75: mol_type = other DNA
tttagcgagtggctggcgctgtttaagcatcggacaacctgggggatgattttaggtttctctggcgtcaattat

SEQ ID NO: 642582 - DNA, 75 bp, synthetic construct
  source 1..75: mol_type = other DNA
cgaaaactctgctggctgtaatgttgacctctgccatagcgactggatctgcttttgcagataacaatgtgcaga

SEQ ID NO: 642583 - DNA, 75 bp, synthetic construct
  source 1..75: mol_type = other DNA
acatggttgttgatctggttttcgccaatgctggggtttttgataaaagttcgcggtcgtcgaaactcaacattt

SEQ ID NO: 642584 - DNA, 75 bp, synthetic construct
  source 1..75: mol_type = other DNA
gttagtttctcccgggctttggtcagttgactgtataaatggtcgttttcgcctcaatcggatcacccaggtggg

SEQ ID NO: 642585 - DNA, 75 bp, synthetic construct
  source 1..75: mol_type = other DNA
ggcgagttaggattatccgctaccgagtttggtgttttgctttctgcattttctctgtcttatggtttttcacaa

SEQ ID NO: 642586 - DNA, 75 bp, synthetic construct
  source 1..75: mol_type = other DNA
gaagtgccggaagaagcaaaagcgggccgtgtcgatctgcgcgatttaccgctggtcaccattgatggcgaagac

SEQ ID NO: 642587 - DNA, 75 bp, synthetic construct
  source 1..75: mol_type = other DNA
ggaaactttcaccagcactgagcgtgcgcataaagttgcagcatttacggatggtatccagcgactggcgttaaa

SEQ ID NO: 642588 - DNA, 75 bp, synthetic construct
  source 1..75: mol_type = other DNA
ccagcagattcatgagatggcagagtatctcaggaagcgtctgccgccggatgaagcctatttttgttccgatga

SEQ ID NO: 642589 - DNA, 75 bp, synthetic construct
  source 1..75: mol_type = other DNA
atcgcctgaagaaactgcctgccgaccagcagattcatgagatggcagagtatctcaggaagcgtctgccgccgg

SEQ ID NO: 642590 - DNA, 75 bp, synthetic construct
  source 1..75: mol_type = other DNA
gttaaatatgctggataattctccgcatgtgcctttctttaccccgtttttcaatggactggcgtcagcaacgca

SEQ ID NO: 642591 - DNA, 75 bp, synthetic construct
  source 1..75: mol_type = other DNA
tgagacttacagttgcgatgcgcaggtgataaaagtggctgcatttacggacggtattcagcggctggcgttaaa

SEQ ID NO: 642592 - DNA, 75 bp, synthetic construct
  source 1..75: mol_type = other DNA
tggattttggtcacggtctgcaattgccgcttacgccgatggtgggtgaatatgccaatatgacgcacttcatta

SEQ ID NO: 642593 - DNA, 75 bp, synthetic construct
  source 1..75: mol_type = other DNA
cgagaaaagcgaaaaagccctcggctaaaacgcaaaaaatagctgcagcgaccaaagcgaagcgtgcggcgaaga

SEQ ID NO: 642594 - DNA, 75 bp, synthetic construct
  source 1..75: mol_type = other DNA
ttcgccgattcgtcgttaccctgatctgacgctgcaccgcggcattaagtatctgctggcgaaagagcaggggca

SEQ ID NO: 642595 - DNA, 75 bp, synthetic construct
  source 1..75: mol_type = other DNA
tcggtaaaacggcgcgcgagaaagcgaaaaaaggtgatgcaggtaaaaaagccggtaagcgtcgtcaggtgggca

SEQ ID NO: 642596 - DNA, 75 bp, synthetic construct
  source 1..75: mol_type = other DNA
aagcctactggtgcacgccggaactcttacagcagctggccatcagggagctgtatcagcttgaactgacgctgg

SEQ ID NO: 642597 - DNA, 75 bp, synthetic construct
  source 1..75: mol_type = other DNA
atccggttaccgggcaatacagcctgcgtatgcgcatgtccctgcatccgttctatgtacagaagcgcgaatttg

SEQ ID NO: 642598 - DNA, 75 bp, synthetic construct
  source 1..75: mol_type = other DNA
acatcccaagctggggcggcggttacggtaacatcttccaggatgagcgtgacgtgaaatttatggtaatcgcac

SEQ ID NO: 642599 - DNA, 75 bp, synthetic construct
  source 1..75: mol_type = other DNA
aaggtgttgccgcgcatgacggcaccgatgctgaccgagcaggaagtcgccgcgctggaactgcctgaccttgtg

SEQ ID NO: 642600 - DNA, 75 bp, synthetic construct
  source 1..75: mol_type = other DNA
cggtggtattgcccgtggggccacgccagaaagcaacggcagctatggcctcgtccgtctggagggggacctgct

SEQ ID NO: 642601 - DNA, 75 bp, synthetic construct
  source 1..75: mol_type = other DNA
acaccactgtcggacatcgtggaacactgacgctggccgccgggggaagtctgagtggcagaacacagctcagta

SEQ ID NO: 642602 - DNA, 75 bp, synthetic construct
  source 1..75: mol_type = other DNA
ttttgccgctggtcttcatgcgctgaaaggtcaccgtgtagtcggcggaatgcgcgcttctatttataacgcgat

SEQ ID NO: 642603 - DNA, 75 bp, synthetic construct
  source 1..75: mol_type = other DNA
gaggaagccgagaaggattttcgcgatcttcttaacgtcccctccaactataaagtattgttctgccatggtggc

SEQ ID NO: 642604 - DNA, 75 bp, synthetic construct
  source 1..75: mol_type = other DNA
cgatgctgaccgagcaggaagtcgccgcactggaactgcctgaccttgtggcgctggccggtaaggtggtcggtt

SEQ ID NO: 642605 - DNA, 75 bp, synthetic construct
  source 1..75: mol_type = other DNA
cacgctggatgaccgttccgggcgcctggaagtcatgttgtttactgacgccctggataaataccagcaattgct

SEQ ID NO: 642606 - DNA, 75 bp, synthetic construct
  source 1..75: mol_type = other DNA
tgaggggccaattgaggcaatcatcgaagcccgaaataaaggtggttacttccgcgagctttttgatctctgcgc

SEQ ID NO: 642607 - DNA, 75 bp, synthetic construct
  source 1..75: mol_type = other DNA
gacttcgacgttgacttctgtatggaaaaacgcgatcaggttatcgagcacgtagcggacatgtacggtcgtgat

SEQ ID NO: 642608 - DNA, 75 bp, synthetic construct
  source 1..75: mol_type = other DNA
cagagcgtatggcagaacaacaatctgatatggttaagaaaatggtttttgaaacgcttaagaccatgtatagca

SEQ ID NO: 642609 - DNA, 75 bp, synthetic construct
  source 1..75: mol_type = other DNA
tcgcgactggcttatcgaattaaacgaagggctgatcctcctttccggcgggcgcatgggcgacgtcggacgcag

SEQ ID NO: 642610 - DNA, 75 bp, synthetic construct
  source 1..75: mol_type = other DNA
gtgaagttctacggagcgggacatggtgcagggattaaacccatcgtcggggcggattttaacgtccagagcgaa

SEQ ID NO: 642611 - DNA, 75 bp, synthetic construct
  source 1..75: mol_type = other DNA
aaaggtcaccgtgtggtcggcggaatgcgcgcttctatttataacgccatgccgctggaaggcgttaaagcgctg

SEQ ID NO: 642612 - DNA, 75 bp, synthetic construct
  source 1..75: mol_type = other DNA
gcgcagataccgacctagatgatataactagttatattgctcgtttcgacatagatgcggctgaacgcttatggc

SEQ ID NO: 642613 - DNA, 75 bp, synthetic construct
  source 1..75: mol_type = other DNA
ccgccaagtgatcgagtatccggtttgcgggaaattgtggttcaccctaattatatcgttttgtaccgagtagca

SEQ ID NO: 642614 - DNA, 75 bp, synthetic construct
  source 1..75: mol_type = other DNA
tatcatctcattagcaaatacattaaaaatgaaagttattgccgaaggcattgaaaataaaaaagatgcccttta

SEQ ID NO: 642615 - DNA, 75 bp, synthetic construct
  source 1..75: mol_type = other DNA
ctggatggcccggtagccggactttgctcacttgaaaaaggggcagcctatatcgggttgacaaaagctgcattg

SEQ ID NO: 642616 - DNA, 75 bp, synthetic construct
  source 1..75: mol_type = other DNA
cacaactggaaaagctactggacatacgaccgccagaaaagaaagtttaccccggctgataaggaagattgccag

SEQ ID NO: 642617 - DNA, 75 bp, synthetic construct
  source 1..75: mol_type = other DNA
agttatctgacaccgatcacacaactggagcggcgtacatcaacgccgataccagtcaacaagaagcaacagata

SEQ ID NO: 642618 - DNA, 75 bp, synthetic construct
  source 1..75: mol_type = other DNA
aattgcatagaaaatgcatcttgagttgttcctttgtatcaaagaatgaaataaaggatgagtttgataaaatat

SEQ ID NO: 642619 - DNA, 75 bp, synthetic construct
  source 1..75: mol_type = other DNA
atggattactggttaccgatcattgtgttatttggtgctttcttttttatgttggcattaggtgttcctattgtc

SEQ ID NO: 642620 - DNA, 75 bp, synthetic construct
  source 1..75: mol_type = other DNA
taccccgacagaggcctccgcaattgcagtaatttatacccttttccttgcactggttctttatcgtgaaatctc

SEQ ID NO: 642621 - DNA, 75 bp, synthetic construct
  source 1..75: mol_type = other DNA
gcaacattcccttagatattattaaaatcgacaaatcttacatccatgacatgcgcagaaatgatgtgtcaaaat

SEQ ID NO: 642622 - DNA, 75 bp, synthetic construct
  source 1..75: mol_type = other DNA
gaatgggcacattactcaattgctatggatattgtcatctttttctcatgcagtaaaagaagtaaacgcaatccc

SEQ ID NO: 642623 - DNA, 75 bp, synthetic construct
  source 1..75: mol_type = other DNA
ggtgattcatgcatcaatttcattcattcgaagcatggaccggttagtacttccgctagtaacctgcatgatgtt

SEQ ID NO: 642624 - DNA, 75 bp, synthetic construct
  source 1..75: mol_type = other DNA
tgcgggtgcacagcgactactcgatgatcgatggcctggcaaaaaccgcgccgctggtaaaaaaggcggcggcgt

SEQ ID NO: 642625 - DNA, 75 bp, synthetic construct
  source 1..75: mol_type = other DNA
gtgacaggacgggagtttacctctgccacgctaagtagcactaactggcaatacgcctgtacctgctctgcgggt

SEQ ID NO: 642626 - DNA, 75 bp, synthetic construct
  source 1..75: mol_type = other DNA
aatataggggcaaatccatatgcctcctcaggagggtgtggagccgacagcactagcggtgcgacaaattacagc

SEQ ID NO: 642627 - DNA, 75 bp, synthetic construct
  source 1..75: mol_type = other DNA
gagtgccagtatttcgctgaaacaggcggaaaaaaactgggcggattacgaagcgttgccgcgtgacccgcgtca

SEQ ID NO: 642628 - DNA, 75 bp, synthetic construct
  source 1..75: mol_type = other DNA
gcggcaggtcccatcagtgctgcattcgaaccacttaagcctgtgtttcagtggattggcgacaaagtacaggcg

SEQ ID NO: 642629 - DNA, 75 bp, synthetic construct
  source 1..75: mol_type = other DNA
atatcaatgactacggtggacgtccggtactgcagttctcctgtgcaggaagtcgctgtactgcagtaaagaaat

SEQ ID NO: 642630 - DNA, 75 bp, synthetic construct
  source 1..75: mol_type = other DNA
aaggcagttaaacttgtctatatggtcagccctgtacttaccaccactggacatcaggcaggatattacaaactc

SEQ ID NO: 642631 - DNA, 75 bp, synthetic construct
  source 1..75: mol_type = other DNA
acggttacggcgtcaaacgggaagcttttcatgaaaccgaacttgttccgggagaggaataccgttcaccggacg

SEQ ID NO: 642632 - DNA, 75 bp, synthetic construct
  source 1..75: mol_type = other DNA
ttgagtactgcgagcaaaaagggataacacaggctcagttcattgagaaaattatcaaagatgaactgcagaggc

SEQ ID NO: 642633 - DNA, 75 bp, synthetic construct
  source 1..75: mol_type = other DNA
caagggcagatgctggaacaactcggctttacgctggcgaagttgcccgcagggttaaacgccagccaaagccag

SEQ ID NO: 642634 - DNA, 75 bp, synthetic construct
  source 1..75: mol_type = other DNA
acccggattacgcaacggctgttgataagatggttcgcgtgaaagatatctttataccgattgagagcaatgcca

SEQ ID NO: 642635 - DNA, 75 bp, synthetic construct
  source 1..75: mol_type = other DNA
attacgcatggatatatcgttcgatactggaaagcgtggcgctgacgctgaagaacaattacgacaatatgtgta

SEQ ID NO: 642636 - DNA, 75 bp, synthetic construct
  source 1..75: mol_type = other DNA
gatgattgttactgggtattccagcggcatggttgagtgtcgctggtatgacggttacggtgtcaaacgggaagc

SEQ ID NO: 642637 - DNA, 75 bp, synthetic construct
  source 1..75: mol_type = other DNA
gcgttgctgccgcgcctgcagagcttccaccgttgcatcctttggcacttcccgcgaaaggcggcgaagcgatgg

SEQ ID NO: 642638 - DNA, 75 bp, synthetic construct
  source 1..75: mol_type = other DNA
gtacaatggcggcgaaagcggtgatccgcgacgtaggccgcgtgctggggcatccgtacggctttgtcgatcgta

SEQ ID NO: 642639 - DNA, 75 bp, synthetic construct
  source 1..75: mol_type = other DNA
gctctgggacaattccagtacatctctactatcagaggacggatgcacgtgcgcggttgcgttttggcgcgacgt

SEQ ID NO: 642640 - DNA, 75 bp, synthetic construct
  source 1..75: mol_type = other DNA
gtggagaacgaagacggttctcacgttcctgttgcacagccaatcatcattaacgctgctggttaccctgtatat

SEQ ID NO: 642641 - DNA, 75 bp, synthetic construct
  source 1..75: mol_type = other DNA
tcgctgggcgatgcgttaaaagcggctgatcaacacgcaaaagcggaagccatcggtcaggccgatatgttcggc

SEQ ID NO: 642642 - DNA, 75 bp, synthetic construct
  source 1..75: mol_type = other DNA
ccgagaaggtggtgggtctggtggatgagtgctggcggatggggctgaaaatcctgccaccagatataaactccg

SEQ ID NO: 642643 - DNA, 75 bp, synthetic construct
  source 1..75: mol_type = other DNA
atcaccgacctcgatccgctggagtttgacctgctgttcgaacgtttccttaacccggaacgtgtctccatgcct

SEQ ID NO: 642644 - DNA, 75 bp, synthetic construct
  source 1..75: mol_type = other DNA
tcgcaatccactaaagattatccaacgtcttaccgtaacctgcgagtaaaattgagtttcggttatggtaatttt

SEQ ID NO: 642645 - DNA, 75 bp, synthetic construct
  source 1..75: mol_type = other DNA
cggtatatatcccgttattctctattataaagattttgatgagttggttttggcttatggtataagcgacacgaa

SEQ ID NO: 642646 - DNA, 75 bp, synthetic construct
  source 1..75: mol_type = other DNA
ggcatcgtcggtgaaaacgggccggaaattgttaacggcccggcaaatgtgaccagccggagaaatacagctgca

SEQ ID NO: 642647 - DNA, 75 bp, synthetic construct
  source 1..75: mol_type = other DNA
atccaggggccgaacgacgggatgctgagaaaagcttggatcggacgagccggaatactgccgcgtccggcagca

SEQ ID NO: 642648 - DNA, 75 bp, synthetic construct
  source 1..75: mol_type = other DNA
atgtctggaaatataggggcaaatccagcctgtgtccgtacggccccagtgcaacagataagcaccactgtcagt

SEQ ID NO: 642649 - DNA, 75 bp, synthetic construct
  source 1..75: mol_type = other DNA
agaacgattctatgtcccggagaatgtttatatcatcggtttaatgaatactgccgatcgctctctggccgttgt

SEQ ID NO: 642650 - DNA, 75 bp, synthetic construct
  source 1..75: mol_type = other DNA
tgctggcaattcctttgctccggcgtggtcgcatcgatagcgttatcttcgtcggattgattgtcattcttatct

SEQ ID NO: 642651 - DNA, 75 bp, synthetic construct
  source 1..75: mol_type = other DNA
ttgtccagaaatgacggtggacatagtgcgacatttcgacttgtgaaaatcgatggcgagaataaagaagtcgcc

SEQ ID NO: 642652 - DNA, 75 bp, synthetic construct
  source 1..75: mol_type = other DNA
caatatcgcttgtccagaaatgacggtggacatagtgcgacatttcgacttgtgaaaatcgataataataaaaaa

SEQ ID NO: 642653 - DNA, 75 bp, synthetic construct
  source 1..75: mol_type = other DNA
cctgacgcagcttagcgaacggctggcccaggagcattatgcttcgcaatggggtgagactattcaccgcgtccg

SEQ ID NO: 642654 - DNA, 75 bp, synthetic construct
  source 1..75: mol_type = other DNA
acgctttgcctgccacaggatgtgcagggtgaagcctgggattatccggattattttttcgctcgccgggtctat

SEQ ID NO: 642655 - DNA, 75 bp, synthetic construct
  source 1..75: mol_type = other DNA
atgccccgacgcaacggccccaccctgctggcaattcctttgctccggcgcggtcgcatcgatagcgttatcttc

SEQ ID NO: 642656 - DNA, 75 bp, synthetic construct
  source 1..75: mol_type = other DNA
gaggaagcattaagtgcatatgagatagataaacgtcgatttaacaatggcaaggatgtttctttgccaaaatta

SEQ ID NO: 642657 - DNA, 75 bp, synthetic construct
  source 1..75: mol_type = other DNA
atgccagttgaagaggcgcgtccggtggccagcaactcaagttactttgaccaactcggcgcacaaatggggatt

SEQ ID NO: 642658 - DNA, 75 bp, synthetic construct
  source 1..75: mol_type = other DNA
tgcgaaagaaatcactccagagttaaaagctccggttaatagcgaggctaatgcgaaagaaatcgctccagagtt

SEQ ID NO: 642659 - DNA, 75 bp, synthetic construct
  source 1..75: mol_type = other DNA
agcgatggtacgcgtaacagtgatgcggcaactgttgggcagttaaaccggaaagttggtggagtttatgatgat

SEQ ID NO: 642660 - DNA, 75 bp, synthetic construct
  source 1..75: mol_type = other DNA
ttgatggtgaaacgaagcggctgtttgcgcagatgacctcattgcttgccaggattgaagagcacaccaaagact

SEQ ID NO: 642661 - DNA, 75 bp, synthetic construct
  source 1..75: mol_type = other DNA
gttgacgcaataaaacggcttaatttaggggacgtttctcgtatacgggaggacaaagtcactaaccgtgcacag

SEQ ID NO: 642662 - DNA, 75 bp, synthetic construct
  source 1..75: mol_type = other DNA
tcttattcttcgccaccagagaccaattattatttgcggtgggggtgtgaagtattcgcagtctgaacaggaact

SEQ ID NO: 642663 - DNA, 75 bp, synthetic construct
  source 1..75: mol_type = other DNA
taatgccaaaaacgccatcttcaccgtttcggaagcgatggaacatttctcctatttgccgaccggattgtacgt

SEQ ID NO: 642664 - DNA, 75 bp, synthetic construct
  source 1..75: mol_type = other DNA
gtttcggaagcgatggagcacttcgcctatttgccgaccggattgtacgtatttgcgtataaaaaagacgtttat

SEQ ID NO: 642665 - DNA, 75 bp, synthetic construct
  source 1..75: mol_type = other DNA
accaaagcaatgggcagaaaatcctttgatgaagatttaaaagccctgccggaaaaagggggctatctgtgtctt

SEQ ID NO: 642666 - DNA, 75 bp, synthetic construct
  source 1..75: mol_type = other DNA
gacagtgttgagcaactggctcaggatacgaatacccgccttgtggttgaagcgaaaaagtctcgtgaatataca

SEQ ID NO: 642667 - DNA, 75 bp, synthetic construct
  source 1..75: mol_type = other DNA
aaaatcgctggcgatggacagcgagaacctgatgttctctctgtttaagaacggtaaaccggtgaccggtgatga

SEQ ID NO: 642668 - DNA, 75 bp, synthetic construct
  source 1..75: mol_type = other DNA
cgttcatttccaggtgggaagcattaaggaaggtgcgaataagtggggaaattcttctcggctgactcagtcatt

SEQ ID NO: 642669 - DNA, 75 bp, synthetic construct
  source 1..75: mol_type = other DNA
attcatttattaatatgaaaatagagccacacattgtcaatattaacccagacattattaacgatataatacttc

SEQ ID NO: 642670 - DNA, 75 bp, synthetic construct
  source 1..75: mol_type = other DNA
gatgaattttcaaaatctataaaccttagtaatagattgttaatcctaaataaagatcaattacatttaaagaaa

SEQ ID NO: 642671 - DNA, 75 bp, synthetic construct
  source 1..75: mol_type = other DNA
attatcacaaacggcaaggtgcatagctaccctacgagaaaaaggagaattggagttttataagagtttagagac

SEQ ID NO: 642672 - DNA, 75 bp, synthetic construct
  source 1..75: mol_type = other DNA
tgcctttggtgttcatgcctgagacagatagcctcaagcacccgcagtcattctacttaactaagatttccccgc

SEQ ID NO: 642673 - DNA, 75 bp, synthetic construct
  source 1..75: mol_type = other DNA
ttctacttaacttccctttcaccgcaaattattttatctccggtggcaatgttcacccgatatgggaattcccat

SEQ ID NO: 642674 - DNA, 75 bp, synthetic construct
  source 1..75: mol_type = other DNA
tgactttaaaaaaaggtcaggaaaggagactactttaaatttttttcaacggcacaaggcattacatcctaatgg

SEQ ID NO: 642675 - DNA, 75 bp, synthetic construct
  source 1..75: mol_type = other DNA
taagacagcagatgctgttattcagagtacccctcttggcttagttgcatcaacattagtcaataaagcgaatgc

SEQ ID NO: 642676 - DNA, 75 bp, synthetic construct
  source 1..75: mol_type = other DNA
caggcattcaacttcaatcgattcaatcaggttgcagaacatgccaacaggctaaactccctgatcgacaccagc

SEQ ID NO: 642677 - DNA, 75 bp, synthetic construct
  source 1..75: mol_type = other DNA
attagcctgattaacgttttctccgataccagtttcagcgaacccaaatacaatggcgtgaagctcaatttgaag

SEQ ID NO: 642678 - DNA, 75 bp, synthetic construct
  source 1..75: mol_type = other DNA
tggtaacggcaaagcgcaccgcaaaggcgaagtcctgtttattgatgcccgtaagattggctttatgaaagaccg

SEQ ID NO: 642679 - DNA, 75 bp, synthetic construct
  source 1..75: mol_type = other DNA
gtgccgattaccgtagcgatgtggaagatgcgattcgccaaagtaccagcgggccgcaaaaactcgttgggccgc

SEQ ID NO: 642680 - DNA, 75 bp, synthetic construct
  source 1..75: mol_type = other DNA
tatatcttgatgcgctaagggaaaagcaatccattgcggtacttgaacagagtctctcccggcataacgcaattc

SEQ ID NO: 642681 - DNA, 75 bp, synthetic construct
  source 1..75: mol_type = other DNA
ctgtgatctgcctgttcctgctgacattgctggtgggctgctcgaatacgcgtaccgtttacgttccagcgcaat

SEQ ID NO: 642682 - DNA, 75 bp, synthetic construct
  source 1..75: mol_type = other DNA
ggcggggattatttacctgatcgttaacggcctgctgacgttgatgatgcgcctgatcgagcgtaaagcgctggc

SEQ ID NO: 642683 - DNA, 75 bp, synthetic construct
  source 1..75: mol_type = other DNA
acgttgcaggagtatccggtactgtggcatctgttgtcagaaccgtggttgtgcgcgctgattgcgttgtcgctg

SEQ ID NO: 642684 - DNA, 75 bp, synthetic construct
  source 1..75: mol_type = other DNA
tcccgaagatgaaaagtcagacggtacatggtggtttaacgccaaagcctgggacgaactagccgacgaactact

SEQ ID NO: 642685 - DNA, 75 bp, synthetic construct
  source 1..75: mol_type = other DNA
gctattcaggcgacggcggatgagctggaagtgggtatgggtaaagttggtatgccgctgcgtgtcgccgtaacc

SEQ ID NO: 642686 - DNA, 75 bp, synthetic construct
  source 1..75: mol_type = other DNA
acatcatcggcctggacggctcagtggaccgcaaggaaactcaccgtgcgccttatgtcaaagggaccttcaagg

SEQ ID NO: 642687 - DNA, 75 bp, synthetic construct
  source 1..75: mol_type = other DNA
atcactgccgagctggcgaacggtcaggtctatgtattgtcgtctgcctggctgcacggcgaagcgaaccataat

SEQ ID NO: 642688 - DNA, 75 bp, synthetic construct
  source 1..75: mol_type = other DNA
tggtatgcattttcactgccgaaaatgaaagccagcaaagaagtcacaatagacgatgagttacgtatctggaaa

SEQ ID NO: 642689 - DNA, 75 bp, synthetic construct
  source 1..75: mol_type = other DNA
atcattataaagtggaagaaacaggagaggacactattcgctcttttgtttcattatatcttgatgctctcaggg

SEQ ID NO: 642690 - DNA, 75 bp, synthetic construct
  source 1..75: mol_type = other DNA
tgcggtacttgaacagagtctctcccggcataacgcaattcttaatgatcttaacaccatcagtattcacgatac

SEQ ID NO: 642691 - DNA, 75 bp, synthetic construct
  source 1..75: mol_type = other DNA
cacgctgggaaaactgtccacctggacaaaaaatccggtaaccgaaagtgatcttgaaaatcctttttcccggat

SEQ ID NO: 642692 - DNA, 75 bp, synthetic construct
  source 1..75: mol_type = other DNA
ctgttactttgtgtggttgctggcgcggtgatgattaatgccgctgattttccagcaactgccattgaaacggat

SEQ ID NO: 642693 - DNA, 75 bp, synthetic construct
  source 1..75: mol_type = other DNA
atataacggggaacgcaccaaagttgaagcgggcgatgtgtcaaatgtgtcaacgatggttaagaccattcttaa

SEQ ID NO: 642694 - DNA, 75 bp, synthetic construct
  source 1..75: mol_type = other DNA
atccgtcgtggcttgccagccgggctgatgtggagagtaaaaaagcagcactgaaagcgcaggagcttgccagat

SEQ ID NO: 642695 - DNA, 75 bp, synthetic construct
  source 1..75: mol_type = other DNA
gatggttgatggcaatcagaacgtggaagaacggaagatcggtatttattccggccaggtctggcacagtgattt

SEQ ID NO: 642696 - DNA, 75 bp, synthetic construct
  source 1..75: mol_type = other DNA
ggtggtggcgctggccggcatgatgtttgtgacccgtaatatcgactggtatgcgttttcactgccgaaaatgaa

SEQ ID NO: 642697 - DNA, 75 bp, synthetic construct
  source 1..75: mol_type = other DNA
tgctgttgttgattccgataatgctgattcggcaggtgattgtcgaacgtgccgattaccgtagcgatgtggaag

SEQ ID NO: 642698 - DNA, 75 bp, synthetic construct
  source 1..75: mol_type = other DNA
ggaagaaagaattcgttcctttgtatctctatatcttgatgcactcagggaaaaacaatccattgaggtacttaa

SEQ ID NO: 642699 - DNA, 75 bp, synthetic construct
  source 1..75: mol_type = other DNA
ctttaaccgaagggaactggctgaagcagaacctgaagctgaatatggcgctgaatttaagcgggacagggagcc

SEQ ID NO: 642700 - DNA, 75 bp, synthetic construct
  source 1..75: mol_type = other DNA
gtggggactgctgaattctgccgatagcgcgctgttgttgggaaccagtgtgctggtggtggcgctggcaggcat

SEQ ID NO: 642701 - DNA, 75 bp, synthetic construct
  source 1..75: mol_type = other DNA
atgaaagatttaactttgaagtttcatgacaaactgcagtttaaggccttcctgtcatctcttgtctgggcggac

SEQ ID NO: 642702 - DNA, 75 bp, synthetic construct
  source 1..75: mol_type = other DNA
atgatgatctcatatcaggaacttgttcgcaccttccctattggcgttccgttcttctggccgtccgctgcaatg

SEQ ID NO: 642703 - DNA, 75 bp, synthetic construct
  source 1..75: mol_type = other DNA
atgccagttagtcgtaatcgctgcattttcttaaacgttggtttgggagaaggctctgcattacctgttggtgtg

SEQ ID NO: 642704 - DNA, 75 bp, synthetic construct
  source 1..75: mol_type = other DNA
acgaccagactctggaaagttttacaggcaccacgattttaaaacaaatcacgcccctgtctccggccattgact

SEQ ID NO: 642705 - DNA, 75 bp, synthetic construct
  source 1..75: mol_type = other DNA
ctttagctttgatgcatctaaaatcgttcctgttgccactgaaaaccggccgcgcaacgtcgcatttaacttcat

SEQ ID NO: 642706 - DNA, 75 bp, synthetic construct
  source 1..75: mol_type = other DNA
gagttcagaactgtaaacactgaaaattattcaatatgggaaacagtaggttcgtttaagggggccatagtgcca

SEQ ID NO: 642707 - DNA, 75 bp, synthetic construct
  source 1..75: mol_type = other DNA
gcattttcttaaacgttggtttaggagaaggctcagcattgcctgttggcgtacctgttccgtggccctcagcca

SEQ ID NO: 642708 - DNA, 75 bp, synthetic construct
  source 1..75: mol_type = other DNA
gagctgcttcatctgattcaattaacggtggttatgcaaagcgagtaacattcgatgcttccagagttgttccaa

SEQ ID NO: 642709 - DNA, 75 bp, synthetic construct
  source 1..75: mol_type = other DNA
acctggcgaatagcctcatcattgatgggcgcagtgaaatgggcgaactggcgcagagcgtttcgcatatgcagc

SEQ ID NO: 642710 - DNA, 75 bp, synthetic construct
  source 1..75: mol_type = other DNA
acgcggtgagtttatccgtggatgggacgacgggcgcaaagttgatacaggacgtaagttgctgtccgcacaagg

SEQ ID NO: 642711 - DNA, 75 bp, synthetic construct
  source 1..75: mol_type = other DNA
cccgatttacgcggtgagtttatccgtggatgggacgacgggcgcaaagttgatacggggcgttcattgctaagt

SEQ ID NO: 642712 - DNA, 75 bp, synthetic construct
  source 1..75: mol_type = other DNA
ctgttataaccgttggaaacccagctaatcctaaagcaggaaataatagcgattatgttcctgcatcagcagata

SEQ ID NO: 642713 - DNA, 75 bp, synthetic construct
  source 1..75: mol_type = other DNA
cggtgcggctttttctgctgaagaatacccggaactggcaaaggcttacccgacaaataaattgcctgatttacg

SEQ ID NO: 642714 - DNA, 75 bp, synthetic construct
  source 1..75: mol_type = other DNA
cacaaccggtggttactggcagagatgagccgcattgcagcggatgtgatactggaaatctgccatcaggcagat

SEQ ID NO: 642715 - DNA, 75 bp, synthetic construct
  source 1..75: mol_type = other DNA
gaccacgctgatggggtacacacagtggtgttgttcctcaccggactgttgccacacaaaaaaggtctgcttccg

SEQ ID NO: 642716 - DNA, 75 bp, synthetic construct
  source 1..75: mol_type = other DNA
tcaacgtatcccgggtgatggataatgccacccatgtggcggtgtactctggctcttacctgaaaaactgccggt

SEQ ID NO: 642717 - DNA, 75 bp, synthetic construct
  source 1..75: mol_type = other DNA
aaaagccgccggtgccaatgagccgtctggaacactatgccggtcaggatgaaactggtctgcgttacaacagcc

SEQ ID NO: 642718 - DNA, 75 bp, synthetic construct
  source 1..75: mol_type = other DNA
gtggcggataaggggttccgtatggtgaggtactacggtttcctgagtccggtgaagcgccggttactggaagat

SEQ ID NO: 642719 - DNA, 75 bp, synthetic construct
  source 1..75: mol_type = other DNA
gggcctttaactacaccctcaaccgggacagtgatgagagctggtatctgcgcagtgaagaacgttatcgtgctg

SEQ ID NO: 642720 - DNA, 75 bp, synthetic construct
  source 1..75: mol_type = other DNA
atgccagttagccgtaatctctgcattttcttaaacgttggtttgggagaaggctctgcattacctgttggtgtc

SEQ ID NO: 642721 - DNA, 75 bp, synthetic construct
  source 1..75: mol_type = other DNA
aggttcagcattacctattggtgcgcctgttccgtggccttctgagacacctccaacaggctggctgaaatgcaa

SEQ ID NO: 642722 - DNA, 75 bp, synthetic construct
  source 1..75: mol_type = other DNA
tttaatggtctttttgctgttaaacaaacaaatggtttaggtggtgtttctgtagcaaaaagtaaaaatgctgaa

SEQ ID NO: 642723 - DNA, 75 bp, synthetic construct
  source 1..75: mol_type = other DNA
tgaaaaagccgccggtgccgatgagccgtctggagcactatgcaggtcaggatgaaattggtctgcgttacaaca

SEQ ID NO: 642724 - DNA, 75 bp, synthetic construct
  source 1..75: mol_type = other DNA
atttttacgcccgtaaggtgatgagcatgtggcgttaccggataacgcggctactgtcccggaaatacccggagc

SEQ ID NO: 642725 - DNA, 75 bp, synthetic construct
  source 1..75: mol_type = other DNA
tgcatgagccactggccaggatgcggtggtgcggcagagagccgcatcggggaagttgcatccattgtccgggaa

SEQ ID NO: 642726 - DNA, 75 bp, synthetic construct
  source 1..75: mol_type = other DNA
agccagcccactcaccaataaaccgcaaacaccatcccgtcctgccagtgagcaaccaccggcacagccacgact

SEQ ID NO: 642727 - DNA, 75 bp, synthetic construct
  source 1..75: mol_type = other DNA
taccgccatcaccaatatgaacggcattatcagcctcgcacctggcggtattggcccggcaatgatgtgtgaaat

SEQ ID NO: 642728 - DNA, 75 bp, synthetic construct
  source 1..75: mol_type = other DNA
tgctgccagaaggtcagtttaaatatcacgtcgattttgagcatctgcacattggcgaagaaacggggatgattt

SEQ ID NO: 642729 - DNA, 75 bp, synthetic construct
  source 1..75: mol_type = other DNA
cagacactgctgtccgacatgctggaaagcggtaaagcaacggatgcgctatgcaattacgacggcccacaagga

SEQ ID NO: 642730 - DNA, 75 bp, synthetic construct
  source 1..75: mol_type = other DNA
atcagcacgggatcccgctggtgattgataacgcctatggcgtcccgttcccgggcatcatctttagcgaagcgc

SEQ ID NO: 642731 - DNA, 75 bp, synthetic construct
  source 1..75: mol_type = other DNA
gccggggcacaacttcttcccagggctggataaaccgtggccgcatacgcatcaatgtatgcgcatgaactacgt

SEQ ID NO: 642732 - DNA, 75 bp, synthetic construct
  source 1..75: mol_type = other DNA
aggcaatgtgattactgacgaagagttactgaagctggacgcgctggcgaatcagcacggtattccactggtgat

SEQ ID NO: 642733 - DNA, 75 bp, synthetic construct
  source 1..75: mol_type = other DNA
cgggcagtcgattggttttagcaatctcacagagcatggcggtttctttgcgggtggctggaaagggttcctgac

SEQ ID NO: 642734 - DNA, 75 bp, synthetic construct
  source 1..75: mol_type = other DNA
cacggggccaaataataatactgtcggcgcatttacctcttcaacattgacaccaaatctctcatcaattgcgac

SEQ ID NO: 642735 - DNA, 75 bp, synthetic construct
  source 1..75: mol_type = other DNA
ccggatttacgcggtgaatttatccgtggctgggatgacggacgtggtgtggatgcggggagaacaatattatcc

SEQ ID NO: 642736 - DNA, 75 bp, synthetic construct
  source 1..75: mol_type = other DNA
gttttagcaacctcacagagcatggcggtttctttgcgggtggctggaaagggttcctgaccgcattgtgtattg

SEQ ID NO: 642737 - DNA, 75 bp, synthetic construct
  source 1..75: mol_type = other DNA
gctgattggcattactgccggtgaagcgaagaatccgcaggtgacactgcgcagtgccgtaggcaaagtgctgtg

SEQ ID NO: 642738 - DNA, 75 bp, synthetic construct
  source 1..75: mol_type = other DNA
ttcgccgtttacgcacatcgttatatgagcccgttttttggctatctcactgcctggtcttactggttcatgtgg

SEQ ID NO: 642739 - DNA, 75 bp, synthetic construct
  source 1..75: mol_type = other DNA
cccagagccggagaaaattgaagctggcgtgaagattctggcggaagagattgaacgcgcctgggctgaaagcca

SEQ ID NO: 642740 - DNA, 75 bp, synthetic construct
  source 1..75: mol_type = other DNA
gcgactcattataaaaaattcaaaagcatggcaccgttacctgaaatggtcgctaccagtcgtaatattgatgaa

SEQ ID NO: 642741 - DNA, 75 bp, synthetic construct
  source 1..75: mol_type = other DNA
tgctattgtcagtcataaccactattggggaatctggacttcacgaactaacgaccagactctggaaagttttac

SEQ ID NO: 642742 - DNA, 75 bp, synthetic construct
  source 1..75: mol_type = other DNA
ggcggaagatagttttaccggggcatggatatcaatgcgcccccgcaatgttgcgtttaattacatcgtaagggc

SEQ ID NO: 642743 - DNA, 75 bp, synthetic construct
  source 1..75: mol_type = other DNA
gtcgataccggttcggtgctggttgaaagcgccggagagacgatgaccaacatcgttaatgcggttacgcgcgtt

SEQ ID NO: 642744 - DNA, 75 bp, synthetic construct
  source 1..75: mol_type = other DNA
tctacccattataaaaaattcaaaagcatggcgccgttacctgaaatggtcgccaccagtcgtaatattgatgaa

SEQ ID NO: 642745 - DNA, 75 bp, synthetic construct
  source 1..75: mol_type = other DNA
tcttgattaccttggtttaggggaaggctcggcgctgcccgttggtgtacctattccatggccctcagccacacc

SEQ ID NO: 642746 - DNA, 75 bp, synthetic construct
  source 1..75: mol_type = other DNA
attgttgtagctaacgatgggtatgacacaaaggatgaatgggagttggccacaattttcaaaaaaacatataca

SEQ ID NO: 642747 - DNA, 75 bp, synthetic construct
  source 1..75: mol_type = other DNA
cgttggtttgggggaaggctctgcattgcctgttggtgtaccggttccatggcccaccgccacaccgccagcagg

SEQ ID NO: 642748 - DNA, 75 bp, synthetic construct
  source 1..75: mol_type = other DNA
acaattatggatcatgcacacaatatggaattgtggacgggggacgggcttgccgcaggaagtgcacgggaagga

SEQ ID NO: 642749 - DNA, 75 bp, synthetic construct
  source 1..75: mol_type = other DNA
accctgtgctggcgaaagtgtttccggcgctggcattacctgacgcacgcggtgatttcattcgtatctgggatg

SEQ ID NO: 642750 - DNA, 75 bp, synthetic construct
  source 1..75: mol_type = other DNA
agccgcaagaatccgtttggcgatatcaaatctgatggcacggtgaaaacggctctcgaaaaccttggtttggga

SEQ ID NO: 642751 - DNA, 75 bp, synthetic construct
  source 1..75: mol_type = other DNA
ggatgcactgaaagaccgggtgaataacgcgttatggcgtgactcgccaggtcccggctatgtgcatttccctga

SEQ ID NO: 642752 - DNA, 75 bp, synthetic construct
  source 1..75: mol_type = other DNA
gaagtgaagaaacactcaagacggttatcaataccgactggggattaccttatcttccccgcgccagcatggagc

SEQ ID NO: 642753 - DNA, 75 bp, synthetic construct
  source 1..75: mol_type = other DNA
agggttgatcctctcttcaaaccggataacgacatccctgtttccggggcttatgtcacctttgaacccggcgct

SEQ ID NO: 642754 - DNA, 75 bp, synthetic construct
  source 1..75: mol_type = other DNA
atcaggccgataaacgcctgattgttatcaagcagccgattggcgttaccgcagctatcacgccgtggaacttcc

SEQ ID NO: 642755 - DNA, 75 bp, synthetic construct
  source 1..75: mol_type = other DNA
acgccgggcaaacctgcgtctgcgccaaccgtttatacgtgcaggacggcgtgtatgaccgctttgccgaaaaat

SEQ ID NO: 642756 - DNA, 75 bp, synthetic construct
  source 1..75: mol_type = other DNA
ttgatcgttacaacatcacgcagtcattgcgcggtgactgcgacggggagagccagcgaattgatccggccagct

SEQ ID NO: 642757 - DNA, 75 bp, synthetic construct
  source 1..75: mol_type = other DNA
atcgtcgatgaagaacactttggtcaggatgctgccaacgaagtgagcgtgccgtatccgttcaaatctgccacc

SEQ ID NO: 642758 - DNA, 75 bp, synthetic construct
  source 1..75: mol_type = other DNA
aacctcggtttgacctgcgaccccgttgcagggcaagttcaggtgccgtgcattgaacgtaatgccattgcctct

SEQ ID NO: 642759 - DNA, 75 bp, synthetic construct
  source 1..75: mol_type = other DNA
aacggtgccaccacggaggaaggggcctttgtccaggggaacaggctgcaggccggtgcctttaactactccctc

SEQ ID NO: 642760 - DNA, 75 bp, synthetic construct
  source 1..75: mol_type = other DNA
tggcgataaccgggattgtggatggcaaaagcgttaactggatggagaaagtgacagatgaacaataccacgccc

SEQ ID NO: 642761 - DNA, 75 bp, synthetic construct
  source 1..75: mol_type = other DNA
gccgacgcacggatgacggctggggtggtaaacgctattgctgcatatcatccctcattaatgctaatgtatgcg

SEQ ID NO: 642762 - DNA, 75 bp, synthetic construct
  source 1..75: mol_type = other DNA
gctcacggataaaaaattcaaagaaatcgttgttgaaattgataatcgtaaaaaagttcagcagcaattaatcaa

SEQ ID NO: 642763 - DNA, 75 bp, synthetic construct
  source 1..75: mol_type = other DNA
ccgttcggcggcataaaagcctcgggtctgggtcgtgaaggttcgaagtatggcatcgaagattatttagaaatc

SEQ ID NO: 642764 - DNA, 75 bp, synthetic construct
  source 1..75: mol_type = other DNA
atgttattatccggtgggctaacagaatgcagcaggcatccggaagtgatgtgcggaatttaccggtgtcagtgg

SEQ ID NO: 642765 - DNA, 75 bp, synthetic construct
  source 1..75: mol_type = other DNA
agctattaaaaaaattttcgtctttagcgaataaatcaacgggaagttcacatcctaatgatcaagagagatggt

SEQ ID NO: 642766 - DNA, 75 bp, synthetic construct
  source 1..75: mol_type = other DNA
atgacaggatacggaggacagttgtggcgcacgttttcggtgaacgcactctggccacactggcgcgtcttctga

SEQ ID NO: 642767 - DNA, 75 bp, synthetic construct
  source 1..75: mol_type = other DNA
tccttctgtcgatattttacagaataaaatgtatgaagttgaaaaatatatgacactgacaggccatgtttatac

SEQ ID NO: 642768 - DNA, 75 bp, synthetic construct
  source 1..75: mol_type = other DNA
ccgggcagtggcgataaggaatgaactggttcgtcggggagtcattaaggatgattgttattatggtgaaccaga

SEQ ID NO: 642769 - DNA, 75 bp, synthetic construct
  source 1..75: mol_type = other DNA
gaacgggctgttagtatacgtagtgagttggttcgtcgtggggtaattaaaatccaggctgataaaattgtctgg

SEQ ID NO: 642770 - DNA, 75 bp, synthetic construct
  source 1..75: mol_type = other DNA
ccgttttccgggaacaccatattaatgaactcagcgccgcactggccagaatgctccacatgcaccacatactgc

SEQ ID NO: 642771 - DNA, 75 bp, synthetic construct
  source 1..75: mol_type = other DNA
tttatcgtctttgacgatgccgatctcgataaagccgtggaaggcgcgctggcctcgaaattccgcaacgccggg

SEQ ID NO: 642772 - DNA, 75 bp, synthetic construct
  source 1..75: mol_type = other DNA
aagaagagacattcggccccctcgccccgctgttccgttttaaagatgaagccgatgtgatcgcgcaagccaatg

SEQ ID NO: 642773 - DNA, 75 bp, synthetic construct
  source 1..75: mol_type = other DNA
atcagacttttactagaattgccgccactgacgatggaacaacaataactaactcagatacggtgatgctgccaa

SEQ ID NO: 642774 - DNA, 75 bp, synthetic construct
  source 1..75: mol_type = other DNA
taaatctgaatggcaataatgtaaccataaaaaacacagatataacattacaccaaaacaatgcagataccactg

SEQ ID NO: 642775 - DNA, 75 bp, synthetic construct
  source 1..75: mol_type = other DNA
gccgtacgaaggtgaagccattgagattcgcgggcaaaagcaatttgcccttgtaaaagatggcctcgaacaaat

SEQ ID NO: 642776 - DNA, 75 bp, synthetic construct
  source 1..75: mol_type = other DNA
ccggggagaccgccgccggtggtactggccgtgtccgcactgcggggaatattttcagccggtgatggataacat

SEQ ID NO: 642777 - DNA, 75 bp, synthetic construct
  source 1..75: mol_type = other DNA
aggtgatgagcatgtggcgttaccggataacgcggctactgtcccggaaatacccggagctggtgataccggatg

SEQ ID NO: 642778 - DNA, 75 bp, synthetic construct
  source 1..75: mol_type = other DNA
cataacggagacggtgagaaaaacggcgatgcaaatcaggtggagagggatgtatcagaggttactgaaggttga

SEQ ID NO: 642779 - DNA, 75 bp, synthetic construct
  source 1..75: mol_type = other DNA
cgtgacaccagaccacacctggaaaaaccttcatttttacgcccgtaaggtgatgagcatgtggcgttaccggat

SEQ ID NO: 642780 - DNA, 75 bp, synthetic construct
  source 1..75: mol_type = other DNA
gctggtgcagaccgatgcgtttaaggaccgtgtaaataatgccctgtggcgtgacacgccgggaccgaattatat

SEQ ID NO: 642781 - DNA, 75 bp, synthetic construct
  source 1..75: mol_type = other DNA
ccggaaggggcagtccgtccggtggtaattgaatcagtgacaaaaatcatggcctgcgggaccacactgatgggc

SEQ ID NO: 642782 - DNA, 75 bp, synthetic construct
  source 1..75: mol_type = other DNA
aggtgtgcggctgagagccgcagaggggaagttgcgtccattttaccggaaacggagcaaaaaaccgccattcat

SEQ ID NO: 642783 - DNA, 75 bp, synthetic construct
  source 1..75: mol_type = other DNA
ttacgggacttaagcgggataccgtctggcagagcctgatgcacaagccgctggcacgaatgctgtggtgcggct

SEQ ID NO: 642784 - DNA, 75 bp, synthetic construct
  source 1..75: mol_type = other DNA
gatattcacggtcatccacacatggggacgtgaccagcagtggcatccgcacattcacctgtcgacaacgaccgg

SEQ ID NO: 642785 - DNA, 75 bp, synthetic construct
  source 1..75: mol_type = other DNA
gccacaccaaaaaggtctgcttccggtgtaaaagccgctcctgtccgcactgcggggtgaaggctggcgcacagt

SEQ ID NO: 642786 - DNA, 75 bp, synthetic construct
  source 1..75: mol_type = other DNA
cagcagaaggaaacagtaaacgggaatggaatcgtttcctggacacacactaccgccgcggctggaatgtcaacg

SEQ ID NO: 642787 - DNA, 75 bp, synthetic construct
  source 1..75: mol_type = other DNA
atccgcacattcacctgtcgacaacgaccggcggcgtgacatcagaccacacctggaaaaaccttcatttttacg

SEQ ID NO: 642788 - DNA, 75 bp, synthetic construct
  source 1..75: mol_type = other DNA
gcagcggatgtgatactggaaatctgccatcagacagatgtggagccggggatattcacggtgatccacacatgg

SEQ ID NO: 642789 - DNA, 75 bp, synthetic construct
  source 1..75: mol_type = other DNA
gctgattgcccctgagcagaaacgcgaactgaataacaaagggatctggcttcgtgaaggtgaacgggcggtggc

SEQ ID NO: 642790 - DNA, 75 bp, synthetic construct
  source 1..75: mol_type = other DNA
gcgcacaattaaacaacatgcgtgacgagccgcgcagcgtgtcgccggggatgtctaccgacgcgctgaatcagg

SEQ ID NO: 642791 - DNA, 75 bp, synthetic construct
  source 1..75: mol_type = other DNA
gctactacctgatgagcatcgggcttattgtgccgctgattatggcgctgatgatgttcgataacctcgacgacc

SEQ ID NO: 642792 - DNA, 75 bp, synthetic construct
  source 1..75: mol_type = other DNA
tcagcgactgggaccgtaaagagattatcgtgccgaacaaggcgtttattactgagcagtttatcaactggtcac

SEQ ID NO: 642793 - DNA, 75 bp, synthetic construct
  source 1..75: mol_type = other DNA
tgcgacggggagagccagcgaattgatccggccagctatccggaagactgggatgtcctgctgacggatgttttt

SEQ ID NO: 642794 - DNA, 75 bp, synthetic construct
  source 1..75: mol_type = other DNA
gcaatatcagcaagttatcgataattacccgaaactctccgctactctgcgcgcacagttgaacaacatgcgtga

SEQ ID NO: 642795 - DNA, 75 bp, synthetic construct
  source 1..75: mol_type = other DNA
gtgcctcagttgggggcgtacgccgcgacggcccccgatagcaaacaaatcactcaggaactggagcaggcaaaa

SEQ ID NO: 642796 - DNA, 75 bp, synthetic construct
  source 1..75: mol_type = other DNA
cgcaaccagttgaacagccaacgccagcttgaggcagagcgggcgctggaaagcactgaattactggcagaaagc

SEQ ID NO: 642797 - DNA, 75 bp, synthetic construct
  source 1..75: mol_type = other DNA
cgagccgcgcagtgcgccgtcggggatgtccaccgacgcgctaaatcaggaaattctccagatcagtagccagtt

SEQ ID NO: 642798 - DNA, 75 bp, synthetic construct
  source 1..75: mol_type = other DNA
gcgaaaaccgggcaggggagctaacgaggcgtttgacctgctggtttatgcggatgcgcttgccgttctgcatgg

SEQ ID NO: 642799 - DNA, 75 bp, synthetic construct
  source 1..75: mol_type = other DNA
ccggaagtcttcctggtcgatctacaacaggggattcagattttcgagttgcgtatttacgccgcggaaatgggt

SEQ ID NO: 642800 - DNA, 75 bp, synthetic construct
  source 1..75: mol_type = other DNA
gcgctggaaagtaccgaattgctggcagaaaacagcgccgatttgccgaaagatatcgtcgcgcaattcaaaatt

SEQ ID NO: 642801 - DNA, 75 bp, synthetic construct
  source 1..75: mol_type = other DNA
tcgcacagttcaaaattaaccgtgaactatcggcagcgctgaatcagcaggcacagcgaatggatttagtggctt

SEQ ID NO: 642802 - DNA, 75 bp, synthetic construct
  source 1..75: mol_type = other DNA
aagtattggtaacacaggtggtagtgaaacccgcccccgcaatattgcatttaactatatcgtgagggcggctta

SEQ ID NO: 642803 - DNA, 75 bp, synthetic construct
  source 1..75: mol_type = other DNA
tggcccaccgccacaccgccagcaggctggttaaagtgcgacgggcgcgcctttacaaaagaacaatatcctgtt

SEQ ID NO: 642804 - DNA, 75 bp, synthetic construct
  source 1..75: mol_type = other DNA
ccgttggcgtgcctgttccgtggccttccgccactccgccaacaggctggctgaaatgcaacggtgccgcttttt

SEQ ID NO: 642805 - DNA, 75 bp, synthetic construct
  source 1..75: mol_type = other DNA
gtcctgaacgctgccggtattaatgttgatccttctaaacaaaaccagttattaacagcactaaaagcgctgtta

SEQ ID NO: 642806 - DNA, 75 bp, synthetic construct
  source 1..75: mol_type = other DNA
ggcaaaagcctaccccgcgaataaattaccggatttacgcggagaatttatccgtggctgggatgatgggcgagg

SEQ ID NO: 642807 - DNA, 75 bp, synthetic construct
  source 1..75: mol_type = other DNA
gaacggcgagctgaaggttcatgccggcggagaagcgtctgatgtcacccagaacacgggaggtgcattggttac

SEQ ID NO: 642808 - DNA, 75 bp, synthetic construct
  source 1..75: mol_type = other DNA
gtgctttattgagcattcagactgggatgctggaaaaacaccgccatattgttgttgccaacgatgggtatgatt

SEQ ID NO: 642809 - DNA, 75 bp, synthetic construct
  source 1..75: mol_type = other DNA
taccttggtttgggagaaggttcagcattacctgttggtgcgcctgttccgtggccttcagagacacctccaaca

SEQ ID NO: 642810 - DNA, 75 bp, synthetic construct
  source 1..75: mol_type = other DNA
gcaaggttgataccgggcgtgcgctactttcatttcaggaagggactatcgtatccggttttgatgataatgata

SEQ ID NO: 642811 - DNA, 75 bp, synthetic construct
  source 1..75: mol_type = other DNA
ttttcataaacgttggtttgggagaaggctctgcattaccggttggtgtgcctgttccgtggccttcagctacac

SEQ ID NO: 642812 - DNA, 75 bp, synthetic construct
  source 1..75: mol_type = other DNA
gacgagatgctgactttaagttccacaactaatgccttgtccccggacagtattgatgccaccaactcgttaatt

SEQ ID NO: 642813 - DNA, 75 bp, synthetic construct
  source 1..75: mol_type = other DNA
acgggatgttggaaaaacaccgccatattgttgtagctaacgatggatatgacacaaaggatgaatgggagttgg

SEQ ID NO: 642814 - DNA, 75 bp, synthetic construct
  source 1..75: mol_type = other DNA
gttgatacgaggcgttcattgctaagtggtcaggctgcaacatttattcgtacagctttgcaggattattacggt

SEQ ID NO: 642815 - DNA, 75 bp, synthetic construct
  source 1..75: mol_type = other DNA
taaattgcctgatttacgcggtgaatttattcgtggctgggatgatgggcgtagtgcggatgcggggagaacaat

SEQ ID NO: 642816 - DNA, 75 bp, synthetic construct
  source 1..75: mol_type = other DNA
ctgatttacgcggcgaattcattcgtgggtgggatgatgggcgcaatgtggattcagggcgggcgttactttcac

SEQ ID NO: 642817 - DNA, 75 bp, synthetic construct
  source 1..75: mol_type = other DNA
tcgaacgatggggaaagaatattcattaacacaacagaaggaaatctatctgatccaaacagtaatggtaccggg

SEQ ID NO: 642818 - DNA, 75 bp, synthetic construct
  source 1..75: mol_type = other DNA
tttttgtcgcgctggtcattgttggcgcgggcgtcaaaatcgtgccgcagggctatcagtggacagtagagcgtt

SEQ ID NO: 642819 - DNA, 75 bp, synthetic construct
  source 1..75: mol_type = other DNA
tttatggatcgcattggtcgcaagatcaatatgatggagcaagtgctcgacatcccttcccaggaagttatctcg

SEQ ID NO: 642820 - DNA, 75 bp, synthetic construct
  source 1..75: mol_type = other DNA
gaaggtgaaaaacaatcgcaaatcctgaaagcggaaggcgaacgtcagtcggcgtttttacaggctgaagcgcgt

SEQ ID NO: 642821 - DNA, 75 bp, synthetic construct
  source 1..75: mol_type = other DNA
gaatacctacaaaagtggggtcagttactaatatcccgtatggaatagaacaggttatatctgatgaaaccattt

SEQ ID NO: 642822 - DNA, 75 bp, synthetic construct
  source 1..75: mol_type = other DNA
tgtgcctgttccatggccttcagccacaccgccaacaggctggctgaaatgcaacggtgcggctttttctgctga

SEQ ID NO: 642823 - DNA, 75 bp, synthetic construct
  source 1..75: mol_type = other DNA
atggttataaaaaaggttggtttgggagaaggttcggcattacccgttggtgtgcctgttccgtggccttccgcc

SEQ ID NO: 642824 - DNA, 75 bp, synthetic construct
  source 1..75: mol_type = other DNA
ggcgcggtattgacgcgaggcgcgaaattctgtctgctcagggtgacgccattcgaaatatcgttgggcatatct

SEQ ID NO: 642825 - DNA, 75 bp, synthetic construct
  source 1..75: mol_type = other DNA
tggctatggcgaaagctatatcaacgccaccggattacgccatgtctggcatttacgttgtctggataccttaaa

SEQ ID NO: 642826 - DNA, 75 bp, synthetic construct
  source 1..75: mol_type = other DNA
atctgcccaataccggaagtggtgctggcagcgccagaagatttggtcgactgtgccatcaggttaacgaggtat

SEQ ID NO: 642827 - DNA, 75 bp, synthetic construct
  source 1..75: mol_type = other DNA
caactaccgcatctgacactggatcgtttatgctgttattggggtacattggtcagtatgtcactgtctctggtt

SEQ ID NO: 642828 - DNA, 75 bp, synthetic construct
  source 1..75: mol_type = other DNA
cccgtgaagagacctttggcccggtggcaccgctttttcgcttcaccacggaagatgaggtgattgcaatggcga

SEQ ID NO: 642829 - DNA, 75 bp, synthetic construct
  source 1..75: mol_type = other DNA
ttttgccaacggtgcggtaagatcggctttgtggcttaatagcaagaaaagtggtctttttgatatgcgagatgt

SEQ ID NO: 642830 - DNA, 75 bp, synthetic construct
  source 1..75: mol_type = other DNA
gcacgctgaatcatctggccttttgtcgccaacacggcaaaggaatggtgatcggcactacgggttttgacgaag

SEQ ID NO: 642831 - DNA, 75 bp, synthetic construct
  source 1..75: mol_type = other DNA
tgtttttcatctccagaacttttatcgtgctgtcaaacattagacctgatctccagtcaggagtttatatgtatg

SEQ ID NO: 642832 - DNA, 75 bp, synthetic construct
  source 1..75: mol_type = other DNA
aaaatagtgacaatagcgccggaggacataagctggggcttatatccctcatcgctattgtcgttagctccatgc

SEQ ID NO: 642833 - DNA, 75 bp, synthetic construct
  source 1..75: mol_type = other DNA
gtaacgccccgtttatcgtctttgatgacgccgacatcaatgccgccgttgagggggcactggcctcaaaatacc

SEQ ID NO: 642834 - DNA, 75 bp, synthetic construct
  source 1..75: mol_type = other DNA
caatccgattaaattatatgtgtacaatctttgtactaaagataaagtgttcattgctaatatttctgcatataa

SEQ ID NO: 642835 - DNA, 75 bp, synthetic construct
  source 1..75: mol_type = other DNA
tttcacgcctggagaggttaccctgttcgggtacttccgccagcagcgcagcagccgtcatggtgccaacacctt

SEQ ID NO: 642836 - DNA, 75 bp, synthetic construct
  source 1..75: mol_type = other DNA
ggtactcgcttggcggacgggtggcgatgatggcggcttgccaggagccggcggggctttgtggaacgcgcaccg

SEQ ID NO: 642837 - DNA, 75 bp, synthetic construct
  source 1..75: mol_type = other DNA
cagtcgtgaaggccataccggtgaacgtgtgcctggtaccattggttttgccaccgtgcgtgcaggtgacatcgt

SEQ ID NO: 642838 - DNA, 75 bp, synthetic construct
  source 1..75: mol_type = other DNA
ccaccgtccgtgccggagacatcgtgggtgaacataccgccatgtttgccgatatcggcgaacgtctggagatca

SEQ ID NO: 642839 - DNA, 75 bp, synthetic construct
  source 1..75: mol_type = other DNA
gcgttaaaacgcgatttaacccactgcttgtgcgtgaagaagacacgctgaaagccttcctgattaaagcgctga

SEQ ID NO: 642840 - DNA, 75 bp, synthetic construct
  source 1..75: mol_type = other DNA
tctttaagggctttttctgcaaaaaattataatcatgtacataaaataggatatctaaaattaattggaatagta

SEQ ID NO: 642841 - DNA, 75 bp, synthetic construct
  source 1..75: mol_type = other DNA
cccgctgttccgttttaaagatgaagccgatgtgattgcgcaagccaatgacaccgaatttggccttgcagccta

SEQ ID NO: 642842 - DNA, 75 bp, synthetic construct
  source 1..75: mol_type = other DNA
ttgctcagcagcgtataacagggaatttcatggggggagctatgggtagctctggctcaataaaagcgggtgcac

SEQ ID NO: 642843 - DNA, 75 bp, synthetic construct
  source 1..75: mol_type = other DNA
tggttttacactgacgacattgcagtcactgacgcgcggcttcgcgcgcacccggatgatgtggaggttatccct

SEQ ID NO: 642844 - DNA, 75 bp, synthetic construct
  source 1..75: mol_type = other DNA
gacgggcgcaaagttgatacaggacgtaagttgctgtccgcacaaggggcaacgctgttaagaacagcaatgctg

SEQ ID NO: 642845 - DNA, 75 bp, synthetic construct
  source 1..75: mol_type = other DNA
cgccagaaggctggttaaagtgcaacggagctacgttcaccaaagaacaatatcctgttctggccagagtctacc

SEQ ID NO: 642846 - DNA, 75 bp, synthetic construct
  source 1..75: mol_type = other DNA
ctctcgaaaaccttggtttgggagaaggtgctccagctattggcgttccgttcttctggccgtccgccgcaatgc

SEQ ID NO: 642847 - DNA, 75 bp, synthetic construct
  source 1..75: mol_type = other DNA
tggcagcgccagaagatttggtcgactctgcgcagcggcttagcgaggtatgccagtggctggcggagggggcac

SEQ ID NO: 642848 - DNA, 75 bp, synthetic construct
  source 1..75: mol_type = other DNA
atgagcgaaacttttttccatctgctggggccaggaacgcaaccgaacgatgacagtttcagcatgaatccactg

SEQ ID NO: 642849 - DNA, 75 bp, synthetic construct
  source 1..75: mol_type = other DNA
tcaataaaaatggtcgtcagattgtggctgctgaaggaacggcaaataccactgtggtttatgccggcggcgacc

SEQ ID NO: 642850 - DNA, 75 bp, synthetic construct
  source 1..75: mol_type = other DNA
ctggtgaaaaatagcgacggcaaactggctatcgtttctacctctaacgccggaactccgctgaccaccgatgca

SEQ ID NO: 642851 - DNA, 75 bp, synthetic construct
  source 1..75: mol_type = other DNA
tatcactacggcaagcatcatcagacttatgtcactaacctgaacaacctgattaaaggtaccgcgtttgaaggt

SEQ ID NO: 642852 - DNA, 75 bp, synthetic construct
  source 1..75: mol_type = other DNA
caccgatgcccgttgtatccgtgaaatgcatgaagcgccattacaggcgctcaatattctgtccagatacccgca

SEQ ID NO: 642853 - DNA, 75 bp, synthetic construct
  source 1..75: mol_type = other DNA
tgggccgatcatactatacgacggtaacaagaactcagattacatgtgctggctacggtggctttagagttttcg

SEQ ID NO: 642854 - DNA, 75 bp, synthetic construct
  source 1..75: mol_type = other DNA
aggaatagatactaaccgtagcttgctttcgtcacagggagatgccattcgaaatataattggtgcattagtgga

SEQ ID NO: 642855 - DNA, 75 bp, synthetic construct
  source 1..75: mol_type = other DNA
aatcagaggggctttttacgatgcaggaacacgatcagcgagaatgccgaataacacaactactatagacaaaac

SEQ ID NO: 642856 - DNA, 75 bp, synthetic construct
  source 1..75: mol_type = other DNA
aactggacattcgacgcttctcgagcggttcgtacagcatctgaaacccgcccccgaaatattacatttaactat

SEQ ID NO: 642857 - DNA, 75 bp, synthetic construct
  source 1..75: mol_type = other DNA
aaggctcggcgctgcccgttggtgtacctgttccatggccatcagccacacctccaacggggtggctgaaatgca

SEQ ID NO: 642858 - DNA, 75 bp, synthetic construct
  source 1..75: mol_type = other DNA
tcaaatcggatggcacggtgaaaacggctctcgaaaaccttggtttgggagagggagcaaaattaggcgcagcgg

SEQ ID NO: 642859 - DNA, 75 bp, synthetic construct
  source 1..75: mol_type = other DNA
tacccggaactggcaaaggcttatccgacaaataaattacctgatttacgcggtgagtttattcgtggctgggat

SEQ ID NO: 642860 - DNA, 75 bp, synthetic construct
  source 1..75: mol_type = other DNA
aaaggcaagctgaccatcagccacgcctttgcgctggctaccctcaacgagcaacaagtagatgaactggcgaac

SEQ ID NO: 642861 - DNA, 75 bp, synthetic construct
  source 1..75: mol_type = other DNA
atgaaagaaagcaatagccgtcgtgagtttttgagccagagcggtaagatggtcaccgccgccgcgctgtttggt

SEQ ID NO: 642862 - DNA, 75 bp, synthetic construct
  source 1..75: mol_type = other DNA
attcaggggtatgcaacggaggatcatgctcatggattaccgtcaagatccacgattgtgactgatgcaacgatt

SEQ ID NO: 642863 - DNA, 75 bp, synthetic construct
  source 1..75: mol_type = other DNA
taacggagcagcattttcttctgaaaagtaccccaagctggcaaaagcctaccccaccaataaattaccggattt

SEQ ID NO: 642864 - DNA, 75 bp, synthetic construct
  source 1..75: mol_type = other DNA
aagaacaatatcctgttctggccagagtctacccgaccctccgtcttcccgatttacgcggtgagtttatccgtg

SEQ ID NO: 642865 - DNA, 75 bp, synthetic construct
  source 1..75: mol_type = other DNA
cagaatattgttggttcttttgggcgtacccagctttttagagacgtacttagttcagggccatttagtcaacat

SEQ ID NO: 642866 - DNA, 75 bp, synthetic construct
  source 1..75: mol_type = other DNA
tctcgaaaaccttggtttgggagaaggctctgcattacctgttggtgtccctgttccgtggccttcagccactcc

SEQ ID NO: 642867 - DNA, 75 bp, synthetic construct
  source 1..75: mol_type = other DNA
agaaggataagttcggcgcgggtaagaacggttttacccgtggtaacccccagactggcacgcctgccaccgatc

SEQ ID NO: 642868 - DNA, 75 bp, synthetic construct
  source 1..75: mol_type = other DNA
cctgttccgtggccttcagccactccgccaacaggctggctgaaatgcaatggtgcagctttttctgctgaagaa

SEQ ID NO: 642869 - DNA, 75 bp, synthetic construct
  source 1..75: mol_type = other DNA
accgcctactggctggctgaaatgcaacggtgcggctttttctgccgttgaatatccaaaactggcgaaggctta

SEQ ID NO: 642870 - DNA, 75 bp, synthetic construct
  source 1..75: mol_type = other DNA
gcattagtggatgtcaggtttaatacctacccttctgattctggcgtttttacaaccagcgtcatcggagatgct

SEQ ID NO: 642871 - DNA, 75 bp, synthetic construct
  source 1..75: mol_type = other DNA
acccgacaaataaattgcctgatttacgtggtgagttcattcgtggctgggatgacggaagaggaatagatacta

SEQ ID NO: 642872 - DNA, 75 bp, synthetic construct
  source 1..75: mol_type = other DNA
atgaataaattgaatgttgactctggcaactccattgttagccgtccacgtaatatcgcatttaattatattgtg

SEQ ID NO: 642873 - DNA, 75 bp, synthetic construct
  source 1..75: mol_type = other DNA
ggtacttatatcggggttgactggaagaatgacacgcaggcaacggtagtattagcaacagcaactgcttatgac

SEQ ID NO: 642874 - DNA, 75 bp, synthetic construct
  source 1..75: mol_type = other DNA
cagaatgatgcaattcagaatattgttggttcttttgggcgtacccagctttttaaagacgttcttagttcagga

SEQ ID NO: 642875 - DNA, 75 bp, synthetic construct
  source 1..75: mol_type = other DNA
aaatcggatggcacggtgaaaacggctctcgaaaaccttggtttgggagaaggttcggcattccccgttggcgtg

SEQ ID NO: 642876 - DNA, 75 bp, synthetic construct
  source 1..75: mol_type = other DNA
gggagaaggctctgcattacctgttggtgtccctgttccgtggccttcagccactccgccaacaggttggctgaa

SEQ ID NO: 642877 - DNA, 75 bp, synthetic construct
  source 1..75: mol_type = other DNA
atgatggaagaggaattgattcaggacggactctcctgtctgctcaggacgggagcattgaggcacacggccatg

SEQ ID NO: 642878 - DNA, 75 bp, synthetic construct
  source 1..75: mol_type = other DNA
aaaaccttttacggcggaccgtggcgctcactcaatcgccctgcaggcaccactatccaggacatgatcaaactt

SEQ ID NO: 642879 - DNA, 75 bp, synthetic construct
  source 1..75: mol_type = other DNA
ggtagaagttatcattcagacaacagcggttccgctggaggctcagatagcggcggatttagcggcggggggggt

SEQ ID NO: 642880 - DNA, 75 bp, synthetic construct
  source 1..75: mol_type = other DNA
attcagacaacagcggttccggtggaggctcaggaggcgggtttagcggcggtggcggcgcatccggccgctggt

SEQ ID NO: 642881 - DNA, 75 bp, synthetic construct
  source 1..75: mol_type = other DNA
cataccgggtactcattcaggtttatactgcaaatataatgggccatttaggggtggagttaatgagtgacaagg

SEQ ID NO: 642882 - DNA, 75 bp, synthetic construct
  source 1..75: mol_type = other DNA
tttccattgctgtattttccttctttttactttcaccatatttatggtctttacctgtttatgtgtacttcagaa

SEQ ID NO: 642883 - DNA, 75 bp, synthetic construct
  source 1..75: mol_type = other DNA
gggcacaggtcgctgtattaatagtgccatccaccggagacgattctattgaacaatatgctacaagagtttttg

SEQ ID NO: 642884 - DNA, 75 bp, synthetic construct
  source 1..75: mol_type = other DNA
gatttaatcatgtcaaaaacattcaccaaaattatacttatttttttctgtgttcgtttttaattataacgaatc

SEQ ID NO: 642885 - DNA, 75 bp, synthetic construct
  source 1..75: mol_type = other DNA
cgcggtgaatttattcgtggctgggatgatgggcgcgggattgactctggtcgtaacttattatctgcacagaat

SEQ ID NO: 642886 - DNA, 75 bp, synthetic construct
  source 1..75: mol_type = other DNA
aggtgctccagctattggcgttccgttcttctggccgtccgccgcaatgccagataccgtaatcgacagctggtc

SEQ ID NO: 642887 - DNA, 75 bp, synthetic construct
  source 1..75: mol_type = other DNA
ggcttttttacaggccgaagcgcgtgaacgttccgccgaagcggaagcccgcgccacccaaatggtgtctgaagc

SEQ ID NO: 642888 - DNA, 75 bp, synthetic construct
  source 1..75: mol_type = other DNA
aaagtcgctgcgctggcggatgtcatcttatatgaagatgatcatatcctggtgttgaataaaccgtctggcaca

SEQ ID NO: 642889 - DNA, 75 bp, synthetic construct
  source 1..75: mol_type = other DNA
aaaaaacgcattaagcctgaatataaactcgaagcaggtgatgaggtgcgtattccaccggttcgcgttgctgaa

SEQ ID NO: 642890 - DNA, 75 bp, synthetic construct
  source 1..75: mol_type = other DNA
tcaaagtggaagaacgctatgcgtttgccacgctggttcgttgcagtccggttaccggacgtacgcaccagatcc

SEQ ID NO: 642891 - DNA, 75 bp, synthetic construct
  source 1..75: mol_type = other DNA
tgcctgttccgtggccttcagctacaccaccgacaggctggttgaaatgcaatggtgcagctttttctgctgaag

SEQ ID NO: 642892 - DNA, 75 bp, synthetic construct
  source 1..75: mol_type = other DNA
cgtagtgtaaaacgttttggcgaaattagtggaaatgtaggtacagaaactcgtcctcgtaacatcgcttttaat

SEQ ID NO: 642893 - DNA, 75 bp, synthetic construct
  source 1..75: mol_type = other DNA
cctgttccgtggccttccgccactccgccaacaggctggctgaaatgcaatggtgccgctttttctgctgaagaa

SEQ ID NO: 642894 - DNA, 75 bp, synthetic construct
  source 1..75: mol_type = other DNA
ttggcgttccgttcttctggccgtccgccgcaatgccagataccgtaatcaaaagctggtccagtatggtgtttt

SEQ ID NO: 642895 - DNA, 75 bp, synthetic construct
  source 1..75: mol_type = other DNA
atgctggagaaagccaatttgtacgcgcagctttatattcgccctaacgaacaaaacctgtcccgttcgctgttt

SEQ ID NO: 642896 - DNA, 75 bp, synthetic construct
  source 1..75: mol_type = other DNA
cgcattacgtcggcgggctggacccgaccagtgttgatggcgcgatggaaaaatccctcgacaccatgtttcaga

SEQ ID NO: 642897 - DNA, 75 bp, synthetic construct
  source 1..75: mol_type = other DNA
aaccctacactcaggcgcgggcggaaaaactgatcgatttattgcaatcgaaaggcaccactatcgcccgtagcc

SEQ ID NO: 642898 - DNA, 75 bp, synthetic construct
  source 1..75: mol_type = other DNA
atgccagttacccgttatttctgcattttcataaacgttggtttgggagaaggttcggcattacccgttggtgtg

SEQ ID NO: 642899 - DNA, 75 bp, synthetic construct
  source 1..75: mol_type = other DNA
cggatggcacggtgaaaacagctctcgaaaaccttggtttgggagaaggctcagcattacccgttggtgtgcctg

SEQ ID NO: 642900 - DNA, 75 bp, synthetic construct
  source 1..75: mol_type = other DNA
ggctctcgaaaaccttggtttgggagaaggctctgcattacctgtcggtgtgcctgttccgtggccttccgccac

SEQ ID NO: 642901 - DNA, 75 bp, synthetic construct
  source 1..75: mol_type = other DNA
agtgcgctactgttaagccgcaaaaatccgtttggcgatatcaaatcggacggcacggtgaaaacggctctcgaa

SEQ ID NO: 642902 - DNA, 75 bp, synthetic construct
  source 1..75: mol_type = other DNA
aaatcggatggcactgtgcaaacggctctcgaaaaccttggtttgggagaaggttctgcattacctgttggtgtg

SEQ ID NO: 642903 - DNA, 75 bp, synthetic construct
  source 1..75: mol_type = other DNA
gaaggctctgcattacctgttggtgtccctgttccgtggccttcagccactccgccgacaggctggctgaaatgc

SEQ ID NO: 642904 - DNA, 75 bp, synthetic construct
  source 1..75: mol_type = other DNA
agggatcgtcttctctgctggcgcgttcgtgtcggcaatcgtcgcagtacgtattggtatctggctctatcaccg

SEQ ID NO: 642905 - DNA, 75 bp, synthetic construct
  source 1..75: mol_type = other DNA
atcggctggatttgcccctatatttccagacacctgttatcacttaacccattactggcttgctgccgtagatat

SEQ ID NO: 642906 - DNA, 75 bp, synthetic construct
  source 1..75: mol_type = other DNA
gatcatcgacaccgcgcagtttttgaaagagcagggcaaagtcccggctgtagcgaatgattacagccagtacgt

SEQ ID NO: 642907 - DNA, 75 bp, synthetic construct
  source 1..75: mol_type = other DNA
gcactgacctcactggaggcagagccagtggcgtggctggtaacactcacaaaaaacgatcaggaatcagtctct

SEQ ID NO: 642908 - DNA, 75 bp, synthetic construct
  source 1..75: mol_type = other DNA
gccgggaaacacagcgctggctgaaggagaacccgaagttcaggggcatttatcagccggtttactcgccatggg

SEQ ID NO: 642909 - DNA, 75 bp, synthetic construct
  source 1..75: mol_type = other DNA
atgtcagttcaactaactagtgagtctttaaatcagtggcttagtatgagttctcttgcggcagtaatagctgga

SEQ ID NO: 642910 - DNA, 75 bp, synthetic construct
  source 1..75: mol_type = other DNA
ctacaaaccaactgcatcaattcttatcggcgtagccagcctgatcccaactatcacgcaggattcattcgagaa

SEQ ID NO: 642911 - DNA, 75 bp, synthetic construct
  source 1..75: mol_type = other DNA
taaccagtgagtcattaaatcagtggcttagtatgggatctcttgctgcggtaatcgctggggttccgccagaag

SEQ ID NO: 642912 - DNA, 75 bp, synthetic construct
  source 1..75: mol_type = other DNA
ctacaaaccagcagcatcaattcttatcggcatagccagcctgatccctaccatcacgcaggactcttttgaaaa

SEQ ID NO: 642913 - DNA, 75 bp, synthetic construct
  source 1..75: mol_type = other DNA
atatcccaccaatgctatagtgagtatataaaggtcatatcatctatcagtaaaccggaagacttgattggtaaa

SEQ ID NO: 642914 - DNA, 75 bp, synthetic construct
  source 1..75: mol_type = other DNA
gggagatattgatggtgcttatgtctgggcaccggcggttaacgccctggaaaaagacggcaaggtgctgaccga

SEQ ID NO: 642915 - DNA, 75 bp, synthetic construct
  source 1..75: mol_type = other DNA
cgccgccgggttctcctgtcgatgctcagctttctctgcggccttctattctacaaaccaactgcatccatcctt

SEQ ID NO: 642916 - DNA, 75 bp, synthetic construct
  source 1..75: mol_type = other DNA
ttaaagaagtatggacccacgataagggcgtctacaatcgctgtcagacattgggaattacagctaagtctttag

SEQ ID NO: 642917 - DNA, 75 bp, synthetic construct
  source 1..75: mol_type = other DNA
cgctgttctgcgcgaaccccgacaatctgaacgaattacgcctgcgtgatgcgtcctggcacgggctggagctgc

SEQ ID NO: 642918 - DNA, 75 bp, synthetic construct
  source 1..75: mol_type = other DNA
ggcgacgtacaggcgggatcatcccggccgggatgtcgctggagtttcaggcagccgcgaacggtcaggccgatc

SEQ ID NO: 642919 - DNA, 75 bp, synthetic construct
  source 1..75: mol_type = other DNA
gaaaacctttctcctttgacccggagatgcagagcgccgcgctggatattccgcagattgccagccgttatattg

SEQ ID NO: 642920 - DNA, 75 bp, synthetic construct
  source 1..75: mol_type = other DNA
ttaatgccaatatatttaataaaatctggaagttacgcaacaacggtgcaattctcccactccacaatggtatcc

SEQ ID NO: 642921 - DNA, 75 bp, synthetic construct
  source 1..75: mol_type = other DNA
tgaatgaatatctgcatgatgcggcgtggtttgaagatgccctgtttgatgccggtgatgccattctcaagggct

SEQ ID NO: 642922 - DNA, 75 bp, synthetic construct
  source 1..75: mol_type = other DNA
ggccaaatcccgcaccgggtacgttggcaccaatggccttgtgcgcacgcttatctggccttttatttttaaaaa

SEQ ID NO: 642923 - DNA, 75 bp, synthetic construct
  source 1..75: mol_type = other DNA
atgcaaaactggataaaggccgcagcgatcgccgtaagcctggcgctgcccggcgtggcgctggcgcaatcgctg

SEQ ID NO: 642924 - DNA, 75 bp, synthetic construct
  source 1..75: mol_type = other DNA
cagtgcaaaaataaagtcgaatggcctgttaatgcccatattacttcacatgtcgatgaatgcagtcatagcagg

SEQ ID NO: 642925 - DNA, 75 bp, synthetic construct
  source 1..75: mol_type = other DNA
tatatccagggggcttcttgttccagcattatttcttgctgaatttctaattcttgttccactgtattttatttt

SEQ ID NO: 642926 - DNA, 75 bp, synthetic construct
  source 1..75: mol_type = other DNA
atgcaaaactggataaaggccgcagttatcgccgtgagcctggcgctgcccggcgtggcgctggcgcaatcgctg

SEQ ID NO: 642927 - DNA, 75 bp, synthetic construct
  source 1..75: mol_type = other DNA
tcaccaaccagaccatcaccaatatgctgcgccagtttggcgtgcaactgccgaataaaatcgacccgaaggtga

SEQ ID NO: 642928 - DNA, 75 bp, synthetic construct
  source 1..75: mol_type = other DNA
cgtggtggtgggcgggatgaatgccaccggggccagcggttcgagcgtaacggttaatacgccaaccgccgggtt

SEQ ID NO: 642929 - DNA, 75 bp, synthetic construct
  source 1..75: mol_type = other DNA
ctctcttgctgcggttatcgtaggtgttccgccagaggtggcgctcggtgctcttgctggtgcggtaatttttgt

SEQ ID NO: 642930 - DNA, 75 bp, synthetic construct
  source 1..75: mol_type = other DNA
tacggcctcaccacatccccgccgccaggctcaatgggtattgccgttccgctgaatggcaatacatcccatacc

SEQ ID NO: 642931 - DNA, 75 bp, synthetic construct
  source 1..75: mol_type = other DNA
tttgaaggcaacatcaaccatgtgggtggtgtgattacctccgttgacgtcaccattaatggcgttaaaatcgga

SEQ ID NO: 642932 - DNA, 75 bp, synthetic construct
  source 1..75: mol_type = other DNA
atgcctttatggtaacgcgggaaaatactacgtcagaaacacaaaaactggtcgaatggtttttaacgccgcagg

SEQ ID NO: 642933 - DNA, 75 bp, synthetic construct
  source 1..75: mol_type = other DNA
atcgagtgggaagcgttgctggtggaaatgctcggtctgttgcatcgtattgcgatggtacaactttcgcctgct

SEQ ID NO: 642934 - DNA, 75 bp, synthetic construct
  source 1..75: mol_type = other DNA
cgtcgtcggccaggaacatgtgctgactgcactggcgaacggcttgtcgttagggcgtattcatcatgcttatct

SEQ ID NO: 642935 - DNA, 75 bp, synthetic construct
  source 1..75: mol_type = other DNA
gccgatcacctcgcaacgttgattgcgactggtgttaaaacagcttcctgtggttcgctggcgggatgtattgaa

SEQ ID NO: 642936 - DNA, 75 bp, synthetic construct
  source 1..75: mol_type = other DNA
gctatccagaatcgctgagtgaacgccttaataatgcggctgcgcagcaacaagtctctgtaaatacctatatta

SEQ ID NO: 642937 - DNA, 75 bp, synthetic construct
  source 1..75: mol_type = other DNA
agtatcttgaggattgtaaagctgcgggtattgagccgtatgcgcgtacagaaaagattaagacctttacgttac

SEQ ID NO: 642938 - DNA, 75 bp, synthetic construct
  source 1..75: mol_type = other DNA
gagattacgtcaacagcgtgaagaactactatcaacattgcatgaattagaaagagaaatgaaagattttattga

SEQ ID NO: 642939 - DNA, 75 bp, synthetic construct
  source 1..75: mol_type = other DNA
tattattttcgtggcgcaaccttccgatgggcaaaaaaacgcgctgagaaatcgggcgtcactttgctgtacacg

SEQ ID NO: 642940 - DNA, 75 bp, synthetic construct
  source 1..75: mol_type = other DNA
aggttataccttccgctattacgcaacacaaatgaatgccgataagaatatcaaattgttagcgattaacggtat

SEQ ID NO: 642941 - DNA, 75 bp, synthetic construct
  source 1..75: mol_type = other DNA
aaatagccgcctggcgacaatgtctttttttagttcccgctttattaaccctggttggctggataatcacgctac

SEQ ID NO: 642942 - DNA, 75 bp, synthetic construct
  source 1..75: mol_type = other DNA
tgaggatgtattcgaagtggacgatgacgcaacacctgatgaaattcatgacgaagcaaaagaaattttctttaa

SEQ ID NO: 642943 - DNA, 75 bp, synthetic construct
  source 1..75: mol_type = other DNA
atggcttttttaatggggtccagcgaggcgctgaaagatcgctatgattttatgaagtttcaggtcttccagtgg

SEQ ID NO: 642944 - DNA, 75 bp, synthetic construct
  source 1..75: mol_type = other DNA
atgaagtttcaggtcttccagtggttgattggcgcaacagatggccatgcaaaaaacttctccgtatttattcag

SEQ ID NO: 642945 - DNA, 75 bp, synthetic construct
  source 1..75: mol_type = other DNA
cttacttttaaagtatcaactcttccagatgtcagtcgatttaaaaatgctcgttttttatttgagagaataccg

SEQ ID NO: 642946 - DNA, 75 bp, synthetic construct
  source 1..75: mol_type = other DNA
ctttttccctcataagaagaaaaccttttgcggaagcagagtaccattacgtttctgtagagcctgcatagaaaa

SEQ ID NO: 642947 - DNA, 75 bp, synthetic construct
  source 1..75: mol_type = other DNA
cactattatccacaacccagattatgcgcagggtttactaacatcagtaaaggccgcagtacccgcagtgcaaac

SEQ ID NO: 642948 - DNA, 75 bp, synthetic construct
  source 1..75: mol_type = other DNA
tggcaacaggggacaattcttgatacaagtatcaaaaatgcgttgcagttttgtagccgaattattttagtcacc

SEQ ID NO: 642949 - DNA, 75 bp, synthetic construct
  source 1..75: mol_type = other DNA
ggttggtgggtaagtgaacaatatagtacttcatggctaaatacaaagcttgataaaagtgtggttgttttttgt

SEQ ID NO: 642950 - DNA, 75 bp, synthetic construct
  source 1..75: mol_type = other DNA
tgatcctctccggcccggcttatctgctttttagttatttgctgagcgttaatattctgctgggcagcgtattcg

SEQ ID NO: 642951 - DNA, 75 bp, synthetic construct
  source 1..75: mol_type = other DNA
gcagcaacttcgtgatgttcttatttctcacggactcatggaagaagaaagcacaacatgccgctatgcctttct

SEQ ID NO: 642952 - DNA, 75 bp, synthetic construct
  source 1..75: mol_type = other DNA
aacggacagattgccaaattcgtaaccgtgcaaggccattctatggctgtttatgatgcgtatggtacacagcag

SEQ ID NO: 642953 - DNA, 75 bp, synthetic construct
  source 1..75: mol_type = other DNA
ttcgatgatatcgctattgccccctacaccgttccggcgctctccagcgtaaaaattccggtgactgagatgatt

SEQ ID NO: 642954 - DNA, 75 bp, synthetic construct
  source 1..75: mol_type = other DNA
aatctaaaagaatattcgaaattatttagtaatgcactaaggtttatatgtgtattaacaatacctctaagtgta

SEQ ID NO: 642955 - DNA, 75 bp, synthetic construct
  source 1..75: mol_type = other DNA
acttttttggtattcccatactgacgcaatttttagcagtagtgattactatcctgggagccgggctttcagtaa

SEQ ID NO: 642956 - DNA, 75 bp, synthetic construct
  source 1..75: mol_type = other DNA
cgttgccgtaattccctcctgtttatccttctcatgcttggttttgtcgctggttatcagggttatttatataaa

SEQ ID NO: 642957 - DNA, 75 bp, synthetic construct
  source 1..75: mol_type = other DNA
tacaccgacggcggaaaacattcgcaacggcaaatatgcgtacatcgtcgatgcatttatggtgacgcgtgaaaa

SEQ ID NO: 642958 - DNA, 75 bp, synthetic construct
  source 1..75: mol_type = other DNA
tgctgactctgggggcgataataatatttttctctggtcgcgtgtgggcgggcgatagtgcaccagaaaaaaaag

SEQ ID NO: 642959 - DNA, 75 bp, synthetic construct
  source 1..75: mol_type = other DNA
tctgcattttatgcactaagcgttataccggaagattttcattcctgggaatacctgacgaactctcgtacacca

SEQ ID NO: 642960 - DNA, 75 bp, synthetic construct
  source 1..75: mol_type = other DNA
taataatcaactgacgccgctacgtgacaaaccgcaaattcagtttaggcaaaactggccgcgaatcgatggtgc

SEQ ID NO: 642961 - DNA, 75 bp, synthetic construct
  source 1..75: mol_type = other DNA
cagacggtgatgcaatcgcaggtcatgaaaaatgtccgtatgatctcgccgcaggaaaccgaagtggcaagcgta

SEQ ID NO: 642962 - DNA, 75 bp, synthetic construct
  source 1..75: mol_type = other DNA
aggccgcagccgaggctgcaccgcagacccgcgaagaagtcagccgcgatatccgtaccctgggcgatattcagc

SEQ ID NO: 642963 - DNA, 75 bp, synthetic construct
  source 1..75: mol_type = other DNA
ggaaaaaggcagttcattcacgctgaacgccggtgatacggccacggataccacggtaaatggcggactgttcac

SEQ ID NO: 642964 - DNA, 75 bp, synthetic construct
  source 1..75: mol_type = other DNA
aataggctataccttccgctattacgcgacgcaaatgaatgctgataaaaatataagattgctagcgattaacgg

SEQ ID NO: 642965 - DNA, 75 bp, synthetic construct
  source 1..75: mol_type = other DNA
cgctgggatacgcctggccgaccagatatcctttatccggcacgtccggactacgttgccgtaacttactcctgt

SEQ ID NO: 642966 - DNA, 75 bp, synthetic construct
  source 1..75: mol_type = other DNA
cccgttggggcgcatatcagtttttcgctgggatacgcctggccgaccagatatcctttatccggcacgtccgga

SEQ ID NO: 642967 - DNA, 75 bp, synthetic construct
  source 1..75: mol_type = other DNA
aaaagatgtgcgccggattgaatcggcctctggcggaaaaacgaacgaatggctgggtttatacctggagcggat

SEQ ID NO: 642968 - DNA, 75 bp, synthetic construct
  source 1..75: mol_type = other DNA
attgtttcaccttcttgtaccattttaggtggcaaaaatatgaatgtcgatataggcacgattaaacgagctgat

SEQ ID NO: 642969 - DNA, 75 bp, synthetic construct
  source 1..75: mol_type = other DNA
tcacattagatataattaagaccagtaccacaacagggagtggaaccttagccagtgggccgtatacagagtacg

SEQ ID NO: 642970 - DNA, 75 bp, synthetic construct
  source 1..75: mol_type = other DNA
tttttattggcttaatggcgctggggacaacgtcagcatgggcatcatgttggcaatctaatagtgcctatgaaa

SEQ ID NO: 642971 - DNA, 75 bp, synthetic construct
  source 1..75: mol_type = other DNA
aagggtcgcgctttacgctggagattatcaaaaccgcggcaaccaccggcagcggcaccctggcggcgggtaagt

SEQ ID NO: 642972 - DNA, 75 bp, synthetic construct
  source 1..75: mol_type = other DNA
gcggcgaaacggtaaatatcgtctatcccgacgtctattcgtcccgggtatattacaccaccgactattccctcg

SEQ ID NO: 642973 - DNA, 75 bp, synthetic construct
  source 1..75: mol_type = other DNA
agcggcaccctggcggcgggtaagtacacctcctacgactgggagagcggcggtaacccgatcctcgaaacctat

SEQ ID NO: 642974 - DNA, 75 bp, synthetic construct
  source 1..75: mol_type = other DNA
cgtaaacgaccctggcttctggctatttaaagggtattttaatctgacggttggtgaaacgttgcgtacctggac

SEQ ID NO: 642975 - DNA, 75 bp, synthetic construct
  source 1..75: mol_type = other DNA
tcaccctgggcgttcaggctggttatgaccacagcgtcagcggcagcagcgctgaagggtataacggtcaggcca

SEQ ID NO: 642976 - DNA, 75 bp, synthetic construct
  source 1..75: mol_type = other DNA
tcgttgtttttattacgatgcagtgaccatggaatatgctggctggtcagatgaatatattaacgctggcgtcag

SEQ ID NO: 642977 - DNA, 75 bp, synthetic construct
  source 1..75: mol_type = other DNA
atgactgaagatgttattcagcgaattactacattttttcagaccagcccagatgtcaagaacagagaaataaag

SEQ ID NO: 642978 - DNA, 75 bp, synthetic construct
  source 1..75: mol_type = other DNA
gtagtaacatgccgatactccgcggagtatcgctgacgctgcaaccaggtgaagtggtggctattactggaaaat

SEQ ID NO: 642979 - DNA, 75 bp, synthetic construct
  source 1..75: mol_type = other DNA
gtcgacagctgatgtgctatgacattgtgcacaccctgactggtagtgtggtatcggcaattattttgtggaaag

SEQ ID NO: 642980 - DNA, 75 bp, synthetic construct
  source 1..75: mol_type = other DNA
catcattgatgacgccgctgaagtcgctcgtcagatgaaaaaatcgatgccgctggtgaaagaaaatcgccgtga

SEQ ID NO: 642981 - DNA, 75 bp, synthetic construct
  source 1..75: mol_type = other DNA
gagaaaaaaacctggtatgccgatggcgatgccgatatggagaagctggctaaatggaagccagaaaatgtggtg

SEQ ID NO: 642982 - DNA, 75 bp, synthetic construct
  source 1..75: mol_type = other DNA
ttctggaagcgtaacagtacgtttgctgacgcattcaaacagaactggcctgatgttcaggaaaaaatcaaaaaa

SEQ ID NO: 642983 - DNA, 75 bp, synthetic construct
  source 1..75: mol_type = other DNA
ataccatccctgtacatactgatgtggttggacgcggaaaggctgcgacgtatatcggggatgagcgcgtacctg

SEQ ID NO: 642984 - DNA, 75 bp, synthetic construct
  source 1..75: mol_type = other DNA
tcaggacaagatcaagagcgcataccgtgagattgattttgcattatcacttctaccagagccgaaatataacat

SEQ ID NO: 642985 - DNA, 75 bp, synthetic construct
  source 1..75: mol_type = other DNA
taccaaaaggcgtatctctggataaatttgcaaaatggagcggtgagccagctgcagaaaaaaatacgccggttg

SEQ ID NO: 642986 - DNA, 75 bp, synthetic construct
  source 1..75: mol_type = other DNA
ttgccaagaacgcgcgcaaagaaggttgcttccatgttgttggcgggctggatgctcttaaagacgcgccggtgc

SEQ ID NO: 642987 - DNA, 75 bp, synthetic construct
  source 1..75: mol_type = other DNA
tgggggatgcggtgcccgcccgccggttacaggaggccattgacccggtgctggagccggttattgatgccatca

SEQ ID NO: 642988 - DNA, 75 bp, synthetic construct
  source 1..75: mol_type = other DNA
cagcaatgaacctgctcagacagacaaagagatgccaccggaaaaacaggaaaagacagaacagacggcgctggc

SEQ ID NO: 642989 - DNA, 75 bp, synthetic construct
  source 1..75: mol_type = other DNA
accaaaatcaccagtgcggtgatgcagctcagtacggggatggatatttctgatccctggatacgggagcagacc

SEQ ID NO: 642990 - DNA, 75 bp, synthetic construct
  source 1..75: mol_type = other DNA
cgcaaactggaggctcacgccagcggagagaaaccgctcccggatacagaaatgaaggtgctgcaggcagcacag

SEQ ID NO: 642991 - DNA, 75 bp, synthetic construct
  source 1..75: mol_type = other DNA
gaaggcactgaaagaagcctatcccgataagccaattattattgccggtgatgatgatatttcgcagtcctgcaa

SEQ ID NO: 642992 - DNA, 75 bp, synthetic construct
  source 1..75: mol_type = other DNA
attcgtcaaaatattaatagcaatgtgccgtatccctgaaaataattctgctgcatttcctcttcttattttgca

SEQ ID NO: 642993 - DNA, 75 bp, synthetic construct
  source 1..75: mol_type = other DNA
ttatttaacaagccagcgcttcccaaggaactacaagaacagctgaaggaaaacattaagcggcatgctgacgcc

SEQ ID NO: 642994 - DNA, 75 bp, synthetic construct
  source 1..75: mol_type = other DNA
acggcggtattgcccgtggggccacgccggaaagcagcggcagctatggattcgtccgtctggagggtgacctga

SEQ ID NO: 642995 - DNA, 75 bp, synthetic construct
  source 1..75: mol_type = other DNA
atggcacttgaagataaaatgattcgctatgcagcagcccacccgcgcgaggaagtgtgcgggctggtgatagat

SEQ ID NO: 642996 - DNA, 75 bp, synthetic construct
  source 1..75: mol_type = other DNA
ccggtagcgcacctgttaggcagaaaatttgagcacggaaaaacagactgctacgcgcttttccgcgacgcctat

SEQ ID NO: 642997 - DNA, 75 bp, synthetic construct
  source 1..75: mol_type = other DNA
gctccatggatatgttgtcgcagttggaagtggatatgcttaaacgcaccgccagcagcgacctctatcaactgt

SEQ ID NO: 642998 - DNA, 75 bp, synthetic construct
  source 1..75: mol_type = other DNA
cattattgatgacgctgccgaagtagcacgtcagatgaaaaaagcgatgccgctggtgaaagaaaaccgtcgcga

SEQ ID NO: 642999 - DNA, 75 bp, synthetic construct
  source 1..75: mol_type = other DNA
ctccggtattgtggcggggaacgtaaaagaagacgggattcgcgcccttgaagaggtttggtccttacaaaatca

SEQ ID NO: 643000 - DNA, 75 bp, synthetic construct
  source 1..75: mol_type = other DNA
gtgtgccggatggcgttaatttccttgtggcgacagtggatgtgcaggcgggacgtcatcgccgttttgtggttc

SEQ ID NO: 643001 - DNA, 75 bp, synthetic construct
  source 1..75: mol_type = other DNA
agggggatgctttctctcttgcctcaaaacgtaccaccacatttatgtccagcggtatgacgctggtggagagtt

SEQ ID NO: 643002 - DNA, 75 bp, synthetic construct
  source 1..75: mol_type = other DNA
caggaccgtgttgaaagcctgatggagggtgctgacagcccggatgaaatgaaacgcgctctggatgcgctgggg

SEQ ID NO: 643003 - DNA, 75 bp, synthetic construct
  source 1..75: mol_type = other DNA
taaccgccgtttttcactctcacgttaatgatattcctgtattgtcggcacgggatcgacaacagcaagttattt

SEQ ID NO: 643004 - DNA, 75 bp, synthetic construct
  source 1..75: mol_type = other DNA
gcttttttattcaccctcactctgattaaggaaatgctgatgaaacgacatctgaatacctgctacaggctggta

SEQ ID NO: 643005 - DNA, 75 bp, synthetic construct
  source 1..75: mol_type = other DNA
accaccacgctgaataatagtgccacgcttaccctttccgggaaaacagtgaataacgataccctgaccatccgt

SEQ ID NO: 643006 - DNA, 75 bp, synthetic construct
  source 1..75: mol_type = other DNA
caatatggggggatgagcatgcccctacagatatgctgattaaagccctttaccgtgatggtggggcttttgttt

SEQ ID NO: 643007 - DNA, 75 bp, synthetic construct
  source 1..75: mol_type = other DNA
attcgtgtctccagtaacgggggggggtattttattgtgccggttcaggcgtgcgtttcccggcgtgtctgctct

SEQ ID NO: 643008 - DNA, 75 bp, synthetic construct
  source 1..75: mol_type = other DNA
gcagggcactgaaggaatggcagaagctgggccacaccatccgcgaacaattcaaaaagaaactgtctgaacgcc

SEQ ID NO: 643009 - DNA, 75 bp, synthetic construct
  source 1..75: mol_type = other DNA
tgtataacgatcacgtggttgccagcctgattaaagactttaaagcgaccgatccgaacggtttcctggtttatt

SEQ ID NO: 643010 - DNA, 75 bp, synthetic construct
  source 1..75: mol_type = other DNA
gcgactcatccgcgtgatttctcgcaggatgtcaatcgtaaatacagcctggcagaactgatccacacctggtcg

SEQ ID NO: 643011 - DNA, 75 bp, synthetic construct
  source 1..75: mol_type = other DNA
gctgcataaaaccgatccgaatctgaccgtgtttaataacgtagttacgtctcgtccgtacaccattgaaatcct

SEQ ID NO: 643012 - DNA, 75 bp, synthetic construct
  source 1..75: mol_type = other DNA
gcagcctaccacctggtgcacgaacaggtgattagtccgctacacagccacctgacacgcctgattgccgcctgg

SEQ ID NO: 643013 - DNA, 75 bp, synthetic construct
  source 1..75: mol_type = other DNA
agaaccagatcgcgccgctatccgtgagctgatccttcgcgcttgcaggaatatgatccaactgctcacccagga

SEQ ID NO: 643014 - DNA, 75 bp, synthetic construct
  source 1..75: mol_type = other DNA
atgccaacgatacccgcatgatcctccatacccatgcattacttggcgagattctggcgtttcgtcttggtaaag

SEQ ID NO: 643015 - DNA, 75 bp, synthetic construct
  source 1..75: mol_type = other DNA
atcctgctgcccgccaacatcatgaccatggtgatgtatgcctttcgtgcggaacgcaaacacatttccgaaagc

SEQ ID NO: 643016 - DNA, 75 bp, synthetic construct
  source 1..75: mol_type = other DNA
ttacaattttgtaatgaaccaggctgtttctataacatatgatttatggcatattattttcatgaagattttact

SEQ ID NO: 643017 - DNA, 75 bp, synthetic construct
  source 1..75: mol_type = other DNA
atgaatttcgacagcgacactaacgccattgatgtggcggtgaagcggctacgcggcaaaatcgacaacgacttt

SEQ ID NO: 643018 - DNA, 75 bp, synthetic construct
  source 1..75: mol_type = other DNA
cgtgctgaagccgttccaggaagtgctgaatgaccctgcgccgaagaaactgatcatcgttcatctgctgggtac

SEQ ID NO: 643019 - DNA, 75 bp, synthetic construct
  source 1..75: mol_type = other DNA
ataacttttccagtggtaaaagttataaccggaggaatctatcagcgaattattacccgcaaagaggaggaagcc

SEQ ID NO: 643020 - DNA, 75 bp, synthetic construct
  source 1..75: mol_type = other DNA
ttgcaggtattgttttgttaatgttcatcattattgttggttatttcttttctgagcgtaatgacagaaagatat

SEQ ID NO: 643021 - DNA, 75 bp, synthetic construct
  source 1..75: mol_type = other DNA
tactaacggcatgcgcgactcgctgttgtttagttcgctgtggttgatcccggtattcctctttccgaagcggat

SEQ ID NO: 643022 - DNA, 75 bp, synthetic construct
  source 1..75: mol_type = other DNA
cggatttaacgaaggcgtgttcaccgctgcaaaactttacccggcaaacgcaaccactaactccagccacggcgt

SEQ ID NO: 643023 - DNA, 75 bp, synthetic construct
  source 1..75: mol_type = other DNA
tcttggtatgtatccgttcgccagtgcggattctactaatgttgctgttaacgtaccgaagacagagaagcgatt

SEQ ID NO: 643024 - DNA, 75 bp, synthetic construct
  source 1..75: mol_type = other DNA
aataaagcgggtactttattaagattactttactcatgggctggtgttgggcagccttttagctttatttgtgag

SEQ ID NO: 643025 - DNA, 75 bp, synthetic construct
  source 1..75: mol_type = other DNA
gttacgatccaacccgttcggtggtgaacccgcagttcaaagaaaccacccgctggattggcaacccgtacaaga

SEQ ID NO: 643026 - DNA, 75 bp, synthetic construct
  source 1..75: mol_type = other DNA
ggttattatcagtatcgccagcaacttaactcgctgacgaagctgctgaatgaaaataatgcattaccgccgctg

SEQ ID NO: 643027 - DNA, 75 bp, synthetic construct
  source 1..75: mol_type = other DNA
gggcgtaatgaggacaacccgacgcgtcatatgtacaccattccgttcctgctgtggacgtcagaaaaatggcaa

SEQ ID NO: 643028 - DNA, 75 bp, synthetic construct
  source 1..75: mol_type = other DNA
aagaaactgatcatcgttcatctgctgggtacgcatatcaaatacaaataccgctacccggaaaatcagggcaag

SEQ ID NO: 643029 - DNA, 75 bp, synthetic construct
  source 1..75: mol_type = other DNA
cgtatgagtctgtacggttatccgcgtgaaaccacgccggaactggatatgctgcataaaaccgatccgaatctg

SEQ ID NO: 643030 - DNA, 75 bp, synthetic construct
  source 1..75: mol_type = other DNA
tgttatacggattgattctgcatccgatgacagtgaacacgtttatcaaacataagccgtttgaaaaaacactgg

SEQ ID NO: 643031 - DNA, 75 bp, synthetic construct
  source 1..75: mol_type = other DNA
ccatgacaaccaaaggtgaacaggccaaaaaacagctaattgctgcggcactggcacagtttggtgagtatggaa

SEQ ID NO: 643032 - DNA, 75 bp, synthetic construct
  source 1..75: mol_type = other DNA
tgttatgagtcagcttgcgacgatgcttggcgcacctgtcccgatagtcggtgctatgactgagcacgccgctgc

SEQ ID NO: 643033 - DNA, 75 bp, synthetic construct
  source 1..75: mol_type = other DNA
cgctggcagatgatgacccacgccgccagcggtacgctgaactgttggcgcaggctggccgcatgactattcccc

SEQ ID NO: 643034 - DNA, 75 bp, synthetic construct
  source 1..75: mol_type = other DNA
tgttatgagtcagcttgcgacaatgctcggcgcacctgtcccgatagtaggtgcgatgactgagcacgccgctgc

SEQ ID NO: 643035 - DNA, 75 bp, synthetic construct
  source 1..75: mol_type = other DNA
aagccctgattacgacgacaggaacgtcataacctttgatgaatacgcagaaattcacacgccaaaagcatggaa

SEQ ID NO: 643036 - DNA, 75 bp, synthetic construct
  source 1..75: mol_type = other DNA
tttcaatgtatatcctcgtccaagcccctgttttaaccggtttatcaaaaaaccaaacagaaagccttaccacta

SEQ ID NO: 643037 - DNA, 75 bp, synthetic construct
  source 1..75: mol_type = other DNA
gtgctatgactgagcacgccgctgcatggcgtgtctgtctgctggatcaagggcttggcgatcttctggatggct

SEQ ID NO: 643038 - DNA, 75 bp, synthetic construct
  source 1..75: mol_type = other DNA
atcagccagcatctggcaaccaggctgccgaatccaatcgcggtaatgagtggaccggcaatcctgatattgata

SEQ ID NO: 643039 - DNA, 75 bp, synthetic construct
  source 1..75: mol_type = other DNA
atgaaaagcgataaattcattgcgtgctgttttgttgaagtgcctaaaggtgatgttttctgtaattacgaattt

SEQ ID NO: 643040 - DNA, 75 bp, synthetic construct
  source 1..75: mol_type = other DNA
atcttcactaaaaaccagttgttaagaataaaggcagaaaatgatgaaataccagtaggtaatatggggattatg

SEQ ID NO: 643041 - DNA, 75 bp, synthetic construct
  source 1..75: mol_type = other DNA
cgctggcaggtgatgactcacgccgccagcgttacgccgaacttttgaagcaggctggcagtatgaccattcccc

SEQ ID NO: 643042 - DNA, 75 bp, synthetic construct
  source 1..75: mol_type = other DNA
atggttgatgaaaagccgattagagcgctggcagatgatgacccacgccgccagcggtacgccgaactgttggcg

SEQ ID NO: 643043 - DNA, 75 bp, synthetic construct
  source 1..75: mol_type = other DNA
gccttgcgattggcgggtaagcaaaaggaacggcttacagcggccagcgagggtttgaccattgagcaataccgg

SEQ ID NO: 643044 - DNA, 75 bp, synthetic construct
  source 1..75: mol_type = other DNA
cgggctggggctgggcggggaaggctggaccaccatgaccatcaccacgccaaccggtgaaggggtaaccagcgc

SEQ ID NO: 643045 - DNA, 75 bp, synthetic construct
  source 1..75: mol_type = other DNA
gaaagtaacggagccaaaaaaacataccgcatcgccaacgctactgctaaggcgattaatatgcgacagggtgtt

SEQ ID NO: 643046 - DNA, 75 bp, synthetic construct
  source 1..75: mol_type = other DNA
agcgaacaggtaccagacaaaggcatgaatacgcaaagttcgttctggaaaaaaatcaatgatgccgttggctct

SEQ ID NO: 643047 - DNA, 75 bp, synthetic construct
  source 1..75: mol_type = other DNA
ggcgttgattttaaagatcgcacgcaggcggcgtttgttgtaccaaaagaagatattgctgcgcagaaatacgat

SEQ ID NO: 643048 - DNA, 75 bp, synthetic construct
  source 1..75: mol_type = other DNA
atgaataatcctgccatgacaatcaagggtgaacaggcgaaaaaacagctgattgctgcggcactggcacagttt

SEQ ID NO: 643049 - DNA, 75 bp, synthetic construct
  source 1..75: mol_type = other DNA
tacgcaaacgctggagttcaccattgaagaagtgaacgccgatcgcaatgtttctaataacgctaaaaatcgtca

SEQ ID NO: 643050 - DNA, 75 bp, synthetic construct
  source 1..75: mol_type = other DNA
ggtctgttatgcatcaatatgaatcttgatgttcctttctcgcagattatgagcacctttgtgccgcctgaaact

SEQ ID NO: 643051 - DNA, 75 bp, synthetic construct
  source 1..75: mol_type = other DNA
ccccgaagaacgcaaagacttcgattacgaaggcccggaggttatttataccttctgggctaaacatggcccttg

SEQ ID NO: 643052 - DNA, 75 bp, synthetic construct
  source 1..75: mol_type = other DNA
ccagtctggcaggcattgacccttttactggcgttgatatcactatagctaactgtaaatcaacatattgggatg

SEQ ID NO: 643053 - DNA, 75 bp, synthetic construct
  source 1..75: mol_type = other DNA
aaaggtatgccgctgtacgagcacatcgctgaactgaatggtactccgggcaaatactctatgccggttccgatg

SEQ ID NO: 643054 - DNA, 75 bp, synthetic construct
  source 1..75: mol_type = other DNA
agatccgaaagtgatactgaaacgattaaaagatttggaaaaagagattctggcggatttggatgagctggaggg

SEQ ID NO: 643055 - DNA, 75 bp, synthetic construct
  source 1..75: mol_type = other DNA
ggtatatccagaatattatcaacggtgaagtgaacagctttgttgcgcgctaccgtgataacagcgaaccgttgg

SEQ ID NO: 643056 - DNA, 75 bp, synthetic construct
  source 1..75: mol_type = other DNA
aatcgcagttatcgaaccggatcgttaacagcttctatcgcccgtggtttttgccaccggagatgatcaccgccg

SEQ ID NO: 643057 - DNA, 75 bp, synthetic construct
  source 1..75: mol_type = other DNA
gatttatgaccgttcaggggaatttgttaaaagttactatgatccctccatcgataagatcctgaatccgctgga

SEQ ID NO: 643058 - DNA, 75 bp, synthetic construct
  source 1..75: mol_type = other DNA
aaccggtgatctccatgtggctgtccatcgccattcgtggcctgatggcgatgggggagaaccgtaaccgtcgtg

SEQ ID NO: 643059 - DNA, 75 bp, synthetic construct
  source 1..75: mol_type = other DNA
ccgacaggtgctttggggatgaaggcgagaagacttgcatccctggaaaaagcacgagcgaggaatgccgcatga

SEQ ID NO: 643060 - DNA, 75 bp, synthetic construct
  source 1..75: mol_type = other DNA
tctcgttggtctgttattatgggtaaaaataagctggcagacgtttataaacggctgtatttactggtggtgtac

SEQ ID NO: 643061 - DNA, 75 bp, synthetic construct
  source 1..75: mol_type = other DNA
tctctttggtctgatattatgggtaaaaataagctggcagacgtttataaacggctgtatttactggtggtgtac

SEQ ID NO: 643062 - DNA, 75 bp, synthetic construct
  source 1..75: mol_type = other DNA
actcgttggtctgatattatgggtaaaaataagctggcagacgtttataaacggctgtatttactggtggtgtac

SEQ ID NO: 643063 - DNA, 75 bp, synthetic construct
  source 1..75: mol_type = other DNA
agccacaacagccacaacagccacaacagccacaacagccacaacagccacaacagccacaacagccggtgtctc

SEQ ID NO: 643064 - DNA, 75 bp, synthetic construct
  source 1..75: mol_type = other DNA
ccctgaaatatcagacacgaccgaaggtcgctccggagtttattccgcgtgacatcaacccggaaatggagaacc

SEQ ID NO: 643065 - DNA, 75 bp, synthetic construct
  source 1..75: mol_type = other DNA
tgcattcttcggtggagcaggagcgccaggccgttatcagtaaattgattgcccgttttgaaggtgatgctgcca

SEQ ID NO: 643066 - DNA, 75 bp, synthetic construct
  source 1..75: mol_type = other DNA
atatgtactatggaaaggatatcaaatacttgccagtaaaactcagacgcccttgcaggatttagtatgggatct

SEQ ID NO: 643067 - DNA, 75 bp, synthetic construct
  source 1..75: mol_type = other DNA
gtgctgtggctggtattcagtggcctgatttactggctgttcacagcctttatgaaaattgatgtgaatgtagta

SEQ ID NO: 643068 - DNA, 75 bp, synthetic construct
  source 1..75: mol_type = other DNA
aatatcaggaacgtccgaaggttgctccggagtttattccgcgtgaaatcaatccggaaatggagaatcgcctga

SEQ ID NO: 643069 - DNA, 75 bp, synthetic construct
  source 1..75: mol_type = other DNA
cctcgttggtctgctattatgggtaaaaataagctggcagacgtttataaacggctgtatttactggtggtgtac

SEQ ID NO: 643070 - DNA, 75 bp, synthetic construct
  source 1..75: mol_type = other DNA
tagcatgtagatatcttttggaaaagattgcatctgactcggcgatgaggggtggagatttttatactccagaag

SEQ ID NO: 643071 - DNA, 75 bp, synthetic construct
  source 1..75: mol_type = other DNA
atgccaacaacagacagaaaacgagggcgtataaatttaaatgctgacgaacgccgagacatatcgatacagttc

SEQ ID NO: 643072 - DNA, 75 bp, synthetic construct
  source 1..75: mol_type = other DNA
tctggttttatgggtaaaaataagctggcagacgtttgtgaatggctgtatttactggtggtgtaccacgctgga

SEQ ID NO: 643073 - DNA, 75 bp, synthetic construct
  source 1..75: mol_type = other DNA
atgaattactcgatatttttgcaagtcctgaaatgaaatttgattatacccaggatggtaataaaaagataaaag

SEQ ID NO: 643074 - DNA, 75 bp, synthetic construct
  source 1..75: mol_type = other DNA
gatttggctaaacccgtaaaggggcgcaacttaataacagatgaaatcattaggaaggtatcagaatgctacttt

SEQ ID NO: 643075 - DNA, 75 bp, synthetic construct
  source 1..75: mol_type = other DNA
tgcctttattttgcacatggtttcaacacttaaaagtgcaactggtagaatggccatactggtatctcacggtgt

SEQ ID NO: 643076 - DNA, 75 bp, synthetic construct
  source 1..75: mol_type = other DNA
gctccttggtctgctattatgggtaaaaataagctggcagacgtttataaacggctgtatttactggtggtgtac

SEQ ID NO: 643077 - DNA, 75 bp, synthetic construct
  source 1..75: mol_type = other DNA
gctctttggtctgttattatgggtaaaaataagctggcagacgtttataaacggctgtatttactggtggtgtac

SEQ ID NO: 643078 - DNA, 75 bp, synthetic construct
  source 1..75: mol_type = other DNA
gctcattggtctgatattatgggtaaaaataagctggcagacgtttataaacggctgtatttactggtggtgtac

SEQ ID NO: 643079 - DNA, 75 bp, synthetic construct
  source 1..75: mol_type = other DNA
cagccagtatatgagatccagtattacggcaaaaccttccggatgaacgctgcccaggtactgcatgataaatat

SEQ ID NO: 643080 - DNA, 75 bp, synthetic construct
  source 1..75: mol_type = other DNA
attcctacggtgctgatccggtacgtgacggggtatcgaccggtaaggatatggagcgccagacgctggtcagtt

SEQ ID NO: 643081 - DNA, 75 bp, synthetic construct
  source 1..75: mol_type = other DNA
gctcgttggtctggtattatgggtaaaaataagctggcagacgtttataaacggctgtatttactggtggtgtac

SEQ ID NO: 643082 - DNA, 75 bp, synthetic construct
  source 1..75: mol_type = other DNA
tccatcgccattcgtggcctgatggcgatgggggagaaccgtaaccgtcgtgtgtggttcttctgtgacgagttg

SEQ ID NO: 643083 - DNA, 75 bp, synthetic construct
  source 1..75: mol_type = other DNA
aagatattgaccgcgaccgcgagcagctggtcggtgagcttgtggagatggtgattgctgcctccgcctcactgc

SEQ ID NO: 643084 - DNA, 75 bp, synthetic construct
  source 1..75: mol_type = other DNA
tgcctggctgactggacggaaggtgcgcgccctgaaattaaagccatcattagcgaggcattcagcacggacaag

SEQ ID NO: 643085 - DNA, 75 bp, synthetic construct
  source 1..75: mol_type = other DNA
ctgattgcggggtatttccatcagagcaggcgtatcgcgtatggcgtaagacaccggagaaggctgctgacccga

SEQ ID NO: 643086 - DNA, 75 bp, synthetic construct
  source 1..75: mol_type = other DNA
tagaagaaaagctactgaaagtggttccggcagagtttaaagtcgactgccaccattggttgatcctgcacgggc

SEQ ID NO: 643087 - DNA, 75 bp, synthetic construct
  source 1..75: mol_type = other DNA
ggttaggccttaatgggctgcgtggtaattatcagcatccagaatatgacgggttatgtttccgacctcctcaat

SEQ ID NO: 643088 - DNA, 75 bp, synthetic construct
  source 1..75: mol_type = other DNA
gtgattgctgcctccgcctcactgcgtgaactgaaactgcgagcgtttggtgatattcaggcgtttattgacctg

SEQ ID NO: 643089 - DNA, 75 bp, synthetic construct
  source 1..75: mol_type = other DNA
aaccgaaggtggaatccgcccgagatgcactggcgcggatcaatccacatatcgcgattacgccggtaaatgcgt

SEQ ID NO: 643090 - DNA, 75 bp, synthetic construct
  source 1..75: mol_type = other DNA
tttgagcacatcaccactaaagatgctgccgaatatgttcgtgacggtaatgaattgctggccgctactattacc

SEQ ID NO: 643091 - DNA, 75 bp, synthetic construct
  source 1..75: mol_type = other DNA
gcggcaaaactttacccggcaaacgctaccaccaactccagccacggtgtgacgtcggttgacactatcatgccg

SEQ ID NO: 643092 - DNA, 75 bp, synthetic construct
  source 1..75: mol_type = other DNA
cagaacataatttgtcgtgagtgccgccagagcgaagttatgcagcgtgtactggcgttctatcagggcaatttt

SEQ ID NO: 643093 - DNA, 75 bp, synthetic construct
  source 1..75: mol_type = other DNA
cgcgctggcgcgaatcaatccccacatcattattacgccagtgaatgcattgcttgatgacgctgagcttgctgc

SEQ ID NO: 643094 - DNA, 75 bp, synthetic construct
  source 1..75: mol_type = other DNA
cgttaacctgcgtagaagcaggcgtgatggcaccgttgatcggcgtgattggttcgttgcaggcaatggaagcga

SEQ ID NO: 643095 - DNA, 75 bp, synthetic construct
  source 1..75: mol_type = other DNA
catcactggttaatccttcacgggcgttatacctgcatagctcgtaagcctcgctgtggctcctgcattattgaa

SEQ ID NO: 643096 - DNA, 75 bp, synthetic construct
  source 1..75: mol_type = other DNA
tgtttttgctgctgactggccatgttcccgcagcgtcagcggacgctgcctgtgaagggcggtttgttaacccga

SEQ ID NO: 643097 - DNA, 75 bp, synthetic construct
  source 1..75: mol_type = other DNA
gctgacggatgtgacccgttcaccgtactgcatggtgaatctggggggctttaatatcaatatcgggaacgtcgg

SEQ ID NO: 643098 - DNA, 75 bp, synthetic construct
  source 1..75: mol_type = other DNA
atagcgaataaatggggattatatactctcctccccctgagaacgccccctttattgtcatcaatctccatccca

SEQ ID NO: 643099 - DNA, 75 bp, synthetic construct
  source 1..75: mol_type = other DNA
atgaacgctgctcaggtactgcatgataaatatatgatctggtgcggagagcagctatggtccgcattcgttctg

SEQ ID NO: 643100 - DNA, 75 bp, synthetic construct
  source 1..75: mol_type = other DNA
atgacgctaaaaatattcttgttgctgattgtgaaaatgggggggggttatgcgtgatgatcgttttaattccct

SEQ ID NO: 643101 - DNA, 75 bp, synthetic construct
  source 1..75: mol_type = other DNA
aatggctgggtgagcaatgaatccagtccgttgcagtcatccctgctggtcagtgaacggatggcgtttaagctc

SEQ ID NO: 643102 - DNA, 75 bp, synthetic construct
  source 1..75: mol_type = other DNA
gtttctatgccacgcttccctggcggccattaactgttcagcctgaatgcccggcaacgcttaaggatgtgagcg

SEQ ID NO: 643103 - DNA, 75 bp, synthetic construct
  source 1..75: mol_type = other DNA
cagatatcccgttaggcatgattagagaagaaaatgactttcgcatctcggttgctggcgcacaggagaagactg

SEQ ID NO: 643104 - DNA, 75 bp, synthetic construct
  source 1..75: mol_type = other DNA
tcgcaggctccgcgcaaaagttgatgatccttttcctgaaaagctaattgccacaatccgggggatgggatattc

SEQ ID NO: 643105 - DNA, 75 bp, synthetic construct
  source 1..75: mol_type = other DNA
ggctgacggaagaagagagcctgtggctgcaatcgcgtgtttatgtacgggctcgacatttttataacaactggg

SEQ ID NO: 643106 - DNA, 75 bp, synthetic construct
  source 1..75: mol_type = other DNA
ggattatgtgcggatgagttttttatcacgggttggtgtgctcaacaagtggctgacggaagacgagagtttatg

SEQ ID NO: 643107 - DNA, 75 bp, synthetic construct
  source 1..75: mol_type = other DNA
tgtttgcgctttctgcgccaatggaaatactcaatcagggatgcaaaccctcccatgactcacccaaaatgtata

SEQ ID NO: 643108 - DNA, 75 bp, synthetic construct
  source 1..75: mol_type = other DNA
ctccggtaccctggccaccagcactaccgctaccatgggcgccttgctgaatgaaaaagccggcagcgggatggc

SEQ ID NO: 643109 - DNA, 75 bp, synthetic construct
  source 1..75: mol_type = other DNA
tgacgaaaacgtcccttttatcccgtgcgttgtctgtcccctgttgtgatatgttccggcgtggctctccgtgga

SEQ ID NO: 643110 - DNA, 75 bp, synthetic construct
  source 1..75: mol_type = other DNA
ggttcggcgcagaaagcgaccacgggaaaaggggagacctgcccgtaaatcagttccggaaatggtcggtgagtg

SEQ ID NO: 643111 - DNA, 75 bp, synthetic construct
  source 1..75: mol_type = other DNA
tggaagagttgaagaaaatcgtccgcgtgatgaagaaactcgacgttgaagctccgcatgaagttatgctgacta

SEQ ID NO: 643112 - DNA, 75 bp, synthetic construct
  source 1..75: mol_type = other DNA
taaatcagttccggaaatggtcggtgagtgccagttttcagcgccccgtcacggacagggtgtggtggctgacca

SEQ ID NO: 643113 - DNA, 75 bp, synthetic construct
  source 1..75: mol_type = other DNA
gagtgccagttttcagcgccccgtcacggacagggtgtggtggctgaccagcgcttatgcccagtggtcaccgga

SEQ ID NO: 643114 - DNA, 75 bp, synthetic construct
  source 1..75: mol_type = other DNA
gcgggcagaagaataccggtacggggcagttaaatggtgtcctttcctttaataatcctctggggctggctgaca

SEQ ID NO: 643115 - DNA, 75 bp, synthetic construct
  source 1..75: mol_type = other DNA
ggaagttattgcagagccggaaccggtagttgaatctgaagccacacctgagcctgtggctagtgagcgtgaaga

SEQ ID NO: 643116 - DNA, 75 bp, synthetic construct
  source 1..75: mol_type = other DNA
gctggtcaccattgatggcgaagacgcccgtgactttgacgatgcagtttactgtgagaaaaaacgcggcggcgg

SEQ ID NO: 643117 - DNA, 75 bp, synthetic construct
  source 1..75: mol_type = other DNA
tgaagtgtgacttcatgctcgaccaggtaggtaacgtctttaaaggcgtaatttccagcgtcactggctttggct

SEQ ID NO: 643118 - DNA, 75 bp, synthetic construct
  source 1..75: mol_type = other DNA
gacagaaggcgcatcacgcaagcagcttcgcgatgctgaggcgctctacggcctgctgaaagaagagatgggtga

SEQ ID NO: 643119 - DNA, 75 bp, synthetic construct
  source 1..75: mol_type = other DNA
ttttttcctggctgggctttggtcaaaaagagcagaccccggaaaaagagacagaagtccagaacgaacaaccgg

SEQ ID NO: 643120 - DNA, 75 bp, synthetic construct
  source 1..75: mol_type = other DNA
agagctggaagcgcaggcactggccgccgaagcggtagaagaggcggtgatggtggttactccggcagaagaaga

SEQ ID NO: 643121 - DNA, 75 bp, synthetic construct
  source 1..75: mol_type = other DNA
tcaccctgggcgttcaggcaggttatgaccacagcgtcagcggcagcagcgctgaaggttataacggtcaggcca

SEQ ID NO: 643122 - DNA, 75 bp, synthetic construct
  source 1..75: mol_type = other DNA
cattaaacaatcattaaatatattttggcacagttcatattaccgcatgccttctgaaagaagtaactatgaaga

SEQ ID NO: 643123 - DNA, 75 bp, synthetic construct
  source 1..75: mol_type = other DNA
tctcttaattttattttacttagtggcgcagagggggcaataaaactgagagaaatgctgtccatatataactat

SEQ ID NO: 643124 - DNA, 75 bp, synthetic construct
  source 1..75: mol_type = other DNA
gacattgcacagatatgaaaatgatatagtcaagcagtttccgttaaaaaatttatttggacttgaacattctgt

SEQ ID NO: 643125 - DNA, 75 bp, synthetic construct
  source 1..75: mol_type = other DNA
caatagtccctgcaacagttaatgaagcaataatttactatgataatttatcttccctatggaaaattgagttga

SEQ ID NO: 643126 - DNA, 75 bp, synthetic construct
  source 1..75: mol_type = other DNA
gcactaaaccgtccatcaagaatgttgcctgctatggccttaaaaggcatgaactggagaattatttctcagtta

SEQ ID NO: 643127 - DNA, 75 bp, synthetic construct
  source 1..75: mol_type = other DNA
tgaatggggatgtcctttcaattgatgtgatgtgtacgaatggtaatattccatcatcaatgaatattggtgctc

SEQ ID NO: 643128 - DNA, 75 bp, synthetic construct
  source 1..75: mol_type = other DNA
tccggaaacgtctgccggtactgaaggtccctgctttacggtgtcacgcattgttgtcagtggggccacccgact

SEQ ID NO: 643129 - DNA, 75 bp, synthetic construct
  source 1..75: mol_type = other DNA
cacaattatctggatgatgttctgcttcagggcagcagccgtaaactcacttcattttctgtcgggctgaatcac

SEQ ID NO: 643130 - DNA, 75 bp, synthetic construct
  source 1..75: mol_type = other DNA
acctgcgggatattgagcaggggatggagcagattaatcgtctgcgttcggagccggtacagattgaaatatcgc

SEQ ID NO: 643131 - DNA, 75 bp, synthetic construct
  source 1..75: mol_type = other DNA
cccgttgtcaatctcttcgagaagaaaactgaacccctacgattatctgatggccaggatgagtatcaggtaaat

SEQ ID NO: 643132 - DNA, 75 bp, synthetic construct
  source 1..75: mol_type = other DNA
gcagcagttgttggatgaaaaccagcgtcagcgtgatgcgctggagcgcagtgcgccgctgaccatcacgccgtc

SEQ ID NO: 643133 - DNA, 75 bp, synthetic construct
  source 1..75: mol_type = other DNA
actgaccggaggtctgcagcaccgcattattcacaattatctggatgatgttctgcttcagggcagcagccgtaa

SEQ ID NO: 643134 - DNA, 75 bp, synthetic construct
  source 1..75: mol_type = other DNA
gctttagcgccccgcctgccgccgccattgttgaccgcaattgcttttccgtctcgctctacagtgcccaaaaac

SEQ ID NO: 643135 - DNA, 75 bp, synthetic construct
  source 1..75: mol_type = other DNA
gttgcggttcctgattatctggcgggaaatggcgtggtgtatcagaccagtgatgtgaaatacgttattgccaat

SEQ ID NO: 643136 - DNA, 75 bp, synthetic construct
  source 1..75: mol_type = other DNA
cggcactatggctggccggatgcagctccggtgagatcaacaaaaactactaccagttacctgttgtacagggcg

SEQ ID NO: 643137 - DNA, 75 bp, synthetic construct
  source 1..75: mol_type = other DNA
attggttttatagcattgcatattttaaataattatgaaaattcagttgattatgaatcagtacggattattgag

SEQ ID NO: 643138 - DNA, 75 bp, synthetic construct
  source 1..75: mol_type = other DNA
taggaaactgaatgttgttgataaaggcttcctaatatggttgcaacatcaagatatcaaagatctaaaggatga

SEQ ID NO: 643139 - DNA, 75 bp, synthetic construct
  source 1..75: mol_type = other DNA
tccgccgggatccgggaacgtgccagtgaaatcagtgcgctgattgtcgaagaagggggcaagatccagcagttg

SEQ ID NO: 643140 - DNA, 75 bp, synthetic construct
  source 1..75: mol_type = other DNA
ttgtgatggatgacgctgatattgaactggcagtcaaagccatcgttgattcacgagtcattaatagtgggcaag

SEQ ID NO: 643141 - DNA, 75 bp, synthetic construct
  source 1..75: mol_type = other DNA
ggtctgcctttgtgctggccgccgttgtggcgctggttatctgtctggtcaccttttttgtgactacctggattc

SEQ ID NO: 643142 - DNA, 75 bp, synthetic construct
  source 1..75: mol_type = other DNA
ttccgacattcagtctctgccggatctgacctgctatgtcaccctgcccggaccgtatccggcagtcaaactctc

SEQ ID NO: 643143 - DNA, 75 bp, synthetic construct
  source 1..75: mol_type = other DNA
ctctgaaatatcaggcacgaccgaaggtcgctccggagtttattccgcgtgacatcaatccggaaatggagaacc

SEQ ID NO: 643144 - DNA, 75 bp, synthetic construct
  source 1..75: mol_type = other DNA
gtaactttgaactgaacgtcttccgtccgatggtgatccataatttcctgcaatcggtgcgcttgctggcagatg

SEQ ID NO: 643145 - DNA, 75 bp, synthetic construct
  source 1..75: mol_type = other DNA
atgccagggaaagtgaacccaacacagtgcgaagcattaaccatgctctgctgtcaggtgatggggaacgacgtg

SEQ ID NO: 643146 - DNA, 75 bp, synthetic construct
  source 1..75: mol_type = other DNA
tgtttccggagaagacgtgactcaggctgaacagccgcaacagccgcaacagccgcaacagccgcaacagccgca

SEQ ID NO: 643147 - DNA, 75 bp, synthetic construct
  source 1..75: mol_type = other DNA
tttgttttatcgttgtagccaggaacataaaacaattgttattggctgggtaaatggatttgacacgcttcgtgc

SEQ ID NO: 643148 - DNA, 75 bp, synthetic construct
  source 1..75: mol_type = other DNA
tgcgcgcccggttaggggtgtccttcaacggtgtcgatcctgagaaacaggctacgactgcgaaagaacaggagc

SEQ ID NO: 643149 - DNA, 75 bp, synthetic construct
  source 1..75: mol_type = other DNA
tcaccctgggcgttcaggcaggttatgtccacagcgtcagcggcagcagcgctgaagggtataacggtcaggcca

SEQ ID NO: 643150 - DNA, 75 bp, synthetic construct
  source 1..75: mol_type = other DNA
gccctactggttgtcgtggttttacaacacaccatggaagacgctgcactcagagagtggggatggcgtattcct

SEQ ID NO: 643151 - DNA, 75 bp, synthetic construct
  source 1..75: mol_type = other DNA
gtggttctgccgaagcgcaatactgcgaactggatgttcgtacttggtgacctgaaccgctttacgctaacggga

SEQ ID NO: 643152 - DNA, 75 bp, synthetic construct
  source 1..75: mol_type = other DNA
ggaaaacggtgtgcttaaaggcgacttagtggcgcgatttggtgccgatccgacgctaaaacgtcaggatattcg

SEQ ID NO: 643153 - DNA, 75 bp, synthetic construct
  source 1..75: mol_type = other DNA
gatcagcgtaatcgccgtattccgttagtgcgatttgaaagccgcttgtataaagatatttatcagaacaattag

SEQ ID NO: 643154 - DNA, 75 bp, synthetic construct
  source 1..75: mol_type = other DNA
cgcgtagtctgaatcgcgatccactgggtctgaaagcggataacctgccttttcacggcgcggatatctggacgc

SEQ ID NO: 643155 - DNA, 75 bp, synthetic construct
  source 1..75: mol_type = other DNA
tgtatgaactttcctggctgaatgcgaaaggtttgccgcaggtcgctgtcggtcatgttgaacttgattacacca

SEQ ID NO: 643156 - DNA, 75 bp, synthetic construct
  source 1..75: mol_type = other DNA
gtagtggaagaaacactcgttagccacctgctgaaatcaaactgcctgattactcatcagccagactggggatct

SEQ ID NO: 643157 - DNA, 75 bp, synthetic construct
  source 1..75: mol_type = other DNA
agcgttatcgttaaaatcggtaggaatggaaacatctttcttctggtatgtcacctttatggcagtgattgcatt

SEQ ID NO: 643158 - DNA, 75 bp, synthetic construct
  source 1..75: mol_type = other DNA
atgggcggcggtgattatgtactgcttctcgctgcgaagaatggcgaatctagcaaggttcagcgactggcgcaa

SEQ ID NO: 643159 - DNA, 75 bp, synthetic construct
  source 1..75: mol_type = other DNA
aggccattttaatggcatctgcattgatgaccaggatatcgccattgataactatgagttcaccaccgactacct

SEQ ID NO: 643160 - DNA, 75 bp, synthetic construct
  source 1..75: mol_type = other DNA
atgacgtcgctatctcgtccccgcgtggagtttatctccactattttgcagaccgtactcaatcttggcctgttg

SEQ ID NO: 643161 - DNA, 75 bp, synthetic construct
  source 1..75: mol_type = other DNA
cgggatcaccgccattgtgcgcttgatcatcgtcgatcataaatcgccactggatgtgttgatctactcggctgc

SEQ ID NO: 643162 - DNA, 75 bp, synthetic construct
  source 1..75: mol_type = other DNA
ctatccacagcgacgggttattttacatggcactatgctggcggcggcagagtctgcgcgctatatcgttcacgg

SEQ ID NO: 643163 - DNA, 75 bp, synthetic construct
  source 1..75: mol_type = other DNA
actccttagctaaatggttaagcgcgatcctccccgtggtcattgttgggctggtggggttgtttgcggtaacgg

SEQ ID NO: 643164 - DNA, 75 bp, synthetic construct
  source 1..75: mol_type = other DNA
actatctgaccgataccggaaacttaccgcgtattaatactgttgaatccccgtttgctgaatattcttcacttg

SEQ ID NO: 643165 - DNA, 75 bp, synthetic construct
  source 1..75: mol_type = other DNA
atctactcggcagcgatcctgttactggtgatcaccctatggctgtgtaattcgaaacggctgaagcgggagtaa

SEQ ID NO: 643166 - DNA, 75 bp, synthetic construct
  source 1..75: mol_type = other DNA
gatttagcgccgcatttgctcgatcaggctattacgctgtttggcttacccgtcagcatgaccgtagatttagca

SEQ ID NO: 643167 - DNA, 75 bp, synthetic construct
  source 1..75: mol_type = other DNA
cgaccaacaccattactctgggtaagcagttggtcgctgaaatgctggaacagcttgcggatacaccgcgttgta

SEQ ID NO: 643168 - DNA, 75 bp, synthetic construct
  source 1..75: mol_type = other DNA
taacgctaaaaacgccatcttcaccgtttcggaagcaatggagcacttcgcctatttgccgaccggattgtacgt

SEQ ID NO: 643169 - DNA, 75 bp, synthetic construct
  source 1..75: mol_type = other DNA
aggccattacgctatttggtttaccggttagcatgacggtagatttggcacagttacggcccggagcgcagtcga

SEQ ID NO: 643170 - DNA, 75 bp, synthetic construct
  source 1..75: mol_type = other DNA
ggttccggcaagccaggcaatccaggtaatggagttgattgagctgggcatcgaatccgccaaacatcgcgcgac

SEQ ID NO: 643171 - DNA, 75 bp, synthetic construct
  source 1..75: mol_type = other DNA
ggtgccggcaagtcaggcgattcaggtgatggaactcattgaacttggtatcgaatccgccaaacatcgcgcgac

SEQ ID NO: 643172 - DNA, 75 bp, synthetic construct
  source 1..75: mol_type = other DNA
caagcctggagggaaaaggcgcaaggttcaccctctggcttccggtcaatattacgcgtaaggacccacaaggat

SEQ ID NO: 643173 - DNA, 75 bp, synthetic construct
  source 1..75: mol_type = other DNA
ggaaagccagccgcagcgtattgtttccaccagcgtcaccctgaccggctcactgctggcgatcgatgctccggt

SEQ ID NO: 643174 - DNA, 75 bp, synthetic construct
  source 1..75: mol_type = other DNA
ggcgaaagaacgcaaactgcaacggctctatatcggcgaaccgagcgccgaagcggtagccgcgcaaatgccgga

SEQ ID NO: 643175 - DNA, 75 bp, synthetic construct
  source 1..75: mol_type = other DNA
tctttcaacgtggtgtttcagtggcaggagcgattggatctcccacttttataaatttccccattgcatttacca

SEQ ID NO: 643176 - DNA, 75 bp, synthetic construct
  source 1..75: mol_type = other DNA
tatgccaatccactgctcgcgcacctgcctgcagtacaaaacaagcaggtttatgcgctgggaaccgagacgttc

SEQ ID NO: 643177 - DNA, 75 bp, synthetic construct
  source 1..75: mol_type = other DNA
aggcccttttcttaacaggacttttgctttcaggaatatccgcagtgcaggccgccgactggccgcgtcaggtga

SEQ ID NO: 643178 - DNA, 75 bp, synthetic construct
  source 1..75: mol_type = other DNA
gatgctggaacaactcggctttacgctggcgaagttgcccgcaggcttaaacgccagccaaagccagggcaaacg

SEQ ID NO: 643179 - DNA, 75 bp, synthetic construct
  source 1..75: mol_type = other DNA
tgcttgagaaagcggaagctgcgcctgcgcttgaggtctatcgtttgttccagccaatgtcagctccctggcggc

SEQ ID NO: 643180 - DNA, 75 bp, synthetic construct
  source 1..75: mol_type = other DNA
ggcggtcgtgcataatattgttgaacaacacggtggtacaattcaggtcgcaagccaggagggaaaaggcgcaac

SEQ ID NO: 643181 - DNA, 75 bp, synthetic construct
  source 1..75: mol_type = other DNA
attatcattcttcacagtgacccagaaatggttgggcgtgcactctattcgcctgatgaaatgcggcagttaaag

SEQ ID NO: 643182 - DNA, 75 bp, synthetic construct
  source 1..75: mol_type = other DNA
gcgatcttttcctgtgtggtacgccgtctgcgtttctccggccctaagacatcaatcatctgttctccaatgact

SEQ ID NO: 643183 - DNA, 75 bp, synthetic construct
  source 1..75: mol_type = other DNA
atctggatgatgactactttgacatgttgcaggaggaactttgcagtgttgtggaggcatccggtgccagcctgg

SEQ ID NO: 643184 - DNA, 75 bp, synthetic construct
  source 1..75: mol_type = other DNA
gaagcggcaaagaggaatgtggggacaggagaaaatcaggtaccggatatgaacagctttggtaactcattgacc

SEQ ID NO: 643185 - DNA, 75 bp, synthetic construct
  source 1..75: mol_type = other DNA
catgtcaaaaatacagggtttatctcttttgacggtaaaaccttcgtctattacctctatccggtaactcacaat

SEQ ID NO: 643186 - DNA, 75 bp, synthetic construct
  source 1..75: mol_type = other DNA
ggaaggaggaccggatgcggaaaatggtgataccgggcagaccgtctacggagatgccgtacgcaccaccatcaa

SEQ ID NO: 643187 - DNA, 75 bp, synthetic construct
  source 1..75: mol_type = other DNA
atgcagcaccggcaggataacttactggcgaacagaaatttgttgcctggtatggtttccggtcagtgcgcattt

SEQ ID NO: 643188 - DNA, 75 bp, synthetic construct
  source 1..75: mol_type = other DNA
gtttgattagcaattccaaccctaatagctttcggatcgcttcagatctcattaatgaagcaaaagagaatttca

SEQ ID NO: 643189 - DNA, 75 bp, synthetic construct
  source 1..75: mol_type = other DNA
aaattctccacgttacccgtcaggacaacgccgttgcgcaatctgccgcatcgtgggttgagctgtgcgactggg

SEQ ID NO: 643190 - DNA, 75 bp, synthetic construct
  source 1..75: mol_type = other DNA
tattggtacttccacctgcgacattctgattgccgacaaacagagcgttggcgagcgtgcagtaaaaggcatttg

SEQ ID NO: 643191 - DNA, 75 bp, synthetic construct
  source 1..75: mol_type = other DNA
cattatgcaggcctgctgcgacgtgctgaatcgcccgctgcaaattgttgcctctgaccagtgctgtgcgctcgg

SEQ ID NO: 643192 - DNA, 75 bp, synthetic construct
  source 1..75: mol_type = other DNA
atgattacggtcattgatcatgaggaccacactcgtcgtgtatggccgataagagcaggaaagttatcatggctg

SEQ ID NO: 643193 - DNA, 75 bp, synthetic construct
  source 1..75: mol_type = other DNA
gcactgaacaggccatcaagaatgctgccggcgatgacattaaaaggaatgaactggagaattatttctcagtta

SEQ ID NO: 643194 - DNA, 75 bp, synthetic construct
  source 1..75: mol_type = other DNA
atttagacgtttttgaaggcgctaaattttctcttgatatggtaaggttttatcttaatggtccggcaacagtga

SEQ ID NO: 643195 - DNA, 75 bp, synthetic construct
  source 1..75: mol_type = other DNA
atgtttccggttcgttcactgccggactgcctcttgtttacccggactggcttgcccctgaccatctcacggttt

SEQ ID NO: 643196 - DNA, 75 bp, synthetic construct
  source 1..75: mol_type = other DNA
cggtacggggcagttaaatggtgtcctttcctttaataatcctctggggctggctgacaactggtttgtcagcgg

SEQ ID NO: 643197 - DNA, 75 bp, synthetic construct
  source 1..75: mol_type = other DNA
ataaaatagaaaagaatgtttctgaagaactcttcagagtaaactgttctcccgttgttaatctcttcgaaaaaa

SEQ ID NO: 643198 - DNA, 75 bp, synthetic construct
  source 1..75: mol_type = other DNA
gcggcatcgcgcggaaaaacccggtcattatgcaggcctgctgcgacgtgcttaatcgtccgctgcaaatcgtcg

SEQ ID NO: 643199 - DNA, 75 bp, synthetic construct
  source 1..75: mol_type = other DNA
ccagcgattttgccagtaacccggaaccacgttgcccctgcattttgctgctggatgtttctggttctatgaacg

SEQ ID NO: 643200 - DNA, 75 bp, synthetic construct
  source 1..75: mol_type = other DNA
aaagagtggaactcggcattgtgacgttcggcccggtgcatgtggaacaaccctttaccagcgccgctaattttt

SEQ ID NO: 643201 - DNA, 75 bp, synthetic construct
  source 1..75: mol_type = other DNA
cggattggttacctttcgcgatgagctgcttgccgattcgctggccttaaaaagagtggaactcggcattgtgac

SEQ ID NO: 643202 - DNA, 75 bp, synthetic construct
  source 1..75: mol_type = other DNA
tatccactttaatgtgatggccattgtgccgcgtgattcaaccgttgagacgttcgtattggcggtaaacagtgc

SEQ ID NO: 643203 - DNA, 75 bp, synthetic construct
  source 1..75: mol_type = other DNA
atctgacatagatgctaacctgataatgacatatacaaaaaacaggctggagtatgcagcaaaacaaaagttcgc

SEQ ID NO: 643204 - DNA, 75 bp, synthetic construct
  source 1..75: mol_type = other DNA
atattgatgggctgcgagctattgcggttttgctggtcgtgctgtaccacgcaaactttcctattcatggtggtt

SEQ ID NO: 643205 - DNA, 75 bp, synthetic construct
  source 1..75: mol_type = other DNA
gcctgaaaggggtgattaccgatctcaatctcgctaccgacgccccggcgctgttcggcggtttgattgccgcca

SEQ ID NO: 643206 - DNA, 75 bp, synthetic construct
  source 1..75: mol_type = other DNA
aaattctccacgttacccgtcaggacagcgccgttgcgcaatctgccgcatcgtggattgagctgtgcgactggg

SEQ ID NO: 643207 - DNA, 75 bp, synthetic construct
  source 1..75: mol_type = other DNA
agtcaatggaagcggcgctgaaaaccgtactggcagagcttagcgccgaacaacgggctgaagtggtcggtattg

SEQ ID NO: 643208 - DNA, 75 bp, synthetic construct
  source 1..75: mol_type = other DNA
aaaacgatgctacaaataaacattatgcaattgcccattttaacgtatggaatgcagaaatgttgatgggcgtta

SEQ ID NO: 643209 - DNA, 75 bp, synthetic construct
  source 1..75: mol_type = other DNA
tctgtttcctaattttgccgaggcaaaattactcaccgggaaagagacactggatgaaattgctgactgctttct

SEQ ID NO: 643210 - DNA, 75 bp, synthetic construct
  source 1..75: mol_type = other DNA
gtggaaattgaatattgacgatgttgattttgcgcggttttctcaggcgaaattattatcactggccagtatttt

SEQ ID NO: 643211 - DNA, 75 bp, synthetic construct
  source 1..75: mol_type = other DNA
atccggtattggcggcgcagatggtaaacatggcttgcatgaatatctgcagacccaggtggtttatttacagtc

SEQ ID NO: 643212 - DNA, 75 bp, synthetic construct
  source 1..75: mol_type = other DNA
gtatccgaacggtgatggctgtgtaactataagctcaccagaaataaaaataaataccctgctgccatttgcctg

SEQ ID NO: 643213 - DNA, 75 bp, synthetic construct
  source 1..75: mol_type = other DNA
gggtgtgggtatagcaaattattaattgctttttattttttgctacaaattttgcgaccattaacatatgattat

SEQ ID NO: 643214 - DNA, 75 bp, synthetic construct
  source 1..75: mol_type = other DNA
ccgtgtggcggcattgaaatttgcagcctccgtctttaccaatttaagccgcgatcaccttgattatcatggtga

SEQ ID NO: 643215 - DNA, 75 bp, synthetic construct
  source 1..75: mol_type = other DNA
ttggcgaaaccagcgcggtaatgggcaccgttggtaacggcctgctggggaaagtgatcccgacagaaaatacta

SEQ ID NO: 643216 - DNA, 75 bp, synthetic construct
  source 1..75: mol_type = other DNA
tgtcgcatttgacacgctggaagatgctatctcaatggctaatgacagtgattacggcctgacctcatcaatcta

SEQ ID NO: 643217 - DNA, 75 bp, synthetic construct
  source 1..75: mol_type = other DNA
ttctctgttcctgcaagcaatgcgtgtggcaattcctgccgtcatcgtggcgctgtctgttggtaccagcgaagt

SEQ ID NO: 643218 - DNA, 75 bp, synthetic construct
  source 1..75: mol_type = other DNA
attatcggtggtactctggaaatgatcgcgcttggctggatgaatatcggtgccgcagttgcgcctgatgcagct

SEQ ID NO: 643219 - DNA, 75 bp, synthetic construct
  source 1..75: mol_type = other DNA
gtgttaaagggaaaacttgttacatcaacataaaccccgatggtcgttatgcccgtgttttgaccgccccatgta

SEQ ID NO: 643220 - DNA, 75 bp, synthetic construct
  source 1..75: mol_type = other DNA
ggcatcaggcggcattttgttatggccgcagtcgcattttgactgggcgcgtccggggatcattctttacggtgt

SEQ ID NO: 643221 - DNA, 75 bp, synthetic construct
  source 1..75: mol_type = other DNA
tgccgtgcgtgagcataaagcaggtgaaccggtaggctatggcggcacctggattagcgagcgcgatacccgcct

SEQ ID NO: 643222 - DNA, 75 bp, synthetic construct
  source 1..75: mol_type = other DNA
tgaccatcatcgttcgtactatcaccgttgctttccagcacgctgcggataaggctgctgataacggcaacctga

SEQ ID NO: 643223 - DNA, 75 bp, synthetic construct
  source 1..75: mol_type = other DNA
ccatgaagattaccagattgtcggtaatcagcgtctggactactccgatcgcgtcacggtggcgcgtttgctggg

SEQ ID NO: 643224 - DNA, 75 bp, synthetic construct
  source 1..75: mol_type = other DNA
atatcaacaacgtggtgtgcgcaatgcccttgccctatacccgtttgtacgaaggcctggcgagcggattgaaag

SEQ ID NO: 643225 - DNA, 75 bp, synthetic construct
  source 1..75: mol_type = other DNA
ggcgctggcaggcgcggcaaatccggcacaggtggcaggcgatttccatgcgcaaatcgacgctatctggggagg

SEQ ID NO: 643226 - DNA, 75 bp, synthetic construct
  source 1..75: mol_type = other DNA
tttatcatcgtggtcgcgacgcacaggccagcgggcagcaatggggcgaggcggatctggcgcgtatgaaggctc

SEQ ID NO: 643227 - DNA, 75 bp, synthetic construct
  source 1..75: mol_type = other DNA
aaaaatctggagtcaagcggcgcgatacggattgaacgtcgcgggcgcaatggcagttatctggtagagatggat

SEQ ID NO: 643228 - DNA, 75 bp, synthetic construct
  source 1..75: mol_type = other DNA
ctgcatgcggttgttgataaacatgccctgcttacccatcaacagcgtgtggtaagtggggaacaggaacccagt

SEQ ID NO: 643229 - DNA, 75 bp, synthetic construct
  source 1..75: mol_type = other DNA
tggtgagcatcagttgatttgccgtaaaggggagtctgcaaaggtgaaacgcgtggggctggataaccgttcggc

SEQ ID NO: 643230 - DNA, 75 bp, synthetic construct
  source 1..75: mol_type = other DNA
atgttgaatgctctaggttatgaagatcacgcgaagtttcgcgtcatctattttgaccaatacggacgcgaacaa

SEQ ID NO: 643231 - DNA, 75 bp, synthetic construct
  source 1..75: mol_type = other DNA
aggcaaacgtccactgatgggcgcaattgccgaagagtttgctgacgtggcggtggtgacggacgataacccgcg

SEQ ID NO: 643232 - DNA, 75 bp, synthetic construct
  source 1..75: mol_type = other DNA
tcagcaacctgctgctggcgctggcgacgctgctggcgctcggttacccgctggccgagctgctgaaaacagcag

SEQ ID NO: 643233 - DNA, 75 bp, synthetic construct
  source 1..75: mol_type = other DNA
ggcgctggcaggcgcagcaaatccggcacaggtagctgccgacttccatgcgcaaatcgacgctatctggggagg

SEQ ID NO: 643234 - DNA, 75 bp, synthetic construct
  source 1..75: mol_type = other DNA
atgagccgaccacttctgcaactggcactcgaccactcatcacttgaagccgcacagcgcgacgtgacgcagtta

SEQ ID NO: 643235 - DNA, 75 bp, synthetic construct
  source 1..75: mol_type = other DNA
gcaaacatgactaagctcgactggattcgtgaggcaatggaattggaagccgcaaacgaacaactgattcaagaa

SEQ ID NO: 643236 - DNA, 75 bp, synthetic construct
  source 1..75: mol_type = other DNA
atgacggtgcggggtttgcaaatggttccacagccgcagataaagcaagtgccgtcgccgttgaagtctggagca

SEQ ID NO: 643237 - DNA, 75 bp, synthetic construct
  source 1..75: mol_type = other DNA
atcatggcaatttcatcgcgtaacacacttcttgccacactggcattcatcgcgtaacacacttcttgccacact

SEQ ID NO: 643238 - DNA, 75 bp, synthetic construct
  source 1..75: mol_type = other DNA
acagcggagccagcatcgtgcgggcgctggcttctggcgacgtgcaaatcggcaacctcggttccagcccattag

SEQ ID NO: 643239 - DNA, 75 bp, synthetic construct
  source 1..75: mol_type = other DNA
tgctgaccggctctgacggcgtactgcgtggtgcttccggtggtcactgcgataccgcgattgcctctgcgcttt

SEQ ID NO: 643240 - DNA, 75 bp, synthetic construct
  source 1..75: mol_type = other DNA
cggtgaacaaagcgatcatcgataccgcgcagtttttgaaagagcagggcaaagttcccgccgtggcgaatgatt

SEQ ID NO: 643241 - DNA, 75 bp, synthetic construct
  source 1..75: mol_type = other DNA
tcctgaggtagtgaaagccttcgccaaaagcgcccttgatgcccagcagccttacatagccaaccctgatgcgtg

SEQ ID NO: 643242 - DNA, 75 bp, synthetic construct
  source 1..75: mol_type = other DNA
tagttaagaaaaacatcagcaaacccgaagatctgattggcaaacgcatcgccgtgccgtttatctccaccacgc

SEQ ID NO: 643243 - DNA, 75 bp, synthetic construct
  source 1..75: mol_type = other DNA
gttccctatccagctgcagtgcagcggcggagtcagcgttgccggctacgccaacgtcaatatgacctttgatgg

SEQ ID NO: 643244 - DNA, 75 bp, synthetic construct
  source 1..75: mol_type = other DNA
cgacctttacgctggaagtgatcaaaactgccgccataaccggtagcggcagcgtcgccagcggcaagtatacgt

SEQ ID NO: 643245 - DNA, 75 bp, synthetic construct
  source 1..75: mol_type = other DNA
taccgggatgacctcaaagccaaagtcgcccggcagaagctgagcccggacagtttcacaacctacggggtgcgt

SEQ ID NO: 643246 - DNA, 75 bp, synthetic construct
  source 1..75: mol_type = other DNA
ctgaccgtcaatatggtgatggacgtcatcgcgaagatgggctttaaaaacctgaccctggcatccagctccctg

SEQ ID NO: 643247 - DNA, 75 bp, synthetic construct
  source 1..75: mol_type = other DNA
tgagtggctgcgcgaacgtgcgcgtctgctgaccggtgaaccacagccgattgaattcaccgaccgcgtcgttgc

SEQ ID NO: 643248 - DNA, 75 bp, synthetic construct
  source 1..75: mol_type = other DNA
tcccccgaagattacgcagcggcagaagactgggggacggtggtggccattgttcacagccatcctgatgcgacg

SEQ ID NO: 643249 - DNA, 75 bp, synthetic construct
  source 1..75: mol_type = other DNA
gattgaagtcttcttgctggcgtcaaaactgggtaactccgaagcgctggtggtgaagaaaactatcagcaaacc

SEQ ID NO: 643250 - DNA, 75 bp, synthetic construct
  source 1..75: mol_type = other DNA
tttgccctcaccacgaaaggtacgcctgctcacagcgccgtaagttatcaggatggcgactatctgatgtttggc

SEQ ID NO: 643251 - DNA, 75 bp, synthetic construct
  source 1..75: mol_type = other DNA
cgatgggatttgcctgggacgacaagcgcctgcgccgcgcggggctggactaccacgaatttaccgccgttacgc

SEQ ID NO: 643252 - DNA, 75 bp, synthetic construct
  source 1..75: mol_type = other DNA
atgctaaacatcgtactttacgaaccagaaattccgccaaatactggcaacatcatccgtctttgcgccaacacc

SEQ ID NO: 643253 - DNA, 75 bp, synthetic construct
  source 1..75: mol_type = other DNA
aaaaataaaaccgtaagcaatgtcactgcgggtaaattttctgcacctgccacatttacagtaacctataactaa

SEQ ID NO: 643254 - DNA, 75 bp, synthetic construct
  source 1..75: mol_type = other DNA
ttacccaatgagtgctcgcctggtcgtagaaaaaaataaaaccgtaaacaatgttacggcgggtaaattttctgc

SEQ ID NO: 643255 - DNA, 75 bp, synthetic construct
  source 1..75: mol_type = other DNA
gcttttgttggttctgttgcgtgttgggggataagcgcatgggtgttgattatatgctggattaagctgcattaa

SEQ ID NO: 643256 - DNA, 75 bp, synthetic construct
  source 1..75: mol_type = other DNA
ggcatccctattcaccaaccaattgtttgcagctacagataacgttaagctgaatgttaaagcaaccgtagagat

SEQ ID NO: 643257 - DNA, 75 bp, synthetic construct
  source 1..75: mol_type = other DNA
ccacagccacggggaatacagttgtagattatccgatgagtgcgcgcctggtcgtggataagagtaaaaccgtaa

SEQ ID NO: 643258 - DNA, 75 bp, synthetic construct
  source 1..75: mol_type = other DNA
ttggattatcgactgcaactattctggcggcatcagtgctcactttttcgtcatttgctgcgactgatagcgtta

SEQ ID NO: 643259 - DNA, 75 bp, synthetic construct
  source 1..75: mol_type = other DNA
gttgcgtcacccccgcaacagaagaagtcagtattgctggtgcgacgggaggtgatgttgtcgattacccgatga

SEQ ID NO: 643260 - DNA, 75 bp, synthetic construct
  source 1..75: mol_type = other DNA
cagtcgccgttgaggtctggagtacgtccacaccaggtaaaaacggcgcaaaacaattcagttgcgtcacccccg

SEQ ID NO: 643261 - DNA, 75 bp, synthetic construct
  source 1..75: mol_type = other DNA
ccatcaatttcggtgatgtatatatttctgaaattaatgccgaaactaaaattaaaaccttcaaattgcagttca

SEQ ID NO: 643262 - DNA, 75 bp, synthetic construct
  source 1..75: mol_type = other DNA
aaaagagcacattcctcttatgcgcgctccctggcctatgactggtgaagtgaatcgtcgcaatgtgattaaccc

SEQ ID NO: 643263 - DNA, 75 bp, synthetic construct
  source 1..75: mol_type = other DNA
tctggggattttcacttattgccggttggtacaaaccccagtttaagaaggaatatcagatgctccactatgata

SEQ ID NO: 643264 - DNA, 75 bp, synthetic construct
  source 1..75: mol_type = other DNA
cgcacggacgagggttttgacgttgagtgcggctttgccgcaccttggactcgtggcaataactgtccccatgat

SEQ ID NO: 643265 - DNA, 75 bp, synthetic construct
  source 1..75: mol_type = other DNA
gtgggcacggcgttacgagggcgagattattcaaagcgatcgtccaggagaaaatattcttctgtttaaacgtgc

SEQ ID NO: 643266 - DNA, 75 bp, synthetic construct
  source 1..75: mol_type = other DNA
cgatgaaataggccttccgcgcggcgtgtttaaccttgtgctggggcgtggtgaaaccgttgggcaagaactggc

SEQ ID NO: 643267 - DNA, 75 bp, synthetic construct
  source 1..75: mol_type = other DNA
gcttggcgtgactaccggcattctgccgtggaacttcccgttcttcctcattgcccgcaaaatggctcccgctct

SEQ ID NO: 643268 - DNA, 75 bp, synthetic construct
  source 1..75: mol_type = other DNA
acaaccactatcggggcaggtaccctggtcaaccagggacagatggagaacggtgtctggttctggaaattctag

SEQ ID NO: 643269 - DNA, 75 bp, synthetic construct
  source 1..75: mol_type = other DNA
tggacattccagtatcctgtccgtatgcgtctggtcggccagacaaccagcaagccagaacagtcttttgttttc

SEQ ID NO: 643270 - DNA, 75 bp, synthetic construct
  source 1..75: mol_type = other DNA
catggagtgaaaaagaggatgatcgaggcagaaccatcgttacatatacctgtgatattagtgaaagtggcctaa

SEQ ID NO: 643271 - DNA, 75 bp, synthetic construct
  source 1..75: mol_type = other DNA
catgcgtgacgcagcaatcaaatcagatcgcgcagaactggggaatgatatttctccgcgcttcaagtgcgaaaa

SEQ ID NO: 643272 - DNA, 75 bp, synthetic construct
  source 1..75: mol_type = other DNA
aaactcaacaaagaaggcctgagctggtacggggtgcgcaccgttgagccacaccatgacggcacaccgcactgg

SEQ ID NO: 643273 - DNA, 75 bp, synthetic construct
  source 1..75: mol_type = other DNA
aacaagatcagttttatgtggtggctaatggtcgtcagcatgtgagagctgatatctacacaatcagagcaagtt

SEQ ID NO: 643274 - DNA, 75 bp, synthetic construct
  source 1..75: mol_type = other DNA
gggtaacccaaaggtcgcaatggtcagtatgacaggcagcgtctctgcaggtgaaaagatcatggcgactgcggc

SEQ ID NO: 643275 - DNA, 75 bp, synthetic construct
  source 1..75: mol_type = other DNA
atccgttacctgcaggggattgagcacagcggtgagtccttcactattcgtgactggatgcggggtgtccgtgaa

SEQ ID NO: 643276 - DNA, 75 bp, synthetic construct
  source 1..75: mol_type = other DNA
tgattcttgctgatcacatttcgaatgcaatatcccgagtcgtctcaggcatacaaattaataatgttttccttg

SEQ ID NO: 643277 - DNA, 75 bp, synthetic construct
  source 1..75: mol_type = other DNA
atctggggctgctatccggcgaagacggcgacaaaattaaacgcttgccgctcgttggcgtctggctggaacggc

SEQ ID NO: 643278 - DNA, 75 bp, synthetic construct
  source 1..75: mol_type = other DNA
gtctgagtgccgtacttgctgcaagggaagcagaaggtcgccagatggccagcctcttcgaaccggaggttgcct

SEQ ID NO: 643279 - DNA, 75 bp, synthetic construct
  source 1..75: mol_type = other DNA
tttccgttccccgagccataagattgcagagttcgcggccggtgagattggtgagaaagagcacctgaaagccag

SEQ ID NO: 643280 - DNA, 75 bp, synthetic construct
  source 1..75: mol_type = other DNA
cggcgatttccatccgtgctgtgctgaccaactacgtgaaagccatccgttacctgcaggggattgagcataacg

SEQ ID NO: 643281 - DNA, 75 bp, synthetic construct
  source 1..75: mol_type = other DNA
tgtgcttgcagagcttagcgtcgaacagcgcgcagctgtggtcgggattggcgttgacacaaccggctcgacgcc

SEQ ID NO: 643282 - DNA, 75 bp, synthetic construct
  source 1..75: mol_type = other DNA
tcatggattgagctgtgcgactgggtgcccgccctgctcagtggcaccacgcgcccgcaggatattcgtcgcgga

SEQ ID NO: 643283 - DNA, 75 bp, synthetic construct
  source 1..75: mol_type = other DNA
ctttctttatttaggtaaaaatacggcacttaataaagttaacgcagttttgttaggtcgtggcgattttattat

SEQ ID NO: 643284 - DNA, 75 bp, synthetic construct
  source 1..75: mol_type = other DNA
aaaacccgtctctggatcacctgccggtagtactcgactggtttaacggtcgtcgcacgccaaacgctaaccaac

SEQ ID NO: 643285 - DNA, 75 bp, synthetic construct
  source 1..75: mol_type = other DNA
ccgcctttggcgcacgcgcaattatggagtgctttaccgatcaggggatcgccgtcaataacgtgatggcgctgg

SEQ ID NO: 643286 - DNA, 75 bp, synthetic construct
  source 1..75: mol_type = other DNA
ggtggtgctcgactggtttaacggtcgccgcacaccgaacgctaaccaacgcctgaaaggagtgattaccgatct

SEQ ID NO: 643287 - DNA, 75 bp, synthetic construct
  source 1..75: mol_type = other DNA
taaatgattgcagaaaaaaattaaatgtctcagatgtcaaactaacctactactggtttgtaacagacaccggag

SEQ ID NO: 643288 - DNA, 75 bp, synthetic construct
  source 1..75: mol_type = other DNA
ccagccagattgatgtgcattgtttccgccatattttgcagattgttcgcgacaatgaagcggctgaatatctgg

SEQ ID NO: 643289 - DNA, 75 bp, synthetic construct
  source 1..75: mol_type = other DNA
gcgaccggacagaatagcccccggtcgcgggcgttacggtacggtggtacaggtgattgaccccgaccggctgag

SEQ ID NO: 643290 - DNA, 75 bp, synthetic construct
  source 1..75: mol_type = other DNA
gagaaaaaaggcgccatcctcggcctcgatgcgggcctttccactctcgaaattgaagtgggtgaaaacgtgggt

SEQ ID NO: 643291 - DNA, 75 bp, synthetic construct
  source 1..75: mol_type = other DNA
aatcacacagtctatattcgagacaacgggattggcatcggtgaaccgaaagaacccgaaggccattatggtctg

SEQ ID NO: 643292 - DNA, 75 bp, synthetic construct
  source 1..75: mol_type = other DNA
acaaccttccggcggcggcacgttagtgagtattagctttcgctccgcagagggtgaggggaaggggaacacgcc

SEQ ID NO: 643293 - DNA, 75 bp, synthetic construct
  source 1..75: mol_type = other DNA
tgacaatgcaagagacggtttacggcgaactgcactggcaaaatagtcacgtttcatcatcagaaccgctgctta

SEQ ID NO: 643294 - DNA, 75 bp, synthetic construct
  source 1..75: mol_type = other DNA
ggcacacggtcagatcgagttcactgctgatgctatcccgcatctcgtaaaactcggattgcttgaagaagaaaa

SEQ ID NO: 643295 - DNA, 75 bp, synthetic construct
  source 1..75: mol_type = other DNA
gcatgttaaacgtgatattaaaactatgcttacttctcttgaattagatgagtccaaatttggacgcatcttttt

SEQ ID NO: 643296 - DNA, 75 bp, synthetic construct
  source 1..75: mol_type = other DNA
acattgagcgcgtctatgatgaaaataacaagccgtgtgggtatgttgctaatgactcttctctgtctttctgcc

SEQ ID NO: 643297 - DNA, 75 bp, synthetic construct
  source 1..75: mol_type = other DNA
gtattacggatgatgacaggcaataaaagttttgacgcagtatgggcggaagagtacggaaaagcactcgcctcc

SEQ ID NO: 643298 - DNA, 75 bp, synthetic construct
  source 1..75: mol_type = other DNA
cctcgccttatgccgcttttggtctggtgatgtgcgccctgctgatagtgagtttttatacttcaatcagtggaa

SEQ ID NO: 643299 - DNA, 75 bp, synthetic construct
  source 1..75: mol_type = other DNA
gaagttgccgttgaagggcgcaaaggtttttacgcatcatttcagtatgtgacgttgatcagcgggcaactgcta

SEQ ID NO: 643300 - DNA, 75 bp, synthetic construct
  source 1..75: mol_type = other DNA
taccgctcgctggaagcgtcagtagaagaaaagacccgcgatctccacgaggccaagcggcgtctggaagttctt

SEQ ID NO: 643301 - DNA, 75 bp, synthetic construct
  source 1..75: mol_type = other DNA
cggtgacgctggctagccagaaacggatctggcgactggcgcagcgtctggtggatatgccgaatgtggttgaag

SEQ ID NO: 643302 - DNA, 75 bp, synthetic construct
  source 1..75: mol_type = other DNA
ctggcagttgattggtcatacctcactcagcctgtttgatccggcgcgtgacgaacccatcttattacgtccggg

SEQ ID NO: 643303 - DNA, 75 bp, synthetic construct
  source 1..75: mol_type = other DNA
taagcccgtgtttgaacaggtgatggcggcgctggactgtctgaagcgtcatcgtgtggacgtcaatatcctgac

SEQ ID NO: 643304 - DNA, 75 bp, synthetic construct
  source 1..75: mol_type = other DNA
atgacgcacaagaattaatcgcgcacggtgcaaagttaatcgatattcgcgatgccgacgaatatcttcgtgaac

SEQ ID NO: 643305 - DNA, 75 bp, synthetic construct
  source 1..75: mol_type = other DNA
cagaaatctttttactcgaagatgggattgatggctggaaaaaagcaggattgccagtagcggtaaataaatctc

SEQ ID NO: 643306 - DNA, 75 bp, synthetic construct
  source 1..75: mol_type = other DNA
gaggagagtgaggcgctggaaccggagtcacgccatatcgaaatcccggtggtttacggcggcgctggcgggccg

SEQ ID NO: 643307 - DNA, 75 bp, synthetic construct
  source 1..75: mol_type = other DNA
tactctgcgccgcatacgccatcaggtggttgccccgctgaatcagctggttaccgccagtcagcgtattgaaca

SEQ ID NO: 643308 - DNA, 75 bp, synthetic construct
  source 1..75: mol_type = other DNA
taacattactgaagcgttcgataccggaagataacgccaccgcacaaagtatcatggccgatttttcccaggcat

SEQ ID NO: 643309 - DNA, 75 bp, synthetic construct
  source 1..75: mol_type = other DNA
cggtttgtactttaatcaggcacagaagcatttccagcagttattgttaatggaagaacgcgcaacgatcgcccg

SEQ ID NO: 643310 - DNA, 75 bp, synthetic construct
  source 1..75: mol_type = other DNA
gtttacgcacgttatacccgtcgtggcggtctggacattaacccgtggcgcagtaatagcgattttgtcccatcg

SEQ ID NO: 643311 - DNA, 75 bp, synthetic construct
  source 1..75: mol_type = other DNA
ttaaaatctatgttggttgagcatcgtgatgtgcaggctaacgatcataaaggggctttagtgcaatttacgcga

SEQ ID NO: 643312 - DNA, 75 bp, synthetic construct
  source 1..75: mol_type = other DNA
tgcattcgcaggtttatctgctattgatgtggaaatgattgctggtttgcccgaggggtacctgactggcaagaa

SEQ ID NO: 643313 - DNA, 75 bp, synthetic construct
  source 1..75: mol_type = other DNA
ttcaacatggagtcgtagtagtggccaaaccgcagaatggaagaatctcagcagctatttgcaacgggcggttat

SEQ ID NO: 643314 - DNA, 75 bp, synthetic construct
  source 1..75: mol_type = other DNA
tcccattgtccagggttcggcaggtgtaagaattggcgcttcctctgaaaagaaaatgtcccacaggtacgtaat

SEQ ID NO: 643315 - DNA, 75 bp, synthetic construct
  source 1..75: mol_type = other DNA
cgccgggtaatgactgaagatgtggtggagcagtgccgcagaatgctggagaacggcgctacccggcagcaggta

SEQ ID NO: 643316 - DNA, 75 bp, synthetic construct
  source 1..75: mol_type = other DNA
tttaatggcggaacacaacagattgcgtattggagatatgctggagaaactgattaatgagtactatcaggaaca

SEQ ID NO: 643317 - DNA, 75 bp, synthetic construct
  source 1..75: mol_type = other DNA
aagttacccttaagggcacggttttgggtgttcatacagccgaagccatactgcttaacggcaacagagatacga

SEQ ID NO: 643318 - DNA, 75 bp, synthetic construct
  source 1..75: mol_type = other DNA
tgccgttagagacggtggaaatctaacattgaacgaagaatcaccgatcgttaagaagtttgtcgcggagtacac

SEQ ID NO: 643319 - DNA, 75 bp, synthetic construct
  source 1..75: mol_type = other DNA
atgcgctaaatgcggcaatttctgtgttaggggaagcgccggtcaatcctccgaataaaggagagccatcaaaaa

SEQ ID NO: 643320 - DNA, 75 bp, synthetic construct
  source 1..75: mol_type = other DNA
tggtgaatggatggtacccgacagcgagtatcagcgatctgctggttgtcgtgatgaagaagtccacggcgggta

SEQ ID NO: 643321 - DNA, 75 bp, synthetic construct
  source 1..75: mol_type = other DNA
ttaaccagaactgccggatacttggaaaactgtctgccaaccagattgaaggcgatattgttaaaaccgtgggga

SEQ ID NO: 643322 - DNA, 75 bp, synthetic construct
  source 1..75: mol_type = other DNA
atgcaccgtcagtcagacatcgccgcggctttccgcgagtccattttgcgcagttccaaggggttccagtacctt

SEQ ID NO: 643323 - DNA, 75 bp, synthetic construct
  source 1..75: mol_type = other DNA
attctggttatagccgtcggcagttgcagattatatttcgcgaacatgccggacttcctcttggtgaatacatta

SEQ ID NO: 643324 - DNA, 75 bp, synthetic construct
  source 1..75: mol_type = other DNA
ctctctatgttcatttattatcaccatcgggtttatccagaggggaaggcgttgatattgaagtgatacgtaaga

SEQ ID NO: 643325 - DNA, 75 bp, synthetic construct
  source 1..75: mol_type = other DNA
tgtatttaacatttgctcaagccataagctatatatttcctcttctgacattgccttacttaagtcacaaacttg

SEQ ID NO: 643326 - DNA, 75 bp, synthetic construct
  source 1..75: mol_type = other DNA
attaccatacagtccttggagcgcgagaagattaccgtggtttgaaaagtcatgaaacgattcatgatcctaccc

SEQ ID NO: 643327 - DNA, 75 bp, synthetic construct
  source 1..75: mol_type = other DNA
ttatttatcgagaaatctttagtgaagagttttttattccagtatgaaaattgttttaaagaaggaacatatgga

SEQ ID NO: 643328 - DNA, 75 bp, synthetic construct
  source 1..75: mol_type = other DNA
ctacgaagagggttcgaaactcttccagcagaaatacctcatcgatgataacgcggtaacgctggtcggtgagcc

SEQ ID NO: 643329 - DNA, 75 bp, synthetic construct
  source 1..75: mol_type = other DNA
gccagtgacggcctcaccgggacaccgacagggttcagtgaactggacgcgatgacctgtggtctccagcccggc

SEQ ID NO: 643330 - DNA, 75 bp, synthetic construct
  source 1..75: mol_type = other DNA
cggcggcgaacggaagagagcgttctgatattcagcatcgagatgccgaaggagcaactgattctgcgcatgctt

SEQ ID NO: 643331 - DNA, 75 bp, synthetic construct
  source 1..75: mol_type = other DNA
aatccagagatcgccggaactgcatgtgactttcactgtagaggggtggacggccttttccggatccgtcccgaa

SEQ ID NO: 643332 - DNA, 75 bp, synthetic construct
  source 1..75: mol_type = other DNA
ccggtacggaatgataagggctgggatattgtgccgtttcacaaagtaggcaaatttatcagcggtggtacacct

SEQ ID NO: 643333 - DNA, 75 bp, synthetic construct
  source 1..75: mol_type = other DNA
aggagcgagcactatagaacagcagtttgtgagaactataactaaaagatacgaaaaaacaatacgtagaaagat

SEQ ID NO: 643334 - DNA, 75 bp, synthetic construct
  source 1..75: mol_type = other DNA
ggcgatccggctggcgctcaggtgaatactgatgccattaccgcagcggtaaacgctgctctcactccgctgacc

SEQ ID NO: 643335 - DNA, 75 bp, synthetic construct
  source 1..75: mol_type = other DNA
ttcctcacccacaactccgacgcctccttcgacgaaatctaccagatgctgcgagaggccatccgcgcgccgtcc

SEQ ID NO: 643336 - DNA, 75 bp, synthetic construct
  source 1..75: mol_type = other DNA
aatccctcgccatcaacgcctccaacatctcaacgacaaccatcaacgggcaagaacactacgtcattcgtggtg

SEQ ID NO: 643337 - DNA, 75 bp, synthetic construct
  source 1..75: mol_type = other DNA
cccgacggtacaatttgaattctggttttcggaggcaaaaatcgcagacacatctcaggtggaaacctctgcccg

SEQ ID NO: 643338 - DNA, 75 bp, synthetic construct
  source 1..75: mol_type = other DNA
aacgcctctgaatataaaattaccagcgctcgcatgggcaataccgtcaccatgagtgccgaactgtacaaataa

SEQ ID NO: 643339 - DNA, 75 bp, synthetic construct
  source 1..75: mol_type = other DNA
aactcgccgctattcggtcatgacaaaggggcgtttactggtgcgattaatacccatcgtggtcgttttgaaatt

SEQ ID NO: 643340 - DNA, 75 bp, synthetic construct
  source 1..75: mol_type = other DNA
ggcgaatgtgaaacgccggtgcgtaaggcgaagcacggtgattccagcggcgtacgcggcgctgcgtggttatgg

SEQ ID NO: 643341 - DNA, 75 bp, synthetic construct
  source 1..75: mol_type = other DNA
atggctcaggccaataaaagcctggtcatccagcgccagcggtatatcgacgatggatttaaccgcgctgcagat

SEQ ID NO: 643342 - DNA, 75 bp, synthetic construct
  source 1..75: mol_type = other DNA
cctttgcgcacaatacaaaaaagcggtctttgcccgcgccaaagccgatcttctcggtgagtttacggcggtgaa

SEQ ID NO: 643343 - DNA, 75 bp, synthetic construct
  source 1..75: mol_type = other DNA
cagaccagaacacagacactgctacaggcatgcttaaaaatgatggcttctggccggatctgtccatggctgatt

SEQ ID NO: 643344 - DNA, 75 bp, synthetic construct
  source 1..75: mol_type = other DNA
ccggtacatcagcccgtgaggcggcaacccatgcgactgatgctgcaggctcagcacgcgcagccagcacgtcag

SEQ ID NO: 643345 - DNA, 75 bp, synthetic construct
  source 1..75: mol_type = other DNA
gatacagatgccgtcgcctggaacctggacagtggcgcttattgtgcacaggatggtggcgcatcatccttaatt

SEQ ID NO: 643346 - DNA, 75 bp, synthetic construct
  source 1..75: mol_type = other DNA
cggcgaatgcgcagtttacctatattaatcatggtgatggttattcccctggctggcgtcgtgactacaacacga

SEQ ID NO: 643347 - DNA, 75 bp, synthetic construct
  source 1..75: mol_type = other DNA
tacctgagcggaaaagcccggaaagacagctggtacaggaataacagtatccagcggggtcgaagcacagcagtc

SEQ ID NO: 643348 - DNA, 75 bp, synthetic construct
  source 1..75: mol_type = other DNA
tggcaatgaatattttaaatggcgcatcaggtctggcagcacaacaaaagatctgatgacgcttaagtctgatgc

SEQ ID NO: 643349 - DNA, 75 bp, synthetic construct
  source 1..75: mol_type = other DNA
taacgggaaatataccgcacaggacgccaccacagcgcgaaaaggccttgttcagctcagtagcgccaccaacag

SEQ ID NO: 643350 - DNA, 75 bp, synthetic construct
  source 1..75: mol_type = other DNA
gcggcaattaatatggttcgaatgtggggaggtgatcgtttctgcactgtgaagaatctaggggagaatgccggg

SEQ ID NO: 643351 - DNA, 75 bp, synthetic construct
  source 1..75: mol_type = other DNA
tgtaaaaacaacagctggcaatacagcagtatcgtctggaacatataatgctgtagtgtcaatcaccacgcagat

SEQ ID NO: 643352 - DNA, 75 bp, synthetic construct
  source 1..75: mol_type = other DNA
aattgctaacaccccggcaagaattgataattgcatatctgcaggcgttgatataatgattactgattgctatag

SEQ ID NO: 643353 - DNA, 75 bp, synthetic construct
  source 1..75: mol_type = other DNA
gtggagaacgaagacggctctcacgttcctgtatcgcaaccaatcatcattaacgctgctggttacccggtatat

SEQ ID NO: 643354 - DNA, 75 bp, synthetic construct
  source 1..75: mol_type = other DNA
atggaaatgtgtaacggccgaagtgcctataaacatgggtattcttatccggaaagtacaaaaaactttatcaaa

SEQ ID NO: 643355 - DNA, 75 bp, synthetic construct
  source 1..75: mol_type = other DNA
cagtgattgataaaaaagagtatgaaacctggataacgctggcgggagacgtctggaaattgatgctcacacctt

SEQ ID NO: 643356 - DNA, 75 bp, synthetic construct
  source 1..75: mol_type = other DNA
ttggcacaacaattggatttttgtccttaagtgctattgccgctacaggtccttcaattaactcaaaaacattaa

SEQ ID NO: 643357 - DNA, 75 bp, synthetic construct
  source 1..75: mol_type = other DNA
agataatgaaagggatgatctggaatctctgatacaaaaaatagataaggaatgcattccatctcacaatgaaag

SEQ ID NO: 643358 - DNA, 75 bp, synthetic construct
  source 1..75: mol_type = other DNA
gcaactggattttatcgacctgacggctttcggtacggcgcttgtcggttttttgccgcagacctcgccggaagc

SEQ ID NO: 643359 - DNA, 75 bp, synthetic construct
  source 1..75: mol_type = other DNA
cagatcgataactatatggttgatggtattttgaatcgcgctggaatctgggcgacgcactttctgatatggcac

SEQ ID NO: 643360 - DNA, 75 bp, synthetic construct
  source 1..75: mol_type = other DNA
ctctgagcaagggtgaagatactaccgaaacgggtaaggcgcttgaagagtacattggtcgaaagccggataaac

SEQ ID NO: 643361 - DNA, 75 bp, synthetic construct
  source 1..75: mol_type = other DNA
cctgttgaactagctgagaaaactaatacgcccatataccagtctggatcactggcactgagtaagctggctaag

SEQ ID NO: 643362 - DNA, 75 bp, synthetic construct
  source 1..75: mol_type = other DNA
acgcagaaaacttgaagagtgtatcagccgccaaccgcagaaacccgtaaggaaatccattattttaacaaaccc

SEQ ID NO: 643363 - DNA, 75 bp, synthetic construct
  source 1..75: mol_type = other DNA
cgccagcttgatgaacgtgaacgcaggctgaaggcaaaagccaggagtaactacagcgatcaggggggatacgac

SEQ ID NO: 643364 - DNA, 75 bp, synthetic construct
  source 1..75: mol_type = other DNA
gagagaaatggttaagcaggtaaaagcgttctcagatcatatcaatgatgctgacctggaccatttcgcagatgt

SEQ ID NO: 643365 - DNA, 75 bp, synthetic construct
  source 1..75: mol_type = other DNA
atgtatcagttttctgaaaatgtaccgaaatacattaacgcttaccgtttcattgtctggaatgaattacacggc

SEQ ID NO: 643366 - DNA, 75 bp, synthetic construct
  source 1..75: mol_type = other DNA
ggtcaccggtcctgtatcaaacgccggttcttcctacttttctaaagatattaatggatctgttgcaatcagcct

SEQ ID NO: 643367 - DNA, 75 bp, synthetic construct
  source 1..75: mol_type = other DNA
ggttggttgaaaacgaacattccttttttgctggtttgcatgttcacaacaatacttgtctcctggtttcaaagt

SEQ ID NO: 643368 - DNA, 75 bp, synthetic construct
  source 1..75: mol_type = other DNA
tcgcaaagagggtgaaggcgatttaagtcttgaatactggaagcaagaacatcagcgatttttcacccgtgaagg

SEQ ID NO: 643369 - DNA, 75 bp, synthetic construct
  source 1..75: mol_type = other DNA
tcaggattacagcgcaattaaagacgtcttccgtccaggccatgctgattacacctacgaacaaaaatacggtct

SEQ ID NO: 643370 - DNA, 75 bp, synthetic construct
  source 1..75: mol_type = other DNA
gatcgccttatgtcacgcaccattgaggcagtggcccacgtcaacgatcagcttcttctgtggcgtcaggttcag

SEQ ID NO: 643371 - DNA, 75 bp, synthetic construct
  source 1..75: mol_type = other DNA
ccgtcaaatccagaatattacctcgaaagatctcgacgttcgcctcgacccgcagaccgtgccgattgagctgga

SEQ ID NO: 643372 - DNA, 75 bp, synthetic construct
  source 1..75: mol_type = other DNA
taaagcagcacagcgtagcattacagcgccagacaggataggagaaagaaaacataggtttatcaacgagataca

SEQ ID NO: 643373 - DNA, 75 bp, synthetic construct
  source 1..75: mol_type = other DNA
aatatatacttcgaaaatttacgtaacgatattaataacattacagaggcaattaactcattacccgacgctatt

SEQ ID NO: 643374 - DNA, 75 bp, synthetic construct
  source 1..75: mol_type = other DNA
acataattttatcaatcatctgcatgaacttttacgctcgcgcttatcaacggctttgccgctgattttcgcagt

SEQ ID NO: 643375 - DNA, 75 bp, synthetic construct
  source 1..75: mol_type = other DNA
gctgctctaaaatcttcaagtgttagtccacaaggtagtgttgctgtcgaagcgccaatcactttctcctttgtc

SEQ ID NO: 643376 - DNA, 75 bp, synthetic construct
  source 1..75: mol_type = other DNA
tgcatgggataacatgcagtctattgacaagttcgttaatagcagcgaagagaccattaccacacgcacaggcga

SEQ ID NO: 643377 - DNA, 75 bp, synthetic construct
  source 1..75: mol_type = other DNA
tgatgcagctaatgctgcttctcatgcaacagcgtattattgtgagaacaacttatttccatcaactcaggggct

SEQ ID NO: 643378 - DNA, 75 bp, synthetic construct
  source 1..75: mol_type = other DNA
aataaatgccgcaatgaagattgcagaagttctaggtttttggtcttggattgatgatgaatctaaaagactgca

SEQ ID NO: 643379 - DNA, 75 bp, synthetic construct
  source 1..75: mol_type = other DNA
caagaatccgaactctatgcgctgggccgggagggttctataccgcagtttattggcggtgaaaaagtgtggcgg

SEQ ID NO: 643380 - DNA, 75 bp, synthetic construct
  source 1..75: mol_type = other DNA
gcatttaaaggccagtacgcgcgaatagcgtcgacgcgactgcacgggaaagagcaattcaggtgcgtgaatact

SEQ ID NO: 643381 - DNA, 75 bp, synthetic construct
  source 1..75: mol_type = other DNA
tgtatgaggcgcggctacatcagtatcagcgtcaagttatcagcgatatcacggcaaggacaggccagagcgaac

SEQ ID NO: 643382 - DNA, 75 bp, synthetic construct
  source 1..75: mol_type = other DNA
gtaggaactataattattcctcctggtgagtttgttgcaaacccgtcaataaaagatgtttctggattatttaag

SEQ ID NO: 643383 - DNA, 75 bp, synthetic construct
  source 1..75: mol_type = other DNA
ggcgaaggcgtatgaaggctatagaaatgaagcatctaagttggatgatgaggattttataactcgtttatttga

SEQ ID NO: 643384 - DNA, 75 bp, synthetic construct
  source 1..75: mol_type = other DNA
gtattcagcatccgatggtgagaaaaagctatctcgataatccactgcaaccgcgaaaggtcgtggcgaagatac

SEQ ID NO: 643385 - DNA, 75 bp, synthetic construct
  source 1..75: mol_type = other DNA
gttgtatgtaattttatagcttcatcatctaatagaaagcgcggtatttacgcggaaggagctcatatcagagga

SEQ ID NO: 643386 - DNA, 75 bp, synthetic construct
  source 1..75: mol_type = other DNA
taacaattgatgaaccagatccatcaaataaagtatttgacatgtctggtaatttagcaattggtcctgatattg

SEQ ID NO: 643387 - DNA, 75 bp, synthetic construct
  source 1..75: mol_type = other DNA
tggctattcatattttacagaaaagaccattgttagttgtataggcgcccataatttgacaattaagggtgtcaa

SEQ ID NO: 643388 - DNA, 75 bp, synthetic construct
  source 1..75: mol_type = other DNA
caacgttgctcttgatttcatggaaaagcatccgggtatgtcctgggagcaggctttggttgccgctatgggtta

SEQ ID NO: 643389 - DNA, 75 bp, synthetic construct
  source 1..75: mol_type = other DNA
aacctggagggggtagagcgagcaatagaaacaagttctcatggcatcggtggagtcagttttattcttatgaaa

SEQ ID NO: 643390 - DNA, 75 bp, synthetic construct
  source 1..75: mol_type = other DNA
aaacgatatattcccttttacagaccagaggatgataggctatggtctgaaactcagagttgaggagtcatttga

SEQ ID NO: 643391 - DNA, 75 bp, synthetic construct
  source 1..75: mol_type = other DNA
gagtggcgtgaggtggattttgataatgcggtgtgggagattcccaaagaacgtatgaaaatgcgacgtgctcat

SEQ ID NO: 643392 - DNA, 75 bp, synthetic construct
  source 1..75: mol_type = other DNA
ccacgggtagccctgtttccaaatcaccattacgcagacaaatggaaacacagttcccggaactggccagcggta

SEQ ID NO: 643393 - DNA, 75 bp, synthetic construct
  source 1..75: mol_type = other DNA
cagtaccactccccgtcccgatggctggtagcgaggcgggatgttttgcctacccgccggctggcaccatcgtgg

SEQ ID NO: 643394 - DNA, 75 bp, synthetic construct
  source 1..75: mol_type = other DNA
atgggatatcaacggaactgaaagagcgaatcttgaatatgggagagaaaactgttccggtgaattactatacaa

SEQ ID NO: 643395 - DNA, 75 bp, synthetic construct
  source 1..75: mol_type = other DNA
gaaaacttgaaagacaaaaatttcttttcccactggactatgagaataaattacaacatcaattagacaagtatt

SEQ ID NO: 643396 - DNA, 75 bp, synthetic construct
  source 1..75: mol_type = other DNA
tgatcaagcatcatcatttccaggcacacaactgaatcaaagtgataatttcctcgattcactgagggaattttt

SEQ ID NO: 643397 - DNA, 75 bp, synthetic construct
  source 1..75: mol_type = other DNA
tctgaaattaatccaaaattaatgattggttcaatgagaattgcagaatataaatttatggcagaggaaatatca

SEQ ID NO: 643398 - DNA, 75 bp, synthetic construct
  source 1..75: mol_type = other DNA
tttctgccggacaactgccatcatccggtgatgaagttgtcgccgggacaacatcactgaaattacagtgtgatg

SEQ ID NO: 643399 - DNA, 75 bp, synthetic construct
  source 1..75: mol_type = other DNA
agcaggcgatatacaatgagtgaggatatcgacaaagagtccgttataaataccattgcattgatgagcaccttt

SEQ ID NO: 643400 - DNA, 75 bp, synthetic construct
  source 1..75: mol_type = other DNA
atactcattctttaaaatttattaactgcaattttttcaatgttgatatgataagagttaatttcagtaaatgtc

SEQ ID NO: 643401 - DNA, 75 bp, synthetic construct
  source 1..75: mol_type = other DNA
gccacacatacagcaaaccacacccatagcaacactggcacaccaatgaacagcagcgaacttgccgcagatgcc

SEQ ID NO: 643402 - DNA, 75 bp, synthetic construct
  source 1..75: mol_type = other DNA
tcaacatcaaggcaacaaaagaaggttcatttactttgcttgttgctgtgatggggagcataaaaactattaacg

SEQ ID NO: 643403 - DNA, 75 bp, synthetic construct
  source 1..75: mol_type = other DNA
ttgagattgcatatgctggggatgcatatgcgaataatgagatcgatgctaaaatgcttggtgatgctctgtctt

SEQ ID NO: 643404 - DNA, 75 bp, synthetic construct
  source 1..75: mol_type = other DNA
ctggtgaatggcgaaggggtgagcgccgaatctcacccgctgtttaacgtctatcaaattgtcctgcaggcacag

SEQ ID NO: 643405 - DNA, 75 bp, synthetic construct
  source 1..75: mol_type = other DNA
gagggaggattaaaagtcggtaatggtgttacagttttaaatcaacagccagatgcttacggtagagtacaggct

SEQ ID NO: 643406 - DNA, 75 bp, synthetic construct
  source 1..75: mol_type = other DNA
agctgaatttttttagccgtgcaaataaaatataccgtgtagcatggagtatattttatattattttttttaaat

SEQ ID NO: 643407 - DNA, 75 bp, synthetic construct
  source 1..75: mol_type = other DNA
tgctgttgcaagagagccaaattgtgatggtcggcgctgatctccgacacagggttgtagcaagccccgcaaagc

SEQ ID NO: 643408 - DNA, 75 bp, synthetic construct
  source 1..75: mol_type = other DNA
caactagaggttacagaaacacagtttatagagtttgcagatgcgattgcagctttctggaatgatatcctaaca

SEQ ID NO: 643409 - DNA, 75 bp, synthetic construct
  source 1..75: mol_type = other DNA
cctgcggtaccttattttcaatctatattccgaaagtgaaacctaatgacagctccattaaccctattgatcgtt

SEQ ID NO: 643410 - DNA, 75 bp, synthetic construct
  source 1..75: mol_type = other DNA
cagagaagcggcgaaaggaaaagcgcgtgcagcagccggacaacaccgcgccggacggggccaccgtatcggcgg

SEQ ID NO: 643411 - DNA, 75 bp, synthetic construct
  source 1..75: mol_type = other DNA
tgtttgttattgttttcctgatcagtgcatttctggcagcggcttttattatctgggaaaatccttttcgacata

SEQ ID NO: 643412 - DNA, 75 bp, synthetic construct
  source 1..75: mol_type = other DNA
tccgatctgccgttccatactgctaacggtacgctggactggaaaccgctggcgctggaagactggtcattctat

SEQ ID NO: 643413 - DNA, 75 bp, synthetic construct
  source 1..75: mol_type = other DNA
acggcatttaaagcaccttctctgttgcaacttagccctgactggacgagcaattcctgccgtggcgcatgtaag

SEQ ID NO: 643414 - DNA, 75 bp, synthetic construct
  source 1..75: mol_type = other DNA
gcaggcatcggttttgatgccacctgttctctggtggtactggataaaaacggtgatccattgcctgtcagcccg

SEQ ID NO: 643415 - DNA, 75 bp, synthetic construct
  source 1..75: mol_type = other DNA
gtgtcgatgtgggttcaggcagcgtccgggctggggtttttgatctccagggctcgttacttgctcacgcggcac

SEQ ID NO: 643416 - DNA, 75 bp, synthetic construct
  source 1..75: mol_type = other DNA
tcaatcagttggcgttttttcaaattattatttcttttgttgtctgttttttataatattacatggtaaacaaaa

SEQ ID NO: 643417 - DNA, 75 bp, synthetic construct
  source 1..75: mol_type = other DNA
attgtcgggatctgcacagccattttcgttgccagcgtattgtggttaagttcgttagccgccagtcgtattaac

SEQ ID NO: 643418 - DNA, 75 bp, synthetic construct
  source 1..75: mol_type = other DNA
gtcgatgatgggcctgttatggtggtaagctcccagcgcttacatgatatgttgaatcctacaaaagataccaat

SEQ ID NO: 643419 - DNA, 75 bp, synthetic construct
  source 1..75: mol_type = other DNA
aacgctatcaatctcttcatcatcgtcgatatgaggcctataagcagttgcagcatactgcaaatgtcaacgacg

SEQ ID NO: 643420 - DNA, 75 bp, synthetic construct
  source 1..75: mol_type = other DNA
gcgttattttggctgttttccgccaccagcgcggtttatccccgctggcgcggggaacacggggcgatcaattga

SEQ ID NO: 643421 - DNA, 75 bp, synthetic construct
  source 1..75: mol_type = other DNA
atgcctggcagtttatggcgggcgtcctgcccgccaccctccgggccgttgcttcgcaacgttcaaatccgctcc

SEQ ID NO: 643422 - DNA, 75 bp, synthetic construct
  source 1..75: mol_type = other DNA
atgccacatcaccccgtatccgcctgtttgggtggacgctctggttgctggtgttattcacgctcctctttcttt

SEQ ID NO: 643423 - DNA, 75 bp, synthetic construct
  source 1..75: mol_type = other DNA
aaaaaaacatatttgcagctattgaaaaaaaattcccggatataaaacttgatgaaaaatcagcacaaacatcta

SEQ ID NO: 643424 - DNA, 75 bp, synthetic construct
  source 1..75: mol_type = other DNA
gccgtactacagcgaagaagagctgatgggggaaacggtggtggtcttatgcaatctgcaaaaagcgaaaatgcg

SEQ ID NO: 643425 - DNA, 75 bp, synthetic construct
  source 1..75: mol_type = other DNA
cagacttttgacaaatctgcctacccgaaacttgcagccgcttatccgtcaggcgtgatccctgatatgcgtggc

SEQ ID NO: 643426 - DNA, 75 bp, synthetic construct
  source 1..75: mol_type = other DNA
taactgaagatggtcgccaggttgaggaagtgcatgtcctgggagatatgtatcgtctggagttctatccgcgtg

SEQ ID NO: 643427 - DNA, 75 bp, synthetic construct
  source 1..75: mol_type = other DNA
agatatgtacggttcagtaaatatcgatgatgcggtattcttctttggcaaagaaaacgactggaggtcaaagta

SEQ ID NO: 643428 - DNA, 75 bp, synthetic construct
  source 1..75: mol_type = other DNA
ttattaactggctctacaaccagtctggcgtactgagcgaacgggctgaattcatgaagtgtgctgaaatgctgt

SEQ ID NO: 643429 - DNA, 75 bp, synthetic construct
  source 1..75: mol_type = other DNA
tcatgctcattgataaaattctggcttacaatccttcagataatccgggagcacgccggttactgggaccggaac

SEQ ID NO: 643430 - DNA, 75 bp, synthetic construct
  source 1..75: mol_type = other DNA
gggggccgctactgatgggggctacgtttgtatcagcatttgctgctctgtttttagtagtgctgatttcaaata

SEQ ID NO: 643431 - DNA, 75 bp, synthetic construct
  source 1..75: mol_type = other DNA
cggatattaccgagctggtaacggcggtaaaaactcaggttgcaatccagctggcacttgatgcttccgacatac

SEQ ID NO: 643432 - DNA, 75 bp, synthetic construct
  source 1..75: mol_type = other DNA
gccattccggcaggctcatcaacctcggatattaccgagctggtaacggcggtaaaaactcaggttgcaatccag

SEQ ID NO: 643433 - DNA, 75 bp, synthetic construct
  source 1..75: mol_type = other DNA
tggtattcatgctctccatatttatataaatcatttactaatgtttcaaatggtattgctgatataaaaacattg

SEQ ID NO: 643434 - DNA, 75 bp, synthetic construct
  source 1..75: mol_type = other DNA
accagaagataattttcgggtaaccacgccgatagatggaaagtttaatgcggtactggaatatattgttatgga

SEQ ID NO: 643435 - DNA, 75 bp, synthetic construct
  source 1..75: mol_type = other DNA
atatgacagacattgagcaggaaaaagtcgcgcaatttttgtcacgtgaaggaattcgcaatttcctcgcccgtc

SEQ ID NO: 643436 - DNA, 75 bp, synthetic construct
  source 1..75: mol_type = other DNA
atgaattataaaaccattttatttgccactcttttgataacgggttgtaacaataatatttcgacacatacacct

SEQ ID NO: 643437 - DNA, 75 bp, synthetic construct
  source 1..75: mol_type = other DNA
agcgcggtggaacagttgttatgataacgcatgatacaaatataatcacaacagatatgaaagtaataacgcttt

SEQ ID NO: 643438 - DNA, 75 bp, synthetic construct
  source 1..75: mol_type = other DNA
acaacgtgttgcacttgcaagagccttactaagaaaacctaaaatactgcttgcagatgaaccgaccgcaagttt

SEQ ID NO: 643439 - DNA, 75 bp, synthetic construct
  source 1..75: mol_type = other DNA
gatccgttgcaggggcggtatatcactcaggacccgatagggctggagggggggatggagtctgtatgcgtaccc

SEQ ID NO: 643440 - DNA, 75 bp, synthetic construct
  source 1..75: mol_type = other DNA
tggaacatttccggctccggagccggggtggaaaactatactctcggcccgggcgccgtctcgctggcctggatc

SEQ ID NO: 643441 - DNA, 75 bp, synthetic construct
  source 1..75: mol_type = other DNA
taaagtggcacttcctgccgcggtagaagagttacgtaaagccatttttgagctggttaggaacaaagttattca

SEQ ID NO: 643442 - DNA, 75 bp, synthetic construct
  source 1..75: mol_type = other DNA
tgatatggctgcgtgcgcagatgaagctgacgagcctgtgctgggcgctgaaagaactggcaaaggatatctgga

SEQ ID NO: 643443 - DNA, 75 bp, synthetic construct
  source 1..75: mol_type = other DNA
ctgatgattttgtcgcagtggcgatcgctggtttcaatcagatgaatcgtggtggtccggcgggaaatgccgtgg

SEQ ID NO: 643444 - DNA, 75 bp, synthetic construct
  source 1..75: mol_type = other DNA
atgctgtcgctggtcgcccgcggacagtaccagtttaccgactacgtgcgcctgattggcgaagttggcggtttc

SEQ ID NO: 643445 - DNA, 75 bp, synthetic construct
  source 1..75: mol_type = other DNA
tgccgcagccaactcgctgtttagccatcgcttacacgaccgtctgggtgagccgcagtatacagattcactgca

SEQ ID NO: 643446 - DNA, 75 bp, synthetic construct
  source 1..75: mol_type = other DNA
aacaaccttagcctgtgggggaatgtcggtgtgcaactaggttatagcgatactcagggcatgctgggagtgaaa

SEQ ID NO: 643447 - DNA, 75 bp, synthetic construct
  source 1..75: mol_type = other DNA
aggccggaagctatatcagcaacattgccgcagccaactcgctgtttagccatcgtttacacgaccgtctgggtg

SEQ ID NO: 643448 - DNA, 75 bp, synthetic construct
  source 1..75: mol_type = other DNA
ggcagaggaaatattgccaatgacggtctgttaacgctaaaaaacgtgactggcgaactgcgtaatagcataagc

SEQ ID NO: 643449 - DNA, 75 bp, synthetic construct
  source 1..75: mol_type = other DNA
gtctgacagtgaaaataccacatcggtaaaagtgggagagcaatccattggtggactggccatgaatggcggtac

SEQ ID NO: 643450 - DNA, 75 bp, synthetic construct
  source 1..75: mol_type = other DNA
gttccgactctgccattaatatggcaagtcaacaaaatgaacgtgaaaggcgatacccaagggaacactcgcgtt

SEQ ID NO: 643451 - DNA, 75 bp, synthetic construct
  source 1..75: mol_type = other DNA
ctggcggccaacagtgacgtccccatgatgaagaatgtggctaaaacgatagggaaaaggttgtacggtatcctg

SEQ ID NO: 643452 - DNA, 75 bp, synthetic construct
  source 1..75: mol_type = other DNA
gatgttatacgaagcaaatctgccgaaggtggattgattgctaatgagataacgtcaaaaggttttgcttttttg

SEQ ID NO: 643453 - DNA, 75 bp, synthetic construct
  source 1..75: mol_type = other DNA
ctgtttataaaggtgaaaaggagaactatcttgatgagtgttttaaaagcctgcatgaacagacaattaaagcta

SEQ ID NO: 643454 - DNA, 75 bp, synthetic construct
  source 1..75: mol_type = other DNA
ggagtatgtcgtgaatgacctcttttccgggcgtaaggagtcgattgacgttctcaccagacgactacatcgcaa

SEQ ID NO: 643455 - DNA, 75 bp, synthetic construct
  source 1..75: mol_type = other DNA
accgagcgcgttgatagcatttgtaggccggataaggcgttcacgccgcatccggcactctttcagcaacatggt

SEQ ID NO: 643456 - DNA, 75 bp, synthetic construct
  source 1..75: mol_type = other DNA
taaattccctgaaggaagcacgtgataaaaataataaaataatttattcctcagggcttagttgttttcaatctc

SEQ ID NO: 643457 - DNA, 75 bp, synthetic construct
  source 1..75: mol_type = other DNA
taaaaattgtaagtggtatcaaaggaataaagattctaatttttagagtattgcccagattaatgcctcaatcgt

SEQ ID NO: 643458 - DNA, 75 bp, synthetic construct
  source 1..75: mol_type = other DNA
catttatttatggaagattataacttgtggctacgctgtcttgctaaaaattataaaatgataaatttaacagaa

SEQ ID NO: 643459 - DNA, 75 bp, synthetic construct
  source 1..75: mol_type = other DNA
ctttatacattaaagaaaaaccagaatattttgaagagtgtcttataagtctcaaagatcaaactttgatgccaa

SEQ ID NO: 643460 - DNA, 75 bp, synthetic construct
  source 1..75: mol_type = other DNA
gatattcagtctgtcggtggatataaaaaacatctattaatggaagattataatctttggttgcgtcttttaaat

SEQ ID NO: 643461 - DNA, 75 bp, synthetic construct
  source 1..75: mol_type = other DNA
gatggctatataccggctgaattagataatgtcgtaatagagtggagtaaagttttaccagtaaaagtttgtaag

SEQ ID NO: 643462 - DNA, 75 bp, synthetic construct
  source 1..75: mol_type = other DNA
aaaaaattgtaccgacaacgcacaatgagataatgaaaaatataggaaaacgaaatccatttaaccacatgacag

SEQ ID NO: 643463 - DNA, 75 bp, synthetic construct
  source 1..75: mol_type = other DNA
caacttgaaagaaagcttaacaaaacttttaataagctggaggaaagagtaagaaacacaaaagcatttcagttt

SEQ ID NO: 643464 - DNA, 75 bp, synthetic construct
  source 1..75: mol_type = other DNA
gattaattcaagaggtggctggaaagctattcaggactctacgcagacaatgttagggaacttaaagaatacttg

SEQ ID NO: 643465 - DNA, 75 bp, synthetic construct
  source 1..75: mol_type = other DNA
gtgtacgagaggcaatcactaaagccagaggtcatacatccaccagcattaatggtgacagagcagctagcagtc

SEQ ID NO: 643466 - DNA, 75 bp, synthetic construct
  source 1..75: mol_type = other DNA
gccacttagacagccaagacagccacgaattagcggaaacagagcaatcacagcggcttattcagctaatatgtc

SEQ ID NO: 643467 - DNA, 75 bp, synthetic construct
  source 1..75: mol_type = other DNA
ccacgcttgatagtattttcagaggttctgaaagtggtctgcaagattttaccagaagcttgaccaatcttttaa

SEQ ID NO: 643468 - DNA, 75 bp, synthetic construct
  source 1..75: mol_type = other DNA
cagcagaaaccaagaagcctatccctgtgaatatcactggtgaagcaactattaaacctgatgaatcagcattct

SEQ ID NO: 643469 - DNA, 75 bp, synthetic construct
  source 1..75: mol_type = other DNA
tctggctctcaggacatcacgcaaggaagtctggcaacgaacacaaccataaatggtggtcgacagtatgttgaa

SEQ ID NO: 643470 - DNA, 75 bp, synthetic construct
  source 1..75: mol_type = other DNA
aaaacgtcagctttggtgacggggagaaccgttacaatattgtcgatcgtaatgagcatggctctcaggattttc

SEQ ID NO: 643471 - DNA, 75 bp, synthetic construct
  source 1..75: mol_type = other DNA
gtacggtttttgtatgttcacccgctggaatggtatctgcgagtagagtcaccgcgcgatgttattgagctgccc

SEQ ID NO: 643472 - DNA, 75 bp, synthetic construct
  source 1..75: mol_type = other DNA
aaacgtccggttaaagtgatgctcccccgcccctctattcccaataacaccacgcaccgccccgccacccttcag

SEQ ID NO: 643473 - DNA, 75 bp, synthetic construct
  source 1..75: mol_type = other DNA
cgaaaggtcaaggacaacaccgaaacgtatgattactggacggtgcgcatgacctaccgctatttcccgcagaag

SEQ ID NO: 643474 - DNA, 75 bp, synthetic construct
  source 1..75: mol_type = other DNA
cagatgaaaccagctttatgacctttagcggtaatatctacgaccaatgcgcagaagctatgctattaagttcat

SEQ ID NO: 643475 - DNA, 75 bp, synthetic construct
  source 1..75: mol_type = other DNA
gttcaaaaaattatactaaaaatcaataccctaatattaatgactatattttattctatagtaaatcaaaaaaaa

SEQ ID NO: 643476 - DNA, 75 bp, synthetic construct
  source 1..75: mol_type = other DNA
gcttacaaacgatggcagtatctatatacatattgggcaccaaatgcttttccatttaaaaattattatggatga

SEQ ID NO: 643477 - DNA, 75 bp, synthetic construct
  source 1..75: mol_type = other DNA
ttctaaaattaagttaatttatcttgatcctccatatggtactggcatggattttcaatcacgggatctcaaaca

SEQ ID NO: 643478 - DNA, 75 bp, synthetic construct
  source 1..75: mol_type = other DNA
gcagcgaggtctgcttccgctgcgaggacatccgagacgaacgcgaaagcgtcggaaaccagcgcagaatcctca

SEQ ID NO: 643479 - DNA, 75 bp, synthetic construct
  source 1..75: mol_type = other DNA
tgatcacttatttacagaatgaaaccaacctgacgcgccgcactatagttgccattatcaacaaaagtggccgcc

SEQ ID NO: 643480 - DNA, 75 bp, synthetic construct
  source 1..75: mol_type = other DNA
ttgcagagcaattgcagaaggaaattgaaaacgaagaaggtatcaagtttggtgtggttgaaaagcacctgtttg

SEQ ID NO: 643481 - DNA, 75 bp, synthetic construct
  source 1..75: mol_type = other DNA
tggcgctgacaggctttaacggcctgtcctcaaaagttcagaacgtcctgaaggatgacccgttctccgggcata

SEQ ID NO: 643482 - DNA, 75 bp, synthetic construct
  source 1..75: mol_type = other DNA
ccctaagtttgctaaagaacttggtgcacagattaattcaagaggtggctggaaagctattcaggactctacgca

SEQ ID NO: 643483 - DNA, 75 bp, synthetic construct
  source 1..75: mol_type = other DNA
gttaaagcctctgatgcactccctaagtttgctaaagaacttggttcacagattaattcaagaggtggctggaaa

SEQ ID NO: 643484 - DNA, 75 bp, synthetic construct
  source 1..75: mol_type = other DNA
aacgcccaagaattttgatataaaacttaccgattgtgatgttactaactataaagctggtaaaaagcgggaaca

SEQ ID NO: 643485 - DNA, 75 bp, synthetic construct
  source 1..75: mol_type = other DNA
gatatgcattttaaaatataacaaaaatcaccatgaaataagaataattatccacggagaacataaactgcagac

SEQ ID NO: 643486 - DNA, 75 bp, synthetic construct
  source 1..75: mol_type = other DNA
gtgtgacggaaagccctgcgttaaggtggacacccgcaccacgtatggggataaagagaatacctggatgattat

SEQ ID NO: 643487 - DNA, 75 bp, synthetic construct
  source 1..75: mol_type = other DNA
acccaagaaaaaaaactggcatatgttaagtattttttacgggctgtatatgatggccttagaaataaaactggg

SEQ ID NO: 643488 - DNA, 75 bp, synthetic construct
  source 1..75: mol_type = other DNA
cacgctgattatgttcttaggtacagtgggaattctcggttcagcgctggtagcagtgtttcgtattagcggaat

SEQ ID NO: 643489 - DNA, 75 bp, synthetic construct
  source 1..75: mol_type = other DNA
atgatgttcatcacaaaaaaaaataaaaaagtttgcgcaaccgttctgattttgattcaaatgttcgtggatgcc

SEQ ID NO: 643490 - DNA, 75 bp, synthetic construct
  source 1..75: mol_type = other DNA
gaaagtttgataaattattccctgacagtcattttattattgtcaagtgttttgatggaatcctgggggcattgg

SEQ ID NO: 643491 - DNA, 75 bp, synthetic construct
  source 1..75: mol_type = other DNA
tggagttcgcgaaaaagcaaaatttaagccttgcatatggtgattgcgggtatgtttattcatccactgaaatgg

SEQ ID NO: 643492 - DNA, 75 bp, synthetic construct
  source 1..75: mol_type = other DNA
atgatttactattattatccattcgatgacgatgagagttttttggaattattaaatgaaaaaattttcattaga

SEQ ID NO: 643493 - DNA, 75 bp, synthetic construct
  source 1..75: mol_type = other DNA
ttaaaattaacaaaggaaatatcagatatacggattttctcttgtgatagcggcataaaacactcaatacatatt

SEQ ID NO: 643494 - DNA, 75 bp, synthetic construct
  source 1..75: mol_type = other DNA
taccacgcagctgactaccgtcctgactaagttgtcagcgatggaaaacggcaatacgcgccgccctggcagtgc

SEQ ID NO: 643495 - DNA, 75 bp, synthetic construct
  source 1..75: mol_type = other DNA
aaaacttaacgacctgaccacgaagctgtcagcaaccggcatcacgccacgcccggctggcacaccggcagaaag

SEQ ID NO: 643496 - DNA, 75 bp, synthetic construct
  source 1..75: mol_type = other DNA
aagaagaaatcaaagccattgccgaaaaacttaacgacctgaccacgaagctgtcagcaaccggcatcacgccac

SEQ ID NO: 643497 - DNA, 75 bp, synthetic construct
  source 1..75: mol_type = other DNA
cagtgaacgccatcgcggagaaggttaccagtatggaaaccgcatttgctgaactcagcaaggacgccacgaagc

SEQ ID NO: 643498 - DNA, 75 bp, synthetic construct
  source 1..75: mol_type = other DNA
agtctggaaacattcagtttaggaaaattacagacaagtaaaccggataaaaaaaattctttctggtcgcgttta

SEQ ID NO: 643499 - DNA, 75 bp, synthetic construct
  source 1..75: mol_type = other DNA
ggacgcgctgaaagtggaaacggaaggtgatgtcacgaagttatatgcccagttaatcccaaatcaatttttaat

SEQ ID NO: 643500 - DNA, 75 bp, synthetic construct
  source 1..75: mol_type = other DNA
gatacctacgctgggataaaagattatcctgtatgtttctatgaccccaaatacaaaataatggcaaatcatcat

SEQ ID NO: 643501 - DNA, 75 bp, synthetic construct
  source 1..75: mol_type = other DNA
gttctagtaacgatttgatctctgcaccacggctgccgcccaaactaatcatatactactgtggagaaaaccagt

SEQ ID NO: 643502 - DNA, 75 bp, synthetic construct
  source 1..75: mol_type = other DNA
aactcaagaatgaaattttgcggaacatgaagtatatcggcccgcaaatatttagctggggtgatgaccaccggc

SEQ ID NO: 643503 - DNA, 75 bp, synthetic construct
  source 1..75: mol_type = other DNA
cattcgcccccgccattcccccatcttccgttaacccaggcgtacgacgcccgccagggcggctcttcctgtcgg

SEQ ID NO: 643504 - DNA, 75 bp, synthetic construct
  source 1..75: mol_type = other DNA
ataaaggaatcgatcgccagctaccgcaacgttgcccttttgctcctcaatccccggggtgaggtgctgtacagc

SEQ ID NO: 643505 - DNA, 75 bp, synthetic construct
  source 1..75: mol_type = other DNA
gaacatgaacccgaacctgcatcaaatgtgaagcgtgatttatctgaagtcgagttcgagtcaacaatgaagcgt

SEQ ID NO: 643506 - DNA, 75 bp, synthetic construct
  source 1..75: mol_type = other DNA
gaaaacctgccagcaagccggattgaaaaccgggcagaagcattgcgcagaatgaaggaatgtctcattacaaga

SEQ ID NO: 643507 - DNA, 75 bp, synthetic construct
  source 1..75: mol_type = other DNA
tcactaaagaactgtttgggtatattgcaaatggtataggtgatgatatatcaagtattgccaggacaatgctcg

SEQ ID NO: 643508 - DNA, 75 bp, synthetic construct
  source 1..75: mol_type = other DNA
acaatgctcggtgaagttgtggaaaaaattgatgattggcaaatagaacgtttccaacaatcttttcaagatgac

SEQ ID NO: 643509 - DNA, 75 bp, synthetic construct
  source 1..75: mol_type = other DNA
tgatgatatatcaagtattgccaggacaatgctcggtgaggttgtggaaaaaatagatgattggcaaatagaacg

SEQ ID NO: 643510 - DNA, 75 bp, synthetic construct
  source 1..75: mol_type = other DNA
aatgaaaatgttcatgtattagctggaaatcatgaaacgaattgcaatggtaactatatgcagaacttcacgcgt

SEQ ID NO: 643511 - DNA, 75 bp, synthetic construct
  source 1..75: mol_type = other DNA
gcgcagtgacgccatgtacgtttctgggtgaccaaaccggcgatcgatttagtaatatctgtggcgatcaattta

SEQ ID NO: 643512 - DNA, 75 bp, synthetic construct
  source 1..75: mol_type = other DNA
gataacagtctctattgatgaaatgaccaatgctctcgatccggtcgaattagcggcaattatcaataaaaagca

SEQ ID NO: 643513 - DNA, 75 bp, synthetic construct
  source 1..75: mol_type = other DNA
tgggaagcactggatttactcagacggtggcctggtagctgttaataacggaaatggcggtggtggtggcgacga

SEQ ID NO: 643514 - DNA, 75 bp, synthetic construct
  source 1..75: mol_type = other DNA
tagtcagtctttcattggcaatatcagattttttagcattcgttgcatctctttatattgcaattggcttgcttt

SEQ ID NO: 643515 - DNA, 75 bp, synthetic construct
  source 1..75: mol_type = other DNA
tcagggagaaattaggaataactggctaagggagtttatgataagaggctttcgttatgtctctgtgattccaac

SEQ ID NO: 643516 - DNA, 75 bp, synthetic construct
  source 1..75: mol_type = other DNA
atgagttaccacagctcttcaatgtacttaaaggtgaaatgagcttggtaggacctcgcccaattattactgcag

SEQ ID NO: 643517 - DNA, 75 bp, synthetic construct
  source 1..75: mol_type = other DNA
agccggggtgatcacaatcgacttggtattgccctgcaaatcgggtgtgtgcgttttctgggcacttttcttact

SEQ ID NO: 643518 - DNA, 75 bp, synthetic construct
  source 1..75: mol_type = other DNA
tgagtttcaatgttcagtatgcccctgcgcgggacgtgcagacactgcgcatcgatacgccgcagtttcaatttt

SEQ ID NO: 643519 - DNA, 75 bp, synthetic construct
  source 1..75: mol_type = other DNA
attgcaagtgagcaaaataatgcaagtaataataacatcgatggtattccagttttagataatgatcttaactgg

SEQ ID NO: 643520 - DNA, 75 bp, synthetic construct
  source 1..75: mol_type = other DNA
attgcgacgactggggaattttcggaaaataaaaacattgatggtgtccctgtactggcgaatgatcctgcttgg

SEQ ID NO: 643521 - DNA, 75 bp, synthetic construct
  source 1..75: mol_type = other DNA
ataagccgcaaagtaaaaaaggatggtggtccttctatttatggacatgaacgtattggcaaaggtggaaaacca

SEQ ID NO: 643522 - DNA, 75 bp, synthetic construct
  source 1..75: mol_type = other DNA
cgcagttatttaatgttttgaagggcgaaatgagtttagtaggtcctcgtccaataataaaagcagaattgtcaa

SEQ ID NO: 643523 - DNA, 75 bp, synthetic construct
  source 1..75: mol_type = other DNA
gtaagtgggcgtagtgatgtagactacgaaacacgagtatatttagatacatggtatgtcaaaaattggtccatg

SEQ ID NO: 643524 - DNA, 75 bp, synthetic construct
  source 1..75: mol_type = other DNA
ctgcactgggtgcttggtgttctctgtgtagggtggtatggaattaggttaaggcattatttttatcggaaaaca

SEQ ID NO: 643525 - DNA, 75 bp, synthetic construct
  source 1..75: mol_type = other DNA
gatgtagcttttttttggcaatagccgactttattagttttgtactgtcattatatatatctttgcaattgttat

SEQ ID NO: 643526 - DNA, 75 bp, synthetic construct
  source 1..75: mol_type = other DNA
gcgcaccaatcccggcgcatattgttgataaattgcgcggacgggagtttaaaacctttgatgagtttcgcgagg

SEQ ID NO: 643527 - DNA, 75 bp, synthetic construct
  source 1..75: mol_type = other DNA
cagatctggagcatgtacggggggagtttgtggtgttctttcacgtataataggaccaagtaaatttgatagtac

SEQ ID NO: 643528 - DNA, 75 bp, synthetic construct
  source 1..75: mol_type = other DNA
ttgatgttaaggacggtgaattacttgtgcttggtggccttgccagcagtaagctgacgcagtcgcggacaggtt

SEQ ID NO: 643529 - DNA, 75 bp, synthetic construct
  source 1..75: mol_type = other DNA
catagacgaagcacacaatatcctttcgaacacctcgttcagggaatcagaaagctggaaggattatcggctcga

SEQ ID NO: 643530 - DNA, 75 bp, synthetic construct
  source 1..75: mol_type = other DNA
tacagcatggcgagccactggtcgagagccgctacctctacgacccgctgggacggcgaatggcgaaacgggtat

SEQ ID NO: 643531 - DNA, 75 bp, synthetic construct
  source 1..75: mol_type = other DNA
cagtatcctttaaatccactacaacaaattgaccctatgggattattgcagacttgggatgatgccagatctgga

SEQ ID NO: 643532 - DNA, 75 bp, synthetic construct
  source 1..75: mol_type = other DNA
acgggtgggacggcgaccggctgacgacggtacagaccgacaccacgcgtatccagacggtataccagccgggga

SEQ ID NO: 643533 - DNA, 75 bp, synthetic construct
  source 1..75: mol_type = other DNA
agtagcgacaaacccaaatgcgatactataaatcagtttcttagcccaattttcaaagatgacccagaacttata

SEQ ID NO: 643534 - DNA, 75 bp, synthetic construct
  source 1..75: mol_type = other DNA
tagaacatggtggtggagtgtatgatattgataattttaagattgttacgccccgactacatgatgaaattcact

SEQ ID NO: 643535 - DNA, 75 bp, synthetic construct
  source 1..75: mol_type = other DNA
gtgtgccactacattgactcagatttgaattctcgtgctcctcgtattttgcttataggggcctccagaggaata

SEQ ID NO: 643536 - DNA, 75 bp, synthetic construct
  source 1..75: mol_type = other DNA
tacagcctcactggcaggctatattgaccggaacgggtgctttactggtggaactcgcgagttgccccttatcgg

SEQ ID NO: 643537 - DNA, 75 bp, synthetic construct
  source 1..75: mol_type = other DNA
tagctgatgcagacgaaactgtaatgaggtttactcgtacagatcttgaagatattgaaattgcactaccaatca

SEQ ID NO: 643538 - DNA, 75 bp, synthetic construct
  source 1..75: mol_type = other DNA
ggtagcttcattgagatcaaaaaaggtttcatgagcctgatcggcaaggttgaagcggaacgaatcattgaggaa

SEQ ID NO: 643539 - DNA, 75 bp, synthetic construct
  source 1..75: mol_type = other DNA
aaatatggctaccgtgtcaaagaccagacgcttgaattaactttgctgcgttcgcagcataaacctggggaagtt

SEQ ID NO: 643540 - DNA, 75 bp, synthetic construct
  source 1..75: mol_type = other DNA
gccagaataataccctgcccgctgacaaaattatcccgggagatggccgtactctcgttgttcacttcgacgaac

SEQ ID NO: 643541 - DNA, 75 bp, synthetic construct
  source 1..75: mol_type = other DNA
ggatactcagctggccggagcgggtgccggggcggacgaggtgctgccgccggagccgcccgcataccgggtgct

SEQ ID NO: 643542 - DNA, 75 bp, synthetic construct
  source 1..75: mol_type = other DNA
atgaagaaaacactgctggctcttctgttaaccgggctttcatttggagcttgtgcgcagcaacaggggtttgtt

SEQ ID NO: 643543 - DNA, 75 bp, synthetic construct
  source 1..75: mol_type = other DNA
cggagcctaaatcgaggagcgattccctcgagcgtcagccacagcccctgggccgctacggttcagcctgtactc

SEQ ID NO: 643544 - DNA, 75 bp, synthetic construct
  source 1..75: mol_type = other DNA
tgttctgcccgagtgaaggtaaaaatcgtgttaacttctgccgccatcacggtatcgaatatatccccgcacggg

SEQ ID NO: 643545 - DNA, 75 bp, synthetic construct
  source 1..75: mol_type = other DNA
aacaccccacctgctgacaagatgattccgggtgatggtcgcactctggttgttcacttcgacaaattcggcaat

SEQ ID NO: 643546 - DNA, 75 bp, synthetic construct
  source 1..75: mol_type = other DNA
tgttggcgtcgttgagatgactgaacctgagtcggaaggcaaaaatcccaccaaggtttatttgataaggtttaa

SEQ ID NO: 643547 - DNA, 75 bp, synthetic construct
  source 1..75: mol_type = other DNA
taaatctgtatgcattctgcaacgcagaactgaatctttcataccccaagaagcaggtgaatataccgcttgagg

SEQ ID NO: 643548 - DNA, 75 bp, synthetic construct
  source 1..75: mol_type = other DNA
atcgttaacggggttcaccgctgataaccccgaatatcatttatccaatggcatgaaatcgaaatcagtcgatac

SEQ ID NO: 643549 - DNA, 75 bp, synthetic construct
  source 1..75: mol_type = other DNA
ttatcggtcccgatggcgacaacgtcattctccagggcagccactacctgactggcggctttgcacaatccggta

SEQ ID NO: 643550 - DNA, 75 bp, synthetic construct
  source 1..75: mol_type = other DNA
cgcgtgaggccgggatgattgcctatatgctggcgaacggacagggcaaggggcgcgcccgcaccgatggcgaag

SEQ ID NO: 643551 - DNA, 75 bp, synthetic construct
  source 1..75: mol_type = other DNA
tctatttgctctcagaactgactctgctaacgggaaatgagttcaccgacggcgaaccgtgcagaatgcatttca

SEQ ID NO: 643552 - DNA, 75 bp, synthetic construct
  source 1..75: mol_type = other DNA
atgaagccccataaaccagtggcgcctgagcctgaatcacagagcgattctcttgtacgtcagccgcatacactg

SEQ ID NO: 643553 - DNA, 75 bp, synthetic construct
  source 1..75: mol_type = other DNA
cgcgtattgatgccaaacgtgggcaaacaatcaaattaatgtacacagccagcacctcactgatcttacccagca

SEQ ID NO: 643554 - DNA, 75 bp, synthetic construct
  source 1..75: mol_type = other DNA
agagaatgagtaagattgcattattttctactttatctaaactttcatcattactatttattttttttacggtaa

SEQ ID NO: 643555 - DNA, 75 bp, synthetic construct
  source 1..75: mol_type = other DNA
tttacgagctactttatcggccctttaatggcggatttctatgcgcgctaccccggcatcacgctccagctacag

SEQ ID NO: 643556 - DNA, 75 bp, synthetic construct
  source 1..75: mol_type = other DNA
ggctgttgatgaaatggggtttatggttgcgagatacttggattattggaagcgggaaaaacgcttatgaagctt

SEQ ID NO: 643557 - DNA, 75 bp, synthetic construct
  source 1..75: mol_type = other DNA
ttaaaagcatttaaattagttggaagaccggtctttgtcgaacatactggactatatatagaaagcctcaatggt

SEQ ID NO: 643558 - DNA, 75 bp, synthetic construct
  source 1..75: mol_type = other DNA
gatcaacgaaatagaaaaagagctcacaattaaacaggctagactacttttagtagagacctccagccatatcga

SEQ ID NO: 643559 - DNA, 75 bp, synthetic construct
  source 1..75: mol_type = other DNA
agagagcaaattgaccactactgcgagaaagcggggctacatccacaggtggtcattgaggcgaactcaattagc

SEQ ID NO: 643560 - DNA, 75 bp, synthetic construct
  source 1..75: mol_type = other DNA
ccgccacgcaaaaatgctggaaaccgatcaggcatgggaggtattcgaaaaactggaagattgttatttcagccg

SEQ ID NO: 643561 - DNA, 75 bp, synthetic construct
  source 1..75: mol_type = other DNA
atgacaactcaaatttctgttgaaactctctctccgatcacccataaccagattcctgttattaccaccgaactt

SEQ ID NO: 643562 - DNA, 75 bp, synthetic construct
  source 1..75: mol_type = other DNA
gttgcggcggaaaaatagcgggcagacagccgccgcaaaggcatttttgcaaatggcgttggatgaatgtgcggt

SEQ ID NO: 643563 - DNA, 75 bp, synthetic construct
  source 1..75: mol_type = other DNA
ctacaggaaatgtcgcaggagaaaatcgaggatatgctttgccgcgacgagttggacgttgggattgccttcgcg

SEQ ID NO: 643564 - DNA, 75 bp, synthetic construct
  source 1..75: mol_type = other DNA
cggaaaaatagctggcagacagccgccgcgaaggcatttttgcacatggcgttggaggaatgtgcggatgttggc

SEQ ID NO: 643565 - DNA, 75 bp, synthetic construct
  source 1..75: mol_type = other DNA
cgagctgttcatcattggaatttggtatgtttctcaataagttgtcacaactattgtctcttcagtcggcagagg

SEQ ID NO: 643566 - DNA, 75 bp, synthetic construct
  source 1..75: mol_type = other DNA
cgataaagtcatggaggcgcttaaggctgcaactacccatgactatgaagtgtatagctttgctaaaaaattatt

SEQ ID NO: 643567 - DNA, 75 bp, synthetic construct
  source 1..75: mol_type = other DNA
cggagcaatgtcttttattatggatgatgtgcctgataactgtacttatgtcaccaggaaggaatccagagtgat

SEQ ID NO: 643568 - DNA, 75 bp, synthetic construct
  source 1..75: mol_type = other DNA
atgatgtttcagaatgaacgtgaattcatttataatgtctctggtttcgataacttacatcagaaagctaaagag

SEQ ID NO: 643569 - DNA, 75 bp, synthetic construct
  source 1..75: mol_type = other DNA
tgcacaggtctacatcagtctgttgaaaaacggtcgtagcagtggttacaagatagcaaaggaaatttcactatc

SEQ ID NO: 643570 - DNA, 75 bp, synthetic construct
  source 1..75: mol_type = other DNA
ttaagtgacaatgagaaactgatggacgatctgggggcaaatgtcacgccggctatctattacatgagtaaggaa

SEQ ID NO: 643571 - DNA, 75 bp, synthetic construct
  source 1..75: mol_type = other DNA
gaaggttagaaaccagcaagaggaactgcttgaaaagtatcaggtactgagaaaagatattgaagcattaactga

SEQ ID NO: 643572 - DNA, 75 bp, synthetic construct
  source 1..75: mol_type = other DNA
aaatgttgatggtgttttttcggagtttttacttgatagtcttaattttccaaagattgaaattaaggtgtctcc

SEQ ID NO: 643573 - DNA, 75 bp, synthetic construct
  source 1..75: mol_type = other DNA
acctgttatcacttaacccattactggcttgctgccgtagatattcccgtggcgagcgataacccagtgcactat

SEQ ID NO: 643574 - DNA, 75 bp, synthetic construct
  source 1..75: mol_type = other DNA
accttcacgaatctccgaagttctgtctttgtccatagattgcatgttcgcaaataaaacaagaaaaggtgatca

SEQ ID NO: 643575 - DNA, 75 bp, synthetic construct
  source 1..75: mol_type = other DNA
tcatgataatttttattccctaaaaactttatggcaagaattgcaaatgcgtcttcctaatggatttccatggtt

SEQ ID NO: 643576 - DNA, 75 bp, synthetic construct
  source 1..75: mol_type = other DNA
tttactaagttaagtgataatgcaatttataatgaagagatgaactctgaatttatgagttttgccaaagcatat

SEQ ID NO: 643577 - DNA, 75 bp, synthetic construct
  source 1..75: mol_type = other DNA
tgaccctgccaccgtgccgggtaaatggattccggtaagcgagcggatgccggagaatgatgtatctgttctcac

SEQ ID NO: 643578 - DNA, 75 bp, synthetic construct
  source 1..75: mol_type = other DNA
tatttgaacgttatgccgggccggagtataagcatcaggaaatgggccagcccaacgtcagtaccgaacgccggg

SEQ ID NO: 643579 - DNA, 75 bp, synthetic construct
  source 1..75: mol_type = other DNA
cctgctcgccgttttggcaaagcgggaatggaattatttgatttgcgcctgcacgagcgagatgacgttttacag

SEQ ID NO: 643580 - DNA, 75 bp, synthetic construct
  source 1..75: mol_type = other DNA
atggttctccacatgactggtttgaaggacgcgcccaaatgctgcctgcttgtcttcattgatgatgctactagc

SEQ ID NO: 643581 - DNA, 75 bp, synthetic construct
  source 1..75: mol_type = other DNA
tgcgtcacgatgtcgcgcaacttatctgccgcttgcagcaacagccgggtgaacgctgggcgctgtgctttgaga

SEQ ID NO: 643582 - DNA, 75 bp, synthetic construct
  source 1..75: mol_type = other DNA
tccaaagacggttcctcgccgagcatgccaaaacaggtatatcgccgaaagaatggtgcgaagcgcagggactga

SEQ ID NO: 643583 - DNA, 75 bp, synthetic construct
  source 1..75: mol_type = other DNA
cggacgcaacgttatcattatgacctgaccggaaaactcacgcagagtgaagatgaggggcttgtcaccctctgg

SEQ ID NO: 643584 - DNA, 75 bp, synthetic construct
  source 1..75: mol_type = other DNA
gcttgaacggcagtatcagttccaatctccattacacccaagtcagccttgccgcaggagcaagcggcagtgata

SEQ ID NO: 643585 - DNA, 75 bp, synthetic construct
  source 1..75: mol_type = other DNA
tgggtcataaacaggataggtctcaattcatggctgtttttctctaacccagtaccactatatctttgtgagaaa

SEQ ID NO: 643586 - DNA, 75 bp, synthetic construct
  source 1..75: mol_type = other DNA
atctgtgaactcaggctgccagatcatcgtttccgatggaagcataataagctttttctgcttctgccggagtaa

SEQ ID NO: 643587 - DNA, 75 bp, synthetic construct
  source 1..75: mol_type = other DNA
tatgctttcctgcctgtattccctgtgattctggtgctggtctttagcccgttggtcatctccaccattaaaatc

SEQ ID NO: 643588 - DNA, 75 bp, synthetic construct
  source 1..75: mol_type = other DNA
gcgacggcaagctgacagagctgagcatcgacggtgttagcttccacactctcactggaatctccttcagccaca

SEQ ID NO: 643589 - DNA, 75 bp, synthetic construct
  source 1..75: mol_type = other DNA
tgcttttttccaccttgctcacctggcgtgaagtagtggtgctggaagatgcctatatctcagccagcgtaatca

SEQ ID NO: 643590 - DNA, 75 bp, synthetic construct
  source 1..75: mol_type = other DNA
ttccgggcctggatccaggcgaaaagcggtcgtgatgtaaccatcggtgatttcaccgccagcctgacagctacg

SEQ ID NO: 643591 - DNA, 75 bp, synthetic construct
  source 1..75: mol_type = other DNA
tgtttacctttttattacaaataggaactgcgaatgcagtatcttttgattgctcgaaagctaaatcatattctg

SEQ ID NO: 643592 - DNA, 75 bp, synthetic construct
  source 1..75: mol_type = other DNA
gaatatagtcgcgcctgcggtgaaaatgatattccttactatccaatccgccagatgggcgagatggctctgctg

SEQ ID NO: 643593 - DNA, 75 bp, synthetic construct
  source 1..75: mol_type = other DNA
tctcagatagtcatacagcgttatcaaatgtgtttatacggattaaggataaaagaacaccttgcggtaattact

SEQ ID NO: 643594 - DNA, 75 bp, synthetic construct
  source 1..75: mol_type = other DNA
ccgtaatttcgcaccaatttttgaagatgttgcgcaagagcgtagcggtaaagtgcgctttgtgaaagtgaatac

SEQ ID NO: 643595 - DNA, 75 bp, synthetic construct
  source 1..75: mol_type = other DNA
aatgaaatcctaattaacaaattccttttctatactcttcaatcaagaaacaggaatttattgagtttaaaaaaa

SEQ ID NO: 643596 - DNA, 75 bp, synthetic construct
  source 1..75: mol_type = other DNA
gtaaaaatagattcctgatgtatggcgatgatggaacaatagctatttttattgcttcaaaatctaaaggtaatg

SEQ ID NO: 643597 - DNA, 75 bp, synthetic construct
  source 1..75: mol_type = other DNA
gatgatttaattcagactatttatcagatgactgatgatggtcatgccaatgatttagctggcttatatctgaca

SEQ ID NO: 643598 - DNA, 75 bp, synthetic construct
  source 1..75: mol_type = other DNA
caagaatatgggatacttgcatatatattagcttatttggctttttttcaggcagttgttaatttgggtttggat

SEQ ID NO: 643599 - DNA, 75 bp, synthetic construct
  source 1..75: mol_type = other DNA
gccgctatgacaaccgtggccggttaacctcggtgaaagacgcacagggccgtgaaacgcggtatgaatacaacg

SEQ ID NO: 643600 - DNA, 75 bp, synthetic construct
  source 1..75: mol_type = other DNA
gccgctggcactggaacgtgccggtttgacaatgagcgatctgacattgatcgatatgcacgaagcctttgcagc

SEQ ID NO: 643601 - DNA, 75 bp, synthetic construct
  source 1..75: mol_type = other DNA
cgctttgaagatgggaaacattattttcttttaactggtgatgccctgaaagcatttaaggacagagtgactatt

SEQ ID NO: 643602 - DNA, 75 bp, synthetic construct
  source 1..75: mol_type = other DNA
tcaaccctgaaaacttgccagttattgagtggcagggagtacgtgtagttaccaccgaaacgttggcggcgggat

SEQ ID NO: 643603 - DNA, 75 bp, synthetic construct
  source 1..75: mol_type = other DNA
aggtcttccgcgtgaaatcgagttgcgccagaaacaatacgagtactatcgtgatttactgttcagtttcccgaa

SEQ ID NO: 643604 - DNA, 75 bp, synthetic construct
  source 1..75: mol_type = other DNA
cttaactcattaggttcattatcttttgatgtcacacgatctgatgctcagttgcataatcaggataaagaaacg

SEQ ID NO: 643605 - DNA, 75 bp, synthetic construct
  source 1..75: mol_type = other DNA
ttgtaggtaaagagagcaactatctggaaaacctccagccacacattgatgctctgagactcgatgtcattgtga

SEQ ID NO: 643606 - DNA, 75 bp, synthetic construct
  source 1..75: mol_type = other DNA
ggataaagtcatggaagcgcttaaaactgccgcgacacatgagcatgaactatatgcctttgcaaaaaaactctt

SEQ ID NO: 643607 - DNA, 75 bp, synthetic construct
  source 1..75: mol_type = other DNA
agccgtggcgtccagaatgcttcagcgctggctgaatgtttttaacctgcgcgggaaactctatccggatatgga

SEQ ID NO: 643608 - DNA, 75 bp, synthetic construct
  source 1..75: mol_type = other DNA
taagatttaatgtgaatttgaaaaatcaggacacaaataatagttcatttagctacggagataaccgattcgaga

SEQ ID NO: 643609 - DNA, 75 bp, synthetic construct
  source 1..75: mol_type = other DNA
ccggctggatgaggtctgggcggccattaagaccgggctggtcaggggctgtccgtgggcttccgtccccatgaa

SEQ ID NO: 643610 - DNA, 75 bp, synthetic construct
  source 1..75: mol_type = other DNA
ttacattggcgattgttattctcgcatcgttctattcggctgcctttggtaccgatccgactcagagctcgttaa

SEQ ID NO: 643611 - DNA, 75 bp, synthetic construct
  source 1..75: mol_type = other DNA
tccgggctttttgaatcttatttataatttaattctggactccacctctctgagtatgttgctgtgggaagttgg

SEQ ID NO: 643612 - DNA, 75 bp, synthetic construct
  source 1..75: mol_type = other DNA
gataagtttactgcacttaccgctgagcttaccgctgagcttaccgctgagcttaccatgcgtaaaaaacagtac

SEQ ID NO: 643613 - DNA, 75 bp, synthetic construct
  source 1..75: mol_type = other DNA
accggtgaacttaacgttaatatcaaagctgctttgataagaagacacataagaaaaataaaatcatttaggcta

SEQ ID NO: 643614 - DNA, 75 bp, synthetic construct
  source 1..75: mol_type = other DNA
ttttctttcttatatactttcgacaataaagagggttggctcactcgagctgataatattcccagaaagtgcatt

SEQ ID NO: 643615 - DNA, 75 bp, synthetic construct
  source 1..75: mol_type = other DNA
aatctctattgattctttctttaaaaaaagtaacaccggtgaacttaacgttaatatcaaagctgcattgataag

SEQ ID NO: 643616 - DNA, 75 bp, synthetic construct
  source 1..75: mol_type = other DNA
cggcaaagtgttcgattttttcgaggcgttagcggaagatcgcggcgtggagttgcgatttgttggcgacaaatg

SEQ ID NO: 643617 - DNA, 75 bp, synthetic construct
  source 1..75: mol_type = other DNA
tcaacgccttaacctctgaagaggaagccgcagtaaatgcactggcggagaaattagcagcaaacaagccccgtc

SEQ ID NO: 643618 - DNA, 75 bp, synthetic construct
  source 1..75: mol_type = other DNA
ataactgcagtaaaagcactttggcgacggctaaaaaaacgcctcggaattacttatcgtcttggctggcatagt

SEQ ID NO: 643619 - DNA, 75 bp, synthetic construct
  source 1..75: mol_type = other DNA
tacttaaatccgaaatcaatggcaattcatggcatgttggtgatttgttgccgtcagaagcggaactcgctgttc

SEQ ID NO: 643620 - DNA, 75 bp, synthetic construct
  source 1..75: mol_type = other DNA
gcagtacgaaaatcagctccagaacacgatggccccagccgcgtatatctgggatcaggcgcagactacgatcaa

SEQ ID NO: 643621 - DNA, 75 bp, synthetic construct
  source 1..75: mol_type = other DNA
gacaacctgcatttctacggcaatttactcagcaagtcctgcacgctggtgattcagggcgagtcgctggcggag

SEQ ID NO: 643622 - DNA, 75 bp, synthetic construct
  source 1..75: mol_type = other DNA
tgagcggtgaacttatcgcaggtgcaatcgcgaaggttttatatccggatgagaaagacctgtcgaagctgaccg

SEQ ID NO: 643623 - DNA, 75 bp, synthetic construct
  source 1..75: mol_type = other DNA
caggccgtgcaggccggacgactggcagaagcacagggcaaccagaaagagaataacaatgccgtgggtatcagc

SEQ ID NO: 643624 - DNA, 75 bp, synthetic construct
  source 1..75: mol_type = other DNA
aagacagcaaacgggccgcagacccattacacgacctgcgtagcaagccgttttctgagtggggcgaagatgaaa

SEQ ID NO: 643625 - DNA, 75 bp, synthetic construct
  source 1..75: mol_type = other DNA
atttgtatttatgctacagcatgcggacatgcaggaattggtggtgggataaatgcggctatcacatattctgag

SEQ ID NO: 643626 - DNA, 75 bp, synthetic construct
  source 1..75: mol_type = other DNA
gcttgcgtgatgggttacagcgctaaggcgatttgtgcagctttccgtgtatcgcttgcctatgcgctgaagatg

SEQ ID NO: 643627 - DNA, 75 bp, synthetic construct
  source 1..75: mol_type = other DNA
aagcattaaccccggaagaggaagagaagatcgccgccctgtctctgaagctctccacaaccaaaccgcgccccc

SEQ ID NO: 643628 - DNA, 75 bp, synthetic construct
  source 1..75: mol_type = other DNA
gttgtttatttcttggctagttttttttcgtcatctgatatcagagaattaatcataaagaagatttcaaaaaaa

SEQ ID NO: 643629 - DNA, 75 bp, synthetic construct
  source 1..75: mol_type = other DNA
ttctatttccctaatgtgctgaagtacgatccagatcagttatcagtcatgttaaatctatcttggcttcgagga

SEQ ID NO: 643630 - DNA, 75 bp, synthetic construct
  source 1..75: mol_type = other DNA
tataaaattgcaacattaggaagcggaaatccgcgtaattttacgtggaatattatttcaaataacaatgttgtt

SEQ ID NO: 643631 - DNA, 75 bp, synthetic construct
  source 1..75: mol_type = other DNA
tgtagctttttcctcagctcacgtatttcgatttgttctggtgttatcggagaggcttttggtgttttgccctga

SEQ ID NO: 643632 - DNA, 75 bp, synthetic construct
  source 1..75: mol_type = other DNA
actatctggaaatatcgggatcgcttactctcccgtaactgtagaaggtatatttaatattcagggagacatcct

SEQ ID NO: 643633 - DNA, 75 bp, synthetic construct
  source 1..75: mol_type = other DNA
atctggaaatatcggtatcgcttactctcccgtaactgtagaaggtatatttaatattcagggagacatccgact

SEQ ID NO: 643634 - DNA, 75 bp, synthetic construct
  source 1..75: mol_type = other DNA
atgataatattgaactttacccaatatcattttttaatgaggttaattctggttggaaaattgcacaaaatgacg

SEQ ID NO: 643635 - DNA, 75 bp, synthetic construct
  source 1..75: mol_type = other DNA
atgaaccgatcttccccggcgacacataacccgtataagccaatgtgtgaaaacacggtcaataaggcactgcgg

SEQ ID NO: 643636 - DNA, 75 bp, synthetic construct
  source 1..75: mol_type = other DNA
catgaagacagcactgaccggaggtctgcagcaccgcattattcacaattatctggatgatgttctgcttcaggg

SEQ ID NO: 643637 - DNA, 75 bp, synthetic construct
  source 1..75: mol_type = other DNA
tagcagctaggtctttgtatcccgtacttagtcatcaccaagatgataataaaaaaattgcgtcaatatacttaa

SEQ ID NO: 643638 - DNA, 75 bp, synthetic construct
  source 1..75: mol_type = other DNA
ccccggcaccgtgcagggtcagtacgattatatccatgatttaatgcaggccgtgattgacgttcccgatcgtcg

SEQ ID NO: 643639 - DNA, 75 bp, synthetic construct
  source 1..75: mol_type = other DNA
attttgaagatatagatgtaaatgcatggtctggtggtgttgcatggtatgtcggtccatttataacatcctggc

SEQ ID NO: 643640 - DNA, 75 bp, synthetic construct
  source 1..75: mol_type = other DNA
atcaagaacaggtcttgctgtagctgagaatacgccggtgtttgcgcgtaaagattttcaacaggatgttagcct

SEQ ID NO: 643641 - DNA, 75 bp, synthetic construct
  source 1..75: mol_type = other DNA
tacgaagcgactttgcaggaagaaaaacgggtgctggtggtggatatcggcggtggtacgactgactgttcgtag

SEQ ID NO: 643642 - DNA, 75 bp, synthetic construct
  source 1..75: mol_type = other DNA
ggtacagagccaaatcccttactttttacggcattaacggccccatttatcacacccgctactgctactggccca

SEQ ID NO: 643643 - DNA, 75 bp, synthetic construct
  source 1..75: mol_type = other DNA
ccaccgccgaaaggcatgctgccattctcaaccgactggtttatgacctgggaacaaaacgttcatatgaagagg

SEQ ID NO: 643644 - DNA, 75 bp, synthetic construct
  source 1..75: mol_type = other DNA
aagcaatcacattctaatgttaaagtgtacggagattctaatggtgtttcgtacctgcaattaaacagtataacg

SEQ ID NO: 643645 - DNA, 75 bp, synthetic construct
  source 1..75: mol_type = other DNA
gatggtttgcatacgtttgaagcggtacgccatgattttgaaagctggttgccaaagctttctgaaagggctgtg

SEQ ID NO: 643646 - DNA, 75 bp, synthetic construct
  source 1..75: mol_type = other DNA
atgccattctatttcaggaaggagtgtccgttaaactcaggctacctcattattctgaaatcccgggtaaacacc

SEQ ID NO: 643647 - DNA, 75 bp, synthetic construct
  source 1..75: mol_type = other DNA
aagtcatcagacttgtcagggggcagtcatacagaggctcacgactgggaccggtggggatttcagtgcccagta

SEQ ID NO: 643648 - DNA, 75 bp, synthetic construct
  source 1..75: mol_type = other DNA
ctaaagataacaataaccatattgtaagagaattcaatttaagggttatatctactgataaagcagaggcggaac

SEQ ID NO: 643649 - DNA, 75 bp, synthetic construct
  source 1..75: mol_type = other DNA
agggtgaaaggaagctaattgatgatttcattcaggctctttctaaacaacgacagagactgtttttctctttgc

SEQ ID NO: 643650 - DNA, 75 bp, synthetic construct
  source 1..75: mol_type = other DNA
tgcgtgccaagctgcgctgcatcaatcccgagctttcaccgattaatacccaccgcggcatgggatacagcctga

SEQ ID NO: 643651 - DNA, 75 bp, synthetic construct
  source 1..75: mol_type = other DNA
ccactgtcacggtaattaaaaacctgatggatgcgcttattgacatctctgttattgcagacagggtgcataagc

SEQ ID NO: 643652 - DNA, 75 bp, synthetic construct
  source 1..75: mol_type = other DNA
agaaataatgtcttgaagattcttaaaagaaaggagcctgtagtaaaagatcgggagtctgtttataaactggtc

SEQ ID NO: 643653 - DNA, 75 bp, synthetic construct
  source 1..75: mol_type = other DNA
ctcaaacgttgactgtatcaatgtgtaatgctctattattaaatattataaccaaatggatacctggattatttt

SEQ ID NO: 643654 - DNA, 75 bp, synthetic construct
  source 1..75: mol_type = other DNA
gcttttggatgaattaaaacgacaatatccacactttgagttcgctcatgggcatggactagggatagttggtgt

SEQ ID NO: 643655 - DNA, 75 bp, synthetic construct
  source 1..75: mol_type = other DNA
atgtttcatgtggataatccgacgggtgtgccagtgatgccacctgtcgcggctgaattaagcaaaacaacgctt

SEQ ID NO: 643656 - DNA, 75 bp, synthetic construct
  source 1..75: mol_type = other DNA
atatcaaaccggataaaaataccaccaaccagattatgacggcgctgaaaaaactgtttattacgaacagtggtt

SEQ ID NO: 643657 - DNA, 75 bp, synthetic construct
  source 1..75: mol_type = other DNA
ggctggaatgatgaagaaagagcagccaaggcacttatacaatttggacctcatgttccatctattgcttttgaa

SEQ ID NO: 643658 - DNA, 75 bp, synthetic construct
  source 1..75: mol_type = other DNA
ggtctgttactcaacatccccccttgtgagaatcaacacgatctcctgcgtgaactcggcaaaatcgcctttgtt

SEQ ID NO: 643659 - DNA, 75 bp, synthetic construct
  source 1..75: mol_type = other DNA
atatcaccatcagcaacatcagcggcaacgccggaacggcaacccgacttcagacggcccgcaggattaacaatg

SEQ ID NO: 643660 - DNA, 75 bp, synthetic construct
  source 1..75: mol_type = other DNA
aagctgtttattacgaacagtggttcagctggtgccattgccggattaaccggtcagaataatacattcccgtac

SEQ ID NO: 643661 - DNA, 75 bp, synthetic construct
  source 1..75: mol_type = other DNA
caagtctggcagacacgtgagcaggatttggatagcgccttaaatgctcgtgagcgtgaaattgctcacctgaac

SEQ ID NO: 643662 - DNA, 75 bp, synthetic construct
  source 1..75: mol_type = other DNA
gtcaatggcaacagcagaagcaaattctgactgaagccaatgatgagctacagaataagtgtgatgtcctgacca

SEQ ID NO: 643663 - DNA, 75 bp, synthetic construct
  source 1..75: mol_type = other DNA
tcagcaagagcaacagagcattgagcgaacattcgcggcaaattaccgaattacagcttcagttggaacaagcgc

SEQ ID NO: 643664 - DNA, 75 bp, synthetic construct
  source 1..75: mol_type = other DNA
ctcaggggctgagttgggatttgattgccatgcaggagcatctgttaattttccaaggctatggggtacagatat

SEQ ID NO: 643665 - DNA, 75 bp, synthetic construct
  source 1..75: mol_type = other DNA
cattcacaataacagttggggaatatggtaattttaaatctattagtgatgctctaaactcagctgttgcactgc

SEQ ID NO: 643666 - DNA, 75 bp, synthetic construct
  source 1..75: mol_type = other DNA
gtcatgtatttggtgcaaatcccacaaaagatattagatggattgatgtagagagatctgaagcttcttttatga

SEQ ID NO: 643667 - DNA, 75 bp, synthetic construct
  source 1..75: mol_type = other DNA
ggcgctttcggcggatataacactgacgccgaaagatattggtacgcttaactcaacaacaatgtcattcagcgg

SEQ ID NO: 643668 - DNA, 75 bp, synthetic construct
  source 1..75: mol_type = other DNA
cggcgtaagagaccccggaacgttatcgttcactcggaccgcggaagtcagtactgttcagcagattatcaggcg

SEQ ID NO: 643669 - DNA, 75 bp, synthetic construct
  source 1..75: mol_type = other DNA
cggagaaaacgcgagttatctactgcaaagatggaagccggaagggtgattatgaacataccatgttcgactttc

SEQ ID NO: 643670 - DNA, 75 bp, synthetic construct
  source 1..75: mol_type = other DNA
gattacgttgatgacaaaattgcagagcacgaacagtcacgacgtcacccggacgcttctttgaccgcaaaaggt

SEQ ID NO: 643671 - DNA, 75 bp, synthetic construct
  source 1..75: mol_type = other DNA
cgcatggtcatcatcgtcagcagtgtggcctcagtggagctgactattgacaccacaacggtgatggcaacgcag

SEQ ID NO: 643672 - DNA, 75 bp, synthetic construct
  source 1..75: mol_type = other DNA
ttcgcatcgttaattgctcctggtggcgcaggtggcgggaaagtgggaattacaaacacaaacggcggtaacgga

SEQ ID NO: 643673 - DNA, 75 bp, synthetic construct
  source 1..75: mol_type = other DNA
attgttcacgcgtttaaaaataaaattggtttgaaaatattgcctatgacgcataaacaacatatcgattatgta

SEQ ID NO: 643674 - DNA, 75 bp, synthetic construct
  source 1..75: mol_type = other DNA
tcctcgcgacaagattttaaaaagctttttgactatttgctgggtttctctaaaaggttattaccagttcttatt

SEQ ID NO: 643675 - DNA, 75 bp, synthetic construct
  source 1..75: mol_type = other DNA
cgccgcgtattgaggtcgagtttagtggtcacttgttgctaacgaatggcacacggcaaccttgttcggtaatcg

SEQ ID NO: 643676 - DNA, 75 bp, synthetic construct
  source 1..75: mol_type = other DNA
tccaaaactgaatggctggataaattattacgggcgatatacctgttcggaattatacagcgtgttcagatatat

SEQ ID NO: 643677 - DNA, 75 bp, synthetic construct
  source 1..75: mol_type = other DNA
ataatacaaagaaagccatcaaaattgcgtatatgctatcaaaagtggaaaagtttgataagattattcattcaa

SEQ ID NO: 643678 - DNA, 75 bp, synthetic construct
  source 1..75: mol_type = other DNA
cgttccgcgaccgtctggcggctaatggcaagaaaggaaaggtgattctcggcgcgatgatgcgcaagctggcac

SEQ ID NO: 643679 - DNA, 75 bp, synthetic construct
  source 1..75: mol_type = other DNA
tttactcagttaagcaatgcgaccaacagcacgtctgaaacactggccgcaacgccaaaagcagtaaagaccgcc

SEQ ID NO: 643680 - DNA, 75 bp, synthetic construct
  source 1..75: mol_type = other DNA
tcttccgtggtgaccaaagactacacctttaaacgacccggctgggcagggcgttttgatcaggaaggccagcac

SEQ ID NO: 643681 - DNA, 75 bp, synthetic construct
  source 1..75: mol_type = other DNA
atgattgccgatgaagtgcaaagcggctttgcgcgtaccggtaaactgtttgccatggatcattacgccgataag

SEQ ID NO: 643682 - DNA, 75 bp, synthetic construct
  source 1..75: mol_type = other DNA
gtgctcaacattatcgacaaagaatcactctgcgaacgcgcgaatcaactgggccagcgtctgacaaacacgctg

SEQ ID NO: 643683 - DNA, 75 bp, synthetic construct
  source 1..75: mol_type = other DNA
atttgtcagcacaaacagcagcgcctgccacaactaacggtatctacaatacgctgacaaccaatgaactttccg

SEQ ID NO: 643684 - DNA, 75 bp, synthetic construct
  source 1..75: mol_type = other DNA
gatgtttgttgagcaagattactcggaaagcgtaattgttgcagcaacaaatcatccagagttacttgatcaggc

SEQ ID NO: 643685 - DNA, 75 bp, synthetic construct
  source 1..75: mol_type = other DNA
gaggtgcattttcccaccatcagccgtaaagacctgatggtgaccgggcagtcggcgcgggtgccggtggtgttt

SEQ ID NO: 643686 - DNA, 75 bp, synthetic construct
  source 1..75: mol_type = other DNA
ccaaaggcggtaaaggtcgcgtatgaccttgctaacgggaaatacactgcacaggacgccaccacagcgagaaaa

SEQ ID NO: 643687 - DNA, 75 bp, synthetic construct
  source 1..75: mol_type = other DNA
taacaatctgaattttaatgcctggctccaggcgaaaagcggccgggaagtgacgatgggtgagtttaccgcctc

SEQ ID NO: 643688 - DNA, 75 bp, synthetic construct
  source 1..75: mol_type = other DNA
agcatgagaccagacatgcgtacaacgcacagggactggcgaaccgctgtataccggacagcctgcccgccgtgg

SEQ ID NO: 643689 - DNA, 75 bp, synthetic construct
  source 1..75: mol_type = other DNA
gacgtgtcgaggcaactgcgaccaagcactccggcagtatgttagaaaacaaaccatggccttattgatggctgg

SEQ ID NO: 643690 - DNA, 75 bp, synthetic construct
  source 1..75: mol_type = other DNA
gattacagagctatcttcctgcgttaacggtatattttggtagcaatgaattatcagtcagattttcagcagtta

SEQ ID NO: 643691 - DNA, 75 bp, synthetic construct
  source 1..75: mol_type = other DNA
cgctctattaaacgtgattacgatcacattctcaagacgctacgtacaattacctacaagcttacaacatttaca

SEQ ID NO: 643692 - DNA, 75 bp, synthetic construct
  source 1..75: mol_type = other DNA
cgcctcgtattgaggtcgtctttagtggtcacttgttgctgacgaatggcacacggaacccttgttcggtaatcg

SEQ ID NO: 643693 - DNA, 75 bp, synthetic construct
  source 1..75: mol_type = other DNA
agcggttggcggtatattagctcctgctcttatttacgtagcctttaatgccaacgatcctgaggcgatttctgg

SEQ ID NO: 643694 - DNA, 75 bp, synthetic construct
  source 1..75: mol_type = other DNA
ctgacggatatcagcgaactacgtgttgtacagggaatggatgccgcgctctatcagaaaataaaaccacttgtc

SEQ ID NO: 643695 - DNA, 75 bp, synthetic construct
  source 1..75: mol_type = other DNA
ccgaactcctggattacgcccggtcgtggcgggaagctgaacctgataatgaagatgcgcgttattatgaatacg

SEQ ID NO: 643696 - DNA, 75 bp, synthetic construct
  source 1..75: mol_type = other DNA
cgggggatattcttgctgttcaaagcaacaaccgaactgcatgaacggctggaaaaccgcgatcatgattccggc

SEQ ID NO: 643697 - DNA, 75 bp, synthetic construct
  source 1..75: mol_type = other DNA
gatccaatcgggctaagaggtgaatggaatctgtataaatatccattaaaccctgttcggtttatagattctttg

SEQ ID NO: 643698 - DNA, 75 bp, synthetic construct
  source 1..75: mol_type = other DNA
cagaagttgttttgacttcgaccaactatggtaacaataatttaacttcgcaagatcgcgtcattgatattaatg

SEQ ID NO: 643699 - DNA, 75 bp, synthetic construct
  source 1..75: mol_type = other DNA
ctggtgagtgatccgctggggttgctggggggtgagcagacttaccggtatgtgccaaatccgtgtgggtatgtt

SEQ ID NO: 643700 - DNA, 75 bp, synthetic construct
  source 1..75: mol_type = other DNA
gcaggacagtggcaggatgcggaatccgggctgtgctataaccggttccggtattacgagccggaaaccgggatg

SEQ ID NO: 643701 - DNA, 75 bp, synthetic construct
  source 1..75: mol_type = other DNA
ttcagattgttgagtgtgttaatttaaatataggacttattgcaaaagatgaactggtaaaaatcatcaataaac

SEQ ID NO: 643702 - DNA, 75 bp, synthetic construct
  source 1..75: mol_type = other DNA
actctctgcgctggggcgttctctggttgagatggttttgcacaaaggacgtaagccgcggatctcactcacgcg

SEQ ID NO: 643703 - DNA, 75 bp, synthetic construct
  source 1..75: mol_type = other DNA
agcaatattaaacttggtttgaaaggtgaggttagtgcaacatttgagacgaatgtttttgtcgtgaaattgaaa

SEQ ID NO: 643704 - DNA, 75 bp, synthetic construct
  source 1..75: mol_type = other DNA
gaaacaggccggaaacacgcagtatgactatgacgccgcaggccggatggtcagccggacaaaacaccgtgacgg

SEQ ID NO: 643705 - DNA, 75 bp, synthetic construct
  source 1..75: mol_type = other DNA
accaaagcgtatgccgatgattttgcggaatataatattcagattaatggtatcgccccaggatattatgtgagt

SEQ ID NO: 643706 - DNA, 75 bp, synthetic construct
  source 1..75: mol_type = other DNA
aaaactggcgatgatgcagacaccacaccattttttttctcccgatccttttgaaaggaatttagggagatttcg

SEQ ID NO: 643707 - DNA, 75 bp, synthetic construct
  source 1..75: mol_type = other DNA
tcaggtgatatatcaggatctttctttattcccaaatctttctgtggctgaaaatatcgcttttgaatacaacct

SEQ ID NO: 643708 - DNA, 75 bp, synthetic construct
  source 1..75: mol_type = other DNA
gcattgcagtcgaaacagtaacagaagatgcgcatacgtcgttacgcttgcatcgtgcaggttatagctctgcgt

SEQ ID NO: 643709 - DNA, 75 bp, synthetic construct
  source 1..75: mol_type = other DNA
gggcgttttaatgtcactgcaaaaggtggattgatcgccaataaatatgtggactggcagatctcatacccatat

SEQ ID NO: 643710 - DNA, 75 bp, synthetic construct
  source 1..75: mol_type = other DNA
aatgaaatttatgagatggtgctggcctggtatattacgctaccgacactggtggcactaatcgctccggcgaaa

SEQ ID NO: 643711 - DNA, 75 bp, synthetic construct
  source 1..75: mol_type = other DNA
catcgtcttggctacagttcagcgtatttgcgctatccattagctgctggccttgcaactgaaacattatcggca

SEQ ID NO: 643712 - DNA, 75 bp, synthetic construct
  source 1..75: mol_type = other DNA
gggacctgggcgagagcgaacccttcgacttcttgacgtggttcgaatattccccgtctgatgagccgggcttta

SEQ ID NO: 643713 - DNA, 75 bp, synthetic construct
  source 1..75: mol_type = other DNA
ttggctttaaagtcttcaaacttgattccaccaatatcaaaccttgggagctggatttcgatcttacggagcagg

SEQ ID NO: 643714 - DNA, 75 bp, synthetic construct
  source 1..75: mol_type = other DNA
gtgctctacgaggtgctgctgaagtacggtctggatctgaccttgccaattgccgagcacagtgtggctggccat

SEQ ID NO: 643715 - DNA, 75 bp, synthetic construct
  source 1..75: mol_type = other DNA
gcaaaagccaaatgaaggacaccttttttatggattaatccagaatggtacggatacatggaatgcttcattttt

SEQ ID NO: 643716 - DNA, 75 bp, synthetic construct
  source 1..75: mol_type = other DNA
gttgttaccagaacggtgattaacgggagatataccgagaacatgtaccgaattatcgacaggaacgcacctaaa

SEQ ID NO: 643717 - DNA, 75 bp, synthetic construct
  source 1..75: mol_type = other DNA
tccagatcctgacaagacagccgagtggatactctgtatcgctcgacaagctggcgcagctatccggtgtaagcc

SEQ ID NO: 643718 - DNA, 75 bp, synthetic construct
  source 1..75: mol_type = other DNA
atgaaactaaataaatatgttttagcaatagcaattgcctattcatcttcagttttttctgccgggattcctgta

SEQ ID NO: 643719 - DNA, 75 bp, synthetic construct
  source 1..75: mol_type = other DNA
atgccggtgcaaaccagtatcgacggcggggtggtgacctggacggggaccgttattgcgaaccacctctacaac

SEQ ID NO: 643720 - DNA, 75 bp, synthetic construct
  source 1..75: mol_type = other DNA
atgccggtgcaaaccagtattgacggcggtgtggtgacctggacagggacagttattgcgaaccacctctacaac

SEQ ID NO: 643721 - DNA, 75 bp, synthetic construct
  source 1..75: mol_type = other DNA
cccagaacgcagcataaatggcaaaaaactggagcaccgatcattacagcttggtatttctcgtaacttgatcag

SEQ ID NO: 643722 - DNA, 75 bp, synthetic construct
  source 1..75: mol_type = other DNA
agcctgggcgatagaacaaacagcagacgtacaggagaaaataagtgatgccctcaatgatatctcagaccttac

SEQ ID NO: 643723 - DNA, 75 bp, synthetic construct
  source 1..75: mol_type = other DNA
tggcggttcttattgccagcccgatagtaaacgctgctggtatacccgtgtttgatgcaacagccagactagaga

SEQ ID NO: 643724 - DNA, 75 bp, synthetic construct
  source 1..75: mol_type = other DNA
ggttaagaattcgacttaattccgcagatttcacgctaaacagccttcttcccggtgaaaaaaagttggcggaag

SEQ ID NO: 643725 - DNA, 75 bp, synthetic construct
  source 1..75: mol_type = other DNA
taaaacggcagggaaaaacggtcaccagccaggtgctgatttttgaaatcatgcctgcgcctccggccattgcca

SEQ ID NO: 643726 - DNA, 75 bp, synthetic construct
  source 1..75: mol_type = other DNA
ccggagtcgattcaggttcaggcacagttgaaacagcctaaattacgtggaaacgttcagacggcgcaaagggag

SEQ ID NO: 643727 - DNA, 75 bp, synthetic construct
  source 1..75: mol_type = other DNA
tttttgtctaatattagtgttggagaaataatgcctcttactactttgctatttttgtctatgctgccccttcat

SEQ ID NO: 643728 - DNA, 75 bp, synthetic construct
  source 1..75: mol_type = other DNA
gccggacgcctgaaatgtgctcatgtaaatcatgtagaagcgttatgcgacgcggaggacgtgctggtgtggtcc

SEQ ID NO: 643729 - DNA, 75 bp, synthetic construct
  source 1..75: mol_type = other DNA
tcacgttatcggtgggtcactcattgtttgatgagcgctttggccttgcgccacagatgccgaaaaagttgcaga

SEQ ID NO: 643730 - DNA, 75 bp, synthetic construct
  source 1..75: mol_type = other DNA
gcatgaggctctcagagcgatactgctagggaaccaagctgtatattcagaggcttattcattggttggcaaccc

SEQ ID NO: 643731 - DNA, 75 bp, synthetic construct
  source 1..75: mol_type = other DNA
gaaaagcaatccgtcaggaggtgaggagaatcgcagtgacaagtccttgtacgagctggcgcatatgttcaatgc

SEQ ID NO: 643732 - DNA, 75 bp, synthetic construct
  source 1..75: mol_type = other DNA
ttttagcactgttccgtgatgagattccaggttatcaggatgaccacgggaaggaaattccgttagaactggact

SEQ ID NO: 643733 - DNA, 75 bp, synthetic construct
  source 1..75: mol_type = other DNA
atttattaattcaactttcattggtatacctaagcgtataccaatggcgatttgctgtagtgtttactgtggtta

SEQ ID NO: 643734 - DNA, 75 bp, synthetic construct
  source 1..75: mol_type = other DNA
atgacccgctgcaggggaggtatatcactcaggatccgattgggctgaaggggggatggaatttttatcagtatc

SEQ ID NO: 643735 - DNA, 75 bp, synthetic construct
  source 1..75: mol_type = other DNA
aatgatataaatgtaatagataaagtaaatagtcagtttgattgtaatttaaatgaaataagttactatactgta

SEQ ID NO: 643736 - DNA, 75 bp, synthetic construct
  source 1..75: mol_type = other DNA
gcgtccaagttatatcagtcagcgacgagcatcttgtcgatctgattgctttcagggatgatcctgaggatgaga

SEQ ID NO: 643737 - DNA, 75 bp, synthetic construct
  source 1..75: mol_type = other DNA
tgccggtaccccatgggtgctgtccgacaccggctggcatctgcctacaggaattctgcaggaaactggcacgct

SEQ ID NO: 643738 - DNA, 75 bp, synthetic construct
  source 1..75: mol_type = other DNA
gaaacgtgctgccggctggcaccgactgtattccgcagataacggaatgatgacgccatcagaagaaacaacgcc

SEQ ID NO: 643739 - DNA, 75 bp, synthetic construct
  source 1..75: mol_type = other DNA
acacctgtttttcttgttgtggataacgttgatcaactcagcgaagaagtccaatctcaaattttcactgattgt

SEQ ID NO: 643740 - DNA, 75 bp, synthetic construct
  source 1..75: mol_type = other DNA
ctttaggcgcacttatgctaaccgctccggtgttcgctgttgatgtcgatgtaaagttcatcgccacaatcgtac

SEQ ID NO: 643741 - DNA, 75 bp, synthetic construct
  source 1..75: mol_type = other DNA
acacattttttaaagttcagaacgatgaaaacatcacgtggacaactgctgaaatcagcggcggattaaaactgg

SEQ ID NO: 643742 - DNA, 75 bp, synthetic construct
  source 1..75: mol_type = other DNA
cttaggctcaggctctggcagaacgaagggcgtatatcgcggcatcttccggtaacaacctcttctggcgctggc

SEQ ID NO: 643743 - DNA, 75 bp, synthetic construct
  source 1..75: mol_type = other DNA
gtgacatcttcttcccgaaactgagtgaagcattacacctcatttcttttgccgatattgcggttctctacctta

SEQ ID NO: 643744 - DNA, 75 bp, synthetic construct
  source 1..75: mol_type = other DNA
aagctggtcttctggtttgtacgtgttgatgacgaagggtatcctgaaatagcccgctgcacggagcgggagttt

SEQ ID NO: 643745 - DNA, 75 bp, synthetic construct
  source 1..75: mol_type = other DNA
ataatagacgggtggttataaacccggcgaatgtatttgttaatatggtcagggaaatgccgttgggctatgaag

SEQ ID NO: 643746 - DNA, 75 bp, synthetic construct
  source 1..75: mol_type = other DNA
gctctctggtgattcactccggtaaaaaaggtggcacgctcaacggagcagaagaaaatctgaaaaagggatggg

SEQ ID NO: 643747 - DNA, 75 bp, synthetic construct
  source 1..75: mol_type = other DNA
cagccagggctgacgataaagccttccgggttcagtcatgatgaatcattgctgccacaacccggcagccttcac

SEQ ID NO: 643748 - DNA, 75 bp, synthetic construct
  source 1..75: mol_type = other DNA
ttgccagtacacctcaatattcgcaggtacgccagattactagcgcgggaaaaccctgacctgaaaaactttctc

SEQ ID NO: 643749 - DNA, 75 bp, synthetic construct
  source 1..75: mol_type = other DNA
cgtcaccacaccaacaagacctgtgccgcccgtaccggatggctccctgcactggtcgctgctcaatattatgac

SEQ ID NO: 643750 - DNA, 75 bp, synthetic construct
  source 1..75: mol_type = other DNA
ctgcgttcctgaaatccccgattggaattatcaccacgctgattctggcgatcggattactctatgacgattatc

SEQ ID NO: 643751 - DNA, 75 bp, synthetic construct
  source 1..75: mol_type = other DNA
gccagcggtaacatgcgtgacatggccgctatttttacaggtgtaggacagaagctcagcggcatgccgtattac

SEQ ID NO: 643752 - DNA, 75 bp, synthetic construct
  source 1..75: mol_type = other DNA
gccctatttggggaatatgttaaatgattttgctggcgtggatcagcaacgagttatgcattgtcgtaaagcatt

SEQ ID NO: 643753 - DNA, 75 bp, synthetic construct
  source 1..75: mol_type = other DNA
catggtccctaaagtgggattttagcaacttcatttcgcaaatgggtgagttcggcaagatgctgaacatgatcg

SEQ ID NO: 643754 - DNA, 75 bp, synthetic construct
  source 1..75: mol_type = other DNA
tcagccagctgttgcggcagaacggcggagaccttagcaaagcactggcatcatataactgggggatcgggaatg

SEQ ID NO: 643755 - DNA, 75 bp, synthetic construct
  source 1..75: mol_type = other DNA
gcccgtttgactgttgaccgtcaaaagggtgtgaattcacagttaacccagcaactccccgcaggaccgagataa

SEQ ID NO: 643756 - DNA, 75 bp, synthetic construct
  source 1..75: mol_type = other DNA
cactcctgctgaccgaggaagggcaaagctatttcctcgatatcaaagagatattttcgcaattaaccgaagcga

SEQ ID NO: 643757 - DNA, 75 bp, synthetic construct
  source 1..75: mol_type = other DNA
tactgacgaccgaacgccaggcacgcaccgcgggcgatactgaaactctggctgctgccagaacgcacagcgatg

SEQ ID NO: 643758 - DNA, 75 bp, synthetic construct
  source 1..75: mol_type = other DNA
cggcttgggagttcggctgtaggctggcgggcatctgccattgatgagtggttaactttacatacaacaccaacc

SEQ ID NO: 643759 - DNA, 75 bp, synthetic construct
  source 1..75: mol_type = other DNA
caaacacggctggaaaagcctgccggatattcacagccgcgccaacaatcctaccagccggatgatgcgttttgc

SEQ ID NO: 643760 - DNA, 75 bp, synthetic construct
  source 1..75: mol_type = other DNA
tgggttcaatcaacgcctccacaagcagcaacccctggttgcaccgaatgatatcaagcgttatttcgtcacccc

SEQ ID NO: 643761 - DNA, 75 bp, synthetic construct
  source 1..75: mol_type = other DNA
gactaaatcacagatagtgaaactttttctaacaatgcttccagactttaatcataaagagactggtaagtatct

SEQ ID NO: 643762 - DNA, 75 bp, synthetic construct
  source 1..75: mol_type = other DNA
gagatatttaaacgtaatcctcaaaagctccatgttgtcgatattagtgaaaataatatggttgagctggtacga

SEQ ID NO: 643763 - DNA, 75 bp, synthetic construct
  source 1..75: mol_type = other DNA
ccgacacgatgaatacggcaggctgacggagaagacggaccgcatcccggcgggtgtgatacggacggacgacga

SEQ ID NO: 643764 - DNA, 75 bp, synthetic construct
  source 1..75: mol_type = other DNA
ctggtgttctacacgcggatacagcatggcgagccactggtcgagagccgctacctctacgacccgctgggacgg

SEQ ID NO: 643765 - DNA, 75 bp, synthetic construct
  source 1..75: mol_type = other DNA
atcagcggtattgggatttccgaggtaggttcgcatagccagatggttggcaaggttccgcaatcagtaagggat

SEQ ID NO: 643766 - DNA, 75 bp, synthetic construct
  source 1..75: mol_type = other DNA
ggctgaacttacccgactgctgggtatatcaagatctactatttacgtgaaaataaatccggcctcgaaatacca

SEQ ID NO: 643767 - DNA, 75 bp, synthetic construct
  source 1..75: mol_type = other DNA
aatatcagttggcgttttgttctacgctgcaaaacgttatatatcaccagttatttcaaaatataccccatggaa

SEQ ID NO: 643768 - DNA, 75 bp, synthetic construct
  source 1..75: mol_type = other DNA
acaggtttcagaagcggtcaacggtagcgggatcgtcggtaggttgttttgggattttcaggggaagagcatttc

SEQ ID NO: 643769 - DNA, 75 bp, synthetic construct
  source 1..75: mol_type = other DNA
caatagtaaggattatgtaatccaaccatgcgaaagtgagagtgattatgaaaagatattttttataattaagaa

SEQ ID NO: 643770 - DNA, 75 bp, synthetic construct
  source 1..75: mol_type = other DNA
aaatatagtgattataaaaaaaacttagttttgcatcataatgacgatgtaatttttttcaatcgttcagatata

SEQ ID NO: 643771 - DNA, 75 bp, synthetic construct
  source 1..75: mol_type = other DNA
ccgatgattaccgccaatacgctggcgggcggcattaccggcgtgctggtgatcgctttcggaatcaaacgtctg

SEQ ID NO: 643772 - DNA, 75 bp, synthetic construct
  source 1..75: mol_type = other DNA
gcccaggatcacctgatgacgtccattctggccaaagagttggtgactgaactcatcgacatctaccgcacccgc

SEQ ID NO: 643773 - DNA, 75 bp, synthetic construct
  source 1..75: mol_type = other DNA
gcgcatgccatacagactaagctgattgaagaagacgaaggaatggggaaaacgacgatgacgcttgtgatggta

SEQ ID NO: 643774 - DNA, 75 bp, synthetic construct
  source 1..75: mol_type = other DNA
aggttatcagttgccgccgggccagctggcgccggtaccggccggtgtcaggggcgcaggagcggagcttaaaaa

SEQ ID NO: 643775 - DNA, 75 bp, synthetic construct
  source 1..75: mol_type = other DNA
atgaaagcgagtccacacaacaataatgtctgggggacgacgtataacacccgtaataatgtcaccaccgatgcg

SEQ ID NO: 643776 - DNA, 75 bp, synthetic construct
  source 1..75: mol_type = other DNA
gatcataatgatgattcaagaattacttcagatttgatatatcttatatcaaagatcgaaaacaacaggaaaatt

SEQ ID NO: 643777 - DNA, 75 bp, synthetic construct
  source 1..75: mol_type = other DNA
tatacatctaattgtacaatcgatgtatacacaaaagaaggaagtaatacatatcttagcaatgaactcatattt

SEQ ID NO: 643778 - DNA, 75 bp, synthetic construct
  source 1..75: mol_type = other DNA
tcattatcgtcctgaaaggattgtggttacgccgcaaagcgaaagccgcgcaacaggagcttgtccatgaacatt

SEQ ID NO: 643779 - DNA, 75 bp, synthetic construct
  source 1..75: mol_type = other DNA
ctcacttactacgttatcgggccggtgatgtccgacctcatgggcgggctgctccacttcctgaataccattcct

SEQ ID NO: 643780 - DNA, 75 bp, synthetic construct
  source 1..75: mol_type = other DNA
gcttcacctttatgatccccatcatgggcgcttatattgcctcgtcgattgccgataaaccggctttcgctccgg

SEQ ID NO: 643781 - DNA, 75 bp, synthetic construct
  source 1..75: mol_type = other DNA
ccacggctaccggagaactccttgccaacggtaagcctcagtatgcaaatctgaggaaagcaatcgatacgccta

SEQ ID NO: 643782 - DNA, 75 bp, synthetic construct
  source 1..75: mol_type = other DNA
attttgttaaagaaaaaaaatgcaaaaaaatatcttatgcagcttcatttggtgttgataattggaatcatgaaa

SEQ ID NO: 643783 - DNA, 75 bp, synthetic construct
  source 1..75: mol_type = other DNA
caaatttaatgcaggccaccagcgctataatgcttttaaaaaattcgtcagtgagatttcggaaatcagcgcaaa

SEQ ID NO: 643784 - DNA, 75 bp, synthetic construct
  source 1..75: mol_type = other DNA
gaaaaacagattttgtgcccgaatgcaataatcagccaacagaacttaattcatcactttcctctttgatgaccg

SEQ ID NO: 643785 - DNA, 75 bp, synthetic construct
  source 1..75: mol_type = other DNA
accgctatggctcactctcggcacatcaaggcagctcttagggcaatccatgcagacagaccagacacttcctat

SEQ ID NO: 643786 - DNA, 75 bp, synthetic construct
  source 1..75: mol_type = other DNA
ttaagccatgccgtcaccacgtccggcattggcacactggcctaccgacgcgaaccggaagggaagaagaaccgc

SEQ ID NO: 643787 - DNA, 75 bp, synthetic construct
  source 1..75: mol_type = other DNA
accactgcctcaagcgggggtacaccggattaaagtcggaaggctggcccgtgtggatacgcacgaaatcactgt

SEQ ID NO: 643788 - DNA, 75 bp, synthetic construct
  source 1..75: mol_type = other DNA
ggcttcccgtatctgttccggggggcgatatgaagccactgcgcctgtcgctccctctcagaccggaagccgcgg

SEQ ID NO: 643789 - DNA, 75 bp, synthetic construct
  source 1..75: mol_type = other DNA
aaggtgacattcgataacaaaccagaacctttgccaccagtgggtgaactggccgaagtcacggttgacttgccg

SEQ ID NO: 643790 - DNA, 75 bp, synthetic construct
  source 1..75: mol_type = other DNA
gggtatatgcagtttactctgaggcaagcctgacaaaaacaatcctgctgtctttaatcatcctattagttagag

SEQ ID NO: 643791 - DNA, 75 bp, synthetic construct
  source 1..75: mol_type = other DNA
atccgacgtacctgtctctgacgtggcatgatgaggatggtattgtgatagcgtttgatggaatcaatagcgatt

SEQ ID NO: 643792 - DNA, 75 bp, synthetic construct
  source 1..75: mol_type = other DNA
gccgcgaagcagaaaccacaggcgctggctctggcatggagtgacgaagacggtatggtgattgagctgcggcag

SEQ ID NO: 643793 - DNA, 75 bp, synthetic construct
  source 1..75: mol_type = other DNA
atcacgggcgtcgtggactatgagcacgtccgcgagctggcccgcatcaatggcgacctgggccgcctgggcggc

SEQ ID NO: 643794 - DNA, 75 bp, synthetic construct
  source 1..75: mol_type = other DNA
cctgacgaacaatcaaacggaaatatttacgggtatcacattgatggtaaaagatggattaatgttagtggatat

SEQ ID NO: 643795 - DNA, 75 bp, synthetic construct
  source 1..75: mol_type = other DNA
aaaaccgttgtttggggcgattattacattgtccggtggagttaatggcgaaagaacctgtgaagttgaaattct

SEQ ID NO: 643796 - DNA, 75 bp, synthetic construct
  source 1..75: mol_type = other DNA
atgagatctggcacgccatcatcgacttcaaaaccgcgctaactgccagtggtcgtttacaacaagtgcggcaac

SEQ ID NO: 643797 - DNA, 75 bp, synthetic construct
  source 1..75: mol_type = other DNA
tgagagcgccctgcatattatgcgtcgcaaatacgatgaatggcagccacgggtcctcacctgtagcgcgctgga

SEQ ID NO: 643798 - DNA, 75 bp, synthetic construct
  source 1..75: mol_type = other DNA
agatgacggcggtccaccgtgaggaaggtgtcagtctttaccgcagctatgacagccgtggtcagttaatctcgg

SEQ ID NO: 643799 - DNA, 75 bp, synthetic construct
  source 1..75: mol_type = other DNA
taaagggcgggaaaagcgcgatggcagtacgctgggcgatcgcctgaattactgggatgtgaaaatgagtattca

SEQ ID NO: 643800 - DNA, 75 bp, synthetic construct
  source 1..75: mol_type = other DNA
cgtaattcgtcaccgcgtctgtatggcaaccagagtaatgtttataacgcggtgcaagagtggctgcgcgcaggc

SEQ ID NO: 643801 - DNA, 75 bp, synthetic construct
  source 1..75: mol_type = other DNA
cgttgtcactatcaacaaagtggcggtcattgagtttaactatggccgaaaacttaatgccttaagtaaagtctt

SEQ ID NO: 643802 - DNA, 75 bp, synthetic construct
  source 1..75: mol_type = other DNA
aagaagtactgaatcacctgttcgcgaatgaagatttcgatcgctattaccgccagacgcttttagcggtcaaaa

SEQ ID NO: 643803 - DNA, 75 bp, synthetic construct
  source 1..75: mol_type = other DNA
gcagtttgtttcgccaatggtgtatggagagcgacagatcacatgggatgaggcttactccaggtttaggagctt

SEQ ID NO: 643804 - DNA, 75 bp, synthetic construct
  source 1..75: mol_type = other DNA
attgccggcggcggcgacgatctacagggtatcaaaaaggggctgatggaaatggcggatctgatcgtcattaac

SEQ ID NO: 643805 - DNA, 75 bp, synthetic construct
  source 1..75: mol_type = other DNA
gggcccaggagttaatgctgttatgtgaagcggcgggttatgacgtggtgattatcgaaacggtcggcgtcggtc

SEQ ID NO: 643806 - DNA, 75 bp, synthetic construct
  source 1..75: mol_type = other DNA
cgcaaatatgaagaatggcaaccacgagtcctcacctgtagcgcactggaaaaatgcggtatcgatgagatttgg

SEQ ID NO: 643807 - DNA, 75 bp, synthetic construct
  source 1..75: mol_type = other DNA
ggagtggctgacctacggcagcggttacctggcggggatgaagctgggcgacacgccgctgctggagtacgcgcg

SEQ ID NO: 643808 - DNA, 75 bp, synthetic construct
  source 1..75: mol_type = other DNA
agttcttgttgctgattatcaaaagtatttcaaagtgtctgttgatacagcgtcatctgatgttaaaaagggcgt

SEQ ID NO: 643809 - DNA, 75 bp, synthetic construct
  source 1..75: mol_type = other DNA
aactatgcagcaggtttttgttccgctaccccggcgttaaggggaaatgaggtcagcatggatactatcgatctt

SEQ ID NO: 643810 - DNA, 75 bp, synthetic construct
  source 1..75: mol_type = other DNA
atcgcggcctgccgctggcgcttgtcagcacggaaggggcaacagaatggtgcgcagaatacgatgaatggggca

SEQ ID NO: 643811 - DNA, 75 bp, synthetic construct
  source 1..75: mol_type = other DNA
agaaaaccatgtcatggcaaacgctgtctgaacagctggttggcagtgtggaccttgccgatagaatgagaggca

SEQ ID NO: 643812 - DNA, 75 bp, synthetic construct
  source 1..75: mol_type = other DNA
tatgtgaaaggtttatgcttccaacctcgcagaagaacaatattgcggaaatgaaacgtaccttcctggaacctg

SEQ ID NO: 643813 - DNA, 75 bp, synthetic construct
  source 1..75: mol_type = other DNA
ttcgtgtcatccggctttatgaaagcctgtgtcagttccggagcacaggtgtctggatcaccacacatgactggt

SEQ ID NO: 643814 - DNA, 75 bp, synthetic construct
  source 1..75: mol_type = other DNA
agggagacatgacccagtacggcggcccgatagtcctggggtcggcaggcgtgagaattggcgcgccaaccggcg

SEQ ID NO: 643815 - DNA, 75 bp, synthetic construct
  source 1..75: mol_type = other DNA
cgcaacggcgatgtcacccgctacagttatgataatccacacagtgaattaccctctgcaactgaagatgcgacg

SEQ ID NO: 643816 - DNA, 75 bp, synthetic construct
  source 1..75: mol_type = other DNA
tcctatccgcgctggtttaggtgaaaacccacggactgcatatgtagtaccacgagtggagtgggaaaaatgtcg

SEQ ID NO: 643817 - DNA, 75 bp, synthetic construct
  source 1..75: mol_type = other DNA
tgacgaccgaattattcgaaataggtagctatggcacaggttcattaaatattacggataagggtacgtcacgag

SEQ ID NO: 643818 - DNA, 75 bp, synthetic construct
  source 1..75: mol_type = other DNA
gattatcggtggcaatgccaccggtatcggtggccctgaatgtgcaggatcaagactctgtcatcacggtacgca

SEQ ID NO: 643819 - DNA, 75 bp, synthetic construct
  source 1..75: mol_type = other DNA
atgagccgaaagaaccgatgtcgattcttcccctgcttttatccactccttcacagagcacagccagtgccagtt

SEQ ID NO: 643820 - DNA, 75 bp, synthetic construct
  source 1..75: mol_type = other DNA
cgatgcgctgtatctcgatgaaatcacacttaccagcgagcaagatgcagctctgcgctacggccaggtagaagt

SEQ ID NO: 643821 - DNA, 75 bp, synthetic construct
  source 1..75: mol_type = other DNA
ctgattgatgaaagcgactttacccgtgccgtagatattcgcaccgataacatcgtcgcaacgggcattacctat

SEQ ID NO: 643822 - DNA, 75 bp, synthetic construct
  source 1..75: mol_type = other DNA
agcaaatgcagggtaatgattttgggttatccgtatcactcactatcgaaaaaaaccgtagcgctgcaaaattac

SEQ ID NO: 643823 - DNA, 75 bp, synthetic construct
  source 1..75: mol_type = other DNA
caattgatgaagcattattgacgctggaacgcgatcgcgttgaacagcagtcgctgctatcgcatccggcaaact

SEQ ID NO: 643824 - DNA, 75 bp, synthetic construct
  source 1..75: mol_type = other DNA
aagcgaaatctacaacacccgcttgtatatctttaccgaccgccctctgtatcgtgcaggcgatcgtgttgatgt

SEQ ID NO: 643825 - DNA, 75 bp, synthetic construct
  source 1..75: mol_type = other DNA
tatatttttaccgatcgcccgctatatcgcgcaggcgatcgtgtcgatgttaaagtgatgggccgcgagttccac

SEQ ID NO: 643826 - DNA, 75 bp, synthetic construct
  source 1..75: mol_type = other DNA
gtgcgtcgcgaagaacgggccgaaggtgaggcgctggcagaagagatgacgctacgcgatgcgctctccctgttt

SEQ ID NO: 643827 - DNA, 75 bp, synthetic construct
  source 1..75: mol_type = other DNA
gttccggtcatggtaatggcggggggaatagtaattccggtggtggctcgggaacaggcggtaatctgtcagcag

SEQ ID NO: 643828 - DNA, 75 bp, synthetic construct
  source 1..75: mol_type = other DNA
gatagtggcttaccgatggcagttattggatatagtgttgcagaggaagcgggtatgcgacgtcttgcaagctat

SEQ ID NO: 643829 - DNA, 75 bp, synthetic construct
  source 1..75: mol_type = other DNA
ctgctggcgtcggctgagatgcagcacagcgaattgcgtggcggcgtgttgctgctggccctgctgcattcgccg

SEQ ID NO: 643830 - DNA, 75 bp, synthetic construct
  source 1..75: mol_type = other DNA
gtcaattgcaataggtggcgataccaaagctaccggatggggggctattgttattggtggggatgatttaactcc

SEQ ID NO: 643831 - DNA, 75 bp, synthetic construct
  source 1..75: mol_type = other DNA
tgagctgggtgtacgcctgctttcgttacgtagcgtggcagattacgtgcgtcgcgaagaacgggcagaaggtga

SEQ ID NO: 643832 - DNA, 75 bp, synthetic construct
  source 1..75: mol_type = other DNA
catgggctaaacataagttaactggagggggcgaagactggcgttgggttggtcagggcgtgccggacattctct

SEQ ID NO: 643833 - DNA, 75 bp, synthetic construct
  source 1..75: mol_type = other DNA
gagccaccggcgctgatacgactgagcagccgagtcagacaattgctcccacccgttgacctgacagaactgttg

SEQ ID NO: 643834 - DNA, 75 bp, synthetic construct
  source 1..75: mol_type = other DNA
tggcagcacggttggatgaaacctggaaaacggtggcatcacgttttgaccgcaataccgccgtagacatctgca

SEQ ID NO: 643835 - DNA, 75 bp, synthetic construct
  source 1..75: mol_type = other DNA
ggatgatgccgcctgggattaccttaaagcgcttaataccggccatccgggcggtgttatgtcaacacacgctaa

SEQ ID NO: 643836 - DNA, 75 bp, synthetic construct
  source 1..75: mol_type = other DNA
cgcgccaccggcttagctgggtaaaacagaattacctccgggcagaaacgctggtcagcgccaatgcccgcctgg

SEQ ID NO: 643837 - DNA, 75 bp, synthetic construct
  source 1..75: mol_type = other DNA
tgctcaggcaataatggtggtcggaagagttaacaagacactgtatcttctcaactatattgatgatgaggacta

SEQ ID NO: 643838 - DNA, 75 bp, synthetic construct
  source 1..75: mol_type = other DNA
gatggtatgcgttttgtcacaccagtgaaaacggtgaattctggccccaacagaaaatactttggttcagggcgc

SEQ ID NO: 643839 - DNA, 75 bp, synthetic construct
  source 1..75: mol_type = other DNA
accctcatgaaatagaacttgttaaacgtaatgctacccttcacggcatgagcatgagcagagaaattgctattc

SEQ ID NO: 643840 - DNA, 75 bp, synthetic construct
  source 1..75: mol_type = other DNA
atttcagaaaagacgttattgaagtgattgaactgtgtaagcaaattgattcaaaacttgaaacgttaaccaaga

SEQ ID NO: 643841 - DNA, 75 bp, synthetic construct
  source 1..75: mol_type = other DNA
gttgcgcctggcgcgactaaccggagcgagcggcgagtaaaaatgctggaacgtccacggcgtgaagaggtggat

SEQ ID NO: 643842 - DNA, 75 bp, synthetic construct
  source 1..75: mol_type = other DNA
aagacgagcgtgtcgtcattttagaggacgttcatgaagtaacggtcaatcacgttgtcgaggccgtttatatgg

SEQ ID NO: 643843 - DNA, 75 bp, synthetic construct
  source 1..75: mol_type = other DNA
tttataattagtatctttttttattctcgggatgaaaggaagtatattactaatacactttcagataaattaaaa

SEQ ID NO: 643844 - DNA, 75 bp, synthetic construct
  source 1..75: mol_type = other DNA
gtgacggaggaagagatcagacaggcgctgaccgtgcgtgaaccactggtgagaaatgtggtgaatcgtctgaca

SEQ ID NO: 643845 - DNA, 75 bp, synthetic construct
  source 1..75: mol_type = other DNA
atatgctatagaacctgacagtgccattaatattaccaaacgttttgccaaaaatttgaaaatttataatcttcc

SEQ ID NO: 643846 - DNA, 75 bp, synthetic construct
  source 1..75: mol_type = other DNA
gcgtttaatacggagtcacaagagttttactttaacgctgacgattctgttatgtcgttccgagaatggaaagag

SEQ ID NO: 643847 - DNA, 75 bp, synthetic construct
  source 1..75: mol_type = other DNA
attaagacattaggggaaaacaaaactactttacctcacccggtaggtatagttataggtaagaacgttaacatc

SEQ ID NO: 643848 - DNA, 75 bp, synthetic construct
  source 1..75: mol_type = other DNA
gcatcggcaaccccgcaaattattactacttcccaatccgaaaaataattgattttgtaaaagacaatatttttg

SEQ ID NO: 643849 - DNA, 75 bp, synthetic construct
  source 1..75: mol_type = other DNA
aatggcctgctcaccatctccactgagcgtagctgggcgatgacgcacagtatcagcggtagcggtgatgtgaca

SEQ ID NO: 643850 - DNA, 75 bp, synthetic construct
  source 1..75: mol_type = other DNA
tcaatttgctggaacacgatgatagccatgtcggcgttcaactggtgaaggcgcaaacggttattgggtcgggtg

SEQ ID NO: 643851 - DNA, 75 bp, synthetic construct
  source 1..75: mol_type = other DNA
ttgcgcaggctgccgacgccgaaccgctgaacactgcgattgcagacgctcagcaactggttgcggataaggtcg

SEQ ID NO: 643852 - DNA, 75 bp, synthetic construct
  source 1..75: mol_type = other DNA
tgtcatgtcattgctttacgtaaaaataatggcggaattgaggtgtttaatccaaacgaagggttattcgtttct

SEQ ID NO: 643853 - DNA, 75 bp, synthetic construct
  source 1..75: mol_type = other DNA
tggcgagttataccgggatgcctgtttccaccactcacgtactctcctcttccgtagcggggacgatggtcgttg

SEQ ID NO: 643854 - DNA, 75 bp, synthetic construct
  source 1..75: mol_type = other DNA
tgcctcaggatacgaagattggaaccatatctgtgactaatctgggaagtaaccatggttgggccatttatactg

SEQ ID NO: 643855 - DNA, 75 bp, synthetic construct
  source 1..75: mol_type = other DNA
ccatgtgtatcttgataagaaaatttcagactcatgcatattcaataaattaacaaactggcttatagcaattat

SEQ ID NO: 643856 - DNA, 75 bp, synthetic construct
  source 1..75: mol_type = other DNA
tacaacttcatggaaatggtttaagaaatagcgagttaagcttaattgcagaaattaacagctttattaaaaata

SEQ ID NO: 643857 - DNA, 75 bp, synthetic construct
  source 1..75: mol_type = other DNA
ttttgaaattacagatttgcacccgacatcttcaaatggcgatctggacgtcaccatcgacgagcgcgatggtaa

SEQ ID NO: 643858 - DNA, 75 bp, synthetic construct
  source 1..75: mol_type = other DNA
atgtgaacgttatgcctggggggacactgcgtgtcgctaaaaccacaatcggcggcaacctggagaatggcggca

SEQ ID NO: 643859 - DNA, 75 bp, synthetic construct
  source 1..75: mol_type = other DNA
tgttacaaatattgttgcttctgatgagatgtactgtgtatatgctatagaacctgacagtgccattaacattac

SEQ ID NO: 643860 - DNA, 75 bp, synthetic construct
  source 1..75: mol_type = other DNA
atcttaattgttttttaaattcaatggttgccgtttcgcagccaactgttgataaaatcatttttggtgctgaag

SEQ ID NO: 643861 - DNA, 75 bp, synthetic construct
  source 1..75: mol_type = other DNA
tgcctgcgctcaatgccaaacatatattttgtatcaccattaaattattgtacgttgcaagtcaccattcacctc

SEQ ID NO: 643862 - DNA, 75 bp, synthetic construct
  source 1..75: mol_type = other DNA
ctttacagcaatggcgtggcagaagagcagaatcccaccccactgccggccgtcgctgaggcgctgatcaacgcg

SEQ ID NO: 643863 - DNA, 75 bp, synthetic construct
  source 1..75: mol_type = other DNA
atgcatcacctttccgggatagagtctactcaatataaatatgcacccaaagaagaaaaggtgaacgcgatgagc

SEQ ID NO: 643864 - DNA, 75 bp, synthetic construct
  source 1..75: mol_type = other DNA
tggcgatctcttttatattcatgctgacgataaacactcctacgcttccgttaacgatctggttttgcagaatat

SEQ ID NO: 643865 - DNA, 75 bp, synthetic construct
  source 1..75: mol_type = other DNA
gcatacaacacgaagaccgaagagttttattacaatgctgatggctccgctatgaccctgcgggaatggcgagcg

SEQ ID NO: 643866 - DNA, 75 bp, synthetic construct
  source 1..75: mol_type = other DNA
cgcgttagcctgctgccacctgatgggctggagtggaggccggggcaattgtctgttgctgatgcgatcttttcc

SEQ ID NO: 643867 - DNA, 75 bp, synthetic construct
  source 1..75: mol_type = other DNA
ccagatttccccggcgttcgcgtagacgatgccgcattgaaaccgcgcgagcacgccgtgccggaatcaacaacc

SEQ ID NO: 643868 - DNA, 75 bp, synthetic construct
  source 1..75: mol_type = other DNA
aaatgtggctgctcatgccgtggtgaatgccgcactggtggcacagggaaataacgttcttgcctgtgccgcgga

SEQ ID NO: 643869 - DNA, 75 bp, synthetic construct
  source 1..75: mol_type = other DNA
ttgcgggatgctggcgttcacgctgtggcattcggtgacaagttgccgaggcaccgcaacgctcaacaactcgcg

SEQ ID NO: 643870 - DNA, 75 bp, synthetic construct
  source 1..75: mol_type = other DNA
atgatgccgcattgaaaccgcgcgagcacgccgtttcggcatcgacaaccgggcagaatgcttttctcaaagcct

SEQ ID NO: 643871 - DNA, 75 bp, synthetic construct
  source 1..75: mol_type = other DNA
cggatgaccggtgcacgttatctgcaccaatttggacgtaatgcacaaggcgaatttgtctaccgcgagctgaca

SEQ ID NO: 643872 - DNA, 75 bp, synthetic construct
  source 1..75: mol_type = other DNA
tctgagcaaagagcatttactcttacgggtccttacggaagtggaaaatcatcccttgcagtaactttactttca

SEQ ID NO: 643873 - DNA, 75 bp, synthetic construct
  source 1..75: mol_type = other DNA
tatttgcgcatgaaaaaatacggtattgataaaatggattttcgctatgagaagaaagataaaaagacacaaact

SEQ ID NO: 643874 - DNA, 75 bp, synthetic construct
  source 1..75: mol_type = other DNA
aaacagcagttaacgaatagtgatactccgaagaaaagcacggtcccaaatgaagataaaaaaggcataagatga

SEQ ID NO: 643875 - DNA, 75 bp, synthetic construct
  source 1..75: mol_type = other DNA
tggtcacgatgatgtcttcgaaccgtggtatccgctgggaacggcgaatatgctgcaagtgctgcatatggggct

SEQ ID NO: 643876 - DNA, 75 bp, synthetic construct
  source 1..75: mol_type = other DNA
gccagccacaccacggcaatgcactcctataacggggcgtatacctcacgcctgttccgcttgctgaaaatgtcc

SEQ ID NO: 643877 - DNA, 75 bp, synthetic construct
  source 1..75: mol_type = other DNA
tgaacctgagataaaaaattttgatgctgttatttattattcgccatcaattttttttggtccattagtcagaaa

SEQ ID NO: 643878 - DNA, 75 bp, synthetic construct
  source 1..75: mol_type = other DNA
agagaagttactttcttctcatcccgtagacgtacagaagagacctattgggaagtttcagtagacaacggagtg

SEQ ID NO: 643879 - DNA, 75 bp, synthetic construct
  source 1..75: mol_type = other DNA
gctaatcagctactacatgagaaattttctgttacctctgctattgacaatataatgaagcacttaaataaaaaa

SEQ ID NO: 643880 - DNA, 75 bp, synthetic construct
  source 1..75: mol_type = other DNA
cggcgttttaatgctggacgattcggtcagtttgcagatgatggagacggatccagccccgctggatgaactcgt

SEQ ID NO: 643881 - DNA, 75 bp, synthetic construct
  source 1..75: mol_type = other DNA
aggactcttctcgtttccatttgaagaagatcctcattgatgaaaataaaaacaatctactttctcaaattagta

SEQ ID NO: 643882 - DNA, 75 bp, synthetic construct
  source 1..75: mol_type = other DNA
tccccggaacctcatgcgttctatgatttcctgaaatcaacaaaagatagtgaagatcaaacatacactccagag

SEQ ID NO: 643883 - DNA, 75 bp, synthetic construct
  source 1..75: mol_type = other DNA
cgtctgctttggcttgaaaaagaaattaatacgggtgagagcggcggtttctgccgctacatcctggaaatggcg

SEQ ID NO: 643884 - DNA, 75 bp, synthetic construct
  source 1..75: mol_type = other DNA
gctaagttagccggaatacctatgccgccatggctgaagctgtgggctatttatgccgggtatctggtggacgac

SEQ ID NO: 643885 - DNA, 75 bp, synthetic construct
  source 1..75: mol_type = other DNA
gctgatggcgatgcggcgcggcatgaatggctttaccgccgattaccagtcgatgctgcaaaagacagggttcaa

SEQ ID NO: 643886 - DNA, 75 bp, synthetic construct
  source 1..75: mol_type = other DNA
cgtatttgtactctgatcgcgaaaatattggtgccagtgcgaagtcatcctgggattacacgaaacaaaatattg

SEQ ID NO: 643887 - DNA, 75 bp, synthetic construct
  source 1..75: mol_type = other DNA
atcccggggcggaaggcttcctgaatcgccttggtgtacagacccgtgacgccagcggtaacatgcgcgacatgg

SEQ ID NO: 643888 - DNA, 75 bp, synthetic construct
  source 1..75: mol_type = other DNA
ggaagcagaagcacaacgtgcgctgaacgatgctatcaacgtactttctgatgaacaaaccagccttaaattcaa

SEQ ID NO: 643889 - DNA, 75 bp, synthetic construct
  source 1..75: mol_type = other DNA
atttcggatagtcgatggtgtcggcgatatcatcgagtggtgggggaaactggatgccgaaacgaaaaccctgat

SEQ ID NO: 643890 - DNA, 75 bp, synthetic construct
  source 1..75: mol_type = other DNA
cccttacgactacacactgtattgcaggaagtgggtaaaaccaaatctgacttgtacgccacaggatgattccca

SEQ ID NO: 643891 - DNA, 75 bp, synthetic construct
  source 1..75: mol_type = other DNA
agatgcaaaaccagatggacccggtgtacacgccggcgcgaaaaatccacctgtaccactgcgaccatcgcggcc

SEQ ID NO: 643892 - DNA, 75 bp, synthetic construct
  source 1..75: mol_type = other DNA
cgacggccatacgtgtggatggcgcagaagataccgggttcagtgctgaacgtgaaggaggggcgctgacggaag

SEQ ID NO: 643893 - DNA, 75 bp, synthetic construct
  source 1..75: mol_type = other DNA
caaatcgagccctggcaggcccgttgcttttcattgcaggtagtggaaagtcgccacgaggtggtgctggataag

SEQ ID NO: 643894 - DNA, 75 bp, synthetic construct
  source 1..75: mol_type = other DNA
ggatccgctctgcggatgcgcaggcgctacagcagtgtggaatggagtggatttttgctggcggtaaaccggcgt

SEQ ID NO: 643895 - DNA, 75 bp, synthetic construct
  source 1..75: mol_type = other DNA
ggcgggttgtgtttgtaataatggcgatgataatgcattattacgtgcggcaataaggttagcaattgatcagga

SEQ ID NO: 643896 - DNA, 75 bp, synthetic construct
  source 1..75: mol_type = other DNA
aagccaagggttcggtgatggctttcttggcaaggtcaggccacctatggcttgtgaagcaccattccatctcaa

SEQ ID NO: 643897 - DNA, 75 bp, synthetic construct
  source 1..75: mol_type = other DNA
aaattcacaccaagcggggcgagactcttaattcgcgtcggatcactacgccttaatgaaaatcatgcaaccaaa

SEQ ID NO: 643898 - DNA, 75 bp, synthetic construct
  source 1..75: mol_type = other DNA
gatgctatagattatttatttctcggacaaccaagaaatgatacgattcttgctgagtctggtgagtgtaaaatc

SEQ ID NO: 643899 - DNA, 75 bp, synthetic construct
  source 1..75: mol_type = other DNA
taccggacaatccctttgtttcaacctgcgggcgaatccaacaatttgtaaagcgggcaaacgccacgacttgct

SEQ ID NO: 643900 - DNA, 75 bp, synthetic construct
  source 1..75: mol_type = other DNA
agacgccaatgtttacgcgtcagatcaagcagattgcaaccgatgatgaattaaaggaattacaaaaagaactca

SEQ ID NO: 643901 - DNA, 75 bp, synthetic construct
  source 1..75: mol_type = other DNA
cagcgaaggggggaaaccggggaatgtactgaccgttaacggtaactataccggaaacaatggcctgatgacgtt

SEQ ID NO: 643902 - DNA, 75 bp, synthetic construct
  source 1..75: mol_type = other DNA
ctcctggcacattcgcgatgtggtggctaggctgcaccgggatctggctgaaatcggaaggtggcaccaacgttt

SEQ ID NO: 643903 - DNA, 75 bp, synthetic construct
  source 1..75: mol_type = other DNA
aacgtcgctgctgccgtgatgcagaactgtgctgatgacgtaccgtttatcggaccgaaaacctgcgtggattta

SEQ ID NO: 643904 - DNA, 75 bp, synthetic construct
  source 1..75: mol_type = other DNA
ggcggtgttgcggaacctgcatttccgtgcggcaccggcaggtgaacatgtactggctgcgattcattatctggc

SEQ ID NO: 643905 - DNA, 75 bp, synthetic construct
  source 1..75: mol_type = other DNA
ttttgtgtcgcaactaacgccacagagcgccagataatggcgtggtgtgcggatcgtcgtgcagacgtcactttg

SEQ ID NO: 643906 - DNA, 75 bp, synthetic construct
  source 1..75: mol_type = other DNA
ggccggtttccttgaaggccggtattcctacccccgtccgggctaccacccatgagtgtaggaactccggtggtg

SEQ ID NO: 643907 - DNA, 75 bp, synthetic construct
  source 1..75: mol_type = other DNA
acaccctgaatttgtctttgtgtttgcggctgtccgtcgcgcagaccgtcatccccgtatctgcatgcttcgcac

SEQ ID NO: 643908 - DNA, 75 bp, synthetic construct
  source 1..75: mol_type = other DNA
tcaagtatagaaaaaaacgctttacatcggcctctacctgatgtggccaaacgcctagtgcagcatcttgcagag

SEQ ID NO: 643909 - DNA, 75 bp, synthetic construct
  source 1..75: mol_type = other DNA
atttctgccgaagcccgtgcatcaagaagtgatacagcacatccgggcgcttggcctgttaccagttggagataa

SEQ ID NO: 643910 - DNA, 75 bp, synthetic construct
  source 1..75: mol_type = other DNA
ttttagtctatactgattatgaaaaagaaaagatcaatcaaaaaaaatgtttcgcattgaataatgggttggatt

SEQ ID NO: 643911 - DNA, 75 bp, synthetic construct
  source 1..75: mol_type = other DNA
cagaggtgtttggcgttccagaaaacaatatccaagacaacaaatcccttgagcttataggccttgattccatca

SEQ ID NO: 643912 - DNA, 75 bp, synthetic construct
  source 1..75: mol_type = other DNA
cgactggaacatcagccactacttcgacggtaaccaccgagccaaaagacccaataccatggtttggattaacag

SEQ ID NO: 643913 - DNA, 75 bp, synthetic construct
  source 1..75: mol_type = other DNA
tgttaacctgcaggacagcgtgactgccgctgtcagtggtgtgttagtgacatacatggtcgtcaggatggtatc

SEQ ID NO: 643914 - DNA, 75 bp, synthetic construct
  source 1..75: mol_type = other DNA
gctcggctgcaccgggatctggttgaaatcggaaggcggcaccaacgtgtgcgtcgatttctggtgcggtactgg

SEQ ID NO: 643915 - DNA, 75 bp, synthetic construct
  source 1..75: mol_type = other DNA
caggggtggctactgttgtagaacgtttattaaataatggtaaggctctgagtaacagacaagccaaaaatgatc

SEQ ID NO: 643916 - DNA, 75 bp, synthetic construct
  source 1..75: mol_type = other DNA
tctggtcaaacttccaggccgatccgcaggaaattcgcgtactgtgggagatgaaaaaagatcgtctgaagtatg

SEQ ID NO: 643917 - DNA, 75 bp, synthetic construct
  source 1..75: mol_type = other DNA
atatccatgctatactgagttaaacaaaataagagccatgcaactaaacaatgcttacatttcagattttcaaaa

SEQ ID NO: 643918 - DNA, 75 bp, synthetic construct
  source 1..75: mol_type = other DNA
cgatgtggcgttaggatcttacggcgagaacccgcgcggtattaccgacaaaatgaccagcgccgatatgttgcg

SEQ ID NO: 643919 - DNA, 75 bp, synthetic construct
  source 1..75: mol_type = other DNA
cgcgcagctggccgccgcagtcagtaccaccacaacagatctaaaaaaccaggtgacgggatttattcaggaacg

SEQ ID NO: 643920 - DNA, 75 bp, synthetic construct
  source 1..75: mol_type = other DNA
cgccgcctgaagcatcacatcaaccgtatgtggctggagaaaatgccggtaccagccatcgtaaacgccgcccag

SEQ ID NO: 643921 - DNA, 75 bp, synthetic construct
  source 1..75: mol_type = other DNA
aaaacaacatggggtcgagttggcgtatgcacaggcgatcatggggcatagttcagggtctattacttacgaccg

SEQ ID NO: 643922 - DNA, 75 bp, synthetic construct
  source 1..75: mol_type = other DNA
tcactctcgatttcggtgcgctctatcagggctactgctctgatatgacgcgcaccttgctggtgaatggcgaag

SEQ ID NO: 643923 - DNA, 75 bp, synthetic construct
  source 1..75: mol_type = other DNA
gctcctggtggctggctgggcgggtatagtatttagccgccgggtgattcccgccgtccctgatgtctggcacgc

SEQ ID NO: 643924 - DNA, 75 bp, synthetic construct
  source 1..75: mol_type = other DNA
tcaacggcggtgatgatttttaacgcgggctgggtcagctttcaaaactggcgtgcgggcaggctttctttgccc

SEQ ID NO: 643925 - DNA, 75 bp, synthetic construct
  source 1..75: mol_type = other DNA
ggactttttatttttgatgaggggcacatgattggggccgatgaacgagaggttcggtatgaagttcaaattcaa

SEQ ID NO: 643926 - DNA, 75 bp, synthetic construct
  source 1..75: mol_type = other DNA
ttgtcgccagcggctggcgtggggcgctgccgcacggcaaagccagcgacaagattgttgcagcgggcgagtttg

SEQ ID NO: 643927 - DNA, 75 bp, synthetic construct
  source 1..75: mol_type = other DNA
cgattctccccggcgtgcgttgccagcaggttgacgacgccgcgcgtcgggtcattacagaagccggttatggag

SEQ ID NO: 643928 - DNA, 75 bp, synthetic construct
  source 1..75: mol_type = other DNA
ctacacgataatcaaaactatgcttatttagatctaagccctggatttaactttggagcatggagatttagaaac

SEQ ID NO: 643929 - DNA, 75 bp, synthetic construct
  source 1..75: mol_type = other DNA
gaatatacgtcaaaaatatagtaacaataattattatggtgtttcgggaaatactacattacgttatcagttagg

SEQ ID NO: 643930 - DNA, 75 bp, synthetic construct
  source 1..75: mol_type = other DNA
ggcaaatgaactgcggttaatgagagagcagatagaaatatacaataacaccaatgaaaagcaggggtataagat

SEQ ID NO: 643931 - DNA, 75 bp, synthetic construct
  source 1..75: mol_type = other DNA
gccgggcaatccctgcggtacctgatgtatggtatgcgcgcatctatgtactgctgctgtacctggtactcctcg

SEQ ID NO: 643932 - DNA, 75 bp, synthetic construct
  source 1..75: mol_type = other DNA
ggcgtcgcctgtccctgccagtggtcaccggcggcggtgtgattatcggtacgatcgccgcattgctgggcgtgg

SEQ ID NO: 643933 - DNA, 75 bp, synthetic construct
  source 1..75: mol_type = other DNA
tttgaaaaacaagaaaaaacaggtggcgcaatatctttaaaatattcaaaagacttccttggaaccggcactaac

SEQ ID NO: 643934 - DNA, 75 bp, synthetic construct
  source 1..75: mol_type = other DNA
attcgataaagtaaataaacgccagactaactggcataccctcacatctgacacgggggcccgtgagatggagag

SEQ ID NO: 643935 - DNA, 75 bp, synthetic construct
  source 1..75: mol_type = other DNA
gagaacggccacggcgtggtgttcccggctgaactggtgcggctgctggacaggctggaggaagaaatccgggca

SEQ ID NO: 643936 - DNA, 75 bp, synthetic construct
  source 1..75: mol_type = other DNA
gcggtcgtcatgcactcgctctaccggcacggtgaaatgatcaaggtttcggaattcaagaatgtcatcggccga

SEQ ID NO: 643937 - DNA, 75 bp, synthetic construct
  source 1..75: mol_type = other DNA
ttcttacagcagcatctcaccgagtccatcgttgccgatgcggcggaacgagatggaaaggactttcttttcgaa

SEQ ID NO: 643938 - DNA, 75 bp, synthetic construct
  source 1..75: mol_type = other DNA
gtggagcaactggccagacaggtggagccggaatacacaccggcgcgaaaagctcatctttatcactgcgaccac

SEQ ID NO: 643939 - DNA, 75 bp, synthetic construct
  source 1..75: mol_type = other DNA
ctcagcctcagcgttccccgacacactgcccgtaccgaatacggccccgacaggggtatccgcctttcggcggtg

SEQ ID NO: 643940 - DNA, 75 bp, synthetic construct
  source 1..75: mol_type = other DNA
gagaggtggatggaatatgtatcagtatccgttgaatcccatacaagtgatagacccaatggggttagatgcgat

SEQ ID NO: 643941 - DNA, 75 bp, synthetic construct
  source 1..75: mol_type = other DNA
cggcacgctacgcctacgaatggtatgaagaagctcccaacgccgcctatggttatatcgtcggttccgccattg

SEQ ID NO: 643942 - DNA, 75 bp, synthetic construct
  source 1..75: mol_type = other DNA
gcgacggtcgctatgaataacggccagatcaatctgagctatctcggccctgatgatttgtgggtagttgcgaag

SEQ ID NO: 643943 - DNA, 75 bp, synthetic construct
  source 1..75: mol_type = other DNA
tactacagccgatattggtaaaatttgtatttcaaccttgatacaagcttctgtcatatatttgatttttacact

SEQ ID NO: 643944 - DNA, 75 bp, synthetic construct
  source 1..75: mol_type = other DNA
cggcacgctacgcctacgaatggcatgaagaagcccccaacgccgcctatggttatatcgtcggttccgccattg

SEQ ID NO: 643945 - DNA, 75 bp, synthetic construct
  source 1..75: mol_type = other DNA
ctaatatggctaatgttaattttaataatgccaatttaagcaattgccatttcaactgttctgttttaacaaaag

SEQ ID NO: 643946 - DNA, 75 bp, synthetic construct
  source 1..75: mol_type = other DNA
gtgtatatgccgcctgaaaatgacaaacaataacgcgcaccatcaatgtgaaaagtggtttattgccttaatggg

SEQ ID NO: 643947 - DNA, 75 bp, synthetic construct
  source 1..75: mol_type = other DNA
aggcgcaatcctcgggcaaagatactgttaaaaaggtagggatcggcgggttctcaatgtttgcgcgagttagcg

SEQ ID NO: 643948 - DNA, 75 bp, synthetic construct
  source 1..75: mol_type = other DNA
atgcctgatgcgacgcagatgcgtcttatcatgccgacaaaaccgtgctcacccgtaggccggataaggcgttca

SEQ ID NO: 643949 - DNA, 75 bp, synthetic construct
  source 1..75: mol_type = other DNA
gccgcaacataaccctcgatcgcgctgctgatgtgaaagccggtaataggctgtttttgaatcttccgtcaggca

SEQ ID NO: 643950 - DNA, 75 bp, synthetic construct
  source 1..75: mol_type = other DNA
ctgggtcaaagaatcgatgcgactcagatagacaaatgggaactttatcgcatcgcccagtattgcgatcaactg

SEQ ID NO: 643951 - DNA, 75 bp, synthetic construct
  source 1..75: mol_type = other DNA
tactccagaaaaacaacggcgataaagtcggcacccgcgttgagtatgctatcgatctgtcggtcgatggcgggc

SEQ ID NO: 643952 - DNA, 75 bp, synthetic construct
  source 1..75: mol_type = other DNA
acgctgaaagaaatagcggctgcgatcaataacgaccagaatttcagcacaactatcaacaatgccttggctctc

SEQ ID NO: 643953 - DNA, 75 bp, synthetic construct
  source 1..75: mol_type = other DNA
atcggcattgatatttcagactctgtaaccagtaccagaagtgatgttgctgcaagttcgctggcggttaaaaaa

SEQ ID NO: 643954 - DNA, 75 bp, synthetic construct
  source 1..75: mol_type = other DNA
tcagagttttacaccacaacccgcaaaccctctgcgggagatgttggtgcatacacgcaggcagaatgtaactca

SEQ ID NO: 643955 - DNA, 75 bp, synthetic construct
  source 1..75: mol_type = other DNA
ttatggttccatgaccttttcaggttggttgaatcagttgtcagtagataaaatcaacaggaggaatgcttatgc

SEQ ID NO: 643956 - DNA, 75 bp, synthetic construct
  source 1..75: mol_type = other DNA
tggctgtggaactattcatcttgcaggttgcgttattgaggttatgggtaataaaggtgccatgaccatccgtgt

SEQ ID NO: 643957 - DNA, 75 bp, synthetic construct
  source 1..75: mol_type = other DNA
gcggctacagcgactaaattgcagacggcgtgtactatcaacggtgtctcgtttgacggttctaaaaacattgag

SEQ ID NO: 643958 - DNA, 75 bp, synthetic construct
  source 1..75: mol_type = other DNA
ctttaacgcccattgccaggtgtccatttcaccatctcacgccatttctcttgctaccgagcaaatgggggagat

SEQ ID NO: 643959 - DNA, 75 bp, synthetic construct
  source 1..75: mol_type = other DNA
tttgcgattatacggtcatggtcaaaggcaccgtcctggcaagcgggccgacagacaccacttttacagccgaga

SEQ ID NO: 643960 - DNA, 75 bp, synthetic construct
  source 1..75: mol_type = other DNA
aaataaagaaaaagtgggaatgtggtcggccttcacttcctcctcatcagggtactttccagcattctagctttt

SEQ ID NO: 643961 - DNA, 75 bp, synthetic construct
  source 1..75: mol_type = other DNA
cacacatgctaagacatgcatgtggctatgctttggccgataggggtgttgatactcgtctaatacaagattatt

SEQ ID NO: 643962 - DNA, 75 bp, synthetic construct
  source 1..75: mol_type = other DNA
ttgtacctctcatactggcatgtcacaaactgaggataatattcatgcagtcgctatgaagattactgcagatat

SEQ ID NO: 643963 - DNA, 75 bp, synthetic construct
  source 1..75: mol_type = other DNA
tatagatatagctttatatgcaaataataaatgtgacgatagaattacgagaagagtttaccttaataaagataa

SEQ ID NO: 643964 - DNA, 75 bp, synthetic construct
  source 1..75: mol_type = other DNA
atggcgtacatggctgaggtaaatctttataaagtaatagcgccatatgttaatttatttaaagccgaccttagt

SEQ ID NO: 643965 - DNA, 75 bp, synthetic construct
  source 1..75: mol_type = other DNA
agtcggacaaattccctgtatattcatataaacgagaggaggattataataaaaaactttgccaagatgataatt

SEQ ID NO: 643966 - DNA, 75 bp, synthetic construct
  source 1..75: mol_type = other DNA
gcaccctcgcaccagacctggacatccgcatcccgtatgccacggacccggcgggcaaccggctgccggacccgg

SEQ ID NO: 643967 - DNA, 75 bp, synthetic construct
  source 1..75: mol_type = other DNA
cgtttacaacctgtttgataccgattacgtcgcctcaatcaacaagagcggctaccgttatcacccgggcgagcc

SEQ ID NO: 643968 - DNA, 75 bp, synthetic construct
  source 1..75: mol_type = other DNA
tgtttatgccggatgcggcgtgaacgccttatccggcctacaaaactgtgcaaattcaatatattgcaggaaaaa

SEQ ID NO: 643969 - DNA, 75 bp, synthetic construct
  source 1..75: mol_type = other DNA
ttatcagttcaggaaagatattatggatattgccaacatggtttctaatcctagctacttctctaatagtggaat

SEQ ID NO: 643970 - DNA, 75 bp, synthetic construct
  source 1..75: mol_type = other DNA
gtgttgtattgcaggaaaatatactattaaatcgtagtattatcgataatattacattagcttctccggctgtat

SEQ ID NO: 643971 - DNA, 75 bp, synthetic construct
  source 1..75: mol_type = other DNA
ttataaccgtcaccggtactacgatccgttgcaggggcggtatatcatccaggacccgataggggggatggggga

SEQ ID NO: 643972 - DNA, 75 bp, synthetic construct
  source 1..75: mol_type = other DNA
ccggagcgagacacagtacgatgcgtggggaaaagcggtcagcaccacgcagggcgggctgacgcgcagtatgga

SEQ ID NO: 643973 - DNA, 75 bp, synthetic construct
  source 1..75: mol_type = other DNA
tactacaaccggaaccggtactacgatccgttgcaggggcggtatatcactcaggacccgatagggctggagggg

SEQ ID NO: 643974 - DNA, 75 bp, synthetic construct
  source 1..75: mol_type = other DNA
atgggatttagatttcgtaaaagaatccggattgcgcccggactcgcgatcaacattagtaaaagcggagtaagc

SEQ ID NO: 643975 - DNA, 75 bp, synthetic construct
  source 1..75: mol_type = other DNA
catccgggtcgagacagagaacggcgagcgggagaaagcgcagcgccgcagcctggcggagaagttacagcagga

SEQ ID NO: 643976 - DNA, 75 bp, synthetic construct
  source 1..75: mol_type = other DNA
accggccacgacaacggatgcaacgggcggcacccggcagatgacctggagccactacgggcagttgctggcgtt

SEQ ID NO: 643977 - DNA, 75 bp, synthetic construct
  source 1..75: mol_type = other DNA
actaccactacgacagccagcaccggctggtgttctacacgcggatacagcaaggggagccaccggtcgagagcc

SEQ ID NO: 643978 - DNA, 75 bp, synthetic construct
  source 1..75: mol_type = other DNA
gcagagatacctggatttggataatagatacaacagatgaagaagaacaatgtatgatgaatgtaagcgactcgt

SEQ ID NO: 643979 - DNA, 75 bp, synthetic construct
  source 1..75: mol_type = other DNA
ggatgagatgggagcctctgtctctgattattttaaaaagatgcaaccccgcagagatacctggatttggataat

SEQ ID NO: 643980 - DNA, 75 bp, synthetic construct
  source 1..75: mol_type = other DNA
ggaaccggtactatgaccgctacaggggaggtatattacacaagaccccattgggctggcgggggatggaacctg

SEQ ID NO: 643981 - DNA, 75 bp, synthetic construct
  source 1..75: mol_type = other DNA
gtacagaccgacaccacgcgtatccagacggtatatcagccggggagcttcgcgccgctcatccgcatcgaaaca

SEQ ID NO: 643982 - DNA, 75 bp, synthetic construct
  source 1..75: mol_type = other DNA
actaccactacgacagccagcaccggctggtgttccacacgcggatacagcaaggggagccactggtcgagagcc

SEQ ID NO: 643983 - DNA, 75 bp, synthetic construct
  source 1..75: mol_type = other DNA
accggattcggttctgcactgttctacacctatatctgcattgataaagatctgctggtcgaaaaccttggcggt

SEQ ID NO: 643984 - DNA, 75 bp, synthetic construct
  source 1..75: mol_type = other DNA
ccactgcaggtgatatgaacgttatgcctgggggggcactgcgtgtcgctaaaaccactatcggcggcaacctgg

SEQ ID NO: 643985 - DNA, 75 bp, synthetic construct
  source 1..75: mol_type = other DNA
gtgataacagatgtctggaaatataggggcaaatccagtgtattaggcgcgggtgaactgaatattaccaccgga

SEQ ID NO: 643986 - DNA, 75 bp, synthetic construct
  source 1..75: mol_type = other DNA
tcagcggtagcggtgatgtgacaaaactggggaccgggatcctgactcttaacaacgattccgcggcgtatcagg

SEQ ID NO: 643987 - DNA, 75 bp, synthetic construct
  source 1..75: mol_type = other DNA
gacgatggtaaacagcgtgagttccagccttacattgaagcgaactggatcaacaatagcaaagtctacgccgtg

SEQ ID NO: 643988 - DNA, 75 bp, synthetic construct
  source 1..75: mol_type = other DNA
ccactgcaggtgatgtgaacgttatgcctgggggacactgcgtgtcgccaaaaccactatcggcggcaatctgga

SEQ ID NO: 643989 - DNA, 75 bp, synthetic construct
  source 1..75: mol_type = other DNA
cgcatccaaaggcaaaaaaacggcaatcgataaaatttatccgcgacattttttggcgacagcaaaggtgctgag

SEQ ID NO: 643990 - DNA, 75 bp, synthetic construct
  source 1..75: mol_type = other DNA
atgctgggcgggatgagtgacaccgccagcaaccgcatcacgtttgagcgcgacagccagtaccggatcacgggt

SEQ ID NO: 643991 - DNA, 75 bp, synthetic construct
  source 1..75: mol_type = other DNA
tctgcgcagggggcagcactacgcccggccgtgaattcagccgattttagcgagcacagccgcgcacgggacgtc

SEQ ID NO: 643992 - DNA, 75 bp, synthetic construct
  source 1..75: mol_type = other DNA
gaccgcgcgcaagaaatatttcacaacatcggcggagaagcaaagtgctaaagccgccagggagaaaaagcagga

SEQ ID NO: 643993 - DNA, 75 bp, synthetic construct
  source 1..75: mol_type = other DNA
cgacgcttgcggagggatatatcagcgtcgatacgctggttgtcggcgcgggtgactacacctggaaaggccgta

SEQ ID NO: 643994 - DNA, 75 bp, synthetic construct
  source 1..75: mol_type = other DNA
gctggtatcaacctgaattcgtgtaagccatcaaagcgaaaaattaaaagcactggtaaatacattggcagtttg

SEQ ID NO: 643995 - DNA, 75 bp, synthetic construct
  source 1..75: mol_type = other DNA
ctgcgattggaggtatcgcaactcaagctgattcaacaatgcgggcaaatggctgatcgagcattggaactggct

SEQ ID NO: 643996 - DNA, 75 bp, synthetic construct
  source 1..75: mol_type = other DNA
caatgagacattgttacttgatgtgtcgaatgactaagacatttggatcaacaatagctgacgtgataggtaaaa

SEQ ID NO: 643997 - DNA, 75 bp, synthetic construct
  source 1..75: mol_type = other DNA
gcgatcgaaggagaagccttgaatgatgttacggtgcacggcgttcttacacatacgcttaaccaagttaaagac

SEQ ID NO: 643998 - DNA, 75 bp, synthetic construct
  source 1..75: mol_type = other DNA
gccgggtatatatgctttagcttgtttcatgttaaagttgtttagaattgataatatattgaagatactcaaaaa

SEQ ID NO: 643999 - DNA, 75 bp, synthetic construct
  source 1..75: mol_type = other DNA
aaagagaaccgtatccttcgggaggagagggagatattaaaaaaggcagcaatatttttcgcagtacaaaagctg

SEQ ID NO: 644000 - DNA, 75 bp, synthetic construct
  source 1..75: mol_type = other DNA
taccaggattaccagcgcacgcagtatgaagtgtatgactaccccggacgtttcaagggtgcccacgggcagaac

SEQ ID NO: 644001 - DNA, 75 bp, synthetic construct
  source 1..75: mol_type = other DNA
attacgttgagcgccagctctccccggttgttctgtgccacattaagcccgagagcagggttctcgagactgata

SEQ ID NO: 644002 - DNA, 75 bp, synthetic construct
  source 1..75: mol_type = other DNA
gcgatagaaggggaagctctgaatgacgtaacggtacacggcgttcttacacatacacttaaccaagttaaagac

SEQ ID NO: 644003 - DNA, 75 bp, synthetic construct
  source 1..75: mol_type = other DNA
ggatactgatggccagcccctgagcaacatactgctgctggctgaccgtattgcgatgattaacccggagagcgg

SEQ ID NO: 644004 - DNA, 75 bp, synthetic construct
  source 1..75: mol_type = other DNA
gagcaggtggtgatgtcgctactgaacaaggatggactgtaactggtgcaaatattcagtcagttgaaaacggaa

SEQ ID NO: 644005 - DNA, 75 bp, synthetic construct
  source 1..75: mol_type = other DNA
gcaattgtgcgatctggtgatttatcacaattgcccacaccggtatcaaatgaagatgaagagcctgactattat

SEQ ID NO: 644006 - DNA, 75 bp, synthetic construct
  source 1..75: mol_type = other DNA
ccgtcctccatcactgcgccagcgtcgtgatcttatacttctagcgcatatacgtgagcagcatcggttgtgttt

SEQ ID NO: 644007 - DNA, 75 bp, synthetic construct
  source 1..75: mol_type = other DNA
ttcagtttgggccagattccccttcatttatgcaggattttgatgaattaaaagttaaggcaacttctattgctt

SEQ ID NO: 644008 - DNA, 75 bp, synthetic construct
  source 1..75: mol_type = other DNA
atgaataaacaaaacggaattagcattattgaggtttgtatagttttaatttcatcattattttttatatatata

SEQ ID NO: 644009 - DNA, 75 bp, synthetic construct
  source 1..75: mol_type = other DNA
gctctgctgtggtaaggcaaggctggtgctgacgaaggacggacaaatttttctcaacggcacaaaaattcattt

SEQ ID NO: 644010 - DNA, 75 bp, synthetic construct
  source 1..75: mol_type = other DNA
atttggaggtatgtcccatggtgaggattactcatcagcaccaaatagcattaagaaatgtgcaaaaaaatatgg

SEQ ID NO: 644011 - DNA, 75 bp, synthetic construct
  source 1..75: mol_type = other DNA
gagtcggggctgtactataaccggaaccggtattatgacccgttgcaggggaggtatattactcaggacccgata

SEQ ID NO: 644012 - DNA, 75 bp, synthetic construct
  source 1..75: mol_type = other DNA
gatcaccggagtactgaaagggtctttatctgaggatgtctttcaggacagaggcacgattgccggttcggtgca

SEQ ID NO: 644013 - DNA, 75 bp, synthetic construct
  source 1..75: mol_type = other DNA
tggagcgcggaatatgatgaatggggcaaccagcttaatgaggagaacccgcatcatgtgtatcagccgtaccgt

SEQ ID NO: 644014 - DNA, 75 bp, synthetic construct
  source 1..75: mol_type = other DNA
cacggctggctgacagacatcagccacctgagcgaaggccaccgtgttgccgtccactatggctatgacgataaa

SEQ ID NO: 644015 - DNA, 75 bp, synthetic construct
  source 1..75: mol_type = other DNA
ggctacgacgataagggccgcctgaccggcgaacgccagacggtggagaacccggagacgggggaactgctgtgg

SEQ ID NO: 644016 - DNA, 75 bp, synthetic construct
  source 1..75: mol_type = other DNA
cgccctctctcagcctcaccgttccccgacacactgcccggtaccgaatacggccccgacaggggcatccgtctt

SEQ ID NO: 644017 - DNA, 75 bp, synthetic construct
  source 1..75: mol_type = other DNA
aaataggtaacaaccaggcgatcaccgttaccaataaccagatccagaacattggcgttaatcagatacagacgg

SEQ ID NO: 644018 - DNA, 75 bp, synthetic construct
  source 1..75: mol_type = other DNA
agatatggccgggacgacgaattgtgctgacggggcatccgcaggcgaacctgaaccgggaatggcaggtggtgg

SEQ ID NO: 644019 - DNA, 75 bp, synthetic construct
  source 1..75: mol_type = other DNA
ctacatccacgcgcagaagaacatggataccgaagtgctcaacgaccgtaccaccaccgtaaaacacgatcaccg

SEQ ID NO: 644020 - DNA, 75 bp, synthetic construct
  source 1..75: mol_type = other DNA
tggcgctgacagctggctgataatatgcaggatggtgtccggattgcccgtgataatcctgacagcggtgtggtg

SEQ ID NO: 644021 - DNA, 75 bp, synthetic construct
  source 1..75: mol_type = other DNA
atggtgaattactgtcttatatcattggcgctgacagctggctgataatatgcaggatggtgtccggattgcccg

SEQ ID NO: 644022 - DNA, 75 bp, synthetic construct
  source 1..75: mol_type = other DNA
atgaataatctggccgccatcatcaatgagcaaggattgttgcctttaactacgatcatcaaaatcagcatttca

SEQ ID NO: 644023 - DNA, 75 bp, synthetic construct
  source 1..75: mol_type = other DNA
ccgtgcgcgaccgtaaaaaacgcggccccggacgcgggcggggtgtcacgaccgtcgtgaccgccggtgagcagc

SEQ ID NO: 644024 - DNA, 75 bp, synthetic construct
  source 1..75: mol_type = other DNA
gaaaaaggggaagagggaccgcctttctctgcaacaggatgggcagccactcagtgagctggattacgatcagtg

SEQ ID NO: 644025 - DNA, 75 bp, synthetic construct
  source 1..75: mol_type = other DNA
gtagcatatagagtaatcaaagatgttggagaggaggaacgaggttatgccatacaaaccgaatgtttccgaact

SEQ ID NO: 644026 - DNA, 75 bp, synthetic construct
  source 1..75: mol_type = other DNA
ctcgaaaatctgataacacgcatccatcagcagaaaaacattattgaaaacataacaatcagggatattaagaag

SEQ ID NO: 644027 - DNA, 75 bp, synthetic construct
  source 1..75: mol_type = other DNA
caccgacacgacgatgctatctcaggtctcacgactgcgacaattgtctgggcatctgccggggtgggaatcacc

SEQ ID NO: 644028 - DNA, 75 bp, synthetic construct
  source 1..75: mol_type = other DNA
tatgaactgatggggtggttgcaaacatgtgttcaagaagttatcaatgacacaccttcagaggctgcactgcaa

SEQ ID NO: 644029 - DNA, 75 bp, synthetic construct
  source 1..75: mol_type = other DNA
atgaggcactgcagaaaacgaaagtgtcgtttaggcgttgggggaggggttaaaaaagtaacggcagaagtcacc

SEQ ID NO: 644030 - DNA, 75 bp, synthetic construct
  source 1..75: mol_type = other DNA
tcgcattgtattcttgggctggctttcttcagttgtattatatatcttgttctgacaataataattgttcaacaa

SEQ ID NO: 644031 - DNA, 75 bp, synthetic construct
  source 1..75: mol_type = other DNA
cgcatgatggggcgcgccggtgggttactttcgtctgtcggtagccgcatggggctggggcgtttctccggcttt

SEQ ID NO: 644032 - DNA, 75 bp, synthetic construct
  source 1..75: mol_type = other DNA
ccgcaagaatccgtttggcgatatcaaatcggatggcacggtgaaaacggctctcgaaaaccttggtttatcaga

SEQ ID NO: 644033 - DNA, 75 bp, synthetic construct
  source 1..75: mol_type = other DNA
ctctagtttgcagcatatgaaaaatgggctcaaacagctacacacaagaaattgtgataatgtccttcagacaat

SEQ ID NO: 644034 - DNA, 75 bp, synthetic construct
  source 1..75: mol_type = other DNA
gataaagcgtgactacatcagtgtcatgcccaaaccagacgggttaacggcagcaaagaaccttgcagaggcatt

SEQ ID NO: 644035 - DNA, 75 bp, synthetic construct
  source 1..75: mol_type = other DNA
atgtcgtttaacttgagccgcacgcagtttttgcagatgtttgccgtgatgcagtctataaagctgataaacaac

SEQ ID NO: 644036 - DNA, 75 bp, synthetic construct
  source 1..75: mol_type = other DNA
gcattcaatcgaggaacttaccgcgactcaaaacggaactgcagaaatgcatgtttgtgatgttcagggatttgc

SEQ ID NO: 644037 - DNA, 75 bp, synthetic construct
  source 1..75: mol_type = other DNA
tccaggcggtttctctgtcgcttgggagtctgtcaggtagcgggacctttcggatgaacaccgatattgcgtcgc

SEQ ID NO: 644038 - DNA, 75 bp, synthetic construct
  source 1..75: mol_type = other DNA
gccattaatatcccttactgctcattgggcgcggcgttgacgtccgatccgcgtgaaaacctgtcactgcaatcc

SEQ ID NO: 644039 - DNA, 75 bp, synthetic construct
  source 1..75: mol_type = other DNA
cggctgaatctgatattgctgaactaaatgctttatgggaatggttccgagagagactgcccgctgactacgtat

SEQ ID NO: 644040 - DNA, 75 bp, synthetic construct
  source 1..75: mol_type = other DNA
cgggcgacattaccgcgtcacgtttgtggatccgtacacgtcctacggtgcaggattcgttcaggcacactgcga

SEQ ID NO: 644041 - DNA, 75 bp, synthetic construct
  source 1..75: mol_type = other DNA
ggatgctgagacaggatataatgtcgttctgtttaataagtcttccggcgtcaggcatgccgcagataaatctcg

SEQ ID NO: 644042 - DNA, 75 bp, synthetic construct
  source 1..75: mol_type = other DNA
tttggaaaaaggcaggacagtgattacctcatcacccaagtggttgccgattacctaggtgaccgaaataaattt

SEQ ID NO: 644043 - DNA, 75 bp, synthetic construct
  source 1..75: mol_type = other DNA
ttatgtatacaaatggtgaatattcatgggagcatgttccagcactggggaaaaatatatacaaagctgttatta

SEQ ID NO: 644044 - DNA, 75 bp, synthetic construct
  source 1..75: mol_type = other DNA
gcgactttttggctatacctcaagttcaacacagcgaagacagcggggtgtggaggtatgttatggaagccgggc

SEQ ID NO: 644045 - DNA, 75 bp, synthetic construct
  source 1..75: mol_type = other DNA
gaagctggaaaaattgtatttggcgatttcagcaacgttgtactggcatcatggggtggactaacaattgaccgt

SEQ ID NO: 644046 - DNA, 75 bp, synthetic construct
  source 1..75: mol_type = other DNA
atggttcgcggtgctggtttgaaactagaacgtgaaattctaaaacaaatcgttactactgtaccacataaagat

SEQ ID NO: 644047 - DNA, 75 bp, synthetic construct
  source 1..75: mol_type = other DNA
aatgcctgaaaagggccagaacgtgcttatttcggtgaatttcgataggatagctctctggttgaaccgcatata

SEQ ID NO: 644048 - DNA, 75 bp, synthetic construct
  source 1..75: mol_type = other DNA
cagccgtgatgaccttaacgacccggagtcctaccagctttacgttgaccagtacgacgacatcaagtccaacct

SEQ ID NO: 644049 - DNA, 75 bp, synthetic construct
  source 1..75: mol_type = other DNA
accgctatggctcactctcggcacatcaagtcagcactgaaggcaatacacgcagacaaccctagcgcgtcctat

SEQ ID NO: 644050 - DNA, 75 bp, synthetic construct
  source 1..75: mol_type = other DNA
tcgtgactctggaacgagtaactaaagctctgaccctcacgtctctcattgagcagtacgagcaggagaacgccc

SEQ ID NO: 644051 - DNA, 75 bp, synthetic construct
  source 1..75: mol_type = other DNA
tcaacgtcttttcgttgaagaatttcccgctttttatacttggatttatgatcgtagttgttaatctgatctgga

SEQ ID NO: 644052 - DNA, 75 bp, synthetic construct
  source 1..75: mol_type = other DNA
gctcggaggatgaggggtatctggcaagctgggagtacgacgcggcgggcaacctgctggacaggcgcgcggggg

SEQ ID NO: 644053 - DNA, 75 bp, synthetic construct
  source 1..75: mol_type = other DNA
ccagcccctctccggaggggctgtttatattgattttgtcagatgtgagtaaactgcttatggactttgttgttt

SEQ ID NO: 644054 - DNA, 75 bp, synthetic construct
  source 1..75: mol_type = other DNA
accagcgtaacggcgtctactattttcgccttcgagttagacaatcaaacaatgatagaatgacctcagtttcat

SEQ ID NO: 644055 - DNA, 75 bp, synthetic construct
  source 1..75: mol_type = other DNA
agaaacgctgggagtgaagatgctatggtattcgatggtctgcgtctcatgaaaaacggctacggtgagcaggtg

SEQ ID NO: 644056 - DNA, 75 bp, synthetic construct
  source 1..75: mol_type = other DNA
gccgttcgtaatgacatgattaaaaagaacatgactgaggggctggaacttaaggttcctcagcgtagagcctcc

SEQ ID NO: 644057 - DNA, 75 bp, synthetic construct
  source 1..75: mol_type = other DNA
ccattgtcgagtgggaacttagtgtcagccgtgatgacctgaacgaccctgagtcctatcagctttatgttgacc

SEQ ID NO: 644058 - DNA, 75 bp, synthetic construct
  source 1..75: mol_type = other DNA
atgtctttaaacgattctaaaatccgcaagttaaaaccctcttcccgtccggtaaaactctccggctctcacggt

SEQ ID NO: 644059 - DNA, 75 bp, synthetic construct
  source 1..75: mol_type = other DNA
gcaggatttcactgccctgctgagggttattgaggataagggctttctggaagtcgcgtcccgcacgcggcagca

SEQ ID NO: 644060 - DNA, 75 bp, synthetic construct
  source 1..75: mol_type = other DNA
ccaataatccagcgtctccaacggcgccactcatcacctatgttgttgcactcttgcggatatacaacacagcga

SEQ ID NO: 644061 - DNA, 75 bp, synthetic construct
  source 1..75: mol_type = other DNA
atgaaacattatttaaagcgaccgatgaccaaagttgcgctggcgctggctttagcagggtactgcgcagtgcca

SEQ ID NO: 644062 - DNA, 75 bp, synthetic construct
  source 1..75: mol_type = other DNA
atacaggtaaggatgggttcgtttataatgatgatcgcaaatttacacctgagcagctttctgaactagcaggca

SEQ ID NO: 644063 - DNA, 75 bp, synthetic construct
  source 1..75: mol_type = other DNA
gccggcgcttcggcacagtcaataacctcttttcataaggaaaagtcagcaatgaatactggtgaacagattaaa

SEQ ID NO: 644064 - DNA, 75 bp, synthetic construct
  source 1..75: mol_type = other DNA
cattgatcaactattccgtcagtgagcgagaagtatttgaagagaatggtaggttttatattcttaaagattcaa

SEQ ID NO: 644065 - DNA, 75 bp, synthetic construct
  source 1..75: mol_type = other DNA
ttgcgccaaacaaagtcgtattttatggcagcaactttgaaagtgcgaaacagatggaactcaatgaggcactaa

SEQ ID NO: 644066 - DNA, 75 bp, synthetic construct
  source 1..75: mol_type = other DNA
taccaacggcgggattgtcaacccgagctacaacaacagcgacctggttatcccagttaccaacgccgaagcgaa

SEQ ID NO: 644067 - DNA, 75 bp, synthetic construct
  source 1..75: mol_type = other DNA
acgaagggcgtatatcgcggcgtcttccggtaacaacctcttctggcgctggcgttgaattattacctgttgaga

SEQ ID NO: 644068 - DNA, 75 bp, synthetic construct
  source 1..75: mol_type = other DNA
ctggtcatgaatgcgccgggacggttgtggctgtgggaagccgcgtgcgcaaatttaaaccgggggatcgggtaa

SEQ ID NO: 644069 - DNA, 75 bp, synthetic construct
  source 1..75: mol_type = other DNA
tattgaacgaacgctgtttatgctcgactggttccgcgatccggcactgcgtcggcgggtacaggcgggactgaa

SEQ ID NO: 644070 - DNA, 75 bp, synthetic construct
  source 1..75: mol_type = other DNA
agatctcctttatttgctgcaccctcaacccagaacactctcacagctgatgcgaaaaatgattgaggatcagct

SEQ ID NO: 644071 - DNA, 75 bp, synthetic construct
  source 1..75: mol_type = other DNA
ttattttgaaaaaataaaaaagaacaaaacacatggcaggatctgtccacaaaagaacaaaaattacagcttatt

SEQ ID NO: 644072 - DNA, 75 bp, synthetic construct
  source 1..75: mol_type = other DNA
actataatgaaatcagtgatgcagataaaaacattatcaagaagatattaacagaaatatctaaaatgccagaag

SEQ ID NO: 644073 - DNA, 75 bp, synthetic construct
  source 1..75: mol_type = other DNA
cgcactttggcgcgatcgccatggaacgacagcgtcaaaatgacgttgctgaattatcgcaagagcttcagacca

SEQ ID NO: 644074 - DNA, 75 bp, synthetic construct
  source 1..75: mol_type = other DNA
atataaaaaaaatgaagagataatagcaattctttccattgcagatgatactattttaatttatgaagaattaaa

SEQ ID NO: 644075 - DNA, 75 bp, synthetic construct
  source 1..75: mol_type = other DNA
tacatattcagtacaatcagacgaattcgatgatcaaaccacttacacgcaataccgttatttttccactgctat

SEQ ID NO: 644076 - DNA, 75 bp, synthetic construct
  source 1..75: mol_type = other DNA
tgtgcaacgccgacgtagcgatgggcgatctgctgattcacgaaggcgcgccatgcattgcacagcaacatgcgg

SEQ ID NO: 644077 - DNA, 75 bp, synthetic construct
  source 1..75: mol_type = other DNA
gtcgttcttgcccggattgtttttccactcatcgtgcatgcgtgaatatagacgaaagtaattatattgacgttg

SEQ ID NO: 644078 - DNA, 75 bp, synthetic construct
  source 1..75: mol_type = other DNA
aatgagcacggcatttttaatcttcgaatgggcggcgattccaactacattatttgctggttggttgagtgataa

SEQ ID NO: 644079 - DNA, 75 bp, synthetic construct
  source 1..75: mol_type = other DNA
gctccaggagttgtcactgggcgatatggttcgattggtgatgttttttatttagaacaggatttttggccatta

SEQ ID NO: 644080 - DNA, 75 bp, synthetic construct
  source 1..75: mol_type = other DNA
caactcagtgcattgattcataacggcgcgtactatattgagcagccggaagaagcatctgtagaactgacgttt

SEQ ID NO: 644081 - DNA, 75 bp, synthetic construct
  source 1..75: mol_type = other DNA
agaacaacaaaaaattgccgccgttctgtccgcagccgatgctgaaatatccacgctggagaaaaaactcgcctg

SEQ ID NO: 644082 - DNA, 75 bp, synthetic construct
  source 1..75: mol_type = other DNA
gcccgcttccaccctagttgacggtaagattgagaagaccgccatttccatccgcagcgtgctgactaactacgt

SEQ ID NO: 644083 - DNA, 75 bp, synthetic construct
  source 1..75: mol_type = other DNA
gtccactctgatgcgcaagattatgaagcaactgcgcgacaggggggacctggtcattatctacgacaagggctg

SEQ ID NO: 644084 - DNA, 75 bp, synthetic construct
  source 1..75: mol_type = other DNA
gttaagcgccaacaatccagccagttagcggaaactcagcaacagcagattgaagtgctggaaaaacaaagtaga

SEQ ID NO: 644085 - DNA, 75 bp, synthetic construct
  source 1..75: mol_type = other DNA
aaaattatgcttcacatcagctttttaagaatttaggctataaacaaatatctcaagataaatatattagtagga

SEQ ID NO: 644086 - DNA, 75 bp, synthetic construct
  source 1..75: mol_type = other DNA
tcttgacgcgtccggctcaatgagtggccagttcagtaagggtaacgttcagtccgtgctggatcgcatcgccgt

SEQ ID NO: 644087 - DNA, 75 bp, synthetic construct
  source 1..75: mol_type = other DNA
tcatagtctgcgaggaatgtttatcagccagcttgatcggcatggtgtaccagaagacaggatcgccctaatcgt

SEQ ID NO: 644088 - DNA, 75 bp, synthetic construct
  source 1..75: mol_type = other DNA
gtacatcaaggccgtggaggtgttcacggcacatttcaggtgcaaggatttccgcctgcacgagatcaacagaac

SEQ ID NO: 644089 - DNA, 75 bp, synthetic construct
  source 1..75: mol_type = other DNA
gtgtgttttacgttgaagccagagcatttcctatcaagatatttgctgaggagggcttgaacgtaattgttccaa

SEQ ID NO: 644090 - DNA, 75 bp, synthetic construct
  source 1..75: mol_type = other DNA
taaatagttatttgaaaagcttattattaaaacatcttactgaaaaagaatatgaggtgttacgattaagctacg

SEQ ID NO: 644091 - DNA, 75 bp, synthetic construct
  source 1..75: mol_type = other DNA
tccggtatcagattgatgcccggctttacttttatccggggccggagtcggaacccatcctgaatgctgccagaa

SEQ ID NO: 644092 - DNA, 75 bp, synthetic construct
  source 1..75: mol_type = other DNA
ttcctgagtgccattattgttggcgtaccgatggcgattatctattacttcactttccgctttgttattcgccgt

SEQ ID NO: 644093 - DNA, 75 bp, synthetic construct
  source 1..75: mol_type = other DNA
agcaatgatgttgaataataattccattataatggctacagttttattagaaaattatgcttcacatcagctttt

SEQ ID NO: 644094 - DNA, 75 bp, synthetic construct
  source 1..75: mol_type = other DNA
aacttcagtgcgagccccatacgcgacgatttgcacggaatccaaacattcctacgtttgagaaccattcggttt

SEQ ID NO: 644095 - DNA, 75 bp, synthetic construct
  source 1..75: mol_type = other DNA
gtggcgcacgtcttcggtgaacgcactctgaccacactggagcgtcttctgagcctgctgtcggcctttgaggtc

SEQ ID NO: 644096 - DNA, 75 bp, synthetic construct
  source 1..75: mol_type = other DNA
gaggggatctctcagggcaaagcgctgcaaaaggggcaaaaaaggggcaaaaaaagagtgggttatcgtagctta

SEQ ID NO: 644097 - DNA, 75 bp, synthetic construct
  source 1..75: mol_type = other DNA
aaatgatccacggtgaccaaacaatttggttcaaaatgctggaagaaggtgtgaaatcgttcagtagcgacagct

SEQ ID NO: 644098 - DNA, 75 bp, synthetic construct
  source 1..75: mol_type = other DNA
gcagtatttatctatttgatggagaggcaattatagttcctggagaagggcagagatttgaaccaaagtatttca

SEQ ID NO: 644099 - DNA, 75 bp, synthetic construct
  source 1..75: mol_type = other DNA
agccggactaactatacagccgcaatggtgctgttcatcagactttaacatccagtcgggagaagaagcagggat

SEQ ID NO: 644100 - DNA, 75 bp, synthetic construct
  source 1..75: mol_type = other DNA
gtaagaacgccgctagagcatatcgccagtaatgctgtggacatgttgattaatgccgacagtggccgctctttg

SEQ ID NO: 644101 - DNA, 75 bp, synthetic construct
  source 1..75: mol_type = other DNA
atcgaatgccaagtatgcaggccagtacaccccaggcattaaataccctgtattaagcaagattcaggctgggca

SEQ ID NO: 644102 - DNA, 75 bp, synthetic construct
  source 1..75: mol_type = other DNA
ggagctttgtgttagtatacttgcagtggacgcgttcatacgctgtaaaatttttagggaccctaacggagtgaa

SEQ ID NO: 644103 - DNA, 75 bp, synthetic construct
  source 1..75: mol_type = other DNA
atctcttttatcgcctgaatgtcttcccactggaattgccgccgctgcgcgaccgtccggaagatatccctcttt

SEQ ID NO: 644104 - DNA, 75 bp, synthetic construct
  source 1..75: mol_type = other DNA
caatggcgcagttgctgcacccgacgacgccagagaatgacgaagaagaacgtcagcgcattgttcaggtattgc

SEQ ID NO: 644105 - DNA, 75 bp, synthetic construct
  source 1..75: mol_type = other DNA
cagctcgaatcaacaaggcgcacgcttgaagcaatggtgcgtgatggtcttcttgagcgggttaatgtgtatgag

SEQ ID NO: 644106 - DNA, 75 bp, synthetic construct
  source 1..75: mol_type = other DNA
ttccgaatatcagcgatatcacatagaggcaacccgacgaacgttaaacgctatggtaaatgatgggatcctgta

SEQ ID NO: 644107 - DNA, 75 bp, synthetic construct
  source 1..75: mol_type = other DNA
aacgcagcagggtaacggcggtacggccgtgctgtggtcagacagctacaccaacttccatggtcagattagcgc

SEQ ID NO: 644108 - DNA, 75 bp, synthetic construct
  source 1..75: mol_type = other DNA
cctgcgggatgttacttatggtcataagtggactgtcacaggcaactgaaataaatctggagggcctccaccgga

SEQ ID NO: 644109 - DNA, 75 bp, synthetic construct
  source 1..75: mol_type = other DNA
tcactgatgaaattccggggatagaccgcaagctcggactggagttgattggtatcattatgtatttgctcggat

SEQ ID NO: 644110 - DNA, 75 bp, synthetic construct
  source 1..75: mol_type = other DNA
cctgccaggtcgttctgttgttgcgcgtgacggtgagggccggaatggtgcaattgacggcgaatgtatacgcat

SEQ ID NO: 644111 - DNA, 75 bp, synthetic construct
  source 1..75: mol_type = other DNA
taattaaatatttgtctgaaaagtggggagggagcaaatgtcccttgtgtaaaaaagggcgttggaatgtttctg

SEQ ID NO: 644112 - DNA, 75 bp, synthetic construct
  source 1..75: mol_type = other DNA
aatttattggccatactttacatgttcaactgaatacaggattccgatttgataatctccctgcggaggacgagc

SEQ ID NO: 644113 - DNA, 75 bp, synthetic construct
  source 1..75: mol_type = other DNA
accttatcgatcatacgctacatatccagcttgatacaggattcaaatttgataatcttccttctgaggaagagc

SEQ ID NO: 644114 - DNA, 75 bp, synthetic construct
  source 1..75: mol_type = other DNA
gggttacacggtgtaatctatgtctggcattggaactctataaaaaatgaatatgaatggagcttgaaaatttca

SEQ ID NO: 644115 - DNA, 75 bp, synthetic construct
  source 1..75: mol_type = other DNA
catttaaggaaatttcactagaagagctacgtaaagttaaagttctgtgtgccccccttcctgaacaaaagaaaa

SEQ ID NO: 644116 - DNA, 75 bp, synthetic construct
  source 1..75: mol_type = other DNA
ctcgccaatagtcagcagcagaaaaaagccctgatgcagcaattgcttaccgggaagaaacgcttgctggatgag

SEQ ID NO: 644117 - DNA, 75 bp, synthetic construct
  source 1..75: mol_type = other DNA
agaaaaatattaatttacaagtcttaaaacctttgctgatactgacacctccctacgcggaacaaaagaaaattg

SEQ ID NO: 644118 - DNA, 75 bp, synthetic construct
  source 1..75: mol_type = other DNA
ttctatgcggattacttgaaaccgatggttgggttgaaggaaataatgccctgcgctttagctcggcaagcaagt

SEQ ID NO: 644119 - DNA, 75 bp, synthetic construct
  source 1..75: mol_type = other DNA
ggagcgagatatttaccgagttacgttctctgacggaagaaccgttgattgcgcggatgatcatttgtgggaaat

SEQ ID NO: 644120 - DNA, 75 bp, synthetic construct
  source 1..75: mol_type = other DNA
tcctggcagtgaagttaagccgctgacgattaataacggtcaacttgcgaccttaatgctatttattagccgaag

SEQ ID NO: 644121 - DNA, 75 bp, synthetic construct
  source 1..75: mol_type = other DNA
tgcaccgggagcaaaagccagtagatgggctgacgcttttcgatgaactggagcgcaaatcattaacggcgtctg

SEQ ID NO: 644122 - DNA, 75 bp, synthetic construct
  source 1..75: mol_type = other DNA
gcactggaaagccgaaccaataaacgcccattaccaagtgactcacgagatacagggcagattgaacaggattgc

SEQ ID NO: 644123 - DNA, 75 bp, synthetic construct
  source 1..75: mol_type = other DNA
gaagcaaaaattcactgcaaaacgcatcaaaacaagtgcgcctgttatcacgtcggttgagtatattggacgtga

SEQ ID NO: 644124 - DNA, 75 bp, synthetic construct
  source 1..75: mol_type = other DNA
gacagcgaacttaactggcaaggttcattgctgttggtagcaagttccccacaagtcgcgacacaatccttcacc

SEQ ID NO: 644125 - DNA, 75 bp, synthetic construct
  source 1..75: mol_type = other DNA
atgtttttttttagagcgattttaatcgttttttttatcggatcagatgttcaagcttttcagatagatacgcta

SEQ ID NO: 644126 - DNA, 75 bp, synthetic construct
  source 1..75: mol_type = other DNA
tgccattcatcactggcaacaaagttggcactatacatttcttgaacgggttattaacagaataaggatgcttat

SEQ ID NO: 644127 - DNA, 75 bp, synthetic construct
  source 1..75: mol_type = other DNA
gacatacttacgaatctataccaaaaatacttactgatatatttaatacaggaaatggatttaaagatgaaacaa

SEQ ID NO: 644128 - DNA, 75 bp, synthetic construct
  source 1..75: mol_type = other DNA
tctggaagagctcctattggagtggatggaaagtcagtgaacctgcatcacatgacgcaaaatcaaagtggacca

SEQ ID NO: 644129 - DNA, 75 bp, synthetic construct
  source 1..75: mol_type = other DNA
agcaaaagcgcaatcttcaggcattttagctgaagagattgttccggttgtgttgaaaaacaaaaaggtgttgta

SEQ ID NO: 644130 - DNA, 75 bp, synthetic construct
  source 1..75: mol_type = other DNA
ggcaatgcctccggggtgaatgacggagccgctgcgttgattattgccagtgaacagatggcagcagcgcaagga

SEQ ID NO: 644131 - DNA, 75 bp, synthetic construct
  source 1..75: mol_type = other DNA
gtagaatgcaaacgagttaagtcgttaaaaaaactatctaaaaacataaaagttgcaaaccagcagatcgtgcgc

SEQ ID NO: 644132 - DNA, 75 bp, synthetic construct
  source 1..75: mol_type = other DNA
gaaaattatgtcagtcataacaaggcattacgactagaatccaccggatcgacaattaccactacgctttcgacc

SEQ ID NO: 644133 - DNA, 75 bp, synthetic construct
  source 1..75: mol_type = other DNA
tgaaaatctgtccgctctggagcaggatatcaccaggctggaaaaagcagcggcattaagcattgccagaatgat

SEQ ID NO: 644134 - DNA, 75 bp, synthetic construct
  source 1..75: mol_type = other DNA
gttggttcgggggcggggataaacctgctttagttaaaaaatgtatggggacatgggaaaaagtcttgcctggtt

SEQ ID NO: 644135 - DNA, 75 bp, synthetic construct
  source 1..75: mol_type = other DNA
ggaagcgaaacaccgcgacaattgacagtcttattcatcgcacgaagaaaacagaacctgctaaatccgaaacca

SEQ ID NO: 644136 - DNA, 75 bp, synthetic construct
  source 1..75: mol_type = other DNA
gcccgggacaccccgccattggtgcccgttcgatcaaacagttactggattacagctggacaatgccgacgccac

SEQ ID NO: 644137 - DNA, 75 bp, synthetic construct
  source 1..75: mol_type = other DNA
atggacgaactcgaatcctactcgctagccgaggatgaggataagtggataaccataaatggttcccacgtcaaa

SEQ ID NO: 644138 - DNA, 75 bp, synthetic construct
  source 1..75: mol_type = other DNA
atgcaaacggtatggtatctgcaacatacgcattttggcgaaatgaaaggtatcggcatttatacccgttatgaa

SEQ ID NO: 644139 - DNA, 75 bp, synthetic construct
  source 1..75: mol_type = other DNA
atggctcccgcagttccatggaagcactgctaatgtcgtgatgccgcttatgcctgcatactgggccctgaataa

SEQ ID NO: 644140 - DNA, 75 bp, synthetic construct
  source 1..75: mol_type = other DNA
tgcctgtgttccctggccaatcaggataaagctgctcccgtttgatttatcccggcagactgcgggacattatag

SEQ ID NO: 644141 - DNA, 75 bp, synthetic construct
  source 1..75: mol_type = other DNA
gttacctgctgggcgcaaaagcctgcgctccggcgttaatcgccagtgaaggcagcatgattttcacactgtcaa

SEQ ID NO: 644142 - DNA, 75 bp, synthetic construct
  source 1..75: mol_type = other DNA
attcggaacagcgataactgctaatgctgcaacaagcaatgttactgcaactgcaacaataattggtgacgctac

SEQ ID NO: 644143 - DNA, 75 bp, synthetic construct
  source 1..75: mol_type = other DNA
tggaaaataagcctggttttgtggattacccggaaaattttcagtttattgaatacatcctaaaccaggatctct

SEQ ID NO: 644144 - DNA, 75 bp, synthetic construct
  source 1..75: mol_type = other DNA
gccggacagtttaaccagattgatcctgacaacacgaaaccacagtcactcatcaactgggatggtttccgcacc

SEQ ID NO: 644145 - DNA, 75 bp, synthetic construct
  source 1..75: mol_type = other DNA
ctggtagaaacactcaaagccgatcacgatgccacacgccagttcgtcagcaagccaatcggtaaatccgccgac

SEQ ID NO: 644146 - DNA, 75 bp, synthetic construct
  source 1..75: mol_type = other DNA
agtcagccatttccagttactcaggtgacaatttcttaaaaataaactcagatcttcgtaaaggtaaagatgaag

SEQ ID NO: 644147 - DNA, 75 bp, synthetic construct
  source 1..75: mol_type = other DNA
gaacaatttgaatataacggtgtgtccgtcacgctttccgaattgtctgcgctgcagcgtattgagcatcttgcc

SEQ ID NO: 644148 - DNA, 75 bp, synthetic construct
  source 1..75: mol_type = other DNA
ggccaagtattaaaatcaacgactgaaattaaaaattatgatgggtccacgcgtgttggcggtgaggcgtggctt

SEQ ID NO: 644149 - DNA, 75 bp, synthetic construct
  source 1..75: mol_type = other DNA
ggaagagcattaaatatgattccgggtggattcaaaggtattcgagaattacataaacttagagtcctcaacaaa

SEQ ID NO: 644150 - DNA, 75 bp, synthetic construct
  source 1..75: mol_type = other DNA
gtaaaccggtgaccggtgatgaatataatgctaaaaacgccatcttcaccgtttcggaagcgatggagcacttcg

SEQ ID NO: 644151 - DNA, 75 bp, synthetic construct
  source 1..75: mol_type = other DNA
gtatggggctggcagggggctttatcggaatcgctttagcctatttggattatcaacctggtgtagaacaaacac

SEQ ID NO: 644152 - DNA, 75 bp, synthetic construct
  source 1..75: mol_type = other DNA
acacttcctctgacagagtattacgacaggaataaccaacccaatacggaaaatattgagcgtaagaaagcaaac

SEQ ID NO: 644153 - DNA, 75 bp, synthetic construct
  source 1..75: mol_type = other DNA
agacctacgtttcacgacatcactgtaatgattttgggattttatattgtggtttctcttttgttactaaattga

SEQ ID NO: 644154 - DNA, 75 bp, synthetic construct
  source 1..75: mol_type = other DNA
accgactatttgcaacagtgcccgttgtcctgcgtgcagtctgacccggaatccgagccgtactggcgtgacgtg

SEQ ID NO: 644155 - DNA, 75 bp, synthetic construct
  source 1..75: mol_type = other DNA
gcaattttctggccgtaacccggcgtatcaaccctccggctgaaggtcaggctgaccgcgtggcgcggctgaatg

SEQ ID NO: 644156 - DNA, 75 bp, synthetic construct
  source 1..75: mol_type = other DNA
tagtgcattccctgtttctactggaaccgattccttgggtgctcctccaaaagaatataacactcaggatgtgat

SEQ ID NO: 644157 - DNA, 75 bp, synthetic construct
  source 1..75: mol_type = other DNA
ccatggtcactaaccgcgatctgccctgccttattgcccgcaatggccgggacgatctaaccgtggatgcagcca

SEQ ID NO: 644158 - DNA, 75 bp, synthetic construct
  source 1..75: mol_type = other DNA
gtttccattaataccttctcgcagatgacgctgcacagcatgcagcgcggtaaaattatgacttggcctgttagg

SEQ ID NO: 644159 - DNA, 75 bp, synthetic construct
  source 1..75: mol_type = other DNA
caggcgagggtcactgacgcgttcgggaatgcgcttgccggacagacggtcagcgtgttggcagacaacagcgca

SEQ ID NO: 644160 - DNA, 75 bp, synthetic construct
  source 1..75: mol_type = other DNA
ccggtgtgatgaacacgaaaaccaaaggtaaggtctcgctcaacctggaaatcgaaccgtttgatgagaaccgag

SEQ ID NO: 644161 - DNA, 75 bp, synthetic construct
  source 1..75: mol_type = other DNA
gcgacatacctttgcgacaaagctcattgagagcggggccgacattcacaccgtcaaagacttacttggtcacag

SEQ ID NO: 644162 - DNA, 75 bp, synthetic construct
  source 1..75: mol_type = other DNA
ataccctacaaaagggcttggctcctgattgatacgttaaacaaagggataggtaagcccgtggtcatcacgtca

SEQ ID NO: 644163 - DNA, 75 bp, synthetic construct
  source 1..75: mol_type = other DNA
agcattcaaaaaaacaaccctgcctatgataaattattcagaatttttgaaaattcactaatgacacaagctggt

SEQ ID NO: 644164 - DNA, 75 bp, synthetic construct
  source 1..75: mol_type = other DNA
tatgaagatactgggccttggagcgactttgaatgggggatgctcaatgggaagctctctgccctgcgatgggtc

SEQ ID NO: 644165 - DNA, 75 bp, synthetic construct
  source 1..75: mol_type = other DNA
gtacgaaacctttagatttgtcactcataatgtcacggatttttccggcaaagaccacaggcagccacacgacga

SEQ ID NO: 644166 - DNA, 75 bp, synthetic construct
  source 1..75: mol_type = other DNA
gatcatgaagatgaaagtggaccaatttttaacccaatcaaacattgaccacacggtaaatagctgcgcggttgg

SEQ ID NO: 644167 - DNA, 75 bp, synthetic construct
  source 1..75: mol_type = other DNA
ccaaaaattggggggtcttttttcgctgcatcagagcgtttttgacgcaatttttcacttcaatagtaccttcgc

SEQ ID NO: 644168 - DNA, 75 bp, synthetic construct
  source 1..75: mol_type = other DNA
gactgaatcaggaaatacgccgccggcagatggagctggatattctgaaaaaagcggaggaaatcataaaaaaag

SEQ ID NO: 644169 - DNA, 75 bp, synthetic construct
  source 1..75: mol_type = other DNA
tgatggggccggtagtgttccttgcctccagcgcttcagattatgtgaatggttataccattgccgtggatggcg

SEQ ID NO: 644170 - DNA, 75 bp, synthetic construct
  source 1..75: mol_type = other DNA
ttgattatagcttacttaataaaatggatatgtccgagcttccatcctgtcacgatggttcgggaacaattagat

SEQ ID NO: 644171 - DNA, 75 bp, synthetic construct
  source 1..75: mol_type = other DNA
tcagtgacatatataaccaattatggcatgacataagaagttataatggaaagcaaaatgactttaaccagttct

SEQ ID NO: 644172 - DNA, 75 bp, synthetic construct
  source 1..75: mol_type = other DNA
ctaatagataaagtctcacaaagcttattgcttggaagcgaaaaaaccaaagatgaaattatccagaaaattgaa

SEQ ID NO: 644173 - DNA, 75 bp, synthetic construct
  source 1..75: mol_type = other DNA
aaagatgctcgtcttatagactgcatttggtttagggaaggccgcatgatgccagcagtaatggagattgaacac

SEQ ID NO: 644174 - DNA, 75 bp, synthetic construct
  source 1..75: mol_type = other DNA
tccagatagcattagtaaaaatcggccatcatctgggatacagaacatgggttgcagctaatgaccgaggattaa

SEQ ID NO: 644175 - DNA, 75 bp, synthetic construct
  source 1..75: mol_type = other DNA
tagttttatattcatgctgttagtatcaattgccagttttttatttgcagcaattgagacaacacataatagaga

SEQ ID NO: 644176 - DNA, 75 bp, synthetic construct
  source 1..75: mol_type = other DNA
cattaaaggtaatactcaaaagctcttgctatcaattgcagagcgaatcagaaaaaacattgaagagcaatgctc

SEQ ID NO: 644177 - DNA, 75 bp, synthetic construct
  source 1..75: mol_type = other DNA
ggggatgagaataaacttccggcgaagtccatctggtggcagggggaggagtataaagcctggccgtgtcaggtt

SEQ ID NO: 644178 - DNA, 75 bp, synthetic construct
  source 1..75: mol_type = other DNA
ctgacggcctgcaaactccgattcggcgaaaataacgaactctcatttggtggcttcccgggcacgtctttgatc

SEQ ID NO: 644179 - DNA, 75 bp, synthetic construct
  source 1..75: mol_type = other DNA
ccgcctgcatgcaggccatgaatgaacaatttaaatcagcattccttaaactcattcagcaaaaccacaaagcag

SEQ ID NO: 644180 - DNA, 75 bp, synthetic construct
  source 1..75: mol_type = other DNA
cagccaaatcgaaagacgagcaggacaaagtcaacgttgacctcgccgcgtccggcgtcgcttacaaagaacgcc

SEQ ID NO: 644181 - DNA, 75 bp, synthetic construct
  source 1..75: mol_type = other DNA
tgaaatgttagtcaatgccgataaagcgttatatcaagccaaaagaaccgggaaaaacaaggtaataatccactc

SEQ ID NO: 644182 - DNA, 75 bp, synthetic construct
  source 1..75: mol_type = other DNA
gatgtgcataaaatgtcggaagtacgtattagcggcacgcaggggatctcgtccgatagcccggtcagcggtaag

SEQ ID NO: 644183 - DNA, 75 bp, synthetic construct
  source 1..75: mol_type = other DNA
atctactatccgaacgggccgatacccgttacgccgcttagccctgaagatcaacaggatctgttctacgcgcat

SEQ ID NO: 644184 - DNA, 75 bp, synthetic construct
  source 1..75: mol_type = other DNA
ggtggtcgggtggagacctcttcgcacggtaacctgcaggcatttggtacggtcagtgcatccgcgaagaaaggc

SEQ ID NO: 644185 - DNA, 75 bp, synthetic construct
  source 1..75: mol_type = other DNA
gtcgctggatgaatgcaacggcacgctgacggcctgcaaactccgattcggcgaaaataacgaactctcatttgg

SEQ ID NO: 644186 - DNA, 75 bp, synthetic construct
  source 1..75: mol_type = other DNA
agctggaatccggaaacgatgttcgcctgattgaggtggacggttcttcctttgggctaacggacgttctccgct

SEQ ID NO: 644187 - DNA, 75 bp, synthetic construct
  source 1..75: mol_type = other DNA
ggtgatgctgatgtgggataaacgcccctacgacggtaaacgtgagcggaatatctccctcgctttcgatttgaa

SEQ ID NO: 644188 - DNA, 75 bp, synthetic construct
  source 1..75: mol_type = other DNA
cgagtgcgtcggctacatccagaacatgggcgcaattcccgcgccggtgctcacagaagaagggcgaatagtctt

SEQ ID NO: 644189 - DNA, 75 bp, synthetic construct
  source 1..75: mol_type = other DNA
atagtccccggttttaaatacgacacggtaatcgcccgtagttgcagtttgctcgggccacagtgccttaattcg

SEQ ID NO: 644190 - DNA, 75 bp, synthetic construct
  source 1..75: mol_type = other DNA
ttcccaaaaatgcagcggggagcaagagcgatggaacgccggtacaggcttattcttcattaatcggtaattgcc

SEQ ID NO: 644191 - DNA, 75 bp, synthetic construct
  source 1..75: mol_type = other DNA
ccgttttactcaccctgctcggtttcatttggtctattacgctgttacatagtgccgacataactccgcattatg

SEQ ID NO: 644192 - DNA, 75 bp, synthetic construct
  source 1..75: mol_type = other DNA
atggataattttatacccttgataagcttgttgagctcagaactagaaaaaaaaataaacatgataaacgatctg

SEQ ID NO: 644193 - DNA, 75 bp, synthetic construct
  source 1..75: mol_type = other DNA
atgtttttatcaaaatttttgaaggttggagaaaaaaaattaccggcaatatcaggtcctgtaaatctctttata

SEQ ID NO: 644194 - DNA, 75 bp, synthetic construct
  source 1..75: mol_type = other DNA
cggtaatcgcccgtagttgcagtttgctcgggccacagtgccttaattcgtccatcccttatctgttttggcggt

SEQ ID NO: 644195 - DNA, 75 bp, synthetic construct
  source 1..75: mol_type = other DNA
gacatcggggtcttcatggtttctcctaaaaccagctatatgacgggagcaactgtggatgtcaccggcggtatg

SEQ ID NO: 644196 - DNA, 75 bp, synthetic construct
  source 1..75: mol_type = other DNA
tacgtcaccgagataaccccacaagactgggacttggtaatgaatgtgaacctgaaagcggtattccatttaagc

SEQ ID NO: 644197 - DNA, 75 bp, synthetic construct
  source 1..75: mol_type = other DNA
atgggcgcaattcccgcgccggtgctcacagaagaagggcgaatagtcttcagactccagttcgcctgcacttac

SEQ ID NO: 644198 - DNA, 75 bp, synthetic construct
  source 1..75: mol_type = other DNA
atgattgcacgtttcaatgaaacgggccgcagtcaggtgctggcaaaacgtatgccgggtgacctctctgaatac

SEQ ID NO: 644199 - DNA, 75 bp, synthetic construct
  source 1..75: mol_type = other DNA
attaatatcagcattcggggatgcattaaactgatatatcgacctgccagtgttccgtctcctgtttttaataat

SEQ ID NO: 644200 - DNA, 75 bp, synthetic construct
  source 1..75: mol_type = other DNA
gccccggatatttatctggctgatgacggcggtgtggcggtggcggtgatcaccggtgtgaactacggaactgcg

SEQ ID NO: 644201 - DNA, 75 bp, synthetic construct
  source 1..75: mol_type = other DNA
gcgcctccgggattctgtttgctggcaataacaggctgacggccagtaacattgctcttaccgggaacagtacga

SEQ ID NO: 644202 - DNA, 75 bp, synthetic construct
  source 1..75: mol_type = other DNA
tttgcactcgttggcttcctgacgtagttcaaaagacccagcgccaggtaaatggtacaaaaaaaacgcattacc

SEQ ID NO: 644203 - DNA, 75 bp, synthetic construct
  source 1..75: mol_type = other DNA
gactgccgtaaacgatttggcgccggcctggcagatcctaacgcggcaattctcgactttggcggctttccggca

SEQ ID NO: 644204 - DNA, 75 bp, synthetic construct
  source 1..75: mol_type = other DNA
aaacctcgacggtcatatcacggcgctgtgcctccaatttaaggacatggttaacgccagggtgagcattatcga

SEQ ID NO: 644205 - DNA, 75 bp, synthetic construct
  source 1..75: mol_type = other DNA
tcaagcctactcaggtaattgatttacttaagagctcgcatttgtttttcttgccaacattaaatgagaactatg

SEQ ID NO: 644206 - DNA, 75 bp, synthetic construct
  source 1..75: mol_type = other DNA
gtggcaatctttgacattgaaaaggacgaattacttcggctctccgatatccagctggaagagctgatcgctcgg

SEQ ID NO: 644207 - DNA, 75 bp, synthetic construct
  source 1..75: mol_type = other DNA
tcccaaatgtgggtttcgtcctcttggtggcgatgatgtggcaacagaccgcgatcgaaaactctctcgcgtaaa

SEQ ID NO: 644208 - DNA, 75 bp, synthetic construct
  source 1..75: mol_type = other DNA
ctgccgggcagcgcagagttcaaagccacgctgatcgacgacaaagcggtactgaccgatcaggatcgtaaatac

SEQ ID NO: 644209 - DNA, 75 bp, synthetic construct
  source 1..75: mol_type = other DNA
ttctttgatgcgcaagtatgacttaagaaaatcgacattaattaaaacagtcggcctttattatctaatgctcca

SEQ ID NO: 644210 - DNA, 75 bp, synthetic construct
  source 1..75: mol_type = other DNA
gcgtctgtcgaagtacatctttgacgaagtacaggctggccgtcagcctaatctgtgggtgcgtttcgacttcgc

SEQ ID NO: 644211 - DNA, 75 bp, synthetic construct
  source 1..75: mol_type = other DNA
aaaaggcttcgtctaacaacaattcctttagcgccatttacaaggaatggtacgagcacaagaagcaagtctggt

SEQ ID NO: 644212 - DNA, 75 bp, synthetic construct
  source 1..75: mol_type = other DNA
ctttgcaggaggcaagggataaggcatggactgcgaggaaagacatctcggttggcatcgatccggtaaaggcga

SEQ ID NO: 644213 - DNA, 75 bp, synthetic construct
  source 1..75: mol_type = other DNA
cccaccagggcaaagtggattttctcgataatcagttaacgccgagtaccggcaccatccgcatgcgtgcgctgc

SEQ ID NO: 644214 - DNA, 75 bp, synthetic construct
  source 1..75: mol_type = other DNA
tttacggataaccctcgatacattgcggagaaaaattatatggaagctttactcaaaaaagcatctccccatacc

SEQ ID NO: 644215 - DNA, 75 bp, synthetic construct
  source 1..75: mol_type = other DNA
gatttacccccgacgcaaattctgcgccgcctgcaccatgttcgccagtgccgcgcgggtttctggccagccgcg

SEQ ID NO: 644216 - DNA, 75 bp, synthetic construct
  source 1..75: mol_type = other DNA
ggctgagttttcgcctgcggttaatttaacagtagaagatacgctaaacggaaacggtaatgaacaaaatttcgc

SEQ ID NO: 644217 - DNA, 75 bp, synthetic construct
  source 1..75: mol_type = other DNA
tagaagggattgccaccgccgcccagacgctggggcaacgcaccctgtcgcctgaagacttacgtatgttggttg

SEQ ID NO: 644218 - DNA, 75 bp, synthetic construct
  source 1..75: mol_type = other DNA
tttcactgtgtgatgcggtgaactttctcgtggaaaaatacgcgctggtgctaccgaccagccgggattcagcgc

SEQ ID NO: 644219 - DNA, 75 bp, synthetic construct
  source 1..75: mol_type = other DNA
ctcaatatctggaggcgaggcgggagatgatgcagtggtatggtgattttactagtaatttaggcaaggaaggga

SEQ ID NO: 644220 - DNA, 75 bp, synthetic construct
  source 1..75: mol_type = other DNA
agcggattttatacggaatatcgaatcctttgaattatcgaaggaaaaatcaccttcagagtctggtgtattaaa

SEQ ID NO: 644221 - DNA, 75 bp, synthetic construct
  source 1..75: mol_type = other DNA
cgactaagcgagaagggaaatccctttctgtgcgcactcgtaagccaaaagctatgactggcttgcgtaaaacaa

SEQ ID NO: 644222 - DNA, 75 bp, synthetic construct
  source 1..75: mol_type = other DNA
ctgacacacgacacattgctggttatttatggcctggcaaaatccggcctgattaatcgttcagaggaatcactt

SEQ ID NO: 644223 - DNA, 75 bp, synthetic construct
  source 1..75: mol_type = other DNA
catcgtcaacgggcattggctgcggttgcggctccgataacgctggcgaaggggtggaccaggactataagcaag

SEQ ID NO: 644224 - DNA, 75 bp, synthetic construct
  source 1..75: mol_type = other DNA
atgatggagataagctaattcttgttgcgttaaaaatagcagcatttcttagtttttcagcaacagggagaattg

SEQ ID NO: 644225 - DNA, 75 bp, synthetic construct
  source 1..75: mol_type = other DNA
gtggagaatgaagacggttctcacgttcctgtatcgcaaccaatcatcattaacgctgctggttacccggtatat

SEQ ID NO: 644226 - DNA, 75 bp, synthetic construct
  source 1..75: mol_type = other DNA
tcgtatcgatgccttcgcaacttttcactatggcgcgttcttttaaagccgtagccaatggagaaatttatatcg

SEQ ID NO: 644227 - DNA, 75 bp, synthetic construct
  source 1..75: mol_type = other DNA
gctcaacggactggggggtgtactttacgggtggctgttctggcgttaccacttggagtcggcaatggtctctca

SEQ ID NO: 644228 - DNA, 75 bp, synthetic construct
  source 1..75: mol_type = other DNA
ggatggccacagccaaaattattgatcatctgagttttggagttacacttatagctagtcatgagagagtcaaac

SEQ ID NO: 644229 - DNA, 75 bp, synthetic construct
  source 1..75: mol_type = other DNA
cagtttttggggatttatcgatctggctactattcttccgttgtatgttctatggttttggccggaaattggcgc

SEQ ID NO: 644230 - DNA, 75 bp, synthetic construct
  source 1..75: mol_type = other DNA
gttccagcggcgcgtcaacgtgcgagcgatgaattagcctccatacaggcggttatcgataagcagcagggcggg

SEQ ID NO: 644231 - DNA, 75 bp, synthetic construct
  source 1..75: mol_type = other DNA
ggaatccgttctatcatcaatatctttgtgtcccagatggtaaaggggactatacttgtggtggccaagaccaac

SEQ ID NO: 644232 - DNA, 75 bp, synthetic construct
  source 1..75: mol_type = other DNA
ctgatcaacaaccgtttatgattgatgggattattcgtttcctggagcattatccagagctgtatgaggttgttg

SEQ ID NO: 644233 - DNA, 75 bp, synthetic construct
  source 1..75: mol_type = other DNA
gggtactaaatggaattttctcccttttcgtcccggcctggttggtggtcattgtatcggggttgacccatatta

SEQ ID NO: 644234 - DNA, 75 bp, synthetic construct
  source 1..75: mol_type = other DNA
gcatcattggtcttggatatgttggtctgcctttggcggtagaattcgggaaaaaatataatacggttggttttg

SEQ ID NO: 644235 - DNA, 75 bp, synthetic construct
  source 1..75: mol_type = other DNA
gagcgatatgccaagagcaagccacatgcgccctctctatcggttccgtgattatctccaggctcagcatgatga

SEQ ID NO: 644236 - DNA, 75 bp, synthetic construct
  source 1..75: mol_type = other DNA
atagtactgtgcatcttttttatgttactaacagtattggcactacctttgaaaattccaaccataaataaaatg

SEQ ID NO: 644237 - DNA, 75 bp, synthetic construct
  source 1..75: mol_type = other DNA
ttgaaatcattgctacggcaatctatatgttcgtactatttccatgttggatagtactgtgcatcttttttatgt

SEQ ID NO: 644238 - DNA, 75 bp, synthetic construct
  source 1..75: mol_type = other DNA
agcaactaatcaggcttaatgagttggaaaaactgttgtctgatggctcacttggtcagctattctttgattcag

SEQ ID NO: 644239 - DNA, 75 bp, synthetic construct
  source 1..75: mol_type = other DNA
cttggttttcctcattatgccgcatggaaaatcgccgatcagatggcaaaaacacctgaagcagcactcaacttt

SEQ ID NO: 644240 - DNA, 75 bp, synthetic construct
  source 1..75: mol_type = other DNA
atgacttccgctattgaaaaactgaaaacccgcttacttccctacagagagcagaacgcgcagccgacggtaagc

SEQ ID NO: 644241 - DNA, 75 bp, synthetic construct
  source 1..75: mol_type = other DNA
aaagcagaaaaagaagccgcagagatgcaggcggcggctatcgttgagttagccgaagctacacgtaaaaagggc

SEQ ID NO: 644242 - DNA, 75 bp, synthetic construct
  source 1..75: mol_type = other DNA
aatgaaatcggtgtttctggcggctcgctggcggcattgacttcacccttaacctcaacaactcccgtcgtagaa

SEQ ID NO: 644243 - DNA, 75 bp, synthetic construct
  source 1..75: mol_type = other DNA
ggctttaaaagataaatatggtgtatcacaaggcatggcggtatttaatcagttgaaatggctggtaaacccatc

SEQ ID NO: 644244 - DNA, 75 bp, synthetic construct
  source 1..75: mol_type = other DNA
acgcagcagccggaaatatgaccgtcagggccgactggcagaagagacctcgcgcaacggtaacattacgcgctg

SEQ ID NO: 644245 - DNA, 75 bp, synthetic construct
  source 1..75: mol_type = other DNA
aaaatataaaggcgataacgctgctgtggctgcttccctgcgttcctggtatgagaactggaataaacaaagcgc

SEQ ID NO: 644246 - DNA, 75 bp, synthetic construct
  source 1..75: mol_type = other DNA
cattcgcagcttggtttttatccctattctattgggctttatctaacattgaaaatcctagttattcaatgaata

SEQ ID NO: 644247 - DNA, 75 bp, synthetic construct
  source 1..75: mol_type = other DNA
attttagaaggggtaagtttcagcagaaaaaattgtacagtgggagtatagtttttatagtaaaaaaaggatatg

SEQ ID NO: 644248 - DNA, 75 bp, synthetic construct
  source 1..75: mol_type = other DNA
agagaaactctatgacgttgtaaacaaagtgaaagaaaatagacccaagttgctagggcatgagaaaattgatca

SEQ ID NO: 644249 - DNA, 75 bp, synthetic construct
  source 1..75: mol_type = other DNA
agttgggcgggatattcttgcgaaatcgaccgttgccgccgttatcgaatacctcggtttacaggaaacggtaaa

SEQ ID NO: 644250 - DNA, 75 bp, synthetic construct
  source 1..75: mol_type = other DNA
cacgaccgcgtgatggtcgcctgctgtttcattcagatcaaggtgttcagtataaaagcaataaatacagaaagt

SEQ ID NO: 644251 - DNA, 75 bp, synthetic construct
  source 1..75: mol_type = other DNA
cgcggcgttaatacgttttacaatacattgttccccattattggctatgcggggtcaattatcaccatgatatga

SEQ ID NO: 644252 - DNA, 75 bp, synthetic construct
  source 1..75: mol_type = other DNA
tttgaatattgctctgattaacgaacttgcaatgattttcaataagctggggattgatacggaggaagtattaaa

SEQ ID NO: 644253 - DNA, 75 bp, synthetic construct
  source 1..75: mol_type = other DNA
cagttatcgtgtgatacctatgctggatatcctggtgtgggcagccgttaaaaaaatccgtgtctctgacgacag

SEQ ID NO: 644254 - DNA, 75 bp, synthetic construct
  source 1..75: mol_type = other DNA
ggatgattcttttagaagtaaagttggtataagcgatagtgaaatattaaagatgttagaggcatttgttgaaaa

SEQ ID NO: 644255 - DNA, 75 bp, synthetic construct
  source 1..75: mol_type = other DNA
gcccggagcgttgaatatacaagtgaaatatccgcaagtattgaccttatggatgattcttttagaagtaaagtt

SEQ ID NO: 644256 - DNA, 75 bp, synthetic construct
  source 1..75: mol_type = other DNA
tcactggcacgccatttacctgggtcctgtcccaggatatgtcaagtgtgcctgctgatgcgcagtataatttct

SEQ ID NO: 644257 - DNA, 75 bp, synthetic construct
  source 1..75: mol_type = other DNA
ctataagtcaaattcctcttctctatcctcacactcggggttaaaggacccaacgggcacacccgtctgttatta

SEQ ID NO: 644258 - DNA, 75 bp, synthetic construct
  source 1..75: mol_type = other DNA
atattgataattatcatatgctgtctgcattagctgggattgcgggatttgacaggagcattgagtttacatgtg

SEQ ID NO: 644259 - DNA, 75 bp, synthetic construct
  source 1..75: mol_type = other DNA
gaacttattgatttcacgtttgaatggaaagggctgaagaaattatgcgtggcagtctcctttcggtctataata

SEQ ID NO: 644260 - DNA, 75 bp, synthetic construct
  source 1..75: mol_type = other DNA
ttatataaatttgcttaaatttacttcatttattggaaagttagaaagaaaattgcttctaaagcggttgaataa

SEQ ID NO: 644261 - DNA, 75 bp, synthetic construct
  source 1..75: mol_type = other DNA
cgtataaaacaaggattaatcgcaaaagcgcctcttgaaggttggcattatggctctaaggaaattgttaaagaa

SEQ ID NO: 644262 - DNA, 75 bp, synthetic construct
  source 1..75: mol_type = other DNA
gggaatataatattcagttcaatttcaaggatgatgatgggataccttatgcaaatacgagatatattgcgttta

SEQ ID NO: 644263 - DNA, 75 bp, synthetic construct
  source 1..75: mol_type = other DNA
gatgttaaacgttatgctcaaggcaacccgacaccgccgggtctctataatgtccgcgtatttgtaaacggtcag

SEQ ID NO: 644264 - DNA, 75 bp, synthetic construct
  source 1..75: mol_type = other DNA
ggcagtctcctttcggtctataatagcagaacaaaagaaagagccagaaattgacggtcagatattatatcagtt

SEQ ID NO: 644265 - DNA, 75 bp, synthetic construct
  source 1..75: mol_type = other DNA
aaagcgttccggtcccctgtctcatggtgtatgccgccgggagaccctcgcgctggacgccagcagaaaccgagt

SEQ ID NO: 644266 - DNA, 75 bp, synthetic construct
  source 1..75: mol_type = other DNA
atgatgctggtcgtgtaacactgagtactcttcacagtgcaaagggccgtgagtttgaagtggccattttatatg

SEQ ID NO: 644267 - DNA, 75 bp, synthetic construct
  source 1..75: mol_type = other DNA
ctgccgcactctcttaccgcacacaagcaccgctgattgactccttactcaatgaaattggcgtttcaggcggct

SEQ ID NO: 644268 - DNA, 75 bp, synthetic construct
  source 1..75: mol_type = other DNA
attgatgtcagcattgaaagccaaaaagtattggttcttagatcaggatatcatgaacaaagtcttctttggccg

SEQ ID NO: 644269 - DNA, 75 bp, synthetic construct
  source 1..75: mol_type = other DNA
taaacaacctgatttaacacctcttgttaaagcctcggaaacactcggaaaaataatcaaaaaagatgatattat

SEQ ID NO: 644270 - DNA, 75 bp, synthetic construct
  source 1..75: mol_type = other DNA
aaataggaattattgggctgggttacgttggcttacctttagctgttgaatttggcaaaaaaataaagactcttg

SEQ ID NO: 644271 - DNA, 75 bp, synthetic construct
  source 1..75: mol_type = other DNA
tcattaagcgcaattctcgtcttgcccgtttcatcgaagcctgcagtcagtgggtaactgggggatggaaagaag

SEQ ID NO: 644272 - DNA, 75 bp, synthetic construct
  source 1..75: mol_type = other DNA
agcttcagttttaaatttcagaagcaaaaagcatgttaaggatgaattattatttcgtctgaggatatttatcac

SEQ ID NO: 644273 - DNA, 75 bp, synthetic construct
  source 1..75: mol_type = other DNA
cgcgccttgatcactcccgcaagccggatatggctcgagaaaagcttgtgcaacttcttggcgatgttccccgga

SEQ ID NO: 644274 - DNA, 75 bp, synthetic construct
  source 1..75: mol_type = other DNA
agtaatgttgatcaaagtatcctttacgaggcaattacttatctatctggagaaaaagcaccaatattatcaatc

SEQ ID NO: 644275 - DNA, 75 bp, synthetic construct
  source 1..75: mol_type = other DNA
attcaacaattcaataatgcaactgatggttattatacgaacatgtttgttatgcgcaaagacatgttcctggat

SEQ ID NO: 644276 - DNA, 75 bp, synthetic construct
  source 1..75: mol_type = other DNA
ctgaagtctgccatcatcgacggtgtggtcagcggtaatatcagcgcggcagcccacgccagcgtatcagtaatg

SEQ ID NO: 644277 - DNA, 75 bp, synthetic construct
  source 1..75: mol_type = other DNA
ggcgaggtgaagcgcaaggatcggaaggtgtactttaagaaggacgaaaatggccgcgttggtcggtttgtgaaa

SEQ ID NO: 644278 - DNA, 75 bp, synthetic construct
  source 1..75: mol_type = other DNA
tttccctcgacctgtctctggtcagccagcagtttctctcccttgaatttgcgcaggtactggacaaaatggcct

SEQ ID NO: 644279 - DNA, 75 bp, synthetic construct
  source 1..75: mol_type = other DNA
taatggttacactttagaggtgtatggtaaatttgactcggagcttataccattatttaatgaaatccaaagaca

SEQ ID NO: 644280 - DNA, 75 bp, synthetic construct
  source 1..75: mol_type = other DNA
cagagcgctgggcatgggtaactatctcggctctgctgtacaaccgcagggggatacgtttgtttttgaaccggc

SEQ ID NO: 644281 - DNA, 75 bp, synthetic construct
  source 1..75: mol_type = other DNA
ttcgccggagatatggccgggacggcgaattgtgctgacggggcatccgcaggcaaacctgaaccgggaatggca

SEQ ID NO: 644282 - DNA, 75 bp, synthetic construct
  source 1..75: mol_type = other DNA
aagcatcctcggcacgatattgcaggaaaacggggtgaccgagtggagtccgctgttcagtgaaccgcatccttc

SEQ ID NO: 644283 - DNA, 75 bp, synthetic construct
  source 1..75: mol_type = other DNA
cacgaagataaccgctcgccgggtagcctgccggggacgaagacgcagatgacgatccgctccaaaacgtacatg

SEQ ID NO: 644284 - DNA, 75 bp, synthetic construct
  source 1..75: mol_type = other DNA
gaccgggttggccgccgccccgtcctgctcacgggtgcaatgatctttgccctggcatgcctgagcatgctgttt

SEQ ID NO: 644285 - DNA, 75 bp, synthetic construct
  source 1..75: mol_type = other DNA
aggaaactgaagcctttttacaacgtaaacaccgtccggacacccgggaaatttttaccaccattgctaaaaact

SEQ ID NO: 644286 - DNA, 75 bp, synthetic construct
  source 1..75: mol_type = other DNA
cggaattgaatcgaaaattaagatattagggcatatacctaaacttgaacaaattgaattaatcaaaaattgcat

SEQ ID NO: 644287 - DNA, 75 bp, synthetic construct
  source 1..75: mol_type = other DNA
tctgaaacagagtgcagcacaacaagctatcaagactccttcttacacctttgcacctgttattaacttcaatcc

SEQ ID NO: 644288 - DNA, 75 bp, synthetic construct
  source 1..75: mol_type = other DNA
tataaaagaggcagatgaagcagaagttgagatacttgattcaattctggtcgatttaataaaagcaaaagattt

SEQ ID NO: 644289 - DNA, 75 bp, synthetic construct
  source 1..75: mol_type = other DNA
cctgccaaaaggcaccgtttctgccacgctgaatattctggcgctcggcataattgcccttagcattgaaataac

SEQ ID NO: 644290 - DNA, 75 bp, synthetic construct
  source 1..75: mol_type = other DNA
ccgctgctcggtgcgaaggtccttcccggtgaaaccgacatcgccctgcccgccccgctgccgttcatcctctcc

SEQ ID NO: 644291 - DNA, 75 bp, synthetic construct
  source 1..75: mol_type = other DNA
agtccatgctgatgatatccccgtcccggtccaggaaatcgtccgcatccccaacccggacagcccggctgtggg

SEQ ID NO: 644292 - DNA, 75 bp, synthetic construct
  source 1..75: mol_type = other DNA
gttaatgttatcgctgactacgcgttaaaaaaagctatagctgatggagtgatggtactggatattccgtggaat

SEQ ID NO: 644293 - DNA, 75 bp, synthetic construct
  source 1..75: mol_type = other DNA
tgcatgggataatatgcagtctattgacaggttcgctaatagtagtgatgaaactattaccacgcgtacaggtaa

SEQ ID NO: 644294 - DNA, 75 bp, synthetic construct
  source 1..75: mol_type = other DNA
gtaaatataaaagaaaaactttcatcaatcccaaaaacagaacaattcagtaaggataattctgggcatatagca

SEQ ID NO: 644295 - DNA, 75 bp, synthetic construct
  source 1..75: mol_type = other DNA
gctacattttcagcaggctcaatatcaaatggtattacaaagtatacagctcaaaatgtaaatgtggaaaaagaa

SEQ ID NO: 644296 - DNA, 75 bp, synthetic construct
  source 1..75: mol_type = other DNA
ctgctgaaacaacgcgagcaggaaagcgatcgttacagtgggcgtgaggatgacccgctggttccccgccagttg

SEQ ID NO: 644297 - DNA, 75 bp, synthetic construct
  source 1..75: mol_type = other DNA
tggaagtggacggcctgccaccggacgcttttgcggtggtttcctttcatctcacccagtcactctcttcactct

SEQ ID NO: 644298 - DNA, 75 bp, synthetic construct
  source 1..75: mol_type = other DNA
cgatcgtaccaccaccgtaaaacacgatcatcgcgaaaccgtaaaaaatgaccagacggtcacgatacaggaagg

SEQ ID NO: 644299 - DNA, 75 bp, synthetic construct
  source 1..75: mol_type = other DNA
catccggtcaatccgctgctcggtgcaaaggtccttcccggtgaaaccgacatcgccctgcccgccccgctgccg

SEQ ID NO: 644300 - DNA, 75 bp, synthetic construct
  source 1..75: mol_type = other DNA
tcaatttatagggtggggttgccgacgcccatatacaattgatgacgataacagttttctgaattgcggagtcgt

SEQ ID NO: 644301 - DNA, 75 bp, synthetic construct
  source 1..75: mol_type = other DNA
gagcagccgcaggcggtgccgggacgcaggggttcaggcaccacgctggataaccattttgcggtaataccggca

SEQ ID NO: 644302 - DNA, 75 bp, synthetic construct
  source 1..75: mol_type = other DNA
cgtgccggtctgcgccagaacttccgtatcttccagaacgaggacatcaaaagcatcctcggcacgatattgcag

SEQ ID NO: 644303 - DNA, 75 bp, synthetic construct
  source 1..75: mol_type = other DNA
aatttaagggattactggaaaggctgggacatatccctccggcagaagcagaaaaagcttattatgctgccatcg

SEQ ID NO: 644304 - DNA, 75 bp, synthetic construct
  source 1..75: mol_type = other DNA
acggcgcagaactatatggcgctgccagctgaattccaacgtatcgatgcagatcagaagaagacagcaacagca

SEQ ID NO: 644305 - DNA, 75 bp, synthetic construct
  source 1..75: mol_type = other DNA
atccaagccgcgctgttgaagtgagttacttcggctttgacgacgaaacaggtttagaagtgcgtgtacgccctg

SEQ ID NO: 644306 - DNA, 75 bp, synthetic construct
  source 1..75: mol_type = other DNA
cgaggtttaccacgctgccaacggcatcagttccacccaggtaaaagatgcgcgcgtttcgctgatgtacttcaa

SEQ ID NO: 644307 - DNA, 75 bp, synthetic construct
  source 1..75: mol_type = other DNA
tggcactgccccacaggatgagaccgccctcgccccggcgactaccagcgatgaggtactgcctgacgcgtcggt

SEQ ID NO: 644308 - DNA, 75 bp, synthetic construct
  source 1..75: mol_type = other DNA
ccaatgccaacggcggttacgtcactgaccgtggacctgatacataccatacccttgacactctcgatttagaga

SEQ ID NO: 644309 - DNA, 75 bp, synthetic construct
  source 1..75: mol_type = other DNA
cgcaagtagaggttgaggaaccaacagctcagccgcaggtcgcgaacctcggcggtggcatgttctccatcaatg

SEQ ID NO: 644310 - DNA, 75 bp, synthetic construct
  source 1..75: mol_type = other DNA
ataaagtcgtgaatgccgttaagaaagtcttccctgtcgatggaaaaatccctgaactcgcaaccttaatccagt

SEQ ID NO: 644311 - DNA, 75 bp, synthetic construct
  source 1..75: mol_type = other DNA
gattatgccaaaccaatccgcaccgatttcccggtatatgacgacctgccggaagaaggtgaagttgatttcacc

SEQ ID NO: 644312 - DNA, 75 bp, synthetic construct
  source 1..75: mol_type = other DNA
tggccccggctggaaagcgccttctgatatccgcttacagatacgtgatgacggactgatactcaacgacaacgg

SEQ ID NO: 644313 - DNA, 75 bp, synthetic construct
  source 1..75: mol_type = other DNA
aaccggttgcggcccaaaccgagccagaagctcaatctgacgaaccgggtgttgtgtaccctgcttacttcgaac

SEQ ID NO: 644314 - DNA, 75 bp, synthetic construct
  source 1..75: mol_type = other DNA
tgcgccggacgtcagctgggaaaatgaggttaatgagcaggtcgctgcagagcagaaaacagctgctaaacagcc

SEQ ID NO: 644315 - DNA, 75 bp, synthetic construct
  source 1..75: mol_type = other DNA
ctggtcatgcgccggacgtcagctgggaaaatgaggttaatgagcaggtcgctgcagagcagaaaacagctgcta

SEQ ID NO: 644316 - DNA, 75 bp, synthetic construct
  source 1..75: mol_type = other DNA
cgatgtgcagatggaaacgactgacccggcggaaggagaagctggtaacccggttcaaccaggcgaaagcgctga

SEQ ID NO: 644317 - DNA, 75 bp, synthetic construct
  source 1..75: mol_type = other DNA
cgtgcgtataggtgcagacctgaaaaccatcagcatgtggaatgttaagcaggaaagcctgcgcgccaggctaca

SEQ ID NO: 644318 - DNA, 75 bp, synthetic construct
  source 1..75: mol_type = other DNA
cacccgaccgccggcatgctgctgaccccccctagccgagccgttgaggtgagctactttggttttgacgaggag

SEQ ID NO: 644319 - DNA, 75 bp, synthetic construct
  source 1..75: mol_type = other DNA
ctggtagaagactggcgcagtggtaagttgcagttgctcaaaactgaaaccagcaacgctgctgacgttacaacg

SEQ ID NO: 644320 - DNA, 75 bp, synthetic construct
  source 1..75: mol_type = other DNA
cacatcacagcgatgccgttgctgtcgacctgcgcttagtcaactgtgatctggaaaactccagcaacggttccg

SEQ ID NO: 644321 - DNA, 75 bp, synthetic construct
  source 1..75: mol_type = other DNA
tacctctacgacccgctgggacggcgaatggcaaaacgggtctggcggcgggagcgtgacctgacggggtggatg

SEQ ID NO: 644322 - DNA, 75 bp, synthetic construct
  source 1..75: mol_type = other DNA
gtaaacataagttattttttcaatggtgtatcattttagcaatcggatttcttaaaatagaattagcagcaatat

SEQ ID NO: 644323 - DNA, 75 bp, synthetic construct
  source 1..75: mol_type = other DNA
tgtgatcgttacgaactggccgaagaccagcgcacctggaatgtgaaattgaaagctgataacgcggcgcaggaa

SEQ ID NO: 644324 - DNA, 75 bp, synthetic construct
  source 1..75: mol_type = other DNA
ccactcagaaatccggaaagcaagatgcagtggtctggttcactgctaaaaccgaggctcgcgccaacctgatgc

SEQ ID NO: 644325 - DNA, 75 bp, synthetic construct
  source 1..75: mol_type = other DNA
ccgtgacgcgctgctggagcagctggcgatcatcaaccctgacctagtggcgcaggaagcgcagaaaccagcacc

SEQ ID NO: 644326 - DNA, 75 bp, synthetic construct
  source 1..75: mol_type = other DNA
ggtctgccgaacgaggtttaccacgctgccaacggcatcagttccacccaggtaaaagatgcgcgcgtttcgctg

SEQ ID NO: 644327 - DNA, 75 bp, synthetic construct
  source 1..75: mol_type = other DNA
tttttaacctggtacgtatcgcaccggaaaatattcatttaactcctgtcgctcacctggaatttgttaaccaga

SEQ ID NO: 644328 - DNA, 75 bp, synthetic construct
  source 1..75: mol_type = other DNA
caacatcctgcgcaatcagccaggcgttctgggtgttaaccgcacggctatttttaacctggtacgtatcgcacc

SEQ ID NO: 644329 - DNA, 75 bp, synthetic construct
  source 1..75: mol_type = other DNA
ctatgaccggcaggtagtagaaggcgtaggggaatatttacaggcgtcacaatcggaatgggatattttcattga

SEQ ID NO: 644330 - DNA, 75 bp, synthetic construct
  source 1..75: mol_type = other DNA
tgcatgaaacgtgttgtgatgccggtacgctggcaatgtgcaaaatgccggcgctggtattgtggaacccggccc

SEQ ID NO: 644331 - DNA, 75 bp, synthetic construct
  source 1..75: mol_type = other DNA
cctggtgctggcgacattaccgttcatcttcctgctgaccctctccggtcagccagcagattgtagctctttcct

SEQ ID NO: 644332 - DNA, 75 bp, synthetic construct
  source 1..75: mol_type = other DNA
taccgattttaaaaaaattggtgatgaggcaaagaaagtcgcaacctcattcaaaggtagcgtaggtaataagaa

SEQ ID NO: 644333 - DNA, 75 bp, synthetic construct
  source 1..75: mol_type = other DNA
cggatattcatctgaatcgaaaacaacagcactgcaacgtcttcaggctgacagccagttactgaacgactggca

SEQ ID NO: 644334 - DNA, 75 bp, synthetic construct
  source 1..75: mol_type = other DNA
aacaacaactgacgtccctcactgcactgccaccgcctgccggcgtgtcatcacaggcactgccgttgccggata

SEQ ID NO: 644335 - DNA, 75 bp, synthetic construct
  source 1..75: mol_type = other DNA
cctagaaagagacgaatccgttttttgcgaaagctatccatatcctttgcctaaagatgtgttgcttgcagctga

SEQ ID NO: 644336 - DNA, 75 bp, synthetic construct
  source 1..75: mol_type = other DNA
actggaaacagttacttattgtcgtgatgcttgctgctcttgtaataggttcccgtgtcgcatgggtgcagcatg

SEQ ID NO: 644337 - DNA, 75 bp, synthetic construct
  source 1..75: mol_type = other DNA
tgattttgctgctgcctcttctggccgcctgcagtcagaacttgacaagatcaagcgaatcgccgaacactatac

SEQ ID NO: 644338 - DNA, 75 bp, synthetic construct
  source 1..75: mol_type = other DNA
gggtacgcgcaggcgcagtcagatcagaaacaggctgatgataaggcccgggcacaacgagataaggagaaaaca

SEQ ID NO: 644339 - DNA, 75 bp, synthetic construct
  source 1..75: mol_type = other DNA
cgtctggcgcgtgtgctggtgaatgactgtgcgtccggggttatgcgtcatgcggatgcgggttatgaagcggca

SEQ ID NO: 644340 - DNA, 75 bp, synthetic construct
  source 1..75: mol_type = other DNA
cctggtgctggcgacatttacgttcatcttcttgcagacattctccagtcagcctgcaggttatagctattcctg

SEQ ID NO: 644341 - DNA, 75 bp, synthetic construct
  source 1..75: mol_type = other DNA
ccatatgaatccggcacgagtggcgtgggtcagggcgcagacagggcagccagcgccggaaggactggttaaagc

SEQ ID NO: 644342 - DNA, 75 bp, synthetic construct
  source 1..75: mol_type = other DNA
ttgcggaactggcagcgtgcagtcatgcagtgccggcagtggctgaataccatgccgccggtgctggtgacactg

SEQ ID NO: 644343 - DNA, 75 bp, synthetic construct
  source 1..75: mol_type = other DNA
tatcgtggcagacgtcaggccgcagaagaaaccgccatgcgtgatgctgaaaccgtgcagcagggcgaagcggcc

SEQ ID NO: 644344 - DNA, 75 bp, synthetic construct
  source 1..75: mol_type = other DNA
tttttgccggtggcagcaggggggctgatgaggtcatcgataccctgcctgatggcaaaaacgcggttacagata

SEQ ID NO: 644345 - DNA, 75 bp, synthetic construct
  source 1..75: mol_type = other DNA
ctgaagcgcaatttggcaaccagagccgcaacagcctgaacattcagcagccgggagagactgacagctatgatg

SEQ ID NO: 644346 - DNA, 75 bp, synthetic construct
  source 1..75: mol_type = other DNA
gaacgccgcaagggggatgtttcgccggagcagttcagtgatgcgtttggttttcgtggtgtgcagtttggtaat

SEQ ID NO: 644347 - DNA, 75 bp, synthetic construct
  source 1..75: mol_type = other DNA
cgtgatgtgcttcgccctcagcgggaggccagaccggaggcacagccacagccggaaaatgcggatgatggcgac

SEQ ID NO: 644348 - DNA, 75 bp, synthetic construct
  source 1..75: mol_type = other DNA
tatcgtggaaaacgtcaggcggcagatgaagcagccatgcgtgaggctgaaagcgttcctcaggacgaatcggct

SEQ ID NO: 644349 - DNA, 75 bp, synthetic construct
  source 1..75: mol_type = other DNA
cctgatgggcgagttcaaccagaatcatattatttttgacgattcctggactgcgccggaactgaaaacagcact

SEQ ID NO: 644350 - DNA, 75 bp, synthetic construct
  source 1..75: mol_type = other DNA
ctggcaccatgaacacgctgatcgtagtgctatgtaccggagccatgacggatgctgctgcagattacaacccaa

SEQ ID NO: 644351 - DNA, 75 bp, synthetic construct
  source 1..75: mol_type = other DNA
ctttgtcgccagacaggggcgattgtcggtgtttttcttctgctggctatgctggcgtcttttatgaataaccag

SEQ ID NO: 644352 - DNA, 75 bp, synthetic construct
  source 1..75: mol_type = other DNA
cgtatggatatagcaagagactttgacctcagcgagggacgaattagccagatcgttaatgcgggtcgtaactaa

SEQ ID NO: 644353 - DNA, 75 bp, synthetic construct
  source 1..75: mol_type = other DNA
cagcaagtcgcgcggcaggtggtcagttaagcgagaaaaagattgtcttcctcggcgcaggctcggcggggtgcg

SEQ ID NO: 644354 - DNA, 75 bp, synthetic construct
  source 1..75: mol_type = other DNA
tggcagtccgtttaatccagtggtatggaaagataaaatctaccctatcgcccagtgtaacaacgcctttatttt

SEQ ID NO: 644355 - DNA, 75 bp, synthetic construct
  source 1..75: mol_type = other DNA
actggaaacagttgcttatcgtgttgatgcttgctgctctggtcatcagtggagttgttgcctggaatgtacacg

SEQ ID NO: 644356 - DNA, 75 bp, synthetic construct
  source 1..75: mol_type = other DNA
tggtacgggacatatggtgaactgacggggatgtacagttacagcagcacgatgcgccagctgaacgccgggatg

SEQ ID NO: 644357 - DNA, 75 bp, synthetic construct
  source 1..75: mol_type = other DNA
ggaagagcactgataactctgtcacgtagtgacggctctcgcctgccttttggagctgtggtgacagaggaagga

SEQ ID NO: 644358 - DNA, 75 bp, synthetic construct
  source 1..75: mol_type = other DNA
gaaaggagaggatacggttgctctggttgtagcacctggagttaatggcgcttcagttgggagtttgcctggcgt

SEQ ID NO: 644359 - DNA, 75 bp, synthetic construct
  source 1..75: mol_type = other DNA
tttttagcagatgtatctttatacattgaaaatgcctatgagaaatctaaaaaattaagttcctacgatttatat

SEQ ID NO: 644360 - DNA, 75 bp, synthetic construct
  source 1..75: mol_type = other DNA
cgccaccgggttattgaacgtggcgtttgcctttggcgaatcacttacgcttctgcttgtggtctggacactgaa

SEQ ID NO: 644361 - DNA, 75 bp, synthetic construct
  source 1..75: mol_type = other DNA
aagctgaaggcgcagtggggagagaacagtctgtgccatgcggattaccgtcttccggaagagaagggtcctgcg

SEQ ID NO: 644362 - DNA, 75 bp, synthetic construct
  source 1..75: mol_type = other DNA
gaataccctaatctttttcggcaaaatagtgaaaaaaatagagacagtagcgattgtgctgacttatcagtgatc

SEQ ID NO: 644363 - DNA, 75 bp, synthetic construct
  source 1..75: mol_type = other DNA
agtgcaaacagatacacgagttgtacccacaaaaggagctattgttaaagctaattttgccaccagagttggagg

SEQ ID NO: 644364 - DNA, 75 bp, synthetic construct
  source 1..75: mol_type = other DNA
tcagttagtggatggccggggattagaacagattatcgaggatatgctttgacaggctatatgtcaccatatcaa

SEQ ID NO: 644365 - DNA, 75 bp, synthetic construct
  source 1..75: mol_type = other DNA
aaaggtggcggaaagggggtggacctgacgttgtttgaagaaggtgcccaactgcccggtatctatccggttgat

SEQ ID NO: 644366 - DNA, 75 bp, synthetic construct
  source 1..75: mol_type = other DNA
agtaaagcaggattatataggtgcatcttatagtaattcatggaaaggtattaccttcgcagtaaattggtcacg

SEQ ID NO: 644367 - DNA, 75 bp, synthetic construct
  source 1..75: mol_type = other DNA
aattccacaagttgcgatccgcccaccattgacaggcattgcccatgaaacaatgtgggatgatggtatatcagc

SEQ ID NO: 644368 - DNA, 75 bp, synthetic construct
  source 1..75: mol_type = other DNA
aaaaattacgacagcattaccggaaggtggagaaacaggacattcccgcgagtcagatggcatttgaaaaacagt

SEQ ID NO: 644369 - DNA, 75 bp, synthetic construct
  source 1..75: mol_type = other DNA
ctgggacccgatgattgacgtgaacctgaccgccgcattcgagttaagctacgaagcggcaaaaattatgatccc

SEQ ID NO: 644370 - DNA, 75 bp, synthetic construct
  source 1..75: mol_type = other DNA
ggccttgcagctctcagagcccagttgcttaaacgtgaagaggaattgcgccggaaggagctggaggatacagaa

SEQ ID NO: 644371 - DNA, 75 bp, synthetic construct
  source 1..75: mol_type = other DNA
gacagagcctgcccgccgtgtggctgaccttctgaatatcgtgcttcctgacaacgcaacttcgtacacactacg

SEQ ID NO: 644372 - DNA, 75 bp, synthetic construct
  source 1..75: mol_type = other DNA
ttatcatggcggtgcttgctgttctggtcatatcaggagttgttgcctggaatgcacacggcagtcgtcagtacg

SEQ ID NO: 644373 - DNA, 75 bp, synthetic construct
  source 1..75: mol_type = other DNA
tttcggttgcactggccgccatgatggacaatgtggcaccttcacagacattgtcagcactgaccgaaaaaatgg

SEQ ID NO: 644374 - DNA, 75 bp, synthetic construct
  source 1..75: mol_type = other DNA
ccgacgtggcctttcacaatctgggcgggtcaaacccacacgcgcacatcatgctatccatgagggcaatcacgc

SEQ ID NO: 644375 - DNA, 75 bp, synthetic construct
  source 1..75: mol_type = other DNA
aactcaccagtaatgccatgtcgatgatggcagatatgcaggcgacgcgcagacgctgggaagagctgaacaccg

SEQ ID NO: 644376 - DNA, 75 bp, synthetic construct
  source 1..75: mol_type = other DNA
ttttgctgccatcaacacaccagaaaaacagccggagcacctgttccgttcactgggctttaatcacacctggga

SEQ ID NO: 644377 - DNA, 75 bp, synthetic construct
  source 1..75: mol_type = other DNA
ctgaccaacgccctgcgccgcgtgggtgtgcaactgcatcagcaagcggacggcatcagcttctccaccaccgaa

SEQ ID NO: 644378 - DNA, 75 bp, synthetic construct
  source 1..75: mol_type = other DNA
tggcatcagtttctccaccaccgaaaaacagtggcctgacatcgagcgcaccttaagcgtgcgcaccgatggcga

SEQ ID NO: 644379 - DNA, 75 bp, synthetic construct
  source 1..75: mol_type = other DNA
cactcgccaccggcggcgcgcatagcgctgcggtatcgtcgtcaaccgttgcgcccactcaggcggtgcggcaaa

SEQ ID NO: 644380 - DNA, 75 bp, synthetic construct
  source 1..75: mol_type = other DNA
ttacagggagcccctaaaaataccggacctgatgttattcggtacgcaacccgggcctgttatgggattttccca

SEQ ID NO: 644381 - DNA, 75 bp, synthetic construct
  source 1..75: mol_type = other DNA
gttttgatcgtgagggagaactaatgctatcactttactttaataaaactccagtatccagattgacattttcta

SEQ ID NO: 644382 - DNA, 75 bp, synthetic construct
  source 1..75: mol_type = other DNA
tccttaataaagtcattttctctcctcaatcacttgatggaaaatggaaaaaaaagaagttcagatttatgtatg

SEQ ID NO: 644383 - DNA, 75 bp, synthetic construct
  source 1..75: mol_type = other DNA
tgttccgtttcggtgcggatgtccgtgcgggcgacgatccgcgcgaagcccagcgtcgcctgattcgcgatggtg

SEQ ID NO: 644384 - DNA, 75 bp, synthetic construct
  source 1..75: mol_type = other DNA
aatttgccagaaaaatattctaaatttttgtttccacaaaaatcggtatcattagtccaattcatcgggaaagat

SEQ ID NO: 644385 - DNA, 75 bp, synthetic construct
  source 1..75: mol_type = other DNA
gcgcctggacccgtggacaatatattcttgagcattatcgctttgtgcaaaatttgccagaaaaatattctaaat

SEQ ID NO: 644386 - DNA, 75 bp, synthetic construct
  source 1..75: mol_type = other DNA
cagcaaggcaatattgtccagatagatattgaatattggcgatttgaggccgtggatctcatcattaatctgtag

SEQ ID NO: 644387 - DNA, 75 bp, synthetic construct
  source 1..75: mol_type = other DNA
atgcctgcgatcttaattgaaaaacatcgtgctgaccagcaagggaatattgtccagatagatattgaatattgg

SEQ ID NO: 644388 - DNA, 75 bp, synthetic construct
  source 1..75: mol_type = other DNA
tatcgcatcaccggctggggggcgctggaaggacataaagttttctatcacgaaacaggtgatgctgccaactta

SEQ ID NO: 644389 - DNA, 75 bp, synthetic construct
  source 1..75: mol_type = other DNA
gggccacgtcagtattacatcgacgctggaatacattgatgagaatgttgatagcttgcggaatatactggaaac

SEQ ID NO: 644390 - DNA, 75 bp, synthetic construct
  source 1..75: mol_type = other DNA
ttgaatggtcaacctttatggcatccatgctggtcggcaccattggtattcaatggtcacgctggtatctggcgc

SEQ ID NO: 644391 - DNA, 75 bp, synthetic construct
  source 1..75: mol_type = other DNA
gaaacatatattaatcctgaagttgctccgggttttattgaacaacttgaaaaccactcattttctgcagtctgg

SEQ ID NO: 644392 - DNA, 75 bp, synthetic construct
  source 1..75: mol_type = other DNA
tgcaaaacgtggtgtatgccatgcggctggcaacgaacgttgaaggcttacgctcgggcagtatttacaacatca

SEQ ID NO: 644393 - DNA, 75 bp, synthetic construct
  source 1..75: mol_type = other DNA
cgaatatgaaaataaagaattgaaaaaactcttcgatttattagatacgagagacatgatcttgaatgagttgca

SEQ ID NO: 644394 - DNA, 75 bp, synthetic construct
  source 1..75: mol_type = other DNA
taagcattcagataaagttaataatcatcaacaccatggcaaggttgataaaaaacatcgttcagagatagttga

SEQ ID NO: 644395 - DNA, 75 bp, synthetic construct
  source 1..75: mol_type = other DNA
tactttgctaaattctatgcgaaatatggagggtaataaagatagtcgtataaataaaaatgttgtcgttctggc

SEQ ID NO: 644396 - DNA, 75 bp, synthetic construct
  source 1..75: mol_type = other DNA
tgccctgtcgctgggcctggtggtcgttagtctgatgtctaatattcgtgttgatttgatggcttacctgttcgg

SEQ ID NO: 644397 - DNA, 75 bp, synthetic construct
  source 1..75: mol_type = other DNA
gtttgtaattatgacccagaaaggaaagttttaaccagtcatcacggaataataagaaatgaagaaaatgaatgt

SEQ ID NO: 644398 - DNA, 75 bp, synthetic construct
  source 1..75: mol_type = other DNA
acacgaagacatggcttcattcgcatatgaaaataaaaaattgaaaaaactcttcactttattagatacgagaga

SEQ ID NO: 644399 - DNA, 75 bp, synthetic construct
  source 1..75: mol_type = other DNA
aaagtaggtgaagaagatgcggcagagtacatcgccggatatgcgctggctaacgacgtcagcctgccggaagag

SEQ ID NO: 644400 - DNA, 75 bp, synthetic construct
  source 1..75: mol_type = other DNA
ccgacagatcctcagtctggccagcctgctggtcagcgtgctcacaaacctttcatttttaccgtggcgctgaac

SEQ ID NO: 644401 - DNA, 75 bp, synthetic construct
  source 1..75: mol_type = other DNA
gaccaggtaattgttcctcgtctgatgcggcaactacagcagggcggcggttgcttacgtttgccacgcggtggt

SEQ ID NO: 644402 - DNA, 75 bp, synthetic construct
  source 1..75: mol_type = other DNA
acactactgctttcagaccaaaacctgaagatatcttcaaatgtggacagacgctcaaaaaactaaacagaaata

SEQ ID NO: 644403 - DNA, 75 bp, synthetic construct
  source 1..75: mol_type = other DNA
gaatacgatcaacttgccgacgttcgctctttacaacgttgagcgatcgcaaccgtttaaccgcaacataaaaga

SEQ ID NO: 644404 - DNA, 75 bp, synthetic construct
  source 1..75: mol_type = other DNA
ccctgagcgaatttgccacactgaatccaggcgatgccattctgctcggcacgccacaggcgcgcgtggaaatac

SEQ ID NO: 644405 - DNA, 75 bp, synthetic construct
  source 1..75: mol_type = other DNA
tggtaagcactactttaaactggagggtggtgaattgcgggaatttaagaacaaggttactcacagtaacttagt

SEQ ID NO: 644406 - DNA, 75 bp, synthetic construct
  source 1..75: mol_type = other DNA
gtacttcaccaccaaaaagaacggcaaaacgtactacatcaaactccatgatccgcgcctgatgcgtgcgatgaa

SEQ ID NO: 644407 - DNA, 75 bp, synthetic construct
  source 1..75: mol_type = other DNA
acgatatcagacttgttcgcgagaccatccgtacgttaggccagcgtgtgcgggaaggttacacgccgcgtgagg

SEQ ID NO: 644408 - DNA, 75 bp, synthetic construct
  source 1..75: mol_type = other DNA
ccagcggaatatcagacgattatcaaaaccgtgctgaaaacccgcgacagtgataacgccaccatccgtgaagca

SEQ ID NO: 644409 - DNA, 75 bp, synthetic construct
  source 1..75: mol_type = other DNA
tggcgtaaggttgatgcgtcttatggtaaggaatcaccggaagtgcaggcgggtgaatttctggcacatatggcg

SEQ ID NO: 644410 - DNA, 75 bp, synthetic construct
  source 1..75: mol_type = other DNA
atgtaccgcagaaaatcgcgcttgcagctgtgggagcgggttatctgcttggctcgcttaaccgcagtgttgcgg

SEQ ID NO: 644411 - DNA, 75 bp, synthetic construct
  source 1..75: mol_type = other DNA
gtgcgattgcagagcgtgttgatccggaaaccggtgaaacccgtcgcgaagttgtcgaacgccctgtaccgatgg

SEQ ID NO: 644412 - DNA, 75 bp, synthetic construct
  source 1..75: mol_type = other DNA
tgcagctgtgggagcgggttatctgcttggctcgcttaaccgcagtgtggcgggggagggtgatgacgggggtaa

SEQ ID NO: 644413 - DNA, 75 bp, synthetic construct
  source 1..75: mol_type = other DNA
ggataaattccaggtgctgaaggcggtgcaggagaatatccgtaaaactggcggaaaaatagatgacagcaataa

SEQ ID NO: 644414 - DNA, 75 bp, synthetic construct
  source 1..75: mol_type = other DNA
ggataaacgtgaaattgtcctggtggcggataacatccctgacgggcggaccgttcgcgagaagttacgtcacga

SEQ ID NO: 644415 - DNA, 75 bp, synthetic construct
  source 1..75: mol_type = other DNA
ggcgtgatgagtggcattaaggacagtgacctgaaggtccgcgtggtgaagtcacagaaagaggctgaagcgctg

SEQ ID NO: 644416 - DNA, 75 bp, synthetic construct
  source 1..75: mol_type = other DNA
agggacagggcgcttcatttccaaaaccacggatgcggcggtgaaatcgctgaatggtattgatataccggaaca

SEQ ID NO: 644417 - DNA, 75 bp, synthetic construct
  source 1..75: mol_type = other DNA
ccgtggtttcacgggggatgatacggaggtacaggcccgccttgcccgtggcaacgcgccgacggcggaggagct

SEQ ID NO: 644418 - DNA, 75 bp, synthetic construct
  source 1..75: mol_type = other DNA
gggctggattgcgggaatttaagaacaaggttactcaaagtaacttagttgcaccgcgtacaaagcacctcatcc

SEQ ID NO: 644419 - DNA, 75 bp, synthetic construct
  source 1..75: mol_type = other DNA
aggccatggggcgtgcatcccgcgcacagtctccgtccactcaggcgatacaggacttgagcgaatcgctgatcc

SEQ ID NO: 644420 - DNA, 75 bp, synthetic construct
  source 1..75: mol_type = other DNA
gatgccggtccgacagcacaggagttaactgagcgtccacgccttcccgctcccggcgatattcatcccggacag

SEQ ID NO: 644421 - DNA, 75 bp, synthetic construct
  source 1..75: mol_type = other DNA
cgcactctgccaccctcacagatggacaaggcttctgcttatcgggtggtatccggtgtgtatcaggcggccgga

SEQ ID NO: 644422 - DNA, 75 bp, synthetic construct
  source 1..75: mol_type = other DNA
atggcctcaacgcctgatgaaaaaggatttatcgagttgcatatcggtgcttctgaaatcaatctttacgcgaaa

SEQ ID NO: 644423 - DNA, 75 bp, synthetic construct
  source 1..75: mol_type = other DNA
ctacatgcagctctggatggaaaaagcacaacaactcagtaagcagctatacccagtcatgagagaactgaactc

SEQ ID NO: 644424 - DNA, 75 bp, synthetic construct
  source 1..75: mol_type = other DNA
atgactgttcaaatctctgtcaaaaacctttcccctgttacctataaccagattccggtaatcacaactgagttg

SEQ ID NO: 644425 - DNA, 75 bp, synthetic construct
  source 1..75: mol_type = other DNA
gtgagacggacaagggcgttgcgttttattcccgtaagggcgtgacccgcacacctgaaggcaatctcatttcgg

SEQ ID NO: 644426 - DNA, 75 bp, synthetic construct
  source 1..75: mol_type = other DNA
aggtatgttgatgctgaatatccggtacgtcaggaggtttacgacgcttttaaaggtgtgattcaggccattaaa

SEQ ID NO: 644427 - DNA, 75 bp, synthetic construct
  source 1..75: mol_type = other DNA
ccttcctccacgcaaaaggaactgggcgcgccaccttctgttggagatgcgattaaaaacattcccgatggaaca

SEQ ID NO: 644428 - DNA, 75 bp, synthetic construct
  source 1..75: mol_type = other DNA
ggcgctgaatacaccgatgactgaaggatatgatgattcagcggtctgggtagcgaaaggggttaacctgattgg

SEQ ID NO: 644429 - DNA, 75 bp, synthetic construct
  source 1..75: mol_type = other DNA
gtggcagaaggtgtggaaagagtttgttgaggacggaggtaaaaccggctggtttaacatgggtgaccttgaagg

SEQ ID NO: 644430 - DNA, 75 bp, synthetic construct
  source 1..75: mol_type = other DNA
gtgggagcgtgttgttgccctggtcaaaggggtactgcgtcgcacggggttactgaagccgacagagctgaacga

SEQ ID NO: 644431 - DNA, 75 bp, synthetic construct
  source 1..75: mol_type = other DNA
attggcgctgctattgcgttgtctggtgccatcggcagttacgttttactttccccaaaagctgagctgccaacg

SEQ ID NO: 644432 - DNA, 75 bp, synthetic construct
  source 1..75: mol_type = other DNA
agcgggatttttaccggaaaaagtgctacatgagctaaaattccgccagcgtaaaaaatccaaagaaacagacaa

SEQ ID NO: 644433 - DNA, 75 bp, synthetic construct
  source 1..75: mol_type = other DNA
ccagcggatgcgaagtccggcaatcattaacgacgcgggctgacggacgtgagatccgttgctggcgggcgctgt

SEQ ID NO: 644434 - DNA, 75 bp, synthetic construct
  source 1..75: mol_type = other DNA
ggctttacctgattgacttagaacacgcattacgcgtcgctggcattcgcatcaaaggagaggagcatggaaata

SEQ ID NO: 644435 - DNA, 75 bp, synthetic construct
  source 1..75: mol_type = other DNA
atgcgggtattgcttcgacctgttctggtaccggaactcggactggttatcgttaagccaggccgtgaatccatg

SEQ ID NO: 644436 - DNA, 75 bp, synthetic construct
  source 1..75: mol_type = other DNA
cgttaagccgggccgtgaatccatgccggtattccacaatacccgggtactggtggagccggaaccgaaaagcat

SEQ ID NO: 644437 - DNA, 75 bp, synthetic construct
  source 1..75: mol_type = other DNA
ccgcacgttgccgcaaggctgtttttctacgaacgttgccctctggcaacccacggatgtgaagtccggcaatca

SEQ ID NO: 644438 - DNA, 75 bp, synthetic construct
  source 1..75: mol_type = other DNA
agtcttcaagagcagtgtggctatccatgctcctgtgcgtcattactatcaggtgcgtaatgcaatattgttgta

SEQ ID NO: 644439 - DNA, 75 bp, synthetic construct
  source 1..75: mol_type = other DNA
taagcacgttaatgaaatggcagattgaatacccgtcactacgtgaagcgatagcctggatgaaatggctacatg

SEQ ID NO: 644440 - DNA, 75 bp, synthetic construct
  source 1..75: mol_type = other DNA
ttccgcgaacgttgcccccttgcaaccagcggatgcgaagtccggcaatcattaacgacgcgggctgacggacgt

SEQ ID NO: 644441 - DNA, 75 bp, synthetic construct
  source 1..75: mol_type = other DNA
cgcagcctgacgtgattgtgcttgatgagccaacctctgcgctggatatctccgtgcaggcgcagatcctcaatt

SEQ ID NO: 644442 - DNA, 75 bp, synthetic construct
  source 1..75: mol_type = other DNA
tactggtaacgctacaggaaaatcgcgggctgacttatgtgctgatttcacacaatgtctcggtgatacgtcata

SEQ ID NO: 644443 - DNA, 75 bp, synthetic construct
  source 1..75: mol_type = other DNA
tgcagcaggtgatctctgctaaaacattctatggttgtgatgaggcgatggttgtgactaattcctacttcactc

SEQ ID NO: 644444 - DNA, 75 bp, synthetic construct
  source 1..75: mol_type = other DNA
gttcgataccaactatgagcgagttcgcgatgttcttcgtaagattaagccagacttgccgaaaggtcaggcact

SEQ ID NO: 644445 - DNA, 75 bp, synthetic construct
  source 1..75: mol_type = other DNA
atgtacagggaagactacgatccgaaaacaacattcagcgactatgaagcgagagcaaaggagtatgccttgtcg

SEQ ID NO: 644446 - DNA, 75 bp, synthetic construct
  source 1..75: mol_type = other DNA
cttcgggatttcaatactccaccctttaagaaagagcctgatgactggatcccgccggggctgacttatctcaaa

SEQ ID NO: 644447 - DNA, 75 bp, synthetic construct
  source 1..75: mol_type = other DNA
ccctgtttctgatgcggtggaattgtcttgggtgaatctgggaaacaacctgtatgcacctaattatcccaagat

SEQ ID NO: 644448 - DNA, 75 bp, synthetic construct
  source 1..75: mol_type = other DNA
gaggccgagctggccgtcatgcaggctatcgctgaaaagccgggagcattacgtgttctgacacatacgcttaac

SEQ ID NO: 644449 - DNA, 75 bp, synthetic construct
  source 1..75: mol_type = other DNA
accgcgcagcgtttattgcgggggagattggtggcgcagttgtcagtctgatagctaacgggattgtgatcagcc

SEQ ID NO: 644450 - DNA, 75 bp, synthetic construct
  source 1..75: mol_type = other DNA
ctacaggattgcagcaggcgcggcagcgtatcaaagctctggaagatgcattacggactcatgggttgattgact

SEQ ID NO: 644451 - DNA, 75 bp, synthetic construct
  source 1..75: mol_type = other DNA
acgttatcgcacagggtactgatgttggtaacgtggcgaacaaggccaacgaggccggacagggcgcttatgacg

SEQ ID NO: 644452 - DNA, 75 bp, synthetic construct
  source 1..75: mol_type = other DNA
atccccactgctgaactgatccccgcactctgcttcgcggtcatctttatctttgcccgtttccgctctcaaacg

SEQ ID NO: 644453 - DNA, 75 bp, synthetic construct
  source 1..75: mol_type = other DNA
tgatttcaatactccaccctttaagactgagcctgataactggatccagccggggctgacttatcttaaagtgcg

SEQ ID NO: 644454 - DNA, 75 bp, synthetic construct
  source 1..75: mol_type = other DNA
cggacaaaaaccaggaacgggagtgtaaccggccatcctttgttgtgtccggtgatgaccggaatatcacgatcc

SEQ ID NO: 644455 - DNA, 75 bp, synthetic construct
  source 1..75: mol_type = other DNA
gcctgctatagcccgcaaaatatattcatcagcgtttccgttggtggatattaccgtggtgccggatgacgagat

SEQ ID NO: 644456 - DNA, 75 bp, synthetic construct
  source 1..75: mol_type = other DNA
gcgacagggagctggtgctcaatcgtctcgacgagctggcgcagtacttcccgcacggactggaatacaaggtgg

SEQ ID NO: 644457 - DNA, 75 bp, synthetic construct
  source 1..75: mol_type = other DNA
agctactaaaaatgatactcgagtaactaaagtcggtaagtttttacgcagtacctctttagatgaactcccaca

SEQ ID NO: 644458 - DNA, 75 bp, synthetic construct
  source 1..75: mol_type = other DNA
tattatgatgatgtcaataagaatgagtcggctattccatatattggcaattacgatattttattgaatgatgct

SEQ ID NO: 644459 - DNA, 75 bp, synthetic construct
  source 1..75: mol_type = other DNA
aaaaaagaacgattcaaggatcactccatttggtagttttttacgaaaaacatcgttagatgagttacctcaatt

SEQ ID NO: 644460 - DNA, 75 bp, synthetic construct
  source 1..75: mol_type = other DNA
atgagggttaaacgctggttgttggcaggtattgcattgtgccttttaaccggtatgcgtgacccttttaaaccg

SEQ ID NO: 644461 - DNA, 75 bp, synthetic construct
  source 1..75: mol_type = other DNA
ggacggcagcagaaacgggacacagtacgatgcgtggggaaaggccatctgtaccacgcagggcgggctgacgcg

SEQ ID NO: 644462 - DNA, 75 bp, synthetic construct
  source 1..75: mol_type = other DNA
catattattaaatttaagtataatatctttatatgcggatgataatttagggttcagcttttttatgcaatggta

SEQ ID NO: 644463 - DNA, 75 bp, synthetic construct
  source 1..75: mol_type = other DNA
gatcaaatactaatgcatcgttgttatctatggtacagcgattttctgatattagcattatttttatcggcatat

SEQ ID NO: 644464 - DNA, 75 bp, synthetic construct
  source 1..75: mol_type = other DNA
ccgagggtggagtatctggctagatataaaaattatatttcttactgtatttaaaggttttattaataagtctgc

SEQ ID NO: 644465 - DNA, 75 bp, synthetic construct
  source 1..75: mol_type = other DNA
aatttttcaacggagtttattttaatattaaaaaactggactttaagttcgttaatagctttaggtttgttatca

SEQ ID NO: 644466 - DNA, 75 bp, synthetic construct
  source 1..75: mol_type = other DNA
atttatgatgataagccacagatcgaatatggtaatgtgccttatggtggttcattgtctacattaatagcccaa

SEQ ID NO: 644467 - DNA, 75 bp, synthetic construct
  source 1..75: mol_type = other DNA
gcgcgatgagtccaaaataaaggatgtcgttaggaaattaacagatacaacttgttctgttttgctaattcctga

SEQ ID NO: 644468 - DNA, 75 bp, synthetic construct
  source 1..75: mol_type = other DNA
atgatcttatgtacattagaagctggagcgtatggttagatctcaaaattatttttctgactgtttttaaaggtt

SEQ ID NO: 644469 - DNA, 75 bp, synthetic construct
  source 1..75: mol_type = other DNA
tcgggcaaaacaggtggtgttccaggtgaatgccgcgccaggcgctgcaacgggcggcgtaaaggttgccgatgt

SEQ ID NO: 644470 - DNA, 75 bp, synthetic construct
  source 1..75: mol_type = other DNA
gttcgttgttagaactgggatattatgtttgggcatcaaaggttgattgtgtcgaatatggaattccacagaacc

SEQ ID NO: 644471 - DNA, 75 bp, synthetic construct
  source 1..75: mol_type = other DNA
gtaataacgaccgggagcgggcgatcggactgctggctgagtatgcgatgaccaaatgtgacaaggttgccgcac

SEQ ID NO: 644472 - DNA, 75 bp, synthetic construct
  source 1..75: mol_type = other DNA
cgggcgcgggtatgagcggatcccctcgactgaggcatatgcggctgtttgccttattaccgacgccattactct

SEQ ID NO: 644473 - DNA, 75 bp, synthetic construct
  source 1..75: mol_type = other DNA
cgtgataaatctcagtcgacacaacacattaccacaacaattctctgaacaaatgttttttgcctgcctttccat

SEQ ID NO: 644474 - DNA, 75 bp, synthetic construct
  source 1..75: mol_type = other DNA
cagtggatcttttttgtggagccggggggctaacgcatggtctccagcgttcaggcatatccgtgaccgccggat

SEQ ID NO: 644475 - DNA, 75 bp, synthetic construct
  source 1..75: mol_type = other DNA
aaacgtaatgatgttattttgaaaactgttagggatgcaataggtggccttccaccattagaagatggtcaaaca

SEQ ID NO: 644476 - DNA, 75 bp, synthetic construct
  source 1..75: mol_type = other DNA
acctcaggtgatgcaccagttggccaccttcgcttttgaggactattcccgcagcgctgccagcgtgaagcagtg

SEQ ID NO: 644477 - DNA, 75 bp, synthetic construct
  source 1..75: mol_type = other DNA
cttcaacattctccattcacgtctcgaagagatgaacggcgttccggtggtgccgctgtacgacacgccgctttc

SEQ ID NO: 644478 - DNA, 75 bp, synthetic construct
  source 1..75: mol_type = other DNA
gcagcgcgccgtctggcatattttctggtgtcgtatatcgcggggatcctttgttccgggctggtgggttcaaag

SEQ ID NO: 644479 - DNA, 75 bp, synthetic construct
  source 1..75: mol_type = other DNA
attaaatctcgaaaggattcgtcaatcaaaaccaggtggaacatggaaggattgggatcctgagttggttgctgc

SEQ ID NO: 644480 - DNA, 75 bp, synthetic construct
  source 1..75: mol_type = other DNA
ttttttgtggtgcaggtggattaacccatggtttgatacaagcagggattggtgtcattgctggtattgatttag

SEQ ID NO: 644481 - DNA, 75 bp, synthetic construct
  source 1..75: mol_type = other DNA
gggcgcggcaaggcagtgaaccaggctcttactgagaaacagggcgttcctgttctggctgactgtaagcgctgc

SEQ ID NO: 644482 - DNA, 75 bp, synthetic construct
  source 1..75: mol_type = other DNA
gtacgctgtttcacatgaccccgctggaagccgttcagggcgttacgcgtaatgcggcaaaggcacttggacttg

SEQ ID NO: 644483 - DNA, 75 bp, synthetic construct
  source 1..75: mol_type = other DNA
gtgcttccggattcgtaggaacccggctgctggaaacggctcatactgagtttaatatcaaaaacctggacaagc

SEQ ID NO: 644484 - DNA, 75 bp, synthetic construct
  source 1..75: mol_type = other DNA
ttatgaagatatcgccagagcgggcggcgggatcttatctacggttaatgccacgcgggcagccagcgaaacaca

SEQ ID NO: 644485 - DNA, 75 bp, synthetic construct
  source 1..75: mol_type = other DNA
tcatcatcaccatgcagtcgattgacggctctatcgccctgattggcctgaaagtggcggcagcgctggtgggga

SEQ ID NO: 644486 - DNA, 75 bp, synthetic construct
  source 1..75: mol_type = other DNA
actcaggcagcagattttgataaccgtatctaccagatggaactgcaacggtacgagttacagaaagaactggtt

SEQ ID NO: 644487 - DNA, 75 bp, synthetic construct
  source 1..75: mol_type = other DNA
atttcagtgaccatccgcttatgccaccgccctctgcacaactgtttgcagggcaccttcccgtcgagtggatac

SEQ ID NO: 644488 - DNA, 75 bp, synthetic construct
  source 1..75: mol_type = other DNA
gatcccggggaccctatggggaagatgttttttaacgttctggcaacctttgctgaatttgagggagatctgata

SEQ ID NO: 644489 - DNA, 75 bp, synthetic construct
  source 1..75: mol_type = other DNA
aaaccgccagagttgtgtttgatgaattaagcgtcaccgaaccggcgacggtcggggagattgcgcagaatacgt

SEQ ID NO: 644490 - DNA, 75 bp, synthetic construct
  source 1..75: mol_type = other DNA
cgggtcgggtaaaaccgaaaccttctatgggtttatcgttaacttcctgctgtggtgccgtggctactgcctctc

SEQ ID NO: 644491 - DNA, 75 bp, synthetic construct
  source 1..75: mol_type = other DNA
ccatcaaggccgagggcagttaagatatcaaaaacccgttatccggtgaaacgcagcaccgctccgcttaagtga

SEQ ID NO: 644492 - DNA, 75 bp, synthetic construct
  source 1..75: mol_type = other DNA
aaatacagcatcaccggggaccatcccgaaacgactggagcatctgcggggtgctctggaagttgtgttcataac

SEQ ID NO: 644493 - DNA, 75 bp, synthetic construct
  source 1..75: mol_type = other DNA
gtcgtcagcgaggattgtgtcaccgtacctatctctttcttcttcattggtatgagcatttagtctgcgacgata

SEQ ID NO: 644494 - DNA, 75 bp, synthetic construct
  source 1..75: mol_type = other DNA
acctgtcagtcattccgggtgccacggaaacacaccagtttgcggctcaacagttactgctgggcattcctcagg

SEQ ID NO: 644495 - DNA, 75 bp, synthetic construct
  source 1..75: mol_type = other DNA
tggcagtaagggacgcacggaagacagcataaacctgtggatgagtgttccactgggacgctggctgggtgggaa

SEQ ID NO: 644496 - DNA, 75 bp, synthetic construct
  source 1..75: mol_type = other DNA
tgtaggattaaatggcttccaagatgaatatcgtcacaaaacgaggcagaactacattgggatgtcatatggtac

SEQ ID NO: 644497 - DNA, 75 bp, synthetic construct
  source 1..75: mol_type = other DNA
cgggggccttaggcggaggatggtctcttggggggctgggcgcgatatctgttgattctatatatgcccgaagcc

SEQ ID NO: 644498 - DNA, 75 bp, synthetic construct
  source 1..75: mol_type = other DNA
ctggaatcagatggcactatacagtcctttaaaatacccttcactttgccggctattgctctacgtgaaggatat

SEQ ID NO: 644499 - DNA, 75 bp, synthetic construct
  source 1..75: mol_type = other DNA
taatacggataacgatatccgggccacggcacgggtgcagcgcagcaccgggcaggacacccgttatgaagccgg

SEQ ID NO: 644500 - DNA, 75 bp, synthetic construct
  source 1..75: mol_type = other DNA
tggcgcgtgacccctcatgatcttagaccggatctttacccaaacccagatgacagcttgcctaaaacggaagca

SEQ ID NO: 644501 - DNA, 75 bp, synthetic construct
  source 1..75: mol_type = other DNA
aaagcaagtggcaggcggaggaagtgctgcgtgaatggtataacaaagcaccaacagaacgttcattaactatca

SEQ ID NO: 644502 - DNA, 75 bp, synthetic construct
  source 1..75: mol_type = other DNA
cgccgaatttgagcagcggttaaatggcgtaagctatgcagaaatcgccgcggcgggcggtggtattttatccac

SEQ ID NO: 644503 - DNA, 75 bp, synthetic construct
  source 1..75: mol_type = other DNA
ccgggggagacatccggctctgccggtgtggtagatgacaaggggagggtgtatctgagcggactgtctgaaact

SEQ ID NO: 644504 - DNA, 75 bp, synthetic construct
  source 1..75: mol_type = other DNA
atgataaaatatatattcgcactcacacttctgctttccgggtctgtctgtgccgatcaaattcagggactcgtt

SEQ ID NO: 644505 - DNA, 75 bp, synthetic construct
  source 1..75: mol_type = other DNA
agcactcgcggtgctcaacaaaaaacccgaagcacttggcggtaatgaaacgatgggagataaaattatcagtgc

SEQ ID NO: 644506 - DNA, 75 bp, synthetic construct
  source 1..75: mol_type = other DNA
tcattattatcatactattttttatttgtcttactttgcagactggtgcaatcttaaattttagattatggtttt

SEQ ID NO: 644507 - DNA, 75 bp, synthetic construct
  source 1..75: mol_type = other DNA
gtacgtttgctcgaggttttgataatgtccgccagggtgatgaactggatgtcccggcacaagttagtgggcttt

SEQ ID NO: 644508 - DNA, 75 bp, synthetic construct
  source 1..75: mol_type = other DNA
tttgctcgaggttttgataatgtccgccagggtgatgaactggatgtcccggcacaagttagtgaaaaaaattaa

SEQ ID NO: 644509 - DNA, 75 bp, synthetic construct
  source 1..75: mol_type = other DNA
aattaaccccgccgccgggtaatagcagtgacaaccttgagcaacagatagccagtgacctgctccccgttgatt

SEQ ID NO: 644510 - DNA, 75 bp, synthetic construct
  source 1..75: mol_type = other DNA
tggctggtaaatcaggcaaaaatgacgcaaataatgctcaggctatctgtgaagcagttcgtcgcccacatatgc

SEQ ID NO: 644511 - DNA, 75 bp, synthetic construct
  source 1..75: mol_type = other DNA
atggaggtatactccggggctcactactggacaaggttgtttcgacaatatggtcatgaaccacgtctgatggtt

SEQ ID NO: 644512 - DNA, 75 bp, synthetic construct
  source 1..75: mol_type = other DNA
ggattcgggatcaagatgaaactgctgcctcagacagaaaacccgttggtggaagcatcagttgccagtactgaa

SEQ ID NO: 644513 - DNA, 75 bp, synthetic construct
  source 1..75: mol_type = other DNA
atgagctgtttaaaacagtgcgctcactcgggattatcagtgttgttgttggcgtaccgggtgtcggcaaaactt

SEQ ID NO: 644514 - DNA, 75 bp, synthetic construct
  source 1..75: mol_type = other DNA
gggcgacaagtctcaggaagatattgctgatgaagccggaatgtctccggcaactctctctgatcttcgcaaagg

SEQ ID NO: 644515 - DNA, 75 bp, synthetic construct
  source 1..75: mol_type = other DNA
agctgcgtaaaaaggatggttcaatcgctacagggcttcaggacgcagtgcttactgtccgtaaggacgctgcat

SEQ ID NO: 644516 - DNA, 75 bp, synthetic construct
  source 1..75: mol_type = other DNA
ttacactacgaagtggatctctcagagaaaactcaggaagaaaaggatcctgcccgcgatcgtcgccgcaaactc

SEQ ID NO: 644517 - DNA, 75 bp, synthetic construct
  source 1..75: mol_type = other DNA
caaaaagaatgtcattattggcttactgttggttgtttttttactgacagcgttctggtgtcaggggcgtccagg

SEQ ID NO: 644518 - DNA, 75 bp, synthetic construct
  source 1..75: mol_type = other DNA
caaatttggcatcgtcatctcttccattctcatctgtggcgcgctgggcactatggcgggtggcaatgccattat

SEQ ID NO: 644519 - DNA, 75 bp, synthetic construct
  source 1..75: mol_type = other DNA
tacacattgatcgtattgaagataatattactgaatatgaccggttttgtcccgcatggcaaaagcagatcaccg

SEQ ID NO: 644520 - DNA, 75 bp, synthetic construct
  source 1..75: mol_type = other DNA
caaaacgctggctaagcttgccaatcatgcggcaaaaaaatggcagcggcagacgggggggggtggtggatttat

SEQ ID NO: 644521 - DNA, 75 bp, synthetic construct
  source 1..75: mol_type = other DNA
agggcaattgaagttgcgaatctgattcttgatttacccggaattagcaaagctgagttagttgataaaacttgc

SEQ ID NO: 644522 - DNA, 75 bp, synthetic construct
  source 1..75: mol_type = other DNA
ggggctttaggggtacatgatacgttgatttctgttgttgccagcaatgcagataagaaatattttcttaaagag

SEQ ID NO: 644523 - DNA, 75 bp, synthetic construct
  source 1..75: mol_type = other DNA
ataaattagaagccggtgatacgctggtggttctcaagcttgaccgcttaggacgtgattgcatcgacctacaga

SEQ ID NO: 644524 - DNA, 75 bp, synthetic construct
  source 1..75: mol_type = other DNA
acaccatggctgaattctgctccgggtatatttattaatgggtatttctcagcagcgccgaatacgataggttca

SEQ ID NO: 644525 - DNA, 75 bp, synthetic construct
  source 1..75: mol_type = other DNA
ttttcgcatgatgcgctattccatcgcggcgatgcaaaaccatctggatgcaggctataaagagcttccattggt

SEQ ID NO: 644526 - DNA, 75 bp, synthetic construct
  source 1..75: mol_type = other DNA
ctgatggggttattgctgacaactcgatgattaaaatgatcgatgccagtcttcgtgagggagcattgtatcgat

SEQ ID NO: 644527 - DNA, 75 bp, synthetic construct
  source 1..75: mol_type = other DNA
ctgaataacttctggtcggcggtggaaaccgtgtttaccgatgactgggacaaaaagccgcgctattcccgccta

SEQ ID NO: 644528 - DNA, 75 bp, synthetic construct
  source 1..75: mol_type = other DNA
cttcgcgagggagcattgtatcgcttccgtgacccggcgacagggttgggggatgaagggaagatggtgaaactg

SEQ ID NO: 644529 - DNA, 75 bp, synthetic construct
  source 1..75: mol_type = other DNA
gtggcaacgactgatcccgaaggcgagatcaacgagcagaacgttgagcgagtcatccgccaggtgcttgagcgc

SEQ ID NO: 644530 - DNA, 75 bp, synthetic construct
  source 1..75: mol_type = other DNA
aagccggtaatgcgattattttctctccgcatcccggcgcacgtcagtgtagctggaaggcgatagaagtcgtta

SEQ ID NO: 644531 - DNA, 75 bp, synthetic construct
  source 1..75: mol_type = other DNA
gctgtgcccggttcttggtctgtatatcgaagaggactggaaagctgcctgccaccgcgtggtggagttgctgac

SEQ ID NO: 644532 - DNA, 75 bp, synthetic construct
  source 1..75: mol_type = other DNA
ggaacaaaatgttatcttaaccaacgggttggaaaattcatacccaaagaaaatattctaaacaataattattta

SEQ ID NO: 644533 - DNA, 75 bp, synthetic construct
  source 1..75: mol_type = other DNA
aatgcattgatgtcaaaactactcatcccaattccctgcccggataatccggaaaaatcccttgccatccagtct

SEQ ID NO: 644534 - DNA, 75 bp, synthetic construct
  source 1..75: mol_type = other DNA
tgtttgtcgcatcgggatggaccgatgccgaaattacccaaacaggcaaagaattcaaacacggtgatggtgggg

SEQ ID NO: 644535 - DNA, 75 bp, synthetic construct
  source 1..75: mol_type = other DNA
ttaaaggcgcgacgcttgctgacaataaaacgcagttggatcgccatgtgagtgaaggtctggcacagtcaggag

SEQ ID NO: 644536 - DNA, 75 bp, synthetic construct
  source 1..75: mol_type = other DNA
tcggctatgggctgttagcgggcctgctgttgatcggcagcacgcgtgccctggccgtggacaacaacctgcatt

SEQ ID NO: 644537 - DNA, 75 bp, synthetic construct
  source 1..75: mol_type = other DNA
tcccgcgtgaaatcgagttgcgccagaaacaatacgagtactatcgtgatttactgttcagttttcccaaacctg

SEQ ID NO: 644538 - DNA, 75 bp, synthetic construct
  source 1..75: mol_type = other DNA
ttaatgtcaaagtaacgttgacaggaacagaagatagtgctttacccggctttctggcctttgactcctcgtcat

SEQ ID NO: 644539 - DNA, 75 bp, synthetic construct
  source 1..75: mol_type = other DNA
gcaaaaaagaaattacctttgaaccgaatcagaccgcttataataagttcatcaacgaaatggcgatggataata

SEQ ID NO: 644540 - DNA, 75 bp, synthetic construct
  source 1..75: mol_type = other DNA
gatgtgatctgctgggtgctgattgccgtagtaaccgttggtatctgcatgtttattgaatggtggacagcatga

SEQ ID NO: 644541 - DNA, 75 bp, synthetic construct
  source 1..75: mol_type = other DNA
caatgtaatcaccatggggcagggctggaaaggaaccgttggatggaatgctgccggaggggcactgggtaactg

SEQ ID NO: 644542 - DNA, 75 bp, synthetic construct
  source 1..75: mol_type = other DNA
tgcctgtgtctggcgggcgtcggctacggctggtatagcgccccgcaaaaactcaccctctggttcccgccggac

SEQ ID NO: 644543 - DNA, 75 bp, synthetic construct
  source 1..75: mol_type = other DNA
gattaggaaagatattgttaaccaaaatataaaccacaatggaataaatataaaaacatatatttgttatgatgt

SEQ ID NO: 644544 - DNA, 75 bp, synthetic construct
  source 1..75: mol_type = other DNA
ttcacacataagtggggggactgcgaatggaaccatcattgatggtggagggcagaaagtaacaactcaggggca

SEQ ID NO: 644545 - DNA, 75 bp, synthetic construct
  source 1..75: mol_type = other DNA
gatacaggcaacatagcacaacaacattcagataatattaattctcttgattttcatcggggagataaaaaggca

SEQ ID NO: 644546 - DNA, 75 bp, synthetic construct
  source 1..75: mol_type = other DNA
tgtttatatactcaaagaatatggtggaatatatacagattatgacgtcactcctgcttatggaaaaaatgtcta

SEQ ID NO: 644547 - DNA, 75 bp, synthetic construct
  source 1..75: mol_type = other DNA
gaatataaatcacttaaggtggaaatagataaaaaaattcatgtaatttggatcgctggcgcgccacctgagact

SEQ ID NO: 644548 - DNA, 75 bp, synthetic construct
  source 1..75: mol_type = other DNA
acaagcctgttgaagaaggcgcagaagtaaagagcaccttgctctatctcaacggttcgcaactggcacagaaag

SEQ ID NO: 644549 - DNA, 75 bp, synthetic construct
  source 1..75: mol_type = other DNA
cgcaacggctcactgctggcgcgcaaagagaaagagtactgttccagacgttgcgcttcgcacgaccagatggct

SEQ ID NO: 644550 - DNA, 75 bp, synthetic construct
  source 1..75: mol_type = other DNA
cgaggaacttaatgtattaaaaaataaggaacaacttgatgatggttttcatgccaaattaaaaacgctttttga

SEQ ID NO: 644551 - DNA, 75 bp, synthetic construct
  source 1..75: mol_type = other DNA
ggcgggtgtgttcgcgcacgaggtcgcgcacatcgctaatgaggatctgcgtgtcatggggctggcggattccgt

SEQ ID NO: 644552 - DNA, 75 bp, synthetic construct
  source 1..75: mol_type = other DNA
caaaaatatgcccgctttatgacgtcaccgccatccgttaaacccgcttcgtcaggtaaaaatcgggaggccgca

SEQ ID NO: 644553 - DNA, 75 bp, synthetic construct
  source 1..75: mol_type = other DNA
tgacgcgccacagtgagttaagtttcagcaccttttttgtctcttcgatgagcgagctattaaagcaggttgccc

SEQ ID NO: 644554 - DNA, 75 bp, synthetic construct
  source 1..75: mol_type = other DNA
acgtccagcgagcaaacgctgaatttctttgcctggatggaacaaattgatcaggttacaccagtaactccaggc

SEQ ID NO: 644555 - DNA, 75 bp, synthetic construct
  source 1..75: mol_type = other DNA
aaagcaatatcgttttaggcaccgctactccagatatcgacctggctccgacctccagcgaacaaacgttaaatt

SEQ ID NO: 644556 - DNA, 75 bp, synthetic construct
  source 1..75: mol_type = other DNA
gcgcagatccgattctcaacaacaccagcacgggtgaagccaccggcgtcggcgtgcgtttaatgaataaagatc

SEQ ID NO: 644557 - DNA, 75 bp, synthetic construct
  source 1..75: mol_type = other DNA
attttcatggaaatgtcatttagttttagaaattattattggctgttccctttacttccttttttagttattaat

SEQ ID NO: 644558 - DNA, 75 bp, synthetic construct
  source 1..75: mol_type = other DNA
ctgaaggcaataaccgaaacgctatctggcgtaacattcccaccggcaggacagatgatgttgcatgaatcactc

SEQ ID NO: 644559 - DNA, 75 bp, synthetic construct
  source 1..75: mol_type = other DNA
tacgaagagaacagcagtgaaattattgattcggtgcaaaacgaaactatcgatgccggttttgtccattttccg

SEQ ID NO: 644560 - DNA, 75 bp, synthetic construct
  source 1..75: mol_type = other DNA
tagcatattcatatttagagcgttctattctaaaagaaattcaaaatttagacctgcaatcccatcaggcgacgt

SEQ ID NO: 644561 - DNA, 75 bp, synthetic construct
  source 1..75: mol_type = other DNA
aaagccggtagaaggcagtccactgtttttactgcaaatgtgcacggaacaattagtggagattggaaaaatttg

SEQ ID NO: 644562 - DNA, 75 bp, synthetic construct
  source 1..75: mol_type = other DNA
tgcccaggaattccacacaggagctaaattacggggcttatcacaaactggagttgataatggatgcaacccaaa

SEQ ID NO: 644563 - DNA, 75 bp, synthetic construct
  source 1..75: mol_type = other DNA
tttacttaccgatttaaatggttgcttccgtggaaagcgtattcctgtttcaagcctgaagaagctcgagaaagg

SEQ ID NO: 644564 - DNA, 75 bp, synthetic construct
  source 1..75: mol_type = other DNA
ataataatgatgtatgccagaggataaattcgagggcaaaaatcaaaaatgaaatgttgggtggcgctattcgat

SEQ ID NO: 644565 - DNA, 75 bp, synthetic construct
  source 1..75: mol_type = other DNA
gataaccttaaggataaatattttgcagataatctttatgagacgtttttggctaactttcccgagcaattagat

SEQ ID NO: 644566 - DNA, 75 bp, synthetic construct
  source 1..75: mol_type = other DNA
ttatcaacatgcaaaataccgatattacggttgatcgtaatggcagtctggcgctgggtttgtggacgctcagcg

SEQ ID NO: 644567 - DNA, 75 bp, synthetic construct
  source 1..75: mol_type = other DNA
aagtacggaatcgaatcttttgcactgattcacgactccttcggtaccattccggctgacgctgcgaacctgttc

SEQ ID NO: 644568 - DNA, 75 bp, synthetic construct
  source 1..75: mol_type = other DNA
tcatgacgctggcttacgggtccaaagagttcggcttccgtcaacaagtgctggaagataccattcagccagcta

SEQ ID NO: 644569 - DNA, 75 bp, synthetic construct
  source 1..75: mol_type = other DNA
acgacttctctgacatcgaactggctgctatcccgttcaacactctggctgaccattacggtgagcgtttagctc

SEQ ID NO: 644570 - DNA, 75 bp, synthetic construct
  source 1..75: mol_type = other DNA
aacaggaaaaaaagaacccgcaaaggacgttgaggctcggttgtttccccagtgtatgcgcttgcattttaccgg

SEQ ID NO: 644571 - DNA, 75 bp, synthetic construct
  source 1..75: mol_type = other DNA
ggtaagcctgttttagtgagtacgcgtggggggatgacggaatttgtcaaagaaaatactacgggattccattta

SEQ ID NO: 644572 - DNA, 75 bp, synthetic construct
  source 1..75: mol_type = other DNA
gccggtatccaaagttggcgtaaccttcgatagcacggctaagacaactggtgctacgcctttgttgagcaacac

SEQ ID NO: 644573 - DNA, 75 bp, synthetic construct
  source 1..75: mol_type = other DNA
acgggctctcgaccgggcggccgccagtgttcgcgaagcgctgtccgtttatgtaacccgcggaggaaatattga

SEQ ID NO: 644574 - DNA, 75 bp, synthetic construct
  source 1..75: mol_type = other DNA
tattaatgtatcaccacgtcggtaataaaccaggactggtcacattatccccccgaaccttccgggcgcagatga

SEQ ID NO: 644575 - DNA, 75 bp, synthetic construct
  source 1..75: mol_type = other DNA
gccgaaaatgcccaaaaattcgttttctcaaaatatagttgggaacatgtaactcagcgttttgaaactcagatg

SEQ ID NO: 644576 - DNA, 75 bp, synthetic construct
  source 1..75: mol_type = other DNA
gaatcctaaaatacaaatccgaagtgattcaagttaatcctgagttaatagctaaagtggctgaaatggcaggat

SEQ ID NO: 644577 - DNA, 75 bp, synthetic construct
  source 1..75: mol_type = other DNA
attttttgaaatcattatcaccaacgcttgattaccacgaaggtccgataggtaaacttccttttaaaggaaagc

SEQ ID NO: 644578 - DNA, 75 bp, synthetic construct
  source 1..75: mol_type = other DNA
gaaatttactacacgaaggacaatatgatgtagtaatagactctgagctttttgatggttcacttacatatggtg

SEQ ID NO: 644579 - DNA, 75 bp, synthetic construct
  source 1..75: mol_type = other DNA
atatcacaccgcagataaaatatgaatttaaccatccagatacagcaatcagttttattcgccagggattaggca

SEQ ID NO: 644580 - DNA, 75 bp, synthetic construct
  source 1..75: mol_type = other DNA
ctattaaaaaccatcgaaatgcagatggtagtcttaaatcaagaccacaaaatacacaatatttttttaaagatg

SEQ ID NO: 644581 - DNA, 75 bp, synthetic construct
  source 1..75: mol_type = other DNA
caaaaaattcagcgaactgcgcagttatgacgaccgcctgcgtcactatgctgatatgagaatcagtattgatct

SEQ ID NO: 644582 - DNA, 75 bp, synthetic construct
  source 1..75: mol_type = other DNA
catgaaggtaacaaaggcttcgccgatctcgtcgccgaaggtgcctacaaaaccttcccggccgacagtgacggt

SEQ ID NO: 644583 - DNA, 75 bp, synthetic construct
  source 1..75: mol_type = other DNA
aaaaagcgttctccagcgtcaagggtatgaatgaacctgaagagagcatgattaatcttgttaaaaccagcaatg

SEQ ID NO: 644584 - DNA, 75 bp, synthetic construct
  source 1..75: mol_type = other DNA
acgacggtgcagactgacaccacacgtatccagacggtatacgagccgggaagcttcacgccgctcatccgggtc

SEQ ID NO: 644585 - DNA, 75 bp, synthetic construct
  source 1..75: mol_type = other DNA
aggccaccgaagccgtggtcctgacgcgagtcgatgattacccaatgcaacaactgctgcgtgccgttgtagata

SEQ ID NO: 644586 - DNA, 75 bp, synthetic construct
  source 1..75: mol_type = other DNA
caatatttcatcggccagtataaaataacaaaagatgattatttaaagaaaatacctttaactgcacaattaatt

SEQ ID NO: 644587 - DNA, 75 bp, synthetic construct
  source 1..75: mol_type = other DNA
tcaacactataaaccaaaccattaaggataactttgatgatatttttcggcaacagtcagagaatatgagcaatt

SEQ ID NO: 644588 - DNA, 75 bp, synthetic construct
  source 1..75: mol_type = other DNA
catcgtatcgtttgtcgaacccgatgacgatgtcatcggcgtatctgaccattaccacattgcctgtggcatagc

SEQ ID NO: 644589 - DNA, 75 bp, synthetic construct
  source 1..75: mol_type = other DNA
agccagcgaggctttgcacccatcgttcgagggatcgccaaaagcaacgccgaagtcagtattgaacaaaacggc

SEQ ID NO: 644590 - DNA, 75 bp, synthetic construct
  source 1..75: mol_type = other DNA
ctcatgtgtaccagatcgacagacaagatctcggcaaagcgtaccacggacagaagatgattcctgcccgatgcg

SEQ ID NO: 644591 - DNA, 75 bp, synthetic construct
  source 1..75: mol_type = other DNA
ggcgctggtgaaagtactgtcagaacggcgatagctgcacttgagaaagaggggtggctcactcgtacgcagcgc

SEQ ID NO: 644592 - DNA, 75 bp, synthetic construct
  source 1..75: mol_type = other DNA
ttccgttcgggtgcaattttcacgacataaaagccaaggggatctcagattacgaaggcagcagtcgcgacaaac

SEQ ID NO: 644593 - DNA, 75 bp, synthetic construct
  source 1..75: mol_type = other DNA
agggttctacggcatcaggtcacctggacgttgcactcagcaaagttggtgaagtcttgatttatactccctccg

SEQ ID NO: 644594 - DNA, 75 bp, synthetic construct
  source 1..75: mol_type = other DNA
atcctttttctacaggcggaggcggtgttcattttgaagcacatgtccaagcgtcttttgttgctctaatgctaa

SEQ ID NO: 644595 - DNA, 75 bp, synthetic construct
  source 1..75: mol_type = other DNA
gcattgtgggcgataatgggcaattgtatttaggttcctcaatggatacaggaaggctaaaagttatatggggaa

SEQ ID NO: 644596 - DNA, 75 bp, synthetic construct
  source 1..75: mol_type = other DNA
atggatgagcaaatggaaatcgaccagttaacgaaacagttccaaatactggacgaagaacaaagtaaattgccc

SEQ ID NO: 644597 - DNA, 75 bp, synthetic construct
  source 1..75: mol_type = other DNA
atgtctgaaaacaataatgcacaggtagctttgttaaatacacagttaagcgagtttgccccaaccatgccccat

SEQ ID NO: 644598 - DNA, 75 bp, synthetic construct
  source 1..75: mol_type = other DNA
gccacccgccagatggcaaaaacactgcctgctccgctcaaccgctgggcaggcaggctggctgaccaggcctgg

SEQ ID NO: 644599 - DNA, 75 bp, synthetic construct
  source 1..75: mol_type = other DNA
ggacaagttaaccaaaattacagatgccagactttgcaaaggtttcagtgactgggctagttcagtcaaagaagg

SEQ ID NO: 644600 - DNA, 75 bp, synthetic construct
  source 1..75: mol_type = other DNA
gtacaagccgattatgatcggcagtgaagacaatctggaagttttcggcgtagtgacctacatcgtaaagtctgc

SEQ ID NO: 644601 - DNA, 75 bp, synthetic construct
  source 1..75: mol_type = other DNA
tgggatttcagtcacttcgtcgttctggtcagcgtaaagcgtaaccgttatgtactgcatgatccggccaggggc

SEQ ID NO: 644602 - DNA, 75 bp, synthetic construct
  source 1..75: mol_type = other DNA
tgctggcaatccagaacgcgcctgtaccagggaaatcggcgctgaaagccgtgcagttacggcttgatcagaaca

SEQ ID NO: 644603 - DNA, 75 bp, synthetic construct
  source 1..75: mol_type = other DNA
tcccgagcggctttttatctttagctctcagccagagcgccgctttcgtaccattccccgcccgctggcgaaaga

SEQ ID NO: 644604 - DNA, 75 bp, synthetic construct
  source 1..75: mol_type = other DNA
atccatctttacgatcatcacgttggtctggtcgtggagcaactgcgctgcattactaacggccaaagtacggac

SEQ ID NO: 644605 - DNA, 75 bp, synthetic construct
  source 1..75: mol_type = other DNA
ctgcctgctccgctcaaccgctgggttggcagactggctgaccaggcctggcatgtggtgatggtggaggccgtt

SEQ ID NO: 644606 - DNA, 75 bp, synthetic construct
  source 1..75: mol_type = other DNA
cgctggagcaggttatcagcggtgaccagcctttgcagcgggcgctgaccgtgctgcgtgacaacacacaacctg

SEQ ID NO: 644607 - DNA, 75 bp, synthetic construct
  source 1..75: mol_type = other DNA
cagaacctgaagctgtttatcgataatgacctgagtctggaggatggcgataacaacgtcattattcgcgaagat

SEQ ID NO: 644608 - DNA, 75 bp, synthetic construct
  source 1..75: mol_type = other DNA
gctgcgttttgctcgctggtcagagagcgattttgatacgtcaatgtggaccatccctcttgatgggcattgcag

SEQ ID NO: 644609 - DNA, 75 bp, synthetic construct
  source 1..75: mol_type = other DNA
atgttggtgatcgtgaacaaagctgagttttacgctaccgtagatctttctgctgatgacctgaaggaactgctg

SEQ ID NO: 644610 - DNA, 75 bp, synthetic construct
  source 1..75: mol_type = other DNA
tcaccggaactcattggtgaaataaaaaaaggtacgagagttgcgctgaaatatgattcttatccctatcagcga

SEQ ID NO: 644611 - DNA, 75 bp, synthetic construct
  source 1..75: mol_type = other DNA
ttgatagtttaattacgaaagatcgtatgcgtgtcgatgtcgtggtcgctttcttcgtgcgggtaaaaccgtcgg

SEQ ID NO: 644612 - DNA, 75 bp, synthetic construct
  source 1..75: mol_type = other DNA
ttatgatgcgtatggtacacagcagttctactatccaaacataattaagtatgacccagatcaatttagggggtt

SEQ ID NO: 644613 - DNA, 75 bp, synthetic construct
  source 1..75: mol_type = other DNA
tgctggtgaagtggcccaccggttaatcgtcccttcatcggatattgacctgggggagaccgagcttccggtgct

SEQ ID NO: 644614 - DNA, 75 bp, synthetic construct
  source 1..75: mol_type = other DNA
cgatacccaaacgaagttatcaacattctttctgagaagggttgcaccatgcaggctgcatggcgtgtttacaga

SEQ ID NO: 644615 - DNA, 75 bp, synthetic construct
  source 1..75: mol_type = other DNA
atggcggcttacgccgccgttgaaactttaatcatcacccgccacgcggatcaccactttgccgaagtttttacc

SEQ ID NO: 644616 - DNA, 75 bp, synthetic construct
  source 1..75: mol_type = other DNA
atgccgcctgggtacgtgcaacaggaaataccggcacacagttcgtgaagcaggccgcaacgttctttggccccg

SEQ ID NO: 644617 - DNA, 75 bp, synthetic construct
  source 1..75: mol_type = other DNA
atgccgcctgggtacgtgctacaggaaataccggcacacagttcgtgaagcaggctgcgacgttctttggacccg

SEQ ID NO: 644618 - DNA, 75 bp, synthetic construct
  source 1..75: mol_type = other DNA
aaaaccgtgatgcgctgtcgcggaagctggaaattgaacagcaagaagcgtttatgacacttgagcaggagcagc

SEQ ID NO: 644619 - DNA, 75 bp, synthetic construct
  source 1..75: mol_type = other DNA
cggaacgccgctggtggcgattgaagcggcgctggagagcgccgggcaaaggctcccctgcgagccgccgcatta

SEQ ID NO: 644620 - DNA, 75 bp, synthetic construct
  source 1..75: mol_type = other DNA
taagcgcccagcaaaacgtagaaacgacacgtcagaccgccgaagctgaccgtgccaagcaggtagcgctgattg

SEQ ID NO: 644621 - DNA, 75 bp, synthetic construct
  source 1..75: mol_type = other DNA
atactggagcggtaggtcaggttgtgagggatggattgtatgctgggactttcaatggacctctgaatgcgattt

SEQ ID NO: 644622 - DNA, 75 bp, synthetic construct
  source 1..75: mol_type = other DNA
ttgagcaagacaccacttacagcaaaggccattgaggccgcacagccgcaggacaagccctacaaactcaccgat

SEQ ID NO: 644623 - DNA, 75 bp, synthetic construct
  source 1..75: mol_type = other DNA
ggctggagaaccaccttctcaacggcgcttaatgagtccggcagatactcaccagactggatcgaaatccaattg

SEQ ID NO: 644624 - DNA, 75 bp, synthetic construct
  source 1..75: mol_type = other DNA
tatcggggagatcttcaaattcgccgttatcactgaactagtcagccgtaatccggtagcagatctggatacggc

SEQ ID NO: 644625 - DNA, 75 bp, synthetic construct
  source 1..75: mol_type = other DNA
cgggcaatgatgcaggactacgccgacgccattgattcaatattggctggtgacggtaatccacttgaaccgtga

SEQ ID NO: 644626 - DNA, 75 bp, synthetic construct
  source 1..75: mol_type = other DNA
aaagcccgccgtccgggccacaacgcatggctgcaaattaacgaaattcaggcgttctatgaagcacttgagaga

SEQ ID NO: 644627 - DNA, 75 bp, synthetic construct
  source 1..75: mol_type = other DNA
cgtgacgtgctggcattactccagaagaaagaacgtaccgcaccggagcaggcccgcaagctacgccagcgcatc

SEQ ID NO: 644628 - DNA, 75 bp, synthetic construct
  source 1..75: mol_type = other DNA
tgtcaccatcaacggcgagtcggtactgaaaacgaatgtggatgggctgggaatacgggtccgtacggtgaatga

SEQ ID NO: 644629 - DNA, 75 bp, synthetic construct
  source 1..75: mol_type = other DNA
agaaagaccagaacggtggcgatattccagataagggcgcttttctggacaatattggcgttaccagcctgacgt

SEQ ID NO: 644630 - DNA, 75 bp, synthetic construct
  source 1..75: mol_type = other DNA
caatgcaggtatggcgcagcacttcaaacaaaaccaactatcgtttttttacagtccgcttatatggcaatcctg

SEQ ID NO: 644631 - DNA, 75 bp, synthetic construct
  source 1..75: mol_type = other DNA
atgcgctggaagtgggtagatctggagtcggcaacaatcacattgcccgctgaagtcatgaaggcccgccgcccg

SEQ ID NO: 644632 - DNA, 75 bp, synthetic construct
  source 1..75: mol_type = other DNA
ttgtatcacttattgagaatacgcttaaagaacatccaaatctaactgatgaacaattaaataaacaagccaagc

SEQ ID NO: 644633 - DNA, 75 bp, synthetic construct
  source 1..75: mol_type = other DNA
cttcctattcttatatctatccagaagtgtacgaattaaatgactttactgtctatgacctattagggcttggtc

SEQ ID NO: 644634 - DNA, 75 bp, synthetic construct
  source 1..75: mol_type = other DNA
cccgcgctggcttaaagccattgccgcgggggaatcttcatgggaccagaacgcgcaagggcctgttacaaggtc

SEQ ID NO: 644635 - DNA, 75 bp, synthetic construct
  source 1..75: mol_type = other DNA
ctgatgtggacatgtccggtaacggtgaaactgaaccgccccgggaatcctggagactaaactccctgagaaaga

SEQ ID NO: 644636 - DNA, 75 bp, synthetic construct
  source 1..75: mol_type = other DNA
gacggaatgcaggttgccatcaacaatacaaatggggcgacctttgcgctaaccaatggcaataacgatatcaat

SEQ ID NO: 644637 - DNA, 75 bp, synthetic construct
  source 1..75: mol_type = other DNA
tggaagcaacgagcaaggcaaagaatggaccgtggaagacattctgggaagagatggcgcgtaaaaccatagtta

SEQ ID NO: 644638 - DNA, 75 bp, synthetic construct
  source 1..75: mol_type = other DNA
gacctgtcgaagcgctggacgtttcaggcgatggggattaacaaccccgaccaggacccggccaaactgctcccg

SEQ ID NO: 644639 - DNA, 75 bp, synthetic construct
  source 1..75: mol_type = other DNA
ttggcaaggttattgattgggtaacagggaaagcgagtatctctactgcggatatatcatccgggtcaacgatgt

SEQ ID NO: 644640 - DNA, 75 bp, synthetic construct
  source 1..75: mol_type = other DNA
aaaaatttttttgtttttctgtggctggtatgtggtggacaggcataacaggttacgggtgataccgctcgccgc

SEQ ID NO: 644641 - DNA, 75 bp, synthetic construct
  source 1..75: mol_type = other DNA
ctggtggtgcacccgtctctccttctgcgactgcgcgatcggcggcgggggttctggaccgtccggtgtccgcgc

SEQ ID NO: 644642 - DNA, 75 bp, synthetic construct
  source 1..75: mol_type = other DNA
ttccgggcctggatccaggcgaaaagcggtcgtgatgtaaccatcggtgatttcaccgccagcctgacagcaact

SEQ ID NO: 644643 - DNA, 75 bp, synthetic construct
  source 1..75: mol_type = other DNA
tgggccgcgaattcatggtggaaagttatttgatcacaacaaccacgccgtgcccgtcagacgctgattatctct

SEQ ID NO: 644644 - DNA, 75 bp, synthetic construct
  source 1..75: mol_type = other DNA
aaagcttgtatcgcttcttatgttgtttattggcctttatcttgttgggtatgcaccggcgagcactgcgtataa

SEQ ID NO: 644645 - DNA, 75 bp, synthetic construct
  source 1..75: mol_type = other DNA
atgtgttttttctggtctcgcttcggtgctggtggcggtgctgtaaaacgctctcagtcgcgctctgacgcaata

SEQ ID NO: 644646 - DNA, 75 bp, synthetic construct
  source 1..75: mol_type = other DNA
tgatgaaatggctcaggcagaaaacatggatgatttgaagcgatattttgcagaagcatatcgcctgacatctgg

SEQ ID NO: 644647 - DNA, 75 bp, synthetic construct
  source 1..75: mol_type = other DNA
ggcaccaacaacatggaccacatactttgatagctggtgaaactgggagtggtaaaggcgttttggtacaatcac

SEQ ID NO: 644648 - DNA, 75 bp, synthetic construct
  source 1..75: mol_type = other DNA
ttgaaggtaatccagatttattcccttcattagaattaggtgaattaggtgaattaggtgaattaggtgaattag

SEQ ID NO: 644649 - DNA, 75 bp, synthetic construct
  source 1..75: mol_type = other DNA
atttaaagagtctcagcagcccaaaaatgtacattcattgatggttaaaattgaaggtaatccagatttattccc

SEQ ID NO: 644650 - DNA, 75 bp, synthetic construct
  source 1..75: mol_type = other DNA
aagacgaaaccgtttacttgcagaagcaggtgtcactaaattagataactataatagtagagttccaacatctga

SEQ ID NO: 644651 - DNA, 75 bp, synthetic construct
  source 1..75: mol_type = other DNA
atgattgatccaaaagctgggatagatttcccttggttgcgcaatatgccgcacctcgatggtgaccttattact

SEQ ID NO: 644652 - DNA, 75 bp, synthetic construct
  source 1..75: mol_type = other DNA
cggatgatttattgagtattgctaatcaagaagaagagtatgcacttttatcaactgcagatattgcaaggcagt

SEQ ID NO: 644653 - DNA, 75 bp, synthetic construct
  source 1..75: mol_type = other DNA
aaaacgttggtttgggagaaggctcagcattgcccgttggtgtgcctgttccgtggccctcagccacaccaccaa

SEQ ID NO: 644654 - DNA, 75 bp, synthetic construct
  source 1..75: mol_type = other DNA
ttagaatgttctcgaaacctaaaattttattatacgggaacagttctatttattatatacatcaaggtgatgggg

SEQ ID NO: 644655 - DNA, 75 bp, synthetic construct
  source 1..75: mol_type = other DNA
aatgtctggggacatataacgcgggttttgcaatggaaaaccaaaaaaagaggctgaaatatgcaaaaaaaatat

SEQ ID NO: 644656 - DNA, 75 bp, synthetic construct
  source 1..75: mol_type = other DNA
gtttgacttcggcaaatcttgatgaaaacatgcgtaaaattttgcatgttgctctccaatcggcaaataacactc

SEQ ID NO: 644657 - DNA, 75 bp, synthetic construct
  source 1..75: mol_type = other DNA
aagaacaaattgctgatattatggctattgctccacggattgtaaatggagagccggttctcaaagtggcaatat

SEQ ID NO: 644658 - DNA, 75 bp, synthetic construct
  source 1..75: mol_type = other DNA
acagccatgatggccaacgtcgggacctgcaatttaaggttaatggtttaaatgtcattactggccgttcctcaa

SEQ ID NO: 644659 - DNA, 75 bp, synthetic construct
  source 1..75: mol_type = other DNA
atgtccccccgccactgaatatttatggtgtcccgttgccgtttaccatgatttacctgctgctgtttccgtatc

SEQ ID NO: 644660 - DNA, 75 bp, synthetic construct
  source 1..75: mol_type = other DNA
gaggaagtggaaactcatttacaaatcgattttcttgccttggattaggattggctttttcacgttcagggggag

SEQ ID NO: 644661 - DNA, 75 bp, synthetic construct
  source 1..75: mol_type = other DNA
caggattcacagttggatactattcaacaacgtcttaagcaggcttcagatgcacgagctcaggaagtcgccggt

SEQ ID NO: 644662 - DNA, 75 bp, synthetic construct
  source 1..75: mol_type = other DNA
tttgcgtatatatatcaacccatagcaccgcaattataatgaaagaatcaaaggataatatttttctattagata

SEQ ID NO: 644663 - DNA, 75 bp, synthetic construct
  source 1..75: mol_type = other DNA
tgtctgagtattccggaaaccgaattcagcattctgatattgatgcgagattttttcctgtctggggggatgaag

SEQ ID NO: 644664 - DNA, 75 bp, synthetic construct
  source 1..75: mol_type = other DNA
tcctcatccatatgaaaatgaagttgctgcacttggtggaatacctttctctcaaataattggttggtatcgtgt

SEQ ID NO: 644665 - DNA, 75 bp, synthetic construct
  source 1..75: mol_type = other DNA
ctctaaagaactggcgtcagcggagctggatattaccactctggcaaaaagcgcggcattaaacgtttcacgaga

SEQ ID NO: 644666 - DNA, 75 bp, synthetic construct
  source 1..75: mol_type = other DNA
aggtggtggcgagcgatcttcacggcgaacagccgcaggcggtaccgggacgcaggggttcaggcaccacgctgg

SEQ ID NO: 644667 - DNA, 75 bp, synthetic construct
  source 1..75: mol_type = other DNA
ccacgggcagaactttgcccgctggcagatggacggctggcgaaacaatgcagaaaccgcgcggggaatgagtcg

SEQ ID NO: 644668 - DNA, 75 bp, synthetic construct
  source 1..75: mol_type = other DNA
cacgggacagccgaaacgggtgattaaacctgttcatttgctggatcgtgaagcagaactgctggctgaacgatt

SEQ ID NO: 644669 - DNA, 75 bp, synthetic construct
  source 1..75: mol_type = other DNA
tacggattacacctttatcgcacctattctgacgcaggtgacaggggttaccggagcaacggtgagtctgtttat

SEQ ID NO: 644670 - DNA, 75 bp, synthetic construct
  source 1..75: mol_type = other DNA
aattaggggttgaaccttatgtgactttccatggccattgcacaggggaaaaattggatgaacttttacttaaag

SEQ ID NO: 644671 - DNA, 75 bp, synthetic construct
  source 1..75: mol_type = other DNA
gtagataatcgtaagcgtttgttctcaggagaggttgtttcaggtaataagttgttatctaaaataccatatttt

SEQ ID NO: 644672 - DNA, 75 bp, synthetic construct
  source 1..75: mol_type = other DNA
ttaaatgttattgaaaatgggttagtaaattgtattgctgctatttatctgataagcccagaatctgtccagaga

SEQ ID NO: 644673 - DNA, 75 bp, synthetic construct
  source 1..75: mol_type = other DNA
tctggccgaagccgcgctgctggcctttggcccggacatcatcgactgcgtgatgttatcgccgaagtggtacgg

SEQ ID NO: 644674 - DNA, 75 bp, synthetic construct
  source 1..75: mol_type = other DNA
gggataaaaaagaagaaattctgacctacatgatccgctttccgaacagtggattcaaaattcaggcactgtctt

SEQ ID NO: 644675 - DNA, 75 bp, synthetic construct
  source 1..75: mol_type = other DNA
ttgaagccccggacgacttcatcagccgtgccgcatggctgcgtgaatcggaggttttaacctggtgtgaagaac

SEQ ID NO: 644676 - DNA, 75 bp, synthetic construct
  source 1..75: mol_type = other DNA
acgcattgctgaatatggattcgttgaaagccaggactatattttgatttgccaaaatgggcaaaccaaagggcg

SEQ ID NO: 644677 - DNA, 75 bp, synthetic construct
  source 1..75: mol_type = other DNA
gttttattctattggctgctgctcatgatagcgtagaggataaaaatattcctggtcttactgtagctggtagag

SEQ ID NO: 644678 - DNA, 75 bp, synthetic construct
  source 1..75: mol_type = other DNA
tctgaaggccggaaaacagtatatgctctggtcaaaaatatatgcaaatccaatgattccacaggaaagagctct

SEQ ID NO: 644679 - DNA, 75 bp, synthetic construct
  source 1..75: mol_type = other DNA
tgggagcagaccttctgggacagcgacaaaaaagaagaaatcctcacttatatgatccgtttccctaacagcgga

SEQ ID NO: 644680 - DNA, 75 bp, synthetic construct
  source 1..75: mol_type = other DNA
tcaggagtggatgcccaaactgaaaggcgagtttgaagcgcagaacatcacgattgcccggcaccagaccacact

SEQ ID NO: 644681 - DNA, 75 bp, synthetic construct
  source 1..75: mol_type = other DNA
gtgagcaccaaagaaagcaaacttaaagcccttcatgcaccccgcaaaatcgacctgcgcaaggaggccgaactg

SEQ ID NO: 644682 - DNA, 75 bp, synthetic construct
  source 1..75: mol_type = other DNA
atgatgaacaaagccagagaaacgtcgccttcactgatgcaaatgacgcctccccgcaaaattgatctgtcaggt

SEQ ID NO: 644683 - DNA, 75 bp, synthetic construct
  source 1..75: mol_type = other DNA
aggtctgcatcgcggaaaaatcccgccgcaccgggcttacctgggcggaagccgggcgtaacgtcattaccgccg

SEQ ID NO: 644684 - DNA, 75 bp, synthetic construct
  source 1..75: mol_type = other DNA
tcgctgaagaaggaagacggcgggcgcgatcacttttatatcggttcgaataaggagatggcccgcgaatttatc

SEQ ID NO: 644685 - DNA, 75 bp, synthetic construct
  source 1..75: mol_type = other DNA
tgaaattatgtgtagcagcaacgccagagtactttgcaagatatggcaaaccccgccatcctcatgatctgctta

SEQ ID NO: 644686 - DNA, 75 bp, synthetic construct
  source 1..75: mol_type = other DNA
tgcaggccagtccgctcgtgtacccgtagtctttaagctgaaagattgcaaagggccggcgggatacaacgtaaa

SEQ ID NO: 644687 - DNA, 75 bp, synthetic construct
  source 1..75: mol_type = other DNA
gcctatgcgcctgcaatccctgacatcgcaatgatgattgccaacaagcttgaaaattttggagtgaccagtgat

SEQ ID NO: 644688 - DNA, 75 bp, synthetic construct
  source 1..75: mol_type = other DNA
gggctacaaaaaaagctcatgtcgatggcgcggtaaacgcagtaaatcttcaactaagtccggaggaaattcagt

SEQ ID NO: 644689 - DNA, 75 bp, synthetic construct
  source 1..75: mol_type = other DNA
tcatgccagcgagtccggttctggcacggaagaaaccggacgttatgatttagtgcggaaatatttgtgtagtgt

SEQ ID NO: 644690 - DNA, 75 bp, synthetic construct
  source 1..75: mol_type = other DNA
agcggcaaacctttccactggcaatttgcaaaggagctggaaattgctgtcgcaggaaatatcattctggatgat

SEQ ID NO: 644691 - DNA, 75 bp, synthetic construct
  source 1..75: mol_type = other DNA
gcgcggggaacacactactgtcggtagctgggaggatgaggagcagtttatccccgctggcgcggggaacacgcg

SEQ ID NO: 644692 - DNA, 75 bp, synthetic construct
  source 1..75: mol_type = other DNA
atgcatcagttgaacacaaaagtagcttttccggtttatccccgctggcgcggggaacactttttgttaattgcg

SEQ ID NO: 644693 - DNA, 75 bp, synthetic construct
  source 1..75: mol_type = other DNA
tgtacctatccgttttattaggttgtatattcttatttataaaatatcgactttatgttctcgatcatagaagcc

SEQ ID NO: 644694 - DNA, 75 bp, synthetic construct
  source 1..75: mol_type = other DNA
cccggtcatcatatctcctcaaatgaagtcaaaaaaacggaaaatgaagtgcgacagaccgaagataaacagcac

SEQ ID NO: 644695 - DNA, 75 bp, synthetic construct
  source 1..75: mol_type = other DNA
atcttaatcgatcgccataacaaaattattgccgggcaaatggttggggtcattgccgctccgggatgtagcctt

SEQ ID NO: 644696 - DNA, 75 bp, synthetic construct
  source 1..75: mol_type = other DNA
aacacaatcgtgtgtaaattcgcggcggctccactggcggtttatccccgctggcgcggggaacactggtcgaaa

SEQ ID NO: 644697 - DNA, 75 bp, synthetic construct
  source 1..75: mol_type = other DNA
ttattggtaaacgtcctatcagtgaaatcaaaccattagaactgcttgaagtattgcgacgaatagagaaacgag

SEQ ID NO: 644698 - DNA, 75 bp, synthetic construct
  source 1..75: mol_type = other DNA
gcgggcatctcggggtggggtatagcaacggtgccgatgtggaatccccgtggaacgcagtggctggtgtgaact

SEQ ID NO: 644699 - DNA, 75 bp, synthetic construct
  source 1..75: mol_type = other DNA
tgcaacatgtccgggtgatccctgggcttgcggatgctgatgtcggcgggcgactggggataggcgcggcgcata

SEQ ID NO: 644700 - DNA, 75 bp, synthetic construct
  source 1..75: mol_type = other DNA
tatatcagccagggcgaacagttaatgattggtcgaaaaggggcggttggcgacattttaggctacttttttgat

SEQ ID NO: 644701 - DNA, 75 bp, synthetic construct
  source 1..75: mol_type = other DNA
ggttgggagcatcagaacggtgcctatgttgatggggtggtgaaagttgaccgttttgccaacaccatccatggc

SEQ ID NO: 644702 - DNA, 75 bp, synthetic construct
  source 1..75: mol_type = other DNA
cgctgaagcgggaacggcggtaagctatcacatggacctgcaaaacggtacgacgttggaaccctggctgaaagc

SEQ ID NO: 644703 - DNA, 75 bp, synthetic construct
  source 1..75: mol_type = other DNA
tctgccgaagtggttttcgcagcggtcatccgagaacagcaaaacggatatggtgatactgcttcaggtgaaaaa

SEQ ID NO: 644704 - DNA, 75 bp, synthetic construct
  source 1..75: mol_type = other DNA
ataacgctgccactattaagcagaatttcatagctgtatatgaattaattacaagcctatatgacggaaaaaatg

SEQ ID NO: 644705 - DNA, 75 bp, synthetic construct
  source 1..75: mol_type = other DNA
tacatcaatgatgagtttttaatttccgtccttgttactaaatgcatacatatgaaatcaggtaaacttagatgg

SEQ ID NO: 644706 - DNA, 75 bp, synthetic construct
  source 1..75: mol_type = other DNA
cgttatgcaatcataactggccgagctgaatacaacccagcacctgatttagctatcgctctggccgttcctaag

SEQ ID NO: 644707 - DNA, 75 bp, synthetic construct
  source 1..75: mol_type = other DNA
gttcgcatacctgctgaaacagtgggaggccctgaacgtgtactgcagtaatggctgggtggaaatcgacaacaa

SEQ ID NO: 644708 - DNA, 75 bp, synthetic construct
  source 1..75: mol_type = other DNA
gttcaatgaatcgttgcttgcggggcggttgaaactcgagaggaacagaagcaaatctttccattcttttcgcca

SEQ ID NO: 644709 - DNA, 75 bp, synthetic construct
  source 1..75: mol_type = other DNA
tcaatcagtaacgatagattggagtacggggtaaatatcgataaccacttttatataaaacatcatattttaaca

SEQ ID NO: 644710 - DNA, 75 bp, synthetic construct
  source 1..75: mol_type = other DNA
attgcccgaaacacggtgtattccatatatcaaaacttgatgggatatttgtgaaaccaagtcagtatcaggctg

SEQ ID NO: 644711 - DNA, 75 bp, synthetic construct
  source 1..75: mol_type = other DNA
gggtgaatgtcaccactcagggcagacgggccattgaataccactaccccgatgaacacaccgtcatccgctgta

SEQ ID NO: 644712 - DNA, 75 bp, synthetic construct
  source 1..75: mol_type = other DNA
atgatgcattccgctacccgcagggcgttaagctcgatcaggaaaacagccgtatttttctgccgaaacttggct

SEQ ID NO: 644713 - DNA, 75 bp, synthetic construct
  source 1..75: mol_type = other DNA
gaaaccgattataaaaaaacgaaagaactggtaaggactgagtttgaagaaaacttgcctgttggatctaaaatc

SEQ ID NO: 644714 - DNA, 75 bp, synthetic construct
  source 1..75: mol_type = other DNA
gatgctgtatctgtaggtgttggtgcagcgacaacaggacgacatgctgttacaagacagataactagtgttgca

SEQ ID NO: 644715 - DNA, 75 bp, synthetic construct
  source 1..75: mol_type = other DNA
cgataccgcgagtgggtcaggaggtgattgtggacttcctcaacggcgatccggaccagccgatcattatggggc

SEQ ID NO: 644716 - DNA, 75 bp, synthetic construct
  source 1..75: mol_type = other DNA
gccagtgattaactggaactgtggtgccacacaacctgtaccggatgcgcctgtgccgaaagatttaccccccgg

SEQ ID NO: 644717 - DNA, 75 bp, synthetic construct
  source 1..75: mol_type = other DNA
tttgagtatatttataatgaaaatactacgatggttgttcgctctggtcatgcttattgctactacagaagctat

SEQ ID NO: 644718 - DNA, 75 bp, synthetic construct
  source 1..75: mol_type = other DNA
catttcttgaggcctatcgctctggctccttttcaaaggcggcagagctactgggcatcactcagcccgcagcgt

SEQ ID NO: 644719 - DNA, 75 bp, synthetic construct
  source 1..75: mol_type = other DNA
tgatccccgagtacagagatgccattgatttgaatgcaagtcgcttaggtgttaaggcccgagctgctggaatca

SEQ ID NO: 644720 - DNA, 75 bp, synthetic construct
  source 1..75: mol_type = other DNA
atggtgcatccgggaggattactcgccttgcggctcgcccttcgggccgttgctaaagcaacgttatcatccctg

SEQ ID NO: 644721 - DNA, 75 bp, synthetic construct
  source 1..75: mol_type = other DNA
caggttttaaaatcaggatgaaaaagttaagtgtctttgcaggcgctcttcttttagggtgcagcacctggtctt

SEQ ID NO: 644722 - DNA, 75 bp, synthetic construct
  source 1..75: mol_type = other DNA
taaacgaggacgctattctgccaggttattgcgaactgggggatgaaggagatttgttaacagaccaaaatatta

SEQ ID NO: 644723 - DNA, 75 bp, synthetic construct
  source 1..75: mol_type = other DNA
tctgggcgcaggaagtgttgctgatcgtggcgctggtattgaagcatatatgccagagacaaagcgctggaatcc

SEQ ID NO: 644724 - DNA, 75 bp, synthetic construct
  source 1..75: mol_type = other DNA
atgattatcgccgatggaagaacggttaatgatgtattaccgggtagtttcctctctccggtaatgactccaact

SEQ ID NO: 644725 - DNA, 75 bp, synthetic construct
  source 1..75: mol_type = other DNA
tgctcaactcgtcttagcgcccagaggaggtgtcggttgtgcaggcggctggtctaacactgcagccttttcgaa

SEQ ID NO: 644726 - DNA, 75 bp, synthetic construct
  source 1..75: mol_type = other DNA
caacagtttaaaattcgctttagcaattgctctggccttccccaaaacagcgcccaaatagtgctggcacctaat

SEQ ID NO: 644727 - DNA, 75 bp, synthetic construct
  source 1..75: mol_type = other DNA
agtatactatttcagccctataaacgttttggtgcatgggagtttggtattgaatttttctaccagaaaaagcat

SEQ ID NO: 644728 - DNA, 75 bp, synthetic construct
  source 1..75: mol_type = other DNA
gcggatattgtaatgtgccgaacaagggactacaaggaaactcattttgatggtttgcatgtgtattataatccc

SEQ ID NO: 644729 - DNA, 75 bp, synthetic construct
  source 1..75: mol_type = other DNA
atgaaattaaaagtcatcgctacactgattgctactgttgccgtgggtgccagcgttagcaacaatttcacttat

SEQ ID NO: 644730 - DNA, 75 bp, synthetic construct
  source 1..75: mol_type = other DNA
accttccggtgactggtttgccgatctgagtcgccttggtgtggatattgtggaatacaccgtggaatgcggccc

SEQ ID NO: 644731 - DNA, 75 bp, synthetic construct
  source 1..75: mol_type = other DNA
accttctggtgactggtttgctgacctgacccgcctcggcgtagacctggtggaatacaccgtggaatgtggtcc

SEQ ID NO: 644732 - DNA, 75 bp, synthetic construct
  source 1..75: mol_type = other DNA
tacaggcaatgatattttaacgcttgatggttctgtcagtatatcaggagatatgtcaaaacaggacggtgctct

SEQ ID NO: 644733 - DNA, 75 bp, synthetic construct
  source 1..75: mol_type = other DNA
acgaatcatgcggtgagcgacctgacgggccggccgctgatgctctttaacagtgaaggcaagacggtctggcgg

SEQ ID NO: 644734 - DNA, 75 bp, synthetic construct
  source 1..75: mol_type = other DNA
cgaatccgcagcccccgaaaaacaaatatcaatggtgccgcgtctctgaatcccttaagccttgaagaattgtct

SEQ ID NO: 644735 - DNA, 75 bp, synthetic construct
  source 1..75: mol_type = other DNA
cgatctgttgcaccggaaacgaagaatacccggtgccggttcgaacccctgttcatcagccagcagggaaatcca

SEQ ID NO: 644736 - DNA, 75 bp, synthetic construct
  source 1..75: mol_type = other DNA
tacctgatggaattaccctgatctccgtaaataataacctgatatcgcatattgactcatttccgccgaagatta

SEQ ID NO: 644737 - DNA, 75 bp, synthetic construct
  source 1..75: mol_type = other DNA
tcttacggctggactgagtgcgataccttcgaaggatattacgattgttcgagaaacaaatggtgggcagttact

SEQ ID NO: 644738 - DNA, 75 bp, synthetic construct
  source 1..75: mol_type = other DNA
gctatgcgttagcggctgactttaaaaacaactacccgccacacatccccaacactcaggtcggcgtatatggcg

SEQ ID NO: 644739 - DNA, 75 bp, synthetic construct
  source 1..75: mol_type = other DNA
cctcttgcttatgcttacaaagagcttacgcctgagattatgcgcaaccatttagctgtattcgagcgatatgga

SEQ ID NO: 644740 - DNA, 75 bp, synthetic construct
  source 1..75: mol_type = other DNA
ccatcaggaaaaatcacgaaggaaacggacaggaaaatacataaacattttatagatatagctttatatgcaaat

SEQ ID NO: 644741 - DNA, 75 bp, synthetic construct
  source 1..75: mol_type = other DNA
gaatacgtgaagctggagcgattgcgtaatgcgctatcaggcaactctccggtaactccggatggttggataagc

SEQ ID NO: 644742 - DNA, 75 bp, synthetic construct
  source 1..75: mol_type = other DNA
ttctatgaggcattaaaggtcgcaatgcgcaactatccggtaactccggatagttggataagctgtagtgagcga

SEQ ID NO: 644743 - DNA, 75 bp, synthetic construct
  source 1..75: mol_type = other DNA
aggaagggtggggatcgcaccacagattgactatggtggtgctgttgatattgattcatttagtaaaggttatgc

SEQ ID NO: 644744 - DNA, 75 bp, synthetic construct
  source 1..75: mol_type = other DNA
tatcacaggcattctataatctcaaaatgtttttaatgatggatatgctcggagttggagatgcaattaatatta

SEQ ID NO: 644745 - DNA, 75 bp, synthetic construct
  source 1..75: mol_type = other DNA
tctcaaaatgtttttaatgatggatatgctcggagttggagatgcaattaatattaatacaaataaaaaatatcc

SEQ ID NO: 644746 - DNA, 75 bp, synthetic construct
  source 1..75: mol_type = other DNA
tgttccgtcgttattccagacgactggcaactaacatcgcagcaacaagcctttatagaactgtttgctgaagat

SEQ ID NO: 644747 - DNA, 75 bp, synthetic construct
  source 1..75: mol_type = other DNA
ggaaccgatgaagtctattgacggcatcaagattattcaggtcgatggtctgaatcgtggtggcgctgcgggtga

SEQ ID NO: 644748 - DNA, 75 bp, synthetic construct
  source 1..75: mol_type = other DNA
gggaggggtggctaaatcgaaagatttagcagctccatataaccgtgcgtcattttcgttcgtgactgaagcggc

SEQ ID NO: 644749 - DNA, 75 bp, synthetic construct
  source 1..75: mol_type = other DNA
tacaggagcgcggcagccacgtcaacgaatcctggctgggcgtggcccgcccggtgcttgaaatcacctgcccgc

SEQ ID NO: 644750 - DNA, 75 bp, synthetic construct
  source 1..75: mol_type = other DNA
tcttaaactggatggcgttgtaaaaatgcttgaagaaataaccaatataccaattataaaaaaagattatgttgt

SEQ ID NO: 644751 - DNA, 75 bp, synthetic construct
  source 1..75: mol_type = other DNA
cttttccgttaattgtgtcatgctctacagatgtctataaaagcgctaaaaatagttatggcacagaaaaaaata

SEQ ID NO: 644752 - DNA, 75 bp, synthetic construct
  source 1..75: mol_type = other DNA
aggggcggggctgatgggggaggccggtcctgaagccattatgcccctgacccgggcggcggatggctcgctggg

SEQ ID NO: 644753 - DNA, 75 bp, synthetic construct
  source 1..75: mol_type = other DNA
tgaatcgtggtggcgctacgggtgatgcaaacacggggaatgtgggggcggaaacctggcagaacaagcgttatc

SEQ ID NO: 644754 - DNA, 75 bp, synthetic construct
  source 1..75: mol_type = other DNA
ttgggtggaaagcgacagggtaatcaggaaagagaaattatggttatctgcataactcctcgaattatagatatt

SEQ ID NO: 644755 - DNA, 75 bp, synthetic construct
  source 1..75: mol_type = other DNA
tggtagtgatgaaaaccgagttcttatttcggcgttagaagaaaatggtaatgttagtaacgtcacatctgcagt

SEQ ID NO: 644756 - DNA, 75 bp, synthetic construct
  source 1..75: mol_type = other DNA
tatgccgcctgcgaaaataccaatgcgggtaaaggcgctgcgctcaataaaaaacagataccagctcccgcggca

SEQ ID NO: 644757 - DNA, 75 bp, synthetic construct
  source 1..75: mol_type = other DNA
tgcatctttatttttaatgacatctgactatgaagcatttccaatggttttgttagaagctttgaaaaatggtct

SEQ ID NO: 644758 - DNA, 75 bp, synthetic construct
  source 1..75: mol_type = other DNA
atgttcggattctttaaaaagaaaaaacctgacgctgagaccgggcaaggtccacgactgacggcaaaccagttt

SEQ ID NO: 644759 - DNA, 75 bp, synthetic construct
  source 1..75: mol_type = other DNA
taatccggggaatgaacgtacctcgctgaaaggaaaactgcgcgggcagaaaattgatgccgccgcagaattttt

SEQ ID NO: 644760 - DNA, 75 bp, synthetic construct
  source 1..75: mol_type = other DNA
atctggtacgtcgcgacctgaatatggaagcggttgtcgcaccagagatttctgcgacggtgggcgtggctgcgg

SEQ ID NO: 644761 - DNA, 75 bp, synthetic construct
  source 1..75: mol_type = other DNA
cgatccggcacagtcaattattgaacaaacggcaggtcaccggggcgtggatgcagtaatagacgccgtcggttt

SEQ ID NO: 644762 - DNA, 75 bp, synthetic construct
  source 1..75: mol_type = other DNA
atgttatgttttttaatttatatcactctccctttcattcagcttgtctatttcatttcctctgaaaagaaacta

SEQ ID NO: 644763 - DNA, 75 bp, synthetic construct
  source 1..75: mol_type = other DNA
aaaagacaatgctacagcgctaacaaagcttgttttttcccgagcagccgaattttggcctgataagaaagaacc

SEQ ID NO: 644764 - DNA, 75 bp, synthetic construct
  source 1..75: mol_type = other DNA
ccaccatttttgcaacactgattttgattgatgttggcttgcctaaatctatccggcgtcattatgggcatggat

SEQ ID NO: 644765 - DNA, 75 bp, synthetic construct
  source 1..75: mol_type = other DNA
ggtgacgtcattgaaatttggtgttagatttcaaaatgatgaaataagcgcagtggatctcgttcaagattctat

SEQ ID NO: 644766 - DNA, 75 bp, synthetic construct
  source 1..75: mol_type = other DNA
gtttcaccaggcgtggtggcaagcgagaaagcgcatgaattgtatgacagcatatacggtggtcaacctgcgccc

SEQ ID NO: 644767 - DNA, 75 bp, synthetic construct
  source 1..75: mol_type = other DNA
ccggctgccggacccggagctacacccggacagcacgctcacggcgtggccggataaccgcatcgcggaggatgc

SEQ ID NO: 644768 - DNA, 75 bp, synthetic construct
  source 1..75: mol_type = other DNA
aggctggtatcggagacatcgcgcagcggggagacagtacgctaccgctacgatgatgcgtacagtgagttaccg

SEQ ID NO: 644769 - DNA, 75 bp, synthetic construct
  source 1..75: mol_type = other DNA
aactgcctgccacgctcacgcccggacaacaggtgatggtttcctggtcgcgcgatgtgatggtgccgctggttg

SEQ ID NO: 644770 - DNA, 75 bp, synthetic construct
  source 1..75: mol_type = other DNA
gatttagttatcagcgacctgcggatggatgaaatggacggtatgcagctgtttgctgaaatccagaaagtgcag

SEQ ID NO: 644771 - DNA, 75 bp, synthetic construct
  source 1..75: mol_type = other DNA
acatgctaacacttgataaccacgatccattaagtggaattcctggctataaaagtattccggttgaattagaac

SEQ ID NO: 644772 - DNA, 75 bp, synthetic construct
  source 1..75: mol_type = other DNA
cgctttatctggcgggtaaagggctgactggctactcgctgccagtgctggaggacggcaagctgtttttgccgc

SEQ ID NO: 644773 - DNA, 75 bp, synthetic construct
  source 1..75: mol_type = other DNA
aagatgtggtgcagggataccacagggctatgctgtccgtgcatatggcaggcaatgcaggggagagcaccgatg

SEQ ID NO: 644774 - DNA, 75 bp, synthetic construct
  source 1..75: mol_type = other DNA
cctattctgaaatggtcaaatatattcaaattgactggaaaaatgatgatgggtttggatatgagggagatgcgt

SEQ ID NO: 644775 - DNA, 75 bp, synthetic construct
  source 1..75: mol_type = other DNA
gaagactttctggctacttgtcgaaaagacatgattgacagaaaaacggttgacgatacgttacccgttctggga

SEQ ID NO: 644776 - DNA, 75 bp, synthetic construct
  source 1..75: mol_type = other DNA
aagcgataaggccacggcggagccgtttttccataggctccgcccccctgacaagcatcacagaatctgacactc

SEQ ID NO: 644777 - DNA, 75 bp, synthetic construct
  source 1..75: mol_type = other DNA
agcagcatgatgaggagtcggggctgtactataaccgtcaccggcactacgatccgttgcaggggcggtatatca

SEQ ID NO: 644778 - DNA, 75 bp, synthetic construct
  source 1..75: mol_type = other DNA
cggatttgtgacagaaaccattgtctttttttatatttgcttaaatctttttttgcgttacttatggctggcgct

SEQ ID NO: 644779 - DNA, 75 bp, synthetic construct
  source 1..75: mol_type = other DNA
cagcgctcgtttctccgcagggctgcaaaaagcagcagtcgccaccggcctgcatcaacgccgctctggcgcaac

SEQ ID NO: 644780 - DNA, 75 bp, synthetic construct
  source 1..75: mol_type = other DNA
aaagcaactgatggtacttcaaaaaaagtacaaattactttatcaaatatgatgcgtttatgcggaagtaagctc

SEQ ID NO: 644781 - DNA, 75 bp, synthetic construct
  source 1..75: mol_type = other DNA
ctgcggggatgtcaaccagtctgctggtgaaaaaaatggtcgaggccgcagaaagcagagagctaccggtagaga

SEQ ID NO: 644782 - DNA, 75 bp, synthetic construct
  source 1..75: mol_type = other DNA
ttgaatttagctttaattcttttagtaaagatgtctgtcgtgaacaaaatagtgatatatataaaatatttttta

SEQ ID NO: 644783 - DNA, 75 bp, synthetic construct
  source 1..75: mol_type = other DNA
gccacatcgtattatccttcaaaaatactttatagactcatttgctaaaacaagtatctctgacagagaaaacaa

SEQ ID NO: 644784 - DNA, 75 bp, synthetic construct
  source 1..75: mol_type = other DNA
tggcaacggcgatggttatgggattttcatcttatgcaaatgcggtgggcagcaataccggcacagtcaatttta

SEQ ID NO: 644785 - DNA, 75 bp, synthetic construct
  source 1..75: mol_type = other DNA
agctggagccttattcgcctgctggaacaggcgcaggtgacaccggtggacagcagcacctttaaagtggtgtgg

SEQ ID NO: 644786 - DNA, 75 bp, synthetic construct
  source 1..75: mol_type = other DNA
gtatggaagcgatttacctggccggctgatacggaagcacctggcgccagtttaagctgggtaagcactcaggcc

SEQ ID NO: 644787 - DNA, 75 bp, synthetic construct
  source 1..75: mol_type = other DNA
ttcaaaaaatataacaatacagacagcggatggagttatggcaaactgggatgatgaatcaagtactctgtctgt

SEQ ID NO: 644788 - DNA, 75 bp, synthetic construct
  source 1..75: mol_type = other DNA
tcccagatttttttccgcacgtagcggtggatatatcaatatccacaaatgtagaagatgattatttttttctta

SEQ ID NO: 644789 - DNA, 75 bp, synthetic construct
  source 1..75: mol_type = other DNA
acacgggtaaaggcattgttttagccctgaacccgccggtttatccccgctggcgcggggaacacactaagcata

SEQ ID NO: 644790 - DNA, 75 bp, synthetic construct
  source 1..75: mol_type = other DNA
ttatggcttctcttttcatctcaccaattatagtcagaagtttatattttaatttcatcttgaaagaaaaaatca

SEQ ID NO: 644791 - DNA, 75 bp, synthetic construct
  source 1..75: mol_type = other DNA
atttttccctaacaaatgatgatgggggtaggtttaagaaaacattgacagtgagggccagggaacaagtggcga

SEQ ID NO: 644792 - DNA, 75 bp, synthetic construct
  source 1..75: mol_type = other DNA
tcagacagtttctgcaagatggagaatccgcgagcctggctgtatcgggcggcgaggaatctgctgattgatgag

SEQ ID NO: 644793 - DNA, 75 bp, synthetic construct
  source 1..75: mol_type = other DNA
ccgacgcgctgcaatcggcgctccgcggtctggcctacggcggcaccatctcgtatgtcgcgtttgccaaaccgt

SEQ ID NO: 644794 - DNA, 75 bp, synthetic construct
  source 1..75: mol_type = other DNA
gatgaagttcaggcgggaatagtcgcgagcgctgcggcgtcagcatttgggggaattggtaaggctaaagggaat

SEQ ID NO: 644795 - DNA, 75 bp, synthetic construct
  source 1..75: mol_type = other DNA
tgggtgaagatatcccgatcaagatggtctacgatctgacggcgacttttgcgcagcaaatgcaggccgaagggg

SEQ ID NO: 644796 - DNA, 75 bp, synthetic construct
  source 1..75: mol_type = other DNA
agcaactactgatagttataatggtagtacatccattgactatactgggctcaattcttcatcatcaggtggaac

SEQ ID NO: 644797 - DNA, 75 bp, synthetic construct
  source 1..75: mol_type = other DNA
ataccggatttaacgatatctggcgtaaagccagggcggcggcaagtgaaaagctgggctacccgattacgggaa

SEQ ID NO: 644798 - DNA, 75 bp, synthetic construct
  source 1..75: mol_type = other DNA
tccacaacataatgaccgtagctaaattatggcacatgtttatggactcccctgcatttacagaactggcccccc

SEQ ID NO: 644799 - DNA, 75 bp, synthetic construct
  source 1..75: mol_type = other DNA
tgctcgaaacaaggcattggatcttgtaggtaatttaggagcggactctaagccagttatcggacgtttggaagt

SEQ ID NO: 644800 - DNA, 75 bp, synthetic construct
  source 1..75: mol_type = other DNA
aaatcgtatcagagaatgatccagatacaaaaaagtgtggtgtaaatatggtaaaataccagggcaaggggatag

SEQ ID NO: 644801 - DNA, 75 bp, synthetic construct
  source 1..75: mol_type = other DNA
taaaaaaaacagcgttatccggagatgaagaaagcattgagttactgcataatattgcgttaggggtgatgctgc

SEQ ID NO: 644802 - DNA, 75 bp, synthetic construct
  source 1..75: mol_type = other DNA
ttattttctattaggcggcttggttaattatctggatctatctaagatatcaaaaaaaacagtattttggttttt

SEQ ID NO: 644803 - DNA, 75 bp, synthetic construct
  source 1..75: mol_type = other DNA
aaagtctgttcatttcctttttcagaaaaagatatatctagcaaacaattatctgttgtaaataaacaatgttag

SEQ ID NO: 644804 - DNA, 75 bp, synthetic construct
  source 1..75: mol_type = other DNA
gtaactggcagttttctgatggcctgatatcaaaggtgccggtaaactggaagacggttgctgaaaatcgccgct

SEQ ID NO: 644805 - DNA, 75 bp, synthetic construct
  source 1..75: mol_type = other DNA
gtgaggatgttcagtatttccagagtgaggacggaagggatttttatgaatctatcccgcttttcacaaagaaat

SEQ ID NO: 644806 - DNA, 75 bp, synthetic construct
  source 1..75: mol_type = other DNA
tatcattgatttacatggtgatgtttatgcaactgattaatgttaaacgatattacccggaacaaaaaccctatg

SEQ ID NO: 644807 - DNA, 75 bp, synthetic construct
  source 1..75: mol_type = other DNA
ttcagcgatcctcatcagaacgagtgaaattgatccgacgggcgcgctaactctaggggtgggagctacgttggt

SEQ ID NO: 644808 - DNA, 75 bp, synthetic construct
  source 1..75: mol_type = other DNA
gtagcggacttgaacaacgtccgttgatttcgatttatcaaagtgttccgcgtaataaccgtaagctaactcgaa

SEQ ID NO: 644809 - DNA, 75 bp, synthetic construct
  source 1..75: mol_type = other DNA
aggcattatcaccatcgattattttgatcgaatgccggctgctgatttcgaaaaagtgctggcggtgaacactac

SEQ ID NO: 644810 - DNA, 75 bp, synthetic construct
  source 1..75: mol_type = other DNA
atcttcagccgttcaaaaaaaacaccattttaattaatgataaaggaattccagacgatattgctcttgctaata

SEQ ID NO: 644811 - DNA, 75 bp, synthetic construct
  source 1..75: mol_type = other DNA
ttttaaggataaaaatggatataatattaatctacaacaaaacactcagttaagaccattcaatgccggggttaa

SEQ ID NO: 644812 - DNA, 75 bp, synthetic construct
  source 1..75: mol_type = other DNA
caatacacgcagccataaagtaccactccatgaggctctggccttgctgcccaatgctccattgaaggtgaacaa

SEQ ID NO: 644813 - DNA, 75 bp, synthetic construct
  source 1..75: mol_type = other DNA
catttagccagtggcgctggttgctggcgtttttaatgtcctgtaatagccggacaaataaactcaatggcgacc

SEQ ID NO: 644814 - DNA, 75 bp, synthetic construct
  source 1..75: mol_type = other DNA
gctgtttcgccgcaataccggtgagtgcctgaaaaatgaaacggtactgatgctgactcacgatgttgagcctat

SEQ ID NO: 644815 - DNA, 75 bp, synthetic construct
  source 1..75: mol_type = other DNA
ggtctcagcgacctgcttccgtttagataccgtggttctaatcccgatgcagtacagcctagggtaactggtgtc

SEQ ID NO: 644816 - DNA, 75 bp, synthetic construct
  source 1..75: mol_type = other DNA
gagctgagattagcgagagccgtttcaatgcaagcaaggcgggatctgcgaagggttaaaaaaagcggcgcatgt

SEQ ID NO: 644817 - DNA, 75 bp, synthetic construct
  source 1..75: mol_type = other DNA
ctatcaccgcagagccggaagagccatcaaccatgttgtggttgatggcctgtctcgttgcaataatcaccggag

SEQ ID NO: 644818 - DNA, 75 bp, synthetic construct
  source 1..75: mol_type = other DNA
cagagtctgcccgtgcccgcctcactgatattacaaccctaaaaagtgggctggaaaaacagcacgaagaatatc

SEQ ID NO: 644819 - DNA, 75 bp, synthetic construct
  source 1..75: mol_type = other DNA
ctgtactggcgactcccgtgaaaaggccgagcagattagccgcgtcagcgcggagtatgataaggctgtcattaa

SEQ ID NO: 644820 - DNA, 75 bp, synthetic construct
  source 1..75: mol_type = other DNA
taccccagcaccaatggagcaaaatacagcgacaactgccgagactgaaccagcacacagcccaagattgttgga

SEQ ID NO: 644821 - DNA, 75 bp, synthetic construct
  source 1..75: mol_type = other DNA
ggttggataagaatccaacagcatctccaggggatcgagcagcagcagaaaacgttcttcaggatttacagaatg

SEQ ID NO: 644822 - DNA, 75 bp, synthetic construct
  source 1..75: mol_type = other DNA
gatatcccgtatgcgacggacccggcaggaaaccggctgccggacccggaactgcacccggacagcaccctcacg

SEQ ID NO: 644823 - DNA, 75 bp, synthetic construct
  source 1..75: mol_type = other DNA
atttgcgctgaagtataactctgaaaaatgcgatagtgactcagtaccagattggattcagaatgtaaaggaaac

SEQ ID NO: 644824 - DNA, 75 bp, synthetic construct
  source 1..75: mol_type = other DNA
tatgtctgcgtgctttgagcaatttaatgctcttgctgaattgagccataattgcaggcagttattgttctcatc

SEQ ID NO: 644825 - DNA, 75 bp, synthetic construct
  source 1..75: mol_type = other DNA
aaagaaaagtattataaagcttcaaacaattcttttggtgtttttggttcgactgcagaagaagctctcagcaaa

SEQ ID NO: 644826 - DNA, 75 bp, synthetic construct
  source 1..75: mol_type = other DNA
gccgtggattatggccgctgtcgccagtgatattgtggcactgacggggaactgcctgatgctttctgatgataa

SEQ ID NO: 644827 - DNA, 75 bp, synthetic construct
  source 1..75: mol_type = other DNA
cagagcgtgaacgtctgcgcgatgagttgcaaaactactgtgccgaaaattttaatgtcgaacttgaacagttcg

SEQ ID NO: 644828 - DNA, 75 bp, synthetic construct
  source 1..75: mol_type = other DNA
gtgacatcaggggcatatgctggcccacttgaagaatacttaattaagagttcttcaagaatgatgaaagagcta

SEQ ID NO: 644829 - DNA, 75 bp, synthetic construct
  source 1..75: mol_type = other DNA
gagtcagtacatcagagcaggatctgacacgccaggctgacatcgaaaaaacggtcattgccagtggtttttata

SEQ ID NO: 644830 - DNA, 75 bp, synthetic construct
  source 1..75: mol_type = other DNA
tcaaccttttgaaccacaccagctacagacgttaacaaaaaaggcagatgacgaaataaaggatgtgataataat

SEQ ID NO: 644831 - DNA, 75 bp, synthetic construct
  source 1..75: mol_type = other DNA
ctgcaaaactggctaacttgcttgggtacgctgtatgacttcgcccggcgtaaatatgacaatatagcccctgac

SEQ ID NO: 644832 - DNA, 75 bp, synthetic construct
  source 1..75: mol_type = other DNA
ggttcgacaaggatattgccatcaggatctttctgttgcgcactcatgtactaaagaattactggaacaactgaa

SEQ ID NO: 644833 - DNA, 75 bp, synthetic construct
  source 1..75: mol_type = other DNA
actgggagcagatacggcctgagaaacagaagcaggaaggtgaactctctcagcagaagcgagagctattgcagt

SEQ ID NO: 644834 - DNA, 75 bp, synthetic construct
  source 1..75: mol_type = other DNA
gccgggacgacgtctcagtttcagccaaaataggttcaacaaccgagtaccgcagcatcattcagaatgatgtcg

SEQ ID NO: 644835 - DNA, 75 bp, synthetic construct
  source 1..75: mol_type = other DNA
gcagcaacaatggactaactgggcaggacgctatctggcggttctgtacagcagggtgatcctgcccgctgaact

SEQ ID NO: 644836 - DNA, 75 bp, synthetic construct
  source 1..75: mol_type = other DNA
ttgataagttattgactggctttgatgccccgtcagccacttacctctatatcgacaagaaaatggccgatcaca

SEQ ID NO: 644837 - DNA, 75 bp, synthetic construct
  source 1..75: mol_type = other DNA
gtaatcagattcctctatttattcgcccgcgtacatatggaaacaatgtctcaagcgggcaaataatgagccgag

SEQ ID NO: 644838 - DNA, 75 bp, synthetic construct
  source 1..75: mol_type = other DNA
ctactttccttgaattactggactctgagattggtaaattacccgatccttcaaggacccgccagcagttgccaa

SEQ ID NO: 644839 - DNA, 75 bp, synthetic construct
  source 1..75: mol_type = other DNA
gaaacgcaatctgacctcgcaaaagccaataacgaagcgaatcgtcgtcgtcatctctcacaaaattttatttct

SEQ ID NO: 644840 - DNA, 75 bp, synthetic construct
  source 1..75: mol_type = other DNA
aatcttcaagatagagtaaactcacggcttgatacaaaatatagacacaaatttgaatcaacaacatttgatgca

SEQ ID NO: 644841 - DNA, 75 bp, synthetic construct
  source 1..75: mol_type = other DNA
ttcctcctgctgaaacgaaaggaggaatgacatttgctgactgtctcatcagttttaatacacaggattgcctgt

SEQ ID NO: 644842 - DNA, 75 bp, synthetic construct
  source 1..75: mol_type = other DNA
tgttgccacctgtctggtcgcgggcttcggctcgttgctgatgggattatatgggctaatttgccaatggcgatt

SEQ ID NO: 644843 - DNA, 75 bp, synthetic construct
  source 1..75: mol_type = other DNA
atggatgatattgttaacttagtgccttcctggatgtttatggcgattgttgccgtatgcgttctatttattatc

SEQ ID NO: 644844 - DNA, 75 bp, synthetic construct
  source 1..75: mol_type = other DNA
ggtcatcgtcgttccaggtatgtgggtaaagcaggcttcccgcctgcggcagttttcgttgcaacctgtctggtt

SEQ ID NO: 644845 - DNA, 75 bp, synthetic construct
  source 1..75: mol_type = other DNA
gtttttccctgccagaacccatccctgagctgacacctgctcaactgccggaatggctcgaactcgtccctgcgg

SEQ ID NO: 644846 - DNA, 75 bp, synthetic construct
  source 1..75: mol_type = other DNA
ttactggtcagtttggtgacatgttagcccgtattgaggctggggagtttccagaagtgtcaacgacggatgaaa

SEQ ID NO: 644847 - DNA, 75 bp, synthetic construct
  source 1..75: mol_type = other DNA
gcgccgcgctgaccaacaaacccaaccttgatttacccgcactcaactccgaggaaaacacgatgaccgtacctg

SEQ ID NO: 644848 - DNA, 75 bp, synthetic construct
  source 1..75: mol_type = other DNA
ccagcgtcgggctgaccaacaaacctaacctggattttcctgcactgaatacggagaaaaacccgatgacagtac

SEQ ID NO: 644849 - DNA, 75 bp, synthetic construct
  source 1..75: mol_type = other DNA
gaccgacgccgaactggcgatgtgccgcagcatgggtattaccggggaagagttcctcgccgctaaaccgaaaca

SEQ ID NO: 644850 - DNA, 75 bp, synthetic construct
  source 1..75: mol_type = other DNA
cagaaggtcagggcagcattcagcttaattgtaaaaccaaaccgaccagtattgtcgatttagccacggcaacag

SEQ ID NO: 644851 - DNA, 75 bp, synthetic construct
  source 1..75: mol_type = other DNA
acagttaaaaggtaaattaatcgccgttagaggtatcgtacaatccattgataaggactttactgactctataat

SEQ ID NO: 644852 - DNA, 75 bp, synthetic construct
  source 1..75: mol_type = other DNA
tattgctgggtaagatcagatttcggtactggctactcagggctttcttatcttcatgacctgcatattgattat

SEQ ID NO: 644853 - DNA, 75 bp, synthetic construct
  source 1..75: mol_type = other DNA
gatgtaccttagctatattgttcctttcgtacagggaagcggtcaggaagtggcttccaggattattggtcagga

SEQ ID NO: 644854 - DNA, 75 bp, synthetic construct
  source 1..75: mol_type = other DNA
ttttaactatatatttctcaacattgcctatgcctgtctgttcaaggttctgattcagtatattaataaatatat

SEQ ID NO: 644855 - DNA, 75 bp, synthetic construct
  source 1..75: mol_type = other DNA
atggcaattggtcagaatcaccaacttacgcaactgatgattcagctccagaaaatgccagaactacatagaaca

SEQ ID NO: 644856 - DNA, 75 bp, synthetic construct
  source 1..75: mol_type = other DNA
ccgctccaaaacgtacatgggcagcggatttaatgagctgaagtttgatgatgcgacagggagagaacaggtcta

SEQ ID NO: 644857 - DNA, 75 bp, synthetic construct
  source 1..75: mol_type = other DNA
tcaacggcgatccggaccagccgattattatggggcgcacctaccaccaggaaaaccgcacccccggcagcctgc

SEQ ID NO: 644858 - DNA, 75 bp, synthetic construct
  source 1..75: mol_type = other DNA
gctaccaggcacgattgcgcagtgagcaacagggggtagagatcagccagtcaatctatgatgatattcgatcca

SEQ ID NO: 644859 - DNA, 75 bp, synthetic construct
  source 1..75: mol_type = other DNA
gataaataaagacaacgtctctgttgagacaatccagtctctattgcactcaaaacaattgccatatttttctga

SEQ ID NO: 644860 - DNA, 75 bp, synthetic construct
  source 1..75: mol_type = other DNA
gcgaaaatactggtgacagcattcaggtcgagctggagaaaaacggttccggtagccgcatgtatatcacctttc

SEQ ID NO: 644861 - DNA, 75 bp, synthetic construct
  source 1..75: mol_type = other DNA
ccggattgttcgtcctgagtacctgcctgagtgggtgtgcgagtgttgacagtgtcaacagtgcgataaaccaga

SEQ ID NO: 644862 - DNA, 75 bp, synthetic construct
  source 1..75: mol_type = other DNA
tgcgacagcggcacaaatgacgatgcatgagttgcaagatacgcgcgaaaacttcgttcagggagtgcaaaatac

SEQ ID NO: 644863 - DNA, 75 bp, synthetic construct
  source 1..75: mol_type = other DNA
ttacagcccgaaattaactgggaagttaatgagcctgaaaaactgaagaaagtactggcatccctgacctcatta

SEQ ID NO: 644864 - DNA, 75 bp, synthetic construct
  source 1..75: mol_type = other DNA
attcccggggcggttcaatcatttatctggcaggatcctcttcctgcggcggattatacaatgattgatggtaaa

SEQ ID NO: 644865 - DNA, 75 bp, synthetic construct
  source 1..75: mol_type = other DNA
caagtacccggaaatgcgcgtgggcgcgctgtcgtactctgctgacctggctggagacatgaacgccgatgttca

SEQ ID NO: 644866 - DNA, 75 bp, synthetic construct
  source 1..75: mol_type = other DNA
cgcgccgcctcgcaggatggtaatccccttctcggcccgcatccttcccgtgctggcgtctggctggctcttggt

SEQ ID NO: 644867 - DNA, 75 bp, synthetic construct
  source 1..75: mol_type = other DNA
ggcgtcgaggaaaaagacatccagatcacgctcgacaacgacgtgctgctggttcgcggtgaaaagcgtcaggag

SEQ ID NO: 644868 - DNA, 75 bp, synthetic construct
  source 1..75: mol_type = other DNA
atgatataaattatggaattatgttggattttgaatgggaatattcttctgatattgaaagtattatcactccta

SEQ ID NO: 644869 - DNA, 75 bp, synthetic construct
  source 1..75: mol_type = other DNA
ccagcaaagatacacataagaacattacttcttctccatgtcacaaatcagccatatcatcatttgagcaagtac

SEQ ID NO: 644870 - DNA, 75 bp, synthetic construct
  source 1..75: mol_type = other DNA
ggatgattatctttggaagtatggggataatttatcttcatcaattgatatattgattaatggcaaggaggcagt

SEQ ID NO: 644871 - DNA, 75 bp, synthetic construct
  source 1..75: mol_type = other DNA
gaatgggtatggggtaggacgggtaaattttgtgctgaccaatctgcaaattagcagtaatggggcagattacac

SEQ ID NO: 644872 - DNA, 75 bp, synthetic construct
  source 1..75: mol_type = other DNA
accgactacgttgtcggccaggtatggggcaaaaagggcgcaaacgcctacctacttcaccaggtgcgcgcgcgc

SEQ ID NO: 644873 - DNA, 75 bp, synthetic construct
  source 1..75: mol_type = other DNA
tggtaagtaagcaggaagcagcggcagagttactcaagcggcgcaacgcacgggccagccttcacgatttcattc

SEQ ID NO: 644874 - DNA, 75 bp, synthetic construct
  source 1..75: mol_type = other DNA
tcgcggggggggatgaggccaaggcggagctggtcgagatcgtcgatttcctgaagaatccgcaggactatggcc

SEQ ID NO: 644875 - DNA, 75 bp, synthetic construct
  source 1..75: mol_type = other DNA
cgcattacagcaagaagttgagacgcttacccactcattcgccgggcaaaaggatgaaaatgcgatattgcataa

SEQ ID NO: 644876 - DNA, 75 bp, synthetic construct
  source 1..75: mol_type = other DNA
attattaaagtctgtgaaaatggtactttcataaaattaagggagttgattttccccgatgcaaataataatgca

SEQ ID NO: 644877 - DNA, 75 bp, synthetic construct
  source 1..75: mol_type = other DNA
ctgaaacagggtttgttgatgttaggcggagagcgaactattgatgatggcattcatgagaaaatattctccaca

SEQ ID NO: 644878 - DNA, 75 bp, synthetic construct
  source 1..75: mol_type = other DNA
cgtaattgcagcttatttgaacaaacccgtaagtgggcttatcgtgctatccgacaagggtggcctgactacgga

SEQ ID NO: 644879 - DNA, 75 bp, synthetic construct
  source 1..75: mol_type = other DNA
ggcggatagattttgtaaatttattaccatagacaacaacccactccgcgccgccatgattgtctttctcatgat

SEQ ID NO: 644880 - DNA, 75 bp, synthetic construct
  source 1..75: mol_type = other DNA
gtcaaatggaattctggcgagatccctatggtgctttttccagcgtgtttggaaatgatgattcatcaaaagaga

SEQ ID NO: 644881 - DNA, 75 bp, synthetic construct
  source 1..75: mol_type = other DNA
tggtgttgctgatgatgaccatgatgcagagagagtaagacagttagatcgtattgaaccaaaacgagttggttt

SEQ ID NO: 644882 - DNA, 75 bp, synthetic construct
  source 1..75: mol_type = other DNA
aatacgaagtggcgttggagtggcattattgtgccagtatgcacaaccattttcacggcggcggttgctgtattt

SEQ ID NO: 644883 - DNA, 75 bp, synthetic construct
  source 1..75: mol_type = other DNA
gcatgatgaggaatcagggctgtactataaccggaaccggtactatgacccgctacaggggaggtatattacaca

SEQ ID NO: 644884 - DNA, 75 bp, synthetic construct
  source 1..75: mol_type = other DNA
tgtaggcattaccatcgcttggttaccattgatgattcttgcattcagatgtggtgctggagttaaagataaaga

SEQ ID NO: 644885 - DNA, 75 bp, synthetic construct
  source 1..75: mol_type = other DNA
cgagaaagtttataacgtgctgtcggaacgcttacgcgatacatacgacattttcggcagccttcccgatacgat

SEQ ID NO: 644886 - DNA, 75 bp, synthetic construct
  source 1..75: mol_type = other DNA
aacaaccctatcctacgccatacagtgctgcgtaagcgtaaacagctggaagatgacggtctgttagagcgtgtt

SEQ ID NO: 644887 - DNA, 75 bp, synthetic construct
  source 1..75: mol_type = other DNA
ggtcttcatgctgcagatcggcaggcgtacacggcatctggtactgggtactgcgacacctattcaaaccaacgt

SEQ ID NO: 644888 - DNA, 75 bp, synthetic construct
  source 1..75: mol_type = other DNA
taagccctaagcaaattgccgaaaaaatccgtgaaatgcgcaaaccacacgcccctaaagacaaaaaagagtggc

SEQ ID NO: 644889 - DNA, 75 bp, synthetic construct
  source 1..75: mol_type = other DNA
actcacaaattggttgaaacagtcagttaatgaaaaaatgccaatgagtgaaactctaaaagagcttgaacgaat

SEQ ID NO: 644890 - DNA, 75 bp, synthetic construct
  source 1..75: mol_type = other DNA
atttcgctatgaatgcacggcctaaactcacaaattggttgaaacagtcagttaatgaaaaaatgccaatgagtg

SEQ ID NO: 644891 - DNA, 75 bp, synthetic construct
  source 1..75: mol_type = other DNA
gaatgtatagcagaggaatcgattaataaaaaagcaaaagatattaaaacgcacttaagcaaagcggtacgacag

SEQ ID NO: 644892 - DNA, 75 bp, synthetic construct
  source 1..75: mol_type = other DNA
gtgataatggtacgcacgtttcgctgatggctgcggctattctggcagtgattgctgcctgtgtgagtggtttac

SEQ ID NO: 644893 - DNA, 75 bp, synthetic construct
  source 1..75: mol_type = other DNA
ttaaccttcggcctgcttatcactgcgttgagtggtttcgctcaggggcaatcgctgacgttaattgctgcggaa

SEQ ID NO: 644894 - DNA, 75 bp, synthetic construct
  source 1..75: mol_type = other DNA
ccgctgcaccgggtaaaattactgctattgatacgcactggatctggcaggaaggtaatcagcgcctgaccaaag

SEQ ID NO: 644895 - DNA, 75 bp, synthetic construct
  source 1..75: mol_type = other DNA
cgtattggtgcccccaccggcgtggcctgttcggtgtgccccggcggggtgacgtccggccatccggtcaatccg

SEQ ID NO: 644896 - DNA, 75 bp, synthetic construct
  source 1..75: mol_type = other DNA
cgcgaaaaatccacctgtaccactgcgaccatcgcggcctgccgctggcgctcatcagcacggaaggggcaacag

SEQ ID NO: 644897 - DNA, 75 bp, synthetic construct
  source 1..75: mol_type = other DNA
agagttgtatcctgtatcagccttgcaaaattttccgagtgctttatgaactggatacgagactgccattcatta

SEQ ID NO: 644898 - DNA, 75 bp, synthetic construct
  source 1..75: mol_type = other DNA
gtttgttagaactctttgaacaaatgaatacgaacaaggaaaataatggatggttatccatatcgttagaagatt

SEQ ID NO: 644899 - DNA, 75 bp, synthetic construct
  source 1..75: mol_type = other DNA
caatgacgatgactgtcagtttacgtggcaaaaatgttgtcatgagtaatgccatatctcgtgccgcgcaaagcc

SEQ ID NO: 644900 - DNA, 75 bp, synthetic construct
  source 1..75: mol_type = other DNA
atgggattaggtttttttcgcagtatttacgaccacatcgccttcgccgcctccgtttctgcggtcacgattggc

SEQ ID NO: 644901 - DNA, 75 bp, synthetic construct
  source 1..75: mol_type = other DNA
cgtttgaaatctataagacccgattttcactcaagttccctgatatcgcgggtaatccatttagcgaaatcgatc

SEQ ID NO: 644902 - DNA, 75 bp, synthetic construct
  source 1..75: mol_type = other DNA
tcctccagaacctgatgagcatgccggtcgcgggttcattgggggatggtttgaatctgatgcagcccgacagga

SEQ ID NO: 644903 - DNA, 75 bp, synthetic construct
  source 1..75: mol_type = other DNA
atgggattcagatttcgtaaatcgatcagcattatcccgggggtcagggttaacctgagtaacggggcccccagc

SEQ ID NO: 644904 - DNA, 75 bp, synthetic construct
  source 1..75: mol_type = other DNA
gtcactgacagtgattttccttgctgctgacaggcgtttttttcatgggactgttttgttgtttgcaccctgtcc

SEQ ID NO: 644905 - DNA, 75 bp, synthetic construct
  source 1..75: mol_type = other DNA
cctgttatagaggggaagtcttttattatccaatggggaagaatcggaccttctgatagtaaaactggtgttgca

SEQ ID NO: 644906 - DNA, 75 bp, synthetic construct
  source 1..75: mol_type = other DNA
ctggcgctgacggcgacggatctgggtcatggcgacggtcgcggtcgctgggtgaaacaggtgtacggctaccgc

SEQ ID NO: 644907 - DNA, 75 bp, synthetic construct
  source 1..75: mol_type = other DNA
gctgcaaccgtggctgaagtattggtttacgccgatgccagagggatccactctcatggcgcggtgcgcgttgaa

SEQ ID NO: 644908 - DNA, 75 bp, synthetic construct
  source 1..75: mol_type = other DNA
ctccgtctctgcggtcacgattggcgcgatgaccatcagcgaaaaaatcgcgctggccgggctgctgctgggtgc

SEQ ID NO: 644909 - DNA, 75 bp, synthetic construct
  source 1..75: mol_type = other DNA
caacctccaatagacagattagagtaacaaaggaatctttaaatattcctagagcagtcggtggacttgttattc

SEQ ID NO: 644910 - DNA, 75 bp, synthetic construct
  source 1..75: mol_type = other DNA
ggcatgtactaatggtctttgcggcacactatccgctatgataggtccagataaatttgattctatagatagcac

SEQ ID NO: 644911 - DNA, 75 bp, synthetic construct
  source 1..75: mol_type = other DNA
aacgcaacacaggaagcccagttctccgtgctcgatgacatcaccgccagcgagttaattaatgacattgaagct

SEQ ID NO: 644912 - DNA, 75 bp, synthetic construct
  source 1..75: mol_type = other DNA
ggggaagggcagcggtatttatcaagatgtataaaatcctctaatgacgaaacttatgcaatttgttcagaggtg

SEQ ID NO: 644913 - DNA, 75 bp, synthetic construct
  source 1..75: mol_type = other DNA
acggtaacggcatccctgattttattgattctcagttggccttctttaataaggcatcgtctccgaatgtttcgg

SEQ ID NO: 644914 - DNA, 75 bp, synthetic construct
  source 1..75: mol_type = other DNA
aatactatggcatcattggtgcagcaattgcttggacatcaagaatgatagtagatagcttaattttattttatc

SEQ ID NO: 644915 - DNA, 75 bp, synthetic construct
  source 1..75: mol_type = other DNA
tttattcaattgttttgcacagattccatttacattaatacaagctgcaggtaagtcgaaggttacagcatctct

SEQ ID NO: 644916 - DNA, 75 bp, synthetic construct
  source 1..75: mol_type = other DNA
gacgcattgcactcagccattggggtcatgtcgattggcaactgggagcattagttttggcgaggattgctcagt

SEQ ID NO: 644917 - DNA, 75 bp, synthetic construct
  source 1..75: mol_type = other DNA
atcccgctcactattgctatgaagaaagcacgcgaagcacaacaacaattagaacaattagaggaagtggcataa

SEQ ID NO: 644918 - DNA, 75 bp, synthetic construct
  source 1..75: mol_type = other DNA
gggaaggaatattaaatgctaatccaggagcttatgttacacgagaggtcatcagcacaaatgtagaacaatata

SEQ ID NO: 644919 - DNA, 75 bp, synthetic construct
  source 1..75: mol_type = other DNA
aaatgtctatcttcagaaaatttgcaacaaataaaaaaatgggattggaaagttaagtctgagaactttcggact

SEQ ID NO: 644920 - DNA, 75 bp, synthetic construct
  source 1..75: mol_type = other DNA
tcttgaaaacaaatggggaatggttttctggtcagctccagttgatgattggttggaagagaagcaacgtagttt

SEQ ID NO: 644921 - DNA, 75 bp, synthetic construct
  source 1..75: mol_type = other DNA
acctgccgcacgatgctatccgcgtgaccgtgttcttcgacggttgttcaaactcaacaatgagtttcagcgcaa

SEQ ID NO: 644922 - DNA, 75 bp, synthetic construct
  source 1..75: mol_type = other DNA
agggagtacagcggttgtcaatatttcccggagctctatcaagagctgtttttcctaagttgagtcgattagcca

SEQ ID NO: 644923 - DNA, 75 bp, synthetic construct
  source 1..75: mol_type = other DNA
aatgaaatcggtgtttctggcggctcgctggcggcattaacttcccccttaaccacaacaactcacatcgcagaa

SEQ ID NO: 644924 - DNA, 75 bp, synthetic construct
  source 1..75: mol_type = other DNA
tgccattgcttgattctgatggagaaacattattcgcaaatggagggaatattttcctccatattgataatgatt

SEQ ID NO: 644925 - DNA, 75 bp, synthetic construct
  source 1..75: mol_type = other DNA
tgacgttaaaaaatattttacggaaaatttccatgttaatgtgatggttgagcgtacaataaaattatataaaga

SEQ ID NO: 644926 - DNA, 75 bp, synthetic construct
  source 1..75: mol_type = other DNA
tttgatcgcggaggacatggctgtgtgggcagttattctctgggcggctatgccagttgggaacatgaaagtggt

SEQ ID NO: 644927 - DNA, 75 bp, synthetic construct
  source 1..75: mol_type = other DNA
catatatgagtgggcgagtctggttttcctataatttactaagccaaatgggagaaccgaaattctttattggta

SEQ ID NO: 644928 - DNA, 75 bp, synthetic construct
  source 1..75: mol_type = other DNA
gcaaactgccgaacggcctgatcctggagcagggcgagtacaaagtggagcttaacggctccaactcctctatcg

SEQ ID NO: 644929 - DNA, 75 bp, synthetic construct
  source 1..75: mol_type = other DNA
ggaaagtaaacttcattcagcgtgtaggttctggcgttcctggattccttttaactggcacagaatacatactga

SEQ ID NO: 644930 - DNA, 75 bp, synthetic construct
  source 1..75: mol_type = other DNA
actggagaccatctgcattattccggagcagtttgtacggcgcattaacggtgtgaatgtgctgtcggatctgaa

SEQ ID NO: 644931 - DNA, 75 bp, synthetic construct
  source 1..75: mol_type = other DNA
ggtatagaaattgaaccctggctgaaggcggctttgcgcaaagaatttgtcgatgataatcgggtgaaagtgaat

SEQ ID NO: 644932 - DNA, 75 bp, synthetic construct
  source 1..75: mol_type = other DNA
aacatggggacttataacggattaaggccattatggattaataacgctactggcgctgtttcgatggggcgtggt

SEQ ID NO: 644933 - DNA, 75 bp, synthetic construct
  source 1..75: mol_type = other DNA
aggcgataccttgtccggtggacttacttttgaaaacgactcaatccttgcctggattcggaatactgactgggc

SEQ ID NO: 644934 - DNA, 75 bp, synthetic construct
  source 1..75: mol_type = other DNA
gtgcaaaagaatggcgataccttgtccggtgggcttacttttgaaaatgactcaatccttgcttggattcgaaat

SEQ ID NO: 644935 - DNA, 75 bp, synthetic construct
  source 1..75: mol_type = other DNA
cgcatgatgcggtatttaaaacctttatgttcacacccgaaaccgcacgggattttctcgaaatacatttaccag

SEQ ID NO: 644936 - DNA, 75 bp, synthetic construct
  source 1..75: mol_type = other DNA
catgattaataactcaaggacagccaatggcaccgatggtcaggcgtacatggataataacggtaactggctttg

SEQ ID NO: 644937 - DNA, 75 bp, synthetic construct
  source 1..75: mol_type = other DNA
taatggtatgtggattcagatgcgcgataacaacgctatctttgggaaaaatatagttaacactgatagcgctca

SEQ ID NO: 644938 - DNA, 75 bp, synthetic construct
  source 1..75: mol_type = other DNA
atgaaaaaggtttttgctgtttcggtggtgggcgcagcctgtgtatttgcagtaaatgcaggtgctgaggaaggt

SEQ ID NO: 644939 - DNA, 75 bp, synthetic construct
  source 1..75: mol_type = other DNA
acagggagaactgaatgcgttgaaggccgcgaaggaagcaaccggcgaaacacttcctgctaatgcaacagagaa

SEQ ID NO: 644940 - DNA, 75 bp, synthetic construct
  source 1..75: mol_type = other DNA
ccggaggtcacagcggacatgcggaaggaacgactcaggccgcagtggcagaaggcactatcaccatccgggaca

SEQ ID NO: 644941 - DNA, 75 bp, synthetic construct
  source 1..75: mol_type = other DNA
cgcattagcgacaagtagtgtttcgctgttacctagaagcgcacaagccatgtgggctcttggcgcaggtgcaaa

SEQ ID NO: 644942 - DNA, 75 bp, synthetic construct
  source 1..75: mol_type = other DNA
gcgctgattcgcaaagatccccatgccgctaaactggcaatgtggcagcatctggaaaacactaaaattatgtta

SEQ ID NO: 644943 - DNA, 75 bp, synthetic construct
  source 1..75: mol_type = other DNA
tggcagccatcgttgagaagatgtggacccagcgtagccataacccgtactggaaaaaactccacgaacacattg

SEQ ID NO: 644944 - DNA, 75 bp, synthetic construct
  source 1..75: mol_type = other DNA
tggcggctatcgttgaaaaaatgtggacccagcgtagtcataacccgtactggaaaaaaactgcacgaacacatt

SEQ ID NO: 644945 - DNA, 75 bp, synthetic construct
  source 1..75: mol_type = other DNA
atggcggcgctgctgtctatcctcgtgtacgtaggtttccgctttgagtggcgactggcggcaggggtggttatt

SEQ ID NO: 644946 - DNA, 75 bp, synthetic construct
  source 1..75: mol_type = other DNA
cgtgcgcggctttaactgggggctggattttaccggtggtacggttatcgaaattacgctcgaaaaaccggctga

SEQ ID NO: 644947 - DNA, 75 bp, synthetic construct
  source 1..75: mol_type = other DNA
tcggtgcgatcctcggagcggcgcttggcgccctgcttgccagccagttaaataatctgatgccgataatcggcg

SEQ ID NO: 644948 - DNA, 75 bp, synthetic construct
  source 1..75: mol_type = other DNA
acatccggtactaccttgatggttatcctgatgctgtatctcttcggtggtccggtgctggaaggcttctcgctg

SEQ ID NO: 644949 - DNA, 75 bp, synthetic construct
  source 1..75: mol_type = other DNA
tgactttatgcgctgggactactgggcatttggcatctctggtctgctgttgatcgccgctatcgtcataatggg

SEQ ID NO: 644950 - DNA, 75 bp, synthetic construct
  source 1..75: mol_type = other DNA
gcggcagtgaagcgtattgagttcgtcggtccgagcgtgggggcagaccttgcgcaaaccggtgcgatggcgttg

SEQ ID NO: 644951 - DNA, 75 bp, synthetic construct
  source 1..75: mol_type = other DNA
caaattctgtcgctggcgctgctgctgcgctacagcctggatgccgatgatgcggcttccgccattgaacgcgcc

SEQ ID NO: 644952 - DNA, 75 bp, synthetic construct
  source 1..75: mol_type = other DNA
ttattgcagaattaagccgccgtttcagctgcacgctggagcactggtatgccgaacagggctgtgatttctgtg

SEQ ID NO: 644953 - DNA, 75 bp, synthetic construct
  source 1..75: mol_type = other DNA
atgaaccacgatatcccattaaaatatttcgatattgccgatgaatacgcgactgaatgcgcagatcctgtcgca

SEQ ID NO: 644954 - DNA, 75 bp, synthetic construct
  source 1..75: mol_type = other DNA
aatggtcttccccgacagatgacgatgagctgccggaagtcaccggaccggcgtggatagtcgacaatgtggcgc

SEQ ID NO: 644955 - DNA, 75 bp, synthetic construct
  source 1..75: mol_type = other DNA
ggtggtcggtgtgagcggttcttcgccagcctacgtctttatgtttatcgaagcgatggccgacgccgccgtgct

SEQ ID NO: 644956 - DNA, 75 bp, synthetic construct
  source 1..75: mol_type = other DNA
ttttgccgctgttaaacctggcattatgatcaaagtgcttagtgaaatcacttccagcctgaataaagactcgct

SEQ ID NO: 644957 - DNA, 75 bp, synthetic construct
  source 1..75: mol_type = other DNA
atgaagctgatacgcggcatacataatctcaatctcagccaggccccgcaagaagggtgtgtgctgactattggt

SEQ ID NO: 644958 - DNA, 75 bp, synthetic construct
  source 1..75: mol_type = other DNA
gtttgtctatattgtgctgctgtggggacattatcatgaaggatggcgtggacgccgcgtcgtctggtttaacgt

SEQ ID NO: 644959 - DNA, 75 bp, synthetic construct
  source 1..75: mol_type = other DNA
ctcatcaacctggcgctggcgaccttcatgcccaatgaatacatcacccacctggaagcaacacccgggatgctg

SEQ ID NO: 644960 - DNA, 75 bp, synthetic construct
  source 1..75: mol_type = other DNA
cgacggtaaaccactggattatacacaggcgagatactggtatgagcaatcagcggaacaggaaaatccacgcgc

SEQ ID NO: 644961 - DNA, 75 bp, synthetic construct
  source 1..75: mol_type = other DNA
ggtgtggcgtttcacggtgtcgcggatggtaaaaatccggatgtgctttccgtgggagaggggccagggatagcc

SEQ ID NO: 644962 - DNA, 75 bp, synthetic construct
  source 1..75: mol_type = other DNA
atgcaatttcagggcgtcattattgcggaaacttgccgggttgaagccggtgataaacaaatgacggtcaatatg

SEQ ID NO: 644963 - DNA, 75 bp, synthetic construct
  source 1..75: mol_type = other DNA
gacgccgcgttgtctggtttaacgtcgccggcgcagtcattctgacactggcctattttggcagccgaattgtcc

SEQ ID NO: 644964 - DNA, 75 bp, synthetic construct
  source 1..75: mol_type = other DNA
atggccctgcataacaagggatgtagtttcagggaaatatcccgtattacagacctgtcgcgtgtgacagtcagt

SEQ ID NO: 644965 - DNA, 75 bp, synthetic construct
  source 1..75: mol_type = other DNA
cgttatacaatgactggactaggaataacaggagtgcatactgcagagagtctgctaccggcaccttcctctgcc

SEQ ID NO: 644966 - DNA, 75 bp, synthetic construct
  source 1..75: mol_type = other DNA
aataattttttgaaagaaaaggtagaagctgtaaaagataatataaattcacatgaactttactttgagaaaata

SEQ ID NO: 644967 - DNA, 75 bp, synthetic construct
  source 1..75: mol_type = other DNA
aaatcttccggaattattcttaaccaaaatagatactaatacgtttttctctcagtggcccactaatgccaagaa

SEQ ID NO: 644968 - DNA, 75 bp, synthetic construct
  source 1..75: mol_type = other DNA
ggcgcggcgtcgttttcgtctcgggatgctggtctttttcggcatgctgggctgggcgctgctcacggcgatgaa

SEQ ID NO: 644969 - DNA, 75 bp, synthetic construct
  source 1..75: mol_type = other DNA
gtatccgcattatgcaggccatcattggcggtattatcgccggttttggcgcacgtctggcaatgggctgtaacc

SEQ ID NO: 644970 - DNA, 75 bp, synthetic construct
  source 1..75: mol_type = other DNA
tcaatcacttttgatctctcaggaaggacgctgcatggggatggccttactttatctccagactgaaaataccgc

SEQ ID NO: 644971 - DNA, 75 bp, synthetic construct
  source 1..75: mol_type = other DNA
atgctttcggccctgcctgccagtggggtcatggatttcgatctcggtatgagtgtggttggtattgttcagtat

SEQ ID NO: 644972 - DNA, 75 bp, synthetic construct
  source 1..75: mol_type = other DNA
tacttcggcgttccgcgatatgtggatcaccggacgtacccatatggcgaaagcaatcattatcggtatggcggt

SEQ ID NO: 644973 - DNA, 75 bp, synthetic construct
  source 1..75: mol_type = other DNA
attctctccacttactattttggcatcactggcaccttttgggcagtcacgggtgaatttacccgttggggcggt

SEQ ID NO: 644974 - DNA, 75 bp, synthetic construct
  source 1..75: mol_type = other DNA
caactggaaatcctcgttgttacataacgcattacttgggctatcgaatttttataatggtctgcgggaaacaga

SEQ ID NO: 644975 - DNA, 75 bp, synthetic construct
  source 1..75: mol_type = other DNA
tcaatcctgtcaataatgctctctcagggcaagagaaacaaaaaaaatcgagcgacaccacaatttttcaagaaa

SEQ ID NO: 644976 - DNA, 75 bp, synthetic construct
  source 1..75: mol_type = other DNA
cgaaatggcccggaggatggctgaaaaccggcacaatactccagactccggaagataaaaatacggatgtatacc

SEQ ID NO: 644977 - DNA, 75 bp, synthetic construct
  source 1..75: mol_type = other DNA
ggtggcccaggggggggacaggcagtgaaaccatcgtcagggatactgttgccaaatggcgtaaaggctggaacc

SEQ ID NO: 644978 - DNA, 75 bp, synthetic construct
  source 1..75: mol_type = other DNA
caccaccaccgaccgtctggcgaatctggctgaaccagtcgctgttgcaggtatctccctgccagtaaaaacact

SEQ ID NO: 644979 - DNA, 75 bp, synthetic construct
  source 1..75: mol_type = other DNA
ggattacctggtacgggaaaactattgcgcagggagcaggactatgggcgtccaccagttacagcaattcaggat

SEQ ID NO: 644980 - DNA, 75 bp, synthetic construct
  source 1..75: mol_type = other DNA
agcaaagtattaataaattacttagtgaggcagaaaaaaggccttatcagtctttaacagaaatacatcagcatc

SEQ ID NO: 644981 - DNA, 75 bp, synthetic construct
  source 1..75: mol_type = other DNA
agagtcttttccaccgctttatggctcatgcaagcatcaaaaaagatgggagcttcatcaaaaacattacaggct

SEQ ID NO: 644982 - DNA, 75 bp, synthetic construct
  source 1..75: mol_type = other DNA
gtacatgcagctccgttgaaaataacatccgcaggagagatgcagttatctgaaaggcagtggcaacagcaggaa

SEQ ID NO: 644983 - DNA, 75 bp, synthetic construct
  source 1..75: mol_type = other DNA
ttgaactgcctgtactggaaacagttctggggacatggaacctgtacaacagcgtcattcagctccagcaagcta

SEQ ID NO: 644984 - DNA, 75 bp, synthetic construct
  source 1..75: mol_type = other DNA
aaatagcgcagcaactggcactcgagttctaccgtattctgaaaacccaaaataaatcacagctaaggagctcgt

SEQ ID NO: 644985 - DNA, 75 bp, synthetic construct
  source 1..75: mol_type = other DNA
aaatagcgcagcaactggcactcgagttctaccgtattctgaaaacccaaaataaatcacagctaagcagctggt

SEQ ID NO: 644986 - DNA, 75 bp, synthetic construct
  source 1..75: mol_type = other DNA
ttgtcgaaggtcatgtaaatcgcctgaagatgctgaaatgtcagatgtatggtcgagccatggaacgtagttctc

SEQ ID NO: 644987 - DNA, 75 bp, synthetic construct
  source 1..75: mol_type = other DNA
agggcaggaaaaacaaaaaaaaccgaagagcattaccggatttcaggaaaattatcaacgcaatatcaggccaat

SEQ ID NO: 644988 - DNA, 75 bp, synthetic construct
  source 1..75: mol_type = other DNA
cgcagcaactggcactcgagttctaccgtattctgaaaacccaaaataaatcacagctaagcagttggttcactc

SEQ ID NO: 644989 - DNA, 75 bp, synthetic construct
  source 1..75: mol_type = other DNA
tcactcgagtccacgaaagcggatcagcagaatttcggagcgtggcagcggggatggaagctgatgctgcagcta

SEQ ID NO: 644990 - DNA, 75 bp, synthetic construct
  source 1..75: mol_type = other DNA
atgaccacctttacccaaaaagaactgattaaagaaataaaagaccgcatcagcagcctcgacgttcgagacgat

SEQ ID NO: 644991 - DNA, 75 bp, synthetic construct
  source 1..75: mol_type = other DNA
gccagcgtgagcaactgagctatgtcattggcaccgaagttccggttccgggcggtgaggccagcgccattcagt

SEQ ID NO: 644992 - DNA, 75 bp, synthetic construct
  source 1..75: mol_type = other DNA
atgaaaacgttaattgcccggcataaagccggtgaacatatcggaatttgttcagtctgttcggcgcatccgttg

SEQ ID NO: 644993 - DNA, 75 bp, synthetic construct
  source 1..75: mol_type = other DNA
tttgccatcgccactgccattggttcatggtttggcgcacgctttaccctgctgcccatcttccgtattcccgtg

SEQ ID NO: 644994 - DNA, 75 bp, synthetic construct
  source 1..75: mol_type = other DNA
atgaccacctttacccaaaaagaactgattaaagaaatcaaagatcgcatcagcagcctcgacgtccgagacgat

SEQ ID NO: 644995 - DNA, 75 bp, synthetic construct
  source 1..75: mol_type = other DNA
atgaccacctttacccaaaaagaactgattaaagaaattaaagaacgcatcagcagcctcgacgtgcgagacgat

SEQ ID NO: 644996 - DNA, 75 bp, synthetic construct
  source 1..75: mol_type = other DNA
tggagaaaatatatacgctgaaaaaattgacaatggatatatagagaatgcggattcaagcataaaaatgaagat

SEQ ID NO: 644997 - DNA, 75 bp, synthetic construct
  source 1..75: mol_type = other DNA
tcgttggctcaaagaagcactgcaaaatggaatgaagaaagaagattttcttgttaaggacacagaagaagaatt

SEQ ID NO: 644998 - DNA, 75 bp, synthetic construct
  source 1..75: mol_type = other DNA
caacaagtccatacattcagcttatagagcaaattgcagttctacagcaggaagcaaagcgactgcgagagcagg

SEQ ID NO: 644999 - DNA, 75 bp, synthetic construct
  source 1..75: mol_type = other DNA
accgcgagatctgaaagtgaatgaaacggatgctgaatacctggtgcgtaaattcgatgcgcttgaagctaaatg

SEQ ID NO: 645000 - DNA, 75 bp, synthetic construct
  source 1..75: mol_type = other DNA
aagactctccagcaattgcgtgaaatttcagtctcacatagagacattgctggtaagcgtcaacggagcaccgta

SEQ ID NO: 645001 - DNA, 75 bp, synthetic construct
  source 1..75: mol_type = other DNA
ggccgattgaataccaagagttggagcattggaatgttgagaaatccatgcgtgacgcatatgaaaagtggcgtg

SEQ ID NO: 645002 - DNA, 75 bp, synthetic construct
  source 1..75: mol_type = other DNA
gtcaaactacgcatgccgcgcagccgtatccgcattatacaggccattattggcggcattatcgccggttttggc

SEQ ID NO: 645003 - DNA, 75 bp, synthetic construct
  source 1..75: mol_type = other DNA
ttgatgaaccgttcgatggcctggatgttgcctcacgtcagcagctggctgagctactcgcctcgttacatcagt

SEQ ID NO: 645004 - DNA, 75 bp, synthetic construct
  source 1..75: mol_type = other DNA
catggcggcaaaattgttttcatcggtttgtacattggtgaacttgttattgacgatccgaccttccataaaaaa

SEQ ID NO: 645005 - DNA, 75 bp, synthetic construct
  source 1..75: mol_type = other DNA
atgccacacgggaagattttgcgttggtgattgaactgatgcgcagcaataaaattcacgaaaatttaatgaaaa

SEQ ID NO: 645006 - DNA, 75 bp, synthetic construct
  source 1..75: mol_type = other DNA
ggctggacattctcggtattaataaacgcaccgcagacgcacctttccacagtctttcctgggggcagcaacgtc

SEQ ID NO: 645007 - DNA, 75 bp, synthetic construct
  source 1..75: mol_type = other DNA
aacggcaaagcctgttttctcatattactcgcctttctttcgagcaattgcaaaaactcatcagcgacgaatggc

SEQ ID NO: 645008 - DNA, 75 bp, synthetic construct
  source 1..75: mol_type = other DNA
tcctggcgaagatgacaccgggcgtaccacggctgaaatcattcaggatgaagtaaaggatactccgcgttgcat

SEQ ID NO: 645009 - DNA, 75 bp, synthetic construct
  source 1..75: mol_type = other DNA
aagggtttcttcgtgggagatgtgtaccgcgagatctgaaagtgaatgaaacagatgctgaatacctggtgcgta

SEQ ID NO: 645010 - DNA, 75 bp, synthetic construct
  source 1..75: mol_type = other DNA
tagatcgccgcagggcgaaaaatggcgatagagaatacatggcatgggatatggcgcttggctggattatctggt

SEQ ID NO: 645011 - DNA, 75 bp, synthetic construct
  source 1..75: mol_type = other DNA
gtatccgcattatgcaggccattattggcggtattatcgccggtttcggcgcgcgtctggcgatgggctgtaacc

SEQ ID NO: 645012 - DNA, 75 bp, synthetic construct
  source 1..75: mol_type = other DNA
accgcagccattgccagggctaaaggggcgcatgttgttgttgcagatattgatagccaacgtcgccagcacgtt

SEQ ID NO: 645013 - DNA, 75 bp, synthetic construct
  source 1..75: mol_type = other DNA
tagtgagtaccttgcggtacgtgaagacaaccttgtgcctctccctgacgaggtcagcgacagtgccggagcatt

SEQ ID NO: 645014 - DNA, 75 bp, synthetic construct
  source 1..75: mol_type = other DNA
gccgtcaaatccggcgcaatggcaaccgacacggttgtgaataccggcgcggaagggggaccagatgcagacaat

SEQ ID NO: 645015 - DNA, 75 bp, synthetic construct
  source 1..75: mol_type = other DNA
ccgcgaacaggctgaagccgttgccgcacagtaccggaacgtctttatcgaggatgatcagggaacgcattttcg

SEQ ID NO: 645016 - DNA, 75 bp, synthetic construct
  source 1..75: mol_type = other DNA
ccgttggcgaagtgaaatcctgccatgtcatcccgcgcccacacagtgatgttgaggctattttacctaaatcgg

SEQ ID NO: 645017 - DNA, 75 bp, synthetic construct
  source 1..75: mol_type = other DNA
tctctgaccgcaaagcaatggagttgtatggttttcccattagtggtgatcattatttctctatgaacaaaggac

SEQ ID NO: 645018 - DNA, 75 bp, synthetic construct
  source 1..75: mol_type = other DNA
gtaaaagccgtacacgttattccccgcccacataccgatgtcgaaaaaatcttaccaaagggaattaacccatga

SEQ ID NO: 645019 - DNA, 75 bp, synthetic construct
  source 1..75: mol_type = other DNA
cgtacctggaattttgaggacggtgccgggtactggatgaaccatgtcatccggaatttcggcattcttaagtaa

SEQ ID NO: 645020 - DNA, 75 bp, synthetic construct
  source 1..75: mol_type = other DNA
ttgatctggcgctcctggaattttgaggactgtgccgggtactggatgaaccggtacatcagggatttcgggatc

SEQ ID NO: 645021 - DNA, 75 bp, synthetic construct
  source 1..75: mol_type = other DNA
ttgctttacgcgaggcgatatttgcactggcacaaattgagcaggaacttatcgcccctgaaaatcgcagcggtt

SEQ ID NO: 645022 - DNA, 75 bp, synthetic construct
  source 1..75: mol_type = other DNA
gtggcgttgacaaccctgctgaaaccagaaagtctctcactgcaggtggacggacgactcatcaaactggacaac

SEQ ID NO: 645023 - DNA, 75 bp, synthetic construct
  source 1..75: mol_type = other DNA
acagagcacaaaggatgtcgccgccggctccgctttacccggccatgcggggcatggccttgtgggttttcagtt

SEQ ID NO: 645024 - DNA, 75 bp, synthetic construct
  source 1..75: mol_type = other DNA
ttccgctgctttggcgaggcggaagtcattgccgaaccgatgatccatccggtggtcggcgtgagcggctcttct

SEQ ID NO: 645025 - DNA, 75 bp, synthetic construct
  source 1..75: mol_type = other DNA
gctacgaaaaaataggttccgggctggtgaccgtcatcgttcgtggtgatgtcggggcggtaaaagcggcaacag

SEQ ID NO: 645026 - DNA, 75 bp, synthetic construct
  source 1..75: mol_type = other DNA
gtggcgacatttcgcaagcggaagtgctattgaaacgtaagttctctgaccgtctgcgttctgaaattggtcgcc

SEQ ID NO: 645027 - DNA, 75 bp, synthetic construct
  source 1..75: mol_type = other DNA
gccagctctctcaacatgaagttaacagcaaaaatccttatggaaaaaagctttttctgaggctgaaccacggac

SEQ ID NO: 645028 - DNA, 75 bp, synthetic construct
  source 1..75: mol_type = other DNA
ggattcattatctgcaacaatgtcgggagatattgcggaagacgacattaccgccgtgctctgttttgtgattga

SEQ ID NO: 645029 - DNA, 75 bp, synthetic construct
  source 1..75: mol_type = other DNA
ttacggtcgccatatacaagtagtgctgcgtaaaaaatacgcaatgagcagcgatttgcgtcgctggacgaactg

SEQ ID NO: 645030 - DNA, 75 bp, synthetic construct
  source 1..75: mol_type = other DNA
tcaatcaatttggcggttataccggaatgacaccggcagactttcgcgaatttgtttttacgattgccgataaag

SEQ ID NO: 645031 - DNA, 75 bp, synthetic construct
  source 1..75: mol_type = other DNA
aagccagggggaagtgaataagcagccgaacatcgaagagttgaaaaaacgcatggagcaaagtcgattgcggaa

SEQ ID NO: 645032 - DNA, 75 bp, synthetic construct
  source 1..75: mol_type = other DNA
atgagcgaatatttcagaatacttcagggactgccggacggtccttttacccgcgaacatgccgaagccgttgcc

SEQ ID NO: 645033 - DNA, 75 bp, synthetic construct
  source 1..75: mol_type = other DNA
aggatgagcagggaacgcattttcgcctggttgtccgtcaggatggcacgttgatctggcgctcctggaattttg

SEQ ID NO: 645034 - DNA, 75 bp, synthetic construct
  source 1..75: mol_type = other DNA
ctggtctggcgtacctggaattttgaggacggtgccgggtactggatgaaccatgtcatcagggatttcggcatt

SEQ ID NO: 645035 - DNA, 75 bp, synthetic construct
  source 1..75: mol_type = other DNA
atattaccgggcgacatcgccgaagatgacatcacagcggtactctgttttgtgattgaagccgatcagattacc

SEQ ID NO: 645036 - DNA, 75 bp, synthetic construct
  source 1..75: mol_type = other DNA
ctgccgctgaatgctgtcatggaatcactgcaaccccgtgaagtcgatctgcatccgctggcaggtggcgagcgg

SEQ ID NO: 645037 - DNA, 75 bp, synthetic construct
  source 1..75: mol_type = other DNA
ccccgccagtgctggaactggccgcaacagaagcaccagccggacgcgtagagcgggaaaaaacgacgcgcggta

SEQ ID NO: 645038 - DNA, 75 bp, synthetic construct
  source 1..75: mol_type = other DNA
gcaatagcctcgatcacggtattgaactgccagaaaaacggctcgccgcaggtaaaaacagcgtcggaaatttaa

SEQ ID NO: 645039 - DNA, 75 bp, synthetic construct
  source 1..75: mol_type = other DNA
tggcaaaagcggcctcgcaaggtttgactgtcagcgaaaacatgagcgacgacgaagtcgcgatgctgatatttg

SEQ ID NO: 645040 - DNA, 75 bp, synthetic construct
  source 1..75: mol_type = other DNA
accttgaaagtaactatcgcaaagtccccggcatttctgctgcgaccattcttggcgacggcagcgtggcactga

SEQ ID NO: 645041 - DNA, 75 bp, synthetic construct
  source 1..75: mol_type = other DNA
taccagaaagggaccgtacacattgtctttaagcgtcctgaccttgttgaaaaactgaatgatattattgcacgg

SEQ ID NO: 645042 - DNA, 75 bp, synthetic construct
  source 1..75: mol_type = other DNA
gtaacgggcgtgtgacgctggactgcagcggacgggaggcactggatgacctggtacgtccgttttatctgctgg

SEQ ID NO: 645043 - DNA, 75 bp, synthetic construct
  source 1..75: mol_type = other DNA
tcggtgagttgtttgaaggggaatattttacggtgcggggataccggaaaggtacggtgcatatcaccttccgtc

SEQ ID NO: 645044 - DNA, 75 bp, synthetic construct
  source 1..75: mol_type = other DNA
gaaaaactgtatacctgggacgaagaggtcaccagcaatgccgtcgaagtacatgtgcatcatctgcgacgcaaa

SEQ ID NO: 645045 - DNA, 75 bp, synthetic construct
  source 1..75: mol_type = other DNA
acatgtgcatcatctgcgacgcaagctcggcagcgacttcattcgtaccgttcacggtattggctacacattagg

SEQ ID NO: 645046 - DNA, 75 bp, synthetic construct
  source 1..75: mol_type = other DNA
gaatatctcgggaacggcgacaatatcggtgagttgtttgaaggggaatattttacggtagcgtggctaccagaa

SEQ ID NO: 645047 - DNA, 75 bp, synthetic construct
  source 1..75: mol_type = other DNA
ctcttcggtatttcttgctggggcgatatcggcggtgctggggattatcgtgacgatactgtcgtttcgccggtg

SEQ ID NO: 645048 - DNA, 75 bp, synthetic construct
  source 1..75: mol_type = other DNA
gcttattttccctgcgctgggtgtggaagtggttaaacgtgttccttcccaggttcgcggtactgcgctcggcgg

SEQ ID NO: 645049 - DNA, 75 bp, synthetic construct
  source 1..75: mol_type = other DNA
tgacatggggattaggcattgtcggaccgaaacactccggtaaagtgatgtcctggaacggaatggccatttacg

SEQ ID NO: 645050 - DNA, 75 bp, synthetic construct
  source 1..75: mol_type = other DNA
gccgtccggaccttgttgagcgactgaatgacatcattgcccgccattatcccggcgcactgccgccgcgtgtct

SEQ ID NO: 645051 - DNA, 75 bp, synthetic construct
  source 1..75: mol_type = other DNA
ctgattgatgtctaccggaaattgtcatgggattacagaaccaataatccctgccgtctgggtaagaaaatcatt

SEQ ID NO: 645052 - DNA, 75 bp, synthetic construct
  source 1..75: mol_type = other DNA
gcaataccgcatcagcttattatggataaaatttatgatgttttgcgcgcctatcgctacggctgtgcggaataa

SEQ ID NO: 645053 - DNA, 75 bp, synthetic construct
  source 1..75: mol_type = other DNA
accggcggccgctgctgcgcatcagtgtggtcagtgtgctttttatcgcgttgtgtgagtacgcgatgtttaccg

SEQ ID NO: 645054 - DNA, 75 bp, synthetic construct
  source 1..75: mol_type = other DNA
aaagcgagcggagcaatatgcaacgcgtagtaagctggtaagtaattattttgaccgttttggtgagtacaaccc

SEQ ID NO: 645055 - DNA, 75 bp, synthetic construct
  source 1..75: mol_type = other DNA
ttgagcgtggaataactgcctttaaaggtgatattgcgccagaagtggcgaagaaaattgccacatcagaatcga

SEQ ID NO: 645056 - DNA, 75 bp, synthetic construct
  source 1..75: mol_type = other DNA
gcagcctgtagaacagcaagatggatttatgtctgacctcggcgaagcagtaaaagaaactggtcgcggactggt

SEQ ID NO: 645057 - DNA, 75 bp, synthetic construct
  source 1..75: mol_type = other DNA
ctgaccgaacgtgccgttcctgtatgtggtcacttaggtttaaccccacagtcagtgaatattttcggtggctac

SEQ ID NO: 645058 - DNA, 75 bp, synthetic construct
  source 1..75: mol_type = other DNA
gtttcggtgcaatcatgcgcttgtacgagtccaaagcagcaaggaatgcgctcttacgtctggcaaacactaaag

SEQ ID NO: 645059 - DNA, 75 bp, synthetic construct
  source 1..75: mol_type = other DNA
gcaaggtcagacaccgcaaatgtagtaactcagacggggcaatcgcaagccaacaggataaggacgattggcgca

SEQ ID NO: 645060 - DNA, 75 bp, synthetic construct
  source 1..75: mol_type = other DNA
ttttacggtgcggggataccggaaaggtacggtgcatatcaccttccgtcgccctgaccttgttgagcaactgaa

SEQ ID NO: 645061 - DNA, 75 bp, synthetic construct
  source 1..75: mol_type = other DNA
caggcagtgaaaccatcgtcagggatgctgttgccaaatggcgtaaaggctggatcccaccggttactactgccg

SEQ ID NO: 645062 - DNA, 75 bp, synthetic construct
  source 1..75: mol_type = other DNA
ttattagtctgatgtgtgaaaaagaaccggcgctgaaaatagcgcagcaactagtacttgagttctaccgtattc

SEQ ID NO: 645063 - DNA, 75 bp, synthetic construct
  source 1..75: mol_type = other DNA
atggcttatagtcgtgaacaattgatgacggcgttaaggaatgcggatgctgctggtgatactgagggagcacgt

SEQ ID NO: 645064 - DNA, 75 bp, synthetic construct
  source 1..75: mol_type = other DNA
caccgaagatattggcaccgccattgatgagtattttgctggtcaggctgttcagcaacaaacagttaatcaggc

SEQ ID NO: 645065 - DNA, 75 bp, synthetic construct
  source 1..75: mol_type = other DNA
atggataaaccggaagaagcgaaaaggaatatcacccgtcttgccgaccggaaaatctgggaccgcctgatgaca

SEQ ID NO: 645066 - DNA, 75 bp, synthetic construct
  source 1..75: mol_type = other DNA
cctggccggtggtgctttattgctggctgcgcttttacccgtttctgcgccgattaaatttgccctgctggtcgt

SEQ ID NO: 645067 - DNA, 75 bp, synthetic construct
  source 1..75: mol_type = other DNA
gaaaactacgcataccgccctcccctttgccggacatacgctgcattttgttgagtttgatccggcgagtttttg

SEQ ID NO: 645068 - DNA, 75 bp, synthetic construct
  source 1..75: mol_type = other DNA
catcagtctctaatatggtcgacatgaaaactacgcatacctccctcccctttgcaggacatacgctgcattttg

SEQ ID NO: 645069 - DNA, 75 bp, synthetic construct
  source 1..75: mol_type = other DNA
cctccctcccctttgccggacatacgctgcattttgttgagttcgatccggcgaatttttgtgagcaggatttac

SEQ ID NO: 645070 - DNA, 75 bp, synthetic construct
  source 1..75: mol_type = other DNA
tcccgatttattagtctgatgtgtgaaaaagaaccggagctgaaaataagcgcagcaactggtactcgagttcta

SEQ ID NO: 645071 - DNA, 75 bp, synthetic construct
  source 1..75: mol_type = other DNA
gtccggaacgccttaaacagcaaacccgcaaaaaacggcatcagcattggacagaggttatggccctgcataaca

SEQ ID NO: 645072 - DNA, 75 bp, synthetic construct
  source 1..75: mol_type = other DNA
gacgtaaacgtaaaacagagcatttagccggacggatcgctgcagtttatgcgctgcgggaatatggctataaat

SEQ ID NO: 645073 - DNA, 75 bp, synthetic construct
  source 1..75: mol_type = other DNA
gaataaatcacctgagccagaaatatctgtgcctgtagcatcgctccgtcgtccggaacgccttaaacagcaaac

SEQ ID NO: 645074 - DNA, 75 bp, synthetic construct
  source 1..75: mol_type = other DNA
agttgtcgtcggcgccggatacagcatctaccctgctaagggcacacgctatggcttgtattttccgtccgccac

SEQ ID NO: 645075 - DNA, 75 bp, synthetic construct
  source 1..75: mol_type = other DNA
gggattaattgccggaggtgaggctggaaaacgggcagcaacggtagtgggtctccgttgcagtgcagataccct

SEQ ID NO: 645076 - DNA, 75 bp, synthetic construct
  source 1..75: mol_type = other DNA
agagagtgcgtttaaggcaagcaagttacagacagatcaaggttttctggattatcagatagtgaactggaataa

SEQ ID NO: 645077 - DNA, 75 bp, synthetic construct
  source 1..75: mol_type = other DNA
atggtcgacatgaaaactacgcatacctccctcccctttgccggacatacgctgcattttgttgagttcgatccg

SEQ ID NO: 645078 - DNA, 75 bp, synthetic construct
  source 1..75: mol_type = other DNA
ggttatggccctgcataacaagggatgtagtttcagggaaatatcccgtattacaggcctgtcgcgagtgacagt

SEQ ID NO: 645079 - DNA, 75 bp, synthetic construct
  source 1..75: mol_type = other DNA
ctcgagttctaccgtattctgaaaacccaaaataaatcacagcttagcagctggttcactcgagtccacgaaagc

SEQ ID NO: 645080 - DNA, 75 bp, synthetic construct
  source 1..75: mol_type = other DNA
gcagatgatggcgacacaacttatgttcgtctgggcttcaaaggcgaaactcaaatcaacgatcaactgactggt

SEQ ID NO: 645081 - DNA, 75 bp, synthetic construct
  source 1..75: mol_type = other DNA
ggcggtgaggccagcgccattcagtcagtacacatcacccaggttgaagatgccgccaatactttacgtacgcat

SEQ ID NO: 645082 - DNA, 75 bp, synthetic construct
  source 1..75: mol_type = other DNA
gcgtaaaggctggaacccaccggttactactgccgcaagacttccttcagtgtcccgggtaagccgctggttgat

SEQ ID NO: 645083 - DNA, 75 bp, synthetic construct
  source 1..75: mol_type = other DNA
gcttatctttcctgcgctgggcgtggaggtggttaaacgcgtcccctcacaagttcgcggcaccgcactgggcgg

SEQ ID NO: 645084 - DNA, 75 bp, synthetic construct
  source 1..75: mol_type = other DNA
taaaatctgggagcggctgatgacggacacggggatgtataccttcatgagttcctgccagcgtgatgagtggaa

SEQ ID NO: 645085 - DNA, 75 bp, synthetic construct
  source 1..75: mol_type = other DNA
aattcggtggcgatacctggacccaaacagatgtgttcatgactggtcgcaccactggtgttgcaacctatcgta

SEQ ID NO: 645086 - DNA, 75 bp, synthetic construct
  source 1..75: mol_type = other DNA
cagtacgccgagtgagaacctgtgcgaccgcttctgccgtctcgataccgctgagtttggcgtggtgccgggcgt

SEQ ID NO: 645087 - DNA, 75 bp, synthetic construct
  source 1..75: mol_type = other DNA
tgccgcggttgtcagcgagcagatgcagggccgcaaccaggtggatatcaacgagatccagaccgcagttgaaaa

SEQ ID NO: 645088 - DNA, 75 bp, synthetic construct
  source 1..75: mol_type = other DNA
gggattaatcgccggaggtgaggctggaaaacgggctgcaacggcagcgggtctccgttgcagtgctgatactct

SEQ ID NO: 645089 - DNA, 75 bp, synthetic construct
  source 1..75: mol_type = other DNA
atctctacggcaaccgcagtaactgcacagattatcgcccaggttgccagccatatttatggcggcaccaccatt

SEQ ID NO: 645090 - DNA, 75 bp, synthetic construct
  source 1..75: mol_type = other DNA
ctatcctgcgtaatcgtatcgcaggcctcggtaaaaaccgtaaaactgcggtgttcccgaaactggtgtttgcga

SEQ ID NO: 645091 - DNA, 75 bp, synthetic construct
  source 1..75: mol_type = other DNA
atctccactgccaccgcagtaactgcgcagattatcgcccaagttgccagccatatttatggcggcaccaccatt

SEQ ID NO: 645092 - DNA, 75 bp, synthetic construct
  source 1..75: mol_type = other DNA
taccgcaaatcccggcaggggagtatgatacaatcattcttggctacagtcaccagtataaggccaatacggaaa

SEQ ID NO: 645093 - DNA, 75 bp, synthetic construct
  source 1..75: mol_type = other DNA
ctcctccattccaaatgcgtcttaacgaagatttcaggttgcagcttgaaaatgaaatgcgcaaagatggagata

SEQ ID NO: 645094 - DNA, 75 bp, synthetic construct
  source 1..75: mol_type = other DNA
ttattcaggaaaccagccagcgatttaatagcctagttcaagcaggtgtaaaaaacgaaatcgcctacaactttt

SEQ ID NO: 645095 - DNA, 75 bp, synthetic construct
  source 1..75: mol_type = other DNA
accaattttagaccagagactttcttttaatgatgaagaacaacatagatatgcgacagatattatagcaataaa

SEQ ID NO: 645096 - DNA, 75 bp, synthetic construct
  source 1..75: mol_type = other DNA
agcaatgataaactggaagagattaaagaaaaattagatagagatagtacacgtatccggtcatataaaaaaagg

SEQ ID NO: 645097 - DNA, 75 bp, synthetic construct
  source 1..75: mol_type = other DNA
ataaaaatattatttatgtcactctaaaatccggtagcgggggtcagagtgggcaaagcaaaactccggctggag

SEQ ID NO: 645098 - DNA, 75 bp, synthetic construct
  source 1..75: mol_type = other DNA
aaccgagcgggttagtatgggcgaatacgctggcctggcaagaagcacgtaaagctcgcataatcctcggtaaga

SEQ ID NO: 645099 - DNA, 75 bp, synthetic construct
  source 1..75: mol_type = other DNA
acagaatcagcatccggtaataagaccctgactcattaccggggtctgaaaacaccctataatgatgaactggca

SEQ ID NO: 645100 - DNA, 75 bp, synthetic construct
  source 1..75: mol_type = other DNA
aagcgcatgatcaaatcagcaaaagcagtcgtaccgacagcgcgactaaaaccaccattactgaatataacaacg

SEQ ID NO: 645101 - DNA, 75 bp, synthetic construct
  source 1..75: mol_type = other DNA
caagtctttgcggtcgcgcctcatcatccgttagcccaggaagaagaaccgttaaaccgtcgtatcattaaacga

SEQ ID NO: 645102 - DNA, 75 bp, synthetic construct
  source 1..75: mol_type = other DNA
acccctgcatatcagccaggtagatattaacccgcaaattgtctttagctatatcaagagcaagggcaacttgtc

SEQ ID NO: 645103 - DNA, 75 bp, synthetic construct
  source 1..75: mol_type = other DNA
tgttgatacaacaaccgccggtgtggcgacttacgccagcggtcgtactttctggcttgatgtcagcatgaaatt

SEQ ID NO: 645104 - DNA, 75 bp, synthetic construct
  source 1..75: mol_type = other DNA
cattatataaacctgaaaacaaccataactatcaaacagaaatgttacttcgctggaactaccctgcagcctcag

SEQ ID NO: 645105 - DNA, 75 bp, synthetic construct
  source 1..75: mol_type = other DNA
acgttcagagattttttcacagaagtgatggatacaacggacagggaaattctggagaaagagctgagaccaatt

SEQ ID NO: 645106 - DNA, 75 bp, synthetic construct
  source 1..75: mol_type = other DNA
gtacggtatcgaaatggtccagaggatggctgaaaaccggcacaatactccagactccagaagacagaaatacgg

SEQ ID NO: 645107 - DNA, 75 bp, synthetic construct
  source 1..75: mol_type = other DNA
ttcaatgaaaaaggagttaagcgagccctgataagcacgcctaatcatactctggttctgcaacaactggaggat

SEQ ID NO: 645108 - DNA, 75 bp, synthetic construct
  source 1..75: mol_type = other DNA
gaccgattacgttgttaaagaacctcagccggatggcacagggctcacgaatatttttttagagtctcacacacc

SEQ ID NO: 645109 - DNA, 75 bp, synthetic construct
  source 1..75: mol_type = other DNA
ggtgaaactgaggctgatgatgataaattagtggatgaatttcgtcgattagctgaacaccctgatggttctgat

SEQ ID NO: 645110 - DNA, 75 bp, synthetic construct
  source 1..75: mol_type = other DNA
aaacacatgtttaattcattttttttagaaaacatgattaaacttcaggataatttcttcaactattgcattgtc

SEQ ID NO: 645111 - DNA, 75 bp, synthetic construct
  source 1..75: mol_type = other DNA
tgacaccggcagactttcgcgaatttgtttttacgattgccgataaagtcggatttgcacgcgaacgcattattc

SEQ ID NO: 645112 - DNA, 75 bp, synthetic construct
  source 1..75: mol_type = other DNA
agtaataggtcatcgtccagatctaggagactggcaaattcgcgagaaacttagctatgctaacagctttagtcc

SEQ ID NO: 645113 - DNA, 75 bp, synthetic construct
  source 1..75: mol_type = other DNA
tgcaaaaagatcatgacggatattcaatgatacaaaatgagattatgaccaccaatttaacaccaaattccggag

SEQ ID NO: 645114 - DNA, 75 bp, synthetic construct
  source 1..75: mol_type = other DNA
tatgactggttaacccctgaatcgatcggcgttaatgatgtcacgcccgcagatgaaagtacctggtgtatagga

SEQ ID NO: 645115 - DNA, 75 bp, synthetic construct
  source 1..75: mol_type = other DNA
gccgatacattatcatgaagccagttacaacacagatattaccgacacaaatcatactggctggtgataatgacc

SEQ ID NO: 645116 - DNA, 75 bp, synthetic construct
  source 1..75: mol_type = other DNA
agaaacacaagtcagctatgatcccctgactcgtcagctcgtttaccagcttcaggcgcgttactctgaattcca

SEQ ID NO: 645117 - DNA, 75 bp, synthetic construct
  source 1..75: mol_type = other DNA
gatccgtctcagagatcatctgaaacggtttcctgatttctataatgaagaaatattcagggaggtgatcgaaga

SEQ ID NO: 645118 - DNA, 75 bp, synthetic construct
  source 1..75: mol_type = other DNA
gcacgttctttctgtgatgcggttagtcgtgccgcctgctggcagaaagcaatgcgccttcgtctgttccagttc

SEQ ID NO: 645119 - DNA, 75 bp, synthetic construct
  source 1..75: mol_type = other DNA
ctgatttactgcaatccccatgagagcgcaacggtgctcgctattttccgtgaagaggccatgcgcgatgagccg

SEQ ID NO: 645120 - DNA, 75 bp, synthetic construct
  source 1..75: mol_type = other DNA
ctcgcttttctgcactgatgagcagattgctgaggtggctgattcggttgttcgtgactgccttgtttctcgggc

SEQ ID NO: 645121 - DNA, 75 bp, synthetic construct
  source 1..75: mol_type = other DNA
tctgatgtggaacgtcgatccctatttacagacccagtggcaactgactgacaaactgtcactggatgctggcgt

SEQ ID NO: 645122 - DNA, 75 bp, synthetic construct
  source 1..75: mol_type = other DNA
ctggctgccgggtgccctacggttaaggattcgcatcagtggcttaatcgtgtctggcagaacattcagcgtaaa

SEQ ID NO: 645123 - DNA, 75 bp, synthetic construct
  source 1..75: mol_type = other DNA
cccgcttgatccacatcatatcaatatgcagcagttcacgccgcagcaggtcgctgaacttgaagccatccgtat

SEQ ID NO: 645124 - DNA, 75 bp, synthetic construct
  source 1..75: mol_type = other DNA
cgtataacgccatcgacgcggcatccgtcgctctcggtcgtccttgtctgacactgcccgaacgtgagcattttc

SEQ ID NO: 645125 - DNA, 75 bp, synthetic construct
  source 1..75: mol_type = other DNA
ggcagatcctcgtgatgcacgatgcgttcggcattaccggcggccatatccctaaatttgccaaaaatttcctcg

SEQ ID NO: 645126 - DNA, 75 bp, synthetic construct
  source 1..75: mol_type = other DNA
atgaaaccgaccactattgcttcattgcagaaatataagcaggaaaaaaaacgcttcgccaccatcactgcctac

SEQ ID NO: 645127 - DNA, 75 bp, synthetic construct
  source 1..75: mol_type = other DNA
gaactgtgcgttcgtggacgagcggtctgtgaactgtccgaggattatggcctgacggggtattttatcgttctc

SEQ ID NO: 645128 - DNA, 75 bp, synthetic construct
  source 1..75: mol_type = other DNA
attagcgatgccttacgtcaggggagagtcgtgctgcgccagggggcgctggcatgcgatggaacagaccgtgac

SEQ ID NO: 645129 - DNA, 75 bp, synthetic construct
  source 1..75: mol_type = other DNA
tctgccgtctggtttatcagctcggtgtgaaaaatgcgctgatggcgcttgagtccgcgcaccgttttgctttct

SEQ ID NO: 645130 - DNA, 75 bp, synthetic construct
  source 1..75: mol_type = other DNA
gatcgcccgtaatatgggctttgcgtcgataggttatgtaccggaagatggctggtatgcaggcacggaagcgcg

SEQ ID NO: 645131 - DNA, 75 bp, synthetic construct
  source 1..75: mol_type = other DNA
tcaggatcgtgccggttcaccgaaaagcgtagctgcagtaggtcatgacgcgaagcagatgctgggccgtacgcc

SEQ ID NO: 645132 - DNA, 75 bp, synthetic construct
  source 1..75: mol_type = other DNA
atggccctggttgttatcgatggtaatcagcgcgtcttccgcagttatggggaaacgcgtcccggtaataacgtt

SEQ ID NO: 645133 - DNA, 75 bp, synthetic construct
  source 1..75: mol_type = other DNA
gccaggcgcacgcgtgccgacctacaatgggacgcccattaccctggtgaatctggcaacccataccagcgccct

SEQ ID NO: 645134 - DNA, 75 bp, synthetic construct
  source 1..75: mol_type = other DNA
gtgaggaggcgtaacgcgagaggcgggataagcagaacagtttcagtgtatctcgatgaagatacaaataaccga

SEQ ID NO: 645135 - DNA, 75 bp, synthetic construct
  source 1..75: mol_type = other DNA
tttcctgatttttataactcggagatattcagggaggcagataaagaggaagatataacatttaatacactctag

SEQ ID NO: 645136 - DNA, 75 bp, synthetic construct
  source 1..75: mol_type = other DNA
cgtaaccttgaccgtttgttaatggaagaaaccggcattccagtcgttgttgctgaagacccgctgacctgtgtg

SEQ ID NO: 645137 - DNA, 75 bp, synthetic construct
  source 1..75: mol_type = other DNA
cagaagaaggctggtatgcaggcacagaagtacgttatatgggcgatatcatggcggatgacgaaaatacggcaa

SEQ ID NO: 645138 - DNA, 75 bp, synthetic construct
  source 1..75: mol_type = other DNA
tgaactatgaaaacatgagtgaaaaccgcaagggttacaataacttccgccttaataacggcgtgccggagtacg

SEQ ID NO: 645139 - DNA, 75 bp, synthetic construct
  source 1..75: mol_type = other DNA
gctccgggtagtcaggccgcgtactccaatctcgcattcgacctgttggcagatgcgctggcaaatgcttctggt

SEQ ID NO: 645140 - DNA, 75 bp, synthetic construct
  source 1..75: mol_type = other DNA
gaccagtgagatgctggtgaaattgctcgatcaggggaccgtgaagttaaacgatccgctaagtaaatatgctcc

SEQ ID NO: 645141 - DNA, 75 bp, synthetic construct
  source 1..75: mol_type = other DNA
gccggagaacgagaaacgacccagtaccagtcaatcccaatggccccccaacttaacccatcgcatgcgggcggt

SEQ ID NO: 645142 - DNA, 75 bp, synthetic construct
  source 1..75: mol_type = other DNA
ctgatgcattcagtcaggatccagacttctacgcattcatccgtagcctgcgagcttatgagaaaagcttctctg

SEQ ID NO: 645143 - DNA, 75 bp, synthetic construct
  source 1..75: mol_type = other DNA
aaacaaaacgattatcgctatgcaaaccataagaaatgggcgacggaaaatgcatttgttctacaataccatatg

SEQ ID NO: 645144 - DNA, 75 bp, synthetic construct
  source 1..75: mol_type = other DNA
ccgcgtcagccgcgatccgttctggtgccgtaacgtgctcagcccgtcgaagttgcgggaaaaatgggatgagct

SEQ ID NO: 645145 - DNA, 75 bp, synthetic construct
  source 1..75: mol_type = other DNA
ggcggggatttccggtctgccaaaccgtcgcttccagtttttcaactggctaagtggactgctgtgggtcagcgt

SEQ ID NO: 645146 - DNA, 75 bp, synthetic construct
  source 1..75: mol_type = other DNA
atgaagatcaggtaatgacgttcctgatgatcctgccaattgccttgttaaccgctggcttgttaggcacgctgt

SEQ ID NO: 645147 - DNA, 75 bp, synthetic construct
  source 1..75: mol_type = other DNA
cgtcagggtgtttacaacggcagagataatttatcggaaaacagttatcgcattggtgtgtcatttaaactgtag

SEQ ID NO: 645148 - DNA, 75 bp, synthetic construct
  source 1..75: mol_type = other DNA
ttgattacactcaaaatatcaacggtgattacaaagctactgttacaggaggcggagagggtatcgcaacgctga

SEQ ID NO: 645149 - DNA, 75 bp, synthetic construct
  source 1..75: mol_type = other DNA
cggttacgtactggcacggtggtaaccacagatgacaggaactgggagttacgttactcagcttctgcacttcgt

SEQ ID NO: 645150 - DNA, 75 bp, synthetic construct
  source 1..75: mol_type = other DNA
actttattgcggatacgctcactgcgcaggttaatcttaacgttaccgaggacaattttatcgctaataacgtcg

SEQ ID NO: 645151 - DNA, 75 bp, synthetic construct
  source 1..75: mol_type = other DNA
agcacgcacacagaaaaacgtgaagacccgtacttcaaagccagttacgacaacgtggactacagccagatcccg

SEQ ID NO: 645152 - DNA, 75 bp, synthetic construct
  source 1..75: mol_type = other DNA
ctgaaaaagctggggcttttgcgttgtgaaaagctcaataaatcaaagcgcgatatgaccaatttctacacgatc

SEQ ID NO: 645153 - DNA, 75 bp, synthetic construct
  source 1..75: mol_type = other DNA
ggaatgtgatggtgttcgctggatttacaacacaacggaacaatggctggaacagttcccattctggtcagagtc

SEQ ID NO: 645154 - DNA, 75 bp, synthetic construct
  source 1..75: mol_type = other DNA
ccacgctgtttttagaaaacggtctgctgcccgcttcatttttgccaggcgacagcttgttgatactggctggcg

SEQ ID NO: 645155 - DNA, 75 bp, synthetic construct
  source 1..75: mol_type = other DNA
cagtctgcattcactgaagagtgggacgaatgggaaacgttgcttgatgccaacaagcgggcggcacacagtgaa

SEQ ID NO: 645156 - DNA, 75 bp, synthetic construct
  source 1..75: mol_type = other DNA
ttgatgcggcgaattaccgcagtgaacacttgtggatcactgcccgggatggcgtcgaagttccggtttcgctgg

SEQ ID NO: 645157 - DNA, 75 bp, synthetic construct
  source 1..75: mol_type = other DNA
gctgctgccttatcaggtctggcgtcacgccatcggtacgccagcatcgcaagataaactgatctacgaagaaaa

SEQ ID NO: 645158 - DNA, 75 bp, synthetic construct
  source 1..75: mol_type = other DNA
atggctaccgctatcggcatatttatgaaccaggctgtgaaatatgctatctaccagcgtcaatcggcattcagt

SEQ ID NO: 645159 - DNA, 75 bp, synthetic construct
  source 1..75: mol_type = other DNA
caacaagcgcgcggcgcacagtgagttttattcgatgggcggaatggcgattacgcccgataacaccattatggc

SEQ ID NO: 645160 - DNA, 75 bp, synthetic construct
  source 1..75: mol_type = other DNA
ttaaatcttacgaaggtgtggcaatggaatatgcttttctggtcgcgctggcgcagggaacattacctggtcagc

SEQ ID NO: 645161 - DNA, 75 bp, synthetic construct
  source 1..75: mol_type = other DNA
caggcttatccgcatttactggtaacgaccggtttacacgattctcaggtgcaatattgggaaccggcaaaatgg

SEQ ID NO: 645162 - DNA, 75 bp, synthetic construct
  source 1..75: mol_type = other DNA
cgccgcttccagtttttcaactggttaagtggattgctatgggtcagcgtggtgaccagttttggttatgcctta

SEQ ID NO: 645163 - DNA, 75 bp, synthetic construct
  source 1..75: mol_type = other DNA
actgccgcagccagcctgggctgctggctaagctatattcaggggcgttggctaggtaataccaaaacggtgaaa

SEQ ID NO: 645164 - DNA, 75 bp, synthetic construct
  source 1..75: mol_type = other DNA
tgttatgcgatgggcgggagtgcggggggcatgttgatgggcgttgcgattaatcaacgcccggaattgttccac

SEQ ID NO: 645165 - DNA, 75 bp, synthetic construct
  source 1..75: mol_type = other DNA
ttgatgcggcgaattaccgcagtgaacacctgtggatagtcgcccgtgatggcgtcgaagttccggtttcgctgg

SEQ ID NO: 645166 - DNA, 75 bp, synthetic construct
  source 1..75: mol_type = other DNA
ggactttctattatgtgcgtaagcatccggtgacgctgctgccttatcaggtttggcgccacgccatcgggactc

SEQ ID NO: 645167 - DNA, 75 bp, synthetic construct
  source 1..75: mol_type = other DNA
cgccggcgaggctttcatgatatacagccttgctgaaaatttttgcagcagcaatggctacacgctccccagagc

SEQ ID NO: 645168 - DNA, 75 bp, synthetic construct
  source 1..75: mol_type = other DNA
tcttatttcattcgaaactttaagagctattttggtattacaccgaaacagttttctctcaaggtaaaaagaaat

SEQ ID NO: 645169 - DNA, 75 bp, synthetic construct
  source 1..75: mol_type = other DNA
aacagatattacctttaccgagaagctcaaaaaaatcatcgaagcagatttatcaagaggatggaaactgagcga

SEQ ID NO: 645170 - DNA, 75 bp, synthetic construct
  source 1..75: mol_type = other DNA
caccgtaggcgctgatatgttgctcaatcaaaaatattgccgcctatgccgcgctatctcaggcagaaaatacca

SEQ ID NO: 645171 - DNA, 75 bp, synthetic construct
  source 1..75: mol_type = other DNA
atgaatatgatgatctcatatcaggaacttgttcgcaccttccttaatattcggcgtattaaaaatggtttctcg

SEQ ID NO: 645172 - DNA, 75 bp, synthetic construct
  source 1..75: mol_type = other DNA
tttttacgctgtttgtggatggtgaaaacgaagtgggtaaggtgacgtccgtcactctgcctaaactgacgcgca

SEQ ID NO: 645173 - DNA, 75 bp, synthetic construct
  source 1..75: mol_type = other DNA
caccagagcatccaggccggtcttgccgatgtggatgcgggtcgcgtggtgagccactcagacatggtggatttt

SEQ ID NO: 645174 - DNA, 75 bp, synthetic construct
  source 1..75: mol_type = other DNA
caggtgaaattgaagcactgctcagtgcaacgctcaaaatgccacacccggaacgtaaccactgtctgattctga

SEQ ID NO: 645175 - DNA, 75 bp, synthetic construct
  source 1..75: mol_type = other DNA
aaccgtgacagcgatgaagactggtacctgcgcagtgaaatgcttatcgtgctgaagtccccctgtatgcctcca

SEQ ID NO: 645176 - DNA, 75 bp, synthetic construct
  source 1..75: mol_type = other DNA
gttcatgaagcggatattcatactgcacaaaaattagcagaaacgttaaatgtgcctttagcatatttctacgtg

SEQ ID NO: 645177 - DNA, 75 bp, synthetic construct
  source 1..75: mol_type = other DNA
aatcaaaatattgccgcctatgccgcgctaactcaggcagaaaataccactaataatagcgactatctgtatacg

SEQ ID NO: 645178 - DNA, 75 bp, synthetic construct
  source 1..75: mol_type = other DNA
gtggccagtttgcttcgaagccgtattgagatcgccgttgcggctcgtctcaagggagaatttgaagcggcatca

SEQ ID NO: 645179 - DNA, 75 bp, synthetic construct
  source 1..75: mol_type = other DNA
tctgatattgatttgcaggcaggtaacctgaatatccgccgcctcaaaaacggtttatcaactcaacatcctctg

SEQ ID NO: 645180 - DNA, 75 bp, synthetic construct
  source 1..75: mol_type = other DNA
tgtcagatacacagccagtaatgctgctcgttttaaaggggtgtggaaaaaaagcctcgttaaaacagtaccttc

SEQ ID NO: 645181 - DNA, 75 bp, synthetic construct
  source 1..75: mol_type = other DNA
ttttcttaaacgttggtttgggagaaggctctgcattacctgttggcgtccctgttccgtggccttcagccacac

SEQ ID NO: 645182 - DNA, 75 bp, synthetic construct
  source 1..75: mol_type = other DNA
cgcttttggctctggaaatttgacaatgaatggtgttacttcttatttcggtgtccgtccacgcaacatcgcatt

SEQ ID NO: 645183 - DNA, 75 bp, synthetic construct
  source 1..75: mol_type = other DNA
tctgcattacctgttggtgtccctgttccgtggccttcagccactccgccaacaggctggctgaaatgcaatggt

SEQ ID NO: 645184 - DNA, 75 bp, synthetic construct
  source 1..75: mol_type = other DNA
tgttgatttctgctctgatgagataattttcaatcattcagtttttgatttaaatgatgaaaacaaagaggttat

SEQ ID NO: 645185 - DNA, 75 bp, synthetic construct
  source 1..75: mol_type = other DNA
atctgaataaagatattattgaaccatgcaagtcagttcctgttaaggctgcagtatgtttcctttttaaaaata

SEQ ID NO: 645186 - DNA, 75 bp, synthetic construct
  source 1..75: mol_type = other DNA
gcgaggtgttgattccgcgagactgctactttcaagtcaggcggcatctatccttgaacataaccatgaaatgca

SEQ ID NO: 645187 - DNA, 75 bp, synthetic construct
  source 1..75: mol_type = other DNA
accagatcagatagatgaagagatgctaaaccagcatgtctgtatgcatgaactggcccctgtagatttagtaat

SEQ ID NO: 645188 - DNA, 75 bp, synthetic construct
  source 1..75: mol_type = other DNA
gcgaaaaattgccagttcatggctgtcgccatgtcgcgatcattatggatggcaacgggcgctgggcaaaaaagc

SEQ ID NO: 645189 - DNA, 75 bp, synthetic construct
  source 1..75: mol_type = other DNA
gtggttttacacggctttttttgtataggcttcagtattcctgagtaccgtaaaccctgtcagggaataaaaaac

SEQ ID NO: 645190 - DNA, 75 bp, synthetic construct
  source 1..75: mol_type = other DNA
gcattcaacatcgcagcaatgacattaccgctctgcgcccctatttgagtgacaaactggcaaccctacttagcg

SEQ ID NO: 645191 - DNA, 75 bp, synthetic construct
  source 1..75: mol_type = other DNA
caacattgcatccagctacaaatcaaccatattatgtaagacatatggtcgtttcattatttcatgctacaggag

SEQ ID NO: 645192 - DNA, 75 bp, synthetic construct
  source 1..75: mol_type = other DNA
taggactgggggggagcatcgcattagtaactttttgctttggcaaattgcctatgccgaactttactttataga

SEQ ID NO: 645193 - DNA, 75 bp, synthetic construct
  source 1..75: mol_type = other DNA
acgcatttcaacctgatgttaatgcgctgcataccctcctgaatcgtactcgtgaagaaatagacgcggcagaaa

SEQ ID NO: 645194 - DNA, 75 bp, synthetic construct
  source 1..75: mol_type = other DNA
cgctgatgattacctggtggtggcaggcaaaacggctaaacctgccttgccagccgaaagcctcgctgcgggaag

SEQ ID NO: 645195 - DNA, 75 bp, synthetic construct
  source 1..75: mol_type = other DNA
gtctcggatctcttacagcctttagtggattcaccgcgtttattattcatcgtaattatgctcgccattatgatg

SEQ ID NO: 645196 - DNA, 75 bp, synthetic construct
  source 1..75: mol_type = other DNA
tagattcgctgatgagattaaaaatagtctgtctatgtataagttagaaaatgcctatttagcactcaactctaa

SEQ ID NO: 645197 - DNA, 75 bp, synthetic construct
  source 1..75: mol_type = other DNA
ttttattcatatcttttggggctacagcagaatgctgggttgttggagatatgcgcggaataagctattcagaac

SEQ ID NO: 645198 - DNA, 75 bp, synthetic construct
  source 1..75: mol_type = other DNA
tgatggtaggcttttgtggtacggatggcacgccgctgtattcagcaaatgaagtggatgttgatgtctcctggc

SEQ ID NO: 645199 - DNA, 75 bp, synthetic construct
  source 1..75: mol_type = other DNA
ggaagcccgccaacaatccccaactggctgcgtgatgatattcgccgcccgtattcgtcaggaggtatgccgtgc

SEQ ID NO: 645200 - DNA, 75 bp, synthetic construct
  source 1..75: mol_type = other DNA
cgattcaacaactggggcgtgattacatggccgccgggttatacgaccgcgcggaagacatgttcaatcagctga

SEQ ID NO: 645201 - DNA, 75 bp, synthetic construct
  source 1..75: mol_type = other DNA
atcagcagttgggtaaaacagctgaatgggccgagtttctccagcgtgcggtggaagaaaataccggtgccgatg

SEQ ID NO: 645202 - DNA, 75 bp, synthetic construct
  source 1..75: mol_type = other DNA
acaactcatcgccccttttcggtaggccagtcgcttacaattaccgaaacggttggcgataccttatatttcaac

SEQ ID NO: 645203 - DNA, 75 bp, synthetic construct
  source 1..75: mol_type = other DNA
atcaaggaagggcgtctagcgcttgatgagatatcaattggtgatgaagtcatattgcggaatgaagataccaat

SEQ ID NO: 645204 - DNA, 75 bp, synthetic construct
  source 1..75: mol_type = other DNA
atgtataccaatgacaccataaagacaacgccccgcagtgctggaacacatgcagagcgtctgaccaccaacgat

SEQ ID NO: 645205 - DNA, 75 bp, synthetic construct
  source 1..75: mol_type = other DNA
acaatccctgcaaacagcatttacagcaaaaattcaacgaattaccgctacacatgagaaataatattaatctaa

SEQ ID NO: 645206 - DNA, 75 bp, synthetic construct
  source 1..75: mol_type = other DNA
tgtaatccacattccctttttaagccaaagaaacgcgtttcttcttccgccatgccgggttcccatttacgggtt

SEQ ID NO: 645207 - DNA, 75 bp, synthetic construct
  source 1..75: mol_type = other DNA
ctgctcgcctgtcgatgagtctcaataacacaccgctgcagggcgcgcatatcaacgtcgtcagtggtaatttta

SEQ ID NO: 645208 - DNA, 75 bp, synthetic construct
  source 1..75: mol_type = other DNA
ctgaagcctgaacgtgcagaaacctggcaggcgggttttaacattgataccagagatttactggtcgaacaggat

SEQ ID NO: 645209 - DNA, 75 bp, synthetic construct
  source 1..75: mol_type = other DNA
tcatattcctgttggctcggttgcctgcatcatgctggaacctggtacacgggtttcgcatgcagctgtacgcct

SEQ ID NO: 645210 - DNA, 75 bp, synthetic construct
  source 1..75: mol_type = other DNA
ggccaaatacattatttactactggagcctgaagaaggaaaaattttcactaaaggagacaaagtgttaattatt

SEQ ID NO: 645211 - DNA, 75 bp, synthetic construct
  source 1..75: mol_type = other DNA
gaaaactcaccgatcaatttggccaaatacattatttactactggagcctgaagaaggaaaattttcactaaagg

SEQ ID NO: 645212 - DNA, 75 bp, synthetic construct
  source 1..75: mol_type = other DNA
ttgccatcactcgcgaagagaaaaaggtcaaatcagccgcatcagttacgcgcagccgtaaaactaagaaggggc

SEQ ID NO: 645213 - DNA, 75 bp, synthetic construct
  source 1..75: mol_type = other DNA
taccggcaagataattgccccctgggttccacgtgaccatagctctgctattaccgaagaagaatatattggctg

SEQ ID NO: 645214 - DNA, 75 bp, synthetic construct
  source 1..75: mol_type = other DNA
caccttatcttttcgctatttcctttgtactattaatcggtctgttggaaattattgccattatctgtggccata

SEQ ID NO: 645215 - DNA, 75 bp, synthetic construct
  source 1..75: mol_type = other DNA
gaagctgtgaacagcgtcaacatgaccgctggccgcattattcatctgattgataaggacattcgcatccaaaaa

SEQ ID NO: 645216 - DNA, 75 bp, synthetic construct
  source 1..75: mol_type = other DNA
atggggcgggctgacgctaactttaattattgcatcagttgggattgcgggggcgctaccgtgggggatcttact

SEQ ID NO: 645217 - DNA, 75 bp, synthetic construct
  source 1..75: mol_type = other DNA
cgcctggttgggtatgtcgacggaagggtatgttttcgccgcactgatctactggatcttctgtttcagcatgtc

SEQ ID NO: 645218 - DNA, 75 bp, synthetic construct
  source 1..75: mol_type = other DNA
atgggcagagttcctgcaacgcgcggtggaagagaataccggtgccgatgctgaattgatgcttgcagacattat

SEQ ID NO: 645219 - DNA, 75 bp, synthetic construct
  source 1..75: mol_type = other DNA
caggcgctcccgctcacgtatgtctgttgccgggagcaggcagaggacggtgcctgctggcatctgctgacgtca

SEQ ID NO: 645220 - DNA, 75 bp, synthetic construct
  source 1..75: mol_type = other DNA
gtgaaatcatcccagtccactgctcaggttgaaggtgcgtaccgcctgatacataacccgtctgtgtccccgcaa

SEQ ID NO: 645221 - DNA, 75 bp, synthetic construct
  source 1..75: mol_type = other DNA
tacagccttctgttatccgcaccttcagctcccgggaggacatgagcatggggacagccacagccggcagtaaca

SEQ ID NO: 645222 - DNA, 75 bp, synthetic construct
  source 1..75: mol_type = other DNA
cggcaaagatgaagttcacgttattggcctggacacgccgctggagcgtttgctgttacaggcattgcagggcgg

SEQ ID NO: 645223 - DNA, 75 bp, synthetic construct
  source 1..75: mol_type = other DNA
gtgggcgcgcgctttgttctcgatggtatgccgggtaagcagatggcgattgatgccgaccttaacgccggattg

SEQ ID NO: 645224 - DNA, 75 bp, synthetic construct
  source 1..75: mol_type = other DNA
gcggatcgtttactggcgcaaactcaggaagcgctatcccgtcaggagatgctgggtgcgccgccagtattgttg

SEQ ID NO: 645225 - DNA, 75 bp, synthetic construct
  source 1..75: mol_type = other DNA
gtatgctgtggtattcgtgatgtgcttcctgttaggttttgtcagccgtcaccgtcagcatagttctttaacctc

SEQ ID NO: 645226 - DNA, 75 bp, synthetic construct
  source 1..75: mol_type = other DNA
tgaaaggtgtcggcaaagactttcgaaacgccgactatatcgactatctgccagtgaatatgttggcaattttga

SEQ ID NO: 645227 - DNA, 75 bp, synthetic construct
  source 1..75: mol_type = other DNA
ggcattcgttttcgtaatctggaaacaggtaactggtacccggaactgctggataacgttgaacccagctttgtc

SEQ ID NO: 645228 - DNA, 75 bp, synthetic construct
  source 1..75: mol_type = other DNA
gggtttatgcctgcatcgggctggtgtatgtcgctatttttattctgaccttcggctgtgagttcccggcgctgg

SEQ ID NO: 645229 - DNA, 75 bp, synthetic construct
  source 1..75: mol_type = other DNA
gggttcacagcaaaccaaagtaccgtcaccaaaactggttaactttgtcctgacgtgcgggaccatcggcaccat

SEQ ID NO: 645230 - DNA, 75 bp, synthetic construct
  source 1..75: mol_type = other DNA
tcacctgcggaaccatcggcaccatgctgacctttgtggttactggcccgattgtagagcatagcggtccacagg

SEQ ID NO: 645231 - DNA, 75 bp, synthetic construct
  source 1..75: mol_type = other DNA
tggcaaagatgaagtccatgttattggcctcgatacaccgctggaacgtttgttgctacaggcgttgcagggcgg

SEQ ID NO: 645232 - DNA, 75 bp, synthetic construct
  source 1..75: mol_type = other DNA
ggaagcccgccagcaatccccaactggctgcgtgatggtattcgctgcccgtattcgtcaggaggtgcgccgtgc

SEQ ID NO: 645233 - DNA, 75 bp, synthetic construct
  source 1..75: mol_type = other DNA
attcagtatcggaggcggtcaggcggatgccctgatgctggaaaaaggcagttcattcacgctgaacgccggtga

SEQ ID NO: 645234 - DNA, 75 bp, synthetic construct
  source 1..75: mol_type = other DNA
caacaaccggcgcttgccgaaatgcgcgatcgtgcgacgcgtgaaaaactgtttattgcgggctggacgcgagcg

SEQ ID NO: 645235 - DNA, 75 bp, synthetic construct
  source 1..75: mol_type = other DNA
ctgatgaaactgacttccgtgttggcgcattgcaacagcttttgcaaatctatcaatccaccagcgaatggcaga

SEQ ID NO: 645236 - DNA, 75 bp, synthetic construct
  source 1..75: mol_type = other DNA
tcaaaccttaatggaaagtgcttcgctgacctatgaacagcgcctgttggcaattcagcaactggggcgtgatta

SEQ ID NO: 645237 - DNA, 75 bp, synthetic construct
  source 1..75: mol_type = other DNA
agtaagccgcgttatcgttgccagaagtgtggttttaccgcatatacgctctactggcattgtccgtcatgtcgg

SEQ ID NO: 645238 - DNA, 75 bp, synthetic construct
  source 1..75: mol_type = other DNA
gatttccagcaggatggtgagttgttgggccgtatacgcagtatccgcaagaaatttgcccaggagatgggcttc

SEQ ID NO: 645239 - DNA, 75 bp, synthetic construct
  source 1..75: mol_type = other DNA
ggtatcgtggtgttcgtcattctcgtgatcatcaactttatggtcattaccaaaggtgccgggcgtatcgcagaa

SEQ ID NO: 645240 - DNA, 75 bp, synthetic construct
  source 1..75: mol_type = other DNA
cacgcttgagtttgctgcgtttccgaccattctgttgtttaccacgctgttgcgtctggcacttaacgtggcttc

SEQ ID NO: 645241 - DNA, 75 bp, synthetic construct
  source 1..75: mol_type = other DNA
gctgacacaggcaatggactatgaccggattgtggcaggctcccgcagccatcagaccggtgtaaatggtgaaaa

SEQ ID NO: 645242 - DNA, 75 bp, synthetic construct
  source 1..75: mol_type = other DNA
tgcgtctggctcttaacgtggcttcaactcgtatcattttgatggaagggcataccggtgcggcggcggcaggga

SEQ ID NO: 645243 - DNA, 75 bp, synthetic construct
  source 1..75: mol_type = other DNA
ctgccgccggtggtgcacattcgcgacaatatggatctgcaaccggcacgttatcgtattttgatgaaaggcgta

SEQ ID NO: 645244 - DNA, 75 bp, synthetic construct
  source 1..75: mol_type = other DNA
gtctgcgttcacttatttcacgtaatccgttcgcacctcgtgaaattgaaccggtcattggcgaagcagtggacg

SEQ ID NO: 645245 - DNA, 75 bp, synthetic construct
  source 1..75: mol_type = other DNA
gaaagaggctgcagatggattatggagtcttcctggcggatgggcagatgttggagatacaccttctgaagctgt

SEQ ID NO: 645246 - DNA, 75 bp, synthetic construct
  source 1..75: mol_type = other DNA
aacttcagtcccgcctgctacagggcaattttgatcggggaagatcgctcgatgaacggttcgccgatccgctga

SEQ ID NO: 645247 - DNA, 75 bp, synthetic construct
  source 1..75: mol_type = other DNA
ccggtaattggcgaagcggtcaacgtgatcgttcagatatctaaaacttctgagggtcgccggattaaagaaatt

SEQ ID NO: 645248 - DNA, 75 bp, synthetic construct
  source 1..75: mol_type = other DNA
atcagcaagttataagactgttacgttcggcgagacaggatagaggtctgacgcaagcacaacttgcaaaagcat

SEQ ID NO: 645249 - DNA, 75 bp, synthetic construct
  source 1..75: mol_type = other DNA
gaacgtatttgcatcattgaagatacgggtgaactgcagtgttcagcagaaaactatgttcagtaccacaccact

SEQ ID NO: 645250 - DNA, 75 bp, synthetic construct
  source 1..75: mol_type = other DNA
agtgcagcggcagccgccgcaagcgcatcggtgacccaggctggcggtgttgaacaggaacttcatgaaaaacct

SEQ ID NO: 645251 - DNA, 75 bp, synthetic construct
  source 1..75: mol_type = other DNA
aattgccgaaggctttattccacgccagctcaatcaggctattgatgacaagctggctgcggtgcttgctgcgcg

SEQ ID NO: 645252 - DNA, 75 bp, synthetic construct
  source 1..75: mol_type = other DNA
tggcaaacctttgttaacggtgccgtatactggtggtgtacaacgcttggaccgatgagagatatcatccggtct

SEQ ID NO: 645253 - DNA, 75 bp, synthetic construct
  source 1..75: mol_type = other DNA
atctctggcagcgtcacgctgacggagaggccagcgcctttgataatctcttttcttccgcgttgtcgctgttca

SEQ ID NO: 645254 - DNA, 75 bp, synthetic construct
  source 1..75: mol_type = other DNA
gctatgacgacattaaggaatcgatccgccgtcgcgggctggacacgccgccgccaatcacccgccgtcccgatc

SEQ ID NO: 645255 - DNA, 75 bp, synthetic construct
  source 1..75: mol_type = other DNA
gtttacgtattgcattgttttcaaaagaaaacacagactaccagtcaatcggatattgatttagccaaacgacgc

SEQ ID NO: 645256 - DNA, 75 bp, synthetic construct
  source 1..75: mol_type = other DNA
tgagggtcgccggattaaagaaattcgcgagattcagggttatgaaaacggggaatatatttcccaactcattgc

SEQ ID NO: 645257 - DNA, 75 bp, synthetic construct
  source 1..75: mol_type = other DNA
gggtacagccgcagccggcagtaacatgacgttctcaccctcacagaatggcacatcactggacctgcaggccgg

SEQ ID NO: 645258 - DNA, 75 bp, synthetic construct
  source 1..75: mol_type = other DNA
cctgaatgaccttggtctgccggaattcacaaaatgtacgaaattgtggcagagacaggcaagtgaaactgaaaa

SEQ ID NO: 645259 - DNA, 75 bp, synthetic construct
  source 1..75: mol_type = other DNA
tgttgttgtcaagcaaacgcgagagattaaagtgtctgattgtgttattccatcgtggtatgtaaaaccgtctca

SEQ ID NO: 645260 - DNA, 75 bp, synthetic construct
  source 1..75: mol_type = other DNA
ccgggcaggatatcacctggtcaacgtctgatggcacgactgaagagggcgaactgctggcggaaaatacagccg

SEQ ID NO: 645261 - DNA, 75 bp, synthetic construct
  source 1..75: mol_type = other DNA
agaggttttgtgagctcaaaaaaagaagagagcaaaatcctgttcacagattaaatgaagcattgccaagaaagg

SEQ ID NO: 645262 - DNA, 75 bp, synthetic construct
  source 1..75: mol_type = other DNA
tgtccgatcgtgctatttcatggcgatgctgacaatctggtaatgcaggatgaattacttgcatgggaaaaattc

SEQ ID NO: 645263 - DNA, 75 bp, synthetic construct
  source 1..75: mol_type = other DNA
tgcccgggctatctggatggcggttcagcagccgggtaaagaaatcgccggaacagcagtcggtactggttctgc

SEQ ID NO: 645264 - DNA, 75 bp, synthetic construct
  source 1..75: mol_type = other DNA
ttgtgaacgccaggaatttgatctgcgagccttcgccggctgtgccggctacgacgtggtgggaatatttaagga

SEQ ID NO: 645265 - DNA, 75 bp, synthetic construct
  source 1..75: mol_type = other DNA
tgaaatagttcgtcagtttccagacgagcgcatctgcattatcgaagatacgggcgaactgcagtgcgccgcgct

SEQ ID NO: 645266 - DNA, 75 bp, synthetic construct
  source 1..75: mol_type = other DNA
tactctttgttaaataagttacattctgaatttcttgagcttgatgaaaagttatcggtgaatgctatggacttt

SEQ ID NO: 645267 - DNA, 75 bp, synthetic construct
  source 1..75: mol_type = other DNA
atctgaccaaagagcgatctttgcatgatgtttacaaattaactaaaaaaataaaggtcaattcatttgactttt

SEQ ID NO: 645268 - DNA, 75 bp, synthetic construct
  source 1..75: mol_type = other DNA
ttcggcgaattgagccgcatgacacagttcaaagataaatctgcgcgttatgccgaaaacatcaacgccgggctg

SEQ ID NO: 645269 - DNA, 75 bp, synthetic construct
  source 1..75: mol_type = other DNA
tatgagaagctggttgatactatgctctccatcaagatcgacaagctgcgcgcctatctgcagaatacgccagcg

SEQ ID NO: 645270 - DNA, 75 bp, synthetic construct
  source 1..75: mol_type = other DNA
actctggctggtaagctctctacgccgatggaagacacgatgtgggacatcatgagaatggcgatcatcctgtcc

SEQ ID NO: 645271 - DNA, 75 bp, synthetic construct
  source 1..75: mol_type = other DNA
agtaataaagggttaggagatccacaatcgcgcatagtatttaacgctgctgatgcacgtaaacacgctatagaa

SEQ ID NO: 645272 - DNA, 75 bp, synthetic construct
  source 1..75: mol_type = other DNA
gcagacagttcaacaattgttgaacttggtgctcaagtctgccttgcaggtattttcgctgcaatactggtgtat

SEQ ID NO: 645273 - DNA, 75 bp, synthetic construct
  source 1..75: mol_type = other DNA
aatggcagaggccaccgcacaagcggataaagtaaatatcgtagaattaggagcacaagtctgtcttgcgggtat

SEQ ID NO: 645274 - DNA, 75 bp, synthetic construct
  source 1..75: mol_type = other DNA
ttgaggttattggcggttttctctcaggctctctggcgttgctggccgacgcgggtcatatgttgaccgatactg

SEQ ID NO: 645275 - DNA, 75 bp, synthetic construct
  source 1..75: mol_type = other DNA
gaatatcaaccttgtcatgggccagactgccacctgaatgaaggggtgtctggccattcacatcatcatcattaa

SEQ ID NO: 645276 - DNA, 75 bp, synthetic construct
  source 1..75: mol_type = other DNA
ttgaaaaacacctgataggaggaataacagacgccacaaagggattaatgatgtcgtactcatctatgatgatgg

SEQ ID NO: 645277 - DNA, 75 bp, synthetic construct
  source 1..75: mol_type = other DNA
gtgcgcggcgctggcagcggagaatgcgggaataaagtctgcaattccagaatcacgggatattgaagatgacaa

SEQ ID NO: 645278 - DNA, 75 bp, synthetic construct
  source 1..75: mol_type = other DNA
aagtctgcaattccccaaccacgggatattgaggatgacaatgacaatatggatgacgtatctcttgctgaagat

SEQ ID NO: 645279 - DNA, 75 bp, synthetic construct
  source 1..75: mol_type = other DNA
gccccatgtttaataactggctacaaaatatatttgcagccatattaactattctcctttcctctttatcattaa

SEQ ID NO: 645280 - DNA, 75 bp, synthetic construct
  source 1..75: mol_type = other DNA
atggcttgggatattcgtcttaatgattattaccgcgtttgtttccatgatagcggaagtcatgatcttattgtt

SEQ ID NO: 645281 - DNA, 75 bp, synthetic construct
  source 1..75: mol_type = other DNA
ggctggcagcagcgtcagccaccatctacatcatgtggcggggataccagactctggctggtaagctctctacac

SEQ ID NO: 645282 - DNA, 75 bp, synthetic construct
  source 1..75: mol_type = other DNA
ttgttatcaattttttaacgtcgagaatggcagaagccaccgcacaagcgggtaaagcaaatatcgtagaattag

SEQ ID NO: 645283 - DNA, 75 bp, synthetic construct
  source 1..75: mol_type = other DNA
tggcaaacctttgtgaacggctgcgtatactggtggtgtacgacgctggggccgatgcgcgatattattcgttcc

SEQ ID NO: 645284 - DNA, 75 bp, synthetic construct
  source 1..75: mol_type = other DNA
gagctccccacgctgcacaagctgcctgacctggtcgaaatcctccctgaggcgcgtaaatttggtggttgttat

SEQ ID NO: 645285 - DNA, 75 bp, synthetic construct
  source 1..75: mol_type = other DNA
atgggttcattatcgcttatccccgcatattccattctgggctgctcaggtgattgagcaggcctggttaagcca

SEQ ID NO: 645286 - DNA, 75 bp, synthetic construct
  source 1..75: mol_type = other DNA
ggctggcagatgagcagacacagcgggatatgcagcggcgtgaggaagtcaatatcaaccacagccaccgtcacg

SEQ ID NO: 645287 - DNA, 75 bp, synthetic construct
  source 1..75: mol_type = other DNA
actctcgatgcgcgggtggatgcacggctcagtgcgctgcttgaggcccgggaagctgaaggcagccttgcccgg

SEQ ID NO: 645288 - DNA, 75 bp, synthetic construct
  source 1..75: mol_type = other DNA
gagctccccacgctgcacaagctgccggacctggtcgaaatcctcccggaggcgcgtaaatttggtggttgttat

SEQ ID NO: 645289 - DNA, 75 bp, synthetic construct
  source 1..75: mol_type = other DNA
accctgatgctccgccagtgcgcgtgggtacctctcttgcggatctatgtggcggtgtctatttattcagtggaa

SEQ ID NO: 645290 - DNA, 75 bp, synthetic construct
  source 1..75: mol_type = other DNA
agaggggaaaataaggcgtacgcctcttcgtcgtggtgcccgtactttatgggagatagtaagggaaacggaaaa

SEQ ID NO: 645291 - DNA, 75 bp, synthetic construct
  source 1..75: mol_type = other DNA
cagtgtctggagaaggaagggaaaattaaacgctcaccggtacgacggggagccagtacgctgtgggaaatcagc

SEQ ID NO: 645292 - DNA, 75 bp, synthetic construct
  source 1..75: mol_type = other DNA
acaggacgacgtacaggccatcgcccgtaagctggcatcggcaaactgctctggtagcggtaaggctgtttgcat

SEQ ID NO: 645293 - DNA, 75 bp, synthetic construct
  source 1..75: mol_type = other DNA
gtcacagcccaagatctcccgccacctggcaatgctccgggaaagtggtctattactggatcgcaaacagggcaa

SEQ ID NO: 645294 - DNA, 75 bp, synthetic construct
  source 1..75: mol_type = other DNA
aagtttacacggtaatgctcgattcgctaataaaagagagttgaaaaaaatttggtatacggagcctgaaaaatg

SEQ ID NO: 645295 - DNA, 75 bp, synthetic construct
  source 1..75: mol_type = other DNA
gcagcaatcactatcagttatcaattctttgagaaaacaaaaacagaaccaatgcctttagaagaagatcttttt

SEQ ID NO: 645296 - DNA, 75 bp, synthetic construct
  source 1..75: mol_type = other DNA
ggaatctcagtccaatgggtagtgggtgatgtagataaggcagaaacttcattttttaacatcaatatgaaggga

SEQ ID NO: 645297 - DNA, 75 bp, synthetic construct
  source 1..75: mol_type = other DNA
catcagtttgatgggggatactcctgttgacatcactggaacagtgaaagcaattgatgagcagatttccaagtt

SEQ ID NO: 645298 - DNA, 75 bp, synthetic construct
  source 1..75: mol_type = other DNA
gagatctttatttccagcgtgatgatgctgttttgtatcggtattgcgcttatttttggctggcgcttaatgcgc

SEQ ID NO: 645299 - DNA, 75 bp, synthetic construct
  source 1..75: mol_type = other DNA
gttactctgctggcacattcttctcacgataaagggggtaatgactccaacttattgatagtgttttatgttcag

SEQ ID NO: 645300 - DNA, 75 bp, synthetic construct
  source 1..75: mol_type = other DNA
ggcaattattaatgatgttctcgacttctcgaaactggaagcaggtaagctgattctggaaagtattccattccc

SEQ ID NO: 645301 - DNA, 75 bp, synthetic construct
  source 1..75: mol_type = other DNA
cagttgcatgtgccgatgccactgggggccgcctcacgggaggtttatagccaggcgcgcgcagcaggtcgcggt

SEQ ID NO: 645302 - DNA, 75 bp, synthetic construct
  source 1..75: mol_type = other DNA
gatccgcgttaagctcatcaacaactatatgagcatcgcgctcaatgcgctttcggcagaagccgccgttttgtg

SEQ ID NO: 645303 - DNA, 75 bp, synthetic construct
  source 1..75: mol_type = other DNA
gagcaatttattgcagcaagggcatcaacttcgcgtctttgatgtgaacgccgaagctgtgcggcatctggtaga

SEQ ID NO: 645304 - DNA, 75 bp, synthetic construct
  source 1..75: mol_type = other DNA
acttgccactgatgacaacagatcttgtggaaccgggaacaaatattggtaagcaagcacgagctatggctgagc

SEQ ID NO: 645305 - DNA, 75 bp, synthetic construct
  source 1..75: mol_type = other DNA
tttaactatgacatctgcggaggtcatcacgatgtttaatcacggatactggcgcaagattggcgatattaagtt

SEQ ID NO: 645306 - DNA, 75 bp, synthetic construct
  source 1..75: mol_type = other DNA
ctggcgcgccaactggtgacgctgctcgggagttttgcgtttgactggtcgattctgccgaaaagcccgcgcaaa

SEQ ID NO: 645307 - DNA, 75 bp, synthetic construct
  source 1..75: mol_type = other DNA
ttcggattttcgattttttgtattctgttagttgttcttattggtggtgttgctttatggttgcatcgtagtaaa

SEQ ID NO: 645308 - DNA, 75 bp, synthetic construct
  source 1..75: mol_type = other DNA
ttaacggtcatgcgttacaggctgatttgcagcaattgcttgggcaaccggtggtgatagccaatgatggtaact

SEQ ID NO: 645309 - DNA, 75 bp, synthetic construct
  source 1..75: mol_type = other DNA
aaaaccggaagatcttgcgcactatgatttgaatgtcgccacccaaaaaacattacgtttgaaaggtctgatgta

SEQ ID NO: 645310 - DNA, 75 bp, synthetic construct
  source 1..75: mol_type = other DNA
agaactggcttaatactattattcgccagacaggatttaacccgttcgaccgcgacgaaggaccgagcgtgaaag

SEQ ID NO: 645311 - DNA, 75 bp, synthetic construct
  source 1..75: mol_type = other DNA
aaatcttttgtaagcgtttgaaagaagcgcgtacggctgctggtttgtctcaaaagaagctgggcattgctgccg

SEQ ID NO: 645312 - DNA, 75 bp, synthetic construct
  source 1..75: mol_type = other DNA
tgaccctggcgtgattgtcatcggcggcgggctttcgaatgtggaactgcttatcaccgatctgaacgcagaagt

SEQ ID NO: 645313 - DNA, 75 bp, synthetic construct
  source 1..75: mol_type = other DNA
ggaagatggtccatcagtcagttgctattgcggcaaacacaactgcgtggagtcgtttgtttccggcagcggttt

SEQ ID NO: 645314 - DNA, 75 bp, synthetic construct
  source 1..75: mol_type = other DNA
tcggccacatcagccgacagggcaacgtctatgtgcgtaccctgctaatccatggctcacgggcagccttgctgg

SEQ ID NO: 645315 - DNA, 75 bp, synthetic construct
  source 1..75: mol_type = other DNA
gagtatgaaggcaagatcatgggattgtgggatgagattaaaatatttctgggttatacagtggtatcagaagca

SEQ ID NO: 645316 - DNA, 75 bp, synthetic construct
  source 1..75: mol_type = other DNA
tgatgcgctggcgggcgagagcacacggccccgagtcagccgtctcggtgaaggcacgctgattacattgcgctg

SEQ ID NO: 645317 - DNA, 75 bp, synthetic construct
  source 1..75: mol_type = other DNA
tccgtcgggccaggccaggtcgatttctcgattaatccggcggattacggtatcccgccgggcgattacgacgtc

SEQ ID NO: 645318 - DNA, 75 bp, synthetic construct
  source 1..75: mol_type = other DNA
gtgcaggccaacaccaacgcggtgctgatgagcaacattcaggtgatggcgctcggcaacctggtaggcgacgac

SEQ ID NO: 645319 - DNA, 75 bp, synthetic construct
  source 1..75: mol_type = other DNA
atgaataccctggcgctgaatgcgcaatcaccgcagccgaccgccacggcggaaagcaacaacgtggcggccagc

SEQ ID NO: 645320 - DNA, 75 bp, synthetic construct
  source 1..75: mol_type = other DNA
ggtaatcagagacaggctaaaatgttgtcagcgcgtttccggtgcattttttgggataatggttggttcgggggc

SEQ ID NO: 645321 - DNA, 75 bp, synthetic construct
  source 1..75: mol_type = other DNA
atgggggtaagtctggacatacgttcaaccgggataaagcagaaaggtgatggacccgccatgatttttggggtg

SEQ ID NO: 645322 - DNA, 75 bp, synthetic construct
  source 1..75: mol_type = other DNA
tcgaatacaaggaggacgttatccgtaaaaacgctgatggcagcgcgcacatggggataagtctggatatacggt

SEQ ID NO: 645323 - DNA, 75 bp, synthetic construct
  source 1..75: mol_type = other DNA
tcgctatctggcgcaacgttttctggacagtggcgcgcttatcgagaaaaaagtggtcgcacaaatcctcttcga

SEQ ID NO: 645324 - DNA, 75 bp, synthetic construct
  source 1..75: mol_type = other DNA
gctcatactgacagtcaggtcacagcagtacgtgatgaactcagcagggatattattgcaggcacatcggcagcg

SEQ ID NO: 645325 - DNA, 75 bp, synthetic construct
  source 1..75: mol_type = other DNA
aagaggacgacctgattgagtcctaccgccaggcgctgcagatcaaaatggtcaacagcacgcaggaggtgcgta

SEQ ID NO: 645326 - DNA, 75 bp, synthetic construct
  source 1..75: mol_type = other DNA
ttgctgaacttgtagcaatgaaagccagagcgctcatgaaagatatgaacatgagttccggggttattaaaggta

SEQ ID NO: 645327 - DNA, 75 bp, synthetic construct
  source 1..75: mol_type = other DNA
atggggacattgttcgacaggtgctgttgggggaaaaaaggcgtctgtgaaactgtttcatctgacgcgttagtg

SEQ ID NO: 645328 - DNA, 75 bp, synthetic construct
  source 1..75: mol_type = other DNA
gatccgcgtgaagctaattaacaactatatgagcattgcgcttaatgcgctgtcctccgaggccgctgtgttatg

SEQ ID NO: 645329 - DNA, 75 bp, synthetic construct
  source 1..75: mol_type = other DNA
tatggggattgcagcagaaagttattacgccgcagcaagtcaagacggcaaagggcggcaggactggagcgccct

SEQ ID NO: 645330 - DNA, 75 bp, synthetic construct
  source 1..75: mol_type = other DNA
gaaaaggattttgttatatacagcagaaaatatcgctactattttgatgaacatgaatggtcatgggcggaaggc

SEQ ID NO: 645331 - DNA, 75 bp, synthetic construct
  source 1..75: mol_type = other DNA
gaaatctggataaaagcatatctacaactgatacataatgcattgggaataactgaaacagaaaaactcgtcaat

SEQ ID NO: 645332 - DNA, 75 bp, synthetic construct
  source 1..75: mol_type = other DNA
tgttttttgttgagattatctcgtgctgttttcttgttgagttttttcatgatattgattcattttttataaatc

SEQ ID NO: 645333 - DNA, 75 bp, synthetic construct
  source 1..75: mol_type = other DNA
cagcccagagcgcggcactggccggtcttttccagccatacagtgttggaaaatttaacgcgacagcagccgttg

SEQ ID NO: 645334 - DNA, 75 bp, synthetic construct
  source 1..75: mol_type = other DNA
cataaatcgtctggggtactgaatgcagaccgaaggtcccgggaagctgaagtaaatatgtatcagcacgatgag

SEQ ID NO: 645335 - DNA, 75 bp, synthetic construct
  source 1..75: mol_type = other DNA
tcttcttctcgtttaaaccaccctgcatttatcagaggaaaccggcttcctcaaactgaccaggccatcattatt

SEQ ID NO: 645336 - DNA, 75 bp, synthetic construct
  source 1..75: mol_type = other DNA
tcttcttctcgtttaaaccaccctgcatttaccagaggaaaccggcaacctcaaactgaccaggccatcattatc

SEQ ID NO: 645337 - DNA, 75 bp, synthetic construct
  source 1..75: mol_type = other DNA
ccacccacgcataaagagcttattgaaattactgaatcagaaagacagctactaattaaccaggctaacgaatac

SEQ ID NO: 645338 - DNA, 75 bp, synthetic construct
  source 1..75: mol_type = other DNA
gaatcagagaggcaattattgattaaccatgccaacgaatacatgaacagtaaacaatggcctggtaaagcggct

SEQ ID NO: 645339 - DNA, 75 bp, synthetic construct
  source 1..75: mol_type = other DNA
ggtggaagcctggcattggcgtggtttgttgctctacttgttttcgatgccatgctgatcacatatgttgtacgc

SEQ ID NO: 645340 - DNA, 75 bp, synthetic construct
  source 1..75: mol_type = other DNA
atggtgttatgcctgccttctctatagaaccgtatgcatccgagcttttaggttataagcctgggcgaatgttga

SEQ ID NO: 645341 - DNA, 75 bp, synthetic construct
  source 1..75: mol_type = other DNA
atgagtagttggcttgcgatgctgcaagatgccgcagagatgtttgtgtttctcgccgtcgagctttcgttgctg

SEQ ID NO: 645342 - DNA, 75 bp, synthetic construct
  source 1..75: mol_type = other DNA
taccgtttcacagagaatgtggcaggaaaagttgcagttgctgcaggtgggtcatccgcatcgtggaatgctggt

SEQ ID NO: 645343 - DNA, 75 bp, synthetic construct
  source 1..75: mol_type = other DNA
gactttaactgagttcacaatgataacaatctgggaaatagaaggctttggaaaaattagtcataccgtaaaaac

SEQ ID NO: 645344 - DNA, 75 bp, synthetic construct
  source 1..75: mol_type = other DNA
tttgagcgaacctatctgatagaatcaaatgatccattgattattaatgaatacttaggaaatagtagaagcatc

SEQ ID NO: 645345 - DNA, 75 bp, synthetic construct
  source 1..75: mol_type = other DNA
caaacaatgctattatgttgatgaacaaaataggataatagaggaaataacatacgccagccatcgtaagaaaga

SEQ ID NO: 645346 - DNA, 75 bp, synthetic construct
  source 1..75: mol_type = other DNA
tgtatttagtggtgaatttgcaaaactggatgattttatcagttatcaagaaaatccgaatgaagtaacgcagaa

SEQ ID NO: 645347 - DNA, 75 bp, synthetic construct
  source 1..75: mol_type = other DNA
atgggaacaggctactttctggtcaggggggacaaaaccacctgcggcggtaagattattgaaggggcggacgac

SEQ ID NO: 645348 - DNA, 75 bp, synthetic construct
  source 1..75: mol_type = other DNA
gggccgactatccgcgtctggaagggcgacgatgttaagctgatttacagcaaccgactgacagaaaatgtctca

SEQ ID NO: 645349 - DNA, 75 bp, synthetic construct
  source 1..75: mol_type = other DNA
cgtgacagtgcaaaacacagtgtgagtgaattaccggtgaactggtgggtacagccttctgttatccgcaccttc

SEQ ID NO: 645350 - DNA, 75 bp, synthetic construct
  source 1..75: mol_type = other DNA
cagattgtcaaaaacgggggcgtggccgggaataccattatcaaccagaaaggcaaactgcaggttgataccggt

SEQ ID NO: 645351 - DNA, 75 bp, synthetic construct
  source 1..75: mol_type = other DNA
gagataacactcagaaaaaaacaaaatatacatcagaaataattttaattacatccacaattagagtatatagta

SEQ ID NO: 645352 - DNA, 75 bp, synthetic construct
  source 1..75: mol_type = other DNA
ttgccgatatacggcagatgacggtaacgctgtgcgtaatcaatgccgtaacccaccacaaactcatccgggatc

SEQ ID NO: 645353 - DNA, 75 bp, synthetic construct
  source 1..75: mol_type = other DNA
gccataactccggaagggaaaattctgacactcttccgggcaatggaaacaccgataaagcgccatataaaaatc

SEQ ID NO: 645354 - DNA, 75 bp, synthetic construct
  source 1..75: mol_type = other DNA
accgataaagcgccatataaaaatcaaaggcgaagcaacaccatacacccccggaatggaaatctactttgaacg

SEQ ID NO: 645355 - DNA, 75 bp, synthetic construct
  source 1..75: mol_type = other DNA
attagagtctttagcaaaaacaattgattgtgctcgatatagccaggaatggtcagaaaaatataacttttctca

SEQ ID NO: 645356 - DNA, 75 bp, synthetic construct
  source 1..75: mol_type = other DNA
actgtacaacgtgcgcactggtcatttacgccaggaacgcgcgcatcggtctggggaatcaatggtcgttacctg

SEQ ID NO: 645357 - DNA, 75 bp, synthetic construct
  source 1..75: mol_type = other DNA
tgacgccatgaaccgcagcgctgatattgtgctttctgatgccaacgtgcgtttagtagtcctctcggcttctgc

SEQ ID NO: 645358 - DNA, 75 bp, synthetic construct
  source 1..75: mol_type = other DNA
aatgccctgtccaggcgcagcactttacccgtcacttcggtttctcttgtaagtggtcagtggggatggactcca

SEQ ID NO: 645359 - DNA, 75 bp, synthetic construct
  source 1..75: mol_type = other DNA
aaaattcaggcacaatatccgcaagaagtgattaccaccgttcgcggccagggctatctgttcgaattgcgctga

SEQ ID NO: 645360 - DNA, 75 bp, synthetic construct
  source 1..75: mol_type = other DNA
actgatgggacgtctgcgcaaaaaaattcaggcacaatatccgcaagaagtgattaccaccgttcgcggccaggg

SEQ ID NO: 645361 - DNA, 75 bp, synthetic construct
  source 1..75: mol_type = other DNA
atgaatatgatggcagattatggatttacccgtaccttaattgtcactgacagtatgttaacgaaattaggtatg

SEQ ID NO: 645362 - DNA, 75 bp, synthetic construct
  source 1..75: mol_type = other DNA
actcatggggcgtctgcgcaaaaaaattcaggcgcaatatccgcaagaagtgattaccaccgttcgcggccaggg

SEQ ID NO: 645363 - DNA, 75 bp, synthetic construct
  source 1..75: mol_type = other DNA
tgcgggaaagccataccattgatgtactgatgggacgtctgcgcaaaaaattcaggcacaatatccgcaagaagt

SEQ ID NO: 645364 - DNA, 75 bp, synthetic construct
  source 1..75: mol_type = other DNA
aaacgctaatccgtaataacggcaaagtggtcagcaaagattcgctgatgttacagctctatccggatgccgaat

SEQ ID NO: 645365 - DNA, 75 bp, synthetic construct
  source 1..75: mol_type = other DNA
tgggttatgttcatgcgatggcgcaccagctgggcggtttctacaacctgccacacggtgtatgtaacgccgttt

SEQ ID NO: 645366 - DNA, 75 bp, synthetic construct
  source 1..75: mol_type = other DNA
gccgaggcaaagattgatgatgcagaggttcatttcctgacggtaataccttcgctgccctactatgcctctctg

SEQ ID NO: 645367 - DNA, 75 bp, synthetic construct
  source 1..75: mol_type = other DNA
tctggagtccggcggtcgcctggatgtactggagagccattcagcacagaataccctggtggatgacggcggtac

SEQ ID NO: 645368 - DNA, 75 bp, synthetic construct
  source 1..75: mol_type = other DNA
gcagcaatgctaaagcgcgtgaagcaatggcttatgcccagttcctcgctggtatggcgttcaacaacgcatctc

SEQ ID NO: 645369 - DNA, 75 bp, synthetic construct
  source 1..75: mol_type = other DNA
gacccctcactgatgactggtatgccgaagccactgacagcagctacaggtatggatgccctgactcacgccatt

SEQ ID NO: 645370 - DNA, 75 bp, synthetic construct
  source 1..75: mol_type = other DNA
tatttccctgggtggtggttctccgcatgactgcgcgaaaggtattgcactggttgctgctaacggcggtgatat

SEQ ID NO: 645371 - DNA, 75 bp, synthetic construct
  source 1..75: mol_type = other DNA
atggaaaaaccaagagtactcgtactgacaggggcagggatttctgcggaatcaggtattcgtacctttcgcgcc

SEQ ID NO: 645372 - DNA, 75 bp, synthetic construct
  source 1..75: mol_type = other DNA
ctattatcaggaaatatgcaagcctcacgtttgggatattaaagagcgtgtaaaagacggggtgattgaggacgt

SEQ ID NO: 645373 - DNA, 75 bp, synthetic construct
  source 1..75: mol_type = other DNA
ctattatcaagaaatatgcttgcctcacgtgtgggatattaaggaacgcgtgcaaggcggtgtaatagacgaggt

SEQ ID NO: 645374 - DNA, 75 bp, synthetic construct
  source 1..75: mol_type = other DNA
actacaaagcaattaatattggtttccccaactcctatgaccgcgcgcatggttacgaagggaaatatctgatga

SEQ ID NO: 645375 - DNA, 75 bp, synthetic construct
  source 1..75: mol_type = other DNA
ggggaactctgtttattttcgcctttgcggtacaggcggaaacaaaggtttatggcgaacaacgcgtcagcggct

SEQ ID NO: 645376 - DNA, 75 bp, synthetic construct
  source 1..75: mol_type = other DNA
taacgacttccgcgcccggggttggggctggctgggttcactggaaaccggtctgcccttcagtatcactgacaa

SEQ ID NO: 645377 - DNA, 75 bp, synthetic construct
  source 1..75: mol_type = other DNA
aatagaggctctcgttgcattaggtgaaaccattattccagcaattataagagatgtatcagaagaagatgctta

SEQ ID NO: 645378 - DNA, 75 bp, synthetic construct
  source 1..75: mol_type = other DNA
atggcgagctgggcgcaaaaactaaaactacatcacctgcaaatgctggtagcgctgggtgaacagggcaatctg

SEQ ID NO: 645379 - DNA, 75 bp, synthetic construct
  source 1..75: mol_type = other DNA
aggtgatgaccccattgctgcaagatctgttggcaggttctatcgatgtggtggttgggcgaattggcggtcgcg

SEQ ID NO: 645380 - DNA, 75 bp, synthetic construct
  source 1..75: mol_type = other DNA
gctcagggcgcagcaacggtgtggatggcggcacctgaactcgaaaactatgaacgcaggctgcaacaacttctt

SEQ ID NO: 645381 - DNA, 75 bp, synthetic construct
  source 1..75: mol_type = other DNA
gaagagcgcacgctcgatctctacgtcaaaatgggtgagcaatatcaactgctcgacagttataaaatctgtaaa

SEQ ID NO: 645382 - DNA, 75 bp, synthetic construct
  source 1..75: mol_type = other DNA
caatggtcgttacgtggtcagcaagccgttaagccacgaagttgtgcaaccacagctggcatcaaactacacgct

SEQ ID NO: 645383 - DNA, 75 bp, synthetic construct
  source 1..75: mol_type = other DNA
atgtgtcccagaccatcggggccattccctcgaatttgcagcagatgtctgcggttctctcgtttggctccacga

SEQ ID NO: 645384 - DNA, 75 bp, synthetic construct
  source 1..75: mol_type = other DNA
gtacaaaatccgttaaccgtctcggttacggcgcgatgcaactggcaggacctggtgtattcggcccaccgaaag

SEQ ID NO: 645385 - DNA, 75 bp, synthetic construct
  source 1..75: mol_type = other DNA
cttcattgattgactccgccatttctaaatttcaacatcaaaaccccgttaacggttcagttaatcctgaactat

SEQ ID NO: 645386 - DNA, 75 bp, synthetic construct
  source 1..75: mol_type = other DNA
gtcgtgggcgagcgccaaaaccgattgctgaagcactggcaggaggtcgttcccttgatgagtttctcatcgaga

SEQ ID NO: 645387 - DNA, 75 bp, synthetic construct
  source 1..75: mol_type = other DNA
tcatggcccagcggaaggatcgattgaggccagcctgacagtgctggcggagatgcaacaacaaggcctggtaaa

SEQ ID NO: 645388 - DNA, 75 bp, synthetic construct
  source 1..75: mol_type = other DNA
aatgccgctcggcatggatgaaatttatatagcgttgtcgatggccgatattttcatcgctattggcacatccgg

SEQ ID NO: 645389 - DNA, 75 bp, synthetic construct
  source 1..75: mol_type = other DNA
cgtctgatgtcacccagaacacgggcggtgcactggttaccagtacagctgcaaccgtcaccggcacaaaccgcc

SEQ ID NO: 645390 - DNA, 75 bp, synthetic construct
  source 1..75: mol_type = other DNA
ccgcacggtgtatgtaacgccgttctgctgccgcatgttcaggtattcaacagcaaagtcgctgctgcgcgtctg

SEQ ID NO: 645391 - DNA, 75 bp, synthetic construct
  source 1..75: mol_type = other DNA
ccgcatcaccctgctgctggccgaagatcatgcttacggcatcttttactggctggcaggcggagtgtcccacgc

SEQ ID NO: 645392 - DNA, 75 bp, synthetic construct
  source 1..75: mol_type = other DNA
ctcgcgggcacgctgctgcaaaccctgacccacaacccaatggcctctccttcactgctcggcattaacagcggc

SEQ ID NO: 645393 - DNA, 75 bp, synthetic construct
  source 1..75: mol_type = other DNA
cgcatttacgggagaatatggcagtaggggaattagcgctacctgatgatgtgttggcaacgctggacagtattg

SEQ ID NO: 645394 - DNA, 75 bp, synthetic construct
  source 1..75: mol_type = other DNA
ttatggcgcgatgcaactggctggtcctggggtttttggccccccaagagatcgccacgtcgctataaccgtgct

SEQ ID NO: 645395 - DNA, 75 bp, synthetic construct
  source 1..75: mol_type = other DNA
gattttgctatggcgggggcgtatctgtcacgaacggtgcaatagtgatccacacccaacgcctgaaatcagatc

SEQ ID NO: 645396 - DNA, 75 bp, synthetic construct
  source 1..75: mol_type = other DNA
cgtactggaaaatggcggacgtctggatgtgctgagcggacacacagccaccagaacccttgtggatgatggcgg

SEQ ID NO: 645397 - DNA, 75 bp, synthetic construct
  source 1..75: mol_type = other DNA
tgcgcatggcctatggcgagcctggagtcggactcgttaactttgcccgcaacgcttaaccccgggctggatttt

SEQ ID NO: 645398 - DNA, 75 bp, synthetic construct
  source 1..75: mol_type = other DNA
taaacccagcgaactgacaccgtggagtggcgaagcggtaatgcgtttatggcagcaggctggcttgccgccggg

SEQ ID NO: 645399 - DNA, 75 bp, synthetic construct
  source 1..75: mol_type = other DNA
ttagttttaattgctctatgaaagggttctggtgggtgacctttttcttgccgattttaatggccattgggatgg

SEQ ID NO: 645400 - DNA, 75 bp, synthetic construct
  source 1..75: mol_type = other DNA
tattggcgggctgatttctgagcaggccgcacagcaggtggttactgcctggcaggaactggaggcgatgggcgg

SEQ ID NO: 645401 - DNA, 75 bp, synthetic construct
  source 1..75: mol_type = other DNA
ttgtcgggctgcccgtgcggcgtttccgcgctgggcgcggctctcttttgctgaacgtcaggtgattgtcgaacg

SEQ ID NO: 645402 - DNA, 75 bp, synthetic construct
  source 1..75: mol_type = other DNA
gggtgacgggccagggcgcattgcgtgtgaagcgtaatccggtatcgggcgaggtgttatggcagggcaatgatg

SEQ ID NO: 645403 - DNA, 75 bp, synthetic construct
  source 1..75: mol_type = other DNA
tctagtcagattctcgccatcatctccaaagaagaccgtcacattgaagtgggcgttacaacttttgacgccagg

SEQ ID NO: 645404 - DNA, 75 bp, synthetic construct
  source 1..75: mol_type = other DNA
gcgaggctcagttacgtcactggaaccctatggctgtcagcatagacccatctagtcagattctcaccatcatct

SEQ ID NO: 645405 - DNA, 75 bp, synthetic construct
  source 1..75: mol_type = other DNA
cattaagaatagtcgttgtcccgggattgttattcctggtgataatggttgcaggcgggatgtgtcgttttcttt

SEQ ID NO: 645406 - DNA, 75 bp, synthetic construct
  source 1..75: mol_type = other DNA
atggctcaagttattaatgaaatggatgttccgtcccattcttttgtttttcatggtacaggtgagagatatttt

SEQ ID NO: 645407 - DNA, 75 bp, synthetic construct
  source 1..75: mol_type = other DNA
tgtttgccgtacgtctggatacctttgaagccgagaagaaccagcaggtcttttatatcggtaccaatcagactg

SEQ ID NO: 645408 - DNA, 75 bp, synthetic construct
  source 1..75: mol_type = other DNA
cgccggaaaatttggcacgtttttatcaggaaaatgatccgaccaacactatgaacccaggtattggtaaaacca

SEQ ID NO: 645409 - DNA, 75 bp, synthetic construct
  source 1..75: mol_type = other DNA
acgaaccctgcttgcgccacgtttactgcgcgcaggaacatcgttgctgacgccggggatcattgaaatgacagg

SEQ ID NO: 645410 - DNA, 75 bp, synthetic construct
  source 1..75: mol_type = other DNA
gcggctaatttgttctggcgcaagagcaacgtagtttatacgccgcgtctggatcaggctggtgtcaacggtatt

SEQ ID NO: 645411 - DNA, 75 bp, synthetic construct
  source 1..75: mol_type = other DNA
cgaagggtgggttacggaatgctgtgcggctaatttgttctggcggaagggcaacgtagtttatacgccgcgact

SEQ ID NO: 645412 - DNA, 75 bp, synthetic construct
  source 1..75: mol_type = other DNA
cttccggtgaccgggttcaggtggtggccgcactgatggccatcggggatgagctgcgccggctgcgtctggccg

SEQ ID NO: 645413 - DNA, 75 bp, synthetic construct
  source 1..75: mol_type = other DNA
catctatgaatggccgcccagaaccagcagtgcgctggatacgctgcttcgtgaaattcagaacgcacgcgaaca

SEQ ID NO: 645414 - DNA, 75 bp, synthetic construct
  source 1..75: mol_type = other DNA
cagttcggcggaatatatgccgatggtgttgcagtttggcttatcggaagagtatgaccgtctgcaagtcagtcg

SEQ ID NO: 645415 - DNA, 75 bp, synthetic construct
  source 1..75: mol_type = other DNA
tttacgatgactcgttacctgaaaaaggacgcggtaacgttcgctggcggacgctcatcgagcaaatgctgagtc

SEQ ID NO: 645416 - DNA, 75 bp, synthetic construct
  source 1..75: mol_type = other DNA
cacacggcgtgctggcggtgtttggtccgtacaattttcctgggcatttacctaacgggcatattgttccggcgt

SEQ ID NO: 645417 - DNA, 75 bp, synthetic construct
  source 1..75: mol_type = other DNA
gggtgacgggcctgggtgcgctgcgcgtgaagcgtaatccggtatctggcgacgttttatggcaaggcaatgatg

SEQ ID NO: 645418 - DNA, 75 bp, synthetic construct
  source 1..75: mol_type = other DNA
cgctgcacctgcgcccgccgtttaatgcttaaacgcggggcgcagggcgatgcgttccttgctcgcctggttgcc

SEQ ID NO: 645419 - DNA, 75 bp, synthetic construct
  source 1..75: mol_type = other DNA
gcaccgccgttactgcgtcagctggctgccatcgggaataacctgaatcagacggcgaggaaggtgaacagcggg

SEQ ID NO: 645420 - DNA, 75 bp, synthetic construct
  source 1..75: mol_type = other DNA
actgggatgacgaaccgcagccgtttattggcgggttgatatcagagcaggctgcacagcaggtggttactgcct

SEQ ID NO: 645421 - DNA, 75 bp, synthetic construct
  source 1..75: mol_type = other DNA
gcggacgttgcttacgccacgcttactgcaaccaggtacttcactgctttcacctggaatcattgacatgacggg

SEQ ID NO: 645422 - DNA, 75 bp, synthetic construct
  source 1..75: mol_type = other DNA
agcacctgctgcacgaactcagtaacagcatgcgtagcctgggtaaaaataactggcccctgttgttcattcgcc

SEQ ID NO: 645423 - DNA, 75 bp, synthetic construct
  source 1..75: mol_type = other DNA
accgcgttccaccagactatgccggaagagtcttacctctacgccctgccgtacaacctgtacaaagagcacggc

SEQ ID NO: 645424 - DNA, 75 bp, synthetic construct
  source 1..75: mol_type = other DNA
agctgactgctatcggtcaccgtatcgtacacggcggcgaaaagtataccagctccgtagtgatcgatgagtctg

SEQ ID NO: 645425 - DNA, 75 bp, synthetic construct
  source 1..75: mol_type = other DNA
gtgttgtctacgttggatggtatttcgcgagaattacgaatatacaaaagggaaagatgcatttcccttttgttt

SEQ ID NO: 645426 - DNA, 75 bp, synthetic construct
  source 1..75: mol_type = other DNA
cacgcttgaggaagcggaagctatccctgagctcgcaccagtggttcagcgtctgaaagagcgcatcgaagagta

SEQ ID NO: 645427 - DNA, 75 bp, synthetic construct
  source 1..75: mol_type = other DNA
cacgcttgaggaagcggaggctatccctgagctcgctccagtggttcagcggctgaaagagcgtgttgcagagta

SEQ ID NO: 645428 - DNA, 75 bp, synthetic construct
  source 1..75: mol_type = other DNA
cactctacccatcaacggagcatttttttaatcaaaaaatgatatctgagatgaaaagggggtcttatttgatca

SEQ ID NO: 645429 - DNA, 75 bp, synthetic construct
  source 1..75: mol_type = other DNA
atctacctggctgctcagtacacccagacttataacgcaactctggctggtgatttaggctgggcgaacaaagcc

SEQ ID NO: 645430 - DNA, 75 bp, synthetic construct
  source 1..75: mol_type = other DNA
tgttcagtaccagggtaaaaacggcaacccatctggtgaaggctttactagtggcgtaactaacaacggtcgtga

SEQ ID NO: 645431 - DNA, 75 bp, synthetic construct
  source 1..75: mol_type = other DNA
actaatgggacgtctacgcaaaaaaattcaagcgcagtatccacaagaagtgattaccaccgttcgcggccaggg

SEQ ID NO: 645432 - DNA, 75 bp, synthetic construct
  source 1..75: mol_type = other DNA
gcatgaccaacaacggtcgtggtgctctgcgtcagaacggcgacggcgttggcggatctatcacttatgattacg

SEQ ID NO: 645433 - DNA, 75 bp, synthetic construct
  source 1..75: mol_type = other DNA
ctggacccgtgtggcattcgctggtctgaaattccaggacgttggttctttcgactatggtcgtaactacggcgt

SEQ ID NO: 645434 - DNA, 75 bp, synthetic construct
  source 1..75: mol_type = other DNA
tctatcacttatgattacgaaggcttcggtatcggtggtgcgatctccagctccaaacgtactgatgatcagaac

SEQ ID NO: 645435 - DNA, 75 bp, synthetic construct
  source 1..75: mol_type = other DNA
ggtagtcagcattctgtccagaatggtatgcctgagtgacgaggagaagcagacaatgttgtcctgccttcctga

SEQ ID NO: 645436 - DNA, 75 bp, synthetic construct
  source 1..75: mol_type = other DNA
atgagaatctggatgcggttgccgaaaagtggcgcaaaaaattagaaatgcataaagagatggcatttctgtgcc

SEQ ID NO: 645437 - DNA, 75 bp, synthetic construct
  source 1..75: mol_type = other DNA
ctggcgaccgctggcggatgaaaattttcatttaggcctgggattcaccgctggcgtaacggcacgcgataactg

SEQ ID NO: 645438 - DNA, 75 bp, synthetic construct
  source 1..75: mol_type = other DNA
ttgcacaaacctggcaacagccagaacatatatgatttatatattcctgccatcacctggcatgcgcgttttgcc

SEQ ID NO: 645439 - DNA, 75 bp, synthetic construct
  source 1..75: mol_type = other DNA
atcgccgctgggcggctggcattctggacagagcccggttttacgggttacataacgagcaaagcgctgatggaa

SEQ ID NO: 645440 - DNA, 75 bp, synthetic construct
  source 1..75: mol_type = other DNA
ctgcgacggccacgggatctgaccctttatgacactcctatgggttatgtcataaaaatgcttgtgtcagtattc

SEQ ID NO: 645441 - DNA, 75 bp, synthetic construct
  source 1..75: mol_type = other DNA
gtcgttctggaagggaaaataccggggctgcgctctctggttgtctgcctggaagatgcggtcagcgagcatgac

SEQ ID NO: 645442 - DNA, 75 bp, synthetic construct
  source 1..75: mol_type = other DNA
atgttcatctcagacgaaacgcttcgtgttattcatctggtcgccagacaccagagcattaccaccgcagccgag

SEQ ID NO: 645443 - DNA, 75 bp, synthetic construct
  source 1..75: mol_type = other DNA
aacgaccccgctggggacgcgtgtaatgctgccggaatatggcagcaaattatttgatcttgttgataatcccac

SEQ ID NO: 645444 - DNA, 75 bp, synthetic construct
  source 1..75: mol_type = other DNA
taattatggaaagcgctggcgcaatagcacgctgggaaccacgcgtcagaattgacagaataaatgtgttagcag

SEQ ID NO: 645445 - DNA, 75 bp, synthetic construct
  source 1..75: mol_type = other DNA
gggatgaaaaaggaaactggcatggcctgtatgccatggcatttaaggactcgtggaacaaatgggaaccgattg

SEQ ID NO: 645446 - DNA, 75 bp, synthetic construct
  source 1..75: mol_type = other DNA
tgctaaaccaataccggcatcgtggattgtgtgcctcttcctgtctatatcgtttttgagtaaaaaagaaccaca

SEQ ID NO: 645447 - DNA, 75 bp, synthetic construct
  source 1..75: mol_type = other DNA
tacatatgcataacgaaattgtggaatctctttccacgaaaggaaaaattggtcttcttgttcttattatgttct

SEQ ID NO: 645448 - DNA, 75 bp, synthetic construct
  source 1..75: mol_type = other DNA
aagacaaatcaactaaatgaattaaatattaaagcaaattgcactagaaacagtaattacaatggagttaattgc

SEQ ID NO: 645449 - DNA, 75 bp, synthetic construct
  source 1..75: mol_type = other DNA
ctaccgtcgcgggtaatgtctcggtagagaaaaccacccgcaacgccctgcaactgctgcatttctggaatgcgg

SEQ ID NO: 645450 - DNA, 75 bp, synthetic construct
  source 1..75: mol_type = other DNA
gaagttattgagattccaggatgtccagggacttatcgtgcaattgcatggattaaaccccattttcaacttgag

SEQ ID NO: 645451 - DNA, 75 bp, synthetic construct
  source 1..75: mol_type = other DNA
tagtgagtttttatacatcaatcagtggaatactgaaggctgagatgttcccggcacaggttcgcgcattaggcg

SEQ ID NO: 645452 - DNA, 75 bp, synthetic construct
  source 1..75: mol_type = other DNA
tattgtcgccaataaagacacgctggtgatgattggcgatttaagttctcacggcgtgttgttaggttttttatt

SEQ ID NO: 645453 - DNA, 75 bp, synthetic construct
  source 1..75: mol_type = other DNA
tcagcatttattggtgcaataggtgttagctttaacgcaagctcaagtttggtaatttttggaggtagctactca

SEQ ID NO: 645454 - DNA, 75 bp, synthetic construct
  source 1..75: mol_type = other DNA
atgacaattacatcaacattagggcagaatgaaacacagtatgctacagatgattgtctagaagaaattataaat

SEQ ID NO: 645455 - DNA, 75 bp, synthetic construct
  source 1..75: mol_type = other DNA
agccatggtataaaatatttagagccaaaaactttgatcgttacttttataattcaccgtggaaatattataaaa

SEQ ID NO: 645456 - DNA, 75 bp, synthetic construct
  source 1..75: mol_type = other DNA
tataatcttgcaaggccagattcatacacctatagcgtatattcaaaagtctgtcagcgactgatgatatttggc

SEQ ID NO: 645457 - DNA, 75 bp, synthetic construct
  source 1..75: mol_type = other DNA
tgattgtcttgaagaaattataaataataccagagctgtaagacaggattctgaaaaaaacagatttaaattgca

SEQ ID NO: 645458 - DNA, 75 bp, synthetic construct
  source 1..75: mol_type = other DNA
gattaaacctcattttcagcttgaggggttaagtatgtcattgcgtcttgttgctgacttaccatcaagtgtagg

SEQ ID NO: 645459 - DNA, 75 bp, synthetic construct
  source 1..75: mol_type = other DNA
atgtgggactaactttgccacagtccttgggacgtatcccatatggcatgaagactgtacctgctgagacgttta

SEQ ID NO: 645460 - DNA, 75 bp, synthetic construct
  source 1..75: mol_type = other DNA
ggcagcggcaaatctaacttgcttgaagtcctcgcagcaatcttctttcagttggaaattctgcgtgtgcgccgg

SEQ ID NO: 645461 - DNA, 75 bp, synthetic construct
  source 1..75: mol_type = other DNA
acatcgggccttaccgttgatgtctcgtcatttactacggaactgaaaattggcgaccggcagttagcaggcagt

SEQ ID NO: 645462 - DNA, 75 bp, synthetic construct
  source 1..75: mol_type = other DNA
gtggcggggctaaccagccttgcgcttcagggccatgcgcactataccgaaccgggtaagccgcaggtctggctc

SEQ ID NO: 645463 - DNA, 75 bp, synthetic construct
  source 1..75: mol_type = other DNA
cagcctctggatgcaactttaaccgcgcttgctggtcttgctacaggcgcaaataaattgccgtactttaccggt

SEQ ID NO: 645464 - DNA, 75 bp, synthetic construct
  source 1..75: mol_type = other DNA
gaccaccaccgtggatatgaagtctgcgctgtatcaggatgtgaaaaatgccgtcacatcaatgctgaccccggg

SEQ ID NO: 645465 - DNA, 75 bp, synthetic construct
  source 1..75: mol_type = other DNA
atcaccggcggtgtatccattgtggacggtaaactcaccggttcaaaagccttcctgaaagcattgtcttcccag

SEQ ID NO: 645466 - DNA, 75 bp, synthetic construct
  source 1..75: mol_type = other DNA
gggggaacagccagtgatacggttatccgtgacggcggagggcagagcctgaacggactggcggtgaacaccacg

SEQ ID NO: 645467 - DNA, 75 bp, synthetic construct
  source 1..75: mol_type = other DNA
tgaattaattgatacaacacaggcaaggccaattcagtattgtattaatgggacgtggtataacgcggggagcat

SEQ ID NO: 645468 - DNA, 75 bp, synthetic construct
  source 1..75: mol_type = other DNA
agatgctgaagaagctgggcaaacttgatccgcgtgagttctctccgggcgcagcgccgcagggggaaaataatg

SEQ ID NO: 645469 - DNA, 75 bp, synthetic construct
  source 1..75: mol_type = other DNA
caattgcttcatagcctaggtctatgtttactgtttagagaaaccaacagcctgtttctgttagacgaaccggag

SEQ ID NO: 645470 - DNA, 75 bp, synthetic construct
  source 1..75: mol_type = other DNA
gtccagcggcggcggaatcactaacgctcaattcacttatattaatcatggtgatgcttatgctcctggctggcg

SEQ ID NO: 645471 - DNA, 75 bp, synthetic construct
  source 1..75: mol_type = other DNA
tgggcttatgcaaataataaggtcattacagatacaggttgcggaaatatttgtcttgcaggtgctgtggtggaa

SEQ ID NO: 645472 - DNA, 75 bp, synthetic construct
  source 1..75: mol_type = other DNA
tgagctaacggcggaagatttaaatcttgaacaaaccgtagaattagccgcaggagcattacagaaaaaccagaa

SEQ ID NO: 645473 - DNA, 75 bp, synthetic construct
  source 1..75: mol_type = other DNA
cgatcgtttaagtcaaggtgagcatttgggtgaaaaactacttattgatgccatctatagaactgtattagttgc

SEQ ID NO: 645474 - DNA, 75 bp, synthetic construct
  source 1..75: mol_type = other DNA
tctcactggcagaagccaggcaacagcgcgacggtatccgcaagctactggcgcagaatatcaacccggcgcaac

SEQ ID NO: 645475 - DNA, 75 bp, synthetic construct
  source 1..75: mol_type = other DNA
gagccatcaggagcgcaacagcgttcgggcggcgtatatccaccgggctgaacatctcgacgcccgtacagccat

SEQ ID NO: 645476 - DNA, 75 bp, synthetic construct
  source 1..75: mol_type = other DNA
gctgcagaggctaaacagatttatgaaatcgccagtcgtctgcagcaaaggatatctgctgtaatgcgttatgcc

SEQ ID NO: 645477 - DNA, 75 bp, synthetic construct
  source 1..75: mol_type = other DNA
aaactcagcaagccactcttcaggctcagcgtatgcctttgcttgagatttttattcaccagtttttgcatagcg

SEQ ID NO: 645478 - DNA, 75 bp, synthetic construct
  source 1..75: mol_type = other DNA
acgctccgactatgtgagcgagcaaggtaatctggcttttatgaagggcaagctgatgctttctgcacagctgcg

SEQ ID NO: 645479 - DNA, 75 bp, synthetic construct
  source 1..75: mol_type = other DNA
atgcctaattggtgggaaataaaaaatagcacgggtgaagatgacactccggctgagcttttaatatacgggtat

SEQ ID NO: 645480 - DNA, 75 bp, synthetic construct
  source 1..75: mol_type = other DNA
tacgattatttagcctctcgattccagaaccttcagttaaaaacctttttgccgtaaatgaattttatagaaata

SEQ ID NO: 645481 - DNA, 75 bp, synthetic construct
  source 1..75: mol_type = other DNA
tttcataaaccctgatctacaagaacggttagtgatcggggatgatggcatttcaatatttacttatgacattaa

SEQ ID NO: 645482 - DNA, 75 bp, synthetic construct
  source 1..75: mol_type = other DNA
tgtatgttgtttttccggaatgatttatccacatatccagaggcccgatccagtaaacagatccatgaatgatca

SEQ ID NO: 645483 - DNA, 75 bp, synthetic construct
  source 1..75: mol_type = other DNA
gccacgcagcgactttcgtcttattcgccaccgcattctggcacctgaaaaaatgggctggaaatacaaagacgc

SEQ ID NO: 645484 - DNA, 75 bp, synthetic construct
  source 1..75: mol_type = other DNA
ctggatgcaggaacatgaggcggaaattgcacagttaattcagcatattcatgataaggggccggtacgttcagc

SEQ ID NO: 645485 - DNA, 75 bp, synthetic construct
  source 1..75: mol_type = other DNA
caggtagtgcaggagttgcactaggtagtgcaggagttgcaccagggggtagtgcaggagattcacccagaacca

SEQ ID NO: 645486 - DNA, 75 bp, synthetic construct
  source 1..75: mol_type = other DNA
gactcgttatgtgagttgagtatcagagaacgtggtatggagtttaaggcagttctcgcttacgaatcgaagaag

SEQ ID NO: 645487 - DNA, 75 bp, synthetic construct
  source 1..75: mol_type = other DNA
gcacttctcagcaacgctacagctggtttaaacgtggtttcgacagcggcgatccggcacaatgcaatacttttg

SEQ ID NO: 645488 - DNA, 75 bp, synthetic construct
  source 1..75: mol_type = other DNA
catccatatcaaaccccggaacttctggttttacctgttacacacggagacacagattacctctcatggctcaac

SEQ ID NO: 645489 - DNA, 75 bp, synthetic construct
  source 1..75: mol_type = other DNA
tttttgacggacaaggccaggagcatccacaagcgcgcgtcacgggctttatggatgctgaaaccttcagcgcac

SEQ ID NO: 645490 - DNA, 75 bp, synthetic construct
  source 1..75: mol_type = other DNA
acaatatatcaatggctgttgcgtcaattggtagcctgatgtggcatgcgtcagaaaatgaggactatgacgaaa

SEQ ID NO: 645491 - DNA, 75 bp, synthetic construct
  source 1..75: mol_type = other DNA
ggcatcgagccgaaagttcgtcaactgcaacaaaacgcgacgcaggcggaagtgaaccgcttatctgtgcgtatg

SEQ ID NO: 645492 - DNA, 75 bp, synthetic construct
  source 1..75: mol_type = other DNA
ggcgttgatttaaccgggttgatgaccggacagccggtttctcaacagcaatcaacgcggtcaattagcccaaat

SEQ ID NO: 645493 - DNA, 75 bp, synthetic construct
  source 1..75: mol_type = other DNA
atgctgacgaaatatgcccttgtggcagtcatagtgctgtgtttgacggtactgggatttacgcttctggtcggt

SEQ ID NO: 645494 - DNA, 75 bp, synthetic construct
  source 1..75: mol_type = other DNA
atgctgacgaaatatgcccttgtggcagtcatagtgctgtgttttacggtgctgggatttacgcttctggtcggc

SEQ ID NO: 645495 - DNA, 75 bp, synthetic construct
  source 1..75: mol_type = other DNA
atgctgacgaaatatgcccttgtggcagtcatagtgctgtgttttacggtcctgggatttacgcttctggtcggg

SEQ ID NO: 645496 - DNA, 75 bp, synthetic construct
  source 1..75: mol_type = other DNA
tcctgctattttgcagcacttccgtttttgccggattattcgacgcgcctggacgttcccaatttgtccccgcgg

SEQ ID NO: 645497 - DNA, 75 bp, synthetic construct
  source 1..75: mol_type = other DNA
gcctttatcaccagcctacaggccaaacgcggctggatgcgcgtggtgcaaataatcctgctggcagcggcattg

SEQ ID NO: 645498 - DNA, 75 bp, synthetic construct
  source 1..75: mol_type = other DNA
atgctgacgaaatatgcccttgtggcagtcatagtgctgtgtttgacggttctgggatttacgcttctggtcgga

SEQ ID NO: 645499 - DNA, 75 bp, synthetic construct
  source 1..75: mol_type = other DNA
tttacctttgttggtattggtgctcttgtttatatgctttattgcatcctgatggcctttatggaacgtaaaagc

SEQ ID NO: 645500 - DNA, 75 bp, synthetic construct
  source 1..75: mol_type = other DNA
gaagtgatacaacgtcatcatctgcaactggtcggcattcacatgcacattggttccggtgttgattacgcgcat

SEQ ID NO: 645501 - DNA, 75 bp, synthetic construct
  source 1..75: mol_type = other DNA
tgcggcaggttatcgactttggtcaggatttacaggcgatttctgctggcggtgggctttcagttccttatcaac

SEQ ID NO: 645502 - DNA, 75 bp, synthetic construct
  source 1..75: mol_type = other DNA
tcaggacgtgtattgcttctctggagcttaaaccaggcaaaatgcttgcccgactcacgcggcaaaccatctgca

SEQ ID NO: 645503 - DNA, 75 bp, synthetic construct
  source 1..75: mol_type = other DNA
tatcgagggtgataaagggcccttcaattacttggccggcaaacagcaaagtgaacttgatattgagtgggaagc

SEQ ID NO: 645504 - DNA, 75 bp, synthetic construct
  source 1..75: mol_type = other DNA
cttgataaggacgaacagactgctatccaaatgcccgcttcgatgatccgcctgttgaaacaacgtgaaggggaa

SEQ ID NO: 645505 - DNA, 75 bp, synthetic construct
  source 1..75: mol_type = other DNA
tgggccaccctgtgaaactggaaattgaaccgggtcgcttcctggtagcgcagtctggcgtattaattactcagg

SEQ ID NO: 645506 - DNA, 75 bp, synthetic construct
  source 1..75: mol_type = other DNA
cggttctggtgttgattatgcgcatctggagcaggtgtgtggtgcgatggtacgccaggttgtcgattttggtca

SEQ ID NO: 645507 - DNA, 75 bp, synthetic construct
  source 1..75: mol_type = other DNA
cgttaatccggggtttggtcacggacatagccaaaaaaccaataccggtggcgaaaacagcaagcacggtatctg

SEQ ID NO: 645508 - DNA, 75 bp, synthetic construct
  source 1..75: mol_type = other DNA
caggaaggggggaatgtcgaaacccgcgccttaccggaagtgatggctggcgattatctggtgctgcatgatacc

SEQ ID NO: 645509 - DNA, 75 bp, synthetic construct
  source 1..75: mol_type = other DNA
accagaagttctgtttgataatggtcaggcgcggttgattcgccgtcgccagaccatcgaagaattactggcgct

SEQ ID NO: 645510 - DNA, 75 bp, synthetic construct
  source 1..75: mol_type = other DNA
tgaatcgggcgatgtctttacccagcaggaagggggaaatgttgaaacccgcgccttgccggaagtgaaggcggg

SEQ ID NO: 645511 - DNA, 75 bp, synthetic construct
  source 1..75: mol_type = other DNA
ggtgcctttaactactccctcaaccgggacagtgatgagagctggtatctgcgcagtgaaaatgcttatcgtgca

SEQ ID NO: 645512 - DNA, 75 bp, synthetic construct
  source 1..75: mol_type = other DNA
taaagcaaggcagtacggtaagagggtttatcgcagggatcgcctgttcagtggctgtcgcctcagcattgtggt

SEQ ID NO: 645513 - DNA, 75 bp, synthetic construct
  source 1..75: mol_type = other DNA
atttacacaccgccacctactatacgcttgcccggacacggacccagggactggcgggattctgcgaaggtgcgg

SEQ ID NO: 645514 - DNA, 75 bp, synthetic construct
  source 1..75: mol_type = other DNA
acccgtcgcagccggagctgaactggaaactggtggagtcgctggcgctggcgatatttaaggccaacggggtgg

SEQ ID NO: 645515 - DNA, 75 bp, synthetic construct
  source 1..75: mol_type = other DNA
ggcctcgacacaatggaatgaggcactcaaaacccgcgcacagagtagcccgcagttgcgtggctggttgcagac

SEQ ID NO: 645516 - DNA, 75 bp, synthetic construct
  source 1..75: mol_type = other DNA
atggtaagccacgactgggataagttctggccgcagggcggcccggcgcgtactgaaatgctggactggtttaac

SEQ ID NO: 645517 - DNA, 75 bp, synthetic construct
  source 1..75: mol_type = other DNA
cgcacagagtagcccgcagttgcgtggctggttgcagacccgtcaggacttacatgcttttgcagatctcgtgat

SEQ ID NO: 645518 - DNA, 75 bp, synthetic construct
  source 1..75: mol_type = other DNA
atagatcgcctctgggacaggtcagtaatcatcaagaacgaggaaaaacgagaagagttccgctgggtgcagtac

SEQ ID NO: 645519 - DNA, 75 bp, synthetic construct
  source 1..75: mol_type = other DNA
ttttaccaggacactatcaacgctttctacggcaagcagcagtatctgtttaatccaccgtgggaatctctggca

SEQ ID NO: 645520 - DNA, 75 bp, synthetic construct
  source 1..75: mol_type = other DNA
cgttaccagaacagaatcccatcttgagtacctgcaatcgcgtggcatatcgccagaagtcgtaaagcgctacga

SEQ ID NO: 645521 - DNA, 75 bp, synthetic construct
  source 1..75: mol_type = other DNA
tgcagtttatgctggttatgctggctgcatggggcattagctggggagccagatttgtcatggagctggccgttc

SEQ ID NO: 645522 - DNA, 75 bp, synthetic construct
  source 1..75: mol_type = other DNA
acttgaataagatgataatcaagccagccatcgccgaactgaacgaaaaaagcgatctggttgtaacggttgaga

SEQ ID NO: 645523 - DNA, 75 bp, synthetic construct
  source 1..75: mol_type = other DNA
cttttcctgacatgggacggcagcacgctgaagccaagctcaaggaagcgatagatcgcctctgggacaggtcag

SEQ ID NO: 645524 - DNA, 75 bp, synthetic construct
  source 1..75: mol_type = other DNA
ctgttaccagaagttctgtttgataatggtcaggcgcggttgattcgccgtcgccagaccatcgaagaattactg

SEQ ID NO: 645525 - DNA, 75 bp, synthetic construct
  source 1..75: mol_type = other DNA
attttgatcgcgcggttcgtcgtttacagcagcagctgcgtaagccagctgaagaattggggcgagagattactc

SEQ ID NO: 645526 - DNA, 75 bp, synthetic construct
  source 1..75: mol_type = other DNA
tggactgatgtgctgccggagtttggtggtgatacttacagcgcggataacttcatgcagggacggggtaacggt

SEQ ID NO: 645527 - DNA, 75 bp, synthetic construct
  source 1..75: mol_type = other DNA
ctggcagggtatttctgggtactcgagaactctgtagaccacggctgccatgcccatatcgtgttctatctcgac

SEQ ID NO: 645528 - DNA, 75 bp, synthetic construct
  source 1..75: mol_type = other DNA
tattccagcatctcgagtatacggctaaactctactcaaaaagccatgttgatggaaagcgtaattttggttgta

SEQ ID NO: 645529 - DNA, 75 bp, synthetic construct
  source 1..75: mol_type = other DNA
tgagccattgtcagtttatcagtttaggcatgtgttgcccttcgatcagatcgaatctttttcgctgtttaatgt

SEQ ID NO: 645530 - DNA, 75 bp, synthetic construct
  source 1..75: mol_type = other DNA
gtttgggttgagcatgttccctgctatgtcgatagctttcactattattgtaagtatcgggaaggcatcagaggc

SEQ ID NO: 645531 - DNA, 75 bp, synthetic construct
  source 1..75: mol_type = other DNA
ctgcacagtaccagtttgattttggtctgcgtccggcagtctctttcctgatgtctaaaggccgtgacctgcacg

SEQ ID NO: 645532 - DNA, 75 bp, synthetic construct
  source 1..75: mol_type = other DNA
atgtactgacatacctgaatacatccacaaccggcagcacacaacaaatccagggcgcgttacccccaccggatg

SEQ ID NO: 645533 - DNA, 75 bp, synthetic construct
  source 1..75: mol_type = other DNA
tcaggaggcagtgcatcagatgccatttccggtgatgccagcaatacccagaccaccaccgtggatatgaagtct

SEQ ID NO: 645534 - DNA, 75 bp, synthetic construct
  source 1..75: mol_type = other DNA
agtttggtggagatacctggactcagactgatgtatttatgacccagcgtgctactggcgtagcgacctatcgta

SEQ ID NO: 645535 - DNA, 75 bp, synthetic construct
  source 1..75: mol_type = other DNA
gtggcagaacacagctcagtaaaggcgccagcatggtactgaatggtgatgtggtcagtaccggcgatattgtta

SEQ ID NO: 645536 - DNA, 75 bp, synthetic construct
  source 1..75: mol_type = other DNA
gtttcagtattggtggtgcggtgtccagttctcaacgtacatgggatcagaaccatacgggactgatggggaccg

SEQ ID NO: 645537 - DNA, 75 bp, synthetic construct
  source 1..75: mol_type = other DNA
ggaagctattttcattagtggtttgtttttccatactccaagtgctgctacaaactgctttgaagggttaaaaaa

SEQ ID NO: 645538 - DNA, 75 bp, synthetic construct
  source 1..75: mol_type = other DNA
accaacagatctattgcaccatgcaaggtatgacaaattaatggatgcatttcgtggtgatgctgccaacttact

SEQ ID NO: 645539 - DNA, 75 bp, synthetic construct
  source 1..75: mol_type = other DNA
caagctgatgaacagcttcgtgaatttattgaaagtgctcagattccattcctgccaatgtctatggcgaaaggg

SEQ ID NO: 645540 - DNA, 75 bp, synthetic construct
  source 1..75: mol_type = other DNA
cgatcgtcgatctccagcaaggtgattatgaagagctggaccaaatgaatgcggcaaaaccgtatgccaaagcgg

SEQ ID NO: 645541 - DNA, 75 bp, synthetic construct
  source 1..75: mol_type = other DNA
gcagggcgtgaaagtggattccgtctcgttaggcgaaatagagcgtgcgttggcggcgggttacaatccgcaaac

SEQ ID NO: 645542 - DNA, 75 bp, synthetic construct
  source 1..75: mol_type = other DNA
tggcggcaggatataacccacaaacgcatcctgacgacattgtgtttaccgccgatgttattgatcaggcgacgc

SEQ ID NO: 645543 - DNA, 75 bp, synthetic construct
  source 1..75: mol_type = other DNA
ggctacgactactttgagcaaacccgtaagccaccgaccgtttctgtggtcaatggccgttacgtggtcagcaag

SEQ ID NO: 645544 - DNA, 75 bp, synthetic construct
  source 1..75: mol_type = other DNA
gtgaagttcgacgtgtttttaaaatcatggcaaggcacgcaattagagaaccgatggcagcggttcctgattgca

SEQ ID NO: 645545 - DNA, 75 bp, synthetic construct
  source 1..75: mol_type = other DNA
tagccaataccgatcccttctttcttcttcgcttcttccaccatactgttctgattgaagaaggaacatcgctgg

SEQ ID NO: 645546 - DNA, 75 bp, synthetic construct
  source 1..75: mol_type = other DNA
aaacagacattgatgacttcaccgaaagacggtttgctgaagaaaaacgtatcgggtgtgaagagttccaagcac

SEQ ID NO: 645547 - DNA, 75 bp, synthetic construct
  source 1..75: mol_type = other DNA
tacccaaaagccagggatctgcctgaccgtttctgcgccaggattcctcaatggtttgaccgcattggccaacgc

SEQ ID NO: 645548 - DNA, 75 bp, synthetic construct
  source 1..75: mol_type = other DNA
aagttatcagtcttgtttttactgccgctatgactggacaccaagtctggacttcccttcatgcgaatagtgcta

SEQ ID NO: 645549 - DNA, 75 bp, synthetic construct
  source 1..75: mol_type = other DNA
cctgaatgacctgcgtttacagattagcttctttgaatatgcgctgggtgctgctgaagatattgctaataagat

SEQ ID NO: 645550 - DNA, 75 bp, synthetic construct
  source 1..75: mol_type = other DNA
cagggggattttttcgcgtcctcacagccacttgatactaacgtgaaaaaatattcacaaagatactcggtttaa

SEQ ID NO: 645551 - DNA, 75 bp, synthetic construct
  source 1..75: mol_type = other DNA
atcattctaccgaagaagtacgctatgttatctttccgttcaacccgtagtggcgacctcgttaacgtgttggtt

SEQ ID NO: 645552 - DNA, 75 bp, synthetic construct
  source 1..75: mol_type = other DNA
tacaacgaaaatatgaagttacattcgttgttgatggaacttcgtgtgacgttgcgatcactgatcacctctggc

SEQ ID NO: 645553 - DNA, 75 bp, synthetic construct
  source 1..75: mol_type = other DNA
ggcacagatgtacaaattttacgttccgagccgaagaaaaaagcactcttcgtaggtgcggaaaagaaagtttat

SEQ ID NO: 645554 - DNA, 75 bp, synthetic construct
  source 1..75: mol_type = other DNA
cacacatggtttttacgtgtccgttatactcactgttatgaaaacggttttccgcaacctgatgaaacacagcgt

SEQ ID NO: 645555 - DNA, 75 bp, synthetic construct
  source 1..75: mol_type = other DNA
ctggagctcgccgtgctgtaacagatagtggctcttccgagcgtgtccgtggcatacgcaacaataaccccggaa

SEQ ID NO: 645556 - DNA, 75 bp, synthetic construct
  source 1..75: mol_type = other DNA
tgatacaggtgtctatctcctgcctaagcggttcgcttctatctctttcaggtcaactaaagacgctaagacggt

SEQ ID NO: 645557 - DNA, 75 bp, synthetic construct
  source 1..75: mol_type = other DNA
cgcgcggatgttgctcaggctcaggatgcatcattgcaactcagccagatttccagtgatctgctaaccaacccg

SEQ ID NO: 645558 - DNA, 75 bp, synthetic construct
  source 1..75: mol_type = other DNA
atcagatcggtgctttcttccgtgatgcaccagtttctcagcagtctgcatacctcgacaccattcggcagagta

SEQ ID NO: 645559 - DNA, 75 bp, synthetic construct
  source 1..75: mol_type = other DNA
gtgaaggaaacctgcgttacaccgagttcaggaatacgcagatcgccgggcaatacattggttcattccgtaata

SEQ ID NO: 645560 - DNA, 75 bp, synthetic construct
  source 1..75: mol_type = other DNA
ttatgaaaacttcgactatggatttttccagaatgctgcgtatggaaaaaaagctcctgatgttctttttataag

SEQ ID NO: 645561 - DNA, 75 bp, synthetic construct
  source 1..75: mol_type = other DNA
ccagcaggcgcaaaagctggcgcgtcagtattcgtcctgttggtcaacggcgggcgtacatcctcacgacagcag

SEQ ID NO: 645562 - DNA, 75 bp, synthetic construct
  source 1..75: mol_type = other DNA
gtacacaaacccagtctgattcaggggttcgaaaatcgaactgttacgtacgtaattcttttacacagagtgtaa

SEQ ID NO: 645563 - DNA, 75 bp, synthetic construct
  source 1..75: mol_type = other DNA
taattacatccttaatgttcaggatatctataaaaattctcctgtcccggtttgtgtccgtaagaaccggaaaat

SEQ ID NO: 645564 - DNA, 75 bp, synthetic construct
  source 1..75: mol_type = other DNA
ccgcgcatcgcgtaaacgctttggtagcccgaaattccgtgtatggggcggcaagccgatgattatgctgattct

SEQ ID NO: 645565 - DNA, 75 bp, synthetic construct
  source 1..75: mol_type = other DNA
ttgcactgttggtggcgttcgtggtgtggttgagcactaaagctgtcagccgcatgacggcgattgtgctggggg

SEQ ID NO: 645566 - DNA, 75 bp, synthetic construct
  source 1..75: mol_type = other DNA
tggcggatctgtttggctttgatgattcggcaatggggcgttttaaaacggcactgttgacctttgcaccgcccg

SEQ ID NO: 645567 - DNA, 75 bp, synthetic construct
  source 1..75: mol_type = other DNA
ctggagagcagggaaaatatggatataaaattactcgggggcttacagggcaaaatagcacatccggaacgttta

SEQ ID NO: 645568 - DNA, 75 bp, synthetic construct
  source 1..75: mol_type = other DNA
caggggagcagggaaaatacggatataaaatcacgcgggggtttgcagggcagaatacaggggccgggtcgttca

SEQ ID NO: 645569 - DNA, 75 bp, synthetic construct
  source 1..75: mol_type = other DNA
cggaacggtgttatccggtgccggagataatgtgctgaaaacaaccggtgctaatccctcagcgctggggatagc

SEQ ID NO: 645570 - DNA, 75 bp, synthetic construct
  source 1..75: mol_type = other DNA
ggccagcctggagcgcgcccgtattcaggcaaatcaggacaatcacgcccgtttttattttgattattcccgcgc

SEQ ID NO: 645571 - DNA, 75 bp, synthetic construct
  source 1..75: mol_type = other DNA
ggccacttaacagtcaatctataaataattacatccttaatgttcaggatatctataaaaattcgcctgtcccgg

SEQ ID NO: 645572 - DNA, 75 bp, synthetic construct
  source 1..75: mol_type = other DNA
ggacagataggggcggaggcggcaggcagtcttgtgcagctgattgaccagcgggtgcaggcggtgatgctgtcc

SEQ ID NO: 645573 - DNA, 75 bp, synthetic construct
  source 1..75: mol_type = other DNA
atcccgcgtccggagtttatcggtattgcagagaagggcggtaatattgatgtgctggtacaggcgttaagcggc

SEQ ID NO: 645574 - DNA, 75 bp, synthetic construct
  source 1..75: mol_type = other DNA
cttcggcagcctgctggggcatgtacagcctgcgacattgttcaacgtcgccgaaagcaatgcgtcttatgcgcc

SEQ ID NO: 645575 - DNA, 75 bp, synthetic construct
  source 1..75: mol_type = other DNA
tgtgctggtacaggcattaagcggcgtgctgaacagccgtagcctggaccttctgctggtcgtgttctcaaactt

SEQ ID NO: 645576 - DNA, 75 bp, synthetic construct
  source 1..75: mol_type = other DNA
cttgtctctaaagcaactacaagcgcaattgcggtaaaaacagcaccaaataaatctgtagggggacaggttaaa

SEQ ID NO: 645577 - DNA, 75 bp, synthetic construct
  source 1..75: mol_type = other DNA
gcgcattacataacgcacaggatgaaaaacttcccgccgttaccgcgctggccatctcaaataaagcagtgcaac

SEQ ID NO: 645578 - DNA, 75 bp, synthetic construct
  source 1..75: mol_type = other DNA
agactttctccttgagcaagggtttgtgcataaagttgagtccaccaatagctatgtgctctgtcatctgttcga

SEQ ID NO: 645579 - DNA, 75 bp, synthetic construct
  source 1..75: mol_type = other DNA
atggaaaagaccacaacgcaggagttattagcgcaggctgaaaaactctgtgcgcagcgtaatgtgcgcctgacc

SEQ ID NO: 645580 - DNA, 75 bp, synthetic construct
  source 1..75: mol_type = other DNA
tctcaggtgagcagggttcttttgcctggtatccggtgaacagcaacagtaataacggcaattcgggggctgaat

SEQ ID NO: 645581 - DNA, 75 bp, synthetic construct
  source 1..75: mol_type = other DNA
tccgtcatgaagctatgttgcgtttagcccatagccttaaacatgtcccggatattgaggagatttattgggaga

SEQ ID NO: 645582 - DNA, 75 bp, synthetic construct
  source 1..75: mol_type = other DNA
tcttcacggttagtgatttttcgaaatcagagatagagaaatatctggcggtagactctgacaagatcactgtat

SEQ ID NO: 645583 - DNA, 75 bp, synthetic construct
  source 1..75: mol_type = other DNA
cgcgcagcgtaatgtgcgcctgaccccacagcgcctggaagtgttgcgcctgatgagtctgcaggatggcgctat

SEQ ID NO: 645584 - DNA, 75 bp, synthetic construct
  source 1..75: mol_type = other DNA
gcagaaaacaaaaacgagctggtggtaaaacctgcggccaagcaaatgacggagtggcaccgggaactggaagcc

SEQ ID NO: 645585 - DNA, 75 bp, synthetic construct
  source 1..75: mol_type = other DNA
ggcactgacagcgccctggcgatggcaatgggccatgtgattttaaaagagtttcatctcgataatcccagcgac

SEQ ID NO: 645586 - DNA, 75 bp, synthetic construct
  source 1..75: mol_type = other DNA
cagcgcctacgatctgcttgatttgctgcgtgaagccgagccgcaagccaagccgccaacggtttatcgcgcact

SEQ ID NO: 645587 - DNA, 75 bp, synthetic construct
  source 1..75: mol_type = other DNA
ctgtgcggcatgtgtggaagtggaagcgtgtcgtcatcctgaacagtgccatcatgaccactctattccgatgaa

SEQ ID NO: 645588 - DNA, 75 bp, synthetic construct
  source 1..75: mol_type = other DNA
cagcgcctacgatctccttgatttactgcgtgaagccgaaccgcaagccaagccgccaacagtttatcgcgcgct

SEQ ID NO: 645589 - DNA, 75 bp, synthetic construct
  source 1..75: mol_type = other DNA
tgttgcacattgaaaatatcgcccttatgccgggaattgattttaaccctggcaaacaggacgacgactcagcgt

SEQ ID NO: 645590 - DNA, 75 bp, synthetic construct
  source 1..75: mol_type = other DNA
ctgctttgcattctttggagacatcatatcctgagttgtttagagaaaaaacagatagtaaaaagaaagaaataa

SEQ ID NO: 645591 - DNA, 75 bp, synthetic construct
  source 1..75: mol_type = other DNA
ttttaaattaaagttgaatgcgcgagaaaaagcatatagtaaatttatttactataaattttttcatggcaacac

SEQ ID NO: 645592 - DNA, 75 bp, synthetic construct
  source 1..75: mol_type = other DNA
agttttgggaccctcgctgaatgggtcgaagtaccaacaggtattgttgcgcagattatgggccatatgatccta

SEQ ID NO: 645593 - DNA, 75 bp, synthetic construct
  source 1..75: mol_type = other DNA
ggcgagaatctgggcaaagtactgatcggtggaatggagtcggtaatgttgaatacaatgtggtatatgcagtaa

SEQ ID NO: 645594 - DNA, 75 bp, synthetic construct
  source 1..75: mol_type = other DNA
tctggaggtagcgcagatcttaaaaaattcatcgaaagatatatggatgaatattcaagctactatggaagcatt

SEQ ID NO: 645595 - DNA, 75 bp, synthetic construct
  source 1..75: mol_type = other DNA
ctaatttgcaatattatggatatgagattagctaagctggctaaaaaatatggatgtacttatagcagatatgct

SEQ ID NO: 645596 - DNA, 75 bp, synthetic construct
  source 1..75: mol_type = other DNA
ggatttacatcatcatatggcggaagcgaaacccgtccacgaaatattgcatttaactatatcgtaagggctgca

SEQ ID NO: 645597 - DNA, 75 bp, synthetic construct
  source 1..75: mol_type = other DNA
gagcattgaggcacacggccatgattacaatggggtcatctatacttctagcggtccttcctgggctaatacgac

SEQ ID NO: 645598 - DNA, 75 bp, synthetic construct
  source 1..75: mol_type = other DNA
ttttcttaaacgttggtttaggagaaggctctgcattacccgtaggtgtgcctgttccgtggccttcagtcacac

SEQ ID NO: 645599 - DNA, 75 bp, synthetic construct
  source 1..75: mol_type = other DNA
tatcagccttcacggtttgcgtcgtagttttggtactttggccgagtgggttgaagttcccacaggtattgttgc

SEQ ID NO: 645600 - DNA, 75 bp, synthetic construct
  source 1..75: mol_type = other DNA
tcatttcggcatgattgacgccattgatgatccgcaggtttttgccgcgttgtttggtacagcggaagcgtggtt

SEQ ID NO: 645601 - DNA, 75 bp, synthetic construct
  source 1..75: mol_type = other DNA
cagtcgccattaacaccggaaccaacctgccctccgtcgccacgccgaacggacaggctgcgttcttattcctgt

SEQ ID NO: 645602 - DNA, 75 bp, synthetic construct
  source 1..75: mol_type = other DNA
agttgtcgtcggcgccggctacagcatctaccctgctcagggcagacgctatggcttgtattttccgtccgccac

SEQ ID NO: 645603 - DNA, 75 bp, synthetic construct
  source 1..75: mol_type = other DNA
cgtgaagcttaacgaggcgatcacagctgccgacgttacgatgcgtaccgatgaaattaaacgagagttgatgaa

SEQ ID NO: 645604 - DNA, 75 bp, synthetic construct
  source 1..75: mol_type = other DNA
aaactttctcaacgatcagttcgtgatcgacagcattgtttctgccattaacccgcagaagggccaggcgatggt

SEQ ID NO: 645605 - DNA, 75 bp, synthetic construct
  source 1..75: mol_type = other DNA
ttcagaaatgtaagcaggataaaaagcgtttcgcgaccattaccgcttacgactacagctttgctaaactgtttg

SEQ ID NO: 645606 - DNA, 75 bp, synthetic construct
  source 1..75: mol_type = other DNA
agcacgtgaaggtgcacctcaggccagacaggtggccgatcgatggcacctgctaaaaaatattggcgatgcact

SEQ ID NO: 645607 - DNA, 75 bp, synthetic construct
  source 1..75: mol_type = other DNA
tgctcccttcgccagttcacaccagcagtcttcacaggcgttacaaaatttacaacgtcaactgggattaatagc

SEQ ID NO: 645608 - DNA, 75 bp, synthetic construct
  source 1..75: mol_type = other DNA
cgccgcaaaatgctggccgcgatgggaatgcccgaacgcacgctgatggggtatgacgccgtttgcaggcagtat

SEQ ID NO: 645609 - DNA, 75 bp, synthetic construct
  source 1..75: mol_type = other DNA
gctgtctgtactggggatgccagcacatacagtgatgagttatgagcgcgtttgcaggctgtatgaaaaatcatt

SEQ ID NO: 645610 - DNA, 75 bp, synthetic construct
  source 1..75: mol_type = other DNA
gcacatcgtccggtgtttgtctggccaacgcgcgagcaacgctggaaatacctttctacggcgaagctaaaagcc

SEQ ID NO: 645611 - DNA, 75 bp, synthetic construct
  source 1..75: mol_type = other DNA
aaactttctcaacgatcagttcgtgatcgacagtattgtgtctgccattaacccgcaaaagggccaggcgatggt

SEQ ID NO: 645612 - DNA, 75 bp, synthetic construct
  source 1..75: mol_type = other DNA
tggcggggaaaacgccattaaccgccataagactggggtcggtgaccgcacatatgcccggaacatgggaaagct

SEQ ID NO: 645613 - DNA, 75 bp, synthetic construct
  source 1..75: mol_type = other DNA
gccaccggcaaaaccagctgccgggatatgtcaccggatgagttatcccgcgtgctggatgttttcaaaaaacgc

SEQ ID NO: 645614 - DNA, 75 bp, synthetic construct
  source 1..75: mol_type = other DNA
ccacactgctgctgtacgtcgcggtgcgccaaactgcctgctgctggctgatctgccgtttatggcgtatgccac

SEQ ID NO: 645615 - DNA, 75 bp, synthetic construct
  source 1..75: mol_type = other DNA
gatcgacgccaaacggtaacgattatgatcgcgatatcgtgatcatcagcaccctgcgtctcgacaagctgcacg

SEQ ID NO: 645616 - DNA, 75 bp, synthetic construct
  source 1..75: mol_type = other DNA
cgctgcgggcgcagcaattcgttatcaggcggtgcattccgatgaagtcgaagacattctggcgctggatatcgc

SEQ ID NO: 645617 - DNA, 75 bp, synthetic construct
  source 1..75: mol_type = other DNA
atatgcaccgggatatctacgatatcgcggaaaaatatggcaaagacaccttcctgatgatcgataaacttggca

SEQ ID NO: 645618 - DNA, 75 bp, synthetic construct
  source 1..75: mol_type = other DNA
tactctgttcatagttgtcgtcggcgtcggatacagcatctcccctgttcagggcagacgctatggcttgtattt

SEQ ID NO: 645619 - DNA, 75 bp, synthetic construct
  source 1..75: mol_type = other DNA
acccggcttgttcacgtaaaatttttgccgagtcgcttgctcccttcgccggttcacaccaacagtcttcacagg

SEQ ID NO: 645620 - DNA, 75 bp, synthetic construct
  source 1..75: mol_type = other DNA
atgtcctgaatgctttaagcgtagcgactctgttcatagttgtcgtcggcgccggatacagcatccaccctgctc

SEQ ID NO: 645621 - DNA, 75 bp, synthetic construct
  source 1..75: mol_type = other DNA
ctcaccgatcccgcaaaaacggcccgctatcgcaagggcttccgttctggtcagggcgacgcgctggctgtcgtt

SEQ ID NO: 645622 - DNA, 75 bp, synthetic construct
  source 1..75: mol_type = other DNA
cagttgctggtgctggaatgcgtaccggttgaactggcgaaacgcattaccgaagcgctggcgattccggtcatc

SEQ ID NO: 645623 - DNA, 75 bp, synthetic construct
  source 1..75: mol_type = other DNA
ttcagaaatgtaagcaggacaaaaaacgtttcgcgaccatcaccgcttacgactacagcttcgcgaaactgtttg

SEQ ID NO: 645624 - DNA, 75 bp, synthetic construct
  source 1..75: mol_type = other DNA
catttaccgccgcgcatgaaaaactggcgcgataaatacgaacatcatctgctgttaaaaatggcgggcgatggc

SEQ ID NO: 645625 - DNA, 75 bp, synthetic construct
  source 1..75: mol_type = other DNA
cccggcgtataccgaaatgtcgttattcgcgcgtataaatgaagatggcaaactgacgctggtgaaccatctggg

SEQ ID NO: 645626 - DNA, 75 bp, synthetic construct
  source 1..75: mol_type = other DNA
cgatttctttgtctgtacgccggaggaaggcagcaaagcgtttttacaccgtttcgccgctgcgggcgcagcaat

SEQ ID NO: 645627 - DNA, 75 bp, synthetic construct
  source 1..75: mol_type = other DNA
ttgccaaaagaattaataataaaaacgatcgtcgaagcaaaagtatttgcttaacccctgacggagttacacttg

SEQ ID NO: 645628 - DNA, 75 bp, synthetic construct
  source 1..75: mol_type = other DNA
gtcagccagcaaaaatccacaaaccctatccaactaataaaatgcaaacaacttccggcaaaaaagtgatacaag

SEQ ID NO: 645629 - DNA, 75 bp, synthetic construct
  source 1..75: mol_type = other DNA
atgagaacagccgaatcacccggcagagaaatagccgccagaccagctaaccatcatgcacatatcagcatggcc

SEQ ID NO: 645630 - DNA, 75 bp, synthetic construct
  source 1..75: mol_type = other DNA
atgagaacagccgaatcacccggcagaaaaataaccgccagaccagctaaccatcatgcacatatcagcatggcc

SEQ ID NO: 645631 - DNA, 75 bp, synthetic construct
  source 1..75: mol_type = other DNA
catcctgatcgtgccctcttacggcggtggcggtacggctggcgcggtgccacgacaggtaattcgctttttaaa

SEQ ID NO: 645632 - DNA, 75 bp, synthetic construct
  source 1..75: mol_type = other DNA
tttctcaacttcatcaaattttttacgatgatgatggattaattgattcagaaaagaacgtgactattttataca

SEQ ID NO: 645633 - DNA, 75 bp, synthetic construct
  source 1..75: mol_type = other DNA
ctcggtttcatctttaaagccaatgatcttattaagattgcttttgaacataaaagagattcgttttggattcga

SEQ ID NO: 645634 - DNA, 75 bp, synthetic construct
  source 1..75: mol_type = other DNA
agctcgaaatactggcaagatttttttattacatagaacaaaacaaagatataccatttaatgaaatcaatattg

SEQ ID NO: 645635 - DNA, 75 bp, synthetic construct
  source 1..75: mol_type = other DNA
tgaaaatgacaatgactacataagagcaacagatgattacattatacagaggaataaagaatgcaaacagacagg

SEQ ID NO: 645636 - DNA, 75 bp, synthetic construct
  source 1..75: mol_type = other DNA
tcagctttccggtgcacccgataatgtgctgaaaaccacgggtgctaatccttcggcactgggtattgcattata

SEQ ID NO: 645637 - DNA, 75 bp, synthetic construct
  source 1..75: mol_type = other DNA
tccccggaggaaacctgctcatccattgaacgactgattgcaacgctcacgaacaacgccgaacagaaggagtgc

SEQ ID NO: 645638 - DNA, 75 bp, synthetic construct
  source 1..75: mol_type = other DNA
cataagagcaacagatgattacattattatgaggaatagaaaatgccaacaacagacagaaaacgagggcgtata

SEQ ID NO: 645639 - DNA, 75 bp, synthetic construct
  source 1..75: mol_type = other DNA
aaagctgatgagcttattgaagcattaattattgaaaatgataacgactacataagagcaacagatgattacatt

SEQ ID NO: 645640 - DNA, 75 bp, synthetic construct
  source 1..75: mol_type = other DNA
cgggagaaaccgtgagcggcggaacactgacaaatcatgacaaccagattgtatccggaacagctgatggcgtga

SEQ ID NO: 645641 - DNA, 75 bp, synthetic construct
  source 1..75: mol_type = other DNA
atgaaaaatatcatcactattttaatgattgcagttatcagtttctttactgctaatgtatcagcaaacaatgcc

SEQ ID NO: 645642 - DNA, 75 bp, synthetic construct
  source 1..75: mol_type = other DNA
ttgattacaaaatcaacttaattgacgatagtaagtttaccaaaacagctggtattgataccgacgacatcgtcg

SEQ ID NO: 645643 - DNA, 75 bp, synthetic construct
  source 1..75: mol_type = other DNA
cctatagcagcaggcttcaaggggcttttacctcatggcagaaagtcccggattcagtgcgatgatgatgagggc

SEQ ID NO: 645644 - DNA, 75 bp, synthetic construct
  source 1..75: mol_type = other DNA
atctgctggcgaaaaatttcccggcgatgaccattgaaacggcggtggaatacacctctgacgctggcgagctgg

SEQ ID NO: 645645 - DNA, 75 bp, synthetic construct
  source 1..75: mol_type = other DNA
ctttaagcaactggtgaaacagactaacggtcatattgagcgtaccgacaaaatgaaactgtgcatgtcgccgct

SEQ ID NO: 645646 - DNA, 75 bp, synthetic construct
  source 1..75: mol_type = other DNA
actacaacaataatgggcaggtaaatgctaacgtcaactgggttgctcgtgagtcctatctgtaccagaccatta

SEQ ID NO: 645647 - DNA, 75 bp, synthetic construct
  source 1..75: mol_type = other DNA
gttataggagtatcaatacgtaccattgcaaagaaaaggaaatgttcagatgggactgtcagaaaagaattgcaa

SEQ ID NO: 645648 - DNA, 75 bp, synthetic construct
  source 1..75: mol_type = other DNA
attatgattgatggatgtgtggcccggttgcggaaatataaaacagaagaatatgagctgatcattgctcacttt

SEQ ID NO: 645649 - DNA, 75 bp, synthetic construct
  source 1..75: mol_type = other DNA
tattgaactggaaacgccttacagcgctcgcgatgttgccgccctcgcagacttcagccataacccggcggatca

SEQ ID NO: 645650 - DNA, 75 bp, synthetic construct
  source 1..75: mol_type = other DNA
tagaccgctggggggcatgggctgcagcagaaaatagtggtgtcgattggcaaccgatagcagcgggcttcaagg

SEQ ID NO: 645651 - DNA, 75 bp, synthetic construct
  source 1..75: mol_type = other DNA
atcatgatagatagttgtgtggctaggttgcgtaaatataagtcagaagattacgagctgataatcgcccacttt

SEQ ID NO: 645652 - DNA, 75 bp, synthetic construct
  source 1..75: mol_type = other DNA
ggcttctaccacacggtaaaatgtcacgtctccagtgcgatgatgatgaaggaattatgattgatggatgtgtgg

SEQ ID NO: 645653 - DNA, 75 bp, synthetic construct
  source 1..75: mol_type = other DNA
ctcccccactacgtcgatttccaggccgaactggagctactcaaacgtctgcaacaggagcagaaccatggctaa

SEQ ID NO: 645654 - DNA, 75 bp, synthetic construct
  source 1..75: mol_type = other DNA
atgtacgttgccgtgaaagggggcgagaaggcgatcgacgccgcccacgccctgcaagagagccgacgccggggc

SEQ ID NO: 645655 - DNA, 75 bp, synthetic construct
  source 1..75: mol_type = other DNA
aaccgtgacagcgatgaagactggtacctgcgcagtgaatatgcttatcgttctgaagtccccctgtatgcctcc

SEQ ID NO: 645656 - DNA, 75 bp, synthetic construct
  source 1..75: mol_type = other DNA
taaaccacaaaaaattgtcatctcacccggcccctgtacgccagatgaagccgggatctcccttgacgttattcg

SEQ ID NO: 645657 - DNA, 75 bp, synthetic construct
  source 1..75: mol_type = other DNA
ataaagacattcccggcggccagctgcttggcccaacctacgactacacccatcgcctgctcgatttcaccctgc

SEQ ID NO: 645658 - DNA, 75 bp, synthetic construct
  source 1..75: mol_type = other DNA
ttcctgttgcgcgcctaccgcaccacgctggcgaagctggcggtcagtgagccgctcgacaccaccgggatgcgt

SEQ ID NO: 645659 - DNA, 75 bp, synthetic construct
  source 1..75: mol_type = other DNA
agtgcagaagccgcacctctggttgcggtactcacccgtgacggctgggaaactcagtggcctctaccagaagcg

SEQ ID NO: 645660 - DNA, 75 bp, synthetic construct
  source 1..75: mol_type = other DNA
acactccaggtagttaacgcccttatagataagggtaaagacggctatgaccaggttcaacaaaaaatgaataag

SEQ ID NO: 645661 - DNA, 75 bp, synthetic construct
  source 1..75: mol_type = other DNA
gttgaatcgtggactggtggcaacccggtcccggctgaggtaaaggggatcagcggcagagagcagctttcaggc

SEQ ID NO: 645662 - DNA, 75 bp, synthetic construct
  source 1..75: mol_type = other DNA
ccggtgacacggtcgatgccattaactctgcgcagtggggcgcgggtgcttatgatgcttatgggacgggaatac

SEQ ID NO: 645663 - DNA, 75 bp, synthetic construct
  source 1..75: mol_type = other DNA
tgcgcgagaaaggcattcagttcgaaatgaagcaaaacgaaccggaagatcattttggttcactgctgctgatgg

SEQ ID NO: 645664 - DNA, 75 bp, synthetic construct
  source 1..75: mol_type = other DNA
tggctgttgatgggcatcgggtttattgcctctgtcatgcacctgggatcgccactgcgggcgtttaactcgctg

SEQ ID NO: 645665 - DNA, 75 bp, synthetic construct
  source 1..75: mol_type = other DNA
caatggcgcaggcatttggcggtaaagttgtgcgcgccgcaaaggtcatgcacggcaaaacctcgccgattacac

SEQ ID NO: 645666 - DNA, 75 bp, synthetic construct
  source 1..75: mol_type = other DNA
tgacacggtcgatgccattaactctgcgcagtggggcgcgggtgcttatgatgcttatgggacgggaataccggc

SEQ ID NO: 645667 - DNA, 75 bp, synthetic construct
  source 1..75: mol_type = other DNA
cactatccagaaggcgttttatctgggcgttgacgataccaacatgttgtccttcttcactaaaaccagctctgt

SEQ ID NO: 645668 - DNA, 75 bp, synthetic construct
  source 1..75: mol_type = other DNA
gatcagatggggatgaacggggagtcggcaggtaatgccctgcgaaaagttatccagtccggattaagcgttaag

SEQ ID NO: 645669 - DNA, 75 bp, synthetic construct
  source 1..75: mol_type = other DNA
gattggcgacaagctgaaagtcgtgttcatcccgaactacagcgttagcctggcgcagttgatcattccggcggc

SEQ ID NO: 645670 - DNA, 75 bp, synthetic construct
  source 1..75: mol_type = other DNA
ccagatgcgaattgggtaccgcgtgtgaatatttttggcggtaaggcggcttcggcgtactacatggcgaagcat

SEQ ID NO: 645671 - DNA, 75 bp, synthetic construct
  source 1..75: mol_type = other DNA
aacctggccggtcgatatgctgggcaaaattttgccgcgtcacttgcagataatttttgaaatcaacgactattt

SEQ ID NO: 645672 - DNA, 75 bp, synthetic construct
  source 1..75: mol_type = other DNA
gtgcaaccgacgcagtgtgtggtctttgaagatgccgatttcggtattcaggcggcccgtgcagcaggcatggac

SEQ ID NO: 645673 - DNA, 75 bp, synthetic construct
  source 1..75: mol_type = other DNA
atgttttttattgagaatgaaggtcaggctgtcgccagaacggattactggcagtctgtacaggcgcaggccgga

SEQ ID NO: 645674 - DNA, 75 bp, synthetic construct
  source 1..75: mol_type = other DNA
tcgcctgctccccgaaaacaaccagggagggggttttgttgtcaccgtctggacgcgtggaggtaaccagctccg

SEQ ID NO: 645675 - DNA, 75 bp, synthetic construct
  source 1..75: mol_type = other DNA
agcaaactaaaatagatatacttggcgctagggataaggttctatttgttgaaggtgttacgtctagccttgacc

SEQ ID NO: 645676 - DNA, 75 bp, synthetic construct
  source 1..75: mol_type = other DNA
cgggatggtcgcgggacctgtgctcggtgggctgatgggcggtttctccccccacgctccgttcttcgccgcggc

SEQ ID NO: 645677 - DNA, 75 bp, synthetic construct
  source 1..75: mol_type = other DNA
gttgaatcgtggacaggtggcaacccggtcccggctgaggtaaaggggatcagcggcagagagcagatgtcaggc

SEQ ID NO: 645678 - DNA, 75 bp, synthetic construct
  source 1..75: mol_type = other DNA
tccatatcctcacagttatgaacaacctgacgattaactatggtactgaaacttcgccagagttagccgggataa

SEQ ID NO: 645679 - DNA, 75 bp, synthetic construct
  source 1..75: mol_type = other DNA
gaaggcaaactggaggcgaaagcagccgatctggcccgagcacaggatcgcctggagctggctgaaagtgaaaat

SEQ ID NO: 645680 - DNA, 75 bp, synthetic construct
  source 1..75: mol_type = other DNA
ctatccctcaagtctgctgagctggaacgctcacaggctgacgtcgataagctggagaagaggctcgttgagttg

SEQ ID NO: 645681 - DNA, 75 bp, synthetic construct
  source 1..75: mol_type = other DNA
ggtacggcagtcgctctacagcatggatgaccgcccgacggtctatgccctgtttgaacgttatacggtatggct

SEQ ID NO: 645682 - DNA, 75 bp, synthetic construct
  source 1..75: mol_type = other DNA
atttacagagttatctgcaggacatgtcgccggaattagtggaaatgctgggagggaagaaggatttttacgaac

SEQ ID NO: 645683 - DNA, 75 bp, synthetic construct
  source 1..75: mol_type = other DNA
gcagaggaggcccggcagtggaaagaacagatcctcgcaggtacagccgataaaaccacacaactgcaggcgctg

SEQ ID NO: 645684 - DNA, 75 bp, synthetic construct
  source 1..75: mol_type = other DNA
cagcagcaaagcggctgcatacgctacaggctggaatgcctgccgcgccgctatgcttcagggaaaaggaaagtg

SEQ ID NO: 645685 - DNA, 75 bp, synthetic construct
  source 1..75: mol_type = other DNA
atgaaagtgcttcatgtggcaggagaaaaaggtggcaccggcgcgtcagcagaagatgcaatacaggagatattc

SEQ ID NO: 645686 - DNA, 75 bp, synthetic construct
  source 1..75: mol_type = other DNA
aaagtggggactcacgggatcgtgatgatgatccgcctgccggatttcaatatgttgagcgatacctgggggcac

SEQ ID NO: 645687 - DNA, 75 bp, synthetic construct
  source 1..75: mol_type = other DNA
attcaatttttgcaactattaataatattcagaatataatcaagttggcaaatgaaagtgatgttataattacaa

SEQ ID NO: 645688 - DNA, 75 bp, synthetic construct
  source 1..75: mol_type = other DNA
aaggaaagtcagcaacaacaacccagtacttccacagaccagcaagtgcttgccgcgcaacaagctgcaataaaa

SEQ ID NO: 645689 - DNA, 75 bp, synthetic construct
  source 1..75: mol_type = other DNA
gtccgccctagtgccgatctttttttagagacgacagacttgccctgctggcgacatggcgaatggttacatctc

SEQ ID NO: 645690 - DNA, 75 bp, synthetic construct
  source 1..75: mol_type = other DNA
cgaattatcgtaacggacatcatgtgacagccctggctaaccggctgctgaggctcaggcgggtgcgattcggcg

SEQ ID NO: 645691 - DNA, 75 bp, synthetic construct
  source 1..75: mol_type = other DNA
tgtgctccaacgtttgaaggtgttcggggggttcttggttcgaaatgggcttatcagtggcggaaatttatagct

SEQ ID NO: 645692 - DNA, 75 bp, synthetic construct
  source 1..75: mol_type = other DNA
atggatgaccaaaaaaacatcaaggttcgatttaatcgatttgggaaaattgcgtcgaaatcacttcatgagatt

SEQ ID NO: 645693 - DNA, 75 bp, synthetic construct
  source 1..75: mol_type = other DNA
aaccgtgacagcgatgaagactggtacctgcgcagtgaatatgcgtatcgttctgaagtcccccagtatgcctcc

SEQ ID NO: 645694 - DNA, 75 bp, synthetic construct
  source 1..75: mol_type = other DNA
aacagtagttgatgatagcgatcctgatgtgattgaactgctggacgagaacatggagatggctctaacgcttga

SEQ ID NO: 645695 - DNA, 75 bp, synthetic construct
  source 1..75: mol_type = other DNA
cggttcaggctagcggtggcccaccccctaccgtaccttcaacttcaccaacccaggtgaatccgtcttcggcag

SEQ ID NO: 645696 - DNA, 75 bp, synthetic construct
  source 1..75: mol_type = other DNA
cggttcaggccagcggtggcgcaacgactaccgtaccttcgacttcaccaactcaggtgaatccgtcttcggcag

SEQ ID NO: 645697 - DNA, 75 bp, synthetic construct
  source 1..75: mol_type = other DNA
catatcggtgagccaccgataagccgggcactggaagcatggcgagtggtctttgaagacatgacatggaaaacc

SEQ ID NO: 645698 - DNA, 75 bp, synthetic construct
  source 1..75: mol_type = other DNA
atgcaaaaaaatggcaatgtcaatcattgaagatgtaagtaaattaccttcaattagaaaaatatctttttcaaa

SEQ ID NO: 645699 - DNA, 75 bp, synthetic construct
  source 1..75: mol_type = other DNA
ctttctgaggctgaaccacggacagtatattcttaacccgggacttaaaatcaggcagggggaaaggtggtgtgc

SEQ ID NO: 645700 - DNA, 75 bp, synthetic construct
  source 1..75: mol_type = other DNA
atccagcaaaaagggatgctgaatcagcaactgaaaacgcaaactcagttgcaacagcagcatttagaaaaccag

SEQ ID NO: 645701 - DNA, 75 bp, synthetic construct
  source 1..75: mol_type = other DNA
cctaaccagccggggtatcagatccccagtcagcagcggatgcagactcaaatgcagacgcagcaaatccagcaa

SEQ ID NO: 645702 - DNA, 75 bp, synthetic construct
  source 1..75: mol_type = other DNA
atgctttcaaaacttacgtctgttcagtttgaatgcgtatcgctcattgagatggtgcgctcttatcaggaagaa

SEQ ID NO: 645703 - DNA, 75 bp, synthetic construct
  source 1..75: mol_type = other DNA
ggggcagcgctgtggctggatactcgatacatacgttcaacacttttcaggaaatagtcccggtgcactggttaa

SEQ ID NO: 645704 - DNA, 75 bp, synthetic construct
  source 1..75: mol_type = other DNA
tcgaaattaaagaaattaacgaaatcattgaggttactgatcgccccgagtttaccctcatgcgtcgttatgaaa

SEQ ID NO: 645705 - DNA, 75 bp, synthetic construct
  source 1..75: mol_type = other DNA
gatgcctggctggacaagcgatgggacaccccgggtattctggttgtcatcacgctgtcgttacctgcctctccc

SEQ ID NO: 645706 - DNA, 75 bp, synthetic construct
  source 1..75: mol_type = other DNA
gagcttattgaaattactgaatcagaaagacagctactaattaaccaggccaacgaatacatgaacagtaagcaa

SEQ ID NO: 645707 - DNA, 75 bp, synthetic construct
  source 1..75: mol_type = other DNA
gaaatgggctgggacccacagcttggttgtccgacccgcgaaacattgcagcgtctggggctggaagatattgcc

SEQ ID NO: 645708 - DNA, 75 bp, synthetic construct
  source 1..75: mol_type = other DNA
ttcgtacctataaatccgtttttgacttaggtccggcggcagagaaatacacagtaaaaatgagcggctgccact

SEQ ID NO: 645709 - DNA, 75 bp, synthetic construct
  source 1..75: mol_type = other DNA
ggcgaccacgtttggttactcttcggtatttcttgccggggcgatctctgcagtgctgggaattattgtcacgat

SEQ ID NO: 645710 - DNA, 75 bp, synthetic construct
  source 1..75: mol_type = other DNA
gaacgcatgcttgaaaaaacgattactatccacttagatgctaaagatggaaagaagatcgttgagctaattgat

SEQ ID NO: 645711 - DNA, 75 bp, synthetic construct
  source 1..75: mol_type = other DNA
gaaaatatcatgcttgttaatggtatgtgcaataacgtaactcatgtagagcgtttacgtcatagccagaaggaa

SEQ ID NO: 645712 - DNA, 75 bp, synthetic construct
  source 1..75: mol_type = other DNA
cagcccaccactgacaaagacgacgtctgggtcgccgtcatcaccaaagaagaagttcgcaaggaatcacccggg

SEQ ID NO: 645713 - DNA, 75 bp, synthetic construct
  source 1..75: mol_type = other DNA
tgcgaagagaacggagtgacatttagcctttcagaagacaatttcagtatcgatcccgtgttgggctataccggc

SEQ ID NO: 645714 - DNA, 75 bp, synthetic construct
  source 1..75: mol_type = other DNA
cgccttcatcgccccgaaaggggaacagaaaaaacgctcacaaagacacttacccgggcgctgctctgggcgaag

SEQ ID NO: 645715 - DNA, 75 bp, synthetic construct
  source 1..75: mol_type = other DNA
atgaattacatatattccgcgacgacaaactctttctatcccttggagatgaaagaggattacacacaagctgac

SEQ ID NO: 645716 - DNA, 75 bp, synthetic construct
  source 1..75: mol_type = other DNA
aaaaccgtccggaagtgcatcgtcggtatatcgatattcagtttctggcgtggggtgaagagaaaatcggcattg

SEQ ID NO: 645717 - DNA, 75 bp, synthetic construct
  source 1..75: mol_type = other DNA
tccgcgttgcagaagaaaatggtttgcccacatgtgctgaaatacctccaccatcacatgaggtacttattgaac

SEQ ID NO: 645718 - DNA, 75 bp, synthetic construct
  source 1..75: mol_type = other DNA
gtcagaaccgtattgatatttactgagagctcagatcaactttccagggcaacagatcgcgtacccggtttgccg

SEQ ID NO: 645719 - DNA, 75 bp, synthetic construct
  source 1..75: mol_type = other DNA
gatattattttttatcacgatagtgaacatgaatcatttatagaaatgataccgggtagctacgctattttcttc

SEQ ID NO: 645720 - DNA, 75 bp, synthetic construct
  source 1..75: mol_type = other DNA
ctatattgatattcaatatctggcgtggggcgaggagaaaatcggcattgctattgatacgggaaataataaagt

SEQ ID NO: 645721 - DNA, 75 bp, synthetic construct
  source 1..75: mol_type = other DNA
gatattattttttatcacgacagtgagcatgaatcatttatcgaaatgataccgggtagttacgctattttcttc

SEQ ID NO: 645722 - DNA, 75 bp, synthetic construct
  source 1..75: mol_type = other DNA
tactaattaatcaggccaacgattatatgaacagtaaacaatggcctggtaaagccgctattggtcgtctgaaag

SEQ ID NO: 645723 - DNA, 75 bp, synthetic construct
  source 1..75: mol_type = other DNA
aaaatccgtattgccggaggtgatgggctgcccgcgtgggcggatattcctgcccctacgcatgaagaacttact

SEQ ID NO: 645724 - DNA, 75 bp, synthetic construct
  source 1..75: mol_type = other DNA
atgattgataaatataaatcagagggatgggatttatcagatgtgaaagaagtgaatcaaaatattgtcagtgag

SEQ ID NO: 645725 - DNA, 75 bp, synthetic construct
  source 1..75: mol_type = other DNA
atgcagaaatatattttcagtgccgataaaaatgcgttttttcctgtggagcttaaaatcgcttatcaggaatcc

SEQ ID NO: 645726 - DNA, 75 bp, synthetic construct
  source 1..75: mol_type = other DNA
tcgatgaagccaataattatatgcacggtaagcaatggccaggtaaagcggctattggtcgtctgaaaggtgagg

SEQ ID NO: 645727 - DNA, 75 bp, synthetic construct
  source 1..75: mol_type = other DNA
caggtgaaaccgtgaacggcggaacactggaaaatcatgacaaccagattgtcctcggtacggccaacggaatga

SEQ ID NO: 645728 - DNA, 75 bp, synthetic construct
  source 1..75: mol_type = other DNA
aataaacaacaacttgatggcgaactggataagattatcaatccatttgatttagaagcgaaattccgtgctttt

SEQ ID NO: 645729 - DNA, 75 bp, synthetic construct
  source 1..75: mol_type = other DNA
cgtgcgatcaatgatgcggagtcggtactggggacaacccgacgtcgccgtcgtccgctgggagtgaggttatga

SEQ ID NO: 645730 - DNA, 75 bp, synthetic construct
  source 1..75: mol_type = other DNA
ttgataaagaatttggcgttcaaccgcagcagttacccgattactgggggctggcggggatcagcagttcaaagg

SEQ ID NO: 645731 - DNA, 75 bp, synthetic construct
  source 1..75: mol_type = other DNA
tttctgtgtcgcgatattgcccgcttacaaaccgacttgcgtatcgacggcaatttacagcaattgcggttggta

SEQ ID NO: 645732 - DNA, 75 bp, synthetic construct
  source 1..75: mol_type = other DNA
taagaaggtgggctttaaggttacgggacgctctgaggtggacgatttggggaaaccgtatccgttattgaatct

SEQ ID NO: 645733 - DNA, 75 bp, synthetic construct
  source 1..75: mol_type = other DNA
ccgttgtgggtcgcggttaatgagcgggatcagccggttgggtttatgttgctaagtgggcagcatatggatgcg

SEQ ID NO: 645734 - DNA, 75 bp, synthetic construct
  source 1..75: mol_type = other DNA
aaccgcgtgaatactatgaaaaagatgaagaattacatcaggtactgacgcaaatcggcagcggtgtgttcagcc

SEQ ID NO: 645735 - DNA, 75 bp, synthetic construct
  source 1..75: mol_type = other DNA
cgatctgtctgaacagatttcgctggcggggacggaagcttccggcaccagtaacatgaagtttgcgcttaacgg

SEQ ID NO: 645736 - DNA, 75 bp, synthetic construct
  source 1..75: mol_type = other DNA
aattggcgataagctgaaagtggtgtttatcccgaactacagcgtcagtctggcgcagttgatcattccagcagc

SEQ ID NO: 645737 - DNA, 75 bp, synthetic construct
  source 1..75: mol_type = other DNA
atccagccatagcctgttccagtatcgaatgttacccttatcgcctgatctttaagggggttatcgtggctgttc

SEQ ID NO: 645738 - DNA, 75 bp, synthetic construct
  source 1..75: mol_type = other DNA
caagaacaattatctgtaccacctgagaaaaaagaaagacgaattgccagcattgaaaatatatcgaaagagctt

SEQ ID NO: 645739 - DNA, 75 bp, synthetic construct
  source 1..75: mol_type = other DNA
cgatgctgaacatcgccaatatgggctacttctcttctgaccggaccatcaaagagtacgccgatcttatctggc

SEQ ID NO: 645740 - DNA, 75 bp, synthetic construct
  source 1..75: mol_type = other DNA
tttgaagatgccgatttcggtattcaggcggcccgtgcagcaggcatggacgctgtggatgttcgcttgctgtga

SEQ ID NO: 645741 - DNA, 75 bp, synthetic construct
  source 1..75: mol_type = other DNA
tgggggcatatcggttcaattgaagttgtatacccagatcagcctgagcaagcgaaaatactaacctccctcgac

SEQ ID NO: 645742 - DNA, 75 bp, synthetic construct
  source 1..75: mol_type = other DNA
atgagccagtacagagcatatcccgcgtataaggattccggcgttgagtggattgggcaggtgcctgagcattgg

SEQ ID NO: 645743 - DNA, 75 bp, synthetic construct
  source 1..75: mol_type = other DNA
aaccgtgacagcgatgaagactggtacctgcgcagtgaatatgcatatcgttctgaagtcccccggtatgcctcc

SEQ ID NO: 645744 - DNA, 75 bp, synthetic construct
  source 1..75: mol_type = other DNA
ttatggcgctgtaatgaaaattgatcctgctgctcccgactggcctgagcgtgactattttatcctgtccaaagg

SEQ ID NO: 645745 - DNA, 75 bp, synthetic construct
  source 1..75: mol_type = other DNA
catatacattttgttaccggagaggttagaaaaaaaaatagttatttcgatactcttacaaatatggggccaata

SEQ ID NO: 645746 - DNA, 75 bp, synthetic construct
  source 1..75: mol_type = other DNA
atgaagattttttccgtccgacagaccgtttttcccgcgctgcttgtcctttcccccaccgtttttgccgctgat

SEQ ID NO: 645747 - DNA, 75 bp, synthetic construct
  source 1..75: mol_type = other DNA
tgactggtgtcaccgatgaacatgctatcggtaaagccttcaccgaatctctgccattcaccgcactgttgacgg

SEQ ID NO: 645748 - DNA, 75 bp, synthetic construct
  source 1..75: mol_type = other DNA
ttgggccagtcccccgactggtacaaactcgccctcatcattttcttaatcgtaaatccgttaattttcctcatc

SEQ ID NO: 645749 - DNA, 75 bp, synthetic construct
  source 1..75: mol_type = other DNA
gatgattgcgcttaatggctcgcccacgtggcgcattgctcaggcgattattgaactgaatcaggccgatctcga

SEQ ID NO: 645750 - DNA, 75 bp, synthetic construct
  source 1..75: mol_type = other DNA
gccttaacgatgcctgttgtgggaccgcccatagcagtgtttattgttcgattcttgaagctcttgaacaagggg

SEQ ID NO: 645751 - DNA, 75 bp, synthetic construct
  source 1..75: mol_type = other DNA
gcattgtgcaggaaagattgcaggaagtcgaagcacggatagccgagttgcagagtatgcagcgttccttgcaac

SEQ ID NO: 645752 - DNA, 75 bp, synthetic construct
  source 1..75: mol_type = other DNA
tttgtaatgcgttgatgccggttattcccgtacgtgcctgtggcgatatctccttttcgtcaacaacgctatatg

SEQ ID NO: 645753 - DNA, 75 bp, synthetic construct
  source 1..75: mol_type = other DNA
ttacgctatcgcggacgcgagaaaacctttagcgcaggctacacccgcaccaccaacaaccgtatggagttgatg

SEQ ID NO: 645754 - DNA, 75 bp, synthetic construct
  source 1..75: mol_type = other DNA
caaatcatccatttaaaacacgttcaggtaaaccattgaaggtactagccggatttgtcgatagttcaaacggca

SEQ ID NO: 645755 - DNA, 75 bp, synthetic construct
  source 1..75: mol_type = other DNA
acttcgcggcctgacagcacctcgcatatttcttgatgaaatatccaacgtggacgcgagcggggatgaaggcaa

SEQ ID NO: 645756 - DNA, 75 bp, synthetic construct
  source 1..75: mol_type = other DNA
tggtcactccctgattaaccttaacgtaaacttaggcaaatcaaacgtccgtcaattactcaaccgtgctgtatc

SEQ ID NO: 645757 - DNA, 75 bp, synthetic construct
  source 1..75: mol_type = other DNA
cgcaaaggtaatctgatcgccctgcgcgaactggcactgcgccgtactgccgatcgcgtagatgagcaaatgcgc

SEQ ID NO: 645758 - DNA, 75 bp, synthetic construct
  source 1..75: mol_type = other DNA
gctaccgtcattaatgtggtgagtttcgatctcttttttatcgccccacgcggcacgctcgccgtctctgatgtg

SEQ ID NO: 645759 - DNA, 75 bp, synthetic construct
  source 1..75: mol_type = other DNA
tctgtcgagaaatgacggtgaagaccagaccagaagaaacgctgaaaatatgttcggagatgacgagcctgttta

SEQ ID NO: 645760 - DNA, 75 bp, synthetic construct
  source 1..75: mol_type = other DNA
taattaaagcatttgtttccagcggacaatttttattaccgctaatcattagcctgttagggaaggtgcgaataa

SEQ ID NO: 645761 - DNA, 75 bp, synthetic construct
  source 1..75: mol_type = other DNA
gacgatccggcgcatatcaacgacgttatcgtcgaagccgccatcagtaccattctcgattgtgaagactcggtc

SEQ ID NO: 645762 - DNA, 75 bp, synthetic construct
  source 1..75: mol_type = other DNA
ctgttgaaaaatggctcagaaaccacgttacgtaccccggcgcagtttgtcggctaccgtggcgatgctgctgca

SEQ ID NO: 645763 - DNA, 75 bp, synthetic construct
  source 1..75: mol_type = other DNA
acgccggagttggtgctgatgcaggacggcgcattcagcctgacggcaccgccggtacagggaatgccggtgcag

SEQ ID NO: 645764 - DNA, 75 bp, synthetic construct
  source 1..75: mol_type = other DNA
gcttttcacagcaaaaaattgctgaggcaataacacaactggaaaaaagcacggcatcaaaaatgtcaaagccat

SEQ ID NO: 645765 - DNA, 75 bp, synthetic construct
  source 1..75: mol_type = other DNA
ggggccaacctgagccggctgaaagagtggatttttgaccccaataaagtgatcgaagaaccgcccctggatatt

SEQ ID NO: 645766 - DNA, 75 bp, synthetic construct
  source 1..75: mol_type = other DNA
gcgtaacggcaaaatcctcggctgggcatggggcgcgggatttgttgacggtatcggtcagggaatggagcgtgc

SEQ ID NO: 645767 - DNA, 75 bp, synthetic construct
  source 1..75: mol_type = other DNA
aatgaagcctcactgcgtgatgtgcagcaacgctgcccggcaagtgtaaaaatggagcaatttcgccccaatctg

SEQ ID NO: 645768 - DNA, 75 bp, synthetic construct
  source 1..75: mol_type = other DNA
gccgctgatgataccgccaacatcacgcaacaaccggacgccaatgtagatattgactggcagggacaggcattt

SEQ ID NO: 645769 - DNA, 75 bp, synthetic construct
  source 1..75: mol_type = other DNA
cgttacgaagtgcggctggagccgcgtatggcgctgctggcccgcagccgccagaatgccatctaccagaatctg

SEQ ID NO: 645770 - DNA, 75 bp, synthetic construct
  source 1..75: mol_type = other DNA
cacggtgccgatgcagctgcgtatcaccggcctggtggaaatgccgaacagcaagacgtatgacgcaacgggatg

SEQ ID NO: 645771 - DNA, 75 bp, synthetic construct
  source 1..75: mol_type = other DNA
ctgaagcagctgggcaacctgaatccgcagcagtttatgtccggcagccagggagggggcaacgatggcaaataa

SEQ ID NO: 645772 - DNA, 75 bp, synthetic construct
  source 1..75: mol_type = other DNA
accagaagattgccggtcacgtgtcctttatgggcaagaacggcatcaagggcgaagtggtcatgcgtaacggtc

SEQ ID NO: 645773 - DNA, 75 bp, synthetic construct
  source 1..75: mol_type = other DNA
aaggcggtgacaaaagtgatacggtttttggcgcaggccttgtggtgggatacgatttttatcagcactacaatg

SEQ ID NO: 645774 - DNA, 75 bp, synthetic construct
  source 1..75: mol_type = other DNA
ttgtcacgttcaggctctgctgacaacttcgcatggaaccttggcgcgggtgtccgctatgacgtaaccccggat

SEQ ID NO: 645775 - DNA, 75 bp, synthetic construct
  source 1..75: mol_type = other DNA
tcacgactatcagtccagaaaaaggacaaaagcacccggctggcgaaccgttaaaaacgctgcaatcttttcgca

SEQ ID NO: 645776 - DNA, 75 bp, synthetic construct
  source 1..75: mol_type = other DNA
cattggtcttacacatgctctggcagatgacagtggtctggccttcgatcgcatctttatgattacggaacctga

SEQ ID NO: 645777 - DNA, 75 bp, synthetic construct
  source 1..75: mol_type = other DNA
tcagcaatgggcgatgatggcaccattctttgctgtagctgtgtaccgaagactgcacttaagttggcgcgttag

SEQ ID NO: 645778 - DNA, 75 bp, synthetic construct
  source 1..75: mol_type = other DNA
aaagcgcagatcggtaaaggaatgtgggcaatgccggatctgatggctgacatgtacagccagaaaggtgatcaa

SEQ ID NO: 645779 - DNA, 75 bp, synthetic construct
  source 1..75: mol_type = other DNA
atactcagccagacttcgaagccgttccggtgaagcagagcggtgtgcaactgatggcgtcagagtttaacgcga

SEQ ID NO: 645780 - DNA, 75 bp, synthetic construct
  source 1..75: mol_type = other DNA
tgaaacggtgatcagcacggggattcctgggtttggtattcggattcagaaggccagcgatagttcgatactcga

SEQ ID NO: 645781 - DNA, 75 bp, synthetic construct
  source 1..75: mol_type = other DNA
gctgatggggaaccttgccgtggcagcggaaagtaaaccggtgttattgacgttgcacgttttggtggatgggcc

SEQ ID NO: 645782 - DNA, 75 bp, synthetic construct
  source 1..75: mol_type = other DNA
cggcgaaacatcaccgcttttttcgcaaagccaggcaaaactggcacgccagttccaccagaaaattgctggtta

SEQ ID NO: 645783 - DNA, 75 bp, synthetic construct
  source 1..75: mol_type = other DNA
agttcccgtcaagcagagtggggctcagctaatggcgtcggaatttaatgccagtatgaccgtagtggtggatta

SEQ ID NO: 645784 - DNA, 75 bp, synthetic construct
  source 1..75: mol_type = other DNA
acctgtgaaagagaatggtgcgcagctagcgacaggagaatttaacgccagattgaccatggtggtggattacca

SEQ ID NO: 645785 - DNA, 75 bp, synthetic construct
  source 1..75: mol_type = other DNA
gacgcgaatgcaaagccgtcggcgtggtcgtttcggctggataatattctgttcgatcaagggcggatcgccatt

SEQ ID NO: 645786 - DNA, 75 bp, synthetic construct
  source 1..75: mol_type = other DNA
gcagaaaagtcgaaacggtctgaacagaagaagggcgaaaaaagcgttcagcctgcgggcaaagtgctgccttat

SEQ ID NO: 645787 - DNA, 75 bp, synthetic construct
  source 1..75: mol_type = other DNA
gccgactggtagcgaaaatcgacactgaaaaatcgtcggtctttgattatcgcggctttaacgggcgcattggtg

SEQ ID NO: 645788 - DNA, 75 bp, synthetic construct
  source 1..75: mol_type = other DNA
gattgttgggctgaacgtcggaaactacattgtcggtgcgattttcggtgatgatgaggtgcgggtgaactgcgc

SEQ ID NO: 645789 - DNA, 75 bp, synthetic construct
  source 1..75: mol_type = other DNA
ctgcggcggcgttactggcgctgatctcaccttcagaaggtgaagctaatcagtgccggatgattttgtcgcaga

SEQ ID NO: 645790 - DNA, 75 bp, synthetic construct
  source 1..75: mol_type = other DNA
tcaaaccgaccatcaaccagaaagtctctgcggaactgaatcgccccttcgccatccgtggcgatcttggcgtgg

SEQ ID NO: 645791 - DNA, 75 bp, synthetic construct
  source 1..75: mol_type = other DNA
caggacagcgttgccgcattaggtatgcgcgtgctgggtaatccgtacggcaacgacccgcgcatcatctccggt

SEQ ID NO: 645792 - DNA, 75 bp, synthetic construct
  source 1..75: mol_type = other DNA
taccagcaggtaataagcacgcatggatgtgcgccctgaatgatttttttaatgaccctgggcgtttttatcaga

SEQ ID NO: 645793 - DNA, 75 bp, synthetic construct
  source 1..75: mol_type = other DNA
aaagcatttaggtggcacggatattcaggctgggaatcagtcgtttggtggaagatcggcgagagaagtagctcg

SEQ ID NO: 645794 - DNA, 75 bp, synthetic construct
  source 1..75: mol_type = other DNA
atgaagacggatcaatattagtgttaaagcatttaggtggcacggatattcaggctgggaatcagtctcacaaac

SEQ ID NO: 645795 - DNA, 75 bp, synthetic construct
  source 1..75: mol_type = other DNA
gccgcaaccggagcacgtgacggtggaaaccacgggcattgatagcgaaatcaccagccaggcggggccacagct

SEQ ID NO: 645796 - DNA, 75 bp, synthetic construct
  source 1..75: mol_type = other DNA
cgcagggtaggcgttaccggtatatccgctggggagtgacaccggacgataattttcatgaaggtaaatgtggtt

SEQ ID NO: 645797 - DNA, 75 bp, synthetic construct
  source 1..75: mol_type = other DNA
gacccggaatatgaatatgttctccctgaataagttgtgtgatgtcgttgtggtgccttctgaagaaatgcgttc

SEQ ID NO: 645798 - DNA, 75 bp, synthetic construct
  source 1..75: mol_type = other DNA
ggtgtggcatgggccgctcagcaactcggacagaatgcggtgatttacatgccgaaaggttctgctcaggaacgc

SEQ ID NO: 645799 - DNA, 75 bp, synthetic construct
  source 1..75: mol_type = other DNA
aacctgacaaagctgactgtatttatcgctctggcgtcaaaggcgacatcgtcaacgttggcggcgatatggcca

SEQ ID NO: 645800 - DNA, 75 bp, synthetic construct
  source 1..75: mol_type = other DNA
cattatcacccgcaacgtcaaagcctgatggaaaaactggcgctgaacaaagatgccgtggtgctggttatcagc

SEQ ID NO: 645801 - DNA, 75 bp, synthetic construct
  source 1..75: mol_type = other DNA
gtgtctggggctaaaccgcgcgaagggaaccctggtgttgaggttggcgattatgcggagtacatggagttgggc

SEQ ID NO: 645802 - DNA, 75 bp, synthetic construct
  source 1..75: mol_type = other DNA
ttttgaaggccgcgtagcaacgtcgctacgtgagcatatcaaattacacaacatggaagatttgtttggtgaagt

SEQ ID NO: 645803 - DNA, 75 bp, synthetic construct
  source 1..75: mol_type = other DNA
acgctgtttgaaccgggtgaaatggtccgtgttaatgatggtccgttcgctgacttcaacggtgttgttgaagaa

SEQ ID NO: 645804 - DNA, 75 bp, synthetic construct
  source 1..75: mol_type = other DNA
gacggcttcggtatgtccacttcctacgactttgacttcggtttaagtctgggtgcagcttattctaactcagac

SEQ ID NO: 645805 - DNA, 75 bp, synthetic construct
  source 1..75: mol_type = other DNA
agctggcggctcttttccaccaaaataccaccatgctgatggctggctggggaatgcaacgtcaacagtttggcg

SEQ ID NO: 645806 - DNA, 75 bp, synthetic construct
  source 1..75: mol_type = other DNA
cgttagcaacagagctggaaaactccttgcagagcgcggttcgcgaccaggttcacagcaatacgcgggtgcgat

SEQ ID NO: 645807 - DNA, 75 bp, synthetic construct
  source 1..75: mol_type = other DNA
gcatgatgggcgaggcgctaaaccgcttaagccagccgcagttacgtcaggccgtgcaactcctgacacgaacgg

SEQ ID NO: 645808 - DNA, 75 bp, synthetic construct
  source 1..75: mol_type = other DNA
agtcgagcggttcgttaacatttggagattgctacatatcacttaacgagttcgccgcagagcttcgcaaaggag

SEQ ID NO: 645809 - DNA, 75 bp, synthetic construct
  source 1..75: mol_type = other DNA
atgccgattacgaagcagagctaggtatggagcgtggtggattcagtgatgcgcttaacgaaatcaaaaccccag

SEQ ID NO: 645810 - DNA, 75 bp, synthetic construct
  source 1..75: mol_type = other DNA
gagcgtaatgatctcaccatgaccggcgattacagtaatcagcatctggtgccgatgaagcaagtggtgccgcca

SEQ ID NO: 645811 - DNA, 75 bp, synthetic construct
  source 1..75: mol_type = other DNA
caacccgacccgccgcgctgcggtgctgccttccatgcagggcagtttgccgggtggcaccgatgcggtagataa

SEQ ID NO: 645812 - DNA, 75 bp, synthetic construct
  source 1..75: mol_type = other DNA
gcgagagtgatggcattgcaaaaaatgccgaatgggccgcggagatttgcggtgttggcgcagagaaaatccgcg

SEQ ID NO: 645813 - DNA, 75 bp, synthetic construct
  source 1..75: mol_type = other DNA
agctgatctgcattgatccaatgcgatcggaaaccgtcgatttctttggcgataaaatggagtgggtggcaccgc

SEQ ID NO: 645814 - DNA, 75 bp, synthetic construct
  source 1..75: mol_type = other DNA
gctggaacatagcgatgtcgtggtgctgtggagtgctaatccactcaatacgctgaaaattgcgtggaatgcatc

SEQ ID NO: 645815 - DNA, 75 bp, synthetic construct
  source 1..75: mol_type = other DNA
attacggttatcgggattgtccaggccatccgatgtggctggaacccgatgagtggtggggcaacgccgaagcag

SEQ ID NO: 645816 - DNA, 75 bp, synthetic construct
  source 1..75: mol_type = other DNA
cgctggagcgtttatcgcttctctggccggacggcaaactgacattaccgcgcgttgagcaggcagtgaatgatg

SEQ ID NO: 645817 - DNA, 75 bp, synthetic construct
  source 1..75: mol_type = other DNA
aggacagcagaatgctgatgaatgtggggatgaatgcggaaattaaggataatatgcgttttggcttggagctgg

SEQ ID NO: 645818 - DNA, 75 bp, synthetic construct
  source 1..75: mol_type = other DNA
attgtcacgcgacaggggggctgattgctgtatccgaactggcctccagagttatgaagaaagccgctcgcggca

SEQ ID NO: 645819 - DNA, 75 bp, synthetic construct
  source 1..75: mol_type = other DNA
caagttgtcaccgtatgacaccgaagagatgcttgaggctatgcgtatttttctggaagaacaggaaggtgagta

SEQ ID NO: 645820 - DNA, 75 bp, synthetic construct
  source 1..75: mol_type = other DNA
aagccagcggttcagacaacacactgaatgtcagctttatgaagaacccggctccggggcagtccctgaacatcc

SEQ ID NO: 645821 - DNA, 75 bp, synthetic construct
  source 1..75: mol_type = other DNA
atcctggttcagtggcctcttctgtcacccctgttctggctgccgggttatacagtggatataacgcagcatact

SEQ ID NO: 645822 - DNA, 75 bp, synthetic construct
  source 1..75: mol_type = other DNA
cgaaaaccgcaacggactttatggcgtcaggttataaatccttcctgacagaggtcaataatctgaacaagcgta

SEQ ID NO: 645823 - DNA, 75 bp, synthetic construct
  source 1..75: mol_type = other DNA
gccgttacgcgcgttgtttgataagcatcgcgtttggcagaaccggcggggcatgatgggcgaggcattaaatcg

SEQ ID NO: 645824 - DNA, 75 bp, synthetic construct
  source 1..75: mol_type = other DNA
gcgtacaggtgacctgtcagacaccagagcaagcccaacttcctcgctgggttgcagcccgggcaaaacagctca

SEQ ID NO: 645825 - DNA, 75 bp, synthetic construct
  source 1..75: mol_type = other DNA
gccggacggcaaactgacattaccgcgcgttgagcaggcagtgaatgatgccgcgcatttcaccccttttcattg

SEQ ID NO: 645826 - DNA, 75 bp, synthetic construct
  source 1..75: mol_type = other DNA
acgaaatcaaggttatcaaccgtggagggcaggcatattgcgtaaaagatggagtgcaagttaatcccatgtatg

SEQ ID NO: 645827 - DNA, 75 bp, synthetic construct
  source 1..75: mol_type = other DNA
tcccggcgcgggtcaccagcacggtgaagaacgatatctatgcccatatcgacaaggacgggcgctaccgggtca

SEQ ID NO: 645828 - DNA, 75 bp, synthetic construct
  source 1..75: mol_type = other DNA
catcgcgtttggcagaaccgccggggcatgatgagtgaggcgttaaatcgcttaagccagccgcagttacgtcag

SEQ ID NO: 645829 - DNA, 75 bp, synthetic construct
  source 1..75: mol_type = other DNA
tttacggaaggaaaaagtgagctgcaatggctggaaacgttttataacgttgcccggcagcgcggggcaagtcag

SEQ ID NO: 645830 - DNA, 75 bp, synthetic construct
  source 1..75: mol_type = other DNA
taaaaatgaaggtgggattatatttgactttcccgcagctgtagccgtgagcttctctcgggggatatacttcac

SEQ ID NO: 645831 - DNA, 75 bp, synthetic construct
  source 1..75: mol_type = other DNA
tactggcatctatatctaatcgctaaatcagtacttgaaaacaaagattctgttgtcaatggaagagatatagat

SEQ ID NO: 645832 - DNA, 75 bp, synthetic construct
  source 1..75: mol_type = other DNA
tttcagaactacgaaaagcccgtacagggaaaatcgacccgaatgtttcggcatgggctgaaagcgtggatgcat

SEQ ID NO: 645833 - DNA, 75 bp, synthetic construct
  source 1..75: mol_type = other DNA
agcatcaaatcagattaaagatccagattttataaaagcacttaataaagttcgtttggaatacgctaaagaaat

SEQ ID NO: 645834 - DNA, 75 bp, synthetic construct
  source 1..75: mol_type = other DNA
tagtgtccgaactgcggaaagcgcgaacggggaagatagatcctaatgtcgcggcgtgggctggaagcgtagatg

SEQ ID NO: 645835 - DNA, 75 bp, synthetic construct
  source 1..75: mol_type = other DNA
tagtgtcagaactgcgaaaagcgggtacaggaaaaatagatcctaatgtggcgatatgggctggaagcgtggatg

SEQ ID NO: 645836 - DNA, 75 bp, synthetic construct
  source 1..75: mol_type = other DNA
tctgtgccggtgcctaaccggatacagcgtaaggtgtttacccgtaatgagggaaaacagggaccatcactgccg

SEQ ID NO: 645837 - DNA, 75 bp, synthetic construct
  source 1..75: mol_type = other DNA
cctgtcatcgtcacaggatgaagcccgttacgaagtgcgccttgaaccccgaatggcgctgctggcccgcagccg

SEQ ID NO: 645838 - DNA, 75 bp, synthetic construct
  source 1..75: mol_type = other DNA
tgaaaaccgtggaaggagatggcgctggaacgcacgtcacagagcagagcggaagaagacaatccggaaagtccg

SEQ ID NO: 645839 - DNA, 75 bp, synthetic construct
  source 1..75: mol_type = other DNA
gtcaattatctcaaacccaactctgtcagacatttgcagaaaaatttactgtgaccgaggaattactgctgtctt

SEQ ID NO: 645840 - DNA, 75 bp, synthetic construct
  source 1..75: mol_type = other DNA
gtgacggcagcgcagatgcagaagcagtatgaggaaatccgtcgcgagctggatgtcctgaacaaacagcgcggt

SEQ ID NO: 645841 - DNA, 75 bp, synthetic construct
  source 1..75: mol_type = other DNA
gcaagacgtatgacgcaacgggatgttttgtggggctggaagcctggggggatgtgtccagtgaacgtgccattg

SEQ ID NO: 645842 - DNA, 75 bp, synthetic construct
  source 1..75: mol_type = other DNA
cggcggtgtacagcgcagcaaagggcatgggctacacgctgaccagcgccttcggggatgctgcatctgatgtgg

SEQ ID NO: 645843 - DNA, 75 bp, synthetic construct
  source 1..75: mol_type = other DNA
tcaggttatctacggtaacaacggtctgaatgcttctggtcaaaatgctgaagtatgggcagctggtctgaaata

SEQ ID NO: 645844 - DNA, 75 bp, synthetic construct
  source 1..75: mol_type = other DNA
cagtgggaatttaacattggcgcaaacggtcctgaaagcgacaaaggtaataccgcaacgcgtctggcatttgca

SEQ ID NO: 645845 - DNA, 75 bp, synthetic construct
  source 1..75: mol_type = other DNA
cggcgatggtcgtaaactttctaaagagaatggtgacggttatggtatgtcaacctcctataactttgacttcgg

SEQ ID NO: 645846 - DNA, 75 bp, synthetic construct
  source 1..75: mol_type = other DNA
gccctgggcatccaatgtggctggagccggacgaatggcagggcaatgccgaaccagaacagttgcaggtacttt

SEQ ID NO: 645847 - DNA, 75 bp, synthetic construct
  source 1..75: mol_type = other DNA
ctgaattacagttcacttcgcgaattgtacgcggtggcgaaccgcgagcctgtcaccattcatcccgaagatgcg

SEQ ID NO: 645848 - DNA, 75 bp, synthetic construct
  source 1..75: mol_type = other DNA
atggttactcctactcttaatttcgaccactcgcaccacaagctcaaaattcgcggcctgcaaagtccggtggat

SEQ ID NO: 645849 - DNA, 75 bp, synthetic construct
  source 1..75: mol_type = other DNA
tcgacgccagcaagcccgaaggtgaaaaccaggaaaaaacccgtttaaccttcgccggtttgaaatataacgagt

SEQ ID NO: 645850 - DNA, 75 bp, synthetic construct
  source 1..75: mol_type = other DNA
ggcgagatgggccgcaaagatctgatcaaaatcgaaaatacctttttaagtgaggatcaggttgatcagctggcg

SEQ ID NO: 645851 - DNA, 75 bp, synthetic construct
  source 1..75: mol_type = other DNA
gcccgaacagcaactgtatcagccatgccgaaccggtttcttccagctttgccgtgcgaaaacgcgccaatgata

SEQ ID NO: 645852 - DNA, 75 bp, synthetic construct
  source 1..75: mol_type = other DNA
ttggtctggttgatggtctgaattttgctgtgcaatatcaaggtaagaacagcaatcgtggcgttactaaacaaa

SEQ ID NO: 645853 - DNA, 75 bp, synthetic construct
  source 1..75: mol_type = other DNA
tgcttatgatgccgcagcttataccgatatgttagttgaatggggtggtgattcctgggcttccgctgacaactt

SEQ ID NO: 645854 - DNA, 75 bp, synthetic construct
  source 1..75: mol_type = other DNA
aagtttaacctgctggataaagacgatgcagcgattaccgatgccgcaactgatgaccagtttgcagttggtatc

SEQ ID NO: 645855 - DNA, 75 bp, synthetic construct
  source 1..75: mol_type = other DNA
cgatcgaattcagcaaccaggagctggatgatctgattatccgtcgtaccgatggttctccaacctataacttct

SEQ ID NO: 645856 - DNA, 75 bp, synthetic construct
  source 1..75: mol_type = other DNA
cggggcggtcagcgtaatgcagtatcgtgatgacggttatctgccagaagcactgctgaactatctggtgcgtct

SEQ ID NO: 645857 - DNA, 75 bp, synthetic construct
  source 1..75: mol_type = other DNA
ttgtggcggcgggcgaaaacccttggtcagaaaccggcttacttctgggtatggctggtgatgctgggcctgact

SEQ ID NO: 645858 - DNA, 75 bp, synthetic construct
  source 1..75: mol_type = other DNA
gagccgtgctgttgcaaaaggcggctccccggtaacgttccataaactgaccaccagtaacctcaccggtcaggg

SEQ ID NO: 645859 - DNA, 75 bp, synthetic construct
  source 1..75: mol_type = other DNA
tgcaaaacgctgaaagagatggcacagacttgccgttatttctacgaagattttgctgagttcgatgccgacgcc

SEQ ID NO: 645860 - DNA, 75 bp, synthetic construct
  source 1..75: mol_type = other DNA
cacgtttctatgatcaacggcgatgacggcaaaaaactgtccaaacgtcacggggcggtcagcgtaatgcagtat

SEQ ID NO: 645861 - DNA, 75 bp, synthetic construct
  source 1..75: mol_type = other DNA
ggcaccacgctctatggctataccgcggacactgccgggcatgtaatggtggataacgactgcggttttttacgt

SEQ ID NO: 645862 - DNA, 75 bp, synthetic construct
  source 1..75: mol_type = other DNA
cacagcccgtttattatgtcgcgtatggcgctggcggcagcgcagggcggtgcggcaggtatccgtgctaacagc

SEQ ID NO: 645863 - DNA, 75 bp, synthetic construct
  source 1..75: mol_type = other DNA
cccggaacgcgccgcacgttgcctggcattaggcgctcatactgtggtggttgggggggcaataactcgtccgca

SEQ ID NO: 645864 - DNA, 75 bp, synthetic construct
  source 1..75: mol_type = other DNA
tgatgtggtcagtaccggcgatattgttaacgcaggggagatttactttgataatcagacaacaccggacgccgt

SEQ ID NO: 645865 - DNA, 75 bp, synthetic construct
  source 1..75: mol_type = other DNA
tgcgcagtgaaaatgcttatcgtgcagaagtccctgcgtattttcatgaaaggagatcactcaataacttccatc

SEQ ID NO: 645866 - DNA, 75 bp, synthetic construct
  source 1..75: mol_type = other DNA
gtactactgatggcggatatagcaaccgtagacgaggcggtaacagccgagcgtctgggttttgactgtgtgggc

SEQ ID NO: 645867 - DNA, 75 bp, synthetic construct
  source 1..75: mol_type = other DNA
caaagcagtaatagcccgatttattggtgattccaaaatgtggcttgaagcaaataaagcgatgaaatcagctat

SEQ ID NO: 645868 - DNA, 75 bp, synthetic construct
  source 1..75: mol_type = other DNA
ggtgattcaaaaatgtggcttgaagcaaataaagcgatgaaatcagcgatcaacactccgtggtatcgcaggaaa

SEQ ID NO: 645869 - DNA, 75 bp, synthetic construct
  source 1..75: mol_type = other DNA
tacatcatatggaagggcatctgttagcgccgatgctggaagataatccgccagagttcccgtttgtcgcgctgc

SEQ ID NO: 645870 - DNA, 75 bp, synthetic construct
  source 1..75: mol_type = other DNA
gggctggtcccacggcgatcaggaaatcttcacccgtgaagaaatgatcaaatacttcaccctgaacgcggttag

SEQ ID NO: 645871 - DNA, 75 bp, synthetic construct
  source 1..75: mol_type = other DNA
tttggtcaaaagaggtctttagcagaacacgtctatgccgagtttgaacgtcgcggaattaacgtttctatatca

SEQ ID NO: 645872 - DNA, 75 bp, synthetic construct
  source 1..75: mol_type = other DNA
atcctgccagatgatttaacaccaggaaaatacaaaaaaatttatctgtctggggatggttctgctggtctacca

SEQ ID NO: 645873 - DNA, 75 bp, synthetic construct
  source 1..75: mol_type = other DNA
atgtttagcataagatccctactacctattaacgccagcgtatcagttccgacaaaccaatctcaatccatccca

SEQ ID NO: 645874 - DNA, 75 bp, synthetic construct
  source 1..75: mol_type = other DNA
gccagcctacaagggagagcggtgtatcacccatcctgtagtctgtcccgcaaattgggtgtgaaggatgaacca

SEQ ID NO: 645875 - DNA, 75 bp, synthetic construct
  source 1..75: mol_type = other DNA
aggatctcacctcttttattgttaataaattaggggtagtcgatgtaggtgccagtttgcaagggagagctgtgt

SEQ ID NO: 645876 - DNA, 75 bp, synthetic construct
  source 1..75: mol_type = other DNA
ggtgattccaaaatgtggcttgaagcaaataaagcgatgaaatcagctatcaacattccgtggtatcgcaggaaa

SEQ ID NO: 645877 - DNA, 75 bp, synthetic construct
  source 1..75: mol_type = other DNA
tgttaccgttcacgcaattggcaaaacacgcagcattgagcgtatcaataaagcgctggcgtttattgctgaacg

SEQ ID NO: 645878 - DNA, 75 bp, synthetic construct
  source 1..75: mol_type = other DNA
gtatgtcgctactcatttacagtggcatatcgagcaggaaaaaattgatacccgcaacggcccgcaactggcgga

SEQ ID NO: 645879 - DNA, 75 bp, synthetic construct
  source 1..75: mol_type = other DNA
gtcagatcaacattctgaaagcgctgaaagcgccagtaccggtttacgcgcacgtttcgatgatcaatggcgatg

SEQ ID NO: 645880 - DNA, 75 bp, synthetic construct
  source 1..75: mol_type = other DNA
cgctggaaagggtcgagcaaaaagtggcgcgcgcagtcgaagagggggcgagggtagcgttggggggcaaagcgg

SEQ ID NO: 645881 - DNA, 75 bp, synthetic construct
  source 1..75: mol_type = other DNA
tgaaaatcaaacacaaactctcatatgttcgcccaactaaccgcgggaaaatttccgaagaagacactaccgaaa

SEQ ID NO: 645882 - DNA, 75 bp, synthetic construct
  source 1..75: mol_type = other DNA
tgcaggcatttatcggggagttggacggcggcgtatttgaaaccaaaatcggcgcagttctcagtgaagtcgctt

SEQ ID NO: 645883 - DNA, 75 bp, synthetic construct
  source 1..75: mol_type = other DNA
cgcaagttgtagacaccattggggcgggcgacagtcatgcaggtggcgtacttgccgggttggcctctggtctgc

SEQ ID NO: 645884 - DNA, 75 bp, synthetic construct
  source 1..75: mol_type = other DNA
accgttgaggccgatcgcacctgtatctctaacattcaccagggcggcacgccgccggttgaagccgcagccgtc

SEQ ID NO: 645885 - DNA, 75 bp, synthetic construct
  source 1..75: mol_type = other DNA
tctatggcgtctcccgtaatcatatggtcaaaataatcaatcaacttagtcgtgccggctacgtgactgctgttc

SEQ ID NO: 645886 - DNA, 75 bp, synthetic construct
  source 1..75: mol_type = other DNA
atgtgcaggcatttatcggggagctggacggcggcgtatttgaaaccaaaatcggcgcagttctcagtgaagtcg

SEQ ID NO: 645887 - DNA, 75 bp, synthetic construct
  source 1..75: mol_type = other DNA
gtcattgacgtgatcgccgacgcttatgccctcccctggcgtgggtgcgatatcgaactgaaacagcagagcgtt

SEQ ID NO: 645888 - DNA, 75 bp, synthetic construct
  source 1..75: mol_type = other DNA
cttgcgcccctgcatccccgccttatcgcccggcttttatggaggcacggcaccgcccggtgtcgcggaatatgt

SEQ ID NO: 645889 - DNA, 75 bp, synthetic construct
  source 1..75: mol_type = other DNA
atgacgatggcggggaaatccccgccttttcctgccggtccccggacaaagcacaaaggaagtcgccgccggctc

SEQ ID NO: 645890 - DNA, 75 bp, synthetic construct
  source 1..75: mol_type = other DNA
ctcaatcgccaggaagctgaaattgccgccgaacgttttgctttatccaccgatataacgacgcttggcaagcaa

SEQ ID NO: 645891 - DNA, 75 bp, synthetic construct
  source 1..75: mol_type = other DNA
gaggctgagattgccgccgaacgttttgctttatccgcagagataacaacacttggcaagcaatggcaggagaaa

SEQ ID NO: 645892 - DNA, 75 bp, synthetic construct
  source 1..75: mol_type = other DNA
taaagcgcctcggcatcgaagcgggtaatgccttgccgctcggtcagggcgtgtgggcggagattattcgcaacc

SEQ ID NO: 645893 - DNA, 75 bp, synthetic construct
  source 1..75: mol_type = other DNA
cgtgaagattgaagatcagatcggtgagatcctcggcgcgaaagtagtgatcctgctggtgggcgaacgtccggg

SEQ ID NO: 645894 - DNA, 75 bp, synthetic construct
  source 1..75: mol_type = other DNA
ctcatcagcctgtttacggcttacggcgcacgagtaaaaatcgtttatcttgaagtgccatgggcgcaatggaag

SEQ ID NO: 645895 - DNA, 75 bp, synthetic construct
  source 1..75: mol_type = other DNA
gtttctgatgcagaacgtttcactcgctggatgaacgatccgcgcgttgagtatttctgggagcaaagtggctca

SEQ ID NO: 645896 - DNA, 75 bp, synthetic construct
  source 1..75: mol_type = other DNA
ccggtgtggcggttgcgctgtctcttgctgctgtcacgtcagttccggccctggctgctgacacggttgtacagg

SEQ ID NO: 645897 - DNA, 75 bp, synthetic construct
  source 1..75: mol_type = other DNA
ctgaagtttggtgaaacttacatcaaccgtgaaaacttcgaagctatgcaaggattccacgccggatggcgtaaa

SEQ ID NO: 645898 - DNA, 75 bp, synthetic construct
  source 1..75: mol_type = other DNA
agctattgatttcagcacggtagccagtcagttgccagaaccgttaacatttgcaacagcgacggccggtaatca

SEQ ID NO: 645899 - DNA, 75 bp, synthetic construct
  source 1..75: mol_type = other DNA
tatcactctgggcgttcaggccggttatgcccacagcgtcatcggcagcagcgctgaagggtataacggtcaggc

SEQ ID NO: 645900 - DNA, 75 bp, synthetic construct
  source 1..75: mol_type = other DNA
agaaccacggttatgccgttgggctgacctcaagctggtatcagcacggtaatcagaagcagggggcctggttgg

SEQ ID NO: 645901 - DNA, 75 bp, synthetic construct
  source 1..75: mol_type = other DNA
ggttggatagctggctgcaatatgcgtggtttaacaatgatgtttccgaacaagacgatggcgtggatcattacc

SEQ ID NO: 645902 - DNA, 75 bp, synthetic construct
  source 1..75: mol_type = other DNA
ttgaagaccagattggcgagcttcttggcgcgaaagtggtgatcctgctggtgggcgaacgtccggggttagggc

SEQ ID NO: 645903 - DNA, 75 bp, synthetic construct
  source 1..75: mol_type = other DNA
aatcgggattatgcgaattattcattcagtgaaaaagattgagcgtttttttctgacgaataacagcacaaataa

SEQ ID NO: 645904 - DNA, 75 bp, synthetic construct
  source 1..75: mol_type = other DNA
catatctcgtgtatccgtaacaaaatgggaaaatggctcttcaaaacctgacggtgagaatttgcatctactgtc

SEQ ID NO: 645905 - DNA, 75 bp, synthetic construct
  source 1..75: mol_type = other DNA
ttggtagtaacattggttacatgaaaaacactatcagcgaacgtattcggaatcgtcgaaaagacgttggactaa

SEQ ID NO: 645906 - DNA, 75 bp, synthetic construct
  source 1..75: mol_type = other DNA
attgttatttatagtttgttattttgcgcataaaactgtagagcgaaaaggtgttttaattgggaagacgctttt

SEQ ID NO: 645907 - DNA, 75 bp, synthetic construct
  source 1..75: mol_type = other DNA
gtttcaaaattacaaatcccatatatcaacagcaacattcaaatattaacattgttatttatagtttgttatttt

SEQ ID NO: 645908 - DNA, 75 bp, synthetic construct
  source 1..75: mol_type = other DNA
accgggccatgcctacggaatgtttatggaacgctttaaagagctgcataagatacataaacaatccagacagcg

SEQ ID NO: 645909 - DNA, 75 bp, synthetic construct
  source 1..75: mol_type = other DNA
aacacaccttcgctaccgtttctcctgccgtggtgatgttctgaaagtgatcactcatgttaaccatcttgcgaa

SEQ ID NO: 645910 - DNA, 75 bp, synthetic construct
  source 1..75: mol_type = other DNA
ttaattttatttttgttatgttgataactgggaaaatattatactcacctcgaggggagtttctttcatttatgt

SEQ ID NO: 645911 - DNA, 75 bp, synthetic construct
  source 1..75: mol_type = other DNA
aactgatgaagagcggttcaaactattagtcgatgctaaaatactgactaaaaatggcacttttaactctcgttt

SEQ ID NO: 645912 - DNA, 75 bp, synthetic construct
  source 1..75: mol_type = other DNA
cttgcaacgcggacgtatggcctggctgttaatgcaggaaatatcgcaaggcaatcgtgagccgcatgtgttgca

SEQ ID NO: 645913 - DNA, 75 bp, synthetic construct
  source 1..75: mol_type = other DNA
acccgcgcacgacatcgggtatgggcgctgttcaacaaaaacaatccttctccctttgtggaaatactgaaaaat

SEQ ID NO: 645914 - DNA, 75 bp, synthetic construct
  source 1..75: mol_type = other DNA
gcttgcaggaggggagtgatggttttccggctgcggcgcgggagtcgattatggaagaggcgctactgccaccgg

SEQ ID NO: 645915 - DNA, 75 bp, synthetic construct
  source 1..75: mol_type = other DNA
aatagctaatagttcatttagttggtggggggcgtggctaaaaaactatgatttaggtattacaattgcgccaac

SEQ ID NO: 645916 - DNA, 75 bp, synthetic construct
  source 1..75: mol_type = other DNA
attaagtgatgtaattcgatgcaccaattcagtctccgtgcatatacgccgcggagattatgtatcgaacgtcga

SEQ ID NO: 645917 - DNA, 75 bp, synthetic construct
  source 1..75: mol_type = other DNA
tgttccagcttccgtgttgcagctgcatccttcgctgatagtaatcgctgataaagccgctgccgcagaattagc

SEQ ID NO: 645918 - DNA, 75 bp, synthetic construct
  source 1..75: mol_type = other DNA
gtggcgacattaacccggctttttattcatcctgttaaatcgatgcgcggcattggtcttacacataccctggca

SEQ ID NO: 645919 - DNA, 75 bp, synthetic construct
  source 1..75: mol_type = other DNA
atgaaaaaatccctgagaatacagtttggcgagcgggtaaaagagttgcgcgttgccaccggaatgagccaggaa

SEQ ID NO: 645920 - DNA, 75 bp, synthetic construct
  source 1..75: mol_type = other DNA
agaagcgttttggcacgttttctgaagctcttgagtatctccgtagcatggagacagcaaaatggcgtaggccca

SEQ ID NO: 645921 - DNA, 75 bp, synthetic construct
  source 1..75: mol_type = other DNA
gctatccgtggcgatctgggcgtggtgtgggagcggcaaaaacaagaaactggctggcgcagctgggtgccgtgg

SEQ ID NO: 645922 - DNA, 75 bp, synthetic construct
  source 1..75: mol_type = other DNA
tgcgtctacagatgcaggcgacaacggtcgtgattaacggtgaaacagttatcagcacgggtattcctgggtttg

SEQ ID NO: 645923 - DNA, 75 bp, synthetic construct
  source 1..75: mol_type = other DNA
gctaaaaaaatcagcaataggcgatgatggcactattctttgctgtagttgtgtaccgaagactgcgcttaagct

SEQ ID NO: 645924 - DNA, 75 bp, synthetic construct
  source 1..75: mol_type = other DNA
ggcgttatttattccatggcggaagatgtatcccgtctttatcccgttggttttaccattgtggaagtggatgaa

SEQ ID NO: 645925 - DNA, 75 bp, synthetic construct
  source 1..75: mol_type = other DNA
cacgtcttactgcgattgccgaacgggaaatatccgataagaagacggatttacttctgggaatcatcagtgatg

SEQ ID NO: 645926 - DNA, 75 bp, synthetic construct
  source 1..75: mol_type = other DNA
agttgggcggcgacttttcgttagtgcctgacagctacgtgacgatggggccgaaaagcatcatggcggcgaaaa

SEQ ID NO: 645927 - DNA, 75 bp, synthetic construct
  source 1..75: mol_type = other DNA
gctgaaaaaatcagcaatgggcgatgatggcaccattctttgctgtagctgtgtaccgaagactgcgcttaagct

SEQ ID NO: 645928 - DNA, 75 bp, synthetic construct
  source 1..75: mol_type = other DNA
agcgcctgctgaatgaagcaaaggacatcacctcagactggaaaaccgagctggagctgggcaccatcagtgatg

SEQ ID NO: 645929 - DNA, 75 bp, synthetic construct
  source 1..75: mol_type = other DNA
attacccggaagagatgccttatggtgaaaacattcagtatttccgcagtgaagacggacaggatttttatgaat

SEQ ID NO: 645930 - DNA, 75 bp, synthetic construct
  source 1..75: mol_type = other DNA
agcgtttccaccatcatctcgatgctcactggcggcgctggagcgaggaaatgagcgaaattgctgctggcgtat

SEQ ID NO: 645931 - DNA, 75 bp, synthetic construct
  source 1..75: mol_type = other DNA
ttgtttcaccctgcggaagtttccccggatgaagctattgaactggcggctcgcgcagaacaggcagcattacag

SEQ ID NO: 645932 - DNA, 75 bp, synthetic construct
  source 1..75: mol_type = other DNA
ctgctcgactcgctcggtaaacaaattttgcctgactggctgaccattgaagaacacccgcatctgctaaaaggg

SEQ ID NO: 645933 - DNA, 75 bp, synthetic construct
  source 1..75: mol_type = other DNA
tgtcgccgcgtaaactttccaccatgaaagcgccggtgatttttgccaatgaagtcgcaaccggattgtttggtc

SEQ ID NO: 645934 - DNA, 75 bp, synthetic construct
  source 1..75: mol_type = other DNA
atgacgacacaatccagtcctgttattactgatatgaaagtcattccggtcgccggacatgacagcatgttgctt

SEQ ID NO: 645935 - DNA, 75 bp, synthetic construct
  source 1..75: mol_type = other DNA
atgttgttgcttctgcagctataagtattgcagcgatagagatgaaaaccatcctgccagatgatttaacaccag

SEQ ID NO: 645936 - DNA, 75 bp, synthetic construct
  source 1..75: mol_type = other DNA
tatcaccaactgatatcgtcaaccgtctggtagaacataatcttcatgaagtagaagacatcagattaacatctt

SEQ ID NO: 645937 - DNA, 75 bp, synthetic construct
  source 1..75: mol_type = other DNA
cgtacaggcggcgctggatattgcgcgttacacttcgccagatccgtatgcaggcgtggcagacaaggaactgct

SEQ ID NO: 645938 - DNA, 75 bp, synthetic construct
  source 1..75: mol_type = other DNA
ggcctttgacgcaccagatctcgacttgttccaccctgcggaagtttccccggatgaagccattgaactggcggc

SEQ ID NO: 645939 - DNA, 75 bp, synthetic construct
  source 1..75: mol_type = other DNA
atgggaggtatatgtgaggacagtaatccttttttttgtcttttggtatcctgttttactcaggcacaggaaagt

SEQ ID NO: 645940 - DNA, 75 bp, synthetic construct
  source 1..75: mol_type = other DNA
ggtaatgatattgaaacacgcagtaacatacagtgtggttctgttctgttaccggagatgaaaatcgccgggcag

SEQ ID NO: 645941 - DNA, 75 bp, synthetic construct
  source 1..75: mol_type = other DNA
gaaattcagtatccggttagtgaaatcaccatcgcaggtaatttaaaagatatgtggcgcaatattgtcaccgtc

SEQ ID NO: 645942 - DNA, 75 bp, synthetic construct
  source 1..75: mol_type = other DNA
ttaccggtgattattcccgtggtgcagcgggcttctgggtagagaatggcgaaattcagtatccggttagtgaaa

SEQ ID NO: 645943 - DNA, 75 bp, synthetic construct
  source 1..75: mol_type = other DNA
tgaagccatttctctgtgcaaagggctaaatgatgttcttacctatgcggaagacccgtgcggcgctggcagggt

SEQ ID NO: 645944 - DNA, 75 bp, synthetic construct
  source 1..75: mol_type = other DNA
aacgggcaactcacctggctatcaggaactgcaaccggtctgacacccccggcaggcattactgctggttctgtc

SEQ ID NO: 645945 - DNA, 75 bp, synthetic construct
  source 1..75: mol_type = other DNA
aaagccatcagaaattatgttcgccgcaaaattgatgacgcagcagccgaaaagctcagtaaaacagcgcaggca

SEQ ID NO: 645946 - DNA, 75 bp, synthetic construct
  source 1..75: mol_type = other DNA
gttatatctggtgagcggtggttataaggtcatcagaaattatattcgccgtaaaattgatgatgcggcagctga

SEQ ID NO: 645947 - DNA, 75 bp, synthetic construct
  source 1..75: mol_type = other DNA
cgcaaagctgctgaagagatggacgagcgtattcgcgaacggctacataccgaagacattaccgcacgcacgttt

SEQ ID NO: 645948 - DNA, 75 bp, synthetic construct
  source 1..75: mol_type = other DNA
cagttctcttttcagaaaaagttaagatccagcgttttctgctctatcgtggctatctgatggagaatatccagg

SEQ ID NO: 645949 - DNA, 75 bp, synthetic construct
  source 1..75: mol_type = other DNA
catactccgcgcactccgctttaaccacaggacaactggctttctcactgatcatgatcgtagggctttacaccc

SEQ ID NO: 645950 - DNA, 75 bp, synthetic construct
  source 1..75: mol_type = other DNA
actgcgggtggtggcagaaaacgaatgggcaaactgcacggcgatcactcttaacatgaccggggtgtccgatgg

SEQ ID NO: 645951 - DNA, 75 bp, synthetic construct
  source 1..75: mol_type = other DNA
agatattgtcgaccgcattgttcaacataatcttcatatgatcgtaataacctggccccaagaattgttcattta

SEQ ID NO: 645952 - DNA, 75 bp, synthetic construct
  source 1..75: mol_type = other DNA
cctggagcaaataaaagccatctacaatcaagtaatagcgatgttgttgctgctgcagctataagtattacagcg

SEQ ID NO: 645953 - DNA, 75 bp, synthetic construct
  source 1..75: mol_type = other DNA
aacagacagcgatattgaaatcatcaaacgtcaatggggtgcgttttacggtacggatctggagttgcaattacg

SEQ ID NO: 645954 - DNA, 75 bp, synthetic construct
  source 1..75: mol_type = other DNA
acggccagttccggcggttcagagcaggaagataacgaccggctacgtgagcgtatcaagctggcgccggaatcc

SEQ ID NO: 645955 - DNA, 75 bp, synthetic construct
  source 1..75: mol_type = other DNA
ttgaacgtgatgccgataaaatcacggctgaaatgattgctcagtatgagcgtgataccggaaaaaccttatatc

SEQ ID NO: 645956 - DNA, 75 bp, synthetic construct
  source 1..75: mol_type = other DNA
taacccattattacgaagtgcatcaatgttccagttggactggaagagcatgcatgccaataacaatacaggggg

SEQ ID NO: 645957 - DNA, 75 bp, synthetic construct
  source 1..75: mol_type = other DNA
gacgctgcaccaatccataacggcggcaatttactaaaacaaagctcgatgtcgacgggtaatgtccaacaaaca

SEQ ID NO: 645958 - DNA, 75 bp, synthetic construct
  source 1..75: mol_type = other DNA
ctgggcggaactcaggttggctggtttggcgtcggtgtggcgatgtttgccattccggtgggtaaggcaccgggc

SEQ ID NO: 645959 - DNA, 75 bp, synthetic construct
  source 1..75: mol_type = other DNA
gacgctgcaccaatccataacggcggcaatttactgaaacaaagcacgatgtcgacgggcaatgtccaacaaaca

SEQ ID NO: 645960 - DNA, 75 bp, synthetic construct
  source 1..75: mol_type = other DNA
tctacaagatgccgctcggcaagctgatgtgctgggtatgtatggcgttctttgtgttcgtggtcgtgctgctga

SEQ ID NO: 645961 - DNA, 75 bp, synthetic construct
  source 1..75: mol_type = other DNA
cagcagcaacttgaggaaataaaagagcgtatcgaaaccgttatacaagggatcaaaactgagcctgctcatcca

SEQ ID NO: 645962 - DNA, 75 bp, synthetic construct
  source 1..75: mol_type = other DNA
gagtttagtgaaggcacaatgtacctagtttcgctggaagactacccgctcggcatctggttctttaatgaagca

SEQ ID NO: 645963 - DNA, 75 bp, synthetic construct
  source 1..75: mol_type = other DNA
tcatttacccgatgaacgctctggcaaccgatcaggccagccgtttcgccaaaactatcgccagcgatccgcagt

SEQ ID NO: 645964 - DNA, 75 bp, synthetic construct
  source 1..75: mol_type = other DNA
gctgctcaaccactgcgcgggcgcgtcacaagccggggttaaagcgattatcatctacccgatgaacgccctggc

SEQ ID NO: 645965 - DNA, 75 bp, synthetic construct
  source 1..75: mol_type = other DNA
atttctggcccagccggaaacgctgctgaaaggaccatacctttccgcccagttgccgtttcgtaaaagtgactt

SEQ ID NO: 645966 - DNA, 75 bp, synthetic construct
  source 1..75: mol_type = other DNA
gtaaccccaatctgctggattacaaaatgccgaccatgccggatctgccacaactggaaagcgcgtttgtcgaaa

SEQ ID NO: 645967 - DNA, 75 bp, synthetic construct
  source 1..75: mol_type = other DNA
ttgctcatgttgccgtgaggttgtccgggctccggccgatcaaggctggcagtggcgtaatgcgccttgtctctc

SEQ ID NO: 645968 - DNA, 75 bp, synthetic construct
  source 1..75: mol_type = other DNA
atgtggcggtggaagatcgcgaacactatttgccggttatccactgccgtgactgccacgcaaccggctgggcca

SEQ ID NO: 645969 - DNA, 75 bp, synthetic construct
  source 1..75: mol_type = other DNA
cgatctactgggcccctgggcaggctatttcactggctggacctactggttctgctgggtggttactggaatggc

SEQ ID NO: 645970 - DNA, 75 bp, synthetic construct
  source 1..75: mol_type = other DNA
gcactggcagctctcccctttcagccattaagccttcccgcctggccgcacgttcacgcctggcatctgtttatt

SEQ ID NO: 645971 - DNA, 75 bp, synthetic construct
  source 1..75: mol_type = other DNA
cgccttccctgacctgggtttcaaccctcaatatgatttccttgttgggtgcaacgccggtaatggtggatgtcg

SEQ ID NO: 645972 - DNA, 75 bp, synthetic construct
  source 1..75: mol_type = other DNA
catcaacggtttgttcgcggtgcaacgggaaaggctacgttaaaaaccattgccagcggtgcaaagggcgcggcg

SEQ ID NO: 645973 - DNA, 75 bp, synthetic construct
  source 1..75: mol_type = other DNA
accaaagactctattccacgtgtagcaccgctgtacttcgcgttccgcatcatggtggcgtgtggcttcctgctg

SEQ ID NO: 645974 - DNA, 75 bp, synthetic construct
  source 1..75: mol_type = other DNA
ttgcaatccagatcccttatgcgctgggtatcatcgctacacgttctgtggatacgccggttatcggcctgaaag

SEQ ID NO: 645975 - DNA, 75 bp, synthetic construct
  source 1..75: mol_type = other DNA
gcgctgtacggtattccgctgccgtggattgctgtagaggcgggctggttcgttgctgaatatggtcgtcaaccg

SEQ ID NO: 645976 - DNA, 75 bp, synthetic construct
  source 1..75: mol_type = other DNA
tttacgtcgtggcgttggcgtcgcctgttttagctacacctctaacacctggcctgtcggcgtagaaatagcagg

SEQ ID NO: 645977 - DNA, 75 bp, synthetic construct
  source 1..75: mol_type = other DNA
gaccccggcgcatttgcctcacgtcagagctatgttgccgcgcctgcgctgcgcagtgcggcactgttattaaaa

SEQ ID NO: 645978 - DNA, 75 bp, synthetic construct
  source 1..75: mol_type = other DNA
ttcgtacctggtgtaccgcaaacaacgtccgcacctgcatgagaagtcgatctacaagatgccgctcggcaagct

SEQ ID NO: 645979 - DNA, 75 bp, synthetic construct
  source 1..75: mol_type = other DNA
tgatggagttaaacgaggatcagcgcaatgaacttattattcttgttgccgttttcgcgtttcgggattattgcc

SEQ ID NO: 645980 - DNA, 75 bp, synthetic construct
  source 1..75: mol_type = other DNA
tccacttcccaaagtcaccgcgtttgtcggatgaaagccggggcacgtccccggatgcgcttaatactactgatg

SEQ ID NO: 645981 - DNA, 75 bp, synthetic construct
  source 1..75: mol_type = other DNA
gtttgataacaaagaatatctctattacaaagcgggtaatgactccaacttattgatagtgttttatgttcagat

SEQ ID NO: 645982 - DNA, 75 bp, synthetic construct
  source 1..75: mol_type = other DNA
atgttgccgtccgttgtcagtcggcaggtcgccgacagcgttgccgcctttttacgggcggcgttcccgctaaac

SEQ ID NO: 645983 - DNA, 75 bp, synthetic construct
  source 1..75: mol_type = other DNA
cagccattattccgattacagcgacggtgccgggttacaactggcagccgatgtgcgtgaaaacgatctgctgtc

SEQ ID NO: 645984 - DNA, 75 bp, synthetic construct
  source 1..75: mol_type = other DNA
gccctggataaacagaatgtcgctcaggcattaagtgtcgtccccggcgtggtgctgcaaaagtcaggtagccgc

SEQ ID NO: 645985 - DNA, 75 bp, synthetic construct
  source 1..75: mol_type = other DNA
cgtgattggcgcgttcacgatgatcacgaccgtttccgcgattctgtttatgttcgtctggacgattatcctttg

SEQ ID NO: 645986 - DNA, 75 bp, synthetic construct
  source 1..75: mol_type = other DNA
gcgttggataaacaaaatgttgctcaggcattaagtgtcgttcccggcgtggtgctgcaaaaatcaggcagccgc

SEQ ID NO: 645987 - DNA, 75 bp, synthetic construct
  source 1..75: mol_type = other DNA
atgggcggagccattaatatcaccacccagaagccaacaaaacctctggaagcaaatctgggatatcgccaggga

SEQ ID NO: 645988 - DNA, 75 bp, synthetic construct
  source 1..75: mol_type = other DNA
agggatggagccgtagccaggacaatgcctacgatatgcatgcttcatttgccgccagcagcgatctggggtatt

SEQ ID NO: 645989 - DNA, 75 bp, synthetic construct
  source 1..75: mol_type = other DNA
tctcgcttgatcctaccgcaggtcatgagcagcagggaacgcggccggtgcttattgtcacaccggcggccttta

SEQ ID NO: 645990 - DNA, 75 bp, synthetic construct
  source 1..75: mol_type = other DNA
tgaactggaaagtgcggtgggcttgccgatggataaagaaaccagccatgtgatgctgtgcggcaatccacagat

SEQ ID NO: 645991 - DNA, 75 bp, synthetic construct
  source 1..75: mol_type = other DNA
ccaaaaccgacggcagagaaaaaagatgaacgccgctggatggtacagtgcggttcgttcagaggcgcagaacag

SEQ ID NO: 645992 - DNA, 75 bp, synthetic construct
  source 1..75: mol_type = other DNA
ccgatgatcaggctccggctgaacagtcgctgcggcgcaatctcacaaaccgacatattcagcttattgccattg

SEQ ID NO: 645993 - DNA, 75 bp, synthetic construct
  source 1..75: mol_type = other DNA
ccgctgtggtttatcgcgctggggctgggctggttgtttattggtaagaagcgggctgctgaactgcggaaataa

SEQ ID NO: 645994 - DNA, 75 bp, synthetic construct
  source 1..75: mol_type = other DNA
cccgaggcggaaaacgactcgaacgggttccggagactatcatgaacgaagttcttggccgcctgtccactattc

SEQ ID NO: 645995 - DNA, 75 bp, synthetic construct
  source 1..75: mol_type = other DNA
tgccgatgacaaacgcggcattgtgaagctcggttttacaccgcgtgaaaacgatgaatacacgctgacttacat

SEQ ID NO: 645996 - DNA, 75 bp, synthetic construct
  source 1..75: mol_type = other DNA
ccagccggtggaggagtgccgtaaaatggtattcagttttattcatcaggcgctggcggacggcttgcgaaatgt

SEQ ID NO: 645997 - DNA, 75 bp, synthetic construct
  source 1..75: mol_type = other DNA
atcggattcgcttaattttaccgtagatctccaaaaaaacagtgccagacaatttccaacgaccggtagcacaag

SEQ ID NO: 645998 - DNA, 75 bp, synthetic construct
  source 1..75: mol_type = other DNA
atatcggccgttataattctcagagtaatttttctttaaacaatattttaattgaaaattgtgcgccaggctgta

SEQ ID NO: 645999 - DNA, 75 bp, synthetic construct
  source 1..75: mol_type = other DNA
ggatagaaataaatataaaaccttagaaaacgataaaatcatattaatacaatctccgcaaaataatgggtacgc

SEQ ID NO: 646000 - DNA, 75 bp, synthetic construct
  source 1..75: mol_type = other DNA
ggattcgcttaattttaccgtagatctccaaaaaaacagtgccagacaatttccaacgaccggtagcacaagtcc

SEQ ID NO: 646001 - DNA, 75 bp, synthetic construct
  source 1..75: mol_type = other DNA
caggcgttaatagctttgagtcgattgacagtaaaagtgactcgaaatttttaaagattggagatatttattcaa

SEQ ID NO: 646002 - DNA, 75 bp, synthetic construct
  source 1..75: mol_type = other DNA
ttattttgatggcgtacctatttatgttccctatgacggtaacctcgatctggcgaggatcctgaccaacaatct

SEQ ID NO: 646003 - DNA, 75 bp, synthetic construct
  source 1..75: mol_type = other DNA
aaaaatcacgctactggcagtggccagagtatgacaaagaaagtttttattatcagggaacgacccaactaaacg

SEQ ID NO: 646004 - DNA, 75 bp, synthetic construct
  source 1..75: mol_type = other DNA
ctcatgatgtacaactcgctggccgatctgaaaagtaaaaacggtagctatagtcactattccgattacagcgat

SEQ ID NO: 646005 - DNA, 75 bp, synthetic construct
  source 1..75: mol_type = other DNA
gctggcaatgtggcagcatctggagaatgtgaagcagcgcttgctggagttctctaatgttgatgacatctattt

SEQ ID NO: 646006 - DNA, 75 bp, synthetic construct
  source 1..75: mol_type = other DNA
gtgaactggcttccagcgcgccgggcagcagcgaaagcggtgacatgcagttccatctcgctattgccgaagcaa

SEQ ID NO: 646007 - DNA, 75 bp, synthetic construct
  source 1..75: mol_type = other DNA
tgaagtcagcgtttactataaccgggtaagtgacgccatcctttcacacaatatcgatgccgataccattcaaaa

SEQ ID NO: 646008 - DNA, 75 bp, synthetic construct
  source 1..75: mol_type = other DNA
atggttcccggatggattgaccccgatacttttaaactcaatgaacacgctgagactgtaagactgattttcaag

SEQ ID NO: 646009 - DNA, 75 bp, synthetic construct
  source 1..75: mol_type = other DNA
gacaacgataggcacactaccagcatcacagcgtaatgaccgccccgctataccgaactactacgaagccgctat

SEQ ID NO: 646010 - DNA, 75 bp, synthetic construct
  source 1..75: mol_type = other DNA
agcggaaaaggttacatcgatgatgaagatgatgatggtgaatacccgcaggacgactacaccgacgaacccggc

SEQ ID NO: 646011 - DNA, 75 bp, synthetic construct
  source 1..75: mol_type = other DNA
ctaagtggtgaaagtctgcataacatcgcccgtcacctacaggctaataacattagttcattctcacggcgtaaa

SEQ ID NO: 646012 - DNA, 75 bp, synthetic construct
  source 1..75: mol_type = other DNA
taggtacactaccagcatcacagcgcaatgaccgccccgctataccgaactactacgaagccgctatagatgctg

SEQ ID NO: 646013 - DNA, 75 bp, synthetic construct
  source 1..75: mol_type = other DNA
tgaaagtctgcataacattgcacgtcacctacaaagcaacgatataaagtcttttagtcgccgtaaagatgctaa

SEQ ID NO: 646014 - DNA, 75 bp, synthetic construct
  source 1..75: mol_type = other DNA
cagcagtgaaagcggcgatatgcaatttcatcttgctattgctgaagctacccataacagcatgttggtagagtt

SEQ ID NO: 646015 - DNA, 75 bp, synthetic construct
  source 1..75: mol_type = other DNA
tccaggggctggtggaagtacgccgtggtgcaggtatttatgttctcgacagcttaacctgtcagagtgcagaga

SEQ ID NO: 646016 - DNA, 75 bp, synthetic construct
  source 1..75: mol_type = other DNA
aacgcataacagcatgctggtggagctgttccgtcagtcctggcagtggcgggaaaacaatccaatgtggatcca

SEQ ID NO: 646017 - DNA, 75 bp, synthetic construct
  source 1..75: mol_type = other DNA
tgtgtcatatcaatctctggggtaaaccggggatagtggtttactgtggtggcgagcactgtaataaagccgcgt

SEQ ID NO: 646018 - DNA, 75 bp, synthetic construct
  source 1..75: mol_type = other DNA
ttctgataccggcgaaccgggaggcaggaaagtgggccagagcatgacccattatattattgccggtggcccttt

SEQ ID NO: 646019 - DNA, 75 bp, synthetic construct
  source 1..75: mol_type = other DNA
gccacgctttcaacactggtgcatgagatggttcatcagtggcaattccattttggcgagcctggccgccgtggc

SEQ ID NO: 646020 - DNA, 75 bp, synthetic construct
  source 1..75: mol_type = other DNA
accatacctacaaacccgttaccgctaaatgatggaacatcaatctttgaaattgctgataaagagctactggat

SEQ ID NO: 646021 - DNA, 75 bp, synthetic construct
  source 1..75: mol_type = other DNA
aaaaactcagagcatttattaagaaacattcaattggttatccataacttatcaaaaaatggaggggataagatt

SEQ ID NO: 646022 - DNA, 75 bp, synthetic construct
  source 1..75: mol_type = other DNA
aattacatatataataaaaaagaagacaacataagcgaattgctcattgctgttgatgaaaaaggaaatctcatc

SEQ ID NO: 646023 - DNA, 75 bp, synthetic construct
  source 1..75: mol_type = other DNA
atagttttttttaactctgaaccagcagtggtagtgccagcgatgactggagttaacaccatcatgcgtgaatat

SEQ ID NO: 646024 - DNA, 75 bp, synthetic construct
  source 1..75: mol_type = other DNA
ataaaccctgaggatcttagttataatgatattgatatatataccaacattatttttaaagaattaaccccacag

SEQ ID NO: 646025 - DNA, 75 bp, synthetic construct
  source 1..75: mol_type = other DNA
ggcccgcgatgaactcacggcagaaaaagcggcgcaattggtcagcattgagtgggaagaattacccgttatcac

SEQ ID NO: 646026 - DNA, 75 bp, synthetic construct
  source 1..75: mol_type = other DNA
aacttcctgcaacaaggcgataaagaggcagcggaaagcggcgcgttttacgcccgtatccgccacgaacgctac

SEQ ID NO: 646027 - DNA, 75 bp, synthetic construct
  source 1..75: mol_type = other DNA
gcatcaggaatctaagcagaagtctttccgtgtttctcagaaatgggggcaacgtgcaaaacttgcccttgctgg

SEQ ID NO: 646028 - DNA, 75 bp, synthetic construct
  source 1..75: mol_type = other DNA
gattctcatcagccatacaaggtgctgaaggtgctgattcaaccagacgacaaaatgagctattcaaacagtggt

SEQ ID NO: 646029 - DNA, 75 bp, synthetic construct
  source 1..75: mol_type = other DNA
tgaaggtgcagattcaaccagacgacaaaatgacctgttcaagcaatggttgaagaagaatagcgatgctcaagt

SEQ ID NO: 646030 - DNA, 75 bp, synthetic construct
  source 1..75: mol_type = other DNA
atgctttcccgtattgaaagtggggagttttcagaaggtacaattctgttagtcgaagctatcgaccgtataggc

SEQ ID NO: 646031 - DNA, 75 bp, synthetic construct
  source 1..75: mol_type = other DNA
caagaaatcctcgataaaaatcgtaaatgtcaacgacggatgaaaagtgatccacttatatctccaccaacggcc

SEQ ID NO: 646032 - DNA, 75 bp, synthetic construct
  source 1..75: mol_type = other DNA
gcacagcattgcagactactattgatagcatgaaacgtaaggctttactcactgacaagaaactaccccagattc

SEQ ID NO: 646033 - DNA, 75 bp, synthetic construct
  source 1..75: mol_type = other DNA
aggcgcgacagcttcttgagagcaacatcgccgagtttgccgccctgcaggctacccgcgaagatatcgtcaaaa

SEQ ID NO: 646034 - DNA, 75 bp, synthetic construct
  source 1..75: mol_type = other DNA
tcagcggtaaatcagaccttgtaaacgacggcaaaacgatcaatagccaactggattactcgctaaatagcctga

SEQ ID NO: 646035 - DNA, 75 bp, synthetic construct
  source 1..75: mol_type = other DNA
aggtacagaatcaggatctgggcagcggcaagctgactttaaaagtcggccagattgatggtgaagcctggcatc

SEQ ID NO: 646036 - DNA, 75 bp, synthetic construct
  source 1..75: mol_type = other DNA
gctgaacgagccgattccgtcccatctggtggacagcctgacgcttgatgatctgccgacctcgtttccgcgctt

SEQ ID NO: 646037 - DNA, 75 bp, synthetic construct
  source 1..75: mol_type = other DNA
tccaatctggaagtcagttatcaaaactatcatcgcggcgtattcagcagccagttgcaactgttggtgaaaccc

SEQ ID NO: 646038 - DNA, 75 bp, synthetic construct
  source 1..75: mol_type = other DNA
tcaccaccagcctgcaatatgctaacggtcagatcacgttgaatggtcagaaaatgcctctggaagagtttgttg

SEQ ID NO: 646039 - DNA, 75 bp, synthetic construct
  source 1..75: mol_type = other DNA
gaagtaagcaagccactgtttgatatggcaaaaggtgaaacgccttttgagattaactcccgcattggttacagc

SEQ ID NO: 646040 - DNA, 75 bp, synthetic construct
  source 1..75: mol_type = other DNA
tgcgaccccgccggatgcgactgccacgttacatgccatgcagtcctgtcggcaggagacggcggcgctggagcg

SEQ ID NO: 646041 - DNA, 75 bp, synthetic construct
  source 1..75: mol_type = other DNA
agattcggctgcagggaaactgacttttaacattgatggattgtcgcaggtcattgcaccgctacgcgacgcctg

SEQ ID NO: 646042 - DNA, 75 bp, synthetic construct
  source 1..75: mol_type = other DNA
acgttacaggccatgcagtcctgtcggcgggagtccgcggcgctggagcggcttgactgctatgaccgcctgctg

SEQ ID NO: 646043 - DNA, 75 bp, synthetic construct
  source 1..75: mol_type = other DNA
ggagtgtcatccgcaaccgcattggcgagaaaaaatggctgctgcgcgccgcgctgtacggtattccgctgccgt

SEQ ID NO: 646044 - DNA, 75 bp, synthetic construct
  source 1..75: mol_type = other DNA
gatgggttttggacgttaacgaagatcagacactaacacctgaaggtcgtcagcagcaacttgaggaaataaaag

SEQ ID NO: 646045 - DNA, 75 bp, synthetic construct
  source 1..75: mol_type = other DNA
gcttgactgttacgaccgcctgctggcaccactgtccccgtcaggatttaacggggcactggtcaaagccagctt

SEQ ID NO: 646046 - DNA, 75 bp, synthetic construct
  source 1..75: mol_type = other DNA
aaaatgccactggaagatttcgtgggtatgtttgcgatgccggcattaaacgttccggctgtacccgctattccg

SEQ ID NO: 646047 - DNA, 75 bp, synthetic construct
  source 1..75: mol_type = other DNA
acggagatggctgtgaaacaggcgcaaattggcaccattgacgcgcaaatcaagcgcaatcaggcctctctcgat

SEQ ID NO: 646048 - DNA, 75 bp, synthetic construct
  source 1..75: mol_type = other DNA
ggttgttggagcaagaaataccggatggactgcagccacaggtacacctcttcttggctcattcaacgctaacca

SEQ ID NO: 646049 - DNA, 75 bp, synthetic construct
  source 1..75: mol_type = other DNA
gaaaagtacaaccgcccgtgtattgcaggcactattaagccgttggccggaacatcgtcgtgttgaactgatcac

SEQ ID NO: 646050 - DNA, 75 bp, synthetic construct
  source 1..75: mol_type = other DNA
aaaacgttaagcaacgtctgctggaattctcgaacgttgacgatatttattttgacggctatctgtttgattcat

SEQ ID NO: 646051 - DNA, 75 bp, synthetic construct
  source 1..75: mol_type = other DNA
accatacctacaaacccgttaccgctaaatgatgggtcaccaatctttgaaattgctgataaagagctactggat

SEQ ID NO: 646052 - DNA, 75 bp, synthetic construct
  source 1..75: mol_type = other DNA
ggtctgtttaggtgtcagtgcggggctagtgttcaccctacagggactaagaataagtatcagggcgtttatcgg

SEQ ID NO: 646053 - DNA, 75 bp, synthetic construct
  source 1..75: mol_type = other DNA
cacaggtcaggaacgatgagcaggatgttattctggtcgatcacgaagaaagaattcgtcagctccgcatcgacg

SEQ ID NO: 646054 - DNA, 75 bp, synthetic construct
  source 1..75: mol_type = other DNA
cggtaatcattcaggctacacgactcgatacatcaatccttccacgcaatatattcagccagtcttacctgctgt

SEQ ID NO: 646055 - DNA, 75 bp, synthetic construct
  source 1..75: mol_type = other DNA
ctggaagattttgttgggatgtttgcgatgccggcattaaatgttccggctgtacccgctattccgcagcagtaa

SEQ ID NO: 646056 - DNA, 75 bp, synthetic construct
  source 1..75: mol_type = other DNA
gacattgtggaaagagatcaactggctgaacttaaagcaaaatattctacctactcgcgagcgtgccagtttaat

SEQ ID NO: 646057 - DNA, 75 bp, synthetic construct
  source 1..75: mol_type = other DNA
ttccgtacctatgacgttatcggaagacgagatcgcccgtctcaaaggtataaatgaagatctctcgttagaaga

SEQ ID NO: 646058 - DNA, 75 bp, synthetic construct
  source 1..75: mol_type = other DNA
acgttatcgcacagggtactgatgttggtaacgtggcgaataaggccaacgaggccggacagggcgcttatgatg

SEQ ID NO: 646059 - DNA, 75 bp, synthetic construct
  source 1..75: mol_type = other DNA
tttctgtcctgattaatgccgatgagttccaccatgcaaacccgctacatggactcaggaaactgaggattattc

SEQ ID NO: 646060 - DNA, 75 bp, synthetic construct
  source 1..75: mol_type = other DNA
tggctggaaaagcctgcggacaaacgccacctgtccgaacttgccgaaatgtggtggatgctcgacgggcaaaat

SEQ ID NO: 646061 - DNA, 75 bp, synthetic construct
  source 1..75: mol_type = other DNA
atgacctatgcgcacctcgctcctgatttcctccaggatgcaatttcacttaatccgttaaaaggaggtatccac

SEQ ID NO: 646062 - DNA, 75 bp, synthetic construct
  source 1..75: mol_type = other DNA
cccacaaagtctgttcgggccgcacgataaagtctttattccccgtctggcgcatatgatgcaccactacggcag

SEQ ID NO: 646063 - DNA, 75 bp, synthetic construct
  source 1..75: mol_type = other DNA
acgccggagtcggtactgatgcaggatggcgcattcagcctgacggcaccgcccgtgcagggaatgccggtgcag

SEQ ID NO: 646064 - DNA, 75 bp, synthetic construct
  source 1..75: mol_type = other DNA
actgctgatgccggggctggagataaaagttcagggcgacgacgcgccagcggtgttccgcaagggcgtactgat

SEQ ID NO: 646065 - DNA, 75 bp, synthetic construct
  source 1..75: mol_type = other DNA
atgaaactgacgcctgttattgctgcgctgcgtgcccgctgtccgtattttgaaaaccgggttgcaggcgcggcc

SEQ ID NO: 646066 - DNA, 75 bp, synthetic construct
  source 1..75: mol_type = other DNA
atgaaactgacaacgataattgcggcgctgcgtgagcgatgcccgcgttttgaggatcgtgttggtggcgcggcg

SEQ ID NO: 646067 - DNA, 75 bp, synthetic construct
  source 1..75: mol_type = other DNA
cagtttaaggcgatccctgatgccggaaaactgcgactgcctgctgcctatgtggtcccctctgacgatgcgccg

SEQ ID NO: 646068 - DNA, 75 bp, synthetic construct
  source 1..75: mol_type = other DNA
actatctggcggatgccatgaggtttaacccgatagctaacatggcattcactgaacaagaagagccagcagagt

SEQ ID NO: 646069 - DNA, 75 bp, synthetic construct
  source 1..75: mol_type = other DNA
tgcccgatggagtgaagcatcggaactacgtggagagcacatcattggcaaccgggtgacgttctttaacaccaa

SEQ ID NO: 646070 - DNA, 75 bp, synthetic construct
  source 1..75: mol_type = other DNA
gaagcgataggcagcctcattgtcactaaagagggcgataccctggattgccgtcagtggcagcgggtgattgcc

SEQ ID NO: 646071 - DNA, 75 bp, synthetic construct
  source 1..75: mol_type = other DNA
tctctcctcgtcacgggacgaagcccgttacgaagtgcggctggagccgcgtatggcgctgctggcccgcagccg

SEQ ID NO: 646072 - DNA, 75 bp, synthetic construct
  source 1..75: mol_type = other DNA
gcgccggagtcggtgctgatgcaggacggcgcattcagcctgagcgccccgcccgtacagggaatgccggtgatg

SEQ ID NO: 646073 - DNA, 75 bp, synthetic construct
  source 1..75: mol_type = other DNA
tcagcaccggtattgccggacgcagtctgaccgctgacctgattgactgtgcagccgaaccgacacagtttaacg

SEQ ID NO: 646074 - DNA, 75 bp, synthetic construct
  source 1..75: mol_type = other DNA
ggtggtattggctcaacgcgggcacataccgcgctggtacttggggaaaacatcctttcctgtgatacggagaag

SEQ ID NO: 646075 - DNA, 75 bp, synthetic construct
  source 1..75: mol_type = other DNA
cgactttgcatttgccgactgaagcatctctacataaggaaattaaaggttatgaccttgtggccccaaacattc

SEQ ID NO: 646076 - DNA, 75 bp, synthetic construct
  source 1..75: mol_type = other DNA
cctgaggaacctcaccaggcgctgtgcgcaattggcacggctacttcaatacgcaaagcggtctttaaagtaccg

SEQ ID NO: 646077 - DNA, 75 bp, synthetic construct
  source 1..75: mol_type = other DNA
aaagaacagagcgtcatcaaccattgctacaccgaaattgatctgaagattttccgtcagtacctcgctcccgcg

SEQ ID NO: 646078 - DNA, 75 bp, synthetic construct
  source 1..75: mol_type = other DNA
aagtgctgctttataccgatggtcgcccgaacaagccgtatcacgggcagatcggtttcgtttcaccaactgctg

SEQ ID NO: 646079 - DNA, 75 bp, synthetic construct
  source 1..75: mol_type = other DNA
aatgaaggtggcacggtgtttaccgtttcactaacgcgtccggtgtgggtacgtgcctatgttgacgaacgtaat

SEQ ID NO: 646080 - DNA, 75 bp, synthetic construct
  source 1..75: mol_type = other DNA
ttcggcaaacgacctggaaaatgcccgctcctcgcgcgaccaggcgcaggcaacgctgaaatcagcacaggataa

SEQ ID NO: 646081 - DNA, 75 bp, synthetic construct
  source 1..75: mol_type = other DNA
cgcggtggagccaggcacggttctcaatgaaggtggcacggtgtttaccgtctcgctaacgcgtccagtgtgggt

SEQ ID NO: 646082 - DNA, 75 bp, synthetic construct
  source 1..75: mol_type = other DNA
aagtgctgcttttataccgatggtcgcccggacaagccgtatcacgggcagattggtttcgtttcgccgactgct

SEQ ID NO: 646083 - DNA, 75 bp, synthetic construct
  source 1..75: mol_type = other DNA
accggatctgcgtaccgacctcgtctatcgcctgcgtattgtggtgaccgacgccgatgatgcgttacgccaggg

SEQ ID NO: 646084 - DNA, 75 bp, synthetic construct
  source 1..75: mol_type = other DNA
aaacgaatcggaaaatcgatactggaaaaaactctaactcggtggccagtttttgttgaccacttcacttatact

SEQ ID NO: 646085 - DNA, 75 bp, synthetic construct
  source 1..75: mol_type = other DNA
tggtcgcggaacggtcaaactagggcaggccgatgcgctggataaaaatagtgattacagaggtatttattttac

SEQ ID NO: 646086 - DNA, 75 bp, synthetic construct
  source 1..75: mol_type = other DNA
tttgacaaaaaacatgtgctggatggcgtggacctgtttaccgggatcacaatgacctataccgacagcagtgca

SEQ ID NO: 646087 - DNA, 75 bp, synthetic construct
  source 1..75: mol_type = other DNA
gttcagccgatggcgggtacagtgataattacactcacgttcaggtcggctttgacaaaaaacatgtgctggatg

SEQ ID NO: 646088 - DNA, 75 bp, synthetic construct
  source 1..75: mol_type = other DNA
aactttatgacggaagttaacaacctgaacaaacgtatgggtgagctgcgtgacacgaacggtgatgccggtgcc

SEQ ID NO: 646089 - DNA, 75 bp, synthetic construct
  source 1..75: mol_type = other DNA
tgggcccgtatcatgaacggcgccggttcagccgatggcggatacagtgataactacacccacgttcaggtcggt

SEQ ID NO: 646090 - DNA, 75 bp, synthetic construct
  source 1..75: mol_type = other DNA
ttgcctcacaaaaaaagaacggctacatttatagtttccgccttgtcttatggtgctgctggacatgcctatgca

SEQ ID NO: 646091 - DNA, 75 bp, synthetic construct
  source 1..75: mol_type = other DNA
atcacgcttaacaataactccacgctggatattaacagccgtttcaccggcgggattgaggctcatgacagtcag

SEQ ID NO: 646092 - DNA, 75 bp, synthetic construct
  source 1..75: mol_type = other DNA
tgtcctgcgcactgatctgaaggacgctgataaaatcagtattacggagaaagccagcggttcagacaacaccct

SEQ ID NO: 646093 - DNA, 75 bp, synthetic construct
  source 1..75: mol_type = other DNA
aacttatcagcagcagaagcactagagcgttatggtattgaattcaatggaaagaaacagataatcggttttcgg

SEQ ID NO: 646094 - DNA, 75 bp, synthetic construct
  source 1..75: mol_type = other DNA
gaaatttctggatccgtgattatcttgatttggcacagaataaaggtgtatttcagcctggagcatacggggtaa

SEQ ID NO: 646095 - DNA, 75 bp, synthetic construct
  source 1..75: mol_type = other DNA
tccgtgacggcggtcatctgacggcacaaaaagggctctacagtgacggccgggttcagattggaaagaacggta

SEQ ID NO: 646096 - DNA, 75 bp, synthetic construct
  source 1..75: mol_type = other DNA
tatttatataggcaatatcttgtgttcaatgatttaagatttaaagcaagatattggcaaaaaattataaaaatc

SEQ ID NO: 646097 - DNA, 75 bp, synthetic construct
  source 1..75: mol_type = other DNA
aaatgggtcattcttggaacaacatatggtaaagcattctccagtaaggatacctgggccttttttgcccgatat

SEQ ID NO: 646098 - DNA, 75 bp, synthetic construct
  source 1..75: mol_type = other DNA
atgcagctgattcgaaccctggccgcatggcggccggatgtgacggcgtatcgtaatgttcaggatgcttatcgt

SEQ ID NO: 646099 - DNA, 75 bp, synthetic construct
  source 1..75: mol_type = other DNA
caccgtttgtcgtgggcggcgttgatacgcataaggacctgcacgttgctgcagtagttgatgaaaacaaccgcg

SEQ ID NO: 646100 - DNA, 75 bp, synthetic construct
  source 1..75: mol_type = other DNA
acgctgcctgaagcgctatatctcacgcgaagtttatacattactgcgtaatcaaaacaggcagatcaacagcat

SEQ ID NO: 646101 - DNA, 75 bp, synthetic construct
  source 1..75: mol_type = other DNA
gattgtttatcgacgccagataataaattagatgcacatagatacgataagtgtgcgttgcgtagtaaaaacaat

SEQ ID NO: 646102 - DNA, 75 bp, synthetic construct
  source 1..75: mol_type = other DNA
atggcaggtaaagttacggaaaccgctgttgtgggtggagtggatgcacataaagatctgcacgttgctgctgtc

SEQ ID NO: 646103 - DNA, 75 bp, synthetic construct
  source 1..75: mol_type = other DNA
atggttgataaagttaccaaagctgccgttgtgggtggcgtggatacacataaagatttgcacgttgccgctgtc

SEQ ID NO: 646104 - DNA, 75 bp, synthetic construct
  source 1..75: mol_type = other DNA
tgcgattccgcttgtggtgggtaaaaccctcggcgagtacaaaaacgttctgacgctggtgcgtaacacgtttgc

SEQ ID NO: 646105 - DNA, 75 bp, synthetic construct
  source 1..75: mol_type = other DNA
cactgaatgtcaatgtggcccaggggaataacctgaaaacaggtgacggtaccgtttttcttaatgcagaaaagg

SEQ ID NO: 646106 - DNA, 75 bp, synthetic construct
  source 1..75: mol_type = other DNA
gtcggtaaaaggagcggcaaacgataacctgcacaaaacaggggccgggacactgaatgtcaatgtggcccaggg

SEQ ID NO: 646107 - DNA, 75 bp, synthetic construct
  source 1..75: mol_type = other DNA
gaatatgtcgccagacgagtagcggaagggcatacaaaaatggaagcaatacgctgcctgaagcgctatatctca

SEQ ID NO: 646108 - DNA, 75 bp, synthetic construct
  source 1..75: mol_type = other DNA
gatcagaatcaggatttgcggcactgtgtggtgtcagcccggtccccgtttcttctggaaaaacgaaccgttacc

SEQ ID NO: 646109 - DNA, 75 bp, synthetic construct
  source 1..75: mol_type = other DNA
ccgccgctgcaccgggtaaaattactgctattgatacgcactggatctggcaggaaggtaatcagcgcctgacca

SEQ ID NO: 646110 - DNA, 75 bp, synthetic construct
  source 1..75: mol_type = other DNA
ctcaccaacagtcagcagcagaaaaaagccctgatgcagcaattgcttactgggaagaaacgcttgctggatgag

SEQ ID NO: 646111 - DNA, 75 bp, synthetic construct
  source 1..75: mol_type = other DNA
ttgagaaaaaactcgcctgcctgagagatgagaaaaaagccctgatgcaacagctactgactggcaaacgtcgtg

SEQ ID NO: 646112 - DNA, 75 bp, synthetic construct
  source 1..75: mol_type = other DNA
atacgacctttgatgacaaagtgcgtcagcatgccaccacagagatgcaggtgacggcagcgcagatgcagaagc

SEQ ID NO: 646113 - DNA, 75 bp, synthetic construct
  source 1..75: mol_type = other DNA
aagtggttctcaaagtcggtaatgactccaacttattgatagtgttttatgttcagataatgcccgatgactttg

SEQ ID NO: 646114 - DNA, 75 bp, synthetic construct
  source 1..75: mol_type = other DNA
tcgtgatgaaactgaccgtgaatatttaaaaggctgcggagaaaccgttgaggtccacgaagggcaaatcgttat

SEQ ID NO: 646115 - DNA, 75 bp, synthetic construct
  source 1..75: mol_type = other DNA
catcagatacccttgatggttatttcttattaaaaaaagggcagtttgcttacaataaaagttactctaatggtt

SEQ ID NO: 646116 - DNA, 75 bp, synthetic construct
  source 1..75: mol_type = other DNA
acgcagaacagagcggaagaagacaatccggaaagtccggttcctgttccgccatcagctgaaagtcatcttaac

SEQ ID NO: 646117 - DNA, 75 bp, synthetic construct
  source 1..75: mol_type = other DNA
tcagcttccggggcaaaaacggtatcaagggcgaagtggtgatgcgtaacggcaaaatcctcggctgggcatggg

SEQ ID NO: 646118 - DNA, 75 bp, synthetic construct
  source 1..75: mol_type = other DNA
tggggcgcgggatttgttgacggtatcggtcagggaatggagcgtgcctcccagccggctgtcgggctgggggcc

SEQ ID NO: 646119 - DNA, 75 bp, synthetic construct
  source 1..75: mol_type = other DNA
ggcagcctgagttcacagataaaacactctccaggaaaaccggggcggttcaaaccgtggctgaacaggagcctg

SEQ ID NO: 646120 - DNA, 75 bp, synthetic construct
  source 1..75: mol_type = other DNA
atgcctctgtcaccggtaatgaatccacggtgccgatgcagctgcgtatcaccggcctggtggaaatgccgaaca

SEQ ID NO: 646121 - DNA, 75 bp, synthetic construct
  source 1..75: mol_type = other DNA
gcctggggggatgtctccagttgtcaacgacggatgaaaagtgatccacttatatctccaccaacggcccaatat

SEQ ID NO: 646122 - DNA, 75 bp, synthetic construct
  source 1..75: mol_type = other DNA
aatcggctacatcgtattgctgttcatgttctgtcatctgtttggcgtgctgggagcagcgtttgcttatttcgg

SEQ ID NO: 646123 - DNA, 75 bp, synthetic construct
  source 1..75: mol_type = other DNA
atgattgcacagtgccggaatatttattgctctgcgacatttgaagcgagtgaaagctttttctctgactgtaaa

SEQ ID NO: 646124 - DNA, 75 bp, synthetic construct
  source 1..75: mol_type = other DNA
atggacgatggcaccaagataatgattgcacagtgccggaatatttattgctctgcgacatttgaagcgagtgaa

SEQ ID NO: 646125 - DNA, 75 bp, synthetic construct
  source 1..75: mol_type = other DNA
acaaaccagcaaataaactcagttattgttcgtggttccaattcaaatgaatttttctattatcaaatcgaattt

SEQ ID NO: 646126 - DNA, 75 bp, synthetic construct
  source 1..75: mol_type = other DNA
tttgcgcccgttatgtcggttcaccgctggatttcgccgtgcggacactgactctgctgggaaattccgtcccca

SEQ ID NO: 646127 - DNA, 75 bp, synthetic construct
  source 1..75: mol_type = other DNA
caaccccggacaattgatattaaagcacggggcggaaaacgactcgaacgggttccggagactatcatgaacgaa

SEQ ID NO: 646128 - DNA, 75 bp, synthetic construct
  source 1..75: mol_type = other DNA
tgagaaagcttacacacttctcaaagaagcacctgcaattccaatgtttaaaactttagccgatctggataagtt

SEQ ID NO: 646129 - DNA, 75 bp, synthetic construct
  source 1..75: mol_type = other DNA
ctcagtcggatttgacgcgctatgtagcttctcattttcattacctacactaatggaacaacaaaaaatagccgc

SEQ ID NO: 646130 - DNA, 75 bp, synthetic construct
  source 1..75: mol_type = other DNA
gaaaagcttctcaccaacagtcagcggcagaaaaaagccctgatgcagcaattgcttactgggaagaaacgcttg

SEQ ID NO: 646131 - DNA, 75 bp, synthetic construct
  source 1..75: mol_type = other DNA
atttcgcaatgtcgtctcgttttccttttcgctggatatcgtcagcggcgcggtggcgattgtcggcggcattgc

SEQ ID NO: 646132 - DNA, 75 bp, synthetic construct
  source 1..75: mol_type = other DNA
gaataaactcgcctgcctgaaagacgagaagaaagccttgatgcagcaactgctgaccgggaaacgtcgggtgaa

SEQ ID NO: 646133 - DNA, 75 bp, synthetic construct
  source 1..75: mol_type = other DNA
agaaaaaagccctgatgcagcagttactgaccgggaaacgccgtgtcaaaacagaagttgaagaaaccgttagcg

SEQ ID NO: 646134 - DNA, 75 bp, synthetic construct
  source 1..75: mol_type = other DNA
aaatcgctgccgttctgtccgcagccgacgccgaaatctccgtgctggagaaaaaactcgcttgcctgaaagatg

SEQ ID NO: 646135 - DNA, 75 bp, synthetic construct
  source 1..75: mol_type = other DNA
gcctcaccgcccggcccggaaggcgaaccacagccaggaaacacccccgtatccttcccgccgcagggcagcgtt

SEQ ID NO: 646136 - DNA, 75 bp, synthetic construct
  source 1..75: mol_type = other DNA
ctcctgttgcatctttggattctttatctgcgatgttaggcatagaaagaaaaagattggactggatagtcaagt

SEQ ID NO: 646137 - DNA, 75 bp, synthetic construct
  source 1..75: mol_type = other DNA
tgattcgtcgctgtgattaccatctgaatctgattcatccgaaagattacagttatttcaatacattaagcacca

SEQ ID NO: 646138 - DNA, 75 bp, synthetic construct
  source 1..75: mol_type = other DNA
tgattgagttcgaagtgtatatcgacgagatctttgcgttttctcagcgttccgatggcctgattatttcgacgc

SEQ ID NO: 646139 - DNA, 75 bp, synthetic construct
  source 1..75: mol_type = other DNA
gaagcgataggtagcctgattgttactaaacagggggatacgctggattgtcgtcagtggcagcgggtgattgct

SEQ ID NO: 646140 - DNA, 75 bp, synthetic construct
  source 1..75: mol_type = other DNA
aaaacgtgaactgtacgagattgaacgtgacggtaacaccattgaatatgatggcatgacgatggaacgagtgga

SEQ ID NO: 646141 - DNA, 75 bp, synthetic construct
  source 1..75: mol_type = other DNA
atgctctatgattttgatatagtagggcggactaataagaatcttgcaaaactatatagacgtaagcttgtggca

SEQ ID NO: 646142 - DNA, 75 bp, synthetic construct
  source 1..75: mol_type = other DNA
tatatgagaactgacagcaaatctgcatgcgactggttcgataccagaaaggcaaactccaccacatccatgatg

SEQ ID NO: 646143 - DNA, 75 bp, synthetic construct
  source 1..75: mol_type = other DNA
tataaggcgacttcttgactgtggtggcgattattttacgctaacagataattttgaatctgtagaacctcacaa

SEQ ID NO: 646144 - DNA, 75 bp, synthetic construct
  source 1..75: mol_type = other DNA
gaaaaagttttcgagtgcgatatacccacgtatttttctgagtcttatccttttattgaggcatcagagaaaaca

SEQ ID NO: 646145 - DNA, 75 bp, synthetic construct
  source 1..75: mol_type = other DNA
aatcaaccgtggcaacctgggtttcctgactgaccttgatcccgataacgcccagcaacagttagccgatgtgct

SEQ ID NO: 646146 - DNA, 75 bp, synthetic construct
  source 1..75: mol_type = other DNA
ttaccgggcatcgacgctattttgaagtgcattactacctgcaagggcagcaaaaaattgaatatgcgccgaaag

SEQ ID NO: 646147 - DNA, 75 bp, synthetic construct
  source 1..75: mol_type = other DNA
taacgaggaagcagatgaaactattcacgtgcctttatttggtcaagactcagaaaatgggtgcttcagttcaat

SEQ ID NO: 646148 - DNA, 75 bp, synthetic construct
  source 1..75: mol_type = other DNA
cacaccacaagctcaaaattcgcggcctgcaaagtccggtggacgtgctgacttttacaggccgcgaacagctca

SEQ ID NO: 646149 - DNA, 75 bp, synthetic construct
  source 1..75: mol_type = other DNA
agccgatatgaacagtggaggtactccgaaatcaacggttgaagagtattatggcgggaatatcccatgggtatc

SEQ ID NO: 646150 - DNA, 75 bp, synthetic construct
  source 1..75: mol_type = other DNA
gttttacatcagaatttaatactgatgaaaatacgatcacgataagcgagggagggaactcttgtggatacgttg

SEQ ID NO: 646151 - DNA, 75 bp, synthetic construct
  source 1..75: mol_type = other DNA
gggctcccctgagaggaattgtaaaaaatatcagggtgaacacgctggggggcgtggtttcagcgggacaggaca

SEQ ID NO: 646152 - DNA, 75 bp, synthetic construct
  source 1..75: mol_type = other DNA
acgcaacgggatgttttgtcggacttgaagcctgggggatgtctccagtgagcgtgccattgtacgcacccgcaa

SEQ ID NO: 646153 - DNA, 75 bp, synthetic construct
  source 1..75: mol_type = other DNA
ggaagcctggggggatgtgtccagtgagcgtgccattgtacgcacccgcaatatcagctgcctgaagaacggcaa

SEQ ID NO: 646154 - DNA, 75 bp, synthetic construct
  source 1..75: mol_type = other DNA
accgtattcagcgtaaaacgttcagctatgacgctgacagaaagaaaggcccctccctgccgtatatcccgtccg

SEQ ID NO: 646155 - DNA, 75 bp, synthetic construct
  source 1..75: mol_type = other DNA
gatttttctgctggtactggtagtgacgtttgttatctgggcatggaacagtcctctggatgaagtgacccgtgg

SEQ ID NO: 646156 - DNA, 75 bp, synthetic construct
  source 1..75: mol_type = other DNA
ccgggagatttaaaactggacccgaatgaagcttattaccgggtactggttaccaccagtaataattatctgaca

SEQ ID NO: 646157 - DNA, 75 bp, synthetic construct
  source 1..75: mol_type = other DNA
agggagagggaaagtacagtttatcggctacgaaagactgaactggcacaaagcattgccggccttaagcagagt

SEQ ID NO: 646158 - DNA, 75 bp, synthetic construct
  source 1..75: mol_type = other DNA
aaactggacccgaatgaagcttattaccgggtactggttaccaccagtaataattatctgacagacaggaatggg

SEQ ID NO: 646159 - DNA, 75 bp, synthetic construct
  source 1..75: mol_type = other DNA
ggtcagggaaggagatattgttgagaaaggtcaggtactgctgacactggatgatacccgaagctctgccatgct

SEQ ID NO: 646160 - DNA, 75 bp, synthetic construct
  source 1..75: mol_type = other DNA
ctgtttatcggctacgaaagactgaactggcgcaaagcatctctggccttaagcagagtaaggcactgctggata

SEQ ID NO: 646161 - DNA, 75 bp, synthetic construct
  source 1..75: mol_type = other DNA
gacggtgcggtgctccacattgttccccggcttgccggtgcaaagcatggcggaatttttcagaccatcctgggt

SEQ ID NO: 646162 - DNA, 75 bp, synthetic construct
  source 1..75: mol_type = other DNA
aacgctggatatccgcaacggtggtgccgccaccaccgtatccatggggaatggcggtgtactgctggccgattc

SEQ ID NO: 646163 - DNA, 75 bp, synthetic construct
  source 1..75: mol_type = other DNA
ggaaccctgtgggctggctgggggccacggctgtatcgggtatgtatgcggcaggggccagtatgatcctgggcg

SEQ ID NO: 646164 - DNA, 75 bp, synthetic construct
  source 1..75: mol_type = other DNA
acgcattgccgggcgtgatgcaggtgaaaccgaattgtctgcccgtcttaatgagccgctggcaaatggtgccgt

SEQ ID NO: 646165 - DNA, 75 bp, synthetic construct
  source 1..75: mol_type = other DNA
ggatgccgggggtaggaattatggcgagtaatctgctgttttctctcggtgccagtatgacgcttggcggtgttg

SEQ ID NO: 646166 - DNA, 75 bp, synthetic construct
  source 1..75: mol_type = other DNA
acattccggaatttatgcgtcgtgcgaaagataaaaatgactctttccgcctgatgggcttcggtcaccgcgtgt

SEQ ID NO: 646167 - DNA, 75 bp, synthetic construct
  source 1..75: mol_type = other DNA
aatggtgccgtgatccacatcgtaccgcgtctggcgggtgctaaaagtggcggtatttttcaggcagtgctgggg

SEQ ID NO: 646168 - DNA, 75 bp, synthetic construct
  source 1..75: mol_type = other DNA
agcgaaggaatgaaaatcgcccgtccgcgtcagttgtacaccggctacacacagcgcgactttaagtcggatatt

SEQ ID NO: 646169 - DNA, 75 bp, synthetic construct
  source 1..75: mol_type = other DNA
ggcggcgttctatcacgactcgctggatgttaacaatcctcgtcatcgtgaaattgccgcgttccgcctgctgtc

SEQ ID NO: 646170 - DNA, 75 bp, synthetic construct
  source 1..75: mol_type = other DNA
aacgaaggcatgaaaatcgcccgtccacgccaactgtatactggttacgaaaaacgcgattttaaaagcgatatc

SEQ ID NO: 646171 - DNA, 75 bp, synthetic construct
  source 1..75: mol_type = other DNA
tccacatcgttccgcgtcttgcgggagcaaaaagtggcggtgtgtttcaggcggtgctgggtgcggcgctgattg

SEQ ID NO: 646172 - DNA, 75 bp, synthetic construct
  source 1..75: mol_type = other DNA
ctgcctttacggggattttcaacgatttggccgccgcatcgagcttcgtgtgaaaacgggggcagaagcaatccg

SEQ ID NO: 646173 - DNA, 75 bp, synthetic construct
  source 1..75: mol_type = other DNA
ctgcctttacggggattttcaacgatttggccgccgcatcgaacttcgtgtgaaaacgggggcagaagcgatccg

SEQ ID NO: 646174 - DNA, 75 bp, synthetic construct
  source 1..75: mol_type = other DNA
gtatggtgaaatgcgcgtggggtcgcgggtgatttcgcaagagatcagcacggcagatgaaggggatggcggcca

SEQ ID NO: 646175 - DNA, 75 bp, synthetic construct
  source 1..75: mol_type = other DNA
ctgcctttacggggatttgcaacgatttggccgccgcatcgatcttcgtgtgaaaacgggggcagaagcaatccg

SEQ ID NO: 646176 - DNA, 75 bp, synthetic construct
  source 1..75: mol_type = other DNA
ctggctgggtgccgcggctgtatcgggcatgtatgcggcaggggccagtatgatcctgggcggagtggcgcagat

SEQ ID NO: 646177 - DNA, 75 bp, synthetic construct
  source 1..75: mol_type = other DNA
tgcggttgtatcgggcatgtatgcggcaggggccagtatgatcctgggcggagtggcgcagatgctggcaccgaa

SEQ ID NO: 646178 - DNA, 75 bp, synthetic construct
  source 1..75: mol_type = other DNA
gggcaatgttctgcccgttctgtacggtgaaatgcgcgtggggtcacgtgtggtttctcaggagatcagcacggc

SEQ ID NO: 646179 - DNA, 75 bp, synthetic construct
  source 1..75: mol_type = other DNA
gatgtggaggaggaagagcactacgacaacaccgcagcggaaatccgtcaggtggatgcgcacctgaagcgcctg

SEQ ID NO: 646180 - DNA, 75 bp, synthetic construct
  source 1..75: mol_type = other DNA
gctgcggcacagtcaacaaccgtttttcataaggaaaagaccataatgaatactggtgaacagattaaaagtttt

SEQ ID NO: 646181 - DNA, 75 bp, synthetic construct
  source 1..75: mol_type = other DNA
tgcgctggccacacagatcccggcgtttcgtcagaaactgaatgagggctggtatcaggtgcgcattgccgggcg

SEQ ID NO: 646182 - DNA, 75 bp, synthetic construct
  source 1..75: mol_type = other DNA
gcacactggatgtggaagaggaagagcactacgacaacaccgcagcggaaatccgtcaggtggatgcgcacctga

SEQ ID NO: 646183 - DNA, 75 bp, synthetic construct
  source 1..75: mol_type = other DNA
tttctgccgcgtccggcaaccggaaaccggtggtgaaaatcgcatcttctgccggcgctgcggcacagtcaataa

SEQ ID NO: 646184 - DNA, 75 bp, synthetic construct
  source 1..75: mol_type = other DNA
tggccatccgtgcggagcgctggatcaactggcgtcgtcgccgtactgcggcggtggcggtgatcaccggtgtga

SEQ ID NO: 646185 - DNA, 75 bp, synthetic construct
  source 1..75: mol_type = other DNA
ggtgaaatgcgcgtggggtcccgagtggtatctcaggagatcagcactgcagaggaaggcgatggtggtcaggtt

SEQ ID NO: 646186 - DNA, 75 bp, synthetic construct
  source 1..75: mol_type = other DNA
gcgtcttgctggcgctaaaagtggcggtgtgtttcagaccgtgctgggggcggcgctgattgcggtggcgtggtg

SEQ ID NO: 646187 - DNA, 75 bp, synthetic construct
  source 1..75: mol_type = other DNA
gggcgctggccatgcagatcccggcgtttcgtcagaagctgagcgacggctggtaccaggtacgcattgccgggc

SEQ ID NO: 646188 - DNA, 75 bp, synthetic construct
  source 1..75: mol_type = other DNA
acatggttgcccagggcaatgtcctgcctgttctgtacggtgaaatgcgcgtggggtcacgtgtggcatctcagg

SEQ ID NO: 646189 - DNA, 75 bp, synthetic construct
  source 1..75: mol_type = other DNA
aactccccgaacacagacaacgaataacggtaagcagaacacgtatttctcctctctggataacctggttgccca

SEQ ID NO: 646190 - DNA, 75 bp, synthetic construct
  source 1..75: mol_type = other DNA
cggataacggcaaacagaacacctatttttcctcactggataacatggttgctcagggcaatgttctgcctgttc

SEQ ID NO: 646191 - DNA, 75 bp, synthetic construct
  source 1..75: mol_type = other DNA
aatggagcagtgatccacatcgtgccgcgtctggcaggagccaaaagtggcggtgtgtttcaggcagtgctggga

SEQ ID NO: 646192 - DNA, 75 bp, synthetic construct
  source 1..75: mol_type = other DNA
cgcggctgtatcgggcatgtatgcggcaggggccagtatgatcctgggtggtgtggcccagatgctggcaccgaa

SEQ ID NO: 646193 - DNA, 75 bp, synthetic construct
  source 1..75: mol_type = other DNA
gtgatgcaggcgaaaacgaattatctgcccgtcttaatgagccgctggcaaatggtgccgtgatccacatcgtgc

SEQ ID NO: 646194 - DNA, 75 bp, synthetic construct
  source 1..75: mol_type = other DNA
cggcgctgattgctacggcaatctggatgccgggaatcagtatcgctttcagtgacattctcttttctatggggg

SEQ ID NO: 646195 - DNA, 75 bp, synthetic construct
  source 1..75: mol_type = other DNA
gacacaggcaatggattatgaccggattctggcaggctcccgcagccatcagaccggtgtaaatggtgaaaacaa

SEQ ID NO: 646196 - DNA, 75 bp, synthetic construct
  source 1..75: mol_type = other DNA
ggctgtgctgggcgttgcgctggttgcggctgctatctggatgccgggcatcagtattgcagccagcaacatcat

SEQ ID NO: 646197 - DNA, 75 bp, synthetic construct
  source 1..75: mol_type = other DNA
catcgccggcgataaaaccgatgaatggctgcaaccggcctgtaatgaaatgtaccgcgtgctgaaaaaagatgc

SEQ ID NO: 646198 - DNA, 75 bp, synthetic construct
  source 1..75: mol_type = other DNA
actgctggagcagtatcaccgggccggacagcaacgtctggccgccgtccggcgcgccatgcagtacccggccgc

SEQ ID NO: 646199 - DNA, 75 bp, synthetic construct
  source 1..75: mol_type = other DNA
gatggtgagcttctacggctggaaccgcgtcgatcgctttatggctgcgtggaaacaggccgggttcagcgttgt

SEQ ID NO: 646200 - DNA, 75 bp, synthetic construct
  source 1..75: mol_type = other DNA
cgtattgaccgcgttatggcggcctggaaacgcgccggattcagcgtggctgggcacctcgtgttcaccaaaaac

SEQ ID NO: 646201 - DNA, 75 bp, synthetic construct
  source 1..75: mol_type = other DNA
gatggtcagtttttacggctggaaccgcgtcgatcgcttcatggccgcgtggaaaagtgccggattcagcgtggt

SEQ ID NO: 646202 - DNA, 75 bp, synthetic construct
  source 1..75: mol_type = other DNA
cggaacgcctggttttactacttcatttacatgaagttaaaacaacaaactgtgcgactttcacgtcgcaccctc

SEQ ID NO: 646203 - DNA, 75 bp, synthetic construct
  source 1..75: mol_type = other DNA
tggtcatctggtcttcaccaaaaactacacatcgaaggccgcatatgtgggctatcgccacgaatgcgcctacat

SEQ ID NO: 646204 - DNA, 75 bp, synthetic construct
  source 1..75: mol_type = other DNA
gcgtgcgggttatggccacgtttccggacaatgctgtcgatttcatcctcaccgacccgccatatctcgtcggtt

SEQ ID NO: 646205 - DNA, 75 bp, synthetic construct
  source 1..75: mol_type = other DNA
cgcgttaatggtgagcttctatggctggaaccgcgtcgatcgctttatggccgcctggaaaaatgcgggattcag

SEQ ID NO: 646206 - DNA, 75 bp, synthetic construct
  source 1..75: mol_type = other DNA
tcaacctgcgtggccgactggacgatgaacggcgagtatggcagcgagtttggcggatttttccccgtccaggtc

SEQ ID NO: 646207 - DNA, 75 bp, synthetic construct
  source 1..75: mol_type = other DNA
tggggtggaactacacaggcaaccggtatcacccgacggaaaagcccgtcaccagtctgcaacccctgatcgaat

SEQ ID NO: 646208 - DNA, 75 bp, synthetic construct
  source 1..75: mol_type = other DNA
cctggcaaaaggccgtccacgtctgccacaaaacccgcagccggacgtgctgggctggaaatattcaggcaatcg

SEQ ID NO: 646209 - DNA, 75 bp, synthetic construct
  source 1..75: mol_type = other DNA
ccacgttaaaatataactttatggcatttatgaaagttttcatttcatttattacgtttactttcatttatctaa

SEQ ID NO: 646210 - DNA, 75 bp, synthetic construct
  source 1..75: mol_type = other DNA
catggctgctggttattgagttgctggcaatattgctgctgatccctggcgactggacagacagagccatcaaaa

SEQ ID NO: 646211 - DNA, 75 bp, synthetic construct
  source 1..75: mol_type = other DNA
ctcctgcgccgggtgggcgcatgtcaaaactacaggctttttttttggtacactgtatagctatctacattacat

SEQ ID NO: 646212 - DNA, 75 bp, synthetic construct
  source 1..75: mol_type = other DNA
aagggaaaattatcgttgaacccagaactttacaaaaagaaggataacacctcgaacgaaaggaaaaatgattca

SEQ ID NO: 646213 - DNA, 75 bp, synthetic construct
  source 1..75: mol_type = other DNA
ttaatatgttgttcatatgctcaggggaaaatcagaagagtatctattaaattgatggccataacgctttttttt

SEQ ID NO: 646214 - DNA, 75 bp, synthetic construct
  source 1..75: mol_type = other DNA
cggttgtcattccgataacaatgatgacgtgctgtgtcctcattggcctgacgttcggcaacctccagaaacggg

SEQ ID NO: 646215 - DNA, 75 bp, synthetic construct
  source 1..75: mol_type = other DNA
agaagtccaaggggatgcaggacatgggcaagggctggtttgtgtgggtcaaaggccgcatggaagcctttgtca

SEQ ID NO: 646216 - DNA, 75 bp, synthetic construct
  source 1..75: mol_type = other DNA
gtgggctactgttttcacagttggtagcagcagggcagatcacaatgatcgatccccagcaggatacgacggaga

SEQ ID NO: 646217 - DNA, 75 bp, synthetic construct
  source 1..75: mol_type = other DNA
aagattgcacgggaaggaagaaagtttgggctaggccttgttgtttcttcccaaaggccatcagagctatctccg

SEQ ID NO: 646218 - DNA, 75 bp, synthetic construct
  source 1..75: mol_type = other DNA
atttcctcgaaaaaaaataagtttaaatccagtcggaactcttaaacgcttttccaaagatggtactgattattt

SEQ ID NO: 646219 - DNA, 75 bp, synthetic construct
  source 1..75: mol_type = other DNA
ggcttatcttcactgcgttcagtgccaatgccgggcgcataactatgagcaacccggagcagtcaaccatggcga

SEQ ID NO: 646220 - DNA, 75 bp, synthetic construct
  source 1..75: mol_type = other DNA
gtgtactgcgatcccccttacctgcggttcagtggcgagggcaatttcaccgcctacggaaaaccattcgatgaa

SEQ ID NO: 646221 - DNA, 75 bp, synthetic construct
  source 1..75: mol_type = other DNA
atgagcaaagaactgttatccggcacgccgcttaaatgggtgggcggaaaaagtcgcatcatgaacacactgaag

SEQ ID NO: 646222 - DNA, 75 bp, synthetic construct
  source 1..75: mol_type = other DNA
tggccacctggtcttcaccaaaaactacacatcgaaggccgcatatgtgggctatcgccacgaatgcgcctacat

SEQ ID NO: 646223 - DNA, 75 bp, synthetic construct
  source 1..75: mol_type = other DNA
tctggcaggagccaaaagtggcggtgtgtttcaggctgtgctgggggcggctgttatggcggttgctatatggat

SEQ ID NO: 646224 - DNA, 75 bp, synthetic construct
  source 1..75: mol_type = other DNA
atgttctgcctgttctgtacggtgaaatgcgtgtggggtcacgggtaatttcgcaggaaatcagcacggcagacg

SEQ ID NO: 646225 - DNA, 75 bp, synthetic construct
  source 1..75: mol_type = other DNA
tggcgtcaccgggcatggcacgcatctgcctttacggggatttccaacgatttggccgccgcatcgaccttcgag

SEQ ID NO: 646226 - DNA, 75 bp, synthetic construct
  source 1..75: mol_type = other DNA
tcagtcgtgacggccggagccgccgttgcagcatggggggcagccattggggccggtggtatgtcatgcatcatg

SEQ ID NO: 646227 - DNA, 75 bp, synthetic construct
  source 1..75: mol_type = other DNA
cgcgtctggcgggagccaaaagtggcggtctttttcaggctgtgctgggggcggcgttgattgcggtggcatggt

SEQ ID NO: 646228 - DNA, 75 bp, synthetic construct
  source 1..75: mol_type = other DNA
atgcagatcccggcgtttcgtcagaaactgagcgacggctggtaccaggtacgcattgccgggcgtgatgcaggt

SEQ ID NO: 646229 - DNA, 75 bp, synthetic construct
  source 1..75: mol_type = other DNA
agcccgtctgaatgagccgctggaaaatggtgccgtgatccacatcgtaccgcgtctggcgggtgctaaaagtgg

SEQ ID NO: 646230 - DNA, 75 bp, synthetic construct
  source 1..75: mol_type = other DNA
ggtgtgtttcaggtggtgctgggggcggcgctgattgcggtggcatggtggaaccctgtgggctggctgggtgcc

SEQ ID NO: 646231 - DNA, 75 bp, synthetic construct
  source 1..75: mol_type = other DNA
ttgcccaggggaacccgatgccggtgccttacggtgaaatgctggttggctcccggcgaatctcccaggacatca

SEQ ID NO: 646232 - DNA, 75 bp, synthetic construct
  source 1..75: mol_type = other DNA
cgaaggcaaagacgccggagtacaaaagcacggataacggtaaacagaacacgtatttttcgtcactggacaaca

SEQ ID NO: 646233 - DNA, 75 bp, synthetic construct
  source 1..75: mol_type = other DNA
tgaaggcacctcatcccgtgacaccctgcgcgacagtgcaaaacacagtgtgcgtgaactgccggtgaactggtg

SEQ ID NO: 646234 - DNA, 75 bp, synthetic construct
  source 1..75: mol_type = other DNA
gctgcttgagcagtatcactgtgccgggcagcaacgccttgccgccgtgcagcgggccatgcagcagggggccgc

SEQ ID NO: 646235 - DNA, 75 bp, synthetic construct
  source 1..75: mol_type = other DNA
cagcaacgtctggctgccgtacagcgggccatgcagcagggggccgcgaatgatgactggtttatgccggaggct

SEQ ID NO: 646236 - DNA, 75 bp, synthetic construct
  source 1..75: mol_type = other DNA
gggcaaccgccatcacccgacggaaaagcccgttaccagcctgcaaccgctgattgagagcttcacacacccgaa

SEQ ID NO: 646237 - DNA, 75 bp, synthetic construct
  source 1..75: mol_type = other DNA
ccgtccacgtctgccacaaaacccgctgccggacgtgctgggctggaattattcagggcaatcgtcatctcccga

SEQ ID NO: 646238 - DNA, 75 bp, synthetic construct
  source 1..75: mol_type = other DNA
tgccggcgataaaaccgatgaatggctgcaaccggcctgtaatgatatgtaccgcgtactcaaaaaagacgcgtt

SEQ ID NO: 646239 - DNA, 75 bp, synthetic construct
  source 1..75: mol_type = other DNA
tgacagacccgccatatctcgtcggtttacgtgaccgttccgggcgcaccatcgccggcgataaaaccgatgaat

SEQ ID NO: 646240 - DNA, 75 bp, synthetic construct
  source 1..75: mol_type = other DNA
tcacggacccgccatatctcgtcggtttgcgtgaccgttccgggcgcaccatcgccggcgataaaaccgatgaat

SEQ ID NO: 646241 - DNA, 75 bp, synthetic construct
  source 1..75: mol_type = other DNA
ctgccgcgcataccaccatcaaccagaaaggaaagctgcaggtgaatgccggcggtaaagcgtctgatgtcaccc

SEQ ID NO: 646242 - DNA, 75 bp, synthetic construct
  source 1..75: mol_type = other DNA
tcacccgacggaaaagcccgttaccagcctgcaaccgctgattgagagcttcacacacccgaacgcgattgtgct

SEQ ID NO: 646243 - DNA, 75 bp, synthetic construct
  source 1..75: mol_type = other DNA
tacacctggcaggggctctccctggatgacggccaggataacgccggttatgtgaagttcgggcatggcagtgca

SEQ ID NO: 646244 - DNA, 75 bp, synthetic construct
  source 1..75: mol_type = other DNA
gctatcgccacgaatgcgcctacatcctggcaaaaggccgtccacgtctgccaccaaacccgctgccggacgtgc

SEQ ID NO: 646245 - DNA, 75 bp, synthetic construct
  source 1..75: mol_type = other DNA
tatctcggcacgcgattatttgcatattgatatgaccgcttcttatatggtgggcgataaattagaagatatgca

SEQ ID NO: 646246 - DNA, 75 bp, synthetic construct
  source 1..75: mol_type = other DNA
tacgcctgaagcagaaaacgcggcggattgggtgttaaatagcctggcagacctgccgcaagcgataaaaaagca

SEQ ID NO: 646247 - DNA, 75 bp, synthetic construct
  source 1..75: mol_type = other DNA
tcggcgctcgatccggagatggtgaaagaggtgctggatacgatgattgggctggcgcaatcgggtatgacatgt

SEQ ID NO: 646248 - DNA, 75 bp, synthetic construct
  source 1..75: mol_type = other DNA
atacccgcgtggatgatggcggaacgctggatgtccgcaacggtggtaccgccaccaccgtatccatgggaaatg

SEQ ID NO: 646249 - DNA, 75 bp, synthetic construct
  source 1..75: mol_type = other DNA
gagtgccactctttcactgaaacaagcggaaaaaaactgggcagattacgaggcactaccgcgtaactcgcgtca

SEQ ID NO: 646250 - DNA, 75 bp, synthetic construct
  source 1..75: mol_type = other DNA
cgaagtttgattttgaatccatcaccttcagtcatgcgaaggtgtcggccattgcggtacttgtaacttcgcgtt

SEQ ID NO: 646251 - DNA, 75 bp, synthetic construct
  source 1..75: mol_type = other DNA
cgcggagtttggcagtgcgatcccgtttctctggcagcatgaccattcccgcccggtggggcagtgtacggtgcg

SEQ ID NO: 646252 - DNA, 75 bp, synthetic construct
  source 1..75: mol_type = other DNA
tccgcttttccagtccggcagctgatgcactggtccgtaatgcgctggcagaagcggtggtggcgcgtctggaca

SEQ ID NO: 646253 - DNA, 75 bp, synthetic construct
  source 1..75: mol_type = other DNA
acggcaacactggtgaagcccgaacccggaatgccgtcacagctggcagccaggctggatgaagcctgggctgcc

SEQ ID NO: 646254 - DNA, 75 bp, synthetic construct
  source 1..75: mol_type = other DNA
atccgcaatattgagcgcgtcaggcaggaagtgggaatggtctttcagcatttcaatctcttccctcatctgacc

SEQ ID NO: 646255 - DNA, 75 bp, synthetic construct
  source 1..75: mol_type = other DNA
ggcactgtccatgcgtaaaaatgcgctgggtcagaaggaatacccggacatgaccctgctgggtggctccttcca

SEQ ID NO: 646256 - DNA, 75 bp, synthetic construct
  source 1..75: mol_type = other DNA
ttgattatctgcgtccgcagaccattatcgggcgatttggtcagggcgggatccctgcacttcgtcaggtgccgt

SEQ ID NO: 646257 - DNA, 75 bp, synthetic construct
  source 1..75: mol_type = other DNA
atctggtggtaagtttatgtaccagtgaacatctgcttgtgcatcatccgatgctggaaggtgttctgttgtctg

SEQ ID NO: 646258 - DNA, 75 bp, synthetic construct
  source 1..75: mol_type = other DNA
aacgtctgaggcagcgttcgctggcaaataaactgatcagcctcttccgtcagtttggtggtaagcgtacagcct

SEQ ID NO: 646259 - DNA, 75 bp, synthetic construct
  source 1..75: mol_type = other DNA
caatgaccggcaggctgaaaaccctgcgctgaccagtctgatggacgagtatgtctgctttgcatggcggacgac

SEQ ID NO: 646260 - DNA, 75 bp, synthetic construct
  source 1..75: mol_type = other DNA
tctgctggttcatcatccgatgctggaaggcattctgctgtctgaatgtgaacgtctgaaacaccattctctggc

SEQ ID NO: 646261 - DNA, 75 bp, synthetic construct
  source 1..75: mol_type = other DNA
cacgccgtatcctggggcgtgtgtcatccgaatatccactacttccagaatctgacgcccgggtgggtgtcattc

SEQ ID NO: 646262 - DNA, 75 bp, synthetic construct
  source 1..75: mol_type = other DNA
atgaccggaaacagccttgaagactggaaagagaacctgaaacggaaatcagaaaaagagctggaggaatggatc

SEQ ID NO: 646263 - DNA, 75 bp, synthetic construct
  source 1..75: mol_type = other DNA
ttattaatgatccagctagtgtccgccggtcagcgggtcagcgcattacgggcaattggcgcgagcgctccggta

SEQ ID NO: 646264 - DNA, 75 bp, synthetic construct
  source 1..75: mol_type = other DNA
aggcagagcgcagcactgacggatctgatggatcagtacgtgctcctggcataccgcacaacggttgacgatagc

SEQ ID NO: 646265 - DNA, 75 bp, synthetic construct
  source 1..75: mol_type = other DNA
atgtctactcaacttgatcccacccagctggccattgaatttttacgccgtgaccaaagcaatctttcacctgcc

SEQ ID NO: 646266 - DNA, 75 bp, synthetic construct
  source 1..75: mol_type = other DNA
ttgcgcctcaaactggtctggctttgctggcttgatttaatgaccggaaactgccttgacgactggacggagaat

SEQ ID NO: 646267 - DNA, 75 bp, synthetic construct
  source 1..75: mol_type = other DNA
agattggtgaaatggcttgtgtcgcagtccacccggattaccgcagttcatcaaggggcgaggttttgctggaac

SEQ ID NO: 646268 - DNA, 75 bp, synthetic construct
  source 1..75: mol_type = other DNA
gctttaatctgacctcggaagagattgccactcaactggccatcaaactgaaagctgaaaagatgattggttttt

SEQ ID NO: 646269 - DNA, 75 bp, synthetic construct
  source 1..75: mol_type = other DNA
gtcgctgtttcagtcactggcgagagctttaatctgacctcggaagagattgccactcaactggccatcaaactg

SEQ ID NO: 646270 - DNA, 75 bp, synthetic construct
  source 1..75: mol_type = other DNA
ctggtgctgtctggctgatgtccagcaccaatgccctggcgctgtccatgcgtaaaaatgcgctgggtcagaaag

SEQ ID NO: 646271 - DNA, 75 bp, synthetic construct
  source 1..75: mol_type = other DNA
agttaacgggcaaattaataccgttaattgaggaagtccttgccgcaggtgaaattgaaccaccacaacccgcgc

SEQ ID NO: 646272 - DNA, 75 bp, synthetic construct
  source 1..75: mol_type = other DNA
ggatgatttcaaatgggacgagattcttattcttggctatgcccctctaccgtggatcaaggttccagtggcggt

SEQ ID NO: 646273 - DNA, 75 bp, synthetic construct
  source 1..75: mol_type = other DNA
ggatgatttcaaatgggacgatattctgattcttggctatgaccctctaccgtggatcaaggttccagtggcggt

SEQ ID NO: 646274 - DNA, 75 bp, synthetic construct
  source 1..75: mol_type = other DNA
attgttagtcattgccgcgttctgtgtttgcgaaagaagcaaagaaagagtggggctgcgttaattaattttgtg

SEQ ID NO: 646275 - DNA, 75 bp, synthetic construct
  source 1..75: mol_type = other DNA
aagatctacggttgaaggtggtgcgcaaaatgtatgaattacgttttcgtgaaccaccgccagctcgccgttcag

SEQ ID NO: 646276 - DNA, 75 bp, synthetic construct
  source 1..75: mol_type = other DNA
tcccgttaaaagatcgcacctccatgatcttcctccagtacggtcagatcgacgtactggacggcgctttcgtgc

SEQ ID NO: 646277 - DNA, 75 bp, synthetic construct
  source 1..75: mol_type = other DNA
gccaacgtcaaaggaatgaatgaacctgctgatggtgcaatcaatctcgttaaaaccagtaatggctggaaagcc

SEQ ID NO: 646278 - DNA, 75 bp, synthetic construct
  source 1..75: mol_type = other DNA
ggccagaaggttgttcgcgtgtcttatacatggaagttggttgacgttccgggatggattgacaaaaaagcgttc

SEQ ID NO: 646279 - DNA, 75 bp, synthetic construct
  source 1..75: mol_type = other DNA
ggacacccggaaaacgaacgctgtgatgaactggctcgtgctgcggcgatgaatcccacactggaagatacgggc

SEQ ID NO: 646280 - DNA, 75 bp, synthetic construct
  source 1..75: mol_type = other DNA
ggatgatttcaaatgggacgaggttttaattcttggctatgaccctctaccgtggatcaaggttccagtggcggt

SEQ ID NO: 646281 - DNA, 75 bp, synthetic construct
  source 1..75: mol_type = other DNA
tgtcccgtgaaattgaccagctacagcgtatcgttgacacgcttcgcaccaaccctacagatcgtcgcatcctgc

SEQ ID NO: 646282 - DNA, 75 bp, synthetic construct
  source 1..75: mol_type = other DNA
ttgacgagattaaggaatggactgagccgggaaacggtaatcagaaagtagttcgcgtgtcttatacgtggaagc

SEQ ID NO: 646283 - DNA, 75 bp, synthetic construct
  source 1..75: mol_type = other DNA
gcgggctttagctttgcaatggaaaatgctggcaacgcagtcgtagcggcggcgaaataccgtgcaggctccaat

SEQ ID NO: 646284 - DNA, 75 bp, synthetic construct
  source 1..75: mol_type = other DNA
taattggtcagttgcataacatacagggccgacagttatttttaatggcatttcaccaatctcataccagttttt

SEQ ID NO: 646285 - DNA, 75 bp, synthetic construct
  source 1..75: mol_type = other DNA
tcttggtgtagctcaaaataatatggttgggaaacctattcgtttcagaccattaacatttgagagtaattttac

SEQ ID NO: 646286 - DNA, 75 bp, synthetic construct
  source 1..75: mol_type = other DNA
atggagcttgttactacgcagtcagtattgatgcaaattcaaccaacaattcagcgttttgccagaatgctagcc

SEQ ID NO: 646287 - DNA, 75 bp, synthetic construct
  source 1..75: mol_type = other DNA
attggaaaacctgttcgtttcagaccattaacatttgagagtaattttacccatggtcatatgcaacatattgtt

SEQ ID NO: 646288 - DNA, 75 bp, synthetic construct
  source 1..75: mol_type = other DNA
attgaactgctggtgcattactttttacatctacatacccgtcgtttgggatcggtttacccaggtattgctccc

SEQ ID NO: 646289 - DNA, 75 bp, synthetic construct
  source 1..75: mol_type = other DNA
cgctttcacgtcataacagcaagaagcaagtcgctgatgaactgggcatcggcattgctacgctctatcgtaaga

SEQ ID NO: 646290 - DNA, 75 bp, synthetic construct
  source 1..75: mol_type = other DNA
ggcaaaataccgcgcagggtctaataaccacgaaggcgtactggacgtgatcgataaagttcttaaacacgaagc

SEQ ID NO: 646291 - DNA, 75 bp, synthetic construct
  source 1..75: mol_type = other DNA
ggcaaagatgtttttaatggcgagctgtcgaaggatgcatttgctactgtcgtggaacatttgctgacgcgcccg

SEQ ID NO: 646292 - DNA, 75 bp, synthetic construct
  source 1..75: mol_type = other DNA
ggccatcggcgatattatggtgccggtccacaccggcaacggcagcatcgatctgattatccccggcgtacataa

SEQ ID NO: 646293 - DNA, 75 bp, synthetic construct
  source 1..75: mol_type = other DNA
gtaaaaaccgtgacgccagctacgccgcgtaaaatggctgtggcagatagcggggagaactgggaaacgttttaa

SEQ ID NO: 646294 - DNA, 75 bp, synthetic construct
  source 1..75: mol_type = other DNA
cgttgttgcagacgcgtaacaccctcaaccgcgcgggtatccgctacatgatggatcagaataatattggtagcg

SEQ ID NO: 646295 - DNA, 75 bp, synthetic construct
  source 1..75: mol_type = other DNA
cgatattgagatgctgcgtcaggcaggctttagttttgcaatggaaaatgccggcagcgcggtcgtcgcagcggc

SEQ ID NO: 646296 - DNA, 75 bp, synthetic construct
  source 1..75: mol_type = other DNA
agcagtccgggcgctgaccacacagcttccggcgtttcgtcagaaactgagcgacggctggtatcaggtacgtat

SEQ ID NO: 646297 - DNA, 75 bp, synthetic construct
  source 1..75: mol_type = other DNA
aatattcccgataacgccacggtgcagtcggtggtggatgacctcagccatgccggacagattcatttcacctcc

SEQ ID NO: 646298 - DNA, 75 bp, synthetic construct
  source 1..75: mol_type = other DNA
agcccgtctgaatgaaccgctggcaaatggtgctgtgatccatatcgtgccgcgtctggcaggagccaaaagtgg

SEQ ID NO: 646299 - DNA, 75 bp, synthetic construct
  source 1..75: mol_type = other DNA
tgtggcgcagatgctggcaccgaaagccaggacgcccacggcagcaagtacagataacggcaaacagaacaccta

SEQ ID NO: 646300 - DNA, 75 bp, synthetic construct
  source 1..75: mol_type = other DNA
gtcgccacggttatttaccgtgaaatgaccttcgccacactttggcatgtacttattggcgcggcgaaaaccacc

SEQ ID NO: 646301 - DNA, 75 bp, synthetic construct
  source 1..75: mol_type = other DNA
cggatatcccaggacatcagcacccgtgatgaaggtggtggcgggaaggtggtggttatcgggcggcaggggtaa

SEQ ID NO: 646302 - DNA, 75 bp, synthetic construct
  source 1..75: mol_type = other DNA
gcagatgctggcaccgaaagccaggacgcccacggcagcaagtacagataacggcaaacagaacacctatttctc

SEQ ID NO: 646303 - DNA, 75 bp, synthetic construct
  source 1..75: mol_type = other DNA
cggggaaatgcgcgtggggtcgcgggtggcttctcaggagatcagcacggcagacgagggggacggtggtcaggt

SEQ ID NO: 646304 - DNA, 75 bp, synthetic construct
  source 1..75: mol_type = other DNA
ggtgaaatgcgcgtgggctcccgggtggtatctcaggagatcagcactgcagaagaaggcgatggtggtcaggtt

SEQ ID NO: 646305 - DNA, 75 bp, synthetic construct
  source 1..75: mol_type = other DNA
ggtgaaatgcgcgtgggatcccgggtggtatctcaggagatcagcactgcagacgaaggcgatggtggtcaggtt

SEQ ID NO: 646306 - DNA, 75 bp, synthetic construct
  source 1..75: mol_type = other DNA
ggtgaaatgctggttggttcacgacggatatcccaggacatcagcacccgtgatgaaggcgggggcggaaaggtc

SEQ ID NO: 646307 - DNA, 75 bp, synthetic construct
  source 1..75: mol_type = other DNA
gtgaaatgcgcgtgggatcacgtgtggtatctcaggagatcagcacagcagatgaaggtgatggtggtcaggttg

SEQ ID NO: 646308 - DNA, 75 bp, synthetic construct
  source 1..75: mol_type = other DNA
gggcgtgatgccggtgaaaccgaattgtctgcccgtcttaatgagccgctggcaaatggtgccgtgatccacatc

SEQ ID NO: 646309 - DNA, 75 bp, synthetic construct
  source 1..75: mol_type = other DNA
gggggtgcggtgatccacattgttccgcgtctggcgggcgcaaaaagtggtggcgtgtttcaggcggtgctgggg

SEQ ID NO: 646310 - DNA, 75 bp, synthetic construct
  source 1..75: mol_type = other DNA
gtggtattgcccgtggggccacgccggaaagcagcggcagctatggcttcgtccgtctggagagtgacctgctca

SEQ ID NO: 646311 - DNA, 75 bp, synthetic construct
  source 1..75: mol_type = other DNA
gcgtatggcgggagctaaaagtggcggtgtgtttcaggtggtgctgggggcggcgctgattgcgacggcaatctg

SEQ ID NO: 646312 - DNA, 75 bp, synthetic construct
  source 1..75: mol_type = other DNA
gtgaaaacgggagccgaagccatccgggcgctggctatgcagtttccggcgtttcgtcagaagctgagcgacggc

SEQ ID NO: 646313 - DNA, 75 bp, synthetic construct
  source 1..75: mol_type = other DNA
tggggacagccgcagccggcagtaacatgacgttctcaccgtcccggaatggcacgtcactggacctgcaggccg

SEQ ID NO: 646314 - DNA, 75 bp, synthetic construct
  source 1..75: mol_type = other DNA
agattgccatcgtcccccggagtctgcaccggctgatttatggctctgacaaacgggccacgccgcccctggatg

SEQ ID NO: 646315 - DNA, 75 bp, synthetic construct
  source 1..75: mol_type = other DNA
tacagccttccgttatccgcaccttcagctcccggggagatatgcgtgtggggacctccactgcaggcagcggga

SEQ ID NO: 646316 - DNA, 75 bp, synthetic construct
  source 1..75: mol_type = other DNA
cacgtcactggacctgcaggccggactggaagcccgtgtccgggaaaatatcaccctgggcgttcaggccggtta

SEQ ID NO: 646317 - DNA, 75 bp, synthetic construct
  source 1..75: mol_type = other DNA
ggaaagcagcggcagctatggcttcgtccgtctggagggtgacctgctgagaacagaggttgccggtatgtctct

SEQ ID NO: 646318 - DNA, 75 bp, synthetic construct
  source 1..75: mol_type = other DNA
gtgatgcaggcgaaaccgaattatcatcccgtcttaatgagccgctggcaaatggtgccgtgatccacatcgtgc

SEQ ID NO: 646319 - DNA, 75 bp, synthetic construct
  source 1..75: mol_type = other DNA
atgctggaaggcattctcctgtctgaatgtgaacgtctgaggcagcgttcgctggcaaataaactgatcagcctc

SEQ ID NO: 646320 - DNA, 75 bp, synthetic construct
  source 1..75: mol_type = other DNA
tgaccggcttcacccggcacgccgtatcctggggcgtgtgtcatccgaatatctactacttccataatctgacgc

SEQ ID NO: 646321 - DNA, 75 bp, synthetic construct
  source 1..75: mol_type = other DNA
aactggtctggctatgttggtacgatttgatgatgggtgcgacgctggaagactggttggataacctgaaacgta

SEQ ID NO: 646322 - DNA, 75 bp, synthetic construct
  source 1..75: mol_type = other DNA
tttactgcaccacccaatgttggaagggatattactgagtgaatgtatccgcctcaaacaacgcccactggcaaa

SEQ ID NO: 646323 - DNA, 75 bp, synthetic construct
  source 1..75: mol_type = other DNA
atgaaatcacagtatcagacccgttatgaatggctttgcgaaagttaccagaaatggctgaccggcttcacccgg

SEQ ID NO: 646324 - DNA, 75 bp, synthetic construct
  source 1..75: mol_type = other DNA
aatgaacccctgacgtatctgatggatcagtatgtgcttctggcataccgcacaacggttgatacggctcactac

SEQ ID NO: 646325 - DNA, 75 bp, synthetic construct
  source 1..75: mol_type = other DNA
gtggtgaacttatgcaccagtgaacatctgctggttcatcatccgatgctggaaggcattctgctgtctgaatgt

SEQ ID NO: 646326 - DNA, 75 bp, synthetic construct
  source 1..75: mol_type = other DNA
cgatgttcttctctaacgccactattggcgtgtttgctaaccacttcggtggctggcgcgcggcgctgaagattt

SEQ ID NO: 646327 - DNA, 75 bp, synthetic construct
  source 1..75: mol_type = other DNA
atgacaaaagtattgctgtctcatcccccgcgcccggcgagccataactcaagccgcgctatggtgtgggtgcga

SEQ ID NO: 646328 - DNA, 75 bp, synthetic construct
  source 1..75: mol_type = other DNA
ctggatcttctgtttcagcatgtcgcgctatagccagcatctggaaaaacgttttaacaccgggcgtacaccgca

SEQ ID NO: 646329 - DNA, 75 bp, synthetic construct
  source 1..75: mol_type = other DNA
attgtggcccagggaacccgccacagcatgaaagcctcatcggacaataacgacttccgcgtccggggctggggc

SEQ ID NO: 646330 - DNA, 75 bp, synthetic construct
  source 1..75: mol_type = other DNA
ggcaatggggcgggctgacgctaactttaattattgcatcagttgggattgcgggggcgctaccgtgggggatct

SEQ ID NO: 646331 - DNA, 75 bp, synthetic construct
  source 1..75: mol_type = other DNA
ttcgccgcgctgatctactggatcttctgtttcagcatgtcgcgctatagccagcatctggaaaaacgttttaac

SEQ ID NO: 646332 - DNA, 75 bp, synthetic construct
  source 1..75: mol_type = other DNA
ggaactctctgaagcgttcaacggtatctcccagcgtcttatccccggcgcggttctggcgattgactgtgcggc

SEQ ID NO: 646333 - DNA, 75 bp, synthetic construct
  source 1..75: mol_type = other DNA
ggaactctctgaagcatttaacggcatttcccagcgcctgatcccaggtgcagttctggcgattgactgtgcggc

SEQ ID NO: 646334 - DNA, 75 bp, synthetic construct
  source 1..75: mol_type = other DNA
gcatggcggactggtcgattctggcaccgccgatgatgcaaggcttcttctccatcggtatcgcctgtatggccg

SEQ ID NO: 646335 - DNA, 75 bp, synthetic construct
  source 1..75: mol_type = other DNA
ccgcggctgtatcgggcatgtatgcggcaggggccagtatgatcctgggcggagtggcgcagatgctggcaccga

SEQ ID NO: 646336 - DNA, 75 bp, synthetic construct
  source 1..75: mol_type = other DNA
atgcggcaggggccagtatgatcctgggcggtgtggcgcagatgctggcccccaaacccagaaccccccgaacac

SEQ ID NO: 646337 - DNA, 75 bp, synthetic construct
  source 1..75: mol_type = other DNA
cctgcaaactggtttctccttcgcggtggcgatcttcatcatcactcagggtgtgcgcatgtttgtggcggaact

SEQ ID NO: 646338 - DNA, 75 bp, synthetic construct
  source 1..75: mol_type = other DNA
atctcaataggaatgttaatgtcgtatatcgtttcttatgcatacttggcacttttttcaattcataagaaatat

SEQ ID NO: 646339 - DNA, 75 bp, synthetic construct
  source 1..75: mol_type = other DNA
ccgttgccttacgtactaagcttaaggttttttaccgccctacagctttacttgaaggacgtaaaggtgctgaag

SEQ ID NO: 646340 - DNA, 75 bp, synthetic construct
  source 1..75: mol_type = other DNA
agtttttcactaaccgggtaacgaagacgctggggatgacactggcgctgatgatgacctgtcagagtgcaatgg

SEQ ID NO: 646341 - DNA, 75 bp, synthetic construct
  source 1..75: mol_type = other DNA
ggacgattaacaagaagaaaccggcagcaccggaagccgcaaaagctgagaaagcagataccgcagagcagaaat

SEQ ID NO: 646342 - DNA, 75 bp, synthetic construct
  source 1..75: mol_type = other DNA
ggacgattaaccagaaaaaaacgtcagcgtcttccgggcagaaggtatctgattcgccggttaatccgtctgata

SEQ ID NO: 646343 - DNA, 75 bp, synthetic construct
  source 1..75: mol_type = other DNA
gtgagtaagcgtaacgcagtaacgacgtttttcactaaccgggtgacaaaagcactgggaatgaccctggcgctg

SEQ ID NO: 646344 - DNA, 75 bp, synthetic construct
  source 1..75: mol_type = other DNA
cgggggatgaagtacaggtgaaaggcaatgttgcgaaggtggattcactgaatgactggggcacgctgcaggtct

SEQ ID NO: 646345 - DNA, 75 bp, synthetic construct
  source 1..75: mol_type = other DNA
cctggcatgagcatatctatgaaatgagcgccaatccgtttttgacctcattcgcctcgctattccattcggttt

SEQ ID NO: 646346 - DNA, 75 bp, synthetic construct
  source 1..75: mol_type = other DNA
gcaatcagcggcgatataaacgtgatgtgttgcgatatgttgcaattatcaaaattgctcagcgtattggcattc

SEQ ID NO: 646347 - DNA, 75 bp, synthetic construct
  source 1..75: mol_type = other DNA
ccaatttactggataaaaatggtaatcctgtggaaataatggtgtgtgatgatcaggaactgcatttttttgttc

SEQ ID NO: 646348 - DNA, 75 bp, synthetic construct
  source 1..75: mol_type = other DNA
acaacaccttatatctatgccattggcagcctgctggatggtaacggaaagaaaattgccacggataacgagacg

SEQ ID NO: 646349 - DNA, 75 bp, synthetic construct
  source 1..75: mol_type = other DNA
gagaaggacacccgtccgacctttgtggtgacgccgtccttcttcaaggtgaagccgaatggtcagcagacactg

SEQ ID NO: 646350 - DNA, 75 bp, synthetic construct
  source 1..75: mol_type = other DNA
cagcaccaggcgatcgttgatgcgataatccatagtgatggcaacgcagctttcaaagcttgtcaggcactgcta

SEQ ID NO: 646351 - DNA, 75 bp, synthetic construct
  source 1..75: mol_type = other DNA
tctttttatgctctcgtgtttatcagcggtatggtccgcactaacggaaaatgaaaagacatttaatataagtgg

SEQ ID NO: 646352 - DNA, 75 bp, synthetic construct
  source 1..75: mol_type = other DNA
gtgggaaatcatcttggttataatgtgcctcaaatcaggaaactgatggcaactatttgccaaatgaatctcaaa

SEQ ID NO: 646353 - DNA, 75 bp, synthetic construct
  source 1..75: mol_type = other DNA
tcatgggataaactcattgcaatgaaagacagcttaaaccgtgttgtcgaagaacccgtaaaagctcctaaatcg

SEQ ID NO: 646354 - DNA, 75 bp, synthetic construct
  source 1..75: mol_type = other DNA
gcattaaaagacgtggttacagacaagaatgatcgcaattctgttaataacaacaatcagctccagctcaaatca

SEQ ID NO: 646355 - DNA, 75 bp, synthetic construct
  source 1..75: mol_type = other DNA
gagtaatttaatattgttgtcattcaaatttatatcccactttatgccgcttattatcacaaaaataatgtacaa

SEQ ID NO: 646356 - DNA, 75 bp, synthetic construct
  source 1..75: mol_type = other DNA
atgcgctgtaaacatgctgtcattatgtgcatttataatggtgacaatgttaataatgttaaactagcagttgat

SEQ ID NO: 646357 - DNA, 75 bp, synthetic construct
  source 1..75: mol_type = other DNA
gctttacgagcagtttggtgatttgaaattcaaatacaggaacagggcgttctggtgcaggggggactacgtcga

SEQ ID NO: 646358 - DNA, 75 bp, synthetic construct
  source 1..75: mol_type = other DNA
cagatcgcaatgccgttaacaactcatcgattattcagcttcgtaacggatcattcatgtatttcatgtcgttga

SEQ ID NO: 646359 - DNA, 75 bp, synthetic construct
  source 1..75: mol_type = other DNA
aattctgggcgtaaacaaccttaagacgatgatccgtgaaatgattaaccggaacttgagagatggcgatcctca

SEQ ID NO: 646360 - DNA, 75 bp, synthetic construct
  source 1..75: mol_type = other DNA
cattaaaggggcaagcaatgttgatgctccaatccttccggtcaaggacacaagaacgggtggttttactcttaa

SEQ ID NO: 646361 - DNA, 75 bp, synthetic construct
  source 1..75: mol_type = other DNA
ctggcgctaaaattaaattaaccagctttcagaaaggcatgattgatgctcctttcttagagaataagaaaaagt

SEQ ID NO: 646362 - DNA, 75 bp, synthetic construct
  source 1..75: mol_type = other DNA
cctgatgactactgcgaacaattgttatctgaacagttgaaacggcagggtaataccacacgttgggtaaaagtt

SEQ ID NO: 646363 - DNA, 75 bp, synthetic construct
  source 1..75: mol_type = other DNA
gccagtattagaggcaaccccagaattaaaggcgatgatcaccgacaaatcagatcgcaatgccgttaacaactc

SEQ ID NO: 646364 - DNA, 75 bp, synthetic construct
  source 1..75: mol_type = other DNA
tacaaactccccgaaaaaacgcagtcgttcggtgtgacaattccgtccggacgtcagcatatgatcgaaaatcag

SEQ ID NO: 646365 - DNA, 75 bp, synthetic construct
  source 1..75: mol_type = other DNA
gctggtactttgttatcgcgatgaatataaactggcgctgggcgaggaacgtggcgagtttaacgtcttactggc

SEQ ID NO: 646366 - DNA, 75 bp, synthetic construct
  source 1..75: mol_type = other DNA
gaacattgtggaatttgctggtgatgatgaggcgctgattgatgagcgggtaaatgcactctgtgcgcggttgga

SEQ ID NO: 646367 - DNA, 75 bp, synthetic construct
  source 1..75: mol_type = other DNA
tctctgatgatgtagtggcgcttaccgcgaaatacggtggtttgttgtggggcgaacacggcaaaggttttcgcg

SEQ ID NO: 646368 - DNA, 75 bp, synthetic construct
  source 1..75: mol_type = other DNA
catcaggcgatgcagcgactgccgcgtaatcgctgtctggcgaccggatattcctgccgtagtcaggtaaaacgg

SEQ ID NO: 646369 - DNA, 75 bp, synthetic construct
  source 1..75: mol_type = other DNA
ttatcaacgctgccgtcagcaacgccagttaatcatcgacaaattccccaaacttaatcgctttttaaccggtta

SEQ ID NO: 646370 - DNA, 75 bp, synthetic construct
  source 1..75: mol_type = other DNA
gccaattccgtttgctgaggatacctgcgtaccgccggaacatctggcggattatattgctgaatttcgcgcgct

SEQ ID NO: 646371 - DNA, 75 bp, synthetic construct
  source 1..75: mol_type = other DNA
agagcaaaatttttactaagtgatattttagaatactcactaatcattaaagaagaactaaaatcatatctaggc

SEQ ID NO: 646372 - DNA, 75 bp, synthetic construct
  source 1..75: mol_type = other DNA
acccaggcactggaaacgatcaaaatcgtcggagaacgttactcgcctgagcatcaggctcgcgtaggccgttaa

SEQ ID NO: 646373 - DNA, 75 bp, synthetic construct
  source 1..75: mol_type = other DNA
ccttatcgcagaaggtaaagtcaaacatttcggactgtccgaaacgagtgtgcaaaccattcgtcgtgcacatgc

SEQ ID NO: 646374 - DNA, 75 bp, synthetic construct
  source 1..75: mol_type = other DNA
taaagagatgctcgggctgaatattgttgaatttgccggcgatgatgaggcgctgattgacgagagggtaagtgc

SEQ ID NO: 646375 - DNA, 75 bp, synthetic construct
  source 1..75: mol_type = other DNA
gcccggcgttttttggagaggaactttacggcgaattacgtaaagtcaaagcggcatttgatccacaaaaccggc

SEQ ID NO: 646376 - DNA, 75 bp, synthetic construct
  source 1..75: mol_type = other DNA
ttcctgtcgcagtcaggtgaaacgggttgaagggacaggggtacgccatcctgtgcaagcattactggagatcat

SEQ ID NO: 646377 - DNA, 75 bp, synthetic construct
  source 1..75: mol_type = other DNA
atgattgaaaacccatcaggttcttttgtcgaaaaaatattcactgatttaagaaatgaaataattttacgttgt

SEQ ID NO: 646378 - DNA, 75 bp, synthetic construct
  source 1..75: mol_type = other DNA
aagcaccagcttgatgaggataaaatgggagagcagttatcgattccctatccgggcagcccgtttacgggctgt

SEQ ID NO: 646379 - DNA, 75 bp, synthetic construct
  source 1..75: mol_type = other DNA
gatcccgccgaagatgagtgtgtcgagcttcatggggtatctgaagggtaaaagtagtctgatgctttacgagca

SEQ ID NO: 646380 - DNA, 75 bp, synthetic construct
  source 1..75: mol_type = other DNA
aaagcagtctgatgctttacgagcagtttggtgatttgaaattcaaatataggaacagggagttctggtgcagag

SEQ ID NO: 646381 - DNA, 75 bp, synthetic construct
  source 1..75: mol_type = other DNA
catagtatttgcgccaaaataccgaagacaggtgttctacagagagaagcgtagagcaaaaggctgtattttgag

SEQ ID NO: 646382 - DNA, 75 bp, synthetic construct
  source 1..75: mol_type = other DNA
gtgattctgccaggcgcgaatctgacgcaggctgcggaggtcgcagaacgtattcgcctgaagttaaatgaaaaa

SEQ ID NO: 646383 - DNA, 75 bp, synthetic construct
  source 1..75: mol_type = other DNA
gtgattctgccaggcgcgagtctgacggaggctgcggaagtcgcagaacgtattcgcctgaagttaaatgaaaaa

SEQ ID NO: 646384 - DNA, 75 bp, synthetic construct
  source 1..75: mol_type = other DNA
aataatatttaccttcaccgtcaaacatctttaccggatatattaaaagagtatggctataaaagttattttata

SEQ ID NO: 646385 - DNA, 75 bp, synthetic construct
  source 1..75: mol_type = other DNA
ctatccagagatgaaatacactgctttgtcatcgaacactatggtaggggaataccagtcaggaggaggaatgta

SEQ ID NO: 646386 - DNA, 75 bp, synthetic construct
  source 1..75: mol_type = other DNA
caataacatgcgggacaacgttaacaaaccatacatgctcaaatccatatacaggttcaacatttggaattgggc

SEQ ID NO: 646387 - DNA, 75 bp, synthetic construct
  source 1..75: mol_type = other DNA
agttgagattaaatccggtgatgcaaatcatctggttgttatgccacctaaattcgctttaccagccggtagtag

SEQ ID NO: 646388 - DNA, 75 bp, synthetic construct
  source 1..75: mol_type = other DNA
ctgcgacatgctgatcacccagcaggaaaagctcaaattatatgccgaccagcacgccgaagccggtttgattta

SEQ ID NO: 646389 - DNA, 75 bp, synthetic construct
  source 1..75: mol_type = other DNA
gacgtgcacatcaccattctcacatctttctgctattggtagtgattatttcaatataggcaaagaaaatcatgt

SEQ ID NO: 646390 - DNA, 75 bp, synthetic construct
  source 1..75: mol_type = other DNA
actgaaagcctggcgttgactattgaccgggtgattccttactggaatgaaactattctcccgcgcatgaagagc

SEQ ID NO: 646391 - DNA, 75 bp, synthetic construct
  source 1..75: mol_type = other DNA
acgagcaggtgaaacaatggcgtcgtggttttgcggtgactccgccggaactgactaaagatgatgagcgttatc

SEQ ID NO: 646392 - DNA, 75 bp, synthetic construct
  source 1..75: mol_type = other DNA
agctttgactttgcttacacctccgtcctgaaacgtgcaatccatactctgtggaacatactggacgaactggat

SEQ ID NO: 646393 - DNA, 75 bp, synthetic construct
  source 1..75: mol_type = other DNA
tcaatcacttcctgcttggtcttggcgttacgcaaccgaagctggacaaagtgaccggcgaaaccggtgaagcca

SEQ ID NO: 646394 - DNA, 75 bp, synthetic construct
  source 1..75: mol_type = other DNA
aaacgctattatctgggtaatgctgacgagatcgcggcgaaagcagcggcggttgctaaccagggtaaagcgaag

SEQ ID NO: 646395 - DNA, 75 bp, synthetic construct
  source 1..75: mol_type = other DNA
gaaatatctcgataacatgagcgaagaagagattcttgagttgaatattccgactggcgtaccgctggtttatga

SEQ ID NO: 646396 - DNA, 75 bp, synthetic construct
  source 1..75: mol_type = other DNA
atgagtgttgcgctaaacggctggtgtgatcgcgcgcacattaatgaagacataaaaaaagccggcatcatgccg

SEQ ID NO: 646397 - DNA, 75 bp, synthetic construct
  source 1..75: mol_type = other DNA
cggagcatggctgccagacgttgctagttccctgggctggccccggaaggcggtatacgctgctgttcgactcgt

SEQ ID NO: 646398 - DNA, 75 bp, synthetic construct
  source 1..75: mol_type = other DNA
atattatcaacctgaccgctccatggcaggttaaatatctttctctcgatgaaaacgccggttctgttaccgtca

SEQ ID NO: 646399 - DNA, 75 bp, synthetic construct
  source 1..75: mol_type = other DNA
gaaatatctcgataacatgagcgaagaagagattcttgagctgaatatcccgactggtgtgccgctggtgtatga

SEQ ID NO: 646400 - DNA, 75 bp, synthetic construct
  source 1..75: mol_type = other DNA
ttcgtcatggcgaaagtcagtggaacaaagaaaaccgtttcaccggttggtacgacgtggatctgtctgagaaag

SEQ ID NO: 646401 - DNA, 75 bp, synthetic construct
  source 1..75: mol_type = other DNA
gatcatatccatatgcttgtggagatcccgcccaaaatgagcgtatccgggtttatgggatatctgaaagggaaa

SEQ ID NO: 646402 - DNA, 75 bp, synthetic construct
  source 1..75: mol_type = other DNA
actgcgcaaaatgcactctgctaccagcgatgccctgcaggatgacggttttctttttcagctttatctgcctga

SEQ ID NO: 646403 - DNA, 75 bp, synthetic construct
  source 1..75: mol_type = other DNA
ttgtgcacagaaaccccccagctaggctgggggaagcgtagagcaataggctttttgagaaagttgtgtgagtgg

SEQ ID NO: 646404 - DNA, 75 bp, synthetic construct
  source 1..75: mol_type = other DNA
tggtagcgccggaagttgcacgctggtactacaaacggtactgcccgcgctgtggtttgccgatggtccttcgtg

SEQ ID NO: 646405 - DNA, 75 bp, synthetic construct
  source 1..75: mol_type = other DNA
aacccgtcggcgccacctgcggattttatccgccgggtgctggagccgctgctggcgaaaatgggaattcatcag

SEQ ID NO: 646406 - DNA, 75 bp, synthetic construct
  source 1..75: mol_type = other DNA
ctgtgccgtgcctccatcttagccgggctggcggggatgcaagggtacgcttcgccgctgcggtcacccggtccc

SEQ ID NO: 646407 - DNA, 75 bp, synthetic construct
  source 1..75: mol_type = other DNA
tgacgacattgttacattaataaaaaaatgtgtcgattgtaaattaaaagtttatatagtttctgcctctcttga

SEQ ID NO: 646408 - DNA, 75 bp, synthetic construct
  source 1..75: mol_type = other DNA
agtttggggatttgaaattcaaatacagaaacagggagttctggtgcagagggtactacgtcgatacggtgggta

SEQ ID NO: 646409 - DNA, 75 bp, synthetic construct
  source 1..75: mol_type = other DNA
ttatgggtgctaatgggcattgggtttatcgcctcgatgctccatctgggctcgccactgcgtgctttcaattcg

SEQ ID NO: 646410 - DNA, 75 bp, synthetic construct
  source 1..75: mol_type = other DNA
ggctttatgggatatctgaaagggaaaggcagtctgatgctttacgagcagtttggtgatttgaaattcaaatac

SEQ ID NO: 646411 - DNA, 75 bp, synthetic construct
  source 1..75: mol_type = other DNA
aagctgtgtgagtggaaaagtgtacggattctggaagctgaatgctgtgcagatcatatccatatgcttgtggag

SEQ ID NO: 646412 - DNA, 75 bp, synthetic construct
  source 1..75: mol_type = other DNA
ttgttgcaatggaaccagagcaaaaagaaaaaaaattatcgcgttaaatttgaagcggttcccagtattgatgac

SEQ ID NO: 646413 - DNA, 75 bp, synthetic construct
  source 1..75: mol_type = other DNA
atgagcgtatccgggtttatgggatatctgaaagggaaaagcagtctgatgctttacgagcagtttggtgatttg

SEQ ID NO: 646414 - DNA, 75 bp, synthetic construct
  source 1..75: mol_type = other DNA
tgttcatgggcggcccgttactggggtacctgttgctgagtctggctggcgtcgatggctgggcgatgcgtctgc

SEQ ID NO: 646415 - DNA, 75 bp, synthetic construct
  source 1..75: mol_type = other DNA
tctctggagagaaagattatgatctaaacggttttgattgcggcgaagagtcactaaacgcctttttagccaacc

SEQ ID NO: 646416 - DNA, 75 bp, synthetic construct
  source 1..75: mol_type = other DNA
cggttatcagacgatgctggcgcactacggttataaaccggaaatggagcaagaacgcctcgaatcaatgctctc

SEQ ID NO: 646417 - DNA, 75 bp, synthetic construct
  source 1..75: mol_type = other DNA
cgtgttctgtaccaacgatgacctggctgtcggcgcggcgtttgaatgtcagcgtttggggctgaaaattcctga

SEQ ID NO: 646418 - DNA, 75 bp, synthetic construct
  source 1..75: mol_type = other DNA
tcatacttagcggcgagatgatcgggcgtgcgctcttttatggcctgcatatgaccgtcggaatggccgtcgcag

SEQ ID NO: 646419 - DNA, 75 bp, synthetic construct
  source 1..75: mol_type = other DNA
aaaaccgggcgcgtgcatacttcttatcaccaggcggtgactgcgacagggcgcttgtcgtcaaccgatcctaac

SEQ ID NO: 646420 - DNA, 75 bp, synthetic construct
  source 1..75: mol_type = other DNA
tgacctttaaccagattgccctcgaagaggccggacgttacgccgccgaagatgcagatgtcaccttgcagctgc

SEQ ID NO: 646421 - DNA, 75 bp, synthetic construct
  source 1..75: mol_type = other DNA
ctgggactgtttaagaagtatgagttcagacgctggactgccgatgtagaagcaggtaaatggctgcaggctaaa

SEQ ID NO: 646422 - DNA, 75 bp, synthetic construct
  source 1..75: mol_type = other DNA
tgttcttgttggatgtgtgggcatcgacgctatcataatggtccccgcgtatcggaaattcgtgcaaaagcacgc

SEQ ID NO: 646423 - DNA, 75 bp, synthetic construct
  source 1..75: mol_type = other DNA
taagtctgttcaaggtgaaatcatcgacgaggccattatgacccgcgatgaagctcttaagcgtttgtctaaaat

SEQ ID NO: 646424 - DNA, 75 bp, synthetic construct
  source 1..75: mol_type = other DNA
cgcaaagctgcgcacgtaattgcgacaaattgcgacgttcaggcgttcattaagtctgttcagcgtgaaatcatc

SEQ ID NO: 646425 - DNA, 75 bp, synthetic construct
  source 1..75: mol_type = other DNA
tgccgcaagcgttgggaaaactctggttacttgccagtatggtgctcggcgttgttttcatttggatgatgacct

SEQ ID NO: 646426 - DNA, 75 bp, synthetic construct
  source 1..75: mol_type = other DNA
ctgtgtatgaagaagacaggcctatggcatttgctggatatttaatccgcgttagacctaattctatcggaaata

SEQ ID NO: 646427 - DNA, 75 bp, synthetic construct
  source 1..75: mol_type = other DNA
aattcaatggtaatgtttgcaagcctgtattacacaaaataacgcaggcttacggaataactatcgcaaactcac

SEQ ID NO: 646428 - DNA, 75 bp, synthetic construct
  source 1..75: mol_type = other DNA
accgggcaacggcggcagaagtgtttggtttgccactggaaaccgtcaccagcgagcaacgtcgtagcgcgaaag

SEQ ID NO: 646429 - DNA, 75 bp, synthetic construct
  source 1..75: mol_type = other DNA
attacattgctccccaaatttactggccattctcacggagtgccgcgcgttatgacgtgttggcaaaatggtggg

SEQ ID NO: 646430 - DNA, 75 bp, synthetic construct
  source 1..75: mol_type = other DNA
gcgtatcggttaatacaaaacccggaactatcagggaattgaatagcaccctgtcacagcaaccagccagtgtct

SEQ ID NO: 646431 - DNA, 75 bp, synthetic construct
  source 1..75: mol_type = other DNA
aatagttcacacgatccgcgcggttccgatacccgaggtgcagcagcctatgatgagtcctatgcggatacccgc

SEQ ID NO: 646432 - DNA, 75 bp, synthetic construct
  source 1..75: mol_type = other DNA
atggacggtttaaggattgagattttttcagaggaagttgagtatgaattaagcaacttcgattgtggagaagag

SEQ ID NO: 646433 - DNA, 75 bp, synthetic construct
  source 1..75: mol_type = other DNA
aattagcgatcaaaaagccagccacactcgttgctctggctcttttactgtgtagttgtaagaccacaccgccaa

SEQ ID NO: 646434 - DNA, 75 bp, synthetic construct
  source 1..75: mol_type = other DNA
tccctgaggttcaggactggatcacatcaatagtcgcagaagtggtttcccgctatccggtagatggcgtgcagt

SEQ ID NO: 646435 - DNA, 75 bp, synthetic construct
  source 1..75: mol_type = other DNA
ggtatagacaagaatgaagtctgttttcacaccacacgtcattctgttgcctctttactggtttcgagtggtcaa

SEQ ID NO: 646436 - DNA, 75 bp, synthetic construct
  source 1..75: mol_type = other DNA
catcagtctggcctcagcagcccatttttgtggttaagtagggctgggtatctcggatgtttaattggcatgata

SEQ ID NO: 646437 - DNA, 75 bp, synthetic construct
  source 1..75: mol_type = other DNA
ggtgatgatgttttatgccttgtgttttggaaggtgcgaacaagttcctgatatgagatcatcatattcatccgg

SEQ ID NO: 646438 - DNA, 75 bp, synthetic construct
  source 1..75: mol_type = other DNA
atgcaaaaatccttccgattcaccaattcatccatcaaagcccttccggcaaacacagataccagatctacagag

SEQ ID NO: 646439 - DNA, 75 bp, synthetic construct
  source 1..75: mol_type = other DNA
tggaggggcgtattcacgggcagcaatatgcgccgtctacctgtaacagagcccttgctattctgaaaacgatgg

SEQ ID NO: 646440 - DNA, 75 bp, synthetic construct
  source 1..75: mol_type = other DNA
tagatgaaataaaagaagagttaacaaaagacattcaaaaaaagtttaacgacatgctcaaaaaggcatttaagg

SEQ ID NO: 646441 - DNA, 75 bp, synthetic construct
  source 1..75: mol_type = other DNA
tctgtatgccacctggtttgccaacgatgaaacccgtaacggggcttacctggattcatgggtacagtacagctg

SEQ ID NO: 646442 - DNA, 75 bp, synthetic construct
  source 1..75: mol_type = other DNA
tatagtcagaacatacaagcttaatattggtgagaattataatggcgagcttaatgtggttgatggtgggcaata

SEQ ID NO: 646443 - DNA, 75 bp, synthetic construct
  source 1..75: mol_type = other DNA
tcttgcgtaggggatatatgttatgtagacggcactgtaaatattacaagcccttgggaagatggtaatgttcag

SEQ ID NO: 646444 - DNA, 75 bp, synthetic construct
  source 1..75: mol_type = other DNA
ccgaggtgaacaccacgctggcgccggttgtggtgcactggaaggcgcaggggcatgaacgcgccgcagacgtac

SEQ ID NO: 646445 - DNA, 75 bp, synthetic construct
  source 1..75: mol_type = other DNA
cggggtgggaagtaagataaccgttggttcaggagtccagaatattgacggactggactttaacggtggcacagt

SEQ ID NO: 646446 - DNA, 75 bp, synthetic construct
  source 1..75: mol_type = other DNA
aatggcgggcaattccttatccggaataataccaatctttatatcggtggaagaaacggaggttatggagaaata

SEQ ID NO: 646447 - DNA, 75 bp, synthetic construct
  source 1..75: mol_type = other DNA
tacagccggagcttatgattacatactgaaacgtggtcaggggattaacagcactaactggtatctgattagcag

SEQ ID NO: 646448 - DNA, 75 bp, synthetic construct
  source 1..75: mol_type = other DNA
ttatacgtctttaaatgacgacgataacaaactgatatccatgctgagatggaataatacaaaagggatgggata

SEQ ID NO: 646449 - DNA, 75 bp, synthetic construct
  source 1..75: mol_type = other DNA
caacggatgcgcagaattggttacaggcgcgcgggagtcatgtaaatgaatcatatctcggcgtggcgcgtccga

SEQ ID NO: 646450 - DNA, 75 bp, synthetic construct
  source 1..75: mol_type = other DNA
atggttgataaaaaatgcatcactaaagaaaaaaacagtatgaataagaatatacgaattttacaatttctggtc

SEQ ID NO: 646451 - DNA, 75 bp, synthetic construct
  source 1..75: mol_type = other DNA
gacggctgcaggctctgtgctgaacattcatggcggaagtctgatactgaataatggaggagaatctgcaggtac

SEQ ID NO: 646452 - DNA, 75 bp, synthetic construct
  source 1..75: mol_type = other DNA
aaaccaattataatgaaaatatattatctgttgaaagtagtgttaacatcaaaggaggaacaagcaatacatcaa

SEQ ID NO: 646453 - DNA, 75 bp, synthetic construct
  source 1..75: mol_type = other DNA
atcaggatgaaccgctgaccaataacggattctggccagacctgaatctgaaggattttcaggcgcagcggtcac

SEQ ID NO: 646454 - DNA, 75 bp, synthetic construct
  source 1..75: mol_type = other DNA
accaaacggtaatggcatacaaagtttctgaggtcatcgctgcaatccgcgccgctggcattcgcatcaaaggag

SEQ ID NO: 646455 - DNA, 75 bp, synthetic construct
  source 1..75: mol_type = other DNA
tgggatattacacattatgcggcagttgttttgaacgagccgcattgccctcgaaatcgaaacagaaaaaaattc

SEQ ID NO: 646456 - DNA, 75 bp, synthetic construct
  source 1..75: mol_type = other DNA
aagcccatacgttttatcagtcgctgggctttatcccgttggtcggagaaaacgaaaatgcgttatttttcccaa

SEQ ID NO: 646457 - DNA, 75 bp, synthetic construct
  source 1..75: mol_type = other DNA
aaatttctgaccggaccagaaaccgtgctggcgctgctggatgaacgggaaagaaaccagcaatacatcaaacgc

SEQ ID NO: 646458 - DNA, 75 bp, synthetic construct
  source 1..75: mol_type = other DNA
tgcgtgccgtcttggcaacatgaataaggcccgctccgatgcctatgcggaacaaatcaaggcggggctcagttg

SEQ ID NO: 646459 - DNA, 75 bp, synthetic construct
  source 1..75: mol_type = other DNA
gctgaatttattgctgcctttaatcccaagattgctttggcactactggatgaacgggaaagaaacctgcaatac

SEQ ID NO: 646460 - DNA, 75 bp, synthetic construct
  source 1..75: mol_type = other DNA
tgcagacccgggataaccttgagcgcatggtggttatcgcggtgcgggtgctgggcctgcggcagggaagtatca

SEQ ID NO: 646461 - DNA, 75 bp, synthetic construct
  source 1..75: mol_type = other DNA
gccggattgctggcagaggcgtcagttgttatccgccgcatgaaggggctgaaaagggcaacggtaaagaaggta

SEQ ID NO: 646462 - DNA, 75 bp, synthetic construct
  source 1..75: mol_type = other DNA
gtggcggaggtgaacgcggagctggaaaaagtggaagccagctggaaggcaaatggagttctgagcgcaggggac

SEQ ID NO: 646463 - DNA, 75 bp, synthetic construct
  source 1..75: mol_type = other DNA
gtgtgtacaatgaggtgattgatgaatggtccaaccaattccctgaaattgagaacttactaactgttcttcaaa

SEQ ID NO: 646464 - DNA, 75 bp, synthetic construct
  source 1..75: mol_type = other DNA
caaggggtattcctctgcggcagatgttccggggccgtcgtgtgaaggggctaacgcgctgactgagtcttacaa

SEQ ID NO: 646465 - DNA, 75 bp, synthetic construct
  source 1..75: mol_type = other DNA
tggaaactactgtgggttaagctggaaggaaagcagcttccagcgcaaacaccgaccctgaaatgggcctgtttg

SEQ ID NO: 646466 - DNA, 75 bp, synthetic construct
  source 1..75: mol_type = other DNA
caacggaagtaaagacatggttacaggcacgcggtagccacgttaatgagtcatatctcggtgttgcacgcccga

SEQ ID NO: 646467 - DNA, 75 bp, synthetic construct
  source 1..75: mol_type = other DNA
atactaatctggcattgattacgctggcgaccggggcaggatcctgtatctgctcccacgttaacgacgccagtt

SEQ ID NO: 646468 - DNA, 75 bp, synthetic construct
  source 1..75: mol_type = other DNA
ggattgctttactcctgcttttaaccataaaaattaagctcaatacgtttgtttcactaattattgtctcgattg

SEQ ID NO: 646469 - DNA, 75 bp, synthetic construct
  source 1..75: mol_type = other DNA
ggaatatagcctctctcggcgcgacccgccgattcagcgaaagcgaaatgccaggctttgggatcagttttctca

SEQ ID NO: 646470 - DNA, 75 bp, synthetic construct
  source 1..75: mol_type = other DNA
tcaccaaagcgtctctggcaaccgagtccttcatctccgcagcatcgttccaggagacgactcgcgtgctgaccg

SEQ ID NO: 646471 - DNA, 75 bp, synthetic construct
  source 1..75: mol_type = other DNA
ggatcgtatgcgtcgccgtgctgcgggtgaagctccggctgcaccgcaggtgactgcagaagacgcatctgccag

SEQ ID NO: 646472 - DNA, 75 bp, synthetic construct
  source 1..75: mol_type = other DNA
cgcgctggaagagttcggtgatgaattcgacgcaaaaatgggtgcggaagcaatccaggccctgctgaagagcat

SEQ ID NO: 646473 - DNA, 75 bp, synthetic construct
  source 1..75: mol_type = other DNA
atgattaaaggaagtcagatttttggcatgaatatgccggaggaatcattgtttattcgaattgtcagcagttag

SEQ ID NO: 646474 - DNA, 75 bp, synthetic construct
  source 1..75: mol_type = other DNA
caggaaaaagtattatttatccgtgacagtgacggcttttatttaccgcagtcggttgacatattgctggccaca

SEQ ID NO: 646475 - DNA, 75 bp, synthetic construct
  source 1..75: mol_type = other DNA
aaaaaccgggaaatatgccggcgaagggggcttgctggatttaacgctgaatacgacggcctggtgtatgcggat

SEQ ID NO: 646476 - DNA, 75 bp, synthetic construct
  source 1..75: mol_type = other DNA
cgggaaaaataaacttgactgggcagtggtctgttcggcgtttattgtcggtatcgcactttttttcgaagtcgg

SEQ ID NO: 646477 - DNA, 75 bp, synthetic construct
  source 1..75: mol_type = other DNA
cctcggttcgctggttggacaatatgtacataaacgcatttccgttaaggtcttccgcgtgatggtcttcttatt

SEQ ID NO: 646478 - DNA, 75 bp, synthetic construct
  source 1..75: mol_type = other DNA
tttatgaccgcaactggattgccgcccccatcggggctgttgcaggtgcattaggcgcagcgttctcaaccaacg

SEQ ID NO: 646479 - DNA, 75 bp, synthetic construct
  source 1..75: mol_type = other DNA
agctggaactgcgtggtcttgctaccaccatcaaagctgcgaagaaaatggttgagcgcgaaaaagctgtcgttt

SEQ ID NO: 646480 - DNA, 75 bp, synthetic construct
  source 1..75: mol_type = other DNA
attgaccccacgaatgtcaccctgacatccggtgccacctggaatatccccgataacgccacggttcagtcggtg

SEQ ID NO: 646481 - DNA, 75 bp, synthetic construct
  source 1..75: mol_type = other DNA
agtttctgttcagtatactttattctgtgcagtctcatttttctggtgcgcaaacaatacaactgaatggtaatg

SEQ ID NO: 646482 - DNA, 75 bp, synthetic construct
  source 1..75: mol_type = other DNA
gcgtcaagatcgcaaaccgcgaactggaagcgaacggtaaagtgggtgcaacttactcccgcgatctgctgggta

SEQ ID NO: 646483 - DNA, 75 bp, synthetic construct
  source 1..75: mol_type = other DNA
attatggagcataaatccggagttgcccgttctgtatggacggcccgtcttaatggttgtcagattatctggaga

SEQ ID NO: 646484 - DNA, 75 bp, synthetic construct
  source 1..75: mol_type = other DNA
ctccagaagtggtattgcgggctgatgcaggcattcaacttggagagcatggataccgcaatgcatctgctatgt

SEQ ID NO: 646485 - DNA, 75 bp, synthetic construct
  source 1..75: mol_type = other DNA
ggcgttcaggccggttatgcccacagcatcaacggcagcagcgctgaaagttataacagtcaggccacgctgaat

SEQ ID NO: 646486 - DNA, 75 bp, synthetic construct
  source 1..75: mol_type = other DNA
agctggaactgcgtggtcttgctaccaccattaaagctgctaagaaaatggttgagcgcgaagaagctgtcgttt

SEQ ID NO: 646487 - DNA, 75 bp, synthetic construct
  source 1..75: mol_type = other DNA
cgtatgggccacatcgagctggcttctccgactgcgcacatctggttcctgaaatctctgccgtcccgtatcggc

SEQ ID NO: 646488 - DNA, 75 bp, synthetic construct
  source 1..75: mol_type = other DNA
taatttccgatggtccggaagcgccgcatgacattctgcgtctgcgtggtgttcatgctgtgactcgttacatcg

SEQ ID NO: 646489 - DNA, 75 bp, synthetic construct
  source 1..75: mol_type = other DNA
tgttaacgccaaaggcgagggcatggtgctgactggcccgaaagaagcagaacgtctgtatcgctctggtctggc

SEQ ID NO: 646490 - DNA, 75 bp, synthetic construct
  source 1..75: mol_type = other DNA
gtgaaagatttattaaagtttctgaaagcgcagactaaaaccgaagagtttgatgcggtcaaaattgctctggct

SEQ ID NO: 646491 - DNA, 75 bp, synthetic construct
  source 1..75: mol_type = other DNA
tatgacgtgttggcaaaatggtgggcggatgtcgttaaaccgaccaggacccgcctgtatatcggtatcgccttc

SEQ ID NO: 646492 - DNA, 75 bp, synthetic construct
  source 1..75: mol_type = other DNA
cctggcaaaacacatcctgccgctgtttcctgcgcatgaatgttatgtggagccgttctgcggcgcagctgcgct

SEQ ID NO: 646493 - DNA, 75 bp, synthetic construct
  source 1..75: mol_type = other DNA
ggtaaaacatcatctggaagaatttgtacgccagttcaaatgggcgctggtcagccggcagatctacaaatggct

SEQ ID NO: 646494 - DNA, 75 bp, synthetic construct
  source 1..75: mol_type = other DNA
tatctggcaaccacgtttttgggagcacgccatccgcaataccaaagattataggcatcatgttgattatattta

SEQ ID NO: 646495 - DNA, 75 bp, synthetic construct
  source 1..75: mol_type = other DNA
atatgaaattattcagaagcttactacaaataatgtcgacgaaatgatcaaggagttgattaacaatgagttgga

SEQ ID NO: 646496 - DNA, 75 bp, synthetic construct
  source 1..75: mol_type = other DNA
gtgaaaatccgggttacgatccgctgcaatttatgctcgacgaagcccacaagcgtgggatgaaagtacacgcct

SEQ ID NO: 646497 - DNA, 75 bp, synthetic construct
  source 1..75: mol_type = other DNA
ctctgcgctggtgtatatcgaaaaatatacgggcaatgcgccgaagttaacggcgtttgatcagccagctattca

SEQ ID NO: 646498 - DNA, 75 bp, synthetic construct
  source 1..75: mol_type = other DNA
ttaacggcggatatccccagctcgcagctggcaaatgcctgtgccggtaactctgcgctggtgtatatcgaaaaa

SEQ ID NO: 646499 - DNA, 75 bp, synthetic construct
  source 1..75: mol_type = other DNA
ttgctggtgggtatgtagaaaataaaaatgccaatgggcttcaggtgcccacggtctataccgacaatggtacta

SEQ ID NO: 646500 - DNA, 75 bp, synthetic construct
  source 1..75: mol_type = other DNA
ggtaaaacatcacctggaagaatttatccgccagttcaaatgggcgctggttagccggcagatctacaaatggct

SEQ ID NO: 646501 - DNA, 75 bp, synthetic construct
  source 1..75: mol_type = other DNA
tgaagcctgctattgggcaaagtgctacagcctacatgggcgaccccatcataacatctgctactggatataaaa

SEQ ID NO: 646502 - DNA, 75 bp, synthetic construct
  source 1..75: mol_type = other DNA
tgatcgaaatgcgccgcagcgagaagaacgaacagtacgttcgttatggtgatttccgcgccgatccggtgaaaa

SEQ ID NO: 646503 - DNA, 75 bp, synthetic construct
  source 1..75: mol_type = other DNA
tctcaacgttccatcgcgatgtcgcgcaagggttatatcccatcgattgggcgggggacgtaacggatttcagtg

SEQ ID NO: 646504 - DNA, 75 bp, synthetic construct
  source 1..75: mol_type = other DNA
ggtacaacctgtcaccgccctgcaaagcgaatattccatgtggtggcgtgagcctgaacaggaaattctgccgtt

SEQ ID NO: 646505 - DNA, 75 bp, synthetic construct
  source 1..75: mol_type = other DNA
aaggtctggattatcagttgttgacgttagcggatttgttgaggctacagcagcagtttttacggcgaatggggg

SEQ ID NO: 646506 - DNA, 75 bp, synthetic construct
  source 1..75: mol_type = other DNA
taaaaacatcttccctggtcaggaaagaaatcttgaaagcatatctggctacgacaaaatcgttgtcaaatataa

SEQ ID NO: 646507 - DNA, 75 bp, synthetic construct
  source 1..75: mol_type = other DNA
agcctgagcaggagatcctgccgttgctggaggaactgggtattggttttgtacccttcagtccattaggtaagg

SEQ ID NO: 646508 - DNA, 75 bp, synthetic construct
  source 1..75: mol_type = other DNA
cctgatcgctgaaggcaaagttaaacatttcggtctgtccgaagcgggcgcgcaaaccattcgtcgtgctcatgc

SEQ ID NO: 646509 - DNA, 75 bp, synthetic construct
  source 1..75: mol_type = other DNA
tgccgacatcattctttcacaggatgactcactgcagataacccaggcgcttgaaaccattaaaatcgtcggcga

SEQ ID NO: 646510 - DNA, 75 bp, synthetic construct
  source 1..75: mol_type = other DNA
tctcaacgttccatcgcgatgtcgcgcgagggttatatcccatcaattgggcgggagacataacggatttgagtg

SEQ ID NO: 646511 - DNA, 75 bp, synthetic construct
  source 1..75: mol_type = other DNA
agcgttttgattatgagtgctttgatgtggacgtatgggaaggcctgcgttttggttttctgatcccgggtgatt

SEQ ID NO: 646512 - DNA, 75 bp, synthetic construct
  source 1..75: mol_type = other DNA
tttggttttctgatcaccggtaattatcgccgggggtggcgacgcggttactccatccttcgggcaatcatgcgt

SEQ ID NO: 646513 - DNA, 75 bp, synthetic construct
  source 1..75: mol_type = other DNA
gtgaaaaacctgaacgggcagaatggcaccatcagcctgcgtgtacgcccggatatggcacagaacaatgctgac

SEQ ID NO: 646514 - DNA, 75 bp, synthetic construct
  source 1..75: mol_type = other DNA
gagcgtggctttgctggctgggggtatttcttagccggaaaactggcgcattgtgtgctgtgcctgatacttccc

SEQ ID NO: 646515 - DNA, 75 bp, synthetic construct
  source 1..75: mol_type = other DNA
ggcaaaaagggctggattatcggttgttaacgttagcggatttgttgaggctacagcagcagtttttacggcgaa

SEQ ID NO: 646516 - DNA, 75 bp, synthetic construct
  source 1..75: mol_type = other DNA
gtcgaagaccttgcgacgcgcgggttcagcattgttaacagtcagggcagcgagagcagaaaccccgcactgagc

SEQ ID NO: 646517 - DNA, 75 bp, synthetic construct
  source 1..75: mol_type = other DNA
atgagcatggttaaacataaacgagggacctcctctacactcgatgtgcagcatgaggccgaactgaaggtgctg

SEQ ID NO: 646518 - DNA, 75 bp, synthetic construct
  source 1..75: mol_type = other DNA
atgagcatagttaaacataaactgggcacactccacacacttgatgtgcagcaagaagctgaactcatggctttg

SEQ ID NO: 646519 - DNA, 75 bp, synthetic construct
  source 1..75: mol_type = other DNA
tggaacaatcagtcaggacgaggataaccttttacctctgatgctgcgttactttaatagcaaggggtttgaagc

SEQ ID NO: 646520 - DNA, 75 bp, synthetic construct
  source 1..75: mol_type = other DNA
tggaagtctggttggaataatgtctggaacctgcccagattcaaatccacacatgtctgttcagtccgctactga

SEQ ID NO: 646521 - DNA, 75 bp, synthetic construct
  source 1..75: mol_type = other DNA
tcggcgtgcagtttttaacgggctggattgatgagagtacccggttcgctggcggtgatttccgcgcgacagaaa

SEQ ID NO: 646522 - DNA, 75 bp, synthetic construct
  source 1..75: mol_type = other DNA
ttcaacactggtagcaaaactgctgataactattatgcgtcaatttactccgttgaccagggggttaaaaagatc

SEQ ID NO: 646523 - DNA, 75 bp, synthetic construct
  source 1..75: mol_type = other DNA
gtgagcgaatgcccgctcaagatgattggattttaatttattcaaagcacggcgagtatatggcaggacaggtac

SEQ ID NO: 646524 - DNA, 75 bp, synthetic construct
  source 1..75: mol_type = other DNA
ggaaggcaaagacagcaaaatagccaatcttaccgccgaacgcgatgctcttcgtgaaggtgagatgggcgacgc

SEQ ID NO: 646525 - DNA, 75 bp, synthetic construct
  source 1..75: mol_type = other DNA
tcatcagcgcttacgctggtaatagcccagcgtctggtacgtaaactttgcccacattgtcgccagcagcaaggg

SEQ ID NO: 646526 - DNA, 75 bp, synthetic construct
  source 1..75: mol_type = other DNA
gaacgtagcagcatgcttcatcgaacagattttcacgatgattaccaaacggtaatggcatacaaagtttctgaa

SEQ ID NO: 646527 - DNA, 75 bp, synthetic construct
  source 1..75: mol_type = other DNA
aaatggcggacgtctggatgtgctgagcggacacacagccactaatacccgtgtggatgatggcggaacgctgga

SEQ ID NO: 646528 - DNA, 75 bp, synthetic construct
  source 1..75: mol_type = other DNA
ataattagtacgcttatttcacaaatgagtgcaatgatgactgaaaatacaaagacatcattcatatacttggta

SEQ ID NO: 646529 - DNA, 75 bp, synthetic construct
  source 1..75: mol_type = other DNA
ccagaaaacgtgcacgaaccggcacagccgtcgtgacttttaccgtaaacacggaaggcactattgtcagtagtt

SEQ ID NO: 646530 - DNA, 75 bp, synthetic construct
  source 1..75: mol_type = other DNA
ccgtgagaaaggctcttgaagagttggcatcgataggatacctcaagtacaccgaaattaagaaagacggaaaag

SEQ ID NO: 646531 - DNA, 75 bp, synthetic construct
  source 1..75: mol_type = other DNA
tcgtctggtttggtattaaaacgtcgctggtagcgccgatgaatcgcctgatcgacaacattcgtcatattgctg

SEQ ID NO: 646532 - DNA, 75 bp, synthetic construct
  source 1..75: mol_type = other DNA
gcagtggaaagcgaaagcgaagcaactggccgagcgtggcgatctgacacccgccgactggaacaaccttgagct

SEQ ID NO: 646533 - DNA, 75 bp, synthetic construct
  source 1..75: mol_type = other DNA
cagcgtccgtctcagcattcagggcggccatctcggtcacgataacaacggcggtattgcccgtggggccacgcc

SEQ ID NO: 646534 - DNA, 75 bp, synthetic construct
  source 1..75: mol_type = other DNA
agccgtcgtgacttttaccgtaaacacggaaggcactattgtcagtagtttcttggaaatctcttcaggaacctt

SEQ ID NO: 646535 - DNA, 75 bp, synthetic construct
  source 1..75: mol_type = other DNA
ttcacgcaccgagcagcaagccgcttcgttagaagagacggcagccagcatggagcaattgactgcgacagtgaa

SEQ ID NO: 646536 - DNA, 75 bp, synthetic construct
  source 1..75: mol_type = other DNA
cagtgataaaggaggcagcagtgccgcaacgaaacgacaggagccgcagcacaccgacgaccagtccgaagaata

SEQ ID NO: 646537 - DNA, 75 bp, synthetic construct
  source 1..75: mol_type = other DNA
aaagacatcattcatatacttggtatatttggtcatgttcatgcaactaatctacaagcctcataaaattaataa

SEQ ID NO: 646538 - DNA, 75 bp, synthetic construct
  source 1..75: mol_type = other DNA
atcaggacggtttcgagaagcagtatatggcgtacatgcagcaaaacgatcgtctctatgacatcgccgtcgctg

SEQ ID NO: 646539 - DNA, 75 bp, synthetic construct
  source 1..75: mol_type = other DNA
agtggtagataacgtggtgcagactatgcgtgatatctccaccagttcgcagaaaatcgccgatattatcagcgt

SEQ ID NO: 646540 - DNA, 75 bp, synthetic construct
  source 1..75: mol_type = other DNA
ccgaaacggcgcaacgtggcggcaaagtggttgataacgtggtgcagaccatgcgcgatatctccaccagttcgc

SEQ ID NO: 646541 - DNA, 75 bp, synthetic construct
  source 1..75: mol_type = other DNA
cagcatcctgaactgccgcagaagttgattgcgatggaacctccattgcctgcagcatcgactgatggcacgcaa

SEQ ID NO: 646542 - DNA, 75 bp, synthetic construct
  source 1..75: mol_type = other DNA
tggtgatgtggtcagtaccggcgatattgttaacgcaggggagatttactttgataatcagacaacaccggacgc

SEQ ID NO: 646543 - DNA, 75 bp, synthetic construct
  source 1..75: mol_type = other DNA
aagtcacgcttgttttccaggacggcttccagctcgaaacactggaggaagcgcgcgcgaaagctgctgtacgta

SEQ ID NO: 646544 - DNA, 75 bp, synthetic construct
  source 1..75: mol_type = other DNA
gcgtgggtgtttactttaccggcggcaatttttctttctggtgggctgtactggatagcattgcagttgatttaa

SEQ ID NO: 646545 - DNA, 75 bp, synthetic construct
  source 1..75: mol_type = other DNA
aaaggcaaacgtaagccgccattctggacgcgtattgcgctgattgtttccgctgcgggcgtggcgttttcgcac

SEQ ID NO: 646546 - DNA, 75 bp, synthetic construct
  source 1..75: mol_type = other DNA
gcacaaatgacggcggcagtgtctatcggccttgccagttatattgggatgcccgtctccacaacacacgtcctc

SEQ ID NO: 646547 - DNA, 75 bp, synthetic construct
  source 1..75: mol_type = other DNA
ctgcgtgtgccggaagaacaggagcgagaagggctggacgtcaacagccacggcgagaatgcctataacgcgtaa

SEQ ID NO: 646548 - DNA, 75 bp, synthetic construct
  source 1..75: mol_type = other DNA
gcttctcacggtgcactggatttcgcgggtggcacggtggtgcacattaacgccgcaatcgccggtctggtgggc

SEQ ID NO: 646549 - DNA, 75 bp, synthetic construct
  source 1..75: mol_type = other DNA
aactgacggcggtgatgggcagcatttatcagtatatccacgtggcgtttcagggatcgtttgcctgcattaccg

SEQ ID NO: 646550 - DNA, 75 bp, synthetic construct
  source 1..75: mol_type = other DNA
cccgcgccggatatgaccggggtggtcaatcagtcctttgataacaaagttcagcgttctgccattgcggaagcc

SEQ ID NO: 646551 - DNA, 75 bp, synthetic construct
  source 1..75: mol_type = other DNA
ccggcaaagtacagatgcccaacgatcaggaattcgatctcaccgggtgttttgtgactcttgagacctgggggg

SEQ ID NO: 646552 - DNA, 75 bp, synthetic construct
  source 1..75: mol_type = other DNA
atggctgcacctgcggtggccgataaagccgacaatgcgtttatgatgatttgtactgcgctggtgctgtttatg

SEQ ID NO: 646553 - DNA, 75 bp, synthetic construct
  source 1..75: mol_type = other DNA
ctggtggaaattcgcgatcgcgccatgggtatcatcattggtaccgtggtgtccgcggtgatttacacctttgtc

SEQ ID NO: 646554 - DNA, 75 bp, synthetic construct
  source 1..75: mol_type = other DNA
gggaaaatatcaccctgggcgttcaggccggttatgcccacagcgtcagcggcagcagcgctgaaggttataacg

SEQ ID NO: 646555 - DNA, 75 bp, synthetic construct
  source 1..75: mol_type = other DNA
tgaatggcgcgattgcccgttatcaccggcttcgttcatccccggtgagtcaaatggttttccctggggtaaacc

SEQ ID NO: 646556 - DNA, 75 bp, synthetic construct
  source 1..75: mol_type = other DNA
aggtgaggtcgatattatctactcccaggcagcggcctatttcgaacaggattacacggctttccttcgcagcgc

SEQ ID NO: 646557 - DNA, 75 bp, synthetic construct
  source 1..75: mol_type = other DNA
aaacgatcgaacaacgcccgctggttgtgctgcaagaaatcccggaaggtaacttcttcggcaaaatcattgatt

SEQ ID NO: 646558 - DNA, 75 bp, synthetic construct
  source 1..75: mol_type = other DNA
ttgatccgtgacgtaccgaatgaatactcgatctataaagaaaaagaatttacgtttaacggtattcgccagctg

SEQ ID NO: 646559 - DNA, 75 bp, synthetic construct
  source 1..75: mol_type = other DNA
gatgttcctcaaaccgggcatgcaggttccggtttctcagctgatccgcggtattaacctgcaatcgggtaacga

SEQ ID NO: 646560 - DNA, 75 bp, synthetic construct
  source 1..75: mol_type = other DNA
tggcagtgctgttttacggtattcagtcgaacgcgttttacaccaaatttgtcgcgatcttgtttgtggtcgcca

SEQ ID NO: 646561 - DNA, 75 bp, synthetic construct
  source 1..75: mol_type = other DNA
gagatcccttttctggcgctctctctggcggtactgttttatggcattcagtccaacgccttctataccaaattt

SEQ ID NO: 646562 - DNA, 75 bp, synthetic construct
  source 1..75: mol_type = other DNA
ttcacgcctgggatgcaacctggaactcggcgcaggcgctggataacgcactacagccggacagagcaggtcagt

SEQ ID NO: 646563 - DNA, 75 bp, synthetic construct
  source 1..75: mol_type = other DNA
gcccactatgcgaaaaacattcaccacaaaaacgggaaagtcaccttcctggaaattggtgccgcctgggcgggt

SEQ ID NO: 646564 - DNA, 75 bp, synthetic construct
  source 1..75: mol_type = other DNA
caaatggttttccctggggtaaaccgtgaacaggacgatgaagtggtctgtgaatcactggttatgtcggcactt

SEQ ID NO: 646565 - DNA, 75 bp, synthetic construct
  source 1..75: mol_type = other DNA
gtcgagagattgcgcgtaatttcactgcactcaattatcgtgttgatcccctgcactggcagacgctctgcatgg

SEQ ID NO: 646566 - DNA, 75 bp, synthetic construct
  source 1..75: mol_type = other DNA
gttcagctggaaagcatcgccattaccatcgtctggtctggtgtggtggcgtttataggctacaaactggcggat

SEQ ID NO: 646567 - DNA, 75 bp, synthetic construct
  source 1..75: mol_type = other DNA
ttttatctgcgccagcacggtgaggaaaaagggcgccagatagcctgtgccctgctggaagatttaatggaatcc

SEQ ID NO: 646568 - DNA, 75 bp, synthetic construct
  source 1..75: mol_type = other DNA
atgttctccacactccgccgcactctgtttgcgctgctggcttgtgcatcttttatcgtccatgccgccgcgcca

SEQ ID NO: 646569 - DNA, 75 bp, synthetic construct
  source 1..75: mol_type = other DNA
attctgacccgtctgcacgacgaggcggtttatctgccaatcagctatatctcgatgatggtggtggcaaaaccg

SEQ ID NO: 646570 - DNA, 75 bp, synthetic construct
  source 1..75: mol_type = other DNA
tgcgaacgtcagcaccgctatccgcaactcaccctcgatgcactcgaaagcgccattgccgccgagctggagggc

SEQ ID NO: 646571 - DNA, 75 bp, synthetic construct
  source 1..75: mol_type = other DNA
atgaaaaagccattaccacccgtattacgtgccgcgctgtatcgtcgcgccgtggcctgtgcatggctaaccctg

SEQ ID NO: 646572 - DNA, 75 bp, synthetic construct
  source 1..75: mol_type = other DNA
actgctggaagatttaatggaagccggaccactcaaggccgcgccctcactgtcctttctcgggctcgcggtgat

SEQ ID NO: 646573 - DNA, 75 bp, synthetic construct
  source 1..75: mol_type = other DNA
actgcacttgatgacgatgaaaagggagtaactttaagttacacccttggtggtgagcagaatttaagcattgtg

SEQ ID NO: 646574 - DNA, 75 bp, synthetic construct
  source 1..75: mol_type = other DNA
gaattcagagctgaatatttatcagtacggtggcggtaactctgctgttgcattgcaggctgatgcccgcaactc

SEQ ID NO: 646575 - DNA, 75 bp, synthetic construct
  source 1..75: mol_type = other DNA
gttgctattaattatttcagtatcaatggctatggcggacaaaatatagttccgttcggggagcggggggggtgt

SEQ ID NO: 646576 - DNA, 75 bp, synthetic construct
  source 1..75: mol_type = other DNA
taattcagactttccttgcaggctatttagtgcagacgttattgtttaacaaagcaattccaacagatgcattga

SEQ ID NO: 646577 - DNA, 75 bp, synthetic construct
  source 1..75: mol_type = other DNA
aacggcaatctgggcctttatgttcttcattctcagtaaagaggaactgctggcgtggggatggcgtataccttt

SEQ ID NO: 646578 - DNA, 75 bp, synthetic construct
  source 1..75: mol_type = other DNA
gagtacatccacagggtagtgcttgaaggtgagttcattggcaaacaagagaagaaaaccaacgagctttctgca

SEQ ID NO: 646579 - DNA, 75 bp, synthetic construct
  source 1..75: mol_type = other DNA
atgaaaaagccattaccacccgtattacgcgccgcgctgtatcgtcgtgccgtggcctgtgcatggctgaccctg

SEQ ID NO: 646580 - DNA, 75 bp, synthetic construct
  source 1..75: mol_type = other DNA
gactgactttgtaccgccgccgacactgcaaccaacgtttaatccgctgacggataatgttgtctcgctcgacct

SEQ ID NO: 646581 - DNA, 75 bp, synthetic construct
  source 1..75: mol_type = other DNA
gagcgcgaaatgacgctggtgatggactcatatcgcctgttcaatgttggactgcgccgccctgactgcgttatc

SEQ ID NO: 646582 - DNA, 75 bp, synthetic construct
  source 1..75: mol_type = other DNA
atgactgacaatgtttatacccctgaccaattccgcccgcactggggcggtgtagatgctgacaacgacattcac

SEQ ID NO: 646583 - DNA, 75 bp, synthetic construct
  source 1..75: mol_type = other DNA
ggaacgaatccgcttctcagctgtgttgattttcgtggtggtatggctgacgctctcttacattccgattgcgca

SEQ ID NO: 646584 - DNA, 75 bp, synthetic construct
  source 1..75: mol_type = other DNA
cgctctcttacattccgattgcgcatatggtctggggcggcggtttgctggcttctcacggtgcgctggattttg

SEQ ID NO: 646585 - DNA, 75 bp, synthetic construct
  source 1..75: mol_type = other DNA
tcataactgtgcggtgctgggattatttgctctggaaaacattaccatggcagaaatgttcggctgtaaaaaccg

SEQ ID NO: 646586 - DNA, 75 bp, synthetic construct
  source 1..75: mol_type = other DNA
ttttatctgcgccagcacggtgaggaaaaagggcgtcagatagcctgtgccctgctggaagatttaatggaatct

SEQ ID NO: 646587 - DNA, 75 bp, synthetic construct
  source 1..75: mol_type = other DNA
cgccattgccgccgagctggaaggcttctacctgcgccagcacggcgaggaaaaaggccgccagattgcctgtgc

SEQ ID NO: 646588 - DNA, 75 bp, synthetic construct
  source 1..75: mol_type = other DNA
ttctacctgcgccagcacggcgaggaaaaaggccgccagatagcctgtgcgctgctcgaagatttaatggaagcc

SEQ ID NO: 646589 - DNA, 75 bp, synthetic construct
  source 1..75: mol_type = other DNA
gacagcggggagcgaagaggacgccgcaaacgaattggctcacgccgtaaaagcggctgctaatcgctttctcac

SEQ ID NO: 646590 - DNA, 75 bp, synthetic construct
  source 1..75: mol_type = other DNA
taattactgtccgaatggaccttgatcaaagtcagttgcaggaagggaaaaactacccattcaacactctggttg

SEQ ID NO: 646591 - DNA, 75 bp, synthetic construct
  source 1..75: mol_type = other DNA
ttcactggttactaagaaaggagatggcacttatgagattggagaactgccaaaggctttcgatctggcagaact

SEQ ID NO: 646592 - DNA, 75 bp, synthetic construct
  source 1..75: mol_type = other DNA
tggtattgtggaaatcagccctgtccctggtgctggcgacactcccgctcatctttctgctgactcctctggtca

SEQ ID NO: 646593 - DNA, 75 bp, synthetic construct
  source 1..75: mol_type = other DNA
atgaccatgtgatgacgccaatgatgcaattgcaggacccggagaagacgaaggtgattatcgtgacgcttgccg

SEQ ID NO: 646594 - DNA, 75 bp, synthetic construct
  source 1..75: mol_type = other DNA
gttggcatttaatgtctgtgatgttgagtgcggcgtcgtgtctggactgggcgacgaaattaaccggtctgagtg

SEQ ID NO: 646595 - DNA, 75 bp, synthetic construct
  source 1..75: mol_type = other DNA
acgtctgtccgagatgaatgtcgagcctcatgttactgagcgaatgctcgtgacctgctccccgttgattagtac

SEQ ID NO: 646596 - DNA, 75 bp, synthetic construct
  source 1..75: mol_type = other DNA
gaaagagcatagcaagatgggtaatgttatccgccgtccaatcttcgaacaaattaagcctttcctcgaaaaggc

SEQ ID NO: 646597 - DNA, 75 bp, synthetic construct
  source 1..75: mol_type = other DNA
cctggtgctggcgacactcccgctcatctttctgctgactcctctggtcagccaactgtttgtcatcatttcctg

SEQ ID NO: 646598 - DNA, 75 bp, synthetic construct
  source 1..75: mol_type = other DNA
attgcttttttaaaaacaaccataccaataatatatctatcggatacaacatatgatcaattaaaaagctattat

SEQ ID NO: 646599 - DNA, 75 bp, synthetic construct
  source 1..75: mol_type = other DNA
tcagttctatagttatcaacgaaaggacggggatattaattaaagacccgttagactataagcactttggaaatg

SEQ ID NO: 646600 - DNA, 75 bp, synthetic construct
  source 1..75: mol_type = other DNA
gaaaactgaaatcgcgaaagcctccaatgttgcagctaaggccggtgaaaacgtgggcgggtggatcgatgattt

SEQ ID NO: 646601 - DNA, 75 bp, synthetic construct
  source 1..75: mol_type = other DNA
tccccaggcgaagggggttttctttggtttgacccatcaacatggtgctaatgaactggcgcgagcagtgctgga

SEQ ID NO: 646602 - DNA, 75 bp, synthetic construct
  source 1..75: mol_type = other DNA
agcccggatgcgaaagtcggcttcctggcgattgctaacaagttccaggcaatgatcgacagcggcaatattcca

SEQ ID NO: 646603 - DNA, 75 bp, synthetic construct
  source 1..75: mol_type = other DNA
gcagggacggcggatgtggttgcttctgccgcgcaggtggtgagtagctggggctttgcgattaccccggatacg

SEQ ID NO: 646604 - DNA, 75 bp, synthetic construct
  source 1..75: mol_type = other DNA
atcatcacacgcgacactttactgagcggctttgagatgtatctgccaggcattgaacgcaggcatcctgaagcc

SEQ ID NO: 646605 - DNA, 75 bp, synthetic construct
  source 1..75: mol_type = other DNA
gcggcgctcaaccggcgcaagccatcatggccgtgatgcgaaaaatgatgattgagtcgcaacaagacgactccg

SEQ ID NO: 646606 - DNA, 75 bp, synthetic construct
  source 1..75: mol_type = other DNA
catgtcaaagattatgactatttcttcttatcagaatcagcaaatgagtgtgatcaggaacgaatgattaataca

SEQ ID NO: 646607 - DNA, 75 bp, synthetic construct
  source 1..75: mol_type = other DNA
ttagttccgaagatatcgaataatatgaaaaccaatttcccagcaagcggtgtgagtgctttggaagatgattga

SEQ ID NO: 646608 - DNA, 75 bp, synthetic construct
  source 1..75: mol_type = other DNA
agccgattttgccgataccacggccagaaacctgtttgatgaagggctgcactgttttcgcaacaataatctgac

SEQ ID NO: 646609 - DNA, 75 bp, synthetic construct
  source 1..75: mol_type = other DNA
gtgcctgtagactccccacttttgccggagcagcacatcatcttcggcggacagcgctggaaagtgacagagatc

SEQ ID NO: 646610 - DNA, 75 bp, synthetic construct
  source 1..75: mol_type = other DNA
gtggtgctcaaccggcacaagccatcatggcggtgatgcgaaaaatgatgattgagtcgcaacaagacgactcag

SEQ ID NO: 646611 - DNA, 75 bp, synthetic construct
  source 1..75: mol_type = other DNA
aatttgcattgtcgccattatattatgctcggtacttagcccgctgttaatcagaacgggattacgagagatcaa

SEQ ID NO: 646612 - DNA, 75 bp, synthetic construct
  source 1..75: mol_type = other DNA
gtgattaatccactgaccgccatctggaattgcccgaatggtgaattacgtcatcatccgcaagaaattatgcag

SEQ ID NO: 646613 - DNA, 75 bp, synthetic construct
  source 1..75: mol_type = other DNA
gtactatttatggtaaaccatattcgggcccacaagaagtggctgatgccgatggcctcagcgtacgaatttcac

SEQ ID NO: 646614 - DNA, 75 bp, synthetic construct
  source 1..75: mol_type = other DNA
atttatgatctgtattataaacaaagtagaagatacagaacttggattgaaattaactcttgaaaacggcaacaa

SEQ ID NO: 646615 - DNA, 75 bp, synthetic construct
  source 1..75: mol_type = other DNA
atgaacaatattaaaatgatcacactcttccatccacatgacaaaacaccattcatgatctctattgtatgcaaa

SEQ ID NO: 646616 - DNA, 75 bp, synthetic construct
  source 1..75: mol_type = other DNA
ggtaagcaaagtaactggctttccgggcaacacggtgaagaaggcggttctatgcgcggcgcagcaaacgatctg

SEQ ID NO: 646617 - DNA, 75 bp, synthetic construct
  source 1..75: mol_type = other DNA
aagggcattgaatctgtatttgatactgccatggcaattcagtggtatgcgcagagggaaactgatatcgaaaac

SEQ ID NO: 646618 - DNA, 75 bp, synthetic construct
  source 1..75: mol_type = other DNA
gaatatctgatcgctgatgtgaacccggatttggtcaatctctataaggtcgtggcctatcagacagaggctttt

SEQ ID NO: 646619 - DNA, 75 bp, synthetic construct
  source 1..75: mol_type = other DNA
agtaaatctgcagcagaaattatcgccacaaaatcagttggctgggttggtgttgattatgccagaggtccagac

SEQ ID NO: 646620 - DNA, 75 bp, synthetic construct
  source 1..75: mol_type = other DNA
ccacaaaatcagctggctggtttggtgtcgatttggcgtccggtccagatatctcggtggaaactgaggtgcggg

SEQ ID NO: 646621 - DNA, 75 bp, synthetic construct
  source 1..75: mol_type = other DNA
atgagcactatcctgaaatgggcgggaaataaaaccgccattatgtccgaactgaaaaaacaccttcctgctggc

SEQ ID NO: 646622 - DNA, 75 bp, synthetic construct
  source 1..75: mol_type = other DNA
actgaaaaaataccttcctgctggccggcgactggttgaacctttcgcgggttcttgtgctgtgatgatagagac

SEQ ID NO: 646623 - DNA, 75 bp, synthetic construct
  source 1..75: mol_type = other DNA
atgagcactatcctgaaatgggcgggaaataaaaccgccattatgccagaactgaaaaaataccttcctgctggc

SEQ ID NO: 646624 - DNA, 75 bp, synthetic construct
  source 1..75: mol_type = other DNA
gtcggtacacggaagggccctgaataccacactgaatggcggttacgcctggaggcgctctgggagcatctgggg

SEQ ID NO: 646625 - DNA, 75 bp, synthetic construct
  source 1..75: mol_type = other DNA
taggtttttgtttggttggttgtgcaggtatgaaattacctgagtattcgcaagttaaagcaagtccgtattata

SEQ ID NO: 646626 - DNA, 75 bp, synthetic construct
  source 1..75: mol_type = other DNA
gcagatcgacgctgagtcctacatcctgatcgactataactccggcaaagtgctcgccgagcagaatgcggatgt

SEQ ID NO: 646627 - DNA, 75 bp, synthetic construct
  source 1..75: mol_type = other DNA
tgccaccgccacttcagtcccggccctggctgctgacagtgttgtacaggcagggaaaatcgtgaacggcgggac

SEQ ID NO: 646628 - DNA, 75 bp, synthetic construct
  source 1..75: mol_type = other DNA
gtgtattgcgatccgccatatgacggtaagttttccggctatcacactgatggtttcactgaagatgaccagtat

SEQ ID NO: 646629 - DNA, 75 bp, synthetic construct
  source 1..75: mol_type = other DNA
gatcatctgaaggtcatccggtcaacagtgacacatccctgattcgttcgctgtatcgcaatttcactcaccact

SEQ ID NO: 646630 - DNA, 75 bp, synthetic construct
  source 1..75: mol_type = other DNA
ccgtgggttatgtcgctataacaagagcgggcatttcaacattccctacgggaattataaaaatccgtatttccc

SEQ ID NO: 646631 - DNA, 75 bp, synthetic construct
  source 1..75: mol_type = other DNA
cagagatttttgagtgtgatgtcagaacaatcactggctggcaaagtcaggggctgagagttttgtcggggggag

SEQ ID NO: 646632 - DNA, 75 bp, synthetic construct
  source 1..75: mol_type = other DNA
cagcatcggcgtgtcagctggcgagggtaaatctgcaacagaaatcattgctgtttccggggcgcgctgctgggt

SEQ ID NO: 646633 - DNA, 75 bp, synthetic construct
  source 1..75: mol_type = other DNA
ataaaaaggttgccgctgattgtgaattgtttatatctcgcgccaaagttttatttgagatcgcaaacagggagg

SEQ ID NO: 646634 - DNA, 75 bp, synthetic construct
  source 1..75: mol_type = other DNA
acaggcagatgcgcaggaactgaaaaatgctcgtgaggaagggctggttcttgaaacggaattatttacctacat

SEQ ID NO: 646635 - DNA, 75 bp, synthetic construct
  source 1..75: mol_type = other DNA
gctcagcgtgaggccgacattgaaaatgaaaaacttcgtaaggaagtcgacgatatgcgcgtggctgctgagtcg

SEQ ID NO: 646636 - DNA, 75 bp, synthetic construct
  source 1..75: mol_type = other DNA
acgaaaagctccgcaaagaactggacgatttgcgtgcggcagcggagtcagatttacaacccggcaccattgact

SEQ ID NO: 646637 - DNA, 75 bp, synthetic construct
  source 1..75: mol_type = other DNA
cacctggcatccgttcttgaacatcggtcatcagaaggacatccggtcattgtttctaatagtgacacatccctg

SEQ ID NO: 646638 - DNA, 75 bp, synthetic construct
  source 1..75: mol_type = other DNA
ttctgtatctcaatcgtcatggttaccgtggattatgtcgctataacaagagcgggtatttcaacattccctacg

SEQ ID NO: 646639 - DNA, 75 bp, synthetic construct
  source 1..75: mol_type = other DNA
gaaaaagcccagcgggcaacatttatctgcgccagcttcgatgaaacgctggcaatgttgcacgcgggggatgtt

SEQ ID NO: 646640 - DNA, 75 bp, synthetic construct
  source 1..75: mol_type = other DNA
tcctgtatcttaatcgtcacggttaccgtggtttatgtcgctataacaagagcgggcatttcaacatcccctacg

SEQ ID NO: 646641 - DNA, 75 bp, synthetic construct
  source 1..75: mol_type = other DNA
gttcctgtgcagtgatgatggagacggagtaccccagctatcttgttgcggatattaatcctgatttaatcaacc

SEQ ID NO: 646642 - DNA, 75 bp, synthetic construct
  source 1..75: mol_type = other DNA
atgaccagtatcacctggcatccgttcttgaacatcgagcatctgaaggacatccggtcattgtttctaacagtg

SEQ ID NO: 646643 - DNA, 75 bp, synthetic construct
  source 1..75: mol_type = other DNA
gggattgtgttgataaaatcaggtacccgtaaagcgcgtaaacctgaactggaggtgaaccatggcgcagtttga

SEQ ID NO: 646644 - DNA, 75 bp, synthetic construct
  source 1..75: mol_type = other DNA
cagtcgtattcaatgatacatatgcgcccaagggatagtaacgatttcgtcgatgagtttacgccagcgctttac

SEQ ID NO: 646645 - DNA, 75 bp, synthetic construct
  source 1..75: mol_type = other DNA
gttaagactaaaagaaacggaagatgatatggctggtagtgattatattctgtttacaggtatgcgtgatactga

SEQ ID NO: 646646 - DNA, 75 bp, synthetic construct
  source 1..75: mol_type = other DNA
gatgatgaacataacgaaaaatttcaacgtgaaacgtttttctcattaagtggactgaatataccattagaagaa

SEQ ID NO: 646647 - DNA, 75 bp, synthetic construct
  source 1..75: mol_type = other DNA
catcagatcgttaaaacccccaatattgacaggcttgcccaggagggcgtcaaatttactgactactatgcccca

SEQ ID NO: 646648 - DNA, 75 bp, synthetic construct
  source 1..75: mol_type = other DNA
gggattgtgttaatcaaatcaggtacccgtaaagcgtgtaaacctgagccggaggtgaaccatggcgcagtttga

SEQ ID NO: 646649 - DNA, 75 bp, synthetic construct
  source 1..75: mol_type = other DNA
aggcctcaaagtggcgctgtttggcccaatcgccgggattggcgatgcgattttctggtttaccttattgccgat

SEQ ID NO: 646650 - DNA, 75 bp, synthetic construct
  source 1..75: mol_type = other DNA
agcaccagtggccggatggcacggcaggcatatgactggctgagtctggcaccactctttctggatactgaaacg

SEQ ID NO: 646651 - DNA, 75 bp, synthetic construct
  source 1..75: mol_type = other DNA
cgcggaagccctggaaatcggcctgaccgatgcgtccggtcaggtggtatttgaaaccagactgaagcccacggt

SEQ ID NO: 646652 - DNA, 75 bp, synthetic construct
  source 1..75: mol_type = other DNA
gtgtcgcatcgttctgaatttcagcacgtaatgactgaaatacgtaataatcctgtaaaatttctggaagagaat

SEQ ID NO: 646653 - DNA, 75 bp, synthetic construct
  source 1..75: mol_type = other DNA
gcctaaccgtaaccgtctgctgtggagcagcaatctgaatgttgatggcatgaagacaggaaccacggcaggcgc

SEQ ID NO: 646654 - DNA, 75 bp, synthetic construct
  source 1..75: mol_type = other DNA
cgcgtctggtttggtgataagagcgaagtgaatcttggggcaggcgaagcgggctcagtgaccataccgcgtggg

SEQ ID NO: 646655 - DNA, 75 bp, synthetic construct
  source 1..75: mol_type = other DNA
aactatatttcttatttaaaaaataatcatatcgacagtaacacggcttttattgatattggccataatggttct

SEQ ID NO: 646656 - DNA, 75 bp, synthetic construct
  source 1..75: mol_type = other DNA
ttattatccagcggacccgtattcttaacgcagcggcgcgcgaagccgaagcgtttgaagataaattctggtctg

SEQ ID NO: 646657 - DNA, 75 bp, synthetic construct
  source 1..75: mol_type = other DNA
caataaacacgatcgtcctcatcttgcgggttttgatagtgcagttaaagccagcaccaggcgcgcagggcagga

SEQ ID NO: 646658 - DNA, 75 bp, synthetic construct
  source 1..75: mol_type = other DNA
catgatgagacatctttaattacagttaatattacaagagaggatggcttgttaagactaaaagaaacggaatat

SEQ ID NO: 646659 - DNA, 75 bp, synthetic construct
  source 1..75: mol_type = other DNA
gaataaacgctcaatatgaaatggaattaaaagatgcctgctccagagttattgattctggttggtatataatgg

SEQ ID NO: 646660 - DNA, 75 bp, synthetic construct
  source 1..75: mol_type = other DNA
cattctcgctataaccaacaataatcttacacctatattaatagaacctgatgaaaatagttataatttaaaccc

SEQ ID NO: 646661 - DNA, 75 bp, synthetic construct
  source 1..75: mol_type = other DNA
ccgtgaacttgaaaatctggaaacgcacattccgttcctcggtacggttggctccatcagcccgtatattggtct

SEQ ID NO: 646662 - DNA, 75 bp, synthetic construct
  source 1..75: mol_type = other DNA
gggatatcgacttgctatacggtaacgaaggattattaccgctcgataccttcgcccgctttagccagaatccgg

SEQ ID NO: 646663 - DNA, 75 bp, synthetic construct
  source 1..75: mol_type = other DNA
gcccagagcatggtttatgaaccgctggtgaaatatcaggcagacggttcggtgatcccgtggctggcaaaaagc

SEQ ID NO: 646664 - DNA, 75 bp, synthetic construct
  source 1..75: mol_type = other DNA
tatttgcgctgctggcttgtgcgtcttttatcgtccatgccgctgcaccagatgaaatcaccaccgcctggccgg

SEQ ID NO: 646665 - DNA, 75 bp, synthetic construct
  source 1..75: mol_type = other DNA
gactggggagaatccatctaagcatctcgaagagattggccatatgctcaaaataccaactacctattcaagcta

SEQ ID NO: 646666 - DNA, 75 bp, synthetic construct
  source 1..75: mol_type = other DNA
tcttgttccatcagccaccgagattcttggggcagctcaaaatttgaactatatagcgtcaatacatgaaggtaa

SEQ ID NO: 646667 - DNA, 75 bp, synthetic construct
  source 1..75: mol_type = other DNA
attctgacccgtctgcatgacgaggcggtttatctgcctatcagttacatctcaatgatggtggtttcaaaaccg

SEQ ID NO: 646668 - DNA, 75 bp, synthetic construct
  source 1..75: mol_type = other DNA
cgcggaagccctggaaatcggcctgaccgatgcggccggtcaggtggtatttgaaacctggctgaagcccacggt

SEQ ID NO: 646669 - DNA, 75 bp, synthetic construct
  source 1..75: mol_type = other DNA
gggggctgttgtcactaaaagtgttcctgccggtataactgtgtgcggaaatccagcaagagaaatgaaaagatc

SEQ ID NO: 646670 - DNA, 75 bp, synthetic construct
  source 1..75: mol_type = other DNA
cttatggtgctgctacttggatttgcccctatatttccagacacctgtcatcacttaacccattactggcccgct

SEQ ID NO: 646671 - DNA, 75 bp, synthetic construct
  source 1..75: mol_type = other DNA
atatttgcagtgtaagcgacgtaaagataaatctgttgagcccccccctttatattatctctggagcagggaggc

SEQ ID NO: 646672 - DNA, 75 bp, synthetic construct
  source 1..75: mol_type = other DNA
acggcctggaaaccggtgcgtccgtggcgcataacggttgctgcctgaccgtgacggaaattaacggcaaccatg

SEQ ID NO: 646673 - DNA, 75 bp, synthetic construct
  source 1..75: mol_type = other DNA
atgtttacggggattgtacagggcaccgcaaaactggtgtcgattgacgagaaaccaaattttcgtacgcatgtg

SEQ ID NO: 646674 - DNA, 75 bp, synthetic construct
  source 1..75: mol_type = other DNA
tgtggctaacgatgccactccttatcttatggtgctgctacttaataacgatgtctggtgtaagagtcgtgaggt

SEQ ID NO: 646675 - DNA, 75 bp, synthetic construct
  source 1..75: mol_type = other DNA
agggaagctgtggctaacgatgccactccttatcttatggtgctgctacttaataacgatgtctggtgtaagtga

SEQ ID NO: 646676 - DNA, 75 bp, synthetic construct
  source 1..75: mol_type = other DNA
tttcctgtaatgccctctggcaaaagtgtgtccttgcaactctgtatcgggctgcagctacacatcctaaaatta

SEQ ID NO: 646677 - DNA, 75 bp, synthetic construct
  source 1..75: mol_type = other DNA
aacaaagatttttccactgctcaatctttaatcagggaagctttgttggctgaacctttactcgaacctgctata

SEQ ID NO: 646678 - DNA, 75 bp, synthetic construct
  source 1..75: mol_type = other DNA
aatataatttggcaaagtcattaaggatgtcaaaaaaatatgatcaggcaatacagcatttctatgaatatatat

SEQ ID NO: 646679 - DNA, 75 bp, synthetic construct
  source 1..75: mol_type = other DNA
ttcattttcttgcatgctaataaatatattccaagcagttgggtatgtttactttgagtcaatttcatctaatgt

SEQ ID NO: 646680 - DNA, 75 bp, synthetic construct
  source 1..75: mol_type = other DNA
cctgtataaaggcatgatgctaccactggctgtgctggcggacttaaccgtgctggttcgtcgcaacaccaaaaa

SEQ ID NO: 646681 - DNA, 75 bp, synthetic construct
  source 1..75: mol_type = other DNA
atgtcgcatttgagtttttccacaagttacatgtgccattttattgcttccacgatgtggatgtttcccctgagg

SEQ ID NO: 646682 - DNA, 75 bp, synthetic construct
  source 1..75: mol_type = other DNA
tccacccacaaagattatgggaaacctatcattattttatgggaatgggtatttatcgtagtaaaggctttttct

SEQ ID NO: 646683 - DNA, 75 bp, synthetic construct
  source 1..75: mol_type = other DNA
tgccactgttgaggggaccaatgccggcggtaagttcagtattgatggcatatccggtcaggccagcggcctgct

SEQ ID NO: 646684 - DNA, 75 bp, synthetic construct
  source 1..75: mol_type = other DNA
cagactgaagtccacggtcgccatcggggcgcaggccgccgctgtgcatggtatcagtgagcaggctctctgcgg

SEQ ID NO: 646685 - DNA, 75 bp, synthetic construct
  source 1..75: mol_type = other DNA
caggcatatgactggctgagtctggcaccgctctttctggatactgaaacggcaggactggacaataccgcggaa

SEQ ID NO: 646686 - DNA, 75 bp, synthetic construct
  source 1..75: mol_type = other DNA
ggccaaatgtcactggtggatttagcaaaatatgctcaggaacataatctggctccggtgcatcagagtggacgc

SEQ ID NO: 646687 - DNA, 75 bp, synthetic construct
  source 1..75: mol_type = other DNA
acaaggggaacagacctggtcgaacaacgacaaactgtcgccatacaccaataacatcattcaggtgtggaccag

SEQ ID NO: 646688 - DNA, 75 bp, synthetic construct
  source 1..75: mol_type = other DNA
aacgacaaactgtcgccgtataccaataacatcattcaggtgtggaccagcggcacgggggtcaacaaagaccag

SEQ ID NO: 646689 - DNA, 75 bp, synthetic construct
  source 1..75: mol_type = other DNA
ctcaggttctggtactgacgggtgtgccttatgaaaatctcgacctgccgaaactggacgatctttctaccggtg

SEQ ID NO: 646690 - DNA, 75 bp, synthetic construct
  source 1..75: mol_type = other DNA
acactatcagtaagttggagtcattaccccgaattacacttaaaacgactcaacagcttaacgttggcttgccac

SEQ ID NO: 646691 - DNA, 75 bp, synthetic construct
  source 1..75: mol_type = other DNA
ggcaatgagtcgccgtcaggctgaaaagttgcttttggacgtcatatgttatacgcgggagctggcaaaaaacgg

SEQ ID NO: 646692 - DNA, 75 bp, synthetic construct
  source 1..75: mol_type = other DNA
gtagtctgggaaggctggaggcgcttgccgtacaactggcaggaatgccggggctgaatggtgttcctcatgtgg

SEQ ID NO: 646693 - DNA, 75 bp, synthetic construct
  source 1..75: mol_type = other DNA
ataacaatgtgatggtatttgatacagactatacacctgttcaaaaaacgacgttaaatcaaaatgttactattc

SEQ ID NO: 646694 - DNA, 75 bp, synthetic construct
  source 1..75: mol_type = other DNA
accatttggtaagatttgacggcaaggtctggaaagatgtaacgcaaactaataaacctaagtttacccaccagc

SEQ ID NO: 646695 - DNA, 75 bp, synthetic construct
  source 1..75: mol_type = other DNA
ttattcttatagcatttcttctaaccgcatgtaacagcgaaccctcagaaaaagatatttatacagctttaagta

SEQ ID NO: 646696 - DNA, 75 bp, synthetic construct
  source 1..75: mol_type = other DNA
acggatggtcgccgtcgccagtctggaagctctcgccccgtcactgttgttgctggatgaacccagtcgggattt

SEQ ID NO: 646697 - DNA, 75 bp, synthetic construct
  source 1..75: mol_type = other DNA
ccaacagatgcattgatgattagttcgattctcggctttatgaccattccgttccttggttggttatccgataaa

SEQ ID NO: 646698 - DNA, 75 bp, synthetic construct
  source 1..75: mol_type = other DNA
ggcatggccaatgctttctatcattgtagataaaagctatgccccgagcaccattatggttgcactgattgtgat

SEQ ID NO: 646699 - DNA, 75 bp, synthetic construct
  source 1..75: mol_type = other DNA
acaaaactcgaatgggcgataggtgcggtagtgctggtgattatcagcctgcttgcaactctcgaacctttttga

SEQ ID NO: 646700 - DNA, 75 bp, synthetic construct
  source 1..75: mol_type = other DNA
tggaaacacgggtagggcaaaaaatcccgaatcctacctggacgccaactgcaggtattcgtcaacgctcactgg

SEQ ID NO: 646701 - DNA, 75 bp, synthetic construct
  source 1..75: mol_type = other DNA
acatttggcaggctgttttgcaaacgcagtttggtggcgtctggttatggcaaattgttctcgccctcgtaacgt

SEQ ID NO: 646702 - DNA, 75 bp, synthetic construct
  source 1..75: mol_type = other DNA
aacgcttgcgacttactgggggcaacttttactgcttaaagtcgtactggtgataattatggtgggcatcgcgct

SEQ ID NO: 646703 - DNA, 75 bp, synthetic construct
  source 1..75: mol_type = other DNA
tctggttatggcaaattgttctcgccctcgtaacgttgatcgtcgcccttatgcaaccgcggaatatgccacgtt

SEQ ID NO: 646704 - DNA, 75 bp, synthetic construct
  source 1..75: mol_type = other DNA
cttcttacgcccacagccggtacggttatgctgcaacaacaagcgatgaaaaacctgaaaaaccgccagcgcgcg

SEQ ID NO: 646705 - DNA, 75 bp, synthetic construct
  source 1..75: mol_type = other DNA
tcagcaatgctaacctacattatgttgtatgttatcaatcgacatggacttgagtctccagccgaagccgcccta

SEQ ID NO: 646706 - DNA, 75 bp, synthetic construct
  source 1..75: mol_type = other DNA
cggaccagttggcctggatgaaacgccaggtacctgagacgttaatcagcaagattatcctcgttaaaggcagcg

SEQ ID NO: 646707 - DNA, 75 bp, synthetic construct
  source 1..75: mol_type = other DNA
gattttgcccaggcgcggagtttggcccggcgaaacgctggccgcactaccactatgcggaactggcaaaacagt

SEQ ID NO: 646708 - DNA, 75 bp, synthetic construct
  source 1..75: mol_type = other DNA
tcctttgttagaaggcagaactaataacataaatatttatgaaaacatacataatcttctagctgtgaatgagtt

SEQ ID NO: 646709 - DNA, 75 bp, synthetic construct
  source 1..75: mol_type = other DNA
tgcgcagcgatatgttaagcaccattgagtacgctccggtgtggatcatcatggcggtagcactggcgctcggca

SEQ ID NO: 646710 - DNA, 75 bp, synthetic construct
  source 1..75: mol_type = other DNA
cagctgacgcgcagttgttgaattatgtcgcctggccgcagcggtggacgaggcggaaaagttatcggttttatg

SEQ ID NO: 646711 - DNA, 75 bp, synthetic construct
  source 1..75: mol_type = other DNA
taacgactctggtctgatgcacgttgcagcagccctcaatcgtccgctggttgccctgtatggtccgagtagccc

SEQ ID NO: 646712 - DNA, 75 bp, synthetic construct
  source 1..75: mol_type = other DNA
atgattacttatcaggaagctctgaaaagagcaataaactaccttgccaatacagagtttccagtcgtcataaca

SEQ ID NO: 646713 - DNA, 75 bp, synthetic construct
  source 1..75: mol_type = other DNA
ggaattcctcatcgcaccggctggcgcggcgaaatgcgctacggtttactcaacgatgtgcgcgtacttgataaa

SEQ ID NO: 646714 - DNA, 75 bp, synthetic construct
  source 1..75: mol_type = other DNA
atcgtatacctgtaaccaattttccctctcatcagaacgtccgatgattggcttttgcccaggagcggagtttgg

SEQ ID NO: 646715 - DNA, 75 bp, synthetic construct
  source 1..75: mol_type = other DNA
tccggcaaaacgctggccacactaccactatgcggaactggcaaagcagctgattgatgaaggttatcaggtggt

SEQ ID NO: 646716 - DNA, 75 bp, synthetic construct
  source 1..75: mol_type = other DNA
accggggaagaagtggccgatctcagcctgcaggagaatgacatcaaaaatgccattaacctgatgttccggggg

SEQ ID NO: 646717 - DNA, 75 bp, synthetic construct
  source 1..75: mol_type = other DNA
aaacatttgaaaactgaaggtattactacattagtgcattacccaatagcgcctcataatcaagaagcatataaa

SEQ ID NO: 646718 - DNA, 75 bp, synthetic construct
  source 1..75: mol_type = other DNA
ataacaaatccttcaatttgtcagttgaaaatgtatgcaatgcaatttcagataaaacaaaagttattctgccag

SEQ ID NO: 646719 - DNA, 75 bp, synthetic construct
  source 1..75: mol_type = other DNA
tggttctcatagaaaatatcatcatatttatactggtgttaatagtcgactcgatgaaattcaggcggcaatgct

SEQ ID NO: 646720 - DNA, 75 bp, synthetic construct
  source 1..75: mol_type = other DNA
aatcatcttaaaccaatatttgtagaaccagatgaagaaacattcaacattaatgttgatatgattagaaatgtc

SEQ ID NO: 646721 - DNA, 75 bp, synthetic construct
  source 1..75: mol_type = other DNA
ccaatggcttagatgcattgagcattaccttaaaagcatggatattattaggcaaaattaaagaaggggatgagg

SEQ ID NO: 646722 - DNA, 75 bp, synthetic construct
  source 1..75: mol_type = other DNA
ggactggatgcctactttagcgaaaatgatgaacttcaaattacctacagaccgtactttcgatggtgaatcgct

SEQ ID NO: 646723 - DNA, 75 bp, synthetic construct
  source 1..75: mol_type = other DNA
tgtgtgcgggcatttcattttcactggcagtgattgacccggcagcggtacaccttttgagttgggcgggggcgg

SEQ ID NO: 646724 - DNA, 75 bp, synthetic construct
  source 1..75: mol_type = other DNA
gaatttcgttttcactggctgttatcgacccggcagcagtgcatctgttgagttgggcgggggcggcatatattg

SEQ ID NO: 646725 - DNA, 75 bp, synthetic construct
  source 1..75: mol_type = other DNA
ttcacttcccatggatccaaacatgactgaagaggatattctgcaggttattaaagcggttaacatttttaaacc

SEQ ID NO: 646726 - DNA, 75 bp, synthetic construct
  source 1..75: mol_type = other DNA
tcatggggagatgctgctggctttagcttctatccagggaaaaatttaggtgctttaggcgatgctggcgctata

SEQ ID NO: 646727 - DNA, 75 bp, synthetic construct
  source 1..75: mol_type = other DNA
aatattagcaattaccgagaataatttggttccagtattaattgagcctgatgatgtaacttataatattgacat

SEQ ID NO: 646728 - DNA, 75 bp, synthetic construct
  source 1..75: mol_type = other DNA
aaataaatgagcaatataaagaagagctccataacgcctgtttaaatgttattgactccgggagttatattcttg

SEQ ID NO: 646729 - DNA, 75 bp, synthetic construct
  source 1..75: mol_type = other DNA
tatttaagcacaaatggcatacagacattaattcattacccaaccccaccacacctacaagacgcttacaaaaac

SEQ ID NO: 646730 - DNA, 75 bp, synthetic construct
  source 1..75: mol_type = other DNA
gcacgtcactggacctgcaggccggactggaagcccgtgtccgggaaaatatcaccctgggcgttcaggccggtt

SEQ ID NO: 646731 - DNA, 75 bp, synthetic construct
  source 1..75: mol_type = other DNA
aacgcaagcccgacgcttaatgacgctggaagatatcgtcagtggttattccaacgtgttgatttctctggtaga

SEQ ID NO: 646732 - DNA, 75 bp, synthetic construct
  source 1..75: mol_type = other DNA
cgctattttttgtcgccatctgtcattgcaatacgcccttggtaatgactccaacttattgatagtgttttatgt

SEQ ID NO: 646733 - DNA, 75 bp, synthetic construct
  source 1..75: mol_type = other DNA
tgccagacggtcgatcacctggtgcaagttaccgtcgaaaaccccggtacgcccattgcgcccgaacacttaccg

SEQ ID NO: 646734 - DNA, 75 bp, synthetic construct
  source 1..75: mol_type = other DNA
ttacccgccagtccaacttctcggcagatatcgcccacgaaattcgcacgccaattacgaatctggtgacgcaaa

SEQ ID NO: 646735 - DNA, 75 bp, synthetic construct
  source 1..75: mol_type = other DNA
catcttcattacataaatgatttgatgaataaacttattatgaccgcatcgatcatcagcatcctgatcgtcttt

SEQ ID NO: 646736 - DNA, 75 bp, synthetic construct
  source 1..75: mol_type = other DNA
atgctgtcatactgtgttactcaggaatttaccgcaagctgtcgaaaaatatcacacaattgttattccactgcc

SEQ ID NO: 646737 - DNA, 75 bp, synthetic construct
  source 1..75: mol_type = other DNA
atgagttttacggataactggtcagacgaagaattcattcgtcagataaaagaattaatcggtaacgaaggagat

SEQ ID NO: 646738 - DNA, 75 bp, synthetic construct
  source 1..75: mol_type = other DNA
tagctcgtagttatctaaaaaatataaaaaatatattaatcaaactgccaacagtattagatgacgagcgtcatg

SEQ ID NO: 646739 - DNA, 75 bp, synthetic construct
  source 1..75: mol_type = other DNA
tgggcgttcaggccggttatgcccacagcatcaacggcagcagcgctgaaggttataacagtcaggccacactga

SEQ ID NO: 646740 - DNA, 75 bp, synthetic construct
  source 1..75: mol_type = other DNA
tcacaaaattgttattccactgccctttttatcattaactttgccacttcacccatccatgcagaaaatacactc

SEQ ID NO: 646741 - DNA, 75 bp, synthetic construct
  source 1..75: mol_type = other DNA
acgccttcatcagagcctattaatcaatttgcgcgccaactcatcaccctacttgatacctctgatttaagttcg

SEQ ID NO: 646742 - DNA, 75 bp, synthetic construct
  source 1..75: mol_type = other DNA
gtatggactctctataatggcctggcaagtgagttgaaatggcgcgatgatacaacactcattaaccggacagcg

SEQ ID NO: 646743 - DNA, 75 bp, synthetic construct
  source 1..75: mol_type = other DNA
ttttattctaggtgaagaattcattggttcagccccgtgtgcactggtgctgggggataacatcttctacggtca

SEQ ID NO: 646744 - DNA, 75 bp, synthetic construct
  source 1..75: mol_type = other DNA
tagtaatgggtacttgaccgtaagtttaaatcgtttaagtaaaattcacagatgtgtattgcaattaaaaaaata

SEQ ID NO: 646745 - DNA, 75 bp, synthetic construct
  source 1..75: mol_type = other DNA
tcctgttacgcatgaaatatctatttcaacacatataaagctctacaatagaaatgggacgatgacagataaaac

SEQ ID NO: 646746 - DNA, 75 bp, synthetic construct
  source 1..75: mol_type = other DNA
ttgagattgccaaaagcctgaaaccgtccccgcgcggcgagctggaaatcactgacgtgaaccgtatctaccttg

SEQ ID NO: 646747 - DNA, 75 bp, synthetic construct
  source 1..75: mol_type = other DNA
tggccggtgggtcagggactcgtctctatccggtcaccatggcggtgagcaaacagctgctgccaatctacgaca

SEQ ID NO: 646748 - DNA, 75 bp, synthetic construct
  source 1..75: mol_type = other DNA
acagaaaaggttttattgatgcggagcaggttaaactccttgcgaagccgctaaaaaaaaatacatatgggaaat

SEQ ID NO: 646749 - DNA, 75 bp, synthetic construct
  source 1..75: mol_type = other DNA
gccaccgtcgaactctctccagttgctggacgaaacgttctcggtatccgggacggaattatccgcgaccaaaca

SEQ ID NO: 646750 - DNA, 75 bp, synthetic construct
  source 1..75: mol_type = other DNA
gaacaatttgaaaaccagaacctcgcttgggcctgtgtctatattacgtggggaggagcatctggatattgtgat

SEQ ID NO: 646751 - DNA, 75 bp, synthetic construct
  source 1..75: mol_type = other DNA
cttccagctgacgtataaaagtcaaaccaactttggaattttcccgtcacaatcgaaaaaagaggacttaggaca

SEQ ID NO: 646752 - DNA, 75 bp, synthetic construct
  source 1..75: mol_type = other DNA
agaacacatctccttctcttggttgtgagtatctaactcccggttgtatggaggaggagcatttcttattgttga

SEQ ID NO: 646753 - DNA, 75 bp, synthetic construct
  source 1..75: mol_type = other DNA
attcaaaggtacgatcgtatcacgtaagagtgtcgcagcattaatcacagatatcatcgataaacctgagaaaca

SEQ ID NO: 646754 - DNA, 75 bp, synthetic construct
  source 1..75: mol_type = other DNA
atgcgaaagctgaaaatgatgctcttctgcggaagcttgataatggtggcagggtgctcgtcaaaggaaaatgcc

SEQ ID NO: 646755 - DNA, 75 bp, synthetic construct
  source 1..75: mol_type = other DNA
ctgccggtgaactggtgggtacagccttctgttatccgcaccttcagctcccggggtgacatgagcatggggaca

SEQ ID NO: 646756 - DNA, 75 bp, synthetic construct
  source 1..75: mol_type = other DNA
tccagaaacggggttgactggatttatattccggctaaaaaggaatttaaggagcctgtcagcgtgttcacgtat

SEQ ID NO: 646757 - DNA, 75 bp, synthetic construct
  source 1..75: mol_type = other DNA
gcccgtttcagttgtcgccggaactggctggcgacacgcggcttgtgagtttttatcttacccagtcactggaac

SEQ ID NO: 646758 - DNA, 75 bp, synthetic construct
  source 1..75: mol_type = other DNA
gtgaaaacgacaacgggcgtgaataccagtccgacactgacaaaacgtgaaatcagcacgcgggttgatgttaat

SEQ ID NO: 646759 - DNA, 75 bp, synthetic construct
  source 1..75: mol_type = other DNA
gcaagtaaaagtgttagcacaacctctgaaaaaaaatgcttatggtcagtacctactaaaaatgattgaaggtta

SEQ ID NO: 646760 - DNA, 75 bp, synthetic construct
  source 1..75: mol_type = other DNA
tggcgacataattttacttggtggtctggctgagaataaagacagtaatgcagatacgggcctgtcatttttgcc

SEQ ID NO: 646761 - DNA, 75 bp, synthetic construct
  source 1..75: mol_type = other DNA
gctgggtgctcgtcttgatgatggtaatgcgttcactctgaatgtgggggggctgaatgcgttttacagtctgat

SEQ ID NO: 646762 - DNA, 75 bp, synthetic construct
  source 1..75: mol_type = other DNA
gcaggtaaaagtattagccgaaccgcttatcaagaatcaatatggtcaatatttgctgaaaatgatcagcgaata

SEQ ID NO: 646763 - DNA, 75 bp, synthetic construct
  source 1..75: mol_type = other DNA
acaggtgaaagcattagcggagccgctgaaaaaaaatgcttatggacagtatctgctgaaaatgattaaaggtta

SEQ ID NO: 646764 - DNA, 75 bp, synthetic construct
  source 1..75: mol_type = other DNA
tcaggaaagggtttattgatgctgagcaggtgaaagtgttagccgaaccgctgaagaaaaatgcttatggtcagt

SEQ ID NO: 646765 - DNA, 75 bp, synthetic construct
  source 1..75: mol_type = other DNA
agggcaacagcggttctccggtgcagtcggttacgtacaggaacagcggggcaattttcacggtgacgccggttg

SEQ ID NO: 646766 - DNA, 75 bp, synthetic construct
  source 1..75: mol_type = other DNA
accgatattaaccgtatttatatggaacaggggcgtttatccgttgccatgatggggcgtggttatgcatggctg

SEQ ID NO: 646767 - DNA, 75 bp, synthetic construct
  source 1..75: mol_type = other DNA
atgaaaacgcgtaaaggtattattttagctggtggttccggcactcgtctttatcctgtgactatggccgtgagt

SEQ ID NO: 646768 - DNA, 75 bp, synthetic construct
  source 1..75: mol_type = other DNA
gcgaaagtgctttacaagaaaatgagcaagaagatgatgttataagttcgccattgcctaaaaacacaattctct

SEQ ID NO: 646769 - DNA, 75 bp, synthetic construct
  source 1..75: mol_type = other DNA
ccggcacatatccttccgaaaagtgctgttgagccatcggtcatcgcacaggttgtcatcagcaaatataccgac

SEQ ID NO: 646770 - DNA, 75 bp, synthetic construct
  source 1..75: mol_type = other DNA
agcacattttcgcccggatgggtgtggagcttcccgtcagtacaatggcggatatggttggtgtcgccggagctg

SEQ ID NO: 646771 - DNA, 75 bp, synthetic construct
  source 1..75: mol_type = other DNA
gatgttgacacggatatcgcagaaatctcagcgcatctggacagtctgcttccccggaccggggacgaagaaaaa

SEQ ID NO: 646772 - DNA, 75 bp, synthetic construct
  source 1..75: mol_type = other DNA
gccgaattgcatgggggaagtgcttcatatcactatctcaataagcataatgtgttccgaattacgttaccgcaa

SEQ ID NO: 646773 - DNA, 75 bp, synthetic construct
  source 1..75: mol_type = other DNA
cgccattatactgtgctcagtattaagtccgttgttaatcagaacggggttacgagagatcaaaaagttgagtgg

SEQ ID NO: 646774 - DNA, 75 bp, synthetic construct
  source 1..75: mol_type = other DNA
ccgtacaaatgttaacaatgatatgttaaataacatacctgcttctgagacgataagtattgctggtatttatcg

SEQ ID NO: 646775 - DNA, 75 bp, synthetic construct
  source 1..75: mol_type = other DNA
acagggtaacaagattagctcgccactgacggtcctgccgccggtgcagcgcatcgattccatgatgaacggcca

SEQ ID NO: 646776 - DNA, 75 bp, synthetic construct
  source 1..75: mol_type = other DNA
aaagccaacacgctgcaaatagcactacaaacgcgtattaagttgttctggcgaccgaaggcgctggagaacgtc

SEQ ID NO: 646777 - DNA, 75 bp, synthetic construct
  source 1..75: mol_type = other DNA
gcgcgtaatcgtgggatcgaggtggcgacgggcaaatatgtcgcttttgtcgatgctgacgatgaggtctatccc

SEQ ID NO: 646778 - DNA, 75 bp, synthetic construct
  source 1..75: mol_type = other DNA
ttgcggatcggaaagtaccgaagataaccattaatgacaatacggtgacgtggtcgaatcttgagcagggtatgg

SEQ ID NO: 646779 - DNA, 75 bp, synthetic construct
  source 1..75: mol_type = other DNA
atggcaaaggaagggatatcagcgggtttctcactccgatattttttcttgatagattcacggcatcgtcaggct

SEQ ID NO: 646780 - DNA, 75 bp, synthetic construct
  source 1..75: mol_type = other DNA
actgcttagcgctgccagtttgtctgccctggcgtctgtaacgccagatcgtacccgtttgatatttaatgaaag

SEQ ID NO: 646781 - DNA, 75 bp, synthetic construct
  source 1..75: mol_type = other DNA
ttacgttacgcccttagctacctggctaaacaggatcagaaagaacacggtattattctgaggcgtagcaggctt

SEQ ID NO: 646782 - DNA, 75 bp, synthetic construct
  source 1..75: mol_type = other DNA
aaccgtctgggcaatttcgcggtggaaaacggtaggctgacggtgttgttctggagtccggtggtcgcctggatg

SEQ ID NO: 646783 - DNA, 75 bp, synthetic construct
  source 1..75: mol_type = other DNA
atgtataatgctaatcccaattacgaaatggatttcgcgattctgaaagacgtgaatgaacacatggaaggactg

SEQ ID NO: 646784 - DNA, 75 bp, synthetic construct
  source 1..75: mol_type = other DNA
aaatggatttcatgattctgaaagacgtgaatgaacacatggagggtatgtttcaacgtttttctaaactgttac

SEQ ID NO: 646785 - DNA, 75 bp, synthetic construct
  source 1..75: mol_type = other DNA
attcgcttactgcacttgatactgcactacgtcgcagatttgattttgaagcgatgctgccagatattacagttc

SEQ ID NO: 646786 - DNA, 75 bp, synthetic construct
  source 1..75: mol_type = other DNA
tcttattgagccatctaaacgggctggtgagccagaatcgcttagcgtattgctgccatactcttccactccatt

SEQ ID NO: 646787 - DNA, 75 bp, synthetic construct
  source 1..75: mol_type = other DNA
tcagttagctatcgcagtggataatattgtcaggccagagcgaacacggcagatgatcgttgatttttatcgcca

SEQ ID NO: 646788 - DNA, 75 bp, synthetic construct
  source 1..75: mol_type = other DNA
gcatgacgcctgaggtttaccagcgtttatcgacagccgttgaactgggtaaatggccagacggtgttgccttga

SEQ ID NO: 646789 - DNA, 75 bp, synthetic construct
  source 1..75: mol_type = other DNA
tgtgtatcgatcacgtgattcactatagtgataagtccgcggtagacgacttacgttacgccctcagctacctgg

SEQ ID NO: 646790 - DNA, 75 bp, synthetic construct
  source 1..75: mol_type = other DNA
tagtgataaatctgcggtagacgacttacgttacgccctcagctacctggctaaacaggatcagaaagaacacgg

SEQ ID NO: 646791 - DNA, 75 bp, synthetic construct
  source 1..75: mol_type = other DNA
ccaaacgagaacagaaagaacttggtattattcggtggcatagcaggcttcctgaaaaaagtaaccggggccgac

SEQ ID NO: 646792 - DNA, 75 bp, synthetic construct
  source 1..75: mol_type = other DNA
gcaggaaggccagaccgaacgagggaaagagtgcttcatctcgatgaactcccgctcgacgcctgggcgctggat

SEQ ID NO: 646793 - DNA, 75 bp, synthetic construct
  source 1..75: mol_type = other DNA
gtctgacgcaatttaaacaggattctaaattgtgggccgcctttgttgatacgattcaggacgtgtggaatgaat

SEQ ID NO: 646794 - DNA, 75 bp, synthetic construct
  source 1..75: mol_type = other DNA
caaagccgcagatggtaatcgcggtgccggttttaaatatccggttatgagtgtgctggatatctgccgccttcc

SEQ ID NO: 646795 - DNA, 75 bp, synthetic construct
  source 1..75: mol_type = other DNA
atgactaagaaatacacactaatctatgcagatccgccttggacacatcgtgacaaagccgcagatggtaatcgc

SEQ ID NO: 646796 - DNA, 75 bp, synthetic construct
  source 1..75: mol_type = other DNA
atttctggcctcatatatcgggggaacaactcttgctggtatgtttgcgatccagatgaacagtttgttaaatgg

SEQ ID NO: 646797 - DNA, 75 bp, synthetic construct
  source 1..75: mol_type = other DNA
ctgatggagaaagaaagtaaaggcgttatcgaagcaacgctaatggcggtgcgcatgcgtctgcgacctatcctg

SEQ ID NO: 646798 - DNA, 75 bp, synthetic construct
  source 1..75: mol_type = other DNA
ttctgatatcaatcagaccatttctacggcgttgggcggaacttacgttaacgacttcatcgaccgtggacgggt

SEQ ID NO: 646799 - DNA, 75 bp, synthetic construct
  source 1..75: mol_type = other DNA
actaacgatgttcgggatggtgcttgccatcgggctgctcgtcgatgatgcgatagtggtggtggagaacgtcga

SEQ ID NO: 646800 - DNA, 75 bp, synthetic construct
  source 1..75: mol_type = other DNA
gctgagctggaggtggtccgcctgcagggatgggcgtttgataatcaggaagatgtcgacgatgtcacctgtatt

SEQ ID NO: 646801 - DNA, 75 bp, synthetic construct
  source 1..75: mol_type = other DNA
attacaagaattggtctctcaatataacttatctgaaagagttatatttcataacagcaaaactcaaaaagagtt

SEQ ID NO: 646802 - DNA, 75 bp, synthetic construct
  source 1..75: mol_type = other DNA
gtgtcgcagcattaatcacagatatcatcgataaacctgagaaacacattggtgagaatataggcatcaatcaac

SEQ ID NO: 646803 - DNA, 75 bp, synthetic construct
  source 1..75: mol_type = other DNA
aagagatttacggcgaagataccgggaatccactggcgaagaaaattgcacagatttggaaggatgtaacaagcc

SEQ ID NO: 646804 - DNA, 75 bp, synthetic construct
  source 1..75: mol_type = other DNA
tggttccgggtattgttaaatttctggagaaaaccaatgagcgaaaaaacgacgttgacaaaaggcatcaccagt

SEQ ID NO: 646805 - DNA, 75 bp, synthetic construct
  source 1..75: mol_type = other DNA
agctattcgcccgccagtcgtcacatggtttcgacgtatggggcaatcagtgcgaaggcccgtcggtgcagttgc

SEQ ID NO: 646806 - DNA, 75 bp, synthetic construct
  source 1..75: mol_type = other DNA
atggtggtgttgtttttacgtctcccctcttctttcttgccggaagaagaccagggtgtctttctgaccatgatt

SEQ ID NO: 646807 - DNA, 75 bp, synthetic construct
  source 1..75: mol_type = other DNA
tcgtcaccatcgccaccgtgctggttgccagtagtgcggtgaccaaagatcatattctgctggcagctgatgtgc

SEQ ID NO: 646808 - DNA, 75 bp, synthetic construct
  source 1..75: mol_type = other DNA
ggcgcgttatgcaaggttgtttgcgccggggctgcatgtgctgtcgtataacgaagtgccggacgagctggagtt

SEQ ID NO: 646809 - DNA, 75 bp, synthetic construct
  source 1..75: mol_type = other DNA
gcagcattacccatccgttcgttcgcaagcaggagctgacggtgtataccctgaataatgagctggaaaatctgc

SEQ ID NO: 646810 - DNA, 75 bp, synthetic construct
  source 1..75: mol_type = other DNA
accattccggcacggttcatcggctgggcttccccgaggatatcgagtatgacgaacttccgggaaaaaatgacg

SEQ ID NO: 646811 - DNA, 75 bp, synthetic construct
  source 1..75: mol_type = other DNA
tgaagcctgctggtgtacacatgtgtcccaaatgtgggtttcgtcctcttggtggcgatgatgtggcaacagacc

SEQ ID NO: 646812 - DNA, 75 bp, synthetic construct
  source 1..75: mol_type = other DNA
tctggcgatcaacctgatcggcggtgtctgtatcgggattttcaaatataacctgagcgccgatgccgctttcca

SEQ ID NO: 646813 - DNA, 75 bp, synthetic construct
  source 1..75: mol_type = other DNA
atgacctctctcgcctttattctcggcgtattaccactggctatcagtaatggtgccggcagtggtgcgcagaac

SEQ ID NO: 646814 - DNA, 75 bp, synthetic construct
  source 1..75: mol_type = other DNA
attcaaggggaggccgcgccgggcaccagttccggtgatgcgatggcgctaatggaaaatcttgcctcacaattg

SEQ ID NO: 646815 - DNA, 75 bp, synthetic construct
  source 1..75: mol_type = other DNA
agtatcccaccattgcgccgcctgcggtgtcgatatcggccaattatcctggagccgatgcacaaaccgtgcagg

SEQ ID NO: 646816 - DNA, 75 bp, synthetic construct
  source 1..75: mol_type = other DNA
ggcgctgctgaccgaaggcgtttccctgcgcgatatcgtcaccatcgccaccgtgctggtcgccagtagcgcggt

SEQ ID NO: 646817 - DNA, 75 bp, synthetic construct
  source 1..75: mol_type = other DNA
aagcggaagagaaaagtctcgaaacgctgacccgcaccatcaccgaaaccagcgagcaacaggtcagttgggaaa

SEQ ID NO: 646818 - DNA, 75 bp, synthetic construct
  source 1..75: mol_type = other DNA
gaatggtctctgcaacattgctggctattttcttcgtaccggtgttctttgtcgtgatccgccgttgctttaaag

SEQ ID NO: 646819 - DNA, 75 bp, synthetic construct
  source 1..75: mol_type = other DNA
aaaggtacgatcgtatcacgtaagagtgtcgcagcattaatcacagatatcatcgataaacctgagaaacacatt

SEQ ID NO: 646820 - DNA, 75 bp, synthetic construct
  source 1..75: mol_type = other DNA
gccctgataaataccctaacccaaccgatggcctgccttgtggacgtaagagtacagcgaatgaattactggcgg

SEQ ID NO: 646821 - DNA, 75 bp, synthetic construct
  source 1..75: mol_type = other DNA
actccctggaaacaacaagtgatattctcaaagctgatgtgatcagaaaaacactggaaatcgtgttgcgataca

SEQ ID NO: 646822 - DNA, 75 bp, synthetic construct
  source 1..75: mol_type = other DNA
ccctaccgacggtttacctgttggatgtaagactaacacaccaaatgcaccggagttgattcatgaaaatcaagc

SEQ ID NO: 646823 - DNA, 75 bp, synthetic construct
  source 1..75: mol_type = other DNA
gaacggcgatctgcgccagcctttgctggtgttcataccgacctcgcttcgtactagcgccgaggattcttttgg

SEQ ID NO: 646824 - DNA, 75 bp, synthetic construct
  source 1..75: mol_type = other DNA
cgcacttcttcagcatcgtggtctctttcgtaagaatccaatcagtaacgagtggtctgtaaatccaaagtattc

SEQ ID NO: 646825 - DNA, 75 bp, synthetic construct
  source 1..75: mol_type = other DNA
cgatagatgccgacgacgccgacgatctgcgtcccggtgatgaaatcatggtcctgccgaagtacgaatcgaaaa

SEQ ID NO: 646826 - DNA, 75 bp, synthetic construct
  source 1..75: mol_type = other DNA
aaagtgttagcacaacctctgaaaaaaaatgcttatggtcagtacctactaaaaatgggtcacgtatccaaaggg

SEQ ID NO: 646827 - DNA, 75 bp, synthetic construct
  source 1..75: mol_type = other DNA
ttgaggctagcaacttcattgctacgattgaagagcgtcagggtctgaaagtttcctgcccggaagaaattgctt

SEQ ID NO: 646828 - DNA, 75 bp, synthetic construct
  source 1..75: mol_type = other DNA
aaaaagcaactttgctgtaacaggactttatttctatgacaacgacgttgtagaaatggcgaaaaaccttaagcc

SEQ ID NO: 646829 - DNA, 75 bp, synthetic construct
  source 1..75: mol_type = other DNA
tgtctctggcgttgttagtgctggtgggctgtcgttcacatccggaaattccggtgaatgatgagcaatcgctgg

SEQ ID NO: 646830 - DNA, 75 bp, synthetic construct
  source 1..75: mol_type = other DNA
cagcatcctcgacgctttataacgaaaggcaagaacccgttaccgttcattatcgtttttactggtatgacgcca

SEQ ID NO: 646831 - DNA, 75 bp, synthetic construct
  source 1..75: mol_type = other DNA
tgggtgataatatcttttacggtcatgacctaccaaaattaatggatacagctgttaatagagagagtggcgcaa

SEQ ID NO: 646832 - DNA, 75 bp, synthetic construct
  source 1..75: mol_type = other DNA
ataaaatagaattcgaggaaggatggcatttcatccgtgtaatgccctggactgccgatggcgacccgattccgc

SEQ ID NO: 646833 - DNA, 75 bp, synthetic construct
  source 1..75: mol_type = other DNA
aaaacggcgtactttccccgcgtgggcgggaaacgcaaacggatgtgcccgagttcgaaccgctgtttgccgatt

SEQ ID NO: 646834 - DNA, 75 bp, synthetic construct
  source 1..75: mol_type = other DNA
tcagctcggatcgttgggttatcagtgtaaaacggcaaatgatggcgtcgatgcgcttaatgtactaagcaagaa

SEQ ID NO: 646835 - DNA, 75 bp, synthetic construct
  source 1..75: mol_type = other DNA
accgatactggttgcattgttctgcatgttcgcgtcgagggagattatctttctattcgcgtacgcgatactggc

SEQ ID NO: 646836 - DNA, 75 bp, synthetic construct
  source 1..75: mol_type = other DNA
acctgagaaacacattggtgagaatataggcatcaatcaacccggtactgatggtgataagccattcttcatgta

SEQ ID NO: 646837 - DNA, 75 bp, synthetic construct
  source 1..75: mol_type = other DNA
gattaatcaactggcagataaacaaaccattaaacaaactttatttgcccgtcagccagcaaaaatacacaaacc

SEQ ID NO: 646838 - DNA, 75 bp, synthetic construct
  source 1..75: mol_type = other DNA
acattgaagttacccgtggtatttccaccatcctctatcagctggcggtgggtgcaaaagtgattctgtctttgt

SEQ ID NO: 646839 - DNA, 75 bp, synthetic construct
  source 1..75: mol_type = other DNA
ttccaggggaccggtctgggtctggcgatttgtgaaaaactgatcagcatgatggacggcgatatctcggtagat

SEQ ID NO: 646840 - DNA, 75 bp, synthetic construct
  source 1..75: mol_type = other DNA
ccgaaaggcgtcgatcggctggtgacggcaatgaacaactcttccagcctgttgttgaaaattatcagcgatatt

SEQ ID NO: 646841 - DNA, 75 bp, synthetic construct
  source 1..75: mol_type = other DNA
ataagattgagcgctatctctcccagcatccttatgtgagagagctatcgctgaatatctttaaccccggatcag

SEQ ID NO: 646842 - DNA, 75 bp, synthetic construct
  source 1..75: mol_type = other DNA
cggtatggacagctgcctgtcgaagccagtaacgctggatgttataaaacagacgctgacggtatatgccgagag

SEQ ID NO: 646843 - DNA, 75 bp, synthetic construct
  source 1..75: mol_type = other DNA
gtggggattccggcgaaagaagtggtgcggctgttcgatcccttcttccaggtagggacgggtgtacagcgtaac

SEQ ID NO: 646844 - DNA, 75 bp, synthetic construct
  source 1..75: mol_type = other DNA
atgcgcttaatgtacttagcaagaatcatattgatatcgtgcttagcgacgtcaacatgccaaatatggatggtt

SEQ ID NO: 646845 - DNA, 75 bp, synthetic construct
  source 1..75: mol_type = other DNA
tggctgatgctcttcgagtgcgactttacgcggtgaatttattcgtggctgggatgacggacgtggtgtggatgc

SEQ ID NO: 646846 - DNA, 75 bp, synthetic construct
  source 1..75: mol_type = other DNA
ataatgcaattaataaaatcatcgtaacgtcgctcttttcctgtctcagcgacactcagcaaaaacagttctacg

SEQ ID NO: 646847 - DNA, 75 bp, synthetic construct
  source 1..75: mol_type = other DNA
caaaacggtgaccagcattctgatggcctgggtattcaccctgccagctgcggtactgctctccggcgcgctcta

SEQ ID NO: 646848 - DNA, 75 bp, synthetic construct
  source 1..75: mol_type = other DNA
aaaaccacgaacgccacgctccgctctgtctcctatcagaacgaactgctgctggagcaggcggtaaggaaaaaa

SEQ ID NO: 646849 - DNA, 75 bp, synthetic construct
  source 1..75: mol_type = other DNA
tggcgaaggcacctcatcccgtgacaccctgcgcgacagtacaaaacacggtgtgagtgaactgcctgtgaactg

SEQ ID NO: 646850 - DNA, 75 bp, synthetic construct
  source 1..75: mol_type = other DNA
actctgcattttggggtgttatggttatagtgaagtggtcaacaaaaactggccaccgagttagagttttttcca

SEQ ID NO: 646851 - DNA, 75 bp, synthetic construct
  source 1..75: mol_type = other DNA
gttaatatgaatgccacaggttacgaaatcactcgtacccgcgatgctatcaacaacgtggaagcttactttgag

SEQ ID NO: 646852 - DNA, 75 bp, synthetic construct
  source 1..75: mol_type = other DNA
ggcgctaagagccactctctgaacacaacaagtcgctttcttgttgaggcgcagttggcatcaattcttgccgaa

SEQ ID NO: 646853 - DNA, 75 bp, synthetic construct
  source 1..75: mol_type = other DNA
caagcaagctaccggaaaatgcgatggagtatctgaaaaagagcgggctgataagcgtagaggatgttttacgat

SEQ ID NO: 646854 - DNA, 75 bp, synthetic construct
  source 1..75: mol_type = other DNA
ggacgcgtattgcgctgatcctttccgctatcggcgtggcgttttcgcacggcgcgaacgatggtcagaaaggca

SEQ ID NO: 646855 - DNA, 75 bp, synthetic construct
  source 1..75: mol_type = other DNA
gactccggaagcaggcgcaacacaacctgcggagttccattgccatccgtcgaataccattaacgcgctcaatcg

SEQ ID NO: 646856 - DNA, 75 bp, synthetic construct
  source 1..75: mol_type = other DNA
gcttgggtgtttacccttccggctgcggtactgctttccggcgggctgtactggctctccttgcagttcctgtaa

SEQ ID NO: 646857 - DNA, 75 bp, synthetic construct
  source 1..75: mol_type = other DNA
attcgtgagaaatttaatcagcgtaaatataatgtcgttattggtattggcggcggtaaaacgttggatacggca

SEQ ID NO: 646858 - DNA, 75 bp, synthetic construct
  source 1..75: mol_type = other DNA
gttcgaagaactgatggatgcctaccggcgcgaggcaatggcaattatagcgcgctgggatctggcggatcagct

SEQ ID NO: 646859 - DNA, 75 bp, synthetic construct
  source 1..75: mol_type = other DNA
cgtcgcgaggcaatggcaattatcgcccgctgggatctggcggatcggattgatgggcagagggaagcggcatga

SEQ ID NO: 646860 - DNA, 75 bp, synthetic construct
  source 1..75: mol_type = other DNA
cggcgagaggcaatggcaattatcgcccgctgggatctggctgatcagcttgatgggcagagggacgcggcatga

SEQ ID NO: 646861 - DNA, 75 bp, synthetic construct
  source 1..75: mol_type = other DNA
ctgaacggcggtgagcagtgggtacatgaagacgggattgcaacgggtaccgtcattaatgagaagggctggcag

SEQ ID NO: 646862 - DNA, 75 bp, synthetic construct
  source 1..75: mol_type = other DNA
tctccggatgacgggggcagctgttatctctggctcaaccgtggtcaaccacccgcagttaaccggcgacgataa

SEQ ID NO: 646863 - DNA, 75 bp, synthetic construct
  source 1..75: mol_type = other DNA
gttaaaggcgttcgccaggaagtactggaggccgctaaagacagtccagagttcgaagaactgatggattcctac

SEQ ID NO: 646864 - DNA, 75 bp, synthetic construct
  source 1..75: mol_type = other DNA
gcaaaagagcgccagcagcgcgaaactcgtaagcgtgaattgcttgagatgattaacagtgagggtttttcagtc

SEQ ID NO: 646865 - DNA, 75 bp, synthetic construct
  source 1..75: mol_type = other DNA
actgagcttagggatgatgctgcgtgggattatcttaaagcacttaataccggccatccaggcggtgttatgtca

SEQ ID NO: 646866 - DNA, 75 bp, synthetic construct
  source 1..75: mol_type = other DNA
acaacctacatgccgctggaagggattcagcttatccagaaggcgatgcgggtgctaatgggttcctggggtgct

SEQ ID NO: 646867 - DNA, 75 bp, synthetic construct
  source 1..75: mol_type = other DNA
tggaggctgctaaagacagccctgagttcgaagaactgatggattcctaccggcgcgaggcaatggcaattatcg

SEQ ID NO: 646868 - DNA, 75 bp, synthetic construct
  source 1..75: mol_type = other DNA
caaggactaccgcctgtcagaacagctatatgaccgacaagttgaactgatcgagagcatccggcttcatcaact

SEQ ID NO: 646869 - DNA, 75 bp, synthetic construct
  source 1..75: mol_type = other DNA
cgtggtttttgatgccagtcataacgtgtttgactacaaagtattacgaaagaactttaatgaactccaggaata

SEQ ID NO: 646870 - DNA, 75 bp, synthetic construct
  source 1..75: mol_type = other DNA
taatcgaagaagctaaattaaaaatagcgattgcgaaatgccatcccaattcaggggtggcacgagtagagggtg

SEQ ID NO: 646871 - DNA, 75 bp, synthetic construct
  source 1..75: mol_type = other DNA
tattcgccatgcctggtgtcgttatctttgcccatatggcgcgctgatgggcgtggtttcgctattatcgccgtt

SEQ ID NO: 646872 - DNA, 75 bp, synthetic construct
  source 1..75: mol_type = other DNA
gccaggctcgacgaggtgtggtggctggaggttttgcaaacgtgataatcagattaatggaatctagtgataaca

SEQ ID NO: 646873 - DNA, 75 bp, synthetic construct
  source 1..75: mol_type = other DNA
tacgatgcgaacgcggagcctcaattttcttgcttttgcggcagtgggcgcttgtgctattcaagaagtatctca

SEQ ID NO: 646874 - DNA, 75 bp, synthetic construct
  source 1..75: mol_type = other DNA
ggcggaaaagttttaaataaattcactgccattcttaacccgtgcatctatatcgttttcggcggtatggcgatt

SEQ ID NO: 646875 - DNA, 75 bp, synthetic construct
  source 1..75: mol_type = other DNA
tgaagtggcgcgggaaatagcctgccggcttcgggatatgggctggccgccggaacggattcaggaggcaaccgg

SEQ ID NO: 646876 - DNA, 75 bp, synthetic construct
  source 1..75: mol_type = other DNA
ttgaagtggcgcgggaaatagcctgccggcttcgggatataggctggccgccggaacggattcaggaggtcacgg

SEQ ID NO: 646877 - DNA, 75 bp, synthetic construct
  source 1..75: mol_type = other DNA
gacgcaattaaaagattaggagttcaaatatcagacgaggtaatggatttcctgacaatatcaatggctgtgaca

SEQ ID NO: 646878 - DNA, 75 bp, synthetic construct
  source 1..75: mol_type = other DNA
atagtcggttgcctgcatcgaatgattctactatttcagttcaaatttattcgagagatggagtcgttgccaaaa

SEQ ID NO: 646879 - DNA, 75 bp, synthetic construct
  source 1..75: mol_type = other DNA
ctttgcggataaaattttactgcaacgaatgttatcgaatcttattgttaacgccattcgatattcgccagaaaa

SEQ ID NO: 646880 - DNA, 75 bp, synthetic construct
  source 1..75: mol_type = other DNA
atcatcgtctcttaccgccagcaagtgagaacttgttgcccgtacagctttatggattaagtgggcaggggcggg

SEQ ID NO: 646881 - DNA, 75 bp, synthetic construct
  source 1..75: mol_type = other DNA
attcgacgagcatcacttcatgcagggggaattagtagagatgttgaatatattttccagtccttagctaaagta

SEQ ID NO: 646882 - DNA, 75 bp, synthetic construct
  source 1..75: mol_type = other DNA
caaaaggaaaaatgatctccgaatgttcaaataagcagctcttatctaaaattgtggaaagtacagtatcctgca

SEQ ID NO: 646883 - DNA, 75 bp, synthetic construct
  source 1..75: mol_type = other DNA
gaaaattatgaatatataaatataacagagctattaaagagggtgatgttttttcatgatttatatgtcaaggat

SEQ ID NO: 646884 - DNA, 75 bp, synthetic construct
  source 1..75: mol_type = other DNA
taaaaccgtcaccagtattctgatggcgtgggtgtttaccttaccggcggcgatttttctatctggtagtcttta

SEQ ID NO: 646885 - DNA, 75 bp, synthetic construct
  source 1..75: mol_type = other DNA
ggctggcgtcgtgtggcgatgaccatcggtgagaagattggtaagcgtggcatgacgtatgcgcaaggcatggcg

SEQ ID NO: 646886 - DNA, 75 bp, synthetic construct
  source 1..75: mol_type = other DNA
agatcgcaaaaagaaaaaaggcaaacgtaagccgccattctggacgcgtattgcgctgattgtttccgctgcggg

SEQ ID NO: 646887 - DNA, 75 bp, synthetic construct
  source 1..75: mol_type = other DNA
gtagcaccaactctgacgcgtggggcttcggtttgaaagccggttacgacttcaaactgggtgatgctggttacg

SEQ ID NO: 646888 - DNA, 75 bp, synthetic construct
  source 1..75: mol_type = other DNA
tccatcgataacggtactgaagggtctgcggtacgtgttggtctgggtactcagttcagcttcaccaagaacttc

SEQ ID NO: 646889 - DNA, 75 bp, synthetic construct
  source 1..75: mol_type = other DNA
cgctgcgggcgtggcgttttcgcacggcgcgaacgacgggcagaaaggaattggtctggtgatgctggtggggat

SEQ ID NO: 646890 - DNA, 75 bp, synthetic construct
  source 1..75: mol_type = other DNA
ttgaacgcgtagacattatccctaccagtatggtggcgacgatggctgcagcagaaagcggttggggaacgtcga

SEQ ID NO: 646891 - DNA, 75 bp, synthetic construct
  source 1..75: mol_type = other DNA
gccaatggtcgcctgcggaacgtgcgcgtctacaagacatcgccaggcgttacaaggtgaagtggtctggtaata

SEQ ID NO: 646892 - DNA, 75 bp, synthetic construct
  source 1..75: mol_type = other DNA
ttagcgaagacgcacacatcaacaacgaatcataagtcccacataacggagaccagtagtaaacaggtaagcagt

SEQ ID NO: 646893 - DNA, 75 bp, synthetic construct
  source 1..75: mol_type = other DNA
ggtgatggacgcgttaaatctgcgtgaagtgaccaagattttctcctcactgattgtctccccaattgtggggct

SEQ ID NO: 646894 - DNA, 75 bp, synthetic construct
  source 1..75: mol_type = other DNA
tttttaacttttttggcgtattgcttggcggacttagcgtcgcctatgccatcgtccatatgttgccaaccgatt

SEQ ID NO: 646895 - DNA, 75 bp, synthetic construct
  source 1..75: mol_type = other DNA
cgagtcagaagtcccatttaactaaagctagtaataaacaggtaagcagtaaacaagagtattctcgcaatagtg

SEQ ID NO: 646896 - DNA, 75 bp, synthetic construct
  source 1..75: mol_type = other DNA
aaattgcgctgcaaacgcgtatcaaactgttctatcgccccgccgcgctggccaaaaaggtcgatcctgagcatc

SEQ ID NO: 646897 - DNA, 75 bp, synthetic construct
  source 1..75: mol_type = other DNA
ggtgcgcgactttcgctgatctttaaatgcaacggcaataattgccaggtggatgcagagcagagccgcaaaggc

SEQ ID NO: 646898 - DNA, 75 bp, synthetic construct
  source 1..75: mol_type = other DNA
cactgttgtgaacagtgacggctggcagattgtcaaggaaggtggtctggcggatttcaccaccgttaaccagaa

SEQ ID NO: 646899 - DNA, 75 bp, synthetic construct
  source 1..75: mol_type = other DNA
ggcgcgcgcctgccgctgatcttccgctgtgaaggggacacctgcaaggtggatgaagatcaaagcagcaaaggc

SEQ ID NO: 646900 - DNA, 75 bp, synthetic construct
  source 1..75: mol_type = other DNA
aagaagagcaaaaagacgggctgtgtgcttacggctgcaatgaagttcctgaacgtcctgctgcagggcgtcctc

SEQ ID NO: 646901 - DNA, 75 bp, synthetic construct
  source 1..75: mol_type = other DNA
ctgatttatatggcgatggtaattaaaatctttgaacagaatgagttgtgtaaagaatggcataaaaaatttagt

SEQ ID NO: 646902 - DNA, 75 bp, synthetic construct
  source 1..75: mol_type = other DNA
taatcctgaatatgcaatcccgcaaaaagtgacgattagcattggtgccgtggtggtgcatggaaatacgttaaa

SEQ ID NO: 646903 - DNA, 75 bp, synthetic construct
  source 1..75: mol_type = other DNA
atatttgatggttatgattgctctgtttgttatttatacaatagcattcatttttatgcagttgtatttcattta

SEQ ID NO: 646904 - DNA, 75 bp, synthetic construct
  source 1..75: mol_type = other DNA
cgatcctgaaagcatcgataatattcgcggtgccctgcattatctggcgaaagaagaacaaaaagacgggctgtg

SEQ ID NO: 646905 - DNA, 75 bp, synthetic construct
  source 1..75: mol_type = other DNA
tgccaccgccacttcagtcccggccctggctgctgacagtgttgtacaggcaggggaaatcgtgaacggcggaac

SEQ ID NO: 646906 - DNA, 75 bp, synthetic construct
  source 1..75: mol_type = other DNA
gcctccccggtaacgttccataaactgaccaccagtaacctcactggtcagggtggcaccatcaatatgcgtgtt

SEQ ID NO: 646907 - DNA, 75 bp, synthetic construct
  source 1..75: mol_type = other DNA
tggtggtcagcacgacgctggcggtactgttgaccaccaccaacctggcggcgcacgcatcagtcactccggatc

SEQ ID NO: 646908 - DNA, 75 bp, synthetic construct
  source 1..75: mol_type = other DNA
acggtcgcaccctggacgttgaaggcggtgattatcaggtgattgaaaacgtgcgcgtggttgataaagcctccc

SEQ ID NO: 646909 - DNA, 75 bp, synthetic construct
  source 1..75: mol_type = other DNA
gaagcggtgcagatttaccttgtggttcgaccgtatgagagcgcgaaagaaatcagcgtcagcatcgaactggac

SEQ ID NO: 646910 - DNA, 75 bp, synthetic construct
  source 1..75: mol_type = other DNA
tcagtaaattaactgttatggtaatatttatgtgccatattttcagtgcactacgagtaacaaagaacattgccc

SEQ ID NO: 646911 - DNA, 75 bp, synthetic construct
  source 1..75: mol_type = other DNA
gcatcacgcttgatgctgagggcggtgattaccaggcaattgaaaacaaacgtgtcgttgacaaagtgtgtcgcc

SEQ ID NO: 646912 - DNA, 75 bp, synthetic construct
  source 1..75: mol_type = other DNA
ttattgtccgcccctatgcctgcccgaaagaaatccgggttggcattcagcttgattattcactggaggatgacg

SEQ ID NO: 646913 - DNA, 75 bp, synthetic construct
  source 1..75: mol_type = other DNA
agcacgccgggcagcattgccgcacatgaaacgctgtttgcccgcccactgcgtgccatggcgaaatccacgcag

SEQ ID NO: 646914 - DNA, 75 bp, synthetic construct
  source 1..75: mol_type = other DNA
gatcgatcgtcagagggttaaaaaaatatatccctttgcggagcggatagcggaatgctggcaggcaattacgta

SEQ ID NO: 646915 - DNA, 75 bp, synthetic construct
  source 1..75: mol_type = other DNA
gtgattgaatggacggctgatcatggttttcatgcgcatgtggtcttctggatcgatcgtcagagggttaaaaaa

SEQ ID NO: 646916 - DNA, 75 bp, synthetic construct
  source 1..75: mol_type = other DNA
gatcgatcgtcagagagttaaaaaaatatatccctttgcggagcggattacggaatgctggcggtctattacgca

SEQ ID NO: 646917 - DNA, 75 bp, synthetic construct
  source 1..75: mol_type = other DNA
caacaaaatcagctcgccgctggcggtgctgccgccggtgcagcgcatcgatgcgatgatgaacggccaggtgaa

SEQ ID NO: 646918 - DNA, 75 bp, synthetic construct
  source 1..75: mol_type = other DNA
cacgcgttgccccggcgctggcgctgctggtggccgccagttttacaacccacgcatcggtgacgcccgatcgca

SEQ ID NO: 646919 - DNA, 75 bp, synthetic construct
  source 1..75: mol_type = other DNA
cgcggtgccctgcattatctggcgaaagaagagcaaaaagacggactgtgcgcatacggttgcagtgaagttcct

SEQ ID NO: 646920 - DNA, 75 bp, synthetic construct
  source 1..75: mol_type = other DNA
atcaatatatgggattactcgcagggtaaaggccctggaaaagcggtgaagcaagtcataccttttgaaggcaat

SEQ ID NO: 646921 - DNA, 75 bp, synthetic construct
  source 1..75: mol_type = other DNA
gcggtcatctcggtcacgataacaacggcggtattgcccgtggggccacgccggaaagcagcggcagctatggcc

SEQ ID NO: 646922 - DNA, 75 bp, synthetic construct
  source 1..75: mol_type = other DNA
tgttaacgcaggggagatttactttgacaatcagacaacaccggatgccgtactgagccgtgctgttgcaaaagg

SEQ ID NO: 646923 - DNA, 75 bp, synthetic construct
  source 1..75: mol_type = other DNA
cctggtgtcgttatctttgcccatatggcgcgctgatgggcgtggtttcgctattatcgccgtttaagattcgtc

SEQ ID NO: 646924 - DNA, 75 bp, synthetic construct
  source 1..75: mol_type = other DNA
aaagacgagctaggtgaaattgccaaactcgaccagggcaaacgcctcggccccgatcccgaccagttcggcggc

SEQ ID NO: 646925 - DNA, 75 bp, synthetic construct
  source 1..75: mol_type = other DNA
gcgctttcgcaggccgttaaagggatcgacttgtctgtagcctatgcattgtggggtgggtttggtattaccgcc

SEQ ID NO: 646926 - DNA, 75 bp, synthetic construct
  source 1..75: mol_type = other DNA
tggagcgcattcgcatgttgatccttaacgcgattttactgaatgtgcttgccggagccgcgttgtttactctcg

SEQ ID NO: 646927 - DNA, 75 bp, synthetic construct
  source 1..75: mol_type = other DNA
gtccaggggaatatgctgcaggccggtgcctttaactactccctcaaccgggacagtgatgagagctggtatctg

SEQ ID NO: 646928 - DNA, 75 bp, synthetic construct
  source 1..75: mol_type = other DNA
cggcgtggtgacacgctgaccattaacggcgagatgttctgggtggatcgtgtttctccggatgacgggggcagc

SEQ ID NO: 646929 - DNA, 75 bp, synthetic construct
  source 1..75: mol_type = other DNA
tcatcggaaccatcgcaacagggggtatttcctgtaatatgtactcgacttcatcctggctccgtaatgaaacgt

SEQ ID NO: 646930 - DNA, 75 bp, synthetic construct
  source 1..75: mol_type = other DNA
actggaaaatggcggacgtctggatgtgctgagcggacacacagccactaatacccgtgtggatgatggcggaac

SEQ ID NO: 646931 - DNA, 75 bp, synthetic construct
  source 1..75: mol_type = other DNA
gcgtggagtcatgtccggtggcctcaaccttgaccttttcgctgcaaaaacctgcggcaaataaaatggcctttg

SEQ ID NO: 646932 - DNA, 75 bp, synthetic construct
  source 1..75: mol_type = other DNA
agcgacagagatgatgactacgtcagtcgtccacctgactggggtaaacggctggaagtcagctgctcgagttaa

SEQ ID NO: 646933 - DNA, 75 bp, synthetic construct
  source 1..75: mol_type = other DNA
atgactatgtcagtcgtccacctgactgggtaaacggctggaagtcagctgctcgagttaaaggctacttggtca

SEQ ID NO: 646934 - DNA, 75 bp, synthetic construct
  source 1..75: mol_type = other DNA
ttcaacgacgcgcgctttaagtattgtcaccagcgatacgccggtttatcgggaaacggtggaatcgggcgcgat

SEQ ID NO: 646935 - DNA, 75 bp, synthetic construct
  source 1..75: mol_type = other DNA
cggactctaagccagttatcggacgtttggaagtcagcgctggtaatgggaaagtcatagggcggcaatccagcg

SEQ ID NO: 646936 - DNA, 75 bp, synthetic construct
  source 1..75: mol_type = other DNA
gtgactgcggcggtattatcaaaaagtacgaagagttgagtacggcacagcaaaagcaactgatcagtgactgtg

SEQ ID NO: 646937 - DNA, 75 bp, synthetic construct
  source 1..75: mol_type = other DNA
gggatgataagtttatcaccaccgactatttgcaacagtgccatatggggcaaatggtggtcaccatcctgtcgg

SEQ ID NO: 646938 - DNA, 75 bp, synthetic construct
  source 1..75: mol_type = other DNA
gattattgatggcagtcggatttgtaatgaactgggatttgaataccagtatcccgatccgctggtaatgccgct

SEQ ID NO: 646939 - DNA, 75 bp, synthetic construct
  source 1..75: mol_type = other DNA
gatttcgacggatgatggcggaagctgtcatctctggcttgggcgtggcgtgccgcctgccgttaaccgtcgtcg

SEQ ID NO: 646940 - DNA, 75 bp, synthetic construct
  source 1..75: mol_type = other DNA
cctacagcgtggtgatggacgttaaaatgctcgatttctttcgtcatatggggaccgcgacattaatcagcgtga

SEQ ID NO: 646941 - DNA, 75 bp, synthetic construct
  source 1..75: mol_type = other DNA
ggcgcaggtgtctggggaggtgaagcattactgccaggtatgtcaccgttggcccaggtgtacagcggccatcag

SEQ ID NO: 646942 - DNA, 75 bp, synthetic construct
  source 1..75: mol_type = other DNA
tgacgggatcagtaccgacggtgatatggggcaaatggtggtcaccatcctgtcggctgtggcacaggctgaacg

SEQ ID NO: 646943 - DNA, 75 bp, synthetic construct
  source 1..75: mol_type = other DNA
ttgacgctcagggcgtggcagtcccggttcattgatgacgggatcagtaccgacggtgatatggggcaaatggtg

SEQ ID NO: 646944 - DNA, 75 bp, synthetic construct
  source 1..75: mol_type = other DNA
ttctctggtttcctgggttgtatcgtttattccgcgccgcccggagcggagcgaaacggcacaaccatcggatca

SEQ ID NO: 646945 - DNA, 75 bp, synthetic construct
  source 1..75: mol_type = other DNA
aagatctcaacgtggtgaaaaataccatttacgcttcgctgggtatcgactggccgaaagacaagctgaacatct

SEQ ID NO: 646946 - DNA, 75 bp, synthetic construct
  source 1..75: mol_type = other DNA
ccgaaagcctttcggcacatatcggtcaacgtattcgctgggcgcgcgggatggtgcaaatcttccgtcttgata

SEQ ID NO: 646947 - DNA, 75 bp, synthetic construct
  source 1..75: mol_type = other DNA
tgcagtaattcgtcgcaaaccattggatgaaattggcggtattgctgtcgaaacggtaaccgaagatgcgcacac

SEQ ID NO: 646948 - DNA, 75 bp, synthetic construct
  source 1..75: mol_type = other DNA
acagaaggtgaacttactgctcaaacgcggtcagcaggaatatgtcttcccgactcaggtggcgcgcgtgatggg

SEQ ID NO: 646949 - DNA, 75 bp, synthetic construct
  source 1..75: mol_type = other DNA
atgccggggcgcttctcggcgctgatgctgattgtgctgtcgctgaccgtttcttgccgttatatctggtggcgt

SEQ ID NO: 646950 - DNA, 75 bp, synthetic construct
  source 1..75: mol_type = other DNA
gtcggtgaaatggtcagggcagaaatggaacggcgcgcccgtgccggacgtggcagtttttacgataaagattga

SEQ ID NO: 646951 - DNA, 75 bp, synthetic construct
  source 1..75: mol_type = other DNA
cccgcgaactggcgaaactggtcggtgaaatggtcagggcagaactggatcggcgtacccgtgccgggcgtggca

SEQ ID NO: 646952 - DNA, 75 bp, synthetic construct
  source 1..75: mol_type = other DNA
gcgcgcgcaggaaaccgcgggaaaactgaaaacaggtggtgcgctggcaattggtgcggcagcggctggcggcta

SEQ ID NO: 646953 - DNA, 75 bp, synthetic construct
  source 1..75: mol_type = other DNA
ttattccgccggttaatgcgcggcttatcggacattatcgggattatcgtcgccacggcgcgtcggctttcagcg

SEQ ID NO: 646954 - DNA, 75 bp, synthetic construct
  source 1..75: mol_type = other DNA
tggataaatgtaccagtgctggcgagatattcggtaacgttcttggcggtgcgttacaacttgttctgacacctg

SEQ ID NO: 646955 - DNA, 75 bp, synthetic construct
  source 1..75: mol_type = other DNA
cttccggatgaagcggaaagggcgcgcaagaaaatcgaagacgcacagcgtgcggccattcttcaggacaaggtt

SEQ ID NO: 646956 - DNA, 75 bp, synthetic construct
  source 1..75: mol_type = other DNA
ggatcctcgatgacggtggcagggaggagtttcgccagtttgcgcaaaacgttggggtgaaatatatcgcccgta

SEQ ID NO: 646957 - DNA, 75 bp, synthetic construct
  source 1..75: mol_type = other DNA
ctcgacacgattactgcgctgcctgttcagggtctgcatgttgacctcgtacatggtaaagatgacgttgctgaa

SEQ ID NO: 646958 - DNA, 75 bp, synthetic construct
  source 1..75: mol_type = other DNA
gtgggtggcatcttcctgctcattgctgcacagccctatcgacctgagcgtggaaacgcgtcttgatgcagaagt

SEQ ID NO: 646959 - DNA, 75 bp, synthetic construct
  source 1..75: mol_type = other DNA
agaaaagcgtctggcggcgatcaccgctcaggacagtcagcgtgcgaatgtctatgaagtgcgtgctgaagccca

SEQ ID NO: 646960 - DNA, 75 bp, synthetic construct
  source 1..75: mol_type = other DNA
cctgcgtctggatttcaaaaagggcaatctcgacgccaataactaccgcacgggcattgcggaacacatcaaaca

SEQ ID NO: 646961 - DNA, 75 bp, synthetic construct
  source 1..75: mol_type = other DNA
tctatgaagtgcgtgctgaagcccagcgtgcgcgttttaaactgccagcctggccgaccaccacgattggttctt

SEQ ID NO: 646962 - DNA, 75 bp, synthetic construct
  source 1..75: mol_type = other DNA
gccgcaggcgtggctggacgcatataaacctgcttacgatgcgctccagggccaggtgaaactgctgctgaccac

SEQ ID NO: 646963 - DNA, 75 bp, synthetic construct
  source 1..75: mol_type = other DNA
gttgcttgatgagtggcgcgacgactggcgcgaactgactacgcggctgggctgcgtctctattcatctcaatca

SEQ ID NO: 646964 - DNA, 75 bp, synthetic construct
  source 1..75: mol_type = other DNA
attgcttgatgaatggcgcgacgactggcgagaattgaccgcgcgactgggctgcgtctctattcatctcaatca

SEQ ID NO: 646965 - DNA, 75 bp, synthetic construct
  source 1..75: mol_type = other DNA
gtcataagatgatcgaatttgacgcgaagttatcgaaagatggcgagatcttcctgctccatgacgacaatctcg

SEQ ID NO: 646966 - DNA, 75 bp, synthetic construct
  source 1..75: mol_type = other DNA
cgggcattgcggaacatatcaggcaggccattgttgagcaggaacgtttgggactggatgtgctggtacatggcg

SEQ ID NO: 646967 - DNA, 75 bp, synthetic construct
  source 1..75: mol_type = other DNA
ccggcgctgcgcgaaggtttaccgctgcgtcgtagcgactgggacgcctatctccagtggggcgtagaggccttc

SEQ ID NO: 646968 - DNA, 75 bp, synthetic construct
  source 1..75: mol_type = other DNA
ctcgacacgattactgcgctgcctgttcaggggctgcatgtggaccttgtacatggtaaagatgacgttgttgaa

SEQ ID NO: 646969 - DNA, 75 bp, synthetic construct
  source 1..75: mol_type = other DNA
aaaaaatcacctcgctggcgcaggcccatccggtactgacgcgccagctactgatagcaggcggtgcgttgctgg

SEQ ID NO: 646970 - DNA, 75 bp, synthetic construct
  source 1..75: mol_type = other DNA
tctgcgaagcggagatggacaatctgacccgcaaactgcgcaagctggagcgggattactttgagatgcgcgagc

SEQ ID NO: 646971 - DNA, 75 bp, synthetic construct
  source 1..75: mol_type = other DNA
gattgttgaacgcgatgaagtaggcgcgcgcaaaaacgccgtcgatgaagagatcgaacgtttaagccagcctgg

SEQ ID NO: 646972 - DNA, 75 bp, synthetic construct
  source 1..75: mol_type = other DNA
cttatccccgacctgaccttgttgcactttcgtaacaccacggaagccggagccaccagcggttcgcgcgataaa

SEQ ID NO: 646973 - DNA, 75 bp, synthetic construct
  source 1..75: mol_type = other DNA
gtcgcagattgccgaacaactggaaggtttaaccgattgcccggaagatctctatctgatcgaaggtgatccgca

SEQ ID NO: 646974 - DNA, 75 bp, synthetic construct
  source 1..75: mol_type = other DNA
agctgcagtctcgcattcagagtttgatgcagcgtgcgccggtttggctggcagcgcaaaacagtctcaaccagt

SEQ ID NO: 646975 - DNA, 75 bp, synthetic construct
  source 1..75: mol_type = other DNA
agattgagcgtttaagccagccgggcggctctgaagatcagcgcctgaatgcgctggcagaacgttttggcggcg

SEQ ID NO: 646976 - DNA, 75 bp, synthetic construct
  source 1..75: mol_type = other DNA
cgcgatacgcgctggtacgttaacggattccagcttacgtgccaggccgttatttaacagttatcgaaaaattat

SEQ ID NO: 646977 - DNA, 75 bp, synthetic construct
  source 1..75: mol_type = other DNA
ccatttttgtttcggtggtcgagagcggaagttttagccgggcggctgaacaattaggacaagcgaactctgcgg

SEQ ID NO: 646978 - DNA, 75 bp, synthetic construct
  source 1..75: mol_type = other DNA
tttgtcatccaatagtggggaaacactgaaacagctttgcctgagtggcaacgggattgcgtgtttgtccgacta

SEQ ID NO: 646979 - DNA, 75 bp, synthetic construct
  source 1..75: mol_type = other DNA
gagcaggcttatcagctggtggtggcaatcaacggcccgctggcgcgtaacgaggcgtgggatgtcgctcgcgaa

SEQ ID NO: 646980 - DNA, 75 bp, synthetic construct
  source 1..75: mol_type = other DNA
cactgacgctgattaactggaacggcttttttgcccgaacttttgaccttgacgagctggtcacgacgctttctg

SEQ ID NO: 646981 - DNA, 75 bp, synthetic construct
  source 1..75: mol_type = other DNA
atggagacgcgaataacgtggctgttacgatcgatgcgcactagtggtgctgtttctgatgccgtgattaagcct

SEQ ID NO: 646982 - DNA, 75 bp, synthetic construct
  source 1..75: mol_type = other DNA
cggtgaggcgattggtaccggtatgtcgattctggtgatggtggtacaaagctgggaagatgaatctcgccgcct

SEQ ID NO: 646983 - DNA, 75 bp, synthetic construct
  source 1..75: mol_type = other DNA
tgataccccagggaaaatcgacccaatcccgcatccgtatggcgaagatttgccgtgcgcggataacaaaccggt

SEQ ID NO: 646984 - DNA, 75 bp, synthetic construct
  source 1..75: mol_type = other DNA
acgggcgtgatttctgatctcggtgggccaactgccaacatgtatatgttgcgctgcaaatcgccacgcgccgag

SEQ ID NO: 646985 - DNA, 75 bp, synthetic construct
  source 1..75: mol_type = other DNA
attcgatcatcaacgagattgaagcgatccgcgacaccgtgccaggctttacgggcgtgatttctgatctcggtg

SEQ ID NO: 646986 - DNA, 75 bp, synthetic construct
  source 1..75: mol_type = other DNA
gctggctgacctttataaagctacccgcaaatacggggaagttgaccgggtatcgttctttaaggacattgccgg

SEQ ID NO: 646987 - DNA, 75 bp, synthetic construct
  source 1..75: mol_type = other DNA
ccagtctcctgtgatacttaagaagatacaaacttttaatggaaaaataaaattcaggcagtttgtgggagacct

SEQ ID NO: 646988 - DNA, 75 bp, synthetic construct
  source 1..75: mol_type = other DNA
gtaagcgaccggatcgcgccacactggtttatacccagcgttgtaaagaggcgtggaaagatgtgccggtgatcc

SEQ ID NO: 646989 - DNA, 75 bp, synthetic construct
  source 1..75: mol_type = other DNA
tacatgtggttggtttgcgtggctttgcgccgcagcttcctgaaacgcttccaggaactgacgaagcgtcttccc

SEQ ID NO: 646990 - DNA, 75 bp, synthetic construct
  source 1..75: mol_type = other DNA
acagcatgaacaacatcaggatttgtttaacagcaaccgtctgaccttctcggaagcgctggcgaaactgtatca

SEQ ID NO: 646991 - DNA, 75 bp, synthetic construct
  source 1..75: mol_type = other DNA
ttcgccgtgacgaactacatgcgcaactgagcaataaccgttctcgtcgcaaccaactggaaaaagcacttacct

SEQ ID NO: 646992 - DNA, 75 bp, synthetic construct
  source 1..75: mol_type = other DNA
gactaccagcaggcgctggacgtccagcaaacgcgtgcaattcagtacaaccaggcgattgccgcgcttaatcgt

SEQ ID NO: 646993 - DNA, 75 bp, synthetic construct
  source 1..75: mol_type = other DNA
atctcgacaaagccctggagtttcgtcgcgagctacatacttcgcgtcagcaactggcggctgagcagtacaaac

SEQ ID NO: 646994 - DNA, 75 bp, synthetic construct
  source 1..75: mol_type = other DNA
gtgcggtgaagagttcacttccagtcaggacgtcactgaatacatgcaacagttgctggagcgtgagcgcgaagc

SEQ ID NO: 646995 - DNA, 75 bp, synthetic construct
  source 1..75: mol_type = other DNA
cgggagcgtttcccgtccacatcccgctggtatctgggggagtgggaatcatttctggggttgccggactgtacc

SEQ ID NO: 646996 - DNA, 75 bp, synthetic construct
  source 1..75: mol_type = other DNA
atgaaagaccgatttaaaggtttgcacggcgatctctttacgccagccgccgatctggtgctcacgtctcctgcc

SEQ ID NO: 646997 - DNA, 75 bp, synthetic construct
  source 1..75: mol_type = other DNA
cagtaatatcctcaataaacagatcttccgatcttctgaaggggcgaatacctataacgagccaggccgggctta

SEQ ID NO: 646998 - DNA, 75 bp, synthetic construct
  source 1..75: mol_type = other DNA
ctcaagcatcgaacattatcaccattaaaggtcaaccagccgcagtgacatttgaagccgatatcaacgcatttc

SEQ ID NO: 646999 - DNA, 75 bp, synthetic construct
  source 1..75: mol_type = other DNA
catcgtcgccagacaacattccatttcaaaaaaccagctcattgttgatgtcttagaacgtgagttttcagccca

SEQ ID NO: 647000 - DNA, 75 bp, synthetic construct
  source 1..75: mol_type = other DNA
taaaggtcaaccagccgcagtgacatttgaagccgatatcaacgcatttcgcggcaaattcctcaatgtaaatgg

SEQ ID NO: 647001 - DNA, 75 bp, synthetic construct
  source 1..75: mol_type = other DNA
ccaaccagccggaaagtagcgaagagggcgctacgcgtcgcgccaatttcagccttagtgggcctctggctggtg

SEQ ID NO: 647002 - DNA, 75 bp, synthetic construct
  source 1..75: mol_type = other DNA
aagtttacgaccaatcgcctgagttcctggcgaaccagcggtgagcttaatattcctttgaatgtgatggttgat

SEQ ID NO: 647003 - DNA, 75 bp, synthetic construct
  source 1..75: mol_type = other DNA
atactgatcggaatgtctacaggtatggcgggagctactatcagtctgccaataattttttctgtagcttttata

SEQ ID NO: 647004 - DNA, 75 bp, synthetic construct
  source 1..75: mol_type = other DNA
tgaatgaaggattatccggcggtggtgaagggcgtattttagcgggtgaaaagtttacgaccaatcgccttagtt

SEQ ID NO: 647005 - DNA, 75 bp, synthetic construct
  source 1..75: mol_type = other DNA
gggccggaaaacaccttaattttgattgatggtgtaccggtgacgtcacgtaactccgtgcgttatagctggcgt

SEQ ID NO: 647006 - DNA, 75 bp, synthetic construct
  source 1..75: mol_type = other DNA
gcccgaacctttaaagccccaaacctgtatcaatccagtgaaggctatctgctctactcgaaaggcaatggctgt

SEQ ID NO: 647007 - DNA, 75 bp, synthetic construct
  source 1..75: mol_type = other DNA
gtttatgaatcgggtgcgctggaatgtttactggagaaatataaacccgcgcatcagatttataaatttgtttac

SEQ ID NO: 647008 - DNA, 75 bp, synthetic construct
  source 1..75: mol_type = other DNA
tcgaccgcgacccggcgcaaatcaccagtgagatgattgcgcagtatgaagcggtgagcggtaaaacgctctatc

SEQ ID NO: 647009 - DNA, 75 bp, synthetic construct
  source 1..75: mol_type = other DNA
tggcgtttcccaatgattttcgccgcgaccatacctctgaccagttgcacgaagagtttgatgcgaaggataacc

SEQ ID NO: 647010 - DNA, 75 bp, synthetic construct
  source 1..75: mol_type = other DNA
ctaaagtcacttatggcgagcatgtgtttgatttcggcaaaccgtttgaaaaactcaccatgcgcgaagcaatca

SEQ ID NO: 647011 - DNA, 75 bp, synthetic construct
  source 1..75: mol_type = other DNA
acgtttgcggaacggaagctgatccgcaaatacgcagtcagcagataagctcactacaaaatgcaggcgtcatca

SEQ ID NO: 647012 - DNA, 75 bp, synthetic construct
  source 1..75: mol_type = other DNA
tgttattcgaccttgtacttggttatggcacctccgctacgcctgtcagcgaattactggaccaactttcacaca

SEQ ID NO: 647013 - DNA, 75 bp, synthetic construct
  source 1..75: mol_type = other DNA
cacattgcaattctccgttgccaaggcgcaaaagcgcaatgtgttgatcccggagggaacccgcgccagcgcctc

SEQ ID NO: 647014 - DNA, 75 bp, synthetic construct
  source 1..75: mol_type = other DNA
tgattcagcctaccttgattacggaatatccggcagaagtttccccgctggcgcgtcgtaaggatgttaacccgg

SEQ ID NO: 647015 - DNA, 75 bp, synthetic construct
  source 1..75: mol_type = other DNA
tgattcagcctaccttgattacggaatatccggcagaagtatccccgctggcgcgtcgtaatgatgttaacccgg

SEQ ID NO: 647016 - DNA, 75 bp, synthetic construct
  source 1..75: mol_type = other DNA
ccaatgaggctattgattttaacgatgaactgagaaatcgccgcgaaaaactggcagcactacgtcagcaaggtg

SEQ ID NO: 647017 - DNA, 75 bp, synthetic construct
  source 1..75: mol_type = other DNA
ttatcggtgcccgcggtacgctgtttaagacgcaaacgggtgagctttccattcactgtactgagttgcgcctgc

SEQ ID NO: 647018 - DNA, 75 bp, synthetic construct
  source 1..75: mol_type = other DNA
tgattcagcctaccttgattacggaatatccggcagaagtgtccccgctggcgcgccgtaaagatgttaacccgg

SEQ ID NO: 647019 - DNA, 75 bp, synthetic construct
  source 1..75: mol_type = other DNA
tgattcagcctaccttgattacggaatatccggcagaagtctccccgctggcgcggcgtaaagatgttaacccgg

SEQ ID NO: 647020 - DNA, 75 bp, synthetic construct
  source 1..75: mol_type = other DNA
aatcattgcagctattgggtttgtcgctggtaaggcaatattctctgataatgttgtgtttaggcgaaggatgta

SEQ ID NO: 647021 - DNA, 75 bp, synthetic construct
  source 1..75: mol_type = other DNA
cacatctgattcagcctaccttcattactgaatatccggcagaagtttctccgctggcccgccgtaatgaggtta

SEQ ID NO: 647022 - DNA, 75 bp, synthetic construct
  source 1..75: mol_type = other DNA
cacatctgattcagcctacctttattactgaatatccggcagaagtctctccgctggcccgccgtaatgaggtta

SEQ ID NO: 647023 - DNA, 75 bp, synthetic construct
  source 1..75: mol_type = other DNA
cacatctgattcagcctaccttaattactgaatatccggcagaagtatcaccgctggcccgccgtaatgaggtta

SEQ ID NO: 647024 - DNA, 75 bp, synthetic construct
  source 1..75: mol_type = other DNA
aaatatgcaccgattgacgaaaaacttatggcgcttcacaagtggttttgggaacaaagtgaagccgagcgcgcc

SEQ ID NO: 647025 - DNA, 75 bp, synthetic construct
  source 1..75: mol_type = other DNA
gcgaattaccggacgaatctgagaaagatgctcaggcctactttaatcgcaaatatgcaccgattgacgaaaaac

SEQ ID NO: 647026 - DNA, 75 bp, synthetic construct
  source 1..75: mol_type = other DNA
ggaattggtatcgaccgtatggtaatgctgttcaccaacagccataccatccgtgacgttattctgttcccggcg

SEQ ID NO: 647027 - DNA, 75 bp, synthetic construct
  source 1..75: mol_type = other DNA
aaatcaccgatcgctttgagttcttcattggtggtcgtgaaatcggtaacggctttagcgaactgaatgatgctg

SEQ ID NO: 647028 - DNA, 75 bp, synthetic construct
  source 1..75: mol_type = other DNA
gacgatgaagcaatgttctacgatgaagattacgttactgcactggaacatggtctgccgccgacagcaggtctg

SEQ ID NO: 647029 - DNA, 75 bp, synthetic construct
  source 1..75: mol_type = other DNA
ggctttagcgagctgaacgacgcagaagatcaggcgcaacgtttccaggatcaggttgccgcgaaagaggcgggc

SEQ ID NO: 647030 - DNA, 75 bp, synthetic construct
  source 1..75: mol_type = other DNA
atgtctgaacaacacgtacaaggcactgacgcggtaaccgatcttaacaatgaactgaaaactcgtcgcgaaaag

SEQ ID NO: 647031 - DNA, 75 bp, synthetic construct
  source 1..75: mol_type = other DNA
ggaactgtacctcaagcgtctggtggtcggtggcttcgagcgtgtattcgaaatcaaccgtaacttccgtaacga

SEQ ID NO: 647032 - DNA, 75 bp, synthetic construct
  source 1..75: mol_type = other DNA
agaaatatcgcccggaaaccgacatggcggatctggacaacttcgactctgcgaaagcgattgctgaatctatcg

SEQ ID NO: 647033 - DNA, 75 bp, synthetic construct
  source 1..75: mol_type = other DNA
aatatgcaccgattgacgaaaagcttatggcgcttcacaagtggttttgggaacaaagtgaagccgagcgcgccg

SEQ ID NO: 647034 - DNA, 75 bp, synthetic construct
  source 1..75: mol_type = other DNA
tcatgcaggctgccattatcgaatggcaggcaactggcgacgctaagagcggactagcatggatttataacacac

SEQ ID NO: 647035 - DNA, 75 bp, synthetic construct
  source 1..75: mol_type = other DNA
agcggactggcatggatttataacacactgtttggcctaggcgaattgccggacgaatctgagaaagatgctcag

SEQ ID NO: 647036 - DNA, 75 bp, synthetic construct
  source 1..75: mol_type = other DNA
tttgctgttgcaacgtaatgcgttgcgcgctccggatcagtttgaaatcccaccaaaccgggttatcgagttggg

SEQ ID NO: 647037 - DNA, 75 bp, synthetic construct
  source 1..75: mol_type = other DNA
atggtgatgtggtcagtaccggcgatattgttaacgcaggggagatttactttgacaatcagacaacaccggatg

SEQ ID NO: 647038 - DNA, 75 bp, synthetic construct
  source 1..75: mol_type = other DNA
tttaatccaaatgttgcgctggcactactggatgaacgggaaagaaaccagcaatacatcaaacgccgcgaccag

SEQ ID NO: 647039 - DNA, 75 bp, synthetic construct
  source 1..75: mol_type = other DNA
tctcgggcacgataacaacggtggtattgcccgtggggccacgccggaaggcaacggcagctatggcttcgtccg

SEQ ID NO: 647040 - DNA, 75 bp, synthetic construct
  source 1..75: mol_type = other DNA
tgcgcaacacgttctgaaaaacaacgctgaatttattgctgcctttaatccaaaggttgctttggcattactgga

SEQ ID NO: 647041 - DNA, 75 bp, synthetic construct
  source 1..75: mol_type = other DNA
atgagcgagatcaactatcaggcactgcgtgaaaaggcagaaaaagcaacgtgtggcgagtggtcgctcgaatat

SEQ ID NO: 647042 - DNA, 75 bp, synthetic construct
  source 1..75: mol_type = other DNA
tgcgcgacacaatggctggcatccacaacacaatccgaatggatggcggctatacgccactggcagcaatcctta

SEQ ID NO: 647043 - DNA, 75 bp, synthetic construct
  source 1..75: mol_type = other DNA
gtgattgtgattgtcagctttgagcactccagcaacctggcggcggcgtacgggattgcggtgaccggaaccatg

SEQ ID NO: 647044 - DNA, 75 bp, synthetic construct
  source 1..75: mol_type = other DNA
cttatggcgcttcacaagtggttttgggaacaaagtgaagccgagcgcgccgctggcattcgcatcaaaggagag

SEQ ID NO: 647045 - DNA, 75 bp, synthetic construct
  source 1..75: mol_type = other DNA
gagaatgcatacatccgcaaccggtacaaagaactggacctattaatcgggaaaaacattctggtcatgcaggct

SEQ ID NO: 647046 - DNA, 75 bp, synthetic construct
  source 1..75: mol_type = other DNA
tgagatgaaattgccttatcatctcaatcatgttcatcttctttatggcgattatgtaactccaaaagatttagt

SEQ ID NO: 647047 - DNA, 75 bp, synthetic construct
  source 1..75: mol_type = other DNA
cttaccaaccagaaacgaaacttgcgcttctaaatggtgcttcaatgaaagaagcgttatccatgtatgaggagt

SEQ ID NO: 647048 - DNA, 75 bp, synthetic construct
  source 1..75: mol_type = other DNA
catacactaaatcagtaagttggcagcatcaccacgcgccctatatcggcgtgaactgcgcagcgatcccggaaa

SEQ ID NO: 647049 - DNA, 75 bp, synthetic construct
  source 1..75: mol_type = other DNA
attggaattgaagatatggttatcgtgcaaactaaagatgccgttcttgtgtctaaaaagagtgatgtacagcat

SEQ ID NO: 647050 - DNA, 75 bp, synthetic construct
  source 1..75: mol_type = other DNA
cttaaaaaaacaatcgcacagagcatgttactcatagagaagtatttagaccatgggggaagtttgactctatag

SEQ ID NO: 647051 - DNA, 75 bp, synthetic construct
  source 1..75: mol_type = other DNA
ttatcgattccctgatagacgtgaaaatgccccattacgcaccgctggctcagaccagcgggtatatcgacctca

SEQ ID NO: 647052 - DNA, 75 bp, synthetic construct
  source 1..75: mol_type = other DNA
attcaggagattccgggggatattttcgcggcggcagcaacttacgacggtgaagtcattaccatttatccggac

SEQ ID NO: 647053 - DNA, 75 bp, synthetic construct
  source 1..75: mol_type = other DNA
attcaggaaattccgggagatattttcgcggcggcagcaacttacgacggtgaagtcattaccatttatccggac

SEQ ID NO: 647054 - DNA, 75 bp, synthetic construct
  source 1..75: mol_type = other DNA
ccgattaccagcgccagttgatggacggttttcaggaagggctgcaaaaagggtttgctcagggaatgaccgaag

SEQ ID NO: 647055 - DNA, 75 bp, synthetic construct
  source 1..75: mol_type = other DNA
ccgctgcgtgaacgtctgaacgatattattccgctggcagagtcatttattaaaaaatactccacggtgctggtg

SEQ ID NO: 647056 - DNA, 75 bp, synthetic construct
  source 1..75: mol_type = other DNA
ctggcccggcaacgtgcgccagctggagaacgccattcagcggggaatgattttaaatcgcgacggcgtgattta

SEQ ID NO: 647057 - DNA, 75 bp, synthetic construct
  source 1..75: mol_type = other DNA
tgggctcgtcaccgcttgaggtggcggcggcgcgtgcctgcgcggatatcgaaaacacccccgtcccgctgcgtc

SEQ ID NO: 647058 - DNA, 75 bp, synthetic construct
  source 1..75: mol_type = other DNA
tgcaacatcagtggcgtccgggagtcggtggttttgtcgatctgaattgtggatggtactgtcaggatgcattac

SEQ ID NO: 647059 - DNA, 75 bp, synthetic construct
  source 1..75: mol_type = other DNA
cccctgtcggagagcgtaatttaaaagaggaaattaaacgcgtcgaaaaacgcatcattatggaagtgctggaac

SEQ ID NO: 647060 - DNA, 75 bp, synthetic construct
  source 1..75: mol_type = other DNA
acggtccctgcccgaaatgtgggggcaaggatcgttttcgccttgatgaccttgacgggcgcgggacgtggatct

SEQ ID NO: 647061 - DNA, 75 bp, synthetic construct
  source 1..75: mol_type = other DNA
gtgcattatcacggcacgcctttccgcgactggctgtactgtctgaccggggatctgcctgagctgacccgccag

SEQ ID NO: 647062 - DNA, 75 bp, synthetic construct
  source 1..75: mol_type = other DNA
tgcgtcgcagcgactgggatgcctatctccagtggggcgtggaggctttccgtatcaacgccgccgtggcgaaag

SEQ ID NO: 647063 - DNA, 75 bp, synthetic construct
  source 1..75: mol_type = other DNA
tgtcagccgtgaaaccatcgccaaacaaattgcgctggcgctgcgtgatgaagtcgcggacctggaagccgctgg

SEQ ID NO: 647064 - DNA, 75 bp, synthetic construct
  source 1..75: mol_type = other DNA
tgaactcaggcccgatcattttttctgaggatcttccgccgcagattcgtcagccagtctgtaatgctggcgagg

SEQ ID NO: 647065 - DNA, 75 bp, synthetic construct
  source 1..75: mol_type = other DNA
aataaattttaccaagtagaccaattcgttgaaaaacctaatcgctcaagggctgaagagtatatttcctcagat

SEQ ID NO: 647066 - DNA, 75 bp, synthetic construct
  source 1..75: mol_type = other DNA
tccggccatagctctttcagcatttacagctttgaagcgtaatgaacaacaggatcctattttgttgattctcgc

SEQ ID NO: 647067 - DNA, 75 bp, synthetic construct
  source 1..75: mol_type = other DNA
attccatttcaattgttgaacaaggaaatatcttaacttttggtattattcctcattatgcagagaccggttatg

SEQ ID NO: 647068 - DNA, 75 bp, synthetic construct
  source 1..75: mol_type = other DNA
tgatggcgatacggaaatccgcaatatcaagatttgcagtccgctgcgggtgactgcgatcacctgtgatgcaga

SEQ ID NO: 647069 - DNA, 75 bp, synthetic construct
  source 1..75: mol_type = other DNA
atgaatccgtttatattcctctgggtgctacttatagccttgaaaatccaggtgtaattcctctcaatcttattg

SEQ ID NO: 647070 - DNA, 75 bp, synthetic construct
  source 1..75: mol_type = other DNA
agaggagttaaaaaaacacagacctgatatatacaaaatctgtgagcaagcaatttcctcatcctataatgatct

SEQ ID NO: 647071 - DNA, 75 bp, synthetic construct
  source 1..75: mol_type = other DNA
aaacagcgaaagccagttaccagacagcggcagcgaggatcaggttgcagcattaatcaccgtgttgggcaatct

SEQ ID NO: 647072 - DNA, 75 bp, synthetic construct
  source 1..75: mol_type = other DNA
ctatggccgcggagctgcggactcccattatacactggatacatggcattctccgatgggggatggtggtcggga

SEQ ID NO: 647073 - DNA, 75 bp, synthetic construct
  source 1..75: mol_type = other DNA
tcatggatatgtttatcgatggcgcacgccgtggctttactatcgccaccaccaacctgctgccgaacgtggtga

SEQ ID NO: 647074 - DNA, 75 bp, synthetic construct
  source 1..75: mol_type = other DNA
accatgggtatccgcagggattggctacgccagaattcaccagaaaacaaccggtatcagtacctgggattatga

SEQ ID NO: 647075 - DNA, 75 bp, synthetic construct
  source 1..75: mol_type = other DNA
ttacgctcgtggaaaagctgattcgaagtataacgtagataaagacagctggtcaggtggttactggcgtgatga

SEQ ID NO: 647076 - DNA, 75 bp, synthetic construct
  source 1..75: mol_type = other DNA
ttatggccgcggtaacgctgaatcaaaatatcgtctgagttattgggaaagtgccggtggtgccgagtttgatga

SEQ ID NO: 647077 - DNA, 75 bp, synthetic construct
  source 1..75: mol_type = other DNA
ctccgatggggaatggtggtcgggaagacacacagaacaggctcagtgtgaataccctgatggtgaacacgtatt

SEQ ID NO: 647078 - DNA, 75 bp, synthetic construct
  source 1..75: mol_type = other DNA
gatgggtgcgttttattgaggcaacggttgacgtacagggcggtaaaaatcgccgttttgttgtggcagatcacc

SEQ ID NO: 647079 - DNA, 75 bp, synthetic construct
  source 1..75: mol_type = other DNA
ttacattactcgggatatgataacaatttcgcatggagcattggggccggtgttcgctatgacgtaaccccggat

SEQ ID NO: 647080 - DNA, 75 bp, synthetic construct
  source 1..75: mol_type = other DNA
ataacaacttcgcatggagcattggggccggtgttcgctatgacgtaaccccggatatcgctcttgacctcagct

SEQ ID NO: 647081 - DNA, 75 bp, synthetic construct
  source 1..75: mol_type = other DNA
gtggtagatgtctcggaagtgttacgcgacggtaccccgcgccgcgccgcgccgaagagattacgattaaagacc

SEQ ID NO: 647082 - DNA, 75 bp, synthetic construct
  source 1..75: mol_type = other DNA
ccactttcccgactggctggggcgctggtttttcgatgagctgacctatgaggagcgcggcagtgacggaaaatg

SEQ ID NO: 647083 - DNA, 75 bp, synthetic construct
  source 1..75: mol_type = other DNA
ggatgtgttccataaaacatggccgctggcttctgatccggatgtgcgcatgcgtctgatggccatggcggtgga

SEQ ID NO: 647084 - DNA, 75 bp, synthetic construct
  source 1..75: mol_type = other DNA
atgaaaaaggttattgttgtttcagcgcttgctatggcggggggatttttagccccggctctggctggtaggggg

SEQ ID NO: 647085 - DNA, 75 bp, synthetic construct
  source 1..75: mol_type = other DNA
atttccagctataacgttgccggatatactcgtcaaacgaccattatggcgcaggccaatagcactctgggggca

SEQ ID NO: 647086 - DNA, 75 bp, synthetic construct
  source 1..75: mol_type = other DNA
aataccgggtcgctgggcggcattctgacattccgttctcaggatctggaccagacgcgtaatacgcttggacaa

SEQ ID NO: 647087 - DNA, 75 bp, synthetic construct
  source 1..75: mol_type = other DNA
ctgcgcgaccaggacaaacaggtcaatatcgcgataggtgccagcgttgatcagatcaacaattacgctaaacaa

SEQ ID NO: 647088 - DNA, 75 bp, synthetic construct
  source 1..75: mol_type = other DNA
gtggggcatatctgtgaacccgtaatggcgctgtggggattgcccggtgaagcggcaaccgtccttttagccgca

SEQ ID NO: 647089 - DNA, 75 bp, synthetic construct
  source 1..75: mol_type = other DNA
aatacacacttttttcattgtcgccactactttccgcgtttattcagctagcttctatttttcttttaggtcatt

SEQ ID NO: 647090 - DNA, 75 bp, synthetic construct
  source 1..75: mol_type = other DNA
caaacagtttgttgaggcggcgcagccgctggaagccatcaccggtaaagtgaacgactttctcgcccatatcga

SEQ ID NO: 647091 - DNA, 75 bp, synthetic construct
  source 1..75: mol_type = other DNA
ttaaattcctgattgaccggctcaagccggaagaaaaacaaattgctttagatttgttgaaaggattaaatatat

SEQ ID NO: 647092 - DNA, 75 bp, synthetic construct
  source 1..75: mol_type = other DNA
gcgactaattaaaattcgtcgaagtcataacgagtttcatccagataatgattttaccatcgacacggttaattc

SEQ ID NO: 647093 - DNA, 75 bp, synthetic construct
  source 1..75: mol_type = other DNA
tggtcgaggtgttacagcaggaaggggcattagtaaactggaaaaataatcccgacggtacgcgtagcccctatg

SEQ ID NO: 647094 - DNA, 75 bp, synthetic construct
  source 1..75: mol_type = other DNA
tgatgccgtctcaccggagacattggcggaacatcctctacttatctataacgaagattttgccttaagtaagca

SEQ ID NO: 647095 - DNA, 75 bp, synthetic construct
  source 1..75: mol_type = other DNA
tgtttagtcatccactttgtgtgctggtgccgcgttcaggtaaatggcttgagcgtgatgccgtctcaccagaga

SEQ ID NO: 647096 - DNA, 75 bp, synthetic construct
  source 1..75: mol_type = other DNA
cggcgtggaactgaagatttcggagtttggtggtctgacggtacaacaagcggtaatgaacggcgaactggatat

SEQ ID NO: 647097 - DNA, 75 bp, synthetic construct
  source 1..75: mol_type = other DNA
ttaactggtttaaatcgctgctgttaccgatggagttcagcaaggaaacgctggataaatgcaccagtgctggcg

SEQ ID NO: 647098 - DNA, 75 bp, synthetic construct
  source 1..75: mol_type = other DNA
cccgcgttcaggcactgacgcgaatcgacaaaaacagcccgcagtttaaggcgctgcgtgagcaggcgttaaaac

SEQ ID NO: 647099 - DNA, 75 bp, synthetic construct
  source 1..75: mol_type = other DNA
acggcggatattggctcaaatatcctgacgcagttcggcctctccgctgaccagatggaccgggtcggtgacacg

SEQ ID NO: 647100 - DNA, 75 bp, synthetic construct
  source 1..75: mol_type = other DNA
gcgatcctacaattgcccgtcgcccagtatccaaccattgcgccgcctgcggtttctgtttcggcaaactatccg

SEQ ID NO: 647101 - DNA, 75 bp, synthetic construct
  source 1..75: mol_type = other DNA
caacaaccttgacggcgatctgaaatcactcggcagtgcatgggaaggggtgcgcatccgcattgcagatctgat

SEQ ID NO: 647102 - DNA, 75 bp, synthetic construct
  source 1..75: mol_type = other DNA
gaacttgaaggcgcgcgcggtgaggctgaacgcacagcaaaggttatggccaacaaccttgacggcgatctgaaa

SEQ ID NO: 647103 - DNA, 75 bp, synthetic construct
  source 1..75: mol_type = other DNA
caacccggcgtcgaattcgatcacaccaacgttattgattatcagcctgcaaaagcgatcgccttaagtcagatg

SEQ ID NO: 647104 - DNA, 75 bp, synthetic construct
  source 1..75: mol_type = other DNA
accgtaacttccgtaatgaaggtatttctgttcgccataatcctgagttcacaatgatggaactctacatggcat

SEQ ID NO: 647105 - DNA, 75 bp, synthetic construct
  source 1..75: mol_type = other DNA
tacttgccgaataactattatatagttatagcaaattcaatgttttttattttttcttttatcggtggtattagt

SEQ ID NO: 647106 - DNA, 75 bp, synthetic construct
  source 1..75: mol_type = other DNA
cgcaggccattcaggctgcgcttcccggcgtgctgagcatggcaacggctggcggtatggatctcggcgagacgg

SEQ ID NO: 647107 - DNA, 75 bp, synthetic construct
  source 1..75: mol_type = other DNA
tcgcggctttgtttgccagcttgccgactcgctgaatttcccacaagacatgctaattctcggtggcgatcatct

SEQ ID NO: 647108 - DNA, 75 bp, synthetic construct
  source 1..75: mol_type = other DNA
gccacgcatcattgccctggtagtacaacccggcgtcgaattcgatcacaccaacgttattgattatcagccagc

SEQ ID NO: 647109 - DNA, 75 bp, synthetic construct
  source 1..75: mol_type = other DNA
ttattgctcaaacgcggttaaaaaatccggaagaattcggcaaagtgaccctgcgcgtaaacagtgacggctcgg

SEQ ID NO: 647110 - DNA, 75 bp, synthetic construct
  source 1..75: mol_type = other DNA
gtggagccgctgtacaaagcgttgaacgccggacgtaccagtaagcgtattcataaaggcctggtggtgcgtaaa

SEQ ID NO: 647111 - DNA, 75 bp, synthetic construct
  source 1..75: mol_type = other DNA
gagaaagcaaacgttgaaagcatctgcgacggtcgcatagccttcgccatggcaggcgtcatacccgcaaaggcg

SEQ ID NO: 647112 - DNA, 75 bp, synthetic construct
  source 1..75: mol_type = other DNA
ttgttagggacgtttgccatcctcgccgcttttggttactccatcaacacactaacgatgttcgggatggtgctt

SEQ ID NO: 647113 - DNA, 75 bp, synthetic construct
  source 1..75: mol_type = other DNA
tatgatcgacaaagaaattgcacgtggtgaactggtagagttaatggcagatagagtgctgccagtggaaatgcc

SEQ ID NO: 647114 - DNA, 75 bp, synthetic construct
  source 1..75: mol_type = other DNA
tgcttgagcaactggatgcacaggacaatttattttcatttatgaaaactgcgcataccattttgctccagggga

SEQ ID NO: 647115 - DNA, 75 bp, synthetic construct
  source 1..75: mol_type = other DNA
ctgtacaatggagcgcggcgcgacagaatccagaaaaaatgcgcgaccttgcggagggcagagaactctgccggg

SEQ ID NO: 647116 - DNA, 75 bp, synthetic construct
  source 1..75: mol_type = other DNA
gatccgacctggaccggtactgaccacacgcgtgaacacattccggtactggtttacggcccgaaagtaaaaccg

SEQ ID NO: 647117 - DNA, 75 bp, synthetic construct
  source 1..75: mol_type = other DNA
ctttactgcgcgatgacgacatcctgatcctcaccgctgaccacggttgtgatccgacctggaccggtactgacc

SEQ ID NO: 647118 - DNA, 75 bp, synthetic construct
  source 1..75: mol_type = other DNA
atgtgaagttcgggcatggcagtgcacaacatgtgcgtgccggtttccgtctgggcagccacaacgatatgacct

SEQ ID NO: 647119 - DNA, 75 bp, synthetic construct
  source 1..75: mol_type = other DNA
cacaggacgatatttactgatctatgcgctgattgttgcaggaatggtggtgttgtttttacgtcttccgtcttc

SEQ ID NO: 647120 - DNA, 75 bp, synthetic construct
  source 1..75: mol_type = other DNA
cacggccaggtggtttctgtcggtaaaattgcggacatctacgccaactgcggtatcaccaaaaaagtgaaagcg

SEQ ID NO: 647121 - DNA, 75 bp, synthetic construct
  source 1..75: mol_type = other DNA
ctgaagttatcggcgcgtacgcatgggcgcacgaaatgtcatccggtaaagataccccgtctggtcactgggaaa

SEQ ID NO: 647122 - DNA, 75 bp, synthetic construct
  source 1..75: mol_type = other DNA
taatatacctttgttatctaattatatgtttctactttaagcttgaaataacacatccagcagttgtacatacga

SEQ ID NO: 647123 - DNA, 75 bp, synthetic construct
  source 1..75: mol_type = other DNA
catccccgctggtatcacgccttaattaccacgctacaggatgtggacatgctgatctatgtccatggcgcgaat

SEQ ID NO: 647124 - DNA, 75 bp, synthetic construct
  source 1..75: mol_type = other DNA
tgttcggcctggagccttacgaaatctcaactctgtttgagcaacgccaggcaatgctgcaatcaatcaaggaag

SEQ ID NO: 647125 - DNA, 75 bp, synthetic construct
  source 1..75: mol_type = other DNA
cggacgaccgtgagcaggtgctggccgtctatggtccggtacatgcccggttgctgcgtcaggcactggaactga

SEQ ID NO: 647126 - DNA, 75 bp, synthetic construct
  source 1..75: mol_type = other DNA
ggcgcaggccctacgtgtatttacccccgtctacgatgaaaataataagcaaattggcgtagtggcaattggtct

SEQ ID NO: 647127 - DNA, 75 bp, synthetic construct
  source 1..75: mol_type = other DNA
tgtgacggcgaggtggttcgtcccaaagaaccgaactggacagcctgggcaaacgaaattcgcctgatgtgtgtg

SEQ ID NO: 647128 - DNA, 75 bp, synthetic construct
  source 1..75: mol_type = other DNA
gtggtgctgcgcgagccttcggcagaggcctggtatctttggcgggaagttcttaatggcgatgatgcgggtgac

SEQ ID NO: 647129 - DNA, 75 bp, synthetic construct
  source 1..75: mol_type = other DNA
ctggtcggcaaactgtttatggattatctgtcaccgttgaaacaacaacgtattcgtcagaaagttgaaaaactg

SEQ ID NO: 647130 - DNA, 75 bp, synthetic construct
  source 1..75: mol_type = other DNA
gcaagtgctggcagaactggcaaaacgcggcatcgagtgggtacagatcgacgaacccgcgctggtactggaact

SEQ ID NO: 647131 - DNA, 75 bp, synthetic construct
  source 1..75: mol_type = other DNA
cattcactcgccaaacgtaccgagcgtggaatggattgaagccttgctgaagaaagcggcaaaacgcattccggc

SEQ ID NO: 647132 - DNA, 75 bp, synthetic construct
  source 1..75: mol_type = other DNA
ttaatctgttcgatcccgatgcggtgatcctgggcggtggcgtgatggatatgcccgccttcccacgcgagactc

SEQ ID NO: 647133 - DNA, 75 bp, synthetic construct
  source 1..75: mol_type = other DNA
ctgactttaatggcgctcagggtgcagcaatattggcgcatcaacgttttttatcgcaacttgacgccgtcccgc

SEQ ID NO: 647134 - DNA, 75 bp, synthetic construct
  source 1..75: mol_type = other DNA
ctctactctgtttgagcaacgccaggcaatgctgcaatcgatcaaggaaggcgtcgttgccgtggacgctcgtgg

SEQ ID NO: 647135 - DNA, 75 bp, synthetic construct
  source 1..75: mol_type = other DNA
aaccggacacgcagacggatgaacaggattttttaactcgccatcctgatgcggttgtattcagccctaaaaagc

SEQ ID NO: 647136 - DNA, 75 bp, synthetic construct
  source 1..75: mol_type = other DNA
aggctgaacgcacggcaaaggttatggccaacaaccttgatggcgatctgaaatcactcggcagtgcatgggaag

SEQ ID NO: 647137 - DNA, 75 bp, synthetic construct
  source 1..75: mol_type = other DNA
cgggggcaaaatgcgcccgatggaagatctgctggctgacctttataaagccacccgcaaatacggggaagttga

SEQ ID NO: 647138 - DNA, 75 bp, synthetic construct
  source 1..75: mol_type = other DNA
ccgcagcgtttacccgtaccaacactgaccttcgcgcactgggcgaaaccatgaaatatgccggtccggtggcgg

SEQ ID NO: 647139 - DNA, 75 bp, synthetic construct
  source 1..75: mol_type = other DNA
aaaaaacgcattggccccggcgatattgtctttaagaacctgccccgcgcacttgctgttcgtggggagtggcag

SEQ ID NO: 647140 - DNA, 75 bp, synthetic construct
  source 1..75: mol_type = other DNA
gcagttcggcctttctgctgaccagatggaccgggtcggtgacacactcaccgcagcgtttacccgtaccaacac

SEQ ID NO: 647141 - DNA, 75 bp, synthetic construct
  source 1..75: mol_type = other DNA
cgacaaaaacagcccgcagtttaaggcgctgcgtgagcaggcgttaaaacttggctctgaaacgcagttcaccgc

SEQ ID NO: 647142 - DNA, 75 bp, synthetic construct
  source 1..75: mol_type = other DNA
gacagcacaaagcgggcaaaacaaatgggatttatgccgtttgttccgcacatccgctggtgctggaagctgcaa

SEQ ID NO: 647143 - DNA, 75 bp, synthetic construct
  source 1..75: mol_type = other DNA
tgtttgtcagctcgccgactcgttgaatttcccgcaggatgcgctgattctgggtggtgaccatctggggccaaa

SEQ ID NO: 647144 - DNA, 75 bp, synthetic construct
  source 1..75: mol_type = other DNA
ctgacagaaatggtgagacagcacaaagcgggcaaaacaaatgggatttatgccgtttgttccgcacatccgctg

SEQ ID NO: 647145 - DNA, 75 bp, synthetic construct
  source 1..75: mol_type = other DNA
ccatccagcaggccatcagacgcaccgaacagtacaacaatcagcttgaacgcgaacagcaggcgcttgcgcgtg

SEQ ID NO: 647146 - DNA, 75 bp, synthetic construct
  source 1..75: mol_type = other DNA
tggtggtgcatctgatttacttctcgcaaatcagtgatatgacgcgagacgggctggccaacaaggcactggcag

SEQ ID NO: 647147 - DNA, 75 bp, synthetic construct
  source 1..75: mol_type = other DNA
tccctgcgcttatcgccgtccgtcagcacgtacacagaaaaacgcgaagacccgtacttcaaagccagttacgac

SEQ ID NO: 647148 - DNA, 75 bp, synthetic construct
  source 1..75: mol_type = other DNA
tcaggccagcggcctgctgctggaaaatggcggcagctttacggttaatgccgggggacaggccagcaacaccac

SEQ ID NO: 647149 - DNA, 75 bp, synthetic construct
  source 1..75: mol_type = other DNA
atatagtttttccgctgccgtaaaatcggcagccgggcgtgagaacccgagcaatctaacggcgacatatgacgc

SEQ ID NO: 647150 - DNA, 75 bp, synthetic construct
  source 1..75: mol_type = other DNA
gctacagacgagaacttctccggggcgctatccagcaaaccagggactttttctctcgccacctcaaagcggcat

SEQ ID NO: 647151 - DNA, 75 bp, synthetic construct
  source 1..75: mol_type = other DNA
tcgccacacgaagagaaagtggtttgggaacggactactcaaaattacttggtgcgagtgacagaactccctgaa

SEQ ID NO: 647152 - DNA, 75 bp, synthetic construct
  source 1..75: mol_type = other DNA
catgatccggctgatcgcacagcacaaaacaaacatcaataatttcctcacttatgcaggctataaatacagggt

SEQ ID NO: 647153 - DNA, 75 bp, synthetic construct
  source 1..75: mol_type = other DNA
cacgttcttcaaccggcatgagaggtctgtcaggcggaaataaaatacaccacattccggctggtcttgagaact

SEQ ID NO: 647154 - DNA, 75 bp, synthetic construct
  source 1..75: mol_type = other DNA
gtgagcctgccgctgcgggcatgggctaccccgaaatggcgcctgagaaaattcagcaggcactgtgggatatcc

SEQ ID NO: 647155 - DNA, 75 bp, synthetic construct
  source 1..75: mol_type = other DNA
tcacctgcctctgcttgcgcatctggaaggcgaattgttcagcggccggggatggcagccgggaatatccgttcc

SEQ ID NO: 647156 - DNA, 75 bp, synthetic construct
  source 1..75: mol_type = other DNA
gcggatatctggttaaaagccgttatctgtgtggttataacgcagtgcccggggacagtgaatacattgcttttc

SEQ ID NO: 647157 - DNA, 75 bp, synthetic construct
  source 1..75: mol_type = other DNA
gacagggaacttatgaagccctatccggtttctatggcgcaactgtattcccttactggcgtaccagatatggct

SEQ ID NO: 647158 - DNA, 75 bp, synthetic construct
  source 1..75: mol_type = other DNA
ggattgaccaagcgatgttagagcgttggcaaggcatctgggagcgtttcgtgttggaactgtcgggtgatgtta

SEQ ID NO: 647159 - DNA, 75 bp, synthetic construct
  source 1..75: mol_type = other DNA
aggatatggtcgagcgctggcaagacctctgggaacgctttgtgctggagctggcggatgatgtaaaaagtcttt

SEQ ID NO: 647160 - DNA, 75 bp, synthetic construct
  source 1..75: mol_type = other DNA
ttgttaagcaccacaaaggggcgagtagatgctgtcagcagagtgaaaaacctgatagcacaaaaagacattgac

SEQ ID NO: 647161 - DNA, 75 bp, synthetic construct
  source 1..75: mol_type = other DNA
gggctgcaggcgctgatgcccttccggctgcggggagaaaatcccggtaatgtcggacccgtcgtcaccggggct

SEQ ID NO: 647162 - DNA, 75 bp, synthetic construct
  source 1..75: mol_type = other DNA
acagatccgtgggttggcttttgcttctttgactgattttaccaagccagagcctttctggactattgataataa

SEQ ID NO: 647163 - DNA, 75 bp, synthetic construct
  source 1..75: mol_type = other DNA
tattgaggttatgaagggattggtagaggcttgtgaggctgaacaggaaaggcatactcttaatgatttttttca

SEQ ID NO: 647164 - DNA, 75 bp, synthetic construct
  source 1..75: mol_type = other DNA
gtgacatttaccgccagacataatcacttacctgcaccgggagcggatgcctggccggtacttatccgcgaagca

SEQ ID NO: 647165 - DNA, 75 bp, synthetic construct
  source 1..75: mol_type = other DNA
aggtaagcagtacaatggaggccgcacagatccgaggattggcttttacttgtttgactgattttactaagccag

SEQ ID NO: 647166 - DNA, 75 bp, synthetic construct
  source 1..75: mol_type = other DNA
gttaactttttaagtaatttaatccagctttctacttctgcacaagaaaatcttgtattgaataacatttttaaa

SEQ ID NO: 647167 - DNA, 75 bp, synthetic construct
  source 1..75: mol_type = other DNA
ggaccaccttacattcaatatccaacaggtaacagtaaggctcgaaatcagcgagtaaattatttgctgggtgat

SEQ ID NO: 647168 - DNA, 75 bp, synthetic construct
  source 1..75: mol_type = other DNA
tgaactctgcgccctgataagcgccctcgccgatgtgccggtgaatcagagtatcgctatcacaggttcagtcga

SEQ ID NO: 647169 - DNA, 75 bp, synthetic construct
  source 1..75: mol_type = other DNA
gagcaactctttggctgcctgcgccagtttaatggcgacattaccctgcagcctggtctggtgcatcaggcaaat

SEQ ID NO: 647170 - DNA, 75 bp, synthetic construct
  source 1..75: mol_type = other DNA
ataccgagctgagcttgctgatagagcacctacagaaactcagcagtgcattccgatcaaccagttccgggattt

SEQ ID NO: 647171 - DNA, 75 bp, synthetic construct
  source 1..75: mol_type = other DNA
aactgcctgcgcccggtgctgatgcctggccagtgcttatccgcgaagccgcccgctataccggtgagcaagaaa

SEQ ID NO: 647172 - DNA, 75 bp, synthetic construct
  source 1..75: mol_type = other DNA
agccgtgaacgcttcgattgggtcgcgtttgatgagtctcgtcccctccccatctccgttccttcaatgccattg

SEQ ID NO: 647173 - DNA, 75 bp, synthetic construct
  source 1..75: mol_type = other DNA
cacgcgcgggcatcatcctcttttatactagcgaaagcgccggaagaatccgagtatcttaatcttatagccgat

SEQ ID NO: 647174 - DNA, 75 bp, synthetic construct
  source 1..75: mol_type = other DNA
tgacaacgttccagacgttccaatcttgcaagatattgaacattacgaaattccacgcgataaacggcgtgatat

SEQ ID NO: 647175 - DNA, 75 bp, synthetic construct
  source 1..75: mol_type = other DNA
cacaacgttttctggggagagggatgggcataaactcgtttattgttgccgtctcttctgctgccgggccgacaa

SEQ ID NO: 647176 - DNA, 75 bp, synthetic construct
  source 1..75: mol_type = other DNA
ataaatgcggtctggtcgtttttctgttgtcttcactgttctgcgccctttctgattcgctgcaaatgctcaccc

SEQ ID NO: 647177 - DNA, 75 bp, synthetic construct
  source 1..75: mol_type = other DNA
gcccagcagttaaacgctctactaaagagcttggtgatatttggttgtatccttggaatatatcttggggatatg

SEQ ID NO: 647178 - DNA, 75 bp, synthetic construct
  source 1..75: mol_type = other DNA
cattatggcagcgggtctgttttcactggttctgctgcccgcttctcctgcggatatcaacattatctggccaat

SEQ ID NO: 647179 - DNA, 75 bp, synthetic construct
  source 1..75: mol_type = other DNA
aatggtacgcacgtctcgctgatgactgcggctattctggccgtgattgctgcttgcgtcagtgggttacggatt

SEQ ID NO: 647180 - DNA, 75 bp, synthetic construct
  source 1..75: mol_type = other DNA
ccattattacttccgccccgcgggaacgtagcggcggtgccagtggcatgttaggtacggctcgtctgcttggtc

SEQ ID NO: 647181 - DNA, 75 bp, synthetic construct
  source 1..75: mol_type = other DNA
gaggttaagcgccttaagtcgcttgaagaagagaacgcccgactcaagaagctgctcgccgaagccatgctggat

SEQ ID NO: 647182 - DNA, 75 bp, synthetic construct
  source 1..75: mol_type = other DNA
atgccagccgtaaggactactccttcctgaccgatgcggagtttgaagtaatgtccaaaatccctgagcactcgc

SEQ ID NO: 647183 - DNA, 75 bp, synthetic construct
  source 1..75: mol_type = other DNA
atgcgcgtaccgtgactatcctggacgggtacgtgaatgaagtggtggaaaacggggtgtcactgaaagggctgc

SEQ ID NO: 647184 - DNA, 75 bp, synthetic construct
  source 1..75: mol_type = other DNA
ccgcagccatggcgtaccactacgggcgttgttcggcccaatttgtggcgcaattttacttgtggttggcgcctg

SEQ ID NO: 647185 - DNA, 75 bp, synthetic construct
  source 1..75: mol_type = other DNA
ccagtcgctgggatttgtcgtcaccgcacaaatgccgcaggtaggcactcactttggtcgttggctggatctgac

SEQ ID NO: 647186 - DNA, 75 bp, synthetic construct
  source 1..75: mol_type = other DNA
cgaagccgaagctggggtacccgcccgtgaactctgccgcaagcatgccatttccgatgccacgttttacacctg

SEQ ID NO: 647187 - DNA, 75 bp, synthetic construct
  source 1..75: mol_type = other DNA
tctgatgttaaatcagtttggcgataatggtacacacgtctcgctgatgactgcggctattctggctgtgattgc

SEQ ID NO: 647188 - DNA, 75 bp, synthetic construct
  source 1..75: mol_type = other DNA
ccgtgatgaccagcgtttttattttgctcgtattgctgaggaacccgggaactgtgcacgttacaaaacagtcaa

SEQ ID NO: 647189 - DNA, 75 bp, synthetic construct
  source 1..75: mol_type = other DNA
atgctggacatggaaaataatatcaaaaagataaatgccgagatcgaagaaaatcgaaagaatggcgttgatgat

SEQ ID NO: 647190 - DNA, 75 bp, synthetic construct
  source 1..75: mol_type = other DNA
ggatattcttgaatcatcaccgacacttaatgttccgtaccaagctaaaagcctcagctatggttattacaccgg

SEQ ID NO: 647191 - DNA, 75 bp, synthetic construct
  source 1..75: mol_type = other DNA
cagtaacggcacgaacgagcaatacgtaggccgtgacctttatatgccgcaagagattgtagagttagggtcaca

SEQ ID NO: 647192 - DNA, 75 bp, synthetic construct
  source 1..75: mol_type = other DNA
ttccctgatgaagggggtgataatgctatctggaacagcatggcagaagctgtatttgaatcctatattctgtac

SEQ ID NO: 647193 - DNA, 75 bp, synthetic construct
  source 1..75: mol_type = other DNA
cttctgcttctgactttgactttaatgatttacgtcgtaaaagaatgtctgtatatattgtgctttctccaacag

SEQ ID NO: 647194 - DNA, 75 bp, synthetic construct
  source 1..75: mol_type = other DNA
gctgcggctattctggcagtgattgctgcctgtgtcagtggtttacgtatcactcagccacgatccagggcataa

SEQ ID NO: 647195 - DNA, 75 bp, synthetic construct
  source 1..75: mol_type = other DNA
gccagttctatttgggtggtgaatgcctatcaaatcgcgattgtcgtctccctgctttcgttttcgtttctggga

SEQ ID NO: 647196 - DNA, 75 bp, synthetic construct
  source 1..75: mol_type = other DNA
ttgctgcggaactggtggtaatggttgtcgttggtattttctttattcgccgccagctttctcttcccgtaccgc

SEQ ID NO: 647197 - DNA, 75 bp, synthetic construct
  source 1..75: mol_type = other DNA
atgactattgagcaatgtttggacttggatgaagttccagaagcagacctggtttcacccaaaacggtcaaagat

SEQ ID NO: 647198 - DNA, 75 bp, synthetic construct
  source 1..75: mol_type = other DNA
gtcgataaatctgaaaaaccattggcctccgaactgacactatctcaggcatggaagggatttcttgagttcaag

SEQ ID NO: 647199 - DNA, 75 bp, synthetic construct
  source 1..75: mol_type = other DNA
cggaatatgacctcatgtggaaacattattgtgatgcacatgtagcctttcttgattcccgacattctgaatatc

SEQ ID NO: 647200 - DNA, 75 bp, synthetic construct
  source 1..75: mol_type = other DNA
catttacagccaaagttctggcccgcaatggatacgtcatacccgcagagatgaattaagccgctttggtcaaaa

SEQ ID NO: 647201 - DNA, 75 bp, synthetic construct
  source 1..75: mol_type = other DNA
tgatgctggtactgctgttgccgcatattcataaaatgaatcttttaaccctgccgctgcaacaaggacttgcgt

SEQ ID NO: 647202 - DNA, 75 bp, synthetic construct
  source 1..75: mol_type = other DNA
ctgtttcagcgttcaaatagcgttggcgggagaatgcaaaccggggcaattacttttctgccaccgctggcattt

SEQ ID NO: 647203 - DNA, 75 bp, synthetic construct
  source 1..75: mol_type = other DNA
tcagtgacgcaaccgaagctatccgtaaaatgaacgggtacacctacacacttaaggaaaacggactgccttacg

SEQ ID NO: 647204 - DNA, 75 bp, synthetic construct
  source 1..75: mol_type = other DNA
cataatggcactggctggttgccattagctgttgggcaaggaggtacaggtgcgacaacagtagaagatgcgcga

SEQ ID NO: 647205 - DNA, 75 bp, synthetic construct
  source 1..75: mol_type = other DNA
tatgagcaaaaagctggccttgctaatactgacctaaacacccttaccggtgaatattctggtttctatcaacaa

SEQ ID NO: 647206 - DNA, 75 bp, synthetic construct
  source 1..75: mol_type = other DNA
gtggtatccgggcggtaatggtaaaccgttctgctcaggttcagactccggcaggcctgacggatactgagtccg

SEQ ID NO: 647207 - DNA, 75 bp, synthetic construct
  source 1..75: mol_type = other DNA
aaaaccgtgggtcaacgatgataaaccgcaggtcattgtcgtgggctggtcaggtgattggtcgcttgctgatgg

SEQ ID NO: 647208 - DNA, 75 bp, synthetic construct
  source 1..75: mol_type = other DNA
tgctgctcggtttgttctttatctctgtcggcatgtcgctcaacctcggggtgctttatacccatctgttgtggg

SEQ ID NO: 647209 - DNA, 75 bp, synthetic construct
  source 1..75: mol_type = other DNA
agcgctggctgttctggcgttgattatcccttccctgctgacctggcaaagcagaaagcataatccgcaggcagg

SEQ ID NO: 647210 - DNA, 75 bp, synthetic construct
  source 1..75: mol_type = other DNA
atttattaccggtagtgcgatccctctgatagcgtacattttctggcaactggcgacgctgggcagcattgattc

SEQ ID NO: 647211 - DNA, 75 bp, synthetic construct
  source 1..75: mol_type = other DNA
gcactgttttatccacgaggatttgtgatggcgctgggttacgccggtgtggcgctggcggtactggcattgatt

SEQ ID NO: 647212 - DNA, 75 bp, synthetic construct
  source 1..75: mol_type = other DNA
ttgtattatggttattttcaattatctatattcgcagcaggcatcgttgtattatggttattttcaattatctat

SEQ ID NO: 647213 - DNA, 75 bp, synthetic construct
  source 1..75: mol_type = other DNA
agtttaatggcgacattaccctgcagcctggtctggtgcatcaggcaaatggcggtattctcatcatctctttgc

SEQ ID NO: 647214 - DNA, 75 bp, synthetic construct
  source 1..75: mol_type = other DNA
cttatggtgctgctacttaataacgatgtctggtgtaagagtcgtgaggtggtggttctcagaaatctgattgag

SEQ ID NO: 647215 - DNA, 75 bp, synthetic construct
  source 1..75: mol_type = other DNA
ttcaaaggcgaactggctaaatcgctcgcgcgcaaccggacaacaacgacggatcaggctaaagcggcgcgtgag

SEQ ID NO: 647216 - DNA, 75 bp, synthetic construct
  source 1..75: mol_type = other DNA
aagcgttcctgatgtcggaactacagcttgagcaacagatccccttctcagcatcgctgacatttgagcagtcat

SEQ ID NO: 647217 - DNA, 75 bp, synthetic construct
  source 1..75: mol_type = other DNA
ggcgacaccttctccggcgagcagctaaacttaatgctacagcagcgtgaatggcgcgaaggtttcctcgctgaa

SEQ ID NO: 647218 - DNA, 75 bp, synthetic construct
  source 1..75: mol_type = other DNA
tcaccgacatcgaacgcaaagcggagcttggcggcaatatccatgcgaaagggatgatgatcatgcaagcgttcc

SEQ ID NO: 647219 - DNA, 75 bp, synthetic construct
  source 1..75: mol_type = other DNA
gccacgccggaaagcagcggcagctatggcttcgtccgtctggagggtgacctgctcagaacagaggttgccggt

SEQ ID NO: 647220 - DNA, 75 bp, synthetic construct
  source 1..75: mol_type = other DNA
gttgtgatatggccatttctaatcatctatgtttatttttgtgagttattcagaagtcactggatagcagtctga

SEQ ID NO: 647221 - DNA, 75 bp, synthetic construct
  source 1..75: mol_type = other DNA
tacacaataacaagggaagactcactcgtggctgcaaccctgcttactcaaaatctattcacacatggttacgtt

SEQ ID NO: 647222 - DNA, 75 bp, synthetic construct
  source 1..75: mol_type = other DNA
tccggtaataacggcggttatctgcggaatgagctgtcctggtctctgttctccctgccatatgtgggaactgtc

SEQ ID NO: 647223 - DNA, 75 bp, synthetic construct
  source 1..75: mol_type = other DNA
tcaatactcacaggcgagtattgaacagctccgaacgtacattatcgagctgaaatcacagctcggtctgagtac

SEQ ID NO: 647224 - DNA, 75 bp, synthetic construct
  source 1..75: mol_type = other DNA
ctatacaggcttcaattcgttcaacaatcaggtaggcggcgttacagaaacagatctgatgcagcacctgatcga

SEQ ID NO: 647225 - DNA, 75 bp, synthetic construct
  source 1..75: mol_type = other DNA
gatctggcggtgatcccggcactggcgttagtgccgttgttggcgggttcggcagacgaacatttcgactggatg

SEQ ID NO: 647226 - DNA, 75 bp, synthetic construct
  source 1..75: mol_type = other DNA
tagccagtatctctataacgatacatgggtggattcaatcggggaaattgtcgatacaccgatgaactatccaaa

SEQ ID NO: 647227 - DNA, 75 bp, synthetic construct
  source 1..75: mol_type = other DNA
tggtgcaggcagatcgctttggtttggtgaactccgttaatgggaaaattacaacgccattcgttattgatgccg

SEQ ID NO: 647228 - DNA, 75 bp, synthetic construct
  source 1..75: mol_type = other DNA
acctacaacaacaaggaggacggttataagcaaaacatcgagtacgttgaagatcaggacgcaatgcgccgttat

SEQ ID NO: 647229 - DNA, 75 bp, synthetic construct
  source 1..75: mol_type = other DNA
acaaatttacagatgccgatcagcggcttgaagaagctcaaaacaatcttaaaacggaagtttccggtactgtca

SEQ ID NO: 647230 - DNA, 75 bp, synthetic construct
  source 1..75: mol_type = other DNA
tgacttggcaaacgcgaaagaaatcgaggcgatgaagtcaactgtagatagcagtttagccaccattgaagaaat

SEQ ID NO: 647231 - DNA, 75 bp, synthetic construct
  source 1..75: mol_type = other DNA
attcagttgcaggaaactgtatcagagcagggtaaagctgtagctggagctgttgaggcggcaaatgcagcactt

SEQ ID NO: 647232 - DNA, 75 bp, synthetic construct
  source 1..75: mol_type = other DNA
aaaaacgttggtattaagttaacagcgaagaaaacaggtgtttattatcgtagttatgagctgaagttacccaag

SEQ ID NO: 647233 - DNA, 75 bp, synthetic construct
  source 1..75: mol_type = other DNA
tgaagttcccttctctgcgaagaatagaccaaaaaacgggtgatacgaacggcactaccgttgagtataagttcc

SEQ ID NO: 647234 - DNA, 75 bp, synthetic construct
  source 1..75: mol_type = other DNA
tcccatgcactcactatccctgatgaaagctttaagcaatttcttttagagcctaatgcagaagttatttggatc

SEQ ID NO: 647235 - DNA, 75 bp, synthetic construct
  source 1..75: mol_type = other DNA
cgaatgaacgatatgggcttggccaatttgtatcagagtccatgattgacctcggccagctgtaccagatcggtc

SEQ ID NO: 647236 - DNA, 75 bp, synthetic construct
  source 1..75: mol_type = other DNA
aagtggacgaattgacaccttaaaagcatcagttgatggaaatacagcgacaattcaagagcaggcaactgctat

SEQ ID NO: 647237 - DNA, 75 bp, synthetic construct
  source 1..75: mol_type = other DNA
gtgaaatttccgcattaaataaggagctaatgagtagtatcgatgagtttaaaacatcgtttactgaacgcagcg

SEQ ID NO: 647238 - DNA, 75 bp, synthetic construct
  source 1..75: mol_type = other DNA
accgaatacgagcttgttgattcggcctatgaacgctgtattgttggcgagtgtcttgagtcatgtgatcctgat

SEQ ID NO: 647239 - DNA, 75 bp, synthetic construct
  source 1..75: mol_type = other DNA
tgacgttctcaccctcacagaatggcacatcactggacctgcaggccggactggaagcccgtgtccgggaaaata

SEQ ID NO: 647240 - DNA, 75 bp, synthetic construct
  source 1..75: mol_type = other DNA
cacagcatttcatgtggggactccctggcttaacctgaccgggcggtgcgcattcccgcttttcgcactgatggc

SEQ ID NO: 647241 - DNA, 75 bp, synthetic construct
  source 1..75: mol_type = other DNA
atcgacgcactggtggaacaggcgcgcgagcgcgtaataaaaacaggggagttaacgcgaaccgaggtcgatgag

SEQ ID NO: 647242 - DNA, 75 bp, synthetic construct
  source 1..75: mol_type = other DNA
ccgcaggcgccgaggccgcagagtctattgtcatcacctgtaacgagccggaagacaccatgaagctggtggaga

SEQ ID NO: 647243 - DNA, 75 bp, synthetic construct
  source 1..75: mol_type = other DNA
ctggttcctgattaacgagaaagcaaataccgatgtcatctttaccgttgatggtttcagttttagcggcagcgg

SEQ ID NO: 647244 - DNA, 75 bp, synthetic construct
  source 1..75: mol_type = other DNA
cagcgcggatttccttaatacagcaaaatatccgcaggcaaccttcacctccaccagcgtgaagaaaaacggtga

SEQ ID NO: 647245 - DNA, 75 bp, synthetic construct
  source 1..75: mol_type = other DNA
gacgccaatggctggttttgattttgttgaaacgcctaagtccgtaaatattcagcttaaaaaaacacacgacgt

SEQ ID NO: 647246 - DNA, 75 bp, synthetic construct
  source 1..75: mol_type = other DNA
ctttatggatgatgagacaagccagttgttatgcagtctggtccacgagaataatagaagctggacactaatgtt

SEQ ID NO: 647247 - DNA, 75 bp, synthetic construct
  source 1..75: mol_type = other DNA
agattagaggggtttttactcatgctgattatatgggattaggcatcgcaagttttgcttacctttatctcgtag

SEQ ID NO: 647248 - DNA, 75 bp, synthetic construct
  source 1..75: mol_type = other DNA
ggagaacgcacaaaccgagcttaaaggtgaggtttcggcaacgatcgacaaggtcaatgaagcgtttgaaaaaat

SEQ ID NO: 647249 - DNA, 75 bp, synthetic construct
  source 1..75: mol_type = other DNA
tgacgagttaaatgagcatatcaaccagagcgtcgaatctttggaggggtcggtaaacgacgttaaggaagatat

SEQ ID NO: 647250 - DNA, 75 bp, synthetic construct
  source 1..75: mol_type = other DNA
ttcgttgaaacgcctaaatccgtcaatatccagttaaaaaaaacacattatgtaacggtttcaatcgataacgat

SEQ ID NO: 647251 - DNA, 75 bp, synthetic construct
  source 1..75: mol_type = other DNA
tttcaatcaatatttgaatcaatgcaagagaaaaatgaaatgagtaaaggggaattttatatcgctccaatgtat

SEQ ID NO: 647252 - DNA, 75 bp, synthetic construct
  source 1..75: mol_type = other DNA
aatccgggaggctatgcccgccagcaacacatgggcggcggtaaagtctggggtaattcccgcaagatggcggcc

SEQ ID NO: 647253 - DNA, 75 bp, synthetic construct
  source 1..75: mol_type = other DNA
aatccgggcggcttcagccgcacccagcatatgggcggcggcaaggtctggggcatctccagcaagatggcctcg

SEQ ID NO: 647254 - DNA, 75 bp, synthetic construct
  source 1..75: mol_type = other DNA
tttataataagaaacatatttgaaacatcagtatttataaaatcagaatgtaaaaaactagggataaagaatttc

SEQ ID NO: 647255 - DNA, 75 bp, synthetic construct
  source 1..75: mol_type = other DNA
aacttgtaaataattcatttattgatttctgtggtactcctgaagaatataatcttttattatcccaaccatata

SEQ ID NO: 647256 - DNA, 75 bp, synthetic construct
  source 1..75: mol_type = other DNA
caattaaatatttttatgtatctattgccgacatggcattttgtggtactccagcggagtatgaagagttaattt

SEQ ID NO: 647257 - DNA, 75 bp, synthetic construct
  source 1..75: mol_type = other DNA
gtgaatttccataccgaagaggtgatgctggacaaaattaccggaaaaacgccggtggcggcctatgtctccccg

SEQ ID NO: 647258 - DNA, 75 bp, synthetic construct
  source 1..75: mol_type = other DNA
ctactgcgaccaggccagcggtcttgtgaatattgccattatggacggtaccgtctggcgtctgctgaatggctt

SEQ ID NO: 647259 - DNA, 75 bp, synthetic construct
  source 1..75: mol_type = other DNA
tgctggacaaaattaccggaaaaacgccggtggcggcctatgtctccccgatcgttgaaggaaaagtgcttcgcc

SEQ ID NO: 647260 - DNA, 75 bp, synthetic construct
  source 1..75: mol_type = other DNA
gggaatactcaggcggaaggcgtccgttgctatggggccattcaggataaccaggcgctgagtgaagggatcacc

SEQ ID NO: 647261 - DNA, 75 bp, synthetic construct
  source 1..75: mol_type = other DNA
atggggttatttaccacgcgtcagttgctcggctacaccgagcagaaagtgaaatttcgtgcgctgtttctggag

SEQ ID NO: 647262 - DNA, 75 bp, synthetic construct
  source 1..75: mol_type = other DNA
ccgttctgcagggtaagtacaccatgagcggggaacagtttgagacggtggaagtggattttgggcgctctgcca

SEQ ID NO: 647263 - DNA, 75 bp, synthetic construct
  source 1..75: mol_type = other DNA
tcagacaggttgagcaaaaaacagggctgaagcgttcacagatatacctttatatgaaagagggtgcatttcccc

SEQ ID NO: 647264 - DNA, 75 bp, synthetic construct
  source 1..75: mol_type = other DNA
gacggtggagttaagacagaagaacgagacgagttcaaaaaattagcggaaggggaaacagggatcatttgcgtt

SEQ ID NO: 647265 - DNA, 75 bp, synthetic construct
  source 1..75: mol_type = other DNA
tggttcttcctaccagtgccggaaagtcattgattgcttgtatgctgtctcgttggtacttagagaactacaccg

SEQ ID NO: 647266 - DNA, 75 bp, synthetic construct
  source 1..75: mol_type = other DNA
ggtattcataatcgccgtagaatgctggttcttcctaccagtgcgggtaagtcattgattgcttgtatgctgtct

SEQ ID NO: 647267 - DNA, 75 bp, synthetic construct
  source 1..75: mol_type = other DNA
ggactgacactgaatcagtcccgtctggtgacggataaaaatctggtgctgtcttcatccgggcagattgtacag

SEQ ID NO: 647268 - DNA, 75 bp, synthetic construct
  source 1..75: mol_type = other DNA
tcctgtgagcattattccggtcgtgcaacatgggatattcggaagccgtatatagataaagtgctggtcattaat

SEQ ID NO: 647269 - DNA, 75 bp, synthetic construct
  source 1..75: mol_type = other DNA
agagagttcatgatagatatggaaatgaaatgtgtacctgttatcaccaagttgttgcatcaacgcaactggtca

SEQ ID NO: 647270 - DNA, 75 bp, synthetic construct
  source 1..75: mol_type = other DNA
atgcaatttaaagatttaccagaggatattcagaaaatagctgcggatacgcttaaagaccatttatcggtgata

SEQ ID NO: 647271 - DNA, 75 bp, synthetic construct
  source 1..75: mol_type = other DNA
atcattccgggatcgacactcatcaatcatcacatcgtgaggggttttccattcttctaactctgttacaagagc

SEQ ID NO: 647272 - DNA, 75 bp, synthetic construct
  source 1..75: mol_type = other DNA
gggtgtccatgcttctgtctctgttacgagagcagggcgaatgtcctcactcgacattgaacgacactgagcaat

SEQ ID NO: 647273 - DNA, 75 bp, synthetic construct
  source 1..75: mol_type = other DNA
ggtaattatgtagatgaacctatacgtacatggccaaatcctgatccgcttggaggtgctgatttaatttcctct

SEQ ID NO: 647274 - DNA, 75 bp, synthetic construct
  source 1..75: mol_type = other DNA
ctagtaagaaatttaacaaccagtaaacattatttagaatccaaactttcagagtaccctggaagcttgggtact

SEQ ID NO: 647275 - DNA, 75 bp, synthetic construct
  source 1..75: mol_type = other DNA
tgagaccttatatgatagtgatgataggtttactctgattttccaaacattcttggttcctggggtgaggtggag

SEQ ID NO: 647276 - DNA, 75 bp, synthetic construct
  source 1..75: mol_type = other DNA
cggctgatggtaccgaaacccgctacctgcctgagggcacgctggtgctggggaatacggcggctgatgggatcc

SEQ ID NO: 647277 - DNA, 75 bp, synthetic construct
  source 1..75: mol_type = other DNA
gctggtcgatcatagtcagttcaaagttatcaatggcgacaacgttcgtcagcaatatattgttgatgttaaagg

SEQ ID NO: 647278 - DNA, 75 bp, synthetic construct
  source 1..75: mol_type = other DNA
ctctgaccagctggtgattaatggtggtcaggcaaccggcaaaacctggcttgcgtttacaaatgtcggaaacag

SEQ ID NO: 647279 - DNA, 75 bp, synthetic construct
  source 1..75: mol_type = other DNA
caactcgaaacggcagtgaaagatctgggcgcagtggtgtccttcaaggggtattacggcgatctggccattgtg

SEQ ID NO: 647280 - DNA, 75 bp, synthetic construct
  source 1..75: mol_type = other DNA
cgccagcgagctgaaaattgcctgctttggtctggcgtttaaaccgaatattgatgatctgcgcgaaagtccggc

SEQ ID NO: 647281 - DNA, 75 bp, synthetic construct
  source 1..75: mol_type = other DNA
cgaaacgctggttgttgagcctaacatccaccagttgccgaaaaaactgaccgggctttgtactctggcgcagct

SEQ ID NO: 647282 - DNA, 75 bp, synthetic construct
  source 1..75: mol_type = other DNA
gttgtggcgaaaacgtcttatgtggcagaggacggtaccgaaaaacgttatctgcctgagagcacgctggtcctg

SEQ ID NO: 647283 - DNA, 75 bp, synthetic construct
  source 1..75: mol_type = other DNA
taaattccgtgcgctgtttctggagctgtttttccgccgtacggtgaatttccacaccgaagaggtgatgctgga

SEQ ID NO: 647284 - DNA, 75 bp, synthetic construct
  source 1..75: mol_type = other DNA
cgtctggcgtctgctgaatggctttaaattgttccgcgaaaaactggatacccgtcgcggctctaattcgcaact

SEQ ID NO: 647285 - DNA, 75 bp, synthetic construct
  source 1..75: mol_type = other DNA
cgtgaatttaccatgacgcagtccgcaccgctgatggtgctgccggatccggatgagtttgtggtggtgcaggtg

SEQ ID NO: 647286 - DNA, 75 bp, synthetic construct
  source 1..75: mol_type = other DNA
ccatgctgacacaggcaatggactatgaccggattctggcaggctcccgcagccatcagaccggtgtaaacggtg

SEQ ID NO: 647287 - DNA, 75 bp, synthetic construct
  source 1..75: mol_type = other DNA
agggtattacggcgatctggccattgtggtggcgaaaacgtcttatgtggcagaagatggtactgaaaaacgtta

SEQ ID NO: 647288 - DNA, 75 bp, synthetic construct
  source 1..75: mol_type = other DNA
tttccgtctgggcagccacaacgatatgacctttggtgaaggcacctcatcccgtgcccccctgcgtgacagtgc

SEQ ID NO: 647289 - DNA, 75 bp, synthetic construct
  source 1..75: mol_type = other DNA
tgaaaccgctttgcgttgtggacgctattcttgcgaaacagaatttgggtacgcgtgcagatatggctccggtga

SEQ ID NO: 647290 - DNA, 75 bp, synthetic construct
  source 1..75: mol_type = other DNA
aatgtcagtattcatcagcgtacatgggatgcggccacgtttggtgttgatcggcgcaggacatgttaaccgggc

SEQ ID NO: 647291 - DNA, 75 bp, synthetic construct
  source 1..75: mol_type = other DNA
ggaatggttgagcgtaaagtgattgaagagtcgctacaggcattgcaggaacgtaagccgcgattattccatggg

SEQ ID NO: 647292 - DNA, 75 bp, synthetic construct
  source 1..75: mol_type = other DNA
tcacaactcgaaacggcagtgaaagatctgggcgcagtggtgtccttcaaggggtattacggcgatctggccatt

SEQ ID NO: 647293 - DNA, 75 bp, synthetic construct
  source 1..75: mol_type = other DNA
cggtgaaatgacagttgaaggcgttacagcccgtctggctcagacctccgtggaagcaatgacgttgactgaacg

SEQ ID NO: 647294 - DNA, 75 bp, synthetic construct
  source 1..75: mol_type = other DNA
atgaaaggaactgatttatgggattgtttacgacccgccagttactcggttataccgaacaaaaagttaaattac

SEQ ID NO: 647295 - DNA, 75 bp, synthetic construct
  source 1..75: mol_type = other DNA
ccgtgctgtatggcaagtacaccatggaaggggagcagttcgagaaaattgaggtcgatttcggcagatcaacga

SEQ ID NO: 647296 - DNA, 75 bp, synthetic construct
  source 1..75: mol_type = other DNA
gggtattatgcgctcgaatgtgaaattaggcgatctggtagaagagggtgatgttattgcctgtgttggcgatca

SEQ ID NO: 647297 - DNA, 75 bp, synthetic construct
  source 1..75: mol_type = other DNA
gtgcagcagtggaagcactggatattcgccctgattgccacgaataatcaggatcgtgaagccctcgacaaactc

SEQ ID NO: 647298 - DNA, 75 bp, synthetic construct
  source 1..75: mol_type = other DNA
ggtatgcgtccacgtctggtgttgattggcgcggggcatgtcaaccgggcgatagcccagagtgcggcgctatta

SEQ ID NO: 647299 - DNA, 75 bp, synthetic construct
  source 1..75: mol_type = other DNA
cacctggcaggagggaatgtcactaacagtggcagtaccctgatggcgcagaataatctcaccatcgacagcgct

SEQ ID NO: 647300 - DNA, 75 bp, synthetic construct
  source 1..75: mol_type = other DNA
tagttcagcgtgtgccagcgcaagactgaaagttattgcgtcgaaagaagggtacgaagatggcccttataactc

SEQ ID NO: 647301 - DNA, 75 bp, synthetic construct
  source 1..75: mol_type = other DNA
ctgaagtgattaatacttccgggaatatcgaaaccacccgcggtgatatcaccatcagaaccggacatttactga

SEQ ID NO: 647302 - DNA, 75 bp, synthetic construct
  source 1..75: mol_type = other DNA
ggagcctggaagcagatggaaaatacttgggcaaaagcattgggtgaaggaaaagaggttaaggtcaacattcag

SEQ ID NO: 647303 - DNA, 75 bp, synthetic construct
  source 1..75: mol_type = other DNA
ttgcgtcctgctcgactaaccctggcggggctgaatgtaaacgcggtgaggctgtaaacaaagcgattgcagcag

SEQ ID NO: 647304 - DNA, 75 bp, synthetic construct
  source 1..75: mol_type = other DNA
gcaatgatctcagtctgaatgccattgacagggtaagcagcagtcgtcatgcaaacagtgaatctcaccagcgca

SEQ ID NO: 647305 - DNA, 75 bp, synthetic construct
  source 1..75: mol_type = other DNA
tttccatctgtagcagctaacgttgcagattctgcagtttctggtctttccaattatgctacgaatggtaaaaat

SEQ ID NO: 647306 - DNA, 75 bp, synthetic construct
  source 1..75: mol_type = other DNA
caaagttccttttgagaaagtgcttaatccagtgtcaaagcagtatgaatggatacctacaggtgtatggacaat

SEQ ID NO: 647307 - DNA, 75 bp, synthetic construct
  source 1..75: mol_type = other DNA
caatataacccaaggtgatcgtctgctgtctgttatcactgatccaacttcatggccggttgccgtgatgggcgg

SEQ ID NO: 647308 - DNA, 75 bp, synthetic construct
  source 1..75: mol_type = other DNA
cgctgcaaacacacaaaaaacaacgggcaggaacagcagcagtggcggtggcgtgggtgtcagtatcggtgccgg

SEQ ID NO: 647309 - DNA, 75 bp, synthetic construct
  source 1..75: mol_type = other DNA
gctgacgttcaccacgccggactacagtggcagtggctggctacaggccactgacctgatgctgaacgtggcgaa

SEQ ID NO: 647310 - DNA, 75 bp, synthetic construct
  source 1..75: mol_type = other DNA
tcagggcaacggtaaaaccacgctcagcgcggcaacgcaggcccacaacagcggcaaaattctttccggcggtga

SEQ ID NO: 647311 - DNA, 75 bp, synthetic construct
  source 1..75: mol_type = other DNA
agcttaaagatcgttcagtagttggcgatggattagagcacgatcatatcccatcatttgctgctattcgtcagg

SEQ ID NO: 647312 - DNA, 75 bp, synthetic construct
  source 1..75: mol_type = other DNA
tcgtatgctggaagcgcagggcttccgtgtcgggatcatcgcccagccagactggagcagcaaagacgactttat

SEQ ID NO: 647313 - DNA, 75 bp, synthetic construct
  source 1..75: mol_type = other DNA
agacgcctgccggagcaaagaaagcgccgtctgcgcaacctcgcccgatgaatgccggtgcgaagaaacgtccta

SEQ ID NO: 647314 - DNA, 75 bp, synthetic construct
  source 1..75: mol_type = other DNA
ggtttatacccagcgttgtaaggaagcatggaaagatgtaccggtgatcctcggtggtatcgaggccagcctgcg

SEQ ID NO: 647315 - DNA, 75 bp, synthetic construct
  source 1..75: mol_type = other DNA
tttcctacgggaaacgaccattgggccacgcgctgataacgggtatgtcgggggaaggtaaaaccacactgctta

SEQ ID NO: 647316 - DNA, 75 bp, synthetic construct
  source 1..75: mol_type = other DNA
agcttggcatttattatcgtgataagcgcggtaatgagatccccgcgcctgataaaaaagaggtcgaagaactgg

SEQ ID NO: 647317 - DNA, 75 bp, synthetic construct
  source 1..75: mol_type = other DNA
gtaggaacagccatatttctgtcctctactgcttctgactatatcaatggacaagttatttatgtcgatggtggt

SEQ ID NO: 647318 - DNA, 75 bp, synthetic construct
  source 1..75: mol_type = other DNA
gaaataaagtttatcagagaaacgatctttttgacccctataaggtatcatcatggaaagataaaggtaaaacag

SEQ ID NO: 647319 - DNA, 75 bp, synthetic construct
  source 1..75: mol_type = other DNA
atgacgtatggcgaaactgaagcgatgaaagcagcctggaaagagcatccaggcatgagcgatgcacagttgcgg

SEQ ID NO: 647320 - DNA, 75 bp, synthetic construct
  source 1..75: mol_type = other DNA
ctatataacaatgcaacagctattgaagtacctaaagatgtacatcaggcaggccctacttatggtggtaaaaat

SEQ ID NO: 647321 - DNA, 75 bp, synthetic construct
  source 1..75: mol_type = other DNA
ttggttataagagtgaagacgtcttcgtaccgaagggcgacaaacagcgtcgtttgcataaagcgttgttgcgtt

SEQ ID NO: 647322 - DNA, 75 bp, synthetic construct
  source 1..75: mol_type = other DNA
caatacccgtccggcgttgacgaaacatacgccgatggcgacccagcgtcagacgcctgctacggcaaaaaagcg

SEQ ID NO: 647323 - DNA, 75 bp, synthetic construct
  source 1..75: mol_type = other DNA
cgatgggcgagccaattagcgaaatccgcgatgtgcgtaataccgcgattatcgtgaaagaggcgctgcctggct

SEQ ID NO: 647324 - DNA, 75 bp, synthetic construct
  source 1..75: mol_type = other DNA
cacaattcagaaactcccacagccggacctccggcactgtaaccctttacctgccggtatccacgtttgtgggta

SEQ ID NO: 647325 - DNA, 75 bp, synthetic construct
  source 1..75: mol_type = other DNA
tatggtgttaccacattctggctatggcattgccatgtataacagcgcaggcgcaatggtgtatcacggtgagat

SEQ ID NO: 647326 - DNA, 75 bp, synthetic construct
  source 1..75: mol_type = other DNA
ggaaaacgccaacggcagcattgcaccgatatttgacagggagaaagagcagaagcgtctgcaggaagcgcaggt

SEQ ID NO: 647327 - DNA, 75 bp, synthetic construct
  source 1..75: mol_type = other DNA
accggtatgtccggcagcagtggacatgctgaaggtaccacgtcatccgccatcagcggcggaaatctcattatc

SEQ ID NO: 647328 - DNA, 75 bp, synthetic construct
  source 1..75: mol_type = other DNA
tatgcttgacaactgccactctgctagtaaattaagagtgctggcctcaactgatacagagaatatgggcggtgg

SEQ ID NO: 647329 - DNA, 75 bp, synthetic construct
  source 1..75: mol_type = other DNA
ctccaggcgaaaagcgggcgggaagtgacgatgggtgagtttaccgcctccttaaccgcaacgtttgagtacata

SEQ ID NO: 647330 - DNA, 75 bp, synthetic construct
  source 1..75: mol_type = other DNA
gagatgatttatcatggcgagatgatgccgcttgatgcaaaactggttaatgttgatgtccagttttcaattaac

SEQ ID NO: 647331 - DNA, 75 bp, synthetic construct
  source 1..75: mol_type = other DNA
agcgtggatgtgcagaacgcacagcttgacggaacacaggctgccagagacatccttaccctgaacgccagtgaa

SEQ ID NO: 647332 - DNA, 75 bp, synthetic construct
  source 1..75: mol_type = other DNA
gtaacctcatgctggacagcgcgtcttccacactggcgggtgaaaccagtgcgggtggcacggtgtctgtaaaag

SEQ ID NO: 647333 - DNA, 75 bp, synthetic construct
  source 1..75: mol_type = other DNA
cctgaaccagacttccgggaccgtgaatgcagctgaaaatgtcaccttgaccaccaccgatgataccacactgaa

SEQ ID NO: 647334 - DNA, 75 bp, synthetic construct
  source 1..75: mol_type = other DNA
gacgaaaaatttgagcagaagaaaagcgggctgacggttgccctgtccggtgcggtgggtagtgccatcaataat

SEQ ID NO: 647335 - DNA, 75 bp, synthetic construct
  source 1..75: mol_type = other DNA
gaacagaggttgccggtatgtctctgacgacaggggtgtatggtgctgcaggccattcttccgttgatgttaagg

SEQ ID NO: 647336 - DNA, 75 bp, synthetic construct
  source 1..75: mol_type = other DNA
ctgaggataaattactatcacatggatttaaattaaataaagaaaaaaagcgaatatcttcatataatagccgtc

SEQ ID NO: 647337 - DNA, 75 bp, synthetic construct
  source 1..75: mol_type = other DNA
cgcccgccatgtttccattaataccttctcgcagatgacgctgcacagcatgcagcgcggcaaaattatgacctg

SEQ ID NO: 647338 - DNA, 75 bp, synthetic construct
  source 1..75: mol_type = other DNA
ttgcgcaccttcggtgaactgactttcagccagcttgccgggctggacaggctgccgctttatctctgcggcgag

SEQ ID NO: 647339 - DNA, 75 bp, synthetic construct
  source 1..75: mol_type = other DNA
gaggccttcagcttcctgaccgcccgcacgcagctaaaaattgacgctgaattcccccgtttcacccagcgcctg

SEQ ID NO: 647340 - DNA, 75 bp, synthetic construct
  source 1..75: mol_type = other DNA
ggccaataccggcgggcaatgggtacaggatggcggaacagccaacaaaacgactgtcaccagtggtggtcttca

SEQ ID NO: 647341 - DNA, 75 bp, synthetic construct
  source 1..75: mol_type = other DNA
cacgccatcctgacttccctgcatgctgctggtcttaacgctaatgactacggggcatattcccgagcatgggct

SEQ ID NO: 647342 - DNA, 75 bp, synthetic construct
  source 1..75: mol_type = other DNA
gccataacctgttgcatgaatatttcgcctgcccggagcgattttattttttcacaccaacgggactgtctgccg

SEQ ID NO: 647343 - DNA, 75 bp, synthetic construct
  source 1..75: mol_type = other DNA
agtttatctttcgacgcgatgaatcagttaatccagagctaaaagaggtcgtgaattttaaattgctttgcatgc

SEQ ID NO: 647344 - DNA, 75 bp, synthetic construct
  source 1..75: mol_type = other DNA
gggaacgctggccggattaatcacgcctcctcgcctgatacggatgttggaacagacggctcttgaacacaacat

SEQ ID NO: 647345 - DNA, 75 bp, synthetic construct
  source 1..75: mol_type = other DNA
gtagagcttcccctatttttagagtctgccaagtgtggaaatagcaaaatatccagttatccgatacctttttac

SEQ ID NO: 647346 - DNA, 75 bp, synthetic construct
  source 1..75: mol_type = other DNA
gaagctttcagcttcctgaccgcccgcacgcagcttaaaattgacgctgaatttccccgcttcacccagcgtttg

SEQ ID NO: 647347 - DNA, 75 bp, synthetic construct
  source 1..75: mol_type = other DNA
aacttctacataccagcgccatcgcgcccctggctggcattccggggcattttgacggcgcgctggatgtgaatc

SEQ ID NO: 647348 - DNA, 75 bp, synthetic construct
  source 1..75: mol_type = other DNA
acaaccgcgaattgagctacctgcgggaaacgggagccgaatttgccgcccgtcatcccaaaatcgccgcccgtc

SEQ ID NO: 647349 - DNA, 75 bp, synthetic construct
  source 1..75: mol_type = other DNA
gagatgccaataggcactgaggcttggcgcatcatgcaagcaaagcaacaactccagaaaaatataaacagtttg

SEQ ID NO: 647350 - DNA, 75 bp, synthetic construct
  source 1..75: mol_type = other DNA
aaccaggtgaaagggatccccctgaaactggtacgacagcgtgtccgggtgtttaaagccagtccgtcaggaaaa

SEQ ID NO: 647351 - DNA, 75 bp, synthetic construct
  source 1..75: mol_type = other DNA
cacaggcatttgaagatgcccgcgaccacatcattgctgcggaaatgccgaaacagctggggtatgcactgaaac

SEQ ID NO: 647352 - DNA, 75 bp, synthetic construct
  source 1..75: mol_type = other DNA
gcgataaaccgtgtagcgcagaaagcggtctcggtagctacccggcaggttgcgcagaataccgttgcgggtgac

SEQ ID NO: 647353 - DNA, 75 bp, synthetic construct
  source 1..75: mol_type = other DNA
ggggaccgcccgggtcagactgacccggcgtggtggaaaactgcagtaccgtggcagcgtgctgaaggtgggtaa

SEQ ID NO: 647354 - DNA, 75 bp, synthetic construct
  source 1..75: mol_type = other DNA
gaaggactgagagtgggaaaatactttttccggggggcatttgttcagcaactggcgaatggccgctggcatgtt

SEQ ID NO: 647355 - DNA, 75 bp, synthetic construct
  source 1..75: mol_type = other DNA
atgaaaggccttgaaaacgccatccgcaatctgaacagccttgatactcgtatggtaccgcaggccagtgcatgg

SEQ ID NO: 647356 - DNA, 75 bp, synthetic construct
  source 1..75: mol_type = other DNA
cgaaaattcgggggcatatactttcgaaaccattgctcgtgaatggcatgccagcaacaagcgctggagtgaaga

SEQ ID NO: 647357 - DNA, 75 bp, synthetic construct
  source 1..75: mol_type = other DNA
ccatcgatcgcgtgttcttcgctatcttgagctttatatcttccctcatatcggttcgtccgacattcgccagct

SEQ ID NO: 647358 - DNA, 75 bp, synthetic construct
  source 1..75: mol_type = other DNA
tggattcaggactatggcgtgtagttcgttaattgagtctggattatggtcgagggatgctgtggagcggcagat

SEQ ID NO: 647359 - DNA, 75 bp, synthetic construct
  source 1..75: mol_type = other DNA
aattaagggtgtgcgttattcgtatcgtggtatgaagatgaaagaggagcatatcgttccgctgagtcgtcaggc

SEQ ID NO: 647360 - DNA, 75 bp, synthetic construct
  source 1..75: mol_type = other DNA
gctaagccactcggaacgtaacaatgtacgtgcagcttatattcatacttctgaacatttggatgagcgccggtt

SEQ ID NO: 647361 - DNA, 75 bp, synthetic construct
  source 1..75: mol_type = other DNA
actctaatccagccagcgatatggccggtgcgttatcgacaaccaaagcgcgacattaccccgccttaccctcta

SEQ ID NO: 647362 - DNA, 75 bp, synthetic construct
  source 1..75: mol_type = other DNA
tatgtgttttcagaagggttaattgaggctggatttgataacttcaccaataatgactggttagcttgtcttctg

SEQ ID NO: 647363 - DNA, 75 bp, synthetic construct
  source 1..75: mol_type = other DNA
atgaattcacctgtcgcggcatgttcagcgaccagcgccggacagaaatatcgctttttctcaattattatgaaa

SEQ ID NO: 647364 - DNA, 75 bp, synthetic construct
  source 1..75: mol_type = other DNA
tacggataacaacactgacgtatttgttctggtgattggtgaatctgcaaggactgataacatgtccatttacgg

SEQ ID NO: 647365 - DNA, 75 bp, synthetic construct
  source 1..75: mol_type = other DNA
attacagtaacgttatattcttcctttcagtttgcgttgaagaaacagtatcaaataaatgaagttgatccttac

SEQ ID NO: 647366 - DNA, 75 bp, synthetic construct
  source 1..75: mol_type = other DNA
tattacttattgctccagccacgctgcgtaagcagtggagtcaggaacttgaagagaaattttcgctaccttcac

SEQ ID NO: 647367 - DNA, 75 bp, synthetic construct
  source 1..75: mol_type = other DNA
aaattacgacgattacagcgatgaagaaggcattgatgacgaagataccatcgatcctcaggcgctacaggccga

SEQ ID NO: 647368 - DNA, 75 bp, synthetic construct
  source 1..75: mol_type = other DNA
ttacccgacgccattcaataaccgaagactttcgtccgacggaagacgaagaagtgctctataaacaggtttcct

SEQ ID NO: 647369 - DNA, 75 bp, synthetic construct
  source 1..75: mol_type = other DNA
taaataataaagatttcgatgttgaagcgatcgcatcgggtctgacattgcttgcagtacaggcacaggagaaat

SEQ ID NO: 647370 - DNA, 75 bp, synthetic construct
  source 1..75: mol_type = other DNA
gataaatatgcctttttccgcgccgtaaataataaagatttcgatgttgaagcgatcgcatcgggtctgacattg

SEQ ID NO: 647371 - DNA, 75 bp, synthetic construct
  source 1..75: mol_type = other DNA
taatgactggttagcttgtcttctgcgttgggccgatatgcagccctacgcaaattataaaggccccacaacaga

SEQ ID NO: 647372 - DNA, 75 bp, synthetic construct
  source 1..75: mol_type = other DNA
aataaaacccagccagcaggcttatcatgttccgatgtttatctggtacagcccggcactgggagagcatgtcga

SEQ ID NO: 647373 - DNA, 75 bp, synthetic construct
  source 1..75: mol_type = other DNA
attacagtagcgttatattcttcctttcagtttgcgttgaaaaaacagcatcaaataaatgaagtcgatccttac

SEQ ID NO: 647374 - DNA, 75 bp, synthetic construct
  source 1..75: mol_type = other DNA
cggcgtcaatggcgtaccgcaggccgacggttcggtgatgtcgctggcgaatgccgcatggatttgggtgccatt

SEQ ID NO: 647375 - DNA, 75 bp, synthetic construct
  source 1..75: mol_type = other DNA
gctgtgcagagtgggttaatcgactacaaccccgcgcaagagattgccggtgcggttgctacagcgaaaagacag

SEQ ID NO: 647376 - DNA, 75 bp, synthetic construct
  source 1..75: mol_type = other DNA
agcaaagcgtgacgaggctaaaaagctcttagtgcagggcattgacccaaaagccgagcagaaagaagctcaggc

SEQ ID NO: 647377 - DNA, 75 bp, synthetic construct
  source 1..75: mol_type = other DNA
tggggctctatcgacaaccaaagcgcgacattacccagctttaccctctagccggttccctgagtttcttgcacg

SEQ ID NO: 647378 - DNA, 75 bp, synthetic construct
  source 1..75: mol_type = other DNA
cagattagtggtgataggaaactgcttttccctggcgatcatgacgcaactaaggttatgagtgaaaacacagta

SEQ ID NO: 647379 - DNA, 75 bp, synthetic construct
  source 1..75: mol_type = other DNA
aaggctgttgaagcttccgggcgattggaagttgcttcccgattacagcaaagaacaacggcagtaatgagatat

SEQ ID NO: 647380 - DNA, 75 bp, synthetic construct
  source 1..75: mol_type = other DNA
aataatgcattgcgtgcgatgggctatgatacgaaaacagaagtttgcggacatggttttaggacaatggcacgt

SEQ ID NO: 647381 - DNA, 75 bp, synthetic construct
  source 1..75: mol_type = other DNA
agcatgatgtggcgcagcgtcttcagcaacgtgttactgctattatgcgctatgccgtacagaacgattatatag

SEQ ID NO: 647382 - DNA, 75 bp, synthetic construct
  source 1..75: mol_type = other DNA
gcatggatttaggacgatggcgcgtggagcgctcggtgagtcagggttatggagtgatgacgcgatagaacgaca

SEQ ID NO: 647383 - DNA, 75 bp, synthetic construct
  source 1..75: mol_type = other DNA
ccttactaacttttgtgcgttccagtgagttacgtttcgcgcgttgggatgaattcgacttcgataaatctcttt

SEQ ID NO: 647384 - DNA, 75 bp, synthetic construct
  source 1..75: mol_type = other DNA
ctactgtgacgctagctcaggcaagagtaaagcgcgatgaggctaaaaagctactagtgcagggcattgacccaa

SEQ ID NO: 647385 - DNA, 75 bp, synthetic construct
  source 1..75: mol_type = other DNA
caaaaccagccacctgttagccccaattaaaaaagttgacgccagtggaaaacacgacgtcgctcagcgcctgca

SEQ ID NO: 647386 - DNA, 75 bp, synthetic construct
  source 1..75: mol_type = other DNA
cagtaacatgacgttctcaccgtcccggaatggcacgtcactggacctgcaggccggactggaagcccgtatccg

SEQ ID NO: 647387 - DNA, 75 bp, synthetic construct
  source 1..75: mol_type = other DNA
cctgggcgttcaggccggttatgcccacagcatcaacggcagcagcgctgaaggttataacagtcaggccacact

SEQ ID NO: 647388 - DNA, 75 bp, synthetic construct
  source 1..75: mol_type = other DNA
gccggcggtggtgaaggacagaccgcgatcaaaatggctgagcgcggacatcaggtcattttatgcgatctctcg

SEQ ID NO: 647389 - DNA, 75 bp, synthetic construct
  source 1..75: mol_type = other DNA
atgaagctcaacgccagactggtcgagaccgcaaagccaaaagacaaaacctacaaaatggccgatggtggcggt

SEQ ID NO: 647390 - DNA, 75 bp, synthetic construct
  source 1..75: mol_type = other DNA
tatgccgtgcagaacgattacatcgactcaaatccagccagtgatatggccggtgcgttatcgacaaccaaagcg

SEQ ID NO: 647391 - DNA, 75 bp, synthetic construct
  source 1..75: mol_type = other DNA
cggtgcgttatctacggcgaaaacgcggcactacccggcgctaccatcacatcgtttccatgagttcttggcacg

SEQ ID NO: 647392 - DNA, 75 bp, synthetic construct
  source 1..75: mol_type = other DNA
gtaagcggaacattacggagcttaagactcgggatcttcttgtacccatcaaagcggtggaatcatccgggcgtc

SEQ ID NO: 647393 - DNA, 75 bp, synthetic construct
  source 1..75: mol_type = other DNA
tcatgggtttagaactatggcgcgtggtgcgctaagtgagtcgaaactatggaatgatgatgccattgaaagaca

SEQ ID NO: 647394 - DNA, 75 bp, synthetic construct
  source 1..75: mol_type = other DNA
gatgattttgttagagcaacttaagcagattagtggtgataaagagttactttttccgggggatcatgacgcaac

SEQ ID NO: 647395 - DNA, 75 bp, synthetic construct
  source 1..75: mol_type = other DNA
ggcggcaaggtgattgccagtacacaaccagcacaaacaacggtgtatctggagcagccagaagccatcgattac

SEQ ID NO: 647396 - DNA, 75 bp, synthetic construct
  source 1..75: mol_type = other DNA
ttccgcattttgaatttacccgtgaatacggcgtggagtcgctgcataaaaccttcgccctggcgcaaaaatacg

SEQ ID NO: 647397 - DNA, 75 bp, synthetic construct
  source 1..75: mol_type = other DNA
cggtagccttgttggtgcaggcgcggcaagttgctatttttggcattggcgcttcgggtattctggcggattata

SEQ ID NO: 647398 - DNA, 75 bp, synthetic construct
  source 1..75: mol_type = other DNA
tggcgcaccgtgaaggcatgggcgcgcgagtcaccgccagccacaccacggcaatgcactcctataacggggcgt

SEQ ID NO: 647399 - DNA, 75 bp, synthetic construct
  source 1..75: mol_type = other DNA
gggctacgggcagattaacgacggcctgaatttaatcacccaccacagcgccaggacgttgaatttgcaggatta

SEQ ID NO: 647400 - DNA, 75 bp, synthetic construct
  source 1..75: mol_type = other DNA
accgtctcatcgacgttcactgtgatgagatcgatgatgagcagtcgcgctttgtcgaaaccgttgccgccctgg

SEQ ID NO: 647401 - DNA, 75 bp, synthetic construct
  source 1..75: mol_type = other DNA
tgatcatcaaatggttcgactggctgtatgagctgggcaaccgcgagcctaatcgctataaggctgcgatattgc

SEQ ID NO: 647402 - DNA, 75 bp, synthetic construct
  source 1..75: mol_type = other DNA
atggtggcaggtgaggccattattataagtatcacgggggggttttttgttcggactgtgcatggcctctttcca

SEQ ID NO: 647403 - DNA, 75 bp, synthetic construct
  source 1..75: mol_type = other DNA
gtgacctttgagcagaaaaaagcccgggccattgccctgatggacagcaaaaagatgtggcggagcaattatgcc

SEQ ID NO: 647404 - DNA, 75 bp, synthetic construct
  source 1..75: mol_type = other DNA
tgatcattaagtggttcgactggctgtatgagctgggcaaccgcgaaaccaatcgttataaggccgcgatattgc

SEQ ID NO: 647405 - DNA, 75 bp, synthetic construct
  source 1..75: mol_type = other DNA
tgtttgttgtctggctgctctgtacgctgtttatcgccacgctgacctggtttgagtttcgccgcgtgcggttta

SEQ ID NO: 647406 - DNA, 75 bp, synthetic construct
  source 1..75: mol_type = other DNA
acaacggctttttgctgttccggcttaactcctacagtcagatcttctccagtgaagtctccggcgtggcgttaa

SEQ ID NO: 647407 - DNA, 75 bp, synthetic construct
  source 1..75: mol_type = other DNA
atgccgtataaaacaaaaagcgatctgccagaaaatgtaaaacgcgttctaccgtctcatgcccaggatatctat

SEQ ID NO: 647408 - DNA, 75 bp, synthetic construct
  source 1..75: mol_type = other DNA
gcgaaggaaaaagaagggcgcattgatattctggtgaataacgcaggtgtttgccgtctgggtagttttcttgaa

SEQ ID NO: 647409 - DNA, 75 bp, synthetic construct
  source 1..75: mol_type = other DNA
atgggtaaactcacgggcaagacagcactgattacgggcgcattgcagggaattggcgaaggaattgccagaact

SEQ ID NO: 647410 - DNA, 75 bp, synthetic construct
  source 1..75: mol_type = other DNA
ccggtaagaagacgccacagcaggcgctggataccgccgttgagcgtgggaatcagttactacgccgctttgaga

SEQ ID NO: 647411 - DNA, 75 bp, synthetic construct
  source 1..75: mol_type = other DNA
caaagccggatagcttctacgatgcgggttataacgaaggtattcaggactgtcgtaaacatctgacggcatcag

SEQ ID NO: 647412 - DNA, 75 bp, synthetic construct
  source 1..75: mol_type = other DNA
ttggcgggatggggctggcacaaggctacctgaacgacgcagagaaaacggcggcgagctttgtctggcgcgaag

SEQ ID NO: 647413 - DNA, 75 bp, synthetic construct
  source 1..75: mol_type = other DNA
cggcattattcgcggttggatttcactgtggatgctggcagcggcaggcgtgctggggattgtcggtatgttctg

SEQ ID NO: 647414 - DNA, 75 bp, synthetic construct
  source 1..75: mol_type = other DNA
gttcatgcttactacgatattttgagcgaagccggatgtgaggtcgatatctggcgaaccacttactatcaccag

SEQ ID NO: 647415 - DNA, 75 bp, synthetic construct
  source 1..75: mol_type = other DNA
gaagagcagtatccactgcaggaggatggtcaaatactgctggcatttccgcgcttgttcattgttgcccggcga

SEQ ID NO: 647416 - DNA, 75 bp, synthetic construct
  source 1..75: mol_type = other DNA
acacgactggatcgcctcatttaaacaagccttcagcgaagggcaaacagtcgtcgtgcctgccggattggtttg

SEQ ID NO: 647417 - DNA, 75 bp, synthetic construct
  source 1..75: mol_type = other DNA
atgacgattgcagaacgtcttatacagaaaggtttcgacgaaggttttaaagaaggttttaagaaaggtgcgctt

SEQ ID NO: 647418 - DNA, 75 bp, synthetic construct
  source 1..75: mol_type = other DNA
agaaaggtttcgacgagggttttaaagaaggttttaaacaaggagctcttgaagtggcgcgggaaatagcctgcc

SEQ ID NO: 647419 - DNA, 75 bp, synthetic construct
  source 1..75: mol_type = other DNA
tggatatggttaatagcgcgggcatgctaattggctatggtgttatcaaagggaaatatctgtcgataccgcaga

SEQ ID NO: 647420 - DNA, 75 bp, synthetic construct
  source 1..75: mol_type = other DNA
atgtactgggggccgtcaggaatggtagcaggtgaggccattattataagtatcacgagtggttttttgttcgga

SEQ ID NO: 647421 - DNA, 75 bp, synthetic construct
  source 1..75: mol_type = other DNA
tgcaagcctgatgattgcaaaactactgtactggctttttgatagcgccggactcattcataaacgaataaaatc

SEQ ID NO: 647422 - DNA, 75 bp, synthetic construct
  source 1..75: mol_type = other DNA
tactggctttttgaaagcgccggactcattcataaacgaacaaaatcatcgctccggacgcaggttgaaggataa

SEQ ID NO: 647423 - DNA, 75 bp, synthetic construct
  source 1..75: mol_type = other DNA
aaagatgtggcggagtaattatgcccctcctcttctgcgtattctctggcggctgggtatccggcttccgccatt

SEQ ID NO: 647424 - DNA, 75 bp, synthetic construct
  source 1..75: mol_type = other DNA
gggcaaatgccctgatggacagcaaaaagatgtggcggagtaattatgctcctcctctgctgcgtattctctggc

SEQ ID NO: 647425 - DNA, 75 bp, synthetic construct
  source 1..75: mol_type = other DNA
ggactgctcatggcctctttccactggtggcgcaggaaagttaaccgactgccaccatgggatgatgtgtaaacc

SEQ ID NO: 647426 - DNA, 75 bp, synthetic construct
  source 1..75: mol_type = other DNA
atggagcaacaggctgatgagttatatagcattctgggagcgcttctgcacaaggatgaggctaaggtgggtcaa

SEQ ID NO: 647427 - DNA, 75 bp, synthetic construct
  source 1..75: mol_type = other DNA
ctcagcaaggttttagtaatgacgtggtttgttggattactggcatgaatgagacttacactagggtccgtggcg

SEQ ID NO: 647428 - DNA, 75 bp, synthetic construct
  source 1..75: mol_type = other DNA
tcagcaatgctattgttctgcttggcgttttggttgccattggaaccattatctacaatgtgcgtaccgcaaaaa

SEQ ID NO: 647429 - DNA, 75 bp, synthetic construct
  source 1..75: mol_type = other DNA
gcgtctttggggcaagttttggttctgcggaagtggcgataaacgttgaaggtgccgccgttgagagagaaatga

SEQ ID NO: 647430 - DNA, 75 bp, synthetic construct
  source 1..75: mol_type = other DNA
taatattaagaaaaaagatagcttggtgcttttggggataacattatcgataataccgacctttagattgatttt

SEQ ID NO: 647431 - DNA, 75 bp, synthetic construct
  source 1..75: mol_type = other DNA
tatcgaaatgcaattgtattctcagattcatgaaaccaaaattcatgagggtatttgccagataatccagattca

SEQ ID NO: 647432 - DNA, 75 bp, synthetic construct
  source 1..75: mol_type = other DNA
ggtctggctttaaacgtagaacaaactcagcaaggctttagtgatgacgtggtttgttggattactggaatgaat

SEQ ID NO: 647433 - DNA, 75 bp, synthetic construct
  source 1..75: mol_type = other DNA
aagaaggcattgatgacgaagacaccatcgatcctcaggcactacaggccgaaattgaacagttaaaaagttaca

SEQ ID NO: 647434 - DNA, 75 bp, synthetic construct
  source 1..75: mol_type = other DNA
gcgtaagcagtggagccaggaacttgaagagaagttttcactaccttcgcgcattatcgaagcaagaagtttcaa

SEQ ID NO: 647435 - DNA, 75 bp, synthetic construct
  source 1..75: mol_type = other DNA
cgtggagcaacgtatcgggcgtgttcaccgctatggacaaaaacacgatgtcgtggtggttaattttattaataa

SEQ ID NO: 647436 - DNA, 75 bp, synthetic construct
  source 1..75: mol_type = other DNA
gcaggcgctggtgttgggatggcgctgacggcctttggcgttccggcaactgtgcatattttgttggcggcactg

SEQ ID NO: 647437 - DNA, 75 bp, synthetic construct
  source 1..75: mol_type = other DNA
ttcagttctgctctctgttaatcaattatgacttaccttggaacccgcagcgggttgagcaacgtatcggacgtg

SEQ ID NO: 647438 - DNA, 75 bp, synthetic construct
  source 1..75: mol_type = other DNA
gctcgtcagcttccttctctgaaagagaaaatggaagccaaacgtgcattaaaggtactggaacgcgagcgggat

SEQ ID NO: 647439 - DNA, 75 bp, synthetic construct
  source 1..75: mol_type = other DNA
gctaatgtcttattatgttttttcgaataacatttatgtgtggcgcagtattatctgcttatattttctcgtatt

SEQ ID NO: 647440 - DNA, 75 bp, synthetic construct
  source 1..75: mol_type = other DNA
gattgaagaatatcttggagagctttgctgattttgatgaggtaattaagcctttatcggatcaagttcttgccg

SEQ ID NO: 647441 - DNA, 75 bp, synthetic construct
  source 1..75: mol_type = other DNA
ggacagcttcatcaaggattataatacactgtatggcaccagctattcagctaatgattcgcaaagcttttacaa

SEQ ID NO: 647442 - DNA, 75 bp, synthetic construct
  source 1..75: mol_type = other DNA
atctttacttatgcagccaacgaagcggacaaaagtgataaggaaacggttaacggcttactagatgaagaagac

SEQ ID NO: 647443 - DNA, 75 bp, synthetic construct
  source 1..75: mol_type = other DNA
taaaggtattgccgcagcctccctcgcagccattcttgaagcccgtggcctcaatgtgaccatcatgaaactgga

SEQ ID NO: 647444 - DNA, 75 bp, synthetic construct
  source 1..75: mol_type = other DNA
atgggggcgctcttcctgttgagttactacaccgacgtcgctggcgtcggtgccgctgcggcgggtgtcacgaac

SEQ ID NO: 647445 - DNA, 75 bp, synthetic construct
  source 1..75: mol_type = other DNA
atggtcataactgaagcatccgacgacgtggtgtctaccagagtgtcagatatgcaggaaaatatgagttccgac

SEQ ID NO: 647446 - DNA, 75 bp, synthetic construct
  source 1..75: mol_type = other DNA
agctaaaaatggcagaacatactgaaaaaacgcataaaaaaaccggcattcaggttgccggtttgagtcgacttc

SEQ ID NO: 647447 - DNA, 75 bp, synthetic construct
  source 1..75: mol_type = other DNA
ttatattggatgagttatgcttccttatttgtgtcggggggggagttgtcggtatttatgagtcaagataatgaa

SEQ ID NO: 647448 - DNA, 75 bp, synthetic construct
  source 1..75: mol_type = other DNA
cagcaatgagatcgatatcgatgtggaagatatcgacaccaaagaggtcatggaaagcgatatccggctgggcaa

SEQ ID NO: 647449 - DNA, 75 bp, synthetic construct
  source 1..75: mol_type = other DNA
aaacaaaccactgaaatgctttttgataaatgcctgcacaagtatgtcattgttgatgccattcgtgatgagaat

SEQ ID NO: 647450 - DNA, 75 bp, synthetic construct
  source 1..75: mol_type = other DNA
atcttcacttatgccgccaatgaagcggacaaaagtgataaagaggcggtaaacggtctgctggatgaagaggat

SEQ ID NO: 647451 - DNA, 75 bp, synthetic construct
  source 1..75: mol_type = other DNA
aaaactctggaaaaaacagatgatcatatttggtcatcacttaaagatattgcgatcttaaaaacacagatcaaa

SEQ ID NO: 647452 - DNA, 75 bp, synthetic construct
  source 1..75: mol_type = other DNA
tctggcgtttttattgttgtgatcgcaaccgtccaaacgatttatggattcggacaaaagtcaggtaacgccatg

SEQ ID NO: 647453 - DNA, 75 bp, synthetic construct
  source 1..75: mol_type = other DNA
gcgccagccacgttaagttatgaaggtgaagcggcttgtgctctggaggcgctcgcagcctcatgccacggagtg

SEQ ID NO: 647454 - DNA, 75 bp, synthetic construct
  source 1..75: mol_type = other DNA
atggattgcttagatgtaaccaattggactgagctagatgttttcgcacaatatcctgttggtgctcgctctaag

SEQ ID NO: 647455 - DNA, 75 bp, synthetic construct
  source 1..75: mol_type = other DNA
cggacaaaagtcaggtaatgccatgagaaaatccgcagaatatttgcagctttttgatgatgcagaaaaatattc

SEQ ID NO: 647456 - DNA, 75 bp, synthetic construct
  source 1..75: mol_type = other DNA
atatttggtcatcacttaaagatattgcgatcttaaaaacacagatcaaaataggcgtctccatcgaacaacacg

SEQ ID NO: 647457 - DNA, 75 bp, synthetic construct
  source 1..75: mol_type = other DNA
atgaagaagatcgcaatgattgttgcaatgctgacggtctctgcatcaggttttgcagcatcaggagatgttatt

SEQ ID NO: 647458 - DNA, 75 bp, synthetic construct
  source 1..75: mol_type = other DNA
tgcggttgatcaagaccgtttcgatattcctgtacaggtagaagcattacgtgccagtggtacttccatgtcgtc

SEQ ID NO: 647459 - DNA, 75 bp, synthetic construct
  source 1..75: mol_type = other DNA
gtgccagtggtagttccatgaactctgctacatcaggtacactttcggctcagttcacatacactgcgacatatc

SEQ ID NO: 647460 - DNA, 75 bp, synthetic construct
  source 1..75: mol_type = other DNA
gcgccgctggcatcgtcgtgtggacgtttgttcgatgccgtagcggcggcgctgggctgtgcgccagccacgtta

SEQ ID NO: 647461 - DNA, 75 bp, synthetic construct
  source 1..75: mol_type = other DNA
gggaaatcaacagcctctccaacagggtagcattagccaaagattcgaaagaatctcaagaccttgcaaacagta

SEQ ID NO: 647462 - DNA, 75 bp, synthetic construct
  source 1..75: mol_type = other DNA
aaaatgcgcttgaggcggagcgtgttaaacagtggaatcaacaacaattaaatgctcccgatataaattttaact

SEQ ID NO: 647463 - DNA, 75 bp, synthetic construct
  source 1..75: mol_type = other DNA
tgacacaaaaccatacacctataaagagaaagtaattaattatattaagatagcattgaaaggtcatattttcac

SEQ ID NO: 647464 - DNA, 75 bp, synthetic construct
  source 1..75: mol_type = other DNA
cgtggttgacagaattgctgatttagaagctaaacagccatcgccagtagtaccggaaggactgattaaagcggt

SEQ ID NO: 647465 - DNA, 75 bp, synthetic construct
  source 1..75: mol_type = other DNA
agcagcggcagctatggcttcgtccgtctggagggtgacctgatgagaacagaggttgccggtatgtctctgacg

SEQ ID NO: 647466 - DNA, 75 bp, synthetic construct
  source 1..75: mol_type = other DNA
gtcactcctggcggggcgctggatccgcgcctgaccggtgccaaccgctggaccggtttaaaatacaatggttca

SEQ ID NO: 647467 - DNA, 75 bp, synthetic construct
  source 1..75: mol_type = other DNA
gtggcgagtggtcgctcgaatatggagagggccgatttgatggtgatgatgcgctaattcatcgcgaggctgctg

SEQ ID NO: 647468 - DNA, 75 bp, synthetic construct
  source 1..75: mol_type = other DNA
gggcagccacaacgatatgacctttggcgaaggcacctcatcccgtgacaccctgcgcggctgtgccaaacacag

SEQ ID NO: 647469 - DNA, 75 bp, synthetic construct
  source 1..75: mol_type = other DNA
cggcacaccggctttttttgtccatccggcagaagcactgcacggcgatctggggatgattgaaagccgcgatgt

SEQ ID NO: 647470 - DNA, 75 bp, synthetic construct
  source 1..75: mol_type = other DNA
tttgggaaaagcacgattgttataagcgacccaacgcttgcggataaatttgttggaagttcaaccgagtctgtc

SEQ ID NO: 647471 - DNA, 75 bp, synthetic construct
  source 1..75: mol_type = other DNA
cccgcaggccagacgctgaccattaccgtcaaactgctgatgcaagacgatcgcttcggcagttttgagtgcagc

SEQ ID NO: 647472 - DNA, 75 bp, synthetic construct
  source 1..75: mol_type = other DNA
cgttcagggttttactcacgttacagcggtaccggacactggatcagttgggccgttatgttcctgtgctggcct

SEQ ID NO: 647473 - DNA, 75 bp, synthetic construct
  source 1..75: mol_type = other DNA
ggatttaatgaagaagattttgcccgctcccaccctgctggagcactgggcgctcgcttgctgaataaagtgcat

SEQ ID NO: 647474 - DNA, 75 bp, synthetic construct
  source 1..75: mol_type = other DNA
ttacgtcgctggctggttggcggcggcgcactcaccacgccagttaatgaagcgatgacggtcggcggcaccaca

SEQ ID NO: 647475 - DNA, 75 bp, synthetic construct
  source 1..75: mol_type = other DNA
ccctgcgcgacagtacaaaacacggtgtgagtgaactgcctgtgaactggtgggtacaaccttctgttatccgca

SEQ ID NO: 647476 - DNA, 75 bp, synthetic construct
  source 1..75: mol_type = other DNA
aaagaagagaaatacagcgaggcgctggatgtggcccgccagcaggtggaaaacggtgcgcagattatcgatatc

SEQ ID NO: 647477 - DNA, 75 bp, synthetic construct
  source 1..75: mol_type = other DNA
tatcggcgcgtgtgaagacatcaaacgcgaactgccgcacgcgctgatttccggcggcgtatctaacgtttcttt

SEQ ID NO: 647478 - DNA, 75 bp, synthetic construct
  source 1..75: mol_type = other DNA
ggtgctggacggcggtatgggcaccatgatccagagttatcgactgaacgaggccgattttcgcggcgagcgttt

SEQ ID NO: 647479 - DNA, 75 bp, synthetic construct
  source 1..75: mol_type = other DNA
ggcgaaagagatggagcgtcagggtttcaccattccgttactgatcggcggcgcgaccacctctaaagcgcacac

SEQ ID NO: 647480 - DNA, 75 bp, synthetic construct
  source 1..75: mol_type = other DNA
acgcatcgcgcaccgttggtgtggtggcggcgctgctttccgacactcagcgcgatgatttcgttgctcgtaccc

SEQ ID NO: 647481 - DNA, 75 bp, synthetic construct
  source 1..75: mol_type = other DNA
ctgagatccccatagcctgccgtttatccggcctggagccgctgaatattggcgacgatagcctgtttgtgaacg

SEQ ID NO: 647482 - DNA, 75 bp, synthetic construct
  source 1..75: mol_type = other DNA
atgaacgtggtcggcgatctgtttggcgaagggaaaatgttcctgccacaggtggtcaaatcggcgcgcgtcatg

SEQ ID NO: 647483 - DNA, 75 bp, synthetic construct
  source 1..75: mol_type = other DNA
caaagcgctggtggaaggcggtgtagatctgattctgattgaaactgttttcgacactcttaacgcgaaagcggc

SEQ ID NO: 647484 - DNA, 75 bp, synthetic construct
  source 1..75: mol_type = other DNA
gtggaccgcccgcacgccggggaaaccacgctacgttgctggtgttctcggcccaaccaatcgcacagcatctat

SEQ ID NO: 647485 - DNA, 75 bp, synthetic construct
  source 1..75: mol_type = other DNA
gcgggctttctcaatatcgtcggcggctgctgtggcaccacgccacaacatattgcagcgatgagtcgtgcagta

SEQ ID NO: 647486 - DNA, 75 bp, synthetic construct
  source 1..75: mol_type = other DNA
agtatccgcgcattctggaagatgaagtggtgggcgttgaggcgcagcggctgtttaaagacgccaacgacatgc

SEQ ID NO: 647487 - DNA, 75 bp, synthetic construct
  source 1..75: mol_type = other DNA
atctttcgccatgtggcccggtgcatcggtttcgggttggtacttcagccacccggacagcaagtactacgcggt

SEQ ID NO: 647488 - DNA, 75 bp, synthetic construct
  source 1..75: mol_type = other DNA
aacacacccaagataagtgaagtcacaagtacatcagatttttcccctttacaggtttctgctgtctggcacggt

SEQ ID NO: 647489 - DNA, 75 bp, synthetic construct
  source 1..75: mol_type = other DNA
accccaattcaaatttcgaatttgttgaaaaaatatctctgcaatatgggatgggtacccctcatacatcaaaac

SEQ ID NO: 647490 - DNA, 75 bp, synthetic construct
  source 1..75: mol_type = other DNA
ttatttatccaactgtccaatacctgttttggttttgctttgtaagcctgaaaaaaaaagaagtgttttgggaat

SEQ ID NO: 647491 - DNA, 75 bp, synthetic construct
  source 1..75: mol_type = other DNA
gactcgaccccagcagccgccagcgtctgattggcctggcggggcagaagaaagccactaacccgtttctgaaaa

SEQ ID NO: 647492 - DNA, 75 bp, synthetic construct
  source 1..75: mol_type = other DNA
gcttgaatattataatgtacgaaaaaaagaattatatgcaaaaaacaggaagttaaaaaagaaactaaaaaaaca

SEQ ID NO: 647493 - DNA, 75 bp, synthetic construct
  source 1..75: mol_type = other DNA
tcgacacccttaacgccaaagcggcggtctttgcggtgaaaacggagttcgaagcgttgggcgttgaactgccga

SEQ ID NO: 647494 - DNA, 75 bp, synthetic construct
  source 1..75: mol_type = other DNA
cagaccactgaagcgttttacaactccctgcgccacgccgaagcgctgacctttggcctgaactgtgcgctgggg

SEQ ID NO: 647495 - DNA, 75 bp, synthetic construct
  source 1..75: mol_type = other DNA
gtgagcagcaaagttgaacaactgcgtgcgcagttaaatgaacgaattctggtgctggacggcggtatgggcacc

SEQ ID NO: 647496 - DNA, 75 bp, synthetic construct
  source 1..75: mol_type = other DNA
cgcgatgatttcgttgctcgtacccgcaaggagtacgaaaccgtgcgtattcagcacggacgaaagaaaccacgc

SEQ ID NO: 647497 - DNA, 75 bp, synthetic construct
  source 1..75: mol_type = other DNA
ctgttcccggcaaaccgtgtgggtgatgacattgaaatctaccgtgatgaaacgcgcacccatgtgatcaaagtc

SEQ ID NO: 647498 - DNA, 75 bp, synthetic construct
  source 1..75: mol_type = other DNA
tcagcacgggcgcaagaaaccgcgcacaccaccggtcacgctggaagcggcgcgcgataacgatttcgcttttga

SEQ ID NO: 647499 - DNA, 75 bp, synthetic construct
  source 1..75: mol_type = other DNA
aaagctgttcgttttgagtttgagttgccgttgcctggtggttcaacaatcggtcgctccgatgatgtgctggcg

SEQ ID NO: 647500 - DNA, 75 bp, synthetic construct
  source 1..75: mol_type = other DNA
tatccggatcgcgggcgtgagccgctggctggcgttcatgcttactacgatattctgagtgaagccggatgtgag

SEQ ID NO: 647501 - DNA, 75 bp, synthetic construct
  source 1..75: mol_type = other DNA
tggttggggcgattattcatcaaacataaccttaatgctgtaaaaaaggatgatataattatctttaatgacagt

SEQ ID NO: 647502 - DNA, 75 bp, synthetic construct
  source 1..75: mol_type = other DNA
tgatgacctgtcagttatagtcgaaatggattacttccctgaaaaccaaaaatcaatgatgtatcgtaatgggcg

SEQ ID NO: 647503 - DNA, 75 bp, synthetic construct
  source 1..75: mol_type = other DNA
atcgggggtgctgatgcggatcagtgcccttaaggagtatgaggatgcggaactgacagctgcgcgtattgctgc

SEQ ID NO: 647504 - DNA, 75 bp, synthetic construct
  source 1..75: mol_type = other DNA
gctccggaaatataaagagaataatagcttgcttcaaatgatagcttccagaaaacaagtggagctgttacgaaa

SEQ ID NO: 647505 - DNA, 75 bp, synthetic construct
  source 1..75: mol_type = other DNA
gtttcttcttccgacatgccaggttcccatttacgggttgtatgggtatcgcccaccgataaatatccttcgtcc

SEQ ID NO: 647506 - DNA, 75 bp, synthetic construct
  source 1..75: mol_type = other DNA
atgacgcccgtggaatatattttaaaagagaataaaaattgcaatatgtggtggacccatacaatgtcttgcctc

SEQ ID NO: 647507 - DNA, 75 bp, synthetic construct
  source 1..75: mol_type = other DNA
aacccgcaatccggttaccagattatccggcatcatggtgatggcactgaagaagtggtgtttgattctcgtgta

SEQ ID NO: 647508 - DNA, 75 bp, synthetic construct
  source 1..75: mol_type = other DNA
tattaaaaaagatgacataattatcattaatgacagtgttgttaataaaggtatcaataaacaaatattaaaaaa

SEQ ID NO: 647509 - DNA, 75 bp, synthetic construct
  source 1..75: mol_type = other DNA
tgatatcattatatttaatgacagtgtcattaataaaagtattaacaagcaaatattaaaaaatattaattgtca

SEQ ID NO: 647510 - DNA, 75 bp, synthetic construct
  source 1..75: mol_type = other DNA
atagcaatcagatagaaccatgtgcggtactggcaaaagcccttgagcatgatgctgaatacacgacgcgaaaag

SEQ ID NO: 647511 - DNA, 75 bp, synthetic construct
  source 1..75: mol_type = other DNA
aaaaaccaccgatgaaattgccgccatgctggcggatgaaacctggatgtccggtgccgaatgtctggcacacgg

SEQ ID NO: 647512 - DNA, 75 bp, synthetic construct
  source 1..75: mol_type = other DNA
cattactgaaaaatacaggcgctgccggattgcgcttaaagccgttcgccatggacgtaatcagtgagttttatt

SEQ ID NO: 647513 - DNA, 75 bp, synthetic construct
  source 1..75: mol_type = other DNA
gaaataaaagggtgtattcctgaagaatgccaggaaattaaacattctgaatatgtggcgctgacggaggaataa

SEQ ID NO: 647514 - DNA, 75 bp, synthetic construct
  source 1..75: mol_type = other DNA
ctatgccaggattttatccttattgaatattcctcatgatttagcgtcttataaagctgttatagcaggtcagta

SEQ ID NO: 647515 - DNA, 75 bp, synthetic construct
  source 1..75: mol_type = other DNA
cttgaactttatatctttccatatatcggctcatctgacattcgccagctcaaaaccagccacctgttagcccct

SEQ ID NO: 647516 - DNA, 75 bp, synthetic construct
  source 1..75: mol_type = other DNA
accggtctgcccttcagtatcactgacaacctgatgctggagccacaactgcagtatacctggcagggactttcc

SEQ ID NO: 647517 - DNA, 75 bp, synthetic construct
  source 1..75: mol_type = other DNA
ttccgtctgggcagccacaacgatatgaactttggtaaaggcacctcatcccgtgacaccctgcgcgacagtgcc
